United States Patent Application Publication US 2007/0042381 A1 - sequence listing, part 54

SEQ ID NO: 2438047 - RNA, 23 nt, Human
cagguggggagacugggcugagg

SEQ ID NO: 2438048 - RNA, 23 nt, Human
caggugggcuucccaguggcugc

SEQ ID NO: 2438049 - RNA, 12 nt, Human
cagguggggagg

SEQ ID NO: 2438050 - RNA, 18 nt, Human
cagguggggucacucugg

SEQ ID NO: 2438051 - RNA, 17 nt, Human
cagguggggcagcuuga

SEQ ID NO: 2438052 - RNA, 16 nt, Human
cagguggggcagcuug

SEQ ID NO: 2438053 - RNA, 15 nt, Human
cagguggggcagcuu

SEQ ID NO: 2438054 - RNA, 14 nt, Human
cagguggggcagcu

SEQ ID NO: 2438055 - RNA, 13 nt, Human
cagguggggcagc

SEQ ID NO: 2438056 - RNA, 22 nt, Human
caggugggcuucccaguggcug

SEQ ID NO: 2438057 - RNA, 19 nt, Human
caggugggcuucccagugg

SEQ ID NO: 2438058 - RNA, 19 nt, Human
cagguggggagacugggcu

SEQ ID NO: 2438059 - RNA, 20 nt, Human
cagguggggagacugggcug

SEQ ID NO: 2438060 - RNA, 22 nt, Human
cagguggggagacugggcugag

SEQ ID NO: 2438061 - RNA, 16 nt, Human
caggugggcuucccag

SEQ ID NO: 2438062 - RNA, 21 nt, Human
caggugggcguggucacugcu

SEQ ID NO: 2438063 - RNA, 23 nt, Human
caggugggcguggucacugcugu

SEQ ID NO: 2438064 - RNA, 17 nt, Human
caggugggcguggucac

SEQ ID NO: 2438065 - RNA, 22 nt, Human
caggugggcgggcagcacagca

SEQ ID NO: 2438066 - RNA, 21 nt, Human
caggugggcgggcagcacagc

SEQ ID NO: 2438067 - RNA, 22 nt, Human
cagguggcugacccagucccug

SEQ ID NO: 2438068 - RNA, 21 nt, Human
caggggugggacacccuguga

SEQ ID NO: 2438069 - RNA, 20 nt, Human
caggggugggacacccugug

SEQ ID NO: 2438070 - RNA, 15 nt, Human
caggggugggacacc

SEQ ID NO: 2438071 - RNA, 14 nt, Human
caggggugggacac

SEQ ID NO: 2438072 - RNA, 16 nt, Human
cagggggugugucugc

SEQ ID NO: 2438073 - RNA, 18 nt, Human
caggggucccagccaccc

SEQ ID NO: 2438074 - RNA, 20 nt, Human
caggggucccagccaccccg

SEQ ID NO: 2438075 - RNA, 17 nt, Human
caggggucucccuggag

SEQ ID NO: 2438076 - RNA, 18 nt, Human
caggggucgucaccaccu

SEQ ID NO: 2438077 - RNA, 21 nt, Human
caggggucgucaccaccucuc

SEQ ID NO: 2438078 - RNA, 20 nt, Human
caggggugauuucagagagg

SEQ ID NO: 2438079 - RNA, 16 nt, Human
caggggucucccugga

SEQ ID NO: 2438080 - RNA, 17 nt, Human
caggggugcccccuccu

SEQ ID NO: 2438081 - RNA, 16 nt, Human
caggggugcccccucc

SEQ ID NO: 2438082 - RNA, 15 nt, Human
caggggugcccccuc

SEQ ID NO: 2438083 - RNA, 13 nt, Human
caggggugccccc

SEQ ID NO: 2438084 - RNA, 23 nt, Human
caggggugcccccuccucuccca

SEQ ID NO: 2438085 - RNA, 22 nt, Human
caggggugcccccuccucuccc

SEQ ID NO: 2438086 - RNA, 15 nt, Human
cagggucucacucug

SEQ ID NO: 2438087 - RNA, 23 nt, Human
cagggucucacuauguugcccag

SEQ ID NO: 2438088 - RNA, 22 nt, Human
cagggucucacuauguugccca

SEQ ID NO: 2438089 - RNA, 21 nt, Human
cagggucucacuauguugccc

SEQ ID NO: 2438090 - RNA, 23 nt, Human
cagggucccugguggcagcucac

SEQ ID NO: 2438091 - RNA, 16 nt, Human
cagggucccucugugu

SEQ ID NO: 2438092 - RNA, 15 nt, Human
cagggucccucugug

SEQ ID NO: 2438093 - RNA, 13 nt, Human
cagggucccugcu

SEQ ID NO: 2438094 - RNA, 21 nt, Human
cagggucccauuucucacuga

SEQ ID NO: 2438095 - RNA, 15 nt, Human
cagggucccugcugu

SEQ ID NO: 2438096 - RNA, 18 nt, Human
caggguccuguagcccua

SEQ ID NO: 2438097 - RNA, 17 nt, Human
cagguaacaggcagaua

SEQ ID NO: 2438098 - RNA, 16 nt, Human
cagguaacaggcagau

SEQ ID NO: 2438099 - RNA, 15 nt, Human
cagguaacaggcaga

SEQ ID NO: 2438100 - RNA, 14 nt, Human
cagguaacaggcag

SEQ ID NO: 2438101 - RNA, 16 nt, Human
cagggucucacucugu

SEQ ID NO: 2438102 - RNA, 16 nt, Human
caggguuuugccaugu

SEQ ID NO: 2438103 - RNA, 15 nt, Human
cagguaaacuccugu

SEQ ID NO: 2438104 - RNA, 22 nt, Human
cagggguggggguggaggcuuc

SEQ ID NO: 2438105 - RNA, 20 nt, Human
cagggguggggguggaggcu

SEQ ID NO: 2438106 - RNA, 12 nt, Human
cagggguggggg

SEQ ID NO: 2438107 - RNA, 22 nt, Human
cagggguggcugccucauuuag

SEQ ID NO: 2438108 - RNA, 15 nt, Human
cagggguugcaguga

SEQ ID NO: 2438109 - RNA, 13 nt, Human
cagggguugcagu

SEQ ID NO: 2438110 - RNA, 13 nt, Human
cagggguuucucg

SEQ ID NO: 2438111 - RNA, 21 nt, Human
cagggguucgagaccagucug

SEQ ID NO: 2438112 - RNA, 17 nt, Human
cagggguucgagaccag

SEQ ID NO: 2438113 - RNA, 13 nt, Human
cagggguucgaga

SEQ ID NO: 2438114 - RNA, 22 nt, Human
cagggguugcagugagcggaga

SEQ ID NO: 2438115 - RNA, 20 nt, Human
caggggugcccccuccucuc

SEQ ID NO: 2438116 - RNA, 20 nt, Human
caggguagcccgccugccag

SEQ ID NO: 2438117 - RNA, 16 nt, Human
caggguagcccgccug

SEQ ID NO: 2438118 - RNA, 15 nt, Human
caggguagcccgccu

SEQ ID NO: 2438119 - RNA, 13 nt, Human
caggguagcccgc

SEQ ID NO: 2438120 - RNA, 23 nt, Human
caggguagauaaccuguacuuca

SEQ ID NO: 2438121 - RNA, 13 nt, Human
caggguagcaggu

SEQ ID NO: 2438122 - RNA, 16 nt, Human
caggguagcagguacc

SEQ ID NO: 2438123 - RNA, 23 nt, Human
caggguauggacuaucugucugg

SEQ ID NO: 2438124 - RNA, 18 nt, Human
caggguauggacuaucug

SEQ ID NO: 2438125 - RNA, 21 nt, Human
caggguagcccgccugccagu

SEQ ID NO: 2438126 - RNA, 20 nt, Human
caggguauuccagagugggg

SEQ ID NO: 2438127 - RNA, 21 nt, Human
caggguauuccagagugggga

SEQ ID NO: 2438128 - RNA, 20 nt, Human
cagggucacugaaggccugg

SEQ ID NO: 2438129 - RNA, 22 nt, Human
cagggucccugguggcagcuca

SEQ ID NO: 2438130 - RNA, 19 nt, Human
cagggucccugguggcagc

SEQ ID NO: 2438131 - RNA, 18 nt, Human
cagggucccugguggcag

SEQ ID NO: 2438132 - RNA, 15 nt, Human
cagggucccuggugg

SEQ ID NO: 2438133 - RNA, 13 nt, Human
cagggucccucug

SEQ ID NO: 2438134 - RNA, 17 nt, Human
cagggucccauuucuca

SEQ ID NO: 2438135 - RNA, 21 nt, Human
cagggucacugaaggccuggc

SEQ ID NO: 2438136 - RNA, 22 nt, Human
caggguccacaggaagugaaga

SEQ ID NO: 2438137 - RNA, 14 nt, Human
cagggucaggagag

SEQ ID NO: 2438138 - RNA, 14 nt, Human
cagggucccuggug

SEQ ID NO: 2438139 - RNA, 12 nt, Human
cagggucccugg

SEQ ID NO: 2438140 - RNA, 19 nt, Human
cagguaccagcugcgcuug

SEQ ID NO: 2438141 - RNA, 18 nt, Human
cagguaccagcugcgcuu

SEQ ID NO: 2438142 - RNA, 17 nt, Human
cagguaccagcugcgcu

SEQ ID NO: 2438143 - RNA, 16 nt, Human
cagguaccagcugcgc

SEQ ID NO: 2438144 - RNA, 21 nt, Human
cagguaccagcugcgcuugcu

SEQ ID NO: 2438145 - RNA, 23 nt, Human
cagguaaugagggacuggaacca

SEQ ID NO: 2438146 - RNA, 22 nt, Human
cagguaaugagggacuggaacc

SEQ ID NO: 2438147 - RNA, 20 nt, Human
cagguaaugagggacuggaa

SEQ ID NO: 2438148 - RNA, 17 nt, Human
cagguaaugagggacug

SEQ ID NO: 2438149 - RNA, 15 nt, Human
cagguaaugagggac

SEQ ID NO: 2438150 - RNA, 17 nt, Human
cagguaaauuaagacau

SEQ ID NO: 2438151 - RNA, 13 nt, Human
cagguaaugugaa

SEQ ID NO: 2438152 - RNA, 19 nt, Human
cagguaaugugaauaaauu

SEQ ID NO: 2438153 - RNA, 15 nt, Human
cagguaccagcugcg

SEQ ID NO: 2438154 - RNA, 14 nt, Human
cagguaccagcugc

SEQ ID NO: 2438155 - RNA, 13 nt, Human
cagguaccagcug

SEQ ID NO: 2438156 - RNA, 17 nt, Human
cagguaaucgaccugcc

SEQ ID NO: 2438157 - RNA, 18 nt, Human
cagguaaucgaccugccu

SEQ ID NO: 2438158 - RNA, 19 nt, Human
cagguaaucgaccugccuc

SEQ ID NO: 2438159 - RNA, 20 nt, Human
cagguaaucgaccugccucg

SEQ ID NO: 2438160 - RNA, 21 nt, Human
cagguaacaggcagauacagg

SEQ ID NO: 2438161 - RNA, 20 nt, Human
cagguaacaggcagauacag

SEQ ID NO: 2438162 - RNA, 22 nt, Human
cagguagcugccccuggcucug

SEQ ID NO: 2438163 - RNA, 20 nt, Human
cagguagcugccccuggcuc

SEQ ID NO: 2438164 - RNA, 21 nt, Human
cagguagcugccccuggcucu

SEQ ID NO: 2438165 - RNA, 23 nt, Human
cagguagcugccccuggcucuga

SEQ ID NO: 2438166 - RNA, 12 nt, Human
cagguagccagg

SEQ ID NO: 2438167 - RNA, 14 nt, Human
cagguagcugcccc

SEQ ID NO: 2438168 - RNA, 15 nt, Human
cagguagcugccccu

SEQ ID NO: 2438169 - RNA, 16 nt, Human
cagguagcugccccug

SEQ ID NO: 2438170 - RNA, 18 nt, Human
cagguagcugccccuggc

SEQ ID NO: 2438171 - RNA, 19 nt, Human
cagguagcugccccuggcu

SEQ ID NO: 2438172 - RNA, 19 nt, Human
cagguagaacacaagguca

SEQ ID NO: 2438173 - RNA, 14 nt, Human
cagguaggaggcaa

SEQ ID NO: 2438174 - RNA, 23 nt, Human
cagguaggaggcaaauaucuuga

SEQ ID NO: 2438175 - RNA, 18 nt, Human
cagguaguugcaauugaa

SEQ ID NO: 2438176 - RNA, 23 nt, Human
cagguaguugcaauugaauuaaa

SEQ ID NO: 2438177 - RNA, 17 nt, Human
cagguauagacuccuga

SEQ ID NO: 2438178 - RNA, 16 nt, Human
cagguaucuccaggau

SEQ ID NO: 2438179 - RNA, 15 nt, Human
cagguaucuccagga

SEQ ID NO: 2438180 - RNA, 14 nt, Human
cagguaucuccagg

SEQ ID NO: 2438181 - RNA, 22 nt, Human
cagguaucuccaggauugaaga

SEQ ID NO: 2438182 - RNA, 18 nt, Human
cagguaucuccaggauug

SEQ ID NO: 2438183 - RNA, 20 nt, Human
cagguaugaccuucuaggaa

SEQ ID NO: 2438184 - RNA, 18 nt, Human
caggucccuaauaaagcu

SEQ ID NO: 2438185 - RNA, 17 nt, Human
caggucccuaauaaagc

SEQ ID NO: 2438186 - RNA, 16 nt, Human
caggucccuaauaaag

SEQ ID NO: 2438187 - RNA, 15 nt, Human
caggucccuaauaaa

SEQ ID NO: 2438188 - RNA, 14 nt, Human
caggucccuaauaa

SEQ ID NO: 2438189 - RNA, 13 nt, Human
caggucccuaaua

SEQ ID NO: 2438190 - RNA, 12 nt, Human
caggucccuaau

SEQ ID NO: 2438191 - RNA, 11 nt, Human
caggucccuaa

SEQ ID NO: 2438192 - RNA, 19 nt, Human
cagguccagcucuggaggg

SEQ ID NO: 2438193 - RNA, 17 nt, Human
cagguccagcucuggag

SEQ ID NO: 2438194 - RNA, 16 nt, Human
cagguccagcucugga

SEQ ID NO: 2438195 - RNA, 14 nt, Human
cagguccagcucug

SEQ ID NO: 2438196 - RNA, 13 nt, Human
cagguccagcucu

SEQ ID NO: 2438197 - RNA, 22 nt, Human
cagguccacggucuguucuuga

SEQ ID NO: 2438198 - RNA, 13 nt, Human
cagguccccagac

SEQ ID NO: 2438199 - RNA, 18 nt, Human
cagguccccagcuuuggc

SEQ ID NO: 2438200 - RNA, 23 nt, Human
cagguccagcucuggaggggagg

SEQ ID NO: 2438201 - RNA, 12 nt, Human
cagguccccaga

SEQ ID NO: 2438202 - RNA, 16 nt, Human
caggucagggugagga

SEQ ID NO: 2438203 - RNA, 20 nt, Human
caggucaggaguucgagacc

SEQ ID NO: 2438204 - RNA, 15 nt, Human
cagguauguugccuu

SEQ ID NO: 2438205 - RNA, 14 nt, Human
cagguauguugccu

SEQ ID NO: 2438206 - RNA, 23 nt, Human
cagguauggaaggguuuguggcu

SEQ ID NO: 2438207 - RNA, 20 nt, Human
cagguauguugccuuuaugg

SEQ ID NO: 2438208 - RNA, 16 nt, Human
cagguauguugccuuu

SEQ ID NO: 2438209 - RNA, 17 nt, Human
caggucacacgaggggc

SEQ ID NO: 2438210 - RNA, 23 nt, Human
caggucaauacaguacaggcagc

SEQ ID NO: 2438211 - RNA, 22 nt, Human
caggucaauacaguacaggcag

SEQ ID NO: 2438212 - RNA, 23 nt, Human
caggucuugaacuccuggccuca

SEQ ID NO: 2438213 - RNA, 22 nt, Human
caggucuugaacuccuggccuc

SEQ ID NO: 2438214 - RNA, 21 nt, Human
caggucuugaacuccuggccu

SEQ ID NO: 2438215 - RNA, 20 nt, Human
caggucuugaacuccuggcc

SEQ ID NO: 2438216 - RNA, 19 nt, Human
caggucuugaacuccuggc

SEQ ID NO: 2438217 - RNA, 18 nt, Human
caggucuugaacuccugg

SEQ ID NO: 2438218 - RNA, 15 nt, Human
caggucuccucuuaa

SEQ ID NO: 2438219 - RNA, 17 nt, Human
caggucuccucuuaaaa

SEQ ID NO: 2438220 - RNA, 19 nt, Human
caggucuccuccaccgcca

SEQ ID NO: 2438221 - RNA, 22 nt, Human
caggucucccacgugggagaca

SEQ ID NO: 2438222 - RNA, 13 nt, Human
caggucuccucuu

SEQ ID NO: 2438223 - RNA, 14 nt, Human
caggucuccucuua

SEQ ID NO: 2438224 - RNA, 13 nt, Human
caggucucccacg

SEQ ID NO: 2438225 - RNA, 14 nt, Human
caggucucacgggc

SEQ ID NO: 2438226 - RNA, 12 nt, Human
caggucucccac

SEQ ID NO: 2438227 - RNA, 20 nt, Human
caggucucccacgugggaga

SEQ ID NO: 2438228 - RNA, 19 nt, Human
caggucucccacgugggag

SEQ ID NO: 2438229 - RNA, 11 nt, Human
caggucuccuc

SEQ ID NO: 2438230 - RNA, 22 nt, Human
caggucccuaauaaagcugugu

SEQ ID NO: 2438231 - RNA, 21 nt, Human
caggucccuaauaaagcugug

SEQ ID NO: 2438232 - RNA, 20 nt, Human
caggucccuaauaaagcugu

SEQ ID NO: 2438233 - RNA, 19 nt, Human
caggucccuaauaaagcug

SEQ ID NO: 2438234 - RNA, 15 nt, Human
cagguccucagagaa

SEQ ID NO: 2438235 - RNA, 20 nt, Human
cagguccucagagaauuucu

SEQ ID NO: 2438236 - RNA, 22 nt, Human
cagguccucugauacccagagc

SEQ ID NO: 2438237 - RNA, 21 nt, Human
cagguccucugauacccagag

SEQ ID NO: 2438238 - RNA, 21 nt, Human
cagguccugcagucuggcuga

SEQ ID NO: 2438239 - RNA, 13 nt, Human
caggugcugcugc

SEQ ID NO: 2438240 - RNA, 23 nt, Human
caggugcugcuacccucccugcu

SEQ ID NO: 2438241 - RNA, 22 nt, Human
caggugcugcuacccucccugc

SEQ ID NO: 2438242 - RNA, 20 nt, Human
caggugagcccauggcccuc

SEQ ID NO: 2438243 - RNA, 17 nt, Human
cagguggcaggaccagg

SEQ ID NO: 2438244 - RNA, 16 nt, Human
cagguggcaggaccag

SEQ ID NO: 2438245 - RNA, 15 nt, Human
cagguggcaggacca

SEQ ID NO: 2438246 - RNA, 23 nt, Human
cagguggaggugucaggcugcug

SEQ ID NO: 2438247 - RNA, 21 nt, Human
cagguggaggugucaggcugc

SEQ ID NO: 2438248 - RNA, 20 nt, Human
cagguggcaggaccaggacu

SEQ ID NO: 2438249 - RNA, 18 nt, Human
cagguggcaggaccagga

SEQ ID NO: 2438250 - RNA, 21 nt, Human
cagguggcaggaccaggacua

SEQ ID NO: 2438251 - RNA, 15 nt, Human
cagguggccacucca

SEQ ID NO: 2438252 - RNA, 19 nt, Human
cagguggccagccuggauc

SEQ ID NO: 2438253 - RNA, 21 nt, Human
cagguggccacuccagacccc

SEQ ID NO: 2438254 - RNA, 19 nt, Human
cagguggccacuccagacc

SEQ ID NO: 2438255 - RNA, 16 nt, Human
cagguggccacuccag

SEQ ID NO: 2438256 - RNA, 14 nt, Human
cagguggcugaccc

SEQ ID NO: 2438257 - RNA, 15 nt, Human
cagguggcugaccca

SEQ ID NO: 2438258 - RNA, 16 nt, Human
cagguggcugacccag

SEQ ID NO: 2438259 - RNA, 19 nt, Human
cagguggcugacccagucc

SEQ ID NO: 2438260 - RNA, 20 nt, Human
cagguggcugacccaguccc

SEQ ID NO: 2438261 - RNA, 23 nt, Human
cagguggcugacccagucccugg

SEQ ID NO: 2438262 - RNA, 15 nt, Human
cagguggccaugccu

SEQ ID NO: 2438263 - RNA, 13 nt, Human
cagguggccaugc

SEQ ID NO: 2438264 - RNA, 22 nt, Human
cagguggcucugaggugccugu

SEQ ID NO: 2438265 - RNA, 19 nt, Human
cagguggccaugccucagc

SEQ ID NO: 2438266 - RNA, 21 nt, Human
caggugagaagcagaggaagg

SEQ ID NO: 2438267 - RNA, 17 nt, Human
caggugagcccauggcc

SEQ ID NO: 2438268 - RNA, 15 nt, Human
caggugagcccaugg

SEQ ID NO: 2438269 - RNA, 21 nt, Human
caggugcugcuacccucccug

SEQ ID NO: 2438270 - RNA, 21 nt, Human
caggugagcaaccaguuggcu

SEQ ID NO: 2438271 - RNA, 18 nt, Human
caggugaccuucugggaa

SEQ ID NO: 2438272 - RNA, 13 nt, Human
caggugagaagca

SEQ ID NO: 2438273 - RNA, 20 nt, Human
caggugagaagcagaggaag

SEQ ID NO: 2438274 - RNA, 21 nt, Human
caggucuuggagcugagccuc

SEQ ID NO: 2438275 - RNA, 20 nt, Human
caggucuuggagcugagccu

SEQ ID NO: 2438276 - RNA, 23 nt, Human
caggucuuggagcugagccucuc

SEQ ID NO: 2438277 - RNA, 13 nt, Human
caggucuuuccua

SEQ ID NO: 2438278 - RNA, 20 nt, Human
caggucuucaucgaaucuac

SEQ ID NO: 2438279 - RNA, 19 nt, Human
caggucuuggagcugagcc

SEQ ID NO: 2438280 - RNA, 22 nt, Human
caggucuccucuuaaaaaauaa

SEQ ID NO: 2438281 - RNA, 14 nt, Human
caggucuuuccuaa

SEQ ID NO: 2438282 - RNA, 19 nt, Human
caggucuuuccuaaggcug

SEQ ID NO: 2438283 - RNA, 21 nt, Human
caggucuuuccuaaggcugca

SEQ ID NO: 2438284 - RNA, 20 nt, Human
caggugaagcaccaagcuca

SEQ ID NO: 2438285 - RNA, 12 nt, Human
caggugacaugu

SEQ ID NO: 2438286 - RNA, 21 nt, Human
caggugacaugugaaaccuuu

SEQ ID NO: 2438287 - RNA, 18 nt, Human
caggugacaugugaaacc

SEQ ID NO: 2438288 - RNA, 23 nt, Human
caggugaccaaaauccccuucuc

SEQ ID NO: 2438289 - RNA, 17 nt, Human
caggugaccuucuggga

SEQ ID NO: 2438290 - RNA, 17 nt, Human
caggugacaugugaaac

SEQ ID NO: 2438291 - RNA, 16 nt, Human
caggugacaugugaaa

SEQ ID NO: 2438292 - RNA, 14 nt, Human
caggugacauguga

SEQ ID NO: 2438293 - RNA, 13 nt, Human
caggauagacuuu

SEQ ID NO: 2438294 - RNA, 15 nt, Human
caggauaguugcucc

SEQ ID NO: 2438295 - RNA, 23 nt, Human
caggauacucugucagaugggaa

SEQ ID NO: 2438296 - RNA, 18 nt, Human
caggauacucugucagau

SEQ ID NO: 2438297 - RNA, 20 nt, Human
caggauacucugucagaugg

SEQ ID NO: 2438298 - RNA, 18 nt, Human
caggauaauaaaguguuu

SEQ ID NO: 2438299 - RNA, 14 nt, Human
caggauacaugugc

SEQ ID NO: 2438300 - RNA, 17 nt, Human
caggauacucugucaga

SEQ ID NO: 2438301 - RNA, 22 nt, Human
caggaguuugagaccaaccugg

SEQ ID NO: 2438302 - RNA, 23 nt, Human
caggaguuugagaccaaccuggg

SEQ ID NO: 2438303 - RNA, 18 nt, Human
caggaguuugaggcugca

SEQ ID NO: 2438304 - RNA, 20 nt, Human
caggaguuugaggcugcagc

SEQ ID NO: 2438305 - RNA, 21 nt, Human
caggaguuugaggcugcagcg

SEQ ID NO: 2438306 - RNA, 22 nt, Human
caggaguuugaggcugcagcga

SEQ ID NO: 2438307 - RNA, 22 nt, Human
caggagugggaaaacacugcca

SEQ ID NO: 2438308 - RNA, 17 nt, Human
caggaguggguugauuu

SEQ ID NO: 2438309 - RNA, 19 nt, Human
caggaguuaaaaagggcag

SEQ ID NO: 2438310 - RNA, 16 nt, Human
caggaguuagaggcca

SEQ ID NO: 2438311 - RNA, 17 nt, Human
caggaguuagaggccag

SEQ ID NO: 2438312 - RNA, 18 nt, Human
caggaguuagaggccagc

SEQ ID NO: 2438313 - RNA, 19 nt, Human
caggaguuagaggccagcc

SEQ ID NO: 2438314 - RNA, 20 nt, Human
caggaguuagaggccagccu

SEQ ID NO: 2438315 - RNA, 21 nt, Human
caggaguuagaggccagccug

SEQ ID NO: 2438316 - RNA, 21 nt, Human
caggaguucaauaaaugucug

SEQ ID NO: 2438317 - RNA, 22 nt, Human
caggaguuagaggccagccugg

SEQ ID NO: 2438318 - RNA, 23 nt, Human
caggaguucaauaaaugucuguu

SEQ ID NO: 2438319 - RNA, 21 nt, Human
caggaguucgagaccagccug

SEQ ID NO: 2438320 - RNA, 19 nt, Human
caggaguuucguuuucaaa

SEQ ID NO: 2438321 - RNA, 21 nt, Human
caggaguuugagaccaaccug

SEQ ID NO: 2438322 - RNA, 18 nt, Human
caggaguucgaggcugca

SEQ ID NO: 2438323 - RNA, 23 nt, Human
caggaguucgagaccagccuggc

SEQ ID NO: 2438324 - RNA, 19 nt, Human
caggaguucgaggcugcag

SEQ ID NO: 2438325 - RNA, 16 nt, Human
caggaguuggaagugu

SEQ ID NO: 2438326 - RNA, 18 nt, Human
caggaguccacuuuguuu

SEQ ID NO: 2438327 - RNA, 14 nt, Human
caggaguccacuuu

SEQ ID NO: 2438328 - RNA, 15 nt, Human
caggagucccaagga

SEQ ID NO: 2438329 - RNA, 16 nt, Human
caggagucccaaggaa

SEQ ID NO: 2438330 - RNA, 17 nt, Human
caggagucccaaggaaa

SEQ ID NO: 2438331 - RNA, 18 nt, Human
caggagucccaaggaaag

SEQ ID NO: 2438332 - RNA, 12 nt, Human
caggagugagca

SEQ ID NO: 2438333 - RNA, 24 nt, Human
caggagucccaaggaaagccccag

SEQ ID NO: 2438334 - RNA, 13 nt, Human
caggagucccugg

SEQ ID NO: 2438335 - RNA, 14 nt, Human
caggagucccuggu

SEQ ID NO: 2438336 - RNA, 15 nt, Human
caggagucccuggua

SEQ ID NO: 2438337 - RNA, 15 nt, Human
caggagucccugcca

SEQ ID NO: 2438338 - RNA, 21 nt, Human
caggagucccugccaucaugu

SEQ ID NO: 2438339 - RNA, 14 nt, Human
caggagucccugcc

SEQ ID NO: 2438340 - RNA, 19 nt, Human
caggagucccaaggaaagc

SEQ ID NO: 2438341 - RNA, 21 nt, Human
caggagucccaaggaaagccc

SEQ ID NO: 2438342 - RNA, 21 nt, Human
caggagcccugggaggcucug

SEQ ID NO: 2438343 - RNA, 20 nt, Human
caggagcauccaccuccuuc

SEQ ID NO: 2438344 - RNA, 22 nt, Human
caggagcauccaccuccuucuc

SEQ ID NO: 2438345 - RNA, 17 nt, Human
caggagccuccugcccu

SEQ ID NO: 2438346 - RNA, 14 nt, Human
caggagccuccugc

SEQ ID NO: 2438347 - RNA, 11 nt, Human
caggagccugg

SEQ ID NO: 2438348 - RNA, 12 nt, Human
caggagccuggc

SEQ ID NO: 2438349 - RNA, 20 nt, Human
caggagccuccugcccuuac

SEQ ID NO: 2438350 - RNA, 16 nt, Human
caggagccugugccuc

SEQ ID NO: 2438351 - RNA, 15 nt, Human
caggagccugugccu

SEQ ID NO: 2438352 - RNA, 19 nt, Human
caggagcagccacauuccu

SEQ ID NO: 2438353 - RNA, 14 nt, Human
caggagcagccaca

SEQ ID NO: 2438354 - RNA, 13 nt, Human
caggagcagccac

SEQ ID NO: 2438355 - RNA, 12 nt, Human
caggagcagcca

SEQ ID NO: 2438356 - RNA, 18 nt, Human
caggagccccgaggccuu

SEQ ID NO: 2438357 - RNA, 16 nt, Human
caggagccccgaggcc

SEQ ID NO: 2438358 - RNA, 23 nt, Human
caggagcagccucagaacaaagu

SEQ ID NO: 2438359 - RNA, 20 nt, Human
caggagcagccucagaacaa

SEQ ID NO: 2438360 - RNA, 15 nt, Human
caggagcagccucag

SEQ ID NO: 2438361 - RNA, 16 nt, Human
caggagcaguaucaug

SEQ ID NO: 2438362 - RNA, 20 nt, Human
caggagcaguaucaugaagc

SEQ ID NO: 2438363 - RNA, 15 nt, Human
caggagccccgaggc

SEQ ID NO: 2438364 - RNA, 19 nt, Human
caggagcccugggaggcuc

SEQ ID NO: 2438365 - RNA, 18 nt, Human
caggagcccugggaggcu

SEQ ID NO: 2438366 - RNA, 16 nt, Human
caggagcccugggagg

SEQ ID NO: 2438367 - RNA, 14 nt, Human
caggagcccuggga

SEQ ID NO: 2438368 - RNA, 22 nt, Human
caggagccccgaggccuucucu

SEQ ID NO: 2438369 - RNA, 20 nt, Human
caggagccccgaggccuucu

SEQ ID NO: 2438370 - RNA, 11 nt, Human
caggagcccug

SEQ ID NO: 2438371 - RNA, 23 nt, Human
caggagccccgaggccuucucug

SEQ ID NO: 2438372 - RNA, 16 nt, Human
caggacucugccuccu

SEQ ID NO: 2438373 - RNA, 15 nt, Human
caggacucugccucc

SEQ ID NO: 2438374 - RNA, 13 nt, Human
caggacucugccu

SEQ ID NO: 2438375 - RNA, 12 nt, Human
caggacucugcc

SEQ ID NO: 2438376 - RNA, 22 nt, Human
caggacucccuccucaccucug

SEQ ID NO: 2438377 - RNA, 23 nt, Human
caggacucccuccucaccucugg

SEQ ID NO: 2438378 - RNA, 13 nt, Human
caggacugggcca

SEQ ID NO: 2438379 - RNA, 12 nt, Human
caggacugggcc

SEQ ID NO: 2438380 - RNA, 16 nt, Human
caggacugggccacuu

SEQ ID NO: 2438381 - RNA, 15 nt, Human
caggacugggccacu

SEQ ID NO: 2438382 - RNA, 14 nt, Human
caggacugugacuc

SEQ ID NO: 2438383 - RNA, 20 nt, Human
caggacugggccacuucugg

SEQ ID NO: 2438384 - RNA, 13 nt, Human
caggacugcacag

SEQ ID NO: 2438385 - RNA, 19 nt, Human
caggacugcaacaggcuug

SEQ ID NO: 2438386 - RNA, 20 nt, Human
caggacugagccccgcagac

SEQ ID NO: 2438387 - RNA, 18 nt, Human
caggacugagccccgcag

SEQ ID NO: 2438388 - RNA, 18 nt, Human
caggacucuugugaaaag

SEQ ID NO: 2438389 - RNA, 20 nt, Human
caggacucugcccagaccac

SEQ ID NO: 2438390 - RNA, 18 nt, Human
caggacugaauugucccc

SEQ ID NO: 2438391 - RNA, 19 nt, Human
caggacugaauugucccca

SEQ ID NO: 2438392 - RNA, 17 nt, Human
caggacugagccccgca

SEQ ID NO: 2438393 - RNA, 14 nt, Human
caggacugagcccc

SEQ ID NO: 2438394 - RNA, 20 nt, Human
caggacugaauuguccccag

SEQ ID NO: 2438395 - RNA, 21 nt, Human
caggacugaauuguccccagu

SEQ ID NO: 2438396 - RNA, 20 nt, Human
caggacuccccaggccaggc

SEQ ID NO: 2438397 - RNA, 19 nt, Human
caggacuccccaggccagg

SEQ ID NO: 2438398 - RNA, 18 nt, Human
caggacuccccaggccag

SEQ ID NO: 2438399 - RNA, 17 nt, Human
caggacuccccaggcca

SEQ ID NO: 2438400 - RNA, 16 nt, Human
caggacuccccaggcc

SEQ ID NO: 2438401 - RNA, 15 nt, Human
caggacuccccaggc

SEQ ID NO: 2438402 - RNA, 21 nt, Human
caggacucagcuccccagagu

SEQ ID NO: 2438403 - RNA, 20 nt, Human
caggacucagcuccccagag

SEQ ID NO: 2438404 - RNA, 19 nt, Human
caggacucagcuccccaga

SEQ ID NO: 2438405 - RNA, 13 nt, Human
caggacucccucc

SEQ ID NO: 2438406 - RNA, 14 nt, Human
caggacucccuccu

SEQ ID NO: 2438407 - RNA, 15 nt, Human
caggacucccuccuc

SEQ ID NO: 2438408 - RNA, 16 nt, Human
caggacucccuccuca

SEQ ID NO: 2438409 - RNA, 17 nt, Human
caggacucccuccucac

SEQ ID NO: 2438410 - RNA, 19 nt, Human
caggacucccuccucaccu

SEQ ID NO: 2438411 - RNA, 20 nt, Human
caggacucccuccucaccuc

SEQ ID NO: 2438412 - RNA, 21 nt, Human
caggacucccuccucaccucu

SEQ ID NO: 2438413 - RNA, 18 nt, Human
caggacucagcuccccag

SEQ ID NO: 2438414 - RNA, 17 nt, Human
caggacucagcucccca

SEQ ID NO: 2438415 - RNA, 14 nt, Human
caggacucagcucc

SEQ ID NO: 2438416 - RNA, 21 nt, Human
caggacuauagcccagguccu

SEQ ID NO: 2438417 - RNA, 20 nt, Human
caggacucagaagccucugg

SEQ ID NO: 2438418 - RNA, 21 nt, Human
caggacucagaagccucuggg

SEQ ID NO: 2438419 - RNA, 18 nt, Human
caggacucagaagccucu

SEQ ID NO: 2438420 - RNA, 19 nt, Human
caggacucagaagccucug

SEQ ID NO: 2438421 - RNA, 16 nt, Human
caggacucagaagccu

SEQ ID NO: 2438422 - RNA, 20 nt, Human
caggacuauauuugggccug

SEQ ID NO: 2438423 - RNA, 18 nt, Human
caggacuauagcccaggu

SEQ ID NO: 2438424 - RNA, 17 nt, Human
caggacuauagcccagg

SEQ ID NO: 2438425 - RNA, 16 nt, Human
caggacuauagcccag

SEQ ID NO: 2438426 - RNA, 23 nt, Human
caggacggggccggccagguggg

SEQ ID NO: 2438427 - RNA, 22 nt, Human
caggacggggccggccaggugg

SEQ ID NO: 2438428 - RNA, 24 nt, Human
caggacggggccggccaggugggc

SEQ ID NO: 2438429 - RNA, 23 nt, Human
caggacuuggucugauuucagga

SEQ ID NO: 2438430 - RNA, 20 nt, Human
caggacuuggucugauuuca

SEQ ID NO: 2438431 - RNA, 23 nt, Human
caggagaaaugcauccauuccuc

SEQ ID NO: 2438432 - RNA, 11 nt, Human
caggagaacca

SEQ ID NO: 2438433 - RNA, 23 nt, Human
caggacuuaacggcuccaggauu

SEQ ID NO: 2438434 - RNA, 21 nt, Human
caggacuuaacggcuccagga

SEQ ID NO: 2438435 - RNA, 20 nt, Human
caggacuuaacggcuccagg

SEQ ID NO: 2438436 - RNA, 19 nt, Human
caggacuuaacggcuccag

SEQ ID NO: 2438437 - RNA, 17 nt, Human
caggagaaccacuacau

SEQ ID NO: 2438438 - RNA, 19 nt, Human
caggagaaggccaauuccu

SEQ ID NO: 2438439 - RNA, 21 nt, Human
caggagaaggccaauuccuau

SEQ ID NO: 2438440 - RNA, 22 nt, Human
caggagaaggccaauuccuaua

SEQ ID NO: 2438441 - RNA, 14 nt, Human
caggagacaggaag

SEQ ID NO: 2438442 - RNA, 12 nt, Human
caggagacaucc

SEQ ID NO: 2438443 - RNA, 18 nt, Human
caggagagagaaagccag

SEQ ID NO: 2438444 - RNA, 14 nt, Human
caggagagagaaag

SEQ ID NO: 2438445 - RNA, 13 nt, Human
caggagagagaaa

SEQ ID NO: 2438446 - RNA, 12 nt, Human
caggagagagaa

SEQ ID NO: 2438447 - RNA, 20 nt, Human
caggagagagaaagccaggc

SEQ ID NO: 2438448 - RNA, 19 nt, Human
caggagagagaaagccagg

SEQ ID NO: 2438449 - RNA, 19 nt, Human
caggagagaguugaaccua

SEQ ID NO: 2438450 - RNA, 15 nt, Human
caggagacaggaagg

SEQ ID NO: 2438451 - RNA, 14 nt, Human
caggagagaaaggg

SEQ ID NO: 2438452 - RNA, 16 nt, Human
caggagacccacaggu

SEQ ID NO: 2438453 - RNA, 21 nt, Human
caggagaggagagccagagaa

SEQ ID NO: 2438454 - RNA, 20 nt, Human
caggagaggagagccagaga

SEQ ID NO: 2438455 - RNA, 19 nt, Human
caggagaggagagccagag

SEQ ID NO: 2438456 - RNA, 18 nt, Human
caggagaggagagccaga

SEQ ID NO: 2438457 - RNA, 12 nt, Human
caggagaggagc

SEQ ID NO: 2438458 - RNA, 22 nt, Human
caggagaggagagccagagaag

SEQ ID NO: 2438459 - RNA, 20 nt, Human
caggagaggagcgggaccug

SEQ ID NO: 2438460 - RNA, 12 nt, Human
caggagaguaga

SEQ ID NO: 2438461 - RNA, 15 nt, Human
caggagaggggcaga

SEQ ID NO: 2438462 - RNA, 17 nt, Human
caggagaggggcagaac

SEQ ID NO: 2438463 - RNA, 12 nt, Human
caggagagcagc

SEQ ID NO: 2438464 - RNA, 23 nt, Human
caggagagagaaagccaggcagg

SEQ ID NO: 2438465 - RNA, 22 nt, Human
caggagagcagcggggcgaagc

SEQ ID NO: 2438466 - RNA, 13 nt, Human
caggagagccagc

SEQ ID NO: 2438467 - RNA, 15 nt, Human
caggagagccagccc

SEQ ID NO: 2438468 - RNA, 16 nt, Human
caggagagccagcccu

SEQ ID NO: 2438469 - RNA, 17 nt, Human
caggagagccagcccuc

SEQ ID NO: 2438470 - RNA, 18 nt, Human
caggagagccagcccucc

SEQ ID NO: 2438471 - RNA, 17 nt, Human
caggagaggagagccag

SEQ ID NO: 2438472 - RNA, 16 nt, Human
caggagaggagagcca

SEQ ID NO: 2438473 - RNA, 15 nt, Human
caggagaggagagcc

SEQ ID NO: 2438474 - RNA, 14 nt, Human
caggagaggagagc

SEQ ID NO: 2438475 - RNA, 19 nt, Human
caggagagccagcccuccc

SEQ ID NO: 2438476 - RNA, 21 nt, Human
caggagagccagcccucccug

SEQ ID NO: 2438477 - RNA, 23 nt, Human
caggagagccagcccucccuguc

SEQ ID NO: 2438478 - RNA, 18 nt, Human
caggagcaaauguuucug

SEQ ID NO: 2438479 - RNA, 23 nt, Human
caggagauugagaaggagagaaa

SEQ ID NO: 2438480 - RNA, 22 nt, Human
caggagauugagaaggagagaa

SEQ ID NO: 2438481 - RNA, 21 nt, Human
caggagauugagaaggagaga

SEQ ID NO: 2438482 - RNA, 20 nt, Human
caggagauugagaaggagag

SEQ ID NO: 2438483 - RNA, 19 nt, Human
caggagauugagaaggaga

SEQ ID NO: 2438484 - RNA, 17 nt, Human
caggagauugagaagga

SEQ ID NO: 2438485 - RNA, 16 nt, Human
caggagauugagaagg

SEQ ID NO: 2438486 - RNA, 12 nt, Human
caggagagggaa

SEQ ID NO: 2438487 - RNA, 20 nt, Human
caggagauggaaguugcagu

SEQ ID NO: 2438488 - RNA, 22 nt, Human
caggagcaaauguuucugcagu

SEQ ID NO: 2438489 - RNA, 19 nt, Human
caggagcaaauguuucugc

SEQ ID NO: 2438490 - RNA, 23 nt, Human
caggagcacaggcagcuggauga

SEQ ID NO: 2438491 - RNA, 18 nt, Human
caggagcacaggcagcug

SEQ ID NO: 2438492 - RNA, 17 nt, Human
caggagcacaggcagcu

SEQ ID NO: 2438493 - RNA, 16 nt, Human
caggagcacaggcagc

SEQ ID NO: 2438494 - RNA, 15 nt, Human
caggagcacaggcag

SEQ ID NO: 2438495 - RNA, 22 nt, Human
caggauccuauucucaccagga

SEQ ID NO: 2438496 - RNA, 21 nt, Human
caggauccuauucucaccagg

SEQ ID NO: 2438497 - RNA, 23 nt, Human
caggaucgcaagagccauguaga

SEQ ID NO: 2438498 - RNA, 20 nt, Human
caggauccuauucucaccag

SEQ ID NO: 2438499 - RNA, 22 nt, Human
caggaucccaggggcccaaggc

SEQ ID NO: 2438500 - RNA, 19 nt, Human
caggauccuauucucacca

SEQ ID NO: 2438501 - RNA, 22 nt, Human
caggaucaugguguaauaagac

SEQ ID NO: 2438502 - RNA, 21 nt, Human
caggaucaugguguaauaaga

SEQ ID NO: 2438503 - RNA, 19 nt, Human
caggaucaugguguaauaa

SEQ ID NO: 2438504 - RNA, 18 nt, Human
caggaucaugguguaaua

SEQ ID NO: 2438505 - RNA, 16 nt, Human
caggaucaugguguaa

SEQ ID NO: 2438506 - RNA, 15 nt, Human
caggaucauggugua

SEQ ID NO: 2438507 - RNA, 21 nt, Human
caggaucccaggggcccaagg

SEQ ID NO: 2438508 - RNA, 23 nt, Human
caggaucaugguguaauaagaca

SEQ ID NO: 2438509 - RNA, 16 nt, Human
caggaucccaggggcc

SEQ ID NO: 2438510 - RNA, 24 nt, Human
caggaucagauugcaugugacucu

SEQ ID NO: 2438511 - RNA, 20 nt, Human
caggaucagauugcauguga

SEQ ID NO: 2438512 - RNA, 23 nt, Human
caggaucagauugcaugugacuc

SEQ ID NO: 2438513 - RNA, 14 nt, Human
caggaucagucuga

SEQ ID NO: 2438514 - RNA, 13 nt, Human
caggaucagucug

SEQ ID NO: 2438515 - RNA, 23 nt, Human
caggaugguucccuugaugaaga

SEQ ID NO: 2438516 - RNA, 21 nt, Human
caggaugguucccuugaugaa

SEQ ID NO: 2438517 - RNA, 24 nt, Human
caggauggccuggccagggccugg

SEQ ID NO: 2438518 - RNA, 17 nt, Human
caggauggccuggccag

SEQ ID NO: 2438519 - RNA, 18 nt, Human
caggaugggggcuggccu

SEQ ID NO: 2438520 - RNA, 16 nt, Human
caggauggccuggcca

SEQ ID NO: 2438521 - RNA, 15 nt, Human
caggauggccuggcc

SEQ ID NO: 2438522 - RNA, 23 nt, Human
caggauggcccuucccacuggag

SEQ ID NO: 2438523 - RNA, 19 nt, Human
caggaugggggcuggccuc

SEQ ID NO: 2438524 - RNA, 17 nt, Human
caggauucuuccucccu

SEQ ID NO: 2438525 - RNA, 18 nt, Human
caggauucuuccucccuc

SEQ ID NO: 2438526 - RNA, 19 nt, Human
caggauguacaaggacagc

SEQ ID NO: 2438527 - RNA, 21 nt, Human
caggaugggggcuggccucug

SEQ ID NO: 2438528 - RNA, 22 nt, Human
caggaugaugacuauggaaaga

SEQ ID NO: 2438529 - RNA, 23 nt, Human
caggaugcuaacaucuaaaaaua

SEQ ID NO: 2438530 - RNA, 13 nt, Human
caggaugcccagg

SEQ ID NO: 2438531 - RNA, 14 nt, Human
caggaugcccaggg

SEQ ID NO: 2438532 - RNA, 17 nt, Human
caggaugcccagggcca

SEQ ID NO: 2438533 - RNA, 23 nt, Human
caggauggccgggcgcgguggcu

SEQ ID NO: 2438534 - RNA, 15 nt, Human
caggauggaggggug

SEQ ID NO: 2438535 - RNA, 21 nt, Human
caggauggaggggugguccug

SEQ ID NO: 2438536 - RNA, 22 nt, Human
caggauggaggggugguccuga

SEQ ID NO: 2438537 - RNA, 23 nt, Human
caggauggaggggugguccugac

SEQ ID NO: 2438538 - RNA, 19 nt, Human
caggaugcccagggccacu

SEQ ID NO: 2438539 - RNA, 22 nt, Human
caggaugcccagggccacucug

SEQ ID NO: 2438540 - RNA, 24 nt, Human
caggaugcccagggccacucugcc

SEQ ID NO: 2438541 - RNA, 20 nt, Human
caggaugaugacuauggaaa

SEQ ID NO: 2438542 - RNA, 18 nt, Human
caggaugaugacuaugga

SEQ ID NO: 2438543 - RNA, 21 nt, Human
caggaugacgguauuaugcuu

SEQ ID NO: 2438544 - RNA, 20 nt, Human
caggaugacgguauuaugcu

SEQ ID NO: 2438545 - RNA, 17 nt, Human
caggaugaccuggauaa

SEQ ID NO: 2438546 - RNA, 16 nt, Human
caggaugaccuggaua

SEQ ID NO: 2438547 - RNA, 15 nt, Human
caggaugacccugcg

SEQ ID NO: 2438548 - RNA, 18 nt, Human
caggaucucuuagcauuu

SEQ ID NO: 2438549 - RNA, 15 nt, Human
caggaugaacccagg

SEQ ID NO: 2438550 - RNA, 23 nt, Human
caggaucucuuagcauuuuaauu

SEQ ID NO: 2438551 - RNA, 17 nt, Human
caggaugaacccaggac

SEQ ID NO: 2438552 - RNA, 16 nt, Human
caggaugaacccagga

SEQ ID NO: 2438553 - RNA, 15 nt, Human
caggcaugccugugu

SEQ ID NO: 2438554 - RNA, 16 nt, Human
caggcaugccugugug

SEQ ID NO: 2438555 - RNA, 17 nt, Human
caggcaugguggcccac

SEQ ID NO: 2438556 - RNA, 12 nt, Human
caggcauccucc

SEQ ID NO: 2438557 - RNA, 20 nt, Human
caggcaugaacauguacugu

SEQ ID NO: 2438558 - RNA, 12 nt, Human
caggcaugaagu

SEQ ID NO: 2438559 - RNA, 17 nt, Human
caggcaugcaugugcuu

SEQ ID NO: 2438560 - RNA, 14 nt, Human
caggcaugccugug

SEQ ID NO: 2438561 - RNA, 18 nt, Human
caggcagucgggggcugg

SEQ ID NO: 2438562 - RNA, 16 nt, Human
caggcagucgggggcu

SEQ ID NO: 2438563 - RNA, 16 nt, Human
caggcaggugccugga

SEQ ID NO: 2438564 - RNA, 14 nt, Human
caggcaggugccug

SEQ ID NO: 2438565 - RNA, 20 nt, Human
caggcagguagccaggggga

SEQ ID NO: 2438566 - RNA, 15 nt, Human
caggcagggugcagu

SEQ ID NO: 2438567 - RNA, 22 nt, Human
caggcagucgggggcuggccua

SEQ ID NO: 2438568 - RNA, 21 nt, Human
caggcagucgggggcuggccu

SEQ ID NO: 2438569 - RNA, 20 nt, Human
caggcagucgggggcuggcc

SEQ ID NO: 2438570 - RNA, 19 nt, Human
caggcagucgggggcuggc

SEQ ID NO: 2438571 - RNA, 24 nt, Human
caggcagucgggggcuggccuagg

SEQ ID NO: 2438572 - RNA, 23 nt, Human
caggcagucgggggcuggccuag

SEQ ID NO: 2438573 - RNA, 20 nt, Human
caggcagugaugcuggaugc

SEQ ID NO: 2438574 - RNA, 22 nt, Human
caggcagugaugcuggaugcuc

SEQ ID NO: 2438575 - RNA, 23 nt, Human
caggcauagaggcuucuccgcca

SEQ ID NO: 2438576 - RNA, 21 nt, Human
caggcauagaggcuucuccgc

SEQ ID NO: 2438577 - RNA, 19 nt, Human
caggcauagaggcuucucc

SEQ ID NO: 2438578 - RNA, 18 nt, Human
caggcauagaggcuucuc

SEQ ID NO: 2438579 - RNA, 17 nt, Human
caggcauagaggcuucu

SEQ ID NO: 2438580 - RNA, 14 nt, Human
caggcauagaggcu

SEQ ID NO: 2438581 - RNA, 17 nt, Human
caggcaguuggccagag

SEQ ID NO: 2438582 - RNA, 14 nt, Human
caggcauaggccug

SEQ ID NO: 2438583 - RNA, 15 nt, Human
caggcauaggccugg

SEQ ID NO: 2438584 - RNA, 16 nt, Human
caggcauaggccuggg

SEQ ID NO: 2438585 - RNA, 17 nt, Human
caggcauaggccugggu

SEQ ID NO: 2438586 - RNA, 15 nt, Human
caggcaucacagcua

SEQ ID NO: 2438587 - RNA, 14 nt, Human
caggcaucacagcu

SEQ ID NO: 2438588 - RNA, 18 nt, Human
caggcauaggccugggug

SEQ ID NO: 2438589 - RNA, 19 nt, Human
caggcauaggccugggugc

SEQ ID NO: 2438590 - RNA, 23 nt, Human
caggcaggucuugaacuccuggc

SEQ ID NO: 2438591 - RNA, 15 nt, Human
caggcaggugggaug

SEQ ID NO: 2438592 - RNA, 22 nt, Human
caggcaggucuugaacuccugg

SEQ ID NO: 2438593 - RNA, 13 nt, Human
caggcaggucuug

SEQ ID NO: 2438594 - RNA, 12 nt, Human
caggcaggucuu

SEQ ID NO: 2438595 - RNA, 19 nt, Human
caggcagguccaggguuug

SEQ ID NO: 2438596 - RNA, 15 nt, Human
caggcagguccaggg

SEQ ID NO: 2438597 - RNA, 14 nt, Human
caggcagguccagg

SEQ ID NO: 2438598 - RNA, 21 nt, Human
caggcauuccccaggaggcca

SEQ ID NO: 2438599 - RNA, 20 nt, Human
caggcauuccccaggaggcc

SEQ ID NO: 2438600 - RNA, 19 nt, Human
caggcauuccccaggaggc

SEQ ID NO: 2438601 - RNA, 18 nt, Human
caggcauuccccaggagg

SEQ ID NO: 2438602 - RNA, 23 nt, Human
caggcauuccccaggaggccagc

SEQ ID NO: 2438603 - RNA, 22 nt, Human
caggcauuccccaggaggccag

SEQ ID NO: 2438604 - RNA, 19 nt, Human
caggcauugccaagggcuu

SEQ ID NO: 2438605 - RNA, 24 nt, Human
caggcauuccccaggaggccagcc

SEQ ID NO: 2438606 - RNA, 17 nt, Human
caggcauuccccaggag

SEQ ID NO: 2438607 - RNA, 16 nt, Human
caggcauuccccagga

SEQ ID NO: 2438608 - RNA, 15 nt, Human
caggcauuccccagg

SEQ ID NO: 2438609 - RNA, 13 nt, Human
caggcauucccca

SEQ ID NO: 2438610 - RNA, 20 nt, Human
caggcauguucucugaggac

SEQ ID NO: 2438611 - RNA, 19 nt, Human
caggcauguucucugagga

SEQ ID NO: 2438612 - RNA, 18 nt, Human
caggcauguucucugagg

SEQ ID NO: 2438613 - RNA, 15 nt, Human
caggcauguucucug

SEQ ID NO: 2438614 - RNA, 16 nt, Human
caggauuuuaaucuuu

SEQ ID NO: 2438615 - RNA, 14 nt, Human
caggcaaaauccuu

SEQ ID NO: 2438616 - RNA, 18 nt, Human
caggcaaaauccuugcuu

SEQ ID NO: 2438617 - RNA, 22 nt, Human
caggauuuuaacaaaagcaaga

SEQ ID NO: 2438618 - RNA, 13 nt, Human
caggcaaaucagu

SEQ ID NO: 2438619 - RNA, 11 nt, Human
caggcaaauca

SEQ ID NO: 2438620 - RNA, 16 nt, Human
caggcaaagcaaguga

SEQ ID NO: 2438621 - RNA, 15 nt, Human
caggcaacugaggca

SEQ ID NO: 2438622 - RNA, 16 nt, Human
caggcaacugaggcag

SEQ ID NO: 2438623 - RNA, 17 nt, Human
caggcaacugaggcaga

SEQ ID NO: 2438624 - RNA, 18 nt, Human
caggcaacugaggcagac

SEQ ID NO: 2438625 - RNA, 19 nt, Human
caggcaacugaggcagaca

SEQ ID NO: 2438626 - RNA, 21 nt, Human
caggauuugaacucagaucug

SEQ ID NO: 2438627 - RNA, 21 nt, Human
caggauuucgugggucuguuu

SEQ ID NO: 2438628 - RNA, 22 nt, Human
caggauuugaacucagaucugu

SEQ ID NO: 2438629 - RNA, 15 nt, Human
caggauugaagagca

SEQ ID NO: 2438630 - RNA, 13 nt, Human
caggauugaagag

SEQ ID NO: 2438631 - RNA, 20 nt, Human
caggauucuuccucccuccc

SEQ ID NO: 2438632 - RNA, 21 nt, Human
caggcaagcaccuccugccuc

SEQ ID NO: 2438633 - RNA, 16 nt, Human
caggcaagcaccuccu

SEQ ID NO: 2438634 - RNA, 15 nt, Human
caggcaagcaccucc

SEQ ID NO: 2438635 - RNA, 14 nt, Human
caggcaagcaccuc

SEQ ID NO: 2438636 - RNA, 15 nt, Human
caggcagccaggcca

SEQ ID NO: 2438637 - RNA, 14 nt, Human
caggcagccaggcc

SEQ ID NO: 2438638 - RNA, 18 nt, Human
caggcaagugaagaaaag

SEQ ID NO: 2438639 - RNA, 22 nt, Human
caggcaaggucuggccucaggu

SEQ ID NO: 2438640 - RNA, 17 nt, Human
caggcaaggucuggccu

SEQ ID NO: 2438641 - RNA, 20 nt, Human
caggcaacugaggcagacag

SEQ ID NO: 2438642 - RNA, 22 nt, Human
caggcaacugaggcagacagca

SEQ ID NO: 2438643 - RNA, 12 nt, Human
caggcagcccua

SEQ ID NO: 2438644 - RNA, 17 nt, Human
caggcagccaggccaca

SEQ ID NO: 2438645 - RNA, 16 nt, Human
caggcagccaggccac

SEQ ID NO: 2438646 - RNA, 20 nt, Human
caggcaggaaggcugagagg

SEQ ID NO: 2438647 - RNA, 18 nt, Human
caggcaggaagggcagga

SEQ ID NO: 2438648 - RNA, 22 nt, Human
caggcagcuuuuucucucccac

SEQ ID NO: 2438649 - RNA, 19 nt, Human
caggcagcuuuuucucucc

SEQ ID NO: 2438650 - RNA, 15 nt, Human
caggcagcgccaagc

SEQ ID NO: 2438651 - RNA, 14 nt, Human
caggcagcgccaag

SEQ ID NO: 2438652 - RNA, 18 nt, Human
caggcagcgauggucuca

SEQ ID NO: 2438653 - RNA, 21 nt, Human
caggcagcgauggucucagaa

SEQ ID NO: 2438654 - RNA, 12 nt, Human
caggcagcgaug

SEQ ID NO: 2438655 - RNA, 13 nt, Human
caggcagccugga

SEQ ID NO: 2438656 - RNA, 20 nt, Human
caggcagcuuuaaccauuaa

SEQ ID NO: 2438657 - RNA, 18 nt, Human
caggcagcuggaugagac

SEQ ID NO: 2438658 - RNA, 15 nt, Human
caggcagcuggauga

SEQ ID NO: 2438659 - RNA, 23 nt, Human
caggcagggcugacucuaggugc

SEQ ID NO: 2438660 - RNA, 17 nt, Human
caggcagggcugacucu

SEQ ID NO: 2438661 - RNA, 23 nt, Human
caggcagggguggggguggaggc

SEQ ID NO: 2438662 - RNA, 22 nt, Human
caggcagggguggggguggagg

SEQ ID NO: 2438663 - RNA, 21 nt, Human
caggcagggguggggguggag

SEQ ID NO: 2438664 - RNA, 17 nt, Human
caggcaggggugggggu

SEQ ID NO: 2438665 - RNA, 13 nt, Human
caggcaggggugg

SEQ ID NO: 2438666 - RNA, 12 nt, Human
caggcaggggug

SEQ ID NO: 2438667 - RNA, 13 nt, Human
caggcagguccag

SEQ ID NO: 2438668 - RNA, 19 nt, Human
caggcaggcugugcgcuga

SEQ ID NO: 2438669 - RNA, 13 nt, Human
caggcaggcugug

SEQ ID NO: 2438670 - RNA, 12 nt, Human
caggcaggcugu

SEQ ID NO: 2438671 - RNA, 21 nt, Human
caggcaggccaaggccuucuc

SEQ ID NO: 2438672 - RNA, 23 nt, Human
caggcaggcuaaggcguggagcu

SEQ ID NO: 2438673 - RNA, 20 nt, Human
caggcaggcuaaggcgugga

SEQ ID NO: 2438674 - RNA, 19 nt, Human
caggcaggaagggcaggaa

SEQ ID NO: 2438675 - RNA, 22 nt, Human
caggcagggccaacccuucucc

SEQ ID NO: 2438676 - RNA, 20 nt, Human
caggcagggccaacccuucu

SEQ ID NO: 2438677 - RNA, 20 nt, Human
caggccccugccacccuggg

SEQ ID NO: 2438678 - RNA, 19 nt, Human
caggccccugccacccugg

SEQ ID NO: 2438679 - RNA, 17 nt, Human
caggccccugccacccu

SEQ ID NO: 2438680 - RNA, 15 nt, Human
caggccccugccacc

SEQ ID NO: 2438681 - RNA, 15 nt, Human
caggcccggcuccag

SEQ ID NO: 2438682 - RNA, 14 nt, Human
caggcccggcucca

SEQ ID NO: 2438683 - RNA, 22 nt, Human
caggccccuuuucacucccucc

SEQ ID NO: 2438684 - RNA, 21 nt, Human
caggccccgugaggcaauggg

SEQ ID NO: 2438685 - RNA, 13 nt, Human
caggcccggcucc

SEQ ID NO: 2438686 - RNA, 18 nt, Human
caggccaaacucaccugc

SEQ ID NO: 2438687 - RNA, 18 nt, Human
caggcauuugacugaaga

SEQ ID NO: 2438688 - RNA, 23 nt, Human
caggcauuugacugaagaugcag

SEQ ID NO: 2438689 - RNA, 21 nt, Human
caggcauuugacugaagaugc

SEQ ID NO: 2438690 - RNA, 23 nt, Human
caggccaaacucaccugccccuc

SEQ ID NO: 2438691 - RNA, 17 nt, Human
caggccaagaaacgucu

SEQ ID NO: 2438692 - RNA, 18 nt, Human
caggccaagagcagaggc

SEQ ID NO: 2438693 - RNA, 18 nt, Human
caggccacaagacccuug

SEQ ID NO: 2438694 - RNA, 17 nt, Human
caggccacaagacccuu

SEQ ID NO: 2438695 - RNA, 13 nt, Human
caggccacaagac

SEQ ID NO: 2438696 - RNA, 19 nt, Human
caggccaagagcagaggca

SEQ ID NO: 2438697 - RNA, 21 nt, Human
caggccaagagcagaggcagc

SEQ ID NO: 2438698 - RNA, 19 nt, Human
caggccaaggccuucuccu

SEQ ID NO: 2438699 - RNA, 23 nt, Human
caggccaagagcagaggcagcga

SEQ ID NO: 2438700 - RNA, 15 nt, Human
caggccauggaggca

SEQ ID NO: 2438701 - RNA, 19 nt, Human
caggccaucuuccaggugg

SEQ ID NO: 2438702 - RNA, 16 nt, Human
caggccaucuuccagg

SEQ ID NO: 2438703 - RNA, 15 nt, Human
caggccaucuuccag

SEQ ID NO: 2438704 - RNA, 18 nt, Human
caggccauuccccgucuc

SEQ ID NO: 2438705 - RNA, 14 nt, Human
caggccaucuucca

SEQ ID NO: 2438706 - RNA, 13 nt, Human
caggccaucuucc

SEQ ID NO: 2438707 - RNA, 18 nt, Human
caggccauccggccccca

SEQ ID NO: 2438708 - RNA, 23 nt, Human
caggccaguaagggaaauagaaa

SEQ ID NO: 2438709 - RNA, 22 nt, Human
caggccaguaagggaaauagaa

SEQ ID NO: 2438710 - RNA, 21 nt, Human
caggccaguaagggaaauaga

SEQ ID NO: 2438711 - RNA, 21 nt, Human
caggccaucaucaguggagcc

SEQ ID NO: 2438712 - RNA, 21 nt, Human
caggccagggggccagucccu

SEQ ID NO: 2438713 - RNA, 23 nt, Human
caggccaccauauucagugcugu

SEQ ID NO: 2438714 - RNA, 15 nt, Human
caggccaggugcagu

SEQ ID NO: 2438715 - RNA, 12 nt, Human
caggccaggcuc

SEQ ID NO: 2438716 - RNA, 18 nt, Human
caggccaggcuccuuccu

SEQ ID NO: 2438717 - RNA, 16 nt, Human
caggccaggugcagug

SEQ ID NO: 2438718 - RNA, 16 nt, Human
caggccaguaagggaa

SEQ ID NO: 2438719 - RNA, 21 nt, Human
caggccaggcuccuuccuguc

SEQ ID NO: 2438720 - RNA, 22 nt, Human
caggccaggcccucugcccacu

SEQ ID NO: 2438721 - RNA, 21 nt, Human
caggccaggcccucugcccac

SEQ ID NO: 2438722 - RNA, 20 nt, Human
caggccacaagacccuugug

SEQ ID NO: 2438723 - RNA, 16 nt, Human
caggccaccaggaugg

SEQ ID NO: 2438724 - RNA, 15 nt, Human
caggccaccaggaug

SEQ ID NO: 2438725 - RNA, 13 nt, Human
caggccaccagga

SEQ ID NO: 2438726 - RNA, 23 nt, Human
caggccacauggggcugggcagc

SEQ ID NO: 2438727 - RNA, 20 nt, Human
caggcccccaggugccaguu

SEQ ID NO: 2438728 - RNA, 20 nt, Human
caggccccgaggacccagac

SEQ ID NO: 2438729 - RNA, 18 nt, Human
caggccccgaggacccag

SEQ ID NO: 2438730 - RNA, 17 nt, Human
caggccccgaggaccca

SEQ ID NO: 2438731 - RNA, 13 nt, Human
caggccccugcca

SEQ ID NO: 2438732 - RNA, 22 nt, Human
caggccccgaggacccagaccc

SEQ ID NO: 2438733 - RNA, 21 nt, Human
caggccccgaggacccagacc

SEQ ID NO: 2438734 - RNA, 23 nt, Human
caggccccgaggacccagaccca

SEQ ID NO: 2438735 - RNA, 17 nt, Human
caggccccgcuugucca

SEQ ID NO: 2438736 - RNA, 18 nt, Human
caggccccgcuuguccag

SEQ ID NO: 2438737 - RNA, 19 nt, Human
caggccccgcuuguccagc

SEQ ID NO: 2438738 - RNA, 22 nt, Human
caggccccgcuuguccagcgcc

SEQ ID NO: 2438739 - RNA, 23 nt, Human
caggccccgcuuguccagcgccu

SEQ ID NO: 2438740 - RNA, 14 nt, Human
caggcccccaggug

SEQ ID NO: 2438741 - RNA, 19 nt, Human
caggcccccaggugccagu

SEQ ID NO: 2438742 - RNA, 21 nt, Human
caggcccccagaaccccuggc

SEQ ID NO: 2438743 - RNA, 18 nt, Human
caggcccccaagccugca

SEQ ID NO: 2438744 - RNA, 19 nt, Human
caggcccccaagccugcag

SEQ ID NO: 2438745 - RNA, 15 nt, Human
caggcccccaagccu

SEQ ID NO: 2438746 - RNA, 17 nt, Human
caggcccccaagccugc

SEQ ID NO: 2438747 - RNA, 15 nt, Human
caggcccccaccacu

SEQ ID NO: 2438748 - RNA, 21 nt, Human
caggcccagcauugcugguuc

SEQ ID NO: 2438749 - RNA, 20 nt, Human
caggcccagcauugcugguu

SEQ ID NO: 2438750 - RNA, 19 nt, Human
caggcccagcauugcuggu

SEQ ID NO: 2438751 - RNA, 12 nt, Human
caggcccagcau

SEQ ID NO: 2438752 - RNA, 11 nt, Human
caggcccagca

SEQ ID NO: 2438753 - RNA, 10 nt, Human
caggcccagc

SEQ ID NO: 2438754 - RNA, 13 nt, Human
caggcccacagua

SEQ ID NO: 2438755 - RNA, 18 nt, Human
caggcccaagagaugaag

SEQ ID NO: 2438756 - RNA, 19 nt, Human
caggcccaagagaugaaga

SEQ ID NO: 2438757 - RNA, 21 nt, Human
caggccauuccccgucucugg

SEQ ID NO: 2438758 - RNA, 18 nt, Human
caggccauggaggcagaa

SEQ ID NO: 2438759 - RNA, 22 nt, Human
caggcccagcauugcugguucu

SEQ ID NO: 2438760 - RNA, 15 nt, Human
caggccccaggaaag

SEQ ID NO: 2438761 - RNA, 17 nt, Human
caggccccaaaaccaca

SEQ ID NO: 2438762 - RNA, 19 nt, Human
caggccccaaaaccacagc

SEQ ID NO: 2438763 - RNA, 22 nt, Human
caggccccaaaaccacagcccu

SEQ ID NO: 2438764 - RNA, 23 nt, Human
caggccccaaaaccacagcccug

SEQ ID NO: 2438765 - RNA, 13 nt, Human
caggcccccaagc

SEQ ID NO: 2438766 - RNA, 13 nt, Human
caggccccagcaa

SEQ ID NO: 2438767 - RNA, 13 nt, Human
caggccccaggaa

SEQ ID NO: 2438768 - RNA, 14 nt, Human
caggccccaggaag

SEQ ID NO: 2438769 - RNA, 15 nt, Human
caggccccaggaagc

SEQ ID NO: 2438770 - RNA, 16 nt, Human
caggccccaggaagcc

SEQ ID NO: 2438771 - RNA, 17 nt, Human
caggccccaggaagccg

SEQ ID NO: 2438772 - RNA, 18 nt, Human
caggccccaggcagggcc

SEQ ID NO: 2438773 - RNA, 12 nt, Human
caggcugcucuu

SEQ ID NO: 2438774 - RNA, 20 nt, Human
caggcugcucuugaacuccu

SEQ ID NO: 2438775 - RNA, 18 nt, Human
caggcugcucagggcugg

SEQ ID NO: 2438776 - RNA, 17 nt, Human
caggcugcucagggcug

SEQ ID NO: 2438777 - RNA, 23 nt, Human
caggcugcucuugaacuccugac

SEQ ID NO: 2438778 - RNA, 11 nt, Human
caggcugcugg

SEQ ID NO: 2438779 - RNA, 12 nt, Human
caggcugcugga

SEQ ID NO: 2438780 - RNA, 14 nt, Human
caggcugcuggagg

SEQ ID NO: 2438781 - RNA, 15 nt, Human
caggcugcuggagga

SEQ ID NO: 2438782 - RNA, 22 nt, Human
caggcugcuggcgccucugcaa

SEQ ID NO: 2438783 - RNA, 20 nt, Human
caggcugcuggcgccucugc

SEQ ID NO: 2438784 - RNA, 18 nt, Human
caggcugcuggcgccucu

SEQ ID NO: 2438785 - RNA, 16 nt, Human
caggcugcuggcgccu

SEQ ID NO: 2438786 - RNA, 13 nt, Human
caggcugcuggcg

SEQ ID NO: 2438787 - RNA, 12 nt, Human
caggcugcuggc

SEQ ID NO: 2438788 - RNA, 16 nt, Human
caggcugcuggaggaa

SEQ ID NO: 2438789 - RNA, 20 nt, Human
caggcuggagguaaggccuu

SEQ ID NO: 2438790 - RNA, 21 nt, Human
caggcugcuggcgccucugca

SEQ ID NO: 2438791 - RNA, 14 nt, Human
caggcuggacgugg

SEQ ID NO: 2438792 - RNA, 12 nt, Human
caggcugcuugg

SEQ ID NO: 2438793 - RNA, 15 nt, Human
caggcugcuugggau

SEQ ID NO: 2438794 - RNA, 15 nt, Human
caggcuggccagccc

SEQ ID NO: 2438795 - RNA, 14 nt, Human
caggcuggccagcc

SEQ ID NO: 2438796 - RNA, 13 nt, Human
caggcuggccagc

SEQ ID NO: 2438797 - RNA, 11 nt, Human
caggcuggcca

SEQ ID NO: 2438798 - RNA, 20 nt, Human
caggcuggcagcucuccagu

SEQ ID NO: 2438799 - RNA, 19 nt, Human
caggcuggcagcucuccag

SEQ ID NO: 2438800 - RNA, 12 nt, Human
caggcuggccag

SEQ ID NO: 2438801 - RNA, 18 nt, Human
caggcuggcagcucucca

SEQ ID NO: 2438802 - RNA, 17 nt, Human
caggcuggcagcucucc

SEQ ID NO: 2438803 - RNA, 16 nt, Human
caggcuggcagcucuc

SEQ ID NO: 2438804 - RNA, 15 nt, Human
caggcuggcagcucu

SEQ ID NO: 2438805 - RNA, 21 nt, Human
caggcuggagguaaggccuuu

SEQ ID NO: 2438806 - RNA, 20 nt, Human
caggcuggcaccgccuucuc

SEQ ID NO: 2438807 - RNA, 13 nt, Human
caggcuggcagcu

SEQ ID NO: 2438808 - RNA, 21 nt, Human
caggcuggcaccgccuucucu

SEQ ID NO: 2438809 - RNA, 23 nt, Human
caggcuggccagccccacagccc

SEQ ID NO: 2438810 - RNA, 21 nt, Human
caggcuggccagccccacagc

SEQ ID NO: 2438811 - RNA, 20 nt, Human
caggcuggccagccccacag

SEQ ID NO: 2438812 - RNA, 19 nt, Human
caggcuggccagccccaca

SEQ ID NO: 2438813 - RNA, 18 nt, Human
caggcuggccagccccac

SEQ ID NO: 2438814 - RNA, 17 nt, Human
caggcuggccagcccca

SEQ ID NO: 2438815 - RNA, 16 nt, Human
caggcuggccagcccc

SEQ ID NO: 2438816 - RNA, 19 nt, Human
caggcuggccaguccaggc

SEQ ID NO: 2438817 - RNA, 18 nt, Human
caggcuggccaguccagg

SEQ ID NO: 2438818 - RNA, 16 nt, Human
caggcuggccagucca

SEQ ID NO: 2438819 - RNA, 14 nt, Human
caggcuggccaguc

SEQ ID NO: 2438820 - RNA, 12 nt, Human
caggcuggcccu

SEQ ID NO: 2438821 - RNA, 14 nt, Human
caggcuggcccugc

SEQ ID NO: 2438822 - RNA, 15 nt, Human
caggcuggcccugcc

SEQ ID NO: 2438823 - RNA, 16 nt, Human
caggcuggcccugccc

SEQ ID NO: 2438824 - RNA, 18 nt, Human
caggcuggggcugaccuu

SEQ ID NO: 2438825 - RNA, 13 nt, Human
caggcuggggcug

SEQ ID NO: 2438826 - RNA, 21 nt, Human
caggcuggccaguccaggcug

SEQ ID NO: 2438827 - RNA, 23 nt, Human
caggcugggucgcccuggacugu

SEQ ID NO: 2438828 - RNA, 21 nt, Human
caggcugggucgcccuggacu

SEQ ID NO: 2438829 - RNA, 23 nt, Human
caggcugggcuucaguggcagcu

SEQ ID NO: 2438830 - RNA, 13 nt, Human
caggcugagccuc

SEQ ID NO: 2438831 - RNA, 14 nt, Human
caggcugagccuca

SEQ ID NO: 2438832 - RNA, 15 nt, Human
caggcugagccucag

SEQ ID NO: 2438833 - RNA, 16 nt, Human
caggcugagccucagu

SEQ ID NO: 2438834 - RNA, 17 nt, Human
caggcugagccucaguc

SEQ ID NO: 2438835 - RNA, 21 nt, Human
caggcugagccucagucuccc

SEQ ID NO: 2438836 - RNA, 16 nt, Human
caggcugacaucugug

SEQ ID NO: 2438837 - RNA, 11 nt, Human
caggcugaggu

SEQ ID NO: 2438838 - RNA, 22 nt, Human
caggcugccaaggccagagugg

SEQ ID NO: 2438839 - RNA, 21 nt, Human
caggcugccaaggccagagug

SEQ ID NO: 2438840 - RNA, 16 nt, Human
caggcugccguggggc

SEQ ID NO: 2438841 - RNA, 22 nt, Human
caggcucugugcugacccuccu

SEQ ID NO: 2438842 - RNA, 21 nt, Human
caggcucugugcugacccucc

SEQ ID NO: 2438843 - RNA, 19 nt, Human
caggcucugugcugacccu

SEQ ID NO: 2438844 - RNA, 18 nt, Human
caggcucugugcugaccc

SEQ ID NO: 2438845 - RNA, 15 nt, Human
caggcucugugcuga

SEQ ID NO: 2438846 - RNA, 14 nt, Human
caggcucugugcug

SEQ ID NO: 2438847 - RNA, 13 nt, Human
caggcucugugcu

SEQ ID NO: 2438848 - RNA, 17 nt, Human
caggcucugccucaccu

SEQ ID NO: 2438849 - RNA, 18 nt, Human
caggcucuuagcagcuuc

SEQ ID NO: 2438850 - RNA, 15 nt, Human
caggcucuuagcagc

SEQ ID NO: 2438851 - RNA, 24 nt, Human
caggcucugugcugacccuccugu

SEQ ID NO: 2438852 - RNA, 23 nt, Human
caggcucugugcugacccuccug

SEQ ID NO: 2438853 - RNA, 12 nt, Human
caggcucuuagc

SEQ ID NO: 2438854 - RNA, 22 nt, Human
caggcucuuagcagcuuccaga

SEQ ID NO: 2438855 - RNA, 21 nt, Human
caggcucuuagcagcuuccag

SEQ ID NO: 2438856 - RNA, 12 nt, Human
caggcucuucuc

SEQ ID NO: 2438857 - RNA, 15 nt, Human
caggcucuucuccuu

SEQ ID NO: 2438858 - RNA, 14 nt, Human
caggcucuucuccu

SEQ ID NO: 2438859 - RNA, 15 nt, Human
caggcugaccacagc

SEQ ID NO: 2438860 - RNA, 17 nt, Human
caggcugaccacagcac

SEQ ID NO: 2438861 - RNA, 20 nt, Human
caggcugaccacagcacagc

SEQ ID NO: 2438862 - RNA, 21 nt, Human
caggcugaccacagcacagcc

SEQ ID NO: 2438863 - RNA, 22 nt, Human
caggcugaccacagcacagcca

SEQ ID NO: 2438864 - RNA, 12 nt, Human
caggcugagccu

SEQ ID NO: 2438865 - RNA, 23 nt, Human
caggcucuuuggggucagccagg

SEQ ID NO: 2438866 - RNA, 18 nt, Human
caggcugaagcagguucc

SEQ ID NO: 2438867 - RNA, 14 nt, Human
caggcugacaucug

SEQ ID NO: 2438868 - RNA, 22 nt, Human
caggcucuuuggggucagccag

SEQ ID NO: 2438869 - RNA, 14 nt, Human
caggcugaccacag

SEQ ID NO: 2438870 - RNA, 22 nt, Human
caggcucuucuccuuucacaac

SEQ ID NO: 2438871 - RNA, 18 nt, Human
caggcucuucuccuuuca

SEQ ID NO: 2438872 - RNA, 21 nt, Human
caggcuuagucacugagacag

SEQ ID NO: 2438873 - RNA, 20 nt, Human
caggcuuagucacugagaca

SEQ ID NO: 2438874 - RNA, 17 nt, Human
caggcuuagucacugag

SEQ ID NO: 2438875 - RNA, 16 nt, Human
caggcuuagucacuga

SEQ ID NO: 2438876 - RNA, 14 nt, Human
caggcugugaguuu

SEQ ID NO: 2438877 - RNA, 17 nt, Human
caggcugucuggccagg

SEQ ID NO: 2438878 - RNA, 16 nt, Human
caggcugucuggccag

SEQ ID NO: 2438879 - RNA, 19 nt, Human
caggcugugcgcugacaac

SEQ ID NO: 2438880 - RNA, 22 nt, Human
caggcugugcgcugacaaccac

SEQ ID NO: 2438881 - RNA, 16 nt, Human
caggcugugggccuca

SEQ ID NO: 2438882 - RNA, 17 nt, Human
caggcugugggccucaa

SEQ ID NO: 2438883 - RNA, 23 nt, Human
caggcuguaucccaugagccuca

SEQ ID NO: 2438884 - RNA, 22 nt, Human
caggcuguaucccaugagccuc

SEQ ID NO: 2438885 - RNA, 21 nt, Human
caggcuguaucccaugagccu

SEQ ID NO: 2438886 - RNA, 20 nt, Human
caggcuguaucccaugagcc

SEQ ID NO: 2438887 - RNA, 15 nt, Human
caggcuggugggagg

SEQ ID NO: 2438888 - RNA, 18 nt, Human
caggcuggugggaggggc

SEQ ID NO: 2438889 - RNA, 23 nt, Human
caggcuggucucgaacuccugac

SEQ ID NO: 2438890 - RNA, 14 nt, Human
caggcuguauccca

SEQ ID NO: 2438891 - RNA, 20 nt, Human
caggcuggucucgaacuccu

SEQ ID NO: 2438892 - RNA, 22 nt, Human
caggcuggucucgaacuccuga

SEQ ID NO: 2438893 - RNA, 19 nt, Human
caggcuggucucaaacucu

SEQ ID NO: 2438894 - RNA, 12 nt, Human
caggcuggucuc

SEQ ID NO: 2438895 - RNA, 13 nt, Human
caggcuggucuca

SEQ ID NO: 2438896 - RNA, 23 nt, Human
caggcuggucucaaacuccugac

SEQ ID NO: 2438897 - RNA, 23 nt, Human
caggcuuagucacugagacagcc

SEQ ID NO: 2438898 - RNA, 22 nt, Human
caggcuuagucacugagacagc

SEQ ID NO: 2438899 - RNA, 22 nt, Human
caggcuucacccugaaugguuc

SEQ ID NO: 2438900 - RNA, 15 nt, Human
caggcuucacccuga

SEQ ID NO: 2438901 - RNA, 14 nt, Human
caggcuuccuuggc

SEQ ID NO: 2438902 - RNA, 18 nt, Human
caggcuugccugcaggca

SEQ ID NO: 2438903 - RNA, 17 nt, Human
caggcuugccugcaggc

SEQ ID NO: 2438904 - RNA, 16 nt, Human
caggcuugccugcagg

SEQ ID NO: 2438905 - RNA, 15 nt, Human
caggcuugccugcag

SEQ ID NO: 2438906 - RNA, 23 nt, Human
caggcuuuuuuaucaugugaaau

SEQ ID NO: 2438907 - RNA, 23 nt, Human
caggcuuuguuuauagcuugcgc

SEQ ID NO: 2438908 - RNA, 15 nt, Human
cagggaaaagcagcu

SEQ ID NO: 2438909 - RNA, 19 nt, Human
caggcccggcuccaggcuc

SEQ ID NO: 2438910 - RNA, 18 nt, Human
caggcccggcuccaggcu

SEQ ID NO: 2438911 - RNA, 16 nt, Human
caggcccggcuccagg

SEQ ID NO: 2438912 - RNA, 17 nt, Human
caggcccggcuccaggc

SEQ ID NO: 2438913 - RNA, 21 nt, Human
caggcccggcuccaggcuccu

SEQ ID NO: 2438914 - RNA, 20 nt, Human
caggcccggcuccaggcucc

SEQ ID NO: 2438915 - RNA, 18 nt, Human
caggcccggcgcgguggc

SEQ ID NO: 2438916 - RNA, 16 nt, Human
caggcccggggcuggc

SEQ ID NO: 2438917 - RNA, 22 nt, Human
caggcccggcuccaggcuccuu

SEQ ID NO: 2438918 - RNA, 15 nt, Human
caggcccucugccca

SEQ ID NO: 2438919 - RNA, 14 nt, Human
caggcccucugccc

SEQ ID NO: 2438920 - RNA, 13 nt, Human
caggcccucugcc

SEQ ID NO: 2438921 - RNA, 23 nt, Human
caggcccucccuguuccccagag

SEQ ID NO: 2438922 - RNA, 15 nt, Human
caggcccggggcugg

SEQ ID NO: 2438923 - RNA, 22 nt, Human
caggcccucccuguuccccaga

SEQ ID NO: 2438924 - RNA, 19 nt, Human
caggcccggcgcgguggcu

SEQ ID NO: 2438925 - RNA, 14 nt, Human
caggcccggggcug

SEQ ID NO: 2438926 - RNA, 22 nt, Human
caggcccucugcccacucccug

SEQ ID NO: 2438927 - RNA, 21 nt, Human
caggcccucugcccacucccu

SEQ ID NO: 2438928 - RNA, 23 nt, Human
caggcccugcacuguccugcucc

SEQ ID NO: 2438929 - RNA, 14 nt, Human
caggcccugcacug

SEQ ID NO: 2438930 - RNA, 13 nt, Human
caggcccugcacu

SEQ ID NO: 2438931 - RNA, 12 nt, Human
caggcccugcac

SEQ ID NO: 2438932 - RNA, 11 nt, Human
caggcccugca

SEQ ID NO: 2438933 - RNA, 20 nt, Human
caggcccucugcccacuccc

SEQ ID NO: 2438934 - RNA, 19 nt, Human
caggcccucugcccacucc

SEQ ID NO: 2438935 - RNA, 17 nt, Human
caggcccucugcccacu

SEQ ID NO: 2438936 - RNA, 16 nt, Human
caggcccucugcccac

SEQ ID NO: 2438937 - RNA, 20 nt, Human
caggcccuggccuccccugc

SEQ ID NO: 2438938 - RNA, 18 nt, Human
caggcccuggccuccccu

SEQ ID NO: 2438939 - RNA, 17 nt, Human
caggcccuggccucccc

SEQ ID NO: 2438940 - RNA, 15 nt, Human
caggcccuggccucc

SEQ ID NO: 2438941 - RNA, 18 nt, Human
caggcccugcacuguccu

SEQ ID NO: 2438942 - RNA, 17 nt, Human
caggcccugcacugucc

SEQ ID NO: 2438943 - RNA, 16 nt, Human
caggcccugcacuguc

SEQ ID NO: 2438944 - RNA, 15 nt, Human
caggcccugcacugu

SEQ ID NO: 2438945 - RNA, 20 nt, Human
caggcccugcacuguccugc

SEQ ID NO: 2438946 - RNA, 19 nt, Human
caggcccugcacuguccug

SEQ ID NO: 2438947 - RNA, 14 nt, Human
caggcccuggccuc

SEQ ID NO: 2438948 - RNA, 22 nt, Human
caggcccuggccuccccugcca

SEQ ID NO: 2438949 - RNA, 21 nt, Human
caggcccuuauuuucaagaaa

SEQ ID NO: 2438950 - RNA, 15 nt, Human
caggcccuuccucuc

SEQ ID NO: 2438951 - RNA, 17 nt, Human
caggcccuuccucucca

SEQ ID NO: 2438952 - RNA, 16 nt, Human
caggcccuuccucucc

SEQ ID NO: 2438953 - RNA, 23 nt, Human
caggcccuuccucuccacugccu

SEQ ID NO: 2438954 - RNA, 21 nt, Human
caggcccuuccucuccacugc

SEQ ID NO: 2438955 - RNA, 20 nt, Human
caggcccuuccucuccacug

SEQ ID NO: 2438956 - RNA, 19 nt, Human
caggcccuuccucuccacu

SEQ ID NO: 2438957 - RNA, 14 nt, Human
caggccgcagcucu

SEQ ID NO: 2438958 - RNA, 13 nt, Human
caggccgcagcuc

SEQ ID NO: 2438959 - RNA, 18 nt, Human
caggccgagaagccagug

SEQ ID NO: 2438960 - RNA, 16 nt, Human
caggcccuuuccucag

SEQ ID NO: 2438961 - RNA, 17 nt, Human
caggcccuuuccucagg

SEQ ID NO: 2438962 - RNA, 22 nt, Human
caggcccugcacuguccugcuc

SEQ ID NO: 2438963 - RNA, 18 nt, Human
caggccgcagcucuugcc

SEQ ID NO: 2438964 - RNA, 15 nt, Human
caggccgcagcucuu

SEQ ID NO: 2438965 - RNA, 22 nt, Human
caggccgcagcucuugcccuuc

SEQ ID NO: 2438966 - RNA, 14 nt, Human
caggccgccccagc

SEQ ID NO: 2438967 - RNA, 16 nt, Human
caggccgccccagccu

SEQ ID NO: 2438968 - RNA, 18 nt, Human
caggccgccccagccucu

SEQ ID NO: 2438969 - RNA, 20 nt, Human
caggccgccccagccucuga

SEQ ID NO: 2438970 - RNA, 21 nt, Human
caggccgccccagccucugag

SEQ ID NO: 2438971 - RNA, 13 nt, Human
caggcuccugcca

SEQ ID NO: 2438972 - RNA, 14 nt, Human
caggcuccugccac

SEQ ID NO: 2438973 - RNA, 15 nt, Human
caggcuccugccacc

SEQ ID NO: 2438974 - RNA, 16 nt, Human
caggcuccugccacca

SEQ ID NO: 2438975 - RNA, 22 nt, Human
caggcucauagggaagaccugc

SEQ ID NO: 2438976 - RNA, 20 nt, Human
caggcuccuuuagcgcccag

SEQ ID NO: 2438977 - RNA, 19 nt, Human
caggcuccuuuagcgccca

SEQ ID NO: 2438978 - RNA, 18 nt, Human
caggcuccugccaccacg

SEQ ID NO: 2438979 - RNA, 12 nt, Human
caggcuccuucc

SEQ ID NO: 2438980 - RNA, 13 nt, Human
caggcuccuuccu

SEQ ID NO: 2438981 - RNA, 14 nt, Human
caggcuccuuccug

SEQ ID NO: 2438982 - RNA, 17 nt, Human
caggcuccuuccugucu

SEQ ID NO: 2438983 - RNA, 14 nt, Human
caggcuccuuuagc

SEQ ID NO: 2438984 - RNA, 22 nt, Human
caggcucacugccaggccagcc

SEQ ID NO: 2438985 - RNA, 21 nt, Human
caggcucacugccaggccagc

SEQ ID NO: 2438986 - RNA, 20 nt, Human
caggcucacugccaggccag

SEQ ID NO: 2438987 - RNA, 18 nt, Human
caggcucacugccaggcc

SEQ ID NO: 2438988 - RNA, 23 nt, Human
caggcucacugccaggccagccu

SEQ ID NO: 2438989 - RNA, 16 nt, Human
caggcucacugccagg

SEQ ID NO: 2438990 - RNA, 15 nt, Human
caggcucacugccag

SEQ ID NO: 2438991 - RNA, 14 nt, Human
caggcucacugcca

SEQ ID NO: 2438992 - RNA, 13 nt, Human
caggcucacugcc

SEQ ID NO: 2438993 - RNA, 16 nt, Human
caggcuagagugcagu

SEQ ID NO: 2438994 - RNA, 19 nt, Human
caggccggcgagcccugug

SEQ ID NO: 2438995 - RNA, 15 nt, Human
caggcuagaaccugg

SEQ ID NO: 2438996 - RNA, 19 nt, Human
caggcuagauguauguacu

SEQ ID NO: 2438997 - RNA, 13 nt, Human
caggcuagaugua

SEQ ID NO: 2438998 - RNA, 14 nt, Human
caggcuacugucag

SEQ ID NO: 2438999 - RNA, 14 nt, Human
caggccgcccugcg

SEQ ID NO: 2439000 - RNA, 23 nt, Human
caggccgccccagccucugagcc

SEQ ID NO: 2439001 - RNA, 16 nt, Human
caggcucucaggccag

SEQ ID NO: 2439002 - RNA, 15 nt, Human
caggcucucaggcca

SEQ ID NO: 2439003 - RNA, 14 nt, Human
caggcucucaggcc

SEQ ID NO: 2439004 - RNA, 13 nt, Human
caggcucucaggc

SEQ ID NO: 2439005 - RNA, 12 nt, Human
caggcucucagg

SEQ ID NO: 2439006 - RNA, 20 nt, Human
caggcucgggcuccccagcc

SEQ ID NO: 2439007 - RNA, 21 nt, Human
caggcuccuuuagcgcccagu

SEQ ID NO: 2439008 - RNA, 21 nt, Human
caggcuccuuccugucuuccu

SEQ ID NO: 2439009 - RNA, 18 nt, Human
caggcuccuuccugucuu

SEQ ID NO: 2439010 - RNA, 20 nt, Human
caggcuccuuccugucuucc

SEQ ID NO: 2439011 - RNA, 20 nt, Human
caggcucucaggccagcugc

SEQ ID NO: 2439012 - RNA, 19 nt, Human
caggcucucaggccagcug

SEQ ID NO: 2439013 - RNA, 18 nt, Human
caggcucucaggccagcu

SEQ ID NO: 2439014 - RNA, 17 nt, Human
caggcucucaggccagc

SEQ ID NO: 2439015 - RNA, 23 nt, Human
caggcucucaggccagcugcuug

SEQ ID NO: 2439016 - RNA, 21 nt, Human
caggcucucaggccagcugcu

SEQ ID NO: 2439017 - RNA, 14 nt, Human
caggcucugcccug

SEQ ID NO: 2439018 - RNA, 13 nt, Human
caggcucugcccu

SEQ ID NO: 2439019 - RNA, 15 nt, Human
caggcucugcccugc

SEQ ID NO: 2439020 - RNA, 21 nt, Human
caggcucugcccugcccuagc

SEQ ID NO: 2439021 - RNA, 22 nt, Human
caggcucugcccugcccuagcu

SEQ ID NO: 2439022 - RNA, 23 nt, Human
caggcucugcccugcccuagcuc

SEQ ID NO: 2439023 - RNA, 13 nt, Human
caggcucucaaca

SEQ ID NO: 2439024 - RNA, 14 nt, Human
caggcucucaacag

SEQ ID NO: 2439025 - RNA, 20 nt, Human
cagggggguugugaggccug

SEQ ID NO: 2439026 - RNA, 19 nt, Human
cagggggguugugaggccu

SEQ ID NO: 2439027 - RNA, 18 nt, Human
caggggggugaggagcug

SEQ ID NO: 2439028 - RNA, 19 nt, Human
caggggggugaggagcugg

SEQ ID NO: 2439029 - RNA, 15 nt, Human
caggggggugaggag

SEQ ID NO: 2439030 - RNA, 21 nt, Human
cagggggcccaccagagcugu

SEQ ID NO: 2439031 - RNA, 20 nt, Human
cagggggcccaccagagcug

SEQ ID NO: 2439032 - RNA, 19 nt, Human
cagggggccaggugcacag

SEQ ID NO: 2439033 - RNA, 15 nt, Human
caggggcuguuugag

SEQ ID NO: 2439034 - RNA, 12 nt, Human
caggggcuguuu

SEQ ID NO: 2439035 - RNA, 19 nt, Human
cagggggaagguggggucc

SEQ ID NO: 2439036 - RNA, 18 nt, Human
cagggggacuagccccug

SEQ ID NO: 2439037 - RNA, 11 nt, Human
cagggggccag

SEQ ID NO: 2439038 - RNA, 22 nt, Human
cagggggccagucccugaggca

SEQ ID NO: 2439039 - RNA, 16 nt, Human
cagggggccaggugca

SEQ ID NO: 2439040 - RNA, 13 nt, Human
cagggggccaggu

SEQ ID NO: 2439041 - RNA, 12 nt, Human
caggggagcccu

SEQ ID NO: 2439042 - RNA, 15 nt, Human
caggggagcccucca

SEQ ID NO: 2439043 - RNA, 13 nt, Human
caggggagcccuc

SEQ ID NO: 2439044 - RNA, 21 nt, Human
caggggagcccuccacgccgg

SEQ ID NO: 2439045 - RNA, 17 nt, Human
caggggagagggucugg

SEQ ID NO: 2439046 - RNA, 23 nt, Human
caggggacucagcccugagguga

SEQ ID NO: 2439047 - RNA, 20 nt, Human
caggggagagggucuggaga

SEQ ID NO: 2439048 - RNA, 21 nt, Human
caggggagagggucuggagaa

SEQ ID NO: 2439049 - RNA, 22 nt, Human
caggggacaggaguccacuuug

SEQ ID NO: 2439050 - RNA, 16 nt, Human
caggggacaggagucc

SEQ ID NO: 2439051 - RNA, 15 nt, Human
caggggaccacaccu

SEQ ID NO: 2439052 - RNA, 17 nt, Human
caggggaccacaccucc

SEQ ID NO: 2439053 - RNA, 15 nt, Human
caggggacucagccc

SEQ ID NO: 2439054 - RNA, 17 nt, Human
caggggacucagcccug

SEQ ID NO: 2439055 - RNA, 18 nt, Human
caggggacucagcccuga

SEQ ID NO: 2439056 - RNA, 20 nt, Human
caggggacucagcccugagg

SEQ ID NO: 2439057 - RNA, 21 nt, Human
caggggacucagcccugaggu

SEQ ID NO: 2439058 - RNA, 16 nt, Human
caggggacaggauggu

SEQ ID NO: 2439059 - RNA, 11 nt, Human
caggggacagg

SEQ ID NO: 2439060 - RNA, 13 nt, Human
cagggcgagacuc

SEQ ID NO: 2439061 - RNA, 15 nt, Human
cagggccuugcccag

SEQ ID NO: 2439062 - RNA, 16 nt, Human
cagggccuugcccaga

SEQ ID NO: 2439063 - RNA, 17 nt, Human
cagggccuugcccagag

SEQ ID NO: 2439064 - RNA, 18 nt, Human
cagggccuugcccagaga

SEQ ID NO: 2439065 - RNA, 19 nt, Human
cagggccuugcccagagau

SEQ ID NO: 2439066 - RNA, 20 nt, Human
cagggccuugcccagagaug

SEQ ID NO: 2439067 - RNA, 24 nt, Human
cagggccuugcccagagaugccuc

SEQ ID NO: 2439068 - RNA, 15 nt, Human
cagggccuggcucag

SEQ ID NO: 2439069 - RNA, 14 nt, Human
cagggccuggcuca

SEQ ID NO: 2439070 - RNA, 13 nt, Human
cagggccuggcuc

SEQ ID NO: 2439071 - RNA, 19 nt, Human
cagggccuggaagacagag

SEQ ID NO: 2439072 - RNA, 18 nt, Human
cagggccuggaagacaga

SEQ ID NO: 2439073 - RNA, 17 nt, Human
cagggccuggaagacag

SEQ ID NO: 2439074 - RNA, 19 nt, Human
cagggccuggcucaggugg

SEQ ID NO: 2439075 - RNA, 16 nt, Human
cagggccuggcucagg

SEQ ID NO: 2439076 - RNA, 22 nt, Human
cagggccuggggagauggagga

SEQ ID NO: 2439077 - RNA, 13 nt, Human
cagggccuugccc

SEQ ID NO: 2439078 - RNA, 14 nt, Human
cagggccuugccca

SEQ ID NO: 2439079 - RNA, 22 nt, Human
caggggccuggagauccuccug

SEQ ID NO: 2439080 - RNA, 15 nt, Human
caggggccuggagau

SEQ ID NO: 2439081 - RNA, 14 nt, Human
caggggccuggaga

SEQ ID NO: 2439082 - RNA, 13 nt, Human
caggggccuggag

SEQ ID NO: 2439083 - RNA, 12 nt, Human
caggggccugga

SEQ ID NO: 2439084 - RNA, 14 nt, Human
caggggcucuggag

SEQ ID NO: 2439085 - RNA, 13 nt, Human
caggggcucugga

SEQ ID NO: 2439086 - RNA, 19 nt, Human
caggggcuacaagagggaa

SEQ ID NO: 2439087 - RNA, 23 nt, Human
caggggccuggagauccuccugc

SEQ ID NO: 2439088 - RNA, 18 nt, Human
caggggcuacaagaggga

SEQ ID NO: 2439089 - RNA, 17 nt, Human
caggggcuacaagaggg

SEQ ID NO: 2439090 - RNA, 15 nt, Human
caggggcguggaggg

SEQ ID NO: 2439091 - RNA, 18 nt, Human
caggggcguguggcucac

SEQ ID NO: 2439092 - RNA, 12 nt, Human
caggggcugccc

SEQ ID NO: 2439093 - RNA, 19 nt, Human
caggggcucuggagagaaa

SEQ ID NO: 2439094 - RNA, 20 nt, Human
caggggcucuggagagaaac

SEQ ID NO: 2439095 - RNA, 18 nt, Human
caggggcucuggagagaa

SEQ ID NO: 2439096 - RNA, 17 nt, Human
caggggcucuggagaga

SEQ ID NO: 2439097 - RNA, 16 nt, Human
caggggcucuggagag

SEQ ID NO: 2439098 - RNA, 15 nt, Human
caggggcucuggaga

SEQ ID NO: 2439099 - RNA, 18 nt, Human
caggggcugcccgcuccc

SEQ ID NO: 2439100 - RNA, 16 nt, Human
caggggcugcccgcuc

SEQ ID NO: 2439101 - RNA, 14 nt, Human
caggggcugcccgc

SEQ ID NO: 2439102 - RNA, 13 nt, Human
caggggcugcccg

SEQ ID NO: 2439103 - RNA, 20 nt, Human
caggggcugcccgcucccag

SEQ ID NO: 2439104 - RNA, 19 nt, Human
caggggcugcccgcuccca

SEQ ID NO: 2439105 - RNA, 13 nt, Human
caggggcugcuuc

SEQ ID NO: 2439106 - RNA, 20 nt, Human
caggggcugcuuccuccugg

SEQ ID NO: 2439107 - RNA, 19 nt, Human
caggggcugcuuccuccug

SEQ ID NO: 2439108 - RNA, 18 nt, Human
caggggcugcuuccuccu

SEQ ID NO: 2439109 - RNA, 16 nt, Human
caggggcugcuuccuc

SEQ ID NO: 2439110 - RNA, 13 nt, Human
caggggcuggcuu

SEQ ID NO: 2439111 - RNA, 12 nt, Human
caggggcuggcu

SEQ ID NO: 2439112 - RNA, 22 nt, Human
caggggcugcuuccuccuggaa

SEQ ID NO: 2439113 - RNA, 17 nt, Human
caggggcuggcuucagg

SEQ ID NO: 2439114 - RNA, 15 nt, Human
caggggcuggcuuca

SEQ ID NO: 2439115 - RNA, 19 nt, Human
caggggcuggcuucaggag

SEQ ID NO: 2439116 - RNA, 17 nt, Human
caggggauugaagcccu

SEQ ID NO: 2439117 - RNA, 14 nt, Human
caggggauugaagc

SEQ ID NO: 2439118 - RNA, 22 nt, Human
caggggauggcguggucaagca

SEQ ID NO: 2439119 - RNA, 16 nt, Human
caggggauggcguggu

SEQ ID NO: 2439120 - RNA, 18 nt, Human
caggggagucccgucagg

SEQ ID NO: 2439121 - RNA, 14 nt, Human
caggggcaggagga

SEQ ID NO: 2439122 - RNA, 20 nt, Human
caggggauugaagcccucca

SEQ ID NO: 2439123 - RNA, 19 nt, Human
caggggaggguagagcgga

SEQ ID NO: 2439124 - RNA, 18 nt, Human
caggggccccuccagcuu

SEQ ID NO: 2439125 - RNA, 17 nt, Human
caggggccccuccagcu

SEQ ID NO: 2439126 - RNA, 16 nt, Human
caggggccccuccagc

SEQ ID NO: 2439127 - RNA, 15 nt, Human
caggggccccuccag

SEQ ID NO: 2439128 - RNA, 13 nt, Human
caggggccccucc

SEQ ID NO: 2439129 - RNA, 11 nt, Human
caggggccccg

SEQ ID NO: 2439130 - RNA, 16 nt, Human
caggggcccacaggga

SEQ ID NO: 2439131 - RNA, 22 nt, Human
caggggcccaaggcggccccuc

SEQ ID NO: 2439132 - RNA, 20 nt, Human
caggggccccuccagcuugu

SEQ ID NO: 2439133 - RNA, 19 nt, Human
caggggccccuccagcuug

SEQ ID NO: 2439134 - RNA, 20 nt, Human
caggggcauguauuggccug

SEQ ID NO: 2439135 - RNA, 22 nt, Human
caggggcaggcacagcacaggg

SEQ ID NO: 2439136 - RNA, 17 nt, Human
caggggcaggcacagca

SEQ ID NO: 2439137 - RNA, 16 nt, Human
caggggcaggcacagc

SEQ ID NO: 2439138 - RNA, 15 nt, Human
caggggcaggcacag

SEQ ID NO: 2439139 - RNA, 14 nt, Human
caggggcaggcaca

SEQ ID NO: 2439140 - RNA, 13 nt, Human
caggggcaggcac

SEQ ID NO: 2439141 - RNA, 21 nt, Human
caggggcccaaggcggccccu

SEQ ID NO: 2439142 - RNA, 20 nt, Human
caggggcccaaggcggcccc

SEQ ID NO: 2439143 - RNA, 15 nt, Human
caggggccagaggaa

SEQ ID NO: 2439144 - RNA, 23 nt, Human
caggggcauguauuggccuggag

SEQ ID NO: 2439145 - RNA, 22 nt, Human
caggggcauguauuggccugga

SEQ ID NO: 2439146 - RNA, 21 nt, Human
caggggcauguauuggccugg

SEQ ID NO: 2439147 - RNA, 14 nt, Human
caggggccagagga

SEQ ID NO: 2439148 - RNA, 21 nt, Human
cagggccaugcugaggccugg

SEQ ID NO: 2439149 - RNA, 18 nt, Human
cagggccaugcugaggcc

SEQ ID NO: 2439150 - RNA, 17 nt, Human
cagggccaugcugaggc

SEQ ID NO: 2439151 - RNA, 16 nt, Human
cagggccaugcugagg

SEQ ID NO: 2439152 - RNA, 17 nt, Human
cagggccaugccugccc

SEQ ID NO: 2439153 - RNA, 16 nt, Human
cagggccaugccugcc

SEQ ID NO: 2439154 - RNA, 14 nt, Human
cagggccaugcuga

SEQ ID NO: 2439155 - RNA, 20 nt, Human
cagggccaggacugagcccc

SEQ ID NO: 2439156 - RNA, 18 nt, Human
cagggccaggacugagcc

SEQ ID NO: 2439157 - RNA, 15 nt, Human
cagggccaggacuga

SEQ ID NO: 2439158 - RNA, 14 nt, Human
cagggccaggacug

SEQ ID NO: 2439159 - RNA, 12 nt, Human
cagggccagggc

SEQ ID NO: 2439160 - RNA, 13 nt, Human
cagggccagggcc

SEQ ID NO: 2439161 - RNA, 15 nt, Human
cagggccagggcccu

SEQ ID NO: 2439162 - RNA, 16 nt, Human
cagggccagggcccug

SEQ ID NO: 2439163 - RNA, 18 nt, Human
cagggccagggcccugca

SEQ ID NO: 2439164 - RNA, 19 nt, Human
cagggccagggcccugcag

SEQ ID NO: 2439165 - RNA, 13 nt, Human
cagggccaggacu

SEQ ID NO: 2439166 - RNA, 12 nt, Human
cagggccaggac

SEQ ID NO: 2439167 - RNA, 18 nt, Human
cagggccacucugccucu

SEQ ID NO: 2439168 - RNA, 20 nt, Human
cagggccacucugccucugc

SEQ ID NO: 2439169 - RNA, 18 nt, Human
cagggccacgugccaggc

SEQ ID NO: 2439170 - RNA, 20 nt, Human
cagggccacgugccaggccc

SEQ ID NO: 2439171 - RNA, 13 nt, Human
cagggccacuccc

SEQ ID NO: 2439172 - RNA, 21 nt, Human
cagggccacgugccaggcccg

SEQ ID NO: 2439173 - RNA, 19 nt, Human
cagggccacucccggcacu

SEQ ID NO: 2439174 - RNA, 12 nt, Human
cagggccacucu

SEQ ID NO: 2439175 - RNA, 16 nt, Human
cagggccacucugccu

SEQ ID NO: 2439176 - RNA, 17 nt, Human
cagggccacucugccuc

SEQ ID NO: 2439177 - RNA, 15 nt, Human
cagggccacgugcca

SEQ ID NO: 2439178 - RNA, 16 nt, Human
cagggccacgugccag

SEQ ID NO: 2439179 - RNA, 17 nt, Human
cagggccacgugccagg

SEQ ID NO: 2439180 - RNA, 22 nt, Human
cagggccaacuugagggcccag

SEQ ID NO: 2439181 - RNA, 19 nt, Human
cagggccaacuugagggcc

SEQ ID NO: 2439182 - RNA, 17 nt, Human
cagggccaacuugaggg

SEQ ID NO: 2439183 - RNA, 18 nt, Human
cagggccaacccuucucc

SEQ ID NO: 2439184 - RNA, 22 nt, Human
cagggcagcugggcccaacccu

SEQ ID NO: 2439185 - RNA, 21 nt, Human
cagggcagcugggcccaaccc

SEQ ID NO: 2439186 - RNA, 13 nt, Human
cagggcagggccc

SEQ ID NO: 2439187 - RNA, 13 nt, Human
cagggcagggcca

SEQ ID NO: 2439188 - RNA, 15 nt, Human
cagggcagggcucug

SEQ ID NO: 2439189 - RNA, 16 nt, Human
cagggcagggcucuga

SEQ ID NO: 2439190 - RNA, 19 nt, Human
cagggcagggcucugauau

SEQ ID NO: 2439191 - RNA, 15 nt, Human
cagggcaucuccagg

SEQ ID NO: 2439192 - RNA, 21 nt, Human
cagggcagucauuggcugucu

SEQ ID NO: 2439193 - RNA, 17 nt, Human
cagggcagggcucugau

SEQ ID NO: 2439194 - RNA, 21 nt, Human
cagggcaucuccaggaaggcg

SEQ ID NO: 2439195 - RNA, 18 nt, Human
cagggcaucuccaggaag

SEQ ID NO: 2439196 - RNA, 17 nt, Human
cagggcaucuccaggaa

SEQ ID NO: 2439197 - RNA, 16 nt, Human
cagggcaucuccagga

SEQ ID NO: 2439198 - RNA, 15 nt, Human
cagggcaucuccugu

SEQ ID NO: 2439199 - RNA, 13 nt, Human
cagggcaucuccu

SEQ ID NO: 2439200 - RNA, 14 nt, Human
cagggcaucuccug

SEQ ID NO: 2439201 - RNA, 21 nt, Human
cagggcaugccccggccaccu

SEQ ID NO: 2439202 - RNA, 18 nt, Human
cagggcaugccccggcca

SEQ ID NO: 2439203 - RNA, 15 nt, Human
cagggcaugccacgu

SEQ ID NO: 2439204 - RNA, 19 nt, Human
cagggcaugcauuuugcag

SEQ ID NO: 2439205 - RNA, 17 nt, Human
cagggcauggcugggaa

SEQ ID NO: 2439206 - RNA, 20 nt, Human
cagggcauggccagguggcc

SEQ ID NO: 2439207 - RNA, 23 nt, Human
cagggcaugccccggccaccucu

SEQ ID NO: 2439208 - RNA, 22 nt, Human
cagggcaugccccggccaccuc

SEQ ID NO: 2439209 - RNA, 13 nt, Human
cagggccaacccu

SEQ ID NO: 2439210 - RNA, 22 nt, Human
cagggccaugcugaggccuggg

SEQ ID NO: 2439211 - RNA, 23 nt, Human
cagggccaugcugaggccugggc

SEQ ID NO: 2439212 - RNA, 14 nt, Human
cagggcccacaccc

SEQ ID NO: 2439213 - RNA, 19 nt, Human
cagggcccaagucccuguu

SEQ ID NO: 2439214 - RNA, 18 nt, Human
cagggcccaagucccugu

SEQ ID NO: 2439215 - RNA, 17 nt, Human
cagggcccaagucccug

SEQ ID NO: 2439216 - RNA, 12 nt, Human
cagggcccagag

SEQ ID NO: 2439217 - RNA, 13 nt, Human
cagggcccagagc

SEQ ID NO: 2439218 - RNA, 14 nt, Human
cagggcccagagcc

SEQ ID NO: 2439219 - RNA, 15 nt, Human
cagggcccagagccc

SEQ ID NO: 2439220 - RNA, 16 nt, Human
cagggcccagagccca

SEQ ID NO: 2439221 - RNA, 18 nt, Human
cagggcccagagcccagc

SEQ ID NO: 2439222 - RNA, 19 nt, Human
cagggcccagagcccagcu

SEQ ID NO: 2439223 - RNA, 21 nt, Human
cagggcccagagcccagcucc

SEQ ID NO: 2439224 - RNA, 22 nt, Human
cagggcccagagcccagcucca

SEQ ID NO: 2439225 - RNA, 20 nt, Human
cagggccccaggcauugcca

SEQ ID NO: 2439226 - RNA, 21 nt, Human
cagggcccccagcgagagucc

SEQ ID NO: 2439227 - RNA, 16 nt, Human
cagggccccagcacua

SEQ ID NO: 2439228 - RNA, 22 nt, Human
cagggccccagcacuaaagcag

SEQ ID NO: 2439229 - RNA, 17 nt, Human
cagggcccacacccccu

SEQ ID NO: 2439230 - RNA, 13 nt, Human
cagggccccagaa

SEQ ID NO: 2439231 - RNA, 15 nt, Human
cagggccccagaagg

SEQ ID NO: 2439232 - RNA, 17 nt, Human
cagggccccagaaggca

SEQ ID NO: 2439233 - RNA, 14 nt, Human
cagggccccagcac

SEQ ID NO: 2439234 - RNA, 15 nt, Human
cagggccccagcacu

SEQ ID NO: 2439235 - RNA, 15 nt, Human
cagggcccccaucuc

SEQ ID NO: 2439236 - RNA, 16 nt, Human
cagggcccccaucuca

SEQ ID NO: 2439237 - RNA, 18 nt, Human
cagggccccucacccugc

SEQ ID NO: 2439238 - RNA, 21 nt, Human
cagggcccccaucucaugccc

SEQ ID NO: 2439239 - RNA, 22 nt, Human
cagggccccucacccugccuua

SEQ ID NO: 2439240 - RNA, 21 nt, Human
cagggccccucacccugccuu

SEQ ID NO: 2439241 - RNA, 21 nt, Human
cagggccccagaaggcaggga

SEQ ID NO: 2439242 - RNA, 16 nt, Human
cagggccucacacggu

SEQ ID NO: 2439243 - RNA, 23 nt, Human
cagggccuagcugcuacaaagaa

SEQ ID NO: 2439244 - RNA, 22 nt, Human
cagggccuagcugcuacaaaga

SEQ ID NO: 2439245 - RNA, 21 nt, Human
cagggccuagcugcuacaaag

SEQ ID NO: 2439246 - RNA, 20 nt, Human
cagggccuagcugcuacaaa

SEQ ID NO: 2439247 - RNA, 19 nt, Human
cagggccuagcugcuacaa

SEQ ID NO: 2439248 - RNA, 16 nt, Human
cagggccugagccugg

SEQ ID NO: 2439249 - RNA, 17 nt, Human
cagggccugagccuggc

SEQ ID NO: 2439250 - RNA, 18 nt, Human
cagggccugagccuggcc

SEQ ID NO: 2439251 - RNA, 19 nt, Human
cagggccugagccuggcca

SEQ ID NO: 2439252 - RNA, 20 nt, Human
cagggccugagccuggccag

SEQ ID NO: 2439253 - RNA, 21 nt, Human
cagggccugagccuggccagc

SEQ ID NO: 2439254 - RNA, 22 nt, Human
cagggccugagccuggccagcc

SEQ ID NO: 2439255 - RNA, 22 nt, Human
cagggccugcaggaccugccug

SEQ ID NO: 2439256 - RNA, 12 nt, Human
cagggccuggaa

SEQ ID NO: 2439257 - RNA, 15 nt, Human
cagggcccugcagag

SEQ ID NO: 2439258 - RNA, 18 nt, Human
cagggcccugcagagggg

SEQ ID NO: 2439259 - RNA, 15 nt, Human
cagggcccugagcuc

SEQ ID NO: 2439260 - RNA, 21 nt, Human
cagggcccugagcucggugga

SEQ ID NO: 2439261 - RNA, 13 nt, Human
cagggcccugcag

SEQ ID NO: 2439262 - RNA, 14 nt, Human
cagggcccugcaga

SEQ ID NO: 2439263 - RNA, 19 nt, Human
cagggacagaggccccagc

SEQ ID NO: 2439264 - RNA, 21 nt, Human
cagggacagaggccccagccu

SEQ ID NO: 2439265 - RNA, 12 nt, Human
cagggacaggau

SEQ ID NO: 2439266 - RNA, 23 nt, Human
cagggacagaggccccagccucc

SEQ ID NO: 2439267 - RNA, 23 nt, Human
cagggacagaggggguggccucc

SEQ ID NO: 2439268 - RNA, 18 nt, Human
cagggacaggauaagagg

SEQ ID NO: 2439269 - RNA, 22 nt, Human
cagggaccacacccuguacugu

SEQ ID NO: 2439270 - RNA, 16 nt, Human
cagggaccacacccug

SEQ ID NO: 2439271 - RNA, 17 nt, Human
cagggacagagccaugc

SEQ ID NO: 2439272 - RNA, 14 nt, Human
cagggaccaaggac

SEQ ID NO: 2439273 - RNA, 15 nt, Human
cagggaccaaggacc

SEQ ID NO: 2439274 - RNA, 18 nt, Human
cagggaccaaggaccccu

SEQ ID NO: 2439275 - RNA, 14 nt, Human
cagggaccccugcc

SEQ ID NO: 2439276 - RNA, 15 nt, Human
cagggaccccugccc

SEQ ID NO: 2439277 - RNA, 16 nt, Human
cagggaccccugcccu

SEQ ID NO: 2439278 - RNA, 20 nt, Human
cagggaccacagcaaggcac

SEQ ID NO: 2439279 - RNA, 17 nt, Human
cagggaccacagcaagg

SEQ ID NO: 2439280 - RNA, 22 nt, Human
cagggacccacuucacacacag

SEQ ID NO: 2439281 - RNA, 15 nt, Human
cagggaccacagcaa

SEQ ID NO: 2439282 - RNA, 14 nt, Human
cagggaccacagca

SEQ ID NO: 2439283 - RNA, 13 nt, Human
cagggaccacagc

SEQ ID NO: 2439284 - RNA, 19 nt, Human
cagggaccaaggaccccuc

SEQ ID NO: 2439285 - RNA, 20 nt, Human
cagggacugaaaaccucucc

SEQ ID NO: 2439286 - RNA, 21 nt, Human
cagggacugaaaaccucuccu

SEQ ID NO: 2439287 - RNA, 23 nt, Human
cagggacugaaaaccucuccuca

SEQ ID NO: 2439288 - RNA, 21 nt, Human
cagggacuaugaaugggcaaa

SEQ ID NO: 2439289 - RNA, 21 nt, Human
cagggaccuuuggagaccauu

SEQ ID NO: 2439290 - RNA, 14 nt, Human
cagggcacaccggg

SEQ ID NO: 2439291 - RNA, 18 nt, Human
cagggcaaugaugaauga

SEQ ID NO: 2439292 - RNA, 23 nt, Human
cagggacuguuccugucucagca

SEQ ID NO: 2439293 - RNA, 18 nt, Human
cagggacuguuccugucu

SEQ ID NO: 2439294 - RNA, 14 nt, Human
cagggacuugaagu

SEQ ID NO: 2439295 - RNA, 19 nt, Human
cagggacuugaaguuguua

SEQ ID NO: 2439296 - RNA, 15 nt, Human
cagggacuugaaguu

SEQ ID NO: 2439297 - RNA, 12 nt, Human
cagggagaagcu

SEQ ID NO: 2439298 - RNA, 17 nt, Human
cagggauuaaccucugc

SEQ ID NO: 2439299 - RNA, 18 nt, Human
cagggauguacaaggcga

SEQ ID NO: 2439300 - RNA, 19 nt, Human
cagggauuaaccucugcac

SEQ ID NO: 2439301 - RNA, 18 nt, Human
cagggauuaaccucugca

SEQ ID NO: 2439302 - RNA, 20 nt, Human
cagggauuaaccucugcacu

SEQ ID NO: 2439303 - RNA, 14 nt, Human
cagggauuugagga

SEQ ID NO: 2439304 - RNA, 16 nt, Human
cagggauugcugccac

SEQ ID NO: 2439305 - RNA, 13 nt, Human
cagggauuugagg

SEQ ID NO: 2439306 - RNA, 21 nt, Human
cagggcacaccgggcacucag

SEQ ID NO: 2439307 - RNA, 19 nt, Human
cagggcacaccgggcacuc

SEQ ID NO: 2439308 - RNA, 17 nt, Human
cagggcacaccgggcac

SEQ ID NO: 2439309 - RNA, 15 nt, Human
cagggcacaccgggc

SEQ ID NO: 2439310 - RNA, 23 nt, Human
cagggcacaccgggcacucagaa

SEQ ID NO: 2439311 - RNA, 22 nt, Human
cagggcacaccgggcacucaga

SEQ ID NO: 2439312 - RNA, 16 nt, Human
cagggcagcgccaggc

SEQ ID NO: 2439313 - RNA, 17 nt, Human
cagggcagcgccaggcu

SEQ ID NO: 2439314 - RNA, 18 nt, Human
cagggcagcgccaggcug

SEQ ID NO: 2439315 - RNA, 19 nt, Human
cagggcagcgccaggcuga

SEQ ID NO: 2439316 - RNA, 20 nt, Human
cagggcagcugggcccaacc

SEQ ID NO: 2439317 - RNA, 18 nt, Human
cagggcagcugggcccaa

SEQ ID NO: 2439318 - RNA, 17 nt, Human
cagggcagcugggccca

SEQ ID NO: 2439319 - RNA, 16 nt, Human
cagggcagcugggccc

SEQ ID NO: 2439320 - RNA, 15 nt, Human
cagggcagcugggcc

SEQ ID NO: 2439321 - RNA, 14 nt, Human
cagggcagcugggc

SEQ ID NO: 2439322 - RNA, 22 nt, Human
cagggcagcgccaggcugacca

SEQ ID NO: 2439323 - RNA, 14 nt, Human
cagggcagcgccag

SEQ ID NO: 2439324 - RNA, 15 nt, Human
cagggcagcgccagg

SEQ ID NO: 2439325 - RNA, 13 nt, Human
cagggcagcgcca

SEQ ID NO: 2439326 - RNA, 19 nt, Human
cagggcagagugagaccca

SEQ ID NO: 2439327 - RNA, 20 nt, Human
cagggcacuucacagagugu

SEQ ID NO: 2439328 - RNA, 13 nt, Human
cagggcagaguga

SEQ ID NO: 2439329 - RNA, 16 nt, Human
cagggcagagccggga

SEQ ID NO: 2439330 - RNA, 12 nt, Human
cagggcagagcc

SEQ ID NO: 2439331 - RNA, 15 nt, Human
cagggcagagccggg

SEQ ID NO: 2439332 - RNA, 18 nt, Human
cagggcacuucacagagu

SEQ ID NO: 2439333 - RNA, 17 nt, Human
cagggcacuucacagag

SEQ ID NO: 2439334 - RNA, 14 nt, Human
cagggcacuucaca

SEQ ID NO: 2439335 - RNA, 15 nt, Human
cagggcacugcugcu

SEQ ID NO: 2439336 - RNA, 11 nt, Human
cagggcacugc

SEQ ID NO: 2439337 - RNA, 17 nt, Human
cagggaagagcagaacg

SEQ ID NO: 2439338 - RNA, 15 nt, Human
cagggaagagcagaa

SEQ ID NO: 2439339 - RNA, 16 nt, Human
cagggaagagaaagug

SEQ ID NO: 2439340 - RNA, 22 nt, Human
cagggaagagcagaacggagcc

SEQ ID NO: 2439341 - RNA, 17 nt, Human
cagggaagcuacagguu

SEQ ID NO: 2439342 - RNA, 15 nt, Human
cagggaagcuacagg

SEQ ID NO: 2439343 - RNA, 14 nt, Human
cagggaagcuacag

SEQ ID NO: 2439344 - RNA, 22 nt, Human
cagggaacccugcuugcacuuu

SEQ ID NO: 2439345 - RNA, 19 nt, Human
cagggaacccugcuugcac

SEQ ID NO: 2439346 - RNA, 23 nt, Human
cagggaaccguuauuauaauugu

SEQ ID NO: 2439347 - RNA, 22 nt, Human
cagggaaccguuauuauaauug

SEQ ID NO: 2439348 - RNA, 20 nt, Human
cagggaaaauuauuugcaua

SEQ ID NO: 2439349 - RNA, 20 nt, Human
cagggaaaaugcagcaggga

SEQ ID NO: 2439350 - RNA, 15 nt, Human
cagggaaaggccagu

SEQ ID NO: 2439351 - RNA, 14 nt, Human
cagggaaaggcucu

SEQ ID NO: 2439352 - RNA, 23 nt, Human
cagggaaaggcucugaaagccag

SEQ ID NO: 2439353 - RNA, 22 nt, Human
cagggaaacagcuaaugggaca

SEQ ID NO: 2439354 - RNA, 15 nt, Human
cagggaaaauauaua

SEQ ID NO: 2439355 - RNA, 16 nt, Human
cagggaaacagcuaau

SEQ ID NO: 2439356 - RNA, 17 nt, Human
cagggaaaagcagcucu

SEQ ID NO: 2439357 - RNA, 19 nt, Human
cagggaaaagcagcucucc

SEQ ID NO: 2439358 - RNA, 20 nt, Human
cagggaaaagcagcucuccc

SEQ ID NO: 2439359 - RNA, 21 nt, Human
cagggaaaagcagcucucccc

SEQ ID NO: 2439360 - RNA, 15 nt, Human
cagggaaggggacaa

SEQ ID NO: 2439361 - RNA, 17 nt, Human
cagggaaggggacaagg

SEQ ID NO: 2439362 - RNA, 19 nt, Human
cagggaaggggaggcagcc

SEQ ID NO: 2439363 - RNA, 14 nt, Human
cagggaagucccca

SEQ ID NO: 2439364 - RNA, 16 nt, Human
cagggaaguccccagg

SEQ ID NO: 2439365 - RNA, 17 nt, Human
cagggaaguccccaggc

SEQ ID NO: 2439366 - RNA, 18 nt, Human
cagggaaguccccaggcc

SEQ ID NO: 2439367 - RNA, 17 nt, Human
cagggaagugcucugau

SEQ ID NO: 2439368 - RNA, 21 nt, Human
cagggaaguguaagaaacaca

SEQ ID NO: 2439369 - RNA, 23 nt, Human
cagggaaugccugagugccuggc

SEQ ID NO: 2439370 - RNA, 23 nt, Human
cagggaaguccccaggccccagg

SEQ ID NO: 2439371 - RNA, 14 nt, Human
cagggaagcuggcc

SEQ ID NO: 2439372 - RNA, 17 nt, Human
cagggaagcuggccgag

SEQ ID NO: 2439373 - RNA, 21 nt, Human
cagggaagcuacagguuacaa

SEQ ID NO: 2439374 - RNA, 20 nt, Human
cagggaagcuacagguuaca

SEQ ID NO: 2439375 - RNA, 19 nt, Human
cagggaagcuacagguuac

SEQ ID NO: 2439376 - RNA, 18 nt, Human
cagggaagcuacagguua

SEQ ID NO: 2439377 - RNA, 24 nt, Human
cagggaagcuacagguuacaacag

SEQ ID NO: 2439378 - RNA, 22 nt, Human
cagggaagcuacagguuacaac

SEQ ID NO: 2439379 - RNA, 13 nt, Human
cagggaagcuggc

SEQ ID NO: 2439380 - RNA, 20 nt, Human
cagggacagaggggguggcc

SEQ ID NO: 2439381 - RNA, 14 nt, Human
cagggacagagggg

SEQ ID NO: 2439382 - RNA, 16 nt, Human
cagggacagagccaug

SEQ ID NO: 2439383 - RNA, 15 nt, Human
cagggacagagccau

SEQ ID NO: 2439384 - RNA, 14 nt, Human
cagggacagaggcc

SEQ ID NO: 2439385 - RNA, 16 nt, Human
cagggacagaggcccc

SEQ ID NO: 2439386 - RNA, 18 nt, Human
cagggacagaggccccag

SEQ ID NO: 2439387 - RNA, 13 nt, Human
cagggacagaggg

SEQ ID NO: 2439388 - RNA, 14 nt, Human
cagggacagagaca

SEQ ID NO: 2439389 - RNA, 17 nt, Human
cagggacagagacaccu

SEQ ID NO: 2439390 - RNA, 18 nt, Human
cagggacagagacaccug

SEQ ID NO: 2439391 - RNA, 19 nt, Human
cagggacagagacaccugc

SEQ ID NO: 2439392 - RNA, 20 nt, Human
cagggacagagacaccugca

SEQ ID NO: 2439393 - RNA, 21 nt, Human
cagggacagagacaccugcac

SEQ ID NO: 2439394 - RNA, 14 nt, Human
cagggacagagcca

SEQ ID NO: 2439395 - RNA, 13 nt, Human
cagggacagagcc

SEQ ID NO: 2439396 - RNA, 22 nt, Human
cagggacagagacaccugcacc

SEQ ID NO: 2439397 - RNA, 23 nt, Human
cagggacagagacaccugcaccu

SEQ ID NO: 2439398 - RNA, 23 nt, Human
cagggacaccagccaggcucugu

SEQ ID NO: 2439399 - RNA, 22 nt, Human
cagggacaccagccaggcucug

SEQ ID NO: 2439400 - RNA, 21 nt, Human
cagggacaccagccaggcucu

SEQ ID NO: 2439401 - RNA, 20 nt, Human
cagggacaccagccaggcuc

SEQ ID NO: 2439402 - RNA, 19 nt, Human
cagggacaccagccaggcu

SEQ ID NO: 2439403 - RNA, 17 nt, Human
cagggacaccagccagg

SEQ ID NO: 2439404 - RNA, 16 nt, Human
cagggacaccagccag

SEQ ID NO: 2439405 - RNA, 15 nt, Human
cagggacaccagcca

SEQ ID NO: 2439406 - RNA, 23 nt, Human
cagggaauuucaggaacuagaga

SEQ ID NO: 2439407 - RNA, 21 nt, Human
cauuaaaacugaagucugaaa

SEQ ID NO: 2439408 - RNA, 20 nt, Human
cauuaaaagaaaauaaaaaa

SEQ ID NO: 2439409 - RNA, 12 nt, Human
cauuaaaagaaa

SEQ ID NO: 2439410 - RNA, 13 nt, Human
cauuaaaagaaaa

SEQ ID NO: 2439411 - RNA, 14 nt, Human
cauuaaaagaaaau

SEQ ID NO: 2439412 - RNA, 17 nt, Human
cauuaaaagaaaauaaa

SEQ ID NO: 2439413 - RNA, 22 nt, Human
cauuaaaaaugcauauacuuua

SEQ ID NO: 2439414 - RNA, 23 nt, Human
cauguuuuuguuuucuuugaaug

SEQ ID NO: 2439415 - RNA, 12 nt, Human
cauuaaaacaau

SEQ ID NO: 2439416 - RNA, 22 nt, Human
cauuaaaacugaagucugaaau

SEQ ID NO: 2439417 - RNA, 19 nt, Human
cauuaaaacugaagucuga

SEQ ID NO: 2439418 - RNA, 21 nt, Human
cauuaaaacaauauuguuucu

SEQ ID NO: 2439419 - RNA, 22 nt, Human
cauuaaaacaauauuguuucua

SEQ ID NO: 2439420 - RNA, 12 nt, Human
cauguuugugau

SEQ ID NO: 2439421 - RNA, 14 nt, Human
cauguuugugauug

SEQ ID NO: 2439422 - RNA, 14 nt, Human
cauguuugcuucau

SEQ ID NO: 2439423 - RNA, 16 nt, Human
cauguuugcugaacac

SEQ ID NO: 2439424 - RNA, 21 nt, Human
cauguuucucuggccccaagg

SEQ ID NO: 2439425 - RNA, 13 nt, Human
cauguuucuucau

SEQ ID NO: 2439426 - RNA, 19 nt, Human
cauguuuuucuucucccuc

SEQ ID NO: 2439427 - RNA, 20 nt, Human
cauguuuuucuucucccuca

SEQ ID NO: 2439428 - RNA, 17 nt, Human
cauguuuuuguuuucuu

SEQ ID NO: 2439429 - RNA, 13 nt, Human
cauguuuguaaaa

SEQ ID NO: 2439430 - RNA, 22 nt, Human
cauuaaaaaaaaaaaaaaaagu

SEQ ID NO: 2439431 - RNA, 21 nt, Human
caugugaugagaggaaaucac

SEQ ID NO: 2439432 - RNA, 19 nt, Human
caugugauccuuuuauguu

SEQ ID NO: 2439433 - RNA, 18 nt, Human
caugugauccuuuuaugu

SEQ ID NO: 2439434 - RNA, 16 nt, Human
caugugauccuuuuau

SEQ ID NO: 2439435 - RNA, 12 nt, Human
caugugauccuu

SEQ ID NO: 2439436 - RNA, 22 nt, Human
caugugauccuuuuauguuauu

SEQ ID NO: 2439437 - RNA, 20 nt, Human
caugugaugagaggaaauca

SEQ ID NO: 2439438 - RNA, 18 nt, Human
caugugaugagaggaaau

SEQ ID NO: 2439439 - RNA, 17 nt, Human
caugugaugagaggaaa

SEQ ID NO: 2439440 - RNA, 16 nt, Human
caugugaugagaggaa

SEQ ID NO: 2439441 - RNA, 15 nt, Human
caugugaugagagga

SEQ ID NO: 2439442 - RNA, 17 nt, Human
caugugacucugaagcu

SEQ ID NO: 2439443 - RNA, 13 nt, Human
caugugacucuga

SEQ ID NO: 2439444 - RNA, 16 nt, Human
caugugacucugaagc

SEQ ID NO: 2439445 - RNA, 12 nt, Human
caugugacucug

SEQ ID NO: 2439446 - RNA, 17 nt, Human
caugucuuguacaugug

SEQ ID NO: 2439447 - RNA, 15 nt, Human
caugucuuguacaug

SEQ ID NO: 2439448 - RNA, 14 nt, Human
caugucuuguacau

SEQ ID NO: 2439449 - RNA, 13 nt, Human
caugucuuguaca

SEQ ID NO: 2439450 - RNA, 22 nt, Human
caugucuuaaugaaguuugaau

SEQ ID NO: 2439451 - RNA, 21 nt, Human
caugucuuaaugaaguuugaa

SEQ ID NO: 2439452 - RNA, 23 nt, Human
caugucuuaaugaaguuugaaug

SEQ ID NO: 2439453 - RNA, 20 nt, Human
caugucuuaaugaaguuuga

SEQ ID NO: 2439454 - RNA, 18 nt, Human
caugucuuaaugaaguuu

SEQ ID NO: 2439455 - RNA, 17 nt, Human
caugucuuaaugaaguu

SEQ ID NO: 2439456 - RNA, 16 nt, Human
caugucuuaaugaagu

SEQ ID NO: 2439457 - RNA, 15 nt, Human
caugucuuaaugaag

SEQ ID NO: 2439458 - RNA, 14 nt, Human
caugucuuaaugaa

SEQ ID NO: 2439459 - RNA, 13 nt, Human
caugucuuaauga

SEQ ID NO: 2439460 - RNA, 15 nt, Human
caugucugcauuucg

SEQ ID NO: 2439461 - RNA, 23 nt, Human
caugucugcauuucgguggcuag

SEQ ID NO: 2439462 - RNA, 12 nt, Human
caugucuggcua

SEQ ID NO: 2439463 - RNA, 14 nt, Human
caugucucgacuca

SEQ ID NO: 2439464 - RNA, 14 nt, Human
caugucugcauuuc

SEQ ID NO: 2439465 - RNA, 17 nt, Human
caugucuccuauccugg

SEQ ID NO: 2439466 - RNA, 17 nt, Human
caugucucucagaauuc

SEQ ID NO: 2439467 - RNA, 13 nt, Human
cauguuucauguu

SEQ ID NO: 2439468 - RNA, 14 nt, Human
cauguguugaaaaa

SEQ ID NO: 2439469 - RNA, 17 nt, Human
cauguuucauguuuugu

SEQ ID NO: 2439470 - RNA, 16 nt, Human
cauguuucauguuuug

SEQ ID NO: 2439471 - RNA, 22 nt, Human
cauguuucauguuuugugacua

SEQ ID NO: 2439472 - RNA, 13 nt, Human
cauguuuccucua

SEQ ID NO: 2439473 - RNA, 21 nt, Human
cauguuuccucuaguucuuug

SEQ ID NO: 2439474 - RNA, 10 nt, Human
cauguuucuu

SEQ ID NO: 2439475 - RNA, 18 nt, Human
cauguguuuacuuuaugu

SEQ ID NO: 2439476 - RNA, 18 nt, Human
cauguguuggcagccucu

SEQ ID NO: 2439477 - RNA, 20 nt, Human
cauguguuuuaauuccaaua

SEQ ID NO: 2439478 - RNA, 19 nt, Human
cauguguuugguucugggg

SEQ ID NO: 2439479 - RNA, 15 nt, Human
cauguguccugguuc

SEQ ID NO: 2439480 - RNA, 21 nt, Human
cauguguccugguucccguuu

SEQ ID NO: 2439481 - RNA, 15 nt, Human
caugugugagugugu

SEQ ID NO: 2439482 - RNA, 16 nt, Human
cauguguuaaguauuu

SEQ ID NO: 2439483 - RNA, 17 nt, Human
caugugugagugugugc

SEQ ID NO: 2439484 - RNA, 16 nt, Human
caugugccgaaugugc

SEQ ID NO: 2439485 - RNA, 17 nt, Human
caugugcccccucuacc

SEQ ID NO: 2439486 - RNA, 20 nt, Human
caugugccugauccagccuc

SEQ ID NO: 2439487 - RNA, 19 nt, Human
caugugccugauccagccu

SEQ ID NO: 2439488 - RNA, 15 nt, Human
caugugccugaucca

SEQ ID NO: 2439489 - RNA, 14 nt, Human
caugugccugaucc

SEQ ID NO: 2439490 - RNA, 14 nt, Human
caugugcacaugca

SEQ ID NO: 2439491 - RNA, 22 nt, Human
caugugccagguuuuuggucug

SEQ ID NO: 2439492 - RNA, 18 nt, Human
cauguguagccugugcau

SEQ ID NO: 2439493 - RNA, 16 nt, Human
cauguguagccugugc

SEQ ID NO: 2439494 - RNA, 20 nt, Human
cauguguacuuaauuucuuu

SEQ ID NO: 2439495 - RNA, 14 nt, Human
cauguguagccugu

SEQ ID NO: 2439496 - RNA, 18 nt, Human
cauguguaugggcaaaaa

SEQ ID NO: 2439497 - RNA, 12 nt, Human
cauguguauguu

SEQ ID NO: 2439498 - RNA, 20 nt, Human
caugugcuaguaauuggaaa

SEQ ID NO: 2439499 - RNA, 23 nt, Human
cauguguaaucaauaaacgauuu

SEQ ID NO: 2439500 - RNA, 22 nt, Human
cauguguaaucaauaaacgauu

SEQ ID NO: 2439501 - RNA, 18 nt, Human
cauguguaaucaauaaac

SEQ ID NO: 2439502 - RNA, 17 nt, Human
cauguguaaucaauaaa

SEQ ID NO: 2439503 - RNA, 17 nt, Human
cauggucggaaaacaug

SEQ ID NO: 2439504 - RNA, 19 nt, Human
cauggucggaaaacaugcu

SEQ ID NO: 2439505 - RNA, 13 nt, Human
caugguguaauaa

SEQ ID NO: 2439506 - RNA, 14 nt, Human
caugguguaauaag

SEQ ID NO: 2439507 - RNA, 20 nt, Human
caugguggcgcaagccugua

SEQ ID NO: 2439508 - RNA, 12 nt, Human
caugguggcgca

SEQ ID NO: 2439509 - RNA, 17 nt, Human
caugguggcgcaagccu

SEQ ID NO: 2439510 - RNA, 18 nt, Human
caugguggcgcaagccug

SEQ ID NO: 2439511 - RNA, 21 nt, Human
caugguggguccaugggcaga

SEQ ID NO: 2439512 - RNA, 22 nt, Human
caugguggguccaugggcagag

SEQ ID NO: 2439513 - RNA, 19 nt, Human
caugguggguucaggggac

SEQ ID NO: 2439514 - RNA, 11 nt, Human
cauggugaaaa

SEQ ID NO: 2439515 - RNA, 21 nt, Human
caugguacccccuucugggca

SEQ ID NO: 2439516 - RNA, 14 nt, Human
cauggucacacacu

SEQ ID NO: 2439517 - RNA, 15 nt, Human
cauggucacacacug

SEQ ID NO: 2439518 - RNA, 23 nt, Human
cauggucggaaaacaugcuacac

SEQ ID NO: 2439519 - RNA, 21 nt, Human
cauggugccugagaggcaggc

SEQ ID NO: 2439520 - RNA, 19 nt, Human
cauggugccugagaggcag

SEQ ID NO: 2439521 - RNA, 18 nt, Human
cauggugccugagaggca

SEQ ID NO: 2439522 - RNA, 19 nt, Human
cauggugaaaauguacuga

SEQ ID NO: 2439523 - RNA, 18 nt, Human
cauggugaaaauguacug

SEQ ID NO: 2439524 - RNA, 22 nt, Human
cauggugccugagaggcaggca

SEQ ID NO: 2439525 - RNA, 23 nt, Human
caugguggcaccagcgaagggag

SEQ ID NO: 2439526 - RNA, 16 nt, Human
caugucuauucagcuu

SEQ ID NO: 2439527 - RNA, 17 nt, Human
caugucuauucagcuuc

SEQ ID NO: 2439528 - RNA, 16 nt, Human
caugucuccuauccug

SEQ ID NO: 2439529 - RNA, 14 nt, Human
caugucgugaccaa

SEQ ID NO: 2439530 - RNA, 14 nt, Human
caugucggccucua

SEQ ID NO: 2439531 - RNA, 22 nt, Human
caugucuauaaucccagcacuu

SEQ ID NO: 2439532 - RNA, 22 nt, Human
cauguacuguaguuuuucuuca

SEQ ID NO: 2439533 - RNA, 22 nt, Human
caugucgcgcucagcaugcauc

SEQ ID NO: 2439534 - RNA, 13 nt, Human
caugucggccucu

SEQ ID NO: 2439535 - RNA, 14 nt, Human
cauguacuguaguu

SEQ ID NO: 2439536 - RNA, 22 nt, Human
cauguacugagccuuguaauuc

SEQ ID NO: 2439537 - RNA, 19 nt, Human
cauguacugagccuuguaa

SEQ ID NO: 2439538 - RNA, 13 nt, Human
cauguaccccaau

SEQ ID NO: 2439539 - RNA, 23 nt, Human
cauguacugagccuuguaauucu

SEQ ID NO: 2439540 - RNA, 13 nt, Human
cauguacuguagu

SEQ ID NO: 2439541 - RNA, 15 nt, Human
cauguaaacugugca

SEQ ID NO: 2439542 - RNA, 22 nt, Human
cauguaaacacgccugcaaacg

SEQ ID NO: 2439543 - RNA, 16 nt, Human
cauguaaacugugcac

SEQ ID NO: 2439544 - RNA, 21 nt, Human
cauguaaacaaaauuuaguuu

SEQ ID NO: 2439545 - RNA, 18 nt, Human
cauguaaacaaaauuuag

SEQ ID NO: 2439546 - RNA, 14 nt, Human
cauguaaaagaguc

SEQ ID NO: 2439547 - RNA, 16 nt, Human
cauguaaaagagucau

SEQ ID NO: 2439548 - RNA, 19 nt, Human
cauguaccauuugcauggc

SEQ ID NO: 2439549 - RNA, 15 nt, Human
cauguacaugaagaa

SEQ ID NO: 2439550 - RNA, 19 nt, Human
cauguacccuaaggucauu

SEQ ID NO: 2439551 - RNA, 20 nt, Human
cauguacaugaagaagcuaa

SEQ ID NO: 2439552 - RNA, 14 nt, Human
caugcuucuuccuu

SEQ ID NO: 2439553 - RNA, 22 nt, Human
caugcugugugacucaaaccaa

SEQ ID NO: 2439554 - RNA, 17 nt, Human
cauggaaaccugaaaaa

SEQ ID NO: 2439555 - RNA, 17 nt, Human
caugcuuugugaacaag

SEQ ID NO: 2439556 - RNA, 13 nt, Human
caugcuuguguua

SEQ ID NO: 2439557 - RNA, 16 nt, Human
caugcuucuuccuuac

SEQ ID NO: 2439558 - RNA, 19 nt, Human
cauggaauuuguaaguuua

SEQ ID NO: 2439559 - RNA, 16 nt, Human
cauggaauuuguaagu

SEQ ID NO: 2439560 - RNA, 20 nt, Human
cauggaauuggagcucgugg

SEQ ID NO: 2439561 - RNA, 18 nt, Human
cauggaaaccugaaaaaa

SEQ ID NO: 2439562 - RNA, 21 nt, Human
cauggaaauucccuucaucug

SEQ ID NO: 2439563 - RNA, 22 nt, Human
cauggacaccccuuauccagga

SEQ ID NO: 2439564 - RNA, 21 nt, Human
cauggacaccccuuauccagg

SEQ ID NO: 2439565 - RNA, 14 nt, Human
cauggacaccccuu

SEQ ID NO: 2439566 - RNA, 23 nt, Human
cauggacaccccuuauccaggac

SEQ ID NO: 2439567 - RNA, 12 nt, Human
cauggacccgga

SEQ ID NO: 2439568 - RNA, 14 nt, Human
cauggacuucacau

SEQ ID NO: 2439569 - RNA, 19 nt, Human
cauggacguucggggcaug

SEQ ID NO: 2439570 - RNA, 15 nt, Human
cauggacccggagcu

SEQ ID NO: 2439571 - RNA, 21 nt, Human
cauggacucuacacugugaac

SEQ ID NO: 2439572 - RNA, 15 nt, Human
cauggacuucacaua

SEQ ID NO: 2439573 - RNA, 14 nt, Human
cauggagccagcuc

SEQ ID NO: 2439574 - RNA, 22 nt, Human
cauggacuucugccagcauaau

SEQ ID NO: 2439575 - RNA, 15 nt, Human
cauggacuuccacug

SEQ ID NO: 2439576 - RNA, 17 nt, Human
cauggagccccagcccc

SEQ ID NO: 2439577 - RNA, 16 nt, Human
cauggagccccagccc

SEQ ID NO: 2439578 - RNA, 12 nt, Human
cauggagcuggc

SEQ ID NO: 2439579 - RNA, 15 nt, Human
cauggagccccagcc

SEQ ID NO: 2439580 - RNA, 14 nt, Human
cauggagccccagc

SEQ ID NO: 2439581 - RNA, 17 nt, Human
cauggagccagcucccu

SEQ ID NO: 2439582 - RNA, 13 nt, Human
cauggagcuggcc

SEQ ID NO: 2439583 - RNA, 18 nt, Human
cauggagccccagccccc

SEQ ID NO: 2439584 - RNA, 14 nt, Human
cauggagcuggccg

SEQ ID NO: 2439585 - RNA, 14 nt, Human
cauggaggagcuug

SEQ ID NO: 2439586 - RNA, 13 nt, Human
cauggaggcacac

SEQ ID NO: 2439587 - RNA, 17 nt, Human
caugcagccacugugcu

SEQ ID NO: 2439588 - RNA, 16 nt, Human
caugcagcccaugccc

SEQ ID NO: 2439589 - RNA, 19 nt, Human
caugcagcccaugcccacc

SEQ ID NO: 2439590 - RNA, 20 nt, Human
caugcagcccaugcccaccu

SEQ ID NO: 2439591 - RNA, 19 nt, Human
caugcagauggggcucccg

SEQ ID NO: 2439592 - RNA, 14 nt, Human
caugcagcaucuaa

SEQ ID NO: 2439593 - RNA, 14 nt, Human
caugcggcccagcc

SEQ ID NO: 2439594 - RNA, 13 nt, Human
caugcggcccagc

SEQ ID NO: 2439595 - RNA, 23 nt, Human
caugcggagaacaaaugugaagg

SEQ ID NO: 2439596 - RNA, 16 nt, Human
caugcggagaacaaau

SEQ ID NO: 2439597 - RNA, 14 nt, Human
caugcggagaacaa

SEQ ID NO: 2439598 - RNA, 21 nt, Human
caugcagccgugaucaaggga

SEQ ID NO: 2439599 - RNA, 23 nt, Human
caugcgcucagggccaugcugag

SEQ ID NO: 2439600 - RNA, 17 nt, Human
caugcagccgugaucaa

SEQ ID NO: 2439601 - RNA, 15 nt, Human
caugcagccgugauc

SEQ ID NO: 2439602 - RNA, 22 nt, Human
caugcgcucagggccaugcuga

SEQ ID NO: 2439603 - RNA, 22 nt, Human
caugcagcccaugcccaccugc

SEQ ID NO: 2439604 - RNA, 23 nt, Human
caugcagcccaugcccaccugcc

SEQ ID NO: 2439605 - RNA, 10 nt, Human
caugcacugu

SEQ ID NO: 2439606 - RNA, 13 nt, Human
caugcacugugaa

SEQ ID NO: 2439607 - RNA, 14 nt, Human
caugcacugugaag

SEQ ID NO: 2439608 - RNA, 16 nt, Human
caugcacugugaagga

SEQ ID NO: 2439609 - RNA, 17 nt, Human
caugcacugugaaggac

SEQ ID NO: 2439610 - RNA, 18 nt, Human
caugcacugugaaggacc

SEQ ID NO: 2439611 - RNA, 20 nt, Human
caugcacugugaaggacccu

SEQ ID NO: 2439612 - RNA, 23 nt, Human
caugcacuguucccccugugcag

SEQ ID NO: 2439613 - RNA, 19 nt, Human
caugcacuguucccccugu

SEQ ID NO: 2439614 - RNA, 22 nt, Human
caugcacugugaaggacccuug

SEQ ID NO: 2439615 - RNA, 19 nt, Human
caugcagacaugagugcgu

SEQ ID NO: 2439616 - RNA, 13 nt, Human
caugcagagcgcc

SEQ ID NO: 2439617 - RNA, 17 nt, Human
caugcacuuggcugcau

SEQ ID NO: 2439618 - RNA, 15 nt, Human
caugcugucccuuac

SEQ ID NO: 2439619 - RNA, 13 nt, Human
caugcugucccuu

SEQ ID NO: 2439620 - RNA, 17 nt, Human
caugcugugugacucaa

SEQ ID NO: 2439621 - RNA, 21 nt, Human
caugcugugugacucaaacca

SEQ ID NO: 2439622 - RNA, 14 nt, Human
caugcugugugacu

SEQ ID NO: 2439623 - RNA, 19 nt, Human
caugcggcccagcccggcu

SEQ ID NO: 2439624 - RNA, 18 nt, Human
caugcggcccagcccggc

SEQ ID NO: 2439625 - RNA, 16 nt, Human
caugcggcccagcccg

SEQ ID NO: 2439626 - RNA, 15 nt, Human
caugcggcccagccc

SEQ ID NO: 2439627 - RNA, 22 nt, Human
caugcggcccagcccggcuccc

SEQ ID NO: 2439628 - RNA, 21 nt, Human
caugcggcccagcccggcucc

SEQ ID NO: 2439629 - RNA, 16 nt, Human
caugcggcccaggaug

SEQ ID NO: 2439630 - RNA, 20 nt, Human
caugcgggcugggcagcugu

SEQ ID NO: 2439631 - RNA, 19 nt, Human
caugcgggcugggcagcug

SEQ ID NO: 2439632 - RNA, 18 nt, Human
caugcgggcugggcagcu

SEQ ID NO: 2439633 - RNA, 15 nt, Human
caugcgggcugggca

SEQ ID NO: 2439634 - RNA, 19 nt, Human
caugcuggguucugcacag

SEQ ID NO: 2439635 - RNA, 21 nt, Human
caugcgggcugggcagcuguu

SEQ ID NO: 2439636 - RNA, 16 nt, Human
cauggucacacacuga

SEQ ID NO: 2439637 - RNA, 19 nt, Human
caugggugaagggagagcc

SEQ ID NO: 2439638 - RNA, 22 nt, Human
caugggugaagggagagccagc

SEQ ID NO: 2439639 - RNA, 23 nt, Human
caugggugaagggagagccagcu

SEQ ID NO: 2439640 - RNA, 19 nt, Human
caugguacccccuucuggg

SEQ ID NO: 2439641 - RNA, 18 nt, Human
caugguacccccuucugg

SEQ ID NO: 2439642 - RNA, 23 nt, Human
caugggcuucacuguauaaauag

SEQ ID NO: 2439643 - RNA, 20 nt, Human
caugggcuucacuguauaaa

SEQ ID NO: 2439644 - RNA, 17 nt, Human
caugggcuucacuguau

SEQ ID NO: 2439645 - RNA, 16 nt, Human
cauggggaagggauau

SEQ ID NO: 2439646 - RNA, 21 nt, Human
caugggcuucacuguauaaau

SEQ ID NO: 2439647 - RNA, 20 nt, Human
caugggguuggcugggccca

SEQ ID NO: 2439648 - RNA, 22 nt, Human
caugggguuggcugggcccaga

SEQ ID NO: 2439649 - RNA, 21 nt, Human
cauggggugggguagggcuga

SEQ ID NO: 2439650 - RNA, 19 nt, Human
caugggguuggcugggccc

SEQ ID NO: 2439651 - RNA, 18 nt, Human
cauggcagaguuugugug

SEQ ID NO: 2439652 - RNA, 17 nt, Human
cauggcagaguuugugu

SEQ ID NO: 2439653 - RNA, 22 nt, Human
cauggaggagcuugggggauga

SEQ ID NO: 2439654 - RNA, 20 nt, Human
cauggaggcacacagcugca

SEQ ID NO: 2439655 - RNA, 19 nt, Human
cauggaggcacacagcugc

SEQ ID NO: 2439656 - RNA, 16 nt, Human
cauggaggcacacagc

SEQ ID NO: 2439657 - RNA, 23 nt, Human
caugggacagggaggacgcucuc

SEQ ID NO: 2439658 - RNA, 21 nt, Human
caugggagcugguuagaaaug

SEQ ID NO: 2439659 - RNA, 18 nt, Human
cauggcaucaccuccacc

SEQ ID NO: 2439660 - RNA, 13 nt, Human
caugggagccggg

SEQ ID NO: 2439661 - RNA, 22 nt, Human
caugggagccgggucugccucu

SEQ ID NO: 2439662 - RNA, 16 nt, Human
caugggcuucacugua

SEQ ID NO: 2439663 - RNA, 15 nt, Human
caugggcuucacugu

SEQ ID NO: 2439664 - RNA, 14 nt, Human
caugggcuucacug

SEQ ID NO: 2439665 - RNA, 13 nt, Human
caugggcuucacu

SEQ ID NO: 2439666 - RNA, 12 nt, Human
caugggcuucac

SEQ ID NO: 2439667 - RNA, 24 nt, Human
caugggccuggccaccucucuccu

SEQ ID NO: 2439668 - RNA, 13 nt, Human
caugggcucugac

SEQ ID NO: 2439669 - RNA, 23 nt, Human
caugggccuggccaccucucucc

SEQ ID NO: 2439670 - RNA, 13 nt, Human
caugggccuggcc

SEQ ID NO: 2439671 - RNA, 23 nt, Human
caugggcacugcuggguggccca

SEQ ID NO: 2439672 - RNA, 19 nt, Human
caugggcacugcugggugg

SEQ ID NO: 2439673 - RNA, 18 nt, Human
caugggcacugcugggug

SEQ ID NO: 2439674 - RNA, 17 nt, Human
caugggcacugcugggu

SEQ ID NO: 2439675 - RNA, 16 nt, Human
caugggcacugcuggg

SEQ ID NO: 2439676 - RNA, 15 nt, Human
caugggcagagccca

SEQ ID NO: 2439677 - RNA, 17 nt, Human
caugggcagagcccaag

SEQ ID NO: 2439678 - RNA, 18 nt, Human
caugggccuccugugugu

SEQ ID NO: 2439679 - RNA, 22 nt, Human
caugggagggggcuugaagcca

SEQ ID NO: 2439680 - RNA, 14 nt, Human
caugggagggggcu

SEQ ID NO: 2439681 - RNA, 14 nt, Human
caugggaggcucac

SEQ ID NO: 2439682 - RNA, 15 nt, Human
caugggcacugcugg

SEQ ID NO: 2439683 - RNA, 14 nt, Human
caugggcacugcug

SEQ ID NO: 2439684 - RNA, 13 nt, Human
caugggcacugcu

SEQ ID NO: 2439685 - RNA, 17 nt, Human
cauuugaaaauuuugau

SEQ ID NO: 2439686 - RNA, 19 nt, Human
cauuugaaaauuuugaugu

SEQ ID NO: 2439687 - RNA, 15 nt, Human
cauuuacuguggcuu

SEQ ID NO: 2439688 - RNA, 14 nt, Human
cauuuacuguggcu

SEQ ID NO: 2439689 - RNA, 13 nt, Human
cauuuacuguggc

SEQ ID NO: 2439690 - RNA, 12 nt, Human
cauuuacugugg

SEQ ID NO: 2439691 - RNA, 18 nt, Human
cauuucuuugugcuuugg

SEQ ID NO: 2439692 - RNA, 12 nt, Human
cauuucuugggc

SEQ ID NO: 2439693 - RNA, 14 nt, Human
cauuucuugggccc

SEQ ID NO: 2439694 - RNA, 15 nt, Human
cauuucuugggcccu

SEQ ID NO: 2439695 - RNA, 16 nt, Human
cauuucuugggcccuc

SEQ ID NO: 2439696 - RNA, 22 nt, Human
cauuuacccuucuuuucugacu

SEQ ID NO: 2439697 - RNA, 20 nt, Human
cauuuacauguauuauuuca

SEQ ID NO: 2439698 - RNA, 12 nt, Human
cauuuacaugua

SEQ ID NO: 2439699 - RNA, 20 nt, Human
cauuuaauaauauacuugug

SEQ ID NO: 2439700 - RNA, 17 nt, Human
cauuuaauaauauacuu

SEQ ID NO: 2439701 - RNA, 20 nt, Human
cauuuaauguagccauggga

SEQ ID NO: 2439702 - RNA, 22 nt, Human
cauuuaauguagccaugggacc

SEQ ID NO: 2439703 - RNA, 21 nt, Human
cauuuaauguagccaugggac

SEQ ID NO: 2439704 - RNA, 24 nt, Human
cauuuaauguagccaugggaccaa

SEQ ID NO: 2439705 - RNA, 17 nt, Human
cauuuaagagacaguca

SEQ ID NO: 2439706 - RNA, 14 nt, Human
cauuuaauaauaua

SEQ ID NO: 2439707 - RNA, 13 nt, Human
cauuuaauaauau

SEQ ID NO: 2439708 - RNA, 23 nt, Human
cauuuaagagacagucaccccag

SEQ ID NO: 2439709 - RNA, 19 nt, Human
cauuuaagagacagucacc

SEQ ID NO: 2439710 - RNA, 12 nt, Human
cauuuaauaaua

SEQ ID NO: 2439711 - RNA, 23 nt, Human
cauuuaaauuuuacccuuuagac

SEQ ID NO: 2439712 - RNA, 18 nt, Human
cauuuaaauuuuuuuccu

SEQ ID NO: 2439713 - RNA, 20 nt, Human
cauuuaaauacagucuucca

SEQ ID NO: 2439714 - RNA, 18 nt, Human
cauuuaaauacagucuuc

SEQ ID NO: 2439715 - RNA, 17 nt, Human
cauuuaaauacagucuu

SEQ ID NO: 2439716 - RNA, 23 nt, Human
cauuguuuuaaaaagaaacaaga

SEQ ID NO: 2439717 - RNA, 16 nt, Human
cauuguucaauuagaa

SEQ ID NO: 2439718 - RNA, 17 nt, Human
cauuguuuuaaaaagaa

SEQ ID NO: 2439719 - RNA, 20 nt, Human
cauuguuuugccaacauugc

SEQ ID NO: 2439720 - RNA, 16 nt, Human
cauuguuuugccaaca

SEQ ID NO: 2439721 - RNA, 14 nt, Human
cauuguuuugccaa

SEQ ID NO: 2439722 - RNA, 12 nt, Human
cauuuaaaaaaa

SEQ ID NO: 2439723 - RNA, 21 nt, Human
cauuuaaaaaaaaaauuuguu

SEQ ID NO: 2439724 - RNA, 13 nt, Human
cauuuaaaacaga

SEQ ID NO: 2439725 - RNA, 17 nt, Human
cauuuaaaacagacacu

SEQ ID NO: 2439726 - RNA, 18 nt, Human
cauuuaaaacagacacug

SEQ ID NO: 2439727 - RNA, 23 nt, Human
cauuuaaaacagacacuggcaug

SEQ ID NO: 2439728 - RNA, 15 nt, Human
cauuuaaaaaaaauc

SEQ ID NO: 2439729 - RNA, 21 nt, Human
cauuguacaguuuguuuacac

SEQ ID NO: 2439730 - RNA, 20 nt, Human
cauuguacaguuuguuuaca

SEQ ID NO: 2439731 - RNA, 19 nt, Human
cauuguacaguuuguuuac

SEQ ID NO: 2439732 - RNA, 14 nt, Human
cauuguacaguuug

SEQ ID NO: 2439733 - RNA, 13 nt, Human
cauuguacaguuu

SEQ ID NO: 2439734 - RNA, 21 nt, Human
cauuguaauguuacugaucau

SEQ ID NO: 2439735 - RNA, 17 nt, Human
cauuguaauguuacuga

SEQ ID NO: 2439736 - RNA, 18 nt, Human
cauuguaauguuacugau

SEQ ID NO: 2439737 - RNA, 15 nt, Human
cauuguaacuuggau

SEQ ID NO: 2439738 - RNA, 15 nt, Human
cauuguaauguuacu

SEQ ID NO: 2439739 - RNA, 16 nt, Human
cauuguaauguuacug

SEQ ID NO: 2439740 - RNA, 21 nt, Human
cauuguaaaugugcuuuuaaa

SEQ ID NO: 2439741 - RNA, 19 nt, Human
cauugauggggaaggaggc

SEQ ID NO: 2439742 - RNA, 16 nt, Human
cauugauugucagcua

SEQ ID NO: 2439743 - RNA, 16 nt, Human
cauugauggggaagga

SEQ ID NO: 2439744 - RNA, 17 nt, Human
cauugauugucagcuac

SEQ ID NO: 2439745 - RNA, 18 nt, Human
cauugauugucagcuacu

SEQ ID NO: 2439746 - RNA, 13 nt, Human
cauugugggaagg

SEQ ID NO: 2439747 - RNA, 15 nt, Human
cauugugggaagggg

SEQ ID NO: 2439748 - RNA, 22 nt, Human
cauuguacaguuuguuuacaca

SEQ ID NO: 2439749 - RNA, 21 nt, Human
cauugugggauguucagcacu

SEQ ID NO: 2439750 - RNA, 22 nt, Human
cauugugggauguucagcacug

SEQ ID NO: 2439751 - RNA, 22 nt, Human
cauugaacacaaacuguaaaua

SEQ ID NO: 2439752 - RNA, 15 nt, Human
cauugaaucuguaug

SEQ ID NO: 2439753 - RNA, 16 nt, Human
cauugaagucagaugu

SEQ ID NO: 2439754 - RNA, 19 nt, Human
cauugaaguaaugaauuuu

SEQ ID NO: 2439755 - RNA, 14 nt, Human
cauugaauuagaaa

SEQ ID NO: 2439756 - RNA, 19 nt, Human
cauugaaucuguauggcua

SEQ ID NO: 2439757 - RNA, 18 nt, Human
cauugaaguaaugaauuu

SEQ ID NO: 2439758 - RNA, 18 nt, Human
cauucuuuuaaaagacaa

SEQ ID NO: 2439759 - RNA, 19 nt, Human
cauucuuuuguaauuuaaa

SEQ ID NO: 2439760 - RNA, 17 nt, Human
cauugaccugaggcccu

SEQ ID NO: 2439761 - RNA, 15 nt, Human
cauugaccugaggcc

SEQ ID NO: 2439762 - RNA, 21 nt, Human
cauugaauucuugguugagga

SEQ ID NO: 2439763 - RNA, 22 nt, Human
cauugaauucuugguugaggaa

SEQ ID NO: 2439764 - RNA, 23 nt, Human
cauugaauucuugguugaggaaa

SEQ ID NO: 2439765 - RNA, 14 nt, Human
cauugaccugaggc

SEQ ID NO: 2439766 - RNA, 16 nt, Human
cauugacaagaacuga

SEQ ID NO: 2439767 - RNA, 15 nt, Human
cauugaguaauauag

SEQ ID NO: 2439768 - RNA, 18 nt, Human
cauugaccugaggcccuu

SEQ ID NO: 2439769 - RNA, 17 nt, Human
cauugauaugaaaaaua

SEQ ID NO: 2439770 - RNA, 18 nt, Human
cauugauaugaaaaauau

SEQ ID NO: 2439771 - RNA, 19 nt, Human
cauugauaugaaaaauaug

SEQ ID NO: 2439772 - RNA, 22 nt, Human
cauugauaugaaaaauaugaua

SEQ ID NO: 2439773 - RNA, 14 nt, Human
cauugauggggaag

SEQ ID NO: 2439774 - RNA, 17 nt, Human
cauuucuugggcccucc

SEQ ID NO: 2439775 - RNA, 18 nt, Human
cauuucuugggcccuccu

SEQ ID NO: 2439776 - RNA, 22 nt, Human
cauuugaguuauuuuaauuauc

SEQ ID NO: 2439777 - RNA, 14 nt, Human
cauuugaugcuaaa

SEQ ID NO: 2439778 - RNA, 15 nt, Human
cauuugaugcuaaau

SEQ ID NO: 2439779 - RNA, 13 nt, Human
cauuugcugaaua

SEQ ID NO: 2439780 - RNA, 22 nt, Human
cauuugcaagggaaaagucucu

SEQ ID NO: 2439781 - RNA, 16 nt, Human
cauuugaugcuaaaua

SEQ ID NO: 2439782 - RNA, 15 nt, Human
cauuugauucugugu

SEQ ID NO: 2439783 - RNA, 19 nt, Human
cauuugcagaguccugcac

SEQ ID NO: 2439784 - RNA, 18 nt, Human
cauuugcagaguccugca

SEQ ID NO: 2439785 - RNA, 21 nt, Human
cauuugcacuggaguucuaug

SEQ ID NO: 2439786 - RNA, 20 nt, Human
cauuugcacuggaguucuau

SEQ ID NO: 2439787 - RNA, 15 nt, Human
cauuugcacccuccg

SEQ ID NO: 2439788 - RNA, 17 nt, Human
cauuugcacccuccgcc

SEQ ID NO: 2439789 - RNA, 13 nt, Human
cauuugcuuuuug

SEQ ID NO: 2439790 - RNA, 16 nt, Human
cauuugcuuuuucacc

SEQ ID NO: 2439791 - RNA, 23 nt, Human
cauuuuaccuuugacaaagguaa

SEQ ID NO: 2439792 - RNA, 19 nt, Human
cauuuuaauuuuaaccaaa

SEQ ID NO: 2439793 - RNA, 23 nt, Human
cauuuuauuuuauuaugcaugaa

SEQ ID NO: 2439794 - RNA, 22 nt, Human
cauuuuauuuuauuaugcauga

SEQ ID NO: 2439795 - RNA, 16 nt, Human
cauuuucaccccaccc

SEQ ID NO: 2439796 - RNA, 22 nt, Human
cauuuuacuuuuuccuggcuca

SEQ ID NO: 2439797 - RNA, 20 nt, Human
cauuuuacuuuuuccuggcu

SEQ ID NO: 2439798 - RNA, 17 nt, Human
cauuuuacuuuuuccug

SEQ ID NO: 2439799 - RNA, 20 nt, Human
cauuuuacccacacacagau

SEQ ID NO: 2439800 - RNA, 16 nt, Human
ccaaacccuucagugc

SEQ ID NO: 2439801 - RNA, 17 nt, Human
ccaaaccaccagaagcc

SEQ ID NO: 2439802 - RNA, 15 nt, Human
ccaaacaccuuccag

SEQ ID NO: 2439803 - RNA, 19 nt, Human
ccaaacaccuuccagcucc

SEQ ID NO: 2439804 - RNA, 20 nt, Human
ccaaaauguuggucauuuua

SEQ ID NO: 2439805 - RNA, 21 nt, Human
ccaaaauguuggucauuuuau

SEQ ID NO: 2439806 - RNA, 16 nt, Human
ccaaaauuauuucaga

SEQ ID NO: 2439807 - RNA, 20 nt, Human
ccaaaauuguuuugagcuuu

SEQ ID NO: 2439808 - RNA, 16 nt, Human
ccaaacaaauaugcaa

SEQ ID NO: 2439809 - RNA, 15 nt, Human
cauuuuuacaauaaa

SEQ ID NO: 2439810 - RNA, 15 nt, Human
cauuuuuaaucauga

SEQ ID NO: 2439811 - RNA, 17 nt, Human
cauuuuuacaauaaaua

SEQ ID NO: 2439812 - RNA, 17 nt, Human
cauuuuuaguagagaca

SEQ ID NO: 2439813 - RNA, 23 nt, Human
ccaaaauguaggcuuaguuugug

SEQ ID NO: 2439814 - RNA, 22 nt, Human
ccaaaaugcucuagugccuucu

SEQ ID NO: 2439815 - RNA, 17 nt, Human
cauuuucugcaagccug

SEQ ID NO: 2439816 - RNA, 15 nt, Human
cauuuucugcaagcc

SEQ ID NO: 2439817 - RNA, 18 nt, Human
cauuuucugcaagccugc

SEQ ID NO: 2439818 - RNA, 19 nt, Human
cauuuuuaaucaugaaauu

SEQ ID NO: 2439819 - RNA, 21 nt, Human
cauuuuuaagugcugcauuua

SEQ ID NO: 2439820 - RNA, 14 nt, Human
cauuuucugcaagc

SEQ ID NO: 2439821 - RNA, 12 nt, Human
cauuuucugcaa

SEQ ID NO: 2439822 - RNA, 11 nt, Human
cauuuucugca

SEQ ID NO: 2439823 - RNA, 17 nt, Human
cauuuuccccccacucu

SEQ ID NO: 2439824 - RNA, 20 nt, Human
cauuuuccccccacucuccc

SEQ ID NO: 2439825 - RNA, 21 nt, Human
cauuuuccccccacucucccc

SEQ ID NO: 2439826 - RNA, 22 nt, Human
cauuuuccccccacucucccca

SEQ ID NO: 2439827 - RNA, 12 nt, Human
cauuuucccaga

SEQ ID NO: 2439828 - RNA, 14 nt, Human
cauuuuccccccac

SEQ ID NO: 2439829 - RNA, 15 nt, Human
cauuuuccccccacu

SEQ ID NO: 2439830 - RNA, 17 nt, Human
cauuuucaccccacccu

SEQ ID NO: 2439831 - RNA, 20 nt, Human
cauuuuagaagacucuacca

SEQ ID NO: 2439832 - RNA, 13 nt, Human
cauucuuccuagu

SEQ ID NO: 2439833 - RNA, 18 nt, Human
cauucuuccuaguuuucu

SEQ ID NO: 2439834 - RNA, 19 nt, Human
cauucuucucuagcuggug

SEQ ID NO: 2439835 - RNA, 18 nt, Human
cauucuucucuagcuggu

SEQ ID NO: 2439836 - RNA, 21 nt, Human
cauucuuccuaguuuucuccu

SEQ ID NO: 2439837 - RNA, 20 nt, Human
cauucuucucuagcuggugg

SEQ ID NO: 2439838 - RNA, 23 nt, Human
cauucuucuguacgucugacagg

SEQ ID NO: 2439839 - RNA, 17 nt, Human
cauucuugaaagcugug

SEQ ID NO: 2439840 - RNA, 21 nt, Human
cauucuugguuggcuggccuu

SEQ ID NO: 2439841 - RNA, 17 nt, Human
cauucuugguuggcugg

SEQ ID NO: 2439842 - RNA, 16 nt, Human
cauucuugguuggcug

SEQ ID NO: 2439843 - RNA, 17 nt, Human
cauucuuucugauaacu

SEQ ID NO: 2439844 - RNA, 18 nt, Human
cauucuuuaucuugacau

SEQ ID NO: 2439845 - RNA, 16 nt, Human
cauucuuuuaaaagac

SEQ ID NO: 2439846 - RNA, 19 nt, Human
cauucuuuuaaaagacaag

SEQ ID NO: 2439847 - RNA, 12 nt, Human
cauucuuuugua

SEQ ID NO: 2439848 - RNA, 18 nt, Human
cauucuuuuguaauuuaa

SEQ ID NO: 2439849 - RNA, 16 nt, Human
cauucuuuuguaauuu

SEQ ID NO: 2439850 - RNA, 15 nt, Human
cauucuuuuguaauu

SEQ ID NO: 2439851 - RNA, 14 nt, Human
cauucuuuuguaau

SEQ ID NO: 2439852 - RNA, 21 nt, Human
cauucugacucgguuucucca

SEQ ID NO: 2439853 - RNA, 19 nt, Human
cauucugacucgguuucuc

SEQ ID NO: 2439854 - RNA, 16 nt, Human
cauucugacucgguuu

SEQ ID NO: 2439855 - RNA, 12 nt, Human
cauucugacucg

SEQ ID NO: 2439856 - RNA, 15 nt, Human
cauucugacucauau

SEQ ID NO: 2439857 - RNA, 16 nt, Human
cauucugaccauuuca

SEQ ID NO: 2439858 - RNA, 17 nt, Human
cauucugaccauuucag

SEQ ID NO: 2439859 - RNA, 23 nt, Human
cauucugacucgguuucuccaaa

SEQ ID NO: 2439860 - RNA, 20 nt, Human
cauucugauuuggaaaaaga

SEQ ID NO: 2439861 - RNA, 22 nt, Human
cauucugccaggcccccaagcc

SEQ ID NO: 2439862 - RNA, 23 nt, Human
cauuccugguacccagccaucug

SEQ ID NO: 2439863 - RNA, 21 nt, Human
cauuccugguacccagccauc

SEQ ID NO: 2439864 - RNA, 20 nt, Human
cauuccugguacccagccau

SEQ ID NO: 2439865 - RNA, 19 nt, Human
cauuccugguacccagcca

SEQ ID NO: 2439866 - RNA, 13 nt, Human
cauuccuguauuc

SEQ ID NO: 2439867 - RNA, 24 nt, Human
cauuccugguacccagccaucugc

SEQ ID NO: 2439868 - RNA, 18 nt, Human
cauuccuguauucacccg

SEQ ID NO: 2439869 - RNA, 18 nt, Human
cauuccugguacccagcc

SEQ ID NO: 2439870 - RNA, 17 nt, Human
cauuccugguacccagc

SEQ ID NO: 2439871 - RNA, 15 nt, Human
cauuccugguaccca

SEQ ID NO: 2439872 - RNA, 16 nt, Human
cauuccugggcacagu

SEQ ID NO: 2439873 - RNA, 14 nt, Human
cauuccugggcaca

SEQ ID NO: 2439874 - RNA, 21 nt, Human
cauuccuggaaaccacagucc

SEQ ID NO: 2439875 - RNA, 21 nt, Human
cauuccugggaaauauucccu

SEQ ID NO: 2439876 - RNA, 23 nt, Human
cauuccugaugcuucuucagaga

SEQ ID NO: 2439877 - RNA, 13 nt, Human
cauuccugccugu

SEQ ID NO: 2439878 - RNA, 14 nt, Human
cauuccugccuguc

SEQ ID NO: 2439879 - RNA, 15 nt, Human
cauuccugccugucu

SEQ ID NO: 2439880 - RNA, 16 nt, Human
cauuccugccugucuc

SEQ ID NO: 2439881 - RNA, 19 nt, Human
cauuccuggaaaccacagu

SEQ ID NO: 2439882 - RNA, 17 nt, Human
cauuccuggaaaccaca

SEQ ID NO: 2439883 - RNA, 22 nt, Human
cauuccugaugcuucuucagag

SEQ ID NO: 2439884 - RNA, 19 nt, Human
cauuccugaugcuucuuca

SEQ ID NO: 2439885 - RNA, 16 nt, Human
cauuccugaugcuucu

SEQ ID NO: 2439886 - RNA, 14 nt, Human
cauuccugaugcuu

SEQ ID NO: 2439887 - RNA, 13 nt, Human
cauuccugaagaa

SEQ ID NO: 2439888 - RNA, 16 nt, Human
cauuccugaagaacca

SEQ ID NO: 2439889 - RNA, 17 nt, Human
cauuccugaagaaccag

SEQ ID NO: 2439890 - RNA, 20 nt, Human
cauuccugaagaaccagucc

SEQ ID NO: 2439891 - RNA, 21 nt, Human
cauuccugaagaaccaguccc

SEQ ID NO: 2439892 - RNA, 21 nt, Human
cauuccugauaugauuuaaaa

SEQ ID NO: 2439893 - RNA, 19 nt, Human
cauuccugaaagaaacagu

SEQ ID NO: 2439894 - RNA, 13 nt, Human
cauuccugaaaga

SEQ ID NO: 2439895 - RNA, 23 nt, Human
cauuccucaccuuuucccgggga

SEQ ID NO: 2439896 - RNA, 13 nt, Human
cauuccucaggga

SEQ ID NO: 2439897 - RNA, 16 nt, Human
cauuccucagggacag

SEQ ID NO: 2439898 - RNA, 23 nt, Human
cauuccucagggacagagacacc

SEQ ID NO: 2439899 - RNA, 20 nt, Human
cauucugccugcccaggccc

SEQ ID NO: 2439900 - RNA, 19 nt, Human
cauucugccugcccaggcc

SEQ ID NO: 2439901 - RNA, 18 nt, Human
cauucugccugcccaggc

SEQ ID NO: 2439902 - RNA, 17 nt, Human
cauucugccugcccagg

SEQ ID NO: 2439903 - RNA, 16 nt, Human
cauucugccugcccag

SEQ ID NO: 2439904 - RNA, 15 nt, Human
cauucugccugccca

SEQ ID NO: 2439905 - RNA, 13 nt, Human
cauucugccugcc

SEQ ID NO: 2439906 - RNA, 12 nt, Human
cauucugccugc

SEQ ID NO: 2439907 - RNA, 13 nt, Human
cauucuggaauaa

SEQ ID NO: 2439908 - RNA, 21 nt, Human
cauucugucgccuuagcaugu

SEQ ID NO: 2439909 - RNA, 16 nt, Human
cauucuggaagugacu

SEQ ID NO: 2439910 - RNA, 12 nt, Human
cauucuggaagu

SEQ ID NO: 2439911 - RNA, 20 nt, Human
cauucugcuuucaucuuggu

SEQ ID NO: 2439912 - RNA, 22 nt, Human
cauucuuauaaauaugaagcuc

SEQ ID NO: 2439913 - RNA, 17 nt, Human
cauucuuauaaauauga

SEQ ID NO: 2439914 - RNA, 21 nt, Human
cauucuuauuucaugaaaauu

SEQ ID NO: 2439915 - RNA, 16 nt, Human
cauucuuauaaauaug

SEQ ID NO: 2439916 - RNA, 15 nt, Human
cauucuuauaaauau

SEQ ID NO: 2439917 - RNA, 14 nt, Human
cauucuuauaaaua

SEQ ID NO: 2439918 - RNA, 17 nt, Human
cauucuuagcucuuaau

SEQ ID NO: 2439919 - RNA, 14 nt, Human
cauucuuagcucuu

SEQ ID NO: 2439920 - RNA, 17 nt, Human
cauucuguuaaucauua

SEQ ID NO: 2439921 - RNA, 22 nt, Human
cauucugucgccuuagcauguu

SEQ ID NO: 2439922 - RNA, 15 nt, Human
cauucugucuugaag

SEQ ID NO: 2439923 - RNA, 13 nt, Human
cauuacugcaugc

SEQ ID NO: 2439924 - RNA, 16 nt, Human
cauuacugcaugcacu

SEQ ID NO: 2439925 - RNA, 23 nt, Human
cauuacugcaugcacuucuuaca

SEQ ID NO: 2439926 - RNA, 23 nt, Human
cauuacucaauugauaaacauuu

SEQ ID NO: 2439927 - RNA, 16 nt, Human
cauuaccacucaggca

SEQ ID NO: 2439928 - RNA, 21 nt, Human
cauuacuuuaccacccccaca

SEQ ID NO: 2439929 - RNA, 23 nt, Human
cauuacuuuaccacccccacacc

SEQ ID NO: 2439930 - RNA, 17 nt, Human
cauuagaaauagacagu

SEQ ID NO: 2439931 - RNA, 19 nt, Human
cauuagaauuauuuaaaca

SEQ ID NO: 2439932 - RNA, 14 nt, Human
cauuagaauuauuu

SEQ ID NO: 2439933 - RNA, 22 nt, Human
cauuagaagauauuagucuugg

SEQ ID NO: 2439934 - RNA, 18 nt, Human
cauuagaaauuagcugug

SEQ ID NO: 2439935 - RNA, 17 nt, Human
cauuauuggaauuaacc

SEQ ID NO: 2439936 - RNA, 18 nt, Human
cauuauuggaauuaaccu

SEQ ID NO: 2439937 - RNA, 20 nt, Human
cauuauuggaauuaaccugg

SEQ ID NO: 2439938 - RNA, 22 nt, Human
cauuauuggaauuaaccuggug

SEQ ID NO: 2439939 - RNA, 14 nt, Human
cauuauuggaauua

SEQ ID NO: 2439940 - RNA, 12 nt, Human
cauuauuggaau

SEQ ID NO: 2439941 - RNA, 16 nt, Human
cauucaaaaguugaaa

SEQ ID NO: 2439942 - RNA, 17 nt, Human
cauucaaaaguugaaau

SEQ ID NO: 2439943 - RNA, 22 nt, Human
cauuauuuuuccacuuuguucu

SEQ ID NO: 2439944 - RNA, 20 nt, Human
cauuauuuuuccacuuuguu

SEQ ID NO: 2439945 - RNA, 23 nt, Human
cauuauuggaauuaaccuggugc

SEQ ID NO: 2439946 - RNA, 23 nt, Human
cauucaaauuaaggguuaagaaa

SEQ ID NO: 2439947 - RNA, 12 nt, Human
cauucaacaaga

SEQ ID NO: 2439948 - RNA, 12 nt, Human
cauucaaauuaa

SEQ ID NO: 2439949 - RNA, 18 nt, Human
cauucaaaaguugaaauu

SEQ ID NO: 2439950 - RNA, 17 nt, Human
cauucaaguguaaaaua

SEQ ID NO: 2439951 - RNA, 17 nt, Human
cauucaacccuggagag

SEQ ID NO: 2439952 - RNA, 22 nt, Human
cauucacaguucuuugggccag

SEQ ID NO: 2439953 - RNA, 21 nt, Human
cauucaauuuauucaagaaaa

SEQ ID NO: 2439954 - RNA, 13 nt, Human
cauucaauguuua

SEQ ID NO: 2439955 - RNA, 22 nt, Human
cauucaauaagcaucaaacucu

SEQ ID NO: 2439956 - RNA, 20 nt, Human
cauucaauuuauucaagaaa

SEQ ID NO: 2439957 - RNA, 23 nt, Human
cauucacaguucuuugggccaga

SEQ ID NO: 2439958 - RNA, 13 nt, Human
cauucaccugccc

SEQ ID NO: 2439959 - RNA, 13 nt, Human
cauucacccagac

SEQ ID NO: 2439960 - RNA, 14 nt, Human
cauucacccagaca

SEQ ID NO: 2439961 - RNA, 21 nt, Human
cauucaaguguaaaauauuuu

SEQ ID NO: 2439962 - RNA, 20 nt, Human
cauucaaguguaaaauauuu

SEQ ID NO: 2439963 - RNA, 19 nt, Human
cauucaaguguaaaauauu

SEQ ID NO: 2439964 - RNA, 18 nt, Human
cauucaaguguaaaauau

SEQ ID NO: 2439965 - RNA, 23 nt, Human
cauucaaguguaaaauauuuuga

SEQ ID NO: 2439966 - RNA, 22 nt, Human
cauucaaguguaaaauauuuug

SEQ ID NO: 2439967 - RNA, 21 nt, Human
cauucaauaagcaucaaacuc

SEQ ID NO: 2439968 - RNA, 16 nt, Human
cauucaauacaagugu

SEQ ID NO: 2439969 - RNA, 13 nt, Human
cauuacagagagg

SEQ ID NO: 2439970 - RNA, 15 nt, Human
cauuacagagaggag

SEQ ID NO: 2439971 - RNA, 18 nt, Human
cauuacagagaggagaaa

SEQ ID NO: 2439972 - RNA, 20 nt, Human
cauuacagagaggagaaaca

SEQ ID NO: 2439973 - RNA, 12 nt, Human
cauuaauucuau

SEQ ID NO: 2439974 - RNA, 16 nt, Human
cauuacaaauugcuua

SEQ ID NO: 2439975 - RNA, 15 nt, Human
cauuaccacucaggc

SEQ ID NO: 2439976 - RNA, 14 nt, Human
cauuaccacucagg

SEQ ID NO: 2439977 - RNA, 13 nt, Human
cauuaccacucag

SEQ ID NO: 2439978 - RNA, 12 nt, Human
cauuaccacuca

SEQ ID NO: 2439979 - RNA, 21 nt, Human
cauuacagugggugccccccu

SEQ ID NO: 2439980 - RNA, 22 nt, Human
cauuacagagaggagaaacaca

SEQ ID NO: 2439981 - RNA, 14 nt, Human
cauuacagcuuaau

SEQ ID NO: 2439982 - RNA, 21 nt, Human
cauuacagagaggagaaacac

SEQ ID NO: 2439983 - RNA, 24 nt, Human
cauuacagggaaugccugagugcc

SEQ ID NO: 2439984 - RNA, 16 nt, Human
cauuacagcuuaauca

SEQ ID NO: 2439985 - RNA, 21 nt, Human
cauuaacaguuuuccaugaaa

SEQ ID NO: 2439986 - RNA, 22 nt, Human
cauuaacaguuuuccaugaaaa

SEQ ID NO: 2439987 - RNA, 16 nt, Human
cauuaacuaaucuauu

SEQ ID NO: 2439988 - RNA, 18 nt, Human
cauuaacuaaucuauugg

SEQ ID NO: 2439989 - RNA, 23 nt, Human
cauuaacaguuuuccaugaaaac

SEQ ID NO: 2439990 - RNA, 17 nt, Human
cauuaagaaaaucauau

SEQ ID NO: 2439991 - RNA, 14 nt, Human
cauuaagaaaauca

SEQ ID NO: 2439992 - RNA, 13 nt, Human
cauuaagaaaauc

SEQ ID NO: 2439993 - RNA, 12 nt, Human
cauuaagaaaau

SEQ ID NO: 2439994 - RNA, 11 nt, Human
cauuaagaaaa

SEQ ID NO: 2439995 - RNA, 16 nt, Human
cauuaacuucucugga

SEQ ID NO: 2439996 - RNA, 17 nt, Human
cauuaacuuagcaugug

SEQ ID NO: 2439997 - RNA, 17 nt, Human
cauuaagcccucuucca

SEQ ID NO: 2439998 - RNA, 15 nt, Human
cauuaagaaaaucau

SEQ ID NO: 2439999 - RNA, 16 nt, Human
cauuaagcccucuucc

SEQ ID NO: 2440000 - RNA, 20 nt, Human
cauuaagcccucuuccauca

SEQ ID NO: 2440001 - RNA, 16 nt, Human
cauuaagccuuccaca

SEQ ID NO: 2440002 - RNA, 17 nt, Human
cauuccccaggaggcca

SEQ ID NO: 2440003 - RNA, 15 nt, Human
cauuccccaggaggc

SEQ ID NO: 2440004 - RNA, 13 nt, Human
cauuccccaggag

SEQ ID NO: 2440005 - RNA, 15 nt, Human
cauuccauucuggaa

SEQ ID NO: 2440006 - RNA, 14 nt, Human
cauuccauucugga

SEQ ID NO: 2440007 - RNA, 22 nt, Human
cauuccagccccucuggucgcu

SEQ ID NO: 2440008 - RNA, 12 nt, Human
cauuccauccuu

SEQ ID NO: 2440009 - RNA, 14 nt, Human
cauuccauccuuga

SEQ ID NO: 2440010 - RNA, 19 nt, Human
cauuccagccccucugguc

SEQ ID NO: 2440011 - RNA, 18 nt, Human
cauuccagccccucuggu

SEQ ID NO: 2440012 - RNA, 15 nt, Human
cauuccagccccucu

SEQ ID NO: 2440013 - RNA, 13 nt, Human
cauuccagccccu

SEQ ID NO: 2440014 - RNA, 14 nt, Human
cauuccagaggaag

SEQ ID NO: 2440015 - RNA, 14 nt, Human
cauuccaagccuga

SEQ ID NO: 2440016 - RNA, 19 nt, Human
cauuccccaggaggccagc

SEQ ID NO: 2440017 - RNA, 18 nt, Human
cauuccccaggaggccag

SEQ ID NO: 2440018 - RNA, 20 nt, Human
cauuccccaggaggccagcc

SEQ ID NO: 2440019 - RNA, 13 nt, Human
cauuccccauggg

SEQ ID NO: 2440020 - RNA, 13 nt, Human
cauuccccaggug

SEQ ID NO: 2440021 - RNA, 17 nt, Human
cauuccccagguggcug

SEQ ID NO: 2440022 - RNA, 23 nt, Human
cauuccccagguggcugacccag

SEQ ID NO: 2440023 - RNA, 17 nt, Human
cauuccccgucucuggu

SEQ ID NO: 2440024 - RNA, 11 nt, Human
cauucccugag

SEQ ID NO: 2440025 - RNA, 17 nt, Human
cauucccugagucacca

SEQ ID NO: 2440026 - RNA, 18 nt, Human
cauuccuaaacuaucuuu

SEQ ID NO: 2440027 - RNA, 20 nt, Human
cauuccuaacacagcaugug

SEQ ID NO: 2440028 - RNA, 21 nt, Human
cauuccuaacacagcaugugu

SEQ ID NO: 2440029 - RNA, 13 nt, Human
cauuccuauuucu

SEQ ID NO: 2440030 - RNA, 13 nt, Human
cauuccucaccuu

SEQ ID NO: 2440031 - RNA, 23 nt, Human
cauuccuaacacagcauguguau

SEQ ID NO: 2440032 - RNA, 18 nt, Human
cauucccugagucaccag

SEQ ID NO: 2440033 - RNA, 20 nt, Human
cauucccugagucaccagga

SEQ ID NO: 2440034 - RNA, 21 nt, Human
cauucccugagucaccaggaa

SEQ ID NO: 2440035 - RNA, 22 nt, Human
cauuccgacaaccgaugcucca

SEQ ID NO: 2440036 - RNA, 16 nt, Human
cauucauuccauucug

SEQ ID NO: 2440037 - RNA, 17 nt, Human
cauucauuccauucugg

SEQ ID NO: 2440038 - RNA, 20 nt, Human
cauucauuuagcuaaacgga

SEQ ID NO: 2440039 - RNA, 14 nt, Human
cauucaugccuggc

SEQ ID NO: 2440040 - RNA, 15 nt, Human
cauucauuccauucu

SEQ ID NO: 2440041 - RNA, 16 nt, Human
cauucaugccuggcuu

SEQ ID NO: 2440042 - RNA, 18 nt, Human
cauucaucuuguguuuua

SEQ ID NO: 2440043 - RNA, 19 nt, Human
cauucauuuucuggguguu

SEQ ID NO: 2440044 - RNA, 12 nt, Human
cauuccaacaaa

SEQ ID NO: 2440045 - RNA, 15 nt, Human
cauucauucuuagcu

SEQ ID NO: 2440046 - RNA, 23 nt, Human
cauuccaagacaguauacagucc

SEQ ID NO: 2440047 - RNA, 15 nt, Human
cauuccaagacagua

SEQ ID NO: 2440048 - RNA, 17 nt, Human
cauuccaccuucccaug

SEQ ID NO: 2440049 - RNA, 13 nt, Human
cauuccagaggaa

SEQ ID NO: 2440050 - RNA, 22 nt, Human
cauuccaccuucccaugcccug

SEQ ID NO: 2440051 - RNA, 22 nt, Human
cauuccaacuaucucauuucca

SEQ ID NO: 2440052 - RNA, 14 nt, Human
cauuccaagacagu

SEQ ID NO: 2440053 - RNA, 13 nt, Human
cauuccaagacag

SEQ ID NO: 2440054 - RNA, 18 nt, Human
cauuccaacaaaggguuu

SEQ ID NO: 2440055 - RNA, 14 nt, Human
cauuccaacaaagg

SEQ ID NO: 2440056 - RNA, 16 nt, Human
cauuccaacagugagu

SEQ ID NO: 2440057 - RNA, 23 nt, Human
cauuccaacagcucaagucuucc

SEQ ID NO: 2440058 - RNA, 16 nt, Human
cauucacucuuccaga

SEQ ID NO: 2440059 - RNA, 14 nt, Human
cauucacucuucca

SEQ ID NO: 2440060 - RNA, 11 nt, Human
cauucacuuca

SEQ ID NO: 2440061 - RNA, 20 nt, Human
cauucacucuuccagaaucc

SEQ ID NO: 2440062 - RNA, 15 nt, Human
cauucaccugcccca

SEQ ID NO: 2440063 - RNA, 16 nt, Human
cauucaccugccccaa

SEQ ID NO: 2440064 - RNA, 19 nt, Human
cauucaccugccccaacuc

SEQ ID NO: 2440065 - RNA, 13 nt, Human
cauucacucuucc

SEQ ID NO: 2440066 - RNA, 20 nt, Human
cauucacccagacagcuccc

SEQ ID NO: 2440067 - RNA, 13 nt, Human
cauucagaaaaaa

SEQ ID NO: 2440068 - RNA, 18 nt, Human
cauucacuugcauuucuu

SEQ ID NO: 2440069 - RNA, 12 nt, Human
cauucagagagc

SEQ ID NO: 2440070 - RNA, 14 nt, Human
cauucacuucauaa

SEQ ID NO: 2440071 - RNA, 15 nt, Human
cauucacuucauaau

SEQ ID NO: 2440072 - RNA, 15 nt, Human
cauucacuugcauuu

SEQ ID NO: 2440073 - RNA, 15 nt, Human
cauucagagagcagc

SEQ ID NO: 2440074 - RNA, 15 nt, Human
cauucagcaagacaa

SEQ ID NO: 2440075 - RNA, 13 nt, Human
cauucaggaaaac

SEQ ID NO: 2440076 - RNA, 20 nt, Human
cauucaggaaaacugacaga

SEQ ID NO: 2440077 - RNA, 23 nt, Human
cauucaggaaaacugacagagga

SEQ ID NO: 2440078 - RNA, 17 nt, Human
cauucaggaagaugaaa

SEQ ID NO: 2440079 - RNA, 13 nt, Human
cauucaucucauu

SEQ ID NO: 2440080 - RNA, 15 nt, Human
cauucauaacuuuca

SEQ ID NO: 2440081 - RNA, 20 nt, Human
cauucagugauuacugucaa

SEQ ID NO: 2440082 - RNA, 21 nt, Human
cauucagugauuacugucaag

SEQ ID NO: 2440083 - RNA, 19 nt, Human
cauucagugauuacuguca

SEQ ID NO: 2440084 - RNA, 14 nt, Human
caucacuccccucc

SEQ ID NO: 2440085 - RNA, 13 nt, Human
caucacuccccuc

SEQ ID NO: 2440086 - RNA, 16 nt, Human
caucacucugcugcuu

SEQ ID NO: 2440087 - RNA, 15 nt, Human
caucacuccccucca

SEQ ID NO: 2440088 - RNA, 12 nt, Human
caucagggacag

SEQ ID NO: 2440089 - RNA, 14 nt, Human
caucagggacagga

SEQ ID NO: 2440090 - RNA, 18 nt, Human
caucagggacaggaugac

SEQ ID NO: 2440091 - RNA, 16 nt, Human
caucaguauugaagca

SEQ ID NO: 2440092 - RNA, 17 nt, Human
caucagguuccaucccg

SEQ ID NO: 2440093 - RNA, 16 nt, Human
caucagguuccauccc

SEQ ID NO: 2440094 - RNA, 20 nt, Human
caucaguauugaagcauuuu

SEQ ID NO: 2440095 - RNA, 22 nt, Human
caucaguauugaagcauuuuau

SEQ ID NO: 2440096 - RNA, 17 nt, Human
caucagucccuauguau

SEQ ID NO: 2440097 - RNA, 15 nt, Human
caucagucccuaugu

SEQ ID NO: 2440098 - RNA, 15 nt, Human
caucagugcucccuc

SEQ ID NO: 2440099 - RNA, 16 nt, Human
caucagugcucccuca

SEQ ID NO: 2440100 - RNA, 24 nt, Human
caucagugcucccucacaugucag

SEQ ID NO: 2440101 - RNA, 14 nt, Human
caucaguggagcca

SEQ ID NO: 2440102 - RNA, 16 nt, Human
caucaguggcauggcu

SEQ ID NO: 2440103 - RNA, 18 nt, Human
caucaguggcauggcucc

SEQ ID NO: 2440104 - RNA, 23 nt, Human
caucaguguacccccgcccaggc

SEQ ID NO: 2440105 - RNA, 22 nt, Human
caucaguguacccccgcccagg

SEQ ID NO: 2440106 - RNA, 21 nt, Human
caucaguguacccccgcccag

SEQ ID NO: 2440107 - RNA, 22 nt, Human
caucaguggcauggcuccaguc

SEQ ID NO: 2440108 - RNA, 22 nt, Human
caucaguuacucugaagggcau

SEQ ID NO: 2440109 - RNA, 18 nt, Human
caucaguuagagcugaca

SEQ ID NO: 2440110 - RNA, 16 nt, Human
caucaguuagagcuga

SEQ ID NO: 2440111 - RNA, 15 nt, Human
caucaguuagagcug

SEQ ID NO: 2440112 - RNA, 24 nt, Human
caucaguguacccccgcccaggcu

SEQ ID NO: 2440113 - RNA, 20 nt, Human
caucaguuagagcugacaca

SEQ ID NO: 2440114 - RNA, 12 nt, Human
caucauaaaaua

SEQ ID NO: 2440115 - RNA, 19 nt, Human
caucaccgacgcgucuccu

SEQ ID NO: 2440116 - RNA, 20 nt, Human
caucacccuuaccaugugcc

SEQ ID NO: 2440117 - RNA, 22 nt, Human
caucaccgacgcgucuccuguu

SEQ ID NO: 2440118 - RNA, 13 nt, Human
caucaccacaguu

SEQ ID NO: 2440119 - RNA, 12 nt, Human
caucacccgcua

SEQ ID NO: 2440120 - RNA, 13 nt, Human
caucaagacugga

SEQ ID NO: 2440121 - RNA, 22 nt, Human
caucaagaauggggaucacaga

SEQ ID NO: 2440122 - RNA, 14 nt, Human
caucaacugaauga

SEQ ID NO: 2440123 - RNA, 19 nt, Human
caucaagaagguagcuuga

SEQ ID NO: 2440124 - RNA, 20 nt, Human
caucaccaacgucugugcca

SEQ ID NO: 2440125 - RNA, 16 nt, Human
caucaccuuaggcagg

SEQ ID NO: 2440126 - RNA, 17 nt, Human
caucaccuuaggcaggg

SEQ ID NO: 2440127 - RNA, 18 nt, Human
caucaccuuaggcaggga

SEQ ID NO: 2440128 - RNA, 19 nt, Human
caucaccuuaggcagggaa

SEQ ID NO: 2440129 - RNA, 20 nt, Human
caucaccuuaggcagggaag

SEQ ID NO: 2440130 - RNA, 22 nt, Human
caucaccuuaggcagggaagug

SEQ ID NO: 2440131 - RNA, 23 nt, Human
caucaccuuaggcagggaagugu

SEQ ID NO: 2440132 - RNA, 14 nt, Human
caucacgccugugc

SEQ ID NO: 2440133 - RNA, 15 nt, Human
caucacgccugugca

SEQ ID NO: 2440134 - RNA, 12 nt, Human
caucaccucagg

SEQ ID NO: 2440135 - RNA, 13 nt, Human
caucaccucaggc

SEQ ID NO: 2440136 - RNA, 14 nt, Human
caucaccuccacca

SEQ ID NO: 2440137 - RNA, 13 nt, Human
caucaccuccacc

SEQ ID NO: 2440138 - RNA, 15 nt, Human
caucaccucaggcca

SEQ ID NO: 2440139 - RNA, 18 nt, Human
caucaccucaggccaggu

SEQ ID NO: 2440140 - RNA, 15 nt, Human
caucaugucuggcua

SEQ ID NO: 2440141 - RNA, 14 nt, Human
caucaugucuggcu

SEQ ID NO: 2440142 - RNA, 19 nt, Human
caucauguuuacagaggac

SEQ ID NO: 2440143 - RNA, 21 nt, Human
caucauguuuacagaggacag

SEQ ID NO: 2440144 - RNA, 13 nt, Human
caucauguuuaca

SEQ ID NO: 2440145 - RNA, 22 nt, Human
caucauguccccaaaccugcaa

SEQ ID NO: 2440146 - RNA, 21 nt, Human
caucauguccccaaaccugca

SEQ ID NO: 2440147 - RNA, 21 nt, Human
caucauggauucauuacagcu

SEQ ID NO: 2440148 - RNA, 21 nt, Human
caucaugcuuacaaaaaagaa

SEQ ID NO: 2440149 - RNA, 15 nt, Human
caucauggcuaucug

SEQ ID NO: 2440150 - RNA, 13 nt, Human
caucaugucuggc

SEQ ID NO: 2440151 - RNA, 16 nt, Human
caucaugcaucuuacu

SEQ ID NO: 2440152 - RNA, 17 nt, Human
caucaucaguggagcca

SEQ ID NO: 2440153 - RNA, 21 nt, Human
caucaucaaggcacugccuga

SEQ ID NO: 2440154 - RNA, 20 nt, Human
caucaucaaggcacugccug

SEQ ID NO: 2440155 - RNA, 19 nt, Human
caucaucaaggcacugccu

SEQ ID NO: 2440156 - RNA, 13 nt, Human
caucaucaaggca

SEQ ID NO: 2440157 - RNA, 23 nt, Human
caucauaggaagggaccaaggca

SEQ ID NO: 2440158 - RNA, 14 nt, Human
caucauauuauaca

SEQ ID NO: 2440159 - RNA, 16 nt, Human
caucauauuauacaga

SEQ ID NO: 2440160 - RNA, 22 nt, Human
caucauaggaagggaccaaggc

SEQ ID NO: 2440161 - RNA, 17 nt, Human
caucauaggaagggacc

SEQ ID NO: 2440162 - RNA, 15 nt, Human
caucauacacuuccu

SEQ ID NO: 2440163 - RNA, 22 nt, Human
caucauaaaauaaaguauauau

SEQ ID NO: 2440164 - RNA, 23 nt, Human
caucauaaaauaaaguauauaua

SEQ ID NO: 2440165 - RNA, 13 nt, Human
caucauaaaauaa

SEQ ID NO: 2440166 - RNA, 14 nt, Human
caucauaaaauaaa

SEQ ID NO: 2440167 - RNA, 18 nt, Human
caucauaaaauaaaguau

SEQ ID NO: 2440168 - RNA, 20 nt, Human
caucauaaaauaaaguauau

SEQ ID NO: 2440169 - RNA, 15 nt, Human
caucaucccagcugc

SEQ ID NO: 2440170 - RNA, 13 nt, Human
caucaucccagcu

SEQ ID NO: 2440171 - RNA, 16 nt, Human
caucauccuaagcuau

SEQ ID NO: 2440172 - RNA, 13 nt, Human
caucaucuccugc

SEQ ID NO: 2440173 - RNA, 20 nt, Human
caucaucuccugccuuccuc

SEQ ID NO: 2440174 - RNA, 21 nt, Human
caucaucuccugccuuccucc

SEQ ID NO: 2440175 - RNA, 19 nt, Human
caucccuuugaaacaagau

SEQ ID NO: 2440176 - RNA, 20 nt, Human
caucccuugaccaggccugg

SEQ ID NO: 2440177 - RNA, 23 nt, Human
caucccuugaccaggccugggcc

SEQ ID NO: 2440178 - RNA, 20 nt, Human
caucccuuuuugaaguguag

SEQ ID NO: 2440179 - RNA, 18 nt, Human
caucccuuuuugaagugu

SEQ ID NO: 2440180 - RNA, 17 nt, Human
caucccuuuuugaagug

SEQ ID NO: 2440181 - RNA, 16 nt, Human
caucccuuuuugaagu

SEQ ID NO: 2440182 - RNA, 13 nt, Human
caucccuuuuuga

SEQ ID NO: 2440183 - RNA, 16 nt, Human
caucccuuugcccaga

SEQ ID NO: 2440184 - RNA, 18 nt, Human
caucccuuaccugggaaa

SEQ ID NO: 2440185 - RNA, 19 nt, Human
caucccuugaccaggccug

SEQ ID NO: 2440186 - RNA, 16 nt, Human
cauccggcccccagag

SEQ ID NO: 2440187 - RNA, 13 nt, Human
cauccgaggcagg

SEQ ID NO: 2440188 - RNA, 14 nt, Human
cauccgaggcaggg

SEQ ID NO: 2440189 - RNA, 15 nt, Human
cauccgaggcagggu

SEQ ID NO: 2440190 - RNA, 23 nt, Human
cauccgaggcagggucaggagag

SEQ ID NO: 2440191 - RNA, 16 nt, Human
cauccgaggcaggguc

SEQ ID NO: 2440192 - RNA, 22 nt, Human
cauccgaggcagggucaggaga

SEQ ID NO: 2440193 - RNA, 13 nt, Human
caucccuccuggg

SEQ ID NO: 2440194 - RNA, 17 nt, Human
caucccugaggagccag

SEQ ID NO: 2440195 - RNA, 22 nt, Human
caucccugaaggccccgcccag

SEQ ID NO: 2440196 - RNA, 15 nt, Human
caucccucuggggcu

SEQ ID NO: 2440197 - RNA, 14 nt, Human
caucccuggaaggu

SEQ ID NO: 2440198 - RNA, 16 nt, Human
caucccugccugguca

SEQ ID NO: 2440199 - RNA, 15 nt, Human
caucccuggaaggug

SEQ ID NO: 2440200 - RNA, 19 nt, Human
caucccugauuccuguugu

SEQ ID NO: 2440201 - RNA, 18 nt, Human
caucccugaggagccagg

SEQ ID NO: 2440202 - RNA, 15 nt, Human
caucccugccagcuc

SEQ ID NO: 2440203 - RNA, 15 nt, Human
caucccugccugguc

SEQ ID NO: 2440204 - RNA, 14 nt, Human
caucccugccuggu

SEQ ID NO: 2440205 - RNA, 13 nt, Human
caucccugccugg

SEQ ID NO: 2440206 - RNA, 21 nt, Human
caucccugccagcucuucugc

SEQ ID NO: 2440207 - RNA, 18 nt, Human
cauccauaguaguaugau

SEQ ID NO: 2440208 - RNA, 14 nt, Human
cauccaucaucaug

SEQ ID NO: 2440209 - RNA, 16 nt, Human
cauccauaguaguaug

SEQ ID NO: 2440210 - RNA, 16 nt, Human
cauccauaaagaagca

SEQ ID NO: 2440211 - RNA, 13 nt, Human
cauccaucaucau

SEQ ID NO: 2440212 - RNA, 12 nt, Human
cauccauccagg

SEQ ID NO: 2440213 - RNA, 17 nt, Human
cauccauaaagaagcaa

SEQ ID NO: 2440214 - RNA, 14 nt, Human
cauccauaaagaag

SEQ ID NO: 2440215 - RNA, 22 nt, Human
cauccagugucucacagcccug

SEQ ID NO: 2440216 - RNA, 13 nt, Human
cauccaguucaug

SEQ ID NO: 2440217 - RNA, 23 nt, Human
cauccagucucccaacuuguauu

SEQ ID NO: 2440218 - RNA, 22 nt, Human
cauccacucuacccucccaccc

SEQ ID NO: 2440219 - RNA, 18 nt, Human
cauccacucuacccuccc

SEQ ID NO: 2440220 - RNA, 19 nt, Human
cauccacucuacccuccca

SEQ ID NO: 2440221 - RNA, 17 nt, Human
cauccagguucagcuug

SEQ ID NO: 2440222 - RNA, 23 nt, Human
cauccacugugccaugugccagg

SEQ ID NO: 2440223 - RNA, 17 nt, Human
cauccacugugccaugu

SEQ ID NO: 2440224 - RNA, 14 nt, Human
cauccacugugcca

SEQ ID NO: 2440225 - RNA, 15 nt, Human
caucauucucugucu

SEQ ID NO: 2440226 - RNA, 16 nt, Human
caucauucucugucuc

SEQ ID NO: 2440227 - RNA, 17 nt, Human
cauccacucuacccucc

SEQ ID NO: 2440228 - RNA, 18 nt, Human
caucauucaugcuacugc

SEQ ID NO: 2440229 - RNA, 21 nt, Human
caucauuauuugcagagacag

SEQ ID NO: 2440230 - RNA, 14 nt, Human
caucauuagaacaa

SEQ ID NO: 2440231 - RNA, 17 nt, Human
caucauuauaaacguga

SEQ ID NO: 2440232 - RNA, 13 nt, Human
caucauuagaaca

SEQ ID NO: 2440233 - RNA, 10 nt, Human
caucauuaga

SEQ ID NO: 2440234 - RNA, 17 nt, Human
caucauuccuugagaaa

SEQ ID NO: 2440235 - RNA, 22 nt, Human
caucauuccuugagaaaaacaa

SEQ ID NO: 2440236 - RNA, 12 nt, Human
caucauucucug

SEQ ID NO: 2440237 - RNA, 14 nt, Human
caucauucucuguc

SEQ ID NO: 2440238 - RNA, 19 nt, Human
caucaaauggaagacacau

SEQ ID NO: 2440239 - RNA, 17 nt, Human
caucaaauggaagacac

SEQ ID NO: 2440240 - RNA, 16 nt, Human
caucaaauggaagaca

SEQ ID NO: 2440241 - RNA, 15 nt, Human
caucaaauggaagac

SEQ ID NO: 2440242 - RNA, 13 nt, Human
caucaacaaaaau

SEQ ID NO: 2440243 - RNA, 15 nt, Human
caucaacaaaaauug

SEQ ID NO: 2440244 - RNA, 21 nt, Human
cauauuuguuaaauauuuaca

SEQ ID NO: 2440245 - RNA, 10 nt, Human
caucaacuga

SEQ ID NO: 2440246 - RNA, 12 nt, Human
caucaacugaau

SEQ ID NO: 2440247 - RNA, 14 nt, Human
caucaacaucuugg

SEQ ID NO: 2440248 - RNA, 14 nt, Human
cauauuuaaagaca

SEQ ID NO: 2440249 - RNA, 19 nt, Human
cauauuguuacugguacca

SEQ ID NO: 2440250 - RNA, 22 nt, Human
cauauugugccaauauguauug

SEQ ID NO: 2440251 - RNA, 21 nt, Human
cauauugugccaauauguauu

SEQ ID NO: 2440252 - RNA, 18 nt, Human
cauauuguggcacaagca

SEQ ID NO: 2440253 - RNA, 17 nt, Human
cauauuguggcacaagc

SEQ ID NO: 2440254 - RNA, 14 nt, Human
cauauuguguguaa

SEQ ID NO: 2440255 - RNA, 13 nt, Human
cauauuguuacug

SEQ ID NO: 2440256 - RNA, 22 nt, Human
cauauuuguauaguugcuugcc

SEQ ID NO: 2440257 - RNA, 18 nt, Human
cauauuuguauaguugcu

SEQ ID NO: 2440258 - RNA, 14 nt, Human
cauauuuguggaau

SEQ ID NO: 2440259 - RNA, 14 nt, Human
cauauuuguuaaau

SEQ ID NO: 2440260 - RNA, 19 nt, Human
cauauuuguuaaauauuua

SEQ ID NO: 2440261 - RNA, 20 nt, Human
cauauuuguuaaauauuuac

SEQ ID NO: 2440262 - RNA, 19 nt, Human
cauauuugcauauguauga

SEQ ID NO: 2440263 - RNA, 15 nt, Human
cauauuugcauaugu

SEQ ID NO: 2440264 - RNA, 17 nt, Human
cauauuugcauauguau

SEQ ID NO: 2440265 - RNA, 13 nt, Human
cauauuguugaaa

SEQ ID NO: 2440266 - RNA, 16 nt, Human
cauauuguugaaaggu

SEQ ID NO: 2440267 - RNA, 14 nt, Human
cauauuguuauuau

SEQ ID NO: 2440268 - RNA, 21 nt, Human
cauauugagcacuugcuguau

SEQ ID NO: 2440269 - RNA, 16 nt, Human
cauauugaauguuucc

SEQ ID NO: 2440270 - RNA, 16 nt, Human
cauaugaccucaugca

SEQ ID NO: 2440271 - RNA, 22 nt, Human
cauaugacauucaugccuggcu

SEQ ID NO: 2440272 - RNA, 17 nt, Human
cauauugauuuccguua

SEQ ID NO: 2440273 - RNA, 21 nt, Human
cauaugacauucaugccuggc

SEQ ID NO: 2440274 - RNA, 19 nt, Human
cauaugacauucaugccug

SEQ ID NO: 2440275 - RNA, 17 nt, Human
cauaugaaauuuaauau

SEQ ID NO: 2440276 - RNA, 22 nt, Human
cauauucuguuggccaguguga

SEQ ID NO: 2440277 - RNA, 20 nt, Human
cauaucugccuuuauugugu

SEQ ID NO: 2440278 - RNA, 14 nt, Human
cauaucuuuauuaa

SEQ ID NO: 2440279 - RNA, 15 nt, Human
cauaucuuuauuaau

SEQ ID NO: 2440280 - RNA, 16 nt, Human
cauaucuuuauuaauc

SEQ ID NO: 2440281 - RNA, 22 nt, Human
cauaugaaaaaaaugcauuuua

SEQ ID NO: 2440282 - RNA, 11 nt, Human
cauaugaaaaa

SEQ ID NO: 2440283 - RNA, 17 nt, Human
cauaucuuuauuaauca

SEQ ID NO: 2440284 - RNA, 18 nt, Human
cauaugaaaauacaacuu

SEQ ID NO: 2440285 - RNA, 18 nt, Human
cauaucugccuuuauugu

SEQ ID NO: 2440286 - RNA, 15 nt, Human
cauaucugccuuuau

SEQ ID NO: 2440287 - RNA, 13 nt, Human
cauaucugccuuu

SEQ ID NO: 2440288 - RNA, 12 nt, Human
cauaucugccuu

SEQ ID NO: 2440289 - RNA, 11 nt, Human
cauaucugccu

SEQ ID NO: 2440290 - RNA, 22 nt, Human
cauauugcacaugucuuaauga

SEQ ID NO: 2440291 - RNA, 23 nt, Human
cauauugcacaugucuuaaugaa

SEQ ID NO: 2440292 - RNA, 21 nt, Human
cauauugcacaugucuuaaug

SEQ ID NO: 2440293 - RNA, 20 nt, Human
cauauugcacaugucuuaau

SEQ ID NO: 2440294 - RNA, 19 nt, Human
cauauugcacaugucuuaa

SEQ ID NO: 2440295 - RNA, 18 nt, Human
cauauugcacaugucuua

SEQ ID NO: 2440296 - RNA, 17 nt, Human
cauauugcacaugucuu

SEQ ID NO: 2440297 - RNA, 16 nt, Human
cauauugcacaugucu

SEQ ID NO: 2440298 - RNA, 15 nt, Human
cauauugcacauguc

SEQ ID NO: 2440299 - RNA, 14 nt, Human
cauauugcacaugu

SEQ ID NO: 2440300 - RNA, 21 nt, Human
cauauugauuuccguuaaaau

SEQ ID NO: 2440301 - RNA, 16 nt, Human
cauauugcugagagaa

SEQ ID NO: 2440302 - RNA, 19 nt, Human
cauauugcuuuuucuaaug

SEQ ID NO: 2440303 - RNA, 17 nt, Human
cauauugcugagagaaa

SEQ ID NO: 2440304 - RNA, 21 nt, Human
cauauugcugagagaaauaug

SEQ ID NO: 2440305 - RNA, 16 nt, Human
cauauugguauucacu

SEQ ID NO: 2440306 - RNA, 14 nt, Human
cauauugguauuca

SEQ ID NO: 2440307 - RNA, 23 nt, Human
cauauugcugagagaaauaugga

SEQ ID NO: 2440308 - RNA, 23 nt, Human
cauauuguacacuuuuuugggga

SEQ ID NO: 2440309 - RNA, 20 nt, Human
cauauuguacacuuuuuugg

SEQ ID NO: 2440310 - RNA, 18 nt, Human
cauauugugauucugccu

SEQ ID NO: 2440311 - RNA, 20 nt, Human
cauauugugccaauauguau

SEQ ID NO: 2440312 - RNA, 13 nt, Human
cauauugugccaa

SEQ ID NO: 2440313 - RNA, 20 nt, Human
cauauugugauucugccuuu

SEQ ID NO: 2440314 - RNA, 15 nt, Human
cauauuguacacuuu

SEQ ID NO: 2440315 - RNA, 14 nt, Human
cauauuguacacuu

SEQ ID NO: 2440316 - RNA, 13 nt, Human
cauauuguacacu

SEQ ID NO: 2440317 - RNA, 12 nt, Human
cauauuguacac

SEQ ID NO: 2440318 - RNA, 11 nt, Human
cauauuguaca

SEQ ID NO: 2440319 - RNA, 20 nt, Human
cauauaacuuauauuguaag

SEQ ID NO: 2440320 - RNA, 22 nt, Human
cauauaacuuauauuguaagaa

SEQ ID NO: 2440321 - RNA, 23 nt, Human
cauauaacuuauauuguaagaaa

SEQ ID NO: 2440322 - RNA, 22 nt, Human
cauagugaccggcugcuuuucc

SEQ ID NO: 2440323 - RNA, 18 nt, Human
cauagugaccggcugcuu

SEQ ID NO: 2440324 - RNA, 19 nt, Human
cauagugaugguuccccug

SEQ ID NO: 2440325 - RNA, 18 nt, Human
cauagugaugguuccccu

SEQ ID NO: 2440326 - RNA, 13 nt, Human
cauauauaacaau

SEQ ID NO: 2440327 - RNA, 14 nt, Human
cauauaaguuugaa

SEQ ID NO: 2440328 - RNA, 16 nt, Human
cauauaagugauugcu

SEQ ID NO: 2440329 - RNA, 23 nt, Human
cauauaagauucauauuuacuuc

SEQ ID NO: 2440330 - RNA, 17 nt, Human
cauauaugaggacuugu

SEQ ID NO: 2440331 - RNA, 22 nt, Human
cauauauggggggccaacacca

SEQ ID NO: 2440332 - RNA, 21 nt, Human
cauauauggggggccaacacc

SEQ ID NO: 2440333 - RNA, 15 nt, Human
cauauauaacaaugc

SEQ ID NO: 2440334 - RNA, 23 nt, Human
cauauauauguuuuaagaggcag

SEQ ID NO: 2440335 - RNA, 15 nt, Human
cauauccugccucag

SEQ ID NO: 2440336 - RNA, 14 nt, Human
cauauccugccuca

SEQ ID NO: 2440337 - RNA, 13 nt, Human
cauauccugccuc

SEQ ID NO: 2440338 - RNA, 12 nt, Human
cauauccugccu

SEQ ID NO: 2440339 - RNA, 11 nt, Human
cauauccugcc

SEQ ID NO: 2440340 - RNA, 20 nt, Human
cauaguaguaugaugauaca

SEQ ID NO: 2440341 - RNA, 18 nt, Human
cauaguauuccauugugu

SEQ ID NO: 2440342 - RNA, 13 nt, Human
cauagucacaugg

SEQ ID NO: 2440343 - RNA, 22 nt, Human
cauaguaccauuuauacaaauu

SEQ ID NO: 2440344 - RNA, 21 nt, Human
cauaguauuccauugugugag

SEQ ID NO: 2440345 - RNA, 23 nt, Human
cauagucauguaagcugaaaaua

SEQ ID NO: 2440346 - RNA, 17 nt, Human
cauaguaugguggcugg

SEQ ID NO: 2440347 - RNA, 16 nt, Human
cauaguaugguggcug

SEQ ID NO: 2440348 - RNA, 18 nt, Human
cauaguaccaaucauuuu

SEQ ID NO: 2440349 - RNA, 16 nt, Human
cauaguaccaaucauu

SEQ ID NO: 2440350 - RNA, 23 nt, Human
cauaguaacuucuuauggaauug

SEQ ID NO: 2440351 - RNA, 24 nt, Human
cauaguaacuucuuauggaauuga

SEQ ID NO: 2440352 - RNA, 21 nt, Human
cauaguaacuucuuauggaau

SEQ ID NO: 2440353 - RNA, 22 nt, Human
cauaguaacuucuuauggaauu

SEQ ID NO: 2440354 - RNA, 15 nt, Human
cauaguaugguggcu

SEQ ID NO: 2440355 - RNA, 22 nt, Human
cauaguaccaaucauuuuaauu

SEQ ID NO: 2440356 - RNA, 16 nt, Human
cauaguaccauuuaua

SEQ ID NO: 2440357 - RNA, 19 nt, Human
cauaguaccauuuauacaa

SEQ ID NO: 2440358 - RNA, 20 nt, Human
cauaguaccauuuauacaaa

SEQ ID NO: 2440359 - RNA, 21 nt, Human
cauaguacucuuuguagcaaa

SEQ ID NO: 2440360 - RNA, 19 nt, Human
cagugcugucugaucugug

SEQ ID NO: 2440361 - RNA, 15 nt, Human
cagugcuguacuuga

SEQ ID NO: 2440362 - RNA, 22 nt, Human
cagugcugucugaucugugcuu

SEQ ID NO: 2440363 - RNA, 12 nt, Human
cagugcuguggc

SEQ ID NO: 2440364 - RNA, 13 nt, Human
cagugcuguggcc

SEQ ID NO: 2440365 - RNA, 15 nt, Human
cagugcuguggccug

SEQ ID NO: 2440366 - RNA, 18 nt, Human
cagugcuguggccugggc

SEQ ID NO: 2440367 - RNA, 20 nt, Human
cagugcuguggccugggcaa

SEQ ID NO: 2440368 - RNA, 19 nt, Human
cagugcuguggccugggca

SEQ ID NO: 2440369 - RNA, 14 nt, Human
cagugcuucagccu

SEQ ID NO: 2440370 - RNA, 15 nt, Human
cagugcuucagccug

SEQ ID NO: 2440371 - RNA, 16 nt, Human
cagugcuucagccuga

SEQ ID NO: 2440372 - RNA, 17 nt, Human
cagugcuucagccugag

SEQ ID NO: 2440373 - RNA, 18 nt, Human
cagugcuucagccugagg

SEQ ID NO: 2440374 - RNA, 19 nt, Human
cagugcuucagccugaggc

SEQ ID NO: 2440375 - RNA, 20 nt, Human
cagugcuucagccugaggcu

SEQ ID NO: 2440376 - RNA, 18 nt, Human
cagugcuugccacagagc

SEQ ID NO: 2440377 - RNA, 17 nt, Human
cagugcuugccacagag

SEQ ID NO: 2440378 - RNA, 15 nt, Human
cagugcuugccacag

SEQ ID NO: 2440379 - RNA, 12 nt, Human
cagugcuucuca

SEQ ID NO: 2440380 - RNA, 17 nt, Human
cagugcuucucuacaga

SEQ ID NO: 2440381 - RNA, 14 nt, Human
cagugcuugccaca

SEQ ID NO: 2440382 - RNA, 20 nt, Human
cagugcuugaguuuggggaa

SEQ ID NO: 2440383 - RNA, 19 nt, Human
cagugcuugauugcgugga

SEQ ID NO: 2440384 - RNA, 13 nt, Human
caucuuuccuguc

SEQ ID NO: 2440385 - RNA, 19 nt, Human
caucuuuccugauggcagg

SEQ ID NO: 2440386 - RNA, 16 nt, Human
caucuuuaucuguucu

SEQ ID NO: 2440387 - RNA, 22 nt, Human
caucuucuuugcagccugggug

SEQ ID NO: 2440388 - RNA, 22 nt, Human
caucuuuacaaaacuacaugag

SEQ ID NO: 2440389 - RNA, 17 nt, Human
caucuuuaucuguucuu

SEQ ID NO: 2440390 - RNA, 12 nt, Human
caucuuucacau

SEQ ID NO: 2440391 - RNA, 22 nt, Human
caucuuucaucaaucauuguac

SEQ ID NO: 2440392 - RNA, 21 nt, Human
caucuuucaucaaucauugua

SEQ ID NO: 2440393 - RNA, 13 nt, Human
caucuuucacauu

SEQ ID NO: 2440394 - RNA, 17 nt, Human
caucuuucaucaaucau

SEQ ID NO: 2440395 - RNA, 14 nt, Human
caucuuucacacuu

SEQ ID NO: 2440396 - RNA, 17 nt, Human
caucuuugcagguugcu

SEQ ID NO: 2440397 - RNA, 15 nt, Human
caucuuugccuuggg

SEQ ID NO: 2440398 - RNA, 17 nt, Human
caucuuugccuugggcu

SEQ ID NO: 2440399 - RNA, 23 nt, Human
caucuuugccuugggcugcuccu

SEQ ID NO: 2440400 - RNA, 22 nt, Human
caucuuugccuugggcugcucc

SEQ ID NO: 2440401 - RNA, 16 nt, Human
caucuuucuucuauuu

SEQ ID NO: 2440402 - RNA, 21 nt, Human
caucuuucuucuauuuuauuc

SEQ ID NO: 2440403 - RNA, 21 nt, Human
caucuuuccugauggcaggau

SEQ ID NO: 2440404 - RNA, 14 nt, Human
caugaaaacacauu

SEQ ID NO: 2440405 - RNA, 15 nt, Human
caugaaaacacauuu

SEQ ID NO: 2440406 - RNA, 16 nt, Human
caugaaaacacauuuu

SEQ ID NO: 2440407 - RNA, 17 nt, Human
caugaaaacacauuuuu

SEQ ID NO: 2440408 - RNA, 13 nt, Human
caugaaaacacau

SEQ ID NO: 2440409 - RNA, 16 nt, Human
caucuuuugugagaug

SEQ ID NO: 2440410 - RNA, 21 nt, Human
caucuuuugugagauguaauu

SEQ ID NO: 2440411 - RNA, 14 nt, Human
caucuuuugugaga

SEQ ID NO: 2440412 - RNA, 21 nt, Human
caucuuuucuugccucugucc

SEQ ID NO: 2440413 - RNA, 16 nt, Human
caucuuuucuugccuc

SEQ ID NO: 2440414 - RNA, 14 nt, Human
caucuuuucuugcc

SEQ ID NO: 2440415 - RNA, 13 nt, Human
caucuuuuacauu

SEQ ID NO: 2440416 - RNA, 15 nt, Human
caugaaauaugcauc

SEQ ID NO: 2440417 - RNA, 14 nt, Human
caugaaauaugcau

SEQ ID NO: 2440418 - RNA, 13 nt, Human
caugaaauaugca

SEQ ID NO: 2440419 - RNA, 15 nt, Human
caugaacauguacug

SEQ ID NO: 2440420 - RNA, 13 nt, Human
caugaacauguac

SEQ ID NO: 2440421 - RNA, 19 nt, Human
caugaaccucaagcugcau

SEQ ID NO: 2440422 - RNA, 23 nt, Human
caugaacagaaaacauucugauu

SEQ ID NO: 2440423 - RNA, 22 nt, Human
caugaacagaaaacauucugau

SEQ ID NO: 2440424 - RNA, 20 nt, Human
caugaacacacuguguccug

SEQ ID NO: 2440425 - RNA, 18 nt, Human
caugaacacacugugucc

SEQ ID NO: 2440426 - RNA, 17 nt, Human
caugaacacacuguguc

SEQ ID NO: 2440427 - RNA, 16 nt, Human
caugaacacacugugu

SEQ ID NO: 2440428 - RNA, 14 nt, Human
caugaaauuacuua

SEQ ID NO: 2440429 - RNA, 24 nt, Human
caugaaauugucuagcagagcagg

SEQ ID NO: 2440430 - RNA, 23 nt, Human
caugaacuucgcaucaaaagaca

SEQ ID NO: 2440431 - RNA, 21 nt, Human
caugaacuucgcaucaaaaga

SEQ ID NO: 2440432 - RNA, 16 nt, Human
caugaacauguuccug

SEQ ID NO: 2440433 - RNA, 20 nt, Human
caugaaccucaagcugcauc

SEQ ID NO: 2440434 - RNA, 12 nt, Human
caugaagacaga

SEQ ID NO: 2440435 - RNA, 13 nt, Human
caugaagaccaca

SEQ ID NO: 2440436 - RNA, 14 nt, Human
caugaagacaggau

SEQ ID NO: 2440437 - RNA, 17 nt, Human
caugaagaccacaucca

SEQ ID NO: 2440438 - RNA, 14 nt, Human
caugaagacaggac

SEQ ID NO: 2440439 - RNA, 15 nt, Human
caugaagacaggaca

SEQ ID NO: 2440440 - RNA, 16 nt, Human
caugaagacaggacag

SEQ ID NO: 2440441 - RNA, 17 nt, Human
caugaagacaggacagu

SEQ ID NO: 2440442 - RNA, 19 nt, Human
caugaaaacacauuuuucu

SEQ ID NO: 2440443 - RNA, 21 nt, Human
caugaaaacacauuuuucuua

SEQ ID NO: 2440444 - RNA, 21 nt, Human
caugaaaacguuuuauugugu

SEQ ID NO: 2440445 - RNA, 22 nt, Human
caugaaaacguuuuauuguguu

SEQ ID NO: 2440446 - RNA, 23 nt, Human
caugaaaaagcagcuaccaggug

SEQ ID NO: 2440447 - RNA, 16 nt, Human
caugaaaacguuuuau

SEQ ID NO: 2440448 - RNA, 17 nt, Human
caugaaaacguuuuauu

SEQ ID NO: 2440449 - RNA, 19 nt, Human
caugaaaacguuuuauugu

SEQ ID NO: 2440450 - RNA, 18 nt, Human
caugaaaaaaggacaauu

SEQ ID NO: 2440451 - RNA, 12 nt, Human
caugaaaaagca

SEQ ID NO: 2440452 - RNA, 13 nt, Human
caugaaaaagcag

SEQ ID NO: 2440453 - RNA, 15 nt, Human
caugaaaaagcagcu

SEQ ID NO: 2440454 - RNA, 18 nt, Human
caugaaaaagcagcuacc

SEQ ID NO: 2440455 - RNA, 19 nt, Human
caugaaaaagcagcuacca

SEQ ID NO: 2440456 - RNA, 13 nt, Human
caugaaaacguuu

SEQ ID NO: 2440457 - RNA, 22 nt, Human
caugaaauauagaucaguuaua

SEQ ID NO: 2440458 - RNA, 15 nt, Human
caugaaacuccaccu

SEQ ID NO: 2440459 - RNA, 14 nt, Human
caugaaacuccacc

SEQ ID NO: 2440460 - RNA, 19 nt, Human
caugaaacagaaacaaaaa

SEQ ID NO: 2440461 - RNA, 22 nt, Human
caugaaaccuuauuuuuuccca

SEQ ID NO: 2440462 - RNA, 13 nt, Human
caugaaacagaaa

SEQ ID NO: 2440463 - RNA, 15 nt, Human
caugaaacagaaaca

SEQ ID NO: 2440464 - RNA, 13 nt, Human
caugaaacaaagc

SEQ ID NO: 2440465 - RNA, 22 nt, Human
caugaaaaugcaacaacaugua

SEQ ID NO: 2440466 - RNA, 15 nt, Human
caugaaaaugcaaca

SEQ ID NO: 2440467 - RNA, 13 nt, Human
caugaaaaugcaa

SEQ ID NO: 2440468 - RNA, 23 nt, Human
caugagcaucaggccaggcccuc

SEQ ID NO: 2440469 - RNA, 22 nt, Human
caugagcaucaggccaggcccu

SEQ ID NO: 2440470 - RNA, 21 nt, Human
caugagcaucaggccaggccc

SEQ ID NO: 2440471 - RNA, 20 nt, Human
caugagcaucaggccaggcc

SEQ ID NO: 2440472 - RNA, 18 nt, Human
caugagcaucaggccagg

SEQ ID NO: 2440473 - RNA, 17 nt, Human
caugagcaucaggccag

SEQ ID NO: 2440474 - RNA, 16 nt, Human
caugagcaucaggcca

SEQ ID NO: 2440475 - RNA, 15 nt, Human
caugagcaucaggcc

SEQ ID NO: 2440476 - RNA, 21 nt, Human
caugagccucagcauccuggc

SEQ ID NO: 2440477 - RNA, 20 nt, Human
caugagccucagcauccugg

SEQ ID NO: 2440478 - RNA, 19 nt, Human
caugagccucagcauccug

SEQ ID NO: 2440479 - RNA, 18 nt, Human
caugagccucagcauccu

SEQ ID NO: 2440480 - RNA, 17 nt, Human
caugagccucagcaucc

SEQ ID NO: 2440481 - RNA, 15 nt, Human
caugagccucagcau

SEQ ID NO: 2440482 - RNA, 21 nt, Human
caugagcaccccaaggcugcg

SEQ ID NO: 2440483 - RNA, 16 nt, Human
caugagcaccccaagg

SEQ ID NO: 2440484 - RNA, 12 nt, Human
caugagccucag

SEQ ID NO: 2440485 - RNA, 19 nt, Human
caugagaccacuguuauca

SEQ ID NO: 2440486 - RNA, 17 nt, Human
caugagaccacuguuau

SEQ ID NO: 2440487 - RNA, 18 nt, Human
caugagauaauaugcaga

SEQ ID NO: 2440488 - RNA, 17 nt, Human
caugagaggcucugugc

SEQ ID NO: 2440489 - RNA, 23 nt, Human
caugagagaauuguaucauuuga

SEQ ID NO: 2440490 - RNA, 13 nt, Human
caugagcaucagg

SEQ ID NO: 2440491 - RNA, 16 nt, Human
caugagcaauucuccu

SEQ ID NO: 2440492 - RNA, 22 nt, Human
caugagaugauacauccaaagc

SEQ ID NO: 2440493 - RNA, 20 nt, Human
caugagaucuaggugaggau

SEQ ID NO: 2440494 - RNA, 18 nt, Human
caugagaagagggccugu

SEQ ID NO: 2440495 - RNA, 17 nt, Human
caugagaagagggccug

SEQ ID NO: 2440496 - RNA, 16 nt, Human
caugagaagagggccu

SEQ ID NO: 2440497 - RNA, 15 nt, Human
caugagaagagggcc

SEQ ID NO: 2440498 - RNA, 22 nt, Human
caugagaaguugauauagaaca

SEQ ID NO: 2440499 - RNA, 22 nt, Human
caugagaagagggccuguggga

SEQ ID NO: 2440500 - RNA, 12 nt, Human
caugagaaucua

SEQ ID NO: 2440501 - RNA, 19 nt, Human
caugagaaucuauauuuaa

SEQ ID NO: 2440502 - RNA, 20 nt, Human
caugagaauaagagaaagaa

SEQ ID NO: 2440503 - RNA, 14 nt, Human
caugagacacaucu

SEQ ID NO: 2440504 - RNA, 19 nt, Human
caugagacacaucuccucc

SEQ ID NO: 2440505 - RNA, 21 nt, Human
caugacuuuuccauguaucua

SEQ ID NO: 2440506 - RNA, 16 nt, Human
caugagaacaaacaga

SEQ ID NO: 2440507 - RNA, 14 nt, Human
caugagaagagggc

SEQ ID NO: 2440508 - RNA, 15 nt, Human
caugacuuuuccaug

SEQ ID NO: 2440509 - RNA, 22 nt, Human
caugacuugagaaacaaauaau

SEQ ID NO: 2440510 - RNA, 17 nt, Human
caugacucggggguggg

SEQ ID NO: 2440511 - RNA, 20 nt, Human
caugacucguauaugucuca

SEQ ID NO: 2440512 - RNA, 23 nt, Human
caugacucguauaugucucaggu

SEQ ID NO: 2440513 - RNA, 19 nt, Human
caugaccuaguuuuccaug

SEQ ID NO: 2440514 - RNA, 14 nt, Human
caugaccugugacc

SEQ ID NO: 2440515 - RNA, 16 nt, Human
caugaccugugaccag

SEQ ID NO: 2440516 - RNA, 21 nt, Human
caugaccuuacauuuccuggg

SEQ ID NO: 2440517 - RNA, 17 nt, Human
caugaccugugaccagc

SEQ ID NO: 2440518 - RNA, 18 nt, Human
caugaccugugaccagca

SEQ ID NO: 2440519 - RNA, 19 nt, Human
caugaagauguagaggaga

SEQ ID NO: 2440520 - RNA, 17 nt, Human
caugaagauauuuuucc

SEQ ID NO: 2440521 - RNA, 18 nt, Human
caugaagauucuuuccca

SEQ ID NO: 2440522 - RNA, 18 nt, Human
caugaagauguagaggag

SEQ ID NO: 2440523 - RNA, 18 nt, Human
caugaagagauuuuucau

SEQ ID NO: 2440524 - RNA, 22 nt, Human
caugaggccacugcugcuucuc

SEQ ID NO: 2440525 - RNA, 21 nt, Human
caugaggccucaguggacuuu

SEQ ID NO: 2440526 - RNA, 24 nt, Human
caugaggcaaugucaggaacagaa

SEQ ID NO: 2440527 - RNA, 16 nt, Human
caugaggccacugcug

SEQ ID NO: 2440528 - RNA, 16 nt, Human
caugaggaguugcugu

SEQ ID NO: 2440529 - RNA, 15 nt, Human
caugaggaguugcug

SEQ ID NO: 2440530 - RNA, 22 nt, Human
caugaggcaaugucaggaacag

SEQ ID NO: 2440531 - RNA, 23 nt, Human
caugaggcaaugucaggaacaga

SEQ ID NO: 2440532 - RNA, 16 nt, Human
caugagguacugagag

SEQ ID NO: 2440533 - RNA, 17 nt, Human
caugagggaucacaggg

SEQ ID NO: 2440534 - RNA, 18 nt, Human
caugagggaucacagggc

SEQ ID NO: 2440535 - RNA, 16 nt, Human
caugaggggcccgagc

SEQ ID NO: 2440536 - RNA, 19 nt, Human
caugagggaucacagggcc

SEQ ID NO: 2440537 - RNA, 20 nt, Human
caugagggaucacagggccc

SEQ ID NO: 2440538 - RNA, 12 nt, Human
caugaggaacua

SEQ ID NO: 2440539 - RNA, 14 nt, Human
caugagcuuuuaua

SEQ ID NO: 2440540 - RNA, 23 nt, Human
caugaggaacaaggcaaggcugu

SEQ ID NO: 2440541 - RNA, 20 nt, Human
caugaggacaugauggagcg

SEQ ID NO: 2440542 - RNA, 21 nt, Human
caugaggacaugauggagcgc

SEQ ID NO: 2440543 - RNA, 22 nt, Human
caugaggacaugauggagcgca

SEQ ID NO: 2440544 - RNA, 21 nt, Human
caugaggaacaaggcaaggcu

SEQ ID NO: 2440545 - RNA, 20 nt, Human
caugaggaacaaggcaaggc

SEQ ID NO: 2440546 - RNA, 17 nt, Human
caugaggaacaaggcaa

SEQ ID NO: 2440547 - RNA, 16 nt, Human
caugaggaacaaggca

SEQ ID NO: 2440548 - RNA, 23 nt, Human
caugagccucagcauccuggcac

SEQ ID NO: 2440549 - RNA, 22 nt, Human
caugagccucagcauccuggca

SEQ ID NO: 2440550 - RNA, 23 nt, Human
caugagcuauuuccauuccagaa

SEQ ID NO: 2440551 - RNA, 22 nt, Human
caugagcuauuuccauuccaga

SEQ ID NO: 2440552 - RNA, 16 nt, Human
caugagcuauuuccau

SEQ ID NO: 2440553 - RNA, 20 nt, Human
caugagcuacgccugccucc

SEQ ID NO: 2440554 - RNA, 19 nt, Human
caugagcuacgccugccuc

SEQ ID NO: 2440555 - RNA, 13 nt, Human
caugagcuccaga

SEQ ID NO: 2440556 - RNA, 14 nt, Human
caugagcuccagac

SEQ ID NO: 2440557 - RNA, 15 nt, Human
caugagcuccagacc

SEQ ID NO: 2440558 - RNA, 16 nt, Human
caugagcuccagaccc

SEQ ID NO: 2440559 - RNA, 17 nt, Human
caugagcuccagacccc

SEQ ID NO: 2440560 - RNA, 19 nt, Human
caugagcuccagaccccca

SEQ ID NO: 2440561 - RNA, 21 nt, Human
caugagcuccagacccccagc

SEQ ID NO: 2440562 - RNA, 23 nt, Human
caugagcuccagacccccagcaa

SEQ ID NO: 2440563 - RNA, 15 nt, Human
caugaguccccuguu

SEQ ID NO: 2440564 - RNA, 14 nt, Human
caugaguccccugu

SEQ ID NO: 2440565 - RNA, 20 nt, Human
caugaguccuugaaaauauu

SEQ ID NO: 2440566 - RNA, 19 nt, Human
caugaguccuugaaaauau

SEQ ID NO: 2440567 - RNA, 18 nt, Human
caugaguccuugaaaaua

SEQ ID NO: 2440568 - RNA, 17 nt, Human
caugaguccuugaaaau

SEQ ID NO: 2440569 - RNA, 14 nt, Human
caugagugcgugcu

SEQ ID NO: 2440570 - RNA, 21 nt, Human
caugaguccuugaaaauauuu

SEQ ID NO: 2440571 - RNA, 14 nt, Human
caugagugaauaaa

SEQ ID NO: 2440572 - RNA, 23 nt, Human
caugaguccccuguuuguuucug

SEQ ID NO: 2440573 - RNA, 19 nt, Human
caugagucccagugggagg

SEQ ID NO: 2440574 - RNA, 18 nt, Human
caugagucccagugggag

SEQ ID NO: 2440575 - RNA, 17 nt, Human
caugagucccaguggga

SEQ ID NO: 2440576 - RNA, 16 nt, Human
caugagucccaguggg

SEQ ID NO: 2440577 - RNA, 15 nt, Human
caugagucccagugg

SEQ ID NO: 2440578 - RNA, 14 nt, Human
caugagucccagug

SEQ ID NO: 2440579 - RNA, 12 nt, Human
caugagucccag

SEQ ID NO: 2440580 - RNA, 13 nt, Human
caugaguccccug

SEQ ID NO: 2440581 - RNA, 19 nt, Human
caugagguacugagaguga

SEQ ID NO: 2440582 - RNA, 20 nt, Human
caugaggggcccgagcagaa

SEQ ID NO: 2440583 - RNA, 22 nt, Human
caugaucccuguguugucucua

SEQ ID NO: 2440584 - RNA, 21 nt, Human
caugaucccuguguugucucu

SEQ ID NO: 2440585 - RNA, 15 nt, Human
caugaucucccugcc

SEQ ID NO: 2440586 - RNA, 13 nt, Human
caugaucucccug

SEQ ID NO: 2440587 - RNA, 16 nt, Human
caugaucucccugccg

SEQ ID NO: 2440588 - RNA, 17 nt, Human
caugaucucccugccgc

SEQ ID NO: 2440589 - RNA, 18 nt, Human
caugaucucccugccgcc

SEQ ID NO: 2440590 - RNA, 19 nt, Human
caugaucucccugccgccu

SEQ ID NO: 2440591 - RNA, 15 nt, Human
caugaucuugagcaa

SEQ ID NO: 2440592 - RNA, 15 nt, Human
caugaucucggcuua

SEQ ID NO: 2440593 - RNA, 20 nt, Human
caugaucucccugccgccuc

SEQ ID NO: 2440594 - RNA, 21 nt, Human
caugaucucccugccgccuca

SEQ ID NO: 2440595 - RNA, 18 nt, Human
caugaugagcuccucuuc

SEQ ID NO: 2440596 - RNA, 19 nt, Human
caugaugagcuccucuucc

SEQ ID NO: 2440597 - RNA, 15 nt, Human
caugaugagcuccuc

SEQ ID NO: 2440598 - RNA, 21 nt, Human
caugaucuugugacauauuau

SEQ ID NO: 2440599 - RNA, 15 nt, Human
caugcacucagcucu

SEQ ID NO: 2440600 - RNA, 16 nt, Human
caugcacucagcucuu

SEQ ID NO: 2440601 - RNA, 18 nt, Human
caugagugcgugcucagu

SEQ ID NO: 2440602 - RNA, 21 nt, Human
caugaguuggggucuggcagc

SEQ ID NO: 2440603 - RNA, 23 nt, Human
caugaguuggggucuggcagccu

SEQ ID NO: 2440604 - RNA, 19 nt, Human
caugaguuggcugggaaua

SEQ ID NO: 2440605 - RNA, 15 nt, Human
caugaguuugcccug

SEQ ID NO: 2440606 - RNA, 16 nt, Human
caugaguuugcccugg

SEQ ID NO: 2440607 - RNA, 22 nt, Human
caugaguuugcccugguuucac

SEQ ID NO: 2440608 - RNA, 19 nt, Human
caugaguuuuuucucuugg

SEQ ID NO: 2440609 - RNA, 22 nt, Human
caugaguuuuuucucuugggcu

SEQ ID NO: 2440610 - RNA, 14 nt, Human
caugauaugucagg

SEQ ID NO: 2440611 - RNA, 21 nt, Human
caucuugaauuguaaggaaug

SEQ ID NO: 2440612 - RNA, 16 nt, Human
caucuugaauuguaag

SEQ ID NO: 2440613 - RNA, 21 nt, Human
caucuucuuugcagccugggu

SEQ ID NO: 2440614 - RNA, 22 nt, Human
caucuucuggagucuccagugg

SEQ ID NO: 2440615 - RNA, 19 nt, Human
caucuucuucaccauuugg

SEQ ID NO: 2440616 - RNA, 22 nt, Human
caucuucuuuuugaaaucagca

SEQ ID NO: 2440617 - RNA, 19 nt, Human
caucuucuggagucuccag

SEQ ID NO: 2440618 - RNA, 13 nt, Human
caucuucuggagu

SEQ ID NO: 2440619 - RNA, 14 nt, Human
caucuucuucacca

SEQ ID NO: 2440620 - RNA, 17 nt, Human
caucuucugccuuaguc

SEQ ID NO: 2440621 - RNA, 23 nt, Human
caucugcccaggggugcccccuc

SEQ ID NO: 2440622 - RNA, 17 nt, Human
caucuugcucugcugac

SEQ ID NO: 2440623 - RNA, 16 nt, Human
caucuugcucugcuga

SEQ ID NO: 2440624 - RNA, 15 nt, Human
caucuugcucugcug

SEQ ID NO: 2440625 - RNA, 15 nt, Human
caucuuguguuuuau

SEQ ID NO: 2440626 - RNA, 19 nt, Human
caucuugcucugcugacag

SEQ ID NO: 2440627 - RNA, 23 nt, Human
caucuuucuucuauuuuauuccc

SEQ ID NO: 2440628 - RNA, 15 nt, Human
cauccuaccaaugca

SEQ ID NO: 2440629 - RNA, 14 nt, Human
cauccuaccaaugc

SEQ ID NO: 2440630 - RNA, 17 nt, Human
cauccuacaagacacag

SEQ ID NO: 2440631 - RNA, 19 nt, Human
cauccuacaagacacagug

SEQ ID NO: 2440632 - RNA, 19 nt, Human
cauccuaccaaugcaugca

SEQ ID NO: 2440633 - RNA, 18 nt, Human
cauccuaccaaugcaugc

SEQ ID NO: 2440634 - RNA, 18 nt, Human
cauccuacaagacacagu

SEQ ID NO: 2440635 - RNA, 15 nt, Human
cauccgccagggccc

SEQ ID NO: 2440636 - RNA, 14 nt, Human
cauccgccagggcc

SEQ ID NO: 2440637 - RNA, 15 nt, Human
cauccggcagccugg

SEQ ID NO: 2440638 - RNA, 16 nt, Human
cauccggcagccugga

SEQ ID NO: 2440639 - RNA, 16 nt, Human
caucuccugccuuccu

SEQ ID NO: 2440640 - RNA, 20 nt, Human
caucuccuccauacucagga

SEQ ID NO: 2440641 - RNA, 15 nt, Human
caucucccucccaca

SEQ ID NO: 2440642 - RNA, 20 nt, Human
caucuccugugcauggguga

SEQ ID NO: 2440643 - RNA, 21 nt, Human
caucucgccaccccuccuucc

SEQ ID NO: 2440644 - RNA, 22 nt, Human
caucucgccaccccuccuuccu

SEQ ID NO: 2440645 - RNA, 19 nt, Human
caucuccugccuuccuccu

SEQ ID NO: 2440646 - RNA, 22 nt, Human
caucuccugccuuccuccuggg

SEQ ID NO: 2440647 - RNA, 13 nt, Human
caucuccugugca

SEQ ID NO: 2440648 - RNA, 15 nt, Human
caucuccugugcaug

SEQ ID NO: 2440649 - RNA, 19 nt, Human
caucuccugugcaugggug

SEQ ID NO: 2440650 - RNA, 16 nt, Human
caucucuaacagcuca

SEQ ID NO: 2440651 - RNA, 18 nt, Human
caucucuaacagcucagg

SEQ ID NO: 2440652 - RNA, 19 nt, Human
caucucuaacagcucagga

SEQ ID NO: 2440653 - RNA, 20 nt, Human
caucucuaacagcucaggau

SEQ ID NO: 2440654 - RNA, 21 nt, Human
caucucuaacagcucaggauc

SEQ ID NO: 2440655 - RNA, 16 nt, Human
caucucuacaaaaagc

SEQ ID NO: 2440656 - RNA, 17 nt, Human
caucugaccagcagcgc

SEQ ID NO: 2440657 - RNA, 19 nt, Human
caucugaccagcagcgccu

SEQ ID NO: 2440658 - RNA, 21 nt, Human
caucugaccagcagcgccuuu

SEQ ID NO: 2440659 - RNA, 14 nt, Human
caucugaccagcag

SEQ ID NO: 2440660 - RNA, 15 nt, Human
caucugaccagcagc

SEQ ID NO: 2440661 - RNA, 15 nt, Human
caucugaccacgugc

SEQ ID NO: 2440662 - RNA, 15 nt, Human
caucugaagagcaga

SEQ ID NO: 2440663 - RNA, 15 nt, Human
caucucuuugaauuu

SEQ ID NO: 2440664 - RNA, 13 nt, Human
caucucuuugaau

SEQ ID NO: 2440665 - RNA, 16 nt, Human
caucucuuguuuaaau

SEQ ID NO: 2440666 - RNA, 22 nt, Human
caucucuuugaauuuucugugu

SEQ ID NO: 2440667 - RNA, 19 nt, Human
caucucuuugaauuuucug

SEQ ID NO: 2440668 - RNA, 12 nt, Human
caucugaaagcc

SEQ ID NO: 2440669 - RNA, 13 nt, Human
caucugaaagcca

SEQ ID NO: 2440670 - RNA, 16 nt, Human
caucugaaagccacgu

SEQ ID NO: 2440671 - RNA, 14 nt, Human
caucugaaagccac

SEQ ID NO: 2440672 - RNA, 23 nt, Human
caucugcacccucgaugaagccc

SEQ ID NO: 2440673 - RNA, 18 nt, Human
caucugacucacaagaag

SEQ ID NO: 2440674 - RNA, 12 nt, Human
caucugacucac

SEQ ID NO: 2440675 - RNA, 19 nt, Human
caucugcauuuucacccca

SEQ ID NO: 2440676 - RNA, 22 nt, Human
caucugcccaggacggggccgg

SEQ ID NO: 2440677 - RNA, 14 nt, Human
caucugcccaggac

SEQ ID NO: 2440678 - RNA, 13 nt, Human
caucugcccagga

SEQ ID NO: 2440679 - RNA, 12 nt, Human
caucugcccagg

SEQ ID NO: 2440680 - RNA, 11 nt, Human
caucugcccag

SEQ ID NO: 2440681 - RNA, 16 nt, Human
caucugcacccucgau

SEQ ID NO: 2440682 - RNA, 20 nt, Human
caucugcauuuucaccccac

SEQ ID NO: 2440683 - RNA, 21 nt, Human
caucugcccaggggugccccc

SEQ ID NO: 2440684 - RNA, 16 nt, Human
caucugcccaggggug

SEQ ID NO: 2440685 - RNA, 15 nt, Human
caucugcccaggggu

SEQ ID NO: 2440686 - RNA, 13 nt, Human
caucugcccaggg

SEQ ID NO: 2440687 - RNA, 11 nt, Human
caucugccccu

SEQ ID NO: 2440688 - RNA, 13 nt, Human
caucugccccucc

SEQ ID NO: 2440689 - RNA, 14 nt, Human
caucugccccuccc

SEQ ID NO: 2440690 - RNA, 15 nt, Human
caucugccccucccc

SEQ ID NO: 2440691 - RNA, 16 nt, Human
caucugccccuccccc

SEQ ID NO: 2440692 - RNA, 17 nt, Human
caucugccccuccccca

SEQ ID NO: 2440693 - RNA, 15 nt, Human
caucucuccuccuuu

SEQ ID NO: 2440694 - RNA, 20 nt, Human
caucucucccuccccugcca

SEQ ID NO: 2440695 - RNA, 23 nt, Human
caucucucccuccccugccauuu

SEQ ID NO: 2440696 - RNA, 21 nt, Human
caucucucuacuccuaccuca

SEQ ID NO: 2440697 - RNA, 22 nt, Human
caucucucuacuccuaccucag

SEQ ID NO: 2440698 - RNA, 19 nt, Human
caucucuaauuggaagaaa

SEQ ID NO: 2440699 - RNA, 22 nt, Human
caucucuaacagcucaggaucu

SEQ ID NO: 2440700 - RNA, 23 nt, Human
caucucuaacagcucaggaucuc

SEQ ID NO: 2440701 - RNA, 15 nt, Human
caucucucagaaggg

SEQ ID NO: 2440702 - RNA, 18 nt, Human
caucucucagaagggagg

SEQ ID NO: 2440703 - RNA, 12 nt, Human
caucucucccuc

SEQ ID NO: 2440704 - RNA, 15 nt, Human
caucucucccucccc

SEQ ID NO: 2440705 - RNA, 16 nt, Human
caucucucccuccccu

SEQ ID NO: 2440706 - RNA, 16 nt, Human
caucucuggaugccug

SEQ ID NO: 2440707 - RNA, 14 nt, Human
caucucuggaugcc

SEQ ID NO: 2440708 - RNA, 13 nt, Human
caucucugcuugg

SEQ ID NO: 2440709 - RNA, 21 nt, Human
caucucugcuugagucagguu

SEQ ID NO: 2440710 - RNA, 13 nt, Human
caucucugcuuga

SEQ ID NO: 2440711 - RNA, 20 nt, Human
caucucugcuugagucaggu

SEQ ID NO: 2440712 - RNA, 12 nt, Human
caucucugcuug

SEQ ID NO: 2440713 - RNA, 22 nt, Human
caucucugcaaucuucucagaa

SEQ ID NO: 2440714 - RNA, 11 nt, Human
caucucugcac

SEQ ID NO: 2440715 - RNA, 15 nt, Human
caucucugcaaucuu

SEQ ID NO: 2440716 - RNA, 21 nt, Human
caucucucuggcccucuaccc

SEQ ID NO: 2440717 - RNA, 13 nt, Human
caucucucugccc

SEQ ID NO: 2440718 - RNA, 15 nt, Human
caucucucugcccaa

SEQ ID NO: 2440719 - RNA, 11 nt, Human
caucucucucc

SEQ ID NO: 2440720 - RNA, 23 nt, Human
caucucucuacuccuaccucagc

SEQ ID NO: 2440721 - RNA, 16 nt, Human
caucucucugcccaac

SEQ ID NO: 2440722 - RNA, 18 nt, Human
caucucucugcccaaccc

SEQ ID NO: 2440723 - RNA, 15 nt, Human
caucucucuggcccu

SEQ ID NO: 2440724 - RNA, 14 nt, Human
caucucucuggccc

SEQ ID NO: 2440725 - RNA, 14 nt, Human
caucucucuuuaau

SEQ ID NO: 2440726 - RNA, 22 nt, Human
cccaaauggaaaugggcagagc

SEQ ID NO: 2440727 - RNA, 18 nt, Human
cccaaauggaaaugggca

SEQ ID NO: 2440728 - RNA, 14 nt, Human
cccaaaugagccau

SEQ ID NO: 2440729 - RNA, 13 nt, Human
cccaacccugccc

SEQ ID NO: 2440730 - RNA, 14 nt, Human
cccaacccugcccc

SEQ ID NO: 2440731 - RNA, 15 nt, Human
cccaacccugccccu

SEQ ID NO: 2440732 - RNA, 15 nt, Human
cccaaauccgaaccu

SEQ ID NO: 2440733 - RNA, 18 nt, Human
cccaaauccgaaccuccu

SEQ ID NO: 2440734 - RNA, 23 nt, Human
cccaaauccgaaccuccucugug

SEQ ID NO: 2440735 - RNA, 16 nt, Human
cccaaaucaauacacu

SEQ ID NO: 2440736 - RNA, 14 nt, Human
cccaaaucaauaca

SEQ ID NO: 2440737 - RNA, 17 nt, Human
cccaaauaagaagggau

SEQ ID NO: 2440738 - RNA, 21 nt, Human
cccaaagugcuuccaaggcag

SEQ ID NO: 2440739 - RNA, 21 nt, Human
cccaaagugguauagaaaugc

SEQ ID NO: 2440740 - RNA, 16 nt, Human
cccaaagugcugggau

SEQ ID NO: 2440741 - RNA, 23 nt, Human
cccaaaggauacuguaacacuuu

SEQ ID NO: 2440742 - RNA, 16 nt, Human
cccaaagucuguguga

SEQ ID NO: 2440743 - RNA, 20 nt, Human
cccaaagugguauagaaaug

SEQ ID NO: 2440744 - RNA, 22 nt, Human
cccaaggaaagccccagcacua

SEQ ID NO: 2440745 - RNA, 16 nt, Human
cccaaccuccugaccu

SEQ ID NO: 2440746 - RNA, 21 nt, Human
cccaaggacugagggacucug

SEQ ID NO: 2440747 - RNA, 16 nt, Human
cccaaggacugaggga

SEQ ID NO: 2440748 - RNA, 15 nt, Human
cccaaggacugaggg

SEQ ID NO: 2440749 - RNA, 14 nt, Human
cccaaggaggaaaa

SEQ ID NO: 2440750 - RNA, 15 nt, Human
cccaaggaggaaaaa

SEQ ID NO: 2440751 - RNA, 15 nt, Human
cccaacccuggcacc

SEQ ID NO: 2440752 - RNA, 15 nt, Human
cccaacccuucccca

SEQ ID NO: 2440753 - RNA, 14 nt, Human
cccaacccugucug

SEQ ID NO: 2440754 - RNA, 16 nt, Human
cccaacccugccccug

SEQ ID NO: 2440755 - RNA, 17 nt, Human
cccaacccuucccucac

SEQ ID NO: 2440756 - RNA, 12 nt, Human
cccaaccucaga

SEQ ID NO: 2440757 - RNA, 22 nt, Human
cccaaccggggagcccccgccc

SEQ ID NO: 2440758 - RNA, 15 nt, Human
cccaaggcggccccu

SEQ ID NO: 2440759 - RNA, 22 nt, Human
cccaaggcguccgcgcgccagc

SEQ ID NO: 2440760 - RNA, 22 nt, Human
cccaaggaggaaaaacagacaa

SEQ ID NO: 2440761 - RNA, 21 nt, Human
cccaaggcugcgucuggaggg

SEQ ID NO: 2440762 - RNA, 20 nt, Human
cccaaggcugcgucuggagg

SEQ ID NO: 2440763 - RNA, 19 nt, Human
cccaaggcugcgucuggag

SEQ ID NO: 2440764 - RNA, 15 nt, Human
cccaaggcugcgucu

SEQ ID NO: 2440765 - RNA, 17 nt, Human
cccaaggcucugagcaa

SEQ ID NO: 2440766 - RNA, 17 nt, Human
cccaaucccuuuauuac

SEQ ID NO: 2440767 - RNA, 21 nt, Human
cccaaucccuuuauuaccccc

SEQ ID NO: 2440768 - RNA, 17 nt, Human
cccaagggaaagaaaag

SEQ ID NO: 2440769 - RNA, 22 nt, Human
cccaaggcugcgucuggagggg

SEQ ID NO: 2440770 - RNA, 23 nt, Human
cccaaucccagcuaccucaacca

SEQ ID NO: 2440771 - RNA, 15 nt, Human
cccaaagugcuggga

SEQ ID NO: 2440772 - RNA, 13 nt, Human
cccaaagugcugg

SEQ ID NO: 2440773 - RNA, 18 nt, Human
cccaaaggacuccaccca

SEQ ID NO: 2440774 - RNA, 14 nt, Human
cccaaaggacucca

SEQ ID NO: 2440775 - RNA, 17 nt, Human
cccaaagcuuuccugcc

SEQ ID NO: 2440776 - RNA, 16 nt, Human
cccaaagcuuuccugc

SEQ ID NO: 2440777 - RNA, 20 nt, Human
cccaaagcuuuccugcccca

SEQ ID NO: 2440778 - RNA, 17 nt, Human
cccaaaggaaaaagcac

SEQ ID NO: 2440779 - RNA, 21 nt, Human
cccaaaaccacagcccuguca

SEQ ID NO: 2440780 - RNA, 18 nt, Human
cccaaaacucuccucugc

SEQ ID NO: 2440781 - RNA, 16 nt, Human
cccaaaacucuccucu

SEQ ID NO: 2440782 - RNA, 21 nt, Human
cccaaaacaccggguuccagc

SEQ ID NO: 2440783 - RNA, 20 nt, Human
cccaaaacucuccucugcug

SEQ ID NO: 2440784 - RNA, 15 nt, Human
cccaaagcuuuccug

SEQ ID NO: 2440785 - RNA, 14 nt, Human
cccaaagcuuuccu

SEQ ID NO: 2440786 - RNA, 14 nt, Human
cccaaaaccacagc

SEQ ID NO: 2440787 - RNA, 15 nt, Human
cccaaaaccacagcc

SEQ ID NO: 2440788 - RNA, 14 nt, Human
cccaaagccagaca

SEQ ID NO: 2440789 - RNA, 14 nt, Human
ccauuuguguuuau

SEQ ID NO: 2440790 - RNA, 19 nt, Human
cccaaaacaccggguucca

SEQ ID NO: 2440791 - RNA, 14 nt, Human
ccauuugugugugu

SEQ ID NO: 2440792 - RNA, 20 nt, Human
ccauucuccaccugccaggg

SEQ ID NO: 2440793 - RNA, 19 nt, Human
ccauucuccaccugccagg

SEQ ID NO: 2440794 - RNA, 15 nt, Human
ccauucucccaggua

SEQ ID NO: 2440795 - RNA, 14 nt, Human
ccauucucccaggu

SEQ ID NO: 2440796 - RNA, 13 nt, Human
ccauucucccagg

SEQ ID NO: 2440797 - RNA, 12 nt, Human
ccauucucccag

SEQ ID NO: 2440798 - RNA, 22 nt, Human
ccauucucccagguaccagcug

SEQ ID NO: 2440799 - RNA, 19 nt, Human
ccauuuggcagagcuucuu

SEQ ID NO: 2440800 - RNA, 13 nt, Human
ccauucauuccau

SEQ ID NO: 2440801 - RNA, 14 nt, Human
ccauucauuccauu

SEQ ID NO: 2440802 - RNA, 11 nt, Human
ccauucuccca

SEQ ID NO: 2440803 - RNA, 15 nt, Human
ccaucuaaacugccc

SEQ ID NO: 2440804 - RNA, 16 nt, Human
ccaucuaaacugcccc

SEQ ID NO: 2440805 - RNA, 20 nt, Human
ccaucuaaauaccugcccug

SEQ ID NO: 2440806 - RNA, 23 nt, Human
ccaucgcuguguguuaguuccca

SEQ ID NO: 2440807 - RNA, 21 nt, Human
ccaucugcccaggggugcccc

SEQ ID NO: 2440808 - RNA, 20 nt, Human
ccaucugcccaggggugccc

SEQ ID NO: 2440809 - RNA, 17 nt, Human
ccaucugcccaggggug

SEQ ID NO: 2440810 - RNA, 16 nt, Human
ccaucugcccaggacg

SEQ ID NO: 2440811 - RNA, 15 nt, Human
ccaucugcccaggac

SEQ ID NO: 2440812 - RNA, 13 nt, Human
ccaucugcccagg

SEQ ID NO: 2440813 - RNA, 12 nt, Human
ccaucugcccag

SEQ ID NO: 2440814 - RNA, 23 nt, Human
ccaucugcaccccuucucuccuc

SEQ ID NO: 2440815 - RNA, 22 nt, Human
ccaucugcaccccuucucuccu

SEQ ID NO: 2440816 - RNA, 20 nt, Human
ccaucugcaccccuucucuc

SEQ ID NO: 2440817 - RNA, 17 nt, Human
ccaucugcaccccuucu

SEQ ID NO: 2440818 - RNA, 12 nt, Human
ccaucugcaccc

SEQ ID NO: 2440819 - RNA, 19 nt, Human
ccaucugcaccccccuggg

SEQ ID NO: 2440820 - RNA, 14 nt, Human
ccaucugcaccccu

SEQ ID NO: 2440821 - RNA, 20 nt, Human
ccaucugcaccccccugggc

SEQ ID NO: 2440822 - RNA, 23 nt, Human
ccaucugcccaggggugcccccu

SEQ ID NO: 2440823 - RNA, 22 nt, Human
ccaucugcccaggggugccccc

SEQ ID NO: 2440824 - RNA, 20 nt, Human
ccaucugcgugacaauaaaa

SEQ ID NO: 2440825 - RNA, 15 nt, Human
ccauggcccucccag

SEQ ID NO: 2440826 - RNA, 15 nt, Human
ccauggcccucauua

SEQ ID NO: 2440827 - RNA, 19 nt, Human
ccauggcgugucccucucg

SEQ ID NO: 2440828 - RNA, 21 nt, Human
ccauggcgugucccucucgga

SEQ ID NO: 2440829 - RNA, 21 nt, Human
ccaugggaaaugucaacaagu

SEQ ID NO: 2440830 - RNA, 18 nt, Human
ccauggcuuaaugcuucu

SEQ ID NO: 2440831 - RNA, 22 nt, Human
ccauccuacccucgggcccacc

SEQ ID NO: 2440832 - RNA, 18 nt, Human
ccauccuacccucgggcc

SEQ ID NO: 2440833 - RNA, 17 nt, Human
ccauccuacccucgggc

SEQ ID NO: 2440834 - RNA, 16 nt, Human
ccauccuacccucggg

SEQ ID NO: 2440835 - RNA, 13 nt, Human
ccauccucaaaca

SEQ ID NO: 2440836 - RNA, 23 nt, Human
ccauccuacccucgggcccaccu

SEQ ID NO: 2440837 - RNA, 18 nt, Human
ccauccucaaacacugca

SEQ ID NO: 2440838 - RNA, 13 nt, Human
ccauccuccagca

SEQ ID NO: 2440839 - RNA, 14 nt, Human
ccauccuccagcag

SEQ ID NO: 2440840 - RNA, 15 nt, Human
ccauccuccagcagg

SEQ ID NO: 2440841 - RNA, 16 nt, Human
ccauccuccagcaggg

SEQ ID NO: 2440842 - RNA, 13 nt, Human
ccauccuccagcu

SEQ ID NO: 2440843 - RNA, 17 nt, Human
ccauccuccagcaggga

SEQ ID NO: 2440844 - RNA, 14 nt, Human
ccaucuaaacugcc

SEQ ID NO: 2440845 - RNA, 17 nt, Human
ccauccuccagcuucug

SEQ ID NO: 2440846 - RNA, 16 nt, Human
ccauccuccagcuucu

SEQ ID NO: 2440847 - RNA, 15 nt, Human
ccauccuccagcuuc

SEQ ID NO: 2440848 - RNA, 14 nt, Human
ccauccuccagcuu

SEQ ID NO: 2440849 - RNA, 14 nt, Human
ccauccuccccuuc

SEQ ID NO: 2440850 - RNA, 16 nt, Human
ccaucgcuguguguua

SEQ ID NO: 2440851 - RNA, 20 nt, Human
ccaucgcuguguguuaguuc

SEQ ID NO: 2440852 - RNA, 13 nt, Human
ccauccuccccuu

SEQ ID NO: 2440853 - RNA, 23 nt, Human
ccauauugcacaugucuuaauga

SEQ ID NO: 2440854 - RNA, 21 nt, Human
ccauauugcacaugucuuaau

SEQ ID NO: 2440855 - RNA, 18 nt, Human
ccauauugcacaugucuu

SEQ ID NO: 2440856 - RNA, 13 nt, Human
ccauauugcacau

SEQ ID NO: 2440857 - RNA, 14 nt, Human
ccauaguaguauga

SEQ ID NO: 2440858 - RNA, 19 nt, Human
ccauauucuguuggccagu

SEQ ID NO: 2440859 - RNA, 12 nt, Human
ccauccuacccu

SEQ ID NO: 2440860 - RNA, 16 nt, Human
ccaugggacagggagg

SEQ ID NO: 2440861 - RNA, 19 nt, Human
ccaugggacagggaggacg

SEQ ID NO: 2440862 - RNA, 14 nt, Human
ccauggcuuccucc

SEQ ID NO: 2440863 - RNA, 20 nt, Human
ccauggcuuccaaggugguc

SEQ ID NO: 2440864 - RNA, 15 nt, Human
ccaugggaccaaacc

SEQ ID NO: 2440865 - RNA, 21 nt, Human
ccaugggaccaaaccuagccc

SEQ ID NO: 2440866 - RNA, 21 nt, Human
ccaugggaagacgaggcccuc

SEQ ID NO: 2440867 - RNA, 22 nt, Human
ccaugggagcugguuagaaaug

SEQ ID NO: 2440868 - RNA, 18 nt, Human
ccauguuggccaggcugc

SEQ ID NO: 2440869 - RNA, 21 nt, Human
ccauguuggccaggcugcucu

SEQ ID NO: 2440870 - RNA, 16 nt, Human
ccauguuggccaggcu

SEQ ID NO: 2440871 - RNA, 17 nt, Human
ccauguuggccaggcug

SEQ ID NO: 2440872 - RNA, 16 nt, Human
ccauguuucucuggcc

SEQ ID NO: 2440873 - RNA, 15 nt, Human
ccauguuucucuggc

SEQ ID NO: 2440874 - RNA, 21 nt, Human
ccauguuucucuggccccaag

SEQ ID NO: 2440875 - RNA, 14 nt, Human
ccauguuucucugg

SEQ ID NO: 2440876 - RNA, 16 nt, Human
ccauguuugagcucag

SEQ ID NO: 2440877 - RNA, 17 nt, Human
ccauguuugagcucaga

SEQ ID NO: 2440878 - RNA, 13 nt, Human
ccauguuuguaaa

SEQ ID NO: 2440879 - RNA, 21 nt, Human
ccauguuugagcucagacccc

SEQ ID NO: 2440880 - RNA, 15 nt, Human
ccauguuuguaaaac

SEQ ID NO: 2440881 - RNA, 14 nt, Human
ccauguuuguaaaa

SEQ ID NO: 2440882 - RNA, 18 nt, Human
ccauucuccaccugccag

SEQ ID NO: 2440883 - RNA, 19 nt, Human
ccauucacucuuccagaau

SEQ ID NO: 2440884 - RNA, 20 nt, Human
ccauucagugauuacuguca

SEQ ID NO: 2440885 - RNA, 20 nt, Human
ccauucacuucauaauccag

SEQ ID NO: 2440886 - RNA, 17 nt, Human
ccauucacucuuccaga

SEQ ID NO: 2440887 - RNA, 14 nt, Human
ccaguuauggcuau

SEQ ID NO: 2440888 - RNA, 21 nt, Human
ccaguuauggcuauaggugcu

SEQ ID NO: 2440889 - RNA, 19 nt, Human
ccauagcuccugcuccaca

SEQ ID NO: 2440890 - RNA, 21 nt, Human
ccauaguaugggacuggccuc

SEQ ID NO: 2440891 - RNA, 15 nt, Human
ccauagucacauggc

SEQ ID NO: 2440892 - RNA, 23 nt, Human
ccauauucuguuggccaguguga

SEQ ID NO: 2440893 - RNA, 15 nt, Human
ccauaguaccauuua

SEQ ID NO: 2440894 - RNA, 19 nt, Human
ccauaguaccauuuauaca

SEQ ID NO: 2440895 - RNA, 12 nt, Human
ccauaggucacc

SEQ ID NO: 2440896 - RNA, 13 nt, Human
ccauaggcccagu

SEQ ID NO: 2440897 - RNA, 15 nt, Human
ccauagcuuccauga

SEQ ID NO: 2440898 - RNA, 22 nt, Human
ccaguguuguggauuuaacaga

SEQ ID NO: 2440899 - RNA, 17 nt, Human
ccaguguuagggaaggg

SEQ ID NO: 2440900 - RNA, 17 nt, Human
ccaguuaaaaaaaauuu

SEQ ID NO: 2440901 - RNA, 20 nt, Human
ccaguguuagggaagggccu

SEQ ID NO: 2440902 - RNA, 18 nt, Human
ccagugucugucccgggg

SEQ ID NO: 2440903 - RNA, 22 nt, Human
ccaguguccccuccacugucac

SEQ ID NO: 2440904 - RNA, 16 nt, Human
ccaguguccccuccac

SEQ ID NO: 2440905 - RNA, 14 nt, Human
ccaguguccccucc

SEQ ID NO: 2440906 - RNA, 22 nt, Human
ccagugucaaguugugcuuguu

SEQ ID NO: 2440907 - RNA, 19 nt, Human
ccagugucaaguugugcuu

SEQ ID NO: 2440908 - RNA, 14 nt, Human
ccagugguugcugu

SEQ ID NO: 2440909 - RNA, 14 nt, Human
ccaguguagccuug

SEQ ID NO: 2440910 - RNA, 15 nt, Human
ccaguguagccuugc

SEQ ID NO: 2440911 - RNA, 16 nt, Human
ccaguguccuuagaac

SEQ ID NO: 2440912 - RNA, 21 nt, Human
ccagugucugucccggggucc

SEQ ID NO: 2440913 - RNA, 22 nt, Human
ccagugugggaaugcggcaaga

SEQ ID NO: 2440914 - RNA, 15 nt, Human
ccagugucugucccg

SEQ ID NO: 2440915 - RNA, 15 nt, Human
ccagugaggcucugc

SEQ ID NO: 2440916 - RNA, 14 nt, Human
ccagugaggcucug

SEQ ID NO: 2440917 - RNA, 23 nt, Human
ccagugcccacaggaucagucug

SEQ ID NO: 2440918 - RNA, 18 nt, Human
ccagugcccauuccucac

SEQ ID NO: 2440919 - RNA, 13 nt, Human
ccagugcccauuc

SEQ ID NO: 2440920 - RNA, 16 nt, Human
ccagucuguggaucag

SEQ ID NO: 2440921 - RNA, 16 nt, Human
ccagugaggcucugcc

SEQ ID NO: 2440922 - RNA, 14 nt, Human
ccagugcccccacu

SEQ ID NO: 2440923 - RNA, 16 nt, Human
ccagugcccccacuga

SEQ ID NO: 2440924 - RNA, 18 nt, Human
ccagugcccccacugacc

SEQ ID NO: 2440925 - RNA, 22 nt, Human
ccagugguuccuaauccucuag

SEQ ID NO: 2440926 - RNA, 20 nt, Human
ccagugccgagaaggaagcc

SEQ ID NO: 2440927 - RNA, 13 nt, Human
ccaucuacccucc

SEQ ID NO: 2440928 - RNA, 13 nt, Human
ccagccucccuga

SEQ ID NO: 2440929 - RNA, 15 nt, Human
ccagccucccugaag

SEQ ID NO: 2440930 - RNA, 17 nt, Human
ccagccucccugaagcc

SEQ ID NO: 2440931 - RNA, 21 nt, Human
ccagccucccugaagccuuug

SEQ ID NO: 2440932 - RNA, 16 nt, Human
ccagccuccaugcugc

SEQ ID NO: 2440933 - RNA, 15 nt, Human
ccagccuccaugcug

SEQ ID NO: 2440934 - RNA, 15 nt, Human
ccagccuccucugga

SEQ ID NO: 2440935 - RNA, 14 nt, Human
ccagccuccucugg

SEQ ID NO: 2440936 - RNA, 20 nt, Human
ccaggagaaggccaauuccu

SEQ ID NO: 2440937 - RNA, 21 nt, Human
ccagccuccgagagggagaga

SEQ ID NO: 2440938 - RNA, 19 nt, Human
ccagccuccgagagggaga

SEQ ID NO: 2440939 - RNA, 18 nt, Human
ccagccuccgagagggag

SEQ ID NO: 2440940 - RNA, 22 nt, Human
ccagccucaguccuccccucac

SEQ ID NO: 2440941 - RNA, 13 nt, Human
ccagccuccucug

SEQ ID NO: 2440942 - RNA, 12 nt, Human
ccagccuccucu

SEQ ID NO: 2440943 - RNA, 11 nt, Human
ccagccuccuc

SEQ ID NO: 2440944 - RNA, 19 nt, Human
ccagccuccguauuucaga

SEQ ID NO: 2440945 - RNA, 23 nt, Human
ccaggcccucugcccacucccug

SEQ ID NO: 2440946 - RNA, 22 nt, Human
ccaggcccucugcccacucccu

SEQ ID NO: 2440947 - RNA, 20 nt, Human
ccaggccccaaaaccacagc

SEQ ID NO: 2440948 - RNA, 14 nt, Human
ccaggccgcagcuc

SEQ ID NO: 2440949 - RNA, 18 nt, Human
ccaggccgagaagccagu

SEQ ID NO: 2440950 - RNA, 21 nt, Human
ccaggccccaaaaccacagcc

SEQ ID NO: 2440951 - RNA, 21 nt, Human
ccaggccgcagcucuugcccu

SEQ ID NO: 2440952 - RNA, 19 nt, Human
ccaggccgcagcucuugcc

SEQ ID NO: 2440953 - RNA, 17 nt, Human
ccaggccgcagcucuug

SEQ ID NO: 2440954 - RNA, 16 nt, Human
ccaggccgcagcucuu

SEQ ID NO: 2440955 - RNA, 21 nt, Human
ccaggccgccccagccucuga

SEQ ID NO: 2440956 - RNA, 21 nt, Human
ccaggcccucugcccacuccc

SEQ ID NO: 2440957 - RNA, 20 nt, Human
ccaggcccucugcccacucc

SEQ ID NO: 2440958 - RNA, 16 nt, Human
ccaggccauggaggca

SEQ ID NO: 2440959 - RNA, 19 nt, Human
ccaggccagggggccaguc

SEQ ID NO: 2440960 - RNA, 18 nt, Human
ccaggccaucuuccaggu

SEQ ID NO: 2440961 - RNA, 16 nt, Human
ccaggccaucuuccag

SEQ ID NO: 2440962 - RNA, 22 nt, Human
ccaggccauccggcccccagag

SEQ ID NO: 2440963 - RNA, 21 nt, Human
ccaggccauccggcccccaga

SEQ ID NO: 2440964 - RNA, 17 nt, Human
ccaggcgggcucaagga

SEQ ID NO: 2440965 - RNA, 16 nt, Human
ccaggcgggcucaagg

SEQ ID NO: 2440966 - RNA, 14 nt, Human
ccaggcgggcucaa

SEQ ID NO: 2440967 - RNA, 22 nt, Human
ccaggcgggagcgguggcccug

SEQ ID NO: 2440968 - RNA, 18 nt, Human
ccaggcgaugugcaagug

SEQ ID NO: 2440969 - RNA, 21 nt, Human
ccaggcgggagcgguggcccu

SEQ ID NO: 2440970 - RNA, 17 nt, Human
ccaggcuuagucacuga

SEQ ID NO: 2440971 - RNA, 24 nt, Human
ccaggcuguaucccaugagccuca

SEQ ID NO: 2440972 - RNA, 18 nt, Human
ccaggccggcgagcccug

SEQ ID NO: 2440973 - RNA, 15 nt, Human
ccaggccgccccagc

SEQ ID NO: 2440974 - RNA, 16 nt, Human
ccaggccgccccagcc

SEQ ID NO: 2440975 - RNA, 21 nt, Human
ccaggccgggguggagcaugg

SEQ ID NO: 2440976 - RNA, 18 nt, Human
ccaggccgccccagccuc

SEQ ID NO: 2440977 - RNA, 19 nt, Human
ccaggccguccucccgggc

SEQ ID NO: 2440978 - RNA, 15 nt, Human
ccaggccguccuccc

SEQ ID NO: 2440979 - RNA, 22 nt, Human
ccaggccggugugggcuguguc

SEQ ID NO: 2440980 - RNA, 16 nt, Human
ccaggccguggcugcc

SEQ ID NO: 2440981 - RNA, 14 nt, Human
ccaggccguggcug

SEQ ID NO: 2440982 - RNA, 18 nt, Human
ccaggcgccccuuccccc

SEQ ID NO: 2440983 - RNA, 22 nt, Human
ccaggccguccucccgggcccu

SEQ ID NO: 2440984 - RNA, 18 nt, Human
ccaggccguggcugccca

SEQ ID NO: 2440985 - RNA, 19 nt, Human
ccaggcgccccuucccccu

SEQ ID NO: 2440986 - RNA, 18 nt, Human
ccaggcgcaggggcucac

SEQ ID NO: 2440987 - RNA, 16 nt, Human
ccaggagccugugccu

SEQ ID NO: 2440988 - RNA, 17 nt, Human
ccaggagccugugccuc

SEQ ID NO: 2440989 - RNA, 12 nt, Human
ccaggagcaaau

SEQ ID NO: 2440990 - RNA, 20 nt, Human
ccaggagccccgaggccuuc

SEQ ID NO: 2440991 - RNA, 12 nt, Human
ccaggagccucc

SEQ ID NO: 2440992 - RNA, 23 nt, Human
ccaggagagccagcccucccugu

SEQ ID NO: 2440993 - RNA, 21 nt, Human
ccaggagaggagcgggaccug

SEQ ID NO: 2440994 - RNA, 20 nt, Human
ccaggagagccagcccuccc

SEQ ID NO: 2440995 - RNA, 19 nt, Human
ccaggagccccgaggccuu

SEQ ID NO: 2440996 - RNA, 16 nt, Human
ccaggagccccgaggc

SEQ ID NO: 2440997 - RNA, 15 nt, Human
ccaggagagagaaag

SEQ ID NO: 2440998 - RNA, 14 nt, Human
ccaggagagagaaa

SEQ ID NO: 2440999 - RNA, 12 nt, Human
ccaggagagaga

SEQ ID NO: 2441000 - RNA, 17 nt, Human
ccaggagagagaaagcc

SEQ ID NO: 2441001 - RNA, 16 nt, Human
ccaggagagagaaagc

SEQ ID NO: 2441002 - RNA, 21 nt, Human
ccaggagagagaaagccaggc

SEQ ID NO: 2441003 - RNA, 13 nt, Human
ccaggagagccag

SEQ ID NO: 2441004 - RNA, 16 nt, Human
ccaggagagccagccc

SEQ ID NO: 2441005 - RNA, 17 nt, Human
ccaggagagccagcccu

SEQ ID NO: 2441006 - RNA, 18 nt, Human
ccaggagagccagcccuc

SEQ ID NO: 2441007 - RNA, 19 nt, Human
ccaggagagccagcccucc

SEQ ID NO: 2441008 - RNA, 18 nt, Human
ccaggcauuccccaggag

SEQ ID NO: 2441009 - RNA, 17 nt, Human
ccaggcauuccccagga

SEQ ID NO: 2441010 - RNA, 21 nt, Human
ccaggagcugggcagaaggcc

SEQ ID NO: 2441011 - RNA, 16 nt, Human
ccaggagcugggcaga

SEQ ID NO: 2441012 - RNA, 13 nt, Human
ccaggagcucuuc

SEQ ID NO: 2441013 - RNA, 18 nt, Human
ccaggagcucuucaggcc

SEQ ID NO: 2441014 - RNA, 21 nt, Human
ccaggagcucuucaggccucc

SEQ ID NO: 2441015 - RNA, 17 nt, Human
ccaggagcugcucacua

SEQ ID NO: 2441016 - RNA, 16 nt, Human
ccaggagcugcccaga

SEQ ID NO: 2441017 - RNA, 23 nt, Human
ccaggagcucuucaggccucccu

SEQ ID NO: 2441018 - RNA, 21 nt, Human
ccaggcauuccccaggaggcc

SEQ ID NO: 2441019 - RNA, 19 nt, Human
ccaggcauuccccaggagg

SEQ ID NO: 2441020 - RNA, 18 nt, Human
ccaggccaggccaccagg

SEQ ID NO: 2441021 - RNA, 12 nt, Human
ccaggccaggcc

SEQ ID NO: 2441022 - RNA, 15 nt, Human
ccaggccagcugccu

SEQ ID NO: 2441023 - RNA, 23 nt, Human
ccaggccagccuccgagagggag

SEQ ID NO: 2441024 - RNA, 23 nt, Human
ccagguaccagcugcgcuugcuu

SEQ ID NO: 2441025 - RNA, 18 nt, Human
ccagguaccagcugcgcu

SEQ ID NO: 2441026 - RNA, 17 nt, Human
ccagguaccagcugcgc

SEQ ID NO: 2441027 - RNA, 15 nt, Human
ccagguaccagcugc

SEQ ID NO: 2441028 - RNA, 23 nt, Human
ccagguaaugagggacuggaacc

SEQ ID NO: 2441029 - RNA, 18 nt, Human
ccaggugcacaagcucca

SEQ ID NO: 2441030 - RNA, 20 nt, Human
ccaggugcacaagcuccaag

SEQ ID NO: 2441031 - RNA, 19 nt, Human
ccaggugcacaagcuccaa

SEQ ID NO: 2441032 - RNA, 16 nt, Human
ccaggguugaccccag

SEQ ID NO: 2441033 - RNA, 18 nt, Human
ccaggguugaccccagag

SEQ ID NO: 2441034 - RNA, 22 nt, Human
ccaggguugaucacacucuggg

SEQ ID NO: 2441035 - RNA, 16 nt, Human
ccaggguugaucacac

SEQ ID NO: 2441036 - RNA, 21 nt, Human
ccaggguugaccccagaggau

SEQ ID NO: 2441037 - RNA, 18 nt, Human
ccagguaaugagggacug

SEQ ID NO: 2441038 - RNA, 16 nt, Human
ccagguaaugagggac

SEQ ID NO: 2441039 - RNA, 23 nt, Human
ccagguaagcaggaggaggugcc

SEQ ID NO: 2441040 - RNA, 17 nt, Human
ccaggguuucgagaagc

SEQ ID NO: 2441041 - RNA, 18 nt, Human
ccagggcuggacugaggc

SEQ ID NO: 2441042 - RNA, 17 nt, Human
ccagggcuggacugagg

SEQ ID NO: 2441043 - RNA, 16 nt, Human
ccagggcuggacugag

SEQ ID NO: 2441044 - RNA, 13 nt, Human
ccagggcuggacu

SEQ ID NO: 2441045 - RNA, 19 nt, Human
ccagggcuggacugaggcc

SEQ ID NO: 2441046 - RNA, 14 nt, Human
ccaggguuccccca

SEQ ID NO: 2441047 - RNA, 14 nt, Human
ccagggugugugcu

SEQ ID NO: 2441048 - RNA, 15 nt, Human
ccaggguucccccag

SEQ ID NO: 2441049 - RNA, 20 nt, Human
ccaggguucccccagcccug

SEQ ID NO: 2441050 - RNA, 21 nt, Human
ccaggguucccccagcccugu

SEQ ID NO: 2441051 - RNA, 22 nt, Human
ccaggguucccccagcccugug

SEQ ID NO: 2441052 - RNA, 16 nt, Human
ccagggcucugaccag

SEQ ID NO: 2441053 - RNA, 20 nt, Human
ccagggcugcuagacggagg

SEQ ID NO: 2441054 - RNA, 20 nt, Human
ccagggcuccugcacuuacu

SEQ ID NO: 2441055 - RNA, 21 nt, Human
ccagggcuggaaugauuucag

SEQ ID NO: 2441056 - RNA, 19 nt, Human
ccagggcccagagcccagc

SEQ ID NO: 2441057 - RNA, 21 nt, Human
ccagggcccagagcccagcuc

SEQ ID NO: 2441058 - RNA, 22 nt, Human
ccagggcccagagcccagcucc

SEQ ID NO: 2441059 - RNA, 14 nt, Human
ccagggcuccugca

SEQ ID NO: 2441060 - RNA, 13 nt, Human
ccagggcuccugc

SEQ ID NO: 2441061 - RNA, 12 nt, Human
ccagggcuccug

SEQ ID NO: 2441062 - RNA, 18 nt, Human
ccagggagccuuugguuc

SEQ ID NO: 2441063 - RNA, 14 nt, Human
ccagggagccuuug

SEQ ID NO: 2441064 - RNA, 12 nt, Human
ccagggagccuu

SEQ ID NO: 2441065 - RNA, 13 nt, Human
ccagggagccuuu

SEQ ID NO: 2441066 - RNA, 12 nt, Human
ccagggccaggg

SEQ ID NO: 2441067 - RNA, 21 nt, Human
ccagggccacucugccucugc

SEQ ID NO: 2441068 - RNA, 14 nt, Human
ccagggccagggcc

SEQ ID NO: 2441069 - RNA, 16 nt, Human
ccagggccagggcccu

SEQ ID NO: 2441070 - RNA, 15 nt, Human
ccagggcccagagcc

SEQ ID NO: 2441071 - RNA, 16 nt, Human
ccagggcccagagccc

SEQ ID NO: 2441072 - RNA, 17 nt, Human
ccagggcccagagccca

SEQ ID NO: 2441073 - RNA, 18 nt, Human
ccagggcccagagcccag

SEQ ID NO: 2441074 - RNA, 13 nt, Human
ccagggcccagag

SEQ ID NO: 2441075 - RNA, 14 nt, Human
ccagggcccagagc

SEQ ID NO: 2441076 - RNA, 15 nt, Human
ccagggccagggguc

SEQ ID NO: 2441077 - RNA, 17 nt, Human
ccagggccagggcccug

SEQ ID NO: 2441078 - RNA, 20 nt, Human
ccagucuggaaugcaguggu

SEQ ID NO: 2441079 - RNA, 19 nt, Human
ccagucuggaaugcagugg

SEQ ID NO: 2441080 - RNA, 13 nt, Human
ccagugaggcucu

SEQ ID NO: 2441081 - RNA, 13 nt, Human
ccagucuguggau

SEQ ID NO: 2441082 - RNA, 12 nt, Human
ccagucugugga

SEQ ID NO: 2441083 - RNA, 16 nt, Human
ccagucugcugcccuc

SEQ ID NO: 2441084 - RNA, 17 nt, Human
ccagucugcugcccucc

SEQ ID NO: 2441085 - RNA, 18 nt, Human
ccagucugcugcccucca

SEQ ID NO: 2441086 - RNA, 22 nt, Human
ccagucugcugcccuccauccc

SEQ ID NO: 2441087 - RNA, 19 nt, Human
ccagucugggcugccgggu

SEQ ID NO: 2441088 - RNA, 18 nt, Human
ccagucugggcugccggg

SEQ ID NO: 2441089 - RNA, 16 nt, Human
ccagucugggcugccg

SEQ ID NO: 2441090 - RNA, 23 nt, Human
ccagucugcugcccuccaucccg

SEQ ID NO: 2441091 - RNA, 17 nt, Human
ccaguaaacagaggagu

SEQ ID NO: 2441092 - RNA, 12 nt, Human
ccaguaaacaga

SEQ ID NO: 2441093 - RNA, 23 nt, Human
ccaguaaaauugccauauugcac

SEQ ID NO: 2441094 - RNA, 19 nt, Human
ccaguaaaauugccauauu

SEQ ID NO: 2441095 - RNA, 17 nt, Human
ccaguaaaauugccaua

SEQ ID NO: 2441096 - RNA, 14 nt, Human
ccagucuaaaaaua

SEQ ID NO: 2441097 - RNA, 19 nt, Human
ccagucgcgcugccugugu

SEQ ID NO: 2441098 - RNA, 21 nt, Human
ccagucgcgcugccugugugg

SEQ ID NO: 2441099 - RNA, 20 nt, Human
ccagucgcgcugccugugug

SEQ ID NO: 2441100 - RNA, 16 nt, Human
ccagucuacccagaga

SEQ ID NO: 2441101 - RNA, 16 nt, Human
ccagucuccaccagga

SEQ ID NO: 2441102 - RNA, 18 nt, Human
ccagucuccaccaggaac

SEQ ID NO: 2441103 - RNA, 19 nt, Human
ccagucuccaccaggaacc

SEQ ID NO: 2441104 - RNA, 18 nt, Human
ccagucuggaaugcagug

SEQ ID NO: 2441105 - RNA, 20 nt, Human
ccagucuccaccaggaaccu

SEQ ID NO: 2441106 - RNA, 21 nt, Human
ccagucuccaccaggaaccuc

SEQ ID NO: 2441107 - RNA, 23 nt, Human
ccagucuccaccaggaaccucuu

SEQ ID NO: 2441108 - RNA, 12 nt, Human
ccagucugaccc

SEQ ID NO: 2441109 - RNA, 13 nt, Human
ccagucugacccu

SEQ ID NO: 2441110 - RNA, 12 nt, Human
ccagucucuucu

SEQ ID NO: 2441111 - RNA, 24 nt, Human
ccaggugcacaagcuccaagcucc

SEQ ID NO: 2441112 - RNA, 15 nt, Human
ccagguucagcuugu

SEQ ID NO: 2441113 - RNA, 22 nt, Human
ccagguucuauuuggaauuuau

SEQ ID NO: 2441114 - RNA, 16 nt, Human
ccagguucuauuugga

SEQ ID NO: 2441115 - RNA, 21 nt, Human
ccagguucuccguuagcuccu

SEQ ID NO: 2441116 - RNA, 15 nt, Human
ccagguucuauuugg

SEQ ID NO: 2441117 - RNA, 19 nt, Human
ccagguaccagcugcgcuu

SEQ ID NO: 2441118 - RNA, 23 nt, Human
ccagguucuccguuagcuccugu

SEQ ID NO: 2441119 - RNA, 22 nt, Human
ccagguucuccguuagcuccug

SEQ ID NO: 2441120 - RNA, 24 nt, Human
ccagguucuccguuagcuccugug

SEQ ID NO: 2441121 - RNA, 13 nt, Human
ccagguugaaaga

SEQ ID NO: 2441122 - RNA, 22 nt, Human
ccagguuuuucaauuaaacgga

SEQ ID NO: 2441123 - RNA, 21 nt, Human
ccagguuuuucaauuaaacgg

SEQ ID NO: 2441124 - RNA, 20 nt, Human
ccagguuuuucaauuaaacg

SEQ ID NO: 2441125 - RNA, 19 nt, Human
ccagguuuuucaauuaaac

SEQ ID NO: 2441126 - RNA, 18 nt, Human
ccagguuuuucaauuaaa

SEQ ID NO: 2441127 - RNA, 17 nt, Human
ccagguuuuucaauuaa

SEQ ID NO: 2441128 - RNA, 16 nt, Human
ccagguuuuucaauua

SEQ ID NO: 2441129 - RNA, 15 nt, Human
ccagguuuuucaauu

SEQ ID NO: 2441130 - RNA, 14 nt, Human
ccagguuuuucaau

SEQ ID NO: 2441131 - RNA, 16 nt, Human
ccagguugaaagaccu

SEQ ID NO: 2441132 - RNA, 17 nt, Human
ccagguuuuuggucuga

SEQ ID NO: 2441133 - RNA, 15 nt, Human
ccaguaaaauugcca

SEQ ID NO: 2441134 - RNA, 13 nt, Human
ccaguaaaauugc

SEQ ID NO: 2441135 - RNA, 11 nt, Human
ccaguaaaauu

SEQ ID NO: 2441136 - RNA, 23 nt, Human
ccagguuuuucaauuaaacggau

SEQ ID NO: 2441137 - RNA, 22 nt, Human
ccagggacagaggggguggccu

SEQ ID NO: 2441138 - RNA, 21 nt, Human
ccagggacagaggggguggcc

SEQ ID NO: 2441139 - RNA, 15 nt, Human
ccagggacagagggg

SEQ ID NO: 2441140 - RNA, 14 nt, Human
ccagggacagaggg

SEQ ID NO: 2441141 - RNA, 20 nt, Human
ccaggcuuagucacugagac

SEQ ID NO: 2441142 - RNA, 22 nt, Human
ccaggcgggcucaaggaaaggg

SEQ ID NO: 2441143 - RNA, 18 nt, Human
ccaggcgggcucaaggaa

SEQ ID NO: 2441144 - RNA, 17 nt, Human
ccaggcugugggccuca

SEQ ID NO: 2441145 - RNA, 21 nt, Human
ccaggcugugggccucaagga

SEQ ID NO: 2441146 - RNA, 22 nt, Human
ccaggcugugggccucaaggac

SEQ ID NO: 2441147 - RNA, 14 nt, Human
ccagggagaggcca

SEQ ID NO: 2441148 - RNA, 17 nt, Human
ccagggagaggccauga

SEQ ID NO: 2441149 - RNA, 21 nt, Human
ccagggagcauuuuccuccau

SEQ ID NO: 2441150 - RNA, 20 nt, Human
ccagggagcauuuuccucca

SEQ ID NO: 2441151 - RNA, 19 nt, Human
ccagggagcauuuuccucc

SEQ ID NO: 2441152 - RNA, 15 nt, Human
ccagcaagugagagc

SEQ ID NO: 2441153 - RNA, 18 nt, Human
ccagcaacuugucuuuuu

SEQ ID NO: 2441154 - RNA, 16 nt, Human
ccagcaacugaauaaa

SEQ ID NO: 2441155 - RNA, 21 nt, Human
ccagcaacuugucuuuuucug

SEQ ID NO: 2441156 - RNA, 14 nt, Human
ccagauuucacucu

SEQ ID NO: 2441157 - RNA, 17 nt, Human
ccagcaacugaauaaau

SEQ ID NO: 2441158 - RNA, 15 nt, Human
ccagcaacugaauaa

SEQ ID NO: 2441159 - RNA, 13 nt, Human
ccagcaacugaau

SEQ ID NO: 2441160 - RNA, 18 nt, Human
ccagcaacccuccuauca

SEQ ID NO: 2441161 - RNA, 11 nt, Human
ccagcaacuga

SEQ ID NO: 2441162 - RNA, 15 nt, Human
ccagcaacuccaacu

SEQ ID NO: 2441163 - RNA, 22 nt, Human
ccagcaaugacaucucaggggc

SEQ ID NO: 2441164 - RNA, 21 nt, Human
ccagcaaugacaucucagggg

SEQ ID NO: 2441165 - RNA, 12 nt, Human
ccagcaaugaca

SEQ ID NO: 2441166 - RNA, 17 nt, Human
ccagcaauauguaaaua

SEQ ID NO: 2441167 - RNA, 17 nt, Human
ccagcaaugauguccag

SEQ ID NO: 2441168 - RNA, 23 nt, Human
ccagcaaugacaucucaggggcc

SEQ ID NO: 2441169 - RNA, 16 nt, Human
ccagcaauucuccugc

SEQ ID NO: 2441170 - RNA, 18 nt, Human
ccagcaauucuccugccu

SEQ ID NO: 2441171 - RNA, 19 nt, Human
ccagcaauucuccugccuc

SEQ ID NO: 2441172 - RNA, 20 nt, Human
ccagcaauucuccugccuca

SEQ ID NO: 2441173 - RNA, 17 nt, Human
ccagcacuaaagcagug

SEQ ID NO: 2441174 - RNA, 18 nt, Human
ccagcaaugauguccaga

SEQ ID NO: 2441175 - RNA, 19 nt, Human
ccagauuuacacugggaga

SEQ ID NO: 2441176 - RNA, 18 nt, Human
ccagcacuaaagcagugg

SEQ ID NO: 2441177 - RNA, 22 nt, Human
ccagcaagugagagcugggugu

SEQ ID NO: 2441178 - RNA, 21 nt, Human
ccagcaagugagagcugggug

SEQ ID NO: 2441179 - RNA, 20 nt, Human
ccagcaagugagagcugggu

SEQ ID NO: 2441180 - RNA, 16 nt, Human
ccagcaagugagagcu

SEQ ID NO: 2441181 - RNA, 22 nt, Human
ccagccccacagcccacguccu

SEQ ID NO: 2441182 - RNA, 17 nt, Human
ccagccccacccaggag

SEQ ID NO: 2441183 - RNA, 18 nt, Human
ccagccccacccaggagg

SEQ ID NO: 2441184 - RNA, 15 nt, Human
ccagccccagugccc

SEQ ID NO: 2441185 - RNA, 13 nt, Human
ccagccccagugc

SEQ ID NO: 2441186 - RNA, 23 nt, Human
ccagccccaaaacucuccucugc

SEQ ID NO: 2441187 - RNA, 14 nt, Human
ccagccagggcugc

SEQ ID NO: 2441188 - RNA, 13 nt, Human
ccagccagggcug

SEQ ID NO: 2441189 - RNA, 15 nt, Human
ccagccagggcugcu

SEQ ID NO: 2441190 - RNA, 19 nt, Human
ccagccagugaccugagga

SEQ ID NO: 2441191 - RNA, 20 nt, Human
ccagccagugaccugaggaa

SEQ ID NO: 2441192 - RNA, 22 nt, Human
ccagccagugaccugaggaagc

SEQ ID NO: 2441193 - RNA, 21 nt, Human
ccagccauacuuaucucucug

SEQ ID NO: 2441194 - RNA, 15 nt, Human
ccagccccacagccc

SEQ ID NO: 2441195 - RNA, 14 nt, Human
ccagccccacagcc

SEQ ID NO: 2441196 - RNA, 13 nt, Human
ccagccccacagc

SEQ ID NO: 2441197 - RNA, 23 nt, Human
ccagccagugaccugaggaagcg

SEQ ID NO: 2441198 - RNA, 21 nt, Human
ccagccccacagcccacgucc

SEQ ID NO: 2441199 - RNA, 19 nt, Human
ccagccccacagcccacgu

SEQ ID NO: 2441200 - RNA, 14 nt, Human
ccagccccacccag

SEQ ID NO: 2441201 - RNA, 15 nt, Human
ccagccccacccagg

SEQ ID NO: 2441202 - RNA, 16 nt, Human
ccagccccacccagga

SEQ ID NO: 2441203 - RNA, 20 nt, Human
ccagcccuugagcuccccaa

SEQ ID NO: 2441204 - RNA, 15 nt, Human
ccagcccuguggaag

SEQ ID NO: 2441205 - RNA, 18 nt, Human
ccagcccuguggaaggga

SEQ ID NO: 2441206 - RNA, 17 nt, Human
ccagcccuuagcaggga

SEQ ID NO: 2441207 - RNA, 21 nt, Human
ccagcccuccuuaucaaagga

SEQ ID NO: 2441208 - RNA, 21 nt, Human
ccagcccucccuguccuccuc

SEQ ID NO: 2441209 - RNA, 22 nt, Human
ccagcccucccuguccuccucg

SEQ ID NO: 2441210 - RNA, 14 nt, Human
ccagcccuguggaa

SEQ ID NO: 2441211 - RNA, 16 nt, Human
ccagcccuuagcaggg

SEQ ID NO: 2441212 - RNA, 16 nt, Human
ccagcccuauggaugu

SEQ ID NO: 2441213 - RNA, 15 nt, Human
ccagcccuauggaug

SEQ ID NO: 2441214 - RNA, 13 nt, Human
ccagcccucaucc

SEQ ID NO: 2441215 - RNA, 16 nt, Human
ccagccccagugccca

SEQ ID NO: 2441216 - RNA, 14 nt, Human
ccagcccucauccc

SEQ ID NO: 2441217 - RNA, 14 nt, Human
ccagcccuccccau

SEQ ID NO: 2441218 - RNA, 20 nt, Human
ccagcccuccccauggagcc

SEQ ID NO: 2441219 - RNA, 21 nt, Human
ccagcccuccccauggagcca

SEQ ID NO: 2441220 - RNA, 13 nt, Human
ccagcccucccug

SEQ ID NO: 2441221 - RNA, 14 nt, Human
ccagcccucccugu

SEQ ID NO: 2441222 - RNA, 15 nt, Human
ccagcccucccuguc

SEQ ID NO: 2441223 - RNA, 16 nt, Human
ccagcccucccugucc

SEQ ID NO: 2441224 - RNA, 17 nt, Human
ccagcccucccuguccu

SEQ ID NO: 2441225 - RNA, 18 nt, Human
ccagcccucccuguccuc

SEQ ID NO: 2441226 - RNA, 19 nt, Human
ccagcccucccuguccucc

SEQ ID NO: 2441227 - RNA, 20 nt, Human
ccagcccucccuguccuccu

SEQ ID NO: 2441228 - RNA, 16 nt, Human
ccagccuccucuggac

SEQ ID NO: 2441229 - RNA, 14 nt, Human
ccagccgccaugcu

SEQ ID NO: 2441230 - RNA, 23 nt, Human
ccagccgagauagccaaggccaa

SEQ ID NO: 2441231 - RNA, 20 nt, Human
ccagcccuuugggaggcuga

SEQ ID NO: 2441232 - RNA, 18 nt, Human
ccagccgccaugcuccug

SEQ ID NO: 2441233 - RNA, 19 nt, Human
ccagccgccaugcuccugg

SEQ ID NO: 2441234 - RNA, 11 nt, Human
ccagccucagu

SEQ ID NO: 2441235 - RNA, 10 nt, Human
ccagccucag

SEQ ID NO: 2441236 - RNA, 21 nt, Human
ccagccucaguccuccccuca

SEQ ID NO: 2441237 - RNA, 20 nt, Human
ccagccucaguccuccccuc

SEQ ID NO: 2441238 - RNA, 19 nt, Human
ccagccucaguccuccccu

SEQ ID NO: 2441239 - RNA, 15 nt, Human
ccagccucaguccuc

SEQ ID NO: 2441240 - RNA, 12 nt, Human
ccagccucaguc

SEQ ID NO: 2441241 - RNA, 21 nt, Human
ccagccuccaagcuccaucuc

SEQ ID NO: 2441242 - RNA, 19 nt, Human
ccagccucaucucuuuguu

SEQ ID NO: 2441243 - RNA, 22 nt, Human
ccagcauuccagccccucuggu

SEQ ID NO: 2441244 - RNA, 21 nt, Human
ccagcauuccagccccucugg

SEQ ID NO: 2441245 - RNA, 20 nt, Human
ccagcauuccagccccucug

SEQ ID NO: 2441246 - RNA, 19 nt, Human
ccagcauuccagccccucu

SEQ ID NO: 2441247 - RNA, 18 nt, Human
ccagcauuccagccccuc

SEQ ID NO: 2441248 - RNA, 17 nt, Human
ccagcauuccagccccu

SEQ ID NO: 2441249 - RNA, 16 nt, Human
ccagcauuccagcccc

SEQ ID NO: 2441250 - RNA, 15 nt, Human
ccagcauuccagccc

SEQ ID NO: 2441251 - RNA, 14 nt, Human
ccagcauuccagcc

SEQ ID NO: 2441252 - RNA, 23 nt, Human
ccagcauaauacuugcuuuggaa

SEQ ID NO: 2441253 - RNA, 22 nt, Human
ccagcaguugaaugacaacaga

SEQ ID NO: 2441254 - RNA, 15 nt, Human
ccagcaguuugggag

SEQ ID NO: 2441255 - RNA, 15 nt, Human
ccagcaguuuucaag

SEQ ID NO: 2441256 - RNA, 22 nt, Human
ccagcaguuuucaagucaaauu

SEQ ID NO: 2441257 - RNA, 21 nt, Human
ccagcaucccuugaccaggcc

SEQ ID NO: 2441258 - RNA, 21 nt, Human
ccagcauccuuuucugcagag

SEQ ID NO: 2441259 - RNA, 18 nt, Human
ccagcaucccuugaccag

SEQ ID NO: 2441260 - RNA, 15 nt, Human
ccagcaucccuugac

SEQ ID NO: 2441261 - RNA, 19 nt, Human
ccagcauccuuuucugcag

SEQ ID NO: 2441262 - RNA, 22 nt, Human
ccagcacugaggaagaacgggg

SEQ ID NO: 2441263 - RNA, 17 nt, Human
ccagcacugaggaagaa

SEQ ID NO: 2441264 - RNA, 15 nt, Human
ccagcacugaggaag

SEQ ID NO: 2441265 - RNA, 14 nt, Human
ccagcacugaggaa

SEQ ID NO: 2441266 - RNA, 13 nt, Human
ccagcacugagga

SEQ ID NO: 2441267 - RNA, 12 nt, Human
ccagcacugagg

SEQ ID NO: 2441268 - RNA, 24 nt, Human
ccagcacuaaagcaguggacacca

SEQ ID NO: 2441269 - RNA, 12 nt, Human
ccagcacuaacg

SEQ ID NO: 2441270 - RNA, 12 nt, Human
ccagcacugcuu

SEQ ID NO: 2441271 - RNA, 13 nt, Human
ccagcacugccca

SEQ ID NO: 2441272 - RNA, 15 nt, Human
ccagcacugcuugag

SEQ ID NO: 2441273 - RNA, 18 nt, Human
ccagcacugcuugaggaa

SEQ ID NO: 2441274 - RNA, 19 nt, Human
ccagcacugcuugaggaaa

SEQ ID NO: 2441275 - RNA, 22 nt, Human
ccagcacugcuugaggaaaaca

SEQ ID NO: 2441276 - RNA, 15 nt, Human
ccagcaggugcugac

SEQ ID NO: 2441277 - RNA, 14 nt, Human
ccagcacugcccaa

SEQ ID NO: 2441278 - RNA, 18 nt, Human
ccagcaggugcugacuuc

SEQ ID NO: 2441279 - RNA, 15 nt, Human
ccagcagguggggag

SEQ ID NO: 2441280 - RNA, 14 nt, Human
ccagcauuccuuuu

SEQ ID NO: 2441281 - RNA, 13 nt, Human
ccagcauuccuuu

SEQ ID NO: 2441282 - RNA, 18 nt, Human
ccagcauuuuacugauuc

SEQ ID NO: 2441283 - RNA, 13 nt, Human
ccagcauugcugg

SEQ ID NO: 2441284 - RNA, 17 nt, Human
ccagcauugcugguucu

SEQ ID NO: 2441285 - RNA, 15 nt, Human
ccagccaaagccucc

SEQ ID NO: 2441286 - RNA, 18 nt, Human
ccagccaaagccuccucc

SEQ ID NO: 2441287 - RNA, 19 nt, Human
ccagccaaagccuccucca

SEQ ID NO: 2441288 - RNA, 13 nt, Human
ccagccaccccgg

SEQ ID NO: 2441289 - RNA, 19 nt, Human
ccagccaaccccuguggag

SEQ ID NO: 2441290 - RNA, 22 nt, Human
ccagccaacuuuugcauguuuu

SEQ ID NO: 2441291 - RNA, 17 nt, Human
ccagccaaacccugucu

SEQ ID NO: 2441292 - RNA, 18 nt, Human
ccagccaaacccugucug

SEQ ID NO: 2441293 - RNA, 19 nt, Human
ccagccaaacccugucuga

SEQ ID NO: 2441294 - RNA, 13 nt, Human
ccagccaaccccu

SEQ ID NO: 2441295 - RNA, 18 nt, Human
ccagccaaccccugugga

SEQ ID NO: 2441296 - RNA, 13 nt, Human
ccagccagauccu

SEQ ID NO: 2441297 - RNA, 19 nt, Human
ccagccagaguuccugcgg

SEQ ID NO: 2441298 - RNA, 23 nt, Human
ccagccagaacguggcucugcug

SEQ ID NO: 2441299 - RNA, 22 nt, Human
ccagccagaacguggcucugcu

SEQ ID NO: 2441300 - RNA, 22 nt, Human
ccagccacucgggaggcugaga

SEQ ID NO: 2441301 - RNA, 21 nt, Human
ccagccacucgggaggcugag

SEQ ID NO: 2441302 - RNA, 20 nt, Human
ccagccacucgggaggcuga

SEQ ID NO: 2441303 - RNA, 14 nt, Human
ccagccacguggag

SEQ ID NO: 2441304 - RNA, 21 nt, Human
ccagccaccccgggcucucug

SEQ ID NO: 2441305 - RNA, 22 nt, Human
ccagccaccccgggcucucugc

SEQ ID NO: 2441306 - RNA, 22 nt, Human
ccagccagcaaugauguccaga

SEQ ID NO: 2441307 - RNA, 21 nt, Human
ccagccagauggacuccagcc

SEQ ID NO: 2441308 - RNA, 19 nt, Human
ccagccagauccucuuggu

SEQ ID NO: 2441309 - RNA, 18 nt, Human
ccagccagauccucuugg

SEQ ID NO: 2441310 - RNA, 13 nt, Human
ccagccagcagcc

SEQ ID NO: 2441311 - RNA, 15 nt, Human
ccagccagcagccag

SEQ ID NO: 2441312 - RNA, 16 nt, Human
ccagccagcagccagc

SEQ ID NO: 2441313 - RNA, 19 nt, Human
ccagccagcagccagcucu

SEQ ID NO: 2441314 - RNA, 23 nt, Human
ccagccagcagccagcucucagc

SEQ ID NO: 2441315 - RNA, 10 nt, Human
ccagccaggc

SEQ ID NO: 2441316 - RNA, 20 nt, Human
ccagccaggcucugugcuga

SEQ ID NO: 2441317 - RNA, 19 nt, Human
ccagccaggcucugugcug

SEQ ID NO: 2441318 - RNA, 18 nt, Human
ccagccaggcucugugcu

SEQ ID NO: 2441319 - RNA, 17 nt, Human
ccagccaggcucugugc

SEQ ID NO: 2441320 - RNA, 15 nt, Human
ccagccaggcucugu

SEQ ID NO: 2441321 - RNA, 14 nt, Human
ccagccaggcucug

SEQ ID NO: 2441322 - RNA, 21 nt, Human
ccagccaggcgggcucaagga

SEQ ID NO: 2441323 - RNA, 17 nt, Human
ccagccaggcgggcuca

SEQ ID NO: 2441324 - RNA, 12 nt, Human
ccagccaggcgg

SEQ ID NO: 2441325 - RNA, 17 nt, Human
ccagccaggccccaggc

SEQ ID NO: 2441326 - RNA, 22 nt, Human
ccagauucuuuccugaggcugg

SEQ ID NO: 2441327 - RNA, 21 nt, Human
ccagauucuuuccugaggcug

SEQ ID NO: 2441328 - RNA, 20 nt, Human
ccagauucuuuccugaggcu

SEQ ID NO: 2441329 - RNA, 19 nt, Human
ccagauucuuuccugaggc

SEQ ID NO: 2441330 - RNA, 17 nt, Human
ccagauguuuccagacu

SEQ ID NO: 2441331 - RNA, 23 nt, Human
ccagauguuuccagacuuccuug

SEQ ID NO: 2441332 - RNA, 18 nt, Human
ccagauucuuuccugagg

SEQ ID NO: 2441333 - RNA, 23 nt, Human
ccagaugcugauguucaguguaa

SEQ ID NO: 2441334 - RNA, 21 nt, Human
ccagaugcugauguucagugu

SEQ ID NO: 2441335 - RNA, 19 nt, Human
ccagaugcugauguucagu

SEQ ID NO: 2441336 - RNA, 15 nt, Human
ccagaugcugauguu

SEQ ID NO: 2441337 - RNA, 17 nt, Human
ccagauggacuccagcc

SEQ ID NO: 2441338 - RNA, 22 nt, Human
ccagaugcugauguucagugua

SEQ ID NO: 2441339 - RNA, 16 nt, Human
ccagauggacuccagc

SEQ ID NO: 2441340 - RNA, 20 nt, Human
ccagaugggggaaagcacag

SEQ ID NO: 2441341 - RNA, 16 nt, Human
ccagaugggggaaagc

SEQ ID NO: 2441342 - RNA, 14 nt, Human
ccagauggggccuc

SEQ ID NO: 2441343 - RNA, 23 nt, Human
ccagagggagugacagaggcagc

SEQ ID NO: 2441344 - RNA, 22 nt, Human
ccagagggagugacagaggcag

SEQ ID NO: 2441345 - RNA, 13 nt, Human
ccagagggccugc

SEQ ID NO: 2441346 - RNA, 16 nt, Human
ccagaggcuggguuca

SEQ ID NO: 2441347 - RNA, 13 nt, Human
ccagagggcccag

SEQ ID NO: 2441348 - RNA, 15 nt, Human
ccagagggcccaggc

SEQ ID NO: 2441349 - RNA, 17 nt, Human
ccagagggcccaggcag

SEQ ID NO: 2441350 - RNA, 16 nt, Human
ccagagggccugcaag

SEQ ID NO: 2441351 - RNA, 15 nt, Human
ccagagggccugcaa

SEQ ID NO: 2441352 - RNA, 23 nt, Human
ccagaugcaccagcccuuagcag

SEQ ID NO: 2441353 - RNA, 15 nt, Human
ccagaggcugcccca

SEQ ID NO: 2441354 - RNA, 18 nt, Human
ccagagggcccaggcagg

SEQ ID NO: 2441355 - RNA, 14 nt, Human
ccagaugcagggca

SEQ ID NO: 2441356 - RNA, 15 nt, Human
ccagaugcagggcag

SEQ ID NO: 2441357 - RNA, 18 nt, Human
ccagaugcagggcaguca

SEQ ID NO: 2441358 - RNA, 18 nt, Human
ccagaugccuucuccaga

SEQ ID NO: 2441359 - RNA, 21 nt, Human
ccagauguuuuacgucuggga

SEQ ID NO: 2441360 - RNA, 19 nt, Human
ccagauguuuuacgucugg

SEQ ID NO: 2441361 - RNA, 23 nt, Human
ccagauucuuuccugaggcuggg

SEQ ID NO: 2441362 - RNA, 20 nt, Human
ccagauugcaacaggcuggg

SEQ ID NO: 2441363 - RNA, 19 nt, Human
ccagauugcaacaggcugg

SEQ ID NO: 2441364 - RNA, 12 nt, Human
ccagauuucacu

SEQ ID NO: 2441365 - RNA, 22 nt, Human
ccagauuuaugcauauuauuuu

SEQ ID NO: 2441366 - RNA, 13 nt, Human
ccagauuuaugca

SEQ ID NO: 2441367 - RNA, 21 nt, Human
ccagauugcaacaggcugggc

SEQ ID NO: 2441368 - RNA, 14 nt, Human
ccacugucacccuc

SEQ ID NO: 2441369 - RNA, 19 nt, Human
ccacuguacuugcucuuga

SEQ ID NO: 2441370 - RNA, 18 nt, Human
ccacuguacuugcucuug

SEQ ID NO: 2441371 - RNA, 17 nt, Human
ccacuguacuugcucuu

SEQ ID NO: 2441372 - RNA, 11 nt, Human
ccacuggggaa

SEQ ID NO: 2441373 - RNA, 22 nt, Human
ccacuggggaaauaacagcugu

SEQ ID NO: 2441374 - RNA, 14 nt, Human
ccacuguaaaauga

SEQ ID NO: 2441375 - RNA, 19 nt, Human
ccagacaccuugacagggc

SEQ ID NO: 2441376 - RNA, 17 nt, Human
ccagacaccuugacagg

SEQ ID NO: 2441377 - RNA, 20 nt, Human
ccacuguacuugcucuugau

SEQ ID NO: 2441378 - RNA, 15 nt, Human
ccagacacccaggac

SEQ ID NO: 2441379 - RNA, 16 nt, Human
ccagacacccaggacu

SEQ ID NO: 2441380 - RNA, 14 nt, Human
ccagacacccagga

SEQ ID NO: 2441381 - RNA, 12 nt, Human
ccacuggggaaa

SEQ ID NO: 2441382 - RNA, 18 nt, Human
ccacuguaaaaugaaauu

SEQ ID NO: 2441383 - RNA, 14 nt, Human
ccagagaggguggu

SEQ ID NO: 2441384 - RNA, 18 nt, Human
ccagacccccuggagacu

SEQ ID NO: 2441385 - RNA, 23 nt, Human
ccagagaggguggugaccucugc

SEQ ID NO: 2441386 - RNA, 21 nt, Human
ccagagaggguggugaccucu

SEQ ID NO: 2441387 - RNA, 20 nt, Human
ccagacaccuugacagggca

SEQ ID NO: 2441388 - RNA, 12 nt, Human
ccagacccccac

SEQ ID NO: 2441389 - RNA, 14 nt, Human
ccagacccaguggg

SEQ ID NO: 2441390 - RNA, 12 nt, Human
ccagacccccug

SEQ ID NO: 2441391 - RNA, 16 nt, Human
ccagacccccuggaga

SEQ ID NO: 2441392 - RNA, 14 nt, Human
ccagacccccaccc

SEQ ID NO: 2441393 - RNA, 15 nt, Human
ccagacccccacccc

SEQ ID NO: 2441394 - RNA, 16 nt, Human
ccagacccccaccccu

SEQ ID NO: 2441395 - RNA, 19 nt, Human
ccagacccccaccccuucc

SEQ ID NO: 2441396 - RNA, 21 nt, Human
ccagacccccaccccuucccc

SEQ ID NO: 2441397 - RNA, 22 nt, Human
ccagacccccaccccuucccca

SEQ ID NO: 2441398 - RNA, 14 nt, Human
ccagacccccagca

SEQ ID NO: 2441399 - RNA, 19 nt, Human
ccagacccccagcaacccu

SEQ ID NO: 2441400 - RNA, 19 nt, Human
ccagagcugccaccugccu

SEQ ID NO: 2441401 - RNA, 16 nt, Human
ccagagcugccaccug

SEQ ID NO: 2441402 - RNA, 15 nt, Human
ccagagcugccaccu

SEQ ID NO: 2441403 - RNA, 14 nt, Human
ccagagcugccacc

SEQ ID NO: 2441404 - RNA, 14 nt, Human
ccagagcugggagg

SEQ ID NO: 2441405 - RNA, 21 nt, Human
ccagagcugggaggcauggcc

SEQ ID NO: 2441406 - RNA, 19 nt, Human
ccagagcuguuuauggccu

SEQ ID NO: 2441407 - RNA, 20 nt, Human
ccagagcuguuuauggccuc

SEQ ID NO: 2441408 - RNA, 21 nt, Human
ccagagcuguuuauggccuca

SEQ ID NO: 2441409 - RNA, 23 nt, Human
ccagaggaacuguccagagagca

SEQ ID NO: 2441410 - RNA, 22 nt, Human
ccagaggaacuguccagagagc

SEQ ID NO: 2441411 - RNA, 21 nt, Human
ccagaggaacuguccagagag

SEQ ID NO: 2441412 - RNA, 20 nt, Human
ccagaggaacuguccagaga

SEQ ID NO: 2441413 - RNA, 17 nt, Human
ccagaggaaggggccag

SEQ ID NO: 2441414 - RNA, 19 nt, Human
ccagaggaaggggccagag

SEQ ID NO: 2441415 - RNA, 22 nt, Human
ccagagcuguuuauggccucag

SEQ ID NO: 2441416 - RNA, 23 nt, Human
ccagagcuguuuauggccucagc

SEQ ID NO: 2441417 - RNA, 19 nt, Human
ccagaggaacuguccagag

SEQ ID NO: 2441418 - RNA, 14 nt, Human
ccagaggaacuguc

SEQ ID NO: 2441419 - RNA, 24 nt, Human
ccagagcuguuuauggccucagcu

SEQ ID NO: 2441420 - RNA, 20 nt, Human
ccagagauccaaaagaagcc

SEQ ID NO: 2441421 - RNA, 22 nt, Human
ccagacccccagcaacccuccu

SEQ ID NO: 2441422 - RNA, 17 nt, Human
ccagaccccucuggcca

SEQ ID NO: 2441423 - RNA, 13 nt, Human
ccagagauccaaa

SEQ ID NO: 2441424 - RNA, 14 nt, Human
ccagagaugccucc

SEQ ID NO: 2441425 - RNA, 15 nt, Human
ccagagaugccucca

SEQ ID NO: 2441426 - RNA, 16 nt, Human
ccagagaugccuccac

SEQ ID NO: 2441427 - RNA, 17 nt, Human
ccagagaugccuccacc

SEQ ID NO: 2441428 - RNA, 18 nt, Human
ccagagaugccuccaccg

SEQ ID NO: 2441429 - RNA, 20 nt, Human
ccagagaugccuccaccgcu

SEQ ID NO: 2441430 - RNA, 23 nt, Human
ccagagaugccuccaccgcugcc

SEQ ID NO: 2441431 - RNA, 22 nt, Human
ccagagauggagguucucucgg

SEQ ID NO: 2441432 - RNA, 16 nt, Human
ccagagaugggacugg

SEQ ID NO: 2441433 - RNA, 21 nt, Human
ccagagaugggacugggaggg

SEQ ID NO: 2441434 - RNA, 22 nt, Human
ccagagaugggacugggagggc

SEQ ID NO: 2441435 - RNA, 12 nt, Human
ccagagcacugg

SEQ ID NO: 2441436 - RNA, 13 nt, Human
ccagagcaaaaua

SEQ ID NO: 2441437 - RNA, 23 nt, Human
ccagagaugggacugggagggcc

SEQ ID NO: 2441438 - RNA, 19 nt, Human
ccagagcacagaucuguuu

SEQ ID NO: 2441439 - RNA, 13 nt, Human
ccagagcugccac

SEQ ID NO: 2441440 - RNA, 12 nt, Human
ccagagcugcca

SEQ ID NO: 2441441 - RNA, 11 nt, Human
ccagagcugcc

SEQ ID NO: 2441442 - RNA, 21 nt, Human
ccagagcuacccgcagaguuc

SEQ ID NO: 2441443 - RNA, 20 nt, Human
ccagagcuacccgcagaguu

SEQ ID NO: 2441444 - RNA, 21 nt, Human
ccagagggagugacagaggca

SEQ ID NO: 2441445 - RNA, 20 nt, Human
ccagagggagugacagaggc

SEQ ID NO: 2441446 - RNA, 19 nt, Human
ccagagggagugacagagg

SEQ ID NO: 2441447 - RNA, 18 nt, Human
ccagagggagugacagag

SEQ ID NO: 2441448 - RNA, 21 nt, Human
ccagaggcccccagcccaggg

SEQ ID NO: 2441449 - RNA, 19 nt, Human
ccagaggcccccagcccag

SEQ ID NO: 2441450 - RNA, 22 nt, Human
ccagaggcccccagcccagggc

SEQ ID NO: 2441451 - RNA, 19 nt, Human
ccagaggcuauuauuuuca

SEQ ID NO: 2441452 - RNA, 15 nt, Human
ccagaggcuggguuc

SEQ ID NO: 2441453 - RNA, 12 nt, Human
ccagaggcuggg

SEQ ID NO: 2441454 - RNA, 14 nt, Human
ccagaggcugcaga

SEQ ID NO: 2441455 - RNA, 11 nt, Human
ccagaggcucg

SEQ ID NO: 2441456 - RNA, 17 nt, Human
ccagagggagugacaga

SEQ ID NO: 2441457 - RNA, 16 nt, Human
ccagagggagugacag

SEQ ID NO: 2441458 - RNA, 22 nt, Human
ccagaggagggcagcagaaggg

SEQ ID NO: 2441459 - RNA, 12 nt, Human
ccagaggagggc

SEQ ID NO: 2441460 - RNA, 21 nt, Human
ccagaggauugcugccccauc

SEQ ID NO: 2441461 - RNA, 18 nt, Human
ccagaggcccccagccca

SEQ ID NO: 2441462 - RNA, 15 nt, Human
ccagaggcccccagc

SEQ ID NO: 2441463 - RNA, 14 nt, Human
ccagaggcccccag

SEQ ID NO: 2441464 - RNA, 22 nt, Human
ccagaggaaggggccagaggcu

SEQ ID NO: 2441465 - RNA, 21 nt, Human
ccagaggagagaggacccccu

SEQ ID NO: 2441466 - RNA, 22 nt, Human
ccagaggagagaggacccccug

SEQ ID NO: 2441467 - RNA, 13 nt, Human
ccagaggagacau

SEQ ID NO: 2441468 - RNA, 16 nt, Human
ccacaccucugccaga

SEQ ID NO: 2441469 - RNA, 15 nt, Human
ccacaccucugccag

SEQ ID NO: 2441470 - RNA, 12 nt, Human
ccacaccugagc

SEQ ID NO: 2441471 - RNA, 13 nt, Human
ccacacuccagcu

SEQ ID NO: 2441472 - RNA, 14 nt, Human
ccacacuccagcug

SEQ ID NO: 2441473 - RNA, 17 nt, Human
ccacacuccagcuggga

SEQ ID NO: 2441474 - RNA, 14 nt, Human
ccacaccucugcca

SEQ ID NO: 2441475 - RNA, 16 nt, Human
ccacaccucccugaac

SEQ ID NO: 2441476 - RNA, 17 nt, Human
ccacaccucccugaacc

SEQ ID NO: 2441477 - RNA, 14 nt, Human
ccacaccuccacag

SEQ ID NO: 2441478 - RNA, 13 nt, Human
ccacaccuccaca

SEQ ID NO: 2441479 - RNA, 22 nt, Human
ccacaccucaguucccuuggcc

SEQ ID NO: 2441480 - RNA, 17 nt, Human
ccacaccuccacaguuc

SEQ ID NO: 2441481 - RNA, 15 nt, Human
ccacaccuccacagu

SEQ ID NO: 2441482 - RNA, 23 nt, Human
ccacaccuccacaguucaguggc

SEQ ID NO: 2441483 - RNA, 14 nt, Human
ccacaccucccuga

SEQ ID NO: 2441484 - RNA, 14 nt, Human
ccacacccagccca

SEQ ID NO: 2441485 - RNA, 13 nt, Human
ccacacccagccc

SEQ ID NO: 2441486 - RNA, 14 nt, Human
ccacacacucgccc

SEQ ID NO: 2441487 - RNA, 23 nt, Human
ccacacccuguacuguucugugu

SEQ ID NO: 2441488 - RNA, 14 nt, Human
ccacaccgcagaag

SEQ ID NO: 2441489 - RNA, 20 nt, Human
ccacaccguguaaaccaaag

SEQ ID NO: 2441490 - RNA, 18 nt, Human
ccacaccguguaaaccaa

SEQ ID NO: 2441491 - RNA, 16 nt, Human
ccacaccguguaaacc

SEQ ID NO: 2441492 - RNA, 15 nt, Human
ccacaccgcagaagc

SEQ ID NO: 2441493 - RNA, 18 nt, Human
ccacaccucaguucccuu

SEQ ID NO: 2441494 - RNA, 19 nt, Human
ccacaccucaguucccuug

SEQ ID NO: 2441495 - RNA, 18 nt, Human
ccacacacacagaaaaua

SEQ ID NO: 2441496 - RNA, 19 nt, Human
ccacacacacagaaaauau

SEQ ID NO: 2441497 - RNA, 20 nt, Human
ccacacacacagaaaauaua

SEQ ID NO: 2441498 - RNA, 21 nt, Human
ccacacacacagaaaauauac

SEQ ID NO: 2441499 - RNA, 17 nt, Human
ccacacacacagaaaau

SEQ ID NO: 2441500 - RNA, 14 nt, Human
ccaaacccugucug

SEQ ID NO: 2441501 - RNA, 16 nt, Human
ccaaaccaccuucccu

SEQ ID NO: 2441502 - RNA, 14 nt, Human
ccaaaccaccuucc

SEQ ID NO: 2441503 - RNA, 20 nt, Human
ccaaaccaccagaagcccag

SEQ ID NO: 2441504 - RNA, 16 nt, Human
ccaaacccaugaggca

SEQ ID NO: 2441505 - RNA, 22 nt, Human
ccacacacacagaaaauauacu

SEQ ID NO: 2441506 - RNA, 23 nt, Human
ccacacacacagaaaauauacug

SEQ ID NO: 2441507 - RNA, 23 nt, Human
ccacacacacccacacacucgcc

SEQ ID NO: 2441508 - RNA, 16 nt, Human
ccacacacacccacac

SEQ ID NO: 2441509 - RNA, 12 nt, Human
ccacacacagag

SEQ ID NO: 2441510 - RNA, 16 nt, Human
ccacacacagaggaag

SEQ ID NO: 2441511 - RNA, 17 nt, Human
ccacacacagaggaaga

SEQ ID NO: 2441512 - RNA, 18 nt, Human
ccacacacagaggaagag

SEQ ID NO: 2441513 - RNA, 19 nt, Human
ccacacacagcugggcugu

SEQ ID NO: 2441514 - RNA, 22 nt, Human
ccacacacagaggaagagcagg

SEQ ID NO: 2441515 - RNA, 20 nt, Human
ccacacacagcugggcugug

SEQ ID NO: 2441516 - RNA, 12 nt, Human
ccacacacccca

SEQ ID NO: 2441517 - RNA, 12 nt, Human
ccacacccagcc

SEQ ID NO: 2441518 - RNA, 15 nt, Human
ccacacacucgcccg

SEQ ID NO: 2441519 - RNA, 23 nt, Human
ccacacacgcaggaacucccagc

SEQ ID NO: 2441520 - RNA, 22 nt, Human
ccacacacgcaggaacucccag

SEQ ID NO: 2441521 - RNA, 18 nt, Human
ccacacacgcaggaacuc

SEQ ID NO: 2441522 - RNA, 15 nt, Human
ccacacacgcaggaa

SEQ ID NO: 2441523 - RNA, 13 nt, Human
ccacacaccccaa

SEQ ID NO: 2441524 - RNA, 21 nt, Human
ccacccaagggccuggccuga

SEQ ID NO: 2441525 - RNA, 20 nt, Human
ccacccaagggccuggccug

SEQ ID NO: 2441526 - RNA, 22 nt, Human
ccacccaagggccuggccugag

SEQ ID NO: 2441527 - RNA, 13 nt, Human
ccacccaccucag

SEQ ID NO: 2441528 - RNA, 15 nt, Human
ccacccaccucagcc

SEQ ID NO: 2441529 - RNA, 14 nt, Human
ccacccaccucagc

SEQ ID NO: 2441530 - RNA, 16 nt, Human
ccacccaccucagccu

SEQ ID NO: 2441531 - RNA, 15 nt, Human
ccacccacuucccug

SEQ ID NO: 2441532 - RNA, 19 nt, Human
ccacccaccucccugccuc

SEQ ID NO: 2441533 - RNA, 15 nt, Human
ccacccaaugcugau

SEQ ID NO: 2441534 - RNA, 17 nt, Human
ccacccaccucccugcc

SEQ ID NO: 2441535 - RNA, 15 nt, Human
ccacccaccagggcg

SEQ ID NO: 2441536 - RNA, 19 nt, Human
ccacccaagggccuggccu

SEQ ID NO: 2441537 - RNA, 17 nt, Human
ccacccaagggccuggc

SEQ ID NO: 2441538 - RNA, 17 nt, Human
ccaccaaggucuucagc

SEQ ID NO: 2441539 - RNA, 11 nt, Human
ccaccaagggc

SEQ ID NO: 2441540 - RNA, 21 nt, Human
ccacccaagcuuggcagccga

SEQ ID NO: 2441541 - RNA, 11 nt, Human
ccaccaagguc

SEQ ID NO: 2441542 - RNA, 16 nt, Human
ccacccaagcuuggca

SEQ ID NO: 2441543 - RNA, 16 nt, Human
ccacccaagggccugg

SEQ ID NO: 2441544 - RNA, 22 nt, Human
ccaccaagccuggucagcccaa

SEQ ID NO: 2441545 - RNA, 21 nt, Human
ccaccaagccuggucagccca

SEQ ID NO: 2441546 - RNA, 20 nt, Human
ccaccaacauacucccaucu

SEQ ID NO: 2441547 - RNA, 16 nt, Human
ccaccacacccagccc

SEQ ID NO: 2441548 - RNA, 14 nt, Human
ccaccacacccagc

SEQ ID NO: 2441549 - RNA, 18 nt, Human
ccaccaacauacucccau

SEQ ID NO: 2441550 - RNA, 14 nt, Human
ccaccaacauacuc

SEQ ID NO: 2441551 - RNA, 19 nt, Human
ccacaugagucccaguggg

SEQ ID NO: 2441552 - RNA, 17 nt, Human
ccacaugagucccagug

SEQ ID NO: 2441553 - RNA, 13 nt, Human
ccacaugaguccc

SEQ ID NO: 2441554 - RNA, 23 nt, Human
ccacaugagucccagugggaggc

SEQ ID NO: 2441555 - RNA, 22 nt, Human
ccacaugagucccagugggagg

SEQ ID NO: 2441556 - RNA, 19 nt, Human
ccacaugccaagcacugug

SEQ ID NO: 2441557 - RNA, 20 nt, Human
ccaccaaaggccagggucac

SEQ ID NO: 2441558 - RNA, 23 nt, Human
ccacaucuugcucugcugacaga

SEQ ID NO: 2441559 - RNA, 22 nt, Human
ccacaucuugcucugcugacag

SEQ ID NO: 2441560 - RNA, 20 nt, Human
ccacaucuugcucugcugac

SEQ ID NO: 2441561 - RNA, 16 nt, Human
ccacaucuugcucugc

SEQ ID NO: 2441562 - RNA, 19 nt, Human
ccacacugauccagcccug

SEQ ID NO: 2441563 - RNA, 22 nt, Human
ccacacugauccagcccugagu

SEQ ID NO: 2441564 - RNA, 23 nt, Human
ccacacugcuaggugggccagcc

SEQ ID NO: 2441565 - RNA, 22 nt, Human
ccacauagugaugguuccccug

SEQ ID NO: 2441566 - RNA, 21 nt, Human
ccacauagugaugguuccccu

SEQ ID NO: 2441567 - RNA, 19 nt, Human
ccacauagugaugguuccc

SEQ ID NO: 2441568 - RNA, 14 nt, Human
ccacacuggacucc

SEQ ID NO: 2441569 - RNA, 13 nt, Human
ccacacuggacuc

SEQ ID NO: 2441570 - RNA, 23 nt, Human
ccacaucugccuuaaaaccaaag

SEQ ID NO: 2441571 - RNA, 22 nt, Human
ccacaucugccuuaaaaccaaa

SEQ ID NO: 2441572 - RNA, 14 nt, Human
ccacaucugccuua

SEQ ID NO: 2441573 - RNA, 13 nt, Human
ccacaucugccuu

SEQ ID NO: 2441574 - RNA, 23 nt, Human
ccacaucuugaucugcucagccc

SEQ ID NO: 2441575 - RNA, 22 nt, Human
ccacaucuugaucugcucagcc

SEQ ID NO: 2441576 - RNA, 20 nt, Human
ccacaucuugaucugcucag

SEQ ID NO: 2441577 - RNA, 14 nt, Human
ccacaucuugcucu

SEQ ID NO: 2441578 - RNA, 12 nt, Human
ccacaucugccu

SEQ ID NO: 2441579 - RNA, 19 nt, Human
ccacaucuacguuuuuggu

SEQ ID NO: 2441580 - RNA, 20 nt, Human
ccacauccacacacgcagga

SEQ ID NO: 2441581 - RNA, 14 nt, Human
ccacaucuacguuu

SEQ ID NO: 2441582 - RNA, 15 nt, Human
ccacauccacacacg

SEQ ID NO: 2441583 - RNA, 22 nt, Human
ccacaucaauauugucauuccu

SEQ ID NO: 2441584 - RNA, 23 nt, Human
ccacauagugaugguuccccugu

SEQ ID NO: 2441585 - RNA, 14 nt, Human
ccacaucaaagagg

SEQ ID NO: 2441586 - RNA, 14 nt, Human
ccacccaggagccc

SEQ ID NO: 2441587 - RNA, 16 nt, Human
ccaccccgccugcccu

SEQ ID NO: 2441588 - RNA, 20 nt, Human
ccacccccuucucugcucca

SEQ ID NO: 2441589 - RNA, 23 nt, Human
ccacccccuucucugcuccacca

SEQ ID NO: 2441590 - RNA, 12 nt, Human
ccacccaggagc

SEQ ID NO: 2441591 - RNA, 11 nt, Human
ccacccagccc

SEQ ID NO: 2441592 - RNA, 12 nt, Human
ccacccagccca

SEQ ID NO: 2441593 - RNA, 13 nt, Human
ccacccagcccau

SEQ ID NO: 2441594 - RNA, 22 nt, Human
ccacccagcccauucucucucc

SEQ ID NO: 2441595 - RNA, 15 nt, Human
ccaccucagccuccc

SEQ ID NO: 2441596 - RNA, 14 nt, Human
ccaccuccagaaac

SEQ ID NO: 2441597 - RNA, 16 nt, Human
ccaccucagccuccug

SEQ ID NO: 2441598 - RNA, 10 nt, Human
ccaccucagc

SEQ ID NO: 2441599 - RNA, 14 nt, Human
ccaccucagccuug

SEQ ID NO: 2441600 - RNA, 15 nt, Human
ccaccucagccuugg

SEQ ID NO: 2441601 - RNA, 14 nt, Human
ccaccucagccucc

SEQ ID NO: 2441602 - RNA, 13 nt, Human
ccaccucagccuc

SEQ ID NO: 2441603 - RNA, 12 nt, Human
ccaccucagccu

SEQ ID NO: 2441604 - RNA, 18 nt, Human
ccacccugaaagcccuga

SEQ ID NO: 2441605 - RNA, 16 nt, Human
ccacccugaaagcccu

SEQ ID NO: 2441606 - RNA, 17 nt, Human
ccacccugaaagcccug

SEQ ID NO: 2441607 - RNA, 17 nt, Human
ccacccgaugcugcuuu

SEQ ID NO: 2441608 - RNA, 16 nt, Human
ccacccgaugcugcuu

SEQ ID NO: 2441609 - RNA, 14 nt, Human
ccacccgaugcugc

SEQ ID NO: 2441610 - RNA, 20 nt, Human
ccaccccuugcucucaaccc

SEQ ID NO: 2441611 - RNA, 15 nt, Human
ccacccguggagaug

SEQ ID NO: 2441612 - RNA, 20 nt, Human
ccaccccguagauucccauc

SEQ ID NO: 2441613 - RNA, 13 nt, Human
ccacccgaugcug

SEQ ID NO: 2441614 - RNA, 19 nt, Human
ccaccccucaacaccucug

SEQ ID NO: 2441615 - RNA, 15 nt, Human
ccaccccgcucugca

SEQ ID NO: 2441616 - RNA, 16 nt, Human
ccaccccgcucugcau

SEQ ID NO: 2441617 - RNA, 14 nt, Human
ccaccccgggcucu

SEQ ID NO: 2441618 - RNA, 17 nt, Human
ccaccccgggcucucug

SEQ ID NO: 2441619 - RNA, 21 nt, Human
ccaccccggggacccugugac

SEQ ID NO: 2441620 - RNA, 20 nt, Human
ccaccccggggacccuguga

SEQ ID NO: 2441621 - RNA, 19 nt, Human
ccaccccggggacccugug

SEQ ID NO: 2441622 - RNA, 18 nt, Human
ccaccccggggacccugu

SEQ ID NO: 2441623 - RNA, 18 nt, Human
ccaccccgggcucucugc

SEQ ID NO: 2441624 - RNA, 20 nt, Human
ccaccccgggcucucugcug

SEQ ID NO: 2441625 - RNA, 19 nt, Human
ccacccucagcaccccuuc

SEQ ID NO: 2441626 - RNA, 13 nt, Human
ccacccucagcac

SEQ ID NO: 2441627 - RNA, 12 nt, Human
ccacccuaccug

SEQ ID NO: 2441628 - RNA, 22 nt, Human
ccacccuaccuguucagugucc

SEQ ID NO: 2441629 - RNA, 22 nt, Human
ccacccguucugcuggccugga

SEQ ID NO: 2441630 - RNA, 21 nt, Human
ccacccguucugcuggccugg

SEQ ID NO: 2441631 - RNA, 19 nt, Human
ccacccguucugcuggccu

SEQ ID NO: 2441632 - RNA, 15 nt, Human
ccacccucccuggag

SEQ ID NO: 2441633 - RNA, 13 nt, Human
ccacccucccugg

SEQ ID NO: 2441634 - RNA, 20 nt, Human
ccacccucugagcuuugcau

SEQ ID NO: 2441635 - RNA, 23 nt, Human
ccacccucugagcuuugcauguu

SEQ ID NO: 2441636 - RNA, 15 nt, Human
ccacccuccacucuc

SEQ ID NO: 2441637 - RNA, 22 nt, Human
ccacccucccagaccugccucu

SEQ ID NO: 2441638 - RNA, 17 nt, Human
ccacccucagcaccccu

SEQ ID NO: 2441639 - RNA, 21 nt, Human
ccacccuccccucucuugcac

SEQ ID NO: 2441640 - RNA, 15 nt, Human
ccacccuccccucuc

SEQ ID NO: 2441641 - RNA, 20 nt, Human
ccaccugccuguugggccag

SEQ ID NO: 2441642 - RNA, 17 nt, Human
ccaccugccuguugggc

SEQ ID NO: 2441643 - RNA, 20 nt, Human
ccaccugcccaucacagggu

SEQ ID NO: 2441644 - RNA, 23 nt, Human
ccaccugcccaucacaggguugg

SEQ ID NO: 2441645 - RNA, 12 nt, Human
ccaccugccccc

SEQ ID NO: 2441646 - RNA, 18 nt, Human
ccaccugcccccuucucc

SEQ ID NO: 2441647 - RNA, 20 nt, Human
ccaccugcccccuucuccca

SEQ ID NO: 2441648 - RNA, 16 nt, Human
ccaccugccagggaca

SEQ ID NO: 2441649 - RNA, 20 nt, Human
ccaccugaggugggcccagg

SEQ ID NO: 2441650 - RNA, 16 nt, Human
ccaccugaggugggcc

SEQ ID NO: 2441651 - RNA, 15 nt, Human
ccaccugaggugggc

SEQ ID NO: 2441652 - RNA, 15 nt, Human
ccaccucccucacca

SEQ ID NO: 2441653 - RNA, 22 nt, Human
ccaccugaggugggcccaggac

SEQ ID NO: 2441654 - RNA, 21 nt, Human
ccaccugaggugggcccagga

SEQ ID NO: 2441655 - RNA, 14 nt, Human
ccaccugcccaacc

SEQ ID NO: 2441656 - RNA, 14 nt, Human
ccaccugcccauca

SEQ ID NO: 2441657 - RNA, 15 nt, Human
ccaccugcccaucac

SEQ ID NO: 2441658 - RNA, 16 nt, Human
ccaccugcccaucaca

SEQ ID NO: 2441659 - RNA, 13 nt, Human
ccaccucccucac

SEQ ID NO: 2441660 - RNA, 14 nt, Human
ccaccugagguggg

SEQ ID NO: 2441661 - RNA, 17 nt, Human
ccaccucccacaaagga

SEQ ID NO: 2441662 - RNA, 18 nt, Human
ccaccuccccacgcccuc

SEQ ID NO: 2441663 - RNA, 17 nt, Human
ccaccuccccacgcccu

SEQ ID NO: 2441664 - RNA, 13 nt, Human
ccaccuccccacg

SEQ ID NO: 2441665 - RNA, 12 nt, Human
ccaccuccccac

SEQ ID NO: 2441666 - RNA, 20 nt, Human
ccaccuccaucuucuuugca

SEQ ID NO: 2441667 - RNA, 13 nt, Human
ccaccuccagaaa

SEQ ID NO: 2441668 - RNA, 16 nt, Human
ccaccucagccuugga

SEQ ID NO: 2441669 - RNA, 19 nt, Human
ccaccuccccuauccaccc

SEQ ID NO: 2441670 - RNA, 22 nt, Human
ccaccuccccuauccacccagc

SEQ ID NO: 2441671 - RNA, 20 nt, Human
ccaccucccccucccccuuc

SEQ ID NO: 2441672 - RNA, 17 nt, Human
ccaccuccccuauccac

SEQ ID NO: 2441673 - RNA, 23 nt, Human
ccaccuccccaggccguggcugc

SEQ ID NO: 2441674 - RNA, 16 nt, Human
ccaccuccccaggccg

SEQ ID NO: 2441675 - RNA, 23 nt, Human
ccaccuccccacgcccuccccuc

SEQ ID NO: 2441676 - RNA, 15 nt, Human
ccaccuccccagccu

SEQ ID NO: 2441677 - RNA, 13 nt, Human
ccaccuccccagg

SEQ ID NO: 2441678 - RNA, 14 nt, Human
ccaccuggccucug

SEQ ID NO: 2441679 - RNA, 17 nt, Human
ccaccuggccucugcac

SEQ ID NO: 2441680 - RNA, 20 nt, Human
ccacggacguuuccaucagg

SEQ ID NO: 2441681 - RNA, 19 nt, Human
ccacggacguuuccaucag

SEQ ID NO: 2441682 - RNA, 12 nt, Human
ccacggagccac

SEQ ID NO: 2441683 - RNA, 18 nt, Human
ccacggacguuuccauca

SEQ ID NO: 2441684 - RNA, 15 nt, Human
ccacgcuucucuuug

SEQ ID NO: 2441685 - RNA, 23 nt, Human
ccaccucuucucuuccuguaaca

SEQ ID NO: 2441686 - RNA, 14 nt, Human
ccacgcugucucca

SEQ ID NO: 2441687 - RNA, 15 nt, Human
ccacgcugucuccag

SEQ ID NO: 2441688 - RNA, 18 nt, Human
ccacgcugucuccagacc

SEQ ID NO: 2441689 - RNA, 19 nt, Human
ccacgcugucuccagaccc

SEQ ID NO: 2441690 - RNA, 21 nt, Human
ccacgcugucuccagaccccc

SEQ ID NO: 2441691 - RNA, 13 nt, Human
ccacgcuucucuu

SEQ ID NO: 2441692 - RNA, 20 nt, Human
ccacgcugucuccagacccc

SEQ ID NO: 2441693 - RNA, 16 nt, Human
ccaccuggccucugca

SEQ ID NO: 2441694 - RNA, 15 nt, Human
ccaccuggccucugc

SEQ ID NO: 2441695 - RNA, 22 nt, Human
ccaccugcggugcuaucucccc

SEQ ID NO: 2441696 - RNA, 14 nt, Human
ccaccugcucccag

SEQ ID NO: 2441697 - RNA, 15 nt, Human
ccaccugcucccagg

SEQ ID NO: 2441698 - RNA, 23 nt, Human
ccaccugcccccuucucccacac

SEQ ID NO: 2441699 - RNA, 21 nt, Human
ccaccugcccccuucucccac

SEQ ID NO: 2441700 - RNA, 22 nt, Human
ccaccugcccccuucucccaca

SEQ ID NO: 2441701 - RNA, 14 nt, Human
ccacggccaggcca

SEQ ID NO: 2441702 - RNA, 13 nt, Human
ccacggccaggcc

SEQ ID NO: 2441703 - RNA, 13 nt, Human
ccacggccacugg

SEQ ID NO: 2441704 - RNA, 17 nt, Human
ccacggacuccagucug

SEQ ID NO: 2441705 - RNA, 20 nt, Human
ccacggagccacuccucuga

SEQ ID NO: 2441706 - RNA, 21 nt, Human
ccacggagccacuccucugac

SEQ ID NO: 2441707 - RNA, 12 nt, Human
ccacggccaggc

SEQ ID NO: 2441708 - RNA, 19 nt, Human
ccacguccugucagugccg

SEQ ID NO: 2441709 - RNA, 18 nt, Human
ccacguccugucagugcc

SEQ ID NO: 2441710 - RNA, 16 nt, Human
ccacggccacuggcca

SEQ ID NO: 2441711 - RNA, 22 nt, Human
ccacgucugcgccgccgccgga

SEQ ID NO: 2441712 - RNA, 17 nt, Human
ccacgucugucuucaca

SEQ ID NO: 2441713 - RNA, 15 nt, Human
ccacggccaggccag

SEQ ID NO: 2441714 - RNA, 20 nt, Human
ccacgucugcuaacuuggag

SEQ ID NO: 2441715 - RNA, 17 nt, Human
ccacgugacagugccug

SEQ ID NO: 2441716 - RNA, 14 nt, Human
ccacgugccaggcc

SEQ ID NO: 2441717 - RNA, 15 nt, Human
ccacgugccaggccc

SEQ ID NO: 2441718 - RNA, 15 nt, Human
ccacgugcuaccccc

SEQ ID NO: 2441719 - RNA, 16 nt, Human
ccacgugccaggcccg

SEQ ID NO: 2441720 - RNA, 23 nt, Human
ccacgugccaggcccggggcugg

SEQ ID NO: 2441721 - RNA, 17 nt, Human
ccacguucaccccucca

SEQ ID NO: 2441722 - RNA, 15 nt, Human
ccacguucaccccuc

SEQ ID NO: 2441723 - RNA, 22 nt, Human
ccacguguaacugucagccggg

SEQ ID NO: 2441724 - RNA, 14 nt, Human
ccacguucaccccu

SEQ ID NO: 2441725 - RNA, 20 nt, Human
ccacguuggagaagcccgug

SEQ ID NO: 2441726 - RNA, 23 nt, Human
ccacguucugcucaucauucucu

SEQ ID NO: 2441727 - RNA, 21 nt, Human
ccacguuggagaagcccgugu

SEQ ID NO: 2441728 - RNA, 20 nt, Human
ccacuaacuagagcagcccu

SEQ ID NO: 2441729 - RNA, 11 nt, Human
ccacuaacuag

SEQ ID NO: 2441730 - RNA, 22 nt, Human
ccacuaaaagaucgcaguuugc

SEQ ID NO: 2441731 - RNA, 13 nt, Human
ccacguuucuaaa

SEQ ID NO: 2441732 - RNA, 15 nt, Human
ccacguuccuuacug

SEQ ID NO: 2441733 - RNA, 20 nt, Human
ccacguuccuuacugcagaa

SEQ ID NO: 2441734 - RNA, 19 nt, Human
ccacguucucacacccacc

SEQ ID NO: 2441735 - RNA, 17 nt, Human
ccacguucucacaccca

SEQ ID NO: 2441736 - RNA, 16 nt, Human
ccacguucucacaccc

SEQ ID NO: 2441737 - RNA, 21 nt, Human
ccacguuccuuacugcagaau

SEQ ID NO: 2441738 - RNA, 18 nt, Human
ccacucaguccauagcag

SEQ ID NO: 2441739 - RNA, 22 nt, Human
ccacucacuaggcccccacuug

SEQ ID NO: 2441740 - RNA, 12 nt, Human
ccacucaccccg

SEQ ID NO: 2441741 - RNA, 11 nt, Human
ccacucacccc

SEQ ID NO: 2441742 - RNA, 16 nt, Human
ccacucaccagugucc

SEQ ID NO: 2441743 - RNA, 23 nt, Human
ccacucacacagccaggugccuu

SEQ ID NO: 2441744 - RNA, 22 nt, Human
ccacucacgaauauuaugccca

SEQ ID NO: 2441745 - RNA, 13 nt, Human
ccacucaccccgg

SEQ ID NO: 2441746 - RNA, 18 nt, Human
ccacucacuaggccccca

SEQ ID NO: 2441747 - RNA, 22 nt, Human
ccacucacacagccaggugccu

SEQ ID NO: 2441748 - RNA, 21 nt, Human
ccacucacacagccaggugcc

SEQ ID NO: 2441749 - RNA, 18 nt, Human
ccacucacacagccaggu

SEQ ID NO: 2441750 - RNA, 17 nt, Human
ccacucacacagccagg

SEQ ID NO: 2441751 - RNA, 16 nt, Human
ccacucacacagccag

SEQ ID NO: 2441752 - RNA, 15 nt, Human
ccacucacacagcca

SEQ ID NO: 2441753 - RNA, 14 nt, Human
ccacucacacagcc

SEQ ID NO: 2441754 - RNA, 18 nt, Human
ccacucaagccaagcagc

SEQ ID NO: 2441755 - RNA, 13 nt, Human
ccacucccugcaa

SEQ ID NO: 2441756 - RNA, 12 nt, Human
ccacucccugca

SEQ ID NO: 2441757 - RNA, 16 nt, Human
ccacuccccaccuuca

SEQ ID NO: 2441758 - RNA, 19 nt, Human
ccacuccagaccccuggcu

SEQ ID NO: 2441759 - RNA, 17 nt, Human
ccacuccagaccccugg

SEQ ID NO: 2441760 - RNA, 18 nt, Human
ccacuacauucuguuaau

SEQ ID NO: 2441761 - RNA, 22 nt, Human
ccacuacggaauaguuggcuag

SEQ ID NO: 2441762 - RNA, 21 nt, Human
ccacuaagaauucaaacuggg

SEQ ID NO: 2441763 - RNA, 22 nt, Human
ccacuaacuagagcagcccugg

SEQ ID NO: 2441764 - RNA, 13 nt, Human
ccacuaagcagag

SEQ ID NO: 2441765 - RNA, 16 nt, Human
ccacuacucaaaaauu

SEQ ID NO: 2441766 - RNA, 14 nt, Human
ccacuaagcagagg

SEQ ID NO: 2441767 - RNA, 16 nt, Human
ccacuaagcagaggag

SEQ ID NO: 2441768 - RNA, 23 nt, Human
ccacuacggaauaguuggcuagg

SEQ ID NO: 2441769 - RNA, 12 nt, Human
ccacucaagcca

SEQ ID NO: 2441770 - RNA, 16 nt, Human
ccacucaagccaagca

SEQ ID NO: 2441771 - RNA, 17 nt, Human
ccacucaagccaagcag

SEQ ID NO: 2441772 - RNA, 13 nt, Human
ccacucacacagc

SEQ ID NO: 2441773 - RNA, 20 nt, Human
ccacucaaauuaaucuuucu

SEQ ID NO: 2441774 - RNA, 16 nt, Human
ccacugccauaaaaca

SEQ ID NO: 2441775 - RNA, 19 nt, Human
ccacugcccacccccucaa

SEQ ID NO: 2441776 - RNA, 16 nt, Human
ccacugcccacccccu

SEQ ID NO: 2441777 - RNA, 15 nt, Human
ccacugcccaccccc

SEQ ID NO: 2441778 - RNA, 21 nt, Human
ccacugcacuccagccugggc

SEQ ID NO: 2441779 - RNA, 15 nt, Human
ccacugcccgagcug

SEQ ID NO: 2441780 - RNA, 16 nt, Human
ccacugcccgagcugg

SEQ ID NO: 2441781 - RNA, 17 nt, Human
ccacugcccgagcuggu

SEQ ID NO: 2441782 - RNA, 18 nt, Human
ccacugcccgagcuggug

SEQ ID NO: 2441783 - RNA, 20 nt, Human
ccacugcccgagcuggugca

SEQ ID NO: 2441784 - RNA, 15 nt, Human
ccacugccucagguu

SEQ ID NO: 2441785 - RNA, 14 nt, Human
ccacugccucaggu

SEQ ID NO: 2441786 - RNA, 13 nt, Human
ccacugccucagg

SEQ ID NO: 2441787 - RNA, 16 nt, Human
ccacugccuacugcau

SEQ ID NO: 2441788 - RNA, 22 nt, Human
ccacugcccgagcuggugcauu

SEQ ID NO: 2441789 - RNA, 23 nt, Human
ccacugcccgagcuggugcauua

SEQ ID NO: 2441790 - RNA, 14 nt, Human
ccacugccuacugc

SEQ ID NO: 2441791 - RNA, 15 nt, Human
ccacucccugcaacc

SEQ ID NO: 2441792 - RNA, 18 nt, Human
ccacugcacuccagccug

SEQ ID NO: 2441793 - RNA, 19 nt, Human
ccacugcacuccagccugg

SEQ ID NO: 2441794 - RNA, 20 nt, Human
ccacugcacuccagccuggg

SEQ ID NO: 2441795 - RNA, 23 nt, Human
ccacugccuucgcuucuugccuc

SEQ ID NO: 2441796 - RNA, 22 nt, Human
ccacugccuucgcuucuugccu

SEQ ID NO: 2441797 - RNA, 14 nt, Human
ccacugccuuugac

SEQ ID NO: 2441798 - RNA, 22 nt, Human
ccacugccuuugaccugccucc

SEQ ID NO: 2441799 - RNA, 16 nt, Human
ccacugcgaccacaag

SEQ ID NO: 2441800 - RNA, 18 nt, Human
ccacugccuucgcuucuu

SEQ ID NO: 2441801 - RNA, 16 nt, Human
ccacugccuucgcuuc

SEQ ID NO: 2441802 - RNA, 15 nt, Human
ccacugccuucgcuu

SEQ ID NO: 2441803 - RNA, 14 nt, Human
ccacugccuucgcu

SEQ ID NO: 2441804 - RNA, 19 nt, Human
ccacugccucagguuccua

SEQ ID NO: 2441805 - RNA, 16 nt, Human
ccacugccucagguuc

SEQ ID NO: 2441806 - RNA, 11 nt, Human
ccacugccucu

SEQ ID NO: 2441807 - RNA, 11 nt, Human
ccacuggccau

SEQ ID NO: 2441808 - RNA, 20 nt, Human
ccacuggccaccaggcuggc

SEQ ID NO: 2441809 - RNA, 19 nt, Human
ccacuggccaccaggcugg

SEQ ID NO: 2441810 - RNA, 18 nt, Human
ccacuggccaccaggcug

SEQ ID NO: 2441811 - RNA, 17 nt, Human
ccacuggccaccaggcu

SEQ ID NO: 2441812 - RNA, 16 nt, Human
ccacuggccaccaggc

SEQ ID NO: 2441813 - RNA, 14 nt, Human
ccacuggccaccag

SEQ ID NO: 2441814 - RNA, 13 nt, Human
ccacuggccacca

SEQ ID NO: 2441815 - RNA, 11 nt, Human
ccacuggaggu

SEQ ID NO: 2441816 - RNA, 12 nt, Human
ccacuggccacc

SEQ ID NO: 2441817 - RNA, 11 nt, Human
ccacuggccac

SEQ ID NO: 2441818 - RNA, 22 nt, Human
ccacuggacuugagcuuggcag

SEQ ID NO: 2441819 - RNA, 20 nt, Human
ccacuggacuugagcuuggc

SEQ ID NO: 2441820 - RNA, 21 nt, Human
ccacuggacuugagcuuggca

SEQ ID NO: 2441821 - RNA, 13 nt, Human
ccacugcguuguc

SEQ ID NO: 2441822 - RNA, 16 nt, Human
ccacuggacuugagcu

SEQ ID NO: 2441823 - RNA, 12 nt, Human
ccuucagugccu

SEQ ID NO: 2441824 - RNA, 20 nt, Human
ccuguuaaaagaugaaaaua

SEQ ID NO: 2441825 - RNA, 21 nt, Human
ccuguuaaaagaugaaaauau

SEQ ID NO: 2441826 - RNA, 22 nt, Human
ccuguguugucucuagagcagg

SEQ ID NO: 2441827 - RNA, 20 nt, Human
ccuguguugucucuagagca

SEQ ID NO: 2441828 - RNA, 16 nt, Human
ccuguguugucucuag

SEQ ID NO: 2441829 - RNA, 21 nt, Human
ccugugugugaaaggaagcuc

SEQ ID NO: 2441830 - RNA, 15 nt, Human
ccuguuuaagagaca

SEQ ID NO: 2441831 - RNA, 12 nt, Human
ccuguuuaagag

SEQ ID NO: 2441832 - RNA, 23 nt, Human
ccuguugggccaggagccuccug

SEQ ID NO: 2441833 - RNA, 17 nt, Human
ccuguugguuccaagcc

SEQ ID NO: 2441834 - RNA, 13 nt, Human
ccuguugguucca

SEQ ID NO: 2441835 - RNA, 15 nt, Human
ccuguuacccagaga

SEQ ID NO: 2441836 - RNA, 13 nt, Human
ccuguguuucuag

SEQ ID NO: 2441837 - RNA, 14 nt, Human
ccuguuuguuucug

SEQ ID NO: 2441838 - RNA, 23 nt, Human
ccuguuugaagccugcccuuguc

SEQ ID NO: 2441839 - RNA, 18 nt, Human
ccuguuugaagccugccc

SEQ ID NO: 2441840 - RNA, 18 nt, Human
ccuguuuguuucugaaag

SEQ ID NO: 2441841 - RNA, 20 nt, Human
ccuguuuuagaagguucucu

SEQ ID NO: 2441842 - RNA, 21 nt, Human
ccuguuugggccccucuccca

SEQ ID NO: 2441843 - RNA, 13 nt, Human
ccuguuuucugag

SEQ ID NO: 2441844 - RNA, 19 nt, Human
ccuguuuuauacuguacuu

SEQ ID NO: 2441845 - RNA, 15 nt, Human
ccuguuuaauauuua

SEQ ID NO: 2441846 - RNA, 14 nt, Human
ccuguuuaauauuu

SEQ ID NO: 2441847 - RNA, 14 nt, Human
ccuguuuaaauauu

SEQ ID NO: 2441848 - RNA, 22 nt, Human
ccuguugguuccaagcccugga

SEQ ID NO: 2441849 - RNA, 21 nt, Human
ccuguugguuccaagcccugg

SEQ ID NO: 2441850 - RNA, 21 nt, Human
ccuguuuaauauuuaaacagc

SEQ ID NO: 2441851 - RNA, 16 nt, Human
ccuguuuaauauuuaa

SEQ ID NO: 2441852 - RNA, 16 nt, Human
ccuguuucugcagcca

SEQ ID NO: 2441853 - RNA, 12 nt, Human
ccuguuuccuga

SEQ ID NO: 2441854 - RNA, 13 nt, Human
ccuguguccaugc

SEQ ID NO: 2441855 - RNA, 12 nt, Human
ccuggugcucuc

SEQ ID NO: 2441856 - RNA, 9 nt, Human
ccuggugcu

SEQ ID NO: 2441857 - RNA, 17 nt, Human
ccuggugcucucugcca

SEQ ID NO: 2441858 - RNA, 16 nt, Human
ccuggugcucucugcc

SEQ ID NO: 2441859 - RNA, 15 nt, Human
ccuggugcucucugc

SEQ ID NO: 2441860 - RNA, 13 nt, Human
ccuggugcucucu

SEQ ID NO: 2441861 - RNA, 12 nt, Human
ccuguguacagg

SEQ ID NO: 2441862 - RNA, 19 nt, Human
ccuggugcucucugccacu

SEQ ID NO: 2441863 - RNA, 13 nt, Human
ccuguguagcugg

SEQ ID NO: 2441864 - RNA, 21 nt, Human
ccugugucuugcaauggcagc

SEQ ID NO: 2441865 - RNA, 19 nt, Human
ccugugucuugcaauggca

SEQ ID NO: 2441866 - RNA, 19 nt, Human
ccugugucccaugacccac

SEQ ID NO: 2441867 - RNA, 18 nt, Human
ccugugucccaugaccca

SEQ ID NO: 2441868 - RNA, 14 nt, Human
ccugugucccauga

SEQ ID NO: 2441869 - RNA, 13 nt, Human
ccugugucccaug

SEQ ID NO: 2441870 - RNA, 19 nt, Human
ccuguguccaugcgcucag

SEQ ID NO: 2441871 - RNA, 11 nt, Human
ccuguguccca

SEQ ID NO: 2441872 - RNA, 17 nt, Human
ccugugucuugcaaugg

SEQ ID NO: 2441873 - RNA, 23 nt, Human
ccugugucuucuccaccacgcug

SEQ ID NO: 2441874 - RNA, 18 nt, Human
ccugugugauugacagcu

SEQ ID NO: 2441875 - RNA, 19 nt, Human
ccugugugauugacagcuu

SEQ ID NO: 2441876 - RNA, 22 nt, Human
ccugugugauugacagcuuugc

SEQ ID NO: 2441877 - RNA, 23 nt, Human
ccugugucccaugacccaccccu

SEQ ID NO: 2441878 - RNA, 22 nt, Human
ccugugucccaugacccacccc

SEQ ID NO: 2441879 - RNA, 21 nt, Human
ccugugucccaugacccaccc

SEQ ID NO: 2441880 - RNA, 20 nt, Human
ccugugucccaugacccacc

SEQ ID NO: 2441881 - RNA, 14 nt, Human
ccugugugauugac

SEQ ID NO: 2441882 - RNA, 22 nt, Human
ccugugucuugcaauggcagcc

SEQ ID NO: 2441883 - RNA, 21 nt, Human
ccugugugugcgccuacagga

SEQ ID NO: 2441884 - RNA, 20 nt, Human
ccugugugugcgccuacagg

SEQ ID NO: 2441885 - RNA, 20 nt, Human
ccuguguguccaaaacugcc

SEQ ID NO: 2441886 - RNA, 21 nt, Human
ccuguguguccaaaacugccu

SEQ ID NO: 2441887 - RNA, 13 nt, Human
ccuuaccagcaga

SEQ ID NO: 2441888 - RNA, 17 nt, Human
ccuuaccaacuuucugu

SEQ ID NO: 2441889 - RNA, 15 nt, Human
ccuuaccaacuuucu

SEQ ID NO: 2441890 - RNA, 15 nt, Human
ccuuacauuuccugg

SEQ ID NO: 2441891 - RNA, 17 nt, Human
ccuuaccacugcucuga

SEQ ID NO: 2441892 - RNA, 18 nt, Human
ccuuacagccucugacuu

SEQ ID NO: 2441893 - RNA, 14 nt, Human
ccuuacagccucug

SEQ ID NO: 2441894 - RNA, 16 nt, Human
ccuuacacuuacuguu

SEQ ID NO: 2441895 - RNA, 15 nt, Human
ccuuacacuuacugu

SEQ ID NO: 2441896 - RNA, 17 nt, Human
ccuuacaguaggagccc

SEQ ID NO: 2441897 - RNA, 21 nt, Human
ccuuacaguaggagcccagcu

SEQ ID NO: 2441898 - RNA, 22 nt, Human
ccuuacaaguuagaaaacauaa

SEQ ID NO: 2441899 - RNA, 13 nt, Human
ccuuacacuuacu

SEQ ID NO: 2441900 - RNA, 22 nt, Human
ccuuacacguaccucucaucag

SEQ ID NO: 2441901 - RNA, 20 nt, Human
ccuuaccagcagagcaccuu

SEQ ID NO: 2441902 - RNA, 19 nt, Human
ccuuaccaacuuucuguaa

SEQ ID NO: 2441903 - RNA, 18 nt, Human
ccuuaccaacuuucugua

SEQ ID NO: 2441904 - RNA, 20 nt, Human
ccuuaccacugcucugauga

SEQ ID NO: 2441905 - RNA, 15 nt, Human
ccuuacccucauguu

SEQ ID NO: 2441906 - RNA, 21 nt, Human
ccuuaccaugugccugaucca

SEQ ID NO: 2441907 - RNA, 15 nt, Human
ccuuaccaugugccu

SEQ ID NO: 2441908 - RNA, 14 nt, Human
ccuuacccaucugc

SEQ ID NO: 2441909 - RNA, 15 nt, Human
ccuuaccccuuagcc

SEQ ID NO: 2441910 - RNA, 16 nt, Human
ccuuaccccuuagccu

SEQ ID NO: 2441911 - RNA, 14 nt, Human
ccuuaccuuuuuau

SEQ ID NO: 2441912 - RNA, 16 nt, Human
ccuuacucuucuugaa

SEQ ID NO: 2441913 - RNA, 17 nt, Human
ccuuacucuucuugaaa

SEQ ID NO: 2441914 - RNA, 19 nt, Human
ccuuaccugccaggaagcc

SEQ ID NO: 2441915 - RNA, 19 nt, Human
ccuuacccucauguucuua

SEQ ID NO: 2441916 - RNA, 22 nt, Human
ccuuacucuucuugaaauuuua

SEQ ID NO: 2441917 - RNA, 12 nt, Human
ccuuacugcaga

SEQ ID NO: 2441918 - RNA, 17 nt, Human
ccuuagaagucacacag

SEQ ID NO: 2441919 - RNA, 18 nt, Human
ccuuagaagucacacagu

SEQ ID NO: 2441920 - RNA, 20 nt, Human
ccuuaaggacaaaaaugaac

SEQ ID NO: 2441921 - RNA, 14 nt, Human
ccuuaacuggagcc

SEQ ID NO: 2441922 - RNA, 23 nt, Human
ccuuaacuggagccccaucagcu

SEQ ID NO: 2441923 - RNA, 17 nt, Human
ccuuaacuggagcccca

SEQ ID NO: 2441924 - RNA, 20 nt, Human
ccuuacacaaugguuuucuu

SEQ ID NO: 2441925 - RNA, 14 nt, Human
ccuuacacaauggu

SEQ ID NO: 2441926 - RNA, 17 nt, Human
ccuuaauucacucccac

SEQ ID NO: 2441927 - RNA, 23 nt, Human
ccuuaaucagguccucagagaau

SEQ ID NO: 2441928 - RNA, 14 nt, Human
ccuuaaguaagcaa

SEQ ID NO: 2441929 - RNA, 22 nt, Human
ccuuaaaggcaccaucuaauag

SEQ ID NO: 2441930 - RNA, 23 nt, Human
ccuuaaagaaagucgaauuaaua

SEQ ID NO: 2441931 - RNA, 22 nt, Human
ccuuaaagucaguaacuuaccc

SEQ ID NO: 2441932 - RNA, 12 nt, Human
ccuuaaaggaag

SEQ ID NO: 2441933 - RNA, 12 nt, Human
ccuuaacacuga

SEQ ID NO: 2441934 - RNA, 20 nt, Human
ccuuaaacaaaaauuaaaau

SEQ ID NO: 2441935 - RNA, 23 nt, Human
ccuuaaacagggcaucuccagga

SEQ ID NO: 2441936 - RNA, 15 nt, Human
ccuuaaacugugugg

SEQ ID NO: 2441937 - RNA, 17 nt, Human
ccuuaaaaccaaagagg

SEQ ID NO: 2441938 - RNA, 23 nt, Human
ccuuaaaacuuuaaucccacuug

SEQ ID NO: 2441939 - RNA, 16 nt, Human
ccuguuuucugagccc

SEQ ID NO: 2441940 - RNA, 15 nt, Human
ccuguuuucugagcc

SEQ ID NO: 2441941 - RNA, 17 nt, Human
ccuguuuucugagcccg

SEQ ID NO: 2441942 - RNA, 18 nt, Human
ccuguuuuguuggaaggu

SEQ ID NO: 2441943 - RNA, 17 nt, Human
ccuguuuuguuggaagg

SEQ ID NO: 2441944 - RNA, 17 nt, Human
ccuguuuuuaagcuguu

SEQ ID NO: 2441945 - RNA, 18 nt, Human
ccuguuuuuaagcuguuu

SEQ ID NO: 2441946 - RNA, 19 nt, Human
ccuguuuuuaagcuguuuc

SEQ ID NO: 2441947 - RNA, 13 nt, Human
ccuguuuuucaca

SEQ ID NO: 2441948 - RNA, 16 nt, Human
ccuguuuuucacauuu

SEQ ID NO: 2441949 - RNA, 16 nt, Human
ccuguuuuucugggug

SEQ ID NO: 2441950 - RNA, 15 nt, Human
ccuguuuuucugggu

SEQ ID NO: 2441951 - RNA, 20 nt, Human
ccuguuuuucacauuuuccu

SEQ ID NO: 2441952 - RNA, 17 nt, Human
ccuguuuuucugggugg

SEQ ID NO: 2441953 - RNA, 16 nt, Human
ccuuaaaaccaaagag

SEQ ID NO: 2441954 - RNA, 15 nt, Human
ccuuaaaaccaaaga

SEQ ID NO: 2441955 - RNA, 13 nt, Human
ccuugaacuagga

SEQ ID NO: 2441956 - RNA, 17 nt, Human
ccuucuuuccucuuccc

SEQ ID NO: 2441957 - RNA, 16 nt, Human
ccuucuuuccucuucc

SEQ ID NO: 2441958 - RNA, 21 nt, Human
ccuugaaaauaagaauagaaa

SEQ ID NO: 2441959 - RNA, 15 nt, Human
ccuugaaaauauuuu

SEQ ID NO: 2441960 - RNA, 13 nt, Human
ccuugaacacugg

SEQ ID NO: 2441961 - RNA, 20 nt, Human
ccuugaaaacuuuaugcuaa

SEQ ID NO: 2441962 - RNA, 16 nt, Human
ccuucuugccuucaga

SEQ ID NO: 2441963 - RNA, 21 nt, Human
ccuucuucuuuuugcuguugu

SEQ ID NO: 2441964 - RNA, 20 nt, Human
ccuucuucuuuuugcuguug

SEQ ID NO: 2441965 - RNA, 13 nt, Human
ccuucuuggugcu

SEQ ID NO: 2441966 - RNA, 22 nt, Human
ccuucuucuuuuugcuguuguu

SEQ ID NO: 2441967 - RNA, 12 nt, Human
ccuucuuguagu

SEQ ID NO: 2441968 - RNA, 13 nt, Human
ccuucuuuccucu

SEQ ID NO: 2441969 - RNA, 17 nt, Human
ccuugaagaaccucuca

SEQ ID NO: 2441970 - RNA, 18 nt, Human
ccuugaagaaccucucac

SEQ ID NO: 2441971 - RNA, 19 nt, Human
ccuugaacuuugaccucug

SEQ ID NO: 2441972 - RNA, 16 nt, Human
ccuugaaccacuuccc

SEQ ID NO: 2441973 - RNA, 15 nt, Human
ccuugaaccacuucc

SEQ ID NO: 2441974 - RNA, 20 nt, Human
ccuugaacacugggggaggg

SEQ ID NO: 2441975 - RNA, 19 nt, Human
ccuugaaccacuucccuca

SEQ ID NO: 2441976 - RNA, 14 nt, Human
ccuugaacuccugg

SEQ ID NO: 2441977 - RNA, 23 nt, Human
ccuugaagaacugcaggcccugg

SEQ ID NO: 2441978 - RNA, 22 nt, Human
ccuugaagaacugcaggcccug

SEQ ID NO: 2441979 - RNA, 21 nt, Human
ccuugaagaacugcaggcccu

SEQ ID NO: 2441980 - RNA, 18 nt, Human
ccuugaagaacugcaggc

SEQ ID NO: 2441981 - RNA, 18 nt, Human
ccuugaaccacuucccuc

SEQ ID NO: 2441982 - RNA, 13 nt, Human
ccuugaagauauc

SEQ ID NO: 2441983 - RNA, 14 nt, Human
ccuugaagccacug

SEQ ID NO: 2441984 - RNA, 19 nt, Human
ccuugaagccacugaagcu

SEQ ID NO: 2441985 - RNA, 22 nt, Human
ccuugaagccacugaagcuggg

SEQ ID NO: 2441986 - RNA, 22 nt, Human
ccuugaccauucuccaccugcc

SEQ ID NO: 2441987 - RNA, 13 nt, Human
ccuugacucuuuc

SEQ ID NO: 2441988 - RNA, 23 nt, Human
ccuugaccauucuccaccugcca

SEQ ID NO: 2441989 - RNA, 21 nt, Human
ccuugaauauccccucccagu

SEQ ID NO: 2441990 - RNA, 21 nt, Human
ccuugaaggguaaagaaguuu

SEQ ID NO: 2441991 - RNA, 11 nt, Human
ccuugaagccg

SEQ ID NO: 2441992 - RNA, 23 nt, Human
ccuugaagauaucuugaaaugaa

SEQ ID NO: 2441993 - RNA, 18 nt, Human
ccuugaggagucuugugu

SEQ ID NO: 2441994 - RNA, 16 nt, Human
ccuugaggagucuugu

SEQ ID NO: 2441995 - RNA, 22 nt, Human
ccuugaggaggggcagguaaac

SEQ ID NO: 2441996 - RNA, 21 nt, Human
ccuugaggaaacaacagcuuu

SEQ ID NO: 2441997 - RNA, 16 nt, Human
ccuugacuuagauucu

SEQ ID NO: 2441998 - RNA, 20 nt, Human
ccuugacgucaagucuccuu

SEQ ID NO: 2441999 - RNA, 20 nt, Human
ccuugaguugauucagcucu

SEQ ID NO: 2442000 - RNA, 23 nt, Human
ccuugaggucuuuugacaugugg

SEQ ID NO: 2442001 - RNA, 13 nt, Human
ccuugaggucuuu

SEQ ID NO: 2442002 - RNA, 12 nt, Human
ccuugaggucuu

SEQ ID NO: 2442003 - RNA, 21 nt, Human
ccuugagggugcuuguucccu

SEQ ID NO: 2442004 - RNA, 17 nt, Human
ccuucuuauucucacuc

SEQ ID NO: 2442005 - RNA, 18 nt, Human
ccuucuuauucucacucc

SEQ ID NO: 2442006 - RNA, 21 nt, Human
ccuucuguggcucacagaacc

SEQ ID NO: 2442007 - RNA, 23 nt, Human
ccuucuucacccagcuaaucugu

SEQ ID NO: 2442008 - RNA, 19 nt, Human
ccuucuuauucucacucca

SEQ ID NO: 2442009 - RNA, 20 nt, Human
ccuucuuauucucacuccac

SEQ ID NO: 2442010 - RNA, 14 nt, Human
ccuucuucacccag

SEQ ID NO: 2442011 - RNA, 22 nt, Human
ccuucuuauucucacuccacca

SEQ ID NO: 2442012 - RNA, 22 nt, Human
ccuucuuccaucccaggacacc

SEQ ID NO: 2442013 - RNA, 14 nt, Human
ccuucuuccauccc

SEQ ID NO: 2442014 - RNA, 19 nt, Human
ccuucuucacccagcuaau

SEQ ID NO: 2442015 - RNA, 17 nt, Human
ccuucuucacccagcua

SEQ ID NO: 2442016 - RNA, 15 nt, Human
ccuucuucacccagc

SEQ ID NO: 2442017 - RNA, 19 nt, Human
ccuucuuccaucccaggac

SEQ ID NO: 2442018 - RNA, 18 nt, Human
ccuucuuccaucccagga

SEQ ID NO: 2442019 - RNA, 16 nt, Human
ccuucuuccaucccag

SEQ ID NO: 2442020 - RNA, 19 nt, Human
ccuucuucuuuuugcuguu

SEQ ID NO: 2442021 - RNA, 18 nt, Human
ccuucuucuuuuugcugu

SEQ ID NO: 2442022 - RNA, 21 nt, Human
ccuucuucggggaacuccugg

SEQ ID NO: 2442023 - RNA, 22 nt, Human
ccuucuucggggaacuccugga

SEQ ID NO: 2442024 - RNA, 22 nt, Human
ccuucuguccuggugucacuua

SEQ ID NO: 2442025 - RNA, 21 nt, Human
ccuucuguccuggugucacuu

SEQ ID NO: 2442026 - RNA, 19 nt, Human
ccuucuguccuggugucac

SEQ ID NO: 2442027 - RNA, 18 nt, Human
ccuucuguccugguguca

SEQ ID NO: 2442028 - RNA, 15 nt, Human
ccuucugugaaagua

SEQ ID NO: 2442029 - RNA, 14 nt, Human
ccuucuguggcuca

SEQ ID NO: 2442030 - RNA, 17 nt, Human
ccuucuccucuuguaaa

SEQ ID NO: 2442031 - RNA, 16 nt, Human
ccuucucucaccuccu

SEQ ID NO: 2442032 - RNA, 18 nt, Human
ccuucucucaccuccuaa

SEQ ID NO: 2442033 - RNA, 17 nt, Human
ccuucucucaccuccua

SEQ ID NO: 2442034 - RNA, 14 nt, Human
ccuucucucaucuc

SEQ ID NO: 2442035 - RNA, 19 nt, Human
ccuucucucaccuccuaaa

SEQ ID NO: 2442036 - RNA, 19 nt, Human
ccuucuccuucaccuuugu

SEQ ID NO: 2442037 - RNA, 15 nt, Human
ccuucuccuucaccu

SEQ ID NO: 2442038 - RNA, 18 nt, Human
ccuucuaguuucccacaa

SEQ ID NO: 2442039 - RNA, 17 nt, Human
ccuucuaguuucccaca

SEQ ID NO: 2442040 - RNA, 16 nt, Human
ccuucuaguuucccac

SEQ ID NO: 2442041 - RNA, 20 nt, Human
ccuucuaggguuauugcauu

SEQ ID NO: 2442042 - RNA, 15 nt, Human
ccuucuaguuuccca

SEQ ID NO: 2442043 - RNA, 15 nt, Human
ccuucggcgccuuaa

SEQ ID NO: 2442044 - RNA, 12 nt, Human
ccuucuaccugc

SEQ ID NO: 2442045 - RNA, 20 nt, Human
ccuucuaccugccacucaca

SEQ ID NO: 2442046 - RNA, 18 nt, Human
ccuucuaccugccacuca

SEQ ID NO: 2442047 - RNA, 14 nt, Human
ccuucuacugagcc

SEQ ID NO: 2442048 - RNA, 15 nt, Human
ccuucuacugagccu

SEQ ID NO: 2442049 - RNA, 14 nt, Human
ccuucuaggaagcu

SEQ ID NO: 2442050 - RNA, 17 nt, Human
ccuucuaccugccacuc

SEQ ID NO: 2442051 - RNA, 16 nt, Human
ccuucuaccugccacu

SEQ ID NO: 2442052 - RNA, 15 nt, Human
ccuucuaccugccac

SEQ ID NO: 2442053 - RNA, 14 nt, Human
ccuucuaccugcca

SEQ ID NO: 2442054 - RNA, 13 nt, Human
ccuucuaccugcc

SEQ ID NO: 2442055 - RNA, 20 nt, Human
ccuucggacaacucaguccc

SEQ ID NO: 2442056 - RNA, 18 nt, Human
ccuuugacgccaucccag

SEQ ID NO: 2442057 - RNA, 17 nt, Human
ccuuugacgccauccca

SEQ ID NO: 2442058 - RNA, 16 nt, Human
ccuuugacgccauccc

SEQ ID NO: 2442059 - RNA, 15 nt, Human
ccuuugaccugccuc

SEQ ID NO: 2442060 - RNA, 16 nt, Human
ccuuugaccugccucc

SEQ ID NO: 2442061 - RNA, 19 nt, Human
ccuuucuccccugccccca

SEQ ID NO: 2442062 - RNA, 17 nt, Human
ccuuucucccaggccag

SEQ ID NO: 2442063 - RNA, 22 nt, Human
ccuuucuaguccuauucuauug

SEQ ID NO: 2442064 - RNA, 15 nt, Human
ccuuucuaaacaaga

SEQ ID NO: 2442065 - RNA, 23 nt, Human
ccuuucuaaacaagauuuuaaag

SEQ ID NO: 2442066 - RNA, 17 nt, Human
ccuuucuccagccagca

SEQ ID NO: 2442067 - RNA, 16 nt, Human
ccuuucuccagccagc

SEQ ID NO: 2442068 - RNA, 15 nt, Human
ccuuucuccagccag

SEQ ID NO: 2442069 - RNA, 14 nt, Human
ccuuucuccagcca

SEQ ID NO: 2442070 - RNA, 13 nt, Human
ccuuucuccagcc

SEQ ID NO: 2442071 - RNA, 18 nt, Human
ccuuucuaucauuuuugu

SEQ ID NO: 2442072 - RNA, 10 nt, Human
ccuuucucac

SEQ ID NO: 2442073 - RNA, 18 nt, Human
ccuuucuccccugccccc

SEQ ID NO: 2442074 - RNA, 15 nt, Human
ccuuucuccccugcc

SEQ ID NO: 2442075 - RNA, 20 nt, Human
ccuuucuccagccagcaaug

SEQ ID NO: 2442076 - RNA, 18 nt, Human
ccuuucuccagccagcaa

SEQ ID NO: 2442077 - RNA, 22 nt, Human
ccuuucuccagccagcaaugau

SEQ ID NO: 2442078 - RNA, 14 nt, Human
ccuuucucccaggc

SEQ ID NO: 2442079 - RNA, 19 nt, Human
ccuuguccccacacuccua

SEQ ID NO: 2442080 - RNA, 18 nt, Human
ccuuguccccacacuccu

SEQ ID NO: 2442081 - RNA, 17 nt, Human
ccuuguccccacacucc

SEQ ID NO: 2442082 - RNA, 16 nt, Human
ccuuguccccacacuc

SEQ ID NO: 2442083 - RNA, 15 nt, Human
ccuuguccccacacu

SEQ ID NO: 2442084 - RNA, 14 nt, Human
ccuuguccccacac

SEQ ID NO: 2442085 - RNA, 13 nt, Human
ccuuguccccaca

SEQ ID NO: 2442086 - RNA, 16 nt, Human
ccuuguccacccaccu

SEQ ID NO: 2442087 - RNA, 14 nt, Human
ccuuguccuuuccc

SEQ ID NO: 2442088 - RNA, 15 nt, Human
ccuuguccccugccu

SEQ ID NO: 2442089 - RNA, 21 nt, Human
ccuuguccccacacuccuaca

SEQ ID NO: 2442090 - RNA, 14 nt, Human
ccuuguccccugcc

SEQ ID NO: 2442091 - RNA, 16 nt, Human
ccuugucacugguaga

SEQ ID NO: 2442092 - RNA, 14 nt, Human
ccuuguccacccac

SEQ ID NO: 2442093 - RNA, 17 nt, Human
ccuugguggcaagagcc

SEQ ID NO: 2442094 - RNA, 15 nt, Human
ccuugguggcaagag

SEQ ID NO: 2442095 - RNA, 19 nt, Human
ccuuggugugacccucuga

SEQ ID NO: 2442096 - RNA, 18 nt, Human
ccuuguuacuucugaggu

SEQ ID NO: 2442097 - RNA, 16 nt, Human
ccuuguuacuucugag

SEQ ID NO: 2442098 - RNA, 19 nt, Human
ccuuguuacuucugaggua

SEQ ID NO: 2442099 - RNA, 21 nt, Human
ccuuguuauuucucagacuuu

SEQ ID NO: 2442100 - RNA, 13 nt, Human
ccuuguugcauga

SEQ ID NO: 2442101 - RNA, 16 nt, Human
ccuuguuggagccugc

SEQ ID NO: 2442102 - RNA, 21 nt, Human
ccuuguuccuagaguagagug

SEQ ID NO: 2442103 - RNA, 21 nt, Human
ccuuguucugauaaugaaaau

SEQ ID NO: 2442104 - RNA, 15 nt, Human
ccuuguucacacucu

SEQ ID NO: 2442105 - RNA, 18 nt, Human
ccuuguuggagccugcag

SEQ ID NO: 2442106 - RNA, 17 nt, Human
ccuuguuggagccugca

SEQ ID NO: 2442107 - RNA, 19 nt, Human
ccuuguuuacacauacccu

SEQ ID NO: 2442108 - RNA, 22 nt, Human
ccuuguuucaaacacaaaugca

SEQ ID NO: 2442109 - RNA, 20 nt, Human
ccuuguuucaaacacaaaug

SEQ ID NO: 2442110 - RNA, 14 nt, Human
ccuuguuucaaaca

SEQ ID NO: 2442111 - RNA, 19 nt, Human
ccuuguuggagccugcagg

SEQ ID NO: 2442112 - RNA, 22 nt, Human
ccuuguuugauuuuagcugcag

SEQ ID NO: 2442113 - RNA, 22 nt, Human
ccuugguuaggcauugugggaa

SEQ ID NO: 2442114 - RNA, 21 nt, Human
ccuugguuaggcauuguggga

SEQ ID NO: 2442115 - RNA, 22 nt, Human
ccuuggugucgggcaugacacg

SEQ ID NO: 2442116 - RNA, 21 nt, Human
ccuuggugucgggcaugacac

SEQ ID NO: 2442117 - RNA, 19 nt, Human
ccuuggggcugaugcaguu

SEQ ID NO: 2442118 - RNA, 18 nt, Human
ccuuggggauucuuccau

SEQ ID NO: 2442119 - RNA, 22 nt, Human
ccuuggggauucuuccaucuga

SEQ ID NO: 2442120 - RNA, 14 nt, Human
ccuuggggcaggca

SEQ ID NO: 2442121 - RNA, 15 nt, Human
ccuuggggcaggcag

SEQ ID NO: 2442122 - RNA, 16 nt, Human
ccuuggggcaggcagu

SEQ ID NO: 2442123 - RNA, 14 nt, Human
ccuugggcccuuug

SEQ ID NO: 2442124 - RNA, 12 nt, Human
ccuugggcccuu

SEQ ID NO: 2442125 - RNA, 23 nt, Human
ccuugagugggguuaucucugug

SEQ ID NO: 2442126 - RNA, 22 nt, Human
ccuugagugggguuaucucugu

SEQ ID NO: 2442127 - RNA, 14 nt, Human
ccuugagugggguu

SEQ ID NO: 2442128 - RNA, 14 nt, Human
ccuugaugaagaag

SEQ ID NO: 2442129 - RNA, 23 nt, Human
ccuugauuguucgggugugcaau

SEQ ID NO: 2442130 - RNA, 19 nt, Human
ccuugauggagauauuuac

SEQ ID NO: 2442131 - RNA, 14 nt, Human
ccuugaugugccug

SEQ ID NO: 2442132 - RNA, 21 nt, Human
ccuugauuuuagccuucucug

SEQ ID NO: 2442133 - RNA, 22 nt, Human
ccuugauuuuagccuucucugu

SEQ ID NO: 2442134 - RNA, 20 nt, Human
ccuugauuuuagccuucucu

SEQ ID NO: 2442135 - RNA, 20 nt, Human
ccuugggaggaagcagaaua

SEQ ID NO: 2442136 - RNA, 19 nt, Human
ccuugggaggaagcagaau

SEQ ID NO: 2442137 - RNA, 18 nt, Human
ccuugggaggaagcagaa

SEQ ID NO: 2442138 - RNA, 17 nt, Human
ccuugggaggaagcaga

SEQ ID NO: 2442139 - RNA, 16 nt, Human
ccuugggaggaagcag

SEQ ID NO: 2442140 - RNA, 15 nt, Human
ccuugggaggaagca

SEQ ID NO: 2442141 - RNA, 14 nt, Human
ccuugggaggaagc

SEQ ID NO: 2442142 - RNA, 19 nt, Human
ccuugggaggccccacugg

SEQ ID NO: 2442143 - RNA, 20 nt, Human
ccuugggaggccccacuggg

SEQ ID NO: 2442144 - RNA, 22 nt, Human
ccuugggaggaagcagaauaaa

SEQ ID NO: 2442145 - RNA, 21 nt, Human
ccuugggaggaagcagaauaa

SEQ ID NO: 2442146 - RNA, 23 nt, Human
ccuugggaggaagcagaauaaag

SEQ ID NO: 2442147 - RNA, 15 nt, Human
ccuugggaggcccca

SEQ ID NO: 2442148 - RNA, 17 nt, Human
ccuugcaacuucauguc

SEQ ID NO: 2442149 - RNA, 18 nt, Human
ccuugcaacacacagaca

SEQ ID NO: 2442150 - RNA, 22 nt, Human
ccuugcaacacacagacacacg

SEQ ID NO: 2442151 - RNA, 23 nt, Human
ccuugcaaagaccauaaagucca

SEQ ID NO: 2442152 - RNA, 14 nt, Human
ccuugauugggacu

SEQ ID NO: 2442153 - RNA, 16 nt, Human
ccuugcaacacacaga

SEQ ID NO: 2442154 - RNA, 17 nt, Human
ccuugcaacacacagac

SEQ ID NO: 2442155 - RNA, 12 nt, Human
ccuugggacccc

SEQ ID NO: 2442156 - RNA, 21 nt, Human
ccuuggcuuuuacugaagccu

SEQ ID NO: 2442157 - RNA, 14 nt, Human
ccuucacuuaggaa

SEQ ID NO: 2442158 - RNA, 18 nt, Human
ccuucacugccuuugcuc

SEQ ID NO: 2442159 - RNA, 14 nt, Human
ccuucacugccuuu

SEQ ID NO: 2442160 - RNA, 23 nt, Human
ccuucacuccggugugccugcag

SEQ ID NO: 2442161 - RNA, 10 nt, Human
ccuucagaca

SEQ ID NO: 2442162 - RNA, 11 nt, Human
ccuucagacac

SEQ ID NO: 2442163 - RNA, 20 nt, Human
ccuucacuucugaccacacu

SEQ ID NO: 2442164 - RNA, 18 nt, Human
ccuucagaaccauccaua

SEQ ID NO: 2442165 - RNA, 22 nt, Human
ccuucacuucugaccacacuuc

SEQ ID NO: 2442166 - RNA, 21 nt, Human
ccuucaccuuuguccccaccg

SEQ ID NO: 2442167 - RNA, 14 nt, Human
ccuucaccucugaa

SEQ ID NO: 2442168 - RNA, 17 nt, Human
ccuucaccccaguggcc

SEQ ID NO: 2442169 - RNA, 17 nt, Human
ccuucacauacccuccc

SEQ ID NO: 2442170 - RNA, 14 nt, Human
ccuucacuccggug

SEQ ID NO: 2442171 - RNA, 20 nt, Human
ccuucacuccggugugccug

SEQ ID NO: 2442172 - RNA, 20 nt, Human
ccuucaccuuuguccccacc

SEQ ID NO: 2442173 - RNA, 19 nt, Human
ccuucaccuuuguccccac

SEQ ID NO: 2442174 - RNA, 17 nt, Human
ccuucacagaugggugc

SEQ ID NO: 2442175 - RNA, 14 nt, Human
ccuuagacaguccc

SEQ ID NO: 2442176 - RNA, 12 nt, Human
ccuucacagugu

SEQ ID NO: 2442177 - RNA, 20 nt, Human
ccuucacauccuguguuucu

SEQ ID NO: 2442178 - RNA, 15 nt, Human
ccuucagcccucacc

SEQ ID NO: 2442179 - RNA, 14 nt, Human
ccuucagcccucac

SEQ ID NO: 2442180 - RNA, 10 nt, Human
ccuucagugc

SEQ ID NO: 2442181 - RNA, 11 nt, Human
ccuucagugcc

SEQ ID NO: 2442182 - RNA, 14 nt, Human
ccuucagugccaaa

SEQ ID NO: 2442183 - RNA, 19 nt, Human
ccuucauuuggcauucccc

SEQ ID NO: 2442184 - RNA, 12 nt, Human
ccuucagccuga

SEQ ID NO: 2442185 - RNA, 23 nt, Human
ccuucagauguucucucccaggg

SEQ ID NO: 2442186 - RNA, 22 nt, Human
ccuucagauguucucucccagg

SEQ ID NO: 2442187 - RNA, 13 nt, Human
ccuucagcccuca

SEQ ID NO: 2442188 - RNA, 21 nt, Human
ccuucagacuuugcuucccau

SEQ ID NO: 2442189 - RNA, 18 nt, Human
ccuucagacuuugcuucc

SEQ ID NO: 2442190 - RNA, 17 nt, Human
ccuucagacacccucaa

SEQ ID NO: 2442191 - RNA, 20 nt, Human
ccuucagacacccucaaccu

SEQ ID NO: 2442192 - RNA, 16 nt, Human
ccuucagauggaaacu

SEQ ID NO: 2442193 - RNA, 20 nt, Human
ccuuccucugagccuuggga

SEQ ID NO: 2442194 - RNA, 13 nt, Human
ccuuccucugagg

SEQ ID NO: 2442195 - RNA, 15 nt, Human
ccuuccuucccuggc

SEQ ID NO: 2442196 - RNA, 16 nt, Human
ccuuccuucccuggcu

SEQ ID NO: 2442197 - RNA, 16 nt, Human
ccuuccuugaccagca

SEQ ID NO: 2442198 - RNA, 15 nt, Human
ccuuccucugagccu

SEQ ID NO: 2442199 - RNA, 16 nt, Human
ccuuccucugagccuu

SEQ ID NO: 2442200 - RNA, 15 nt, Human
ccuuccucucuccag

SEQ ID NO: 2442201 - RNA, 17 nt, Human
ccuuccucucuccagau

SEQ ID NO: 2442202 - RNA, 21 nt, Human
ccuuccucuccacugccuucg

SEQ ID NO: 2442203 - RNA, 22 nt, Human
ccuucauuuggcauuccccacu

SEQ ID NO: 2442204 - RNA, 18 nt, Human
ccuucagcccucaccccu

SEQ ID NO: 2442205 - RNA, 12 nt, Human
ccuucagugccc

SEQ ID NO: 2442206 - RNA, 14 nt, Human
ccuucagugcccac

SEQ ID NO: 2442207 - RNA, 15 nt, Human
ccuucagugcccacc

SEQ ID NO: 2442208 - RNA, 16 nt, Human
ccuucagugcccacca

SEQ ID NO: 2442209 - RNA, 16 nt, Human
ccuuccaagagccuga

SEQ ID NO: 2442210 - RNA, 17 nt, Human
ccuuccaagagccugag

SEQ ID NO: 2442211 - RNA, 15 nt, Human
ccuuccaagagccug

SEQ ID NO: 2442212 - RNA, 18 nt, Human
ccuucagugcccaccaac

SEQ ID NO: 2442213 - RNA, 16 nt, Human
ccuuccaacaggagcu

SEQ ID NO: 2442214 - RNA, 19 nt, Human
ccuuccaacaggagcuggg

SEQ ID NO: 2442215 - RNA, 23 nt, Human
ccuucgcuucuugccucugugcu

SEQ ID NO: 2442216 - RNA, 21 nt, Human
ccuucgcuucuugccucugug

SEQ ID NO: 2442217 - RNA, 20 nt, Human
ccuucgcuucuugccucugu

SEQ ID NO: 2442218 - RNA, 19 nt, Human
ccuucgcuucuugccucug

SEQ ID NO: 2442219 - RNA, 14 nt, Human
ccuucggccuccau

SEQ ID NO: 2442220 - RNA, 19 nt, Human
ccuucggccuccauccuga

SEQ ID NO: 2442221 - RNA, 20 nt, Human
ccuucggccuccauccugag

SEQ ID NO: 2442222 - RNA, 14 nt, Human
ccuuccuugcuaau

SEQ ID NO: 2442223 - RNA, 15 nt, Human
ccuuccuucccuggg

SEQ ID NO: 2442224 - RNA, 23 nt, Human
ccuuccuugaccagcagauccca

SEQ ID NO: 2442225 - RNA, 19 nt, Human
ccuuccuugcucugcaccc

SEQ ID NO: 2442226 - RNA, 18 nt, Human
ccuuccuugcucugcacc

SEQ ID NO: 2442227 - RNA, 20 nt, Human
ccuuccuugcuguccuaggc

SEQ ID NO: 2442228 - RNA, 13 nt, Human
ccuuccuuuuccc

SEQ ID NO: 2442229 - RNA, 15 nt, Human
ccuuccuuuucccug

SEQ ID NO: 2442230 - RNA, 18 nt, Human
ccuucgcuucuugccucu

SEQ ID NO: 2442231 - RNA, 17 nt, Human
ccuucgcuucuugccuc

SEQ ID NO: 2442232 - RNA, 16 nt, Human
ccuucgcuucuugccu

SEQ ID NO: 2442233 - RNA, 19 nt, Human
ccuuccuuuucccugcuuc

SEQ ID NO: 2442234 - RNA, 18 nt, Human
ccuuccuuuucccugcuu

SEQ ID NO: 2442235 - RNA, 17 nt, Human
ccuuccuuuucccugcu

SEQ ID NO: 2442236 - RNA, 16 nt, Human
ccuuccuuuucccugc

SEQ ID NO: 2442237 - RNA, 21 nt, Human
ccuuccuuuucccugcuucca

SEQ ID NO: 2442238 - RNA, 20 nt, Human
ccuuccuuuucccugcuucc

SEQ ID NO: 2442239 - RNA, 23 nt, Human
ccuuccuuuucccugcuuccagg

SEQ ID NO: 2442240 - RNA, 19 nt, Human
cgagcaaagucuaaaguuu

SEQ ID NO: 2442241 - RNA, 23 nt, Human
cgagcaaagaucaaaauaaaaag

SEQ ID NO: 2442242 - RNA, 20 nt, Human
cgagcaaagucuaaaguuua

SEQ ID NO: 2442243 - RNA, 20 nt, Human
cgagcaaagaucaaaauaaa

SEQ ID NO: 2442244 - RNA, 15 nt, Human
cgagcaaagaucaaa

SEQ ID NO: 2442245 - RNA, 14 nt, Human
cgagcaaagaucaa

SEQ ID NO: 2442246 - RNA, 13 nt, Human
cgagcaccuccac

SEQ ID NO: 2442247 - RNA, 20 nt, Human
cgagauugcaccacugcacu

SEQ ID NO: 2442248 - RNA, 20 nt, Human
cgagaucacgccacugcacu

SEQ ID NO: 2442249 - RNA, 18 nt, Human
cgagaucacgccacugca

SEQ ID NO: 2442250 - RNA, 16 nt, Human
cgagaucacgccacug

SEQ ID NO: 2442251 - RNA, 17 nt, Human
cgagcaugccuggaugg

SEQ ID NO: 2442252 - RNA, 16 nt, Human
cgagcaugccuggaug

SEQ ID NO: 2442253 - RNA, 13 nt, Human
cgagcaugccugg

SEQ ID NO: 2442254 - RNA, 14 nt, Human
cgagcaugccugga

SEQ ID NO: 2442255 - RNA, 18 nt, Human
cgagcaggcuacugucag

SEQ ID NO: 2442256 - RNA, 20 nt, Human
cgagcaggcuucuucccccc

SEQ ID NO: 2442257 - RNA, 18 nt, Human
cgagcagggugcuguggg

SEQ ID NO: 2442258 - RNA, 15 nt, Human
cgagcaguccugccu

SEQ ID NO: 2442259 - RNA, 17 nt, Human
cgagcaguccugccuca

SEQ ID NO: 2442260 - RNA, 21 nt, Human
cgagcaguccugccucagccu

SEQ ID NO: 2442261 - RNA, 23 nt, Human
cgagcaguccugccucagccucc

SEQ ID NO: 2442262 - RNA, 15 nt, Human
cgacuuucugccugg

SEQ ID NO: 2442263 - RNA, 14 nt, Human
cgacuuucugccug

SEQ ID NO: 2442264 - RNA, 13 nt, Human
cgacuuucugccu

SEQ ID NO: 2442265 - RNA, 19 nt, Human
cgacuuguuuuugcacaug

SEQ ID NO: 2442266 - RNA, 21 nt, Human
cgacuugcuguuuuguucugu

SEQ ID NO: 2442267 - RNA, 22 nt, Human
cgacuugaauuuucccacugca

SEQ ID NO: 2442268 - RNA, 16 nt, Human
cgacuugcauuuuugc

SEQ ID NO: 2442269 - RNA, 17 nt, Human
cgagaacuuucauuuuu

SEQ ID NO: 2442270 - RNA, 16 nt, Human
cgagaacuuucauuuu

SEQ ID NO: 2442271 - RNA, 20 nt, Human
cgagaaauaaaguuugcuua

SEQ ID NO: 2442272 - RNA, 23 nt, Human
cgacuuuguaccccccaaccccu

SEQ ID NO: 2442273 - RNA, 16 nt, Human
cgacuuucugccugga

SEQ ID NO: 2442274 - RNA, 17 nt, Human
cgacuuuguacccccca

SEQ ID NO: 2442275 - RNA, 13 nt, Human
cgacuuuauuuuc

SEQ ID NO: 2442276 - RNA, 14 nt, Human
cgaauagcugggac

SEQ ID NO: 2442277 - RNA, 13 nt, Human
cgaauagcuggga

SEQ ID NO: 2442278 - RNA, 11 nt, Human
cgacugucucc

SEQ ID NO: 2442279 - RNA, 19 nt, Human
cgaauacuuuugcccuuug

SEQ ID NO: 2442280 - RNA, 21 nt, Human
cgacuugaauuuucccacugc

SEQ ID NO: 2442281 - RNA, 20 nt, Human
cgacuugaauuuucccacug

SEQ ID NO: 2442282 - RNA, 19 nt, Human
cgacuugaauuuucccacu

SEQ ID NO: 2442283 - RNA, 18 nt, Human
cgacuugaauuuucccac

SEQ ID NO: 2442284 - RNA, 17 nt, Human
cgacugugaccuguggg

SEQ ID NO: 2442285 - RNA, 19 nt, Human
cgacugugaccugugggga

SEQ ID NO: 2442286 - RNA, 18 nt, Human
cgagauagccaaggccaa

SEQ ID NO: 2442287 - RNA, 17 nt, Human
cgagaucacgccacugc

SEQ ID NO: 2442288 - RNA, 23 nt, Human
cgagaggugggccagucugugga

SEQ ID NO: 2442289 - RNA, 22 nt, Human
cgagaggugggccagucugugg

SEQ ID NO: 2442290 - RNA, 19 nt, Human
cgagaguagccgagagccu

SEQ ID NO: 2442291 - RNA, 20 nt, Human
cgagaguagccgagagccug

SEQ ID NO: 2442292 - RNA, 14 nt, Human
cgagagucugucuc

SEQ ID NO: 2442293 - RNA, 15 nt, Human
cgagagucugucuca

SEQ ID NO: 2442294 - RNA, 20 nt, Human
cgagaggugggccagucugu

SEQ ID NO: 2442295 - RNA, 19 nt, Human
cgagaggugggccagucug

SEQ ID NO: 2442296 - RNA, 15 nt, Human
cgagaggugggccag

SEQ ID NO: 2442297 - RNA, 14 nt, Human
cgagaggugggcca

SEQ ID NO: 2442298 - RNA, 18 nt, Human
cgagagguaugccuguac

SEQ ID NO: 2442299 - RNA, 22 nt, Human
cgagaggggaagaguguacugg

SEQ ID NO: 2442300 - RNA, 13 nt, Human
cgagaccagucug

SEQ ID NO: 2442301 - RNA, 17 nt, Human
cgagaccagccuggcca

SEQ ID NO: 2442302 - RNA, 14 nt, Human
cgagacacuugccu

SEQ ID NO: 2442303 - RNA, 20 nt, Human
cgagaagcugcucuggaauu

SEQ ID NO: 2442304 - RNA, 17 nt, Human
cgagaccaaccugacca

SEQ ID NO: 2442305 - RNA, 18 nt, Human
cgagaagcugcucuggaa

SEQ ID NO: 2442306 - RNA, 16 nt, Human
cgagaagcugcucugg

SEQ ID NO: 2442307 - RNA, 13 nt, Human
cgagaagcaagaa

SEQ ID NO: 2442308 - RNA, 15 nt, Human
cgagaagcaagaaag

SEQ ID NO: 2442309 - RNA, 13 nt, Human
cgagaccagccug

SEQ ID NO: 2442310 - RNA, 14 nt, Human
cgagaccagccugg

SEQ ID NO: 2442311 - RNA, 15 nt, Human
cgagaccagccuggc

SEQ ID NO: 2442312 - RNA, 16 nt, Human
cgagaccagccuggcc

SEQ ID NO: 2442313 - RNA, 20 nt, Human
cgaaaacguggcugcuucaa

SEQ ID NO: 2442314 - RNA, 22 nt, Human
cgaaaaguuggugucaaugaau

SEQ ID NO: 2442315 - RNA, 21 nt, Human
cgaaaaauccucuuccucuga

SEQ ID NO: 2442316 - RNA, 16 nt, Human
cgaaaccaaagaagaa

SEQ ID NO: 2442317 - RNA, 22 nt, Human
cgaaacaggcuacucuccucgg

SEQ ID NO: 2442318 - RNA, 14 nt, Human
cgaaaccccaucuc

SEQ ID NO: 2442319 - RNA, 17 nt, Human
cgaaacacagaaaccuu

SEQ ID NO: 2442320 - RNA, 13 nt, Human
cgaaacagcgcug

SEQ ID NO: 2442321 - RNA, 18 nt, Human
cgaaaccugggauucagg

SEQ ID NO: 2442322 - RNA, 18 nt, Human
cgaaaccuugccuuucuc

SEQ ID NO: 2442323 - RNA, 19 nt, Human
cgaaaacguggcugcuuca

SEQ ID NO: 2442324 - RNA, 18 nt, Human
cgaaaacguggcugcuuc

SEQ ID NO: 2442325 - RNA, 15 nt, Human
cgaaaacguggcugc

SEQ ID NO: 2442326 - RNA, 19 nt, Human
cgaaaaauccucuuccucu

SEQ ID NO: 2442327 - RNA, 13 nt, Human
cgaaaaccaggcc

SEQ ID NO: 2442328 - RNA, 22 nt, Human
cgaaaaccaggccuuaucucca

SEQ ID NO: 2442329 - RNA, 21 nt, Human
ccuuugacgccaucccagccc

SEQ ID NO: 2442330 - RNA, 20 nt, Human
ccuuugacgccaucccagcc

SEQ ID NO: 2442331 - RNA, 22 nt, Human
ccuuugacgccaucccagcccc

SEQ ID NO: 2442332 - RNA, 21 nt, Human
ccuuugaccugccucccuuca

SEQ ID NO: 2442333 - RNA, 22 nt, Human
ccuuugaccugccucccuucau

SEQ ID NO: 2442334 - RNA, 17 nt, Human
ccuuuuacauacugcug

SEQ ID NO: 2442335 - RNA, 16 nt, Human
ccuuuuauagcuauua

SEQ ID NO: 2442336 - RNA, 11 nt, Human
ccuuuuauagc

SEQ ID NO: 2442337 - RNA, 22 nt, Human
ccuuuuauguaguaauugacau

SEQ ID NO: 2442338 - RNA, 21 nt, Human
ccuuuuauaaaccucuaauuu

SEQ ID NO: 2442339 - RNA, 21 nt, Human
ccuuuuagccuaguucaucca

SEQ ID NO: 2442340 - RNA, 18 nt, Human
ccuuuuacauacugcugu

SEQ ID NO: 2442341 - RNA, 21 nt, Human
ccuuuucagcuucugcugggc

SEQ ID NO: 2442342 - RNA, 20 nt, Human
ccuuuucagcuucugcuggg

SEQ ID NO: 2442343 - RNA, 17 nt, Human
ccuuuucagcuucugcu

SEQ ID NO: 2442344 - RNA, 23 nt, Human
ccuuuucagcgauguaugcagcu

SEQ ID NO: 2442345 - RNA, 18 nt, Human
ccuuuuuuuccaucuuua

SEQ ID NO: 2442346 - RNA, 15 nt, Human
ccuuuucacuacacc

SEQ ID NO: 2442347 - RNA, 15 nt, Human
ccuuuuauugacaca

SEQ ID NO: 2442348 - RNA, 15 nt, Human
ccuuuuauguuauuu

SEQ ID NO: 2442349 - RNA, 12 nt, Human
cgaaagaacagu

SEQ ID NO: 2442350 - RNA, 21 nt, Human
cgaaagaacaguccauugaaa

SEQ ID NO: 2442351 - RNA, 19 nt, Human
cgaaagggacuuggaagcu

SEQ ID NO: 2442352 - RNA, 20 nt, Human
cgaaaggaugaaagugacca

SEQ ID NO: 2442353 - RNA, 22 nt, Human
cgaaagggacuuggaagcuccg

SEQ ID NO: 2442354 - RNA, 22 nt, Human
cgaaaggauguaaacagugccu

SEQ ID NO: 2442355 - RNA, 23 nt, Human
cgaaaggauguaaacagugccug

SEQ ID NO: 2442356 - RNA, 12 nt, Human
cgaaccaggagc

SEQ ID NO: 2442357 - RNA, 14 nt, Human
cgaaccaauauuug

SEQ ID NO: 2442358 - RNA, 14 nt, Human
cgaacccaccugcu

SEQ ID NO: 2442359 - RNA, 14 nt, Human
cgaacuccugaccu

SEQ ID NO: 2442360 - RNA, 16 nt, Human
cgaacgacaauagcuu

SEQ ID NO: 2442361 - RNA, 16 nt, Human
cgaaccuccucuguga

SEQ ID NO: 2442362 - RNA, 15 nt, Human
cgaaccuccucugug

SEQ ID NO: 2442363 - RNA, 23 nt, Human
cgaacccaccugcugagagaccc

SEQ ID NO: 2442364 - RNA, 15 nt, Human
cgaaccaggagcugc

SEQ ID NO: 2442365 - RNA, 16 nt, Human
cgaacccaccugcuga

SEQ ID NO: 2442366 - RNA, 13 nt, Human
cgaaccccaagga

SEQ ID NO: 2442367 - RNA, 14 nt, Human
cgaacuggcugcaa

SEQ ID NO: 2442368 - RNA, 12 nt, Human
cgaacuggcugc

SEQ ID NO: 2442369 - RNA, 16 nt, Human
cgaacuguuguauaaa

SEQ ID NO: 2442370 - RNA, 15 nt, Human
cgaacuccuugauuu

SEQ ID NO: 2442371 - RNA, 18 nt, Human
cgaagaaggguccuuccc

SEQ ID NO: 2442372 - RNA, 13 nt, Human
cgaagacacagac

SEQ ID NO: 2442373 - RNA, 22 nt, Human
cgaaguggacuggccccugggu

SEQ ID NO: 2442374 - RNA, 13 nt, Human
cgaaguguugcau

SEQ ID NO: 2442375 - RNA, 14 nt, Human
cgaaguugaugcaa

SEQ ID NO: 2442376 - RNA, 14 nt, Human
cgaauacaaaauug

SEQ ID NO: 2442377 - RNA, 17 nt, Human
cgccaugcuccuggccc

SEQ ID NO: 2442378 - RNA, 18 nt, Human
cgagccaugauguggagu

SEQ ID NO: 2442379 - RNA, 19 nt, Human
cgagccaugauguggagug

SEQ ID NO: 2442380 - RNA, 15 nt, Human
cgagcauccuggcca

SEQ ID NO: 2442381 - RNA, 18 nt, Human
cgagcaugccuggauggg

SEQ ID NO: 2442382 - RNA, 16 nt, Human
cgagcccugguggcag

SEQ ID NO: 2442383 - RNA, 15 nt, Human
cgagcccugguggca

SEQ ID NO: 2442384 - RNA, 23 nt, Human
cgauguggaaaaaugagagaagg

SEQ ID NO: 2442385 - RNA, 20 nt, Human
cgauguaugcagcuaucugg

SEQ ID NO: 2442386 - RNA, 19 nt, Human
cgauguaugcagcuaucug

SEQ ID NO: 2442387 - RNA, 18 nt, Human
cgauguaggcauucugga

SEQ ID NO: 2442388 - RNA, 20 nt, Human
cgagaggggaagaguguacu

SEQ ID NO: 2442389 - RNA, 17 nt, Human
cgauuauuaucuaaagu

SEQ ID NO: 2442390 - RNA, 21 nt, Human
cgauucacccuguccaaacug

SEQ ID NO: 2442391 - RNA, 16 nt, Human
cgauucacccugucca

SEQ ID NO: 2442392 - RNA, 22 nt, Human
cgauguggcccuggccugcugg

SEQ ID NO: 2442393 - RNA, 17 nt, Human
cgauguggcccuggccu

SEQ ID NO: 2442394 - RNA, 18 nt, Human
cgauguggcccuggccug

SEQ ID NO: 2442395 - RNA, 11 nt, Human
cgauguggccc

SEQ ID NO: 2442396 - RNA, 13 nt, Human
cgauguggcccug

SEQ ID NO: 2442397 - RNA, 15 nt, Human
cgauguggcccuggc

SEQ ID NO: 2442398 - RNA, 16 nt, Human
cgauguggcccuggcc

SEQ ID NO: 2442399 - RNA, 19 nt, Human
cgcacagcaugagaggcuc

SEQ ID NO: 2442400 - RNA, 13 nt, Human
cgcacagcaguuc

SEQ ID NO: 2442401 - RNA, 17 nt, Human
cgcacagagcuggggcu

SEQ ID NO: 2442402 - RNA, 15 nt, Human
cgcacagucucucuc

SEQ ID NO: 2442403 - RNA, 13 nt, Human
cgcacagucucuc

SEQ ID NO: 2442404 - RNA, 15 nt, Human
cgcaccauucugacu

SEQ ID NO: 2442405 - RNA, 14 nt, Human
cgcaccauucugac

SEQ ID NO: 2442406 - RNA, 14 nt, Human
cgcaccccagagug

SEQ ID NO: 2442407 - RNA, 13 nt, Human
cgcacccccaccc

SEQ ID NO: 2442408 - RNA, 14 nt, Human
cgcacccccacccu

SEQ ID NO: 2442409 - RNA, 20 nt, Human
cgcaaacccccuuugugcug

SEQ ID NO: 2442410 - RNA, 22 nt, Human
cgcaagagccauguagaagcug

SEQ ID NO: 2442411 - RNA, 15 nt, Human
cgcacacacacacac

SEQ ID NO: 2442412 - RNA, 20 nt, Human
cgcacacacacacacaggag

SEQ ID NO: 2442413 - RNA, 13 nt, Human
cgcacagagcugg

SEQ ID NO: 2442414 - RNA, 12 nt, Human
cgcacagagcug

SEQ ID NO: 2442415 - RNA, 20 nt, Human
cgauuucuguuuagauaaua

SEQ ID NO: 2442416 - RNA, 14 nt, Human
cgauuugucccagg

SEQ ID NO: 2442417 - RNA, 22 nt, Human
cgauucaccugagcaggaccuc

SEQ ID NO: 2442418 - RNA, 15 nt, Human
cgauucauauugaau

SEQ ID NO: 2442419 - RNA, 23 nt, Human
cgauuuuguaucugcaggcagac

SEQ ID NO: 2442420 - RNA, 18 nt, Human
cgauuuuguaucugcagg

SEQ ID NO: 2442421 - RNA, 17 nt, Human
cgauuuuguaucugcag

SEQ ID NO: 2442422 - RNA, 13 nt, Human
cgauuuuguaucu

SEQ ID NO: 2442423 - RNA, 13 nt, Human
cgauuuugccugu

SEQ ID NO: 2442424 - RNA, 23 nt, Human
cgauucaucucucagaagggagg

SEQ ID NO: 2442425 - RNA, 16 nt, Human
cgcaaaccacacugga

SEQ ID NO: 2442426 - RNA, 15 nt, Human
cgcaaaccacacugg

SEQ ID NO: 2442427 - RNA, 19 nt, Human
cgcaaagggcugaaagcca

SEQ ID NO: 2442428 - RNA, 18 nt, Human
cgcaaaccacacuggacu

SEQ ID NO: 2442429 - RNA, 14 nt, Human
cgcagagaggccag

SEQ ID NO: 2442430 - RNA, 12 nt, Human
cgcagagaggcc

SEQ ID NO: 2442431 - RNA, 21 nt, Human
cgcagccaaggccgaagcucu

SEQ ID NO: 2442432 - RNA, 14 nt, Human
cgcagcccugcaga

SEQ ID NO: 2442433 - RNA, 18 nt, Human
cgcagcccuagagccugc

SEQ ID NO: 2442434 - RNA, 17 nt, Human
cgcagcccuagagccug

SEQ ID NO: 2442435 - RNA, 10 nt, Human
cgcagcccug

SEQ ID NO: 2442436 - RNA, 16 nt, Human
cgcagacaggaccagg

SEQ ID NO: 2442437 - RNA, 15 nt, Human
cgcagacaggaccag

SEQ ID NO: 2442438 - RNA, 18 nt, Human
cgcagaccuccccagccc

SEQ ID NO: 2442439 - RNA, 17 nt, Human
cgcagaccuccccagcc

SEQ ID NO: 2442440 - RNA, 16 nt, Human
cgcagaccuccccagc

SEQ ID NO: 2442441 - RNA, 15 nt, Human
cgcagaccuccccag

SEQ ID NO: 2442442 - RNA, 20 nt, Human
cgcagaccuccccagccccu

SEQ ID NO: 2442443 - RNA, 19 nt, Human
cgcagaccuccccagcccc

SEQ ID NO: 2442444 - RNA, 17 nt, Human
cgcaccccccaagcugu

SEQ ID NO: 2442445 - RNA, 12 nt, Human
cgcagaccuccc

SEQ ID NO: 2442446 - RNA, 16 nt, Human
cgcacccuccccuccc

SEQ ID NO: 2442447 - RNA, 15 nt, Human
cgcacccccacccuu

SEQ ID NO: 2442448 - RNA, 19 nt, Human
cgcacccccacccuuuggg

SEQ ID NO: 2442449 - RNA, 21 nt, Human
cgccagauucuuuccugaggc

SEQ ID NO: 2442450 - RNA, 20 nt, Human
cgccagauucuuuccugagg

SEQ ID NO: 2442451 - RNA, 19 nt, Human
cgccagauucuuuccugag

SEQ ID NO: 2442452 - RNA, 17 nt, Human
cgccagauucuuuccug

SEQ ID NO: 2442453 - RNA, 20 nt, Human
cgcagcccuagagccugccu

SEQ ID NO: 2442454 - RNA, 19 nt, Human
cgcagcccuagagccugcc

SEQ ID NO: 2442455 - RNA, 21 nt, Human
cgccaggauggaacacggcca

SEQ ID NO: 2442456 - RNA, 22 nt, Human
cgcagcccuagagccugccugg

SEQ ID NO: 2442457 - RNA, 23 nt, Human
cgccaggauggaacacggccaca

SEQ ID NO: 2442458 - RNA, 16 nt, Human
cgccaggcugaccaca

SEQ ID NO: 2442459 - RNA, 17 nt, Human
cgccaggcugaccacag

SEQ ID NO: 2442460 - RNA, 20 nt, Human
cgccaggcugaccacagcac

SEQ ID NO: 2442461 - RNA, 22 nt, Human
cgccaggggaaaaucagccugc

SEQ ID NO: 2442462 - RNA, 21 nt, Human
cgccaggcugaccacagcaca

SEQ ID NO: 2442463 - RNA, 23 nt, Human
cgccaggcugaccacagcacagc

SEQ ID NO: 2442464 - RNA, 16 nt, Human
ccugcauucuuucugu

SEQ ID NO: 2442465 - RNA, 15 nt, Human
ccugaggcagguccc

SEQ ID NO: 2442466 - RNA, 21 nt, Human
ccucuccaagggcuucugcac

SEQ ID NO: 2442467 - RNA, 19 nt, Human
ccucuccaagggcuucugc

SEQ ID NO: 2442468 - RNA, 18 nt, Human
ccucuccaagggcuucug

SEQ ID NO: 2442469 - RNA, 13 nt, Human
ccucuccaagggc

SEQ ID NO: 2442470 - RNA, 23 nt, Human
ccucuccaagggcuucugcaccc

SEQ ID NO: 2442471 - RNA, 22 nt, Human
ccucuccaagggcuucugcacc

SEQ ID NO: 2442472 - RNA, 23 nt, Human
ccucuccaccuaguggcugucca

SEQ ID NO: 2442473 - RNA, 17 nt, Human
ccucuccaccuaguggc

SEQ ID NO: 2442474 - RNA, 22 nt, Human
ccucuccacccucccagaccug

SEQ ID NO: 2442475 - RNA, 17 nt, Human
ccucuccacccucccag

SEQ ID NO: 2442476 - RNA, 15 nt, Human
ccucuccacccuccc

SEQ ID NO: 2442477 - RNA, 19 nt, Human
ccugacaagcacugcuagg

SEQ ID NO: 2442478 - RNA, 14 nt, Human
ccugacaagcacug

SEQ ID NO: 2442479 - RNA, 19 nt, Human
ccugacaaccacuggucug

SEQ ID NO: 2442480 - RNA, 18 nt, Human
ccugacaaccacuggucu

SEQ ID NO: 2442481 - RNA, 23 nt, Human
ccugacaacacucauugaccuga

SEQ ID NO: 2442482 - RNA, 22 nt, Human
ccugacacugcggggcuuggcu

SEQ ID NO: 2442483 - RNA, 13 nt, Human
ccugacacucccu

SEQ ID NO: 2442484 - RNA, 20 nt, Human
ccugacaagcacugcuaggc

SEQ ID NO: 2442485 - RNA, 13 nt, Human
ccugacacuuuaa

SEQ ID NO: 2442486 - RNA, 14 nt, Human
ccugacacuuuaau

SEQ ID NO: 2442487 - RNA, 15 nt, Human
ccugacacuuuaauu

SEQ ID NO: 2442488 - RNA, 16 nt, Human
ccugacagaaggacuc

SEQ ID NO: 2442489 - RNA, 18 nt, Human
ccugacagucuugugcuu

SEQ ID NO: 2442490 - RNA, 20 nt, Human
ccugacagaugucagccgag

SEQ ID NO: 2442491 - RNA, 21 nt, Human
ccugacagaugucagccgagc

SEQ ID NO: 2442492 - RNA, 16 nt, Human
ccugacauuggagccu

SEQ ID NO: 2442493 - RNA, 13 nt, Human
ccugagcaacucu

SEQ ID NO: 2442494 - RNA, 14 nt, Human
ccugagcaacucuu

SEQ ID NO: 2442495 - RNA, 15 nt, Human
ccugagcaacucuug

SEQ ID NO: 2442496 - RNA, 18 nt, Human
ccugagcaacucuugauu

SEQ ID NO: 2442497 - RNA, 23 nt, Human
ccugagcaacucuugauuaucca

SEQ ID NO: 2442498 - RNA, 19 nt, Human
ccugagcaaugucugugcu

SEQ ID NO: 2442499 - RNA, 16 nt, Human
ccugagcuuucugcua

SEQ ID NO: 2442500 - RNA, 17 nt, Human
ccugagcuuggccagaa

SEQ ID NO: 2442501 - RNA, 21 nt, Human
ccugagcuuggccagaagggg

SEQ ID NO: 2442502 - RNA, 19 nt, Human
ccugaggaagagggacugu

SEQ ID NO: 2442503 - RNA, 18 nt, Human
ccugaggaacccuuacag

SEQ ID NO: 2442504 - RNA, 18 nt, Human
ccugagcuuggccagaag

SEQ ID NO: 2442505 - RNA, 17 nt, Human
ccugaggacagcugucc

SEQ ID NO: 2442506 - RNA, 16 nt, Human
ccugaggacagcuguc

SEQ ID NO: 2442507 - RNA, 15 nt, Human
ccugaggacagcugu

SEQ ID NO: 2442508 - RNA, 18 nt, Human
ccugaggaagaugggggc

SEQ ID NO: 2442509 - RNA, 12 nt, Human
ccugaggaagcg

SEQ ID NO: 2442510 - RNA, 23 nt, Human
ccugaggaagcgugaaggccgag

SEQ ID NO: 2442511 - RNA, 17 nt, Human
ccugaggaugagcugga

SEQ ID NO: 2442512 - RNA, 16 nt, Human
ccugaggaugagcugg

SEQ ID NO: 2442513 - RNA, 15 nt, Human
ccugaggaugagcug

SEQ ID NO: 2442514 - RNA, 20 nt, Human
ccugaggaugagcuggaagg

SEQ ID NO: 2442515 - RNA, 21 nt, Human
ccugaggcccagagggccugc

SEQ ID NO: 2442516 - RNA, 20 nt, Human
ccugaggacagcuguccucu

SEQ ID NO: 2442517 - RNA, 13 nt, Human
ccugaggaugagc

SEQ ID NO: 2442518 - RNA, 12 nt, Human
ccugagccagau

SEQ ID NO: 2442519 - RNA, 20 nt, Human
ccugagccagauuucacucu

SEQ ID NO: 2442520 - RNA, 23 nt, Human
ccugagccaagcuagaauucccu

SEQ ID NO: 2442521 - RNA, 13 nt, Human
ccugagccaagcu

SEQ ID NO: 2442522 - RNA, 20 nt, Human
ccugagcaaugucugugcua

SEQ ID NO: 2442523 - RNA, 11 nt, Human
ccugagcccca

SEQ ID NO: 2442524 - RNA, 14 nt, Human
ccugagcuuucugc

SEQ ID NO: 2442525 - RNA, 16 nt, Human
ccugagcuuggccaga

SEQ ID NO: 2442526 - RNA, 17 nt, Human
ccugccaggaagccagc

SEQ ID NO: 2442527 - RNA, 15 nt, Human
ccugccaggaagcca

SEQ ID NO: 2442528 - RNA, 14 nt, Human
ccugccaggaagcc

SEQ ID NO: 2442529 - RNA, 13 nt, Human
ccugccaggaagc

SEQ ID NO: 2442530 - RNA, 16 nt, Human
ccugccagcugcacug

SEQ ID NO: 2442531 - RNA, 17 nt, Human
ccugccagcugcacuga

SEQ ID NO: 2442532 - RNA, 18 nt, Human
ccugccagcugcacugau

SEQ ID NO: 2442533 - RNA, 23 nt, Human
ccugccagcugcacugaugcugc

SEQ ID NO: 2442534 - RNA, 13 nt, Human
ccugccagcugca

SEQ ID NO: 2442535 - RNA, 14 nt, Human
ccugccagcugcac

SEQ ID NO: 2442536 - RNA, 12 nt, Human
ccugccagcugc

SEQ ID NO: 2442537 - RNA, 21 nt, Human
ccugccagccuggcuucugga

SEQ ID NO: 2442538 - RNA, 12 nt, Human
ccugcauucuuu

SEQ ID NO: 2442539 - RNA, 13 nt, Human
ccugccagccugg

SEQ ID NO: 2442540 - RNA, 19 nt, Human
ccugccagacggcacccac

SEQ ID NO: 2442541 - RNA, 14 nt, Human
ccugccagccuggc

SEQ ID NO: 2442542 - RNA, 15 nt, Human
ccugccagccuggcu

SEQ ID NO: 2442543 - RNA, 16 nt, Human
ccugccagccuggcuu

SEQ ID NO: 2442544 - RNA, 17 nt, Human
ccugccagccuggcuuc

SEQ ID NO: 2442545 - RNA, 20 nt, Human
ccugcauguaaacacgccug

SEQ ID NO: 2442546 - RNA, 21 nt, Human
ccugcauguaaacacgccugc

SEQ ID NO: 2442547 - RNA, 22 nt, Human
ccugcauguaaacacgccugca

SEQ ID NO: 2442548 - RNA, 23 nt, Human
ccugcauguaaacacgccugcaa

SEQ ID NO: 2442549 - RNA, 14 nt, Human
ccugccacucaggc

SEQ ID NO: 2442550 - RNA, 15 nt, Human
ccugcauucacccag

SEQ ID NO: 2442551 - RNA, 16 nt, Human
ccugcauucacccaga

SEQ ID NO: 2442552 - RNA, 17 nt, Human
ccugcauucacccagac

SEQ ID NO: 2442553 - RNA, 22 nt, Human
ccugccacucaggcccaaagcc

SEQ ID NO: 2442554 - RNA, 23 nt, Human
ccugccacucaggcccaaagccu

SEQ ID NO: 2442555 - RNA, 14 nt, Human
ccugccagaccccc

SEQ ID NO: 2442556 - RNA, 19 nt, Human
ccugcauucacccagacag

SEQ ID NO: 2442557 - RNA, 22 nt, Human
ccugcauucugccgugugcccu

SEQ ID NO: 2442558 - RNA, 23 nt, Human
ccugccacuuugguacauggcca

SEQ ID NO: 2442559 - RNA, 24 nt, Human
ccugcauccccuuggcugugaggc

SEQ ID NO: 2442560 - RNA, 23 nt, Human
ccugcauccccuuggcugugagg

SEQ ID NO: 2442561 - RNA, 21 nt, Human
ccugcauccccuuggcuguga

SEQ ID NO: 2442562 - RNA, 18 nt, Human
ccugcauccccuuggcug

SEQ ID NO: 2442563 - RNA, 22 nt, Human
ccugcagucuggcugagcccug

SEQ ID NO: 2442564 - RNA, 21 nt, Human
ccugcagucuggcugagcccu

SEQ ID NO: 2442565 - RNA, 18 nt, Human
ccugcaucugaccagcag

SEQ ID NO: 2442566 - RNA, 19 nt, Human
ccugcauccguaguucccu

SEQ ID NO: 2442567 - RNA, 22 nt, Human
ccugcauccguaguucccugaa

SEQ ID NO: 2442568 - RNA, 19 nt, Human
ccugcaucugaccagcagc

SEQ ID NO: 2442569 - RNA, 15 nt, Human
ccugccagggacaga

SEQ ID NO: 2442570 - RNA, 14 nt, Human
ccugccagggacag

SEQ ID NO: 2442571 - RNA, 13 nt, Human
ccugccagggaca

SEQ ID NO: 2442572 - RNA, 12 nt, Human
ccugccagggac

SEQ ID NO: 2442573 - RNA, 23 nt, Human
ccugcccccaccacggccacugg

SEQ ID NO: 2442574 - RNA, 16 nt, Human
ccugccagggacagag

SEQ ID NO: 2442575 - RNA, 15 nt, Human
ccugcccccaggacu

SEQ ID NO: 2442576 - RNA, 14 nt, Human
ccugcccccaggac

SEQ ID NO: 2442577 - RNA, 17 nt, Human
ccugcccccagccccgg

SEQ ID NO: 2442578 - RNA, 15 nt, Human
ccugcccccagcccc

SEQ ID NO: 2442579 - RNA, 12 nt, Human
ccugcccccagg

SEQ ID NO: 2442580 - RNA, 17 nt, Human
ccugcccccacuuccug

SEQ ID NO: 2442581 - RNA, 15 nt, Human
ccugcccccacuucc

SEQ ID NO: 2442582 - RNA, 14 nt, Human
ccugcccccacuuc

SEQ ID NO: 2442583 - RNA, 14 nt, Human
ccugcccccagccc

SEQ ID NO: 2442584 - RNA, 13 nt, Human
ccugcccccagcc

SEQ ID NO: 2442585 - RNA, 22 nt, Human
ccugcccccagaccuuuuaucc

SEQ ID NO: 2442586 - RNA, 22 nt, Human
ccugccaggaagccagcaggcu

SEQ ID NO: 2442587 - RNA, 21 nt, Human
ccugccaggaagccagcaggc

SEQ ID NO: 2442588 - RNA, 19 nt, Human
ccugccaggaagccagcag

SEQ ID NO: 2442589 - RNA, 18 nt, Human
ccugccaggaagccagca

SEQ ID NO: 2442590 - RNA, 21 nt, Human
ccugccaggagcuuuggaccu

SEQ ID NO: 2442591 - RNA, 23 nt, Human
ccugccaggaagccagcaggcuc

SEQ ID NO: 2442592 - RNA, 11 nt, Human
ccugccaggga

SEQ ID NO: 2442593 - RNA, 16 nt, Human
ccugccaggcauggug

SEQ ID NO: 2442594 - RNA, 15 nt, Human
ccugauugugucucu

SEQ ID NO: 2442595 - RNA, 17 nt, Human
ccugauugccaagcuca

SEQ ID NO: 2442596 - RNA, 16 nt, Human
ccugauucaacuaaaa

SEQ ID NO: 2442597 - RNA, 19 nt, Human
ccugauucggcugucucag

SEQ ID NO: 2442598 - RNA, 14 nt, Human
ccugaggcccuucu

SEQ ID NO: 2442599 - RNA, 22 nt, Human
ccugaugcuucuucagagacuc

SEQ ID NO: 2442600 - RNA, 21 nt, Human
ccugaugcuucuucagagacu

SEQ ID NO: 2442601 - RNA, 20 nt, Human
ccugaugcuucuucagagac

SEQ ID NO: 2442602 - RNA, 19 nt, Human
ccugaugcuucuucagaga

SEQ ID NO: 2442603 - RNA, 12 nt, Human
ccugaggcccuu

SEQ ID NO: 2442604 - RNA, 11 nt, Human
ccugaggcccu

SEQ ID NO: 2442605 - RNA, 15 nt, Human
ccugcaaacgcugcc

SEQ ID NO: 2442606 - RNA, 16 nt, Human
ccugcaaacgcugccu

SEQ ID NO: 2442607 - RNA, 17 nt, Human
ccugcaaacgcugccug

SEQ ID NO: 2442608 - RNA, 18 nt, Human
ccugcaaacgcugccugc

SEQ ID NO: 2442609 - RNA, 19 nt, Human
ccugcaaacgcugccugcc

SEQ ID NO: 2442610 - RNA, 22 nt, Human
ccugcaaacgcugccugcccac

SEQ ID NO: 2442611 - RNA, 21 nt, Human
ccugcaaacgcugccugcccg

SEQ ID NO: 2442612 - RNA, 22 nt, Human
ccugcaaacgcugccugcccgu

SEQ ID NO: 2442613 - RNA, 21 nt, Human
ccugcaaccugauugugucuc

SEQ ID NO: 2442614 - RNA, 22 nt, Human
ccugcaaccugauugugucucu

SEQ ID NO: 2442615 - RNA, 19 nt, Human
ccugauugugucucuuggu

SEQ ID NO: 2442616 - RNA, 17 nt, Human
ccugauugugucucuug

SEQ ID NO: 2442617 - RNA, 22 nt, Human
ccugauuuuuuuuccuuuuaau

SEQ ID NO: 2442618 - RNA, 17 nt, Human
ccugcaaaaggacucuc

SEQ ID NO: 2442619 - RNA, 20 nt, Human
ccugauuguguauauucaua

SEQ ID NO: 2442620 - RNA, 19 nt, Human
ccugcaaaaggacucucag

SEQ ID NO: 2442621 - RNA, 18 nt, Human
ccugcaaaaugagacccu

SEQ ID NO: 2442622 - RNA, 14 nt, Human
ccugcaaaauuuua

SEQ ID NO: 2442623 - RNA, 13 nt, Human
ccugcaaggacua

SEQ ID NO: 2442624 - RNA, 20 nt, Human
ccugcaacucaaggacuuug

SEQ ID NO: 2442625 - RNA, 18 nt, Human
ccugcaacucaaggacuu

SEQ ID NO: 2442626 - RNA, 17 nt, Human
ccugcaagggcucccca

SEQ ID NO: 2442627 - RNA, 12 nt, Human
ccugcaaggacu

SEQ ID NO: 2442628 - RNA, 12 nt, Human
ccugcaacucau

SEQ ID NO: 2442629 - RNA, 16 nt, Human
ccugauuuuuuuuccu

SEQ ID NO: 2442630 - RNA, 16 nt, Human
ccugcaaacucacugc

SEQ ID NO: 2442631 - RNA, 15 nt, Human
ccugcaaacucacug

SEQ ID NO: 2442632 - RNA, 14 nt, Human
ccugcaaacucacu

SEQ ID NO: 2442633 - RNA, 22 nt, Human
ccugcaaaauuugaugccagga

SEQ ID NO: 2442634 - RNA, 20 nt, Human
ccugcaaacucacugcucaa

SEQ ID NO: 2442635 - RNA, 17 nt, Human
ccugcaaacucacugcu

SEQ ID NO: 2442636 - RNA, 17 nt, Human
ccugcaacucaaggacu

SEQ ID NO: 2442637 - RNA, 14 nt, Human
ccugcaagaacaag

SEQ ID NO: 2442638 - RNA, 19 nt, Human
ccugcaauuucauaugcug

SEQ ID NO: 2442639 - RNA, 21 nt, Human
ccugcaaugaagucucugaag

SEQ ID NO: 2442640 - RNA, 20 nt, Human
ccugcaagggcuccccacug

SEQ ID NO: 2442641 - RNA, 17 nt, Human
ccugcaagucaguccag

SEQ ID NO: 2442642 - RNA, 19 nt, Human
ccugcaaugaagucucuga

SEQ ID NO: 2442643 - RNA, 16 nt, Human
ccugcacggugggccu

SEQ ID NO: 2442644 - RNA, 15 nt, Human
ccugcaccugugcag

SEQ ID NO: 2442645 - RNA, 14 nt, Human
ccugcaccugugca

SEQ ID NO: 2442646 - RNA, 22 nt, Human
ccugcaccuccccccacugcag

SEQ ID NO: 2442647 - RNA, 20 nt, Human
ccugcaaugaagucucugaa

SEQ ID NO: 2442648 - RNA, 21 nt, Human
ccugcaccuccccccacugca

SEQ ID NO: 2442649 - RNA, 18 nt, Human
ccugcacgucaugggagg

SEQ ID NO: 2442650 - RNA, 23 nt, Human
ccugcacggugggccuugcuggg

SEQ ID NO: 2442651 - RNA, 22 nt, Human
ccugcacggugggccuugcugg

SEQ ID NO: 2442652 - RNA, 21 nt, Human
ccugcacggugggccuugcug

SEQ ID NO: 2442653 - RNA, 20 nt, Human
ccugcacggugggccuugcu

SEQ ID NO: 2442654 - RNA, 19 nt, Human
ccugcacggugggccuugc

SEQ ID NO: 2442655 - RNA, 18 nt, Human
ccugcacggugggccuug

SEQ ID NO: 2442656 - RNA, 17 nt, Human
ccugcacggugggccuu

SEQ ID NO: 2442657 - RNA, 23 nt, Human
ccugcacgucaugggagggggcu

SEQ ID NO: 2442658 - RNA, 19 nt, Human
ccugcacgucaugggaggg

SEQ ID NO: 2442659 - RNA, 21 nt, Human
ccugcacuaauuugauguuua

SEQ ID NO: 2442660 - RNA, 16 nt, Human
ccugcaggccaagagc

SEQ ID NO: 2442661 - RNA, 21 nt, Human
ccugcaggccaagagcagagg

SEQ ID NO: 2442662 - RNA, 22 nt, Human
ccugcaggccaagagcagaggc

SEQ ID NO: 2442663 - RNA, 12 nt, Human
ccugcaggccag

SEQ ID NO: 2442664 - RNA, 18 nt, Human
ccugcaggccaggccagc

SEQ ID NO: 2442665 - RNA, 20 nt, Human
ccugcaguacuuuaccuccu

SEQ ID NO: 2442666 - RNA, 15 nt, Human
ccugcagucacagcu

SEQ ID NO: 2442667 - RNA, 16 nt, Human
ccugcagucuggcuga

SEQ ID NO: 2442668 - RNA, 15 nt, Human
ccugcagucaucuug

SEQ ID NO: 2442669 - RNA, 21 nt, Human
ccugcagguugggccauacug

SEQ ID NO: 2442670 - RNA, 17 nt, Human
ccugcagguugggccau

SEQ ID NO: 2442671 - RNA, 16 nt, Human
ccugcagguugggcca

SEQ ID NO: 2442672 - RNA, 20 nt, Human
ccugcaggugcugcugcgug

SEQ ID NO: 2442673 - RNA, 18 nt, Human
ccugcaguacuuuaccuc

SEQ ID NO: 2442674 - RNA, 18 nt, Human
ccugcaggugcugcugcg

SEQ ID NO: 2442675 - RNA, 17 nt, Human
ccugcaggugcugcugc

SEQ ID NO: 2442676 - RNA, 15 nt, Human
ccugcaggugcugcu

SEQ ID NO: 2442677 - RNA, 23 nt, Human
ccugcaggguggugcugggacug

SEQ ID NO: 2442678 - RNA, 22 nt, Human
ccugcaggguggugcugggacu

SEQ ID NO: 2442679 - RNA, 21 nt, Human
ccugcaggguggugcugggac

SEQ ID NO: 2442680 - RNA, 20 nt, Human
ccugcaggguggugcuggga

SEQ ID NO: 2442681 - RNA, 19 nt, Human
ccugcaggguggugcuggg

SEQ ID NO: 2442682 - RNA, 15 nt, Human
ccugcagggccaagc

SEQ ID NO: 2442683 - RNA, 16 nt, Human
ccugcaggccaggcca

SEQ ID NO: 2442684 - RNA, 14 nt, Human
ccugcuuccaggaa

SEQ ID NO: 2442685 - RNA, 21 nt, Human
ccugcuuccaccucaccccac

SEQ ID NO: 2442686 - RNA, 23 nt, Human
ccugcuuugggcugcccuggugc

SEQ ID NO: 2442687 - RNA, 22 nt, Human
ccugcuuugggcugcccuggug

SEQ ID NO: 2442688 - RNA, 21 nt, Human
ccugcuuugggcugcccuggu

SEQ ID NO: 2442689 - RNA, 20 nt, Human
ccugcuuccaccucacccca

SEQ ID NO: 2442690 - RNA, 19 nt, Human
ccugcuuccaccucacccc

SEQ ID NO: 2442691 - RNA, 18 nt, Human
ccugcuuccaccucaccc

SEQ ID NO: 2442692 - RNA, 17 nt, Human
ccugcuucaugcucagc

SEQ ID NO: 2442693 - RNA, 16 nt, Human
ccugcuucaugcucag

SEQ ID NO: 2442694 - RNA, 14 nt, Human
ccugcuucaugcuc

SEQ ID NO: 2442695 - RNA, 19 nt, Human
ccugcuuugggcugcccug

SEQ ID NO: 2442696 - RNA, 20 nt, Human
ccugcuuugggcugcccugg

SEQ ID NO: 2442697 - RNA, 12 nt, Human
ccugcugucccc

SEQ ID NO: 2442698 - RNA, 17 nt, Human
ccugcugagggaccagc

SEQ ID NO: 2442699 - RNA, 19 nt, Human
ccugcugagggaccagcca

SEQ ID NO: 2442700 - RNA, 20 nt, Human
ccugcugugauuccacuaca

SEQ ID NO: 2442701 - RNA, 22 nt, Human
ccugcuguccccucuugcccca

SEQ ID NO: 2442702 - RNA, 19 nt, Human
ccugcuguccccucuugcc

SEQ ID NO: 2442703 - RNA, 15 nt, Human
ccugcuguccccucu

SEQ ID NO: 2442704 - RNA, 21 nt, Human
ccugcugagggaccagccaag

SEQ ID NO: 2442705 - RNA, 14 nt, Human
ccugcuguguuccc

SEQ ID NO: 2442706 - RNA, 23 nt, Human
ccugcugugauuccacuacaccu

SEQ ID NO: 2442707 - RNA, 14 nt, Human
ccugcuucaaauau

SEQ ID NO: 2442708 - RNA, 15 nt, Human
ccuggaagccagcuu

SEQ ID NO: 2442709 - RNA, 17 nt, Human
ccuggaagccagcuuuc

SEQ ID NO: 2442710 - RNA, 13 nt, Human
ccuggaagcugug

SEQ ID NO: 2442711 - RNA, 23 nt, Human
ccuggaagcuguguccuugcacc

SEQ ID NO: 2442712 - RNA, 17 nt, Human
ccuggaagcuguguccu

SEQ ID NO: 2442713 - RNA, 18 nt, Human
ccuggaagcuguguccuu

SEQ ID NO: 2442714 - RNA, 20 nt, Human
ccuggaagcuguguccuugc

SEQ ID NO: 2442715 - RNA, 14 nt, Human
ccuggaagacagag

SEQ ID NO: 2442716 - RNA, 13 nt, Human
ccuggaagacaga

SEQ ID NO: 2442717 - RNA, 12 nt, Human
ccuggaagacag

SEQ ID NO: 2442718 - RNA, 22 nt, Human
ccuggaagacagagaccuccug

SEQ ID NO: 2442719 - RNA, 15 nt, Human
ccuggaagacagaga

SEQ ID NO: 2442720 - RNA, 22 nt, Human
ccuggaacaucaucaaggcacu

SEQ ID NO: 2442721 - RNA, 18 nt, Human
ccuggaacugucucucau

SEQ ID NO: 2442722 - RNA, 20 nt, Human
ccuggaacugucucucauga

SEQ ID NO: 2442723 - RNA, 13 nt, Human
ccuggaacuuggg

SEQ ID NO: 2442724 - RNA, 16 nt, Human
ccuggaacuuggggag

SEQ ID NO: 2442725 - RNA, 17 nt, Human
ccuggaacuuggggagu

SEQ ID NO: 2442726 - RNA, 23 nt, Human
ccuggaaaucaggguuaguauug

SEQ ID NO: 2442727 - RNA, 19 nt, Human
ccugcuuuucacugcugca

SEQ ID NO: 2442728 - RNA, 21 nt, Human
ccugcuuccaggaaacuccac

SEQ ID NO: 2442729 - RNA, 15 nt, Human
ccugcuuuucacugc

SEQ ID NO: 2442730 - RNA, 21 nt, Human
ccugcuuuucacugcugcaag

SEQ ID NO: 2442731 - RNA, 22 nt, Human
ccuggaaauaucaguuacucag

SEQ ID NO: 2442732 - RNA, 21 nt, Human
ccugcugaagguggggauugc

SEQ ID NO: 2442733 - RNA, 23 nt, Human
ccugcugaaugauuuccaaagag

SEQ ID NO: 2442734 - RNA, 22 nt, Human
ccugcucuccucuugccacugc

SEQ ID NO: 2442735 - RNA, 17 nt, Human
ccugcugagagacccaa

SEQ ID NO: 2442736 - RNA, 21 nt, Human
ccugcugagagacccaaggag

SEQ ID NO: 2442737 - RNA, 20 nt, Human
ccugcugagagacccaagga

SEQ ID NO: 2442738 - RNA, 21 nt, Human
ccugcucuccucuugccacug

SEQ ID NO: 2442739 - RNA, 19 nt, Human
ccugcucuccucuugccac

SEQ ID NO: 2442740 - RNA, 18 nt, Human
ccugcucuccucuugcca

SEQ ID NO: 2442741 - RNA, 16 nt, Human
ccugcucuccucuugc

SEQ ID NO: 2442742 - RNA, 23 nt, Human
ccugcucuccaagucucaguggc

SEQ ID NO: 2442743 - RNA, 22 nt, Human
ccugcucuccaagucucagugg

SEQ ID NO: 2442744 - RNA, 22 nt, Human
ccugcucuccgaccagacaccu

SEQ ID NO: 2442745 - RNA, 13 nt, Human
ccugcuccacagu

SEQ ID NO: 2442746 - RNA, 20 nt, Human
ccugcuccacagccauccca

SEQ ID NO: 2442747 - RNA, 19 nt, Human
ccugcuccacagccauccc

SEQ ID NO: 2442748 - RNA, 12 nt, Human
ccugcuccacag

SEQ ID NO: 2442749 - RNA, 15 nt, Human
ccugcuccacagugu

SEQ ID NO: 2442750 - RNA, 14 nt, Human
ccugcuccacagug

SEQ ID NO: 2442751 - RNA, 11 nt, Human
ccugcuccaga

SEQ ID NO: 2442752 - RNA, 12 nt, Human
ccugcuccagac

SEQ ID NO: 2442753 - RNA, 13 nt, Human
ccugcuccagacc

SEQ ID NO: 2442754 - RNA, 14 nt, Human
ccugcuccagaccu

SEQ ID NO: 2442755 - RNA, 15 nt, Human
ccugcuccagaccug

SEQ ID NO: 2442756 - RNA, 22 nt, Human
ccugcuccucccuggcugcccu

SEQ ID NO: 2442757 - RNA, 18 nt, Human
ccugcuccuucccaggag

SEQ ID NO: 2442758 - RNA, 21 nt, Human
ccugcucgaugcucacagggc

SEQ ID NO: 2442759 - RNA, 21 nt, Human
ccugcucuccgaccagacacc

SEQ ID NO: 2442760 - RNA, 17 nt, Human
ccugcguccuccucacc

SEQ ID NO: 2442761 - RNA, 16 nt, Human
ccugcguccuccucac

SEQ ID NO: 2442762 - RNA, 15 nt, Human
ccugcguccuccuca

SEQ ID NO: 2442763 - RNA, 13 nt, Human
ccugcguccuccu

SEQ ID NO: 2442764 - RNA, 19 nt, Human
ccugcguccuccucaccuc

SEQ ID NO: 2442765 - RNA, 18 nt, Human
ccugcguccuccucaccu

SEQ ID NO: 2442766 - RNA, 22 nt, Human
ccugcggugcuaucucccccag

SEQ ID NO: 2442767 - RNA, 22 nt, Human
ccugcuauuacuaaggaguaau

SEQ ID NO: 2442768 - RNA, 22 nt, Human
ccugccccucaacucuccucca

SEQ ID NO: 2442769 - RNA, 15 nt, Human
ccugccgguaaacac

SEQ ID NO: 2442770 - RNA, 14 nt, Human
ccugccccucccag

SEQ ID NO: 2442771 - RNA, 15 nt, Human
ccugccccucccaga

SEQ ID NO: 2442772 - RNA, 14 nt, Human
ccugccgccucaau

SEQ ID NO: 2442773 - RNA, 15 nt, Human
ccugccggccggggc

SEQ ID NO: 2442774 - RNA, 20 nt, Human
ccugccgguaaacacgccug

SEQ ID NO: 2442775 - RNA, 21 nt, Human
ccugccgguaaacacgccugc

SEQ ID NO: 2442776 - RNA, 22 nt, Human
ccugccgguaaacacgccugca

SEQ ID NO: 2442777 - RNA, 23 nt, Human
ccugccgguaaacacgccugcaa

SEQ ID NO: 2442778 - RNA, 20 nt, Human
ccugccuaagggagaguggu

SEQ ID NO: 2442779 - RNA, 23 nt, Human
ccugccguggacuuggggucaga

SEQ ID NO: 2442780 - RNA, 21 nt, Human
ccugccuaggaauucccagcc

SEQ ID NO: 2442781 - RNA, 19 nt, Human
ccugcccccaggacugggc

SEQ ID NO: 2442782 - RNA, 18 nt, Human
ccugcccccaggacuggg

SEQ ID NO: 2442783 - RNA, 17 nt, Human
ccugcccccaggacugg

SEQ ID NO: 2442784 - RNA, 16 nt, Human
ccugcccccaggacug

SEQ ID NO: 2442785 - RNA, 22 nt, Human
ccugcccccaggacugggccac

SEQ ID NO: 2442786 - RNA, 20 nt, Human
ccugcccccaggacugggcc

SEQ ID NO: 2442787 - RNA, 18 nt, Human
ccugcccccagccccggg

SEQ ID NO: 2442788 - RNA, 17 nt, Human
ccugcccccuucuccca

SEQ ID NO: 2442789 - RNA, 16 nt, Human
ccugcccccuucuccc

SEQ ID NO: 2442790 - RNA, 18 nt, Human
ccugcccccuucucccac

SEQ ID NO: 2442791 - RNA, 19 nt, Human
ccugcccccuucucccaca

SEQ ID NO: 2442792 - RNA, 20 nt, Human
ccugcccccuucucccacac

SEQ ID NO: 2442793 - RNA, 21 nt, Human
ccugcccccuucucccacacu

SEQ ID NO: 2442794 - RNA, 22 nt, Human
ccugcccccuucucccacacug

SEQ ID NO: 2442795 - RNA, 23 nt, Human
ccugcccccuucucccacacugc

SEQ ID NO: 2442796 - RNA, 16 nt, Human
ccugccccgcccagcu

SEQ ID NO: 2442797 - RNA, 18 nt, Human
ccugccccgcccccaguc

SEQ ID NO: 2442798 - RNA, 13 nt, Human
ccugccccgcccc

SEQ ID NO: 2442799 - RNA, 22 nt, Human
ccugccccgcccagcugcaccu

SEQ ID NO: 2442800 - RNA, 20 nt, Human
ccugccccgcccccaguccc

SEQ ID NO: 2442801 - RNA, 22 nt, Human
ccugccccgucaccaucucagg

SEQ ID NO: 2442802 - RNA, 23 nt, Human
ccugccccgucaccaucucaggc

SEQ ID NO: 2442803 - RNA, 21 nt, Human
ccugccucacagcuggccguc

SEQ ID NO: 2442804 - RNA, 11 nt, Human
ccugccucagc

SEQ ID NO: 2442805 - RNA, 14 nt, Human
ccugccuggcaggc

SEQ ID NO: 2442806 - RNA, 11 nt, Human
ccugccuggcc

SEQ ID NO: 2442807 - RNA, 12 nt, Human
ccugccuggcca

SEQ ID NO: 2442808 - RNA, 13 nt, Human
ccugccuggccag

SEQ ID NO: 2442809 - RNA, 14 nt, Human
ccugccuggccagg

SEQ ID NO: 2442810 - RNA, 23 nt, Human
ccugccuguugggccaggagccu

SEQ ID NO: 2442811 - RNA, 21 nt, Human
ccugccuuagagccaggcaca

SEQ ID NO: 2442812 - RNA, 20 nt, Human
ccugccuuagagccaggcac

SEQ ID NO: 2442813 - RNA, 16 nt, Human
ccugccuuaucuugca

SEQ ID NO: 2442814 - RNA, 19 nt, Human
ccugccuuagagccaggca

SEQ ID NO: 2442815 - RNA, 23 nt, Human
ccugccuggggcgggccccucau

SEQ ID NO: 2442816 - RNA, 17 nt, Human
ccugccuggcccccugu

SEQ ID NO: 2442817 - RNA, 18 nt, Human
ccugccugguccucacac

SEQ ID NO: 2442818 - RNA, 23 nt, Human
ccugccuggccaggcagaucugu

SEQ ID NO: 2442819 - RNA, 18 nt, Human
ccugccuggccaggcaga

SEQ ID NO: 2442820 - RNA, 22 nt, Human
ccugccuggccaggcagaucug

SEQ ID NO: 2442821 - RNA, 23 nt, Human
ccugccuucuucuuuuugcuguu

SEQ ID NO: 2442822 - RNA, 22 nt, Human
ccugccuugaagccacugaagc

SEQ ID NO: 2442823 - RNA, 23 nt, Human
ccugccuugaagccacugaagcu

SEQ ID NO: 2442824 - RNA, 16 nt, Human
ccugccuugaagccac

SEQ ID NO: 2442825 - RNA, 17 nt, Human
ccugccuugaagccacu

SEQ ID NO: 2442826 - RNA, 19 nt, Human
ccugccuugaagccacuga

SEQ ID NO: 2442827 - RNA, 21 nt, Human
ccugccuugaagccacugaag

SEQ ID NO: 2442828 - RNA, 14 nt, Human
ccugccuuccuccu

SEQ ID NO: 2442829 - RNA, 16 nt, Human
ccugccuuccuccugg

SEQ ID NO: 2442830 - RNA, 17 nt, Human
ccugccuuccuccuggg

SEQ ID NO: 2442831 - RNA, 22 nt, Human
ccugccuuccuccugggcccuc

SEQ ID NO: 2442832 - RNA, 13 nt, Human
ccugccuugaagc

SEQ ID NO: 2442833 - RNA, 22 nt, Human
ccugccuucuucuuuuugcugu

SEQ ID NO: 2442834 - RNA, 18 nt, Human
ccugccuucuucggggaa

SEQ ID NO: 2442835 - RNA, 21 nt, Human
ccugccuucuguccugguguc

SEQ ID NO: 2442836 - RNA, 19 nt, Human
ccugccuucuguccuggug

SEQ ID NO: 2442837 - RNA, 16 nt, Human
ccugccuucuguccug

SEQ ID NO: 2442838 - RNA, 15 nt, Human
ccugccuucuguccu

SEQ ID NO: 2442839 - RNA, 19 nt, Human
ccugcgaaggggcccuggu

SEQ ID NO: 2442840 - RNA, 20 nt, Human
ccugcgaaggggcccugguc

SEQ ID NO: 2442841 - RNA, 15 nt, Human
ccugcgaaggggccc

SEQ ID NO: 2442842 - RNA, 17 nt, Human
ccugcgaaggggcccug

SEQ ID NO: 2442843 - RNA, 20 nt, Human
ccugcgccaccgcccagaga

SEQ ID NO: 2442844 - RNA, 19 nt, Human
ccugcgcccaccccgcucu

SEQ ID NO: 2442845 - RNA, 18 nt, Human
ccugcgauuuugccugug

SEQ ID NO: 2442846 - RNA, 20 nt, Human
ccugcgcccaguccuuccac

SEQ ID NO: 2442847 - RNA, 18 nt, Human
ccugcgcccaguccuucc

SEQ ID NO: 2442848 - RNA, 22 nt, Human
ccugcgcccaccccgcucugca

SEQ ID NO: 2442849 - RNA, 21 nt, Human
ccugcgcccaccccgcucugc

SEQ ID NO: 2442850 - RNA, 20 nt, Human
ccugcgcccaccccgcucug

SEQ ID NO: 2442851 - RNA, 17 nt, Human
ccugcggugcuaucucc

SEQ ID NO: 2442852 - RNA, 16 nt, Human
ccugcggugcuaucuc

SEQ ID NO: 2442853 - RNA, 24 nt, Human
ccugcggguggggcuuggggcuca

SEQ ID NO: 2442854 - RNA, 21 nt, Human
ccugcggguggggcuuggggc

SEQ ID NO: 2442855 - RNA, 23 nt, Human
ccugcgguagaugggagggaggc

SEQ ID NO: 2442856 - RNA, 20 nt, Human
ccugcggguggggcuugggg

SEQ ID NO: 2442857 - RNA, 24 nt, Human
ccugcgggugaacaaagcagccac

SEQ ID NO: 2442858 - RNA, 23 nt, Human
ccugcgggugaacaaagcagcca

SEQ ID NO: 2442859 - RNA, 21 nt, Human
ccugcggcugcugugugccuu

SEQ ID NO: 2442860 - RNA, 21 nt, Human
ccugcgggcuuuuccccgguc

SEQ ID NO: 2442861 - RNA, 18 nt, Human
ccugcgggucacaggagg

SEQ ID NO: 2442862 - RNA, 22 nt, Human
ccugcgggucacaggagggagg

SEQ ID NO: 2442863 - RNA, 16 nt, Human
ccugcggccugcugga

SEQ ID NO: 2442864 - RNA, 23 nt, Human
ccugcggagugaagaggggcagc

SEQ ID NO: 2442865 - RNA, 17 nt, Human
ccugcggccugcuggag

SEQ ID NO: 2442866 - RNA, 20 nt, Human
ccugcggcugcugugugccu

SEQ ID NO: 2442867 - RNA, 16 nt, Human
ccugcggcugcugugu

SEQ ID NO: 2442868 - RNA, 19 nt, Human
ccugcgggcuuuuccccgg

SEQ ID NO: 2442869 - RNA, 22 nt, Human
ccugcggagugaagaggggcag

SEQ ID NO: 2442870 - RNA, 20 nt, Human
ccugcggagugaagaggggc

SEQ ID NO: 2442871 - RNA, 19 nt, Human
ccugcggagugaagagggg

SEQ ID NO: 2442872 - RNA, 18 nt, Human
ccugcggagugaagaggg

SEQ ID NO: 2442873 - RNA, 17 nt, Human
ccugcggagugaagagg

SEQ ID NO: 2442874 - RNA, 16 nt, Human
ccugcggagugaagag

SEQ ID NO: 2442875 - RNA, 20 nt, Human
ccugcgcgcaugugcgcaca

SEQ ID NO: 2442876 - RNA, 14 nt, Human
ccugcgcgcaugug

SEQ ID NO: 2442877 - RNA, 22 nt, Human
ccugcgcccaguccuuccaccu

SEQ ID NO: 2442878 - RNA, 22 nt, Human
ccugggguaccaagagacuccu

SEQ ID NO: 2442879 - RNA, 23 nt, Human
ccuggggguucuuucuuccucug

SEQ ID NO: 2442880 - RNA, 22 nt, Human
ccuggggguucuuucuuccucu

SEQ ID NO: 2442881 - RNA, 21 nt, Human
ccuggggguucuuucuuccuc

SEQ ID NO: 2442882 - RNA, 14 nt, Human
ccuggguccuuuuc

SEQ ID NO: 2442883 - RNA, 18 nt, Human
ccugggucuaagggguug

SEQ ID NO: 2442884 - RNA, 14 nt, Human
ccugggucuguguc

SEQ ID NO: 2442885 - RNA, 15 nt, Human
ccugggucugugucu

SEQ ID NO: 2442886 - RNA, 16 nt, Human
ccugggucugugucuc

SEQ ID NO: 2442887 - RNA, 17 nt, Human
ccugggucugugucucu

SEQ ID NO: 2442888 - RNA, 21 nt, Human
ccugggucugugucucuuuuc

SEQ ID NO: 2442889 - RNA, 14 nt, Human
ccugggugacauuu

SEQ ID NO: 2442890 - RNA, 13 nt, Human
ccugggugacauu

SEQ ID NO: 2442891 - RNA, 15 nt, Human
ccugggugacauuug

SEQ ID NO: 2442892 - RNA, 23 nt, Human
ccugggugcuggcugcccagacc

SEQ ID NO: 2442893 - RNA, 15 nt, Human
ccugggggugccagg

SEQ ID NO: 2442894 - RNA, 16 nt, Human
ccugggggugccagga

SEQ ID NO: 2442895 - RNA, 18 nt, Human
ccuggggguucuuucuuc

SEQ ID NO: 2442896 - RNA, 14 nt, Human
ccugggggugccag

SEQ ID NO: 2442897 - RNA, 15 nt, Human
ccugggccccaccac

SEQ ID NO: 2442898 - RNA, 12 nt, Human
ccuggggggcag

SEQ ID NO: 2442899 - RNA, 16 nt, Human
ccugggcauugcuuuc

SEQ ID NO: 2442900 - RNA, 17 nt, Human
ccugggcauugcuuucc

SEQ ID NO: 2442901 - RNA, 13 nt, Human
ccugggccccacc

SEQ ID NO: 2442902 - RNA, 14 nt, Human
ccugggccccacca

SEQ ID NO: 2442903 - RNA, 22 nt, Human
ccugggcauauccaccaccucc

SEQ ID NO: 2442904 - RNA, 17 nt, Human
ccugggcauacuaauaa

SEQ ID NO: 2442905 - RNA, 17 nt, Human
ccuggcuucuggagccc

SEQ ID NO: 2442906 - RNA, 23 nt, Human
ccugggccacagggcgagacucc

SEQ ID NO: 2442907 - RNA, 16 nt, Human
ccugggcauccuucuu

SEQ ID NO: 2442908 - RNA, 23 nt, Human
ccugggcauauccaccaccuccc

SEQ ID NO: 2442909 - RNA, 14 nt, Human
ccugggcauugcuu

SEQ ID NO: 2442910 - RNA, 15 nt, Human
ccugggcauugcuuu

SEQ ID NO: 2442911 - RNA, 24 nt, Human
ccuggcuuuucacugcuggcugcc

SEQ ID NO: 2442912 - RNA, 23 nt, Human
ccuggcuuuucacugcuggcugc

SEQ ID NO: 2442913 - RNA, 22 nt, Human
ccuggcuuuucacugcuggcug

SEQ ID NO: 2442914 - RNA, 21 nt, Human
ccuggcuuuucacugcuggcu

SEQ ID NO: 2442915 - RNA, 18 nt, Human
ccuggcuuuucacugcug

SEQ ID NO: 2442916 - RNA, 20 nt, Human
ccuggcuuuucacugcuggc

SEQ ID NO: 2442917 - RNA, 13 nt, Human
ccuggcuucuccu

SEQ ID NO: 2442918 - RNA, 13 nt, Human
ccuggcuucugga

SEQ ID NO: 2442919 - RNA, 14 nt, Human
ccuggcuucuggag

SEQ ID NO: 2442920 - RNA, 15 nt, Human
ccuggcuucuggagc

SEQ ID NO: 2442921 - RNA, 16 nt, Human
ccuggcuucuggagcc

SEQ ID NO: 2442922 - RNA, 20 nt, Human
ccuggcugggacguggcuca

SEQ ID NO: 2442923 - RNA, 21 nt, Human
ccuggcugggacguggcucag

SEQ ID NO: 2442924 - RNA, 22 nt, Human
ccuggcugggacguggcucagc

SEQ ID NO: 2442925 - RNA, 24 nt, Human
ccuggcugggacguggcucagcca

SEQ ID NO: 2442926 - RNA, 20 nt, Human
ccuggguuuuguauucucug

SEQ ID NO: 2442927 - RNA, 21 nt, Human
ccuggguuuuguauucucuga

SEQ ID NO: 2442928 - RNA, 22 nt, Human
ccuggguuuuguauucucugag

SEQ ID NO: 2442929 - RNA, 23 nt, Human
ccuggguuuuguauucucugagc

SEQ ID NO: 2442930 - RNA, 19 nt, Human
ccuggguuuuguauucucu

SEQ ID NO: 2442931 - RNA, 16 nt, Human
ccuggguuuaagggga

SEQ ID NO: 2442932 - RNA, 17 nt, Human
ccuggguucccuuuccu

SEQ ID NO: 2442933 - RNA, 16 nt, Human
ccugggugcuggcugc

SEQ ID NO: 2442934 - RNA, 17 nt, Human
ccugggugggcucugug

SEQ ID NO: 2442935 - RNA, 16 nt, Human
ccugggugggcucugu

SEQ ID NO: 2442936 - RNA, 15 nt, Human
ccugggugggcucug

SEQ ID NO: 2442937 - RNA, 15 nt, Human
ccuggguggggcugc

SEQ ID NO: 2442938 - RNA, 16 nt, Human
ccuggguggggcugcu

SEQ ID NO: 2442939 - RNA, 13 nt, Human
ccuggguucccuu

SEQ ID NO: 2442940 - RNA, 22 nt, Human
ccugguacccagccaucugccc

SEQ ID NO: 2442941 - RNA, 20 nt, Human
ccugguacccagccaucugc

SEQ ID NO: 2442942 - RNA, 19 nt, Human
ccugguacccagccaucug

SEQ ID NO: 2442943 - RNA, 18 nt, Human
ccugguacccagccaucu

SEQ ID NO: 2442944 - RNA, 15 nt, Human
ccugguacccuccug

SEQ ID NO: 2442945 - RNA, 14 nt, Human
ccugguacccuccu

SEQ ID NO: 2442946 - RNA, 13 nt, Human
ccugguacccagc

SEQ ID NO: 2442947 - RNA, 17 nt, Human
ccugguacccagccauc

SEQ ID NO: 2442948 - RNA, 15 nt, Human
ccugguacccagcca

SEQ ID NO: 2442949 - RNA, 14 nt, Human
ccugguacccagcc

SEQ ID NO: 2442950 - RNA, 17 nt, Human
ccugguagaauagauau

SEQ ID NO: 2442951 - RNA, 13 nt, Human
ccugguagggcag

SEQ ID NO: 2442952 - RNA, 19 nt, Human
ccugguaggagugugugau

SEQ ID NO: 2442953 - RNA, 19 nt, Human
ccugguacucaagcccgcg

SEQ ID NO: 2442954 - RNA, 16 nt, Human
ccugguacucaagccc

SEQ ID NO: 2442955 - RNA, 17 nt, Human
ccugguacccuccuggc

SEQ ID NO: 2442956 - RNA, 15 nt, Human
ccugguacucaagcc

SEQ ID NO: 2442957 - RNA, 10 nt, Human
ccuggugccc

SEQ ID NO: 2442958 - RNA, 22 nt, Human
ccugguccagggaagcuggccg

SEQ ID NO: 2442959 - RNA, 14 nt, Human
ccugguccagggaa

SEQ ID NO: 2442960 - RNA, 21 nt, Human
ccugguccagggaagcuggcc

SEQ ID NO: 2442961 - RNA, 14 nt, Human
ccuggugaccccuu

SEQ ID NO: 2442962 - RNA, 17 nt, Human
ccuggugaccccuuuuc

SEQ ID NO: 2442963 - RNA, 18 nt, Human
ccugguauauccaaaagc

SEQ ID NO: 2442964 - RNA, 20 nt, Human
ccugguauauccaaaagcuu

SEQ ID NO: 2442965 - RNA, 21 nt, Human
ccuggucacaggacucugccu

SEQ ID NO: 2442966 - RNA, 23 nt, Human
ccuggucacaggacucugccucc

SEQ ID NO: 2442967 - RNA, 22 nt, Human
ccuggucacaggacucugccuc

SEQ ID NO: 2442968 - RNA, 20 nt, Human
ccuggucacagggcaugccc

SEQ ID NO: 2442969 - RNA, 12 nt, Human
ccuggucagccc

SEQ ID NO: 2442970 - RNA, 14 nt, Human
ccuggucagcccaa

SEQ ID NO: 2442971 - RNA, 22 nt, Human
ccuggcugcugcccccaccccg

SEQ ID NO: 2442972 - RNA, 21 nt, Human
ccuggcugcugcccccacccc

SEQ ID NO: 2442973 - RNA, 20 nt, Human
ccuggcugcugcccccaccc

SEQ ID NO: 2442974 - RNA, 18 nt, Human
ccuggcugcugcccccac

SEQ ID NO: 2442975 - RNA, 17 nt, Human
ccuggcugcugccccca

SEQ ID NO: 2442976 - RNA, 16 nt, Human
ccuggcugcugccccc

SEQ ID NO: 2442977 - RNA, 15 nt, Human
ccuggcugcugcccc

SEQ ID NO: 2442978 - RNA, 14 nt, Human
ccuggcugcugccc

SEQ ID NO: 2442979 - RNA, 13 nt, Human
ccuggcugcugcc

SEQ ID NO: 2442980 - RNA, 16 nt, Human
ccuggcugcccuggcc

SEQ ID NO: 2442981 - RNA, 15 nt, Human
ccuggcugcccuggc

SEQ ID NO: 2442982 - RNA, 14 nt, Human
ccuggcugcccugg

SEQ ID NO: 2442983 - RNA, 13 nt, Human
ccuggcugcccug

SEQ ID NO: 2442984 - RNA, 12 nt, Human
ccuggcugcccu

SEQ ID NO: 2442985 - RNA, 24 nt, Human
ccuggcugagguuccucugccugc

SEQ ID NO: 2442986 - RNA, 21 nt, Human
ccuggcucccacaggcagcuu

SEQ ID NO: 2442987 - RNA, 20 nt, Human
ccuggcugcccuggcccuga

SEQ ID NO: 2442988 - RNA, 18 nt, Human
ccuggcugcccuggcccu

SEQ ID NO: 2442989 - RNA, 17 nt, Human
ccuggcugcccuggccc

SEQ ID NO: 2442990 - RNA, 19 nt, Human
ccuggcugcccuggcccug

SEQ ID NO: 2442991 - RNA, 16 nt, Human
ccuggcuccaggccag

SEQ ID NO: 2442992 - RNA, 17 nt, Human
ccuggcuccaggccagg

SEQ ID NO: 2442993 - RNA, 22 nt, Human
ccuggcuccaaacccucgaggc

SEQ ID NO: 2442994 - RNA, 15 nt, Human
ccuggcuccaggcca

SEQ ID NO: 2442995 - RNA, 20 nt, Human
ccuggcucccacaggcagcu

SEQ ID NO: 2442996 - RNA, 19 nt, Human
ccuggcucccacaggcagc

SEQ ID NO: 2442997 - RNA, 18 nt, Human
ccuggcucccacaggcag

SEQ ID NO: 2442998 - RNA, 16 nt, Human
ccuggcucccacaggc

SEQ ID NO: 2442999 - RNA, 17 nt, Human
ccuggcucccacaggcc

SEQ ID NO: 2443000 - RNA, 18 nt, Human
ccuggcugcagccugcgc

SEQ ID NO: 2443001 - RNA, 23 nt, Human
ccuggcucccacaggcccuuccu

SEQ ID NO: 2443002 - RNA, 12 nt, Human
ccuggccagaca

SEQ ID NO: 2443003 - RNA, 13 nt, Human
ccuggccagacac

SEQ ID NO: 2443004 - RNA, 14 nt, Human
ccuggccagacaca

SEQ ID NO: 2443005 - RNA, 15 nt, Human
ccuggccagacacag

SEQ ID NO: 2443006 - RNA, 16 nt, Human
ccuggccagacacagg

SEQ ID NO: 2443007 - RNA, 18 nt, Human
ccuggccagacacaggcc

SEQ ID NO: 2443008 - RNA, 19 nt, Human
ccuggccagacacaggccc

SEQ ID NO: 2443009 - RNA, 23 nt, Human
ccuggccagacacaggcccuccc

SEQ ID NO: 2443010 - RNA, 15 nt, Human
ccuggccagaugcac

SEQ ID NO: 2443011 - RNA, 20 nt, Human
ccuggcuccaaacccucgag

SEQ ID NO: 2443012 - RNA, 12 nt, Human
ccuggccagagg

SEQ ID NO: 2443013 - RNA, 13 nt, Human
ccuggccagaggc

SEQ ID NO: 2443014 - RNA, 14 nt, Human
ccuggccagaggcu

SEQ ID NO: 2443015 - RNA, 14 nt, Human
ccuggcagcucugg

SEQ ID NO: 2443016 - RNA, 15 nt, Human
ccuggcagcucugga

SEQ ID NO: 2443017 - RNA, 17 nt, Human
ccuggcagcucuggaca

SEQ ID NO: 2443018 - RNA, 19 nt, Human
ccuggcagcucuggacagc

SEQ ID NO: 2443019 - RNA, 20 nt, Human
ccuggcagcucuggacagcc

SEQ ID NO: 2443020 - RNA, 21 nt, Human
ccuggcagcucuggacagccc

SEQ ID NO: 2443021 - RNA, 23 nt, Human
ccuggcagcucuggacagcccca

SEQ ID NO: 2443022 - RNA, 17 nt, Human
ccuggcaggaugacccu

SEQ ID NO: 2443023 - RNA, 22 nt, Human
ccuggcagccgugccuucagcu

SEQ ID NO: 2443024 - RNA, 21 nt, Human
ccuggcagccgugccuucagc

SEQ ID NO: 2443025 - RNA, 12 nt, Human
ccuggcagcucu

SEQ ID NO: 2443026 - RNA, 13 nt, Human
ccuggcagcucug

SEQ ID NO: 2443027 - RNA, 23 nt, Human
ccuggcacccggccccugcuggu

SEQ ID NO: 2443028 - RNA, 14 nt, Human
ccuggcagaacuga

SEQ ID NO: 2443029 - RNA, 18 nt, Human
ccuggcacgguggcucag

SEQ ID NO: 2443030 - RNA, 22 nt, Human
ccuggcacgguggcucaggccu

SEQ ID NO: 2443031 - RNA, 18 nt, Human
ccuggagauccuccugca

SEQ ID NO: 2443032 - RNA, 17 nt, Human
ccuggagauccuccugc

SEQ ID NO: 2443033 - RNA, 16 nt, Human
ccuggagauccuccug

SEQ ID NO: 2443034 - RNA, 22 nt, Human
ccuggcacccggccccugcugg

SEQ ID NO: 2443035 - RNA, 13 nt, Human
ccuggcagccccu

SEQ ID NO: 2443036 - RNA, 12 nt, Human
ccuggcagcccc

SEQ ID NO: 2443037 - RNA, 23 nt, Human
ccuggcacuaacguugagccccu

SEQ ID NO: 2443038 - RNA, 17 nt, Human
ccuggcagaacugagcu

SEQ ID NO: 2443039 - RNA, 18 nt, Human
ccuggcagaacugagcuc

SEQ ID NO: 2443040 - RNA, 13 nt, Human
ccuggcagaaugc

SEQ ID NO: 2443041 - RNA, 20 nt, Human
ccuggcagaacugagcuccu

SEQ ID NO: 2443042 - RNA, 23 nt, Human
ccuggcagaacugagcuccucug

SEQ ID NO: 2443043 - RNA, 23 nt, Human
ccuggagacuuagggcaccaggg

SEQ ID NO: 2443044 - RNA, 19 nt, Human
ccuggagacuuagggcacc

SEQ ID NO: 2443045 - RNA, 18 nt, Human
ccuggagacugcccagcu

SEQ ID NO: 2443046 - RNA, 19 nt, Human
ccuggagacuaaccccacc

SEQ ID NO: 2443047 - RNA, 21 nt, Human
ccuggagagcuagaaccuaga

SEQ ID NO: 2443048 - RNA, 19 nt, Human
ccuggagagcuagaaccua

SEQ ID NO: 2443049 - RNA, 14 nt, Human
ccuggagagcuaga

SEQ ID NO: 2443050 - RNA, 13 nt, Human
ccuggagagcuag

SEQ ID NO: 2443051 - RNA, 23 nt, Human
ccuggagagccagaaccuggagg

SEQ ID NO: 2443052 - RNA, 22 nt, Human
ccuggagagccagaaccuggag

SEQ ID NO: 2443053 - RNA, 21 nt, Human
ccuggagagccagaaccugga

SEQ ID NO: 2443054 - RNA, 14 nt, Human
ccuggagagccaga

SEQ ID NO: 2443055 - RNA, 15 nt, Human
ccuggagauccuccu

SEQ ID NO: 2443056 - RNA, 13 nt, Human
ccuggagauccuc

SEQ ID NO: 2443057 - RNA, 22 nt, Human
ccuggagagcuagaaccuggag

SEQ ID NO: 2443058 - RNA, 21 nt, Human
ccuggagagcuagaaccugga

SEQ ID NO: 2443059 - RNA, 23 nt, Human
ccuggagaguucaauggcugcug

SEQ ID NO: 2443060 - RNA, 22 nt, Human
ccuggagaguucaauggcugcu

SEQ ID NO: 2443061 - RNA, 18 nt, Human
ccuggaauauauaaccag

SEQ ID NO: 2443062 - RNA, 11 nt, Human
ccuggaagggc

SEQ ID NO: 2443063 - RNA, 12 nt, Human
ccuggaagggcu

SEQ ID NO: 2443064 - RNA, 21 nt, Human
ccuggaagcuguguccuugca

SEQ ID NO: 2443065 - RNA, 17 nt, Human
ccuggacacucagaccu

SEQ ID NO: 2443066 - RNA, 16 nt, Human
ccuggacacucagacc

SEQ ID NO: 2443067 - RNA, 24 nt, Human
ccuggaagggcuagaaccuguaga

SEQ ID NO: 2443068 - RNA, 13 nt, Human
ccuggaagggcua

SEQ ID NO: 2443069 - RNA, 18 nt, Human
cccuaccgagucucuucu

SEQ ID NO: 2443070 - RNA, 14 nt, Human
cccuaccccaccac

SEQ ID NO: 2443071 - RNA, 21 nt, Human
cccuaccgagucucuucucca

SEQ ID NO: 2443072 - RNA, 13 nt, Human
cccuaccucaggc

SEQ ID NO: 2443073 - RNA, 14 nt, Human
cccuaccugugccu

SEQ ID NO: 2443074 - RNA, 19 nt, Human
cccuaccuguucagugucc

SEQ ID NO: 2443075 - RNA, 23 nt, Human
cccuacuauucaguggcgagaaa

SEQ ID NO: 2443076 - RNA, 16 nt, Human
cccuaccucaggcagg

SEQ ID NO: 2443077 - RNA, 22 nt, Human
cccuaccugauuggugcaaccc

SEQ ID NO: 2443078 - RNA, 23 nt, Human
cccuaccugauuggugcaacccu

SEQ ID NO: 2443079 - RNA, 18 nt, Human
cccuagcccaggagagag

SEQ ID NO: 2443080 - RNA, 20 nt, Human
cccuagcuccacacccucuc

SEQ ID NO: 2443081 - RNA, 19 nt, Human
cccuagcuuuagacccugg

SEQ ID NO: 2443082 - RNA, 18 nt, Human
cccuagcuuuagacccug

SEQ ID NO: 2443083 - RNA, 17 nt, Human
cccuagcuuuagacccu

SEQ ID NO: 2443084 - RNA, 22 nt, Human
cccuagcuuagagccucccuca

SEQ ID NO: 2443085 - RNA, 14 nt, Human
cccuaggagaccaa

SEQ ID NO: 2443086 - RNA, 21 nt, Human
cccuagcuuuagacccugggu

SEQ ID NO: 2443087 - RNA, 14 nt, Human
cccuaggggacacu

SEQ ID NO: 2443088 - RNA, 18 nt, Human
cccuaggggacacuuccc

SEQ ID NO: 2443089 - RNA, 17 nt, Human
cccuaggggacacuucc

SEQ ID NO: 2443090 - RNA, 19 nt, Human
cccuaggggacacuucccu

SEQ ID NO: 2443091 - RNA, 21 nt, Human
cccuaggucagcuugcugccc

SEQ ID NO: 2443092 - RNA, 23 nt, Human
cccuaaugcgcaggcuggcccug

SEQ ID NO: 2443093 - RNA, 18 nt, Human
cccuacaccccuccccug

SEQ ID NO: 2443094 - RNA, 20 nt, Human
cccuacaguugaaaaacagc

SEQ ID NO: 2443095 - RNA, 21 nt, Human
cccuaccccacaccaggccgu

SEQ ID NO: 2443096 - RNA, 19 nt, Human
cccuaccccacaccaggcc

SEQ ID NO: 2443097 - RNA, 23 nt, Human
cccuaccagcgcccgcugggcug

SEQ ID NO: 2443098 - RNA, 22 nt, Human
cccuaccagcgcccgcugggcu

SEQ ID NO: 2443099 - RNA, 21 nt, Human
cccuaccagcgcccgcugggc

SEQ ID NO: 2443100 - RNA, 20 nt, Human
cccuaccagcgcccgcuggg

SEQ ID NO: 2443101 - RNA, 20 nt, Human
cccuaccacugucuucuuca

SEQ ID NO: 2443102 - RNA, 17 nt, Human
cccuaccacugucuucu

SEQ ID NO: 2443103 - RNA, 13 nt, Human
cccuacaccuuga

SEQ ID NO: 2443104 - RNA, 14 nt, Human
cccuacauguauug

SEQ ID NO: 2443105 - RNA, 17 nt, Human
cccuaccaccuccccag

SEQ ID NO: 2443106 - RNA, 19 nt, Human
cccuaccaccuccccagcc

SEQ ID NO: 2443107 - RNA, 20 nt, Human
cccuaccaccuccccagccu

SEQ ID NO: 2443108 - RNA, 15 nt, Human
cccguguccugccug

SEQ ID NO: 2443109 - RNA, 19 nt, Human
cccguguccccggccucag

SEQ ID NO: 2443110 - RNA, 12 nt, Human
cccguggucucu

SEQ ID NO: 2443111 - RNA, 14 nt, Human
cccguguggccccu

SEQ ID NO: 2443112 - RNA, 17 nt, Human
cccguguggccccuuca

SEQ ID NO: 2443113 - RNA, 22 nt, Human
cccguguggccccuucacuucu

SEQ ID NO: 2443114 - RNA, 22 nt, Human
cccuaaucuauggucgggagac

SEQ ID NO: 2443115 - RNA, 19 nt, Human
cccguucugcuggccugga

SEQ ID NO: 2443116 - RNA, 17 nt, Human
cccguucugcuggccug

SEQ ID NO: 2443117 - RNA, 18 nt, Human
cccguguggccccuucac

SEQ ID NO: 2443118 - RNA, 21 nt, Human
cccuaaugcgcaggcuggccc

SEQ ID NO: 2443119 - RNA, 22 nt, Human
cccuaaugcgcaggcuggcccu

SEQ ID NO: 2443120 - RNA, 17 nt, Human
cccuaaugcgcaggcug

SEQ ID NO: 2443121 - RNA, 15 nt, Human
cccuaaucuaugguc

SEQ ID NO: 2443122 - RNA, 12 nt, Human
cccuaaugccug

SEQ ID NO: 2443123 - RNA, 18 nt, Human
cccggugcccaagaauag

SEQ ID NO: 2443124 - RNA, 21 nt, Human
cccggggugcccacaggccgc

SEQ ID NO: 2443125 - RNA, 22 nt, Human
cccggguuuggcgggccaagga

SEQ ID NO: 2443126 - RNA, 15 nt, Human
cccgguucuuccagu

SEQ ID NO: 2443127 - RNA, 22 nt, Human
cccggucccuugagaccucagc

SEQ ID NO: 2443128 - RNA, 15 nt, Human
cccgucacagccuca

SEQ ID NO: 2443129 - RNA, 14 nt, Human
cccguaaugcuuag

SEQ ID NO: 2443130 - RNA, 17 nt, Human
cccgucaccaucucagg

SEQ ID NO: 2443131 - RNA, 18 nt, Human
cccgucaccaucucaggc

SEQ ID NO: 2443132 - RNA, 17 nt, Human
cccgggguccuguggca

SEQ ID NO: 2443133 - RNA, 21 nt, Human
cccggggcagcugccagagaa

SEQ ID NO: 2443134 - RNA, 22 nt, Human
cccgggguccuguggcaggcag

SEQ ID NO: 2443135 - RNA, 18 nt, Human
cccgggguccuguggcag

SEQ ID NO: 2443136 - RNA, 20 nt, Human
cccggguuuggcgggccaag

SEQ ID NO: 2443137 - RNA, 16 nt, Human
cccgggcucugccucc

SEQ ID NO: 2443138 - RNA, 16 nt, Human
cccgggcugccugggc

SEQ ID NO: 2443139 - RNA, 15 nt, Human
cccgggcugccuggg

SEQ ID NO: 2443140 - RNA, 13 nt, Human
cccgggcugccug

SEQ ID NO: 2443141 - RNA, 12 nt, Human
cccgggcugccu

SEQ ID NO: 2443142 - RNA, 16 nt, Human
cccgggcucucugcug

SEQ ID NO: 2443143 - RNA, 17 nt, Human
cccgggcucucugcugu

SEQ ID NO: 2443144 - RNA, 16 nt, Human
cccggggacccuguga

SEQ ID NO: 2443145 - RNA, 15 nt, Human
cccggggacccugug

SEQ ID NO: 2443146 - RNA, 23 nt, Human
cccgggcugccugggcuguuggc

SEQ ID NO: 2443147 - RNA, 17 nt, Human
cccgggcugccugggcu

SEQ ID NO: 2443148 - RNA, 22 nt, Human
cccggggaaaggcaagguccgg

SEQ ID NO: 2443149 - RNA, 21 nt, Human
cccggggacccugugacaugg

SEQ ID NO: 2443150 - RNA, 18 nt, Human
cccggggacccugugaca

SEQ ID NO: 2443151 - RNA, 17 nt, Human
cccggggacccugugac

SEQ ID NO: 2443152 - RNA, 12 nt, Human
cccggggcagcu

SEQ ID NO: 2443153 - RNA, 14 nt, Human
cccggggcagcugc

SEQ ID NO: 2443154 - RNA, 19 nt, Human
cccggggcagcugccagag

SEQ ID NO: 2443155 - RNA, 20 nt, Human
cccggggcagcugccagaga

SEQ ID NO: 2443156 - RNA, 23 nt, Human
cccguggccccagccuggcccag

SEQ ID NO: 2443157 - RNA, 22 nt, Human
cccguggccccagccuggccca

SEQ ID NO: 2443158 - RNA, 21 nt, Human
cccguggccccagccuggccc

SEQ ID NO: 2443159 - RNA, 20 nt, Human
cccguggccccagccuggcc

SEQ ID NO: 2443160 - RNA, 18 nt, Human
cccguggccccagccugg

SEQ ID NO: 2443161 - RNA, 15 nt, Human
cccgugggguuccuc

SEQ ID NO: 2443162 - RNA, 19 nt, Human
cccgucucucucccaugga

SEQ ID NO: 2443163 - RNA, 16 nt, Human
cccgucucucucccau

SEQ ID NO: 2443164 - RNA, 22 nt, Human
cccgucucugguuccuccccuc

SEQ ID NO: 2443165 - RNA, 23 nt, Human
cccgucugggguucagccccucc

SEQ ID NO: 2443166 - RNA, 20 nt, Human
cccgucugggguucagcccc

SEQ ID NO: 2443167 - RNA, 21 nt, Human
cccgucugggguucagccccu

SEQ ID NO: 2443168 - RNA, 17 nt, Human
cccguggccccagccug

SEQ ID NO: 2443169 - RNA, 15 nt, Human
cccguggccccagcc

SEQ ID NO: 2443170 - RNA, 17 nt, Human
cccguccugccuguggc

SEQ ID NO: 2443171 - RNA, 16 nt, Human
cccguccugccugugg

SEQ ID NO: 2443172 - RNA, 15 nt, Human
cccguccugccugug

SEQ ID NO: 2443173 - RNA, 14 nt, Human
cccguccugccugu

SEQ ID NO: 2443174 - RNA, 16 nt, Human
cccgucccauauccug

SEQ ID NO: 2443175 - RNA, 18 nt, Human
cccguccacggcucuagg

SEQ ID NO: 2443176 - RNA, 13 nt, Human
cccguccugccug

SEQ ID NO: 2443177 - RNA, 17 nt, Human
cccgucagggcccaagu

SEQ ID NO: 2443178 - RNA, 19 nt, Human
cccgucaggacguugagga

SEQ ID NO: 2443179 - RNA, 22 nt, Human
cccgucagggcccaagucccug

SEQ ID NO: 2443180 - RNA, 18 nt, Human
cccgucauguuccucaaa

SEQ ID NO: 2443181 - RNA, 15 nt, Human
cccgucucucuccca

SEQ ID NO: 2443182 - RNA, 12 nt, Human
cccgucucucuc

SEQ ID NO: 2443183 - RNA, 13 nt, Human
cccgucucagugu

SEQ ID NO: 2443184 - RNA, 12 nt, Human
cccgucucagug

SEQ ID NO: 2443185 - RNA, 19 nt, Human
cccgucccauauccugccu

SEQ ID NO: 2443186 - RNA, 20 nt, Human
cccgucgaggggcucucagc

SEQ ID NO: 2443187 - RNA, 21 nt, Human
cccgaguagcugggacuacag

SEQ ID NO: 2443188 - RNA, 18 nt, Human
cccgaguagcugggacua

SEQ ID NO: 2443189 - RNA, 17 nt, Human
cccgaguagcugggacu

SEQ ID NO: 2443190 - RNA, 16 nt, Human
cccgaguagcugggac

SEQ ID NO: 2443191 - RNA, 15 nt, Human
cccgaguagcuggga

SEQ ID NO: 2443192 - RNA, 14 nt, Human
cccgaguagcuggg

SEQ ID NO: 2443193 - RNA, 13 nt, Human
cccgaguagcugg

SEQ ID NO: 2443194 - RNA, 22 nt, Human
cccgagggaugaugccacacca

SEQ ID NO: 2443195 - RNA, 20 nt, Human
cccgagggaugaugccacac

SEQ ID NO: 2443196 - RNA, 14 nt, Human
cccgaggcugccca

SEQ ID NO: 2443197 - RNA, 19 nt, Human
cccgaggcugcccacuaug

SEQ ID NO: 2443198 - RNA, 22 nt, Human
cccagagggcccaggcaggcca

SEQ ID NO: 2443199 - RNA, 23 nt, Human
cccagagggcccaggcaggccac

SEQ ID NO: 2443200 - RNA, 20 nt, Human
cccagaacuggacucaggau

SEQ ID NO: 2443201 - RNA, 19 nt, Human
cccagaaccuguccuugca

SEQ ID NO: 2443202 - RNA, 15 nt, Human
cccagaaccuguccu

SEQ ID NO: 2443203 - RNA, 17 nt, Human
cccagaaccuguccuug

SEQ ID NO: 2443204 - RNA, 19 nt, Human
cccagaacuggacucagga

SEQ ID NO: 2443205 - RNA, 19 nt, Human
cccagaaggaccuccugag

SEQ ID NO: 2443206 - RNA, 13 nt, Human
cccagaaggcagg

SEQ ID NO: 2443207 - RNA, 23 nt, Human
cccagaaggcagggaaaggcucu

SEQ ID NO: 2443208 - RNA, 16 nt, Human
cccagaggcuggguga

SEQ ID NO: 2443209 - RNA, 13 nt, Human
cccagagggccca

SEQ ID NO: 2443210 - RNA, 15 nt, Human
cccagaaaaggacag

SEQ ID NO: 2443211 - RNA, 17 nt, Human
cccagaaaaggacagaa

SEQ ID NO: 2443212 - RNA, 16 nt, Human
cccagaaaaggacaga

SEQ ID NO: 2443213 - RNA, 14 nt, Human
cccagaaaggagac

SEQ ID NO: 2443214 - RNA, 15 nt, Human
cccagaaaggagacu

SEQ ID NO: 2443215 - RNA, 17 nt, Human
cccagaaaggagacuag

SEQ ID NO: 2443216 - RNA, 14 nt, Human
cccagaacacacuc

SEQ ID NO: 2443217 - RNA, 18 nt, Human
cccagaacacacuccauc

SEQ ID NO: 2443218 - RNA, 22 nt, Human
cccagaacacacuccaucagcu

SEQ ID NO: 2443219 - RNA, 14 nt, Human
cccagaaccugucc

SEQ ID NO: 2443220 - RNA, 15 nt, Human
cccagagggccugca

SEQ ID NO: 2443221 - RNA, 21 nt, Human
cccgaggccuucucugaagga

SEQ ID NO: 2443222 - RNA, 14 nt, Human
cccagagggccugc

SEQ ID NO: 2443223 - RNA, 14 nt, Human
cccagagggcccag

SEQ ID NO: 2443224 - RNA, 15 nt, Human
cccagagggcccagg

SEQ ID NO: 2443225 - RNA, 16 nt, Human
cccagagggcccaggc

SEQ ID NO: 2443226 - RNA, 18 nt, Human
cccagagggcccaggcag

SEQ ID NO: 2443227 - RNA, 15 nt, Human
cccgggcucugccuc

SEQ ID NO: 2443228 - RNA, 14 nt, Human
cccgggcucugccu

SEQ ID NO: 2443229 - RNA, 21 nt, Human
cccgggcucagggaccacagc

SEQ ID NO: 2443230 - RNA, 20 nt, Human
cccgggcucagggaccacag

SEQ ID NO: 2443231 - RNA, 21 nt, Human
cccgggcgcggccagccccgg

SEQ ID NO: 2443232 - RNA, 19 nt, Human
cccgggcgcggccagcccc

SEQ ID NO: 2443233 - RNA, 18 nt, Human
cccgggcccucccuugga

SEQ ID NO: 2443234 - RNA, 17 nt, Human
cccgggcccucccuugg

SEQ ID NO: 2443235 - RNA, 22 nt, Human
cccgggcccguugaggaugagg

SEQ ID NO: 2443236 - RNA, 20 nt, Human
cccgggcccguugaggauga

SEQ ID NO: 2443237 - RNA, 12 nt, Human
cccgggcucugc

SEQ ID NO: 2443238 - RNA, 22 nt, Human
cccgggaggggcccgcuugccu

SEQ ID NO: 2443239 - RNA, 18 nt, Human
cccgggaggggcccgcuu

SEQ ID NO: 2443240 - RNA, 17 nt, Human
cccgggaggggcccgcu

SEQ ID NO: 2443241 - RNA, 15 nt, Human
cccgggaggggcccg

SEQ ID NO: 2443242 - RNA, 23 nt, Human
cccgggaggggcccgcuugccuc

SEQ ID NO: 2443243 - RNA, 13 nt, Human
cccgggaggggcc

SEQ ID NO: 2443244 - RNA, 23 nt, Human
cccgcuugccucggcuccugcug

SEQ ID NO: 2443245 - RNA, 22 nt, Human
cccgcuugccucggcuccugcu

SEQ ID NO: 2443246 - RNA, 21 nt, Human
cccgcuugccucggcuccugc

SEQ ID NO: 2443247 - RNA, 20 nt, Human
cccgcuugccucggcuccug

SEQ ID NO: 2443248 - RNA, 19 nt, Human
cccgcuugccucggcuccu

SEQ ID NO: 2443249 - RNA, 17 nt, Human
cccgcuugccucggcuc

SEQ ID NO: 2443250 - RNA, 15 nt, Human
cccgcuugccucggc

SEQ ID NO: 2443251 - RNA, 12 nt, Human
cccgcuugccuc

SEQ ID NO: 2443252 - RNA, 11 nt, Human
cccgcuugccu

SEQ ID NO: 2443253 - RNA, 21 nt, Human
cccgcugggcugagccccuac

SEQ ID NO: 2443254 - RNA, 15 nt, Human
cccgcugggcugagc

SEQ ID NO: 2443255 - RNA, 12 nt, Human
cccgcugggcug

SEQ ID NO: 2443256 - RNA, 20 nt, Human
cccgcugucagccauuccug

SEQ ID NO: 2443257 - RNA, 19 nt, Human
cccgcugucagccauuccu

SEQ ID NO: 2443258 - RNA, 16 nt, Human
cccgccugccaguccu

SEQ ID NO: 2443259 - RNA, 14 nt, Human
cccgccugccaguc

SEQ ID NO: 2443260 - RNA, 13 nt, Human
cccgccugccagu

SEQ ID NO: 2443261 - RNA, 12 nt, Human
cccgccugcccu

SEQ ID NO: 2443262 - RNA, 16 nt, Human
cccgcugcugcugcug

SEQ ID NO: 2443263 - RNA, 12 nt, Human
cccgccugccag

SEQ ID NO: 2443264 - RNA, 11 nt, Human
cccgccugcca

SEQ ID NO: 2443265 - RNA, 21 nt, Human
cccgccucucccgucagggcc

SEQ ID NO: 2443266 - RNA, 13 nt, Human
cccgccucucccg

SEQ ID NO: 2443267 - RNA, 12 nt, Human
cccgccucuccc

SEQ ID NO: 2443268 - RNA, 22 nt, Human
cccgaguagcugggacuacagg

SEQ ID NO: 2443269 - RNA, 21 nt, Human
cccgagucauucguucugugg

SEQ ID NO: 2443270 - RNA, 19 nt, Human
cccgccccacauuccgaca

SEQ ID NO: 2443271 - RNA, 16 nt, Human
cccgcccccugcccuc

SEQ ID NO: 2443272 - RNA, 17 nt, Human
cccgcccccugcccucc

SEQ ID NO: 2443273 - RNA, 20 nt, Human
cccgccccuuccccgaggga

SEQ ID NO: 2443274 - RNA, 15 nt, Human
cccgccccacauucc

SEQ ID NO: 2443275 - RNA, 20 nt, Human
cccgccgcuuuucuccucuu

SEQ ID NO: 2443276 - RNA, 19 nt, Human
cccgccgcuuuucuccucu

SEQ ID NO: 2443277 - RNA, 18 nt, Human
cccgccgccugguacuca

SEQ ID NO: 2443278 - RNA, 12 nt, Human
cccucuggggcu

SEQ ID NO: 2443279 - RNA, 18 nt, Human
cccucuggccaggaugga

SEQ ID NO: 2443280 - RNA, 22 nt, Human
cccucuggccaggauggagggg

SEQ ID NO: 2443281 - RNA, 13 nt, Human
cccucuggcccug

SEQ ID NO: 2443282 - RNA, 14 nt, Human
cccucuggcccugc

SEQ ID NO: 2443283 - RNA, 21 nt, Human
cccucuggaguggccacuaag

SEQ ID NO: 2443284 - RNA, 22 nt, Human
cccucuggaguggccacuaagc

SEQ ID NO: 2443285 - RNA, 18 nt, Human
cccucuggaguggccacu

SEQ ID NO: 2443286 - RNA, 12 nt, Human
cccucuggccag

SEQ ID NO: 2443287 - RNA, 13 nt, Human
cccucuggaucaa

SEQ ID NO: 2443288 - RNA, 13 nt, Human
cccucuggccagg

SEQ ID NO: 2443289 - RNA, 22 nt, Human
cccucuggagggguguggcucc

SEQ ID NO: 2443290 - RNA, 21 nt, Human
cccucuggagggguguggcuc

SEQ ID NO: 2443291 - RNA, 12 nt, Human
cccucuggaggg

SEQ ID NO: 2443292 - RNA, 15 nt, Human
cccucugcugcuguc

SEQ ID NO: 2443293 - RNA, 14 nt, Human
cccucugcugcugu

SEQ ID NO: 2443294 - RNA, 15 nt, Human
cccucugccuguccc

SEQ ID NO: 2443295 - RNA, 16 nt, Human
cccucugccugucccu

SEQ ID NO: 2443296 - RNA, 23 nt, Human
cccucugccugucccucucaggc

SEQ ID NO: 2443297 - RNA, 14 nt, Human
cccucugaccugca

SEQ ID NO: 2443298 - RNA, 19 nt, Human
cccucugaaugguccaggg

SEQ ID NO: 2443299 - RNA, 18 nt, Human
cccucucuugcacccgcc

SEQ ID NO: 2443300 - RNA, 13 nt, Human
cccucucuugcac

SEQ ID NO: 2443301 - RNA, 23 nt, Human
cccucucuugcacccgccucucc

SEQ ID NO: 2443302 - RNA, 15 nt, Human
cccucucugcucugc

SEQ ID NO: 2443303 - RNA, 16 nt, Human
cccucucugcucugcg

SEQ ID NO: 2443304 - RNA, 11 nt, Human
cccucucugga

SEQ ID NO: 2443305 - RNA, 19 nt, Human
cccucugaccugcacuggg

SEQ ID NO: 2443306 - RNA, 17 nt, Human
cccucugaccugcacug

SEQ ID NO: 2443307 - RNA, 16 nt, Human
cccucugaccugcacu

SEQ ID NO: 2443308 - RNA, 15 nt, Human
cccucugaccugcac

SEQ ID NO: 2443309 - RNA, 9 nt, Human
cccucugcc

SEQ ID NO: 2443310 - RNA, 21 nt, Human
cccucugagaauuccaaggag

SEQ ID NO: 2443311 - RNA, 20 nt, Human
cccucugagaauuccaagga

SEQ ID NO: 2443312 - RNA, 22 nt, Human
cccucugaaugguccaggguug

SEQ ID NO: 2443313 - RNA, 13 nt, Human
cccucugccacca

SEQ ID NO: 2443314 - RNA, 12 nt, Human
cccucugccacc

SEQ ID NO: 2443315 - RNA, 14 nt, Human
cccucugccaccag

SEQ ID NO: 2443316 - RNA, 14 nt, Human
cccucugccugucc

SEQ ID NO: 2443317 - RNA, 20 nt, Human
cccucucugcaucugaccac

SEQ ID NO: 2443318 - RNA, 18 nt, Human
cccucucugcaucugacc

SEQ ID NO: 2443319 - RNA, 14 nt, Human
cccucucugcucug

SEQ ID NO: 2443320 - RNA, 12 nt, Human
cccucucugcau

SEQ ID NO: 2443321 - RNA, 18 nt, Human
cccucucucuucugcucc

SEQ ID NO: 2443322 - RNA, 19 nt, Human
cccucucucuucugcucca

SEQ ID NO: 2443323 - RNA, 22 nt, Human
cccucucucuucugcuccaccc

SEQ ID NO: 2443324 - RNA, 23 nt, Human
cccucucucuucugcuccacccu

SEQ ID NO: 2443325 - RNA, 13 nt, Human
cccucucuccucc

SEQ ID NO: 2443326 - RNA, 18 nt, Human
cccucucucugacucuca

SEQ ID NO: 2443327 - RNA, 15 nt, Human
cccucucucugacuc

SEQ ID NO: 2443328 - RNA, 13 nt, Human
cccucucucugac

SEQ ID NO: 2443329 - RNA, 12 nt, Human
cccucucucuga

SEQ ID NO: 2443330 - RNA, 13 nt, Human
cccucucucuucu

SEQ ID NO: 2443331 - RNA, 14 nt, Human
cccucucucuucug

SEQ ID NO: 2443332 - RNA, 15 nt, Human
cccucucucuucugc

SEQ ID NO: 2443333 - RNA, 17 nt, Human
cccucucucuucugcuc

SEQ ID NO: 2443334 - RNA, 21 nt, Human
cccucccccgccacuccugaa

SEQ ID NO: 2443335 - RNA, 11 nt, Human
cccucuccugc

SEQ ID NO: 2443336 - RNA, 20 nt, Human
cccucccccccaugcacugu

SEQ ID NO: 2443337 - RNA, 17 nt, Human
cccucuccugccuacuc

SEQ ID NO: 2443338 - RNA, 12 nt, Human
cccucuccugcc

SEQ ID NO: 2443339 - RNA, 13 nt, Human
cccucuccugccu

SEQ ID NO: 2443340 - RNA, 17 nt, Human
cccucuccuuccugugu

SEQ ID NO: 2443341 - RNA, 13 nt, Human
cccucccauuagg

SEQ ID NO: 2443342 - RNA, 17 nt, Human
cccucccaucugggagu

SEQ ID NO: 2443343 - RNA, 16 nt, Human
cccucccaucugggag

SEQ ID NO: 2443344 - RNA, 14 nt, Human
cccucccaucuggg

SEQ ID NO: 2443345 - RNA, 16 nt, Human
cccuccccagagcacu

SEQ ID NO: 2443346 - RNA, 15 nt, Human
cccucccauuaggac

SEQ ID NO: 2443347 - RNA, 15 nt, Human
cccuccccagagcac

SEQ ID NO: 2443348 - RNA, 13 nt, Human
cccucccaucugg

SEQ ID NO: 2443349 - RNA, 22 nt, Human
cccucccagggccagggcccug

SEQ ID NO: 2443350 - RNA, 15 nt, Human
cccucccccccaugc

SEQ ID NO: 2443351 - RNA, 18 nt, Human
cccucccccccaugcacu

SEQ ID NO: 2443352 - RNA, 14 nt, Human
cccucccccacugc

SEQ ID NO: 2443353 - RNA, 14 nt, Human
cccuccccagggga

SEQ ID NO: 2443354 - RNA, 14 nt, Human
cccuccccauggag

SEQ ID NO: 2443355 - RNA, 16 nt, Human
cccucccccaaccccc

SEQ ID NO: 2443356 - RNA, 16 nt, Human
cccuccccaucccaug

SEQ ID NO: 2443357 - RNA, 12 nt, Human
cccuccccaggg

SEQ ID NO: 2443358 - RNA, 13 nt, Human
cccuccccagggg

SEQ ID NO: 2443359 - RNA, 13 nt, Human
cccuccaccugcu

SEQ ID NO: 2443360 - RNA, 23 nt, Human
cccuccacucuccucuuccaggc

SEQ ID NO: 2443361 - RNA, 12 nt, Human
cccuccacuguc

SEQ ID NO: 2443362 - RNA, 12 nt, Human
cccuccacuccu

SEQ ID NO: 2443363 - RNA, 17 nt, Human
cccuccacuccuuccug

SEQ ID NO: 2443364 - RNA, 18 nt, Human
cccuccacguucaccccu

SEQ ID NO: 2443365 - RNA, 22 nt, Human
cccuccacccugucccccagcu

SEQ ID NO: 2443366 - RNA, 16 nt, Human
cccuccacccuguccc

SEQ ID NO: 2443367 - RNA, 14 nt, Human
cccuccacaucccu

SEQ ID NO: 2443368 - RNA, 14 nt, Human
cccuauccacccag

SEQ ID NO: 2443369 - RNA, 16 nt, Human
cccuauccacccagcc

SEQ ID NO: 2443370 - RNA, 18 nt, Human
cccuauccacccagccca

SEQ ID NO: 2443371 - RNA, 14 nt, Human
cccuccacccuguc

SEQ ID NO: 2443372 - RNA, 12 nt, Human
cccuccacccug

SEQ ID NO: 2443373 - RNA, 19 nt, Human
cccuauccacccagcccau

SEQ ID NO: 2443374 - RNA, 15 nt, Human
cccuccacaucccug

SEQ ID NO: 2443375 - RNA, 23 nt, Human
cccuauauguaguauaaagaaaa

SEQ ID NO: 2443376 - RNA, 19 nt, Human
cccuagugacccggaggcc

SEQ ID NO: 2443377 - RNA, 21 nt, Human
cccuagugacccggaggccac

SEQ ID NO: 2443378 - RNA, 19 nt, Human
cccuaguucuaccucaggc

SEQ ID NO: 2443379 - RNA, 17 nt, Human
cccuagucccuuccccu

SEQ ID NO: 2443380 - RNA, 22 nt, Human
cccuagucccuuccccucccug

SEQ ID NO: 2443381 - RNA, 22 nt, Human
cccuaggucagcuugcugcccu

SEQ ID NO: 2443382 - RNA, 23 nt, Human
cccuaguaagugccuuccauguc

SEQ ID NO: 2443383 - RNA, 20 nt, Human
cccuaguaagugccuuccau

SEQ ID NO: 2443384 - RNA, 16 nt, Human
cccuagucccuucccc

SEQ ID NO: 2443385 - RNA, 18 nt, Human
cccuaguaagugccuucc

SEQ ID NO: 2443386 - RNA, 17 nt, Human
cccuaguaagugccuuc

SEQ ID NO: 2443387 - RNA, 15 nt, Human
cccuaguaaaaauac

SEQ ID NO: 2443388 - RNA, 23 nt, Human
cccugcaaaauuugaugccagga

SEQ ID NO: 2443389 - RNA, 20 nt, Human
cccugaguggaucuccaagg

SEQ ID NO: 2443390 - RNA, 19 nt, Human
cccugcaaaaugagacccu

SEQ ID NO: 2443391 - RNA, 19 nt, Human
cccugaguggaucuccaag

SEQ ID NO: 2443392 - RNA, 15 nt, Human
cccugcaaagcccag

SEQ ID NO: 2443393 - RNA, 23 nt, Human
cccugaggugugggggcugcagc

SEQ ID NO: 2443394 - RNA, 22 nt, Human
cccugaggugugggggcugcag

SEQ ID NO: 2443395 - RNA, 21 nt, Human
cccugaggugugggggcugca

SEQ ID NO: 2443396 - RNA, 20 nt, Human
cccugaggugugggggcugc

SEQ ID NO: 2443397 - RNA, 22 nt, Human
cccugaguaaucgcuuaaagau

SEQ ID NO: 2443398 - RNA, 16 nt, Human
cccugagucaccagga

SEQ ID NO: 2443399 - RNA, 17 nt, Human
cccugagucaccaggaa

SEQ ID NO: 2443400 - RNA, 23 nt, Human
cccugaaacuuauuuuuuucuga

SEQ ID NO: 2443401 - RNA, 22 nt, Human
cccugaaacuuauuuuuuucug

SEQ ID NO: 2443402 - RNA, 12 nt, Human
cccugaggcuca

SEQ ID NO: 2443403 - RNA, 18 nt, Human
cccugaggcucagggaaa

SEQ ID NO: 2443404 - RNA, 17 nt, Human
cccugaggggucccuga

SEQ ID NO: 2443405 - RNA, 18 nt, Human
cccugaggugaaagggag

SEQ ID NO: 2443406 - RNA, 19 nt, Human
cccugaggugugggggcug

SEQ ID NO: 2443407 - RNA, 15 nt, Human
cccugaggugugggg

SEQ ID NO: 2443408 - RNA, 20 nt, Human
cccugaggugaaagggagcu

SEQ ID NO: 2443409 - RNA, 16 nt, Human
cccugcaaagcccagc

SEQ ID NO: 2443410 - RNA, 17 nt, Human
cccugcaaagcccagcu

SEQ ID NO: 2443411 - RNA, 19 nt, Human
cccugcaaagcccagcuug

SEQ ID NO: 2443412 - RNA, 20 nt, Human
cccugcaaagcccagcuuga

SEQ ID NO: 2443413 - RNA, 23 nt, Human
cccugcacaaagcccuuccaugu

SEQ ID NO: 2443414 - RNA, 15 nt, Human
cccugcaaaggacug

SEQ ID NO: 2443415 - RNA, 16 nt, Human
cccugcaaaggacugu

SEQ ID NO: 2443416 - RNA, 10 nt, Human
cccugcacug

SEQ ID NO: 2443417 - RNA, 14 nt, Human
cccugcacgucaug

SEQ ID NO: 2443418 - RNA, 15 nt, Human
cccugcacgucaugg

SEQ ID NO: 2443419 - RNA, 13 nt, Human
cccugcacgucau

SEQ ID NO: 2443420 - RNA, 13 nt, Human
cccugcacugucc

SEQ ID NO: 2443421 - RNA, 15 nt, Human
cccugcacuguccug

SEQ ID NO: 2443422 - RNA, 23 nt, Human
cccugcacuggaguccagucucu

SEQ ID NO: 2443423 - RNA, 13 nt, Human
cccugcacuggag

SEQ ID NO: 2443424 - RNA, 22 nt, Human
cccugcacuggaguccagucuc

SEQ ID NO: 2443425 - RNA, 23 nt, Human
cccugcacuguccugcuccacag

SEQ ID NO: 2443426 - RNA, 22 nt, Human
cccugcacuguccugcuccaca

SEQ ID NO: 2443427 - RNA, 21 nt, Human
cccugcacuguccugcuccac

SEQ ID NO: 2443428 - RNA, 20 nt, Human
cccugcacuguccugcucca

SEQ ID NO: 2443429 - RNA, 19 nt, Human
cccugcacuguccugcucc

SEQ ID NO: 2443430 - RNA, 18 nt, Human
cccugcacuguccugcuc

SEQ ID NO: 2443431 - RNA, 17 nt, Human
cccugcacuguccugcu

SEQ ID NO: 2443432 - RNA, 16 nt, Human
cccugcacuguccugc

SEQ ID NO: 2443433 - RNA, 12 nt, Human
cccugcacuugc

SEQ ID NO: 2443434 - RNA, 19 nt, Human
cccugccacucacuaggcc

SEQ ID NO: 2443435 - RNA, 18 nt, Human
cccugccacucacuaggc

SEQ ID NO: 2443436 - RNA, 13 nt, Human
cccugccacucac

SEQ ID NO: 2443437 - RNA, 19 nt, Human
cccugcacuugcagacucu

SEQ ID NO: 2443438 - RNA, 23 nt, Human
cccugaggcccagagggccugca

SEQ ID NO: 2443439 - RNA, 20 nt, Human
cccugaggcccagagggccu

SEQ ID NO: 2443440 - RNA, 19 nt, Human
cccugaggcccagagggcc

SEQ ID NO: 2443441 - RNA, 18 nt, Human
cccugaggcccagagggc

SEQ ID NO: 2443442 - RNA, 17 nt, Human
cccugaggcccagaggg

SEQ ID NO: 2443443 - RNA, 16 nt, Human
cccugaggcccagagg

SEQ ID NO: 2443444 - RNA, 15 nt, Human
cccugaggcccagag

SEQ ID NO: 2443445 - RNA, 14 nt, Human
cccugaggcccaga

SEQ ID NO: 2443446 - RNA, 15 nt, Human
cccugaaagcccuga

SEQ ID NO: 2443447 - RNA, 22 nt, Human
cccugaaaauguuuuucugcca

SEQ ID NO: 2443448 - RNA, 23 nt, Human
cccugaaaauguuuuucugccag

SEQ ID NO: 2443449 - RNA, 24 nt, Human
cccugaaaauguuuuucugccagg

SEQ ID NO: 2443450 - RNA, 13 nt, Human
cccugaggcccag

SEQ ID NO: 2443451 - RNA, 17 nt, Human
cccugaaacuuauuuuu

SEQ ID NO: 2443452 - RNA, 15 nt, Human
cccugaaacuuauuu

SEQ ID NO: 2443453 - RNA, 14 nt, Human
cccugaaacuuauu

SEQ ID NO: 2443454 - RNA, 16 nt, Human
cccugaaagcccugag

SEQ ID NO: 2443455 - RNA, 22 nt, Human
cccucuggucgcuccugcccac

SEQ ID NO: 2443456 - RNA, 20 nt, Human
cccucuggucgcuccugccc

SEQ ID NO: 2443457 - RNA, 19 nt, Human
cccucuggucgcuccugcc

SEQ ID NO: 2443458 - RNA, 18 nt, Human
cccucuggucgcuccugc

SEQ ID NO: 2443459 - RNA, 16 nt, Human
cccucuggggcuguuc

SEQ ID NO: 2443460 - RNA, 15 nt, Human
cccucuguccugacu

SEQ ID NO: 2443461 - RNA, 14 nt, Human
cccucuguccugac

SEQ ID NO: 2443462 - RNA, 18 nt, Human
cccucuguguauuugcuu

SEQ ID NO: 2443463 - RNA, 15 nt, Human
cccugaaaacccaga

SEQ ID NO: 2443464 - RNA, 16 nt, Human
cccugaaaacccagag

SEQ ID NO: 2443465 - RNA, 17 nt, Human
cccugaaaacccagaga

SEQ ID NO: 2443466 - RNA, 18 nt, Human
cccugaaaacccagagag

SEQ ID NO: 2443467 - RNA, 24 nt, Human
cccucuguccaggcacugagauac

SEQ ID NO: 2443468 - RNA, 13 nt, Human
cccucuguccuga

SEQ ID NO: 2443469 - RNA, 20 nt, Human
cccucuguccaggcacugag

SEQ ID NO: 2443470 - RNA, 16 nt, Human
cccuggaccagugguc

SEQ ID NO: 2443471 - RNA, 17 nt, Human
cccuggaccaguggucu

SEQ ID NO: 2443472 - RNA, 21 nt, Human
cccuggaccaguggucucaca

SEQ ID NO: 2443473 - RNA, 23 nt, Human
cccuggaccaguggucucacaug

SEQ ID NO: 2443474 - RNA, 20 nt, Human
cccugcuuugggcugcccug

SEQ ID NO: 2443475 - RNA, 12 nt, Human
cccuggaagccg

SEQ ID NO: 2443476 - RNA, 22 nt, Human
cccuggaagccggcggcccaag

SEQ ID NO: 2443477 - RNA, 18 nt, Human
cccuggaagccggcggcc

SEQ ID NO: 2443478 - RNA, 21 nt, Human
cccugcuggcucuucugccca

SEQ ID NO: 2443479 - RNA, 20 nt, Human
cccugcuggcucuucugccc

SEQ ID NO: 2443480 - RNA, 17 nt, Human
cccuggacaagcagagg

SEQ ID NO: 2443481 - RNA, 22 nt, Human
cccugcuggguguggcgcagca

SEQ ID NO: 2443482 - RNA, 15 nt, Human
cccugcuggcucuuc

SEQ ID NO: 2443483 - RNA, 14 nt, Human
cccugcuggcucuu

SEQ ID NO: 2443484 - RNA, 13 nt, Human
cccugcuggcucu

SEQ ID NO: 2443485 - RNA, 17 nt, Human
cccugcuuugggcugcc

SEQ ID NO: 2443486 - RNA, 19 nt, Human
cccugcuuugggcugcccu

SEQ ID NO: 2443487 - RNA, 18 nt, Human
cccugcuuugggcugccc

SEQ ID NO: 2443488 - RNA, 17 nt, Human
cccugcccaccuggccu

SEQ ID NO: 2443489 - RNA, 14 nt, Human
cccugcccaccugg

SEQ ID NO: 2443490 - RNA, 13 nt, Human
cccugccagaccc

SEQ ID NO: 2443491 - RNA, 21 nt, Human
cccugccagacccccuggaga

SEQ ID NO: 2443492 - RNA, 13 nt, Human
cccugcccaccug

SEQ ID NO: 2443493 - RNA, 21 nt, Human
cccugcuggguguggcgcagc

SEQ ID NO: 2443494 - RNA, 16 nt, Human
cccugcuggguguggc

SEQ ID NO: 2443495 - RNA, 18 nt, Human
cccugcccaccuggccuc

SEQ ID NO: 2443496 - RNA, 18 nt, Human
cccugcuggccgccucac

SEQ ID NO: 2443497 - RNA, 14 nt, Human
cccugcacuguccu

SEQ ID NO: 2443498 - RNA, 20 nt, Human
cccugccacucacuaggccc

SEQ ID NO: 2443499 - RNA, 12 nt, Human
cccugccagcuc

SEQ ID NO: 2443500 - RNA, 17 nt, Human
cccugggcucugugggc

SEQ ID NO: 2443501 - RNA, 22 nt, Human
cccuggguucagaaaugcugcc

SEQ ID NO: 2443502 - RNA, 23 nt, Human
cccuggguucagaaaugcugccu

SEQ ID NO: 2443503 - RNA, 23 nt, Human
cccugguaauaaguacuguguac

SEQ ID NO: 2443504 - RNA, 14 nt, Human
cccugggcucugug

SEQ ID NO: 2443505 - RNA, 16 nt, Human
cccugggcucugcccc

SEQ ID NO: 2443506 - RNA, 13 nt, Human
cccugggcucugc

SEQ ID NO: 2443507 - RNA, 15 nt, Human
cccugggcucugccc

SEQ ID NO: 2443508 - RNA, 15 nt, Human
cccugguagggcagu

SEQ ID NO: 2443509 - RNA, 16 nt, Human
cccugguccagggaag

SEQ ID NO: 2443510 - RNA, 18 nt, Human
cccugguccagggaagcu

SEQ ID NO: 2443511 - RNA, 15 nt, Human
cccugguccugaggg

SEQ ID NO: 2443512 - RNA, 13 nt, Human
cccugguccuucc

SEQ ID NO: 2443513 - RNA, 17 nt, Human
cccugguggcagcucac

SEQ ID NO: 2443514 - RNA, 16 nt, Human
cccugguggcagcuca

SEQ ID NO: 2443515 - RNA, 15 nt, Human
cccugguggcagcuc

SEQ ID NO: 2443516 - RNA, 20 nt, Human
cccuggucucagcagcgacc

SEQ ID NO: 2443517 - RNA, 17 nt, Human
cccuggucucagcagcg

SEQ ID NO: 2443518 - RNA, 13 nt, Human
cccuggucucagc

SEQ ID NO: 2443519 - RNA, 16 nt, Human
cccugguccuuccagg

SEQ ID NO: 2443520 - RNA, 17 nt, Human
cccugguccuuccaggc

SEQ ID NO: 2443521 - RNA, 18 nt, Human
cccugggaggcagugaug

SEQ ID NO: 2443522 - RNA, 14 nt, Human
cccuggacugggag

SEQ ID NO: 2443523 - RNA, 13 nt, Human
cccuggacuggga

SEQ ID NO: 2443524 - RNA, 22 nt, Human
cccuggcuuuucacugcuggcu

SEQ ID NO: 2443525 - RNA, 19 nt, Human
cccuggcuuuucacugcug

SEQ ID NO: 2443526 - RNA, 15 nt, Human
cccuggacugugugc

SEQ ID NO: 2443527 - RNA, 17 nt, Human
cccuggcuuuucacugc

SEQ ID NO: 2443528 - RNA, 18 nt, Human
cccuggcuuuucacugcu

SEQ ID NO: 2443529 - RNA, 17 nt, Human
cccugggcucggaggcu

SEQ ID NO: 2443530 - RNA, 19 nt, Human
cccugggcccugggcugga

SEQ ID NO: 2443531 - RNA, 22 nt, Human
cccugggccccaccaccuaggc

SEQ ID NO: 2443532 - RNA, 18 nt, Human
cccugggcccugggcugg

SEQ ID NO: 2443533 - RNA, 16 nt, Human
cccugggcccugggcu

SEQ ID NO: 2443534 - RNA, 13 nt, Human
cccugggcccugg

SEQ ID NO: 2443535 - RNA, 18 nt, Human
cccugggccccaccaccu

SEQ ID NO: 2443536 - RNA, 20 nt, Human
cccugggccccaccaccuag

SEQ ID NO: 2443537 - RNA, 16 nt, Human
cccugggccccaccac

SEQ ID NO: 2443538 - RNA, 21 nt, Human
cccaccuggccucugcacucc

SEQ ID NO: 2443539 - RNA, 19 nt, Human
cccaccuggccucugcacu

SEQ ID NO: 2443540 - RNA, 17 nt, Human
cccaccuggccucugca

SEQ ID NO: 2443541 - RNA, 13 nt, Human
cccaccugcccau

SEQ ID NO: 2443542 - RNA, 20 nt, Human
cccaccugcccaucacaggg

SEQ ID NO: 2443543 - RNA, 23 nt, Human
cccaccugcccaucacaggguug

SEQ ID NO: 2443544 - RNA, 20 nt, Human
cccacgacugcccggcaggg

SEQ ID NO: 2443545 - RNA, 21 nt, Human
cccacgacugcccggcagggu

SEQ ID NO: 2443546 - RNA, 16 nt, Human
cccaccuggccucugc

SEQ ID NO: 2443547 - RNA, 19 nt, Human
cccaccuuguuggagccug

SEQ ID NO: 2443548 - RNA, 18 nt, Human
cccaccuuguuggagccu

SEQ ID NO: 2443549 - RNA, 17 nt, Human
cccaccuuguuggagcc

SEQ ID NO: 2443550 - RNA, 21 nt, Human
cccaccuuguuggagccugca

SEQ ID NO: 2443551 - RNA, 20 nt, Human
cccaccuuguuggagccugc

SEQ ID NO: 2443552 - RNA, 21 nt, Human
cccaccuuuauuaaaaucuua

SEQ ID NO: 2443553 - RNA, 21 nt, Human
cccacuugccucuuccuugaa

SEQ ID NO: 2443554 - RNA, 15 nt, Human
cccacuugccucuuc

SEQ ID NO: 2443555 - RNA, 14 nt, Human
cccacuugccucuu

SEQ ID NO: 2443556 - RNA, 13 nt, Human
cccacuugccucu

SEQ ID NO: 2443557 - RNA, 20 nt, Human
cccagaaaaaaaaaaacuua

SEQ ID NO: 2443558 - RNA, 15 nt, Human
cccacuuuggccucc

SEQ ID NO: 2443559 - RNA, 12 nt, Human
cccacuucugcc

SEQ ID NO: 2443560 - RNA, 23 nt, Human
cccacuugagaauuacccuuuug

SEQ ID NO: 2443561 - RNA, 21 nt, Human
cccacgcuggagugcagugag

SEQ ID NO: 2443562 - RNA, 20 nt, Human
cccacgcuggagugcaguga

SEQ ID NO: 2443563 - RNA, 14 nt, Human
cccacgcuggagug

SEQ ID NO: 2443564 - RNA, 19 nt, Human
cccacgcuggagugcagug

SEQ ID NO: 2443565 - RNA, 14 nt, Human
cccaccgcaugccc

SEQ ID NO: 2443566 - RNA, 20 nt, Human
cccaccgcaugcccccucgu

SEQ ID NO: 2443567 - RNA, 18 nt, Human
cccaccgcaugcccccuc

SEQ ID NO: 2443568 - RNA, 22 nt, Human
cccaccgcaugcccccucgugc

SEQ ID NO: 2443569 - RNA, 20 nt, Human
cccaccgcagacaggaccag

SEQ ID NO: 2443570 - RNA, 19 nt, Human
cccaccgcagacaggacca

SEQ ID NO: 2443571 - RNA, 17 nt, Human
cccaccacacccucccu

SEQ ID NO: 2443572 - RNA, 12 nt, Human
cccaccacagca

SEQ ID NO: 2443573 - RNA, 13 nt, Human
cccaccacagcag

SEQ ID NO: 2443574 - RNA, 15 nt, Human
cccaccaccccagcu

SEQ ID NO: 2443575 - RNA, 18 nt, Human
cccaccaccccagcugcu

SEQ ID NO: 2443576 - RNA, 13 nt, Human
cccaccaccuagg

SEQ ID NO: 2443577 - RNA, 16 nt, Human
cccaccaccuaggcca

SEQ ID NO: 2443578 - RNA, 19 nt, Human
cccaccaccuaggccacuc

SEQ ID NO: 2443579 - RNA, 20 nt, Human
cccaccaccuaggccacucc

SEQ ID NO: 2443580 - RNA, 21 nt, Human
cccaccaccuaggccacuccu

SEQ ID NO: 2443581 - RNA, 22 nt, Human
cccaccaccuaggccacuccuc

SEQ ID NO: 2443582 - RNA, 22 nt, Human
cccaccaggcugcucagggcug

SEQ ID NO: 2443583 - RNA, 17 nt, Human
cccaccaggcugcucag

SEQ ID NO: 2443584 - RNA, 16 nt, Human
cccaccaggcugcuca

SEQ ID NO: 2443585 - RNA, 13 nt, Human
cccaccaggcugc

SEQ ID NO: 2443586 - RNA, 19 nt, Human
cccaccacgauguggcccu

SEQ ID NO: 2443587 - RNA, 20 nt, Human
cccaccacgauguggcccug

SEQ ID NO: 2443588 - RNA, 14 nt, Human
cccaccacggccac

SEQ ID NO: 2443589 - RNA, 24 nt, Human
cccaccacgauguggcccuggccu

SEQ ID NO: 2443590 - RNA, 21 nt, Human
cccaccacggccacuggccau

SEQ ID NO: 2443591 - RNA, 20 nt, Human
cccaccacggccacuggcca

SEQ ID NO: 2443592 - RNA, 23 nt, Human
cccaccacuaggacucugaggcu

SEQ ID NO: 2443593 - RNA, 23 nt, Human
cccaccgggcugggagcucugca

SEQ ID NO: 2443594 - RNA, 17 nt, Human
cccaccucagccucccg

SEQ ID NO: 2443595 - RNA, 17 nt, Human
cccaccuccccacgccc

SEQ ID NO: 2443596 - RNA, 16 nt, Human
cccaccuccccacgcc

SEQ ID NO: 2443597 - RNA, 15 nt, Human
cccaccuccccacgc

SEQ ID NO: 2443598 - RNA, 14 nt, Human
cccaccuccccacg

SEQ ID NO: 2443599 - RNA, 12 nt, Human
cccaccucccug

SEQ ID NO: 2443600 - RNA, 13 nt, Human
cccaccuccccac

SEQ ID NO: 2443601 - RNA, 10 nt, Human
cccaccuccc

SEQ ID NO: 2443602 - RNA, 11 nt, Human
cccaccuccac

SEQ ID NO: 2443603 - RNA, 17 nt, Human
cccaccucagccuccug

SEQ ID NO: 2443604 - RNA, 14 nt, Human
cccaccucccugcc

SEQ ID NO: 2443605 - RNA, 15 nt, Human
cccaccucccugccu

SEQ ID NO: 2443606 - RNA, 16 nt, Human
cccaccucccugccuc

SEQ ID NO: 2443607 - RNA, 22 nt, Human
cccaccucucucacuccuugaa

SEQ ID NO: 2443608 - RNA, 21 nt, Human
cccaccucugugaccucaggc

SEQ ID NO: 2443609 - RNA, 20 nt, Human
cccaccucugugaccucagg

SEQ ID NO: 2443610 - RNA, 12 nt, Human
cccaccucuucu

SEQ ID NO: 2443611 - RNA, 18 nt, Human
cccaccucugugaccuca

SEQ ID NO: 2443612 - RNA, 17 nt, Human
cccaccucugugaccuc

SEQ ID NO: 2443613 - RNA, 15 nt, Human
cccaccucugugacc

SEQ ID NO: 2443614 - RNA, 17 nt, Human
cccaccucccugccucc

SEQ ID NO: 2443615 - RNA, 19 nt, Human
cccacaggacauuucucua

SEQ ID NO: 2443616 - RNA, 20 nt, Human
cccacaggacauuucucuaa

SEQ ID NO: 2443617 - RNA, 16 nt, Human
cccacaggaggugguc

SEQ ID NO: 2443618 - RNA, 16 nt, Human
cccacaugugacacau

SEQ ID NO: 2443619 - RNA, 19 nt, Human
cccacaugugacacauaug

SEQ ID NO: 2443620 - RNA, 21 nt, Human
cccacaggagguggucuggga

SEQ ID NO: 2443621 - RNA, 21 nt, Human
cccaccaacaucccauugccc

SEQ ID NO: 2443622 - RNA, 14 nt, Human
cccacauuccgaca

SEQ ID NO: 2443623 - RNA, 14 nt, Human
cccacauuggaccc

SEQ ID NO: 2443624 - RNA, 23 nt, Human
cccacaggaagccugcaguccug

SEQ ID NO: 2443625 - RNA, 22 nt, Human
cccacaggaagccugcaguccu

SEQ ID NO: 2443626 - RNA, 20 nt, Human
cccacaggaagccugcaguc

SEQ ID NO: 2443627 - RNA, 19 nt, Human
cccacagcucccaccccac

SEQ ID NO: 2443628 - RNA, 20 nt, Human
cccacagcucccaccccacc

SEQ ID NO: 2443629 - RNA, 12 nt, Human
cccacagcuccc

SEQ ID NO: 2443630 - RNA, 14 nt, Human
cccacagcucccac

SEQ ID NO: 2443631 - RNA, 15 nt, Human
cccacagcucccacc

SEQ ID NO: 2443632 - RNA, 17 nt, Human
cccacagcucccacccc

SEQ ID NO: 2443633 - RNA, 23 nt, Human
cccacaaucuuaaggggcagcuu

SEQ ID NO: 2443634 - RNA, 13 nt, Human
cccacacacccca

SEQ ID NO: 2443635 - RNA, 13 nt, Human
cccacagcgcugg

SEQ ID NO: 2443636 - RNA, 17 nt, Human
cccacacacacacacau

SEQ ID NO: 2443637 - RNA, 18 nt, Human
cccacacacacacacaug

SEQ ID NO: 2443638 - RNA, 19 nt, Human
cccacacacacacacaugc

SEQ ID NO: 2443639 - RNA, 20 nt, Human
cccacacacacacacaugca

SEQ ID NO: 2443640 - RNA, 19 nt, Human
cccacagcgcuggccggga

SEQ ID NO: 2443641 - RNA, 13 nt, Human
cccacacacagau

SEQ ID NO: 2443642 - RNA, 13 nt, Human
cccacaagaaaug

SEQ ID NO: 2443643 - RNA, 20 nt, Human
cccaaugcacuuuguucugg

SEQ ID NO: 2443644 - RNA, 16 nt, Human
cccaaugcacuuuguu

SEQ ID NO: 2443645 - RNA, 10 nt, Human
cccacacaca

SEQ ID NO: 2443646 - RNA, 11 nt, Human
cccacacacac

SEQ ID NO: 2443647 - RNA, 13 nt, Human
cccacacacacac

SEQ ID NO: 2443648 - RNA, 14 nt, Human
cccacacacacaca

SEQ ID NO: 2443649 - RNA, 14 nt, Human
cccacaaguggugg

SEQ ID NO: 2443650 - RNA, 16 nt, Human
cccacaagugguggua

SEQ ID NO: 2443651 - RNA, 20 nt, Human
cccacaaguggugguaaccc

SEQ ID NO: 2443652 - RNA, 22 nt, Human
cccacaaucuuaaggggcagcu

SEQ ID NO: 2443653 - RNA, 22 nt, Human
cccacaauauaaaacuguacuu

SEQ ID NO: 2443654 - RNA, 22 nt, Human
cccacaaguggugguaacccug

SEQ ID NO: 2443655 - RNA, 23 nt, Human
cccacaaguggugguaacccugg

SEQ ID NO: 2443656 - RNA, 20 nt, Human
cccacaagaaaugaaagcag

SEQ ID NO: 2443657 - RNA, 13 nt, Human
cccacaaguggug

SEQ ID NO: 2443658 - RNA, 17 nt, Human
cccacaacuccugucua

SEQ ID NO: 2443659 - RNA, 22 nt, Human
ccuaugcaauauaucuaaauug

SEQ ID NO: 2443660 - RNA, 21 nt, Human
ccuaugcaugguguagaugcc

SEQ ID NO: 2443661 - RNA, 21 nt, Human
ccuaugcacauauggacucug

SEQ ID NO: 2443662 - RNA, 20 nt, Human
ccuaugcacauauggacucu

SEQ ID NO: 2443663 - RNA, 14 nt, Human
ccuaugcacauaug

SEQ ID NO: 2443664 - RNA, 19 nt, Human
ccuaugcagagguccacaa

SEQ ID NO: 2443665 - RNA, 19 nt, Human
ccucagucuggcccuuccu

SEQ ID NO: 2443666 - RNA, 20 nt, Human
ccuaugcugccuaggcugac

SEQ ID NO: 2443667 - RNA, 12 nt, Human
ccucauacccac

SEQ ID NO: 2443668 - RNA, 11 nt, Human
ccucagugcca

SEQ ID NO: 2443669 - RNA, 20 nt, Human
ccucagucuggcccuuccuu

SEQ ID NO: 2443670 - RNA, 14 nt, Human
ccucaucaccaacg

SEQ ID NO: 2443671 - RNA, 13 nt, Human
ccucaucaccaac

SEQ ID NO: 2443672 - RNA, 22 nt, Human
ccucauaguaugguggcugggu

SEQ ID NO: 2443673 - RNA, 21 nt, Human
ccucauaguaugguggcuggg

SEQ ID NO: 2443674 - RNA, 13 nt, Human
ccucauacccacc

SEQ ID NO: 2443675 - RNA, 17 nt, Human
ccucauagcccucaccc

SEQ ID NO: 2443676 - RNA, 18 nt, Human
ccucauagcccucacccu

SEQ ID NO: 2443677 - RNA, 21 nt, Human
ccucauagcccucacccuggg

SEQ ID NO: 2443678 - RNA, 22 nt, Human
ccucauagcccucacccugggg

SEQ ID NO: 2443679 - RNA, 20 nt, Human
ccucauaguaugguggcugg

SEQ ID NO: 2443680 - RNA, 20 nt, Human
ccucauccucauacccaccc

SEQ ID NO: 2443681 - RNA, 13 nt, Human
ccucauccucaua

SEQ ID NO: 2443682 - RNA, 13 nt, Human
ccucaucucauuc

SEQ ID NO: 2443683 - RNA, 21 nt, Human
ccucaucgcguccuccuaccg

SEQ ID NO: 2443684 - RNA, 17 nt, Human
ccucaucucucugccca

SEQ ID NO: 2443685 - RNA, 19 nt, Human
ccucaucucucugcccaac

SEQ ID NO: 2443686 - RNA, 21 nt, Human
ccucaucuccccaucauuggu

SEQ ID NO: 2443687 - RNA, 23 nt, Human
ccucauccagggcucugaccagu

SEQ ID NO: 2443688 - RNA, 14 nt, Human
ccucaucccgagca

SEQ ID NO: 2443689 - RNA, 20 nt, Human
ccucaucccguguucuccuu

SEQ ID NO: 2443690 - RNA, 20 nt, Human
ccucaucccgagcaccucca

SEQ ID NO: 2443691 - RNA, 14 nt, Human
ccucauccgaggca

SEQ ID NO: 2443692 - RNA, 15 nt, Human
ccucauccgaggcag

SEQ ID NO: 2443693 - RNA, 17 nt, Human
ccucauccgaggcaggg

SEQ ID NO: 2443694 - RNA, 20 nt, Human
ccucauccgaggcaggguca

SEQ ID NO: 2443695 - RNA, 23 nt, Human
ccucaucaggaugaacccaggac

SEQ ID NO: 2443696 - RNA, 21 nt, Human
ccucaucaggaugaacccagg

SEQ ID NO: 2443697 - RNA, 19 nt, Human
ccucaucaggaugaaccca

SEQ ID NO: 2443698 - RNA, 15 nt, Human
ccucaucaggaugaa

SEQ ID NO: 2443699 - RNA, 15 nt, Human
ccucauccagggcuc

SEQ ID NO: 2443700 - RNA, 14 nt, Human
ccucauccagggcu

SEQ ID NO: 2443701 - RNA, 22 nt, Human
ccucauccaccccaucccuccc

SEQ ID NO: 2443702 - RNA, 14 nt, Human
ccucaucaggauga

SEQ ID NO: 2443703 - RNA, 13 nt, Human
ccucaucaggaug

SEQ ID NO: 2443704 - RNA, 13 nt, Human
ccucauauuuaaa

SEQ ID NO: 2443705 - RNA, 16 nt, Human
ccucaguggacuuucc

SEQ ID NO: 2443706 - RNA, 18 nt, Human
ccucaguggacuuuccac

SEQ ID NO: 2443707 - RNA, 12 nt, Human
ccucauauuuaa

SEQ ID NO: 2443708 - RNA, 16 nt, Human
ccuccaauccugcccc

SEQ ID NO: 2443709 - RNA, 15 nt, Human
ccuccaauccugccc

SEQ ID NO: 2443710 - RNA, 17 nt, Human
ccucaucuuucaucaau

SEQ ID NO: 2443711 - RNA, 17 nt, Human
ccucaucuucuucacca

SEQ ID NO: 2443712 - RNA, 23 nt, Human
ccuccaaucccaccaacccucag

SEQ ID NO: 2443713 - RNA, 15 nt, Human
ccucaucugucccuc

SEQ ID NO: 2443714 - RNA, 17 nt, Human
ccucaucugucccuccg

SEQ ID NO: 2443715 - RNA, 19 nt, Human
ccucaucugcucagcagcu

SEQ ID NO: 2443716 - RNA, 13 nt, Human
ccucaucugcuca

SEQ ID NO: 2443717 - RNA, 20 nt, Human
ccucaucucucugcccaacc

SEQ ID NO: 2443718 - RNA, 18 nt, Human
ccucaucuucuucaccau

SEQ ID NO: 2443719 - RNA, 15 nt, Human
ccucaucuucuucac

SEQ ID NO: 2443720 - RNA, 20 nt, Human
ccucaucugggggaguggaa

SEQ ID NO: 2443721 - RNA, 23 nt, Human
ccuccacaguucgaccugcggcu

SEQ ID NO: 2443722 - RNA, 17 nt, Human
ccuccacaguucagugg

SEQ ID NO: 2443723 - RNA, 14 nt, Human
ccuccacauccucc

SEQ ID NO: 2443724 - RNA, 15 nt, Human
ccuccacauccucca

SEQ ID NO: 2443725 - RNA, 16 nt, Human
ccuccacauccuccac

SEQ ID NO: 2443726 - RNA, 16 nt, Human
ccuccacauccuuucu

SEQ ID NO: 2443727 - RNA, 14 nt, Human
ccuccaccaccacu

SEQ ID NO: 2443728 - RNA, 12 nt, Human
ccuccacauccu

SEQ ID NO: 2443729 - RNA, 20 nt, Human
ccuccacauccuccacguuc

SEQ ID NO: 2443730 - RNA, 15 nt, Human
ccuccacagccgcag

SEQ ID NO: 2443731 - RNA, 16 nt, Human
ccuccacagccgcagc

SEQ ID NO: 2443732 - RNA, 17 nt, Human
ccuccacagccgcagcc

SEQ ID NO: 2443733 - RNA, 11 nt, Human
ccuccacagcu

SEQ ID NO: 2443734 - RNA, 12 nt, Human
ccuccacagcuu

SEQ ID NO: 2443735 - RNA, 16 nt, Human
ccucccaaagugcugg

SEQ ID NO: 2443736 - RNA, 16 nt, Human
ccuccccauggagcca

SEQ ID NO: 2443737 - RNA, 20 nt, Human
ccuccccauuagagucagcc

SEQ ID NO: 2443738 - RNA, 22 nt, Human
ccuccccaggggagagggucug

SEQ ID NO: 2443739 - RNA, 15 nt, Human
ccuccauucugacca

SEQ ID NO: 2443740 - RNA, 22 nt, Human
ccuccccauuucccaucugcac

SEQ ID NO: 2443741 - RNA, 21 nt, Human
ccuccccauuucccaucugca

SEQ ID NO: 2443742 - RNA, 20 nt, Human
ccuccccauuucccaucugc

SEQ ID NO: 2443743 - RNA, 15 nt, Human
ccuccccauuuccca

SEQ ID NO: 2443744 - RNA, 14 nt, Human
ccuccccauuuccc

SEQ ID NO: 2443745 - RNA, 21 nt, Human
ccuccccauuagagucagccu

SEQ ID NO: 2443746 - RNA, 13 nt, Human
ccucccccaaccc

SEQ ID NO: 2443747 - RNA, 18 nt, Human
ccucccccaacccccacc

SEQ ID NO: 2443748 - RNA, 19 nt, Human
ccucccccaacccccaccc

SEQ ID NO: 2443749 - RNA, 22 nt, Human
ccucccccaacccccaccccac

SEQ ID NO: 2443750 - RNA, 15 nt, Human
ccuccaugcugccuc

SEQ ID NO: 2443751 - RNA, 15 nt, Human
ccucccaaagugcug

SEQ ID NO: 2443752 - RNA, 18 nt, Human
ccuccaucuucuuugcag

SEQ ID NO: 2443753 - RNA, 23 nt, Human
ccuccaucuccaagaaugcugaa

SEQ ID NO: 2443754 - RNA, 19 nt, Human
ccuccaugacugcacagua

SEQ ID NO: 2443755 - RNA, 14 nt, Human
ccuccaugcugccu

SEQ ID NO: 2443756 - RNA, 23 nt, Human
ccuccaugugggcuaguugggcu

SEQ ID NO: 2443757 - RNA, 11 nt, Human
ccuccagguuu

SEQ ID NO: 2443758 - RNA, 19 nt, Human
ccuccaggugugcacgugg

SEQ ID NO: 2443759 - RNA, 14 nt, Human
ccuccaggugugca

SEQ ID NO: 2443760 - RNA, 22 nt, Human
ccuccaggugcacaagcuccaa

SEQ ID NO: 2443761 - RNA, 14 nt, Human
ccuccauccugagg

SEQ ID NO: 2443762 - RNA, 21 nt, Human
ccuccaucuccaagaaugcug

SEQ ID NO: 2443763 - RNA, 19 nt, Human
ccuccaucuccaagaaugc

SEQ ID NO: 2443764 - RNA, 24 nt, Human
ccuccaucucauguaucaucugga

SEQ ID NO: 2443765 - RNA, 12 nt, Human
ccuccagguuuu

SEQ ID NO: 2443766 - RNA, 18 nt, Human
ccuccaucuaaacugccc

SEQ ID NO: 2443767 - RNA, 21 nt, Human
ccuccaggugcacaagcucca

SEQ ID NO: 2443768 - RNA, 19 nt, Human
ccuccaggugcacaagcuc

SEQ ID NO: 2443769 - RNA, 21 nt, Human
ccuccagggcuggacugaggc

SEQ ID NO: 2443770 - RNA, 20 nt, Human
ccuccagggcuggacugagg

SEQ ID NO: 2443771 - RNA, 18 nt, Human
ccuccagggcuggacuga

SEQ ID NO: 2443772 - RNA, 17 nt, Human
ccuccagggcuggacug

SEQ ID NO: 2443773 - RNA, 16 nt, Human
ccuccagggcuggacu

SEQ ID NO: 2443774 - RNA, 13 nt, Human
ccuccagggcugg

SEQ ID NO: 2443775 - RNA, 12 nt, Human
ccuccagggcug

SEQ ID NO: 2443776 - RNA, 21 nt, Human
ccuccagggccacgugccagg

SEQ ID NO: 2443777 - RNA, 22 nt, Human
ccuccagggccacgugccaggc

SEQ ID NO: 2443778 - RNA, 13 nt, Human
ccuccagcaggga

SEQ ID NO: 2443779 - RNA, 13 nt, Human
ccuccagccucug

SEQ ID NO: 2443780 - RNA, 12 nt, Human
ccuccagccucu

SEQ ID NO: 2443781 - RNA, 11 nt, Human
ccuccagccuc

SEQ ID NO: 2443782 - RNA, 14 nt, Human
ccuccagccucugu

SEQ ID NO: 2443783 - RNA, 12 nt, Human
ccuccagggcca

SEQ ID NO: 2443784 - RNA, 14 nt, Human
ccuccagggccacg

SEQ ID NO: 2443785 - RNA, 16 nt, Human
ccuccagggccacgug

SEQ ID NO: 2443786 - RNA, 17 nt, Human
ccuccagggccacgugc

SEQ ID NO: 2443787 - RNA, 18 nt, Human
ccuccagggccacgugcc

SEQ ID NO: 2443788 - RNA, 19 nt, Human
ccuccagggccacgugcca

SEQ ID NO: 2443789 - RNA, 20 nt, Human
ccuccagggccacgugccag

SEQ ID NO: 2443790 - RNA, 17 nt, Human
ccuccacguucugcuca

SEQ ID NO: 2443791 - RNA, 18 nt, Human
ccuccacguucugcucau

SEQ ID NO: 2443792 - RNA, 12 nt, Human
ccuccacuccca

SEQ ID NO: 2443793 - RNA, 23 nt, Human
ccuccaccucuucaccccccacu

SEQ ID NO: 2443794 - RNA, 21 nt, Human
ccuccacguucugcucaucau

SEQ ID NO: 2443795 - RNA, 18 nt, Human
ccuccacucccacuuccc

SEQ ID NO: 2443796 - RNA, 15 nt, Human
ccuccacucccacuu

SEQ ID NO: 2443797 - RNA, 14 nt, Human
ccuccacucccacu

SEQ ID NO: 2443798 - RNA, 13 nt, Human
ccuccacucccac

SEQ ID NO: 2443799 - RNA, 20 nt, Human
ccuccacucccacuucccug

SEQ ID NO: 2443800 - RNA, 11 nt, Human
ccuccacuccu

SEQ ID NO: 2443801 - RNA, 18 nt, Human
ccuccagaagccucuggc

SEQ ID NO: 2443802 - RNA, 19 nt, Human
ccuccagaagccucuggcu

SEQ ID NO: 2443803 - RNA, 20 nt, Human
ccuccagaagccucuggcua

SEQ ID NO: 2443804 - RNA, 21 nt, Human
ccuccagaagccucuggcuag

SEQ ID NO: 2443805 - RNA, 22 nt, Human
ccuccagaagccucuggcuaga

SEQ ID NO: 2443806 - RNA, 17 nt, Human
ccuccagaagccucugg

SEQ ID NO: 2443807 - RNA, 24 nt, Human
ccuccacccugucccccagcucug

SEQ ID NO: 2443808 - RNA, 21 nt, Human
ccuccacccugucccccagcu

SEQ ID NO: 2443809 - RNA, 20 nt, Human
ccuccacccugucccccagc

SEQ ID NO: 2443810 - RNA, 19 nt, Human
ccuccacccugucccccag

SEQ ID NO: 2443811 - RNA, 16 nt, Human
ccuccacccugucccc

SEQ ID NO: 2443812 - RNA, 15 nt, Human
ccuccacccuguccc

SEQ ID NO: 2443813 - RNA, 14 nt, Human
ccuccacccugucc

SEQ ID NO: 2443814 - RNA, 11 nt, Human
ccuccacccug

SEQ ID NO: 2443815 - RNA, 21 nt, Human
ccuccaccgccauggcuucca

SEQ ID NO: 2443816 - RNA, 19 nt, Human
ccuccaccgccauggcuuc

SEQ ID NO: 2443817 - RNA, 17 nt, Human
ccuccaccgccauggcu

SEQ ID NO: 2443818 - RNA, 13 nt, Human
ccuccaccgcugc

SEQ ID NO: 2443819 - RNA, 14 nt, Human
ccuccaccgcugcc

SEQ ID NO: 2443820 - RNA, 15 nt, Human
ccuccaccgcugccu

SEQ ID NO: 2443821 - RNA, 23 nt, Human
ccuccaccaccacuggccaccag

SEQ ID NO: 2443822 - RNA, 21 nt, Human
ccuccaccaccacuggccacc

SEQ ID NO: 2443823 - RNA, 20 nt, Human
ccuccaccaccacuggccac

SEQ ID NO: 2443824 - RNA, 19 nt, Human
ccuccaccaccacuggcca

SEQ ID NO: 2443825 - RNA, 18 nt, Human
ccuccaccaccacuggcc

SEQ ID NO: 2443826 - RNA, 17 nt, Human
ccuccaccaccacuggc

SEQ ID NO: 2443827 - RNA, 15 nt, Human
ccuccaccaccacug

SEQ ID NO: 2443828 - RNA, 22 nt, Human
ccuccacccucugagcuuugca

SEQ ID NO: 2443829 - RNA, 20 nt, Human
ccuccacccucugagcuuug

SEQ ID NO: 2443830 - RNA, 16 nt, Human
ccuccacccucugagc

SEQ ID NO: 2443831 - RNA, 15 nt, Human
ccuccacccucugag

SEQ ID NO: 2443832 - RNA, 14 nt, Human
ccuccacccucuga

SEQ ID NO: 2443833 - RNA, 13 nt, Human
ccuccacccucug

SEQ ID NO: 2443834 - RNA, 17 nt, Human
ccuccaccccccagaac

SEQ ID NO: 2443835 - RNA, 15 nt, Human
ccuccaccugccgug

SEQ ID NO: 2443836 - RNA, 14 nt, Human
ccuccaccucuuca

SEQ ID NO: 2443837 - RNA, 18 nt, Human
ccuccacguucaccccuc

SEQ ID NO: 2443838 - RNA, 17 nt, Human
ccuccacguucaccccu

SEQ ID NO: 2443839 - RNA, 17 nt, Human
ccucccgaauagcuggg

SEQ ID NO: 2443840 - RNA, 16 nt, Human
ccucuaggaggucucu

SEQ ID NO: 2443841 - RNA, 22 nt, Human
ccucuagcugugggggugaggg

SEQ ID NO: 2443842 - RNA, 12 nt, Human
ccucuagggacc

SEQ ID NO: 2443843 - RNA, 19 nt, Human
ccucuagggaccccuccuc

SEQ ID NO: 2443844 - RNA, 18 nt, Human
ccucuagggaccccuccu

SEQ ID NO: 2443845 - RNA, 20 nt, Human
ccucuagggaccccuccucc

SEQ ID NO: 2443846 - RNA, 13 nt, Human
ccucuagugcccu

SEQ ID NO: 2443847 - RNA, 14 nt, Human
ccucuagugcccuc

SEQ ID NO: 2443848 - RNA, 15 nt, Human
ccucuagugcccucc

SEQ ID NO: 2443849 - RNA, 23 nt, Human
ccucucaucaguguccucuugcu

SEQ ID NO: 2443850 - RNA, 15 nt, Human
ccucucaguacuuug

SEQ ID NO: 2443851 - RNA, 12 nt, Human
ccucuccaaggg

SEQ ID NO: 2443852 - RNA, 18 nt, Human
ccucucauuccagaggaa

SEQ ID NO: 2443853 - RNA, 14 nt, Human
ccucuauugaugua

SEQ ID NO: 2443854 - RNA, 19 nt, Human
ccucuaugaacuauggacg

SEQ ID NO: 2443855 - RNA, 13 nt, Human
ccucuaucccaau

SEQ ID NO: 2443856 - RNA, 23 nt, Human
ccucuauugauguacagucuguc

SEQ ID NO: 2443857 - RNA, 20 nt, Human
ccucuauugauguacagucu

SEQ ID NO: 2443858 - RNA, 17 nt, Human
ccucuauuuauguuugc

SEQ ID NO: 2443859 - RNA, 21 nt, Human
ccucuauuuauguuugcacuu

SEQ ID NO: 2443860 - RNA, 16 nt, Human
ccucuauuuagcauga

SEQ ID NO: 2443861 - RNA, 16 nt, Human
ccucggugccuuccuc

SEQ ID NO: 2443862 - RNA, 14 nt, Human
ccucgguguggaga

SEQ ID NO: 2443863 - RNA, 14 nt, Human
ccuccuuccuugac

SEQ ID NO: 2443864 - RNA, 15 nt, Human
ccuccuuccuugacc

SEQ ID NO: 2443865 - RNA, 18 nt, Human
ccuccuuccuugaccagc

SEQ ID NO: 2443866 - RNA, 20 nt, Human
ccuccuuccuugaccagcag

SEQ ID NO: 2443867 - RNA, 20 nt, Human
ccuccuuccuugcuguccua

SEQ ID NO: 2443868 - RNA, 15 nt, Human
ccuccuucucccuuu

SEQ ID NO: 2443869 - RNA, 16 nt, Human
ccuccuucucccuuuu

SEQ ID NO: 2443870 - RNA, 17 nt, Human
ccuccuucucccuuuuu

SEQ ID NO: 2443871 - RNA, 19 nt, Human
ccucgggcgagucacugcc

SEQ ID NO: 2443872 - RNA, 22 nt, Human
ccucgggcgagucacugccucu

SEQ ID NO: 2443873 - RNA, 19 nt, Human
ccuccugucuucccagggu

SEQ ID NO: 2443874 - RNA, 18 nt, Human
ccuccugucuucccaggg

SEQ ID NO: 2443875 - RNA, 13 nt, Human
ccuccuucagaca

SEQ ID NO: 2443876 - RNA, 14 nt, Human
ccuccuucagacac

SEQ ID NO: 2443877 - RNA, 19 nt, Human
ccuccuuccaccucccucc

SEQ ID NO: 2443878 - RNA, 18 nt, Human
ccuccuuccaccucccuc

SEQ ID NO: 2443879 - RNA, 17 nt, Human
ccuccuuccaccucccu

SEQ ID NO: 2443880 - RNA, 16 nt, Human
ccuccuuccaccuccc

SEQ ID NO: 2443881 - RNA, 15 nt, Human
ccuccuucagacacc

SEQ ID NO: 2443882 - RNA, 22 nt, Human
ccuccuucagacacccucaacc

SEQ ID NO: 2443883 - RNA, 14 nt, Human
ccuccuucccaaag

SEQ ID NO: 2443884 - RNA, 18 nt, Human
ccucuagaagccaaggga

SEQ ID NO: 2443885 - RNA, 16 nt, Human
ccucuagaagccaagg

SEQ ID NO: 2443886 - RNA, 15 nt, Human
ccucuagaagccaag

SEQ ID NO: 2443887 - RNA, 19 nt, Human
ccucuagaaauuuuucaga

SEQ ID NO: 2443888 - RNA, 14 nt, Human
ccucuagaggcaag

SEQ ID NO: 2443889 - RNA, 21 nt, Human
ccucuaaccccaggccccgag

SEQ ID NO: 2443890 - RNA, 19 nt, Human
ccucuaaccccaggccccg

SEQ ID NO: 2443891 - RNA, 18 nt, Human
ccucuaaccccaggcccc

SEQ ID NO: 2443892 - RNA, 17 nt, Human
ccucuaaccccaggccc

SEQ ID NO: 2443893 - RNA, 16 nt, Human
ccucuaaccccaggcc

SEQ ID NO: 2443894 - RNA, 15 nt, Human
ccucuaaccccaggc

SEQ ID NO: 2443895 - RNA, 23 nt, Human
ccucuaaagcaauaaugguccca

SEQ ID NO: 2443896 - RNA, 13 nt, Human
ccucuaaccccag

SEQ ID NO: 2443897 - RNA, 22 nt, Human
ccucguggccagcccggcuggu

SEQ ID NO: 2443898 - RNA, 18 nt, Human
ccucguggccagcccggc

SEQ ID NO: 2443899 - RNA, 15 nt, Human
ccucgguacucccau

SEQ ID NO: 2443900 - RNA, 18 nt, Human
ccucgggucuccucacuc

SEQ ID NO: 2443901 - RNA, 17 nt, Human
ccucgggucuccucacu

SEQ ID NO: 2443902 - RNA, 15 nt, Human
ccucgggucuccuca

SEQ ID NO: 2443903 - RNA, 14 nt, Human
ccucgggucuccuc

SEQ ID NO: 2443904 - RNA, 18 nt, Human
ccucgguguggagaagcg

SEQ ID NO: 2443905 - RNA, 18 nt, Human
ccucguggccuuccccag

SEQ ID NO: 2443906 - RNA, 19 nt, Human
ccucguggccuuccccagc

SEQ ID NO: 2443907 - RNA, 22 nt, Human
ccucguggccuuccccagccuc

SEQ ID NO: 2443908 - RNA, 23 nt, Human
ccucguggccuuccccagccucu

SEQ ID NO: 2443909 - RNA, 18 nt, Human
ccucgugguccccaacag

SEQ ID NO: 2443910 - RNA, 15 nt, Human
ccucgugguccccaa

SEQ ID NO: 2443911 - RNA, 19 nt, Human
ccucgugguccccaacagc

SEQ ID NO: 2443912 - RNA, 22 nt, Human
ccuccucugugaccaaugucuu

SEQ ID NO: 2443913 - RNA, 12 nt, Human
ccuccucuguga

SEQ ID NO: 2443914 - RNA, 14 nt, Human
ccuccucuucugac

SEQ ID NO: 2443915 - RNA, 13 nt, Human
ccuccucugugaa

SEQ ID NO: 2443916 - RNA, 20 nt, Human
ccuccugaaacuuacacaca

SEQ ID NO: 2443917 - RNA, 17 nt, Human
ccuccucuucugacgug

SEQ ID NO: 2443918 - RNA, 21 nt, Human
ccuccugaaacuuacacacaa

SEQ ID NO: 2443919 - RNA, 16 nt, Human
ccuccucugucugccc

SEQ ID NO: 2443920 - RNA, 14 nt, Human
ccuccucugucugc

SEQ ID NO: 2443921 - RNA, 17 nt, Human
ccuccucugucugcccu

SEQ ID NO: 2443922 - RNA, 11 nt, Human
ccuccucugug

SEQ ID NO: 2443923 - RNA, 18 nt, Human
ccuccucuguccagggcc

SEQ ID NO: 2443924 - RNA, 13 nt, Human
ccuccucugucug

SEQ ID NO: 2443925 - RNA, 14 nt, Human
ccuccucugucccu

SEQ ID NO: 2443926 - RNA, 22 nt, Human
ccuccucuggacggcaggcuca

SEQ ID NO: 2443927 - RNA, 21 nt, Human
ccuccucuggacggcaggcuc

SEQ ID NO: 2443928 - RNA, 12 nt, Human
ccuccucugucc

SEQ ID NO: 2443929 - RNA, 15 nt, Human
ccuccucuguccagg

SEQ ID NO: 2443930 - RNA, 16 nt, Human
ccuccucuguccaggg

SEQ ID NO: 2443931 - RNA, 21 nt, Human
ccuccucauguacauacccug

SEQ ID NO: 2443932 - RNA, 20 nt, Human
ccuccucauguacauacccu

SEQ ID NO: 2443933 - RNA, 23 nt, Human
ccuccucaucugggggaguggaa

SEQ ID NO: 2443934 - RNA, 13 nt, Human
ccuccucagggau

SEQ ID NO: 2443935 - RNA, 12 nt, Human
ccuccucaugua

SEQ ID NO: 2443936 - RNA, 23 nt, Human
ccuccucaucccguguucuccuu

SEQ ID NO: 2443937 - RNA, 20 nt, Human
ccuccucaucccguguucuc

SEQ ID NO: 2443938 - RNA, 13 nt, Human
ccuccucaucccg

SEQ ID NO: 2443939 - RNA, 12 nt, Human
ccuccucaggga

SEQ ID NO: 2443940 - RNA, 20 nt, Human
ccuccucuggacggcaggcu

SEQ ID NO: 2443941 - RNA, 19 nt, Human
ccuccuccaaaggcccccu

SEQ ID NO: 2443942 - RNA, 15 nt, Human
ccuccuccacaccag

SEQ ID NO: 2443943 - RNA, 17 nt, Human
ccuccugucuucccagg

SEQ ID NO: 2443944 - RNA, 16 nt, Human
ccuccugucuucccag

SEQ ID NO: 2443945 - RNA, 15 nt, Human
ccuccugucucuggc

SEQ ID NO: 2443946 - RNA, 22 nt, Human
ccuccuguaaaugguguacaua

SEQ ID NO: 2443947 - RNA, 21 nt, Human
ccuccugguggguccaggggc

SEQ ID NO: 2443948 - RNA, 20 nt, Human
ccuccugguggguccagggg

SEQ ID NO: 2443949 - RNA, 19 nt, Human
ccuccugguggguccaggg

SEQ ID NO: 2443950 - RNA, 18 nt, Human
ccuccugcugcagagggg

SEQ ID NO: 2443951 - RNA, 17 nt, Human
ccuccugcugcagaggg

SEQ ID NO: 2443952 - RNA, 12 nt, Human
ccuccugcugca

SEQ ID NO: 2443953 - RNA, 11 nt, Human
ccuccugcugc

SEQ ID NO: 2443954 - RNA, 21 nt, Human
ccuccugcugcagaggggcag

SEQ ID NO: 2443955 - RNA, 20 nt, Human
ccuccugcugcagaggggca

SEQ ID NO: 2443956 - RNA, 14 nt, Human
ccuccugggcuaag

SEQ ID NO: 2443957 - RNA, 16 nt, Human
ccuccugaccugaggc

SEQ ID NO: 2443958 - RNA, 23 nt, Human
ccuccugccucgaacuggcugca

SEQ ID NO: 2443959 - RNA, 12 nt, Human
ccuccugagaaa

SEQ ID NO: 2443960 - RNA, 18 nt, Human
ccuccugaccugaggcuc

SEQ ID NO: 2443961 - RNA, 15 nt, Human
ccuccugaccuguca

SEQ ID NO: 2443962 - RNA, 23 nt, Human
ccuccugcgcgcaugugcgcaca

SEQ ID NO: 2443963 - RNA, 20 nt, Human
ccuccugcgcgcaugugcgc

SEQ ID NO: 2443964 - RNA, 18 nt, Human
ccuccugcgcgcaugugc

SEQ ID NO: 2443965 - RNA, 11 nt, Human
ccuccugcuca

SEQ ID NO: 2443966 - RNA, 15 nt, Human
ccuccugcuacucug

SEQ ID NO: 2443967 - RNA, 14 nt, Human
ccuccccuugggcg

SEQ ID NO: 2443968 - RNA, 13 nt, Human
ccuccccuugggc

SEQ ID NO: 2443969 - RNA, 12 nt, Human
ccuccccuuggg

SEQ ID NO: 2443970 - RNA, 20 nt, Human
ccuccccuggggacagcaag

SEQ ID NO: 2443971 - RNA, 14 nt, Human
ccuccccuggggac

SEQ ID NO: 2443972 - RNA, 23 nt, Human
ccuccccuggggacagcaagggc

SEQ ID NO: 2443973 - RNA, 17 nt, Human
ccuccccuucccugcaa

SEQ ID NO: 2443974 - RNA, 13 nt, Human
ccuccccccacug

SEQ ID NO: 2443975 - RNA, 14 nt, Human
ccuccccccacugc

SEQ ID NO: 2443976 - RNA, 15 nt, Human
ccucccccacugcca

SEQ ID NO: 2443977 - RNA, 23 nt, Human
ccuccccauuucccaucugcacc

SEQ ID NO: 2443978 - RNA, 15 nt, Human
ccucccccagagggg

SEQ ID NO: 2443979 - RNA, 13 nt, Human
ccuccccugggga

SEQ ID NO: 2443980 - RNA, 16 nt, Human
ccuccccugcugcagg

SEQ ID NO: 2443981 - RNA, 20 nt, Human
ccuccccugcugcaggggcu

SEQ ID NO: 2443982 - RNA, 15 nt, Human
ccuccccccacugca

SEQ ID NO: 2443983 - RNA, 21 nt, Human
ccucccgaguagcugggacua

SEQ ID NO: 2443984 - RNA, 20 nt, Human
ccucccgaguagcugggacu

SEQ ID NO: 2443985 - RNA, 19 nt, Human
ccucccggcaugggaaagc

SEQ ID NO: 2443986 - RNA, 15 nt, Human
ccucccggcauggga

SEQ ID NO: 2443987 - RNA, 18 nt, Human
ccucccgccccuucccac

SEQ ID NO: 2443988 - RNA, 16 nt, Human
ccucccgccccuuccc

SEQ ID NO: 2443989 - RNA, 11 nt, Human
ccucccucagc

SEQ ID NO: 2443990 - RNA, 12 nt, Human
ccucccucagcc

SEQ ID NO: 2443991 - RNA, 22 nt, Human
ccucccucacccugagccccuu

SEQ ID NO: 2443992 - RNA, 11 nt, Human
ccucccgcccc

SEQ ID NO: 2443993 - RNA, 23 nt, Human
ccuccccuugggcggcugagagc

SEQ ID NO: 2443994 - RNA, 16 nt, Human
ccuccccuugggcggc

SEQ ID NO: 2443995 - RNA, 19 nt, Human
ccucccgaguagcugggac

SEQ ID NO: 2443996 - RNA, 21 nt, Human
ccucccugccccucccuucaa

SEQ ID NO: 2443997 - RNA, 18 nt, Human
ccucccugccccucccuu

SEQ ID NO: 2443998 - RNA, 14 nt, Human
ccucccucagcccc

SEQ ID NO: 2443999 - RNA, 15 nt, Human
ccucccucagccccu

SEQ ID NO: 2444000 - RNA, 16 nt, Human
ccucccucagccccuc

SEQ ID NO: 2444001 - RNA, 10 nt, Human
ccucccuccc

SEQ ID NO: 2444002 - RNA, 20 nt, Human
ccucccucagccccucuugc

SEQ ID NO: 2444003 - RNA, 14 nt, Human
ccuccucagaucuu

SEQ ID NO: 2444004 - RNA, 24 nt, Human
ccucccugccccucccuucaacca

SEQ ID NO: 2444005 - RNA, 22 nt, Human
ccucccugccccucccuucaac

SEQ ID NO: 2444006 - RNA, 14 nt, Human
ccucccugccucca

SEQ ID NO: 2444007 - RNA, 15 nt, Human
ccucccugccuccag

SEQ ID NO: 2444008 - RNA, 12 nt, Human
ccucccugcugu

SEQ ID NO: 2444009 - RNA, 13 nt, Human
ccucccugccccu

SEQ ID NO: 2444010 - RNA, 12 nt, Human
ccucccugccuc

SEQ ID NO: 2444011 - RNA, 17 nt, Human
ccgggaccuggugcugc

SEQ ID NO: 2444012 - RNA, 18 nt, Human
ccgggaccccgagccugg

SEQ ID NO: 2444013 - RNA, 20 nt, Human
ccgggcgcgguggcucacgc

SEQ ID NO: 2444014 - RNA, 16 nt, Human
ccgggcguggugguga

SEQ ID NO: 2444015 - RNA, 20 nt, Human
ccgggcucagggaccacagc

SEQ ID NO: 2444016 - RNA, 22 nt, Human
ccgggcucagggaccacagcaa

SEQ ID NO: 2444017 - RNA, 21 nt, Human
ccgggcucagggaccacagca

SEQ ID NO: 2444018 - RNA, 13 nt, Human
ccgggcucucugc

SEQ ID NO: 2444019 - RNA, 19 nt, Human
ccgggcugggagcucugca

SEQ ID NO: 2444020 - RNA, 18 nt, Human
ccgggcugggagcucugc

SEQ ID NO: 2444021 - RNA, 16 nt, Human
ccgggcugccugggcu

SEQ ID NO: 2444022 - RNA, 15 nt, Human
ccgggcugccugggc

SEQ ID NO: 2444023 - RNA, 12 nt, Human
ccgggcugccug

SEQ ID NO: 2444024 - RNA, 13 nt, Human
ccgggcugggagc

SEQ ID NO: 2444025 - RNA, 22 nt, Human
ccgggcucugccucccaucacc

SEQ ID NO: 2444026 - RNA, 14 nt, Human
ccgggcucucugcu

SEQ ID NO: 2444027 - RNA, 16 nt, Human
ccgggcucucugcugu

SEQ ID NO: 2444028 - RNA, 16 nt, Human
ccgugcucgccccagc

SEQ ID NO: 2444029 - RNA, 17 nt, Human
ccgugcucgccccagca

SEQ ID NO: 2444030 - RNA, 14 nt, Human
ccgugcugacagcu

SEQ ID NO: 2444031 - RNA, 16 nt, Human
ccgugcugacagcugc

SEQ ID NO: 2444032 - RNA, 17 nt, Human
ccgugcugacagcugcu

SEQ ID NO: 2444033 - RNA, 18 nt, Human
ccgugcugacagcugcuc

SEQ ID NO: 2444034 - RNA, 19 nt, Human
ccgugcugacagcugcucc

SEQ ID NO: 2444035 - RNA, 21 nt, Human
ccgugcugacagcugcuccua

SEQ ID NO: 2444036 - RNA, 14 nt, Human
ccgugcuuccucag

SEQ ID NO: 2444037 - RNA, 20 nt, Human
ccgugcugacagcugcuccu

SEQ ID NO: 2444038 - RNA, 21 nt, Human
ccgggcugccugggcuguugg

SEQ ID NO: 2444039 - RNA, 18 nt, Human
ccgggcugccugggcugu

SEQ ID NO: 2444040 - RNA, 17 nt, Human
ccgggcugccugggcug

SEQ ID NO: 2444041 - RNA, 20 nt, Human
ccgggugggcggcacagccu

SEQ ID NO: 2444042 - RNA, 14 nt, Human
ccgggugggcggca

SEQ ID NO: 2444043 - RNA, 14 nt, Human
ccgggucugccucu

SEQ ID NO: 2444044 - RNA, 12 nt, Human
ccggguuccagc

SEQ ID NO: 2444045 - RNA, 15 nt, Human
ccggguuccagcacc

SEQ ID NO: 2444046 - RNA, 22 nt, Human
ccgguaaacacgccugcaaacg

SEQ ID NO: 2444047 - RNA, 21 nt, Human
ccggguuuggcgggccaagga

SEQ ID NO: 2444048 - RNA, 22 nt, Human
ccggguuuggcgggccaaggac

SEQ ID NO: 2444049 - RNA, 20 nt, Human
ccggguucuagucuccuuug

SEQ ID NO: 2444050 - RNA, 17 nt, Human
ccggguucuagucuccu

SEQ ID NO: 2444051 - RNA, 19 nt, Human
ccggguuuggcgggccaag

SEQ ID NO: 2444052 - RNA, 20 nt, Human
ccggguuuggcgggccaagg

SEQ ID NO: 2444053 - RNA, 22 nt, Human
ccgcucugcaugcggcccagcc

SEQ ID NO: 2444054 - RNA, 21 nt, Human
ccgcucugcaugcggcccagc

SEQ ID NO: 2444055 - RNA, 20 nt, Human
ccgcucugcaugcggcccag

SEQ ID NO: 2444056 - RNA, 13 nt, Human
ccgcugaguggac

SEQ ID NO: 2444057 - RNA, 14 nt, Human
ccgcucuggaccaa

SEQ ID NO: 2444058 - RNA, 23 nt, Human
ccgcugagcgaggagaugcuccu

SEQ ID NO: 2444059 - RNA, 22 nt, Human
ccgcucagcccucccugccccu

SEQ ID NO: 2444060 - RNA, 21 nt, Human
ccgcucagcccucccugcccc

SEQ ID NO: 2444061 - RNA, 19 nt, Human
ccgcucagcccucccugcc

SEQ ID NO: 2444062 - RNA, 15 nt, Human
ccgcucagcccuccc

SEQ ID NO: 2444063 - RNA, 20 nt, Human
ccgcugccacguuggagaag

SEQ ID NO: 2444064 - RNA, 23 nt, Human
ccgcugccacccaccucccugcc

SEQ ID NO: 2444065 - RNA, 24 nt, Human
ccgcugccacccaccucccugccu

SEQ ID NO: 2444066 - RNA, 15 nt, Human
ccgcugccacccacc

SEQ ID NO: 2444067 - RNA, 16 nt, Human
ccgcugccacccaccu

SEQ ID NO: 2444068 - RNA, 17 nt, Human
ccgcugccacccaccuc

SEQ ID NO: 2444069 - RNA, 20 nt, Human
ccgcugccacccaccucccu

SEQ ID NO: 2444070 - RNA, 15 nt, Human
ccgcugauucucagg

SEQ ID NO: 2444071 - RNA, 13 nt, Human
ccgcugauucuca

SEQ ID NO: 2444072 - RNA, 19 nt, Human
ccgcugaguggacuggagu

SEQ ID NO: 2444073 - RNA, 17 nt, Human
ccgcugaguggacugga

SEQ ID NO: 2444074 - RNA, 22 nt, Human
ccgcugauucucagggucucug

SEQ ID NO: 2444075 - RNA, 11 nt, Human
ccgcugccacc

SEQ ID NO: 2444076 - RNA, 12 nt, Human
ccgcugccaccc

SEQ ID NO: 2444077 - RNA, 14 nt, Human
ccgcugccacccac

SEQ ID NO: 2444078 - RNA, 12 nt, Human
ccgcuuucuacc

SEQ ID NO: 2444079 - RNA, 20 nt, Human
ccgcugcccggcgcccucug

SEQ ID NO: 2444080 - RNA, 19 nt, Human
ccgcugcccggcgcccucu

SEQ ID NO: 2444081 - RNA, 22 nt, Human
ccgcugcccggcgcccucuguc

SEQ ID NO: 2444082 - RNA, 16 nt, Human
ccgcuuguccagcgcc

SEQ ID NO: 2444083 - RNA, 17 nt, Human
ccgcuuguccagcgccu

SEQ ID NO: 2444084 - RNA, 18 nt, Human
ccggcuggccuggccccu

SEQ ID NO: 2444085 - RNA, 17 nt, Human
ccggcuggccuggcccc

SEQ ID NO: 2444086 - RNA, 15 nt, Human
ccggcuggccuggcc

SEQ ID NO: 2444087 - RNA, 19 nt, Human
ccgcuuucuacccagcgag

SEQ ID NO: 2444088 - RNA, 17 nt, Human
ccgggaccccgagccug

SEQ ID NO: 2444089 - RNA, 20 nt, Human
ccgggaagggggcugggaca

SEQ ID NO: 2444090 - RNA, 23 nt, Human
ccggcugguuuuguaagaugcug

SEQ ID NO: 2444091 - RNA, 18 nt, Human
ccgcuuguccagcgccua

SEQ ID NO: 2444092 - RNA, 19 nt, Human
ccgcuuguccagcgccuag

SEQ ID NO: 2444093 - RNA, 14 nt, Human
ccgcacugggcuug

SEQ ID NO: 2444094 - RNA, 19 nt, Human
ccgcacugggcuuggggac

SEQ ID NO: 2444095 - RNA, 16 nt, Human
ccgcacccccacccuu

SEQ ID NO: 2444096 - RNA, 13 nt, Human
ccgcaccccccaa

SEQ ID NO: 2444097 - RNA, 11 nt, Human
ccgcaccccag

SEQ ID NO: 2444098 - RNA, 13 nt, Human
ccgcaccccagag

SEQ ID NO: 2444099 - RNA, 17 nt, Human
ccgcaccccagagugug

SEQ ID NO: 2444100 - RNA, 15 nt, Human
ccgcacccccacccu

SEQ ID NO: 2444101 - RNA, 15 nt, Human
ccgcaauacaggaac

SEQ ID NO: 2444102 - RNA, 21 nt, Human
ccgcaaugugcccccagacgc

SEQ ID NO: 2444103 - RNA, 18 nt, Human
ccgcgcgcgucccccugc

SEQ ID NO: 2444104 - RNA, 16 nt, Human
ccgcgcccgcgcccuc

SEQ ID NO: 2444105 - RNA, 16 nt, Human
ccgcgccuccuuccuu

SEQ ID NO: 2444106 - RNA, 22 nt, Human
ccgcgccaaauaaugucucugu

SEQ ID NO: 2444107 - RNA, 23 nt, Human
ccgccuucacuccggugugccug

SEQ ID NO: 2444108 - RNA, 20 nt, Human
ccgccuguucccccgccgcu

SEQ ID NO: 2444109 - RNA, 17 nt, Human
ccgccuguucccccgcc

SEQ ID NO: 2444110 - RNA, 14 nt, Human
ccgccugguacuca

SEQ ID NO: 2444111 - RNA, 14 nt, Human
ccgcacucacccau

SEQ ID NO: 2444112 - RNA, 14 nt, Human
ccgcacuaggggau

SEQ ID NO: 2444113 - RNA, 22 nt, Human
ccgccugguacucaagcccgcg

SEQ ID NO: 2444114 - RNA, 16 nt, Human
ccgcuagaggccugag

SEQ ID NO: 2444115 - RNA, 15 nt, Human
ccgcuagaggccuga

SEQ ID NO: 2444116 - RNA, 23 nt, Human
ccgcuaagagggagggagggcuc

SEQ ID NO: 2444117 - RNA, 13 nt, Human
ccgcucagcccuc

SEQ ID NO: 2444118 - RNA, 12 nt, Human
ccgcucagcccu

SEQ ID NO: 2444119 - RNA, 19 nt, Human
ccgcuagaggccugaggau

SEQ ID NO: 2444120 - RNA, 18 nt, Human
ccgcuagaggccugagga

SEQ ID NO: 2444121 - RNA, 17 nt, Human
ccgcuagaggccugagg

SEQ ID NO: 2444122 - RNA, 11 nt, Human
ccgcucagccc

SEQ ID NO: 2444123 - RNA, 13 nt, Human
ccgcguuguaaaa

SEQ ID NO: 2444124 - RNA, 17 nt, Human
ccgcguuguaaaauaua

SEQ ID NO: 2444125 - RNA, 21 nt, Human
ccgcuaagagggagggagggc

SEQ ID NO: 2444126 - RNA, 17 nt, Human
ccgcgucuggugacaac

SEQ ID NO: 2444127 - RNA, 22 nt, Human
ccgcgugaucaaagccacacuc

SEQ ID NO: 2444128 - RNA, 19 nt, Human
ccgcgucgcccucccaggc

SEQ ID NO: 2444129 - RNA, 17 nt, Human
ccgcgucgcccucccag

SEQ ID NO: 2444130 - RNA, 20 nt, Human
ccgcggggacauugggaagg

SEQ ID NO: 2444131 - RNA, 22 nt, Human
cccugguucugaugaugugccu

SEQ ID NO: 2444132 - RNA, 18 nt, Human
cccugguuuccugcccug

SEQ ID NO: 2444133 - RNA, 19 nt, Human
cccugguuuccugcccugg

SEQ ID NO: 2444134 - RNA, 14 nt, Human
ccgaggccuucucu

SEQ ID NO: 2444135 - RNA, 14 nt, Human
ccgaggcaggguca

SEQ ID NO: 2444136 - RNA, 11 nt, Human
ccgaggccagu

SEQ ID NO: 2444137 - RNA, 20 nt, Human
ccgaggcagggucaggagag

SEQ ID NO: 2444138 - RNA, 14 nt, Human
cccuggucucuggu

SEQ ID NO: 2444139 - RNA, 13 nt, Human
cccuggucucugg

SEQ ID NO: 2444140 - RNA, 15 nt, Human
cccuggucucugguc

SEQ ID NO: 2444141 - RNA, 16 nt, Human
cccugguucucaucuu

SEQ ID NO: 2444142 - RNA, 15 nt, Human
cccugguucucaucu

SEQ ID NO: 2444143 - RNA, 20 nt, Human
cccugguggcagcucaccuc

SEQ ID NO: 2444144 - RNA, 16 nt, Human
cccugguuuccugccc

SEQ ID NO: 2444145 - RNA, 17 nt, Human
cccugguuuccugcccu

SEQ ID NO: 2444146 - RNA, 23 nt, Human
cccugguucugaugaugugccug

SEQ ID NO: 2444147 - RNA, 17 nt, Human
cccugguucucaucuuu

SEQ ID NO: 2444148 - RNA, 15 nt, Human
cccugguuucacugg

SEQ ID NO: 2444149 - RNA, 20 nt, Human
cccugguuucacuggcccaa

SEQ ID NO: 2444150 - RNA, 17 nt, Human
ccgaguagcugggacua

SEQ ID NO: 2444151 - RNA, 22 nt, Human
ccgaggccuaccccgcagacac

SEQ ID NO: 2444152 - RNA, 19 nt, Human
ccgagucauucguucugug

SEQ ID NO: 2444153 - RNA, 20 nt, Human
ccgagucauucguucugugg

SEQ ID NO: 2444154 - RNA, 12 nt, Human
ccgaguccaagc

SEQ ID NO: 2444155 - RNA, 20 nt, Human
ccgaguagcugggacuacag

SEQ ID NO: 2444156 - RNA, 23 nt, Human
ccgaugcugcuuuccccuguggg

SEQ ID NO: 2444157 - RNA, 21 nt, Human
ccgaugcugcuuuccccugug

SEQ ID NO: 2444158 - RNA, 20 nt, Human
ccgaugcugcuuuccccugu

SEQ ID NO: 2444159 - RNA, 13 nt, Human
ccgaguccaagcu

SEQ ID NO: 2444160 - RNA, 17 nt, Human
ccgaugcugcuuucccc

SEQ ID NO: 2444161 - RNA, 16 nt, Human
ccgauucaccugagca

SEQ ID NO: 2444162 - RNA, 21 nt, Human
ccgauucaucucucagaaggg

SEQ ID NO: 2444163 - RNA, 22 nt, Human
ccgaugcugcuuuccccugugg

SEQ ID NO: 2444164 - RNA, 13 nt, Human
ccgauucacccug

SEQ ID NO: 2444165 - RNA, 14 nt, Human
ccgauuucccaggc

SEQ ID NO: 2444166 - RNA, 16 nt, Human
ccgcaaaccacacugg

SEQ ID NO: 2444167 - RNA, 15 nt, Human
ccgcaaaccacacug

SEQ ID NO: 2444168 - RNA, 21 nt, Human
ccgcaaacccccuuugugcug

SEQ ID NO: 2444169 - RNA, 21 nt, Human
ccgcaaaccacacuggacucc

SEQ ID NO: 2444170 - RNA, 14 nt, Human
ccuauagucccagc

SEQ ID NO: 2444171 - RNA, 15 nt, Human
ccuaggcuccacccc

SEQ ID NO: 2444172 - RNA, 21 nt, Human
ccuacuuugacuuuuugcauu

SEQ ID NO: 2444173 - RNA, 23 nt, Human
ccuacuucuuugcuuugcccagc

SEQ ID NO: 2444174 - RNA, 17 nt, Human
ccuaggcuccaccccau

SEQ ID NO: 2444175 - RNA, 18 nt, Human
ccuaggcuccaccccauc

SEQ ID NO: 2444176 - RNA, 17 nt, Human
ccuaggcugaccuugaa

SEQ ID NO: 2444177 - RNA, 17 nt, Human
ccuagggccacugaaga

SEQ ID NO: 2444178 - RNA, 20 nt, Human
ccuagggauguucuggcccu

SEQ ID NO: 2444179 - RNA, 22 nt, Human
ccuagggaagggugguggagcc

SEQ ID NO: 2444180 - RNA, 23 nt, Human
ccuagggaagggugguggagcca

SEQ ID NO: 2444181 - RNA, 14 nt, Human
ccuagggaaaaguu

SEQ ID NO: 2444182 - RNA, 14 nt, Human
ccuagggccugguc

SEQ ID NO: 2444183 - RNA, 16 nt, Human
ccuagggccuggucca

SEQ ID NO: 2444184 - RNA, 18 nt, Human
ccuaggggacacuucccu

SEQ ID NO: 2444185 - RNA, 17 nt, Human
ccuaggggacacuuccc

SEQ ID NO: 2444186 - RNA, 16 nt, Human
ccuacuucuuuugcuc

SEQ ID NO: 2444187 - RNA, 22 nt, Human
ccuacuucuuuugcucuuagcu

SEQ ID NO: 2444188 - RNA, 14 nt, Human
ccuacuuugacuuu

SEQ ID NO: 2444189 - RNA, 15 nt, Human
ccuacuuugacuuuu

SEQ ID NO: 2444190 - RNA, 19 nt, Human
ccuacuucuccagccuaga

SEQ ID NO: 2444191 - RNA, 14 nt, Human
ccuacuucuccagc

SEQ ID NO: 2444192 - RNA, 12 nt, Human
ccuacuucucca

SEQ ID NO: 2444193 - RNA, 15 nt, Human
ccuacuuccugugac

SEQ ID NO: 2444194 - RNA, 12 nt, Human
ccuaccucaggu

SEQ ID NO: 2444195 - RNA, 15 nt, Human
ccuaccucaggcagg

SEQ ID NO: 2444196 - RNA, 18 nt, Human
ccuaccucagccuagacc

SEQ ID NO: 2444197 - RNA, 21 nt, Human
ccuaccucagccuagacccuc

SEQ ID NO: 2444198 - RNA, 21 nt, Human
ccuacuuccccuuccuaauuc

SEQ ID NO: 2444199 - RNA, 13 nt, Human
ccuacuuccugug

SEQ ID NO: 2444200 - RNA, 15 nt, Human
ccuaccaaugcaugc

SEQ ID NO: 2444201 - RNA, 13 nt, Human
ccuaccaaugcau

SEQ ID NO: 2444202 - RNA, 12 nt, Human
ccuaccaaugca

SEQ ID NO: 2444203 - RNA, 23 nt, Human
ccuaccaauagauuccccauugc

SEQ ID NO: 2444204 - RNA, 19 nt, Human
ccuaccaauagauucccca

SEQ ID NO: 2444205 - RNA, 17 nt, Human
ccuacacccuuggacuu

SEQ ID NO: 2444206 - RNA, 13 nt, Human
ccuacaccauucc

SEQ ID NO: 2444207 - RNA, 20 nt, Human
ccuacacccuuggacuugag

SEQ ID NO: 2444208 - RNA, 18 nt, Human
ccuaccaccccuuccugu

SEQ ID NO: 2444209 - RNA, 17 nt, Human
ccuaccaccccuuccug

SEQ ID NO: 2444210 - RNA, 13 nt, Human
ccuaccaccuccc

SEQ ID NO: 2444211 - RNA, 17 nt, Human
ccuaccagcgcccgcug

SEQ ID NO: 2444212 - RNA, 16 nt, Human
ccuaccagcgcccgcu

SEQ ID NO: 2444213 - RNA, 13 nt, Human
ccuaccacugucu

SEQ ID NO: 2444214 - RNA, 18 nt, Human
ccuaccaccuccccagcc

SEQ ID NO: 2444215 - RNA, 22 nt, Human
ccuaccaaugcaugcagccacu

SEQ ID NO: 2444216 - RNA, 16 nt, Human
ccuaccaaugcaugca

SEQ ID NO: 2444217 - RNA, 13 nt, Human
ccuaccacagugu

SEQ ID NO: 2444218 - RNA, 14 nt, Human
ccuaccacaguguc

SEQ ID NO: 2444219 - RNA, 13 nt, Human
ccuaccaccccuu

SEQ ID NO: 2444220 - RNA, 14 nt, Human
ccuaccacaugcca

SEQ ID NO: 2444221 - RNA, 15 nt, Human
ccuaccacagugucu

SEQ ID NO: 2444222 - RNA, 16 nt, Human
ccuaccacagugucug

SEQ ID NO: 2444223 - RNA, 15 nt, Human
ccuacccaaccacuc

SEQ ID NO: 2444224 - RNA, 22 nt, Human
ccuaccaucagggacaggauga

SEQ ID NO: 2444225 - RNA, 16 nt, Human
ccuaccaucagggaca

SEQ ID NO: 2444226 - RNA, 23 nt, Human
ccuaccagcgcccgcugggcuga

SEQ ID NO: 2444227 - RNA, 22 nt, Human
ccuaccagcgcccgcugggcug

SEQ ID NO: 2444228 - RNA, 21 nt, Human
ccuaccagcgcccgcugggcu

SEQ ID NO: 2444229 - RNA, 20 nt, Human
ccuaccagcgcccgcugggc

SEQ ID NO: 2444230 - RNA, 19 nt, Human
ccuaccagcgcccgcuggg

SEQ ID NO: 2444231 - RNA, 23 nt, Human
ccuaccgagucucuucuccacug

SEQ ID NO: 2444232 - RNA, 22 nt, Human
ccuaccgagucucuucuccacu

SEQ ID NO: 2444233 - RNA, 14 nt, Human
ccuaccucagccua

SEQ ID NO: 2444234 - RNA, 16 nt, Human
ccuaccucagccuaga

SEQ ID NO: 2444235 - RNA, 13 nt, Human
ccuaccucagccu

SEQ ID NO: 2444236 - RNA, 21 nt, Human
ccuaccggcaauuuccggcca

SEQ ID NO: 2444237 - RNA, 12 nt, Human
ccuaccucagcc

SEQ ID NO: 2444238 - RNA, 13 nt, Human
ccuacccacaccu

SEQ ID NO: 2444239 - RNA, 20 nt, Human
ccuaccggcaauuuccggcc

SEQ ID NO: 2444240 - RNA, 12 nt, Human
ccuaguuuucca

SEQ ID NO: 2444241 - RNA, 13 nt, Human
ccuaguuuuccau

SEQ ID NO: 2444242 - RNA, 15 nt, Human
ccuaguuuuccaugc

SEQ ID NO: 2444243 - RNA, 15 nt, Human
ccuaguuuucuccuc

SEQ ID NO: 2444244 - RNA, 16 nt, Human
ccuaguuuucuccucc

SEQ ID NO: 2444245 - RNA, 18 nt, Human
ccuaguuuucuccuccca

SEQ ID NO: 2444246 - RNA, 19 nt, Human
ccuaguuuucuccucccag

SEQ ID NO: 2444247 - RNA, 18 nt, Human
ccuaguucuguagaaaug

SEQ ID NO: 2444248 - RNA, 14 nt, Human
ccuaguuucccuga

SEQ ID NO: 2444249 - RNA, 19 nt, Human
ccuaguucuguagaaaugg

SEQ ID NO: 2444250 - RNA, 23 nt, Human
ccuaguuccaccaucaagccacc

SEQ ID NO: 2444251 - RNA, 21 nt, Human
ccuaguuccaccaucaagcca

SEQ ID NO: 2444252 - RNA, 13 nt, Human
ccuaguuccacca

SEQ ID NO: 2444253 - RNA, 21 nt, Human
ccuaguucauccaauccucac

SEQ ID NO: 2444254 - RNA, 24 nt, Human
ccuaguggggucucccucuccugc

SEQ ID NO: 2444255 - RNA, 18 nt, Human
ccuaggggucagggacca

SEQ ID NO: 2444256 - RNA, 21 nt, Human
ccuaguggggucucccucucc

SEQ ID NO: 2444257 - RNA, 15 nt, Human
ccuaggggucaggga

SEQ ID NO: 2444258 - RNA, 23 nt, Human
ccuaguggggucucccucuccug

SEQ ID NO: 2444259 - RNA, 18 nt, Human
ccuauauuguuuucagug

SEQ ID NO: 2444260 - RNA, 18 nt, Human
ccuauauaauaaagcuac

SEQ ID NO: 2444261 - RNA, 16 nt, Human
ccuauauaguuuauug

SEQ ID NO: 2444262 - RNA, 14 nt, Human
ccuauauguaguau

SEQ ID NO: 2444263 - RNA, 15 nt, Human
ccuauauuuacagug

SEQ ID NO: 2444264 - RNA, 13 nt, Human
ccuauauuuacag

SEQ ID NO: 2444265 - RNA, 15 nt, Human
ccuauauuggcuaaa

SEQ ID NO: 2444266 - RNA, 18 nt, Human
ccuauaugauuuauaguu

SEQ ID NO: 2444267 - RNA, 14 nt, Human
ccuaugcaauauau

SEQ ID NO: 2444268 - RNA, 22 nt, Human
ccuauauuguuuucaguguaca

SEQ ID NO: 2444269 - RNA, 22 nt, Human
ccuauacgcagcgugcuuuaaa

SEQ ID NO: 2444270 - RNA, 13 nt, Human
ccuauagucccag

SEQ ID NO: 2444271 - RNA, 18 nt, Human
ccuauagucccagcuacu

SEQ ID NO: 2444272 - RNA, 20 nt, Human
ccuauaaaacaggucaauac

SEQ ID NO: 2444273 - RNA, 17 nt, Human
ccuauaaaguaaagcua

SEQ ID NO: 2444274 - RNA, 23 nt, Human
ccuauaaaacaggucaauacagu

SEQ ID NO: 2444275 - RNA, 20 nt, Human
ccuaguuuucuccucccagg

SEQ ID NO: 2444276 - RNA, 12 nt, Human
ccuauaaaacag

SEQ ID NO: 2444277 - RNA, 12 nt, Human
ccuauaaugaag

SEQ ID NO: 2444278 - RNA, 20 nt, Human
ccuaauuucuccucccuucc

SEQ ID NO: 2444279 - RNA, 23 nt, Human
ccuaauuucuccucccuuccuuu

SEQ ID NO: 2444280 - RNA, 15 nt, Human
ccuacaagacacagu

SEQ ID NO: 2444281 - RNA, 21 nt, Human
ccuacaccauuaucuuggaaa

SEQ ID NO: 2444282 - RNA, 19 nt, Human
ccuacaagagcagccugug

SEQ ID NO: 2444283 - RNA, 17 nt, Human
ccuacaagagcagccug

SEQ ID NO: 2444284 - RNA, 18 nt, Human
ccuacaagagcagccugu

SEQ ID NO: 2444285 - RNA, 21 nt, Human
ccuacaagagcagccuguggc

SEQ ID NO: 2444286 - RNA, 18 nt, Human
ccuaaauauauuuuaaga

SEQ ID NO: 2444287 - RNA, 14 nt, Human
ccuaaaguguauuu

SEQ ID NO: 2444288 - RNA, 16 nt, Human
ccuaaauauauuuuaa

SEQ ID NO: 2444289 - RNA, 15 nt, Human
ccuaaaauucagugg

SEQ ID NO: 2444290 - RNA, 16 nt, Human
ccguguaaaccaaagc

SEQ ID NO: 2444291 - RNA, 14 nt, Human
ccgugguccuuugg

SEQ ID NO: 2444292 - RNA, 20 nt, Human
ccgugguguuauuuaaagaa

SEQ ID NO: 2444293 - RNA, 22 nt, Human
ccgugcuuguuugcucaccugg

SEQ ID NO: 2444294 - RNA, 15 nt, Human
ccgugcuuccucagu

SEQ ID NO: 2444295 - RNA, 20 nt, Human
ccgugcuuguuugcucaccu

SEQ ID NO: 2444296 - RNA, 23 nt, Human
ccgugcuuguuugcucaccuggg

SEQ ID NO: 2444297 - RNA, 23 nt, Human
ccgugugagaagugaaugcuggg

SEQ ID NO: 2444298 - RNA, 22 nt, Human
ccgugugagaagugaaugcugg

SEQ ID NO: 2444299 - RNA, 13 nt, Human
ccgugugcccucg

SEQ ID NO: 2444300 - RNA, 14 nt, Human
ccuaaaaguaaaca

SEQ ID NO: 2444301 - RNA, 23 nt, Human
ccuaaaaggaaaucucaccccau

SEQ ID NO: 2444302 - RNA, 18 nt, Human
ccuaaaauaauugguucu

SEQ ID NO: 2444303 - RNA, 15 nt, Human
ccuaaaaguaaacau

SEQ ID NO: 2444304 - RNA, 22 nt, Human
ccuaaaagugggcuugauucug

SEQ ID NO: 2444305 - RNA, 16 nt, Human
ccgugugcccucgggc

SEQ ID NO: 2444306 - RNA, 13 nt, Human
ccguguggccccu

SEQ ID NO: 2444307 - RNA, 14 nt, Human
ccguguggccccuu

SEQ ID NO: 2444308 - RNA, 15 nt, Human
ccguguggccccuuc

SEQ ID NO: 2444309 - RNA, 22 nt, Human
ccuaaaaggaaaucucacccca

SEQ ID NO: 2444310 - RNA, 18 nt, Human
ccuaaaagcacacucauc

SEQ ID NO: 2444311 - RNA, 16 nt, Human
ccguguggccccuuca

SEQ ID NO: 2444312 - RNA, 17 nt, Human
ccuaaaagcacacucau

SEQ ID NO: 2444313 - RNA, 16 nt, Human
cuuaauuaaaagaaua

SEQ ID NO: 2444314 - RNA, 17 nt, Human
cuuaauuaaaagaauau

SEQ ID NO: 2444315 - RNA, 14 nt, Human
cuuaauguuuauuc

SEQ ID NO: 2444316 - RNA, 12 nt, Human
cuuaauguuuau

SEQ ID NO: 2444317 - RNA, 22 nt, Human
cuuaauguucugaauaauuucu

SEQ ID NO: 2444318 - RNA, 20 nt, Human
cuuaauguucugaauaauuu

SEQ ID NO: 2444319 - RNA, 22 nt, Human
cuuaaugaaguuugaauguuaa

SEQ ID NO: 2444320 - RNA, 23 nt, Human
cuuaaugaaguuugaauguuaaa

SEQ ID NO: 2444321 - RNA, 21 nt, Human
cuuaaugaaguuugaauguua

SEQ ID NO: 2444322 - RNA, 20 nt, Human
cuuaaugaaguuugaauguu

SEQ ID NO: 2444323 - RNA, 19 nt, Human
cuuaaugaaguuugaaugu

SEQ ID NO: 2444324 - RNA, 18 nt, Human
cuuaaugaaguuugaaug

SEQ ID NO: 2444325 - RNA, 17 nt, Human
cuuaaugaaguuugaau

SEQ ID NO: 2444326 - RNA, 15 nt, Human
cuuaaugaaguuuga

SEQ ID NO: 2444327 - RNA, 14 nt, Human
cuuaaugaaguuug

SEQ ID NO: 2444328 - RNA, 12 nt, Human
cuuaaugaaguu

SEQ ID NO: 2444329 - RNA, 21 nt, Human
cuuaaucuuuucacaaauaaa

SEQ ID NO: 2444330 - RNA, 20 nt, Human
cuuaaucuuuucacaaauaa

SEQ ID NO: 2444331 - RNA, 19 nt, Human
cuuaaucuuuucacaaaua

SEQ ID NO: 2444332 - RNA, 18 nt, Human
cuuaaucuuuucacaaau

SEQ ID NO: 2444333 - RNA, 17 nt, Human
cuuaaucuuuucacaaa

SEQ ID NO: 2444334 - RNA, 19 nt, Human
cuuaauauauauauccaga

SEQ ID NO: 2444335 - RNA, 14 nt, Human
cuuaauauguuaac

SEQ ID NO: 2444336 - RNA, 23 nt, Human
cuuaauuguucauuuugagcuga

SEQ ID NO: 2444337 - RNA, 19 nt, Human
cuuaauuguucauuuugag

SEQ ID NO: 2444338 - RNA, 16 nt, Human
cuuaauuguucauuuu

SEQ ID NO: 2444339 - RNA, 19 nt, Human
cuuaauuccuuucucaucc

SEQ ID NO: 2444340 - RNA, 15 nt, Human
cuuaauugcacucua

SEQ ID NO: 2444341 - RNA, 20 nt, Human
cuuaauucuuagcucauucu

SEQ ID NO: 2444342 - RNA, 17 nt, Human
cuuaauuccuuucucau

SEQ ID NO: 2444343 - RNA, 23 nt, Human
cuuaauguuuauuccugauaaua

SEQ ID NO: 2444344 - RNA, 19 nt, Human
cuuaauuauuauuuguguu

SEQ ID NO: 2444345 - RNA, 19 nt, Human
cuuaauuaaaagaauauuu

SEQ ID NO: 2444346 - RNA, 20 nt, Human
cuuaauuaaaagaauauuuu

SEQ ID NO: 2444347 - RNA, 18 nt, Human
cuuaauuauuauuugugu

SEQ ID NO: 2444348 - RNA, 15 nt, Human
cuuaauuauuauuug

SEQ ID NO: 2444349 - RNA, 11 nt, Human
cuuaauuauua

SEQ ID NO: 2444350 - RNA, 16 nt, Human
cuuaauguuuauuccu

SEQ ID NO: 2444351 - RNA, 15 nt, Human
cuuaauguuuauucc

SEQ ID NO: 2444352 - RNA, 23 nt, Human
cuuaagaagacugcauuauauuu

SEQ ID NO: 2444353 - RNA, 18 nt, Human
cuuaagaauuuugagcag

SEQ ID NO: 2444354 - RNA, 17 nt, Human
cuuaaccagaucauugu

SEQ ID NO: 2444355 - RNA, 14 nt, Human
cuuaacauucugua

SEQ ID NO: 2444356 - RNA, 17 nt, Human
cuuaacauucuguaaaa

SEQ ID NO: 2444357 - RNA, 21 nt, Human
cuuaagaagacugcauuauau

SEQ ID NO: 2444358 - RNA, 17 nt, Human
cuuaacauauuuacuaa

SEQ ID NO: 2444359 - RNA, 15 nt, Human
cuuaacauauuuacu

SEQ ID NO: 2444360 - RNA, 13 nt, Human
cuuaacauauuua

SEQ ID NO: 2444361 - RNA, 23 nt, Human
cuuaacaauuucuguccuucaga

SEQ ID NO: 2444362 - RNA, 20 nt, Human
cuuaaaaaucauugauuguc

SEQ ID NO: 2444363 - RNA, 17 nt, Human
cuuaaauuuuaauuuau

SEQ ID NO: 2444364 - RNA, 18 nt, Human
cuuaaauuuuaauuuauu

SEQ ID NO: 2444365 - RNA, 12 nt, Human
cuuaagcuuccg

SEQ ID NO: 2444366 - RNA, 20 nt, Human
cuuaaggacaaaaaugaacu

SEQ ID NO: 2444367 - RNA, 21 nt, Human
cuuaaggauggagccagcucu

SEQ ID NO: 2444368 - RNA, 18 nt, Human
cuuaaggggcagcuucua

SEQ ID NO: 2444369 - RNA, 16 nt, Human
cuuaaggcacucuguu

SEQ ID NO: 2444370 - RNA, 20 nt, Human
cuuaaggauugugauauuuu

SEQ ID NO: 2444371 - RNA, 12 nt, Human
cuuaaggggcag

SEQ ID NO: 2444372 - RNA, 15 nt, Human
cuuaaggggcagcuu

SEQ ID NO: 2444373 - RNA, 14 nt, Human
cuuaaggggcagcu

SEQ ID NO: 2444374 - RNA, 22 nt, Human
cuuaaguaagcaacagcauaac

SEQ ID NO: 2444375 - RNA, 16 nt, Human
cuuaauacuaccuuga

SEQ ID NO: 2444376 - RNA, 18 nt, Human
cuuaauacuaccuugaaa

SEQ ID NO: 2444377 - RNA, 17 nt, Human
cuuaauacacacaguua

SEQ ID NO: 2444378 - RNA, 21 nt, Human
cuuaauaccugggugauuaca

SEQ ID NO: 2444379 - RNA, 20 nt, Human
cuuaauagaaacauugaaga

SEQ ID NO: 2444380 - RNA, 16 nt, Human
cuuaauaguauuuaug

SEQ ID NO: 2444381 - RNA, 17 nt, Human
cuuaauaguauuuauga

SEQ ID NO: 2444382 - RNA, 14 nt, Human
cuuaguacugaguu

SEQ ID NO: 2444383 - RNA, 23 nt, Human
cuuagagccucccucaauucccc

SEQ ID NO: 2444384 - RNA, 22 nt, Human
cuuaguaaugcuacgugugauu

SEQ ID NO: 2444385 - RNA, 21 nt, Human
cuuaguaaugcuacgugugau

SEQ ID NO: 2444386 - RNA, 20 nt, Human
cuuaguaaugcuacguguga

SEQ ID NO: 2444387 - RNA, 23 nt, Human
cuuagguuggcaaaaaggcagga

SEQ ID NO: 2444388 - RNA, 21 nt, Human
cuuagguuggcaaaaaggcag

SEQ ID NO: 2444389 - RNA, 17 nt, Human
cuuagagccucccucaa

SEQ ID NO: 2444390 - RNA, 16 nt, Human
cuuagagccucccuca

SEQ ID NO: 2444391 - RNA, 23 nt, Human
cuuagagccaggcacacacugug

SEQ ID NO: 2444392 - RNA, 17 nt, Human
cuuagagccaggcacac

SEQ ID NO: 2444393 - RNA, 16 nt, Human
cuuagagccaggcaca

SEQ ID NO: 2444394 - RNA, 15 nt, Human
cuuagagccaggcac

SEQ ID NO: 2444395 - RNA, 14 nt, Human
cuuagagccaggca

SEQ ID NO: 2444396 - RNA, 12 nt, Human
cuuagagccagg

SEQ ID NO: 2444397 - RNA, 22 nt, Human
cuuagagcaguuucuguccugc

SEQ ID NO: 2444398 - RNA, 19 nt, Human
cuuagagcaguuucugucc

SEQ ID NO: 2444399 - RNA, 11 nt, Human
cuuagagcagu

SEQ ID NO: 2444400 - RNA, 22 nt, Human
cuuagagacaguugggugagaa

SEQ ID NO: 2444401 - RNA, 20 nt, Human
cuuagagaauguucuccuaa

SEQ ID NO: 2444402 - RNA, 17 nt, Human
cuuagacuugaaauacu

SEQ ID NO: 2444403 - RNA, 16 nt, Human
cuuagaccuuccauaa

SEQ ID NO: 2444404 - RNA, 20 nt, Human
cuuagaccucagccugugcu

SEQ ID NO: 2444405 - RNA, 17 nt, Human
cuuagaccucagccugu

SEQ ID NO: 2444406 - RNA, 18 nt, Human
cuuagaccucagccugug

SEQ ID NO: 2444407 - RNA, 18 nt, Human
cuuagaccuuccauaaug

SEQ ID NO: 2444408 - RNA, 19 nt, Human
cuuagacuucgacucagga

SEQ ID NO: 2444409 - RNA, 14 nt, Human
cuuagacuucugcu

SEQ ID NO: 2444410 - RNA, 20 nt, Human
cuuagacuucgacucaggau

SEQ ID NO: 2444411 - RNA, 16 nt, Human
cuuagacuucugcuuu

SEQ ID NO: 2444412 - RNA, 16 nt, Human
cuuagacuugaaauac

SEQ ID NO: 2444413 - RNA, 19 nt, Human
cuuagaauuaguggcacuu

SEQ ID NO: 2444414 - RNA, 20 nt, Human
cuuagaauaaaauuguaaaa

SEQ ID NO: 2444415 - RNA, 12 nt, Human
cuuagaauccaa

SEQ ID NO: 2444416 - RNA, 16 nt, Human
cuuagaauccaaacuu

SEQ ID NO: 2444417 - RNA, 17 nt, Human
cuuagaauccaaacuug

SEQ ID NO: 2444418 - RNA, 17 nt, Human
cuuagaauaaaauugua

SEQ ID NO: 2444419 - RNA, 16 nt, Human
cuuagaauaaaauugu

SEQ ID NO: 2444420 - RNA, 15 nt, Human
cuuagaauaaaauug

SEQ ID NO: 2444421 - RNA, 11 nt, Human
cuuagaauaaa

SEQ ID NO: 2444422 - RNA, 18 nt, Human
cuuagaaguuuguuguga

SEQ ID NO: 2444423 - RNA, 12 nt, Human
cuuagaccucag

SEQ ID NO: 2444424 - RNA, 13 nt, Human
cuuagaccucagc

SEQ ID NO: 2444425 - RNA, 14 nt, Human
cuuagaccucagcc

SEQ ID NO: 2444426 - RNA, 15 nt, Human
cuuagaccucagccu

SEQ ID NO: 2444427 - RNA, 16 nt, Human
cuuagaccucagccug

SEQ ID NO: 2444428 - RNA, 19 nt, Human
cuuacucuucuugaaauuu

SEQ ID NO: 2444429 - RNA, 12 nt, Human
cuuacugauaua

SEQ ID NO: 2444430 - RNA, 15 nt, Human
cuuacugauauauuu

SEQ ID NO: 2444431 - RNA, 19 nt, Human
cuuacugauauauuuuaca

SEQ ID NO: 2444432 - RNA, 21 nt, Human
cuuacugauauauuuuacaau

SEQ ID NO: 2444433 - RNA, 21 nt, Human
cuuacugauuuuuaaguuauu

SEQ ID NO: 2444434 - RNA, 12 nt, Human
cuuacugcaaau

SEQ ID NO: 2444435 - RNA, 13 nt, Human
cuuacugcagaau

SEQ ID NO: 2444436 - RNA, 13 nt, Human
cuuaccuuuuuau

SEQ ID NO: 2444437 - RNA, 22 nt, Human
cuuaccuucaauaaaguaucua

SEQ ID NO: 2444438 - RNA, 15 nt, Human
cuuacucuucuugaa

SEQ ID NO: 2444439 - RNA, 12 nt, Human
cuuacugaaggu

SEQ ID NO: 2444440 - RNA, 20 nt, Human
cuuaccugccaggaagccag

SEQ ID NO: 2444441 - RNA, 19 nt, Human
cuuaauuuugguuguauuc

SEQ ID NO: 2444442 - RNA, 14 nt, Human
cuuaauuuucagua

SEQ ID NO: 2444443 - RNA, 11 nt, Human
cuuaauuuugg

SEQ ID NO: 2444444 - RNA, 18 nt, Human
cuuaauuuucaguauaau

SEQ ID NO: 2444445 - RNA, 16 nt, Human
cuuaauuuugguugua

SEQ ID NO: 2444446 - RNA, 19 nt, Human
cuuaccugggcauucuugu

SEQ ID NO: 2444447 - RNA, 20 nt, Human
cuuaccuguaugucuccagu

SEQ ID NO: 2444448 - RNA, 15 nt, Human
cuuaccuucaauaaa

SEQ ID NO: 2444449 - RNA, 16 nt, Human
cuuaccuucaauaaag

SEQ ID NO: 2444450 - RNA, 17 nt, Human
cuuaccuucaauaaagu

SEQ ID NO: 2444451 - RNA, 18 nt, Human
cuuaccuucaauaaagua

SEQ ID NO: 2444452 - RNA, 21 nt, Human
cuuaccuucaauaaaguaucu

SEQ ID NO: 2444453 - RNA, 17 nt, Human
cuuagaaagcaggggcu

SEQ ID NO: 2444454 - RNA, 18 nt, Human
cuuagaaagcaggggcua

SEQ ID NO: 2444455 - RNA, 16 nt, Human
cuuagaaagcaggggc

SEQ ID NO: 2444456 - RNA, 14 nt, Human
cuuagaaagcaggg

SEQ ID NO: 2444457 - RNA, 19 nt, Human
cuuagaaaauucacuauug

SEQ ID NO: 2444458 - RNA, 20 nt, Human
cuuagaaaaaccaccaccau

SEQ ID NO: 2444459 - RNA, 20 nt, Human
cuuagaagucacacaguauu

SEQ ID NO: 2444460 - RNA, 17 nt, Human
cuuagaagucacacagu

SEQ ID NO: 2444461 - RNA, 17 nt, Human
cuuagaaguggaccagg

SEQ ID NO: 2444462 - RNA, 18 nt, Human
cuuagaaguggaccagga

SEQ ID NO: 2444463 - RNA, 20 nt, Human
cuuagaaguggaccaggaca

SEQ ID NO: 2444464 - RNA, 21 nt, Human
cuuagaaguggaccaggacag

SEQ ID NO: 2444465 - RNA, 22 nt, Human
cuuagaaguggaccaggacagg

SEQ ID NO: 2444466 - RNA, 23 nt, Human
cuuagaaguggaccaggacagga

SEQ ID NO: 2444467 - RNA, 16 nt, Human
cuuagaaauugcauuu

SEQ ID NO: 2444468 - RNA, 16 nt, Human
cuguugcccaggcugg

SEQ ID NO: 2444469 - RNA, 15 nt, Human
cuguugcccaggcug

SEQ ID NO: 2444470 - RNA, 14 nt, Human
cuguugcccaggcu

SEQ ID NO: 2444471 - RNA, 13 nt, Human
cuguugcccaggc

SEQ ID NO: 2444472 - RNA, 19 nt, Human
cuguugcacccagcccugg

SEQ ID NO: 2444473 - RNA, 18 nt, Human
cuguugcacccagcccug

SEQ ID NO: 2444474 - RNA, 17 nt, Human
cuguugcacccagcccu

SEQ ID NO: 2444475 - RNA, 14 nt, Human
cuguugcacccagc

SEQ ID NO: 2444476 - RNA, 21 nt, Human
cuguugcacccagcccugguc

SEQ ID NO: 2444477 - RNA, 20 nt, Human
cuguugcacccagcccuggu

SEQ ID NO: 2444478 - RNA, 23 nt, Human
cuguugcacccagcccuggucuc

SEQ ID NO: 2444479 - RNA, 20 nt, Human
cuguugauuucuuuccagag

SEQ ID NO: 2444480 - RNA, 17 nt, Human
cuguugauuucuuucca

SEQ ID NO: 2444481 - RNA, 23 nt, Human
cuguugauugcuaaauguaacag

SEQ ID NO: 2444482 - RNA, 22 nt, Human
cuguugauugcuaaauguaaca

SEQ ID NO: 2444483 - RNA, 13 nt, Human
cuguugcacccag

SEQ ID NO: 2444484 - RNA, 19 nt, Human
cuguugcaaacucagccuc

SEQ ID NO: 2444485 - RNA, 12 nt, Human
cuguugcccagg

SEQ ID NO: 2444486 - RNA, 12 nt, Human
cuguugcaguga

SEQ ID NO: 2444487 - RNA, 12 nt, Human
cuguugcauggg

SEQ ID NO: 2444488 - RNA, 13 nt, Human
cuguugccacaac

SEQ ID NO: 2444489 - RNA, 21 nt, Human
cuguugaugaggccucuugga

SEQ ID NO: 2444490 - RNA, 20 nt, Human
cuguugaugaggccucuugg

SEQ ID NO: 2444491 - RNA, 17 nt, Human
cuguugaugaggccucu

SEQ ID NO: 2444492 - RNA, 20 nt, Human
cuguugauugcuaaauguaa

SEQ ID NO: 2444493 - RNA, 19 nt, Human
cuguugauugcuaaaugua

SEQ ID NO: 2444494 - RNA, 18 nt, Human
cuguugauugcuaaaugu

SEQ ID NO: 2444495 - RNA, 17 nt, Human
cuguugauugcuaaaug

SEQ ID NO: 2444496 - RNA, 15 nt, Human
cuguugauugcuaaa

SEQ ID NO: 2444497 - RNA, 14 nt, Human
cuguugauugcuaa

SEQ ID NO: 2444498 - RNA, 15 nt, Human
cuguugauugcagga

SEQ ID NO: 2444499 - RNA, 15 nt, Human
cuguugagcuguuuu

SEQ ID NO: 2444500 - RNA, 20 nt, Human
cuguugagcuguuuucccug

SEQ ID NO: 2444501 - RNA, 17 nt, Human
cuguugacgaagucucu

SEQ ID NO: 2444502 - RNA, 21 nt, Human
cuguugacacaggucuuuccu

SEQ ID NO: 2444503 - RNA, 23 nt, Human
cuguugacauccaagcuuccuuu

SEQ ID NO: 2444504 - RNA, 23 nt, Human
cuguucuuucuggcuaugcauuu

SEQ ID NO: 2444505 - RNA, 15 nt, Human
cuguucuuggggccc

SEQ ID NO: 2444506 - RNA, 13 nt, Human
cuguucuuggggc

SEQ ID NO: 2444507 - RNA, 16 nt, Human
cuguucuuuaauuuau

SEQ ID NO: 2444508 - RNA, 13 nt, Human
cuguucuuuaauu

SEQ ID NO: 2444509 - RNA, 12 nt, Human
cuguugaaaauu

SEQ ID NO: 2444510 - RNA, 22 nt, Human
cuguugaaaauuauuuuaaaca

SEQ ID NO: 2444511 - RNA, 21 nt, Human
cuguugaaaauuauuuuaaac

SEQ ID NO: 2444512 - RNA, 14 nt, Human
cuguugaaaauuau

SEQ ID NO: 2444513 - RNA, 22 nt, Human
cuguugacacaggucuuuccua

SEQ ID NO: 2444514 - RNA, 17 nt, Human
cuguugacacaggucuu

SEQ ID NO: 2444515 - RNA, 20 nt, Human
cuguugacauccaagcuucc

SEQ ID NO: 2444516 - RNA, 12 nt, Human
cuguucuugaag

SEQ ID NO: 2444517 - RNA, 15 nt, Human
cuguucuuuccaaag

SEQ ID NO: 2444518 - RNA, 16 nt, Human
cuguucuuuccaaagu

SEQ ID NO: 2444519 - RNA, 19 nt, Human
cuguucuuuccaaaguaca

SEQ ID NO: 2444520 - RNA, 21 nt, Human
cuguucuuuccaaaguacacu

SEQ ID NO: 2444521 - RNA, 13 nt, Human
cuguucuuucugg

SEQ ID NO: 2444522 - RNA, 14 nt, Human
cuguucuuucuggc

SEQ ID NO: 2444523 - RNA, 21 nt, Human
cuguucuuucuggcuaugcau

SEQ ID NO: 2444524 - RNA, 16 nt, Human
cuguuaauaguucagg

SEQ ID NO: 2444525 - RNA, 14 nt, Human
cuguucuguggaaa

SEQ ID NO: 2444526 - RNA, 22 nt, Human
cuguuaaauugcuguguaucug

SEQ ID NO: 2444527 - RNA, 20 nt, Human
cuguuaaauugcuguguauc

SEQ ID NO: 2444528 - RNA, 19 nt, Human
cuguuaaauugcuguguau

SEQ ID NO: 2444529 - RNA, 18 nt, Human
cuguuaaauugcugugua

SEQ ID NO: 2444530 - RNA, 16 nt, Human
cuguuaaauugcugug

SEQ ID NO: 2444531 - RNA, 22 nt, Human
cuguucuguggaaaguguaaag

SEQ ID NO: 2444532 - RNA, 21 nt, Human
cuguucuguggaaaguguaaa

SEQ ID NO: 2444533 - RNA, 20 nt, Human
cuguucuguggaaaguguaa

SEQ ID NO: 2444534 - RNA, 15 nt, Human
cuguucuguggaaag

SEQ ID NO: 2444535 - RNA, 23 nt, Human
cuguucuguggaaaguguaaagc

SEQ ID NO: 2444536 - RNA, 11 nt, Human
cuguucugugu

SEQ ID NO: 2444537 - RNA, 14 nt, Human
cuguucugugucuu

SEQ ID NO: 2444538 - RNA, 13 nt, Human
cuguucugugucu

SEQ ID NO: 2444539 - RNA, 17 nt, Human
cuguucuguuuugccug

SEQ ID NO: 2444540 - RNA, 18 nt, Human
cuguucuuaagacgugau

SEQ ID NO: 2444541 - RNA, 19 nt, Human
cuguuugcuaagugaggau

SEQ ID NO: 2444542 - RNA, 17 nt, Human
cuguuugcuaagugagg

SEQ ID NO: 2444543 - RNA, 23 nt, Human
cuguuuggaggagcaaaggcuga

SEQ ID NO: 2444544 - RNA, 23 nt, Human
cuguuugaggauauauuuucacu

SEQ ID NO: 2444545 - RNA, 15 nt, Human
cuguuugacaaaccu

SEQ ID NO: 2444546 - RNA, 22 nt, Human
cuguuugaggauauauuuucac

SEQ ID NO: 2444547 - RNA, 16 nt, Human
cuguuucugucaggag

SEQ ID NO: 2444548 - RNA, 12 nt, Human
cuguuugacaaa

SEQ ID NO: 2444549 - RNA, 16 nt, Human
cuguuuauuuuauauu

SEQ ID NO: 2444550 - RNA, 17 nt, Human
cuguuucaacacagacc

SEQ ID NO: 2444551 - RNA, 15 nt, Human
cuguuucaaacuuua

SEQ ID NO: 2444552 - RNA, 17 nt, Human
cuguuucaaacuuuacu

SEQ ID NO: 2444553 - RNA, 17 nt, Human
cuguuuagcagcagccu

SEQ ID NO: 2444554 - RNA, 20 nt, Human
cuguuuagcagcagccuuua

SEQ ID NO: 2444555 - RNA, 15 nt, Human
cuguugcccacguuu

SEQ ID NO: 2444556 - RNA, 18 nt, Human
cuguuuagauaauacacc

SEQ ID NO: 2444557 - RNA, 14 nt, Human
cuguuuagauaaua

SEQ ID NO: 2444558 - RNA, 17 nt, Human
cuguuuagauaauacac

SEQ ID NO: 2444559 - RNA, 17 nt, Human
cuguugcccaggcuggc

SEQ ID NO: 2444560 - RNA, 13 nt, Human
cuguugccagaga

SEQ ID NO: 2444561 - RNA, 17 nt, Human
cuguugccagagaugga

SEQ ID NO: 2444562 - RNA, 20 nt, Human
cuguuuuuacccauaucccc

SEQ ID NO: 2444563 - RNA, 15 nt, Human
cuguuuuuacccaua

SEQ ID NO: 2444564 - RNA, 12 nt, Human
cuguuuuucaca

SEQ ID NO: 2444565 - RNA, 13 nt, Human
cuguuuuucacau

SEQ ID NO: 2444566 - RNA, 15 nt, Human
cuguuuuucacauuu

SEQ ID NO: 2444567 - RNA, 17 nt, Human
cuguuuuucagggaggu

SEQ ID NO: 2444568 - RNA, 14 nt, Human
cuuaaaaaaugucc

SEQ ID NO: 2444569 - RNA, 16 nt, Human
cuuaaaaaguggaaaa

SEQ ID NO: 2444570 - RNA, 17 nt, Human
cuuaaaaaguggaaaaa

SEQ ID NO: 2444571 - RNA, 21 nt, Human
cuguuuucucucggcucccca

SEQ ID NO: 2444572 - RNA, 23 nt, Human
cuguuuuccuuucucaccgcagu

SEQ ID NO: 2444573 - RNA, 17 nt, Human
cuguuuuuaaaaaucau

SEQ ID NO: 2444574 - RNA, 15 nt, Human
cuguuuuuaagcugu

SEQ ID NO: 2444575 - RNA, 22 nt, Human
cuguuuuuacccauauccccuc

SEQ ID NO: 2444576 - RNA, 13 nt, Human
cuguuuuuaccca

SEQ ID NO: 2444577 - RNA, 23 nt, Human
cuguuuuuaagcuguuuccauag

SEQ ID NO: 2444578 - RNA, 19 nt, Human
cuguuuuuaagcuguuucc

SEQ ID NO: 2444579 - RNA, 18 nt, Human
cuguuuuuaagcuguuuc

SEQ ID NO: 2444580 - RNA, 17 nt, Human
cuguuuuuaagcuguuu

SEQ ID NO: 2444581 - RNA, 16 nt, Human
cuguuuuuaagcuguu

SEQ ID NO: 2444582 - RNA, 17 nt, Human
cuguuuuccucccuucu

SEQ ID NO: 2444583 - RNA, 19 nt, Human
cuguuuuccucccuucugc

SEQ ID NO: 2444584 - RNA, 20 nt, Human
cuguuuuccucccuucugcu

SEQ ID NO: 2444585 - RNA, 21 nt, Human
cuguuuuccucccuucugcua

SEQ ID NO: 2444586 - RNA, 18 nt, Human
cuguuuuccuuucucacc

SEQ ID NO: 2444587 - RNA, 16 nt, Human
cuguuuuccuuucuca

SEQ ID NO: 2444588 - RNA, 14 nt, Human
cuguuuuccuuucu

SEQ ID NO: 2444589 - RNA, 23 nt, Human
cuguuuuccucccuucugcuacu

SEQ ID NO: 2444590 - RNA, 12 nt, Human
cuguuuuccucc

SEQ ID NO: 2444591 - RNA, 14 nt, Human
cuguuuuccucccu

SEQ ID NO: 2444592 - RNA, 15 nt, Human
cuguuuuccucccuu

SEQ ID NO: 2444593 - RNA, 16 nt, Human
cuguuuuccucccuuc

SEQ ID NO: 2444594 - RNA, 13 nt, Human
cuguuuucccuga

SEQ ID NO: 2444595 - RNA, 15 nt, Human
cuguuuuauaauuuu

SEQ ID NO: 2444596 - RNA, 18 nt, Human
cuguuuuagguuaaaaaa

SEQ ID NO: 2444597 - RNA, 16 nt, Human
cuguuugggccccucu

SEQ ID NO: 2444598 - RNA, 20 nt, Human
cuguuugggccccucuccca

SEQ ID NO: 2444599 - RNA, 11 nt, Human
cuguuugucau

SEQ ID NO: 2444600 - RNA, 17 nt, Human
cuguuugucuucucccc

SEQ ID NO: 2444601 - RNA, 16 nt, Human
cuguuugucuucuccc

SEQ ID NO: 2444602 - RNA, 12 nt, Human
cuguuuguuaug

SEQ ID NO: 2444603 - RNA, 14 nt, Human
cuguuuuauaauuu

SEQ ID NO: 2444604 - RNA, 22 nt, Human
cuguuuuacaaaaaagaaaaga

SEQ ID NO: 2444605 - RNA, 18 nt, Human
cuguuugucuucucccca

SEQ ID NO: 2444606 - RNA, 13 nt, Human
cuucccugacuca

SEQ ID NO: 2444607 - RNA, 20 nt, Human
cuucccugacucauucugaa

SEQ ID NO: 2444608 - RNA, 22 nt, Human
cuucccuaucuuugccacccuc

SEQ ID NO: 2444609 - RNA, 23 nt, Human
cuucccuagcuuuagacccuggg

SEQ ID NO: 2444610 - RNA, 14 nt, Human
cuucccugacucau

SEQ ID NO: 2444611 - RNA, 10 nt, Human
cuucccuggc

SEQ ID NO: 2444612 - RNA, 11 nt, Human
cuucccuggcu

SEQ ID NO: 2444613 - RNA, 17 nt, Human
cuucccugggcugugcu

SEQ ID NO: 2444614 - RNA, 13 nt, Human
cuucccugggcug

SEQ ID NO: 2444615 - RNA, 12 nt, Human
cuucccugggcu

SEQ ID NO: 2444616 - RNA, 12 nt, Human
cuucccuggcuu

SEQ ID NO: 2444617 - RNA, 15 nt, Human
cuuccuaguuuucuc

SEQ ID NO: 2444618 - RNA, 17 nt, Human
cuuccuaguuuucuccu

SEQ ID NO: 2444619 - RNA, 23 nt, Human
cuuccuaguuuucuccucccagg

SEQ ID NO: 2444620 - RNA, 18 nt, Human
cuucccugggcugugcua

SEQ ID NO: 2444621 - RNA, 13 nt, Human
cuuccucacugcc

SEQ ID NO: 2444622 - RNA, 22 nt, Human
cuuccuaguuuucuccucccag

SEQ ID NO: 2444623 - RNA, 18 nt, Human
cuuccuauaugcacuuau

SEQ ID NO: 2444624 - RNA, 20 nt, Human
cuuccugcguccuccucacc

SEQ ID NO: 2444625 - RNA, 18 nt, Human
cuuccugcguccuccuca

SEQ ID NO: 2444626 - RNA, 21 nt, Human
cuuccugcguccuccucaccu

SEQ ID NO: 2444627 - RNA, 13 nt, Human
cuuccucacuucc

SEQ ID NO: 2444628 - RNA, 16 nt, Human
cuuccucacugcccaa

SEQ ID NO: 2444629 - RNA, 14 nt, Human
cuuccucacuucca

SEQ ID NO: 2444630 - RNA, 17 nt, Human
cuuccugcccuacagag

SEQ ID NO: 2444631 - RNA, 16 nt, Human
cuuccugcguccuccu

SEQ ID NO: 2444632 - RNA, 19 nt, Human
cuuccugcccuacagaggu

SEQ ID NO: 2444633 - RNA, 15 nt, Human
cuuccugcguccucc

SEQ ID NO: 2444634 - RNA, 14 nt, Human
cuuccuggagacug

SEQ ID NO: 2444635 - RNA, 22 nt, Human
cuuccuggagacugcccagcua

SEQ ID NO: 2444636 - RNA, 22 nt, Human
cuuccugucccaccucuucucu

SEQ ID NO: 2444637 - RNA, 17 nt, Human
cuuccugucccaccucu

SEQ ID NO: 2444638 - RNA, 18 nt, Human
cuuccuguccagcuccaa

SEQ ID NO: 2444639 - RNA, 13 nt, Human
cuuccugugacuu

SEQ ID NO: 2444640 - RNA, 21 nt, Human
cuuccugucccaccucuucuc

SEQ ID NO: 2444641 - RNA, 20 nt, Human
cuuccugucuuccugcauuc

SEQ ID NO: 2444642 - RNA, 16 nt, Human
cuuccugugacuucag

SEQ ID NO: 2444643 - RNA, 12 nt, Human
cuucccccucca

SEQ ID NO: 2444644 - RNA, 18 nt, Human
cuucccccauagccaccc

SEQ ID NO: 2444645 - RNA, 14 nt, Human
cuucccccauagcc

SEQ ID NO: 2444646 - RNA, 15 nt, Human
cuucccccauagcca

SEQ ID NO: 2444647 - RNA, 16 nt, Human
cuucccccauagccac

SEQ ID NO: 2444648 - RNA, 18 nt, Human
cuuccccaucuucuaaac

SEQ ID NO: 2444649 - RNA, 14 nt, Human
cuuccccagcgucc

SEQ ID NO: 2444650 - RNA, 13 nt, Human
cuuccccagccuc

SEQ ID NO: 2444651 - RNA, 14 nt, Human
cuuccccagccucu

SEQ ID NO: 2444652 - RNA, 14 nt, Human
cuuccccaugggaa

SEQ ID NO: 2444653 - RNA, 13 nt, Human
cuuccccauggga

SEQ ID NO: 2444654 - RNA, 12 nt, Human
cuuccccauggg

SEQ ID NO: 2444655 - RNA, 17 nt, Human
cuucccuaucuuugcca

SEQ ID NO: 2444656 - RNA, 18 nt, Human
cuucccuaucuuugccac

SEQ ID NO: 2444657 - RNA, 16 nt, Human
cuucccuaucuuugcc

SEQ ID NO: 2444658 - RNA, 17 nt, Human
cuucccuaccucaggca

SEQ ID NO: 2444659 - RNA, 20 nt, Human
cuucccuaccucaggcagga

SEQ ID NO: 2444660 - RNA, 22 nt, Human
cuucccuagcuuuagacccugg

SEQ ID NO: 2444661 - RNA, 21 nt, Human
cuucccuagcuuuagacccug

SEQ ID NO: 2444662 - RNA, 20 nt, Human
cuucccuagaggguuccugu

SEQ ID NO: 2444663 - RNA, 23 nt, Human
cuucccuagaggguuccuguaga

SEQ ID NO: 2444664 - RNA, 15 nt, Human
cuucccccuccaauc

SEQ ID NO: 2444665 - RNA, 16 nt, Human
cuucccccucccaggg

SEQ ID NO: 2444666 - RNA, 15 nt, Human
cuucccuaccucagg

SEQ ID NO: 2444667 - RNA, 16 nt, Human
cuucccuaccucaggc

SEQ ID NO: 2444668 - RNA, 13 nt, Human
cuucccuaccuca

SEQ ID NO: 2444669 - RNA, 20 nt, Human
cuucccccgcaaugugcccc

SEQ ID NO: 2444670 - RNA, 15 nt, Human
cuuccacugagggca

SEQ ID NO: 2444671 - RNA, 18 nt, Human
cuuccacugagggcaguc

SEQ ID NO: 2444672 - RNA, 20 nt, Human
cuuccacuuuuuuuuguaug

SEQ ID NO: 2444673 - RNA, 20 nt, Human
cuuccagagaguccucugga

SEQ ID NO: 2444674 - RNA, 21 nt, Human
cuuccagagaguccucuggau

SEQ ID NO: 2444675 - RNA, 18 nt, Human
cuuccagagaguccucug

SEQ ID NO: 2444676 - RNA, 17 nt, Human
cuuccagaaucccaaga

SEQ ID NO: 2444677 - RNA, 16 nt, Human
cuuccagaaucccaag

SEQ ID NO: 2444678 - RNA, 17 nt, Human
cuuccagaagugugauu

SEQ ID NO: 2444679 - RNA, 16 nt, Human
cuuccagaagugugau

SEQ ID NO: 2444680 - RNA, 15 nt, Human
cuuccagaaguguga

SEQ ID NO: 2444681 - RNA, 21 nt, Human
cuuccacuuuuuuuuguaugu

SEQ ID NO: 2444682 - RNA, 23 nt, Human
cuuccccacugcacacaccucag

SEQ ID NO: 2444683 - RNA, 14 nt, Human
cuuccccacugccu

SEQ ID NO: 2444684 - RNA, 16 nt, Human
cuuccccacugccugc

SEQ ID NO: 2444685 - RNA, 19 nt, Human
cuuccccacugccugccca

SEQ ID NO: 2444686 - RNA, 20 nt, Human
cuuccccacugccugcccac

SEQ ID NO: 2444687 - RNA, 22 nt, Human
cuuccccacugccugcccaccc

SEQ ID NO: 2444688 - RNA, 19 nt, Human
cuuccccagaaaggagacu

SEQ ID NO: 2444689 - RNA, 18 nt, Human
cuuccccacugcacacac

SEQ ID NO: 2444690 - RNA, 11 nt, Human
cuuccccacug

SEQ ID NO: 2444691 - RNA, 15 nt, Human
cuuccccacccucag

SEQ ID NO: 2444692 - RNA, 16 nt, Human
cuuccccaaauaauau

SEQ ID NO: 2444693 - RNA, 23 nt, Human
cuucccaugacccaggcugggca

SEQ ID NO: 2444694 - RNA, 18 nt, Human
cuucccauuguggcuccu

SEQ ID NO: 2444695 - RNA, 15 nt, Human
cuucccauuguggcu

SEQ ID NO: 2444696 - RNA, 15 nt, Human
cuucgccaccugggu

SEQ ID NO: 2444697 - RNA, 19 nt, Human
cuucgcgugcccucgcugc

SEQ ID NO: 2444698 - RNA, 17 nt, Human
cuucgcuccugugucuu

SEQ ID NO: 2444699 - RNA, 21 nt, Human
cuucgcuucuugccucugugc

SEQ ID NO: 2444700 - RNA, 20 nt, Human
cuucgcuucuugccucugug

SEQ ID NO: 2444701 - RNA, 18 nt, Human
cuucgcuucuugccucug

SEQ ID NO: 2444702 - RNA, 17 nt, Human
cuucgcuucuugccucu

SEQ ID NO: 2444703 - RNA, 16 nt, Human
cuucgcuucuugccuc

SEQ ID NO: 2444704 - RNA, 15 nt, Human
cuucgcuucuugccu

SEQ ID NO: 2444705 - RNA, 16 nt, Human
cuucgcuccugugucu

SEQ ID NO: 2444706 - RNA, 19 nt, Human
cuucgcaucaaaagacaau

SEQ ID NO: 2444707 - RNA, 17 nt, Human
cuucgcaucaaaagaca

SEQ ID NO: 2444708 - RNA, 16 nt, Human
cuucgcaucaaaagac

SEQ ID NO: 2444709 - RNA, 15 nt, Human
cuucgcaucaaaaga

SEQ ID NO: 2444710 - RNA, 16 nt, Human
cuucgcaggcaugucc

SEQ ID NO: 2444711 - RNA, 14 nt, Human
cuuccuuuucccug

SEQ ID NO: 2444712 - RNA, 23 nt, Human
cuucgcaucaaaagacaauucuu

SEQ ID NO: 2444713 - RNA, 22 nt, Human
cuucgcaucaaaagacaauucu

SEQ ID NO: 2444714 - RNA, 21 nt, Human
cuucgcaucaaaagacaauuc

SEQ ID NO: 2444715 - RNA, 20 nt, Human
cuucgcaucaaaagacaauu

SEQ ID NO: 2444716 - RNA, 14 nt, Human
cuucgccaccuggg

SEQ ID NO: 2444717 - RNA, 16 nt, Human
cuucgauacaccgggc

SEQ ID NO: 2444718 - RNA, 21 nt, Human
cuucgauacaccgggccugga

SEQ ID NO: 2444719 - RNA, 17 nt, Human
cuuccuuuuaucaguag

SEQ ID NO: 2444720 - RNA, 21 nt, Human
cuuccuuuuagccuaguucau

SEQ ID NO: 2444721 - RNA, 18 nt, Human
cuuccuuucuuucucucu

SEQ ID NO: 2444722 - RNA, 22 nt, Human
cuuccuuuguuuuuuuuuccug

SEQ ID NO: 2444723 - RNA, 13 nt, Human
cuuccuucauuuc

SEQ ID NO: 2444724 - RNA, 15 nt, Human
cuuccuucauuuccu

SEQ ID NO: 2444725 - RNA, 16 nt, Human
cuuccuucauuuccuc

SEQ ID NO: 2444726 - RNA, 13 nt, Human
cuuccuucccacc

SEQ ID NO: 2444727 - RNA, 12 nt, Human
cuuccuucccac

SEQ ID NO: 2444728 - RNA, 19 nt, Human
cuuccuuggcaucacaggg

SEQ ID NO: 2444729 - RNA, 13 nt, Human
cuuccuuggcuuu

SEQ ID NO: 2444730 - RNA, 16 nt, Human
cuuccuguuugggccc

SEQ ID NO: 2444731 - RNA, 16 nt, Human
cuuccuguuuuucaca

SEQ ID NO: 2444732 - RNA, 17 nt, Human
cuuccuguuuuucacau

SEQ ID NO: 2444733 - RNA, 18 nt, Human
cuuccuguuuuucacauu

SEQ ID NO: 2444734 - RNA, 15 nt, Human
cuuccugugugucca

SEQ ID NO: 2444735 - RNA, 23 nt, Human
cuuccuguguguccaaaacugcc

SEQ ID NO: 2444736 - RNA, 23 nt, Human
cuuccuguuuuucacauuuuccu

SEQ ID NO: 2444737 - RNA, 19 nt, Human
cuuccuuaauucacuccca

SEQ ID NO: 2444738 - RNA, 14 nt, Human
cuuccuguucugaa

SEQ ID NO: 2444739 - RNA, 21 nt, Human
cuuccuuaauucacucccaca

SEQ ID NO: 2444740 - RNA, 15 nt, Human
cuuccuucaccucug

SEQ ID NO: 2444741 - RNA, 23 nt, Human
cuucgggaagagaggaguucaau

SEQ ID NO: 2444742 - RNA, 22 nt, Human
cuucgggaagagaggaguucaa

SEQ ID NO: 2444743 - RNA, 21 nt, Human
cuucgggaagagaggaguuca

SEQ ID NO: 2444744 - RNA, 18 nt, Human
cuucgggaagagaggagu

SEQ ID NO: 2444745 - RNA, 17 nt, Human
cuucgggaagagaggag

SEQ ID NO: 2444746 - RNA, 15 nt, Human
cuucgggaagagagg

SEQ ID NO: 2444747 - RNA, 19 nt, Human
cuucgggaggucgaggcag

SEQ ID NO: 2444748 - RNA, 20 nt, Human
cuucggccuccauccugagg

SEQ ID NO: 2444749 - RNA, 22 nt, Human
cuucgcgguggaaggcccgagg

SEQ ID NO: 2444750 - RNA, 19 nt, Human
cuucggaaaccuuggugua

SEQ ID NO: 2444751 - RNA, 23 nt, Human
cuucguacaguucuucgggaaga

SEQ ID NO: 2444752 - RNA, 16 nt, Human
cuucguacaguucuuc

SEQ ID NO: 2444753 - RNA, 14 nt, Human
cuucguacaguucu

SEQ ID NO: 2444754 - RNA, 21 nt, Human
cuucgucuuucccauggggag

SEQ ID NO: 2444755 - RNA, 14 nt, Human
cuucgucuuuccca

SEQ ID NO: 2444756 - RNA, 22 nt, Human
cuucgugggaucugccccuccc

SEQ ID NO: 2444757 - RNA, 21 nt, Human
cuucgugggaucugccccucc

SEQ ID NO: 2444758 - RNA, 21 nt, Human
cuucgugcggaaucagcuucu

SEQ ID NO: 2444759 - RNA, 22 nt, Human
cuucgucuuucccauggggagg

SEQ ID NO: 2444760 - RNA, 13 nt, Human
cuucguacaguuc

SEQ ID NO: 2444761 - RNA, 12 nt, Human
cuucguacaguu

SEQ ID NO: 2444762 - RNA, 19 nt, Human
cuucggggaacuccuggaa

SEQ ID NO: 2444763 - RNA, 16 nt, Human
cuucgggcugugcccg

SEQ ID NO: 2444764 - RNA, 18 nt, Human
cuucggggaacuccugga

SEQ ID NO: 2444765 - RNA, 16 nt, Human
cuucucacugccaugc

SEQ ID NO: 2444766 - RNA, 23 nt, Human
cuucgugggaucugccccucccu

SEQ ID NO: 2444767 - RNA, 16 nt, Human
cuucucagaaggcaaa

SEQ ID NO: 2444768 - RNA, 13 nt, Human
cuucucagaaucu

SEQ ID NO: 2444769 - RNA, 22 nt, Human
cuucucagaaggcaaaugacuu

SEQ ID NO: 2444770 - RNA, 21 nt, Human
cuucucacugccaugccagcu

SEQ ID NO: 2444771 - RNA, 17 nt, Human
cuucucauuucaccccu

SEQ ID NO: 2444772 - RNA, 15 nt, Human
cuucucauuucaccc

SEQ ID NO: 2444773 - RNA, 21 nt, Human
cuucucauuccaacagugagu

SEQ ID NO: 2444774 - RNA, 20 nt, Human
cuucucauuccaacagugag

SEQ ID NO: 2444775 - RNA, 14 nt, Human
cuucucauuucacc

SEQ ID NO: 2444776 - RNA, 14 nt, Human
cuucucaugaucca

SEQ ID NO: 2444777 - RNA, 18 nt, Human
cuucucaucacuccccuc

SEQ ID NO: 2444778 - RNA, 13 nt, Human
cuucucaucacuc

SEQ ID NO: 2444779 - RNA, 12 nt, Human
cuucucaucugu

SEQ ID NO: 2444780 - RNA, 17 nt, Human
cuucucauccugcaggc

SEQ ID NO: 2444781 - RNA, 16 nt, Human
cuucucauccugcagg

SEQ ID NO: 2444782 - RNA, 15 nt, Human
cuucucauccugcag

SEQ ID NO: 2444783 - RNA, 15 nt, Human
cuuccacaagagccc

SEQ ID NO: 2444784 - RNA, 14 nt, Human
cuuccacaagagcc

SEQ ID NO: 2444785 - RNA, 13 nt, Human
cuuccacaagagc

SEQ ID NO: 2444786 - RNA, 13 nt, Human
cuuccaaagcaca

SEQ ID NO: 2444787 - RNA, 18 nt, Human
cuucauuugugucaaugg

SEQ ID NO: 2444788 - RNA, 14 nt, Human
cuucauuuguguca

SEQ ID NO: 2444789 - RNA, 13 nt, Human
cuucauuuguguc

SEQ ID NO: 2444790 - RNA, 11 nt, Human
cuucauuugug

SEQ ID NO: 2444791 - RNA, 16 nt, Human
cuucauuagagcaggc

SEQ ID NO: 2444792 - RNA, 24 nt, Human
cuucauuugggaugcuacucuagu

SEQ ID NO: 2444793 - RNA, 15 nt, Human
cuucauuagagcagg

SEQ ID NO: 2444794 - RNA, 20 nt, Human
cuucauuaccuuuuuugaua

SEQ ID NO: 2444795 - RNA, 17 nt, Human
cuucauuaauaauaaau

SEQ ID NO: 2444796 - RNA, 18 nt, Human
cuucauuugggaugcuac

SEQ ID NO: 2444797 - RNA, 17 nt, Human
cuucauuuuuccuaaca

SEQ ID NO: 2444798 - RNA, 16 nt, Human
cuucauuuuuccuaac

SEQ ID NO: 2444799 - RNA, 14 nt, Human
cuucauuuuuccua

SEQ ID NO: 2444800 - RNA, 13 nt, Human
cuucauuuuuccu

SEQ ID NO: 2444801 - RNA, 23 nt, Human
cuucaugucaacuucuggcuccu

SEQ ID NO: 2444802 - RNA, 20 nt, Human
cuucaugucaacuucuggcu

SEQ ID NO: 2444803 - RNA, 16 nt, Human
cuucauuaauaauaaa

SEQ ID NO: 2444804 - RNA, 20 nt, Human
cuucauuaagcccucuucca

SEQ ID NO: 2444805 - RNA, 15 nt, Human
cuucauggcagaagg

SEQ ID NO: 2444806 - RNA, 21 nt, Human
cuucauggcagaaggcaaacc

SEQ ID NO: 2444807 - RNA, 23 nt, Human
cuucauggaugggggaacucaga

SEQ ID NO: 2444808 - RNA, 15 nt, Human
cuucagugcccacca

SEQ ID NO: 2444809 - RNA, 13 nt, Human
cuucauggauggg

SEQ ID NO: 2444810 - RNA, 11 nt, Human
cuucagugccc

SEQ ID NO: 2444811 - RNA, 13 nt, Human
cuucagugcccac

SEQ ID NO: 2444812 - RNA, 19 nt, Human
cuucagugcaucugggaag

SEQ ID NO: 2444813 - RNA, 23 nt, Human
cuucaguauguugucaaagagag

SEQ ID NO: 2444814 - RNA, 14 nt, Human
cuucagugccaaaa

SEQ ID NO: 2444815 - RNA, 15 nt, Human
cuucaguaagccgug

SEQ ID NO: 2444816 - RNA, 19 nt, Human
cuucaguauguugucaaag

SEQ ID NO: 2444817 - RNA, 15 nt, Human
cuucagguucuuagu

SEQ ID NO: 2444818 - RNA, 19 nt, Human
cuucagguucuuaguguca

SEQ ID NO: 2444819 - RNA, 22 nt, Human
cuucaguauguugucaaagaga

SEQ ID NO: 2444820 - RNA, 21 nt, Human
cuucagcaguaccuauaaagu

SEQ ID NO: 2444821 - RNA, 18 nt, Human
cuucagcauauuuauagc

SEQ ID NO: 2444822 - RNA, 14 nt, Human
cuucagccucccga

SEQ ID NO: 2444823 - RNA, 15 nt, Human
cuucagccugaaaga

SEQ ID NO: 2444824 - RNA, 20 nt, Human
cuucagccuccccaccuucu

SEQ ID NO: 2444825 - RNA, 20 nt, Human
cuucagccucuuucuguccc

SEQ ID NO: 2444826 - RNA, 14 nt, Human
cuucagccugaggc

SEQ ID NO: 2444827 - RNA, 20 nt, Human
cuucagccucccgaguagcu

SEQ ID NO: 2444828 - RNA, 16 nt, Human
cuucagccucccgagu

SEQ ID NO: 2444829 - RNA, 15 nt, Human
cuucagcugacuuuu

SEQ ID NO: 2444830 - RNA, 19 nt, Human
cuucagcugacuuuucugu

SEQ ID NO: 2444831 - RNA, 16 nt, Human
cuucagcgguuuauau

SEQ ID NO: 2444832 - RNA, 15 nt, Human
cuucagccugaggcu

SEQ ID NO: 2444833 - RNA, 16 nt, Human
cuucagccugaggcug

SEQ ID NO: 2444834 - RNA, 20 nt, Human
cuucagccugaggcugagac

SEQ ID NO: 2444835 - RNA, 22 nt, Human
cuucagccugaggcugagacug

SEQ ID NO: 2444836 - RNA, 14 nt, Human
cuucaguaagccgu

SEQ ID NO: 2444837 - RNA, 22 nt, Human
cuucagguuaucgaaauaacaa

SEQ ID NO: 2444838 - RNA, 21 nt, Human
cuucagguuaucgaaauaaca

SEQ ID NO: 2444839 - RNA, 20 nt, Human
cuucagguuaucgaaauaac

SEQ ID NO: 2444840 - RNA, 16 nt, Human
cuucagguggaaaaac

SEQ ID NO: 2444841 - RNA, 18 nt, Human
cuucagcuucuucaucuu

SEQ ID NO: 2444842 - RNA, 19 nt, Human
cuucagcuguacuucgucu

SEQ ID NO: 2444843 - RNA, 13 nt, Human
cuucagcuucuuc

SEQ ID NO: 2444844 - RNA, 16 nt, Human
cuucaggagggagcau

SEQ ID NO: 2444845 - RNA, 18 nt, Human
cuucaggucaggaguucg

SEQ ID NO: 2444846 - RNA, 22 nt, Human
cuuagucacugagacagcccgg

SEQ ID NO: 2444847 - RNA, 17 nt, Human
cuuagucacugccugca

SEQ ID NO: 2444848 - RNA, 16 nt, Human
cuuagucacugccugc

SEQ ID NO: 2444849 - RNA, 15 nt, Human
cuuagucacugccug

SEQ ID NO: 2444850 - RNA, 14 nt, Human
cuuagucacugccu

SEQ ID NO: 2444851 - RNA, 13 nt, Human
cuuagucacugcc

SEQ ID NO: 2444852 - RNA, 23 nt, Human
cuuaguaaugcuacgugugauuu

SEQ ID NO: 2444853 - RNA, 20 nt, Human
cuuagucacugagacagccc

SEQ ID NO: 2444854 - RNA, 21 nt, Human
cuuagucacugagacagcccg

SEQ ID NO: 2444855 - RNA, 16 nt, Human
cuucaaauccauccag

SEQ ID NO: 2444856 - RNA, 14 nt, Human
cuucaaauccaucc

SEQ ID NO: 2444857 - RNA, 23 nt, Human
cuuagucacugccugcagagguc

SEQ ID NO: 2444858 - RNA, 17 nt, Human
cuucaaauccauccaga

SEQ ID NO: 2444859 - RNA, 19 nt, Human
cuucaaauuagaagacauu

SEQ ID NO: 2444860 - RNA, 13 nt, Human
cuucaaauuagaa

SEQ ID NO: 2444861 - RNA, 17 nt, Human
cuucaaauccuugaaga

SEQ ID NO: 2444862 - RNA, 15 nt, Human
cuucaaauauuuccc

SEQ ID NO: 2444863 - RNA, 20 nt, Human
cuucaaggauccugagccag

SEQ ID NO: 2444864 - RNA, 19 nt, Human
cuucaaggauccugagcca

SEQ ID NO: 2444865 - RNA, 18 nt, Human
cuucaaggauccugagcc

SEQ ID NO: 2444866 - RNA, 17 nt, Human
cuucaaggauccugagc

SEQ ID NO: 2444867 - RNA, 18 nt, Human
cuucaagaucauguaccc

SEQ ID NO: 2444868 - RNA, 17 nt, Human
cuucaagaccuucacca

SEQ ID NO: 2444869 - RNA, 18 nt, Human
cuucaagaacucugggcu

SEQ ID NO: 2444870 - RNA, 16 nt, Human
cuucaacucccugccc

SEQ ID NO: 2444871 - RNA, 23 nt, Human
cuucaacagacccccucuagaaa

SEQ ID NO: 2444872 - RNA, 17 nt, Human
cuucaacugaccagccu

SEQ ID NO: 2444873 - RNA, 23 nt, Human
cuucaacugaccagccuccaugc

SEQ ID NO: 2444874 - RNA, 20 nt, Human
cuucaacugaccagccucca

SEQ ID NO: 2444875 - RNA, 14 nt, Human
cuucacauauugau

SEQ ID NO: 2444876 - RNA, 23 nt, Human
cuucacauauugauuuccguuaa

SEQ ID NO: 2444877 - RNA, 11 nt, Human
cuucagagagc

SEQ ID NO: 2444878 - RNA, 24 nt, Human
cuucagagacuccugcaggcagcc

SEQ ID NO: 2444879 - RNA, 17 nt, Human
cuucacauacccucccc

SEQ ID NO: 2444880 - RNA, 22 nt, Human
cuucacauaagcucagaaucca

SEQ ID NO: 2444881 - RNA, 20 nt, Human
cuucacauaagcucagaauc

SEQ ID NO: 2444882 - RNA, 14 nt, Human
cuucacaguguuuc

SEQ ID NO: 2444883 - RNA, 14 nt, Human
cuucacauaguuuu

SEQ ID NO: 2444884 - RNA, 13 nt, Human
cuucacauaguuu

SEQ ID NO: 2444885 - RNA, 20 nt, Human
cuucacauccuguguuucua

SEQ ID NO: 2444886 - RNA, 20 nt, Human
cuucagagcugacacaggau

SEQ ID NO: 2444887 - RNA, 18 nt, Human
cuucagagcugacacagg

SEQ ID NO: 2444888 - RNA, 14 nt, Human
cuucagagcugaca

SEQ ID NO: 2444889 - RNA, 12 nt, Human
cuucagagcuga

SEQ ID NO: 2444890 - RNA, 21 nt, Human
cuucagaggcccucgcugcca

SEQ ID NO: 2444891 - RNA, 23 nt, Human
cuucagaggcccucgcugccagc

SEQ ID NO: 2444892 - RNA, 14 nt, Human
cuucagagagcugg

SEQ ID NO: 2444893 - RNA, 15 nt, Human
cuucagagagcuggu

SEQ ID NO: 2444894 - RNA, 16 nt, Human
cuucagagagcuggua

SEQ ID NO: 2444895 - RNA, 22 nt, Human
cuucagagagcugguaguuagu

SEQ ID NO: 2444896 - RNA, 12 nt, Human
cuucagagcagg

SEQ ID NO: 2444897 - RNA, 18 nt, Human
cuucagauuuguguuaua

SEQ ID NO: 2444898 - RNA, 20 nt, Human
cuucagaucagugcuugagu

SEQ ID NO: 2444899 - RNA, 18 nt, Human
cuucagauggaaacucuu

SEQ ID NO: 2444900 - RNA, 15 nt, Human
cuucagaucagugcu

SEQ ID NO: 2444901 - RNA, 17 nt, Human
cuucagaucagugcuug

SEQ ID NO: 2444902 - RNA, 22 nt, Human
cuucaaggauccugagccagau

SEQ ID NO: 2444903 - RNA, 21 nt, Human
cuucaaggauccugagccaga

SEQ ID NO: 2444904 - RNA, 23 nt, Human
cuucaaggauccugagccagauu

SEQ ID NO: 2444905 - RNA, 14 nt, Human
cuucacaaagccca

SEQ ID NO: 2444906 - RNA, 15 nt, Human
cuucacaaagcccaa

SEQ ID NO: 2444907 - RNA, 17 nt, Human
cuucacaaagcccaagg

SEQ ID NO: 2444908 - RNA, 12 nt, Human
cuucacaacaga

SEQ ID NO: 2444909 - RNA, 14 nt, Human
cuucacaacagauu

SEQ ID NO: 2444910 - RNA, 15 nt, Human
cuucacaaauucuca

SEQ ID NO: 2444911 - RNA, 23 nt, Human
cuucacaaagcccaagggaucug

SEQ ID NO: 2444912 - RNA, 16 nt, Human
cuucacacacaggcaa

SEQ ID NO: 2444913 - RNA, 17 nt, Human
cuucacacacaggcaac

SEQ ID NO: 2444914 - RNA, 12 nt, Human
cuucacaguguu

SEQ ID NO: 2444915 - RNA, 13 nt, Human
cuucacaguguuu

SEQ ID NO: 2444916 - RNA, 18 nt, Human
cugucuucccaggguagc

SEQ ID NO: 2444917 - RNA, 14 nt, Human
cugucuuccugcau

SEQ ID NO: 2444918 - RNA, 16 nt, Human
cugucuuccugcauuc

SEQ ID NO: 2444919 - RNA, 17 nt, Human
cugucuucucaggcucu

SEQ ID NO: 2444920 - RNA, 23 nt, Human
cugucuucccaggguagcccgcc

SEQ ID NO: 2444921 - RNA, 16 nt, Human
cugucuucccagggua

SEQ ID NO: 2444922 - RNA, 15 nt, Human
cugucuucccagggu

SEQ ID NO: 2444923 - RNA, 18 nt, Human
cugucuuccugcauucac

SEQ ID NO: 2444924 - RNA, 14 nt, Human
cugucuucccaggg

SEQ ID NO: 2444925 - RNA, 13 nt, Human
cugucuucccagg

SEQ ID NO: 2444926 - RNA, 12 nt, Human
cugucuucccag

SEQ ID NO: 2444927 - RNA, 11 nt, Human
cugucuuccca

SEQ ID NO: 2444928 - RNA, 22 nt, Human
cugucuucauagcagauuuuaa

SEQ ID NO: 2444929 - RNA, 18 nt, Human
cugucuucaccugauuca

SEQ ID NO: 2444930 - RNA, 22 nt, Human
cugucuucaccugauucaacua

SEQ ID NO: 2444931 - RNA, 19 nt, Human
cugucuucauagcagauuu

SEQ ID NO: 2444932 - RNA, 17 nt, Human
cugucuucaccugauuc

SEQ ID NO: 2444933 - RNA, 15 nt, Human
cugucuucaagggcu

SEQ ID NO: 2444934 - RNA, 23 nt, Human
cugucuucacagcucuguguugc

SEQ ID NO: 2444935 - RNA, 18 nt, Human
cugucuucacaacagauu

SEQ ID NO: 2444936 - RNA, 18 nt, Human
cugucuguuacacuggag

SEQ ID NO: 2444937 - RNA, 16 nt, Human
cugucuguuacacugg

SEQ ID NO: 2444938 - RNA, 17 nt, Human
cugucuucaacagcucc

SEQ ID NO: 2444939 - RNA, 14 nt, Human
cugucuucaagggc

SEQ ID NO: 2444940 - RNA, 19 nt, Human
cugucuucacagcucugug

SEQ ID NO: 2444941 - RNA, 18 nt, Human
cugucuucaguaagccgu

SEQ ID NO: 2444942 - RNA, 20 nt, Human
cugucuuuccuagauggcag

SEQ ID NO: 2444943 - RNA, 23 nt, Human
cugucuuucugagcacacuuuag

SEQ ID NO: 2444944 - RNA, 15 nt, Human
cugugaaaggaaaga

SEQ ID NO: 2444945 - RNA, 21 nt, Human
cugucuuuuuucuaaaguaaa

SEQ ID NO: 2444946 - RNA, 21 nt, Human
cugucuucuucaggguccuga

SEQ ID NO: 2444947 - RNA, 11 nt, Human
cugucuuuccu

SEQ ID NO: 2444948 - RNA, 13 nt, Human
cugucuuuccuag

SEQ ID NO: 2444949 - RNA, 14 nt, Human
cugucuuuccuaga

SEQ ID NO: 2444950 - RNA, 16 nt, Human
cugucuuucagauaca

SEQ ID NO: 2444951 - RNA, 20 nt, Human
cugucuuucagauacauggu

SEQ ID NO: 2444952 - RNA, 15 nt, Human
cugucuuucagauac

SEQ ID NO: 2444953 - RNA, 16 nt, Human
cugucuuuaaggaaaa

SEQ ID NO: 2444954 - RNA, 15 nt, Human
cugucugguggcccc

SEQ ID NO: 2444955 - RNA, 13 nt, Human
cugucugguggcc

SEQ ID NO: 2444956 - RNA, 15 nt, Human
cugucuggccaggcc

SEQ ID NO: 2444957 - RNA, 20 nt, Human
cugucuggcugaggauuuca

SEQ ID NO: 2444958 - RNA, 15 nt, Human
cugucugcucagaca

SEQ ID NO: 2444959 - RNA, 14 nt, Human
cugucuguaccuaa

SEQ ID NO: 2444960 - RNA, 18 nt, Human
cugucugguuuuaacaau

SEQ ID NO: 2444961 - RNA, 17 nt, Human
cugucugguuuuaacaa

SEQ ID NO: 2444962 - RNA, 16 nt, Human
cugucugguuuuaaca

SEQ ID NO: 2444963 - RNA, 23 nt, Human
cugucugguuucaccgaggacau

SEQ ID NO: 2444964 - RNA, 23 nt, Human
cugucugguggccccguuucugg

SEQ ID NO: 2444965 - RNA, 22 nt, Human
cugucuguagagggcccuggug

SEQ ID NO: 2444966 - RNA, 20 nt, Human
cugucuguagagggcccugg

SEQ ID NO: 2444967 - RNA, 19 nt, Human
cugucuguagagggcccug

SEQ ID NO: 2444968 - RNA, 16 nt, Human
cugucuguagagggcc

SEQ ID NO: 2444969 - RNA, 16 nt, Human
cugucugucucuccau

SEQ ID NO: 2444970 - RNA, 20 nt, Human
cugucugucucuccaucugu

SEQ ID NO: 2444971 - RNA, 15 nt, Human
cugucuguuacacug

SEQ ID NO: 2444972 - RNA, 20 nt, Human
cugucauuugagcagggcuc

SEQ ID NO: 2444973 - RNA, 18 nt, Human
cugucaauuacaggaagu

SEQ ID NO: 2444974 - RNA, 22 nt, Human
cugucauuugagcagggcucag

SEQ ID NO: 2444975 - RNA, 21 nt, Human
cugucauuugagcagggcuca

SEQ ID NO: 2444976 - RNA, 21 nt, Human
cugucugaucugugcuuucca

SEQ ID NO: 2444977 - RNA, 16 nt, Human
cugucugaucugugcu

SEQ ID NO: 2444978 - RNA, 17 nt, Human
cugucugaucugugcuu

SEQ ID NO: 2444979 - RNA, 14 nt, Human
cugucugccagcca

SEQ ID NO: 2444980 - RNA, 23 nt, Human
cugucauuugagcagggcucagc

SEQ ID NO: 2444981 - RNA, 15 nt, Human
cugucugccagccag

SEQ ID NO: 2444982 - RNA, 16 nt, Human
cugucugccagccagc

SEQ ID NO: 2444983 - RNA, 17 nt, Human
cugucugccagccagca

SEQ ID NO: 2444984 - RNA, 20 nt, Human
cugucugccagccagcagcc

SEQ ID NO: 2444985 - RNA, 21 nt, Human
cugucugccagccagcagcca

SEQ ID NO: 2444986 - RNA, 14 nt, Human
cugucugccagggc

SEQ ID NO: 2444987 - RNA, 18 nt, Human
cugugcccacaucccagg

SEQ ID NO: 2444988 - RNA, 14 nt, Human
cugugcccaaguug

SEQ ID NO: 2444989 - RNA, 22 nt, Human
cugugccauuuuguauuuuacu

SEQ ID NO: 2444990 - RNA, 15 nt, Human
cugugccaugugcca

SEQ ID NO: 2444991 - RNA, 17 nt, Human
cugugcccacccuccac

SEQ ID NO: 2444992 - RNA, 23 nt, Human
cugugcccacccuccacucuccu

SEQ ID NO: 2444993 - RNA, 22 nt, Human
cugugcccacaucccaggcuuc

SEQ ID NO: 2444994 - RNA, 19 nt, Human
cugugcccacaucccaggc

SEQ ID NO: 2444995 - RNA, 23 nt, Human
cugugcccacaucccaggcuuca

SEQ ID NO: 2444996 - RNA, 12 nt, Human
cugugcccaugg

SEQ ID NO: 2444997 - RNA, 19 nt, Human
cugugcccuaaaguguauu

SEQ ID NO: 2444998 - RNA, 21 nt, Human
cugugccccaugccuguccag

SEQ ID NO: 2444999 - RNA, 18 nt, Human
cugugcccaugggcacug

SEQ ID NO: 2445000 - RNA, 15 nt, Human
cugugcccaugggca

SEQ ID NO: 2445001 - RNA, 13 nt, Human
cugugcccauggg

SEQ ID NO: 2445002 - RNA, 17 nt, Human
cugugcccagagauggg

SEQ ID NO: 2445003 - RNA, 21 nt, Human
cugugcccaugggcacugcug

SEQ ID NO: 2445004 - RNA, 20 nt, Human
cugugcccaugggcacugcu

SEQ ID NO: 2445005 - RNA, 17 nt, Human
cugugccccaugccugu

SEQ ID NO: 2445006 - RNA, 14 nt, Human
cugugccaugugcc

SEQ ID NO: 2445007 - RNA, 21 nt, Human
cugugccacucaccgaagcca

SEQ ID NO: 2445008 - RNA, 23 nt, Human
cugugccacccugggcucugugg

SEQ ID NO: 2445009 - RNA, 22 nt, Human
cugugccacccugggcucugug

SEQ ID NO: 2445010 - RNA, 16 nt, Human
cugugcagucacugga

SEQ ID NO: 2445011 - RNA, 15 nt, Human
cugugcagggaggag

SEQ ID NO: 2445012 - RNA, 22 nt, Human
cugugcagggaggagguggcag

SEQ ID NO: 2445013 - RNA, 17 nt, Human
cugugcacgcaguggcc

SEQ ID NO: 2445014 - RNA, 12 nt, Human
cugugcacgcag

SEQ ID NO: 2445015 - RNA, 14 nt, Human
cugugcaccaagca

SEQ ID NO: 2445016 - RNA, 14 nt, Human
cugugcacugccca

SEQ ID NO: 2445017 - RNA, 18 nt, Human
cugugcacgcaguggccu

SEQ ID NO: 2445018 - RNA, 21 nt, Human
cugugcacaucugugucuugu

SEQ ID NO: 2445019 - RNA, 16 nt, Human
cugugcaaauccuuga

SEQ ID NO: 2445020 - RNA, 22 nt, Human
cugugauuccacuacaccuggc

SEQ ID NO: 2445021 - RNA, 19 nt, Human
cugugcagccgcugagcga

SEQ ID NO: 2445022 - RNA, 21 nt, Human
cugugcagccgcugagcgagg

SEQ ID NO: 2445023 - RNA, 23 nt, Human
cugugcagccuguccugggcugg

SEQ ID NO: 2445024 - RNA, 13 nt, Human
cugugcagggagg

SEQ ID NO: 2445025 - RNA, 16 nt, Human
cugugcagccgcugag

SEQ ID NO: 2445026 - RNA, 17 nt, Human
cugugcagccgcugagc

SEQ ID NO: 2445027 - RNA, 22 nt, Human
cugugcagccccgccuccaggc

SEQ ID NO: 2445028 - RNA, 14 nt, Human
cugugcagccccgc

SEQ ID NO: 2445029 - RNA, 22 nt, Human
cugugaaaggaaagagggaggu

SEQ ID NO: 2445030 - RNA, 16 nt, Human
cugugaaaggaaagag

SEQ ID NO: 2445031 - RNA, 18 nt, Human
cugugaaaguacauuugg

SEQ ID NO: 2445032 - RNA, 19 nt, Human
cugugaaaaaaaaaaugcu

SEQ ID NO: 2445033 - RNA, 15 nt, Human
cugugaaacuggcac

SEQ ID NO: 2445034 - RNA, 12 nt, Human
cugugaaauagu

SEQ ID NO: 2445035 - RNA, 16 nt, Human
cugugaaaugcuggca

SEQ ID NO: 2445036 - RNA, 23 nt, Human
cugugaaacuggcacugaauuaa

SEQ ID NO: 2445037 - RNA, 17 nt, Human
cugugagcccagcuggg

SEQ ID NO: 2445038 - RNA, 13 nt, Human
cugugagccccug

SEQ ID NO: 2445039 - RNA, 15 nt, Human
cugugagcccagcug

SEQ ID NO: 2445040 - RNA, 16 nt, Human
cugugaacgauuuaga

SEQ ID NO: 2445041 - RNA, 18 nt, Human
cugugaacauggacucuu

SEQ ID NO: 2445042 - RNA, 17 nt, Human
cugugagccuuggcugu

SEQ ID NO: 2445043 - RNA, 13 nt, Human
cugugaggcaggg

SEQ ID NO: 2445044 - RNA, 14 nt, Human
cugugaggcagggg

SEQ ID NO: 2445045 - RNA, 15 nt, Human
cugugaggccccugg

SEQ ID NO: 2445046 - RNA, 18 nt, Human
cugugaggcaggggcgga

SEQ ID NO: 2445047 - RNA, 21 nt, Human
cugugagccccugguccugag

SEQ ID NO: 2445048 - RNA, 16 nt, Human
cugugagccccugguc

SEQ ID NO: 2445049 - RNA, 15 nt, Human
cugugagccccuggu

SEQ ID NO: 2445050 - RNA, 14 nt, Human
cugugagccccugg

SEQ ID NO: 2445051 - RNA, 15 nt, Human
cugugagccuuggcu

SEQ ID NO: 2445052 - RNA, 12 nt, Human
cugugagccuug

SEQ ID NO: 2445053 - RNA, 21 nt, Human
cugugauggggcccugccucc

SEQ ID NO: 2445054 - RNA, 16 nt, Human
cugugauggggcccug

SEQ ID NO: 2445055 - RNA, 23 nt, Human
cugugauggggcccugccuccuu

SEQ ID NO: 2445056 - RNA, 16 nt, Human
cugugauugugccuac

SEQ ID NO: 2445057 - RNA, 16 nt, Human
cugugaggcuguccug

SEQ ID NO: 2445058 - RNA, 15 nt, Human
cugugaggcuguccu

SEQ ID NO: 2445059 - RNA, 18 nt, Human
cugugaggccccuggaca

SEQ ID NO: 2445060 - RNA, 17 nt, Human
cugugaggccccuggac

SEQ ID NO: 2445061 - RNA, 12 nt, Human
cugugaggcugu

SEQ ID NO: 2445062 - RNA, 15 nt, Human
cugugauggggcccu

SEQ ID NO: 2445063 - RNA, 17 nt, Human
cugugaugauccucaua

SEQ ID NO: 2445064 - RNA, 22 nt, Human
cugugaugaggggaggggggca

SEQ ID NO: 2445065 - RNA, 14 nt, Human
cugugaugccacac

SEQ ID NO: 2445066 - RNA, 16 nt, Human
cugugaugccacacag

SEQ ID NO: 2445067 - RNA, 18 nt, Human
cugugaugcuuugaagua

SEQ ID NO: 2445068 - RNA, 17 nt, Human
cugugaugccacacaga

SEQ ID NO: 2445069 - RNA, 18 nt, Human
cuguguguguguaugugg

SEQ ID NO: 2445070 - RNA, 20 nt, Human
cuguguguguguaugugggg

SEQ ID NO: 2445071 - RNA, 18 nt, Human
cuguguguuuaugugugu

SEQ ID NO: 2445072 - RNA, 20 nt, Human
cuguguguuuaugugugugu

SEQ ID NO: 2445073 - RNA, 15 nt, Human
cuguguguguguaug

SEQ ID NO: 2445074 - RNA, 16 nt, Human
cuguguguguguaugu

SEQ ID NO: 2445075 - RNA, 14 nt, Human
cuguguguguguau

SEQ ID NO: 2445076 - RNA, 18 nt, Human
cuguguucgacucagccu

SEQ ID NO: 2445077 - RNA, 13 nt, Human
cuguguuccuggc

SEQ ID NO: 2445078 - RNA, 12 nt, Human
cuguguuccugg

SEQ ID NO: 2445079 - RNA, 22 nt, Human
cuguguucgacucagccucagg

SEQ ID NO: 2445080 - RNA, 21 nt, Human
cuguguucgacucagccucag

SEQ ID NO: 2445081 - RNA, 20 nt, Human
cuguguucgacucagccuca

SEQ ID NO: 2445082 - RNA, 13 nt, Human
cuguguugccaag

SEQ ID NO: 2445083 - RNA, 20 nt, Human
cuguguucuggugaggccuu

SEQ ID NO: 2445084 - RNA, 21 nt, Human
cuguguguguguauguggggg

SEQ ID NO: 2445085 - RNA, 16 nt, Human
cuguguguuuucauaa

SEQ ID NO: 2445086 - RNA, 18 nt, Human
cuguguguuuucauaaua

SEQ ID NO: 2445087 - RNA, 19 nt, Human
cuguguguuuucauaauaa

SEQ ID NO: 2445088 - RNA, 23 nt, Human
cuguguuuuugcuaucacacagu

SEQ ID NO: 2445089 - RNA, 19 nt, Human
cuguuaaaagaugaaaaua

SEQ ID NO: 2445090 - RNA, 15 nt, Human
cuguuaaaagaugaa

SEQ ID NO: 2445091 - RNA, 16 nt, Human
cuguuaaaagaugaaa

SEQ ID NO: 2445092 - RNA, 19 nt, Human
cuguguugccaagcuccaa

SEQ ID NO: 2445093 - RNA, 17 nt, Human
cuguguugccaagcucc

SEQ ID NO: 2445094 - RNA, 16 nt, Human
cuguguugccaagcuc

SEQ ID NO: 2445095 - RNA, 14 nt, Human
cuguguugccaagc

SEQ ID NO: 2445096 - RNA, 21 nt, Human
cuguguugccaagcuccaagc

SEQ ID NO: 2445097 - RNA, 14 nt, Human
cuguguugccaugu

SEQ ID NO: 2445098 - RNA, 18 nt, Human
cuguguugcgugucgugg

SEQ ID NO: 2445099 - RNA, 14 nt, Human
cuguguugucucua

SEQ ID NO: 2445100 - RNA, 20 nt, Human
cuguguugcgugucgugggu

SEQ ID NO: 2445101 - RNA, 19 nt, Human
cuguguugucucuagagca

SEQ ID NO: 2445102 - RNA, 22 nt, Human
cuguguuuugaaugguguugua

SEQ ID NO: 2445103 - RNA, 15 nt, Human
cuguguuuuugaaau

SEQ ID NO: 2445104 - RNA, 14 nt, Human
cugugugccuucgc

SEQ ID NO: 2445105 - RNA, 15 nt, Human
cuguguguccaaaac

SEQ ID NO: 2445106 - RNA, 19 nt, Human
cuguguguccaaaacugcc

SEQ ID NO: 2445107 - RNA, 21 nt, Human
cuguguguccaaaacugccuc

SEQ ID NO: 2445108 - RNA, 17 nt, Human
cugugugugaugugcau

SEQ ID NO: 2445109 - RNA, 22 nt, Human
cuguguguccaaaacugccuca

SEQ ID NO: 2445110 - RNA, 14 nt, Human
cugugugcucagga

SEQ ID NO: 2445111 - RNA, 21 nt, Human
cugugugcaccuuaccaacuu

SEQ ID NO: 2445112 - RNA, 16 nt, Human
cugugugcacaaauau

SEQ ID NO: 2445113 - RNA, 17 nt, Human
cugugugcagugaaggu

SEQ ID NO: 2445114 - RNA, 15 nt, Human
cugugugcagugaag

SEQ ID NO: 2445115 - RNA, 19 nt, Human
cugugugaugaacuuucuc

SEQ ID NO: 2445116 - RNA, 18 nt, Human
cugugugaugaacuuucu

SEQ ID NO: 2445117 - RNA, 21 nt, Human
cugugugauugacagcuuugc

SEQ ID NO: 2445118 - RNA, 23 nt, Human
cugugugauugacagcuuugcug

SEQ ID NO: 2445119 - RNA, 22 nt, Human
cugugugauugacagcuuugcu

SEQ ID NO: 2445120 - RNA, 18 nt, Human
cugugugcaagugugugc

SEQ ID NO: 2445121 - RNA, 16 nt, Human
cugugugaugaacuuu

SEQ ID NO: 2445122 - RNA, 15 nt, Human
cugugugaugaacuu

SEQ ID NO: 2445123 - RNA, 18 nt, Human
cugugugacucaaaccaa

SEQ ID NO: 2445124 - RNA, 19 nt, Human
cugugugacaucaguggca

SEQ ID NO: 2445125 - RNA, 16 nt, Human
cugugguuuuccccuc

SEQ ID NO: 2445126 - RNA, 21 nt, Human
cugugguuguuuuagcuccuu

SEQ ID NO: 2445127 - RNA, 21 nt, Human
cugugguuuuccccucccugg

SEQ ID NO: 2445128 - RNA, 20 nt, Human
cugugguuuuccccucccug

SEQ ID NO: 2445129 - RNA, 19 nt, Human
cugugguuuuccccucccu

SEQ ID NO: 2445130 - RNA, 18 nt, Human
cugugguuuuccccuccc

SEQ ID NO: 2445131 - RNA, 23 nt, Human
cugugguuuuccccucccugggu

SEQ ID NO: 2445132 - RNA, 22 nt, Human
cugugguuuuccccucccuggg

SEQ ID NO: 2445133 - RNA, 16 nt, Human
cuguguaaaaagagag

SEQ ID NO: 2445134 - RNA, 14 nt, Human
cuguguaaaguuag

SEQ ID NO: 2445135 - RNA, 13 nt, Human
cuguguaaaguua

SEQ ID NO: 2445136 - RNA, 12 nt, Human
cuguguaaaguu

SEQ ID NO: 2445137 - RNA, 11 nt, Human
cuguguaaagu

SEQ ID NO: 2445138 - RNA, 17 nt, Human
cuguguaaaaagagagc

SEQ ID NO: 2445139 - RNA, 16 nt, Human
cuguguaacagcuccu

SEQ ID NO: 2445140 - RNA, 15 nt, Human
cuguguaacagcucc

SEQ ID NO: 2445141 - RNA, 17 nt, Human
cuguguaacagcuccuu

SEQ ID NO: 2445142 - RNA, 18 nt, Human
cuguguaaaguuagucua

SEQ ID NO: 2445143 - RNA, 15 nt, Human
cuguguaaaguuagu

SEQ ID NO: 2445144 - RNA, 14 nt, Human
cuguguaacagcuc

SEQ ID NO: 2445145 - RNA, 13 nt, Human
cuguguaacagcu

SEQ ID NO: 2445146 - RNA, 20 nt, Human
cugugucuuuuuucacuaca

SEQ ID NO: 2445147 - RNA, 12 nt, Human
cugugugaaaua

SEQ ID NO: 2445148 - RNA, 19 nt, Human
cugugugaaauaccagugu

SEQ ID NO: 2445149 - RNA, 21 nt, Human
cugugugaaauaccagugugg

SEQ ID NO: 2445150 - RNA, 20 nt, Human
cugugucuuucacagcuccu

SEQ ID NO: 2445151 - RNA, 13 nt, Human
cugugugaaaaug

SEQ ID NO: 2445152 - RNA, 13 nt, Human
cuguggagaaaua

SEQ ID NO: 2445153 - RNA, 12 nt, Human
cuguggaagcaa

SEQ ID NO: 2445154 - RNA, 23 nt, Human
cuguggaaaguguaaagcauucc

SEQ ID NO: 2445155 - RNA, 13 nt, Human
cuguggaagggac

SEQ ID NO: 2445156 - RNA, 18 nt, Human
cuguggaaucuggaguga

SEQ ID NO: 2445157 - RNA, 14 nt, Human
cuguggaagggacu

SEQ ID NO: 2445158 - RNA, 16 nt, Human
cuguggaagggacuag

SEQ ID NO: 2445159 - RNA, 17 nt, Human
cugugccucugccuguc

SEQ ID NO: 2445160 - RNA, 16 nt, Human
cugugccucugccugu

SEQ ID NO: 2445161 - RNA, 11 nt, Human
cugugccucug

SEQ ID NO: 2445162 - RNA, 16 nt, Human
cugugcccugguggag

SEQ ID NO: 2445163 - RNA, 15 nt, Human
cugugcccuggugga

SEQ ID NO: 2445164 - RNA, 13 nt, Human
cugugcccuggug

SEQ ID NO: 2445165 - RNA, 12 nt, Human
cugugcccuggu

SEQ ID NO: 2445166 - RNA, 17 nt, Human
cugugcccuuauucagg

SEQ ID NO: 2445167 - RNA, 17 nt, Human
cugugcccugguggaga

SEQ ID NO: 2445168 - RNA, 18 nt, Human
cugugccuaacaccagcg

SEQ ID NO: 2445169 - RNA, 11 nt, Human
cugugcccugg

SEQ ID NO: 2445170 - RNA, 15 nt, Human
cugugcccucuugau

SEQ ID NO: 2445171 - RNA, 15 nt, Human
cugugccucugccug

SEQ ID NO: 2445172 - RNA, 14 nt, Human
cugugccucugccu

SEQ ID NO: 2445173 - RNA, 13 nt, Human
cugugccucugcc

SEQ ID NO: 2445174 - RNA, 12 nt, Human
cugugccucugc

SEQ ID NO: 2445175 - RNA, 24 nt, Human
cuguggaucaaauccagccugcug

SEQ ID NO: 2445176 - RNA, 14 nt, Human
cuguggaucaaauc

SEQ ID NO: 2445177 - RNA, 23 nt, Human
cuguggaggaaggauuguaaaaa

SEQ ID NO: 2445178 - RNA, 22 nt, Human
cuguggaggaaggauuguaaaa

SEQ ID NO: 2445179 - RNA, 21 nt, Human
cuguggaggaaggauuguaaa

SEQ ID NO: 2445180 - RNA, 20 nt, Human
cuguggaggaaggauuguaa

SEQ ID NO: 2445181 - RNA, 19 nt, Human
cuguggaggaaggauugua

SEQ ID NO: 2445182 - RNA, 17 nt, Human
cuguggaggaaggauug

SEQ ID NO: 2445183 - RNA, 16 nt, Human
cuguggaggaaggauu

SEQ ID NO: 2445184 - RNA, 14 nt, Human
cuguggagacuggg

SEQ ID NO: 2445185 - RNA, 15 nt, Human
cuguggagcccgcac

SEQ ID NO: 2445186 - RNA, 22 nt, Human
cuguggagcccgcacccccacc

SEQ ID NO: 2445187 - RNA, 15 nt, Human
cuguggaggaaggau

SEQ ID NO: 2445188 - RNA, 14 nt, Human
cuguggaggaagga

SEQ ID NO: 2445189 - RNA, 23 nt, Human
cuguggagcccgcacccccaccc

SEQ ID NO: 2445190 - RNA, 20 nt, Human
cuguggccccacccugggcc

SEQ ID NO: 2445191 - RNA, 18 nt, Human
cuguggccccacccuggg

SEQ ID NO: 2445192 - RNA, 17 nt, Human
cuguggccccacccugg

SEQ ID NO: 2445193 - RNA, 16 nt, Human
cuguggccccacccug

SEQ ID NO: 2445194 - RNA, 21 nt, Human
cuguggccccacccugggccc

SEQ ID NO: 2445195 - RNA, 15 nt, Human
cuguggaugagcccu

SEQ ID NO: 2445196 - RNA, 17 nt, Human
cuguggaugagcccuca

SEQ ID NO: 2445197 - RNA, 15 nt, Human
cuguggaucagagau

SEQ ID NO: 2445198 - RNA, 22 nt, Human
cuguggagguacacucuuauag

SEQ ID NO: 2445199 - RNA, 16 nt, Human
cuguggucacagcgga

SEQ ID NO: 2445200 - RNA, 22 nt, Human
cugugguccugaauucuuuccc

SEQ ID NO: 2445201 - RNA, 22 nt, Human
cuguggguuucuaaagcugcca

SEQ ID NO: 2445202 - RNA, 15 nt, Human
cugugggugacccag

SEQ ID NO: 2445203 - RNA, 23 nt, Human
cugugguaguacuccugcaaaau

SEQ ID NO: 2445204 - RNA, 15 nt, Human
cuguggugugucccc

SEQ ID NO: 2445205 - RNA, 22 nt, Human
cuguggugugucccccucuguc

SEQ ID NO: 2445206 - RNA, 14 nt, Human
cugugguguguccc

SEQ ID NO: 2445207 - RNA, 23 nt, Human
cuguggugcaaaagcagaaaaua

SEQ ID NO: 2445208 - RNA, 22 nt, Human
cuguggugcaaaagcagaaaau

SEQ ID NO: 2445209 - RNA, 22 nt, Human
cugugggaucccucugggcacu

SEQ ID NO: 2445210 - RNA, 14 nt, Human
cugugggaugggau

SEQ ID NO: 2445211 - RNA, 24 nt, Human
cugugggggugagggucccaugug

SEQ ID NO: 2445212 - RNA, 23 nt, Human
cugugggggugagggucccaugu

SEQ ID NO: 2445213 - RNA, 22 nt, Human
cugugggcacgcugugggcagg

SEQ ID NO: 2445214 - RNA, 20 nt, Human
cugugggcaggugggagcuu

SEQ ID NO: 2445215 - RNA, 21 nt, Human
cuguggguuucuaaagcugcc

SEQ ID NO: 2445216 - RNA, 15 nt, Human
cuguggguaguauga

SEQ ID NO: 2445217 - RNA, 23 nt, Human
cuguggggugugcacaucucugc

SEQ ID NO: 2445218 - RNA, 22 nt, Human
cugugggugaagacagagggaa

SEQ ID NO: 2445219 - RNA, 20 nt, Human
cuguggccguuaucuggaag

SEQ ID NO: 2445220 - RNA, 19 nt, Human
cuguggccguuaucuggaa

SEQ ID NO: 2445221 - RNA, 21 nt, Human
cuguggccguuaucuggaagu

SEQ ID NO: 2445222 - RNA, 11 nt, Human
cuguggccugg

SEQ ID NO: 2445223 - RNA, 22 nt, Human
cuguggcuucuuaaucuuuuca

SEQ ID NO: 2445224 - RNA, 19 nt, Human
cuguggcuuucagccucug

SEQ ID NO: 2445225 - RNA, 18 nt, Human
cuguggcuuucagccucu

SEQ ID NO: 2445226 - RNA, 14 nt, Human
cugugggagccugc

SEQ ID NO: 2445227 - RNA, 16 nt, Human
cugugggaaggccagc

SEQ ID NO: 2445228 - RNA, 15 nt, Human
cugugggaaggccag

SEQ ID NO: 2445229 - RNA, 18 nt, Human
cugugggaaggccagcug

SEQ ID NO: 2445230 - RNA, 20 nt, Human
cugugggaaggccagcugcc

SEQ ID NO: 2445231 - RNA, 23 nt, Human
cugugggaacgagaggggaagag

SEQ ID NO: 2445232 - RNA, 21 nt, Human
cugugggaacgagaggggaag

SEQ ID NO: 2445233 - RNA, 20 nt, Human
cugugggaacgagaggggaa

SEQ ID NO: 2445234 - RNA, 18 nt, Human
cugggcuggcucccucuu

SEQ ID NO: 2445235 - RNA, 16 nt, Human
cugggcuggcucccuc

SEQ ID NO: 2445236 - RNA, 12 nt, Human
cugggcuggcuc

SEQ ID NO: 2445237 - RNA, 17 nt, Human
cugggcugccaugugaa

SEQ ID NO: 2445238 - RNA, 20 nt, Human
cugggcugccaugugaagag

SEQ ID NO: 2445239 - RNA, 19 nt, Human
cugggcugcuacccagaaa

SEQ ID NO: 2445240 - RNA, 18 nt, Human
cugggcugggugcgaccc

SEQ ID NO: 2445241 - RNA, 12 nt, Human
cugggcugggug

SEQ ID NO: 2445242 - RNA, 20 nt, Human
cugggcuggggccugauggg

SEQ ID NO: 2445243 - RNA, 18 nt, Human
cugggcuggggccugaug

SEQ ID NO: 2445244 - RNA, 15 nt, Human
cugggcuggggccug

SEQ ID NO: 2445245 - RNA, 12 nt, Human
cugggcugugcu

SEQ ID NO: 2445246 - RNA, 22 nt, Human
cugggcugggugcgaccccauc

SEQ ID NO: 2445247 - RNA, 21 nt, Human
cugggcugguggcucccggag

SEQ ID NO: 2445248 - RNA, 13 nt, Human
cugggcuguuggc

SEQ ID NO: 2445249 - RNA, 13 nt, Human
cugggcugugcua

SEQ ID NO: 2445250 - RNA, 15 nt, Human
cugggcuguuggcac

SEQ ID NO: 2445251 - RNA, 14 nt, Human
cugggcuguuggca

SEQ ID NO: 2445252 - RNA, 15 nt, Human
cugggcuucaguggc

SEQ ID NO: 2445253 - RNA, 22 nt, Human
cugggcuuggggaccagagcug

SEQ ID NO: 2445254 - RNA, 18 nt, Human
cugggcuugucuguagau

SEQ ID NO: 2445255 - RNA, 14 nt, Human
cugggggcugggca

SEQ ID NO: 2445256 - RNA, 18 nt, Human
cugggggcugggcagagg

SEQ ID NO: 2445257 - RNA, 15 nt, Human
cugggggugccagga

SEQ ID NO: 2445258 - RNA, 19 nt, Human
cugggggugccaggaccag

SEQ ID NO: 2445259 - RNA, 14 nt, Human
cugggggugggcca

SEQ ID NO: 2445260 - RNA, 15 nt, Human
cugggggugggccag

SEQ ID NO: 2445261 - RNA, 16 nt, Human
cugggggugggccagg

SEQ ID NO: 2445262 - RNA, 14 nt, Human
cugggggugccagg

SEQ ID NO: 2445263 - RNA, 16 nt, Human
cugggggccucuucug

SEQ ID NO: 2445264 - RNA, 23 nt, Human
cugggcuuuuuuuuucucuuucu

SEQ ID NO: 2445265 - RNA, 20 nt, Human
cugggcuuggggcuuccuaa

SEQ ID NO: 2445266 - RNA, 19 nt, Human
cugggcuuggggcuuccua

SEQ ID NO: 2445267 - RNA, 22 nt, Human
cuggguuuggaccccagcuggg

SEQ ID NO: 2445268 - RNA, 21 nt, Human
cuggguuuggaccccagcugg

SEQ ID NO: 2445269 - RNA, 20 nt, Human
cuggguuuggaccccagcug

SEQ ID NO: 2445270 - RNA, 19 nt, Human
cuggguccuuuucagaagu

SEQ ID NO: 2445271 - RNA, 19 nt, Human
cuggguuuggaccccagcu

SEQ ID NO: 2445272 - RNA, 15 nt, Human
cugggucgcccugga

SEQ ID NO: 2445273 - RNA, 22 nt, Human
cuggguuuuguauucucugagc

SEQ ID NO: 2445274 - RNA, 20 nt, Human
cuggguuuuguauucucuga

SEQ ID NO: 2445275 - RNA, 23 nt, Human
cuggguuuggaccccagcuggga

SEQ ID NO: 2445276 - RNA, 20 nt, Human
cuggguuuucuuaaccaucu

SEQ ID NO: 2445277 - RNA, 19 nt, Human
cugguaaacuauuugucuu

SEQ ID NO: 2445278 - RNA, 16 nt, Human
cugguaaacuauuugu

SEQ ID NO: 2445279 - RNA, 18 nt, Human
cugguaacaguucauguu

SEQ ID NO: 2445280 - RNA, 19 nt, Human
cugguauauccaaaagcuu

SEQ ID NO: 2445281 - RNA, 20 nt, Human
cugguauauccaaaagcuuu

SEQ ID NO: 2445282 - RNA, 18 nt, Human
cugguauauccaaaagcu

SEQ ID NO: 2445283 - RNA, 15 nt, Human
cugguaaucuugcuc

SEQ ID NO: 2445284 - RNA, 19 nt, Human
cugguaauauugacuugua

SEQ ID NO: 2445285 - RNA, 15 nt, Human
cugguaauauugacu

SEQ ID NO: 2445286 - RNA, 17 nt, Human
cugguaauuuguaucug

SEQ ID NO: 2445287 - RNA, 13 nt, Human
cugggucgcccug

SEQ ID NO: 2445288 - RNA, 23 nt, Human
cuggguccuugcaccccucacuc

SEQ ID NO: 2445289 - RNA, 18 nt, Human
cuggguccuugcaccccu

SEQ ID NO: 2445290 - RNA, 21 nt, Human
cuggguccaggggaugggagg

SEQ ID NO: 2445291 - RNA, 22 nt, Human
cuggguccaggggaugggaggu

SEQ ID NO: 2445292 - RNA, 17 nt, Human
cugggguucagccccuc

SEQ ID NO: 2445293 - RNA, 19 nt, Human
cugggguucagccccuccu

SEQ ID NO: 2445294 - RNA, 20 nt, Human
cugggguucagccccuccuc

SEQ ID NO: 2445295 - RNA, 21 nt, Human
cugggguucagccccuccucu

SEQ ID NO: 2445296 - RNA, 23 nt, Human
cugggguucagccccuccucugc

SEQ ID NO: 2445297 - RNA, 16 nt, Human
cuggguaaaugcagcg

SEQ ID NO: 2445298 - RNA, 22 nt, Human
cugggguucagccccuccucug

SEQ ID NO: 2445299 - RNA, 20 nt, Human
cugggguggggucaugcccu

SEQ ID NO: 2445300 - RNA, 13 nt, Human
cuggggugggguc

SEQ ID NO: 2445301 - RNA, 14 nt, Human
cuggggugggguca

SEQ ID NO: 2445302 - RNA, 16 nt, Human
cuggggugugggaggc

SEQ ID NO: 2445303 - RNA, 19 nt, Human
cuggggugugggaggcccg

SEQ ID NO: 2445304 - RNA, 13 nt, Human
cugggguucagcc

SEQ ID NO: 2445305 - RNA, 15 nt, Human
cugggguucagcccc

SEQ ID NO: 2445306 - RNA, 23 nt, Human
cuggggguucuuucuuccucugc

SEQ ID NO: 2445307 - RNA, 20 nt, Human
cuggggguucuuucuuccuc

SEQ ID NO: 2445308 - RNA, 16 nt, Human
cugggguaccaagaga

SEQ ID NO: 2445309 - RNA, 17 nt, Human
cugggggugggccaggc

SEQ ID NO: 2445310 - RNA, 21 nt, Human
cugggguaccaagagacuccu

SEQ ID NO: 2445311 - RNA, 16 nt, Human
cuggggguugcggggg

SEQ ID NO: 2445312 - RNA, 20 nt, Human
cugggguggggauagggagc

SEQ ID NO: 2445313 - RNA, 23 nt, Human
cugggccccugccucucugcagg

SEQ ID NO: 2445314 - RNA, 20 nt, Human
cugggccccugccucucugc

SEQ ID NO: 2445315 - RNA, 13 nt, Human
cugggcccucucu

SEQ ID NO: 2445316 - RNA, 14 nt, Human
cugggcccucucug

SEQ ID NO: 2445317 - RNA, 15 nt, Human
cugggcccucucugc

SEQ ID NO: 2445318 - RNA, 18 nt, Human
cugggcccucucugcucu

SEQ ID NO: 2445319 - RNA, 21 nt, Human
cugggcaaggaggccacguga

SEQ ID NO: 2445320 - RNA, 15 nt, Human
cugggcaaggaggcc

SEQ ID NO: 2445321 - RNA, 19 nt, Human
cugggccccugccucucug

SEQ ID NO: 2445322 - RNA, 17 nt, Human
cugggauuuacacuuga

SEQ ID NO: 2445323 - RNA, 15 nt, Human
cugggcaaagccuag

SEQ ID NO: 2445324 - RNA, 15 nt, Human
cugggcaacagagca

SEQ ID NO: 2445325 - RNA, 18 nt, Human
cugggcaacagagcaaga

SEQ ID NO: 2445326 - RNA, 23 nt, Human
cugggauucuacuuuaagcacua

SEQ ID NO: 2445327 - RNA, 22 nt, Human
cugggauucuacuuuaagcacu

SEQ ID NO: 2445328 - RNA, 21 nt, Human
cugggauucuacuuuaagcac

SEQ ID NO: 2445329 - RNA, 18 nt, Human
cugggauucuacuuuaag

SEQ ID NO: 2445330 - RNA, 20 nt, Human
cugggauucccaccaagguc

SEQ ID NO: 2445331 - RNA, 17 nt, Human
cugggauucuacuuuaa

SEQ ID NO: 2445332 - RNA, 15 nt, Human
cugggauucccacca

SEQ ID NO: 2445333 - RNA, 15 nt, Human
cugggaugggccugc

SEQ ID NO: 2445334 - RNA, 17 nt, Human
cugggauucccaccaag

SEQ ID NO: 2445335 - RNA, 14 nt, Human
cugggauuccuccc

SEQ ID NO: 2445336 - RNA, 12 nt, Human
cugcuccacccu

SEQ ID NO: 2445337 - RNA, 13 nt, Human
cugcuccacccuu

SEQ ID NO: 2445338 - RNA, 14 nt, Human
cugcuccacccuug

SEQ ID NO: 2445339 - RNA, 15 nt, Human
cugcuccacccuugg

SEQ ID NO: 2445340 - RNA, 16 nt, Human
cugcuccacccuuggc

SEQ ID NO: 2445341 - RNA, 17 nt, Human
cugcuccacccuuggcc

SEQ ID NO: 2445342 - RNA, 18 nt, Human
cugcuccacccuuggccu

SEQ ID NO: 2445343 - RNA, 19 nt, Human
cugcuccacccuuggccug

SEQ ID NO: 2445344 - RNA, 11 nt, Human
cugcuccacca

SEQ ID NO: 2445345 - RNA, 13 nt, Human
cugcuccaccaca

SEQ ID NO: 2445346 - RNA, 16 nt, Human
cugcuccaccacaucc

SEQ ID NO: 2445347 - RNA, 11 nt, Human
cugcuccaccc

SEQ ID NO: 2445348 - RNA, 16 nt, Human
cugcuccacaguguug

SEQ ID NO: 2445349 - RNA, 14 nt, Human
cugcuccacagugu

SEQ ID NO: 2445350 - RNA, 13 nt, Human
cugcuccacagug

SEQ ID NO: 2445351 - RNA, 12 nt, Human
cugcuccacagu

SEQ ID NO: 2445352 - RNA, 19 nt, Human
cugcuccacagccauccca

SEQ ID NO: 2445353 - RNA, 22 nt, Human
cugggaugggccugcuuccugu

SEQ ID NO: 2445354 - RNA, 20 nt, Human
cugcuccacccuuggccugu

SEQ ID NO: 2445355 - RNA, 21 nt, Human
cugcuccacccuuggccuguc

SEQ ID NO: 2445356 - RNA, 16 nt, Human
cugggaugggccugcu

SEQ ID NO: 2445357 - RNA, 21 nt, Human
cugcuccacaguguuggcgag

SEQ ID NO: 2445358 - RNA, 14 nt, Human
cugggauguccaca

SEQ ID NO: 2445359 - RNA, 21 nt, Human
cugggauguccacagaugccu

SEQ ID NO: 2445360 - RNA, 20 nt, Human
cugggauguggcugcagcag

SEQ ID NO: 2445361 - RNA, 15 nt, Human
cugggauguggcugc

SEQ ID NO: 2445362 - RNA, 14 nt, Human
cugggauguuucug

SEQ ID NO: 2445363 - RNA, 21 nt, Human
cugggauuacaagcgugagcc

SEQ ID NO: 2445364 - RNA, 18 nt, Human
cugggauuacaggcguga

SEQ ID NO: 2445365 - RNA, 20 nt, Human
cugggauuacaggcaugagc

SEQ ID NO: 2445366 - RNA, 22 nt, Human
cugggauguggcugcagcagcg

SEQ ID NO: 2445367 - RNA, 19 nt, Human
cugggauguuucugucaca

SEQ ID NO: 2445368 - RNA, 19 nt, Human
cugggcugagccccuaccc

SEQ ID NO: 2445369 - RNA, 18 nt, Human
cugggcugagccccuacc

SEQ ID NO: 2445370 - RNA, 17 nt, Human
cugggcugagccccuac

SEQ ID NO: 2445371 - RNA, 15 nt, Human
cugggcugagccccu

SEQ ID NO: 2445372 - RNA, 12 nt, Human
cugggcugaggg

SEQ ID NO: 2445373 - RNA, 13 nt, Human
cugggcugaggga

SEQ ID NO: 2445374 - RNA, 16 nt, Human
cugggcugagggagcc

SEQ ID NO: 2445375 - RNA, 18 nt, Human
cugggcugagggagccug

SEQ ID NO: 2445376 - RNA, 19 nt, Human
cugggcugagggagccugg

SEQ ID NO: 2445377 - RNA, 23 nt, Human
cugggcugagggagccuggcccc

SEQ ID NO: 2445378 - RNA, 18 nt, Human
cugggcucugugggcugc

SEQ ID NO: 2445379 - RNA, 16 nt, Human
cugggcucugugggcu

SEQ ID NO: 2445380 - RNA, 15 nt, Human
cugggcucugugggc

SEQ ID NO: 2445381 - RNA, 14 nt, Human
cugggcucuguggg

SEQ ID NO: 2445382 - RNA, 21 nt, Human
cugggcucugugggcugcacu

SEQ ID NO: 2445383 - RNA, 20 nt, Human
cugggcucugugggcugcac

SEQ ID NO: 2445384 - RNA, 18 nt, Human
cugggcugaacacuccaa

SEQ ID NO: 2445385 - RNA, 12 nt, Human
cugggcugacug

SEQ ID NO: 2445386 - RNA, 22 nt, Human
cugggcucugugggcugcacuc

SEQ ID NO: 2445387 - RNA, 15 nt, Human
cugggcugacuggga

SEQ ID NO: 2445388 - RNA, 14 nt, Human
cugggcugagcccc

SEQ ID NO: 2445389 - RNA, 13 nt, Human
cugggcugagccc

SEQ ID NO: 2445390 - RNA, 12 nt, Human
cugggcugagcc

SEQ ID NO: 2445391 - RNA, 13 nt, Human
cugggcugagaga

SEQ ID NO: 2445392 - RNA, 15 nt, Human
cugggcucugccacc

SEQ ID NO: 2445393 - RNA, 14 nt, Human
cugggcucugccac

SEQ ID NO: 2445394 - RNA, 13 nt, Human
cugggcucugcca

SEQ ID NO: 2445395 - RNA, 23 nt, Human
cugggcucugcaauuccccucug

SEQ ID NO: 2445396 - RNA, 22 nt, Human
cugggcucugcaauuccccucu

SEQ ID NO: 2445397 - RNA, 15 nt, Human
cugggcucuccaccu

SEQ ID NO: 2445398 - RNA, 16 nt, Human
cugggcucuccaccuc

SEQ ID NO: 2445399 - RNA, 17 nt, Human
cugggcucuccaccuca

SEQ ID NO: 2445400 - RNA, 18 nt, Human
cugggcucuccaccucag

SEQ ID NO: 2445401 - RNA, 19 nt, Human
cugggcucuccaccucagc

SEQ ID NO: 2445402 - RNA, 20 nt, Human
cugggcucuccaccucagcc

SEQ ID NO: 2445403 - RNA, 21 nt, Human
cugggcucuccaccucagccu

SEQ ID NO: 2445404 - RNA, 20 nt, Human
cugggcucugccacccuacc

SEQ ID NO: 2445405 - RNA, 17 nt, Human
cugggcucugccacccu

SEQ ID NO: 2445406 - RNA, 13 nt, Human
cugggcucugccc

SEQ ID NO: 2445407 - RNA, 17 nt, Human
cugggcucugccccagc

SEQ ID NO: 2445408 - RNA, 18 nt, Human
cugggcucugccccagcu

SEQ ID NO: 2445409 - RNA, 13 nt, Human
cugggcucugugg

SEQ ID NO: 2445410 - RNA, 16 nt, Human
cugggcucugggagca

SEQ ID NO: 2445411 - RNA, 18 nt, Human
cugggcucugggagcagc

SEQ ID NO: 2445412 - RNA, 15 nt, Human
cugggcucugggagc

SEQ ID NO: 2445413 - RNA, 21 nt, Human
cugggcucugccacccuaccu

SEQ ID NO: 2445414 - RNA, 23 nt, Human
cugggcucugccccagcucuggc

SEQ ID NO: 2445415 - RNA, 15 nt, Human
cugggcucggaggcu

SEQ ID NO: 2445416 - RNA, 13 nt, Human
cugggcucggagg

SEQ ID NO: 2445417 - RNA, 17 nt, Human
cugggcuccuccagggu

SEQ ID NO: 2445418 - RNA, 21 nt, Human
cugggcuccuaaccuuccugu

SEQ ID NO: 2445419 - RNA, 21 nt, Human
cugggcucggaggcugccccc

SEQ ID NO: 2445420 - RNA, 18 nt, Human
cugggcucggaggcugcc

SEQ ID NO: 2445421 - RNA, 17 nt, Human
cugggcucggaggcugc

SEQ ID NO: 2445422 - RNA, 16 nt, Human
cugggcucggaggcug

SEQ ID NO: 2445423 - RNA, 17 nt, Human
cugggcucgucuuugca

SEQ ID NO: 2445424 - RNA, 12 nt, Human
cugggcucucca

SEQ ID NO: 2445425 - RNA, 13 nt, Human
cugggcucuccac

SEQ ID NO: 2445426 - RNA, 14 nt, Human
cugggcucuccacc

SEQ ID NO: 2445427 - RNA, 14 nt, Human
cugggcuccuccag

SEQ ID NO: 2445428 - RNA, 15 nt, Human
cugggcuccuccagg

SEQ ID NO: 2445429 - RNA, 13 nt, Human
cugggccugcaga

SEQ ID NO: 2445430 - RNA, 22 nt, Human
cugggcccugacauuggagccu

SEQ ID NO: 2445431 - RNA, 18 nt, Human
cugguggcagugggagcu

SEQ ID NO: 2445432 - RNA, 14 nt, Human
cugguggcaguggg

SEQ ID NO: 2445433 - RNA, 20 nt, Human
cugguggcagcucaccucuc

SEQ ID NO: 2445434 - RNA, 15 nt, Human
cugguggcagcugcg

SEQ ID NO: 2445435 - RNA, 18 nt, Human
cugguggcagcucaccuc

SEQ ID NO: 2445436 - RNA, 17 nt, Human
cugguggcagcucaccu

SEQ ID NO: 2445437 - RNA, 17 nt, Human
cugguauuccugccucc

SEQ ID NO: 2445438 - RNA, 15 nt, Human
cugguauuccugccu

SEQ ID NO: 2445439 - RNA, 14 nt, Human
cugguauuccugcc

SEQ ID NO: 2445440 - RNA, 16 nt, Human
cugguggcagcucacc

SEQ ID NO: 2445441 - RNA, 12 nt, Human
cuggugguucac

SEQ ID NO: 2445442 - RNA, 20 nt, Human
cuggugguucacucuuggag

SEQ ID NO: 2445443 - RNA, 21 nt, Human
cuggugguucacucuuggagc

SEQ ID NO: 2445444 - RNA, 23 nt, Human
cuggugguucacucuuggagccu

SEQ ID NO: 2445445 - RNA, 20 nt, Human
cuggugguuucacggugcca

SEQ ID NO: 2445446 - RNA, 18 nt, Human
cuggugguuucacggugc

SEQ ID NO: 2445447 - RNA, 21 nt, Human
cuggugguuucacggugccag

SEQ ID NO: 2445448 - RNA, 15 nt, Human
cuggugguugcuguu

SEQ ID NO: 2445449 - RNA, 16 nt, Human
cuggugguuucacggu

SEQ ID NO: 2445450 - RNA, 20 nt, Human
cuggugguugcuguuuuccu

SEQ ID NO: 2445451 - RNA, 19 nt, Human
cugguguccugaccacccu

SEQ ID NO: 2445452 - RNA, 18 nt, Human
cugguguccugaccaccc

SEQ ID NO: 2445453 - RNA, 17 nt, Human
cugguguccugaccacc

SEQ ID NO: 2445454 - RNA, 16 nt, Human
cugguguccugaccac

SEQ ID NO: 2445455 - RNA, 15 nt, Human
cugguguccugacca

SEQ ID NO: 2445456 - RNA, 14 nt, Human
cugguguccugacc

SEQ ID NO: 2445457 - RNA, 13 nt, Human
cugguguccugac

SEQ ID NO: 2445458 - RNA, 18 nt, Human
cuggugucacuuacuguu

SEQ ID NO: 2445459 - RNA, 15 nt, Human
cuggugucacuuacu

SEQ ID NO: 2445460 - RNA, 12 nt, Human
cugguguccuga

SEQ ID NO: 2445461 - RNA, 22 nt, Human
cuguacagagcccacgccccca

SEQ ID NO: 2445462 - RNA, 18 nt, Human
cuguacagagcccacgcc

SEQ ID NO: 2445463 - RNA, 15 nt, Human
cuguacagagcccac

SEQ ID NO: 2445464 - RNA, 14 nt, Human
cuguacagagccca

SEQ ID NO: 2445465 - RNA, 14 nt, Human
cuguaauuugugau

SEQ ID NO: 2445466 - RNA, 15 nt, Human
cuguaauuugugaua

SEQ ID NO: 2445467 - RNA, 22 nt, Human
cuguaauuccuaccucccugca

SEQ ID NO: 2445468 - RNA, 16 nt, Human
cuguaauuccuaccuc

SEQ ID NO: 2445469 - RNA, 18 nt, Human
cuguaaucccagcuacuu

SEQ ID NO: 2445470 - RNA, 22 nt, Human
cuguaaucccagcuacucggga

SEQ ID NO: 2445471 - RNA, 15 nt, Human
cuguaaucccagcag

SEQ ID NO: 2445472 - RNA, 19 nt, Human
cuguaaucccagcuacuca

SEQ ID NO: 2445473 - RNA, 19 nt, Human
cuguaaucccagcuacucg

SEQ ID NO: 2445474 - RNA, 17 nt, Human
cuggugucugcuuucuc

SEQ ID NO: 2445475 - RNA, 22 nt, Human
cugguguccugaccacccuccc

SEQ ID NO: 2445476 - RNA, 21 nt, Human
cugguguccugaccacccucc

SEQ ID NO: 2445477 - RNA, 20 nt, Human
cugguguccugaccacccuc

SEQ ID NO: 2445478 - RNA, 23 nt, Human
cugguuaauauuuauaggucacu

SEQ ID NO: 2445479 - RNA, 21 nt, Human
cugguuagagguucccuuuga

SEQ ID NO: 2445480 - RNA, 22 nt, Human
cugguuagagguucccuuugac

SEQ ID NO: 2445481 - RNA, 14 nt, Human
cugguuagaaaugc

SEQ ID NO: 2445482 - RNA, 16 nt, Human
cuggugugaacuaaac

SEQ ID NO: 2445483 - RNA, 23 nt, Human
cugguuagaaaugcagaauccua

SEQ ID NO: 2445484 - RNA, 23 nt, Human
cuggugucugcuuucuccauugu

SEQ ID NO: 2445485 - RNA, 19 nt, Human
cuguaauccuagcacuuug

SEQ ID NO: 2445486 - RNA, 20 nt, Human
cuguaaucccagcacuuugg

SEQ ID NO: 2445487 - RNA, 19 nt, Human
cuguaaucccagcacuugg

SEQ ID NO: 2445488 - RNA, 16 nt, Human
cuguaaucccagcacu

SEQ ID NO: 2445489 - RNA, 20 nt, Human
cuguaaucccagcaugcuga

SEQ ID NO: 2445490 - RNA, 14 nt, Human
cuguaaucccagcu

SEQ ID NO: 2445491 - RNA, 13 nt, Human
cuguaaucccagc

SEQ ID NO: 2445492 - RNA, 14 nt, Human
cuguaaucccagca

SEQ ID NO: 2445493 - RNA, 17 nt, Human
cuguaaucccagcacuu

SEQ ID NO: 2445494 - RNA, 15 nt, Human
cuguaaucccagcac

SEQ ID NO: 2445495 - RNA, 21 nt, Human
cuguacuccucccaggcgccc

SEQ ID NO: 2445496 - RNA, 19 nt, Human
cuguacuccucccaggcgc

SEQ ID NO: 2445497 - RNA, 16 nt, Human
cuguacuccucccagg

SEQ ID NO: 2445498 - RNA, 15 nt, Human
cuguacuccucccag

SEQ ID NO: 2445499 - RNA, 18 nt, Human
cuguacucgcuugugcag

SEQ ID NO: 2445500 - RNA, 12 nt, Human
cuguaguuuuau

SEQ ID NO: 2445501 - RNA, 20 nt, Human
cuguaguugcguggacucug

SEQ ID NO: 2445502 - RNA, 17 nt, Human
cuguacucgcuugugca

SEQ ID NO: 2445503 - RNA, 21 nt, Human
cuguacuagagaucugguuuu

SEQ ID NO: 2445504 - RNA, 20 nt, Human
cuguacucaggaggcugagg

SEQ ID NO: 2445505 - RNA, 21 nt, Human
cuguaguuaggaaauaaaacc

SEQ ID NO: 2445506 - RNA, 22 nt, Human
cuguaguuaggaaauaaaaccu

SEQ ID NO: 2445507 - RNA, 20 nt, Human
cuguacgucugacaggcaau

SEQ ID NO: 2445508 - RNA, 19 nt, Human
cuguacgucugacaggcaa

SEQ ID NO: 2445509 - RNA, 14 nt, Human
cuguacuccuccca

SEQ ID NO: 2445510 - RNA, 17 nt, Human
cuguacuagagaucugg

SEQ ID NO: 2445511 - RNA, 13 nt, Human
cuguacuagagau

SEQ ID NO: 2445512 - RNA, 13 nt, Human
cuguacucaggag

SEQ ID NO: 2445513 - RNA, 23 nt, Human
cuguaccuuuugaggagccccag

SEQ ID NO: 2445514 - RNA, 17 nt, Human
cuguacauagccuauau

SEQ ID NO: 2445515 - RNA, 14 nt, Human
cuguacaucuauuu

SEQ ID NO: 2445516 - RNA, 20 nt, Human
cuguacauauuugagacuag

SEQ ID NO: 2445517 - RNA, 19 nt, Human
cuguacauagccuauauuu

SEQ ID NO: 2445518 - RNA, 19 nt, Human
cuguaauuuaguuauugau

SEQ ID NO: 2445519 - RNA, 16 nt, Human
cuguaauuuaguuauu

SEQ ID NO: 2445520 - RNA, 13 nt, Human
cuguaauuuaguu

SEQ ID NO: 2445521 - RNA, 16 nt, Human
cuguaauuguguguga

SEQ ID NO: 2445522 - RNA, 17 nt, Human
cuguacaugaaaacaca

SEQ ID NO: 2445523 - RNA, 20 nt, Human
cuguacaugaaaacacauuu

SEQ ID NO: 2445524 - RNA, 21 nt, Human
cuguacaugaaaacacauuuu

SEQ ID NO: 2445525 - RNA, 18 nt, Human
cuguacgucugacaggca

SEQ ID NO: 2445526 - RNA, 16 nt, Human
cuguacgucugacagg

SEQ ID NO: 2445527 - RNA, 15 nt, Human
cuguacgucugacag

SEQ ID NO: 2445528 - RNA, 14 nt, Human
cuguacgucugaca

SEQ ID NO: 2445529 - RNA, 23 nt, Human
cuguaguuuuaucacauguaugu

SEQ ID NO: 2445530 - RNA, 22 nt, Human
cuguaguuuuaucacauguaug

SEQ ID NO: 2445531 - RNA, 21 nt, Human
cuguaguuuuaucacauguau

SEQ ID NO: 2445532 - RNA, 17 nt, Human
cuguauaaaaucagcca

SEQ ID NO: 2445533 - RNA, 11 nt, Human
cuguauaaaau

SEQ ID NO: 2445534 - RNA, 19 nt, Human
cuguauaaaaucagccaau

SEQ ID NO: 2445535 - RNA, 13 nt, Human
cuguauaaauagg

SEQ ID NO: 2445536 - RNA, 20 nt, Human
cuguauaaauaggagaggau

SEQ ID NO: 2445537 - RNA, 19 nt, Human
cuguauaaauaggagagga

SEQ ID NO: 2445538 - RNA, 16 nt, Human
cuguauaaauaggaga

SEQ ID NO: 2445539 - RNA, 15 nt, Human
cuguauaaauaggag

SEQ ID NO: 2445540 - RNA, 14 nt, Human
cuguauaaauagga

SEQ ID NO: 2445541 - RNA, 20 nt, Human
cuguaucccaugagccucag

SEQ ID NO: 2445542 - RNA, 12 nt, Human
cuguauugaauc

SEQ ID NO: 2445543 - RNA, 21 nt, Human
cuguauucucaaacacaguua

SEQ ID NO: 2445544 - RNA, 18 nt, Human
cuguauucucaaacacag

SEQ ID NO: 2445545 - RNA, 13 nt, Human
cuguauucucaaa

SEQ ID NO: 2445546 - RNA, 19 nt, Human
cuguauuagucacagagau

SEQ ID NO: 2445547 - RNA, 17 nt, Human
cuguauuagucacagag

SEQ ID NO: 2445548 - RNA, 22 nt, Human
cuguaucccaugagccucagca

SEQ ID NO: 2445549 - RNA, 21 nt, Human
cuguaucccaugagccucagc

SEQ ID NO: 2445550 - RNA, 16 nt, Human
cugucaauuacaggaa

SEQ ID NO: 2445551 - RNA, 15 nt, Human
cugucaauuacagga

SEQ ID NO: 2445552 - RNA, 21 nt, Human
cugucaaaacaaguuuuucug

SEQ ID NO: 2445553 - RNA, 19 nt, Human
cugucaaaacaaguuuuuc

SEQ ID NO: 2445554 - RNA, 22 nt, Human
cuguauuuuuuuuucuaagaga

SEQ ID NO: 2445555 - RNA, 21 nt, Human
cuguauuuuuuuuucuaagag

SEQ ID NO: 2445556 - RNA, 18 nt, Human
cuguauuuuuuuuucuaa

SEQ ID NO: 2445557 - RNA, 13 nt, Human
cugucaauuacag

SEQ ID NO: 2445558 - RNA, 17 nt, Human
cugucaaaauaauuuua

SEQ ID NO: 2445559 - RNA, 16 nt, Human
cugucaaaauaauuuu

SEQ ID NO: 2445560 - RNA, 14 nt, Human
cugucaaacaaagc

SEQ ID NO: 2445561 - RNA, 17 nt, Human
cugucaaacaaagccag

SEQ ID NO: 2445562 - RNA, 20 nt, Human
cuguauugaaucauguagua

SEQ ID NO: 2445563 - RNA, 17 nt, Human
cuguauugaaucaugua

SEQ ID NO: 2445564 - RNA, 14 nt, Human
cuguauugaaucau

SEQ ID NO: 2445565 - RNA, 13 nt, Human
cuguauugaauca

SEQ ID NO: 2445566 - RNA, 15 nt, Human
cuguauugaugacag

SEQ ID NO: 2445567 - RNA, 21 nt, Human
cuguauugaaucauguaguau

SEQ ID NO: 2445568 - RNA, 15 nt, Human
cuguauuuaauuuug

SEQ ID NO: 2445569 - RNA, 14 nt, Human
cuguauuuaauuuu

SEQ ID NO: 2445570 - RNA, 23 nt, Human
cuguauuuuauuuagacaagaga

SEQ ID NO: 2445571 - RNA, 20 nt, Human
cuguauuuuguuuuugucuu

SEQ ID NO: 2445572 - RNA, 21 nt, Human
cuguauuuuuaccuuuuuccu

SEQ ID NO: 2445573 - RNA, 20 nt, Human
cuguauuuuguauuguuuca

SEQ ID NO: 2445574 - RNA, 14 nt, Human
cuuuauguguaaau

SEQ ID NO: 2445575 - RNA, 12 nt, Human
cuuuauguguaa

SEQ ID NO: 2445576 - RNA, 23 nt, Human
cuuuauguggaaaacagaacauc

SEQ ID NO: 2445577 - RNA, 18 nt, Human
cuuuauguggaaaacaga

SEQ ID NO: 2445578 - RNA, 12 nt, Human
cuuuauaaacuu

SEQ ID NO: 2445579 - RNA, 13 nt, Human
cuuuauaaauaaa

SEQ ID NO: 2445580 - RNA, 11 nt, Human
cuuuauaaaua

SEQ ID NO: 2445581 - RNA, 13 nt, Human
cuuuauaaacuuu

SEQ ID NO: 2445582 - RNA, 15 nt, Human
cuuuaguuuuuguga

SEQ ID NO: 2445583 - RNA, 13 nt, Human
cuuuaguuuuugu

SEQ ID NO: 2445584 - RNA, 20 nt, Human
cuuuauguuacuacaugcac

SEQ ID NO: 2445585 - RNA, 22 nt, Human
cuuuauguugcggugagaacuc

SEQ ID NO: 2445586 - RNA, 21 nt, Human
cuuuauuaaauacaaaacuuc

SEQ ID NO: 2445587 - RNA, 18 nt, Human
cuuuauuaaaaucuuaaa

SEQ ID NO: 2445588 - RNA, 13 nt, Human
cuuuauuaaaauc

SEQ ID NO: 2445589 - RNA, 20 nt, Human
cuuuauuaaucacuauuguu

SEQ ID NO: 2445590 - RNA, 14 nt, Human
cuuuauuacccccu

SEQ ID NO: 2445591 - RNA, 20 nt, Human
cuuuauuacccccuccuuca

SEQ ID NO: 2445592 - RNA, 22 nt, Human
cuuuauuacccccuccuucaga

SEQ ID NO: 2445593 - RNA, 15 nt, Human
cuuuauuaaucacua

SEQ ID NO: 2445594 - RNA, 20 nt, Human
cuuuauucuggcagaggagg

SEQ ID NO: 2445595 - RNA, 20 nt, Human
cuuuauuccagaaugcugua

SEQ ID NO: 2445596 - RNA, 16 nt, Human
cuuuauucaaguaaaa

SEQ ID NO: 2445597 - RNA, 21 nt, Human
cuuuauuuucuauaauuuaaa

SEQ ID NO: 2445598 - RNA, 11 nt, Human
cuuuauuuucu

SEQ ID NO: 2445599 - RNA, 21 nt, Human
cuuucagggggguugugaggc

SEQ ID NO: 2445600 - RNA, 12 nt, Human
cuuucagguacu

SEQ ID NO: 2445601 - RNA, 16 nt, Human
cuuuauuggcugagau

SEQ ID NO: 2445602 - RNA, 23 nt, Human
cuuuauuccagaaugcuguacau

SEQ ID NO: 2445603 - RNA, 16 nt, Human
cuuuauugagaaagag

SEQ ID NO: 2445604 - RNA, 15 nt, Human
cuuuauugagaaaga

SEQ ID NO: 2445605 - RNA, 13 nt, Human
cuuuauugagaaa

SEQ ID NO: 2445606 - RNA, 18 nt, Human
cuuuauuggcugagauau

SEQ ID NO: 2445607 - RNA, 18 nt, Human
cuuuauuguguuugucau

SEQ ID NO: 2445608 - RNA, 16 nt, Human
cuuuauuguguuuguc

SEQ ID NO: 2445609 - RNA, 20 nt, Human
cuuuauuguguuugucauua

SEQ ID NO: 2445610 - RNA, 19 nt, Human
cuuuauuguguuugucauu

SEQ ID NO: 2445611 - RNA, 23 nt, Human
cuuuauuguguuugucauuagcc

SEQ ID NO: 2445612 - RNA, 14 nt, Human
cuuuauugugaucu

SEQ ID NO: 2445613 - RNA, 18 nt, Human
cuuuccaaaugcccagcu

SEQ ID NO: 2445614 - RNA, 19 nt, Human
cuuuccaaaugcccagcuu

SEQ ID NO: 2445615 - RNA, 13 nt, Human
cuuuccacagaag

SEQ ID NO: 2445616 - RNA, 22 nt, Human
cuuuccaaaugcccagcuuaaa

SEQ ID NO: 2445617 - RNA, 23 nt, Human
cuuuccaccacagccagcaccug

SEQ ID NO: 2445618 - RNA, 22 nt, Human
cuuuccaccacagccagcaccu

SEQ ID NO: 2445619 - RNA, 21 nt, Human
cuuuccaccacagccagcacc

SEQ ID NO: 2445620 - RNA, 17 nt, Human
cuuuccaccacagccag

SEQ ID NO: 2445621 - RNA, 15 nt, Human
cuuuccaccacagcc

SEQ ID NO: 2445622 - RNA, 15 nt, Human
cuuuccaaggcuucu

SEQ ID NO: 2445623 - RNA, 16 nt, Human
cuuucccaacucuagc

SEQ ID NO: 2445624 - RNA, 17 nt, Human
cuuuccacccccucccu

SEQ ID NO: 2445625 - RNA, 20 nt, Human
cuuuccacccccucccuggc

SEQ ID NO: 2445626 - RNA, 21 nt, Human
cuuuccacaccuggcacugcu

SEQ ID NO: 2445627 - RNA, 14 nt, Human
cuuuccacccccuc

SEQ ID NO: 2445628 - RNA, 15 nt, Human
cuuuccacccccucc

SEQ ID NO: 2445629 - RNA, 16 nt, Human
cuuuccacccccuccc

SEQ ID NO: 2445630 - RNA, 19 nt, Human
cuuucauuuuuuuccaggc

SEQ ID NO: 2445631 - RNA, 16 nt, Human
cuuucauuuuuuucca

SEQ ID NO: 2445632 - RNA, 15 nt, Human
cuuucauuuuuuucc

SEQ ID NO: 2445633 - RNA, 22 nt, Human
cuuucauuuuuuuccaggcugg

SEQ ID NO: 2445634 - RNA, 20 nt, Human
cuuucauuuuuuuccaggcu

SEQ ID NO: 2445635 - RNA, 13 nt, Human
cuuucauuuucug

SEQ ID NO: 2445636 - RNA, 14 nt, Human
cuuucauuuucugu

SEQ ID NO: 2445637 - RNA, 17 nt, Human
cuuucauuuucuguuug

SEQ ID NO: 2445638 - RNA, 21 nt, Human
cuuucaucaaucauuguacag

SEQ ID NO: 2445639 - RNA, 20 nt, Human
cuuucaucaaucauuguaca

SEQ ID NO: 2445640 - RNA, 22 nt, Human
cuuucaucaaucauuguacagu

SEQ ID NO: 2445641 - RNA, 18 nt, Human
cuuucaucaaucauugua

SEQ ID NO: 2445642 - RNA, 14 nt, Human
cuuucauauuuuag

SEQ ID NO: 2445643 - RNA, 17 nt, Human
cuuucauuuacuguggc

SEQ ID NO: 2445644 - RNA, 18 nt, Human
cuuucauuuacuguggcu

SEQ ID NO: 2445645 - RNA, 18 nt, Human
cuuucauuucuugaggua

SEQ ID NO: 2445646 - RNA, 17 nt, Human
cuuucauacugaagaug

SEQ ID NO: 2445647 - RNA, 17 nt, Human
cuuucagugaaagcauc

SEQ ID NO: 2445648 - RNA, 15 nt, Human
cuuucagugaaagca

SEQ ID NO: 2445649 - RNA, 18 nt, Human
cuuucauaaucuuugcuu

SEQ ID NO: 2445650 - RNA, 17 nt, Human
cuuucauaaucuuugcu

SEQ ID NO: 2445651 - RNA, 18 nt, Human
cuuguguguuucacuuuu

SEQ ID NO: 2445652 - RNA, 17 nt, Human
cuuguguguuucacuuu

SEQ ID NO: 2445653 - RNA, 13 nt, Human
cuuguguguuuca

SEQ ID NO: 2445654 - RNA, 19 nt, Human
cuuguguuaaguaugugua

SEQ ID NO: 2445655 - RNA, 21 nt, Human
cuuguguguuuauugucaaag

SEQ ID NO: 2445656 - RNA, 19 nt, Human
cuuguuggagccugcaggg

SEQ ID NO: 2445657 - RNA, 18 nt, Human
cuuguuggagccugcagg

SEQ ID NO: 2445658 - RNA, 21 nt, Human
cuuguuggauuuuugucuugu

SEQ ID NO: 2445659 - RNA, 19 nt, Human
cuuguguguuuugagagua

SEQ ID NO: 2445660 - RNA, 19 nt, Human
cuuguguguuucacuuuua

SEQ ID NO: 2445661 - RNA, 15 nt, Human
cuuguuggagccugc

SEQ ID NO: 2445662 - RNA, 16 nt, Human
cuuguuguuuuacuaa

SEQ ID NO: 2445663 - RNA, 21 nt, Human
cuuguuguuuuacuaaagaaa

SEQ ID NO: 2445664 - RNA, 19 nt, Human
cuuguuguuuuacuaaaga

SEQ ID NO: 2445665 - RNA, 22 nt, Human
cuuguuuacagcacuacucugu

SEQ ID NO: 2445666 - RNA, 19 nt, Human
cuuguuuacagcacuacuc

SEQ ID NO: 2445667 - RNA, 14 nt, Human
cuuguuuucaguuu

SEQ ID NO: 2445668 - RNA, 13 nt, Human
cuuguuguuguua

SEQ ID NO: 2445669 - RNA, 22 nt, Human
cuuguugggauuccugacccag

SEQ ID NO: 2445670 - RNA, 21 nt, Human
cuuguugggauuccugaccca

SEQ ID NO: 2445671 - RNA, 20 nt, Human
cuuguugggauuccugaccc

SEQ ID NO: 2445672 - RNA, 18 nt, Human
cuuguugggauuccugac

SEQ ID NO: 2445673 - RNA, 23 nt, Human
cuuguuggauuuuugucuugugu

SEQ ID NO: 2445674 - RNA, 15 nt, Human
cuuguggacuaaaag

SEQ ID NO: 2445675 - RNA, 15 nt, Human
cuuguaaauacacca

SEQ ID NO: 2445676 - RNA, 12 nt, Human
cuuguaaauaca

SEQ ID NO: 2445677 - RNA, 19 nt, Human
cuuguggacuaaaagauau

SEQ ID NO: 2445678 - RNA, 18 nt, Human
cuuguggacuaaaagaua

SEQ ID NO: 2445679 - RNA, 17 nt, Human
cuuguggacuaaaagau

SEQ ID NO: 2445680 - RNA, 16 nt, Human
cuuguggacuaaaaga

SEQ ID NO: 2445681 - RNA, 23 nt, Human
cuugggggacagggcuggcccag

SEQ ID NO: 2445682 - RNA, 24 nt, Human
cuugggggaugacuagaggcaggg

SEQ ID NO: 2445683 - RNA, 12 nt, Human
cuuguaaauaaa

SEQ ID NO: 2445684 - RNA, 19 nt, Human
cuuguaaauaaagcccugg

SEQ ID NO: 2445685 - RNA, 17 nt, Human
cuuguaaauaaagcccu

SEQ ID NO: 2445686 - RNA, 16 nt, Human
cuuguaaauaaagccc

SEQ ID NO: 2445687 - RNA, 15 nt, Human
cuuguaaauaaagcc

SEQ ID NO: 2445688 - RNA, 20 nt, Human
cuuguguguuuauugucaaa

SEQ ID NO: 2445689 - RNA, 16 nt, Human
cuuguggauguuuuaa

SEQ ID NO: 2445690 - RNA, 15 nt, Human
cuuguggauguuuua

SEQ ID NO: 2445691 - RNA, 19 nt, Human
cuuguggagccccacacug

SEQ ID NO: 2445692 - RNA, 16 nt, Human
cuuguggagccccaca

SEQ ID NO: 2445693 - RNA, 14 nt, Human
cuuguggagcccca

SEQ ID NO: 2445694 - RNA, 13 nt, Human
cuuguggagcccc

SEQ ID NO: 2445695 - RNA, 12 nt, Human
cuuguggagccc

SEQ ID NO: 2445696 - RNA, 13 nt, Human
cuuguaaauacac

SEQ ID NO: 2445697 - RNA, 22 nt, Human
cuuguggauguuuuaauuccau

SEQ ID NO: 2445698 - RNA, 14 nt, Human
cuuguggccuggga

SEQ ID NO: 2445699 - RNA, 22 nt, Human
cuuuaaacucagggacagagcc

SEQ ID NO: 2445700 - RNA, 19 nt, Human
cuuuaaacucagggacaga

SEQ ID NO: 2445701 - RNA, 16 nt, Human
cuuuaaacucagggac

SEQ ID NO: 2445702 - RNA, 15 nt, Human
cuuuaaacucaggga

SEQ ID NO: 2445703 - RNA, 13 nt, Human
cuuuaaacucagg

SEQ ID NO: 2445704 - RNA, 21 nt, Human
cuuguuuuuuuuuuccacuua

SEQ ID NO: 2445705 - RNA, 20 nt, Human
cuuguuuuuuuuuuccacuu

SEQ ID NO: 2445706 - RNA, 19 nt, Human
cuuguuuuuuuuuuccacu

SEQ ID NO: 2445707 - RNA, 16 nt, Human
cuuguuuuugcacaug

SEQ ID NO: 2445708 - RNA, 12 nt, Human
cuuguuuuugca

SEQ ID NO: 2445709 - RNA, 18 nt, Human
cuuguuuuuccacuacug

SEQ ID NO: 2445710 - RNA, 14 nt, Human
cuuguuuucuggga

SEQ ID NO: 2445711 - RNA, 14 nt, Human
cuuguuuucuugcc

SEQ ID NO: 2445712 - RNA, 17 nt, Human
cuuguuuucuugccaau

SEQ ID NO: 2445713 - RNA, 18 nt, Human
cuuguuuucuugccaaug

SEQ ID NO: 2445714 - RNA, 18 nt, Human
cuuuaaagggauggcaag

SEQ ID NO: 2445715 - RNA, 21 nt, Human
cuuuaaaggaaaaaauguugg

SEQ ID NO: 2445716 - RNA, 13 nt, Human
cuuuaaaggaaaa

SEQ ID NO: 2445717 - RNA, 19 nt, Human
cuuuaaaggaaaaaauguu

SEQ ID NO: 2445718 - RNA, 12 nt, Human
cuuuacuguuug

SEQ ID NO: 2445719 - RNA, 18 nt, Human
cuuuaaaggaaaaaaugu

SEQ ID NO: 2445720 - RNA, 14 nt, Human
cuuuaaaggaaaaa

SEQ ID NO: 2445721 - RNA, 20 nt, Human
cuuuaaagggauggcaagau

SEQ ID NO: 2445722 - RNA, 14 nt, Human
cuuuacuguuuguu

SEQ ID NO: 2445723 - RNA, 15 nt, Human
cuuuacuguuuguua

SEQ ID NO: 2445724 - RNA, 17 nt, Human
cuuuagugguggccauu

SEQ ID NO: 2445725 - RNA, 14 nt, Human
cuuuaguggcuuca

SEQ ID NO: 2445726 - RNA, 20 nt, Human
cuuuagugaucacagcagcu

SEQ ID NO: 2445727 - RNA, 20 nt, Human
cuuuagugaacguggacucc

SEQ ID NO: 2445728 - RNA, 15 nt, Human
cuuuagucugcaaaa

SEQ ID NO: 2445729 - RNA, 14 nt, Human
cuuuagucugcaaa

SEQ ID NO: 2445730 - RNA, 14 nt, Human
cuuuacuuuuaaac

SEQ ID NO: 2445731 - RNA, 19 nt, Human
cuuguaaaggaauuuaaaa

SEQ ID NO: 2445732 - RNA, 16 nt, Human
cuuggggggcugaggu

SEQ ID NO: 2445733 - RNA, 22 nt, Human
cuuggggggcugaggugggagg

SEQ ID NO: 2445734 - RNA, 22 nt, Human
cuuggggaccagagcugccacc

SEQ ID NO: 2445735 - RNA, 18 nt, Human
cuuggggaauuuccucua

SEQ ID NO: 2445736 - RNA, 17 nt, Human
cuuggggaauuuccucu

SEQ ID NO: 2445737 - RNA, 15 nt, Human
cuuggggacaucucu

SEQ ID NO: 2445738 - RNA, 19 nt, Human
cuuggggaguuaagaccug

SEQ ID NO: 2445739 - RNA, 20 nt, Human
cuuggggaguuaagaccugg

SEQ ID NO: 2445740 - RNA, 22 nt, Human
cuugggggacagggcuggccca

SEQ ID NO: 2445741 - RNA, 21 nt, Human
cuugggggacagggcuggccc

SEQ ID NO: 2445742 - RNA, 18 nt, Human
cuugggggacagggcugg

SEQ ID NO: 2445743 - RNA, 15 nt, Human
cuuggggggcugagg

SEQ ID NO: 2445744 - RNA, 13 nt, Human
cuugggcuucauc

SEQ ID NO: 2445745 - RNA, 23 nt, Human
cuugggcagagcuggcucugagc

SEQ ID NO: 2445746 - RNA, 22 nt, Human
cuugggcagagcuggcucugag

SEQ ID NO: 2445747 - RNA, 19 nt, Human
cuugggaggaagcagaaua

SEQ ID NO: 2445748 - RNA, 14 nt, Human
cuugggccacugug

SEQ ID NO: 2445749 - RNA, 21 nt, Human
cuuggggaccagagcugccac

SEQ ID NO: 2445750 - RNA, 20 nt, Human
cuuggggaccagagcugcca

SEQ ID NO: 2445751 - RNA, 22 nt, Human
cuugggcuucauccuccucaga

SEQ ID NO: 2445752 - RNA, 20 nt, Human
cuuggggacaggggcaggag

SEQ ID NO: 2445753 - RNA, 19 nt, Human
cuugggcuuccauuugugu

SEQ ID NO: 2445754 - RNA, 23 nt, Human
cuugggcuuccauuugugugugu

SEQ ID NO: 2445755 - RNA, 16 nt, Human
cuuggggaauuuccuc

SEQ ID NO: 2445756 - RNA, 18 nt, Human
cuuggggaacaagggugg

SEQ ID NO: 2445757 - RNA, 12 nt, Human
cuuggagggcau

SEQ ID NO: 2445758 - RNA, 23 nt, Human
cuuggagggcaugaagacagaua

SEQ ID NO: 2445759 - RNA, 22 nt, Human
cuuggaggaaggaaacccagcu

SEQ ID NO: 2445760 - RNA, 15 nt, Human
cuuggagcugagccu

SEQ ID NO: 2445761 - RNA, 18 nt, Human
cuuggagcugagccucuc

SEQ ID NO: 2445762 - RNA, 21 nt, Human
cuuggagcugagccucucacc

SEQ ID NO: 2445763 - RNA, 15 nt, Human
cuuggaggccagcca

SEQ ID NO: 2445764 - RNA, 19 nt, Human
cuuggaggguugguccucu

SEQ ID NO: 2445765 - RNA, 18 nt, Human
cuuggaggguugguccuc

SEQ ID NO: 2445766 - RNA, 23 nt, Human
cuuggagggucccaagcugggcc

SEQ ID NO: 2445767 - RNA, 22 nt, Human
cuuggagggucccaagcugggc

SEQ ID NO: 2445768 - RNA, 21 nt, Human
cuuggagggucccaagcuggg

SEQ ID NO: 2445769 - RNA, 19 nt, Human
cuuggagggucccaagcug

SEQ ID NO: 2445770 - RNA, 18 nt, Human
cuuggagggucccaagcu

SEQ ID NO: 2445771 - RNA, 17 nt, Human
cuuggagggucccaagc

SEQ ID NO: 2445772 - RNA, 14 nt, Human
cuuggagggaccaa

SEQ ID NO: 2445773 - RNA, 15 nt, Human
cuuggaggcugucuu

SEQ ID NO: 2445774 - RNA, 15 nt, Human
cuuggagggucccaa

SEQ ID NO: 2445775 - RNA, 16 nt, Human
cuuggcugcagggagu

SEQ ID NO: 2445776 - RNA, 17 nt, Human
cuuggagguagcuuuga

SEQ ID NO: 2445777 - RNA, 18 nt, Human
cuuggaguauuggggucu

SEQ ID NO: 2445778 - RNA, 24 nt, Human
cuuggaggguugguccucuugccu

SEQ ID NO: 2445779 - RNA, 22 nt, Human
cuugggaagcugaggcgggaga

SEQ ID NO: 2445780 - RNA, 10 nt, Human
cuugggaaug

SEQ ID NO: 2445781 - RNA, 18 nt, Human
cuugggaauggauccugg

SEQ ID NO: 2445782 - RNA, 23 nt, Human
cuugggaccgccagauggggccu

SEQ ID NO: 2445783 - RNA, 17 nt, Human
cuugggacuggguuugg

SEQ ID NO: 2445784 - RNA, 15 nt, Human
cuugggacuggguuu

SEQ ID NO: 2445785 - RNA, 20 nt, Human
cuugggcagagcuggcucug

SEQ ID NO: 2445786 - RNA, 19 nt, Human
cuugggcagagcuggcucu

SEQ ID NO: 2445787 - RNA, 18 nt, Human
cuugggcagagcuggcuc

SEQ ID NO: 2445788 - RNA, 15 nt, Human
cuugggcagagcugg

SEQ ID NO: 2445789 - RNA, 18 nt, Human
cuugggaggaagcagaau

SEQ ID NO: 2445790 - RNA, 17 nt, Human
cuugggaggaagcagaa

SEQ ID NO: 2445791 - RNA, 14 nt, Human
cuugggcagagcug

SEQ ID NO: 2445792 - RNA, 16 nt, Human
cuugggaggaagcaga

SEQ ID NO: 2445793 - RNA, 15 nt, Human
cuugggaggaagcag

SEQ ID NO: 2445794 - RNA, 14 nt, Human
cuugggaggaagca

SEQ ID NO: 2445795 - RNA, 17 nt, Human
cuuggcugcagggaguc

SEQ ID NO: 2445796 - RNA, 17 nt, Human
cuuggcugcuuggccuu

SEQ ID NO: 2445797 - RNA, 14 nt, Human
cuuggcugcuuggc

SEQ ID NO: 2445798 - RNA, 14 nt, Human
cuuggcugcaggga

SEQ ID NO: 2445799 - RNA, 15 nt, Human
cuuggcuuucauguu

SEQ ID NO: 2445800 - RNA, 14 nt, Human
cuuggcuuucaugu

SEQ ID NO: 2445801 - RNA, 19 nt, Human
cuugggaaauaugaaugcc

SEQ ID NO: 2445802 - RNA, 12 nt, Human
cuugggaaauau

SEQ ID NO: 2445803 - RNA, 11 nt, Human
cuugggaaaua

SEQ ID NO: 2445804 - RNA, 22 nt, Human
cuuggcuuucauuauuaguacu

SEQ ID NO: 2445805 - RNA, 20 nt, Human
cuuggcuuuuacugaagccu

SEQ ID NO: 2445806 - RNA, 16 nt, Human
cuugccagagauccaa

SEQ ID NO: 2445807 - RNA, 23 nt, Human
cuugccagagauccaaaagaagc

SEQ ID NO: 2445808 - RNA, 15 nt, Human
cuugccacugccucu

SEQ ID NO: 2445809 - RNA, 14 nt, Human
cuugccacugccuc

SEQ ID NO: 2445810 - RNA, 11 nt, Human
cuugccagaga

SEQ ID NO: 2445811 - RNA, 12 nt, Human
cuugccagagau

SEQ ID NO: 2445812 - RNA, 16 nt, Human
cuugccagacaugugg

SEQ ID NO: 2445813 - RNA, 18 nt, Human
cuucucauuucaccccuc

SEQ ID NO: 2445814 - RNA, 13 nt, Human
cuugccacugccu

SEQ ID NO: 2445815 - RNA, 21 nt, Human
cuucuccacccugcucuccga

SEQ ID NO: 2445816 - RNA, 18 nt, Human
cuucuccacccugcucuc

SEQ ID NO: 2445817 - RNA, 17 nt, Human
cuucuccacccugcucu

SEQ ID NO: 2445818 - RNA, 15 nt, Human
cuugcccaccccacc

SEQ ID NO: 2445819 - RNA, 14 nt, Human
cuugcccaccccac

SEQ ID NO: 2445820 - RNA, 14 nt, Human
cuugcccacaccga

SEQ ID NO: 2445821 - RNA, 22 nt, Human
cuugcccaccccacccccaccc

SEQ ID NO: 2445822 - RNA, 13 nt, Human
cuugcccagagau

SEQ ID NO: 2445823 - RNA, 19 nt, Human
cuugcccagagaugccucc

SEQ ID NO: 2445824 - RNA, 21 nt, Human
cuugcccagagaugccuccac

SEQ ID NO: 2445825 - RNA, 19 nt, Human
cuugccccccaccccagcc

SEQ ID NO: 2445826 - RNA, 13 nt, Human
cuugccccccacc

SEQ ID NO: 2445827 - RNA, 14 nt, Human
cuugccccccaccc

SEQ ID NO: 2445828 - RNA, 15 nt, Human
cuugccccccacccc

SEQ ID NO: 2445829 - RNA, 16 nt, Human
cuugccccccacccca

SEQ ID NO: 2445830 - RNA, 23 nt, Human
cuugcccagagaugccuccaccg

SEQ ID NO: 2445831 - RNA, 22 nt, Human
cuugcccagagaugccuccacc

SEQ ID NO: 2445832 - RNA, 14 nt, Human
cuugcucugcugac

SEQ ID NO: 2445833 - RNA, 13 nt, Human
cuugcucugcuga

SEQ ID NO: 2445834 - RNA, 17 nt, Human
cuugcccggauucuggg

SEQ ID NO: 2445835 - RNA, 21 nt, Human
cuugccccggccccggcccca

SEQ ID NO: 2445836 - RNA, 18 nt, Human
cuugccccggccccggcc

SEQ ID NO: 2445837 - RNA, 18 nt, Human
cuugcccggauucuggga

SEQ ID NO: 2445838 - RNA, 20 nt, Human
cuugcccggauucugggagg

SEQ ID NO: 2445839 - RNA, 13 nt, Human
cuugcccugaccu

SEQ ID NO: 2445840 - RNA, 12 nt, Human
cuugcccugacc

SEQ ID NO: 2445841 - RNA, 17 nt, Human
cuugcuguccuaggcca

SEQ ID NO: 2445842 - RNA, 20 nt, Human
cuugcuguccuaggccacac

SEQ ID NO: 2445843 - RNA, 18 nt, Human
cuugcccugaccucccag

SEQ ID NO: 2445844 - RNA, 17 nt, Human
cuugcccugaccuccca

SEQ ID NO: 2445845 - RNA, 15 nt, Human
cuugcccugaccucc

SEQ ID NO: 2445846 - RNA, 14 nt, Human
cuugcccugaccuc

SEQ ID NO: 2445847 - RNA, 19 nt, Human
cuugcccugaccucccagc

SEQ ID NO: 2445848 - RNA, 16 nt, Human
cuugcuguccuaggcc

SEQ ID NO: 2445849 - RNA, 17 nt, Human
cuugcucugcugacaga

SEQ ID NO: 2445850 - RNA, 16 nt, Human
cuugcucugcugacag

SEQ ID NO: 2445851 - RNA, 18 nt, Human
cuugcuguuuuguucugu

SEQ ID NO: 2445852 - RNA, 15 nt, Human
cuugcuguccuaggc

SEQ ID NO: 2445853 - RNA, 20 nt, Human
cuugcuucaaccccaugaga

SEQ ID NO: 2445854 - RNA, 14 nt, Human
cuuggaaaaaguga

SEQ ID NO: 2445855 - RNA, 17 nt, Human
cuugcuuuucuguauuu

SEQ ID NO: 2445856 - RNA, 15 nt, Human
cuugcuuauuugaca

SEQ ID NO: 2445857 - RNA, 16 nt, Human
cuuggaaaaagugaug

SEQ ID NO: 2445858 - RNA, 20 nt, Human
cuuggaaaaauccagaaaga

SEQ ID NO: 2445859 - RNA, 22 nt, Human
cuuggaaaaauccagaaagaaa

SEQ ID NO: 2445860 - RNA, 14 nt, Human
cuuggaaaccugcc

SEQ ID NO: 2445861 - RNA, 16 nt, Human
cuuggaaaugggagac

SEQ ID NO: 2445862 - RNA, 21 nt, Human
cuuggaaagaaacaaccguug

SEQ ID NO: 2445863 - RNA, 23 nt, Human
cuuggaaagcaucaccucaggcc

SEQ ID NO: 2445864 - RNA, 15 nt, Human
cuuggaaaggaccag

SEQ ID NO: 2445865 - RNA, 23 nt, Human
cuuggaaaccugcccugccugag

SEQ ID NO: 2445866 - RNA, 22 nt, Human
cuuggaaaccugcccugccuga

SEQ ID NO: 2445867 - RNA, 21 nt, Human
cuuggaaaccugcccugccug

SEQ ID NO: 2445868 - RNA, 20 nt, Human
cuuggaaaccugcccugccu

SEQ ID NO: 2445869 - RNA, 18 nt, Human
cuuggaaaccugcccugc

SEQ ID NO: 2445870 - RNA, 17 nt, Human
cuuggaaaccugcccug

SEQ ID NO: 2445871 - RNA, 16 nt, Human
cuuggaaaccugcccu

SEQ ID NO: 2445872 - RNA, 15 nt, Human
cuuggaaaccugccc

SEQ ID NO: 2445873 - RNA, 21 nt, Human
cuuggaaagcaucaccucagg

SEQ ID NO: 2445874 - RNA, 22 nt, Human
cuuggaaagcaucaccucaggc

SEQ ID NO: 2445875 - RNA, 20 nt, Human
cuuggaaagcaucaccucag

SEQ ID NO: 2445876 - RNA, 21 nt, Human
cuuggaaacuggaugagguca

SEQ ID NO: 2445877 - RNA, 15 nt, Human
cuuggaagagccugc

SEQ ID NO: 2445878 - RNA, 13 nt, Human
cuuggagcugagc

SEQ ID NO: 2445879 - RNA, 19 nt, Human
cuuggaagagccugcaggu

SEQ ID NO: 2445880 - RNA, 12 nt, Human
cuuggagcugag

SEQ ID NO: 2445881 - RNA, 13 nt, Human
cuuggaggaagga

SEQ ID NO: 2445882 - RNA, 13 nt, Human
cuuggaagcuccg

SEQ ID NO: 2445883 - RNA, 18 nt, Human
cuuuggacagaagcagcu

SEQ ID NO: 2445884 - RNA, 19 nt, Human
cuuuggacagaagcagcuc

SEQ ID NO: 2445885 - RNA, 20 nt, Human
cuuuggacagaagcagcucu

SEQ ID NO: 2445886 - RNA, 21 nt, Human
cuuuggacagaagcagcucuu

SEQ ID NO: 2445887 - RNA, 16 nt, Human
cuuuggacccugaggc

SEQ ID NO: 2445888 - RNA, 15 nt, Human
cuuuggacccugagg

SEQ ID NO: 2445889 - RNA, 18 nt, Human
cuuuggacccugaggccc

SEQ ID NO: 2445890 - RNA, 17 nt, Human
cuuuggacccugaggcc

SEQ ID NO: 2445891 - RNA, 19 nt, Human
cuuuggacccugaggccca

SEQ ID NO: 2445892 - RNA, 20 nt, Human
cuuuggaccuaaauggccuc

SEQ ID NO: 2445893 - RNA, 16 nt, Human
cuuuggcugcaugcga

SEQ ID NO: 2445894 - RNA, 17 nt, Human
cuuugcucuucaagaaa

SEQ ID NO: 2445895 - RNA, 13 nt, Human
cuuugcucugggu

SEQ ID NO: 2445896 - RNA, 14 nt, Human
cuuugcucuuucuu

SEQ ID NO: 2445897 - RNA, 16 nt, Human
cuuucccauggggagg

SEQ ID NO: 2445898 - RNA, 13 nt, Human
cuuugcuccuccc

SEQ ID NO: 2445899 - RNA, 16 nt, Human
cuuucccaucuuccaa

SEQ ID NO: 2445900 - RNA, 13 nt, Human
cuuugcugcuaca

SEQ ID NO: 2445901 - RNA, 11 nt, Human
cuuugcugcua

SEQ ID NO: 2445902 - RNA, 10 nt, Human
cuuugcugcu

SEQ ID NO: 2445903 - RNA, 19 nt, Human
cuuugcugcugaaggcuca

SEQ ID NO: 2445904 - RNA, 18 nt, Human
cuuugcugagccuguaaa

SEQ ID NO: 2445905 - RNA, 11 nt, Human
cuuugcugcca

SEQ ID NO: 2445906 - RNA, 21 nt, Human
cuuugcugugaggcuguccug

SEQ ID NO: 2445907 - RNA, 17 nt, Human
cuuugcugugaggcugu

SEQ ID NO: 2445908 - RNA, 11 nt, Human
cuuugcugcug

SEQ ID NO: 2445909 - RNA, 22 nt, Human
cuuugcugugaggcuguccugu

SEQ ID NO: 2445910 - RNA, 17 nt, Human
cuuuggaaggagugaga

SEQ ID NO: 2445911 - RNA, 15 nt, Human
cuuuggaaggaguga

SEQ ID NO: 2445912 - RNA, 17 nt, Human
cuuugugauuuuuguaa

SEQ ID NO: 2445913 - RNA, 18 nt, Human
cuuugugauuuuuguaau

SEQ ID NO: 2445914 - RNA, 19 nt, Human
cuuugugauuuuuguaauu

SEQ ID NO: 2445915 - RNA, 19 nt, Human
cuuugucuaaaacaauaaa

SEQ ID NO: 2445916 - RNA, 15 nt, Human
cuuugucuaaaacaa

SEQ ID NO: 2445917 - RNA, 15 nt, Human
cuuuguucuggcucu

SEQ ID NO: 2445918 - RNA, 14 nt, Human
cuuuguucuggcuc

SEQ ID NO: 2445919 - RNA, 18 nt, Human
cuuuguucauagcccagu

SEQ ID NO: 2445920 - RNA, 23 nt, Human
cuuuguucucagcucccccuguc

SEQ ID NO: 2445921 - RNA, 20 nt, Human
cuuuguucucagcucccccu

SEQ ID NO: 2445922 - RNA, 17 nt, Human
cuuuguucucagcuccc

SEQ ID NO: 2445923 - RNA, 14 nt, Human
cuuuguucucagcu

SEQ ID NO: 2445924 - RNA, 18 nt, Human
cuuuguucuaaagaugga

SEQ ID NO: 2445925 - RNA, 22 nt, Human
cuuuguccccaccgcagacagg

SEQ ID NO: 2445926 - RNA, 22 nt, Human
cuuugggagaaaacgucuugcu

SEQ ID NO: 2445927 - RNA, 13 nt, Human
cuuugggaauguu

SEQ ID NO: 2445928 - RNA, 23 nt, Human
cuuugggaauauuugaaucuugu

SEQ ID NO: 2445929 - RNA, 15 nt, Human
cuuugucccggggcu

SEQ ID NO: 2445930 - RNA, 14 nt, Human
cuuugugauuuuug

SEQ ID NO: 2445931 - RNA, 17 nt, Human
cuuuguccuuuuuguua

SEQ ID NO: 2445932 - RNA, 18 nt, Human
cuuuguccccaccgcaga

SEQ ID NO: 2445933 - RNA, 13 nt, Human
cuuugggaggcca

SEQ ID NO: 2445934 - RNA, 20 nt, Human
cuuugggaauauuugaaucu

SEQ ID NO: 2445935 - RNA, 19 nt, Human
cuuugggaauauuugaauc

SEQ ID NO: 2445936 - RNA, 18 nt, Human
cuuugggaauauuugaau

SEQ ID NO: 2445937 - RNA, 17 nt, Human
cuuugggaauauuugaa

SEQ ID NO: 2445938 - RNA, 13 nt, Human
cuuugggaagggg

SEQ ID NO: 2445939 - RNA, 22 nt, Human
cuuugggaaaggagaaguuaag

SEQ ID NO: 2445940 - RNA, 15 nt, Human
cuuugggaaaggaga

SEQ ID NO: 2445941 - RNA, 20 nt, Human
cuuuuacguccaucucuugu

SEQ ID NO: 2445942 - RNA, 14 nt, Human
cuuuuaauuuuccu

SEQ ID NO: 2445943 - RNA, 13 nt, Human
cuuuuacauacug

SEQ ID NO: 2445944 - RNA, 14 nt, Human
cuuuuaccaugccc

SEQ ID NO: 2445945 - RNA, 16 nt, Human
cuuuuaccaugccccu

SEQ ID NO: 2445946 - RNA, 14 nt, Human
cuuuuacauacugc

SEQ ID NO: 2445947 - RNA, 17 nt, Human
cuuuuacauacugcugu

SEQ ID NO: 2445948 - RNA, 18 nt, Human
cuuuguuuguugucagcu

SEQ ID NO: 2445949 - RNA, 20 nt, Human
cuuuguuuguugucagcuga

SEQ ID NO: 2445950 - RNA, 18 nt, Human
cuuuguuucguggggagg

SEQ ID NO: 2445951 - RNA, 17 nt, Human
cuuuguuucguggggag

SEQ ID NO: 2445952 - RNA, 17 nt, Human
cuuuguuucaaccaagu

SEQ ID NO: 2445953 - RNA, 18 nt, Human
cuuuucagcuucugcugg

SEQ ID NO: 2445954 - RNA, 17 nt, Human
cuuuucagcuucugcug

SEQ ID NO: 2445955 - RNA, 16 nt, Human
cuuuucagcuucugcu

SEQ ID NO: 2445956 - RNA, 14 nt, Human
cuuuucagcuucug

SEQ ID NO: 2445957 - RNA, 19 nt, Human
cuuuucagaagugagcuuu

SEQ ID NO: 2445958 - RNA, 21 nt, Human
cuuuucagaagugagcuuugc

SEQ ID NO: 2445959 - RNA, 23 nt, Human
cuuuucagcgauguaugcagcua

SEQ ID NO: 2445960 - RNA, 20 nt, Human
cuuuucauaaccuagccuua

SEQ ID NO: 2445961 - RNA, 20 nt, Human
cuuuucacugcuggcugccu

SEQ ID NO: 2445962 - RNA, 18 nt, Human
cuuuucacugcuggcugc

SEQ ID NO: 2445963 - RNA, 17 nt, Human
cuuuucacugcuggcug

SEQ ID NO: 2445964 - RNA, 23 nt, Human
cuuuuacucaugaucuugugaca

SEQ ID NO: 2445965 - RNA, 23 nt, Human
cuuuucagcuucugcugggcugg

SEQ ID NO: 2445966 - RNA, 19 nt, Human
cuuuucagcuucugcuggg

SEQ ID NO: 2445967 - RNA, 22 nt, Human
cuuuucauaaccuagccuuaga

SEQ ID NO: 2445968 - RNA, 17 nt, Human
cuuuucaucugggaaag

SEQ ID NO: 2445969 - RNA, 16 nt, Human
cuuuucaucugggaaa

SEQ ID NO: 2445970 - RNA, 13 nt, Human
cuuuucaucuggg

SEQ ID NO: 2445971 - RNA, 23 nt, Human
cuuuucuugcaugaggcuagugu

SEQ ID NO: 2445972 - RNA, 18 nt, Human
cuuuucuugcaugaggcu

SEQ ID NO: 2445973 - RNA, 13 nt, Human
cuuuucuguauuu

SEQ ID NO: 2445974 - RNA, 16 nt, Human
cuuuucuuucagccaa

SEQ ID NO: 2445975 - RNA, 19 nt, Human
cuuuucuggaauguaauca

SEQ ID NO: 2445976 - RNA, 19 nt, Human
cuuuucugcccuggcugcu

SEQ ID NO: 2445977 - RNA, 18 nt, Human
cuuuucuggaauguaauc

SEQ ID NO: 2445978 - RNA, 18 nt, Human
cuuuucuguccgagcuuu

SEQ ID NO: 2445979 - RNA, 23 nt, Human
cuuuucuguccgagcuuugaaaa

SEQ ID NO: 2445980 - RNA, 14 nt, Human
cuuuuccccggucc

SEQ ID NO: 2445981 - RNA, 18 nt, Human
cuuuucccacuguuuaag

SEQ ID NO: 2445982 - RNA, 22 nt, Human
cuuuucccucuuuggcuccccu

SEQ ID NO: 2445983 - RNA, 20 nt, Human
cuuuucccucuuuggcuccc

SEQ ID NO: 2445984 - RNA, 14 nt, Human
cuuuuccccugucc

SEQ ID NO: 2445985 - RNA, 15 nt, Human
cuuuucccugcuucc

SEQ ID NO: 2445986 - RNA, 14 nt, Human
cuuuucccugcuuc

SEQ ID NO: 2445987 - RNA, 13 nt, Human
cuuuucccugcuu

SEQ ID NO: 2445988 - RNA, 16 nt, Human
cuuuucuacccuagcc

SEQ ID NO: 2445989 - RNA, 18 nt, Human
cuuuucuaggcuacaauu

SEQ ID NO: 2445990 - RNA, 22 nt, Human
cuuuucuacccuagccauuccu

SEQ ID NO: 2445991 - RNA, 18 nt, Human
cuuuucuacccuagccau

SEQ ID NO: 2445992 - RNA, 17 nt, Human
cuuuucuacccuagcca

SEQ ID NO: 2445993 - RNA, 18 nt, Human
cuuuucccugcuuccagg

SEQ ID NO: 2445994 - RNA, 20 nt, Human
cuuuucccugcuuccaggaa

SEQ ID NO: 2445995 - RNA, 20 nt, Human
cuuuucuauuuucccucgcu

SEQ ID NO: 2445996 - RNA, 14 nt, Human
cuuuucuauuuucc

SEQ ID NO: 2445997 - RNA, 13 nt, Human
cuuuucuauuuuc

SEQ ID NO: 2445998 - RNA, 21 nt, Human
cuuuucuagcccgaauacaaa

SEQ ID NO: 2445999 - RNA, 17 nt, Human
cuuuucuccaauaucag

SEQ ID NO: 2446000 - RNA, 13 nt, Human
cuuuucucagcug

SEQ ID NO: 2446001 - RNA, 17 nt, Human
cuuuucucugguaauau

SEQ ID NO: 2446002 - RNA, 21 nt, Human
cuuuucuccaauaucagugcu

SEQ ID NO: 2446003 - RNA, 15 nt, Human
cuuuucuccaugagu

SEQ ID NO: 2446004 - RNA, 14 nt, Human
cuuuucucuuucuc

SEQ ID NO: 2446005 - RNA, 13 nt, Human
cuuuucucuuucu

SEQ ID NO: 2446006 - RNA, 14 nt, Human
gaaaacaugcuaca

SEQ ID NO: 2446007 - RNA, 15 nt, Human
gaaaacaugcuacac

SEQ ID NO: 2446008 - RNA, 12 nt, Human
gaaaacaugcua

SEQ ID NO: 2446009 - RNA, 19 nt, Human
gaaaacaucacugaaaugc

SEQ ID NO: 2446010 - RNA, 22 nt, Human
gaaaacaauaacgauaaaagac

SEQ ID NO: 2446011 - RNA, 13 nt, Human
gaaaacacauuuu

SEQ ID NO: 2446012 - RNA, 15 nt, Human
gaaaacaagugcugg

SEQ ID NO: 2446013 - RNA, 18 nt, Human
gaaaacauuguuccagau

SEQ ID NO: 2446014 - RNA, 11 nt, Human
gaaaacauugu

SEQ ID NO: 2446015 - RNA, 20 nt, Human
gaaaacauucugauuuggaa

SEQ ID NO: 2446016 - RNA, 12 nt, Human
gaaaacaucugg

SEQ ID NO: 2446017 - RNA, 17 nt, Human
gaaaacauuccauccuu

SEQ ID NO: 2446018 - RNA, 19 nt, Human
gaaaaccaagccguggcuu

SEQ ID NO: 2446019 - RNA, 18 nt, Human
gaaaaccaagccguggcu

SEQ ID NO: 2446020 - RNA, 12 nt, Human
gaaaacauuguu

SEQ ID NO: 2446021 - RNA, 21 nt, Human
gaaaaccaagccguggcuucc

SEQ ID NO: 2446022 - RNA, 16 nt, Human
gaaaaccaucacauga

SEQ ID NO: 2446023 - RNA, 16 nt, Human
gaaaacguggcugcuu

SEQ ID NO: 2446024 - RNA, 15 nt, Human
gaaaacguggcugcu

SEQ ID NO: 2446025 - RNA, 18 nt, Human
gaaaacguggcugcuuca

SEQ ID NO: 2446026 - RNA, 11 nt, Human
gaaaacccacc

SEQ ID NO: 2446027 - RNA, 12 nt, Human
gaaaacccagag

SEQ ID NO: 2446028 - RNA, 23 nt, Human
gaaaaaggaugcacagaguuguu

SEQ ID NO: 2446029 - RNA, 17 nt, Human
gaaaaaggaugcacaga

SEQ ID NO: 2446030 - RNA, 23 nt, Human
gaaaaagugauggagcagagcaa

SEQ ID NO: 2446031 - RNA, 12 nt, Human
gaaaaagugaug

SEQ ID NO: 2446032 - RNA, 21 nt, Human
gaaaaagucauccaaucuaac

SEQ ID NO: 2446033 - RNA, 19 nt, Human
gaaaaagucauccaaucua

SEQ ID NO: 2446034 - RNA, 19 nt, Human
gaaaaaguuaaacauugaa

SEQ ID NO: 2446035 - RNA, 21 nt, Human
cuuuuuugauaaaguuucuca

SEQ ID NO: 2446036 - RNA, 18 nt, Human
gaaaaagucauccaaucu

SEQ ID NO: 2446037 - RNA, 15 nt, Human
cuuuuuuggcugcug

SEQ ID NO: 2446038 - RNA, 14 nt, Human
cuuuuuuggcugcu

SEQ ID NO: 2446039 - RNA, 16 nt, Human
cuuuuuucuuauuuaa

SEQ ID NO: 2446040 - RNA, 19 nt, Human
cuuuuuugauaaaguuucu

SEQ ID NO: 2446041 - RNA, 18 nt, Human
cuuuuuugauaaaguuuc

SEQ ID NO: 2446042 - RNA, 17 nt, Human
cuuuuuugauaaaguuu

SEQ ID NO: 2446043 - RNA, 16 nt, Human
cuuuuuucuuuaagau

SEQ ID NO: 2446044 - RNA, 13 nt, Human
cuuuuuuccuccu

SEQ ID NO: 2446045 - RNA, 20 nt, Human
cuuuuuugaaauaauaaauc

SEQ ID NO: 2446046 - RNA, 21 nt, Human
cuuuugagugccuuacacaau

SEQ ID NO: 2446047 - RNA, 16 nt, Human
cuuuugagcauuuaga

SEQ ID NO: 2446048 - RNA, 22 nt, Human
cuuuucuuuagagcauugccau

SEQ ID NO: 2446049 - RNA, 13 nt, Human
cuuuugacaugug

SEQ ID NO: 2446050 - RNA, 10 nt, Human
cuuuugaccu

SEQ ID NO: 2446051 - RNA, 14 nt, Human
cuuuugacaugugg

SEQ ID NO: 2446052 - RNA, 18 nt, Human
cuuuugacuuaaagcaga

SEQ ID NO: 2446053 - RNA, 18 nt, Human
cuuuuuuccuuaauccag

SEQ ID NO: 2446054 - RNA, 14 nt, Human
cuuuuuucuaaagu

SEQ ID NO: 2446055 - RNA, 15 nt, Human
cuuuuuucacuacau

SEQ ID NO: 2446056 - RNA, 22 nt, Human
cuuuuuucauggacacuuugaa

SEQ ID NO: 2446057 - RNA, 19 nt, Human
gaaaagcuauuagccagga

SEQ ID NO: 2446058 - RNA, 17 nt, Human
gaaaagcuauuagccag

SEQ ID NO: 2446059 - RNA, 14 nt, Human
gaaaagcuauuagc

SEQ ID NO: 2446060 - RNA, 11 nt, Human
gaaaagcuauu

SEQ ID NO: 2446061 - RNA, 22 nt, Human
gaaaagcuauuagccaggauca

SEQ ID NO: 2446062 - RNA, 20 nt, Human
gaaaagcuauuagccaggau

SEQ ID NO: 2446063 - RNA, 14 nt, Human
gaaaagcugaaucc

SEQ ID NO: 2446064 - RNA, 18 nt, Human
gaaaauaagaauagaaau

SEQ ID NO: 2446065 - RNA, 18 nt, Human
gaaaauaaucauucuuau

SEQ ID NO: 2446066 - RNA, 19 nt, Human
gaaaauauacuguaaagaa

SEQ ID NO: 2446067 - RNA, 20 nt, Human
gaaaauauacuguaaagaaa

SEQ ID NO: 2446068 - RNA, 18 nt, Human
gaaaauauacuguaaaga

SEQ ID NO: 2446069 - RNA, 13 nt, Human
gaaaauaauuguu

SEQ ID NO: 2446070 - RNA, 19 nt, Human
gaaaauaacgauaaaagac

SEQ ID NO: 2446071 - RNA, 17 nt, Human
gaaaagcugcugacagu

SEQ ID NO: 2446072 - RNA, 13 nt, Human
gaaaagcugcuga

SEQ ID NO: 2446073 - RNA, 19 nt, Human
gaaaaucuuauaauuuaaa

SEQ ID NO: 2446074 - RNA, 16 nt, Human
gaaaaucagccugcuc

SEQ ID NO: 2446075 - RNA, 18 nt, Human
gaaaaucagccugcucca

SEQ ID NO: 2446076 - RNA, 17 nt, Human
gaaaauauuauguguuu

SEQ ID NO: 2446077 - RNA, 14 nt, Human
gaaaaucagccugc

SEQ ID NO: 2446078 - RNA, 12 nt, Human
gaaaauaucacu

SEQ ID NO: 2446079 - RNA, 21 nt, Human
gaaaauauacuguaaagaaag

SEQ ID NO: 2446080 - RNA, 23 nt, Human
gaaaauauacuguaaagaaagag

SEQ ID NO: 2446081 - RNA, 12 nt, Human
gaaaauaugcau

SEQ ID NO: 2446082 - RNA, 15 nt, Human
gaaaauaugcaucua

SEQ ID NO: 2446083 - RNA, 14 nt, Human
gaaacacagaaacc

SEQ ID NO: 2446084 - RNA, 15 nt, Human
gaaaaucaaauacau

SEQ ID NO: 2446085 - RNA, 14 nt, Human
gaaaaucaaauaca

SEQ ID NO: 2446086 - RNA, 18 nt, Human
gaaaauauuuuuuauaua

SEQ ID NO: 2446087 - RNA, 19 nt, Human
gaaaaucaaauacauacuu

SEQ ID NO: 2446088 - RNA, 20 nt, Human
gaaaaucuuauaauuuaaaa

SEQ ID NO: 2446089 - RNA, 21 nt, Human
gaaacaccuucucuggagcca

SEQ ID NO: 2446090 - RNA, 18 nt, Human
gaaacacccucacacugg

SEQ ID NO: 2446091 - RNA, 19 nt, Human
gaaacacccucacacuggg

SEQ ID NO: 2446092 - RNA, 22 nt, Human
gaaacacccucacacugggacu

SEQ ID NO: 2446093 - RNA, 14 nt, Human
gaaacaccuucucu

SEQ ID NO: 2446094 - RNA, 18 nt, Human
gaaacacuggggcuggca

SEQ ID NO: 2446095 - RNA, 22 nt, Human
gaaacacugggcuucuagaacc

SEQ ID NO: 2446096 - RNA, 15 nt, Human
gaaacagcucgacuu

SEQ ID NO: 2446097 - RNA, 20 nt, Human
gaaacagcucgacuuuaaaa

SEQ ID NO: 2446098 - RNA, 18 nt, Human
gaaacagcuaaugggaca

SEQ ID NO: 2446099 - RNA, 20 nt, Human
gaaacagaucuccuggcaaa

SEQ ID NO: 2446100 - RNA, 20 nt, Human
gaaacagaggagagucccag

SEQ ID NO: 2446101 - RNA, 16 nt, Human
gaaacacuuugcauaa

SEQ ID NO: 2446102 - RNA, 15 nt, Human
gaaacacuggggcug

SEQ ID NO: 2446103 - RNA, 14 nt, Human
gaaacagaaacaaa

SEQ ID NO: 2446104 - RNA, 22 nt, Human
gaaacagaaacaaaaacacuaa

SEQ ID NO: 2446105 - RNA, 14 nt, Human
gaaacagagacagg

SEQ ID NO: 2446106 - RNA, 16 nt, Human
gaaacagagacaggcc

SEQ ID NO: 2446107 - RNA, 17 nt, Human
gaaacagagacaggccc

SEQ ID NO: 2446108 - RNA, 19 nt, Human
gaaacagaggagaguccca

SEQ ID NO: 2446109 - RNA, 19 nt, Human
gaaacagagacaggcccaa

SEQ ID NO: 2446110 - RNA, 12 nt, Human
gaaacagaggcu

SEQ ID NO: 2446111 - RNA, 18 nt, Human
gaauacuguuaaaggaaa

SEQ ID NO: 2446112 - RNA, 20 nt, Human
gaauacuguuaaaggaaaaa

SEQ ID NO: 2446113 - RNA, 19 nt, Human
gaauacuuuugcccuuuga

SEQ ID NO: 2446114 - RNA, 14 nt, Human
gaauacuuuuuaca

SEQ ID NO: 2446115 - RNA, 20 nt, Human
gaauacuuuuuacaauuaaa

SEQ ID NO: 2446116 - RNA, 23 nt, Human
gaauagaaauaaaggaugugauu

SEQ ID NO: 2446117 - RNA, 14 nt, Human
gaauacuuuauaaa

SEQ ID NO: 2446118 - RNA, 22 nt, Human
gaauaauguaaaauguugaaua

SEQ ID NO: 2446119 - RNA, 14 nt, Human
gaauaauguaaaau

SEQ ID NO: 2446120 - RNA, 18 nt, Human
gaauaauuauuuauuuaa

SEQ ID NO: 2446121 - RNA, 13 nt, Human
gaauaauuauuua

SEQ ID NO: 2446122 - RNA, 20 nt, Human
gaauaauuauuuauuuaaua

SEQ ID NO: 2446123 - RNA, 21 nt, Human
gaauaaugguaccagauaaaa

SEQ ID NO: 2446124 - RNA, 20 nt, Human
gaauaaugguaccagauaaa

SEQ ID NO: 2446125 - RNA, 13 nt, Human
gaauaaugggcuu

SEQ ID NO: 2446126 - RNA, 22 nt, Human
gaauaaucuuuggguaacuuca

SEQ ID NO: 2446127 - RNA, 14 nt, Human
gaauaaugaaugga

SEQ ID NO: 2446128 - RNA, 16 nt, Human
gaauaaguuauugcag

SEQ ID NO: 2446129 - RNA, 14 nt, Human
gaauaaguuauugc

SEQ ID NO: 2446130 - RNA, 13 nt, Human
gaauaaguuauug

SEQ ID NO: 2446131 - RNA, 12 nt, Human
gaauaaguuauu

SEQ ID NO: 2446132 - RNA, 20 nt, Human
gaauaagugccaggauggaa

SEQ ID NO: 2446133 - RNA, 20 nt, Human
gaauaauccuaaacauauga

SEQ ID NO: 2446134 - RNA, 19 nt, Human
gaauaaguuauugcaguuu

SEQ ID NO: 2446135 - RNA, 18 nt, Human
gaauaaguuauugcaguu

SEQ ID NO: 2446136 - RNA, 21 nt, Human
gaauaauaaaaguauauauau

SEQ ID NO: 2446137 - RNA, 19 nt, Human
gaauaauaaaaguauauau

SEQ ID NO: 2446138 - RNA, 15 nt, Human
gaauaaucuuugggu

SEQ ID NO: 2446139 - RNA, 14 nt, Human
gaauaaaugucuuu

SEQ ID NO: 2446140 - RNA, 11 nt, Human
gaauaaauguc

SEQ ID NO: 2446141 - RNA, 21 nt, Human
gaauaaauaugccucuccuuu

SEQ ID NO: 2446142 - RNA, 15 nt, Human
gaauaaauugcuccu

SEQ ID NO: 2446143 - RNA, 20 nt, Human
gaauaagccauucugacuca

SEQ ID NO: 2446144 - RNA, 21 nt, Human
gaauaagccauucugacucau

SEQ ID NO: 2446145 - RNA, 22 nt, Human
gaauaagccauucugacucaua

SEQ ID NO: 2446146 - RNA, 12 nt, Human
gaauaaggccuu

SEQ ID NO: 2446147 - RNA, 14 nt, Human
gaauaacauguaau

SEQ ID NO: 2446148 - RNA, 13 nt, Human
gaauaaaauugua

SEQ ID NO: 2446149 - RNA, 21 nt, Human
gaauaaaauuauuuuggauuu

SEQ ID NO: 2446150 - RNA, 17 nt, Human
gaauaaaauuauuuugg

SEQ ID NO: 2446151 - RNA, 23 nt, Human
gaauaaaauguugaaaagucaaa

SEQ ID NO: 2446152 - RNA, 12 nt, Human
gaauaaacuaga

SEQ ID NO: 2446153 - RNA, 22 nt, Human
gaauaaaauuguaaaauuguau

SEQ ID NO: 2446154 - RNA, 16 nt, Human
gaauaaacuagauuac

SEQ ID NO: 2446155 - RNA, 19 nt, Human
gaauaaacuagauuacauu

SEQ ID NO: 2446156 - RNA, 15 nt, Human
gaauaaagcaauuuu

SEQ ID NO: 2446157 - RNA, 14 nt, Human
gaauaaagcaauuu

SEQ ID NO: 2446158 - RNA, 13 nt, Human
gaauaaagcaauu

SEQ ID NO: 2446159 - RNA, 12 nt, Human
gaauaaagcaau

SEQ ID NO: 2446160 - RNA, 14 nt, Human
gaauaaagacaccu

SEQ ID NO: 2446161 - RNA, 22 nt, Human
gaauaaagcaauuuuccuugaa

SEQ ID NO: 2446162 - RNA, 19 nt, Human
gaauaaagcaauuuuccuu

SEQ ID NO: 2446163 - RNA, 18 nt, Human
gaauaaagcaauuuuccu

SEQ ID NO: 2446164 - RNA, 17 nt, Human
gaauaaagcaauuuucc

SEQ ID NO: 2446165 - RNA, 16 nt, Human
gaauaaagcaauuuuc

SEQ ID NO: 2446166 - RNA, 21 nt, Human
gaauaaagcaauuuuccuuga

SEQ ID NO: 2446167 - RNA, 20 nt, Human
gaauaaagcaauuuuccuug

SEQ ID NO: 2446168 - RNA, 17 nt, Human
gaauaaagccugcuuuu

SEQ ID NO: 2446169 - RNA, 13 nt, Human
gaauaaaguucug

SEQ ID NO: 2446170 - RNA, 14 nt, Human
gaauaaaguucuga

SEQ ID NO: 2446171 - RNA, 20 nt, Human
gaauaaaguucugaguguuu

SEQ ID NO: 2446172 - RNA, 19 nt, Human
gaauaaauaugccucuccu

SEQ ID NO: 2446173 - RNA, 16 nt, Human
gaauaaauaugccucu

SEQ ID NO: 2446174 - RNA, 12 nt, Human
gaauaaauaugc

SEQ ID NO: 2446175 - RNA, 11 nt, Human
gaauaaauaug

SEQ ID NO: 2446176 - RNA, 22 nt, Human
gaauaaauaaauguaucuuauu

SEQ ID NO: 2446177 - RNA, 14 nt, Human
gaauaaaguugaag

SEQ ID NO: 2446178 - RNA, 16 nt, Human
gaauaaaguugaagcu

SEQ ID NO: 2446179 - RNA, 17 nt, Human
gaaguuuacauuguaaa

SEQ ID NO: 2446180 - RNA, 16 nt, Human
gaaguuuacauuguaa

SEQ ID NO: 2446181 - RNA, 20 nt, Human
gaagguuuguguuuuucugc

SEQ ID NO: 2446182 - RNA, 12 nt, Human
gaagguuguaag

SEQ ID NO: 2446183 - RNA, 13 nt, Human
gaagguugaagag

SEQ ID NO: 2446184 - RNA, 15 nt, Human
gaagguugugaugaa

SEQ ID NO: 2446185 - RNA, 20 nt, Human
gaagguuugguguguggaga

SEQ ID NO: 2446186 - RNA, 20 nt, Human
gaagguuuacaauuuacaaa

SEQ ID NO: 2446187 - RNA, 20 nt, Human
gaagguuuacucuguggcca

SEQ ID NO: 2446188 - RNA, 16 nt, Human
gaagguuuguauauug

SEQ ID NO: 2446189 - RNA, 16 nt, Human
gaagguuuguguuuuu

SEQ ID NO: 2446190 - RNA, 15 nt, Human
gaagguuuguauauu

SEQ ID NO: 2446191 - RNA, 12 nt, Human
gaauaaaauuuu

SEQ ID NO: 2446192 - RNA, 21 nt, Human
gaauaaaauguugaaaaguca

SEQ ID NO: 2446193 - RNA, 17 nt, Human
gaauaaaauguugaaaa

SEQ ID NO: 2446194 - RNA, 15 nt, Human
gaauaaaauguugaa

SEQ ID NO: 2446195 - RNA, 21 nt, Human
gaaguuuccuuggcuggugca

SEQ ID NO: 2446196 - RNA, 12 nt, Human
gaaguuucugcc

SEQ ID NO: 2446197 - RNA, 14 nt, Human
gaaguuucacauga

SEQ ID NO: 2446198 - RNA, 18 nt, Human
gaaguuuaauugacuuau

SEQ ID NO: 2446199 - RNA, 15 nt, Human
gaauagaugcugacu

SEQ ID NO: 2446200 - RNA, 19 nt, Human
gaauagcaaggugcucaca

SEQ ID NO: 2446201 - RNA, 15 nt, Human
gaauagccacauuug

SEQ ID NO: 2446202 - RNA, 18 nt, Human
gaauagccacauuuggaa

SEQ ID NO: 2446203 - RNA, 23 nt, Human
gaauagccacauuuggaauacuu

SEQ ID NO: 2446204 - RNA, 14 nt, Human
gaauagcugggacu

SEQ ID NO: 2446205 - RNA, 18 nt, Human
gaaucacucuuguggaug

SEQ ID NO: 2446206 - RNA, 19 nt, Human
gaaucacucuuguggaugu

SEQ ID NO: 2446207 - RNA, 13 nt, Human
gaaucagaaacag

SEQ ID NO: 2446208 - RNA, 21 nt, Human
gaaucaauaauauauuuucug

SEQ ID NO: 2446209 - RNA, 11 nt, Human
gaaucaauaau

SEQ ID NO: 2446210 - RNA, 15 nt, Human
gaauagcugggacua

SEQ ID NO: 2446211 - RNA, 17 nt, Human
gaauccacucccaggca

SEQ ID NO: 2446212 - RNA, 18 nt, Human
gaaucccccuugccaccc

SEQ ID NO: 2446213 - RNA, 17 nt, Human
gaaucccccuugccacc

SEQ ID NO: 2446214 - RNA, 14 nt, Human
gaaucccccuugcc

SEQ ID NO: 2446215 - RNA, 17 nt, Human
gaauccccucccuguca

SEQ ID NO: 2446216 - RNA, 16 nt, Human
gaauccccgaaggugc

SEQ ID NO: 2446217 - RNA, 23 nt, Human
gaaucccccuugccaccccaccc

SEQ ID NO: 2446218 - RNA, 16 nt, Human
gaauccccucccuguc

SEQ ID NO: 2446219 - RNA, 24 nt, Human
gaauccacccauccuaccaaugca

SEQ ID NO: 2446220 - RNA, 15 nt, Human
gaauccacccauccu

SEQ ID NO: 2446221 - RNA, 17 nt, Human
gaauccaagugaacacu

SEQ ID NO: 2446222 - RNA, 16 nt, Human
gaauccaagcgagguc

SEQ ID NO: 2446223 - RNA, 13 nt, Human
gaauccaaacuug

SEQ ID NO: 2446224 - RNA, 12 nt, Human
gaauccaaacuu

SEQ ID NO: 2446225 - RNA, 22 nt, Human
gaaucauuucuauuucuccucc

SEQ ID NO: 2446226 - RNA, 14 nt, Human
gaaucauuuguuca

SEQ ID NO: 2446227 - RNA, 23 nt, Human
gaaucauuuguucaaagcuguug

SEQ ID NO: 2446228 - RNA, 19 nt, Human
gaaucagaucauuucaaaa

SEQ ID NO: 2446229 - RNA, 13 nt, Human
gaaucagaacuca

SEQ ID NO: 2446230 - RNA, 18 nt, Human
gaaucagacccuacccca

SEQ ID NO: 2446231 - RNA, 22 nt, Human
gaaucagacccuaccccaccac

SEQ ID NO: 2446232 - RNA, 23 nt, Human
gaaucagacccuaccccaccacg

SEQ ID NO: 2446233 - RNA, 19 nt, Human
gaaucagacuucacacugc

SEQ ID NO: 2446234 - RNA, 14 nt, Human
gaaugaaagaguaa

SEQ ID NO: 2446235 - RNA, 12 nt, Human
gaaugaaagagu

SEQ ID NO: 2446236 - RNA, 21 nt, Human
gaaugaaacccccacacacac

SEQ ID NO: 2446237 - RNA, 21 nt, Human
gaaugccucaaugugaccagg

SEQ ID NO: 2446238 - RNA, 19 nt, Human
gaaugaaagggcccagaga

SEQ ID NO: 2446239 - RNA, 14 nt, Human
gaaugccuccugca

SEQ ID NO: 2446240 - RNA, 14 nt, Human
gaaugaaagcuccu

SEQ ID NO: 2446241 - RNA, 22 nt, Human
gaaugaaagaguaaaggaaaug

SEQ ID NO: 2446242 - RNA, 22 nt, Human
gaaugccucaaugugaccaggg

SEQ ID NO: 2446243 - RNA, 13 nt, Human
gaaugccuccucc

SEQ ID NO: 2446244 - RNA, 18 nt, Human
gaaugccugagugccugg

SEQ ID NO: 2446245 - RNA, 16 nt, Human
gaaugccugagugccu

SEQ ID NO: 2446246 - RNA, 19 nt, Human
gaaugccugagugccuggc

SEQ ID NO: 2446247 - RNA, 23 nt, Human
gaaugcggcaagaaggaauugac

SEQ ID NO: 2446248 - RNA, 22 nt, Human
gaaugcucaaguuuuucagaaa

SEQ ID NO: 2446249 - RNA, 14 nt, Human
gaaucuugucucaa

SEQ ID NO: 2446250 - RNA, 13 nt, Human
gaaucuugucuca

SEQ ID NO: 2446251 - RNA, 20 nt, Human
gaaucuugucucaaugcuca

SEQ ID NO: 2446252 - RNA, 18 nt, Human
gaaucuugucucaaugcu

SEQ ID NO: 2446253 - RNA, 16 nt, Human
gaaucuugucucaaug

SEQ ID NO: 2446254 - RNA, 15 nt, Human
gaaucuugucucaau

SEQ ID NO: 2446255 - RNA, 19 nt, Human
gaaugaaacccccacacac

SEQ ID NO: 2446256 - RNA, 20 nt, Human
gaaugaaacccccacacaca

SEQ ID NO: 2446257 - RNA, 16 nt, Human
gaaugaaacccccaca

SEQ ID NO: 2446258 - RNA, 21 nt, Human
gaaucuugucucaaugcucau

SEQ ID NO: 2446259 - RNA, 14 nt, Human
gaaugaaagggccc

SEQ ID NO: 2446260 - RNA, 20 nt, Human
gaauccuaggcuccacccca

SEQ ID NO: 2446261 - RNA, 15 nt, Human
gaauccuagggccug

SEQ ID NO: 2446262 - RNA, 23 nt, Human
gaauccuacacaccuaagggaca

SEQ ID NO: 2446263 - RNA, 22 nt, Human
gaauccuguccucagcuucuua

SEQ ID NO: 2446264 - RNA, 17 nt, Human
gaaucuauauuuaacaa

SEQ ID NO: 2446265 - RNA, 16 nt, Human
gaaucuauuuaaguaa

SEQ ID NO: 2446266 - RNA, 15 nt, Human
gaaucuauuuaagua

SEQ ID NO: 2446267 - RNA, 19 nt, Human
gaaucuaugccaaagauca

SEQ ID NO: 2446268 - RNA, 15 nt, Human
gaaucuaugccaaag

SEQ ID NO: 2446269 - RNA, 12 nt, Human
gaaucuaugcca

SEQ ID NO: 2446270 - RNA, 21 nt, Human
gaaucuaucugcuuaugcagu

SEQ ID NO: 2446271 - RNA, 15 nt, Human
gaaucuauuauacug

SEQ ID NO: 2446272 - RNA, 22 nt, Human
gaaucuaugccaaagaucacuu

SEQ ID NO: 2446273 - RNA, 13 nt, Human
gaaucuauuuaag

SEQ ID NO: 2446274 - RNA, 22 nt, Human
gaaucuggagaccagggagccu

SEQ ID NO: 2446275 - RNA, 16 nt, Human
gaaucuggagaccagg

SEQ ID NO: 2446276 - RNA, 18 nt, Human
gaaucuggagaccaggga

SEQ ID NO: 2446277 - RNA, 16 nt, Human
gaaucucaaauaacua

SEQ ID NO: 2446278 - RNA, 21 nt, Human
gaaucuauuauacuguauuaa

SEQ ID NO: 2446279 - RNA, 22 nt, Human
gaagcccaggaaaggcuccagg

SEQ ID NO: 2446280 - RNA, 21 nt, Human
gaagcccaggaaaggcuccag

SEQ ID NO: 2446281 - RNA, 20 nt, Human
gaagcccaggaaaggcucca

SEQ ID NO: 2446282 - RNA, 18 nt, Human
gaagcccaauaaaccucu

SEQ ID NO: 2446283 - RNA, 19 nt, Human
gaagcccaauaaaccucuu

SEQ ID NO: 2446284 - RNA, 21 nt, Human
gaagccgcuggggccaguugg

SEQ ID NO: 2446285 - RNA, 18 nt, Human
gaagccggcggcccaagc

SEQ ID NO: 2446286 - RNA, 15 nt, Human
gaagccggcggccca

SEQ ID NO: 2446287 - RNA, 16 nt, Human
gaagccggaggguguu

SEQ ID NO: 2446288 - RNA, 20 nt, Human
gaagccggcggcccaagccc

SEQ ID NO: 2446289 - RNA, 16 nt, Human
gaagccgggaacagac

SEQ ID NO: 2446290 - RNA, 20 nt, Human
gaagccgugcucgccccagc

SEQ ID NO: 2446291 - RNA, 16 nt, Human
gaagccgugcccugcc

SEQ ID NO: 2446292 - RNA, 17 nt, Human
gaagccgugcccugccc

SEQ ID NO: 2446293 - RNA, 19 nt, Human
gaagccgugcccugccccc

SEQ ID NO: 2446294 - RNA, 12 nt, Human
gaagccucuggc

SEQ ID NO: 2446295 - RNA, 10 nt, Human
gaagccuuug

SEQ ID NO: 2446296 - RNA, 11 nt, Human
gaagccuuugu

SEQ ID NO: 2446297 - RNA, 13 nt, Human
gaagccuuuggga

SEQ ID NO: 2446298 - RNA, 15 nt, Human
gaagccuuuccugua

SEQ ID NO: 2446299 - RNA, 18 nt, Human
gaagccuuugggaagggg

SEQ ID NO: 2446300 - RNA, 16 nt, Human
gaagcgagcacugacc

SEQ ID NO: 2446301 - RNA, 21 nt, Human
gaagccuuggggcugaugcag

SEQ ID NO: 2446302 - RNA, 16 nt, Human
gaagccuccccagcuc

SEQ ID NO: 2446303 - RNA, 17 nt, Human
gaagccucuggcuagag

SEQ ID NO: 2446304 - RNA, 13 nt, Human
gaagccucuggcu

SEQ ID NO: 2446305 - RNA, 14 nt, Human
gaagccucuggcua

SEQ ID NO: 2446306 - RNA, 22 nt, Human
gaagcuuguguauccauuauca

SEQ ID NO: 2446307 - RNA, 23 nt, Human
gaagcuucuuaaaugagaaggaa

SEQ ID NO: 2446308 - RNA, 22 nt, Human
gaagcgcgccacucgcuucccc

SEQ ID NO: 2446309 - RNA, 15 nt, Human
gaagcuuugaaggcc

SEQ ID NO: 2446310 - RNA, 14 nt, Human
gaagcuuucugucu

SEQ ID NO: 2446311 - RNA, 14 nt, Human
gaagcuuucaguau

SEQ ID NO: 2446312 - RNA, 23 nt, Human
gaagcuuguguauccauuaucau

SEQ ID NO: 2446313 - RNA, 18 nt, Human
gaagcuuuuaugugaaac

SEQ ID NO: 2446314 - RNA, 15 nt, Human
gaaggaaaaaugugu

SEQ ID NO: 2446315 - RNA, 18 nt, Human
gaaggaaaaggcagggag

SEQ ID NO: 2446316 - RNA, 17 nt, Human
gaagacugcauuauauu

SEQ ID NO: 2446317 - RNA, 15 nt, Human
gaagaagagggagag

SEQ ID NO: 2446318 - RNA, 21 nt, Human
gaagacucauucuucuguacg

SEQ ID NO: 2446319 - RNA, 19 nt, Human
gaagacucauucuucugua

SEQ ID NO: 2446320 - RNA, 16 nt, Human
gaagccagcaggcucu

SEQ ID NO: 2446321 - RNA, 15 nt, Human
gaagccagcaggcuc

SEQ ID NO: 2446322 - RNA, 22 nt, Human
gaagccacgguguucugugaua

SEQ ID NO: 2446323 - RNA, 23 nt, Human
gaagacucuaccagacuguguau

SEQ ID NO: 2446324 - RNA, 15 nt, Human
gaagacucuaccaga

SEQ ID NO: 2446325 - RNA, 13 nt, Human
gaagacucuacca

SEQ ID NO: 2446326 - RNA, 15 nt, Human
gaagccacugaagcu

SEQ ID NO: 2446327 - RNA, 18 nt, Human
gaagccacugaagcuggg

SEQ ID NO: 2446328 - RNA, 19 nt, Human
gaagccaggaauuucccag

SEQ ID NO: 2446329 - RNA, 21 nt, Human
gaagccaggaauuucccagga

SEQ ID NO: 2446330 - RNA, 23 nt, Human
gaagccaggaauuucccaggacc

SEQ ID NO: 2446331 - RNA, 24 nt, Human
gaagccaggaauuucccaggaccc

SEQ ID NO: 2446332 - RNA, 22 nt, Human
gaagccagcuuucccugccucu

SEQ ID NO: 2446333 - RNA, 12 nt, Human
gaagccagccuu

SEQ ID NO: 2446334 - RNA, 20 nt, Human
gaagccagccuucuuccauc

SEQ ID NO: 2446335 - RNA, 22 nt, Human
gaagccacuuucuacaggccag

SEQ ID NO: 2446336 - RNA, 23 nt, Human
gaagccagcaggcucucaggcca

SEQ ID NO: 2446337 - RNA, 10 nt, Human
gaagcccaga

SEQ ID NO: 2446338 - RNA, 12 nt, Human
gaagcccagaau

SEQ ID NO: 2446339 - RNA, 14 nt, Human
gaagccauugucuu

SEQ ID NO: 2446340 - RNA, 13 nt, Human
gaagccauugucu

SEQ ID NO: 2446341 - RNA, 15 nt, Human
gaagcccaagugaaa

SEQ ID NO: 2446342 - RNA, 16 nt, Human
gaagcccaagugaaau

SEQ ID NO: 2446343 - RNA, 16 nt, Human
gaagccauugucuucg

SEQ ID NO: 2446344 - RNA, 14 nt, Human
gaagcccaauaaac

SEQ ID NO: 2446345 - RNA, 14 nt, Human
gaagccaggagcaa

SEQ ID NO: 2446346 - RNA, 13 nt, Human
gaagccaggagca

SEQ ID NO: 2446347 - RNA, 12 nt, Human
gaagccaggagc

SEQ ID NO: 2446348 - RNA, 18 nt, Human
gaagccaggagcaaaugu

SEQ ID NO: 2446349 - RNA, 15 nt, Human
gaagccaggagcaaa

SEQ ID NO: 2446350 - RNA, 22 nt, Human
gaagccaggagcaaauguuucu

SEQ ID NO: 2446351 - RNA, 18 nt, Human
gaagccagugcggcaggu

SEQ ID NO: 2446352 - RNA, 12 nt, Human
gaagccauuguc

SEQ ID NO: 2446353 - RNA, 12 nt, Human
gaaggauacaaa

SEQ ID NO: 2446354 - RNA, 19 nt, Human
gaaggauacaaaagcaugu

SEQ ID NO: 2446355 - RNA, 14 nt, Human
gaaggcaaaugacu

SEQ ID NO: 2446356 - RNA, 15 nt, Human
gaaggcaaagcacga

SEQ ID NO: 2446357 - RNA, 21 nt, Human
gaaggauacaaaagcauguga

SEQ ID NO: 2446358 - RNA, 13 nt, Human
gaaggaguuuuau

SEQ ID NO: 2446359 - RNA, 20 nt, Human
gaaggagccccauuccuggg

SEQ ID NO: 2446360 - RNA, 21 nt, Human
gaaggagccccauuccuggga

SEQ ID NO: 2446361 - RNA, 22 nt, Human
gaaggagccccauuccugggaa

SEQ ID NO: 2446362 - RNA, 16 nt, Human
gaaggagagaaagugg

SEQ ID NO: 2446363 - RNA, 13 nt, Human
gaaggagagaaag

SEQ ID NO: 2446364 - RNA, 12 nt, Human
gaaggagagaaa

SEQ ID NO: 2446365 - RNA, 23 nt, Human
gaaggagacucaccucugccuca

SEQ ID NO: 2446366 - RNA, 21 nt, Human
gaaggagagaaagugggugag

SEQ ID NO: 2446367 - RNA, 20 nt, Human
gaaggagagaaaguggguga

SEQ ID NO: 2446368 - RNA, 15 nt, Human
gaaggagagaagggg

SEQ ID NO: 2446369 - RNA, 16 nt, Human
gaaggagagaagggga

SEQ ID NO: 2446370 - RNA, 18 nt, Human
gaaggagagaaggggagg

SEQ ID NO: 2446371 - RNA, 20 nt, Human
gaaggagagaaggggaggag

SEQ ID NO: 2446372 - RNA, 13 nt, Human
gaaggagagccug

SEQ ID NO: 2446373 - RNA, 15 nt, Human
gaaggagagccugcu

SEQ ID NO: 2446374 - RNA, 16 nt, Human
gaaggagagccugcug

SEQ ID NO: 2446375 - RNA, 17 nt, Human
gaaggaaacccagcucu

SEQ ID NO: 2446376 - RNA, 14 nt, Human
gaaggaaacccagc

SEQ ID NO: 2446377 - RNA, 18 nt, Human
gaaggaaacccagcucug

SEQ ID NO: 2446378 - RNA, 14 nt, Human
gaaggaaaaugaua

SEQ ID NO: 2446379 - RNA, 23 nt, Human
gaaggacccggaggggccuggca

SEQ ID NO: 2446380 - RNA, 17 nt, Human
gaaggagaaggaaggag

SEQ ID NO: 2446381 - RNA, 15 nt, Human
gaaggagacagagcu

SEQ ID NO: 2446382 - RNA, 18 nt, Human
gaaggagacagagcuggu

SEQ ID NO: 2446383 - RNA, 15 nt, Human
gaaggagacucaccu

SEQ ID NO: 2446384 - RNA, 17 nt, Human
gaaggagacucaccucu

SEQ ID NO: 2446385 - RNA, 20 nt, Human
gaaggagacucaccucugcc

SEQ ID NO: 2446386 - RNA, 22 nt, Human
gaaggagacucaccucugccuc

SEQ ID NO: 2446387 - RNA, 19 nt, Human
gaaggacugugacaggcag

SEQ ID NO: 2446388 - RNA, 18 nt, Human
gaaggacugugacaggca

SEQ ID NO: 2446389 - RNA, 22 nt, Human
gaaggacugugacaggcagcag

SEQ ID NO: 2446390 - RNA, 21 nt, Human
gaaggacugugacaggcagca

SEQ ID NO: 2446391 - RNA, 23 nt, Human
gaaggacugugacaggcagcaga

SEQ ID NO: 2446392 - RNA, 16 nt, Human
gaaggagaaggaagga

SEQ ID NO: 2446393 - RNA, 15 nt, Human
gaaggaccuccugag

SEQ ID NO: 2446394 - RNA, 20 nt, Human
gaaggaaaaggcagggagcg

SEQ ID NO: 2446395 - RNA, 15 nt, Human
gaaggccccgcccag

SEQ ID NO: 2446396 - RNA, 14 nt, Human
gaaggccccgccca

SEQ ID NO: 2446397 - RNA, 16 nt, Human
gaaggccccgcccagg

SEQ ID NO: 2446398 - RNA, 13 nt, Human
gaaggguaaagaa

SEQ ID NO: 2446399 - RNA, 17 nt, Human
gaaggaggugagggaug

SEQ ID NO: 2446400 - RNA, 16 nt, Human
gaagguucugguguga

SEQ ID NO: 2446401 - RNA, 20 nt, Human
gaagguucuggugugaacua

SEQ ID NO: 2446402 - RNA, 20 nt, Human
gaaggguuuuccacccugga

SEQ ID NO: 2446403 - RNA, 13 nt, Human
gaagguaaaauug

SEQ ID NO: 2446404 - RNA, 14 nt, Human
gaaggguccuuccc

SEQ ID NO: 2446405 - RNA, 17 nt, Human
gaagggugguggagcca

SEQ ID NO: 2446406 - RNA, 21 nt, Human
gaaggguccuucccucucccc

SEQ ID NO: 2446407 - RNA, 15 nt, Human
gaaggguuuguggcu

SEQ ID NO: 2446408 - RNA, 21 nt, Human
gaaggguuuguggcugggggc

SEQ ID NO: 2446409 - RNA, 14 nt, Human
gaaggcagggaggg

SEQ ID NO: 2446410 - RNA, 13 nt, Human
gaaggccacaugu

SEQ ID NO: 2446411 - RNA, 22 nt, Human
gaaggccagcugccccagccag

SEQ ID NO: 2446412 - RNA, 13 nt, Human
gaaggcagggagg

SEQ ID NO: 2446413 - RNA, 13 nt, Human
gaaggcagggaaa

SEQ ID NO: 2446414 - RNA, 17 nt, Human
gaaggcaagagggggug

SEQ ID NO: 2446415 - RNA, 16 nt, Human
gaaggcaagagggggu

SEQ ID NO: 2446416 - RNA, 14 nt, Human
gaaggcaagagggg

SEQ ID NO: 2446417 - RNA, 12 nt, Human
gaaggcaaaaaa

SEQ ID NO: 2446418 - RNA, 15 nt, Human
gaaggcaaaugacuu

SEQ ID NO: 2446419 - RNA, 16 nt, Human
gaaggcaaaugacuuu

SEQ ID NO: 2446420 - RNA, 23 nt, Human
gaaggcaagaggggguggagggg

SEQ ID NO: 2446421 - RNA, 22 nt, Human
gaaggcaagaggggguggaggg

SEQ ID NO: 2446422 - RNA, 24 nt, Human
gaaggcacuaaaaagagcuguccu

SEQ ID NO: 2446423 - RNA, 15 nt, Human
gaaggcagaaagcaa

SEQ ID NO: 2446424 - RNA, 18 nt, Human
gaaggcagaaagcaaaau

SEQ ID NO: 2446425 - RNA, 13 nt, Human
gaaggcaggaaga

SEQ ID NO: 2446426 - RNA, 16 nt, Human
gaaggcagccaccagc

SEQ ID NO: 2446427 - RNA, 13 nt, Human
gaaggcaaugcca

SEQ ID NO: 2446428 - RNA, 17 nt, Human
gaaggcagcagguggca

SEQ ID NO: 2446429 - RNA, 12 nt, Human
gaaauugacaga

SEQ ID NO: 2446430 - RNA, 21 nt, Human
gaaauugacacaaguggaccu

SEQ ID NO: 2446431 - RNA, 17 nt, Human
gaaauucuccuggaggu

SEQ ID NO: 2446432 - RNA, 15 nt, Human
gaaauuggcuggaug

SEQ ID NO: 2446433 - RNA, 14 nt, Human
gaaauuggcuggau

SEQ ID NO: 2446434 - RNA, 22 nt, Human
gaaauuggaacagaauguuuua

SEQ ID NO: 2446435 - RNA, 17 nt, Human
gaaauuggaacagaaug

SEQ ID NO: 2446436 - RNA, 17 nt, Human
gaaauugccugacgaac

SEQ ID NO: 2446437 - RNA, 13 nt, Human
gaaauugacagau

SEQ ID NO: 2446438 - RNA, 19 nt, Human
gaaauugcauuuccugaca

SEQ ID NO: 2446439 - RNA, 22 nt, Human
gaaauuguuuaaguguuguaaa

SEQ ID NO: 2446440 - RNA, 19 nt, Human
gaaauuuaaaagacacugu

SEQ ID NO: 2446441 - RNA, 20 nt, Human
gaaauugucuagcagagcag

SEQ ID NO: 2446442 - RNA, 21 nt, Human
gaaauugucuagcagagcagg

SEQ ID NO: 2446443 - RNA, 13 nt, Human
gaaauuuaaaaga

SEQ ID NO: 2446444 - RNA, 22 nt, Human
gaaauuuaauauagcuauuuuu

SEQ ID NO: 2446445 - RNA, 16 nt, Human
gaaauuuaauucaugu

SEQ ID NO: 2446446 - RNA, 20 nt, Human
gaaauuuaauucauguuucu

SEQ ID NO: 2446447 - RNA, 21 nt, Human
gaaauuuaauucauguuucuu

SEQ ID NO: 2446448 - RNA, 15 nt, Human
gaaauuugauuucua

SEQ ID NO: 2446449 - RNA, 23 nt, Human
gaaauuuaauucauguuucuuaa

SEQ ID NO: 2446450 - RNA, 17 nt, Human
gaaauuuguuauaauga

SEQ ID NO: 2446451 - RNA, 15 nt, Human
gaaauuuuauaugcu

SEQ ID NO: 2446452 - RNA, 19 nt, Human
gaaauuuuauaugcuuacu

SEQ ID NO: 2446453 - RNA, 22 nt, Human
gaaauuuuaaccuaugauauuu

SEQ ID NO: 2446454 - RNA, 21 nt, Human
gaaauuuucuagacuuucugu

SEQ ID NO: 2446455 - RNA, 14 nt, Human
gaaauuuuccaaug

SEQ ID NO: 2446456 - RNA, 21 nt, Human
gaaauuugauuucuauucaag

SEQ ID NO: 2446457 - RNA, 22 nt, Human
gaaauuuuauaugcuuacugau

SEQ ID NO: 2446458 - RNA, 20 nt, Human
gaaauuuucuagacuuucug

SEQ ID NO: 2446459 - RNA, 18 nt, Human
gaaauuuucuagacuuuc

SEQ ID NO: 2446460 - RNA, 16 nt, Human
gaacacugggggaggg

SEQ ID NO: 2446461 - RNA, 17 nt, Human
gaacacugggggagggg

SEQ ID NO: 2446462 - RNA, 16 nt, Human
gaaauucuccuggagg

SEQ ID NO: 2446463 - RNA, 15 nt, Human
gaaauucuccuggag

SEQ ID NO: 2446464 - RNA, 14 nt, Human
gaaauucuccugga

SEQ ID NO: 2446465 - RNA, 16 nt, Human
gaaauuccuguagcau

SEQ ID NO: 2446466 - RNA, 15 nt, Human
gaaauuccuguagca

SEQ ID NO: 2446467 - RNA, 19 nt, Human
gaaauuccuguagcaucuu

SEQ ID NO: 2446468 - RNA, 20 nt, Human
gaaauuaccagaguuguucu

SEQ ID NO: 2446469 - RNA, 17 nt, Human
gaaauuacacccaaaga

SEQ ID NO: 2446470 - RNA, 17 nt, Human
gaaauuaagaaggcaaa

SEQ ID NO: 2446471 - RNA, 18 nt, Human
gaaauuaagaaggcaaaa

SEQ ID NO: 2446472 - RNA, 22 nt, Human
gaaauuaagaaggcaaaaaugu

SEQ ID NO: 2446473 - RNA, 13 nt, Human
gaaauuaagaaga

SEQ ID NO: 2446474 - RNA, 15 nt, Human
gaaauuaagaagaaa

SEQ ID NO: 2446475 - RNA, 16 nt, Human
gaaauuaagaagaaac

SEQ ID NO: 2446476 - RNA, 20 nt, Human
gaaaugguuguauuagaugu

SEQ ID NO: 2446477 - RNA, 19 nt, Human
gaaaugguuguauuagaug

SEQ ID NO: 2446478 - RNA, 18 nt, Human
gaaaugguuguauuagau

SEQ ID NO: 2446479 - RNA, 17 nt, Human
gaaaugguuguauuaga

SEQ ID NO: 2446480 - RNA, 15 nt, Human
gaaaugguuguauua

SEQ ID NO: 2446481 - RNA, 14 nt, Human
gaaaugguuguauu

SEQ ID NO: 2446482 - RNA, 21 nt, Human
gaaaugguaugagcugagggg

SEQ ID NO: 2446483 - RNA, 17 nt, Human
gaaaugguaugagcuga

SEQ ID NO: 2446484 - RNA, 13 nt, Human
gaaaugguuguau

SEQ ID NO: 2446485 - RNA, 22 nt, Human
gaaauguuauuuuuuaauuauu

SEQ ID NO: 2446486 - RNA, 16 nt, Human
gaaauguguuucugua

SEQ ID NO: 2446487 - RNA, 22 nt, Human
gaaauguaagggaaacugccag

SEQ ID NO: 2446488 - RNA, 21 nt, Human
gaaauguuauuuuuuaauuau

SEQ ID NO: 2446489 - RNA, 14 nt, Human
gaaaugggcagagc

SEQ ID NO: 2446490 - RNA, 22 nt, Human
gaaaugcuuguggauugagggu

SEQ ID NO: 2446491 - RNA, 16 nt, Human
gaaauggcuuugugau

SEQ ID NO: 2446492 - RNA, 17 nt, Human
gaaauggaauacugaag

SEQ ID NO: 2446493 - RNA, 17 nt, Human
gaaauggcuugaagcca

SEQ ID NO: 2446494 - RNA, 20 nt, Human
gaaaugggcagagcagagac

SEQ ID NO: 2446495 - RNA, 16 nt, Human
gaaaugguaugagcug

SEQ ID NO: 2446496 - RNA, 19 nt, Human
gaaaugggacuuaacuccu

SEQ ID NO: 2446497 - RNA, 17 nt, Human
gaaaugggacuuaacuc

SEQ ID NO: 2446498 - RNA, 18 nt, Human
gaaauggcuugaagccaa

SEQ ID NO: 2446499 - RNA, 16 nt, Human
gaaauauuauguuaaa

SEQ ID NO: 2446500 - RNA, 13 nt, Human
gaaauauuauguu

SEQ ID NO: 2446501 - RNA, 16 nt, Human
gaaaugcugccugccu

SEQ ID NO: 2446502 - RNA, 15 nt, Human
gaaaugcugccugcc

SEQ ID NO: 2446503 - RNA, 16 nt, Human
gaaauauugcuggggu

SEQ ID NO: 2446504 - RNA, 15 nt, Human
gaaauauucccuaga

SEQ ID NO: 2446505 - RNA, 19 nt, Human
gaaauauuaaacccuggau

SEQ ID NO: 2446506 - RNA, 19 nt, Human
gaaaugcugggcugacggu

SEQ ID NO: 2446507 - RNA, 17 nt, Human
gaaaugcugccugccug

SEQ ID NO: 2446508 - RNA, 15 nt, Human
gaaaugcugggcuga

SEQ ID NO: 2446509 - RNA, 23 nt, Human
gaaaugcugguuuuucaguuuuc

SEQ ID NO: 2446510 - RNA, 18 nt, Human
gaaauaagaaaaaucaug

SEQ ID NO: 2446511 - RNA, 16 nt, Human
gaaauaagaaaaauca

SEQ ID NO: 2446512 - RNA, 21 nt, Human
gaaauaagaaaaaucauguuu

SEQ ID NO: 2446513 - RNA, 14 nt, Human
gaaauaagaaaaau

SEQ ID NO: 2446514 - RNA, 22 nt, Human
gaaauaacuccuucuuguagua

SEQ ID NO: 2446515 - RNA, 21 nt, Human
gaaauaaauguaucauagaaa

SEQ ID NO: 2446516 - RNA, 14 nt, Human
gaaauaaauagcua

SEQ ID NO: 2446517 - RNA, 15 nt, Human
gaaauaaauagcuau

SEQ ID NO: 2446518 - RNA, 17 nt, Human
gaaauaaauagcuauau

SEQ ID NO: 2446519 - RNA, 21 nt, Human
gaaauaaauagcuauauccau

SEQ ID NO: 2446520 - RNA, 20 nt, Human
gaaauaacaauguuaaggaa

SEQ ID NO: 2446521 - RNA, 18 nt, Human
gaaauaacaauguuaagg

SEQ ID NO: 2446522 - RNA, 17 nt, Human
gaaauaacaauguuaag

SEQ ID NO: 2446523 - RNA, 16 nt, Human
gaaauaacaauguuaa

SEQ ID NO: 2446524 - RNA, 15 nt, Human
gaaauaacaauguua

SEQ ID NO: 2446525 - RNA, 18 nt, Human
gaaauaacaagucgauga

SEQ ID NO: 2446526 - RNA, 23 nt, Human
gaaauaaauagcuauauccaugu

SEQ ID NO: 2446527 - RNA, 11 nt, Human
gaaauaauaaa

SEQ ID NO: 2446528 - RNA, 14 nt, Human
gaaauaauaugcau

SEQ ID NO: 2446529 - RNA, 13 nt, Human
gaaauaauaugca

SEQ ID NO: 2446530 - RNA, 13 nt, Human
gaaauaauaaauc

SEQ ID NO: 2446531 - RNA, 14 nt, Human
gaaauaauaaaucu

SEQ ID NO: 2446532 - RNA, 17 nt, Human
gaaauaauaaaucuggu

SEQ ID NO: 2446533 - RNA, 15 nt, Human
gaaauaauaugcauu

SEQ ID NO: 2446534 - RNA, 19 nt, Human
gaaauaauguacaucuggc

SEQ ID NO: 2446535 - RNA, 18 nt, Human
gaaacauaaauaaaauga

SEQ ID NO: 2446536 - RNA, 17 nt, Human
gaaacauaaauaaaaug

SEQ ID NO: 2446537 - RNA, 15 nt, Human
gaaacauaaauaaaa

SEQ ID NO: 2446538 - RNA, 13 nt, Human
gaaacauaaauaa

SEQ ID NO: 2446539 - RNA, 22 nt, Human
gaaacauaaauaaaaugaccag

SEQ ID NO: 2446540 - RNA, 23 nt, Human
gaaacaucaguuacucugaaggg

SEQ ID NO: 2446541 - RNA, 19 nt, Human
gaaacaucaguuacucuga

SEQ ID NO: 2446542 - RNA, 20 nt, Human
gaaacaucaguuacucugaa

SEQ ID NO: 2446543 - RNA, 22 nt, Human
gaaacaggaccacaaaaaugaa

SEQ ID NO: 2446544 - RNA, 13 nt, Human
gaaacaggagaga

SEQ ID NO: 2446545 - RNA, 17 nt, Human
gaaacaggagagaaagg

SEQ ID NO: 2446546 - RNA, 15 nt, Human
gaaacaugguuuuga

SEQ ID NO: 2446547 - RNA, 20 nt, Human
gaaacaugacucguauaugu

SEQ ID NO: 2446548 - RNA, 17 nt, Human
gaaauaaaguuugcuua

SEQ ID NO: 2446549 - RNA, 18 nt, Human
gaaauaaaguuggugaca

SEQ ID NO: 2446550 - RNA, 17 nt, Human
gaaauacauggacaaua

SEQ ID NO: 2446551 - RNA, 12 nt, Human
gaaauacauauu

SEQ ID NO: 2446552 - RNA, 16 nt, Human
gaaauacuacuuacca

SEQ ID NO: 2446553 - RNA, 19 nt, Human
gaaauacuacuccuguaau

SEQ ID NO: 2446554 - RNA, 21 nt, Human
gaaauacuacuuaccauaugu

SEQ ID NO: 2446555 - RNA, 21 nt, Human
gaaauacauauuuccaagaag

SEQ ID NO: 2446556 - RNA, 17 nt, Human
gaaauacauauuuccaa

SEQ ID NO: 2446557 - RNA, 16 nt, Human
gaaauacuacuccugu

SEQ ID NO: 2446558 - RNA, 22 nt, Human
gaaauacagauuuugauagcaa

SEQ ID NO: 2446559 - RNA, 17 nt, Human
gaaauacagauuuugau

SEQ ID NO: 2446560 - RNA, 19 nt, Human
gaaauacacaaguaaacau

SEQ ID NO: 2446561 - RNA, 18 nt, Human
gaaauacacaaguaaaca

SEQ ID NO: 2446562 - RNA, 21 nt, Human
gaaauacaauucuacauuguc

SEQ ID NO: 2446563 - RNA, 15 nt, Human
gaaauacuauuuaaa

SEQ ID NO: 2446564 - RNA, 14 nt, Human
gaaauacuauuuaa

SEQ ID NO: 2446565 - RNA, 15 nt, Human
gaaauacuguuugag

SEQ ID NO: 2446566 - RNA, 23 nt, Human
gaaauagaaaaacccugccccca

SEQ ID NO: 2446567 - RNA, 21 nt, Human
gaaauagaaaaacccugcccc

SEQ ID NO: 2446568 - RNA, 20 nt, Human
gaaauagaaaaacccugccc

SEQ ID NO: 2446569 - RNA, 19 nt, Human
gaaauagaaaaacccugcc

SEQ ID NO: 2446570 - RNA, 19 nt, Human
gaaauacuguuugagguuu

SEQ ID NO: 2446571 - RNA, 18 nt, Human
gaaauacugcaagaaaau

SEQ ID NO: 2446572 - RNA, 20 nt, Human
gaaauagaaauuuccagaga

SEQ ID NO: 2446573 - RNA, 18 nt, Human
gaaauagacaguauauuu

SEQ ID NO: 2446574 - RNA, 20 nt, Human
gaaauagcuccguggagcag

SEQ ID NO: 2446575 - RNA, 19 nt, Human
gaaauagacaguauauuua

SEQ ID NO: 2446576 - RNA, 22 nt, Human
gaaauaugauuuuauuugacaa

SEQ ID NO: 2446577 - RNA, 15 nt, Human
gaaauaugauuuuau

SEQ ID NO: 2446578 - RNA, 17 nt, Human
gaaauaugcacaauagc

SEQ ID NO: 2446579 - RNA, 18 nt, Human
gaaauaugcacaauagca

SEQ ID NO: 2446580 - RNA, 13 nt, Human
gaaauaugcaucu

SEQ ID NO: 2446581 - RNA, 14 nt, Human
gaaauaucuguauu

SEQ ID NO: 2446582 - RNA, 14 nt, Human
gaaauaugauuuua

SEQ ID NO: 2446583 - RNA, 14 nt, Human
gaaauaugaaugcc

SEQ ID NO: 2446584 - RNA, 20 nt, Human
gaaauaugaagaacugagga

SEQ ID NO: 2446585 - RNA, 21 nt, Human
gaaauaucugaaaauguaugu

SEQ ID NO: 2446586 - RNA, 22 nt, Human
gaaauaguguggaaauuaagaa

SEQ ID NO: 2446587 - RNA, 17 nt, Human
gaaauagucugugugaa

SEQ ID NO: 2446588 - RNA, 15 nt, Human
gaaauagucugugug

SEQ ID NO: 2446589 - RNA, 13 nt, Human
gaaauauaauuga

SEQ ID NO: 2446590 - RNA, 18 nt, Human
gaaauaguucaaagccaa

SEQ ID NO: 2446591 - RNA, 15 nt, Human
gaaauauacacacag

SEQ ID NO: 2446592 - RNA, 17 nt, Human
gaaauauacacacagca

SEQ ID NO: 2446593 - RNA, 16 nt, Human
gaacucaaauggggcc

SEQ ID NO: 2446594 - RNA, 19 nt, Human
gaacucaaauggggccaga

SEQ ID NO: 2446595 - RNA, 20 nt, Human
gaacucaaauggggccagau

SEQ ID NO: 2446596 - RNA, 22 nt, Human
gaacucaaauggggccagaucc

SEQ ID NO: 2446597 - RNA, 23 nt, Human
gaacucaaauggggccagaucca

SEQ ID NO: 2446598 - RNA, 22 nt, Human
gaacucaucuagguaaauuaca

SEQ ID NO: 2446599 - RNA, 14 nt, Human
gaacucccuuucaa

SEQ ID NO: 2446600 - RNA, 15 nt, Human
gaacucaacuuugac

SEQ ID NO: 2446601 - RNA, 13 nt, Human
gaacucauuccug

SEQ ID NO: 2446602 - RNA, 14 nt, Human
gaacucauuccugc

SEQ ID NO: 2446603 - RNA, 22 nt, Human
gaacucauuccugccugucucc

SEQ ID NO: 2446604 - RNA, 15 nt, Human
gaacucccuuucaac

SEQ ID NO: 2446605 - RNA, 22 nt, Human
gaacuggguacuuguggacaca

SEQ ID NO: 2446606 - RNA, 17 nt, Human
gaacuguccagagagca

SEQ ID NO: 2446607 - RNA, 16 nt, Human
gaacuguccagagagc

SEQ ID NO: 2446608 - RNA, 15 nt, Human
gaacuguccagagag

SEQ ID NO: 2446609 - RNA, 14 nt, Human
gaacuguccagaga

SEQ ID NO: 2446610 - RNA, 22 nt, Human
gaacuguccagagagcaacucu

SEQ ID NO: 2446611 - RNA, 17 nt, Human
gaacugucucucaugaa

SEQ ID NO: 2446612 - RNA, 20 nt, Human
gaacuggucaccaugaaacu

SEQ ID NO: 2446613 - RNA, 19 nt, Human
gaacucccagcaacacaag

SEQ ID NO: 2446614 - RNA, 13 nt, Human
gaacuguccagag

SEQ ID NO: 2446615 - RNA, 11 nt, Human
gaacucccagc

SEQ ID NO: 2446616 - RNA, 17 nt, Human
gaacucccagcaacaca

SEQ ID NO: 2446617 - RNA, 16 nt, Human
gaacucauuccugccu

SEQ ID NO: 2446618 - RNA, 21 nt, Human
gaacuugcagcugauguugga

SEQ ID NO: 2446619 - RNA, 12 nt, Human
gaacuugcaugg

SEQ ID NO: 2446620 - RNA, 12 nt, Human
gaacuugacaau

SEQ ID NO: 2446621 - RNA, 18 nt, Human
gaacuucgcaucaaaaga

SEQ ID NO: 2446622 - RNA, 23 nt, Human
gaacuuccagguguuacuguaau

SEQ ID NO: 2446623 - RNA, 22 nt, Human
gaacuuccagauccuggaaauc

SEQ ID NO: 2446624 - RNA, 15 nt, Human
gaacuuauucuguag

SEQ ID NO: 2446625 - RNA, 18 nt, Human
gaacuguccagagagcaa

SEQ ID NO: 2446626 - RNA, 17 nt, Human
gaacuuacauuguucaa

SEQ ID NO: 2446627 - RNA, 21 nt, Human
gaacugucucucaugaaccuc

SEQ ID NO: 2446628 - RNA, 22 nt, Human
gaacugugaggguaaaggcuau

SEQ ID NO: 2446629 - RNA, 20 nt, Human
gaacuuauccuaaaacaaau

SEQ ID NO: 2446630 - RNA, 12 nt, Human
gaacuugguucc

SEQ ID NO: 2446631 - RNA, 23 nt, Human
gaacuugguucccauuugcuccu

SEQ ID NO: 2446632 - RNA, 21 nt, Human
gaacuuguaaaggaauuuaaa

SEQ ID NO: 2446633 - RNA, 16 nt, Human
gaacuuggcgcugccc

SEQ ID NO: 2446634 - RNA, 15 nt, Human
gaacuuggcgcugcc

SEQ ID NO: 2446635 - RNA, 13 nt, Human
gaacuuggcgcug

SEQ ID NO: 2446636 - RNA, 22 nt, Human
gaacuugcugcugagugcacca

SEQ ID NO: 2446637 - RNA, 19 nt, Human
gaacuuggaaagaaaugcc

SEQ ID NO: 2446638 - RNA, 15 nt, Human
gaagaaacagaucuc

SEQ ID NO: 2446639 - RNA, 18 nt, Human
gaagaaaauugcugugcc

SEQ ID NO: 2446640 - RNA, 19 nt, Human
gaagaacugcaggcccugg

SEQ ID NO: 2446641 - RNA, 21 nt, Human
gaagaagcaccaaucaugaau

SEQ ID NO: 2446642 - RNA, 22 nt, Human
gaagaagagggagagguggagc

SEQ ID NO: 2446643 - RNA, 14 nt, Human
gaagaagagggaga

SEQ ID NO: 2446644 - RNA, 16 nt, Human
gaagaacuugcaugga

SEQ ID NO: 2446645 - RNA, 22 nt, Human
gaagaacuguguuucaaguuca

SEQ ID NO: 2446646 - RNA, 22 nt, Human
gaagaaaacuccuuuagcaggu

SEQ ID NO: 2446647 - RNA, 14 nt, Human
gaagaaaacaucua

SEQ ID NO: 2446648 - RNA, 17 nt, Human
gaacuuggaggcaccau

SEQ ID NO: 2446649 - RNA, 15 nt, Human
gaacuuggaggcacc

SEQ ID NO: 2446650 - RNA, 22 nt, Human
gaagaaaacaucuauucucucc

SEQ ID NO: 2446651 - RNA, 20 nt, Human
gaagaaaagugggccagugu

SEQ ID NO: 2446652 - RNA, 17 nt, Human
gaagaaaauugcugugc

SEQ ID NO: 2446653 - RNA, 22 nt, Human
gaacuagaguuuagcuggaaaa

SEQ ID NO: 2446654 - RNA, 21 nt, Human
gaacuagaguuuagcuggaaa

SEQ ID NO: 2446655 - RNA, 22 nt, Human
gaacgugacugccccaacuccu

SEQ ID NO: 2446656 - RNA, 14 nt, Human
gaacgugacugccc

SEQ ID NO: 2446657 - RNA, 16 nt, Human
gaacguggcucugcug

SEQ ID NO: 2446658 - RNA, 17 nt, Human
gaacguggcucugcugg

SEQ ID NO: 2446659 - RNA, 16 nt, Human
gaacgggguccuucaa

SEQ ID NO: 2446660 - RNA, 15 nt, Human
gaacgguaaauuucu

SEQ ID NO: 2446661 - RNA, 17 nt, Human
gaacgguaaauuucugu

SEQ ID NO: 2446662 - RNA, 15 nt, Human
gaacggggagaaaag

SEQ ID NO: 2446663 - RNA, 13 nt, Human
gaacuauuagagc

SEQ ID NO: 2446664 - RNA, 17 nt, Human
gaacuauggacggugcu

SEQ ID NO: 2446665 - RNA, 15 nt, Human
gaacuaugaacuaca

SEQ ID NO: 2446666 - RNA, 18 nt, Human
gaacuauuccccagcagg

SEQ ID NO: 2446667 - RNA, 21 nt, Human
gaacuauggacggugcuccag

SEQ ID NO: 2446668 - RNA, 15 nt, Human
gaacuauuggagggu

SEQ ID NO: 2446669 - RNA, 20 nt, Human
gaacuauuccccagcagggu

SEQ ID NO: 2446670 - RNA, 22 nt, Human
gaacuauuggagggugggagag

SEQ ID NO: 2446671 - RNA, 15 nt, Human
gaacuauaaagaagu

SEQ ID NO: 2446672 - RNA, 22 nt, Human
gaacuagccaccaacucuugca

SEQ ID NO: 2446673 - RNA, 23 nt, Human
gaacuagccaccaacucuugcag

SEQ ID NO: 2446674 - RNA, 15 nt, Human
gaaccuguagagcua

SEQ ID NO: 2446675 - RNA, 12 nt, Human
gaaccugugucc

SEQ ID NO: 2446676 - RNA, 20 nt, Human
gaaccuguccuugcacacuc

SEQ ID NO: 2446677 - RNA, 12 nt, Human
gaaccuguccuu

SEQ ID NO: 2446678 - RNA, 13 nt, Human
gaaccuggagggg

SEQ ID NO: 2446679 - RNA, 21 nt, Human
gaaccuggagggcuggaaucu

SEQ ID NO: 2446680 - RNA, 16 nt, Human
gaaccuggagggcuag

SEQ ID NO: 2446681 - RNA, 15 nt, Human
gaaccuggagggcua

SEQ ID NO: 2446682 - RNA, 17 nt, Human
gaaccuggaggggcuag

SEQ ID NO: 2446683 - RNA, 16 nt, Human
gaaccuggaggggcua

SEQ ID NO: 2446684 - RNA, 15 nt, Human
gaaccuggaguuccu

SEQ ID NO: 2446685 - RNA, 16 nt, Human
gaaccuggaacuuggg

SEQ ID NO: 2446686 - RNA, 15 nt, Human
gaaccuggagagcua

SEQ ID NO: 2446687 - RNA, 12 nt, Human
gaaccuggaacu

SEQ ID NO: 2446688 - RNA, 12 nt, Human
gaaccuggagag

SEQ ID NO: 2446689 - RNA, 13 nt, Human
gaaccuuguuauu

SEQ ID NO: 2446690 - RNA, 18 nt, Human
gaaccuuguuauuucuca

SEQ ID NO: 2446691 - RNA, 22 nt, Human
gaacggggcucuucucauuuca

SEQ ID NO: 2446692 - RNA, 19 nt, Human
gaacggggcucuucucauu

SEQ ID NO: 2446693 - RNA, 22 nt, Human
gaacggagccccaggccucugu

SEQ ID NO: 2446694 - RNA, 23 nt, Human
gaacggagccccaggccucugug

SEQ ID NO: 2446695 - RNA, 14 nt, Human
gaacggggagaaaa

SEQ ID NO: 2446696 - RNA, 19 nt, Human
gaaccuugugccuggcuca

SEQ ID NO: 2446697 - RNA, 18 nt, Human
gaaccuugugccuggcuc

SEQ ID NO: 2446698 - RNA, 17 nt, Human
gaaccuugugccuggcu

SEQ ID NO: 2446699 - RNA, 16 nt, Human
gaaccuugugccuggc

SEQ ID NO: 2446700 - RNA, 14 nt, Human
gaaccuugugccug

SEQ ID NO: 2446701 - RNA, 18 nt, Human
gaaccuucuggccuccca

SEQ ID NO: 2446702 - RNA, 21 nt, Human
gaaccuucuggccucccacag

SEQ ID NO: 2446703 - RNA, 21 nt, Human
gaaccacaucuugcucugcug

SEQ ID NO: 2446704 - RNA, 16 nt, Human
gaacagacuggaagca

SEQ ID NO: 2446705 - RNA, 15 nt, Human
gaacagacuggaagc

SEQ ID NO: 2446706 - RNA, 17 nt, Human
gaacagacaacagaagu

SEQ ID NO: 2446707 - RNA, 18 nt, Human
gaacagacaacagaaguc

SEQ ID NO: 2446708 - RNA, 19 nt, Human
gaacagacaacagaaguca

SEQ ID NO: 2446709 - RNA, 15 nt, Human
gaacagacaggagaa

SEQ ID NO: 2446710 - RNA, 16 nt, Human
gaacagacaggagaaa

SEQ ID NO: 2446711 - RNA, 14 nt, Human
gaacagaaggauga

SEQ ID NO: 2446712 - RNA, 19 nt, Human
gaacagaaggaugaaugag

SEQ ID NO: 2446713 - RNA, 15 nt, Human
gaacagaauguuuua

SEQ ID NO: 2446714 - RNA, 14 nt, Human
gaacagaauguuuu

SEQ ID NO: 2446715 - RNA, 12 nt, Human
gaacagaauguu

SEQ ID NO: 2446716 - RNA, 18 nt, Human
gaacacugggggagggga

SEQ ID NO: 2446717 - RNA, 20 nt, Human
gaacacugggggaggggaca

SEQ ID NO: 2446718 - RNA, 13 nt, Human
gaacagaaauacc

SEQ ID NO: 2446719 - RNA, 15 nt, Human
gaacacuuuuaauaa

SEQ ID NO: 2446720 - RNA, 12 nt, Human
gaacagaaggau

SEQ ID NO: 2446721 - RNA, 15 nt, Human
gaaccuaccuucauu

SEQ ID NO: 2446722 - RNA, 19 nt, Human
gaaccguuuugaagcuacu

SEQ ID NO: 2446723 - RNA, 20 nt, Human
gaaccuaacuccccacccca

SEQ ID NO: 2446724 - RNA, 17 nt, Human
gaaccguuuugaagcua

SEQ ID NO: 2446725 - RNA, 18 nt, Human
gaaccguuuugaagcuac

SEQ ID NO: 2446726 - RNA, 17 nt, Human
gaaccugacguagcugc

SEQ ID NO: 2446727 - RNA, 12 nt, Human
gaaccugacccc

SEQ ID NO: 2446728 - RNA, 14 nt, Human
gaaccuagaagggc

SEQ ID NO: 2446729 - RNA, 17 nt, Human
gaaccucuuccccagaa

SEQ ID NO: 2446730 - RNA, 11 nt, Human
gaaccugaccc

SEQ ID NO: 2446731 - RNA, 17 nt, Human
gaaccaccacacccagc

SEQ ID NO: 2446732 - RNA, 16 nt, Human
gaaccaccacacccag

SEQ ID NO: 2446733 - RNA, 18 nt, Human
gaacagacaggagaaaug

SEQ ID NO: 2446734 - RNA, 17 nt, Human
gaacagacaggagaaau

SEQ ID NO: 2446735 - RNA, 13 nt, Human
gaaccgcaggaag

SEQ ID NO: 2446736 - RNA, 20 nt, Human
gaaccgcaggaagcugcucc

SEQ ID NO: 2446737 - RNA, 14 nt, Human
gaaccgcaggaagc

SEQ ID NO: 2446738 - RNA, 15 nt, Human
gaaccgcaggaagcu

SEQ ID NO: 2446739 - RNA, 15 nt, Human
gaaccgcugaauaug

SEQ ID NO: 2446740 - RNA, 16 nt, Human
gaaccgcaggaagcug

SEQ ID NO: 2446741 - RNA, 20 nt, Human
cucugccucugacacacagc

SEQ ID NO: 2446742 - RNA, 19 nt, Human
cucugccucugacacacag

SEQ ID NO: 2446743 - RNA, 21 nt, Human
cucugccucccaucacccgcu

SEQ ID NO: 2446744 - RNA, 22 nt, Human
cucugccggcucuuuccuugcu

SEQ ID NO: 2446745 - RNA, 16 nt, Human
cucugccucugacaca

SEQ ID NO: 2446746 - RNA, 20 nt, Human
cucuggauuauauuaugaag

SEQ ID NO: 2446747 - RNA, 19 nt, Human
cucuggauuauauuaugaa

SEQ ID NO: 2446748 - RNA, 10 nt, Human
cucugccuga

SEQ ID NO: 2446749 - RNA, 20 nt, Human
cucuggauggcaccagaggc

SEQ ID NO: 2446750 - RNA, 19 nt, Human
cucuggauggcaccagagg

SEQ ID NO: 2446751 - RNA, 16 nt, Human
cucuggauggcaccag

SEQ ID NO: 2446752 - RNA, 15 nt, Human
cucuggauggcacca

SEQ ID NO: 2446753 - RNA, 13 nt, Human
cucuggauggcac

SEQ ID NO: 2446754 - RNA, 17 nt, Human
cucugccucugccugca

SEQ ID NO: 2446755 - RNA, 19 nt, Human
cucuggcauuagaauuauu

SEQ ID NO: 2446756 - RNA, 18 nt, Human
cucuggcauuagaauuau

SEQ ID NO: 2446757 - RNA, 19 nt, Human
cucuggcaguucuggaaug

SEQ ID NO: 2446758 - RNA, 23 nt, Human
cucuggcagcucagagagggugg

SEQ ID NO: 2446759 - RNA, 22 nt, Human
cucuggauuggagauagggaaa

SEQ ID NO: 2446760 - RNA, 18 nt, Human
cucuggauugugggaauu

SEQ ID NO: 2446761 - RNA, 22 nt, Human
cucuggccuucggccuccaucc

SEQ ID NO: 2446762 - RNA, 15 nt, Human
cucuggccccaaggg

SEQ ID NO: 2446763 - RNA, 14 nt, Human
cucuggccccaagg

SEQ ID NO: 2446764 - RNA, 24 nt, Human
cucuggcccucuaccccugaucug

SEQ ID NO: 2446765 - RNA, 13 nt, Human
cucuggcccugcc

SEQ ID NO: 2446766 - RNA, 16 nt, Human
cucuggccuuuuccua

SEQ ID NO: 2446767 - RNA, 15 nt, Human
cucuggccuuuuccu

SEQ ID NO: 2446768 - RNA, 21 nt, Human
cucuggccuucggccuccauc

SEQ ID NO: 2446769 - RNA, 23 nt, Human
cucuggcauuagaauuauuuaaa

SEQ ID NO: 2446770 - RNA, 20 nt, Human
cucuggcauuagaauuauuu

SEQ ID NO: 2446771 - RNA, 10 nt, Human
cucuggccag

SEQ ID NO: 2446772 - RNA, 15 nt, Human
cucuggccaggaugg

SEQ ID NO: 2446773 - RNA, 13 nt, Human
cucuggccccaag

SEQ ID NO: 2446774 - RNA, 19 nt, Human
cucuggccaggauggaggg

SEQ ID NO: 2446775 - RNA, 22 nt, Human
cucuguccugggagugagcugg

SEQ ID NO: 2446776 - RNA, 15 nt, Human
cucuguccugggagu

SEQ ID NO: 2446777 - RNA, 13 nt, Human
cucuguccuggga

SEQ ID NO: 2446778 - RNA, 14 nt, Human
cucuguccugggag

SEQ ID NO: 2446779 - RNA, 20 nt, Human
cucugggccauucuccacag

SEQ ID NO: 2446780 - RNA, 15 nt, Human
cucugggcaggaccu

SEQ ID NO: 2446781 - RNA, 14 nt, Human
cucuggcguguggg

SEQ ID NO: 2446782 - RNA, 17 nt, Human
cucugggagaggauuuu

SEQ ID NO: 2446783 - RNA, 16 nt, Human
cucuggcgacaguuuu

SEQ ID NO: 2446784 - RNA, 14 nt, Human
cucuggcuagaggc

SEQ ID NO: 2446785 - RNA, 23 nt, Human
cucugggcaggaccucagagucc

SEQ ID NO: 2446786 - RNA, 23 nt, Human
cucugggccaagucaaagacauu

SEQ ID NO: 2446787 - RNA, 17 nt, Human
cucugggcugccaugug

SEQ ID NO: 2446788 - RNA, 14 nt, Human
cucuggggacuccg

SEQ ID NO: 2446789 - RNA, 20 nt, Human
cucuggggccacacagaaac

SEQ ID NO: 2446790 - RNA, 17 nt, Human
cucuggggccacacaga

SEQ ID NO: 2446791 - RNA, 15 nt, Human
cucugucgcccaggc

SEQ ID NO: 2446792 - RNA, 13 nt, Human
cucugucgcccag

SEQ ID NO: 2446793 - RNA, 18 nt, Human
cucugucgcccaggcugg

SEQ ID NO: 2446794 - RNA, 22 nt, Human
cucugucgcccaggcuggagug

SEQ ID NO: 2446795 - RNA, 17 nt, Human
cucugucgcccagucug

SEQ ID NO: 2446796 - RNA, 16 nt, Human
cucugucuuguguuuc

SEQ ID NO: 2446797 - RNA, 15 nt, Human
cucugucuuguguuu

SEQ ID NO: 2446798 - RNA, 23 nt, Human
cucugucuucuuugcccacaaug

SEQ ID NO: 2446799 - RNA, 19 nt, Human
cucugucgcccagucugga

SEQ ID NO: 2446800 - RNA, 18 nt, Human
cucugucgcccagucugg

SEQ ID NO: 2446801 - RNA, 23 nt, Human
cucugugucagguggggcagcuu

SEQ ID NO: 2446802 - RNA, 22 nt, Human
cucugugucagguggggcagcu

SEQ ID NO: 2446803 - RNA, 21 nt, Human
cucugugucagguggggcagc

SEQ ID NO: 2446804 - RNA, 20 nt, Human
cucugugucagguggggcag

SEQ ID NO: 2446805 - RNA, 14 nt, Human
cucugugaccaaug

SEQ ID NO: 2446806 - RNA, 15 nt, Human
cucugugaccaaugu

SEQ ID NO: 2446807 - RNA, 17 nt, Human
cucugugaccaaugucu

SEQ ID NO: 2446808 - RNA, 18 nt, Human
cucugugaccaaugucuu

SEQ ID NO: 2446809 - RNA, 21 nt, Human
cucugugaacgauuuagaaag

SEQ ID NO: 2446810 - RNA, 18 nt, Human
cucugugaacgauuuaga

SEQ ID NO: 2446811 - RNA, 18 nt, Human
cucugugaacccuaugag

SEQ ID NO: 2446812 - RNA, 18 nt, Human
cucugugaagcauucgag

SEQ ID NO: 2446813 - RNA, 23 nt, Human
cucugugaacgauuuagaaagaa

SEQ ID NO: 2446814 - RNA, 24 nt, Human
cucugugaccucaggcacuagccu

SEQ ID NO: 2446815 - RNA, 19 nt, Human
cucugugaccucaggcacu

SEQ ID NO: 2446816 - RNA, 16 nt, Human
cucugugaccucaggc

SEQ ID NO: 2446817 - RNA, 14 nt, Human
cucugugaccucag

SEQ ID NO: 2446818 - RNA, 19 nt, Human
cucugugaccaaugucuug

SEQ ID NO: 2446819 - RNA, 19 nt, Human
cucugugucagguggggca

SEQ ID NO: 2446820 - RNA, 15 nt, Human
cucugugaccugccc

SEQ ID NO: 2446821 - RNA, 23 nt, Human
cucugugaccugccccgcccagc

SEQ ID NO: 2446822 - RNA, 21 nt, Human
cucuguuguccuccccuuggg

SEQ ID NO: 2446823 - RNA, 20 nt, Human
cucuguuguccuccccuugg

SEQ ID NO: 2446824 - RNA, 17 nt, Human
cucuguuguccuccccu

SEQ ID NO: 2446825 - RNA, 12 nt, Human
cucuguuguccu

SEQ ID NO: 2446826 - RNA, 22 nt, Human
cucuguugcccaggcuggagug

SEQ ID NO: 2446827 - RNA, 20 nt, Human
cucuguugcccaggcuggag

SEQ ID NO: 2446828 - RNA, 16 nt, Human
cucuguguccuucccu

SEQ ID NO: 2446829 - RNA, 14 nt, Human
cucuguguccuucc

SEQ ID NO: 2446830 - RNA, 17 nt, Human
cucuguguccuucccug

SEQ ID NO: 2446831 - RNA, 15 nt, Human
cucugugugcacaaa

SEQ ID NO: 2446832 - RNA, 17 nt, Human
cucugugugcacaaaua

SEQ ID NO: 2446833 - RNA, 19 nt, Human
cucuuaagaagacugcauu

SEQ ID NO: 2446834 - RNA, 21 nt, Human
cucuuaagccaucuugguaaa

SEQ ID NO: 2446835 - RNA, 20 nt, Human
cucuuaagccaucuugguaa

SEQ ID NO: 2446836 - RNA, 14 nt, Human
cucuuaagccaucu

SEQ ID NO: 2446837 - RNA, 13 nt, Human
cucuuaagccauc

SEQ ID NO: 2446838 - RNA, 17 nt, Human
cucuuaaaaaauaaaaa

SEQ ID NO: 2446839 - RNA, 18 nt, Human
cucuuaaaaaauaaaaac

SEQ ID NO: 2446840 - RNA, 12 nt, Human
cucuuaagccau

SEQ ID NO: 2446841 - RNA, 19 nt, Human
cucuuaaaaaauaaaaacu

SEQ ID NO: 2446842 - RNA, 16 nt, Human
cucuuaaaaaauaaaa

SEQ ID NO: 2446843 - RNA, 22 nt, Human
cucuguuguccuccccuugggc

SEQ ID NO: 2446844 - RNA, 16 nt, Human
cucuguuucuccuucu

SEQ ID NO: 2446845 - RNA, 14 nt, Human
cucuguuucucuuu

SEQ ID NO: 2446846 - RNA, 14 nt, Human
cucuuccugcaagg

SEQ ID NO: 2446847 - RNA, 22 nt, Human
cucuuccucugaggcuggaucc

SEQ ID NO: 2446848 - RNA, 17 nt, Human
cucuuccucugaggcug

SEQ ID NO: 2446849 - RNA, 16 nt, Human
cucuuccucugaggcu

SEQ ID NO: 2446850 - RNA, 13 nt, Human
cucuuccucugag

SEQ ID NO: 2446851 - RNA, 12 nt, Human
cucuuccucuga

SEQ ID NO: 2446852 - RNA, 11 nt, Human
cucuuccucug

SEQ ID NO: 2446853 - RNA, 19 nt, Human
cucuuccccuugcccuugc

SEQ ID NO: 2446854 - RNA, 18 nt, Human
cucuuccccuugcccuug

SEQ ID NO: 2446855 - RNA, 16 nt, Human
cucuuccccuugcccu

SEQ ID NO: 2446856 - RNA, 15 nt, Human
cucuuccccuugccc

SEQ ID NO: 2446857 - RNA, 23 nt, Human
cucuuccccuugcccuugcccug

SEQ ID NO: 2446858 - RNA, 12 nt, Human
cucuuccccucu

SEQ ID NO: 2446859 - RNA, 16 nt, Human
cucuuccccucucaga

SEQ ID NO: 2446860 - RNA, 14 nt, Human
cucuuccccucuca

SEQ ID NO: 2446861 - RNA, 12 nt, Human
cucuuccccaga

SEQ ID NO: 2446862 - RNA, 21 nt, Human
cucuuccccagaaaggagacu

SEQ ID NO: 2446863 - RNA, 16 nt, Human
cucuuccaucaugucc

SEQ ID NO: 2446864 - RNA, 17 nt, Human
cucuuaauuguucauuu

SEQ ID NO: 2446865 - RNA, 22 nt, Human
cucuuaaguuucucagcuccca

SEQ ID NO: 2446866 - RNA, 19 nt, Human
cucuuaaguuucucagcuc

SEQ ID NO: 2446867 - RNA, 18 nt, Human
cucuuaaguuucucagcu

SEQ ID NO: 2446868 - RNA, 14 nt, Human
cucuuaaguuucuc

SEQ ID NO: 2446869 - RNA, 12 nt, Human
cucuuaaguuuc

SEQ ID NO: 2446870 - RNA, 22 nt, Human
cucuuaagccaucuugguaaau

SEQ ID NO: 2446871 - RNA, 22 nt, Human
cucuuaagcuuccgccgucuca

SEQ ID NO: 2446872 - RNA, 13 nt, Human
cucuucuccaggc

SEQ ID NO: 2446873 - RNA, 15 nt, Human
cucuucuccaggcug

SEQ ID NO: 2446874 - RNA, 19 nt, Human
cucuucucauuucaccccu

SEQ ID NO: 2446875 - RNA, 15 nt, Human
cucuucucauuucac

SEQ ID NO: 2446876 - RNA, 12 nt, Human
cucuucucauuu

SEQ ID NO: 2446877 - RNA, 11 nt, Human
cucuucucauu

SEQ ID NO: 2446878 - RNA, 13 nt, Human
cucuucuccacug

SEQ ID NO: 2446879 - RNA, 12 nt, Human
cucuucuccacu

SEQ ID NO: 2446880 - RNA, 16 nt, Human
cucuuccuuuuaucag

SEQ ID NO: 2446881 - RNA, 23 nt, Human
cucuuccuugaagaacugcaggc

SEQ ID NO: 2446882 - RNA, 10 nt, Human
cucuuccugu

SEQ ID NO: 2446883 - RNA, 20 nt, Human
cucuucguuucagugucaaa

SEQ ID NO: 2446884 - RNA, 18 nt, Human
cucuuccuugcuguguca

SEQ ID NO: 2446885 - RNA, 15 nt, Human
cucuucuagagccgu

SEQ ID NO: 2446886 - RNA, 17 nt, Human
cucuucuauuuuguaaa

SEQ ID NO: 2446887 - RNA, 19 nt, Human
cucuucuauuuuguaaacu

SEQ ID NO: 2446888 - RNA, 15 nt, Human
cucuucucaagugcc

SEQ ID NO: 2446889 - RNA, 14 nt, Human
cucuucucaagugc

SEQ ID NO: 2446890 - RNA, 20 nt, Human
cucugccagugacagacagg

SEQ ID NO: 2446891 - RNA, 15 nt, Human
cucugccagugacag

SEQ ID NO: 2446892 - RNA, 14 nt, Human
cucugccagugaca

SEQ ID NO: 2446893 - RNA, 13 nt, Human
cucugccagugac

SEQ ID NO: 2446894 - RNA, 19 nt, Human
cucugccaaaggaugugau

SEQ ID NO: 2446895 - RNA, 14 nt, Human
cucugccaaaggau

SEQ ID NO: 2446896 - RNA, 23 nt, Human
cucugcauuugucuauucuccag

SEQ ID NO: 2446897 - RNA, 22 nt, Human
cucugcauuugucuauucucca

SEQ ID NO: 2446898 - RNA, 19 nt, Human
cucugcauuugucuauucu

SEQ ID NO: 2446899 - RNA, 14 nt, Human
cucugcauuugucu

SEQ ID NO: 2446900 - RNA, 23 nt, Human
cucugcaugcggcccagcccggc

SEQ ID NO: 2446901 - RNA, 15 nt, Human
cucugcauucuagua

SEQ ID NO: 2446902 - RNA, 20 nt, Human
cucugcaugcggcccagccc

SEQ ID NO: 2446903 - RNA, 19 nt, Human
cucugcaugcggcccagcc

SEQ ID NO: 2446904 - RNA, 18 nt, Human
cucugcaugcggcccagc

SEQ ID NO: 2446905 - RNA, 17 nt, Human
cucugcaugcggcccag

SEQ ID NO: 2446906 - RNA, 22 nt, Human
cucugcaugcggcccagcccgg

SEQ ID NO: 2446907 - RNA, 21 nt, Human
cucugcaugcggcccagcccg

SEQ ID NO: 2446908 - RNA, 14 nt, Human
cucugcauucuagu

SEQ ID NO: 2446909 - RNA, 16 nt, Human
cucugcaugcggccca

SEQ ID NO: 2446910 - RNA, 14 nt, Human
cucugcaucugacc

SEQ ID NO: 2446911 - RNA, 13 nt, Human
cucugcaucugac

SEQ ID NO: 2446912 - RNA, 22 nt, Human
cucugcaucuacucccaaguau

SEQ ID NO: 2446913 - RNA, 20 nt, Human
cucugcaucuacucccaagu

SEQ ID NO: 2446914 - RNA, 19 nt, Human
cucugcaucuacucccaag

SEQ ID NO: 2446915 - RNA, 17 nt, Human
cucugcaucuacuccca

SEQ ID NO: 2446916 - RNA, 18 nt, Human
cucugcaggucccuaaua

SEQ ID NO: 2446917 - RNA, 21 nt, Human
cucugcaggucccuaauaaag

SEQ ID NO: 2446918 - RNA, 12 nt, Human
cucugaguguga

SEQ ID NO: 2446919 - RNA, 17 nt, Human
cucugaguaucuccucg

SEQ ID NO: 2446920 - RNA, 10 nt, Human
cucugcacaa

SEQ ID NO: 2446921 - RNA, 14 nt, Human
cucugauaagagaa

SEQ ID NO: 2446922 - RNA, 17 nt, Human
cucugauacccagagca

SEQ ID NO: 2446923 - RNA, 13 nt, Human
cucugcacaagcu

SEQ ID NO: 2446924 - RNA, 20 nt, Human
cucugcaggucccuaauaaa

SEQ ID NO: 2446925 - RNA, 19 nt, Human
cucugcaggucccuaauaa

SEQ ID NO: 2446926 - RNA, 14 nt, Human
cucugcacaagcug

SEQ ID NO: 2446927 - RNA, 15 nt, Human
cucugcacaagcugc

SEQ ID NO: 2446928 - RNA, 17 nt, Human
cucugcccacucccugc

SEQ ID NO: 2446929 - RNA, 16 nt, Human
cucugcccacucccug

SEQ ID NO: 2446930 - RNA, 15 nt, Human
cucugcccacucccu

SEQ ID NO: 2446931 - RNA, 13 nt, Human
cucugcccacucc

SEQ ID NO: 2446932 - RNA, 20 nt, Human
cucugcccacucccugcaac

SEQ ID NO: 2446933 - RNA, 18 nt, Human
cucugcccacucccugca

SEQ ID NO: 2446934 - RNA, 17 nt, Human
cucugccccauccucca

SEQ ID NO: 2446935 - RNA, 21 nt, Human
cucugccccauccuccagcag

SEQ ID NO: 2446936 - RNA, 22 nt, Human
cucugccccauccuccagcagg

SEQ ID NO: 2446937 - RNA, 24 nt, Human
cucugccccauccuccagcaggga

SEQ ID NO: 2446938 - RNA, 20 nt, Human
cucugcccaacccuucccuc

SEQ ID NO: 2446939 - RNA, 15 nt, Human
cucugccccauccuc

SEQ ID NO: 2446940 - RNA, 14 nt, Human
cucugcccaacccu

SEQ ID NO: 2446941 - RNA, 17 nt, Human
cucugccucccaucacc

SEQ ID NO: 2446942 - RNA, 16 nt, Human
cucugccucccaucac

SEQ ID NO: 2446943 - RNA, 14 nt, Human
cucugccucccauc

SEQ ID NO: 2446944 - RNA, 13 nt, Human
cucugccucccau

SEQ ID NO: 2446945 - RNA, 12 nt, Human
cucugcccuugg

SEQ ID NO: 2446946 - RNA, 20 nt, Human
cucugcccuaaugcgcaggc

SEQ ID NO: 2446947 - RNA, 21 nt, Human
cucugccgcaauacaggaacc

SEQ ID NO: 2446948 - RNA, 18 nt, Human
cucugccgcaauacagga

SEQ ID NO: 2446949 - RNA, 21 nt, Human
cucugcccuuguucccuaggg

SEQ ID NO: 2446950 - RNA, 19 nt, Human
cucugcccuuguucccuag

SEQ ID NO: 2446951 - RNA, 17 nt, Human
cucugcccccugcuggc

SEQ ID NO: 2446952 - RNA, 12 nt, Human
cucugcccccug

SEQ ID NO: 2446953 - RNA, 23 nt, Human
cucugccggcucuuuccuugcuc

SEQ ID NO: 2446954 - RNA, 20 nt, Human
cucugccggcucuuuccuug

SEQ ID NO: 2446955 - RNA, 18 nt, Human
cucugccggcucuuuccu

SEQ ID NO: 2446956 - RNA, 15 nt, Human
cucugccggcucuuu

SEQ ID NO: 2446957 - RNA, 14 nt, Human
cucugccggcucuu

SEQ ID NO: 2446958 - RNA, 20 nt, Human
cucugccgcaauacaggaac

SEQ ID NO: 2446959 - RNA, 13 nt, Human
cucugccggcucu

SEQ ID NO: 2446960 - RNA, 16 nt, Human
cucugacccagugaga

SEQ ID NO: 2446961 - RNA, 12 nt, Human
cucugaccccuc

SEQ ID NO: 2446962 - RNA, 18 nt, Human
cucugaccccuccucacu

SEQ ID NO: 2446963 - RNA, 16 nt, Human
cucugaccccuccuca

SEQ ID NO: 2446964 - RNA, 14 nt, Human
cucugaccccuccu

SEQ ID NO: 2446965 - RNA, 13 nt, Human
cucugaccccucc

SEQ ID NO: 2446966 - RNA, 21 nt, Human
cucugaccccuccucacuggc

SEQ ID NO: 2446967 - RNA, 17 nt, Human
cucugaccgaaacagcg

SEQ ID NO: 2446968 - RNA, 19 nt, Human
cucugaccgaaacagcgcu

SEQ ID NO: 2446969 - RNA, 14 nt, Human
cucugaccugcacu

SEQ ID NO: 2446970 - RNA, 12 nt, Human
cucugaccugca

SEQ ID NO: 2446971 - RNA, 17 nt, Human
cucugaccucuuggcca

SEQ ID NO: 2446972 - RNA, 23 nt, Human
cucugaccuacucgagggacuua

SEQ ID NO: 2446973 - RNA, 22 nt, Human
cucugaccgaaacagcgcuggg

SEQ ID NO: 2446974 - RNA, 23 nt, Human
cucugaccgaaacagcgcugggu

SEQ ID NO: 2446975 - RNA, 21 nt, Human
cucugagacucgcgacaaugc

SEQ ID NO: 2446976 - RNA, 17 nt, Human
cucugacucagggcucc

SEQ ID NO: 2446977 - RNA, 20 nt, Human
cucugacucagggcuccugg

SEQ ID NO: 2446978 - RNA, 21 nt, Human
cucugacucagggcuccuggg

SEQ ID NO: 2446979 - RNA, 15 nt, Human
cucugacucucaaau

SEQ ID NO: 2446980 - RNA, 15 nt, Human
cucugacucagggcu

SEQ ID NO: 2446981 - RNA, 16 nt, Human
cucugacucagggcuc

SEQ ID NO: 2446982 - RNA, 14 nt, Human
cucugacucagggc

SEQ ID NO: 2446983 - RNA, 16 nt, Human
cucugaccugcaggcc

SEQ ID NO: 2446984 - RNA, 15 nt, Human
cucugaccugcacug

SEQ ID NO: 2446985 - RNA, 13 nt, Human
cucugaccugcag

SEQ ID NO: 2446986 - RNA, 14 nt, Human
cucugaccugcagg

SEQ ID NO: 2446987 - RNA, 15 nt, Human
cucugaccugcaggc

SEQ ID NO: 2446988 - RNA, 14 nt, Human
cucugaggacacua

SEQ ID NO: 2446989 - RNA, 12 nt, Human
cucugaggacac

SEQ ID NO: 2446990 - RNA, 19 nt, Human
cucugaggugccuguccca

SEQ ID NO: 2446991 - RNA, 15 nt, Human
cucugaggugccugu

SEQ ID NO: 2446992 - RNA, 22 nt, Human
cucugaggugccugucccaccc

SEQ ID NO: 2446993 - RNA, 16 nt, Human
cucugaguaucuccuc

SEQ ID NO: 2446994 - RNA, 16 nt, Human
cucugaggacacuaac

SEQ ID NO: 2446995 - RNA, 23 nt, Human
cucugagacucgcgacaaugcaa

SEQ ID NO: 2446996 - RNA, 18 nt, Human
cucugacucucaaaucuu

SEQ ID NO: 2446997 - RNA, 16 nt, Human
cucugacucucaaauc

SEQ ID NO: 2446998 - RNA, 20 nt, Human
cucugagacucgcgacaaug

SEQ ID NO: 2446999 - RNA, 13 nt, Human
cucugagcuuugc

SEQ ID NO: 2447000 - RNA, 16 nt, Human
cucugagcugugcagg

SEQ ID NO: 2447001 - RNA, 17 nt, Human
cucugagcuuugcaugu

SEQ ID NO: 2447002 - RNA, 19 nt, Human
cucugacacacagcucugu

SEQ ID NO: 2447003 - RNA, 23 nt, Human
cucugacagaagaaccccagggu

SEQ ID NO: 2447004 - RNA, 18 nt, Human
cucugacacacagcucug

SEQ ID NO: 2447005 - RNA, 17 nt, Human
cucugacacacagcucu

SEQ ID NO: 2447006 - RNA, 16 nt, Human
cucugacacacagcuc

SEQ ID NO: 2447007 - RNA, 15 nt, Human
cucugacacacagcu

SEQ ID NO: 2447008 - RNA, 21 nt, Human
cucugacaacagacuucugaa

SEQ ID NO: 2447009 - RNA, 22 nt, Human
cucugacaacagacuucugaaa

SEQ ID NO: 2447010 - RNA, 14 nt, Human
cucugacacacagc

SEQ ID NO: 2447011 - RNA, 14 nt, Human
cucugaagggaggu

SEQ ID NO: 2447012 - RNA, 13 nt, Human
cucugaagggagg

SEQ ID NO: 2447013 - RNA, 17 nt, Human
cucugaagggcaucaug

SEQ ID NO: 2447014 - RNA, 19 nt, Human
cucugaagggcaucaugca

SEQ ID NO: 2447015 - RNA, 22 nt, Human
cucugaagggcaucaugcaucu

SEQ ID NO: 2447016 - RNA, 22 nt, Human
cucugaaggacauugcggacag

SEQ ID NO: 2447017 - RNA, 23 nt, Human
cucgcugaugcugggcugggugc

SEQ ID NO: 2447018 - RNA, 22 nt, Human
cucgcugaugcugggcugggug

SEQ ID NO: 2447019 - RNA, 21 nt, Human
cucgcugaugcugggcugggu

SEQ ID NO: 2447020 - RNA, 20 nt, Human
cucgcugaugcugggcuggg

SEQ ID NO: 2447021 - RNA, 12 nt, Human
cucgcugccagc

SEQ ID NO: 2447022 - RNA, 18 nt, Human
cucgcugcacaaauacuc

SEQ ID NO: 2447023 - RNA, 23 nt, Human
cucugaagugaaacugcuuguuu

SEQ ID NO: 2447024 - RNA, 19 nt, Human
cucugaagugaaacugcuu

SEQ ID NO: 2447025 - RNA, 23 nt, Human
cucugaagucacaucacaggaca

SEQ ID NO: 2447026 - RNA, 23 nt, Human
cucugaagggcaucaugcaucuu

SEQ ID NO: 2447027 - RNA, 13 nt, Human
cucugaagucaca

SEQ ID NO: 2447028 - RNA, 18 nt, Human
cucugaaugguccagggu

SEQ ID NO: 2447029 - RNA, 17 nt, Human
cucugaaugguccaggg

SEQ ID NO: 2447030 - RNA, 21 nt, Human
cucugaauuaguccuugcuug

SEQ ID NO: 2447031 - RNA, 20 nt, Human
cucugaauuaguccuugcuu

SEQ ID NO: 2447032 - RNA, 16 nt, Human
cucugacaacagacuu

SEQ ID NO: 2447033 - RNA, 19 nt, Human
cucugaauuugagauacaa

SEQ ID NO: 2447034 - RNA, 14 nt, Human
cugagccagauuuc

SEQ ID NO: 2447035 - RNA, 13 nt, Human
cugagccagauuu

SEQ ID NO: 2447036 - RNA, 23 nt, Human
cugagccaguucaguaccuggag

SEQ ID NO: 2447037 - RNA, 20 nt, Human
cugagcagugaaugauucag

SEQ ID NO: 2447038 - RNA, 22 nt, Human
cugagccaagcuagaauucccu

SEQ ID NO: 2447039 - RNA, 12 nt, Human
cugagcaggugu

SEQ ID NO: 2447040 - RNA, 18 nt, Human
cugagcaggaccucugaa

SEQ ID NO: 2447041 - RNA, 13 nt, Human
cugagcagggaga

SEQ ID NO: 2447042 - RNA, 23 nt, Human
cugagcaccugcuucaugcucag

SEQ ID NO: 2447043 - RNA, 17 nt, Human
cugagcaccugcuucau

SEQ ID NO: 2447044 - RNA, 16 nt, Human
cugagcaccugcuuca

SEQ ID NO: 2447045 - RNA, 19 nt, Human
cugagcacauucuggcuca

SEQ ID NO: 2447046 - RNA, 13 nt, Human
cugagcaccugcu

SEQ ID NO: 2447047 - RNA, 17 nt, Human
cugagcaagagcuggca

SEQ ID NO: 2447048 - RNA, 16 nt, Human
cugagcaagagcuggc

SEQ ID NO: 2447049 - RNA, 15 nt, Human
cugagcaagagcugg

SEQ ID NO: 2447050 - RNA, 14 nt, Human
cugagcaagagcug

SEQ ID NO: 2447051 - RNA, 16 nt, Human
cugagcaaugucugug

SEQ ID NO: 2447052 - RNA, 20 nt, Human
cugagcaagagcuggcaaag

SEQ ID NO: 2447053 - RNA, 15 nt, Human
cugagcaaugucugu

SEQ ID NO: 2447054 - RNA, 17 nt, Human
cugagcacacuuuagug

SEQ ID NO: 2447055 - RNA, 19 nt, Human
cugagcaaugucugugcua

SEQ ID NO: 2447056 - RNA, 18 nt, Human
cugagcaaugucugugcu

SEQ ID NO: 2447057 - RNA, 17 nt, Human
cugagcaaugucugugc

SEQ ID NO: 2447058 - RNA, 13 nt, Human
cugagcaccaggg

SEQ ID NO: 2447059 - RNA, 16 nt, Human
cugagcaggauuuuaa

SEQ ID NO: 2447060 - RNA, 16 nt, Human
cugagcaggaccucug

SEQ ID NO: 2447061 - RNA, 23 nt, Human
cugagcagagucuugcuaccuca

SEQ ID NO: 2447062 - RNA, 22 nt, Human
cugagcagagucuugcuaccuc

SEQ ID NO: 2447063 - RNA, 21 nt, Human
cugagcagacuggugagcaga

SEQ ID NO: 2447064 - RNA, 22 nt, Human
cugagcagacuggugagcagac

SEQ ID NO: 2447065 - RNA, 16 nt, Human
cugagcagacugguga

SEQ ID NO: 2447066 - RNA, 17 nt, Human
cugagcagacuggugag

SEQ ID NO: 2447067 - RNA, 16 nt, Human
cugagaugugaacaca

SEQ ID NO: 2447068 - RNA, 20 nt, Human
cugagaugugaacacaucag

SEQ ID NO: 2447069 - RNA, 22 nt, Human
cugagacagcccgggcucugcc

SEQ ID NO: 2447070 - RNA, 21 nt, Human
cugagacagcccgggcucugc

SEQ ID NO: 2447071 - RNA, 19 nt, Human
cugagaaagacuauucaaa

SEQ ID NO: 2447072 - RNA, 20 nt, Human
cugagaaagacuauucaaac

SEQ ID NO: 2447073 - RNA, 19 nt, Human
cugagacagcccgggcucu

SEQ ID NO: 2447074 - RNA, 20 nt, Human
cugagacagcccgggcucug

SEQ ID NO: 2447075 - RNA, 21 nt, Human
cugagauuucaucugcucucc

SEQ ID NO: 2447076 - RNA, 20 nt, Human
cugagauuucaucugcucuc

SEQ ID NO: 2447077 - RNA, 19 nt, Human
cugagauuucaucugcucu

SEQ ID NO: 2447078 - RNA, 18 nt, Human
cugagauuucaucugcuc

SEQ ID NO: 2447079 - RNA, 16 nt, Human
cugagauuucaucugc

SEQ ID NO: 2447080 - RNA, 15 nt, Human
cugagauuucaucug

SEQ ID NO: 2447081 - RNA, 14 nt, Human
cugagauuucaucu

SEQ ID NO: 2447082 - RNA, 21 nt, Human
cugagaugugaacacaucagc

SEQ ID NO: 2447083 - RNA, 23 nt, Human
cugagauuauaggcaccuaccac

SEQ ID NO: 2447084 - RNA, 19 nt, Human
cugagauuauuuuaaucua

SEQ ID NO: 2447085 - RNA, 21 nt, Human
cugagcaaauguggcuccugg

SEQ ID NO: 2447086 - RNA, 20 nt, Human
cugagcaaauguggcuccug

SEQ ID NO: 2447087 - RNA, 17 nt, Human
cugagcaaauguggcuc

SEQ ID NO: 2447088 - RNA, 15 nt, Human
cugagcaaauguggc

SEQ ID NO: 2447089 - RNA, 20 nt, Human
cugagcaacucuugauuauc

SEQ ID NO: 2447090 - RNA, 12 nt, Human
cugagcaagagc

SEQ ID NO: 2447091 - RNA, 12 nt, Human
cugagcaaagca

SEQ ID NO: 2447092 - RNA, 22 nt, Human
cugagauuucaucugcucuccu

SEQ ID NO: 2447093 - RNA, 16 nt, Human
cugagcaacagaguga

SEQ ID NO: 2447094 - RNA, 23 nt, Human
cugagcaacagagugagacccug

SEQ ID NO: 2447095 - RNA, 24 nt, Human
cugagcaacagagugagacccugu

SEQ ID NO: 2447096 - RNA, 20 nt, Human
cugacucgucugacugugug

SEQ ID NO: 2447097 - RNA, 18 nt, Human
cugacucgguuucuccaa

SEQ ID NO: 2447098 - RNA, 17 nt, Human
cugacucgguuucucca

SEQ ID NO: 2447099 - RNA, 16 nt, Human
cugacucgguuucucc

SEQ ID NO: 2447100 - RNA, 19 nt, Human
cugacuccucuaagccacu

SEQ ID NO: 2447101 - RNA, 17 nt, Human
cugacuccucuaagcca

SEQ ID NO: 2447102 - RNA, 15 nt, Human
cugacucgguuucuc

SEQ ID NO: 2447103 - RNA, 13 nt, Human
cugacuccuuaga

SEQ ID NO: 2447104 - RNA, 15 nt, Human
cugacuccuuagaga

SEQ ID NO: 2447105 - RNA, 12 nt, Human
cugacugggagu

SEQ ID NO: 2447106 - RNA, 16 nt, Human
cugacugaugcuuuca

SEQ ID NO: 2447107 - RNA, 19 nt, Human
cugacugauguugagggaa

SEQ ID NO: 2447108 - RNA, 22 nt, Human
cugacuacugggcaaagagugu

SEQ ID NO: 2447109 - RNA, 16 nt, Human
cugacuacugggcaaa

SEQ ID NO: 2447110 - RNA, 15 nt, Human
cugacuacugggcaa

SEQ ID NO: 2447111 - RNA, 17 nt, Human
cugacuacuggcucuca

SEQ ID NO: 2447112 - RNA, 16 nt, Human
cugacucagggcuccu

SEQ ID NO: 2447113 - RNA, 18 nt, Human
cugacucagggcuccugg

SEQ ID NO: 2447114 - RNA, 19 nt, Human
cugacucagggcuccuggg

SEQ ID NO: 2447115 - RNA, 21 nt, Human
cugacucagggcuccuggguu

SEQ ID NO: 2447116 - RNA, 16 nt, Human
cugacucauucugaag

SEQ ID NO: 2447117 - RNA, 13 nt, Human
cugacuccagugg

SEQ ID NO: 2447118 - RNA, 15 nt, Human
cugacucagggcucc

SEQ ID NO: 2447119 - RNA, 12 nt, Human
cugagaaagacu

SEQ ID NO: 2447120 - RNA, 13 nt, Human
cugagaaagacua

SEQ ID NO: 2447121 - RNA, 15 nt, Human
cugagaaagacuauu

SEQ ID NO: 2447122 - RNA, 18 nt, Human
cugagaaagacuauucaa

SEQ ID NO: 2447123 - RNA, 22 nt, Human
cugacuggugcuauaggcugga

SEQ ID NO: 2447124 - RNA, 17 nt, Human
cugacuguacuccuccc

SEQ ID NO: 2447125 - RNA, 18 nt, Human
cugacuuugcucuuucuu

SEQ ID NO: 2447126 - RNA, 21 nt, Human
cugagaaaagcuuugaacccu

SEQ ID NO: 2447127 - RNA, 18 nt, Human
cugacagacacaggcccg

SEQ ID NO: 2447128 - RNA, 17 nt, Human
cugacagacacaggccc

SEQ ID NO: 2447129 - RNA, 16 nt, Human
cugaccagcagcgccu

SEQ ID NO: 2447130 - RNA, 20 nt, Human
cugaccagcagcgccuuucc

SEQ ID NO: 2447131 - RNA, 21 nt, Human
cugaccagcagcgccuuuccc

SEQ ID NO: 2447132 - RNA, 22 nt, Human
cugaccagcagcgccuuuccca

SEQ ID NO: 2447133 - RNA, 17 nt, Human
cugaccagccuccaugc

SEQ ID NO: 2447134 - RNA, 14 nt, Human
cugaauuucuuuug

SEQ ID NO: 2447135 - RNA, 16 nt, Human
cugacagacacaggcc

SEQ ID NO: 2447136 - RNA, 14 nt, Human
cugaauuuucacau

SEQ ID NO: 2447137 - RNA, 13 nt, Human
cugaauuuucaca

SEQ ID NO: 2447138 - RNA, 20 nt, Human
cugaauuuucacaugaacau

SEQ ID NO: 2447139 - RNA, 21 nt, Human
cugaauuuggccugcacuaau

SEQ ID NO: 2447140 - RNA, 23 nt, Human
cugaccagccuccaugcugccuc

SEQ ID NO: 2447141 - RNA, 21 nt, Human
cugaccagccuccaugcugcc

SEQ ID NO: 2447142 - RNA, 23 nt, Human
cugaccaguuuaaccugaugcag

SEQ ID NO: 2447143 - RNA, 21 nt, Human
cugacgaacuuccauggcccu

SEQ ID NO: 2447144 - RNA, 23 nt, Human
cugaccuuugucaucuuucuucu

SEQ ID NO: 2447145 - RNA, 21 nt, Human
cugaccuuugucaucuuucuu

SEQ ID NO: 2447146 - RNA, 22 nt, Human
cugacggaagccaacuuggcuu

SEQ ID NO: 2447147 - RNA, 21 nt, Human
cugacggaagccaacuuggcu

SEQ ID NO: 2447148 - RNA, 16 nt, Human
cugacggaagccaacu

SEQ ID NO: 2447149 - RNA, 16 nt, Human
cugacgcaacccacgu

SEQ ID NO: 2447150 - RNA, 23 nt, Human
cugacggaagccaacuuggcuuu

SEQ ID NO: 2447151 - RNA, 15 nt, Human
cugacggccagggag

SEQ ID NO: 2447152 - RNA, 19 nt, Human
cugacggccagggagaagc

SEQ ID NO: 2447153 - RNA, 20 nt, Human
cugacggccagggagaagcu

SEQ ID NO: 2447154 - RNA, 21 nt, Human
cugacggccagggagaagcuc

SEQ ID NO: 2447155 - RNA, 23 nt, Human
cugacgugccuuuugcaccccuc

SEQ ID NO: 2447156 - RNA, 22 nt, Human
cugacgugccuuuugcaccccu

SEQ ID NO: 2447157 - RNA, 20 nt, Human
cugacgugccuuuugcaccc

SEQ ID NO: 2447158 - RNA, 18 nt, Human
cugacgugccuuuugcac

SEQ ID NO: 2447159 - RNA, 17 nt, Human
cugacgugccuuuugca

SEQ ID NO: 2447160 - RNA, 14 nt, Human
cugacgugccuuuu

SEQ ID NO: 2447161 - RNA, 22 nt, Human
cugacguagcugcaaaggacag

SEQ ID NO: 2447162 - RNA, 18 nt, Human
cugacggugcagucuggg

SEQ ID NO: 2447163 - RNA, 18 nt, Human
cugacguagcugcaaagg

SEQ ID NO: 2447164 - RNA, 23 nt, Human
cugacguagcugcaaaggacaga

SEQ ID NO: 2447165 - RNA, 16 nt, Human
cugacggugcagucug

SEQ ID NO: 2447166 - RNA, 21 nt, Human
cugacggggaggaaccacugc

SEQ ID NO: 2447167 - RNA, 15 nt, Human
cucuucucuuccugu

SEQ ID NO: 2447168 - RNA, 14 nt, Human
cucuucucuuccug

SEQ ID NO: 2447169 - RNA, 22 nt, Human
cucuucugacgugccuuuugca

SEQ ID NO: 2447170 - RNA, 20 nt, Human
cucuucugacgugccuuuug

SEQ ID NO: 2447171 - RNA, 12 nt, Human
cucuucugagcu

SEQ ID NO: 2447172 - RNA, 17 nt, Human
cucuucugacgugccuu

SEQ ID NO: 2447173 - RNA, 16 nt, Human
cucuucucuuccugua

SEQ ID NO: 2447174 - RNA, 16 nt, Human
cucuucugacgugccu

SEQ ID NO: 2447175 - RNA, 14 nt, Human
cucuucuccccaga

SEQ ID NO: 2447176 - RNA, 13 nt, Human
cucuucuccccag

SEQ ID NO: 2447177 - RNA, 16 nt, Human
cucuucuccaggcugu

SEQ ID NO: 2447178 - RNA, 23 nt, Human
cucuuuggucuacacugugcuga

SEQ ID NO: 2447179 - RNA, 22 nt, Human
cucuuuggucuacacugugcug

SEQ ID NO: 2447180 - RNA, 15 nt, Human
cucuucugagcuauu

SEQ ID NO: 2447181 - RNA, 18 nt, Human
cucuucugagcuauuuca

SEQ ID NO: 2447182 - RNA, 21 nt, Human
cucuucugagcuauuucaucu

SEQ ID NO: 2447183 - RNA, 22 nt, Human
cucuucugagcuauuucaucua

SEQ ID NO: 2447184 - RNA, 23 nt, Human
cucuucugagcuauuucaucuau

SEQ ID NO: 2447185 - RNA, 16 nt, Human
cucuucugcaucuugg

SEQ ID NO: 2447186 - RNA, 20 nt, Human
cucuucugccggcccugggg

SEQ ID NO: 2447187 - RNA, 12 nt, Human
cucuucugcucc

SEQ ID NO: 2447188 - RNA, 19 nt, Human
cucuuuguucucagcuccc

SEQ ID NO: 2447189 - RNA, 17 nt, Human
cucuuuguucucagcuc

SEQ ID NO: 2447190 - RNA, 22 nt, Human
cucuuugucuaaaacaauaaaa

SEQ ID NO: 2447191 - RNA, 16 nt, Human
cucuuugucuaaaaca

SEQ ID NO: 2447192 - RNA, 17 nt, Human
cucuuugucuaaaacaa

SEQ ID NO: 2447193 - RNA, 18 nt, Human
cucuuugucuaaaacaau

SEQ ID NO: 2447194 - RNA, 21 nt, Human
cucuuugucuaaaacaauaaa

SEQ ID NO: 2447195 - RNA, 12 nt, Human
cucuuuguaaga

SEQ ID NO: 2447196 - RNA, 14 nt, Human
cucuuugucuaaaa

SEQ ID NO: 2447197 - RNA, 21 nt, Human
cucuucugccggcccuggggc

SEQ ID NO: 2447198 - RNA, 20 nt, Human
cucuuuguucuaaagaugga

SEQ ID NO: 2447199 - RNA, 23 nt, Human
cugaaagggacgcuacccgggaa

SEQ ID NO: 2447200 - RNA, 14 nt, Human
cucuuuucaaaaca

SEQ ID NO: 2447201 - RNA, 23 nt, Human
cugaaagugaaaguccagaaacu

SEQ ID NO: 2447202 - RNA, 19 nt, Human
cugaaagugaaaguccaga

SEQ ID NO: 2447203 - RNA, 20 nt, Human
cugaaaugcugcauuuuaau

SEQ ID NO: 2447204 - RNA, 17 nt, Human
cugaaauucuccuggag

SEQ ID NO: 2447205 - RNA, 16 nt, Human
cugaaauucuccugga

SEQ ID NO: 2447206 - RNA, 15 nt, Human
cugaaauucuccugg

SEQ ID NO: 2447207 - RNA, 14 nt, Human
cugaaauucuccug

SEQ ID NO: 2447208 - RNA, 19 nt, Human
cugaaauucuccuggaggu

SEQ ID NO: 2447209 - RNA, 18 nt, Human
cugaaauucuccuggagg

SEQ ID NO: 2447210 - RNA, 19 nt, Human
cugaaauuuuauaugcuua

SEQ ID NO: 2447211 - RNA, 22 nt, Human
cugaaauuuuauaugcuuacug

SEQ ID NO: 2447212 - RNA, 12 nt, Human
cugaacaagaau

SEQ ID NO: 2447213 - RNA, 13 nt, Human
cugaacaagaauu

SEQ ID NO: 2447214 - RNA, 14 nt, Human
cugaacaagaauug

SEQ ID NO: 2447215 - RNA, 16 nt, Human
cugaacaagaauugga

SEQ ID NO: 2447216 - RNA, 21 nt, Human
cugaacaaacuaucagaggaa

SEQ ID NO: 2447217 - RNA, 16 nt, Human
cugaacaaaaaauaaa

SEQ ID NO: 2447218 - RNA, 16 nt, Human
cugaacaauucucucu

SEQ ID NO: 2447219 - RNA, 19 nt, Human
cugaacaauaggcuguucc

SEQ ID NO: 2447220 - RNA, 21 nt, Human
cugaacaauaggcuguuccca

SEQ ID NO: 2447221 - RNA, 14 nt, Human
cugaacauugcaua

SEQ ID NO: 2447222 - RNA, 16 nt, Human
cugaaaugcugcauuu

SEQ ID NO: 2447223 - RNA, 20 nt, Human
cugaacauccuuccuuccca

SEQ ID NO: 2447224 - RNA, 17 nt, Human
cugaacauccuuccuuc

SEQ ID NO: 2447225 - RNA, 15 nt, Human
cugaacauuccagag

SEQ ID NO: 2447226 - RNA, 13 nt, Human
cugaacuuugcug

SEQ ID NO: 2447227 - RNA, 14 nt, Human
cugaacuuugcuga

SEQ ID NO: 2447228 - RNA, 21 nt, Human
cugaacuuugcugagccugua

SEQ ID NO: 2447229 - RNA, 15 nt, Human
cugaagaaccagucc

SEQ ID NO: 2447230 - RNA, 22 nt, Human
cugaagaaccaguccccccacc

SEQ ID NO: 2447231 - RNA, 14 nt, Human
cugaagaaccaguc

SEQ ID NO: 2447232 - RNA, 13 nt, Human
cugaagaacagua

SEQ ID NO: 2447233 - RNA, 14 nt, Human
cugaaccaucccug

SEQ ID NO: 2447234 - RNA, 16 nt, Human
cugaaccaucccugau

SEQ ID NO: 2447235 - RNA, 14 nt, Human
cugaacccugugcu

SEQ ID NO: 2447236 - RNA, 13 nt, Human
cugaacccugugc

SEQ ID NO: 2447237 - RNA, 12 nt, Human
cugaacuuugcu

SEQ ID NO: 2447238 - RNA, 21 nt, Human
cugaaccccgucgaggggcuc

SEQ ID NO: 2447239 - RNA, 16 nt, Human
cugaaccccucccucc

SEQ ID NO: 2447240 - RNA, 22 nt, Human
cugaaugcuuauagguggccuc

SEQ ID NO: 2447241 - RNA, 21 nt, Human
cugaaugcuuauagguggccu

SEQ ID NO: 2447242 - RNA, 19 nt, Human
cugaaugcuuauagguggc

SEQ ID NO: 2447243 - RNA, 16 nt, Human
cugaaugcugcuacuu

SEQ ID NO: 2447244 - RNA, 16 nt, Human
cugaaugguccagggu

SEQ ID NO: 2447245 - RNA, 15 nt, Human
cugaaugguccaggg

SEQ ID NO: 2447246 - RNA, 14 nt, Human
cugaaugguccagg

SEQ ID NO: 2447247 - RNA, 22 nt, Human
cugaauggaagguuuguauauu

SEQ ID NO: 2447248 - RNA, 21 nt, Human
cugaauaaauaccucuuagcu

SEQ ID NO: 2447249 - RNA, 20 nt, Human
cugaaugaggucagcauguc

SEQ ID NO: 2447250 - RNA, 15 nt, Human
cugaauaaauaccuc

SEQ ID NO: 2447251 - RNA, 23 nt, Human
cugaaugccucaaugugaccagg

SEQ ID NO: 2447252 - RNA, 22 nt, Human
cugaaugccucaaugugaccag

SEQ ID NO: 2447253 - RNA, 17 nt, Human
cugaaugcucugugcga

SEQ ID NO: 2447254 - RNA, 12 nt, Human
cugaaugcucug

SEQ ID NO: 2447255 - RNA, 19 nt, Human
cugaaugguuuucaaaaua

SEQ ID NO: 2447256 - RNA, 20 nt, Human
cugaaugguuuucaaaauaa

SEQ ID NO: 2447257 - RNA, 22 nt, Human
cugaaugguuccaugccugagg

SEQ ID NO: 2447258 - RNA, 11 nt, Human
cugaauguucu

SEQ ID NO: 2447259 - RNA, 12 nt, Human
cugaauguucug

SEQ ID NO: 2447260 - RNA, 13 nt, Human
cugaauguucuga

SEQ ID NO: 2447261 - RNA, 14 nt, Human
cugaauguucugac

SEQ ID NO: 2447262 - RNA, 16 nt, Human
cugaauguucugacau

SEQ ID NO: 2447263 - RNA, 18 nt, Human
cugaaugguuccaugccu

SEQ ID NO: 2447264 - RNA, 18 nt, Human
cugaaugguccaggguug

SEQ ID NO: 2447265 - RNA, 11 nt, Human
cugaauguauu

SEQ ID NO: 2447266 - RNA, 24 nt, Human
cugaauuauaagaggcugauaauu

SEQ ID NO: 2447267 - RNA, 14 nt, Human
cugaauuauaagag

SEQ ID NO: 2447268 - RNA, 23 nt, Human
cugaauuaucuauacauaucuuu

SEQ ID NO: 2447269 - RNA, 12 nt, Human
cugaauuucuuu

SEQ ID NO: 2447270 - RNA, 12 nt, Human
cugaauuauuuu

SEQ ID NO: 2447271 - RNA, 18 nt, Human
cugaauguuuauuccuug

SEQ ID NO: 2447272 - RNA, 16 nt, Human
cugaauguuuauuccu

SEQ ID NO: 2447273 - RNA, 19 nt, Human
cugaauguuuauuccuuga

SEQ ID NO: 2447274 - RNA, 19 nt, Human
cugaauguugggacugcua

SEQ ID NO: 2447275 - RNA, 16 nt, Human
cugaauguugggacug

SEQ ID NO: 2447276 - RNA, 15 nt, Human
cugaauguugggacu

SEQ ID NO: 2447277 - RNA, 22 nt, Human
cugaauguucugacauuaacag

SEQ ID NO: 2447278 - RNA, 23 nt, Human
cugaauguucugacauuaacagu

SEQ ID NO: 2447279 - RNA, 17 nt, Human
cugaauguucugacauu

SEQ ID NO: 2447280 - RNA, 18 nt, Human
cugaauguucugacauua

SEQ ID NO: 2447281 - RNA, 19 nt, Human
cugaauguucugacauuaa

SEQ ID NO: 2447282 - RNA, 20 nt, Human
cugaauguucugacauuaac

SEQ ID NO: 2447283 - RNA, 17 nt, Human
cugaauuaaucaucuau

SEQ ID NO: 2447284 - RNA, 20 nt, Human
cugaauuaaugacagagcca

SEQ ID NO: 2447285 - RNA, 22 nt, Human
cugaauuaguccuugcuuggcu

SEQ ID NO: 2447286 - RNA, 20 nt, Human
cugaauuaguccuugcuugg

SEQ ID NO: 2447287 - RNA, 19 nt, Human
cugaauuaguccuugcuug

SEQ ID NO: 2447288 - RNA, 18 nt, Human
cugaauuaguccuugcuu

SEQ ID NO: 2447289 - RNA, 22 nt, Human
cugaauuaaugacagagccagu

SEQ ID NO: 2447290 - RNA, 17 nt, Human
cugaauuaguccuugcu

SEQ ID NO: 2447291 - RNA, 21 nt, Human
cugaauuaaugacagagccag

SEQ ID NO: 2447292 - RNA, 14 nt, Human
cugaagaagauggu

SEQ ID NO: 2447293 - RNA, 17 nt, Human
cugaagucacacaguga

SEQ ID NO: 2447294 - RNA, 19 nt, Human
cugaagucacacagugagu

SEQ ID NO: 2447295 - RNA, 18 nt, Human
cugaagucacacagugag

SEQ ID NO: 2447296 - RNA, 15 nt, Human
cugaagucacugcac

SEQ ID NO: 2447297 - RNA, 14 nt, Human
cugaagucacugca

SEQ ID NO: 2447298 - RNA, 13 nt, Human
cugaagucacugc

SEQ ID NO: 2447299 - RNA, 21 nt, Human
cugaagucacaucacaggaca

SEQ ID NO: 2447300 - RNA, 22 nt, Human
cugaagucacaucacaggacac

SEQ ID NO: 2447301 - RNA, 21 nt, Human
cugaagucacacagugagucg

SEQ ID NO: 2447302 - RNA, 19 nt, Human
cugaagucacaucacagga

SEQ ID NO: 2447303 - RNA, 20 nt, Human
cugaagucuuuguacagaca

SEQ ID NO: 2447304 - RNA, 17 nt, Human
cugaagucuuuguacag

SEQ ID NO: 2447305 - RNA, 13 nt, Human
cugaagucugaaa

SEQ ID NO: 2447306 - RNA, 15 nt, Human
cugaagucugaaauu

SEQ ID NO: 2447307 - RNA, 14 nt, Human
cugaagucugaaau

SEQ ID NO: 2447308 - RNA, 22 nt, Human
cugaagucccagauacuugggg

SEQ ID NO: 2447309 - RNA, 17 nt, Human
cugaaguucagcugcau

SEQ ID NO: 2447310 - RNA, 14 nt, Human
cugaaguucaccau

SEQ ID NO: 2447311 - RNA, 21 nt, Human
cugaaguguuucacgagagcc

SEQ ID NO: 2447312 - RNA, 16 nt, Human
cugaaguuaacagaga

SEQ ID NO: 2447313 - RNA, 13 nt, Human
cugaaguuucaca

SEQ ID NO: 2447314 - RNA, 22 nt, Human
cugaaguuggagugaguguggc

SEQ ID NO: 2447315 - RNA, 13 nt, Human
cugccccugcccc

SEQ ID NO: 2447316 - RNA, 11 nt, Human
cugccccugcc

SEQ ID NO: 2447317 - RNA, 14 nt, Human
cugccccugccccg

SEQ ID NO: 2447318 - RNA, 10 nt, Human
cugccccugc

SEQ ID NO: 2447319 - RNA, 17 nt, Human
cugccccaaccugcuga

SEQ ID NO: 2447320 - RNA, 21 nt, Human
cugccccuccucucugcccua

SEQ ID NO: 2447321 - RNA, 20 nt, Human
cugccccuccucucugcccu

SEQ ID NO: 2447322 - RNA, 21 nt, Human
cugccccaaacaaauaugcaa

SEQ ID NO: 2447323 - RNA, 13 nt, Human
cugccgcagcccu

SEQ ID NO: 2447324 - RNA, 12 nt, Human
cugccgcagccc

SEQ ID NO: 2447325 - RNA, 15 nt, Human
cugccgcaccccaga

SEQ ID NO: 2447326 - RNA, 14 nt, Human
cugccgcaccccag

SEQ ID NO: 2447327 - RNA, 16 nt, Human
cugccccugccccguc

SEQ ID NO: 2447328 - RNA, 17 nt, Human
cugccccugccccguca

SEQ ID NO: 2447329 - RNA, 15 nt, Human
cugccgcagagcugg

SEQ ID NO: 2447330 - RNA, 14 nt, Human
cugccgcagagcug

SEQ ID NO: 2447331 - RNA, 13 nt, Human
cugccgcagagcu

SEQ ID NO: 2447332 - RNA, 16 nt, Human
cugccgcaccccagag

SEQ ID NO: 2447333 - RNA, 17 nt, Human
cugccgcaccccagagu

SEQ ID NO: 2447334 - RNA, 22 nt, Human
cugccgcagcccugcagagggc

SEQ ID NO: 2447335 - RNA, 21 nt, Human
cugccgcagcccugcagaggg

SEQ ID NO: 2447336 - RNA, 20 nt, Human
cugccgcagcccugcagagg

SEQ ID NO: 2447337 - RNA, 19 nt, Human
cugccgcagcccugcagag

SEQ ID NO: 2447338 - RNA, 16 nt, Human
cugccgccccacccag

SEQ ID NO: 2447339 - RNA, 18 nt, Human
cugccgcagagcuggccg

SEQ ID NO: 2447340 - RNA, 16 nt, Human
cugccgcagagcuggc

SEQ ID NO: 2447341 - RNA, 23 nt, Human
cugccgcagcccugcagagggca

SEQ ID NO: 2447342 - RNA, 14 nt, Human
cugccgccucccag

SEQ ID NO: 2447343 - RNA, 15 nt, Human
cugccgccucccagc

SEQ ID NO: 2447344 - RNA, 16 nt, Human
cugccgccucccagcc

SEQ ID NO: 2447345 - RNA, 18 nt, Human
cugccgccucccagccug

SEQ ID NO: 2447346 - RNA, 19 nt, Human
cugccgccucccagccugg

SEQ ID NO: 2447347 - RNA, 19 nt, Human
cugccuaggaauucccagc

SEQ ID NO: 2447348 - RNA, 19 nt, Human
cugccuaaguggcugcuga

SEQ ID NO: 2447349 - RNA, 15 nt, Human
cugccggcccugggg

SEQ ID NO: 2447350 - RNA, 16 nt, Human
cugccggcccuggggc

SEQ ID NO: 2447351 - RNA, 21 nt, Human
cugccggcccuggggcuaggc

SEQ ID NO: 2447352 - RNA, 20 nt, Human
cugccuaaguggcugcugac

SEQ ID NO: 2447353 - RNA, 15 nt, Human
cugccuacugcaucg

SEQ ID NO: 2447354 - RNA, 13 nt, Human
cugccuacucacg

SEQ ID NO: 2447355 - RNA, 14 nt, Human
cugccuacugcauc

SEQ ID NO: 2447356 - RNA, 14 nt, Human
cugccuacucacga

SEQ ID NO: 2447357 - RNA, 18 nt, Human
cugccucagccucccaag

SEQ ID NO: 2447358 - RNA, 10 nt, Human
cugccucagg

SEQ ID NO: 2447359 - RNA, 17 nt, Human
cugccucagccucccga

SEQ ID NO: 2447360 - RNA, 19 nt, Human
cugccucagccucccaaag

SEQ ID NO: 2447361 - RNA, 15 nt, Human
cugccucagccuccc

SEQ ID NO: 2447362 - RNA, 16 nt, Human
cugccuaggcugaccu

SEQ ID NO: 2447363 - RNA, 18 nt, Human
cugccucucugcaggucc

SEQ ID NO: 2447364 - RNA, 17 nt, Human
cugccucucugcagguc

SEQ ID NO: 2447365 - RNA, 16 nt, Human
cugccucucugcaggu

SEQ ID NO: 2447366 - RNA, 15 nt, Human
cugccucucugcagg

SEQ ID NO: 2447367 - RNA, 23 nt, Human
cugccuccagggcuggacugagg

SEQ ID NO: 2447368 - RNA, 22 nt, Human
cugccuccagggcuggacugag

SEQ ID NO: 2447369 - RNA, 20 nt, Human
cugccuccagggcuggacug

SEQ ID NO: 2447370 - RNA, 19 nt, Human
cugccuccagggcuggacu

SEQ ID NO: 2447371 - RNA, 18 nt, Human
cugccuccagggcuggac

SEQ ID NO: 2447372 - RNA, 17 nt, Human
cugccuccagggcugga

SEQ ID NO: 2447373 - RNA, 16 nt, Human
cugccuccagggcugg

SEQ ID NO: 2447374 - RNA, 15 nt, Human
cugccuccagggcug

SEQ ID NO: 2447375 - RNA, 14 nt, Human
cugccuccagaaug

SEQ ID NO: 2447376 - RNA, 16 nt, Human
cugccuccacucccac

SEQ ID NO: 2447377 - RNA, 17 nt, Human
cugccuccacucccacu

SEQ ID NO: 2447378 - RNA, 19 nt, Human
cugccuccacucccacuuc

SEQ ID NO: 2447379 - RNA, 18 nt, Human
cugccuccacucccacuu

SEQ ID NO: 2447380 - RNA, 14 nt, Human
cugccuccagggcu

SEQ ID NO: 2447381 - RNA, 22 nt, Human
cugccuccagaauggucuuucu

SEQ ID NO: 2447382 - RNA, 17 nt, Human
cugcggcugcugugugc

SEQ ID NO: 2447383 - RNA, 16 nt, Human
cugcggcugcugugug

SEQ ID NO: 2447384 - RNA, 17 nt, Human
cugcgggaugguccugg

SEQ ID NO: 2447385 - RNA, 18 nt, Human
cugcgggaugguccuggg

SEQ ID NO: 2447386 - RNA, 19 nt, Human
cugcgggaugguccugggg

SEQ ID NO: 2447387 - RNA, 15 nt, Human
cugcggccugcugga

SEQ ID NO: 2447388 - RNA, 22 nt, Human
cugcggagugaagaggggcagc

SEQ ID NO: 2447389 - RNA, 14 nt, Human
cugcggcaucagau

SEQ ID NO: 2447390 - RNA, 21 nt, Human
cugcggcacccuugcgcuuuu

SEQ ID NO: 2447391 - RNA, 23 nt, Human
cugcggagugaagaggggcagcc

SEQ ID NO: 2447392 - RNA, 21 nt, Human
cugcggagugaagaggggcag

SEQ ID NO: 2447393 - RNA, 20 nt, Human
cugcggagugaagaggggca

SEQ ID NO: 2447394 - RNA, 19 nt, Human
cugcggagugaagaggggc

SEQ ID NO: 2447395 - RNA, 18 nt, Human
cugcggagugaagagggg

SEQ ID NO: 2447396 - RNA, 18 nt, Human
cugcgaaggggcccuggu

SEQ ID NO: 2447397 - RNA, 19 nt, Human
cugcgaaggggcccugguc

SEQ ID NO: 2447398 - RNA, 20 nt, Human
cugcggagagaggccuuguc

SEQ ID NO: 2447399 - RNA, 24 nt, Human
cugccuuuauuguguuugucauua

SEQ ID NO: 2447400 - RNA, 22 nt, Human
cugccuuuauuguguuugucau

SEQ ID NO: 2447401 - RNA, 22 nt, Human
cugccuucuucuuuuugcuguu

SEQ ID NO: 2447402 - RNA, 22 nt, Human
cugccuugaagccacugaagcu

SEQ ID NO: 2447403 - RNA, 17 nt, Human
cugcgaaggggcccugg

SEQ ID NO: 2447404 - RNA, 21 nt, Human
cugccuuugcuccucccaugu

SEQ ID NO: 2447405 - RNA, 18 nt, Human
cugccuuuggcagaguuc

SEQ ID NO: 2447406 - RNA, 18 nt, Human
cugcgguccacccaggag

SEQ ID NO: 2447407 - RNA, 20 nt, Human
cugcgggaugguccuggggc

SEQ ID NO: 2447408 - RNA, 22 nt, Human
cugcgggaugguccuggggcuc

SEQ ID NO: 2447409 - RNA, 20 nt, Human
cugcgguccacccaggagcc

SEQ ID NO: 2447410 - RNA, 19 nt, Human
cugcgguccacccaggagc

SEQ ID NO: 2447411 - RNA, 19 nt, Human
cugcguccuccucaccuca

SEQ ID NO: 2447412 - RNA, 18 nt, Human
cugcguccuccucaccuc

SEQ ID NO: 2447413 - RNA, 17 nt, Human
cugcguccuccucaccu

SEQ ID NO: 2447414 - RNA, 15 nt, Human
cugcguccuccucac

SEQ ID NO: 2447415 - RNA, 14 nt, Human
cugcguccuccuca

SEQ ID NO: 2447416 - RNA, 13 nt, Human
cugcguccuccuc

SEQ ID NO: 2447417 - RNA, 19 nt, Human
cugcgucaugcuuguguua

SEQ ID NO: 2447418 - RNA, 19 nt, Human
cugcggcugcugugugccu

SEQ ID NO: 2447419 - RNA, 14 nt, Human
cugcgucuggaggg

SEQ ID NO: 2447420 - RNA, 24 nt, Human
cugcguccuccucaccucaugccc

SEQ ID NO: 2447421 - RNA, 22 nt, Human
cugcgucuggaggggccccugc

SEQ ID NO: 2447422 - RNA, 18 nt, Human
cugcgucuggaggggccc

SEQ ID NO: 2447423 - RNA, 16 nt, Human
cugcgucuggaggggc

SEQ ID NO: 2447424 - RNA, 15 nt, Human
cugcgucuggagggg

SEQ ID NO: 2447425 - RNA, 19 nt, Human
cugcgugacaauaaaacau

SEQ ID NO: 2447426 - RNA, 13 nt, Human
cugcgucuguguu

SEQ ID NO: 2447427 - RNA, 15 nt, Human
cugcguggggacagg

SEQ ID NO: 2447428 - RNA, 15 nt, Human
cugcgugccugugga

SEQ ID NO: 2447429 - RNA, 23 nt, Human
cugcgucuggaggggccccugcu

SEQ ID NO: 2447430 - RNA, 22 nt, Human
cugccugcccaggccccugcca

SEQ ID NO: 2447431 - RNA, 21 nt, Human
cugccugcccaggccccugcc

SEQ ID NO: 2447432 - RNA, 22 nt, Human
cugccugccccgcccccagucc

SEQ ID NO: 2447433 - RNA, 18 nt, Human
cugccugccccgccccca

SEQ ID NO: 2447434 - RNA, 15 nt, Human
cugccugccccgccc

SEQ ID NO: 2447435 - RNA, 14 nt, Human
cugccugccccgcc

SEQ ID NO: 2447436 - RNA, 13 nt, Human
cugccuccaggaa

SEQ ID NO: 2447437 - RNA, 21 nt, Human
cugccugccccgcccccaguc

SEQ ID NO: 2447438 - RNA, 19 nt, Human
cugccugccccgcccccag

SEQ ID NO: 2447439 - RNA, 21 nt, Human
cugccucugacacacagcucu

SEQ ID NO: 2447440 - RNA, 18 nt, Human
cugccucugacacacagc

SEQ ID NO: 2447441 - RNA, 17 nt, Human
cugccucugacacacag

SEQ ID NO: 2447442 - RNA, 13 nt, Human
cugccuucugucc

SEQ ID NO: 2447443 - RNA, 12 nt, Human
cugccuucuguc

SEQ ID NO: 2447444 - RNA, 20 nt, Human
cugccuucuggauucuuggc

SEQ ID NO: 2447445 - RNA, 23 nt, Human
cugccuucgcuucuugccucugu

SEQ ID NO: 2447446 - RNA, 21 nt, Human
cugccuucgcuucuugccucu

SEQ ID NO: 2447447 - RNA, 21 nt, Human
cugccuucuguccugguguca

SEQ ID NO: 2447448 - RNA, 17 nt, Human
cugccuucuguccuggu

SEQ ID NO: 2447449 - RNA, 16 nt, Human
cugccuucuguccugg

SEQ ID NO: 2447450 - RNA, 15 nt, Human
cugccuucuguccug

SEQ ID NO: 2447451 - RNA, 21 nt, Human
cugccuucuucuuuuugcugu

SEQ ID NO: 2447452 - RNA, 15 nt, Human
cugccuucuucuuuu

SEQ ID NO: 2447453 - RNA, 24 nt, Human
cugccuucuucggggaacuccugg

SEQ ID NO: 2447454 - RNA, 16 nt, Human
cugccuugaagccacu

SEQ ID NO: 2447455 - RNA, 20 nt, Human
cugccuugaagccacugaag

SEQ ID NO: 2447456 - RNA, 21 nt, Human
cugccuugaagccacugaagc

SEQ ID NO: 2447457 - RNA, 12 nt, Human
cugccuggcagg

SEQ ID NO: 2447458 - RNA, 20 nt, Human
cugccuucgcuucuugccuc

SEQ ID NO: 2447459 - RNA, 11 nt, Human
cugccuggagc

SEQ ID NO: 2447460 - RNA, 22 nt, Human
cugccuggagacuuagggcacc

SEQ ID NO: 2447461 - RNA, 18 nt, Human
cugccuggacuagaggga

SEQ ID NO: 2447462 - RNA, 19 nt, Human
cugcaguugccagucaccc

SEQ ID NO: 2447463 - RNA, 16 nt, Human
cugcacuggaguccag

SEQ ID NO: 2447464 - RNA, 23 nt, Human
cugcacuugcagacucuacagag

SEQ ID NO: 2447465 - RNA, 22 nt, Human
cugcaguugccagucaccccgg

SEQ ID NO: 2447466 - RNA, 21 nt, Human
cugcaguugccagucaccccg

SEQ ID NO: 2447467 - RNA, 17 nt, Human
cugcaguugccagucac

SEQ ID NO: 2447468 - RNA, 20 nt, Human
cugcaucagcugcugaaaca

SEQ ID NO: 2447469 - RNA, 19 nt, Human
cugcaucuuggggacaucu

SEQ ID NO: 2447470 - RNA, 16 nt, Human
cugcaucuuggggaca

SEQ ID NO: 2447471 - RNA, 14 nt, Human
cugcaucuugggga

SEQ ID NO: 2447472 - RNA, 13 nt, Human
cugcaucuugggg

SEQ ID NO: 2447473 - RNA, 21 nt, Human
cugcaucugggauucccacca

SEQ ID NO: 2447474 - RNA, 22 nt, Human
cugcaucugaccagcagcgccu

SEQ ID NO: 2447475 - RNA, 21 nt, Human
cugcaucuagaggcuuccuuc

SEQ ID NO: 2447476 - RNA, 16 nt, Human
cugcaucugaccagca

SEQ ID NO: 2447477 - RNA, 17 nt, Human
cugcaucugaccagcag

SEQ ID NO: 2447478 - RNA, 18 nt, Human
cugcaucugaccagcagc

SEQ ID NO: 2447479 - RNA, 19 nt, Human
cugcaucugaccagcagcg

SEQ ID NO: 2447480 - RNA, 20 nt, Human
cugcaucugaccagcagcgc

SEQ ID NO: 2447481 - RNA, 21 nt, Human
cugcaucugaccagcagcgcc

SEQ ID NO: 2447482 - RNA, 22 nt, Human
cugcaucguuucaucuuccaac

SEQ ID NO: 2447483 - RNA, 18 nt, Human
cugcaucuacucccaagu

SEQ ID NO: 2447484 - RNA, 17 nt, Human
cugcaucuacucccaag

SEQ ID NO: 2447485 - RNA, 20 nt, Human
cugcaucuagaggcuuccuu

SEQ ID NO: 2447486 - RNA, 15 nt, Human
cugcaucuacuccca

SEQ ID NO: 2447487 - RNA, 19 nt, Human
cugcauccuccgccucccg

SEQ ID NO: 2447488 - RNA, 23 nt, Human
cugcauccuccaagaaucuaucu

SEQ ID NO: 2447489 - RNA, 17 nt, Human
cugcauccuccaagaau

SEQ ID NO: 2447490 - RNA, 20 nt, Human
cugcauccguaguucccuga

SEQ ID NO: 2447491 - RNA, 21 nt, Human
cugcauccguaguucccugaa

SEQ ID NO: 2447492 - RNA, 12 nt, Human
cugcauccccuu

SEQ ID NO: 2447493 - RNA, 16 nt, Human
cugcauccccuuggcu

SEQ ID NO: 2447494 - RNA, 15 nt, Human
cugcauccccuuggc

SEQ ID NO: 2447495 - RNA, 22 nt, Human
cugcauccccuuggcugugagg

SEQ ID NO: 2447496 - RNA, 19 nt, Human
cugcauccguaguucccug

SEQ ID NO: 2447497 - RNA, 20 nt, Human
cugcauccuccgccucccgg

SEQ ID NO: 2447498 - RNA, 16 nt, Human
cugcaucguuucaucu

SEQ ID NO: 2447499 - RNA, 22 nt, Human
cugcaugcgggcuuccuccugg

SEQ ID NO: 2447500 - RNA, 18 nt, Human
cugcaugcgggcuuccuc

SEQ ID NO: 2447501 - RNA, 21 nt, Human
cugcaugcggcccagcccggc

SEQ ID NO: 2447502 - RNA, 12 nt, Human
cugcaugcugcu

SEQ ID NO: 2447503 - RNA, 13 nt, Human
cugcaugcugcug

SEQ ID NO: 2447504 - RNA, 15 nt, Human
cugcaugcugcugga

SEQ ID NO: 2447505 - RNA, 21 nt, Human
cugcaugcuggguucugcaca

SEQ ID NO: 2447506 - RNA, 19 nt, Human
cugcaugcuggguucugca

SEQ ID NO: 2447507 - RNA, 18 nt, Human
cugcaugcugcuggacag

SEQ ID NO: 2447508 - RNA, 22 nt, Human
cugcaugcugcuggacaguauc

SEQ ID NO: 2447509 - RNA, 20 nt, Human
cugcaugcggcccagcccgg

SEQ ID NO: 2447510 - RNA, 18 nt, Human
cugcaugcggcccagccc

SEQ ID NO: 2447511 - RNA, 17 nt, Human
cugcaugcggcccagcc

SEQ ID NO: 2447512 - RNA, 16 nt, Human
cugcaugcggcccagc

SEQ ID NO: 2447513 - RNA, 15 nt, Human
cugcaugcggcccag

SEQ ID NO: 2447514 - RNA, 14 nt, Human
cugcaugcggccca

SEQ ID NO: 2447515 - RNA, 23 nt, Human
cugcaugcgagugcucauuucag

SEQ ID NO: 2447516 - RNA, 23 nt, Human
cugcaugccuggucuuuccucug

SEQ ID NO: 2447517 - RNA, 22 nt, Human
cugcaugccuggucuuuccucu

SEQ ID NO: 2447518 - RNA, 20 nt, Human
cugcaugccuggucuuuccu

SEQ ID NO: 2447519 - RNA, 21 nt, Human
cugcaucuuggggacaucucu

SEQ ID NO: 2447520 - RNA, 23 nt, Human
cugccacacaaacguauguaaau

SEQ ID NO: 2447521 - RNA, 22 nt, Human
cugccacacaaacguauguaaa

SEQ ID NO: 2447522 - RNA, 12 nt, Human
cugccacacagg

SEQ ID NO: 2447523 - RNA, 15 nt, Human
cugccacacaaacgu

SEQ ID NO: 2447524 - RNA, 13 nt, Human
cugccacacaaac

SEQ ID NO: 2447525 - RNA, 16 nt, Human
cugccacaccugagcc

SEQ ID NO: 2447526 - RNA, 15 nt, Human
cugccacaccugagc

SEQ ID NO: 2447527 - RNA, 22 nt, Human
cugccacacgucugacccucuc

SEQ ID NO: 2447528 - RNA, 23 nt, Human
cugccacacgucugacccucucc

SEQ ID NO: 2447529 - RNA, 15 nt, Human
cugccaccugcugcu

SEQ ID NO: 2447530 - RNA, 14 nt, Human
cugccaccuggggc

SEQ ID NO: 2447531 - RNA, 15 nt, Human
cugccaccuggggca

SEQ ID NO: 2447532 - RNA, 16 nt, Human
cugccaccuggggcag

SEQ ID NO: 2447533 - RNA, 18 nt, Human
cugccaccuggggcaguc

SEQ ID NO: 2447534 - RNA, 19 nt, Human
cugccaaugggagcucaug

SEQ ID NO: 2447535 - RNA, 18 nt, Human
cugccaaugggagcucau

SEQ ID NO: 2447536 - RNA, 21 nt, Human
cugcauguaaacacgccugca

SEQ ID NO: 2447537 - RNA, 11 nt, Human
cugccaggcau

SEQ ID NO: 2447538 - RNA, 13 nt, Human
cugccaggcaugg

SEQ ID NO: 2447539 - RNA, 19 nt, Human
cugccacucacuaggcccc

SEQ ID NO: 2447540 - RNA, 24 nt, Human
cugccacucacacagccaggugcc

SEQ ID NO: 2447541 - RNA, 16 nt, Human
cugccacuucccaggu

SEQ ID NO: 2447542 - RNA, 13 nt, Human
cugccacuuccca

SEQ ID NO: 2447543 - RNA, 19 nt, Human
cugccacuuugguacaugg

SEQ ID NO: 2447544 - RNA, 20 nt, Human
cugccacucacacagccagg

SEQ ID NO: 2447545 - RNA, 18 nt, Human
cugccacucacacagcca

SEQ ID NO: 2447546 - RNA, 16 nt, Human
cugccacucacuaggc

SEQ ID NO: 2447547 - RNA, 15 nt, Human
cugccacucacacag

SEQ ID NO: 2447548 - RNA, 13 nt, Human
cugccacucacac

SEQ ID NO: 2447549 - RNA, 16 nt, Human
cugccacucaggccca

SEQ ID NO: 2447550 - RNA, 23 nt, Human
cugccacucaggcccaaagccuc

SEQ ID NO: 2447551 - RNA, 12 nt, Human
cugccacucaca

SEQ ID NO: 2447552 - RNA, 17 nt, Human
cugccaucuucccagca

SEQ ID NO: 2447553 - RNA, 16 nt, Human
cugccaucuucccagc

SEQ ID NO: 2447554 - RNA, 15 nt, Human
cugccaucuucccag

SEQ ID NO: 2447555 - RNA, 14 nt, Human
cugccaucuuccca

SEQ ID NO: 2447556 - RNA, 23 nt, Human
cugccaucuuaguuuggauucuu

SEQ ID NO: 2447557 - RNA, 22 nt, Human
cugccaucuuaguuuggauucu

SEQ ID NO: 2447558 - RNA, 14 nt, Human
cugccaugccagcu

SEQ ID NO: 2447559 - RNA, 23 nt, Human
cugccaggccagccuccgagagg

SEQ ID NO: 2447560 - RNA, 22 nt, Human
cugccaggccagccuccgagag

SEQ ID NO: 2447561 - RNA, 20 nt, Human
cugccaggccagccuccgag

SEQ ID NO: 2447562 - RNA, 19 nt, Human
cugccaggccagccuccga

SEQ ID NO: 2447563 - RNA, 19 nt, Human
cugccaucuuaguuuggau

SEQ ID NO: 2447564 - RNA, 18 nt, Human
cugccaggccagccuccg

SEQ ID NO: 2447565 - RNA, 17 nt, Human
cugccaggccagccucc

SEQ ID NO: 2447566 - RNA, 16 nt, Human
cugccaggccagccuc

SEQ ID NO: 2447567 - RNA, 15 nt, Human
cugccaggccagccu

SEQ ID NO: 2447568 - RNA, 13 nt, Human
cugccaggccagc

SEQ ID NO: 2447569 - RNA, 20 nt, Human
cugccaggcagggguggggg

SEQ ID NO: 2447570 - RNA, 17 nt, Human
cugccaggcaggggugg

SEQ ID NO: 2447571 - RNA, 23 nt, Human
cugccacuuugguacauggccag

SEQ ID NO: 2447572 - RNA, 15 nt, Human
cugcccaccuggccu

SEQ ID NO: 2447573 - RNA, 14 nt, Human
cugcccaccuggcc

SEQ ID NO: 2447574 - RNA, 13 nt, Human
cugcccaccuggc

SEQ ID NO: 2447575 - RNA, 15 nt, Human
cugccaugccagcuu

SEQ ID NO: 2447576 - RNA, 16 nt, Human
cugccaugcagggccu

SEQ ID NO: 2447577 - RNA, 18 nt, Human
cugccaucuucccagcag

SEQ ID NO: 2447578 - RNA, 15 nt, Human
cugccaugcagggcc

SEQ ID NO: 2447579 - RNA, 16 nt, Human
cugcccacucccugca

SEQ ID NO: 2447580 - RNA, 15 nt, Human
cugcccacucccugc

SEQ ID NO: 2447581 - RNA, 14 nt, Human
cugcccacucccug

SEQ ID NO: 2447582 - RNA, 22 nt, Human
cugcccaccuggccucugcacu

SEQ ID NO: 2447583 - RNA, 20 nt, Human
cugcccaccuggccucugca

SEQ ID NO: 2447584 - RNA, 19 nt, Human
cugcccaccuggccucugc

SEQ ID NO: 2447585 - RNA, 18 nt, Human
cugcccaccuggccucug

SEQ ID NO: 2447586 - RNA, 17 nt, Human
cugcccaccuggccucu

SEQ ID NO: 2447587 - RNA, 22 nt, Human
cugcccagaguugcugggagcu

SEQ ID NO: 2447588 - RNA, 17 nt, Human
cugcccagccuccaagc

SEQ ID NO: 2447589 - RNA, 18 nt, Human
cugcccagaccccucugg

SEQ ID NO: 2447590 - RNA, 21 nt, Human
cugcccagaccccucuggcca

SEQ ID NO: 2447591 - RNA, 22 nt, Human
cugcccagaccccucuggccag

SEQ ID NO: 2447592 - RNA, 23 nt, Human
cugcccagaccccucuggccagg

SEQ ID NO: 2447593 - RNA, 18 nt, Human
cugcccagaguugcuggg

SEQ ID NO: 2447594 - RNA, 18 nt, Human
cugcccacucccugcaac

SEQ ID NO: 2447595 - RNA, 17 nt, Human
cugccaugcagggccuc

SEQ ID NO: 2447596 - RNA, 12 nt, Human
cugcccaccugu

SEQ ID NO: 2447597 - RNA, 18 nt, Human
cugcccaugccaccgcuu

SEQ ID NO: 2447598 - RNA, 20 nt, Human
cugcccaucugggaaaauac

SEQ ID NO: 2447599 - RNA, 18 nt, Human
cugcccaucugggaaaau

SEQ ID NO: 2447600 - RNA, 16 nt, Human
cugcccauggacaggc

SEQ ID NO: 2447601 - RNA, 18 nt, Human
cugcccauggacaggcug

SEQ ID NO: 2447602 - RNA, 22 nt, Human
cugcccaugucgcgcucagcau

SEQ ID NO: 2447603 - RNA, 21 nt, Human
cugcccaugucgcgcucagca

SEQ ID NO: 2447604 - RNA, 20 nt, Human
cugcccauggacaggcuggc

SEQ ID NO: 2447605 - RNA, 15 nt, Human
cugccccaaacaaau

SEQ ID NO: 2447606 - RNA, 15 nt, Human
cugcccaucacaggg

SEQ ID NO: 2447607 - RNA, 18 nt, Human
cugcccaucacaggguug

SEQ ID NO: 2447608 - RNA, 22 nt, Human
cugcccaucacaggguugggcc

SEQ ID NO: 2447609 - RNA, 14 nt, Human
cugcccagcuuggg

SEQ ID NO: 2447610 - RNA, 18 nt, Human
cugcccagaucccagaag

SEQ ID NO: 2447611 - RNA, 13 nt, Human
cugcccagcuugg

SEQ ID NO: 2447612 - RNA, 22 nt, Human
cugauuuuuuuuuccuucagug

SEQ ID NO: 2447613 - RNA, 21 nt, Human
cugauuuuuuuuuccuucagu

SEQ ID NO: 2447614 - RNA, 17 nt, Human
cugcaaaaauauuuaua

SEQ ID NO: 2447615 - RNA, 20 nt, Human
cugcaaaaauauuuauaaaa

SEQ ID NO: 2447616 - RNA, 21 nt, Human
cugcaaaaauauuuauaaaac

SEQ ID NO: 2447617 - RNA, 15 nt, Human
cugcaaaaauauuua

SEQ ID NO: 2447618 - RNA, 23 nt, Human
cugauuuuuuuuuccuucagugc

SEQ ID NO: 2447619 - RNA, 22 nt, Human
cugcaaagaucuguccucagcc

SEQ ID NO: 2447620 - RNA, 23 nt, Human
cugcaaagaucuguccucagccu

SEQ ID NO: 2447621 - RNA, 13 nt, Human
cugcaaagcccag

SEQ ID NO: 2447622 - RNA, 15 nt, Human
cugcaaagcccagcu

SEQ ID NO: 2447623 - RNA, 20 nt, Human
cugcaaacucacugcucaag

SEQ ID NO: 2447624 - RNA, 16 nt, Human
cugcaaacucacugcu

SEQ ID NO: 2447625 - RNA, 19 nt, Human
cugcaaacgcugccugccg

SEQ ID NO: 2447626 - RNA, 19 nt, Human
cugcaaacgcugccugccc

SEQ ID NO: 2447627 - RNA, 20 nt, Human
cugcaaacgcugccugccca

SEQ ID NO: 2447628 - RNA, 18 nt, Human
cugcaaacgcugccugcc

SEQ ID NO: 2447629 - RNA, 20 nt, Human
cugauuuuuuuuuccuucag

SEQ ID NO: 2447630 - RNA, 19 nt, Human
cugauuuuuuuuuccuuca

SEQ ID NO: 2447631 - RNA, 18 nt, Human
cugauuuuuuuuuccuuc

SEQ ID NO: 2447632 - RNA, 16 nt, Human
cugauuuuuuuuuccu

SEQ ID NO: 2447633 - RNA, 21 nt, Human
cugauuuucaaagcuuuuucc

SEQ ID NO: 2447634 - RNA, 15 nt, Human
cugauuuuuuuuccu

SEQ ID NO: 2447635 - RNA, 19 nt, Human
cugauuuuuuuuccuuuua

SEQ ID NO: 2447636 - RNA, 20 nt, Human
cugauuuuuuuuccuuuuaa

SEQ ID NO: 2447637 - RNA, 18 nt, Human
cugauuuucaaagcuuuu

SEQ ID NO: 2447638 - RNA, 14 nt, Human
cugauuuggaaaaa

SEQ ID NO: 2447639 - RNA, 12 nt, Human
cugauuuuaaca

SEQ ID NO: 2447640 - RNA, 13 nt, Human
cugauuuuaacaa

SEQ ID NO: 2447641 - RNA, 14 nt, Human
cugauuuuaacaau

SEQ ID NO: 2447642 - RNA, 17 nt, Human
cugauuuuaacaauaac

SEQ ID NO: 2447643 - RNA, 22 nt, Human
cugauuuuaacaauaacuacug

SEQ ID NO: 2447644 - RNA, 21 nt, Human
cugauggugcaaugaccuuuc

SEQ ID NO: 2447645 - RNA, 20 nt, Human
cugauggugcaaugaccuuu

SEQ ID NO: 2447646 - RNA, 19 nt, Human
cugauggugcaaugaccuu

SEQ ID NO: 2447647 - RNA, 17 nt, Human
cugauggugcaaugacc

SEQ ID NO: 2447648 - RNA, 21 nt, Human
cugauuguaacguugcugugg

SEQ ID NO: 2447649 - RNA, 20 nt, Human
cugauuguaacguugcugug

SEQ ID NO: 2447650 - RNA, 18 nt, Human
cugauuguaacguugcug

SEQ ID NO: 2447651 - RNA, 14 nt, Human
cugauuguaacguu

SEQ ID NO: 2447652 - RNA, 13 nt, Human
cugauuguauuua

SEQ ID NO: 2447653 - RNA, 17 nt, Human
cugauugugucucuugg

SEQ ID NO: 2447654 - RNA, 19 nt, Human
cugauggucagcucccuuc

SEQ ID NO: 2447655 - RNA, 17 nt, Human
cugauuggugcaacccu

SEQ ID NO: 2447656 - RNA, 14 nt, Human
cugauggucagcuc

SEQ ID NO: 2447657 - RNA, 18 nt, Human
cugauccuggaggcccag

SEQ ID NO: 2447658 - RNA, 16 nt, Human
cugauggucagcuccc

SEQ ID NO: 2447659 - RNA, 15 nt, Human
cugauggucagcucc

SEQ ID NO: 2447660 - RNA, 21 nt, Human
cugauuugcugggcaguuuuu

SEQ ID NO: 2447661 - RNA, 11 nt, Human
cugauuugcaa

SEQ ID NO: 2447662 - RNA, 11 nt, Human
cugauuugcug

SEQ ID NO: 2447663 - RNA, 16 nt, Human
cugauuugcaaaaaaa

SEQ ID NO: 2447664 - RNA, 12 nt, Human
cugauuucagga

SEQ ID NO: 2447665 - RNA, 14 nt, Human
cugauuuccuuugg

SEQ ID NO: 2447666 - RNA, 21 nt, Human
cugauugugucucuugguccu

SEQ ID NO: 2447667 - RNA, 12 nt, Human
cugauuuacagu

SEQ ID NO: 2447668 - RNA, 23 nt, Human
cugauuguaacguugcuguggga

SEQ ID NO: 2447669 - RNA, 17 nt, Human
cugauuguuucauugcg

SEQ ID NO: 2447670 - RNA, 16 nt, Human
cugauuuaggagaagc

SEQ ID NO: 2447671 - RNA, 17 nt, Human
cugauuuaggagaagcc

SEQ ID NO: 2447672 - RNA, 18 nt, Human
cugauuuaggagaagcca

SEQ ID NO: 2447673 - RNA, 20 nt, Human
cugauuuaggagaagccagg

SEQ ID NO: 2447674 - RNA, 22 nt, Human
cugauuuaggagaagccaggaa

SEQ ID NO: 2447675 - RNA, 21 nt, Human
cugauuuaggagaagccagga

SEQ ID NO: 2447676 - RNA, 13 nt, Human
cugauuucacaac

SEQ ID NO: 2447677 - RNA, 21 nt, Human
cugcacaguuuucuggcugga

SEQ ID NO: 2447678 - RNA, 23 nt, Human
cugcacaugaaucccacccacau

SEQ ID NO: 2447679 - RNA, 22 nt, Human
cugcacaugaaucccacccaca

SEQ ID NO: 2447680 - RNA, 23 nt, Human
cugcacaugacucgggggugggg

SEQ ID NO: 2447681 - RNA, 22 nt, Human
cugcacaugacucggggguggg

SEQ ID NO: 2447682 - RNA, 23 nt, Human
cugcacaugucuuguacaugugu

SEQ ID NO: 2447683 - RNA, 21 nt, Human
cugcacaugucuuguacaugu

SEQ ID NO: 2447684 - RNA, 20 nt, Human
cugcacccccuccugcugca

SEQ ID NO: 2447685 - RNA, 16 nt, Human
cugcacaugucuugua

SEQ ID NO: 2447686 - RNA, 14 nt, Human
cugcacaugucuug

SEQ ID NO: 2447687 - RNA, 21 nt, Human
cugcacaugcagcugcacccu

SEQ ID NO: 2447688 - RNA, 20 nt, Human
cugcacaugcagcugcaccc

SEQ ID NO: 2447689 - RNA, 14 nt, Human
cugcacacagcacg

SEQ ID NO: 2447690 - RNA, 20 nt, Human
cugcacacgcuccuuccucu

SEQ ID NO: 2447691 - RNA, 11 nt, Human
cugcacagagc

SEQ ID NO: 2447692 - RNA, 20 nt, Human
cugcacacaccucagaggcu

SEQ ID NO: 2447693 - RNA, 22 nt, Human
cugcacacgcuccuuccucuga

SEQ ID NO: 2447694 - RNA, 18 nt, Human
cugcacaguuuucuggcu

SEQ ID NO: 2447695 - RNA, 22 nt, Human
cugcacagugcaucucagccca

SEQ ID NO: 2447696 - RNA, 23 nt, Human
cugcacagauggauuugccugug

SEQ ID NO: 2447697 - RNA, 20 nt, Human
cugcacagauggauuugccu

SEQ ID NO: 2447698 - RNA, 20 nt, Human
cugcacagagcucuccagcu

SEQ ID NO: 2447699 - RNA, 18 nt, Human
cugcacagagcucuccag

SEQ ID NO: 2447700 - RNA, 14 nt, Human
cugcacagagcucu

SEQ ID NO: 2447701 - RNA, 13 nt, Human
cugcacagagcuc

SEQ ID NO: 2447702 - RNA, 23 nt, Human
cugcacagagcucuccagcucca

SEQ ID NO: 2447703 - RNA, 21 nt, Human
cugcacagagcucuccagcuc

SEQ ID NO: 2447704 - RNA, 12 nt, Human
cugcacagaugg

SEQ ID NO: 2447705 - RNA, 13 nt, Human
cugcacagaugga

SEQ ID NO: 2447706 - RNA, 18 nt, Human
cugcaauaaggggagagu

SEQ ID NO: 2447707 - RNA, 19 nt, Human
cugcaagugacaucucuuu

SEQ ID NO: 2447708 - RNA, 19 nt, Human
cugcaagucaguccaggau

SEQ ID NO: 2447709 - RNA, 22 nt, Human
cugcacaauaaaaauguuuaac

SEQ ID NO: 2447710 - RNA, 19 nt, Human
cugcacacaccucagaggc

SEQ ID NO: 2447711 - RNA, 15 nt, Human
cugcacacaccucag

SEQ ID NO: 2447712 - RNA, 13 nt, Human
cugcacacagcac

SEQ ID NO: 2447713 - RNA, 22 nt, Human
cugcacaagcugcacccucagg

SEQ ID NO: 2447714 - RNA, 15 nt, Human
cugcacaauaaaaau

SEQ ID NO: 2447715 - RNA, 18 nt, Human
cugcacaauaaaaauguu

SEQ ID NO: 2447716 - RNA, 15 nt, Human
cugcacuccccugcu

SEQ ID NO: 2447717 - RNA, 14 nt, Human
cugcacuccccugc

SEQ ID NO: 2447718 - RNA, 23 nt, Human
cugcaccggcuggccuggccccu

SEQ ID NO: 2447719 - RNA, 12 nt, Human
cugcaccgggcc

SEQ ID NO: 2447720 - RNA, 13 nt, Human
cugcacccucagg

SEQ ID NO: 2447721 - RNA, 14 nt, Human
cugcacccucaggc

SEQ ID NO: 2447722 - RNA, 22 nt, Human
cugcaccggcuggccuggcccc

SEQ ID NO: 2447723 - RNA, 20 nt, Human
cugcaccggcuggccuggcc

SEQ ID NO: 2447724 - RNA, 18 nt, Human
cugcacugagcagagucu

SEQ ID NO: 2447725 - RNA, 14 nt, Human
cugcacugagcaga

SEQ ID NO: 2447726 - RNA, 22 nt, Human
cugcacucugugcccaugggca

SEQ ID NO: 2447727 - RNA, 21 nt, Human
cugcacucugugcccaugggc

SEQ ID NO: 2447728 - RNA, 20 nt, Human
cugcacucugugcccauggg

SEQ ID NO: 2447729 - RNA, 18 nt, Human
cugcacucugugcccaug

SEQ ID NO: 2447730 - RNA, 17 nt, Human
cugcacucugugcccau

SEQ ID NO: 2447731 - RNA, 19 nt, Human
cugcacucuuaagcuuccg

SEQ ID NO: 2447732 - RNA, 15 nt, Human
cugcacugaugcugc

SEQ ID NO: 2447733 - RNA, 17 nt, Human
cugcacugaugcugccc

SEQ ID NO: 2447734 - RNA, 18 nt, Human
cugcacugaugcugcccc

SEQ ID NO: 2447735 - RNA, 19 nt, Human
cugcacugaugcugccccu

SEQ ID NO: 2447736 - RNA, 18 nt, Human
cugcacuugcagacucua

SEQ ID NO: 2447737 - RNA, 17 nt, Human
cugcacuccccugcugg

SEQ ID NO: 2447738 - RNA, 16 nt, Human
cugcacuccccugcug

SEQ ID NO: 2447739 - RNA, 21 nt, Human
cugcaccccuucucuccuccc

SEQ ID NO: 2447740 - RNA, 20 nt, Human
cugcaccccuucucuccucc

SEQ ID NO: 2447741 - RNA, 19 nt, Human
cugcaccccuucucuccuc

SEQ ID NO: 2447742 - RNA, 16 nt, Human
cugcacucugugccca

SEQ ID NO: 2447743 - RNA, 15 nt, Human
cugcacucugugccc

SEQ ID NO: 2447744 - RNA, 14 nt, Human
cugcacucugugcc

SEQ ID NO: 2447745 - RNA, 13 nt, Human
cugcacucugugc

SEQ ID NO: 2447746 - RNA, 23 nt, Human
cugcacucuaacccuaggcauca

SEQ ID NO: 2447747 - RNA, 19 nt, Human
cugauaagagaaucaacau

SEQ ID NO: 2447748 - RNA, 23 nt, Human
cugauaacuagauggugcugaga

SEQ ID NO: 2447749 - RNA, 24 nt, Human
cugauaacuagauggugcugagaa

SEQ ID NO: 2447750 - RNA, 18 nt, Human
cugauaacuagauggugc

SEQ ID NO: 2447751 - RNA, 19 nt, Human
cugauaacuagauggugcu

SEQ ID NO: 2447752 - RNA, 20 nt, Human
cugauaacuagauggugcug

SEQ ID NO: 2447753 - RNA, 21 nt, Human
cugauaacuagauggugcuga

SEQ ID NO: 2447754 - RNA, 22 nt, Human
cugauaacaaccuggagaccag

SEQ ID NO: 2447755 - RNA, 18 nt, Human
cugauaacaaccuggaga

SEQ ID NO: 2447756 - RNA, 17 nt, Human
cugauaacaaccuggag

SEQ ID NO: 2447757 - RNA, 16 nt, Human
cugauaacaaccugga

SEQ ID NO: 2447758 - RNA, 14 nt, Human
cugaguuccugcau

SEQ ID NO: 2447759 - RNA, 16 nt, Human
cugaguuccugcaugc

SEQ ID NO: 2447760 - RNA, 20 nt, Human
cugaguugacuugacagaac

SEQ ID NO: 2447761 - RNA, 17 nt, Human
cugaguuucauucuccu

SEQ ID NO: 2447762 - RNA, 21 nt, Human
cugaguugguguugacaugug

SEQ ID NO: 2447763 - RNA, 20 nt, Human
cugaguuucauucuccugcc

SEQ ID NO: 2447764 - RNA, 19 nt, Human
cugaguuucauucuccugc

SEQ ID NO: 2447765 - RNA, 21 nt, Human
cugaguuucauucuccugccu

SEQ ID NO: 2447766 - RNA, 18 nt, Human
cugaguuucauucuccug

SEQ ID NO: 2447767 - RNA, 19 nt, Human
cugagucugaaggcugggu

SEQ ID NO: 2447768 - RNA, 18 nt, Human
cugagucugaaggcuggg

SEQ ID NO: 2447769 - RNA, 20 nt, Human
cugagucccaggcugagccu

SEQ ID NO: 2447770 - RNA, 17 nt, Human
cugagucugaaggcugg

SEQ ID NO: 2447771 - RNA, 21 nt, Human
cugagucccaggagcugccca

SEQ ID NO: 2447772 - RNA, 17 nt, Human
cugagucccaggagcug

SEQ ID NO: 2447773 - RNA, 16 nt, Human
cugagucccaggagcu

SEQ ID NO: 2447774 - RNA, 21 nt, Human
cugaguccaagaggguccuuu

SEQ ID NO: 2447775 - RNA, 20 nt, Human
cugagucaugaucucccugc

SEQ ID NO: 2447776 - RNA, 21 nt, Human
cugagucaugaucucccugcc

SEQ ID NO: 2447777 - RNA, 18 nt, Human
cugagucauggccgggug

SEQ ID NO: 2447778 - RNA, 22 nt, Human
cugagucaugaucucccugccg

SEQ ID NO: 2447779 - RNA, 15 nt, Human
cugaguuccuagcca

SEQ ID NO: 2447780 - RNA, 16 nt, Human
cugaguuccuagccac

SEQ ID NO: 2447781 - RNA, 17 nt, Human
cugaguuccuagccacc

SEQ ID NO: 2447782 - RNA, 18 nt, Human
cugaguuccuagccaccg

SEQ ID NO: 2447783 - RNA, 22 nt, Human
cugagucugcuauauuuucaug

SEQ ID NO: 2447784 - RNA, 17 nt, Human
cugagucugcuauauuu

SEQ ID NO: 2447785 - RNA, 22 nt, Human
cugagucccaggagcugcccag

SEQ ID NO: 2447786 - RNA, 21 nt, Human
cugagucugcuauauuuucau

SEQ ID NO: 2447787 - RNA, 17 nt, Human
cugaguuacauugucau

SEQ ID NO: 2447788 - RNA, 15 nt, Human
cugagugaaccugua

SEQ ID NO: 2447789 - RNA, 13 nt, Human
cugagugaaccug

SEQ ID NO: 2447790 - RNA, 23 nt, Human
cugauauuuuaccucuuauugca

SEQ ID NO: 2447791 - RNA, 17 nt, Human
cugauauuuuaccucuu

SEQ ID NO: 2447792 - RNA, 22 nt, Human
cugauauuucccuccccugggg

SEQ ID NO: 2447793 - RNA, 22 nt, Human
cugauauugccgcacuagggga

SEQ ID NO: 2447794 - RNA, 19 nt, Human
cugauauugccgcacuagg

SEQ ID NO: 2447795 - RNA, 20 nt, Human
cugauauucaaauggacaaa

SEQ ID NO: 2447796 - RNA, 19 nt, Human
cugauauuccaugaaugua

SEQ ID NO: 2447797 - RNA, 18 nt, Human
cugauauuccaugaaugu

SEQ ID NO: 2447798 - RNA, 15 nt, Human
cugaucaccugcccu

SEQ ID NO: 2447799 - RNA, 17 nt, Human
cugaucaaugacagagc

SEQ ID NO: 2447800 - RNA, 15 nt, Human
cugaucaaugacaga

SEQ ID NO: 2447801 - RNA, 18 nt, Human
cugaucaagucaccggag

SEQ ID NO: 2447802 - RNA, 14 nt, Human
cugaucaaugacag

SEQ ID NO: 2447803 - RNA, 22 nt, Human
cugaucaagucaccggagcuuu

SEQ ID NO: 2447804 - RNA, 22 nt, Human
cugauaugauuuaaaacaugua

SEQ ID NO: 2447805 - RNA, 23 nt, Human
cugauaugauuuaaaacauguaa

SEQ ID NO: 2447806 - RNA, 21 nt, Human
cugauaugauuuaaaacaugu

SEQ ID NO: 2447807 - RNA, 19 nt, Human
cugauaugauuuaaaacau

SEQ ID NO: 2447808 - RNA, 18 nt, Human
cugauaugauuuaaaaca

SEQ ID NO: 2447809 - RNA, 16 nt, Human
cugauaugauuuaaaa

SEQ ID NO: 2447810 - RNA, 16 nt, Human
cugauauauuuuacaa

SEQ ID NO: 2447811 - RNA, 18 nt, Human
cugauauauuuuacaauu

SEQ ID NO: 2447812 - RNA, 14 nt, Human
cugauacccagagc

SEQ ID NO: 2447813 - RNA, 22 nt, Human
cugauauauguguuuuucacau

SEQ ID NO: 2447814 - RNA, 15 nt, Human
cugauauauguguuu

SEQ ID NO: 2447815 - RNA, 21 nt, Human
cugauauauguguuuuucaca

SEQ ID NO: 2447816 - RNA, 15 nt, Human
cugauaauuccagug

SEQ ID NO: 2447817 - RNA, 14 nt, Human
cugauaauaauuga

SEQ ID NO: 2447818 - RNA, 16 nt, Human
cugauggugcaaugac

SEQ ID NO: 2447819 - RNA, 15 nt, Human
cugauggugcaauga

SEQ ID NO: 2447820 - RNA, 14 nt, Human
cugauggugcaaug

SEQ ID NO: 2447821 - RNA, 15 nt, Human
cugauccuggaggcc

SEQ ID NO: 2447822 - RNA, 17 nt, Human
cugauccuggaggccca

SEQ ID NO: 2447823 - RNA, 12 nt, Human
cugauccuggag

SEQ ID NO: 2447824 - RNA, 21 nt, Human
cugauccuaguuccaccauca

SEQ ID NO: 2447825 - RNA, 20 nt, Human
cugauccuaguuccaccauc

SEQ ID NO: 2447826 - RNA, 15 nt, Human
cugaucccucuacag

SEQ ID NO: 2447827 - RNA, 13 nt, Human
cugaucagucuaa

SEQ ID NO: 2447828 - RNA, 14 nt, Human
cugaucagagccgu

SEQ ID NO: 2447829 - RNA, 17 nt, Human
cugaucagaccacggcu

SEQ ID NO: 2447830 - RNA, 20 nt, Human
cugaucagagccgugguccu

SEQ ID NO: 2447831 - RNA, 19 nt, Human
cugagcccgggcugccugg

SEQ ID NO: 2447832 - RNA, 18 nt, Human
cugagcccgggcugccug

SEQ ID NO: 2447833 - RNA, 17 nt, Human
cugagcccgggcugccu

SEQ ID NO: 2447834 - RNA, 16 nt, Human
cugagcccgggcugcc

SEQ ID NO: 2447835 - RNA, 15 nt, Human
cugagcccgggcugc

SEQ ID NO: 2447836 - RNA, 14 nt, Human
cugagcccgggcug

SEQ ID NO: 2447837 - RNA, 20 nt, Human
cugagccccuuccuugcucu

SEQ ID NO: 2447838 - RNA, 19 nt, Human
cugagccccuuccuugcuc

SEQ ID NO: 2447839 - RNA, 13 nt, Human
cugagccccuguc

SEQ ID NO: 2447840 - RNA, 15 nt, Human
cugagccccugucua

SEQ ID NO: 2447841 - RNA, 16 nt, Human
cugagccccugucuag

SEQ ID NO: 2447842 - RNA, 22 nt, Human
cugagccccugucuagagaggg

SEQ ID NO: 2447843 - RNA, 16 nt, Human
cugagccccuuccuug

SEQ ID NO: 2447844 - RNA, 14 nt, Human
cugagccccuuccu

SEQ ID NO: 2447845 - RNA, 13 nt, Human
cugagccccuucc

SEQ ID NO: 2447846 - RNA, 23 nt, Human
cugagccccugucuagagaggga

SEQ ID NO: 2447847 - RNA, 24 nt, Human
cugaggcccuucucuccagccccu

SEQ ID NO: 2447848 - RNA, 23 nt, Human
cugagcccgggcugccugggcug

SEQ ID NO: 2447849 - RNA, 22 nt, Human
cugagcccgggcugccugggcu

SEQ ID NO: 2447850 - RNA, 21 nt, Human
cugagcccgggcugccugggc

SEQ ID NO: 2447851 - RNA, 20 nt, Human
cugagcccgggcugccuggg

SEQ ID NO: 2447852 - RNA, 21 nt, Human
cugaggccuaaaaguaaacau

SEQ ID NO: 2447853 - RNA, 19 nt, Human
cugaggccuaaaaguaaac

SEQ ID NO: 2447854 - RNA, 18 nt, Human
cugagccccgcagaccuc

SEQ ID NO: 2447855 - RNA, 17 nt, Human
cugagccccgcagaccu

SEQ ID NO: 2447856 - RNA, 22 nt, Human
cugagcccccccaacacugugc

SEQ ID NO: 2447857 - RNA, 21 nt, Human
cugagcccccccaacacugug

SEQ ID NO: 2447858 - RNA, 14 nt, Human
cugagccccuaccc

SEQ ID NO: 2447859 - RNA, 13 nt, Human
cugagccccuacc

SEQ ID NO: 2447860 - RNA, 22 nt, Human
cugagccccgcagaccucccca

SEQ ID NO: 2447861 - RNA, 21 nt, Human
cugagccccgcagaccucccc

SEQ ID NO: 2447862 - RNA, 23 nt, Human
cugagccccgcagaccuccccag

SEQ ID NO: 2447863 - RNA, 22 nt, Human
cugagccccuaccccacaccag

SEQ ID NO: 2447864 - RNA, 19 nt, Human
cugagccccuaccccacac

SEQ ID NO: 2447865 - RNA, 17 nt, Human
cugagccccuaccccac

SEQ ID NO: 2447866 - RNA, 15 nt, Human
cugagccccuacccc

SEQ ID NO: 2447867 - RNA, 12 nt, Human
cugagccccugu

SEQ ID NO: 2447868 - RNA, 22 nt, Human
cugagccccugggacugcugcu

SEQ ID NO: 2447869 - RNA, 16 nt, Human
cugagccccugggacu

SEQ ID NO: 2447870 - RNA, 19 nt, Human
cugagccccugggacugcu

SEQ ID NO: 2447871 - RNA, 23 nt, Human
cugaggccugggccgcugccacg

SEQ ID NO: 2447872 - RNA, 22 nt, Human
cugaggccugggccgcugccac

SEQ ID NO: 2447873 - RNA, 19 nt, Human
cugaggccugggccgcugc

SEQ ID NO: 2447874 - RNA, 15 nt, Human
cugaggccugggccg

SEQ ID NO: 2447875 - RNA, 14 nt, Human
cugaggccugggcc

SEQ ID NO: 2447876 - RNA, 22 nt, Human
cugaggccuggacuuuccugca

SEQ ID NO: 2447877 - RNA, 20 nt, Human
cugaggccuggacuuuccug

SEQ ID NO: 2447878 - RNA, 19 nt, Human
cugaggccuggacuuuccu

SEQ ID NO: 2447879 - RNA, 15 nt, Human
cugaggccuggacuu

SEQ ID NO: 2447880 - RNA, 12 nt, Human
cugaggccugga

SEQ ID NO: 2447881 - RNA, 22 nt, Human
cugaggccugagcgcuccugcc

SEQ ID NO: 2447882 - RNA, 18 nt, Human
cugaggccugagcgcucc

SEQ ID NO: 2447883 - RNA, 15 nt, Human
cugaggccuccagcu

SEQ ID NO: 2447884 - RNA, 23 nt, Human
cugaggccuaaaaguaaacauua

SEQ ID NO: 2447885 - RNA, 17 nt, Human
cugaggccugagcgcuc

SEQ ID NO: 2447886 - RNA, 21 nt, Human
cugaggcuccacuuggucugu

SEQ ID NO: 2447887 - RNA, 23 nt, Human
cugaggcucugacccagugagau

SEQ ID NO: 2447888 - RNA, 22 nt, Human
cugaggcucugacccagugaga

SEQ ID NO: 2447889 - RNA, 20 nt, Human
cugaggcuccugugcuacuu

SEQ ID NO: 2447890 - RNA, 17 nt, Human
cugaggcuccugugcua

SEQ ID NO: 2447891 - RNA, 15 nt, Human
cugaggcucuuucug

SEQ ID NO: 2447892 - RNA, 16 nt, Human
cugaggcucuuucugg

SEQ ID NO: 2447893 - RNA, 15 nt, Human
cugaggcuccacuug

SEQ ID NO: 2447894 - RNA, 17 nt, Human
cugaggcgggagaauca

SEQ ID NO: 2447895 - RNA, 18 nt, Human
cugaggccuuaucauuca

SEQ ID NO: 2447896 - RNA, 16 nt, Human
cugaggcucagggaaa

SEQ ID NO: 2447897 - RNA, 18 nt, Human
cugaggcggguggaucac

SEQ ID NO: 2447898 - RNA, 22 nt, Human
cugaggcugggcucccuuccca

SEQ ID NO: 2447899 - RNA, 17 nt, Human
cugaggcugggcucccu

SEQ ID NO: 2447900 - RNA, 16 nt, Human
cugaggcugggcuccc

SEQ ID NO: 2447901 - RNA, 15 nt, Human
cugaggcugggcucc

SEQ ID NO: 2447902 - RNA, 17 nt, Human
cugaggcuggcacagga

SEQ ID NO: 2447903 - RNA, 18 nt, Human
cugaggcuggcacaggac

SEQ ID NO: 2447904 - RNA, 19 nt, Human
cugaggcuggcacaggaca

SEQ ID NO: 2447905 - RNA, 20 nt, Human
cugaggcuggcacaggacau

SEQ ID NO: 2447906 - RNA, 13 nt, Human
cugaggcugggcu

SEQ ID NO: 2447907 - RNA, 11 nt, Human
cugaggcuggc

SEQ ID NO: 2447908 - RNA, 13 nt, Human
cugaggcuggcac

SEQ ID NO: 2447909 - RNA, 15 nt, Human
cugaggcuggauccu

SEQ ID NO: 2447910 - RNA, 15 nt, Human
cugaggcugagacug

SEQ ID NO: 2447911 - RNA, 18 nt, Human
cugaggcucuuucugggc

SEQ ID NO: 2447912 - RNA, 20 nt, Human
cugaggcucuuucugggcca

SEQ ID NO: 2447913 - RNA, 20 nt, Human
cugagggaggaggccaccuc

SEQ ID NO: 2447914 - RNA, 19 nt, Human
cugagggaggaggccaccu

SEQ ID NO: 2447915 - RNA, 18 nt, Human
cugagggaggaggccacc

SEQ ID NO: 2447916 - RNA, 17 nt, Human
cugagggaggaggccac

SEQ ID NO: 2447917 - RNA, 16 nt, Human
cugagggaggaggcca

SEQ ID NO: 2447918 - RNA, 15 nt, Human
cugagggaggaggcc

SEQ ID NO: 2447919 - RNA, 13 nt, Human
cugagggaggagg

SEQ ID NO: 2447920 - RNA, 23 nt, Human
cugagggacucugaagccucugg

SEQ ID NO: 2447921 - RNA, 22 nt, Human
cugagggaggaggccaccucuc

SEQ ID NO: 2447922 - RNA, 21 nt, Human
cugagggaggaggccaccucu

SEQ ID NO: 2447923 - RNA, 15 nt, Human
cugagggaucuuuac

SEQ ID NO: 2447924 - RNA, 16 nt, Human
cugagggauggacuga

SEQ ID NO: 2447925 - RNA, 23 nt, Human
cugagggaggaggccaccucucc

SEQ ID NO: 2447926 - RNA, 22 nt, Human
cugagucacccaugaagacagg

SEQ ID NO: 2447927 - RNA, 20 nt, Human
cugagucacccaugaagaca

SEQ ID NO: 2447928 - RNA, 22 nt, Human
cugagucacccuaccugugccu

SEQ ID NO: 2447929 - RNA, 23 nt, Human
cugagucacccuaccugugccug

SEQ ID NO: 2447930 - RNA, 18 nt, Human
cugagucaugaucucccu

SEQ ID NO: 2447931 - RNA, 19 nt, Human
cugagucaugaucucccug

SEQ ID NO: 2447932 - RNA, 14 nt, Human
cugaggcuuccaga

SEQ ID NO: 2447933 - RNA, 14 nt, Human
cugaggcuguagga

SEQ ID NO: 2447934 - RNA, 18 nt, Human
cugaggcuuccagagagu

SEQ ID NO: 2447935 - RNA, 15 nt, Human
cugagggaccagcca

SEQ ID NO: 2447936 - RNA, 20 nt, Human
cugaggcuguggucacagcg

SEQ ID NO: 2447937 - RNA, 19 nt, Human
cugaggcuguggucacagc

SEQ ID NO: 2447938 - RNA, 17 nt, Human
cugaggcuguggucaca

SEQ ID NO: 2447939 - RNA, 14 nt, Human
cugaggcugugguc

SEQ ID NO: 2447940 - RNA, 13 nt, Human
cugaggcuguggu

SEQ ID NO: 2447941 - RNA, 21 nt, Human
cugaggcuggauccuagccuu

SEQ ID NO: 2447942 - RNA, 11 nt, Human
cugaggcugua

SEQ ID NO: 2447943 - RNA, 22 nt, Human
cugagggacucugaagccucug

SEQ ID NO: 2447944 - RNA, 21 nt, Human
cugagggacucugaagccucu

SEQ ID NO: 2447945 - RNA, 12 nt, Human
cugagggagccu

SEQ ID NO: 2447946 - RNA, 20 nt, Human
cugagggacucugaagccuc

SEQ ID NO: 2447947 - RNA, 16 nt, Human
cugagggacucugaag

SEQ ID NO: 2447948 - RNA, 14 nt, Human
cugagggacucuga

SEQ ID NO: 2447949 - RNA, 18 nt, Human
cugagggaccagccaaga

SEQ ID NO: 2447950 - RNA, 13 nt, Human
cugagggagccug

SEQ ID NO: 2447951 - RNA, 17 nt, Human
cugagggagccuggccc

SEQ ID NO: 2447952 - RNA, 15 nt, Human
cuccucuccccagca

SEQ ID NO: 2447953 - RNA, 13 nt, Human
cuccucuccccag

SEQ ID NO: 2447954 - RNA, 17 nt, Human
cuccugccgcagagcug

SEQ ID NO: 2447955 - RNA, 16 nt, Human
cuccugccgcagagcu

SEQ ID NO: 2447956 - RNA, 14 nt, Human
cuccugccgcagag

SEQ ID NO: 2447957 - RNA, 14 nt, Human
cuccucuccccagc

SEQ ID NO: 2447958 - RNA, 23 nt, Human
cuccucucccauugucccucugc

SEQ ID NO: 2447959 - RNA, 14 nt, Human
cuccugccuacuca

SEQ ID NO: 2447960 - RNA, 16 nt, Human
cuccugccuacucacg

SEQ ID NO: 2447961 - RNA, 18 nt, Human
cuccugccgcagagcugg

SEQ ID NO: 2447962 - RNA, 13 nt, Human
cuccugccuacuc

SEQ ID NO: 2447963 - RNA, 11 nt, Human
cuccugccuca

SEQ ID NO: 2447964 - RNA, 12 nt, Human
cuccugccucag

SEQ ID NO: 2447965 - RNA, 16 nt, Human
cuccugccucagccuc

SEQ ID NO: 2447966 - RNA, 17 nt, Human
cuccugccucagccucc

SEQ ID NO: 2447967 - RNA, 12 nt, Human
cuccugcugcag

SEQ ID NO: 2447968 - RNA, 22 nt, Human
cuccugcugcaccaacccagcc

SEQ ID NO: 2447969 - RNA, 16 nt, Human
cuccugcugcagaggg

SEQ ID NO: 2447970 - RNA, 21 nt, Human
cuccugcugcaccaacccagc

SEQ ID NO: 2447971 - RNA, 19 nt, Human
cuccugcugcaccaaccca

SEQ ID NO: 2447972 - RNA, 18 nt, Human
cuccugcugcaccaaccc

SEQ ID NO: 2447973 - RNA, 14 nt, Human
cuccugcugcacca

SEQ ID NO: 2447974 - RNA, 18 nt, Human
cuccugcuacucuguucc

SEQ ID NO: 2447975 - RNA, 13 nt, Human
cuccugcugcacc

SEQ ID NO: 2447976 - RNA, 22 nt, Human
cuccugccucgaacuggcugca

SEQ ID NO: 2447977 - RNA, 21 nt, Human
cuccugccucgaacuggcugc

SEQ ID NO: 2447978 - RNA, 20 nt, Human
cuccugccucgaacuggcug

SEQ ID NO: 2447979 - RNA, 18 nt, Human
cuccugccucgaacuggc

SEQ ID NO: 2447980 - RNA, 19 nt, Human
cuccugccucagccucccg

SEQ ID NO: 2447981 - RNA, 21 nt, Human
cuccugccucagccuccugag

SEQ ID NO: 2447982 - RNA, 17 nt, Human
cuccuuaucaaaggaca

SEQ ID NO: 2447983 - RNA, 22 nt, Human
cuccuuaucaaaggacaccauu

SEQ ID NO: 2447984 - RNA, 16 nt, Human
cuccuuagucuucuca

SEQ ID NO: 2447985 - RNA, 20 nt, Human
cuccuuagagacaucaaaau

SEQ ID NO: 2447986 - RNA, 21 nt, Human
cuccuuagagacaucaaaauc

SEQ ID NO: 2447987 - RNA, 23 nt, Human
cuccuucccaaaggacuccaccc

SEQ ID NO: 2447988 - RNA, 22 nt, Human
cuccuucccaaaggacuccacc

SEQ ID NO: 2447989 - RNA, 13 nt, Human
cuccuucccaaag

SEQ ID NO: 2447990 - RNA, 14 nt, Human
cuccuuccaguguc

SEQ ID NO: 2447991 - RNA, 17 nt, Human
cuccuuagucuucucau

SEQ ID NO: 2447992 - RNA, 19 nt, Human
cuccuuagucuucucauag

SEQ ID NO: 2447993 - RNA, 17 nt, Human
cuccuucccaucgcugu

SEQ ID NO: 2447994 - RNA, 16 nt, Human
cuccuucccaucgcug

SEQ ID NO: 2447995 - RNA, 24 nt, Human
cuccugugugugcgccuacaggag

SEQ ID NO: 2447996 - RNA, 23 nt, Human
cuccugugugugcgccuacagga

SEQ ID NO: 2447997 - RNA, 11 nt, Human
cuccuggacuc

SEQ ID NO: 2447998 - RNA, 18 nt, Human
cuccuggacauuuuuuca

SEQ ID NO: 2447999 - RNA, 20 nt, Human
cuccuggaagcuguguccuu

SEQ ID NO: 2448000 - RNA, 23 nt, Human
cuccuggaagcuguguccuugca

SEQ ID NO: 2448001 - RNA, 21 nt, Human
cuccugugugugcgccuacag

SEQ ID NO: 2448002 - RNA, 20 nt, Human
cuccuggaaaggcucagucu

SEQ ID NO: 2448003 - RNA, 22 nt, Human
cuccuggaaaggcucagucuca

SEQ ID NO: 2448004 - RNA, 23 nt, Human
cuccuggaaaggcucagucucag

SEQ ID NO: 2448005 - RNA, 24 nt, Human
cuccuggaaaggcucagucucagg

SEQ ID NO: 2448006 - RNA, 18 nt, Human
cuccuggaaaggcucagu

SEQ ID NO: 2448007 - RNA, 19 nt, Human
cuccuggaaaggcucaguc

SEQ ID NO: 2448008 - RNA, 17 nt, Human
cuccuggaaaggcucag

SEQ ID NO: 2448009 - RNA, 14 nt, Human
cuccuggaaauauu

SEQ ID NO: 2448010 - RNA, 15 nt, Human
cuccuggaagcugug

SEQ ID NO: 2448011 - RNA, 17 nt, Human
cuccuggaagcuguguc

SEQ ID NO: 2448012 - RNA, 11 nt, Human
cuccuggaaau

SEQ ID NO: 2448013 - RNA, 19 nt, Human
cucgagcaugccuggaugg

SEQ ID NO: 2448014 - RNA, 16 nt, Human
cucgagcaugccugga

SEQ ID NO: 2448015 - RNA, 15 nt, Human
cucgagcaugccugg

SEQ ID NO: 2448016 - RNA, 13 nt, Human
cucgagcaugccu

SEQ ID NO: 2448017 - RNA, 19 nt, Human
cuccuucgcaggcaugucc

SEQ ID NO: 2448018 - RNA, 21 nt, Human
cuccuugggcacuuuuuaauu

SEQ ID NO: 2448019 - RNA, 22 nt, Human
cuccuuggugccuggccuggca

SEQ ID NO: 2448020 - RNA, 19 nt, Human
cuccuuggugccuggccug

SEQ ID NO: 2448021 - RNA, 15 nt, Human
cuccuuggugccugg

SEQ ID NO: 2448022 - RNA, 19 nt, Human
cucgagaacuuucauuuuu

SEQ ID NO: 2448023 - RNA, 15 nt, Human
cucgagcaacugcug

SEQ ID NO: 2448024 - RNA, 21 nt, Human
cucgagacacagugaagcaaa

SEQ ID NO: 2448025 - RNA, 17 nt, Human
cucgagcaguccugccu

SEQ ID NO: 2448026 - RNA, 17 nt, Human
cuccuugggcccuuuga

SEQ ID NO: 2448027 - RNA, 18 nt, Human
cuccuugggcccuuugag

SEQ ID NO: 2448028 - RNA, 19 nt, Human
cuccuugggcccuuugagu

SEQ ID NO: 2448029 - RNA, 14 nt, Human
cuccuuggugccug

SEQ ID NO: 2448030 - RNA, 23 nt, Human
cuccuuggugucgggcaugacac

SEQ ID NO: 2448031 - RNA, 15 nt, Human
cuccuuccugugugu

SEQ ID NO: 2448032 - RNA, 18 nt, Human
cuccuuccuucaccucug

SEQ ID NO: 2448033 - RNA, 14 nt, Human
cuccuuccuugacc

SEQ ID NO: 2448034 - RNA, 17 nt, Human
cuccuuccuugaccagc

SEQ ID NO: 2448035 - RNA, 18 nt, Human
cuccuuccuugaccagca

SEQ ID NO: 2448036 - RNA, 13 nt, Human
cuccuugggcccu

SEQ ID NO: 2448037 - RNA, 16 nt, Human
cuccuugggcccuuug

SEQ ID NO: 2448038 - RNA, 12 nt, Human
cuccuugggccc

SEQ ID NO: 2448039 - RNA, 22 nt, Human
cuccuuccuugcuguccuaggc

SEQ ID NO: 2448040 - RNA, 13 nt, Human
cuccuuccuggag

SEQ ID NO: 2448041 - RNA, 14 nt, Human
cuccuuccuggaga

SEQ ID NO: 2448042 - RNA, 20 nt, Human
cuccuuccuggagcccagag

SEQ ID NO: 2448043 - RNA, 21 nt, Human
cuccuuccugccaccugcugc

SEQ ID NO: 2448044 - RNA, 16 nt, Human
cuccuuccugccaccu

SEQ ID NO: 2448045 - RNA, 13 nt, Human
cuccuuccugugu

SEQ ID NO: 2448046 - RNA, 14 nt, Human
cuccuuccugucuu

SEQ ID NO: 2448047 - RNA, 15 nt, Human
cuccuuccugucuuc

SEQ ID NO: 2448048 - RNA, 16 nt, Human
cuccuuccugucuucc

SEQ ID NO: 2448049 - RNA, 17 nt, Human
cuccuuccugucuuccu

SEQ ID NO: 2448050 - RNA, 23 nt, Human
cuccuuccuggagcccagaggag

SEQ ID NO: 2448051 - RNA, 13 nt, Human
cuccuuccugucu

SEQ ID NO: 2448052 - RNA, 12 nt, Human
cuccuuccuguc

SEQ ID NO: 2448053 - RNA, 13 nt, Human
cucgagggcaggg

SEQ ID NO: 2448054 - RNA, 23 nt, Human
cucgagggcagggaccacacccu

SEQ ID NO: 2448055 - RNA, 18 nt, Human
cucgagggcagggaccac

SEQ ID NO: 2448056 - RNA, 23 nt, Human
cucgaggacuguauuugugacua

SEQ ID NO: 2448057 - RNA, 22 nt, Human
cucgaggacuguauuugugacu

SEQ ID NO: 2448058 - RNA, 20 nt, Human
cucgaggacuguauuuguga

SEQ ID NO: 2448059 - RNA, 17 nt, Human
cucgaggacuguauuug

SEQ ID NO: 2448060 - RNA, 16 nt, Human
cucgaggacuguauuu

SEQ ID NO: 2448061 - RNA, 22 nt, Human
cucgagcaugccuggauggggc

SEQ ID NO: 2448062 - RNA, 23 nt, Human
cucgagcaguccugccucagccu

SEQ ID NO: 2448063 - RNA, 13 nt, Human
cucgcaagcuggg

SEQ ID NO: 2448064 - RNA, 14 nt, Human
cucgcaagcugggu

SEQ ID NO: 2448065 - RNA, 15 nt, Human
cucgcaccuuuccaa

SEQ ID NO: 2448066 - RNA, 14 nt, Human
cucgcaccuuucca

SEQ ID NO: 2448067 - RNA, 20 nt, Human
cucgcagagaggccaggugc

SEQ ID NO: 2448068 - RNA, 14 nt, Human
cucgcagagaggcc

SEQ ID NO: 2448069 - RNA, 16 nt, Human
cucgauuuuguaucug

SEQ ID NO: 2448070 - RNA, 15 nt, Human
cucgauuuuguaucu

SEQ ID NO: 2448071 - RNA, 14 nt, Human
cucgauuuuguauc

SEQ ID NO: 2448072 - RNA, 13 nt, Human
cucgauuuuguau

SEQ ID NO: 2448073 - RNA, 19 nt, Human
cucgauuuuguaucugcag

SEQ ID NO: 2448074 - RNA, 18 nt, Human
cucgauuuuguaucugca

SEQ ID NO: 2448075 - RNA, 20 nt, Human
cucgauuuuguaucugcagg

SEQ ID NO: 2448076 - RNA, 22 nt, Human
cucgauuuuaucuuucgcacag

SEQ ID NO: 2448077 - RNA, 14 nt, Human
cucgauuucuccag

SEQ ID NO: 2448078 - RNA, 23 nt, Human
cucgaggguuggguucaucugag

SEQ ID NO: 2448079 - RNA, 17 nt, Human
cucgauucauauugaau

SEQ ID NO: 2448080 - RNA, 22 nt, Human
cucgcuauugucaccagggcug

SEQ ID NO: 2448081 - RNA, 20 nt, Human
cucgccuggccugaggucuc

SEQ ID NO: 2448082 - RNA, 15 nt, Human
cucgcucugucaccc

SEQ ID NO: 2448083 - RNA, 13 nt, Human
cucgcucugucac

SEQ ID NO: 2448084 - RNA, 12 nt, Human
cucgcucuguca

SEQ ID NO: 2448085 - RNA, 23 nt, Human
cucgcucugucgcccaggcugga

SEQ ID NO: 2448086 - RNA, 19 nt, Human
cucgcugaugcugggcugg

SEQ ID NO: 2448087 - RNA, 18 nt, Human
cucgcugaugcugggcug

SEQ ID NO: 2448088 - RNA, 17 nt, Human
cucgcugaugcugggcu

SEQ ID NO: 2448089 - RNA, 16 nt, Human
cucgcugaugcugggc

SEQ ID NO: 2448090 - RNA, 17 nt, Human
cucgccuggccugaggu

SEQ ID NO: 2448091 - RNA, 16 nt, Human
cucgccuggccugagg

SEQ ID NO: 2448092 - RNA, 23 nt, Human
cucgccugacaaccacuggucug

SEQ ID NO: 2448093 - RNA, 15 nt, Human
cucgccuucaucucc

SEQ ID NO: 2448094 - RNA, 16 nt, Human
cucgccgucugugaau

SEQ ID NO: 2448095 - RNA, 15 nt, Human
cucgccgucugugaa

SEQ ID NO: 2448096 - RNA, 20 nt, Human
cucgcccugcgguagauggg

SEQ ID NO: 2448097 - RNA, 12 nt, Human
cucgcccugggu

SEQ ID NO: 2448098 - RNA, 13 nt, Human
cucgcccuggguc

SEQ ID NO: 2448099 - RNA, 15 nt, Human
cucgcccugggucua

SEQ ID NO: 2448100 - RNA, 23 nt, Human
cucgcccgcccacuguccugggc

SEQ ID NO: 2448101 - RNA, 22 nt, Human
cucgcccgcccacuguccuggg

SEQ ID NO: 2448102 - RNA, 18 nt, Human
cucgcauaggaccuuucc

SEQ ID NO: 2448103 - RNA, 16 nt, Human
cuccgacugcuaggga

SEQ ID NO: 2448104 - RNA, 17 nt, Human
cucccuuguucucuaag

SEQ ID NO: 2448105 - RNA, 14 nt, Human
cucccuuguucucu

SEQ ID NO: 2448106 - RNA, 21 nt, Human
cucccuugguggcaagagccc

SEQ ID NO: 2448107 - RNA, 20 nt, Human
cucccuugguggcaagagcc

SEQ ID NO: 2448108 - RNA, 18 nt, Human
cucccuuggguucugaua

SEQ ID NO: 2448109 - RNA, 17 nt, Human
cucccuuggguucugau

SEQ ID NO: 2448110 - RNA, 13 nt, Human
cucccuugggcuc

SEQ ID NO: 2448111 - RNA, 14 nt, Human
cucccuugggcucc

SEQ ID NO: 2448112 - RNA, 18 nt, Human
cucccuugggcucccugu

SEQ ID NO: 2448113 - RNA, 19 nt, Human
cucccuuggggccuaugca

SEQ ID NO: 2448114 - RNA, 17 nt, Human
cucccuguuccccagag

SEQ ID NO: 2448115 - RNA, 18 nt, Human
cucccuguuccccagaga

SEQ ID NO: 2448116 - RNA, 20 nt, Human
cucccuuggauuguccccga

SEQ ID NO: 2448117 - RNA, 16 nt, Human
cucccuguuccccaga

SEQ ID NO: 2448118 - RNA, 17 nt, Human
cucccugucggccuggu

SEQ ID NO: 2448119 - RNA, 18 nt, Human
cucccuguccuccucgga

SEQ ID NO: 2448120 - RNA, 18 nt, Human
cucccugguucugaugau

SEQ ID NO: 2448121 - RNA, 19 nt, Human
cucccuguaaccucuucag

SEQ ID NO: 2448122 - RNA, 21 nt, Human
cucccuguaggaagucauccu

SEQ ID NO: 2448123 - RNA, 11 nt, Human
cucccuguccu

SEQ ID NO: 2448124 - RNA, 13 nt, Human
cucccuguccucc

SEQ ID NO: 2448125 - RNA, 14 nt, Human
cucccuguccuccu

SEQ ID NO: 2448126 - RNA, 15 nt, Human
cucccuguccuccuc

SEQ ID NO: 2448127 - RNA, 16 nt, Human
cucccuguccuccucg

SEQ ID NO: 2448128 - RNA, 16 nt, Human
cuccgagagggagaga

SEQ ID NO: 2448129 - RNA, 22 nt, Human
cuccgagaggugggccagucug

SEQ ID NO: 2448130 - RNA, 18 nt, Human
cuccgagaggugggccag

SEQ ID NO: 2448131 - RNA, 17 nt, Human
cuccgagaggugggcca

SEQ ID NO: 2448132 - RNA, 15 nt, Human
cuccgagaggugggc

SEQ ID NO: 2448133 - RNA, 14 nt, Human
cuccgagagguggg

SEQ ID NO: 2448134 - RNA, 13 nt, Human
cuccgagaggugg

SEQ ID NO: 2448135 - RNA, 14 nt, Human
cuccgagagggaga

SEQ ID NO: 2448136 - RNA, 13 nt, Human
cuccgaggccagu

SEQ ID NO: 2448137 - RNA, 15 nt, Human
cuccgauccuuccuc

SEQ ID NO: 2448138 - RNA, 16 nt, Human
cuccgauccuuccucc

SEQ ID NO: 2448139 - RNA, 14 nt, Human
cuccuauccugguu

SEQ ID NO: 2448140 - RNA, 14 nt, Human
cuccgccagccucc

SEQ ID NO: 2448141 - RNA, 22 nt, Human
cuccuaucagaaguuucucagc

SEQ ID NO: 2448142 - RNA, 13 nt, Human
cuccgccagccuc

SEQ ID NO: 2448143 - RNA, 12 nt, Human
cuccgccagccu

SEQ ID NO: 2448144 - RNA, 15 nt, Human
cuccgcaguuccugu

SEQ ID NO: 2448145 - RNA, 12 nt, Human
cuccuaugugua

SEQ ID NO: 2448146 - RNA, 22 nt, Human
cuccuauucaguucccagaauc

SEQ ID NO: 2448147 - RNA, 13 nt, Human
cuccuauguguaa

SEQ ID NO: 2448148 - RNA, 18 nt, Human
cuccuaucuguguuuuga

SEQ ID NO: 2448149 - RNA, 15 nt, Human
cuccuaucuguguuu

SEQ ID NO: 2448150 - RNA, 14 nt, Human
cuccuaucuguguu

SEQ ID NO: 2448151 - RNA, 13 nt, Human
cuccuaucugugu

SEQ ID NO: 2448152 - RNA, 17 nt, Human
cuccuaugaucucaggu

SEQ ID NO: 2448153 - RNA, 18 nt, Human
cuccucagaucuucugug

SEQ ID NO: 2448154 - RNA, 14 nt, Human
cuccucaacucacc

SEQ ID NO: 2448155 - RNA, 22 nt, Human
cuccuauucucuuaauuuuucu

SEQ ID NO: 2448156 - RNA, 22 nt, Human
cuccucccacccggcugcagag

SEQ ID NO: 2448157 - RNA, 20 nt, Human
cuccucccacccggcugcag

SEQ ID NO: 2448158 - RNA, 17 nt, Human
cuccucccaggcgcccc

SEQ ID NO: 2448159 - RNA, 19 nt, Human
cuccucccuuuuuccuugu

SEQ ID NO: 2448160 - RNA, 12 nt, Human
cuccucccagga

SEQ ID NO: 2448161 - RNA, 12 nt, Human
cuccuccuagcc

SEQ ID NO: 2448162 - RNA, 23 nt, Human
cuccucccaggcgccccuucccc

SEQ ID NO: 2448163 - RNA, 22 nt, Human
cuccucccaggcgccccuuccc

SEQ ID NO: 2448164 - RNA, 13 nt, Human
cuccucucccauc

SEQ ID NO: 2448165 - RNA, 12 nt, Human
cuccucucccau

SEQ ID NO: 2448166 - RNA, 15 nt, Human
cuccucuccaggcac

SEQ ID NO: 2448167 - RNA, 13 nt, Human
cuccucuccaggc

SEQ ID NO: 2448168 - RNA, 21 nt, Human
cuccucucccaucccccugcc

SEQ ID NO: 2448169 - RNA, 15 nt, Human
cuccucucccauccc

SEQ ID NO: 2448170 - RNA, 23 nt, Human
cuccucucccaucccccugcccu

SEQ ID NO: 2448171 - RNA, 21 nt, Human
cuccucucccauugucccucu

SEQ ID NO: 2448172 - RNA, 20 nt, Human
cuccuccgugcuuccucagu

SEQ ID NO: 2448173 - RNA, 13 nt, Human
cuccuccucccug

SEQ ID NO: 2448174 - RNA, 12 nt, Human
cuccucuccagg

SEQ ID NO: 2448175 - RNA, 14 nt, Human
cuccuccucccugc

SEQ ID NO: 2448176 - RNA, 19 nt, Human
cuccuccuggacuccugca

SEQ ID NO: 2448177 - RNA, 14 nt, Human
cuccuccuggacuc

SEQ ID NO: 2448178 - RNA, 15 nt, Human
cuccuccuggacucc

SEQ ID NO: 2448179 - RNA, 15 nt, Human
cuccuccucccugca

SEQ ID NO: 2448180 - RNA, 14 nt, Human
cuccuccuccccca

SEQ ID NO: 2448181 - RNA, 15 nt, Human
cuccuccucccccag

SEQ ID NO: 2448182 - RNA, 15 nt, Human
cuccuccagagucag

SEQ ID NO: 2448183 - RNA, 13 nt, Human
cuccuccagaguc

SEQ ID NO: 2448184 - RNA, 15 nt, Human
cuccucccacccggc

SEQ ID NO: 2448185 - RNA, 17 nt, Human
cuccuccacucuccccc

SEQ ID NO: 2448186 - RNA, 15 nt, Human
cuccuccagccgcca

SEQ ID NO: 2448187 - RNA, 21 nt, Human
cuccucacaacauggugucug

SEQ ID NO: 2448188 - RNA, 14 nt, Human
cuccucacccccag

SEQ ID NO: 2448189 - RNA, 14 nt, Human
cuccucagggaugg

SEQ ID NO: 2448190 - RNA, 22 nt, Human
cuccucagggauggccguuggc

SEQ ID NO: 2448191 - RNA, 18 nt, Human
cuccucaggguugagguc

SEQ ID NO: 2448192 - RNA, 20 nt, Human
cuccucauccagggcucuga

SEQ ID NO: 2448193 - RNA, 23 nt, Human
cuccucaggguugagguccagcc

SEQ ID NO: 2448194 - RNA, 16 nt, Human
cuccucauccagggcu

SEQ ID NO: 2448195 - RNA, 21 nt, Human
cuccccagcaagugagagcug

SEQ ID NO: 2448196 - RNA, 15 nt, Human
cuccccagcaggugg

SEQ ID NO: 2448197 - RNA, 16 nt, Human
cuccccagcagguggg

SEQ ID NO: 2448198 - RNA, 12 nt, Human
cuccccuccucc

SEQ ID NO: 2448199 - RNA, 20 nt, Human
cuccccuccuccuggacucc

SEQ ID NO: 2448200 - RNA, 19 nt, Human
cuccccagcauuccagccc

SEQ ID NO: 2448201 - RNA, 12 nt, Human
cuccccuccucu

SEQ ID NO: 2448202 - RNA, 19 nt, Human
cuccccagcagguggggag

SEQ ID NO: 2448203 - RNA, 14 nt, Human
cuccauccugaggc

SEQ ID NO: 2448204 - RNA, 13 nt, Human
cuccauccugagg

SEQ ID NO: 2448205 - RNA, 23 nt, Human
cuccccagcaagugagagcuggg

SEQ ID NO: 2448206 - RNA, 22 nt, Human
cuccccagcaagugagagcugg

SEQ ID NO: 2448207 - RNA, 11 nt, Human
cuccccuuccc

SEQ ID NO: 2448208 - RNA, 14 nt, Human
cuccccuugagcug

SEQ ID NO: 2448209 - RNA, 16 nt, Human
cuccccuugagcugag

SEQ ID NO: 2448210 - RNA, 15 nt, Human
cuccccuucccugca

SEQ ID NO: 2448211 - RNA, 16 nt, Human
cuccccuucccugcaa

SEQ ID NO: 2448212 - RNA, 19 nt, Human
cuccccuuccucacugccc

SEQ ID NO: 2448213 - RNA, 14 nt, Human
cuccccugcccugc

SEQ ID NO: 2448214 - RNA, 12 nt, Human
cuccccugcccu

SEQ ID NO: 2448215 - RNA, 13 nt, Human
cuccccugcccug

SEQ ID NO: 2448216 - RNA, 23 nt, Human
cuccccugcccccaggacugggc

SEQ ID NO: 2448217 - RNA, 22 nt, Human
cuccccugcccccaggacuggg

SEQ ID NO: 2448218 - RNA, 21 nt, Human
cuccccugcccccaggacugg

SEQ ID NO: 2448219 - RNA, 20 nt, Human
cuccccugcccccaggacug

SEQ ID NO: 2448220 - RNA, 19 nt, Human
cuccccugcccccaggacu

SEQ ID NO: 2448221 - RNA, 18 nt, Human
cuccccugcccccaggac

SEQ ID NO: 2448222 - RNA, 17 nt, Human
cuccccugcccccagga

SEQ ID NO: 2448223 - RNA, 16 nt, Human
cuccccugcccccagg

SEQ ID NO: 2448224 - RNA, 15 nt, Human
cuccccugcccccag

SEQ ID NO: 2448225 - RNA, 14 nt, Human
cuccccugccccca

SEQ ID NO: 2448226 - RNA, 13 nt, Human
cuccccugccccc

SEQ ID NO: 2448227 - RNA, 14 nt, Human
cuccccugccauuu

SEQ ID NO: 2448228 - RNA, 17 nt, Human
cuccccuccucuccccu

SEQ ID NO: 2448229 - RNA, 16 nt, Human
cuccccuccucucccc

SEQ ID NO: 2448230 - RNA, 15 nt, Human
cuccccuccuugccu

SEQ ID NO: 2448231 - RNA, 21 nt, Human
cuccccugccagggcagggcc

SEQ ID NO: 2448232 - RNA, 20 nt, Human
cucccgggcccucccuugga

SEQ ID NO: 2448233 - RNA, 19 nt, Human
cucccgggcccucccuugg

SEQ ID NO: 2448234 - RNA, 22 nt, Human
cucccgggcccucccuuggaaa

SEQ ID NO: 2448235 - RNA, 16 nt, Human
cucccgggcccucccu

SEQ ID NO: 2448236 - RNA, 15 nt, Human
cucccgggcccuccc

SEQ ID NO: 2448237 - RNA, 21 nt, Human
cucccgccccuuccccgaggg

SEQ ID NO: 2448238 - RNA, 18 nt, Human
cuccccuugggcggcuga

SEQ ID NO: 2448239 - RNA, 21 nt, Human
cucccgccagacuguuagaaa

SEQ ID NO: 2448240 - RNA, 16 nt, Human
cucccgccccuuccca

SEQ ID NO: 2448241 - RNA, 14 nt, Human
cucccgucagggcc

SEQ ID NO: 2448242 - RNA, 21 nt, Human
cucccgguucuuccagugguu

SEQ ID NO: 2448243 - RNA, 16 nt, Human
cucccgguucuuccag

SEQ ID NO: 2448244 - RNA, 15 nt, Human
cucccgguucuucca

SEQ ID NO: 2448245 - RNA, 21 nt, Human
cucccggugcccaagaauaga

SEQ ID NO: 2448246 - RNA, 15 nt, Human
cucccggugcccaag

SEQ ID NO: 2448247 - RNA, 15 nt, Human
cuccccuugggcggc

SEQ ID NO: 2448248 - RNA, 13 nt, Human
cuccccuugggcg

SEQ ID NO: 2448249 - RNA, 12 nt, Human
cuccccuugggc

SEQ ID NO: 2448250 - RNA, 20 nt, Human
cucccgaguagcugggacua

SEQ ID NO: 2448251 - RNA, 19 nt, Human
cucccgaguagcugggacu

SEQ ID NO: 2448252 - RNA, 17 nt, Human
cucccugccccccagcc

SEQ ID NO: 2448253 - RNA, 23 nt, Human
cucccugccccccagcccuccuu

SEQ ID NO: 2448254 - RNA, 14 nt, Human
cucccugccccucc

SEQ ID NO: 2448255 - RNA, 13 nt, Human
cucccugccccuc

SEQ ID NO: 2448256 - RNA, 21 nt, Human
cucccgucagggcccaagucc

SEQ ID NO: 2448257 - RNA, 19 nt, Human
cucccgucagggcccaagu

SEQ ID NO: 2448258 - RNA, 16 nt, Human
cucccgucagggccca

SEQ ID NO: 2448259 - RNA, 15 nt, Human
cucccgucagggccc

SEQ ID NO: 2448260 - RNA, 14 nt, Human
cucccuaaacugua

SEQ ID NO: 2448261 - RNA, 22 nt, Human
cucccugcaucugaccagcagc

SEQ ID NO: 2448262 - RNA, 23 nt, Human
cucccugcaucugaccagcagcg

SEQ ID NO: 2448263 - RNA, 21 nt, Human
cucccugccccucccuucaac

SEQ ID NO: 2448264 - RNA, 20 nt, Human
cucccugccccucccuucaa

SEQ ID NO: 2448265 - RNA, 18 nt, Human
cucccugccccucccuuc

SEQ ID NO: 2448266 - RNA, 17 nt, Human
cucccugccccucccuu

SEQ ID NO: 2448267 - RNA, 15 nt, Human
cucccugccuccagg

SEQ ID NO: 2448268 - RNA, 16 nt, Human
cucccugccuccagga

SEQ ID NO: 2448269 - RNA, 10 nt, Human
cucccugccg

SEQ ID NO: 2448270 - RNA, 15 nt, Human
cucccugccgccuca

SEQ ID NO: 2448271 - RNA, 16 nt, Human
cucccugccgccucaa

SEQ ID NO: 2448272 - RNA, 18 nt, Human
cucccugccgccucaaug

SEQ ID NO: 2448273 - RNA, 19 nt, Human
cucccugccgccucaaugu

SEQ ID NO: 2448274 - RNA, 14 nt, Human
cucccugccuccag

SEQ ID NO: 2448275 - RNA, 17 nt, Human
cucagggucccuggugg

SEQ ID NO: 2448276 - RNA, 16 nt, Human
cucagggucccuggug

SEQ ID NO: 2448277 - RNA, 15 nt, Human
cucagggucccuggu

SEQ ID NO: 2448278 - RNA, 15 nt, Human
cucagggcuccuggg

SEQ ID NO: 2448279 - RNA, 17 nt, Human
cucagggcuccuggguu

SEQ ID NO: 2448280 - RNA, 16 nt, Human
cucagggcugacacgu

SEQ ID NO: 2448281 - RNA, 18 nt, Human
cucagggucccugguggc

SEQ ID NO: 2448282 - RNA, 16 nt, Human
cucaggugagaagcag

SEQ ID NO: 2448283 - RNA, 19 nt, Human
cucaggugagaagcagagg

SEQ ID NO: 2448284 - RNA, 20 nt, Human
cucaggugagaagcagagga

SEQ ID NO: 2448285 - RNA, 10 nt, Human
cucagggcag

SEQ ID NO: 2448286 - RNA, 13 nt, Human
cucagggccuggc

SEQ ID NO: 2448287 - RNA, 15 nt, Human
cucagggccuggcuc

SEQ ID NO: 2448288 - RNA, 14 nt, Human
cucagggccuggcu

SEQ ID NO: 2448289 - RNA, 13 nt, Human
cucagggcuccug

SEQ ID NO: 2448290 - RNA, 16 nt, Human
cucagggcuccugccu

SEQ ID NO: 2448291 - RNA, 15 nt, Human
cucagggcuccugcc

SEQ ID NO: 2448292 - RNA, 14 nt, Human
cucagggcuccugc

SEQ ID NO: 2448293 - RNA, 22 nt, Human
cucagggcuaaacgggcauugc

SEQ ID NO: 2448294 - RNA, 23 nt, Human
cucagggcuccugccuucugucc

SEQ ID NO: 2448295 - RNA, 22 nt, Human
cucagggcuccugccuucuguc

SEQ ID NO: 2448296 - RNA, 14 nt, Human
cucagggcuccugg

SEQ ID NO: 2448297 - RNA, 16 nt, Human
cucagggccuggcuca

SEQ ID NO: 2448298 - RNA, 15 nt, Human
cucagggccuggucg

SEQ ID NO: 2448299 - RNA, 12 nt, Human
cucagccagaga

SEQ ID NO: 2448300 - RNA, 11 nt, Human
cucagccagca

SEQ ID NO: 2448301 - RNA, 13 nt, Human
cucagccagcacu

SEQ ID NO: 2448302 - RNA, 16 nt, Human
cucagccagccccauc

SEQ ID NO: 2448303 - RNA, 14 nt, Human
cucagccagagaag

SEQ ID NO: 2448304 - RNA, 23 nt, Human
cucagccaagcacagugguggca

SEQ ID NO: 2448305 - RNA, 20 nt, Human
cucagccaagcacaguggug

SEQ ID NO: 2448306 - RNA, 18 nt, Human
cucagccaagcacagugg

SEQ ID NO: 2448307 - RNA, 21 nt, Human
cucagcagcgaccaccccugc

SEQ ID NO: 2448308 - RNA, 23 nt, Human
cucagcagcgaccaccccugccu

SEQ ID NO: 2448309 - RNA, 18 nt, Human
cucagcauccuggcaccc

SEQ ID NO: 2448310 - RNA, 19 nt, Human
cucaggaggcugaggcaga

SEQ ID NO: 2448311 - RNA, 19 nt, Human
cucagcccacauagugaug

SEQ ID NO: 2448312 - RNA, 15 nt, Human
cucagccaugaggag

SEQ ID NO: 2448313 - RNA, 21 nt, Human
cucagccaugaggaguugcug

SEQ ID NO: 2448314 - RNA, 20 nt, Human
cucaggaggcugaggcagaa

SEQ ID NO: 2448315 - RNA, 20 nt, Human
cucaggaggcugaggcagga

SEQ ID NO: 2448316 - RNA, 22 nt, Human
cucaggaggcugaggcaggagg

SEQ ID NO: 2448317 - RNA, 18 nt, Human
cucaggaguuugagacca

SEQ ID NO: 2448318 - RNA, 23 nt, Human
cucaggaguuugagaccaaccug

SEQ ID NO: 2448319 - RNA, 18 nt, Human
cucagggaccacagcaag

SEQ ID NO: 2448320 - RNA, 17 nt, Human
cucagggaccacagcaa

SEQ ID NO: 2448321 - RNA, 16 nt, Human
cucagggaccacagca

SEQ ID NO: 2448322 - RNA, 15 nt, Human
cucagggaccacagc

SEQ ID NO: 2448323 - RNA, 19 nt, Human
cucagggaccacagcaagg

SEQ ID NO: 2448324 - RNA, 22 nt, Human
cucagggauggccguuggccac

SEQ ID NO: 2448325 - RNA, 15 nt, Human
cucaggcagcucaag

SEQ ID NO: 2448326 - RNA, 14 nt, Human
cucaggcagcucaa

SEQ ID NO: 2448327 - RNA, 23 nt, Human
cucaggcacuagccuuuggcucu

SEQ ID NO: 2448328 - RNA, 21 nt, Human
cucagggacagagacaccugc

SEQ ID NO: 2448329 - RNA, 12 nt, Human
cucagggaccac

SEQ ID NO: 2448330 - RNA, 19 nt, Human
cucagggacagagccaugc

SEQ ID NO: 2448331 - RNA, 18 nt, Human
cucagggacagagccaug

SEQ ID NO: 2448332 - RNA, 16 nt, Human
cucagggacagagcca

SEQ ID NO: 2448333 - RNA, 15 nt, Human
cucagggacagagcc

SEQ ID NO: 2448334 - RNA, 14 nt, Human
cucagggacagagc

SEQ ID NO: 2448335 - RNA, 22 nt, Human
cucagggacagagacaccugca

SEQ ID NO: 2448336 - RNA, 23 nt, Human
cucagggacagagacaccugcac

SEQ ID NO: 2448337 - RNA, 13 nt, Human
cucaggaucucuu

SEQ ID NO: 2448338 - RNA, 15 nt, Human
cucaggaugcccagg

SEQ ID NO: 2448339 - RNA, 14 nt, Human
cucaggaugcccag

SEQ ID NO: 2448340 - RNA, 23 nt, Human
cucaggaggcugaggcagaagaa

SEQ ID NO: 2448341 - RNA, 23 nt, Human
cucaggaggcugaggcaggagga

SEQ ID NO: 2448342 - RNA, 16 nt, Human
cucaggaggcugaggg

SEQ ID NO: 2448343 - RNA, 19 nt, Human
cucaggcacuagccuuugg

SEQ ID NO: 2448344 - RNA, 18 nt, Human
cucaggcacuagccuuug

SEQ ID NO: 2448345 - RNA, 15 nt, Human
cucaggcacuagccu

SEQ ID NO: 2448346 - RNA, 14 nt, Human
cucaggcacuagcc

SEQ ID NO: 2448347 - RNA, 21 nt, Human
cucaggcaaggucuggccuca

SEQ ID NO: 2448348 - RNA, 19 nt, Human
cucaggauuucgugggucu

SEQ ID NO: 2448349 - RNA, 16 nt, Human
cucaggaugcccaggg

SEQ ID NO: 2448350 - RNA, 19 nt, Human
cucaggaugcccagggcca

SEQ ID NO: 2448351 - RNA, 22 nt, Human
cucaggaugcccagggccacuc

SEQ ID NO: 2448352 - RNA, 19 nt, Human
cucaucucuuagcuccccu

SEQ ID NO: 2448353 - RNA, 17 nt, Human
cucaucucuuagcuccc

SEQ ID NO: 2448354 - RNA, 16 nt, Human
cucaucucucugccca

SEQ ID NO: 2448355 - RNA, 17 nt, Human
cucaucucucugcccaa

SEQ ID NO: 2448356 - RNA, 18 nt, Human
cucaucucuaacagcuca

SEQ ID NO: 2448357 - RNA, 20 nt, Human
cucaucucuaacagcucagg

SEQ ID NO: 2448358 - RNA, 22 nt, Human
cucaucucuaacagcucaggau

SEQ ID NO: 2448359 - RNA, 23 nt, Human
cucaucucuaacagcucaggauc

SEQ ID NO: 2448360 - RNA, 24 nt, Human
cucaucucuaacagcucaggaucu

SEQ ID NO: 2448361 - RNA, 15 nt, Human
cucauccucauaccc

SEQ ID NO: 2448362 - RNA, 21 nt, Human
cucaucccuaaugcugcagau

SEQ ID NO: 2448363 - RNA, 17 nt, Human
cucauccgaggcagggu

SEQ ID NO: 2448364 - RNA, 22 nt, Human
cucaucauucucugucucaucc

SEQ ID NO: 2448365 - RNA, 23 nt, Human
cucauccccaggggucccagcca

SEQ ID NO: 2448366 - RNA, 16 nt, Human
cucaucccguguucuc

SEQ ID NO: 2448367 - RNA, 22 nt, Human
cucaucccgagcaccuccacau

SEQ ID NO: 2448368 - RNA, 18 nt, Human
cucaucccuaaugcugca

SEQ ID NO: 2448369 - RNA, 22 nt, Human
cucaucaggaugaacccaggac

SEQ ID NO: 2448370 - RNA, 19 nt, Human
cucaucccguguucuccuu

SEQ ID NO: 2448371 - RNA, 14 nt, Human
cucauccgaggcag

SEQ ID NO: 2448372 - RNA, 15 nt, Human
cucauccgaggcagg

SEQ ID NO: 2448373 - RNA, 17 nt, Human
cucaucauucucugucu

SEQ ID NO: 2448374 - RNA, 18 nt, Human
cucaucauucucugucuc

SEQ ID NO: 2448375 - RNA, 19 nt, Human
cucaucauucucugucuca

SEQ ID NO: 2448376 - RNA, 20 nt, Human
cucaucauucucugucucau

SEQ ID NO: 2448377 - RNA, 14 nt, Human
cucaucauucucug

SEQ ID NO: 2448378 - RNA, 15 nt, Human
cucaucauucucugu

SEQ ID NO: 2448379 - RNA, 13 nt, Human
cucaucauucucu

SEQ ID NO: 2448380 - RNA, 16 nt, Human
cucaucauaaaauaaa

SEQ ID NO: 2448381 - RNA, 21 nt, Human
cucaucaccaacgucugugcc

SEQ ID NO: 2448382 - RNA, 16 nt, Human
cucaucaacugaauga

SEQ ID NO: 2448383 - RNA, 13 nt, Human
cucaucaacugaa

SEQ ID NO: 2448384 - RNA, 20 nt, Human
cucauauccccuauuuaaca

SEQ ID NO: 2448385 - RNA, 23 nt, Human
cucauaguaugguggcuggguug

SEQ ID NO: 2448386 - RNA, 21 nt, Human
cucauauccaguauuguuccu

SEQ ID NO: 2448387 - RNA, 15 nt, Human
cucauaucaguuugc

SEQ ID NO: 2448388 - RNA, 19 nt, Human
cucauauauaucuaucuua

SEQ ID NO: 2448389 - RNA, 16 nt, Human
cucaucacuccccucc

SEQ ID NO: 2448390 - RNA, 15 nt, Human
cucaucacuccccuc

SEQ ID NO: 2448391 - RNA, 14 nt, Human
cucaucacuccccu

SEQ ID NO: 2448392 - RNA, 14 nt, Human
cucaucaacugaau

SEQ ID NO: 2448393 - RNA, 22 nt, Human
cucaucaccaacgucugugcca

SEQ ID NO: 2448394 - RNA, 20 nt, Human
cucaucaggaugaacccagg

SEQ ID NO: 2448395 - RNA, 16 nt, Human
cucaucaggaugaacc

SEQ ID NO: 2448396 - RNA, 13 nt, Human
cucaucaggauga

SEQ ID NO: 2448397 - RNA, 12 nt, Human
cucaucaggaug

SEQ ID NO: 2448398 - RNA, 15 nt, Human
cucaucacuggauga

SEQ ID NO: 2448399 - RNA, 17 nt, Human
cucaucacuccccucca

SEQ ID NO: 2448400 - RNA, 24 nt, Human
cucaucaguguccucuugcucaaa

SEQ ID NO: 2448401 - RNA, 12 nt, Human
cucaucauaaaa

SEQ ID NO: 2448402 - RNA, 14 nt, Human
cucaucauaaaaua

SEQ ID NO: 2448403 - RNA, 15 nt, Human
cucaucauaaaauaa

SEQ ID NO: 2448404 - RNA, 21 nt, Human
cucauacccacccccacccaa

SEQ ID NO: 2448405 - RNA, 19 nt, Human
cucauacccacccccaccc

SEQ ID NO: 2448406 - RNA, 18 nt, Human
cucauacccacccccacc

SEQ ID NO: 2448407 - RNA, 16 nt, Human
cucauacccaccccca

SEQ ID NO: 2448408 - RNA, 19 nt, Human
cucaggugauccacccacc

SEQ ID NO: 2448409 - RNA, 18 nt, Human
cucaggugauccacccac

SEQ ID NO: 2448410 - RNA, 20 nt, Human
cucaggugauccacccaccu

SEQ ID NO: 2448411 - RNA, 13 nt, Human
cucauagcccuca

SEQ ID NO: 2448412 - RNA, 17 nt, Human
cucauagcccucacccu

SEQ ID NO: 2448413 - RNA, 15 nt, Human
cucauagcacuuccc

SEQ ID NO: 2448414 - RNA, 12 nt, Human
cucauagcauua

SEQ ID NO: 2448415 - RNA, 14 nt, Human
cucauagcauuaac

SEQ ID NO: 2448416 - RNA, 16 nt, Human
cucauagcauuaacua

SEQ ID NO: 2448417 - RNA, 18 nt, Human
cucauagcauuaacuaau

SEQ ID NO: 2448418 - RNA, 20 nt, Human
cucauagcccucacccuggg

SEQ ID NO: 2448419 - RNA, 21 nt, Human
cucauagcccucacccugggg

SEQ ID NO: 2448420 - RNA, 21 nt, Human
cucauaguaugguggcugggu

SEQ ID NO: 2448421 - RNA, 13 nt, Human
cucauacugugcu

SEQ ID NO: 2448422 - RNA, 17 nt, Human
cucauacguccaccaug

SEQ ID NO: 2448423 - RNA, 15 nt, Human
cucauacguccacca

SEQ ID NO: 2448424 - RNA, 14 nt, Human
cucauacguccacc

SEQ ID NO: 2448425 - RNA, 18 nt, Human
cucauaccuuuaaaggaa

SEQ ID NO: 2448426 - RNA, 16 nt, Human
cucauaccuuuaaagg

SEQ ID NO: 2448427 - RNA, 22 nt, Human
cucauacucaccucaccccacu

SEQ ID NO: 2448428 - RNA, 15 nt, Human
cucauacccaccccc

SEQ ID NO: 2448429 - RNA, 14 nt, Human
cucauacucaccuc

SEQ ID NO: 2448430 - RNA, 18 nt, Human
cuccauccaaggccaggu

SEQ ID NO: 2448431 - RNA, 14 nt, Human
cuccauccaaggcc

SEQ ID NO: 2448432 - RNA, 13 nt, Human
cuccauccaaggc

SEQ ID NO: 2448433 - RNA, 12 nt, Human
cuccauccaagg

SEQ ID NO: 2448434 - RNA, 20 nt, Human
cuccauccacaugggagccg

SEQ ID NO: 2448435 - RNA, 12 nt, Human
cuccauccugag

SEQ ID NO: 2448436 - RNA, 23 nt, Human
cuccaggagcagccacauuccug

SEQ ID NO: 2448437 - RNA, 18 nt, Human
cuccaggagcagccacau

SEQ ID NO: 2448438 - RNA, 20 nt, Human
cuccaggcacccuucuuucc

SEQ ID NO: 2448439 - RNA, 16 nt, Human
cuccaggcacccuucu

SEQ ID NO: 2448440 - RNA, 19 nt, Human
cuccaggauugaagagcau

SEQ ID NO: 2448441 - RNA, 21 nt, Human
cuccaggcacccuucuuuccu

SEQ ID NO: 2448442 - RNA, 11 nt, Human
cuccaggcagg

SEQ ID NO: 2448443 - RNA, 19 nt, Human
cuccaucaguuagagcuga

SEQ ID NO: 2448444 - RNA, 18 nt, Human
cuccaucaguuagagcug

SEQ ID NO: 2448445 - RNA, 15 nt, Human
cuccaucagcuguaa

SEQ ID NO: 2448446 - RNA, 17 nt, Human
cuccaggagcagccaca

SEQ ID NO: 2448447 - RNA, 16 nt, Human
cuccaggagcagccac

SEQ ID NO: 2448448 - RNA, 15 nt, Human
cuccaggagcagcca

SEQ ID NO: 2448449 - RNA, 14 nt, Human
cuccaggagcagcc

SEQ ID NO: 2448450 - RNA, 13 nt, Human
cuccaggagcagc

SEQ ID NO: 2448451 - RNA, 11 nt, Human
cuccaggagca

SEQ ID NO: 2448452 - RNA, 20 nt, Human
cuccagcuuguggagcccca

SEQ ID NO: 2448453 - RNA, 19 nt, Human
cuccagcuuguggagcccc

SEQ ID NO: 2448454 - RNA, 21 nt, Human
cuccagcuuguggagccccac

SEQ ID NO: 2448455 - RNA, 12 nt, Human
cuccaggaacca

SEQ ID NO: 2448456 - RNA, 18 nt, Human
cuccaggaaccacaccac

SEQ ID NO: 2448457 - RNA, 22 nt, Human
cuccaggagaggagcgggaccu

SEQ ID NO: 2448458 - RNA, 14 nt, Human
cuccaggagaggag

SEQ ID NO: 2448459 - RNA, 13 nt, Human
cuccaggagagga

SEQ ID NO: 2448460 - RNA, 11 nt, Human
cuccagcuucu

SEQ ID NO: 2448461 - RNA, 20 nt, Human
cuccaggaaugccuccuccc

SEQ ID NO: 2448462 - RNA, 17 nt, Human
cuccagccccuggaugc

SEQ ID NO: 2448463 - RNA, 16 nt, Human
cuccagccccuggaug

SEQ ID NO: 2448464 - RNA, 14 nt, Human
cuccagccuggcuc

SEQ ID NO: 2448465 - RNA, 13 nt, Human
cuccagccuggcu

SEQ ID NO: 2448466 - RNA, 12 nt, Human
cuccagccuggc

SEQ ID NO: 2448467 - RNA, 22 nt, Human
cuccagccuggacccccagcuu

SEQ ID NO: 2448468 - RNA, 21 nt, Human
cuccagccuggacccccagcu

SEQ ID NO: 2448469 - RNA, 20 nt, Human
cuccagccuggacccccagc

SEQ ID NO: 2448470 - RNA, 18 nt, Human
cuccacguucugcucauc

SEQ ID NO: 2448471 - RNA, 20 nt, Human
cuccagccccuggaugcagc

SEQ ID NO: 2448472 - RNA, 18 nt, Human
cuccagcuuguggagccc

SEQ ID NO: 2448473 - RNA, 12 nt, Human
cuccagcuugug

SEQ ID NO: 2448474 - RNA, 22 nt, Human
cuccagcuucugguacucuccu

SEQ ID NO: 2448475 - RNA, 21 nt, Human
cuccagcuucugguacucucc

SEQ ID NO: 2448476 - RNA, 20 nt, Human
cuccagcuucugguacucuc

SEQ ID NO: 2448477 - RNA, 19 nt, Human
cuccagcuucugguacucu

SEQ ID NO: 2448478 - RNA, 13 nt, Human
cuccagcuucugg

SEQ ID NO: 2448479 - RNA, 14 nt, Human
cuccagcucaccag

SEQ ID NO: 2448480 - RNA, 12 nt, Human
cuccagccuggg

SEQ ID NO: 2448481 - RNA, 13 nt, Human
cuccagccugggc

SEQ ID NO: 2448482 - RNA, 14 nt, Human
cuccagccugggca

SEQ ID NO: 2448483 - RNA, 20 nt, Human
cuccagccugggcaacacag

SEQ ID NO: 2448484 - RNA, 13 nt, Human
cuccaccugccag

SEQ ID NO: 2448485 - RNA, 12 nt, Human
cuccaccugcca

SEQ ID NO: 2448486 - RNA, 22 nt, Human
cuccaccugcucccaggccagu

SEQ ID NO: 2448487 - RNA, 23 nt, Human
cuccacccugucccccagcucug

SEQ ID NO: 2448488 - RNA, 22 nt, Human
cuccaccucuucaccccccacu

SEQ ID NO: 2448489 - RNA, 18 nt, Human
cuccaccugcucccaggc

SEQ ID NO: 2448490 - RNA, 14 nt, Human
cuccaccugccagg

SEQ ID NO: 2448491 - RNA, 13 nt, Human
cuccaccugcucu

SEQ ID NO: 2448492 - RNA, 15 nt, Human
cuccaccuugcgggg

SEQ ID NO: 2448493 - RNA, 18 nt, Human
cuccacguucaccccucc

SEQ ID NO: 2448494 - RNA, 16 nt, Human
cuccacguucaccccu

SEQ ID NO: 2448495 - RNA, 15 nt, Human
cuccagccccuggau

SEQ ID NO: 2448496 - RNA, 16 nt, Human
cuccacguucugcuca

SEQ ID NO: 2448497 - RNA, 17 nt, Human
cuccacguucugcucau

SEQ ID NO: 2448498 - RNA, 15 nt, Human
cuccacguucugcuc

SEQ ID NO: 2448499 - RNA, 20 nt, Human
cuccacguucaccccuccac

SEQ ID NO: 2448500 - RNA, 12 nt, Human
cuccaaagaaau

SEQ ID NO: 2448501 - RNA, 21 nt, Human
cuccaaacugacucuuaagaa

SEQ ID NO: 2448502 - RNA, 13 nt, Human
cuccaaagaaaug

SEQ ID NO: 2448503 - RNA, 23 nt, Human
cuccaaagaggugacugggcccu

SEQ ID NO: 2448504 - RNA, 16 nt, Human
cuccaaaagcacuuac

SEQ ID NO: 2448505 - RNA, 15 nt, Human
cuccaaaagcacuua

SEQ ID NO: 2448506 - RNA, 23 nt, Human
cuccaaacugaagcagccucucc

SEQ ID NO: 2448507 - RNA, 15 nt, Human
cuccaaaauaaaacu

SEQ ID NO: 2448508 - RNA, 16 nt, Human
cuccaaaauaaaacuu

SEQ ID NO: 2448509 - RNA, 16 nt, Human
cuccaaaacuccugcc

SEQ ID NO: 2448510 - RNA, 20 nt, Human
cucauuuuuuuaauuuauua

SEQ ID NO: 2448511 - RNA, 18 nt, Human
cucauuuuuuuaauuuau

SEQ ID NO: 2448512 - RNA, 17 nt, Human
cucauuugggguagcua

SEQ ID NO: 2448513 - RNA, 20 nt, Human
cucauuugggguagcuagag

SEQ ID NO: 2448514 - RNA, 17 nt, Human
cucauuacuuuugaagu

SEQ ID NO: 2448515 - RNA, 23 nt, Human
cucauuacuuuaccacccccaca

SEQ ID NO: 2448516 - RNA, 17 nt, Human
cucauuugucacacacu

SEQ ID NO: 2448517 - RNA, 21 nt, Human
cucauuuccaagcaaguauua

SEQ ID NO: 2448518 - RNA, 21 nt, Human
cucauguuuuccauuguuuga

SEQ ID NO: 2448519 - RNA, 18 nt, Human
cucauguuuuccauuguu

SEQ ID NO: 2448520 - RNA, 15 nt, Human
cucauuaaugacacu

SEQ ID NO: 2448521 - RNA, 16 nt, Human
cucauuaaugacacuu

SEQ ID NO: 2448522 - RNA, 12 nt, Human
cucaucugcuca

SEQ ID NO: 2448523 - RNA, 15 nt, Human
cucaucucuguccca

SEQ ID NO: 2448524 - RNA, 12 nt, Human
cucaucugcugg

SEQ ID NO: 2448525 - RNA, 12 nt, Human
cucaucucuucu

SEQ ID NO: 2448526 - RNA, 15 nt, Human
cucaucucuucuuuu

SEQ ID NO: 2448527 - RNA, 22 nt, Human
cucaucucuuagcuccccucca

SEQ ID NO: 2448528 - RNA, 20 nt, Human
cucaucucuuagcuccccuc

SEQ ID NO: 2448529 - RNA, 16 nt, Human
cucauguuuucaacug

SEQ ID NO: 2448530 - RNA, 17 nt, Human
cucauguuuucaacugc

SEQ ID NO: 2448531 - RNA, 17 nt, Human
cucaucugcucagcagc

SEQ ID NO: 2448532 - RNA, 17 nt, Human
cucauguuuuccauugu

SEQ ID NO: 2448533 - RNA, 13 nt, Human
cucauguuuucca

SEQ ID NO: 2448534 - RNA, 18 nt, Human
cucauguuuucaacugcc

SEQ ID NO: 2448535 - RNA, 20 nt, Human
cucauguuuucaacugccaa

SEQ ID NO: 2448536 - RNA, 13 nt, Human
cucauuaaaaaaa

SEQ ID NO: 2448537 - RNA, 13 nt, Human
cuccacccugcuc

SEQ ID NO: 2448538 - RNA, 23 nt, Human
cuccaccaagccuggucagccca

SEQ ID NO: 2448539 - RNA, 16 nt, Human
cuccacaucugccuua

SEQ ID NO: 2448540 - RNA, 12 nt, Human
cuccaccaaccc

SEQ ID NO: 2448541 - RNA, 17 nt, Human
cuccacaucugccuuaa

SEQ ID NO: 2448542 - RNA, 15 nt, Human
cuccacaucugccuu

SEQ ID NO: 2448543 - RNA, 14 nt, Human
cuccacaucugccu

SEQ ID NO: 2448544 - RNA, 13 nt, Human
cuccacaucugcc

SEQ ID NO: 2448545 - RNA, 22 nt, Human
cuccacauccuuucuaaacaag

SEQ ID NO: 2448546 - RNA, 14 nt, Human
cuccacauccucca

SEQ ID NO: 2448547 - RNA, 15 nt, Human
cuccacauccuccac

SEQ ID NO: 2448548 - RNA, 17 nt, Human
cuccacauccuccacgu

SEQ ID NO: 2448549 - RNA, 14 nt, Human
cuccacauccuuuc

SEQ ID NO: 2448550 - RNA, 20 nt, Human
cuccacacccucucccagga

SEQ ID NO: 2448551 - RNA, 15 nt, Human
cuccacccugcucuc

SEQ ID NO: 2448552 - RNA, 15 nt, Human
cuccaccaccacugg

SEQ ID NO: 2448553 - RNA, 12 nt, Human
cuccaccaccac

SEQ ID NO: 2448554 - RNA, 14 nt, Human
cuccacccuggccg

SEQ ID NO: 2448555 - RNA, 13 nt, Human
cuccaccaaccca

SEQ ID NO: 2448556 - RNA, 20 nt, Human
cuccaccaacccaucagaag

SEQ ID NO: 2448557 - RNA, 13 nt, Human
cuccaccacaucc

SEQ ID NO: 2448558 - RNA, 18 nt, Human
cuccacccugucccccag

SEQ ID NO: 2448559 - RNA, 17 nt, Human
cuccacccuguccccca

SEQ ID NO: 2448560 - RNA, 15 nt, Human
cuccacccugucccc

SEQ ID NO: 2448561 - RNA, 14 nt, Human
cuccacccuguccc

SEQ ID NO: 2448562 - RNA, 13 nt, Human
cuccacccugucc

SEQ ID NO: 2448563 - RNA, 15 nt, Human
cuccacccuggccga

SEQ ID NO: 2448564 - RNA, 22 nt, Human
cuccacccugucccccagcucu

SEQ ID NO: 2448565 - RNA, 20 nt, Human
cuccacccugucccccagcu

SEQ ID NO: 2448566 - RNA, 12 nt, Human
cuccacccuugg

SEQ ID NO: 2448567 - RNA, 16 nt, Human
cuccaauccugccccc

SEQ ID NO: 2448568 - RNA, 15 nt, Human
cuccaauccugcccc

SEQ ID NO: 2448569 - RNA, 14 nt, Human
cuccaauccugccc

SEQ ID NO: 2448570 - RNA, 19 nt, Human
cuccaauaucagugcucga

SEQ ID NO: 2448571 - RNA, 21 nt, Human
cuccaaugcuguuaucccugc

SEQ ID NO: 2448572 - RNA, 17 nt, Human
cuccaauaucagugcuc

SEQ ID NO: 2448573 - RNA, 16 nt, Human
cuccaauaucagugcu

SEQ ID NO: 2448574 - RNA, 22 nt, Human
cuccaagugccagaggugggca

SEQ ID NO: 2448575 - RNA, 21 nt, Human
cuccaagugccagaggugggc

SEQ ID NO: 2448576 - RNA, 22 nt, Human
cuccaaucccaccaacccucag

SEQ ID NO: 2448577 - RNA, 20 nt, Human
cuccaagugccagagguggg

SEQ ID NO: 2448578 - RNA, 19 nt, Human
cuccaagugccagaggugg

SEQ ID NO: 2448579 - RNA, 18 nt, Human
cuccaagugccagaggug

SEQ ID NO: 2448580 - RNA, 16 nt, Human
cuccaagugccagagg

SEQ ID NO: 2448581 - RNA, 15 nt, Human
cuccaagugccagag

SEQ ID NO: 2448582 - RNA, 14 nt, Human
cuccaagugccaga

SEQ ID NO: 2448583 - RNA, 21 nt, Human
cuccaagucucaguggcuuca

SEQ ID NO: 2448584 - RNA, 17 nt, Human
cuccaagucucaguggc

SEQ ID NO: 2448585 - RNA, 16 nt, Human
cuccaagucucagugg

SEQ ID NO: 2448586 - RNA, 14 nt, Human
cuccaaaggccccc

SEQ ID NO: 2448587 - RNA, 22 nt, Human
cuccaaaggaagucuaggagcu

SEQ ID NO: 2448588 - RNA, 15 nt, Human
cuccaagucucagug

SEQ ID NO: 2448589 - RNA, 13 nt, Human
cuccacauccucc

SEQ ID NO: 2448590 - RNA, 17 nt, Human
cuccacacccucuccca

SEQ ID NO: 2448591 - RNA, 23 nt, Human
cuccacacacagcugggcugugg

SEQ ID NO: 2448592 - RNA, 20 nt, Human
cuccacaccauucaggucuu

SEQ ID NO: 2448593 - RNA, 21 nt, Human
cuccacacacagcugggcugu

SEQ ID NO: 2448594 - RNA, 18 nt, Human
cuccacaccauucagguc

SEQ ID NO: 2448595 - RNA, 17 nt, Human
cuccaauuaaggauuuu

SEQ ID NO: 2448596 - RNA, 20 nt, Human
cuccaauuaaggauuuuaug

SEQ ID NO: 2448597 - RNA, 22 nt, Human
cuccaauuaaggauuuuaugcu

SEQ ID NO: 2448598 - RNA, 22 nt, Human
cucacaguccuuaccagcagag

SEQ ID NO: 2448599 - RNA, 19 nt, Human
cucacaguccuuaccagca

SEQ ID NO: 2448600 - RNA, 17 nt, Human
cucacaguccuuaccag

SEQ ID NO: 2448601 - RNA, 12 nt, Human
cucacauuuaug

SEQ ID NO: 2448602 - RNA, 20 nt, Human
cucaccacuacaucacuuga

SEQ ID NO: 2448603 - RNA, 22 nt, Human
cucacauuuauucugcucacau

SEQ ID NO: 2448604 - RNA, 19 nt, Human
cucacauuuauucugcuca

SEQ ID NO: 2448605 - RNA, 15 nt, Human
cucacauuuauucug

SEQ ID NO: 2448606 - RNA, 15 nt, Human
cucaccagccccagu

SEQ ID NO: 2448607 - RNA, 14 nt, Human
cucaccagccccag

SEQ ID NO: 2448608 - RNA, 13 nt, Human
cucaccagcccca

SEQ ID NO: 2448609 - RNA, 22 nt, Human
cucaccaggggcaggcacagca

SEQ ID NO: 2448610 - RNA, 21 nt, Human
cucaccaggggcaggcacagc

SEQ ID NO: 2448611 - RNA, 20 nt, Human
cucaccaggggcaggcacag

SEQ ID NO: 2448612 - RNA, 15 nt, Human
cucaccaggggcagg

SEQ ID NO: 2448613 - RNA, 13 nt, Human
cucaccaggggca

SEQ ID NO: 2448614 - RNA, 14 nt, Human
cucaccaggggcag

SEQ ID NO: 2448615 - RNA, 13 nt, Human
cucaccaggaagg

SEQ ID NO: 2448616 - RNA, 18 nt, Human
cucaccagccccagugcc

SEQ ID NO: 2448617 - RNA, 17 nt, Human
cucaccagccccagugc

SEQ ID NO: 2448618 - RNA, 17 nt, Human
cucaagugauucuccug

SEQ ID NO: 2448619 - RNA, 16 nt, Human
cucaagucuucccuga

SEQ ID NO: 2448620 - RNA, 17 nt, Human
cucaagucuucccugau

SEQ ID NO: 2448621 - RNA, 18 nt, Human
cucaagucuucccugauc

SEQ ID NO: 2448622 - RNA, 21 nt, Human
cucaaguccucuuuucugaga

SEQ ID NO: 2448623 - RNA, 23 nt, Human
cucaagaagcaggcuacacugac

SEQ ID NO: 2448624 - RNA, 14 nt, Human
cucaagaagcaggc

SEQ ID NO: 2448625 - RNA, 13 nt, Human
cucaagaagcagg

SEQ ID NO: 2448626 - RNA, 22 nt, Human
cucaagaagacauggagacucc

SEQ ID NO: 2448627 - RNA, 21 nt, Human
cucaagaagacauggagacuc

SEQ ID NO: 2448628 - RNA, 20 nt, Human
cucaagaagacauggagacu

SEQ ID NO: 2448629 - RNA, 15 nt, Human
cucaagaagcaggcu

SEQ ID NO: 2448630 - RNA, 23 nt, Human
cucaaccuaccaccccuuccugu

SEQ ID NO: 2448631 - RNA, 21 nt, Human
cucaagaaauaaaaggaagcc

SEQ ID NO: 2448632 - RNA, 22 nt, Human
cucaagaaauaaaaggaagcca

SEQ ID NO: 2448633 - RNA, 23 nt, Human
cucaagaaauaaaaggaagccaa

SEQ ID NO: 2448634 - RNA, 19 nt, Human
cucaagaagacauggagac

SEQ ID NO: 2448635 - RNA, 15 nt, Human
cucacagccucugac

SEQ ID NO: 2448636 - RNA, 14 nt, Human
cucacagccucuga

SEQ ID NO: 2448637 - RNA, 13 nt, Human
cucacagccucug

SEQ ID NO: 2448638 - RNA, 12 nt, Human
cucacagccucu

SEQ ID NO: 2448639 - RNA, 11 nt, Human
cucacagccuc

SEQ ID NO: 2448640 - RNA, 19 nt, Human
cucacaccgcgucugguga

SEQ ID NO: 2448641 - RNA, 22 nt, Human
cucacagccucugaccccuccu

SEQ ID NO: 2448642 - RNA, 21 nt, Human
cucacagccucugaccccucc

SEQ ID NO: 2448643 - RNA, 19 nt, Human
cucacagccucugaccccu

SEQ ID NO: 2448644 - RNA, 16 nt, Human
cucacagccucugacc

SEQ ID NO: 2448645 - RNA, 15 nt, Human
cucacaguccuuacc

SEQ ID NO: 2448646 - RNA, 24 nt, Human
cucacacaugagcaucaggccagg

SEQ ID NO: 2448647 - RNA, 22 nt, Human
cucacacaugagcaucaggcca

SEQ ID NO: 2448648 - RNA, 23 nt, Human
cucacacccaccguccgcccugc

SEQ ID NO: 2448649 - RNA, 22 nt, Human
cucacacccaccguccgcccug

SEQ ID NO: 2448650 - RNA, 15 nt, Human
cucacacccaccguc

SEQ ID NO: 2448651 - RNA, 13 nt, Human
cucacacccaccg

SEQ ID NO: 2448652 - RNA, 12 nt, Human
cucacacccacc

SEQ ID NO: 2448653 - RNA, 23 nt, Human
cucacaccaggcuugccugcagg

SEQ ID NO: 2448654 - RNA, 19 nt, Human
cuauugucaccagggcugg

SEQ ID NO: 2448655 - RNA, 16 nt, Human
cuauuguagcauuucu

SEQ ID NO: 2448656 - RNA, 12 nt, Human
cuauuguacaga

SEQ ID NO: 2448657 - RNA, 16 nt, Human
cuauucucaccaggaa

SEQ ID NO: 2448658 - RNA, 17 nt, Human
cuauuguaaauauguuu

SEQ ID NO: 2448659 - RNA, 14 nt, Human
cuauuguagagcca

SEQ ID NO: 2448660 - RNA, 23 nt, Human
cuauugugauuugacuguuuuua

SEQ ID NO: 2448661 - RNA, 20 nt, Human
cuauugugauuugacuguuu

SEQ ID NO: 2448662 - RNA, 11 nt, Human
cuauuuaaugg

SEQ ID NO: 2448663 - RNA, 19 nt, Human
cuauugugauuugacuguu

SEQ ID NO: 2448664 - RNA, 18 nt, Human
cuauugugauuugacugu

SEQ ID NO: 2448665 - RNA, 17 nt, Human
cuauugugauuugacug

SEQ ID NO: 2448666 - RNA, 14 nt, Human
cuauugugauuuga

SEQ ID NO: 2448667 - RNA, 15 nt, Human
cuauugucauuaaag

SEQ ID NO: 2448668 - RNA, 14 nt, Human
cuauugucauuaaa

SEQ ID NO: 2448669 - RNA, 13 nt, Human
cuauugugauuug

SEQ ID NO: 2448670 - RNA, 22 nt, Human
cuauuguccccuagcaaggcau

SEQ ID NO: 2448671 - RNA, 12 nt, Human
cuauuuaaugga

SEQ ID NO: 2448672 - RNA, 20 nt, Human
cuauuguuacucugguucuu

SEQ ID NO: 2448673 - RNA, 16 nt, Human
cuauuguuacucuggu

SEQ ID NO: 2448674 - RNA, 13 nt, Human
cuauuuagcauga

SEQ ID NO: 2448675 - RNA, 18 nt, Human
cuauuuagcaugacaagc

SEQ ID NO: 2448676 - RNA, 17 nt, Human
cuauuuaguuuuuguaa

SEQ ID NO: 2448677 - RNA, 20 nt, Human
cuauuuaguuuuuguaauuu

SEQ ID NO: 2448678 - RNA, 22 nt, Human
cuauuuaguuuuuguaauuuau

SEQ ID NO: 2448679 - RNA, 23 nt, Human
cuauuuaguuuuuguaauuuauu

SEQ ID NO: 2448680 - RNA, 11 nt, Human
cuauuuaugaa

SEQ ID NO: 2448681 - RNA, 17 nt, Human
cuauuuauauguacaug

SEQ ID NO: 2448682 - RNA, 23 nt, Human
cuauuuagcaugacaagccccag

SEQ ID NO: 2448683 - RNA, 21 nt, Human
cuauuuaucuguaguaaacua

SEQ ID NO: 2448684 - RNA, 16 nt, Human
cuauuuaucuguguuu

SEQ ID NO: 2448685 - RNA, 19 nt, Human
cuauuuaucuguguuuuug

SEQ ID NO: 2448686 - RNA, 22 nt, Human
cuauuuaucuguguuuuugaaa

SEQ ID NO: 2448687 - RNA, 21 nt, Human
cuauucaguucccagaaucaa

SEQ ID NO: 2448688 - RNA, 18 nt, Human
cuauucaguucccagaau

SEQ ID NO: 2448689 - RNA, 22 nt, Human
cuauucccacaccuccacaguu

SEQ ID NO: 2448690 - RNA, 20 nt, Human
cuauucccacaccuccacag

SEQ ID NO: 2448691 - RNA, 19 nt, Human
cuauucccacaccuccaca

SEQ ID NO: 2448692 - RNA, 14 nt, Human
cuauuccuccuggg

SEQ ID NO: 2448693 - RNA, 17 nt, Human
cuauuccccagcagggu

SEQ ID NO: 2448694 - RNA, 14 nt, Human
cuauucuauugcag

SEQ ID NO: 2448695 - RNA, 15 nt, Human
cuauucucaccagga

SEQ ID NO: 2448696 - RNA, 16 nt, Human
cuauuucagugccaau

SEQ ID NO: 2448697 - RNA, 17 nt, Human
cuauuuccauuccagaa

SEQ ID NO: 2448698 - RNA, 14 nt, Human
cuauuuccauucca

SEQ ID NO: 2448699 - RNA, 23 nt, Human
cuauuuccccaggggaaaaugaa

SEQ ID NO: 2448700 - RNA, 22 nt, Human
cuauuuccccaggggaaaauga

SEQ ID NO: 2448701 - RNA, 21 nt, Human
cuauuuccccaggggaaaaug

SEQ ID NO: 2448702 - RNA, 12 nt, Human
cuauuucuaguu

SEQ ID NO: 2448703 - RNA, 19 nt, Human
cucaaaucguccagcgacc

SEQ ID NO: 2448704 - RNA, 13 nt, Human
cucaaaucuauuc

SEQ ID NO: 2448705 - RNA, 16 nt, Human
cucaaaucuauucaga

SEQ ID NO: 2448706 - RNA, 15 nt, Human
cucaaaucuauucag

SEQ ID NO: 2448707 - RNA, 22 nt, Human
cucaaaucuauucagacaagca

SEQ ID NO: 2448708 - RNA, 17 nt, Human
cucaaaugacccaaaga

SEQ ID NO: 2448709 - RNA, 21 nt, Human
cucaaaucuuuuagucauuau

SEQ ID NO: 2448710 - RNA, 16 nt, Human
cucaaaugcucagacc

SEQ ID NO: 2448711 - RNA, 17 nt, Human
cucaaccuccugggcua

SEQ ID NO: 2448712 - RNA, 15 nt, Human
cucaaccuccugggc

SEQ ID NO: 2448713 - RNA, 22 nt, Human
cucaaccuaccaccccuuccug

SEQ ID NO: 2448714 - RNA, 13 nt, Human
cucaaccuccugg

SEQ ID NO: 2448715 - RNA, 20 nt, Human
cucaacacccaacugucucg

SEQ ID NO: 2448716 - RNA, 23 nt, Human
cucaacaagggagagaccucauc

SEQ ID NO: 2448717 - RNA, 21 nt, Human
cucaacaccucugcacaagcu

SEQ ID NO: 2448718 - RNA, 22 nt, Human
cucaacaagggagagaccucau

SEQ ID NO: 2448719 - RNA, 19 nt, Human
cucaacaagggagagaccu

SEQ ID NO: 2448720 - RNA, 15 nt, Human
cucaacaagggagag

SEQ ID NO: 2448721 - RNA, 19 nt, Human
cucaacaaagcacaguguu

SEQ ID NO: 2448722 - RNA, 15 nt, Human
cucaacaaagcacag

SEQ ID NO: 2448723 - RNA, 19 nt, Human
cucaaaugcucagaccagc

SEQ ID NO: 2448724 - RNA, 21 nt, Human
cucagcaccccuuccaugugg

SEQ ID NO: 2448725 - RNA, 20 nt, Human
cucagcaccccuuccaugug

SEQ ID NO: 2448726 - RNA, 17 nt, Human
cucagcaccccuuccau

SEQ ID NO: 2448727 - RNA, 16 nt, Human
cucagcaccccuucca

SEQ ID NO: 2448728 - RNA, 15 nt, Human
cucagcaccccuucc

SEQ ID NO: 2448729 - RNA, 13 nt, Human
cucagcaccccuu

SEQ ID NO: 2448730 - RNA, 12 nt, Human
cucagcaccccu

SEQ ID NO: 2448731 - RNA, 12 nt, Human
cucagcacuugg

SEQ ID NO: 2448732 - RNA, 17 nt, Human
cucagcauccuggcacc

SEQ ID NO: 2448733 - RNA, 16 nt, Human
cucagcauccuggcac

SEQ ID NO: 2448734 - RNA, 12 nt, Human
cucagcagcccu

SEQ ID NO: 2448735 - RNA, 13 nt, Human
cucagcagcccuc

SEQ ID NO: 2448736 - RNA, 14 nt, Human
cucagcagcccucc

SEQ ID NO: 2448737 - RNA, 15 nt, Human
cucagcagcccuccu

SEQ ID NO: 2448738 - RNA, 16 nt, Human
cucagcagcccuccuc

SEQ ID NO: 2448739 - RNA, 17 nt, Human
cucagcagcccuccuca

SEQ ID NO: 2448740 - RNA, 18 nt, Human
cucagcagcccuccucac

SEQ ID NO: 2448741 - RNA, 21 nt, Human
cucagcagcccuccucacccc

SEQ ID NO: 2448742 - RNA, 20 nt, Human
cucagcagcgaccaccccug

SEQ ID NO: 2448743 - RNA, 19 nt, Human
cucagcagcgaccaccccu

SEQ ID NO: 2448744 - RNA, 18 nt, Human
cucagcagcgaccacccc

SEQ ID NO: 2448745 - RNA, 19 nt, Human
cucagcagcccuccucacc

SEQ ID NO: 2448746 - RNA, 18 nt, Human
cucagaucugucugauag

SEQ ID NO: 2448747 - RNA, 17 nt, Human
cucagauuauuuuuccu

SEQ ID NO: 2448748 - RNA, 15 nt, Human
cucagaucugucuga

SEQ ID NO: 2448749 - RNA, 19 nt, Human
cucagauccuuguuucaaa

SEQ ID NO: 2448750 - RNA, 17 nt, Human
cucagauccuuguuuca

SEQ ID NO: 2448751 - RNA, 15 nt, Human
cucagaucuucugug

SEQ ID NO: 2448752 - RNA, 14 nt, Human
cucagcacaaggcc

SEQ ID NO: 2448753 - RNA, 20 nt, Human
cucagcacaaggccaucugg

SEQ ID NO: 2448754 - RNA, 21 nt, Human
cucacugccaggccagccucc

SEQ ID NO: 2448755 - RNA, 20 nt, Human
cucacugccaggccagccuc

SEQ ID NO: 2448756 - RNA, 19 nt, Human
cucacugccaggccagccu

SEQ ID NO: 2448757 - RNA, 18 nt, Human
cucacugccaggccagcc

SEQ ID NO: 2448758 - RNA, 15 nt, Human
cucacugccaggcca

SEQ ID NO: 2448759 - RNA, 14 nt, Human
cucacugccaggcc

SEQ ID NO: 2448760 - RNA, 20 nt, Human
cucacuguugcccaggcugg

SEQ ID NO: 2448761 - RNA, 19 nt, Human
cucacugccaugccagcuu

SEQ ID NO: 2448762 - RNA, 22 nt, Human
cucacugccaugccagcuuauc

SEQ ID NO: 2448763 - RNA, 22 nt, Human
cucagacuuuggaaaaugcauu

SEQ ID NO: 2448764 - RNA, 22 nt, Human
cucacugccaggccagccuccg

SEQ ID NO: 2448765 - RNA, 23 nt, Human
cucagagaauuucuaccauuuca

SEQ ID NO: 2448766 - RNA, 17 nt, Human
cucagacuuuggaaaau

SEQ ID NO: 2448767 - RNA, 22 nt, Human
cucacuguugcccaggcuggcg

SEQ ID NO: 2448768 - RNA, 21 nt, Human
cucacuguugcccaggcuggc

SEQ ID NO: 2448769 - RNA, 15 nt, Human
cucagauccagggac

SEQ ID NO: 2448770 - RNA, 16 nt, Human
cucagauccagggaca

SEQ ID NO: 2448771 - RNA, 17 nt, Human
cucagauccagggacag

SEQ ID NO: 2448772 - RNA, 18 nt, Human
cucagauccagggacaga

SEQ ID NO: 2448773 - RNA, 20 nt, Human
cucagauccagggacagagg

SEQ ID NO: 2448774 - RNA, 22 nt, Human
cucagauccagggacagaggcc

SEQ ID NO: 2448775 - RNA, 15 nt, Human
cucagauccuuguuu

SEQ ID NO: 2448776 - RNA, 21 nt, Human
cucagaucaguguaccauuug

SEQ ID NO: 2448777 - RNA, 10 nt, Human
cucagaucca

SEQ ID NO: 2448778 - RNA, 13 nt, Human
cucagauccaggg

SEQ ID NO: 2448779 - RNA, 14 nt, Human
cucagauccaggga

SEQ ID NO: 2448780 - RNA, 20 nt, Human
cucagaucacuacugcaguc

SEQ ID NO: 2448781 - RNA, 17 nt, Human
cucagaucaguguacca

SEQ ID NO: 2448782 - RNA, 18 nt, Human
cucagaucacuacugcag

SEQ ID NO: 2448783 - RNA, 17 nt, Human
cucagaucacuacugca

SEQ ID NO: 2448784 - RNA, 17 nt, Human
cucagauauuuauauuu

SEQ ID NO: 2448785 - RNA, 23 nt, Human
cucagagagggcaggcaugaagu

SEQ ID NO: 2448786 - RNA, 15 nt, Human
cucagagagggcagg

SEQ ID NO: 2448787 - RNA, 13 nt, Human
cucagagagggca

SEQ ID NO: 2448788 - RNA, 15 nt, Human
cucagagagcaccau

SEQ ID NO: 2448789 - RNA, 14 nt, Human
cucagagagggugg

SEQ ID NO: 2448790 - RNA, 14 nt, Human
cucagauauuuaua

SEQ ID NO: 2448791 - RNA, 18 nt, Human
cucagagucggaacggag

SEQ ID NO: 2448792 - RNA, 15 nt, Human
cucagaguccaggcc

SEQ ID NO: 2448793 - RNA, 18 nt, Human
cucagaguccaggcccca

SEQ ID NO: 2448794 - RNA, 17 nt, Human
cucagagucggaacgga

SEQ ID NO: 2448795 - RNA, 13 nt, Human
cucagagugcaag

SEQ ID NO: 2448796 - RNA, 13 nt, Human
cucacugccaggc

SEQ ID NO: 2448797 - RNA, 17 nt, Human
cucacugcaaccuccgc

SEQ ID NO: 2448798 - RNA, 13 nt, Human
cucacugcagccu

SEQ ID NO: 2448799 - RNA, 22 nt, Human
cucacugagaagauugugaaua

SEQ ID NO: 2448800 - RNA, 21 nt, Human
cucacugaaaacaucuggaag

SEQ ID NO: 2448801 - RNA, 14 nt, Human
cucacugaaaccag

SEQ ID NO: 2448802 - RNA, 12 nt, Human
cucacugcagcc

SEQ ID NO: 2448803 - RNA, 21 nt, Human
cucacucugucgcccagucug

SEQ ID NO: 2448804 - RNA, 13 nt, Human
cucacucugucgc

SEQ ID NO: 2448805 - RNA, 19 nt, Human
cucacugaaaacaucugga

SEQ ID NO: 2448806 - RNA, 18 nt, Human
cucacugaaaacaucugg

SEQ ID NO: 2448807 - RNA, 17 nt, Human
cucacugaaaacaucug

SEQ ID NO: 2448808 - RNA, 13 nt, Human
cucacugaaaaca

SEQ ID NO: 2448809 - RNA, 16 nt, Human
cucacucuugccaacc

SEQ ID NO: 2448810 - RNA, 15 nt, Human
cucacucuggccuca

SEQ ID NO: 2448811 - RNA, 14 nt, Human
cucacucuugccaa

SEQ ID NO: 2448812 - RNA, 22 nt, Human
cucacucugucgcccagucugg

SEQ ID NO: 2448813 - RNA, 14 nt, Human
cucacucuggccuc

SEQ ID NO: 2448814 - RNA, 12 nt, Human
cucacucugucg

SEQ ID NO: 2448815 - RNA, 11 nt, Human
cucacucuguc

SEQ ID NO: 2448816 - RNA, 11 nt, Human
cucacuccugu

SEQ ID NO: 2448817 - RNA, 22 nt, Human
cucacuccugagaccccuggcc

SEQ ID NO: 2448818 - RNA, 20 nt, Human
cucacuccugagaccccugg

SEQ ID NO: 2448819 - RNA, 14 nt, Human
cucacuccugagac

SEQ ID NO: 2448820 - RNA, 20 nt, Human
cucacuccuguuacuuaccu

SEQ ID NO: 2448821 - RNA, 12 nt, Human
cucacuccuguu

SEQ ID NO: 2448822 - RNA, 13 nt, Human
cucacuccuugaa

SEQ ID NO: 2448823 - RNA, 19 nt, Human
cucacuccuaccugguaau

SEQ ID NO: 2448824 - RNA, 23 nt, Human
cucacucccuucuaccugccacu

SEQ ID NO: 2448825 - RNA, 22 nt, Human
cucacucccuucuaccugccac

SEQ ID NO: 2448826 - RNA, 12 nt, Human
cucacuccugag

SEQ ID NO: 2448827 - RNA, 17 nt, Human
cucacuccuaccuggua

SEQ ID NO: 2448828 - RNA, 16 nt, Human
cucacuccuaccuggu

SEQ ID NO: 2448829 - RNA, 20 nt, Human
cucacuauguugcccaggca

SEQ ID NO: 2448830 - RNA, 19 nt, Human
cucacuauguugcccaggc

SEQ ID NO: 2448831 - RNA, 17 nt, Human
cucacccccagcuuugc

SEQ ID NO: 2448832 - RNA, 18 nt, Human
cucacccccagcuuugcu

SEQ ID NO: 2448833 - RNA, 14 nt, Human
cucacccccagcuu

SEQ ID NO: 2448834 - RNA, 21 nt, Human
cucacccccaaggggcagucu

SEQ ID NO: 2448835 - RNA, 22 nt, Human
cucacccccaaggggcagucug

SEQ ID NO: 2448836 - RNA, 19 nt, Human
cucaccccaucccacaccc

SEQ ID NO: 2448837 - RNA, 21 nt, Human
cucaccccaucccacacccug

SEQ ID NO: 2448838 - RNA, 22 nt, Human
cucaccccaucccacacccugg

SEQ ID NO: 2448839 - RNA, 17 nt, Human
cucacccccaaggggca

SEQ ID NO: 2448840 - RNA, 24 nt, Human
cucaccaguguccccuccacuguc

SEQ ID NO: 2448841 - RNA, 23 nt, Human
cucaccaguguccccuccacugu

SEQ ID NO: 2448842 - RNA, 20 nt, Human
cucaccaguguccccuccac

SEQ ID NO: 2448843 - RNA, 23 nt, Human
cucaccaggggcaggcacagcac

SEQ ID NO: 2448844 - RNA, 14 nt, Human
cucaccaucugugc

SEQ ID NO: 2448845 - RNA, 14 nt, Human
cucaccauguaaaa

SEQ ID NO: 2448846 - RNA, 15 nt, Human
cucaccccagcccca

SEQ ID NO: 2448847 - RNA, 22 nt, Human
cucacccacuuuggccuccguu

SEQ ID NO: 2448848 - RNA, 12 nt, Human
cucaccccaucc

SEQ ID NO: 2448849 - RNA, 13 nt, Human
cucaccccauccc

SEQ ID NO: 2448850 - RNA, 12 nt, Human
cucacuccacca

SEQ ID NO: 2448851 - RNA, 14 nt, Human
cucacuccaccacc

SEQ ID NO: 2448852 - RNA, 16 nt, Human
cucacuccaccaccca

SEQ ID NO: 2448853 - RNA, 17 nt, Human
cucacuccaccacccaa

SEQ ID NO: 2448854 - RNA, 20 nt, Human
cucacuccaccacccaaaag

SEQ ID NO: 2448855 - RNA, 15 nt, Human
cucacuccuaccugg

SEQ ID NO: 2448856 - RNA, 13 nt, Human
cucacuccuaccu

SEQ ID NO: 2448857 - RNA, 15 nt, Human
cucacucccagucca

SEQ ID NO: 2448858 - RNA, 15 nt, Human
cucacucccuuccca

SEQ ID NO: 2448859 - RNA, 21 nt, Human
cucacucccuucccauaagcu

SEQ ID NO: 2448860 - RNA, 22 nt, Human
cucacuauguugcccaggcagg

SEQ ID NO: 2448861 - RNA, 21 nt, Human
cucacuauguugcccaggcag

SEQ ID NO: 2448862 - RNA, 23 nt, Human
cucacuauguugcccaggcaggu

SEQ ID NO: 2448863 - RNA, 19 nt, Human
cucacccccagcuuugcua

SEQ ID NO: 2448864 - RNA, 23 nt, Human
cuaggucucggacuaagccuacc

SEQ ID NO: 2448865 - RNA, 12 nt, Human
cuaggucugaua

SEQ ID NO: 2448866 - RNA, 24 nt, Human
cuaggugacagagugagacucugu

SEQ ID NO: 2448867 - RNA, 19 nt, Human
cuagguggcaaggcugugc

SEQ ID NO: 2448868 - RNA, 17 nt, Human
cuagguggcaaggcugu

SEQ ID NO: 2448869 - RNA, 22 nt, Human
cuaggugcccuuggaggccagc

SEQ ID NO: 2448870 - RNA, 18 nt, Human
cuaggugcccuuggaggc

SEQ ID NO: 2448871 - RNA, 23 nt, Human
cuagguggcaaggcugugcuccc

SEQ ID NO: 2448872 - RNA, 13 nt, Human
cuaggugggccag

SEQ ID NO: 2448873 - RNA, 15 nt, Human
cuaggugggccagcc

SEQ ID NO: 2448874 - RNA, 17 nt, Human
cuaggugggccagcccc

SEQ ID NO: 2448875 - RNA, 18 nt, Human
cuaggugggccagccccu

SEQ ID NO: 2448876 - RNA, 19 nt, Human
cuaggugggccagccccuc

SEQ ID NO: 2448877 - RNA, 21 nt, Human
cuaggugggccagccccuccc

SEQ ID NO: 2448878 - RNA, 23 nt, Human
cuaggugggccagccccucccac

SEQ ID NO: 2448879 - RNA, 14 nt, Human
cuagguacuucagg

SEQ ID NO: 2448880 - RNA, 15 nt, Human
cuagguaggguuuaa

SEQ ID NO: 2448881 - RNA, 17 nt, Human
cuaggucagcuugcugc

SEQ ID NO: 2448882 - RNA, 18 nt, Human
cuaggugacagagugaga

SEQ ID NO: 2448883 - RNA, 14 nt, Human
cuaggugacagagu

SEQ ID NO: 2448884 - RNA, 23 nt, Human
cgcccaguuggguggaugccugg

SEQ ID NO: 2448885 - RNA, 12 nt, Human
cgccccacccag

SEQ ID NO: 2448886 - RNA, 13 nt, Human
cgcccauguguga

SEQ ID NO: 2448887 - RNA, 22 nt, Human
cuagguaaauuacaguuccuag

SEQ ID NO: 2448888 - RNA, 21 nt, Human
cgccccagaucaccagcccgg

SEQ ID NO: 2448889 - RNA, 20 nt, Human
cgccccagauaccagccccu

SEQ ID NO: 2448890 - RNA, 19 nt, Human
cgccccagauaccagcccc

SEQ ID NO: 2448891 - RNA, 13 nt, Human
cgccccacccaga

SEQ ID NO: 2448892 - RNA, 20 nt, Human
cgccaucccagccccaauga

SEQ ID NO: 2448893 - RNA, 15 nt, Human
cgccaugcuccuggc

SEQ ID NO: 2448894 - RNA, 22 nt, Human
cgcccaguuggguggaugccug

SEQ ID NO: 2448895 - RNA, 17 nt, Human
cgccaucccagccccaa

SEQ ID NO: 2448896 - RNA, 11 nt, Human
cgccagggccc

SEQ ID NO: 2448897 - RNA, 18 nt, Human
cuagugacccggaggcca

SEQ ID NO: 2448898 - RNA, 14 nt, Human
cuagugacccggag

SEQ ID NO: 2448899 - RNA, 18 nt, Human
cuagugacuuguguccca

SEQ ID NO: 2448900 - RNA, 21 nt, Human
cuagugagcagucaggaaaga

SEQ ID NO: 2448901 - RNA, 14 nt, Human
cuagugaaugaauc

SEQ ID NO: 2448902 - RNA, 21 nt, Human
cuagugaaggcuucucucugu

SEQ ID NO: 2448903 - RNA, 20 nt, Human
cuagucccuuccacaccccc

SEQ ID NO: 2448904 - RNA, 17 nt, Human
cuagugaaggcuucucu

SEQ ID NO: 2448905 - RNA, 15 nt, Human
cuagucccuuccccu

SEQ ID NO: 2448906 - RNA, 17 nt, Human
cuagucccuuccccucc

SEQ ID NO: 2448907 - RNA, 18 nt, Human
cuagugaaagaggcagcu

SEQ ID NO: 2448908 - RNA, 19 nt, Human
cuagugaaagaggcagcuu

SEQ ID NO: 2448909 - RNA, 20 nt, Human
cuagugaaacucguuaauuu

SEQ ID NO: 2448910 - RNA, 13 nt, Human
cuagucauaaccu

SEQ ID NO: 2448911 - RNA, 18 nt, Human
cuagucagagagaguguu

SEQ ID NO: 2448912 - RNA, 15 nt, Human
cuagucccuuccaca

SEQ ID NO: 2448913 - RNA, 14 nt, Human
cuaguccagugacc

SEQ ID NO: 2448914 - RNA, 14 nt, Human
cuagucccuucccc

SEQ ID NO: 2448915 - RNA, 16 nt, Human
cuaguaauuggaaagg

SEQ ID NO: 2448916 - RNA, 16 nt, Human
cuaguacuaacuccua

SEQ ID NO: 2448917 - RNA, 15 nt, Human
cuagucaagcuccuc

SEQ ID NO: 2448918 - RNA, 16 nt, Human
cuagucaagcuccucc

SEQ ID NO: 2448919 - RNA, 19 nt, Human
cuagucaagcuccuccucc

SEQ ID NO: 2448920 - RNA, 22 nt, Human
cuagucaagcuccuccucccug

SEQ ID NO: 2448921 - RNA, 23 nt, Human
cuagucaagcuccuccucccugc

SEQ ID NO: 2448922 - RNA, 13 nt, Human
cuagucagagaga

SEQ ID NO: 2448923 - RNA, 16 nt, Human
cuagucagagagagug

SEQ ID NO: 2448924 - RNA, 19 nt, Human
cuagguuuaacucagauca

SEQ ID NO: 2448925 - RNA, 18 nt, Human
cuagguuuaacucagauc

SEQ ID NO: 2448926 - RNA, 16 nt, Human
cuagguuuaacucaga

SEQ ID NO: 2448927 - RNA, 15 nt, Human
cuagguuuaacucag

SEQ ID NO: 2448928 - RNA, 14 nt, Human
cuagguuuaacuca

SEQ ID NO: 2448929 - RNA, 12 nt, Human
cuagguuuaacu

SEQ ID NO: 2448930 - RNA, 13 nt, Human
cuagguucuaaaa

SEQ ID NO: 2448931 - RNA, 16 nt, Human
cuaguaagugccuucc

SEQ ID NO: 2448932 - RNA, 15 nt, Human
cuaguaagugccuuc

SEQ ID NO: 2448933 - RNA, 18 nt, Human
cuaguaagugccuuccau

SEQ ID NO: 2448934 - RNA, 17 nt, Human
cuaguaagugccuucca

SEQ ID NO: 2448935 - RNA, 22 nt, Human
cuagguuuaacucagaucacua

SEQ ID NO: 2448936 - RNA, 20 nt, Human
cuagguuuaacucagaucac

SEQ ID NO: 2448937 - RNA, 16 nt, Human
cuaguaaaaauacaaa

SEQ ID NO: 2448938 - RNA, 14 nt, Human
cuagugcugugaaa

SEQ ID NO: 2448939 - RNA, 17 nt, Human
cuagugcugugaaaaaa

SEQ ID NO: 2448940 - RNA, 13 nt, Human
cuagugcugugaa

SEQ ID NO: 2448941 - RNA, 16 nt, Human
cuagugcaaaucauag

SEQ ID NO: 2448942 - RNA, 20 nt, Human
cuagugacuugugucccaug

SEQ ID NO: 2448943 - RNA, 19 nt, Human
cuagugacuugugucccau

SEQ ID NO: 2448944 - RNA, 13 nt, Human
cuagugcaaauca

SEQ ID NO: 2448945 - RNA, 22 nt, Human
cuaguggcuguccagugcccau

SEQ ID NO: 2448946 - RNA, 20 nt, Human
cuaguggcuguccagugccc

SEQ ID NO: 2448947 - RNA, 19 nt, Human
cuaguggcuguccagugcc

SEQ ID NO: 2448948 - RNA, 18 nt, Human
cuaguggcuguccagugc

SEQ ID NO: 2448949 - RNA, 17 nt, Human
cuaguggcuguccagug

SEQ ID NO: 2448950 - RNA, 16 nt, Human
cuaguggcuguccagu

SEQ ID NO: 2448951 - RNA, 15 nt, Human
cuaguggcuguccag

SEQ ID NO: 2448952 - RNA, 14 nt, Human
cuaguggcugucca

SEQ ID NO: 2448953 - RNA, 23 nt, Human
cuagugcuuuccuuuuuuaaaaa

SEQ ID NO: 2448954 - RNA, 21 nt, Human
cuagugcuuuccuuuuuuaaa

SEQ ID NO: 2448955 - RNA, 22 nt, Human
cuagugcuuuccuuuuuuaaaa

SEQ ID NO: 2448956 - RNA, 22 nt, Human
cuagugcugugaaaaaaaaaau

SEQ ID NO: 2448957 - RNA, 13 nt, Human
cuagugcuuuccu

SEQ ID NO: 2448958 - RNA, 13 nt, Human
cuagugcagcuga

SEQ ID NO: 2448959 - RNA, 19 nt, Human
cuauaaucccagcacuuug

SEQ ID NO: 2448960 - RNA, 15 nt, Human
cuaguggcuucaaaa

SEQ ID NO: 2448961 - RNA, 17 nt, Human
cuaguggggucucccuc

SEQ ID NO: 2448962 - RNA, 18 nt, Human
cuaguggggucucccucu

SEQ ID NO: 2448963 - RNA, 19 nt, Human
cuaguggggucucccucuc

SEQ ID NO: 2448964 - RNA, 20 nt, Human
cuaguggggucucccucucc

SEQ ID NO: 2448965 - RNA, 21 nt, Human
cuaguggggucucccucuccu

SEQ ID NO: 2448966 - RNA, 22 nt, Human
cuaguggggucucccucuccug

SEQ ID NO: 2448967 - RNA, 12 nt, Human
cuauaaugaagc

SEQ ID NO: 2448968 - RNA, 16 nt, Human
cuauaauguaagcucu

SEQ ID NO: 2448969 - RNA, 22 nt, Human
cuauaauuuaccugaagucuuu

SEQ ID NO: 2448970 - RNA, 19 nt, Human
cuauaaugaagcuuuauac

SEQ ID NO: 2448971 - RNA, 15 nt, Human
cuauaaugaagcuuu

SEQ ID NO: 2448972 - RNA, 21 nt, Human
cuauaauguaagcucuacuga

SEQ ID NO: 2448973 - RNA, 10 nt, Human
cuauagcacc

SEQ ID NO: 2448974 - RNA, 19 nt, Human
cuauagacccgaggaaacu

SEQ ID NO: 2448975 - RNA, 12 nt, Human
cuauagacucua

SEQ ID NO: 2448976 - RNA, 17 nt, Human
cuauacauaucuuuauu

SEQ ID NO: 2448977 - RNA, 20 nt, Human
cuauacauaucuuuauuaau

SEQ ID NO: 2448978 - RNA, 22 nt, Human
cuauacauaucuuuauuaauca

SEQ ID NO: 2448979 - RNA, 14 nt, Human
cuauacauaucuuu

SEQ ID NO: 2448980 - RNA, 15 nt, Human
cuauacauaucuuua

SEQ ID NO: 2448981 - RNA, 15 nt, Human
cuauacaacuggaca

SEQ ID NO: 2448982 - RNA, 14 nt, Human
cuaucuguguuuug

SEQ ID NO: 2448983 - RNA, 21 nt, Human
cuaucugucugguggccccgu

SEQ ID NO: 2448984 - RNA, 18 nt, Human
cuaucugucugguggccc

SEQ ID NO: 2448985 - RNA, 17 nt, Human
cuaucugucugguggcc

SEQ ID NO: 2448986 - RNA, 16 nt, Human
cuaucugucugguggc

SEQ ID NO: 2448987 - RNA, 14 nt, Human
cuaucugucuggug

SEQ ID NO: 2448988 - RNA, 11 nt, Human
cuaucugucug

SEQ ID NO: 2448989 - RNA, 21 nt, Human
cuaucuggucaaccuccugga

SEQ ID NO: 2448990 - RNA, 22 nt, Human
cuaucuggucaaccuccuggac

SEQ ID NO: 2448991 - RNA, 12 nt, Human
cuauauuugggc

SEQ ID NO: 2448992 - RNA, 22 nt, Human
cuauauuugggccugcuccaga

SEQ ID NO: 2448993 - RNA, 22 nt, Human
cuauauuuagauuguuaaaaua

SEQ ID NO: 2448994 - RNA, 23 nt, Human
cuauauuuagauuguuaaaauaa

SEQ ID NO: 2448995 - RNA, 12 nt, Human
cuauauuuacag

SEQ ID NO: 2448996 - RNA, 16 nt, Human
cuauauuuacagugaa

SEQ ID NO: 2448997 - RNA, 15 nt, Human
cuauauuuacaguga

SEQ ID NO: 2448998 - RNA, 13 nt, Human
cuauauuuagauu

SEQ ID NO: 2448999 - RNA, 16 nt, Human
cuauauuuaacaagau

SEQ ID NO: 2449000 - RNA, 15 nt, Human
cuauauuguacacac

SEQ ID NO: 2449001 - RNA, 14 nt, Human
cuauauuguacaca

SEQ ID NO: 2449002 - RNA, 21 nt, Human
cuauaggugcuacaaaaacac

SEQ ID NO: 2449003 - RNA, 22 nt, Human
cuauaggugcuacaaaaacaca

SEQ ID NO: 2449004 - RNA, 20 nt, Human
cuauaggugcuacaaaaaca

SEQ ID NO: 2449005 - RNA, 17 nt, Human
cuauagccuaggugaca

SEQ ID NO: 2449006 - RNA, 15 nt, Human
cuauagcccaggucc

SEQ ID NO: 2449007 - RNA, 19 nt, Human
cuauaugauuuauaguuug

SEQ ID NO: 2449008 - RNA, 12 nt, Human
cuauaugugaau

SEQ ID NO: 2449009 - RNA, 21 nt, Human
cuauauguaguauaaagaaaa

SEQ ID NO: 2449010 - RNA, 14 nt, Human
cuauauguacuugu

SEQ ID NO: 2449011 - RNA, 19 nt, Human
cuauauggcaagaaagcug

SEQ ID NO: 2449012 - RNA, 13 nt, Human
cuauauggcaaga

SEQ ID NO: 2449013 - RNA, 18 nt, Human
cuauauuguuugcuaagc

SEQ ID NO: 2449014 - RNA, 18 nt, Human
cuauaugugaauccucuu

SEQ ID NO: 2449015 - RNA, 21 nt, Human
cuauauguacuugucaaagaa

SEQ ID NO: 2449016 - RNA, 19 nt, Human
cuauauguuuguauaauga

SEQ ID NO: 2449017 - RNA, 13 nt, Human
cuauauuguacac

SEQ ID NO: 2449018 - RNA, 22 nt, Human
cuauuagccaggaucauggugu

SEQ ID NO: 2449019 - RNA, 16 nt, Human
cuauuagccaggauca

SEQ ID NO: 2449020 - RNA, 13 nt, Human
cuauuagccaguc

SEQ ID NO: 2449021 - RNA, 14 nt, Human
cuauuagacuguag

SEQ ID NO: 2449022 - RNA, 23 nt, Human
cuauuacugucugguuuuaacaa

SEQ ID NO: 2449023 - RNA, 16 nt, Human
cuauuagccacaaaau

SEQ ID NO: 2449024 - RNA, 18 nt, Human
cuauguaacaaaccugca

SEQ ID NO: 2449025 - RNA, 22 nt, Human
cuauguaaaugcaucuguccuc

SEQ ID NO: 2449026 - RNA, 17 nt, Human
cuauuaccaugagaaga

SEQ ID NO: 2449027 - RNA, 15 nt, Human
cuauuagagaagaga

SEQ ID NO: 2449028 - RNA, 18 nt, Human
cuauucaaacagucucag

SEQ ID NO: 2449029 - RNA, 16 nt, Human
cuauucaaacagucuc

SEQ ID NO: 2449030 - RNA, 23 nt, Human
cuauucaaacagucucaggaaau

SEQ ID NO: 2449031 - RNA, 17 nt, Human
cuauucaguucccagaa

SEQ ID NO: 2449032 - RNA, 23 nt, Human
cuauucaagguggccaaauuauu

SEQ ID NO: 2449033 - RNA, 13 nt, Human
cuauucagacaag

SEQ ID NO: 2449034 - RNA, 19 nt, Human
cuauucaguggcgagaaau

SEQ ID NO: 2449035 - RNA, 22 nt, Human
cuauucaagguggccaaauuau

SEQ ID NO: 2449036 - RNA, 11 nt, Human
cuauucacaac

SEQ ID NO: 2449037 - RNA, 21 nt, Human
cuauggugccaauggaaccuc

SEQ ID NO: 2449038 - RNA, 15 nt, Human
cuauggugccaaugg

SEQ ID NO: 2449039 - RNA, 14 nt, Human
cuauggugccaaug

SEQ ID NO: 2449040 - RNA, 21 nt, Human
cuauggugagaugcagcugga

SEQ ID NO: 2449041 - RNA, 20 nt, Human
cuauggugagaugcagcugg

SEQ ID NO: 2449042 - RNA, 19 nt, Human
cuauggugagaugcagcug

SEQ ID NO: 2449043 - RNA, 21 nt, Human
cuauggucgggagacagcauc

SEQ ID NO: 2449044 - RNA, 17 nt, Human
cuauggucgggagacag

SEQ ID NO: 2449045 - RNA, 12 nt, Human
cuauggucaucu

SEQ ID NO: 2449046 - RNA, 16 nt, Human
cuaugggagccccagg

SEQ ID NO: 2449047 - RNA, 19 nt, Human
cuaugggggcacugaggac

SEQ ID NO: 2449048 - RNA, 17 nt, Human
cuaugggagccccaggg

SEQ ID NO: 2449049 - RNA, 23 nt, Human
cuaugggacucaaugcacugaca

SEQ ID NO: 2449050 - RNA, 13 nt, Human
cuaugggagcccc

SEQ ID NO: 2449051 - RNA, 14 nt, Human
cuaugggagcccca

SEQ ID NO: 2449052 - RNA, 15 nt, Human
cuaugggagccccag

SEQ ID NO: 2449053 - RNA, 22 nt, Human
cuaugggacucaaugcacugac

SEQ ID NO: 2449054 - RNA, 18 nt, Human
cuaugggacucaaugcac

SEQ ID NO: 2449055 - RNA, 23 nt, Human
cuauggacggugcuccaggcagg

SEQ ID NO: 2449056 - RNA, 22 nt, Human
cuauggacggugcuccaggcag

SEQ ID NO: 2449057 - RNA, 19 nt, Human
cuauggacggugcuccagg

SEQ ID NO: 2449058 - RNA, 17 nt, Human
cuauggaagcauauugu

SEQ ID NO: 2449059 - RNA, 19 nt, Human
cuaugcugccuaggcugac

SEQ ID NO: 2449060 - RNA, 21 nt, Human
cuaugcugguaggcuccugcc

SEQ ID NO: 2449061 - RNA, 22 nt, Human
cuaugaucccagcacuuuggga

SEQ ID NO: 2449062 - RNA, 14 nt, Human
cuaugcugccuagg

SEQ ID NO: 2449063 - RNA, 13 nt, Human
cuauggccugugg

SEQ ID NO: 2449064 - RNA, 17 nt, Human
cuauggcuggccacugc

SEQ ID NO: 2449065 - RNA, 23 nt, Human
cuauggcuggccacugcacagag

SEQ ID NO: 2449066 - RNA, 14 nt, Human
cuauggauggcuuc

SEQ ID NO: 2449067 - RNA, 15 nt, Human
cuauggauggcuucu

SEQ ID NO: 2449068 - RNA, 10 nt, Human
cuauggaugu

SEQ ID NO: 2449069 - RNA, 16 nt, Human
cuauggauggcuucua

SEQ ID NO: 2449070 - RNA, 18 nt, Human
cuauggaugugggguccc

SEQ ID NO: 2449071 - RNA, 11 nt, Human
cuauggaugug

SEQ ID NO: 2449072 - RNA, 24 nt, Human
cuauggaugugggguccccaucau

SEQ ID NO: 2449073 - RNA, 21 nt, Human
cuaugcacauauggacucugc

SEQ ID NO: 2449074 - RNA, 20 nt, Human
cuaugcacauauggacucug

SEQ ID NO: 2449075 - RNA, 20 nt, Human
cuaugcagagguccacaaca

SEQ ID NO: 2449076 - RNA, 18 nt, Human
cuaugcacauauggacuc

SEQ ID NO: 2449077 - RNA, 13 nt, Human
cuaugcacauaug

SEQ ID NO: 2449078 - RNA, 23 nt, Human
cuaugauauuuucugugccugaa

SEQ ID NO: 2449079 - RNA, 21 nt, Human
cuaugaucccagcacuuuggg

SEQ ID NO: 2449080 - RNA, 20 nt, Human
cuaugcauggugccccagga

SEQ ID NO: 2449081 - RNA, 21 nt, Human
cuaugcauggugccccaggac

SEQ ID NO: 2449082 - RNA, 22 nt, Human
cuaugcauggugccccaggacc

SEQ ID NO: 2449083 - RNA, 23 nt, Human
cuaugcauggugccccaggacca

SEQ ID NO: 2449084 - RNA, 13 nt, Human
cuaugcauggugc

SEQ ID NO: 2449085 - RNA, 19 nt, Human
cuaugcauggugccccagg

SEQ ID NO: 2449086 - RNA, 22 nt, Human
cuaugcacauauggacucugca

SEQ ID NO: 2449087 - RNA, 20 nt, Human
cuaugcauaucaguugagcu

SEQ ID NO: 2449088 - RNA, 15 nt, Human
cuaugagggccuuga

SEQ ID NO: 2449089 - RNA, 17 nt, Human
cuaugagggccuugagu

SEQ ID NO: 2449090 - RNA, 20 nt, Human
cuaugauaugguaaaaguua

SEQ ID NO: 2449091 - RNA, 16 nt, Human
cuaucuguuuacagug

SEQ ID NO: 2449092 - RNA, 21 nt, Human
cuaugagaauugggauuacau

SEQ ID NO: 2449093 - RNA, 13 nt, Human
cuaugagggccuu

SEQ ID NO: 2449094 - RNA, 23 nt, Human
cuaugaggaauaauuauuuauuu

SEQ ID NO: 2449095 - RNA, 22 nt, Human
cuaugaggaauaauuauuuauu

SEQ ID NO: 2449096 - RNA, 14 nt, Human
gaggcugggcuccc

SEQ ID NO: 2449097 - RNA, 13 nt, Human
gaggcugggcucc

SEQ ID NO: 2449098 - RNA, 23 nt, Human
gaggcuaaauuacucaggaagaa

SEQ ID NO: 2449099 - RNA, 20 nt, Human
gaggcgggccagccaggcgg

SEQ ID NO: 2449100 - RNA, 19 nt, Human
gaggcggguggaucacuug

SEQ ID NO: 2449101 - RNA, 21 nt, Human
gaggcuuccugcguccuccuc

SEQ ID NO: 2449102 - RNA, 15 nt, Human
gaggcuuccugcguc

SEQ ID NO: 2449103 - RNA, 13 nt, Human
gaggcuuccugcg

SEQ ID NO: 2449104 - RNA, 23 nt, Human
gaggcuuccagagaguccucugg

SEQ ID NO: 2449105 - RNA, 18 nt, Human
gaggcuucuccgccagcc

SEQ ID NO: 2449106 - RNA, 15 nt, Human
gaggcuucuccgcca

SEQ ID NO: 2449107 - RNA, 14 nt, Human
gaggcuuccuucau

SEQ ID NO: 2449108 - RNA, 22 nt, Human
gaggcuuccagagaguccucug

SEQ ID NO: 2449109 - RNA, 21 nt, Human
gaggcuuccagagaguccucu

SEQ ID NO: 2449110 - RNA, 20 nt, Human
gaggcuuccagagaguccuc

SEQ ID NO: 2449111 - RNA, 16 nt, Human
gaggcuuccagagagu

SEQ ID NO: 2449112 - RNA, 22 nt, Human
gaggcuuagcuuugcucugcca

SEQ ID NO: 2449113 - RNA, 15 nt, Human
gaggcugggcucccu

SEQ ID NO: 2449114 - RNA, 17 nt, Human
gaggcuguucccaccag

SEQ ID NO: 2449115 - RNA, 14 nt, Human
gaggccuucucuga

SEQ ID NO: 2449116 - RNA, 19 nt, Human
gaggcggaucuuuggacag

SEQ ID NO: 2449117 - RNA, 19 nt, Human
gaggcggagaguacaguga

SEQ ID NO: 2449118 - RNA, 20 nt, Human
gaggccuuaucauucauucu

SEQ ID NO: 2449119 - RNA, 20 nt, Human
gaggcggagcuugcagugag

SEQ ID NO: 2449120 - RNA, 19 nt, Human
gaggcgggccagccaggcg

SEQ ID NO: 2449121 - RNA, 17 nt, Human
gaggcgggccagccagg

SEQ ID NO: 2449122 - RNA, 16 nt, Human
gaggcgggccagccag

SEQ ID NO: 2449123 - RNA, 15 nt, Human
gaggcgggccagcca

SEQ ID NO: 2449124 - RNA, 12 nt, Human
gaggcgggugga

SEQ ID NO: 2449125 - RNA, 19 nt, Human
gaggcggguggaucaccug

SEQ ID NO: 2449126 - RNA, 14 nt, Human
gaggcgggccagcc

SEQ ID NO: 2449127 - RNA, 13 nt, Human
gaggcgggccagc

SEQ ID NO: 2449128 - RNA, 20 nt, Human
gaggcgggagaaucauguga

SEQ ID NO: 2449129 - RNA, 15 nt, Human
gaggcgggagaauca

SEQ ID NO: 2449130 - RNA, 20 nt, Human
gaggccugggccgcugccac

SEQ ID NO: 2449131 - RNA, 16 nt, Human
gaggccugggccgcug

SEQ ID NO: 2449132 - RNA, 16 nt, Human
gaggccuggccaggca

SEQ ID NO: 2449133 - RNA, 15 nt, Human
gaggccuggccaggc

SEQ ID NO: 2449134 - RNA, 14 nt, Human
gaggccugggccgc

SEQ ID NO: 2449135 - RNA, 14 nt, Human
gaggccuggccagg

SEQ ID NO: 2449136 - RNA, 13 nt, Human
gaggccuggccag

SEQ ID NO: 2449137 - RNA, 18 nt, Human
gaggccuggaguaacaca

SEQ ID NO: 2449138 - RNA, 23 nt, Human
gaggccugcccucagggaucuug

SEQ ID NO: 2449139 - RNA, 20 nt, Human
gaggccuggacuuuccugca

SEQ ID NO: 2449140 - RNA, 19 nt, Human
gaggccuggacuuuccugc

SEQ ID NO: 2449141 - RNA, 17 nt, Human
gaggccuggccaggcac

SEQ ID NO: 2449142 - RNA, 22 nt, Human
gaggccugggccgcugccacgu

SEQ ID NO: 2449143 - RNA, 21 nt, Human
gaggccugggccgcugccacg

SEQ ID NO: 2449144 - RNA, 18 nt, Human
gaggccuuaucauucauu

SEQ ID NO: 2449145 - RNA, 23 nt, Human
gaggcccuucucuccagccccug

SEQ ID NO: 2449146 - RNA, 14 nt, Human
gaggcccuucucuc

SEQ ID NO: 2449147 - RNA, 24 nt, Human
gaggcccuucucuccagccccugg

SEQ ID NO: 2449148 - RNA, 22 nt, Human
gaggcccuucucuccagccccu

SEQ ID NO: 2449149 - RNA, 20 nt, Human
gaggccugcccucagggauc

SEQ ID NO: 2449150 - RNA, 16 nt, Human
gaggccugcccgggcg

SEQ ID NO: 2449151 - RNA, 13 nt, Human
gaggccugcccgg

SEQ ID NO: 2449152 - RNA, 12 nt, Human
gaggccugcccg

SEQ ID NO: 2449153 - RNA, 20 nt, Human
gaggccugccuccagggcug

SEQ ID NO: 2449154 - RNA, 19 nt, Human
gaggccugccuccagggcu

SEQ ID NO: 2449155 - RNA, 18 nt, Human
gaggccuggacuuuccug

SEQ ID NO: 2449156 - RNA, 13 nt, Human
gaggccuggacuu

SEQ ID NO: 2449157 - RNA, 22 nt, Human
gaggccugccuccagggcugga

SEQ ID NO: 2449158 - RNA, 21 nt, Human
gaggccugccuccagggcugg

SEQ ID NO: 2449159 - RNA, 22 nt, Human
gaggccugaggaugagcuggaa

SEQ ID NO: 2449160 - RNA, 21 nt, Human
gaggccugaggaugagcugga

SEQ ID NO: 2449161 - RNA, 20 nt, Human
gaggccugaggaugagcugg

SEQ ID NO: 2449162 - RNA, 13 nt, Human
gaggccugaggau

SEQ ID NO: 2449163 - RNA, 20 nt, Human
gaggccugagcgcuccugcc

SEQ ID NO: 2449164 - RNA, 22 nt, Human
gaggccgcuagaggccugagga

SEQ ID NO: 2449165 - RNA, 20 nt, Human
gaggccgcuagaggccugag

SEQ ID NO: 2449166 - RNA, 15 nt, Human
gaggccgcuagaggc

SEQ ID NO: 2449167 - RNA, 16 nt, Human
gaggccggggccgggu

SEQ ID NO: 2449168 - RNA, 19 nt, Human
gaggccgggugcucagggc

SEQ ID NO: 2449169 - RNA, 20 nt, Human
gaggcccucgggcccagccc

SEQ ID NO: 2449170 - RNA, 19 nt, Human
gaggcccucgggcccagcc

SEQ ID NO: 2449171 - RNA, 18 nt, Human
gaggcccucgggcccagc

SEQ ID NO: 2449172 - RNA, 17 nt, Human
gaggcccucgggcccag

SEQ ID NO: 2449173 - RNA, 19 nt, Human
gaggcccucuggaguggcc

SEQ ID NO: 2449174 - RNA, 21 nt, Human
gaggcccucgggcccagcccc

SEQ ID NO: 2449175 - RNA, 17 nt, Human
gaggcccucuggagugg

SEQ ID NO: 2449176 - RNA, 16 nt, Human
gaggcccucgggccca

SEQ ID NO: 2449177 - RNA, 17 nt, Human
gaggcccucgcugccag

SEQ ID NO: 2449178 - RNA, 13 nt, Human
gaggcccggccuc

SEQ ID NO: 2449179 - RNA, 20 nt, Human
gaggcccgcaugcggcccag

SEQ ID NO: 2449180 - RNA, 22 nt, Human
gaggccccuauguaguccgugc

SEQ ID NO: 2449181 - RNA, 21 nt, Human
gaggcccccagcccagggcuc

SEQ ID NO: 2449182 - RNA, 17 nt, Human
gaggccaguaccuuucc

SEQ ID NO: 2449183 - RNA, 24 nt, Human
gaggccccuauguaguccgugcug

SEQ ID NO: 2449184 - RNA, 20 nt, Human
gaggccccuucuagguggca

SEQ ID NO: 2449185 - RNA, 19 nt, Human
gaggccccuucuagguggc

SEQ ID NO: 2449186 - RNA, 15 nt, Human
gaggccccuggccca

SEQ ID NO: 2449187 - RNA, 13 nt, Human
gaggccccuggac

SEQ ID NO: 2449188 - RNA, 20 nt, Human
gaggccccugucucagggug

SEQ ID NO: 2449189 - RNA, 20 nt, Human
gaggcccccagcccagggcu

SEQ ID NO: 2449190 - RNA, 19 nt, Human
gaggcccccagcccagggc

SEQ ID NO: 2449191 - RNA, 17 nt, Human
gaggcccccagcccagg

SEQ ID NO: 2449192 - RNA, 16 nt, Human
gaggcccccagcccag

SEQ ID NO: 2449193 - RNA, 14 nt, Human
gaggccaggugcag

SEQ ID NO: 2449194 - RNA, 19 nt, Human
gaggccagggcagagugag

SEQ ID NO: 2449195 - RNA, 15 nt, Human
gaggcccccagccca

SEQ ID NO: 2449196 - RNA, 16 nt, Human
gagggagggcuccaga

SEQ ID NO: 2449197 - RNA, 14 nt, Human
gagggagugacaga

SEQ ID NO: 2449198 - RNA, 14 nt, Human
gagggagguaagga

SEQ ID NO: 2449199 - RNA, 13 nt, Human
gagggagugacag

SEQ ID NO: 2449200 - RNA, 22 nt, Human
gagggcacagaaaauggaagac

SEQ ID NO: 2449201 - RNA, 14 nt, Human
gagggcacagaaaa

SEQ ID NO: 2449202 - RNA, 23 nt, Human
gagggcacagaaaauggaagaca

SEQ ID NO: 2449203 - RNA, 20 nt, Human
gagggcacauuccuugccug

SEQ ID NO: 2449204 - RNA, 23 nt, Human
gagggagguguuuaaagagaggu

SEQ ID NO: 2449205 - RNA, 18 nt, Human
gagggagguguuuaaaga

SEQ ID NO: 2449206 - RNA, 15 nt, Human
gagggagguguuuaa

SEQ ID NO: 2449207 - RNA, 12 nt, Human
gagggcacuggu

SEQ ID NO: 2449208 - RNA, 20 nt, Human
gaggggccuggcagccgugc

SEQ ID NO: 2449209 - RNA, 18 nt, Human
gaggggccuggcagccgu

SEQ ID NO: 2449210 - RNA, 14 nt, Human
gaggggccuggcag

SEQ ID NO: 2449211 - RNA, 13 nt, Human
gaggggccuggca

SEQ ID NO: 2449212 - RNA, 22 nt, Human
gaggggccucuuaugggcuggg

SEQ ID NO: 2449213 - RNA, 16 nt, Human
gagggcagaggcugga

SEQ ID NO: 2449214 - RNA, 22 nt, Human
gagggcagaaagguucugcccg

SEQ ID NO: 2449215 - RNA, 21 nt, Human
gagggcagaaagguucugccc

SEQ ID NO: 2449216 - RNA, 20 nt, Human
gagggcagaaagguucugcc

SEQ ID NO: 2449217 - RNA, 17 nt, Human
gagggcagaaagguucu

SEQ ID NO: 2449218 - RNA, 15 nt, Human
gagggcacuggagcu

SEQ ID NO: 2449219 - RNA, 23 nt, Human
gagggcacauuccuugccugcac

SEQ ID NO: 2449220 - RNA, 18 nt, Human
gagggcacugguggcccg

SEQ ID NO: 2449221 - RNA, 16 nt, Human
gagggcacugguggcc

SEQ ID NO: 2449222 - RNA, 22 nt, Human
gagggcagcagaaggggguggu

SEQ ID NO: 2449223 - RNA, 21 nt, Human
gagggcagcagaagggggugg

SEQ ID NO: 2449224 - RNA, 12 nt, Human
gaggggccucuu

SEQ ID NO: 2449225 - RNA, 19 nt, Human
gagggcagcagaagggggu

SEQ ID NO: 2449226 - RNA, 15 nt, Human
gagggcagaggcugg

SEQ ID NO: 2449227 - RNA, 23 nt, Human
gagggcagaaagguucugcccgg

SEQ ID NO: 2449228 - RNA, 14 nt, Human
gagggcagaggcug

SEQ ID NO: 2449229 - RNA, 20 nt, Human
gaggcuuuggauuugacauu

SEQ ID NO: 2449230 - RNA, 21 nt, Human
gagggaaagcccagaaaagga

SEQ ID NO: 2449231 - RNA, 14 nt, Human
gaggcuuuggauuu

SEQ ID NO: 2449232 - RNA, 16 nt, Human
gaggcuuuggauuuga

SEQ ID NO: 2449233 - RNA, 19 nt, Human
gaggcuugucagagcuggg

SEQ ID NO: 2449234 - RNA, 21 nt, Human
gaggcuugucagagcugggag

SEQ ID NO: 2449235 - RNA, 17 nt, Human
gaggcuugucagagcug

SEQ ID NO: 2449236 - RNA, 22 nt, Human
gaggcuugggaccgccagaugg

SEQ ID NO: 2449237 - RNA, 18 nt, Human
gaggcuugucagagcugg

SEQ ID NO: 2449238 - RNA, 18 nt, Human
gaggcuugggaccgccag

SEQ ID NO: 2449239 - RNA, 20 nt, Human
gaggcuugcugagaggggcu

SEQ ID NO: 2449240 - RNA, 15 nt, Human
gaggcuuggaaagca

SEQ ID NO: 2449241 - RNA, 22 nt, Human
gaggcuucuccgccagccuccu

SEQ ID NO: 2449242 - RNA, 21 nt, Human
gaggcuucuccgccagccucc

SEQ ID NO: 2449243 - RNA, 20 nt, Human
gaggcuucuccgccagccuc

SEQ ID NO: 2449244 - RNA, 19 nt, Human
gaggcuucuccgccagccu

SEQ ID NO: 2449245 - RNA, 23 nt, Human
gaggcuucuccgccagccuccuc

SEQ ID NO: 2449246 - RNA, 16 nt, Human
gaggcuucuucagauc

SEQ ID NO: 2449247 - RNA, 15 nt, Human
gaggcuugcugagag

SEQ ID NO: 2449248 - RNA, 22 nt, Human
gaggcuucuucagaucagugcu

SEQ ID NO: 2449249 - RNA, 17 nt, Human
gagggaccaacugggcc

SEQ ID NO: 2449250 - RNA, 18 nt, Human
gagggaccaacugggccc

SEQ ID NO: 2449251 - RNA, 19 nt, Human
gagggaccaacugggccca

SEQ ID NO: 2449252 - RNA, 16 nt, Human
gagggaaugaaccugg

SEQ ID NO: 2449253 - RNA, 21 nt, Human
gagggaauccccgaaggugcu

SEQ ID NO: 2449254 - RNA, 18 nt, Human
gagggaauugaggucugc

SEQ ID NO: 2449255 - RNA, 19 nt, Human
gagggaacagacaggagaa

SEQ ID NO: 2449256 - RNA, 15 nt, Human
gagggaacagacagg

SEQ ID NO: 2449257 - RNA, 18 nt, Human
gagggaacagacaggaga

SEQ ID NO: 2449258 - RNA, 15 nt, Human
gagggagggcuccag

SEQ ID NO: 2449259 - RNA, 15 nt, Human
gagggagggagggcu

SEQ ID NO: 2449260 - RNA, 17 nt, Human
gagggaggcaagcccug

SEQ ID NO: 2449261 - RNA, 14 nt, Human
gagggagggagggc

SEQ ID NO: 2449262 - RNA, 21 nt, Human
gagggacucugaagccucugg

SEQ ID NO: 2449263 - RNA, 20 nt, Human
gagggacucugaagccucug

SEQ ID NO: 2449264 - RNA, 19 nt, Human
gagggacucugaagccucu

SEQ ID NO: 2449265 - RNA, 18 nt, Human
gagggacucugaagccuc

SEQ ID NO: 2449266 - RNA, 23 nt, Human
gagggacucugaagccucuggga

SEQ ID NO: 2449267 - RNA, 22 nt, Human
gagggacucugaagccucuggg

SEQ ID NO: 2449268 - RNA, 16 nt, Human
gagggacgccuggggg

SEQ ID NO: 2449269 - RNA, 23 nt, Human
gagggacgccugggggugccagg

SEQ ID NO: 2449270 - RNA, 14 nt, Human
gagggacucugaag

SEQ ID NO: 2449271 - RNA, 12 nt, Human
gagggaccagcc

SEQ ID NO: 2449272 - RNA, 16 nt, Human
gagggaccagccaaga

SEQ ID NO: 2449273 - RNA, 13 nt, Human
gagggaccucucc

SEQ ID NO: 2449274 - RNA, 14 nt, Human
gagggaccucuccc

SEQ ID NO: 2449275 - RNA, 15 nt, Human
gagggaccucuccca

SEQ ID NO: 2449276 - RNA, 14 nt, Human
gagggacgccuggg

SEQ ID NO: 2449277 - RNA, 15 nt, Human
gagggacgccugggg

SEQ ID NO: 2449278 - RNA, 17 nt, Human
gagggaccucucccagg

SEQ ID NO: 2449279 - RNA, 18 nt, Human
gagggaccucucccaggg

SEQ ID NO: 2449280 - RNA, 13 nt, Human
gaggccagccuug

SEQ ID NO: 2449281 - RNA, 13 nt, Human
gaggccagggcag

SEQ ID NO: 2449282 - RNA, 15 nt, Human
gaggccagggcagag

SEQ ID NO: 2449283 - RNA, 12 nt, Human
gaggccaggagu

SEQ ID NO: 2449284 - RNA, 22 nt, Human
gaggccaggaguuugagaccag

SEQ ID NO: 2449285 - RNA, 12 nt, Human
gaggccagccuu

SEQ ID NO: 2449286 - RNA, 23 nt, Human
gaggcaggaggauugcuugagcc

SEQ ID NO: 2449287 - RNA, 22 nt, Human
gaggcagccccauucugccugc

SEQ ID NO: 2449288 - RNA, 23 nt, Human
gaggcagcgugaaagcagaugag

SEQ ID NO: 2449289 - RNA, 21 nt, Human
gaggcagcgugaaagcagaug

SEQ ID NO: 2449290 - RNA, 23 nt, Human
gaggcagccccauucugccugcc

SEQ ID NO: 2449291 - RNA, 13 nt, Human
gaggcagcagugu

SEQ ID NO: 2449292 - RNA, 20 nt, Human
gaggcagcagugugaggcca

SEQ ID NO: 2449293 - RNA, 21 nt, Human
gaggcagcagugugaggccag

SEQ ID NO: 2449294 - RNA, 22 nt, Human
gaggcagcagugugaggccagg

SEQ ID NO: 2449295 - RNA, 13 nt, Human
gaggcagccccau

SEQ ID NO: 2449296 - RNA, 12 nt, Human
gaggcagacagc

SEQ ID NO: 2449297 - RNA, 15 nt, Human
gaggcagacagcagc

SEQ ID NO: 2449298 - RNA, 16 nt, Human
gaggcagacagcagcu

SEQ ID NO: 2449299 - RNA, 19 nt, Human
gaggcagagguugcaguga

SEQ ID NO: 2449300 - RNA, 20 nt, Human
gaggcagaaaauugcacaau

SEQ ID NO: 2449301 - RNA, 16 nt, Human
gaggcagaaaauugca

SEQ ID NO: 2449302 - RNA, 18 nt, Human
gaggcacugaagugcuua

SEQ ID NO: 2449303 - RNA, 23 nt, Human
gaggcagaagaauugaacccagg

SEQ ID NO: 2449304 - RNA, 18 nt, Human
gaggauugcuugagccca

SEQ ID NO: 2449305 - RNA, 19 nt, Human
gaggauugcuugagcccag

SEQ ID NO: 2449306 - RNA, 22 nt, Human
gaggauugcuugagcccaggag

SEQ ID NO: 2449307 - RNA, 21 nt, Human
gaggcaaugucaggaacagaa

SEQ ID NO: 2449308 - RNA, 23 nt, Human
gaggcaaugucaggaacagaagg

SEQ ID NO: 2449309 - RNA, 24 nt, Human
gaggcacacagcugcagagacaga

SEQ ID NO: 2449310 - RNA, 20 nt, Human
gaggcacacagcugcagaga

SEQ ID NO: 2449311 - RNA, 14 nt, Human
gaggaugggcucgc

SEQ ID NO: 2449312 - RNA, 13 nt, Human
gaggaugggcucg

SEQ ID NO: 2449313 - RNA, 16 nt, Human
gaggauucuaugaggc

SEQ ID NO: 2449314 - RNA, 17 nt, Human
gaggauucuaugaggca

SEQ ID NO: 2449315 - RNA, 16 nt, Human
gaggauugcuugagcu

SEQ ID NO: 2449316 - RNA, 20 nt, Human
gaggauguucugggacacag

SEQ ID NO: 2449317 - RNA, 17 nt, Human
gaggauguucugggaca

SEQ ID NO: 2449318 - RNA, 20 nt, Human
gaggauggccucugcuaagc

SEQ ID NO: 2449319 - RNA, 15 nt, Human
gaggaugggaaggag

SEQ ID NO: 2449320 - RNA, 19 nt, Human
gaggaugggaaggagggag

SEQ ID NO: 2449321 - RNA, 17 nt, Human
gaggaucacuggagccc

SEQ ID NO: 2449322 - RNA, 20 nt, Human
gaggauggccagugucuguc

SEQ ID NO: 2449323 - RNA, 18 nt, Human
gaggauauauuuucacuu

SEQ ID NO: 2449324 - RNA, 20 nt, Human
gaggaguuucgagguagagu

SEQ ID NO: 2449325 - RNA, 23 nt, Human
gaggauaggaguucacuucaucu

SEQ ID NO: 2449326 - RNA, 19 nt, Human
gaggaucacagugcugaga

SEQ ID NO: 2449327 - RNA, 18 nt, Human
gaggaucacagugcugag

SEQ ID NO: 2449328 - RNA, 16 nt, Human
gaggaucacuggagcc

SEQ ID NO: 2449329 - RNA, 12 nt, Human
gaggauguucug

SEQ ID NO: 2449330 - RNA, 15 nt, Human
gaggaugucugggcc

SEQ ID NO: 2449331 - RNA, 20 nt, Human
gaggaugucacucagaugga

SEQ ID NO: 2449332 - RNA, 15 nt, Human
gaggaguacagguga

SEQ ID NO: 2449333 - RNA, 14 nt, Human
gaggagucuugugu

SEQ ID NO: 2449334 - RNA, 12 nt, Human
gaggaguucaau

SEQ ID NO: 2449335 - RNA, 11 nt, Human
gaggaguucaa

SEQ ID NO: 2449336 - RNA, 13 nt, Human
gaggagugaggaa

SEQ ID NO: 2449337 - RNA, 23 nt, Human
gaggaguuugggguaugggagag

SEQ ID NO: 2449338 - RNA, 17 nt, Human
gaggaguucaaugaucu

SEQ ID NO: 2449339 - RNA, 16 nt, Human
gaggaguucaaugauc

SEQ ID NO: 2449340 - RNA, 15 nt, Human
gaggaguucaaugau

SEQ ID NO: 2449341 - RNA, 14 nt, Human
gaggaguucaauga

SEQ ID NO: 2449342 - RNA, 19 nt, Human
gaggaguucaaugaucuag

SEQ ID NO: 2449343 - RNA, 18 nt, Human
gaggaguucaaugaucua

SEQ ID NO: 2449344 - RNA, 16 nt, Human
gaggaguuucgaggua

SEQ ID NO: 2449345 - RNA, 20 nt, Human
gaggagguggcagcccugua

SEQ ID NO: 2449346 - RNA, 22 nt, Human
gaggagguggcagcccuguagg

SEQ ID NO: 2449347 - RNA, 20 nt, Human
gaggagguuuggggucugcc

SEQ ID NO: 2449348 - RNA, 17 nt, Human
gaggagguuuaggucaa

SEQ ID NO: 2449349 - RNA, 18 nt, Human
gaggaggggccgcugcca

SEQ ID NO: 2449350 - RNA, 16 nt, Human
gaggaggggccgcugc

SEQ ID NO: 2449351 - RNA, 17 nt, Human
gaggaggggccgcugcc

SEQ ID NO: 2449352 - RNA, 17 nt, Human
gaggagggcggggggca

SEQ ID NO: 2449353 - RNA, 15 nt, Human
gaggagguggcagcc

SEQ ID NO: 2449354 - RNA, 18 nt, Human
gaggagguggcagcccug

SEQ ID NO: 2449355 - RNA, 19 nt, Human
gaggagguaaugaauuaaa

SEQ ID NO: 2449356 - RNA, 22 nt, Human
gaggaauuuucuuuguguagcu

SEQ ID NO: 2449357 - RNA, 14 nt, Human
gaggaauuucaccu

SEQ ID NO: 2449358 - RNA, 15 nt, Human
gaggacaaccauucc

SEQ ID NO: 2449359 - RNA, 20 nt, Human
gaggacaauucaugaacuuc

SEQ ID NO: 2449360 - RNA, 19 nt, Human
gaggacaauucaugaacuu

SEQ ID NO: 2449361 - RNA, 12 nt, Human
gaggacaauuca

SEQ ID NO: 2449362 - RNA, 14 nt, Human
gaggaauguauaug

SEQ ID NO: 2449363 - RNA, 13 nt, Human
gaggaauguauau

SEQ ID NO: 2449364 - RNA, 15 nt, Human
gaggaaugcuccccc

SEQ ID NO: 2449365 - RNA, 14 nt, Human
gaggaauggacaga

SEQ ID NO: 2449366 - RNA, 21 nt, Human
gaggaaugcucccccauccuc

SEQ ID NO: 2449367 - RNA, 17 nt, Human
gaggaaugaugaagcuu

SEQ ID NO: 2449368 - RNA, 13 nt, Human
gaggaaugcuccc

SEQ ID NO: 2449369 - RNA, 15 nt, Human
gaggaauccagaccc

SEQ ID NO: 2449370 - RNA, 20 nt, Human
gaggaaucgaggaaccagag

SEQ ID NO: 2449371 - RNA, 14 nt, Human
gaggaauccagacc

SEQ ID NO: 2449372 - RNA, 22 nt, Human
gaggaaucaugucaggccugug

SEQ ID NO: 2449373 - RNA, 21 nt, Human
gaggaaucaugucaggccugu

SEQ ID NO: 2449374 - RNA, 20 nt, Human
gaggaaucaugucaggccug

SEQ ID NO: 2449375 - RNA, 22 nt, Human
gaggaaucacucuuguggaugu

SEQ ID NO: 2449376 - RNA, 13 nt, Human
gaggaauaucaau

SEQ ID NO: 2449377 - RNA, 21 nt, Human
gaggaauaauuauuuauuuaa

SEQ ID NO: 2449378 - RNA, 23 nt, Human
gaggaauaugacggaagaacaua

SEQ ID NO: 2449379 - RNA, 19 nt, Human
gaggaaucacucuugugga

SEQ ID NO: 2449380 - RNA, 13 nt, Human
gaggaaggcaaga

SEQ ID NO: 2449381 - RNA, 16 nt, Human
gaggaaggauuguaaa

SEQ ID NO: 2449382 - RNA, 15 nt, Human
gaggaaggauuguaa

SEQ ID NO: 2449383 - RNA, 14 nt, Human
gaggaaggauugua

SEQ ID NO: 2449384 - RNA, 16 nt, Human
gaggaaggcaggaaga

SEQ ID NO: 2449385 - RNA, 21 nt, Human
gaggaaggcaagagggggugg

SEQ ID NO: 2449386 - RNA, 19 nt, Human
gaggaaggggccagaggcu

SEQ ID NO: 2449387 - RNA, 17 nt, Human
gaggaauaauuauuuau

SEQ ID NO: 2449388 - RNA, 19 nt, Human
gaggaauaguugagcccca

SEQ ID NO: 2449389 - RNA, 18 nt, Human
gaggaauaauuauuuauu

SEQ ID NO: 2449390 - RNA, 16 nt, Human
gaggaaggagagaagg

SEQ ID NO: 2449391 - RNA, 14 nt, Human
gaggaaggagagaa

SEQ ID NO: 2449392 - RNA, 22 nt, Human
gaggaaggaaacccagcucugg

SEQ ID NO: 2449393 - RNA, 21 nt, Human
gagcuucuguugcugccucau

SEQ ID NO: 2449394 - RNA, 22 nt, Human
gagcuucuuccaggugcccagc

SEQ ID NO: 2449395 - RNA, 15 nt, Human
gaggagccccagcua

SEQ ID NO: 2449396 - RNA, 14 nt, Human
gaggagccccagcu

SEQ ID NO: 2449397 - RNA, 18 nt, Human
gaggacagcuugagccgg

SEQ ID NO: 2449398 - RNA, 15 nt, Human
gaggacagcuugagc

SEQ ID NO: 2449399 - RNA, 14 nt, Human
gaggacagcugucc

SEQ ID NO: 2449400 - RNA, 17 nt, Human
gaggagcagugcaggca

SEQ ID NO: 2449401 - RNA, 23 nt, Human
gaggacagggaggugaccccagg

SEQ ID NO: 2449402 - RNA, 22 nt, Human
gaggacagggaggugaccccag

SEQ ID NO: 2449403 - RNA, 13 nt, Human
gaggacagcuguc

SEQ ID NO: 2449404 - RNA, 21 nt, Human
gaggacaauucaugaacuucg

SEQ ID NO: 2449405 - RNA, 13 nt, Human
gaggacagggagg

SEQ ID NO: 2449406 - RNA, 20 nt, Human
gaggaggccaccucuccaag

SEQ ID NO: 2449407 - RNA, 19 nt, Human
gaggaggccaccucuccaa

SEQ ID NO: 2449408 - RNA, 18 nt, Human
gaggaggccaccucucca

SEQ ID NO: 2449409 - RNA, 16 nt, Human
gaggaggccaccucuc

SEQ ID NO: 2449410 - RNA, 15 nt, Human
gaggaggccaccucu

SEQ ID NO: 2449411 - RNA, 14 nt, Human
gaggaggccaccuc

SEQ ID NO: 2449412 - RNA, 12 nt, Human
gaggaggccacc

SEQ ID NO: 2449413 - RNA, 17 nt, Human
gaggagggagagggagg

SEQ ID NO: 2449414 - RNA, 11 nt, Human
gaggagggaga

SEQ ID NO: 2449415 - RNA, 18 nt, Human
gaggaggcuccagagggc

SEQ ID NO: 2449416 - RNA, 21 nt, Human
gaggaggccugggggcaggga

SEQ ID NO: 2449417 - RNA, 13 nt, Human
gaggaggccucca

SEQ ID NO: 2449418 - RNA, 19 nt, Human
gaggagggaugcugccuga

SEQ ID NO: 2449419 - RNA, 20 nt, Human
gaggagggcgugacucaccc

SEQ ID NO: 2449420 - RNA, 15 nt, Human
gaggagcuuggggga

SEQ ID NO: 2449421 - RNA, 21 nt, Human
gaggagcuugggggaugacua

SEQ ID NO: 2449422 - RNA, 13 nt, Human
gaggaggaaggca

SEQ ID NO: 2449423 - RNA, 19 nt, Human
gaggaggaaggagagaagg

SEQ ID NO: 2449424 - RNA, 14 nt, Human
gaggaggaggaggu

SEQ ID NO: 2449425 - RNA, 16 nt, Human
gaggaggaaggcaaga

SEQ ID NO: 2449426 - RNA, 18 nt, Human
gaggaggcaauugggaug

SEQ ID NO: 2449427 - RNA, 11 nt, Human
gaggagcugcu

SEQ ID NO: 2449428 - RNA, 12 nt, Human
gaggagcugcug

SEQ ID NO: 2449429 - RNA, 13 nt, Human
gaggagcugcugg

SEQ ID NO: 2449430 - RNA, 15 nt, Human
gaggagcugcuggcu

SEQ ID NO: 2449431 - RNA, 18 nt, Human
gaggagcucaggacacua

SEQ ID NO: 2449432 - RNA, 18 nt, Human
gagcagccacauuccuga

SEQ ID NO: 2449433 - RNA, 21 nt, Human
gagcagacaggaggaaucaug

SEQ ID NO: 2449434 - RNA, 15 nt, Human
gagcagacaggagga

SEQ ID NO: 2449435 - RNA, 22 nt, Human
gagcagaccaccccgccugccc

SEQ ID NO: 2449436 - RNA, 11 nt, Human
gagcagagucu

SEQ ID NO: 2449437 - RNA, 20 nt, Human
gagcagagucuugcuaccuc

SEQ ID NO: 2449438 - RNA, 16 nt, Human
gagcagaggggcugaa

SEQ ID NO: 2449439 - RNA, 18 nt, Human
gagcagaugcagagagcc

SEQ ID NO: 2449440 - RNA, 16 nt, Human
gagcagaugcagagag

SEQ ID NO: 2449441 - RNA, 14 nt, Human
gagcagaugcagag

SEQ ID NO: 2449442 - RNA, 21 nt, Human
gagcagaugcagagagccauu

SEQ ID NO: 2449443 - RNA, 19 nt, Human
gagcagaugcagagagcca

SEQ ID NO: 2449444 - RNA, 19 nt, Human
gagcacuuaagagaauauu

SEQ ID NO: 2449445 - RNA, 18 nt, Human
gagcacuuaagagaauau

SEQ ID NO: 2449446 - RNA, 14 nt, Human
gagcacuugcugua

SEQ ID NO: 2449447 - RNA, 23 nt, Human
gagcagaacggagccccaggccu

SEQ ID NO: 2449448 - RNA, 17 nt, Human
gagcagaaguggagcug

SEQ ID NO: 2449449 - RNA, 14 nt, Human
gagcagacaggagg

SEQ ID NO: 2449450 - RNA, 15 nt, Human
gagcacuuaagagaa

SEQ ID NO: 2449451 - RNA, 16 nt, Human
gagcacuuaagagaau

SEQ ID NO: 2449452 - RNA, 17 nt, Human
gagcacuggguugacuu

SEQ ID NO: 2449453 - RNA, 12 nt, Human
gagcaccugcuu

SEQ ID NO: 2449454 - RNA, 14 nt, Human
gagcacuggagugc

SEQ ID NO: 2449455 - RNA, 20 nt, Human
gagcacuggagugcagggag

SEQ ID NO: 2449456 - RNA, 23 nt, Human
gagcaccugcuucaugcucagcc

SEQ ID NO: 2449457 - RNA, 13 nt, Human
gagcacuggguug

SEQ ID NO: 2449458 - RNA, 18 nt, Human
gagcaggagauugagaag

SEQ ID NO: 2449459 - RNA, 19 nt, Human
gagcaggacucuauuuuaa

SEQ ID NO: 2449460 - RNA, 17 nt, Human
gagcagcagugaaaaca

SEQ ID NO: 2449461 - RNA, 16 nt, Human
gagcagcagugaaaac

SEQ ID NO: 2449462 - RNA, 16 nt, Human
gagcaggaggccccug

SEQ ID NO: 2449463 - RNA, 23 nt, Human
gagcaggagauugagaaggagag

SEQ ID NO: 2449464 - RNA, 22 nt, Human
gagcaggagauugagaaggaga

SEQ ID NO: 2449465 - RNA, 20 nt, Human
gagcaggagauugagaagga

SEQ ID NO: 2449466 - RNA, 21 nt, Human
gagcaggaggccccuggccca

SEQ ID NO: 2449467 - RNA, 17 nt, Human
gagcaggaggccccugg

SEQ ID NO: 2449468 - RNA, 15 nt, Human
gagcaggcacaugga

SEQ ID NO: 2449469 - RNA, 21 nt, Human
gagcaggcuacugucagcucc

SEQ ID NO: 2449470 - RNA, 19 nt, Human
gagcaggccuugcgcuguu

SEQ ID NO: 2449471 - RNA, 19 nt, Human
gagcaggcacauggaggag

SEQ ID NO: 2449472 - RNA, 14 nt, Human
gagccaccgugccu

SEQ ID NO: 2449473 - RNA, 18 nt, Human
gagccaccgcgcccagcc

SEQ ID NO: 2449474 - RNA, 14 nt, Human
gagccaccaugccc

SEQ ID NO: 2449475 - RNA, 22 nt, Human
gagcaggcggugggcacccacc

SEQ ID NO: 2449476 - RNA, 18 nt, Human
gagcaggcggugggcacc

SEQ ID NO: 2449477 - RNA, 20 nt, Human
gagccaccgugccuggccac

SEQ ID NO: 2449478 - RNA, 14 nt, Human
gagccacuaacuag

SEQ ID NO: 2449479 - RNA, 12 nt, Human
gagcccaggccu

SEQ ID NO: 2449480 - RNA, 16 nt, Human
gagcccacgcccccac

SEQ ID NO: 2449481 - RNA, 15 nt, Human
gagcccacgccccca

SEQ ID NO: 2449482 - RNA, 12 nt, Human
gagcccacgccc

SEQ ID NO: 2449483 - RNA, 15 nt, Human
gagcccaggcgggag

SEQ ID NO: 2449484 - RNA, 13 nt, Human
gagcccaggcggg

SEQ ID NO: 2449485 - RNA, 21 nt, Human
gagccauuuugugaauggauu

SEQ ID NO: 2449486 - RNA, 16 nt, Human
gagccauuuugugaau

SEQ ID NO: 2449487 - RNA, 14 nt, Human
gagcccaggccucc

SEQ ID NO: 2449488 - RNA, 13 nt, Human
gagcccaggccuc

SEQ ID NO: 2449489 - RNA, 22 nt, Human
gagccacugcaccgggccacag

SEQ ID NO: 2449490 - RNA, 14 nt, Human
gagccacuccucug

SEQ ID NO: 2449491 - RNA, 15 nt, Human
gagccacuccucuga

SEQ ID NO: 2449492 - RNA, 21 nt, Human
gagccagaaccuggagggcua

SEQ ID NO: 2449493 - RNA, 16 nt, Human
gagccagaaccuggag

SEQ ID NO: 2449494 - RNA, 19 nt, Human
gagccaccaugcccagcuc

SEQ ID NO: 2449495 - RNA, 18 nt, Human
gagccagagaagugacag

SEQ ID NO: 2449496 - RNA, 17 nt, Human
gagccagagaagugaca

SEQ ID NO: 2449497 - RNA, 16 nt, Human
gagccagagaagugac

SEQ ID NO: 2449498 - RNA, 15 nt, Human
gagccagagaaguga

SEQ ID NO: 2449499 - RNA, 14 nt, Human
gagccagagaagug

SEQ ID NO: 2449500 - RNA, 13 nt, Human
gagccagagaagu

SEQ ID NO: 2449501 - RNA, 12 nt, Human
gagccagagaag

SEQ ID NO: 2449502 - RNA, 23 nt, Human
gagccagacucuggucuucuuug

SEQ ID NO: 2449503 - RNA, 23 nt, Human
gagccauauaaguuugaaggaaa

SEQ ID NO: 2449504 - RNA, 20 nt, Human
gagccagagaagugacaggg

SEQ ID NO: 2449505 - RNA, 19 nt, Human
gagccagagaagugacagg

SEQ ID NO: 2449506 - RNA, 22 nt, Human
gagccagagaagugacagggaa

SEQ ID NO: 2449507 - RNA, 22 nt, Human
gagccaucggugaaacuaacag

SEQ ID NO: 2449508 - RNA, 14 nt, Human
gagccauuuuguga

SEQ ID NO: 2449509 - RNA, 23 nt, Human
gagccauuuuggggggccccccu

SEQ ID NO: 2449510 - RNA, 21 nt, Human
gagccauuuuggggggccccc

SEQ ID NO: 2449511 - RNA, 11 nt, Human
gagcccacgcc

SEQ ID NO: 2449512 - RNA, 21 nt, Human
gagccauguagaagcugcauc

SEQ ID NO: 2449513 - RNA, 14 nt, Human
gagccaugcuggga

SEQ ID NO: 2449514 - RNA, 22 nt, Human
gagccaugauguggaguggggc

SEQ ID NO: 2449515 - RNA, 17 nt, Human
gagccaugcgcccccuc

SEQ ID NO: 2449516 - RNA, 22 nt, Human
gagccauggaccacgcaggaag

SEQ ID NO: 2449517 - RNA, 20 nt, Human
gagaucaaccccuucgcucc

SEQ ID NO: 2449518 - RNA, 17 nt, Human
gagauauuuuaaaauga

SEQ ID NO: 2449519 - RNA, 11 nt, Human
gagauauuuac

SEQ ID NO: 2449520 - RNA, 22 nt, Human
gagauauuuacaugaauugcau

SEQ ID NO: 2449521 - RNA, 22 nt, Human
gagauauuuauggggggagaac

SEQ ID NO: 2449522 - RNA, 14 nt, Human
gaaugcuguacauc

SEQ ID NO: 2449523 - RNA, 15 nt, Human
gaaugcuguacaucu

SEQ ID NO: 2449524 - RNA, 17 nt, Human
gaaugcuguacaucuau

SEQ ID NO: 2449525 - RNA, 20 nt, Human
gaaugcuguacaucuauuuu

SEQ ID NO: 2449526 - RNA, 16 nt, Human
gagauauggcagcgaa

SEQ ID NO: 2449527 - RNA, 17 nt, Human
gagauauggcagcgaaa

SEQ ID NO: 2449528 - RNA, 16 nt, Human
gagauaugcagaagga

SEQ ID NO: 2449529 - RNA, 22 nt, Human
gagauaucugagggaggaggcc

SEQ ID NO: 2449530 - RNA, 21 nt, Human
gagauaucugagggaggaggc

SEQ ID NO: 2449531 - RNA, 22 nt, Human
gaaugcugguuuuccuaaaugc

SEQ ID NO: 2449532 - RNA, 21 nt, Human
gaaugcugcccgcucugcaga

SEQ ID NO: 2449533 - RNA, 15 nt, Human
gaaugcugaaaccaa

SEQ ID NO: 2449534 - RNA, 13 nt, Human
gaaugcugaaacc

SEQ ID NO: 2449535 - RNA, 21 nt, Human
gaaugcugcaggacuugagaa

SEQ ID NO: 2449536 - RNA, 21 nt, Human
gaaugcggccgcauucccuga

SEQ ID NO: 2449537 - RNA, 11 nt, Human
gaaugcucccc

SEQ ID NO: 2449538 - RNA, 13 nt, Human
gaaugcuccccca

SEQ ID NO: 2449539 - RNA, 19 nt, Human
gaaugcucccccauccucc

SEQ ID NO: 2449540 - RNA, 20 nt, Human
gaaugcucccccauccuccc

SEQ ID NO: 2449541 - RNA, 21 nt, Human
gaaugcucccccauccucccc

SEQ ID NO: 2449542 - RNA, 22 nt, Human
gaaugcucccccauccuccccu

SEQ ID NO: 2449543 - RNA, 23 nt, Human
gaaugcucccccauccuccccuu

SEQ ID NO: 2449544 - RNA, 17 nt, Human
gaaugcugggacucagc

SEQ ID NO: 2449545 - RNA, 16 nt, Human
gaaugcugggacucag

SEQ ID NO: 2449546 - RNA, 14 nt, Human
gaaugcugggacuc

SEQ ID NO: 2449547 - RNA, 13 nt, Human
gaaugcugggacu

SEQ ID NO: 2449548 - RNA, 19 nt, Human
gaaugcugggacucagccu

SEQ ID NO: 2449549 - RNA, 18 nt, Human
gaaugcugggacucagcc

SEQ ID NO: 2449550 - RNA, 13 nt, Human
gaaugcuguacau

SEQ ID NO: 2449551 - RNA, 17 nt, Human
gaaugcugguuuuccua

SEQ ID NO: 2449552 - RNA, 18 nt, Human
gaaugcugguuuuccuaa

SEQ ID NO: 2449553 - RNA, 21 nt, Human
gagaucgugccguuacucucc

SEQ ID NO: 2449554 - RNA, 22 nt, Human
gagaucgugccguuacucucca

SEQ ID NO: 2449555 - RNA, 19 nt, Human
gagaucuaagccuuuccau

SEQ ID NO: 2449556 - RNA, 20 nt, Human
gagaucuaagccuuuccaua

SEQ ID NO: 2449557 - RNA, 23 nt, Human
gagaucuaaggaugucacagggc

SEQ ID NO: 2449558 - RNA, 21 nt, Human
gagaucuaagccuuuccauaa

SEQ ID NO: 2449559 - RNA, 20 nt, Human
gagaucgcgccacugcacuc

SEQ ID NO: 2449560 - RNA, 14 nt, Human
gagauccuccugca

SEQ ID NO: 2449561 - RNA, 13 nt, Human
gagauccuccugc

SEQ ID NO: 2449562 - RNA, 23 nt, Human
gagauccuccugcagaccacgcc

SEQ ID NO: 2449563 - RNA, 17 nt, Human
gagauccuccugcagac

SEQ ID NO: 2449564 - RNA, 13 nt, Human
gagaucagccugg

SEQ ID NO: 2449565 - RNA, 18 nt, Human
gagaucaaauggaaagga

SEQ ID NO: 2449566 - RNA, 17 nt, Human
gagaucaaauggaaagg

SEQ ID NO: 2449567 - RNA, 23 nt, Human
gagaucaaauggaaaggagagga

SEQ ID NO: 2449568 - RNA, 14 nt, Human
gagaucagccuggg

SEQ ID NO: 2449569 - RNA, 16 nt, Human
gagaucagccugggca

SEQ ID NO: 2449570 - RNA, 23 nt, Human
gagcaagacgcugugcugcccug

SEQ ID NO: 2449571 - RNA, 22 nt, Human
gagcaagacgcugugcugcccu

SEQ ID NO: 2449572 - RNA, 18 nt, Human
gagcaagacgcugugcug

SEQ ID NO: 2449573 - RNA, 21 nt, Human
gagcaagacgcugugcugccc

SEQ ID NO: 2449574 - RNA, 18 nt, Human
gagcaaagaucaaaauaa

SEQ ID NO: 2449575 - RNA, 14 nt, Human
gagcaaagaucaaa

SEQ ID NO: 2449576 - RNA, 22 nt, Human
gagcaaagaucaaaauaaaaag

SEQ ID NO: 2449577 - RNA, 13 nt, Human
gagcaaagcugau

SEQ ID NO: 2449578 - RNA, 13 nt, Human
gagcaaagaucaa

SEQ ID NO: 2449579 - RNA, 15 nt, Human
gagcaaacucugcug

SEQ ID NO: 2449580 - RNA, 12 nt, Human
gagcaaaauaau

SEQ ID NO: 2449581 - RNA, 21 nt, Human
gagaugaaaucuuacagcugg

SEQ ID NO: 2449582 - RNA, 16 nt, Human
gagaucugguuuugcu

SEQ ID NO: 2449583 - RNA, 19 nt, Human
gagcaaaaucgaugcagug

SEQ ID NO: 2449584 - RNA, 17 nt, Human
gagcaccuuagacaguc

SEQ ID NO: 2449585 - RNA, 21 nt, Human
gagcaccccucucugcaucug

SEQ ID NO: 2449586 - RNA, 19 nt, Human
gagcaccuuagacaguccc

SEQ ID NO: 2449587 - RNA, 14 nt, Human
gagcaccuccacau

SEQ ID NO: 2449588 - RNA, 19 nt, Human
gagcaccuccacauccucc

SEQ ID NO: 2449589 - RNA, 17 nt, Human
gagcaccccucucugca

SEQ ID NO: 2449590 - RNA, 16 nt, Human
gagcaccccucucugc

SEQ ID NO: 2449591 - RNA, 13 nt, Human
gagcaccagggga

SEQ ID NO: 2449592 - RNA, 13 nt, Human
gagcacaggcagc

SEQ ID NO: 2449593 - RNA, 20 nt, Human
gagcacagcccucccgcccc

SEQ ID NO: 2449594 - RNA, 18 nt, Human
gagcacagcccucccgcc

SEQ ID NO: 2449595 - RNA, 15 nt, Human
gagcacagcccuccc

SEQ ID NO: 2449596 - RNA, 14 nt, Human
gagcacagcccucc

SEQ ID NO: 2449597 - RNA, 13 nt, Human
gagcacagcccuc

SEQ ID NO: 2449598 - RNA, 12 nt, Human
gagcacagcccu

SEQ ID NO: 2449599 - RNA, 17 nt, Human
gagcacagaucuguuuc

SEQ ID NO: 2449600 - RNA, 15 nt, Human
gagcacaggcagcug

SEQ ID NO: 2449601 - RNA, 14 nt, Human
gagcacaggcagcu

SEQ ID NO: 2449602 - RNA, 13 nt, Human
gagcaccaggcac

SEQ ID NO: 2449603 - RNA, 15 nt, Human
gagcaccaggcacga

SEQ ID NO: 2449604 - RNA, 23 nt, Human
gagcaccaggcacgaacccaccu

SEQ ID NO: 2449605 - RNA, 20 nt, Human
gagcacacuuuaguggccga

SEQ ID NO: 2449606 - RNA, 18 nt, Human
gagcacacuuggcccaag

SEQ ID NO: 2449607 - RNA, 15 nt, Human
gagcacacuguagca

SEQ ID NO: 2449608 - RNA, 13 nt, Human
gagcacacuguag

SEQ ID NO: 2449609 - RNA, 14 nt, Human
gagcuacaaaugca

SEQ ID NO: 2449610 - RNA, 23 nt, Human
gagcuacacaggggaaaagagga

SEQ ID NO: 2449611 - RNA, 19 nt, Human
gagcuaaauuacaauuguc

SEQ ID NO: 2449612 - RNA, 21 nt, Human
gagcuaaauuacaauugucau

SEQ ID NO: 2449613 - RNA, 19 nt, Human
gagcuaacacuggccccua

SEQ ID NO: 2449614 - RNA, 14 nt, Human
gagcuaacacuggc

SEQ ID NO: 2449615 - RNA, 15 nt, Human
gagcuaacacuggcc

SEQ ID NO: 2449616 - RNA, 20 nt, Human
gagcuacuugggccauagcu

SEQ ID NO: 2449617 - RNA, 14 nt, Human
gagcucaggacacu

SEQ ID NO: 2449618 - RNA, 17 nt, Human
gagcucaggacacuaau

SEQ ID NO: 2449619 - RNA, 17 nt, Human
gagcuacgccugccucc

SEQ ID NO: 2449620 - RNA, 23 nt, Human
gagcuacgccugccuccccugug

SEQ ID NO: 2449621 - RNA, 18 nt, Human
gagcuacccgcagaguuc

SEQ ID NO: 2449622 - RNA, 13 nt, Human
gagcucuccagcu

SEQ ID NO: 2449623 - RNA, 19 nt, Human
gagcucuaugggcagaucu

SEQ ID NO: 2449624 - RNA, 22 nt, Human
gagcuccucugggcaggaccuc

SEQ ID NO: 2449625 - RNA, 19 nt, Human
gagcuccucuccuggagga

SEQ ID NO: 2449626 - RNA, 18 nt, Human
gagcuccucuccuggagg

SEQ ID NO: 2449627 - RNA, 17 nt, Human
gagcuccucuccuggag

SEQ ID NO: 2449628 - RNA, 16 nt, Human
gagcuccucuccugga

SEQ ID NO: 2449629 - RNA, 14 nt, Human
gagcuccucugggc

SEQ ID NO: 2449630 - RNA, 15 nt, Human
gagcuccucugggca

SEQ ID NO: 2449631 - RNA, 16 nt, Human
gagcuccucugggcag

SEQ ID NO: 2449632 - RNA, 18 nt, Human
gagcuccucugggcagga

SEQ ID NO: 2449633 - RNA, 18 nt, Human
gagcuccacucugcuucu

SEQ ID NO: 2449634 - RNA, 16 nt, Human
gagcuccacucugcuu

SEQ ID NO: 2449635 - RNA, 13 nt, Human
gagcuccacucug

SEQ ID NO: 2449636 - RNA, 12 nt, Human
gagcuccacucu

SEQ ID NO: 2449637 - RNA, 19 nt, Human
gagcucccggcguggugga

SEQ ID NO: 2449638 - RNA, 15 nt, Human
gagcuccucuccugg

SEQ ID NO: 2449639 - RNA, 20 nt, Human
gagcuccccaccaccccagc

SEQ ID NO: 2449640 - RNA, 22 nt, Human
gagcuccccaccaccccagcug

SEQ ID NO: 2449641 - RNA, 21 nt, Human
gagcuccacucugcuucucug

SEQ ID NO: 2449642 - RNA, 19 nt, Human
gagcuccccaccaccccag

SEQ ID NO: 2449643 - RNA, 15 nt, Human
gagcucugcagccca

SEQ ID NO: 2449644 - RNA, 16 nt, Human
gagcucugcagagcag

SEQ ID NO: 2449645 - RNA, 16 nt, Human
gagcucuucaggccuc

SEQ ID NO: 2449646 - RNA, 17 nt, Human
gagcucuucaggccucc

SEQ ID NO: 2449647 - RNA, 19 nt, Human
gagcucuucaggccucccu

SEQ ID NO: 2449648 - RNA, 13 nt, Human
gagcugccaccug

SEQ ID NO: 2449649 - RNA, 22 nt, Human
gagcucuucaggccucccucuc

SEQ ID NO: 2449650 - RNA, 16 nt, Human
gagcugccaccugccu

SEQ ID NO: 2449651 - RNA, 15 nt, Human
gagcugccaccugcc

SEQ ID NO: 2449652 - RNA, 11 nt, Human
gagcugcccuc

SEQ ID NO: 2449653 - RNA, 20 nt, Human
gagcugccauccagggaugc

SEQ ID NO: 2449654 - RNA, 21 nt, Human
gagcugcccagaguugcuggg

SEQ ID NO: 2449655 - RNA, 19 nt, Human
gagcuguuuauggccucag

SEQ ID NO: 2449656 - RNA, 23 nt, Human
gagcugcccuccuuguccaccca

SEQ ID NO: 2449657 - RNA, 21 nt, Human
gagcugcccuccuuguccacc

SEQ ID NO: 2449658 - RNA, 15 nt, Human
gagcugcccuccuug

SEQ ID NO: 2449659 - RNA, 15 nt, Human
gagcuuaacagugug

SEQ ID NO: 2449660 - RNA, 20 nt, Human
gagcuguuuauggccucagc

SEQ ID NO: 2449661 - RNA, 22 nt, Human
gagcuguuuauggccucagcug

SEQ ID NO: 2449662 - RNA, 18 nt, Human
gagcuucuguugcugccu

SEQ ID NO: 2449663 - RNA, 14 nt, Human
gagcuucuggcacu

SEQ ID NO: 2449664 - RNA, 16 nt, Human
gagcuucucugugaac

SEQ ID NO: 2449665 - RNA, 14 nt, Human
gagcuucucuguga

SEQ ID NO: 2449666 - RNA, 10 nt, Human
gagcuucucu

SEQ ID NO: 2449667 - RNA, 17 nt, Human
gagcuuagccaaugugg

SEQ ID NO: 2449668 - RNA, 16 nt, Human
gagcuucauggcagaa

SEQ ID NO: 2449669 - RNA, 18 nt, Human
gagcuuagugaaauuacu

SEQ ID NO: 2449670 - RNA, 19 nt, Human
gagcuucauggcagaaggc

SEQ ID NO: 2449671 - RNA, 13 nt, Human
gagcuucccugac

SEQ ID NO: 2449672 - RNA, 17 nt, Human
gagcuucccugacucau

SEQ ID NO: 2449673 - RNA, 21 nt, Human
gagccugcaaacucacugcuc

SEQ ID NO: 2449674 - RNA, 19 nt, Human
gagccuccugcccaguccc

SEQ ID NO: 2449675 - RNA, 18 nt, Human
gagccuccugcccagucc

SEQ ID NO: 2449676 - RNA, 17 nt, Human
gagccuccugcccaguc

SEQ ID NO: 2449677 - RNA, 22 nt, Human
gagccuccugcccuuaccugcc

SEQ ID NO: 2449678 - RNA, 20 nt, Human
gagccuccugcccuuaccug

SEQ ID NO: 2449679 - RNA, 15 nt, Human
gagccugcagggugg

SEQ ID NO: 2449680 - RNA, 15 nt, Human
gagccugcagagcug

SEQ ID NO: 2449681 - RNA, 12 nt, Human
gagccugcagag

SEQ ID NO: 2449682 - RNA, 13 nt, Human
gagccugcuggca

SEQ ID NO: 2449683 - RNA, 11 nt, Human
gagccugcugg

SEQ ID NO: 2449684 - RNA, 12 nt, Human
gagccugcuggc

SEQ ID NO: 2449685 - RNA, 17 nt, Human
gagccugcucccccacc

SEQ ID NO: 2449686 - RNA, 18 nt, Human
gagccugcucccccaccc

SEQ ID NO: 2449687 - RNA, 10 nt, Human
gagccugcug

SEQ ID NO: 2449688 - RNA, 19 nt, Human
gagccugcucccccacccc

SEQ ID NO: 2449689 - RNA, 23 nt, Human
gagccugcaggguggugcuggga

SEQ ID NO: 2449690 - RNA, 22 nt, Human
gagccugcaggguggugcuggg

SEQ ID NO: 2449691 - RNA, 20 nt, Human
gagccugcaggguggugcug

SEQ ID NO: 2449692 - RNA, 16 nt, Human
gagccugcaggguggu

SEQ ID NO: 2449693 - RNA, 16 nt, Human
gagccugccuggagcg

SEQ ID NO: 2449694 - RNA, 19 nt, Human
gagccugcggccugcugga

SEQ ID NO: 2449695 - RNA, 13 nt, Human
gagccugcucccc

SEQ ID NO: 2449696 - RNA, 17 nt, Human
gagcccugguggcagug

SEQ ID NO: 2449697 - RNA, 19 nt, Human
gagccucagcauccuggca

SEQ ID NO: 2449698 - RNA, 16 nt, Human
gagcccugguggcagu

SEQ ID NO: 2449699 - RNA, 15 nt, Human
gagcccugguggcag

SEQ ID NO: 2449700 - RNA, 15 nt, Human
gagccuccugcccag

SEQ ID NO: 2449701 - RNA, 14 nt, Human
gagccuccugccca

SEQ ID NO: 2449702 - RNA, 14 nt, Human
gagccuccugcccu

SEQ ID NO: 2449703 - RNA, 21 nt, Human
gagccucagcauccuggcacc

SEQ ID NO: 2449704 - RNA, 20 nt, Human
gagccucagcauccuggcac

SEQ ID NO: 2449705 - RNA, 13 nt, Human
gagccugggaggu

SEQ ID NO: 2449706 - RNA, 21 nt, Human
gagccugggaggucaaggcug

SEQ ID NO: 2449707 - RNA, 12 nt, Human
gagccuggugcc

SEQ ID NO: 2449708 - RNA, 16 nt, Human
gagccuggugcugcug

SEQ ID NO: 2449709 - RNA, 17 nt, Human
gagccuggugcugcugc

SEQ ID NO: 2449710 - RNA, 23 nt, Human
gagccuggcucuugugcuggaug

SEQ ID NO: 2449711 - RNA, 21 nt, Human
gagccuggcucuugugcugga

SEQ ID NO: 2449712 - RNA, 12 nt, Human
gagccuggcucu

SEQ ID NO: 2449713 - RNA, 23 nt, Human
gagccuggcuccguccaggagcc

SEQ ID NO: 2449714 - RNA, 15 nt, Human
gagccuggccagccu

SEQ ID NO: 2449715 - RNA, 15 nt, Human
gagccuggcaagaau

SEQ ID NO: 2449716 - RNA, 15 nt, Human
gagccuggagaagcu

SEQ ID NO: 2449717 - RNA, 14 nt, Human
gagccuggagaagc

SEQ ID NO: 2449718 - RNA, 13 nt, Human
gagccuggagaag

SEQ ID NO: 2449719 - RNA, 12 nt, Human
gagccuggagaa

SEQ ID NO: 2449720 - RNA, 23 nt, Human
gagccugcuggucacagccuccu

SEQ ID NO: 2449721 - RNA, 21 nt, Human
gagccugcuggucacagccuc

SEQ ID NO: 2449722 - RNA, 12 nt, Human
gagccugcuggu

SEQ ID NO: 2449723 - RNA, 15 nt, Human
gagccugcuggcacc

SEQ ID NO: 2449724 - RNA, 10 nt, Human
gagccuggca

SEQ ID NO: 2449725 - RNA, 12 nt, Human
gagcuacaaaug

SEQ ID NO: 2449726 - RNA, 13 nt, Human
gagcuacaaaugc

SEQ ID NO: 2449727 - RNA, 14 nt, Human
gagccuggugcccu

SEQ ID NO: 2449728 - RNA, 22 nt, Human
gagcgugggaggcgggagugga

SEQ ID NO: 2449729 - RNA, 21 nt, Human
gagcgugcuccagccuggcuc

SEQ ID NO: 2449730 - RNA, 20 nt, Human
gagcgugcuccagccuggcu

SEQ ID NO: 2449731 - RNA, 17 nt, Human
gagcgguggcccugucc

SEQ ID NO: 2449732 - RNA, 23 nt, Human
gagcgguggcccugucccuccca

SEQ ID NO: 2449733 - RNA, 14 nt, Human
gagcgguggcccug

SEQ ID NO: 2449734 - RNA, 23 nt, Human
gagcggucucaggcuggugggag

SEQ ID NO: 2449735 - RNA, 22 nt, Human
gagcggucucaggcugguggga

SEQ ID NO: 2449736 - RNA, 17 nt, Human
gagcggucucaggcugg

SEQ ID NO: 2449737 - RNA, 19 nt, Human
gagcggugcuguccucagg

SEQ ID NO: 2449738 - RNA, 12 nt, Human
gaguccccuguu

SEQ ID NO: 2449739 - RNA, 17 nt, Human
gaguccccucaccuccu

SEQ ID NO: 2449740 - RNA, 16 nt, Human
gaguccccucaccucc

SEQ ID NO: 2449741 - RNA, 11 nt, Human
gaguccccuca

SEQ ID NO: 2449742 - RNA, 18 nt, Human
gagucccagugggaggcg

SEQ ID NO: 2449743 - RNA, 16 nt, Human
gagucccagugggagg

SEQ ID NO: 2449744 - RNA, 14 nt, Human
gagucccaguggga

SEQ ID NO: 2449745 - RNA, 20 nt, Human
gagucccaggagcugcccag

SEQ ID NO: 2449746 - RNA, 19 nt, Human
gagucccaggagcugccca

SEQ ID NO: 2449747 - RNA, 18 nt, Human
gagucccaggcugagccu

SEQ ID NO: 2449748 - RNA, 19 nt, Human
gagucccaggcugagccuc

SEQ ID NO: 2449749 - RNA, 19 nt, Human
gaguccccucaccuccucu

SEQ ID NO: 2449750 - RNA, 18 nt, Human
gaguccccucaccuccuc

SEQ ID NO: 2449751 - RNA, 14 nt, Human
gagucccugccauc

SEQ ID NO: 2449752 - RNA, 23 nt, Human
gaguccccuguuuguuucugaaa

SEQ ID NO: 2449753 - RNA, 14 nt, Human
gaguccccuguuug

SEQ ID NO: 2449754 - RNA, 14 nt, Human
gaguagcugggacu

SEQ ID NO: 2449755 - RNA, 12 nt, Human
gaguagcuggga

SEQ ID NO: 2449756 - RNA, 23 nt, Human
gagucccagagcaggaggccccu

SEQ ID NO: 2449757 - RNA, 21 nt, Human
gagucccagagcaggaggccc

SEQ ID NO: 2449758 - RNA, 19 nt, Human
gagucccagagcaggaggc

SEQ ID NO: 2449759 - RNA, 18 nt, Human
gagucccagagcaggagg

SEQ ID NO: 2449760 - RNA, 23 nt, Human
gagucccacugccucagguuccu

SEQ ID NO: 2449761 - RNA, 22 nt, Human
gagucccacugccucagguucc

SEQ ID NO: 2449762 - RNA, 20 nt, Human
gagucccacugccucagguu

SEQ ID NO: 2449763 - RNA, 19 nt, Human
gagucccacugccucaggu

SEQ ID NO: 2449764 - RNA, 17 nt, Human
gagucccacugccucag

SEQ ID NO: 2449765 - RNA, 14 nt, Human
gagucccacugccu

SEQ ID NO: 2449766 - RNA, 13 nt, Human
gagucccacugcc

SEQ ID NO: 2449767 - RNA, 19 nt, Human
gagucaaaacucaaaugcu

SEQ ID NO: 2449768 - RNA, 20 nt, Human
gaguauuuaggcagauugaa

SEQ ID NO: 2449769 - RNA, 19 nt, Human
gagucaaaacuacaaauca

SEQ ID NO: 2449770 - RNA, 19 nt, Human
gagucaaaugguaggcauu

SEQ ID NO: 2449771 - RNA, 17 nt, Human
gagucgaggacagggag

SEQ ID NO: 2449772 - RNA, 18 nt, Human
gaguccccuccccggccc

SEQ ID NO: 2449773 - RNA, 13 nt, Human
gagucggaagggc

SEQ ID NO: 2449774 - RNA, 17 nt, Human
gagucguacagaaagcu

SEQ ID NO: 2449775 - RNA, 22 nt, Human
gagucguacagaaagcugccug

SEQ ID NO: 2449776 - RNA, 17 nt, Human
gagucguggggugugcu

SEQ ID NO: 2449777 - RNA, 19 nt, Human
gagucgucaucacuuuuca

SEQ ID NO: 2449778 - RNA, 14 nt, Human
gagucccgucagga

SEQ ID NO: 2449779 - RNA, 21 nt, Human
gagucucacuguugcccaggc

SEQ ID NO: 2449780 - RNA, 20 nt, Human
gagucucacuguugcccagg

SEQ ID NO: 2449781 - RNA, 21 nt, Human
gagucguggggugugcuggga

SEQ ID NO: 2449782 - RNA, 20 nt, Human
gagucguggggugugcuggg

SEQ ID NO: 2449783 - RNA, 19 nt, Human
gagucguggggugugcugg

SEQ ID NO: 2449784 - RNA, 18 nt, Human
gagucguggggugugcug

SEQ ID NO: 2449785 - RNA, 19 nt, Human
gagucucacuguugcccag

SEQ ID NO: 2449786 - RNA, 14 nt, Human
gagucucccaaggc

SEQ ID NO: 2449787 - RNA, 13 nt, Human
gagucucccaagg

SEQ ID NO: 2449788 - RNA, 20 nt, Human
gagucuccagugguugcugu

SEQ ID NO: 2449789 - RNA, 23 nt, Human
gagucgucaucacuuuucaguga

SEQ ID NO: 2449790 - RNA, 23 nt, Human
gagucucgcuauugucaccaggg

SEQ ID NO: 2449791 - RNA, 12 nt, Human
gagucuccugug

SEQ ID NO: 2449792 - RNA, 12 nt, Human
gagucucuucuc

SEQ ID NO: 2449793 - RNA, 23 nt, Human
gagucucacuguugcccaggcug

SEQ ID NO: 2449794 - RNA, 22 nt, Human
gagucucacuguugcccaggcu

SEQ ID NO: 2449795 - RNA, 17 nt, Human
gagucucuucuccacug

SEQ ID NO: 2449796 - RNA, 16 nt, Human
gagucucuucuccacu

SEQ ID NO: 2449797 - RNA, 15 nt, Human
gagucucuucuccac

SEQ ID NO: 2449798 - RNA, 14 nt, Human
gagucucuucucca

SEQ ID NO: 2449799 - RNA, 21 nt, Human
gagucugaaggcuggguucug

SEQ ID NO: 2449800 - RNA, 18 nt, Human
gagucucuucuccacugg

SEQ ID NO: 2449801 - RNA, 14 nt, Human
gagucugaagcaga

SEQ ID NO: 2449802 - RNA, 15 nt, Human
gaggggggcacaugc

SEQ ID NO: 2449803 - RNA, 19 nt, Human
gaggggggauuuccagcca

SEQ ID NO: 2449804 - RNA, 19 nt, Human
gaggggcucucagcucagc

SEQ ID NO: 2449805 - RNA, 22 nt, Human
gaggggggaggugggauccucc

SEQ ID NO: 2449806 - RNA, 15 nt, Human
gaggggguggccucc

SEQ ID NO: 2449807 - RNA, 18 nt, Human
gagguccacaacacacag

SEQ ID NO: 2449808 - RNA, 22 nt, Human
gaggucaggaguuagaggccag

SEQ ID NO: 2449809 - RNA, 15 nt, Human
gaggggggagguggg

SEQ ID NO: 2449810 - RNA, 16 nt, Human
gaggggcucucagcuc

SEQ ID NO: 2449811 - RNA, 12 nt, Human
gaggggcucuca

SEQ ID NO: 2449812 - RNA, 11 nt, Human
gaggggcucuc

SEQ ID NO: 2449813 - RNA, 16 nt, Human
gaggggcucaggaaaa

SEQ ID NO: 2449814 - RNA, 14 nt, Human
gaggggcuccugga

SEQ ID NO: 2449815 - RNA, 15 nt, Human
gaggggcuccuggaa

SEQ ID NO: 2449816 - RNA, 19 nt, Human
gaggggcgcuggcccagcc

SEQ ID NO: 2449817 - RNA, 18 nt, Human
gaggggcgcuggcccagc

SEQ ID NO: 2449818 - RNA, 17 nt, Human
gaggggcgcuggcccag

SEQ ID NO: 2449819 - RNA, 16 nt, Human
gaggggcgcuggccca

SEQ ID NO: 2449820 - RNA, 15 nt, Human
gaggggcgcuggccc

SEQ ID NO: 2449821 - RNA, 14 nt, Human
gaggggcgcuggcc

SEQ ID NO: 2449822 - RNA, 13 nt, Human
gaggggcgcuggc

SEQ ID NO: 2449823 - RNA, 16 nt, Human
gaggggcgcccaccuc

SEQ ID NO: 2449824 - RNA, 22 nt, Human
gaggggcgcuggcccagccggc

SEQ ID NO: 2449825 - RNA, 20 nt, Human
gaggggcgcuggcccagccg

SEQ ID NO: 2449826 - RNA, 15 nt, Human
gaggggcucaggaaa

SEQ ID NO: 2449827 - RNA, 16 nt, Human
gaggggcgggacccag

SEQ ID NO: 2449828 - RNA, 12 nt, Human
gaggggcuccug

SEQ ID NO: 2449829 - RNA, 13 nt, Human
gaggggcuccugg

SEQ ID NO: 2449830 - RNA, 22 nt, Human
gaggugggauccuccaggugca

SEQ ID NO: 2449831 - RNA, 21 nt, Human
gaggugggauccuccaggugc

SEQ ID NO: 2449832 - RNA, 19 nt, Human
gagguguuuaaagagaggu

SEQ ID NO: 2449833 - RNA, 14 nt, Human
gagguguuuaaaga

SEQ ID NO: 2449834 - RNA, 17 nt, Human
gaggugugggggcugca

SEQ ID NO: 2449835 - RNA, 16 nt, Human
gaggugugggggcugc

SEQ ID NO: 2449836 - RNA, 23 nt, Human
gaggugggcaggugguggcacug

SEQ ID NO: 2449837 - RNA, 21 nt, Human
gaggugggcaggugguggcac

SEQ ID NO: 2449838 - RNA, 17 nt, Human
gaggugggccagucugu

SEQ ID NO: 2449839 - RNA, 14 nt, Human
gaggugggcaggug

SEQ ID NO: 2449840 - RNA, 12 nt, Human
gaggugggcagg

SEQ ID NO: 2449841 - RNA, 11 nt, Human
gaggugggcag

SEQ ID NO: 2449842 - RNA, 18 nt, Human
gaggugggauccuccagg

SEQ ID NO: 2449843 - RNA, 23 nt, Human
gagguccagcccuggcugaagga

SEQ ID NO: 2449844 - RNA, 22 nt, Human
gagguccagcccuggcugaagg

SEQ ID NO: 2449845 - RNA, 20 nt, Human
gagguccagcccuggcugaa

SEQ ID NO: 2449846 - RNA, 19 nt, Human
gagguccagcccuggcuga

SEQ ID NO: 2449847 - RNA, 17 nt, Human
gagguccagcccuggcu

SEQ ID NO: 2449848 - RNA, 14 nt, Human
gaggggguggaggg

SEQ ID NO: 2449849 - RNA, 13 nt, Human
gaggggguggagg

SEQ ID NO: 2449850 - RNA, 12 nt, Human
gaggucccaggc

SEQ ID NO: 2449851 - RNA, 14 nt, Human
gaggucccaggcag

SEQ ID NO: 2449852 - RNA, 17 nt, Human
gaguacguugugcauuu

SEQ ID NO: 2449853 - RNA, 18 nt, Human
gaguacguugugcauuug

SEQ ID NO: 2449854 - RNA, 15 nt, Human
gaguacuacaguccu

SEQ ID NO: 2449855 - RNA, 20 nt, Human
gaguacguugugcauuuggu

SEQ ID NO: 2449856 - RNA, 19 nt, Human
gaguacuacaguccuccca

SEQ ID NO: 2449857 - RNA, 18 nt, Human
gaguacuacaguccuccc

SEQ ID NO: 2449858 - RNA, 20 nt, Human
gaguagcgguccaagccugc

SEQ ID NO: 2449859 - RNA, 15 nt, Human
gaguagcgguccaag

SEQ ID NO: 2449860 - RNA, 19 nt, Human
gaguagccgagagccugcu

SEQ ID NO: 2449861 - RNA, 21 nt, Human
gaguagccgagagccugcucc

SEQ ID NO: 2449862 - RNA, 12 nt, Human
gaguagcuggau

SEQ ID NO: 2449863 - RNA, 16 nt, Human
gaguacaggugaagca

SEQ ID NO: 2449864 - RNA, 18 nt, Human
gaguagccgagagccugc

SEQ ID NO: 2449865 - RNA, 19 nt, Human
gagguucaaagauauuuug

SEQ ID NO: 2449866 - RNA, 13 nt, Human
gagguuauagguc

SEQ ID NO: 2449867 - RNA, 22 nt, Human
gagguuaggaguucgagaccag

SEQ ID NO: 2449868 - RNA, 21 nt, Human
gagguguuuaaagagagguua

SEQ ID NO: 2449869 - RNA, 15 nt, Human
gagguuaaggcugag

SEQ ID NO: 2449870 - RNA, 19 nt, Human
gagguuaaggcugaggaaa

SEQ ID NO: 2449871 - RNA, 14 nt, Human
gagguucccuuuga

SEQ ID NO: 2449872 - RNA, 22 nt, Human
gagguuuguuuagaagaagugu

SEQ ID NO: 2449873 - RNA, 17 nt, Human
gagguucauuucaaaua

SEQ ID NO: 2449874 - RNA, 19 nt, Human
gagguuauaggucacuccu

SEQ ID NO: 2449875 - RNA, 22 nt, Human
gagguuauaggucacuccuggg

SEQ ID NO: 2449876 - RNA, 15 nt, Human
gagguuuuaaaguga

SEQ ID NO: 2449877 - RNA, 19 nt, Human
gagguuuuaaaaaaauccc

SEQ ID NO: 2449878 - RNA, 16 nt, Human
gaguacguugugcauu

SEQ ID NO: 2449879 - RNA, 12 nt, Human
gaguaaaggaaa

SEQ ID NO: 2449880 - RNA, 22 nt, Human
gauauauuaaaaauauaaaacu

SEQ ID NO: 2449881 - RNA, 21 nt, Human
gauauauuaaaaauauaaaac

SEQ ID NO: 2449882 - RNA, 20 nt, Human
gauauauuaaaaauauaaaa

SEQ ID NO: 2449883 - RNA, 18 nt, Human
gauauauuaaaaauauaa

SEQ ID NO: 2449884 - RNA, 17 nt, Human
gauauauuaaaaauaua

SEQ ID NO: 2449885 - RNA, 14 nt, Human
gauauauuaaaaau

SEQ ID NO: 2449886 - RNA, 13 nt, Human
gauauauuaaaaa

SEQ ID NO: 2449887 - RNA, 16 nt, Human
gauauauggauaaugc

SEQ ID NO: 2449888 - RNA, 14 nt, Human
gauauauuuuacaa

SEQ ID NO: 2449889 - RNA, 15 nt, Human
gauauauuuaaaaau

SEQ ID NO: 2449890 - RNA, 23 nt, Human
gauauauuuuacaauuuuuuauc

SEQ ID NO: 2449891 - RNA, 19 nt, Human
gauauauuuaaaaauauuu

SEQ ID NO: 2449892 - RNA, 22 nt, Human
gaucaaccccuucgcuccugug

SEQ ID NO: 2449893 - RNA, 21 nt, Human
gaucaaccccuucgcuccugu

SEQ ID NO: 2449894 - RNA, 19 nt, Human
gauauauguuuuugaaggc

SEQ ID NO: 2449895 - RNA, 22 nt, Human
gauauauguguuuuucacauuu

SEQ ID NO: 2449896 - RNA, 16 nt, Human
gauauagaacagugcu

SEQ ID NO: 2449897 - RNA, 20 nt, Human
gauauauguguuuuucacau

SEQ ID NO: 2449898 - RNA, 23 nt, Human
gauauaugcucugcauguuacau

SEQ ID NO: 2449899 - RNA, 12 nt, Human
gauauagaacag

SEQ ID NO: 2449900 - RNA, 18 nt, Human
gauauacuuuuuucuuau

SEQ ID NO: 2449901 - RNA, 17 nt, Human
gauauacucuagaugaa

SEQ ID NO: 2449902 - RNA, 23 nt, Human
gauagcauuuuugauuuaugcau

SEQ ID NO: 2449903 - RNA, 18 nt, Human
gauauacacggaugacuu

SEQ ID NO: 2449904 - RNA, 21 nt, Human
gauauaaguguguguuuuuca

SEQ ID NO: 2449905 - RNA, 22 nt, Human
gauagcauuuuugauuuaugca

SEQ ID NO: 2449906 - RNA, 17 nt, Human
gauagcauuuuugauuu

SEQ ID NO: 2449907 - RNA, 17 nt, Human
gauauaaguguguguuu

SEQ ID NO: 2449908 - RNA, 13 nt, Human
gauagccaaggcc

SEQ ID NO: 2449909 - RNA, 17 nt, Human
gauagcauugugaacug

SEQ ID NO: 2449910 - RNA, 15 nt, Human
gauagcauugugaac

SEQ ID NO: 2449911 - RNA, 19 nt, Human
gauagcacagacccugccc

SEQ ID NO: 2449912 - RNA, 12 nt, Human
gauagccaaggc

SEQ ID NO: 2449913 - RNA, 18 nt, Human
gauagcacagacccugcc

SEQ ID NO: 2449914 - RNA, 17 nt, Human
gauagcacagacccugc

SEQ ID NO: 2449915 - RNA, 12 nt, Human
gauagagggggg

SEQ ID NO: 2449916 - RNA, 13 nt, Human
gauacaaugcugu

SEQ ID NO: 2449917 - RNA, 18 nt, Human
gauacaaugcugugcccu

SEQ ID NO: 2449918 - RNA, 21 nt, Human
gauagacacauaugaggggga

SEQ ID NO: 2449919 - RNA, 20 nt, Human
gauagacacauaugaggggg

SEQ ID NO: 2449920 - RNA, 16 nt, Human
gauacaagauuagaag

SEQ ID NO: 2449921 - RNA, 22 nt, Human
gauacaauguauuuauuuaaaa

SEQ ID NO: 2449922 - RNA, 19 nt, Human
gauacacccaaaguaucag

SEQ ID NO: 2449923 - RNA, 19 nt, Human
gauaauguuaaauuuguaa

SEQ ID NO: 2449924 - RNA, 14 nt, Human
gauaauguuaaauu

SEQ ID NO: 2449925 - RNA, 13 nt, Human
gauaauguuaaau

SEQ ID NO: 2449926 - RNA, 12 nt, Human
gauaauguuaaa

SEQ ID NO: 2449927 - RNA, 17 nt, Human
gauacaaaagcauguga

SEQ ID NO: 2449928 - RNA, 20 nt, Human
gauacaacuucaagugcaug

SEQ ID NO: 2449929 - RNA, 21 nt, Human
gauaauguuaaauuuguaagu

SEQ ID NO: 2449930 - RNA, 21 nt, Human
gauaaucagugugucuaaauu

SEQ ID NO: 2449931 - RNA, 21 nt, Human
gauaaugugauauuauacaua

SEQ ID NO: 2449932 - RNA, 11 nt, Human
gauaauguuaa

SEQ ID NO: 2449933 - RNA, 15 nt, Human
gauaaugcuguugcc

SEQ ID NO: 2449934 - RNA, 20 nt, Human
gauaaugccggugagaauaa

SEQ ID NO: 2449935 - RNA, 19 nt, Human
gauaaugcuguugccucau

SEQ ID NO: 2449936 - RNA, 21 nt, Human
gauaaaaagauguucagucau

SEQ ID NO: 2449937 - RNA, 19 nt, Human
gaguuuuuguuuggagagc

SEQ ID NO: 2449938 - RNA, 21 nt, Human
gauaaucaacugggcugaaca

SEQ ID NO: 2449939 - RNA, 13 nt, Human
gauaaucagccuc

SEQ ID NO: 2449940 - RNA, 14 nt, Human
gauaaucagccucu

SEQ ID NO: 2449941 - RNA, 15 nt, Human
gauaaucagccucuu

SEQ ID NO: 2449942 - RNA, 16 nt, Human
gauaaucagccucuua

SEQ ID NO: 2449943 - RNA, 13 nt, Human
gaguuuuguuuua

SEQ ID NO: 2449944 - RNA, 19 nt, Human
gaguuuuguuuuaaaauua

SEQ ID NO: 2449945 - RNA, 18 nt, Human
gaguuuuuauggggcuga

SEQ ID NO: 2449946 - RNA, 19 nt, Human
gaguuuuuauggggcugaa

SEQ ID NO: 2449947 - RNA, 22 nt, Human
gaguuuuucccagcuacaccuu

SEQ ID NO: 2449948 - RNA, 22 nt, Human
gagugaacaaauuuacagagac

SEQ ID NO: 2449949 - RNA, 23 nt, Human
gagugaacaaauuuacagagaca

SEQ ID NO: 2449950 - RNA, 10 nt, Human
gaguggccug

SEQ ID NO: 2449951 - RNA, 12 nt, Human
gaguggccuggc

SEQ ID NO: 2449952 - RNA, 18 nt, Human
gaguggcauuggcagcag

SEQ ID NO: 2449953 - RNA, 20 nt, Human
gaguggcauggccaccacca

SEQ ID NO: 2449954 - RNA, 23 nt, Human
gaguggcauuggcagcaggugcu

SEQ ID NO: 2449955 - RNA, 11 nt, Human
gaguggccacu

SEQ ID NO: 2449956 - RNA, 21 nt, Human
gagucugcuauauuuucauga

SEQ ID NO: 2449957 - RNA, 18 nt, Human
gagucugcuauauuuuca

SEQ ID NO: 2449958 - RNA, 11 nt, Human
gagucugcaca

SEQ ID NO: 2449959 - RNA, 19 nt, Human
gagugaacaaauuuacaga

SEQ ID NO: 2449960 - RNA, 12 nt, Human
gagucugaugau

SEQ ID NO: 2449961 - RNA, 12 nt, Human
gagugggcccaa

SEQ ID NO: 2449962 - RNA, 23 nt, Human
gagugggggaucacagccucuga

SEQ ID NO: 2449963 - RNA, 13 nt, Human
gagugucuuucca

SEQ ID NO: 2449964 - RNA, 15 nt, Human
gagugucuuuccacg

SEQ ID NO: 2449965 - RNA, 19 nt, Human
gagugucuuuccacggagc

SEQ ID NO: 2449966 - RNA, 21 nt, Human
gagugucuuuccacggagcca

SEQ ID NO: 2449967 - RNA, 18 nt, Human
gagugggacagagucugg

SEQ ID NO: 2449968 - RNA, 19 nt, Human
gagugggggagagcaggcu

SEQ ID NO: 2449969 - RNA, 14 nt, Human
gaguggggcaguag

SEQ ID NO: 2449970 - RNA, 13 nt, Human
gaguggcuccucc

SEQ ID NO: 2449971 - RNA, 19 nt, Human
gaguggccuggccaggagc

SEQ ID NO: 2449972 - RNA, 20 nt, Human
gaguggccuggccaggagcu

SEQ ID NO: 2449973 - RNA, 13 nt, Human
gaguggccuggcc

SEQ ID NO: 2449974 - RNA, 14 nt, Human
gaguggccuggcca

SEQ ID NO: 2449975 - RNA, 15 nt, Human
gaguggccuggccag

SEQ ID NO: 2449976 - RNA, 18 nt, Human
gaguggccuggccaggag

SEQ ID NO: 2449977 - RNA, 17 nt, Human
gagugggacagagucug

SEQ ID NO: 2449978 - RNA, 15 nt, Human
gaguggcuccucccg

SEQ ID NO: 2449979 - RNA, 13 nt, Human
gaguuccuagcca

SEQ ID NO: 2449980 - RNA, 12 nt, Human
gaguuccugcau

SEQ ID NO: 2449981 - RNA, 18 nt, Human
gaguuccccaugcagaca

SEQ ID NO: 2449982 - RNA, 17 nt, Human
gaguuccaugaagacca

SEQ ID NO: 2449983 - RNA, 15 nt, Human
gaguuccaugaagac

SEQ ID NO: 2449984 - RNA, 23 nt, Human
gaguuccugcggagugaagaggg

SEQ ID NO: 2449985 - RNA, 15 nt, Human
gaguucuugugccau

SEQ ID NO: 2449986 - RNA, 21 nt, Human
gaguucuuaaggauugugaua

SEQ ID NO: 2449987 - RNA, 14 nt, Human
gaguuccugcaugc

SEQ ID NO: 2449988 - RNA, 21 nt, Human
gaguuccuugaucuguauaua

SEQ ID NO: 2449989 - RNA, 17 nt, Human
gaguucgagaccagccu

SEQ ID NO: 2449990 - RNA, 21 nt, Human
gaguugaaaaucuuauaauuu

SEQ ID NO: 2449991 - RNA, 14 nt, Human
gaguugaagacaga

SEQ ID NO: 2449992 - RNA, 13 nt, Human
gaguuuuccccac

SEQ ID NO: 2449993 - RNA, 16 nt, Human
gaguuuuggaugcagu

SEQ ID NO: 2449994 - RNA, 18 nt, Human
gaguuaucuaaaagaaau

SEQ ID NO: 2449995 - RNA, 16 nt, Human
gaguuaucuaaaagaa

SEQ ID NO: 2449996 - RNA, 23 nt, Human
gaguucaucuugaauuguaagga

SEQ ID NO: 2449997 - RNA, 18 nt, Human
gaguuagaggccagccug

SEQ ID NO: 2449998 - RNA, 20 nt, Human
gaguuagaggccagccuggc

SEQ ID NO: 2449999 - RNA, 17 nt, Human
gaguuaggcuauucaca

SEQ ID NO: 2450000 - RNA, 18 nt, Human
gaguuaggcuauucacaa

SEQ ID NO: 2450001 - RNA, 18 nt, Human
gaguuauauguucacugu

SEQ ID NO: 2450002 - RNA, 14 nt, Human
gaguuauauguuca

SEQ ID NO: 2450003 - RNA, 18 nt, Human
gaguuaguuucuuuggga

SEQ ID NO: 2450004 - RNA, 22 nt, Human
gagugggggagagcaggcuggc

SEQ ID NO: 2450005 - RNA, 22 nt, Human
gagugucuuuccacggagccac

SEQ ID NO: 2450006 - RNA, 17 nt, Human
gagugugccugaagucc

SEQ ID NO: 2450007 - RNA, 14 nt, Human
gaguuagacuguug

SEQ ID NO: 2450008 - RNA, 14 nt, Human
gaguuagaggccag

SEQ ID NO: 2450009 - RNA, 16 nt, Human
gaguuagaggccagcc

SEQ ID NO: 2450010 - RNA, 12 nt, Human
gaguuagacugu

SEQ ID NO: 2450011 - RNA, 17 nt, Human
gaguuacauuaauguua

SEQ ID NO: 2450012 - RNA, 15 nt, Human
gauggcaacagaucu

SEQ ID NO: 2450013 - RNA, 16 nt, Human
gauggcaacagaucug

SEQ ID NO: 2450014 - RNA, 17 nt, Human
gauggcaacagaucugg

SEQ ID NO: 2450015 - RNA, 21 nt, Human
gauggcaacagaucuggaacc

SEQ ID NO: 2450016 - RNA, 21 nt, Human
gauggcacuuagcuaucagaa

SEQ ID NO: 2450017 - RNA, 15 nt, Human
gauggcaccagaggc

SEQ ID NO: 2450018 - RNA, 14 nt, Human
gauggcaccagagg

SEQ ID NO: 2450019 - RNA, 22 nt, Human
gauggcaacagaucuggaaccu

SEQ ID NO: 2450020 - RNA, 16 nt, Human
gaugggaaagcauugu

SEQ ID NO: 2450021 - RNA, 21 nt, Human
gauggcacuuauaaccaaagc

SEQ ID NO: 2450022 - RNA, 13 nt, Human
gauggcaggaugg

SEQ ID NO: 2450023 - RNA, 17 nt, Human
gauggcaggauggccug

SEQ ID NO: 2450024 - RNA, 15 nt, Human
gauggcaggauggcc

SEQ ID NO: 2450025 - RNA, 15 nt, Human
gauggcagcuguuua

SEQ ID NO: 2450026 - RNA, 18 nt, Human
gauggcaggauggccugg

SEQ ID NO: 2450027 - RNA, 21 nt, Human
gaugggaacgcagaugaucca

SEQ ID NO: 2450028 - RNA, 23 nt, Human
gaugggaaugaggugggaggugg

SEQ ID NO: 2450029 - RNA, 22 nt, Human
gaugggaaugaagcuuguguau

SEQ ID NO: 2450030 - RNA, 18 nt, Human
gaugggaaugaagcuugu

SEQ ID NO: 2450031 - RNA, 16 nt, Human
gaugggaaugaagcuu

SEQ ID NO: 2450032 - RNA, 14 nt, Human
gaugggaaugaagc

SEQ ID NO: 2450033 - RNA, 13 nt, Human
gaugggaaugaag

SEQ ID NO: 2450034 - RNA, 21 nt, Human
gauggcuuugaaugcggccca

SEQ ID NO: 2450035 - RNA, 18 nt, Human
gaugggaaggagggaggu

SEQ ID NO: 2450036 - RNA, 22 nt, Human
gaugggcaacccccagccugcu

SEQ ID NO: 2450037 - RNA, 21 nt, Human
gaugggagcuccucuccugga

SEQ ID NO: 2450038 - RNA, 20 nt, Human
gaugggagcuccucuccugg

SEQ ID NO: 2450039 - RNA, 15 nt, Human
gaugggacugggagg

SEQ ID NO: 2450040 - RNA, 17 nt, Human
gaugggacugggagggc

SEQ ID NO: 2450041 - RNA, 14 nt, Human
gaugggacugggag

SEQ ID NO: 2450042 - RNA, 12 nt, Human
gaugcuccagcc

SEQ ID NO: 2450043 - RNA, 13 nt, Human
gaugcuccagcca

SEQ ID NO: 2450044 - RNA, 16 nt, Human
gaugcuccagccaacc

SEQ ID NO: 2450045 - RNA, 17 nt, Human
gaugcuccagccaaccc

SEQ ID NO: 2450046 - RNA, 22 nt, Human
gaugcuccagccaaccccugug

SEQ ID NO: 2450047 - RNA, 23 nt, Human
gaugcuccagccaaccccugugg

SEQ ID NO: 2450048 - RNA, 13 nt, Human
gaugcucccuccc

SEQ ID NO: 2450049 - RNA, 15 nt, Human
gaugcucccuccccu

SEQ ID NO: 2450050 - RNA, 20 nt, Human
gaugcucccuccccugcccu

SEQ ID NO: 2450051 - RNA, 21 nt, Human
gaugcucccuccccugcccug

SEQ ID NO: 2450052 - RNA, 21 nt, Human
gaugcucaggcuugaaaugca

SEQ ID NO: 2450053 - RNA, 22 nt, Human
gaugccugauugccaagcucag

SEQ ID NO: 2450054 - RNA, 14 nt, Human
gaugcucacagggc

SEQ ID NO: 2450055 - RNA, 14 nt, Human
gaugcucaggcuug

SEQ ID NO: 2450056 - RNA, 21 nt, Human
gaugccuggcgggguggggug

SEQ ID NO: 2450057 - RNA, 15 nt, Human
gaugccugauugcca

SEQ ID NO: 2450058 - RNA, 20 nt, Human
gaugccuccaccgcugccua

SEQ ID NO: 2450059 - RNA, 18 nt, Human
gaugcccuggagguggcu

SEQ ID NO: 2450060 - RNA, 19 nt, Human
gaugcccuggagguggcug

SEQ ID NO: 2450061 - RNA, 23 nt, Human
gaugccucaugauaugucagggc

SEQ ID NO: 2450062 - RNA, 12 nt, Human
gaugccuccacc

SEQ ID NO: 2450063 - RNA, 13 nt, Human
gaugccuccaccg

SEQ ID NO: 2450064 - RNA, 16 nt, Human
gaugccuccaccgcug

SEQ ID NO: 2450065 - RNA, 17 nt, Human
gaugccuccaccgcugc

SEQ ID NO: 2450066 - RNA, 21 nt, Human
gaugcauucuugguuggcugg

SEQ ID NO: 2450067 - RNA, 21 nt, Human
gaugccccgucccccucuggc

SEQ ID NO: 2450068 - RNA, 18 nt, Human
gaugcauuaaaagaaaau

SEQ ID NO: 2450069 - RNA, 12 nt, Human
gaugcccuggag

SEQ ID NO: 2450070 - RNA, 15 nt, Human
gaugcccuggaggug

SEQ ID NO: 2450071 - RNA, 22 nt, Human
gaugcaucuaccgcucuuggga

SEQ ID NO: 2450072 - RNA, 20 nt, Human
gaugcauggagauagcccca

SEQ ID NO: 2450073 - RNA, 21 nt, Human
gaugcauguuuuccagcuccu

SEQ ID NO: 2450074 - RNA, 20 nt, Human
gaugcauguuuuccagcucc

SEQ ID NO: 2450075 - RNA, 15 nt, Human
gaugcauuaaaagaa

SEQ ID NO: 2450076 - RNA, 16 nt, Human
gaugcauuaaaagaaa

SEQ ID NO: 2450077 - RNA, 17 nt, Human
gaugcauuaaaagaaaa

SEQ ID NO: 2450078 - RNA, 18 nt, Human
gaugcaguucugaagaag

SEQ ID NO: 2450079 - RNA, 13 nt, Human
gaugcaaugaaca

SEQ ID NO: 2450080 - RNA, 13 nt, Human
gaugcauggagau

SEQ ID NO: 2450081 - RNA, 21 nt, Human
gaugcaaucgguuuaaacaug

SEQ ID NO: 2450082 - RNA, 18 nt, Human
gaugcaaggaccaggacu

SEQ ID NO: 2450083 - RNA, 19 nt, Human
gaugcaaggaccaggacuc

SEQ ID NO: 2450084 - RNA, 17 nt, Human
gaugcaauguagagggg

SEQ ID NO: 2450085 - RNA, 18 nt, Human
gaugcaaugugcuacuga

SEQ ID NO: 2450086 - RNA, 14 nt, Human
gaugcaaagaaaau

SEQ ID NO: 2450087 - RNA, 21 nt, Human
gaugacucccuuaaaauagaa

SEQ ID NO: 2450088 - RNA, 17 nt, Human
gaugcaaagaggcaaga

SEQ ID NO: 2450089 - RNA, 14 nt, Human
gaugcaaagaggca

SEQ ID NO: 2450090 - RNA, 15 nt, Human
gaugcaaagaggcaa

SEQ ID NO: 2450091 - RNA, 17 nt, Human
gaugcaagauauuuaua

SEQ ID NO: 2450092 - RNA, 16 nt, Human
gaugcaaagaggcaag

SEQ ID NO: 2450093 - RNA, 14 nt, Human
gaugcaaggaccag

SEQ ID NO: 2450094 - RNA, 17 nt, Human
gaugcaaggaccaggac

SEQ ID NO: 2450095 - RNA, 22 nt, Human
gaugagaaagguugaagcacca

SEQ ID NO: 2450096 - RNA, 17 nt, Human
gaugacugaguccucgu

SEQ ID NO: 2450097 - RNA, 11 nt, Human
gaugagaaagg

SEQ ID NO: 2450098 - RNA, 12 nt, Human
gaugacugaguc

SEQ ID NO: 2450099 - RNA, 14 nt, Human
gaugacugaguccu

SEQ ID NO: 2450100 - RNA, 12 nt, Human
gaugacuaaaau

SEQ ID NO: 2450101 - RNA, 15 nt, Human
gaugacuaaaauauu

SEQ ID NO: 2450102 - RNA, 18 nt, Human
gaugacuaaaauauuuau

SEQ ID NO: 2450103 - RNA, 15 nt, Human
gaugacuagaggcag

SEQ ID NO: 2450104 - RNA, 21 nt, Human
gaugacgguauuaugcuucuu

SEQ ID NO: 2450105 - RNA, 20 nt, Human
gaugacgguauuaugcuucu

SEQ ID NO: 2450106 - RNA, 19 nt, Human
gaugacgguauuaugcuuc

SEQ ID NO: 2450107 - RNA, 14 nt, Human
gaugacuauggaaa

SEQ ID NO: 2450108 - RNA, 16 nt, Human
gaugacuagaggcagg

SEQ ID NO: 2450109 - RNA, 18 nt, Human
gaugacucccuuaaaaua

SEQ ID NO: 2450110 - RNA, 19 nt, Human
gauccugagccagauuuca

SEQ ID NO: 2450111 - RNA, 15 nt, Human
gauccugagccagau

SEQ ID NO: 2450112 - RNA, 14 nt, Human
gauccugagccaga

SEQ ID NO: 2450113 - RNA, 13 nt, Human
gauccugagccag

SEQ ID NO: 2450114 - RNA, 21 nt, Human
gauccucccaccucagccucc

SEQ ID NO: 2450115 - RNA, 20 nt, Human
gauccucccaccucagccuc

SEQ ID NO: 2450116 - RNA, 12 nt, Human
gauccuccaggu

SEQ ID NO: 2450117 - RNA, 19 nt, Human
gauccucccaccucagccu

SEQ ID NO: 2450118 - RNA, 14 nt, Human
gaucacgccacugc

SEQ ID NO: 2450119 - RNA, 13 nt, Human
gaucacgccacug

SEQ ID NO: 2450120 - RNA, 23 nt, Human
gaucaaccccuucgcuccugugu

SEQ ID NO: 2450121 - RNA, 14 nt, Human
gaucaagaaagugu

SEQ ID NO: 2450122 - RNA, 14 nt, Human
gaucaagcugugag

SEQ ID NO: 2450123 - RNA, 18 nt, Human
gauccuauucucaccagg

SEQ ID NO: 2450124 - RNA, 19 nt, Human
gauccuauucucaccagga

SEQ ID NO: 2450125 - RNA, 11 nt, Human
gauccuccagg

SEQ ID NO: 2450126 - RNA, 18 nt, Human
gauccuaguuccaccauc

SEQ ID NO: 2450127 - RNA, 15 nt, Human
gaucacgccacugca

SEQ ID NO: 2450128 - RNA, 12 nt, Human
gauccuuccucc

SEQ ID NO: 2450129 - RNA, 14 nt, Human
gauccuuuuauguu

SEQ ID NO: 2450130 - RNA, 19 nt, Human
gauccucacaaccaccuaa

SEQ ID NO: 2450131 - RNA, 20 nt, Human
gauccuauucucaccaggaa

SEQ ID NO: 2450132 - RNA, 23 nt, Human
gauccucauauggcccaguguca

SEQ ID NO: 2450133 - RNA, 18 nt, Human
gauccucccaccucagcc

SEQ ID NO: 2450134 - RNA, 15 nt, Human
gauccuuuuggaguc

SEQ ID NO: 2450135 - RNA, 17 nt, Human
gauccuuuuggagucag

SEQ ID NO: 2450136 - RNA, 17 nt, Human
gaucgaaccguuuugaa

SEQ ID NO: 2450137 - RNA, 20 nt, Human
gaucgcaagagccauguaga

SEQ ID NO: 2450138 - RNA, 13 nt, Human
gaucgcaguuugc

SEQ ID NO: 2450139 - RNA, 19 nt, Human
gaucuguuuugaaggcaaa

SEQ ID NO: 2450140 - RNA, 20 nt, Human
gaucuguuuugaaggcaaaa

SEQ ID NO: 2450141 - RNA, 23 nt, Human
gaucgcaucauugcacucuagcc

SEQ ID NO: 2450142 - RNA, 15 nt, Human
gaucgcaucauugca

SEQ ID NO: 2450143 - RNA, 18 nt, Human
gaucgcaguuugccuggu

SEQ ID NO: 2450144 - RNA, 13 nt, Human
gaucuuaaauuuu

SEQ ID NO: 2450145 - RNA, 12 nt, Human
gaucuuaaauuu

SEQ ID NO: 2450146 - RNA, 19 nt, Human
gaucuuaaauuuugugaua

SEQ ID NO: 2450147 - RNA, 14 nt, Human
gaucgcccccaccu

SEQ ID NO: 2450148 - RNA, 19 nt, Human
gaucuguuuuuaaaaauca

SEQ ID NO: 2450149 - RNA, 21 nt, Human
gaucuguuuuuaaaaaucaua

SEQ ID NO: 2450150 - RNA, 23 nt, Human
gaucuguuuuuaaaaaucauaaa

SEQ ID NO: 2450151 - RNA, 14 nt, Human
gaucuucaauggcu

SEQ ID NO: 2450152 - RNA, 14 nt, Human
gaucuucagagcag

SEQ ID NO: 2450153 - RNA, 16 nt, Human
gaucuucaauggcuuu

SEQ ID NO: 2450154 - RNA, 15 nt, Human
gaucuucaauggcuu

SEQ ID NO: 2450155 - RNA, 14 nt, Human
gaucuuuaaaauac

SEQ ID NO: 2450156 - RNA, 16 nt, Human
gaucuuugcagacagg

SEQ ID NO: 2450157 - RNA, 11 nt, Human
gaucuuucagg

SEQ ID NO: 2450158 - RNA, 12 nt, Human
gaucuuucagga

SEQ ID NO: 2450159 - RNA, 15 nt, Human
gaucuuucaggaaag

SEQ ID NO: 2450160 - RNA, 22 nt, Human
gaugaaaaagcauguacagugu

SEQ ID NO: 2450161 - RNA, 20 nt, Human
gaugaaaaagcauguacagu

SEQ ID NO: 2450162 - RNA, 19 nt, Human
gaugaaaaagcauguacag

SEQ ID NO: 2450163 - RNA, 18 nt, Human
gaugaaaaagcauguaca

SEQ ID NO: 2450164 - RNA, 17 nt, Human
gaugaaaaagcauguac

SEQ ID NO: 2450165 - RNA, 16 nt, Human
gaugaaaaagcaugua

SEQ ID NO: 2450166 - RNA, 15 nt, Human
gaugaaaaagcaugu

SEQ ID NO: 2450167 - RNA, 14 nt, Human
gaugaaaaauagca

SEQ ID NO: 2450168 - RNA, 15 nt, Human
gaugaaaaaauaaca

SEQ ID NO: 2450169 - RNA, 16 nt, Human
gaucuuuucaaguuaa

SEQ ID NO: 2450170 - RNA, 18 nt, Human
gaucuuucuuuccuuucu

SEQ ID NO: 2450171 - RNA, 19 nt, Human
gauguugaaaaaguucugc

SEQ ID NO: 2450172 - RNA, 21 nt, Human
gauguucuuucacccuuuucu

SEQ ID NO: 2450173 - RNA, 13 nt, Human
gauguuuuaauuc

SEQ ID NO: 2450174 - RNA, 21 nt, Human
gauguuuuaaggaugcuugua

SEQ ID NO: 2450175 - RNA, 14 nt, Human
gauguuuuccauga

SEQ ID NO: 2450176 - RNA, 23 nt, Human
gauguuuuccaugaguccccugu

SEQ ID NO: 2450177 - RNA, 15 nt, Human
gauguuuuccaugag

SEQ ID NO: 2450178 - RNA, 12 nt, Human
gauuaaauucuu

SEQ ID NO: 2450179 - RNA, 19 nt, Human
gauuaaauucuugcaaagu

SEQ ID NO: 2450180 - RNA, 21 nt, Human
gauuauuuuuucagaccgaaa

SEQ ID NO: 2450181 - RNA, 18 nt, Human
gauuauuuuuucagaccg

SEQ ID NO: 2450182 - RNA, 17 nt, Human
gauuauuuuuucagacc

SEQ ID NO: 2450183 - RNA, 13 nt, Human
gauuaagagccau

SEQ ID NO: 2450184 - RNA, 19 nt, Human
gauucaacagguuuuccug

SEQ ID NO: 2450185 - RNA, 14 nt, Human
gauuaaccucugca

SEQ ID NO: 2450186 - RNA, 17 nt, Human
gauuaaccucugcacua

SEQ ID NO: 2450187 - RNA, 22 nt, Human
gauuaagaucucagugguuaag

SEQ ID NO: 2450188 - RNA, 22 nt, Human
gauuaagagauggguuugacaa

SEQ ID NO: 2450189 - RNA, 21 nt, Human
gauguuuuacgucugggagaa

SEQ ID NO: 2450190 - RNA, 18 nt, Human
gauguuuuaauuccauga

SEQ ID NO: 2450191 - RNA, 23 nt, Human
gauguuuuagccauuguuggcuu

SEQ ID NO: 2450192 - RNA, 18 nt, Human
gauuaaccacuucagcug

SEQ ID NO: 2450193 - RNA, 19 nt, Human
gauuaaccacuucagcuga

SEQ ID NO: 2450194 - RNA, 21 nt, Human
gauuaaccacuucagcugacu

SEQ ID NO: 2450195 - RNA, 16 nt, Human
gauguucugggacaca

SEQ ID NO: 2450196 - RNA, 14 nt, Human
gauguguugugaua

SEQ ID NO: 2450197 - RNA, 12 nt, Human
gauguguuguga

SEQ ID NO: 2450198 - RNA, 14 nt, Human
gauguucugggaca

SEQ ID NO: 2450199 - RNA, 21 nt, Human
gauguguccugauaagcugag

SEQ ID NO: 2450200 - RNA, 13 nt, Human
gaugugugcaugu

SEQ ID NO: 2450201 - RNA, 12 nt, Human
gauguguacauc

SEQ ID NO: 2450202 - RNA, 22 nt, Human
gauguguacaucccauguaaca

SEQ ID NO: 2450203 - RNA, 16 nt, Human
gaugugcuuuucucca

SEQ ID NO: 2450204 - RNA, 21 nt, Human
gauguggaaaagccaagaggc

SEQ ID NO: 2450205 - RNA, 23 nt, Human
gauguggaaaagccaagaggcug

SEQ ID NO: 2450206 - RNA, 20 nt, Human
gaugugcuuguuaacugagu

SEQ ID NO: 2450207 - RNA, 11 nt, Human
gaugugcuuuu

SEQ ID NO: 2450208 - RNA, 21 nt, Human
gaugugcuuugcauuccuaca

SEQ ID NO: 2450209 - RNA, 19 nt, Human
gaugugcuuguuaacugag

SEQ ID NO: 2450210 - RNA, 15 nt, Human
gaugugccugggugg

SEQ ID NO: 2450211 - RNA, 15 nt, Human
gaugguggagggcca

SEQ ID NO: 2450212 - RNA, 20 nt, Human
gaugugccauuuuaaaaaaa

SEQ ID NO: 2450213 - RNA, 13 nt, Human
gaugugccugggu

SEQ ID NO: 2450214 - RNA, 23 nt, Human
gauggugcaaugaccuuucaaua

SEQ ID NO: 2450215 - RNA, 14 nt, Human
gaugguggagggcc

SEQ ID NO: 2450216 - RNA, 16 nt, Human
gauggugcugagaagc

SEQ ID NO: 2450217 - RNA, 17 nt, Human
gauggugcugagaagcu

SEQ ID NO: 2450218 - RNA, 12 nt, Human
gauggugcugag

SEQ ID NO: 2450219 - RNA, 14 nt, Human
gauggugcugagaa

SEQ ID NO: 2450220 - RNA, 14 nt, Human
gauggggaaggagg

SEQ ID NO: 2450221 - RNA, 20 nt, Human
gauggugcaaugaccuuuca

SEQ ID NO: 2450222 - RNA, 20 nt, Human
gaugggccugcuuccugucu

SEQ ID NO: 2450223 - RNA, 18 nt, Human
gaugggcuuguuuucuug

SEQ ID NO: 2450224 - RNA, 13 nt, Human
gauggggaaggag

SEQ ID NO: 2450225 - RNA, 17 nt, Human
gaugggcaugggguggg

SEQ ID NO: 2450226 - RNA, 23 nt, Human
gaugggagcuccucuccuggagg

SEQ ID NO: 2450227 - RNA, 22 nt, Human
gaugggagcuccucuccuggag

SEQ ID NO: 2450228 - RNA, 21 nt, Human
gaugggcauggggugggccuc

SEQ ID NO: 2450229 - RNA, 20 nt, Human
gaugggcauggggugggccu

SEQ ID NO: 2450230 - RNA, 22 nt, Human
gaugggcauggggugggccucu

SEQ ID NO: 2450231 - RNA, 15 nt, Human
gaugggccaccgccg

SEQ ID NO: 2450232 - RNA, 13 nt, Human
gaugggccaccgc

SEQ ID NO: 2450233 - RNA, 14 nt, Human
gaugggccaccgcc

SEQ ID NO: 2450234 - RNA, 16 nt, Human
gaugggcccaauucuu

SEQ ID NO: 2450235 - RNA, 20 nt, Human
gauuguccccgacccuugcc

SEQ ID NO: 2450236 - RNA, 13 nt, Human
gauugugccccug

SEQ ID NO: 2450237 - RNA, 21 nt, Human
gauugugaauauuuccauaug

SEQ ID NO: 2450238 - RNA, 23 nt, Human
gauugugggaauuaaggaaguga

SEQ ID NO: 2450239 - RNA, 15 nt, Human
gauuguccccgaccc

SEQ ID NO: 2450240 - RNA, 23 nt, Human
gauuguaacguugcugugggaac

SEQ ID NO: 2450241 - RNA, 22 nt, Human
gauuguaacguugcugugggaa

SEQ ID NO: 2450242 - RNA, 22 nt, Human
gauuggauuauuuaauaacauu

SEQ ID NO: 2450243 - RNA, 19 nt, Human
gauuguaacguugcugugg

SEQ ID NO: 2450244 - RNA, 21 nt, Human
gauuggauuauuuaauaacau

SEQ ID NO: 2450245 - RNA, 20 nt, Human
gauuggauuauuuaauaaca

SEQ ID NO: 2450246 - RNA, 13 nt, Human
gauuggauuauuu

SEQ ID NO: 2450247 - RNA, 20 nt, Human
gauuggauuauucauuuaaa

SEQ ID NO: 2450248 - RNA, 17 nt, Human
gauuggauuauucauuu

SEQ ID NO: 2450249 - RNA, 15 nt, Human
gauuggauuauucau

SEQ ID NO: 2450250 - RNA, 14 nt, Human
gauuggauuauuca

SEQ ID NO: 2450251 - RNA, 11 nt, Human
gauuggauuau

SEQ ID NO: 2450252 - RNA, 22 nt, Human
gauuggagauagggaaagaaag

SEQ ID NO: 2450253 - RNA, 22 nt, Human
gauuggauacgcaucagacaga

SEQ ID NO: 2450254 - RNA, 16 nt, Human
gauuggacggccugau

SEQ ID NO: 2450255 - RNA, 23 nt, Human
gauuggacggccugaugcucccu

SEQ ID NO: 2450256 - RNA, 21 nt, Human
gauugaaguauuuugcuggaa

SEQ ID NO: 2450257 - RNA, 23 nt, Human
gauugaaguauuuugcuggaaua

SEQ ID NO: 2450258 - RNA, 16 nt, Human
gauugacagcuuugcu

SEQ ID NO: 2450259 - RNA, 21 nt, Human
gauugaaaacuuuucucagau

SEQ ID NO: 2450260 - RNA, 20 nt, Human
gauugaaaacuuuucucaga

SEQ ID NO: 2450261 - RNA, 16 nt, Human
gauuauuuuuucagac

SEQ ID NO: 2450262 - RNA, 22 nt, Human
gauucuacuuuaagcacuacau

SEQ ID NO: 2450263 - RNA, 18 nt, Human
gauucuacuuuaagcacu

SEQ ID NO: 2450264 - RNA, 14 nt, Human
gauucuacuuuaag

SEQ ID NO: 2450265 - RNA, 15 nt, Human
gauucuaaugucuuc

SEQ ID NO: 2450266 - RNA, 23 nt, Human
gauucuacuuuaagcacuacaua

SEQ ID NO: 2450267 - RNA, 14 nt, Human
gauuggacauuuuc

SEQ ID NO: 2450268 - RNA, 18 nt, Human
gauugcuugagcucagga

SEQ ID NO: 2450269 - RNA, 23 nt, Human
gauugacgggacuguugguauug

SEQ ID NO: 2450270 - RNA, 17 nt, Human
gauugacagcuuugcug

SEQ ID NO: 2450271 - RNA, 19 nt, Human
gauugacagcuuugcugcu

SEQ ID NO: 2450272 - RNA, 19 nt, Human
gauuccugacccaggccgc

SEQ ID NO: 2450273 - RNA, 18 nt, Human
gauuccugacccaggccg

SEQ ID NO: 2450274 - RNA, 17 nt, Human
gauuccugacccaggcc

SEQ ID NO: 2450275 - RNA, 16 nt, Human
gauuccugacccaggc

SEQ ID NO: 2450276 - RNA, 15 nt, Human
gauuccugacccagg

SEQ ID NO: 2450277 - RNA, 13 nt, Human
gauuccugaccca

SEQ ID NO: 2450278 - RNA, 12 nt, Human
gauuccugaccc

SEQ ID NO: 2450279 - RNA, 19 nt, Human
gauucuaauuuuuaagcaa

SEQ ID NO: 2450280 - RNA, 23 nt, Human
gauucuaccacacagcagcaguu

SEQ ID NO: 2450281 - RNA, 15 nt, Human
gauuccugagccagu

SEQ ID NO: 2450282 - RNA, 13 nt, Human
gauucccagagca

SEQ ID NO: 2450283 - RNA, 19 nt, Human
gauucccagagacaggaaa

SEQ ID NO: 2450284 - RNA, 21 nt, Human
gauucccagagacaggaaaau

SEQ ID NO: 2450285 - RNA, 22 nt, Human
gauucccaccaaggucuucagc

SEQ ID NO: 2450286 - RNA, 16 nt, Human
gauucccaccaagguc

SEQ ID NO: 2450287 - RNA, 13 nt, Human
gauucccagagac

SEQ ID NO: 2450288 - RNA, 14 nt, Human
gauucccagagaca

SEQ ID NO: 2450289 - RNA, 17 nt, Human
gauucccaggaugagca

SEQ ID NO: 2450290 - RNA, 19 nt, Human
gauucccagagcaaaauaa

SEQ ID NO: 2450291 - RNA, 22 nt, Human
gauuccccauugccuccuccuu

SEQ ID NO: 2450292 - RNA, 21 nt, Human
gauuccccuaaccucauuccc

SEQ ID NO: 2450293 - RNA, 21 nt, Human
gauucccuccugcuacucugu

SEQ ID NO: 2450294 - RNA, 17 nt, Human
gauuccccauugccucc

SEQ ID NO: 2450295 - RNA, 14 nt, Human
gauucaaucuguaa

SEQ ID NO: 2450296 - RNA, 16 nt, Human
gauucaaucuguaaac

SEQ ID NO: 2450297 - RNA, 18 nt, Human
gauucaaucuguaaacug

SEQ ID NO: 2450298 - RNA, 21 nt, Human
gauucaaaauugacauugcuu

SEQ ID NO: 2450299 - RNA, 18 nt, Human
gauucaaucgacuggguu

SEQ ID NO: 2450300 - RNA, 12 nt, Human
gauucacacugu

SEQ ID NO: 2450301 - RNA, 21 nt, Human
gauucacaccugacucugaaa

SEQ ID NO: 2450302 - RNA, 23 nt, Human
gauucaacuaaaaaaaaaaaagu

SEQ ID NO: 2450303 - RNA, 14 nt, Human
gauucacaucugca

SEQ ID NO: 2450304 - RNA, 12 nt, Human
gauucagacagc

SEQ ID NO: 2450305 - RNA, 14 nt, Human
gauucaccugagca

SEQ ID NO: 2450306 - RNA, 21 nt, Human
gauucacccuguccaaacugc

SEQ ID NO: 2450307 - RNA, 22 nt, Human
gauucccaagcucugcuccucu

SEQ ID NO: 2450308 - RNA, 14 nt, Human
gauucagaagggga

SEQ ID NO: 2450309 - RNA, 12 nt, Human
gauucagaaauu

SEQ ID NO: 2450310 - RNA, 19 nt, Human
gccagacuggcacaguuuu

SEQ ID NO: 2450311 - RNA, 16 nt, Human
gccagagacacaagcc

SEQ ID NO: 2450312 - RNA, 19 nt, Human
gccagagacacaagccuuc

SEQ ID NO: 2450313 - RNA, 17 nt, Human
gccagagacacaagccu

SEQ ID NO: 2450314 - RNA, 10 nt, Human
gccagaggag

SEQ ID NO: 2450315 - RNA, 20 nt, Human
gccagagacacaagccuucg

SEQ ID NO: 2450316 - RNA, 15 nt, Human
gccagacucuggucu

SEQ ID NO: 2450317 - RNA, 24 nt, Human
gccagaggaacuguccagagagca

SEQ ID NO: 2450318 - RNA, 13 nt, Human
gccagacucuggu

SEQ ID NO: 2450319 - RNA, 22 nt, Human
gccacucugccucugccugcau

SEQ ID NO: 2450320 - RNA, 20 nt, Human
gccacuacacuccagccuga

SEQ ID NO: 2450321 - RNA, 21 nt, Human
gccacuacacuccagccugag

SEQ ID NO: 2450322 - RNA, 22 nt, Human
gccacuacacuccagccugagc

SEQ ID NO: 2450323 - RNA, 23 nt, Human
gccacuacacuccagccugagca

SEQ ID NO: 2450324 - RNA, 23 nt, Human
gccacuccucugacucagggcuc

SEQ ID NO: 2450325 - RNA, 15 nt, Human
gccacuccugaaccc

SEQ ID NO: 2450326 - RNA, 14 nt, Human
gccacucgcuuccc

SEQ ID NO: 2450327 - RNA, 18 nt, Human
gccacucgcuucccccau

SEQ ID NO: 2450328 - RNA, 23 nt, Human
gccacucgggaggcugagacagg

SEQ ID NO: 2450329 - RNA, 20 nt, Human
gccacucgggaggcugagac

SEQ ID NO: 2450330 - RNA, 12 nt, Human
gccacucugccu

SEQ ID NO: 2450331 - RNA, 15 nt, Human
gccagacuggcacag

SEQ ID NO: 2450332 - RNA, 18 nt, Human
gccagacuggcacaguuu

SEQ ID NO: 2450333 - RNA, 13 nt, Human
gccacucugccuc

SEQ ID NO: 2450334 - RNA, 14 nt, Human
gccacucugccucu

SEQ ID NO: 2450335 - RNA, 15 nt, Human
gccacucugccucug

SEQ ID NO: 2450336 - RNA, 17 nt, Human
gccacucugccucugcc

SEQ ID NO: 2450337 - RNA, 13 nt, Human
gccacucuuccaa

SEQ ID NO: 2450338 - RNA, 19 nt, Human
gccacucugccucugccug

SEQ ID NO: 2450339 - RNA, 21 nt, Human
gccacucugccucugccugca

SEQ ID NO: 2450340 - RNA, 14 nt, Human
gccacugaagcugg

SEQ ID NO: 2450341 - RNA, 15 nt, Human
gccacugaagcuggg

SEQ ID NO: 2450342 - RNA, 17 nt, Human
gccacugaagcugggau

SEQ ID NO: 2450343 - RNA, 23 nt, Human
gccagacggcacccacccagcac

SEQ ID NO: 2450344 - RNA, 18 nt, Human
gccagaugcaccagcccu

SEQ ID NO: 2450345 - RNA, 17 nt, Human
gccagaugcaccagccc

SEQ ID NO: 2450346 - RNA, 16 nt, Human
gccagaugcaccagcc

SEQ ID NO: 2450347 - RNA, 24 nt, Human
gccagaguuccugcggagugaaga

SEQ ID NO: 2450348 - RNA, 22 nt, Human
gccagaguuccugcggagugaa

SEQ ID NO: 2450349 - RNA, 18 nt, Human
gccagaguuccugcggag

SEQ ID NO: 2450350 - RNA, 13 nt, Human
gccagaguuccug

SEQ ID NO: 2450351 - RNA, 23 nt, Human
gccagaguggccuggccaggagc

SEQ ID NO: 2450352 - RNA, 24 nt, Human
gccagaguggccuggccaggagcu

SEQ ID NO: 2450353 - RNA, 20 nt, Human
gccagaggugggcagguggu

SEQ ID NO: 2450354 - RNA, 19 nt, Human
gccagaggugggcaggugg

SEQ ID NO: 2450355 - RNA, 17 nt, Human
gccagaggugggcaggu

SEQ ID NO: 2450356 - RNA, 16 nt, Human
gccagaggugggcagg

SEQ ID NO: 2450357 - RNA, 15 nt, Human
gccagaggugggcag

SEQ ID NO: 2450358 - RNA, 12 nt, Human
gccagagguggg

SEQ ID NO: 2450359 - RNA, 23 nt, Human
gccagagggagugacagaggcag

SEQ ID NO: 2450360 - RNA, 17 nt, Human
gccagaguccuuuccaa

SEQ ID NO: 2450361 - RNA, 22 nt, Human
gccagaggugggcagguggugg

SEQ ID NO: 2450362 - RNA, 13 nt, Human
gccagaguggccu

SEQ ID NO: 2450363 - RNA, 14 nt, Human
gccagaguggccug

SEQ ID NO: 2450364 - RNA, 15 nt, Human
gccagaguggccugg

SEQ ID NO: 2450365 - RNA, 17 nt, Human
gccagaguggccuggcc

SEQ ID NO: 2450366 - RNA, 18 nt, Human
gccagaguggccuggcca

SEQ ID NO: 2450367 - RNA, 19 nt, Human
gccagaguggccuggccag

SEQ ID NO: 2450368 - RNA, 22 nt, Human
gccagaguggccuggccaggag

SEQ ID NO: 2450369 - RNA, 17 nt, Human
gccagaggagagaggac

SEQ ID NO: 2450370 - RNA, 15 nt, Human
gccagaggagagagg

SEQ ID NO: 2450371 - RNA, 13 nt, Human
gccagaggagaga

SEQ ID NO: 2450372 - RNA, 12 nt, Human
gccagaggagag

SEQ ID NO: 2450373 - RNA, 22 nt, Human
gccagaggagagaggacccccu

SEQ ID NO: 2450374 - RNA, 19 nt, Human
gccagaggagagaggaccc

SEQ ID NO: 2450375 - RNA, 22 nt, Human
gccagagggagugacagaggca

SEQ ID NO: 2450376 - RNA, 21 nt, Human
gccagagggagugacagaggc

SEQ ID NO: 2450377 - RNA, 11 nt, Human
gccaccugggu

SEQ ID NO: 2450378 - RNA, 14 nt, Human
gccaccuggggcag

SEQ ID NO: 2450379 - RNA, 16 nt, Human
gccaccuggggcaguc

SEQ ID NO: 2450380 - RNA, 17 nt, Human
gccaccuggggcaguca

SEQ ID NO: 2450381 - RNA, 20 nt, Human
gccaccuggcauuccuucug

SEQ ID NO: 2450382 - RNA, 12 nt, Human
gccaccuggggc

SEQ ID NO: 2450383 - RNA, 15 nt, Human
gccacgauugcagga

SEQ ID NO: 2450384 - RNA, 20 nt, Human
gccaccugcggugcuaucuc

SEQ ID NO: 2450385 - RNA, 14 nt, Human
gccaccugcggugc

SEQ ID NO: 2450386 - RNA, 22 nt, Human
gccaccugcggugcuaucuccc

SEQ ID NO: 2450387 - RNA, 21 nt, Human
gccaccugcccccuucuccca

SEQ ID NO: 2450388 - RNA, 18 nt, Human
gccaccugcccccuucuc

SEQ ID NO: 2450389 - RNA, 20 nt, Human
gccaccugcccccuucuccc

SEQ ID NO: 2450390 - RNA, 23 nt, Human
gccaccugcccccuucucccaca

SEQ ID NO: 2450391 - RNA, 20 nt, Human
gccacgcccaacuaauuuuu

SEQ ID NO: 2450392 - RNA, 17 nt, Human
gccacggccaggccaga

SEQ ID NO: 2450393 - RNA, 18 nt, Human
gccacggccaggccagag

SEQ ID NO: 2450394 - RNA, 13 nt, Human
gccacuaagcaga

SEQ ID NO: 2450395 - RNA, 14 nt, Human
gccacuaagcagag

SEQ ID NO: 2450396 - RNA, 15 nt, Human
gccacuaagcagagg

SEQ ID NO: 2450397 - RNA, 16 nt, Human
gccacuaagcagagga

SEQ ID NO: 2450398 - RNA, 17 nt, Human
gccacuaagcagaggag

SEQ ID NO: 2450399 - RNA, 19 nt, Human
gccacuaagcagaggaggg

SEQ ID NO: 2450400 - RNA, 20 nt, Human
gccacuaagcagaggagggg

SEQ ID NO: 2450401 - RNA, 23 nt, Human
gccacuaagcagaggaggggccg

SEQ ID NO: 2450402 - RNA, 17 nt, Human
gccacuacacuccagcc

SEQ ID NO: 2450403 - RNA, 18 nt, Human
gccacuacacuccagccu

SEQ ID NO: 2450404 - RNA, 19 nt, Human
gccacuacacuccagccug

SEQ ID NO: 2450405 - RNA, 19 nt, Human
gccacggccaggccagagg

SEQ ID NO: 2450406 - RNA, 13 nt, Human
gccacgugccagg

SEQ ID NO: 2450407 - RNA, 22 nt, Human
gccacgggucuguguucgacuc

SEQ ID NO: 2450408 - RNA, 13 nt, Human
gccacggcagccu

SEQ ID NO: 2450409 - RNA, 23 nt, Human
gccaccucugcggaccccagcug

SEQ ID NO: 2450410 - RNA, 21 nt, Human
gccaccucugcggaccccagc

SEQ ID NO: 2450411 - RNA, 20 nt, Human
gccaccucugcggaccccag

SEQ ID NO: 2450412 - RNA, 14 nt, Human
gccaccucugcgga

SEQ ID NO: 2450413 - RNA, 11 nt, Human
gccaccucugc

SEQ ID NO: 2450414 - RNA, 16 nt, Human
gccaccucucuccuuu

SEQ ID NO: 2450415 - RNA, 13 nt, Human
gccaccucucucc

SEQ ID NO: 2450416 - RNA, 15 nt, Human
gccaccucucccuca

SEQ ID NO: 2450417 - RNA, 23 nt, Human
gccaccucuccaagggcuucugc

SEQ ID NO: 2450418 - RNA, 22 nt, Human
gccaccucuccaagggcuucug

SEQ ID NO: 2450419 - RNA, 18 nt, Human
gccaccucuccaagggcu

SEQ ID NO: 2450420 - RNA, 17 nt, Human
gccaccucuccaagggc

SEQ ID NO: 2450421 - RNA, 15 nt, Human
gccaccucuccaagg

SEQ ID NO: 2450422 - RNA, 14 nt, Human
gccaccucuccaag

SEQ ID NO: 2450423 - RNA, 13 nt, Human
gccaccucuccaa

SEQ ID NO: 2450424 - RNA, 12 nt, Human
gccaccucucca

SEQ ID NO: 2450425 - RNA, 20 nt, Human
gccaccucccugacccgucu

SEQ ID NO: 2450426 - RNA, 22 nt, Human
gccaccuccccuauccacccag

SEQ ID NO: 2450427 - RNA, 22 nt, Human
gccaccucugcggaccccagcu

SEQ ID NO: 2450428 - RNA, 20 nt, Human
gccaccugaggugggcccag

SEQ ID NO: 2450429 - RNA, 19 nt, Human
gccaccugaggugggccca

SEQ ID NO: 2450430 - RNA, 18 nt, Human
gccaccugaggugggccc

SEQ ID NO: 2450431 - RNA, 15 nt, Human
gccaccugagguggg

SEQ ID NO: 2450432 - RNA, 22 nt, Human
gccaccugaggugggcccagga

SEQ ID NO: 2450433 - RNA, 21 nt, Human
gccaccugaggugggcccagg

SEQ ID NO: 2450434 - RNA, 23 nt, Human
gccaccugaggugggcccaggac

SEQ ID NO: 2450435 - RNA, 17 nt, Human
gccaccugccuguuggg

SEQ ID NO: 2450436 - RNA, 13 nt, Human
gccaccugccccc

SEQ ID NO: 2450437 - RNA, 14 nt, Human
gccaccugcccccu

SEQ ID NO: 2450438 - RNA, 16 nt, Human
gccaccugcccccuuc

SEQ ID NO: 2450439 - RNA, 17 nt, Human
gccaccugcccccuucu

SEQ ID NO: 2450440 - RNA, 20 nt, Human
gccaccgcuuccggcuccug

SEQ ID NO: 2450441 - RNA, 17 nt, Human
gccaccgcgccuggccg

SEQ ID NO: 2450442 - RNA, 17 nt, Human
gccaccgugccuggcca

SEQ ID NO: 2450443 - RNA, 20 nt, Human
gccaccuaucucgugggaga

SEQ ID NO: 2450444 - RNA, 19 nt, Human
gccaccuaucucgugggag

SEQ ID NO: 2450445 - RNA, 15 nt, Human
gccaccuaucucgug

SEQ ID NO: 2450446 - RNA, 23 nt, Human
gccaccgcuuccggcuccugugc

SEQ ID NO: 2450447 - RNA, 22 nt, Human
gccaccgugccuggccacgccc

SEQ ID NO: 2450448 - RNA, 15 nt, Human
gccaccuccccuauc

SEQ ID NO: 2450449 - RNA, 17 nt, Human
gccaccuccccuaucca

SEQ ID NO: 2450450 - RNA, 20 nt, Human
gccaccuccccuauccaccc

SEQ ID NO: 2450451 - RNA, 21 nt, Human
gccaccuccccuauccaccca

SEQ ID NO: 2450452 - RNA, 12 nt, Human
gccaccuccccu

SEQ ID NO: 2450453 - RNA, 13 nt, Human
gccaccuccccua

SEQ ID NO: 2450454 - RNA, 17 nt, Human
gccaccuccccaggccg

SEQ ID NO: 2450455 - RNA, 22 nt, Human
gccaccuaucucgugggagagc

SEQ ID NO: 2450456 - RNA, 21 nt, Human
gccaccuaucucgugggagag

SEQ ID NO: 2450457 - RNA, 13 nt, Human
gccaccuccagaa

SEQ ID NO: 2450458 - RNA, 15 nt, Human
gccaccuccagaaac

SEQ ID NO: 2450459 - RNA, 11 nt, Human
gccaccucccc

SEQ ID NO: 2450460 - RNA, 15 nt, Human
gccaccuccccaggc

SEQ ID NO: 2450461 - RNA, 19 nt, Human
gccaccgccuccuacagcc

SEQ ID NO: 2450462 - RNA, 23 nt, Human
gccacaucuugaucugcucagcc

SEQ ID NO: 2450463 - RNA, 18 nt, Human
gccacaugagucccagug

SEQ ID NO: 2450464 - RNA, 16 nt, Human
gccacaugagucccag

SEQ ID NO: 2450465 - RNA, 14 nt, Human
gccacaugaguccc

SEQ ID NO: 2450466 - RNA, 17 nt, Human
gccaccgcgcccagccu

SEQ ID NO: 2450467 - RNA, 15 nt, Human
gccacaucaaagagg

SEQ ID NO: 2450468 - RNA, 12 nt, Human
gccacaguuguu

SEQ ID NO: 2450469 - RNA, 18 nt, Human
gccacaguagucuugaug

SEQ ID NO: 2450470 - RNA, 22 nt, Human
gccacaggccucccuguuugaa

SEQ ID NO: 2450471 - RNA, 21 nt, Human
gccaagggaugaaagagaagg

SEQ ID NO: 2450472 - RNA, 22 nt, Human
gccaagggaaaggggugcuuuu

SEQ ID NO: 2450473 - RNA, 19 nt, Human
gccaagggaaccugugucc

SEQ ID NO: 2450474 - RNA, 18 nt, Human
gccaagggaaccuguguc

SEQ ID NO: 2450475 - RNA, 22 nt, Human
gccaagguagccaucccaugaa

SEQ ID NO: 2450476 - RNA, 16 nt, Human
gccaagggcuuuguuu

SEQ ID NO: 2450477 - RNA, 14 nt, Human
gccaaggugggagg

SEQ ID NO: 2450478 - RNA, 15 nt, Human
gccaaggugggagga

SEQ ID NO: 2450479 - RNA, 23 nt, Human
gccaaggugggaggauugcuuga

SEQ ID NO: 2450480 - RNA, 16 nt, Human
gccaaggugggcugag

SEQ ID NO: 2450481 - RNA, 18 nt, Human
gccaaggugggcugagcc

SEQ ID NO: 2450482 - RNA, 19 nt, Human
gccaaggugggcugagccc

SEQ ID NO: 2450483 - RNA, 21 nt, Human
gccaaggugggcugagcccug

SEQ ID NO: 2450484 - RNA, 22 nt, Human
gccaaggugggcugagcccugg

SEQ ID NO: 2450485 - RNA, 23 nt, Human
gccaaggugggcugagcccuggc

SEQ ID NO: 2450486 - RNA, 20 nt, Human
gccaagguuuuauaaggcug

SEQ ID NO: 2450487 - RNA, 16 nt, Human
gccaaguaagaaagug

SEQ ID NO: 2450488 - RNA, 19 nt, Human
gcauuugaggucuguucuu

SEQ ID NO: 2450489 - RNA, 20 nt, Human
gcauuugaggucuguucuuu

SEQ ID NO: 2450490 - RNA, 22 nt, Human
gcauuuggugguuucagaaaug

SEQ ID NO: 2450491 - RNA, 23 nt, Human
gcauuuggugguuucagaaaugu

SEQ ID NO: 2450492 - RNA, 18 nt, Human
gccaagggaaaggggugc

SEQ ID NO: 2450493 - RNA, 12 nt, Human
gccaagggaaag

SEQ ID NO: 2450494 - RNA, 19 nt, Human
gccaaggcuggagugcagu

SEQ ID NO: 2450495 - RNA, 23 nt, Human
gcauuugucuauucuccagcuga

SEQ ID NO: 2450496 - RNA, 12 nt, Human
gcauuugugaaa

SEQ ID NO: 2450497 - RNA, 21 nt, Human
gccaaggcugggggaagaagc

SEQ ID NO: 2450498 - RNA, 16 nt, Human
gcauuugagaaaugca

SEQ ID NO: 2450499 - RNA, 15 nt, Human
gcauuugagaaaugc

SEQ ID NO: 2450500 - RNA, 13 nt, Human
gcauuugucaaug

SEQ ID NO: 2450501 - RNA, 12 nt, Human
gcauuugucuau

SEQ ID NO: 2450502 - RNA, 11 nt, Human
gcauuugucua

SEQ ID NO: 2450503 - RNA, 18 nt, Human
gcauuugucaaugacagu

SEQ ID NO: 2450504 - RNA, 22 nt, Human
gccaauguauugauaagagggc

SEQ ID NO: 2450505 - RNA, 20 nt, Human
gccaauggaaccuccuuucu

SEQ ID NO: 2450506 - RNA, 19 nt, Human
gccaauggaaccuccuuuc

SEQ ID NO: 2450507 - RNA, 18 nt, Human
gccaauggaaccuccuuu

SEQ ID NO: 2450508 - RNA, 21 nt, Human
gccaauggagacugucucaag

SEQ ID NO: 2450509 - RNA, 19 nt, Human
gccaauggagacugucuca

SEQ ID NO: 2450510 - RNA, 16 nt, Human
gccaauggagacuguc

SEQ ID NO: 2450511 - RNA, 21 nt, Human
gccaauccccuccuugggcac

SEQ ID NO: 2450512 - RNA, 19 nt, Human
gccaauccccuccuugggc

SEQ ID NO: 2450513 - RNA, 12 nt, Human
gccaaugagguc

SEQ ID NO: 2450514 - RNA, 19 nt, Human
gccaaugaggucugaaaug

SEQ ID NO: 2450515 - RNA, 22 nt, Human
gccaaugaggucugaaauggag

SEQ ID NO: 2450516 - RNA, 17 nt, Human
gccaauggaaccuccuu

SEQ ID NO: 2450517 - RNA, 13 nt, Human
gccaauggaaccu

SEQ ID NO: 2450518 - RNA, 18 nt, Human
gccaaugccccacuggca

SEQ ID NO: 2450519 - RNA, 15 nt, Human
gccaaucaagggcaa

SEQ ID NO: 2450520 - RNA, 18 nt, Human
gccaauauuaaaucugcu

SEQ ID NO: 2450521 - RNA, 18 nt, Human
gccaauccccuccuuggg

SEQ ID NO: 2450522 - RNA, 13 nt, Human
gccaauccccucc

SEQ ID NO: 2450523 - RNA, 23 nt, Human
gccaauauguauuguaaacaugu

SEQ ID NO: 2450524 - RNA, 17 nt, Human
gccaauauguauuguaa

SEQ ID NO: 2450525 - RNA, 13 nt, Human
gccaauauguauu

SEQ ID NO: 2450526 - RNA, 20 nt, Human
gccaaguuuauauacaauua

SEQ ID NO: 2450527 - RNA, 20 nt, Human
gccaauaauaauaccucccu

SEQ ID NO: 2450528 - RNA, 15 nt, Human
gccaaguuuauauac

SEQ ID NO: 2450529 - RNA, 17 nt, Human
gccaaguuuauauacaa

SEQ ID NO: 2450530 - RNA, 20 nt, Human
gccaagugcaggcuggcacc

SEQ ID NO: 2450531 - RNA, 14 nt, Human
gccaaguccagauu

SEQ ID NO: 2450532 - RNA, 12 nt, Human
gccaaguccaga

SEQ ID NO: 2450533 - RNA, 22 nt, Human
gccaagucagcuuugccuucca

SEQ ID NO: 2450534 - RNA, 20 nt, Human
gccaaguggggugcugggag

SEQ ID NO: 2450535 - RNA, 19 nt, Human
gccaaguggggugcuggga

SEQ ID NO: 2450536 - RNA, 23 nt, Human
gccaaguggggugcugggaggag

SEQ ID NO: 2450537 - RNA, 18 nt, Human
gccaaguggggugcuggg

SEQ ID NO: 2450538 - RNA, 13 nt, Human
gccaaguggggug

SEQ ID NO: 2450539 - RNA, 15 nt, Human
gccaagugcaggcug

SEQ ID NO: 2450540 - RNA, 16 nt, Human
gccaagugcaggcugg

SEQ ID NO: 2450541 - RNA, 15 nt, Human
gccaaguuccucuag

SEQ ID NO: 2450542 - RNA, 21 nt, Human
gccaaguuccucuagugcccu

SEQ ID NO: 2450543 - RNA, 12 nt, Human
gccaaguucuua

SEQ ID NO: 2450544 - RNA, 16 nt, Human
gccaauuuuucugcac

SEQ ID NO: 2450545 - RNA, 15 nt, Human
gccaauuuuucugca

SEQ ID NO: 2450546 - RNA, 13 nt, Human
gccaauuuuucug

SEQ ID NO: 2450547 - RNA, 11 nt, Human
gccaauuuuuc

SEQ ID NO: 2450548 - RNA, 23 nt, Human
gccaauuuuugccuucauuaccu

SEQ ID NO: 2450549 - RNA, 22 nt, Human
gccaauuuuucugcacugagca

SEQ ID NO: 2450550 - RNA, 15 nt, Human
gccacaaauaaaaug

SEQ ID NO: 2450551 - RNA, 16 nt, Human
gccacaagacccuugu

SEQ ID NO: 2450552 - RNA, 22 nt, Human
gccacaagacccuugugguccc

SEQ ID NO: 2450553 - RNA, 23 nt, Human
gccacaagaaauuugauuucuau

SEQ ID NO: 2450554 - RNA, 16 nt, Human
gccacaagaaauuuga

SEQ ID NO: 2450555 - RNA, 14 nt, Human
gccacaagaaauuu

SEQ ID NO: 2450556 - RNA, 21 nt, Human
gccacaacccuguuuuauacu

SEQ ID NO: 2450557 - RNA, 19 nt, Human
gccaauuauguuaaacuag

SEQ ID NO: 2450558 - RNA, 17 nt, Human
gccaauuauguuaaacu

SEQ ID NO: 2450559 - RNA, 16 nt, Human
gccaauuauguuaaac

SEQ ID NO: 2450560 - RNA, 15 nt, Human
gccaauuauguuaaa

SEQ ID NO: 2450561 - RNA, 14 nt, Human
gccaauuauguuaa

SEQ ID NO: 2450562 - RNA, 20 nt, Human
gccaaugugaacagcggcug

SEQ ID NO: 2450563 - RNA, 20 nt, Human
gccaauuauguuaaacuagc

SEQ ID NO: 2450564 - RNA, 15 nt, Human
gccaauucagacagg

SEQ ID NO: 2450565 - RNA, 17 nt, Human
gccaauucagacaggca

SEQ ID NO: 2450566 - RNA, 18 nt, Human
gccaauucagacaggcaa

SEQ ID NO: 2450567 - RNA, 20 nt, Human
gccaauuucaaguuccaagu

SEQ ID NO: 2450568 - RNA, 13 nt, Human
gccaauuccuaua

SEQ ID NO: 2450569 - RNA, 11 nt, Human
gccacacacac

SEQ ID NO: 2450570 - RNA, 12 nt, Human
gccacacacaca

SEQ ID NO: 2450571 - RNA, 13 nt, Human
gccacacacacag

SEQ ID NO: 2450572 - RNA, 14 nt, Human
gccacacacacaga

SEQ ID NO: 2450573 - RNA, 15 nt, Human
gccacacacacagaa

SEQ ID NO: 2450574 - RNA, 16 nt, Human
gccacacacacagaaa

SEQ ID NO: 2450575 - RNA, 17 nt, Human
gccacacacacagaaaa

SEQ ID NO: 2450576 - RNA, 18 nt, Human
gccacacacacagaaaau

SEQ ID NO: 2450577 - RNA, 14 nt, Human
gccacaaggacuuc

SEQ ID NO: 2450578 - RNA, 17 nt, Human
gccacaaggacuuccug

SEQ ID NO: 2450579 - RNA, 18 nt, Human
gccacaaggacuuccugu

SEQ ID NO: 2450580 - RNA, 19 nt, Human
gccacaaggacuuccuguc

SEQ ID NO: 2450581 - RNA, 18 nt, Human
gccacacaaacguuuacu

SEQ ID NO: 2450582 - RNA, 21 nt, Human
gccacaaggacuuccugucca

SEQ ID NO: 2450583 - RNA, 10 nt, Human
gccacacaca

SEQ ID NO: 2450584 - RNA, 19 nt, Human
gccacacaaacguuuacuu

SEQ ID NO: 2450585 - RNA, 19 nt, Human
gccacacacacagaaaaua

SEQ ID NO: 2450586 - RNA, 20 nt, Human
gccacacacacagaaaauau

SEQ ID NO: 2450587 - RNA, 21 nt, Human
gccacacacacagaaaauaua

SEQ ID NO: 2450588 - RNA, 22 nt, Human
gccacacacacagaaaauauac

SEQ ID NO: 2450589 - RNA, 13 nt, Human
gccacacagaaac

SEQ ID NO: 2450590 - RNA, 23 nt, Human
gccacacacacagaaaauauacu

SEQ ID NO: 2450591 - RNA, 23 nt, Human
gccacacaucacccuuaccaugu

SEQ ID NO: 2450592 - RNA, 19 nt, Human
gccacaccaagcugugcca

SEQ ID NO: 2450593 - RNA, 18 nt, Human
gccacaccaagcugugcc

SEQ ID NO: 2450594 - RNA, 17 nt, Human
gccacaccaagcugugc

SEQ ID NO: 2450595 - RNA, 16 nt, Human
gccacaccaagcugug

SEQ ID NO: 2450596 - RNA, 15 nt, Human
gccacaccaagcugu

SEQ ID NO: 2450597 - RNA, 14 nt, Human
gccacaccaagcug

SEQ ID NO: 2450598 - RNA, 13 nt, Human
gccacaccaagcu

SEQ ID NO: 2450599 - RNA, 23 nt, Human
gccacaccaagcugugccacccu

SEQ ID NO: 2450600 - RNA, 22 nt, Human
gccacaccaagcugugccaccc

SEQ ID NO: 2450601 - RNA, 21 nt, Human
gccacaccaagcugugccacc

SEQ ID NO: 2450602 - RNA, 20 nt, Human
gccacaccaagcugugccac

SEQ ID NO: 2450603 - RNA, 19 nt, Human
gccacaccaucuccuuuca

SEQ ID NO: 2450604 - RNA, 23 nt, Human
gccacagaggacucacuugccca

SEQ ID NO: 2450605 - RNA, 18 nt, Human
gccacagaagccaggagc

SEQ ID NO: 2450606 - RNA, 14 nt, Human
gccacagaagccag

SEQ ID NO: 2450607 - RNA, 23 nt, Human
gccacagagaaaguacuucucca

SEQ ID NO: 2450608 - RNA, 21 nt, Human
gccacagccuccccugccagg

SEQ ID NO: 2450609 - RNA, 19 nt, Human
gccacagaagccaggagca

SEQ ID NO: 2450610 - RNA, 23 nt, Human
gccacaggccugagauuucaucu

SEQ ID NO: 2450611 - RNA, 22 nt, Human
gccacaggccugagauuucauc

SEQ ID NO: 2450612 - RNA, 20 nt, Human
gccacaggccugagauuuca

SEQ ID NO: 2450613 - RNA, 15 nt, Human
gccacaggccugaga

SEQ ID NO: 2450614 - RNA, 21 nt, Human
gccacaggccucccuguuuga

SEQ ID NO: 2450615 - RNA, 17 nt, Human
gccacaggccucccugu

SEQ ID NO: 2450616 - RNA, 16 nt, Human
gccacaggccucccug

SEQ ID NO: 2450617 - RNA, 14 nt, Human
gccacaggccuccc

SEQ ID NO: 2450618 - RNA, 13 nt, Human
gccacaggccuga

SEQ ID NO: 2450619 - RNA, 12 nt, Human
gccacaggccug

SEQ ID NO: 2450620 - RNA, 13 nt, Human
gccacaggccucc

SEQ ID NO: 2450621 - RNA, 12 nt, Human
gccacaggccuc

SEQ ID NO: 2450622 - RNA, 12 nt, Human
gccacaggacac

SEQ ID NO: 2450623 - RNA, 18 nt, Human
gccacaggacacagucag

SEQ ID NO: 2450624 - RNA, 16 nt, Human
gccacagccuccccug

SEQ ID NO: 2450625 - RNA, 11 nt, Human
gccacagcucu

SEQ ID NO: 2450626 - RNA, 20 nt, Human
gccacagagaaaguacuucu

SEQ ID NO: 2450627 - RNA, 14 nt, Human
gccacagagaaagu

SEQ ID NO: 2450628 - RNA, 23 nt, Human
gccacacuucaggcucuucuccu

SEQ ID NO: 2450629 - RNA, 13 nt, Human
gccacagagaaag

SEQ ID NO: 2450630 - RNA, 18 nt, Human
gccacacuauuaccauga

SEQ ID NO: 2450631 - RNA, 14 nt, Human
gccacaccugagcc

SEQ ID NO: 2450632 - RNA, 13 nt, Human
gccacacucagca

SEQ ID NO: 2450633 - RNA, 16 nt, Human
gccacacucagcacaa

SEQ ID NO: 2450634 - RNA, 17 nt, Human
gccacacucagcacaag

SEQ ID NO: 2450635 - RNA, 16 nt, Human
gccacacccucccccg

SEQ ID NO: 2450636 - RNA, 13 nt, Human
gccacacccuccc

SEQ ID NO: 2450637 - RNA, 22 nt, Human
gccacacccucccccgccacuc

SEQ ID NO: 2450638 - RNA, 21 nt, Human
gccacacgucugacccucucc

SEQ ID NO: 2450639 - RNA, 22 nt, Human
gccacacuucaggcucuucucc

SEQ ID NO: 2450640 - RNA, 20 nt, Human
gccacacuucaggcucuucu

SEQ ID NO: 2450641 - RNA, 21 nt, Human
gccacacuauuaccaugagaa

SEQ ID NO: 2450642 - RNA, 19 nt, Human
gccacacucagcacaaggc

SEQ ID NO: 2450643 - RNA, 22 nt, Human
gccacacucugggcuccagagu

SEQ ID NO: 2450644 - RNA, 21 nt, Human
gccaugcugaggccugggccg

SEQ ID NO: 2450645 - RNA, 20 nt, Human
gccaugcugaggccugggcc

SEQ ID NO: 2450646 - RNA, 19 nt, Human
gccaugcugaggccugggc

SEQ ID NO: 2450647 - RNA, 18 nt, Human
gccaugcugaggccuggg

SEQ ID NO: 2450648 - RNA, 17 nt, Human
gccaugcugaggccugg

SEQ ID NO: 2450649 - RNA, 14 nt, Human
gccaugcugaggcc

SEQ ID NO: 2450650 - RNA, 15 nt, Human
gccaugcugaaggga

SEQ ID NO: 2450651 - RNA, 14 nt, Human
gccaugcugaaggg

SEQ ID NO: 2450652 - RNA, 13 nt, Human
gccaugcugaggc

SEQ ID NO: 2450653 - RNA, 22 nt, Human
gccaugggacagggaggacgcu

SEQ ID NO: 2450654 - RNA, 18 nt, Human
gccauggacucuacacug

SEQ ID NO: 2450655 - RNA, 20 nt, Human
gccauggacucuacacugug

SEQ ID NO: 2450656 - RNA, 22 nt, Human
gccauggacucuacacugugaa

SEQ ID NO: 2450657 - RNA, 23 nt, Human
gccauggacucuacacugugaac

SEQ ID NO: 2450658 - RNA, 16 nt, Human
gccaugcugggaagac

SEQ ID NO: 2450659 - RNA, 18 nt, Human
gccauggacagaagaagg

SEQ ID NO: 2450660 - RNA, 12 nt, Human
gccaugggacca

SEQ ID NO: 2450661 - RNA, 17 nt, Human
gccaugggaccaaaccu

SEQ ID NO: 2450662 - RNA, 13 nt, Human
gccaugggaccaa

SEQ ID NO: 2450663 - RNA, 21 nt, Human
gccaugggaccaaaccuagcc

SEQ ID NO: 2450664 - RNA, 23 nt, Human
gccaugggacagggaggacgcuc

SEQ ID NO: 2450665 - RNA, 14 nt, Human
gccauuuugugaau

SEQ ID NO: 2450666 - RNA, 13 nt, Human
gccauuuugugaa

SEQ ID NO: 2450667 - RNA, 16 nt, Human
gccauuuguguuuaua

SEQ ID NO: 2450668 - RNA, 17 nt, Human
gcccaagucccuguuuu

SEQ ID NO: 2450669 - RNA, 15 nt, Human
gcccaagucccuguu

SEQ ID NO: 2450670 - RNA, 14 nt, Human
gcccaaccuccuga

SEQ ID NO: 2450671 - RNA, 13 nt, Human
gcccaaccuccug

SEQ ID NO: 2450672 - RNA, 14 nt, Human
gcccaaccugcucu

SEQ ID NO: 2450673 - RNA, 14 nt, Human
gcccaagucccugu

SEQ ID NO: 2450674 - RNA, 23 nt, Human
gcccaacagacaccaucuuuugu

SEQ ID NO: 2450675 - RNA, 22 nt, Human
gcccaacaccagccccugcccc

SEQ ID NO: 2450676 - RNA, 14 nt, Human
gcccaacccugucu

SEQ ID NO: 2450677 - RNA, 13 nt, Human
gcccaacccuguc

SEQ ID NO: 2450678 - RNA, 16 nt, Human
gcccaacccuucccca

SEQ ID NO: 2450679 - RNA, 15 nt, Human
gcccaacccuucccc

SEQ ID NO: 2450680 - RNA, 16 nt, Human
gcccaacccugucugu

SEQ ID NO: 2450681 - RNA, 15 nt, Human
gcccaacccugucug

SEQ ID NO: 2450682 - RNA, 16 nt, Human
gcccaacccuucccuc

SEQ ID NO: 2450683 - RNA, 23 nt, Human
gcccaaccggggagcccccgccc

SEQ ID NO: 2450684 - RNA, 23 nt, Human
gcccaaaccaccagaagcccaga

SEQ ID NO: 2450685 - RNA, 18 nt, Human
gcccaacaccagccccug

SEQ ID NO: 2450686 - RNA, 17 nt, Human
gcccaacaccagccccu

SEQ ID NO: 2450687 - RNA, 14 nt, Human
gcccaacaccagcc

SEQ ID NO: 2450688 - RNA, 13 nt, Human
gcccaacaccagc

SEQ ID NO: 2450689 - RNA, 21 nt, Human
gcccaaaccaccagaagccca

SEQ ID NO: 2450690 - RNA, 22 nt, Human
gcccaaaccaccagaagcccag

SEQ ID NO: 2450691 - RNA, 18 nt, Human
gcccaaaaauaugguuga

SEQ ID NO: 2450692 - RNA, 19 nt, Human
gccauuuugugaauggauu

SEQ ID NO: 2450693 - RNA, 18 nt, Human
gccauuuugugaauggau

SEQ ID NO: 2450694 - RNA, 14 nt, Human
gccaugccacccug

SEQ ID NO: 2450695 - RNA, 19 nt, Human
gccaugccagcuuaucuca

SEQ ID NO: 2450696 - RNA, 13 nt, Human
gccaugccagcuu

SEQ ID NO: 2450697 - RNA, 18 nt, Human
gccaugccagcuuaucuc

SEQ ID NO: 2450698 - RNA, 18 nt, Human
gccaugaggaacaaggca

SEQ ID NO: 2450699 - RNA, 18 nt, Human
gccaugagcuccagaccc

SEQ ID NO: 2450700 - RNA, 19 nt, Human
gccaugagcuccagacccc

SEQ ID NO: 2450701 - RNA, 22 nt, Human
gccaugagcuccagacccccag

SEQ ID NO: 2450702 - RNA, 23 nt, Human
gccaugagcuccagacccccagc

SEQ ID NO: 2450703 - RNA, 18 nt, Human
gccaugaccuuacauuuc

SEQ ID NO: 2450704 - RNA, 20 nt, Human
gccaucugcccaggggugcc

SEQ ID NO: 2450705 - RNA, 23 nt, Human
gccaugagaugauacauccaaag

SEQ ID NO: 2450706 - RNA, 14 nt, Human
gccaugagcuccag

SEQ ID NO: 2450707 - RNA, 15 nt, Human
gccaugagcuccaga

SEQ ID NO: 2450708 - RNA, 16 nt, Human
gccaugagcuccagac

SEQ ID NO: 2450709 - RNA, 17 nt, Human
gccaugagcuccagacc

SEQ ID NO: 2450710 - RNA, 15 nt, Human
gccaucugcccaggg

SEQ ID NO: 2450711 - RNA, 14 nt, Human
gccaucugcccagg

SEQ ID NO: 2450712 - RNA, 13 nt, Human
gccaucugcccag

SEQ ID NO: 2450713 - RNA, 12 nt, Human
gccaucugccca

SEQ ID NO: 2450714 - RNA, 19 nt, Human
gccaucugcccaggggugc

SEQ ID NO: 2450715 - RNA, 17 nt, Human
gccaucugcccaggggu

SEQ ID NO: 2450716 - RNA, 21 nt, Human
gccaucugcgugacaauaaaa

SEQ ID NO: 2450717 - RNA, 19 nt, Human
gccaucucuggaugccuga

SEQ ID NO: 2450718 - RNA, 16 nt, Human
gccaucucuggaugcc

SEQ ID NO: 2450719 - RNA, 15 nt, Human
gccaucucuggaugc

SEQ ID NO: 2450720 - RNA, 12 nt, Human
gccaucucugga

SEQ ID NO: 2450721 - RNA, 22 nt, Human
gccaucuccacccccagcugcu

SEQ ID NO: 2450722 - RNA, 18 nt, Human
gccaucgccgggacucca

SEQ ID NO: 2450723 - RNA, 12 nt, Human
gccauccugucc

SEQ ID NO: 2450724 - RNA, 19 nt, Human
gccagugccuuaccuccug

SEQ ID NO: 2450725 - RNA, 23 nt, Human
gccaucgccgggacuccagaacc

SEQ ID NO: 2450726 - RNA, 19 nt, Human
gccaucgccgggacuccag

SEQ ID NO: 2450727 - RNA, 21 nt, Human
gccagugacuccaggagagga

SEQ ID NO: 2450728 - RNA, 10 nt, Human
gccagugccu

SEQ ID NO: 2450729 - RNA, 11 nt, Human
gccagugccuu

SEQ ID NO: 2450730 - RNA, 15 nt, Human
gccagugccuuaccu

SEQ ID NO: 2450731 - RNA, 17 nt, Human
gccagugccuuaccucc

SEQ ID NO: 2450732 - RNA, 17 nt, Human
gccagugaccugaggaa

SEQ ID NO: 2450733 - RNA, 18 nt, Human
gccagugaccugaggaag

SEQ ID NO: 2450734 - RNA, 16 nt, Human
gccagugacuccagga

SEQ ID NO: 2450735 - RNA, 15 nt, Human
gccagugacuccagg

SEQ ID NO: 2450736 - RNA, 13 nt, Human
gccagugacucca

SEQ ID NO: 2450737 - RNA, 20 nt, Human
gccagugaccugaggaagcg

SEQ ID NO: 2450738 - RNA, 20 nt, Human
gccagugaugcuaaagguug

SEQ ID NO: 2450739 - RNA, 19 nt, Human
gccagugaugcuaaagguu

SEQ ID NO: 2450740 - RNA, 18 nt, Human
gccagugacuccaggaga

SEQ ID NO: 2450741 - RNA, 17 nt, Human
gccagugacuccaggag

SEQ ID NO: 2450742 - RNA, 21 nt, Human
gccagauuucacucuccuugg

SEQ ID NO: 2450743 - RNA, 18 nt, Human
gccagauuucacucuccu

SEQ ID NO: 2450744 - RNA, 14 nt, Human
gccagauccagccu

SEQ ID NO: 2450745 - RNA, 12 nt, Human
gccagaugcuga

SEQ ID NO: 2450746 - RNA, 11 nt, Human
gccagaugcug

SEQ ID NO: 2450747 - RNA, 11 nt, Human
gccagauccag

SEQ ID NO: 2450748 - RNA, 16 nt, Human
gccagauuucacucuc

SEQ ID NO: 2450749 - RNA, 19 nt, Human
gccagauuuuccugaaaac

SEQ ID NO: 2450750 - RNA, 22 nt, Human
gccaggcugaccacagcacagc

SEQ ID NO: 2450751 - RNA, 13 nt, Human
gccaggcugcucu

SEQ ID NO: 2450752 - RNA, 14 nt, Human
gccaggcugcucuu

SEQ ID NO: 2450753 - RNA, 13 nt, Human
gccaggcuggguc

SEQ ID NO: 2450754 - RNA, 22 nt, Human
gccaggcugcucuugaacuccu

SEQ ID NO: 2450755 - RNA, 14 nt, Human
gccaggcugccaag

SEQ ID NO: 2450756 - RNA, 18 nt, Human
gccagggacagagggggu

SEQ ID NO: 2450757 - RNA, 16 nt, Human
gccagggacagagggg

SEQ ID NO: 2450758 - RNA, 13 nt, Human
gccagggacagag

SEQ ID NO: 2450759 - RNA, 22 nt, Human
gccaggcuggucucgaacuccu

SEQ ID NO: 2450760 - RNA, 23 nt, Human
gccagggacagaggggguggccu

SEQ ID NO: 2450761 - RNA, 18 nt, Human
gccagggaaguccccgag

SEQ ID NO: 2450762 - RNA, 14 nt, Human
gccagggagaagcu

SEQ ID NO: 2450763 - RNA, 15 nt, Human
gccagggagaagcuc

SEQ ID NO: 2450764 - RNA, 16 nt, Human
gccagggagaagcucc

SEQ ID NO: 2450765 - RNA, 20 nt, Human
gccagggagaagcuccucuc

SEQ ID NO: 2450766 - RNA, 21 nt, Human
gccagggagacagagcucaca

SEQ ID NO: 2450767 - RNA, 16 nt, Human
gccagggagacagagc

SEQ ID NO: 2450768 - RNA, 19 nt, Human
gccagguucuauuuggaau

SEQ ID NO: 2450769 - RNA, 18 nt, Human
gccagguucuauuuggaa

SEQ ID NO: 2450770 - RNA, 19 nt, Human
gccaggugggcgggcagca

SEQ ID NO: 2450771 - RNA, 18 nt, Human
gccaggugggcgggcagc

SEQ ID NO: 2450772 - RNA, 23 nt, Human
gccagguucuauuuggaauuuau

SEQ ID NO: 2450773 - RNA, 20 nt, Human
gccagguucuauuuggaauu

SEQ ID NO: 2450774 - RNA, 23 nt, Human
gccagguucuccguuagcuccug

SEQ ID NO: 2450775 - RNA, 16 nt, Human
gccagggugagagcug

SEQ ID NO: 2450776 - RNA, 15 nt, Human
gccagggugagagcu

SEQ ID NO: 2450777 - RNA, 21 nt, Human
gccaggggucucccuggagug

SEQ ID NO: 2450778 - RNA, 23 nt, Human
gccagggugagagcugcucugga

SEQ ID NO: 2450779 - RNA, 17 nt, Human
gccagggugagagcugc

SEQ ID NO: 2450780 - RNA, 18 nt, Human
gccagguggccacuccag

SEQ ID NO: 2450781 - RNA, 17 nt, Human
gccagguuuuuggucug

SEQ ID NO: 2450782 - RNA, 22 nt, Human
gccagguuucugcccacauugg

SEQ ID NO: 2450783 - RNA, 18 nt, Human
gccagucaccccggccac

SEQ ID NO: 2450784 - RNA, 17 nt, Human
gccagucaccccggcca

SEQ ID NO: 2450785 - RNA, 20 nt, Human
gccagucaccccggccaccu

SEQ ID NO: 2450786 - RNA, 14 nt, Human
gccaguauuuuuua

SEQ ID NO: 2450787 - RNA, 19 nt, Human
gccagguuuucuggguguc

SEQ ID NO: 2450788 - RNA, 13 nt, Human
gccagguuuucug

SEQ ID NO: 2450789 - RNA, 21 nt, Human
gccagggggacuagccccugu

SEQ ID NO: 2450790 - RNA, 19 nt, Human
gccaggggggugaggagcu

SEQ ID NO: 2450791 - RNA, 20 nt, Human
gccaggggggugaggagcug

SEQ ID NO: 2450792 - RNA, 21 nt, Human
gccaggggggugaggagcugg

SEQ ID NO: 2450793 - RNA, 18 nt, Human
gccaggggucucccugga

SEQ ID NO: 2450794 - RNA, 22 nt, Human
gccaggggggugaggagcuggg

SEQ ID NO: 2450795 - RNA, 22 nt, Human
gccagggccccucacccugccu

SEQ ID NO: 2450796 - RNA, 13 nt, Human
gccagggccaggg

SEQ ID NO: 2450797 - RNA, 20 nt, Human
gccagggggacuagccccug

SEQ ID NO: 2450798 - RNA, 19 nt, Human
gccagggggacuagccccu

SEQ ID NO: 2450799 - RNA, 21 nt, Human
gccagggcagagugagaccca

SEQ ID NO: 2450800 - RNA, 14 nt, Human
gccagggcagggcc

SEQ ID NO: 2450801 - RNA, 19 nt, Human
gccagggcagggccccagg

SEQ ID NO: 2450802 - RNA, 15 nt, Human
gccagggcagaguga

SEQ ID NO: 2450803 - RNA, 16 nt, Human
gccagggcagagugag

SEQ ID NO: 2450804 - RNA, 20 nt, Human
gccagggcaaugaugaauga

SEQ ID NO: 2450805 - RNA, 11 nt, Human
gccagggagcu

SEQ ID NO: 2450806 - RNA, 17 nt, Human
gcccagccccuucugac

SEQ ID NO: 2450807 - RNA, 16 nt, Human
gcccagccccuucuga

SEQ ID NO: 2450808 - RNA, 14 nt, Human
gcccagccccuucu

SEQ ID NO: 2450809 - RNA, 13 nt, Human
gcccagccccuuc

SEQ ID NO: 2450810 - RNA, 21 nt, Human
gcccagcccugcuggccgccu

SEQ ID NO: 2450811 - RNA, 17 nt, Human
gcccagcccugcuggcc

SEQ ID NO: 2450812 - RNA, 16 nt, Human
gcccagcccugcuggc

SEQ ID NO: 2450813 - RNA, 15 nt, Human
gcccagcccugcugg

SEQ ID NO: 2450814 - RNA, 13 nt, Human
gcccagcccugcu

SEQ ID NO: 2450815 - RNA, 12 nt, Human
gcccagcccugc

SEQ ID NO: 2450816 - RNA, 11 nt, Human
gcccagcccug

SEQ ID NO: 2450817 - RNA, 14 nt, Human
gcccagcccggcuc

SEQ ID NO: 2450818 - RNA, 12 nt, Human
gcccagcccucc

SEQ ID NO: 2450819 - RNA, 13 nt, Human
gcccagcccggcu

SEQ ID NO: 2450820 - RNA, 18 nt, Human
gcccagcccggaccuugg

SEQ ID NO: 2450821 - RNA, 16 nt, Human
gcccagcccuccccau

SEQ ID NO: 2450822 - RNA, 24 nt, Human
gcccagccccuucugacccaugcu

SEQ ID NO: 2450823 - RNA, 20 nt, Human
gcccagccccuucugaccca

SEQ ID NO: 2450824 - RNA, 13 nt, Human
gcccagcuggguc

SEQ ID NO: 2450825 - RNA, 14 nt, Human
gcccagcuggguca

SEQ ID NO: 2450826 - RNA, 15 nt, Human
gcccagcugggucag

SEQ ID NO: 2450827 - RNA, 18 nt, Human
gcccagcugggucaggca

SEQ ID NO: 2450828 - RNA, 19 nt, Human
gcccagcugggucaggcag

SEQ ID NO: 2450829 - RNA, 20 nt, Human
gcccagcugggucaggcagg

SEQ ID NO: 2450830 - RNA, 21 nt, Human
gcccagcuugaaaccuucacu

SEQ ID NO: 2450831 - RNA, 23 nt, Human
gcccagcugggcucugccacccu

SEQ ID NO: 2450832 - RNA, 21 nt, Human
gcccagcugggcucugccacc

SEQ ID NO: 2450833 - RNA, 19 nt, Human
gcccagcugggcucugcca

SEQ ID NO: 2450834 - RNA, 18 nt, Human
gcccagcugggcucugcc

SEQ ID NO: 2450835 - RNA, 16 nt, Human
gcccagcugggcucug

SEQ ID NO: 2450836 - RNA, 15 nt, Human
gcccagcugggcucu

SEQ ID NO: 2450837 - RNA, 14 nt, Human
gcccagcugggcuc

SEQ ID NO: 2450838 - RNA, 23 nt, Human
gcccagcggccccucccacacac

SEQ ID NO: 2450839 - RNA, 15 nt, Human
gcccagcuagcugca

SEQ ID NO: 2450840 - RNA, 18 nt, Human
gcccagcuauaccugugc

SEQ ID NO: 2450841 - RNA, 13 nt, Human
gcccagcugggcu

SEQ ID NO: 2450842 - RNA, 22 nt, Human
gcccagccggccucucuggccu

SEQ ID NO: 2450843 - RNA, 21 nt, Human
gcccagccggccucucuggcc

SEQ ID NO: 2450844 - RNA, 20 nt, Human
gcccagccggccucucuggc

SEQ ID NO: 2450845 - RNA, 19 nt, Human
gcccagccggccucucugg

SEQ ID NO: 2450846 - RNA, 24 nt, Human
gcccagccggccucucuggccucc

SEQ ID NO: 2450847 - RNA, 23 nt, Human
gcccagccggccucucuggccuc

SEQ ID NO: 2450848 - RNA, 18 nt, Human
gcccagccggccucucug

SEQ ID NO: 2450849 - RNA, 16 nt, Human
gcccagccggccucuc

SEQ ID NO: 2450850 - RNA, 15 nt, Human
gcccagccggccucu

SEQ ID NO: 2450851 - RNA, 13 nt, Human
gcccagccggccu

SEQ ID NO: 2450852 - RNA, 20 nt, Human
gcccagcggccccucccaca

SEQ ID NO: 2450853 - RNA, 19 nt, Human
gcccagcggccccucccac

SEQ ID NO: 2450854 - RNA, 18 nt, Human
gcccagcggccccuccca

SEQ ID NO: 2450855 - RNA, 17 nt, Human
gcccagcggccccuccc

SEQ ID NO: 2450856 - RNA, 16 nt, Human
gcccagcggccccucc

SEQ ID NO: 2450857 - RNA, 21 nt, Human
gcccaggaaaggcuccaggag

SEQ ID NO: 2450858 - RNA, 20 nt, Human
gcccaggaaaggcuccagga

SEQ ID NO: 2450859 - RNA, 19 nt, Human
gcccaggaaaggcuccagg

SEQ ID NO: 2450860 - RNA, 18 nt, Human
gcccaggaaaggcuccag

SEQ ID NO: 2450861 - RNA, 20 nt, Human
gcccaggcuggcgugcagug

SEQ ID NO: 2450862 - RNA, 19 nt, Human
gcccaggcuggcgugcagu

SEQ ID NO: 2450863 - RNA, 22 nt, Human
gcccaggcuggcgugcaguggu

SEQ ID NO: 2450864 - RNA, 16 nt, Human
gcccaggcugguuucg

SEQ ID NO: 2450865 - RNA, 15 nt, Human
gcccagcuugggccc

SEQ ID NO: 2450866 - RNA, 14 nt, Human
gcccagcuugggcc

SEQ ID NO: 2450867 - RNA, 13 nt, Human
gcccagcuugggc

SEQ ID NO: 2450868 - RNA, 17 nt, Human
gcccagcuggugggaag

SEQ ID NO: 2450869 - RNA, 21 nt, Human
gcccaggcuuagucacugaga

SEQ ID NO: 2450870 - RNA, 19 nt, Human
gcccaggcuuagucacuga

SEQ ID NO: 2450871 - RNA, 16 nt, Human
gcccaguccuggccug

SEQ ID NO: 2450872 - RNA, 15 nt, Human
gcccaguccuggccu

SEQ ID NO: 2450873 - RNA, 13 nt, Human
gcccaguccuggc

SEQ ID NO: 2450874 - RNA, 19 nt, Human
gcccagggacaccagccag

SEQ ID NO: 2450875 - RNA, 18 nt, Human
gcccagggacaccagcca

SEQ ID NO: 2450876 - RNA, 17 nt, Human
gcccagggacaccagcc

SEQ ID NO: 2450877 - RNA, 23 nt, Human
gcccaggcuuagucacugagaca

SEQ ID NO: 2450878 - RNA, 19 nt, Human
gcccagucuggaaugcagu

SEQ ID NO: 2450879 - RNA, 17 nt, Human
gcccaguccuuccaccu

SEQ ID NO: 2450880 - RNA, 15 nt, Human
gcccaguccuuccac

SEQ ID NO: 2450881 - RNA, 18 nt, Human
gcccaguccuggccuggc

SEQ ID NO: 2450882 - RNA, 17 nt, Human
gcccaguccuggccugg

SEQ ID NO: 2450883 - RNA, 14 nt, Human
gcccaguccuucca

SEQ ID NO: 2450884 - RNA, 15 nt, Human
gcccaguugggugga

SEQ ID NO: 2450885 - RNA, 19 nt, Human
gcccaguccuuccaccucg

SEQ ID NO: 2450886 - RNA, 18 nt, Human
gcccaguccuuccaccuc

SEQ ID NO: 2450887 - RNA, 21 nt, Human
gcccagagggccugcaaggga

SEQ ID NO: 2450888 - RNA, 20 nt, Human
gcccagagggccugcaaggg

SEQ ID NO: 2450889 - RNA, 22 nt, Human
gcccagagggccugcaagggag

SEQ ID NO: 2450890 - RNA, 16 nt, Human
gcccagagguaacaga

SEQ ID NO: 2450891 - RNA, 12 nt, Human
gcccagagguaa

SEQ ID NO: 2450892 - RNA, 21 nt, Human
gcccagagggcccaggcaggc

SEQ ID NO: 2450893 - RNA, 20 nt, Human
gcccagagguaacagaacag

SEQ ID NO: 2450894 - RNA, 18 nt, Human
gcccagagguaacagaac

SEQ ID NO: 2450895 - RNA, 22 nt, Human
gcccagagguaacagaacagcu

SEQ ID NO: 2450896 - RNA, 23 nt, Human
gcccagaguugcugggagcugaa

SEQ ID NO: 2450897 - RNA, 14 nt, Human
gcccagaguugcug

SEQ ID NO: 2450898 - RNA, 17 nt, Human
gcccagaucagcuccua

SEQ ID NO: 2450899 - RNA, 16 nt, Human
gcccagaucagcuccu

SEQ ID NO: 2450900 - RNA, 21 nt, Human
gcccagauguuuuacgucugg

SEQ ID NO: 2450901 - RNA, 15 nt, Human
gcccagaucccagaa

SEQ ID NO: 2450902 - RNA, 16 nt, Human
gcccagcauugcuggu

SEQ ID NO: 2450903 - RNA, 14 nt, Human
gcccagcauugcug

SEQ ID NO: 2450904 - RNA, 21 nt, Human
gcccagcacugcuugaggaaa

SEQ ID NO: 2450905 - RNA, 19 nt, Human
gcccagcauugcugguucu

SEQ ID NO: 2450906 - RNA, 18 nt, Human
gcccagcauugcugguuc

SEQ ID NO: 2450907 - RNA, 17 nt, Human
gcccagccaaacccugu

SEQ ID NO: 2450908 - RNA, 20 nt, Human
gcccagcacugcuugaggaa

SEQ ID NO: 2450909 - RNA, 21 nt, Human
gcccagcccccacagugcugu

SEQ ID NO: 2450910 - RNA, 15 nt, Human
gcccagcccccacag

SEQ ID NO: 2450911 - RNA, 23 nt, Human
gcccagcccccacagugcugucu

SEQ ID NO: 2450912 - RNA, 21 nt, Human
gcccagacacagaagaggcug

SEQ ID NO: 2450913 - RNA, 12 nt, Human
gcccagccccuu

SEQ ID NO: 2450914 - RNA, 11 nt, Human
gcccagccccu

SEQ ID NO: 2450915 - RNA, 16 nt, Human
gcccagcccagcuggu

SEQ ID NO: 2450916 - RNA, 14 nt, Human
gcccagcccagcug

SEQ ID NO: 2450917 - RNA, 15 nt, Human
gcccagcccagcugg

SEQ ID NO: 2450918 - RNA, 9 nt, Human
gcccagccc

SEQ ID NO: 2450919 - RNA, 20 nt, Human
gcccagccauuaccauggag

SEQ ID NO: 2450920 - RNA, 21 nt, Human
gcccagccauuaccauggaga

SEQ ID NO: 2450921 - RNA, 22 nt, Human
gcccagccauuaccauggagac

SEQ ID NO: 2450922 - RNA, 23 nt, Human
gcccagccauuaccauggagaca

SEQ ID NO: 2450923 - RNA, 20 nt, Human
gcccagccaaacccugucug

SEQ ID NO: 2450924 - RNA, 21 nt, Human
gcccagccaaacccugucuga

SEQ ID NO: 2450925 - RNA, 17 nt, Human
gcccagccaggccccag

SEQ ID NO: 2450926 - RNA, 16 nt, Human
gcccagccaggcccca

SEQ ID NO: 2450927 - RNA, 15 nt, Human
gcccagccaggcccc

SEQ ID NO: 2450928 - RNA, 14 nt, Human
gcccagccaggccc

SEQ ID NO: 2450929 - RNA, 19 nt, Human
gcccagagggccugcaagg

SEQ ID NO: 2450930 - RNA, 18 nt, Human
gcccagagggccugcaag

SEQ ID NO: 2450931 - RNA, 15 nt, Human
gcccagagggccugc

SEQ ID NO: 2450932 - RNA, 14 nt, Human
gcccagagggccug

SEQ ID NO: 2450933 - RNA, 16 nt, Human
gcccagaggagggcag

SEQ ID NO: 2450934 - RNA, 23 nt, Human
gcccagaggagggcagcagaagg

SEQ ID NO: 2450935 - RNA, 17 nt, Human
gcccagagcccagcucc

SEQ ID NO: 2450936 - RNA, 18 nt, Human
gcccagagcccagcucca

SEQ ID NO: 2450937 - RNA, 12 nt, Human
gcccagagggcc

SEQ ID NO: 2450938 - RNA, 13 nt, Human
gcccagagggccc

SEQ ID NO: 2450939 - RNA, 15 nt, Human
gcccagagggcccag

SEQ ID NO: 2450940 - RNA, 16 nt, Human
gcccagagggcccagg

SEQ ID NO: 2450941 - RNA, 20 nt, Human
gcccagagggcccaggcagg

SEQ ID NO: 2450942 - RNA, 15 nt, Human
gcccagagcccagcu

SEQ ID NO: 2450943 - RNA, 16 nt, Human
gcccagagcccagcuc

SEQ ID NO: 2450944 - RNA, 14 nt, Human
gcccagagcccagc

SEQ ID NO: 2450945 - RNA, 13 nt, Human
gcccagagcccag

SEQ ID NO: 2450946 - RNA, 23 nt, Human
gcccagagacauacuugaagggc

SEQ ID NO: 2450947 - RNA, 19 nt, Human
gcccagagacccaagcugc

SEQ ID NO: 2450948 - RNA, 10 nt, Human
gcccagagac

SEQ ID NO: 2450949 - RNA, 20 nt, Human
gcccagagacauacuugaag

SEQ ID NO: 2450950 - RNA, 15 nt, Human
gcccagagaagccaa

SEQ ID NO: 2450951 - RNA, 13 nt, Human
gcccagagaagcc

SEQ ID NO: 2450952 - RNA, 21 nt, Human
gcccaaugcacuuuguucugg

SEQ ID NO: 2450953 - RNA, 19 nt, Human
gcccaauaugcaguucugc

SEQ ID NO: 2450954 - RNA, 21 nt, Human
gcccaaguuguggugcugaca

SEQ ID NO: 2450955 - RNA, 18 nt, Human
gcccaaguuguggugcug

SEQ ID NO: 2450956 - RNA, 20 nt, Human
gcccaaguggcagagcuugg

SEQ ID NO: 2450957 - RNA, 18 nt, Human
gcccaauauuauaauuuu

SEQ ID NO: 2450958 - RNA, 12 nt, Human
gcccaauauuau

SEQ ID NO: 2450959 - RNA, 16 nt, Human
gcccagaccccucugg

SEQ ID NO: 2450960 - RNA, 19 nt, Human
gcccagaccccucuggcca

SEQ ID NO: 2450961 - RNA, 20 nt, Human
gcccagaccccucuggccag

SEQ ID NO: 2450962 - RNA, 21 nt, Human
gcccagaccccucuggccagg

SEQ ID NO: 2450963 - RNA, 20 nt, Human
gcccaauuggaggaaagcaa

SEQ ID NO: 2450964 - RNA, 15 nt, Human
gcccaauuggaggaa

SEQ ID NO: 2450965 - RNA, 14 nt, Human
gcccaauuggagga

SEQ ID NO: 2450966 - RNA, 14 nt, Human
gcccaaugaaauga

SEQ ID NO: 2450967 - RNA, 22 nt, Human
gcccaauucuuacaaacaugug

SEQ ID NO: 2450968 - RNA, 18 nt, Human
gcagagguugcagugagc

SEQ ID NO: 2450969 - RNA, 23 nt, Human
gcagagguaaaagugugagcagu

SEQ ID NO: 2450970 - RNA, 21 nt, Human
gcagagguccacaacacacag

SEQ ID NO: 2450971 - RNA, 12 nt, Human
gcagaggggcuu

SEQ ID NO: 2450972 - RNA, 16 nt, Human
gcagaggggcuuucug

SEQ ID NO: 2450973 - RNA, 18 nt, Human
gcagaggggcuuucugga

SEQ ID NO: 2450974 - RNA, 19 nt, Human
gcagaggggcuuucuggag

SEQ ID NO: 2450975 - RNA, 20 nt, Human
gcagagguaaaagugugagc

SEQ ID NO: 2450976 - RNA, 13 nt, Human
gcagagguaaaag

SEQ ID NO: 2450977 - RNA, 19 nt, Human
gcagagggguaggcagagc

SEQ ID NO: 2450978 - RNA, 20 nt, Human
gcagaggggcaggcccugca

SEQ ID NO: 2450979 - RNA, 20 nt, Human
gcagaggggcuuucuggaga

SEQ ID NO: 2450980 - RNA, 21 nt, Human
gcagaggggcuuucuggagag

SEQ ID NO: 2450981 - RNA, 23 nt, Human
gcagagguugcagugagccgaga

SEQ ID NO: 2450982 - RNA, 18 nt, Human
gcagaggucugugcugag

SEQ ID NO: 2450983 - RNA, 16 nt, Human
gcagaggucugugcug

SEQ ID NO: 2450984 - RNA, 15 nt, Human
gcagaggucugugcu

SEQ ID NO: 2450985 - RNA, 21 nt, Human
gcagagguaaaagugugagca

SEQ ID NO: 2450986 - RNA, 15 nt, Human
gcagagguggccaga

SEQ ID NO: 2450987 - RNA, 14 nt, Human
gcagagguggccag

SEQ ID NO: 2450988 - RNA, 15 nt, Human
gcagauccaggacua

SEQ ID NO: 2450989 - RNA, 23 nt, Human
gcagagguggccagagcugggag

SEQ ID NO: 2450990 - RNA, 14 nt, Human
gcagauccaggacu

SEQ ID NO: 2450991 - RNA, 15 nt, Human
gcagaucccagcuca

SEQ ID NO: 2450992 - RNA, 12 nt, Human
gcagaucccagc

SEQ ID NO: 2450993 - RNA, 14 nt, Human
gcagaucccagcuc

SEQ ID NO: 2450994 - RNA, 13 nt, Human
gcagaucugugcc

SEQ ID NO: 2450995 - RNA, 14 nt, Human
gcagaucugugccc

SEQ ID NO: 2450996 - RNA, 20 nt, Human
gcagaucugugccccaugcc

SEQ ID NO: 2450997 - RNA, 22 nt, Human
gcagaucugugccccaugccug

SEQ ID NO: 2450998 - RNA, 18 nt, Human
gcagauguccuugaugcu

SEQ ID NO: 2450999 - RNA, 13 nt, Human
gcagcagaagggg

SEQ ID NO: 2451000 - RNA, 22 nt, Human
gcagcagaaggggguggugucu

SEQ ID NO: 2451001 - RNA, 15 nt, Human
gcagcagaagggggu

SEQ ID NO: 2451002 - RNA, 20 nt, Human
gcagcagauuuuaggaaaug

SEQ ID NO: 2451003 - RNA, 13 nt, Human
gcagcagauuuua

SEQ ID NO: 2451004 - RNA, 15 nt, Human
gcagcagaggcacug

SEQ ID NO: 2451005 - RNA, 12 nt, Human
gcagcagaggca

SEQ ID NO: 2451006 - RNA, 19 nt, Human
gcagaugagguugcuagag

SEQ ID NO: 2451007 - RNA, 14 nt, Human
gcagaugagguugc

SEQ ID NO: 2451008 - RNA, 13 nt, Human
gcagaugauccau

SEQ ID NO: 2451009 - RNA, 14 nt, Human
gcagaugauccaug

SEQ ID NO: 2451010 - RNA, 15 nt, Human
gcagaugcaaagagg

SEQ ID NO: 2451011 - RNA, 16 nt, Human
gcagaugcaaagaggc

SEQ ID NO: 2451012 - RNA, 13 nt, Human
gcagaugacaaaa

SEQ ID NO: 2451013 - RNA, 15 nt, Human
gcagaugaccccucc

SEQ ID NO: 2451014 - RNA, 16 nt, Human
gcagaugaccccuccc

SEQ ID NO: 2451015 - RNA, 18 nt, Human
gcagauggagaccccuug

SEQ ID NO: 2451016 - RNA, 16 nt, Human
gcacuugcagacucua

SEQ ID NO: 2451017 - RNA, 14 nt, Human
gcacuugcagacuc

SEQ ID NO: 2451018 - RNA, 22 nt, Human
gcacuugcacgcccauguguga

SEQ ID NO: 2451019 - RNA, 21 nt, Human
gcacuugcacgcccaugugug

SEQ ID NO: 2451020 - RNA, 22 nt, Human
gcacuucgggaggucgaggcag

SEQ ID NO: 2451021 - RNA, 22 nt, Human
gcagacucuacagaggccaugg

SEQ ID NO: 2451022 - RNA, 19 nt, Human
gcagacucuacagaggcca

SEQ ID NO: 2451023 - RNA, 18 nt, Human
gcagacucuacagaggcc

SEQ ID NO: 2451024 - RNA, 17 nt, Human
gcagacucuacagaggc

SEQ ID NO: 2451025 - RNA, 23 nt, Human
gcagagaaagaagagacaggagg

SEQ ID NO: 2451026 - RNA, 22 nt, Human
gcagagaaagaagagacaggag

SEQ ID NO: 2451027 - RNA, 18 nt, Human
gcagagaaagaagagaca

SEQ ID NO: 2451028 - RNA, 16 nt, Human
gcagagaaagaagaga

SEQ ID NO: 2451029 - RNA, 15 nt, Human
gcagagaaagaagag

SEQ ID NO: 2451030 - RNA, 19 nt, Human
gcagagaccaucccugaag

SEQ ID NO: 2451031 - RNA, 17 nt, Human
gcagacuggugagcaga

SEQ ID NO: 2451032 - RNA, 13 nt, Human
gcagacugguggg

SEQ ID NO: 2451033 - RNA, 12 nt, Human
gcagacuggagg

SEQ ID NO: 2451034 - RNA, 13 nt, Human
gcagacuggaggg

SEQ ID NO: 2451035 - RNA, 14 nt, Human
gcagacuggagggg

SEQ ID NO: 2451036 - RNA, 15 nt, Human
gcagacuggagggga

SEQ ID NO: 2451037 - RNA, 21 nt, Human
gcagacugcugcuagagccag

SEQ ID NO: 2451038 - RNA, 21 nt, Human
gcagagaccaucccugaaggc

SEQ ID NO: 2451039 - RNA, 20 nt, Human
gcagagaccaucccugaagg

SEQ ID NO: 2451040 - RNA, 22 nt, Human
gcagagaccaucccugaaggcc

SEQ ID NO: 2451041 - RNA, 19 nt, Human
gcagaggggcaggcccugc

SEQ ID NO: 2451042 - RNA, 18 nt, Human
gcagaggggcaggcccug

SEQ ID NO: 2451043 - RNA, 17 nt, Human
gcagaggggcaggcccu

SEQ ID NO: 2451044 - RNA, 12 nt, Human
gcagagacuugg

SEQ ID NO: 2451045 - RNA, 13 nt, Human
gcagaggggcagg

SEQ ID NO: 2451046 - RNA, 17 nt, Human
gcagccucacaguccuu

SEQ ID NO: 2451047 - RNA, 15 nt, Human
gcagccucacagucc

SEQ ID NO: 2451048 - RNA, 16 nt, Human
gcagccgcugagcgag

SEQ ID NO: 2451049 - RNA, 17 nt, Human
gcagccgcugagcgagg

SEQ ID NO: 2451050 - RNA, 18 nt, Human
gcagcccuggagucaugc

SEQ ID NO: 2451051 - RNA, 12 nt, Human
gcagcccuugcu

SEQ ID NO: 2451052 - RNA, 14 nt, Human
gcagccgagcucgu

SEQ ID NO: 2451053 - RNA, 15 nt, Human
gcagcccuuggccag

SEQ ID NO: 2451054 - RNA, 15 nt, Human
gcagccgugaucaag

SEQ ID NO: 2451055 - RNA, 19 nt, Human
gcagccggcacagggucug

SEQ ID NO: 2451056 - RNA, 18 nt, Human
gcagccggcacagggucu

SEQ ID NO: 2451057 - RNA, 19 nt, Human
gcagccucacaguccuuac

SEQ ID NO: 2451058 - RNA, 18 nt, Human
gcagccucccauccaggg

SEQ ID NO: 2451059 - RNA, 20 nt, Human
gcagccucccauccagggcc

SEQ ID NO: 2451060 - RNA, 21 nt, Human
gcagccucccauccagggccc

SEQ ID NO: 2451061 - RNA, 14 nt, Human
gcagccucccucug

SEQ ID NO: 2451062 - RNA, 16 nt, Human
gcagccucccucugac

SEQ ID NO: 2451063 - RNA, 22 nt, Human
gcagccucccucugaccugcag

SEQ ID NO: 2451064 - RNA, 24 nt, Human
gcagcccugcuuugggcugcccug

SEQ ID NO: 2451065 - RNA, 16 nt, Human
gcagcccuggagucau

SEQ ID NO: 2451066 - RNA, 14 nt, Human
gcagcccuggaguc

SEQ ID NO: 2451067 - RNA, 14 nt, Human
gcagcccugcuuug

SEQ ID NO: 2451068 - RNA, 20 nt, Human
gcagcagggagggcuucugc

SEQ ID NO: 2451069 - RNA, 18 nt, Human
gcagcagggagggcuucu

SEQ ID NO: 2451070 - RNA, 19 nt, Human
gcagcagggagggcuucug

SEQ ID NO: 2451071 - RNA, 22 nt, Human
gcagcagccaucauaggaaggg

SEQ ID NO: 2451072 - RNA, 14 nt, Human
gcagcagccaucau

SEQ ID NO: 2451073 - RNA, 16 nt, Human
gcagcaggaggccagg

SEQ ID NO: 2451074 - RNA, 23 nt, Human
gcagcagcuuuuaauacagggua

SEQ ID NO: 2451075 - RNA, 14 nt, Human
gcagcucagagagg

SEQ ID NO: 2451076 - RNA, 21 nt, Human
gcagcucaccucucccuugga

SEQ ID NO: 2451077 - RNA, 20 nt, Human
gcagcucaccucucccuugg

SEQ ID NO: 2451078 - RNA, 17 nt, Human
gcagcucaccucucccu

SEQ ID NO: 2451079 - RNA, 16 nt, Human
gcagccucuccccagg

SEQ ID NO: 2451080 - RNA, 12 nt, Human
gcagccucuccc

SEQ ID NO: 2451081 - RNA, 23 nt, Human
gcagccucccucugaccugcagg

SEQ ID NO: 2451082 - RNA, 15 nt, Human
gcagccuccuccuga

SEQ ID NO: 2451083 - RNA, 14 nt, Human
gcagccuccuccug

SEQ ID NO: 2451084 - RNA, 18 nt, Human
gcagccuccuccugacca

SEQ ID NO: 2451085 - RNA, 16 nt, Human
gcagcucaccucuccc

SEQ ID NO: 2451086 - RNA, 20 nt, Human
gcagccucuccccaggucca

SEQ ID NO: 2451087 - RNA, 19 nt, Human
gcagcucagagaggguggg

SEQ ID NO: 2451088 - RNA, 18 nt, Human
gcagcucagagagggugg

SEQ ID NO: 2451089 - RNA, 15 nt, Human
gcaggaacucccagc

SEQ ID NO: 2451090 - RNA, 14 nt, Human
gcaggaacucccag

SEQ ID NO: 2451091 - RNA, 16 nt, Human
gcaggaacucccagca

SEQ ID NO: 2451092 - RNA, 18 nt, Human
gcaggaagcaacgaaggg

SEQ ID NO: 2451093 - RNA, 23 nt, Human
gcaggaaaugaaaaugucuugug

SEQ ID NO: 2451094 - RNA, 18 nt, Human
gcaggaaauggcugugga

SEQ ID NO: 2451095 - RNA, 16 nt, Human
gcagcucacuacccua

SEQ ID NO: 2451096 - RNA, 12 nt, Human
gcaggaaggaga

SEQ ID NO: 2451097 - RNA, 13 nt, Human
gcaggaaggagag

SEQ ID NO: 2451098 - RNA, 21 nt, Human
gcaggaagcauucagagagca

SEQ ID NO: 2451099 - RNA, 20 nt, Human
gcaggaagcauucagagagc

SEQ ID NO: 2451100 - RNA, 14 nt, Human
gcaggaagcucaga

SEQ ID NO: 2451101 - RNA, 17 nt, Human
gcaggaagcucagacug

SEQ ID NO: 2451102 - RNA, 18 nt, Human
gcaggaagcucagacugg

SEQ ID NO: 2451103 - RNA, 13 nt, Human
gcaggaagcugcu

SEQ ID NO: 2451104 - RNA, 15 nt, Human
gcaggaagcugcucc

SEQ ID NO: 2451105 - RNA, 16 nt, Human
gcaggaagcugcuccg

SEQ ID NO: 2451106 - RNA, 19 nt, Human
gcaggacucagcuccccag

SEQ ID NO: 2451107 - RNA, 21 nt, Human
gcaggaccuucgggcugugcc

SEQ ID NO: 2451108 - RNA, 15 nt, Human
gcaggaaggagagcc

SEQ ID NO: 2451109 - RNA, 20 nt, Human
gcaggaccuucgggcugugc

SEQ ID NO: 2451110 - RNA, 18 nt, Human
gcacuggcucucuccagg

SEQ ID NO: 2451111 - RNA, 17 nt, Human
gcacuggcucucuccag

SEQ ID NO: 2451112 - RNA, 16 nt, Human
gcacuggcucucucca

SEQ ID NO: 2451113 - RNA, 15 nt, Human
gcacuggcucucucc

SEQ ID NO: 2451114 - RNA, 15 nt, Human
gcacuggccugcacg

SEQ ID NO: 2451115 - RNA, 11 nt, Human
gcacuggccug

SEQ ID NO: 2451116 - RNA, 22 nt, Human
gcacugcugugcugugcccaag

SEQ ID NO: 2451117 - RNA, 21 nt, Human
gcacuacaugugguuuauaga

SEQ ID NO: 2451118 - RNA, 20 nt, Human
gcacuaccacuccugccaag

SEQ ID NO: 2451119 - RNA, 23 nt, Human
gcacugggaugagccgcugugag

SEQ ID NO: 2451120 - RNA, 19 nt, Human
gcacuggcucucuccagga

SEQ ID NO: 2451121 - RNA, 12 nt, Human
gcacugggcuug

SEQ ID NO: 2451122 - RNA, 21 nt, Human
gcacuguuccagccugcccuc

SEQ ID NO: 2451123 - RNA, 16 nt, Human
gcacuguuccagccug

SEQ ID NO: 2451124 - RNA, 15 nt, Human
gcacuguucccccug

SEQ ID NO: 2451125 - RNA, 18 nt, Human
gcacuguucccccugugc

SEQ ID NO: 2451126 - RNA, 19 nt, Human
gcacuguucccccugugca

SEQ ID NO: 2451127 - RNA, 20 nt, Human
gcacuguucccccugugcag

SEQ ID NO: 2451128 - RNA, 19 nt, Human
gcacuguuuuauuuuaauu

SEQ ID NO: 2451129 - RNA, 15 nt, Human
gcacugcuuccagug

SEQ ID NO: 2451130 - RNA, 14 nt, Human
gcacugcuuccagu

SEQ ID NO: 2451131 - RNA, 13 nt, Human
gcacugcuuccag

SEQ ID NO: 2451132 - RNA, 12 nt, Human
gcacugcuucca

SEQ ID NO: 2451133 - RNA, 12 nt, Human
gcacuacauuca

SEQ ID NO: 2451134 - RNA, 16 nt, Human
gcacuacauucauuua

SEQ ID NO: 2451135 - RNA, 22 nt, Human
gcacuauaauguaagcucuacu

SEQ ID NO: 2451136 - RNA, 20 nt, Human
gcacuauaauguaagcucua

SEQ ID NO: 2451137 - RNA, 14 nt, Human
gcacuauaauguaa

SEQ ID NO: 2451138 - RNA, 15 nt, Human
gcacuauaauguaag

SEQ ID NO: 2451139 - RNA, 19 nt, Human
gcacuaaggugugcucuga

SEQ ID NO: 2451140 - RNA, 13 nt, Human
gcacuacaugugg

SEQ ID NO: 2451141 - RNA, 16 nt, Human
gcacuacauaaacuga

SEQ ID NO: 2451142 - RNA, 15 nt, Human
gcacuacauaaacug

SEQ ID NO: 2451143 - RNA, 14 nt, Human
gcacuacauaaacu

SEQ ID NO: 2451144 - RNA, 19 nt, Human
gcacuaauuugauguuuac

SEQ ID NO: 2451145 - RNA, 22 nt, Human
gcacuaaaguauguaaaguaug

SEQ ID NO: 2451146 - RNA, 20 nt, Human
gcacuaaaguauguaaagua

SEQ ID NO: 2451147 - RNA, 19 nt, Human
gcacuaaaguauguaaagu

SEQ ID NO: 2451148 - RNA, 20 nt, Human
gcacuaaggugugcucugau

SEQ ID NO: 2451149 - RNA, 14 nt, Human
gcacgugugugcac

SEQ ID NO: 2451150 - RNA, 21 nt, Human
gcacgcuugcguaugucuguu

SEQ ID NO: 2451151 - RNA, 20 nt, Human
gcacgcuugcguaugucugu

SEQ ID NO: 2451152 - RNA, 19 nt, Human
gcacgcuugcguaugucug

SEQ ID NO: 2451153 - RNA, 12 nt, Human
gcacgcuguggg

SEQ ID NO: 2451154 - RNA, 16 nt, Human
gcacgcugugggcagg

SEQ ID NO: 2451155 - RNA, 20 nt, Human
gcacgcugugggcagguggg

SEQ ID NO: 2451156 - RNA, 22 nt, Human
gcacguuaugguguuucucccu

SEQ ID NO: 2451157 - RNA, 23 nt, Human
gcacgugggucuucagggggcca

SEQ ID NO: 2451158 - RNA, 14 nt, Human
gcacuaaagcagug

SEQ ID NO: 2451159 - RNA, 20 nt, Human
gcacuaaagcaguggacacc

SEQ ID NO: 2451160 - RNA, 16 nt, Human
gcacccgccucucccg

SEQ ID NO: 2451161 - RNA, 15 nt, Human
gcacccgccucuccc

SEQ ID NO: 2451162 - RNA, 13 nt, Human
gcacccgccucuc

SEQ ID NO: 2451163 - RNA, 22 nt, Human
gcaccccuucucuccuccccaa

SEQ ID NO: 2451164 - RNA, 21 nt, Human
gcaccccuucucuccucccca

SEQ ID NO: 2451165 - RNA, 20 nt, Human
gcaccccuucucuccucccc

SEQ ID NO: 2451166 - RNA, 19 nt, Human
gcaccccuucucuccuccc

SEQ ID NO: 2451167 - RNA, 18 nt, Human
gcaccccuucucuccucc

SEQ ID NO: 2451168 - RNA, 16 nt, Human
gcaccccuuccaugug

SEQ ID NO: 2451169 - RNA, 13 nt, Human
gcaccccuuccau

SEQ ID NO: 2451170 - RNA, 17 nt, Human
gcaccccuucucuccuc

SEQ ID NO: 2451171 - RNA, 13 nt, Human
gcaccccuucucu

SEQ ID NO: 2451172 - RNA, 12 nt, Human
gcaccccuucuc

SEQ ID NO: 2451173 - RNA, 16 nt, Human
gcacccucaggcaggu

SEQ ID NO: 2451174 - RNA, 19 nt, Human
gcacccucaggcagguggg

SEQ ID NO: 2451175 - RNA, 22 nt, Human
gcacgcccaugugugagugugu

SEQ ID NO: 2451176 - RNA, 12 nt, Human
gcacgcaguggc

SEQ ID NO: 2451177 - RNA, 15 nt, Human
gcacgcccaugugug

SEQ ID NO: 2451178 - RNA, 17 nt, Human
gcacgcccaugugugag

SEQ ID NO: 2451179 - RNA, 18 nt, Human
gcacgcccaugugugagu

SEQ ID NO: 2451180 - RNA, 16 nt, Human
gcacgcacacacacaa

SEQ ID NO: 2451181 - RNA, 17 nt, Human
gcacccuccccucccgu

SEQ ID NO: 2451182 - RNA, 15 nt, Human
gcacccuccccuccc

SEQ ID NO: 2451183 - RNA, 14 nt, Human
gcacccuccccucc

SEQ ID NO: 2451184 - RNA, 13 nt, Human
gcacccuccccuc

SEQ ID NO: 2451185 - RNA, 22 nt, Human
gcacccuccacccuguccccca

SEQ ID NO: 2451186 - RNA, 19 nt, Human
gcacccuccacccuguccc

SEQ ID NO: 2451187 - RNA, 18 nt, Human
gcacccuccacccugucc

SEQ ID NO: 2451188 - RNA, 17 nt, Human
gcacccuccacccuguc

SEQ ID NO: 2451189 - RNA, 16 nt, Human
gcacccuccacccugu

SEQ ID NO: 2451190 - RNA, 15 nt, Human
gcacccuccacccug

SEQ ID NO: 2451191 - RNA, 14 nt, Human
gcacccuccacccu

SEQ ID NO: 2451192 - RNA, 13 nt, Human
gcacccuccaccc

SEQ ID NO: 2451193 - RNA, 18 nt, Human
gcacccccuccugcugca

SEQ ID NO: 2451194 - RNA, 17 nt, Human
gcacccccuccugcugc

SEQ ID NO: 2451195 - RNA, 19 nt, Human
gcacccccuccugcugcag

SEQ ID NO: 2451196 - RNA, 16 nt, Human
gcacccccuccugcug

SEQ ID NO: 2451197 - RNA, 15 nt, Human
gcacccccuccugcu

SEQ ID NO: 2451198 - RNA, 19 nt, Human
gcaccauccgccagggccc

SEQ ID NO: 2451199 - RNA, 12 nt, Human
gcacccccuccu

SEQ ID NO: 2451200 - RNA, 14 nt, Human
gcacccccuggaga

SEQ ID NO: 2451201 - RNA, 13 nt, Human
gcaccccugucuc

SEQ ID NO: 2451202 - RNA, 13 nt, Human
gcaccccucccau

SEQ ID NO: 2451203 - RNA, 13 nt, Human
gcaccauccgcca

SEQ ID NO: 2451204 - RNA, 22 nt, Human
gcaccaucccuuuuugaagugu

SEQ ID NO: 2451205 - RNA, 21 nt, Human
gcaccaucccuuuuugaagug

SEQ ID NO: 2451206 - RNA, 21 nt, Human
gcaccagaggcugcagaaggc

SEQ ID NO: 2451207 - RNA, 18 nt, Human
gcaccauccgccagggcc

SEQ ID NO: 2451208 - RNA, 17 nt, Human
gcaccauccgccagggc

SEQ ID NO: 2451209 - RNA, 20 nt, Human
gcaccaucucugauuuucaa

SEQ ID NO: 2451210 - RNA, 17 nt, Human
gcaccaucucuccuccu

SEQ ID NO: 2451211 - RNA, 15 nt, Human
gcaccaucucuccuc

SEQ ID NO: 2451212 - RNA, 14 nt, Human
gcaccaucucuccu

SEQ ID NO: 2451213 - RNA, 14 nt, Human
gcaccagcagccug

SEQ ID NO: 2451214 - RNA, 21 nt, Human
gcaccagacacccaggacuua

SEQ ID NO: 2451215 - RNA, 15 nt, Human
gcaccagaggcugca

SEQ ID NO: 2451216 - RNA, 13 nt, Human
gcaccagcagccu

SEQ ID NO: 2451217 - RNA, 17 nt, Human
gcacagggucugcucuu

SEQ ID NO: 2451218 - RNA, 12 nt, Human
gcacagggucug

SEQ ID NO: 2451219 - RNA, 23 nt, Human
gcacagggucugcucuuucucug

SEQ ID NO: 2451220 - RNA, 18 nt, Human
gcacagggucugcucuuu

SEQ ID NO: 2451221 - RNA, 22 nt, Human
gcaccaacccagccgcugcccg

SEQ ID NO: 2451222 - RNA, 20 nt, Human
gcaccaacccagccgcugcc

SEQ ID NO: 2451223 - RNA, 18 nt, Human
gcaccaacccagccgcug

SEQ ID NO: 2451224 - RNA, 17 nt, Human
gcaccaacccagccgcu

SEQ ID NO: 2451225 - RNA, 16 nt, Human
gcaccaacccagccgc

SEQ ID NO: 2451226 - RNA, 15 nt, Human
gcaccaacccagccg

SEQ ID NO: 2451227 - RNA, 14 nt, Human
gcaccaacccagcc

SEQ ID NO: 2451228 - RNA, 19 nt, Human
gcaccaaaauaagaaaaga

SEQ ID NO: 2451229 - RNA, 20 nt, Human
gcaccaaaauaagaaaagau

SEQ ID NO: 2451230 - RNA, 17 nt, Human
gcaccaccaagccaagg

SEQ ID NO: 2451231 - RNA, 14 nt, Human
gcaccagacaccca

SEQ ID NO: 2451232 - RNA, 14 nt, Human
gcaccaccaagcca

SEQ ID NO: 2451233 - RNA, 15 nt, Human
gcaccagacacccag

SEQ ID NO: 2451234 - RNA, 16 nt, Human
gcaccagacacccagg

SEQ ID NO: 2451235 - RNA, 17 nt, Human
gcaccagacacccagga

SEQ ID NO: 2451236 - RNA, 18 nt, Human
gcaccagacacccaggac

SEQ ID NO: 2451237 - RNA, 19 nt, Human
gcaccagacacccaggacu

SEQ ID NO: 2451238 - RNA, 20 nt, Human
gcaccagacacccaggacuu

SEQ ID NO: 2451239 - RNA, 13 nt, Human
gcaccaccaagcc

SEQ ID NO: 2451240 - RNA, 17 nt, Human
gcaccacacucagcccu

SEQ ID NO: 2451241 - RNA, 15 nt, Human
gcaccacacucagcc

SEQ ID NO: 2451242 - RNA, 15 nt, Human
gcaccaagcaggaaa

SEQ ID NO: 2451243 - RNA, 18 nt, Human
gcacagccucuuagaugc

SEQ ID NO: 2451244 - RNA, 21 nt, Human
gcacagcuucauuuccugugu

SEQ ID NO: 2451245 - RNA, 22 nt, Human
gcacagcccucccgccccuucc

SEQ ID NO: 2451246 - RNA, 21 nt, Human
gcacagcccucccgccccuuc

SEQ ID NO: 2451247 - RNA, 19 nt, Human
gcacagcccucccgccccu

SEQ ID NO: 2451248 - RNA, 18 nt, Human
gcacagcccucccgcccc

SEQ ID NO: 2451249 - RNA, 14 nt, Human
gcacagcuugaccu

SEQ ID NO: 2451250 - RNA, 23 nt, Human
gcacagcuucauuuccugugucu

SEQ ID NO: 2451251 - RNA, 19 nt, Human
gcacagggcagcugggccc

SEQ ID NO: 2451252 - RNA, 18 nt, Human
gcacagggcagcugggcc

SEQ ID NO: 2451253 - RNA, 20 nt, Human
gcacagggcagcugggccca

SEQ ID NO: 2451254 - RNA, 17 nt, Human
gcacagggcagcugggc

SEQ ID NO: 2451255 - RNA, 16 nt, Human
gcacagggcagcuggg

SEQ ID NO: 2451256 - RNA, 15 nt, Human
gcacagggcagcugg

SEQ ID NO: 2451257 - RNA, 16 nt, Human
gcacagggcaguggga

SEQ ID NO: 2451258 - RNA, 21 nt, Human
gcacagcuugaccugaggcug

SEQ ID NO: 2451259 - RNA, 20 nt, Human
gcacagcuugaccugaggcu

SEQ ID NO: 2451260 - RNA, 19 nt, Human
gcacagcuugaccugaggc

SEQ ID NO: 2451261 - RNA, 18 nt, Human
gcacagcuugaccugagg

SEQ ID NO: 2451262 - RNA, 22 nt, Human
gcacagcuugaccugaggcugu

SEQ ID NO: 2451263 - RNA, 22 nt, Human
gcacagcaaggaggcuggcugg

SEQ ID NO: 2451264 - RNA, 19 nt, Human
gcacagcaaggaggcuggc

SEQ ID NO: 2451265 - RNA, 17 nt, Human
gcacagcaaggaggcug

SEQ ID NO: 2451266 - RNA, 14 nt, Human
gcacagcaaggagg

SEQ ID NO: 2451267 - RNA, 13 nt, Human
gcacagcagcauc

SEQ ID NO: 2451268 - RNA, 22 nt, Human
gcacagcagccuggggcuggcc

SEQ ID NO: 2451269 - RNA, 20 nt, Human
gauugugucucuugguccug

SEQ ID NO: 2451270 - RNA, 14 nt, Human
gauuguuaaaauaa

SEQ ID NO: 2451271 - RNA, 16 nt, Human
gcacagcaguuccgga

SEQ ID NO: 2451272 - RNA, 22 nt, Human
gcacagcaugagaggcucugug

SEQ ID NO: 2451273 - RNA, 15 nt, Human
gcacagccaaggacu

SEQ ID NO: 2451274 - RNA, 22 nt, Human
gcacagccaacacgcaccugcc

SEQ ID NO: 2451275 - RNA, 13 nt, Human
gcacagcaguucc

SEQ ID NO: 2451276 - RNA, 23 nt, Human
gcacagcaaggaggcuggcuggg

SEQ ID NO: 2451277 - RNA, 15 nt, Human
gcacagcagccuggg

SEQ ID NO: 2451278 - RNA, 15 nt, Human
gcacagccucuuaga

SEQ ID NO: 2451279 - RNA, 17 nt, Human
gcacagcccucccgccc

SEQ ID NO: 2451280 - RNA, 16 nt, Human
gcacagcccucccgcc

SEQ ID NO: 2451281 - RNA, 13 nt, Human
gcacagcccuccc

SEQ ID NO: 2451282 - RNA, 12 nt, Human
gcacagcccucc

SEQ ID NO: 2451283 - RNA, 11 nt, Human
gcacagcccuc

SEQ ID NO: 2451284 - RNA, 21 nt, Human
gcacagccauacggcacugaa

SEQ ID NO: 2451285 - RNA, 17 nt, Human
gcacagcccaaagaagg

SEQ ID NO: 2451286 - RNA, 21 nt, Human
gcaugccccggccaccucugc

SEQ ID NO: 2451287 - RNA, 20 nt, Human
gcaugccccggccaccucug

SEQ ID NO: 2451288 - RNA, 19 nt, Human
gcaugccccggccaccucu

SEQ ID NO: 2451289 - RNA, 18 nt, Human
gcaugccccggccaccuc

SEQ ID NO: 2451290 - RNA, 23 nt, Human
gcaugccccggccaccucugcgg

SEQ ID NO: 2451291 - RNA, 22 nt, Human
gcaugccccggccaccucugcg

SEQ ID NO: 2451292 - RNA, 14 nt, Human
gcaugccuggaugg

SEQ ID NO: 2451293 - RNA, 14 nt, Human
gcaugacauuucuu

SEQ ID NO: 2451294 - RNA, 17 nt, Human
gcaugccccggccaccu

SEQ ID NO: 2451295 - RNA, 16 nt, Human
gcaugccccggccacc

SEQ ID NO: 2451296 - RNA, 14 nt, Human
gcaugccccggcca

SEQ ID NO: 2451297 - RNA, 20 nt, Human
gcaugcccccucgugccagu

SEQ ID NO: 2451298 - RNA, 19 nt, Human
gcaugcccccucgugccag

SEQ ID NO: 2451299 - RNA, 18 nt, Human
gcaugcccccucgugcca

SEQ ID NO: 2451300 - RNA, 18 nt, Human
gcauguuaccuccuauaa

SEQ ID NO: 2451301 - RNA, 13 nt, Human
gcauguuacauaa

SEQ ID NO: 2451302 - RNA, 15 nt, Human
gcaugccuggauggg

SEQ ID NO: 2451303 - RNA, 21 nt, Human
gcauguguauuuccagugcaa

SEQ ID NO: 2451304 - RNA, 19 nt, Human
gcaugugugcgagugugug

SEQ ID NO: 2451305 - RNA, 11 nt, Human
gcaugugugug

SEQ ID NO: 2451306 - RNA, 16 nt, Human
gcaugugugugcucag

SEQ ID NO: 2451307 - RNA, 14 nt, Human
gcaugugugugcuc

SEQ ID NO: 2451308 - RNA, 19 nt, Human
gcauguguuugguucuggg

SEQ ID NO: 2451309 - RNA, 23 nt, Human
gcauuauguccacuguguauaga

SEQ ID NO: 2451310 - RNA, 19 nt, Human
gcauuauguccacugugua

SEQ ID NO: 2451311 - RNA, 19 nt, Human
gcauuaucuagauacugua

SEQ ID NO: 2451312 - RNA, 15 nt, Human
gcauuacgugagcca

SEQ ID NO: 2451313 - RNA, 22 nt, Human
gcauuaucuagauacuguauca

SEQ ID NO: 2451314 - RNA, 24 nt, Human
gcauuaucuagauacuguaucaug

SEQ ID NO: 2451315 - RNA, 23 nt, Human
gcauuaccgcguuguaaaauaua

SEQ ID NO: 2451316 - RNA, 20 nt, Human
gcauuaccgcguuguaaaau

SEQ ID NO: 2451317 - RNA, 19 nt, Human
gcauuaccgcguuguaaaa

SEQ ID NO: 2451318 - RNA, 18 nt, Human
gcauuaccgcguuguaaa

SEQ ID NO: 2451319 - RNA, 19 nt, Human
gcauuacagagaggagaaa

SEQ ID NO: 2451320 - RNA, 16 nt, Human
gcauuacauuuccaaa

SEQ ID NO: 2451321 - RNA, 14 nt, Human
gcauuaacuaaucu

SEQ ID NO: 2451322 - RNA, 18 nt, Human
gcauuaacuaaucuauug

SEQ ID NO: 2451323 - RNA, 22 nt, Human
gcauuaacuaaucuauuggguu

SEQ ID NO: 2451324 - RNA, 16 nt, Human
gcauuaacuucucugg

SEQ ID NO: 2451325 - RNA, 14 nt, Human
gcauuaacuucucu

SEQ ID NO: 2451326 - RNA, 14 nt, Human
gcauuacagagagg

SEQ ID NO: 2451327 - RNA, 23 nt, Human
gcauuaaauuuuagcaaagauau

SEQ ID NO: 2451328 - RNA, 18 nt, Human
gcauuaaauucacaaacu

SEQ ID NO: 2451329 - RNA, 22 nt, Human
gcauuaaauucacaaacuuuua

SEQ ID NO: 2451330 - RNA, 16 nt, Human
gcauguuccacuaacc

SEQ ID NO: 2451331 - RNA, 19 nt, Human
gcauuaaauauaauaugca

SEQ ID NO: 2451332 - RNA, 20 nt, Human
gcauguguuugguucugggg

SEQ ID NO: 2451333 - RNA, 22 nt, Human
gcauguguuugguucuggggcc

SEQ ID NO: 2451334 - RNA, 21 nt, Human
gcauuccccaggaggccagcc

SEQ ID NO: 2451335 - RNA, 20 nt, Human
gcauuccccaggaggccagc

SEQ ID NO: 2451336 - RNA, 19 nt, Human
gcauuccccaggaggccag

SEQ ID NO: 2451337 - RNA, 18 nt, Human
gcauuccccaggaggcca

SEQ ID NO: 2451338 - RNA, 17 nt, Human
gcauuccccaggaggcc

SEQ ID NO: 2451339 - RNA, 16 nt, Human
gcauuccccaggaggc

SEQ ID NO: 2451340 - RNA, 15 nt, Human
gcauuccccaggagg

SEQ ID NO: 2451341 - RNA, 14 nt, Human
gcauuccccaggag

SEQ ID NO: 2451342 - RNA, 18 nt, Human
gcauuugaggucuguucu

SEQ ID NO: 2451343 - RNA, 14 nt, Human
gcauuugagaaaug

SEQ ID NO: 2451344 - RNA, 13 nt, Human
gcauuugagaaau

SEQ ID NO: 2451345 - RNA, 22 nt, Human
gcauugagaacugcauauguuu

SEQ ID NO: 2451346 - RNA, 23 nt, Human
gcauugaccgcgacuaauuucaa

SEQ ID NO: 2451347 - RNA, 22 nt, Human
gcauugaccgcgacuaauuuca

SEQ ID NO: 2451348 - RNA, 19 nt, Human
gcauuccuucuuugauaau

SEQ ID NO: 2451349 - RNA, 16 nt, Human
gcauugaauauauuau

SEQ ID NO: 2451350 - RNA, 12 nt, Human
gcauugagaacu

SEQ ID NO: 2451351 - RNA, 21 nt, Human
gcauugagaacugcauauguu

SEQ ID NO: 2451352 - RNA, 22 nt, Human
gcauugaacacaaacuguaaau

SEQ ID NO: 2451353 - RNA, 23 nt, Human
gcauugaacacaaacuguaaaua

SEQ ID NO: 2451354 - RNA, 13 nt, Human
gcauuccuucuuu

SEQ ID NO: 2451355 - RNA, 22 nt, Human
gcauuccugauaugauuuaaaa

SEQ ID NO: 2451356 - RNA, 21 nt, Human
gcauuccugauaugauuuaaa

SEQ ID NO: 2451357 - RNA, 19 nt, Human
gcauuccugauaugauuua

SEQ ID NO: 2451358 - RNA, 15 nt, Human
gcauuccuucuuuga

SEQ ID NO: 2451359 - RNA, 14 nt, Human
gcauuccuucuuug

SEQ ID NO: 2451360 - RNA, 21 nt, Human
gcauugaacacaaacuguaaa

SEQ ID NO: 2451361 - RNA, 22 nt, Human
gcauuccccaggaggccagccu

SEQ ID NO: 2451362 - RNA, 22 nt, Human
gcauuauguccacuguguauag

SEQ ID NO: 2451363 - RNA, 21 nt, Human
gcauuauguccacuguguaua

SEQ ID NO: 2451364 - RNA, 13 nt, Human
gcauucccugagu

SEQ ID NO: 2451365 - RNA, 14 nt, Human
gcauucccugaguc

SEQ ID NO: 2451366 - RNA, 21 nt, Human
gcauucccugagucaccagga

SEQ ID NO: 2451367 - RNA, 22 nt, Human
gcauucccugagucaccaggaa

SEQ ID NO: 2451368 - RNA, 16 nt, Human
gcauuccuacaaagau

SEQ ID NO: 2451369 - RNA, 19 nt, Human
gcauuccuacaaagauguu

SEQ ID NO: 2451370 - RNA, 22 nt, Human
gcaugacacgaauauugcugau

SEQ ID NO: 2451371 - RNA, 13 nt, Human
gcaucuguccuca

SEQ ID NO: 2451372 - RNA, 22 nt, Human
gcaucuguauaaguaagaaaau

SEQ ID NO: 2451373 - RNA, 21 nt, Human
gcaucuguauaaguaagaaaa

SEQ ID NO: 2451374 - RNA, 23 nt, Human
gcaucuguauaaguaagaaaaua

SEQ ID NO: 2451375 - RNA, 21 nt, Human
gcaugacacgaauauugcuga

SEQ ID NO: 2451376 - RNA, 20 nt, Human
gcaugacacgaauauugcug

SEQ ID NO: 2451377 - RNA, 21 nt, Human
gcaugaaguaauaugcacaca

SEQ ID NO: 2451378 - RNA, 22 nt, Human
gcaugaaguaauaugcacacau

SEQ ID NO: 2451379 - RNA, 20 nt, Human
gcaugaaguaauaugcacac

SEQ ID NO: 2451380 - RNA, 13 nt, Human
gcaucuguauaag

SEQ ID NO: 2451381 - RNA, 11 nt, Human
gcaucuguaua

SEQ ID NO: 2451382 - RNA, 17 nt, Human
gcaucuggguagcugua

SEQ ID NO: 2451383 - RNA, 18 nt, Human
gcaucugcuaauaaaacc

SEQ ID NO: 2451384 - RNA, 18 nt, Human
gcaucugccccuccccca

SEQ ID NO: 2451385 - RNA, 23 nt, Human
gcaucugggauucccaccaaggu

SEQ ID NO: 2451386 - RNA, 20 nt, Human
gcaucugggauucccaccaa

SEQ ID NO: 2451387 - RNA, 16 nt, Human
gcaucugggauuccca

SEQ ID NO: 2451388 - RNA, 12 nt, Human
gcaucugccccu

SEQ ID NO: 2451389 - RNA, 14 nt, Human
gcaucugccccucc

SEQ ID NO: 2451390 - RNA, 15 nt, Human
gcaucugccccuccc

SEQ ID NO: 2451391 - RNA, 17 nt, Human
gcaucugccccuccccc

SEQ ID NO: 2451392 - RNA, 12 nt, Human
gcaucuccagga

SEQ ID NO: 2451393 - RNA, 20 nt, Human
gcaucuccaccugcucccag

SEQ ID NO: 2451394 - RNA, 18 nt, Human
gcaucuccaccugcuccc

SEQ ID NO: 2451395 - RNA, 17 nt, Human
gcaucuccaccugcucc

SEQ ID NO: 2451396 - RNA, 15 nt, Human
gcaucuccaccugcu

SEQ ID NO: 2451397 - RNA, 15 nt, Human
gcaucucagcccaca

SEQ ID NO: 2451398 - RNA, 14 nt, Human
gcaucuccaggaag

SEQ ID NO: 2451399 - RNA, 13 nt, Human
gcaucuccaggaa

SEQ ID NO: 2451400 - RNA, 12 nt, Human
gcaucucccaga

SEQ ID NO: 2451401 - RNA, 13 nt, Human
gcaucucccagau

SEQ ID NO: 2451402 - RNA, 21 nt, Human
gcaucucccagauaaugugaa

SEQ ID NO: 2451403 - RNA, 20 nt, Human
gcaucucccucacugaaacc

SEQ ID NO: 2451404 - RNA, 16 nt, Human
gcaucuccugugcaug

SEQ ID NO: 2451405 - RNA, 17 nt, Human
gcaucucccucacugaa

SEQ ID NO: 2451406 - RNA, 16 nt, Human
gcaucuccaggaaggc

SEQ ID NO: 2451407 - RNA, 15 nt, Human
gcaucuccugugcau

SEQ ID NO: 2451408 - RNA, 23 nt, Human
gcaucagcugcugaaacaacaaa

SEQ ID NO: 2451409 - RNA, 12 nt, Human
gcaucaggccag

SEQ ID NO: 2451410 - RNA, 22 nt, Human
gcaucagcugcugaaacaacaa

SEQ ID NO: 2451411 - RNA, 17 nt, Human
gcauacuucaaaaguau

SEQ ID NO: 2451412 - RNA, 16 nt, Human
gcauacuucaaaagua

SEQ ID NO: 2451413 - RNA, 14 nt, Human
gcauacuucaaaag

SEQ ID NO: 2451414 - RNA, 13 nt, Human
gcauacuucaaaa

SEQ ID NO: 2451415 - RNA, 18 nt, Human
gcaucaggccaggcccuc

SEQ ID NO: 2451416 - RNA, 21 nt, Human
gcaucagcuggcgucaugcaa

SEQ ID NO: 2451417 - RNA, 17 nt, Human
gcaucagcuggcgucau

SEQ ID NO: 2451418 - RNA, 18 nt, Human
gcauacuucaaaaguauu

SEQ ID NO: 2451419 - RNA, 23 nt, Human
gcaucaggccaggcccucugccc

SEQ ID NO: 2451420 - RNA, 12 nt, Human
gcaucaggguua

SEQ ID NO: 2451421 - RNA, 15 nt, Human
gcaucagugcccucc

SEQ ID NO: 2451422 - RNA, 13 nt, Human
gcaucauggcuau

SEQ ID NO: 2451423 - RNA, 20 nt, Human
gcaucauucuuguuaauuau

SEQ ID NO: 2451424 - RNA, 20 nt, Human
gcaucauuuugcauucaaau

SEQ ID NO: 2451425 - RNA, 22 nt, Human
gcaucauuauuugcagagacag

SEQ ID NO: 2451426 - RNA, 19 nt, Human
gcaucagucccuauguauu

SEQ ID NO: 2451427 - RNA, 23 nt, Human
gcaucagugcccuccaggauaga

SEQ ID NO: 2451428 - RNA, 12 nt, Human
gcaucucagccc

SEQ ID NO: 2451429 - RNA, 17 nt, Human
gcauccaccuccuucuc

SEQ ID NO: 2451430 - RNA, 14 nt, Human
gcaucucagcccac

SEQ ID NO: 2451431 - RNA, 13 nt, Human
gcaucucagccca

SEQ ID NO: 2451432 - RNA, 14 nt, Human
gcaucuaucucauc

SEQ ID NO: 2451433 - RNA, 12 nt, Human
gcauccaccucc

SEQ ID NO: 2451434 - RNA, 15 nt, Human
gcauccaaaggugcu

SEQ ID NO: 2451435 - RNA, 16 nt, Human
gcauccaccuccuucu

SEQ ID NO: 2451436 - RNA, 15 nt, Human
gcauccaccuccuuc

SEQ ID NO: 2451437 - RNA, 20 nt, Human
gcaguggugguuuucuguuc

SEQ ID NO: 2451438 - RNA, 21 nt, Human
gcaguggugguuuucuguucu

SEQ ID NO: 2451439 - RNA, 21 nt, Human
gcaguggugcgaucuggguuc

SEQ ID NO: 2451440 - RNA, 20 nt, Human
gcaguggugcgaucuggguu

SEQ ID NO: 2451441 - RNA, 19 nt, Human
gcaguggugguuuucuguu

SEQ ID NO: 2451442 - RNA, 22 nt, Human
gcaguggugcgaucuggguuca

SEQ ID NO: 2451443 - RNA, 20 nt, Human
gcaguucccccaaccucaga

SEQ ID NO: 2451444 - RNA, 16 nt, Human
gcauacuaauaaagua

SEQ ID NO: 2451445 - RNA, 21 nt, Human
gcaguugaaaagacuccaaag

SEQ ID NO: 2451446 - RNA, 19 nt, Human
gcauacguacacauuuuau

SEQ ID NO: 2451447 - RNA, 16 nt, Human
gcaguugaaaagacuc

SEQ ID NO: 2451448 - RNA, 19 nt, Human
gcaguugaaaagacuccaa

SEQ ID NO: 2451449 - RNA, 23 nt, Human
gcaguucccccaaccucagacuu

SEQ ID NO: 2451450 - RNA, 17 nt, Human
gcaguucagcaccaccc

SEQ ID NO: 2451451 - RNA, 19 nt, Human
gcaguucagcaccacccua

SEQ ID NO: 2451452 - RNA, 19 nt, Human
gcaguggugcgaucugggu

SEQ ID NO: 2451453 - RNA, 18 nt, Human
gcaguggugcgaucuggg

SEQ ID NO: 2451454 - RNA, 17 nt, Human
gcagugggccuggccag

SEQ ID NO: 2451455 - RNA, 21 nt, Human
gcagugggucccacuuccccu

SEQ ID NO: 2451456 - RNA, 19 nt, Human
gcagugggucccacuuccc

SEQ ID NO: 2451457 - RNA, 18 nt, Human
gcagugggucccacuucc

SEQ ID NO: 2451458 - RNA, 11 nt, Human
gcagugggucc

SEQ ID NO: 2451459 - RNA, 23 nt, Human
gcagugggucccacuuccccucc

SEQ ID NO: 2451460 - RNA, 22 nt, Human
gcagugggucccacuuccccuc

SEQ ID NO: 2451461 - RNA, 18 nt, Human
gcagugguaagcucuggc

SEQ ID NO: 2451462 - RNA, 19 nt, Human
gcaguggcugguccagggc

SEQ ID NO: 2451463 - RNA, 18 nt, Human
gcaguggcugguccaggg

SEQ ID NO: 2451464 - RNA, 15 nt, Human
gcaguggcuggucca

SEQ ID NO: 2451465 - RNA, 14 nt, Human
gcaguggcuggucc

SEQ ID NO: 2451466 - RNA, 20 nt, Human
gcaguggcugguccagggcu

SEQ ID NO: 2451467 - RNA, 21 nt, Human
gcagugggacagggcauggcc

SEQ ID NO: 2451468 - RNA, 16 nt, Human
gcagugggccuggcca

SEQ ID NO: 2451469 - RNA, 15 nt, Human
gcagugggccuggcc

SEQ ID NO: 2451470 - RNA, 11 nt, Human
gcagugggagc

SEQ ID NO: 2451471 - RNA, 19 nt, Human
gcaggucccuaauaaagcu

SEQ ID NO: 2451472 - RNA, 18 nt, Human
gcaggucccuaauaaagc

SEQ ID NO: 2451473 - RNA, 17 nt, Human
gcaggucccuaauaaag

SEQ ID NO: 2451474 - RNA, 16 nt, Human
gcaggucccuaauaaa

SEQ ID NO: 2451475 - RNA, 21 nt, Human
gcaggucccuaauaaagcugu

SEQ ID NO: 2451476 - RNA, 20 nt, Human
gcaggucccuaauaaagcug

SEQ ID NO: 2451477 - RNA, 23 nt, Human
gcaggucccuaauaaagcugugu

SEQ ID NO: 2451478 - RNA, 16 nt, Human
gcaguggcucacgccu

SEQ ID NO: 2451479 - RNA, 21 nt, Human
gcagggucccauuucucacug

SEQ ID NO: 2451480 - RNA, 17 nt, Human
gcagggucaggagaggg

SEQ ID NO: 2451481 - RNA, 19 nt, Human
gcagggcucugccccagag

SEQ ID NO: 2451482 - RNA, 21 nt, Human
gcagggcucugccccagaggc

SEQ ID NO: 2451483 - RNA, 23 nt, Human
gcagggcucucuuuccuucuugc

SEQ ID NO: 2451484 - RNA, 16 nt, Human
gcagggcucugcccca

SEQ ID NO: 2451485 - RNA, 12 nt, Human
gcagggcucuga

SEQ ID NO: 2451486 - RNA, 22 nt, Human
gcaggggaggguagagcggaga

SEQ ID NO: 2451487 - RNA, 14 nt, Human
gcagggucaggaga

SEQ ID NO: 2451488 - RNA, 15 nt, Human
gcagggguugcagug

SEQ ID NO: 2451489 - RNA, 15 nt, Human
gcagggucaggagag

SEQ ID NO: 2451490 - RNA, 16 nt, Human
gcagggucaggagagg

SEQ ID NO: 2451491 - RNA, 15 nt, Human
gcaggucccuaauaa

SEQ ID NO: 2451492 - RNA, 14 nt, Human
gcaggucccuaaua

SEQ ID NO: 2451493 - RNA, 16 nt, Human
gcagggucucacucug

SEQ ID NO: 2451494 - RNA, 19 nt, Human
gcaggguccuagaaauucc

SEQ ID NO: 2451495 - RNA, 14 nt, Human
gcagggcucaggau

SEQ ID NO: 2451496 - RNA, 13 nt, Human
gcagggcucagga

SEQ ID NO: 2451497 - RNA, 21 nt, Human
gcagggcucaggauuucgugg

SEQ ID NO: 2451498 - RNA, 12 nt, Human
gcagggcucagg

SEQ ID NO: 2451499 - RNA, 15 nt, Human
gcagggauuugagga

SEQ ID NO: 2451500 - RNA, 22 nt, Human
gcagggauugcugccacuuuuu

SEQ ID NO: 2451501 - RNA, 19 nt, Human
gcagggauugcugccacuu

SEQ ID NO: 2451502 - RNA, 14 nt, Human
gcagggauuugagg

SEQ ID NO: 2451503 - RNA, 15 nt, Human
gcagggauugcugcc

SEQ ID NO: 2451504 - RNA, 22 nt, Human
gcagggauuaaccucugcacua

SEQ ID NO: 2451505 - RNA, 19 nt, Human
gcagggauuaaccucugca

SEQ ID NO: 2451506 - RNA, 14 nt, Human
gcagggauccuggu

SEQ ID NO: 2451507 - RNA, 13 nt, Human
gcagggaugcccu

SEQ ID NO: 2451508 - RNA, 21 nt, Human
gcagggaugcccuggaggugg

SEQ ID NO: 2451509 - RNA, 23 nt, Human
gcagggaugcccuggagguggcu

SEQ ID NO: 2451510 - RNA, 14 nt, Human
gcagggaggggacu

SEQ ID NO: 2451511 - RNA, 15 nt, Human
gcagggaggggacua

SEQ ID NO: 2451512 - RNA, 21 nt, Human
gcaggcccugcacuguccugc

SEQ ID NO: 2451513 - RNA, 23 nt, Human
gcaggccucgaaaaccaucacau

SEQ ID NO: 2451514 - RNA, 23 nt, Human
gcaggcggugggcacccacccug

SEQ ID NO: 2451515 - RNA, 16 nt, Human
gcaggcggugggcacc

SEQ ID NO: 2451516 - RNA, 15 nt, Human
gcaggcggugggcac

SEQ ID NO: 2451517 - RNA, 14 nt, Human
gcaggcggugggca

SEQ ID NO: 2451518 - RNA, 21 nt, Human
gcaggcagcgccaagcaaccu

SEQ ID NO: 2451519 - RNA, 18 nt, Human
gcaggcagcgccaagcaa

SEQ ID NO: 2451520 - RNA, 22 nt, Human
gcaggcagcgccaagcaaccug

SEQ ID NO: 2451521 - RNA, 16 nt, Human
gcaggcagcgccaagc

SEQ ID NO: 2451522 - RNA, 13 nt, Human
gcaggcagcgcca

SEQ ID NO: 2451523 - RNA, 23 nt, Human
gcaggagaggagagccagagaag

SEQ ID NO: 2451524 - RNA, 9 nt, Human
gcaggcagu

SEQ ID NO: 2451525 - RNA, 13 nt, Human
gcaggcagggcug

SEQ ID NO: 2451526 - RNA, 17 nt, Human
gcaggcagccaggccac

SEQ ID NO: 2451527 - RNA, 18 nt, Human
gcaggcagccaggccaca

SEQ ID NO: 2451528 - RNA, 19 nt, Human
gcaggacugcacagcgucc

SEQ ID NO: 2451529 - RNA, 22 nt, Human
gcaggagaggagagccagagaa

SEQ ID NO: 2451530 - RNA, 20 nt, Human
gcaggagaggagagccagag

SEQ ID NO: 2451531 - RNA, 19 nt, Human
gcaggagaggagagccaga

SEQ ID NO: 2451532 - RNA, 18 nt, Human
gcaggagaggagagccag

SEQ ID NO: 2451533 - RNA, 17 nt, Human
gcaggagaggagagcca

SEQ ID NO: 2451534 - RNA, 16 nt, Human
gcaggagaggagagcc

SEQ ID NO: 2451535 - RNA, 13 nt, Human
gcaggagaggaga

SEQ ID NO: 2451536 - RNA, 22 nt, Human
gcaggagaaucacuugcacucc

SEQ ID NO: 2451537 - RNA, 20 nt, Human
gcaggcaugcaugugcuugu

SEQ ID NO: 2451538 - RNA, 17 nt, Human
gcaggcauagaggcuuc

SEQ ID NO: 2451539 - RNA, 16 nt, Human
gcaggcauguccugga

SEQ ID NO: 2451540 - RNA, 20 nt, Human
gcaggccaagagcagaggca

SEQ ID NO: 2451541 - RNA, 22 nt, Human
gcaggccaagagcagaggcagc

SEQ ID NO: 2451542 - RNA, 24 nt, Human
gcaggccaagagcagaggcagcga

SEQ ID NO: 2451543 - RNA, 21 nt, Human
gcaggccaaggccuucuccuc

SEQ ID NO: 2451544 - RNA, 20 nt, Human
gcaggccaaggccuucuccu

SEQ ID NO: 2451545 - RNA, 19 nt, Human
gcaggccaaggccuucucc

SEQ ID NO: 2451546 - RNA, 23 nt, Human
gcaggccaaggccuucuccuccc

SEQ ID NO: 2451547 - RNA, 20 nt, Human
gcaggccaagucaggcccuu

SEQ ID NO: 2451548 - RNA, 16 nt, Human
gcaggcccuggccucc

SEQ ID NO: 2451549 - RNA, 15 nt, Human
gcaggcccuggccuc

SEQ ID NO: 2451550 - RNA, 14 nt, Human
gcaggcccuggccu

SEQ ID NO: 2451551 - RNA, 12 nt, Human
gcaggcccuggc

SEQ ID NO: 2451552 - RNA, 23 nt, Human
gcaggcccugcacuguccugcuc

SEQ ID NO: 2451553 - RNA, 20 nt, Human
gcaggcccugcacuguccug

SEQ ID NO: 2451554 - RNA, 18 nt, Human
gcaggcccugcacugucc

SEQ ID NO: 2451555 - RNA, 15 nt, Human
gcaggcccugcacug

SEQ ID NO: 2451556 - RNA, 14 nt, Human
gcaggcccugcacu

SEQ ID NO: 2451557 - RNA, 12 nt, Human
gcaggcccugca

SEQ ID NO: 2451558 - RNA, 17 nt, Human
gcaggccaggccagcug

SEQ ID NO: 2451559 - RNA, 15 nt, Human
gcaggccaggccagc

SEQ ID NO: 2451560 - RNA, 16 nt, Human
gcaggccaggccagcu

SEQ ID NO: 2451561 - RNA, 22 nt, Human
gcuuguugggauuccugaccca

SEQ ID NO: 2451562 - RNA, 21 nt, Human
gcuuguugggauuccugaccc

SEQ ID NO: 2451563 - RNA, 20 nt, Human
gcuuguugggauuccugacc

SEQ ID NO: 2451564 - RNA, 18 nt, Human
gcuuguugggauuccuga

SEQ ID NO: 2451565 - RNA, 14 nt, Human
gcuuguuggauuuu

SEQ ID NO: 2451566 - RNA, 15 nt, Human
gcuuguuauuuauaa

SEQ ID NO: 2451567 - RNA, 18 nt, Human
gcuuguucccucucccug

SEQ ID NO: 2451568 - RNA, 21 nt, Human
gcuuguguguuucacuuuuag

SEQ ID NO: 2451569 - RNA, 20 nt, Human
gcuuguguguuucacuuuua

SEQ ID NO: 2451570 - RNA, 19 nt, Human
gcuuguguguuucacuuuu

SEQ ID NO: 2451571 - RNA, 16 nt, Human
gcuuguguguuucacu

SEQ ID NO: 2451572 - RNA, 15 nt, Human
gcuuguguguuucac

SEQ ID NO: 2451573 - RNA, 14 nt, Human
gcuuguguguuuca

SEQ ID NO: 2451574 - RNA, 22 nt, Human
gcuuguguauccauuaucaugu

SEQ ID NO: 2451575 - RNA, 20 nt, Human
gcuuguguauccauuaucau

SEQ ID NO: 2451576 - RNA, 12 nt, Human
gcuuguguuaag

SEQ ID NO: 2451577 - RNA, 19 nt, Human
gcuuguguauccauuauca

SEQ ID NO: 2451578 - RNA, 18 nt, Human
gcuuguguauccauuauc

SEQ ID NO: 2451579 - RNA, 11 nt, Human
gcuuguguauc

SEQ ID NO: 2451580 - RNA, 23 nt, Human
gcuuguggauugaggguaggagg

SEQ ID NO: 2451581 - RNA, 20 nt, Human
gcuuguggagccccacacug

SEQ ID NO: 2451582 - RNA, 19 nt, Human
gcuuguggagccccacacu

SEQ ID NO: 2451583 - RNA, 14 nt, Human
gcuuguggagcccc

SEQ ID NO: 2451584 - RNA, 22 nt, Human
gcuugugcagaaaacauuguuc

SEQ ID NO: 2451585 - RNA, 21 nt, Human
gcuugugcagaaaacauuguu

SEQ ID NO: 2451586 - RNA, 18 nt, Human
gcuugugcagaaaacauu

SEQ ID NO: 2451587 - RNA, 14 nt, Human
gcuugugcacaauu

SEQ ID NO: 2451588 - RNA, 15 nt, Human
gcuugugcaacaaua

SEQ ID NO: 2451589 - RNA, 14 nt, Human
gcuuggagcagagg

SEQ ID NO: 2451590 - RNA, 12 nt, Human
gcuuggacugga

SEQ ID NO: 2451591 - RNA, 16 nt, Human
gcuuggacggcugggc

SEQ ID NO: 2451592 - RNA, 14 nt, Human
gcuugcucauuuuu

SEQ ID NO: 2451593 - RNA, 23 nt, Human
gcuugcucuucagugggagaaaa

SEQ ID NO: 2451594 - RNA, 19 nt, Human
gcuugccugauauaaaugc

SEQ ID NO: 2451595 - RNA, 15 nt, Human
gcuugccucucuguu

SEQ ID NO: 2451596 - RNA, 16 nt, Human
gcuugcguaugucugu

SEQ ID NO: 2451597 - RNA, 22 nt, Human
gcuugcguuagaaugaggagga

SEQ ID NO: 2451598 - RNA, 23 nt, Human
gcuuggaagagccugcaggugcu

SEQ ID NO: 2451599 - RNA, 18 nt, Human
gcuuggaagagccugcag

SEQ ID NO: 2451600 - RNA, 15 nt, Human
gcuuggaagagccug

SEQ ID NO: 2451601 - RNA, 19 nt, Human
gcuuggaaagcaucaccuc

SEQ ID NO: 2451602 - RNA, 21 nt, Human
gcuuggaaagcaucaccucag

SEQ ID NO: 2451603 - RNA, 13 nt, Human
gcuugcugagagg

SEQ ID NO: 2451604 - RNA, 12 nt, Human
gcuugcugagag

SEQ ID NO: 2451605 - RNA, 12 nt, Human
gcuugcuuuucu

SEQ ID NO: 2451606 - RNA, 18 nt, Human
gcuuggaaacuggaugag

SEQ ID NO: 2451607 - RNA, 23 nt, Human
gcuugccucggcuccugcugcac

SEQ ID NO: 2451608 - RNA, 22 nt, Human
gcuugccucggcuccugcugca

SEQ ID NO: 2451609 - RNA, 21 nt, Human
gcuugccucggcuccugcugc

SEQ ID NO: 2451610 - RNA, 20 nt, Human
gcuugccucggcuccugcug

SEQ ID NO: 2451611 - RNA, 19 nt, Human
gcuugccucggcuccugcu

SEQ ID NO: 2451612 - RNA, 18 nt, Human
gcuugccucggcuccugc

SEQ ID NO: 2451613 - RNA, 16 nt, Human
gcuugccucggcuccu

SEQ ID NO: 2451614 - RNA, 15 nt, Human
gcuugccucggcucc

SEQ ID NO: 2451615 - RNA, 14 nt, Human
gcuugccugcaggc

SEQ ID NO: 2451616 - RNA, 13 nt, Human
gcuugccugcagg

SEQ ID NO: 2451617 - RNA, 13 nt, Human
gcuugccuagggc

SEQ ID NO: 2451618 - RNA, 17 nt, Human
gcuugccuagggccugg

SEQ ID NO: 2451619 - RNA, 21 nt, Human
gcuugccuagggccuggucca

SEQ ID NO: 2451620 - RNA, 14 nt, Human
gcuugccucggcuc

SEQ ID NO: 2451621 - RNA, 22 nt, Human
gcuugccuagggccugguccau

SEQ ID NO: 2451622 - RNA, 15 nt, Human
gcuucuuaaagaguu

SEQ ID NO: 2451623 - RNA, 14 nt, Human
gcuucuuaaaugag

SEQ ID NO: 2451624 - RNA, 16 nt, Human
gcuuuaaacucaggga

SEQ ID NO: 2451625 - RNA, 16 nt, Human
gcuuuaaacacccuuc

SEQ ID NO: 2451626 - RNA, 22 nt, Human
gcuuuaaacauugguucuugua

SEQ ID NO: 2451627 - RNA, 17 nt, Human
gcuuuaaacaaauucau

SEQ ID NO: 2451628 - RNA, 13 nt, Human
gcuuuaaacaaau

SEQ ID NO: 2451629 - RNA, 23 nt, Human
gcuuuaaaaacuauuuaacuuga

SEQ ID NO: 2451630 - RNA, 20 nt, Human
gcuuuaaaaacuauuuaacu

SEQ ID NO: 2451631 - RNA, 15 nt, Human
gcuuuaaaaacuauu

SEQ ID NO: 2451632 - RNA, 21 nt, Human
gcuuguuugcucaccuggggu

SEQ ID NO: 2451633 - RNA, 23 nt, Human
gcuuguuuucuugccaaugaggu

SEQ ID NO: 2451634 - RNA, 20 nt, Human
gcuuguuuacagcacuacuc

SEQ ID NO: 2451635 - RNA, 13 nt, Human
gcuuguuuacagc

SEQ ID NO: 2451636 - RNA, 24 nt, Human
gcuuguugggauuccugacccagg

SEQ ID NO: 2451637 - RNA, 23 nt, Human
gcuuguugggauuccugacccag

SEQ ID NO: 2451638 - RNA, 15 nt, Human
gcuuguuuccuagca

SEQ ID NO: 2451639 - RNA, 23 nt, Human
gcuuguuuccuagcacacacuuu

SEQ ID NO: 2451640 - RNA, 19 nt, Human
gcuuguuugcucaccuggg

SEQ ID NO: 2451641 - RNA, 15 nt, Human
gcuuucauguaaacu

SEQ ID NO: 2451642 - RNA, 20 nt, Human
gcuuucauguaaacugugca

SEQ ID NO: 2451643 - RNA, 21 nt, Human
gcuuucauguaaacugugcac

SEQ ID NO: 2451644 - RNA, 14 nt, Human
gcuuuccaaagcca

SEQ ID NO: 2451645 - RNA, 22 nt, Human
gcuuuaaacucagggacagagc

SEQ ID NO: 2451646 - RNA, 21 nt, Human
gcuuuaaacucagggacagag

SEQ ID NO: 2451647 - RNA, 18 nt, Human
gcuuuaaacucagggaca

SEQ ID NO: 2451648 - RNA, 19 nt, Human
gcuuuaaccauuaaaacug

SEQ ID NO: 2451649 - RNA, 12 nt, Human
gcuuucauguaa

SEQ ID NO: 2451650 - RNA, 18 nt, Human
gcuuucaugauuagcaag

SEQ ID NO: 2451651 - RNA, 12 nt, Human
gcuuucaguauu

SEQ ID NO: 2451652 - RNA, 12 nt, Human
gcuuucaugauu

SEQ ID NO: 2451653 - RNA, 15 nt, Human
gcuuuuaugugaaac

SEQ ID NO: 2451654 - RNA, 13 nt, Human
gcuuuuaugugaa

SEQ ID NO: 2451655 - RNA, 16 nt, Human
gcuuuguaggugucuc

SEQ ID NO: 2451656 - RNA, 16 nt, Human
gcuuuuauagaggcua

SEQ ID NO: 2451657 - RNA, 15 nt, Human
gcuuuguaggugucu

SEQ ID NO: 2451658 - RNA, 13 nt, Human
gcuuuuagacaga

SEQ ID NO: 2451659 - RNA, 16 nt, Human
gcuuuccauguugcug

SEQ ID NO: 2451660 - RNA, 19 nt, Human
gcuuuccauguugcugcca

SEQ ID NO: 2451661 - RNA, 11 nt, Human
gcuuuccagcu

SEQ ID NO: 2451662 - RNA, 18 nt, Human
gcuuuccacaccuggcac

SEQ ID NO: 2451663 - RNA, 14 nt, Human
gcuuuccagcucac

SEQ ID NO: 2451664 - RNA, 19 nt, Human
gcuuugggcugcccuggug

SEQ ID NO: 2451665 - RNA, 18 nt, Human
gcuuugggcugcccuggu

SEQ ID NO: 2451666 - RNA, 21 nt, Human
gcuuuccauguugcugccaac

SEQ ID NO: 2451667 - RNA, 20 nt, Human
gcuucaguggcagcugcuuu

SEQ ID NO: 2451668 - RNA, 14 nt, Human
gcuucauaaaugaa

SEQ ID NO: 2451669 - RNA, 19 nt, Human
gcuucaguuuccuggucug

SEQ ID NO: 2451670 - RNA, 18 nt, Human
gcuucaguuguuuucccg

SEQ ID NO: 2451671 - RNA, 15 nt, Human
gcuucaguuguuuuc

SEQ ID NO: 2451672 - RNA, 19 nt, Human
gcuucaguggcagcugcuu

SEQ ID NO: 2451673 - RNA, 17 nt, Human
gcuuaucaauaaaccug

SEQ ID NO: 2451674 - RNA, 23 nt, Human
gcuuaucaugcugucuuuacaug

SEQ ID NO: 2451675 - RNA, 21 nt, Human
gcuucauccuccucagaucuu

SEQ ID NO: 2451676 - RNA, 18 nt, Human
gcuucaucugucaagugg

SEQ ID NO: 2451677 - RNA, 13 nt, Human
gcuucaucuguca

SEQ ID NO: 2451678 - RNA, 14 nt, Human
gcuucaucuggcaa

SEQ ID NO: 2451679 - RNA, 10 nt, Human
gcuucauaca

SEQ ID NO: 2451680 - RNA, 22 nt, Human
gcuucauaaaugaagcagcuuu

SEQ ID NO: 2451681 - RNA, 18 nt, Human
gcuucauaaaugaagcag

SEQ ID NO: 2451682 - RNA, 11 nt, Human
gcuucauacac

SEQ ID NO: 2451683 - RNA, 18 nt, Human
gcuucaugcucagcccug

SEQ ID NO: 2451684 - RNA, 17 nt, Human
gcuucauggcagaaggc

SEQ ID NO: 2451685 - RNA, 14 nt, Human
gcuucaugcucagc

SEQ ID NO: 2451686 - RNA, 14 nt, Human
gcuucaugccagcu

SEQ ID NO: 2451687 - RNA, 16 nt, Human
gcuucaugacauuccu

SEQ ID NO: 2451688 - RNA, 17 nt, Human
gcuuauagguggccucu

SEQ ID NO: 2451689 - RNA, 15 nt, Human
gcuuauagguggccu

SEQ ID NO: 2451690 - RNA, 13 nt, Human
gcuuagaccucag

SEQ ID NO: 2451691 - RNA, 14 nt, Human
gcuuagaccucagc

SEQ ID NO: 2451692 - RNA, 15 nt, Human
gcuuagaccucagcc

SEQ ID NO: 2451693 - RNA, 16 nt, Human
gcuuagaccucagccu

SEQ ID NO: 2451694 - RNA, 20 nt, Human
gcuuauacacuuacacuuua

SEQ ID NO: 2451695 - RNA, 17 nt, Human
gcuuagaccucagccug

SEQ ID NO: 2451696 - RNA, 15 nt, Human
gcuuagacauaacaa

SEQ ID NO: 2451697 - RNA, 18 nt, Human
gcuuagaccucagccugu

SEQ ID NO: 2451698 - RNA, 17 nt, Human
gcuuacugauauauuuu

SEQ ID NO: 2451699 - RNA, 21 nt, Human
gcuuacugauauauuuuacaa

SEQ ID NO: 2451700 - RNA, 20 nt, Human
gcuuacuuuggaauacauuu

SEQ ID NO: 2451701 - RNA, 17 nt, Human
gcuuacuaagcuuugcc

SEQ ID NO: 2451702 - RNA, 23 nt, Human
gcuuacuaagcuuugccagcugc

SEQ ID NO: 2451703 - RNA, 21 nt, Human
gcuuacuacaugugggagcuu

SEQ ID NO: 2451704 - RNA, 19 nt, Human
gcuuacauuuuuacaauaa

SEQ ID NO: 2451705 - RNA, 15 nt, Human
gcuucugcuuuucug

SEQ ID NO: 2451706 - RNA, 14 nt, Human
gcuucugcuuuucu

SEQ ID NO: 2451707 - RNA, 13 nt, Human
gcuucugcuuuuc

SEQ ID NO: 2451708 - RNA, 21 nt, Human
gcuucugcuuuucugcccugg

SEQ ID NO: 2451709 - RNA, 20 nt, Human
gcuucugcuuuucugcccug

SEQ ID NO: 2451710 - RNA, 19 nt, Human
gcuucugcuuuucugcccu

SEQ ID NO: 2451711 - RNA, 16 nt, Human
gcuucugcuuuucugc

SEQ ID NO: 2451712 - RNA, 23 nt, Human
gcuucugcuuuucugcccuggcu

SEQ ID NO: 2451713 - RNA, 12 nt, Human
gcuucuggagcc

SEQ ID NO: 2451714 - RNA, 17 nt, Human
gcuucugcugggcuggg

SEQ ID NO: 2451715 - RNA, 16 nt, Human
gcuucugcugggcugg

SEQ ID NO: 2451716 - RNA, 22 nt, Human
gcuucugcugggcuggggccug

SEQ ID NO: 2451717 - RNA, 15 nt, Human
gcuucugcugggcug

SEQ ID NO: 2451718 - RNA, 14 nt, Human
gcuucugcugggcu

SEQ ID NO: 2451719 - RNA, 12 nt, Human
gcuucugcuggg

SEQ ID NO: 2451720 - RNA, 18 nt, Human
gcuucucauccugcaggc

SEQ ID NO: 2451721 - RNA, 13 nt, Human
gcuucugccugca

SEQ ID NO: 2451722 - RNA, 17 nt, Human
gcuucucauccugcagg

SEQ ID NO: 2451723 - RNA, 17 nt, Human
gcuucuguugcugccuc

SEQ ID NO: 2451724 - RNA, 18 nt, Human
gcuucuguugcugccuca

SEQ ID NO: 2451725 - RNA, 13 nt, Human
gcuucuggagccc

SEQ ID NO: 2451726 - RNA, 14 nt, Human
gcuucuggagcccu

SEQ ID NO: 2451727 - RNA, 17 nt, Human
gcuucuggagcccuugg

SEQ ID NO: 2451728 - RNA, 18 nt, Human
gcuucuggagcccuuggg

SEQ ID NO: 2451729 - RNA, 19 nt, Human
gcuucuguuuuauaauuuu

SEQ ID NO: 2451730 - RNA, 19 nt, Human
gcuucuguugcugccucau

SEQ ID NO: 2451731 - RNA, 16 nt, Human
gcuuccaagguggucu

SEQ ID NO: 2451732 - RNA, 15 nt, Human
gcuuccaaggugguc

SEQ ID NO: 2451733 - RNA, 21 nt, Human
gcuuccaaggcagaagcagca

SEQ ID NO: 2451734 - RNA, 12 nt, Human
gcuuccaauuuu

SEQ ID NO: 2451735 - RNA, 18 nt, Human
gcuuccaagguggucugc

SEQ ID NO: 2451736 - RNA, 16 nt, Human
gcuuccaccucacccc

SEQ ID NO: 2451737 - RNA, 15 nt, Human
gcuuccaccucaccc

SEQ ID NO: 2451738 - RNA, 14 nt, Human
gcuuccaccucacc

SEQ ID NO: 2451739 - RNA, 12 nt, Human
gcuuccaccuca

SEQ ID NO: 2451740 - RNA, 19 nt, Human
gcuuccagaaaaccccagc

SEQ ID NO: 2451741 - RNA, 18 nt, Human
gcuucauuuccugugucu

SEQ ID NO: 2451742 - RNA, 18 nt, Human
gcuucauuagagcaggcg

SEQ ID NO: 2451743 - RNA, 17 nt, Human
gcuucauuagagcaggc

SEQ ID NO: 2451744 - RNA, 16 nt, Human
gcuucauuagagcagg

SEQ ID NO: 2451745 - RNA, 15 nt, Human
gcuucauuagagcag

SEQ ID NO: 2451746 - RNA, 22 nt, Human
gcuuccagagaguccucuggau

SEQ ID NO: 2451747 - RNA, 21 nt, Human
gcuuccagagaguccucugga

SEQ ID NO: 2451748 - RNA, 20 nt, Human
gcuuccagagaguccucugg

SEQ ID NO: 2451749 - RNA, 19 nt, Human
gcuuccagagaguccucug

SEQ ID NO: 2451750 - RNA, 13 nt, Human
gcuuccagagagu

SEQ ID NO: 2451751 - RNA, 20 nt, Human
gcuuccaccucaccccacuu

SEQ ID NO: 2451752 - RNA, 19 nt, Human
gcuuccaccucaccccacu

SEQ ID NO: 2451753 - RNA, 17 nt, Human
gcuuccaccucacccca

SEQ ID NO: 2451754 - RNA, 22 nt, Human
gcuucucacugccaugccagcu

SEQ ID NO: 2451755 - RNA, 17 nt, Human
gcuucucacugccaugc

SEQ ID NO: 2451756 - RNA, 22 nt, Human
gcuuccagauugacgacaagug

SEQ ID NO: 2451757 - RNA, 16 nt, Human
gcuucucauacgucca

SEQ ID NO: 2451758 - RNA, 16 nt, Human
gcuucucauccugcag

SEQ ID NO: 2451759 - RNA, 22 nt, Human
gcugggcugagccccuacccca

SEQ ID NO: 2451760 - RNA, 20 nt, Human
gcugggcugagccccuaccc

SEQ ID NO: 2451761 - RNA, 19 nt, Human
gcugggcugagccccuacc

SEQ ID NO: 2451762 - RNA, 18 nt, Human
gcugggcugagccccuac

SEQ ID NO: 2451763 - RNA, 14 nt, Human
gcugggcugagccc

SEQ ID NO: 2451764 - RNA, 13 nt, Human
gcugggcugagcc

SEQ ID NO: 2451765 - RNA, 12 nt, Human
gcugggcugagc

SEQ ID NO: 2451766 - RNA, 21 nt, Human
gcugggcucugccacccuacc

SEQ ID NO: 2451767 - RNA, 20 nt, Human
gcugggcuucaguggcagcu

SEQ ID NO: 2451768 - RNA, 21 nt, Human
gcugggagggauagagggggg

SEQ ID NO: 2451769 - RNA, 13 nt, Human
gcugggcucucca

SEQ ID NO: 2451770 - RNA, 14 nt, Human
gcugggcucuccac

SEQ ID NO: 2451771 - RNA, 15 nt, Human
gcugggcucuccacc

SEQ ID NO: 2451772 - RNA, 15 nt, Human
gcugggcucugccac

SEQ ID NO: 2451773 - RNA, 14 nt, Human
gcugggcucugcca

SEQ ID NO: 2451774 - RNA, 13 nt, Human
gcugggcucugca

SEQ ID NO: 2451775 - RNA, 19 nt, Human
gcugggcucuccaccucag

SEQ ID NO: 2451776 - RNA, 20 nt, Human
gcugggcucuccaccucagc

SEQ ID NO: 2451777 - RNA, 21 nt, Human
gcugggcucuccaccucagcc

SEQ ID NO: 2451778 - RNA, 22 nt, Human
gcugggcucuccaccucagccu

SEQ ID NO: 2451779 - RNA, 22 nt, Human
gcugggcuucaguggcagcugc

SEQ ID NO: 2451780 - RNA, 21 nt, Human
gcugggcuucaguggcagcug

SEQ ID NO: 2451781 - RNA, 12 nt, Human
gcugggcugggg

SEQ ID NO: 2451782 - RNA, 22 nt, Human
gcugggcuuggcagcccggguc

SEQ ID NO: 2451783 - RNA, 13 nt, Human
gcugggcuggcuc

SEQ ID NO: 2451784 - RNA, 14 nt, Human
gcugggcugggcgc

SEQ ID NO: 2451785 - RNA, 15 nt, Human
gcuggccuggccccu

SEQ ID NO: 2451786 - RNA, 14 nt, Human
gcuggccuggcccc

SEQ ID NO: 2451787 - RNA, 12 nt, Human
gcuggccuggcc

SEQ ID NO: 2451788 - RNA, 13 nt, Human
gcuggccuggccc

SEQ ID NO: 2451789 - RNA, 21 nt, Human
gcugggcucccuucccaccuc

SEQ ID NO: 2451790 - RNA, 19 nt, Human
gcugggaugauuggagggg

SEQ ID NO: 2451791 - RNA, 12 nt, Human
gcugggaggcaa

SEQ ID NO: 2451792 - RNA, 15 nt, Human
gcugggaggcauggc

SEQ ID NO: 2451793 - RNA, 14 nt, Human
gcugggaggcaugg

SEQ ID NO: 2451794 - RNA, 21 nt, Human
gcugggaggcaagaggggugg

SEQ ID NO: 2451795 - RNA, 16 nt, Human
gcugggaggcaagagg

SEQ ID NO: 2451796 - RNA, 18 nt, Human
gcugggaguaguugucuu

SEQ ID NO: 2451797 - RNA, 20 nt, Human
gcugggaggcauggcccugg

SEQ ID NO: 2451798 - RNA, 19 nt, Human
gcugggagggauagagggg

SEQ ID NO: 2451799 - RNA, 19 nt, Human
gcuggucucgaacuccuga

SEQ ID NO: 2451800 - RNA, 22 nt, Human
gcuggucucgaacuccugaccu

SEQ ID NO: 2451801 - RNA, 23 nt, Human
gcuggucucgaacuccugaccuu

SEQ ID NO: 2451802 - RNA, 20 nt, Human
gcuggugagugaugcggcag

SEQ ID NO: 2451803 - RNA, 18 nt, Human
gcuggugagugaugcggc

SEQ ID NO: 2451804 - RNA, 20 nt, Human
gcuggugcagagcugaagau

SEQ ID NO: 2451805 - RNA, 19 nt, Human
gcuggugauggagguuuca

SEQ ID NO: 2451806 - RNA, 21 nt, Human
gcuggugauggagguuucaua

SEQ ID NO: 2451807 - RNA, 13 nt, Human
gcuggugcauuac

SEQ ID NO: 2451808 - RNA, 17 nt, Human
gcuggugcauuacagag

SEQ ID NO: 2451809 - RNA, 18 nt, Human
gcuggugcauuacagaga

SEQ ID NO: 2451810 - RNA, 14 nt, Human
gcuggugccagccu

SEQ ID NO: 2451811 - RNA, 13 nt, Human
gcuggugccagcc

SEQ ID NO: 2451812 - RNA, 20 nt, Human
gcuggugcauuacagagagg

SEQ ID NO: 2451813 - RNA, 22 nt, Human
gcuggugcauuacagagaggag

SEQ ID NO: 2451814 - RNA, 22 nt, Human
gcuggugccagccuuccucugc

SEQ ID NO: 2451815 - RNA, 15 nt, Human
gcuggugccagccuu

SEQ ID NO: 2451816 - RNA, 13 nt, Human
gcuggugcccgga

SEQ ID NO: 2451817 - RNA, 19 nt, Human
gcugguccagggcuaguga

SEQ ID NO: 2451818 - RNA, 14 nt, Human
gcugguccagggcu

SEQ ID NO: 2451819 - RNA, 16 nt, Human
gcugguccgugggacg

SEQ ID NO: 2451820 - RNA, 15 nt, Human
gcugguccgugggac

SEQ ID NO: 2451821 - RNA, 22 nt, Human
gcuggucauguguuugaacuuc

SEQ ID NO: 2451822 - RNA, 19 nt, Human
gcuggucucaaacuccuga

SEQ ID NO: 2451823 - RNA, 20 nt, Human
gcuggucucaaacuccugac

SEQ ID NO: 2451824 - RNA, 23 nt, Human
gcuggggaccugguacccuccug

SEQ ID NO: 2451825 - RNA, 16 nt, Human
gcuggggaccugguac

SEQ ID NO: 2451826 - RNA, 20 nt, Human
gcuggggaaguccucugggu

SEQ ID NO: 2451827 - RNA, 22 nt, Human
gcuggggacggggggccccagu

SEQ ID NO: 2451828 - RNA, 23 nt, Human
gcuggggacggggggccccaguc

SEQ ID NO: 2451829 - RNA, 14 nt, Human
gcuggggaugucuc

SEQ ID NO: 2451830 - RNA, 15 nt, Human
gcugggggccucagu

SEQ ID NO: 2451831 - RNA, 14 nt, Human
gcugggggccucag

SEQ ID NO: 2451832 - RNA, 17 nt, Human
gcuggggcaagucccug

SEQ ID NO: 2451833 - RNA, 18 nt, Human
gcugggggccucagugcc

SEQ ID NO: 2451834 - RNA, 18 nt, Human
gcuggucacugccaugga

SEQ ID NO: 2451835 - RNA, 15 nt, Human
gcuggucacugccau

SEQ ID NO: 2451836 - RNA, 22 nt, Human
gcuggucacagccuccucuguc

SEQ ID NO: 2451837 - RNA, 20 nt, Human
gcuggucacagccuccucug

SEQ ID NO: 2451838 - RNA, 13 nt, Human
gcuggucacugcc

SEQ ID NO: 2451839 - RNA, 18 nt, Human
gcuggucacagccuccuc

SEQ ID NO: 2451840 - RNA, 17 nt, Human
gcuggucacagccuccu

SEQ ID NO: 2451841 - RNA, 15 nt, Human
gcuggucacagccuc

SEQ ID NO: 2451842 - RNA, 13 nt, Human
gcuggucacagcc

SEQ ID NO: 2451843 - RNA, 22 nt, Human
gcuggucaaacaaacucucuga

SEQ ID NO: 2451844 - RNA, 15 nt, Human
gcuggugucaccuga

SEQ ID NO: 2451845 - RNA, 14 nt, Human
gcuggugucaccug

SEQ ID NO: 2451846 - RNA, 23 nt, Human
gcuggugccagccuuccucugca

SEQ ID NO: 2451847 - RNA, 22 nt, Human
gcuggugguuucacggugccag

SEQ ID NO: 2451848 - RNA, 14 nt, Human
gcuggugcccggag

SEQ ID NO: 2451849 - RNA, 17 nt, Human
gcugucagccauuccug

SEQ ID NO: 2451850 - RNA, 23 nt, Human
gcugucaucaauugaauggucag

SEQ ID NO: 2451851 - RNA, 14 nt, Human
gcugucaucugugc

SEQ ID NO: 2451852 - RNA, 15 nt, Human
gcugucaucugugca

SEQ ID NO: 2451853 - RNA, 16 nt, Human
gcugucaucugugcac

SEQ ID NO: 2451854 - RNA, 18 nt, Human
gcugucauaagaaugaau

SEQ ID NO: 2451855 - RNA, 13 nt, Human
gcugucaucucag

SEQ ID NO: 2451856 - RNA, 15 nt, Human
gcuguccccucuugc

SEQ ID NO: 2451857 - RNA, 12 nt, Human
gcuguccccucu

SEQ ID NO: 2451858 - RNA, 22 nt, Human
gcugucccaucuccacuguuau

SEQ ID NO: 2451859 - RNA, 16 nt, Human
gcuguccagugcccau

SEQ ID NO: 2451860 - RNA, 15 nt, Human
gcuguccagugccca

SEQ ID NO: 2451861 - RNA, 14 nt, Human
gcuguccagugccc

SEQ ID NO: 2451862 - RNA, 12 nt, Human
gcuguccagugc

SEQ ID NO: 2451863 - RNA, 23 nt, Human
gcuguccagugcccauuccucac

SEQ ID NO: 2451864 - RNA, 18 nt, Human
gcuguccagugcccauuc

SEQ ID NO: 2451865 - RNA, 22 nt, Human
gcuguccagacagccuguaucu

SEQ ID NO: 2451866 - RNA, 18 nt, Human
gcuguccagacagccugu

SEQ ID NO: 2451867 - RNA, 16 nt, Human
gcuguccagacagccu

SEQ ID NO: 2451868 - RNA, 15 nt, Human
gcuguccagacagcc

SEQ ID NO: 2451869 - RNA, 14 nt, Human
gcuguccagacagc

SEQ ID NO: 2451870 - RNA, 13 nt, Human
gcuguccagacag

SEQ ID NO: 2451871 - RNA, 12 nt, Human
gcuguccagaca

SEQ ID NO: 2451872 - RNA, 22 nt, Human
gcugucaucugugcacugccca

SEQ ID NO: 2451873 - RNA, 23 nt, Human
gcugucccuuacgugaguccugg

SEQ ID NO: 2451874 - RNA, 19 nt, Human
gcuguccccucuugcccca

SEQ ID NO: 2451875 - RNA, 18 nt, Human
gcuguccccucuugcccc

SEQ ID NO: 2451876 - RNA, 17 nt, Human
gcuguccccucuugccc

SEQ ID NO: 2451877 - RNA, 16 nt, Human
gcuguccccucuugcc

SEQ ID NO: 2451878 - RNA, 16 nt, Human
gcugucccuuuuccuu

SEQ ID NO: 2451879 - RNA, 23 nt, Human
gcuguccccucuugccccaaccc

SEQ ID NO: 2451880 - RNA, 20 nt, Human
gcuguccccucuugccccaa

SEQ ID NO: 2451881 - RNA, 13 nt, Human
gcuguccuaggcc

SEQ ID NO: 2451882 - RNA, 14 nt, Human
gcuguccuaggcca

SEQ ID NO: 2451883 - RNA, 16 nt, Human
gcuguccuaggccaca

SEQ ID NO: 2451884 - RNA, 17 nt, Human
gcuguguuugagcucug

SEQ ID NO: 2451885 - RNA, 17 nt, Human
gcuguguucuggugagg

SEQ ID NO: 2451886 - RNA, 14 nt, Human
gcuguguuccccaa

SEQ ID NO: 2451887 - RNA, 22 nt, Human
gcuguguguuaguucccaacau

SEQ ID NO: 2451888 - RNA, 18 nt, Human
gcuguguguuaguuccca

SEQ ID NO: 2451889 - RNA, 18 nt, Human
gcuguguuaaauaaaccu

SEQ ID NO: 2451890 - RNA, 22 nt, Human
gcugugugguuugguguguucc

SEQ ID NO: 2451891 - RNA, 13 nt, Human
gcugugugguuug

SEQ ID NO: 2451892 - RNA, 21 nt, Human
gcuuacaauuuuuuuaauuuu

SEQ ID NO: 2451893 - RNA, 19 nt, Human
gcuuacaauuuuuuuaauu

SEQ ID NO: 2451894 - RNA, 14 nt, Human
gcuuacaauuuuuu

SEQ ID NO: 2451895 - RNA, 12 nt, Human
gcuuacaauuuu

SEQ ID NO: 2451896 - RNA, 23 nt, Human
gcuuacaauuuuuuuaauuuugu

SEQ ID NO: 2451897 - RNA, 22 nt, Human
gcuuacaauuuuuuuaauuuug

SEQ ID NO: 2451898 - RNA, 18 nt, Human
gcuuacauuuuuacaaua

SEQ ID NO: 2451899 - RNA, 14 nt, Human
gcuuacauuuuuac

SEQ ID NO: 2451900 - RNA, 11 nt, Human
gcuuacauuuu

SEQ ID NO: 2451901 - RNA, 18 nt, Human
gcuuacacaucucagacc

SEQ ID NO: 2451902 - RNA, 20 nt, Human
gcuuacaauucccugcuguc

SEQ ID NO: 2451903 - RNA, 19 nt, Human
gcuuacaauucccugcugu

SEQ ID NO: 2451904 - RNA, 14 nt, Human
gcuuacaauucccu

SEQ ID NO: 2451905 - RNA, 18 nt, Human
gcuguuauuucuauuuuu

SEQ ID NO: 2451906 - RNA, 22 nt, Human
gcuuacaagccagcuggagaaa

SEQ ID NO: 2451907 - RNA, 13 nt, Human
gcuguuagagucc

SEQ ID NO: 2451908 - RNA, 16 nt, Human
gcugugugcucuccaa

SEQ ID NO: 2451909 - RNA, 16 nt, Human
gcuguguggcagucug

SEQ ID NO: 2451910 - RNA, 15 nt, Human
gcugugucucccuuc

SEQ ID NO: 2451911 - RNA, 13 nt, Human
gcugugggcaggu

SEQ ID NO: 2451912 - RNA, 22 nt, Human
gcuguggccagggugagagcug

SEQ ID NO: 2451913 - RNA, 14 nt, Human
gcugugggcaggug

SEQ ID NO: 2451914 - RNA, 16 nt, Human
gcugugucuaaacugc

SEQ ID NO: 2451915 - RNA, 15 nt, Human
gcugugucuaaacug

SEQ ID NO: 2451916 - RNA, 14 nt, Human
gcugugucuaaacu

SEQ ID NO: 2451917 - RNA, 14 nt, Human
gcugugggaacgag

SEQ ID NO: 2451918 - RNA, 15 nt, Human
gcuguggccugggca

SEQ ID NO: 2451919 - RNA, 21 nt, Human
gcuguggccagggugagagcu

SEQ ID NO: 2451920 - RNA, 19 nt, Human
gcuguggccagggugagag

SEQ ID NO: 2451921 - RNA, 14 nt, Human
gcuguggccugggc

SEQ ID NO: 2451922 - RNA, 13 nt, Human
gcuguggccaggg

SEQ ID NO: 2451923 - RNA, 17 nt, Human
gcuguggccagggugag

SEQ ID NO: 2451924 - RNA, 16 nt, Human
gcuguggccaggguga

SEQ ID NO: 2451925 - RNA, 14 nt, Human
gcuguggccagggu

SEQ ID NO: 2451926 - RNA, 19 nt, Human
gcuguccucagguggccau

SEQ ID NO: 2451927 - RNA, 18 nt, Human
gcuguccucagguggcca

SEQ ID NO: 2451928 - RNA, 13 nt, Human
gcuguccucaggu

SEQ ID NO: 2451929 - RNA, 12 nt, Human
gcugcccugccc

SEQ ID NO: 2451930 - RNA, 14 nt, Human
gcugcccugcccac

SEQ ID NO: 2451931 - RNA, 13 nt, Human
gcugcccugccca

SEQ ID NO: 2451932 - RNA, 21 nt, Human
gcugcccugcccaccuggccu

SEQ ID NO: 2451933 - RNA, 20 nt, Human
gcugcccugcccaccuggcc

SEQ ID NO: 2451934 - RNA, 18 nt, Human
gcugcccugcccaccugg

SEQ ID NO: 2451935 - RNA, 16 nt, Human
gcugcccugcccaccu

SEQ ID NO: 2451936 - RNA, 23 nt, Human
gcugcccugcccaccuggccucu

SEQ ID NO: 2451937 - RNA, 22 nt, Human
gcugcccugcccaccuggccuc

SEQ ID NO: 2451938 - RNA, 24 nt, Human
gcugcccugcccaccuggccucug

SEQ ID NO: 2451939 - RNA, 17 nt, Human
gcugcccuggcccugag

SEQ ID NO: 2451940 - RNA, 16 nt, Human
gcugcccuggcccuga

SEQ ID NO: 2451941 - RNA, 15 nt, Human
gcugcccuggcccug

SEQ ID NO: 2451942 - RNA, 14 nt, Human
gcugcccuggcccu

SEQ ID NO: 2451943 - RNA, 15 nt, Human
gcugcccugccacuu

SEQ ID NO: 2451944 - RNA, 15 nt, Human
gcugcccugcggccc

SEQ ID NO: 2451945 - RNA, 13 nt, Human
gcugcccuggccc

SEQ ID NO: 2451946 - RNA, 15 nt, Human
gcugcccuggugcug

SEQ ID NO: 2451947 - RNA, 14 nt, Human
gcugcccuggugcu

SEQ ID NO: 2451948 - RNA, 13 nt, Human
gcugcccuggugc

SEQ ID NO: 2451949 - RNA, 12 nt, Human
gcugcccuggug

SEQ ID NO: 2451950 - RNA, 19 nt, Human
gcugccuguucagcuccag

SEQ ID NO: 2451951 - RNA, 18 nt, Human
gcugccuguucagcucca

SEQ ID NO: 2451952 - RNA, 15 nt, Human
gcugccuuagaaccu

SEQ ID NO: 2451953 - RNA, 17 nt, Human
gcugcccuggugcugcc

SEQ ID NO: 2451954 - RNA, 23 nt, Human
gcugcccuggcccugaggugugg

SEQ ID NO: 2451955 - RNA, 19 nt, Human
gcugcccuggcccugaggu

SEQ ID NO: 2451956 - RNA, 20 nt, Human
gcugccuuagaaccuuucuu

SEQ ID NO: 2451957 - RNA, 22 nt, Human
gcugccuguucagcuccagcuc

SEQ ID NO: 2451958 - RNA, 20 nt, Human
gcugccuguucagcuccagc

SEQ ID NO: 2451959 - RNA, 21 nt, Human
gcugcgguccacccaggagcc

SEQ ID NO: 2451960 - RNA, 22 nt, Human
gcugcgguccacccaggagccc

SEQ ID NO: 2451961 - RNA, 15 nt, Human
gcugcggcacccuug

SEQ ID NO: 2451962 - RNA, 14 nt, Human
gcugcggcacccuu

SEQ ID NO: 2451963 - RNA, 15 nt, Human
gcugcgguccaccca

SEQ ID NO: 2451964 - RNA, 14 nt, Human
gcugcgguccaccc

SEQ ID NO: 2451965 - RNA, 15 nt, Human
gcugccuucccuagc

SEQ ID NO: 2451966 - RNA, 13 nt, Human
gcugccuucccua

SEQ ID NO: 2451967 - RNA, 12 nt, Human
gcugccuucccu

SEQ ID NO: 2451968 - RNA, 16 nt, Human
gcugccuucccuagcu

SEQ ID NO: 2451969 - RNA, 19 nt, Human
gcugccuucuggauucuug

SEQ ID NO: 2451970 - RNA, 17 nt, Human
gcugccuucuggauucu

SEQ ID NO: 2451971 - RNA, 16 nt, Human
gcugccuucuggauuc

SEQ ID NO: 2451972 - RNA, 17 nt, Human
gcugcgcuugcuuuucu

SEQ ID NO: 2451973 - RNA, 15 nt, Human
gcugcuacaaagaag

SEQ ID NO: 2451974 - RNA, 20 nt, Human
gcugcuaaucuucagggcac

SEQ ID NO: 2451975 - RNA, 15 nt, Human
gcugcuaaucuucag

SEQ ID NO: 2451976 - RNA, 18 nt, Human
gcugcuaaucuucagggc

SEQ ID NO: 2451977 - RNA, 22 nt, Human
gcugcgucuggaggggccccug

SEQ ID NO: 2451978 - RNA, 14 nt, Human
gcugcgugccugug

SEQ ID NO: 2451979 - RNA, 16 nt, Human
gcugcgucuggagggg

SEQ ID NO: 2451980 - RNA, 19 nt, Human
gcugcuacaaagaagacau

SEQ ID NO: 2451981 - RNA, 18 nt, Human
gcugcuacaaagaagaca

SEQ ID NO: 2451982 - RNA, 17 nt, Human
gcugcuacaaagaagac

SEQ ID NO: 2451983 - RNA, 16 nt, Human
gcugcuacaaagaaga

SEQ ID NO: 2451984 - RNA, 21 nt, Human
gcugcuacaaagaagacaugu

SEQ ID NO: 2451985 - RNA, 20 nt, Human
gcugcuacaaagaagacaug

SEQ ID NO: 2451986 - RNA, 12 nt, Human
gcugcuacccag

SEQ ID NO: 2451987 - RNA, 19 nt, Human
gcugcuacccucccugcug

SEQ ID NO: 2451988 - RNA, 18 nt, Human
gcugcuacccucccugcu

SEQ ID NO: 2451989 - RNA, 17 nt, Human
gcugcuacccucccugc

SEQ ID NO: 2451990 - RNA, 16 nt, Human
gcugcuacccucccug

SEQ ID NO: 2451991 - RNA, 14 nt, Human
gcugcuacccuccc

SEQ ID NO: 2451992 - RNA, 23 nt, Human
gcugcuacaaagaagacauguuu

SEQ ID NO: 2451993 - RNA, 14 nt, Human
gcugcuacccagaa

SEQ ID NO: 2451994 - RNA, 19 nt, Human
gcugcuuucuguugucauu

SEQ ID NO: 2451995 - RNA, 21 nt, Human
gcugcuuuccccuguggggau

SEQ ID NO: 2451996 - RNA, 20 nt, Human
gcugcuuuccccugugggga

SEQ ID NO: 2451997 - RNA, 19 nt, Human
gcugcuuuccccugugggg

SEQ ID NO: 2451998 - RNA, 22 nt, Human
gcugcuuuucccuaagccaagg

SEQ ID NO: 2451999 - RNA, 22 nt, Human
gcugcuuuugucuaugggacuc

SEQ ID NO: 2452000 - RNA, 23 nt, Human
gcugcuacccucccugcuguccc

SEQ ID NO: 2452001 - RNA, 22 nt, Human
gcugcuacccucccugcugucc

SEQ ID NO: 2452002 - RNA, 21 nt, Human
gcugcuacccucccugcuguc

SEQ ID NO: 2452003 - RNA, 20 nt, Human
gcugcuacccucccugcugu

SEQ ID NO: 2452004 - RNA, 18 nt, Human
gcugcuuuccccuguggg

SEQ ID NO: 2452005 - RNA, 17 nt, Human
gcugcuuuccccugugg

SEQ ID NO: 2452006 - RNA, 16 nt, Human
gcugcuuuccccugug

SEQ ID NO: 2452007 - RNA, 15 nt, Human
gcugcuuuccccugu

SEQ ID NO: 2452008 - RNA, 19 nt, Human
gcugcuugugucccuccug

SEQ ID NO: 2452009 - RNA, 23 nt, Human
gcugcuacuuaauuccuuucuca

SEQ ID NO: 2452010 - RNA, 22 nt, Human
gcugcuugugucccuccuggga

SEQ ID NO: 2452011 - RNA, 14 nt, Human
gcugcuuuccccug

SEQ ID NO: 2452012 - RNA, 18 nt, Human
gcuggaagauccugcggg

SEQ ID NO: 2452013 - RNA, 17 nt, Human
gcuggaagauccugcgg

SEQ ID NO: 2452014 - RNA, 15 nt, Human
gcuggaagauccugc

SEQ ID NO: 2452015 - RNA, 14 nt, Human
gcuggaagauccug

SEQ ID NO: 2452016 - RNA, 21 nt, Human
gcuggaacagauucacacugu

SEQ ID NO: 2452017 - RNA, 16 nt, Human
gcuggaacagauucac

SEQ ID NO: 2452018 - RNA, 23 nt, Human
gcuggaaugauuucagcucacug

SEQ ID NO: 2452019 - RNA, 19 nt, Human
gcuggaaucuggagagcua

SEQ ID NO: 2452020 - RNA, 16 nt, Human
gcuggaaucuggagag

SEQ ID NO: 2452021 - RNA, 21 nt, Human
gcuggaaucuggagagcuaga

SEQ ID NO: 2452022 - RNA, 13 nt, Human
gcuggaaggguca

SEQ ID NO: 2452023 - RNA, 21 nt, Human
gcuggaaaaguauguuagugc

SEQ ID NO: 2452024 - RNA, 19 nt, Human
gcugcuuuuugagguggca

SEQ ID NO: 2452025 - RNA, 18 nt, Human
gcugcuuuuugagguggc

SEQ ID NO: 2452026 - RNA, 12 nt, Human
gcugcuuuuccu

SEQ ID NO: 2452027 - RNA, 22 nt, Human
gcugcuuuuccuuggggcaggc

SEQ ID NO: 2452028 - RNA, 23 nt, Human
gcugcuuuuccuuggggcaggca

SEQ ID NO: 2452029 - RNA, 23 nt, Human
gcuggaaaaguauguuagugcaa

SEQ ID NO: 2452030 - RNA, 22 nt, Human
gcuggaaaagggucuugggaaa

SEQ ID NO: 2452031 - RNA, 15 nt, Human
gcuggaaaagggucu

SEQ ID NO: 2452032 - RNA, 23 nt, Human
gcuggaaaagggucuugggaaau

SEQ ID NO: 2452033 - RNA, 20 nt, Human
gcuggaaacagacucgauuc

SEQ ID NO: 2452034 - RNA, 23 nt, Human
gcuggaccuauguccuaaggaca

SEQ ID NO: 2452035 - RNA, 23 nt, Human
gcuggcacauuuccccagaccug

SEQ ID NO: 2452036 - RNA, 15 nt, Human
gcuggaccuugaacu

SEQ ID NO: 2452037 - RNA, 20 nt, Human
gcuggacaguaucacugucu

SEQ ID NO: 2452038 - RNA, 20 nt, Human
gcuggcacccaccguggagg

SEQ ID NO: 2452039 - RNA, 16 nt, Human
gcuggcacccaccgug

SEQ ID NO: 2452040 - RNA, 23 nt, Human
gcuggcacccaccguggaggagg

SEQ ID NO: 2452041 - RNA, 21 nt, Human
gcuggcacccaccguggagga

SEQ ID NO: 2452042 - RNA, 18 nt, Human
gcuggcaccgccuucucu

SEQ ID NO: 2452043 - RNA, 17 nt, Human
gcuggcagcucuccagu

SEQ ID NO: 2452044 - RNA, 16 nt, Human
gcuggcagcucuccag

SEQ ID NO: 2452045 - RNA, 15 nt, Human
gcuggcagcucucca

SEQ ID NO: 2452046 - RNA, 14 nt, Human
gcuggcagcucucc

SEQ ID NO: 2452047 - RNA, 17 nt, Human
gcuggcaccgccuucuc

SEQ ID NO: 2452048 - RNA, 13 nt, Human
gcuggcagcagag

SEQ ID NO: 2452049 - RNA, 13 nt, Human
gcuggcagcucuc

SEQ ID NO: 2452050 - RNA, 15 nt, Human
gcuggcagcagagug

SEQ ID NO: 2452051 - RNA, 23 nt, Human
gcuggcagcucuccagucaggag

SEQ ID NO: 2452052 - RNA, 18 nt, Human
gcuggcagcucuccaguc

SEQ ID NO: 2452053 - RNA, 17 nt, Human
gcuggcaguccuggaag

SEQ ID NO: 2452054 - RNA, 16 nt, Human
gcuggcauuugcaccu

SEQ ID NO: 2452055 - RNA, 21 nt, Human
gcuggccacugcacagagcuc

SEQ ID NO: 2452056 - RNA, 20 nt, Human
gcuggccacugcacagagcu

SEQ ID NO: 2452057 - RNA, 19 nt, Human
gcuggccacugcacagagc

SEQ ID NO: 2452058 - RNA, 13 nt, Human
gcuggccacugca

SEQ ID NO: 2452059 - RNA, 12 nt, Human
gcuggccacugc

SEQ ID NO: 2452060 - RNA, 13 nt, Human
gcuggcccugccc

SEQ ID NO: 2452061 - RNA, 14 nt, Human
gcuggcccagcccu

SEQ ID NO: 2452062 - RNA, 13 nt, Human
gcuggcccagccc

SEQ ID NO: 2452063 - RNA, 14 nt, Human
gcuggcccugcccu

SEQ ID NO: 2452064 - RNA, 15 nt, Human
gcuggcccugcccug

SEQ ID NO: 2452065 - RNA, 16 nt, Human
gcuggcccugcccugg

SEQ ID NO: 2452066 - RNA, 20 nt, Human
gcuggccgccucacccccuc

SEQ ID NO: 2452067 - RNA, 15 nt, Human
gcuggcccagcccug

SEQ ID NO: 2452068 - RNA, 20 nt, Human
gcuggccgaggguccuggcu

SEQ ID NO: 2452069 - RNA, 24 nt, Human
gcuggccgaggguccuggcuccug

SEQ ID NO: 2452070 - RNA, 19 nt, Human
gcuggcccuggcucccaca

SEQ ID NO: 2452071 - RNA, 15 nt, Human
gcuggccgagggucc

SEQ ID NO: 2452072 - RNA, 19 nt, Human
gcuggccgaggguccuggc

SEQ ID NO: 2452073 - RNA, 22 nt, Human
gcuggccagccccacagcccac

SEQ ID NO: 2452074 - RNA, 16 nt, Human
gcuggccagccccaca

SEQ ID NO: 2452075 - RNA, 15 nt, Human
gcuggccagccccac

SEQ ID NO: 2452076 - RNA, 14 nt, Human
gcuggccagcccca

SEQ ID NO: 2452077 - RNA, 13 nt, Human
gcuggccagcccc

SEQ ID NO: 2452078 - RNA, 15 nt, Human
gcuggccaguccagg

SEQ ID NO: 2452079 - RNA, 14 nt, Human
gcuggccaguccag

SEQ ID NO: 2452080 - RNA, 19 nt, Human
gcuggccagccccacagcc

SEQ ID NO: 2452081 - RNA, 18 nt, Human
gcuggccagccccacagc

SEQ ID NO: 2452082 - RNA, 21 nt, Human
gcuggccagccccacagccca

SEQ ID NO: 2452083 - RNA, 11 nt, Human
gcuggcccagc

SEQ ID NO: 2452084 - RNA, 12 nt, Human
gcuggcccagcc

SEQ ID NO: 2452085 - RNA, 14 nt, Human
gcuggcccagccaa

SEQ ID NO: 2452086 - RNA, 17 nt, Human
gcuggccaguccaggcu

SEQ ID NO: 2452087 - RNA, 16 nt, Human
gcuggccaguccaggc

SEQ ID NO: 2452088 - RNA, 23 nt, Human
gcugcaaaggguaucaggugcug

SEQ ID NO: 2452089 - RNA, 22 nt, Human
gcugcaaaggguaucaggugcu

SEQ ID NO: 2452090 - RNA, 21 nt, Human
gcugauucucagggucucugc

SEQ ID NO: 2452091 - RNA, 17 nt, Human
gcucuuucucugccagu

SEQ ID NO: 2452092 - RNA, 17 nt, Human
gcugauuuggugaccaa

SEQ ID NO: 2452093 - RNA, 15 nt, Human
gcugauuuuaacaau

SEQ ID NO: 2452094 - RNA, 14 nt, Human
gcugauuuuaacaa

SEQ ID NO: 2452095 - RNA, 20 nt, Human
gcugauuuuaacaauaacua

SEQ ID NO: 2452096 - RNA, 21 nt, Human
gcugauuaaaccaaggcuaga

SEQ ID NO: 2452097 - RNA, 14 nt, Human
gcugauuguauuua

SEQ ID NO: 2452098 - RNA, 20 nt, Human
gcugauucucagggucucug

SEQ ID NO: 2452099 - RNA, 20 nt, Human
gcugauguuggaagagaaag

SEQ ID NO: 2452100 - RNA, 21 nt, Human
gcugauguucaguguaauuuc

SEQ ID NO: 2452101 - RNA, 21 nt, Human
gcugaugaacuuauucuguag

SEQ ID NO: 2452102 - RNA, 16 nt, Human
gcugaucgugcuaaau

SEQ ID NO: 2452103 - RNA, 13 nt, Human
gcugauucucagg

SEQ ID NO: 2452104 - RNA, 18 nt, Human
gcugagaagcuuuugaau

SEQ ID NO: 2452105 - RNA, 14 nt, Human
gcugagacugcggg

SEQ ID NO: 2452106 - RNA, 15 nt, Human
gcugagacaggagaa

SEQ ID NO: 2452107 - RNA, 19 nt, Human
gcugagacuggauacugcc

SEQ ID NO: 2452108 - RNA, 20 nt, Human
gcugagacuggauacugccc

SEQ ID NO: 2452109 - RNA, 15 nt, Human
gcugagagaaaauaa

SEQ ID NO: 2452110 - RNA, 19 nt, Human
gcugagagaccaggagggc

SEQ ID NO: 2452111 - RNA, 14 nt, Human
gcugagagaaccuc

SEQ ID NO: 2452112 - RNA, 22 nt, Human
gcugagagaccaggagggcacu

SEQ ID NO: 2452113 - RNA, 14 nt, Human
gcugagagacccaa

SEQ ID NO: 2452114 - RNA, 15 nt, Human
gcugagagacccaag

SEQ ID NO: 2452115 - RNA, 17 nt, Human
gcugagagacccaagga

SEQ ID NO: 2452116 - RNA, 23 nt, Human
gcugagaacccugcguggggaca

SEQ ID NO: 2452117 - RNA, 14 nt, Human
gcugagaacacugu

SEQ ID NO: 2452118 - RNA, 18 nt, Human
gcugacuuugcucuuucu

SEQ ID NO: 2452119 - RNA, 20 nt, Human
gcugagagccccagcugaca

SEQ ID NO: 2452120 - RNA, 18 nt, Human
gcugagagccccagcuga

SEQ ID NO: 2452121 - RNA, 17 nt, Human
gcugagagccccagcug

SEQ ID NO: 2452122 - RNA, 15 nt, Human
gcugagagccccagc

SEQ ID NO: 2452123 - RNA, 14 nt, Human
gcugagagccccag

SEQ ID NO: 2452124 - RNA, 13 nt, Human
gcugagagcccca

SEQ ID NO: 2452125 - RNA, 14 nt, Human
gcugagagacuuuu

SEQ ID NO: 2452126 - RNA, 20 nt, Human
gcugagagacccaaggagga

SEQ ID NO: 2452127 - RNA, 22 nt, Human
gcugagagacccaaggaggaaa

SEQ ID NO: 2452128 - RNA, 16 nt, Human
gcugaucagugggccu

SEQ ID NO: 2452129 - RNA, 18 nt, Human
gcugauccagagcacaga

SEQ ID NO: 2452130 - RNA, 17 nt, Human
gcugauauauguguuuu

SEQ ID NO: 2452131 - RNA, 18 nt, Human
gcugauauauguguuuuu

SEQ ID NO: 2452132 - RNA, 20 nt, Human
gcugauauauguguuuuuca

SEQ ID NO: 2452133 - RNA, 17 nt, Human
gcugcaguugccaguca

SEQ ID NO: 2452134 - RNA, 17 nt, Human
gcugcauuuaaaagaua

SEQ ID NO: 2452135 - RNA, 18 nt, Human
gcugcauuuaaaagauac

SEQ ID NO: 2452136 - RNA, 19 nt, Human
gcugcauuuaaaagauaca

SEQ ID NO: 2452137 - RNA, 15 nt, Human
gcugccaaauuuugg

SEQ ID NO: 2452138 - RNA, 23 nt, Human
gcugcauuuuaauuuuaaccaaa

SEQ ID NO: 2452139 - RNA, 17 nt, Human
gcugccaaauuuuggcc

SEQ ID NO: 2452140 - RNA, 15 nt, Human
gcugccaaggccaga

SEQ ID NO: 2452141 - RNA, 14 nt, Human
gcugcaguugccag

SEQ ID NO: 2452142 - RNA, 13 nt, Human
gcugcaguugcca

SEQ ID NO: 2452143 - RNA, 22 nt, Human
gcugcaggggcucuggagagaa

SEQ ID NO: 2452144 - RNA, 13 nt, Human
gcugcaaaggaca

SEQ ID NO: 2452145 - RNA, 15 nt, Human
gcugcaaaggacaga

SEQ ID NO: 2452146 - RNA, 17 nt, Human
gcugcaaaagugagggc

SEQ ID NO: 2452147 - RNA, 21 nt, Human
gcugcaggggcucuggagaga

SEQ ID NO: 2452148 - RNA, 18 nt, Human
gcugcaguaugaaaauaa

SEQ ID NO: 2452149 - RNA, 20 nt, Human
gcugcagugacgugcaccug

SEQ ID NO: 2452150 - RNA, 23 nt, Human
gcugccacacuucaggcucuucu

SEQ ID NO: 2452151 - RNA, 22 nt, Human
gcugccacacuucaggcucuuc

SEQ ID NO: 2452152 - RNA, 21 nt, Human
gcugccacacuucaggcucuu

SEQ ID NO: 2452153 - RNA, 18 nt, Human
gcugccacacuucaggcu

SEQ ID NO: 2452154 - RNA, 17 nt, Human
gcugccacacuucaggc

SEQ ID NO: 2452155 - RNA, 15 nt, Human
gcugccacacuucag

SEQ ID NO: 2452156 - RNA, 20 nt, Human
gcugccaaugggagcucaug

SEQ ID NO: 2452157 - RNA, 16 nt, Human
gcugccaaggccagag

SEQ ID NO: 2452158 - RNA, 17 nt, Human
gcugccaaggccagagu

SEQ ID NO: 2452159 - RNA, 22 nt, Human
gcugcccuccuuguccacccac

SEQ ID NO: 2452160 - RNA, 21 nt, Human
gcugcccuccuuguccaccca

SEQ ID NO: 2452161 - RNA, 20 nt, Human
gcugcccuccuuguccaccc

SEQ ID NO: 2452162 - RNA, 16 nt, Human
gcugcccuccuugucc

SEQ ID NO: 2452163 - RNA, 22 nt, Human
gcugccacccaccucccugccu

SEQ ID NO: 2452164 - RNA, 23 nt, Human
gcugccacccaccucccugccuc

SEQ ID NO: 2452165 - RNA, 13 nt, Human
gcugccaccugcc

SEQ ID NO: 2452166 - RNA, 12 nt, Human
gcugccaccugc

SEQ ID NO: 2452167 - RNA, 17 nt, Human
gcugccacccaccuccc

SEQ ID NO: 2452168 - RNA, 19 nt, Human
gcugccacccaccucccug

SEQ ID NO: 2452169 - RNA, 20 nt, Human
gcugccacccaccucccugc

SEQ ID NO: 2452170 - RNA, 21 nt, Human
gcugccacccaccucccugcc

SEQ ID NO: 2452171 - RNA, 16 nt, Human
gcugccacaccugagc

SEQ ID NO: 2452172 - RNA, 14 nt, Human
gcugccacccaccu

SEQ ID NO: 2452173 - RNA, 19 nt, Human
gcugacagacacaggcccg

SEQ ID NO: 2452174 - RNA, 18 nt, Human
gcugacagacacaggccc

SEQ ID NO: 2452175 - RNA, 23 nt, Human
gcucuuuggggucagccagggcc

SEQ ID NO: 2452176 - RNA, 22 nt, Human
gcucuuuggggucagccagggc

SEQ ID NO: 2452177 - RNA, 21 nt, Human
gcucuuuggggucagccaggg

SEQ ID NO: 2452178 - RNA, 20 nt, Human
gcucuuuggggucagccagg

SEQ ID NO: 2452179 - RNA, 13 nt, Human
gcucuuugguaga

SEQ ID NO: 2452180 - RNA, 18 nt, Human
gcucuuugguagaaaagg

SEQ ID NO: 2452181 - RNA, 17 nt, Human
gcugacagacacaggcc

SEQ ID NO: 2452182 - RNA, 22 nt, Human
gcucuuugguagaaaaggcuag

SEQ ID NO: 2452183 - RNA, 20 nt, Human
gcugacagacacaggcccgg

SEQ ID NO: 2452184 - RNA, 13 nt, Human
gcugaccacagca

SEQ ID NO: 2452185 - RNA, 15 nt, Human
gcugaccaagagaga

SEQ ID NO: 2452186 - RNA, 16 nt, Human
gcugaccaagagagaa

SEQ ID NO: 2452187 - RNA, 20 nt, Human
gcugaccaagagagaaagaa

SEQ ID NO: 2452188 - RNA, 16 nt, Human
gcugacauucaccugc

SEQ ID NO: 2452189 - RNA, 17 nt, Human
gcugacauucaccugcc

SEQ ID NO: 2452190 - RNA, 22 nt, Human
gcugacauuguggcacauucuu

SEQ ID NO: 2452191 - RNA, 21 nt, Human
gcugacauuguggcacauucu

SEQ ID NO: 2452192 - RNA, 13 nt, Human
gcugaccaagaga

SEQ ID NO: 2452193 - RNA, 14 nt, Human
gcugaccaagagag

SEQ ID NO: 2452194 - RNA, 24 nt, Human
gcugacuucaucucccaccuagca

SEQ ID NO: 2452195 - RNA, 17 nt, Human
gcugacggugcagucug

SEQ ID NO: 2452196 - RNA, 19 nt, Human
gcugacuucaucucccacc

SEQ ID NO: 2452197 - RNA, 22 nt, Human
gcugacuguuuucucuugagag

SEQ ID NO: 2452198 - RNA, 13 nt, Human
gcugacggccagg

SEQ ID NO: 2452199 - RNA, 15 nt, Human
gcugacggccaggga

SEQ ID NO: 2452200 - RNA, 17 nt, Human
gcugacgaacuuccaug

SEQ ID NO: 2452201 - RNA, 19 nt, Human
gcugacgaacuuccauggc

SEQ ID NO: 2452202 - RNA, 14 nt, Human
gcugaccacagcac

SEQ ID NO: 2452203 - RNA, 16 nt, Human
gcugaccacagcacag

SEQ ID NO: 2452204 - RNA, 17 nt, Human
gcugaccacagcacagc

SEQ ID NO: 2452205 - RNA, 19 nt, Human
gcugaccacagcacagcca

SEQ ID NO: 2452206 - RNA, 22 nt, Human
gcugaccucuguuguccucccc

SEQ ID NO: 2452207 - RNA, 19 nt, Human
gcugaccucuguuguccuc

SEQ ID NO: 2452208 - RNA, 21 nt, Human
gcugaccacaggcaguuacuu

SEQ ID NO: 2452209 - RNA, 18 nt, Human
gcugaccucuguuguccu

SEQ ID NO: 2452210 - RNA, 22 nt, Human
gcugaccuuccucgcagagagg

SEQ ID NO: 2452211 - RNA, 20 nt, Human
gcugaccuuccucgcagaga

SEQ ID NO: 2452212 - RNA, 19 nt, Human
gcugaccuuccucgcagag

SEQ ID NO: 2452213 - RNA, 18 nt, Human
gcugaccuuccucgcaga

SEQ ID NO: 2452214 - RNA, 17 nt, Human
gcugaccuuccucgcag

SEQ ID NO: 2452215 - RNA, 15 nt, Human
gcugacgaacuucca

SEQ ID NO: 2452216 - RNA, 21 nt, Human
gcugaccuugaacuccugggc

SEQ ID NO: 2452217 - RNA, 23 nt, Human
gcugaccuuccucgcagagaggc

SEQ ID NO: 2452218 - RNA, 20 nt, Human
gcugaccuugaacuccuggg

SEQ ID NO: 2452219 - RNA, 23 nt, Human
gcugaccuugaacuccugggcuc

SEQ ID NO: 2452220 - RNA, 21 nt, Human
gcucucaggccagcugcuugg

SEQ ID NO: 2452221 - RNA, 22 nt, Human
gcucucaguuccgauuucccag

SEQ ID NO: 2452222 - RNA, 21 nt, Human
gcucgccucaggaaugggcug

SEQ ID NO: 2452223 - RNA, 13 nt, Human
gcucgccaugccg

SEQ ID NO: 2452224 - RNA, 14 nt, Human
gcucgauuuuguau

SEQ ID NO: 2452225 - RNA, 14 nt, Human
gcucuugaacuccu

SEQ ID NO: 2452226 - RNA, 16 nt, Human
gcucuugaacuccuga

SEQ ID NO: 2452227 - RNA, 19 nt, Human
gcucuugaacuccugaccu

SEQ ID NO: 2452228 - RNA, 21 nt, Human
gcucuugaacuccugaccuca

SEQ ID NO: 2452229 - RNA, 22 nt, Human
gcucuccaagucucaguggcuu

SEQ ID NO: 2452230 - RNA, 18 nt, Human
gcucuccaagucucagug

SEQ ID NO: 2452231 - RNA, 15 nt, Human
gcucuccaagcccag

SEQ ID NO: 2452232 - RNA, 18 nt, Human
gcucuccaagugccagag

SEQ ID NO: 2452233 - RNA, 17 nt, Human
gcucuccaagugccaga

SEQ ID NO: 2452234 - RNA, 16 nt, Human
gcucuccaagugccag

SEQ ID NO: 2452235 - RNA, 13 nt, Human
gcucuccaagugc

SEQ ID NO: 2452236 - RNA, 12 nt, Human
gcucuucuuaaa

SEQ ID NO: 2452237 - RNA, 19 nt, Human
gcucuccaagugccagagg

SEQ ID NO: 2452238 - RNA, 14 nt, Human
gcucuucugccggc

SEQ ID NO: 2452239 - RNA, 19 nt, Human
gcucuugcccuucccuguc

SEQ ID NO: 2452240 - RNA, 18 nt, Human
gcucuugcccuucccugu

SEQ ID NO: 2452241 - RNA, 17 nt, Human
gcucuugcccuucccug

SEQ ID NO: 2452242 - RNA, 16 nt, Human
gcucuugcccuucccu

SEQ ID NO: 2452243 - RNA, 12 nt, Human
gcucuugcccuu

SEQ ID NO: 2452244 - RNA, 19 nt, Human
gcucuugcuaaucaguguc

SEQ ID NO: 2452245 - RNA, 13 nt, Human
gcucuugcuaauc

SEQ ID NO: 2452246 - RNA, 23 nt, Human
gcucuugcccuucccugucccuc

SEQ ID NO: 2452247 - RNA, 22 nt, Human
gcucuugcccuucccugucccu

SEQ ID NO: 2452248 - RNA, 19 nt, Human
gcucuuggcagguacucag

SEQ ID NO: 2452249 - RNA, 19 nt, Human
gcucuugaugccuggcggg

SEQ ID NO: 2452250 - RNA, 20 nt, Human
gcucuugauaccccccucug

SEQ ID NO: 2452251 - RNA, 19 nt, Human
gcucuugauaccccccucu

SEQ ID NO: 2452252 - RNA, 17 nt, Human
gcucuugauaccccccu

SEQ ID NO: 2452253 - RNA, 14 nt, Human
gcucuucuucuuuc

SEQ ID NO: 2452254 - RNA, 21 nt, Human
gcucuucugccggcccugggg

SEQ ID NO: 2452255 - RNA, 23 nt, Human
gcucuugcuaaucagugucucac

SEQ ID NO: 2452256 - RNA, 20 nt, Human
gcucuugcuaaucagugucu

SEQ ID NO: 2452257 - RNA, 21 nt, Human
gcucuuucucugccagugaca

SEQ ID NO: 2452258 - RNA, 18 nt, Human
gcucuuucucugccagug

SEQ ID NO: 2452259 - RNA, 13 nt, Human
gcucuuucugggc

SEQ ID NO: 2452260 - RNA, 14 nt, Human
gcucuuucugggcc

SEQ ID NO: 2452261 - RNA, 18 nt, Human
gcucuuucugggccaagu

SEQ ID NO: 2452262 - RNA, 21 nt, Human
gcucuuugaaauagucugugu

SEQ ID NO: 2452263 - RNA, 23 nt, Human
gcucuuugaaauagucuguguga

SEQ ID NO: 2452264 - RNA, 18 nt, Human
gcucuuuggggucagcca

SEQ ID NO: 2452265 - RNA, 14 nt, Human
gcucuuuggagauc

SEQ ID NO: 2452266 - RNA, 21 nt, Human
gcgacaaugcaaaccaucauu

SEQ ID NO: 2452267 - RNA, 20 nt, Human
gcgacaaugcaaaccaucau

SEQ ID NO: 2452268 - RNA, 13 nt, Human
gcgacaaugcaaa

SEQ ID NO: 2452269 - RNA, 12 nt, Human
gcgacaaugcaa

SEQ ID NO: 2452270 - RNA, 20 nt, Human
gcgcaggcuggcccugcccu

SEQ ID NO: 2452271 - RNA, 21 nt, Human
gcgcaggcuggcccugcccug

SEQ ID NO: 2452272 - RNA, 16 nt, Human
gcgcagugccucuggu

SEQ ID NO: 2452273 - RNA, 15 nt, Human
gcgcagugccucugg

SEQ ID NO: 2452274 - RNA, 14 nt, Human
gcgcagugccucug

SEQ ID NO: 2452275 - RNA, 22 nt, Human
gcgcaggcuggcccugcccugg

SEQ ID NO: 2452276 - RNA, 18 nt, Human
gcgcaggcuggcccugcc

SEQ ID NO: 2452277 - RNA, 19 nt, Human
gcgcaggcuggcccugccc

SEQ ID NO: 2452278 - RNA, 17 nt, Human
gcgcaggcuggcccugc

SEQ ID NO: 2452279 - RNA, 13 nt, Human
gcgacaaagauga

SEQ ID NO: 2452280 - RNA, 18 nt, Human
gccuuucccaacucuagc

SEQ ID NO: 2452281 - RNA, 21 nt, Human
gccuuuccauaaggaauguag

SEQ ID NO: 2452282 - RNA, 22 nt, Human
gccuuuccauaaggaauguagc

SEQ ID NO: 2452283 - RNA, 19 nt, Human
gccuuucccaacucuagcu

SEQ ID NO: 2452284 - RNA, 21 nt, Human
gccuuuccuguagccuucugu

SEQ ID NO: 2452285 - RNA, 17 nt, Human
gccuuuccuguagccuu

SEQ ID NO: 2452286 - RNA, 22 nt, Human
gccuuucucccaggccaggcuc

SEQ ID NO: 2452287 - RNA, 18 nt, Human
gccuuucucccaggccag

SEQ ID NO: 2452288 - RNA, 19 nt, Human
gccuuucucgauuuuaucu

SEQ ID NO: 2452289 - RNA, 12 nt, Human
gccuuucugugu

SEQ ID NO: 2452290 - RNA, 23 nt, Human
gccuuucucccaggccaggcucc

SEQ ID NO: 2452291 - RNA, 14 nt, Human
gcgaauuuuaaaag

SEQ ID NO: 2452292 - RNA, 14 nt, Human
gcgaaucauuuguu

SEQ ID NO: 2452293 - RNA, 15 nt, Human
gcgaauuuuaaaaga

SEQ ID NO: 2452294 - RNA, 16 nt, Human
gcgaauuuuaaaagau

SEQ ID NO: 2452295 - RNA, 13 nt, Human
gccuuucugugug

SEQ ID NO: 2452296 - RNA, 14 nt, Human
gcgaaggggcccug

SEQ ID NO: 2452297 - RNA, 15 nt, Human
gcgaaggggcccugg

SEQ ID NO: 2452298 - RNA, 16 nt, Human
gcgaaggggcccuggu

SEQ ID NO: 2452299 - RNA, 15 nt, Human
gccuuacacaauggu

SEQ ID NO: 2452300 - RNA, 16 nt, Human
gccuuaaagaaagucg

SEQ ID NO: 2452301 - RNA, 20 nt, Human
gccugucugucucuccaucu

SEQ ID NO: 2452302 - RNA, 16 nt, Human
gccuuaaaacuuuaau

SEQ ID NO: 2452303 - RNA, 16 nt, Human
gccuuacacaaugguu

SEQ ID NO: 2452304 - RNA, 23 nt, Human
gccuucccuagcuuuagacccug

SEQ ID NO: 2452305 - RNA, 24 nt, Human
gccuucccuagcuuuagacccugg

SEQ ID NO: 2452306 - RNA, 17 nt, Human
gccuuaauuuucaguau

SEQ ID NO: 2452307 - RNA, 18 nt, Human
gccuuccccuugcccagg

SEQ ID NO: 2452308 - RNA, 14 nt, Human
gccuuccuccuggg

SEQ ID NO: 2452309 - RNA, 16 nt, Human
gccuuccuccugggcc

SEQ ID NO: 2452310 - RNA, 17 nt, Human
gccuuccuccugggccc

SEQ ID NO: 2452311 - RNA, 22 nt, Human
gccuuccuccugggcccucucu

SEQ ID NO: 2452312 - RNA, 20 nt, Human
gccuuccguaacccaacucu

SEQ ID NO: 2452313 - RNA, 13 nt, Human
gccuuccuccugg

SEQ ID NO: 2452314 - RNA, 17 nt, Human
gccuuccuccacauccu

SEQ ID NO: 2452315 - RNA, 13 nt, Human
gccuuccucucuc

SEQ ID NO: 2452316 - RNA, 16 nt, Human
gccuuccucucuccag

SEQ ID NO: 2452317 - RNA, 17 nt, Human
gccuuccucucuccaga

SEQ ID NO: 2452318 - RNA, 18 nt, Human
gccuuccucucuccagau

SEQ ID NO: 2452319 - RNA, 18 nt, Human
gccuuccuccacauccuu

SEQ ID NO: 2452320 - RNA, 16 nt, Human
gccuugguguccaccu

SEQ ID NO: 2452321 - RNA, 20 nt, Human
gccuuguaauucuaaaugaa

SEQ ID NO: 2452322 - RNA, 17 nt, Human
gccuuguaauucuaaau

SEQ ID NO: 2452323 - RNA, 22 nt, Human
gccuugguguccaccuggcccc

SEQ ID NO: 2452324 - RNA, 18 nt, Human
gccuugguucccuugugu

SEQ ID NO: 2452325 - RNA, 17 nt, Human
gccuugguguccaccug

SEQ ID NO: 2452326 - RNA, 18 nt, Human
gccuugguguccaccugg

SEQ ID NO: 2452327 - RNA, 19 nt, Human
gccuugguguccaccuggc

SEQ ID NO: 2452328 - RNA, 21 nt, Human
gccuugguguccaccuggccc

SEQ ID NO: 2452329 - RNA, 23 nt, Human
gccuuguccccugccugugccug

SEQ ID NO: 2452330 - RNA, 18 nt, Human
gccuuguccccugccugu

SEQ ID NO: 2452331 - RNA, 17 nt, Human
gccuugucccagaggcu

SEQ ID NO: 2452332 - RNA, 17 nt, Human
gccuugugucuacagag

SEQ ID NO: 2452333 - RNA, 15 nt, Human
gccuugugucuacag

SEQ ID NO: 2452334 - RNA, 12 nt, Human
gccuuguguaca

SEQ ID NO: 2452335 - RNA, 14 nt, Human
gcgguccacccagg

SEQ ID NO: 2452336 - RNA, 13 nt, Human
gcgguccacccag

SEQ ID NO: 2452337 - RNA, 21 nt, Human
gcgguagccagcacacagggc

SEQ ID NO: 2452338 - RNA, 22 nt, Human
gcgguagccagcacacagggca

SEQ ID NO: 2452339 - RNA, 23 nt, Human
gcgguagccagcacacagggcag

SEQ ID NO: 2452340 - RNA, 19 nt, Human
gcggugagaggggaacaga

SEQ ID NO: 2452341 - RNA, 18 nt, Human
gcggagaaccuugugccu

SEQ ID NO: 2452342 - RNA, 15 nt, Human
gcggacguuccagcc

SEQ ID NO: 2452343 - RNA, 16 nt, Human
gcggacguuccagccg

SEQ ID NO: 2452344 - RNA, 19 nt, Human
gcggguggaucaccugagg

SEQ ID NO: 2452345 - RNA, 23 nt, Human
gcggagaaccuugugccuggcuc

SEQ ID NO: 2452346 - RNA, 19 nt, Human
gcggagaaccuugugccug

SEQ ID NO: 2452347 - RNA, 14 nt, Human
gcgggugggggugg

SEQ ID NO: 2452348 - RNA, 15 nt, Human
gcgguagccagcaca

SEQ ID NO: 2452349 - RNA, 15 nt, Human
gcgggugggggugga

SEQ ID NO: 2452350 - RNA, 17 nt, Human
gcggggacagcuccuuc

SEQ ID NO: 2452351 - RNA, 15 nt, Human
gcggggacagcuccu

SEQ ID NO: 2452352 - RNA, 14 nt, Human
gcggggacagcucc

SEQ ID NO: 2452353 - RNA, 19 nt, Human
gcggagacggagucccacc

SEQ ID NO: 2452354 - RNA, 16 nt, Human
gcggagaaaggaaggg

SEQ ID NO: 2452355 - RNA, 13 nt, Human
gcggaccccagcu

SEQ ID NO: 2452356 - RNA, 20 nt, Human
gcggaccccagcugugagcc

SEQ ID NO: 2452357 - RNA, 14 nt, Human
gcggaccccagcug

SEQ ID NO: 2452358 - RNA, 21 nt, Human
gcggaccccagcugugagccu

SEQ ID NO: 2452359 - RNA, 14 nt, Human
gcggacguuccagc

SEQ ID NO: 2452360 - RNA, 21 nt, Human
gcgcugccccuggcagccccu

SEQ ID NO: 2452361 - RNA, 18 nt, Human
gcgcugccccuggcagcc

SEQ ID NO: 2452362 - RNA, 13 nt, Human
gcgccuucucccc

SEQ ID NO: 2452363 - RNA, 16 nt, Human
gcgcugccgcacccca

SEQ ID NO: 2452364 - RNA, 17 nt, Human
gcgcugccgcaccccag

SEQ ID NO: 2452365 - RNA, 19 nt, Human
gcgcugccgcaccccagag

SEQ ID NO: 2452366 - RNA, 21 nt, Human
gcgcugccgcaccccagagug

SEQ ID NO: 2452367 - RNA, 14 nt, Human
gcgcuggcccagcc

SEQ ID NO: 2452368 - RNA, 13 nt, Human
gcgcuggcccagc

SEQ ID NO: 2452369 - RNA, 12 nt, Human
gcgcuggcccag

SEQ ID NO: 2452370 - RNA, 11 nt, Human
gcgcuggccca

SEQ ID NO: 2452371 - RNA, 15 nt, Human
gcgcugccugugugg

SEQ ID NO: 2452372 - RNA, 14 nt, Human
gcgcugccugugug

SEQ ID NO: 2452373 - RNA, 19 nt, Human
gcgcugccugugugguguc

SEQ ID NO: 2452374 - RNA, 10 nt, Human
gcgcuggccc

SEQ ID NO: 2452375 - RNA, 17 nt, Human
gcgccgagucugucucu

SEQ ID NO: 2452376 - RNA, 16 nt, Human
gcgcccuuccucucca

SEQ ID NO: 2452377 - RNA, 18 nt, Human
gcgcccuuccucuccacc

SEQ ID NO: 2452378 - RNA, 14 nt, Human
gcgcccuuccucuc

SEQ ID NO: 2452379 - RNA, 12 nt, Human
gcgcccuuccuc

SEQ ID NO: 2452380 - RNA, 16 nt, Human
gcgcccucuguccuga

SEQ ID NO: 2452381 - RNA, 15 nt, Human
gcgcccucuguccug

SEQ ID NO: 2452382 - RNA, 14 nt, Human
gcgcccucuguccu

SEQ ID NO: 2452383 - RNA, 13 nt, Human
gcgcccucugucc

SEQ ID NO: 2452384 - RNA, 16 nt, Human
gcgcccgcugggcuga

SEQ ID NO: 2452385 - RNA, 15 nt, Human
gcgcccgcugggcug

SEQ ID NO: 2452386 - RNA, 14 nt, Human
gcgcccgcugggcu

SEQ ID NO: 2452387 - RNA, 13 nt, Human
gcgcccgcugggc

SEQ ID NO: 2452388 - RNA, 13 nt, Human
gcgcccuggaagc

SEQ ID NO: 2452389 - RNA, 14 nt, Human
gcgcccuggaagcc

SEQ ID NO: 2452390 - RNA, 21 nt, Human
gcgccuuaaggauguucuagc

SEQ ID NO: 2452391 - RNA, 16 nt, Human
gcgccugccccuccca

SEQ ID NO: 2452392 - RNA, 17 nt, Human
gcgccugccccucccag

SEQ ID NO: 2452393 - RNA, 16 nt, Human
gcgccuguagucccag

SEQ ID NO: 2452394 - RNA, 18 nt, Human
gcgccugccccucccaga

SEQ ID NO: 2452395 - RNA, 12 nt, Human
gcgccucugcaa

SEQ ID NO: 2452396 - RNA, 20 nt, Human
gcgccgagucugucucuguc

SEQ ID NO: 2452397 - RNA, 15 nt, Human
gcgccuccuuccuug

SEQ ID NO: 2452398 - RNA, 22 nt, Human
gcgccuccuuccuugcuguccu

SEQ ID NO: 2452399 - RNA, 19 nt, Human
gcgccuccauccaaggcca

SEQ ID NO: 2452400 - RNA, 18 nt, Human
gcgccgcaaaccacacug

SEQ ID NO: 2452401 - RNA, 17 nt, Human
gcgccgcaaaccacacu

SEQ ID NO: 2452402 - RNA, 14 nt, Human
gcgccaagcaaccu

SEQ ID NO: 2452403 - RNA, 18 nt, Human
gcgccaaauaaugucucu

SEQ ID NO: 2452404 - RNA, 18 nt, Human
gcgcagugcuucucuaca

SEQ ID NO: 2452405 - RNA, 21 nt, Human
gcgcagugccucuggucuggg

SEQ ID NO: 2452406 - RNA, 22 nt, Human
gcgcagugcuucucuacagacu

SEQ ID NO: 2452407 - RNA, 21 nt, Human
gcgccaagcaaccugggucca

SEQ ID NO: 2452408 - RNA, 21 nt, Human
gcgccacuacacuccagccug

SEQ ID NO: 2452409 - RNA, 22 nt, Human
gcgccacuacacuccagccuga

SEQ ID NO: 2452410 - RNA, 22 nt, Human
gcgccacuacacuccagccugg

SEQ ID NO: 2452411 - RNA, 14 nt, Human
gcgccaccauccug

SEQ ID NO: 2452412 - RNA, 24 nt, Human
gcgccacuacacuccagccugagc

SEQ ID NO: 2452413 - RNA, 16 nt, Human
gcgccacucgcuuccc

SEQ ID NO: 2452414 - RNA, 18 nt, Human
gcgccacucgcuuccccc

SEQ ID NO: 2452415 - RNA, 21 nt, Human
gcgcccccuccgcccugccac

SEQ ID NO: 2452416 - RNA, 22 nt, Human
gcgcccccuccgcccugccacu

SEQ ID NO: 2452417 - RNA, 13 nt, Human
gcgcccgcgcccg

SEQ ID NO: 2452418 - RNA, 13 nt, Human
gcgccccuucccc

SEQ ID NO: 2452419 - RNA, 23 nt, Human
gcgcccaguuggguggaugccug

SEQ ID NO: 2452420 - RNA, 23 nt, Human
gcgccacucgcuucccccauagc

SEQ ID NO: 2452421 - RNA, 22 nt, Human
gcgcccaguccuuccaccucga

SEQ ID NO: 2452422 - RNA, 21 nt, Human
gccuggcagccgugccuucag

SEQ ID NO: 2452423 - RNA, 20 nt, Human
gccuggcagccgugccuuca

SEQ ID NO: 2452424 - RNA, 12 nt, Human
gccuggcagccg

SEQ ID NO: 2452425 - RNA, 18 nt, Human
gccuggcacaucagaaag

SEQ ID NO: 2452426 - RNA, 13 nt, Human
gccuggcagaacu

SEQ ID NO: 2452427 - RNA, 18 nt, Human
gccuggcagaacugagcu

SEQ ID NO: 2452428 - RNA, 19 nt, Human
gccuggcagaacugagcuc

SEQ ID NO: 2452429 - RNA, 23 nt, Human
gccuggcacagugucugggcuga

SEQ ID NO: 2452430 - RNA, 22 nt, Human
gccuggcacagugucugggcug

SEQ ID NO: 2452431 - RNA, 21 nt, Human
gccuggcacagugucugggcu

SEQ ID NO: 2452432 - RNA, 16 nt, Human
gccuggcacagugucu

SEQ ID NO: 2452433 - RNA, 14 nt, Human
gccuggcacagugu

SEQ ID NO: 2452434 - RNA, 20 nt, Human
gccuggauucauuuccugcc

SEQ ID NO: 2452435 - RNA, 14 nt, Human
gccuggcacacauc

SEQ ID NO: 2452436 - RNA, 19 nt, Human
gccuggcacagggcagugg

SEQ ID NO: 2452437 - RNA, 18 nt, Human
gccuggcacagggcagug

SEQ ID NO: 2452438 - RNA, 22 nt, Human
gccuggccagaugcaccagccc

SEQ ID NO: 2452439 - RNA, 21 nt, Human
gccuggccagaugcaccagcc

SEQ ID NO: 2452440 - RNA, 16 nt, Human
gccuggccagaugcac

SEQ ID NO: 2452441 - RNA, 22 nt, Human
gccuggcagccgugccuucagc

SEQ ID NO: 2452442 - RNA, 20 nt, Human
gccuggccagaugcaccagc

SEQ ID NO: 2452443 - RNA, 14 nt, Human
gccuggccccucag

SEQ ID NO: 2452444 - RNA, 13 nt, Human
gccuggccccuca

SEQ ID NO: 2452445 - RNA, 16 nt, Human
gccuggccccaugguc

SEQ ID NO: 2452446 - RNA, 17 nt, Human
gccuggcccagcucccc

SEQ ID NO: 2452447 - RNA, 16 nt, Human
gccuggcccagcuccc

SEQ ID NO: 2452448 - RNA, 15 nt, Human
gccuggcccagcucc

SEQ ID NO: 2452449 - RNA, 14 nt, Human
gccuggcccagcuc

SEQ ID NO: 2452450 - RNA, 13 nt, Human
gccuggcccagcu

SEQ ID NO: 2452451 - RNA, 11 nt, Human
gccuggcccag

SEQ ID NO: 2452452 - RNA, 12 nt, Human
gccuggcccagc

SEQ ID NO: 2452453 - RNA, 22 nt, Human
gccuggcagaacugagcuccuc

SEQ ID NO: 2452454 - RNA, 13 nt, Human
gccugggccagag

SEQ ID NO: 2452455 - RNA, 16 nt, Human
gccugggccgcugcca

SEQ ID NO: 2452456 - RNA, 20 nt, Human
gccugggccacagggcgaga

SEQ ID NO: 2452457 - RNA, 17 nt, Human
gccuggcccccuguccu

SEQ ID NO: 2452458 - RNA, 15 nt, Human
gccuggcccccagcu

SEQ ID NO: 2452459 - RNA, 18 nt, Human
gccuggcccccagcugug

SEQ ID NO: 2452460 - RNA, 13 nt, Human
gccugggcagcau

SEQ ID NO: 2452461 - RNA, 19 nt, Human
gccugggcagcauagcaag

SEQ ID NO: 2452462 - RNA, 17 nt, Human
gccugggcagccaggcu

SEQ ID NO: 2452463 - RNA, 18 nt, Human
gccugggcagccaggcug

SEQ ID NO: 2452464 - RNA, 20 nt, Human
gccugggcagccaggcugcc

SEQ ID NO: 2452465 - RNA, 23 nt, Human
gccugggcagccaggcugccaag

SEQ ID NO: 2452466 - RNA, 17 nt, Human
gccugucugucucucca

SEQ ID NO: 2452467 - RNA, 14 nt, Human
gccugucugucucu

SEQ ID NO: 2452468 - RNA, 12 nt, Human
gccugucugucu

SEQ ID NO: 2452469 - RNA, 14 nt, Human
gccugucucuucca

SEQ ID NO: 2452470 - RNA, 13 nt, Human
gccugucucuucc

SEQ ID NO: 2452471 - RNA, 19 nt, Human
gccugucucauccccaggg

SEQ ID NO: 2452472 - RNA, 22 nt, Human
gccugucucauccccagggguc

SEQ ID NO: 2452473 - RNA, 16 nt, Human
gccuguccugggcugg

SEQ ID NO: 2452474 - RNA, 13 nt, Human
gccugucuccuuu

SEQ ID NO: 2452475 - RNA, 21 nt, Human
gccugucuccuuugcaggcuc

SEQ ID NO: 2452476 - RNA, 22 nt, Human
gccugucuccuuugcaggcuca

SEQ ID NO: 2452477 - RNA, 20 nt, Human
gccuguacucgcuugugcag

SEQ ID NO: 2452478 - RNA, 17 nt, Human
gccuguaaucccagcua

SEQ ID NO: 2452479 - RNA, 18 nt, Human
gccuguaaucccagcuac

SEQ ID NO: 2452480 - RNA, 19 nt, Human
gccuguacucgcuugugca

SEQ ID NO: 2452481 - RNA, 19 nt, Human
gccuguaaucccagcuacu

SEQ ID NO: 2452482 - RNA, 13 nt, Human
gccuguccugggc

SEQ ID NO: 2452483 - RNA, 17 nt, Human
gccugucucauccccag

SEQ ID NO: 2452484 - RNA, 18 nt, Human
gccugucucauccccagg

SEQ ID NO: 2452485 - RNA, 20 nt, Human
gccuguaauccuagcacuuu

SEQ ID NO: 2452486 - RNA, 16 nt, Human
gccuguaaucccagcu

SEQ ID NO: 2452487 - RNA, 16 nt, Human
gccuggucccugggag

SEQ ID NO: 2452488 - RNA, 15 nt, Human
gccuggucccuggga

SEQ ID NO: 2452489 - RNA, 15 nt, Human
gccuguaauccuagc

SEQ ID NO: 2452490 - RNA, 14 nt, Human
gccuggucccuggg

SEQ ID NO: 2452491 - RNA, 17 nt, Human
gccuggucacagggcau

SEQ ID NO: 2452492 - RNA, 22 nt, Human
gccugguccaugauggagucag

SEQ ID NO: 2452493 - RNA, 18 nt, Human
gccugggccgcugccacg

SEQ ID NO: 2452494 - RNA, 17 nt, Human
gccugggccgcugccac

SEQ ID NO: 2452495 - RNA, 21 nt, Human
gccugggccuccucacaacau

SEQ ID NO: 2452496 - RNA, 20 nt, Human
gccugggcgacagagcgaga

SEQ ID NO: 2452497 - RNA, 23 nt, Human
gccugggcucccuugugcguggg

SEQ ID NO: 2452498 - RNA, 14 nt, Human
gccuggucagccca

SEQ ID NO: 2452499 - RNA, 15 nt, Human
gccuggucagcccaa

SEQ ID NO: 2452500 - RNA, 20 nt, Human
gccugguauauccaaaagcu

SEQ ID NO: 2452501 - RNA, 13 nt, Human
gccuggucagccc

SEQ ID NO: 2452502 - RNA, 20 nt, Human
gccugggcuguuggcacuca

SEQ ID NO: 2452503 - RNA, 18 nt, Human
gccugggcuguuggcacu

SEQ ID NO: 2452504 - RNA, 15 nt, Human
gccugggcuguuggc

SEQ ID NO: 2452505 - RNA, 20 nt, Human
gccuggguuuaaggggagag

SEQ ID NO: 2452506 - RNA, 24 nt, Human
gccuggguggggcugcuccuccag

SEQ ID NO: 2452507 - RNA, 22 nt, Human
gccuggggcuccuuucuccagc

SEQ ID NO: 2452508 - RNA, 17 nt, Human
gccuggggcgggccccu

SEQ ID NO: 2452509 - RNA, 22 nt, Human
gccuggguggggcugcuccucc

SEQ ID NO: 2452510 - RNA, 23 nt, Human
gccuggguggggcugcuccucca

SEQ ID NO: 2452511 - RNA, 17 nt, Human
gccugagcgacagugag

SEQ ID NO: 2452512 - RNA, 20 nt, Human
gccugagcgacagugagacu

SEQ ID NO: 2452513 - RNA, 18 nt, Human
gccugaagucacacagug

SEQ ID NO: 2452514 - RNA, 17 nt, Human
gccugaagucacacagu

SEQ ID NO: 2452515 - RNA, 16 nt, Human
gccugaagucacacag

SEQ ID NO: 2452516 - RNA, 15 nt, Human
gccugaagucacaca

SEQ ID NO: 2452517 - RNA, 21 nt, Human
gcccaguuggguggaugccug

SEQ ID NO: 2452518 - RNA, 19 nt, Human
gcccaguuggguggaugcc

SEQ ID NO: 2452519 - RNA, 21 nt, Human
gcccaguccuggccuggcuuc

SEQ ID NO: 2452520 - RNA, 14 nt, Human
gccugagccuggcc

SEQ ID NO: 2452521 - RNA, 16 nt, Human
gccugagccuggccag

SEQ ID NO: 2452522 - RNA, 17 nt, Human
gccugagccuggccagc

SEQ ID NO: 2452523 - RNA, 22 nt, Human
gccugagcgcuccugccgcaga

SEQ ID NO: 2452524 - RNA, 12 nt, Human
gccugagcuggg

SEQ ID NO: 2452525 - RNA, 20 nt, Human
gccugaggaugagcuggaag

SEQ ID NO: 2452526 - RNA, 18 nt, Human
gccugaggaugagcugga

SEQ ID NO: 2452527 - RNA, 21 nt, Human
gccugaggaugagcuggaagg

SEQ ID NO: 2452528 - RNA, 13 nt, Human
gccugaggcugag

SEQ ID NO: 2452529 - RNA, 14 nt, Human
gccugaggcugaga

SEQ ID NO: 2452530 - RNA, 17 nt, Human
gccugagcucacucggc

SEQ ID NO: 2452531 - RNA, 14 nt, Human
gccugagcucacuc

SEQ ID NO: 2452532 - RNA, 23 nt, Human
gccugagcgcuccugccgcagag

SEQ ID NO: 2452533 - RNA, 17 nt, Human
gccugaggaugagcugg

SEQ ID NO: 2452534 - RNA, 23 nt, Human
gccugagcucacucggcacccug

SEQ ID NO: 2452535 - RNA, 14 nt, Human
gccugaggaugagc

SEQ ID NO: 2452536 - RNA, 19 nt, Human
gccugcaggugcugcugcg

SEQ ID NO: 2452537 - RNA, 16 nt, Human
gccugcaggugcugcu

SEQ ID NO: 2452538 - RNA, 14 nt, Human
gccugcaggugcug

SEQ ID NO: 2452539 - RNA, 24 nt, Human
gccugcaggguggugcugggacug

SEQ ID NO: 2452540 - RNA, 23 nt, Human
gccugcaggguggugcugggacu

SEQ ID NO: 2452541 - RNA, 22 nt, Human
gccugcaggguggugcugggac

SEQ ID NO: 2452542 - RNA, 21 nt, Human
gccugcaggguggugcuggga

SEQ ID NO: 2452543 - RNA, 20 nt, Human
gccugcaggguggugcuggg

SEQ ID NO: 2452544 - RNA, 19 nt, Human
gccugcaggguggugcugg

SEQ ID NO: 2452545 - RNA, 22 nt, Human
gccugcaggaccugccuguagc

SEQ ID NO: 2452546 - RNA, 10 nt, Human
gccugaggga

SEQ ID NO: 2452547 - RNA, 14 nt, Human
gccugaggcuggga

SEQ ID NO: 2452548 - RNA, 15 nt, Human
gccugaggcugagac

SEQ ID NO: 2452549 - RNA, 17 nt, Human
gccugaggcugagacug

SEQ ID NO: 2452550 - RNA, 18 nt, Human
gccugaggcugagacugc

SEQ ID NO: 2452551 - RNA, 13 nt, Human
gccugaggcuggg

SEQ ID NO: 2452552 - RNA, 13 nt, Human
gccuggaagacag

SEQ ID NO: 2452553 - RNA, 23 nt, Human
gccuggaagacagagaccuccug

SEQ ID NO: 2452554 - RNA, 22 nt, Human
gccuggaagacagagaccuccu

SEQ ID NO: 2452555 - RNA, 15 nt, Human
gccuggaagacagag

SEQ ID NO: 2452556 - RNA, 14 nt, Human
gccuggaagacaga

SEQ ID NO: 2452557 - RNA, 10 nt, Human
gccugcugca

SEQ ID NO: 2452558 - RNA, 11 nt, Human
gccugcugcau

SEQ ID NO: 2452559 - RNA, 18 nt, Human
gccugcugcauggggugg

SEQ ID NO: 2452560 - RNA, 23 nt, Human
gccugcugaaugauuuccaaaga

SEQ ID NO: 2452561 - RNA, 11 nt, Human
gccugcucccc

SEQ ID NO: 2452562 - RNA, 13 nt, Human
gccugcuccccca

SEQ ID NO: 2452563 - RNA, 15 nt, Human
gccugcucccccacc

SEQ ID NO: 2452564 - RNA, 16 nt, Human
gccugcucccccaccc

SEQ ID NO: 2452565 - RNA, 17 nt, Human
gccugcucccccacccc

SEQ ID NO: 2452566 - RNA, 19 nt, Human
gccugcucccccacccccu

SEQ ID NO: 2452567 - RNA, 17 nt, Human
gccugcaguccuggaag

SEQ ID NO: 2452568 - RNA, 21 nt, Human
gccugcaugcuggguucugca

SEQ ID NO: 2452569 - RNA, 22 nt, Human
gccugcucccagcagcccuaag

SEQ ID NO: 2452570 - RNA, 20 nt, Human
gccugcucccagcagcccua

SEQ ID NO: 2452571 - RNA, 16 nt, Human
gccugcauguaaacac

SEQ ID NO: 2452572 - RNA, 13 nt, Human
gccugcauucugc

SEQ ID NO: 2452573 - RNA, 18 nt, Human
gccuggauggggcugcac

SEQ ID NO: 2452574 - RNA, 16 nt, Human
gccuggauggggcugc

SEQ ID NO: 2452575 - RNA, 15 nt, Human
gccuggacccccagc

SEQ ID NO: 2452576 - RNA, 13 nt, Human
gccuggaccccca

SEQ ID NO: 2452577 - RNA, 17 nt, Human
gccuggacccccagcuu

SEQ ID NO: 2452578 - RNA, 20 nt, Human
gccuggacauuugccuugcu

SEQ ID NO: 2452579 - RNA, 16 nt, Human
gccuggcacacaucag

SEQ ID NO: 2452580 - RNA, 18 nt, Human
gccuggcaagugggugaa

SEQ ID NO: 2452581 - RNA, 13 nt, Human
gccuggcacacau

SEQ ID NO: 2452582 - RNA, 14 nt, Human
gccuggcacagggc

SEQ ID NO: 2452583 - RNA, 13 nt, Human
gccuggcacaggg

SEQ ID NO: 2452584 - RNA, 20 nt, Human
gccuggauggggcugcaccg

SEQ ID NO: 2452585 - RNA, 21 nt, Human
gccuggauucauuuccugccc

SEQ ID NO: 2452586 - RNA, 19 nt, Human
gccuggauucauuuccugc

SEQ ID NO: 2452587 - RNA, 18 nt, Human
gccuggauucauuuccug

SEQ ID NO: 2452588 - RNA, 16 nt, Human
gccuggauucauuucc

SEQ ID NO: 2452589 - RNA, 14 nt, Human
gccuggauucauuu

SEQ ID NO: 2452590 - RNA, 19 nt, Human
gcuccuuucuccagccagc

SEQ ID NO: 2452591 - RNA, 18 nt, Human
gcuccuuucuccagccag

SEQ ID NO: 2452592 - RNA, 17 nt, Human
gcuccuuucuccagcca

SEQ ID NO: 2452593 - RNA, 16 nt, Human
gcuccuuucuccagcc

SEQ ID NO: 2452594 - RNA, 14 nt, Human
gcuccuuucuccag

SEQ ID NO: 2452595 - RNA, 16 nt, Human
gcuccuuguuccuaga

SEQ ID NO: 2452596 - RNA, 19 nt, Human
gcucgagcaugccuggaug

SEQ ID NO: 2452597 - RNA, 21 nt, Human
gcucgagcaugccuggauggg

SEQ ID NO: 2452598 - RNA, 20 nt, Human
gcuccuuucuccagccagca

SEQ ID NO: 2452599 - RNA, 14 nt, Human
gcuccuuguuccua

SEQ ID NO: 2452600 - RNA, 17 nt, Human
gcuccuuuagcgcccag

SEQ ID NO: 2452601 - RNA, 14 nt, Human
gcuccuugggcccu

SEQ ID NO: 2452602 - RNA, 17 nt, Human
gcuccuugggcccuuug

SEQ ID NO: 2452603 - RNA, 19 nt, Human
gcuccuugggcccuuugag

SEQ ID NO: 2452604 - RNA, 13 nt, Human
gcuccuucugucc

SEQ ID NO: 2452605 - RNA, 18 nt, Human
gcuccuuccucugaggcu

SEQ ID NO: 2452606 - RNA, 18 nt, Human
gcuccuucccaucgcugu

SEQ ID NO: 2452607 - RNA, 13 nt, Human
gcuccuucccauc

SEQ ID NO: 2452608 - RNA, 23 nt, Human
gcuccuucccaggaguggaggag

SEQ ID NO: 2452609 - RNA, 20 nt, Human
gcuccuuccucugaggcuga

SEQ ID NO: 2452610 - RNA, 22 nt, Human
gcuccuuccucugaggcugaaa

SEQ ID NO: 2452611 - RNA, 14 nt, Human
gcuccuuccuggag

SEQ ID NO: 2452612 - RNA, 23 nt, Human
gcuccuuccuggagacugcccag

SEQ ID NO: 2452613 - RNA, 21 nt, Human
gcuccuucucucuuacauuga

SEQ ID NO: 2452614 - RNA, 15 nt, Human
gcuccuuccuucacc

SEQ ID NO: 2452615 - RNA, 13 nt, Human
gcuccuuccuguc

SEQ ID NO: 2452616 - RNA, 19 nt, Human
gcuccuuccugucuuccug

SEQ ID NO: 2452617 - RNA, 13 nt, Human
gcuccugugucuu

SEQ ID NO: 2452618 - RNA, 12 nt, Human
gcuccugugucu

SEQ ID NO: 2452619 - RNA, 22 nt, Human
gcuccguccaggagccugugcc

SEQ ID NO: 2452620 - RNA, 23 nt, Human
gcuccguccaggagccugugccu

SEQ ID NO: 2452621 - RNA, 17 nt, Human
gcuccgugccuccacca

SEQ ID NO: 2452622 - RNA, 16 nt, Human
gcuccgugccuccacc

SEQ ID NO: 2452623 - RNA, 15 nt, Human
gcuccgugccuccac

SEQ ID NO: 2452624 - RNA, 14 nt, Human
gcuccgugccucca

SEQ ID NO: 2452625 - RNA, 13 nt, Human
gcuccgugccucc

SEQ ID NO: 2452626 - RNA, 22 nt, Human
gcuccgugagugaaccaucauu

SEQ ID NO: 2452627 - RNA, 24 nt, Human
gcuccgcuuucuacccagcgagcc

SEQ ID NO: 2452628 - RNA, 22 nt, Human
gcuccuaacccuuaucaccagc

SEQ ID NO: 2452629 - RNA, 23 nt, Human
gcuccuaacccuuaucaccagcu

SEQ ID NO: 2452630 - RNA, 21 nt, Human
gcuccuacccaccgcccuugc

SEQ ID NO: 2452631 - RNA, 15 nt, Human
gcuccuaagcuucaa

SEQ ID NO: 2452632 - RNA, 13 nt, Human
gcuccuagaggga

SEQ ID NO: 2452633 - RNA, 14 nt, Human
gcuccuagagggag

SEQ ID NO: 2452634 - RNA, 14 nt, Human
gcuccuaucugugu

SEQ ID NO: 2452635 - RNA, 14 nt, Human
gcuccuagcagaga

SEQ ID NO: 2452636 - RNA, 15 nt, Human
gcuccuagagggagg

SEQ ID NO: 2452637 - RNA, 16 nt, Human
gcuccuagagggaggg

SEQ ID NO: 2452638 - RNA, 18 nt, Human
gcuccuagagggaggggc

SEQ ID NO: 2452639 - RNA, 19 nt, Human
gcuccuagagggaggggcc

SEQ ID NO: 2452640 - RNA, 15 nt, Human
gcuccuaucuguguu

SEQ ID NO: 2452641 - RNA, 18 nt, Human
gcuccucaacucaccuaa

SEQ ID NO: 2452642 - RNA, 18 nt, Human
gcuccucauccagggcuc

SEQ ID NO: 2452643 - RNA, 19 nt, Human
gcuccucaugguggguuca

SEQ ID NO: 2452644 - RNA, 21 nt, Human
gcuccucauccagggcucuga

SEQ ID NO: 2452645 - RNA, 14 nt, Human
gcuccuccagggcc

SEQ ID NO: 2452646 - RNA, 14 nt, Human
gcuccucccggugc

SEQ ID NO: 2452647 - RNA, 23 nt, Human
gcuccuggggguucuuucuuccu

SEQ ID NO: 2452648 - RNA, 19 nt, Human
gcuccuggucuugagaugu

SEQ ID NO: 2452649 - RNA, 13 nt, Human
gcuccuguccucc

SEQ ID NO: 2452650 - RNA, 11 nt, Human
gcuccucccac

SEQ ID NO: 2452651 - RNA, 20 nt, Human
gcuccuccagggugugugcu

SEQ ID NO: 2452652 - RNA, 15 nt, Human
gcuccuccagggcca

SEQ ID NO: 2452653 - RNA, 18 nt, Human
gcuccuccagggccacgu

SEQ ID NO: 2452654 - RNA, 22 nt, Human
gcuccuccagggccacgugcca

SEQ ID NO: 2452655 - RNA, 23 nt, Human
gcuccuccagggccacgugccag

SEQ ID NO: 2452656 - RNA, 22 nt, Human
gcuccugugcuuucccugaacu

SEQ ID NO: 2452657 - RNA, 16 nt, Human
gcuccugugcuuuccc

SEQ ID NO: 2452658 - RNA, 14 nt, Human
gcuccugugcuuuc

SEQ ID NO: 2452659 - RNA, 21 nt, Human
gcuccugugcuacuuugccuu

SEQ ID NO: 2452660 - RNA, 15 nt, Human
gcuccugugcccuua

SEQ ID NO: 2452661 - RNA, 13 nt, Human
gcuccugugcccu

SEQ ID NO: 2452662 - RNA, 12 nt, Human
gcuccugugccc

SEQ ID NO: 2452663 - RNA, 22 nt, Human
gcuccuguccucccauccccug

SEQ ID NO: 2452664 - RNA, 21 nt, Human
gcuccuguggccccacccugg

SEQ ID NO: 2452665 - RNA, 20 nt, Human
gcuccuguggccccacccug

SEQ ID NO: 2452666 - RNA, 15 nt, Human
gcuccuguggcccca

SEQ ID NO: 2452667 - RNA, 13 nt, Human
gcuccuguggccc

SEQ ID NO: 2452668 - RNA, 15 nt, Human
gcuccuguccuccca

SEQ ID NO: 2452669 - RNA, 14 nt, Human
gcuccugucugcca

SEQ ID NO: 2452670 - RNA, 16 nt, Human
gcuccugucugccagc

SEQ ID NO: 2452671 - RNA, 17 nt, Human
gcuccugucugccagcc

SEQ ID NO: 2452672 - RNA, 18 nt, Human
gcuccugucugccagcca

SEQ ID NO: 2452673 - RNA, 19 nt, Human
gcuccugucugccagccag

SEQ ID NO: 2452674 - RNA, 20 nt, Human
gcuccugucugccagccagc

SEQ ID NO: 2452675 - RNA, 21 nt, Human
gcuccugucugccagccagca

SEQ ID NO: 2452676 - RNA, 18 nt, Human
gcuccagucugcugcccu

SEQ ID NO: 2452677 - RNA, 20 nt, Human
gcuccagucugcugcccucc

SEQ ID NO: 2452678 - RNA, 21 nt, Human
gcuccagucugcugcccucca

SEQ ID NO: 2452679 - RNA, 17 nt, Human
gcuccagucugcugccc

SEQ ID NO: 2452680 - RNA, 21 nt, Human
gcuccagucaacaaacuauuu

SEQ ID NO: 2452681 - RNA, 21 nt, Human
gcuccagguggcucugaggug

SEQ ID NO: 2452682 - RNA, 18 nt, Human
gcuccagguggcucugag

SEQ ID NO: 2452683 - RNA, 16 nt, Human
gcuccagguggcucug

SEQ ID NO: 2452684 - RNA, 21 nt, Human
gcuccaggcaggcuaaggcgu

SEQ ID NO: 2452685 - RNA, 15 nt, Human
gcuccagguggcucu

SEQ ID NO: 2452686 - RNA, 15 nt, Human
gcucccacaggcccu

SEQ ID NO: 2452687 - RNA, 23 nt, Human
gcucccaagggauggugcccugu

SEQ ID NO: 2452688 - RNA, 12 nt, Human
gcucccaaggga

SEQ ID NO: 2452689 - RNA, 11 nt, Human
gcucccaaggg

SEQ ID NO: 2452690 - RNA, 23 nt, Human
gcuccgcuuucuacccagcgagc

SEQ ID NO: 2452691 - RNA, 22 nt, Human
gcuccgcuuucuacccagcgag

SEQ ID NO: 2452692 - RNA, 21 nt, Human
gcuccgcuuucuacccagcga

SEQ ID NO: 2452693 - RNA, 18 nt, Human
gcuccgcuuucuacccag

SEQ ID NO: 2452694 - RNA, 16 nt, Human
gcucccuucucuguag

SEQ ID NO: 2452695 - RNA, 15 nt, Human
gcucccuugugcgug

SEQ ID NO: 2452696 - RNA, 13 nt, Human
gcuccgccucugc

SEQ ID NO: 2452697 - RNA, 14 nt, Human
gcuccgccucugcu

SEQ ID NO: 2452698 - RNA, 17 nt, Human
gcuccgccucugcuggc

SEQ ID NO: 2452699 - RNA, 20 nt, Human
gcucccuucccaccucucuc

SEQ ID NO: 2452700 - RNA, 18 nt, Human
gcucccacaggcagcuuu

SEQ ID NO: 2452701 - RNA, 17 nt, Human
gcucccacaggcagcuu

SEQ ID NO: 2452702 - RNA, 15 nt, Human
gcucccuucucugua

SEQ ID NO: 2452703 - RNA, 16 nt, Human
gcucccacaggcagcu

SEQ ID NO: 2452704 - RNA, 15 nt, Human
gcucccacaggcagc

SEQ ID NO: 2452705 - RNA, 14 nt, Human
gcucccacaggcag

SEQ ID NO: 2452706 - RNA, 18 nt, Human
gcuccaggagcagccaca

SEQ ID NO: 2452707 - RNA, 17 nt, Human
gcuccaggagcagccac

SEQ ID NO: 2452708 - RNA, 16 nt, Human
gcuccaggagcagcca

SEQ ID NO: 2452709 - RNA, 15 nt, Human
gcuccaggagcagcc

SEQ ID NO: 2452710 - RNA, 17 nt, Human
gcuccaggccagggggc

SEQ ID NO: 2452711 - RNA, 18 nt, Human
gcuccaggccagggggcc

SEQ ID NO: 2452712 - RNA, 13 nt, Human
gcuccaggcaggc

SEQ ID NO: 2452713 - RNA, 24 nt, Human
gcuccaggcuccuuuagcgcccag

SEQ ID NO: 2452714 - RNA, 12 nt, Human
gcuccaggcucc

SEQ ID NO: 2452715 - RNA, 13 nt, Human
gcuccaaacccuc

SEQ ID NO: 2452716 - RNA, 21 nt, Human
gcuccagcuguucagcugguu

SEQ ID NO: 2452717 - RNA, 22 nt, Human
gcucaugugugcaacaggguau

SEQ ID NO: 2452718 - RNA, 17 nt, Human
gcucaugugugcaacag

SEQ ID NO: 2452719 - RNA, 14 nt, Human
gcuccaggagcagc

SEQ ID NO: 2452720 - RNA, 12 nt, Human
gcuccaggagca

SEQ ID NO: 2452721 - RNA, 11 nt, Human
gcuccaggagc

SEQ ID NO: 2452722 - RNA, 14 nt, Human
gcucauuucaggau

SEQ ID NO: 2452723 - RNA, 15 nt, Human
gcucauuuuuucuua

SEQ ID NO: 2452724 - RNA, 15 nt, Human
gcucaucugcugguc

SEQ ID NO: 2452725 - RNA, 14 nt, Human
gcucaucugcuggu

SEQ ID NO: 2452726 - RNA, 16 nt, Human
gcucaucucuguccca

SEQ ID NO: 2452727 - RNA, 21 nt, Human
gcucauccccaccugucuuca

SEQ ID NO: 2452728 - RNA, 13 nt, Human
gcucaucugcugg

SEQ ID NO: 2452729 - RNA, 16 nt, Human
gcucaucauucucugu

SEQ ID NO: 2452730 - RNA, 18 nt, Human
gcucaucauucucugucu

SEQ ID NO: 2452731 - RNA, 19 nt, Human
gcucaucauucucugucuc

SEQ ID NO: 2452732 - RNA, 20 nt, Human
gcucaucauucucugucuca

SEQ ID NO: 2452733 - RNA, 18 nt, Human
gcucauggacuucugcca

SEQ ID NO: 2452734 - RNA, 21 nt, Human
gcucaucugcugguccguggg

SEQ ID NO: 2452735 - RNA, 16 nt, Human
gcucaucugcuggucc

SEQ ID NO: 2452736 - RNA, 23 nt, Human
gcucaucugcugguccgugggac

SEQ ID NO: 2452737 - RNA, 22 nt, Human
gcucaucucugucccacuuggc

SEQ ID NO: 2452738 - RNA, 18 nt, Human
gcucauauuuuguauaua

SEQ ID NO: 2452739 - RNA, 22 nt, Human
gcucauauuccugcagccugga

SEQ ID NO: 2452740 - RNA, 14 nt, Human
gcucauauuuugua

SEQ ID NO: 2452741 - RNA, 13 nt, Human
gcucaggaaaacg

SEQ ID NO: 2452742 - RNA, 20 nt, Human
gcucauauuccugcagccug

SEQ ID NO: 2452743 - RNA, 12 nt, Human
gcucagcuucuc

SEQ ID NO: 2452744 - RNA, 13 nt, Human
gcucagcuucucc

SEQ ID NO: 2452745 - RNA, 11 nt, Human
gcucaggaaaa

SEQ ID NO: 2452746 - RNA, 16 nt, Human
gcucagcuucuccugu

SEQ ID NO: 2452747 - RNA, 21 nt, Human
gcucagcuuuuugucuuuucu

SEQ ID NO: 2452748 - RNA, 16 nt, Human
gcucagcucugggcca

SEQ ID NO: 2452749 - RNA, 17 nt, Human
gcucagcucugggccau

SEQ ID NO: 2452750 - RNA, 20 nt, Human
gcucagcuacugauuuuugu

SEQ ID NO: 2452751 - RNA, 13 nt, Human
gcucagcccugga

SEQ ID NO: 2452752 - RNA, 12 nt, Human
gcucagcccugg

SEQ ID NO: 2452753 - RNA, 23 nt, Human
gcucagcggggacagcuccuucu

SEQ ID NO: 2452754 - RNA, 19 nt, Human
gcucagcggggacagcucc

SEQ ID NO: 2452755 - RNA, 18 nt, Human
gcucagcggggacagcuc

SEQ ID NO: 2452756 - RNA, 17 nt, Human
gcucagcggggacagcu

SEQ ID NO: 2452757 - RNA, 21 nt, Human
gcucagcccucccugccccuc

SEQ ID NO: 2452758 - RNA, 19 nt, Human
gcucagcccucccugcccc

SEQ ID NO: 2452759 - RNA, 18 nt, Human
gcucagcccucccugccc

SEQ ID NO: 2452760 - RNA, 17 nt, Human
gcucagcccucccugcc

SEQ ID NO: 2452761 - RNA, 19 nt, Human
gcucagcccugacuggugc

SEQ ID NO: 2452762 - RNA, 11 nt, Human
gcucagcccug

SEQ ID NO: 2452763 - RNA, 16 nt, Human
gcucagcccugacugg

SEQ ID NO: 2452764 - RNA, 21 nt, Human
gcucagcccugacuggugcua

SEQ ID NO: 2452765 - RNA, 20 nt, Human
gcucagcccugacuggugcu

SEQ ID NO: 2452766 - RNA, 16 nt, Human
gcucagcggggacagc

SEQ ID NO: 2452767 - RNA, 15 nt, Human
gcucaccagccccag

SEQ ID NO: 2452768 - RNA, 16 nt, Human
gcucacaguuccucgc

SEQ ID NO: 2452769 - RNA, 17 nt, Human
gcucacaguuccucgcc

SEQ ID NO: 2452770 - RNA, 19 nt, Human
gcucacaguuccucgcccu

SEQ ID NO: 2452771 - RNA, 21 nt, Human
gcucacaguuccucgcccugg

SEQ ID NO: 2452772 - RNA, 14 nt, Human
gcucaccagcccca

SEQ ID NO: 2452773 - RNA, 13 nt, Human
gcucaccagcccc

SEQ ID NO: 2452774 - RNA, 12 nt, Human
gcucaccagccc

SEQ ID NO: 2452775 - RNA, 16 nt, Human
gcucacauaucuguca

SEQ ID NO: 2452776 - RNA, 22 nt, Human
gcucacacugagaauguaagaa

SEQ ID NO: 2452777 - RNA, 14 nt, Human
gcucacacugagaa

SEQ ID NO: 2452778 - RNA, 21 nt, Human
gcucacacgggguauuuuagg

SEQ ID NO: 2452779 - RNA, 22 nt, Human
gcucacaccccauugguggacu

SEQ ID NO: 2452780 - RNA, 13 nt, Human
gcucacacugaga

SEQ ID NO: 2452781 - RNA, 22 nt, Human
gcucacagaacccuuggagcca

SEQ ID NO: 2452782 - RNA, 13 nt, Human
gcucacaguuccu

SEQ ID NO: 2452783 - RNA, 15 nt, Human
gcucacaguuccucg

SEQ ID NO: 2452784 - RNA, 18 nt, Human
gcucaccucucccuugga

SEQ ID NO: 2452785 - RNA, 17 nt, Human
gcucaccucucccuugg

SEQ ID NO: 2452786 - RNA, 16 nt, Human
gcucaccucucccuug

SEQ ID NO: 2452787 - RNA, 14 nt, Human
gcucaccucucccu

SEQ ID NO: 2452788 - RNA, 12 nt, Human
gcucagcccucc

SEQ ID NO: 2452789 - RNA, 16 nt, Human
gcucagcccucccugc

SEQ ID NO: 2452790 - RNA, 15 nt, Human
gcucagcccucccug

SEQ ID NO: 2452791 - RNA, 15 nt, Human
gcucagccagcacuu

SEQ ID NO: 2452792 - RNA, 22 nt, Human
gcucacaguuccucgcccuggg

SEQ ID NO: 2452793 - RNA, 23 nt, Human
gcucacaguuccucgcccugggu

SEQ ID NO: 2452794 - RNA, 11 nt, Human
gcucagcccac

SEQ ID NO: 2452795 - RNA, 17 nt, Human
gcucagccagccccauc

SEQ ID NO: 2452796 - RNA, 18 nt, Human
gcucagcccaccccccuc

SEQ ID NO: 2452797 - RNA, 14 nt, Human
gcucagcccacccc

SEQ ID NO: 2452798 - RNA, 15 nt, Human
gcucagcccaccccc

SEQ ID NO: 2452799 - RNA, 16 nt, Human
gcucagcccacccccc

SEQ ID NO: 2452800 - RNA, 17 nt, Human
gcucagcccaccccccu

SEQ ID NO: 2452801 - RNA, 13 nt, Human
gcuaucuccccca

SEQ ID NO: 2452802 - RNA, 17 nt, Human
gcuaucguaaaauuaag

SEQ ID NO: 2452803 - RNA, 16 nt, Human
gcuaucguaaaauuaa

SEQ ID NO: 2452804 - RNA, 15 nt, Human
gcuaucguaaaauua

SEQ ID NO: 2452805 - RNA, 13 nt, Human
gcuaucacacagu

SEQ ID NO: 2452806 - RNA, 15 nt, Human
gcuauccuggcucuu

SEQ ID NO: 2452807 - RNA, 15 nt, Human
gcuaucucccccagc

SEQ ID NO: 2452808 - RNA, 14 nt, Human
gcuaucucccccag

SEQ ID NO: 2452809 - RNA, 18 nt, Human
gcucaaguccucuuuucu

SEQ ID NO: 2452810 - RNA, 17 nt, Human
gcucaaggaaaggccug

SEQ ID NO: 2452811 - RNA, 13 nt, Human
gcucaaggaaagg

SEQ ID NO: 2452812 - RNA, 18 nt, Human
gcucaagcgauucuccug

SEQ ID NO: 2452813 - RNA, 22 nt, Human
gcucaagcagucuacccaccuc

SEQ ID NO: 2452814 - RNA, 22 nt, Human
gcucaaguccucuuuucugaga

SEQ ID NO: 2452815 - RNA, 19 nt, Human
gcucaaguccucuuuucug

SEQ ID NO: 2452816 - RNA, 16 nt, Human
gcucaaucaagaaaau

SEQ ID NO: 2452817 - RNA, 19 nt, Human
gcucaauauuccugaauga

SEQ ID NO: 2452818 - RNA, 21 nt, Human
gcucaauauuccugaaugaaa

SEQ ID NO: 2452819 - RNA, 20 nt, Human
gcucaagucuucccugauca

SEQ ID NO: 2452820 - RNA, 19 nt, Human
gcucaaggaaaggccugaa

SEQ ID NO: 2452821 - RNA, 20 nt, Human
gcucaaggaaaggccugaaa

SEQ ID NO: 2452822 - RNA, 17 nt, Human
gcucaaggcgugaggau

SEQ ID NO: 2452823 - RNA, 23 nt, Human
gcucaaggaaagggggucccagu

SEQ ID NO: 2452824 - RNA, 17 nt, Human
gcucaagucuucccuga

SEQ ID NO: 2452825 - RNA, 17 nt, Human
gcucaauggacuggaag

SEQ ID NO: 2452826 - RNA, 14 nt, Human
gcucacaaaccaug

SEQ ID NO: 2452827 - RNA, 20 nt, Human
gcucaauccauguucuauuu

SEQ ID NO: 2452828 - RNA, 22 nt, Human
gcucaauauuccugaaugaaau

SEQ ID NO: 2452829 - RNA, 14 nt, Human
gcucaauccucuaa

SEQ ID NO: 2452830 - RNA, 16 nt, Human
gcucaauccucuaagc

SEQ ID NO: 2452831 - RNA, 23 nt, Human
gcucacaauaaaaauggcucaga

SEQ ID NO: 2452832 - RNA, 13 nt, Human
gcucacacaccug

SEQ ID NO: 2452833 - RNA, 15 nt, Human
gcucacacaugagau

SEQ ID NO: 2452834 - RNA, 14 nt, Human
gcucacaccccauu

SEQ ID NO: 2452835 - RNA, 14 nt, Human
gcucacacaugaga

SEQ ID NO: 2452836 - RNA, 14 nt, Human
gcucacaccuguaa

SEQ ID NO: 2452837 - RNA, 21 nt, Human
gcuauaggugcuacaaaaaca

SEQ ID NO: 2452838 - RNA, 19 nt, Human
gcuauaggugcuacaaaaa

SEQ ID NO: 2452839 - RNA, 21 nt, Human
gcuauacugcauacuuuuuaa

SEQ ID NO: 2452840 - RNA, 17 nt, Human
gcuauaccugugccucg

SEQ ID NO: 2452841 - RNA, 15 nt, Human
gcuauaccugugccu

SEQ ID NO: 2452842 - RNA, 16 nt, Human
gcuauaccugugccuc

SEQ ID NO: 2452843 - RNA, 18 nt, Human
gcuauaacaguagggaug

SEQ ID NO: 2452844 - RNA, 18 nt, Human
gcuauaaauuccucuuug

SEQ ID NO: 2452845 - RNA, 23 nt, Human
gcuauaaauuccucuuugcuuug

SEQ ID NO: 2452846 - RNA, 20 nt, Human
gcuauaacuauguugauaaa

SEQ ID NO: 2452847 - RNA, 23 nt, Human
gcuauaccugggcauacuaauaa

SEQ ID NO: 2452848 - RNA, 14 nt, Human
gcuauauccaugua

SEQ ID NO: 2452849 - RNA, 15 nt, Human
gcuauauccauguac

SEQ ID NO: 2452850 - RNA, 17 nt, Human
gcuauauccauguacug

SEQ ID NO: 2452851 - RNA, 18 nt, Human
gcuauauccauguacugu

SEQ ID NO: 2452852 - RNA, 19 nt, Human
gcuauauccauguacugua

SEQ ID NO: 2452853 - RNA, 19 nt, Human
gcuauaucuauauauaauu

SEQ ID NO: 2452854 - RNA, 15 nt, Human
gcuauaucuauauau

SEQ ID NO: 2452855 - RNA, 21 nt, Human
gcuauauccauguacuguagu

SEQ ID NO: 2452856 - RNA, 23 nt, Human
gcuauauccauguacuguaguuu

SEQ ID NO: 2452857 - RNA, 17 nt, Human
gcuauccauuucucaug

SEQ ID NO: 2452858 - RNA, 20 nt, Human
gcuauccugccaaaaucauu

SEQ ID NO: 2452859 - RNA, 23 nt, Human
gcuauauuuucaugacuuuucca

SEQ ID NO: 2452860 - RNA, 22 nt, Human
gcuauauuuucaugacuuuucc

SEQ ID NO: 2452861 - RNA, 14 nt, Human
gcuauauuuucaug

SEQ ID NO: 2452862 - RNA, 19 nt, Human
gcuauccagcuauuuuuau

SEQ ID NO: 2452863 - RNA, 16 nt, Human
gcuagauguauguacu

SEQ ID NO: 2452864 - RNA, 14 nt, Human
gcuagauguaugua

SEQ ID NO: 2452865 - RNA, 13 nt, Human
gcuauaaauauau

SEQ ID NO: 2452866 - RNA, 15 nt, Human
gcuauaaauauauaa

SEQ ID NO: 2452867 - RNA, 17 nt, Human
gcuauaaacaauuacau

SEQ ID NO: 2452868 - RNA, 21 nt, Human
gcuaguugggcuuccucauag

SEQ ID NO: 2452869 - RNA, 22 nt, Human
gcggugcuaucucccccagccc

SEQ ID NO: 2452870 - RNA, 19 nt, Human
gcggugcuaucucccccag

SEQ ID NO: 2452871 - RNA, 13 nt, Human
gcuagauguaugu

SEQ ID NO: 2452872 - RNA, 20 nt, Human
gcuagaguccucacucccag

SEQ ID NO: 2452873 - RNA, 19 nt, Human
gcuagaugggcauggggug

SEQ ID NO: 2452874 - RNA, 16 nt, Human
gcggugcuguccucag

SEQ ID NO: 2452875 - RNA, 13 nt, Human
ggagggccugggc

SEQ ID NO: 2452876 - RNA, 21 nt, Human
ggagggccguaccccacccuc

SEQ ID NO: 2452877 - RNA, 19 nt, Human
ggagggccacaugggaggc

SEQ ID NO: 2452878 - RNA, 23 nt, Human
ggagggccacaugggaggcucac

SEQ ID NO: 2452879 - RNA, 16 nt, Human
ggagggcccuaccuga

SEQ ID NO: 2452880 - RNA, 20 nt, Human
ggagggccguaccccacccu

SEQ ID NO: 2452881 - RNA, 20 nt, Human
ggagggauagaggggggcug

SEQ ID NO: 2452882 - RNA, 19 nt, Human
ggaggggagcaugggaagu

SEQ ID NO: 2452883 - RNA, 21 nt, Human
ggagggcggcaggggccugga

SEQ ID NO: 2452884 - RNA, 20 nt, Human
ggagggcggcaggggccugg

SEQ ID NO: 2452885 - RNA, 20 nt, Human
ggagggcuagaaccuagaag

SEQ ID NO: 2452886 - RNA, 16 nt, Human
ggagggcuagaaccua

SEQ ID NO: 2452887 - RNA, 15 nt, Human
ggagggcgugggagc

SEQ ID NO: 2452888 - RNA, 17 nt, Human
ggagggcgugacucacc

SEQ ID NO: 2452889 - RNA, 20 nt, Human
ggagggcuagaaccuggaga

SEQ ID NO: 2452890 - RNA, 19 nt, Human
ggagggcuagaaccuggag

SEQ ID NO: 2452891 - RNA, 21 nt, Human
ggagggcuagaaccuggaagg

SEQ ID NO: 2452892 - RNA, 16 nt, Human
ggagggcuagaaccug

SEQ ID NO: 2452893 - RNA, 20 nt, Human
ggagggcuagaaccuggcag

SEQ ID NO: 2452894 - RNA, 22 nt, Human
ggagggcuagaaccuggagagc

SEQ ID NO: 2452895 - RNA, 13 nt, Human
ggaggggaggggg

SEQ ID NO: 2452896 - RNA, 13 nt, Human
ggaggggcaggcu

SEQ ID NO: 2452897 - RNA, 23 nt, Human
ggaggggcccgcuugccucggcu

SEQ ID NO: 2452898 - RNA, 13 nt, Human
ggaggggccuagg

SEQ ID NO: 2452899 - RNA, 15 nt, Human
ggaggggccuaggcc

SEQ ID NO: 2452900 - RNA, 21 nt, Human
ggaggggccuaggccucagcc

SEQ ID NO: 2452901 - RNA, 13 nt, Human
ggaggggccuggc

SEQ ID NO: 2452902 - RNA, 22 nt, Human
ggaggggcccgcuugccucggc

SEQ ID NO: 2452903 - RNA, 18 nt, Human
ggaggggcccgcuugccu

SEQ ID NO: 2452904 - RNA, 13 nt, Human
ggaggggcccgcu

SEQ ID NO: 2452905 - RNA, 21 nt, Human
ggaggggccccugcuucucca

SEQ ID NO: 2452906 - RNA, 14 nt, Human
ggaggggcaggcug

SEQ ID NO: 2452907 - RNA, 13 nt, Human
ggaggggccccug

SEQ ID NO: 2452908 - RNA, 20 nt, Human
ggaggggcauggccagcagc

SEQ ID NO: 2452909 - RNA, 13 nt, Human
ggaguaucuggga

SEQ ID NO: 2452910 - RNA, 18 nt, Human
ggaguaaucuguguacaa

SEQ ID NO: 2452911 - RNA, 15 nt, Human
ggagucaagugugga

SEQ ID NO: 2452912 - RNA, 15 nt, Human
ggaguaugcaaaagu

SEQ ID NO: 2452913 - RNA, 14 nt, Human
ggaguaucugggaa

SEQ ID NO: 2452914 - RNA, 15 nt, Human
ggaguaucugggaac

SEQ ID NO: 2452915 - RNA, 22 nt, Human
ggagucccaccuuggcugcagg

SEQ ID NO: 2452916 - RNA, 14 nt, Human
ggagucagagagaa

SEQ ID NO: 2452917 - RNA, 16 nt, Human
ggaggggcgcuggccc

SEQ ID NO: 2452918 - RNA, 12 nt, Human
ggaggggcgcug

SEQ ID NO: 2452919 - RNA, 22 nt, Human
ggaggggcgcccaccuccccac

SEQ ID NO: 2452920 - RNA, 17 nt, Human
ggaggggcgcccaccuc

SEQ ID NO: 2452921 - RNA, 21 nt, Human
ggaggggccuggcagccgugc

SEQ ID NO: 2452922 - RNA, 18 nt, Human
ggaggggccuggcagccg

SEQ ID NO: 2452923 - RNA, 14 nt, Human
ggaggggccuggca

SEQ ID NO: 2452924 - RNA, 20 nt, Human
ggaggggcgcuggcccagcc

SEQ ID NO: 2452925 - RNA, 19 nt, Human
ggaggggcgcuggcccagc

SEQ ID NO: 2452926 - RNA, 21 nt, Human
ggagguugcagugagcugaga

SEQ ID NO: 2452927 - RNA, 15 nt, Human
ggagguugggugggc

SEQ ID NO: 2452928 - RNA, 20 nt, Human
ggagguuuaggucaagaaga

SEQ ID NO: 2452929 - RNA, 17 nt, Human
ggaguacaggugaagca

SEQ ID NO: 2452930 - RNA, 16 nt, Human
ggagggagggcuccag

SEQ ID NO: 2452931 - RNA, 13 nt, Human
ggagggagggcuc

SEQ ID NO: 2452932 - RNA, 17 nt, Human
ggagggagggcuccaga

SEQ ID NO: 2452933 - RNA, 17 nt, Human
ggagggauucugguucc

SEQ ID NO: 2452934 - RNA, 21 nt, Human
ggagggaugcugccugaguca

SEQ ID NO: 2452935 - RNA, 13 nt, Human
ggaggcagggccu

SEQ ID NO: 2452936 - RNA, 18 nt, Human
ggaggcagggccuugccc

SEQ ID NO: 2452937 - RNA, 19 nt, Human
ggaggcagggccuugccca

SEQ ID NO: 2452938 - RNA, 21 nt, Human
ggaggcagggccuugcccaga

SEQ ID NO: 2452939 - RNA, 17 nt, Human
ggaggcaggaguuucgu

SEQ ID NO: 2452940 - RNA, 22 nt, Human
ggaggcacuuuagggcuguaaa

SEQ ID NO: 2452941 - RNA, 17 nt, Human
ggaggcacacagcugca

SEQ ID NO: 2452942 - RNA, 16 nt, Human
ggaggacgcucucugg

SEQ ID NO: 2452943 - RNA, 21 nt, Human
ggaggauguucugggacacag

SEQ ID NO: 2452944 - RNA, 18 nt, Human
ggaggauguucugggaca

SEQ ID NO: 2452945 - RNA, 12 nt, Human
ggaggaccuuau

SEQ ID NO: 2452946 - RNA, 17 nt, Human
ggaggauucuaugaggc

SEQ ID NO: 2452947 - RNA, 20 nt, Human
ggaggauugcuugagcccag

SEQ ID NO: 2452948 - RNA, 22 nt, Human
ggaggauugcuugagcccagga

SEQ ID NO: 2452949 - RNA, 19 nt, Human
ggaggcaagagggguggag

SEQ ID NO: 2452950 - RNA, 23 nt, Human
ggaggcaagagggguggagacug

SEQ ID NO: 2452951 - RNA, 14 nt, Human
ggaggcaagcccug

SEQ ID NO: 2452952 - RNA, 16 nt, Human
ggaggcacacagcugc

SEQ ID NO: 2452953 - RNA, 20 nt, Human
ggagcccugggaggcucugg

SEQ ID NO: 2452954 - RNA, 15 nt, Human
ggagcacuggagugc

SEQ ID NO: 2452955 - RNA, 13 nt, Human
ggagcacuggagu

SEQ ID NO: 2452956 - RNA, 18 nt, Human
ggagccgggucugccucu

SEQ ID NO: 2452957 - RNA, 16 nt, Human
ggagccuacccacccc

SEQ ID NO: 2452958 - RNA, 18 nt, Human
ggagcacuggagugcagg

SEQ ID NO: 2452959 - RNA, 19 nt, Human
ggagccucauccgaggcag

SEQ ID NO: 2452960 - RNA, 20 nt, Human
ggagccucauccgaggcagg

SEQ ID NO: 2452961 - RNA, 21 nt, Human
ggagccucauccgaggcaggg

SEQ ID NO: 2452962 - RNA, 21 nt, Human
ggagccuagagugagggccug

SEQ ID NO: 2452963 - RNA, 17 nt, Human
ggagccgggucugccuc

SEQ ID NO: 2452964 - RNA, 16 nt, Human
ggagccgguggcggug

SEQ ID NO: 2452965 - RNA, 14 nt, Human
ggagccuccugccc

SEQ ID NO: 2452966 - RNA, 15 nt, Human
ggagccuccugccca

SEQ ID NO: 2452967 - RNA, 13 nt, Human
ggagccuccugcc

SEQ ID NO: 2452968 - RNA, 12 nt, Human
ggagccuccugc

SEQ ID NO: 2452969 - RNA, 11 nt, Human
ggagccuccug

SEQ ID NO: 2452970 - RNA, 19 nt, Human
ggagacaugugacauuuau

SEQ ID NO: 2452971 - RNA, 15 nt, Human
ggagacaugugacau

SEQ ID NO: 2452972 - RNA, 18 nt, Human
ggagaccaugcagagcgc

SEQ ID NO: 2452973 - RNA, 17 nt, Human
ggagaccaaggcgggag

SEQ ID NO: 2452974 - RNA, 14 nt, Human
ggagacaugugaca

SEQ ID NO: 2452975 - RNA, 18 nt, Human
ggagacagugaucuccau

SEQ ID NO: 2452976 - RNA, 12 nt, Human
ggagacaggguu

SEQ ID NO: 2452977 - RNA, 13 nt, Human
ggagacagugauc

SEQ ID NO: 2452978 - RNA, 11 nt, Human
ggagacagggu

SEQ ID NO: 2452979 - RNA, 19 nt, Human
ggagaccaugcagagcgcc

SEQ ID NO: 2452980 - RNA, 20 nt, Human
ggagacauuccugggcacag

SEQ ID NO: 2452981 - RNA, 17 nt, Human
ggagcaaagugagggcc

SEQ ID NO: 2452982 - RNA, 15 nt, Human
ggagcaaagugaggg

SEQ ID NO: 2452983 - RNA, 20 nt, Human
ggagcaaauguuucugcagu

SEQ ID NO: 2452984 - RNA, 18 nt, Human
ggagcaaauguuucugca

SEQ ID NO: 2452985 - RNA, 16 nt, Human
ggagcaaauguuucug

SEQ ID NO: 2452986 - RNA, 15 nt, Human
ggagcaaauguuucu

SEQ ID NO: 2452987 - RNA, 22 nt, Human
ggagcaacuuguucguggguca

SEQ ID NO: 2452988 - RNA, 19 nt, Human
ggagcccugggaggcucug

SEQ ID NO: 2452989 - RNA, 16 nt, Human
ggagcccugggaggcu

SEQ ID NO: 2452990 - RNA, 15 nt, Human
ggagcacaggcagcu

SEQ ID NO: 2452991 - RNA, 17 nt, Human
ggagcaccaggcacgaa

SEQ ID NO: 2452992 - RNA, 14 nt, Human
ggagcacaggcagc

SEQ ID NO: 2452993 - RNA, 13 nt, Human
ggagcacaggcag

SEQ ID NO: 2452994 - RNA, 22 nt, Human
ggagccugcuggucacagccuc

SEQ ID NO: 2452995 - RNA, 13 nt, Human
ggagccugcuggu

SEQ ID NO: 2452996 - RNA, 22 nt, Human
ggagccugcaggguggugcugg

SEQ ID NO: 2452997 - RNA, 12 nt, Human
ggagccuggugc

SEQ ID NO: 2452998 - RNA, 21 nt, Human
ggagccugcaggguggugcug

SEQ ID NO: 2452999 - RNA, 16 nt, Human
ggagccugcagggugg

SEQ ID NO: 2453000 - RNA, 13 nt, Human
ggagccugcaggg

SEQ ID NO: 2453001 - RNA, 11 nt, Human
ggagccugcag

SEQ ID NO: 2453002 - RNA, 17 nt, Human
ggagccugcagagcugc

SEQ ID NO: 2453003 - RNA, 15 nt, Human
ggagccuccugcccu

SEQ ID NO: 2453004 - RNA, 22 nt, Human
ggagccugcaaacucacugcuc

SEQ ID NO: 2453005 - RNA, 18 nt, Human
ggagccuguguaacagcu

SEQ ID NO: 2453006 - RNA, 17 nt, Human
ggagccuguguaacagc

SEQ ID NO: 2453007 - RNA, 16 nt, Human
ggagccuguguaacag

SEQ ID NO: 2453008 - RNA, 15 nt, Human
ggagccuguguaaca

SEQ ID NO: 2453009 - RNA, 22 nt, Human
ggagccuguguaacagcuccuu

SEQ ID NO: 2453010 - RNA, 21 nt, Human
ggagccuguguaacagcuccu

SEQ ID NO: 2453011 - RNA, 20 nt, Human
ggagccuguguaacagcucc

SEQ ID NO: 2453012 - RNA, 19 nt, Human
ggagccuguguaacagcuc

SEQ ID NO: 2453013 - RNA, 20 nt, Human
ggagccuuugguucuggcca

SEQ ID NO: 2453014 - RNA, 15 nt, Human
ggagcgcaccugccc

SEQ ID NO: 2453015 - RNA, 16 nt, Human
ggagcgggaccugugg

SEQ ID NO: 2453016 - RNA, 13 nt, Human
ggagcgggaccug

SEQ ID NO: 2453017 - RNA, 20 nt, Human
ggagcggccggccagccccu

SEQ ID NO: 2453018 - RNA, 16 nt, Human
ggagcggaaagcagcu

SEQ ID NO: 2453019 - RNA, 19 nt, Human
ggagcgcaccugcccccug

SEQ ID NO: 2453020 - RNA, 21 nt, Human
ggagcgcaccugcccccuggu

SEQ ID NO: 2453021 - RNA, 23 nt, Human
ggagcgcaccugcccccuggugg

SEQ ID NO: 2453022 - RNA, 14 nt, Human
ggagcggaaagcag

SEQ ID NO: 2453023 - RNA, 15 nt, Human
ggagcggaaagcagc

SEQ ID NO: 2453024 - RNA, 22 nt, Human
ggagcgguggcccugucccucc

SEQ ID NO: 2453025 - RNA, 14 nt, Human
ggagcgugggaggc

SEQ ID NO: 2453026 - RNA, 15 nt, Human
ggagcgguggcccug

SEQ ID NO: 2453027 - RNA, 17 nt, Human
ggagcgggaccuguggc

SEQ ID NO: 2453028 - RNA, 16 nt, Human
ggagcuaacacuggcc

SEQ ID NO: 2453029 - RNA, 17 nt, Human
ggagcuaacacuggccc

SEQ ID NO: 2453030 - RNA, 18 nt, Human
ggagcuaacacuggcccc

SEQ ID NO: 2453031 - RNA, 19 nt, Human
ggagcuaacacuggccccu

SEQ ID NO: 2453032 - RNA, 22 nt, Human
ggagcuaucaggaacagcuaug

SEQ ID NO: 2453033 - RNA, 15 nt, Human
ggagcuaucaggaac

SEQ ID NO: 2453034 - RNA, 20 nt, Human
ggagcucagagagggcaggc

SEQ ID NO: 2453035 - RNA, 17 nt, Human
ggagcucagagagggca

SEQ ID NO: 2453036 - RNA, 14 nt, Human
ggagcucagagagg

SEQ ID NO: 2453037 - RNA, 20 nt, Human
ggagcucacuguggugucug

SEQ ID NO: 2453038 - RNA, 23 nt, Human
ggagcucacuguggugucugugu

SEQ ID NO: 2453039 - RNA, 17 nt, Human
ggagcuccacucugcuu

SEQ ID NO: 2453040 - RNA, 17 nt, Human
ggaccagccuguuggac

SEQ ID NO: 2453041 - RNA, 13 nt, Human
ggaccagcucagg

SEQ ID NO: 2453042 - RNA, 19 nt, Human
ggaccagagcugccaccug

SEQ ID NO: 2453043 - RNA, 15 nt, Human
ggacauuuuuucagu

SEQ ID NO: 2453044 - RNA, 22 nt, Human
ggacagccuguggcggugccug

SEQ ID NO: 2453045 - RNA, 23 nt, Human
ggacagccuguggcggugccugg

SEQ ID NO: 2453046 - RNA, 20 nt, Human
ggacauuugcucauggaauu

SEQ ID NO: 2453047 - RNA, 14 nt, Human
ggaccagagcugcc

SEQ ID NO: 2453048 - RNA, 17 nt, Human
ggacauuugcucaugga

SEQ ID NO: 2453049 - RNA, 17 nt, Human
ggacagccccacccugg

SEQ ID NO: 2453050 - RNA, 21 nt, Human
ggacagccuguggcggugccu

SEQ ID NO: 2453051 - RNA, 17 nt, Human
ggacagcuccuucuguc

SEQ ID NO: 2453052 - RNA, 16 nt, Human
ggacagcuccuucugu

SEQ ID NO: 2453053 - RNA, 15 nt, Human
ggacagcuccuucug

SEQ ID NO: 2453054 - RNA, 11 nt, Human
ggacagcuccu

SEQ ID NO: 2453055 - RNA, 15 nt, Human
ggacagccccuccuc

SEQ ID NO: 2453056 - RNA, 16 nt, Human
ggacagccccuccucc

SEQ ID NO: 2453057 - RNA, 15 nt, Human
ggacagccccacccu

SEQ ID NO: 2453058 - RNA, 16 nt, Human
ggacagccccacccug

SEQ ID NO: 2453059 - RNA, 14 nt, Human
ggacagccccaccc

SEQ ID NO: 2453060 - RNA, 20 nt, Human
ggacagaggggguggccucc

SEQ ID NO: 2453061 - RNA, 17 nt, Human
ggacagaggccugcccg

SEQ ID NO: 2453062 - RNA, 22 nt, Human
ggacagccacggccaggccaga

SEQ ID NO: 2453063 - RNA, 19 nt, Human
gcuuuuauagaggcuagcu

SEQ ID NO: 2453064 - RNA, 22 nt, Human
gcuuuuauagaggcuagcuucu

SEQ ID NO: 2453065 - RNA, 18 nt, Human
gcuuuuauuaaugcacuu

SEQ ID NO: 2453066 - RNA, 15 nt, Human
gcuuuuauuaaugca

SEQ ID NO: 2453067 - RNA, 21 nt, Human
gcuuuuaugugaaacauguuu

SEQ ID NO: 2453068 - RNA, 20 nt, Human
gcuuuuaugugaaacauguu

SEQ ID NO: 2453069 - RNA, 19 nt, Human
gcuuuuaugugaaacaugu

SEQ ID NO: 2453070 - RNA, 15 nt, Human
gcuuuuauuguauaa

SEQ ID NO: 2453071 - RNA, 22 nt, Human
gcuuuuauuaaugcacuuucua

SEQ ID NO: 2453072 - RNA, 19 nt, Human
gcuuuuauuaaugcacuuu

SEQ ID NO: 2453073 - RNA, 12 nt, Human
gcuuuucacugc

SEQ ID NO: 2453074 - RNA, 18 nt, Human
ggacacuccagugccagc

SEQ ID NO: 2453075 - RNA, 16 nt, Human
ggacacuccagugcca

SEQ ID NO: 2453076 - RNA, 15 nt, Human
ggacacuccagugcc

SEQ ID NO: 2453077 - RNA, 14 nt, Human
ggacacuccagugc

SEQ ID NO: 2453078 - RNA, 14 nt, Human
ggacacucagaccu

SEQ ID NO: 2453079 - RNA, 14 nt, Human
ggacacuccuagag

SEQ ID NO: 2453080 - RNA, 21 nt, Human
ggacacuccagugccagcaau

SEQ ID NO: 2453081 - RNA, 15 nt, Human
ggacacuccuagaga

SEQ ID NO: 2453082 - RNA, 16 nt, Human
ggacacuuaauacuac

SEQ ID NO: 2453083 - RNA, 18 nt, Human
ggacacuuaacagaugca

SEQ ID NO: 2453084 - RNA, 16 nt, Human
ggacagaggccugccc

SEQ ID NO: 2453085 - RNA, 15 nt, Human
ggacagaggccugcc

SEQ ID NO: 2453086 - RNA, 14 nt, Human
ggacagaggccugc

SEQ ID NO: 2453087 - RNA, 14 nt, Human
ggacagagccaugc

SEQ ID NO: 2453088 - RNA, 20 nt, Human
ggacagaggccccagccucc

SEQ ID NO: 2453089 - RNA, 23 nt, Human
ggacagaggccccagccucccug

SEQ ID NO: 2453090 - RNA, 16 nt, Human
ggacagaggggguggc

SEQ ID NO: 2453091 - RNA, 15 nt, Human
ggacagaggccccag

SEQ ID NO: 2453092 - RNA, 16 nt, Human
ggacagaggccccagc

SEQ ID NO: 2453093 - RNA, 17 nt, Human
ggacagaggccccagcc

SEQ ID NO: 2453094 - RNA, 18 nt, Human
ggacagaggccccagccu

SEQ ID NO: 2453095 - RNA, 14 nt, Human
ggacagaggcccca

SEQ ID NO: 2453096 - RNA, 20 nt, Human
ggacagagacaccugcaccu

SEQ ID NO: 2453097 - RNA, 21 nt, Human
ggacagagacaccugcaccuc

SEQ ID NO: 2453098 - RNA, 14 nt, Human
ggacagagacaccu

SEQ ID NO: 2453099 - RNA, 17 nt, Human
ggacagagacaccugca

SEQ ID NO: 2453100 - RNA, 18 nt, Human
ggacagagacaccugcac

SEQ ID NO: 2453101 - RNA, 19 nt, Human
ggacagagacaccugcacc

SEQ ID NO: 2453102 - RNA, 20 nt, Human
ggacacuuugaaauguguuu

SEQ ID NO: 2453103 - RNA, 16 nt, Human
ggacacuuccugccua

SEQ ID NO: 2453104 - RNA, 15 nt, Human
ggacacuuccugccu

SEQ ID NO: 2453105 - RNA, 14 nt, Human
ggacacuuccugcc

SEQ ID NO: 2453106 - RNA, 21 nt, Human
ggacacuucccucuguuucuc

SEQ ID NO: 2453107 - RNA, 18 nt, Human
ggacacuucccucuguuu

SEQ ID NO: 2453108 - RNA, 17 nt, Human
ggacacuucccucuguu

SEQ ID NO: 2453109 - RNA, 14 nt, Human
ggacagaagcagcu

SEQ ID NO: 2453110 - RNA, 23 nt, Human
ggacacuuugaaauguguuucug

SEQ ID NO: 2453111 - RNA, 14 nt, Human
ggacagaagaaggc

SEQ ID NO: 2453112 - RNA, 15 nt, Human
ggacagaagcagcuc

SEQ ID NO: 2453113 - RNA, 16 nt, Human
ggacagaagcagcucu

SEQ ID NO: 2453114 - RNA, 17 nt, Human
ggacagaagcagcucuu

SEQ ID NO: 2453115 - RNA, 23 nt, Human
ggacagacucacaaccugaaccu

SEQ ID NO: 2453116 - RNA, 18 nt, Human
ggacugagaaauuuauaa

SEQ ID NO: 2453117 - RNA, 12 nt, Human
ggacugagcccc

SEQ ID NO: 2453118 - RNA, 18 nt, Human
ggacugagccagucccag

SEQ ID NO: 2453119 - RNA, 17 nt, Human
ggacugagccaguccca

SEQ ID NO: 2453120 - RNA, 12 nt, Human
ggacugagccag

SEQ ID NO: 2453121 - RNA, 21 nt, Human
ggacugagggacucugaagcc

SEQ ID NO: 2453122 - RNA, 14 nt, Human
ggacugaggccuga

SEQ ID NO: 2453123 - RNA, 15 nt, Human
ggacugagccccgca

SEQ ID NO: 2453124 - RNA, 13 nt, Human
ggacugaggccug

SEQ ID NO: 2453125 - RNA, 17 nt, Human
ggacugagggacucuga

SEQ ID NO: 2453126 - RNA, 21 nt, Human
ggagaacuccuaggguggcug

SEQ ID NO: 2453127 - RNA, 13 nt, Human
ggagaacuagaga

SEQ ID NO: 2453128 - RNA, 14 nt, Human
ggagaagaacugaa

SEQ ID NO: 2453129 - RNA, 11 nt, Human
ggagaagaacu

SEQ ID NO: 2453130 - RNA, 15 nt, Human
ggagaagagcuguuc

SEQ ID NO: 2453131 - RNA, 22 nt, Human
ggagaagagaggagaggagaga

SEQ ID NO: 2453132 - RNA, 16 nt, Human
ggagaagagaggagag

SEQ ID NO: 2453133 - RNA, 15 nt, Human
ggagaagagaggaga

SEQ ID NO: 2453134 - RNA, 14 nt, Human
ggagaagagaggag

SEQ ID NO: 2453135 - RNA, 13 nt, Human
ggagaagaaguca

SEQ ID NO: 2453136 - RNA, 13 nt, Human
ggagaagagagga

SEQ ID NO: 2453137 - RNA, 22 nt, Human
ggagaagaauuuucagacccca

SEQ ID NO: 2453138 - RNA, 16 nt, Human
ggagaagcugaugcuu

SEQ ID NO: 2453139 - RNA, 19 nt, Human
ggagaagcuccucucccca

SEQ ID NO: 2453140 - RNA, 19 nt, Human
ggagaagccacaggccuga

SEQ ID NO: 2453141 - RNA, 18 nt, Human
ggagaagcaugaaaaagc

SEQ ID NO: 2453142 - RNA, 17 nt, Human
ggagaaggaaggagacu

SEQ ID NO: 2453143 - RNA, 14 nt, Human
ggagaaggaucuag

SEQ ID NO: 2453144 - RNA, 12 nt, Human
ggagaaggaucu

SEQ ID NO: 2453145 - RNA, 13 nt, Human
ggagaagcugaug

SEQ ID NO: 2453146 - RNA, 22 nt, Human
ggagaaggaaggagacucaccu

SEQ ID NO: 2453147 - RNA, 23 nt, Human
ggagaagagcuguucacagccag

SEQ ID NO: 2453148 - RNA, 18 nt, Human
ggagaagccacaggccug

SEQ ID NO: 2453149 - RNA, 19 nt, Human
ggagaagcagugagccgca

SEQ ID NO: 2453150 - RNA, 13 nt, Human
ggagaagcaugaa

SEQ ID NO: 2453151 - RNA, 15 nt, Human
ggagaagcagugagc

SEQ ID NO: 2453152 - RNA, 16 nt, Human
ggagaagcagugagcc

SEQ ID NO: 2453153 - RNA, 18 nt, Human
ggacucuugcucuuucua

SEQ ID NO: 2453154 - RNA, 22 nt, Human
ggagaagucuuagacuugaaau

SEQ ID NO: 2453155 - RNA, 21 nt, Human
ggagaagggauggaggucaca

SEQ ID NO: 2453156 - RNA, 20 nt, Human
ggagaaggaucuagaaugug

SEQ ID NO: 2453157 - RNA, 14 nt, Human
ggagaagggaugga

SEQ ID NO: 2453158 - RNA, 20 nt, Human
ggagacagccccagagcagg

SEQ ID NO: 2453159 - RNA, 21 nt, Human
ggagacagccccagagcaggg

SEQ ID NO: 2453160 - RNA, 23 nt, Human
ggagacagccccagagcagggug

SEQ ID NO: 2453161 - RNA, 22 nt, Human
ggagacagccccagagcagggu

SEQ ID NO: 2453162 - RNA, 14 nt, Human
ggacugagaaauuu

SEQ ID NO: 2453163 - RNA, 16 nt, Human
ggacugacacccaugu

SEQ ID NO: 2453164 - RNA, 16 nt, Human
ggacugaagccugcag

SEQ ID NO: 2453165 - RNA, 17 nt, Human
ggacugaagccugcagg

SEQ ID NO: 2453166 - RNA, 19 nt, Human
ggacugaagccugcaggag

SEQ ID NO: 2453167 - RNA, 19 nt, Human
ggacugaauuguccccagu

SEQ ID NO: 2453168 - RNA, 19 nt, Human
ggacucuuugguggcuuug

SEQ ID NO: 2453169 - RNA, 14 nt, Human
ggacugaagccugc

SEQ ID NO: 2453170 - RNA, 18 nt, Human
ggacugaaaaccucuccu

SEQ ID NO: 2453171 - RNA, 16 nt, Human
ggacugaaaaccucuc

SEQ ID NO: 2453172 - RNA, 17 nt, Human
ggacugaaaaccucucc

SEQ ID NO: 2453173 - RNA, 15 nt, Human
ggacgcucucuggcc

SEQ ID NO: 2453174 - RNA, 16 nt, Human
ggacgcucucuggccu

SEQ ID NO: 2453175 - RNA, 19 nt, Human
ggacgcucucuggccuucg

SEQ ID NO: 2453176 - RNA, 21 nt, Human
ggacucuugcucuuucuacuc

SEQ ID NO: 2453177 - RNA, 13 nt, Human
ggacgcuucugaa

SEQ ID NO: 2453178 - RNA, 23 nt, Human
ggacgcagcaggaggccaggccg

SEQ ID NO: 2453179 - RNA, 17 nt, Human
ggaccuuucagcuguga

SEQ ID NO: 2453180 - RNA, 15 nt, Human
ggaccuuucagcugu

SEQ ID NO: 2453181 - RNA, 19 nt, Human
ggaccuuuagugguggcca

SEQ ID NO: 2453182 - RNA, 12 nt, Human
ggacccagaccc

SEQ ID NO: 2453183 - RNA, 10 nt, Human
ggacccagac

SEQ ID NO: 2453184 - RNA, 19 nt, Human
ggacccaauguaggagcug

SEQ ID NO: 2453185 - RNA, 18 nt, Human
ggaccuugaacuggguac

SEQ ID NO: 2453186 - RNA, 22 nt, Human
ggaccuuuccaccacagccagc

SEQ ID NO: 2453187 - RNA, 19 nt, Human
ggaccuuuccaccacagcc

SEQ ID NO: 2453188 - RNA, 18 nt, Human
ggaccuuuccaccacagc

SEQ ID NO: 2453189 - RNA, 14 nt, Human
ggacgacucugacc

SEQ ID NO: 2453190 - RNA, 22 nt, Human
ggacgcagcaggaggccaggcc

SEQ ID NO: 2453191 - RNA, 20 nt, Human
ggaccuuuccaccacagcca

SEQ ID NO: 2453192 - RNA, 23 nt, Human
ggaccaggcaaugugacuuugca

SEQ ID NO: 2453193 - RNA, 13 nt, Human
ggaccaggcaaug

SEQ ID NO: 2453194 - RNA, 17 nt, Human
ggaccagggcagggcca

SEQ ID NO: 2453195 - RNA, 19 nt, Human
ggaccagucaaccugggca

SEQ ID NO: 2453196 - RNA, 14 nt, Human
ggaccauccuauuu

SEQ ID NO: 2453197 - RNA, 16 nt, Human
ggacccaaugcacaca

SEQ ID NO: 2453198 - RNA, 17 nt, Human
ggaccaucauccuacug

SEQ ID NO: 2453199 - RNA, 15 nt, Human
ggaguccccucaccu

SEQ ID NO: 2453200 - RNA, 13 nt, Human
ggaguccccucac

SEQ ID NO: 2453201 - RNA, 14 nt, Human
ggagucagugccag

SEQ ID NO: 2453202 - RNA, 15 nt, Human
ggagucagugccagg

SEQ ID NO: 2453203 - RNA, 23 nt, Human
ggagucccaccuuggcugcaggg

SEQ ID NO: 2453204 - RNA, 22 nt, Human
ggaugagaguuuuggaugcagu

SEQ ID NO: 2453205 - RNA, 20 nt, Human
ggaugagaguuuuggaugca

SEQ ID NO: 2453206 - RNA, 21 nt, Human
ggaguccccuccccggcccua

SEQ ID NO: 2453207 - RNA, 13 nt, Human
ggaguccccuccc

SEQ ID NO: 2453208 - RNA, 15 nt, Human
ggagucccgucagga

SEQ ID NO: 2453209 - RNA, 20 nt, Human
ggaugagcauggagcuggcc

SEQ ID NO: 2453210 - RNA, 19 nt, Human
ggaugagcauggagcuggc

SEQ ID NO: 2453211 - RNA, 17 nt, Human
ggaugagcauggagcug

SEQ ID NO: 2453212 - RNA, 23 nt, Human
ggaguccccuccccggcccuacc

SEQ ID NO: 2453213 - RNA, 13 nt, Human
ggaugagcauuua

SEQ ID NO: 2453214 - RNA, 22 nt, Human
ggaugaucuaggaagacuuugg

SEQ ID NO: 2453215 - RNA, 18 nt, Human
ggaugaucuaggaagacu

SEQ ID NO: 2453216 - RNA, 16 nt, Human
ggaugaucuaggaaga

SEQ ID NO: 2453217 - RNA, 21 nt, Human
ggaugaggccgcuagaggccu

SEQ ID NO: 2453218 - RNA, 20 nt, Human
ggaugaggccgcuagaggcc

SEQ ID NO: 2453219 - RNA, 15 nt, Human
ggaugagcuggaagg

SEQ ID NO: 2453220 - RNA, 16 nt, Human
ggaugaggugcuggga

SEQ ID NO: 2453221 - RNA, 18 nt, Human
ggaugaggugcugggagg

SEQ ID NO: 2453222 - RNA, 17 nt, Human
ggaugccugguggcagc

SEQ ID NO: 2453223 - RNA, 13 nt, Human
ggaugccuggugg

SEQ ID NO: 2453224 - RNA, 19 nt, Human
ggaugcccaaagaugcagc

SEQ ID NO: 2453225 - RNA, 17 nt, Human
ggaugccccgucccccu

SEQ ID NO: 2453226 - RNA, 18 nt, Human
ggaugccaucugugggca

SEQ ID NO: 2453227 - RNA, 19 nt, Human
ggaugccaucugugggcac

SEQ ID NO: 2453228 - RNA, 22 nt, Human
ggaugcccagggccacucugcc

SEQ ID NO: 2453229 - RNA, 22 nt, Human
ggaugccaauauuaaaucugcu

SEQ ID NO: 2453230 - RNA, 21 nt, Human
ggaugauucagaaauuggaac

SEQ ID NO: 2453231 - RNA, 20 nt, Human
ggaugauucagaaauuggaa

SEQ ID NO: 2453232 - RNA, 16 nt, Human
ggaugauucagaaauu

SEQ ID NO: 2453233 - RNA, 14 nt, Human
ggaugaugccacac

SEQ ID NO: 2453234 - RNA, 18 nt, Human
ggaugcccaaagaugcag

SEQ ID NO: 2453235 - RNA, 18 nt, Human
ggaugaugacuauggaaa

SEQ ID NO: 2453236 - RNA, 23 nt, Human
ggaugaguacccaaaagcucagc

SEQ ID NO: 2453237 - RNA, 17 nt, Human
ggaugaggugcugggag

SEQ ID NO: 2453238 - RNA, 15 nt, Human
ggaugaugccucaug

SEQ ID NO: 2453239 - RNA, 21 nt, Human
ggaugccugguggcagcugcg

SEQ ID NO: 2453240 - RNA, 20 nt, Human
ggaugccugguggcagcugc

SEQ ID NO: 2453241 - RNA, 19 nt, Human
ggaugccugguggcagcug

SEQ ID NO: 2453242 - RNA, 18 nt, Human
ggaugccugguggcagcu

SEQ ID NO: 2453243 - RNA, 22 nt, Human
ggauuauucauuuaaaaugauu

SEQ ID NO: 2453244 - RNA, 21 nt, Human
ggauuauucauuuaaaaugau

SEQ ID NO: 2453245 - RNA, 19 nt, Human
ggauuauucauuuaaaaug

SEQ ID NO: 2453246 - RNA, 17 nt, Human
ggauuauucauuuaaaa

SEQ ID NO: 2453247 - RNA, 15 nt, Human
ggauuauucauuuaa

SEQ ID NO: 2453248 - RNA, 12 nt, Human
ggauuauauuau

SEQ ID NO: 2453249 - RNA, 18 nt, Human
ggaugcccuggagguggc

SEQ ID NO: 2453250 - RNA, 21 nt, Human
ggaugcccuggagguggcuga

SEQ ID NO: 2453251 - RNA, 13 nt, Human
ggaugcccuggag

SEQ ID NO: 2453252 - RNA, 15 nt, Human
ggaugcccuggaggu

SEQ ID NO: 2453253 - RNA, 12 nt, Human
ggaugcccugga

SEQ ID NO: 2453254 - RNA, 23 nt, Human
ggaugcccagggccacucugccu

SEQ ID NO: 2453255 - RNA, 18 nt, Human
ggauuauuuuuucagacc

SEQ ID NO: 2453256 - RNA, 17 nt, Human
ggauuauuuuuucagac

SEQ ID NO: 2453257 - RNA, 16 nt, Human
ggauuauuuuuucaga

SEQ ID NO: 2453258 - RNA, 14 nt, Human
ggauuauuuuuuca

SEQ ID NO: 2453259 - RNA, 13 nt, Human
ggauuauuuuuuc

SEQ ID NO: 2453260 - RNA, 22 nt, Human
ggauuauuuaauaacauuaccu

SEQ ID NO: 2453261 - RNA, 19 nt, Human
ggauuauuuaauaacauua

SEQ ID NO: 2453262 - RNA, 17 nt, Human
ggauuauuuaauaacau

SEQ ID NO: 2453263 - RNA, 20 nt, Human
ggauuauuuuuucagaccga

SEQ ID NO: 2453264 - RNA, 19 nt, Human
ggauuauuuuuucagaccg

SEQ ID NO: 2453265 - RNA, 17 nt, Human
ggauucauuuccugccc

SEQ ID NO: 2453266 - RNA, 16 nt, Human
ggauucauuuccugcc

SEQ ID NO: 2453267 - RNA, 15 nt, Human
ggauucauuuccugc

SEQ ID NO: 2453268 - RNA, 14 nt, Human
ggauucauuuccug

SEQ ID NO: 2453269 - RNA, 16 nt, Human
ggauucauuacagcuu

SEQ ID NO: 2453270 - RNA, 13 nt, Human
ggauucauuuccu

SEQ ID NO: 2453271 - RNA, 21 nt, Human
ggauucaggaauguguggccu

SEQ ID NO: 2453272 - RNA, 13 nt, Human
ggauucaggcugc

SEQ ID NO: 2453273 - RNA, 14 nt, Human
ggauucaggcugcu

SEQ ID NO: 2453274 - RNA, 15 nt, Human
ggauucaggcugcuu

SEQ ID NO: 2453275 - RNA, 20 nt, Human
ggauucuacuuuaagcacua

SEQ ID NO: 2453276 - RNA, 20 nt, Human
ggauuccugacccaggccgc

SEQ ID NO: 2453277 - RNA, 19 nt, Human
ggauuccugacccaggccg

SEQ ID NO: 2453278 - RNA, 16 nt, Human
ggauucugagagcugu

SEQ ID NO: 2453279 - RNA, 23 nt, Human
ggauucuacuuuaagcacuacau

SEQ ID NO: 2453280 - RNA, 21 nt, Human
ggauucuggccuagucccuuc

SEQ ID NO: 2453281 - RNA, 13 nt, Human
ggauucugggagg

SEQ ID NO: 2453282 - RNA, 22 nt, Human
ggauucccaccaaggucuucag

SEQ ID NO: 2453283 - RNA, 18 nt, Human
ggauucauuuccugcccu

SEQ ID NO: 2453284 - RNA, 16 nt, Human
ggauuccugacccagg

SEQ ID NO: 2453285 - RNA, 15 nt, Human
ggauuccugacccag

SEQ ID NO: 2453286 - RNA, 14 nt, Human
ggauuccugaccca

SEQ ID NO: 2453287 - RNA, 13 nt, Human
ggauuccugaccc

SEQ ID NO: 2453288 - RNA, 23 nt, Human
ggauucccaccaaggucuucagc

SEQ ID NO: 2453289 - RNA, 20 nt, Human
ggauugaucggagccuccuc

SEQ ID NO: 2453290 - RNA, 18 nt, Human
ggcaagaaggaauugacu

SEQ ID NO: 2453291 - RNA, 13 nt, Human
ggauugagucugu

SEQ ID NO: 2453292 - RNA, 16 nt, Human
ggauugaagcccucca

SEQ ID NO: 2453293 - RNA, 14 nt, Human
ggauugaagcccuc

SEQ ID NO: 2453294 - RNA, 17 nt, Human
ggcaagcaccuccugcc

SEQ ID NO: 2453295 - RNA, 14 nt, Human
ggcaagaggggugg

SEQ ID NO: 2453296 - RNA, 12 nt, Human
ggcaagaggggu

SEQ ID NO: 2453297 - RNA, 12 nt, Human
ggcaagauuuuc

SEQ ID NO: 2453298 - RNA, 16 nt, Human
ggcaagagggggugga

SEQ ID NO: 2453299 - RNA, 22 nt, Human
ggcaagagcccccuugacaccg

SEQ ID NO: 2453300 - RNA, 19 nt, Human
ggcaagagcccccuugaca

SEQ ID NO: 2453301 - RNA, 23 nt, Human
ggauucuguacaugcauugagcu

SEQ ID NO: 2453302 - RNA, 13 nt, Human
ggauucuuggccc

SEQ ID NO: 2453303 - RNA, 18 nt, Human
ggauucuuuccauuauga

SEQ ID NO: 2453304 - RNA, 21 nt, Human
ggauucuuccucccucccucu

SEQ ID NO: 2453305 - RNA, 19 nt, Human
ggauucugguuccaggguc

SEQ ID NO: 2453306 - RNA, 18 nt, Human
ggauucugguuccagggu

SEQ ID NO: 2453307 - RNA, 14 nt, Human
ggauucugguucca

SEQ ID NO: 2453308 - RNA, 19 nt, Human
ggauucugggaggaagcag

SEQ ID NO: 2453309 - RNA, 18 nt, Human
ggcaagcuagaaccugga

SEQ ID NO: 2453310 - RNA, 19 nt, Human
ggcaagccccugcccaucu

SEQ ID NO: 2453311 - RNA, 19 nt, Human
ggcaagauuuuccuuuuuu

SEQ ID NO: 2453312 - RNA, 20 nt, Human
ggcaagcuagaaccuggagg

SEQ ID NO: 2453313 - RNA, 22 nt, Human
ggcaagcugugacuucuccagg

SEQ ID NO: 2453314 - RNA, 14 nt, Human
ggcaaggacacaga

SEQ ID NO: 2453315 - RNA, 23 nt, Human
ggcaagcugugacuucuccaggu

SEQ ID NO: 2453316 - RNA, 16 nt, Human
ggcaaggacacagaug

SEQ ID NO: 2453317 - RNA, 22 nt, Human
ggcaagcuuggcuguagaagga

SEQ ID NO: 2453318 - RNA, 19 nt, Human
ggcaagcaccuccugccuc

SEQ ID NO: 2453319 - RNA, 18 nt, Human
ggcaagcaccuccugccu

SEQ ID NO: 2453320 - RNA, 22 nt, Human
ggcaaggcaggugccuccaggu

SEQ ID NO: 2453321 - RNA, 14 nt, Human
ggcaaggcaggugc

SEQ ID NO: 2453322 - RNA, 13 nt, Human
ggcaaggcaggug

SEQ ID NO: 2453323 - RNA, 12 nt, Human
ggcaaggcaggu

SEQ ID NO: 2453324 - RNA, 17 nt, Human
ggcaccagcagccugga

SEQ ID NO: 2453325 - RNA, 17 nt, Human
ggcaccagggguuucuc

SEQ ID NO: 2453326 - RNA, 21 nt, Human
ggcacucacagaccuggagcc

SEQ ID NO: 2453327 - RNA, 17 nt, Human
ggcacucacagaccugg

SEQ ID NO: 2453328 - RNA, 23 nt, Human
ggcacucaaugcagccagaccua

SEQ ID NO: 2453329 - RNA, 18 nt, Human
ggcacucaaugcagccag

SEQ ID NO: 2453330 - RNA, 20 nt, Human
ggcacucagaagacacugau

SEQ ID NO: 2453331 - RNA, 19 nt, Human
ggcacucagaagacacuga

SEQ ID NO: 2453332 - RNA, 18 nt, Human
ggcacucagaagacacug

SEQ ID NO: 2453333 - RNA, 20 nt, Human
ggcacccacaagugccacug

SEQ ID NO: 2453334 - RNA, 20 nt, Human
ggcacccggccccugcuggu

SEQ ID NO: 2453335 - RNA, 19 nt, Human
ggcacccggccccugcugg

SEQ ID NO: 2453336 - RNA, 18 nt, Human
ggcacccggccccugcug

SEQ ID NO: 2453337 - RNA, 20 nt, Human
ggcacccaccaucaugucug

SEQ ID NO: 2453338 - RNA, 21 nt, Human
ggcagagguugcagugagccg

SEQ ID NO: 2453339 - RNA, 18 nt, Human
ggcagagguucauuucaa

SEQ ID NO: 2453340 - RNA, 17 nt, Human
ggcagagcuggcucuga

SEQ ID NO: 2453341 - RNA, 16 nt, Human
ggcagagcuggcucug

SEQ ID NO: 2453342 - RNA, 19 nt, Human
ggcagagcuggcucugagc

SEQ ID NO: 2453343 - RNA, 19 nt, Human
ggcagaggcuggaggcagg

SEQ ID NO: 2453344 - RNA, 21 nt, Human
ggcagaggcuggaggcagggc

SEQ ID NO: 2453345 - RNA, 19 nt, Human
ggcagagggcagaggcugg

SEQ ID NO: 2453346 - RNA, 20 nt, Human
ggcagagggcagaggcugga

SEQ ID NO: 2453347 - RNA, 22 nt, Human
ggcagaggcuggaggcagggcc

SEQ ID NO: 2453348 - RNA, 23 nt, Human
ggcagaggcuggaggcagggccu

SEQ ID NO: 2453349 - RNA, 14 nt, Human
ggcagagggcagag

SEQ ID NO: 2453350 - RNA, 16 nt, Human
ggcagagggcagaggc

SEQ ID NO: 2453351 - RNA, 23 nt, Human
ggcacucacagaccuggagcccc

SEQ ID NO: 2453352 - RNA, 22 nt, Human
ggcacucacagaccuggagccc

SEQ ID NO: 2453353 - RNA, 22 nt, Human
ggcagagcagagaccaucccug

SEQ ID NO: 2453354 - RNA, 12 nt, Human
ggcagagcccaa

SEQ ID NO: 2453355 - RNA, 16 nt, Human
ggcagagcccaaggga

SEQ ID NO: 2453356 - RNA, 16 nt, Human
ggcagagccgggaagc

SEQ ID NO: 2453357 - RNA, 22 nt, Human
ggcagagccuuuggaugaccag

SEQ ID NO: 2453358 - RNA, 16 nt, Human
ggccaggcccucugcc

SEQ ID NO: 2453359 - RNA, 15 nt, Human
ggccaggcccucugc

SEQ ID NO: 2453360 - RNA, 16 nt, Human
ggccaugcugaaggga

SEQ ID NO: 2453361 - RNA, 14 nt, Human
ggccaugccugccc

SEQ ID NO: 2453362 - RNA, 13 nt, Human
ggccaugccugcc

SEQ ID NO: 2453363 - RNA, 17 nt, Human
ggccaggcccucugccc

SEQ ID NO: 2453364 - RNA, 14 nt, Human
ggccaggcccucug

SEQ ID NO: 2453365 - RNA, 13 nt, Human
ggccaggagccuc

SEQ ID NO: 2453366 - RNA, 15 nt, Human
ggccaggacugagcc

SEQ ID NO: 2453367 - RNA, 20 nt, Human
ggccaggacugagccccgca

SEQ ID NO: 2453368 - RNA, 13 nt, Human
ggccaggacugag

SEQ ID NO: 2453369 - RNA, 11 nt, Human
ggccaggagcc

SEQ ID NO: 2453370 - RNA, 12 nt, Human
ggcccaccuggc

SEQ ID NO: 2453371 - RNA, 15 nt, Human
ggcccaccagagcug

SEQ ID NO: 2453372 - RNA, 20 nt, Human
ggcccacagggaacccugcu

SEQ ID NO: 2453373 - RNA, 20 nt, Human
ggcccacagcucccacccca

SEQ ID NO: 2453374 - RNA, 15 nt, Human
ggcccacagcuccca

SEQ ID NO: 2453375 - RNA, 17 nt, Human
ggcccacagcucccacc

SEQ ID NO: 2453376 - RNA, 18 nt, Human
ggcccacagcucccaccc

SEQ ID NO: 2453377 - RNA, 19 nt, Human
ggcccacagcucccacccc

SEQ ID NO: 2453378 - RNA, 22 nt, Human
ggccaugcugaggccugggccg

SEQ ID NO: 2453379 - RNA, 19 nt, Human
ggccaugcugaggccuggg

SEQ ID NO: 2453380 - RNA, 18 nt, Human
ggccaugcugaggccugg

SEQ ID NO: 2453381 - RNA, 15 nt, Human
ggccaugcugaggcc

SEQ ID NO: 2453382 - RNA, 14 nt, Human
ggccaugcugaggc

SEQ ID NO: 2453383 - RNA, 13 nt, Human
ggccaugcugagg

SEQ ID NO: 2453384 - RNA, 17 nt, Human
ggccaugcugaagggac

SEQ ID NO: 2453385 - RNA, 14 nt, Human
ggccauggagagcu

SEQ ID NO: 2453386 - RNA, 17 nt, Human
ggccauggagagcugga

SEQ ID NO: 2453387 - RNA, 16 nt, Human
ggccauggagagcugg

SEQ ID NO: 2453388 - RNA, 23 nt, Human
ggcccacagcaggugcugagcaa

SEQ ID NO: 2453389 - RNA, 19 nt, Human
ggcccacagcaggugcuga

SEQ ID NO: 2453390 - RNA, 13 nt, Human
ggcccacagcucc

SEQ ID NO: 2453391 - RNA, 14 nt, Human
ggcccacagcuccc

SEQ ID NO: 2453392 - RNA, 14 nt, Human
ggcauguuccucug

SEQ ID NO: 2453393 - RNA, 16 nt, Human
ggccacacucagcaca

SEQ ID NO: 2453394 - RNA, 17 nt, Human
ggcauguguauguuccc

SEQ ID NO: 2453395 - RNA, 21 nt, Human
ggccacacucagcacaaggcc

SEQ ID NO: 2453396 - RNA, 22 nt, Human
ggccacagaaaauucuucucca

SEQ ID NO: 2453397 - RNA, 20 nt, Human
ggcauguucucugaggacac

SEQ ID NO: 2453398 - RNA, 20 nt, Human
ggcauguggccuguggccug

SEQ ID NO: 2453399 - RNA, 19 nt, Human
ggcauguggccuguggccu

SEQ ID NO: 2453400 - RNA, 23 nt, Human
ggcauguguuuacuuuauguuac

SEQ ID NO: 2453401 - RNA, 17 nt, Human
ggcauguggccuguggc

SEQ ID NO: 2453402 - RNA, 16 nt, Human
ggcauguggccugugg

SEQ ID NO: 2453403 - RNA, 15 nt, Human
ggcauguggccugug

SEQ ID NO: 2453404 - RNA, 13 nt, Human
ggcauguggccug

SEQ ID NO: 2453405 - RNA, 16 nt, Human
ggccaccuccccagca

SEQ ID NO: 2453406 - RNA, 13 nt, Human
ggccaccucccca

SEQ ID NO: 2453407 - RNA, 17 nt, Human
ggccaccuccccagcau

SEQ ID NO: 2453408 - RNA, 13 nt, Human
ggccaccucucca

SEQ ID NO: 2453409 - RNA, 11 nt, Human
ggccaccucuc

SEQ ID NO: 2453410 - RNA, 16 nt, Human
ggccacaucaaagagg

SEQ ID NO: 2453411 - RNA, 16 nt, Human
ggccacaguuguuuga

SEQ ID NO: 2453412 - RNA, 20 nt, Human
ggccacaguagucuugauga

SEQ ID NO: 2453413 - RNA, 14 nt, Human
ggccacaguuguuu

SEQ ID NO: 2453414 - RNA, 23 nt, Human
ggccacagggcgagacuccgucu

SEQ ID NO: 2453415 - RNA, 20 nt, Human
ggccacagggcgagacuccg

SEQ ID NO: 2453416 - RNA, 22 nt, Human
ggccacagaggacucacuugcc

SEQ ID NO: 2453417 - RNA, 20 nt, Human
ggccaccucuccaagggcuu

SEQ ID NO: 2453418 - RNA, 18 nt, Human
ggccaccucuccaagggc

SEQ ID NO: 2453419 - RNA, 15 nt, Human
ggccaccucuccaag

SEQ ID NO: 2453420 - RNA, 14 nt, Human
ggccaccucuccaa

SEQ ID NO: 2453421 - RNA, 23 nt, Human
ggccaccucugcggaccccagcu

SEQ ID NO: 2453422 - RNA, 12 nt, Human
ggccaccucugc

SEQ ID NO: 2453423 - RNA, 21 nt, Human
ggccaccugaggugggcccag

SEQ ID NO: 2453424 - RNA, 20 nt, Human
ggccaccugaggugggccca

SEQ ID NO: 2453425 - RNA, 19 nt, Human
ggccaccugaggugggccc

SEQ ID NO: 2453426 - RNA, 17 nt, Human
ggccaccugaggugggc

SEQ ID NO: 2453427 - RNA, 16 nt, Human
ggccaccugagguggg

SEQ ID NO: 2453428 - RNA, 20 nt, Human
ggccacugugaagagaacca

SEQ ID NO: 2453429 - RNA, 15 nt, Human
ggccacuucugggug

SEQ ID NO: 2453430 - RNA, 13 nt, Human
ggccaccugcccc

SEQ ID NO: 2453431 - RNA, 23 nt, Human
ggccaccugaggugggcccagga

SEQ ID NO: 2453432 - RNA, 22 nt, Human
ggccaccugaggugggcccagg

SEQ ID NO: 2453433 - RNA, 18 nt, Human
ggccagacacaggcccuc

SEQ ID NO: 2453434 - RNA, 15 nt, Human
ggccagacaugccac

SEQ ID NO: 2453435 - RNA, 15 nt, Human
ggccaggacaggccc

SEQ ID NO: 2453436 - RNA, 16 nt, Human
ggccaggacaggcccg

SEQ ID NO: 2453437 - RNA, 16 nt, Human
ggccagacacaggccc

SEQ ID NO: 2453438 - RNA, 17 nt, Human
ggccagacacaggcccu

SEQ ID NO: 2453439 - RNA, 21 nt, Human
ggccacuucuggguggggcag

SEQ ID NO: 2453440 - RNA, 15 nt, Human
ggccacuuuugacua

SEQ ID NO: 2453441 - RNA, 24 nt, Human
ggcagcugcgguccacccaggagc

SEQ ID NO: 2453442 - RNA, 23 nt, Human
ggcagcugcgguccacccaggag

SEQ ID NO: 2453443 - RNA, 12 nt, Human
ggcaggguccua

SEQ ID NO: 2453444 - RNA, 18 nt, Human
ggcagggucucacucugu

SEQ ID NO: 2453445 - RNA, 17 nt, Human
ggcagggucucacucug

SEQ ID NO: 2453446 - RNA, 17 nt, Human
ggcagguuggugggggc

SEQ ID NO: 2453447 - RNA, 14 nt, Human
ggcaguaauaaaaa

SEQ ID NO: 2453448 - RNA, 15 nt, Human
ggcagggucaggaga

SEQ ID NO: 2453449 - RNA, 17 nt, Human
ggcagggucaggagagg

SEQ ID NO: 2453450 - RNA, 21 nt, Human
ggcagaguugaagacagagcu

SEQ ID NO: 2453451 - RNA, 19 nt, Human
ggcagaguugaagacagag

SEQ ID NO: 2453452 - RNA, 17 nt, Human
ggcagaguugaagacag

SEQ ID NO: 2453453 - RNA, 18 nt, Human
ggcagagguuguggugag

SEQ ID NO: 2453454 - RNA, 21 nt, Human
ggcagcugcgguccacccagg

SEQ ID NO: 2453455 - RNA, 14 nt, Human
ggcagcugccagag

SEQ ID NO: 2453456 - RNA, 15 nt, Human
ggcagcugccagaga

SEQ ID NO: 2453457 - RNA, 16 nt, Human
ggcagcugccagagaa

SEQ ID NO: 2453458 - RNA, 17 nt, Human
ggcagcugccagagaag

SEQ ID NO: 2453459 - RNA, 17 nt, Human
ggcagcugaccauggaa

SEQ ID NO: 2453460 - RNA, 11 nt, Human
ggcagcugcca

SEQ ID NO: 2453461 - RNA, 12 nt, Human
ggcagcugccac

SEQ ID NO: 2453462 - RNA, 21 nt, Human
ggcagaguucuauaauguaaa

SEQ ID NO: 2453463 - RNA, 21 nt, Human
ggcagcugaacuauuggaggg

SEQ ID NO: 2453464 - RNA, 22 nt, Human
ggcaugacacgaauauugcuga

SEQ ID NO: 2453465 - RNA, 20 nt, Human
ggcaguggagucggaagggc

SEQ ID NO: 2453466 - RNA, 19 nt, Human
ggcagucgggggcuggccu

SEQ ID NO: 2453467 - RNA, 18 nt, Human
ggcagucgggggcuggcc

SEQ ID NO: 2453468 - RNA, 15 nt, Human
ggcagucgggggcug

SEQ ID NO: 2453469 - RNA, 14 nt, Human
ggcagucgggggcu

SEQ ID NO: 2453470 - RNA, 23 nt, Human
ggcagucauucagcaccagagca

SEQ ID NO: 2453471 - RNA, 19 nt, Human
ggcagucgauagagcugua

SEQ ID NO: 2453472 - RNA, 22 nt, Human
ggcagucauucagcaccagagc

SEQ ID NO: 2453473 - RNA, 21 nt, Human
ggcaguagaaggucggaggcu

SEQ ID NO: 2453474 - RNA, 20 nt, Human
ggcagucauuggcugucucc

SEQ ID NO: 2453475 - RNA, 19 nt, Human
ggcagucaccugcccagau

SEQ ID NO: 2453476 - RNA, 23 nt, Human
ggcaguagcuguggugagguggg

SEQ ID NO: 2453477 - RNA, 23 nt, Human
ggcaugugaugagaggaaaucac

SEQ ID NO: 2453478 - RNA, 18 nt, Human
ggcaugugaugagaggaa

SEQ ID NO: 2453479 - RNA, 22 nt, Human
ggcaugguggcgcaagccugua

SEQ ID NO: 2453480 - RNA, 20 nt, Human
ggcauggggugggccucugg

SEQ ID NO: 2453481 - RNA, 21 nt, Human
ggcaugguggcgcaagccugu

SEQ ID NO: 2453482 - RNA, 18 nt, Human
ggcauguauuggccugga

SEQ ID NO: 2453483 - RNA, 17 nt, Human
ggcauguauuggccugg

SEQ ID NO: 2453484 - RNA, 16 nt, Human
ggcauguauuggccug

SEQ ID NO: 2453485 - RNA, 15 nt, Human
ggcauguauuggccu

SEQ ID NO: 2453486 - RNA, 20 nt, Human
ggcauguauuggccuggagg

SEQ ID NO: 2453487 - RNA, 19 nt, Human
ggcauguauuggccuggag

SEQ ID NO: 2453488 - RNA, 21 nt, Human
ggcauguauuggccuggaggu

SEQ ID NO: 2453489 - RNA, 21 nt, Human
ggcauggggugggccucuggu

SEQ ID NO: 2453490 - RNA, 19 nt, Human
ggcauggggugggccucug

SEQ ID NO: 2453491 - RNA, 21 nt, Human
ggcaugccccggccaccucug

SEQ ID NO: 2453492 - RNA, 19 nt, Human
ggcaugguggcgcaagccu

SEQ ID NO: 2453493 - RNA, 19 nt, Human
ggcaugguacggagauguu

SEQ ID NO: 2453494 - RNA, 20 nt, Human
ggcaugccccggccaccucu

SEQ ID NO: 2453495 - RNA, 19 nt, Human
ggcaugccccggccaccuc

SEQ ID NO: 2453496 - RNA, 18 nt, Human
ggcaugccccggccaccu

SEQ ID NO: 2453497 - RNA, 15 nt, Human
ggcaugccccggcca

SEQ ID NO: 2453498 - RNA, 22 nt, Human
ggcaugccccggccaccucugc

SEQ ID NO: 2453499 - RNA, 18 nt, Human
ggcauggggugggccucu

SEQ ID NO: 2453500 - RNA, 14 nt, Human
ggcaugagggauca

SEQ ID NO: 2453501 - RNA, 19 nt, Human
ggcaugagggaucacaggg

SEQ ID NO: 2453502 - RNA, 16 nt, Human
ggcccagagcaggaag

SEQ ID NO: 2453503 - RNA, 14 nt, Human
ggcccagagcagga

SEQ ID NO: 2453504 - RNA, 15 nt, Human
ggcccaccuggccac

SEQ ID NO: 2453505 - RNA, 14 nt, Human
ggcccaccuggcca

SEQ ID NO: 2453506 - RNA, 12 nt, Human
ggcccagagccc

SEQ ID NO: 2453507 - RNA, 13 nt, Human
ggcccagagccca

SEQ ID NO: 2453508 - RNA, 14 nt, Human
ggcccagagcccag

SEQ ID NO: 2453509 - RNA, 15 nt, Human
ggcccagagcccagc

SEQ ID NO: 2453510 - RNA, 16 nt, Human
ggcccagagcccagcu

SEQ ID NO: 2453511 - RNA, 17 nt, Human
ggcccagagcccagcuc

SEQ ID NO: 2453512 - RNA, 14 nt, Human
ggcccagagggccu

SEQ ID NO: 2453513 - RNA, 18 nt, Human
ggcccagagcccagcucc

SEQ ID NO: 2453514 - RNA, 19 nt, Human
ggcccagagcccagcucca

SEQ ID NO: 2453515 - RNA, 19 nt, Human
ggcccagagggccugcaag

SEQ ID NO: 2453516 - RNA, 17 nt, Human
ggcccagagggccugca

SEQ ID NO: 2453517 - RNA, 20 nt, Human
ggcccagagggccugcaagg

SEQ ID NO: 2453518 - RNA, 20 nt, Human
ggcccagcauugcugguucu

SEQ ID NO: 2453519 - RNA, 15 nt, Human
ggccggcgagcccug

SEQ ID NO: 2453520 - RNA, 17 nt, Human
ggcccagcauugcuggu

SEQ ID NO: 2453521 - RNA, 15 nt, Human
ggcccagcauugcug

SEQ ID NO: 2453522 - RNA, 22 nt, Human
ggcccagaucuggucccuugca

SEQ ID NO: 2453523 - RNA, 17 nt, Human
ggccuaaaaguaaacau

SEQ ID NO: 2453524 - RNA, 21 nt, Human
ggccguugauguuggcuggga

SEQ ID NO: 2453525 - RNA, 19 nt, Human
ggccguugauguuggcugg

SEQ ID NO: 2453526 - RNA, 17 nt, Human
ggccgugggccuggggu

SEQ ID NO: 2453527 - RNA, 13 nt, Human
ggccguuggccac

SEQ ID NO: 2453528 - RNA, 16 nt, Human
ggccuaaaaguaaaca

SEQ ID NO: 2453529 - RNA, 14 nt, Human
ggccgugggccugg

SEQ ID NO: 2453530 - RNA, 16 nt, Human
ggccguggcugcccac

SEQ ID NO: 2453531 - RNA, 13 nt, Human
ggccguggcugcc

SEQ ID NO: 2453532 - RNA, 22 nt, Human
ggccgggaccccgagccuggcu

SEQ ID NO: 2453533 - RNA, 23 nt, Human
ggccgggaccccgagccuggcuc

SEQ ID NO: 2453534 - RNA, 17 nt, Human
ggccggcgagcccugug

SEQ ID NO: 2453535 - RNA, 18 nt, Human
ggccggcgagcccugugg

SEQ ID NO: 2453536 - RNA, 22 nt, Human
ggccggcuucaugccagcuacu

SEQ ID NO: 2453537 - RNA, 15 nt, Human
ggccgggagccugau

SEQ ID NO: 2453538 - RNA, 22 nt, Human
ggccucaagugauucuccugcc

SEQ ID NO: 2453539 - RNA, 14 nt, Human
ggccucaagugauu

SEQ ID NO: 2453540 - RNA, 21 nt, Human
ggccuccguccaggagccugg

SEQ ID NO: 2453541 - RNA, 12 nt, Human
ggccucaagauc

SEQ ID NO: 2453542 - RNA, 22 nt, Human
ggccucaacccucccucagccc

SEQ ID NO: 2453543 - RNA, 23 nt, Human
ggccucaacccucccucagcccc

SEQ ID NO: 2453544 - RNA, 18 nt, Human
ggccucaagaucaaugaa

SEQ ID NO: 2453545 - RNA, 22 nt, Human
ggccuccucacaacaugguguc

SEQ ID NO: 2453546 - RNA, 15 nt, Human
ggccucaaggacuug

SEQ ID NO: 2453547 - RNA, 18 nt, Human
ggccuccucuguccaggg

SEQ ID NO: 2453548 - RNA, 20 nt, Human
ggccuagcauacguacacau

SEQ ID NO: 2453549 - RNA, 22 nt, Human
ggccuagcauacguacacauuu

SEQ ID NO: 2453550 - RNA, 21 nt, Human
ggccucaacccucccucagcc

SEQ ID NO: 2453551 - RNA, 17 nt, Human
ggccuagauccacacac

SEQ ID NO: 2453552 - RNA, 23 nt, Human
ggccuagauccacacacagagga

SEQ ID NO: 2453553 - RNA, 20 nt, Human
ggccucucuggccucccacc

SEQ ID NO: 2453554 - RNA, 19 nt, Human
ggccucucuggccucccac

SEQ ID NO: 2453555 - RNA, 17 nt, Human
ggccucucuggccuccc

SEQ ID NO: 2453556 - RNA, 16 nt, Human
ggccucucuggccucc

SEQ ID NO: 2453557 - RNA, 15 nt, Human
ggccucucuggccuc

SEQ ID NO: 2453558 - RNA, 13 nt, Human
ggccucucuggcc

SEQ ID NO: 2453559 - RNA, 22 nt, Human
ggccucuaaccccaggccccga

SEQ ID NO: 2453560 - RNA, 20 nt, Human
ggccucuaaccccaggcccc

SEQ ID NO: 2453561 - RNA, 19 nt, Human
ggccucuaaccccaggccc

SEQ ID NO: 2453562 - RNA, 18 nt, Human
ggccucuaaccccaggcc

SEQ ID NO: 2453563 - RNA, 17 nt, Human
ggccucuaaccccaggc

SEQ ID NO: 2453564 - RNA, 16 nt, Human
ggccucuaaccccagg

SEQ ID NO: 2453565 - RNA, 18 nt, Human
ggccucgccuggccugag

SEQ ID NO: 2453566 - RNA, 19 nt, Human
ggccucuccuuguggccug

SEQ ID NO: 2453567 - RNA, 20 nt, Human
ggccucucauuccagaggaa

SEQ ID NO: 2453568 - RNA, 14 nt, Human
ggccuccugugugu

SEQ ID NO: 2453569 - RNA, 17 nt, Human
ggccuccucccuuagcu

SEQ ID NO: 2453570 - RNA, 19 nt, Human
ggccuccucuguccagggc

SEQ ID NO: 2453571 - RNA, 20 nt, Human
ggccucgguguggagaagcg

SEQ ID NO: 2453572 - RNA, 17 nt, Human
ggccucgccuggccuga

SEQ ID NO: 2453573 - RNA, 16 nt, Human
ggccucgccuggccug

SEQ ID NO: 2453574 - RNA, 15 nt, Human
ggccucgccuggccu

SEQ ID NO: 2453575 - RNA, 14 nt, Human
ggccucgccuggcc

SEQ ID NO: 2453576 - RNA, 14 nt, Human
ggccuggccugagc

SEQ ID NO: 2453577 - RNA, 13 nt, Human
ggccuggccugag

SEQ ID NO: 2453578 - RNA, 10 nt, Human
ggccuggccu

SEQ ID NO: 2453579 - RNA, 23 nt, Human
ggccuggccccucagggucccug

SEQ ID NO: 2453580 - RNA, 18 nt, Human
ggccuggccccucagggu

SEQ ID NO: 2453581 - RNA, 17 nt, Human
ggccuggccccucaggg

SEQ ID NO: 2453582 - RNA, 15 nt, Human
ggccuggccccucag

SEQ ID NO: 2453583 - RNA, 14 nt, Human
ggccuggccccuca

SEQ ID NO: 2453584 - RNA, 15 nt, Human
ggccugagccuggcc

SEQ ID NO: 2453585 - RNA, 16 nt, Human
ggccugagccuggcca

SEQ ID NO: 2453586 - RNA, 13 nt, Human
ggccuggccccuc

SEQ ID NO: 2453587 - RNA, 22 nt, Human
ggccugagauuucaucugcucu

SEQ ID NO: 2453588 - RNA, 20 nt, Human
ggccugagauuucaucugcu

SEQ ID NO: 2453589 - RNA, 19 nt, Human
ggccucugcacuccccugc

SEQ ID NO: 2453590 - RNA, 18 nt, Human
ggccucugcacuccccug

SEQ ID NO: 2453591 - RNA, 22 nt, Human
ggccucugcacuccccugcugg

SEQ ID NO: 2453592 - RNA, 16 nt, Human
ggccugacucucagca

SEQ ID NO: 2453593 - RNA, 23 nt, Human
ggccugaaugcuuauagguggcc

SEQ ID NO: 2453594 - RNA, 23 nt, Human
ggccucugccccgucucaugagg

SEQ ID NO: 2453595 - RNA, 18 nt, Human
ggccugagcgcuccugcc

SEQ ID NO: 2453596 - RNA, 16 nt, Human
ggccuggccugagcug

SEQ ID NO: 2453597 - RNA, 15 nt, Human
ggccuggccugagcu

SEQ ID NO: 2453598 - RNA, 23 nt, Human
ggccugggggcugggcagaggaa

SEQ ID NO: 2453599 - RNA, 18 nt, Human
ggccugggguaccaagag

SEQ ID NO: 2453600 - RNA, 11 nt, Human
ggccugggccc

SEQ ID NO: 2453601 - RNA, 15 nt, Human
ggccugggccgcugc

SEQ ID NO: 2453602 - RNA, 14 nt, Human
ggccugggccagag

SEQ ID NO: 2453603 - RNA, 21 nt, Human
ggccuggccggcaaccccagu

SEQ ID NO: 2453604 - RNA, 14 nt, Human
ggccugggucugug

SEQ ID NO: 2453605 - RNA, 21 nt, Human
ggccugggugcuggcugccca

SEQ ID NO: 2453606 - RNA, 19 nt, Human
ggccugguguucuguggga

SEQ ID NO: 2453607 - RNA, 21 nt, Human
ggccugguccaugauggaguc

SEQ ID NO: 2453608 - RNA, 11 nt, Human
ggccuggguuu

SEQ ID NO: 2453609 - RNA, 19 nt, Human
ggccugggucugugucucu

SEQ ID NO: 2453610 - RNA, 17 nt, Human
ggcgcacccuccccucc

SEQ ID NO: 2453611 - RNA, 16 nt, Human
ggcgcacccuccccuc

SEQ ID NO: 2453612 - RNA, 12 nt, Human
ggcgcacuguga

SEQ ID NO: 2453613 - RNA, 18 nt, Human
ggcgcacccuccccuccc

SEQ ID NO: 2453614 - RNA, 24 nt, Human
ggcgcagcauauucaggaagcuca

SEQ ID NO: 2453615 - RNA, 23 nt, Human
ggcgcagcauauucaggaagcuc

SEQ ID NO: 2453616 - RNA, 12 nt, Human
ggcgcccaccuc

SEQ ID NO: 2453617 - RNA, 15 nt, Human
ggcgccaccauccug

SEQ ID NO: 2453618 - RNA, 17 nt, Human
ggcgcagugccucuggu

SEQ ID NO: 2453619 - RNA, 16 nt, Human
ggcgcagugccucugg

SEQ ID NO: 2453620 - RNA, 17 nt, Human
ggcgcagccaaggccga

SEQ ID NO: 2453621 - RNA, 11 nt, Human
ggcgcaggagg

SEQ ID NO: 2453622 - RNA, 15 nt, Human
ggcgcagccaaggcc

SEQ ID NO: 2453623 - RNA, 14 nt, Human
ggcgcagccaaggc

SEQ ID NO: 2453624 - RNA, 22 nt, Human
ggcgcacuuuccuccuggcaga

SEQ ID NO: 2453625 - RNA, 14 nt, Human
ggcuccagaaaugu

SEQ ID NO: 2453626 - RNA, 15 nt, Human
ggcucccauucacuc

SEQ ID NO: 2453627 - RNA, 18 nt, Human
ggcucccauucacucuuc

SEQ ID NO: 2453628 - RNA, 19 nt, Human
ggcucccaugaccauacug

SEQ ID NO: 2453629 - RNA, 16 nt, Human
ggcuccagagggcacu

SEQ ID NO: 2453630 - RNA, 14 nt, Human
ggcuccaggcuccu

SEQ ID NO: 2453631 - RNA, 16 nt, Human
ggcucucaggccagcu

SEQ ID NO: 2453632 - RNA, 15 nt, Human
ggcucucaggccagc

SEQ ID NO: 2453633 - RNA, 22 nt, Human
ggcucccauucacucuuccaga

SEQ ID NO: 2453634 - RNA, 12 nt, Human
ggcuccccucua

SEQ ID NO: 2453635 - RNA, 21 nt, Human
ggcuccccauguguccugguu

SEQ ID NO: 2453636 - RNA, 17 nt, Human
ggcuccccauguguccu

SEQ ID NO: 2453637 - RNA, 22 nt, Human
ggcuccccauguguccugguuc

SEQ ID NO: 2453638 - RNA, 11 nt, Human
ggcuccccucu

SEQ ID NO: 2453639 - RNA, 20 nt, Human
ggcucucaggccagcugcuu

SEQ ID NO: 2453640 - RNA, 19 nt, Human
ggcucucaggccagcugcu

SEQ ID NO: 2453641 - RNA, 18 nt, Human
ggcucucaggccagcugc

SEQ ID NO: 2453642 - RNA, 17 nt, Human
ggcucucaggccagcug

SEQ ID NO: 2453643 - RNA, 18 nt, Human
ggcucuccaagugccaga

SEQ ID NO: 2453644 - RNA, 17 nt, Human
ggcucuccaagugccag

SEQ ID NO: 2453645 - RNA, 12 nt, Human
ggcucuccaagu

SEQ ID NO: 2453646 - RNA, 23 nt, Human
ggcucucauguuuucaacugcca

SEQ ID NO: 2453647 - RNA, 20 nt, Human
ggcucuccaagugccagagg

SEQ ID NO: 2453648 - RNA, 19 nt, Human
ggcucuccaagugccagag

SEQ ID NO: 2453649 - RNA, 23 nt, Human
ggcucuccaagugccagaggugg

SEQ ID NO: 2453650 - RNA, 12 nt, Human
ggcucuccaccu

SEQ ID NO: 2453651 - RNA, 13 nt, Human
ggcucuccaccuc

SEQ ID NO: 2453652 - RNA, 14 nt, Human
ggcucuccaccuca

SEQ ID NO: 2453653 - RNA, 15 nt, Human
ggcucuccaccucag

SEQ ID NO: 2453654 - RNA, 16 nt, Human
ggcucuccaccucagc

SEQ ID NO: 2453655 - RNA, 13 nt, Human
ggcucucuccagg

SEQ ID NO: 2453656 - RNA, 12 nt, Human
ggcucucuccag

SEQ ID NO: 2453657 - RNA, 22 nt, Human
ggcucucuauagcaccagggcu

SEQ ID NO: 2453658 - RNA, 17 nt, Human
ggcucuccaccucagcc

SEQ ID NO: 2453659 - RNA, 18 nt, Human
ggcucuccaccucagccu

SEQ ID NO: 2453660 - RNA, 19 nt, Human
ggcucuccaccucagccuu

SEQ ID NO: 2453661 - RNA, 20 nt, Human
ggcucuccaccucagccuug

SEQ ID NO: 2453662 - RNA, 20 nt, Human
ggcucuccucagaagaaaga

SEQ ID NO: 2453663 - RNA, 13 nt, Human
ggcucuccaguua

SEQ ID NO: 2453664 - RNA, 21 nt, Human
ggcucuccaccucagccuugg

SEQ ID NO: 2453665 - RNA, 22 nt, Human
ggcucuccaccucagccuugga

SEQ ID NO: 2453666 - RNA, 15 nt, Human
ggcucugccucccau

SEQ ID NO: 2453667 - RNA, 13 nt, Human
ggcucugccuccc

SEQ ID NO: 2453668 - RNA, 15 nt, Human
ggcucugcccuuggu

SEQ ID NO: 2453669 - RNA, 14 nt, Human
ggcucugcccuugg

SEQ ID NO: 2453670 - RNA, 16 nt, Human
ggcucugccucccauc

SEQ ID NO: 2453671 - RNA, 16 nt, Human
ggcucuggagcccacu

SEQ ID NO: 2453672 - RNA, 19 nt, Human
ggcucuggagcccacugua

SEQ ID NO: 2453673 - RNA, 17 nt, Human
ggcucuggagcccacug

SEQ ID NO: 2453674 - RNA, 20 nt, Human
ggcucugcaaugggcacugg

SEQ ID NO: 2453675 - RNA, 23 nt, Human
ggcucugaggugccugucccacc

SEQ ID NO: 2453676 - RNA, 20 nt, Human
ggcucugaggugccuguccc

SEQ ID NO: 2453677 - RNA, 19 nt, Human
ggcucugaggugccugucc

SEQ ID NO: 2453678 - RNA, 17 nt, Human
ggcucugaggugccugu

SEQ ID NO: 2453679 - RNA, 15 nt, Human
ggcucugagcgccuc

SEQ ID NO: 2453680 - RNA, 14 nt, Human
ggcucugagcgccu

SEQ ID NO: 2453681 - RNA, 14 nt, Human
ggcucucuccagga

SEQ ID NO: 2453682 - RNA, 17 nt, Human
ggcucucuuuccuucuu

SEQ ID NO: 2453683 - RNA, 23 nt, Human
ggcucucuuuccuucuugccuuc

SEQ ID NO: 2453684 - RNA, 18 nt, Human
ggcucucuuuccuucuug

SEQ ID NO: 2453685 - RNA, 14 nt, Human
ggcucugaaagcca

SEQ ID NO: 2453686 - RNA, 13 nt, Human
ggcucugaccagu

SEQ ID NO: 2453687 - RNA, 12 nt, Human
ggcucugcccuu

SEQ ID NO: 2453688 - RNA, 21 nt, Human
ggcucugccccagaggccucu

SEQ ID NO: 2453689 - RNA, 18 nt, Human
ggcucugccccagaggcc

SEQ ID NO: 2453690 - RNA, 14 nt, Human
ggcucugccccagc

SEQ ID NO: 2453691 - RNA, 20 nt, Human
ggcucugccccagcucuggc

SEQ ID NO: 2453692 - RNA, 21 nt, Human
ggcucugccccagcucuggcu

SEQ ID NO: 2453693 - RNA, 20 nt, Human
ggcucugcaauuccccucug

SEQ ID NO: 2453694 - RNA, 19 nt, Human
ggcucugcaauuccccucu

SEQ ID NO: 2453695 - RNA, 14 nt, Human
ggcucugccacccu

SEQ ID NO: 2453696 - RNA, 12 nt, Human
ggcucugcacag

SEQ ID NO: 2453697 - RNA, 19 nt, Human
ggcucugccacccuaccug

SEQ ID NO: 2453698 - RNA, 17 nt, Human
ggcucugccccagaggc

SEQ ID NO: 2453699 - RNA, 16 nt, Human
ggcucugccccagagg

SEQ ID NO: 2453700 - RNA, 12 nt, Human
ggcucugcccca

SEQ ID NO: 2453701 - RNA, 16 nt, Human
ggcuccacuuggucug

SEQ ID NO: 2453702 - RNA, 9 nt, Human
ggcuccaga

SEQ ID NO: 2453703 - RNA, 17 nt, Human
ggcucacccccuucucc

SEQ ID NO: 2453704 - RNA, 22 nt, Human
ggcucacccccuucuccaucca

SEQ ID NO: 2453705 - RNA, 20 nt, Human
ggcucacgccuaugauccca

SEQ ID NO: 2453706 - RNA, 18 nt, Human
ggcucacgccuguaaucc

SEQ ID NO: 2453707 - RNA, 17 nt, Human
ggcucacgccuguaauc

SEQ ID NO: 2453708 - RNA, 21 nt, Human
ggcucacgccuaugaucccag

SEQ ID NO: 2453709 - RNA, 23 nt, Human
ggcucacgccuaugaucccagca

SEQ ID NO: 2453710 - RNA, 12 nt, Human
ggcuaugcauuu

SEQ ID NO: 2453711 - RNA, 13 nt, Human
ggcuaugcauuug

SEQ ID NO: 2453712 - RNA, 14 nt, Human
ggcucacacugaga

SEQ ID NO: 2453713 - RNA, 15 nt, Human
ggcucacacugagaa

SEQ ID NO: 2453714 - RNA, 14 nt, Human
ggcuaugcauuuga

SEQ ID NO: 2453715 - RNA, 18 nt, Human
ggcucacacugagaaugu

SEQ ID NO: 2453716 - RNA, 17 nt, Human
ggcucacacugagaaug

SEQ ID NO: 2453717 - RNA, 19 nt, Human
ggcucacccaagcaaggcc

SEQ ID NO: 2453718 - RNA, 17 nt, Human
ggcuccaggagcagcca

SEQ ID NO: 2453719 - RNA, 18 nt, Human
ggcuccaggagcagccac

SEQ ID NO: 2453720 - RNA, 13 nt, Human
ggcuccaggcucc

SEQ ID NO: 2453721 - RNA, 12 nt, Human
ggcuccaggcuc

SEQ ID NO: 2453722 - RNA, 16 nt, Human
ggcuccaggagcagcc

SEQ ID NO: 2453723 - RNA, 14 nt, Human
ggcuccaggagcag

SEQ ID NO: 2453724 - RNA, 10 nt, Human
ggcuccagac

SEQ ID NO: 2453725 - RNA, 18 nt, Human
ggcucacuauggugccaa

SEQ ID NO: 2453726 - RNA, 17 nt, Human
ggcucacuauggugcca

SEQ ID NO: 2453727 - RNA, 13 nt, Human
ggcuccagagggc

SEQ ID NO: 2453728 - RNA, 23 nt, Human
ggcucacgccuguaaucccagca

SEQ ID NO: 2453729 - RNA, 22 nt, Human
ggcucacgccuguaaucccagc

SEQ ID NO: 2453730 - RNA, 24 nt, Human
ggcucacgccuguaaucccagcag

SEQ ID NO: 2453731 - RNA, 13 nt, Human
ggcucacgugugu

SEQ ID NO: 2453732 - RNA, 21 nt, Human
ggcgggaguggaguggaagaa

SEQ ID NO: 2453733 - RNA, 19 nt, Human
ggcgggacccaggcaccug

SEQ ID NO: 2453734 - RNA, 16 nt, Human
ggcgggaugggccacc

SEQ ID NO: 2453735 - RNA, 15 nt, Human
ggcgggcagcacagc

SEQ ID NO: 2453736 - RNA, 22 nt, Human
ggcgggcaccuauagucccagc

SEQ ID NO: 2453737 - RNA, 14 nt, Human
ggcgggccccucau

SEQ ID NO: 2453738 - RNA, 17 nt, Human
ggcgggccagccaggcg

SEQ ID NO: 2453739 - RNA, 15 nt, Human
ggcgggccagccagg

SEQ ID NO: 2453740 - RNA, 14 nt, Human
ggcgggccagccag

SEQ ID NO: 2453741 - RNA, 13 nt, Human
ggcgggccagcca

SEQ ID NO: 2453742 - RNA, 12 nt, Human
ggcgggccagcc

SEQ ID NO: 2453743 - RNA, 17 nt, Human
ggcgggccaaggacugc

SEQ ID NO: 2453744 - RNA, 13 nt, Human
ggcuagguacaca

SEQ ID NO: 2453745 - RNA, 12 nt, Human
ggcggguggggg

SEQ ID NO: 2453746 - RNA, 14 nt, Human
ggcgggcggucagg

SEQ ID NO: 2453747 - RNA, 20 nt, Human
ggcuaguaucaaaagaaaga

SEQ ID NO: 2453748 - RNA, 16 nt, Human
ggcgggugggggugga

SEQ ID NO: 2453749 - RNA, 16 nt, Human
ggcuagucaagcuccu

SEQ ID NO: 2453750 - RNA, 17 nt, Human
ggcuagucaagcuccuc

SEQ ID NO: 2453751 - RNA, 19 nt, Human
ggcuagucaagcuccuccu

SEQ ID NO: 2453752 - RNA, 22 nt, Human
ggcuagucaagcuccuccuccc

SEQ ID NO: 2453753 - RNA, 23 nt, Human
ggcuagucaagcuccuccucccu

SEQ ID NO: 2453754 - RNA, 13 nt, Human
ggcuagucagaga

SEQ ID NO: 2453755 - RNA, 23 nt, Human
ggcuauaggugcuacaaaaacac

SEQ ID NO: 2453756 - RNA, 23 nt, Human
ggcuagugacuugugucccauga

SEQ ID NO: 2453757 - RNA, 18 nt, Human
ggcuagucagagagagug

SEQ ID NO: 2453758 - RNA, 20 nt, Human
ggcuauagcuacaggaagca

SEQ ID NO: 2453759 - RNA, 20 nt, Human
ggcuagugacuuguguccca

SEQ ID NO: 2453760 - RNA, 14 nt, Human
ggcuagucagagag

SEQ ID NO: 2453761 - RNA, 15 nt, Human
ggcuagucagagaga

SEQ ID NO: 2453762 - RNA, 15 nt, Human
ggcgcgguggcucac

SEQ ID NO: 2453763 - RNA, 14 nt, Human
ggcgcccuggaagc

SEQ ID NO: 2453764 - RNA, 12 nt, Human
ggcgcccuggaa

SEQ ID NO: 2453765 - RNA, 17 nt, Human
ggcgcccucuguccuga

SEQ ID NO: 2453766 - RNA, 16 nt, Human
ggcgcccucuguccug

SEQ ID NO: 2453767 - RNA, 16 nt, Human
ggcgcccuggaagccg

SEQ ID NO: 2453768 - RNA, 19 nt, Human
ggcgcgguggcucacgccu

SEQ ID NO: 2453769 - RNA, 14 nt, Human
ggcgcccucugucc

SEQ ID NO: 2453770 - RNA, 13 nt, Human
ggcgcccucuguc

SEQ ID NO: 2453771 - RNA, 11 nt, Human
ggcgcccucug

SEQ ID NO: 2453772 - RNA, 22 nt, Human
ggcgccccugccaccucccuga

SEQ ID NO: 2453773 - RNA, 15 nt, Human
ggcgccccugccacc

SEQ ID NO: 2453774 - RNA, 13 nt, Human
ggcgccccugcca

SEQ ID NO: 2453775 - RNA, 24 nt, Human
ggcgcccaccuccccacgcccucc

SEQ ID NO: 2453776 - RNA, 15 nt, Human
ggcgcccaccucccc

SEQ ID NO: 2453777 - RNA, 14 nt, Human
ggcgcccaccuccc

SEQ ID NO: 2453778 - RNA, 13 nt, Human
ggcgcccaccucc

SEQ ID NO: 2453779 - RNA, 17 nt, Human
ggcgcugccccuggcag

SEQ ID NO: 2453780 - RNA, 16 nt, Human
ggcgggacccaggcac

SEQ ID NO: 2453781 - RNA, 16 nt, Human
ggcgggagcaucucuu

SEQ ID NO: 2453782 - RNA, 11 nt, Human
ggcgcugcccc

SEQ ID NO: 2453783 - RNA, 22 nt, Human
ggcuggggccuaucagugugcc

SEQ ID NO: 2453784 - RNA, 21 nt, Human
ggcuggggccuaucagugugc

SEQ ID NO: 2453785 - RNA, 16 nt, Human
ggcuggggcugaccuu

SEQ ID NO: 2453786 - RNA, 14 nt, Human
ggcugggggcagga

SEQ ID NO: 2453787 - RNA, 14 nt, Human
ggcugggggccuca

SEQ ID NO: 2453788 - RNA, 21 nt, Human
ggcuggggaaguccucugggu

SEQ ID NO: 2453789 - RNA, 18 nt, Human
ggcuggggaaguccucug

SEQ ID NO: 2453790 - RNA, 20 nt, Human
ggcuggggccuaucagugug

SEQ ID NO: 2453791 - RNA, 16 nt, Human
ggcugggggaagaagc

SEQ ID NO: 2453792 - RNA, 17 nt, Human
ggcuggggaaguccucu

SEQ ID NO: 2453793 - RNA, 18 nt, Human
ggcugggcuucaguggca

SEQ ID NO: 2453794 - RNA, 22 nt, Human
ggcugggcuucaguggcagcug

SEQ ID NO: 2453795 - RNA, 21 nt, Human
ggcugggcuucaguggcagcu

SEQ ID NO: 2453796 - RNA, 11 nt, Human
ggcugggcuuc

SEQ ID NO: 2453797 - RNA, 21 nt, Human
ggcugggcucccuucccaccu

SEQ ID NO: 2453798 - RNA, 20 nt, Human
ggcugggcucccuucccacc

SEQ ID NO: 2453799 - RNA, 17 nt, Human
ggcugggcaaggaggcc

SEQ ID NO: 2453800 - RNA, 16 nt, Human
ggcugggaugggccug

SEQ ID NO: 2453801 - RNA, 15 nt, Human
ggcugggaguggugg

SEQ ID NO: 2453802 - RNA, 14 nt, Human
ggcugggaguggug

SEQ ID NO: 2453803 - RNA, 23 nt, Human
ggcugggaguaguugucuuuccu

SEQ ID NO: 2453804 - RNA, 13 nt, Human
ggcugggaguggu

SEQ ID NO: 2453805 - RNA, 15 nt, Human
ggcugggagcucugc

SEQ ID NO: 2453806 - RNA, 20 nt, Human
ggcuggaguucaguggugug

SEQ ID NO: 2453807 - RNA, 19 nt, Human
ggcuggagugcaguggcgu

SEQ ID NO: 2453808 - RNA, 20 nt, Human
ggcuggagugcaguggugug

SEQ ID NO: 2453809 - RNA, 19 nt, Human
ggcuggaguggaguggcgu

SEQ ID NO: 2453810 - RNA, 23 nt, Human
ggcucuggagcccacuguacuug

SEQ ID NO: 2453811 - RNA, 23 nt, Human
ggcucugggauagcugacccagc

SEQ ID NO: 2453812 - RNA, 23 nt, Human
ggcucugccccagcucuggcuuc

SEQ ID NO: 2453813 - RNA, 13 nt, Human
ggcucugcccugc

SEQ ID NO: 2453814 - RNA, 17 nt, Human
ggcugaggaaaggccag

SEQ ID NO: 2453815 - RNA, 21 nt, Human
ggcugaggaagcacagcagca

SEQ ID NO: 2453816 - RNA, 22 nt, Human
ggcugaggaaaggccagcuggc

SEQ ID NO: 2453817 - RNA, 20 nt, Human
ggcugagcucucugugggcu

SEQ ID NO: 2453818 - RNA, 19 nt, Human
ggcugaggaggccuccauc

SEQ ID NO: 2453819 - RNA, 16 nt, Human
ggcugaggaggccucc

SEQ ID NO: 2453820 - RNA, 15 nt, Human
ggcugaggaggccuc

SEQ ID NO: 2453821 - RNA, 20 nt, Human
ggcugaggaggccuccaucu

SEQ ID NO: 2453822 - RNA, 21 nt, Human
ggcugaggauuucaagccugc

SEQ ID NO: 2453823 - RNA, 13 nt, Human
ggcugaggcagaa

SEQ ID NO: 2453824 - RNA, 14 nt, Human
ggcugaggcagaag

SEQ ID NO: 2453825 - RNA, 19 nt, Human
ggcugcuucaaggauccug

SEQ ID NO: 2453826 - RNA, 15 nt, Human
ggcugcuucaaggau

SEQ ID NO: 2453827 - RNA, 16 nt, Human
ggcugaggccuggacu

SEQ ID NO: 2453828 - RNA, 14 nt, Human
ggcugaggcuggca

SEQ ID NO: 2453829 - RNA, 17 nt, Human
ggcugaggcuggcacag

SEQ ID NO: 2453830 - RNA, 18 nt, Human
ggcugaggcuggcacagg

SEQ ID NO: 2453831 - RNA, 14 nt, Human
ggcugaggccugga

SEQ ID NO: 2453832 - RNA, 14 nt, Human
ggcugaggcaggag

SEQ ID NO: 2453833 - RNA, 17 nt, Human
ggcugaggcagaagaau

SEQ ID NO: 2453834 - RNA, 20 nt, Human
ggcugcuucaaggauccuga

SEQ ID NO: 2453835 - RNA, 15 nt, Human
ggcugagggagccug

SEQ ID NO: 2453836 - RNA, 21 nt, Human
ggcugcuucaaggauccugag

SEQ ID NO: 2453837 - RNA, 18 nt, Human
ggcuggacugaggccuga

SEQ ID NO: 2453838 - RNA, 17 nt, Human
ggcuggacugaggccug

SEQ ID NO: 2453839 - RNA, 13 nt, Human
ggcuggacuugga

SEQ ID NO: 2453840 - RNA, 16 nt, Human
ggcuggacugaggccu

SEQ ID NO: 2453841 - RNA, 14 nt, Human
ggcuggacugaggc

SEQ ID NO: 2453842 - RNA, 13 nt, Human
ggcuggacugagg

SEQ ID NO: 2453843 - RNA, 13 nt, Human
ggcuggagcuggc

SEQ ID NO: 2453844 - RNA, 18 nt, Human
ggcuggacuuggagguag

SEQ ID NO: 2453845 - RNA, 19 nt, Human
ggcuggagaccaugcagag

SEQ ID NO: 2453846 - RNA, 19 nt, Human
ggcuggagacgggugggcg

SEQ ID NO: 2453847 - RNA, 23 nt, Human
ggcuggagcccagggagcggaaa

SEQ ID NO: 2453848 - RNA, 13 nt, Human
ggcuggaggcagg

SEQ ID NO: 2453849 - RNA, 15 nt, Human
ggcuggaggcagggc

SEQ ID NO: 2453850 - RNA, 23 nt, Human
ggcuggaggcagggccuugccca

SEQ ID NO: 2453851 - RNA, 17 nt, Human
ggcuggaggcagggccu

SEQ ID NO: 2453852 - RNA, 19 nt, Human
ggcuggaggcagggccuug

SEQ ID NO: 2453853 - RNA, 16 nt, Human
ggcuggagugaggaaa

SEQ ID NO: 2453854 - RNA, 14 nt, Human
ggcuggagugagga

SEQ ID NO: 2453855 - RNA, 21 nt, Human
ggcugugggccucaaggacuu

SEQ ID NO: 2453856 - RNA, 15 nt, Human
ggcuguggucacagc

SEQ ID NO: 2453857 - RNA, 24 nt, Human
ggcugugguagggggugucucagg

SEQ ID NO: 2453858 - RNA, 10 nt, Human
ggcugugcua

SEQ ID NO: 2453859 - RNA, 18 nt, Human
ggcugugcagccuguccu

SEQ ID NO: 2453860 - RNA, 11 nt, Human
ggcugugagug

SEQ ID NO: 2453861 - RNA, 20 nt, Human
ggcugugcucccugguucug

SEQ ID NO: 2453862 - RNA, 19 nt, Human
ggcugugcgcugacaacca

SEQ ID NO: 2453863 - RNA, 18 nt, Human
ggcugucuucucaggcuc

SEQ ID NO: 2453864 - RNA, 19 nt, Human
ggcugucuucucaggcucu

SEQ ID NO: 2453865 - RNA, 22 nt, Human
ggcugucuucucaggcucugcc

SEQ ID NO: 2453866 - RNA, 13 nt, Human
ggcugugaggccc

SEQ ID NO: 2453867 - RNA, 23 nt, Human
ggcugucuucucaggcucugccc

SEQ ID NO: 2453868 - RNA, 16 nt, Human
ggcugugccucugccu

SEQ ID NO: 2453869 - RNA, 13 nt, Human
ggcugugccucug

SEQ ID NO: 2453870 - RNA, 22 nt, Human
ggcuguccuguacauuguggga

SEQ ID NO: 2453871 - RNA, 13 nt, Human
ggcuguccuguac

SEQ ID NO: 2453872 - RNA, 23 nt, Human
ggcuguccaguucccagaaggca

SEQ ID NO: 2453873 - RNA, 18 nt, Human
ggcugggggcaggagggc

SEQ ID NO: 2453874 - RNA, 16 nt, Human
ggcugggggcaggagg

SEQ ID NO: 2453875 - RNA, 17 nt, Human
ggcugggggcaggaggg

SEQ ID NO: 2453876 - RNA, 17 nt, Human
ggcuguuggcagugagu

SEQ ID NO: 2453877 - RNA, 15 nt, Human
ggcuguuggcaguga

SEQ ID NO: 2453878 - RNA, 23 nt, Human
ggcuguuggcacucacagaccug

SEQ ID NO: 2453879 - RNA, 17 nt, Human
ggcuguuggcacucaca

SEQ ID NO: 2453880 - RNA, 20 nt, Human
ggcuguuggcugggggccuc

SEQ ID NO: 2453881 - RNA, 16 nt, Human
ggcuguuggcuggggg

SEQ ID NO: 2453882 - RNA, 15 nt, Human
ggcuguuggcugggg

SEQ ID NO: 2453883 - RNA, 14 nt, Human
ggcuguuggcuggg

SEQ ID NO: 2453884 - RNA, 12 nt, Human
ggcuguuggcac

SEQ ID NO: 2453885 - RNA, 13 nt, Human
ggcuguugcaugg

SEQ ID NO: 2453886 - RNA, 14 nt, Human
ggcuguucuggaag

SEQ ID NO: 2453887 - RNA, 16 nt, Human
ggcugugucuaaacug

SEQ ID NO: 2453888 - RNA, 15 nt, Human
ggcugugucuaaacu

SEQ ID NO: 2453889 - RNA, 20 nt, Human
ggcuguguucuggugaggcc

SEQ ID NO: 2453890 - RNA, 14 nt, Human
ggcugugucuaaac

SEQ ID NO: 2453891 - RNA, 22 nt, Human
ggcugugggccucaaggacuug

SEQ ID NO: 2453892 - RNA, 14 nt, Human
ggcuuagucacuga

SEQ ID NO: 2453893 - RNA, 15 nt, Human
ggcuuagucacugag

SEQ ID NO: 2453894 - RNA, 21 nt, Human
ggcuuagacuucgacucagga

SEQ ID NO: 2453895 - RNA, 14 nt, Human
ggcuguuugaggau

SEQ ID NO: 2453896 - RNA, 20 nt, Human
ggcuucacggaagagccuug

SEQ ID NO: 2453897 - RNA, 16 nt, Human
ggcuugccacagcucu

SEQ ID NO: 2453898 - RNA, 13 nt, Human
ggcuugccugcag

SEQ ID NO: 2453899 - RNA, 22 nt, Human
ggcuucacuguauaaauaggag

SEQ ID NO: 2453900 - RNA, 21 nt, Human
ggcuucacuguauaaauagga

SEQ ID NO: 2453901 - RNA, 19 nt, Human
ggcuucacuguauaaauag

SEQ ID NO: 2453902 - RNA, 18 nt, Human
ggcuucacuguauaaaua

SEQ ID NO: 2453903 - RNA, 15 nt, Human
ggcuucacuguauaa

SEQ ID NO: 2453904 - RNA, 21 nt, Human
ggcuucacggaagagccuugc

SEQ ID NO: 2453905 - RNA, 12 nt, Human
ggcuucacagau

SEQ ID NO: 2453906 - RNA, 18 nt, Human
ggcuuagcuuugcucugc

SEQ ID NO: 2453907 - RNA, 17 nt, Human
ggcuuggggaccagagc

SEQ ID NO: 2453908 - RNA, 14 nt, Human
ggcuugggaccgcc

SEQ ID NO: 2453909 - RNA, 15 nt, Human
ggcuuggccugcugu

SEQ ID NO: 2453910 - RNA, 23 nt, Human
ggcuugggcuuccauuugugugu

SEQ ID NO: 2453911 - RNA, 18 nt, Human
ggcuuggggaccagagcu

SEQ ID NO: 2453912 - RNA, 13 nt, Human
ggcuuucuggaga

SEQ ID NO: 2453913 - RNA, 14 nt, Human
ggcuuucuggagag

SEQ ID NO: 2453914 - RNA, 15 nt, Human
ggcuugcugagaggg

SEQ ID NO: 2453915 - RNA, 14 nt, Human
ggcuugcaugccaa

SEQ ID NO: 2453916 - RNA, 16 nt, Human
ggcuuggccugcugug

SEQ ID NO: 2453917 - RNA, 14 nt, Human
ggcuuggccugcug

SEQ ID NO: 2453918 - RNA, 13 nt, Human
ggcuuggccugcu

SEQ ID NO: 2453919 - RNA, 12 nt, Human
ggcuuggccugc

SEQ ID NO: 2453920 - RNA, 13 nt, Human
ggcuugcugagag

SEQ ID NO: 2453921 - RNA, 11 nt, Human
ggcuugcugcc

SEQ ID NO: 2453922 - RNA, 15 nt, Human
ggcuugccugcaggc

SEQ ID NO: 2453923 - RNA, 14 nt, Human
ggcuugccugcagg

SEQ ID NO: 2453924 - RNA, 20 nt, Human
gggacucaauuucuccccag

SEQ ID NO: 2453925 - RNA, 14 nt, Human
gggacguggcucag

SEQ ID NO: 2453926 - RNA, 18 nt, Human
gggacguggcucagccag

SEQ ID NO: 2453927 - RNA, 21 nt, Human
gggacugaggggaggggagca

SEQ ID NO: 2453928 - RNA, 15 nt, Human
gggacugagaaauuu

SEQ ID NO: 2453929 - RNA, 23 nt, Human
gggacucaaugcacugacauugu

SEQ ID NO: 2453930 - RNA, 13 nt, Human
gggacugagccag

SEQ ID NO: 2453931 - RNA, 14 nt, Human
gggacugagccagu

SEQ ID NO: 2453932 - RNA, 19 nt, Human
gggacugagccagucccag

SEQ ID NO: 2453933 - RNA, 17 nt, Human
gggacugagccaguccc

SEQ ID NO: 2453934 - RNA, 19 nt, Human
gggagcccacuguccuggg

SEQ ID NO: 2453935 - RNA, 10 nt, Human
gggagcccac

SEQ ID NO: 2453936 - RNA, 20 nt, Human
gggagcccacuguccugggc

SEQ ID NO: 2453937 - RNA, 21 nt, Human
gggagcccacuguccugggcc

SEQ ID NO: 2453938 - RNA, 12 nt, Human
gggagccccagg

SEQ ID NO: 2453939 - RNA, 13 nt, Human
gggagccccaggg

SEQ ID NO: 2453940 - RNA, 21 nt, Human
gggagccccagggucuucccu

SEQ ID NO: 2453941 - RNA, 14 nt, Human
gggagccccagggu

SEQ ID NO: 2453942 - RNA, 16 nt, Human
gggagccccagggucu

SEQ ID NO: 2453943 - RNA, 19 nt, Human
gggacucaaugcacugaca

SEQ ID NO: 2453944 - RNA, 17 nt, Human
gggacucaaugcacuga

SEQ ID NO: 2453945 - RNA, 17 nt, Human
gggacggugcccaagcc

SEQ ID NO: 2453946 - RNA, 16 nt, Human
gggacgucccugccca

SEQ ID NO: 2453947 - RNA, 23 nt, Human
gggacguccugccaccuggggca

SEQ ID NO: 2453948 - RNA, 21 nt, Human
gggacggggggccccagucag

SEQ ID NO: 2453949 - RNA, 21 nt, Human
gggacgccugggggugccagg

SEQ ID NO: 2453950 - RNA, 22 nt, Human
gggacgccugggggugccagga

SEQ ID NO: 2453951 - RNA, 13 nt, Human
gggacccccgccc

SEQ ID NO: 2453952 - RNA, 19 nt, Human
gggacccccgcccccugcc

SEQ ID NO: 2453953 - RNA, 18 nt, Human
gggacccccgcccccugc

SEQ ID NO: 2453954 - RNA, 17 nt, Human
gggacccccgcccccug

SEQ ID NO: 2453955 - RNA, 14 nt, Human
gggacccccgcccc

SEQ ID NO: 2453956 - RNA, 15 nt, Human
gggaccuuuaguggu

SEQ ID NO: 2453957 - RNA, 21 nt, Human
gggaccugguacccuccuggc

SEQ ID NO: 2453958 - RNA, 19 nt, Human
gggaccugccaggcagggg

SEQ ID NO: 2453959 - RNA, 18 nt, Human
gggaccugccaggcaggg

SEQ ID NO: 2453960 - RNA, 18 nt, Human
gggaccugguacccuccu

SEQ ID NO: 2453961 - RNA, 17 nt, Human
gggaccugccaggcagg

SEQ ID NO: 2453962 - RNA, 24 nt, Human
gggacccccgcccccugcccuccc

SEQ ID NO: 2453963 - RNA, 21 nt, Human
gggacccccgcccccugcccu

SEQ ID NO: 2453964 - RNA, 22 nt, Human
gggacaccagccaggcucugug

SEQ ID NO: 2453965 - RNA, 20 nt, Human
gggacaccagccaggcucug

SEQ ID NO: 2453966 - RNA, 19 nt, Human
gggacaccagccaggcucu

SEQ ID NO: 2453967 - RNA, 18 nt, Human
gggacaccagccaggcuc

SEQ ID NO: 2453968 - RNA, 18 nt, Human
gggacccaggcaccugca

SEQ ID NO: 2453969 - RNA, 21 nt, Human
gggacccaauguaggagcugc

SEQ ID NO: 2453970 - RNA, 14 nt, Human
gggacaccagccag

SEQ ID NO: 2453971 - RNA, 23 nt, Human
gggacacauucaacccuggagag

SEQ ID NO: 2453972 - RNA, 19 nt, Human
gggacaaguggacucaggg

SEQ ID NO: 2453973 - RNA, 20 nt, Human
gggacaccaagccuuggcuc

SEQ ID NO: 2453974 - RNA, 14 nt, Human
gggacacccuguga

SEQ ID NO: 2453975 - RNA, 21 nt, Human
gggaauguuugccucugccuc

SEQ ID NO: 2453976 - RNA, 19 nt, Human
gggaauguuugccucugcc

SEQ ID NO: 2453977 - RNA, 14 nt, Human
gggaauugaggaca

SEQ ID NO: 2453978 - RNA, 22 nt, Human
gggacaaguggacucagggcag

SEQ ID NO: 2453979 - RNA, 22 nt, Human
gggaauguuugggcagaaggga

SEQ ID NO: 2453980 - RNA, 23 nt, Human
gggaauguuugggcagaagggag

SEQ ID NO: 2453981 - RNA, 19 nt, Human
gggaauacuagggagaagg

SEQ ID NO: 2453982 - RNA, 19 nt, Human
gggaauaaauaugccucuc

SEQ ID NO: 2453983 - RNA, 14 nt, Human
gggaauauuugaau

SEQ ID NO: 2453984 - RNA, 13 nt, Human
gggaauauuugaa

SEQ ID NO: 2453985 - RNA, 14 nt, Human
gggaauaaauaugc

SEQ ID NO: 2453986 - RNA, 17 nt, Human
gggaagugaggaagcca

SEQ ID NO: 2453987 - RNA, 23 nt, Human
gggaagugacuuagcagaugcug

SEQ ID NO: 2453988 - RNA, 21 nt, Human
gggaagugacaaggccccaga

SEQ ID NO: 2453989 - RNA, 12 nt, Human
gggaaucaagau

SEQ ID NO: 2453990 - RNA, 14 nt, Human
gggaaucagaacuc

SEQ ID NO: 2453991 - RNA, 18 nt, Human
gggaauauuugaaucuug

SEQ ID NO: 2453992 - RNA, 12 nt, Human
gggaauauuuua

SEQ ID NO: 2453993 - RNA, 23 nt, Human
gggaauagucuagauggcuccuc

SEQ ID NO: 2453994 - RNA, 22 nt, Human
gggaauccccgaaggugcugga

SEQ ID NO: 2453995 - RNA, 19 nt, Human
gggaauccccgaaggugcu

SEQ ID NO: 2453996 - RNA, 11 nt, Human
gggaauguuug

SEQ ID NO: 2453997 - RNA, 12 nt, Human
ggcuuuggauuu

SEQ ID NO: 2453998 - RNA, 13 nt, Human
ggcuuuggcuucu

SEQ ID NO: 2453999 - RNA, 14 nt, Human
ggcuuugccagcuu

SEQ ID NO: 2454000 - RNA, 20 nt, Human
ggcuuuuauuaaugcacuuu

SEQ ID NO: 2454001 - RNA, 23 nt, Human
gggaagugaagacuggaagcuaa

SEQ ID NO: 2454002 - RNA, 18 nt, Human
ggcuuuuacugaagccuu

SEQ ID NO: 2454003 - RNA, 19 nt, Human
ggcuuuuauuaaugcacuu

SEQ ID NO: 2454004 - RNA, 20 nt, Human
ggcuuuuacugaagccuuuc

SEQ ID NO: 2454005 - RNA, 17 nt, Human
gggaggacgcucucugg

SEQ ID NO: 2454006 - RNA, 20 nt, Human
gggaggacgcucucuggccu

SEQ ID NO: 2454007 - RNA, 17 nt, Human
gggaggagggagaggga

SEQ ID NO: 2454008 - RNA, 14 nt, Human
gggaggagggagag

SEQ ID NO: 2454009 - RNA, 13 nt, Human
gggaggagggaga

SEQ ID NO: 2454010 - RNA, 21 nt, Human
gggaggagaggggaagggcca

SEQ ID NO: 2454011 - RNA, 14 nt, Human
gggaggagaaugag

SEQ ID NO: 2454012 - RNA, 17 nt, Human
gggaggaggccaccucu

SEQ ID NO: 2454013 - RNA, 21 nt, Human
gggaggaccagggcagggcca

SEQ ID NO: 2454014 - RNA, 23 nt, Human
gggaggaagcagaauaaagcaau

SEQ ID NO: 2454015 - RNA, 22 nt, Human
gggaggauguucugggacacag

SEQ ID NO: 2454016 - RNA, 21 nt, Human
gggaggauugcuugagcucag

SEQ ID NO: 2454017 - RNA, 23 nt, Human
gggaggaucucuugagccuggga

SEQ ID NO: 2454018 - RNA, 20 nt, Human
gggaggagguggcagcccug

SEQ ID NO: 2454019 - RNA, 17 nt, Human
gggaggaucacuggagc

SEQ ID NO: 2454020 - RNA, 17 nt, Human
gggagugacagaggcag

SEQ ID NO: 2454021 - RNA, 18 nt, Human
gggagguugaucagaucu

SEQ ID NO: 2454022 - RNA, 16 nt, Human
gggaguaugcaaaagu

SEQ ID NO: 2454023 - RNA, 16 nt, Human
gggaguccccuccccg

SEQ ID NO: 2454024 - RNA, 21 nt, Human
gggaguaugcaaaaguucuga

SEQ ID NO: 2454025 - RNA, 21 nt, Human
gggagucaucucaaccauccc

SEQ ID NO: 2454026 - RNA, 21 nt, Human
gggagugaguugauagcacag

SEQ ID NO: 2454027 - RNA, 17 nt, Human
gggaguccccuuuucuu

SEQ ID NO: 2454028 - RNA, 15 nt, Human
gggagucccgucagg

SEQ ID NO: 2454029 - RNA, 17 nt, Human
gggagucugaagcagau

SEQ ID NO: 2454030 - RNA, 23 nt, Human
gggagucugaagcagaugcaaag

SEQ ID NO: 2454031 - RNA, 20 nt, Human
gggaggugggauccuccagg

SEQ ID NO: 2454032 - RNA, 22 nt, Human
gggagguguuuaaagagagguu

SEQ ID NO: 2454033 - RNA, 20 nt, Human
gggagguguuuaaagagagg

SEQ ID NO: 2454034 - RNA, 23 nt, Human
gggaggauugcuugagcucagga

SEQ ID NO: 2454035 - RNA, 19 nt, Human
gggaggaucacuggagccc

SEQ ID NO: 2454036 - RNA, 22 nt, Human
gggaggaucacuggagcccagg

SEQ ID NO: 2454037 - RNA, 18 nt, Human
gggaggcaagaggggugg

SEQ ID NO: 2454038 - RNA, 18 nt, Human
gggaggagggagagggag

SEQ ID NO: 2454039 - RNA, 23 nt, Human
gggaggaucacuggagcccagga

SEQ ID NO: 2454040 - RNA, 15 nt, Human
gggagcugcugcccu

SEQ ID NO: 2454041 - RNA, 19 nt, Human
gggagcugguuagaaaugc

SEQ ID NO: 2454042 - RNA, 16 nt, Human
gggaggaaaagaaaag

SEQ ID NO: 2454043 - RNA, 23 nt, Human
gggaggaagaagcuuaggcaggg

SEQ ID NO: 2454044 - RNA, 24 nt, Human
gggaggaaauuugaauggguccau

SEQ ID NO: 2454045 - RNA, 21 nt, Human
gggaggaagcagaauaaagca

SEQ ID NO: 2454046 - RNA, 20 nt, Human
gggaggaagcagaauaaagc

SEQ ID NO: 2454047 - RNA, 18 nt, Human
gggaggaagcagaauaaa

SEQ ID NO: 2454048 - RNA, 16 nt, Human
gggaggaagcagaaua

SEQ ID NO: 2454049 - RNA, 15 nt, Human
gggaggaagcagaau

SEQ ID NO: 2454050 - RNA, 14 nt, Human
gggaggaagcagaa

SEQ ID NO: 2454051 - RNA, 13 nt, Human
gggaggaagcaga

SEQ ID NO: 2454052 - RNA, 12 nt, Human
gggaggaagcag

SEQ ID NO: 2454053 - RNA, 23 nt, Human
gggaggaagcagguugaggggcu

SEQ ID NO: 2454054 - RNA, 19 nt, Human
gggaggaaucgaggaacca

SEQ ID NO: 2454055 - RNA, 22 nt, Human
gggagcugccuguucagcucca

SEQ ID NO: 2454056 - RNA, 21 nt, Human
gggagcugccuguucagcucc

SEQ ID NO: 2454057 - RNA, 13 nt, Human
gggagcugccugu

SEQ ID NO: 2454058 - RNA, 21 nt, Human
gggagcuccucuccuggagga

SEQ ID NO: 2454059 - RNA, 20 nt, Human
gggagcuccucuccuggagg

SEQ ID NO: 2454060 - RNA, 22 nt, Human
gggagcuccucuccuggaggau

SEQ ID NO: 2454061 - RNA, 12 nt, Human
gggagcugaggc

SEQ ID NO: 2454062 - RNA, 22 nt, Human
gggagccuuugguucuggccag

SEQ ID NO: 2454063 - RNA, 17 nt, Human
gggagcgugggaggcgg

SEQ ID NO: 2454064 - RNA, 18 nt, Human
gggagcuccucuccugga

SEQ ID NO: 2454065 - RNA, 23 nt, Human
gggagcuccacucugcuucucug

SEQ ID NO: 2454066 - RNA, 12 nt, Human
gggagcucugca

SEQ ID NO: 2454067 - RNA, 19 nt, Human
gggagcuccacucugcuuc

SEQ ID NO: 2454068 - RNA, 16 nt, Human
gggagccgcuggcaga

SEQ ID NO: 2454069 - RNA, 23 nt, Human
gggagcccucaggcaccugcacu

SEQ ID NO: 2454070 - RNA, 19 nt, Human
gggagccccuucugcucag

SEQ ID NO: 2454071 - RNA, 16 nt, Human
gggagcccccgccccg

SEQ ID NO: 2454072 - RNA, 22 nt, Human
gggagcccccgccccgccccac

SEQ ID NO: 2454073 - RNA, 12 nt, Human
gggagcccccgc

SEQ ID NO: 2454074 - RNA, 21 nt, Human
gggagccuccugcccaguccc

SEQ ID NO: 2454075 - RNA, 21 nt, Human
gggagccuuugguucuggcca

SEQ ID NO: 2454076 - RNA, 21 nt, Human
gggagccugaucaccugcccu

SEQ ID NO: 2454077 - RNA, 17 nt, Human
gggagccuccugcccag

SEQ ID NO: 2454078 - RNA, 14 nt, Human
gggagccuccugcc

SEQ ID NO: 2454079 - RNA, 13 nt, Human
gggagccuccugc

SEQ ID NO: 2454080 - RNA, 12 nt, Human
gggagccuccug

SEQ ID NO: 2454081 - RNA, 11 nt, Human
gggagccuccu

SEQ ID NO: 2454082 - RNA, 21 nt, Human
ucagccucccaaagugcuggg

SEQ ID NO: 2454083 - RNA, 19 nt, Human
ucagccucccaaagugcug

SEQ ID NO: 2454084 - RNA, 23 nt, Human
ucagcauucucacuccuaccugg

SEQ ID NO: 2454085 - RNA, 14 nt, Human
ucagccucccaaag

SEQ ID NO: 2454086 - RNA, 22 nt, Human
ucagccucccgaauagcuggga

SEQ ID NO: 2454087 - RNA, 21 nt, Human
ucagccucccgaauagcuggg

SEQ ID NO: 2454088 - RNA, 18 nt, Human
ucagccucccgaguagcu

SEQ ID NO: 2454089 - RNA, 20 nt, Human
ucagccucccgaguagcugg

SEQ ID NO: 2454090 - RNA, 16 nt, Human
ucagcaugucuauuca

SEQ ID NO: 2454091 - RNA, 19 nt, Human
ucagcaugucuauucagcu

SEQ ID NO: 2454092 - RNA, 21 nt, Human
ucagcaugucuauucagcuuc

SEQ ID NO: 2454093 - RNA, 20 nt, Human
ucagcauucucacuccuacc

SEQ ID NO: 2454094 - RNA, 17 nt, Human
ucagcauucucacuccu

SEQ ID NO: 2454095 - RNA, 12 nt, Human
ucagcaugucua

SEQ ID NO: 2454096 - RNA, 23 nt, Human
ucagaggugaaagcuauaucaau

SEQ ID NO: 2454097 - RNA, 18 nt, Human
ucagagguagggcugcca

SEQ ID NO: 2454098 - RNA, 17 nt, Human
ucagauauaaaagacug

SEQ ID NO: 2454099 - RNA, 14 nt, Human
ucagauauaaaaga

SEQ ID NO: 2454100 - RNA, 18 nt, Human
ucagauauauuuuucaca

SEQ ID NO: 2454101 - RNA, 23 nt, Human
ucagauauauuuuucacaguuuu

SEQ ID NO: 2454102 - RNA, 15 nt, Human
ucagaguauggagcu

SEQ ID NO: 2454103 - RNA, 18 nt, Human
ucagauauauaucauauu

SEQ ID NO: 2454104 - RNA, 16 nt, Human
ucagauauauuuuuca

SEQ ID NO: 2454105 - RNA, 20 nt, Human
ucagauauaaaagacugacc

SEQ ID NO: 2454106 - RNA, 18 nt, Human
ucagauauaaaagacuga

SEQ ID NO: 2454107 - RNA, 20 nt, Human
ucagcucccccuguccccuc

SEQ ID NO: 2454108 - RNA, 18 nt, Human
ucagcucccccugucccc

SEQ ID NO: 2454109 - RNA, 15 nt, Human
ucagcucccccuguc

SEQ ID NO: 2454110 - RNA, 13 nt, Human
ucagcucccccug

SEQ ID NO: 2454111 - RNA, 19 nt, Human
ucagcucuuggcuccacug

SEQ ID NO: 2454112 - RNA, 18 nt, Human
ucagcuccccucggagaa

SEQ ID NO: 2454113 - RNA, 15 nt, Human
ucagcugaaccuggg

SEQ ID NO: 2454114 - RNA, 16 nt, Human
ucagcugaaccugggu

SEQ ID NO: 2454115 - RNA, 17 nt, Human
ucagcuccccagagucc

SEQ ID NO: 2454116 - RNA, 15 nt, Human
ucagcuccccagagu

SEQ ID NO: 2454117 - RNA, 13 nt, Human
ucagcuccccaga

SEQ ID NO: 2454118 - RNA, 20 nt, Human
ucagcucccauuucuacucu

SEQ ID NO: 2454119 - RNA, 19 nt, Human
ucagcucccauuucuacuc

SEQ ID NO: 2454120 - RNA, 16 nt, Human
ucagcucccauuucua

SEQ ID NO: 2454121 - RNA, 15 nt, Human
ucagcucccauuucu

SEQ ID NO: 2454122 - RNA, 17 nt, Human
ucagcuccccucggaga

SEQ ID NO: 2454123 - RNA, 15 nt, Human
ucagccuggccagac

SEQ ID NO: 2454124 - RNA, 16 nt, Human
ucagccuggccagaca

SEQ ID NO: 2454125 - RNA, 17 nt, Human
ucagccuggccagacac

SEQ ID NO: 2454126 - RNA, 18 nt, Human
ucagccuggccagacaca

SEQ ID NO: 2454127 - RNA, 12 nt, Human
ucagccuggcca

SEQ ID NO: 2454128 - RNA, 14 nt, Human
ucagccuggccaga

SEQ ID NO: 2454129 - RNA, 20 nt, Human
ucagccuccuguguagcugg

SEQ ID NO: 2454130 - RNA, 18 nt, Human
ucagccugcuccagcugu

SEQ ID NO: 2454131 - RNA, 19 nt, Human
ucagccugcuccagcuguu

SEQ ID NO: 2454132 - RNA, 22 nt, Human
ucagccuccugaguagcuggga

SEQ ID NO: 2454133 - RNA, 19 nt, Human
ucagccuccucaucugggg

SEQ ID NO: 2454134 - RNA, 13 nt, Human
ucagccuccugug

SEQ ID NO: 2454135 - RNA, 14 nt, Human
ucagccuccugugu

SEQ ID NO: 2454136 - RNA, 16 nt, Human
ucagccuccuguguag

SEQ ID NO: 2454137 - RNA, 21 nt, Human
ucagccuccugaguagcugga

SEQ ID NO: 2454138 - RNA, 13 nt, Human
ucagccuccugag

SEQ ID NO: 2454139 - RNA, 22 nt, Human
ucagccucccgaguagcuggga

SEQ ID NO: 2454140 - RNA, 21 nt, Human
ucagccucccgaguagcuggg

SEQ ID NO: 2454141 - RNA, 13 nt, Human
ucagccuccucau

SEQ ID NO: 2454142 - RNA, 21 nt, Human
ucagccucccgaguagcugag

SEQ ID NO: 2454143 - RNA, 20 nt, Human
ucagccuccggaguagcugg

SEQ ID NO: 2454144 - RNA, 20 nt, Human
ucagccuccugaguagcugg

SEQ ID NO: 2454145 - RNA, 17 nt, Human
ucaggcuagauguaugu

SEQ ID NO: 2454146 - RNA, 13 nt, Human
ucaggcuagaugu

SEQ ID NO: 2454147 - RNA, 18 nt, Human
ucaggcaaggucuggccu

SEQ ID NO: 2454148 - RNA, 17 nt, Human
ucaggcaaggucuggcc

SEQ ID NO: 2454149 - RNA, 15 nt, Human
ucaggcuccauuagg

SEQ ID NO: 2454150 - RNA, 11 nt, Human
ucaggcuccau

SEQ ID NO: 2454151 - RNA, 22 nt, Human
ucaggcacuagccuuuggcucu

SEQ ID NO: 2454152 - RNA, 21 nt, Human
ucaggcacuagccuuuggcuc

SEQ ID NO: 2454153 - RNA, 16 nt, Human
ucaggcacuagccuuu

SEQ ID NO: 2454154 - RNA, 15 nt, Human
ucaggcacuagccuu

SEQ ID NO: 2454155 - RNA, 20 nt, Human
ucaggcuccauuaggauuug

SEQ ID NO: 2454156 - RNA, 16 nt, Human
ucaggcuccauuagga

SEQ ID NO: 2454157 - RNA, 13 nt, Human
ucaggcucugccc

SEQ ID NO: 2454158 - RNA, 15 nt, Human
ucaggcucugccuca

SEQ ID NO: 2454159 - RNA, 21 nt, Human
ucaggcugcuggcgccucugc

SEQ ID NO: 2454160 - RNA, 14 nt, Human
ucaggcucugcccu

SEQ ID NO: 2454161 - RNA, 19 nt, Human
ucaggcucugcccugcccu

SEQ ID NO: 2454162 - RNA, 14 nt, Human
ucaggcugguggga

SEQ ID NO: 2454163 - RNA, 22 nt, Human
ucaggcugcuggcgccucugca

SEQ ID NO: 2454164 - RNA, 15 nt, Human
ucaggcugcuuggga

SEQ ID NO: 2454165 - RNA, 17 nt, Human
ucaggcuggugggaggg

SEQ ID NO: 2454166 - RNA, 16 nt, Human
ucaggcuggugggagg

SEQ ID NO: 2454167 - RNA, 14 nt, Human
ucaggcuuccuugg

SEQ ID NO: 2454168 - RNA, 15 nt, Human
ucaggcuuccuuggc

SEQ ID NO: 2454169 - RNA, 23 nt, Human
ucaggcuuccuuggcaucacagg

SEQ ID NO: 2454170 - RNA, 18 nt, Human
ucaggagcccugggaggc

SEQ ID NO: 2454171 - RNA, 19 nt, Human
ucaggagcccugggaggcu

SEQ ID NO: 2454172 - RNA, 23 nt, Human
ucagcucccccuguccccucagc

SEQ ID NO: 2454173 - RNA, 22 nt, Human
ucagcucccccuguccccucag

SEQ ID NO: 2454174 - RNA, 16 nt, Human
ucagcugccccacagg

SEQ ID NO: 2454175 - RNA, 23 nt, Human
ucaggagcccugggaggcucugg

SEQ ID NO: 2454176 - RNA, 20 nt, Human
ucaggagcccugggaggcuc

SEQ ID NO: 2454177 - RNA, 20 nt, Human
ucaggaugauacacuaugaa

SEQ ID NO: 2454178 - RNA, 22 nt, Human
ucaggaugcccagggccacucu

SEQ ID NO: 2454179 - RNA, 17 nt, Human
ucaggauucuguuccuu

SEQ ID NO: 2454180 - RNA, 13 nt, Human
ucaggaugcccag

SEQ ID NO: 2454181 - RNA, 14 nt, Human
ucaggaugcccagg

SEQ ID NO: 2454182 - RNA, 15 nt, Human
ucaggaugcccaggg

SEQ ID NO: 2454183 - RNA, 16 nt, Human
ucaggaugcccagggc

SEQ ID NO: 2454184 - RNA, 19 nt, Human
ucagggcccaagucccugu

SEQ ID NO: 2454185 - RNA, 18 nt, Human
ucagggcccaagucccug

SEQ ID NO: 2454186 - RNA, 15 nt, Human
ucagggcccaagucc

SEQ ID NO: 2454187 - RNA, 14 nt, Human
ucagggcccaaguc

SEQ ID NO: 2454188 - RNA, 17 nt, Human
ucagggccaugccugcc

SEQ ID NO: 2454189 - RNA, 23 nt, Human
ucagggccaugcugaggccuggg

SEQ ID NO: 2454190 - RNA, 21 nt, Human
ucagggccaugcugaggccug

SEQ ID NO: 2454191 - RNA, 19 nt, Human
ucagggccaugcugaggcc

SEQ ID NO: 2454192 - RNA, 18 nt, Human
ucagggccaugcugaggc

SEQ ID NO: 2454193 - RNA, 16 nt, Human
ucagggccuggcucag

SEQ ID NO: 2454194 - RNA, 14 nt, Human
ucagggccuggcuc

SEQ ID NO: 2454195 - RNA, 15 nt, Human
ucaggugagaagcag

SEQ ID NO: 2454196 - RNA, 16 nt, Human
ucaggugagaagcaga

SEQ ID NO: 2454197 - RNA, 20 nt, Human
ucagggcuccugccuucugu

SEQ ID NO: 2454198 - RNA, 15 nt, Human
ucagggcuccugccu

SEQ ID NO: 2454199 - RNA, 14 nt, Human
ucagggcuccugcc

SEQ ID NO: 2454200 - RNA, 13 nt, Human
ucagggcuccugc

SEQ ID NO: 2454201 - RNA, 23 nt, Human
ucagggcuaaacgggcauugccu

SEQ ID NO: 2454202 - RNA, 23 nt, Human
ucagggcgcacagcaugagaggc

SEQ ID NO: 2454203 - RNA, 14 nt, Human
ucagggccccagca

SEQ ID NO: 2454204 - RNA, 16 nt, Human
ucagggccccagcacu

SEQ ID NO: 2454205 - RNA, 23 nt, Human
ucagggccccagcacuaaagcag

SEQ ID NO: 2454206 - RNA, 22 nt, Human
ucagggcacugcugcugccuuu

SEQ ID NO: 2454207 - RNA, 21 nt, Human
ucagggauggccguuggccac

SEQ ID NO: 2454208 - RNA, 15 nt, Human
ucagggaucuugcau

SEQ ID NO: 2454209 - RNA, 20 nt, Human
ucagggauuuuuuuuuuaaa

SEQ ID NO: 2454210 - RNA, 23 nt, Human
ucagggauagcacugagcaaagc

SEQ ID NO: 2454211 - RNA, 17 nt, Human
ucagggccaugcugagg

SEQ ID NO: 2454212 - RNA, 14 nt, Human
ucagggccaugcug

SEQ ID NO: 2454213 - RNA, 13 nt, Human
ucagggccaugcu

SEQ ID NO: 2454214 - RNA, 14 nt, Human
ucagggccaugccu

SEQ ID NO: 2454215 - RNA, 15 nt, Human
ucagggcagcgccag

SEQ ID NO: 2454216 - RNA, 19 nt, Human
ucagggcagcgccaggcug

SEQ ID NO: 2454217 - RNA, 16 nt, Human
ucagggcagggcucug

SEQ ID NO: 2454218 - RNA, 22 nt, Human
ucagggaaccguuauuauaauu

SEQ ID NO: 2454219 - RNA, 17 nt, Human
ucagggaccccugcccu

SEQ ID NO: 2454220 - RNA, 16 nt, Human
ucagggaaaggccagu

SEQ ID NO: 2454221 - RNA, 15 nt, Human
ucagggaggucauuu

SEQ ID NO: 2454222 - RNA, 21 nt, Human
ucagggagugggcuaagcacg

SEQ ID NO: 2454223 - RNA, 16 nt, Human
ucaggcuugaaaugca

SEQ ID NO: 2454224 - RNA, 20 nt, Human
ucaggcuuucacuauuuccu

SEQ ID NO: 2454225 - RNA, 21 nt, Human
ucaggcuuucacuauuuccuu

SEQ ID NO: 2454226 - RNA, 18 nt, Human
ucaggcuugaaaugcauu

SEQ ID NO: 2454227 - RNA, 16 nt, Human
ucagggaaaagcagcu

SEQ ID NO: 2454228 - RNA, 18 nt, Human
ucagggaaaagcagcucu

SEQ ID NO: 2454229 - RNA, 19 nt, Human
ucagggaaaagcagcucuc

SEQ ID NO: 2454230 - RNA, 23 nt, Human
ucagggaaaagcagcucuccccu

SEQ ID NO: 2454231 - RNA, 22 nt, Human
ucacugcugcaaggccuuucug

SEQ ID NO: 2454232 - RNA, 18 nt, Human
ucacugcugcaaggccuu

SEQ ID NO: 2454233 - RNA, 17 nt, Human
ucacugcugcaaggccu

SEQ ID NO: 2454234 - RNA, 12 nt, Human
ucacugcugcaa

SEQ ID NO: 2454235 - RNA, 12 nt, Human
ucacugcuggcu

SEQ ID NO: 2454236 - RNA, 24 nt, Human
ucacugcucccugaagccagccuu

SEQ ID NO: 2454237 - RNA, 23 nt, Human
ucacugcucccugaagccagccu

SEQ ID NO: 2454238 - RNA, 21 nt, Human
ucacugcucccugaagccagc

SEQ ID NO: 2454239 - RNA, 20 nt, Human
ucacugcucccugaagccag

SEQ ID NO: 2454240 - RNA, 19 nt, Human
ucacugcucccugaagcca

SEQ ID NO: 2454241 - RNA, 18 nt, Human
ucacugcucccugaagcc

SEQ ID NO: 2454242 - RNA, 14 nt, Human
ucacugcucccuga

SEQ ID NO: 2454243 - RNA, 16 nt, Human
ucacugcuggcugccu

SEQ ID NO: 2454244 - RNA, 15 nt, Human
ucacugcuggcugcc

SEQ ID NO: 2454245 - RNA, 14 nt, Human
ucacugcuggcugc

SEQ ID NO: 2454246 - RNA, 13 nt, Human
ucacugcuggcug

SEQ ID NO: 2454247 - RNA, 16 nt, Human
ucacugcugucaucaa

SEQ ID NO: 2454248 - RNA, 15 nt, Human
ucacugcugucauca

SEQ ID NO: 2454249 - RNA, 14 nt, Human
ucacugcuuaacuu

SEQ ID NO: 2454250 - RNA, 13 nt, Human
ucacugcugucau

SEQ ID NO: 2454251 - RNA, 12 nt, Human
ucacugcuguca

SEQ ID NO: 2454252 - RNA, 11 nt, Human
ucacugcuguc

SEQ ID NO: 2454253 - RNA, 10 nt, Human
ucacugcugu

SEQ ID NO: 2454254 - RNA, 22 nt, Human
ucacugcuggcugccuuagaac

SEQ ID NO: 2454255 - RNA, 18 nt, Human
ucacugcuggcugccuua

SEQ ID NO: 2454256 - RNA, 17 nt, Human
ucacugcuggcugccuu

SEQ ID NO: 2454257 - RNA, 14 nt, Human
ucacuggaacucag

SEQ ID NO: 2454258 - RNA, 23 nt, Human
ucacuggaaaggggagagccugc

SEQ ID NO: 2454259 - RNA, 21 nt, Human
ucacuggaaaggggagagccu

SEQ ID NO: 2454260 - RNA, 18 nt, Human
ucacuggaaaggggagag

SEQ ID NO: 2454261 - RNA, 17 nt, Human
ucacuggaaaggggaga

SEQ ID NO: 2454262 - RNA, 15 nt, Human
ucacuggaaagggga

SEQ ID NO: 2454263 - RNA, 18 nt, Human
ucacuggaccacugggca

SEQ ID NO: 2454264 - RNA, 17 nt, Human
ucacuggagcaccaggc

SEQ ID NO: 2454265 - RNA, 17 nt, Human
ucacuggggccuacagc

SEQ ID NO: 2454266 - RNA, 21 nt, Human
ucacuggcugccuccacuccc

SEQ ID NO: 2454267 - RNA, 14 nt, Human
ucacuggagcccag

SEQ ID NO: 2454268 - RNA, 15 nt, Human
ucacuggagcccagg

SEQ ID NO: 2454269 - RNA, 18 nt, Human
ucacuggagcaccaggca

SEQ ID NO: 2454270 - RNA, 22 nt, Human
ucacuggagcaccaggcacgaa

SEQ ID NO: 2454271 - RNA, 11 nt, Human
ucacuggagcc

SEQ ID NO: 2454272 - RNA, 12 nt, Human
ucacuggagccc

SEQ ID NO: 2454273 - RNA, 13 nt, Human
ucacuggagccca

SEQ ID NO: 2454274 - RNA, 21 nt, Human
ucacuugugccaacacucaag

SEQ ID NO: 2454275 - RNA, 12 nt, Human
ucacuugugggg

SEQ ID NO: 2454276 - RNA, 19 nt, Human
ucacuugugccaacacuca

SEQ ID NO: 2454277 - RNA, 20 nt, Human
ucacuguagaaugauuucau

SEQ ID NO: 2454278 - RNA, 17 nt, Human
ucacuugugcaguguug

SEQ ID NO: 2454279 - RNA, 18 nt, Human
ucacugguagaccaaaau

SEQ ID NO: 2454280 - RNA, 19 nt, Human
ucacugguagaccaaaaua

SEQ ID NO: 2454281 - RNA, 20 nt, Human
ucacugguagaccaaaauaa

SEQ ID NO: 2454282 - RNA, 23 nt, Human
ucacuguaagacucauucccuag

SEQ ID NO: 2454283 - RNA, 18 nt, Human
ucacuggguggggugagg

SEQ ID NO: 2454284 - RNA, 16 nt, Human
ucacugggguccuggg

SEQ ID NO: 2454285 - RNA, 17 nt, Human
ucacugggguccugggg

SEQ ID NO: 2454286 - RNA, 19 nt, Human
ucacugggguccuggggcc

SEQ ID NO: 2454287 - RNA, 20 nt, Human
ucacugggguccuggggccu

SEQ ID NO: 2454288 - RNA, 21 nt, Human
ucacugggguccuggggccuc

SEQ ID NO: 2454289 - RNA, 11 nt, Human
ucacugggugg

SEQ ID NO: 2454290 - RNA, 20 nt, Human
ucacuggguggggugaggac

SEQ ID NO: 2454291 - RNA, 17 nt, Human
ucacucuuauugcccac

SEQ ID NO: 2454292 - RNA, 20 nt, Human
ucaccccucccuuucucccc

SEQ ID NO: 2454293 - RNA, 18 nt, Human
ucaccccucccuuucucc

SEQ ID NO: 2454294 - RNA, 17 nt, Human
ucaccccucccuuucuc

SEQ ID NO: 2454295 - RNA, 14 nt, Human
ucaccccucccuuu

SEQ ID NO: 2454296 - RNA, 18 nt, Human
ucaccccugguucucauc

SEQ ID NO: 2454297 - RNA, 15 nt, Human
ucaccccugguucuc

SEQ ID NO: 2454298 - RNA, 13 nt, Human
ucaccccugcccu

SEQ ID NO: 2454299 - RNA, 14 nt, Human
ucaccccugcccug

SEQ ID NO: 2454300 - RNA, 16 nt, Human
ucaccccugcccuggg

SEQ ID NO: 2454301 - RNA, 17 nt, Human
ucaccccugcccuggga

SEQ ID NO: 2454302 - RNA, 16 nt, Human
ucaccagccccagugc

SEQ ID NO: 2454303 - RNA, 13 nt, Human
ucaccagccccag

SEQ ID NO: 2454304 - RNA, 22 nt, Human
ucaccccggccaccugcggugc

SEQ ID NO: 2454305 - RNA, 14 nt, Human
ucaccccgucuggg

SEQ ID NO: 2454306 - RNA, 14 nt, Human
ucaccccuccagga

SEQ ID NO: 2454307 - RNA, 13 nt, Human
ucaccccuccagg

SEQ ID NO: 2454308 - RNA, 17 nt, Human
ucaccccuccacccuug

SEQ ID NO: 2454309 - RNA, 12 nt, Human
ucaccccuccac

SEQ ID NO: 2454310 - RNA, 19 nt, Human
ucacugccaggccagccuc

SEQ ID NO: 2454311 - RNA, 18 nt, Human
ucacugccaggccagccu

SEQ ID NO: 2454312 - RNA, 16 nt, Human
ucacugccaggccagc

SEQ ID NO: 2454313 - RNA, 15 nt, Human
ucacugccaggccag

SEQ ID NO: 2454314 - RNA, 23 nt, Human
ucacugccaggccagccuccgag

SEQ ID NO: 2454315 - RNA, 20 nt, Human
ucacugccaggccagccucc

SEQ ID NO: 2454316 - RNA, 13 nt, Human
ucacugccauaua

SEQ ID NO: 2454317 - RNA, 18 nt, Human
ucacugccaugccagcuu

SEQ ID NO: 2454318 - RNA, 14 nt, Human
ucacugccuuugcu

SEQ ID NO: 2454319 - RNA, 22 nt, Human
ucacugccugcagaggucugug

SEQ ID NO: 2454320 - RNA, 15 nt, Human
ucacugccugcagag

SEQ ID NO: 2454321 - RNA, 19 nt, Human
ucacugcuaagaauauuug

SEQ ID NO: 2454322 - RNA, 11 nt, Human
ucacugccucu

SEQ ID NO: 2454323 - RNA, 12 nt, Human
ucacugccucuc

SEQ ID NO: 2454324 - RNA, 19 nt, Human
ucacugccucucccuggcc

SEQ ID NO: 2454325 - RNA, 14 nt, Human
ucacugccugcaga

SEQ ID NO: 2454326 - RNA, 21 nt, Human
ucacugccucucccuggcccu

SEQ ID NO: 2454327 - RNA, 14 nt, Human
ucacugccaggcca

SEQ ID NO: 2454328 - RNA, 11 nt, Human
ucacugccagg

SEQ ID NO: 2454329 - RNA, 13 nt, Human
ucacugcauccuc

SEQ ID NO: 2454330 - RNA, 19 nt, Human
ucacugcauccuccgccuc

SEQ ID NO: 2454331 - RNA, 20 nt, Human
ucacucuuauugcccacgcu

SEQ ID NO: 2454332 - RNA, 18 nt, Human
ucacugcauccuccgccu

SEQ ID NO: 2454333 - RNA, 21 nt, Human
ucagaggggaauaaacuguug

SEQ ID NO: 2454334 - RNA, 12 nt, Human
ucagagaauuuc

SEQ ID NO: 2454335 - RNA, 22 nt, Human
ucagaguaauccaagcaaaugu

SEQ ID NO: 2454336 - RNA, 21 nt, Human
ucagaguaauccaagcaaaug

SEQ ID NO: 2454337 - RNA, 16 nt, Human
ucagacuuuggaaaau

SEQ ID NO: 2454338 - RNA, 19 nt, Human
ucagacuuuggaaaaugca

SEQ ID NO: 2454339 - RNA, 21 nt, Human
ucagacuuuggaaaaugcauu

SEQ ID NO: 2454340 - RNA, 20 nt, Human
ucagacuuuggaaaaugcau

SEQ ID NO: 2454341 - RNA, 16 nt, Human
ucagacuuuaaagaau

SEQ ID NO: 2454342 - RNA, 13 nt, Human
ucagacuuugcuu

SEQ ID NO: 2454343 - RNA, 15 nt, Human
ucagacuuuggaaaa

SEQ ID NO: 2454344 - RNA, 17 nt, Human
ucagacuuuaaagaaua

SEQ ID NO: 2454345 - RNA, 23 nt, Human
ucagacuuuaaagaauaauaugc

SEQ ID NO: 2454346 - RNA, 23 nt, Human
ucagaccauaauguuacauuauu

SEQ ID NO: 2454347 - RNA, 15 nt, Human
ucagaccauaauguu

SEQ ID NO: 2454348 - RNA, 14 nt, Human
ucagacagcugccu

SEQ ID NO: 2454349 - RNA, 12 nt, Human
ucagaccccagc

SEQ ID NO: 2454350 - RNA, 13 nt, Human
ucagaccccagcg

SEQ ID NO: 2454351 - RNA, 17 nt, Human
ucagaccccagcggcug

SEQ ID NO: 2454352 - RNA, 12 nt, Human
ucagacccccac

SEQ ID NO: 2454353 - RNA, 14 nt, Human
ucagacccccacuc

SEQ ID NO: 2454354 - RNA, 18 nt, Human
ucagacccccacucucau

SEQ ID NO: 2454355 - RNA, 22 nt, Human
ucagacccccacucucauuccc

SEQ ID NO: 2454356 - RNA, 13 nt, Human
ucagacagcugcc

SEQ ID NO: 2454357 - RNA, 22 nt, Human
ucagacagagaggacuguaggg

SEQ ID NO: 2454358 - RNA, 17 nt, Human
ucagacagagaggacug

SEQ ID NO: 2454359 - RNA, 16 nt, Human
ucagacgccugaggaa

SEQ ID NO: 2454360 - RNA, 23 nt, Human
ucagacugcugggacuggccagg

SEQ ID NO: 2454361 - RNA, 13 nt, Human
ucagacuggcugg

SEQ ID NO: 2454362 - RNA, 14 nt, Human
ucagacuggcuggc

SEQ ID NO: 2454363 - RNA, 15 nt, Human
ucagacuuaccagga

SEQ ID NO: 2454364 - RNA, 20 nt, Human
ucagacuggcuggcugcagu

SEQ ID NO: 2454365 - RNA, 21 nt, Human
ucagacuggcuggcugcagug

SEQ ID NO: 2454366 - RNA, 20 nt, Human
ucagaccuuggaucagauga

SEQ ID NO: 2454367 - RNA, 13 nt, Human
ucagacccuuuag

SEQ ID NO: 2454368 - RNA, 13 nt, Human
ucagacccuaccc

SEQ ID NO: 2454369 - RNA, 14 nt, Human
ucagacccuacccc

SEQ ID NO: 2454370 - RNA, 16 nt, Human
ucagacccuaccccac

SEQ ID NO: 2454371 - RNA, 18 nt, Human
ucagacccuaccccacca

SEQ ID NO: 2454372 - RNA, 17 nt, Human
ucagacgccugaggaac

SEQ ID NO: 2454373 - RNA, 21 nt, Human
ucagaccuuggaucagaugaa

SEQ ID NO: 2454374 - RNA, 11 nt, Human
ucagacaagca

SEQ ID NO: 2454375 - RNA, 16 nt, Human
ucagaauucucuaguu

SEQ ID NO: 2454376 - RNA, 21 nt, Human
ucagaauugaucauuuucccc

SEQ ID NO: 2454377 - RNA, 18 nt, Human
ucagacacucuggcuggu

SEQ ID NO: 2454378 - RNA, 17 nt, Human
ucagacacucuggcugg

SEQ ID NO: 2454379 - RNA, 18 nt, Human
ucagacagaaccccuaca

SEQ ID NO: 2454380 - RNA, 15 nt, Human
ucagacacucuggcu

SEQ ID NO: 2454381 - RNA, 14 nt, Human
ucagacacucuggc

SEQ ID NO: 2454382 - RNA, 23 nt, Human
ucagacacccucaaccucuucug

SEQ ID NO: 2454383 - RNA, 17 nt, Human
ucagacacccucaaccu

SEQ ID NO: 2454384 - RNA, 22 nt, Human
ucagacacccucaaccucuucu

SEQ ID NO: 2454385 - RNA, 15 nt, Human
ucagacacccucaac

SEQ ID NO: 2454386 - RNA, 23 nt, Human
ucagaauucucuaguuugauuaa

SEQ ID NO: 2454387 - RNA, 14 nt, Human
ucagaaauuuaauu

SEQ ID NO: 2454388 - RNA, 21 nt, Human
ucagaaauuuaauucauguuu

SEQ ID NO: 2454389 - RNA, 21 nt, Human
ucagaaauuggaacagaaugu

SEQ ID NO: 2454390 - RNA, 23 nt, Human
ucagaaauuuaauucauguuucu

SEQ ID NO: 2454391 - RNA, 15 nt, Human
ucagaaauguguuau

SEQ ID NO: 2454392 - RNA, 21 nt, Human
ucagaaaugcugccugccugu

SEQ ID NO: 2454393 - RNA, 19 nt, Human
ucagaaaugcugccugccu

SEQ ID NO: 2454394 - RNA, 17 nt, Human
ucagaaaugcugccugc

SEQ ID NO: 2454395 - RNA, 16 nt, Human
ucagaaaugcugccug

SEQ ID NO: 2454396 - RNA, 18 nt, Human
ucagaaauuggaacagaa

SEQ ID NO: 2454397 - RNA, 16 nt, Human
ucagaaauuggaacag

SEQ ID NO: 2454398 - RNA, 18 nt, Human
ucagaaauguacaacuuu

SEQ ID NO: 2454399 - RNA, 16 nt, Human
ucacuuuaauucucau

SEQ ID NO: 2454400 - RNA, 15 nt, Human
ucacuuuaauucuca

SEQ ID NO: 2454401 - RNA, 23 nt, Human
ucacuuguuguuuuacuaaagaa

SEQ ID NO: 2454402 - RNA, 20 nt, Human
ucacuuuaauucucauguga

SEQ ID NO: 2454403 - RNA, 18 nt, Human
ucacuuuaauucucaugu

SEQ ID NO: 2454404 - RNA, 14 nt, Human
ucacuuuagaugcu

SEQ ID NO: 2454405 - RNA, 22 nt, Human
ucacuuguuguuuuacuaaaga

SEQ ID NO: 2454406 - RNA, 21 nt, Human
ucacuuguuguuuuacuaaag

SEQ ID NO: 2454407 - RNA, 20 nt, Human
ucacuuguuguuuuacuaaa

SEQ ID NO: 2454408 - RNA, 15 nt, Human
ucacuuguuguuuua

SEQ ID NO: 2454409 - RNA, 17 nt, Human
ucacuuuagaugcugau

SEQ ID NO: 2454410 - RNA, 16 nt, Human
ucacuuuagaugcuga

SEQ ID NO: 2454411 - RNA, 15 nt, Human
ucacuuuagaugcug

SEQ ID NO: 2454412 - RNA, 22 nt, Human
ucacuuuaauucucaugugauc

SEQ ID NO: 2454413 - RNA, 17 nt, Human
ucacuuucacauagaug

SEQ ID NO: 2454414 - RNA, 18 nt, Human
ucacuuucacauagaugu

SEQ ID NO: 2454415 - RNA, 21 nt, Human
ucagaaacacccucacacugg

SEQ ID NO: 2454416 - RNA, 22 nt, Human
ucagaaacacccucacacuggg

SEQ ID NO: 2454417 - RNA, 19 nt, Human
ucagaaacacccucacacu

SEQ ID NO: 2454418 - RNA, 10 nt, Human
ucagaaaugu

SEQ ID NO: 2454419 - RNA, 15 nt, Human
ucagaaacuugugaa

SEQ ID NO: 2454420 - RNA, 16 nt, Human
ucagaaacuugugaag

SEQ ID NO: 2454421 - RNA, 17 nt, Human
ucagaaacuugugaagu

SEQ ID NO: 2454422 - RNA, 18 nt, Human
ucagaaacuugugaagug

SEQ ID NO: 2454423 - RNA, 12 nt, Human
ucagaaacuguu

SEQ ID NO: 2454424 - RNA, 22 nt, Human
ucagaaaccaguuaugugaaug

SEQ ID NO: 2454425 - RNA, 18 nt, Human
ucagaaaccaaacaguuu

SEQ ID NO: 2454426 - RNA, 21 nt, Human
ucagaaacacuggggcuggca

SEQ ID NO: 2454427 - RNA, 13 nt, Human
ucagaaaccaguu

SEQ ID NO: 2454428 - RNA, 18 nt, Human
ucagaaacaucaguuacu

SEQ ID NO: 2454429 - RNA, 22 nt, Human
ucagaaacaucaguuacucuga

SEQ ID NO: 2454430 - RNA, 18 nt, Human
ucagaaacacuggggcug

SEQ ID NO: 2454431 - RNA, 13 nt, Human
ucauuaucucaaa

SEQ ID NO: 2454432 - RNA, 19 nt, Human
ucauuaucucaaaacugca

SEQ ID NO: 2454433 - RNA, 20 nt, Human
ucauuaucucaaaacugcac

SEQ ID NO: 2454434 - RNA, 20 nt, Human
ucauuauguaaaauguuuua

SEQ ID NO: 2454435 - RNA, 13 nt, Human
ucauuauguaaaa

SEQ ID NO: 2454436 - RNA, 13 nt, Human
ucauuauaaacgu

SEQ ID NO: 2454437 - RNA, 15 nt, Human
ucauuauaaacguga

SEQ ID NO: 2454438 - RNA, 23 nt, Human
ucauuauaaacgugaugaucagc

SEQ ID NO: 2454439 - RNA, 17 nt, Human
ucauuauagauccccca

SEQ ID NO: 2454440 - RNA, 17 nt, Human
ucauuccaacagugagu

SEQ ID NO: 2454441 - RNA, 23 nt, Human
ucauuccaccuucccaugcccug

SEQ ID NO: 2454442 - RNA, 13 nt, Human
ucauucaauaaau

SEQ ID NO: 2454443 - RNA, 16 nt, Human
ucauucaauacaagug

SEQ ID NO: 2454444 - RNA, 14 nt, Human
ucauuccagaggaa

SEQ ID NO: 2454445 - RNA, 21 nt, Human
ucauuccaacuucccaguuca

SEQ ID NO: 2454446 - RNA, 14 nt, Human
ucauuccauucugg

SEQ ID NO: 2454447 - RNA, 15 nt, Human
ucauuccauucugga

SEQ ID NO: 2454448 - RNA, 21 nt, Human
ucauucaacccaccugcgucu

SEQ ID NO: 2454449 - RNA, 22 nt, Human
ucauucaaguguaaaauauuuu

SEQ ID NO: 2454450 - RNA, 22 nt, Human
ucauucaaaaguugaaauuaac

SEQ ID NO: 2454451 - RNA, 16 nt, Human
ucauucaaaaguugaa

SEQ ID NO: 2454452 - RNA, 18 nt, Human
ucauucaaaaguugaaau

SEQ ID NO: 2454453 - RNA, 17 nt, Human
ucauuauuuuuccacuu

SEQ ID NO: 2454454 - RNA, 14 nt, Human
ucauuauuggaggg

SEQ ID NO: 2454455 - RNA, 19 nt, Human
ucauuauuggaauuaaccu

SEQ ID NO: 2454456 - RNA, 21 nt, Human
ucauuauuggaauuaaccugg

SEQ ID NO: 2454457 - RNA, 18 nt, Human
ucauuauagaucccccag

SEQ ID NO: 2454458 - RNA, 14 nt, Human
ucauuauuggaauu

SEQ ID NO: 2454459 - RNA, 17 nt, Human
ucauuauuggaauuaac

SEQ ID NO: 2454460 - RNA, 18 nt, Human
ucauuauuggaauuaacc

SEQ ID NO: 2454461 - RNA, 16 nt, Human
ucauuuccaagcaagu

SEQ ID NO: 2454462 - RNA, 15 nt, Human
ucauuucauuuccua

SEQ ID NO: 2454463 - RNA, 19 nt, Human
ucauuucauuguaugaugu

SEQ ID NO: 2454464 - RNA, 13 nt, Human
ucauuuccaagca

SEQ ID NO: 2454465 - RNA, 14 nt, Human
ucauuucauuguau

SEQ ID NO: 2454466 - RNA, 16 nt, Human
ucauuucauuccuaac

SEQ ID NO: 2454467 - RNA, 15 nt, Human
ucauuucuacuguga

SEQ ID NO: 2454468 - RNA, 23 nt, Human
ucauuuccugcccuuccucaguu

SEQ ID NO: 2454469 - RNA, 21 nt, Human
ucauuuccuucaaggcaucau

SEQ ID NO: 2454470 - RNA, 19 nt, Human
ucauuucuacugugacuga

SEQ ID NO: 2454471 - RNA, 18 nt, Human
ucauuucuacugugacug

SEQ ID NO: 2454472 - RNA, 13 nt, Human
ucauuucuauuuc

SEQ ID NO: 2454473 - RNA, 16 nt, Human
ucauuuccugugucuu

SEQ ID NO: 2454474 - RNA, 13 nt, Human
ucauuuccugugu

SEQ ID NO: 2454475 - RNA, 15 nt, Human
ucauuuccugcccuu

SEQ ID NO: 2454476 - RNA, 14 nt, Human
ucauuuccugcccu

SEQ ID NO: 2454477 - RNA, 13 nt, Human
ucauuuccugccc

SEQ ID NO: 2454478 - RNA, 12 nt, Human
ucauuuccugcc

SEQ ID NO: 2454479 - RNA, 13 nt, Human
ucauuuccucaaa

SEQ ID NO: 2454480 - RNA, 22 nt, Human
ucauuuccuauguaacugcauu

SEQ ID NO: 2454481 - RNA, 18 nt, Human
ucauugugaaauuauuca

SEQ ID NO: 2454482 - RNA, 17 nt, Human
ucauugugaaauuauuc

SEQ ID NO: 2454483 - RNA, 15 nt, Human
ucauugugaaauuau

SEQ ID NO: 2454484 - RNA, 12 nt, Human
ucauugugaaau

SEQ ID NO: 2454485 - RNA, 21 nt, Human
ucauuucaccccucccuuucu

SEQ ID NO: 2454486 - RNA, 16 nt, Human
ucauuucaccccuccc

SEQ ID NO: 2454487 - RNA, 15 nt, Human
ucauuucaccccucc

SEQ ID NO: 2454488 - RNA, 14 nt, Human
ucauuucaccccuc

SEQ ID NO: 2454489 - RNA, 16 nt, Human
ucauuccauucuggaa

SEQ ID NO: 2454490 - RNA, 18 nt, Human
ucauugucuguguagagu

SEQ ID NO: 2454491 - RNA, 23 nt, Human
ucauuucaccccucccuuucucc

SEQ ID NO: 2454492 - RNA, 16 nt, Human
ucauuucaggagcagc

SEQ ID NO: 2454493 - RNA, 15 nt, Human
ucauuucaggagcag

SEQ ID NO: 2454494 - RNA, 12 nt, Human
ucauuucaggau

SEQ ID NO: 2454495 - RNA, 14 nt, Human
ucaucuucucagcu

SEQ ID NO: 2454496 - RNA, 16 nt, Human
ucaucuuacuguaccu

SEQ ID NO: 2454497 - RNA, 13 nt, Human
ucaucuucucagc

SEQ ID NO: 2454498 - RNA, 18 nt, Human
ucaucugcucuccuuccu

SEQ ID NO: 2454499 - RNA, 17 nt, Human
ucaucugcucuccuucc

SEQ ID NO: 2454500 - RNA, 19 nt, Human
ucaucuucaccagaggaau

SEQ ID NO: 2454501 - RNA, 12 nt, Human
ucaucuuacugu

SEQ ID NO: 2454502 - RNA, 16 nt, Human
ucaucugcucuccuuc

SEQ ID NO: 2454503 - RNA, 15 nt, Human
ucaucugcucuccuu

SEQ ID NO: 2454504 - RNA, 14 nt, Human
ucaucugcucuccu

SEQ ID NO: 2454505 - RNA, 12 nt, Human
ucaucugcucuc

SEQ ID NO: 2454506 - RNA, 23 nt, Human
ucaucuuagguuggcaaaaaggc

SEQ ID NO: 2454507 - RNA, 14 nt, Human
ucaugcugaaagcc

SEQ ID NO: 2454508 - RNA, 16 nt, Human
ucaucuucuucaccau

SEQ ID NO: 2454509 - RNA, 19 nt, Human
ucaucuucucagcucccau

SEQ ID NO: 2454510 - RNA, 13 nt, Human
ucaugcugaaagc

SEQ ID NO: 2454511 - RNA, 11 nt, Human
ucaugcugaaa

SEQ ID NO: 2454512 - RNA, 19 nt, Human
ucaucuugaauuguaagga

SEQ ID NO: 2454513 - RNA, 18 nt, Human
ucaucuucucagcuccca

SEQ ID NO: 2454514 - RNA, 15 nt, Human
ucaucuucucagcuc

SEQ ID NO: 2454515 - RNA, 13 nt, Human
ucaucuucucugg

SEQ ID NO: 2454516 - RNA, 17 nt, Human
ucaucugcucagcagcu

SEQ ID NO: 2454517 - RNA, 13 nt, Human
ucaucugccgugc

SEQ ID NO: 2454518 - RNA, 17 nt, Human
ucaucaggggccugcag

SEQ ID NO: 2454519 - RNA, 22 nt, Human
ucaucaggaugaacccaggacg

SEQ ID NO: 2454520 - RNA, 14 nt, Human
ucaucaggaugaac

SEQ ID NO: 2454521 - RNA, 13 nt, Human
ucaucaggaugaa

SEQ ID NO: 2454522 - RNA, 11 nt, Human
ucaucaggaug

SEQ ID NO: 2454523 - RNA, 14 nt, Human
ucaucaguauugaa

SEQ ID NO: 2454524 - RNA, 15 nt, Human
ucaucagaagauaac

SEQ ID NO: 2454525 - RNA, 16 nt, Human
ucaucagccaccaucc

SEQ ID NO: 2454526 - RNA, 21 nt, Human
ucaucagcauaccuuuauugu

SEQ ID NO: 2454527 - RNA, 18 nt, Human
ucaucagccaccauccua

SEQ ID NO: 2454528 - RNA, 14 nt, Human
ucaucagcauaccu

SEQ ID NO: 2454529 - RNA, 22 nt, Human
ucaucacuggaugaagauucuc

SEQ ID NO: 2454530 - RNA, 15 nt, Human
ucaucacuggaugaa

SEQ ID NO: 2454531 - RNA, 17 nt, Human
ucaucacuuuucaguga

SEQ ID NO: 2454532 - RNA, 15 nt, Human
ucaucacuuuucagu

SEQ ID NO: 2454533 - RNA, 16 nt, Human
ucaucacuccccucca

SEQ ID NO: 2454534 - RNA, 15 nt, Human
ucaucacuccccucc

SEQ ID NO: 2454535 - RNA, 14 nt, Human
ucaucacuccccuc

SEQ ID NO: 2454536 - RNA, 18 nt, Human
ucauaccuaucaucuuaa

SEQ ID NO: 2454537 - RNA, 22 nt, Human
ucaggugaccaaaauccccuuc

SEQ ID NO: 2454538 - RNA, 21 nt, Human
ucaggugacaugugaaaccuu

SEQ ID NO: 2454539 - RNA, 15 nt, Human
ucauaccuacaugua

SEQ ID NO: 2454540 - RNA, 16 nt, Human
ucauaccuacauguau

SEQ ID NO: 2454541 - RNA, 23 nt, Human
ucagggcuccugccuucuguccu

SEQ ID NO: 2454542 - RNA, 21 nt, Human
ucagggcuccugccuucuguc

SEQ ID NO: 2454543 - RNA, 17 nt, Human
ucaggugacaugugaaa

SEQ ID NO: 2454544 - RNA, 21 nt, Human
ucauacccacccccacccaag

SEQ ID NO: 2454545 - RNA, 15 nt, Human
ucaggugcugccauc

SEQ ID NO: 2454546 - RNA, 14 nt, Human
ucaggugcugccau

SEQ ID NO: 2454547 - RNA, 13 nt, Human
ucaggugcugcca

SEQ ID NO: 2454548 - RNA, 23 nt, Human
ucaggugccucaagagaaggcaa

SEQ ID NO: 2454549 - RNA, 21 nt, Human
ucaggugagaagcagaggaag

SEQ ID NO: 2454550 - RNA, 22 nt, Human
ucauagcccaguagaccuuguu

SEQ ID NO: 2454551 - RNA, 12 nt, Human
ucauagcuaaga

SEQ ID NO: 2454552 - RNA, 21 nt, Human
ucauagcccucacccuggggc

SEQ ID NO: 2454553 - RNA, 21 nt, Human
ucauagcccagaucagcuccu

SEQ ID NO: 2454554 - RNA, 18 nt, Human
ucauagcccagaucagcu

SEQ ID NO: 2454555 - RNA, 14 nt, Human
ucauagcccaguag

SEQ ID NO: 2454556 - RNA, 19 nt, Human
ucauagcauuaacuaaucu

SEQ ID NO: 2454557 - RNA, 15 nt, Human
ucauacucaccucac

SEQ ID NO: 2454558 - RNA, 15 nt, Human
ucauacguccaccau

SEQ ID NO: 2454559 - RNA, 14 nt, Human
ucauacguccacca

SEQ ID NO: 2454560 - RNA, 20 nt, Human
ucauacuaucuacucuccuc

SEQ ID NO: 2454561 - RNA, 14 nt, Human
ucauagcauuaacu

SEQ ID NO: 2454562 - RNA, 21 nt, Human
ucauagcauuaacuaaucuau

SEQ ID NO: 2454563 - RNA, 21 nt, Human
ucaucaccaacgucugugcca

SEQ ID NO: 2454564 - RNA, 20 nt, Human
ucaucaccaacgucugugcc

SEQ ID NO: 2454565 - RNA, 19 nt, Human
ucaucaccaacgucugugc

SEQ ID NO: 2454566 - RNA, 21 nt, Human
ucauaggaagggaccaaggca

SEQ ID NO: 2454567 - RNA, 20 nt, Human
ucauaggaagggaccaaggc

SEQ ID NO: 2454568 - RNA, 20 nt, Human
ucauaggaaaaguacauuua

SEQ ID NO: 2454569 - RNA, 16 nt, Human
ucauagcuaagaaaua

SEQ ID NO: 2454570 - RNA, 13 nt, Human
ucauagcuaagaa

SEQ ID NO: 2454571 - RNA, 12 nt, Human
ucauagcugaga

SEQ ID NO: 2454572 - RNA, 17 nt, Human
ucauagcugagauuccu

SEQ ID NO: 2454573 - RNA, 15 nt, Human
uccacuuggucugug

SEQ ID NO: 2454574 - RNA, 16 nt, Human
uccacuuggucuguga

SEQ ID NO: 2454575 - RNA, 15 nt, Human
uccaccuucccaugc

SEQ ID NO: 2454576 - RNA, 14 nt, Human
uccacuuggucugu

SEQ ID NO: 2454577 - RNA, 13 nt, Human
uccaccugucuca

SEQ ID NO: 2454578 - RNA, 16 nt, Human
uccaccugucucagcc

SEQ ID NO: 2454579 - RNA, 17 nt, Human
uccaccugucucagccu

SEQ ID NO: 2454580 - RNA, 20 nt, Human
uccaccugucucagccuccc

SEQ ID NO: 2454581 - RNA, 17 nt, Human
uccagccagggcugcua

SEQ ID NO: 2454582 - RNA, 15 nt, Human
uccagccagggcugc

SEQ ID NO: 2454583 - RNA, 14 nt, Human
uccagccagggcug

SEQ ID NO: 2454584 - RNA, 13 nt, Human
uccagccagggcu

SEQ ID NO: 2454585 - RNA, 23 nt, Human
uccagccagcaaugauguccaga

SEQ ID NO: 2454586 - RNA, 23 nt, Human
uccagccaaccccuguggagccc

SEQ ID NO: 2454587 - RNA, 13 nt, Human
uccagccaacccc

SEQ ID NO: 2454588 - RNA, 14 nt, Human
uccagccaaccccu

SEQ ID NO: 2454589 - RNA, 16 nt, Human
uccagccaaccccugu

SEQ ID NO: 2454590 - RNA, 20 nt, Human
uccagccaaccccuguggag

SEQ ID NO: 2454591 - RNA, 17 nt, Human
uccagcuguucagcugg

SEQ ID NO: 2454592 - RNA, 21 nt, Human
uccagcuucugguacucuccu

SEQ ID NO: 2454593 - RNA, 20 nt, Human
uccagcuucugguacucucc

SEQ ID NO: 2454594 - RNA, 19 nt, Human
uccagcuucugguacucuc

SEQ ID NO: 2454595 - RNA, 16 nt, Human
uccaggagcagccaca

SEQ ID NO: 2454596 - RNA, 23 nt, Human
uccagcuucugguacucuccuag

SEQ ID NO: 2454597 - RNA, 15 nt, Human
uccagcuugcucuuc

SEQ ID NO: 2454598 - RNA, 16 nt, Human
uccagcuugcucuuca

SEQ ID NO: 2454599 - RNA, 17 nt, Human
uccagcuuguggagccc

SEQ ID NO: 2454600 - RNA, 16 nt, Human
uccagcuuguggagcc

SEQ ID NO: 2454601 - RNA, 17 nt, Human
uccagcuugcucuucag

SEQ ID NO: 2454602 - RNA, 19 nt, Human
uccagcuugcucuucagug

SEQ ID NO: 2454603 - RNA, 17 nt, Human
uccagcucaccagcccc

SEQ ID NO: 2454604 - RNA, 16 nt, Human
uccagcucaccagccc

SEQ ID NO: 2454605 - RNA, 18 nt, Human
uccagcucaccagcccca

SEQ ID NO: 2454606 - RNA, 13 nt, Human
uccagcuggugag

SEQ ID NO: 2454607 - RNA, 15 nt, Human
uccagcucaccagcc

SEQ ID NO: 2454608 - RNA, 18 nt, Human
uccaggagcagccacauu

SEQ ID NO: 2454609 - RNA, 17 nt, Human
uccaggagcagccacau

SEQ ID NO: 2454610 - RNA, 19 nt, Human
uccagcuuguggagcccca

SEQ ID NO: 2454611 - RNA, 18 nt, Human
uccagcuuguggagcccc

SEQ ID NO: 2454612 - RNA, 23 nt, Human
uccagcuuguggagccccacacu

SEQ ID NO: 2454613 - RNA, 22 nt, Human
uccaggggugggacacccugug

SEQ ID NO: 2454614 - RNA, 22 nt, Human
uccaggagcagccacauuccug

SEQ ID NO: 2454615 - RNA, 18 nt, Human
uccagggucccucugugu

SEQ ID NO: 2454616 - RNA, 17 nt, Human
uccagggucccucugug

SEQ ID NO: 2454617 - RNA, 16 nt, Human
uccagggucccucugu

SEQ ID NO: 2454618 - RNA, 23 nt, Human
uccaggggugggacacccuguga

SEQ ID NO: 2454619 - RNA, 15 nt, Human
uccaggugcacaagc

SEQ ID NO: 2454620 - RNA, 22 nt, Human
uccaggugcacaagcuccaagc

SEQ ID NO: 2454621 - RNA, 21 nt, Human
uccaggugcacaagcuccaag

SEQ ID NO: 2454622 - RNA, 20 nt, Human
uccaggugcacaagcuccaa

SEQ ID NO: 2454623 - RNA, 18 nt, Human
uccaggugcacaagcucc

SEQ ID NO: 2454624 - RNA, 21 nt, Human
uccagguggggugaggcagug

SEQ ID NO: 2454625 - RNA, 16 nt, Human
uccagguggggugagg

SEQ ID NO: 2454626 - RNA, 16 nt, Human
uccagguguuacugua

SEQ ID NO: 2454627 - RNA, 14 nt, Human
uccagguggcauca

SEQ ID NO: 2454628 - RNA, 13 nt, Human
uccaggugcccag

SEQ ID NO: 2454629 - RNA, 11 nt, Human
uccaggguggu

SEQ ID NO: 2454630 - RNA, 16 nt, Human
uccagguucagcuugu

SEQ ID NO: 2454631 - RNA, 15 nt, Human
uccagguucagcuug

SEQ ID NO: 2454632 - RNA, 22 nt, Human
uccacccucccagaccugccuc

SEQ ID NO: 2454633 - RNA, 16 nt, Human
uccacccucccagacc

SEQ ID NO: 2454634 - RNA, 12 nt, Human
uccacccugcuc

SEQ ID NO: 2454635 - RNA, 21 nt, Human
uccacccccucccuggccugu

SEQ ID NO: 2454636 - RNA, 19 nt, Human
uccacccccucccuggccu

SEQ ID NO: 2454637 - RNA, 20 nt, Human
uccacccccucccuggccug

SEQ ID NO: 2454638 - RNA, 23 nt, Human
uccaccccccagaaccuguccuu

SEQ ID NO: 2454639 - RNA, 13 nt, Human
uccacccccuccc

SEQ ID NO: 2454640 - RNA, 15 nt, Human
uccacccccucccug

SEQ ID NO: 2454641 - RNA, 18 nt, Human
uccacccccucccuggcc

SEQ ID NO: 2454642 - RNA, 19 nt, Human
uccacagaagcuccaggua

SEQ ID NO: 2454643 - RNA, 18 nt, Human
uccacagagagucccacu

SEQ ID NO: 2454644 - RNA, 17 nt, Human
uccacagaugccuccac

SEQ ID NO: 2454645 - RNA, 21 nt, Human
uccacagagagucccacugcc

SEQ ID NO: 2454646 - RNA, 17 nt, Human
uccacagcaaccccagg

SEQ ID NO: 2454647 - RNA, 16 nt, Human
uccacccccagcugcu

SEQ ID NO: 2454648 - RNA, 22 nt, Human
uccaccccccagaaccuguccu

SEQ ID NO: 2454649 - RNA, 12 nt, Human
uccacccccucc

SEQ ID NO: 2454650 - RNA, 14 nt, Human
uccacccucugagc

SEQ ID NO: 2454651 - RNA, 12 nt, Human
uccacccucuga

SEQ ID NO: 2454652 - RNA, 16 nt, Human
uccacccucugagcuu

SEQ ID NO: 2454653 - RNA, 15 nt, Human
uccaccugccaggga

SEQ ID NO: 2454654 - RNA, 17 nt, Human
uccaccugccagggaca

SEQ ID NO: 2454655 - RNA, 21 nt, Human
uccaccugccagggacagagg

SEQ ID NO: 2454656 - RNA, 18 nt, Human
uccaccugccagggacag

SEQ ID NO: 2454657 - RNA, 18 nt, Human
uccaccugcucccaggcc

SEQ ID NO: 2454658 - RNA, 17 nt, Human
uccaccugcucccaggc

SEQ ID NO: 2454659 - RNA, 16 nt, Human
uccaccugcucccagg

SEQ ID NO: 2454660 - RNA, 13 nt, Human
uccaccugcuccc

SEQ ID NO: 2454661 - RNA, 23 nt, Human
uccaccugggcauauccaccacc

SEQ ID NO: 2454662 - RNA, 17 nt, Human
uccaccuggccccaugu

SEQ ID NO: 2454663 - RNA, 13 nt, Human
uccaccuggcccc

SEQ ID NO: 2454664 - RNA, 22 nt, Human
uccaaaauguuggucauuuuau

SEQ ID NO: 2454665 - RNA, 19 nt, Human
uccaaaauaauuuuaagaa

SEQ ID NO: 2454666 - RNA, 15 nt, Human
uccaaaauaauuuua

SEQ ID NO: 2454667 - RNA, 17 nt, Human
ucauuucuauuucuccu

SEQ ID NO: 2454668 - RNA, 21 nt, Human
ucauuucuauuucuccuccau

SEQ ID NO: 2454669 - RNA, 20 nt, Human
uccaaaauaaaacuuuuuaa

SEQ ID NO: 2454670 - RNA, 18 nt, Human
uccaaaauaaaacuuuuu

SEQ ID NO: 2454671 - RNA, 14 nt, Human
uccaauuuucugga

SEQ ID NO: 2454672 - RNA, 22 nt, Human
uccaauuguugacaguucugaa

SEQ ID NO: 2454673 - RNA, 21 nt, Human
uccaauuguugacaguucuga

SEQ ID NO: 2454674 - RNA, 16 nt, Human
uccaauuguugacagu

SEQ ID NO: 2454675 - RNA, 22 nt, Human
uccaauuuguaaaaacagcauu

SEQ ID NO: 2454676 - RNA, 17 nt, Human
uccaauuuacauacucu

SEQ ID NO: 2454677 - RNA, 18 nt, Human
uccaauuuacauacucug

SEQ ID NO: 2454678 - RNA, 18 nt, Human
uccacaagagcccaggcc

SEQ ID NO: 2454679 - RNA, 15 nt, Human
uccacaagagcccag

SEQ ID NO: 2454680 - RNA, 23 nt, Human
uccacaagauucccagagacagg

SEQ ID NO: 2454681 - RNA, 17 nt, Human
uccacaagagcccaggc

SEQ ID NO: 2454682 - RNA, 16 nt, Human
uccacaagagcccagg

SEQ ID NO: 2454683 - RNA, 17 nt, Human
uccacaaguuaaauaaa

SEQ ID NO: 2454684 - RNA, 18 nt, Human
uccacaaguuaaauaaau

SEQ ID NO: 2454685 - RNA, 20 nt, Human
uccacagaaacauuuucauu

SEQ ID NO: 2454686 - RNA, 14 nt, Human
uccacacacagagg

SEQ ID NO: 2454687 - RNA, 15 nt, Human
uccacacacagagga

SEQ ID NO: 2454688 - RNA, 19 nt, Human
uccacacacagaggaagag

SEQ ID NO: 2454689 - RNA, 22 nt, Human
uccacacacagaggaagagcag

SEQ ID NO: 2454690 - RNA, 12 nt, Human
uccacacacaga

SEQ ID NO: 2454691 - RNA, 13 nt, Human
uccacacacagag

SEQ ID NO: 2454692 - RNA, 19 nt, Human
uauuuauaaauauauuuaa

SEQ ID NO: 2454693 - RNA, 17 nt, Human
uauuuauaaauauauuu

SEQ ID NO: 2454694 - RNA, 16 nt, Human
uauuuauaaauauauu

SEQ ID NO: 2454695 - RNA, 17 nt, Human
uauuuauaaaacuucuc

SEQ ID NO: 2454696 - RNA, 20 nt, Human
uauuuaguuauaguuucaga

SEQ ID NO: 2454697 - RNA, 14 nt, Human
uauuuauaaaacuu

SEQ ID NO: 2454698 - RNA, 20 nt, Human
uauuuaaagaagaaacgucu

SEQ ID NO: 2454699 - RNA, 24 nt, Human
uauuuauaaaaauaaaaaacacug

SEQ ID NO: 2454700 - RNA, 24 nt, Human
uauuuaaacucuguugcaagugca

SEQ ID NO: 2454701 - RNA, 14 nt, Human
uauuuaaacauggu

SEQ ID NO: 2454702 - RNA, 19 nt, Human
uauuuaaaauuuauugcuu

SEQ ID NO: 2454703 - RNA, 18 nt, Human
uauuuaaaaauauuuuug

SEQ ID NO: 2454704 - RNA, 16 nt, Human
uauuguuuugguuugc

SEQ ID NO: 2454705 - RNA, 16 nt, Human
uauuuaaaagauucau

SEQ ID NO: 2454706 - RNA, 13 nt, Human
uauuuaaaacuug

SEQ ID NO: 2454707 - RNA, 12 nt, Human
uauuuaaaacuu

SEQ ID NO: 2454708 - RNA, 15 nt, Human
uauuuaaaagauuca

SEQ ID NO: 2454709 - RNA, 13 nt, Human
uauuuaaaagauu

SEQ ID NO: 2454710 - RNA, 12 nt, Human
uauuuaaaagau

SEQ ID NO: 2454711 - RNA, 23 nt, Human
uauuuaaaagaaagccucagaga

SEQ ID NO: 2454712 - RNA, 22 nt, Human
uauuguuuucaguguacaugga

SEQ ID NO: 2454713 - RNA, 22 nt, Human
uauuguuuuuccuuguauuuaa

SEQ ID NO: 2454714 - RNA, 18 nt, Human
uauuguuuucaguguaca

SEQ ID NO: 2454715 - RNA, 20 nt, Human
uauuguuuucaguguacaug

SEQ ID NO: 2454716 - RNA, 20 nt, Human
uauuguuucuuuaagaaagu

SEQ ID NO: 2454717 - RNA, 21 nt, Human
uauuguuucuggucacuauau

SEQ ID NO: 2454718 - RNA, 12 nt, Human
uauuguuuucag

SEQ ID NO: 2454719 - RNA, 15 nt, Human
uauuguuacucuggu

SEQ ID NO: 2454720 - RNA, 21 nt, Human
uauuguuaacucuugucuauu

SEQ ID NO: 2454721 - RNA, 17 nt, Human
uauuguuaacucuuguc

SEQ ID NO: 2454722 - RNA, 13 nt, Human
uauuguuccaaga

SEQ ID NO: 2454723 - RNA, 17 nt, Human
uauuguuccaagacauu

SEQ ID NO: 2454724 - RNA, 18 nt, Human
uauuguuccaagacauug

SEQ ID NO: 2454725 - RNA, 19 nt, Human
uauuguuccaagacauugu

SEQ ID NO: 2454726 - RNA, 20 nt, Human
uauuguuccaagacauuguc

SEQ ID NO: 2454727 - RNA, 21 nt, Human
uauuguuccaagacauuguca

SEQ ID NO: 2454728 - RNA, 23 nt, Human
uauuguuccaagacauugucaau

SEQ ID NO: 2454729 - RNA, 20 nt, Human
uauugauguacagucuguca

SEQ ID NO: 2454730 - RNA, 22 nt, Human
uauugauguacagucugucaug

SEQ ID NO: 2454731 - RNA, 23 nt, Human
uauugcaaagguuccaacuguau

SEQ ID NO: 2454732 - RNA, 21 nt, Human
uauugcaaagguuccaacugu

SEQ ID NO: 2454733 - RNA, 20 nt, Human
uauugcaaaauagcauuugu

SEQ ID NO: 2454734 - RNA, 22 nt, Human
uauugcaaagguuccaacugua

SEQ ID NO: 2454735 - RNA, 17 nt, Human
uauucucuccuguaccu

SEQ ID NO: 2454736 - RNA, 16 nt, Human
uauucucacuccacca

SEQ ID NO: 2454737 - RNA, 19 nt, Human
uauucucacuccaccaccc

SEQ ID NO: 2454738 - RNA, 18 nt, Human
uauucucuccaaaaaugc

SEQ ID NO: 2454739 - RNA, 21 nt, Human
uauugauaugcuuauacacuu

SEQ ID NO: 2454740 - RNA, 16 nt, Human
uauuguguuugucauu

SEQ ID NO: 2454741 - RNA, 14 nt, Human
uauuguguuuguca

SEQ ID NO: 2454742 - RNA, 18 nt, Human
uauuguguuugucauuag

SEQ ID NO: 2454743 - RNA, 17 nt, Human
uauuguguuugucauua

SEQ ID NO: 2454744 - RNA, 21 nt, Human
uauuguguuugucauuagccu

SEQ ID NO: 2454745 - RNA, 16 nt, Human
uauuguguuuguguau

SEQ ID NO: 2454746 - RNA, 21 nt, Human
uauuggaggguaaaugaugug

SEQ ID NO: 2454747 - RNA, 21 nt, Human
uauuggaauuaaccuggugcu

SEQ ID NO: 2454748 - RNA, 23 nt, Human
uauuggaauuaaccuggugcugg

SEQ ID NO: 2454749 - RNA, 16 nt, Human
uauugcuuuauaaaua

SEQ ID NO: 2454750 - RNA, 16 nt, Human
uauugcugagagaaau

SEQ ID NO: 2454751 - RNA, 19 nt, Human
uauugcugagagaaauaug

SEQ ID NO: 2454752 - RNA, 15 nt, Human
uauuggaauuaaccu

SEQ ID NO: 2454753 - RNA, 16 nt, Human
uauuggaauuaaccug

SEQ ID NO: 2454754 - RNA, 15 nt, Human
uauugcugagagaaa

SEQ ID NO: 2454755 - RNA, 17 nt, Human
uauugcugauggugcaa

SEQ ID NO: 2454756 - RNA, 22 nt, Human
uauuggaaauuuguuauaauga

SEQ ID NO: 2454757 - RNA, 21 nt, Human
uauugcuugcacaaaccaauu

SEQ ID NO: 2454758 - RNA, 19 nt, Human
uauugcuuguuggauuuuu

SEQ ID NO: 2454759 - RNA, 21 nt, Human
uauuacacuguauuuguaucu

SEQ ID NO: 2454760 - RNA, 14 nt, Human
uauuauuacuguuu

SEQ ID NO: 2454761 - RNA, 19 nt, Human
uauuauuacuuauuuuuga

SEQ ID NO: 2454762 - RNA, 13 nt, Human
uauuauuacuguu

SEQ ID NO: 2454763 - RNA, 16 nt, Human
uauuauucccauucua

SEQ ID NO: 2454764 - RNA, 19 nt, Human
uauuauuaguuuugauuua

SEQ ID NO: 2454765 - RNA, 21 nt, Human
uauuaauuguuuugcacuuuu

SEQ ID NO: 2454766 - RNA, 13 nt, Human
uauuaauugcuuu

SEQ ID NO: 2454767 - RNA, 14 nt, Human
uauuaauugcuuug

SEQ ID NO: 2454768 - RNA, 19 nt, Human
uauuacacuguauuuguau

SEQ ID NO: 2454769 - RNA, 17 nt, Human
uauuacacuguauuugu

SEQ ID NO: 2454770 - RNA, 13 nt, Human
uauuacacuguau

SEQ ID NO: 2454771 - RNA, 21 nt, Human
uauuccagaaugcuguacauc

SEQ ID NO: 2454772 - RNA, 23 nt, Human
uauuccagaaugcuguacaucua

SEQ ID NO: 2454773 - RNA, 14 nt, Human
uauuccauauauua

SEQ ID NO: 2454774 - RNA, 17 nt, Human
uauuccagaaugcugua

SEQ ID NO: 2454775 - RNA, 20 nt, Human
uauuccagaaugcuguacau

SEQ ID NO: 2454776 - RNA, 16 nt, Human
uauuccagaaugcugu

SEQ ID NO: 2454777 - RNA, 19 nt, Human
uauuccaagacaugucugu

SEQ ID NO: 2454778 - RNA, 17 nt, Human
uauuccaagacaugucu

SEQ ID NO: 2454779 - RNA, 13 nt, Human
uauuccacaucua

SEQ ID NO: 2454780 - RNA, 15 nt, Human
uauuauugaaauugu

SEQ ID NO: 2454781 - RNA, 14 nt, Human
uauuauugaaauug

SEQ ID NO: 2454782 - RNA, 13 nt, Human
uauuauucugcag

SEQ ID NO: 2454783 - RNA, 15 nt, Human
uauuauucugcagca

SEQ ID NO: 2454784 - RNA, 18 nt, Human
uauuccauccauauacuu

SEQ ID NO: 2454785 - RNA, 17 nt, Human
uauuccauauuuauuca

SEQ ID NO: 2454786 - RNA, 15 nt, Human
uauuccauauuuauu

SEQ ID NO: 2454787 - RNA, 18 nt, Human
uauuccauauauuagcau

SEQ ID NO: 2454788 - RNA, 23 nt, Human
uauuccaugaauguaucaggaaa

SEQ ID NO: 2454789 - RNA, 19 nt, Human
uauuccauccauauacuuu

SEQ ID NO: 2454790 - RNA, 16 nt, Human
uauuccaugaauguau

SEQ ID NO: 2454791 - RNA, 17 nt, Human
uauuccaugaauguauc

SEQ ID NO: 2454792 - RNA, 22 nt, Human
uauuccaugaauguaucaggaa

SEQ ID NO: 2454793 - RNA, 22 nt, Human
uauucccaagcccaugaguccu

SEQ ID NO: 2454794 - RNA, 20 nt, Human
uauucccaagcccaugaguc

SEQ ID NO: 2454795 - RNA, 12 nt, Human
uauucccaugag

SEQ ID NO: 2454796 - RNA, 23 nt, Human
uauucccaagcucuagugggaag

SEQ ID NO: 2454797 - RNA, 23 nt, Human
uauuccccagcagggucuuuuca

SEQ ID NO: 2454798 - RNA, 17 nt, Human
uauuccccauucuuccu

SEQ ID NO: 2454799 - RNA, 20 nt, Human
uauuccccuaucucuagaau

SEQ ID NO: 2454800 - RNA, 22 nt, Human
uauuccccuaucucuagaauuu

SEQ ID NO: 2454801 - RNA, 19 nt, Human
uauucuagcuaauguaaua

SEQ ID NO: 2454802 - RNA, 22 nt, Human
uauucuauuuucauuuucugca

SEQ ID NO: 2454803 - RNA, 14 nt, Human
uauucuauuuucau

SEQ ID NO: 2454804 - RNA, 22 nt, Human
uauucucaaacacaguuacacu

SEQ ID NO: 2454805 - RNA, 17 nt, Human
uauucucaaacacaguu

SEQ ID NO: 2454806 - RNA, 14 nt, Human
uauucucaccagga

SEQ ID NO: 2454807 - RNA, 15 nt, Human
uauucucaccaggaa

SEQ ID NO: 2454808 - RNA, 13 nt, Human
uauucucacucca

SEQ ID NO: 2454809 - RNA, 14 nt, Human
uauucucacuccac

SEQ ID NO: 2454810 - RNA, 15 nt, Human
uauucucacuccacc

SEQ ID NO: 2454811 - RNA, 22 nt, Human
uauucucacuccaccacccaaa

SEQ ID NO: 2454812 - RNA, 19 nt, Human
uauucuauuaacuuuaauu

SEQ ID NO: 2454813 - RNA, 13 nt, Human
uauucuauuaacu

SEQ ID NO: 2454814 - RNA, 19 nt, Human
uauucuauaugaauuuaaa

SEQ ID NO: 2454815 - RNA, 17 nt, Human
uauucuauaugaauuua

SEQ ID NO: 2454816 - RNA, 12 nt, Human
uauucuauugca

SEQ ID NO: 2454817 - RNA, 15 nt, Human
uauucuauaugaauu

SEQ ID NO: 2454818 - RNA, 14 nt, Human
uauucuauaugaau

SEQ ID NO: 2454819 - RNA, 10 nt, Human
uauucuaguc

SEQ ID NO: 2454820 - RNA, 18 nt, Human
uauuccuccugcucauau

SEQ ID NO: 2454821 - RNA, 13 nt, Human
uauuccuccuggg

SEQ ID NO: 2454822 - RNA, 22 nt, Human
uauuccuauauaguuuauugac

SEQ ID NO: 2454823 - RNA, 21 nt, Human
uauucccuagaaacuuccaaa

SEQ ID NO: 2454824 - RNA, 21 nt, Human
uauucccuguacaauauuuaa

SEQ ID NO: 2454825 - RNA, 20 nt, Human
uauuccuauauaguuuauug

SEQ ID NO: 2454826 - RNA, 21 nt, Human
uauuccuauauaguuuauuga

SEQ ID NO: 2454827 - RNA, 21 nt, Human
uauuccugcauuugugaaaug

SEQ ID NO: 2454828 - RNA, 20 nt, Human
uauuccugcauuugugaaau

SEQ ID NO: 2454829 - RNA, 19 nt, Human
uauuccugcauuugugaaa

SEQ ID NO: 2454830 - RNA, 17 nt, Human
uauuccugcauuuguga

SEQ ID NO: 2454831 - RNA, 16 nt, Human
uauuccuuucuaucau

SEQ ID NO: 2454832 - RNA, 17 nt, Human
uauuccuguauguuguc

SEQ ID NO: 2454833 - RNA, 14 nt, Human
uauuccuguauguu

SEQ ID NO: 2454834 - RNA, 11 nt, Human
uauuccugccu

SEQ ID NO: 2454835 - RNA, 22 nt, Human
uauuccuugauacuaaaaguuc

SEQ ID NO: 2454836 - RNA, 22 nt, Human
uauuccuguggauguaaaguga

SEQ ID NO: 2454837 - RNA, 14 nt, Human
uauuccugaaugaa

SEQ ID NO: 2454838 - RNA, 20 nt, Human
uauuccugaaugaaauauca

SEQ ID NO: 2454839 - RNA, 22 nt, Human
uauucgauacugcgacuuucug

SEQ ID NO: 2454840 - RNA, 20 nt, Human
uauuccuuuuguguacagug

SEQ ID NO: 2454841 - RNA, 19 nt, Human
uauuccuuuuguguacagu

SEQ ID NO: 2454842 - RNA, 21 nt, Human
uauuccuuuuguguacagugu

SEQ ID NO: 2454843 - RNA, 20 nt, Human
uauguaaaguauguaaacag

SEQ ID NO: 2454844 - RNA, 19 nt, Human
uauguaaaguauguaaaca

SEQ ID NO: 2454845 - RNA, 18 nt, Human
uauguaaaguauguaaac

SEQ ID NO: 2454846 - RNA, 17 nt, Human
uauguaaaguauguaaa

SEQ ID NO: 2454847 - RNA, 18 nt, Human
uauguaaacauaauucuu

SEQ ID NO: 2454848 - RNA, 19 nt, Human
uauguaaacugcauuagaa

SEQ ID NO: 2454849 - RNA, 14 nt, Human
uauguaaaguaugu

SEQ ID NO: 2454850 - RNA, 23 nt, Human
uauguaaacugcauuagaaauua

SEQ ID NO: 2454851 - RNA, 17 nt, Human
uauguaaaauguuuuag

SEQ ID NO: 2454852 - RNA, 15 nt, Human
uauguaaaauguuuu

SEQ ID NO: 2454853 - RNA, 15 nt, Human
uauguaaacaggaga

SEQ ID NO: 2454854 - RNA, 14 nt, Human
uauguaaacauaau

SEQ ID NO: 2454855 - RNA, 21 nt, Human
uauguaaaaggccaaaccucu

SEQ ID NO: 2454856 - RNA, 22 nt, Human
uauguaaaaggccaaaccucug

SEQ ID NO: 2454857 - RNA, 23 nt, Human
uauguaaaaggccaaaccucugu

SEQ ID NO: 2454858 - RNA, 12 nt, Human
uauguaaaauaa

SEQ ID NO: 2454859 - RNA, 19 nt, Human
uauguaaaauaaaauuaug

SEQ ID NO: 2454860 - RNA, 10 nt, Human
uauguaaaug

SEQ ID NO: 2454861 - RNA, 14 nt, Human
uauguaaauguaua

SEQ ID NO: 2454862 - RNA, 13 nt, Human
uauguaaauguau

SEQ ID NO: 2454863 - RNA, 21 nt, Human
uauguaacaaaccugcacuua

SEQ ID NO: 2454864 - RNA, 13 nt, Human
uauguaaaugugc

SEQ ID NO: 2454865 - RNA, 19 nt, Human
uaugguguuucucccucuc

SEQ ID NO: 2454866 - RNA, 20 nt, Human
uauggcagaguuguaaauau

SEQ ID NO: 2454867 - RNA, 19 nt, Human
uauggcagaguuguaaaua

SEQ ID NO: 2454868 - RNA, 21 nt, Human
uauggcagaguuguaaauaua

SEQ ID NO: 2454869 - RNA, 21 nt, Human
uaugguugauaguuuaccuga

SEQ ID NO: 2454870 - RNA, 20 nt, Human
uaugguugauaguuuaccug

SEQ ID NO: 2454871 - RNA, 22 nt, Human
uaugguugauaguuuaccugaa

SEQ ID NO: 2454872 - RNA, 18 nt, Human
uauggcagaguuguaaau

SEQ ID NO: 2454873 - RNA, 17 nt, Human
uauggcagaguuguaaa

SEQ ID NO: 2454874 - RNA, 23 nt, Human
uauggcagaagacaccagagcag

SEQ ID NO: 2454875 - RNA, 22 nt, Human
uauggcagaagacaccagagca

SEQ ID NO: 2454876 - RNA, 16 nt, Human
uauggcagaagacacc

SEQ ID NO: 2454877 - RNA, 15 nt, Human
uauggcagaagacac

SEQ ID NO: 2454878 - RNA, 14 nt, Human
uauggcagaagaca

SEQ ID NO: 2454879 - RNA, 13 nt, Human
uauggcagaagac

SEQ ID NO: 2454880 - RNA, 12 nt, Human
uauggcagaaga

SEQ ID NO: 2454881 - RNA, 14 nt, Human
uauggcaaaaaugg

SEQ ID NO: 2454882 - RNA, 21 nt, Human
uauggauuuucuauuguuacu

SEQ ID NO: 2454883 - RNA, 15 nt, Human
gggaguggccacaga

SEQ ID NO: 2454884 - RNA, 13 nt, Human
gggaguggccaca

SEQ ID NO: 2454885 - RNA, 20 nt, Human
uauggaugauucagaaauug

SEQ ID NO: 2454886 - RNA, 11 nt, Human
uauggaugugg

SEQ ID NO: 2454887 - RNA, 19 nt, Human
uauggaugauucagaaauu

SEQ ID NO: 2454888 - RNA, 20 nt, Human
gggagugggacagagucugg

SEQ ID NO: 2454889 - RNA, 15 nt, Human
gggaguggaguggaa

SEQ ID NO: 2454890 - RNA, 21 nt, Human
gggaguggaauaguauccucc

SEQ ID NO: 2454891 - RNA, 17 nt, Human
gggaguggaguggaaga

SEQ ID NO: 2454892 - RNA, 18 nt, Human
gggagugggacagagucu

SEQ ID NO: 2454893 - RNA, 14 nt, Human
uauguagauaacaa

SEQ ID NO: 2454894 - RNA, 16 nt, Human
uauguacuugucaaag

SEQ ID NO: 2454895 - RNA, 19 nt, Human
uauguacuugucaaagaag

SEQ ID NO: 2454896 - RNA, 23 nt, Human
uauguagaaaaaaguaaauguga

SEQ ID NO: 2454897 - RNA, 15 nt, Human
uauguacuugucaaa

SEQ ID NO: 2454898 - RNA, 21 nt, Human
uauguacuccucuuuacacug

SEQ ID NO: 2454899 - RNA, 14 nt, Human
uauguaguaauuga

SEQ ID NO: 2454900 - RNA, 17 nt, Human
uauguaguaauugacau

SEQ ID NO: 2454901 - RNA, 20 nt, Human
uauguaguaauugacaugug

SEQ ID NO: 2454902 - RNA, 19 nt, Human
uauguagcagggaaaauau

SEQ ID NO: 2454903 - RNA, 21 nt, Human
uauguagcaggaaauaaagua

SEQ ID NO: 2454904 - RNA, 17 nt, Human
uauguagaugugcauuu

SEQ ID NO: 2454905 - RNA, 15 nt, Human
uauguagcaaaauac

SEQ ID NO: 2454906 - RNA, 12 nt, Human
uauguagaugug

SEQ ID NO: 2454907 - RNA, 16 nt, Human
uauguagaugugcauu

SEQ ID NO: 2454908 - RNA, 13 nt, Human
uauguauguuuac

SEQ ID NO: 2454909 - RNA, 13 nt, Human
uauguaugugugu

SEQ ID NO: 2454910 - RNA, 14 nt, Human
uauguaugugugua

SEQ ID NO: 2454911 - RNA, 17 nt, Human
uauguauguguguaugg

SEQ ID NO: 2454912 - RNA, 16 nt, Human
uauguaugugaaaguu

SEQ ID NO: 2454913 - RNA, 18 nt, Human
uauguaguccgugcugac

SEQ ID NO: 2454914 - RNA, 15 nt, Human
uauguauaauucaaa

SEQ ID NO: 2454915 - RNA, 19 nt, Human
uauguauauuuaaaagaaa

SEQ ID NO: 2454916 - RNA, 20 nt, Human
uauguauggaauacaguguu

SEQ ID NO: 2454917 - RNA, 17 nt, Human
uauguacuucaugcugu

SEQ ID NO: 2454918 - RNA, 13 nt, Human
uauguacuucaug

SEQ ID NO: 2454919 - RNA, 16 nt, Human
uauguaccauguacau

SEQ ID NO: 2454920 - RNA, 16 nt, Human
uauguacguuuguaug

SEQ ID NO: 2454921 - RNA, 22 nt, Human
uauguacguuuguaugugugua

SEQ ID NO: 2454922 - RNA, 21 nt, Human
uauguacguuuguaugugugu

SEQ ID NO: 2454923 - RNA, 19 nt, Human
uauguacguuuguaugugu

SEQ ID NO: 2454924 - RNA, 18 nt, Human
uauguacguuuguaugug

SEQ ID NO: 2454925 - RNA, 20 nt, Human
uauguacuccucuuuacacu

SEQ ID NO: 2454926 - RNA, 11 nt, Human
uauguaacaug

SEQ ID NO: 2454927 - RNA, 12 nt, Human
uauguaacaugu

SEQ ID NO: 2454928 - RNA, 14 nt, Human
uauguaacugcauu

SEQ ID NO: 2454929 - RNA, 24 nt, Human
uauguaacugcauugagaacugca

SEQ ID NO: 2454930 - RNA, 13 nt, Human
uauguaaucuaug

SEQ ID NO: 2454931 - RNA, 16 nt, Human
uauguaagagcaccuu

SEQ ID NO: 2454932 - RNA, 15 nt, Human
uauguaagagcaccu

SEQ ID NO: 2454933 - RNA, 15 nt, Human
uauguaauaauguga

SEQ ID NO: 2454934 - RNA, 16 nt, Human
uauguaauaaugugaa

SEQ ID NO: 2454935 - RNA, 15 nt, Human
uauguacaugagaag

SEQ ID NO: 2454936 - RNA, 14 nt, Human
uauguacaaguguu

SEQ ID NO: 2454937 - RNA, 18 nt, Human
uauguuuauuuacuaauu

SEQ ID NO: 2454938 - RNA, 18 nt, Human
uauguuuauauaaaugcu

SEQ ID NO: 2454939 - RNA, 18 nt, Human
uauguuuaccuuuuaauu

SEQ ID NO: 2454940 - RNA, 20 nt, Human
uauguugcccaggcaggucu

SEQ ID NO: 2454941 - RNA, 15 nt, Human
uauguugaugaaaaa

SEQ ID NO: 2454942 - RNA, 12 nt, Human
uauguuuacaaa

SEQ ID NO: 2454943 - RNA, 14 nt, Human
uauguuuacauauc

SEQ ID NO: 2454944 - RNA, 19 nt, Human
uauguugcccaggcagguc

SEQ ID NO: 2454945 - RNA, 16 nt, Human
uauguugcccaggcag

SEQ ID NO: 2454946 - RNA, 16 nt, Human
uauguugcauagaaua

SEQ ID NO: 2454947 - RNA, 13 nt, Human
uauguugcccagg

SEQ ID NO: 2454948 - RNA, 17 nt, Human
uauguauguuuacauau

SEQ ID NO: 2454949 - RNA, 16 nt, Human
uauguauguuuacaua

SEQ ID NO: 2454950 - RNA, 19 nt, Human
uauguauuaauauucauug

SEQ ID NO: 2454951 - RNA, 22 nt, Human
uauguauuguaaacauguguuu

SEQ ID NO: 2454952 - RNA, 20 nt, Human
uauguauuguaaacaugugu

SEQ ID NO: 2454953 - RNA, 18 nt, Human
uauguauuguaaacaugu

SEQ ID NO: 2454954 - RNA, 12 nt, Human
uauguauuuaua

SEQ ID NO: 2454955 - RNA, 14 nt, Human
uaugucaaagcagg

SEQ ID NO: 2454956 - RNA, 18 nt, Human
uauguugaauacuuuuua

SEQ ID NO: 2454957 - RNA, 16 nt, Human
uaugucauuucauuuc

SEQ ID NO: 2454958 - RNA, 23 nt, Human
uaugucauuuccuucaaggcauc

SEQ ID NO: 2454959 - RNA, 15 nt, Human
uaugucaucauacau

SEQ ID NO: 2454960 - RNA, 19 nt, Human
uaugucaucauacaugacu

SEQ ID NO: 2454961 - RNA, 12 nt, Human
uauguugcauag

SEQ ID NO: 2454962 - RNA, 14 nt, Human
uauguugauaaaag

SEQ ID NO: 2454963 - RNA, 24 nt, Human
uauuaagaaagacuaucuaaaugu

SEQ ID NO: 2454964 - RNA, 16 nt, Human
uauuaagaaugaaaua

SEQ ID NO: 2454965 - RNA, 22 nt, Human
uauuaagaggcagaaaauugca

SEQ ID NO: 2454966 - RNA, 13 nt, Human
uauuaagaaugaa

SEQ ID NO: 2454967 - RNA, 14 nt, Human
uauuaagagugaaa

SEQ ID NO: 2454968 - RNA, 13 nt, Human
uauuaagauggau

SEQ ID NO: 2454969 - RNA, 15 nt, Human
uauuaagauggauuc

SEQ ID NO: 2454970 - RNA, 12 nt, Human
uauuaaauuaug

SEQ ID NO: 2454971 - RNA, 22 nt, Human
uauguuugccacuuugcaaagg

SEQ ID NO: 2454972 - RNA, 14 nt, Human
uauguuugcacacu

SEQ ID NO: 2454973 - RNA, 19 nt, Human
uauguuugcacacuugugu

SEQ ID NO: 2454974 - RNA, 21 nt, Human
uauuaaauuaaauuuuguguc

SEQ ID NO: 2454975 - RNA, 19 nt, Human
uauuaaauuaaauuuugug

SEQ ID NO: 2454976 - RNA, 12 nt, Human
uauuaaugcacu

SEQ ID NO: 2454977 - RNA, 13 nt, Human
uauuaaugaaaau

SEQ ID NO: 2454978 - RNA, 20 nt, Human
uauuaaugcacuuucuaucc

SEQ ID NO: 2454979 - RNA, 17 nt, Human
uauuaaugcacuuucua

SEQ ID NO: 2454980 - RNA, 14 nt, Human
uauuaaugcacuuu

SEQ ID NO: 2454981 - RNA, 13 nt, Human
uauuaaugcacuu

SEQ ID NO: 2454982 - RNA, 22 nt, Human
uauuaaugccuuuaaaguauga

SEQ ID NO: 2454983 - RNA, 14 nt, Human
uauuaaugccuuua

SEQ ID NO: 2454984 - RNA, 13 nt, Human
uauuaaugccuuu

SEQ ID NO: 2454985 - RNA, 23 nt, Human
uauuaaugccuuuaaaguaugaa

SEQ ID NO: 2454986 - RNA, 15 nt, Human
uauuaauauuuuaau

SEQ ID NO: 2454987 - RNA, 17 nt, Human
uauuaauauucauugua

SEQ ID NO: 2454988 - RNA, 20 nt, Human
uauuaauauucauuguauaa

SEQ ID NO: 2454989 - RNA, 16 nt, Human
uauuaagauggauucu

SEQ ID NO: 2454990 - RNA, 18 nt, Human
uauuaagauggauucuca

SEQ ID NO: 2454991 - RNA, 19 nt, Human
uauuaagauggauucucag

SEQ ID NO: 2454992 - RNA, 20 nt, Human
uauuaagauggauucucaga

SEQ ID NO: 2454993 - RNA, 21 nt, Human
uauuaagauggauucucagau

SEQ ID NO: 2454994 - RNA, 20 nt, Human
uauuaauauauaucugcugu

SEQ ID NO: 2454995 - RNA, 18 nt, Human
uauuaauauauaucugcu

SEQ ID NO: 2454996 - RNA, 17 nt, Human
uauuaauagcugccuua

SEQ ID NO: 2454997 - RNA, 20 nt, Human
ucaacgcuuaaaggugucuu

SEQ ID NO: 2454998 - RNA, 19 nt, Human
ucaacgcuuaaaggugucu

SEQ ID NO: 2454999 - RNA, 18 nt, Human
ucaaccuugagacagcuu

SEQ ID NO: 2455000 - RNA, 18 nt, Human
ucaacgcagcccugcuuu

SEQ ID NO: 2455001 - RNA, 15 nt, Human
ucaacgcagcccugc

SEQ ID NO: 2455002 - RNA, 14 nt, Human
ucaacgcagcccug

SEQ ID NO: 2455003 - RNA, 13 nt, Human
ucaacccuggaga

SEQ ID NO: 2455004 - RNA, 18 nt, Human
ucaacccucucaggugac

SEQ ID NO: 2455005 - RNA, 14 nt, Human
ucaacccuggagag

SEQ ID NO: 2455006 - RNA, 15 nt, Human
ucaaccugugaugag

SEQ ID NO: 2455007 - RNA, 18 nt, Human
ucaaccugggcaaagccu

SEQ ID NO: 2455008 - RNA, 17 nt, Human
ucaaccuugagacagcu

SEQ ID NO: 2455009 - RNA, 16 nt, Human
ucaaccuugagacagc

SEQ ID NO: 2455010 - RNA, 20 nt, Human
ucaaccugugaugaggggag

SEQ ID NO: 2455011 - RNA, 20 nt, Human
ucaagugauucuccugccuc

SEQ ID NO: 2455012 - RNA, 18 nt, Human
ucaagugauucuccugcc

SEQ ID NO: 2455013 - RNA, 21 nt, Human
ucaagugauucuccugccuca

SEQ ID NO: 2455014 - RNA, 17 nt, Human
ucaaguuauuguacagc

SEQ ID NO: 2455015 - RNA, 13 nt, Human
ucaaguuauugua

SEQ ID NO: 2455016 - RNA, 22 nt, Human
ucaacgcuuaaaggugucuucc

SEQ ID NO: 2455017 - RNA, 21 nt, Human
ucaaguuauugacaaacucuc

SEQ ID NO: 2455018 - RNA, 19 nt, Human
ucaagugauucuccugccu

SEQ ID NO: 2455019 - RNA, 16 nt, Human
ucaaguuccuuugggu

SEQ ID NO: 2455020 - RNA, 14 nt, Human
ucaaguuccuuugg

SEQ ID NO: 2455021 - RNA, 21 nt, Human
ucaauaaaauccauacauuug

SEQ ID NO: 2455022 - RNA, 14 nt, Human
ucaaguugugcuug

SEQ ID NO: 2455023 - RNA, 13 nt, Human
ucaaguugugcuu

SEQ ID NO: 2455024 - RNA, 23 nt, Human
ucaauaaacgauuuaauucucuu

SEQ ID NO: 2455025 - RNA, 22 nt, Human
ucaauaaacgauuuaauucucu

SEQ ID NO: 2455026 - RNA, 18 nt, Human
ucaauaaacgauuuaauu

SEQ ID NO: 2455027 - RNA, 17 nt, Human
ucaauaaacgauuuaau

SEQ ID NO: 2455028 - RNA, 12 nt, Human
ucaauaaagcau

SEQ ID NO: 2455029 - RNA, 13 nt, Human
ucaauaaacgauu

SEQ ID NO: 2455030 - RNA, 15 nt, Human
ucaauaaacgauuua

SEQ ID NO: 2455031 - RNA, 23 nt, Human
ucaauaaaaugugauuuuucuga

SEQ ID NO: 2455032 - RNA, 19 nt, Human
ucaauaaaaugugauuuuu

SEQ ID NO: 2455033 - RNA, 22 nt, Human
ucaauaaaaugugauuuuucug

SEQ ID NO: 2455034 - RNA, 14 nt, Human
ucaauaaaauguga

SEQ ID NO: 2455035 - RNA, 15 nt, Human
ucaauaaaaugugau

SEQ ID NO: 2455036 - RNA, 16 nt, Human
ucaauaaaaugugauu

SEQ ID NO: 2455037 - RNA, 18 nt, Human
ucaauaaaaugugauuuu

SEQ ID NO: 2455038 - RNA, 16 nt, Human
ucaaguuuuucagaaa

SEQ ID NO: 2455039 - RNA, 22 nt, Human
ucaaguugugcuuguuuacagc

SEQ ID NO: 2455040 - RNA, 17 nt, Human
ucaaguugugcuuguuu

SEQ ID NO: 2455041 - RNA, 13 nt, Human
ucaauaaaaugug

SEQ ID NO: 2455042 - RNA, 15 nt, Human
ucaauaaaugguaua

SEQ ID NO: 2455043 - RNA, 15 nt, Human
ucaauaaaugucugu

SEQ ID NO: 2455044 - RNA, 22 nt, Human
ucaauaaaguauuuaauuagug

SEQ ID NO: 2455045 - RNA, 20 nt, Human
ucaauaaaguauuuaauuag

SEQ ID NO: 2455046 - RNA, 17 nt, Human
ucaauaaaguaucuaca

SEQ ID NO: 2455047 - RNA, 18 nt, Human
ucaauaaaguauuuaauu

SEQ ID NO: 2455048 - RNA, 17 nt, Human
ucaauaaaguauuuaau

SEQ ID NO: 2455049 - RNA, 16 nt, Human
ucaauaaaguauuuaa

SEQ ID NO: 2455050 - RNA, 15 nt, Human
ucaauaaaguauuua

SEQ ID NO: 2455051 - RNA, 11 nt, Human
ucaauaaagua

SEQ ID NO: 2455052 - RNA, 15 nt, Human
ucaauaaagcauuua

SEQ ID NO: 2455053 - RNA, 19 nt, Human
ucaauaaagcauuuauaaa

SEQ ID NO: 2455054 - RNA, 14 nt, Human
ucaauaaaguauuu

SEQ ID NO: 2455055 - RNA, 12 nt, Human
ucaauaaaguau

SEQ ID NO: 2455056 - RNA, 13 nt, Human
ucaauaaaguauc

SEQ ID NO: 2455057 - RNA, 16 nt, Human
ucaauaaaugucuguu

SEQ ID NO: 2455058 - RNA, 18 nt, Human
ucaauaauauauuuucug

SEQ ID NO: 2455059 - RNA, 15 nt, Human
ucaauaauauauuuu

SEQ ID NO: 2455060 - RNA, 14 nt, Human
ucaauaagccuugu

SEQ ID NO: 2455061 - RNA, 13 nt, Human
ucaaugcagcccc

SEQ ID NO: 2455062 - RNA, 20 nt, Human
ucaauaauauauuuucuguu

SEQ ID NO: 2455063 - RNA, 19 nt, Human
ucaauaauauauuuucugu

SEQ ID NO: 2455064 - RNA, 18 nt, Human
ucaauacacuaguuguuu

SEQ ID NO: 2455065 - RNA, 14 nt, Human
ucaauacacuaguu

SEQ ID NO: 2455066 - RNA, 20 nt, Human
ucaauaagcaucaaacucuu

SEQ ID NO: 2455067 - RNA, 23 nt, Human
ucaauuacaggaaguacuggaga

SEQ ID NO: 2455068 - RNA, 21 nt, Human
ucaauuacaggaaguacugga

SEQ ID NO: 2455069 - RNA, 18 nt, Human
ucaauguggugaugaaau

SEQ ID NO: 2455070 - RNA, 21 nt, Human
ucaaugugauucuaaugucuu

SEQ ID NO: 2455071 - RNA, 18 nt, Human
ucaaugugauucuaaugu

SEQ ID NO: 2455072 - RNA, 17 nt, Human
ucaaugugauucuaaug

SEQ ID NO: 2455073 - RNA, 16 nt, Human
ucaaugugauucuaau

SEQ ID NO: 2455074 - RNA, 13 nt, Human
ucaaugugcagug

SEQ ID NO: 2455075 - RNA, 22 nt, Human
ucaaugugauucuaaugucuuc

SEQ ID NO: 2455076 - RNA, 11 nt, Human
ucaauguucau

SEQ ID NO: 2455077 - RNA, 12 nt, Human
ucaauguucauu

SEQ ID NO: 2455078 - RNA, 13 nt, Human
ucaauguucauug

SEQ ID NO: 2455079 - RNA, 14 nt, Human
ucaauguucauugu

SEQ ID NO: 2455080 - RNA, 19 nt, Human
ucaaugguuugcaaggaag

SEQ ID NO: 2455081 - RNA, 18 nt, Human
ucaaugguuugcaaggaa

SEQ ID NO: 2455082 - RNA, 17 nt, Human
ucaaugguuugcaagga

SEQ ID NO: 2455083 - RNA, 11 nt, Human
ucaaugucacu

SEQ ID NO: 2455084 - RNA, 15 nt, Human
ucaaugucaaguacc

SEQ ID NO: 2455085 - RNA, 15 nt, Human
ucaaugugauucuaa

SEQ ID NO: 2455086 - RNA, 15 nt, Human
ucaaugugaaucaga

SEQ ID NO: 2455087 - RNA, 14 nt, Human
ucaccaaggcugau

SEQ ID NO: 2455088 - RNA, 17 nt, Human
ucaccaaaguauuuuuu

SEQ ID NO: 2455089 - RNA, 13 nt, Human
ucacaguguguuu

SEQ ID NO: 2455090 - RNA, 19 nt, Human
ucaccaaaucagcugcuac

SEQ ID NO: 2455091 - RNA, 20 nt, Human
ucaccaaaucagcugcuacu

SEQ ID NO: 2455092 - RNA, 19 nt, Human
ucaccagaggaaucacucu

SEQ ID NO: 2455093 - RNA, 15 nt, Human
ucaccagauuugcua

SEQ ID NO: 2455094 - RNA, 19 nt, Human
ucaccagcaccaacaccac

SEQ ID NO: 2455095 - RNA, 13 nt, Human
ucaccagcaccaa

SEQ ID NO: 2455096 - RNA, 21 nt, Human
ucaccagauuugcuaauuuau

SEQ ID NO: 2455097 - RNA, 18 nt, Human
ucaccagaggaaucacuc

SEQ ID NO: 2455098 - RNA, 16 nt, Human
ucaccagagagggacu

SEQ ID NO: 2455099 - RNA, 20 nt, Human
ucaccacaugcggagaacaa

SEQ ID NO: 2455100 - RNA, 23 nt, Human
ucaccacaccaaaccucucuuau

SEQ ID NO: 2455101 - RNA, 21 nt, Human
ucaccacaguaaguuccuacu

SEQ ID NO: 2455102 - RNA, 19 nt, Human
ucaccacaguaaguuccua

SEQ ID NO: 2455103 - RNA, 18 nt, Human
ucaccacaguaaguuccu

SEQ ID NO: 2455104 - RNA, 12 nt, Human
ucaccaagcuca

SEQ ID NO: 2455105 - RNA, 16 nt, Human
ucaccaagcucacagu

SEQ ID NO: 2455106 - RNA, 20 nt, Human
ucaccaagcucacaguuccu

SEQ ID NO: 2455107 - RNA, 21 nt, Human
ucaccaagcucacaguuccuc

SEQ ID NO: 2455108 - RNA, 22 nt, Human
ucaccaagcucacaguuccucg

SEQ ID NO: 2455109 - RNA, 13 nt, Human
ucacagugcugag

SEQ ID NO: 2455110 - RNA, 17 nt, Human
ucacauuuauucugcuc

SEQ ID NO: 2455111 - RNA, 13 nt, Human
ucacagucucaca

SEQ ID NO: 2455112 - RNA, 21 nt, Human
ucacagucuaauuuuuauuca

SEQ ID NO: 2455113 - RNA, 16 nt, Human
ucacagucuaauuuuu

SEQ ID NO: 2455114 - RNA, 15 nt, Human
ucacagucuaauuuu

SEQ ID NO: 2455115 - RNA, 20 nt, Human
ucacaccugacucugaaauc

SEQ ID NO: 2455116 - RNA, 19 nt, Human
ucacaccugacucugaaau

SEQ ID NO: 2455117 - RNA, 18 nt, Human
ucacagucucuuuaaucu

SEQ ID NO: 2455118 - RNA, 19 nt, Human
ucacagucucuuuaaucuu

SEQ ID NO: 2455119 - RNA, 21 nt, Human
ucacagucucuuuaaucuuca

SEQ ID NO: 2455120 - RNA, 23 nt, Human
ucacagucucuuuaaucuucagu

SEQ ID NO: 2455121 - RNA, 14 nt, Human
ucacauuuuccuuu

SEQ ID NO: 2455122 - RNA, 16 nt, Human
ucacauuuuccuuuuc

SEQ ID NO: 2455123 - RNA, 17 nt, Human
ucacauuuuccuuuuca

SEQ ID NO: 2455124 - RNA, 18 nt, Human
ucacauuuuccuuuucaa

SEQ ID NO: 2455125 - RNA, 11 nt, Human
ucacauuuucc

SEQ ID NO: 2455126 - RNA, 18 nt, Human
ucacagugggagccaggg

SEQ ID NO: 2455127 - RNA, 17 nt, Human
ucacagugggagccagg

SEQ ID NO: 2455128 - RNA, 19 nt, Human
ucacauuuauucugcucac

SEQ ID NO: 2455129 - RNA, 18 nt, Human
ucacauuuauucugcuca

SEQ ID NO: 2455130 - RNA, 16 nt, Human
ucacagucacauucca

SEQ ID NO: 2455131 - RNA, 19 nt, Human
ucacaguccuuaccagcag

SEQ ID NO: 2455132 - RNA, 23 nt, Human
ucacaguccuuaccagcagagca

SEQ ID NO: 2455133 - RNA, 22 nt, Human
ucacaguccuuaccagcagagc

SEQ ID NO: 2455134 - RNA, 18 nt, Human
ucacaccugacucugaaa

SEQ ID NO: 2455135 - RNA, 17 nt, Human
ucacaccugacucugaa

SEQ ID NO: 2455136 - RNA, 13 nt, Human
ucacaccugacuc

SEQ ID NO: 2455137 - RNA, 18 nt, Human
ucacaggcagguccaggg

SEQ ID NO: 2455138 - RNA, 17 nt, Human
ucacaggcagguccagg

SEQ ID NO: 2455139 - RNA, 16 nt, Human
ucacaggcagguccag

SEQ ID NO: 2455140 - RNA, 17 nt, Human
ucacaagacccaaaagg

SEQ ID NO: 2455141 - RNA, 18 nt, Human
ucacaagacccaaaaggc

SEQ ID NO: 2455142 - RNA, 13 nt, Human
ucacaagacccaa

SEQ ID NO: 2455143 - RNA, 20 nt, Human
ucaauuacaggaaguacugg

SEQ ID NO: 2455144 - RNA, 13 nt, Human
ucaauuacugguc

SEQ ID NO: 2455145 - RNA, 16 nt, Human
ucaauuacugguccaa

SEQ ID NO: 2455146 - RNA, 15 nt, Human
ucacaagaagaccag

SEQ ID NO: 2455147 - RNA, 11 nt, Human
ucacacccacc

SEQ ID NO: 2455148 - RNA, 21 nt, Human
ucacacccaccguccgcccug

SEQ ID NO: 2455149 - RNA, 20 nt, Human
ucacacccaccguccgcccu

SEQ ID NO: 2455150 - RNA, 15 nt, Human
ucacacccaccgucc

SEQ ID NO: 2455151 - RNA, 23 nt, Human
ucacaccaggcuugccugcaggc

SEQ ID NO: 2455152 - RNA, 23 nt, Human
ucacacccaccguccgcccugcu

SEQ ID NO: 2455153 - RNA, 22 nt, Human
ucacacccaccguccgcccugc

SEQ ID NO: 2455154 - RNA, 24 nt, Human
ucacacccaccguccgcccugcuc

SEQ ID NO: 2455155 - RNA, 23 nt, Human
ucacaccccagacgaugucuuca

SEQ ID NO: 2455156 - RNA, 15 nt, Human
ucacaccuagcguca

SEQ ID NO: 2455157 - RNA, 20 nt, Human
ucacaccuagcgucaguauu

SEQ ID NO: 2455158 - RNA, 12 nt, Human
ucacaccugacu

SEQ ID NO: 2455159 - RNA, 14 nt, Human
uauuuuuucccaaa

SEQ ID NO: 2455160 - RNA, 15 nt, Human
uauuuuuucagaccg

SEQ ID NO: 2455161 - RNA, 13 nt, Human
uauuuuuucccaa

SEQ ID NO: 2455162 - RNA, 14 nt, Human
uauuuuuucagacc

SEQ ID NO: 2455163 - RNA, 21 nt, Human
uauuuucugugccugaauauu

SEQ ID NO: 2455164 - RNA, 22 nt, Human
uauuuucugguagauagaaaua

SEQ ID NO: 2455165 - RNA, 22 nt, Human
uauuuuuugaggcuaugaauau

SEQ ID NO: 2455166 - RNA, 19 nt, Human
uauuuuuuuaagcuguaaa

SEQ ID NO: 2455167 - RNA, 15 nt, Human
uauuuuuuuaagcgu

SEQ ID NO: 2455168 - RNA, 15 nt, Human
uauuuucuacagugg

SEQ ID NO: 2455169 - RNA, 14 nt, Human
uauuuuccuguaaa

SEQ ID NO: 2455170 - RNA, 14 nt, Human
uauuuucuacagug

SEQ ID NO: 2455171 - RNA, 20 nt, Human
uauuuucugguagauagaaa

SEQ ID NO: 2455172 - RNA, 15 nt, Human
uauuuuccuccccag

SEQ ID NO: 2455173 - RNA, 16 nt, Human
uauuuuccuccccagc

SEQ ID NO: 2455174 - RNA, 12 nt, Human
uauuuuccuccc

SEQ ID NO: 2455175 - RNA, 22 nt, Human
uauuuucccuauuagagaagag

SEQ ID NO: 2455176 - RNA, 17 nt, Human
uauuuuuuucugauugu

SEQ ID NO: 2455177 - RNA, 15 nt, Human
uauuuuuuucugauu

SEQ ID NO: 2455178 - RNA, 20 nt, Human
uauuuuuuuaagcuguaaaa

SEQ ID NO: 2455179 - RNA, 22 nt, Human
uauuuuuuucugaauuauuuuc

SEQ ID NO: 2455180 - RNA, 14 nt, Human
uauuuuuuuacuaa

SEQ ID NO: 2455181 - RNA, 17 nt, Human
uauuuuuuucuuuucuu

SEQ ID NO: 2455182 - RNA, 17 nt, Human
uauuuuuuuuaaguauu

SEQ ID NO: 2455183 - RNA, 16 nt, Human
uauuuuuuugcaagug

SEQ ID NO: 2455184 - RNA, 13 nt, Human
uauuuuuuugcaa

SEQ ID NO: 2455185 - RNA, 18 nt, Human
uauuuuuuucugauugua

SEQ ID NO: 2455186 - RNA, 20 nt, Human
ucaaaaaaaaaaaaaugcac

SEQ ID NO: 2455187 - RNA, 19 nt, Human
ucaaaaaaaaaaaaaugca

SEQ ID NO: 2455188 - RNA, 19 nt, Human
uauuuuuuuuucuaagaga

SEQ ID NO: 2455189 - RNA, 16 nt, Human
uauuuuuuuuucuaag

SEQ ID NO: 2455190 - RNA, 14 nt, Human
uauuuuuuuucugu

SEQ ID NO: 2455191 - RNA, 19 nt, Human
uauuuuuuugcaagugaag

SEQ ID NO: 2455192 - RNA, 17 nt, Human
uauuuuuuugcaaguga

SEQ ID NO: 2455193 - RNA, 14 nt, Human
ucaaaaaaagaaaa

SEQ ID NO: 2455194 - RNA, 15 nt, Human
ucaaaaaaagaaaaa

SEQ ID NO: 2455195 - RNA, 17 nt, Human
uauuuuauguugcauag

SEQ ID NO: 2455196 - RNA, 16 nt, Human
uauuuauauauguauu

SEQ ID NO: 2455197 - RNA, 14 nt, Human
uauuuauauauauu

SEQ ID NO: 2455198 - RNA, 23 nt, Human
uauuuauauauguauuuauaaau

SEQ ID NO: 2455199 - RNA, 20 nt, Human
uauuuauauauugguaacau

SEQ ID NO: 2455200 - RNA, 21 nt, Human
uauuuuauuacaucuuucaca

SEQ ID NO: 2455201 - RNA, 15 nt, Human
uauuuauaaaacuuc

SEQ ID NO: 2455202 - RNA, 23 nt, Human
uauuuauaacucaucauaaaaua

SEQ ID NO: 2455203 - RNA, 21 nt, Human
uauuuauaacucaucauaaaa

SEQ ID NO: 2455204 - RNA, 22 nt, Human
uauuuauaacucaucauaaaau

SEQ ID NO: 2455205 - RNA, 20 nt, Human
uauuuauaacaaccuaaauu

SEQ ID NO: 2455206 - RNA, 19 nt, Human
uauuuauaacaaccuaaau

SEQ ID NO: 2455207 - RNA, 13 nt, Human
uauuuauaacuca

SEQ ID NO: 2455208 - RNA, 20 nt, Human
uauuuauaacucaucauaaa

SEQ ID NO: 2455209 - RNA, 17 nt, Human
uauuuauaaucacuuuu

SEQ ID NO: 2455210 - RNA, 14 nt, Human
uauuuauaagcaga

SEQ ID NO: 2455211 - RNA, 17 nt, Human
uauuuauaagcagauuu

SEQ ID NO: 2455212 - RNA, 17 nt, Human
uauuuauaauacauuuc

SEQ ID NO: 2455213 - RNA, 18 nt, Human
uauuuauagcaauccaug

SEQ ID NO: 2455214 - RNA, 13 nt, Human
uauuuauauaaau

SEQ ID NO: 2455215 - RNA, 14 nt, Human
uauuuuauuaugca

SEQ ID NO: 2455216 - RNA, 17 nt, Human
uauuuuauuaugcauga

SEQ ID NO: 2455217 - RNA, 17 nt, Human
uauuuuauuuagacaag

SEQ ID NO: 2455218 - RNA, 23 nt, Human
uauuuuauuguaacagacauugu

SEQ ID NO: 2455219 - RNA, 19 nt, Human
uauuuuauuguaacagaca

SEQ ID NO: 2455220 - RNA, 18 nt, Human
uauuuuauuguaacagac

SEQ ID NO: 2455221 - RNA, 20 nt, Human
uauuuuauuuagacaagaga

SEQ ID NO: 2455222 - RNA, 13 nt, Human
uauuuuauucccu

SEQ ID NO: 2455223 - RNA, 17 nt, Human
uauuuuauuguaacaga

SEQ ID NO: 2455224 - RNA, 16 nt, Human
uauuuuauuguaacag

SEQ ID NO: 2455225 - RNA, 19 nt, Human
uauuuuauucccuuucaca

SEQ ID NO: 2455226 - RNA, 16 nt, Human
uauuuucauuguaaaa

SEQ ID NO: 2455227 - RNA, 15 nt, Human
uauuuucauuguaaa

SEQ ID NO: 2455228 - RNA, 13 nt, Human
uauuuucauugua

SEQ ID NO: 2455229 - RNA, 17 nt, Human
uauuuuauuuuuuucua

SEQ ID NO: 2455230 - RNA, 22 nt, Human
uauuuucaaauuguaucuagug

SEQ ID NO: 2455231 - RNA, 19 nt, Human
uauuuuccaagugugcaua

SEQ ID NO: 2455232 - RNA, 15 nt, Human
uauuuuccaagugug

SEQ ID NO: 2455233 - RNA, 14 nt, Human
uauuuuccaagugu

SEQ ID NO: 2455234 - RNA, 22 nt, Human
uauuuuccaaaaguggccucuu

SEQ ID NO: 2455235 - RNA, 16 nt, Human
uauuuuccaugaaaau

SEQ ID NO: 2455236 - RNA, 18 nt, Human
uauuuucccccuuuucug

SEQ ID NO: 2455237 - RNA, 24 nt, Human
uauuuuccaagugugcauauugua

SEQ ID NO: 2455238 - RNA, 22 nt, Human
uauuuuccaagugugcauauug

SEQ ID NO: 2455239 - RNA, 20 nt, Human
uauuuuccaugaaaaugcaa

SEQ ID NO: 2455240 - RNA, 15 nt, Human
ucaaaugacccaaag

SEQ ID NO: 2455241 - RNA, 15 nt, Human
ucaaauccauccaga

SEQ ID NO: 2455242 - RNA, 16 nt, Human
ucaaaugacccaaaga

SEQ ID NO: 2455243 - RNA, 19 nt, Human
ucaaaugacccaaagacca

SEQ ID NO: 2455244 - RNA, 17 nt, Human
ucaaaugacccaaagac

SEQ ID NO: 2455245 - RNA, 21 nt, Human
ucaaaugacccaaagaccaau

SEQ ID NO: 2455246 - RNA, 14 nt, Human
ucaaaugcucagac

SEQ ID NO: 2455247 - RNA, 19 nt, Human
ucaaaugcucagaccagcu

SEQ ID NO: 2455248 - RNA, 22 nt, Human
ucaaauuagaagacauuuauac

SEQ ID NO: 2455249 - RNA, 17 nt, Human
ucaaauuagaagacauu

SEQ ID NO: 2455250 - RNA, 20 nt, Human
ucaaauucauuuuuuucacu

SEQ ID NO: 2455251 - RNA, 14 nt, Human
ucaaauucuucuga

SEQ ID NO: 2455252 - RNA, 15 nt, Human
ucaaauucuucugaa

SEQ ID NO: 2455253 - RNA, 23 nt, Human
ucaaauuaaucuuucuuuaccug

SEQ ID NO: 2455254 - RNA, 16 nt, Human
ucaaauuagaagacau

SEQ ID NO: 2455255 - RNA, 15 nt, Human
ucaaauuagaagaca

SEQ ID NO: 2455256 - RNA, 18 nt, Human
ucaaauggggccagaucc

SEQ ID NO: 2455257 - RNA, 17 nt, Human
ucaaauuaauaaucuua

SEQ ID NO: 2455258 - RNA, 22 nt, Human
ucaaauuaauaaucuuauuagg

SEQ ID NO: 2455259 - RNA, 12 nt, Human
ucaaauuaauaa

SEQ ID NO: 2455260 - RNA, 17 nt, Human
ucaaauggaagacacau

SEQ ID NO: 2455261 - RNA, 23 nt, Human
ucaaauggaaaggagaggaaaga

SEQ ID NO: 2455262 - RNA, 20 nt, Human
ucaaauggaagacacauuga

SEQ ID NO: 2455263 - RNA, 15 nt, Human
ucaaauggaaaggag

SEQ ID NO: 2455264 - RNA, 21 nt, Human
ucaaaugcuuggcuucucaua

SEQ ID NO: 2455265 - RNA, 21 nt, Human
ucaaaugcucagaccagcucu

SEQ ID NO: 2455266 - RNA, 20 nt, Human
ucaaauuguaagcaugcaca

SEQ ID NO: 2455267 - RNA, 17 nt, Human
ucaaauuguaagcaugc

SEQ ID NO: 2455268 - RNA, 14 nt, Human
ucaaauugugugaa

SEQ ID NO: 2455269 - RNA, 16 nt, Human
ucaaauucuucugaac

SEQ ID NO: 2455270 - RNA, 21 nt, Human
ucaaauucuucugaacucaaa

SEQ ID NO: 2455271 - RNA, 16 nt, Human
ucaaauucucaaccua

SEQ ID NO: 2455272 - RNA, 16 nt, Human
ucaaauugagagaaug

SEQ ID NO: 2455273 - RNA, 12 nt, Human
ucaaauuguauc

SEQ ID NO: 2455274 - RNA, 14 nt, Human
ucaaauuguaucua

SEQ ID NO: 2455275 - RNA, 23 nt, Human
ucaaccccuucgcuccugugucu

SEQ ID NO: 2455276 - RNA, 14 nt, Human
ucaacccucccuca

SEQ ID NO: 2455277 - RNA, 15 nt, Human
ucaacccucccucag

SEQ ID NO: 2455278 - RNA, 17 nt, Human
ucaacccucccucagcc

SEQ ID NO: 2455279 - RNA, 18 nt, Human
ucaacccucccucagccc

SEQ ID NO: 2455280 - RNA, 19 nt, Human
ucaacccucccucagcccc

SEQ ID NO: 2455281 - RNA, 20 nt, Human
ucaacccucccucagccccu

SEQ ID NO: 2455282 - RNA, 21 nt, Human
ucaacccucccucagccccuc

SEQ ID NO: 2455283 - RNA, 23 nt, Human
ucaacccucccucagccccucuu

SEQ ID NO: 2455284 - RNA, 13 nt, Human
ucaaauuguaucu

SEQ ID NO: 2455285 - RNA, 18 nt, Human
ucaacccuaaaaagcaga

SEQ ID NO: 2455286 - RNA, 22 nt, Human
ucaacccuaaaaagcagagcuu

SEQ ID NO: 2455287 - RNA, 23 nt, Human
ucaacccuaaaaagcagagcuuu

SEQ ID NO: 2455288 - RNA, 14 nt, Human
ucaaauaugcaaag

SEQ ID NO: 2455289 - RNA, 20 nt, Human
ucaaaucaagaaacuuaagg

SEQ ID NO: 2455290 - RNA, 14 nt, Human
ucaaaucagucagu

SEQ ID NO: 2455291 - RNA, 19 nt, Human
ucaaauauuagaugugauu

SEQ ID NO: 2455292 - RNA, 24 nt, Human
ucaaaucagucagugcaaauguca

SEQ ID NO: 2455293 - RNA, 15 nt, Human
ucaaaucagucagug

SEQ ID NO: 2455294 - RNA, 16 nt, Human
ucaaauauuagaugug

SEQ ID NO: 2455295 - RNA, 15 nt, Human
ucaaauauuagaugu

SEQ ID NO: 2455296 - RNA, 16 nt, Human
ucaaagagaaaacuua

SEQ ID NO: 2455297 - RNA, 14 nt, Human
ucaaauauuagaug

SEQ ID NO: 2455298 - RNA, 23 nt, Human
ucaaauauauucagccuggcuuc

SEQ ID NO: 2455299 - RNA, 22 nt, Human
ucaaauauauucagccuggcuu

SEQ ID NO: 2455300 - RNA, 21 nt, Human
ucaaauauauucagccuggcu

SEQ ID NO: 2455301 - RNA, 21 nt, Human
ucaaagaccuuguguguaugu

SEQ ID NO: 2455302 - RNA, 19 nt, Human
ucaaagaccuuguguguau

SEQ ID NO: 2455303 - RNA, 17 nt, Human
ucaaagaccuugugugu

SEQ ID NO: 2455304 - RNA, 22 nt, Human
ucaaagaaggauggcaccuaaa

SEQ ID NO: 2455305 - RNA, 17 nt, Human
ucaaagacauucugaca

SEQ ID NO: 2455306 - RNA, 23 nt, Human
ucaaagaagguuuguguuuuucu

SEQ ID NO: 2455307 - RNA, 16 nt, Human
ucaaagaaggauggca

SEQ ID NO: 2455308 - RNA, 12 nt, Human
ucaaagaaggaa

SEQ ID NO: 2455309 - RNA, 21 nt, Human
ucaaaacacaucuuuccuguc

SEQ ID NO: 2455310 - RNA, 19 nt, Human
ucaaagaaaugcugaugga

SEQ ID NO: 2455311 - RNA, 16 nt, Human
ucaaagaaaugcugau

SEQ ID NO: 2455312 - RNA, 12 nt, Human
ucaaagaaaugc

SEQ ID NO: 2455313 - RNA, 15 nt, Human
ucaaaacagagaugu

SEQ ID NO: 2455314 - RNA, 14 nt, Human
ucaaaaaacuugua

SEQ ID NO: 2455315 - RNA, 15 nt, Human
ucaaaaaacuuguaa

SEQ ID NO: 2455316 - RNA, 16 nt, Human
ucaaaaauauaacuua

SEQ ID NO: 2455317 - RNA, 15 nt, Human
ucaaaaauauaacuu

SEQ ID NO: 2455318 - RNA, 16 nt, Human
ucaaaaaaacacuagu

SEQ ID NO: 2455319 - RNA, 14 nt, Human
ucaaaaaaacacua

SEQ ID NO: 2455320 - RNA, 14 nt, Human
ucaaaaauauaacu

SEQ ID NO: 2455321 - RNA, 17 nt, Human
ucuuccuggauuauuca

SEQ ID NO: 2455322 - RNA, 22 nt, Human
ucuuccuguaacacaagccaca

SEQ ID NO: 2455323 - RNA, 18 nt, Human
ucuucaucuucaccagag

SEQ ID NO: 2455324 - RNA, 17 nt, Human
ucuucaugcaaugacau

SEQ ID NO: 2455325 - RNA, 14 nt, Human
ucuucaugcaauga

SEQ ID NO: 2455326 - RNA, 13 nt, Human
ucuucaucuucac

SEQ ID NO: 2455327 - RNA, 20 nt, Human
ucuucauccggcagccugga

SEQ ID NO: 2455328 - RNA, 22 nt, Human
ucuucagccucuuucugucccu

SEQ ID NO: 2455329 - RNA, 23 nt, Human
ucuucagccuagccgaccucagc

SEQ ID NO: 2455330 - RNA, 21 nt, Human
ucuucagccuagccgaccuca

SEQ ID NO: 2455331 - RNA, 22 nt, Human
ucuucagccuagccgaccucag

SEQ ID NO: 2455332 - RNA, 16 nt, Human
ucuucagcuucuucau

SEQ ID NO: 2455333 - RNA, 13 nt, Human
ucuucagcuucuu

SEQ ID NO: 2455334 - RNA, 13 nt, Human
ucuucaggccucc

SEQ ID NO: 2455335 - RNA, 14 nt, Human
ucuucaggccuccc

SEQ ID NO: 2455336 - RNA, 15 nt, Human
ucuucaggccucccu

SEQ ID NO: 2455337 - RNA, 18 nt, Human
ucuucauaccuacaugua

SEQ ID NO: 2455338 - RNA, 21 nt, Human
ucuucauaccuacauguauuu

SEQ ID NO: 2455339 - RNA, 15 nt, Human
ucuucauaauucuaa

SEQ ID NO: 2455340 - RNA, 20 nt, Human
ucuucagcuugugcacaauu

SEQ ID NO: 2455341 - RNA, 18 nt, Human
ucuucaggccucccucuc

SEQ ID NO: 2455342 - RNA, 22 nt, Human
ucuucauacuuuuuuucacagu

SEQ ID NO: 2455343 - RNA, 15 nt, Human
ucuucauacuuuuuu

SEQ ID NO: 2455344 - RNA, 13 nt, Human
ucuucauacuuuu

SEQ ID NO: 2455345 - RNA, 18 nt, Human
ucuucauccggcagccug

SEQ ID NO: 2455346 - RNA, 19 nt, Human
ucuucauccggcagccugg

SEQ ID NO: 2455347 - RNA, 17 nt, Human
ucuuaggggagagcuuu

SEQ ID NO: 2455348 - RNA, 19 nt, Human
ucuuaggggagagcuuucu

SEQ ID NO: 2455349 - RNA, 14 nt, Human
ucuuaggagcagag

SEQ ID NO: 2455350 - RNA, 22 nt, Human
ucuuagcuuuuuaauuguuguu

SEQ ID NO: 2455351 - RNA, 19 nt, Human
ucuuaggagcagagcucug

SEQ ID NO: 2455352 - RNA, 16 nt, Human
ucuucagccaccucuc

SEQ ID NO: 2455353 - RNA, 16 nt, Human
ucuucagccaucaaca

SEQ ID NO: 2455354 - RNA, 13 nt, Human
ucuucagccauca

SEQ ID NO: 2455355 - RNA, 19 nt, Human
ucuucagccaccucucuuu

SEQ ID NO: 2455356 - RNA, 11 nt, Human
ucuucagccua

SEQ ID NO: 2455357 - RNA, 12 nt, Human
ucuucagccuag

SEQ ID NO: 2455358 - RNA, 18 nt, Human
ucuucagaucucuaacuu

SEQ ID NO: 2455359 - RNA, 23 nt, Human
ucuucagaucucuaacuucacca

SEQ ID NO: 2455360 - RNA, 21 nt, Human
ucuuagcuuuuuaauuguugu

SEQ ID NO: 2455361 - RNA, 18 nt, Human
ucuuagcuuuuuaauugu

SEQ ID NO: 2455362 - RNA, 17 nt, Human
ucuuagcuuuuuaauug

SEQ ID NO: 2455363 - RNA, 16 nt, Human
ucuuagcuuuuuaauu

SEQ ID NO: 2455364 - RNA, 19 nt, Human
ucuuaggaagagaaaccag

SEQ ID NO: 2455365 - RNA, 15 nt, Human
ucuuaggaagagaaa

SEQ ID NO: 2455366 - RNA, 23 nt, Human
ucuugaaagauucagguauguug

SEQ ID NO: 2455367 - RNA, 20 nt, Human
ucuucuuuuugcuguuguuu

SEQ ID NO: 2455368 - RNA, 18 nt, Human
ucuucuuuuugcuguugu

SEQ ID NO: 2455369 - RNA, 21 nt, Human
ucuugaacacucaugcugaaa

SEQ ID NO: 2455370 - RNA, 20 nt, Human
ucuugaacacucaugcugaa

SEQ ID NO: 2455371 - RNA, 19 nt, Human
ucuugaacacucaugcuga

SEQ ID NO: 2455372 - RNA, 13 nt, Human
ucuugaaaaaugc

SEQ ID NO: 2455373 - RNA, 17 nt, Human
ucuugaacuccugaccu

SEQ ID NO: 2455374 - RNA, 19 nt, Human
ucuugaacuccugaccuca

SEQ ID NO: 2455375 - RNA, 12 nt, Human
ucuugaacuccu

SEQ ID NO: 2455376 - RNA, 16 nt, Human
ucuucuccuaugugua

SEQ ID NO: 2455377 - RNA, 13 nt, Human
ucuucuccuuuca

SEQ ID NO: 2455378 - RNA, 15 nt, Human
ucuucucuagcuggu

SEQ ID NO: 2455379 - RNA, 17 nt, Human
ucuucuccuauguguaa

SEQ ID NO: 2455380 - RNA, 13 nt, Human
ucuucucuagcug

SEQ ID NO: 2455381 - RNA, 14 nt, Human
ucuucuccuuucac

SEQ ID NO: 2455382 - RNA, 18 nt, Human
ucuucuuuuuuugugaug

SEQ ID NO: 2455383 - RNA, 17 nt, Human
ucuucuuuuuuugugau

SEQ ID NO: 2455384 - RNA, 16 nt, Human
ucuucuuuuuuuguga

SEQ ID NO: 2455385 - RNA, 19 nt, Human
ucuucuuuuugcuucaaaa

SEQ ID NO: 2455386 - RNA, 14 nt, Human
ucuucuccccaggu

SEQ ID NO: 2455387 - RNA, 12 nt, Human
ucuucuccaucu

SEQ ID NO: 2455388 - RNA, 12 nt, Human
ucuucuccccag

SEQ ID NO: 2455389 - RNA, 14 nt, Human
ucuucuccaucugg

SEQ ID NO: 2455390 - RNA, 12 nt, Human
ucuucuccacca

SEQ ID NO: 2455391 - RNA, 20 nt, Human
ucuucucauuucaccccucc

SEQ ID NO: 2455392 - RNA, 19 nt, Human
ucuucucauuucaccccuc

SEQ ID NO: 2455393 - RNA, 18 nt, Human
ucuucucauuucaccccu

SEQ ID NO: 2455394 - RNA, 15 nt, Human
ucuucucauuucacc

SEQ ID NO: 2455395 - RNA, 23 nt, Human
ucuucucauuucaccccucccuu

SEQ ID NO: 2455396 - RNA, 22 nt, Human
ucuucucauuucaccccucccu

SEQ ID NO: 2455397 - RNA, 12 nt, Human
ucuucuccacug

SEQ ID NO: 2455398 - RNA, 21 nt, Human
ucuuccuugaagaacugcagg

SEQ ID NO: 2455399 - RNA, 13 nt, Human
ucuuccuucugcc

SEQ ID NO: 2455400 - RNA, 13 nt, Human
ucuuccugugggg

SEQ ID NO: 2455401 - RNA, 12 nt, Human
ucuuccuguggg

SEQ ID NO: 2455402 - RNA, 19 nt, Human
ucuuccugugggggaagag

SEQ ID NO: 2455403 - RNA, 10 nt, Human
ucuucucauu

SEQ ID NO: 2455404 - RNA, 17 nt, Human
ucuucucauagcauuaa

SEQ ID NO: 2455405 - RNA, 18 nt, Human
ucuucucauagcauuaac

SEQ ID NO: 2455406 - RNA, 19 nt, Human
ucuucucauagcauuaacu

SEQ ID NO: 2455407 - RNA, 20 nt, Human
ucuucucauagcauuaacua

SEQ ID NO: 2455408 - RNA, 14 nt, Human
ucuucucaggcucu

SEQ ID NO: 2455409 - RNA, 20 nt, Human
ucuucucaggcucugcccug

SEQ ID NO: 2455410 - RNA, 21 nt, Human
ucuucucaggcucugcccugc

SEQ ID NO: 2455411 - RNA, 16 nt, Human
ucuucucauagcauua

SEQ ID NO: 2455412 - RNA, 22 nt, Human
ucuuccuugaagaacugcaggc

SEQ ID NO: 2455413 - RNA, 22 nt, Human
ucuuaaccagaucauugugaaa

SEQ ID NO: 2455414 - RNA, 23 nt, Human
ucuuaacacauguccuugugugu

SEQ ID NO: 2455415 - RNA, 19 nt, Human
ucuuaacaauuucuguccu

SEQ ID NO: 2455416 - RNA, 15 nt, Human
ucuuaacaauuucug

SEQ ID NO: 2455417 - RNA, 18 nt, Human
ucuuaaauuuugugauau

SEQ ID NO: 2455418 - RNA, 22 nt, Human
ucuuaacguuagaccacaaaua

SEQ ID NO: 2455419 - RNA, 12 nt, Human
ucuuaaccaucu

SEQ ID NO: 2455420 - RNA, 12 nt, Human
ucuuaagaagac

SEQ ID NO: 2455421 - RNA, 15 nt, Human
ucuuagcugucugcu

SEQ ID NO: 2455422 - RNA, 18 nt, Human
ucuuagcugucugcucag

SEQ ID NO: 2455423 - RNA, 14 nt, Human
ucuuagcuuuuuaa

SEQ ID NO: 2455424 - RNA, 12 nt, Human
ucuuagcugagu

SEQ ID NO: 2455425 - RNA, 23 nt, Human
ucuuagcugucugcucagacaga

SEQ ID NO: 2455426 - RNA, 23 nt, Human
ucuuaagccaucuugguaaauuu

SEQ ID NO: 2455427 - RNA, 22 nt, Human
ucuuaagccaucuugguaaauu

SEQ ID NO: 2455428 - RNA, 20 nt, Human
ucuuaagccaucuugguaaa

SEQ ID NO: 2455429 - RNA, 17 nt, Human
ucuuagcuccccuccaa

SEQ ID NO: 2455430 - RNA, 21 nt, Human
ucuuaagccuuuugcucacaa

SEQ ID NO: 2455431 - RNA, 16 nt, Human
ucuuagcuccccucca

SEQ ID NO: 2455432 - RNA, 18 nt, Human
ucuuaagaagacugcauu

SEQ ID NO: 2455433 - RNA, 19 nt, Human
ucuuaagccaucuugguaa

SEQ ID NO: 2455434 - RNA, 17 nt, Human
ucuuaagccaucuuggu

SEQ ID NO: 2455435 - RNA, 16 nt, Human
ucuuaagccaucuugg

SEQ ID NO: 2455436 - RNA, 13 nt, Human
ucuuaagccaucu

SEQ ID NO: 2455437 - RNA, 12 nt, Human
ucuuaagccauc

SEQ ID NO: 2455438 - RNA, 15 nt, Human
ucuuaagacuuuugg

SEQ ID NO: 2455439 - RNA, 17 nt, Human
ucuuaaccagaucauug

SEQ ID NO: 2455440 - RNA, 16 nt, Human
ucuuaaccagaucauu

SEQ ID NO: 2455441 - RNA, 22 nt, Human
ucuuaaauauguggaguucauc

SEQ ID NO: 2455442 - RNA, 19 nt, Human
ucuuaaauaauaaagauca

SEQ ID NO: 2455443 - RNA, 14 nt, Human
ucuuaaauuuugug

SEQ ID NO: 2455444 - RNA, 13 nt, Human
ucuuaaauuuugu

SEQ ID NO: 2455445 - RNA, 11 nt, Human
ucuuaaauuuu

SEQ ID NO: 2455446 - RNA, 15 nt, Human
ucuuaaauaauaaag

SEQ ID NO: 2455447 - RNA, 17 nt, Human
ucugucucugccucccu

SEQ ID NO: 2455448 - RNA, 14 nt, Human
ucugucucugccuc

SEQ ID NO: 2455449 - RNA, 13 nt, Human
ucugucugcccuu

SEQ ID NO: 2455450 - RNA, 22 nt, Human
ucugucugcccuucaccccagu

SEQ ID NO: 2455451 - RNA, 18 nt, Human
ucugucuggagugacaga

SEQ ID NO: 2455452 - RNA, 13 nt, Human
ucugucugguggc

SEQ ID NO: 2455453 - RNA, 17 nt, Human
ucugucugguggccccg

SEQ ID NO: 2455454 - RNA, 16 nt, Human
ucugucugguggcccc

SEQ ID NO: 2455455 - RNA, 17 nt, Human
ucugucuucaagggcuu

SEQ ID NO: 2455456 - RNA, 15 nt, Human
ucugucuucacaaca

SEQ ID NO: 2455457 - RNA, 12 nt, Human
ucugucuucaca

SEQ ID NO: 2455458 - RNA, 14 nt, Human
ucugucuucacagc

SEQ ID NO: 2455459 - RNA, 15 nt, Human
ucugucuucacagcu

SEQ ID NO: 2455460 - RNA, 22 nt, Human
ucugucuucacagcucuguguu

SEQ ID NO: 2455461 - RNA, 19 nt, Human
ucugucuuggcuuucaugu

SEQ ID NO: 2455462 - RNA, 12 nt, Human
ucugucuugaag

SEQ ID NO: 2455463 - RNA, 15 nt, Human
ucugucuucaccuga

SEQ ID NO: 2455464 - RNA, 12 nt, Human
ucuguuuucugu

SEQ ID NO: 2455465 - RNA, 20 nt, Human
ucuguuuuccuuucucaccg

SEQ ID NO: 2455466 - RNA, 23 nt, Human
ucuguuuucuuucuaaugagaua

SEQ ID NO: 2455467 - RNA, 17 nt, Human
ucuguuuugaaggcaaa

SEQ ID NO: 2455468 - RNA, 16 nt, Human
ucuguuuugccugaag

SEQ ID NO: 2455469 - RNA, 19 nt, Human
ucuuaaagaaaacccaccc

SEQ ID NO: 2455470 - RNA, 22 nt, Human
ucuuaaaguauucuucucuucc

SEQ ID NO: 2455471 - RNA, 18 nt, Human
ucuuaaaguauucuucuc

SEQ ID NO: 2455472 - RNA, 23 nt, Human
ucuuaaagcugccuguaguuagg

SEQ ID NO: 2455473 - RNA, 20 nt, Human
ucuuaaagcugccuguaguu

SEQ ID NO: 2455474 - RNA, 21 nt, Human
ucuuaaagcugccuguaguua

SEQ ID NO: 2455475 - RNA, 20 nt, Human
ucuuaaagaaaacccacccc

SEQ ID NO: 2455476 - RNA, 16 nt, Human
ucuuaaagcugccugu

SEQ ID NO: 2455477 - RNA, 19 nt, Human
ucuuaaagcugccuguagu

SEQ ID NO: 2455478 - RNA, 16 nt, Human
ucuguuuuuaaaaauc

SEQ ID NO: 2455479 - RNA, 14 nt, Human
ucuguuuuucuuuu

SEQ ID NO: 2455480 - RNA, 18 nt, Human
ucuuaaaaaauaaaaacu

SEQ ID NO: 2455481 - RNA, 16 nt, Human
ucuuaaaccuucaguu

SEQ ID NO: 2455482 - RNA, 17 nt, Human
ucuuaaacaaauguaug

SEQ ID NO: 2455483 - RNA, 17 nt, Human
ucugcugacagacacag

SEQ ID NO: 2455484 - RNA, 18 nt, Human
ucugcugacagacacagg

SEQ ID NO: 2455485 - RNA, 20 nt, Human
ucugcuccucuccaggcacc

SEQ ID NO: 2455486 - RNA, 18 nt, Human
ucugcuccucuccaggca

SEQ ID NO: 2455487 - RNA, 17 nt, Human
ucugcuccucuccaggc

SEQ ID NO: 2455488 - RNA, 16 nt, Human
ucugcuccucuccagg

SEQ ID NO: 2455489 - RNA, 21 nt, Human
ucugcuccucuccccagcaag

SEQ ID NO: 2455490 - RNA, 18 nt, Human
ucugcuccucuccccagc

SEQ ID NO: 2455491 - RNA, 23 nt, Human
ucugccagugacagacaggcucu

SEQ ID NO: 2455492 - RNA, 16 nt, Human
ucugcuccccagggga

SEQ ID NO: 2455493 - RNA, 15 nt, Human
ucugcuccucuccag

SEQ ID NO: 2455494 - RNA, 14 nt, Human
ucugcuccucucca

SEQ ID NO: 2455495 - RNA, 13 nt, Human
ucugcuccucucc

SEQ ID NO: 2455496 - RNA, 12 nt, Human
ucugcuccucuc

SEQ ID NO: 2455497 - RNA, 16 nt, Human
ucugccugcccaggcc

SEQ ID NO: 2455498 - RNA, 15 nt, Human
ucugccugcccaggc

SEQ ID NO: 2455499 - RNA, 13 nt, Human
ucugccagccaca

SEQ ID NO: 2455500 - RNA, 13 nt, Human
ucugccagccagc

SEQ ID NO: 2455501 - RNA, 15 nt, Human
ucugccagccagcag

SEQ ID NO: 2455502 - RNA, 16 nt, Human
ucugccagccagcagc

SEQ ID NO: 2455503 - RNA, 17 nt, Human
ucugccagccagcagcc

SEQ ID NO: 2455504 - RNA, 14 nt, Human
ucugccaggccccc

SEQ ID NO: 2455505 - RNA, 19 nt, Human
ucugccagccagcagccag

SEQ ID NO: 2455506 - RNA, 23 nt, Human
ucugccaggcccccaagccugca

SEQ ID NO: 2455507 - RNA, 12 nt, Human
ucugccagggag

SEQ ID NO: 2455508 - RNA, 13 nt, Human
ucugccagggagc

SEQ ID NO: 2455509 - RNA, 14 nt, Human
ucugccagggagcu

SEQ ID NO: 2455510 - RNA, 19 nt, Human
ucugccagggagcuugaaa

SEQ ID NO: 2455511 - RNA, 13 nt, Human
ucugccagugaca

SEQ ID NO: 2455512 - RNA, 21 nt, Human
ucugccagugacagacaggcu

SEQ ID NO: 2455513 - RNA, 19 nt, Human
ucugccagugacagacagg

SEQ ID NO: 2455514 - RNA, 13 nt, Human
ucugccugcccag

SEQ ID NO: 2455515 - RNA, 14 nt, Human
ucugccugcccagg

SEQ ID NO: 2455516 - RNA, 16 nt, Human
ucugcuggccuggccg

SEQ ID NO: 2455517 - RNA, 15 nt, Human
ucugcuggccuggcc

SEQ ID NO: 2455518 - RNA, 18 nt, Human
ucugcuggccuggaucuc

SEQ ID NO: 2455519 - RNA, 17 nt, Human
ucugcuggccuggaucu

SEQ ID NO: 2455520 - RNA, 16 nt, Human
ucugcuggccuggauc

SEQ ID NO: 2455521 - RNA, 15 nt, Human
ucugcuggccuggau

SEQ ID NO: 2455522 - RNA, 14 nt, Human
ucugcuggccugga

SEQ ID NO: 2455523 - RNA, 20 nt, Human
ucugcuggcccagccaaacc

SEQ ID NO: 2455524 - RNA, 22 nt, Human
ucugcugauccucccaggcuuc

SEQ ID NO: 2455525 - RNA, 23 nt, Human
ucugcuggaguuucauguacaag

SEQ ID NO: 2455526 - RNA, 16 nt, Human
ucugcuggauaaaaug

SEQ ID NO: 2455527 - RNA, 18 nt, Human
ucugcuggauaaaaugag

SEQ ID NO: 2455528 - RNA, 22 nt, Human
ucugcuggauaaaaugagguuc

SEQ ID NO: 2455529 - RNA, 12 nt, Human
ucugcuggccca

SEQ ID NO: 2455530 - RNA, 14 nt, Human
ucugcuggcccagc

SEQ ID NO: 2455531 - RNA, 22 nt, Human
ucugcugacagacacaggcccg

SEQ ID NO: 2455532 - RNA, 21 nt, Human
ucugcugacagacacaggccc

SEQ ID NO: 2455533 - RNA, 20 nt, Human
ucugcugacagacacaggcc

SEQ ID NO: 2455534 - RNA, 19 nt, Human
ucugcugacagacacaggc

SEQ ID NO: 2455535 - RNA, 17 nt, Human
ucugcugggcuggggcc

SEQ ID NO: 2455536 - RNA, 14 nt, Human
ucugcugggcuggg

SEQ ID NO: 2455537 - RNA, 13 nt, Human
ucugcugggcugg

SEQ ID NO: 2455538 - RNA, 12 nt, Human
ucugcugggcug

SEQ ID NO: 2455539 - RNA, 24 nt, Human
ucugcugggcuggggccugauggg

SEQ ID NO: 2455540 - RNA, 22 nt, Human
ucugcugggcuggggccugaug

SEQ ID NO: 2455541 - RNA, 19 nt, Human
ucuggaauaaggagaauga

SEQ ID NO: 2455542 - RNA, 14 nt, Human
ucuggaauacauga

SEQ ID NO: 2455543 - RNA, 22 nt, Human
ucuggaauacaugaaauauaga

SEQ ID NO: 2455544 - RNA, 15 nt, Human
ucuggaaugcagugg

SEQ ID NO: 2455545 - RNA, 14 nt, Human
ucuggacaggcaug

SEQ ID NO: 2455546 - RNA, 16 nt, Human
ucuggaaugcaguggu

SEQ ID NO: 2455547 - RNA, 21 nt, Human
ucuggacaggcauguucucug

SEQ ID NO: 2455548 - RNA, 22 nt, Human
ucuggaccaacccuguuuccug

SEQ ID NO: 2455549 - RNA, 19 nt, Human
ucuggaaucuggagaccag

SEQ ID NO: 2455550 - RNA, 17 nt, Human
ucuggccuucggccucc

SEQ ID NO: 2455551 - RNA, 14 nt, Human
ucuggaccccaucu

SEQ ID NO: 2455552 - RNA, 17 nt, Human
ucuggaccccaucugug

SEQ ID NO: 2455553 - RNA, 18 nt, Human
ucuggaccccaucuguga

SEQ ID NO: 2455554 - RNA, 19 nt, Human
ucuggaccccaucugugaa

SEQ ID NO: 2455555 - RNA, 18 nt, Human
ucuggccuucggccucca

SEQ ID NO: 2455556 - RNA, 19 nt, Human
ucuggcuaugcauuugaaa

SEQ ID NO: 2455557 - RNA, 22 nt, Human
ucuggcuaugcauuugaaaauu

SEQ ID NO: 2455558 - RNA, 15 nt, Human
ucuggcuccagcugg

SEQ ID NO: 2455559 - RNA, 19 nt, Human
ucuggcuccucaaacagua

SEQ ID NO: 2455560 - RNA, 23 nt, Human
ucuggaccaacccuguuuccuga

SEQ ID NO: 2455561 - RNA, 20 nt, Human
ucuggaccccaucugugaau

SEQ ID NO: 2455562 - RNA, 23 nt, Human
ucuggugacuuuccucuuugguc

SEQ ID NO: 2455563 - RNA, 16 nt, Human
ucugggaccucaguuu

SEQ ID NO: 2455564 - RNA, 13 nt, Human
ucugggaccucag

SEQ ID NO: 2455565 - RNA, 22 nt, Human
ucugggaccugccaggcagggg

SEQ ID NO: 2455566 - RNA, 21 nt, Human
ucugggaccugccaggcaggg

SEQ ID NO: 2455567 - RNA, 20 nt, Human
ucugggaccugccaggcagg

SEQ ID NO: 2455568 - RNA, 19 nt, Human
ucugggacccuuuccuucc

SEQ ID NO: 2455569 - RNA, 14 nt, Human
ucugggacacaguu

SEQ ID NO: 2455570 - RNA, 21 nt, Human
ucuggcugagcugaacccauu

SEQ ID NO: 2455571 - RNA, 15 nt, Human
ucuggcugagcugaa

SEQ ID NO: 2455572 - RNA, 15 nt, Human
ucugggacccuuucc

SEQ ID NO: 2455573 - RNA, 16 nt, Human
ucugggacccuuuccu

SEQ ID NO: 2455574 - RNA, 23 nt, Human
ucuggcucuuccaggcugggaga

SEQ ID NO: 2455575 - RNA, 18 nt, Human
ucuggcucuuccaggcug

SEQ ID NO: 2455576 - RNA, 14 nt, Human
ucuggcugagcuga

SEQ ID NO: 2455577 - RNA, 16 nt, Human
ucuggcugagcccugc

SEQ ID NO: 2455578 - RNA, 15 nt, Human
ucuggcugagcccug

SEQ ID NO: 2455579 - RNA, 20 nt, Human
ucuggcugaacccugugcug

SEQ ID NO: 2455580 - RNA, 21 nt, Human
ucuggcugaacccugugcugg

SEQ ID NO: 2455581 - RNA, 19 nt, Human
ucuggcugaacccugugcu

SEQ ID NO: 2455582 - RNA, 18 nt, Human
ucuggcugaacccugugc

SEQ ID NO: 2455583 - RNA, 17 nt, Human
ucuggcugaacccugug

SEQ ID NO: 2455584 - RNA, 16 nt, Human
ucuggcugaacccugu

SEQ ID NO: 2455585 - RNA, 14 nt, Human
ucuggcugaacccu

SEQ ID NO: 2455586 - RNA, 13 nt, Human
ucuggcugaaccc

SEQ ID NO: 2455587 - RNA, 18 nt, Human
ucuggcugaacacuggca

SEQ ID NO: 2455588 - RNA, 19 nt, Human
ucuguccuacucuguguca

SEQ ID NO: 2455589 - RNA, 15 nt, Human
ucuguccuacucugu

SEQ ID NO: 2455590 - RNA, 17 nt, Human
ucuguccuggugucacu

SEQ ID NO: 2455591 - RNA, 21 nt, Human
ucuguccugggagugagcugg

SEQ ID NO: 2455592 - RNA, 14 nt, Human
ucugucgcccaguc

SEQ ID NO: 2455593 - RNA, 14 nt, Human
ucuguccuucagau

SEQ ID NO: 2455594 - RNA, 14 nt, Human
ucuguccugguguc

SEQ ID NO: 2455595 - RNA, 20 nt, Human
ucuguccuucagauggaaac

SEQ ID NO: 2455596 - RNA, 16 nt, Human
ucugucgcccagucug

SEQ ID NO: 2455597 - RNA, 22 nt, Human
ucugucucuggauuauauuaug

SEQ ID NO: 2455598 - RNA, 12 nt, Human
ucugucucugcc

SEQ ID NO: 2455599 - RNA, 19 nt, Human
ucuguccuuuuggcacuga

SEQ ID NO: 2455600 - RNA, 22 nt, Human
ucugucuccuuaacacugagcu

SEQ ID NO: 2455601 - RNA, 21 nt, Human
ucuguccuuuuggcacugaga

SEQ ID NO: 2455602 - RNA, 18 nt, Human
ucuggugaggccuugcuc

SEQ ID NO: 2455603 - RNA, 17 nt, Human
ucuggugaggccuugcu

SEQ ID NO: 2455604 - RNA, 21 nt, Human
ucugggacuuccuugcucucc

SEQ ID NO: 2455605 - RNA, 17 nt, Human
ucugggacuuccuugcu

SEQ ID NO: 2455606 - RNA, 15 nt, Human
ucugggacuuccuug

SEQ ID NO: 2455607 - RNA, 13 nt, Human
ucugggacuuccu

SEQ ID NO: 2455608 - RNA, 22 nt, Human
ucuggugagcgaggacauucuc

SEQ ID NO: 2455609 - RNA, 13 nt, Human
ucugggagaggau

SEQ ID NO: 2455610 - RNA, 23 nt, Human
ucuggugggguguguuccaacug

SEQ ID NO: 2455611 - RNA, 14 nt, Human
ucugguggccccgu

SEQ ID NO: 2455612 - RNA, 12 nt, Human
ucugguggcccc

SEQ ID NO: 2455613 - RNA, 16 nt, Human
ucugguggucuguugg

SEQ ID NO: 2455614 - RNA, 21 nt, Human
ucugguggccgaucggggcac

SEQ ID NO: 2455615 - RNA, 16 nt, Human
ucugguggucucugcu

SEQ ID NO: 2455616 - RNA, 13 nt, Human
ucuggugucugcu

SEQ ID NO: 2455617 - RNA, 20 nt, Human
ucugguuccuccccuccucc

SEQ ID NO: 2455618 - RNA, 21 nt, Human
ucugguuccuccccuccuccu

SEQ ID NO: 2455619 - RNA, 14 nt, Human
ucuguccuacucug

SEQ ID NO: 2455620 - RNA, 23 nt, Human
ucugguuccagggucccucugug

SEQ ID NO: 2455621 - RNA, 21 nt, Human
ucugguuccagggucccucug

SEQ ID NO: 2455622 - RNA, 13 nt, Human
ucugguuccuccc

SEQ ID NO: 2455623 - RNA, 14 nt, Human
ucugguuccagggu

SEQ ID NO: 2455624 - RNA, 13 nt, Human
ucugguuccaggg

SEQ ID NO: 2455625 - RNA, 12 nt, Human
ucugguuccagg

SEQ ID NO: 2455626 - RNA, 14 nt, Human
ucugaaaauauaac

SEQ ID NO: 2455627 - RNA, 13 nt, Human
ucugaaaauauaa

SEQ ID NO: 2455628 - RNA, 23 nt, Human
ucugaaaaauuccuuuguguuuc

SEQ ID NO: 2455629 - RNA, 17 nt, Human
ucugaaaacggcccucu

SEQ ID NO: 2455630 - RNA, 15 nt, Human
ucugaaaacggcccu

SEQ ID NO: 2455631 - RNA, 14 nt, Human
ucugaaaauugaug

SEQ ID NO: 2455632 - RNA, 13 nt, Human
ucugaaaauguau

SEQ ID NO: 2455633 - RNA, 15 nt, Human
ucugaaaccaguguu

SEQ ID NO: 2455634 - RNA, 20 nt, Human
ucugaaaccaguguuaggga

SEQ ID NO: 2455635 - RNA, 23 nt, Human
ucugaaacccuggaccagugguc

SEQ ID NO: 2455636 - RNA, 22 nt, Human
ucugaaaauugaugggauuugg

SEQ ID NO: 2455637 - RNA, 18 nt, Human
ucugaaaauauaaccagc

SEQ ID NO: 2455638 - RNA, 18 nt, Human
ucucugugugcacaaaua

SEQ ID NO: 2455639 - RNA, 20 nt, Human
ucucuguguuuguuccuaca

SEQ ID NO: 2455640 - RNA, 10 nt, Human
ucucuguguu

SEQ ID NO: 2455641 - RNA, 13 nt, Human
ucucuguucauuu

SEQ ID NO: 2455642 - RNA, 14 nt, Human
ucucuguucauuuc

SEQ ID NO: 2455643 - RNA, 16 nt, Human
ucucuguucauuuccu

SEQ ID NO: 2455644 - RNA, 17 nt, Human
ucucuguucauuuccuc

SEQ ID NO: 2455645 - RNA, 18 nt, Human
ucucuguucauuuccuca

SEQ ID NO: 2455646 - RNA, 21 nt, Human
ucucuguuccauugaaucugu

SEQ ID NO: 2455647 - RNA, 18 nt, Human
ucucuuaauuuaaucuuu

SEQ ID NO: 2455648 - RNA, 22 nt, Human
ucucuuacgcccaacccuuccc

SEQ ID NO: 2455649 - RNA, 19 nt, Human
ucucuuacugcaaauguca

SEQ ID NO: 2455650 - RNA, 15 nt, Human
ucucuuacugcaaau

SEQ ID NO: 2455651 - RNA, 13 nt, Human
ucucuuacugcaa

SEQ ID NO: 2455652 - RNA, 16 nt, Human
ucucuuagcuccccuc

SEQ ID NO: 2455653 - RNA, 18 nt, Human
ucucuuagcuccccucca

SEQ ID NO: 2455654 - RNA, 17 nt, Human
ucucuuagcuccccucc

SEQ ID NO: 2455655 - RNA, 19 nt, Human
ucucuuagcuccccuccaa

SEQ ID NO: 2455656 - RNA, 15 nt, Human
ucucuuauagaauau

SEQ ID NO: 2455657 - RNA, 20 nt, Human
ucucuuuuuggaggugcuua

SEQ ID NO: 2455658 - RNA, 19 nt, Human
ucucuuuuuggaggugcuu

SEQ ID NO: 2455659 - RNA, 17 nt, Human
ucucuuuuuggaggugc

SEQ ID NO: 2455660 - RNA, 21 nt, Human
ucucuuauagaauauuuauua

SEQ ID NO: 2455661 - RNA, 20 nt, Human
ucucuuauagaauauuuauu

SEQ ID NO: 2455662 - RNA, 18 nt, Human
ucucuuauagaauauuua

SEQ ID NO: 2455663 - RNA, 17 nt, Human
ucucuuauagaauauuu

SEQ ID NO: 2455664 - RNA, 15 nt, Human
ucugacauaaguauu

SEQ ID NO: 2455665 - RNA, 12 nt, Human
ucugacaucucu

SEQ ID NO: 2455666 - RNA, 14 nt, Human
ucugacaucucugc

SEQ ID NO: 2455667 - RNA, 17 nt, Human
ucugaccagcagcgccu

SEQ ID NO: 2455668 - RNA, 18 nt, Human
ucugaccagcagcgccuu

SEQ ID NO: 2455669 - RNA, 13 nt, Human
ucugacccacugc

SEQ ID NO: 2455670 - RNA, 22 nt, Human
ucugacaggcaaugcuggcugu

SEQ ID NO: 2455671 - RNA, 21 nt, Human
ucugacaggcaaugcuggcug

SEQ ID NO: 2455672 - RNA, 12 nt, Human
ucugacaggcaa

SEQ ID NO: 2455673 - RNA, 16 nt, Human
ucugacagaaagcaga

SEQ ID NO: 2455674 - RNA, 19 nt, Human
ucugacacacagcucuguc

SEQ ID NO: 2455675 - RNA, 18 nt, Human
ucugacacacagcucugu

SEQ ID NO: 2455676 - RNA, 17 nt, Human
ucugacacacagcucug

SEQ ID NO: 2455677 - RNA, 16 nt, Human
ucugacacacagcucu

SEQ ID NO: 2455678 - RNA, 16 nt, Human
ucugaaccauuaaagu

SEQ ID NO: 2455679 - RNA, 15 nt, Human
ucugaacaauucucu

SEQ ID NO: 2455680 - RNA, 14 nt, Human
ucugcacacagcac

SEQ ID NO: 2455681 - RNA, 22 nt, Human
ucugcaacuuuaagcagcucuu

SEQ ID NO: 2455682 - RNA, 10 nt, Human
ucugcacaga

SEQ ID NO: 2455683 - RNA, 13 nt, Human
ucugcacagaugg

SEQ ID NO: 2455684 - RNA, 23 nt, Human
ucugcacaugaaucccacccaca

SEQ ID NO: 2455685 - RNA, 12 nt, Human
ucugcacaugaa

SEQ ID NO: 2455686 - RNA, 17 nt, Human
ucugcacagcuggccuc

SEQ ID NO: 2455687 - RNA, 15 nt, Human
ucugcacagcuggcc

SEQ ID NO: 2455688 - RNA, 15 nt, Human
ucugcacagauggau

SEQ ID NO: 2455689 - RNA, 20 nt, Human
ucugcaagaauugaagcagg

SEQ ID NO: 2455690 - RNA, 21 nt, Human
ucugcaagaauugaagcagga

SEQ ID NO: 2455691 - RNA, 11 nt, Human
ucugaggcuga

SEQ ID NO: 2455692 - RNA, 23 nt, Human
ucugaggcugaaauucagaauau

SEQ ID NO: 2455693 - RNA, 19 nt, Human
ucugaggcucuuucugggc

SEQ ID NO: 2455694 - RNA, 23 nt, Human
ucugaggccuccucucucaguuu

SEQ ID NO: 2455695 - RNA, 21 nt, Human
ucugcaacuuuaagcagcucu

SEQ ID NO: 2455696 - RNA, 14 nt, Human
ucugcaacuuuaag

SEQ ID NO: 2455697 - RNA, 22 nt, Human
ucugaggcuggauccuagccuu

SEQ ID NO: 2455698 - RNA, 21 nt, Human
ucugaggcuggauccuagccu

SEQ ID NO: 2455699 - RNA, 21 nt, Human
ucugaggcucuuucugggcca

SEQ ID NO: 2455700 - RNA, 12 nt, Human
ucugaggacauu

SEQ ID NO: 2455701 - RNA, 20 nt, Human
ucugaggacauuccaagaca

SEQ ID NO: 2455702 - RNA, 22 nt, Human
ucugaggagaaacaaauaagac

SEQ ID NO: 2455703 - RNA, 18 nt, Human
ucugaccauuucaggggu

SEQ ID NO: 2455704 - RNA, 23 nt, Human
ucugaccaguuuaaccugaugca

SEQ ID NO: 2455705 - RNA, 14 nt, Human
ucugaccauuucag

SEQ ID NO: 2455706 - RNA, 23 nt, Human
ucugaggaauccagacccggcug

SEQ ID NO: 2455707 - RNA, 15 nt, Human
ucugacccacugcuu

SEQ ID NO: 2455708 - RNA, 14 nt, Human
ucugacccacugcu

SEQ ID NO: 2455709 - RNA, 19 nt, Human
ucugcaucagcugcugaaa

SEQ ID NO: 2455710 - RNA, 21 nt, Human
ucugcaucagcugcugaaaca

SEQ ID NO: 2455711 - RNA, 14 nt, Human
ucugcaucagcugc

SEQ ID NO: 2455712 - RNA, 15 nt, Human
ucugcacaugucuug

SEQ ID NO: 2455713 - RNA, 12 nt, Human
ucugcacauguc

SEQ ID NO: 2455714 - RNA, 22 nt, Human
ucugcacaugcagcugcacccu

SEQ ID NO: 2455715 - RNA, 21 nt, Human
ucugcacaugcagcugcaccc

SEQ ID NO: 2455716 - RNA, 20 nt, Human
ucugcacaugcagcugcacc

SEQ ID NO: 2455717 - RNA, 19 nt, Human
ucugcaugcggcccagccc

SEQ ID NO: 2455718 - RNA, 18 nt, Human
ucugcaugcggcccagcc

SEQ ID NO: 2455719 - RNA, 17 nt, Human
ucugcaugcggcccagc

SEQ ID NO: 2455720 - RNA, 16 nt, Human
ucugcaugcggcccag

SEQ ID NO: 2455721 - RNA, 15 nt, Human
ucugcaugcggccca

SEQ ID NO: 2455722 - RNA, 14 nt, Human
ucugcaugcggccc

SEQ ID NO: 2455723 - RNA, 22 nt, Human
ucugcaucuuggggacaucucu

SEQ ID NO: 2455724 - RNA, 17 nt, Human
ucugcaucuuggggaca

SEQ ID NO: 2455725 - RNA, 19 nt, Human
ucugcaucuacucccaagu

SEQ ID NO: 2455726 - RNA, 20 nt, Human
ucugcaucugaccacgugcu

SEQ ID NO: 2455727 - RNA, 15 nt, Human
ucugcaucugaccac

SEQ ID NO: 2455728 - RNA, 13 nt, Human
ucugcaucugacc

SEQ ID NO: 2455729 - RNA, 17 nt, Human
ucugcaucuacucccaa

SEQ ID NO: 2455730 - RNA, 23 nt, Human
ucugcacaugcagcugcacccuc

SEQ ID NO: 2455731 - RNA, 17 nt, Human
ucugcacaugucuugua

SEQ ID NO: 2455732 - RNA, 16 nt, Human
ucugcacaugucuugu

SEQ ID NO: 2455733 - RNA, 19 nt, Human
ucugcacaugucuuguaca

SEQ ID NO: 2455734 - RNA, 15 nt, Human
ucugccaccagagac

SEQ ID NO: 2455735 - RNA, 19 nt, Human
ucugccaccaaaggccagg

SEQ ID NO: 2455736 - RNA, 16 nt, Human
ucugccaccaaaggcc

SEQ ID NO: 2455737 - RNA, 10 nt, Human
ucugccacca

SEQ ID NO: 2455738 - RNA, 17 nt, Human
ucugccaccauccugcu

SEQ ID NO: 2455739 - RNA, 14 nt, Human
ucugccacccuacc

SEQ ID NO: 2455740 - RNA, 19 nt, Human
ucugccaauuuuugccuuc

SEQ ID NO: 2455741 - RNA, 22 nt, Human
ucugcauuuugcuauuguaaau

SEQ ID NO: 2455742 - RNA, 22 nt, Human
ucugccaauuuuugccuucauu

SEQ ID NO: 2455743 - RNA, 23 nt, Human
ucugccagaagauccccucagga

SEQ ID NO: 2455744 - RNA, 22 nt, Human
ucugccagaagauccccucagg

SEQ ID NO: 2455745 - RNA, 21 nt, Human
ucugccagaagauccccucag

SEQ ID NO: 2455746 - RNA, 20 nt, Human
ucugccagaagauccccuca

SEQ ID NO: 2455747 - RNA, 17 nt, Human
ucugccacuucccaggu

SEQ ID NO: 2455748 - RNA, 16 nt, Human
ucugccacuucccagg

SEQ ID NO: 2455749 - RNA, 15 nt, Human
ucugccacuucccag

SEQ ID NO: 2455750 - RNA, 14 nt, Human
ucugccacuggaag

SEQ ID NO: 2455751 - RNA, 18 nt, Human
ucugccacccuaccuguu

SEQ ID NO: 2455752 - RNA, 17 nt, Human
ucugccacccuaccugu

SEQ ID NO: 2455753 - RNA, 21 nt, Human
ucugccacccuaccuguucag

SEQ ID NO: 2455754 - RNA, 14 nt, Human
ucugccaccucccc

SEQ ID NO: 2455755 - RNA, 15 nt, Human
ucugccaccuccccu

SEQ ID NO: 2455756 - RNA, 20 nt, Human
ucugccaccuccccuaucca

SEQ ID NO: 2455757 - RNA, 23 nt, Human
ucugccaccuccccuauccaccc

SEQ ID NO: 2455758 - RNA, 22 nt, Human
ucugcaugcggcccagcccggc

SEQ ID NO: 2455759 - RNA, 21 nt, Human
ucugcaugcggcccagcccgg

SEQ ID NO: 2455760 - RNA, 20 nt, Human
ucugcaugcggcccagcccg

SEQ ID NO: 2455761 - RNA, 17 nt, Human
ucugcauucaggaucaa

SEQ ID NO: 2455762 - RNA, 16 nt, Human
ucugcauucuaguacu

SEQ ID NO: 2455763 - RNA, 15 nt, Human
ucugcauuucggugg

SEQ ID NO: 2455764 - RNA, 18 nt, Human
ucugcauuucgguggcua

SEQ ID NO: 2455765 - RNA, 10 nt, Human
ucugcauuuu

SEQ ID NO: 2455766 - RNA, 15 nt, Human
ucugcauuugucuau

SEQ ID NO: 2455767 - RNA, 14 nt, Human
ucugcauuugucua

SEQ ID NO: 2455768 - RNA, 19 nt, Human
ucugcauuucgguggcuag

SEQ ID NO: 2455769 - RNA, 17 nt, Human
ucugcauuuucacccca

SEQ ID NO: 2455770 - RNA, 21 nt, Human
ucugcauuuucaccccacccu

SEQ ID NO: 2455771 - RNA, 19 nt, Human
ucugccaaaggaugugaua

SEQ ID NO: 2455772 - RNA, 19 nt, Human
ucugcauuuugcuauugua

SEQ ID NO: 2455773 - RNA, 18 nt, Human
ucugcauuuugcuauugu

SEQ ID NO: 2455774 - RNA, 16 nt, Human
ucugcauuuugcuauu

SEQ ID NO: 2455775 - RNA, 23 nt, Human
ucucaauccuaauuucuccuccc

SEQ ID NO: 2455776 - RNA, 13 nt, Human
ucucaaugcucau

SEQ ID NO: 2455777 - RNA, 12 nt, Human
ucuccugccuca

SEQ ID NO: 2455778 - RNA, 22 nt, Human
ucucaauccuaauuucuccucc

SEQ ID NO: 2455779 - RNA, 14 nt, Human
ucucaauaugcuua

SEQ ID NO: 2455780 - RNA, 23 nt, Human
ucucaaaguuuugaaaagcuauu

SEQ ID NO: 2455781 - RNA, 20 nt, Human
ucucaaaguuuugaaaagcu

SEQ ID NO: 2455782 - RNA, 18 nt, Human
ucucaaaguuuugaaaag

SEQ ID NO: 2455783 - RNA, 17 nt, Human
ucucaaaguuuugaaaa

SEQ ID NO: 2455784 - RNA, 17 nt, Human
ucucaaauucucaaccu

SEQ ID NO: 2455785 - RNA, 18 nt, Human
ucucaagagggcacuggu

SEQ ID NO: 2455786 - RNA, 17 nt, Human
ucucaagagggcacugg

SEQ ID NO: 2455787 - RNA, 19 nt, Human
ucucaagagggcacuggug

SEQ ID NO: 2455788 - RNA, 13 nt, Human
ucucaagcccugc

SEQ ID NO: 2455789 - RNA, 23 nt, Human
ucucaagggcuagcaucccugag

SEQ ID NO: 2455790 - RNA, 20 nt, Human
ucucaaggugggccuugcua

SEQ ID NO: 2455791 - RNA, 15 nt, Human
ucuccugccucagcc

SEQ ID NO: 2455792 - RNA, 17 nt, Human
ucuccugccucagccuc

SEQ ID NO: 2455793 - RNA, 17 nt, Human
ucuccuggaggauugca

SEQ ID NO: 2455794 - RNA, 13 nt, Human
ucuccuggaggau

SEQ ID NO: 2455795 - RNA, 12 nt, Human
ucuccuggagga

SEQ ID NO: 2455796 - RNA, 11 nt, Human
ucuccuggagg

SEQ ID NO: 2455797 - RNA, 15 nt, Human
ucuccuguaccucuu

SEQ ID NO: 2455798 - RNA, 21 nt, Human
ucuccuggaagugcuaauuuu

SEQ ID NO: 2455799 - RNA, 21 nt, Human
ucuccuggaaauauuaagaaa

SEQ ID NO: 2455800 - RNA, 21 nt, Human
ucucggcuccccauguguccu

SEQ ID NO: 2455801 - RNA, 14 nt, Human
ucucggugguacca

SEQ ID NO: 2455802 - RNA, 17 nt, Human
ucucgguuccacguccc

SEQ ID NO: 2455803 - RNA, 16 nt, Human
ucuccuguaccucuug

SEQ ID NO: 2455804 - RNA, 17 nt, Human
ucuccuguaccucuuga

SEQ ID NO: 2455805 - RNA, 22 nt, Human
ucucgugauugauaagaaccuu

SEQ ID NO: 2455806 - RNA, 14 nt, Human
ucucgugauugaua

SEQ ID NO: 2455807 - RNA, 19 nt, Human
ucucgugguaggacuguag

SEQ ID NO: 2455808 - RNA, 18 nt, Human
ucucgugggagagccauc

SEQ ID NO: 2455809 - RNA, 21 nt, Human
ucucgugguaggacuguagaa

SEQ ID NO: 2455810 - RNA, 18 nt, Human
ucucuaaguuccacugag

SEQ ID NO: 2455811 - RNA, 11 nt, Human
ucucuaauaug

SEQ ID NO: 2455812 - RNA, 21 nt, Human
ucucuaaguuccacugagcuc

SEQ ID NO: 2455813 - RNA, 19 nt, Human
ucucuaacuucaccauauu

SEQ ID NO: 2455814 - RNA, 16 nt, Human
ucucuaaguuccacug

SEQ ID NO: 2455815 - RNA, 22 nt, Human
ucucuaacucagaaacaucagu

SEQ ID NO: 2455816 - RNA, 22 nt, Human
ucucuaacuucaaggcccauau

SEQ ID NO: 2455817 - RNA, 12 nt, Human
ucucuaacuuca

SEQ ID NO: 2455818 - RNA, 18 nt, Human
ucucuaacucagaaacau

SEQ ID NO: 2455819 - RNA, 20 nt, Human
ucucuaacucagaaacauca

SEQ ID NO: 2455820 - RNA, 21 nt, Human
ucucuaacucagaaacaucag

SEQ ID NO: 2455821 - RNA, 17 nt, Human
ucucuaacagcucagga

SEQ ID NO: 2455822 - RNA, 18 nt, Human
ucucuaacagcucaggau

SEQ ID NO: 2455823 - RNA, 23 nt, Human
ucucuaaaugaggggccucaggu

SEQ ID NO: 2455824 - RNA, 22 nt, Human
ucucuaaagaguuuauuuuaag

SEQ ID NO: 2455825 - RNA, 12 nt, Human
ucucguuuuucu

SEQ ID NO: 2455826 - RNA, 14 nt, Human
ucucguuucaaaaa

SEQ ID NO: 2455827 - RNA, 15 nt, Human
ucucguuucaaaaac

SEQ ID NO: 2455828 - RNA, 21 nt, Human
ucucuaaagaguuuauuuuaa

SEQ ID NO: 2455829 - RNA, 19 nt, Human
ucucuaaagaguuuauuuu

SEQ ID NO: 2455830 - RNA, 17 nt, Human
ucucuggccuuuuccua

SEQ ID NO: 2455831 - RNA, 20 nt, Human
ucucugaugugauauccacu

SEQ ID NO: 2455832 - RNA, 20 nt, Human
ucucugagggcuuccuuugg

SEQ ID NO: 2455833 - RNA, 16 nt, Human
ucucugcaggucccua

SEQ ID NO: 2455834 - RNA, 15 nt, Human
ucucugcaggucccu

SEQ ID NO: 2455835 - RNA, 17 nt, Human
ucucugguaauauugac

SEQ ID NO: 2455836 - RNA, 18 nt, Human
ucucuggggccacacaga

SEQ ID NO: 2455837 - RNA, 21 nt, Human
ucucugggcuuggggcuuccu

SEQ ID NO: 2455838 - RNA, 14 nt, Human
ucucuggcugggga

SEQ ID NO: 2455839 - RNA, 16 nt, Human
ucucuggcgacaguuu

SEQ ID NO: 2455840 - RNA, 17 nt, Human
ucucuggcgacaguuuu

SEQ ID NO: 2455841 - RNA, 22 nt, Human
ucucuggcgacaguuuuccuuc

SEQ ID NO: 2455842 - RNA, 13 nt, Human
ucucuggcugggg

SEQ ID NO: 2455843 - RNA, 12 nt, Human
ucucuggcuggg

SEQ ID NO: 2455844 - RNA, 17 nt, Human
ucucuggugagcgagga

SEQ ID NO: 2455845 - RNA, 20 nt, Human
ucucugguccggacacuccu

SEQ ID NO: 2455846 - RNA, 13 nt, Human
ucucugguccgga

SEQ ID NO: 2455847 - RNA, 12 nt, Human
ucucugucucau

SEQ ID NO: 2455848 - RNA, 14 nt, Human
ucucugucucaucc

SEQ ID NO: 2455849 - RNA, 15 nt, Human
ucucugucucaucca

SEQ ID NO: 2455850 - RNA, 16 nt, Human
ucucugucucauccau

SEQ ID NO: 2455851 - RNA, 19 nt, Human
ucucuguagggaacucugg

SEQ ID NO: 2455852 - RNA, 22 nt, Human
ucucugugcuuugacucaccug

SEQ ID NO: 2455853 - RNA, 21 nt, Human
ucucugugcuuugacucaccu

SEQ ID NO: 2455854 - RNA, 16 nt, Human
ucucugugcuuugacu

SEQ ID NO: 2455855 - RNA, 19 nt, Human
ucucugugcuucaauuaau

SEQ ID NO: 2455856 - RNA, 15 nt, Human
ucucugugcugugga

SEQ ID NO: 2455857 - RNA, 11 nt, Human
ucucugugcuu

SEQ ID NO: 2455858 - RNA, 17 nt, Human
ucucugugccuucgucu

SEQ ID NO: 2455859 - RNA, 12 nt, Human
ucucugugccuu

SEQ ID NO: 2455860 - RNA, 22 nt, Human
ucucugugagacucgagaacuu

SEQ ID NO: 2455861 - RNA, 19 nt, Human
ucucugugagacucgagaa

SEQ ID NO: 2455862 - RNA, 23 nt, Human
ucucugugaacgauuuagaaaga

SEQ ID NO: 2455863 - RNA, 22 nt, Human
ucucugugaacgauuuagaaag

SEQ ID NO: 2455864 - RNA, 14 nt, Human
ucucugugagacuc

SEQ ID NO: 2455865 - RNA, 18 nt, Human
ucucugugaccugccccg

SEQ ID NO: 2455866 - RNA, 21 nt, Human
ucucugucucauccaucauca

SEQ ID NO: 2455867 - RNA, 23 nt, Human
ucucugucucauccaucaucaug

SEQ ID NO: 2455868 - RNA, 16 nt, Human
ucucugucucaugugu

SEQ ID NO: 2455869 - RNA, 18 nt, Human
ucucuguagggaacucug

SEQ ID NO: 2455870 - RNA, 16 nt, Human
ucucugugaacgauuu

SEQ ID NO: 2455871 - RNA, 16 nt, Human
ucucugaagcauguuu

SEQ ID NO: 2455872 - RNA, 14 nt, Human
ucucugaagcaugu

SEQ ID NO: 2455873 - RNA, 13 nt, Human
ucucugaagcaug

SEQ ID NO: 2455874 - RNA, 12 nt, Human
ucucugaagcau

SEQ ID NO: 2455875 - RNA, 21 nt, Human
ucucugaagcauguuucaugu

SEQ ID NO: 2455876 - RNA, 19 nt, Human
ucucugaagcauguuucau

SEQ ID NO: 2455877 - RNA, 22 nt, Human
ucucugaagcauguuucauguu

SEQ ID NO: 2455878 - RNA, 14 nt, Human
ucucugaagggagg

SEQ ID NO: 2455879 - RNA, 13 nt, Human
ucucugaagggag

SEQ ID NO: 2455880 - RNA, 11 nt, Human
ucucugaaggg

SEQ ID NO: 2455881 - RNA, 14 nt, Human
ucucugaggacacu

SEQ ID NO: 2455882 - RNA, 17 nt, Human
ucucugacucucaaauc

SEQ ID NO: 2455883 - RNA, 21 nt, Human
ucucugaccuacucgagggac

SEQ ID NO: 2455884 - RNA, 12 nt, Human
ucucugaccuac

SEQ ID NO: 2455885 - RNA, 16 nt, Human
ucucugaagggaggug

SEQ ID NO: 2455886 - RNA, 16 nt, Human
ucucugaagugaaacu

SEQ ID NO: 2455887 - RNA, 14 nt, Human
ucucugaauccuaa

SEQ ID NO: 2455888 - RNA, 14 nt, Human
ucucugcagguccc

SEQ ID NO: 2455889 - RNA, 13 nt, Human
ucucugcaggucc

SEQ ID NO: 2455890 - RNA, 17 nt, Human
ucucugaggacacuaac

SEQ ID NO: 2455891 - RNA, 15 nt, Human
ucucuaguuugauua

SEQ ID NO: 2455892 - RNA, 15 nt, Human
ucucuaggcugggga

SEQ ID NO: 2455893 - RNA, 14 nt, Human
ucucuaggcugggg

SEQ ID NO: 2455894 - RNA, 14 nt, Human
ucucuagugcugug

SEQ ID NO: 2455895 - RNA, 16 nt, Human
ucucuaguuugauuaa

SEQ ID NO: 2455896 - RNA, 16 nt, Human
ucucuagugcugugaa

SEQ ID NO: 2455897 - RNA, 17 nt, Human
ucucuagugcugugaaa

SEQ ID NO: 2455898 - RNA, 19 nt, Human
ucucuagugcugugaaaaa

SEQ ID NO: 2455899 - RNA, 18 nt, Human
ucucucucccauggagcc

SEQ ID NO: 2455900 - RNA, 23 nt, Human
ucucucucccauggagccccagc

SEQ ID NO: 2455901 - RNA, 11 nt, Human
ucucucuccug

SEQ ID NO: 2455902 - RNA, 22 nt, Human
ucucucuccuguacuuuuucca

SEQ ID NO: 2455903 - RNA, 21 nt, Human
ucucucugacucucaaaucuu

SEQ ID NO: 2455904 - RNA, 12 nt, Human
ucucucugccca

SEQ ID NO: 2455905 - RNA, 20 nt, Human
ucucucugacucucaaaucu

SEQ ID NO: 2455906 - RNA, 14 nt, Human
ucucucugacucuc

SEQ ID NO: 2455907 - RNA, 14 nt, Human
ucucucucucucuc

SEQ ID NO: 2455908 - RNA, 15 nt, Human
ucucucucuuagcau

SEQ ID NO: 2455909 - RNA, 14 nt, Human
ucucucucuacaaa

SEQ ID NO: 2455910 - RNA, 14 nt, Human
ucucucucucuccc

SEQ ID NO: 2455911 - RNA, 12 nt, Human
ucucucuccugu

SEQ ID NO: 2455912 - RNA, 13 nt, Human
ucucucucuacaa

SEQ ID NO: 2455913 - RNA, 13 nt, Human
ucucucuccuguc

SEQ ID NO: 2455914 - RNA, 14 nt, Human
ucucucugcccaac

SEQ ID NO: 2455915 - RNA, 16 nt, Human
ucucucugcccaaccc

SEQ ID NO: 2455916 - RNA, 19 nt, Human
ucucucuggcccucuaccc

SEQ ID NO: 2455917 - RNA, 13 nt, Human
ucucucuggcccu

SEQ ID NO: 2455918 - RNA, 12 nt, Human
ucucucuggccc

SEQ ID NO: 2455919 - RNA, 13 nt, Human
ucucugaagauga

SEQ ID NO: 2455920 - RNA, 21 nt, Human
ucucucuggcccucuaccccu

SEQ ID NO: 2455921 - RNA, 23 nt, Human
ucucugaagaguggguuucacaa

SEQ ID NO: 2455922 - RNA, 22 nt, Human
ucucugaagaguggguuucaca

SEQ ID NO: 2455923 - RNA, 11 nt, Human
ucucugaaccc

SEQ ID NO: 2455924 - RNA, 19 nt, Human
ucgugccagucgcgcugcc

SEQ ID NO: 2455925 - RNA, 15 nt, Human
ucgugauaaacuuug

SEQ ID NO: 2455926 - RNA, 22 nt, Human
ucgugacgcugaauaaaugucu

SEQ ID NO: 2455927 - RNA, 20 nt, Human
ucgugccagucgcgcugccu

SEQ ID NO: 2455928 - RNA, 22 nt, Human
ucgugcauuggaagaccccacc

SEQ ID NO: 2455929 - RNA, 20 nt, Human
ucgugcauuggaagacccca

SEQ ID NO: 2455930 - RNA, 19 nt, Human
ucgugcagcauaugaggau

SEQ ID NO: 2455931 - RNA, 22 nt, Human
ucgugccagucgcgcugccugu

SEQ ID NO: 2455932 - RNA, 21 nt, Human
ucgugccagucgcgcugccug

SEQ ID NO: 2455933 - RNA, 23 nt, Human
ucgugccagucgcgcugccugug

SEQ ID NO: 2455934 - RNA, 20 nt, Human
ucgugccguuacucuccaac

SEQ ID NO: 2455935 - RNA, 21 nt, Human
ucgugccuguguccaugcgcu

SEQ ID NO: 2455936 - RNA, 15 nt, Human
ucgugccugugucca

SEQ ID NO: 2455937 - RNA, 18 nt, Human
ucgugcggaaucagcuuc

SEQ ID NO: 2455938 - RNA, 18 nt, Human
ucgugcuaaauuuucagu

SEQ ID NO: 2455939 - RNA, 14 nt, Human
ucgugccugugucc

SEQ ID NO: 2455940 - RNA, 13 nt, Human
ucgugccuguguc

SEQ ID NO: 2455941 - RNA, 12 nt, Human
ucgugccugugu

SEQ ID NO: 2455942 - RNA, 20 nt, Human
ucgugccuccuuccaccucc

SEQ ID NO: 2455943 - RNA, 23 nt, Human
ucgugccguuacucuccaaccug

SEQ ID NO: 2455944 - RNA, 21 nt, Human
ucguggaacaguuaccucugc

SEQ ID NO: 2455945 - RNA, 22 nt, Human
ucguggcagauaaucagccucu

SEQ ID NO: 2455946 - RNA, 23 nt, Human
ucguggcagauaaucagccucuu

SEQ ID NO: 2455947 - RNA, 23 nt, Human
ucguggaaagggugcugcuuccc

SEQ ID NO: 2455948 - RNA, 23 nt, Human
ucgugccuccuuccaccucccuc

SEQ ID NO: 2455949 - RNA, 24 nt, Human
ucguggaaagggugcugcuucccu

SEQ ID NO: 2455950 - RNA, 22 nt, Human
ucgugggacagucaccucaugg

SEQ ID NO: 2455951 - RNA, 15 nt, Human
ucguggccagcccgg

SEQ ID NO: 2455952 - RNA, 14 nt, Human
ucguggccagcccg

SEQ ID NO: 2455953 - RNA, 13 nt, Human
ucguggccagccc

SEQ ID NO: 2455954 - RNA, 12 nt, Human
ucguggccagcc

SEQ ID NO: 2455955 - RNA, 18 nt, Human
ucguggccagcccggcug

SEQ ID NO: 2455956 - RNA, 17 nt, Human
ucguggccagcccggcu

SEQ ID NO: 2455957 - RNA, 20 nt, Human
ucguggccuuccccagccuc

SEQ ID NO: 2455958 - RNA, 22 nt, Human
ucgugagcucuugugaggaaag

SEQ ID NO: 2455959 - RNA, 16 nt, Human
ucgugagcucuuguga

SEQ ID NO: 2455960 - RNA, 21 nt, Human
ucgugacgcugaauaaauguc

SEQ ID NO: 2455961 - RNA, 15 nt, Human
ucgugagcucuugug

SEQ ID NO: 2455962 - RNA, 16 nt, Human
ucgugauugauaagaa

SEQ ID NO: 2455963 - RNA, 21 nt, Human
ucggccucuaaccccaggccc

SEQ ID NO: 2455964 - RNA, 20 nt, Human
ucggccucuaaccccaggcc

SEQ ID NO: 2455965 - RNA, 19 nt, Human
ucggccucuaaccccaggc

SEQ ID NO: 2455966 - RNA, 18 nt, Human
ucggccucuaaccccagg

SEQ ID NO: 2455967 - RNA, 23 nt, Human
ucggccucuaaccccaggccccg

SEQ ID NO: 2455968 - RNA, 22 nt, Human
ucggccucuaaccccaggcccc

SEQ ID NO: 2455969 - RNA, 21 nt, Human
ucgagguagaguuugaaggag

SEQ ID NO: 2455970 - RNA, 17 nt, Human
ucggccucuaaccccag

SEQ ID NO: 2455971 - RNA, 22 nt, Human
ucggccucccaaagugcuggga

SEQ ID NO: 2455972 - RNA, 20 nt, Human
ucgaggggcucucagcucag

SEQ ID NO: 2455973 - RNA, 18 nt, Human
ucgaggggcucucagcuc

SEQ ID NO: 2455974 - RNA, 16 nt, Human
ucgaggggcucucagc

SEQ ID NO: 2455975 - RNA, 14 nt, Human
ucgaggggcucuca

SEQ ID NO: 2455976 - RNA, 23 nt, Human
ucgagguagguggaucaccugag

SEQ ID NO: 2455977 - RNA, 18 nt, Human
ucggccuccauccugagg

SEQ ID NO: 2455978 - RNA, 17 nt, Human
ucggccuccauccugag

SEQ ID NO: 2455979 - RNA, 21 nt, Human
ucuaaauagccaacacccauc

SEQ ID NO: 2455980 - RNA, 13 nt, Human
ucuaaauagccaa

SEQ ID NO: 2455981 - RNA, 17 nt, Human
ucuaaauaccugcccug

SEQ ID NO: 2455982 - RNA, 13 nt, Human
ucuaaauauuucc

SEQ ID NO: 2455983 - RNA, 21 nt, Human
ucuaaaucuccaaaauaaaac

SEQ ID NO: 2455984 - RNA, 23 nt, Human
ucuaaauauuuccuuaaacugug

SEQ ID NO: 2455985 - RNA, 13 nt, Human
ucguuaauuugua

SEQ ID NO: 2455986 - RNA, 19 nt, Human
ucgugggucuguuuuccuu

SEQ ID NO: 2455987 - RNA, 20 nt, Human
ucgugggaucugccccuccc

SEQ ID NO: 2455988 - RNA, 18 nt, Human
ucguggggugugcuggga

SEQ ID NO: 2455989 - RNA, 15 nt, Human
ucguggggugugcug

SEQ ID NO: 2455990 - RNA, 12 nt, Human
ucguggggaggu

SEQ ID NO: 2455991 - RNA, 23 nt, Human
ucgugggagagagacguguacau

SEQ ID NO: 2455992 - RNA, 19 nt, Human
ucguggccuuccccagccu

SEQ ID NO: 2455993 - RNA, 20 nt, Human
ucuaauauggcaaaaauggc

SEQ ID NO: 2455994 - RNA, 14 nt, Human
ucuaauauggccac

SEQ ID NO: 2455995 - RNA, 14 nt, Human
ucuaauaucagcaa

SEQ ID NO: 2455996 - RNA, 15 nt, Human
ucuaauauauuuuua

SEQ ID NO: 2455997 - RNA, 13 nt, Human
ucuaauagugcuu

SEQ ID NO: 2455998 - RNA, 19 nt, Human
ucuaauagaacucaguuuu

SEQ ID NO: 2455999 - RNA, 17 nt, Human
ucuaaccacaucaauau

SEQ ID NO: 2456000 - RNA, 19 nt, Human
ucuaacagcucaggaucuc

SEQ ID NO: 2456001 - RNA, 22 nt, Human
ucuaauagaacucaguuuuaac

SEQ ID NO: 2456002 - RNA, 21 nt, Human
ucuaauagcggguuacuuuca

SEQ ID NO: 2456003 - RNA, 15 nt, Human
ucuaacagcucagga

SEQ ID NO: 2456004 - RNA, 17 nt, Human
ucuaacagcucaggauc

SEQ ID NO: 2456005 - RNA, 13 nt, Human
ucuaacaaugaca

SEQ ID NO: 2456006 - RNA, 23 nt, Human
ucuaacaagucauagguuaauau

SEQ ID NO: 2456007 - RNA, 12 nt, Human
ucuaacaaguca

SEQ ID NO: 2456008 - RNA, 21 nt, Human
ucuaugccaaagaucacuugu

SEQ ID NO: 2456009 - RNA, 12 nt, Human
ucuaugcucucg

SEQ ID NO: 2456010 - RNA, 15 nt, Human
ucuaugaugcuguug

SEQ ID NO: 2456011 - RNA, 14 nt, Human
ucuaugcauuuucu

SEQ ID NO: 2456012 - RNA, 22 nt, Human
ucuaugauuccagguggcauca

SEQ ID NO: 2456013 - RNA, 15 nt, Human
ucuaugccaaagauc

SEQ ID NO: 2456014 - RNA, 15 nt, Human
ucuaugcauuuucug

SEQ ID NO: 2456015 - RNA, 17 nt, Human
ucuaugccaaagaucac

SEQ ID NO: 2456016 - RNA, 16 nt, Human
ucuaugccaaagauca

SEQ ID NO: 2456017 - RNA, 14 nt, Human
ucuaugccagcuca

SEQ ID NO: 2456018 - RNA, 15 nt, Human
ucucaacuccaaacu

SEQ ID NO: 2456019 - RNA, 17 nt, Human
ucucaaauaacuaaaag

SEQ ID NO: 2456020 - RNA, 16 nt, Human
ucucaaaguuuugaaa

SEQ ID NO: 2456021 - RNA, 17 nt, Human
ucuaugaaauauuaugu

SEQ ID NO: 2456022 - RNA, 14 nt, Human
ucuaugaaauauua

SEQ ID NO: 2456023 - RNA, 13 nt, Human
ucuaugaaauauu

SEQ ID NO: 2456024 - RNA, 21 nt, Human
ucuaucaaguauuauaccuuu

SEQ ID NO: 2456025 - RNA, 22 nt, Human
ucuaucaaguauuauaccuuuu

SEQ ID NO: 2456026 - RNA, 15 nt, Human
ucuaucaaguauuau

SEQ ID NO: 2456027 - RNA, 16 nt, Human
ucuagugcagcugauu

SEQ ID NO: 2456028 - RNA, 22 nt, Human
ucuagugagcagucaggaaaga

SEQ ID NO: 2456029 - RNA, 14 nt, Human
ucuagucucucugg

SEQ ID NO: 2456030 - RNA, 22 nt, Human
ucuagucuccuuugcacugagg

SEQ ID NO: 2456031 - RNA, 19 nt, Human
ucuaggagggagacacugg

SEQ ID NO: 2456032 - RNA, 18 nt, Human
ucuagucucucuggggcc

SEQ ID NO: 2456033 - RNA, 14 nt, Human
ucuagugcagcuga

SEQ ID NO: 2456034 - RNA, 19 nt, Human
ucuagugagcagucaggaa

SEQ ID NO: 2456035 - RNA, 20 nt, Human
ucuagucuccuuugcacuga

SEQ ID NO: 2456036 - RNA, 17 nt, Human
ucuaggagcugggagga

SEQ ID NO: 2456037 - RNA, 18 nt, Human
ucuaggagcugggaggaa

SEQ ID NO: 2456038 - RNA, 20 nt, Human
ucuaggagcugggaggaaaa

SEQ ID NO: 2456039 - RNA, 21 nt, Human
ucuaggagcugggaggaaaag

SEQ ID NO: 2456040 - RNA, 13 nt, Human
ucuagaacacagg

SEQ ID NO: 2456041 - RNA, 15 nt, Human
ucuagaacacaggca

SEQ ID NO: 2456042 - RNA, 16 nt, Human
ucuagaacacaggcaa

SEQ ID NO: 2456043 - RNA, 22 nt, Human
ucuagaaagccuguuccccuca

SEQ ID NO: 2456044 - RNA, 18 nt, Human
ucuaggacgccacccagc

SEQ ID NO: 2456045 - RNA, 16 nt, Human
ucuaggagcugggagg

SEQ ID NO: 2456046 - RNA, 14 nt, Human
ucuaaugugugaau

SEQ ID NO: 2456047 - RNA, 14 nt, Human
ucuaauauguaaca

SEQ ID NO: 2456048 - RNA, 14 nt, Human
ucuacuuuuaaaga

SEQ ID NO: 2456049 - RNA, 16 nt, Human
ucuacuuugaggaaac

SEQ ID NO: 2456050 - RNA, 21 nt, Human
ucuacuuuauuaauuguuuug

SEQ ID NO: 2456051 - RNA, 20 nt, Human
ucuacuuugaagucauacca

SEQ ID NO: 2456052 - RNA, 12 nt, Human
ucuacuuugaag

SEQ ID NO: 2456053 - RNA, 14 nt, Human
ucuacuuuauuaau

SEQ ID NO: 2456054 - RNA, 22 nt, Human
ucuacuuuagaaugagagugug

SEQ ID NO: 2456055 - RNA, 20 nt, Human
ucuaauucuaaggaauauga

SEQ ID NO: 2456056 - RNA, 18 nt, Human
ucuaauucccauuuugca

SEQ ID NO: 2456057 - RNA, 19 nt, Human
ucuaauucccauuuugcaa

SEQ ID NO: 2456058 - RNA, 21 nt, Human
ucuaauucccauuuugcaaaa

SEQ ID NO: 2456059 - RNA, 22 nt, Human
ucuaauucccauuuugcaaaau

SEQ ID NO: 2456060 - RNA, 16 nt, Human
ucuacuuuaagcacua

SEQ ID NO: 2456061 - RNA, 17 nt, Human
uccuggcacugcuucca

SEQ ID NO: 2456062 - RNA, 22 nt, Human
uccuggcacccggccccugcug

SEQ ID NO: 2456063 - RNA, 21 nt, Human
uccuggcacccggccccugcu

SEQ ID NO: 2456064 - RNA, 20 nt, Human
uccuggcacccggccccugc

SEQ ID NO: 2456065 - RNA, 22 nt, Human
uccuggcacugcuuccagugag

SEQ ID NO: 2456066 - RNA, 18 nt, Human
uccuggcacugcuuccag

SEQ ID NO: 2456067 - RNA, 15 nt, Human
uccuggcagaaugcu

SEQ ID NO: 2456068 - RNA, 23 nt, Human
uccuggcaauaguguguucugau

SEQ ID NO: 2456069 - RNA, 21 nt, Human
uccuggcaauaguguguucug

SEQ ID NO: 2456070 - RNA, 22 nt, Human
uccuggcaauaguguguucuga

SEQ ID NO: 2456071 - RNA, 11 nt, Human
uccugccuacu

SEQ ID NO: 2456072 - RNA, 20 nt, Human
uccuggcaauaguguguucu

SEQ ID NO: 2456073 - RNA, 20 nt, Human
uccuguaccucuugagccuu

SEQ ID NO: 2456074 - RNA, 22 nt, Human
uccuguaccucuugagccuuga

SEQ ID NO: 2456075 - RNA, 20 nt, Human
uccuguacauugugggaugu

SEQ ID NO: 2456076 - RNA, 23 nt, Human
uccuguaacacaagccacagaag

SEQ ID NO: 2456077 - RNA, 21 nt, Human
uccuguaacacaagccacaga

SEQ ID NO: 2456078 - RNA, 20 nt, Human
uccuguaacacaagccacag

SEQ ID NO: 2456079 - RNA, 20 nt, Human
uccuguaaaugguguacaua

SEQ ID NO: 2456080 - RNA, 19 nt, Human
uccuguaaaugguguacau

SEQ ID NO: 2456081 - RNA, 21 nt, Human
uccuguaauuccuaccucccu

SEQ ID NO: 2456082 - RNA, 16 nt, Human
uccuguaauuccuacc

SEQ ID NO: 2456083 - RNA, 15 nt, Human
uccuguaauuccuac

SEQ ID NO: 2456084 - RNA, 13 nt, Human
uccuguaauuccu

SEQ ID NO: 2456085 - RNA, 14 nt, Human
uccuguacauugug

SEQ ID NO: 2456086 - RNA, 16 nt, Human
uccuguacacugaaua

SEQ ID NO: 2456087 - RNA, 17 nt, Human
uccuguacacugaauau

SEQ ID NO: 2456088 - RNA, 23 nt, Human
uccuguccuuuacacauucggcu

SEQ ID NO: 2456089 - RNA, 22 nt, Human
uccuguccuucucucaccuccu

SEQ ID NO: 2456090 - RNA, 21 nt, Human
uccuguccucccauccccugg

SEQ ID NO: 2456091 - RNA, 11 nt, Human
uccuguccucc

SEQ ID NO: 2456092 - RNA, 21 nt, Human
uccuguacacugaauauuuau

SEQ ID NO: 2456093 - RNA, 16 nt, Human
uccuguccucagcuuc

SEQ ID NO: 2456094 - RNA, 19 nt, Human
uccuggcacccggccccug

SEQ ID NO: 2456095 - RNA, 16 nt, Human
uccuggcacccggccc

SEQ ID NO: 2456096 - RNA, 14 nt, Human
uccuggcacccggc

SEQ ID NO: 2456097 - RNA, 15 nt, Human
uccugccucagccuc

SEQ ID NO: 2456098 - RNA, 13 nt, Human
uccugccucagcc

SEQ ID NO: 2456099 - RNA, 16 nt, Human
uccugccucagccucc

SEQ ID NO: 2456100 - RNA, 17 nt, Human
uccugccucagccuccc

SEQ ID NO: 2456101 - RNA, 13 nt, Human
uccugagccagau

SEQ ID NO: 2456102 - RNA, 21 nt, Human
uccugagaccccuggccuccg

SEQ ID NO: 2456103 - RNA, 19 nt, Human
uccugagaccccuggccuc

SEQ ID NO: 2456104 - RNA, 18 nt, Human
uccugagaccccuggccu

SEQ ID NO: 2456105 - RNA, 20 nt, Human
uccugagaccccuggccucc

SEQ ID NO: 2456106 - RNA, 13 nt, Human
uccucuucuuuau

SEQ ID NO: 2456107 - RNA, 23 nt, Human
uccucuucugcuuaggagagacc

SEQ ID NO: 2456108 - RNA, 17 nt, Human
uccugagaccccuggcc

SEQ ID NO: 2456109 - RNA, 16 nt, Human
uccugagaccccuggc

SEQ ID NO: 2456110 - RNA, 14 nt, Human
uccugagaccccug

SEQ ID NO: 2456111 - RNA, 20 nt, Human
uccugccuaagugcagcccc

SEQ ID NO: 2456112 - RNA, 14 nt, Human
uccugagccagauu

SEQ ID NO: 2456113 - RNA, 14 nt, Human
uccugccucagccu

SEQ ID NO: 2456114 - RNA, 13 nt, Human
uccuucaccucug

SEQ ID NO: 2456115 - RNA, 19 nt, Human
uccuucaccucacugaaaa

SEQ ID NO: 2456116 - RNA, 17 nt, Human
uccuucaccucacugaa

SEQ ID NO: 2456117 - RNA, 12 nt, Human
uccuucagacac

SEQ ID NO: 2456118 - RNA, 23 nt, Human
uccuugaagaacugcaggcccug

SEQ ID NO: 2456119 - RNA, 21 nt, Human
uccuugaagaacugcaggccc

SEQ ID NO: 2456120 - RNA, 20 nt, Human
uccuugaagaacugcaggcc

SEQ ID NO: 2456121 - RNA, 13 nt, Human
uccuucagacacc

SEQ ID NO: 2456122 - RNA, 22 nt, Human
uccuucaccuuuguccccaccg

SEQ ID NO: 2456123 - RNA, 21 nt, Human
uccuucaccuuuguccccacc

SEQ ID NO: 2456124 - RNA, 13 nt, Human
uccuugcuuggcu

SEQ ID NO: 2456125 - RNA, 22 nt, Human
uccuugcuuaugacaucacuug

SEQ ID NO: 2456126 - RNA, 20 nt, Human
uccuugagagaccaggcaaa

SEQ ID NO: 2456127 - RNA, 16 nt, Human
uccuugagagaccagg

SEQ ID NO: 2456128 - RNA, 17 nt, Human
uccuugagacacggagc

SEQ ID NO: 2456129 - RNA, 21 nt, Human
uccuugagacacggagcccag

SEQ ID NO: 2456130 - RNA, 23 nt, Human
uccuugagacacggagcccagcc

SEQ ID NO: 2456131 - RNA, 12 nt, Human
uccuugaagccg

SEQ ID NO: 2456132 - RNA, 13 nt, Human
uccuugaccagca

SEQ ID NO: 2456133 - RNA, 21 nt, Human
uccuugaccagcagaucccag

SEQ ID NO: 2456134 - RNA, 18 nt, Human
uccuucacagaugggugc

SEQ ID NO: 2456135 - RNA, 18 nt, Human
uccuuaccagcagagcac

SEQ ID NO: 2456136 - RNA, 17 nt, Human
uccuuaccagcagagca

SEQ ID NO: 2456137 - RNA, 16 nt, Human
uccuuaccagcagagc

SEQ ID NO: 2456138 - RNA, 20 nt, Human
uccuucaccuuuguccccac

SEQ ID NO: 2456139 - RNA, 18 nt, Human
uccuucaccuuugucccc

SEQ ID NO: 2456140 - RNA, 19 nt, Human
uccuucacagaugggugcu

SEQ ID NO: 2456141 - RNA, 14 nt, Human
uccuucacauccug

SEQ ID NO: 2456142 - RNA, 20 nt, Human
uccuucacauccuguguuuc

SEQ ID NO: 2456143 - RNA, 16 nt, Human
uccuuggacucauuuu

SEQ ID NO: 2456144 - RNA, 19 nt, Human
uccuuggauaggcuuuuua

SEQ ID NO: 2456145 - RNA, 16 nt, Human
uccuuggaaguuucau

SEQ ID NO: 2456146 - RNA, 12 nt, Human
uccuuggaaauc

SEQ ID NO: 2456147 - RNA, 20 nt, Human
uccuuggcaucacagggcag

SEQ ID NO: 2456148 - RNA, 15 nt, Human
uccuuggcaugccuu

SEQ ID NO: 2456149 - RNA, 17 nt, Human
uccuuggcaugccuucc

SEQ ID NO: 2456150 - RNA, 18 nt, Human
uccuuggcaugccuucca

SEQ ID NO: 2456151 - RNA, 10 nt, Human
uccuuuguuc

SEQ ID NO: 2456152 - RNA, 20 nt, Human
uccuuggcaugccuuccagc

SEQ ID NO: 2456153 - RNA, 16 nt, Human
uccuuuguucuuaccu

SEQ ID NO: 2456154 - RNA, 24 nt, Human
uccuuuguucuuaccuguaugucu

SEQ ID NO: 2456155 - RNA, 15 nt, Human
uccuuuguuuuuaug

SEQ ID NO: 2456156 - RNA, 19 nt, Human
uccuuuuaaaacacuucca

SEQ ID NO: 2456157 - RNA, 23 nt, Human
uccuuuguuuuuuuuuccugucc

SEQ ID NO: 2456158 - RNA, 19 nt, Human
uccuuuguuuuuuuuuccu

SEQ ID NO: 2456159 - RNA, 23 nt, Human
uccuuuucacaguucucuccuuc

SEQ ID NO: 2456160 - RNA, 17 nt, Human
uccuuuuaauuuuccug

SEQ ID NO: 2456161 - RNA, 13 nt, Human
uccuuuuagccua

SEQ ID NO: 2456162 - RNA, 20 nt, Human
uccuuuuaaaucuugauacc

SEQ ID NO: 2456163 - RNA, 15 nt, Human
ucgaaccguuuugaa

SEQ ID NO: 2456164 - RNA, 18 nt, Human
ucgaaccguuuugaagcu

SEQ ID NO: 2456165 - RNA, 15 nt, Human
ucgaacuccugaccu

SEQ ID NO: 2456166 - RNA, 20 nt, Human
ucgaaauaacaauguuaagg

SEQ ID NO: 2456167 - RNA, 19 nt, Human
ucgaaauaacaauguuaag

SEQ ID NO: 2456168 - RNA, 18 nt, Human
ucgaaauaacaauguuaa

SEQ ID NO: 2456169 - RNA, 16 nt, Human
ucgaaauaacaauguu

SEQ ID NO: 2456170 - RNA, 14 nt, Human
ucgaaauaacaaug

SEQ ID NO: 2456171 - RNA, 12 nt, Human
ucgaaauaacaa

SEQ ID NO: 2456172 - RNA, 17 nt, Human
ucgaggcggaucuuugg

SEQ ID NO: 2456173 - RNA, 22 nt, Human
ucgaggcggaucuuuggacaga

SEQ ID NO: 2456174 - RNA, 16 nt, Human
ucgaggcugcagucag

SEQ ID NO: 2456175 - RNA, 20 nt, Human
ucgaggcugcagucagucau

SEQ ID NO: 2456176 - RNA, 15 nt, Human
ucgagggcagggacu

SEQ ID NO: 2456177 - RNA, 18 nt, Human
ucgaaacacagaaaccuu

SEQ ID NO: 2456178 - RNA, 13 nt, Human
ucgaaacacagaa

SEQ ID NO: 2456179 - RNA, 19 nt, Human
ucgaaaccugggauucagg

SEQ ID NO: 2456180 - RNA, 15 nt, Human
uccuuuucccugcuu

SEQ ID NO: 2456181 - RNA, 14 nt, Human
uccuuuucccugcu

SEQ ID NO: 2456182 - RNA, 15 nt, Human
uccuuuuccucucuc

SEQ ID NO: 2456183 - RNA, 13 nt, Human
uccuuuucccugc

SEQ ID NO: 2456184 - RNA, 15 nt, Human
uccuuuuagccuagu

SEQ ID NO: 2456185 - RNA, 12 nt, Human
uccuuuuauguu

SEQ ID NO: 2456186 - RNA, 14 nt, Human
uccuuuuagccuag

SEQ ID NO: 2456187 - RNA, 15 nt, Human
uccuuuuauguuauu

SEQ ID NO: 2456188 - RNA, 14 nt, Human
uccuuuuauguuau

SEQ ID NO: 2456189 - RNA, 14 nt, Human
uccuuuucagaagu

SEQ ID NO: 2456190 - RNA, 17 nt, Human
uccaggugugcacgugg

SEQ ID NO: 2456191 - RNA, 21 nt, Human
uccccuguuuguuucugaaag

SEQ ID NO: 2456192 - RNA, 15 nt, Human
ucccgggacgcagca

SEQ ID NO: 2456193 - RNA, 15 nt, Human
ucccgggcccucccu

SEQ ID NO: 2456194 - RNA, 14 nt, Human
ucccgggcccuccc

SEQ ID NO: 2456195 - RNA, 13 nt, Human
ucccgggcccucc

SEQ ID NO: 2456196 - RNA, 21 nt, Human
ucccgggcccguugaggauga

SEQ ID NO: 2456197 - RNA, 18 nt, Human
uccagguguuacuguaau

SEQ ID NO: 2456198 - RNA, 17 nt, Human
uccagguuuaagcuguu

SEQ ID NO: 2456199 - RNA, 20 nt, Human
uccccuguuuguuucugaaa

SEQ ID NO: 2456200 - RNA, 18 nt, Human
uccccuguuuguuucuga

SEQ ID NO: 2456201 - RNA, 18 nt, Human
uccagguuuaagcuguua

SEQ ID NO: 2456202 - RNA, 20 nt, Human
ucccguggccccagccuggc

SEQ ID NO: 2456203 - RNA, 19 nt, Human
ucccguggccccagccugg

SEQ ID NO: 2456204 - RNA, 18 nt, Human
ucccguggccccagccug

SEQ ID NO: 2456205 - RNA, 17 nt, Human
ucccguggccccagccu

SEQ ID NO: 2456206 - RNA, 16 nt, Human
ucccguggccccagcc

SEQ ID NO: 2456207 - RNA, 15 nt, Human
ucccguggccccagc

SEQ ID NO: 2456208 - RNA, 14 nt, Human
ucccguggccccag

SEQ ID NO: 2456209 - RNA, 13 nt, Human
ucccguggcccca

SEQ ID NO: 2456210 - RNA, 24 nt, Human
ucccguggccccagccuggcccag

SEQ ID NO: 2456211 - RNA, 23 nt, Human
ucccguggccccagccuggccca

SEQ ID NO: 2456212 - RNA, 22 nt, Human
ucccguggccccagccuggccc

SEQ ID NO: 2456213 - RNA, 21 nt, Human
ucccguggccccagccuggcc

SEQ ID NO: 2456214 - RNA, 20 nt, Human
ucccguuucuccaccuagac

SEQ ID NO: 2456215 - RNA, 15 nt, Human
ucccguguucuccuu

SEQ ID NO: 2456216 - RNA, 15 nt, Human
ucccuaauaaagcug

SEQ ID NO: 2456217 - RNA, 23 nt, Human
ucccguuuagaguuauuuaggcu

SEQ ID NO: 2456218 - RNA, 14 nt, Human
ucccuaauaaagcu

SEQ ID NO: 2456219 - RNA, 20 nt, Human
ucccgucccauauccugccu

SEQ ID NO: 2456220 - RNA, 18 nt, Human
ucccgucccauauccugc

SEQ ID NO: 2456221 - RNA, 23 nt, Human
ucccgucagggcccaagucccug

SEQ ID NO: 2456222 - RNA, 20 nt, Human
ucccgucagggcccaagucc

SEQ ID NO: 2456223 - RNA, 16 nt, Human
ucccgguucuuccagu

SEQ ID NO: 2456224 - RNA, 16 nt, Human
ucccgucagggcccaa

SEQ ID NO: 2456225 - RNA, 18 nt, Human
ucccgggcccucccuugg

SEQ ID NO: 2456226 - RNA, 19 nt, Human
ucccgggguccuguggcag

SEQ ID NO: 2456227 - RNA, 14 nt, Human
ucccggggcuccac

SEQ ID NO: 2456228 - RNA, 17 nt, Human
ucccgucuacucauucc

SEQ ID NO: 2456229 - RNA, 21 nt, Human
ucccgucccauauccugccuc

SEQ ID NO: 2456230 - RNA, 12 nt, Human
ucccguggcccc

SEQ ID NO: 2456231 - RNA, 13 nt, Human
ucccgugcagcuu

SEQ ID NO: 2456232 - RNA, 23 nt, Human
ucccguggaacguuuuuccuguu

SEQ ID NO: 2456233 - RNA, 22 nt, Human
ucccguggaacguuuuuccugu

SEQ ID NO: 2456234 - RNA, 16 nt, Human
ucccguggaacguuuu

SEQ ID NO: 2456235 - RNA, 11 nt, Human
ucccuccuggg

SEQ ID NO: 2456236 - RNA, 15 nt, Human
ucccuccucuguccc

SEQ ID NO: 2456237 - RNA, 19 nt, Human
ucccuccugggaaugaagc

SEQ ID NO: 2456238 - RNA, 19 nt, Human
ucccuccugggaucugcuc

SEQ ID NO: 2456239 - RNA, 18 nt, Human
ucccuccugggaucugcu

SEQ ID NO: 2456240 - RNA, 21 nt, Human
ucccuccugccgacuccuggg

SEQ ID NO: 2456241 - RNA, 16 nt, Human
ucccuccugccgacuc

SEQ ID NO: 2456242 - RNA, 18 nt, Human
ucccuauguauuugcagu

SEQ ID NO: 2456243 - RNA, 14 nt, Human
ucccuccugcuacu

SEQ ID NO: 2456244 - RNA, 17 nt, Human
ucccucuacugggagcc

SEQ ID NO: 2456245 - RNA, 21 nt, Human
ucccucuacagagcuucccug

SEQ ID NO: 2456246 - RNA, 22 nt, Human
ucccucuacagagcuucccuga

SEQ ID NO: 2456247 - RNA, 15 nt, Human
ucccucuacugggag

SEQ ID NO: 2456248 - RNA, 16 nt, Human
ucccucuaauuuaucu

SEQ ID NO: 2456249 - RNA, 14 nt, Human
ucccucuaauuuau

SEQ ID NO: 2456250 - RNA, 22 nt, Human
ucccucgcugcacaaauacucc

SEQ ID NO: 2456251 - RNA, 19 nt, Human
ucccucgcugcacaaauac

SEQ ID NO: 2456252 - RNA, 16 nt, Human
ucccuauuagagaaga

SEQ ID NO: 2456253 - RNA, 14 nt, Human
ucccuccucaccuc

SEQ ID NO: 2456254 - RNA, 16 nt, Human
ucccuccucaccucug

SEQ ID NO: 2456255 - RNA, 17 nt, Human
ucccuccucaccucugg

SEQ ID NO: 2456256 - RNA, 18 nt, Human
ucccuccucaccucugga

SEQ ID NO: 2456257 - RNA, 20 nt, Human
ucccuagugacccggaggcc

SEQ ID NO: 2456258 - RNA, 17 nt, Human
ucccuagucuauucauu

SEQ ID NO: 2456259 - RNA, 22 nt, Human
ucccuagucuauucauuauauu

SEQ ID NO: 2456260 - RNA, 18 nt, Human
ucccuagucuucaagcag

SEQ ID NO: 2456261 - RNA, 15 nt, Human
ucccuauguauuugc

SEQ ID NO: 2456262 - RNA, 13 nt, Human
ucccuauguauuu

SEQ ID NO: 2456263 - RNA, 19 nt, Human
ucccuaucuuugccacccu

SEQ ID NO: 2456264 - RNA, 16 nt, Human
ucccuaauaaagcugu

SEQ ID NO: 2456265 - RNA, 20 nt, Human
ucccuaaugcugcagauuug

SEQ ID NO: 2456266 - RNA, 14 nt, Human
ucccuaaugcugca

SEQ ID NO: 2456267 - RNA, 23 nt, Human
ucccuaaucuauggucgggagac

SEQ ID NO: 2456268 - RNA, 16 nt, Human
ucccuaaucuaugguc

SEQ ID NO: 2456269 - RNA, 18 nt, Human
ucccuaaaaacacagaca

SEQ ID NO: 2456270 - RNA, 15 nt, Human
ucccuaggagaccaa

SEQ ID NO: 2456271 - RNA, 13 nt, Human
ucccuacauguau

SEQ ID NO: 2456272 - RNA, 24 nt, Human
ucccuacauguauugcacauugua

SEQ ID NO: 2456273 - RNA, 18 nt, Human
ucccuaggggacacuucc

SEQ ID NO: 2456274 - RNA, 16 nt, Human
ucccuaguaaaaauac

SEQ ID NO: 2456275 - RNA, 13 nt, Human
ucccuucccaccu

SEQ ID NO: 2456276 - RNA, 18 nt, Human
ucccuuccacacccccac

SEQ ID NO: 2456277 - RNA, 16 nt, Human
ucccuuccacaccccc

SEQ ID NO: 2456278 - RNA, 17 nt, Human
ucccuucaugcauggaa

SEQ ID NO: 2456279 - RNA, 18 nt, Human
ucccuucaugcauggaaa

SEQ ID NO: 2456280 - RNA, 21 nt, Human
ucccuucaucuggaaccauca

SEQ ID NO: 2456281 - RNA, 11 nt, Human
ucccuggccuu

SEQ ID NO: 2456282 - RNA, 14 nt, Human
ucccuggccuguuc

SEQ ID NO: 2456283 - RNA, 18 nt, Human
ucccuggccuguucuguu

SEQ ID NO: 2456284 - RNA, 13 nt, Human
ucccuggccuguu

SEQ ID NO: 2456285 - RNA, 22 nt, Human
ucccuggaguguggcugaggag

SEQ ID NO: 2456286 - RNA, 22 nt, Human
ucccuggagccagacucugguc

SEQ ID NO: 2456287 - RNA, 19 nt, Human
ucccuggagccagacucug

SEQ ID NO: 2456288 - RNA, 21 nt, Human
ucccuggaguguggcugagga

SEQ ID NO: 2456289 - RNA, 11 nt, Human
ucccuggagug

SEQ ID NO: 2456290 - RNA, 10 nt, Human
ucccuggagu

SEQ ID NO: 2456291 - RNA, 15 nt, Human
ucccuugaugaagaa

SEQ ID NO: 2456292 - RNA, 22 nt, Human
ucccuucuccaucucucuggcc

SEQ ID NO: 2456293 - RNA, 21 nt, Human
ucccuucuccaucucucuggc

SEQ ID NO: 2456294 - RNA, 16 nt, Human
ucccuucuccaucucu

SEQ ID NO: 2456295 - RNA, 20 nt, Human
ucccuucucuguagggaacu

SEQ ID NO: 2456296 - RNA, 18 nt, Human
ucccuugagaccucagcc

SEQ ID NO: 2456297 - RNA, 22 nt, Human
ucccuucuaggguuauugcauu

SEQ ID NO: 2456298 - RNA, 11 nt, Human
ucccuucucca

SEQ ID NO: 2456299 - RNA, 20 nt, Human
ucccuucuaccugccacuca

SEQ ID NO: 2456300 - RNA, 15 nt, Human
ucccuucuaccugcc

SEQ ID NO: 2456301 - RNA, 20 nt, Human
ucccuuccuuuucccugcuu

SEQ ID NO: 2456302 - RNA, 19 nt, Human
ucccuuccuuuucccugcu

SEQ ID NO: 2456303 - RNA, 18 nt, Human
ucccuuccuuuucccugc

SEQ ID NO: 2456304 - RNA, 17 nt, Human
ucccuuccuuuucccug

SEQ ID NO: 2456305 - RNA, 20 nt, Human
uccgacagcccccucugccg

SEQ ID NO: 2456306 - RNA, 20 nt, Human
uccgaccacuaauugccaag

SEQ ID NO: 2456307 - RNA, 21 nt, Human
uccgacaaccgaugcuccagc

SEQ ID NO: 2456308 - RNA, 22 nt, Human
uccgacaaccgaugcuccagcc

SEQ ID NO: 2456309 - RNA, 17 nt, Human
uccgacagcccccucug

SEQ ID NO: 2456310 - RNA, 23 nt, Human
uccgacaaccgaugcuccagcca

SEQ ID NO: 2456311 - RNA, 19 nt, Human
uccgaaccuccucugugaa

SEQ ID NO: 2456312 - RNA, 20 nt, Human
uccgacaaccgaugcuccag

SEQ ID NO: 2456313 - RNA, 21 nt, Human
uccgaaguaugagggaaaaug

SEQ ID NO: 2456314 - RNA, 22 nt, Human
uccgaaccuccucugugaagca

SEQ ID NO: 2456315 - RNA, 18 nt, Human
uccgaaccuccucuguga

SEQ ID NO: 2456316 - RNA, 19 nt, Human
ucccuugagaccucagcca

SEQ ID NO: 2456317 - RNA, 16 nt, Human
ucccuugaugaagaag

SEQ ID NO: 2456318 - RNA, 14 nt, Human
ucccuugagcccuc

SEQ ID NO: 2456319 - RNA, 23 nt, Human
ucccuugaggaaacaacagcuuu

SEQ ID NO: 2456320 - RNA, 13 nt, Human
ucccugcacuugc

SEQ ID NO: 2456321 - RNA, 19 nt, Human
ucccugccccucccuucaa

SEQ ID NO: 2456322 - RNA, 14 nt, Human
ucccugcacuugca

SEQ ID NO: 2456323 - RNA, 12 nt, Human
ucccucucucug

SEQ ID NO: 2456324 - RNA, 22 nt, Human
ucccucucggaaggcuggcugg

SEQ ID NO: 2456325 - RNA, 23 nt, Human
ucccucucggaaggcuggcuggg

SEQ ID NO: 2456326 - RNA, 12 nt, Human
ucccucucccug

SEQ ID NO: 2456327 - RNA, 13 nt, Human
ucccucuccugcc

SEQ ID NO: 2456328 - RNA, 14 nt, Human
ucccucuccugccu

SEQ ID NO: 2456329 - RNA, 15 nt, Human
ucccucuccugccua

SEQ ID NO: 2456330 - RNA, 12 nt, Human
ucccucucggaa

SEQ ID NO: 2456331 - RNA, 13 nt, Human
ucccucucucuga

SEQ ID NO: 2456332 - RNA, 16 nt, Human
ucccucuccugccuac

SEQ ID NO: 2456333 - RNA, 17 nt, Human
ucccucucucugacucu

SEQ ID NO: 2456334 - RNA, 15 nt, Human
ucccucucucugacu

SEQ ID NO: 2456335 - RNA, 12 nt, Human
ucccucucucuu

SEQ ID NO: 2456336 - RNA, 16 nt, Human
ucccucucucuucugc

SEQ ID NO: 2456337 - RNA, 18 nt, Human
ucccucucucuucugcuc

SEQ ID NO: 2456338 - RNA, 19 nt, Human
ucccucucucuucugcucc

SEQ ID NO: 2456339 - RNA, 22 nt, Human
ucccucucucugacucucaaau

SEQ ID NO: 2456340 - RNA, 15 nt, Human
ucccugccuggucac

SEQ ID NO: 2456341 - RNA, 23 nt, Human
ucccugcuagggguuuuaggucu

SEQ ID NO: 2456342 - RNA, 17 nt, Human
ucccugcuccacgucug

SEQ ID NO: 2456343 - RNA, 16 nt, Human
ucccugcuguguuccc

SEQ ID NO: 2456344 - RNA, 19 nt, Human
ucccugcugucgucuuagc

SEQ ID NO: 2456345 - RNA, 22 nt, Human
ucccugcuguccccucuugccc

SEQ ID NO: 2456346 - RNA, 21 nt, Human
ucccugcuguccccucuugcc

SEQ ID NO: 2456347 - RNA, 17 nt, Human
ucccugcuguccccucu

SEQ ID NO: 2456348 - RNA, 14 nt, Human
ucccugcugucccc

SEQ ID NO: 2456349 - RNA, 13 nt, Human
ucccugcuguccc

SEQ ID NO: 2456350 - RNA, 18 nt, Human
ucccugcuuccaggaaac

SEQ ID NO: 2456351 - RNA, 14 nt, Human
ucccugcuuccagg

SEQ ID NO: 2456352 - RNA, 12 nt, Human
ucccugcuucca

SEQ ID NO: 2456353 - RNA, 13 nt, Human
ucccuggaaggug

SEQ ID NO: 2456354 - RNA, 17 nt, Human
ucccuggagccagacuc

SEQ ID NO: 2456355 - RNA, 17 nt, Human
ucccugccucucaucaa

SEQ ID NO: 2456356 - RNA, 23 nt, Human
ucccugccucucaucaacugaau

SEQ ID NO: 2456357 - RNA, 11 nt, Human
ucccugccugg

SEQ ID NO: 2456358 - RNA, 23 nt, Human
ucccugccugguccucacacuca

SEQ ID NO: 2456359 - RNA, 20 nt, Human
ucccugccccucccuucaac

SEQ ID NO: 2456360 - RNA, 16 nt, Human
ucccugcccucaucuc

SEQ ID NO: 2456361 - RNA, 15 nt, Human
ucccugcccucaucu

SEQ ID NO: 2456362 - RNA, 17 nt, Human
ucccugcccucaucucu

SEQ ID NO: 2456363 - RNA, 14 nt, Human
ucccugccgccuca

SEQ ID NO: 2456364 - RNA, 15 nt, Human
uccucggccuggcuc

SEQ ID NO: 2456365 - RNA, 14 nt, Human
uccucggccuggcu

SEQ ID NO: 2456366 - RNA, 19 nt, Human
uccucggcccccuccaucg

SEQ ID NO: 2456367 - RNA, 15 nt, Human
uccucggcccccucc

SEQ ID NO: 2456368 - RNA, 17 nt, Human
uccucgguacucccaua

SEQ ID NO: 2456369 - RNA, 15 nt, Human
uccucgguacuccca

SEQ ID NO: 2456370 - RNA, 24 nt, Human
uccucgccugacaaccacuggucu

SEQ ID NO: 2456371 - RNA, 15 nt, Human
uccucgccugacaac

SEQ ID NO: 2456372 - RNA, 16 nt, Human
uccucggaucaccgag

SEQ ID NO: 2456373 - RNA, 14 nt, Human
uccucggcccccuc

SEQ ID NO: 2456374 - RNA, 19 nt, Human
uccucggaucaccgagagu

SEQ ID NO: 2456375 - RNA, 19 nt, Human
uccuccuuuucacaguucu

SEQ ID NO: 2456376 - RNA, 24 nt, Human
uccucgcagagaggccaggugcag

SEQ ID NO: 2456377 - RNA, 13 nt, Human
uccucgccugaca

SEQ ID NO: 2456378 - RNA, 13 nt, Human
uccucgcccuggg

SEQ ID NO: 2456379 - RNA, 14 nt, Human
uccucgcccugggu

SEQ ID NO: 2456380 - RNA, 14 nt, Human
uccucuaggagguc

SEQ ID NO: 2456381 - RNA, 19 nt, Human
uccucuacuaacaaucagc

SEQ ID NO: 2456382 - RNA, 21 nt, Human
uccucuaagccacucuuccaa

SEQ ID NO: 2456383 - RNA, 18 nt, Human
uccucuacuuaaugagau

SEQ ID NO: 2456384 - RNA, 17 nt, Human
uccucuagaagccaagg

SEQ ID NO: 2456385 - RNA, 16 nt, Human
uccucuagaagccaag

SEQ ID NO: 2456386 - RNA, 14 nt, Human
uccucuagaagcca

SEQ ID NO: 2456387 - RNA, 19 nt, Human
uccucuacuuaaugagaua

SEQ ID NO: 2456388 - RNA, 17 nt, Human
uccucuacuaacaauca

SEQ ID NO: 2456389 - RNA, 18 nt, Human
uccucuacuaacaaucag

SEQ ID NO: 2456390 - RNA, 20 nt, Human
uccucuaagccacucuucca

SEQ ID NO: 2456391 - RNA, 16 nt, Human
uccucgguacucccau

SEQ ID NO: 2456392 - RNA, 19 nt, Human
uccuccuuggugccuggcc

SEQ ID NO: 2456393 - RNA, 17 nt, Human
uccuccuuggugccugg

SEQ ID NO: 2456394 - RNA, 16 nt, Human
uccuccuuggugccug

SEQ ID NO: 2456395 - RNA, 21 nt, Human
uccuccugguggguccagggg

SEQ ID NO: 2456396 - RNA, 20 nt, Human
uccuccugguggguccaggg

SEQ ID NO: 2456397 - RNA, 16 nt, Human
uccuccuguguacagg

SEQ ID NO: 2456398 - RNA, 22 nt, Human
uccuccugguggguccaggggc

SEQ ID NO: 2456399 - RNA, 13 nt, Human
uccuccuuccaug

SEQ ID NO: 2456400 - RNA, 13 nt, Human
uccuccuucccaa

SEQ ID NO: 2456401 - RNA, 15 nt, Human
uccuccuuccaugga

SEQ ID NO: 2456402 - RNA, 22 nt, Human
uccuccugggcccucucugcuc

SEQ ID NO: 2456403 - RNA, 13 nt, Human
uccuccugguggg

SEQ ID NO: 2456404 - RNA, 20 nt, Human
uccuccugggcccucucugc

SEQ ID NO: 2456405 - RNA, 12 nt, Human
uccuccagcagg

SEQ ID NO: 2456406 - RNA, 14 nt, Human
uccuccagcaggga

SEQ ID NO: 2456407 - RNA, 19 nt, Human
uccuccagaagccucuggc

SEQ ID NO: 2456408 - RNA, 20 nt, Human
uccuccagaagccucuggcu

SEQ ID NO: 2456409 - RNA, 21 nt, Human
uccuccagaagccucuggcua

SEQ ID NO: 2456410 - RNA, 22 nt, Human
uccuccagaagccucuggcuag

SEQ ID NO: 2456411 - RNA, 23 nt, Human
uccuccacucucccccacccccu

SEQ ID NO: 2456412 - RNA, 14 nt, Human
uccuccagaagccu

SEQ ID NO: 2456413 - RNA, 16 nt, Human
uccuccagaagccucu

SEQ ID NO: 2456414 - RNA, 18 nt, Human
uccuccagaagccucugg

SEQ ID NO: 2456415 - RNA, 22 nt, Human
uccuccacguucugcucaucau

SEQ ID NO: 2456416 - RNA, 23 nt, Human
uccuccacguucugcucaucauu

SEQ ID NO: 2456417 - RNA, 19 nt, Human
uccuccacucucccccacc

SEQ ID NO: 2456418 - RNA, 16 nt, Human
uccuccacucuccccc

SEQ ID NO: 2456419 - RNA, 21 nt, Human
uccuccacguucugcucauca

SEQ ID NO: 2456420 - RNA, 17 nt, Human
uccucauguucugcuuu

SEQ ID NO: 2456421 - RNA, 24 nt, Human
uccucuggacggcaggcucacugc

SEQ ID NO: 2456422 - RNA, 15 nt, Human
uccucuguacagagc

SEQ ID NO: 2456423 - RNA, 18 nt, Human
uccucuguacagagccca

SEQ ID NO: 2456424 - RNA, 17 nt, Human
uccucuguacagagccc

SEQ ID NO: 2456425 - RNA, 16 nt, Human
uccucuguacagagcc

SEQ ID NO: 2456426 - RNA, 13 nt, Human
uccucuuccucug

SEQ ID NO: 2456427 - RNA, 12 nt, Human
uccucuuccucu

SEQ ID NO: 2456428 - RNA, 19 nt, Human
uccucuuccccuugcccuu

SEQ ID NO: 2456429 - RNA, 18 nt, Human
uccucuuccccuugcccu

SEQ ID NO: 2456430 - RNA, 16 nt, Human
uccucuuccccuugcc

SEQ ID NO: 2456431 - RNA, 15 nt, Human
uccucuuccccuugc

SEQ ID NO: 2456432 - RNA, 20 nt, Human
uccucuggacggcaggcuca

SEQ ID NO: 2456433 - RNA, 18 nt, Human
uccucuggacggcaggcu

SEQ ID NO: 2456434 - RNA, 22 nt, Human
uccucuggacggcaggcucacu

SEQ ID NO: 2456435 - RNA, 17 nt, Human
uccucuucugcaucuug

SEQ ID NO: 2456436 - RNA, 17 nt, Human
uccucuucugacgugcc

SEQ ID NO: 2456437 - RNA, 15 nt, Human
uccucuucugacgug

SEQ ID NO: 2456438 - RNA, 19 nt, Human
uccucuucuauuuuguaaa

SEQ ID NO: 2456439 - RNA, 16 nt, Human
uccucuuccucugagg

SEQ ID NO: 2456440 - RNA, 15 nt, Human
uccucuuccucugag

SEQ ID NO: 2456441 - RNA, 14 nt, Human
uccucuuccucuga

SEQ ID NO: 2456442 - RNA, 21 nt, Human
uccucuuccugaauuuuauuu

SEQ ID NO: 2456443 - RNA, 16 nt, Human
uccucugcugcuggcu

SEQ ID NO: 2456444 - RNA, 15 nt, Human
uccucugcugcuggc

SEQ ID NO: 2456445 - RNA, 14 nt, Human
uccucugcugcugg

SEQ ID NO: 2456446 - RNA, 12 nt, Human
uccucugcugcu

SEQ ID NO: 2456447 - RNA, 19 nt, Human
uccucuagaagccaaggga

SEQ ID NO: 2456448 - RNA, 18 nt, Human
uccucuagaagccaaggg

SEQ ID NO: 2456449 - RNA, 15 nt, Human
uccucuagcuguggg

SEQ ID NO: 2456450 - RNA, 22 nt, Human
uccucuagaagccaagggaaag

SEQ ID NO: 2456451 - RNA, 21 nt, Human
uccucuagcugugggggugag

SEQ ID NO: 2456452 - RNA, 17 nt, Human
uccucuggacggcaggc

SEQ ID NO: 2456453 - RNA, 15 nt, Human
uccucuggacggcag

SEQ ID NO: 2456454 - RNA, 16 nt, Human
uccuaauuccacagcu

SEQ ID NO: 2456455 - RNA, 17 nt, Human
uccuaauuccacagcug

SEQ ID NO: 2456456 - RNA, 18 nt, Human
uccuaauuccacagcugc

SEQ ID NO: 2456457 - RNA, 15 nt, Human
uccuaauuccacagc

SEQ ID NO: 2456458 - RNA, 14 nt, Human
uccuaaucauccaa

SEQ ID NO: 2456459 - RNA, 15 nt, Human
uccuaaucauccaau

SEQ ID NO: 2456460 - RNA, 22 nt, Human
uccuaaugaaugcauaaaaugu

SEQ ID NO: 2456461 - RNA, 16 nt, Human
uccuaauuucuccucc

SEQ ID NO: 2456462 - RNA, 15 nt, Human
uccuaauuucuccuc

SEQ ID NO: 2456463 - RNA, 16 nt, Human
uccuaauuuugagaaa

SEQ ID NO: 2456464 - RNA, 15 nt, Human
uccuacaagacacag

SEQ ID NO: 2456465 - RNA, 20 nt, Human
uccuaccaauagauucccca

SEQ ID NO: 2456466 - RNA, 15 nt, Human
uccuacaaagauguu

SEQ ID NO: 2456467 - RNA, 19 nt, Human
uccuaauuucuccucccuu

SEQ ID NO: 2456468 - RNA, 14 nt, Human
uccuacaaagaugu

SEQ ID NO: 2456469 - RNA, 18 nt, Human
uccuacaagagcagccug

SEQ ID NO: 2456470 - RNA, 20 nt, Human
uccuacauuaauuaucuagu

SEQ ID NO: 2456471 - RNA, 16 nt, Human
uccuaccaaugcaugc

SEQ ID NO: 2456472 - RNA, 15 nt, Human
uccuaccaaugcaug

SEQ ID NO: 2456473 - RNA, 14 nt, Human
uccuaccaaugcau

SEQ ID NO: 2456474 - RNA, 13 nt, Human
uccuaccaaugca

SEQ ID NO: 2456475 - RNA, 21 nt, Human
uccuaccaaugcaugcagcca

SEQ ID NO: 2456476 - RNA, 17 nt, Human
uccuaccaaugcaugca

SEQ ID NO: 2456477 - RNA, 15 nt, Human
uccuacccaaccacu

SEQ ID NO: 2456478 - RNA, 18 nt, Human
uccuacccacccuccuuu

SEQ ID NO: 2456479 - RNA, 18 nt, Human
uccuaauaaaguucugua

SEQ ID NO: 2456480 - RNA, 20 nt, Human
uccuaauaaucauuggauuc

SEQ ID NO: 2456481 - RNA, 16 nt, Human
uccuaaucuucugaac

SEQ ID NO: 2456482 - RNA, 17 nt, Human
uccgaccagacaccuug

SEQ ID NO: 2456483 - RNA, 13 nt, Human
uccgaccagacac

SEQ ID NO: 2456484 - RNA, 20 nt, Human
uccuaguuuucuccucccag

SEQ ID NO: 2456485 - RNA, 23 nt, Human
uccuaguucuguagaaaugguug

SEQ ID NO: 2456486 - RNA, 13 nt, Human
uccuaguuuucuc

SEQ ID NO: 2456487 - RNA, 20 nt, Human
uccuauaauucccuaucuuu

SEQ ID NO: 2456488 - RNA, 20 nt, Human
uccuauaauauaauaaauau

SEQ ID NO: 2456489 - RNA, 18 nt, Human
uccuauacgcagcgugcu

SEQ ID NO: 2456490 - RNA, 19 nt, Human
uccuauacgcagcgugcuu

SEQ ID NO: 2456491 - RNA, 15 nt, Human
uccuauauaguuuau

SEQ ID NO: 2456492 - RNA, 18 nt, Human
uccuauauuguuuucagu

SEQ ID NO: 2456493 - RNA, 20 nt, Human
uccuacccacaccucugcca

SEQ ID NO: 2456494 - RNA, 16 nt, Human
uccuacccacaccucu

SEQ ID NO: 2456495 - RNA, 15 nt, Human
uccuacccacaccuc

SEQ ID NO: 2456496 - RNA, 16 nt, Human
uccuacccaaccacuc

SEQ ID NO: 2456497 - RNA, 22 nt, Human
uccuacccacaccucugccaga

SEQ ID NO: 2456498 - RNA, 21 nt, Human
uccuacccacaccucugccag

SEQ ID NO: 2456499 - RNA, 14 nt, Human
uccuacccaucccc

SEQ ID NO: 2456500 - RNA, 15 nt, Human
uccuacccauccccg

SEQ ID NO: 2456501 - RNA, 18 nt, Human
uccuaccccaauuccuug

SEQ ID NO: 2456502 - RNA, 16 nt, Human
uccuaccccaauuccu

SEQ ID NO: 2456503 - RNA, 19 nt, Human
uccuaccccaauuccuugu

SEQ ID NO: 2456504 - RNA, 22 nt, Human
uccuaguuccaccaucaagcca

SEQ ID NO: 2456505 - RNA, 17 nt, Human
uccuaguucuguagaaa

SEQ ID NO: 2456506 - RNA, 16 nt, Human
uccuaguucuguagaa

SEQ ID NO: 2456507 - RNA, 19 nt, Human
uccuaguucuguagaaaug

SEQ ID NO: 2456508 - RNA, 18 nt, Human
uccuaguucuguagaaau

SEQ ID NO: 2456509 - RNA, 14 nt, Human
uccuauucucacca

SEQ ID NO: 2456510 - RNA, 14 nt, Human
uccuauucuauugc

SEQ ID NO: 2456511 - RNA, 23 nt, Human
uccuauucaguucccagaaucaa

SEQ ID NO: 2456512 - RNA, 22 nt, Human
uccuauucaguucccagaauca

SEQ ID NO: 2456513 - RNA, 14 nt, Human
uccuauucaguucc

SEQ ID NO: 2456514 - RNA, 19 nt, Human
uccuauguuuuuguucaaa

SEQ ID NO: 2456515 - RNA, 18 nt, Human
uccuauguuuuuguucaa

SEQ ID NO: 2456516 - RNA, 12 nt, Human
uccuauguguaa

SEQ ID NO: 2456517 - RNA, 23 nt, Human
uccuaugugauuuuaacucuguc

SEQ ID NO: 2456518 - RNA, 22 nt, Human
uccuaugugauuuuaacucugu

SEQ ID NO: 2456519 - RNA, 13 nt, Human
uccuauaugcacu

SEQ ID NO: 2456520 - RNA, 21 nt, Human
uccuaugugauuuuaacucug

SEQ ID NO: 2456521 - RNA, 18 nt, Human
uccuauauaguuuauuga

SEQ ID NO: 2456522 - RNA, 21 nt, Human
uccucaucugggggaguggaa

SEQ ID NO: 2456523 - RNA, 20 nt, Human
uccucaucugggggagugga

SEQ ID NO: 2456524 - RNA, 19 nt, Human
uccucaucugggggagugg

SEQ ID NO: 2456525 - RNA, 22 nt, Human
uccucaucucuaacagcucagg

SEQ ID NO: 2456526 - RNA, 23 nt, Human
uccucaucucuaacagcucagga

SEQ ID NO: 2456527 - RNA, 17 nt, Human
uccucauuagcauuuug

SEQ ID NO: 2456528 - RNA, 18 nt, Human
uccucauccagggcucug

SEQ ID NO: 2456529 - RNA, 14 nt, Human
uccucaucccgugu

SEQ ID NO: 2456530 - RNA, 22 nt, Human
uccucaucccguguucuccuuu

SEQ ID NO: 2456531 - RNA, 12 nt, Human
uccucaucucua

SEQ ID NO: 2456532 - RNA, 20 nt, Human
uccucaucucuaacagcuca

SEQ ID NO: 2456533 - RNA, 18 nt, Human
uccuauucucaccaggaa

SEQ ID NO: 2456534 - RNA, 17 nt, Human
uccuauucucaccagga

SEQ ID NO: 2456535 - RNA, 16 nt, Human
uccuauucucaccagg

SEQ ID NO: 2456536 - RNA, 15 nt, Human
uccuauucucaccag

SEQ ID NO: 2456537 - RNA, 16 nt, Human
uccuauucucgggcug

SEQ ID NO: 2456538 - RNA, 20 nt, Human
uccuauucucaccaggaagg

SEQ ID NO: 2456539 - RNA, 14 nt, Human
uccuauugcaaagg

SEQ ID NO: 2456540 - RNA, 20 nt, Human
ugguuguacauauaagugau

SEQ ID NO: 2456541 - RNA, 16 nt, Human
ugguuguauuagaugu

SEQ ID NO: 2456542 - RNA, 14 nt, Human
ugguuguauuagau

SEQ ID NO: 2456543 - RNA, 12 nt, Human
ugguuguauuag

SEQ ID NO: 2456544 - RNA, 17 nt, Human
ugguugucaauauuaaa

SEQ ID NO: 2456545 - RNA, 15 nt, Human
ugguugucaauauua

SEQ ID NO: 2456546 - RNA, 17 nt, Human
ugguuguauucuuugau

SEQ ID NO: 2456547 - RNA, 16 nt, Human
ugguuguauucuuuga

SEQ ID NO: 2456548 - RNA, 15 nt, Human
ugguuguauucuuug

SEQ ID NO: 2456549 - RNA, 11 nt, Human
ugguuguauuc

SEQ ID NO: 2456550 - RNA, 18 nt, Human
ugguuguauuagauguuc

SEQ ID NO: 2456551 - RNA, 16 nt, Human
ugguuuucuguucuuu

SEQ ID NO: 2456552 - RNA, 14 nt, Human
ugguugcuuuaaua

SEQ ID NO: 2456553 - RNA, 13 nt, Human
ugguugcugugug

SEQ ID NO: 2456554 - RNA, 19 nt, Human
ugguugcuguuuuccuccc

SEQ ID NO: 2456555 - RNA, 18 nt, Human
ugguugccuuaaagaaag

SEQ ID NO: 2456556 - RNA, 17 nt, Human
ugguugccuuaaagaaa

SEQ ID NO: 2456557 - RNA, 20 nt, Human
ugguugcacuuaugauuuca

SEQ ID NO: 2456558 - RNA, 13 nt, Human
ugguugcauccua

SEQ ID NO: 2456559 - RNA, 15 nt, Human
ugguugauggguucu

SEQ ID NO: 2456560 - RNA, 22 nt, Human
ugguugaguucagguagcugcc

SEQ ID NO: 2456561 - RNA, 18 nt, Human
ugguugcuuuaauaucau

SEQ ID NO: 2456562 - RNA, 16 nt, Human
ugguuggagagcuaga

SEQ ID NO: 2456563 - RNA, 16 nt, Human
ugguuggagaauuuag

SEQ ID NO: 2456564 - RNA, 16 nt, Human
ugguuggcuggccuuc

SEQ ID NO: 2456565 - RNA, 22 nt, Human
ugguugguaacacaaauuuuca

SEQ ID NO: 2456566 - RNA, 15 nt, Human
ugguuggguccucac

SEQ ID NO: 2456567 - RNA, 19 nt, Human
ugguuuucuuguguguuua

SEQ ID NO: 2456568 - RNA, 22 nt, Human
ugguuguuaguuauagaugucu

SEQ ID NO: 2456569 - RNA, 21 nt, Human
ugguuguuaguuauagauguc

SEQ ID NO: 2456570 - RNA, 23 nt, Human
ugguugucauuuuugcaguagag

SEQ ID NO: 2456571 - RNA, 21 nt, Human
ugguuuuuaaaaaacugcuga

SEQ ID NO: 2456572 - RNA, 19 nt, Human
ugguuuuguaagaugcugg

SEQ ID NO: 2456573 - RNA, 16 nt, Human
ugguuuuguuccccuc

SEQ ID NO: 2456574 - RNA, 18 nt, Human
ugguuuuguaagaugcug

SEQ ID NO: 2456575 - RNA, 20 nt, Human
ugguuuuguuccccuccucc

SEQ ID NO: 2456576 - RNA, 17 nt, Human
ugguuuuguuccccucc

SEQ ID NO: 2456577 - RNA, 23 nt, Human
ugguuuuuaaaaaacugcugacu

SEQ ID NO: 2456578 - RNA, 18 nt, Human
uguaaaaaaaaaugccuu

SEQ ID NO: 2456579 - RNA, 22 nt, Human
uguaaaaaaaaaaaaguuauau

SEQ ID NO: 2456580 - RNA, 20 nt, Human
uguaaaaaaaaaaaaguuau

SEQ ID NO: 2456581 - RNA, 13 nt, Human
uguaaaaaaaaaa

SEQ ID NO: 2456582 - RNA, 15 nt, Human
ugguuuuuuuucuaa

SEQ ID NO: 2456583 - RNA, 22 nt, Human
ugguuuuuguagccuuccucca

SEQ ID NO: 2456584 - RNA, 17 nt, Human
ugguuuuuguagccuuc

SEQ ID NO: 2456585 - RNA, 16 nt, Human
ugguuuuucaguuuuc

SEQ ID NO: 2456586 - RNA, 11 nt, Human
uguaaaauggu

SEQ ID NO: 2456587 - RNA, 23 nt, Human
uguaaaaucuuucuuucuuagaa

SEQ ID NO: 2456588 - RNA, 22 nt, Human
uguaaaaucuuucuuucuuaga

SEQ ID NO: 2456589 - RNA, 14 nt, Human
uguaaaaugaaauu

SEQ ID NO: 2456590 - RNA, 15 nt, Human
uguaaaaugaaauua

SEQ ID NO: 2456591 - RNA, 13 nt, Human
uguaaaaucuuuc

SEQ ID NO: 2456592 - RNA, 21 nt, Human
uguaaaaucuuucuuucuuag

SEQ ID NO: 2456593 - RNA, 14 nt, Human
uguaaaaucuuucu

SEQ ID NO: 2456594 - RNA, 22 nt, Human
uguaaaaucuuggcacagaaac

SEQ ID NO: 2456595 - RNA, 21 nt, Human
uguaaaauauuuugaaucaau

SEQ ID NO: 2456596 - RNA, 21 nt, Human
uguaaaaucuuggcacagaaa

SEQ ID NO: 2456597 - RNA, 12 nt, Human
uguaaaauggug

SEQ ID NO: 2456598 - RNA, 21 nt, Human
uguaaacucaaaacuuaacau

SEQ ID NO: 2456599 - RNA, 16 nt, Human
uguaaacucaaaacuu

SEQ ID NO: 2456600 - RNA, 19 nt, Human
uguaaaccugagucguaca

SEQ ID NO: 2456601 - RNA, 23 nt, Human
uguaaaccacaaggcuguugcau

SEQ ID NO: 2456602 - RNA, 22 nt, Human
uguaaaccacaaggcuguugca

SEQ ID NO: 2456603 - RNA, 15 nt, Human
uguaaacucaaaaua

SEQ ID NO: 2456604 - RNA, 20 nt, Human
uguaaacucaaaauauuugu

SEQ ID NO: 2456605 - RNA, 18 nt, Human
uguaaacugcauuagaaa

SEQ ID NO: 2456606 - RNA, 21 nt, Human
uguaaaauauagcuguacaaa

SEQ ID NO: 2456607 - RNA, 19 nt, Human
uguaaaauauagcuguaca

SEQ ID NO: 2456608 - RNA, 18 nt, Human
uguaaaauauacuuaaau

SEQ ID NO: 2456609 - RNA, 11 nt, Human
uguaaaauaua

SEQ ID NO: 2456610 - RNA, 20 nt, Human
uguaaaauauuuugaaucaa

SEQ ID NO: 2456611 - RNA, 19 nt, Human
uguaaaauauuuugaauca

SEQ ID NO: 2456612 - RNA, 21 nt, Human
uguaaaauagcuuguauagug

SEQ ID NO: 2456613 - RNA, 20 nt, Human
uguaaaauagcuuguauagu

SEQ ID NO: 2456614 - RNA, 17 nt, Human
uguaaaauagcuuguau

SEQ ID NO: 2456615 - RNA, 14 nt, Human
uguaaaauagcuug

SEQ ID NO: 2456616 - RNA, 12 nt, Human
uguaaaauagcu

SEQ ID NO: 2456617 - RNA, 18 nt, Human
uguaaaauaagaaugauu

SEQ ID NO: 2456618 - RNA, 21 nt, Human
uguaaaaggccaaaccucugu

SEQ ID NO: 2456619 - RNA, 22 nt, Human
uguaaaaggccaaaccucuguu

SEQ ID NO: 2456620 - RNA, 23 nt, Human
uguaaaaggccaaaccucuguuc

SEQ ID NO: 2456621 - RNA, 14 nt, Human
uguaaaauaaaauu

SEQ ID NO: 2456622 - RNA, 19 nt, Human
uguaaaagaacaguaaaca

SEQ ID NO: 2456623 - RNA, 15 nt, Human
uguaaaacugaggca

SEQ ID NO: 2456624 - RNA, 16 nt, Human
uguaaaacugaggcac

SEQ ID NO: 2456625 - RNA, 22 nt, Human
uguaaaacgagaauccacccau

SEQ ID NO: 2456626 - RNA, 18 nt, Human
uguaaaaccugucaauga

SEQ ID NO: 2456627 - RNA, 16 nt, Human
uguaaaaccugucaau

SEQ ID NO: 2456628 - RNA, 19 nt, Human
uguaaaaaaaaaugccuuu

SEQ ID NO: 2456629 - RNA, 19 nt, Human
uguaaaaacagcauugcuu

SEQ ID NO: 2456630 - RNA, 20 nt, Human
uguaaaaacagcauugcuuu

SEQ ID NO: 2456631 - RNA, 22 nt, Human
uguaaaaacagcauugcuuucu

SEQ ID NO: 2456632 - RNA, 23 nt, Human
uguaaaaacagcauugcuuucug

SEQ ID NO: 2456633 - RNA, 24 nt, Human
uguaaaaacagcauugcuuucuga

SEQ ID NO: 2456634 - RNA, 14 nt, Human
uguaaaaacugugg

SEQ ID NO: 2456635 - RNA, 22 nt, Human
uguaaaaagagagaaaacuuau

SEQ ID NO: 2456636 - RNA, 20 nt, Human
uguaaaaauuggucacccua

SEQ ID NO: 2456637 - RNA, 23 nt, Human
uguaaaacaaaaauguaaugauc

SEQ ID NO: 2456638 - RNA, 14 nt, Human
uguacagacaacaa

SEQ ID NO: 2456639 - RNA, 18 nt, Human
uguacagaauucugcuac

SEQ ID NO: 2456640 - RNA, 13 nt, Human
uguacacuuuuuu

SEQ ID NO: 2456641 - RNA, 21 nt, Human
uguacagaauucugcuaccuc

SEQ ID NO: 2456642 - RNA, 11 nt, Human
uguacagagcc

SEQ ID NO: 2456643 - RNA, 17 nt, Human
uguacagacguaugcuu

SEQ ID NO: 2456644 - RNA, 18 nt, Human
uguacagacguaugcuua

SEQ ID NO: 2456645 - RNA, 22 nt, Human
uguacagagaacuaacacuauu

SEQ ID NO: 2456646 - RNA, 21 nt, Human
uguacagagaacuaacacuau

SEQ ID NO: 2456647 - RNA, 19 nt, Human
uguacagacguaugcuuau

SEQ ID NO: 2456648 - RNA, 20 nt, Human
uguacagacguaugcuuauu

SEQ ID NO: 2456649 - RNA, 19 nt, Human
uguacaaauaaagucccag

SEQ ID NO: 2456650 - RNA, 17 nt, Human
uguaaugaaacaccuuc

SEQ ID NO: 2456651 - RNA, 16 nt, Human
uguaaugaaacaccuu

SEQ ID NO: 2456652 - RNA, 14 nt, Human
uguacacgggacug

SEQ ID NO: 2456653 - RNA, 13 nt, Human
uguacacgggacu

SEQ ID NO: 2456654 - RNA, 18 nt, Human
uguacaaauauaagaaua

SEQ ID NO: 2456655 - RNA, 15 nt, Human
uguacaaauauaaga

SEQ ID NO: 2456656 - RNA, 21 nt, Human
uguacaaauauaagaauaaaa

SEQ ID NO: 2456657 - RNA, 15 nt, Human
uguacaacuuaaguu

SEQ ID NO: 2456658 - RNA, 20 nt, Human
uguacacgggacugacgcaa

SEQ ID NO: 2456659 - RNA, 15 nt, Human
uguacacgggacuga

SEQ ID NO: 2456660 - RNA, 16 nt, Human
uguacacguguccugu

SEQ ID NO: 2456661 - RNA, 17 nt, Human
uguacacguguccugua

SEQ ID NO: 2456662 - RNA, 12 nt, Human
uguacacugaau

SEQ ID NO: 2456663 - RNA, 14 nt, Human
uguacacugaauau

SEQ ID NO: 2456664 - RNA, 15 nt, Human
uguacacugaauauu

SEQ ID NO: 2456665 - RNA, 16 nt, Human
uguacacugaauauuu

SEQ ID NO: 2456666 - RNA, 17 nt, Human
uguacacugaauauuua

SEQ ID NO: 2456667 - RNA, 19 nt, Human
uguacacugaauauuuaua

SEQ ID NO: 2456668 - RNA, 21 nt, Human
uguacacugaauauuuauauu

SEQ ID NO: 2456669 - RNA, 12 nt, Human
uguacacuuuuu

SEQ ID NO: 2456670 - RNA, 20 nt, Human
uguacacugaauauuuauau

SEQ ID NO: 2456671 - RNA, 17 nt, Human
uguaaugaaaaccacau

SEQ ID NO: 2456672 - RNA, 13 nt, Human
uguaaugaaaacc

SEQ ID NO: 2456673 - RNA, 12 nt, Human
uguaaugaaaac

SEQ ID NO: 2456674 - RNA, 11 nt, Human
uguaaugaaaa

SEQ ID NO: 2456675 - RNA, 15 nt, Human
uguaauaagacauaa

SEQ ID NO: 2456676 - RNA, 13 nt, Human
uguaauaauguga

SEQ ID NO: 2456677 - RNA, 18 nt, Human
uguaauaagacauaacgu

SEQ ID NO: 2456678 - RNA, 14 nt, Human
uguaauaagacaua

SEQ ID NO: 2456679 - RNA, 13 nt, Human
uguaauaagacau

SEQ ID NO: 2456680 - RNA, 12 nt, Human
uguaauaagaca

SEQ ID NO: 2456681 - RNA, 14 nt, Human
uguaauaaauauga

SEQ ID NO: 2456682 - RNA, 22 nt, Human
uguaauaacugugaaguuuaca

SEQ ID NO: 2456683 - RNA, 14 nt, Human
uguaauaacuguga

SEQ ID NO: 2456684 - RNA, 15 nt, Human
uguaauaaauaugag

SEQ ID NO: 2456685 - RNA, 23 nt, Human
uguaaccucagcucugggagagg

SEQ ID NO: 2456686 - RNA, 13 nt, Human
uguaauaaauaug

SEQ ID NO: 2456687 - RNA, 19 nt, Human
uguaaccucagcucuggga

SEQ ID NO: 2456688 - RNA, 18 nt, Human
uguaaccucagcucuggg

SEQ ID NO: 2456689 - RNA, 16 nt, Human
uguaaccucagcucug

SEQ ID NO: 2456690 - RNA, 15 nt, Human
uguaaccucagcucu

SEQ ID NO: 2456691 - RNA, 14 nt, Human
uguaaccucagcuc

SEQ ID NO: 2456692 - RNA, 12 nt, Human
uguaaccucagc

SEQ ID NO: 2456693 - RNA, 22 nt, Human
uguaaccgauucaucucucaga

SEQ ID NO: 2456694 - RNA, 20 nt, Human
uguaaccgauucaucucuca

SEQ ID NO: 2456695 - RNA, 16 nt, Human
uguaacagucugaucg

SEQ ID NO: 2456696 - RNA, 11 nt, Human
uguaacaugua

SEQ ID NO: 2456697 - RNA, 17 nt, Human
uguaacauacuggccug

SEQ ID NO: 2456698 - RNA, 14 nt, Human
uguaacagucugau

SEQ ID NO: 2456699 - RNA, 22 nt, Human
uguaacaggucuccucuuaaaa

SEQ ID NO: 2456700 - RNA, 22 nt, Human
uguaacagcuccuugggaggaa

SEQ ID NO: 2456701 - RNA, 18 nt, Human
uguaacagcuccuuggga

SEQ ID NO: 2456702 - RNA, 11 nt, Human
uguaacagcug

SEQ ID NO: 2456703 - RNA, 14 nt, Human
uguaacagcugagg

SEQ ID NO: 2456704 - RNA, 15 nt, Human
uguaacagcugaggu

SEQ ID NO: 2456705 - RNA, 18 nt, Human
uguaacaggucuccucuu

SEQ ID NO: 2456706 - RNA, 20 nt, Human
uguaacaggucuccucuuaa

SEQ ID NO: 2456707 - RNA, 21 nt, Human
uguaacaggucuccucuuaaa

SEQ ID NO: 2456708 - RNA, 17 nt, Human
uguaacagcuccuuggg

SEQ ID NO: 2456709 - RNA, 16 nt, Human
uguaacagcuccuugg

SEQ ID NO: 2456710 - RNA, 14 nt, Human
uguaacagcuccuu

SEQ ID NO: 2456711 - RNA, 13 nt, Human
uguaacagcuccu

SEQ ID NO: 2456712 - RNA, 12 nt, Human
uguaacagcucc

SEQ ID NO: 2456713 - RNA, 18 nt, Human
uguaacagccaggagugu

SEQ ID NO: 2456714 - RNA, 16 nt, Human
uguaacagacauuguu

SEQ ID NO: 2456715 - RNA, 15 nt, Human
uguaacagacauugu

SEQ ID NO: 2456716 - RNA, 13 nt, Human
uguaacagacauu

SEQ ID NO: 2456717 - RNA, 23 nt, Human
uguaacagaaagggcaacaauaa

SEQ ID NO: 2456718 - RNA, 22 nt, Human
uguaacagaaagggcaacaaua

SEQ ID NO: 2456719 - RNA, 17 nt, Human
uguaacagaaagggcaa

SEQ ID NO: 2456720 - RNA, 13 nt, Human
uguaacagaaagg

SEQ ID NO: 2456721 - RNA, 20 nt, Human
uguaacacuuuacaauguuc

SEQ ID NO: 2456722 - RNA, 18 nt, Human
uguaacacuuuacaaugu

SEQ ID NO: 2456723 - RNA, 16 nt, Human
uguaacacuuuacaau

SEQ ID NO: 2456724 - RNA, 20 nt, Human
uguaaauuuuguaugaaaaa

SEQ ID NO: 2456725 - RNA, 17 nt, Human
uguaacaagccacccca

SEQ ID NO: 2456726 - RNA, 15 nt, Human
uguaacacaagccac

SEQ ID NO: 2456727 - RNA, 24 nt, Human
uguaacacaagccacagaagccag

SEQ ID NO: 2456728 - RNA, 21 nt, Human
uguaacacaagccacagaagc

SEQ ID NO: 2456729 - RNA, 20 nt, Human
uguaacacaagccacagaag

SEQ ID NO: 2456730 - RNA, 16 nt, Human
uguaacacaagccaca

SEQ ID NO: 2456731 - RNA, 21 nt, Human
uguaacacagcugagagacuu

SEQ ID NO: 2456732 - RNA, 20 nt, Human
uguaacacagcugagagacu

SEQ ID NO: 2456733 - RNA, 23 nt, Human
uguaacacagcugagagacuuuu

SEQ ID NO: 2456734 - RNA, 13 nt, Human
uguaaacugugua

SEQ ID NO: 2456735 - RNA, 14 nt, Human
uguaaacuguguau

SEQ ID NO: 2456736 - RNA, 22 nt, Human
uguaaacucaaaacuuaacaua

SEQ ID NO: 2456737 - RNA, 18 nt, Human
uguaaacuguguauucca

SEQ ID NO: 2456738 - RNA, 14 nt, Human
uguaaacugugcac

SEQ ID NO: 2456739 - RNA, 15 nt, Human
uguaaacugugcacc

SEQ ID NO: 2456740 - RNA, 23 nt, Human
uguaaacucaaaauauuuguaca

SEQ ID NO: 2456741 - RNA, 14 nt, Human
uguaacaagccacc

SEQ ID NO: 2456742 - RNA, 17 nt, Human
uguaaauuuaugugaug

SEQ ID NO: 2456743 - RNA, 17 nt, Human
ugguguaauaagacaua

SEQ ID NO: 2456744 - RNA, 16 nt, Human
ugguguaauaagacau

SEQ ID NO: 2456745 - RNA, 15 nt, Human
ugguguaauaagaca

SEQ ID NO: 2456746 - RNA, 14 nt, Human
ugguguaauaagac

SEQ ID NO: 2456747 - RNA, 19 nt, Human
ugguguaauaagacauaac

SEQ ID NO: 2456748 - RNA, 23 nt, Human
ugguguauccccccccuguauag

SEQ ID NO: 2456749 - RNA, 19 nt, Human
ugguguaguugaacugaua

SEQ ID NO: 2456750 - RNA, 16 nt, Human
uggugucaccugaaga

SEQ ID NO: 2456751 - RNA, 20 nt, Human
uggugucacuuacuguuucu

SEQ ID NO: 2456752 - RNA, 18 nt, Human
uggugucacuuacuguuu

SEQ ID NO: 2456753 - RNA, 17 nt, Human
uggugucacuuacuguu

SEQ ID NO: 2456754 - RNA, 16 nt, Human
uggugucacuuacugu

SEQ ID NO: 2456755 - RNA, 18 nt, Human
ugguguccaccuggcccc

SEQ ID NO: 2456756 - RNA, 14 nt, Human
ugguguccugacca

SEQ ID NO: 2456757 - RNA, 13 nt, Human
ugguguccaccug

SEQ ID NO: 2456758 - RNA, 14 nt, Human
ugguguccaccugg

SEQ ID NO: 2456759 - RNA, 15 nt, Human
ugguguccaccuggc

SEQ ID NO: 2456760 - RNA, 17 nt, Human
ugguguccaccuggccc

SEQ ID NO: 2456761 - RNA, 15 nt, Human
uggugucgggcauga

SEQ ID NO: 2456762 - RNA, 20 nt, Human
ugguguccugaccacccucc

SEQ ID NO: 2456763 - RNA, 19 nt, Human
ugguguccugaccacccuc

SEQ ID NO: 2456764 - RNA, 17 nt, Human
ugguguccugaccaccc

SEQ ID NO: 2456765 - RNA, 15 nt, Human
ugguguccugaccac

SEQ ID NO: 2456766 - RNA, 21 nt, Human
uggugucgcgccuucuccccc

SEQ ID NO: 2456767 - RNA, 18 nt, Human
uggugucgcgccuucucc

SEQ ID NO: 2456768 - RNA, 21 nt, Human
ugguguccugaccacccuccc

SEQ ID NO: 2456769 - RNA, 19 nt, Human
ugguguccuuucccuccac

SEQ ID NO: 2456770 - RNA, 22 nt, Human
ugguuccagggucccucugugu

SEQ ID NO: 2456771 - RNA, 21 nt, Human
ugguuccagggucccucugug

SEQ ID NO: 2456772 - RNA, 17 nt, Human
ugguuccaagcccugga

SEQ ID NO: 2456773 - RNA, 16 nt, Human
ugguuccaagcccugg

SEQ ID NO: 2456774 - RNA, 12 nt, Human
ugguuccagggu

SEQ ID NO: 2456775 - RNA, 23 nt, Human
ugguuccauuguuuggagacauu

SEQ ID NO: 2456776 - RNA, 21 nt, Human
ugguuccauuguuuggagaca

SEQ ID NO: 2456777 - RNA, 22 nt, Human
ugguuccaugccugagggugga

SEQ ID NO: 2456778 - RNA, 19 nt, Human
ugguuccaugccugagggu

SEQ ID NO: 2456779 - RNA, 17 nt, Human
ugguuccaugccugagg

SEQ ID NO: 2456780 - RNA, 15 nt, Human
ugguuccaugccuga

SEQ ID NO: 2456781 - RNA, 13 nt, Human
ugguuccaugccu

SEQ ID NO: 2456782 - RNA, 20 nt, Human
ugguuccccuguucacucua

SEQ ID NO: 2456783 - RNA, 19 nt, Human
ugguuccccuguucacucu

SEQ ID NO: 2456784 - RNA, 18 nt, Human
ugguuccccuguucacuc

SEQ ID NO: 2456785 - RNA, 11 nt, Human
ugguuccccug

SEQ ID NO: 2456786 - RNA, 19 nt, Human
uggugucgggcaugacacg

SEQ ID NO: 2456787 - RNA, 18 nt, Human
uggugucgggcaugacac

SEQ ID NO: 2456788 - RNA, 15 nt, Human
ugguuccagccugcc

SEQ ID NO: 2456789 - RNA, 16 nt, Human
ugguuccagccugcca

SEQ ID NO: 2456790 - RNA, 16 nt, Human
ugguucauuaauucua

SEQ ID NO: 2456791 - RNA, 13 nt, Human
ugguuccaagccc

SEQ ID NO: 2456792 - RNA, 15 nt, Human
ugguucauaaaugaa

SEQ ID NO: 2456793 - RNA, 13 nt, Human
ugguucauaaaug

SEQ ID NO: 2456794 - RNA, 16 nt, Human
ugguucauaaaugaau

SEQ ID NO: 2456795 - RNA, 16 nt, Human
ugguugaaaauaaaaa

SEQ ID NO: 2456796 - RNA, 12 nt, Human
ugguugaauaaa

SEQ ID NO: 2456797 - RNA, 18 nt, Human
ugguugaauaaacuagau

SEQ ID NO: 2456798 - RNA, 14 nt, Human
ugguucuuguauua

SEQ ID NO: 2456799 - RNA, 18 nt, Human
ugguucuuguauuaagaa

SEQ ID NO: 2456800 - RNA, 19 nt, Human
ugguucuuguauuaagaau

SEQ ID NO: 2456801 - RNA, 22 nt, Human
ugguugagguggaagcccuccu

SEQ ID NO: 2456802 - RNA, 17 nt, Human
ugguugagaaaugaaua

SEQ ID NO: 2456803 - RNA, 15 nt, Human
ugguugagguggaag

SEQ ID NO: 2456804 - RNA, 12 nt, Human
ugguugaggaaa

SEQ ID NO: 2456805 - RNA, 15 nt, Human
ugguugacuggguuu

SEQ ID NO: 2456806 - RNA, 18 nt, Human
ugguugaugaucuuugca

SEQ ID NO: 2456807 - RNA, 15 nt, Human
ugguucucaucuuuc

SEQ ID NO: 2456808 - RNA, 14 nt, Human
ugguucucaucuuu

SEQ ID NO: 2456809 - RNA, 17 nt, Human
ugguucucaucuuucuu

SEQ ID NO: 2456810 - RNA, 13 nt, Human
ugguucucaucuu

SEQ ID NO: 2456811 - RNA, 11 nt, Human
ugguucucauc

SEQ ID NO: 2456812 - RNA, 20 nt, Human
ugguucugaugaugugccug

SEQ ID NO: 2456813 - RNA, 12 nt, Human
ugguucuggcca

SEQ ID NO: 2456814 - RNA, 13 nt, Human
ugguucugugcca

SEQ ID NO: 2456815 - RNA, 12 nt, Human
ugguucuggggc

SEQ ID NO: 2456816 - RNA, 21 nt, Human
ugguucuugguagagauucau

SEQ ID NO: 2456817 - RNA, 19 nt, Human
ugguucuuaguucucacug

SEQ ID NO: 2456818 - RNA, 18 nt, Human
ugguucugugucuguguu

SEQ ID NO: 2456819 - RNA, 20 nt, Human
ugguucccuugaugaagaag

SEQ ID NO: 2456820 - RNA, 17 nt, Human
ugguucccuugaugaag

SEQ ID NO: 2456821 - RNA, 16 nt, Human
ugguucccuugaugaa

SEQ ID NO: 2456822 - RNA, 20 nt, Human
ugguucccguuucuccaccu

SEQ ID NO: 2456823 - RNA, 18 nt, Human
ugguucccguuucuccac

SEQ ID NO: 2456824 - RNA, 23 nt, Human
ugguuccccuguucacucuacuu

SEQ ID NO: 2456825 - RNA, 17 nt, Human
ugguuccuuucucagcc

SEQ ID NO: 2456826 - RNA, 15 nt, Human
ugguucuaauagaac

SEQ ID NO: 2456827 - RNA, 16 nt, Human
ugguucuauuuaaugg

SEQ ID NO: 2456828 - RNA, 14 nt, Human
ugguucuauuuaau

SEQ ID NO: 2456829 - RNA, 18 nt, Human
ugguuccuccccuccucc

SEQ ID NO: 2456830 - RNA, 23 nt, Human
ugguuccuccccuccuccuggac

SEQ ID NO: 2456831 - RNA, 12 nt, Human
ugguuccucccc

SEQ ID NO: 2456832 - RNA, 20 nt, Human
ugguuccggaauccuguccu

SEQ ID NO: 2456833 - RNA, 23 nt, Human
uggguacuuguggacacagcucu

SEQ ID NO: 2456834 - RNA, 20 nt, Human
uggguacuuguggacacagc

SEQ ID NO: 2456835 - RNA, 14 nt, Human
uggguagacacaca

SEQ ID NO: 2456836 - RNA, 18 nt, Human
ugggguuggcugggccca

SEQ ID NO: 2456837 - RNA, 14 nt, Human
uggugagaggcauc

SEQ ID NO: 2456838 - RNA, 22 nt, Human
uggugagaacuacucagggaau

SEQ ID NO: 2456839 - RNA, 23 nt, Human
uggugagaacuacucagggaaug

SEQ ID NO: 2456840 - RNA, 18 nt, Human
ugguggcagugggagcug

SEQ ID NO: 2456841 - RNA, 13 nt, Human
ugguggcaguggg

SEQ ID NO: 2456842 - RNA, 19 nt, Human
ugguggcccgacagccugg

SEQ ID NO: 2456843 - RNA, 20 nt, Human
ugguggcagugggagcugcc

SEQ ID NO: 2456844 - RNA, 20 nt, Human
uggugcaaugaccuuucaau

SEQ ID NO: 2456845 - RNA, 19 nt, Human
uggugcaaugaccuuucaa

SEQ ID NO: 2456846 - RNA, 14 nt, Human
uggugcaaugaccu

SEQ ID NO: 2456847 - RNA, 14 nt, Human
uggugcaaauccua

SEQ ID NO: 2456848 - RNA, 17 nt, Human
uggugguuucagaaaug

SEQ ID NO: 2456849 - RNA, 18 nt, Human
uggugguuucagaaaugu

SEQ ID NO: 2456850 - RNA, 19 nt, Human
uggugguuuucuguucuuu

SEQ ID NO: 2456851 - RNA, 14 nt, Human
uggugguugcuguu

SEQ ID NO: 2456852 - RNA, 17 nt, Human
uggugguuucacggugc

SEQ ID NO: 2456853 - RNA, 13 nt, Human
ugguguaauaaga

SEQ ID NO: 2456854 - RNA, 17 nt, Human
ugguggguccaugggca

SEQ ID NO: 2456855 - RNA, 18 nt, Human
ugguggguccaugggcag

SEQ ID NO: 2456856 - RNA, 16 nt, Human
ugguggguccaugggc

SEQ ID NO: 2456857 - RNA, 23 nt, Human
uggugggguguguuccaacugcc

SEQ ID NO: 2456858 - RNA, 18 nt, Human
ugguggggguagagcuga

SEQ ID NO: 2456859 - RNA, 17 nt, Human
ugguggggguagagcug

SEQ ID NO: 2456860 - RNA, 21 nt, Human
ugguggggguagagcugaucc

SEQ ID NO: 2456861 - RNA, 16 nt, Human
uggugguaacccuggu

SEQ ID NO: 2456862 - RNA, 19 nt, Human
ugguggguucaggggacuc

SEQ ID NO: 2456863 - RNA, 21 nt, Human
ugguggguucaggggacucag

SEQ ID NO: 2456864 - RNA, 15 nt, Human
ugguggucuguuggc

SEQ ID NO: 2456865 - RNA, 17 nt, Human
uggugguaacccuggug

SEQ ID NO: 2456866 - RNA, 15 nt, Human
uggugguaucugagu

SEQ ID NO: 2456867 - RNA, 21 nt, Human
ugguggcccgacagccuggca

SEQ ID NO: 2456868 - RNA, 21 nt, Human
ugguggccucugccccgucuc

SEQ ID NO: 2456869 - RNA, 16 nt, Human
ugguggcgcaagccug

SEQ ID NO: 2456870 - RNA, 13 nt, Human
ugguggcuggguu

SEQ ID NO: 2456871 - RNA, 17 nt, Human
ugguggcgcaagccugu

SEQ ID NO: 2456872 - RNA, 13 nt, Human
ugguggcuuugca

SEQ ID NO: 2456873 - RNA, 21 nt, Human
ugguggcucccggagggcccu

SEQ ID NO: 2456874 - RNA, 12 nt, Human
uggugggagggg

SEQ ID NO: 2456875 - RNA, 21 nt, Human
uggugggaagcgucuguccgu

SEQ ID NO: 2456876 - RNA, 16 nt, Human
uggugggggccucggu

SEQ ID NO: 2456877 - RNA, 18 nt, Human
uggugggggccucggugu

SEQ ID NO: 2456878 - RNA, 23 nt, Human
ugguggggaggggcgcuggccca

SEQ ID NO: 2456879 - RNA, 22 nt, Human
ugguggggaggggcgcuggccc

SEQ ID NO: 2456880 - RNA, 21 nt, Human
ugguggggaggggcgcuggcc

SEQ ID NO: 2456881 - RNA, 20 nt, Human
ugguggggaggggcgcuggc

SEQ ID NO: 2456882 - RNA, 15 nt, Human
ugguggggaggggcg

SEQ ID NO: 2456883 - RNA, 13 nt, Human
ugguggggagggg

SEQ ID NO: 2456884 - RNA, 20 nt, Human
uggugggccaacaaagaaca

SEQ ID NO: 2456885 - RNA, 23 nt, Human
uggugggccaacaaagaacacua

SEQ ID NO: 2456886 - RNA, 22 nt, Human
uggugggaggggcgcccaccuc

SEQ ID NO: 2456887 - RNA, 21 nt, Human
uggugggaggggcgcccaccu

SEQ ID NO: 2456888 - RNA, 23 nt, Human
uggugggaggggcgcccaccucc

SEQ ID NO: 2456889 - RNA, 18 nt, Human
ugucucaagagggcacug

SEQ ID NO: 2456890 - RNA, 17 nt, Human
ugucucaagagggcacu

SEQ ID NO: 2456891 - RNA, 21 nt, Human
ugucucaaaaaaagaaaaaga

SEQ ID NO: 2456892 - RNA, 19 nt, Human
ugucuauucaaaauaucaa

SEQ ID NO: 2456893 - RNA, 18 nt, Human
ugucuauuaccuguuagu

SEQ ID NO: 2456894 - RNA, 13 nt, Human
ugucuauucagcu

SEQ ID NO: 2456895 - RNA, 14 nt, Human
ugucuauucagcuu

SEQ ID NO: 2456896 - RNA, 14 nt, Human
ugucuauuucugcu

SEQ ID NO: 2456897 - RNA, 13 nt, Human
ugucuauuucugc

SEQ ID NO: 2456898 - RNA, 14 nt, Human
ugucuauucuccag

SEQ ID NO: 2456899 - RNA, 18 nt, Human
ugucuauuucugcugaau

SEQ ID NO: 2456900 - RNA, 15 nt, Human
ugucuauuucugcug

SEQ ID NO: 2456901 - RNA, 17 nt, Human
ugucucacugaaacauu

SEQ ID NO: 2456902 - RNA, 13 nt, Human
ugucucagccucc

SEQ ID NO: 2456903 - RNA, 16 nt, Human
ugucucagccuccuga

SEQ ID NO: 2456904 - RNA, 14 nt, Human
ugucucagccuccc

SEQ ID NO: 2456905 - RNA, 15 nt, Human
ugucucagccuccca

SEQ ID NO: 2456906 - RNA, 16 nt, Human
ugucuaugggacucaa

SEQ ID NO: 2456907 - RNA, 15 nt, Human
ugucuaugggacuca

SEQ ID NO: 2456908 - RNA, 14 nt, Human
ugucuaugggacuc

SEQ ID NO: 2456909 - RNA, 22 nt, Human
ugucuauaaucccagcacuuug

SEQ ID NO: 2456910 - RNA, 23 nt, Human
ugucuaguuguuugauucagaca

SEQ ID NO: 2456911 - RNA, 15 nt, Human
ugucuaguuguuuga

SEQ ID NO: 2456912 - RNA, 14 nt, Human
ugucuagaguagcu

SEQ ID NO: 2456913 - RNA, 14 nt, Human
ugucuagagaggga

SEQ ID NO: 2456914 - RNA, 19 nt, Human
ugucuaggcaggaccugug

SEQ ID NO: 2456915 - RNA, 17 nt, Human
ugucuaggcaggaccug

SEQ ID NO: 2456916 - RNA, 16 nt, Human
ugucuguuuguucucu

SEQ ID NO: 2456917 - RNA, 23 nt, Human
ugucuguuaccaugucacugugg

SEQ ID NO: 2456918 - RNA, 15 nt, Human
ugucuguucuacaua

SEQ ID NO: 2456919 - RNA, 21 nt, Human
ugucuguucuacauagaugcu

SEQ ID NO: 2456920 - RNA, 22 nt, Human
ugucuuaaugaaguuugaaugu

SEQ ID NO: 2456921 - RNA, 21 nt, Human
ugucuuaaugaaguuugaaug

SEQ ID NO: 2456922 - RNA, 20 nt, Human
ugucuuaaugaaguuugaau

SEQ ID NO: 2456923 - RNA, 19 nt, Human
ugucuuaaugaaguuugaa

SEQ ID NO: 2456924 - RNA, 18 nt, Human
ugucuuaaugaaguuuga

SEQ ID NO: 2456925 - RNA, 15 nt, Human
ugucuuaaugaaguu

SEQ ID NO: 2456926 - RNA, 14 nt, Human
ugucuuaaugaagu

SEQ ID NO: 2456927 - RNA, 16 nt, Human
ugucuuuucuugcaug

SEQ ID NO: 2456928 - RNA, 19 nt, Human
ugucuuuguuggaaaagaa

SEQ ID NO: 2456929 - RNA, 23 nt, Human
ugucuuuggacccugaggcccag

SEQ ID NO: 2456930 - RNA, 12 nt, Human
ugucuuaauuaa

SEQ ID NO: 2456931 - RNA, 15 nt, Human
ugucugcacccaggg

SEQ ID NO: 2456932 - RNA, 19 nt, Human
ugucugucucuccaucugu

SEQ ID NO: 2456933 - RNA, 14 nt, Human
ugucugcacccagg

SEQ ID NO: 2456934 - RNA, 17 nt, Human
ugucuguuacacuggag

SEQ ID NO: 2456935 - RNA, 12 nt, Human
ugucuguuacac

SEQ ID NO: 2456936 - RNA, 11 nt, Human
ugucuguuaca

SEQ ID NO: 2456937 - RNA, 22 nt, Human
ugucuguuaccaugucacugug

SEQ ID NO: 2456938 - RNA, 19 nt, Human
ugucuguuaccaugucacu

SEQ ID NO: 2456939 - RNA, 13 nt, Human
ugucuguucuaca

SEQ ID NO: 2456940 - RNA, 21 nt, Human
ugucugugcuagggaaacuuc

SEQ ID NO: 2456941 - RNA, 11 nt, Human
ugucugugcua

SEQ ID NO: 2456942 - RNA, 21 nt, Human
ugucugugugcaagugugugc

SEQ ID NO: 2456943 - RNA, 12 nt, Human
ugucugugugca

SEQ ID NO: 2456944 - RNA, 17 nt, Human
ugucugagcccucaaag

SEQ ID NO: 2456945 - RNA, 16 nt, Human
ugucugagaugcuggu

SEQ ID NO: 2456946 - RNA, 18 nt, Human
ugucugagaguuuaguug

SEQ ID NO: 2456947 - RNA, 20 nt, Human
ugucugagcccucaaaguga

SEQ ID NO: 2456948 - RNA, 18 nt, Human
ugucugagcccucaaagu

SEQ ID NO: 2456949 - RNA, 14 nt, Human
ugucugagugaacc

SEQ ID NO: 2456950 - RNA, 15 nt, Human
ugucugagugaaccu

SEQ ID NO: 2456951 - RNA, 20 nt, Human
ugucugaagucacugcacag

SEQ ID NO: 2456952 - RNA, 16 nt, Human
ugucugcacccagggg

SEQ ID NO: 2456953 - RNA, 19 nt, Human
ugucugauuggcucaccca

SEQ ID NO: 2456954 - RNA, 23 nt, Human
ugucugaucugugcuuuccagcu

SEQ ID NO: 2456955 - RNA, 20 nt, Human
ugucugaucugugcuuucca

SEQ ID NO: 2456956 - RNA, 15 nt, Human
ugucugaucugugcu

SEQ ID NO: 2456957 - RNA, 16 nt, Human
ugucugaucugugcuu

SEQ ID NO: 2456958 - RNA, 17 nt, Human
ugucugagugaaccugu

SEQ ID NO: 2456959 - RNA, 20 nt, Human
ugucugagugaaccuguaua

SEQ ID NO: 2456960 - RNA, 21 nt, Human
ugucugagugaaccuguauaa

SEQ ID NO: 2456961 - RNA, 18 nt, Human
uguccugauggucagcuc

SEQ ID NO: 2456962 - RNA, 21 nt, Human
uguccugauggucagcucccu

SEQ ID NO: 2456963 - RNA, 20 nt, Human
uguccugauggucagcuccc

SEQ ID NO: 2456964 - RNA, 19 nt, Human
uguccugauggucagcucc

SEQ ID NO: 2456965 - RNA, 19 nt, Human
uguccugccugucugaagc

SEQ ID NO: 2456966 - RNA, 22 nt, Human
uguccugccuaaggcugaacuu

SEQ ID NO: 2456967 - RNA, 20 nt, Human
uguccugggagugagcuggu

SEQ ID NO: 2456968 - RNA, 19 nt, Human
uguccugggagugagcugg

SEQ ID NO: 2456969 - RNA, 12 nt, Human
uguccugcuggu

SEQ ID NO: 2456970 - RNA, 18 nt, Human
uguccugcuccacagugu

SEQ ID NO: 2456971 - RNA, 17 nt, Human
uguccugcuccacagug

SEQ ID NO: 2456972 - RNA, 16 nt, Human
uguccugcuccacagu

SEQ ID NO: 2456973 - RNA, 15 nt, Human
uguccugcuccacag

SEQ ID NO: 2456974 - RNA, 14 nt, Human
uguccugcuccaca

SEQ ID NO: 2456975 - RNA, 12 nt, Human
uguccugggagu

SEQ ID NO: 2456976 - RNA, 19 nt, Human
uguccuggugcucucugcc

SEQ ID NO: 2456977 - RNA, 16 nt, Human
uguccuggugcucucu

SEQ ID NO: 2456978 - RNA, 13 nt, Human
uguccuggugcuc

SEQ ID NO: 2456979 - RNA, 17 nt, Human
uguccugggcugguggc

SEQ ID NO: 2456980 - RNA, 13 nt, Human
uguccugggcugg

SEQ ID NO: 2456981 - RNA, 18 nt, Human
uguccugggcgcccugga

SEQ ID NO: 2456982 - RNA, 17 nt, Human
uguccugggcgcccugg

SEQ ID NO: 2456983 - RNA, 16 nt, Human
uguccugggcgcccug

SEQ ID NO: 2456984 - RNA, 14 nt, Human
uguccugggccugc

SEQ ID NO: 2456985 - RNA, 15 nt, Human
uguccugggccugca

SEQ ID NO: 2456986 - RNA, 11 nt, Human
uguccugggcg

SEQ ID NO: 2456987 - RNA, 10 nt, Human
uguccugggc

SEQ ID NO: 2456988 - RNA, 17 nt, Human
uguccugggccugcaga

SEQ ID NO: 2456989 - RNA, 18 nt, Human
ugucuaauguauuuuauu

SEQ ID NO: 2456990 - RNA, 17 nt, Human
ugucuaauguauuuuau

SEQ ID NO: 2456991 - RNA, 13 nt, Human
ugucuaauguauu

SEQ ID NO: 2456992 - RNA, 22 nt, Human
ugucuaaggucacacaguauua

SEQ ID NO: 2456993 - RNA, 20 nt, Human
uguccuggugcucucugcca

SEQ ID NO: 2456994 - RNA, 14 nt, Human
ugucuaaugaaacc

SEQ ID NO: 2456995 - RNA, 17 nt, Human
ugucuacacuaagagag

SEQ ID NO: 2456996 - RNA, 19 nt, Human
ugucuaauguauuuuauug

SEQ ID NO: 2456997 - RNA, 22 nt, Human
ugucuacacuaagagagaauga

SEQ ID NO: 2456998 - RNA, 19 nt, Human
ugucuacagagaaccugga

SEQ ID NO: 2456999 - RNA, 12 nt, Human
ugucuacagaga

SEQ ID NO: 2457000 - RNA, 22 nt, Human
uguccuaugggagucaagugug

SEQ ID NO: 2457001 - RNA, 14 nt, Human
uguccccucagcuc

SEQ ID NO: 2457002 - RNA, 13 nt, Human
uguccccucagcu

SEQ ID NO: 2457003 - RNA, 18 nt, Human
uguccccuccacugucac

SEQ ID NO: 2457004 - RNA, 20 nt, Human
uguccuaggaguauccucau

SEQ ID NO: 2457005 - RNA, 15 nt, Human
ugucaucucagugcu

SEQ ID NO: 2457006 - RNA, 13 nt, Human
uguccccuauccu

SEQ ID NO: 2457007 - RNA, 16 nt, Human
uguccccggccucagc

SEQ ID NO: 2457008 - RNA, 23 nt, Human
uguccccuauggggaugguccac

SEQ ID NO: 2457009 - RNA, 19 nt, Human
uguccccgcacugggcuug

SEQ ID NO: 2457010 - RNA, 17 nt, Human
uguccccgcacugggcu

SEQ ID NO: 2457011 - RNA, 13 nt, Human
ugucaucucagcu

SEQ ID NO: 2457012 - RNA, 23 nt, Human
uguccugaccacccuccccucuc

SEQ ID NO: 2457013 - RNA, 22 nt, Human
uguccugaccacccuccccucu

SEQ ID NO: 2457014 - RNA, 21 nt, Human
uguccugaccacccuccccuc

SEQ ID NO: 2457015 - RNA, 20 nt, Human
uguccugaccacccuccccu

SEQ ID NO: 2457016 - RNA, 19 nt, Human
uguccugaccacccucccc

SEQ ID NO: 2457017 - RNA, 17 nt, Human
uguccugaccacccucc

SEQ ID NO: 2457018 - RNA, 16 nt, Human
uguccugaccacccuc

SEQ ID NO: 2457019 - RNA, 22 nt, Human
uguccugacuucaggggcugcc

SEQ ID NO: 2457020 - RNA, 21 nt, Human
uguccugacuucaggggcugc

SEQ ID NO: 2457021 - RNA, 17 nt, Human
uguccugaccugucuca

SEQ ID NO: 2457022 - RNA, 22 nt, Human
uguccucccauccccuggacug

SEQ ID NO: 2457023 - RNA, 19 nt, Human
uguccucccauccccugga

SEQ ID NO: 2457024 - RNA, 18 nt, Human
uguccucccauccccugg

SEQ ID NO: 2457025 - RNA, 17 nt, Human
uguccucccauccccug

SEQ ID NO: 2457026 - RNA, 23 nt, Human
uguccucccauccccuggacugg

SEQ ID NO: 2457027 - RNA, 14 nt, Human
uguccuccccuugg

SEQ ID NO: 2457028 - RNA, 22 nt, Human
uguccuccagaagccucuggcu

SEQ ID NO: 2457029 - RNA, 23 nt, Human
uguccuccagaagccucuggcua

SEQ ID NO: 2457030 - RNA, 13 nt, Human
uguccucccaucc

SEQ ID NO: 2457031 - RNA, 22 nt, Human
uguccucacugcucccugaagc

SEQ ID NO: 2457032 - RNA, 19 nt, Human
uguccucacugcucccuga

SEQ ID NO: 2457033 - RNA, 14 nt, Human
uguccucagcagcu

SEQ ID NO: 2457034 - RNA, 15 nt, Human
uguccucacugcucc

SEQ ID NO: 2457035 - RNA, 14 nt, Human
uguccucacugcuc

SEQ ID NO: 2457036 - RNA, 22 nt, Human
uguccucacggugccuuuuuuc

SEQ ID NO: 2457037 - RNA, 20 nt, Human
uguccucacggugccuuuuu

SEQ ID NO: 2457038 - RNA, 14 nt, Human
uguccucaccacau

SEQ ID NO: 2457039 - RNA, 18 nt, Human
uguccuccagaagccucu

SEQ ID NO: 2457040 - RNA, 19 nt, Human
uguccuccagaagccucug

SEQ ID NO: 2457041 - RNA, 20 nt, Human
uguccuccagaagccucugg

SEQ ID NO: 2457042 - RNA, 21 nt, Human
uguccuccagaagccucuggc

SEQ ID NO: 2457043 - RNA, 16 nt, Human
uguccuccagaagccu

SEQ ID NO: 2457044 - RNA, 17 nt, Human
uguccuccagaagccuc

SEQ ID NO: 2457045 - RNA, 23 nt, Human
uguccuccaacaccaagcacagc

SEQ ID NO: 2457046 - RNA, 17 nt, Human
uguccuccaagccagcg

SEQ ID NO: 2457047 - RNA, 13 nt, Human
uguauaaaauaau

SEQ ID NO: 2457048 - RNA, 14 nt, Human
uguauaaaauaauu

SEQ ID NO: 2457049 - RNA, 16 nt, Human
uguauaaaaucagcca

SEQ ID NO: 2457050 - RNA, 14 nt, Human
uguauaaaaucagc

SEQ ID NO: 2457051 - RNA, 21 nt, Human
uguaguguuggagaagaacug

SEQ ID NO: 2457052 - RNA, 20 nt, Human
uguaguguuggagaagaacu

SEQ ID NO: 2457053 - RNA, 19 nt, Human
uguaguguuggagaagaac

SEQ ID NO: 2457054 - RNA, 23 nt, Human
uguaggaagaguagcauuucauu

SEQ ID NO: 2457055 - RNA, 21 nt, Human
uguaggaagaguagcauuuca

SEQ ID NO: 2457056 - RNA, 19 nt, Human
uguaggaagaguagcauuu

SEQ ID NO: 2457057 - RNA, 12 nt, Human
uguacagagccc

SEQ ID NO: 2457058 - RNA, 21 nt, Human
uguacagagcccacgccccca

SEQ ID NO: 2457059 - RNA, 22 nt, Human
uguacagcaaggagauuuacaa

SEQ ID NO: 2457060 - RNA, 12 nt, Human
uguagcuuugcu

SEQ ID NO: 2457061 - RNA, 13 nt, Human
uguagcuuugcuc

SEQ ID NO: 2457062 - RNA, 15 nt, Human
uguagcuuugcucuu

SEQ ID NO: 2457063 - RNA, 23 nt, Human
uguacagcaaggagauuuacaac

SEQ ID NO: 2457064 - RNA, 19 nt, Human
uguacagaugaaugauaaa

SEQ ID NO: 2457065 - RNA, 22 nt, Human
uguauaagauuagaaugaaaau

SEQ ID NO: 2457066 - RNA, 21 nt, Human
uguauaacuucuuaaaaguug

SEQ ID NO: 2457067 - RNA, 18 nt, Human
uguauaacuucuuaaaag

SEQ ID NO: 2457068 - RNA, 21 nt, Human
uguauaacagguuauuuuagu

SEQ ID NO: 2457069 - RNA, 17 nt, Human
uguauaacagguuauuu

SEQ ID NO: 2457070 - RNA, 15 nt, Human
uguauaacagguuau

SEQ ID NO: 2457071 - RNA, 14 nt, Human
uguauaacagguua

SEQ ID NO: 2457072 - RNA, 14 nt, Human
uguauaaauuuauu

SEQ ID NO: 2457073 - RNA, 23 nt, Human
uguauaaagcaacuguuaugaaa

SEQ ID NO: 2457074 - RNA, 19 nt, Human
uguauaaagcaacuguuau

SEQ ID NO: 2457075 - RNA, 14 nt, Human
uguauaaauaggag

SEQ ID NO: 2457076 - RNA, 13 nt, Human
uguauaaagaaca

SEQ ID NO: 2457077 - RNA, 21 nt, Human
uguauaaaucuuucuuuugau

SEQ ID NO: 2457078 - RNA, 18 nt, Human
uguauaaauaggagagga

SEQ ID NO: 2457079 - RNA, 18 nt, Human
uguauagaugcaagauau

SEQ ID NO: 2457080 - RNA, 16 nt, Human
uguauagguagauguu

SEQ ID NO: 2457081 - RNA, 15 nt, Human
uguauaguacuggca

SEQ ID NO: 2457082 - RNA, 23 nt, Human
uguauaguaaagugauaauuucu

SEQ ID NO: 2457083 - RNA, 20 nt, Human
uguauagaugcaagauauuu

SEQ ID NO: 2457084 - RNA, 19 nt, Human
uguauagaugcaagauauu

SEQ ID NO: 2457085 - RNA, 22 nt, Human
uguaucuugggggacagggcug

SEQ ID NO: 2457086 - RNA, 14 nt, Human
uguaugacuaaaga

SEQ ID NO: 2457087 - RNA, 15 nt, Human
uguaugacuaaagag

SEQ ID NO: 2457088 - RNA, 16 nt, Human
uguaugacugcacaug

SEQ ID NO: 2457089 - RNA, 16 nt, Human
uguaugacuaaagaga

SEQ ID NO: 2457090 - RNA, 20 nt, Human
uguaugacuaaagagagaau

SEQ ID NO: 2457091 - RNA, 17 nt, Human
uguaugacugcacauga

SEQ ID NO: 2457092 - RNA, 21 nt, Human
uguaugacuaaagagagaaug

SEQ ID NO: 2457093 - RNA, 22 nt, Human
uguaugaaagauggcugugccu

SEQ ID NO: 2457094 - RNA, 22 nt, Human
uguaucugcaggcagacacgga

SEQ ID NO: 2457095 - RNA, 21 nt, Human
uguaucugcaggcagacacgg

SEQ ID NO: 2457096 - RNA, 21 nt, Human
uguaucuugggggacagggcu

SEQ ID NO: 2457097 - RNA, 20 nt, Human
uguaucugauagcucuuugg

SEQ ID NO: 2457098 - RNA, 22 nt, Human
uguaucugaaggagauuuuccu

SEQ ID NO: 2457099 - RNA, 23 nt, Human
uguaucucugaagcauguuucau

SEQ ID NO: 2457100 - RNA, 18 nt, Human
uguaucugaaggagauuu

SEQ ID NO: 2457101 - RNA, 20 nt, Human
uguaucugcaggcagacacg

SEQ ID NO: 2457102 - RNA, 19 nt, Human
uguaucugcaggcagacac

SEQ ID NO: 2457103 - RNA, 18 nt, Human
uguaucugcaggcagaca

SEQ ID NO: 2457104 - RNA, 17 nt, Human
uguaucugcaggcagac

SEQ ID NO: 2457105 - RNA, 13 nt, Human
uguaucugagcag

SEQ ID NO: 2457106 - RNA, 22 nt, Human
uguaucucugaagcauguuuca

SEQ ID NO: 2457107 - RNA, 21 nt, Human
uguaucucugaagcauguuuc

SEQ ID NO: 2457108 - RNA, 19 nt, Human
uguaucucugaagcauguu

SEQ ID NO: 2457109 - RNA, 18 nt, Human
uguaucucugaagcaugu

SEQ ID NO: 2457110 - RNA, 17 nt, Human
uguaucucugaagcaug

SEQ ID NO: 2457111 - RNA, 19 nt, Human
uguaucuaugcauuuucug

SEQ ID NO: 2457112 - RNA, 21 nt, Human
uguauaguacuggcaugguac

SEQ ID NO: 2457113 - RNA, 19 nt, Human
uguauuuuaaaagaaugau

SEQ ID NO: 2457114 - RNA, 18 nt, Human
uguauuuuaaaagaauga

SEQ ID NO: 2457115 - RNA, 19 nt, Human
uguauuuuacuaauaaaau

SEQ ID NO: 2457116 - RNA, 15 nt, Human
uguauuuuaacucau

SEQ ID NO: 2457117 - RNA, 14 nt, Human
uguauuuuaacuca

SEQ ID NO: 2457118 - RNA, 15 nt, Human
uguauuuguuugcau

SEQ ID NO: 2457119 - RNA, 14 nt, Human
uguauuuguuugca

SEQ ID NO: 2457120 - RNA, 16 nt, Human
ugucaauuucuguguu

SEQ ID NO: 2457121 - RNA, 15 nt, Human
ugucaauuucugugu

SEQ ID NO: 2457122 - RNA, 23 nt, Human
ugucaauuucccugacuccucua

SEQ ID NO: 2457123 - RNA, 19 nt, Human
ugucaauuucccugacucc

SEQ ID NO: 2457124 - RNA, 21 nt, Human
ugucaauuacaggaaguacug

SEQ ID NO: 2457125 - RNA, 14 nt, Human
ugucacaggcaggu

SEQ ID NO: 2457126 - RNA, 13 nt, Human
ugucacacacuuu

SEQ ID NO: 2457127 - RNA, 14 nt, Human
ugucacaauccuaa

SEQ ID NO: 2457128 - RNA, 19 nt, Human
ugucacaauccuaacacau

SEQ ID NO: 2457129 - RNA, 21 nt, Human
ugucacaauccuaacacauua

SEQ ID NO: 2457130 - RNA, 13 nt, Human
uguaugcuucaua

SEQ ID NO: 2457131 - RNA, 14 nt, Human
uguaugcuucauac

SEQ ID NO: 2457132 - RNA, 16 nt, Human
uguaugcuucauacag

SEQ ID NO: 2457133 - RNA, 19 nt, Human
uguaugcuucauacaggga

SEQ ID NO: 2457134 - RNA, 23 nt, Human
uguaugccuuuaaaucugugaug

SEQ ID NO: 2457135 - RNA, 22 nt, Human
uguaugccuuuaaaucugugau

SEQ ID NO: 2457136 - RNA, 13 nt, Human
uguaugcgugugu

SEQ ID NO: 2457137 - RNA, 16 nt, Human
uguaugccaagugaga

SEQ ID NO: 2457138 - RNA, 18 nt, Human
uguaugccaagugagaag

SEQ ID NO: 2457139 - RNA, 21 nt, Human
uguaugccuuuaaaucuguga

SEQ ID NO: 2457140 - RNA, 12 nt, Human
uguaugccuuua

SEQ ID NO: 2457141 - RNA, 20 nt, Human
uguaugccaagugagaagau

SEQ ID NO: 2457142 - RNA, 15 nt, Human
uguaugggcaaaaaa

SEQ ID NO: 2457143 - RNA, 15 nt, Human
uguaugguucugugc

SEQ ID NO: 2457144 - RNA, 23 nt, Human
uguauggguguguguuuguguga

SEQ ID NO: 2457145 - RNA, 10 nt, Human
uguauguaaa

SEQ ID NO: 2457146 - RNA, 22 nt, Human
uguauguaaaugugcauucuuu

SEQ ID NO: 2457147 - RNA, 15 nt, Human
uguauguaaaugugc

SEQ ID NO: 2457148 - RNA, 14 nt, Human
uguauguaaaugug

SEQ ID NO: 2457149 - RNA, 21 nt, Human
uguauggauaguaaaauucua

SEQ ID NO: 2457150 - RNA, 16 nt, Human
uguauggauaguaaaa

SEQ ID NO: 2457151 - RNA, 14 nt, Human
uguaugggcaaaaa

SEQ ID NO: 2457152 - RNA, 17 nt, Human
uguauggagagaaaaca

SEQ ID NO: 2457153 - RNA, 18 nt, Human
uguauggaauacaguguu

SEQ ID NO: 2457154 - RNA, 19 nt, Human
uguauggaauacaguguua

SEQ ID NO: 2457155 - RNA, 23 nt, Human
uguauggaaauaaauguaucaua

SEQ ID NO: 2457156 - RNA, 16 nt, Human
uguauggaauacagug

SEQ ID NO: 2457157 - RNA, 17 nt, Human
uguauggaauacagugu

SEQ ID NO: 2457158 - RNA, 18 nt, Human
uguauggaaauaaaugua

SEQ ID NO: 2457159 - RNA, 12 nt, Human
uguaugcuggac

SEQ ID NO: 2457160 - RNA, 22 nt, Human
ugucaucauuguauauaugugu

SEQ ID NO: 2457161 - RNA, 19 nt, Human
ugucaucauuguauauaug

SEQ ID NO: 2457162 - RNA, 18 nt, Human
ugucaucauuguauauau

SEQ ID NO: 2457163 - RNA, 17 nt, Human
ugucacuuugcucuggg

SEQ ID NO: 2457164 - RNA, 16 nt, Human
ugucacuuugcucugg

SEQ ID NO: 2457165 - RNA, 19 nt, Human
ugucaucagaagauaacuu

SEQ ID NO: 2457166 - RNA, 18 nt, Human
ugucaucagccaccaucc

SEQ ID NO: 2457167 - RNA, 15 nt, Human
ugucaucagccacca

SEQ ID NO: 2457168 - RNA, 21 nt, Human
ugucaucagccaccauccuau

SEQ ID NO: 2457169 - RNA, 19 nt, Human
ugucagugugacugaucuc

SEQ ID NO: 2457170 - RNA, 16 nt, Human
ugucagugugacugau

SEQ ID NO: 2457171 - RNA, 14 nt, Human
ugucagugugacug

SEQ ID NO: 2457172 - RNA, 15 nt, Human
ugucagugugacuga

SEQ ID NO: 2457173 - RNA, 15 nt, Human
ugucacuuugcucug

SEQ ID NO: 2457174 - RNA, 14 nt, Human
ugucacuuugcucu

SEQ ID NO: 2457175 - RNA, 22 nt, Human
ugucacuucgcgugcccucgcu

SEQ ID NO: 2457176 - RNA, 13 nt, Human
ugucacuguuucu

SEQ ID NO: 2457177 - RNA, 17 nt, Human
ugucacuguuucucugc

SEQ ID NO: 2457178 - RNA, 21 nt, Human
ugucacuuacuguuucuguca

SEQ ID NO: 2457179 - RNA, 14 nt, Human
ugucacuuacuguu

SEQ ID NO: 2457180 - RNA, 18 nt, Human
ugucacuguuucucugcu

SEQ ID NO: 2457181 - RNA, 21 nt, Human
ugucacaggcagguccagggu

SEQ ID NO: 2457182 - RNA, 17 nt, Human
ugucacaggcaggucca

SEQ ID NO: 2457183 - RNA, 16 nt, Human
ugucacaggcaggucc

SEQ ID NO: 2457184 - RNA, 15 nt, Human
ugucacaggcagguc

SEQ ID NO: 2457185 - RNA, 22 nt, Human
ugucacuggcugccuccacucc

SEQ ID NO: 2457186 - RNA, 21 nt, Human
ugucacuggcugccuccacuc

SEQ ID NO: 2457187 - RNA, 19 nt, Human
ugucacuggcugccuccac

SEQ ID NO: 2457188 - RNA, 18 nt, Human
ugucacuggcugccucca

SEQ ID NO: 2457189 - RNA, 17 nt, Human
ugucacuggcugccucc

SEQ ID NO: 2457190 - RNA, 16 nt, Human
ugucacuggcugccuc

SEQ ID NO: 2457191 - RNA, 14 nt, Human
ugucacuggcugcc

SEQ ID NO: 2457192 - RNA, 13 nt, Human
ugucacuggcugc

SEQ ID NO: 2457193 - RNA, 23 nt, Human
ugucacugguagaccaaaauaaa

SEQ ID NO: 2457194 - RNA, 15 nt, Human
ugucacugugguccu

SEQ ID NO: 2457195 - RNA, 12 nt, Human
ugucacuguggu

SEQ ID NO: 2457196 - RNA, 21 nt, Human
ugucacugguagaccaaaaua

SEQ ID NO: 2457197 - RNA, 14 nt, Human
ugucacagggccaa

SEQ ID NO: 2457198 - RNA, 13 nt, Human
ugucacagggcca

SEQ ID NO: 2457199 - RNA, 12 nt, Human
ugucacagggcc

SEQ ID NO: 2457200 - RNA, 11 nt, Human
ugucacagggc

SEQ ID NO: 2457201 - RNA, 20 nt, Human
ugucacaugaaacauuugca

SEQ ID NO: 2457202 - RNA, 13 nt, Human
ugucacaggcagg

SEQ ID NO: 2457203 - RNA, 17 nt, Human
ugucacagggacugaaa

SEQ ID NO: 2457204 - RNA, 20 nt, Human
ugggauauaagaggcagcgu

SEQ ID NO: 2457205 - RNA, 19 nt, Human
ugggaucugccccucccug

SEQ ID NO: 2457206 - RNA, 23 nt, Human
ugggaucugccccucccugcuuc

SEQ ID NO: 2457207 - RNA, 19 nt, Human
ugggaugagaguuuuggau

SEQ ID NO: 2457208 - RNA, 13 nt, Human
ugggauaggaaaa

SEQ ID NO: 2457209 - RNA, 21 nt, Human
ugggauaggaaaaaugaguaa

SEQ ID NO: 2457210 - RNA, 16 nt, Human
ugggauacugcagggc

SEQ ID NO: 2457211 - RNA, 18 nt, Human
ugggaugauuggaggggg

SEQ ID NO: 2457212 - RNA, 16 nt, Human
ugggaugagccgcugu

SEQ ID NO: 2457213 - RNA, 14 nt, Human
ugggaugcuugccu

SEQ ID NO: 2457214 - RNA, 19 nt, Human
ugggaugcuugccuagggc

SEQ ID NO: 2457215 - RNA, 19 nt, Human
ugggaggagggagagggag

SEQ ID NO: 2457216 - RNA, 22 nt, Human
ugggaguugaucgccuuuccca

SEQ ID NO: 2457217 - RNA, 18 nt, Human
ugggaggagggagaggga

SEQ ID NO: 2457218 - RNA, 15 nt, Human
ugggaggagggagag

SEQ ID NO: 2457219 - RNA, 20 nt, Human
ugggaguuuuguauucaucu

SEQ ID NO: 2457220 - RNA, 23 nt, Human
ugggauaaagaugcaaggaccag

SEQ ID NO: 2457221 - RNA, 15 nt, Human
ugggacacccuguga

SEQ ID NO: 2457222 - RNA, 14 nt, Human
ugggacacccugug

SEQ ID NO: 2457223 - RNA, 21 nt, Human
ugggaaugaaugucaguguga

SEQ ID NO: 2457224 - RNA, 16 nt, Human
ugggaaugaaugucag

SEQ ID NO: 2457225 - RNA, 14 nt, Human
ugggacagggagga

SEQ ID NO: 2457226 - RNA, 20 nt, Human
ugggaaugaagcuuguguau

SEQ ID NO: 2457227 - RNA, 19 nt, Human
ugggaaugaagcuugugua

SEQ ID NO: 2457228 - RNA, 18 nt, Human
ugggaaugaagcuugugu

SEQ ID NO: 2457229 - RNA, 15 nt, Human
ugggaaugaagcuug

SEQ ID NO: 2457230 - RNA, 21 nt, Human
ugggaaugaagcuuguguauc

SEQ ID NO: 2457231 - RNA, 16 nt, Human
ugggaggaucucuuga

SEQ ID NO: 2457232 - RNA, 17 nt, Human
ugggcagagcagagacc

SEQ ID NO: 2457233 - RNA, 15 nt, Human
ugggcagagcagaga

SEQ ID NO: 2457234 - RNA, 14 nt, Human
ugggcagagcagag

SEQ ID NO: 2457235 - RNA, 16 nt, Human
ugggaugguggagggc

SEQ ID NO: 2457236 - RNA, 17 nt, Human
ugggaugguggagggcc

SEQ ID NO: 2457237 - RNA, 20 nt, Human
ugggaugcuugccuagggcc

SEQ ID NO: 2457238 - RNA, 13 nt, Human
ugggauggaggag

SEQ ID NO: 2457239 - RNA, 16 nt, Human
ugggauggaggagaag

SEQ ID NO: 2457240 - RNA, 14 nt, Human
ugggauggaggaga

SEQ ID NO: 2457241 - RNA, 13 nt, Human
ugggcagagcaga

SEQ ID NO: 2457242 - RNA, 16 nt, Human
ugggcagcauagcaag

SEQ ID NO: 2457243 - RNA, 18 nt, Human
ugggcagcauagcaagac

SEQ ID NO: 2457244 - RNA, 14 nt, Human
ugggcagccaggcu

SEQ ID NO: 2457245 - RNA, 15 nt, Human
ugggcagccaggcug

SEQ ID NO: 2457246 - RNA, 17 nt, Human
ugggcagcgcccuuccu

SEQ ID NO: 2457247 - RNA, 13 nt, Human
ugggcagcgcccu

SEQ ID NO: 2457248 - RNA, 16 nt, Human
ugggcagccaggcugc

SEQ ID NO: 2457249 - RNA, 22 nt, Human
ugggcaggacucagcuccccag

SEQ ID NO: 2457250 - RNA, 17 nt, Human
ugggcccugggcuggaa

SEQ ID NO: 2457251 - RNA, 16 nt, Human
ugggcccugggcugga

SEQ ID NO: 2457252 - RNA, 14 nt, Human
ugggcccugggcug

SEQ ID NO: 2457253 - RNA, 13 nt, Human
ugggccgcugcca

SEQ ID NO: 2457254 - RNA, 13 nt, Human
ugggcccuuugag

SEQ ID NO: 2457255 - RNA, 21 nt, Human
ugggccggcuucaugccagcu

SEQ ID NO: 2457256 - RNA, 14 nt, Human
ugggccgcugccac

SEQ ID NO: 2457257 - RNA, 16 nt, Human
ugggccucaaggacuu

SEQ ID NO: 2457258 - RNA, 22 nt, Human
ugggcagcuaccauuucccuuu

SEQ ID NO: 2457259 - RNA, 21 nt, Human
ugggcagcgcccuuccucucc

SEQ ID NO: 2457260 - RNA, 20 nt, Human
ugggcagcgcccuuccucuc

SEQ ID NO: 2457261 - RNA, 19 nt, Human
ugggcagcgcccuuccucu

SEQ ID NO: 2457262 - RNA, 19 nt, Human
ugggcagcucaucucuguc

SEQ ID NO: 2457263 - RNA, 10 nt, Human
ugggcagcuc

SEQ ID NO: 2457264 - RNA, 13 nt, Human
ugggcaggaaaag

SEQ ID NO: 2457265 - RNA, 23 nt, Human
ugggcaggaagugaagagauccu

SEQ ID NO: 2457266 - RNA, 13 nt, Human
ugggcaggaccuc

SEQ ID NO: 2457267 - RNA, 21 nt, Human
ugggcaggacucagcucccca

SEQ ID NO: 2457268 - RNA, 18 nt, Human
ugggcaggacucagcucc

SEQ ID NO: 2457269 - RNA, 17 nt, Human
ugggcaggacucagcuc

SEQ ID NO: 2457270 - RNA, 16 nt, Human
ugggcaggaccucaga

SEQ ID NO: 2457271 - RNA, 19 nt, Human
ugggguggguauaaaagau

SEQ ID NO: 2457272 - RNA, 15 nt, Human
ugggguggguauaaa

SEQ ID NO: 2457273 - RNA, 21 nt, Human
uggggggccaacaccagggau

SEQ ID NO: 2457274 - RNA, 15 nt, Human
uggggugugcuggga

SEQ ID NO: 2457275 - RNA, 13 nt, Human
uggggugugcugg

SEQ ID NO: 2457276 - RNA, 18 nt, Human
ugggguuaucucuguguu

SEQ ID NO: 2457277 - RNA, 15 nt, Human
uggggugugggaggc

SEQ ID NO: 2457278 - RNA, 19 nt, Human
ugggguuaucucuguguua

SEQ ID NO: 2457279 - RNA, 21 nt, Human
ugggguguguuccaacugccc

SEQ ID NO: 2457280 - RNA, 14 nt, Human
ugggguucagcccc

SEQ ID NO: 2457281 - RNA, 15 nt, Human
ugggguucagccccu

SEQ ID NO: 2457282 - RNA, 17 nt, Human
ugggguucagccccucc

SEQ ID NO: 2457283 - RNA, 19 nt, Human
ugggguucagccccuccuc

SEQ ID NO: 2457284 - RNA, 21 nt, Human
ugggguucagccccuccucug

SEQ ID NO: 2457285 - RNA, 22 nt, Human
ugggguucagccccuccucugc

SEQ ID NO: 2457286 - RNA, 14 nt, Human
ugggguucguggaa

SEQ ID NO: 2457287 - RNA, 16 nt, Human
ugggguugcaaccacu

SEQ ID NO: 2457288 - RNA, 20 nt, Human
ugggguucguggaaagggug

SEQ ID NO: 2457289 - RNA, 15 nt, Human
ugggggcuggugcca

SEQ ID NO: 2457290 - RNA, 13 nt, Human
ugggggcuggugc

SEQ ID NO: 2457291 - RNA, 16 nt, Human
ugggggcuggugccag

SEQ ID NO: 2457292 - RNA, 19 nt, Human
uggggggcugaggugggag

SEQ ID NO: 2457293 - RNA, 17 nt, Human
uggggggcuucauacac

SEQ ID NO: 2457294 - RNA, 15 nt, Human
uggggggccaacacc

SEQ ID NO: 2457295 - RNA, 17 nt, Human
uggggggccaacaccag

SEQ ID NO: 2457296 - RNA, 14 nt, Human
ugggggccuggauu

SEQ ID NO: 2457297 - RNA, 16 nt, Human
ugggggccucagugcc

SEQ ID NO: 2457298 - RNA, 13 nt, Human
ugggggccaugag

SEQ ID NO: 2457299 - RNA, 16 nt, Human
ugggggccaugagcuc

SEQ ID NO: 2457300 - RNA, 21 nt, Human
uggggccagauccagccuggg

SEQ ID NO: 2457301 - RNA, 18 nt, Human
ugggggcagagggcagag

SEQ ID NO: 2457302 - RNA, 17 nt, Human
ugggggcagggcaugac

SEQ ID NO: 2457303 - RNA, 22 nt, Human
ugggggcaggagggcccuaccu

SEQ ID NO: 2457304 - RNA, 17 nt, Human
ugggggcagagggcaga

SEQ ID NO: 2457305 - RNA, 19 nt, Human
uggggccagauccagccug

SEQ ID NO: 2457306 - RNA, 20 nt, Human
uggggccagauccagccugg

SEQ ID NO: 2457307 - RNA, 17 nt, Human
uggggccaggcuggguc

SEQ ID NO: 2457308 - RNA, 14 nt, Human
uggggccagaucca

SEQ ID NO: 2457309 - RNA, 15 nt, Human
uggggccagauccag

SEQ ID NO: 2457310 - RNA, 16 nt, Human
uggggccagauccagc

SEQ ID NO: 2457311 - RNA, 18 nt, Human
uggggccagauccagccu

SEQ ID NO: 2457312 - RNA, 17 nt, Human
uggggccacacagaaac

SEQ ID NO: 2457313 - RNA, 13 nt, Human
uggggccagaucc

SEQ ID NO: 2457314 - RNA, 14 nt, Human
uggggccacacaga

SEQ ID NO: 2457315 - RNA, 15 nt, Human
ugggcuucauccucc

SEQ ID NO: 2457316 - RNA, 15 nt, Human
ugggccugcuuccug

SEQ ID NO: 2457317 - RNA, 14 nt, Human
ugggccugcuuccu

SEQ ID NO: 2457318 - RNA, 13 nt, Human
ugggccugcuucc

SEQ ID NO: 2457319 - RNA, 22 nt, Human
ugggcuucauccuccucagauc

SEQ ID NO: 2457320 - RNA, 21 nt, Human
ugggcuucaguggcagcugcu

SEQ ID NO: 2457321 - RNA, 22 nt, Human
ugggcuucaguggcagcugcuu

SEQ ID NO: 2457322 - RNA, 16 nt, Human
ugggccugcuccagac

SEQ ID NO: 2457323 - RNA, 18 nt, Human
ugggccugcuccagaccu

SEQ ID NO: 2457324 - RNA, 19 nt, Human
ugggccugcuccagaccug

SEQ ID NO: 2457325 - RNA, 20 nt, Human
ugggccugcuccagaccuga

SEQ ID NO: 2457326 - RNA, 14 nt, Human
ugggccugcuccag

SEQ ID NO: 2457327 - RNA, 15 nt, Human
ugggccugcuccaga

SEQ ID NO: 2457328 - RNA, 13 nt, Human
ugggccugcagaa

SEQ ID NO: 2457329 - RNA, 21 nt, Human
ugggccucuuggaaaaaguga

SEQ ID NO: 2457330 - RNA, 21 nt, Human
ugggccucugguuuggggcga

SEQ ID NO: 2457331 - RNA, 16 nt, Human
ugggccucugguuugg

SEQ ID NO: 2457332 - RNA, 13 nt, Human
ugggccuccucac

SEQ ID NO: 2457333 - RNA, 20 nt, Human
ugggccuccucacaacaugg

SEQ ID NO: 2457334 - RNA, 23 nt, Human
ugggccucaaggacuugaaagca

SEQ ID NO: 2457335 - RNA, 23 nt, Human
ugggcuuggggaccagagcugcc

SEQ ID NO: 2457336 - RNA, 17 nt, Human
ugggcuugucuguagau

SEQ ID NO: 2457337 - RNA, 21 nt, Human
ugggcuugucuguagauuuua

SEQ ID NO: 2457338 - RNA, 22 nt, Human
ugggcuuggggaccagagcugc

SEQ ID NO: 2457339 - RNA, 17 nt, Human
ugggccugcuuccuguc

SEQ ID NO: 2457340 - RNA, 15 nt, Human
uggggauuucuccca

SEQ ID NO: 2457341 - RNA, 17 nt, Human
uggggauuucucccagc

SEQ ID NO: 2457342 - RNA, 13 nt, Human
uggggcagcuuga

SEQ ID NO: 2457343 - RNA, 18 nt, Human
uggggcagcacagagagg

SEQ ID NO: 2457344 - RNA, 16 nt, Human
uggggcagcacagaga

SEQ ID NO: 2457345 - RNA, 22 nt, Human
uggggcagcacagagagggggc

SEQ ID NO: 2457346 - RNA, 12 nt, Human
uggggcaaggcu

SEQ ID NO: 2457347 - RNA, 18 nt, Human
uggggcaagauuuuccuu

SEQ ID NO: 2457348 - RNA, 19 nt, Human
uggggcaagucccugacuc

SEQ ID NO: 2457349 - RNA, 14 nt, Human
uggggcagcacaga

SEQ ID NO: 2457350 - RNA, 13 nt, Human
uggggcagcacag

SEQ ID NO: 2457351 - RNA, 16 nt, Human
uggcugcugaaggcuc

SEQ ID NO: 2457352 - RNA, 14 nt, Human
uggcugcugaaggc

SEQ ID NO: 2457353 - RNA, 13 nt, Human
uggcugcugaagg

SEQ ID NO: 2457354 - RNA, 21 nt, Human
uggcugcugaagcugccugcu

SEQ ID NO: 2457355 - RNA, 15 nt, Human
uggcugcugaagcug

SEQ ID NO: 2457356 - RNA, 12 nt, Human
uggcugcugaag

SEQ ID NO: 2457357 - RNA, 18 nt, Human
uggcuccuaucuguguuu

SEQ ID NO: 2457358 - RNA, 11 nt, Human
uggcugcugaa

SEQ ID NO: 2457359 - RNA, 20 nt, Human
uggcucccggagggcccuga

SEQ ID NO: 2457360 - RNA, 21 nt, Human
uggcuccccucuauuuagcau

SEQ ID NO: 2457361 - RNA, 19 nt, Human
uggcuccgaacacccucga

SEQ ID NO: 2457362 - RNA, 16 nt, Human
uggcuccuaucugugu

SEQ ID NO: 2457363 - RNA, 14 nt, Human
uggcucccucuugg

SEQ ID NO: 2457364 - RNA, 13 nt, Human
uggcuccccucua

SEQ ID NO: 2457365 - RNA, 14 nt, Human
uggcuccccucuau

SEQ ID NO: 2457366 - RNA, 18 nt, Human
uggcucccauucacucuu

SEQ ID NO: 2457367 - RNA, 17 nt, Human
uggcucccauucacucu

SEQ ID NO: 2457368 - RNA, 23 nt, Human
uggcucccaugaccauacugagg

SEQ ID NO: 2457369 - RNA, 23 nt, Human
uggcuccccucuauuuagcauga

SEQ ID NO: 2457370 - RNA, 20 nt, Human
uggcuccagaugcagggcag

SEQ ID NO: 2457371 - RNA, 21 nt, Human
uggcuccagaugcagggcagu

SEQ ID NO: 2457372 - RNA, 20 nt, Human
uggcuccagaaaugucuaaa

SEQ ID NO: 2457373 - RNA, 15 nt, Human
uggcuccagaaaugu

SEQ ID NO: 2457374 - RNA, 21 nt, Human
uggcuccagcaccauccgcca

SEQ ID NO: 2457375 - RNA, 13 nt, Human
uggcuccagcacc

SEQ ID NO: 2457376 - RNA, 23 nt, Human
uggcuccagaugcagggcaguca

SEQ ID NO: 2457377 - RNA, 17 nt, Human
uggcuccagcuggccgg

SEQ ID NO: 2457378 - RNA, 20 nt, Human
uggcucccaugaccauacug

SEQ ID NO: 2457379 - RNA, 19 nt, Human
uggcuccagucugcugccc

SEQ ID NO: 2457380 - RNA, 20 nt, Human
uggcuccagucugcugcccu

SEQ ID NO: 2457381 - RNA, 23 nt, Human
uggcuccagucugcugcccucca

SEQ ID NO: 2457382 - RNA, 15 nt, Human
uggcuccaggccagg

SEQ ID NO: 2457383 - RNA, 15 nt, Human
uggcuccagucugcu

SEQ ID NO: 2457384 - RNA, 22 nt, Human
uggccuucggccuccauccuga

SEQ ID NO: 2457385 - RNA, 20 nt, Human
uggccuucggccuccauccu

SEQ ID NO: 2457386 - RNA, 23 nt, Human
uggccuucggccuccauccugag

SEQ ID NO: 2457387 - RNA, 13 nt, Human
uggccucugcacu

SEQ ID NO: 2457388 - RNA, 18 nt, Human
uggccucugcaaaggaaa

SEQ ID NO: 2457389 - RNA, 18 nt, Human
uggccuugaaaccaccuu

SEQ ID NO: 2457390 - RNA, 21 nt, Human
uggcuucccgcucagcccucc

SEQ ID NO: 2457391 - RNA, 20 nt, Human
uggcuucccgcucagcccuc

SEQ ID NO: 2457392 - RNA, 19 nt, Human
uggcuucccgcucagcccu

SEQ ID NO: 2457393 - RNA, 18 nt, Human
uggcuucccgcucagccc

SEQ ID NO: 2457394 - RNA, 15 nt, Human
uggcugggcccagaa

SEQ ID NO: 2457395 - RNA, 17 nt, Human
uggcuugccacagcucu

SEQ ID NO: 2457396 - RNA, 22 nt, Human
uggcuucccgcucagcccuccc

SEQ ID NO: 2457397 - RNA, 22 nt, Human
uggcuuccuaaaauucagugga

SEQ ID NO: 2457398 - RNA, 17 nt, Human
uggcugggaacugcaga

SEQ ID NO: 2457399 - RNA, 23 nt, Human
uggcugggaacucaccuggggcu

SEQ ID NO: 2457400 - RNA, 15 nt, Human
uggcugggaacucac

SEQ ID NO: 2457401 - RNA, 15 nt, Human
uggcugggacguggc

SEQ ID NO: 2457402 - RNA, 19 nt, Human
uggcugggacguggcucag

SEQ ID NO: 2457403 - RNA, 23 nt, Human
uggcugggacguggcucagccag

SEQ ID NO: 2457404 - RNA, 21 nt, Human
uggcugggaacugcagaccug

SEQ ID NO: 2457405 - RNA, 12 nt, Human
uggcugggccca

SEQ ID NO: 2457406 - RNA, 12 nt, Human
uggcugggcaug

SEQ ID NO: 2457407 - RNA, 21 nt, Human
uggcuggccuuccacuuggcu

SEQ ID NO: 2457408 - RNA, 22 nt, Human
uggcuggcuaacuggaagcaug

SEQ ID NO: 2457409 - RNA, 22 nt, Human
uggcugcugaagcugccugcuu

SEQ ID NO: 2457410 - RNA, 22 nt, Human
uggcuggaugaaauuuucuaga

SEQ ID NO: 2457411 - RNA, 15 nt, Human
uggcuggccacugca

SEQ ID NO: 2457412 - RNA, 17 nt, Human
uggcuggcccgucaugu

SEQ ID NO: 2457413 - RNA, 13 nt, Human
uggcuggcugcag

SEQ ID NO: 2457414 - RNA, 14 nt, Human
uggcuggcugcagu

SEQ ID NO: 2457415 - RNA, 17 nt, Human
uggcuuguaacuccacc

SEQ ID NO: 2457416 - RNA, 19 nt, Human
uggcuuguguguuucacuu

SEQ ID NO: 2457417 - RNA, 20 nt, Human
uggcuuguguguuucacuuu

SEQ ID NO: 2457418 - RNA, 16 nt, Human
uggcuuuucacugcug

SEQ ID NO: 2457419 - RNA, 24 nt, Human
uggcuuguaucaacacuguuacuu

SEQ ID NO: 2457420 - RNA, 18 nt, Human
uggcuuguguguuucacu

SEQ ID NO: 2457421 - RNA, 16 nt, Human
uggcuuguguguuuca

SEQ ID NO: 2457422 - RNA, 14 nt, Human
uggcuuguguguuu

SEQ ID NO: 2457423 - RNA, 22 nt, Human
uggcuuuucacugcuggcugcc

SEQ ID NO: 2457424 - RNA, 21 nt, Human
uggcuuuucacugcuggcugc

SEQ ID NO: 2457425 - RNA, 19 nt, Human
uggcuuuucacugcuggcu

SEQ ID NO: 2457426 - RNA, 18 nt, Human
uggcuuuucacugcuggc

SEQ ID NO: 2457427 - RNA, 14 nt, Human
ugggaaugaagcaa

SEQ ID NO: 2457428 - RNA, 14 nt, Human
ugggaaugaagcuu

SEQ ID NO: 2457429 - RNA, 13 nt, Human
ugggaaugaagcu

SEQ ID NO: 2457430 - RNA, 12 nt, Human
ugggaaugaagc

SEQ ID NO: 2457431 - RNA, 14 nt, Human
ugggaaucaagauu

SEQ ID NO: 2457432 - RNA, 15 nt, Human
uggcuuuucacugcu

SEQ ID NO: 2457433 - RNA, 18 nt, Human
uggccuccucccuuagcu

SEQ ID NO: 2457434 - RNA, 21 nt, Human
uggccuccggcgucagccucc

SEQ ID NO: 2457435 - RNA, 20 nt, Human
uggccuccggcgucagccuc

SEQ ID NO: 2457436 - RNA, 19 nt, Human
uggccuccggcgucagccu

SEQ ID NO: 2457437 - RNA, 19 nt, Human
uggccuccucccuuagcuc

SEQ ID NO: 2457438 - RNA, 20 nt, Human
uggccucccaaaugagccau

SEQ ID NO: 2457439 - RNA, 16 nt, Human
uggccuccccugcuga

SEQ ID NO: 2457440 - RNA, 18 nt, Human
uggccuccggccuccccu

SEQ ID NO: 2457441 - RNA, 15 nt, Human
uggccuccggccucc

SEQ ID NO: 2457442 - RNA, 12 nt, Human
uggccuccggcc

SEQ ID NO: 2457443 - RNA, 23 nt, Human
uggccucgggacaccugcccugc

SEQ ID NO: 2457444 - RNA, 17 nt, Human
uggccucgccuggccug

SEQ ID NO: 2457445 - RNA, 16 nt, Human
uggccucgccuggccu

SEQ ID NO: 2457446 - RNA, 15 nt, Human
uggccucgccuggcc

SEQ ID NO: 2457447 - RNA, 14 nt, Human
uggccucgccuggc

SEQ ID NO: 2457448 - RNA, 21 nt, Human
uggccucuccuuguggccugg

SEQ ID NO: 2457449 - RNA, 19 nt, Human
uggccucgggacaccugcc

SEQ ID NO: 2457450 - RNA, 22 nt, Human
uggccucccaacucaccccagc

SEQ ID NO: 2457451 - RNA, 21 nt, Human
uggccucccaacucaccccag

SEQ ID NO: 2457452 - RNA, 20 nt, Human
uggccucccaacucacccca

SEQ ID NO: 2457453 - RNA, 19 nt, Human
uggccucccaacucacccc

SEQ ID NO: 2457454 - RNA, 23 nt, Human
uggccuagcauacguacacauuu

SEQ ID NO: 2457455 - RNA, 13 nt, Human
uggccucaagauc

SEQ ID NO: 2457456 - RNA, 21 nt, Human
uggccucaacccucccucagc

SEQ ID NO: 2457457 - RNA, 22 nt, Human
uggccucaacccucccucagcc

SEQ ID NO: 2457458 - RNA, 23 nt, Human
uggccucaagugauucuccugcc

SEQ ID NO: 2457459 - RNA, 18 nt, Human
uggccucaagugauucuc

SEQ ID NO: 2457460 - RNA, 14 nt, Human
uggccucccaacuc

SEQ ID NO: 2457461 - RNA, 11 nt, Human
uggccucccaa

SEQ ID NO: 2457462 - RNA, 22 nt, Human
uggccucaagaucaaugaaaug

SEQ ID NO: 2457463 - RNA, 21 nt, Human
uggccucaagaucaaugaaau

SEQ ID NO: 2457464 - RNA, 23 nt, Human
uggccucaacccucccucagccc

SEQ ID NO: 2457465 - RNA, 17 nt, Human
uggccucagaauucaca

SEQ ID NO: 2457466 - RNA, 21 nt, Human
uggccuccacaguucgaccug

SEQ ID NO: 2457467 - RNA, 18 nt, Human
uggccccucugaccugca

SEQ ID NO: 2457468 - RNA, 16 nt, Human
uggccccucugaccug

SEQ ID NO: 2457469 - RNA, 14 nt, Human
uggccccugaacaa

SEQ ID NO: 2457470 - RNA, 20 nt, Human
uggccccugaacaagaauug

SEQ ID NO: 2457471 - RNA, 14 nt, Human
uggccccugagauc

SEQ ID NO: 2457472 - RNA, 20 nt, Human
uggccuagcauacguacaca

SEQ ID NO: 2457473 - RNA, 22 nt, Human
uggccccucagggucccuggug

SEQ ID NO: 2457474 - RNA, 21 nt, Human
uggccccucagggucccuggu

SEQ ID NO: 2457475 - RNA, 14 nt, Human
uggccccucugacc

SEQ ID NO: 2457476 - RNA, 13 nt, Human
uggccccucugac

SEQ ID NO: 2457477 - RNA, 12 nt, Human
uggccccucuga

SEQ ID NO: 2457478 - RNA, 10 nt, Human
uggccccucu

SEQ ID NO: 2457479 - RNA, 13 nt, Human
uggccccucaccu

SEQ ID NO: 2457480 - RNA, 23 nt, Human
uggccccaugucucucagaauuc

SEQ ID NO: 2457481 - RNA, 19 nt, Human
uggccccaugucucucaga

SEQ ID NO: 2457482 - RNA, 21 nt, Human
uggccccaugucucucagaau

SEQ ID NO: 2457483 - RNA, 19 nt, Human
uggccccucccccugccag

SEQ ID NO: 2457484 - RNA, 16 nt, Human
uggccccucaccuggg

SEQ ID NO: 2457485 - RNA, 21 nt, Human
uggccccucaccugggcaccu

SEQ ID NO: 2457486 - RNA, 20 nt, Human
uggccccagccuggcccagc

SEQ ID NO: 2457487 - RNA, 19 nt, Human
uggccccagccuggcccag

SEQ ID NO: 2457488 - RNA, 18 nt, Human
uggccccagccuggccca

SEQ ID NO: 2457489 - RNA, 17 nt, Human
uggccccagccuggccc

SEQ ID NO: 2457490 - RNA, 16 nt, Human
uggccccagccuggcc

SEQ ID NO: 2457491 - RNA, 13 nt, Human
uggccccagccug

SEQ ID NO: 2457492 - RNA, 12 nt, Human
uggccccagccu

SEQ ID NO: 2457493 - RNA, 17 nt, Human
uggcagcucuccaguca

SEQ ID NO: 2457494 - RNA, 22 nt, Human
uggccccagccuggcccagcuc

SEQ ID NO: 2457495 - RNA, 21 nt, Human
uggccccagccuggcccagcu

SEQ ID NO: 2457496 - RNA, 12 nt, Human
uggccccaggac

SEQ ID NO: 2457497 - RNA, 15 nt, Human
uggccccaggaccug

SEQ ID NO: 2457498 - RNA, 20 nt, Human
uggccccaggaccuggcugc

SEQ ID NO: 2457499 - RNA, 20 nt, Human
uggccccucagggucccugg

SEQ ID NO: 2457500 - RNA, 13 nt, Human
uggccccucaggg

SEQ ID NO: 2457501 - RNA, 19 nt, Human
uggccccagcacagcuuga

SEQ ID NO: 2457502 - RNA, 18 nt, Human
uggccccagcacagcuug

SEQ ID NO: 2457503 - RNA, 17 nt, Human
uggccccagcacagcuu

SEQ ID NO: 2457504 - RNA, 14 nt, Human
uggccccagcacag

SEQ ID NO: 2457505 - RNA, 13 nt, Human
uggccccagcaca

SEQ ID NO: 2457506 - RNA, 19 nt, Human
uggcagcugcgguccaccc

SEQ ID NO: 2457507 - RNA, 17 nt, Human
uggcagcugcgguccac

SEQ ID NO: 2457508 - RNA, 11 nt, Human
uggcagcucug

SEQ ID NO: 2457509 - RNA, 21 nt, Human
uggcagcucuggacagcccca

SEQ ID NO: 2457510 - RNA, 22 nt, Human
uggcagcucuggacagccccac

SEQ ID NO: 2457511 - RNA, 16 nt, Human
uggcagcugccacgcc

SEQ ID NO: 2457512 - RNA, 18 nt, Human
uggaacuucuaauauauu

SEQ ID NO: 2457513 - RNA, 16 nt, Human
uggaacuucuaauaua

SEQ ID NO: 2457514 - RNA, 15 nt, Human
uggaacuucuaauau

SEQ ID NO: 2457515 - RNA, 14 nt, Human
uggaacuucuaaua

SEQ ID NO: 2457516 - RNA, 15 nt, Human
uggaaccuccuuucu

SEQ ID NO: 2457517 - RNA, 13 nt, Human
uggaaccuccuuu

SEQ ID NO: 2457518 - RNA, 13 nt, Human
uggaacuucuaau

SEQ ID NO: 2457519 - RNA, 21 nt, Human
uggaacuucuaauauauuuuu

SEQ ID NO: 2457520 - RNA, 17 nt, Human
uggaaccucagccuggc

SEQ ID NO: 2457521 - RNA, 18 nt, Human
uggaaccucagccuggcc

SEQ ID NO: 2457522 - RNA, 19 nt, Human
uggaaccucagccuggcca

SEQ ID NO: 2457523 - RNA, 21 nt, Human
uggaaccuccuuucucuucuc

SEQ ID NO: 2457524 - RNA, 23 nt, Human
uggaaccucagccuggccagaca

SEQ ID NO: 2457525 - RNA, 12 nt, Human
uggaaccuccuu

SEQ ID NO: 2457526 - RNA, 20 nt, Human
uggaacagauucacacuguc

SEQ ID NO: 2457527 - RNA, 19 nt, Human
uggaacagauucacacugu

SEQ ID NO: 2457528 - RNA, 21 nt, Human
uggaacagaauguuuuacugu

SEQ ID NO: 2457529 - RNA, 16 nt, Human
uggaaacugaaugcuc

SEQ ID NO: 2457530 - RNA, 23 nt, Human
uggaacagauucacacugucugg

SEQ ID NO: 2457531 - RNA, 15 nt, Human
uggaaacugaaugcu

SEQ ID NO: 2457532 - RNA, 14 nt, Human
uggaaacugaaugc

SEQ ID NO: 2457533 - RNA, 16 nt, Human
uggaacagaauguuuu

SEQ ID NO: 2457534 - RNA, 17 nt, Human
uggaacacucugagacu

SEQ ID NO: 2457535 - RNA, 15 nt, Human
uggaacacucugaga

SEQ ID NO: 2457536 - RNA, 24 nt, Human
uggaaaccugcccugccugagggc

SEQ ID NO: 2457537 - RNA, 22 nt, Human
uggaaaccugcccugccugagg

SEQ ID NO: 2457538 - RNA, 12 nt, Human
uggaaacugaau

SEQ ID NO: 2457539 - RNA, 19 nt, Human
uggaaacucuuuaacuucu

SEQ ID NO: 2457540 - RNA, 18 nt, Human
uggaaacucuuuaacuuc

SEQ ID NO: 2457541 - RNA, 22 nt, Human
uggaaaaguauguuagugcaaa

SEQ ID NO: 2457542 - RNA, 19 nt, Human
uggaaaagggucuugggaa

SEQ ID NO: 2457543 - RNA, 20 nt, Human
uggaaaaggaagacuagagg

SEQ ID NO: 2457544 - RNA, 22 nt, Human
uggaaaaggaagacuagaggcu

SEQ ID NO: 2457545 - RNA, 16 nt, Human
uggaaaagaggaguuu

SEQ ID NO: 2457546 - RNA, 15 nt, Human
uggaaaaggaagacu

SEQ ID NO: 2457547 - RNA, 16 nt, Human
uggaaaaggaagacua

SEQ ID NO: 2457548 - RNA, 18 nt, Human
uggaaaaggaagacuaga

SEQ ID NO: 2457549 - RNA, 21 nt, Human
uggaaaccugcccugccugag

SEQ ID NO: 2457550 - RNA, 20 nt, Human
uggaaaccugcccugccuga

SEQ ID NO: 2457551 - RNA, 19 nt, Human
uggaaaccugcccugccug

SEQ ID NO: 2457552 - RNA, 17 nt, Human
uggaaaccugcccugcc

SEQ ID NO: 2457553 - RNA, 16 nt, Human
uggaaaccugcccugc

SEQ ID NO: 2457554 - RNA, 15 nt, Human
uggaaaccugcccug

SEQ ID NO: 2457555 - RNA, 14 nt, Human
uggaaaccugcccu

SEQ ID NO: 2457556 - RNA, 17 nt, Human
uggaaaccugaaaaaaa

SEQ ID NO: 2457557 - RNA, 12 nt, Human
uggaaaccacag

SEQ ID NO: 2457558 - RNA, 22 nt, Human
uggaaaagggucuugggaaaua

SEQ ID NO: 2457559 - RNA, 21 nt, Human
uggaaaagggucuugggaaau

SEQ ID NO: 2457560 - RNA, 21 nt, Human
uggaaacccuuaggacagggu

SEQ ID NO: 2457561 - RNA, 15 nt, Human
uggaaaccugaaaaa

SEQ ID NO: 2457562 - RNA, 12 nt, Human
ugcuuguguuau

SEQ ID NO: 2457563 - RNA, 16 nt, Human
ugcuuguuaacugagu

SEQ ID NO: 2457564 - RNA, 15 nt, Human
ugcuuguguuaagua

SEQ ID NO: 2457565 - RNA, 14 nt, Human
ugcuuguuaacuga

SEQ ID NO: 2457566 - RNA, 20 nt, Human
ugcuuucgucuccagccccu

SEQ ID NO: 2457567 - RNA, 20 nt, Human
ugcuuuccguggcacugcau

SEQ ID NO: 2457568 - RNA, 21 nt, Human
ugcuuuccguggcacugcaua

SEQ ID NO: 2457569 - RNA, 15 nt, Human
ugcuuuccccugugg

SEQ ID NO: 2457570 - RNA, 14 nt, Human
ugcuuuccccugug

SEQ ID NO: 2457571 - RNA, 13 nt, Human
ugcuuuccccugu

SEQ ID NO: 2457572 - RNA, 16 nt, Human
ugcuuucccugaacug

SEQ ID NO: 2457573 - RNA, 20 nt, Human
ugcuuuccccuguggggauc

SEQ ID NO: 2457574 - RNA, 17 nt, Human
ugcuuuccguggcacug

SEQ ID NO: 2457575 - RNA, 22 nt, Human
ugcuucuguuuuauaauuuugu

SEQ ID NO: 2457576 - RNA, 13 nt, Human
ugcuucuucagag

SEQ ID NO: 2457577 - RNA, 18 nt, Human
ugcuugugaaaggaaaga

SEQ ID NO: 2457578 - RNA, 12 nt, Human
ugcuuguguuaa

SEQ ID NO: 2457579 - RNA, 19 nt, Human
ugcuucuuaaccccaguaa

SEQ ID NO: 2457580 - RNA, 17 nt, Human
ugcuucuuaaccccagu

SEQ ID NO: 2457581 - RNA, 17 nt, Human
ugcuuuggaaaacccag

SEQ ID NO: 2457582 - RNA, 14 nt, Human
ugcuuugcccagca

SEQ ID NO: 2457583 - RNA, 13 nt, Human
ugcuuugcuuucu

SEQ ID NO: 2457584 - RNA, 16 nt, Human
uggaaaagccaagagg

SEQ ID NO: 2457585 - RNA, 19 nt, Human
uggaaaagccaagaggcug

SEQ ID NO: 2457586 - RNA, 19 nt, Human
ugcuuugcuuucugcucag

SEQ ID NO: 2457587 - RNA, 14 nt, Human
ugcuuugcuuucug

SEQ ID NO: 2457588 - RNA, 14 nt, Human
uggaaaagaauaca

SEQ ID NO: 2457589 - RNA, 19 nt, Human
uggaaaagaauacagaaag

SEQ ID NO: 2457590 - RNA, 20 nt, Human
ugcuuugacugagcagacug

SEQ ID NO: 2457591 - RNA, 22 nt, Human
ugcuuugacugagcagacuggu

SEQ ID NO: 2457592 - RNA, 22 nt, Human
ugcuuugacucaccuguuacuu

SEQ ID NO: 2457593 - RNA, 13 nt, Human
ugcuuugcccagc

SEQ ID NO: 2457594 - RNA, 15 nt, Human
ugcuuugccccugag

SEQ ID NO: 2457595 - RNA, 18 nt, Human
ugcuuucuccauuguaaa

SEQ ID NO: 2457596 - RNA, 18 nt, Human
ugcuuucuauuguacaga

SEQ ID NO: 2457597 - RNA, 13 nt, Human
ugcuuucuauugu

SEQ ID NO: 2457598 - RNA, 12 nt, Human
ugcuuucuauug

SEQ ID NO: 2457599 - RNA, 18 nt, Human
ugcuuucgaacugcuagu

SEQ ID NO: 2457600 - RNA, 12 nt, Human
ugcuuucugaaa

SEQ ID NO: 2457601 - RNA, 13 nt, Human
ugcuuucugaaau

SEQ ID NO: 2457602 - RNA, 16 nt, Human
ugcuguuuuguucugu

SEQ ID NO: 2457603 - RNA, 15 nt, Human
ugcuguuuuguucug

SEQ ID NO: 2457604 - RNA, 18 nt, Human
ugcuuaaaaaucauugau

SEQ ID NO: 2457605 - RNA, 18 nt, Human
ugcuguuuuguucugugg

SEQ ID NO: 2457606 - RNA, 17 nt, Human
ugcuuaaaaaucauuga

SEQ ID NO: 2457607 - RNA, 19 nt, Human
ugcuuaaaaaucauugauu

SEQ ID NO: 2457608 - RNA, 16 nt, Human
ugcuguuuuccucccu

SEQ ID NO: 2457609 - RNA, 17 nt, Human
ugcuguuuuccucccuu

SEQ ID NO: 2457610 - RNA, 19 nt, Human
ugcuguuuuccucccuucu

SEQ ID NO: 2457611 - RNA, 21 nt, Human
ugcuguuuuccucccuucugc

SEQ ID NO: 2457612 - RNA, 18 nt, Human
ugcuguuuugauuuguac

SEQ ID NO: 2457613 - RNA, 22 nt, Human
ugcuguuuuccucccuucugcu

SEQ ID NO: 2457614 - RNA, 14 nt, Human
ugcuguuuuccucc

SEQ ID NO: 2457615 - RNA, 15 nt, Human
ugcuguuuuccuccc

SEQ ID NO: 2457616 - RNA, 19 nt, Human
ugcuguuuguuugacaaag

SEQ ID NO: 2457617 - RNA, 14 nt, Human
ugccugucccucuc

SEQ ID NO: 2457618 - RNA, 11 nt, Human
ugccugucccu

SEQ ID NO: 2457619 - RNA, 19 nt, Human
ugccugucccacccccacc

SEQ ID NO: 2457620 - RNA, 16 nt, Human
ugccugucccaccccc

SEQ ID NO: 2457621 - RNA, 19 nt, Human
ugccuguccagccugggca

SEQ ID NO: 2457622 - RNA, 20 nt, Human
ugccuguccagccugggcag

SEQ ID NO: 2457623 - RNA, 23 nt, Human
ugccuguaguuaggaaauaaaac

SEQ ID NO: 2457624 - RNA, 15 nt, Human
ugccuguccagccug

SEQ ID NO: 2457625 - RNA, 16 nt, Human
ugccuguccagccugg

SEQ ID NO: 2457626 - RNA, 18 nt, Human
ugccuguccagccugggc

SEQ ID NO: 2457627 - RNA, 13 nt, Human
ugcuuaacuucac

SEQ ID NO: 2457628 - RNA, 14 nt, Human
ugcuuaacuucaca

SEQ ID NO: 2457629 - RNA, 17 nt, Human
ugcuuaacuucacauau

SEQ ID NO: 2457630 - RNA, 18 nt, Human
ugcuuaacuucacauauu

SEQ ID NO: 2457631 - RNA, 16 nt, Human
ugcuuaagcagaagca

SEQ ID NO: 2457632 - RNA, 19 nt, Human
ugcuuaacuucacauauug

SEQ ID NO: 2457633 - RNA, 12 nt, Human
ugcuuaaugaaa

SEQ ID NO: 2457634 - RNA, 14 nt, Human
ugcuuaaugaaaag

SEQ ID NO: 2457635 - RNA, 15 nt, Human
ugcuuccuccuggaa

SEQ ID NO: 2457636 - RNA, 14 nt, Human
ugcuuccuccugga

SEQ ID NO: 2457637 - RNA, 13 nt, Human
ugcuucgggcccu

SEQ ID NO: 2457638 - RNA, 12 nt, Human
ugcuucucacug

SEQ ID NO: 2457639 - RNA, 13 nt, Human
ugcuuccuccugg

SEQ ID NO: 2457640 - RNA, 12 nt, Human
ugcuuccuccug

SEQ ID NO: 2457641 - RNA, 22 nt, Human
ugcuuccuagaaguuacugaau

SEQ ID NO: 2457642 - RNA, 21 nt, Human
ugcuuccuagaaguuacugaa

SEQ ID NO: 2457643 - RNA, 20 nt, Human
ugcuuccuagaaguuacuga

SEQ ID NO: 2457644 - RNA, 12 nt, Human
ugcuuccuagaa

SEQ ID NO: 2457645 - RNA, 21 nt, Human
ugcuucccucugccugucccu

SEQ ID NO: 2457646 - RNA, 15 nt, Human
ugcuucuccagccug

SEQ ID NO: 2457647 - RNA, 13 nt, Human
ugcuucuccagcc

SEQ ID NO: 2457648 - RNA, 17 nt, Human
ugcuucuccaugagaca

SEQ ID NO: 2457649 - RNA, 17 nt, Human
ugcuucuguuuuauaau

SEQ ID NO: 2457650 - RNA, 13 nt, Human
ugcuucucugacu

SEQ ID NO: 2457651 - RNA, 12 nt, Human
ugcuucucugac

SEQ ID NO: 2457652 - RNA, 14 nt, Human
ugcuucucuacaga

SEQ ID NO: 2457653 - RNA, 16 nt, Human
ugcuucucuacagacu

SEQ ID NO: 2457654 - RNA, 14 nt, Human
ugcuuacauuuuua

SEQ ID NO: 2457655 - RNA, 12 nt, Human
ugcuuacauuuu

SEQ ID NO: 2457656 - RNA, 20 nt, Human
ugcuuacacaucucagaccc

SEQ ID NO: 2457657 - RNA, 17 nt, Human
ugcuuacacaucucaga

SEQ ID NO: 2457658 - RNA, 16 nt, Human
ugcuuacacaucucag

SEQ ID NO: 2457659 - RNA, 15 nt, Human
ugcuuacacaucuca

SEQ ID NO: 2457660 - RNA, 23 nt, Human
ugcuuacaauuuuuuuaauuuug

SEQ ID NO: 2457661 - RNA, 22 nt, Human
ugcuuacaauuuuuuuaauuuu

SEQ ID NO: 2457662 - RNA, 14 nt, Human
ugcuuacaauuuuu

SEQ ID NO: 2457663 - RNA, 13 nt, Human
ugcuuacaauuuu

SEQ ID NO: 2457664 - RNA, 22 nt, Human
ugcuuacaauucccugcugucg

SEQ ID NO: 2457665 - RNA, 21 nt, Human
ugcuuacaauucccugcuguc

SEQ ID NO: 2457666 - RNA, 20 nt, Human
ugcuuacaauucccugcugu

SEQ ID NO: 2457667 - RNA, 18 nt, Human
ugcuuacaauucccugcu

SEQ ID NO: 2457668 - RNA, 20 nt, Human
ugcuuacauuuuuacaauaa

SEQ ID NO: 2457669 - RNA, 17 nt, Human
ugcuuacauuuuuacaa

SEQ ID NO: 2457670 - RNA, 15 nt, Human
ugcuuacauuuuuac

SEQ ID NO: 2457671 - RNA, 18 nt, Human
ugcuuacauuuuuacaau

SEQ ID NO: 2457672 - RNA, 22 nt, Human
ugcuuccagugaggcucugccc

SEQ ID NO: 2457673 - RNA, 23 nt, Human
ugcuucccauuguggcuccuauc

SEQ ID NO: 2457674 - RNA, 15 nt, Human
ugcuucccuaaucua

SEQ ID NO: 2457675 - RNA, 20 nt, Human
ugcuucccauuguggcuccu

SEQ ID NO: 2457676 - RNA, 13 nt, Human
ugcuucccucugc

SEQ ID NO: 2457677 - RNA, 15 nt, Human
ugcuucccucugccu

SEQ ID NO: 2457678 - RNA, 20 nt, Human
ugcuucccucugccuguccc

SEQ ID NO: 2457679 - RNA, 17 nt, Human
ugcuucccauuguggcu

SEQ ID NO: 2457680 - RNA, 23 nt, Human
ugcuucccauccuacccucgggc

SEQ ID NO: 2457681 - RNA, 18 nt, Human
ugcuucccauccuacccu

SEQ ID NO: 2457682 - RNA, 16 nt, Human
ugcuucccauccuacc

SEQ ID NO: 2457683 - RNA, 15 nt, Human
ugcuucccauccuac

SEQ ID NO: 2457684 - RNA, 14 nt, Human
ugcuucccauccua

SEQ ID NO: 2457685 - RNA, 23 nt, Human
ugcuuccagugaggcucugcccu

SEQ ID NO: 2457686 - RNA, 22 nt, Human
uggagacauuccugggcacagu

SEQ ID NO: 2457687 - RNA, 21 nt, Human
uggagacauuccugggcacag

SEQ ID NO: 2457688 - RNA, 20 nt, Human
uggagacauuccugggcaca

SEQ ID NO: 2457689 - RNA, 15 nt, Human
uggagacauuccugg

SEQ ID NO: 2457690 - RNA, 22 nt, Human
uggagacagccccagagcaggg

SEQ ID NO: 2457691 - RNA, 21 nt, Human
uggagacagccccagagcagg

SEQ ID NO: 2457692 - RNA, 20 nt, Human
uggagacagccccagagcag

SEQ ID NO: 2457693 - RNA, 19 nt, Human
uggagacagccccagagca

SEQ ID NO: 2457694 - RNA, 17 nt, Human
uggagacagccccagag

SEQ ID NO: 2457695 - RNA, 13 nt, Human
uggagacagcccc

SEQ ID NO: 2457696 - RNA, 12 nt, Human
uggagacagccc

SEQ ID NO: 2457697 - RNA, 17 nt, Human
uggagacacaacuauuu

SEQ ID NO: 2457698 - RNA, 18 nt, Human
uggagagcuagaaccugg

SEQ ID NO: 2457699 - RNA, 20 nt, Human
uggagaccaugcagagcgcc

SEQ ID NO: 2457700 - RNA, 19 nt, Human
uggagaccaugcagagcgc

SEQ ID NO: 2457701 - RNA, 18 nt, Human
uggagaccaugcagagcg

SEQ ID NO: 2457702 - RNA, 18 nt, Human
uggagaccagggagccuu

SEQ ID NO: 2457703 - RNA, 19 nt, Human
uggagaccagggagccuuu

SEQ ID NO: 2457704 - RNA, 15 nt, Human
uggagaguuuccuga

SEQ ID NO: 2457705 - RNA, 16 nt, Human
uggagaguuuccugaa

SEQ ID NO: 2457706 - RNA, 20 nt, Human
uggagagcuggagccuggug

SEQ ID NO: 2457707 - RNA, 18 nt, Human
uggagagcuggagccugg

SEQ ID NO: 2457708 - RNA, 14 nt, Human
uggagagcuggugc

SEQ ID NO: 2457709 - RNA, 16 nt, Human
uggagagcuggugccc

SEQ ID NO: 2457710 - RNA, 19 nt, Human
uggagagcuggugcccgga

SEQ ID NO: 2457711 - RNA, 23 nt, Human
uggagagcuagaaccuggagagc

SEQ ID NO: 2457712 - RNA, 22 nt, Human
uggagagcuagaaccuggagag

SEQ ID NO: 2457713 - RNA, 21 nt, Human
uggagagcuagaaccuggagg

SEQ ID NO: 2457714 - RNA, 21 nt, Human
uggagagcuagaaccuggaga

SEQ ID NO: 2457715 - RNA, 20 nt, Human
uggagagcuagaaccuggag

SEQ ID NO: 2457716 - RNA, 19 nt, Human
uggagagcuagaaccugga

SEQ ID NO: 2457717 - RNA, 17 nt, Human
uggagagcuggagccug

SEQ ID NO: 2457718 - RNA, 15 nt, Human
uggagagcuggagcc

SEQ ID NO: 2457719 - RNA, 13 nt, Human
uggagagcuggag

SEQ ID NO: 2457720 - RNA, 11 nt, Human
uggagagcugg

SEQ ID NO: 2457721 - RNA, 22 nt, Human
uggacucugcacaugucuugua

SEQ ID NO: 2457722 - RNA, 18 nt, Human
uggacucugcacaugucu

SEQ ID NO: 2457723 - RNA, 17 nt, Human
uggacucugcacauguc

SEQ ID NO: 2457724 - RNA, 17 nt, Human
uggacucugcacaugaa

SEQ ID NO: 2457725 - RNA, 16 nt, Human
uggacucugcacauga

SEQ ID NO: 2457726 - RNA, 20 nt, Human
uggacggugcuccaggcagg

SEQ ID NO: 2457727 - RNA, 14 nt, Human
uggacucugcacau

SEQ ID NO: 2457728 - RNA, 15 nt, Human
uggacucugcacaug

SEQ ID NO: 2457729 - RNA, 19 nt, Human
uggacucugcacaugucuu

SEQ ID NO: 2457730 - RNA, 14 nt, Human
uggacucuugcucu

SEQ ID NO: 2457731 - RNA, 12 nt, Human
uggacucuugcu

SEQ ID NO: 2457732 - RNA, 18 nt, Human
uggacucuugcucuuucu

SEQ ID NO: 2457733 - RNA, 15 nt, Human
uggacucuugcucuu

SEQ ID NO: 2457734 - RNA, 19 nt, Human
uggacucuuugguggcuuu

SEQ ID NO: 2457735 - RNA, 15 nt, Human
uggacugaagccugc

SEQ ID NO: 2457736 - RNA, 21 nt, Human
uggacugucauagaaauuaca

SEQ ID NO: 2457737 - RNA, 15 nt, Human
uggacugugaugcca

SEQ ID NO: 2457738 - RNA, 15 nt, Human
uggacugucauagaa

SEQ ID NO: 2457739 - RNA, 21 nt, Human
uggacugugaugccacacaga

SEQ ID NO: 2457740 - RNA, 20 nt, Human
uggacugugaugccacacag

SEQ ID NO: 2457741 - RNA, 16 nt, Human
uggacuggccccuggg

SEQ ID NO: 2457742 - RNA, 15 nt, Human
uggacuggccccugg

SEQ ID NO: 2457743 - RNA, 14 nt, Human
uggacuggccccug

SEQ ID NO: 2457744 - RNA, 17 nt, Human
uggacuggaguggagca

SEQ ID NO: 2457745 - RNA, 20 nt, Human
uggacuggccccugggucag

SEQ ID NO: 2457746 - RNA, 17 nt, Human
uggacuggccccugggu

SEQ ID NO: 2457747 - RNA, 13 nt, Human
uggacuggcuaga

SEQ ID NO: 2457748 - RNA, 19 nt, Human
uggacuggcuagaguccuc

SEQ ID NO: 2457749 - RNA, 20 nt, Human
uggacuggcuagaguccuca

SEQ ID NO: 2457750 - RNA, 22 nt, Human
uggacuggcuagaguccucacu

SEQ ID NO: 2457751 - RNA, 13 nt, Human
uggacugggaggu

SEQ ID NO: 2457752 - RNA, 20 nt, Human
uggacuaacuugucuuugga

SEQ ID NO: 2457753 - RNA, 19 nt, Human
uggacuaacuugucuuugg

SEQ ID NO: 2457754 - RNA, 23 nt, Human
uggacuaaaagauauaagugcug

SEQ ID NO: 2457755 - RNA, 22 nt, Human
uggacuaaaagauauaagugcu

SEQ ID NO: 2457756 - RNA, 21 nt, Human
uggacuaaaagauauaagugc

SEQ ID NO: 2457757 - RNA, 15 nt, Human
uggacuaaaagauau

SEQ ID NO: 2457758 - RNA, 14 nt, Human
uggacuaaaagaua

SEQ ID NO: 2457759 - RNA, 13 nt, Human
uggacuaaaagau

SEQ ID NO: 2457760 - RNA, 17 nt, Human
uggacguucggggcaug

SEQ ID NO: 2457761 - RNA, 23 nt, Human
uggacguguuaugacuccagaau

SEQ ID NO: 2457762 - RNA, 19 nt, Human
uggacguguuaugacucca

SEQ ID NO: 2457763 - RNA, 22 nt, Human
uggacggugcuccaggcaggcu

SEQ ID NO: 2457764 - RNA, 19 nt, Human
uggacggugcuccaggcag

SEQ ID NO: 2457765 - RNA, 18 nt, Human
uggacggugcuccaggca

SEQ ID NO: 2457766 - RNA, 17 nt, Human
uggacggugcuccaggc

SEQ ID NO: 2457767 - RNA, 16 nt, Human
uggacggugcuccagg

SEQ ID NO: 2457768 - RNA, 14 nt, Human
uggacggugcucca

SEQ ID NO: 2457769 - RNA, 16 nt, Human
uggacggggacugggg

SEQ ID NO: 2457770 - RNA, 21 nt, Human
uggacggcaggcucacugcca

SEQ ID NO: 2457771 - RNA, 17 nt, Human
uggacauuuuuucaguc

SEQ ID NO: 2457772 - RNA, 23 nt, Human
uggacggcaggcucacugccagg

SEQ ID NO: 2457773 - RNA, 22 nt, Human
uggacggcaggcucacugccag

SEQ ID NO: 2457774 - RNA, 15 nt, Human
uggacggcugggcac

SEQ ID NO: 2457775 - RNA, 19 nt, Human
uggaagaagggagaagaaa

SEQ ID NO: 2457776 - RNA, 17 nt, Human
uggaagaagggagaaga

SEQ ID NO: 2457777 - RNA, 15 nt, Human
uggaagaagggagaa

SEQ ID NO: 2457778 - RNA, 13 nt, Human
uggaagaagggag

SEQ ID NO: 2457779 - RNA, 15 nt, Human
uggaagacacauuga

SEQ ID NO: 2457780 - RNA, 11 nt, Human
uggaagacaca

SEQ ID NO: 2457781 - RNA, 21 nt, Human
uggaagaagggagaagaaagg

SEQ ID NO: 2457782 - RNA, 12 nt, Human
uggaagaaggga

SEQ ID NO: 2457783 - RNA, 15 nt, Human
uggaagaagagggag

SEQ ID NO: 2457784 - RNA, 20 nt, Human
uggaagaaauuccuguagca

SEQ ID NO: 2457785 - RNA, 17 nt, Human
uggaagaaauuccugua

SEQ ID NO: 2457786 - RNA, 22 nt, Human
uggacaggcauguucucugagg

SEQ ID NO: 2457787 - RNA, 18 nt, Human
uggacaggcauguucucu

SEQ ID NO: 2457788 - RNA, 22 nt, Human
uggacauuugccuugcuggacg

SEQ ID NO: 2457789 - RNA, 19 nt, Human
uggacauuugccuugcugg

SEQ ID NO: 2457790 - RNA, 18 nt, Human
uggacauuugccuugcug

SEQ ID NO: 2457791 - RNA, 17 nt, Human
uggacauuugccuugcu

SEQ ID NO: 2457792 - RNA, 23 nt, Human
uggacaggcauguucucugagga

SEQ ID NO: 2457793 - RNA, 17 nt, Human
uggacaggcauguucuc

SEQ ID NO: 2457794 - RNA, 17 nt, Human
uggacauggccccugug

SEQ ID NO: 2457795 - RNA, 12 nt, Human
uggacauggccc

SEQ ID NO: 2457796 - RNA, 15 nt, Human
uggacauugucugcg

SEQ ID NO: 2457797 - RNA, 22 nt, Human
uggacauuguuggcagcauaaa

SEQ ID NO: 2457798 - RNA, 21 nt, Human
uggaugcagccucacaguccu

SEQ ID NO: 2457799 - RNA, 13 nt, Human
uggaugcagccuc

SEQ ID NO: 2457800 - RNA, 22 nt, Human
uggaugcagccucacaguccuu

SEQ ID NO: 2457801 - RNA, 14 nt, Human
uggaugauguuucg

SEQ ID NO: 2457802 - RNA, 17 nt, Human
uggaugauguuucguga

SEQ ID NO: 2457803 - RNA, 17 nt, Human
uggauauaguuuuacuu

SEQ ID NO: 2457804 - RNA, 16 nt, Human
uggauauaguuuuacu

SEQ ID NO: 2457805 - RNA, 18 nt, Human
uggauauauguuuuugaa

SEQ ID NO: 2457806 - RNA, 13 nt, Human
uggauauuuucaa

SEQ ID NO: 2457807 - RNA, 19 nt, Human
uggaucaaauccagccugc

SEQ ID NO: 2457808 - RNA, 23 nt, Human
uggaucacagaggcuucuucaga

SEQ ID NO: 2457809 - RNA, 18 nt, Human
uggauauuuucaaauugu

SEQ ID NO: 2457810 - RNA, 22 nt, Human
uggauauuuucaaauuguaucu

SEQ ID NO: 2457811 - RNA, 23 nt, Human
uggauauuuucaaauuguaucua

SEQ ID NO: 2457812 - RNA, 12 nt, Human
uggagggcugga

SEQ ID NO: 2457813 - RNA, 23 nt, Human
uggagggcuagaaucuggagagc

SEQ ID NO: 2457814 - RNA, 22 nt, Human
uggagggcuagaaucuggagag

SEQ ID NO: 2457815 - RNA, 21 nt, Human
uggagggcuagaaucuggaga

SEQ ID NO: 2457816 - RNA, 22 nt, Human
uggagggcuggaaucuggagag

SEQ ID NO: 2457817 - RNA, 21 nt, Human
uggagggcuggaaucuggaga

SEQ ID NO: 2457818 - RNA, 23 nt, Human
uggaggggggaggugggauccuc

SEQ ID NO: 2457819 - RNA, 20 nt, Human
uggaggggcauggccagcag

SEQ ID NO: 2457820 - RNA, 14 nt, Human
uggaggggccccug

SEQ ID NO: 2457821 - RNA, 21 nt, Human
uggagauccuccugcagacca

SEQ ID NO: 2457822 - RNA, 20 nt, Human
uggagauccuccugcagacc

SEQ ID NO: 2457823 - RNA, 21 nt, Human
uggagggcuagaacuggagag

SEQ ID NO: 2457824 - RNA, 20 nt, Human
uggagggcuagaacuggaga

SEQ ID NO: 2457825 - RNA, 21 nt, Human
uggagggcuagaaccuggagg

SEQ ID NO: 2457826 - RNA, 16 nt, Human
uggagauagggaaaga

SEQ ID NO: 2457827 - RNA, 19 nt, Human
uggagauauuuaugggggg

SEQ ID NO: 2457828 - RNA, 23 nt, Human
uggagauauuuauggggggagaa

SEQ ID NO: 2457829 - RNA, 17 nt, Human
uggagaguuuccugaaa

SEQ ID NO: 2457830 - RNA, 20 nt, Human
uggagauaaagauuucuuga

SEQ ID NO: 2457831 - RNA, 18 nt, Human
uggagauccuccugcaga

SEQ ID NO: 2457832 - RNA, 16 nt, Human
uggagauccuccugca

SEQ ID NO: 2457833 - RNA, 14 nt, Human
uggagauccuccug

SEQ ID NO: 2457834 - RNA, 19 nt, Human
uggcacugcuuccagugag

SEQ ID NO: 2457835 - RNA, 19 nt, Human
uggcacucacagaccugga

SEQ ID NO: 2457836 - RNA, 18 nt, Human
uggcacucacagaccugg

SEQ ID NO: 2457837 - RNA, 17 nt, Human
uggcacucacagaccug

SEQ ID NO: 2457838 - RNA, 19 nt, Human
uggcacugacugggcauag

SEQ ID NO: 2457839 - RNA, 13 nt, Human
uggcacugagccc

SEQ ID NO: 2457840 - RNA, 22 nt, Human
uggcacugagauauuuauuguu

SEQ ID NO: 2457841 - RNA, 22 nt, Human
uggcacucacagaccuggagcc

SEQ ID NO: 2457842 - RNA, 15 nt, Human
uggcacucaacauga

SEQ ID NO: 2457843 - RNA, 16 nt, Human
uggcaaggcugugcuc

SEQ ID NO: 2457844 - RNA, 15 nt, Human
uggcaaggcugugcu

SEQ ID NO: 2457845 - RNA, 14 nt, Human
uggcaaggcugugc

SEQ ID NO: 2457846 - RNA, 22 nt, Human
uggcacuauaauguaagcucua

SEQ ID NO: 2457847 - RNA, 22 nt, Human
uggcacugcuuccagugaggcu

SEQ ID NO: 2457848 - RNA, 15 nt, Human
uggcacugagccccc

SEQ ID NO: 2457849 - RNA, 14 nt, Human
uggcacugagcccc

SEQ ID NO: 2457850 - RNA, 13 nt, Human
uggcacuggaugc

SEQ ID NO: 2457851 - RNA, 15 nt, Human
uggcacuggaugcag

SEQ ID NO: 2457852 - RNA, 15 nt, Human
uggcagcucuccagu

SEQ ID NO: 2457853 - RNA, 14 nt, Human
uggcagcucuccag

SEQ ID NO: 2457854 - RNA, 13 nt, Human
uggcagcucucca

SEQ ID NO: 2457855 - RNA, 12 nt, Human
uggcagcucucc

SEQ ID NO: 2457856 - RNA, 20 nt, Human
uggcacuggggcacuuggca

SEQ ID NO: 2457857 - RNA, 17 nt, Human
uggcacuggggcacuug

SEQ ID NO: 2457858 - RNA, 20 nt, Human
uggcacuggcauugucccug

SEQ ID NO: 2457859 - RNA, 18 nt, Human
uggcacuggaugcagaaa

SEQ ID NO: 2457860 - RNA, 12 nt, Human
uggcaaggcugu

SEQ ID NO: 2457861 - RNA, 20 nt, Human
uggcaaggcagcccugucug

SEQ ID NO: 2457862 - RNA, 19 nt, Human
uggcaaggacacagaugaa

SEQ ID NO: 2457863 - RNA, 21 nt, Human
uggcacuauaauguaagcucu

SEQ ID NO: 2457864 - RNA, 21 nt, Human
uggcaagcuagaaccuggagg

SEQ ID NO: 2457865 - RNA, 21 nt, Human
uggcaagccccugcccaucug

SEQ ID NO: 2457866 - RNA, 16 nt, Human
uggcaagccccugccc

SEQ ID NO: 2457867 - RNA, 15 nt, Human
uggcaagccccugcc

SEQ ID NO: 2457868 - RNA, 13 nt, Human
uggcaagcuguga

SEQ ID NO: 2457869 - RNA, 16 nt, Human
uggcaaggaaaaacag

SEQ ID NO: 2457870 - RNA, 13 nt, Human
uggcaagagcccc

SEQ ID NO: 2457871 - RNA, 19 nt, Human
uggcaagaaagcugguaaa

SEQ ID NO: 2457872 - RNA, 22 nt, Human
uggcaaccuugucucuaugcca

SEQ ID NO: 2457873 - RNA, 15 nt, Human
uggcaagaaagcugg

SEQ ID NO: 2457874 - RNA, 15 nt, Human
uggauuuaacagaaa

SEQ ID NO: 2457875 - RNA, 14 nt, Human
uggaugcagugcuc

SEQ ID NO: 2457876 - RNA, 17 nt, Human
uggauuuaacagaaaug

SEQ ID NO: 2457877 - RNA, 22 nt, Human
ugaucagagccgugguccuuug

SEQ ID NO: 2457878 - RNA, 23 nt, Human
ugaucagagccgugguccuuugg

SEQ ID NO: 2457879 - RNA, 15 nt, Human
ugaucagaucugaca

SEQ ID NO: 2457880 - RNA, 16 nt, Human
ugaucagaucugacau

SEQ ID NO: 2457881 - RNA, 17 nt, Human
ugaucagaucugacaug

SEQ ID NO: 2457882 - RNA, 23 nt, Human
ugaucagaucugacaugauuccu

SEQ ID NO: 2457883 - RNA, 21 nt, Human
ugaucagagccgugguccuuu

SEQ ID NO: 2457884 - RNA, 18 nt, Human
ugaucagaccauaauguu

SEQ ID NO: 2457885 - RNA, 18 nt, Human
ugaucacuggcaaugaaa

SEQ ID NO: 2457886 - RNA, 16 nt, Human
ugauauggcagaagac

SEQ ID NO: 2457887 - RNA, 20 nt, Human
ugauauggagcccuguaauu

SEQ ID NO: 2457888 - RNA, 17 nt, Human
ugauauggagcccugua

SEQ ID NO: 2457889 - RNA, 15 nt, Human
ugauauggcagaaga

SEQ ID NO: 2457890 - RNA, 22 nt, Human
ugaucacggcucacugcagccu

SEQ ID NO: 2457891 - RNA, 19 nt, Human
ugauaugaaaaauaugaua

SEQ ID NO: 2457892 - RNA, 19 nt, Human
ugauaugauuuaaaacaug

SEQ ID NO: 2457893 - RNA, 15 nt, Human
ugauaugauuuaaaa

SEQ ID NO: 2457894 - RNA, 12 nt, Human
ugauaugaaaaa

SEQ ID NO: 2457895 - RNA, 15 nt, Human
ugauaugaaaaauau

SEQ ID NO: 2457896 - RNA, 19 nt, Human
ugauaugcaguuuuccuua

SEQ ID NO: 2457897 - RNA, 15 nt, Human
ugauauauuuuacaa

SEQ ID NO: 2457898 - RNA, 17 nt, Human
ugauaucacagucuaau

SEQ ID NO: 2457899 - RNA, 19 nt, Human
ugauauauuuaaaaauauu

SEQ ID NO: 2457900 - RNA, 19 nt, Human
ugauaucacagucuaauuu

SEQ ID NO: 2457901 - RNA, 19 nt, Human
ugauauccauucuuucuga

SEQ ID NO: 2457902 - RNA, 21 nt, Human
ugauaucaugccccuguacuc

SEQ ID NO: 2457903 - RNA, 16 nt, Human
ugauaucccccagccu

SEQ ID NO: 2457904 - RNA, 21 nt, Human
ugauauccauucuuucugaua

SEQ ID NO: 2457905 - RNA, 11 nt, Human
ugauaugaaaa

SEQ ID NO: 2457906 - RNA, 22 nt, Human
ugauauauaaguguacauaugu

SEQ ID NO: 2457907 - RNA, 16 nt, Human
ugauauauggauaaug

SEQ ID NO: 2457908 - RNA, 13 nt, Human
ugauauauguguu

SEQ ID NO: 2457909 - RNA, 13 nt, Human
ugauauauuuuac

SEQ ID NO: 2457910 - RNA, 14 nt, Human
ugauauauuuuaca

SEQ ID NO: 2457911 - RNA, 14 nt, Human
ugauauauuuaaaa

SEQ ID NO: 2457912 - RNA, 21 nt, Human
ugauauauguguuuuucacau

SEQ ID NO: 2457913 - RNA, 19 nt, Human
ugauauauaaguguacaua

SEQ ID NO: 2457914 - RNA, 18 nt, Human
ugauauauaaguguacau

SEQ ID NO: 2457915 - RNA, 22 nt, Human
ugauauagaacagugcuugcca

SEQ ID NO: 2457916 - RNA, 16 nt, Human
ugauauaaaugcaaua

SEQ ID NO: 2457917 - RNA, 13 nt, Human
ugauauaaaugca

SEQ ID NO: 2457918 - RNA, 22 nt, Human
ugauauacuuuuuucuuauuua

SEQ ID NO: 2457919 - RNA, 23 nt, Human
ugauauaaguguguguuuuucau

SEQ ID NO: 2457920 - RNA, 17 nt, Human
ugauauaaguguguguu

SEQ ID NO: 2457921 - RNA, 24 nt, Human
ugauaguuguaccgcaaugugacu

SEQ ID NO: 2457922 - RNA, 20 nt, Human
ugauaguuacuguugugacc

SEQ ID NO: 2457923 - RNA, 19 nt, Human
ugauauaaaucagauucuu

SEQ ID NO: 2457924 - RNA, 14 nt, Human
ugauauaaauaaaa

SEQ ID NO: 2457925 - RNA, 20 nt, Human
ugauccacccaccucagccu

SEQ ID NO: 2457926 - RNA, 15 nt, Human
ugauccacccaccuc

SEQ ID NO: 2457927 - RNA, 21 nt, Human
ugauccaagcuggucccacuc

SEQ ID NO: 2457928 - RNA, 19 nt, Human
ugaucauagguauuucaaa

SEQ ID NO: 2457929 - RNA, 15 nt, Human
ugaucauaagucuaa

SEQ ID NO: 2457930 - RNA, 21 nt, Human
ugaucauaagucuaaauaaau

SEQ ID NO: 2457931 - RNA, 17 nt, Human
ugauccaagcugguccc

SEQ ID NO: 2457932 - RNA, 24 nt, Human
ugaucauccacugugccaugugcc

SEQ ID NO: 2457933 - RNA, 13 nt, Human
ugaucauccacug

SEQ ID NO: 2457934 - RNA, 21 nt, Human
ugaucuaggaagacuuuggaa

SEQ ID NO: 2457935 - RNA, 19 nt, Human
ugaucuaggaagacuuugg

SEQ ID NO: 2457936 - RNA, 22 nt, Human
ugauccacccaccucagccucc

SEQ ID NO: 2457937 - RNA, 21 nt, Human
ugauccacccaccucagccuc

SEQ ID NO: 2457938 - RNA, 21 nt, Human
ugaucuagguuuaacucagau

SEQ ID NO: 2457939 - RNA, 20 nt, Human
ugaucuagguuuaacucaga

SEQ ID NO: 2457940 - RNA, 19 nt, Human
ugaucuagguuuaacucag

SEQ ID NO: 2457941 - RNA, 18 nt, Human
ugaucuagguuuaacuca

SEQ ID NO: 2457942 - RNA, 17 nt, Human
ugaucuagguuuaacuc

SEQ ID NO: 2457943 - RNA, 16 nt, Human
ugaucuagguuuaacu

SEQ ID NO: 2457944 - RNA, 15 nt, Human
ugaucuagguuuaac

SEQ ID NO: 2457945 - RNA, 14 nt, Human
ugaucuagguuuaa

SEQ ID NO: 2457946 - RNA, 20 nt, Human
ugaucauagguauuucaaaa

SEQ ID NO: 2457947 - RNA, 13 nt, Human
ugaucuagguuua

SEQ ID NO: 2457948 - RNA, 22 nt, Human
ugaucuagguuuaacucagauc

SEQ ID NO: 2457949 - RNA, 20 nt, Human
ugaucugaugcaagcaagaa

SEQ ID NO: 2457950 - RNA, 17 nt, Human
ugaucugagucccagga

SEQ ID NO: 2457951 - RNA, 23 nt, Human
ugaucucuucuuuuggcuuccau

SEQ ID NO: 2457952 - RNA, 17 nt, Human
ugaucugacauccccac

SEQ ID NO: 2457953 - RNA, 20 nt, Human
ugaugaugaaaugaggucag

SEQ ID NO: 2457954 - RNA, 23 nt, Human
ugaugaucuuugcagacaggcaa

SEQ ID NO: 2457955 - RNA, 14 nt, Human
ugaugaaaauauuu

SEQ ID NO: 2457956 - RNA, 22 nt, Human
ugaugaucuuugcagacaggca

SEQ ID NO: 2457957 - RNA, 14 nt, Human
ugaugccaugagga

SEQ ID NO: 2457958 - RNA, 22 nt, Human
ugaugccacaccaagcugugcc

SEQ ID NO: 2457959 - RNA, 20 nt, Human
ugaugccacaccaagcugug

SEQ ID NO: 2457960 - RNA, 18 nt, Human
ugaugccacaccaagcug

SEQ ID NO: 2457961 - RNA, 17 nt, Human
ugaugccacaccaagcu

SEQ ID NO: 2457962 - RNA, 19 nt, Human
ugaugccaaguuguuugag

SEQ ID NO: 2457963 - RNA, 15 nt, Human
ugaugccacaccaag

SEQ ID NO: 2457964 - RNA, 18 nt, Human
ugaugccacacagagugg

SEQ ID NO: 2457965 - RNA, 15 nt, Human
ugaugccaaccucug

SEQ ID NO: 2457966 - RNA, 15 nt, Human
ugaugccaaguuguu

SEQ ID NO: 2457967 - RNA, 21 nt, Human
ugaugccaaguuguuugagaa

SEQ ID NO: 2457968 - RNA, 21 nt, Human
ugaugaugggaauugugugau

SEQ ID NO: 2457969 - RNA, 18 nt, Human
ugaugaugggaauugugu

SEQ ID NO: 2457970 - RNA, 20 nt, Human
ugaucuuugcagacaggcaa

SEQ ID NO: 2457971 - RNA, 19 nt, Human
ugaucuuugcagacaggca

SEQ ID NO: 2457972 - RNA, 19 nt, Human
ugaucugcucagcccugga

SEQ ID NO: 2457973 - RNA, 18 nt, Human
ugaucugcucagcccugg

SEQ ID NO: 2457974 - RNA, 17 nt, Human
ugaucugcucagcccug

SEQ ID NO: 2457975 - RNA, 16 nt, Human
ugaucugcucagcccu

SEQ ID NO: 2457976 - RNA, 21 nt, Human
ugaucugcucagcccuggagg

SEQ ID NO: 2457977 - RNA, 20 nt, Human
ugaucugcucagcccuggag

SEQ ID NO: 2457978 - RNA, 13 nt, Human
ugaucuggaaccc

SEQ ID NO: 2457979 - RNA, 15 nt, Human
ugaucugcucagccc

SEQ ID NO: 2457980 - RNA, 14 nt, Human
ugaucugcucagcc

SEQ ID NO: 2457981 - RNA, 21 nt, Human
ugaucugaugcaagcaagaaa

SEQ ID NO: 2457982 - RNA, 23 nt, Human
ugaucuuugcagacaggcaagca

SEQ ID NO: 2457983 - RNA, 21 nt, Human
ugaucuuugcagacaggcaag

SEQ ID NO: 2457984 - RNA, 18 nt, Human
ugaucuuugcagacaggc

SEQ ID NO: 2457985 - RNA, 15 nt, Human
ugaugaaaaauagca

SEQ ID NO: 2457986 - RNA, 13 nt, Human
ugauguauucuag

SEQ ID NO: 2457987 - RNA, 20 nt, Human
ugauguaggguaaggugccu

SEQ ID NO: 2457988 - RNA, 19 nt, Human
ugauguacagucugucaug

SEQ ID NO: 2457989 - RNA, 18 nt, Human
ugauguacagucugucau

SEQ ID NO: 2457990 - RNA, 17 nt, Human
ugauguacagucuguca

SEQ ID NO: 2457991 - RNA, 16 nt, Human
ugauguacagucuguc

SEQ ID NO: 2457992 - RNA, 20 nt, Human
ugauguaccaugaaacaaag

SEQ ID NO: 2457993 - RNA, 18 nt, Human
ugauguaccaugaaacaa

SEQ ID NO: 2457994 - RNA, 20 nt, Human
ugauguauucuagcuaaugu

SEQ ID NO: 2457995 - RNA, 14 nt, Human
ugauguauucuagc

SEQ ID NO: 2457996 - RNA, 21 nt, Human
ugauguauucuagcuaaugua

SEQ ID NO: 2457997 - RNA, 18 nt, Human
ugauguagugccucuuuc

SEQ ID NO: 2457998 - RNA, 17 nt, Human
ugauguagugccucuuu

SEQ ID NO: 2457999 - RNA, 12 nt, Human
ugauguauauuu

SEQ ID NO: 2458000 - RNA, 15 nt, Human
ugaugucccuaugga

SEQ ID NO: 2458001 - RNA, 13 nt, Human
ugauguacaugua

SEQ ID NO: 2458002 - RNA, 22 nt, Human
ugauguaaucuugaauuguaac

SEQ ID NO: 2458003 - RNA, 19 nt, Human
ugauguaaguuuaccuaug

SEQ ID NO: 2458004 - RNA, 21 nt, Human
ugaugguuguacauauaagug

SEQ ID NO: 2458005 - RNA, 17 nt, Human
ugaugcuggagagguua

SEQ ID NO: 2458006 - RNA, 16 nt, Human
ugaugcuggagagguu

SEQ ID NO: 2458007 - RNA, 15 nt, Human
ugaugcuggaugcuc

SEQ ID NO: 2458008 - RNA, 21 nt, Human
ugauguaaccgauucaucucu

SEQ ID NO: 2458009 - RNA, 22 nt, Human
ugaugcuucuucagagacuccu

SEQ ID NO: 2458010 - RNA, 21 nt, Human
ugaugcuucuucagagacucc

SEQ ID NO: 2458011 - RNA, 19 nt, Human
ugaugcuucuucagagacu

SEQ ID NO: 2458012 - RNA, 15 nt, Human
ugaugcuggagaggu

SEQ ID NO: 2458013 - RNA, 14 nt, Human
ugaugcuggagagg

SEQ ID NO: 2458014 - RNA, 20 nt, Human
ugaugcuggaugcuccuucc

SEQ ID NO: 2458015 - RNA, 15 nt, Human
ugaugcugccccuca

SEQ ID NO: 2458016 - RNA, 23 nt, Human
ugaugcucccuccccugcccugg

SEQ ID NO: 2458017 - RNA, 17 nt, Human
ugaugcucccuccccug

SEQ ID NO: 2458018 - RNA, 20 nt, Human
ugaugcucccuccccugccc

SEQ ID NO: 2458019 - RNA, 21 nt, Human
ugaugcucccuccccugcccu

SEQ ID NO: 2458020 - RNA, 22 nt, Human
ugaugcucccuccccugcccug

SEQ ID NO: 2458021 - RNA, 15 nt, Human
ugaugcucccucccc

SEQ ID NO: 2458022 - RNA, 16 nt, Human
ugaugcucccuccccu

SEQ ID NO: 2458023 - RNA, 14 nt, Human
ugaugcucccuccc

SEQ ID NO: 2458024 - RNA, 15 nt, Human
ugaugcucaggcuug

SEQ ID NO: 2458025 - RNA, 14 nt, Human
ugaugccaggacac

SEQ ID NO: 2458026 - RNA, 23 nt, Human
ugaugccacaccaagcugugcca

SEQ ID NO: 2458027 - RNA, 19 nt, Human
ugaugccagguucuauuug

SEQ ID NO: 2458028 - RNA, 14 nt, Human
ugaugcucaggcuu

SEQ ID NO: 2458029 - RNA, 21 nt, Human
ugauagcacagacccugcccu

SEQ ID NO: 2458030 - RNA, 20 nt, Human
ugauagcacagacccugccc

SEQ ID NO: 2458031 - RNA, 18 nt, Human
ugauagcacagacccugc

SEQ ID NO: 2458032 - RNA, 17 nt, Human
ugauagcacagacccug

SEQ ID NO: 2458033 - RNA, 16 nt, Human
ugauagcacagacccu

SEQ ID NO: 2458034 - RNA, 15 nt, Human
ugauagcacagaccc

SEQ ID NO: 2458035 - RNA, 21 nt, Human
ugauaaaguuucucagauccu

SEQ ID NO: 2458036 - RNA, 18 nt, Human
ugauaaaguuucucagau

SEQ ID NO: 2458037 - RNA, 22 nt, Human
ugauaaaguuucucagauccuu

SEQ ID NO: 2458038 - RNA, 19 nt, Human
ugauaaauuccacuggacu

SEQ ID NO: 2458039 - RNA, 23 nt, Human
ugauagcacagacccugcccugu

SEQ ID NO: 2458040 - RNA, 22 nt, Human
ugauagcacagacccugcccug

SEQ ID NO: 2458041 - RNA, 15 nt, Human
ugauagcacuuucua

SEQ ID NO: 2458042 - RNA, 21 nt, Human
ugauagcacuuucuacaaugu

SEQ ID NO: 2458043 - RNA, 13 nt, Human
ugauagcacuuuc

SEQ ID NO: 2458044 - RNA, 14 nt, Human
ugauagcacuuucu

SEQ ID NO: 2458045 - RNA, 12 nt, Human
ugauagcacuuu

SEQ ID NO: 2458046 - RNA, 22 nt, Human
ugauagcucuuuggcagucuau

SEQ ID NO: 2458047 - RNA, 21 nt, Human
ugauagcuaacauuuuaaaua

SEQ ID NO: 2458048 - RNA, 18 nt, Human
ugauagcuaacauuuuaa

SEQ ID NO: 2458049 - RNA, 16 nt, Human
ugauagcuaacauuuu

SEQ ID NO: 2458050 - RNA, 17 nt, Human
ugauagggauacaugcu

SEQ ID NO: 2458051 - RNA, 21 nt, Human
ugauaggaaugugaaagcacg

SEQ ID NO: 2458052 - RNA, 18 nt, Human
ugauagguauaaguggug

SEQ ID NO: 2458053 - RNA, 11 nt, Human
ugauagcuuua

SEQ ID NO: 2458054 - RNA, 13 nt, Human
ugauagcuuuauu

SEQ ID NO: 2458055 - RNA, 14 nt, Human
ugauagcuuuauuu

SEQ ID NO: 2458056 - RNA, 23 nt, Human
ugauagcuuuauuuuuuaaguau

SEQ ID NO: 2458057 - RNA, 17 nt, Human
ugauagucuuuugcuuu

SEQ ID NO: 2458058 - RNA, 16 nt, Human
ugauagucuuuugcuu

SEQ ID NO: 2458059 - RNA, 20 nt, Human
ugauagggauacaugcucuu

SEQ ID NO: 2458060 - RNA, 21 nt, Human
ugauaguuacuguugugaccu

SEQ ID NO: 2458061 - RNA, 17 nt, Human
ugauaguuacuguugug

SEQ ID NO: 2458062 - RNA, 16 nt, Human
ugauaguuacuguugu

SEQ ID NO: 2458063 - RNA, 14 nt, Human
ugauaguuacuguu

SEQ ID NO: 2458064 - RNA, 13 nt, Human
ugauaguuacugu

SEQ ID NO: 2458065 - RNA, 12 nt, Human
ugauaguuacug

SEQ ID NO: 2458066 - RNA, 14 nt, Human
ugaguuggcuggga

SEQ ID NO: 2458067 - RNA, 16 nt, Human
ugaguuggcugggaau

SEQ ID NO: 2458068 - RNA, 18 nt, Human
ugaguccuugaaaauauu

SEQ ID NO: 2458069 - RNA, 16 nt, Human
ugaguccuugaaaaua

SEQ ID NO: 2458070 - RNA, 18 nt, Human
ugagucgaggacagggag

SEQ ID NO: 2458071 - RNA, 16 nt, Human
ugaguugauucagcuc

SEQ ID NO: 2458072 - RNA, 19 nt, Human
ugaguugauucagcucugc

SEQ ID NO: 2458073 - RNA, 23 nt, Human
ugaguugauagcacagacccugc

SEQ ID NO: 2458074 - RNA, 21 nt, Human
ugaguugauagcacagacccu

SEQ ID NO: 2458075 - RNA, 16 nt, Human
ugagucgaggacaggg

SEQ ID NO: 2458076 - RNA, 15 nt, Human
ugagucgaggacagg

SEQ ID NO: 2458077 - RNA, 16 nt, Human
ugauaaaguuucucag

SEQ ID NO: 2458078 - RNA, 13 nt, Human
ugauaaaguuucu

SEQ ID NO: 2458079 - RNA, 19 nt, Human
ugauaaaguaguaaaaauu

SEQ ID NO: 2458080 - RNA, 14 nt, Human
ugauaaacuuugcu

SEQ ID NO: 2458081 - RNA, 14 nt, Human
ugauaaacauuuaa

SEQ ID NO: 2458082 - RNA, 19 nt, Human
ugaguuucauucuccugcc

SEQ ID NO: 2458083 - RNA, 18 nt, Human
ugaguuucauucuccugc

SEQ ID NO: 2458084 - RNA, 15 nt, Human
ugaguuucauagcua

SEQ ID NO: 2458085 - RNA, 14 nt, Human
ugaguuucauagcu

SEQ ID NO: 2458086 - RNA, 19 nt, Human
ugaguuuaguaaggcugug

SEQ ID NO: 2458087 - RNA, 17 nt, Human
ugaguuuauaucucuca

SEQ ID NO: 2458088 - RNA, 21 nt, Human
ugaguuuagugaucugaacag

SEQ ID NO: 2458089 - RNA, 16 nt, Human
ugauaaaaccauguag

SEQ ID NO: 2458090 - RNA, 22 nt, Human
ugaguuuccucaggcugcugga

SEQ ID NO: 2458091 - RNA, 16 nt, Human
ugaguuuccucaggcu

SEQ ID NO: 2458092 - RNA, 17 nt, Human
ugaguuuccucaggcug

SEQ ID NO: 2458093 - RNA, 19 nt, Human
ugaguuuccucaggcugcu

SEQ ID NO: 2458094 - RNA, 23 nt, Human
ugaguuuaccuuguauacuguag

SEQ ID NO: 2458095 - RNA, 16 nt, Human
ugaguuuaccuuguau

SEQ ID NO: 2458096 - RNA, 23 nt, Human
ugaguuguuuucagacucagacu

SEQ ID NO: 2458097 - RNA, 14 nt, Human
ugaguuuaaagcaa

SEQ ID NO: 2458098 - RNA, 17 nt, Human
ugaguuggcugggaaua

SEQ ID NO: 2458099 - RNA, 17 nt, Human
ugaguuggggucuggca

SEQ ID NO: 2458100 - RNA, 19 nt, Human
ugaguuggggucuggcagc

SEQ ID NO: 2458101 - RNA, 21 nt, Human
ugaguuggggucuggcagccu

SEQ ID NO: 2458102 - RNA, 18 nt, Human
ugaguuguugcccugggu

SEQ ID NO: 2458103 - RNA, 20 nt, Human
ugaguugguguugacaugug

SEQ ID NO: 2458104 - RNA, 16 nt, Human
ugaggacuauggaaau

SEQ ID NO: 2458105 - RNA, 16 nt, Human
ugaggagcagcuucag

SEQ ID NO: 2458106 - RNA, 20 nt, Human
ugaggacauuccaagacagu

SEQ ID NO: 2458107 - RNA, 21 nt, Human
ugaggacauguuuuuguuuuc

SEQ ID NO: 2458108 - RNA, 23 nt, Human
ugagcucuugugaggaaagucau

SEQ ID NO: 2458109 - RNA, 23 nt, Human
ugaggacuuaaaauauuccugca

SEQ ID NO: 2458110 - RNA, 15 nt, Human
ugaggagccaggccg

SEQ ID NO: 2458111 - RNA, 20 nt, Human
ugaggagcagcuucaguugu

SEQ ID NO: 2458112 - RNA, 14 nt, Human
ugaggagccccagc

SEQ ID NO: 2458113 - RNA, 11 nt, Human
ugaggagcccc

SEQ ID NO: 2458114 - RNA, 16 nt, Human
ugaggagccccagcua

SEQ ID NO: 2458115 - RNA, 11 nt, Human
ugaggagcugc

SEQ ID NO: 2458116 - RNA, 12 nt, Human
ugaggagcugcu

SEQ ID NO: 2458117 - RNA, 13 nt, Human
ugaggcugcagcg

SEQ ID NO: 2458118 - RNA, 11 nt, Human
ugaggcugggc

SEQ ID NO: 2458119 - RNA, 14 nt, Human
ugaggcuggcacag

SEQ ID NO: 2458120 - RNA, 15 nt, Human
ugaggcuggcacagg

SEQ ID NO: 2458121 - RNA, 17 nt, Human
ugaggcuggcacaggac

SEQ ID NO: 2458122 - RNA, 12 nt, Human
ugaggcugggaa

SEQ ID NO: 2458123 - RNA, 16 nt, Human
ugaggcugcuuuccaa

SEQ ID NO: 2458124 - RNA, 20 nt, Human
ugaggcugcuuuccaaagcc

SEQ ID NO: 2458125 - RNA, 23 nt, Human
ugaggcugcuuuccaaagccaau

SEQ ID NO: 2458126 - RNA, 11 nt, Human
ugaggcuggca

SEQ ID NO: 2458127 - RNA, 14 nt, Human
ugaggucuguucuu

SEQ ID NO: 2458128 - RNA, 15 nt, Human
ugaggucuguucuuu

SEQ ID NO: 2458129 - RNA, 20 nt, Human
ugaggucuguucuuuccaaa

SEQ ID NO: 2458130 - RNA, 16 nt, Human
ugagggaacagacagg

SEQ ID NO: 2458131 - RNA, 15 nt, Human
ugaggucuggcugcu

SEQ ID NO: 2458132 - RNA, 17 nt, Human
ugaggucuuuugacaug

SEQ ID NO: 2458133 - RNA, 19 nt, Human
ugaggucuuuugacaugug

SEQ ID NO: 2458134 - RNA, 23 nt, Human
ugaggcuuuggauuugacauugc

SEQ ID NO: 2458135 - RNA, 21 nt, Human
ugaggcuugcugagaggggcu

SEQ ID NO: 2458136 - RNA, 20 nt, Human
ugaggcuugcugagaggggc

SEQ ID NO: 2458137 - RNA, 18 nt, Human
ugaggcuuucagguuuua

SEQ ID NO: 2458138 - RNA, 13 nt, Human
ugaggcuuuggau

SEQ ID NO: 2458139 - RNA, 18 nt, Human
ugaggcuuuggauuugac

SEQ ID NO: 2458140 - RNA, 17 nt, Human
ugaggcuugcugagagg

SEQ ID NO: 2458141 - RNA, 16 nt, Human
ugaggcuugcugagag

SEQ ID NO: 2458142 - RNA, 15 nt, Human
ugaggcuugcugaga

SEQ ID NO: 2458143 - RNA, 14 nt, Human
ugaggcuugcugag

SEQ ID NO: 2458144 - RNA, 13 nt, Human
ugaggcuugcuga

SEQ ID NO: 2458145 - RNA, 16 nt, Human
ugaggcuuccagagag

SEQ ID NO: 2458146 - RNA, 15 nt, Human
ugaggcuuccagaga

SEQ ID NO: 2458147 - RNA, 23 nt, Human
ugaggcuuagcuuugcucugcca

SEQ ID NO: 2458148 - RNA, 11 nt, Human
ugaggcugugg

SEQ ID NO: 2458149 - RNA, 18 nt, Human
ugaggcuguccuguacau

SEQ ID NO: 2458150 - RNA, 21 nt, Human
ugaggcuguggucacagcgga

SEQ ID NO: 2458151 - RNA, 21 nt, Human
ugaguccccuguuuguuucug

SEQ ID NO: 2458152 - RNA, 19 nt, Human
ugagguuucaaaccucccu

SEQ ID NO: 2458153 - RNA, 15 nt, Human
ugagguugcuuacua

SEQ ID NO: 2458154 - RNA, 16 nt, Human
ugagguugcuagagaa

SEQ ID NO: 2458155 - RNA, 21 nt, Human
ugagguuccucugccugcccc

SEQ ID NO: 2458156 - RNA, 20 nt, Human
ugagguuccucugccugccc

SEQ ID NO: 2458157 - RNA, 19 nt, Human
ugagguuccucugccugcc

SEQ ID NO: 2458158 - RNA, 18 nt, Human
ugagguuccucugccugc

SEQ ID NO: 2458159 - RNA, 17 nt, Human
ugagguuccucugccug

SEQ ID NO: 2458160 - RNA, 16 nt, Human
ugagguuccucugccu

SEQ ID NO: 2458161 - RNA, 23 nt, Human
ugaggugugggggcugcagcaug

SEQ ID NO: 2458162 - RNA, 21 nt, Human
ugaggugugggggcugcagca

SEQ ID NO: 2458163 - RNA, 15 nt, Human
ugagguuccucugcc

SEQ ID NO: 2458164 - RNA, 14 nt, Human
ugagguuccucugc

SEQ ID NO: 2458165 - RNA, 12 nt, Human
ugagguuaggag

SEQ ID NO: 2458166 - RNA, 16 nt, Human
ugaggugcuauguucu

SEQ ID NO: 2458167 - RNA, 15 nt, Human
ugaggugcuauguuc

SEQ ID NO: 2458168 - RNA, 19 nt, Human
ugagguggaagagggcugc

SEQ ID NO: 2458169 - RNA, 20 nt, Human
ugaggucuuuugacaugugg

SEQ ID NO: 2458170 - RNA, 15 nt, Human
ugaggugcugggagg

SEQ ID NO: 2458171 - RNA, 16 nt, Human
ugaggugcugggaggg

SEQ ID NO: 2458172 - RNA, 17 nt, Human
ugaggugcugggaggga

SEQ ID NO: 2458173 - RNA, 15 nt, Human
ugagguggaagcccu

SEQ ID NO: 2458174 - RNA, 16 nt, Human
ugagguggaagcccuc

SEQ ID NO: 2458175 - RNA, 17 nt, Human
ugagguggaagcccucc

SEQ ID NO: 2458176 - RNA, 20 nt, Human
ugagguggaagcccuccuuc

SEQ ID NO: 2458177 - RNA, 18 nt, Human
ugaggugugggggcugca

SEQ ID NO: 2458178 - RNA, 14 nt, Human
ugagguggcacuuu

SEQ ID NO: 2458179 - RNA, 21 nt, Human
ugagguggaagcccuccuucc

SEQ ID NO: 2458180 - RNA, 22 nt, Human
ugagguggaagcccuccuucca

SEQ ID NO: 2458181 - RNA, 22 nt, Human
ugaguccuggcaugggaaugaa

SEQ ID NO: 2458182 - RNA, 19 nt, Human
ugaguccuggcaugggaau

SEQ ID NO: 2458183 - RNA, 15 nt, Human
ugaguccuugaaaau

SEQ ID NO: 2458184 - RNA, 18 nt, Human
ugaguccuuaaacagggc

SEQ ID NO: 2458185 - RNA, 14 nt, Human
ugaguccuuaaaca

SEQ ID NO: 2458186 - RNA, 14 nt, Human
ugagucgaggacag

SEQ ID NO: 2458187 - RNA, 18 nt, Human
ugaguccuggcaugggaa

SEQ ID NO: 2458188 - RNA, 11 nt, Human
ugaguccuggc

SEQ ID NO: 2458189 - RNA, 21 nt, Human
ugagguuuccuucagacagau

SEQ ID NO: 2458190 - RNA, 14 nt, Human
ugacugaauuucuu

SEQ ID NO: 2458191 - RNA, 15 nt, Human
ugacugaauuucuuu

SEQ ID NO: 2458192 - RNA, 15 nt, Human
ugacugagcuucccu

SEQ ID NO: 2458193 - RNA, 11 nt, Human
ugacugagcuu

SEQ ID NO: 2458194 - RNA, 20 nt, Human
ugacugaugcuuucagauua

SEQ ID NO: 2458195 - RNA, 19 nt, Human
ugacugagcagacugguga

SEQ ID NO: 2458196 - RNA, 15 nt, Human
ugacugagcagacug

SEQ ID NO: 2458197 - RNA, 23 nt, Human
ugacugguguuaucaccgugggc

SEQ ID NO: 2458198 - RNA, 17 nt, Human
ugacucuggcaaagcuu

SEQ ID NO: 2458199 - RNA, 19 nt, Human
ugacucugcccccugcugg

SEQ ID NO: 2458200 - RNA, 18 nt, Human
ugacucugcccccugcug

SEQ ID NO: 2458201 - RNA, 15 nt, Human
ugacucugcccccug

SEQ ID NO: 2458202 - RNA, 14 nt, Human
ugacucugcccccu

SEQ ID NO: 2458203 - RNA, 22 nt, Human
ugacucuggcaaagcuuuuaga

SEQ ID NO: 2458204 - RNA, 12 nt, Human
ugacucuuaaga

SEQ ID NO: 2458205 - RNA, 13 nt, Human
ugacugaauuucu

SEQ ID NO: 2458206 - RNA, 18 nt, Human
ugacggugcagucugggu

SEQ ID NO: 2458207 - RNA, 17 nt, Human
ugacgugaccggacuuu

SEQ ID NO: 2458208 - RNA, 19 nt, Human
ugacgucaagucuccuucc

SEQ ID NO: 2458209 - RNA, 13 nt, Human
ugacucugccccc

SEQ ID NO: 2458210 - RNA, 22 nt, Human
ugacucugaaaucugaagaccu

SEQ ID NO: 2458211 - RNA, 19 nt, Human
ugacgugccuuuugcaccc

SEQ ID NO: 2458212 - RNA, 18 nt, Human
ugacgugccuuuugcacc

SEQ ID NO: 2458213 - RNA, 16 nt, Human
ugacgugccuuuugca

SEQ ID NO: 2458214 - RNA, 23 nt, Human
ugacgugcaccuguacucaggag

SEQ ID NO: 2458215 - RNA, 24 nt, Human
ugacgugaccggacuuuucugcaa

SEQ ID NO: 2458216 - RNA, 22 nt, Human
ugacgugaccggacuuuucugc

SEQ ID NO: 2458217 - RNA, 18 nt, Human
ugacgugcaccuguacuc

SEQ ID NO: 2458218 - RNA, 19 nt, Human
ugacgugcaccuguacuca

SEQ ID NO: 2458219 - RNA, 20 nt, Human
ugacgccaucccagccccaa

SEQ ID NO: 2458220 - RNA, 19 nt, Human
ugacgccaucccagcccca

SEQ ID NO: 2458221 - RNA, 18 nt, Human
ugacgccaucccagcccc

SEQ ID NO: 2458222 - RNA, 17 nt, Human
ugacgccaucccagccc

SEQ ID NO: 2458223 - RNA, 19 nt, Human
ugacggccagggagaagcu

SEQ ID NO: 2458224 - RNA, 20 nt, Human
ugacggaagccaacuuggcu

SEQ ID NO: 2458225 - RNA, 18 nt, Human
ugacggaagaacauagaa

SEQ ID NO: 2458226 - RNA, 19 nt, Human
ugacggaugauuggauuau

SEQ ID NO: 2458227 - RNA, 17 nt, Human
ugacggugcagucuggg

SEQ ID NO: 2458228 - RNA, 23 nt, Human
ugacggucccacacuggugacug

SEQ ID NO: 2458229 - RNA, 21 nt, Human
ugacggucccacacuggugac

SEQ ID NO: 2458230 - RNA, 19 nt, Human
ugacggucccacacuggug

SEQ ID NO: 2458231 - RNA, 19 nt, Human
ugacgguauuaugcuucuu

SEQ ID NO: 2458232 - RNA, 18 nt, Human
ugacgguauuaugcuucu

SEQ ID NO: 2458233 - RNA, 14 nt, Human
ugacgcugaauaaa

SEQ ID NO: 2458234 - RNA, 19 nt, Human
ugacgccugcccuccccag

SEQ ID NO: 2458235 - RNA, 19 nt, Human
ugacgcaacccacguguaa

SEQ ID NO: 2458236 - RNA, 20 nt, Human
ugacgacaagugcugaacag

SEQ ID NO: 2458237 - RNA, 20 nt, Human
ugacgcugaauaaaugucuu

SEQ ID NO: 2458238 - RNA, 18 nt, Human
ugacgcugaauaaauguc

SEQ ID NO: 2458239 - RNA, 17 nt, Human
ugacgcugaauaaaugu

SEQ ID NO: 2458240 - RNA, 15 nt, Human
ugacgcugaauaaau

SEQ ID NO: 2458241 - RNA, 22 nt, Human
ugacgcugaauaaaugucuuuu

SEQ ID NO: 2458242 - RNA, 14 nt, Human
ugacggaagaacau

SEQ ID NO: 2458243 - RNA, 16 nt, Human
ugacgccaucccagcc

SEQ ID NO: 2458244 - RNA, 15 nt, Human
ugacgccaucccagc

SEQ ID NO: 2458245 - RNA, 14 nt, Human
ugacgccaucccag

SEQ ID NO: 2458246 - RNA, 13 nt, Human
ugacgccauccca

SEQ ID NO: 2458247 - RNA, 22 nt, Human
ugaccuuucaauaggaaaaacu

SEQ ID NO: 2458248 - RNA, 18 nt, Human
ugaccuuucaauaggaaa

SEQ ID NO: 2458249 - RNA, 17 nt, Human
ugaccuuuuauguagua

SEQ ID NO: 2458250 - RNA, 18 nt, Human
ugaccuuuuauguaguaa

SEQ ID NO: 2458251 - RNA, 23 nt, Human
ugaccuuuuauguaguaauugac

SEQ ID NO: 2458252 - RNA, 19 nt, Human
ugacgaacuuccauggccc

SEQ ID NO: 2458253 - RNA, 20 nt, Human
ugaccuuuugacuuaaagca

SEQ ID NO: 2458254 - RNA, 15 nt, Human
ugacgacaagugcug

SEQ ID NO: 2458255 - RNA, 14 nt, Human
ugacgaagucucuu

SEQ ID NO: 2458256 - RNA, 18 nt, Human
ugaccucugcagcaauaa

SEQ ID NO: 2458257 - RNA, 21 nt, Human
ugaccucugcagcaauaaagc

SEQ ID NO: 2458258 - RNA, 23 nt, Human
ugaccucugcagcaauaaagcag

SEQ ID NO: 2458259 - RNA, 12 nt, Human
ugaccucugccu

SEQ ID NO: 2458260 - RNA, 16 nt, Human
ugaccuuucaauagga

SEQ ID NO: 2458261 - RNA, 15 nt, Human
ugaccuuucaauagg

SEQ ID NO: 2458262 - RNA, 14 nt, Human
ugaccuuucaauag

SEQ ID NO: 2458263 - RNA, 13 nt, Human
ugaccucaugcau

SEQ ID NO: 2458264 - RNA, 22 nt, Human
ugaccucaggugauccacccac

SEQ ID NO: 2458265 - RNA, 16 nt, Human
ugaccucccagcccua

SEQ ID NO: 2458266 - RNA, 15 nt, Human
ugaccucccagcccu

SEQ ID NO: 2458267 - RNA, 14 nt, Human
ugaccucccagccc

SEQ ID NO: 2458268 - RNA, 12 nt, Human
ugaccucccagc

SEQ ID NO: 2458269 - RNA, 11 nt, Human
ugaccucccag

SEQ ID NO: 2458270 - RNA, 22 nt, Human
ugaccuccaugacugcacagua

SEQ ID NO: 2458271 - RNA, 22 nt, Human
ugaccucaugcaucuccaccug

SEQ ID NO: 2458272 - RNA, 19 nt, Human
ugaccucaugcaucuccac

SEQ ID NO: 2458273 - RNA, 16 nt, Human
ugaccucaugcaucuc

SEQ ID NO: 2458274 - RNA, 17 nt, Human
ugaccuccacagcuucc

SEQ ID NO: 2458275 - RNA, 14 nt, Human
ugaccuccacagcu

SEQ ID NO: 2458276 - RNA, 15 nt, Human
ugaccuccacagcuu

SEQ ID NO: 2458277 - RNA, 13 nt, Human
ugaccucugcagc

SEQ ID NO: 2458278 - RNA, 16 nt, Human
ugaccucugcagcaau

SEQ ID NO: 2458279 - RNA, 14 nt, Human
ugaccucccucuaa

SEQ ID NO: 2458280 - RNA, 13 nt, Human
ugaccucccucua

SEQ ID NO: 2458281 - RNA, 23 nt, Human
ugaccucccagcccuauggaugu

SEQ ID NO: 2458282 - RNA, 22 nt, Human
ugaccucccagcccuauggaug

SEQ ID NO: 2458283 - RNA, 18 nt, Human
ugaccucgugauccaccc

SEQ ID NO: 2458284 - RNA, 22 nt, Human
ugaccucccucuaauuuaucuu

SEQ ID NO: 2458285 - RNA, 16 nt, Human
ugaccuaucacuucca

SEQ ID NO: 2458286 - RNA, 18 nt, Human
ugaccuacucgagggacu

SEQ ID NO: 2458287 - RNA, 17 nt, Human
ugaccuaguuuuccaug

SEQ ID NO: 2458288 - RNA, 22 nt, Human
ugaccuaguuuuccaugcgugu

SEQ ID NO: 2458289 - RNA, 17 nt, Human
ugaccucaaccugugau

SEQ ID NO: 2458290 - RNA, 18 nt, Human
ugaccucaaccugugaug

SEQ ID NO: 2458291 - RNA, 21 nt, Human
ugaccucaagauguccuccuu

SEQ ID NO: 2458292 - RNA, 17 nt, Human
ugaccuacucgagggac

SEQ ID NO: 2458293 - RNA, 16 nt, Human
ugaccuacaaaucaau

SEQ ID NO: 2458294 - RNA, 13 nt, Human
ugaccuacucuca

SEQ ID NO: 2458295 - RNA, 20 nt, Human
ugacccugcgaaggggcccu

SEQ ID NO: 2458296 - RNA, 23 nt, Human
ugaccgugggcggggccuugcgg

SEQ ID NO: 2458297 - RNA, 20 nt, Human
ugaccgugggcggggccuug

SEQ ID NO: 2458298 - RNA, 15 nt, Human
ugacccugaagugag

SEQ ID NO: 2458299 - RNA, 16 nt, Human
ugacccugaucagucu

SEQ ID NO: 2458300 - RNA, 22 nt, Human
ugacccuccuguugcacccagc

SEQ ID NO: 2458301 - RNA, 21 nt, Human
ugacccuccuguugcacccag

SEQ ID NO: 2458302 - RNA, 16 nt, Human
ugacccuccuguugca

SEQ ID NO: 2458303 - RNA, 23 nt, Human
ugacccucugaaugguccagggu

SEQ ID NO: 2458304 - RNA, 22 nt, Human
ugacccucugaaugguccaggg

SEQ ID NO: 2458305 - RNA, 15 nt, Human
ugacccucuccaccc

SEQ ID NO: 2458306 - RNA, 18 nt, Human
ugacccucuccaccccau

SEQ ID NO: 2458307 - RNA, 14 nt, Human
ucuugaaugucuuu

SEQ ID NO: 2458308 - RNA, 13 nt, Human
ugacccuccuguu

SEQ ID NO: 2458309 - RNA, 22 nt, Human
ugaccauucuccaccugccagg

SEQ ID NO: 2458310 - RNA, 21 nt, Human
ugaccauucuccaccugccag

SEQ ID NO: 2458311 - RNA, 20 nt, Human
ugaccauucuccaccugcca

SEQ ID NO: 2458312 - RNA, 17 nt, Human
ucuugaauuguaaggaa

SEQ ID NO: 2458313 - RNA, 13 nt, Human
ucuugaaggugcu

SEQ ID NO: 2458314 - RNA, 15 nt, Human
ucuugaacuccuggc

SEQ ID NO: 2458315 - RNA, 16 nt, Human
ucuugaauaauguaag

SEQ ID NO: 2458316 - RNA, 16 nt, Human
ucuugaaugucuuuug

SEQ ID NO: 2458317 - RNA, 13 nt, Human
ucuugaaucccau

SEQ ID NO: 2458318 - RNA, 16 nt, Human
ugagaaagacuauuca

SEQ ID NO: 2458319 - RNA, 17 nt, Human
ugagaaagacuauucaa

SEQ ID NO: 2458320 - RNA, 22 nt, Human
ugacuguacuccucccaggcgc

SEQ ID NO: 2458321 - RNA, 18 nt, Human
ugacuguacuccucccag

SEQ ID NO: 2458322 - RNA, 17 nt, Human
ugacuguacuccuccca

SEQ ID NO: 2458323 - RNA, 16 nt, Human
ugacuguacuccuccc

SEQ ID NO: 2458324 - RNA, 17 nt, Human
ugagaaaucuaaaaaac

SEQ ID NO: 2458325 - RNA, 13 nt, Human
ugagaaaucuaaa

SEQ ID NO: 2458326 - RNA, 21 nt, Human
ugacuggguuucucuguauag

SEQ ID NO: 2458327 - RNA, 18 nt, Human
ugagaaagacuauucaaa

SEQ ID NO: 2458328 - RNA, 20 nt, Human
ugagaaagacuauucaaaca

SEQ ID NO: 2458329 - RNA, 14 nt, Human
ugacuguauauaaa

SEQ ID NO: 2458330 - RNA, 23 nt, Human
ugacuggguuucucuguauagua

SEQ ID NO: 2458331 - RNA, 12 nt, Human
ugagacccuguc

SEQ ID NO: 2458332 - RNA, 18 nt, Human
ugagaccccuggccuccg

SEQ ID NO: 2458333 - RNA, 16 nt, Human
ugagaccccuggccuc

SEQ ID NO: 2458334 - RNA, 22 nt, Human
ugagaccccuggccuccggcgu

SEQ ID NO: 2458335 - RNA, 14 nt, Human
ugagacccugucuc

SEQ ID NO: 2458336 - RNA, 15 nt, Human
ugagacccugucucu

SEQ ID NO: 2458337 - RNA, 18 nt, Human
ugagacaguccagccugg

SEQ ID NO: 2458338 - RNA, 16 nt, Human
ugagacaguccagccu

SEQ ID NO: 2458339 - RNA, 15 nt, Human
ugagacaggagaauc

SEQ ID NO: 2458340 - RNA, 15 nt, Human
ugagaccccuggccu

SEQ ID NO: 2458341 - RNA, 14 nt, Human
ugagaccccuggcc

SEQ ID NO: 2458342 - RNA, 13 nt, Human
ugagaccccuggc

SEQ ID NO: 2458343 - RNA, 17 nt, Human
ugagacccccacaccuc

SEQ ID NO: 2458344 - RNA, 19 nt, Human
ugagacaguccagccugga

SEQ ID NO: 2458345 - RNA, 22 nt, Human
ugagacccccacaccucaguuc

SEQ ID NO: 2458346 - RNA, 14 nt, Human
ugagacagcucugc

SEQ ID NO: 2458347 - RNA, 16 nt, Human
ugagacagcucugcau

SEQ ID NO: 2458348 - RNA, 13 nt, Human
ugagaaaugcaua

SEQ ID NO: 2458349 - RNA, 13 nt, Human
ugagaaauuaagu

SEQ ID NO: 2458350 - RNA, 15 nt, Human
ugagaaaugaauaau

SEQ ID NO: 2458351 - RNA, 20 nt, Human
ugagaaaugaauaauuuccc

SEQ ID NO: 2458352 - RNA, 11 nt, Human
ugagaaaugca

SEQ ID NO: 2458353 - RNA, 22 nt, Human
ugagaaaugaauaauuucccaa

SEQ ID NO: 2458354 - RNA, 14 nt, Human
ugagaaauuaagua

SEQ ID NO: 2458355 - RNA, 12 nt, Human
ugagaaaugcau

SEQ ID NO: 2458356 - RNA, 14 nt, Human
ugagacucugucuc

SEQ ID NO: 2458357 - RNA, 13 nt, Human
ugagacucugucu

SEQ ID NO: 2458358 - RNA, 12 nt, Human
ugagaccucagc

SEQ ID NO: 2458359 - RNA, 13 nt, Human
ugagaccucagcc

SEQ ID NO: 2458360 - RNA, 12 nt, Human
ugagacucuguc

SEQ ID NO: 2458361 - RNA, 22 nt, Human
ugagaggcauccaguaucuuga

SEQ ID NO: 2458362 - RNA, 14 nt, Human
ugagaccucagcca

SEQ ID NO: 2458363 - RNA, 23 nt, Human
ugagacucucuuaggagcagagc

SEQ ID NO: 2458364 - RNA, 19 nt, Human
ugagacucucuuaggagca

SEQ ID NO: 2458365 - RNA, 18 nt, Human
ugagaggcagacuucccu

SEQ ID NO: 2458366 - RNA, 23 nt, Human
ugagaggcauccaguaucuugaa

SEQ ID NO: 2458367 - RNA, 14 nt, Human
ugagaggcaggcau

SEQ ID NO: 2458368 - RNA, 13 nt, Human
ugagaggcaggca

SEQ ID NO: 2458369 - RNA, 12 nt, Human
ugagaggcaggc

SEQ ID NO: 2458370 - RNA, 16 nt, Human
ugagaggcaggcauag

SEQ ID NO: 2458371 - RNA, 18 nt, Human
ugagaggggcuguccagu

SEQ ID NO: 2458372 - RNA, 14 nt, Human
ugagagguuugacu

SEQ ID NO: 2458373 - RNA, 17 nt, Human
ugagaguagagucacug

SEQ ID NO: 2458374 - RNA, 19 nt, Human
ugagaggggaacagacugg

SEQ ID NO: 2458375 - RNA, 14 nt, Human
ugagaucaggcucu

SEQ ID NO: 2458376 - RNA, 20 nt, Human
ugagaugauacauccaaagc

SEQ ID NO: 2458377 - RNA, 23 nt, Human
ugagaucuaagccuuuccauaag

SEQ ID NO: 2458378 - RNA, 16 nt, Human
ugagaucuaagccuuu

SEQ ID NO: 2458379 - RNA, 20 nt, Human
ugagaucuaagccuuuccau

SEQ ID NO: 2458380 - RNA, 21 nt, Human
ugagaucuaagccuuuccaua

SEQ ID NO: 2458381 - RNA, 22 nt, Human
ugagaucuaagccuuuccauaa

SEQ ID NO: 2458382 - RNA, 19 nt, Human
ugagaguauauuauguauu

SEQ ID NO: 2458383 - RNA, 18 nt, Human
ugagaguaacuuaaguua

SEQ ID NO: 2458384 - RNA, 22 nt, Human
ugagagguuugacuagaugaug

SEQ ID NO: 2458385 - RNA, 19 nt, Human
ugagaguaucaggucuccc

SEQ ID NO: 2458386 - RNA, 17 nt, Human
ugagaguaucaggucuc

SEQ ID NO: 2458387 - RNA, 13 nt, Human
ugagaucaggcuc

SEQ ID NO: 2458388 - RNA, 23 nt, Human
ugagaguauuuaggcagauugaa

SEQ ID NO: 2458389 - RNA, 18 nt, Human
ugagauccuuccuuuuga

SEQ ID NO: 2458390 - RNA, 15 nt, Human
ugagcagucaggaaa

SEQ ID NO: 2458391 - RNA, 17 nt, Human
ugagcagucaggaaaga

SEQ ID NO: 2458392 - RNA, 20 nt, Human
ugagcagucaggaaagagaa

SEQ ID NO: 2458393 - RNA, 13 nt, Human
ugagcaucaggcc

SEQ ID NO: 2458394 - RNA, 18 nt, Human
ugagaugcagcuggaaaa

SEQ ID NO: 2458395 - RNA, 16 nt, Human
ugagaugcagcuggaa

SEQ ID NO: 2458396 - RNA, 15 nt, Human
ugagaugcagcugga

SEQ ID NO: 2458397 - RNA, 14 nt, Human
ugagaugcagcugg

SEQ ID NO: 2458398 - RNA, 19 nt, Human
ugagaugauucagaagggg

SEQ ID NO: 2458399 - RNA, 18 nt, Human
ugagaugauucagaaggg

SEQ ID NO: 2458400 - RNA, 14 nt, Human
ugagaugcuagaac

SEQ ID NO: 2458401 - RNA, 16 nt, Human
ugagaugcuagaacuc

SEQ ID NO: 2458402 - RNA, 20 nt, Human
ugagaugcuagaacucccuu

SEQ ID NO: 2458403 - RNA, 23 nt, Human
ugagcccacugcccacccccuca

SEQ ID NO: 2458404 - RNA, 22 nt, Human
ugagcccacugcccacccccuc

SEQ ID NO: 2458405 - RNA, 21 nt, Human
ugagcccacugcccacccccu

SEQ ID NO: 2458406 - RNA, 20 nt, Human
ugagcccacugcccaccccc

SEQ ID NO: 2458407 - RNA, 19 nt, Human
ugagcccacugcccacccc

SEQ ID NO: 2458408 - RNA, 17 nt, Human
ugagcccacaaagccuu

SEQ ID NO: 2458409 - RNA, 17 nt, Human
ugagcaucacaguuuug

SEQ ID NO: 2458410 - RNA, 16 nt, Human
ugagcaucacaguuuu

SEQ ID NO: 2458411 - RNA, 16 nt, Human
ugagcccacaaagccu

SEQ ID NO: 2458412 - RNA, 15 nt, Human
ugagcaucaggccag

SEQ ID NO: 2458413 - RNA, 14 nt, Human
ugagcaucaggcca

SEQ ID NO: 2458414 - RNA, 13 nt, Human
ugagccccaaaag

SEQ ID NO: 2458415 - RNA, 15 nt, Human
ugagccccuggaggc

SEQ ID NO: 2458416 - RNA, 17 nt, Human
ugagcccauggcccucc

SEQ ID NO: 2458417 - RNA, 17 nt, Human
ugagcccagcuggguca

SEQ ID NO: 2458418 - RNA, 21 nt, Human
ugagcccagcugggucaggca

SEQ ID NO: 2458419 - RNA, 12 nt, Human
ugagcccaggag

SEQ ID NO: 2458420 - RNA, 13 nt, Human
ugagcccaggagu

SEQ ID NO: 2458421 - RNA, 19 nt, Human
ugagccgggccccugggcu

SEQ ID NO: 2458422 - RNA, 20 nt, Human
ugagccgggccccugggcuu

SEQ ID NO: 2458423 - RNA, 17 nt, Human
ugagccgggccccuggg

SEQ ID NO: 2458424 - RNA, 16 nt, Human
ugagccgggccccugg

SEQ ID NO: 2458425 - RNA, 15 nt, Human
ugagccgggccccug

SEQ ID NO: 2458426 - RNA, 21 nt, Human
ugagccgcugugagccccugg

SEQ ID NO: 2458427 - RNA, 16 nt, Human
ugagccuacgcugaag

SEQ ID NO: 2458428 - RNA, 15 nt, Human
ugagccucagcaucc

SEQ ID NO: 2458429 - RNA, 13 nt, Human
ugagccucagcau

SEQ ID NO: 2458430 - RNA, 21 nt, Human
ugagcccgggcugccugggcu

SEQ ID NO: 2458431 - RNA, 22 nt, Human
ugagcccgggcugccugggcug

SEQ ID NO: 2458432 - RNA, 20 nt, Human
ugagcccgggcugccugggc

SEQ ID NO: 2458433 - RNA, 19 nt, Human
ugagcccgggcugccuggg

SEQ ID NO: 2458434 - RNA, 18 nt, Human
ugagcccgggcugccugg

SEQ ID NO: 2458435 - RNA, 17 nt, Human
ugagcccgggcugccug

SEQ ID NO: 2458436 - RNA, 16 nt, Human
ugagcccucaaaguga

SEQ ID NO: 2458437 - RNA, 12 nt, Human
ugagcccucaga

SEQ ID NO: 2458438 - RNA, 14 nt, Human
ugagcccucagaac

SEQ ID NO: 2458439 - RNA, 17 nt, Human
ugagcccucagaacccu

SEQ ID NO: 2458440 - RNA, 17 nt, Human
ugagccccugucuagag

SEQ ID NO: 2458441 - RNA, 21 nt, Human
ugagccccugucuagagaggg

SEQ ID NO: 2458442 - RNA, 12 nt, Human
ugagccccuucc

SEQ ID NO: 2458443 - RNA, 22 nt, Human
ugagccccugucuagagaggga

SEQ ID NO: 2458444 - RNA, 13 nt, Human
ugagccccuggga

SEQ ID NO: 2458445 - RNA, 14 nt, Human
ugagccccugggac

SEQ ID NO: 2458446 - RNA, 15 nt, Human
ugagccccugguccu

SEQ ID NO: 2458447 - RNA, 15 nt, Human
ugagccccugggacu

SEQ ID NO: 2458448 - RNA, 16 nt, Human
ugagcccgggcugccu

SEQ ID NO: 2458449 - RNA, 15 nt, Human
ugagcccgggcugcc

SEQ ID NO: 2458450 - RNA, 14 nt, Human
ugagcccgggcugc

SEQ ID NO: 2458451 - RNA, 13 nt, Human
ugagcccgggcug

SEQ ID NO: 2458452 - RNA, 14 nt, Human
ugagccccuuccuu

SEQ ID NO: 2458453 - RNA, 13 nt, Human
ugagccccuuccu

SEQ ID NO: 2458454 - RNA, 17 nt, Human
ugagcccggaugcuucu

SEQ ID NO: 2458455 - RNA, 21 nt, Human
ugagcucugcagcccagggac

SEQ ID NO: 2458456 - RNA, 18 nt, Human
ugagcucugcagcccagg

SEQ ID NO: 2458457 - RNA, 12 nt, Human
ugagcucucugu

SEQ ID NO: 2458458 - RNA, 23 nt, Human
ugagcucugcauuugucuauucu

SEQ ID NO: 2458459 - RNA, 22 nt, Human
ugagcucugcauuugucuauuc

SEQ ID NO: 2458460 - RNA, 12 nt, Human
ugagcucuucau

SEQ ID NO: 2458461 - RNA, 15 nt, Human
ugagcucuucauguu

SEQ ID NO: 2458462 - RNA, 16 nt, Human
ugagcucuucauguuu

SEQ ID NO: 2458463 - RNA, 18 nt, Human
ugagcucuucauguuuca

SEQ ID NO: 2458464 - RNA, 13 nt, Human
ugagcucuuguga

SEQ ID NO: 2458465 - RNA, 22 nt, Human
ugagcucuugugaggaaaguca

SEQ ID NO: 2458466 - RNA, 18 nt, Human
ugagcucuugugaggaaa

SEQ ID NO: 2458467 - RNA, 20 nt, Human
ugagcucucggaacugcaug

SEQ ID NO: 2458468 - RNA, 21 nt, Human
ugagcucucggaacugcaugc

SEQ ID NO: 2458469 - RNA, 16 nt, Human
ugagcuccucugggca

SEQ ID NO: 2458470 - RNA, 18 nt, Human
ugagcuccucugggcagg

SEQ ID NO: 2458471 - RNA, 23 nt, Human
ugagcuccccaccaccccagcug

SEQ ID NO: 2458472 - RNA, 13 nt, Human
ugagcuccucugg

SEQ ID NO: 2458473 - RNA, 14 nt, Human
ugagcuccucuggg

SEQ ID NO: 2458474 - RNA, 15 nt, Human
ugagcuccucugggc

SEQ ID NO: 2458475 - RNA, 21 nt, Human
ugagcuccccaaaaaccucac

SEQ ID NO: 2458476 - RNA, 15 nt, Human
ugagcuccccaccac

SEQ ID NO: 2458477 - RNA, 20 nt, Human
ugagcuccccaccaccccag

SEQ ID NO: 2458478 - RNA, 22 nt, Human
ugagcuccccaccaccccagcu

SEQ ID NO: 2458479 - RNA, 15 nt, Human
ugagcuccccaaaaa

SEQ ID NO: 2458480 - RNA, 16 nt, Human
ugagcuccccaaaaac

SEQ ID NO: 2458481 - RNA, 16 nt, Human
ugagcuccaugugccc

SEQ ID NO: 2458482 - RNA, 21 nt, Human
ugagcuccagacccccagcaa

SEQ ID NO: 2458483 - RNA, 18 nt, Human
ugagcuccagacccccag

SEQ ID NO: 2458484 - RNA, 19 nt, Human
ugagcuccagacccccagc

SEQ ID NO: 2458485 - RNA, 20 nt, Human
ugagcuccagacccccagca

SEQ ID NO: 2458486 - RNA, 16 nt, Human
ugcacaaacagaggcc

SEQ ID NO: 2458487 - RNA, 15 nt, Human
ugcacaaacagaggc

SEQ ID NO: 2458488 - RNA, 20 nt, Human
ugcaauuucauaugcuguau

SEQ ID NO: 2458489 - RNA, 14 nt, Human
ugcaauuucauaug

SEQ ID NO: 2458490 - RNA, 19 nt, Human
ugcaauuuguuugugcuuc

SEQ ID NO: 2458491 - RNA, 17 nt, Human
ugcaauuuguuugugcu

SEQ ID NO: 2458492 - RNA, 19 nt, Human
ugcaauuugggagauauau

SEQ ID NO: 2458493 - RNA, 21 nt, Human
ugcaauuuguuugugcuucua

SEQ ID NO: 2458494 - RNA, 20 nt, Human
ugcaauuuguuugugcuucu

SEQ ID NO: 2458495 - RNA, 20 nt, Human
ugcaauuuuaauugauuauu

SEQ ID NO: 2458496 - RNA, 18 nt, Human
ugcaauuccccucugcug

SEQ ID NO: 2458497 - RNA, 14 nt, Human
ugcaauuccccucu

SEQ ID NO: 2458498 - RNA, 13 nt, Human
ugcaauuccccuc

SEQ ID NO: 2458499 - RNA, 16 nt, Human
ugcaauuaaagugaua

SEQ ID NO: 2458500 - RNA, 15 nt, Human
ugcaauuaaagugau

SEQ ID NO: 2458501 - RNA, 22 nt, Human
ugcaauuuauuaaaaugauugu

SEQ ID NO: 2458502 - RNA, 18 nt, Human
ugcaauuuauuaaaauga

SEQ ID NO: 2458503 - RNA, 15 nt, Human
ugcaauugcuuagga

SEQ ID NO: 2458504 - RNA, 21 nt, Human
ugcaauuguaggggugugugu

SEQ ID NO: 2458505 - RNA, 15 nt, Human
ugcaauuuauuaaaa

SEQ ID NO: 2458506 - RNA, 14 nt, Human
ugcaauuuauuaaa

SEQ ID NO: 2458507 - RNA, 22 nt, Human
ugcaauuguaggggugugugug

SEQ ID NO: 2458508 - RNA, 19 nt, Human
ugcacaaacagaggccgcc

SEQ ID NO: 2458509 - RNA, 17 nt, Human
ugcacaaacagaggccg

SEQ ID NO: 2458510 - RNA, 15 nt, Human
ugcacaaacucacca

SEQ ID NO: 2458511 - RNA, 21 nt, Human
ugcacaaaauucgaccugauu

SEQ ID NO: 2458512 - RNA, 19 nt, Human
ugcacaaaacccagaccug

SEQ ID NO: 2458513 - RNA, 18 nt, Human
ugcacaaaacccagaccu

SEQ ID NO: 2458514 - RNA, 20 nt, Human
ugcacaaacagaggccgcca

SEQ ID NO: 2458515 - RNA, 18 nt, Human
ugcacagaguuguuacau

SEQ ID NO: 2458516 - RNA, 19 nt, Human
ugcacagaguuguuacauu

SEQ ID NO: 2458517 - RNA, 17 nt, Human
ugcacagaguuguuaca

SEQ ID NO: 2458518 - RNA, 17 nt, Human
ugcacaaagcccuucca

SEQ ID NO: 2458519 - RNA, 15 nt, Human
ugcacaaagcccuuc

SEQ ID NO: 2458520 - RNA, 23 nt, Human
ugcaaugaccuuucaauaggaaa

SEQ ID NO: 2458521 - RNA, 22 nt, Human
ugcaaugaccuuucaauaggaa

SEQ ID NO: 2458522 - RNA, 19 nt, Human
ugcaaugaccuuucaauag

SEQ ID NO: 2458523 - RNA, 17 nt, Human
ugcaaugaccuuucaau

SEQ ID NO: 2458524 - RNA, 16 nt, Human
ugcaaugaccuuucaa

SEQ ID NO: 2458525 - RNA, 13 nt, Human
ugcaaugaccuuu

SEQ ID NO: 2458526 - RNA, 18 nt, Human
ugcaagagacucuggccu

SEQ ID NO: 2458527 - RNA, 11 nt, Human
ugcaaugaaca

SEQ ID NO: 2458528 - RNA, 15 nt, Human
ugcaaugaagucucu

SEQ ID NO: 2458529 - RNA, 17 nt, Human
ugcaagagacucuggcc

SEQ ID NO: 2458530 - RNA, 20 nt, Human
ugcaagaaaaugauguguac

SEQ ID NO: 2458531 - RNA, 18 nt, Human
ugcaaugaagucucugaa

SEQ ID NO: 2458532 - RNA, 22 nt, Human
ugcaaugaagucucugaaguga

SEQ ID NO: 2458533 - RNA, 21 nt, Human
ugcaaugacacagucuuggcu

SEQ ID NO: 2458534 - RNA, 16 nt, Human
ugcaauggcagccuug

SEQ ID NO: 2458535 - RNA, 15 nt, Human
ugcaauggcagccuu

SEQ ID NO: 2458536 - RNA, 14 nt, Human
ugcaauggcagccu

SEQ ID NO: 2458537 - RNA, 13 nt, Human
ugcaauggcagcc

SEQ ID NO: 2458538 - RNA, 15 nt, Human
ugcaauguuuuccuu

SEQ ID NO: 2458539 - RNA, 22 nt, Human
ugcaaugucugagugaaccugu

SEQ ID NO: 2458540 - RNA, 19 nt, Human
ugcaaugucugagugaacc

SEQ ID NO: 2458541 - RNA, 16 nt, Human
ugcaaugugcuacuga

SEQ ID NO: 2458542 - RNA, 22 nt, Human
ugcaauguagaggggaaaagag

SEQ ID NO: 2458543 - RNA, 17 nt, Human
ugcaaugguuaacaucu

SEQ ID NO: 2458544 - RNA, 15 nt, Human
ugcaaugggcacugg

SEQ ID NO: 2458545 - RNA, 20 nt, Human
ugcaauggcgugaucucggc

SEQ ID NO: 2458546 - RNA, 18 nt, Human
ugcaauggcuauauggca

SEQ ID NO: 2458547 - RNA, 16 nt, Human
ugcaaugacaucuuca

SEQ ID NO: 2458548 - RNA, 17 nt, Human
ugcaaugacaucuucaa

SEQ ID NO: 2458549 - RNA, 16 nt, Human
ugcaaugacucaggac

SEQ ID NO: 2458550 - RNA, 17 nt, Human
ugcagaggucugugcug

SEQ ID NO: 2458551 - RNA, 16 nt, Human
ugcagaggucugugcu

SEQ ID NO: 2458552 - RNA, 15 nt, Human
ugcagaggucugugc

SEQ ID NO: 2458553 - RNA, 14 nt, Human
ugcagaggucugug

SEQ ID NO: 2458554 - RNA, 19 nt, Human
ugcagagguccacaacaca

SEQ ID NO: 2458555 - RNA, 21 nt, Human
ugcagaggggcuuucuggaga

SEQ ID NO: 2458556 - RNA, 22 nt, Human
ugcagaggggcuuucuggagag

SEQ ID NO: 2458557 - RNA, 20 nt, Human
ugcagagguaaaagugugag

SEQ ID NO: 2458558 - RNA, 19 nt, Human
ugcagaggguacuuuaaga

SEQ ID NO: 2458559 - RNA, 15 nt, Human
ugcagaggggcaggc

SEQ ID NO: 2458560 - RNA, 14 nt, Human
ugcacuucuuacaa

SEQ ID NO: 2458561 - RNA, 20 nt, Human
ugcagaggggcaggcccugc

SEQ ID NO: 2458562 - RNA, 18 nt, Human
ugcagaggggcaggcccu

SEQ ID NO: 2458563 - RNA, 17 nt, Human
ugcagaggggcaggccc

SEQ ID NO: 2458564 - RNA, 22 nt, Human
ugcagaggggcaggcccugcac

SEQ ID NO: 2458565 - RNA, 21 nt, Human
ugcagaggggcaggcccugca

SEQ ID NO: 2458566 - RNA, 20 nt, Human
ugcagaggggcuuucuggag

SEQ ID NO: 2458567 - RNA, 20 nt, Human
ugcacuguucccccugugca

SEQ ID NO: 2458568 - RNA, 21 nt, Human
ugcacuguucccccugugcag

SEQ ID NO: 2458569 - RNA, 23 nt, Human
ugcacuguucccccugugcagcc

SEQ ID NO: 2458570 - RNA, 14 nt, Human
ugcacuguuccccc

SEQ ID NO: 2458571 - RNA, 19 nt, Human
ugcacuguucccccugugc

SEQ ID NO: 2458572 - RNA, 13 nt, Human
ugcacuguucccc

SEQ ID NO: 2458573 - RNA, 18 nt, Human
ugcacugugaaggacccu

SEQ ID NO: 2458574 - RNA, 18 nt, Human
ugcacuuacuugcuuauu

SEQ ID NO: 2458575 - RNA, 16 nt, Human
ugcacuuacuugcuua

SEQ ID NO: 2458576 - RNA, 18 nt, Human
ugcacuuaugauuucaug

SEQ ID NO: 2458577 - RNA, 19 nt, Human
ugcacuuaugauuucaugu

SEQ ID NO: 2458578 - RNA, 20 nt, Human
ugcacuuaugauuucaugug

SEQ ID NO: 2458579 - RNA, 21 nt, Human
ugcacuuaaggcacucuguua

SEQ ID NO: 2458580 - RNA, 15 nt, Human
ugcacuuacuugcuu

SEQ ID NO: 2458581 - RNA, 16 nt, Human
ugcacuuaaggcacuc

SEQ ID NO: 2458582 - RNA, 23 nt, Human
ugcacuuaacaagcucccaggcc

SEQ ID NO: 2458583 - RNA, 18 nt, Human
ugcacuuaacaagcuccc

SEQ ID NO: 2458584 - RNA, 17 nt, Human
ugcacuguccugcucca

SEQ ID NO: 2458585 - RNA, 16 nt, Human
ugcacuguccugcucc

SEQ ID NO: 2458586 - RNA, 15 nt, Human
ugcacuguccugcuc

SEQ ID NO: 2458587 - RNA, 14 nt, Human
ugcacuguccugcu

SEQ ID NO: 2458588 - RNA, 13 nt, Human
ugcacuguccugc

SEQ ID NO: 2458589 - RNA, 12 nt, Human
ugcacuguccug

SEQ ID NO: 2458590 - RNA, 23 nt, Human
ugcacugucacuuugcucugggu

SEQ ID NO: 2458591 - RNA, 22 nt, Human
ugcacugucacuuugcucuggg

SEQ ID NO: 2458592 - RNA, 22 nt, Human
ugcacuguccugcuccacagug

SEQ ID NO: 2458593 - RNA, 21 nt, Human
ugcacuguccugcuccacagu

SEQ ID NO: 2458594 - RNA, 20 nt, Human
ugcacuguccugcuccacag

SEQ ID NO: 2458595 - RNA, 18 nt, Human
ugcacuguccugcuccac

SEQ ID NO: 2458596 - RNA, 19 nt, Human
ugcacugucgauaaucaga

SEQ ID NO: 2458597 - RNA, 23 nt, Human
ugcacuguccugcuccacagugu

SEQ ID NO: 2458598 - RNA, 15 nt, Human
ugcacugugaaggac

SEQ ID NO: 2458599 - RNA, 16 nt, Human
ugcacugucaagauga

SEQ ID NO: 2458600 - RNA, 21 nt, Human
ugcacugucacuuugcucugg

SEQ ID NO: 2458601 - RNA, 19 nt, Human
ugcacugucacuuugcucu

SEQ ID NO: 2458602 - RNA, 15 nt, Human
ugcacugucacuuug

SEQ ID NO: 2458603 - RNA, 21 nt, Human
ugcacugacauuguuggccaa

SEQ ID NO: 2458604 - RNA, 18 nt, Human
ugcacugacauuguuggc

SEQ ID NO: 2458605 - RNA, 13 nt, Human
ugcacucugugcc

SEQ ID NO: 2458606 - RNA, 12 nt, Human
ugcacucugugc

SEQ ID NO: 2458607 - RNA, 16 nt, Human
ugcacucugugcccau

SEQ ID NO: 2458608 - RNA, 15 nt, Human
ugcacucugugccca

SEQ ID NO: 2458609 - RNA, 21 nt, Human
ugcacucugugcccaugggca

SEQ ID NO: 2458610 - RNA, 21 nt, Human
ugcaccggcuggccuggcccc

SEQ ID NO: 2458611 - RNA, 17 nt, Human
ugcaccuggaauauaua

SEQ ID NO: 2458612 - RNA, 20 nt, Human
ugcaccuggaauauauaacc

SEQ ID NO: 2458613 - RNA, 22 nt, Human
ugcaccuggaauauauaaccag

SEQ ID NO: 2458614 - RNA, 19 nt, Human
ugcacagugauuuuuuucu

SEQ ID NO: 2458615 - RNA, 16 nt, Human
ugcaccuguacucagg

SEQ ID NO: 2458616 - RNA, 17 nt, Human
ugcaccuguacucagga

SEQ ID NO: 2458617 - RNA, 19 nt, Human
ugcaccuuaccaacuuucu

SEQ ID NO: 2458618 - RNA, 18 nt, Human
ugcaccuuaccaacuuuc

SEQ ID NO: 2458619 - RNA, 13 nt, Human
ugcaccuuaccaa

SEQ ID NO: 2458620 - RNA, 12 nt, Human
ugcaccugugca

SEQ ID NO: 2458621 - RNA, 20 nt, Human
ugcaccuguacucaggaggc

SEQ ID NO: 2458622 - RNA, 16 nt, Human
ugcaccuugugucugu

SEQ ID NO: 2458623 - RNA, 15 nt, Human
ugcaccuugugucug

SEQ ID NO: 2458624 - RNA, 21 nt, Human
ugcaccuuaccaacuuucugu

SEQ ID NO: 2458625 - RNA, 20 nt, Human
ugcaccuuaccaacuuucug

SEQ ID NO: 2458626 - RNA, 14 nt, Human
ugcaccuugugucu

SEQ ID NO: 2458627 - RNA, 15 nt, Human
ugcacgaccuuggga

SEQ ID NO: 2458628 - RNA, 20 nt, Human
ugcaccggcuggccuggccc

SEQ ID NO: 2458629 - RNA, 19 nt, Human
ugcaccggcuggccuggcc

SEQ ID NO: 2458630 - RNA, 18 nt, Human
ugcaccggcuggccuggc

SEQ ID NO: 2458631 - RNA, 17 nt, Human
ugcacagugcaucucag

SEQ ID NO: 2458632 - RNA, 16 nt, Human
ugcacagugcaucuca

SEQ ID NO: 2458633 - RNA, 13 nt, Human
ugcacagugauuu

SEQ ID NO: 2458634 - RNA, 15 nt, Human
ugcacagugcaucuc

SEQ ID NO: 2458635 - RNA, 19 nt, Human
ugcacagggcagcugggcc

SEQ ID NO: 2458636 - RNA, 21 nt, Human
ugcacagagcucuccagcucc

SEQ ID NO: 2458637 - RNA, 21 nt, Human
ugcacaaauauuuauuuucuu

SEQ ID NO: 2458638 - RNA, 20 nt, Human
ugcacagggcagcugggccc

SEQ ID NO: 2458639 - RNA, 20 nt, Human
ugcacagaguuguuacauuu

SEQ ID NO: 2458640 - RNA, 23 nt, Human
ugauuuuuuuuuccuucagugcc

SEQ ID NO: 2458641 - RNA, 22 nt, Human
ugauuuuuuuuuccuucagugc

SEQ ID NO: 2458642 - RNA, 18 nt, Human
ugauuuuuuuuucauaca

SEQ ID NO: 2458643 - RNA, 22 nt, Human
ugauuuuuuuuucauacacuua

SEQ ID NO: 2458644 - RNA, 16 nt, Human
ugauuuuuuuuuuuca

SEQ ID NO: 2458645 - RNA, 14 nt, Human
ugcaaaaaggguca

SEQ ID NO: 2458646 - RNA, 18 nt, Human
ugcaaaaauauuuauaaa

SEQ ID NO: 2458647 - RNA, 12 nt, Human
ugcaaaaaauag

SEQ ID NO: 2458648 - RNA, 22 nt, Human
ugcaaaaauauuuauaaaacuu

SEQ ID NO: 2458649 - RNA, 23 nt, Human
ugcaaaaauauuuauaaaacuuc

SEQ ID NO: 2458650 - RNA, 19 nt, Human
ugcaaaacagcguuuaaga

SEQ ID NO: 2458651 - RNA, 23 nt, Human
ugcaaaagacuaauuuaaaaaau

SEQ ID NO: 2458652 - RNA, 19 nt, Human
ugcaaaaggacucucagga

SEQ ID NO: 2458653 - RNA, 23 nt, Human
ugcaaaacagcguuuaagacugu

SEQ ID NO: 2458654 - RNA, 20 nt, Human
ugauuuuuuuuuccuucagu

SEQ ID NO: 2458655 - RNA, 19 nt, Human
ugauuuuuuuuuccuucag

SEQ ID NO: 2458656 - RNA, 17 nt, Human
ugauuuuuuuuuccuuc

SEQ ID NO: 2458657 - RNA, 16 nt, Human
ugauuuuuuuuuccuu

SEQ ID NO: 2458658 - RNA, 21 nt, Human
ugauuuuugccucuuccaguc

SEQ ID NO: 2458659 - RNA, 19 nt, Human
ugauuuuucuggagguuga

SEQ ID NO: 2458660 - RNA, 13 nt, Human
ugauuuuucugga

SEQ ID NO: 2458661 - RNA, 20 nt, Human
ugauuuuuagaugagauugu

SEQ ID NO: 2458662 - RNA, 22 nt, Human
ugauuuuugccucuuccagucu

SEQ ID NO: 2458663 - RNA, 13 nt, Human
ugauuuuuugcau

SEQ ID NO: 2458664 - RNA, 16 nt, Human
ugauuuuuuuuccuuu

SEQ ID NO: 2458665 - RNA, 18 nt, Human
ugauuuuuguaagacaau

SEQ ID NO: 2458666 - RNA, 13 nt, Human
ugauuuuuuucca

SEQ ID NO: 2458667 - RNA, 12 nt, Human
ugauuuuaacaa

SEQ ID NO: 2458668 - RNA, 17 nt, Human
ugauguggaguggggca

SEQ ID NO: 2458669 - RNA, 18 nt, Human
ugauguggaguggggcag

SEQ ID NO: 2458670 - RNA, 22 nt, Human
ugauuuuaaaccauaaaaagcu

SEQ ID NO: 2458671 - RNA, 14 nt, Human
ugauuuuaacucug

SEQ ID NO: 2458672 - RNA, 22 nt, Human
ugauuuuaacaauaacuacugu

SEQ ID NO: 2458673 - RNA, 18 nt, Human
ugauuuuaacaauaacua

SEQ ID NO: 2458674 - RNA, 19 nt, Human
ugauuuuaacaauaacuac

SEQ ID NO: 2458675 - RNA, 13 nt, Human
ugauuuuaacaau

SEQ ID NO: 2458676 - RNA, 14 nt, Human
ugauuuuaacaaua

SEQ ID NO: 2458677 - RNA, 16 nt, Human
ugauuuuaacaauaac

SEQ ID NO: 2458678 - RNA, 17 nt, Human
ugauuuuaacaauaacu

SEQ ID NO: 2458679 - RNA, 16 nt, Human
ugauuuuaauaauaua

SEQ ID NO: 2458680 - RNA, 15 nt, Human
ugauuuuaacucugu

SEQ ID NO: 2458681 - RNA, 17 nt, Human
ugauuuuaacucugucu

SEQ ID NO: 2458682 - RNA, 19 nt, Human
ugauuuuagccuucucugu

SEQ ID NO: 2458683 - RNA, 18 nt, Human
ugauuuuagcugcagaac

SEQ ID NO: 2458684 - RNA, 15 nt, Human
ugauuuuagccuucu

SEQ ID NO: 2458685 - RNA, 19 nt, Human
ugauuuuacaauugaaaug

SEQ ID NO: 2458686 - RNA, 13 nt, Human
ugaugugccuggg

SEQ ID NO: 2458687 - RNA, 21 nt, Human
ugaugugccauuuuaaaaaaa

SEQ ID NO: 2458688 - RNA, 22 nt, Human
ugaugugaagccaauucagaca

SEQ ID NO: 2458689 - RNA, 14 nt, Human
ugaugugaagccaa

SEQ ID NO: 2458690 - RNA, 16 nt, Human
ugaugucccuauggaa

SEQ ID NO: 2458691 - RNA, 20 nt, Human
ugauuuucaaagcuuuuucc

SEQ ID NO: 2458692 - RNA, 15 nt, Human
ugauuuucauugcug

SEQ ID NO: 2458693 - RNA, 16 nt, Human
ugauuuuaucugugaa

SEQ ID NO: 2458694 - RNA, 15 nt, Human
ugauuuuaucuguga

SEQ ID NO: 2458695 - RNA, 13 nt, Human
ugauuuucauugc

SEQ ID NO: 2458696 - RNA, 12 nt, Human
ugauuuucuguu

SEQ ID NO: 2458697 - RNA, 15 nt, Human
ugauuuugaaaccau

SEQ ID NO: 2458698 - RNA, 13 nt, Human
ugauuuucuguug

SEQ ID NO: 2458699 - RNA, 15 nt, Human
ugauuuugaaaucau

SEQ ID NO: 2458700 - RNA, 16 nt, Human
ugauuuugcuguagaa

SEQ ID NO: 2458701 - RNA, 14 nt, Human
ugauuuugcuguag

SEQ ID NO: 2458702 - RNA, 19 nt, Human
ugauuuugcuguagaagau

SEQ ID NO: 2458703 - RNA, 17 nt, Human
ugauuuugcuguagaag

SEQ ID NO: 2458704 - RNA, 22 nt, Human
ugauuuuuaccguuucuucccu

SEQ ID NO: 2458705 - RNA, 13 nt, Human
ugauuuugcaaau

SEQ ID NO: 2458706 - RNA, 21 nt, Human
ugauuuuuaccguuucuuccc

SEQ ID NO: 2458707 - RNA, 21 nt, Human
ugcaaccuccgccucccgggu

SEQ ID NO: 2458708 - RNA, 14 nt, Human
ugcaaccucgcugg

SEQ ID NO: 2458709 - RNA, 19 nt, Human
ugcaaccucgcuggacucu

SEQ ID NO: 2458710 - RNA, 20 nt, Human
ugcaaccucgcuggacucuc

SEQ ID NO: 2458711 - RNA, 22 nt, Human
ugcaaccucgcuggacucucag

SEQ ID NO: 2458712 - RNA, 18 nt, Human
ugcaaccucuuggccuga

SEQ ID NO: 2458713 - RNA, 20 nt, Human
ugcaaccugauugugucucu

SEQ ID NO: 2458714 - RNA, 19 nt, Human
ugcaaccugauugugucuc

SEQ ID NO: 2458715 - RNA, 21 nt, Human
ugcaaccuccgccucuugggu

SEQ ID NO: 2458716 - RNA, 20 nt, Human
ugcaaccuccgccucuuggg

SEQ ID NO: 2458717 - RNA, 20 nt, Human
ugcaaccuccgccucccggg

SEQ ID NO: 2458718 - RNA, 21 nt, Human
ugcaacccaaggacugaggga

SEQ ID NO: 2458719 - RNA, 18 nt, Human
ugcaaccuccgccucuug

SEQ ID NO: 2458720 - RNA, 22 nt, Human
ugcaaccugauugugucucuug

SEQ ID NO: 2458721 - RNA, 18 nt, Human
ugcaaccuucgccaccug

SEQ ID NO: 2458722 - RNA, 21 nt, Human
ugcaaccuucgccaccugggu

SEQ ID NO: 2458723 - RNA, 22 nt, Human
ugcaacuucaugucaacuucug

SEQ ID NO: 2458724 - RNA, 15 nt, Human
ugcaacuucauguca

SEQ ID NO: 2458725 - RNA, 17 nt, Human
ugcaacucaaggacuuu

SEQ ID NO: 2458726 - RNA, 16 nt, Human
ugcaacucaaggacuu

SEQ ID NO: 2458727 - RNA, 16 nt, Human
ugcaacggcuuagacu

SEQ ID NO: 2458728 - RNA, 14 nt, Human
ugcaaccuguugau

SEQ ID NO: 2458729 - RNA, 18 nt, Human
ugcaacuuuguauaaaag

SEQ ID NO: 2458730 - RNA, 23 nt, Human
ugcaacuuuaagcagcucuugcu

SEQ ID NO: 2458731 - RNA, 20 nt, Human
ugcaacuuuaagcagcucuu

SEQ ID NO: 2458732 - RNA, 19 nt, Human
ugcaacuuuaagcagcucu

SEQ ID NO: 2458733 - RNA, 14 nt, Human
ugcaacuuggacuu

SEQ ID NO: 2458734 - RNA, 18 nt, Human
ugcaacuuguaaaugugg

SEQ ID NO: 2458735 - RNA, 16 nt, Human
ugcaacuuguaaaugu

SEQ ID NO: 2458736 - RNA, 17 nt, Human
ugcaacuucuuuuuauu

SEQ ID NO: 2458737 - RNA, 21 nt, Human
ugcaacuucuuuuuauuuucu

SEQ ID NO: 2458738 - RNA, 14 nt, Human
ugcaacuucugccu

SEQ ID NO: 2458739 - RNA, 13 nt, Human
ugcaacuucugcc

SEQ ID NO: 2458740 - RNA, 22 nt, Human
ugcaaacaugggguuggcuggg

SEQ ID NO: 2458741 - RNA, 23 nt, Human
ugcaaacacacaaagguauaauu

SEQ ID NO: 2458742 - RNA, 14 nt, Human
ugcaaaauuuccag

SEQ ID NO: 2458743 - RNA, 15 nt, Human
ugcaaaauuuccagu

SEQ ID NO: 2458744 - RNA, 16 nt, Human
ugcaaaauuuccagua

SEQ ID NO: 2458745 - RNA, 22 nt, Human
ugcaaaauuugaugccaggaca

SEQ ID NO: 2458746 - RNA, 21 nt, Human
ugcaaaauuugaugccaggac

SEQ ID NO: 2458747 - RNA, 21 nt, Human
ugcaaaauuuccaguaccuuu

SEQ ID NO: 2458748 - RNA, 20 nt, Human
ugcaaaagacuaauuuaaaa

SEQ ID NO: 2458749 - RNA, 21 nt, Human
ugcaaaaugaggaauguauau

SEQ ID NO: 2458750 - RNA, 18 nt, Human
ugcaaaaugaggaaugua

SEQ ID NO: 2458751 - RNA, 17 nt, Human
ugcaaaaugagacccuc

SEQ ID NO: 2458752 - RNA, 20 nt, Human
ugcaaaaguucugacuugac

SEQ ID NO: 2458753 - RNA, 23 nt, Human
ugcaaaagguucacuaaagcagu

SEQ ID NO: 2458754 - RNA, 22 nt, Human
ugcaaaaggacucucaggacca

SEQ ID NO: 2458755 - RNA, 22 nt, Human
ugcaaaagguucacuaaagcag

SEQ ID NO: 2458756 - RNA, 17 nt, Human
ugcaacaggcugggcuu

SEQ ID NO: 2458757 - RNA, 16 nt, Human
ugcaacaggcugggcu

SEQ ID NO: 2458758 - RNA, 15 nt, Human
ugcaacaggcugggc

SEQ ID NO: 2458759 - RNA, 14 nt, Human
ugcaacaggcuggg

SEQ ID NO: 2458760 - RNA, 15 nt, Human
ugcaaccacugcaac

SEQ ID NO: 2458761 - RNA, 13 nt, Human
ugcaaccacugca

SEQ ID NO: 2458762 - RNA, 17 nt, Human
ugcaaccaacuacaacc

SEQ ID NO: 2458763 - RNA, 11 nt, Human
ugcaaccacug

SEQ ID NO: 2458764 - RNA, 24 nt, Human
ugcaacaggguauggacuaucugu

SEQ ID NO: 2458765 - RNA, 14 nt, Human
ugcaacaggcuugu

SEQ ID NO: 2458766 - RNA, 13 nt, Human
ugcaacaguagca

SEQ ID NO: 2458767 - RNA, 14 nt, Human
ugcaacaguagcau

SEQ ID NO: 2458768 - RNA, 20 nt, Human
ugcaacaggcugggcuucag

SEQ ID NO: 2458769 - RNA, 19 nt, Human
ugcaacaggcugggcuuca

SEQ ID NO: 2458770 - RNA, 14 nt, Human
ugcaaccuccgccu

SEQ ID NO: 2458771 - RNA, 13 nt, Human
ugcaaccuccgcc

SEQ ID NO: 2458772 - RNA, 16 nt, Human
ugcaaccgucuguuau

SEQ ID NO: 2458773 - RNA, 15 nt, Human
ugcaacccuuacccc

SEQ ID NO: 2458774 - RNA, 17 nt, Human
ugcaacccuuaccccuu

SEQ ID NO: 2458775 - RNA, 20 nt, Human
ugcaacccaaggacugaggg

SEQ ID NO: 2458776 - RNA, 16 nt, Human
ugcaacccaaggacug

SEQ ID NO: 2458777 - RNA, 19 nt, Human
ugccaggaagccagcaggc

SEQ ID NO: 2458778 - RNA, 18 nt, Human
ugccaggaagccagcagg

SEQ ID NO: 2458779 - RNA, 16 nt, Human
ugccaggaagccagca

SEQ ID NO: 2458780 - RNA, 12 nt, Human
ugccaggaagcc

SEQ ID NO: 2458781 - RNA, 18 nt, Human
ugccacucacuaggcccc

SEQ ID NO: 2458782 - RNA, 17 nt, Human
ugccacucacuaggccc

SEQ ID NO: 2458783 - RNA, 15 nt, Human
ugccacucacuaggc

SEQ ID NO: 2458784 - RNA, 14 nt, Human
ugccacucacuagg

SEQ ID NO: 2458785 - RNA, 22 nt, Human
ugccacucacacagccaggugc

SEQ ID NO: 2458786 - RNA, 14 nt, Human
ugccaccagagacc

SEQ ID NO: 2458787 - RNA, 13 nt, Human
ugccacucacuag

SEQ ID NO: 2458788 - RNA, 13 nt, Human
ugccaccagagac

SEQ ID NO: 2458789 - RNA, 22 nt, Human
ugccacucacuaggcccccacu

SEQ ID NO: 2458790 - RNA, 21 nt, Human
ugccacucacuaggcccccac

SEQ ID NO: 2458791 - RNA, 20 nt, Human
ugccacucacuaggccccca

SEQ ID NO: 2458792 - RNA, 19 nt, Human
ugccacucacuaggccccc

SEQ ID NO: 2458793 - RNA, 18 nt, Human
ugccacucauuccuguag

SEQ ID NO: 2458794 - RNA, 17 nt, Human
ugccacucauuccugua

SEQ ID NO: 2458795 - RNA, 23 nt, Human
ugccacucacacagccaggugcc

SEQ ID NO: 2458796 - RNA, 17 nt, Human
ugccacugcccgagcug

SEQ ID NO: 2458797 - RNA, 19 nt, Human
ugccagguuuucugggugu

SEQ ID NO: 2458798 - RNA, 18 nt, Human
ugccagguuuucugggug

SEQ ID NO: 2458799 - RNA, 14 nt, Human
ugccagguuuucug

SEQ ID NO: 2458800 - RNA, 20 nt, Human
ugccagguucuauuuggaau

SEQ ID NO: 2458801 - RNA, 22 nt, Human
ugccaucauguuuacagaggac

SEQ ID NO: 2458802 - RNA, 12 nt, Human
ugccauccaggu

SEQ ID NO: 2458803 - RNA, 14 nt, Human
ugccaucuucccag

SEQ ID NO: 2458804 - RNA, 15 nt, Human
ugccauccagguuca

SEQ ID NO: 2458805 - RNA, 19 nt, Human
ugccagguucuauuuggaa

SEQ ID NO: 2458806 - RNA, 20 nt, Human
ugccagguccuugcccuuug

SEQ ID NO: 2458807 - RNA, 16 nt, Human
ugccagguccuugccc

SEQ ID NO: 2458808 - RNA, 17 nt, Human
ugccagguuuuuggucu

SEQ ID NO: 2458809 - RNA, 23 nt, Human
ugccaggguuucgagaagcugcu

SEQ ID NO: 2458810 - RNA, 20 nt, Human
ugccaggguuucgagaagcu

SEQ ID NO: 2458811 - RNA, 21 nt, Human
ugccacucacacagccaggug

SEQ ID NO: 2458812 - RNA, 12 nt, Human
ugccagggcagg

SEQ ID NO: 2458813 - RNA, 16 nt, Human
ugccagggcagggccc

SEQ ID NO: 2458814 - RNA, 15 nt, Human
ugccagggcagggcc

SEQ ID NO: 2458815 - RNA, 18 nt, Human
ugccacugcccgagcugg

SEQ ID NO: 2458816 - RNA, 20 nt, Human
ugcccaccuggccucugcac

SEQ ID NO: 2458817 - RNA, 16 nt, Human
ugccauguuggccagg

SEQ ID NO: 2458818 - RNA, 15 nt, Human
ugccauguuggccag

SEQ ID NO: 2458819 - RNA, 12 nt, Human
ugccauguuggc

SEQ ID NO: 2458820 - RNA, 18 nt, Human
ugcccacgcuggagugca

SEQ ID NO: 2458821 - RNA, 19 nt, Human
ugcccaccuggccucugca

SEQ ID NO: 2458822 - RNA, 19 nt, Human
ugcccacggagucgugggg

SEQ ID NO: 2458823 - RNA, 11 nt, Human
ugcccaccugu

SEQ ID NO: 2458824 - RNA, 13 nt, Human
ugcccacucccug

SEQ ID NO: 2458825 - RNA, 21 nt, Human
ugcccacucccugcaaccuga

SEQ ID NO: 2458826 - RNA, 17 nt, Human
ugcccacugucucuccu

SEQ ID NO: 2458827 - RNA, 21 nt, Human
ugcccagaacuggacucagga

SEQ ID NO: 2458828 - RNA, 17 nt, Human
ugccaugugugcugaac

SEQ ID NO: 2458829 - RNA, 15 nt, Human
ugccaugugaagagg

SEQ ID NO: 2458830 - RNA, 16 nt, Human
ugccaugugaagaggg

SEQ ID NO: 2458831 - RNA, 15 nt, Human
ugccaugugccaggu

SEQ ID NO: 2458832 - RNA, 20 nt, Human
ugccauguaggguucccuua

SEQ ID NO: 2458833 - RNA, 14 nt, Human
ugccaugugccagg

SEQ ID NO: 2458834 - RNA, 23 nt, Human
ugccaugaggaacaaggcaaggc

SEQ ID NO: 2458835 - RNA, 20 nt, Human
ugccaugaggaacaaggcaa

SEQ ID NO: 2458836 - RNA, 16 nt, Human
ugccaucuucccagca

SEQ ID NO: 2458837 - RNA, 15 nt, Human
ugccaucuucccagc

SEQ ID NO: 2458838 - RNA, 14 nt, Human
ugcauuauauuuau

SEQ ID NO: 2458839 - RNA, 12 nt, Human
ugcauuaucuag

SEQ ID NO: 2458840 - RNA, 17 nt, Human
ugcauuaucuagauacu

SEQ ID NO: 2458841 - RNA, 21 nt, Human
ugcauuauauuuguaaauuua

SEQ ID NO: 2458842 - RNA, 16 nt, Human
ugcauuugucuauucu

SEQ ID NO: 2458843 - RNA, 21 nt, Human
ugcauguuuuccagcuccuca

SEQ ID NO: 2458844 - RNA, 14 nt, Human
ugcauuaaaagaaa

SEQ ID NO: 2458845 - RNA, 15 nt, Human
ugcauuaaaagaaaa

SEQ ID NO: 2458846 - RNA, 16 nt, Human
ugcauuaaaagaaaau

SEQ ID NO: 2458847 - RNA, 17 nt, Human
ugcauuaaaagaaaaua

SEQ ID NO: 2458848 - RNA, 22 nt, Human
ugcauuacagagaggagaaaca

SEQ ID NO: 2458849 - RNA, 23 nt, Human
ugcauuaccgcguuguaaaauau

SEQ ID NO: 2458850 - RNA, 22 nt, Human
ugcauuaccgcguuguaaaaua

SEQ ID NO: 2458851 - RNA, 23 nt, Human
ugcauuacagagaggagaaacac

SEQ ID NO: 2458852 - RNA, 19 nt, Human
ugcauuaccgcguuguaaa

SEQ ID NO: 2458853 - RNA, 15 nt, Human
ugcauuacugcaugc

SEQ ID NO: 2458854 - RNA, 17 nt, Human
ugcauuacugcaugcac

SEQ ID NO: 2458855 - RNA, 18 nt, Human
ugcauuacugcaugcacu

SEQ ID NO: 2458856 - RNA, 19 nt, Human
ugcauuagaaauagacagu

SEQ ID NO: 2458857 - RNA, 20 nt, Human
ugcauuagaaauagacagua

SEQ ID NO: 2458858 - RNA, 21 nt, Human
ugcauuagagcccauuucaau

SEQ ID NO: 2458859 - RNA, 22 nt, Human
ugcauuagaaauagacaguaua

SEQ ID NO: 2458860 - RNA, 13 nt, Human
ugcauuagaaauu

SEQ ID NO: 2458861 - RNA, 14 nt, Human
ugcauuagaaauua

SEQ ID NO: 2458862 - RNA, 23 nt, Human
ugcauuagaaauuagcuguguga

SEQ ID NO: 2458863 - RNA, 20 nt, Human
ugcauuugucuauucuccag

SEQ ID NO: 2458864 - RNA, 19 nt, Human
ugcauuugucuauucucca

SEQ ID NO: 2458865 - RNA, 16 nt, Human
ugcauuuuaaaaauga

SEQ ID NO: 2458866 - RNA, 21 nt, Human
ugcauuuuaaaaaugaaauuu

SEQ ID NO: 2458867 - RNA, 20 nt, Human
ugcauuuugcuauuguaaau

SEQ ID NO: 2458868 - RNA, 19 nt, Human
ugcauuuugcuauuguaaa

SEQ ID NO: 2458869 - RNA, 18 nt, Human
ugcauuuugcuauuguaa

SEQ ID NO: 2458870 - RNA, 17 nt, Human
ugcauuuugcuauugua

SEQ ID NO: 2458871 - RNA, 16 nt, Human
ugcauuuugcuauugu

SEQ ID NO: 2458872 - RNA, 15 nt, Human
ugcauuuugcuauug

SEQ ID NO: 2458873 - RNA, 13 nt, Human
ugcauuuugcuau

SEQ ID NO: 2458874 - RNA, 21 nt, Human
ugcauuuuaauuuuaaccaaa

SEQ ID NO: 2458875 - RNA, 19 nt, Human
ugcauuuuaauuuuaacca

SEQ ID NO: 2458876 - RNA, 17 nt, Human
ugcauuuuaauuuuaac

SEQ ID NO: 2458877 - RNA, 17 nt, Human
ugcauuuucaccccacc

SEQ ID NO: 2458878 - RNA, 18 nt, Human
ugcauuuugcagcaguga

SEQ ID NO: 2458879 - RNA, 22 nt, Human
ugccacaggccucccuguuuga

SEQ ID NO: 2458880 - RNA, 18 nt, Human
ugccacaggccucccugu

SEQ ID NO: 2458881 - RNA, 17 nt, Human
ugccacaggccucccug

SEQ ID NO: 2458882 - RNA, 22 nt, Human
ugcauuuugcuauuguaaauau

SEQ ID NO: 2458883 - RNA, 15 nt, Human
ugccacaggccuccc

SEQ ID NO: 2458884 - RNA, 18 nt, Human
ugcauuuuguuugguauu

SEQ ID NO: 2458885 - RNA, 23 nt, Human
ugcauuuuggagaguuuccugaa

SEQ ID NO: 2458886 - RNA, 15 nt, Human
ugccaccacgcccgg

SEQ ID NO: 2458887 - RNA, 18 nt, Human
ugccaccaaaggccaggg

SEQ ID NO: 2458888 - RNA, 22 nt, Human
ugccacauuuauuuuuauaucu

SEQ ID NO: 2458889 - RNA, 23 nt, Human
ugccacaggccucccuguuugaa

SEQ ID NO: 2458890 - RNA, 21 nt, Human
ugccacaucuugaucugcuca

SEQ ID NO: 2458891 - RNA, 19 nt, Human
ugcagauaaacaguaguga

SEQ ID NO: 2458892 - RNA, 22 nt, Human
ugcagaggucugugcugaggcc

SEQ ID NO: 2458893 - RNA, 19 nt, Human
ugcagaggucugugcugag

SEQ ID NO: 2458894 - RNA, 18 nt, Human
ugcagaggucugugcuga

SEQ ID NO: 2458895 - RNA, 21 nt, Human
ugcagaggucugugcugaggc

SEQ ID NO: 2458896 - RNA, 18 nt, Human
ugcagauggggcucccgc

SEQ ID NO: 2458897 - RNA, 15 nt, Human
ugcagaugacaaaaa

SEQ ID NO: 2458898 - RNA, 14 nt, Human
ugcagaugacaaaa

SEQ ID NO: 2458899 - RNA, 21 nt, Human
ugcauccauuccucagggaca

SEQ ID NO: 2458900 - RNA, 19 nt, Human
ugcauccauuccucaggga

SEQ ID NO: 2458901 - RNA, 20 nt, Human
ugcauccauuccucagggac

SEQ ID NO: 2458902 - RNA, 17 nt, Human
ugcagauuugggcugga

SEQ ID NO: 2458903 - RNA, 16 nt, Human
ugcagauuugggcugg

SEQ ID NO: 2458904 - RNA, 22 nt, Human
ugcagauggggcucccgcccgu

SEQ ID NO: 2458905 - RNA, 13 nt, Human
ugcagauucauuu

SEQ ID NO: 2458906 - RNA, 14 nt, Human
ugcauccuccgccu

SEQ ID NO: 2458907 - RNA, 19 nt, Human
ugcauccguaguucccuga

SEQ ID NO: 2458908 - RNA, 20 nt, Human
ugcauccguaguucccugaa

SEQ ID NO: 2458909 - RNA, 14 nt, Human
ugcauccuccaaga

SEQ ID NO: 2458910 - RNA, 16 nt, Human
ugcauccccuuggcug

SEQ ID NO: 2458911 - RNA, 19 nt, Human
ugcauccgggggcagcucu

SEQ ID NO: 2458912 - RNA, 17 nt, Human
ugcaucccccccaccuc

SEQ ID NO: 2458913 - RNA, 15 nt, Human
ugcaucccccccacc

SEQ ID NO: 2458914 - RNA, 17 nt, Human
ugcaugguuuagaaagc

SEQ ID NO: 2458915 - RNA, 22 nt, Human
ugcauccuccaagaaucuaucu

SEQ ID NO: 2458916 - RNA, 15 nt, Human
ugcauccuccaagaa

SEQ ID NO: 2458917 - RNA, 20 nt, Human
ugcauguaaacacgccugca

SEQ ID NO: 2458918 - RNA, 15 nt, Human
ugcauguaugucuug

SEQ ID NO: 2458919 - RNA, 14 nt, Human
ugcauguaugucuu

SEQ ID NO: 2458920 - RNA, 13 nt, Human
ugcauguaugucu

SEQ ID NO: 2458921 - RNA, 14 nt, Human
ugcauguuccacua

SEQ ID NO: 2458922 - RNA, 22 nt, Human
ugcauguuaggaaaauuucaca

SEQ ID NO: 2458923 - RNA, 15 nt, Human
ugcauguuugugauu

SEQ ID NO: 2458924 - RNA, 17 nt, Human
ugcauguuccacuaacc

SEQ ID NO: 2458925 - RNA, 16 nt, Human
ugcauguuccacuaac

SEQ ID NO: 2458926 - RNA, 18 nt, Human
ugcauguuccacuaaccc

SEQ ID NO: 2458927 - RNA, 19 nt, Human
ugcauguuuuccagcuccu

SEQ ID NO: 2458928 - RNA, 23 nt, Human
ugcccugcugccgccucccagcc

SEQ ID NO: 2458929 - RNA, 21 nt, Human
ugcccugcugccgccucccag

SEQ ID NO: 2458930 - RNA, 19 nt, Human
ugcccugcggccccgucug

SEQ ID NO: 2458931 - RNA, 17 nt, Human
ugcccugccugagggcc

SEQ ID NO: 2458932 - RNA, 11 nt, Human
ugcccugcugc

SEQ ID NO: 2458933 - RNA, 18 nt, Human
ugcccuggauccaucagg

SEQ ID NO: 2458934 - RNA, 15 nt, Human
ugcccugguggagaa

SEQ ID NO: 2458935 - RNA, 14 nt, Human
ugcccugguggaga

SEQ ID NO: 2458936 - RNA, 13 nt, Human
ugcccugguggag

SEQ ID NO: 2458937 - RNA, 16 nt, Human
ugcccuggcccugagg

SEQ ID NO: 2458938 - RNA, 21 nt, Human
ugcccuggugcugccacacuu

SEQ ID NO: 2458939 - RNA, 23 nt, Human
ugcccugguggagaaagcacuga

SEQ ID NO: 2458940 - RNA, 22 nt, Human
ugcccugguggagaaagcacug

SEQ ID NO: 2458941 - RNA, 15 nt, Human
ugcccugguuucacu

SEQ ID NO: 2458942 - RNA, 17 nt, Human
ugcccugguuucacugg

SEQ ID NO: 2458943 - RNA, 14 nt, Human
ugcccuggcccuga

SEQ ID NO: 2458944 - RNA, 13 nt, Human
ugcccuggcccug

SEQ ID NO: 2458945 - RNA, 12 nt, Human
ugcccuggcccu

SEQ ID NO: 2458946 - RNA, 16 nt, Human
ugcccuggagguggcu

SEQ ID NO: 2458947 - RNA, 18 nt, Human
ugcccuggugcugccaca

SEQ ID NO: 2458948 - RNA, 20 nt, Human
ugcccuggugcugccacacu

SEQ ID NO: 2458949 - RNA, 19 nt, Human
ugccgucuaccugaggggc

SEQ ID NO: 2458950 - RNA, 17 nt, Human
ugccgucuaccugaggg

SEQ ID NO: 2458951 - RNA, 23 nt, Human
ugccguggggccgccgccucuuu

SEQ ID NO: 2458952 - RNA, 22 nt, Human
ugccguggauugcacguggccu

SEQ ID NO: 2458953 - RNA, 20 nt, Human
ugccguggauugcacguggc

SEQ ID NO: 2458954 - RNA, 16 nt, Human
ugccggugagaauaag

SEQ ID NO: 2458955 - RNA, 16 nt, Human
ugccgucuaccugagg

SEQ ID NO: 2458956 - RNA, 15 nt, Human
ugccgucuaccugag

SEQ ID NO: 2458957 - RNA, 15 nt, Human
ugcccugguuuccug

SEQ ID NO: 2458958 - RNA, 22 nt, Human
ugcccugguuucacuggcccaa

SEQ ID NO: 2458959 - RNA, 14 nt, Human
ugccggguuuuaua

SEQ ID NO: 2458960 - RNA, 20 nt, Human
ugccgguaaacacgccugca

SEQ ID NO: 2458961 - RNA, 18 nt, Human
ugccggguuuuauauuuu

SEQ ID NO: 2458962 - RNA, 23 nt, Human
ugcccugcccaccuggccucugc

SEQ ID NO: 2458963 - RNA, 22 nt, Human
ugcccugcccaccuggccucug

SEQ ID NO: 2458964 - RNA, 17 nt, Human
ugcccuaaaguguauuu

SEQ ID NO: 2458965 - RNA, 19 nt, Human
ugcccuaaaguguauuuuu

SEQ ID NO: 2458966 - RNA, 19 nt, Human
ugcccugcgggucacagga

SEQ ID NO: 2458967 - RNA, 18 nt, Human
ugcccugcugagucccag

SEQ ID NO: 2458968 - RNA, 22 nt, Human
ugcccugcugagucccaggcug

SEQ ID NO: 2458969 - RNA, 23 nt, Human
ugcccugcugagucccaggcuga

SEQ ID NO: 2458970 - RNA, 21 nt, Human
ugcccugcccaccuggccucu

SEQ ID NO: 2458971 - RNA, 16 nt, Human
ugcccugcccccacga

SEQ ID NO: 2458972 - RNA, 11 nt, Human
ugcccugcccc

SEQ ID NO: 2458973 - RNA, 12 nt, Human
ugcccugccuga

SEQ ID NO: 2458974 - RNA, 14 nt, Human
ugcccugccugagg

SEQ ID NO: 2458975 - RNA, 16 nt, Human
ugcccugcccuagcuc

SEQ ID NO: 2458976 - RNA, 17 nt, Human
ugcccagaaugaggcug

SEQ ID NO: 2458977 - RNA, 18 nt, Human
ugcccagaaugaggcugc

SEQ ID NO: 2458978 - RNA, 19 nt, Human
ugcccagaauaaguuauug

SEQ ID NO: 2458979 - RNA, 17 nt, Human
ugcccagaauaaguuau

SEQ ID NO: 2458980 - RNA, 21 nt, Human
ugcccagaauaaguuauugca

SEQ ID NO: 2458981 - RNA, 18 nt, Human
ugcccggggaaaggcaag

SEQ ID NO: 2458982 - RNA, 21 nt, Human
ugcccggggaaaggcaagguc

SEQ ID NO: 2458983 - RNA, 20 nt, Human
ugcccgggcgcggccagccc

SEQ ID NO: 2458984 - RNA, 19 nt, Human
ugcccgggcgcggccagcc

SEQ ID NO: 2458985 - RNA, 22 nt, Human
ugcccgggcgcggccagccccg

SEQ ID NO: 2458986 - RNA, 18 nt, Human
ugcccggggcagcugcca

SEQ ID NO: 2458987 - RNA, 23 nt, Human
ugcccguaaacacgccugcaaac

SEQ ID NO: 2458988 - RNA, 17 nt, Human
ugcccgucucucuccca

SEQ ID NO: 2458989 - RNA, 20 nt, Human
ugcccggggcagcugccaga

SEQ ID NO: 2458990 - RNA, 20 nt, Human
ugcccguaaacacgccugca

SEQ ID NO: 2458991 - RNA, 23 nt, Human
ugcccggggcagcugccagagaa

SEQ ID NO: 2458992 - RNA, 21 nt, Human
ugcccgucucucucccaugga

SEQ ID NO: 2458993 - RNA, 20 nt, Human
ugcccgucucucucccaugg

SEQ ID NO: 2458994 - RNA, 19 nt, Human
ugcccgucucucucccaug

SEQ ID NO: 2458995 - RNA, 18 nt, Human
ugcccgucucucucccau

SEQ ID NO: 2458996 - RNA, 13 nt, Human
ugcccgucuucag

SEQ ID NO: 2458997 - RNA, 16 nt, Human
ugcccgucuucagccu

SEQ ID NO: 2458998 - RNA, 17 nt, Human
ugcccgucuucagccua

SEQ ID NO: 2458999 - RNA, 18 nt, Human
ugcccgucuucagccuag

SEQ ID NO: 2459000 - RNA, 23 nt, Human
ugcccgucucucucccauggagc

SEQ ID NO: 2459001 - RNA, 19 nt, Human
ugcccgucuucagccuagc

SEQ ID NO: 2459002 - RNA, 14 nt, Human
ugccugguuuugau

SEQ ID NO: 2459003 - RNA, 22 nt, Human
ugccuggucacagggcaugccc

SEQ ID NO: 2459004 - RNA, 17 nt, Human
ugccuggucacagggca

SEQ ID NO: 2459005 - RNA, 16 nt, Human
ugccuggucacagggc

SEQ ID NO: 2459006 - RNA, 17 nt, Human
ugccugguccucacacu

SEQ ID NO: 2459007 - RNA, 19 nt, Human
ugccugguggcagcugcgg

SEQ ID NO: 2459008 - RNA, 15 nt, Human
ugccuguaguuagga

SEQ ID NO: 2459009 - RNA, 16 nt, Human
ugccuguaguuaggaa

SEQ ID NO: 2459010 - RNA, 17 nt, Human
ugccuguaguuaggaaa

SEQ ID NO: 2459011 - RNA, 18 nt, Human
ugccuguaguuaggaaau

SEQ ID NO: 2459012 - RNA, 19 nt, Human
ugccuguaguuaggaaaua

SEQ ID NO: 2459013 - RNA, 20 nt, Human
ugccuguaguuaggaaauaa

SEQ ID NO: 2459014 - RNA, 21 nt, Human
ugccuguaguuaggaaauaaa

SEQ ID NO: 2459015 - RNA, 22 nt, Human
ugccuguaguuaggaaauaaaa

SEQ ID NO: 2459016 - RNA, 18 nt, Human
ugccugguggcagcugcg

SEQ ID NO: 2459017 - RNA, 17 nt, Human
ugccugguggcagcugc

SEQ ID NO: 2459018 - RNA, 20 nt, Human
ugccugguauauccaaaagc

SEQ ID NO: 2459019 - RNA, 23 nt, Human
ugccugguauauccaaaagcuuu

SEQ ID NO: 2459020 - RNA, 22 nt, Human
ugccuggguuuaaggggagagg

SEQ ID NO: 2459021 - RNA, 16 nt, Human
ugccuggguggggcug

SEQ ID NO: 2459022 - RNA, 17 nt, Human
ugccuggguggggcugc

SEQ ID NO: 2459023 - RNA, 19 nt, Human
ugccuggguggggcugcuc

SEQ ID NO: 2459024 - RNA, 21 nt, Human
ugccuggguggggcugcuccu

SEQ ID NO: 2459025 - RNA, 22 nt, Human
ugccuggguggggcugcuccuc

SEQ ID NO: 2459026 - RNA, 23 nt, Human
ugccuggguggggcugcuccucc

SEQ ID NO: 2459027 - RNA, 24 nt, Human
ugccuggguggggcugcuccucca

SEQ ID NO: 2459028 - RNA, 16 nt, Human
ugccugccagcugcac

SEQ ID NO: 2459029 - RNA, 13 nt, Human
ugccugcccaccc

SEQ ID NO: 2459030 - RNA, 14 nt, Human
ugccugcccacccg

SEQ ID NO: 2459031 - RNA, 22 nt, Human
ugccugggcucccuugugcgug

SEQ ID NO: 2459032 - RNA, 21 nt, Human
ugccuggguggacauggcccc

SEQ ID NO: 2459033 - RNA, 17 nt, Human
ugccugggcuguuggca

SEQ ID NO: 2459034 - RNA, 16 nt, Human
ugccugggcuguuggc

SEQ ID NO: 2459035 - RNA, 12 nt, Human
ugccugggcugu

SEQ ID NO: 2459036 - RNA, 15 nt, Human
ugccugcccacccgu

SEQ ID NO: 2459037 - RNA, 16 nt, Human
ugccugcccacccgug

SEQ ID NO: 2459038 - RNA, 19 nt, Human
ugccugccagcugcacuga

SEQ ID NO: 2459039 - RNA, 15 nt, Human
ugccugccagcugca

SEQ ID NO: 2459040 - RNA, 21 nt, Human
ugccugcagaggucugugcug

SEQ ID NO: 2459041 - RNA, 13 nt, Human
ugccugcauucug

SEQ ID NO: 2459042 - RNA, 15 nt, Human
ugccugcauguauuu

SEQ ID NO: 2459043 - RNA, 15 nt, Human
ugccugcagccccgc

SEQ ID NO: 2459044 - RNA, 22 nt, Human
ugccugcagccccgcgccuccu

SEQ ID NO: 2459045 - RNA, 21 nt, Human
ugccucuuccagucuuccuga

SEQ ID NO: 2459046 - RNA, 23 nt, Human
ugccucuuccagucuuccugaca

SEQ ID NO: 2459047 - RNA, 15 nt, Human
ugccucuuagacuuc

SEQ ID NO: 2459048 - RNA, 23 nt, Human
ugccucuguuugacaaaccucua

SEQ ID NO: 2459049 - RNA, 16 nt, Human
ugccucuguuugacaa

SEQ ID NO: 2459050 - RNA, 23 nt, Human
ugccucuucccccugcuuccacc

SEQ ID NO: 2459051 - RNA, 13 nt, Human
ugccucuuccucc

SEQ ID NO: 2459052 - RNA, 21 nt, Human
ugccucuucucuacucuaggg

SEQ ID NO: 2459053 - RNA, 17 nt, Human
ugccucuuccuugaaga

SEQ ID NO: 2459054 - RNA, 18 nt, Human
ugccugcagagagaagcc

SEQ ID NO: 2459055 - RNA, 20 nt, Human
ugccugcagaggucugugcu

SEQ ID NO: 2459056 - RNA, 19 nt, Human
ugccugcagaggucugugc

SEQ ID NO: 2459057 - RNA, 11 nt, Human
ugccugcagcc

SEQ ID NO: 2459058 - RNA, 20 nt, Human
ugccuccuuugugaggaagc

SEQ ID NO: 2459059 - RNA, 21 nt, Human
ugccuccuuugugaggaagcc

SEQ ID NO: 2459060 - RNA, 19 nt, Human
ugccuccucacccccagcu

SEQ ID NO: 2459061 - RNA, 24 nt, Human
ugccuccucacccccagcuuugcu

SEQ ID NO: 2459062 - RNA, 13 nt, Human
ugccucgaaacac

SEQ ID NO: 2459063 - RNA, 17 nt, Human
ugccucgaaacacagaa

SEQ ID NO: 2459064 - RNA, 22 nt, Human
ugccuccuuugugaggaagccg

SEQ ID NO: 2459065 - RNA, 14 nt, Human
ugccucugccuguc

SEQ ID NO: 2459066 - RNA, 13 nt, Human
ugccucugccugu

SEQ ID NO: 2459067 - RNA, 18 nt, Human
ugccucugccugucuccc

SEQ ID NO: 2459068 - RNA, 21 nt, Human
ugccucgaaacacagaaaccu

SEQ ID NO: 2459069 - RNA, 16 nt, Human
ugccucugccugcauu

SEQ ID NO: 2459070 - RNA, 17 nt, Human
ugccucugugcugugug

SEQ ID NO: 2459071 - RNA, 21 nt, Human
ugccucugugcugugugugac

SEQ ID NO: 2459072 - RNA, 13 nt, Human
ugccucugggacu

SEQ ID NO: 2459073 - RNA, 13 nt, Human
ugccuaagcccuc

SEQ ID NO: 2459074 - RNA, 20 nt, Human
ugccgugugcccucgggcga

SEQ ID NO: 2459075 - RNA, 16 nt, Human
ugccguuacucuccaa

SEQ ID NO: 2459076 - RNA, 19 nt, Human
ugccguuacucuccaaccu

SEQ ID NO: 2459077 - RNA, 22 nt, Human
ugccguuacucuccaaccugga

SEQ ID NO: 2459078 - RNA, 16 nt, Human
ugccucccucacccug

SEQ ID NO: 2459079 - RNA, 13 nt, Human
ugccuccccugug

SEQ ID NO: 2459080 - RNA, 21 nt, Human
ugccucccucacccugagccc

SEQ ID NO: 2459081 - RNA, 17 nt, Human
ugccucccucacccuga

SEQ ID NO: 2459082 - RNA, 22 nt, Human
ugccucccucacccugagcccc

SEQ ID NO: 2459083 - RNA, 16 nt, Human
ugccucccuucaugca

SEQ ID NO: 2459084 - RNA, 12 nt, Human
ugccuccucacc

SEQ ID NO: 2459085 - RNA, 19 nt, Human
ugccuccgccucaguaaga

SEQ ID NO: 2459086 - RNA, 22 nt, Human
ugccuccgcgugaucaaagcca

SEQ ID NO: 2459087 - RNA, 13 nt, Human
uuuuuuuugacaa

SEQ ID NO: 2459088 - RNA, 13 nt, Human
uuuuuuuuaaugu

SEQ ID NO: 2459089 - RNA, 14 nt, Human
uuuuuuuuaaacua

SEQ ID NO: 2459090 - RNA, 11 nt, Human
uuuuuuuucau

SEQ ID NO: 2459091 - RNA, 14 nt, Human
uuuucaaaauggag

SEQ ID NO: 2459092 - RNA, 21 nt, Human
uuuucaaaauuguuacaaauu

SEQ ID NO: 2459093 - RNA, 14 nt, Human
uuuucaaauuguau

SEQ ID NO: 2459094 - RNA, 19 nt, Human
uuuucaaauuguaucuagu

SEQ ID NO: 2459095 - RNA, 14 nt, Human
uuuucacaugaaca

SEQ ID NO: 2459096 - RNA, 13 nt, Human
uuuucacaugaac

SEQ ID NO: 2459097 - RNA, 18 nt, Human
uuuucacauucuuauaaa

SEQ ID NO: 2459098 - RNA, 22 nt, Human
uuuucacauucuuauaaauaug

SEQ ID NO: 2459099 - RNA, 23 nt, Human
uuuucacaugaacauacuggcug

SEQ ID NO: 2459100 - RNA, 12 nt, Human
uuuucacauuuu

SEQ ID NO: 2459101 - RNA, 19 nt, Human
uuuucaccagauuugcuaa

SEQ ID NO: 2459102 - RNA, 23 nt, Human
uuuucacauucuuauaaauauga

SEQ ID NO: 2459103 - RNA, 22 nt, Human
uuuucagaaaauauuauguguu

SEQ ID NO: 2459104 - RNA, 18 nt, Human
uuuucacggaaguuuuca

SEQ ID NO: 2459105 - RNA, 17 nt, Human
uuuucacggaaguuuuc

SEQ ID NO: 2459106 - RNA, 15 nt, Human
uuuucacggaaguuu

SEQ ID NO: 2459107 - RNA, 23 nt, Human
uuuucaccuguuuuuaagcuguu

SEQ ID NO: 2459108 - RNA, 13 nt, Human
uuuucaccccacc

SEQ ID NO: 2459109 - RNA, 20 nt, Human
uuuucaccccacccuucccc

SEQ ID NO: 2459110 - RNA, 23 nt, Human
uuuucagaaaauauuauguguuu

SEQ ID NO: 2459111 - RNA, 17 nt, Human
uuuucagaaccucuucc

SEQ ID NO: 2459112 - RNA, 18 nt, Human
uuuucagaaccucuuccc

SEQ ID NO: 2459113 - RNA, 11 nt, Human
uuuucagaccc

SEQ ID NO: 2459114 - RNA, 22 nt, Human
uuuucagaaccucuuccccaga

SEQ ID NO: 2459115 - RNA, 11 nt, Human
uuuucagaccg

SEQ ID NO: 2459116 - RNA, 15 nt, Human
uuuucagaaauaugu

SEQ ID NO: 2459117 - RNA, 13 nt, Human
uuuucagaccgaa

SEQ ID NO: 2459118 - RNA, 14 nt, Human
uuuucagacucaga

SEQ ID NO: 2459119 - RNA, 15 nt, Human
uuuucagauauaaaa

SEQ ID NO: 2459120 - RNA, 13 nt, Human
uuuucccacugca

SEQ ID NO: 2459121 - RNA, 20 nt, Human
uuuucccacugcacccccuc

SEQ ID NO: 2459122 - RNA, 16 nt, Human
uuuucagacucagacu

SEQ ID NO: 2459123 - RNA, 22 nt, Human
uuuucccacugcacccccuccu

SEQ ID NO: 2459124 - RNA, 20 nt, Human
uuuucccagauacuucccau

SEQ ID NO: 2459125 - RNA, 18 nt, Human
uuuucccagcuacaccuu

SEQ ID NO: 2459126 - RNA, 18 nt, Human
uuuucccuauuagagaag

SEQ ID NO: 2459127 - RNA, 22 nt, Human
uuuucccuauuagagaagagau

SEQ ID NO: 2459128 - RNA, 19 nt, Human
uuuucccccuuuucugcau

SEQ ID NO: 2459129 - RNA, 19 nt, Human
uuuuccccccacucucccc

SEQ ID NO: 2459130 - RNA, 16 nt, Human
uuuuccccccuagaaa

SEQ ID NO: 2459131 - RNA, 19 nt, Human
uuuuccccggucccuugag

SEQ ID NO: 2459132 - RNA, 23 nt, Human
uuuuccccggucccuugagaccu

SEQ ID NO: 2459133 - RNA, 18 nt, Human
uuuuccccccacucuccc

SEQ ID NO: 2459134 - RNA, 19 nt, Human
uuuucccagcuacaccuuu

SEQ ID NO: 2459135 - RNA, 13 nt, Human
uuuucuuauuuca

SEQ ID NO: 2459136 - RNA, 21 nt, Human
uuuucuuaaccagaucauugu

SEQ ID NO: 2459137 - RNA, 23 nt, Human
uuuucuacucgaguuacagacaa

SEQ ID NO: 2459138 - RNA, 22 nt, Human
uuuucuacucgaguuacagaca

SEQ ID NO: 2459139 - RNA, 20 nt, Human
uuuucuacucgaguuacaga

SEQ ID NO: 2459140 - RNA, 16 nt, Human
uuuuccccuguccuga

SEQ ID NO: 2459141 - RNA, 12 nt, Human
uuuuccccuccc

SEQ ID NO: 2459142 - RNA, 22 nt, Human
uuuucccucuuuggcuccccug

SEQ ID NO: 2459143 - RNA, 23 nt, Human
uuuucccgagcaaagucuaaagu

SEQ ID NO: 2459144 - RNA, 15 nt, Human
uuuucccuguacagu

SEQ ID NO: 2459145 - RNA, 13 nt, Human
uuuucuacucgag

SEQ ID NO: 2459146 - RNA, 20 nt, Human
uuuuccuaagugauuguaug

SEQ ID NO: 2459147 - RNA, 20 nt, Human
uuuuccuaauaaaguucugu

SEQ ID NO: 2459148 - RNA, 13 nt, Human
uuuuccuaaguga

SEQ ID NO: 2459149 - RNA, 14 nt, Human
uuuuccuaaaugca

SEQ ID NO: 2459150 - RNA, 16 nt, Human
uuuucuuucagccaag

SEQ ID NO: 2459151 - RNA, 16 nt, Human
uuuucuuuaaaagaau

SEQ ID NO: 2459152 - RNA, 15 nt, Human
uuuucuuuaaaagaa

SEQ ID NO: 2459153 - RNA, 16 nt, Human
uuuucuuuaaugcuuu

SEQ ID NO: 2459154 - RNA, 17 nt, Human
uuuugaaauuaaccucu

SEQ ID NO: 2459155 - RNA, 20 nt, Human
uuuugaacuaauaaaagcau

SEQ ID NO: 2459156 - RNA, 21 nt, Human
uuuugaacuaauaaaagcaua

SEQ ID NO: 2459157 - RNA, 22 nt, Human
uuuucuuguguguuuauuguca

SEQ ID NO: 2459158 - RNA, 16 nt, Human
uuuucuucaugcaaug

SEQ ID NO: 2459159 - RNA, 12 nt, Human
uuuucuuuaaaa

SEQ ID NO: 2459160 - RNA, 13 nt, Human
uuuucuucucccu

SEQ ID NO: 2459161 - RNA, 13 nt, Human
uuuucuuacauaa

SEQ ID NO: 2459162 - RNA, 17 nt, Human
uuuucuuaaccaucuuu

SEQ ID NO: 2459163 - RNA, 21 nt, Human
uuuucuucaacaucaauguuc

SEQ ID NO: 2459164 - RNA, 22 nt, Human
uuuucuucaacaucaauguuca

SEQ ID NO: 2459165 - RNA, 15 nt, Human
uuuucuucacugucc

SEQ ID NO: 2459166 - RNA, 20 nt, Human
uuuuaugacuucauuaauaa

SEQ ID NO: 2459167 - RNA, 21 nt, Human
uuuuaugacuucauuaauaau

SEQ ID NO: 2459168 - RNA, 19 nt, Human
uuuuaucuuucgugauaaa

SEQ ID NO: 2459169 - RNA, 23 nt, Human
uuuuaugaagaaaaaauacauuu

SEQ ID NO: 2459170 - RNA, 19 nt, Human
uuuuaucgucacugcuuaa

SEQ ID NO: 2459171 - RNA, 23 nt, Human
uuuuaucuccccuucacaugcau

SEQ ID NO: 2459172 - RNA, 20 nt, Human
uuuuauuuuguaauuauugu

SEQ ID NO: 2459173 - RNA, 16 nt, Human
uuuuauuuuguaauua

SEQ ID NO: 2459174 - RNA, 15 nt, Human
uuuuauuuuguaauu

SEQ ID NO: 2459175 - RNA, 21 nt, Human
uuuuauuuuucucaugaugag

SEQ ID NO: 2459176 - RNA, 18 nt, Human
uuuuauuuuuagacagag

SEQ ID NO: 2459177 - RNA, 18 nt, Human
uuuuauuuuucuaaaaaa

SEQ ID NO: 2459178 - RNA, 11 nt, Human
uuuuauauuua

SEQ ID NO: 2459179 - RNA, 13 nt, Human
uuuuauuuuucua

SEQ ID NO: 2459180 - RNA, 17 nt, Human
uuuuauuuuuuucuacc

SEQ ID NO: 2459181 - RNA, 17 nt, Human
uuuucaaaauaaaaaug

SEQ ID NO: 2459182 - RNA, 18 nt, Human
uuuuauauuugaaauauu

SEQ ID NO: 2459183 - RNA, 13 nt, Human
uuuuauauuugaa

SEQ ID NO: 2459184 - RNA, 23 nt, Human
uuuuauauuuaguuauaguuuca

SEQ ID NO: 2459185 - RNA, 13 nt, Human
uuuuauauuuagu

SEQ ID NO: 2459186 - RNA, 13 nt, Human
uuuuauacauaaa

SEQ ID NO: 2459187 - RNA, 21 nt, Human
uuuuauacauaaacaagacca

SEQ ID NO: 2459188 - RNA, 13 nt, Human
uuuuauacucuuu

SEQ ID NO: 2459189 - RNA, 18 nt, Human
uuuuauacucuuucugua

SEQ ID NO: 2459190 - RNA, 19 nt, Human
uuuuauacacauaauuaaa

SEQ ID NO: 2459191 - RNA, 16 nt, Human
uuuuauagauuugacc

SEQ ID NO: 2459192 - RNA, 19 nt, Human
uuuuauacucuuucuguau

SEQ ID NO: 2459193 - RNA, 12 nt, Human
uuuuauacugua

SEQ ID NO: 2459194 - RNA, 15 nt, Human
uuuuauacuguacuu

SEQ ID NO: 2459195 - RNA, 12 nt, Human
uuuuacaauaaa

SEQ ID NO: 2459196 - RNA, 17 nt, Human
uuuuacaauaaaaucuu

SEQ ID NO: 2459197 - RNA, 18 nt, Human
uuuuacaauaaauaaucu

SEQ ID NO: 2459198 - RNA, 14 nt, Human
uuuuacaauugaaa

SEQ ID NO: 2459199 - RNA, 17 nt, Human
uuuuaaauaaaagcagc

SEQ ID NO: 2459200 - RNA, 19 nt, Human
uuuuacaaaaaagaaaaga

SEQ ID NO: 2459201 - RNA, 19 nt, Human
uuuuaaagugauuaaacgu

SEQ ID NO: 2459202 - RNA, 15 nt, Human
uuuuaaauaaaagca

SEQ ID NO: 2459203 - RNA, 17 nt, Human
uuuuaaauaaaagugau

SEQ ID NO: 2459204 - RNA, 21 nt, Human
uuuuaaaguaacccuacaaaa

SEQ ID NO: 2459205 - RNA, 13 nt, Human
uuuuaaacugugu

SEQ ID NO: 2459206 - RNA, 20 nt, Human
uuuuaaacuguguacauaac

SEQ ID NO: 2459207 - RNA, 23 nt, Human
uuuuaaacuguguacauaacuga

SEQ ID NO: 2459208 - RNA, 16 nt, Human
uuuuaaaguauauauu

SEQ ID NO: 2459209 - RNA, 22 nt, Human
uuuuaaaguauguuauugcaua

SEQ ID NO: 2459210 - RNA, 14 nt, Human
uuuuaaagugauua

SEQ ID NO: 2459211 - RNA, 21 nt, Human
uuuuauaauuuugugaagcaa

SEQ ID NO: 2459212 - RNA, 15 nt, Human
uuuuacuaauagaca

SEQ ID NO: 2459213 - RNA, 23 nt, Human
uuuuauaauuuugugaagcaaaa

SEQ ID NO: 2459214 - RNA, 14 nt, Human
uuuuacuacugugg

SEQ ID NO: 2459215 - RNA, 15 nt, Human
uuuuauacacauaau

SEQ ID NO: 2459216 - RNA, 13 nt, Human
uuuuauacacaua

SEQ ID NO: 2459217 - RNA, 17 nt, Human
uuuuaccguuucuuccc

SEQ ID NO: 2459218 - RNA, 18 nt, Human
uuuuaccguuucuucccu

SEQ ID NO: 2459219 - RNA, 18 nt, Human
uuuuaccuaccacagugu

SEQ ID NO: 2459220 - RNA, 19 nt, Human
uuuuaccuaccacaguguc

SEQ ID NO: 2459221 - RNA, 20 nt, Human
uuuuaccuaccacagugucu

SEQ ID NO: 2459222 - RNA, 16 nt, Human
uuuuacaauugaaaug

SEQ ID NO: 2459223 - RNA, 19 nt, Human
uuuuacguccaucucuugu

SEQ ID NO: 2459224 - RNA, 21 nt, Human
uuuuaccuaccacagugucug

SEQ ID NO: 2459225 - RNA, 22 nt, Human
uuuuacuaaagaaagauuacuu

SEQ ID NO: 2459226 - RNA, 13 nt, Human
uuuuacuaaagaa

SEQ ID NO: 2459227 - RNA, 20 nt, Human
uuuguuauuuucaguauuuu

SEQ ID NO: 2459228 - RNA, 18 nt, Human
uuuguuauuuguacaguu

SEQ ID NO: 2459229 - RNA, 17 nt, Human
uuuguuauuuguacagu

SEQ ID NO: 2459230 - RNA, 19 nt, Human
uuuguuauuuguacaguuc

SEQ ID NO: 2459231 - RNA, 14 nt, Human
uuuguugcuguuuu

SEQ ID NO: 2459232 - RNA, 23 nt, Human
uuuguuggaagguuuggugugug

SEQ ID NO: 2459233 - RNA, 15 nt, Human
uuuguugucagcuga

SEQ ID NO: 2459234 - RNA, 17 nt, Human
uuuguguguugucuuga

SEQ ID NO: 2459235 - RNA, 15 nt, Human
uuuguguguugucuu

SEQ ID NO: 2459236 - RNA, 18 nt, Human
uuuguguguugucuugaa

SEQ ID NO: 2459237 - RNA, 17 nt, Human
uuuguguguugucucuu

SEQ ID NO: 2459238 - RNA, 22 nt, Human
uuuguuaguaugaggcauuugu

SEQ ID NO: 2459239 - RNA, 13 nt, Human
uuuguuaccuuua

SEQ ID NO: 2459240 - RNA, 12 nt, Human
uuuguuauuugu

SEQ ID NO: 2459241 - RNA, 23 nt, Human
uuuuaaaauccacuuuaucuuga

SEQ ID NO: 2459242 - RNA, 13 nt, Human
uuuuaaacaguga

SEQ ID NO: 2459243 - RNA, 23 nt, Human
uuuuaaacaaaauagaagcugua

SEQ ID NO: 2459244 - RNA, 21 nt, Human
uuuuaaaccauaaaaagcuga

SEQ ID NO: 2459245 - RNA, 19 nt, Human
uuuuaaacagugagccuga

SEQ ID NO: 2459246 - RNA, 20 nt, Human
uuuuaaacccuauugguaaa

SEQ ID NO: 2459247 - RNA, 22 nt, Human
uuuuaaaaguuucaaugugauu

SEQ ID NO: 2459248 - RNA, 21 nt, Human
uuuuaaaaguuucaaugugau

SEQ ID NO: 2459249 - RNA, 19 nt, Human
uuuuaaaaguuucaaugug

SEQ ID NO: 2459250 - RNA, 12 nt, Human
uuuguuguaaaa

SEQ ID NO: 2459251 - RNA, 18 nt, Human
uuuuaaaaguuucaaugu

SEQ ID NO: 2459252 - RNA, 14 nt, Human
uuuuaaaauccacu

SEQ ID NO: 2459253 - RNA, 14 nt, Human
uuuuaaaauaucuu

SEQ ID NO: 2459254 - RNA, 20 nt, Human
uuuuaaaauaucuuuugacc

SEQ ID NO: 2459255 - RNA, 14 nt, Human
uuuguauucucuga

SEQ ID NO: 2459256 - RNA, 16 nt, Human
uuuguauucucugagc

SEQ ID NO: 2459257 - RNA, 15 nt, Human
uuuguauucucuccu

SEQ ID NO: 2459258 - RNA, 21 nt, Human
uuuguauuguuucaauugcau

SEQ ID NO: 2459259 - RNA, 23 nt, Human
uuuguauuuuccaagugugcaua

SEQ ID NO: 2459260 - RNA, 17 nt, Human
uuuguauuuuguuuaaa

SEQ ID NO: 2459261 - RNA, 15 nt, Human
uuuguauuuuccaag

SEQ ID NO: 2459262 - RNA, 10 nt, Human
uuuguauuuu

SEQ ID NO: 2459263 - RNA, 14 nt, Human
uuugugugauugaa

SEQ ID NO: 2459264 - RNA, 22 nt, Human
uuugugucaaugggcaaugaca

SEQ ID NO: 2459265 - RNA, 12 nt, Human
uuugugugagag

SEQ ID NO: 2459266 - RNA, 13 nt, Human
uuugugugauuga

SEQ ID NO: 2459267 - RNA, 14 nt, Human
uuugugugagagac

SEQ ID NO: 2459268 - RNA, 14 nt, Human
uuuguguguagucu

SEQ ID NO: 2459269 - RNA, 13 nt, Human
uuugugugucuua

SEQ ID NO: 2459270 - RNA, 21 nt, Human
uuugugucauguuuaagaaau

SEQ ID NO: 2459271 - RNA, 20 nt, Human
uuuguguauuuaacagggag

SEQ ID NO: 2459272 - RNA, 14 nt, Human
uuuguauuuuuagu

SEQ ID NO: 2459273 - RNA, 17 nt, Human
uuuguauuuuuuugcaa

SEQ ID NO: 2459274 - RNA, 14 nt, Human
uuuguauuuuuaau

SEQ ID NO: 2459275 - RNA, 13 nt, Human
uuuguguauuuaa

SEQ ID NO: 2459276 - RNA, 19 nt, Human
uuuguauaaaauaauuuuu

SEQ ID NO: 2459277 - RNA, 18 nt, Human
uuuguauaaaauaauuuu

SEQ ID NO: 2459278 - RNA, 17 nt, Human
uuuguauaaaauaauuu

SEQ ID NO: 2459279 - RNA, 17 nt, Human
uuuggucuacacugugc

SEQ ID NO: 2459280 - RNA, 15 nt, Human
uuuggucaacacuaa

SEQ ID NO: 2459281 - RNA, 13 nt, Human
uuuggucccuggg

SEQ ID NO: 2459282 - RNA, 23 nt, Human
uuuggucccgugcagcuucuguc

SEQ ID NO: 2459283 - RNA, 14 nt, Human
uuugguauuguauu

SEQ ID NO: 2459284 - RNA, 22 nt, Human
uuugguauuacacuguauuugu

SEQ ID NO: 2459285 - RNA, 17 nt, Human
uuuggaccccagcuggg

SEQ ID NO: 2459286 - RNA, 13 nt, Human
uuugguauuguau

SEQ ID NO: 2459287 - RNA, 16 nt, Human
uuuggaccccagcugg

SEQ ID NO: 2459288 - RNA, 19 nt, Human
uuugguaucuguucuuuaa

SEQ ID NO: 2459289 - RNA, 15 nt, Human
uuuggaaaaugcauu

SEQ ID NO: 2459290 - RNA, 23 nt, Human
uuugcauuuaaaacagacacugg

SEQ ID NO: 2459291 - RNA, 12 nt, Human
uuuggaaaauaa

SEQ ID NO: 2459292 - RNA, 13 nt, Human
uuuggacccugag

SEQ ID NO: 2459293 - RNA, 18 nt, Human
uuugcauaacguauaaaa

SEQ ID NO: 2459294 - RNA, 17 nt, Human
uuugcauaacaauuccu

SEQ ID NO: 2459295 - RNA, 18 nt, Human
uuugcauaacaauuccuc

SEQ ID NO: 2459296 - RNA, 16 nt, Human
uuugcauaacaauucc

SEQ ID NO: 2459297 - RNA, 21 nt, Human
uuugcaguagagucaucucca

SEQ ID NO: 2459298 - RNA, 14 nt, Human
uuugcagguugcuu

SEQ ID NO: 2459299 - RNA, 20 nt, Human
uuugcacuggaguucuaugc

SEQ ID NO: 2459300 - RNA, 16 nt, Human
uuugcaggcaugcaug

SEQ ID NO: 2459301 - RNA, 22 nt, Human
uuugcacugagggccacacuau

SEQ ID NO: 2459302 - RNA, 12 nt, Human
uuugcaggcuca

SEQ ID NO: 2459303 - RNA, 20 nt, Human
uuugcauaacaauuccucua

SEQ ID NO: 2459304 - RNA, 22 nt, Human
uuugcauaacaauuccucuacu

SEQ ID NO: 2459305 - RNA, 17 nt, Human
uuugcauuaaauucaca

SEQ ID NO: 2459306 - RNA, 18 nt, Human
uuugcauuaaauucacaa

SEQ ID NO: 2459307 - RNA, 14 nt, Human
uuugcauucaaauu

SEQ ID NO: 2459308 - RNA, 13 nt, Human
uuugcauucaaau

SEQ ID NO: 2459309 - RNA, 12 nt, Human
uuugcauucaaa

SEQ ID NO: 2459310 - RNA, 21 nt, Human
uuugcauuaaauucacaaacu

SEQ ID NO: 2459311 - RNA, 22 nt, Human
uuugcauuaaauucacaaacuu

SEQ ID NO: 2459312 - RNA, 16 nt, Human
uuugcauuuaaaacag

SEQ ID NO: 2459313 - RNA, 17 nt, Human
uuugcauuuaaaacaga

SEQ ID NO: 2459314 - RNA, 19 nt, Human
uuugcauuuaaaacagaca

SEQ ID NO: 2459315 - RNA, 21 nt, Human
uuugcauuuaaaacagacacu

SEQ ID NO: 2459316 - RNA, 19 nt, Human
uuugcauugaacacaaacu

SEQ ID NO: 2459317 - RNA, 17 nt, Human
uuugcauucaaauuaag

SEQ ID NO: 2459318 - RNA, 15 nt, Human
uuugcauucaaauua

SEQ ID NO: 2459319 - RNA, 14 nt, Human
uuugcauuccuaca

SEQ ID NO: 2459320 - RNA, 15 nt, Human
uuuccacagaagcuc

SEQ ID NO: 2459321 - RNA, 16 nt, Human
uuuccaagugugcaua

SEQ ID NO: 2459322 - RNA, 19 nt, Human
uuuccaccacagccagcac

SEQ ID NO: 2459323 - RNA, 23 nt, Human
uuuccacauaaggaaacuggguu

SEQ ID NO: 2459324 - RNA, 20 nt, Human
uuuccacauaaggaaacugg

SEQ ID NO: 2459325 - RNA, 17 nt, Human
uuuccacaccuggcacu

SEQ ID NO: 2459326 - RNA, 22 nt, Human
uuuccacaagauucccagagac

SEQ ID NO: 2459327 - RNA, 19 nt, Human
uuuccacaaaaucugucca

SEQ ID NO: 2459328 - RNA, 15 nt, Human
uuuccacaaaucagu

SEQ ID NO: 2459329 - RNA, 20 nt, Human
uuuccacaagauucccagag

SEQ ID NO: 2459330 - RNA, 17 nt, Human
uuuccguuaaaauacca

SEQ ID NO: 2459331 - RNA, 13 nt, Human
uuugagugccuua

SEQ ID NO: 2459332 - RNA, 15 nt, Human
uuuccguuaaaauac

SEQ ID NO: 2459333 - RNA, 21 nt, Human
uuugagugccuuacacaaugg

SEQ ID NO: 2459334 - RNA, 13 nt, Human
uuugagugcucug

SEQ ID NO: 2459335 - RNA, 16 nt, Human
uuuccguggcacugca

SEQ ID NO: 2459336 - RNA, 12 nt, Human
uuugaguucuac

SEQ ID NO: 2459337 - RNA, 14 nt, Human
uuugaguguuuuaa

SEQ ID NO: 2459338 - RNA, 21 nt, Human
uuugaguggaugauguuucgu

SEQ ID NO: 2459339 - RNA, 14 nt, Human
uuugagugcucuga

SEQ ID NO: 2459340 - RNA, 16 nt, Human
uuugaguggaugaugu

SEQ ID NO: 2459341 - RNA, 20 nt, Human
uuugaguggaugauguuucg

SEQ ID NO: 2459342 - RNA, 16 nt, Human
uuugcaccugcucucu

SEQ ID NO: 2459343 - RNA, 16 nt, Human
uuugcaccccucccau

SEQ ID NO: 2459344 - RNA, 15 nt, Human
uuugcaccccuccca

SEQ ID NO: 2459345 - RNA, 13 nt, Human
uuugcaccccucc

SEQ ID NO: 2459346 - RNA, 12 nt, Human
uuugcaccccuc

SEQ ID NO: 2459347 - RNA, 20 nt, Human
uuugcaccccaugcuguuga

SEQ ID NO: 2459348 - RNA, 18 nt, Human
uuugcaccccaugcuguu

SEQ ID NO: 2459349 - RNA, 17 nt, Human
uuugcaccccaugcugu

SEQ ID NO: 2459350 - RNA, 19 nt, Human
uuugaguuauuuuaauuau

SEQ ID NO: 2459351 - RNA, 17 nt, Human
uuugcacugagggccac

SEQ ID NO: 2459352 - RNA, 16 nt, Human
uuugcacugagggcca

SEQ ID NO: 2459353 - RNA, 18 nt, Human
uuugcacugauauaucau

SEQ ID NO: 2459354 - RNA, 14 nt, Human
uuugcacugagggc

SEQ ID NO: 2459355 - RNA, 12 nt, Human
uuugcacugagg

SEQ ID NO: 2459356 - RNA, 18 nt, Human
uuuuucaugauuuugaaa

SEQ ID NO: 2459357 - RNA, 11 nt, Human
uuuuucaugau

SEQ ID NO: 2459358 - RNA, 10 nt, Human
uuuuucaugu

SEQ ID NO: 2459359 - RNA, 11 nt, Human
uuuuucauguu

SEQ ID NO: 2459360 - RNA, 18 nt, Human
uuuuucauguuuuaacaa

SEQ ID NO: 2459361 - RNA, 13 nt, Human
uuuuucauauugu

SEQ ID NO: 2459362 - RNA, 14 nt, Human
uuuuucagaccgaa

SEQ ID NO: 2459363 - RNA, 15 nt, Human
uuuuucaguuuucag

SEQ ID NO: 2459364 - RNA, 12 nt, Human
uuuuucaguuuu

SEQ ID NO: 2459365 - RNA, 16 nt, Human
uuuuuccaaaaaaaua

SEQ ID NO: 2459366 - RNA, 13 nt, Human
uuuuuccaaaaaa

SEQ ID NO: 2459367 - RNA, 19 nt, Human
uuuuuccaaaaaaauacug

SEQ ID NO: 2459368 - RNA, 14 nt, Human
uuuuuccaacugug

SEQ ID NO: 2459369 - RNA, 21 nt, Human
uuuuuccacauaaggaaacug

SEQ ID NO: 2459370 - RNA, 20 nt, Human
uuuuuccacuuuguucuuua

SEQ ID NO: 2459371 - RNA, 14 nt, Human
uuuuuccacuuugu

SEQ ID NO: 2459372 - RNA, 12 nt, Human
uuuuuccaggcu

SEQ ID NO: 2459373 - RNA, 20 nt, Human
uuuuucauguuuuaacaaaa

SEQ ID NO: 2459374 - RNA, 21 nt, Human
uuuuucauugauaugaaaaau

SEQ ID NO: 2459375 - RNA, 13 nt, Human
uuuuuaaucuuua

SEQ ID NO: 2459376 - RNA, 17 nt, Human
uuuuuaaucaugaaauu

SEQ ID NO: 2459377 - RNA, 13 nt, Human
uuuuuaaucauga

SEQ ID NO: 2459378 - RNA, 20 nt, Human
uuuuuaauaaagacaggguu

SEQ ID NO: 2459379 - RNA, 17 nt, Human
uuuuuaauaaagacagg

SEQ ID NO: 2459380 - RNA, 18 nt, Human
uuuuuaauaaaaaggcac

SEQ ID NO: 2459381 - RNA, 18 nt, Human
uuuuuaaguuacacauuu

SEQ ID NO: 2459382 - RNA, 20 nt, Human
uuuuucaauuaaacggauua

SEQ ID NO: 2459383 - RNA, 19 nt, Human
uuuuucaauuaaacggauu

SEQ ID NO: 2459384 - RNA, 18 nt, Human
uuuuucaauuaaacggau

SEQ ID NO: 2459385 - RNA, 17 nt, Human
uuuuucaauuaaacgga

SEQ ID NO: 2459386 - RNA, 16 nt, Human
uuuuucacggaaguuu

SEQ ID NO: 2459387 - RNA, 21 nt, Human
uuuuucaauuaaacggauuau

SEQ ID NO: 2459388 - RNA, 13 nt, Human
uuuuucacauuuu

SEQ ID NO: 2459389 - RNA, 22 nt, Human
uuuuucacggaaguuuucaaug

SEQ ID NO: 2459390 - RNA, 19 nt, Human
uuuuucacggaaguuuuca

SEQ ID NO: 2459391 - RNA, 10 nt, Human
uuuuucagac

SEQ ID NO: 2459392 - RNA, 14 nt, Human
uuuuucagaaauau

SEQ ID NO: 2459393 - RNA, 12 nt, Human
uuuuucagaccg

SEQ ID NO: 2459394 - RNA, 11 nt, Human
uuuuucagacc

SEQ ID NO: 2459395 - RNA, 21 nt, Human
uuuuucagcagacuaugaaua

SEQ ID NO: 2459396 - RNA, 15 nt, Human
uuuuucaauuaaacg

SEQ ID NO: 2459397 - RNA, 14 nt, Human
uuuuucaauuaaac

SEQ ID NO: 2459398 - RNA, 13 nt, Human
uuuuucaauuaaa

SEQ ID NO: 2459399 - RNA, 19 nt, Human
uuuuuaaugugcuguguaa

SEQ ID NO: 2459400 - RNA, 12 nt, Human
uuuuuaaugugc

SEQ ID NO: 2459401 - RNA, 17 nt, Human
uuuuuaaugugcugugu

SEQ ID NO: 2459402 - RNA, 15 nt, Human
uuuuuaaucaugaaa

SEQ ID NO: 2459403 - RNA, 19 nt, Human
uuuugacaguguugaaaau

SEQ ID NO: 2459404 - RNA, 23 nt, Human
uuuugacaguguugaaaauguuc

SEQ ID NO: 2459405 - RNA, 15 nt, Human
uuuugaauaaaaacu

SEQ ID NO: 2459406 - RNA, 10 nt, Human
uuuugaagug

SEQ ID NO: 2459407 - RNA, 19 nt, Human
uuuugaaguaguuuguaua

SEQ ID NO: 2459408 - RNA, 22 nt, Human
uuuugaaguguaggcagacaca

SEQ ID NO: 2459409 - RNA, 13 nt, Human
uuuugaaggcaaa

SEQ ID NO: 2459410 - RNA, 14 nt, Human
uuuugaaggcaaaa

SEQ ID NO: 2459411 - RNA, 24 nt, Human
uuuugacaguguugaaaauguuca

SEQ ID NO: 2459412 - RNA, 18 nt, Human
uuuugaccuguggugcaa

SEQ ID NO: 2459413 - RNA, 11 nt, Human
uuuugaagugu

SEQ ID NO: 2459414 - RNA, 17 nt, Human
uuuugacuuaaagcaga

SEQ ID NO: 2459415 - RNA, 20 nt, Human
uuuugacggaugauuggauu

SEQ ID NO: 2459416 - RNA, 15 nt, Human
uuuugacggaugauu

SEQ ID NO: 2459417 - RNA, 22 nt, Human
uuuugacuagggauucaggcug

SEQ ID NO: 2459418 - RNA, 20 nt, Human
uuuuuaaauuuuauuuccug

SEQ ID NO: 2459419 - RNA, 12 nt, Human
uuuuuaaccaaa

SEQ ID NO: 2459420 - RNA, 20 nt, Human
uuuuuaaauguaaagauauu

SEQ ID NO: 2459421 - RNA, 21 nt, Human
uuuugacucuggcaaagcuuu

SEQ ID NO: 2459422 - RNA, 18 nt, Human
uuuuuaagugcugcauuu

SEQ ID NO: 2459423 - RNA, 19 nt, Human
uuuuuaagugcugcauuua

SEQ ID NO: 2459424 - RNA, 22 nt, Human
uuuuuaagugcugcauuuaaaa

SEQ ID NO: 2459425 - RNA, 23 nt, Human
uuuuuaagugcugcauuuaaaag

SEQ ID NO: 2459426 - RNA, 16 nt, Human
uuuuuaagugcugcau

SEQ ID NO: 2459427 - RNA, 17 nt, Human
uuuuuaagugcugcauu

SEQ ID NO: 2459428 - RNA, 12 nt, Human
uuuuuaagaaaa

SEQ ID NO: 2459429 - RNA, 23 nt, Human
uuuuuaagaaaaaggaugcacag

SEQ ID NO: 2459430 - RNA, 22 nt, Human
uuuuuaacucaauauuuuccau

SEQ ID NO: 2459431 - RNA, 12 nt, Human
uuuuuuucuuua

SEQ ID NO: 2459432 - RNA, 12 nt, Human
uuuuuuugagau

SEQ ID NO: 2459433 - RNA, 14 nt, Human
uuuuuuucuaagag

SEQ ID NO: 2459434 - RNA, 10 nt, Human
uuuuuuucca

SEQ ID NO: 2459435 - RNA, 12 nt, Human
uuuuuuuuaaga

SEQ ID NO: 2459436 - RNA, 11 nt, Human
uuuuuuuacua

SEQ ID NO: 2459437 - RNA, 13 nt, Human
uuuuuuuaaugug

SEQ ID NO: 2459438 - RNA, 13 nt, Human
uuuuuuccaucuu

SEQ ID NO: 2459439 - RNA, 22 nt, Human
uuuuuuccaucuuuacaaaacu

SEQ ID NO: 2459440 - RNA, 13 nt, Human
uuuuuuccacuua

SEQ ID NO: 2459441 - RNA, 15 nt, Human
uuuuuuaaugugcug

SEQ ID NO: 2459442 - RNA, 12 nt, Human
uuuuuuaauuuu

SEQ ID NO: 2459443 - RNA, 16 nt, Human
uuuuuuaaugugcugu

SEQ ID NO: 2459444 - RNA, 16 nt, Human
uuuuuuauuguuuaaa

SEQ ID NO: 2459445 - RNA, 12 nt, Human
uuuuuucagacc

SEQ ID NO: 2459446 - RNA, 11 nt, Human
uuuuuucagac

SEQ ID NO: 2459447 - RNA, 18 nt, Human
uuuuuucaauauuuauua

SEQ ID NO: 2459448 - RNA, 20 nt, Human
uuuuuucauguuuuaacaaa

SEQ ID NO: 2459449 - RNA, 14 nt, Human
uuuuuucagaccga

SEQ ID NO: 2459450 - RNA, 12 nt, Human
uuuuuucaucuu

SEQ ID NO: 2459451 - RNA, 12 nt, Human
uuuuuuaagauu

SEQ ID NO: 2459452 - RNA, 17 nt, Human
uuuuuuaaguauuuaua

SEQ ID NO: 2459453 - RNA, 11 nt, Human
uuuuuuaagau

SEQ ID NO: 2459454 - RNA, 19 nt, Human
uuuuuuaaccaaaggugaa

SEQ ID NO: 2459455 - RNA, 16 nt, Human
uuuuuccccaaagucu

SEQ ID NO: 2459456 - RNA, 15 nt, Human
uuuuuccccaaaguc

SEQ ID NO: 2459457 - RNA, 14 nt, Human
uuuuuccccaaagu

SEQ ID NO: 2459458 - RNA, 13 nt, Human
uuuuuccaucuuu

SEQ ID NO: 2459459 - RNA, 19 nt, Human
uuuuucccagcuacaccuu

SEQ ID NO: 2459460 - RNA, 20 nt, Human
uuguacauuuaugauuuaau

SEQ ID NO: 2459461 - RNA, 17 nt, Human
uuguacauuuaugauuu

SEQ ID NO: 2459462 - RNA, 21 nt, Human
uuguacauauuuguggaauaa

SEQ ID NO: 2459463 - RNA, 16 nt, Human
uuguacauaguuauuu

SEQ ID NO: 2459464 - RNA, 21 nt, Human
uuguacauguguagccugugc

SEQ ID NO: 2459465 - RNA, 20 nt, Human
uuguacauguguagccugug

SEQ ID NO: 2459466 - RNA, 15 nt, Human
uuguacauauuugug

SEQ ID NO: 2459467 - RNA, 18 nt, Human
uuguacauauguaaaaua

SEQ ID NO: 2459468 - RNA, 22 nt, Human
uuguaugccuuuaaaucuguga

SEQ ID NO: 2459469 - RNA, 21 nt, Human
uuguaugccuuuaaaucugug

SEQ ID NO: 2459470 - RNA, 14 nt, Human
uuguacuguaaaga

SEQ ID NO: 2459471 - RNA, 12 nt, Human
uuguacuguaaa

SEQ ID NO: 2459472 - RNA, 16 nt, Human
uuguauguaaaugugc

SEQ ID NO: 2459473 - RNA, 13 nt, Human
uuguauguaaaug

SEQ ID NO: 2459474 - RNA, 23 nt, Human
uuguaugccuuuaaaucugugau

SEQ ID NO: 2459475 - RNA, 19 nt, Human
uuguauguuaaguuacuuc

SEQ ID NO: 2459476 - RNA, 17 nt, Human
uuguauguguguagaca

SEQ ID NO: 2459477 - RNA, 18 nt, Human
uuguauguaaaugugcau

SEQ ID NO: 2459478 - RNA, 13 nt, Human
uuguauuaaacuc

SEQ ID NO: 2459479 - RNA, 15 nt, Human
uuguauuaaacucuu

SEQ ID NO: 2459480 - RNA, 14 nt, Human
uuguauuaaagaca

SEQ ID NO: 2459481 - RNA, 22 nt, Human
uugucguugacuuuagggacuc

SEQ ID NO: 2459482 - RNA, 17 nt, Human
uugucuaaaacaauaaa

SEQ ID NO: 2459483 - RNA, 18 nt, Human
uugucuaaaacaauaaaa

SEQ ID NO: 2459484 - RNA, 16 nt, Human
uuguauuaaacucuuc

SEQ ID NO: 2459485 - RNA, 19 nt, Human
uuguauucucuccuguacc

SEQ ID NO: 2459486 - RNA, 22 nt, Human
uugucuaaaaugccucagugua

SEQ ID NO: 2459487 - RNA, 11 nt, Human
uugucuaaaau

SEQ ID NO: 2459488 - RNA, 15 nt, Human
uuguauucucuccug

SEQ ID NO: 2459489 - RNA, 16 nt, Human
uuguauucucuccugu

SEQ ID NO: 2459490 - RNA, 21 nt, Human
uuguauucagaguugaugguu

SEQ ID NO: 2459491 - RNA, 13 nt, Human
uuguauuaagaau

SEQ ID NO: 2459492 - RNA, 18 nt, Human
uuguauuaagaaugaaau

SEQ ID NO: 2459493 - RNA, 12 nt, Human
uuguauuaagaa

SEQ ID NO: 2459494 - RNA, 16 nt, Human
uuguauuaaagacaga

SEQ ID NO: 2459495 - RNA, 12 nt, Human
uugucucccugg

SEQ ID NO: 2459496 - RNA, 17 nt, Human
uugucucccuggcccuc

SEQ ID NO: 2459497 - RNA, 16 nt, Human
uugucucccuggcccu

SEQ ID NO: 2459498 - RNA, 15 nt, Human
uugucucccuggccc

SEQ ID NO: 2459499 - RNA, 14 nt, Human
uugucucccuggcc

SEQ ID NO: 2459500 - RNA, 20 nt, Human
uugucugaagucacugcaca

SEQ ID NO: 2459501 - RNA, 21 nt, Human
uugucugaagucacugcacag

SEQ ID NO: 2459502 - RNA, 15 nt, Human
uugucuuaaaaagug

SEQ ID NO: 2459503 - RNA, 15 nt, Human
uugucuagugaaacu

SEQ ID NO: 2459504 - RNA, 17 nt, Human
uugucucaaugcucaua

SEQ ID NO: 2459505 - RNA, 16 nt, Human
uugucucaaugcucau

SEQ ID NO: 2459506 - RNA, 18 nt, Human
uugucucaaugcucauaa

SEQ ID NO: 2459507 - RNA, 16 nt, Human
uugugauuuuuguaau

SEQ ID NO: 2459508 - RNA, 17 nt, Human
uugugauuuuuguaauu

SEQ ID NO: 2459509 - RNA, 12 nt, Human
uugugauuuuug

SEQ ID NO: 2459510 - RNA, 14 nt, Human
uugugaaaugaugg

SEQ ID NO: 2459511 - RNA, 23 nt, Human
uugugauuucccguggccccagc

SEQ ID NO: 2459512 - RNA, 20 nt, Human
uugugaaaggaaagaggcuc

SEQ ID NO: 2459513 - RNA, 21 nt, Human
uugugaaauaaaacuggcuuu

SEQ ID NO: 2459514 - RNA, 17 nt, Human
uugugaaaugaaaacau

SEQ ID NO: 2459515 - RNA, 19 nt, Human
uugucugugcauccggggg

SEQ ID NO: 2459516 - RNA, 16 nt, Human
uuggguucaucugagc

SEQ ID NO: 2459517 - RNA, 22 nt, Human
uuggguucaagcgauucuucug

SEQ ID NO: 2459518 - RNA, 15 nt, Human
uugcacggcugcuga

SEQ ID NO: 2459519 - RNA, 14 nt, Human
uugcacggcugcug

SEQ ID NO: 2459520 - RNA, 15 nt, Human
uugcacguggccucu

SEQ ID NO: 2459521 - RNA, 17 nt, Human
uugcacgcccaugugug

SEQ ID NO: 2459522 - RNA, 18 nt, Human
uugcacgcccauguguga

SEQ ID NO: 2459523 - RNA, 20 nt, Human
uugcacgcccaugugugagu

SEQ ID NO: 2459524 - RNA, 14 nt, Human
uugcacuccagccu

SEQ ID NO: 2459525 - RNA, 21 nt, Human
uuggguguaacaggucuccuc

SEQ ID NO: 2459526 - RNA, 23 nt, Human
uuggguguaacaggucuccucuu

SEQ ID NO: 2459527 - RNA, 19 nt, Human
uugcacuaaaguauguaaa

SEQ ID NO: 2459528 - RNA, 15 nt, Human
uugcacuaaaguaug

SEQ ID NO: 2459529 - RNA, 21 nt, Human
uugguauuguauuuauucaau

SEQ ID NO: 2459530 - RNA, 14 nt, Human
uugguauuguauuu

SEQ ID NO: 2459531 - RNA, 13 nt, Human
uugguauuguauu

SEQ ID NO: 2459532 - RNA, 18 nt, Human
uugguaucuguucuuuaa

SEQ ID NO: 2459533 - RNA, 12 nt, Human
uugguauuguau

SEQ ID NO: 2459534 - RNA, 17 nt, Human
uugguaucaagaaaguc

SEQ ID NO: 2459535 - RNA, 16 nt, Human
uugguaucaagaaagu

SEQ ID NO: 2459536 - RNA, 13 nt, Human
uugguagagauuc

SEQ ID NO: 2459537 - RNA, 15 nt, Human
uugguagagauucau

SEQ ID NO: 2459538 - RNA, 22 nt, Human
uugguacuacuagaugucuuua

SEQ ID NO: 2459539 - RNA, 16 nt, Human
uuggucugugagaugc

SEQ ID NO: 2459540 - RNA, 13 nt, Human
uuggucuguguga

SEQ ID NO: 2459541 - RNA, 15 nt, Human
uugguccaggaaaug

SEQ ID NO: 2459542 - RNA, 15 nt, Human
uuggucuuauuuauu

SEQ ID NO: 2459543 - RNA, 19 nt, Human
uuggucuuauuuauuauug

SEQ ID NO: 2459544 - RNA, 22 nt, Human
uuguaaaaauuaaaaguuaugg

SEQ ID NO: 2459545 - RNA, 15 nt, Human
uuguaaauuaacuuu

SEQ ID NO: 2459546 - RNA, 16 nt, Human
uuguaaauuaacuuuu

SEQ ID NO: 2459547 - RNA, 18 nt, Human
uuguaaauuaacuuuuau

SEQ ID NO: 2459548 - RNA, 23 nt, Human
uuguaaauuaacuuuuauaaacu

SEQ ID NO: 2459549 - RNA, 18 nt, Human
uuguacauaaugcgugca

SEQ ID NO: 2459550 - RNA, 14 nt, Human
uuguacauaaugcg

SEQ ID NO: 2459551 - RNA, 16 nt, Human
uuguaaauuaaucuuu

SEQ ID NO: 2459552 - RNA, 14 nt, Human
uuguaaauuaaucu

SEQ ID NO: 2459553 - RNA, 18 nt, Human
uuguaaauauauaaauau

SEQ ID NO: 2459554 - RNA, 15 nt, Human
uuguaaauuaaucuu

SEQ ID NO: 2459555 - RNA, 21 nt, Human
uuguaaauauauaaauauaua

SEQ ID NO: 2459556 - RNA, 17 nt, Human
uuguaaauauauaaaua

SEQ ID NO: 2459557 - RNA, 15 nt, Human
uuguaaauauauaaa

SEQ ID NO: 2459558 - RNA, 13 nt, Human
uuguaaauauaua

SEQ ID NO: 2459559 - RNA, 12 nt, Human
uuguaaauauau

SEQ ID NO: 2459560 - RNA, 21 nt, Human
uuguaaaugugguaaagaguu

SEQ ID NO: 2459561 - RNA, 16 nt, Human
uuguaaaugugguaaa

SEQ ID NO: 2459562 - RNA, 17 nt, Human
uuguaaauaguauuuga

SEQ ID NO: 2459563 - RNA, 17 nt, Human
uuguaaauagcucaggu

SEQ ID NO: 2459564 - RNA, 15 nt, Human
uuguaaaauagcuug

SEQ ID NO: 2459565 - RNA, 21 nt, Human
uuguaaaagaacaguaaacau

SEQ ID NO: 2459566 - RNA, 21 nt, Human
uuguaaaauagcuuguauagu

SEQ ID NO: 2459567 - RNA, 11 nt, Human
uuguaaauaca

SEQ ID NO: 2459568 - RNA, 12 nt, Human
uuguaaauacac

SEQ ID NO: 2459569 - RNA, 14 nt, Human
uuguaaauacacca

SEQ ID NO: 2459570 - RNA, 13 nt, Human
uuguaaauacacc

SEQ ID NO: 2459571 - RNA, 14 nt, Human
uuguaaauacacau

SEQ ID NO: 2459572 - RNA, 20 nt, Human
uuguaaaagaacaguaaaca

SEQ ID NO: 2459573 - RNA, 14 nt, Human
uuguaaaacuacac

SEQ ID NO: 2459574 - RNA, 23 nt, Human
uuguaaaagaacaguaaacauug

SEQ ID NO: 2459575 - RNA, 20 nt, Human
uuguaaaaccugucaaugau

SEQ ID NO: 2459576 - RNA, 23 nt, Human
uuguaaaaccugucaaugauaca

SEQ ID NO: 2459577 - RNA, 21 nt, Human
uuguaaaaccugucaaugaua

SEQ ID NO: 2459578 - RNA, 20 nt, Human
uuguguuugucauuagccug

SEQ ID NO: 2459579 - RNA, 15 nt, Human
uuguguuugucauua

SEQ ID NO: 2459580 - RNA, 17 nt, Human
uuguguuuguguauuua

SEQ ID NO: 2459581 - RNA, 17 nt, Human
uuguguuuuuaauuuau

SEQ ID NO: 2459582 - RNA, 21 nt, Human
uuguguuuuuaauuuauuuau

SEQ ID NO: 2459583 - RNA, 16 nt, Human
uuguuaaaauaacuag

SEQ ID NO: 2459584 - RNA, 18 nt, Human
uuguguuuugcaagccag

SEQ ID NO: 2459585 - RNA, 14 nt, Human
uuguguuugucauu

SEQ ID NO: 2459586 - RNA, 19 nt, Human
uuguguuucuuuaguuuuu

SEQ ID NO: 2459587 - RNA, 18 nt, Human
uuguuaacucuugucuau

SEQ ID NO: 2459588 - RNA, 18 nt, Human
uuguguuuuuaauuuauu

SEQ ID NO: 2459589 - RNA, 22 nt, Human
uuguuaacucuugucuauuuuu

SEQ ID NO: 2459590 - RNA, 14 nt, Human
uuguuaaauauuua

SEQ ID NO: 2459591 - RNA, 17 nt, Human
uuguuaagauaugaugu

SEQ ID NO: 2459592 - RNA, 19 nt, Human
uuguuaauaaaaguacaug

SEQ ID NO: 2459593 - RNA, 14 nt, Human
uuguuaauaaaagu

SEQ ID NO: 2459594 - RNA, 22 nt, Human
uuguuaagucuaaauauuuccu

SEQ ID NO: 2459595 - RNA, 21 nt, Human
uuguuaauaaaaguacauguu

SEQ ID NO: 2459596 - RNA, 17 nt, Human
uuguuaaugaaaauguc

SEQ ID NO: 2459597 - RNA, 18 nt, Human
uuguuaaugaaaauguca

SEQ ID NO: 2459598 - RNA, 19 nt, Human
uuguuaguaugaggcauuu

SEQ ID NO: 2459599 - RNA, 21 nt, Human
uuguuaguaugaggcauuugu

SEQ ID NO: 2459600 - RNA, 14 nt, Human
uuguuacuucugag

SEQ ID NO: 2459601 - RNA, 17 nt, Human
uuguuacucugguucuu

SEQ ID NO: 2459602 - RNA, 18 nt, Human
uuguuacuaacuaaacuc

SEQ ID NO: 2459603 - RNA, 17 nt, Human
uuguuacuaacuaaacu

SEQ ID NO: 2459604 - RNA, 22 nt, Human
uuguuacucugguucuuuguuu

SEQ ID NO: 2459605 - RNA, 22 nt, Human
uuguuaauuuuuccuauauugc

SEQ ID NO: 2459606 - RNA, 21 nt, Human
uuguuacaggcaccgagaaug

SEQ ID NO: 2459607 - RNA, 12 nt, Human
uuguuaccuuua

SEQ ID NO: 2459608 - RNA, 14 nt, Human
uuguuacauuuuua

SEQ ID NO: 2459609 - RNA, 19 nt, Human
uuguuaaugaaaaugucag

SEQ ID NO: 2459610 - RNA, 17 nt, Human
uuguuaauggugcaaau

SEQ ID NO: 2459611 - RNA, 19 nt, Human
uuguuaaugguuugaauau

SEQ ID NO: 2459612 - RNA, 15 nt, Human
uuguuuccuuucacu

SEQ ID NO: 2459613 - RNA, 9 nt, Human
uuguuuaaa

SEQ ID NO: 2459614 - RNA, 16 nt, Human
uuguuucaauugcauc

SEQ ID NO: 2459615 - RNA, 20 nt, Human
uuguuucauugacuaucaaa

SEQ ID NO: 2459616 - RNA, 14 nt, Human
uuguuuaaaaucau

SEQ ID NO: 2459617 - RNA, 16 nt, Human
uuguuguuuuuaagau

SEQ ID NO: 2459618 - RNA, 23 nt, Human
uuguuguuugccauacuuugucu

SEQ ID NO: 2459619 - RNA, 20 nt, Human
uuguuuauuuaucagugaca

SEQ ID NO: 2459620 - RNA, 18 nt, Human
uuguuucaaacacaaaug

SEQ ID NO: 2459621 - RNA, 21 nt, Human
uuguuugagaaauuaaguauc

SEQ ID NO: 2459622 - RNA, 23 nt, Human
uuguuugaugcauuaaaagaaaa

SEQ ID NO: 2459623 - RNA, 15 nt, Human
uuguuugagaaauua

SEQ ID NO: 2459624 - RNA, 21 nt, Human
uuguuugaaacaaagaagguu

SEQ ID NO: 2459625 - RNA, 12 nt, Human
uuguuugcuauc

SEQ ID NO: 2459626 - RNA, 16 nt, Human
uuguuugccauacuuu

SEQ ID NO: 2459627 - RNA, 15 nt, Human
uuguuugccauacuu

SEQ ID NO: 2459628 - RNA, 19 nt, Human
uuguuugcucaccuggggu

SEQ ID NO: 2459629 - RNA, 16 nt, Human
uuguuugcuaucuuaa

SEQ ID NO: 2459630 - RNA, 13 nt, Human
uuguuugcuuauu

SEQ ID NO: 2459631 - RNA, 16 nt, Human
uuguuucguggggagg

SEQ ID NO: 2459632 - RNA, 16 nt, Human
uuguuucuaccuccca

SEQ ID NO: 2459633 - RNA, 14 nt, Human
uuguuucuaccucc

SEQ ID NO: 2459634 - RNA, 17 nt, Human
uuguuucuaccucccag

SEQ ID NO: 2459635 - RNA, 16 nt, Human
uuguuucucccccugg

SEQ ID NO: 2459636 - RNA, 21 nt, Human
uuguuguuugccauacuuugu

SEQ ID NO: 2459637 - RNA, 15 nt, Human
uuguuguuuguaugu

SEQ ID NO: 2459638 - RNA, 14 nt, Human
uuguuguuugccau

SEQ ID NO: 2459639 - RNA, 20 nt, Human
uuguuguuauuuuuugagaa

SEQ ID NO: 2459640 - RNA, 21 nt, Human
uuguuguuaaugaaaauguca

SEQ ID NO: 2459641 - RNA, 18 nt, Human
uuguuauguagauaacaa

SEQ ID NO: 2459642 - RNA, 19 nt, Human
uuguuauggcuuaaugaca

SEQ ID NO: 2459643 - RNA, 14 nt, Human
uuguuauggcuuaa

SEQ ID NO: 2459644 - RNA, 20 nt, Human
uuguuagugugucuuagugu

SEQ ID NO: 2459645 - RNA, 22 nt, Human
uuguuaguaugaggcauuuguu

SEQ ID NO: 2459646 - RNA, 16 nt, Human
uuguuaucagucaaua

SEQ ID NO: 2459647 - RNA, 22 nt, Human
uuguuaucagucaauauuuuua

SEQ ID NO: 2459648 - RNA, 13 nt, Human
uuguuaucaguaa

SEQ ID NO: 2459649 - RNA, 21 nt, Human
uuguggaaaaugaaaauuagg

SEQ ID NO: 2459650 - RNA, 16 nt, Human
uugugcuuuuccuauu

SEQ ID NO: 2459651 - RNA, 18 nt, Human
uuguggaaagccucugcu

SEQ ID NO: 2459652 - RNA, 16 nt, Human
uuguggacacagcucu

SEQ ID NO: 2459653 - RNA, 16 nt, Human
uuguggacauuuaaga

SEQ ID NO: 2459654 - RNA, 21 nt, Human
uuguggaauugggagcuuggg

SEQ ID NO: 2459655 - RNA, 22 nt, Human
uuguggaagcaaaaaucugaaa

SEQ ID NO: 2459656 - RNA, 22 nt, Human
uuguggaauggagauucaguuu

SEQ ID NO: 2459657 - RNA, 17 nt, Human
uuguggacacagcucuu

SEQ ID NO: 2459658 - RNA, 20 nt, Human
uuguggauuuaacagaaaug

SEQ ID NO: 2459659 - RNA, 21 nt, Human
uuguggauuuaacagaaaugu

SEQ ID NO: 2459660 - RNA, 22 nt, Human
uuguggacuaaaagauauaagu

SEQ ID NO: 2459661 - RNA, 18 nt, Human
uuguggacuaaaagauau

SEQ ID NO: 2459662 - RNA, 16 nt, Human
uuguggacuaaaagau

SEQ ID NO: 2459663 - RNA, 13 nt, Human
uuguggacuaaaa

SEQ ID NO: 2459664 - RNA, 18 nt, Human
uuguggauguuuuaauuc

SEQ ID NO: 2459665 - RNA, 14 nt, Human
uuguggaugucuuc

SEQ ID NO: 2459666 - RNA, 14 nt, Human
uuguggagccccac

SEQ ID NO: 2459667 - RNA, 15 nt, Human
uuguggacauuuaag

SEQ ID NO: 2459668 - RNA, 22 nt, Human
uuguggaggagcucaggacacu

SEQ ID NO: 2459669 - RNA, 22 nt, Human
uuguggauuuaacagaaaugua

SEQ ID NO: 2459670 - RNA, 23 nt, Human
uuguggauuuaacagaaauguac

SEQ ID NO: 2459671 - RNA, 14 nt, Human
uuguggcacauucu

SEQ ID NO: 2459672 - RNA, 20 nt, Human
uuguguucccauuucagcug

SEQ ID NO: 2459673 - RNA, 13 nt, Human
uuguguucuaaua

SEQ ID NO: 2459674 - RNA, 23 nt, Human
uuguggauguuuuaauuccauga

SEQ ID NO: 2459675 - RNA, 21 nt, Human
uuguggauguuuuaauuccau

SEQ ID NO: 2459676 - RNA, 13 nt, Human
uuguguucaccuu

SEQ ID NO: 2459677 - RNA, 21 nt, Human
uuguguuuauauauaagccaa

SEQ ID NO: 2459678 - RNA, 11 nt, Human
uuguguuguca

SEQ ID NO: 2459679 - RNA, 13 nt, Human
uuguguugugaau

SEQ ID NO: 2459680 - RNA, 19 nt, Human
uugugcagaaaacauuguu

SEQ ID NO: 2459681 - RNA, 18 nt, Human
uugugcagaaaacauugu

SEQ ID NO: 2459682 - RNA, 16 nt, Human
uugugcagaaaacauu

SEQ ID NO: 2459683 - RNA, 15 nt, Human
uugugcagaaaacau

SEQ ID NO: 2459684 - RNA, 21 nt, Human
uugugcacccucuaucccaau

SEQ ID NO: 2459685 - RNA, 19 nt, Human
uugugcacccucuauccca

SEQ ID NO: 2459686 - RNA, 17 nt, Human
uugugcauuaucuagau

SEQ ID NO: 2459687 - RNA, 22 nt, Human
uugugauuugacuguuuuuacc

SEQ ID NO: 2459688 - RNA, 17 nt, Human
uugugauuugacuguuu

SEQ ID NO: 2459689 - RNA, 16 nt, Human
uugugauuugacuguu

SEQ ID NO: 2459690 - RNA, 15 nt, Human
uugugauuugacugu

SEQ ID NO: 2459691 - RNA, 11 nt, Human
uugugauuuga

SEQ ID NO: 2459692 - RNA, 23 nt, Human
uugugaaaugaaaacauguaaua

SEQ ID NO: 2459693 - RNA, 22 nt, Human
uugugcauuaucuagauacugu

SEQ ID NO: 2459694 - RNA, 23 nt, Human
uugugcauuaucuagauacugua

SEQ ID NO: 2459695 - RNA, 12 nt, Human
uugugcauuugg

SEQ ID NO: 2459696 - RNA, 16 nt, Human
uugugccaauauguau

SEQ ID NO: 2459697 - RNA, 16 nt, Human
uugugccuuuuauagc

SEQ ID NO: 2459698 - RNA, 11 nt, Human
uugugcuucua

SEQ ID NO: 2459699 - RNA, 14 nt, Human
uugugcuuguuuac

SEQ ID NO: 2459700 - RNA, 23 nt, Human
uugugcuucuuucuuugggaaua

SEQ ID NO: 2459701 - RNA, 18 nt, Human
uugugcuggauggagccc

SEQ ID NO: 2459702 - RNA, 22 nt, Human
uugugcugaucgugcuaaauuu

SEQ ID NO: 2459703 - RNA, 22 nt, Human
uugugccaauauguauuguaaa

SEQ ID NO: 2459704 - RNA, 17 nt, Human
uugugccaauauguauu

SEQ ID NO: 2459705 - RNA, 22 nt, Human
uugugccauagucacauggccu

SEQ ID NO: 2459706 - RNA, 16 nt, Human
uugugccagaaugcuu

SEQ ID NO: 2459707 - RNA, 21 nt, Human
uugugccagaaugcuuuagga

SEQ ID NO: 2459708 - RNA, 12 nt, Human
uugugccccugc

SEQ ID NO: 2459709 - RNA, 17 nt, Human
uugugcccacugucucu

SEQ ID NO: 2459710 - RNA, 15 nt, Human
uugugccuggcucag

SEQ ID NO: 2459711 - RNA, 15 nt, Human
uuuaagacacuuuuu

SEQ ID NO: 2459712 - RNA, 19 nt, Human
uuuaagacauuuuuggaag

SEQ ID NO: 2459713 - RNA, 22 nt, Human
uuuaagacagucccaucaaaac

SEQ ID NO: 2459714 - RNA, 22 nt, Human
uuuaagaaaaaggaugcacaga

SEQ ID NO: 2459715 - RNA, 19 nt, Human
uuuaacuugaggguaauaa

SEQ ID NO: 2459716 - RNA, 12 nt, Human
uuuaacuugagc

SEQ ID NO: 2459717 - RNA, 13 nt, Human
uuuaacuucugcc

SEQ ID NO: 2459718 - RNA, 18 nt, Human
uuuaacuuuaaguuucag

SEQ ID NO: 2459719 - RNA, 14 nt, Human
uuuaacuuuaaguu

SEQ ID NO: 2459720 - RNA, 21 nt, Human
uuuaacuuaaucaauuaauuu

SEQ ID NO: 2459721 - RNA, 18 nt, Human
uuuaagaaaaaggaugca

SEQ ID NO: 2459722 - RNA, 22 nt, Human
uuuaagaaaaaauaacacacau

SEQ ID NO: 2459723 - RNA, 18 nt, Human
uuuaagaaaaaauaacac

SEQ ID NO: 2459724 - RNA, 19 nt, Human
uuuaacuuuaucacauuau

SEQ ID NO: 2459725 - RNA, 13 nt, Human
uuuaauaauguuu

SEQ ID NO: 2459726 - RNA, 22 nt, Human
uuuaauaacauuaccuuacugu

SEQ ID NO: 2459727 - RNA, 20 nt, Human
uuuaauaacauuaccuuacu

SEQ ID NO: 2459728 - RNA, 18 nt, Human
uuuaauaacauuaccuua

SEQ ID NO: 2459729 - RNA, 15 nt, Human
uuuaauaacauuacc

SEQ ID NO: 2459730 - RNA, 23 nt, Human
uuuaauaacauuaccuuacugug

SEQ ID NO: 2459731 - RNA, 15 nt, Human
uuuaauaauauacuu

SEQ ID NO: 2459732 - RNA, 17 nt, Human
uuuaauaaaauaauucu

SEQ ID NO: 2459733 - RNA, 16 nt, Human
uuuaauaaaauaauuc

SEQ ID NO: 2459734 - RNA, 20 nt, Human
uuuaauaaaaaggcaccuau

SEQ ID NO: 2459735 - RNA, 13 nt, Human
uuuaauaaacuuu

SEQ ID NO: 2459736 - RNA, 20 nt, Human
uuuaauaaaauaauucuaaa

SEQ ID NO: 2459737 - RNA, 14 nt, Human
uuuaauaacaauug

SEQ ID NO: 2459738 - RNA, 12 nt, Human
uuuaauaacauu

SEQ ID NO: 2459739 - RNA, 22 nt, Human
uuuaaguguaacuggcaguuuu

SEQ ID NO: 2459740 - RNA, 18 nt, Human
uuuaagacagucuuuggg

SEQ ID NO: 2459741 - RNA, 18 nt, Human
uuuaagugcuuuguaaug

SEQ ID NO: 2459742 - RNA, 14 nt, Human
uuuaaguguaacug

SEQ ID NO: 2459743 - RNA, 15 nt, Human
uuuaaguuguuugca

SEQ ID NO: 2459744 - RNA, 21 nt, Human
uuuaaguuguuugcaugugaa

SEQ ID NO: 2459745 - RNA, 14 nt, Human
uuuaaguuguuugc

SEQ ID NO: 2459746 - RNA, 23 nt, Human
uuuaaguucuggaugcauuucuc

SEQ ID NO: 2459747 - RNA, 18 nt, Human
uuuaaguuacacauuuuu

SEQ ID NO: 2459748 - RNA, 18 nt, Human
uuguuuggagacagaguc

SEQ ID NO: 2459749 - RNA, 18 nt, Human
uuuaaauuuuuuuccuua

SEQ ID NO: 2459750 - RNA, 15 nt, Human
uuguuugcuuauugu

SEQ ID NO: 2459751 - RNA, 18 nt, Human
uuuaaauuuuacccuuua

SEQ ID NO: 2459752 - RNA, 22 nt, Human
uuuaaauuuuacccuuuagacu

SEQ ID NO: 2459753 - RNA, 15 nt, Human
uuuaacaaaaaccaa

SEQ ID NO: 2459754 - RNA, 15 nt, Human
uuuaacaaaagcaag

SEQ ID NO: 2459755 - RNA, 16 nt, Human
uuuaacaaaagcaaga

SEQ ID NO: 2459756 - RNA, 23 nt, Human
uuuaacaacuaugauuuggaaaa

SEQ ID NO: 2459757 - RNA, 18 nt, Human
uuuaacagaaauguacag

SEQ ID NO: 2459758 - RNA, 18 nt, Human
uuuaacaauaacuacugu

SEQ ID NO: 2459759 - RNA, 20 nt, Human
uuuaacaauaacuacugugu

SEQ ID NO: 2459760 - RNA, 21 nt, Human
uuuaacaauaacuacuguguu

SEQ ID NO: 2459761 - RNA, 22 nt, Human
uuuaacaauaacuacuguguuc

SEQ ID NO: 2459762 - RNA, 23 nt, Human
uuuaacaauaacuacuguguucc

SEQ ID NO: 2459763 - RNA, 17 nt, Human
uuuaacagcugaauuau

SEQ ID NO: 2459764 - RNA, 18 nt, Human
uuuaacaggaagaucuua

SEQ ID NO: 2459765 - RNA, 20 nt, Human
uuuaacagcugaauuaucua

SEQ ID NO: 2459766 - RNA, 14 nt, Human
uuuaacagggucuc

SEQ ID NO: 2459767 - RNA, 23 nt, Human
uuuaacagggucucuagugcugu

SEQ ID NO: 2459768 - RNA, 16 nt, Human
uuuaacagucauuuaa

SEQ ID NO: 2459769 - RNA, 15 nt, Human
uuuaacagucauuua

SEQ ID NO: 2459770 - RNA, 17 nt, Human
uuuaacagucauuuaaa

SEQ ID NO: 2459771 - RNA, 19 nt, Human
uuuaacucuauaauguguu

SEQ ID NO: 2459772 - RNA, 21 nt, Human
uuuaacauauaauuucuuuaa

SEQ ID NO: 2459773 - RNA, 15 nt, Human
uuuaacuagaauuua

SEQ ID NO: 2459774 - RNA, 22 nt, Human
uuuaacgaaugaagaugucuaa

SEQ ID NO: 2459775 - RNA, 14 nt, Human
uuuaacugccuugu

SEQ ID NO: 2459776 - RNA, 13 nt, Human
uuuaacucugucu

SEQ ID NO: 2459777 - RNA, 14 nt, Human
uuuaacucugucuu

SEQ ID NO: 2459778 - RNA, 17 nt, Human
uuuaacucugucuucac

SEQ ID NO: 2459779 - RNA, 23 nt, Human
uuuaacucagaucacuacugcag

SEQ ID NO: 2459780 - RNA, 22 nt, Human
uuuaacucauaccuuuaaagga

SEQ ID NO: 2459781 - RNA, 12 nt, Human
uuuaacucuguc

SEQ ID NO: 2459782 - RNA, 23 nt, Human
uuuaacucgagaccuuuucaacu

SEQ ID NO: 2459783 - RNA, 21 nt, Human
uuuaacucagaucacuacugc

SEQ ID NO: 2459784 - RNA, 18 nt, Human
uuuaacucagaucacuac

SEQ ID NO: 2459785 - RNA, 15 nt, Human
uuuaacucagaucac

SEQ ID NO: 2459786 - RNA, 12 nt, Human
uuuaacucagau

SEQ ID NO: 2459787 - RNA, 17 nt, Human
uuuaacuagaauuuauu

SEQ ID NO: 2459788 - RNA, 24 nt, Human
uuuaacucaauauuuuccaugaaa

SEQ ID NO: 2459789 - RNA, 22 nt, Human
uuuagaaagcauuugaaugcau

SEQ ID NO: 2459790 - RNA, 19 nt, Human
uuuagaaauacugcaagaa

SEQ ID NO: 2459791 - RNA, 20 nt, Human
uuuagaaauacugcaagaaa

SEQ ID NO: 2459792 - RNA, 22 nt, Human
uuuagaaauacugcaagaaaau

SEQ ID NO: 2459793 - RNA, 14 nt, Human
uuuagaaauauaau

SEQ ID NO: 2459794 - RNA, 19 nt, Human
uuuagaaagcauuugaaug

SEQ ID NO: 2459795 - RNA, 18 nt, Human
uuuagaaagcauuugaau

SEQ ID NO: 2459796 - RNA, 16 nt, Human
uuuagaaagcauuuga

SEQ ID NO: 2459797 - RNA, 14 nt, Human
uuuagaaagcauuu

SEQ ID NO: 2459798 - RNA, 15 nt, Human
uuuagaaagaauauu

SEQ ID NO: 2459799 - RNA, 23 nt, Human
uuuagaaagaagcccaauauuau

SEQ ID NO: 2459800 - RNA, 13 nt, Human
uuuagaaagcauu

SEQ ID NO: 2459801 - RNA, 19 nt, Human
uuuacuucuuauacauuug

SEQ ID NO: 2459802 - RNA, 22 nt, Human
uuuacuucuuauacauuugaua

SEQ ID NO: 2459803 - RNA, 18 nt, Human
uuuacuugccauuacuca

SEQ ID NO: 2459804 - RNA, 18 nt, Human
uuuaccacccccacaccu

SEQ ID NO: 2459805 - RNA, 18 nt, Human
uuuacuugcauugaauau

SEQ ID NO: 2459806 - RNA, 21 nt, Human
uuuacuugcauugaauauauu

SEQ ID NO: 2459807 - RNA, 22 nt, Human
uuuagacaaauacucaugugua

SEQ ID NO: 2459808 - RNA, 21 nt, Human
uuuagacaaauacucaugugu

SEQ ID NO: 2459809 - RNA, 20 nt, Human
uuuagacaaauacucaugug

SEQ ID NO: 2459810 - RNA, 19 nt, Human
uuuagacaaauacucaugu

SEQ ID NO: 2459811 - RNA, 18 nt, Human
uuuagacaaauacucaug

SEQ ID NO: 2459812 - RNA, 16 nt, Human
uuuagacaaauacuca

SEQ ID NO: 2459813 - RNA, 12 nt, Human
uuuagacagagu

SEQ ID NO: 2459814 - RNA, 22 nt, Human
uuuaguuucuguucuguggaaa

SEQ ID NO: 2459815 - RNA, 14 nt, Human
uuuaguuuacucaa

SEQ ID NO: 2459816 - RNA, 14 nt, Human
uuuagacacuggcu

SEQ ID NO: 2459817 - RNA, 23 nt, Human
uuuagacaaauacucauguguau

SEQ ID NO: 2459818 - RNA, 22 nt, Human
uuuagacaagagaugggaauga

SEQ ID NO: 2459819 - RNA, 23 nt, Human
uuuauaaaaauaaaaaacacugg

SEQ ID NO: 2459820 - RNA, 21 nt, Human
uuuauaaaaauaaaaaacacu

SEQ ID NO: 2459821 - RNA, 15 nt, Human
uuuaguuuuuguucu

SEQ ID NO: 2459822 - RNA, 11 nt, Human
uuuaguuuuug

SEQ ID NO: 2459823 - RNA, 17 nt, Human
uuuauaaaaaauggugc

SEQ ID NO: 2459824 - RNA, 14 nt, Human
uuuaauacagcagu

SEQ ID NO: 2459825 - RNA, 17 nt, Human
uuuaauaauauacuugu

SEQ ID NO: 2459826 - RNA, 14 nt, Human
uuuaauacagggua

SEQ ID NO: 2459827 - RNA, 19 nt, Human
uuuaauagaauauaauuau

SEQ ID NO: 2459828 - RNA, 21 nt, Human
uuuaauagaauauaauuaucg

SEQ ID NO: 2459829 - RNA, 21 nt, Human
uuuacacacgugcaauuuguu

SEQ ID NO: 2459830 - RNA, 16 nt, Human
uuuacacucuuuguaa

SEQ ID NO: 2459831 - RNA, 22 nt, Human
uuuacacucaggcuuucacuau

SEQ ID NO: 2459832 - RNA, 14 nt, Human
uuuacacucaggcu

SEQ ID NO: 2459833 - RNA, 21 nt, Human
uuuacacauucggcucccugg

SEQ ID NO: 2459834 - RNA, 21 nt, Human
uuuacaccaguuccuuucaau

SEQ ID NO: 2459835 - RNA, 16 nt, Human
uuuacagcugccugca

SEQ ID NO: 2459836 - RNA, 15 nt, Human
uuuacagcugccugc

SEQ ID NO: 2459837 - RNA, 20 nt, Human
uuuacaguaaauaaauuguu

SEQ ID NO: 2459838 - RNA, 19 nt, Human
uuuacaguaaauaaauugu

SEQ ID NO: 2459839 - RNA, 15 nt, Human
uuuacaguaaauaaa

SEQ ID NO: 2459840 - RNA, 23 nt, Human
uuuacagggagccuccugcccag

SEQ ID NO: 2459841 - RNA, 22 nt, Human
uuuacagggagccuccugccca

SEQ ID NO: 2459842 - RNA, 20 nt, Human
uuuacagggagccuccugcc

SEQ ID NO: 2459843 - RNA, 18 nt, Human
uuuacagggagccuccug

SEQ ID NO: 2459844 - RNA, 20 nt, Human
uuuacagcuuucaugauuag

SEQ ID NO: 2459845 - RNA, 23 nt, Human
uuuacagcuuucaugauuagcaa

SEQ ID NO: 2459846 - RNA, 13 nt, Human
uuuaccacuugug

SEQ ID NO: 2459847 - RNA, 15 nt, Human
uuuaccacccccaca

SEQ ID NO: 2459848 - RNA, 13 nt, Human
uuuaccaccccca

SEQ ID NO: 2459849 - RNA, 12 nt, Human
uuuaccaaguuu

SEQ ID NO: 2459850 - RNA, 23 nt, Human
uuuacagugaaaauguaagcugu

SEQ ID NO: 2459851 - RNA, 19 nt, Human
uuuacagugaaaauguaag

SEQ ID NO: 2459852 - RNA, 16 nt, Human
uuuacauuguugagcu

SEQ ID NO: 2459853 - RNA, 13 nt, Human
uuuauuaugcaug

SEQ ID NO: 2459854 - RNA, 13 nt, Human
uuuauuauggcac

SEQ ID NO: 2459855 - RNA, 22 nt, Human
uuuauggccucagcugccucac

SEQ ID NO: 2459856 - RNA, 14 nt, Human
uuuauggcuuuugu

SEQ ID NO: 2459857 - RNA, 16 nt, Human
uuuauggcuuuugugc

SEQ ID NO: 2459858 - RNA, 17 nt, Human
uuuauggcacuaguauu

SEQ ID NO: 2459859 - RNA, 17 nt, Human
uuuauacaaauuagaaa

SEQ ID NO: 2459860 - RNA, 12 nt, Human
uuuauggccuca

SEQ ID NO: 2459861 - RNA, 13 nt, Human
uuuauggccucag

SEQ ID NO: 2459862 - RNA, 13 nt, Human
uuuauaagguuuu

SEQ ID NO: 2459863 - RNA, 22 nt, Human
uuuauaauuuugugaagcaaaa

SEQ ID NO: 2459864 - RNA, 17 nt, Human
uuuauacaaaugucuua

SEQ ID NO: 2459865 - RNA, 13 nt, Human
uuuauacaaauua

SEQ ID NO: 2459866 - RNA, 15 nt, Human
uuuauacaaauuaga

SEQ ID NO: 2459867 - RNA, 21 nt, Human
uuuauaacucaucauaaaaua

SEQ ID NO: 2459868 - RNA, 20 nt, Human
uuuauaagcagauuuaacaa

SEQ ID NO: 2459869 - RNA, 16 nt, Human
uuuaguuuuuguucuu

SEQ ID NO: 2459870 - RNA, 19 nt, Human
uuuauaacuaguccuuuac

SEQ ID NO: 2459871 - RNA, 16 nt, Human
uuuauaacucaucaua

SEQ ID NO: 2459872 - RNA, 18 nt, Human
uuuauaacucaucauaaa

SEQ ID NO: 2459873 - RNA, 19 nt, Human
uuuauaacucaucauaaaa

SEQ ID NO: 2459874 - RNA, 20 nt, Human
uuuauaacucaucauaaaau

SEQ ID NO: 2459875 - RNA, 22 nt, Human
uuuauaacucaucauaaaauaa

SEQ ID NO: 2459876 - RNA, 17 nt, Human
uuucaaggcccucagca

SEQ ID NO: 2459877 - RNA, 22 nt, Human
uuucaagccugccuaggaauuc

SEQ ID NO: 2459878 - RNA, 23 nt, Human
uuucaagaauaaucacgcuuucc

SEQ ID NO: 2459879 - RNA, 20 nt, Human
uuucaagacauuaaaucuau

SEQ ID NO: 2459880 - RNA, 17 nt, Human
uuucaagaaacugagga

SEQ ID NO: 2459881 - RNA, 22 nt, Human
uuucaacuuggcuuccuuucuu

SEQ ID NO: 2459882 - RNA, 23 nt, Human
uuucaagcagucgugccuguguc

SEQ ID NO: 2459883 - RNA, 22 nt, Human
uuucaagcagucgugccugugu

SEQ ID NO: 2459884 - RNA, 20 nt, Human
uuucaacgcagcccugcuuu

SEQ ID NO: 2459885 - RNA, 16 nt, Human
uuucaacgcagcccug

SEQ ID NO: 2459886 - RNA, 11 nt, Human
uuuauuuacua

SEQ ID NO: 2459887 - RNA, 15 nt, Human
uuucaacgcagcccu

SEQ ID NO: 2459888 - RNA, 19 nt, Human
uuucaagaaacugaggaau

SEQ ID NO: 2459889 - RNA, 16 nt, Human
uuucaacugccaaaau

SEQ ID NO: 2459890 - RNA, 21 nt, Human
uuucaacgcagcccugcuuug

SEQ ID NO: 2459891 - RNA, 17 nt, Human
uuuauuuaaaagauuca

SEQ ID NO: 2459892 - RNA, 15 nt, Human
uuuauuuaaaagauu

SEQ ID NO: 2459893 - RNA, 14 nt, Human
uuuauuuaaaagau

SEQ ID NO: 2459894 - RNA, 23 nt, Human
uuuauuguuuaaagcaacugucu

SEQ ID NO: 2459895 - RNA, 22 nt, Human
uuuauuguuuaaaaucauuucu

SEQ ID NO: 2459896 - RNA, 20 nt, Human
uuuauuuacagaugaaugua

SEQ ID NO: 2459897 - RNA, 16 nt, Human
uuuauuuacugcuagu

SEQ ID NO: 2459898 - RNA, 21 nt, Human
uuuauuuaaaugucuaaugua

SEQ ID NO: 2459899 - RNA, 15 nt, Human
uuuauuuaaaugucu

SEQ ID NO: 2459900 - RNA, 22 nt, Human
uuuauuuaaaagauucauuuuu

SEQ ID NO: 2459901 - RNA, 17 nt, Human
uuuauuuaauguuaugu

SEQ ID NO: 2459902 - RNA, 16 nt, Human
uuuauuccuguauguu

SEQ ID NO: 2459903 - RNA, 14 nt, Human
uuuauuccuuguga

SEQ ID NO: 2459904 - RNA, 16 nt, Human
uuuauuauuuauuuau

SEQ ID NO: 2459905 - RNA, 19 nt, Human
uuuauuccauauucaugua

SEQ ID NO: 2459906 - RNA, 22 nt, Human
uuuauuccuauauaguuuauug

SEQ ID NO: 2459907 - RNA, 16 nt, Human
uuuauuauuacuguuu

SEQ ID NO: 2459908 - RNA, 14 nt, Human
uuuauugacacaga

SEQ ID NO: 2459909 - RNA, 15 nt, Human
uuuauugacacagaa

SEQ ID NO: 2459910 - RNA, 14 nt, Human
uuuauugagaaaga

SEQ ID NO: 2459911 - RNA, 16 nt, Human
uuuauugagaaagagc

SEQ ID NO: 2459912 - RNA, 14 nt, Human
uuuauugagaauuu

SEQ ID NO: 2459913 - RNA, 12 nt, Human
uuuauugacaca

SEQ ID NO: 2459914 - RNA, 13 nt, Human
uuuauugacacag

SEQ ID NO: 2459915 - RNA, 12 nt, Human
uuuauugacaau

SEQ ID NO: 2459916 - RNA, 16 nt, Human
uuuauucuuuuuaaag

SEQ ID NO: 2459917 - RNA, 12 nt, Human
uuucagaugcuu

SEQ ID NO: 2459918 - RNA, 14 nt, Human
uuucagaugcuucu

SEQ ID NO: 2459919 - RNA, 16 nt, Human
uuucagaugcuucugg

SEQ ID NO: 2459920 - RNA, 12 nt, Human
uuucagaugucu

SEQ ID NO: 2459921 - RNA, 20 nt, Human
uuucagaugcuucugggaga

SEQ ID NO: 2459922 - RNA, 16 nt, Human
uuucagauauauauca

SEQ ID NO: 2459923 - RNA, 15 nt, Human
uuucagauauauauc

SEQ ID NO: 2459924 - RNA, 13 nt, Human
uuucacaacagau

SEQ ID NO: 2459925 - RNA, 18 nt, Human
uuucagauauaaaagacu

SEQ ID NO: 2459926 - RNA, 16 nt, Human
uuucagauauaaaaga

SEQ ID NO: 2459927 - RNA, 14 nt, Human
uuucagauauaaaa

SEQ ID NO: 2459928 - RNA, 14 nt, Human
uuucacaaauuugu

SEQ ID NO: 2459929 - RNA, 16 nt, Human
uuucacaaccuucugu

SEQ ID NO: 2459930 - RNA, 22 nt, Human
uuucacaaccuucuguggcuca

SEQ ID NO: 2459931 - RNA, 13 nt, Human
uuucacaaauaaa

SEQ ID NO: 2459932 - RNA, 12 nt, Human
uuucacaaauaa

SEQ ID NO: 2459933 - RNA, 17 nt, Human
uuucaauuuugcaugcu

SEQ ID NO: 2459934 - RNA, 22 nt, Human
uuucaaguuccaaguugcuaau

SEQ ID NO: 2459935 - RNA, 23 nt, Human
uuucaagucaaauuaauaaucuu

SEQ ID NO: 2459936 - RNA, 19 nt, Human
uuucaauaaagcauuuaua

SEQ ID NO: 2459937 - RNA, 20 nt, Human
uuucaauaaagcauuuauaa

SEQ ID NO: 2459938 - RNA, 20 nt, Human
uuucaagguaauuucuugug

SEQ ID NO: 2459939 - RNA, 18 nt, Human
uuucaaggcccucagcau

SEQ ID NO: 2459940 - RNA, 18 nt, Human
uuucaagucaaauuaaua

SEQ ID NO: 2459941 - RNA, 20 nt, Human
uuucaagucaaauuaauaau

SEQ ID NO: 2459942 - RNA, 21 nt, Human
uuucaagugaaucuaaaagcu

SEQ ID NO: 2459943 - RNA, 14 nt, Human
uuucaauaggaaaa

SEQ ID NO: 2459944 - RNA, 12 nt, Human
uuucaauaggaa

SEQ ID NO: 2459945 - RNA, 17 nt, Human
uuucaauaggaaaaacu

SEQ ID NO: 2459946 - RNA, 19 nt, Human
uuucaauaggaaaaacuga

SEQ ID NO: 2459947 - RNA, 14 nt, Human
uuucaauuuccaag

SEQ ID NO: 2459948 - RNA, 19 nt, Human
uuucaauuuccaagagcug

SEQ ID NO: 2459949 - RNA, 22 nt, Human
uuucagugucaaauaaacacug

SEQ ID NO: 2459950 - RNA, 21 nt, Human
uuucagugucaaauaaacacu

SEQ ID NO: 2459951 - RNA, 22 nt, Human
uuucaguggcacgucaucuagu

SEQ ID NO: 2459952 - RNA, 21 nt, Human
uuucaguggggcagucauuau

SEQ ID NO: 2459953 - RNA, 23 nt, Human
uuucagugucaaauaaacacugu

SEQ ID NO: 2459954 - RNA, 13 nt, Human
uuucaguguacau

SEQ ID NO: 2459955 - RNA, 14 nt, Human
uuucaguguacaug

SEQ ID NO: 2459956 - RNA, 20 nt, Human
uuucagaugucuucugccug

SEQ ID NO: 2459957 - RNA, 19 nt, Human
uuucagaugucuucugccu

SEQ ID NO: 2459958 - RNA, 17 nt, Human
uuucagaugucuucugc

SEQ ID NO: 2459959 - RNA, 15 nt, Human
uuucagaugucuucu

SEQ ID NO: 2459960 - RNA, 22 nt, Human
uuucagaugucuucugccuguu

SEQ ID NO: 2459961 - RNA, 21 nt, Human
uuucagaugucuucugccugu

SEQ ID NO: 2459962 - RNA, 20 nt, Human
uuucagauucccagagcaaa

SEQ ID NO: 2459963 - RNA, 23 nt, Human
uuucagcaccuacaguguacagu

SEQ ID NO: 2459964 - RNA, 14 nt, Human
uuucagcagacuau

SEQ ID NO: 2459965 - RNA, 21 nt, Human
uuucagcagacuaugaauauu

SEQ ID NO: 2459966 - RNA, 17 nt, Human
uuucagugaaagcauca

SEQ ID NO: 2459967 - RNA, 23 nt, Human
uuucauuguaugauguguuguga

SEQ ID NO: 2459968 - RNA, 20 nt, Human
uuucauuguaugauguguug

SEQ ID NO: 2459969 - RNA, 18 nt, Human
uuucauuguaugaugugu

SEQ ID NO: 2459970 - RNA, 14 nt, Human
uuucauuuagguga

SEQ ID NO: 2459971 - RNA, 19 nt, Human
uuucauuuagucaugugac

SEQ ID NO: 2459972 - RNA, 17 nt, Human
uuucauuuacuguggcu

SEQ ID NO: 2459973 - RNA, 14 nt, Human
uuucauuuacugug

SEQ ID NO: 2459974 - RNA, 18 nt, Human
uuucauuuaggugaggaa

SEQ ID NO: 2459975 - RNA, 23 nt, Human
uuuccaacaccacagacacacac

SEQ ID NO: 2459976 - RNA, 22 nt, Human
uuuccaacaccacagacacaca

SEQ ID NO: 2459977 - RNA, 21 nt, Human
uuuccaacaccacagacacac

SEQ ID NO: 2459978 - RNA, 20 nt, Human
uuuccaacaccacagacaca

SEQ ID NO: 2459979 - RNA, 18 nt, Human
uuuccaacaccacagaca

SEQ ID NO: 2459980 - RNA, 15 nt, Human
uuuccaacaccacag

SEQ ID NO: 2459981 - RNA, 23 nt, Human
uuuccaaauucacaaguuguguu

SEQ ID NO: 2459982 - RNA, 16 nt, Human
uuuccaagagcugagg

SEQ ID NO: 2459983 - RNA, 14 nt, Human
uuuccaagagcuga

SEQ ID NO: 2459984 - RNA, 13 nt, Human
uuuccaagagcug

SEQ ID NO: 2459985 - RNA, 22 nt, Human
uucugauuguaacguugcugug

SEQ ID NO: 2459986 - RNA, 21 nt, Human
uucugauuguaacguugcugu

SEQ ID NO: 2459987 - RNA, 11 nt, Human
uucugauugua

SEQ ID NO: 2459988 - RNA, 12 nt, Human
uucugauuccac

SEQ ID NO: 2459989 - RNA, 23 nt, Human
uucugauuguaacguugcugugg

SEQ ID NO: 2459990 - RNA, 19 nt, Human
uucugcaaaaauauuuaua

SEQ ID NO: 2459991 - RNA, 16 nt, Human
uucugccuucucauga

SEQ ID NO: 2459992 - RNA, 11 nt, Human
uucugccuucc

SEQ ID NO: 2459993 - RNA, 24 nt, Human
uucugccuguuauaacucugcacu

SEQ ID NO: 2459994 - RNA, 21 nt, Human
uucugccuguuauaacucugc

SEQ ID NO: 2459995 - RNA, 14 nt, Human
uucugccuucucau

SEQ ID NO: 2459996 - RNA, 21 nt, Human
uucugcaagcacaucugcauu

SEQ ID NO: 2459997 - RNA, 20 nt, Human
uucugccuguuauaacucug

SEQ ID NO: 2459998 - RNA, 15 nt, Human
uucugccuguuauaa

SEQ ID NO: 2459999 - RNA, 17 nt, Human
uucugauuagaaaugac

SEQ ID NO: 2460000 - RNA, 17 nt, Human
uucugauuacacaaaac

SEQ ID NO: 2460001 - RNA, 18 nt, Human
uucugaugaugugccugg

SEQ ID NO: 2460002 - RNA, 14 nt, Human
uucugauuagaaau

SEQ ID NO: 2460003 - RNA, 15 nt, Human
uucugauuagaaaug

SEQ ID NO: 2460004 - RNA, 19 nt, Human
uucugauccuaguuccacc

SEQ ID NO: 2460005 - RNA, 22 nt, Human
uucugauaugcaguuuuccuua

SEQ ID NO: 2460006 - RNA, 22 nt, Human
uucugccuuuggggacuuuucu

SEQ ID NO: 2460007 - RNA, 15 nt, Human
uucugccuuuuuuau

SEQ ID NO: 2460008 - RNA, 15 nt, Human
uucugcuaccucacu

SEQ ID NO: 2460009 - RNA, 19 nt, Human
uucugcucacauaucuguc

SEQ ID NO: 2460010 - RNA, 13 nt, Human
uucugcucaucau

SEQ ID NO: 2460011 - RNA, 14 nt, Human
uucugcucaucauu

SEQ ID NO: 2460012 - RNA, 15 nt, Human
uucugcucagcucug

SEQ ID NO: 2460013 - RNA, 20 nt, Human
uucugcucagcucugggcca

SEQ ID NO: 2460014 - RNA, 19 nt, Human
uucugcuacuggcaaaagg

SEQ ID NO: 2460015 - RNA, 14 nt, Human
uucugcucagcucu

SEQ ID NO: 2460016 - RNA, 16 nt, Human
uucugcuaccucacug

SEQ ID NO: 2460017 - RNA, 21 nt, Human
uucugcuaccucacugggguc

SEQ ID NO: 2460018 - RNA, 9 nt, Human
uucugcucc

SEQ ID NO: 2460019 - RNA, 13 nt, Human
uucugcuccaccc

SEQ ID NO: 2460020 - RNA, 15 nt, Human
uucugcuccacccuu

SEQ ID NO: 2460021 - RNA, 16 nt, Human
uucugcuccacccuug

SEQ ID NO: 2460022 - RNA, 19 nt, Human
uucugcucaucauucucug

SEQ ID NO: 2460023 - RNA, 20 nt, Human
uucugcucaucauucucugu

SEQ ID NO: 2460024 - RNA, 21 nt, Human
uucugcucaucauucucuguc

SEQ ID NO: 2460025 - RNA, 12 nt, Human
uucugcucagcu

SEQ ID NO: 2460026 - RNA, 18 nt, Human
uucugcuccucuccaggc

SEQ ID NO: 2460027 - RNA, 17 nt, Human
uucugcuccucuccagg

SEQ ID NO: 2460028 - RNA, 16 nt, Human
uucugcuccucuccag

SEQ ID NO: 2460029 - RNA, 15 nt, Human
uucugcuccucucca

SEQ ID NO: 2460030 - RNA, 14 nt, Human
uucugcuccucucc

SEQ ID NO: 2460031 - RNA, 13 nt, Human
uucugcuccucuc

SEQ ID NO: 2460032 - RNA, 11 nt, Human
uucugcuccuc

SEQ ID NO: 2460033 - RNA, 17 nt, Human
uucugcuccacccuugg

SEQ ID NO: 2460034 - RNA, 18 nt, Human
uucugcuccacccuuggc

SEQ ID NO: 2460035 - RNA, 20 nt, Human
uucugcuccacccuuggccu

SEQ ID NO: 2460036 - RNA, 22 nt, Human
uucugacccaugcugcccugug

SEQ ID NO: 2460037 - RNA, 23 nt, Human
uucugacccaugcugcccuguga

SEQ ID NO: 2460038 - RNA, 17 nt, Human
uucucugcccuccaaga

SEQ ID NO: 2460039 - RNA, 16 nt, Human
uucucugcccuccaag

SEQ ID NO: 2460040 - RNA, 16 nt, Human
uucugagaaagacuau

SEQ ID NO: 2460041 - RNA, 21 nt, Human
uucugagaaagacuauucaaa

SEQ ID NO: 2460042 - RNA, 18 nt, Human
uucugacccugcuucaaa

SEQ ID NO: 2460043 - RNA, 21 nt, Human
uucugacccugcuucaaauau

SEQ ID NO: 2460044 - RNA, 22 nt, Human
uucugauaacuagauggugcug

SEQ ID NO: 2460045 - RNA, 16 nt, Human
uucugauaaugaaaau

SEQ ID NO: 2460046 - RNA, 23 nt, Human
uucugauaacuagauggugcuga

SEQ ID NO: 2460047 - RNA, 23 nt, Human
uucugaguuucauucuccugccu

SEQ ID NO: 2460048 - RNA, 20 nt, Human
uucugaguuucauucuccug

SEQ ID NO: 2460049 - RNA, 19 nt, Human
uucugaguuucauucuccu

SEQ ID NO: 2460050 - RNA, 16 nt, Human
uucugaguuucauucu

SEQ ID NO: 2460051 - RNA, 20 nt, Human
uucugaguguuuuuacuaca

SEQ ID NO: 2460052 - RNA, 20 nt, Human
uucugaggguccacuacuca

SEQ ID NO: 2460053 - RNA, 21 nt, Human
uucugaggacauuccaagaca

SEQ ID NO: 2460054 - RNA, 19 nt, Human
uucugaggacauuccaaga

SEQ ID NO: 2460055 - RNA, 12 nt, Human
uucugaguuccu

SEQ ID NO: 2460056 - RNA, 15 nt, Human
uucugaguuccugca

SEQ ID NO: 2460057 - RNA, 14 nt, Human
uucugaguguuuuu

SEQ ID NO: 2460058 - RNA, 13 nt, Human
uucugagagcugu

SEQ ID NO: 2460059 - RNA, 19 nt, Human
uucugagagcugugcauca

SEQ ID NO: 2460060 - RNA, 18 nt, Human
uucugagaagguccuuaa

SEQ ID NO: 2460061 - RNA, 16 nt, Human
uucucuccagccccug

SEQ ID NO: 2460062 - RNA, 15 nt, Human
uucucuccagccccu

SEQ ID NO: 2460063 - RNA, 14 nt, Human
uucucuccuguacc

SEQ ID NO: 2460064 - RNA, 18 nt, Human
uucucuccuguaccucuu

SEQ ID NO: 2460065 - RNA, 14 nt, Human
uucucuccagcccc

SEQ ID NO: 2460066 - RNA, 13 nt, Human
uucucuccagccc

SEQ ID NO: 2460067 - RNA, 15 nt, Human
uucuccagcugggcu

SEQ ID NO: 2460068 - RNA, 14 nt, Human
uucuccagcugggc

SEQ ID NO: 2460069 - RNA, 23 nt, Human
uucuccagccuggacccccagcu

SEQ ID NO: 2460070 - RNA, 12 nt, Human
uucuccagcugg

SEQ ID NO: 2460071 - RNA, 22 nt, Human
uucuccagccuggacccccagc

SEQ ID NO: 2460072 - RNA, 14 nt, Human
uucuccagccagca

SEQ ID NO: 2460073 - RNA, 17 nt, Human
uucuccagccuggaccc

SEQ ID NO: 2460074 - RNA, 13 nt, Human
uucuccagccagc

SEQ ID NO: 2460075 - RNA, 17 nt, Human
uucuccacucaguugca

SEQ ID NO: 2460076 - RNA, 19 nt, Human
uucuccagacccaccacac

SEQ ID NO: 2460077 - RNA, 12 nt, Human
uucucugcccuc

SEQ ID NO: 2460078 - RNA, 11 nt, Human
uucucugcccu

SEQ ID NO: 2460079 - RNA, 20 nt, Human
uucucugaggacacuaacca

SEQ ID NO: 2460080 - RNA, 14 nt, Human
uucucugaggacac

SEQ ID NO: 2460081 - RNA, 20 nt, Human
uucuccagcugggcucugca

SEQ ID NO: 2460082 - RNA, 19 nt, Human
uucucuccuguaccucuug

SEQ ID NO: 2460083 - RNA, 16 nt, Human
uucucugagcugugca

SEQ ID NO: 2460084 - RNA, 17 nt, Human
uucucugagcugugcag

SEQ ID NO: 2460085 - RNA, 18 nt, Human
uucucugagcugugcagg

SEQ ID NO: 2460086 - RNA, 18 nt, Human
uucuccaccugccaggga

SEQ ID NO: 2460087 - RNA, 16 nt, Human
uucuccaccugccagg

SEQ ID NO: 2460088 - RNA, 20 nt, Human
uucuccaccugccagggaca

SEQ ID NO: 2460089 - RNA, 14 nt, Human
uucuccacucaguu

SEQ ID NO: 2460090 - RNA, 12 nt, Human
uucuccacugga

SEQ ID NO: 2460091 - RNA, 15 nt, Human
uucuccaccugccag

SEQ ID NO: 2460092 - RNA, 14 nt, Human
uucuccaccugcca

SEQ ID NO: 2460093 - RNA, 12 nt, Human
uucuccaccugc

SEQ ID NO: 2460094 - RNA, 21 nt, Human
uucuccaccucccacaaagga

SEQ ID NO: 2460095 - RNA, 21 nt, Human
uucuaugaaauauuauguuaa

SEQ ID NO: 2460096 - RNA, 18 nt, Human
uucucaugugauccuuuu

SEQ ID NO: 2460097 - RNA, 17 nt, Human
uucucaugugauccuuu

SEQ ID NO: 2460098 - RNA, 21 nt, Human
uucucaugccucagccuccug

SEQ ID NO: 2460099 - RNA, 14 nt, Human
uucuaugaaauauu

SEQ ID NO: 2460100 - RNA, 15 nt, Human
uucuauccucuguaa

SEQ ID NO: 2460101 - RNA, 14 nt, Human
uucuauccucugua

SEQ ID NO: 2460102 - RNA, 20 nt, Human
uucuaucauuuuuguacagu

SEQ ID NO: 2460103 - RNA, 23 nt, Human
uucuauccuacaacaagaguuua

SEQ ID NO: 2460104 - RNA, 21 nt, Human
uucuccaccuagacuguaaac

SEQ ID NO: 2460105 - RNA, 19 nt, Human
uucucauuucaccccuccc

SEQ ID NO: 2460106 - RNA, 16 nt, Human
uucuccacccugcucu

SEQ ID NO: 2460107 - RNA, 16 nt, Human
uucucauuucaccccu

SEQ ID NO: 2460108 - RNA, 15 nt, Human
uucucauuucacccc

SEQ ID NO: 2460109 - RNA, 20 nt, Human
uucucauuugccaauaauaa

SEQ ID NO: 2460110 - RNA, 18 nt, Human
uucucauuccaacaguga

SEQ ID NO: 2460111 - RNA, 20 nt, Human
uucucauuccaacagugagu

SEQ ID NO: 2460112 - RNA, 19 nt, Human
uucuacccagcgagcccug

SEQ ID NO: 2460113 - RNA, 12 nt, Human
uucuacccagcg

SEQ ID NO: 2460114 - RNA, 22 nt, Human
uucuacauaaguaauucaagaa

SEQ ID NO: 2460115 - RNA, 15 nt, Human
uucuacauagaugcu

SEQ ID NO: 2460116 - RNA, 16 nt, Human
uucuacauuucuuaga

SEQ ID NO: 2460117 - RNA, 17 nt, Human
uucuacauuucuuagac

SEQ ID NO: 2460118 - RNA, 14 nt, Human
uucuaccauuucag

SEQ ID NO: 2460119 - RNA, 21 nt, Human
uucuaccacacagcagcaguu

SEQ ID NO: 2460120 - RNA, 15 nt, Human
uucuacaaugugaac

SEQ ID NO: 2460121 - RNA, 16 nt, Human
uucuacaaugugaacu

SEQ ID NO: 2460122 - RNA, 18 nt, Human
uucuacaaugugaacuuu

SEQ ID NO: 2460123 - RNA, 15 nt, Human
uucuacacagagcag

SEQ ID NO: 2460124 - RNA, 19 nt, Human
uucuacaaugugaacuuua

SEQ ID NO: 2460125 - RNA, 21 nt, Human
uucuaauuucaaaaauauaac

SEQ ID NO: 2460126 - RNA, 17 nt, Human
uucuaauuuuggaugga

SEQ ID NO: 2460127 - RNA, 18 nt, Human
uucuacaaaauccugaug

SEQ ID NO: 2460128 - RNA, 15 nt, Human
uucuacauacuaugg

SEQ ID NO: 2460129 - RNA, 17 nt, Human
uucuacaguauuaugua

SEQ ID NO: 2460130 - RNA, 21 nt, Human
uucuacagugguuuuauacug

SEQ ID NO: 2460131 - RNA, 15 nt, Human
uucuacagugguuuu

SEQ ID NO: 2460132 - RNA, 20 nt, Human
uucuaauuaauaaauuauuu

SEQ ID NO: 2460133 - RNA, 17 nt, Human
uucuaaugucuucauuu

SEQ ID NO: 2460134 - RNA, 16 nt, Human
uucuaaugucuucauu

SEQ ID NO: 2460135 - RNA, 17 nt, Human
uucuaauuggcaugaag

SEQ ID NO: 2460136 - RNA, 20 nt, Human
uucgugcggaaucagcuucu

SEQ ID NO: 2460137 - RNA, 13 nt, Human
uucguggggaggu

SEQ ID NO: 2460138 - RNA, 17 nt, Human
uucguggugaucaauua

SEQ ID NO: 2460139 - RNA, 22 nt, Human
uucguggugaucaauuaaaugu

SEQ ID NO: 2460140 - RNA, 23 nt, Human
uucuaaugugugaaucagagcac

SEQ ID NO: 2460141 - RNA, 14 nt, Human
uucuaaugucuuca

SEQ ID NO: 2460142 - RNA, 15 nt, Human
uucguacaguucuuc

SEQ ID NO: 2460143 - RNA, 14 nt, Human
uucguacaguucuu

SEQ ID NO: 2460144 - RNA, 20 nt, Human
uucgguuucuaacuuggagc

SEQ ID NO: 2460145 - RNA, 13 nt, Human
uucggugugcacc

SEQ ID NO: 2460146 - RNA, 14 nt, Human
uucgguuucuaacu

SEQ ID NO: 2460147 - RNA, 22 nt, Human
uucgguggcuagucaagcuccu

SEQ ID NO: 2460148 - RNA, 19 nt, Human
uucguagcuuucccaaaua

SEQ ID NO: 2460149 - RNA, 22 nt, Human
uucguacaguucuucgggaaga

SEQ ID NO: 2460150 - RNA, 20 nt, Human
uucguacaguucuucgggaa

SEQ ID NO: 2460151 - RNA, 23 nt, Human
uucguacaguucuucgggaagag

SEQ ID NO: 2460152 - RNA, 16 nt, Human
uucgucuucuaauuuc

SEQ ID NO: 2460153 - RNA, 13 nt, Human
uucgucuucuaau

SEQ ID NO: 2460154 - RNA, 19 nt, Human
uucgucuguuuauaaacau

SEQ ID NO: 2460155 - RNA, 14 nt, Human
uucgucuucuaauu

SEQ ID NO: 2460156 - RNA, 21 nt, Human
uucgugaaguauacuguauuu

SEQ ID NO: 2460157 - RNA, 17 nt, Human
uucgugaaguauacugu

SEQ ID NO: 2460158 - RNA, 18 nt, Human
uucgugaaguauacugua

SEQ ID NO: 2460159 - RNA, 15 nt, Human
uucuacccuagccau

SEQ ID NO: 2460160 - RNA, 14 nt, Human
uucuacccuagcca

SEQ ID NO: 2460161 - RNA, 22 nt, Human
uucuaccaugaacagaaaacau

SEQ ID NO: 2460162 - RNA, 15 nt, Human
uucuaccauuucaga

SEQ ID NO: 2460163 - RNA, 18 nt, Human
uucuaccauuucagagag

SEQ ID NO: 2460164 - RNA, 14 nt, Human
uucuacccaggugc

SEQ ID NO: 2460165 - RNA, 21 nt, Human
uucuacccagcgagcccuggu

SEQ ID NO: 2460166 - RNA, 20 nt, Human
uucuacccagcgagcccugg

SEQ ID NO: 2460167 - RNA, 13 nt, Human
uucuacuauuuau

SEQ ID NO: 2460168 - RNA, 15 nt, Human
uucuacucauauaua

SEQ ID NO: 2460169 - RNA, 11 nt, Human
uucuaccugcc

SEQ ID NO: 2460170 - RNA, 14 nt, Human
uucuaccucccaga

SEQ ID NO: 2460171 - RNA, 12 nt, Human
uucuaccugcca

SEQ ID NO: 2460172 - RNA, 18 nt, Human
uucuaccuugaggucuuu

SEQ ID NO: 2460173 - RNA, 19 nt, Human
uucuaccuugaggucuuuu

SEQ ID NO: 2460174 - RNA, 21 nt, Human
uucuacccuagccauuccugg

SEQ ID NO: 2460175 - RNA, 20 nt, Human
uucuacccuagccauuccug

SEQ ID NO: 2460176 - RNA, 18 nt, Human
uucuacccuagccauucc

SEQ ID NO: 2460177 - RNA, 13 nt, Human
uucuaccucccag

SEQ ID NO: 2460178 - RNA, 12 nt, Human
uucuaccuccca

SEQ ID NO: 2460179 - RNA, 13 nt, Human
uucuacgccaggg

SEQ ID NO: 2460180 - RNA, 14 nt, Human
uucuauagcuuuuc

SEQ ID NO: 2460181 - RNA, 23 nt, Human
uucuauagcagauuguguaacaa

SEQ ID NO: 2460182 - RNA, 19 nt, Human
uucuaucauuuuuguacag

SEQ ID NO: 2460183 - RNA, 20 nt, Human
uucuauaugaauuuaaauau

SEQ ID NO: 2460184 - RNA, 18 nt, Human
uucuaucauuuuuguaca

SEQ ID NO: 2460185 - RNA, 12 nt, Human
uucuauaugaau

SEQ ID NO: 2460186 - RNA, 20 nt, Human
uucuauaggaacauaugaaa

SEQ ID NO: 2460187 - RNA, 22 nt, Human
uucuacucgaguuacagacaaa

SEQ ID NO: 2460188 - RNA, 12 nt, Human
uucuacuguaug

SEQ ID NO: 2460189 - RNA, 17 nt, Human
uucuacucuuaaguuuc

SEQ ID NO: 2460190 - RNA, 19 nt, Human
uucuacucucccauggcuu

SEQ ID NO: 2460191 - RNA, 14 nt, Human
uucuacucucccau

SEQ ID NO: 2460192 - RNA, 18 nt, Human
uucuacucauauauaucu

SEQ ID NO: 2460193 - RNA, 13 nt, Human
uucuacugugacu

SEQ ID NO: 2460194 - RNA, 21 nt, Human
uucuacucuuaaguuucucag

SEQ ID NO: 2460195 - RNA, 18 nt, Human
uucuacuuuaagcacuac

SEQ ID NO: 2460196 - RNA, 15 nt, Human
uucuacuuuuaaaga

SEQ ID NO: 2460197 - RNA, 19 nt, Human
uuccugcaacucaaggacu

SEQ ID NO: 2460198 - RNA, 22 nt, Human
uuccugaugguacaggaaagcu

SEQ ID NO: 2460199 - RNA, 19 nt, Human
uuccugaugguacaggaaa

SEQ ID NO: 2460200 - RNA, 21 nt, Human
uuccugauggcaggauggccu

SEQ ID NO: 2460201 - RNA, 17 nt, Human
uuccugauaauaauuga

SEQ ID NO: 2460202 - RNA, 19 nt, Human
uuccugauaauaauugauc

SEQ ID NO: 2460203 - RNA, 23 nt, Human
uuccugaugcuucuucagagacu

SEQ ID NO: 2460204 - RNA, 20 nt, Human
uuccugcaacucaaggacuu

SEQ ID NO: 2460205 - RNA, 13 nt, Human
uuccugcaaugaa

SEQ ID NO: 2460206 - RNA, 21 nt, Human
uuccugcaaugaagucucuga

SEQ ID NO: 2460207 - RNA, 15 nt, Human
uuccugcagccugga

SEQ ID NO: 2460208 - RNA, 14 nt, Human
uuccugcagccugg

SEQ ID NO: 2460209 - RNA, 21 nt, Human
uuccugcaggccaggccagcu

SEQ ID NO: 2460210 - RNA, 15 nt, Human
uuccugaggcugggc

SEQ ID NO: 2460211 - RNA, 11 nt, Human
uuccugagcuu

SEQ ID NO: 2460212 - RNA, 13 nt, Human
uuccugagcuugg

SEQ ID NO: 2460213 - RNA, 20 nt, Human
uuccugagcuuggccagaag

SEQ ID NO: 2460214 - RNA, 20 nt, Human
uuccugaggcugggcucccu

SEQ ID NO: 2460215 - RNA, 21 nt, Human
uuccugaggaagagggacugu

SEQ ID NO: 2460216 - RNA, 16 nt, Human
uuccugagcuuggcca

SEQ ID NO: 2460217 - RNA, 13 nt, Human
uuccugaauccaa

SEQ ID NO: 2460218 - RNA, 11 nt, Human
uuccugaagcu

SEQ ID NO: 2460219 - RNA, 18 nt, Human
uuccugaauccaaacuaa

SEQ ID NO: 2460220 - RNA, 14 nt, Human
uuccugaagcugag

SEQ ID NO: 2460221 - RNA, 14 nt, Human
uuccugaaugaaau

SEQ ID NO: 2460222 - RNA, 23 nt, Human
uuccugacccaggccgcagcucu

SEQ ID NO: 2460223 - RNA, 22 nt, Human
uuccugacccaggccgcagcuc

SEQ ID NO: 2460224 - RNA, 16 nt, Human
uuccugacccaggccg

SEQ ID NO: 2460225 - RNA, 15 nt, Human
uuccugacccaggcc

SEQ ID NO: 2460226 - RNA, 14 nt, Human
uuccugacccaggc

SEQ ID NO: 2460227 - RNA, 13 nt, Human
uuccugacccagg

SEQ ID NO: 2460228 - RNA, 22 nt, Human
uuccugaauucuauuugcuggg

SEQ ID NO: 2460229 - RNA, 22 nt, Human
uuccugacacuuuaauuaccaa

SEQ ID NO: 2460230 - RNA, 13 nt, Human
uuccugacacuuu

SEQ ID NO: 2460231 - RNA, 20 nt, Human
uuccugaauucuauuugcug

SEQ ID NO: 2460232 - RNA, 16 nt, Human
uuccugaaugaaauau

SEQ ID NO: 2460233 - RNA, 12 nt, Human
uuccauggccuc

SEQ ID NO: 2460234 - RNA, 16 nt, Human
uuccauggcccucauu

SEQ ID NO: 2460235 - RNA, 15 nt, Human
uuccauggcccucau

SEQ ID NO: 2460236 - RNA, 23 nt, Human
uuccaugccugaggguggagacu

SEQ ID NO: 2460237 - RNA, 14 nt, Human
uuccauggauuuug

SEQ ID NO: 2460238 - RNA, 16 nt, Human
uuccauggccucuuca

SEQ ID NO: 2460239 - RNA, 12 nt, Human
uuccauggggua

SEQ ID NO: 2460240 - RNA, 21 nt, Human
uuccauggugugaucgucuga

SEQ ID NO: 2460241 - RNA, 17 nt, Human
uuccauggcccucauua

SEQ ID NO: 2460242 - RNA, 17 nt, Human
uuccugcguccuccuca

SEQ ID NO: 2460243 - RNA, 16 nt, Human
uuccugcguccuccuc

SEQ ID NO: 2460244 - RNA, 19 nt, Human
uuccugcguccuccucacc

SEQ ID NO: 2460245 - RNA, 15 nt, Human
uuccugccugucucc

SEQ ID NO: 2460246 - RNA, 18 nt, Human
uuccugcagccuggaggc

SEQ ID NO: 2460247 - RNA, 18 nt, Human
uuccugcauucacccaga

SEQ ID NO: 2460248 - RNA, 16 nt, Human
uuccugccugucuccu

SEQ ID NO: 2460249 - RNA, 18 nt, Human
uuccugccugucuccuuu

SEQ ID NO: 2460250 - RNA, 19 nt, Human
uuccugcggagugaagagg

SEQ ID NO: 2460251 - RNA, 17 nt, Human
uuccugcggagugaaga

SEQ ID NO: 2460252 - RNA, 23 nt, Human
uuccugccuucuucuuuuugcug

SEQ ID NO: 2460253 - RNA, 23 nt, Human
uuccugcggagugaagaggggca

SEQ ID NO: 2460254 - RNA, 20 nt, Human
uuccugcggagugaagaggg

SEQ ID NO: 2460255 - RNA, 15 nt, Human
uuccugcguccuccu

SEQ ID NO: 2460256 - RNA, 21 nt, Human
uuccugcgggcuuuuccccgg

SEQ ID NO: 2460257 - RNA, 16 nt, Human
uuccuugcucugcacc

SEQ ID NO: 2460258 - RNA, 14 nt, Human
uuccuugcucuccc

SEQ ID NO: 2460259 - RNA, 13 nt, Human
uuccuugcucucc

SEQ ID NO: 2460260 - RNA, 11 nt, Human
uuccuugcucu

SEQ ID NO: 2460261 - RNA, 15 nt, Human
uuccuugcucaacca

SEQ ID NO: 2460262 - RNA, 13 nt, Human
uuccuugcucaac

SEQ ID NO: 2460263 - RNA, 13 nt, Human
uuccuugcuaaug

SEQ ID NO: 2460264 - RNA, 19 nt, Human
uuccuugccugcacaaacu

SEQ ID NO: 2460265 - RNA, 13 nt, Human
uuccuugccugca

SEQ ID NO: 2460266 - RNA, 15 nt, Human
uuccuggacacucag

SEQ ID NO: 2460267 - RNA, 21 nt, Human
uuccuugaguugauucagcuc

SEQ ID NO: 2460268 - RNA, 16 nt, Human
uuccuuuaaaaaaauu

SEQ ID NO: 2460269 - RNA, 20 nt, Human
uuccuuguccccacacuccu

SEQ ID NO: 2460270 - RNA, 17 nt, Human
uuccuuguccccacacu

SEQ ID NO: 2460271 - RNA, 16 nt, Human
uuccuuguccccacac

SEQ ID NO: 2460272 - RNA, 21 nt, Human
uuccuuguccccacacuccua

SEQ ID NO: 2460273 - RNA, 23 nt, Human
uuccuuuaaaaaaauuuaagugc

SEQ ID NO: 2460274 - RNA, 17 nt, Human
uuccuuuaaaaaaauuu

SEQ ID NO: 2460275 - RNA, 16 nt, Human
uuccuugucacuggua

SEQ ID NO: 2460276 - RNA, 13 nt, Human
uuccuugucccca

SEQ ID NO: 2460277 - RNA, 15 nt, Human
uuccuuguauuuaaa

SEQ ID NO: 2460278 - RNA, 18 nt, Human
uuccuuguauuuaaauau

SEQ ID NO: 2460279 - RNA, 18 nt, Human
uuccuugcuguccuaggc

SEQ ID NO: 2460280 - RNA, 20 nt, Human
uuccuugcuguccuaggcca

SEQ ID NO: 2460281 - RNA, 18 nt, Human
uuccuugcucugcacccc

SEQ ID NO: 2460282 - RNA, 18 nt, Human
uucggugagcuacaaaug

SEQ ID NO: 2460283 - RNA, 13 nt, Human
uuccuuuauaaug

SEQ ID NO: 2460284 - RNA, 14 nt, Human
uuccuuuauauuua

SEQ ID NO: 2460285 - RNA, 16 nt, Human
uuccuuucauuuacug

SEQ ID NO: 2460286 - RNA, 17 nt, Human
uucgggugugcaauguc

SEQ ID NO: 2460287 - RNA, 21 nt, Human
uucgggugugcaaugucugag

SEQ ID NO: 2460288 - RNA, 17 nt, Human
uucggggaacuccugga

SEQ ID NO: 2460289 - RNA, 15 nt, Human
uucugucccucacag

SEQ ID NO: 2460290 - RNA, 14 nt, Human
uucugucccuucug

SEQ ID NO: 2460291 - RNA, 19 nt, Human
uucuguccuacucuguguc

SEQ ID NO: 2460292 - RNA, 14 nt, Human
uucugucaagaaga

SEQ ID NO: 2460293 - RNA, 19 nt, Human
uucugucucugccucccuc

SEQ ID NO: 2460294 - RNA, 14 nt, Human
uucugucucugccu

SEQ ID NO: 2460295 - RNA, 13 nt, Human
uucugucucugcc

SEQ ID NO: 2460296 - RNA, 21 nt, Human
uucugucgccuuagcauguuu

SEQ ID NO: 2460297 - RNA, 16 nt, Human
uucugucucauaugau

SEQ ID NO: 2460298 - RNA, 18 nt, Human
uucuguccuggugucacu

SEQ ID NO: 2460299 - RNA, 13 nt, Human
uucuguccugcug

SEQ ID NO: 2460300 - RNA, 17 nt, Human
uucugucccuuggagcu

SEQ ID NO: 2460301 - RNA, 14 nt, Human
uucuguccuucaga

SEQ ID NO: 2460302 - RNA, 22 nt, Human
uucuguccuuuuggcacugaga

SEQ ID NO: 2460303 - RNA, 18 nt, Human
uucugucgccuuagcaug

SEQ ID NO: 2460304 - RNA, 23 nt, Human
uucuguccuuuuggcacugagau

SEQ ID NO: 2460305 - RNA, 19 nt, Human
uucuggauaaagccacuga

SEQ ID NO: 2460306 - RNA, 18 nt, Human
uucuggauaaagccacug

SEQ ID NO: 2460307 - RNA, 13 nt, Human
uucuggauaaagc

SEQ ID NO: 2460308 - RNA, 20 nt, Human
uucuggaugcauuucucugg

SEQ ID NO: 2460309 - RNA, 15 nt, Human
uucuggaugcauuuc

SEQ ID NO: 2460310 - RNA, 15 nt, Human
uucuggauucuuggc

SEQ ID NO: 2460311 - RNA, 20 nt, Human
uucuggauuuugucaagcag

SEQ ID NO: 2460312 - RNA, 11 nt, Human
uucuguauuuu

SEQ ID NO: 2460313 - RNA, 22 nt, Human
uucuguauuuuuuuuucuaaga

SEQ ID NO: 2460314 - RNA, 20 nt, Human
uucuguauuuuuuuuucuaa

SEQ ID NO: 2460315 - RNA, 18 nt, Human
uucuguauuuuguuuuug

SEQ ID NO: 2460316 - RNA, 17 nt, Human
uucugucuucacaacag

SEQ ID NO: 2460317 - RNA, 21 nt, Human
uucugucucugccucccucac

SEQ ID NO: 2460318 - RNA, 23 nt, Human
uucugugguuuuccccucccugg

SEQ ID NO: 2460319 - RNA, 20 nt, Human
uucugugguuuuccccuccc

SEQ ID NO: 2460320 - RNA, 18 nt, Human
uucugugguuuuccccuc

SEQ ID NO: 2460321 - RNA, 22 nt, Human
uucugugucuuucacagcuccu

SEQ ID NO: 2460322 - RNA, 12 nt, Human
uucugugucuuu

SEQ ID NO: 2460323 - RNA, 23 nt, Human
uucugugucuuucacagcuccuc

SEQ ID NO: 2460324 - RNA, 13 nt, Human
uucugugugaaga

SEQ ID NO: 2460325 - RNA, 19 nt, Human
uucuuaguucucacuguuc

SEQ ID NO: 2460326 - RNA, 18 nt, Human
uucuuaguucucacuguu

SEQ ID NO: 2460327 - RNA, 22 nt, Human
uucugugguuuuccccucccug

SEQ ID NO: 2460328 - RNA, 23 nt, Human
uucugugugcaccuuaccaacuu

SEQ ID NO: 2460329 - RNA, 22 nt, Human
uucugugugugaugugcauggg

SEQ ID NO: 2460330 - RNA, 20 nt, Human
uucuguguguuuucauaaua

SEQ ID NO: 2460331 - RNA, 17 nt, Human
uucuuauaaauaugaag

SEQ ID NO: 2460332 - RNA, 15 nt, Human
uucuuauaaauauga

SEQ ID NO: 2460333 - RNA, 14 nt, Human
uucuuauaaauaug

SEQ ID NO: 2460334 - RNA, 13 nt, Human
uucuuauaaauau

SEQ ID NO: 2460335 - RNA, 23 nt, Human
uucuuaguugcuguaugucucgu

SEQ ID NO: 2460336 - RNA, 15 nt, Human
uucuuaguugcugua

SEQ ID NO: 2460337 - RNA, 14 nt, Human
uucuuaguugcugu

SEQ ID NO: 2460338 - RNA, 19 nt, Human
uucugcuuuucugcccugg

SEQ ID NO: 2460339 - RNA, 18 nt, Human
uucugcuuuucugcccug

SEQ ID NO: 2460340 - RNA, 17 nt, Human
uucugcuuuucugcccu

SEQ ID NO: 2460341 - RNA, 13 nt, Human
uucugcuuuucug

SEQ ID NO: 2460342 - RNA, 18 nt, Human
uucuggaaaagaggaguu

SEQ ID NO: 2460343 - RNA, 19 nt, Human
uucugcuuuugaaaucugu

SEQ ID NO: 2460344 - RNA, 17 nt, Human
uucuggaauacaugaaa

SEQ ID NO: 2460345 - RNA, 21 nt, Human
uucugcuuuuaccaugccccu

SEQ ID NO: 2460346 - RNA, 14 nt, Human
uucugcuuugcucu

SEQ ID NO: 2460347 - RNA, 18 nt, Human
uucugcuuuccucuuccu

SEQ ID NO: 2460348 - RNA, 16 nt, Human
uucugcuuaggagaga

SEQ ID NO: 2460349 - RNA, 15 nt, Human
uucugcuuucaucuu

SEQ ID NO: 2460350 - RNA, 20 nt, Human
uucuggaauguaaucaaugu

SEQ ID NO: 2460351 - RNA, 16 nt, Human
uucuggaauguaauca

SEQ ID NO: 2460352 - RNA, 19 nt, Human
uucuggaauacaugaaaua

SEQ ID NO: 2460353 - RNA, 15 nt, Human
uucuggaauguaauc

SEQ ID NO: 2460354 - RNA, 22 nt, Human
uucuggaauguaaucaauguuu

SEQ ID NO: 2460355 - RNA, 19 nt, Human
uucuggacccguucaacuu

SEQ ID NO: 2460356 - RNA, 21 nt, Human
uucuggaccuuguuguuguua

SEQ ID NO: 2460357 - RNA, 10 nt, Human
uucuggagcc

SEQ ID NO: 2460358 - RNA, 10 nt, Human
uucuggaguu

SEQ ID NO: 2460359 - RNA, 17 nt, Human
uucuggagucuccagug

SEQ ID NO: 2460360 - RNA, 15 nt, Human
uucuggagucuccag

SEQ ID NO: 2460361 - RNA, 20 nt, Human
uucuggagguugauaacuuu

SEQ ID NO: 2460362 - RNA, 13 nt, Human
uucuggagcccuu

SEQ ID NO: 2460363 - RNA, 15 nt, Human
uucuggagcccuugg

SEQ ID NO: 2460364 - RNA, 15 nt, Human
uucugcugggcuggg

SEQ ID NO: 2460365 - RNA, 13 nt, Human
uucugcugggcug

SEQ ID NO: 2460366 - RNA, 19 nt, Human
uucugcuggccuggaucuc

SEQ ID NO: 2460367 - RNA, 18 nt, Human
uucugcuggccuggaucu

SEQ ID NO: 2460368 - RNA, 15 nt, Human
uucugcuggccugga

SEQ ID NO: 2460369 - RNA, 14 nt, Human
uucugcuggccugg

SEQ ID NO: 2460370 - RNA, 13 nt, Human
uucugcuggccug

SEQ ID NO: 2460371 - RNA, 14 nt, Human
uucugcuucagccu

SEQ ID NO: 2460372 - RNA, 20 nt, Human
uucugcugaauuuucacaug

SEQ ID NO: 2460373 - RNA, 18 nt, Human
uucugcugaauuuucaca

SEQ ID NO: 2460374 - RNA, 14 nt, Human
uucugcugaauuuu

SEQ ID NO: 2460375 - RNA, 12 nt, Human
uucugcuggccu

SEQ ID NO: 2460376 - RNA, 13 nt, Human
uucugcuggauaa

SEQ ID NO: 2460377 - RNA, 21 nt, Human
uucugcuggauaaaaugaggu

SEQ ID NO: 2460378 - RNA, 18 nt, Human
uucugcuggaaacagacu

SEQ ID NO: 2460379 - RNA, 16 nt, Human
uucugcuucagccucc

SEQ ID NO: 2460380 - RNA, 15 nt, Human
uucugcuucagccuc

SEQ ID NO: 2460381 - RNA, 19 nt, Human
uucugcuucagccucccga

SEQ ID NO: 2460382 - RNA, 18 nt, Human
uucugcuuguguuaagua

SEQ ID NO: 2460383 - RNA, 20 nt, Human
uucugcugggcuggggccug

SEQ ID NO: 2460384 - RNA, 14 nt, Human
uucugcuuaggaga

SEQ ID NO: 2460385 - RNA, 16 nt, Human
uugaaaaggugaccuu

SEQ ID NO: 2460386 - RNA, 14 nt, Human
uugaaaagcuauua

SEQ ID NO: 2460387 - RNA, 22 nt, Human
uugaaaagcuauuagccaggau

SEQ ID NO: 2460388 - RNA, 13 nt, Human
uugaaaagcuauu

SEQ ID NO: 2460389 - RNA, 20 nt, Human
uugaacucagaucugucuga

SEQ ID NO: 2460390 - RNA, 15 nt, Human
uugaacucagaucug

SEQ ID NO: 2460391 - RNA, 15 nt, Human
uugaaaagucaaacu

SEQ ID NO: 2460392 - RNA, 16 nt, Human
uugaacuccuggccuc

SEQ ID NO: 2460393 - RNA, 15 nt, Human
uugaacuccuggccu

SEQ ID NO: 2460394 - RNA, 16 nt, Human
uugaaaacuuuucuca

SEQ ID NO: 2460395 - RNA, 14 nt, Human
uugaaaacuuuucu

SEQ ID NO: 2460396 - RNA, 13 nt, Human
uugaaaacuuuuc

SEQ ID NO: 2460397 - RNA, 13 nt, Human
uugaaaagaggug

SEQ ID NO: 2460398 - RNA, 17 nt, Human
uugaaaacuuuucucag

SEQ ID NO: 2460399 - RNA, 13 nt, Human
uugaaaagacauc

SEQ ID NO: 2460400 - RNA, 14 nt, Human
uugaaaagaggugu

SEQ ID NO: 2460401 - RNA, 21 nt, Human
uugaaaagaggugugcaagag

SEQ ID NO: 2460402 - RNA, 12 nt, Human
uugaaaagcuau

SEQ ID NO: 2460403 - RNA, 20 nt, Human
uugaaaaaccauuuugcugu

SEQ ID NO: 2460404 - RNA, 20 nt, Human
uugaaaaaauagagccugag

SEQ ID NO: 2460405 - RNA, 21 nt, Human
uucuuuccaaaguacacuguu

SEQ ID NO: 2460406 - RNA, 14 nt, Human
uucuuucauuuucu

SEQ ID NO: 2460407 - RNA, 18 nt, Human
uucuuuuuuuucauuaua

SEQ ID NO: 2460408 - RNA, 23 nt, Human
uugaaaacacuguucucugcccu

SEQ ID NO: 2460409 - RNA, 18 nt, Human
uugaaaacauaaucugca

SEQ ID NO: 2460410 - RNA, 16 nt, Human
uugaaaaccugacaaa

SEQ ID NO: 2460411 - RNA, 22 nt, Human
uugaaaaaauagagccugaggg

SEQ ID NO: 2460412 - RNA, 21 nt, Human
uucuuguguguuuauugucaa

SEQ ID NO: 2460413 - RNA, 13 nt, Human
uucuuccucccuc

SEQ ID NO: 2460414 - RNA, 14 nt, Human
uucuuguguguuua

SEQ ID NO: 2460415 - RNA, 19 nt, Human
uucuuuaaaagaaugggca

SEQ ID NO: 2460416 - RNA, 16 nt, Human
uucuuuaaaagaaugg

SEQ ID NO: 2460417 - RNA, 13 nt, Human
uucuuuaaaagaa

SEQ ID NO: 2460418 - RNA, 23 nt, Human
uucuuuaaaaaacaacuauggau

SEQ ID NO: 2460419 - RNA, 12 nt, Human
uucuuucagcca

SEQ ID NO: 2460420 - RNA, 14 nt, Human
uucuuuccaaagua

SEQ ID NO: 2460421 - RNA, 21 nt, Human
uucuuccacaagagcccaggc

SEQ ID NO: 2460422 - RNA, 19 nt, Human
uucuuccaggugcccagcu

SEQ ID NO: 2460423 - RNA, 20 nt, Human
uucuuccaggugcccagcua

SEQ ID NO: 2460424 - RNA, 21 nt, Human
uucuucauucaauacaagugu

SEQ ID NO: 2460425 - RNA, 13 nt, Human
uucuuaguucuca

SEQ ID NO: 2460426 - RNA, 22 nt, Human
uucuuauaaauaugaagcucac

SEQ ID NO: 2460427 - RNA, 17 nt, Human
uucuuccaaaaagauuu

SEQ ID NO: 2460428 - RNA, 21 nt, Human
uucuuauacauuugauaaagu

SEQ ID NO: 2460429 - RNA, 14 nt, Human
uucuuccaucugau

SEQ ID NO: 2460430 - RNA, 17 nt, Human
uucuuccaucccaggac

SEQ ID NO: 2460431 - RNA, 16 nt, Human
uucuuccaucccagga

SEQ ID NO: 2460432 - RNA, 14 nt, Human
uucuuccaucccag

SEQ ID NO: 2460433 - RNA, 13 nt, Human
uucuuccaucuga

SEQ ID NO: 2460434 - RNA, 13 nt, Human
uucuuccauccca

SEQ ID NO: 2460435 - RNA, 21 nt, Human
uucuuccuauuugccaugggc

SEQ ID NO: 2460436 - RNA, 22 nt, Human
uucuucccuuuuacauacugcu

SEQ ID NO: 2460437 - RNA, 20 nt, Human
uucuucccuuuuacauacug

SEQ ID NO: 2460438 - RNA, 21 nt, Human
uucuucccuuuuacauacugc

SEQ ID NO: 2460439 - RNA, 19 nt, Human
uucuucccaucacuggagc

SEQ ID NO: 2460440 - RNA, 19 nt, Human
uugaugcauuaaaagaaaa

SEQ ID NO: 2460441 - RNA, 20 nt, Human
uugaugcauuaaaagaaaau

SEQ ID NO: 2460442 - RNA, 17 nt, Human
uugaugacccccaacca

SEQ ID NO: 2460443 - RNA, 14 nt, Human
uugaugaggccucu

SEQ ID NO: 2460444 - RNA, 19 nt, Human
uugauaucacagucuaauu

SEQ ID NO: 2460445 - RNA, 16 nt, Human
uugaugaucuuugcag

SEQ ID NO: 2460446 - RNA, 20 nt, Human
uugauugcuaaauguaacag

SEQ ID NO: 2460447 - RNA, 15 nt, Human
uugauugcuaaaugu

SEQ ID NO: 2460448 - RNA, 13 nt, Human
uugauugcuaaau

SEQ ID NO: 2460449 - RNA, 12 nt, Human
uugauugcuaaa

SEQ ID NO: 2460450 - RNA, 13 nt, Human
uugauugauuuga

SEQ ID NO: 2460451 - RNA, 14 nt, Human
uugauugauuugaa

SEQ ID NO: 2460452 - RNA, 12 nt, Human
uugauucugcag

SEQ ID NO: 2460453 - RNA, 20 nt, Human
uugauucugcaguaaaucuu

SEQ ID NO: 2460454 - RNA, 12 nt, Human
uugauucuuccu

SEQ ID NO: 2460455 - RNA, 21 nt, Human
uugauugagaguaacuuaagu

SEQ ID NO: 2460456 - RNA, 13 nt, Human
uugauuugaagaa

SEQ ID NO: 2460457 - RNA, 14 nt, Human
uugauuugaagaac

SEQ ID NO: 2460458 - RNA, 23 nt, Human
uugauugcuaaauguaacagucu

SEQ ID NO: 2460459 - RNA, 12 nt, Human
uugcaaaucuug

SEQ ID NO: 2460460 - RNA, 15 nt, Human
uugcaaaucuugaaa

SEQ ID NO: 2460461 - RNA, 16 nt, Human
uugcaaaucuugaaau

SEQ ID NO: 2460462 - RNA, 23 nt, Human
uugcaaaugcccuuacacuuacu

SEQ ID NO: 2460463 - RNA, 17 nt, Human
uugcaaaucuugaaauu

SEQ ID NO: 2460464 - RNA, 21 nt, Human
uugcaaaguaucccuacugua

SEQ ID NO: 2460465 - RNA, 22 nt, Human
uugcaaaggagcucacuguggu

SEQ ID NO: 2460466 - RNA, 12 nt, Human
uugcaaauaguc

SEQ ID NO: 2460467 - RNA, 15 nt, Human
uugauuugcauugaa

SEQ ID NO: 2460468 - RNA, 17 nt, Human
uugauuugcauugaaca

SEQ ID NO: 2460469 - RNA, 19 nt, Human
uugauuugcauugaacaca

SEQ ID NO: 2460470 - RNA, 13 nt, Human
uugauuugcauug

SEQ ID NO: 2460471 - RNA, 14 nt, Human
uugauuugcauuga

SEQ ID NO: 2460472 - RNA, 18 nt, Human
uugauuugaagaacaugu

SEQ ID NO: 2460473 - RNA, 17 nt, Human
uugauuucuuuccagag

SEQ ID NO: 2460474 - RNA, 20 nt, Human
uugauuuuagccuucucugu

SEQ ID NO: 2460475 - RNA, 13 nt, Human
uugauuuuacaau

SEQ ID NO: 2460476 - RNA, 23 nt, Human
uugauuuuacaauugaaaugacu

SEQ ID NO: 2460477 - RNA, 18 nt, Human
uugagccagcagacauug

SEQ ID NO: 2460478 - RNA, 12 nt, Human
uugacuguuuuu

SEQ ID NO: 2460479 - RNA, 17 nt, Human
uugacuggguuucucug

SEQ ID NO: 2460480 - RNA, 23 nt, Human
uugacuggguuucucuguauagu

SEQ ID NO: 2460481 - RNA, 20 nt, Human
uugagccagcagacauuguc

SEQ ID NO: 2460482 - RNA, 19 nt, Human
uugagccagcagacauugu

SEQ ID NO: 2460483 - RNA, 13 nt, Human
uugagccaggccu

SEQ ID NO: 2460484 - RNA, 17 nt, Human
uugagccaggccugggu

SEQ ID NO: 2460485 - RNA, 19 nt, Human
uugagcccacaaagccuua

SEQ ID NO: 2460486 - RNA, 22 nt, Human
uugagccaggccugggucugug

SEQ ID NO: 2460487 - RNA, 13 nt, Human
uugagcccaggag

SEQ ID NO: 2460488 - RNA, 23 nt, Human
uugagccccaaguccugaagagg

SEQ ID NO: 2460489 - RNA, 18 nt, Human
uugagccccaaguccuga

SEQ ID NO: 2460490 - RNA, 14 nt, Human
uugagccccaaguc

SEQ ID NO: 2460491 - RNA, 19 nt, Human
uugagccccaaguccugaa

SEQ ID NO: 2460492 - RNA, 19 nt, Human
uugagccgggccccugggc

SEQ ID NO: 2460493 - RNA, 11 nt, Human
uugagccuggg

SEQ ID NO: 2460494 - RNA, 20 nt, Human
uugagccgggccccugggcu

SEQ ID NO: 2460495 - RNA, 13 nt, Human
uugaggguugggc

SEQ ID NO: 2460496 - RNA, 16 nt, Human
uugaggguugggcugg

SEQ ID NO: 2460497 - RNA, 21 nt, Human
uugagguccagcccuggcuga

SEQ ID NO: 2460498 - RNA, 16 nt, Human
uugaggucaaguaaga

SEQ ID NO: 2460499 - RNA, 22 nt, Human
uugaggucaaguaagaagacau

SEQ ID NO: 2460500 - RNA, 19 nt, Human
uugagguacucugcacaua

SEQ ID NO: 2460501 - RNA, 21 nt, Human
uugagguaggagaauugcuug

SEQ ID NO: 2460502 - RNA, 14 nt, Human
uugaugaagaaguu

SEQ ID NO: 2460503 - RNA, 13 nt, Human
uugaugaagaagu

SEQ ID NO: 2460504 - RNA, 23 nt, Human
uugaugaagaaguugauaugccu

SEQ ID NO: 2460505 - RNA, 15 nt, Human
uugauaucacagucu

SEQ ID NO: 2460506 - RNA, 20 nt, Human
uugaugaccaaaguccuuuu

SEQ ID NO: 2460507 - RNA, 23 nt, Human
uugauagcacagacccugcccug

SEQ ID NO: 2460508 - RNA, 19 nt, Human
uugauagcuuuauuuuuua

SEQ ID NO: 2460509 - RNA, 14 nt, Human
uugauagcuuuauu

SEQ ID NO: 2460510 - RNA, 17 nt, Human
uugaggucugcucggcc

SEQ ID NO: 2460511 - RNA, 23 nt, Human
uugauauccucuuugagugaagc

SEQ ID NO: 2460512 - RNA, 22 nt, Human
uugauauagaacagugcuugcc

SEQ ID NO: 2460513 - RNA, 17 nt, Human
uugauauagaacagugc

SEQ ID NO: 2460514 - RNA, 21 nt, Human
uugauauacuuuuuucuuauu

SEQ ID NO: 2460515 - RNA, 20 nt, Human
uugauauacuuuuuucuuau

SEQ ID NO: 2460516 - RNA, 18 nt, Human
uugauauaaauaaaacau

SEQ ID NO: 2460517 - RNA, 19 nt, Human
uugacgccaucccagcccc

SEQ ID NO: 2460518 - RNA, 18 nt, Human
uugacgccaucccagccc

SEQ ID NO: 2460519 - RNA, 17 nt, Human
uugacgccaucccagcc

SEQ ID NO: 2460520 - RNA, 16 nt, Human
uugaccucugcagcaa

SEQ ID NO: 2460521 - RNA, 19 nt, Human
uugacucaccuguuacuug

SEQ ID NO: 2460522 - RNA, 14 nt, Human
uugacucaccuguu

SEQ ID NO: 2460523 - RNA, 20 nt, Human
uugacugaagaugcagcuca

SEQ ID NO: 2460524 - RNA, 21 nt, Human
uugacucuuuugccauuaaac

SEQ ID NO: 2460525 - RNA, 15 nt, Human
uugacucuuuugcca

SEQ ID NO: 2460526 - RNA, 13 nt, Human
uugacucugggga

SEQ ID NO: 2460527 - RNA, 19 nt, Human
uugacucuggcaaagcuuu

SEQ ID NO: 2460528 - RNA, 23 nt, Human
uugacuccuugugguuuauguca

SEQ ID NO: 2460529 - RNA, 17 nt, Human
uugacccacaagaaaug

SEQ ID NO: 2460530 - RNA, 17 nt, Human
uugaccgugaggccaga

SEQ ID NO: 2460531 - RNA, 14 nt, Human
uugacccacaagaa

SEQ ID NO: 2460532 - RNA, 22 nt, Human
uugacaagucauuuuaacuuua

SEQ ID NO: 2460533 - RNA, 14 nt, Human
uugaccucugcagc

SEQ ID NO: 2460534 - RNA, 15 nt, Human
uugaccucugcagca

SEQ ID NO: 2460535 - RNA, 21 nt, Human
uugaccucaggugauccaccc

SEQ ID NO: 2460536 - RNA, 20 nt, Human
uugaccgcgacuaauuucaa

SEQ ID NO: 2460537 - RNA, 16 nt, Human
uugacaaaauuuguug

SEQ ID NO: 2460538 - RNA, 19 nt, Human
uugacaaagucaagccaca

SEQ ID NO: 2460539 - RNA, 18 nt, Human
uugacaaaggcaagcacu

SEQ ID NO: 2460540 - RNA, 20 nt, Human
uugacaaagucaagccacau

SEQ ID NO: 2460541 - RNA, 16 nt, Human
uugacaaccaugagac

SEQ ID NO: 2460542 - RNA, 12 nt, Human
uugacaacaucu

SEQ ID NO: 2460543 - RNA, 13 nt, Human
uugacaacaucug

SEQ ID NO: 2460544 - RNA, 13 nt, Human
uugacaaacucuc

SEQ ID NO: 2460545 - RNA, 14 nt, Human
uugacaacaaauua

SEQ ID NO: 2460546 - RNA, 14 nt, Human
uugaauuuucugug

SEQ ID NO: 2460547 - RNA, 18 nt, Human
uugaauuuucccacugca

SEQ ID NO: 2460548 - RNA, 18 nt, Human
uugaauuuugaugaacaa

SEQ ID NO: 2460549 - RNA, 17 nt, Human
uugaauuuucccacugc

SEQ ID NO: 2460550 - RNA, 16 nt, Human
uugaauuuucccacug

SEQ ID NO: 2460551 - RNA, 18 nt, Human
uugaacuuccugcaggua

SEQ ID NO: 2460552 - RNA, 18 nt, Human
uugaacuuaaauaaaugu

SEQ ID NO: 2460553 - RNA, 14 nt, Human
uugaauuguaagga

SEQ ID NO: 2460554 - RNA, 22 nt, Human
uugaacuuaaauaaaugucauu

SEQ ID NO: 2460555 - RNA, 17 nt, Human
uugaacuccugaccuca

SEQ ID NO: 2460556 - RNA, 19 nt, Human
uugaacugauaguuacugu

SEQ ID NO: 2460557 - RNA, 15 nt, Human
uugaacuccugggcu

SEQ ID NO: 2460558 - RNA, 18 nt, Human
uugaacuggguacuugug

SEQ ID NO: 2460559 - RNA, 13 nt, Human
uugaacuuugacc

SEQ ID NO: 2460560 - RNA, 21 nt, Human
uugaacugauaguuacuguug

SEQ ID NO: 2460561 - RNA, 20 nt, Human
uugaacugauaguuacuguu

SEQ ID NO: 2460562 - RNA, 22 nt, Human
uugaacugauaguuacuguugu

SEQ ID NO: 2460563 - RNA, 13 nt, Human
uucacggaagagc

SEQ ID NO: 2460564 - RNA, 21 nt, Human
uucacgccuguaaucccagca

SEQ ID NO: 2460565 - RNA, 23 nt, Human
uucacgccuguaaucccagcacu

SEQ ID NO: 2460566 - RNA, 22 nt, Human
uucaccuuuguccccaccgcag

SEQ ID NO: 2460567 - RNA, 22 nt, Human
uucaccucacugaaaacaucug

SEQ ID NO: 2460568 - RNA, 15 nt, Human
uucacgagagcccgg

SEQ ID NO: 2460569 - RNA, 20 nt, Human
uucacgaaguguugcaugga

SEQ ID NO: 2460570 - RNA, 17 nt, Human
uucacgaaguguugcau

SEQ ID NO: 2460571 - RNA, 19 nt, Human
uucaccucacugaaaacau

SEQ ID NO: 2460572 - RNA, 16 nt, Human
uucagacagcugccug

SEQ ID NO: 2460573 - RNA, 15 nt, Human
uucagacagcugccu

SEQ ID NO: 2460574 - RNA, 14 nt, Human
uucagacagcugcc

SEQ ID NO: 2460575 - RNA, 17 nt, Human
uucacggaagagccuug

SEQ ID NO: 2460576 - RNA, 17 nt, Human
uucagacagcugccugg

SEQ ID NO: 2460577 - RNA, 17 nt, Human
uucagauacaaacugca

SEQ ID NO: 2460578 - RNA, 12 nt, Human
uucagauacaug

SEQ ID NO: 2460579 - RNA, 12 nt, Human
uucagauauaaa

SEQ ID NO: 2460580 - RNA, 15 nt, Human
uucagauauaaaaga

SEQ ID NO: 2460581 - RNA, 14 nt, Human
uucagauauaaaag

SEQ ID NO: 2460582 - RNA, 14 nt, Human
uucagcucacugca

SEQ ID NO: 2460583 - RNA, 20 nt, Human
uucaccuuuguccccaccgc

SEQ ID NO: 2460584 - RNA, 19 nt, Human
uucaccuuuguccccaccg

SEQ ID NO: 2460585 - RNA, 14 nt, Human
uucaccuuuguccc

SEQ ID NO: 2460586 - RNA, 14 nt, Human
uucaccgaggacau

SEQ ID NO: 2460587 - RNA, 22 nt, Human
uucacccuguccaaacugccua

SEQ ID NO: 2460588 - RNA, 22 nt, Human
uucaccccucccuuucuccccu

SEQ ID NO: 2460589 - RNA, 20 nt, Human
uucaccccucccuuucuccc

SEQ ID NO: 2460590 - RNA, 18 nt, Human
uucaccccucccuuucuc

SEQ ID NO: 2460591 - RNA, 17 nt, Human
uucaccccucccuuucu

SEQ ID NO: 2460592 - RNA, 13 nt, Human
uucacccuuuucu

SEQ ID NO: 2460593 - RNA, 22 nt, Human
uucacaagacccaaaaggcaga

SEQ ID NO: 2460594 - RNA, 16 nt, Human
uucaccccucccuuuc

SEQ ID NO: 2460595 - RNA, 15 nt, Human
uucaccccucccuuu

SEQ ID NO: 2460596 - RNA, 21 nt, Human
uucacaaccuucuguggcuca

SEQ ID NO: 2460597 - RNA, 22 nt, Human
uucaauaggaaaaacugauuuu

SEQ ID NO: 2460598 - RNA, 21 nt, Human
uucaauaggaaaaacugauuu

SEQ ID NO: 2460599 - RNA, 20 nt, Human
uucaauaagcaucaaacucu

SEQ ID NO: 2460600 - RNA, 22 nt, Human
uucacaaacuuuuauacucuuu

SEQ ID NO: 2460601 - RNA, 15 nt, Human
uucacaaagcccaag

SEQ ID NO: 2460602 - RNA, 11 nt, Human
uucacaaauaa

SEQ ID NO: 2460603 - RNA, 16 nt, Human
uucacaaacuuuuaua

SEQ ID NO: 2460604 - RNA, 17 nt, Human
uucacaaacuuuuauac

SEQ ID NO: 2460605 - RNA, 11 nt, Human
uucaauauuua

SEQ ID NO: 2460606 - RNA, 15 nt, Human
uucaauauccuuugc

SEQ ID NO: 2460607 - RNA, 16 nt, Human
uuauuuuaaacaaaau

SEQ ID NO: 2460608 - RNA, 14 nt, Human
uuauuuuaaacaaa

SEQ ID NO: 2460609 - RNA, 15 nt, Human
uuauuuguuuucccg

SEQ ID NO: 2460610 - RNA, 19 nt, Human
uuauuuuaauaauguuuca

SEQ ID NO: 2460611 - RNA, 18 nt, Human
uuauuuguuauuuucagu

SEQ ID NO: 2460612 - RNA, 21 nt, Human
uuauuuguguaauagaaaacu

SEQ ID NO: 2460613 - RNA, 13 nt, Human
uuauuuuaaaaga

SEQ ID NO: 2460614 - RNA, 16 nt, Human
uuauuuguguaauaga

SEQ ID NO: 2460615 - RNA, 13 nt, Human
uuauuuguguaau

SEQ ID NO: 2460616 - RNA, 22 nt, Human
uuauuuguguuuuaauuuaaac

SEQ ID NO: 2460617 - RNA, 15 nt, Human
uuauuuguacaguuc

SEQ ID NO: 2460618 - RNA, 14 nt, Human
uuauuuguacaguu

SEQ ID NO: 2460619 - RNA, 20 nt, Human
uuauuuuaauaauguuucaa

SEQ ID NO: 2460620 - RNA, 18 nt, Human
uuauuuuauuaugcauga

SEQ ID NO: 2460621 - RNA, 11 nt, Human
uuauuugcaua

SEQ ID NO: 2460622 - RNA, 13 nt, Human
uuauuuguacagu

SEQ ID NO: 2460623 - RNA, 13 nt, Human
uuauuugcaugug

SEQ ID NO: 2460624 - RNA, 15 nt, Human
uuauuugcagagaca

SEQ ID NO: 2460625 - RNA, 18 nt, Human
uuauuugcagagacagga

SEQ ID NO: 2460626 - RNA, 21 nt, Human
uuauuagagauuaccuccuga

SEQ ID NO: 2460627 - RNA, 17 nt, Human
uuauuagagugucuuuc

SEQ ID NO: 2460628 - RNA, 17 nt, Human
uuauuagggagaaaauu

SEQ ID NO: 2460629 - RNA, 18 nt, Human
uuauuagggagaaaauuc

SEQ ID NO: 2460630 - RNA, 16 nt, Human
uuauuagggagaaaau

SEQ ID NO: 2460631 - RNA, 22 nt, Human
uuauuagccagguaaugugaau

SEQ ID NO: 2460632 - RNA, 14 nt, Human
uuauuugacaaaau

SEQ ID NO: 2460633 - RNA, 22 nt, Human
uuauuugaaaacauauaaagca

SEQ ID NO: 2460634 - RNA, 23 nt, Human
uuauuagggagaaaauucaauug

SEQ ID NO: 2460635 - RNA, 19 nt, Human
uuauuagggagaaaauuca

SEQ ID NO: 2460636 - RNA, 20 nt, Human
uuauuagggagaaaauucaa

SEQ ID NO: 2460637 - RNA, 20 nt, Human
uuauuaguaaaugcuuauca

SEQ ID NO: 2460638 - RNA, 19 nt, Human
uuauuucuuaaacaaaugu

SEQ ID NO: 2460639 - RNA, 23 nt, Human
uuauuuugccauggaugagaguc

SEQ ID NO: 2460640 - RNA, 12 nt, Human
uuauuuugcaac

SEQ ID NO: 2460641 - RNA, 13 nt, Human
uuauuuugguacu

SEQ ID NO: 2460642 - RNA, 22 nt, Human
uuauuuuggaaaauaaauuauu

SEQ ID NO: 2460643 - RNA, 17 nt, Human
uuauuuuaaacaaaaua

SEQ ID NO: 2460644 - RNA, 18 nt, Human
uuauuuucaagaaacuga

SEQ ID NO: 2460645 - RNA, 13 nt, Human
uuauuuucaagaa

SEQ ID NO: 2460646 - RNA, 15 nt, Human
uuauuuuguaauuau

SEQ ID NO: 2460647 - RNA, 14 nt, Human
uuauuuuguaauua

SEQ ID NO: 2460648 - RNA, 13 nt, Human
uuauuuuguaauu

SEQ ID NO: 2460649 - RNA, 18 nt, Human
uuauuuugguacuuuuau

SEQ ID NO: 2460650 - RNA, 21 nt, Human
uuauuuuguaauuauugugau

SEQ ID NO: 2460651 - RNA, 18 nt, Human
uuauuuuguaauuauugu

SEQ ID NO: 2460652 - RNA, 18 nt, Human
uucaaaugcuguaacuuu

SEQ ID NO: 2460653 - RNA, 22 nt, Human
uucaaaugauuuuuacaaguuu

SEQ ID NO: 2460654 - RNA, 14 nt, Human
uucaaaugugcugu

SEQ ID NO: 2460655 - RNA, 19 nt, Human
uucaaauuagaagacauuu

SEQ ID NO: 2460656 - RNA, 21 nt, Human
uucaacagguuuuccugaaga

SEQ ID NO: 2460657 - RNA, 14 nt, Human
uucaacaucaaugu

SEQ ID NO: 2460658 - RNA, 15 nt, Human
uucaacaucaauguu

SEQ ID NO: 2460659 - RNA, 16 nt, Human
uucaacaucaauguuc

SEQ ID NO: 2460660 - RNA, 19 nt, Human
uucaacaucaauguucauu

SEQ ID NO: 2460661 - RNA, 22 nt, Human
uucaacaucaauguucauugua

SEQ ID NO: 2460662 - RNA, 16 nt, Human
uucaaauucuucugaa

SEQ ID NO: 2460663 - RNA, 19 nt, Human
uucaaauucuucugaacuc

SEQ ID NO: 2460664 - RNA, 18 nt, Human
uucaaauugagagaaugg

SEQ ID NO: 2460665 - RNA, 16 nt, Human
uucaauaauaaauauu

SEQ ID NO: 2460666 - RNA, 19 nt, Human
uucaauaaaugucuguuga

SEQ ID NO: 2460667 - RNA, 18 nt, Human
uucaauaaaugucuguug

SEQ ID NO: 2460668 - RNA, 15 nt, Human
uucaaccauucccca

SEQ ID NO: 2460669 - RNA, 19 nt, Human
uucaaccacuguaaaauga

SEQ ID NO: 2460670 - RNA, 21 nt, Human
uucaacaucaauguucauugu

SEQ ID NO: 2460671 - RNA, 17 nt, Human
uuccaucauguccccaa

SEQ ID NO: 2460672 - RNA, 22 nt, Human
uuccaugccugaggguggagac

SEQ ID NO: 2460673 - RNA, 18 nt, Human
uuccaugccugagggugg

SEQ ID NO: 2460674 - RNA, 16 nt, Human
uuccaugccugagggu

SEQ ID NO: 2460675 - RNA, 13 nt, Human
uuccaucccagag

SEQ ID NO: 2460676 - RNA, 15 nt, Human
uuccaugccugaggg

SEQ ID NO: 2460677 - RNA, 18 nt, Human
uuccaugcguguuucuga

SEQ ID NO: 2460678 - RNA, 21 nt, Human
uuccaugcguguuucugacuc

SEQ ID NO: 2460679 - RNA, 15 nt, Human
uuccauggacuuugu

SEQ ID NO: 2460680 - RNA, 14 nt, Human
uuccauggacuuug

SEQ ID NO: 2460681 - RNA, 15 nt, Human
uuccauauggauuuu

SEQ ID NO: 2460682 - RNA, 20 nt, Human
uuccauauggauuuucuauu

SEQ ID NO: 2460683 - RNA, 14 nt, Human
uuccauauucaugu

SEQ ID NO: 2460684 - RNA, 15 nt, Human
uuccauauucaugua

SEQ ID NO: 2460685 - RNA, 16 nt, Human
uuccaucaugucccca

SEQ ID NO: 2460686 - RNA, 14 nt, Human
uuccaucauguccc

SEQ ID NO: 2460687 - RNA, 19 nt, Human
uuccaucagguuccauccc

SEQ ID NO: 2460688 - RNA, 12 nt, Human
uuccaucauguc

SEQ ID NO: 2460689 - RNA, 23 nt, Human
uuccagauaaccagcuguaacac

SEQ ID NO: 2460690 - RNA, 20 nt, Human
uuccauaugaccucaugcau

SEQ ID NO: 2460691 - RNA, 15 nt, Human
uuccauaugaccuca

SEQ ID NO: 2460692 - RNA, 18 nt, Human
uuccauauauuagcauuu

SEQ ID NO: 2460693 - RNA, 18 nt, Human
uuccagauccuggaaauc

SEQ ID NO: 2460694 - RNA, 18 nt, Human
uuccagauaaccagcugu

SEQ ID NO: 2460695 - RNA, 16 nt, Human
uuccagagggguugag

SEQ ID NO: 2460696 - RNA, 20 nt, Human
uuccagaggcuauuauuuuc

SEQ ID NO: 2460697 - RNA, 19 nt, Human
uuccagaggcuauuauuuu

SEQ ID NO: 2460698 - RNA, 16 nt, Human
uuccagaccugaagaa

SEQ ID NO: 2460699 - RNA, 17 nt, Human
uuccagaccugaagaau

SEQ ID NO: 2460700 - RNA, 23 nt, Human
uuccagacugcuuccaauuuucu

SEQ ID NO: 2460701 - RNA, 20 nt, Human
uuccagacuuccuugagaca

SEQ ID NO: 2460702 - RNA, 19 nt, Human
uuccaacccucaucaccaa

SEQ ID NO: 2460703 - RNA, 19 nt, Human
uuccagaauaucugggauu

SEQ ID NO: 2460704 - RNA, 21 nt, Human
uuccagaagugugauugggaa

SEQ ID NO: 2460705 - RNA, 15 nt, Human
uuccagaagugugau

SEQ ID NO: 2460706 - RNA, 15 nt, Human
uuccaaccccaacuc

SEQ ID NO: 2460707 - RNA, 14 nt, Human
uuccagaccugaag

SEQ ID NO: 2460708 - RNA, 19 nt, Human
uuccagaaugcuguacauc

SEQ ID NO: 2460709 - RNA, 16 nt, Human
uuccagaaugcuguac

SEQ ID NO: 2460710 - RNA, 18 nt, Human
uuccagaaugcuguacau

SEQ ID NO: 2460711 - RNA, 14 nt, Human
uuccagaaugcugu

SEQ ID NO: 2460712 - RNA, 15 nt, Human
uuccagaaugcugua

SEQ ID NO: 2460713 - RNA, 16 nt, Human
uuccagaaucccaaga

SEQ ID NO: 2460714 - RNA, 15 nt, Human
uuccagaaucccaag

SEQ ID NO: 2460715 - RNA, 13 nt, Human
uucaucuguaacu

SEQ ID NO: 2460716 - RNA, 18 nt, Human
uucaucugggaaagacau

SEQ ID NO: 2460717 - RNA, 14 nt, Human
uucaucugggaaag

SEQ ID NO: 2460718 - RNA, 13 nt, Human
uucaucugggaaa

SEQ ID NO: 2460719 - RNA, 19 nt, Human
uucaucuggcaacaucuuu

SEQ ID NO: 2460720 - RNA, 17 nt, Human
uucaucuggaaccauca

SEQ ID NO: 2460721 - RNA, 23 nt, Human
uucaucuggaaccaucagaaaca

SEQ ID NO: 2460722 - RNA, 12 nt, Human
uucaucuggaac

SEQ ID NO: 2460723 - RNA, 21 nt, Human
uucaucugcucuccuuccugg

SEQ ID NO: 2460724 - RNA, 23 nt, Human
uucaucuguaacucuaaaagauc

SEQ ID NO: 2460725 - RNA, 21 nt, Human
uucaucuguaacucuaaaaga

SEQ ID NO: 2460726 - RNA, 19 nt, Human
uucaucuguaacucuaaaa

SEQ ID NO: 2460727 - RNA, 18 nt, Human
uucaucuguaacucuaaa

SEQ ID NO: 2460728 - RNA, 18 nt, Human
uucaucuguuguuuuguu

SEQ ID NO: 2460729 - RNA, 14 nt, Human
uucaugcauggaaa

SEQ ID NO: 2460730 - RNA, 15 nt, Human
uucaugcauggaaau

SEQ ID NO: 2460731 - RNA, 16 nt, Human
uucaugcauggaaauu

SEQ ID NO: 2460732 - RNA, 21 nt, Human
uucaugccaauuagcaauuga

SEQ ID NO: 2460733 - RNA, 19 nt, Human
uucaugccaccauggccag

SEQ ID NO: 2460734 - RNA, 17 nt, Human
uucaugcucagcccuga

SEQ ID NO: 2460735 - RNA, 14 nt, Human
uucaugcucagccc

SEQ ID NO: 2460736 - RNA, 16 nt, Human
uucaugccuggcuucg

SEQ ID NO: 2460737 - RNA, 17 nt, Human
uucaugcuaucucugug

SEQ ID NO: 2460738 - RNA, 18 nt, Human
uucaugcuaucucugugu

SEQ ID NO: 2460739 - RNA, 21 nt, Human
uucaugccagcuacuuccucc

SEQ ID NO: 2460740 - RNA, 22 nt, Human
uucaugccaccauggccagcca

SEQ ID NO: 2460741 - RNA, 22 nt, Human
uucaugccagcuacuuccuccu

SEQ ID NO: 2460742 - RNA, 18 nt, Human
uucauuuuuaaucaugaa

SEQ ID NO: 2460743 - RNA, 17 nt, Human
uucauuuuuaaucauga

SEQ ID NO: 2460744 - RNA, 13 nt, Human
uucauuuuuccua

SEQ ID NO: 2460745 - RNA, 17 nt, Human
uucauuuuuuuccaggc

SEQ ID NO: 2460746 - RNA, 14 nt, Human
uucauuuuuuucca

SEQ ID NO: 2460747 - RNA, 15 nt, Human
uucauuuuuccuaac

SEQ ID NO: 2460748 - RNA, 23 nt, Human
uucauuuuuuucacuggaguuac

SEQ ID NO: 2460749 - RNA, 16 nt, Human
uuccaaaaguggccuc

SEQ ID NO: 2460750 - RNA, 17 nt, Human
uuccaaaaguggccucu

SEQ ID NO: 2460751 - RNA, 18 nt, Human
uuccaaaaguggccucuu

SEQ ID NO: 2460752 - RNA, 21 nt, Human
uuccaaaaguggccucuuugu

SEQ ID NO: 2460753 - RNA, 21 nt, Human
uuccaaaaagauuuucagaaa

SEQ ID NO: 2460754 - RNA, 15 nt, Human
uuccaaaaaaauacu

SEQ ID NO: 2460755 - RNA, 13 nt, Human
uuccaaaaaaaua

SEQ ID NO: 2460756 - RNA, 18 nt, Human
uucauuuuuuuccaggcu

SEQ ID NO: 2460757 - RNA, 13 nt, Human
uuccaaaguacac

SEQ ID NO: 2460758 - RNA, 20 nt, Human
uuccaaagcacauugaaaga

SEQ ID NO: 2460759 - RNA, 22 nt, Human
uuccaaagaguagaauugcauu

SEQ ID NO: 2460760 - RNA, 19 nt, Human
uuccaaagcacauugaaag

SEQ ID NO: 2460761 - RNA, 23 nt, Human
uuccaaaggccauggagagcugg

SEQ ID NO: 2460762 - RNA, 15 nt, Human
uuccaaauaaaauga

SEQ ID NO: 2460763 - RNA, 14 nt, Human
uuccaaaguuaaca

SEQ ID NO: 2460764 - RNA, 23 nt, Human
uuccaacaaaggguuuuaaugua

SEQ ID NO: 2460765 - RNA, 16 nt, Human
uuccaaaguacacugu

SEQ ID NO: 2460766 - RNA, 22 nt, Human
uuccaacaccacagacacacac

SEQ ID NO: 2460767 - RNA, 21 nt, Human
uuccaacaccacagacacaca

SEQ ID NO: 2460768 - RNA, 20 nt, Human
uuccaacaccacagacacac

SEQ ID NO: 2460769 - RNA, 19 nt, Human
uuccaacaccacagacaca

SEQ ID NO: 2460770 - RNA, 18 nt, Human
uuccaacaccacagacac

SEQ ID NO: 2460771 - RNA, 17 nt, Human
uuccaacaccacagaca

SEQ ID NO: 2460772 - RNA, 12 nt, Human
uuccaacaccac

SEQ ID NO: 2460773 - RNA, 14 nt, Human
uuccaacagugagu

SEQ ID NO: 2460774 - RNA, 23 nt, Human
uuccaacagcucaagucuucccu

SEQ ID NO: 2460775 - RNA, 23 nt, Human
uuccaacaccacagacacacaca

SEQ ID NO: 2460776 - RNA, 16 nt, Human
uucaguggcagcugcu

SEQ ID NO: 2460777 - RNA, 15 nt, Human
uucaguggcagcugc

SEQ ID NO: 2460778 - RNA, 17 nt, Human
uucaguggcagcugcuu

SEQ ID NO: 2460779 - RNA, 17 nt, Human
uucaguggcagggcuca

SEQ ID NO: 2460780 - RNA, 16 nt, Human
uucaguggcagggcuc

SEQ ID NO: 2460781 - RNA, 22 nt, Human
uucagcuucugcugggcugggg

SEQ ID NO: 2460782 - RNA, 20 nt, Human
uucagcuucugcugggcugg

SEQ ID NO: 2460783 - RNA, 14 nt, Human
uucaguggggcagu

SEQ ID NO: 2460784 - RNA, 20 nt, Human
uucaguggcagggcucagga

SEQ ID NO: 2460785 - RNA, 14 nt, Human
uucagugggagaaa

SEQ ID NO: 2460786 - RNA, 20 nt, Human
uucaguguaauuucuuugcc

SEQ ID NO: 2460787 - RNA, 19 nt, Human
uucaguguaauuucuuugc

SEQ ID NO: 2460788 - RNA, 17 nt, Human
uucaguguaauuucuuu

SEQ ID NO: 2460789 - RNA, 16 nt, Human
uucaguguaauuucuu

SEQ ID NO: 2460790 - RNA, 13 nt, Human
uucaguguaauuu

SEQ ID NO: 2460791 - RNA, 12 nt, Human
uucaguguaauu

SEQ ID NO: 2460792 - RNA, 13 nt, Human
uucaguguaaaua

SEQ ID NO: 2460793 - RNA, 12 nt, Human
uucaguguacau

SEQ ID NO: 2460794 - RNA, 13 nt, Human
uucagugucccgg

SEQ ID NO: 2460795 - RNA, 23 nt, Human
uucagugucaaauaaacacugug

SEQ ID NO: 2460796 - RNA, 22 nt, Human
uucagugucaaauaaacacugu

SEQ ID NO: 2460797 - RNA, 21 nt, Human
uucaguguaauuucuuugccu

SEQ ID NO: 2460798 - RNA, 20 nt, Human
uucaguguauggaaauaaau

SEQ ID NO: 2460799 - RNA, 13 nt, Human
uucaguguacaug

SEQ ID NO: 2460800 - RNA, 15 nt, Human
uucagcuccagcuca

SEQ ID NO: 2460801 - RNA, 12 nt, Human
uucagcuccagc

SEQ ID NO: 2460802 - RNA, 20 nt, Human
uucagcugugaacauggacu

SEQ ID NO: 2460803 - RNA, 13 nt, Human
uucagcucacugu

SEQ ID NO: 2460804 - RNA, 21 nt, Human
uucagcugguugagguuucaa

SEQ ID NO: 2460805 - RNA, 22 nt, Human
uucagcuccagcucaccagccc

SEQ ID NO: 2460806 - RNA, 13 nt, Human
uucagcuugggga

SEQ ID NO: 2460807 - RNA, 14 nt, Human
uucaguggcagcug

SEQ ID NO: 2460808 - RNA, 18 nt, Human
uucagcuucugcugggcu

SEQ ID NO: 2460809 - RNA, 17 nt, Human
uucagcuucugcugggc

SEQ ID NO: 2460810 - RNA, 16 nt, Human
uucagcuucugcuggg

SEQ ID NO: 2460811 - RNA, 15 nt, Human
uucagcuucugcugg

SEQ ID NO: 2460812 - RNA, 14 nt, Human
uucagcuucauuug

SEQ ID NO: 2460813 - RNA, 23 nt, Human
uucagcugugaacauggacucuu

SEQ ID NO: 2460814 - RNA, 22 nt, Human
uucagcuucguuuauuuucaag

SEQ ID NO: 2460815 - RNA, 22 nt, Human
uucagcuuguaaauagcucagg

SEQ ID NO: 2460816 - RNA, 23 nt, Human
uucaguuauuauauuuacaaaug

SEQ ID NO: 2460817 - RNA, 12 nt, Human
uucaguguuaaa

SEQ ID NO: 2460818 - RNA, 18 nt, Human
uucaguguuaaaugugau

SEQ ID NO: 2460819 - RNA, 22 nt, Human
uucaguguuaaaugugaugaau

SEQ ID NO: 2460820 - RNA, 18 nt, Human
uucagugucccgggcccg

SEQ ID NO: 2460821 - RNA, 13 nt, Human
uucaguuacagaa

SEQ ID NO: 2460822 - RNA, 11 nt, Human
uucaguuacag

SEQ ID NO: 2460823 - RNA, 19 nt, Human
uucaguucccagaaucaaa

SEQ ID NO: 2460824 - RNA, 17 nt, Human
uucaguucccagaauca

SEQ ID NO: 2460825 - RNA, 15 nt, Human
uucaguucccagaau

SEQ ID NO: 2460826 - RNA, 22 nt, Human
uucaguuccucuuugcauggaa

SEQ ID NO: 2460827 - RNA, 17 nt, Human
uucaguuccucuuugca

SEQ ID NO: 2460828 - RNA, 23 nt, Human
uucaguuccucuuugcauggaau

SEQ ID NO: 2460829 - RNA, 17 nt, Human
uucaguuacagaaagug

SEQ ID NO: 2460830 - RNA, 16 nt, Human
uucaguuacagaaagu

SEQ ID NO: 2460831 - RNA, 15 nt, Human
uucaguuacagaaag

SEQ ID NO: 2460832 - RNA, 14 nt, Human
uucaguuacagaaa

SEQ ID NO: 2460833 - RNA, 20 nt, Human
uucauaaauaaaguuuguug

SEQ ID NO: 2460834 - RNA, 19 nt, Human
uucauaaacaacuuaaugu

SEQ ID NO: 2460835 - RNA, 16 nt, Human
uucaguugaucacugg

SEQ ID NO: 2460836 - RNA, 18 nt, Human
uucaguugaucacuggca

SEQ ID NO: 2460837 - RNA, 19 nt, Human
uucaucugcucuccuuccu

SEQ ID NO: 2460838 - RNA, 16 nt, Human
uucaucugcucuccuu

SEQ ID NO: 2460839 - RNA, 15 nt, Human
uucaucugcucuccu

SEQ ID NO: 2460840 - RNA, 13 nt, Human
uucaucugcucuc

SEQ ID NO: 2460841 - RNA, 20 nt, Human
uucaucgaaucuacuaauuc

SEQ ID NO: 2460842 - RNA, 14 nt, Human
uucauaacuuucau

SEQ ID NO: 2460843 - RNA, 18 nt, Human
uucauccugacucugccc

SEQ ID NO: 2460844 - RNA, 18 nt, Human
uucauccggcagccugga

SEQ ID NO: 2460845 - RNA, 18 nt, Human
uucaucgaaucuacuaau

SEQ ID NO: 2460846 - RNA, 19 nt, Human
uucauccuccucagaucuu

SEQ ID NO: 2460847 - RNA, 15 nt, Human
uucauccuccucaga

SEQ ID NO: 2460848 - RNA, 15 nt, Human
uucauaaccuagccu

SEQ ID NO: 2460849 - RNA, 16 nt, Human
uucauaaaugaauuuu

SEQ ID NO: 2460850 - RNA, 15 nt, Human
uucauaaaugaauuu

SEQ ID NO: 2460851 - RNA, 12 nt, Human
uucauaaaugaa

SEQ ID NO: 2460852 - RNA, 15 nt, Human
uuauaauuuugugaa

SEQ ID NO: 2460853 - RNA, 14 nt, Human
uuauaauuuuguga

SEQ ID NO: 2460854 - RNA, 21 nt, Human
uuauaauuuuaaauguuuuuu

SEQ ID NO: 2460855 - RNA, 17 nt, Human
uuauaauuuuaaauguu

SEQ ID NO: 2460856 - RNA, 12 nt, Human
uuauaauuuuaa

SEQ ID NO: 2460857 - RNA, 22 nt, Human
uuauaauuguaucagaggccua

SEQ ID NO: 2460858 - RNA, 14 nt, Human
uuauaauuguauca

SEQ ID NO: 2460859 - RNA, 12 nt, Human
uuauaauuuaaa

SEQ ID NO: 2460860 - RNA, 13 nt, Human
uuauaauauacua

SEQ ID NO: 2460861 - RNA, 18 nt, Human
uuauaauaauguuaacau

SEQ ID NO: 2460862 - RNA, 22 nt, Human
uuauaauaaaaggaaaagcaaa

SEQ ID NO: 2460863 - RNA, 21 nt, Human
uuauaauaaaaggaaaagcaa

SEQ ID NO: 2460864 - RNA, 17 nt, Human
uuauaauaaaaggaaaa

SEQ ID NO: 2460865 - RNA, 15 nt, Human
uuauaauaauguuaa

SEQ ID NO: 2460866 - RNA, 13 nt, Human
uuauaauggguaa

SEQ ID NO: 2460867 - RNA, 19 nt, Human
uuauaaugaggaugauuau

SEQ ID NO: 2460868 - RNA, 13 nt, Human
uuauaaucacuuu

SEQ ID NO: 2460869 - RNA, 20 nt, Human
uuauaaucuuccauacuucu

SEQ ID NO: 2460870 - RNA, 11 nt, Human
uuauaaucuuu

SEQ ID NO: 2460871 - RNA, 15 nt, Human
uuauaaugaaugaaa

SEQ ID NO: 2460872 - RNA, 14 nt, Human
uuauaagcagauuu

SEQ ID NO: 2460873 - RNA, 16 nt, Human
uuauaagcagauuuaa

SEQ ID NO: 2460874 - RNA, 18 nt, Human
uuauaaguaucuucaugu

SEQ ID NO: 2460875 - RNA, 18 nt, Human
uuauaaguagcaggccaa

SEQ ID NO: 2460876 - RNA, 20 nt, Human
uuagugcuaagugugaacug

SEQ ID NO: 2460877 - RNA, 19 nt, Human
uuagugcuaagugugaacu

SEQ ID NO: 2460878 - RNA, 17 nt, Human
uuagugcuaagugugaa

SEQ ID NO: 2460879 - RNA, 16 nt, Human
uuagugcuaaguguga

SEQ ID NO: 2460880 - RNA, 21 nt, Human
uuagugcuaagugugaacugg

SEQ ID NO: 2460881 - RNA, 16 nt, Human
uuaguggcucaacauu

SEQ ID NO: 2460882 - RNA, 20 nt, Human
uuaguggcucaacauugugu

SEQ ID NO: 2460883 - RNA, 23 nt, Human
uuaguggcucaacauuguguucc

SEQ ID NO: 2460884 - RNA, 12 nt, Human
uuaguggcuuuu

SEQ ID NO: 2460885 - RNA, 12 nt, Human
uuaguggcuuca

SEQ ID NO: 2460886 - RNA, 16 nt, Human
uuaguguaugcuuuga

SEQ ID NO: 2460887 - RNA, 14 nt, Human
uuagugucacuuac

SEQ ID NO: 2460888 - RNA, 18 nt, Human
uuagugaugucaucuguc

SEQ ID NO: 2460889 - RNA, 15 nt, Human
uuagugcuaagugug

SEQ ID NO: 2460890 - RNA, 12 nt, Human
uuagugcuaagu

SEQ ID NO: 2460891 - RNA, 14 nt, Human
uuagugccugugug

SEQ ID NO: 2460892 - RNA, 17 nt, Human
uuagugcggacaaguuu

SEQ ID NO: 2460893 - RNA, 19 nt, Human
uuagugcggacaaguuuua

SEQ ID NO: 2460894 - RNA, 18 nt, Human
uuagucuucucauagcau

SEQ ID NO: 2460895 - RNA, 19 nt, Human
uuagugaccucagcuuuga

SEQ ID NO: 2460896 - RNA, 17 nt, Human
uuagucugcaaaaugag

SEQ ID NO: 2460897 - RNA, 15 nt, Human
uuagucugcaaaaug

SEQ ID NO: 2460898 - RNA, 13 nt, Human
uuagucuucucau

SEQ ID NO: 2460899 - RNA, 14 nt, Human
uuagucuucucaua

SEQ ID NO: 2460900 - RNA, 21 nt, Human
ugugaaaagaaaaaugagccu

SEQ ID NO: 2460901 - RNA, 17 nt, Human
ugugaaaagaaaaauga

SEQ ID NO: 2460902 - RNA, 13 nt, Human
ugugaaaagaaaa

SEQ ID NO: 2460903 - RNA, 15 nt, Human
ugugaaaagaaaaau

SEQ ID NO: 2460904 - RNA, 20 nt, Human
uuauauuaaaauauggcuau

SEQ ID NO: 2460905 - RNA, 16 nt, Human
uuauauuaugaagcuu

SEQ ID NO: 2460906 - RNA, 14 nt, Human
uuauauuccauaua

SEQ ID NO: 2460907 - RNA, 16 nt, Human
uuauauuccauauauu

SEQ ID NO: 2460908 - RNA, 21 nt, Human
uuauauuccauauauuagcau

SEQ ID NO: 2460909 - RNA, 22 nt, Human
uuauauggaugauucagaaauu

SEQ ID NO: 2460910 - RNA, 20 nt, Human
uuauauggaugauucagaaa

SEQ ID NO: 2460911 - RNA, 16 nt, Human
uuauauguacaugaga

SEQ ID NO: 2460912 - RNA, 19 nt, Human
uuauauguacaugagaagg

SEQ ID NO: 2460913 - RNA, 15 nt, Human
uuauauuaaaauaug

SEQ ID NO: 2460914 - RNA, 16 nt, Human
uuauaugucaaagcag

SEQ ID NO: 2460915 - RNA, 19 nt, Human
uuauaugcuuacugauaua

SEQ ID NO: 2460916 - RNA, 13 nt, Human
uuauaugcuuacu

SEQ ID NO: 2460917 - RNA, 16 nt, Human
uuauaugaagauaagu

SEQ ID NO: 2460918 - RNA, 15 nt, Human
uuauaugaagaaaau

SEQ ID NO: 2460919 - RNA, 19 nt, Human
uuauaugaagaaaaucacu

SEQ ID NO: 2460920 - RNA, 13 nt, Human
uuauauaugugaa

SEQ ID NO: 2460921 - RNA, 13 nt, Human
uuauacauaaaca

SEQ ID NO: 2460922 - RNA, 22 nt, Human
uuauauauugguaacauccuuu

SEQ ID NO: 2460923 - RNA, 23 nt, Human
uuauauaugugaacauuuaucaa

SEQ ID NO: 2460924 - RNA, 11 nt, Human
uuauacauaaa

SEQ ID NO: 2460925 - RNA, 15 nt, Human
uuauaucagccugag

SEQ ID NO: 2460926 - RNA, 23 nt, Human
uuauauauuuauaacucaucaua

SEQ ID NO: 2460927 - RNA, 13 nt, Human
uuauauauuuaua

SEQ ID NO: 2460928 - RNA, 14 nt, Human
uuauauauuuauaa

SEQ ID NO: 2460929 - RNA, 15 nt, Human
uuauauauuuauaac

SEQ ID NO: 2460930 - RNA, 20 nt, Human
uuauauauuuauaacucauc

SEQ ID NO: 2460931 - RNA, 21 nt, Human
uuauaucaucagcauaccuuu

SEQ ID NO: 2460932 - RNA, 16 nt, Human
uuauaucagccugagu

SEQ ID NO: 2460933 - RNA, 19 nt, Human
uuauaucaguccucuuuca

SEQ ID NO: 2460934 - RNA, 21 nt, Human
uuauacacauaauuaaagugu

SEQ ID NO: 2460935 - RNA, 18 nt, Human
uuauacacauaauuaaag

SEQ ID NO: 2460936 - RNA, 15 nt, Human
uuauacacuguaaug

SEQ ID NO: 2460937 - RNA, 22 nt, Human
uuauacagaauugugucugcag

SEQ ID NO: 2460938 - RNA, 22 nt, Human
uuauacagaccgaacuguugua

SEQ ID NO: 2460939 - RNA, 23 nt, Human
uuauacagaauugugucugcagg

SEQ ID NO: 2460940 - RNA, 18 nt, Human
uuauacagcucagcuuuu

SEQ ID NO: 2460941 - RNA, 15 nt, Human
uuauacaaaugucuu

SEQ ID NO: 2460942 - RNA, 17 nt, Human
uuauacaacagugcuaa

SEQ ID NO: 2460943 - RNA, 16 nt, Human
uuauacaacagugcua

SEQ ID NO: 2460944 - RNA, 12 nt, Human
uuauacaacagu

SEQ ID NO: 2460945 - RNA, 19 nt, Human
uuauacaaauuagaaaaug

SEQ ID NO: 2460946 - RNA, 14 nt, Human
uuauacacauaauu

SEQ ID NO: 2460947 - RNA, 13 nt, Human
uuauacacauaau

SEQ ID NO: 2460948 - RNA, 12 nt, Human
uuauacacauaa

SEQ ID NO: 2460949 - RNA, 21 nt, Human
uuauacaacagugcuaaaaau

SEQ ID NO: 2460950 - RNA, 23 nt, Human
uuauacaacagugcuaaaaaugg

SEQ ID NO: 2460951 - RNA, 15 nt, Human
uuauacaauaucauc

SEQ ID NO: 2460952 - RNA, 17 nt, Human
uuauaauuuugugaagc

SEQ ID NO: 2460953 - RNA, 16 nt, Human
uuauaauuuugugaag

SEQ ID NO: 2460954 - RNA, 18 nt, Human
uuauaauuuugugaagca

SEQ ID NO: 2460955 - RNA, 14 nt, Human
uuauaauuuuccua

SEQ ID NO: 2460956 - RNA, 16 nt, Human
uuauaauuuuccuaau

SEQ ID NO: 2460957 - RNA, 16 nt, Human
uuauaauuuuuuucaa

SEQ ID NO: 2460958 - RNA, 21 nt, Human
uuauaauuuuuuuauuacuga

SEQ ID NO: 2460959 - RNA, 18 nt, Human
uuauggcuauaggugcua

SEQ ID NO: 2460960 - RNA, 16 nt, Human
uuauggcuuuugugca

SEQ ID NO: 2460961 - RNA, 20 nt, Human
uuauggaauugauuugcauu

SEQ ID NO: 2460962 - RNA, 21 nt, Human
uuauggaauugauuugcauug

SEQ ID NO: 2460963 - RNA, 23 nt, Human
uuauggaauugauuugcauugaa

SEQ ID NO: 2460964 - RNA, 14 nt, Human
uuauggcacaucag

SEQ ID NO: 2460965 - RNA, 18 nt, Human
uuauggcuuuugugcauu

SEQ ID NO: 2460966 - RNA, 21 nt, Human
uuauggcucacuaugaaucua

SEQ ID NO: 2460967 - RNA, 17 nt, Human
uuauggcuuuugugcau

SEQ ID NO: 2460968 - RNA, 17 nt, Human
uuauguugcauagaaua

SEQ ID NO: 2460969 - RNA, 19 nt, Human
uuauguuuauauaaaugcu

SEQ ID NO: 2460970 - RNA, 20 nt, Human
uuauggaacacucugagacu

SEQ ID NO: 2460971 - RNA, 18 nt, Human
uuauggaacacucugaga

SEQ ID NO: 2460972 - RNA, 21 nt, Human
uuauggacaaugacccagugg

SEQ ID NO: 2460973 - RNA, 14 nt, Human
uuauggaauugauu

SEQ ID NO: 2460974 - RNA, 19 nt, Human
uuauggaauugauuugcau

SEQ ID NO: 2460975 - RNA, 19 nt, Human
uuauggaagauuuuaaauu

SEQ ID NO: 2460976 - RNA, 22 nt, Human
uuauggaaucuaccaacuguuu

SEQ ID NO: 2460977 - RNA, 22 nt, Human
uuauggaagauuuuaaauucac

SEQ ID NO: 2460978 - RNA, 17 nt, Human
uuaugauuuaauaaaau

SEQ ID NO: 2460979 - RNA, 18 nt, Human
uuaugauuuuuuuuucau

SEQ ID NO: 2460980 - RNA, 19 nt, Human
uuaugauuuuuuuuucaua

SEQ ID NO: 2460981 - RNA, 17 nt, Human
uuauggaacacucugag

SEQ ID NO: 2460982 - RNA, 20 nt, Human
uuaugauuuaauaaaauaau

SEQ ID NO: 2460983 - RNA, 15 nt, Human
uuaugauuuaauaaa

SEQ ID NO: 2460984 - RNA, 13 nt, Human
uuaugauuuaaua

SEQ ID NO: 2460985 - RNA, 15 nt, Human
uuauuaauaaacauu

SEQ ID NO: 2460986 - RNA, 14 nt, Human
uuauuaauaaacau

SEQ ID NO: 2460987 - RNA, 23 nt, Human
uuauuaagauggauucucagaua

SEQ ID NO: 2460988 - RNA, 17 nt, Human
uuauuaagauggauucu

SEQ ID NO: 2460989 - RNA, 19 nt, Human
uuauuaagauggauucuca

SEQ ID NO: 2460990 - RNA, 20 nt, Human
uuauuaagauggauucucag

SEQ ID NO: 2460991 - RNA, 21 nt, Human
uuauuaagauggauucucaga

SEQ ID NO: 2460992 - RNA, 13 nt, Human
uuauuaaucacua

SEQ ID NO: 2460993 - RNA, 12 nt, Human
uuauuacaucuu

SEQ ID NO: 2460994 - RNA, 18 nt, Human
uuauuacaucuuucacau

SEQ ID NO: 2460995 - RNA, 18 nt, Human
uuauuacccagaguuuuu

SEQ ID NO: 2460996 - RNA, 19 nt, Human
uuauuacccccuccuucag

SEQ ID NO: 2460997 - RNA, 20 nt, Human
uuauuacccccuccuucaga

SEQ ID NO: 2460998 - RNA, 22 nt, Human
uuauuacccccuccuucagaca

SEQ ID NO: 2460999 - RNA, 13 nt, Human
uuauuaccucuga

SEQ ID NO: 2461000 - RNA, 12 nt, Human
uuauuaccucug

SEQ ID NO: 2461001 - RNA, 15 nt, Human
uuauuaccucugaua

SEQ ID NO: 2461002 - RNA, 19 nt, Human
uuauuacugcuaaguauuu

SEQ ID NO: 2461003 - RNA, 14 nt, Human
uuauuacugcuaag

SEQ ID NO: 2461004 - RNA, 21 nt, Human
uuauuaaaugcccagccccuu

SEQ ID NO: 2461005 - RNA, 19 nt, Human
uuauuaaaugcccagcccc

SEQ ID NO: 2461006 - RNA, 23 nt, Human
uuauuaaaaaucucaaauuucua

SEQ ID NO: 2461007 - RNA, 11 nt, Human
uuauguuugcc

SEQ ID NO: 2461008 - RNA, 20 nt, Human
uuauguuugccacuuugcaa

SEQ ID NO: 2461009 - RNA, 21 nt, Human
uuauuaacuaauaugggcauu

SEQ ID NO: 2461010 - RNA, 18 nt, Human
uuauuaacauaggugaaa

SEQ ID NO: 2461011 - RNA, 19 nt, Human
uuauuaacaaauuauguua

SEQ ID NO: 2461012 - RNA, 20 nt, Human
uuauuaaauacaaaacuucc

SEQ ID NO: 2461013 - RNA, 18 nt, Human
uuauuaaauacaaaacuu

SEQ ID NO: 2461014 - RNA, 22 nt, Human
uuauguuuuuuaaaauauuuau

SEQ ID NO: 2461015 - RNA, 11 nt, Human
uuaucucaaaa

SEQ ID NO: 2461016 - RNA, 16 nt, Human
uuaucucacuugugcc

SEQ ID NO: 2461017 - RNA, 20 nt, Human
uuaucucagucaugcauaaa

SEQ ID NO: 2461018 - RNA, 19 nt, Human
uuaucucagucaugcauaa

SEQ ID NO: 2461019 - RNA, 17 nt, Human
uuaucucagucaugcau

SEQ ID NO: 2461020 - RNA, 15 nt, Human
uuaucucuauuuaau

SEQ ID NO: 2461021 - RNA, 14 nt, Human
uuaucucuauuuaa

SEQ ID NO: 2461022 - RNA, 18 nt, Human
uuaucuguguuuuugaaa

SEQ ID NO: 2461023 - RNA, 22 nt, Human
uuaucucagucaugcauaaaua

SEQ ID NO: 2461024 - RNA, 21 nt, Human
uuaucucagucaugcauaaau

SEQ ID NO: 2461025 - RNA, 21 nt, Human
uuaucuccccuucacaugcau

SEQ ID NO: 2461026 - RNA, 16 nt, Human
uuaucuugaauaaugu

SEQ ID NO: 2461027 - RNA, 14 nt, Human
uuaucuugaauaau

SEQ ID NO: 2461028 - RNA, 17 nt, Human
uuaucuuaugccacggg

SEQ ID NO: 2461029 - RNA, 21 nt, Human
uuaucgaaauaacaauguuaa

SEQ ID NO: 2461030 - RNA, 19 nt, Human
uuaucgaaauaacaauguu

SEQ ID NO: 2461031 - RNA, 22 nt, Human
uuaucgaaauaacaauguuaag

SEQ ID NO: 2461032 - RNA, 15 nt, Human
uuaucggaagcagug

SEQ ID NO: 2461033 - RNA, 14 nt, Human
uuaucggaagcagu

SEQ ID NO: 2461034 - RNA, 16 nt, Human
uuaucggaagcagugc

SEQ ID NO: 2461035 - RNA, 14 nt, Human
uuaucgggaacagu

SEQ ID NO: 2461036 - RNA, 16 nt, Human
uuaucgggaacagugu

SEQ ID NO: 2461037 - RNA, 17 nt, Human
uuaucgggaacaguguu

SEQ ID NO: 2461038 - RNA, 23 nt, Human
uuaucgggaacaguguuucccau

SEQ ID NO: 2461039 - RNA, 16 nt, Human
uuaucgggagcagugu

SEQ ID NO: 2461040 - RNA, 18 nt, Human
uuaucgggagcagugucu

SEQ ID NO: 2461041 - RNA, 19 nt, Human
uuaucgggagcagugucuu

SEQ ID NO: 2461042 - RNA, 19 nt, Human
uuaucuaauaccucugugu

SEQ ID NO: 2461043 - RNA, 21 nt, Human
uuaucuaaaagaaaugucuau

SEQ ID NO: 2461044 - RNA, 15 nt, Human
uuaucuaaaagaaau

SEQ ID NO: 2461045 - RNA, 21 nt, Human
uuaucgggagcagugucuucc

SEQ ID NO: 2461046 - RNA, 23 nt, Human
uuaucgggagcagugucuuccau

SEQ ID NO: 2461047 - RNA, 19 nt, Human
uuaucuauacauaucuuua

SEQ ID NO: 2461048 - RNA, 14 nt, Human
uuaucuagauacug

SEQ ID NO: 2461049 - RNA, 17 nt, Human
uuaucuauacauaucuu

SEQ ID NO: 2461050 - RNA, 20 nt, Human
uuaucuaauaccucugugug

SEQ ID NO: 2461051 - RNA, 20 nt, Human
uuauauuuauuacuguaaga

SEQ ID NO: 2461052 - RNA, 18 nt, Human
uuauauuuaguuauaguu

SEQ ID NO: 2461053 - RNA, 17 nt, Human
uuauauuuaguuauagu

SEQ ID NO: 2461054 - RNA, 22 nt, Human
uuauauuuaguuauaguuucag

SEQ ID NO: 2461055 - RNA, 19 nt, Human
uuauauuuaguuauaguuu

SEQ ID NO: 2461056 - RNA, 12 nt, Human
uuauauuugaaa

SEQ ID NO: 2461057 - RNA, 16 nt, Human
uuauauuuacaaaugg

SEQ ID NO: 2461058 - RNA, 24 nt, Human
uuauauuguaagaaauacuguaca

SEQ ID NO: 2461059 - RNA, 16 nt, Human
uuauauuguaagaaau

SEQ ID NO: 2461060 - RNA, 22 nt, Human
uuauauuguaagaaauacugua

SEQ ID NO: 2461061 - RNA, 14 nt, Human
uuauauuguaagaa

SEQ ID NO: 2461062 - RNA, 15 nt, Human
uuauauugauaacag

SEQ ID NO: 2461063 - RNA, 15 nt, Human
uuauauuugaaauau

SEQ ID NO: 2461064 - RNA, 13 nt, Human
uuauauuugaaau

SEQ ID NO: 2461065 - RNA, 19 nt, Human
uuauccuaaaacaaauagu

SEQ ID NO: 2461066 - RNA, 23 nt, Human
uuaucccuuccuuuuagccuagu

SEQ ID NO: 2461067 - RNA, 13 nt, Human
uuaucccucucca

SEQ ID NO: 2461068 - RNA, 21 nt, Human
uuauccucugaucuccauggc

SEQ ID NO: 2461069 - RNA, 20 nt, Human
uuauccucugaucuccaugg

SEQ ID NO: 2461070 - RNA, 19 nt, Human
uuauccucugaucuccaug

SEQ ID NO: 2461071 - RNA, 16 nt, Human
uuauccucugaucucc

SEQ ID NO: 2461072 - RNA, 15 nt, Human
uuauccucugaucuc

SEQ ID NO: 2461073 - RNA, 14 nt, Human
uuauccucugaucu

SEQ ID NO: 2461074 - RNA, 17 nt, Human
uuauccucuuuagaguu

SEQ ID NO: 2461075 - RNA, 15 nt, Human
uuauccucuuuagag

SEQ ID NO: 2461076 - RNA, 16 nt, Human
uuauccucugguuuaa

SEQ ID NO: 2461077 - RNA, 14 nt, Human
uuauccucuuuaga

SEQ ID NO: 2461078 - RNA, 17 nt, Human
uuauccugaaauuucag

SEQ ID NO: 2461079 - RNA, 20 nt, Human
uuauccucuuuagaguuaga

SEQ ID NO: 2461080 - RNA, 18 nt, Human
uuauccucuuuagaguua

SEQ ID NO: 2461081 - RNA, 15 nt, Human
uuaucgaaauaacaa

SEQ ID NO: 2461082 - RNA, 14 nt, Human
uuaucgaaauaaca

SEQ ID NO: 2461083 - RNA, 13 nt, Human
uuaucgaaauaac

SEQ ID NO: 2461084 - RNA, 16 nt, Human
uuauccugaaauuuca

SEQ ID NO: 2461085 - RNA, 15 nt, Human
aaaaaauauuuuccu

SEQ ID NO: 2461086 - RNA, 20 nt, Human
aaaaaaugcugaacauugca

SEQ ID NO: 2461087 - RNA, 22 nt, Human
aaaaaaugcugaacauugcaua

SEQ ID NO: 2461088 - RNA, 16 nt, Human
aaaaaauguauaugca

SEQ ID NO: 2461089 - RNA, 11 nt, Human
aaaaaaugucc

SEQ ID NO: 2461090 - RNA, 13 nt, Human
aaaaaaucugcag

SEQ ID NO: 2461091 - RNA, 15 nt, Human
aaaaaaucugcagaa

SEQ ID NO: 2461092 - RNA, 12 nt, Human
aaaaacacuagu

SEQ ID NO: 2461093 - RNA, 18 nt, Human
aaaaacaccuagcuuuau

SEQ ID NO: 2461094 - RNA, 17 nt, Human
aaaaacaccuagcuuua

SEQ ID NO: 2461095 - RNA, 15 nt, Human
aaaaacaccuagcuu

SEQ ID NO: 2461096 - RNA, 18 nt, Human
aaaaacacagcaagggug

SEQ ID NO: 2461097 - RNA, 13 nt, Human
aaaaacacagcaa

SEQ ID NO: 2461098 - RNA, 22 nt, Human
aaaaaauuagaaauuggcugga

SEQ ID NO: 2461099 - RNA, 22 nt, Human
aaaaaccuuguauaucuuguuu

SEQ ID NO: 2461100 - RNA, 20 nt, Human
aaaaacuaaaucucuaauau

SEQ ID NO: 2461101 - RNA, 14 nt, Human
aaaaacuaaauugu

SEQ ID NO: 2461102 - RNA, 13 nt, Human
aaaaacuacacau

SEQ ID NO: 2461103 - RNA, 14 nt, Human
aaaaacagaggcca

SEQ ID NO: 2461104 - RNA, 15 nt, Human
aaaaacagcauugcu

SEQ ID NO: 2461105 - RNA, 17 nt, Human
aaaaacagcauugcuuu

SEQ ID NO: 2461106 - RNA, 13 nt, Human
acuagaugaugga

SEQ ID NO: 2461107 - RNA, 15 nt, Human
acuagauggcgagca

SEQ ID NO: 2461108 - RNA, 15 nt, Human
acuagauggugcuga

SEQ ID NO: 2461109 - RNA, 16 nt, Human
acuagauggugcugag

SEQ ID NO: 2461110 - RNA, 18 nt, Human
acuagauggugcugagaa

SEQ ID NO: 2461111 - RNA, 13 nt, Human
acuagcauaucug

SEQ ID NO: 2461112 - RNA, 13 nt, Human
acuagauuacauu

SEQ ID NO: 2461113 - RNA, 18 nt, Human
acuagauuacauucaguu

SEQ ID NO: 2461114 - RNA, 20 nt, Human
acuaguauuucuaugaaaua

SEQ ID NO: 2461115 - RNA, 19 nt, Human
acuagcauaucugccuuua

SEQ ID NO: 2461116 - RNA, 17 nt, Human
acuagcauaucugccuu

SEQ ID NO: 2461117 - RNA, 15 nt, Human
acuagcauaucugcc

SEQ ID NO: 2461118 - RNA, 13 nt, Human
acuagugcaaauc

SEQ ID NO: 2461119 - RNA, 16 nt, Human
acuagugaggaaagau

SEQ ID NO: 2461120 - RNA, 16 nt, Human
acuagugcaaaucaua

SEQ ID NO: 2461121 - RNA, 23 nt, Human
acuagugacaagcuccuggucuu

SEQ ID NO: 2461122 - RNA, 21 nt, Human
acuauucaaacagucucagga

SEQ ID NO: 2461123 - RNA, 13 nt, Human
acuaguuacacau

SEQ ID NO: 2461124 - RNA, 21 nt, Human
acuauuccccagcagggucuu

SEQ ID NO: 2461125 - RNA, 22 nt, Human
acuauucaggagaguagaacag

SEQ ID NO: 2461126 - RNA, 13 nt, Human
acuauucaaguau

SEQ ID NO: 2461127 - RNA, 15 nt, Human
acuaguguugcuugg

SEQ ID NO: 2461128 - RNA, 22 nt, Human
acuauucugauuacacaaaaca

SEQ ID NO: 2461129 - RNA, 21 nt, Human
acuauucugauuacacaaaac

SEQ ID NO: 2461130 - RNA, 15 nt, Human
acuauucugauuaca

SEQ ID NO: 2461131 - RNA, 20 nt, Human
acuauuccccagcagggucu

SEQ ID NO: 2461132 - RNA, 11 nt, Human
acuauuuaaag

SEQ ID NO: 2461133 - RNA, 20 nt, Human
acuauuuaaagccuccucau

SEQ ID NO: 2461134 - RNA, 23 nt, Human
acuauucugauuacacaaaacaa

SEQ ID NO: 2461135 - RNA, 18 nt, Human
acuauuuaacuugagggu

SEQ ID NO: 2461136 - RNA, 22 nt, Human
acuauuuaacuugagcuuuaaa

SEQ ID NO: 2461137 - RNA, 15 nt, Human
acuauuuaacuugag

SEQ ID NO: 2461138 - RNA, 14 nt, Human
acuauuuaacuuga

SEQ ID NO: 2461139 - RNA, 20 nt, Human
acuauuuaguuuuuguaauu

SEQ ID NO: 2461140 - RNA, 21 nt, Human
acuauuuaguuuuuguaauuu

SEQ ID NO: 2461141 - RNA, 23 nt, Human
acuauuuaguuuuuguaauuuau

SEQ ID NO: 2461142 - RNA, 12 nt, Human
acuauuuaucug

SEQ ID NO: 2461143 - RNA, 13 nt, Human
acucaaaagcugg

SEQ ID NO: 2461144 - RNA, 18 nt, Human
acuauuuuucagaaucuc

SEQ ID NO: 2461145 - RNA, 15 nt, Human
acuauuuaucugugu

SEQ ID NO: 2461146 - RNA, 14 nt, Human
acuauuuuucagaa

SEQ ID NO: 2461147 - RNA, 19 nt, Human
acucauaaugugaaguguu

SEQ ID NO: 2461148 - RNA, 16 nt, Human
acucauaaugugaagu

SEQ ID NO: 2461149 - RNA, 15 nt, Human
acucauaaugugaag

SEQ ID NO: 2461150 - RNA, 14 nt, Human
acucauaaugugaa

SEQ ID NO: 2461151 - RNA, 19 nt, Human
acucaguccauagcagaga

SEQ ID NO: 2461152 - RNA, 16 nt, Human
acucagggcuccuggg

SEQ ID NO: 2461153 - RNA, 18 nt, Human
acucagggccccagcacu

SEQ ID NO: 2461154 - RNA, 22 nt, Human
acucagggccccagcacuaaag

SEQ ID NO: 2461155 - RNA, 17 nt, Human
acucaggaugcccaggg

SEQ ID NO: 2461156 - RNA, 20 nt, Human
acucagguuguaguaaagaa

SEQ ID NO: 2461157 - RNA, 21 nt, Human
acucagguuguaguaaagaaa

SEQ ID NO: 2461158 - RNA, 22 nt, Human
acucagguuguaguaaagaaau

SEQ ID NO: 2461159 - RNA, 23 nt, Human
acucagguuguaguaaagaaauu

SEQ ID NO: 2461160 - RNA, 16 nt, Human
acucaggcccaaagcc

SEQ ID NO: 2461161 - RNA, 15 nt, Human
acucagggccccagc

SEQ ID NO: 2461162 - RNA, 15 nt, Human
acucaggaugcccag

SEQ ID NO: 2461163 - RNA, 16 nt, Human
acucaggaugcccagg

SEQ ID NO: 2461164 - RNA, 18 nt, Human
acucaggaugcccagggc

SEQ ID NO: 2461165 - RNA, 17 nt, Human
acucagcuuccuaccca

SEQ ID NO: 2461166 - RNA, 20 nt, Human
acucaggaggcugaggcaga

SEQ ID NO: 2461167 - RNA, 17 nt, Human
acucaggaggcugaggg

SEQ ID NO: 2461168 - RNA, 18 nt, Human
acucaggaggcugagggg

SEQ ID NO: 2461169 - RNA, 18 nt, Human
acucaggauccagucccu

SEQ ID NO: 2461170 - RNA, 14 nt, Human
acucaggaugccca

SEQ ID NO: 2461171 - RNA, 13 nt, Human
acucaggaagaac

SEQ ID NO: 2461172 - RNA, 13 nt, Human
acucaggaggcug

SEQ ID NO: 2461173 - RNA, 14 nt, Human
acucaggaggcuga

SEQ ID NO: 2461174 - RNA, 16 nt, Human
acucaggaggcugagg

SEQ ID NO: 2461175 - RNA, 17 nt, Human
acucaggaggcugaggc

SEQ ID NO: 2461176 - RNA, 18 nt, Human
acucaggaggcugaggca

SEQ ID NO: 2461177 - RNA, 19 nt, Human
acucaggaggcugaggcag

SEQ ID NO: 2461178 - RNA, 23 nt, Human
acucagccaagcacagugguggc

SEQ ID NO: 2461179 - RNA, 22 nt, Human
acucagccaagcacaguggugg

SEQ ID NO: 2461180 - RNA, 17 nt, Human
acucagcccucauuggc

SEQ ID NO: 2461181 - RNA, 21 nt, Human
acucagcccucauuggcucuu

SEQ ID NO: 2461182 - RNA, 11 nt, Human
acucagcccug

SEQ ID NO: 2461183 - RNA, 14 nt, Human
acucagcccugagg

SEQ ID NO: 2461184 - RNA, 18 nt, Human
acucagccaagcacagug

SEQ ID NO: 2461185 - RNA, 17 nt, Human
acucagccaagcacagu

SEQ ID NO: 2461186 - RNA, 16 nt, Human
acucagccaagcacag

SEQ ID NO: 2461187 - RNA, 15 nt, Human
acucagccaagcaca

SEQ ID NO: 2461188 - RNA, 14 nt, Human
acucagccaagcac

SEQ ID NO: 2461189 - RNA, 22 nt, Human
acucagcagcccuccucacccc

SEQ ID NO: 2461190 - RNA, 23 nt, Human
acucagcagcccuccucaccccg

SEQ ID NO: 2461191 - RNA, 18 nt, Human
acucagcagcccuccuca

SEQ ID NO: 2461192 - RNA, 19 nt, Human
acucagcagcccuccucac

SEQ ID NO: 2461193 - RNA, 20 nt, Human
acucagcagcccuccucacc

SEQ ID NO: 2461194 - RNA, 21 nt, Human
acucagcagcccuccucaccc

SEQ ID NO: 2461195 - RNA, 17 nt, Human
acucagcagcccuccuc

SEQ ID NO: 2461196 - RNA, 20 nt, Human
acucaaaacccaucugggcu

SEQ ID NO: 2461197 - RNA, 15 nt, Human
acucaaaacuuaaca

SEQ ID NO: 2461198 - RNA, 18 nt, Human
acucaaaugcucagacca

SEQ ID NO: 2461199 - RNA, 21 nt, Human
acucaaaugcucagaccagcu

SEQ ID NO: 2461200 - RNA, 20 nt, Human
acucaaauggggccagaucc

SEQ ID NO: 2461201 - RNA, 21 nt, Human
acucaaauggggccagaucca

SEQ ID NO: 2461202 - RNA, 22 nt, Human
acucaaauggggccagauccag

SEQ ID NO: 2461203 - RNA, 23 nt, Human
acucaaauggggccagauccagc

SEQ ID NO: 2461204 - RNA, 22 nt, Human
acucaaaugcuuggcuucucau

SEQ ID NO: 2461205 - RNA, 19 nt, Human
acucaaaugcuuggcuucu

SEQ ID NO: 2461206 - RNA, 17 nt, Human
acucaaauggggccaga

SEQ ID NO: 2461207 - RNA, 12 nt, Human
acucaaaugcuu

SEQ ID NO: 2461208 - RNA, 23 nt, Human
acucaaaugcucagaccagcucu

SEQ ID NO: 2461209 - RNA, 15 nt, Human
acucugguucuuugu

SEQ ID NO: 2461210 - RNA, 18 nt, Human
acucuggucuucuuuggg

SEQ ID NO: 2461211 - RNA, 19 nt, Human
acucugucgcccagucugg

SEQ ID NO: 2461212 - RNA, 23 nt, Human
acucugucaauuucccugacucc

SEQ ID NO: 2461213 - RNA, 14 nt, Human
acucugucagaugg

SEQ ID NO: 2461214 - RNA, 16 nt, Human
acucugucagauggga

SEQ ID NO: 2461215 - RNA, 21 nt, Human
acucuaucaaguauuauaccu

SEQ ID NO: 2461216 - RNA, 17 nt, Human
acucuauguucuaagaa

SEQ ID NO: 2461217 - RNA, 23 nt, Human
acucuaucaaguauuauaccuuu

SEQ ID NO: 2461218 - RNA, 13 nt, Human
acucuagggcagu

SEQ ID NO: 2461219 - RNA, 23 nt, Human
acucuagauuuuguuuugcuuuu

SEQ ID NO: 2461220 - RNA, 20 nt, Human
acucuagcugggggugggcc

SEQ ID NO: 2461221 - RNA, 21 nt, Human
acucuaggggucaggcuccau

SEQ ID NO: 2461222 - RNA, 17 nt, Human
acucuaggugcccuugg

SEQ ID NO: 2461223 - RNA, 21 nt, Human
acucuagauuuuguuuugcuu

SEQ ID NO: 2461224 - RNA, 20 nt, Human
acucuagauuuuguuuugcu

SEQ ID NO: 2461225 - RNA, 19 nt, Human
acucuagauuuuguuuugc

SEQ ID NO: 2461226 - RNA, 14 nt, Human
acucuagauuuugu

SEQ ID NO: 2461227 - RNA, 15 nt, Human
acucuagggaaaaac

SEQ ID NO: 2461228 - RNA, 17 nt, Human
acucuagggaaaaacca

SEQ ID NO: 2461229 - RNA, 20 nt, Human
acucauacugugcuggagcc

SEQ ID NO: 2461230 - RNA, 19 nt, Human
acucauacugugcuggagc

SEQ ID NO: 2461231 - RNA, 17 nt, Human
acucauacugugcugga

SEQ ID NO: 2461232 - RNA, 15 nt, Human
acucauacugugcug

SEQ ID NO: 2461233 - RNA, 17 nt, Human
acucauaccuuuaaagg

SEQ ID NO: 2461234 - RNA, 15 nt, Human
acucauacaucuggc

SEQ ID NO: 2461235 - RNA, 14 nt, Human
acucauacaucugg

SEQ ID NO: 2461236 - RNA, 23 nt, Human
acucauacugugcuggagccacu

SEQ ID NO: 2461237 - RNA, 21 nt, Human
acucauacugugcuggagcca

SEQ ID NO: 2461238 - RNA, 22 nt, Human
acucauauccccuauuuaacag

SEQ ID NO: 2461239 - RNA, 21 nt, Human
accucugcagcaauaaagcag

SEQ ID NO: 2461240 - RNA, 19 nt, Human
accucugcggaccccagcu

SEQ ID NO: 2461241 - RNA, 18 nt, Human
accucugcggaccccagc

SEQ ID NO: 2461242 - RNA, 17 nt, Human
accucugcggaccccag

SEQ ID NO: 2461243 - RNA, 14 nt, Human
accucugcggaccc

SEQ ID NO: 2461244 - RNA, 18 nt, Human
accucugcagcaauaaag

SEQ ID NO: 2461245 - RNA, 20 nt, Human
accucugcagcaauaaagca

SEQ ID NO: 2461246 - RNA, 15 nt, Human
accucugcagcaaua

SEQ ID NO: 2461247 - RNA, 20 nt, Human
accugcccugcugaguccca

SEQ ID NO: 2461248 - RNA, 17 nt, Human
accugcccugccugagg

SEQ ID NO: 2461249 - RNA, 18 nt, Human
accugcccugccugaggg

SEQ ID NO: 2461250 - RNA, 23 nt, Human
accucugcucugaggcuuccaga

SEQ ID NO: 2461251 - RNA, 23 nt, Human
accucuggacuggcuagaguccu

SEQ ID NO: 2461252 - RNA, 22 nt, Human
accucugcucugaggcuuccag

SEQ ID NO: 2461253 - RNA, 14 nt, Human
accucugcucugag

SEQ ID NO: 2461254 - RNA, 12 nt, Human
accucugcucug

SEQ ID NO: 2461255 - RNA, 20 nt, Human
accucugcggaccccagcug

SEQ ID NO: 2461256 - RNA, 14 nt, Human
accucuggacuggc

SEQ ID NO: 2461257 - RNA, 15 nt, Human
accucuggacuggcu

SEQ ID NO: 2461258 - RNA, 16 nt, Human
accucuggacuggcua

SEQ ID NO: 2461259 - RNA, 19 nt, Human
accucuggacuggcuagag

SEQ ID NO: 2461260 - RNA, 19 nt, Human
accugucaugccccccuca

SEQ ID NO: 2461261 - RNA, 18 nt, Human
accugucaugccccccuc

SEQ ID NO: 2461262 - RNA, 17 nt, Human
accugucaugccccccu

SEQ ID NO: 2461263 - RNA, 15 nt, Human
accugucaugccccc

SEQ ID NO: 2461264 - RNA, 17 nt, Human
accugccucacagcugg

SEQ ID NO: 2461265 - RNA, 18 nt, Human
accugucaccgugagcag

SEQ ID NO: 2461266 - RNA, 23 nt, Human
accugucacgauugucaucagga

SEQ ID NO: 2461267 - RNA, 19 nt, Human
accugucaccgugagcagc

SEQ ID NO: 2461268 - RNA, 20 nt, Human
accugcccugccugagggcc

SEQ ID NO: 2461269 - RNA, 19 nt, Human
accugcccugccugagggc

SEQ ID NO: 2461270 - RNA, 12 nt, Human
accugccgaccu

SEQ ID NO: 2461271 - RNA, 13 nt, Human
accugccgaccuc

SEQ ID NO: 2461272 - RNA, 17 nt, Human
accugccgaccucgucc

SEQ ID NO: 2461273 - RNA, 18 nt, Human
accugccgaccucguccu

SEQ ID NO: 2461274 - RNA, 20 nt, Human
accugccgaccucguccucc

SEQ ID NO: 2461275 - RNA, 15 nt, Human
accugucccccugac

SEQ ID NO: 2461276 - RNA, 12 nt, Human
accugucccccu

SEQ ID NO: 2461277 - RNA, 16 nt, Human
accugucccccugaca

SEQ ID NO: 2461278 - RNA, 15 nt, Human
accuguccuccuggu

SEQ ID NO: 2461279 - RNA, 14 nt, Human
accuguccuccugg

SEQ ID NO: 2461280 - RNA, 20 nt, Human
accugucaugccccccucaa

SEQ ID NO: 2461281 - RNA, 13 nt, Human
accugucucacca

SEQ ID NO: 2461282 - RNA, 18 nt, Human
accuguccuccugguggg

SEQ ID NO: 2461283 - RNA, 14 nt, Human
accuguccuugcac

SEQ ID NO: 2461284 - RNA, 14 nt, Human
accugucucagccu

SEQ ID NO: 2461285 - RNA, 17 nt, Human
accugucuccuuucuca

SEQ ID NO: 2461286 - RNA, 22 nt, Human
accugucuccuuucaccccagg

SEQ ID NO: 2461287 - RNA, 12 nt, Human
accugucuccuu

SEQ ID NO: 2461288 - RNA, 19 nt, Human
accuuguuggagccugcag

SEQ ID NO: 2461289 - RNA, 18 nt, Human
accuuguuggagccugca

SEQ ID NO: 2461290 - RNA, 17 nt, Human
accuuguuggagccugc

SEQ ID NO: 2461291 - RNA, 16 nt, Human
accuuguuggagccug

SEQ ID NO: 2461292 - RNA, 15 nt, Human
accuuguuggagccu

SEQ ID NO: 2461293 - RNA, 22 nt, Human
accuuguugcaugauguauuuu

SEQ ID NO: 2461294 - RNA, 23 nt, Human
accuugguguaguugaacugaua

SEQ ID NO: 2461295 - RNA, 17 nt, Human
accuuggggcuugacuu

SEQ ID NO: 2461296 - RNA, 16 nt, Human
accuguuuaaauauuu

SEQ ID NO: 2461297 - RNA, 14 nt, Human
accuguuuaaauau

SEQ ID NO: 2461298 - RNA, 16 nt, Human
accuguugguuccaag

SEQ ID NO: 2461299 - RNA, 18 nt, Human
accuuggcugcagggagu

SEQ ID NO: 2461300 - RNA, 20 nt, Human
accuguucagugucccgggc

SEQ ID NO: 2461301 - RNA, 19 nt, Human
accuguucagugucccggg

SEQ ID NO: 2461302 - RNA, 22 nt, Human
accuguucagugucccgggccc

SEQ ID NO: 2461303 - RNA, 17 nt, Human
accuguuaccuacuuug

SEQ ID NO: 2461304 - RNA, 18 nt, Human
accuguuaccuacuuuga

SEQ ID NO: 2461305 - RNA, 18 nt, Human
accuguucagugucccgg

SEQ ID NO: 2461306 - RNA, 17 nt, Human
accuguucagugucccg

SEQ ID NO: 2461307 - RNA, 17 nt, Human
accuguuagcagacagg

SEQ ID NO: 2461308 - RNA, 14 nt, Human
accuguugguucca

SEQ ID NO: 2461309 - RNA, 21 nt, Human
accuguugcuuacaauuuuuu

SEQ ID NO: 2461310 - RNA, 20 nt, Human
accuguugcuuacaauuuuu

SEQ ID NO: 2461311 - RNA, 19 nt, Human
accuguugcuuacaauuuu

SEQ ID NO: 2461312 - RNA, 18 nt, Human
accuguugcuuacaauuu

SEQ ID NO: 2461313 - RNA, 16 nt, Human
accuguugcuuacaau

SEQ ID NO: 2461314 - RNA, 15 nt, Human
accuguugcuuacaa

SEQ ID NO: 2461315 - RNA, 17 nt, Human
accuuggcugcagggag

SEQ ID NO: 2461316 - RNA, 13 nt, Human
accuuucccaucu

SEQ ID NO: 2461317 - RNA, 18 nt, Human
accuuucccaucuuccaa

SEQ ID NO: 2461318 - RNA, 18 nt, Human
accuuuccaccacagcca

SEQ ID NO: 2461319 - RNA, 23 nt, Human
accuuuccaaaguuaacagauuu

SEQ ID NO: 2461320 - RNA, 15 nt, Human
accuuuaagagaaau

SEQ ID NO: 2461321 - RNA, 15 nt, Human
accuuuagggcagcu

SEQ ID NO: 2461322 - RNA, 14 nt, Human
accuuuagggcagc

SEQ ID NO: 2461323 - RNA, 18 nt, Human
accuuguuguuguuaaau

SEQ ID NO: 2461324 - RNA, 21 nt, Human
accuuuagggcagcuugcccc

SEQ ID NO: 2461325 - RNA, 20 nt, Human
accuuuagugguggccauuu

SEQ ID NO: 2461326 - RNA, 15 nt, Human
accuuuaugguuucu

SEQ ID NO: 2461327 - RNA, 14 nt, Human
accuuuauuaaaau

SEQ ID NO: 2461328 - RNA, 15 nt, Human
accuuuauuaaaauc

SEQ ID NO: 2461329 - RNA, 16 nt, Human
accuuuauuaaaaucu

SEQ ID NO: 2461330 - RNA, 17 nt, Human
accuuuauuaaaaucuu

SEQ ID NO: 2461331 - RNA, 18 nt, Human
accuuuauuaaaaucuua

SEQ ID NO: 2461332 - RNA, 18 nt, Human
accuuucauaaucuuugc

SEQ ID NO: 2461333 - RNA, 19 nt, Human
accuuucauaaucuuugcu

SEQ ID NO: 2461334 - RNA, 21 nt, Human
accuuucauaaucuuugcuuu

SEQ ID NO: 2461335 - RNA, 20 nt, Human
accuuucauaaucuuugcuu

SEQ ID NO: 2461336 - RNA, 16 nt, Human
acgugacagugccugg

SEQ ID NO: 2461337 - RNA, 19 nt, Human
acgugacagugccugggaa

SEQ ID NO: 2461338 - RNA, 21 nt, Human
acgugaccggacuuuucugca

SEQ ID NO: 2461339 - RNA, 17 nt, Human
acgugacagugccuggg

SEQ ID NO: 2461340 - RNA, 14 nt, Human
acgugacugcccca

SEQ ID NO: 2461341 - RNA, 18 nt, Human
acgugacugccccaacuc

SEQ ID NO: 2461342 - RNA, 20 nt, Human
acgugacugccccaacuccu

SEQ ID NO: 2461343 - RNA, 21 nt, Human
acgugacuguggcacacgccu

SEQ ID NO: 2461344 - RNA, 14 nt, Human
acgugagagugucu

SEQ ID NO: 2461345 - RNA, 11 nt, Human
acgugaguccu

SEQ ID NO: 2461346 - RNA, 18 nt, Human
acgugauggucugagacu

SEQ ID NO: 2461347 - RNA, 23 nt, Human
acgugagccagguaaugagggac

SEQ ID NO: 2461348 - RNA, 22 nt, Human
acgugagccagguaaugaggga

SEQ ID NO: 2461349 - RNA, 15 nt, Human
acgugagccagguaa

SEQ ID NO: 2461350 - RNA, 14 nt, Human
acgugagccaggua

SEQ ID NO: 2461351 - RNA, 16 nt, Human
acgugagaucauucac

SEQ ID NO: 2461352 - RNA, 15 nt, Human
acgugagagugucuu

SEQ ID NO: 2461353 - RNA, 23 nt, Human
acgugagagugucuucacggcag

SEQ ID NO: 2461354 - RNA, 13 nt, Human
acuaagagagaau

SEQ ID NO: 2461355 - RNA, 22 nt, Human
acuaagcagaggaggggccgcu

SEQ ID NO: 2461356 - RNA, 15 nt, Human
acuaagcagaggagg

SEQ ID NO: 2461357 - RNA, 14 nt, Human
acuaagaaaagaua

SEQ ID NO: 2461358 - RNA, 16 nt, Human
acuaagaauucaaacu

SEQ ID NO: 2461359 - RNA, 18 nt, Human
acuaagaauucaaacugg

SEQ ID NO: 2461360 - RNA, 14 nt, Human
acuaagaagaaaau

SEQ ID NO: 2461361 - RNA, 13 nt, Human
acuaagaagaaaa

SEQ ID NO: 2461362 - RNA, 17 nt, Human
acuaacuugacuuuuaa

SEQ ID NO: 2461363 - RNA, 18 nt, Human
acuaagcccugucgagac

SEQ ID NO: 2461364 - RNA, 16 nt, Human
acuaagcccugucgag

SEQ ID NO: 2461365 - RNA, 13 nt, Human
acuaagcccuguc

SEQ ID NO: 2461366 - RNA, 18 nt, Human
acuaagccacaagaaauu

SEQ ID NO: 2461367 - RNA, 16 nt, Human
acuaagccacaagaaa

SEQ ID NO: 2461368 - RNA, 15 nt, Human
acuaagccacaagaa

SEQ ID NO: 2461369 - RNA, 19 nt, Human
acuaagcagaggaggggcc

SEQ ID NO: 2461370 - RNA, 19 nt, Human
acuaagccuaccugcucuc

SEQ ID NO: 2461371 - RNA, 18 nt, Human
acuaagccuaccugcucu

SEQ ID NO: 2461372 - RNA, 14 nt, Human
acuaagccuaccug

SEQ ID NO: 2461373 - RNA, 22 nt, Human
acuaagcccugucgagacacuu

SEQ ID NO: 2461374 - RNA, 21 nt, Human
acuaagcuuugccagcugcug

SEQ ID NO: 2461375 - RNA, 20 nt, Human
acuaagcuuugccagcugcu

SEQ ID NO: 2461376 - RNA, 20 nt, Human
acuaaggaguaaucugugua

SEQ ID NO: 2461377 - RNA, 12 nt, Human
acuaaggggccc

SEQ ID NO: 2461378 - RNA, 13 nt, Human
acuaauuccacac

SEQ ID NO: 2461379 - RNA, 15 nt, Human
acuaauuccacaccu

SEQ ID NO: 2461380 - RNA, 18 nt, Human
acuaaguuauaguauauc

SEQ ID NO: 2461381 - RNA, 17 nt, Human
acuaaguuauaguauau

SEQ ID NO: 2461382 - RNA, 22 nt, Human
acuaaggggcccggccagccau

SEQ ID NO: 2461383 - RNA, 21 nt, Human
acuaaggggcccggccagcca

SEQ ID NO: 2461384 - RNA, 15 nt, Human
acuaauuuaaaaaau

SEQ ID NO: 2461385 - RNA, 20 nt, Human
acuaauuucaaaaugcuuuu

SEQ ID NO: 2461386 - RNA, 16 nt, Human
acuaauuucaaaaugc

SEQ ID NO: 2461387 - RNA, 19 nt, Human
acuaauuucaaaaugcuuu

SEQ ID NO: 2461388 - RNA, 19 nt, Human
acuaauuguauaacagguu

SEQ ID NO: 2461389 - RNA, 18 nt, Human
acuaauuguauaacaggu

SEQ ID NO: 2461390 - RNA, 17 nt, Human
acuaauuguauaacagg

SEQ ID NO: 2461391 - RNA, 16 nt, Human
acuaauuguauaacag

SEQ ID NO: 2461392 - RNA, 22 nt, Human
acuaauuguauaacagguuauu

SEQ ID NO: 2461393 - RNA, 20 nt, Human
acuaauuguauaacagguua

SEQ ID NO: 2461394 - RNA, 14 nt, Human
acuaauuucaaaau

SEQ ID NO: 2461395 - RNA, 15 nt, Human
acuaauuguauaaca

SEQ ID NO: 2461396 - RNA, 14 nt, Human
acuaauuguauaac

SEQ ID NO: 2461397 - RNA, 20 nt, Human
acuaauuggccucuuuaaga

SEQ ID NO: 2461398 - RNA, 23 nt, Human
acuaauuccacaccuuuuauuga

SEQ ID NO: 2461399 - RNA, 14 nt, Human
acgcugugcugccc

SEQ ID NO: 2461400 - RNA, 12 nt, Human
acgcugugcugc

SEQ ID NO: 2461401 - RNA, 11 nt, Human
acgcugugcug

SEQ ID NO: 2461402 - RNA, 12 nt, Human
acgccacccagc

SEQ ID NO: 2461403 - RNA, 18 nt, Human
acgccaccauuccuggaa

SEQ ID NO: 2461404 - RNA, 13 nt, Human
acgccaccauucc

SEQ ID NO: 2461405 - RNA, 19 nt, Human
acgcaggcccccaggugcc

SEQ ID NO: 2461406 - RNA, 22 nt, Human
acgcaggcccccaggugccagu

SEQ ID NO: 2461407 - RNA, 17 nt, Human
acgcagggguugcagug

SEQ ID NO: 2461408 - RNA, 14 nt, Human
acgcaguggccuuc

SEQ ID NO: 2461409 - RNA, 22 nt, Human
acgcauggaguguguauuguuc

SEQ ID NO: 2461410 - RNA, 21 nt, Human
acguccugucagugccgccgc

SEQ ID NO: 2461411 - RNA, 19 nt, Human
acgucgucuucuguauacu

SEQ ID NO: 2461412 - RNA, 14 nt, Human
acgucugacaggca

SEQ ID NO: 2461413 - RNA, 13 nt, Human
acgucugacaggc

SEQ ID NO: 2461414 - RNA, 18 nt, Human
acguccugucagugccgc

SEQ ID NO: 2461415 - RNA, 15 nt, Human
acguccugucagugc

SEQ ID NO: 2461416 - RNA, 20 nt, Human
acguccugccaccuggggca

SEQ ID NO: 2461417 - RNA, 12 nt, Human
acgcuuugauuc

SEQ ID NO: 2461418 - RNA, 13 nt, Human
acgcuuugauuca

SEQ ID NO: 2461419 - RNA, 14 nt, Human
acgcuuugauucau

SEQ ID NO: 2461420 - RNA, 16 nt, Human
acgcuuugauucauag

SEQ ID NO: 2461421 - RNA, 19 nt, Human
acgcugucuccagaccccc

SEQ ID NO: 2461422 - RNA, 20 nt, Human
acgcugucuccagaccccca

SEQ ID NO: 2461423 - RNA, 21 nt, Human
acgcugucuccagacccccac

SEQ ID NO: 2461424 - RNA, 22 nt, Human
acgcugucuccagacccccacc

SEQ ID NO: 2461425 - RNA, 11 nt, Human
acgcuuugauu

SEQ ID NO: 2461426 - RNA, 17 nt, Human
acgcuuucuagcuguug

SEQ ID NO: 2461427 - RNA, 18 nt, Human
acgcuuuccugaauccaa

SEQ ID NO: 2461428 - RNA, 23 nt, Human
acgcugucuccagacccccaccc

SEQ ID NO: 2461429 - RNA, 20 nt, Human
acugugcugagucugaaggc

SEQ ID NO: 2461430 - RNA, 14 nt, Human
acugugcucagggc

SEQ ID NO: 2461431 - RNA, 21 nt, Human
acugugcuaauaacagugcau

SEQ ID NO: 2461432 - RNA, 18 nt, Human
acugugcuaauaacagug

SEQ ID NO: 2461433 - RNA, 12 nt, Human
acugugcuaaua

SEQ ID NO: 2461434 - RNA, 22 nt, Human
acugugcugagucugaaggcug

SEQ ID NO: 2461435 - RNA, 22 nt, Human
acuucugucuucacaacagauu

SEQ ID NO: 2461436 - RNA, 16 nt, Human
acuucuuauggaauug

SEQ ID NO: 2461437 - RNA, 17 nt, Human
acuucuuauggaauuga

SEQ ID NO: 2461438 - RNA, 20 nt, Human
acuucuuauggaauugauuu

SEQ ID NO: 2461439 - RNA, 21 nt, Human
acuucuucagagcugacacag

SEQ ID NO: 2461440 - RNA, 16 nt, Human
acuucuucagagcuga

SEQ ID NO: 2461441 - RNA, 13 nt, Human
acuucuucagagc

SEQ ID NO: 2461442 - RNA, 21 nt, Human
acuucuuauggaauugauuug

SEQ ID NO: 2461443 - RNA, 23 nt, Human
acuucuuauggaauugauuugca

SEQ ID NO: 2461444 - RNA, 20 nt, Human
acuucuucagagcugacaca

SEQ ID NO: 2461445 - RNA, 12 nt, Human
acuucuugaagg

SEQ ID NO: 2461446 - RNA, 17 nt, Human
acuugggccauagcucc

SEQ ID NO: 2461447 - RNA, 20 nt, Human
acuuggggagauggaguucu

SEQ ID NO: 2461448 - RNA, 21 nt, Human
acuuggggaguuaagaccugg

SEQ ID NO: 2461449 - RNA, 15 nt, Human
acuugggccacugug

SEQ ID NO: 2461450 - RNA, 13 nt, Human
acuucuugaaggu

SEQ ID NO: 2461451 - RNA, 16 nt, Human
acuucuugaaggugcu

SEQ ID NO: 2461452 - RNA, 14 nt, Human
acuugggccacugu

SEQ ID NO: 2461453 - RNA, 16 nt, Human
acuugguuuuuaaaaa

SEQ ID NO: 2461454 - RNA, 18 nt, Human
acuugggccauagcuccu

SEQ ID NO: 2461455 - RNA, 23 nt, Human
acuuggggaguuaagaccuggca

SEQ ID NO: 2461456 - RNA, 21 nt, Human
acuugguguccuuucccucca

SEQ ID NO: 2461457 - RNA, 22 nt, Human
acuugguguccuuucccuccac

SEQ ID NO: 2461458 - RNA, 21 nt, Human
acuuggucugugagaugcuag

SEQ ID NO: 2461459 - RNA, 18 nt, Human
acuugguuggguccucac

SEQ ID NO: 2461460 - RNA, 14 nt, Human
acuguuucugucag

SEQ ID NO: 2461461 - RNA, 16 nt, Human
acuguuucugucagga

SEQ ID NO: 2461462 - RNA, 15 nt, Human
acuguuucugucagg

SEQ ID NO: 2461463 - RNA, 18 nt, Human
acuguuugagguuuuuaa

SEQ ID NO: 2461464 - RNA, 15 nt, Human
acuguuucucugcug

SEQ ID NO: 2461465 - RNA, 13 nt, Human
acuguuucucugc

SEQ ID NO: 2461466 - RNA, 14 nt, Human
acuguuucucugcu

SEQ ID NO: 2461467 - RNA, 18 nt, Human
acuuauuuuuuucugauu

SEQ ID NO: 2461468 - RNA, 17 nt, Human
acuuauuuuuuucugau

SEQ ID NO: 2461469 - RNA, 16 nt, Human
acuuauuuuuuucuga

SEQ ID NO: 2461470 - RNA, 15 nt, Human
acuuauuuuuuucug

SEQ ID NO: 2461471 - RNA, 19 nt, Human
acuuauuuuugacaguguu

SEQ ID NO: 2461472 - RNA, 22 nt, Human
acuuauuuuugacaguguugaa

SEQ ID NO: 2461473 - RNA, 14 nt, Human
acuuauuuuugaca

SEQ ID NO: 2461474 - RNA, 16 nt, Human
acuuauuuuugacagu

SEQ ID NO: 2461475 - RNA, 22 nt, Human
acuuauuugagugauuauuugu

SEQ ID NO: 2461476 - RNA, 12 nt, Human
acuuauuugagu

SEQ ID NO: 2461477 - RNA, 15 nt, Human
acuuauuuucucugu

SEQ ID NO: 2461478 - RNA, 23 nt, Human
acuguuugagguuuuuaagccuu

SEQ ID NO: 2461479 - RNA, 22 nt, Human
acuguuugccuucuacuuuuaa

SEQ ID NO: 2461480 - RNA, 21 nt, Human
acuguuugccuucuacuuuua

SEQ ID NO: 2461481 - RNA, 11 nt, Human
acuuauuugag

SEQ ID NO: 2461482 - RNA, 15 nt, Human
acuuauuuauauaaa

SEQ ID NO: 2461483 - RNA, 21 nt, Human
acuucugucuucacaacagau

SEQ ID NO: 2461484 - RNA, 16 nt, Human
acuucuggcuccucaa

SEQ ID NO: 2461485 - RNA, 17 nt, Human
acuucuggguggggcag

SEQ ID NO: 2461486 - RNA, 16 nt, Human
acuucuggguggggca

SEQ ID NO: 2461487 - RNA, 15 nt, Human
acuucuggcuccuca

SEQ ID NO: 2461488 - RNA, 13 nt, Human
acuucuggcuccu

SEQ ID NO: 2461489 - RNA, 17 nt, Human
acuucugggcuucaucu

SEQ ID NO: 2461490 - RNA, 19 nt, Human
acuucugggcuucaucugg

SEQ ID NO: 2461491 - RNA, 22 nt, Human
acuucugggcuucaucuggcaa

SEQ ID NO: 2461492 - RNA, 12 nt, Human
acuucagacaua

SEQ ID NO: 2461493 - RNA, 21 nt, Human
acuucaaaaguauuuuccugu

SEQ ID NO: 2461494 - RNA, 19 nt, Human
acuucaaaaguauuuuccu

SEQ ID NO: 2461495 - RNA, 23 nt, Human
acuucacauauugauuuccguua

SEQ ID NO: 2461496 - RNA, 18 nt, Human
acuucaaaaguauuuucc

SEQ ID NO: 2461497 - RNA, 17 nt, Human
acuucaaaaguauuuuc

SEQ ID NO: 2461498 - RNA, 16 nt, Human
acuucaaaaguauuuu

SEQ ID NO: 2461499 - RNA, 15 nt, Human
acuucaaaaguauuu

SEQ ID NO: 2461500 - RNA, 21 nt, Human
acuuauuuuuuucugauugua

SEQ ID NO: 2461501 - RNA, 19 nt, Human
acuuauuuuuuucugauug

SEQ ID NO: 2461502 - RNA, 17 nt, Human
acuucacuuuaauucuc

SEQ ID NO: 2461503 - RNA, 23 nt, Human
acuucacugucaggaagaaauca

SEQ ID NO: 2461504 - RNA, 21 nt, Human
acuucacugucaggaagaaau

SEQ ID NO: 2461505 - RNA, 19 nt, Human
acuucacugucaggaagaa

SEQ ID NO: 2461506 - RNA, 22 nt, Human
acugugaaguuuacauuguaaa

SEQ ID NO: 2461507 - RNA, 13 nt, Human
acugugacaggca

SEQ ID NO: 2461508 - RNA, 16 nt, Human
acugugaaggacccuu

SEQ ID NO: 2461509 - RNA, 17 nt, Human
acugugacaggcagcag

SEQ ID NO: 2461510 - RNA, 16 nt, Human
acugugacaggcagca

SEQ ID NO: 2461511 - RNA, 15 nt, Human
acugugacaggcagc

SEQ ID NO: 2461512 - RNA, 14 nt, Human
acugugacaggcag

SEQ ID NO: 2461513 - RNA, 19 nt, Human
acugugacaggcagcagag

SEQ ID NO: 2461514 - RNA, 18 nt, Human
acugugacaggcagcaga

SEQ ID NO: 2461515 - RNA, 23 nt, Human
acugugccuuugaguuuccucag

SEQ ID NO: 2461516 - RNA, 11 nt, Human
acugugccuuu

SEQ ID NO: 2461517 - RNA, 19 nt, Human
acugugacccccagcuccg

SEQ ID NO: 2461518 - RNA, 21 nt, Human
acugugacccccagcuccggc

SEQ ID NO: 2461519 - RNA, 11 nt, Human
acugugacuga

SEQ ID NO: 2461520 - RNA, 23 nt, Human
acugugacucuuuuuagggccag

SEQ ID NO: 2461521 - RNA, 12 nt, Human
acugugaccugu

SEQ ID NO: 2461522 - RNA, 15 nt, Human
acugucucucaugaa

SEQ ID NO: 2461523 - RNA, 17 nt, Human
acugucucucaugaacc

SEQ ID NO: 2461524 - RNA, 21 nt, Human
acugucucgaugcaaugaaca

SEQ ID NO: 2461525 - RNA, 22 nt, Human
acugucuccauggcccugcaaa

SEQ ID NO: 2461526 - RNA, 18 nt, Human
acugucucucaugaaccu

SEQ ID NO: 2461527 - RNA, 15 nt, Human
acugugaaggacccu

SEQ ID NO: 2461528 - RNA, 23 nt, Human
acugucucaagagggcacuggug

SEQ ID NO: 2461529 - RNA, 22 nt, Human
acugguuuauccacccacaaca

SEQ ID NO: 2461530 - RNA, 12 nt, Human
acugucucacug

SEQ ID NO: 2461531 - RNA, 18 nt, Human
acugucucaguuucacuu

SEQ ID NO: 2461532 - RNA, 21 nt, Human
acugucucaagagggcacugg

SEQ ID NO: 2461533 - RNA, 20 nt, Human
acugucucaagagggcacug

SEQ ID NO: 2461534 - RNA, 13 nt, Human
acuguaagaaaau

SEQ ID NO: 2461535 - RNA, 19 nt, Human
acuguaagaaaauaucacu

SEQ ID NO: 2461536 - RNA, 22 nt, Human
acuguaagaaaauaucacuugu

SEQ ID NO: 2461537 - RNA, 19 nt, Human
acugucucaagagggcacu

SEQ ID NO: 2461538 - RNA, 22 nt, Human
acugguuuguugcagccaaaga

SEQ ID NO: 2461539 - RNA, 18 nt, Human
acugguuccauggccucu

SEQ ID NO: 2461540 - RNA, 20 nt, Human
acugguuuauccacccacaa

SEQ ID NO: 2461541 - RNA, 20 nt, Human
acugguuguugccaaacagc

SEQ ID NO: 2461542 - RNA, 16 nt, Human
acugcccccucugccc

SEQ ID NO: 2461543 - RNA, 17 nt, Human
acugcccccucugcccu

SEQ ID NO: 2461544 - RNA, 17 nt, Human
acuggaagcacagcuuc

SEQ ID NO: 2461545 - RNA, 19 nt, Human
acuggaagcacagcuucau

SEQ ID NO: 2461546 - RNA, 16 nt, Human
acuggaagcuaauuug

SEQ ID NO: 2461547 - RNA, 19 nt, Human
acuggaagcauguaggaga

SEQ ID NO: 2461548 - RNA, 20 nt, Human
acuggaagcauguaggagaa

SEQ ID NO: 2461549 - RNA, 16 nt, Human
acugccaggccagccu

SEQ ID NO: 2461550 - RNA, 15 nt, Human
acugccaggccagcc

SEQ ID NO: 2461551 - RNA, 17 nt, Human
acugccaggccagccuc

SEQ ID NO: 2461552 - RNA, 16 nt, Human
acugcccauggacagg

SEQ ID NO: 2461553 - RNA, 19 nt, Human
acugcccauggacaggcug

SEQ ID NO: 2461554 - RNA, 14 nt, Human
acugcccccucugc

SEQ ID NO: 2461555 - RNA, 15 nt, Human
acugcccccucugcc

SEQ ID NO: 2461556 - RNA, 18 nt, Human
acugccccaacuccugga

SEQ ID NO: 2461557 - RNA, 21 nt, Human
acugccccaacuccuggaagc

SEQ ID NO: 2461558 - RNA, 21 nt, Human
acugcccauggacaggcuggc

SEQ ID NO: 2461559 - RNA, 15 nt, Human
acugccccaacuccu

SEQ ID NO: 2461560 - RNA, 17 nt, Human
acugccccaacuccugg

SEQ ID NO: 2461561 - RNA, 15 nt, Human
acuggagaaaaugga

SEQ ID NO: 2461562 - RNA, 19 nt, Human
acuggaagcuaauuugcau

SEQ ID NO: 2461563 - RNA, 21 nt, Human
acuggaagcauguaggagaau

SEQ ID NO: 2461564 - RNA, 17 nt, Human
acuggagaagucuuaga

SEQ ID NO: 2461565 - RNA, 17 nt, Human
acuggagaggcuagaac

SEQ ID NO: 2461566 - RNA, 13 nt, Human
acuggagcaccag

SEQ ID NO: 2461567 - RNA, 13 nt, Human
acuggagcaucug

SEQ ID NO: 2461568 - RNA, 15 nt, Human
acuggagcaccaggc

SEQ ID NO: 2461569 - RNA, 16 nt, Human
acuggagcaccaggca

SEQ ID NO: 2461570 - RNA, 17 nt, Human
acuggagcaucugacuc

SEQ ID NO: 2461571 - RNA, 16 nt, Human
acuggagcaucugacu

SEQ ID NO: 2461572 - RNA, 14 nt, Human
acuggagcaucuga

SEQ ID NO: 2461573 - RNA, 19 nt, Human
acuggagcaccaggcacga

SEQ ID NO: 2461574 - RNA, 12 nt, Human
acuggagcccag

SEQ ID NO: 2461575 - RNA, 18 nt, Human
acuggagcaucugacuca

SEQ ID NO: 2461576 - RNA, 21 nt, Human
acugguccaaaagauugcuga

SEQ ID NO: 2461577 - RNA, 22 nt, Human
acugguccaaaagauugcugaa

SEQ ID NO: 2461578 - RNA, 18 nt, Human
acugguauuccugccucc

SEQ ID NO: 2461579 - RNA, 14 nt, Human
acugguauuuuauc

SEQ ID NO: 2461580 - RNA, 15 nt, Human
acuggucuguaggga

SEQ ID NO: 2461581 - RNA, 20 nt, Human
acugguccugugugcaguga

SEQ ID NO: 2461582 - RNA, 15 nt, Human
acugguccugugugc

SEQ ID NO: 2461583 - RNA, 14 nt, Human
acugguccugugug

SEQ ID NO: 2461584 - RNA, 18 nt, Human
acugguaggaaacuaggu

SEQ ID NO: 2461585 - RNA, 13 nt, Human
acuggagcccagg

SEQ ID NO: 2461586 - RNA, 14 nt, Human
acuggagcccagga

SEQ ID NO: 2461587 - RNA, 15 nt, Human
acugguaggaccaag

SEQ ID NO: 2461588 - RNA, 23 nt, Human
acugccagaugcugauguucagu

SEQ ID NO: 2461589 - RNA, 22 nt, Human
acugccagaugcugauguucag

SEQ ID NO: 2461590 - RNA, 19 nt, Human
acugccagaugcugauguu

SEQ ID NO: 2461591 - RNA, 17 nt, Human
acugccagaugcugaug

SEQ ID NO: 2461592 - RNA, 15 nt, Human
acugccagaugcuga

SEQ ID NO: 2461593 - RNA, 13 nt, Human
acugccagcaacg

SEQ ID NO: 2461594 - RNA, 16 nt, Human
acucugucuucaccug

SEQ ID NO: 2461595 - RNA, 17 nt, Human
acucugucuucaccuga

SEQ ID NO: 2461596 - RNA, 18 nt, Human
acucugucuucaccugau

SEQ ID NO: 2461597 - RNA, 15 nt, Human
acucugucuuguguu

SEQ ID NO: 2461598 - RNA, 22 nt, Human
acucugucuucaccugauucaa

SEQ ID NO: 2461599 - RNA, 20 nt, Human
acucugucucaguccaugaa

SEQ ID NO: 2461600 - RNA, 18 nt, Human
acucugucucaguccaug

SEQ ID NO: 2461601 - RNA, 21 nt, Human
agaaauaagugguuauuucuc

SEQ ID NO: 2461602 - RNA, 17 nt, Human
agaaauaagugguuauu

SEQ ID NO: 2461603 - RNA, 22 nt, Human
agaaauaagugguuauuucuca

SEQ ID NO: 2461604 - RNA, 14 nt, Human
agaaauaauaugca

SEQ ID NO: 2461605 - RNA, 16 nt, Human
agaaauaauaugcauu

SEQ ID NO: 2461606 - RNA, 15 nt, Human
agaaauaauaugcau

SEQ ID NO: 2461607 - RNA, 19 nt, Human
agaaauaaauagcuauauc

SEQ ID NO: 2461608 - RNA, 22 nt, Human
agaaauaaauagcuauauccau

SEQ ID NO: 2461609 - RNA, 21 nt, Human
agaaauaaaguuugcuuagaa

SEQ ID NO: 2461610 - RNA, 15 nt, Human
agaaauaaauagcua

SEQ ID NO: 2461611 - RNA, 18 nt, Human
agaaauaaauagcuauau

SEQ ID NO: 2461612 - RNA, 17 nt, Human
agaaauaaaaggaagcc

SEQ ID NO: 2461613 - RNA, 14 nt, Human
agaaauaaaacugu

SEQ ID NO: 2461614 - RNA, 15 nt, Human
agaaauaaaacuguu

SEQ ID NO: 2461615 - RNA, 21 nt, Human
agaaaguugcacggcugcuga

SEQ ID NO: 2461616 - RNA, 20 nt, Human
agaaaguugcacggcugcug

SEQ ID NO: 2461617 - RNA, 19 nt, Human
agaaaguugcacggcugcu

SEQ ID NO: 2461618 - RNA, 17 nt, Human
agaaaguugcacggcug

SEQ ID NO: 2461619 - RNA, 23 nt, Human
agaaagugugcuuuaugcugaaa

SEQ ID NO: 2461620 - RNA, 21 nt, Human
agaaaguggugcucaguugua

SEQ ID NO: 2461621 - RNA, 15 nt, Human
agaaagugugcuuua

SEQ ID NO: 2461622 - RNA, 16 nt, Human
agaaagugugcuuuau

SEQ ID NO: 2461623 - RNA, 22 nt, Human
agaaagugugcuuuaugcugaa

SEQ ID NO: 2461624 - RNA, 17 nt, Human
agaaagugugagcaaac

SEQ ID NO: 2461625 - RNA, 23 nt, Human
agaaagugugagcaaacuaacuu

SEQ ID NO: 2461626 - RNA, 17 nt, Human
agaaaguggugcucagu

SEQ ID NO: 2461627 - RNA, 14 nt, Human
agaaaguggugcuc

SEQ ID NO: 2461628 - RNA, 21 nt, Human
agaaagugggugagaugcugg

SEQ ID NO: 2461629 - RNA, 20 nt, Human
agaaagugggugagaugcug

SEQ ID NO: 2461630 - RNA, 16 nt, Human
agaaagugugagcaaa

SEQ ID NO: 2461631 - RNA, 19 nt, Human
agaaaguggaaaacaagga

SEQ ID NO: 2461632 - RNA, 20 nt, Human
agaaaguggaaaacaaggaa

SEQ ID NO: 2461633 - RNA, 23 nt, Human
agaaaguggaaaacaaggaaguc

SEQ ID NO: 2461634 - RNA, 21 nt, Human
agaaaguggccaugccacccu

SEQ ID NO: 2461635 - RNA, 15 nt, Human
agaaagugauuucua

SEQ ID NO: 2461636 - RNA, 23 nt, Human
agaaagugaagcaaaucagaaac

SEQ ID NO: 2461637 - RNA, 21 nt, Human
agaaagucgaauuaauagcuu

SEQ ID NO: 2461638 - RNA, 19 nt, Human
agaaagucuuauuuauuca

SEQ ID NO: 2461639 - RNA, 22 nt, Human
agaaagucuuauuuauucauau

SEQ ID NO: 2461640 - RNA, 15 nt, Human
agaaagugaagcaaa

SEQ ID NO: 2461641 - RNA, 23 nt, Human
agaaaguacuucuccacccugcu

SEQ ID NO: 2461642 - RNA, 16 nt, Human
agaaagguucugcccg

SEQ ID NO: 2461643 - RNA, 20 nt, Human
agaaagguggacuggaaggg

SEQ ID NO: 2461644 - RNA, 20 nt, Human
agaaagucgaauuaauagcu

SEQ ID NO: 2461645 - RNA, 22 nt, Human
agaaaguacuucuccacccugc

SEQ ID NO: 2461646 - RNA, 23 nt, Human
agaaaggugaguuugagcugccu

SEQ ID NO: 2461647 - RNA, 22 nt, Human
agaaaggugaguuugagcugcc

SEQ ID NO: 2461648 - RNA, 17 nt, Human
agaaaggguguuuuucu

SEQ ID NO: 2461649 - RNA, 14 nt, Human
agaaaggguguuuu

SEQ ID NO: 2461650 - RNA, 20 nt, Human
agaaagggcaacaauaaaau

SEQ ID NO: 2461651 - RNA, 14 nt, Human
agaaaggggagccc

SEQ ID NO: 2461652 - RNA, 15 nt, Human
agaaaggggagccca

SEQ ID NO: 2461653 - RNA, 16 nt, Human
agaaaggggagcccac

SEQ ID NO: 2461654 - RNA, 17 nt, Human
agaaaggggagcccacu

SEQ ID NO: 2461655 - RNA, 19 nt, Human
agaaaggccuuuaaaauuu

SEQ ID NO: 2461656 - RNA, 17 nt, Human
agaaaggccuuuaaaau

SEQ ID NO: 2461657 - RNA, 16 nt, Human
agaaaggccuuuaaaa

SEQ ID NO: 2461658 - RNA, 15 nt, Human
agaaaggccuuuaaa

SEQ ID NO: 2461659 - RNA, 14 nt, Human
agaaaggccuuuaa

SEQ ID NO: 2461660 - RNA, 16 nt, Human
agaaaggauaaaguug

SEQ ID NO: 2461661 - RNA, 22 nt, Human
agaaaauauuuugucuaaaaug

SEQ ID NO: 2461662 - RNA, 21 nt, Human
agaaaauauuuugucuaaaau

SEQ ID NO: 2461663 - RNA, 20 nt, Human
agaaaauauuuugucuaaaa

SEQ ID NO: 2461664 - RNA, 19 nt, Human
agaaaauauuuugucuaaa

SEQ ID NO: 2461665 - RNA, 13 nt, Human
agaaaaucacuua

SEQ ID NO: 2461666 - RNA, 19 nt, Human
agaaaaucauauugcuucu

SEQ ID NO: 2461667 - RNA, 13 nt, Human
acuuuaucacauu

SEQ ID NO: 2461668 - RNA, 14 nt, Human
acuuuaucacauua

SEQ ID NO: 2461669 - RNA, 21 nt, Human
acuuuaucacauuauuugcau

SEQ ID NO: 2461670 - RNA, 15 nt, Human
agaaaauaccaagga

SEQ ID NO: 2461671 - RNA, 19 nt, Human
agaaaauaguggugugauu

SEQ ID NO: 2461672 - RNA, 16 nt, Human
agaaaaucaggcuggc

SEQ ID NO: 2461673 - RNA, 18 nt, Human
agaaaauauuuugucuaa

SEQ ID NO: 2461674 - RNA, 16 nt, Human
agaaaauauuuugucu

SEQ ID NO: 2461675 - RNA, 10 nt, Human
agaaaauaua

SEQ ID NO: 2461676 - RNA, 14 nt, Human
acuuuucuuugugg

SEQ ID NO: 2461677 - RNA, 15 nt, Human
acuuuugcccuuuga

SEQ ID NO: 2461678 - RNA, 12 nt, Human
acuuuugacaaa

SEQ ID NO: 2461679 - RNA, 14 nt, Human
agaaaauaacaaua

SEQ ID NO: 2461680 - RNA, 17 nt, Human
agaaaauaaucauucuu

SEQ ID NO: 2461681 - RNA, 23 nt, Human
acuuuuaugauacuugaaaauua

SEQ ID NO: 2461682 - RNA, 23 nt, Human
acuuuuauuuccagugaaaucag

SEQ ID NO: 2461683 - RNA, 20 nt, Human
acuuuuaugauguauauuua

SEQ ID NO: 2461684 - RNA, 19 nt, Human
acuuuuaugauguauauuu

SEQ ID NO: 2461685 - RNA, 20 nt, Human
acuuuucauaaccuagccuu

SEQ ID NO: 2461686 - RNA, 22 nt, Human
acuuuuccauguaucuaccuca

SEQ ID NO: 2461687 - RNA, 21 nt, Human
acuuuuccauguaucuaccuc

SEQ ID NO: 2461688 - RNA, 17 nt, Human
acuuuuccauucccaau

SEQ ID NO: 2461689 - RNA, 17 nt, Human
acuuuuccccuguccug

SEQ ID NO: 2461690 - RNA, 20 nt, Human
acuuuuccguuucagcggaa

SEQ ID NO: 2461691 - RNA, 16 nt, Human
acuuuucuuucagcca

SEQ ID NO: 2461692 - RNA, 17 nt, Human
acuuuuccauguaucua

SEQ ID NO: 2461693 - RNA, 12 nt, Human
acuuuucaguga

SEQ ID NO: 2461694 - RNA, 20 nt, Human
acuuuuaaacuguguacaua

SEQ ID NO: 2461695 - RNA, 14 nt, Human
acuuuuaaggcagu

SEQ ID NO: 2461696 - RNA, 17 nt, Human
acuuuuaauaaacuuuu

SEQ ID NO: 2461697 - RNA, 24 nt, Human
acuuuauuuucugguagauagaaa

SEQ ID NO: 2461698 - RNA, 19 nt, Human
acuuuguucuggcucuucc

SEQ ID NO: 2461699 - RNA, 20 nt, Human
acuuuguucuggcucuucca

SEQ ID NO: 2461700 - RNA, 13 nt, Human
acuuuauuuucug

SEQ ID NO: 2461701 - RNA, 16 nt, Human
acuuuuaugauacuug

SEQ ID NO: 2461702 - RNA, 12 nt, Human
acuuuuaugaua

SEQ ID NO: 2461703 - RNA, 13 nt, Human
acuuuuauaaacu

SEQ ID NO: 2461704 - RNA, 17 nt, Human
acuuuguucuggcucuu

SEQ ID NO: 2461705 - RNA, 16 nt, Human
acuuuguucuggcucu

SEQ ID NO: 2461706 - RNA, 22 nt, Human
acuuuauuuucuauaauuuaaa

SEQ ID NO: 2461707 - RNA, 23 nt, Human
acuuuaucuaauaccucugugug

SEQ ID NO: 2461708 - RNA, 22 nt, Human
acuuuaucuugaauaauguaag

SEQ ID NO: 2461709 - RNA, 13 nt, Human
acuuuauugcauc

SEQ ID NO: 2461710 - RNA, 20 nt, Human
acuuuauuaaauacaaaacu

SEQ ID NO: 2461711 - RNA, 20 nt, Human
acuuuaugccggaugugcuu

SEQ ID NO: 2461712 - RNA, 15 nt, Human
acuuuaugccggaug

SEQ ID NO: 2461713 - RNA, 20 nt, Human
acuuuauuuauacacugucu

SEQ ID NO: 2461714 - RNA, 17 nt, Human
acaauucuuuauacaac

SEQ ID NO: 2461715 - RNA, 16 nt, Human
acaauucuuuauacaa

SEQ ID NO: 2461716 - RNA, 15 nt, Human
acaauucuuuauaca

SEQ ID NO: 2461717 - RNA, 14 nt, Human
acaauucuuuauac

SEQ ID NO: 2461718 - RNA, 13 nt, Human
acaauucuuuaua

SEQ ID NO: 2461719 - RNA, 22 nt, Human
acaauucuguuuuagguuaaaa

SEQ ID NO: 2461720 - RNA, 14 nt, Human
acacgcuccuuccu

SEQ ID NO: 2461721 - RNA, 14 nt, Human
acacgcuccucccu

SEQ ID NO: 2461722 - RNA, 14 nt, Human
acacgagcaggcua

SEQ ID NO: 2461723 - RNA, 19 nt, Human
acacgagcaggcuacuguc

SEQ ID NO: 2461724 - RNA, 21 nt, Human
acacauuuuguauaauuguau

SEQ ID NO: 2461725 - RNA, 14 nt, Human
acaccaaauaaaua

SEQ ID NO: 2461726 - RNA, 17 nt, Human
acacgcgugcacacacc

SEQ ID NO: 2461727 - RNA, 15 nt, Human
acacgcgugcacaca

SEQ ID NO: 2461728 - RNA, 21 nt, Human
acacgagcaggcuacugucag

SEQ ID NO: 2461729 - RNA, 22 nt, Human
acacgagguaugaggucuagga

SEQ ID NO: 2461730 - RNA, 13 nt, Human
acacgcacacaca

SEQ ID NO: 2461731 - RNA, 14 nt, Human
acacgcacacacac

SEQ ID NO: 2461732 - RNA, 20 nt, Human
acacgcacacacacacacag

SEQ ID NO: 2461733 - RNA, 23 nt, Human
acacgcacacacacacacaggag

SEQ ID NO: 2461734 - RNA, 13 nt, Human
acacagcucuucu

SEQ ID NO: 2461735 - RNA, 11 nt, Human
acacagcucuu

SEQ ID NO: 2461736 - RNA, 22 nt, Human
acacauuuuauuuuauuaugca

SEQ ID NO: 2461737 - RNA, 21 nt, Human
acacauuuuauuuuauuaugc

SEQ ID NO: 2461738 - RNA, 12 nt, Human
acacauuuugua

SEQ ID NO: 2461739 - RNA, 16 nt, Human
acacagaugaaacaca

SEQ ID NO: 2461740 - RNA, 14 nt, Human
acacagcagcaguu

SEQ ID NO: 2461741 - RNA, 20 nt, Human
acacauuuuuuaaaugcacc

SEQ ID NO: 2461742 - RNA, 22 nt, Human
acacauuuuuuaaaugcaccug

SEQ ID NO: 2461743 - RNA, 12 nt, Human
acacauuuuucu

SEQ ID NO: 2461744 - RNA, 16 nt, Human
acacauuuuguauaau

SEQ ID NO: 2461745 - RNA, 15 nt, Human
acacauuuuguauaa

SEQ ID NO: 2461746 - RNA, 14 nt, Human
acacauuuuguaua

SEQ ID NO: 2461747 - RNA, 13 nt, Human
acacauuuuguau

SEQ ID NO: 2461748 - RNA, 14 nt, Human
acacauuuuucaga

SEQ ID NO: 2461749 - RNA, 19 nt, Human
acacagaggcugccucucc

SEQ ID NO: 2461750 - RNA, 21 nt, Human
acacagaugaaacacaaacaa

SEQ ID NO: 2461751 - RNA, 14 nt, Human
acacagaugaaaca

SEQ ID NO: 2461752 - RNA, 19 nt, Human
acacagaguggucuuucug

SEQ ID NO: 2461753 - RNA, 21 nt, Human
acacagaguggucuuucugga

SEQ ID NO: 2461754 - RNA, 23 nt, Human
acacagaguggucuuucuggaga

SEQ ID NO: 2461755 - RNA, 17 nt, Human
acacagauuugagcuca

SEQ ID NO: 2461756 - RNA, 14 nt, Human
acacagcucugucc

SEQ ID NO: 2461757 - RNA, 20 nt, Human
acacagcucuguccugggag

SEQ ID NO: 2461758 - RNA, 19 nt, Human
acaauugaacuuaaauaaa

SEQ ID NO: 2461759 - RNA, 21 nt, Human
acaauucuuuauacaacagug

SEQ ID NO: 2461760 - RNA, 17 nt, Human
acaauugaacuuaaaua

SEQ ID NO: 2461761 - RNA, 19 nt, Human
acaauucuuuauacaacag

SEQ ID NO: 2461762 - RNA, 18 nt, Human
acaauucuuuauacaaca

SEQ ID NO: 2461763 - RNA, 12 nt, Human
acaauugaaaug

SEQ ID NO: 2461764 - RNA, 12 nt, Human
acaauuguaaua

SEQ ID NO: 2461765 - RNA, 20 nt, Human
acaauuguaaaacugaggca

SEQ ID NO: 2461766 - RNA, 13 nt, Human
acacagaggaaga

SEQ ID NO: 2461767 - RNA, 17 nt, Human
acacagaggaagagcag

SEQ ID NO: 2461768 - RNA, 21 nt, Human
acacagaggaagagcaggcac

SEQ ID NO: 2461769 - RNA, 12 nt, Human
acacagaggaag

SEQ ID NO: 2461770 - RNA, 19 nt, Human
aauuuuccuaauaaaguuc

SEQ ID NO: 2461771 - RNA, 15 nt, Human
aauuuuccuugaagc

SEQ ID NO: 2461772 - RNA, 14 nt, Human
aauuuuccuugaag

SEQ ID NO: 2461773 - RNA, 17 nt, Human
aauuuuccuugaagccg

SEQ ID NO: 2461774 - RNA, 16 nt, Human
aauuuuccuugaagcc

SEQ ID NO: 2461775 - RNA, 20 nt, Human
aauuuucuagacuuucuguu

SEQ ID NO: 2461776 - RNA, 17 nt, Human
aauuuucuagacuuucu

SEQ ID NO: 2461777 - RNA, 15 nt, Human
aauuuucuagacuuu

SEQ ID NO: 2461778 - RNA, 12 nt, Human
aauuuucuagac

SEQ ID NO: 2461779 - RNA, 18 nt, Human
aauuuucucccaggaagc

SEQ ID NO: 2461780 - RNA, 18 nt, Human
aauuuucuagacuuucug

SEQ ID NO: 2461781 - RNA, 22 nt, Human
aauuuucuggaauacaugaaau

SEQ ID NO: 2461782 - RNA, 13 nt, Human
aauuuucuucaug

SEQ ID NO: 2461783 - RNA, 21 nt, Human
aauuuucuguguucugaaguc

SEQ ID NO: 2461784 - RNA, 14 nt, Human
aauuuucuucaugc

SEQ ID NO: 2461785 - RNA, 13 nt, Human
aauuuugugaagc

SEQ ID NO: 2461786 - RNA, 20 nt, Human
aauuuuguucuaguuuucag

SEQ ID NO: 2461787 - RNA, 19 nt, Human
aauuuuguucuaguuuuca

SEQ ID NO: 2461788 - RNA, 13 nt, Human
aauuuuguugcug

SEQ ID NO: 2461789 - RNA, 17 nt, Human
aauuuuguauuuuccaa

SEQ ID NO: 2461790 - RNA, 16 nt, Human
aauuuuguauuuucca

SEQ ID NO: 2461791 - RNA, 15 nt, Human
aauuuuguauuuucc

SEQ ID NO: 2461792 - RNA, 14 nt, Human
aauuuuguauuuuc

SEQ ID NO: 2461793 - RNA, 23 nt, Human
aauuuuguauuuuccaagugugc

SEQ ID NO: 2461794 - RNA, 21 nt, Human
aauuuuguauuuuccaagugu

SEQ ID NO: 2461795 - RNA, 13 nt, Human
aauuuuguauuuu

SEQ ID NO: 2461796 - RNA, 12 nt, Human
aauuuuguauuu

SEQ ID NO: 2461797 - RNA, 16 nt, Human
aauuuuguaugaaaaa

SEQ ID NO: 2461798 - RNA, 14 nt, Human
aauuuuguacaaau

SEQ ID NO: 2461799 - RNA, 15 nt, Human
aauuuuguaacgaag

SEQ ID NO: 2461800 - RNA, 13 nt, Human
aauuuuguacaaa

SEQ ID NO: 2461801 - RNA, 23 nt, Human
aauuuugguuguauucuuugaug

SEQ ID NO: 2461802 - RNA, 22 nt, Human
aauuuugguuguauucuuugau

SEQ ID NO: 2461803 - RNA, 20 nt, Human
aauuuugguuguauucuuug

SEQ ID NO: 2461804 - RNA, 19 nt, Human
aauuuugguuguauucuuu

SEQ ID NO: 2461805 - RNA, 19 nt, Human
aauuuucuucaugcaauga

SEQ ID NO: 2461806 - RNA, 22 nt, Human
aauuuucuucaugcaaugacau

SEQ ID NO: 2461807 - RNA, 15 nt, Human
acaaggcuguugcau

SEQ ID NO: 2461808 - RNA, 22 nt, Human
acaaggcugaccaagagagaaa

SEQ ID NO: 2461809 - RNA, 15 nt, Human
acaaggcaaggcugu

SEQ ID NO: 2461810 - RNA, 23 nt, Human
acaagaaaucccuguuuaauauu

SEQ ID NO: 2461811 - RNA, 21 nt, Human
acaagaaaucccuguuuaaua

SEQ ID NO: 2461812 - RNA, 20 nt, Human
acaaggcaaggcugucaauu

SEQ ID NO: 2461813 - RNA, 18 nt, Human
acaaggccaucugggcuc

SEQ ID NO: 2461814 - RNA, 11 nt, Human
acaaggcccca

SEQ ID NO: 2461815 - RNA, 13 nt, Human
acaaggccccaga

SEQ ID NO: 2461816 - RNA, 17 nt, Human
acaaggcauucaagugu

SEQ ID NO: 2461817 - RNA, 23 nt, Human
acaaggcauucaaguguacagug

SEQ ID NO: 2461818 - RNA, 15 nt, Human
acaaggccccagaga

SEQ ID NO: 2461819 - RNA, 16 nt, Human
acaaggccccagagac

SEQ ID NO: 2461820 - RNA, 17 nt, Human
acaaggccccagagacu

SEQ ID NO: 2461821 - RNA, 18 nt, Human
acaaggccccagagacuc

SEQ ID NO: 2461822 - RNA, 17 nt, Human
acaaggcuagaucauga

SEQ ID NO: 2461823 - RNA, 13 nt, Human
acaaggcugacca

SEQ ID NO: 2461824 - RNA, 18 nt, Human
acaaggcugaccaagaga

SEQ ID NO: 2461825 - RNA, 20 nt, Human
acaaggcugaccaagagaga

SEQ ID NO: 2461826 - RNA, 20 nt, Human
acaaaauucgaccugauuua

SEQ ID NO: 2461827 - RNA, 14 nt, Human
acaaaauuucuauu

SEQ ID NO: 2461828 - RNA, 15 nt, Human
acaaaauuuaguuuu

SEQ ID NO: 2461829 - RNA, 20 nt, Human
acaaaauuuaguuuuuguuc

SEQ ID NO: 2461830 - RNA, 22 nt, Human
acaaaauguaggguuauaauaa

SEQ ID NO: 2461831 - RNA, 14 nt, Human
acaacgugcauugu

SEQ ID NO: 2461832 - RNA, 13 nt, Human
acaacgugcauug

SEQ ID NO: 2461833 - RNA, 18 nt, Human
acaacgugcauugugcuu

SEQ ID NO: 2461834 - RNA, 17 nt, Human
acaacgugcauugugcu

SEQ ID NO: 2461835 - RNA, 16 nt, Human
acaacgugcauugugc

SEQ ID NO: 2461836 - RNA, 15 nt, Human
acaacgugcauugug

SEQ ID NO: 2461837 - RNA, 19 nt, Human
acaaacaaaauuucuauua

SEQ ID NO: 2461838 - RNA, 18 nt, Human
acaaacaaaauuucuauu

SEQ ID NO: 2461839 - RNA, 16 nt, Human
acaaacaaaauuucua

SEQ ID NO: 2461840 - RNA, 18 nt, Human
acaaccuucuguggcuca

SEQ ID NO: 2461841 - RNA, 15 nt, Human
acaacgaggaagccc

SEQ ID NO: 2461842 - RNA, 14 nt, Human
acaaggcaaggcug

SEQ ID NO: 2461843 - RNA, 12 nt, Human
acaaggcaaggc

SEQ ID NO: 2461844 - RNA, 16 nt, Human
acaagaaaucccuguu

SEQ ID NO: 2461845 - RNA, 15 nt, Human
acaagaaaucccugu

SEQ ID NO: 2461846 - RNA, 17 nt, Human
acaaggauugcuacugu

SEQ ID NO: 2461847 - RNA, 14 nt, Human
acaacgaggaagcc

SEQ ID NO: 2461848 - RNA, 16 nt, Human
acaagaaaaaaugaau

SEQ ID NO: 2461849 - RNA, 16 nt, Human
acaacuaggcuucagc

SEQ ID NO: 2461850 - RNA, 13 nt, Human
acaacuuugccag

SEQ ID NO: 2461851 - RNA, 17 nt, Human
acagccacggccaggcc

SEQ ID NO: 2461852 - RNA, 16 nt, Human
acagccacggccaggc

SEQ ID NO: 2461853 - RNA, 20 nt, Human
acagccacacacacagaaaa

SEQ ID NO: 2461854 - RNA, 21 nt, Human
acagccacacacacagaaaau

SEQ ID NO: 2461855 - RNA, 22 nt, Human
acagccacacacacagaaaaua

SEQ ID NO: 2461856 - RNA, 23 nt, Human
acagccacacacacagaaaauau

SEQ ID NO: 2461857 - RNA, 15 nt, Human
acagccacggccagg

SEQ ID NO: 2461858 - RNA, 18 nt, Human
acagccacggccaggcca

SEQ ID NO: 2461859 - RNA, 18 nt, Human
acagcucuucuccaggcu

SEQ ID NO: 2461860 - RNA, 17 nt, Human
acagcucuguguugcca

SEQ ID NO: 2461861 - RNA, 19 nt, Human
acagcucuguguugccaug

SEQ ID NO: 2461862 - RNA, 15 nt, Human
acaggaucagucuga

SEQ ID NO: 2461863 - RNA, 17 nt, Human
acagcucuucuccaggc

SEQ ID NO: 2461864 - RNA, 16 nt, Human
acagcucuucuccagg

SEQ ID NO: 2461865 - RNA, 14 nt, Human
acaggcaaaugcau

SEQ ID NO: 2461866 - RNA, 16 nt, Human
acaggcaacugaggca

SEQ ID NO: 2461867 - RNA, 18 nt, Human
acaggcaacugaggcaga

SEQ ID NO: 2461868 - RNA, 19 nt, Human
acaggcaacugaggcagac

SEQ ID NO: 2461869 - RNA, 19 nt, Human
acaggcaaaauccuugcuu

SEQ ID NO: 2461870 - RNA, 20 nt, Human
acaggauuugaacucagauc

SEQ ID NO: 2461871 - RNA, 12 nt, Human
acaggcaagcac

SEQ ID NO: 2461872 - RNA, 18 nt, Human
acaggcaaugcuggcugu

SEQ ID NO: 2461873 - RNA, 21 nt, Human
acaggaugaugacuauggaaa

SEQ ID NO: 2461874 - RNA, 20 nt, Human
acagcucuguguugccaugu

SEQ ID NO: 2461875 - RNA, 14 nt, Human
acaggauuauugga

SEQ ID NO: 2461876 - RNA, 14 nt, Human
acaggaugaaggca

SEQ ID NO: 2461877 - RNA, 22 nt, Human
acaggauccuauucucaccagg

SEQ ID NO: 2461878 - RNA, 21 nt, Human
acaggauccuauucucaccag

SEQ ID NO: 2461879 - RNA, 18 nt, Human
acaggaugaccuggauaa

SEQ ID NO: 2461880 - RNA, 19 nt, Human
acaggaugggggcuggccu

SEQ ID NO: 2461881 - RNA, 22 nt, Human
acacugcacucuuaagcuuccg

SEQ ID NO: 2461882 - RNA, 18 nt, Human
acacugcaagagccuugg

SEQ ID NO: 2461883 - RNA, 21 nt, Human
acacuggaggagagaagaaug

SEQ ID NO: 2461884 - RNA, 20 nt, Human
acacuggaggagagaagaau

SEQ ID NO: 2461885 - RNA, 19 nt, Human
acacuggaggagagaagaa

SEQ ID NO: 2461886 - RNA, 18 nt, Human
acacuggaggagagaaga

SEQ ID NO: 2461887 - RNA, 22 nt, Human
acacuggaggagagaagaauga

SEQ ID NO: 2461888 - RNA, 22 nt, Human
acacuggcguagaaguuuuugu

SEQ ID NO: 2461889 - RNA, 14 nt, Human
acacuggccccuca

SEQ ID NO: 2461890 - RNA, 13 nt, Human
acacuggccccuc

SEQ ID NO: 2461891 - RNA, 12 nt, Human
acacuggccccu

SEQ ID NO: 2461892 - RNA, 13 nt, Human
acacuggccccua

SEQ ID NO: 2461893 - RNA, 19 nt, Human
acacugguauuccugccuc

SEQ ID NO: 2461894 - RNA, 18 nt, Human
acacugguauuccugccu

SEQ ID NO: 2461895 - RNA, 17 nt, Human
acacugggugcccaagc

SEQ ID NO: 2461896 - RNA, 21 nt, Human
acacuggcugccagcuauuuu

SEQ ID NO: 2461897 - RNA, 16 nt, Human
acacuggcugccagcu

SEQ ID NO: 2461898 - RNA, 22 nt, Human
acacuggcugccagcuauuuuu

SEQ ID NO: 2461899 - RNA, 21 nt, Human
acacuggggugccgccugccc

SEQ ID NO: 2461900 - RNA, 16 nt, Human
acacuggccccuagaa

SEQ ID NO: 2461901 - RNA, 14 nt, Human
acacuggcugccag

SEQ ID NO: 2461902 - RNA, 21 nt, Human
acacuggcucauauuccugca

SEQ ID NO: 2461903 - RNA, 14 nt, Human
acacugcauguuug

SEQ ID NO: 2461904 - RNA, 15 nt, Human
acacugcauguuugu

SEQ ID NO: 2461905 - RNA, 20 nt, Human
acacugcaggcaucacagcu

SEQ ID NO: 2461906 - RNA, 16 nt, Human
acacugcaggcaucac

SEQ ID NO: 2461907 - RNA, 23 nt, Human
acacugcuuguguuuuuaacuca

SEQ ID NO: 2461908 - RNA, 16 nt, Human
acacuggacuccggcc

SEQ ID NO: 2461909 - RNA, 21 nt, Human
acacugcaggcaucacagcua

SEQ ID NO: 2461910 - RNA, 19 nt, Human
acacugcuuguguuuuuaa

SEQ ID NO: 2461911 - RNA, 15 nt, Human
acagaggcagcccca

SEQ ID NO: 2461912 - RNA, 14 nt, Human
acagaggcagcccc

SEQ ID NO: 2461913 - RNA, 14 nt, Human
acagacacaggccc

SEQ ID NO: 2461914 - RNA, 13 nt, Human
acagacacaggcc

SEQ ID NO: 2461915 - RNA, 23 nt, Human
acagaggcagccccauucugccu

SEQ ID NO: 2461916 - RNA, 19 nt, Human
acagaggcagccccauucu

SEQ ID NO: 2461917 - RNA, 17 nt, Human
acagaggccccagccuc

SEQ ID NO: 2461918 - RNA, 18 nt, Human
acagaggccccagccucc

SEQ ID NO: 2461919 - RNA, 12 nt, Human
acagaggccugc

SEQ ID NO: 2461920 - RNA, 22 nt, Human
acagaggccccagccucccuga

SEQ ID NO: 2461921 - RNA, 15 nt, Human
acagaggccccagcc

SEQ ID NO: 2461922 - RNA, 16 nt, Human
acagaggccccagccu

SEQ ID NO: 2461923 - RNA, 11 nt, Human
acagacacagg

SEQ ID NO: 2461924 - RNA, 13 nt, Human
acagacaaagcgu

SEQ ID NO: 2461925 - RNA, 21 nt, Human
acagaauguuuuacugugaaa

SEQ ID NO: 2461926 - RNA, 18 nt, Human
acagacaaaaacagccuc

SEQ ID NO: 2461927 - RNA, 19 nt, Human
acagacaaaaacagccuca

SEQ ID NO: 2461928 - RNA, 20 nt, Human
acagacaaaaacagccucac

SEQ ID NO: 2461929 - RNA, 18 nt, Human
acagaauugugucugcag

SEQ ID NO: 2461930 - RNA, 20 nt, Human
acagaauguuuuacugugaa

SEQ ID NO: 2461931 - RNA, 17 nt, Human
acagaauucugcuaccu

SEQ ID NO: 2461932 - RNA, 15 nt, Human
acagaauucugcuac

SEQ ID NO: 2461933 - RNA, 21 nt, Human
acacuggugugaccugagggc

SEQ ID NO: 2461934 - RNA, 20 nt, Human
acacuggugugaccugaggg

SEQ ID NO: 2461935 - RNA, 16 nt, Human
acacuggugugaccug

SEQ ID NO: 2461936 - RNA, 14 nt, Human
acacuggugacugc

SEQ ID NO: 2461937 - RNA, 21 nt, Human
acacugguauuccugccucca

SEQ ID NO: 2461938 - RNA, 15 nt, Human
acacuguacugcaau

SEQ ID NO: 2461939 - RNA, 23 nt, Human
acagaaucauaugauucugcuuu

SEQ ID NO: 2461940 - RNA, 22 nt, Human
acagcauaacaagguccaagau

SEQ ID NO: 2461941 - RNA, 20 nt, Human
acagccaacacgcaccugcc

SEQ ID NO: 2461942 - RNA, 21 nt, Human
acagccaacacgcaccugccu

SEQ ID NO: 2461943 - RNA, 22 nt, Human
acagccaacacgcaccugccuc

SEQ ID NO: 2461944 - RNA, 13 nt, Human
acagcaucagggu

SEQ ID NO: 2461945 - RNA, 15 nt, Human
acagcauaacaaggu

SEQ ID NO: 2461946 - RNA, 23 nt, Human
acagccaacagguggcaggacca

SEQ ID NO: 2461947 - RNA, 13 nt, Human
acagccaacaggu

SEQ ID NO: 2461948 - RNA, 24 nt, Human
acagccaacacgcaccugccucag

SEQ ID NO: 2461949 - RNA, 17 nt, Human
acagccaacuauggccu

SEQ ID NO: 2461950 - RNA, 12 nt, Human
acagccacacac

SEQ ID NO: 2461951 - RNA, 13 nt, Human
acagccacacaca

SEQ ID NO: 2461952 - RNA, 14 nt, Human
acagccacacacac

SEQ ID NO: 2461953 - RNA, 15 nt, Human
acagccacacacaca

SEQ ID NO: 2461954 - RNA, 16 nt, Human
acagccacacacacag

SEQ ID NO: 2461955 - RNA, 17 nt, Human
acagccacacacacaga

SEQ ID NO: 2461956 - RNA, 18 nt, Human
acagccacacacacagaa

SEQ ID NO: 2461957 - RNA, 19 nt, Human
acagccacacacacagaaa

SEQ ID NO: 2461958 - RNA, 10 nt, Human
acagccacac

SEQ ID NO: 2461959 - RNA, 11 nt, Human
acagccacaca

SEQ ID NO: 2461960 - RNA, 19 nt, Human
acagccaacuauggccugu

SEQ ID NO: 2461961 - RNA, 22 nt, Human
acagcaguugaaaagacuccaa

SEQ ID NO: 2461962 - RNA, 23 nt, Human
acagcaguugaaaagacuccaaa

SEQ ID NO: 2461963 - RNA, 21 nt, Human
acagcaguugaaaagacucca

SEQ ID NO: 2461964 - RNA, 19 nt, Human
acagagugagacucugucu

SEQ ID NO: 2461965 - RNA, 15 nt, Human
acagagugagacucu

SEQ ID NO: 2461966 - RNA, 14 nt, Human
acagaggggguggc

SEQ ID NO: 2461967 - RNA, 16 nt, Human
acagagggaagaaaag

SEQ ID NO: 2461968 - RNA, 13 nt, Human
acagagucugggu

SEQ ID NO: 2461969 - RNA, 23 nt, Human
acagagucucacuguugcccagg

SEQ ID NO: 2461970 - RNA, 14 nt, Human
acagaggccugccc

SEQ ID NO: 2461971 - RNA, 15 nt, Human
acagagggaagaaaa

SEQ ID NO: 2461972 - RNA, 20 nt, Human
acagagggaagaaaagagcu

SEQ ID NO: 2461973 - RNA, 13 nt, Human
acagaggccugcc

SEQ ID NO: 2461974 - RNA, 17 nt, Human
acagaggcuauuguccc

SEQ ID NO: 2461975 - RNA, 18 nt, Human
acaugugcacaugcacgu

SEQ ID NO: 2461976 - RNA, 16 nt, Human
acaugugcacaugcac

SEQ ID NO: 2461977 - RNA, 16 nt, Human
acaugugacauuuaua

SEQ ID NO: 2461978 - RNA, 15 nt, Human
acaugugacauuuau

SEQ ID NO: 2461979 - RNA, 14 nt, Human
acaugugacauuua

SEQ ID NO: 2461980 - RNA, 13 nt, Human
acaugugacauuu

SEQ ID NO: 2461981 - RNA, 21 nt, Human
acaugugacacauaugcaccu

SEQ ID NO: 2461982 - RNA, 15 nt, Human
acaugugacacauau

SEQ ID NO: 2461983 - RNA, 20 nt, Human
acaugcauuacugcaugcac

SEQ ID NO: 2461984 - RNA, 19 nt, Human
acaugcauacuucaaaagu

SEQ ID NO: 2461985 - RNA, 12 nt, Human
acaugcauuuga

SEQ ID NO: 2461986 - RNA, 12 nt, Human
acaugcauacac

SEQ ID NO: 2461987 - RNA, 13 nt, Human
acaugcauacaca

SEQ ID NO: 2461988 - RNA, 16 nt, Human
acaugauuuccuugaa

SEQ ID NO: 2461989 - RNA, 17 nt, Human
acaugauuuccuugaau

SEQ ID NO: 2461990 - RNA, 23 nt, Human
acaugcagcugcacccucccucc

SEQ ID NO: 2461991 - RNA, 20 nt, Human
acaugcagcccaugcccacc

SEQ ID NO: 2461992 - RNA, 22 nt, Human
acaugcagcccaugcccaccug

SEQ ID NO: 2461993 - RNA, 14 nt, Human
acaugcauacacac

SEQ ID NO: 2461994 - RNA, 15 nt, Human
acaugcauacacaca

SEQ ID NO: 2461995 - RNA, 16 nt, Human
acaugcauacacacac

SEQ ID NO: 2461996 - RNA, 17 nt, Human
acaugcauacacacaca

SEQ ID NO: 2461997 - RNA, 21 nt, Human
acaugcauacuucaaaaguau

SEQ ID NO: 2461998 - RNA, 16 nt, Human
acaugcauuacugcau

SEQ ID NO: 2461999 - RNA, 24 nt, Human
acaugcauacacacacacacacag

SEQ ID NO: 2462000 - RNA, 17 nt, Human
acaugcauacuucaaaa

SEQ ID NO: 2462001 - RNA, 16 nt, Human
acaugcauacuucaaa

SEQ ID NO: 2462002 - RNA, 15 nt, Human
acaucagcacgauuu

SEQ ID NO: 2462003 - RNA, 17 nt, Human
acaucagcacgauuucu

SEQ ID NO: 2462004 - RNA, 15 nt, Human
acauaauuaaagugu

SEQ ID NO: 2462005 - RNA, 13 nt, Human
acauaauuaaagu

SEQ ID NO: 2462006 - RNA, 16 nt, Human
acauaauuaaaguguc

SEQ ID NO: 2462007 - RNA, 18 nt, Human
acaucagcacgauuucug

SEQ ID NO: 2462008 - RNA, 15 nt, Human
acaugauuccuuccu

SEQ ID NO: 2462009 - RNA, 22 nt, Human
acaugauuccuuccuguucuga

SEQ ID NO: 2462010 - RNA, 14 nt, Human
acaugauuccuucc

SEQ ID NO: 2462011 - RNA, 13 nt, Human
acaugauuuccuu

SEQ ID NO: 2462012 - RNA, 13 nt, Human
acaugauucauuu

SEQ ID NO: 2462013 - RNA, 13 nt, Human
acaugauuccuuc

SEQ ID NO: 2462014 - RNA, 19 nt, Human
acaugaucuucuuuauaau

SEQ ID NO: 2462015 - RNA, 16 nt, Human
acauguuuccucuagu

SEQ ID NO: 2462016 - RNA, 23 nt, Human
acauguuucuuuguaaugaaaac

SEQ ID NO: 2462017 - RNA, 22 nt, Human
acauguuucuuuguaaugaaaa

SEQ ID NO: 2462018 - RNA, 19 nt, Human
acauguuucuuuguaauga

SEQ ID NO: 2462019 - RNA, 11 nt, Human
acauguuuccu

SEQ ID NO: 2462020 - RNA, 23 nt, Human
acauguuuauuuauucugcauuu

SEQ ID NO: 2462021 - RNA, 21 nt, Human
acauguuuauuuauucugcau

SEQ ID NO: 2462022 - RNA, 21 nt, Human
acaugugacauuuauauauug

SEQ ID NO: 2462023 - RNA, 17 nt, Human
acaugcauuugagguca

SEQ ID NO: 2462024 - RNA, 20 nt, Human
acauaauguauuguugguaa

SEQ ID NO: 2462025 - RNA, 17 nt, Human
acauaaugggguccugg

SEQ ID NO: 2462026 - RNA, 23 nt, Human
acauaaugcgugcauaccacuuu

SEQ ID NO: 2462027 - RNA, 22 nt, Human
acauaaugcgugcauaccacuu

SEQ ID NO: 2462028 - RNA, 21 nt, Human
acauaaugcgugcauaccacu

SEQ ID NO: 2462029 - RNA, 23 nt, Human
acaggguuuggcugugucuaaac

SEQ ID NO: 2462030 - RNA, 22 nt, Human
acaggguuuggcugugucuaaa

SEQ ID NO: 2462031 - RNA, 19 nt, Human
acaggguuuugccauguug

SEQ ID NO: 2462032 - RNA, 15 nt, Human
acaggguuucaccau

SEQ ID NO: 2462033 - RNA, 14 nt, Human
acaggguugggccc

SEQ ID NO: 2462034 - RNA, 24 nt, Human
acagggucugcucuuucucugcca

SEQ ID NO: 2462035 - RNA, 16 nt, Human
acaggguucaaaaugu

SEQ ID NO: 2462036 - RNA, 23 nt, Human
acaggcaaugcuggcuguuggcu

SEQ ID NO: 2462037 - RNA, 19 nt, Human
acaggcaaugcuggcuguu

SEQ ID NO: 2462038 - RNA, 23 nt, Human
acagggucugcucuuucucugcc

SEQ ID NO: 2462039 - RNA, 22 nt, Human
acagggucugcucuuucucugc

SEQ ID NO: 2462040 - RNA, 15 nt, Human
acagggucugcucuu

SEQ ID NO: 2462041 - RNA, 14 nt, Human
acagggucugcucu

SEQ ID NO: 2462042 - RNA, 23 nt, Human
acagggucucuagugcugugaaa

SEQ ID NO: 2462043 - RNA, 12 nt, Human
acaggcacaaaa

SEQ ID NO: 2462044 - RNA, 22 nt, Human
acaggcaacugaggcagacagc

SEQ ID NO: 2462045 - RNA, 14 nt, Human
acauuuauucugcu

SEQ ID NO: 2462046 - RNA, 12 nt, Human
acauuucccugu

SEQ ID NO: 2462047 - RNA, 21 nt, Human
acauuuccccagaccugagcu

SEQ ID NO: 2462048 - RNA, 13 nt, Human
acauuucccaggg

SEQ ID NO: 2462049 - RNA, 15 nt, Human
acauuuauuuuuaua

SEQ ID NO: 2462050 - RNA, 15 nt, Human
acauuuauucugcuc

SEQ ID NO: 2462051 - RNA, 19 nt, Human
acauuuguucuauagcuuu

SEQ ID NO: 2462052 - RNA, 21 nt, Human
acauuuguguaaacaguguuu

SEQ ID NO: 2462053 - RNA, 14 nt, Human
acauuuuaaauaaa

SEQ ID NO: 2462054 - RNA, 20 nt, Human
acauuuuaaauaaaagaaaa

SEQ ID NO: 2462055 - RNA, 17 nt, Human
acauuuuaaauaaaaga

SEQ ID NO: 2462056 - RNA, 15 nt, Human
acauuuuaaauaaaa

SEQ ID NO: 2462057 - RNA, 15 nt, Human
acauuuuaaauggac

SEQ ID NO: 2462058 - RNA, 15 nt, Human
accaaguauuuauua

SEQ ID NO: 2462059 - RNA, 19 nt, Human
accaaggucuucagccauc

SEQ ID NO: 2462060 - RNA, 15 nt, Human
accaaggucuucagc

SEQ ID NO: 2462061 - RNA, 16 nt, Human
accaaguggaccuuga

SEQ ID NO: 2462062 - RNA, 23 nt, Human
accaaguuauaaaucaaugucac

SEQ ID NO: 2462063 - RNA, 23 nt, Human
accaaguuucagguauuaagaaa

SEQ ID NO: 2462064 - RNA, 14 nt, Human
accaauagauuccc

SEQ ID NO: 2462065 - RNA, 13 nt, Human
accaauagauucc

SEQ ID NO: 2462066 - RNA, 13 nt, Human
accacccugaggc

SEQ ID NO: 2462067 - RNA, 23 nt, Human
accaauagggcugagcucucugu

SEQ ID NO: 2462068 - RNA, 20 nt, Human
accaauauuauacuaagaaa

SEQ ID NO: 2462069 - RNA, 23 nt, Human
accaagccaagggaaccuguguc

SEQ ID NO: 2462070 - RNA, 20 nt, Human
accaagccaagggaaccugu

SEQ ID NO: 2462071 - RNA, 17 nt, Human
accaagcaggaagcuca

SEQ ID NO: 2462072 - RNA, 12 nt, Human
accaagcccagu

SEQ ID NO: 2462073 - RNA, 13 nt, Human
accaagcaggaaa

SEQ ID NO: 2462074 - RNA, 17 nt, Human
accaagcacagcagccu

SEQ ID NO: 2462075 - RNA, 14 nt, Human
accaagcacagcag

SEQ ID NO: 2462076 - RNA, 16 nt, Human
accaagcacagcagcc

SEQ ID NO: 2462077 - RNA, 14 nt, Human
accaagcaucuugg

SEQ ID NO: 2462078 - RNA, 24 nt, Human
accaagcaggaagcucagacuggu

SEQ ID NO: 2462079 - RNA, 13 nt, Human
accaagcaggaag

SEQ ID NO: 2462080 - RNA, 14 nt, Human
accaagcaggaagc

SEQ ID NO: 2462081 - RNA, 15 nt, Human
accaagcaggaagcu

SEQ ID NO: 2462082 - RNA, 16 nt, Human
accaagcaggaagcuc

SEQ ID NO: 2462083 - RNA, 18 nt, Human
accagaugaugggggagg

SEQ ID NO: 2462084 - RNA, 17 nt, Human
accagaugaugggggag

SEQ ID NO: 2462085 - RNA, 17 nt, Human
accagcaauauguaaau

SEQ ID NO: 2462086 - RNA, 17 nt, Human
accagcaauauaucuga

SEQ ID NO: 2462087 - RNA, 23 nt, Human
accagcaacuugucuuuuucugg

SEQ ID NO: 2462088 - RNA, 13 nt, Human
accagcagaaaug

SEQ ID NO: 2462089 - RNA, 15 nt, Human
accagcauuccuuuu

SEQ ID NO: 2462090 - RNA, 15 nt, Human
accagcacugucuca

SEQ ID NO: 2462091 - RNA, 17 nt, Human
accagccaguaaauggg

SEQ ID NO: 2462092 - RNA, 20 nt, Human
accagccaggcucugugcug

SEQ ID NO: 2462093 - RNA, 19 nt, Human
accagccaggcucugugcu

SEQ ID NO: 2462094 - RNA, 17 nt, Human
accagccaggcucugug

SEQ ID NO: 2462095 - RNA, 14 nt, Human
accagccagauccu

SEQ ID NO: 2462096 - RNA, 15 nt, Human
accagccagauccuc

SEQ ID NO: 2462097 - RNA, 17 nt, Human
accagcauuccuuuuga

SEQ ID NO: 2462098 - RNA, 16 nt, Human
accagcacugucucag

SEQ ID NO: 2462099 - RNA, 21 nt, Human
accagccauuggcuauuuaaa

SEQ ID NO: 2462100 - RNA, 23 nt, Human
accagccaggcucugugcugacc

SEQ ID NO: 2462101 - RNA, 22 nt, Human
accagccauacuuaucucucug

SEQ ID NO: 2462102 - RNA, 15 nt, Human
accagcccagauguu

SEQ ID NO: 2462103 - RNA, 14 nt, Human
accagcccagaugu

SEQ ID NO: 2462104 - RNA, 19 nt, Human
accagagcugccaccugcc

SEQ ID NO: 2462105 - RNA, 20 nt, Human
accaccuaggccacuccucc

SEQ ID NO: 2462106 - RNA, 21 nt, Human
accaccuaggccacuccucca

SEQ ID NO: 2462107 - RNA, 16 nt, Human
accaccucacuccugu

SEQ ID NO: 2462108 - RNA, 15 nt, Human
accaccucacuccug

SEQ ID NO: 2462109 - RNA, 13 nt, Human
accaccgcucccc

SEQ ID NO: 2462110 - RNA, 14 nt, Human
accaccgcucccca

SEQ ID NO: 2462111 - RNA, 15 nt, Human
accaccgcuccccag

SEQ ID NO: 2462112 - RNA, 17 nt, Human
accaccgcuccccagcc

SEQ ID NO: 2462113 - RNA, 18 nt, Human
accaccgcuccccagccc

SEQ ID NO: 2462114 - RNA, 19 nt, Human
accaccgcuccccagccca

SEQ ID NO: 2462115 - RNA, 21 nt, Human
accaccgcuccccagcccagg

SEQ ID NO: 2462116 - RNA, 18 nt, Human
accaccuaaucaggcuga

SEQ ID NO: 2462117 - RNA, 23 nt, Human
accaccgcuccccagcccagggu

SEQ ID NO: 2462118 - RNA, 19 nt, Human
accaccuaccuuacaguga

SEQ ID NO: 2462119 - RNA, 16 nt, Human
accaccuaggccacuc

SEQ ID NO: 2462120 - RNA, 17 nt, Human
accaccuaggccacucc

SEQ ID NO: 2462121 - RNA, 18 nt, Human
accaccuaggccacuccu

SEQ ID NO: 2462122 - RNA, 13 nt, Human
accagaucauugu

SEQ ID NO: 2462123 - RNA, 20 nt, Human
accagauaaaauuauagaug

SEQ ID NO: 2462124 - RNA, 20 nt, Human
accagauaagaaugcugguu

SEQ ID NO: 2462125 - RNA, 21 nt, Human
accagauaagaaugcugguuu

SEQ ID NO: 2462126 - RNA, 15 nt, Human
accagaggaaucacu

SEQ ID NO: 2462127 - RNA, 18 nt, Human
accagaggaaucacucuu

SEQ ID NO: 2462128 - RNA, 17 nt, Human
accagagcuguggagag

SEQ ID NO: 2462129 - RNA, 14 nt, Human
accaccucccucac

SEQ ID NO: 2462130 - RNA, 22 nt, Human
accagaggcugcagaaggccaa

SEQ ID NO: 2462131 - RNA, 21 nt, Human
accagaggcugcagaaggcca

SEQ ID NO: 2462132 - RNA, 19 nt, Human
accagaggcugcagaaggc

SEQ ID NO: 2462133 - RNA, 15 nt, Human
accagaggcugcaga

SEQ ID NO: 2462134 - RNA, 14 nt, Human
accagaggcugcag

SEQ ID NO: 2462135 - RNA, 14 nt, Human
accauauuaccaca

SEQ ID NO: 2462136 - RNA, 16 nt, Human
accauauuaccacaga

SEQ ID NO: 2462137 - RNA, 11 nt, Human
acccccugaau

SEQ ID NO: 2462138 - RNA, 14 nt, Human
acccccugcaaagc

SEQ ID NO: 2462139 - RNA, 17 nt, Human
acccccugcaaagccca

SEQ ID NO: 2462140 - RNA, 22 nt, Human
acccccugcaaagcccagcuug

SEQ ID NO: 2462141 - RNA, 18 nt, Human
acccccugcaaagcccag

SEQ ID NO: 2462142 - RNA, 20 nt, Human
acccccugcaaagcccagcu

SEQ ID NO: 2462143 - RNA, 16 nt, Human
acccauguuucucugg

SEQ ID NO: 2462144 - RNA, 14 nt, Human
acccaugugccaag

SEQ ID NO: 2462145 - RNA, 16 nt, Human
acccaugggcucugac

SEQ ID NO: 2462146 - RNA, 17 nt, Human
acccaugggcucugaca

SEQ ID NO: 2462147 - RNA, 14 nt, Human
acccaugggcucug

SEQ ID NO: 2462148 - RNA, 17 nt, Human
acccaugugccaaggug

SEQ ID NO: 2462149 - RNA, 19 nt, Human
acccauuccauuuaucuuu

SEQ ID NO: 2462150 - RNA, 17 nt, Human
acccauuccauuuaucu

SEQ ID NO: 2462151 - RNA, 13 nt, Human
acccauuccuauu

SEQ ID NO: 2462152 - RNA, 23 nt, Human
acccauuuaaauuuuuuuccuua

SEQ ID NO: 2462153 - RNA, 20 nt, Human
acccauuuaaauuuuuuucc

SEQ ID NO: 2462154 - RNA, 17 nt, Human
acccauuccuauuucuu

SEQ ID NO: 2462155 - RNA, 19 nt, Human
acccauucuacacagagca

SEQ ID NO: 2462156 - RNA, 22 nt, Human
acccauucguggugaucaauua

SEQ ID NO: 2462157 - RNA, 18 nt, Human
acccaguugccaucugcg

SEQ ID NO: 2462158 - RNA, 17 nt, Human
acccaguugccaucugc

SEQ ID NO: 2462159 - RNA, 22 nt, Human
acccaccguggaggaggaaggc

SEQ ID NO: 2462160 - RNA, 22 nt, Human
acccaccguccgcccugcuccu

SEQ ID NO: 2462161 - RNA, 20 nt, Human
acccaccguccgcccugcuc

SEQ ID NO: 2462162 - RNA, 15 nt, Human
acccaccguggagga

SEQ ID NO: 2462163 - RNA, 13 nt, Human
acccaccucccug

SEQ ID NO: 2462164 - RNA, 14 nt, Human
acccaccucccugc

SEQ ID NO: 2462165 - RNA, 15 nt, Human
acccaccucccugcc

SEQ ID NO: 2462166 - RNA, 16 nt, Human
acccaccucagccucc

SEQ ID NO: 2462167 - RNA, 16 nt, Human
acccaccucccugccu

SEQ ID NO: 2462168 - RNA, 18 nt, Human
acccaccucccugccucc

SEQ ID NO: 2462169 - RNA, 13 nt, Human
acccaccugcuga

SEQ ID NO: 2462170 - RNA, 11 nt, Human
acccaccugcu

SEQ ID NO: 2462171 - RNA, 21 nt, Human
acccaccuuguuggagccugc

SEQ ID NO: 2462172 - RNA, 20 nt, Human
acccaccuuguuggagccug

SEQ ID NO: 2462173 - RNA, 22 nt, Human
acccagugcccccacugaccag

SEQ ID NO: 2462174 - RNA, 17 nt, Human
acccaccugcugagaga

SEQ ID NO: 2462175 - RNA, 22 nt, Human
acccaccugcugagagacccaa

SEQ ID NO: 2462176 - RNA, 19 nt, Human
acccaccuuguuggagccu

SEQ ID NO: 2462177 - RNA, 19 nt, Human
acccaccugguggccucug

SEQ ID NO: 2462178 - RNA, 15 nt, Human
acccaccucagccuc

SEQ ID NO: 2462179 - RNA, 14 nt, Human
acccaccucagccu

SEQ ID NO: 2462180 - RNA, 13 nt, Human
acccaccucagcc

SEQ ID NO: 2462181 - RNA, 19 nt, Human
acccaccguccgcccugcu

SEQ ID NO: 2462182 - RNA, 17 nt, Human
acccacaccucugccag

SEQ ID NO: 2462183 - RNA, 17 nt, Human
acccaccguccgcccug

SEQ ID NO: 2462184 - RNA, 15 nt, Human
acccacaccucugcc

SEQ ID NO: 2462185 - RNA, 16 nt, Human
acccacaccucugcca

SEQ ID NO: 2462186 - RNA, 17 nt, Human
acccacaagugccacug

SEQ ID NO: 2462187 - RNA, 17 nt, Human
acccacaagaaaugaaa

SEQ ID NO: 2462188 - RNA, 23 nt, Human
acccaagggccuggccugagcug

SEQ ID NO: 2462189 - RNA, 21 nt, Human
acccacaagaaaugaaagcag

SEQ ID NO: 2462190 - RNA, 13 nt, Human
acccacaagugcc

SEQ ID NO: 2462191 - RNA, 20 nt, Human
accauauuaccacagacaua

SEQ ID NO: 2462192 - RNA, 19 nt, Human
accauauucagugcugugg

SEQ ID NO: 2462193 - RNA, 19 nt, Human
accaucccuuuuugaagug

SEQ ID NO: 2462194 - RNA, 15 nt, Human
accaucgcuuuauug

SEQ ID NO: 2462195 - RNA, 17 nt, Human
accauccugcagccucc

SEQ ID NO: 2462196 - RNA, 21 nt, Human
accaucccuuuuugaagugua

SEQ ID NO: 2462197 - RNA, 20 nt, Human
accaucccuuuuugaagugu

SEQ ID NO: 2462198 - RNA, 13 nt, Human
accauccuauuua

SEQ ID NO: 2462199 - RNA, 16 nt, Human
accauccugcagccuc

SEQ ID NO: 2462200 - RNA, 17 nt, Human
accauccgccagggccc

SEQ ID NO: 2462201 - RNA, 16 nt, Human
accauccuauuuaacu

SEQ ID NO: 2462202 - RNA, 22 nt, Human
acccaagggccuggccugagcu

SEQ ID NO: 2462203 - RNA, 19 nt, Human
acccaagggccuggccuga

SEQ ID NO: 2462204 - RNA, 18 nt, Human
acccaagggccuggccug

SEQ ID NO: 2462205 - RNA, 13 nt, Human
accaucuaauagc

SEQ ID NO: 2462206 - RNA, 13 nt, Human
accaucucaggcc

SEQ ID NO: 2462207 - RNA, 14 nt, Human
accaucucaggcca

SEQ ID NO: 2462208 - RNA, 15 nt, Human
accaucucaggccac

SEQ ID NO: 2462209 - RNA, 16 nt, Human
accaucucaggccacc

SEQ ID NO: 2462210 - RNA, 17 nt, Human
accaucucaggccaccu

SEQ ID NO: 2462211 - RNA, 21 nt, Human
accaucucaggccaccugccc

SEQ ID NO: 2462212 - RNA, 12 nt, Human
accccuccagga

SEQ ID NO: 2462213 - RNA, 17 nt, Human
accccucauagcccuca

SEQ ID NO: 2462214 - RNA, 15 nt, Human
accccucaccuugca

SEQ ID NO: 2462215 - RNA, 16 nt, Human
accccucaccuugcaa

SEQ ID NO: 2462216 - RNA, 19 nt, Human
accccucaccuugcaacac

SEQ ID NO: 2462217 - RNA, 22 nt, Human
accccucaccuugcaacacaca

SEQ ID NO: 2462218 - RNA, 18 nt, Human
accccucacucuggccuc

SEQ ID NO: 2462219 - RNA, 15 nt, Human
accccucacucuggc

SEQ ID NO: 2462220 - RNA, 23 nt, Human
accccucaccuugcaacacacag

SEQ ID NO: 2462221 - RNA, 19 nt, Human
accccuccaugugggcuag

SEQ ID NO: 2462222 - RNA, 16 nt, Human
accccuccaugugggc

SEQ ID NO: 2462223 - RNA, 18 nt, Human
acccccuucuccauccac

SEQ ID NO: 2462224 - RNA, 19 nt, Human
acccccuucuccauccaca

SEQ ID NO: 2462225 - RNA, 18 nt, Human
acccccuucuacugagcc

SEQ ID NO: 2462226 - RNA, 19 nt, Human
acccccuucuacugagccu

SEQ ID NO: 2462227 - RNA, 13 nt, Human
acccccuucucug

SEQ ID NO: 2462228 - RNA, 20 nt, Human
accccucacaggagcuuacu

SEQ ID NO: 2462229 - RNA, 14 nt, Human
acccccugcccugc

SEQ ID NO: 2462230 - RNA, 13 nt, Human
acccccugcccug

SEQ ID NO: 2462231 - RNA, 12 nt, Human
acccccuggaga

SEQ ID NO: 2462232 - RNA, 15 nt, Human
acccccugcccugca

SEQ ID NO: 2462233 - RNA, 16 nt, Human
acccccuucagugccc

SEQ ID NO: 2462234 - RNA, 19 nt, Human
acccccuuccuacucccag

SEQ ID NO: 2462235 - RNA, 11 nt, Human
acccccuuccc

SEQ ID NO: 2462236 - RNA, 18 nt, Human
acccccuucagugcccac

SEQ ID NO: 2462237 - RNA, 20 nt, Human
acccccuucagugcccacca

SEQ ID NO: 2462238 - RNA, 16 nt, Human
accccucccagcugac

SEQ ID NO: 2462239 - RNA, 15 nt, Human
accccucccagcuga

SEQ ID NO: 2462240 - RNA, 14 nt, Human
accccucccagcug

SEQ ID NO: 2462241 - RNA, 13 nt, Human
accccucccagcu

SEQ ID NO: 2462242 - RNA, 12 nt, Human
accccucccagc

SEQ ID NO: 2462243 - RNA, 17 nt, Human
accccucacucuggccu

SEQ ID NO: 2462244 - RNA, 11 nt, Human
accccucccau

SEQ ID NO: 2462245 - RNA, 22 nt, Human
accccucccagcugacaguccu

SEQ ID NO: 2462246 - RNA, 19 nt, Human
accccucccauuaggacaa

SEQ ID NO: 2462247 - RNA, 12 nt, Human
accccuccccau

SEQ ID NO: 2462248 - RNA, 18 nt, Human
accccuccccuaaugccu

SEQ ID NO: 2462249 - RNA, 13 nt, Human
aacacggccacau

SEQ ID NO: 2462250 - RNA, 21 nt, Human
aacacggccacaucaaagagg

SEQ ID NO: 2462251 - RNA, 21 nt, Human
aacacguccagaauuuuucau

SEQ ID NO: 2462252 - RNA, 21 nt, Human
aacacccaugaaucaaagaca

SEQ ID NO: 2462253 - RNA, 19 nt, Human
aacacgcaccugccucagg

SEQ ID NO: 2462254 - RNA, 14 nt, Human
aacacuaaaaauaa

SEQ ID NO: 2462255 - RNA, 15 nt, Human
aacacuaaaaauaaa

SEQ ID NO: 2462256 - RNA, 19 nt, Human
aacacuaaacagacuauuu

SEQ ID NO: 2462257 - RNA, 18 nt, Human
aacacuaacauauaaugu

SEQ ID NO: 2462258 - RNA, 17 nt, Human
aaauuuuuuuucauguu

SEQ ID NO: 2462259 - RNA, 22 nt, Human
aaauuuuuuuucauguuuuaac

SEQ ID NO: 2462260 - RNA, 17 nt, Human
aaauuuuuuuuuuaaua

SEQ ID NO: 2462261 - RNA, 23 nt, Human
aaauuuuuuuucauguuuuaaca

SEQ ID NO: 2462262 - RNA, 19 nt, Human
aacaaaaacacuaaaaaua

SEQ ID NO: 2462263 - RNA, 13 nt, Human
aacaaaaaaaucu

SEQ ID NO: 2462264 - RNA, 22 nt, Human
aacaaauucaucaaauggaaga

SEQ ID NO: 2462265 - RNA, 18 nt, Human
aacaaauucauauucugu

SEQ ID NO: 2462266 - RNA, 12 nt, Human
aacaaaaagaac

SEQ ID NO: 2462267 - RNA, 21 nt, Human
aacaaauuagguuuuguacaa

SEQ ID NO: 2462268 - RNA, 11 nt, Human
aacaaaaagaa

SEQ ID NO: 2462269 - RNA, 20 nt, Human
aacaaauuauguuacaucug

SEQ ID NO: 2462270 - RNA, 15 nt, Human
aaauuuuuuuucaug

SEQ ID NO: 2462271 - RNA, 18 nt, Human
aaauuuuuuuuguuucau

SEQ ID NO: 2462272 - RNA, 17 nt, Human
aaauuuuuuuuguuuca

SEQ ID NO: 2462273 - RNA, 16 nt, Human
aacacaucagcuugcc

SEQ ID NO: 2462274 - RNA, 14 nt, Human
aacaaccucaacug

SEQ ID NO: 2462275 - RNA, 18 nt, Human
aacaaccucaacugccua

SEQ ID NO: 2462276 - RNA, 18 nt, Human
aacaaauuuacagagaca

SEQ ID NO: 2462277 - RNA, 16 nt, Human
aacaaauugaacucuu

SEQ ID NO: 2462278 - RNA, 13 nt, Human
aacaacauguaua

SEQ ID NO: 2462279 - RNA, 18 nt, Human
aacacauuugauucugug

SEQ ID NO: 2462280 - RNA, 18 nt, Human
aacaccacagacacacac

SEQ ID NO: 2462281 - RNA, 17 nt, Human
aacaccacagacacaca

SEQ ID NO: 2462282 - RNA, 16 nt, Human
aacaccacagacacac

SEQ ID NO: 2462283 - RNA, 15 nt, Human
aacaccacagacaca

SEQ ID NO: 2462284 - RNA, 14 nt, Human
aacaccacagacac

SEQ ID NO: 2462285 - RNA, 13 nt, Human
aacaccacagaca

SEQ ID NO: 2462286 - RNA, 20 nt, Human
aacacauuugauucugugug

SEQ ID NO: 2462287 - RNA, 21 nt, Human
aacaccaagcacagcagccug

SEQ ID NO: 2462288 - RNA, 17 nt, Human
aacacaucuuuccuguc

SEQ ID NO: 2462289 - RNA, 21 nt, Human
aacacauuaucgggagcagug

SEQ ID NO: 2462290 - RNA, 21 nt, Human
aacacauuaagccuuccacac

SEQ ID NO: 2462291 - RNA, 19 nt, Human
aacaccagccccugcccca

SEQ ID NO: 2462292 - RNA, 18 nt, Human
aacaccagccccugcccc

SEQ ID NO: 2462293 - RNA, 17 nt, Human
aacaccagccccugccc

SEQ ID NO: 2462294 - RNA, 16 nt, Human
aacaccagccccugcc

SEQ ID NO: 2462295 - RNA, 15 nt, Human
aacaccagccccugc

SEQ ID NO: 2462296 - RNA, 13 nt, Human
aacaccagccccu

SEQ ID NO: 2462297 - RNA, 23 nt, Human
aacaccacagacacacacacgca

SEQ ID NO: 2462298 - RNA, 19 nt, Human
aacaccacagacacacaca

SEQ ID NO: 2462299 - RNA, 21 nt, Human
aacaccagguuuauggaaaau

SEQ ID NO: 2462300 - RNA, 23 nt, Human
aacaccagccccugccccagccc

SEQ ID NO: 2462301 - RNA, 22 nt, Human
aacaccagccccugccccagcc

SEQ ID NO: 2462302 - RNA, 20 nt, Human
aacacccagucuguucccca

SEQ ID NO: 2462303 - RNA, 15 nt, Human
aacacgccugcaaac

SEQ ID NO: 2462304 - RNA, 20 nt, Human
aacacgccugcaaacgcugc

SEQ ID NO: 2462305 - RNA, 22 nt, Human
aaauguuguucucuucuuuaaa

SEQ ID NO: 2462306 - RNA, 17 nt, Human
aaauguuggucauuuua

SEQ ID NO: 2462307 - RNA, 19 nt, Human
aaauguuggucauuuuaug

SEQ ID NO: 2462308 - RNA, 23 nt, Human
aaauguuguucauuauuggaggg

SEQ ID NO: 2462309 - RNA, 23 nt, Human
aaauguuggauuuauaaaugcua

SEQ ID NO: 2462310 - RNA, 21 nt, Human
aaauguuuacagggagccucc

SEQ ID NO: 2462311 - RNA, 20 nt, Human
aaauguuuacagggagccuc

SEQ ID NO: 2462312 - RNA, 15 nt, Human
aaauguuucugcagu

SEQ ID NO: 2462313 - RNA, 13 nt, Human
aaauguuucugca

SEQ ID NO: 2462314 - RNA, 22 nt, Human
aaauguuggauuuauaaaugcu

SEQ ID NO: 2462315 - RNA, 17 nt, Human
aaaucuuauaauuuaaa

SEQ ID NO: 2462316 - RNA, 23 nt, Human
aaaugccuuacccucauguucuu

SEQ ID NO: 2462317 - RNA, 21 nt, Human
aaaucuuauauuccauauauu

SEQ ID NO: 2462318 - RNA, 19 nt, Human
aaaucuuauauuccauaua

SEQ ID NO: 2462319 - RNA, 19 nt, Human
aaaugccuuugagacaguu

SEQ ID NO: 2462320 - RNA, 18 nt, Human
aaaugccuuugagacagu

SEQ ID NO: 2462321 - RNA, 17 nt, Human
aaaugccuuugagacag

SEQ ID NO: 2462322 - RNA, 16 nt, Human
aaaugccuuugagaca

SEQ ID NO: 2462323 - RNA, 20 nt, Human
aaaugccuuugagacaguuu

SEQ ID NO: 2462324 - RNA, 15 nt, Human
aaaugccuuuguacu

SEQ ID NO: 2462325 - RNA, 14 nt, Human
aaaugccuuugaga

SEQ ID NO: 2462326 - RNA, 13 nt, Human
aaaugccuuugag

SEQ ID NO: 2462327 - RNA, 23 nt, Human
aaauugccauauugcacaugucu

SEQ ID NO: 2462328 - RNA, 21 nt, Human
aaauugccauauugcacaugu

SEQ ID NO: 2462329 - RNA, 19 nt, Human
aaauugccauauugcacau

SEQ ID NO: 2462330 - RNA, 18 nt, Human
aaauugccauauugcaca

SEQ ID NO: 2462331 - RNA, 14 nt, Human
aaauugcuccuuga

SEQ ID NO: 2462332 - RNA, 22 nt, Human
aaauugcuccuaagcuucaaau

SEQ ID NO: 2462333 - RNA, 13 nt, Human
aaauugcuccuug

SEQ ID NO: 2462334 - RNA, 16 nt, Human
aaauugccauauugca

SEQ ID NO: 2462335 - RNA, 15 nt, Human
aaauugccauauugc

SEQ ID NO: 2462336 - RNA, 19 nt, Human
aaauugacacuuaaaaaug

SEQ ID NO: 2462337 - RNA, 23 nt, Human
aaauugaauaaugguaccagaua

SEQ ID NO: 2462338 - RNA, 13 nt, Human
aaauugaauaaug

SEQ ID NO: 2462339 - RNA, 23 nt, Human
aaauugaaucaguauaaacaaag

SEQ ID NO: 2462340 - RNA, 20 nt, Human
aaauugacacaaguggaccu

SEQ ID NO: 2462341 - RNA, 20 nt, Human
aaauugaaaggcauucucug

SEQ ID NO: 2462342 - RNA, 22 nt, Human
aaauugaaaggcauucucugaa

SEQ ID NO: 2462343 - RNA, 23 nt, Human
aaauugaaaggcauucucugaag

SEQ ID NO: 2462344 - RNA, 21 nt, Human
aaauucuugcaaaguaucccu

SEQ ID NO: 2462345 - RNA, 18 nt, Human
aaauuaacaguccuaacu

SEQ ID NO: 2462346 - RNA, 17 nt, Human
aaauuaaagcugaaaac

SEQ ID NO: 2462347 - RNA, 13 nt, Human
aaauuaaagcuga

SEQ ID NO: 2462348 - RNA, 23 nt, Human
aaauguuucugcaguagucucug

SEQ ID NO: 2462349 - RNA, 21 nt, Human
aaauuaacacugcuuguguuu

SEQ ID NO: 2462350 - RNA, 17 nt, Human
aaauuaacaguccuaac

SEQ ID NO: 2462351 - RNA, 18 nt, Human
aaauucuugcaaaguauc

SEQ ID NO: 2462352 - RNA, 13 nt, Human
aaauuaacacugc

SEQ ID NO: 2462353 - RNA, 12 nt, Human
aaauuaacacug

SEQ ID NO: 2462354 - RNA, 21 nt, Human
aacagcacuggcucucuccag

SEQ ID NO: 2462355 - RNA, 20 nt, Human
aacagcacuggcucucucca

SEQ ID NO: 2462356 - RNA, 23 nt, Human
aacagcacuggcucucuccagga

SEQ ID NO: 2462357 - RNA, 14 nt, Human
aacagcacuggcuc

SEQ ID NO: 2462358 - RNA, 18 nt, Human
aacagcacuggcucucuc

SEQ ID NO: 2462359 - RNA, 16 nt, Human
aacagcagagguucuu

SEQ ID NO: 2462360 - RNA, 17 nt, Human
aacagcagagguucuuu

SEQ ID NO: 2462361 - RNA, 21 nt, Human
aacagcagagguucuuuuaaa

SEQ ID NO: 2462362 - RNA, 13 nt, Human
aacagcaguguuc

SEQ ID NO: 2462363 - RNA, 11 nt, Human
aacagcagugu

SEQ ID NO: 2462364 - RNA, 21 nt, Human
aacagcaggguagucugguuu

SEQ ID NO: 2462365 - RNA, 15 nt, Human
aacagcaguguuccc

SEQ ID NO: 2462366 - RNA, 12 nt, Human
aacagcauugcu

SEQ ID NO: 2462367 - RNA, 14 nt, Human
aacagcauugcuuu

SEQ ID NO: 2462368 - RNA, 15 nt, Human
aacagcauugcuuuc

SEQ ID NO: 2462369 - RNA, 13 nt, Human
aaccacuucccuc

SEQ ID NO: 2462370 - RNA, 12 nt, Human
aaccacuucccu

SEQ ID NO: 2462371 - RNA, 21 nt, Human
aaccacuucccucaucucucc

SEQ ID NO: 2462372 - RNA, 18 nt, Human
aaccagagccauggacuc

SEQ ID NO: 2462373 - RNA, 17 nt, Human
aaccagaagcaacagaa

SEQ ID NO: 2462374 - RNA, 21 nt, Human
aaccagaagcaacagaaaaaa

SEQ ID NO: 2462375 - RNA, 22 nt, Human
aaccagaagcaacagaaaaaau

SEQ ID NO: 2462376 - RNA, 18 nt, Human
aaccagaauaaaguucug

SEQ ID NO: 2462377 - RNA, 22 nt, Human
aaccacuggaaaguuuaugguu

SEQ ID NO: 2462378 - RNA, 14 nt, Human
aaccacggaaaaga

SEQ ID NO: 2462379 - RNA, 19 nt, Human
aaccaccuaaucaggcuga

SEQ ID NO: 2462380 - RNA, 19 nt, Human
aaccaccgcuccccagccc

SEQ ID NO: 2462381 - RNA, 20 nt, Human
aaccaccgcuccccagccca

SEQ ID NO: 2462382 - RNA, 15 nt, Human
aaccacuucagcuga

SEQ ID NO: 2462383 - RNA, 15 nt, Human
aaccacuguaaaaug

SEQ ID NO: 2462384 - RNA, 20 nt, Human
aaccacuguaaaaugaaauu

SEQ ID NO: 2462385 - RNA, 16 nt, Human
aaccacuguaaaauga

SEQ ID NO: 2462386 - RNA, 13 nt, Human
aaccacuuaaaaa

SEQ ID NO: 2462387 - RNA, 19 nt, Human
aaccacuuaaaaaaugucc

SEQ ID NO: 2462388 - RNA, 13 nt, Human
aaccacgcuggac

SEQ ID NO: 2462389 - RNA, 18 nt, Human
aacaucccauugcccugg

SEQ ID NO: 2462390 - RNA, 19 nt, Human
aacaucccauugcccuggu

SEQ ID NO: 2462391 - RNA, 15 nt, Human
aaccaccgcucccca

SEQ ID NO: 2462392 - RNA, 16 nt, Human
aaccaccgcuccccag

SEQ ID NO: 2462393 - RNA, 17 nt, Human
aaccaccgcuccccagc

SEQ ID NO: 2462394 - RNA, 18 nt, Human
aaccaccgcuccccagcc

SEQ ID NO: 2462395 - RNA, 18 nt, Human
aaccaccagaagcccaga

SEQ ID NO: 2462396 - RNA, 19 nt, Human
aaccaccagaagcccagaa

SEQ ID NO: 2462397 - RNA, 16 nt, Human
aacaucccauugcccu

SEQ ID NO: 2462398 - RNA, 16 nt, Human
aacagcuucagguuau

SEQ ID NO: 2462399 - RNA, 15 nt, Human
aacagcuucagguua

SEQ ID NO: 2462400 - RNA, 14 nt, Human
aacagcuucagguu

SEQ ID NO: 2462401 - RNA, 13 nt, Human
aacagcuguggcu

SEQ ID NO: 2462402 - RNA, 16 nt, Human
aacagcuucucaauuu

SEQ ID NO: 2462403 - RNA, 22 nt, Human
aacauccaaggagaaacagaga

SEQ ID NO: 2462404 - RNA, 15 nt, Human
aacauccaauauuuu

SEQ ID NO: 2462405 - RNA, 11 nt, Human
aacauccaaaa

SEQ ID NO: 2462406 - RNA, 16 nt, Human
aacauccaaccuuccc

SEQ ID NO: 2462407 - RNA, 17 nt, Human
aacauccaaccuuccca

SEQ ID NO: 2462408 - RNA, 19 nt, Human
aacauccaaggagaaacag

SEQ ID NO: 2462409 - RNA, 17 nt, Human
aaccuagggugauauua

SEQ ID NO: 2462410 - RNA, 14 nt, Human
aaccuagaagggcu

SEQ ID NO: 2462411 - RNA, 20 nt, Human
aaccuacuuucauacugaag

SEQ ID NO: 2462412 - RNA, 23 nt, Human
aaccuaccuucauuucaggaggg

SEQ ID NO: 2462413 - RNA, 20 nt, Human
aaccuaccaccccuuccugu

SEQ ID NO: 2462414 - RNA, 19 nt, Human
aaccuaccaccccuuccug

SEQ ID NO: 2462415 - RNA, 21 nt, Human
aaccuaccuucauuucaggag

SEQ ID NO: 2462416 - RNA, 18 nt, Human
aaccuaccaccccuuccu

SEQ ID NO: 2462417 - RNA, 22 nt, Human
aaccuaaauuugguucuaggcc

SEQ ID NO: 2462418 - RNA, 15 nt, Human
aaccgagcaaagauc

SEQ ID NO: 2462419 - RNA, 19 nt, Human
aacccuuuugucugccucu

SEQ ID NO: 2462420 - RNA, 16 nt, Human
aacccuuuuggccccc

SEQ ID NO: 2462421 - RNA, 22 nt, Human
aacccuuuuggcccccgagcug

SEQ ID NO: 2462422 - RNA, 15 nt, Human
aaccuaaccccuuuc

SEQ ID NO: 2462423 - RNA, 22 nt, Human
aaccuacuuucauacugaagau

SEQ ID NO: 2462424 - RNA, 12 nt, Human
aaccuagccccu

SEQ ID NO: 2462425 - RNA, 19 nt, Human
aaccuaggagugccccauu

SEQ ID NO: 2462426 - RNA, 21 nt, Human
aacccuaaaaagcagagcuuu

SEQ ID NO: 2462427 - RNA, 21 nt, Human
aacccuugucagugacaguau

SEQ ID NO: 2462428 - RNA, 13 nt, Human
aacccuugucagu

SEQ ID NO: 2462429 - RNA, 15 nt, Human
aacccuugaaaagac

SEQ ID NO: 2462430 - RNA, 15 nt, Human
aacccuauugguaaa

SEQ ID NO: 2462431 - RNA, 21 nt, Human
aacccuucuccucuuguaaau

SEQ ID NO: 2462432 - RNA, 21 nt, Human
aacccuuggagccaauggaga

SEQ ID NO: 2462433 - RNA, 14 nt, Human
aacccuugaaaaga

SEQ ID NO: 2462434 - RNA, 23 nt, Human
aacccuucuccucuuguaaauaa

SEQ ID NO: 2462435 - RNA, 20 nt, Human
aacuuuaugcuaagugaaau

SEQ ID NO: 2462436 - RNA, 21 nt, Human
aacuuuaugcuaagugaaaua

SEQ ID NO: 2462437 - RNA, 14 nt, Human
aacuuuauguguaa

SEQ ID NO: 2462438 - RNA, 13 nt, Human
aacuuuaugugua

SEQ ID NO: 2462439 - RNA, 17 nt, Human
aacuuuauguguaaaua

SEQ ID NO: 2462440 - RNA, 14 nt, Human
aacuuuauuaaaua

SEQ ID NO: 2462441 - RNA, 21 nt, Human
aacuuuaucacauuauuugca

SEQ ID NO: 2462442 - RNA, 15 nt, Human
aacuuaaucuaaaug

SEQ ID NO: 2462443 - RNA, 16 nt, Human
aacuuaaucuaaaugg

SEQ ID NO: 2462444 - RNA, 18 nt, Human
aacuuaaucuaaauggaa

SEQ ID NO: 2462445 - RNA, 20 nt, Human
aacuuaauguucugaauaau

SEQ ID NO: 2462446 - RNA, 18 nt, Human
aacuuaauaguauuuaug

SEQ ID NO: 2462447 - RNA, 12 nt, Human
aacuuacacaca

SEQ ID NO: 2462448 - RNA, 18 nt, Human
aacugacucuuaagaaga

SEQ ID NO: 2462449 - RNA, 15 nt, Human
aacugacucuuaaga

SEQ ID NO: 2462450 - RNA, 20 nt, Human
aacucagaucacuacugcag

SEQ ID NO: 2462451 - RNA, 19 nt, Human
aacucagaucacuacugca

SEQ ID NO: 2462452 - RNA, 18 nt, Human
aacucagaucacuacugc

SEQ ID NO: 2462453 - RNA, 15 nt, Human
aacucagaucacuac

SEQ ID NO: 2462454 - RNA, 12 nt, Human
aacucagaucca

SEQ ID NO: 2462455 - RNA, 13 nt, Human
aacucagauccag

SEQ ID NO: 2462456 - RNA, 14 nt, Human
aacucagauccagg

SEQ ID NO: 2462457 - RNA, 15 nt, Human
aacucagauccaggg

SEQ ID NO: 2462458 - RNA, 13 nt, Human
aacucagaucugu

SEQ ID NO: 2462459 - RNA, 21 nt, Human
aacucagaucacuacugcagu

SEQ ID NO: 2462460 - RNA, 22 nt, Human
aacucagauccagggacagagg

SEQ ID NO: 2462461 - RNA, 20 nt, Human
aacugacucuuaagaagacu

SEQ ID NO: 2462462 - RNA, 19 nt, Human
aacugacucuuaagaagac

SEQ ID NO: 2462463 - RNA, 20 nt, Human
aacugagaugugaacacauc

SEQ ID NO: 2462464 - RNA, 13 nt, Human
aacugacuuuauc

SEQ ID NO: 2462465 - RNA, 19 nt, Human
aacugaccagccuccaugc

SEQ ID NO: 2462466 - RNA, 22 nt, Human
aacugauaguuacuguugugac

SEQ ID NO: 2462467 - RNA, 19 nt, Human
aacuuaaauaaugugaaac

SEQ ID NO: 2462468 - RNA, 16 nt, Human
aacuuaacauauuuac

SEQ ID NO: 2462469 - RNA, 14 nt, Human
aacuuaacauauuu

SEQ ID NO: 2462470 - RNA, 16 nt, Human
aacuuaaauuuuaauu

SEQ ID NO: 2462471 - RNA, 19 nt, Human
aacuuaaauuuuaauuuau

SEQ ID NO: 2462472 - RNA, 17 nt, Human
aacuuaaguuaaacaua

SEQ ID NO: 2462473 - RNA, 21 nt, Human
aacuuaaguugguccuuuaca

SEQ ID NO: 2462474 - RNA, 21 nt, Human
aacuuaacauucuguaaaaug

SEQ ID NO: 2462475 - RNA, 16 nt, Human
aacuuaacauucugua

SEQ ID NO: 2462476 - RNA, 17 nt, Human
aacuuaacauucuguaa

SEQ ID NO: 2462477 - RNA, 23 nt, Human
aacugauaguuacuguugugacc

SEQ ID NO: 2462478 - RNA, 19 nt, Human
aacugauaguuacuguugu

SEQ ID NO: 2462479 - RNA, 17 nt, Human
aacugauaguuacuguu

SEQ ID NO: 2462480 - RNA, 16 nt, Human
aacugauaguuacugu

SEQ ID NO: 2462481 - RNA, 15 nt, Human
aacugauaguuacug

SEQ ID NO: 2462482 - RNA, 17 nt, Human
aacugaguccuuaaaca

SEQ ID NO: 2462483 - RNA, 14 nt, Human
aacugauaaagaug

SEQ ID NO: 2462484 - RNA, 16 nt, Human
aacugagugccuuuug

SEQ ID NO: 2462485 - RNA, 12 nt, Human
aacugaggcaga

SEQ ID NO: 2462486 - RNA, 20 nt, Human
aacugaggcagacagcagcu

SEQ ID NO: 2462487 - RNA, 18 nt, Human
aacugaggaauuuucuuu

SEQ ID NO: 2462488 - RNA, 20 nt, Human
aacugaggaauuuucuuugu

SEQ ID NO: 2462489 - RNA, 18 nt, Human
aacugacuuuauccucag

SEQ ID NO: 2462490 - RNA, 18 nt, Human
aacugagauccuuccuuu

SEQ ID NO: 2462491 - RNA, 20 nt, Human
aacgauuuaauucucuugaa

SEQ ID NO: 2462492 - RNA, 12 nt, Human
aacgauuuagaa

SEQ ID NO: 2462493 - RNA, 18 nt, Human
aacgauuuaauucucuug

SEQ ID NO: 2462494 - RNA, 17 nt, Human
aacgauuuaauucucuu

SEQ ID NO: 2462495 - RNA, 20 nt, Human
aacgcaaagggcugaaagcc

SEQ ID NO: 2462496 - RNA, 18 nt, Human
aacgcaaagggcugaaag

SEQ ID NO: 2462497 - RNA, 13 nt, Human
aacgauuuagaaa

SEQ ID NO: 2462498 - RNA, 20 nt, Human
aacggagccccaggccucug

SEQ ID NO: 2462499 - RNA, 17 nt, Human
aacggaucagaaauaca

SEQ ID NO: 2462500 - RNA, 13 nt, Human
aacggaucagaaa

SEQ ID NO: 2462501 - RNA, 14 nt, Human
aacggagaaaggug

SEQ ID NO: 2462502 - RNA, 19 nt, Human
aacggagagcgccugcccc

SEQ ID NO: 2462503 - RNA, 14 nt, Human
aacgcugccugccc

SEQ ID NO: 2462504 - RNA, 15 nt, Human
aacgcugccugccca

SEQ ID NO: 2462505 - RNA, 21 nt, Human
aacgcuuaaaggugucuuccu

SEQ ID NO: 2462506 - RNA, 15 nt, Human
aacgcugccugcccg

SEQ ID NO: 2462507 - RNA, 12 nt, Human
aacgcugccugc

SEQ ID NO: 2462508 - RNA, 13 nt, Human
aacgcugccugcc

SEQ ID NO: 2462509 - RNA, 11 nt, Human
aacgcugccug

SEQ ID NO: 2462510 - RNA, 11 nt, Human
aacgcagcccu

SEQ ID NO: 2462511 - RNA, 18 nt, Human
aacgcagaugauccauga

SEQ ID NO: 2462512 - RNA, 23 nt, Human
aacgcagcccuagagccugccug

SEQ ID NO: 2462513 - RNA, 22 nt, Human
aacgcagcccuagagccugccu

SEQ ID NO: 2462514 - RNA, 21 nt, Human
aacgcagcccuagagccugcc

SEQ ID NO: 2462515 - RNA, 13 nt, Human
aacgcagcccuag

SEQ ID NO: 2462516 - RNA, 21 nt, Human
aacggauuauuuuuucagacc

SEQ ID NO: 2462517 - RNA, 20 nt, Human
aacggauuauuuuuucagac

SEQ ID NO: 2462518 - RNA, 19 nt, Human
aacggauuauuuuuucaga

SEQ ID NO: 2462519 - RNA, 18 nt, Human
aacggauuauuuuuucag

SEQ ID NO: 2462520 - RNA, 17 nt, Human
aacggauuauuuuuuca

SEQ ID NO: 2462521 - RNA, 16 nt, Human
aacggauuauuuuuuc

SEQ ID NO: 2462522 - RNA, 18 nt, Human
aacggaucagaaauacag

SEQ ID NO: 2462523 - RNA, 15 nt, Human
aacggauuccaaaga

SEQ ID NO: 2462524 - RNA, 22 nt, Human
aacggauuauuuuuucagaccg

SEQ ID NO: 2462525 - RNA, 14 nt, Human
aacggcuccaggau

SEQ ID NO: 2462526 - RNA, 23 nt, Human
aacuauuuaacuugagcuuuaaa

SEQ ID NO: 2462527 - RNA, 16 nt, Human
aacuauuuaacuugag

SEQ ID NO: 2462528 - RNA, 13 nt, Human
aacuauuuaucug

SEQ ID NO: 2462529 - RNA, 20 nt, Human
aacuauuuaucuguguuuuu

SEQ ID NO: 2462530 - RNA, 14 nt, Human
aacuauugcccagg

SEQ ID NO: 2462531 - RNA, 15 nt, Human
aacgggcugcccugc

SEQ ID NO: 2462532 - RNA, 19 nt, Human
aacucaaaacuuaacauau

SEQ ID NO: 2462533 - RNA, 18 nt, Human
aacuauuugucuuucagg

SEQ ID NO: 2462534 - RNA, 20 nt, Human
aacuauuucuuauauaugug

SEQ ID NO: 2462535 - RNA, 19 nt, Human
aacuauuugucuuucagga

SEQ ID NO: 2462536 - RNA, 18 nt, Human
aacuauuucuuauauaug

SEQ ID NO: 2462537 - RNA, 17 nt, Human
aacuauuucuuauauau

SEQ ID NO: 2462538 - RNA, 23 nt, Human
aacuauuuaucuguguuuuugaa

SEQ ID NO: 2462539 - RNA, 21 nt, Human
aacucacugcucaagaagaca

SEQ ID NO: 2462540 - RNA, 14 nt, Human
aacucacugcucaa

SEQ ID NO: 2462541 - RNA, 14 nt, Human
aacucacuuuccuc

SEQ ID NO: 2462542 - RNA, 14 nt, Human
aacucagaucacua

SEQ ID NO: 2462543 - RNA, 14 nt, Human
aacucagagccucc

SEQ ID NO: 2462544 - RNA, 22 nt, Human
aacucacugcucaagaagacau

SEQ ID NO: 2462545 - RNA, 21 nt, Human
aacucagaaacaucaguuacu

SEQ ID NO: 2462546 - RNA, 23 nt, Human
aaagccaaguuuauauacaauua

SEQ ID NO: 2462547 - RNA, 16 nt, Human
aaaggcaaauguguac

SEQ ID NO: 2462548 - RNA, 14 nt, Human
aaaggcaagcacuu

SEQ ID NO: 2462549 - RNA, 13 nt, Human
aaaggcaaggucc

SEQ ID NO: 2462550 - RNA, 21 nt, Human
aaagccguuguuuacuuaaag

SEQ ID NO: 2462551 - RNA, 23 nt, Human
aaagccguuguuuacuuaaagau

SEQ ID NO: 2462552 - RNA, 23 nt, Human
aaagcccuuccaugucgccucug

SEQ ID NO: 2462553 - RNA, 22 nt, Human
aaagcccuuccaugucgccucu

SEQ ID NO: 2462554 - RNA, 16 nt, Human
aaagccuccuccagcc

SEQ ID NO: 2462555 - RNA, 21 nt, Human
aaagccagcguccuccucugu

SEQ ID NO: 2462556 - RNA, 20 nt, Human
aaagccagaaccagaugagu

SEQ ID NO: 2462557 - RNA, 14 nt, Human
aaagccagaagcug

SEQ ID NO: 2462558 - RNA, 19 nt, Human
aaagccagcugccgaccag

SEQ ID NO: 2462559 - RNA, 16 nt, Human
aaagccagugacucca

SEQ ID NO: 2462560 - RNA, 19 nt, Human
aaagcccuuaggaagaauu

SEQ ID NO: 2462561 - RNA, 15 nt, Human
aaagccaaugugaac

SEQ ID NO: 2462562 - RNA, 17 nt, Human
aaagccaaugugaacag

SEQ ID NO: 2462563 - RNA, 17 nt, Human
aaagccaccucucccuc

SEQ ID NO: 2462564 - RNA, 18 nt, Human
aaagccacguuccuuacu

SEQ ID NO: 2462565 - RNA, 12 nt, Human
aaagccaccucu

SEQ ID NO: 2462566 - RNA, 19 nt, Human
aaagccaauaacacacagc

SEQ ID NO: 2462567 - RNA, 16 nt, Human
aaaggcuccaggagca

SEQ ID NO: 2462568 - RNA, 15 nt, Human
aaaggcuccaggagc

SEQ ID NO: 2462569 - RNA, 12 nt, Human
aaaggcccccua

SEQ ID NO: 2462570 - RNA, 14 nt, Human
aaaggccucuuccu

SEQ ID NO: 2462571 - RNA, 17 nt, Human
aaaggccuuuaaaauuu

SEQ ID NO: 2462572 - RNA, 12 nt, Human
aaaggccuuuaa

SEQ ID NO: 2462573 - RNA, 11 nt, Human
aaaggccucuu

SEQ ID NO: 2462574 - RNA, 14 nt, Human
aaaggcagaagcaa

SEQ ID NO: 2462575 - RNA, 17 nt, Human
aaaggcaaauguguaca

SEQ ID NO: 2462576 - RNA, 12 nt, Human
aaaggcacagug

SEQ ID NO: 2462577 - RNA, 17 nt, Human
aaaggcaccuauaaaac

SEQ ID NO: 2462578 - RNA, 17 nt, Human
aaaggcaccaucuaaua

SEQ ID NO: 2462579 - RNA, 20 nt, Human
aaaggcaccuauaaaacagg

SEQ ID NO: 2462580 - RNA, 18 nt, Human
aaaggccaaaccucuguu

SEQ ID NO: 2462581 - RNA, 20 nt, Human
aaaggccaaaccucuguuca

SEQ ID NO: 2462582 - RNA, 21 nt, Human
aaaggcaccuauaaaacaggu

SEQ ID NO: 2462583 - RNA, 19 nt, Human
aaaggccauggagagcugg

SEQ ID NO: 2462584 - RNA, 14 nt, Human
aaaggccauggaga

SEQ ID NO: 2462585 - RNA, 20 nt, Human
aaaggccagcuggcagcaga

SEQ ID NO: 2462586 - RNA, 14 nt, Human
aaaggccagcuggc

SEQ ID NO: 2462587 - RNA, 18 nt, Human
aaaggccagcuggcagca

SEQ ID NO: 2462588 - RNA, 12 nt, Human
aaaggccagcug

SEQ ID NO: 2462589 - RNA, 15 nt, Human
aaauaaauauauaua

SEQ ID NO: 2462590 - RNA, 14 nt, Human
aaauaaauauauau

SEQ ID NO: 2462591 - RNA, 20 nt, Human
aaauaaaugagcuauguauu

SEQ ID NO: 2462592 - RNA, 13 nt, Human
aaauaaaugcaau

SEQ ID NO: 2462593 - RNA, 22 nt, Human
aaauaaaugagcuauguauuaa

SEQ ID NO: 2462594 - RNA, 20 nt, Human
aaauaaauagcuauauccau

SEQ ID NO: 2462595 - RNA, 13 nt, Human
aaauaaauauaua

SEQ ID NO: 2462596 - RNA, 12 nt, Human
aaauaaauauau

SEQ ID NO: 2462597 - RNA, 11 nt, Human
aaauaaauaua

SEQ ID NO: 2462598 - RNA, 16 nt, Human
aaauaaauagcuauau

SEQ ID NO: 2462599 - RNA, 20 nt, Human
aaaggcuccaggagcagcca

SEQ ID NO: 2462600 - RNA, 19 nt, Human
aaaggcuccaggagcagcc

SEQ ID NO: 2462601 - RNA, 21 nt, Human
aaagucauuggcuuuauccuc

SEQ ID NO: 2462602 - RNA, 17 nt, Human
aaagucauuggcuuuau

SEQ ID NO: 2462603 - RNA, 15 nt, Human
aaagucauuggcuuu

SEQ ID NO: 2462604 - RNA, 14 nt, Human
aaagucauuggcuu

SEQ ID NO: 2462605 - RNA, 21 nt, Human
aaagucaugcaaaggcuggga

SEQ ID NO: 2462606 - RNA, 13 nt, Human
aaagucauuggcu

SEQ ID NO: 2462607 - RNA, 21 nt, Human
aaaggcgcagugcuucucuac

SEQ ID NO: 2462608 - RNA, 20 nt, Human
aaagucaugcaaaggcuggg

SEQ ID NO: 2462609 - RNA, 13 nt, Human
aaaguggaaaaau

SEQ ID NO: 2462610 - RNA, 19 nt, Human
aaaguggaaaacaaggaag

SEQ ID NO: 2462611 - RNA, 20 nt, Human
aaaguggaaaacaaggaagu

SEQ ID NO: 2462612 - RNA, 22 nt, Human
aaagucuaaaguuuacaguaaa

SEQ ID NO: 2462613 - RNA, 16 nt, Human
aaagucuaaaguuuac

SEQ ID NO: 2462614 - RNA, 12 nt, Human
aaagucuaaagu

SEQ ID NO: 2462615 - RNA, 15 nt, Human
aaagucgaauuaaua

SEQ ID NO: 2462616 - RNA, 22 nt, Human
aaaguccuuuuuuuccaucuuu

SEQ ID NO: 2462617 - RNA, 16 nt, Human
aaaguccuuuuuuucc

SEQ ID NO: 2462618 - RNA, 18 nt, Human
aaaguccuuuuuuuccau

SEQ ID NO: 2462619 - RNA, 23 nt, Human
aaagucauuggcuuuauccucuu

SEQ ID NO: 2462620 - RNA, 13 nt, Human
aaauaaaacuuuu

SEQ ID NO: 2462621 - RNA, 16 nt, Human
aaauaaaacuuuuuaa

SEQ ID NO: 2462622 - RNA, 16 nt, Human
aaaguggccucuuugu

SEQ ID NO: 2462623 - RNA, 18 nt, Human
aaaguggccucuuugucu

SEQ ID NO: 2462624 - RNA, 14 nt, Human
aaaguggccucuuu

SEQ ID NO: 2462625 - RNA, 17 nt, Human
aaaguggccaugccacc

SEQ ID NO: 2462626 - RNA, 19 nt, Human
aaagucuaaaguuuacagu

SEQ ID NO: 2462627 - RNA, 19 nt, Human
aaauaaaacuuuuuaaaau

SEQ ID NO: 2462628 - RNA, 13 nt, Human
aaauaaaagcagc

SEQ ID NO: 2462629 - RNA, 19 nt, Human
aaauaaaagcagcaucugc

SEQ ID NO: 2462630 - RNA, 15 nt, Human
aaauaaaguauauau

SEQ ID NO: 2462631 - RNA, 17 nt, Human
aaauaaaaccuuucaaa

SEQ ID NO: 2462632 - RNA, 11 nt, Human
aaauaaaagca

SEQ ID NO: 2462633 - RNA, 20 nt, Human
aaauaaaguuugcuuagaaa

SEQ ID NO: 2462634 - RNA, 18 nt, Human
aaauaaaguuggugacag

SEQ ID NO: 2462635 - RNA, 16 nt, Human
aaauaaaguauauaua

SEQ ID NO: 2462636 - RNA, 20 nt, Human
aaauaaaguauauauagaau

SEQ ID NO: 2462637 - RNA, 18 nt, Human
aaauaaaguaucaugcau

SEQ ID NO: 2462638 - RNA, 15 nt, Human
aaauaaaguaucaug

SEQ ID NO: 2462639 - RNA, 19 nt, Human
aaauaaaguaucaugcauu

SEQ ID NO: 2462640 - RNA, 13 nt, Human
aaauauuuauuuu

SEQ ID NO: 2462641 - RNA, 15 nt, Human
aaauauuuauuuuaa

SEQ ID NO: 2462642 - RNA, 20 nt, Human
aaauauuuauuuuaauaaug

SEQ ID NO: 2462643 - RNA, 12 nt, Human
aaaucaaauaug

SEQ ID NO: 2462644 - RNA, 14 nt, Human
aaaucaaauaugca

SEQ ID NO: 2462645 - RNA, 15 nt, Human
aaaucaaauaugcaa

SEQ ID NO: 2462646 - RNA, 16 nt, Human
aaaucaaauaugcaaa

SEQ ID NO: 2462647 - RNA, 12 nt, Human
aaaucuggaagc

SEQ ID NO: 2462648 - RNA, 22 nt, Human
aaaucuguccaaaggaggcugg

SEQ ID NO: 2462649 - RNA, 21 nt, Human
aaaucuguccaaaggaggcug

SEQ ID NO: 2462650 - RNA, 23 nt, Human
aaaucaauuacugguccaaaaga

SEQ ID NO: 2462651 - RNA, 19 nt, Human
aaaucaauuacugguccaa

SEQ ID NO: 2462652 - RNA, 13 nt, Human
aaaucaaugucac

SEQ ID NO: 2462653 - RNA, 19 nt, Human
aaaucaaugcuauaacuau

SEQ ID NO: 2462654 - RNA, 17 nt, Human
aaaucaauacacuaguu

SEQ ID NO: 2462655 - RNA, 22 nt, Human
aaaucaauacacuaguuguuuc

SEQ ID NO: 2462656 - RNA, 15 nt, Human
aaaucaauacacuag

SEQ ID NO: 2462657 - RNA, 23 nt, Human
aaaucaaguauuugggaagugaa

SEQ ID NO: 2462658 - RNA, 18 nt, Human
aaaucaaguauuugggaa

SEQ ID NO: 2462659 - RNA, 24 nt, Human
aaauagcucaggugucccugcacu

SEQ ID NO: 2462660 - RNA, 23 nt, Human
aaauagccaacacccaucuguuu

SEQ ID NO: 2462661 - RNA, 13 nt, Human
aaauagcauuugu

SEQ ID NO: 2462662 - RNA, 22 nt, Human
aaauagcauguauugugucuuu

SEQ ID NO: 2462663 - RNA, 21 nt, Human
aaauagccacuuaccuucaau

SEQ ID NO: 2462664 - RNA, 23 nt, Human
aaauagccacuuaccuucaauaa

SEQ ID NO: 2462665 - RNA, 21 nt, Human
aaauagccgggcaugguggcg

SEQ ID NO: 2462666 - RNA, 17 nt, Human
aaauaguuaagacauga

SEQ ID NO: 2462667 - RNA, 22 nt, Human
aaauaguuaagacaugauuucc

SEQ ID NO: 2462668 - RNA, 21 nt, Human
aaauaguguggaaauuaagaa

SEQ ID NO: 2462669 - RNA, 23 nt, Human
aaauaguugagccagcagacauu

SEQ ID NO: 2462670 - RNA, 20 nt, Human
aaauaguugagccagcagac

SEQ ID NO: 2462671 - RNA, 19 nt, Human
aaauaguugagccagcaga

SEQ ID NO: 2462672 - RNA, 19 nt, Human
aaauaguggugugauuugg

SEQ ID NO: 2462673 - RNA, 20 nt, Human
aaauaguguggaaauuaaga

SEQ ID NO: 2462674 - RNA, 23 nt, Human
aaauaggagaggaugagagccca

SEQ ID NO: 2462675 - RNA, 24 nt, Human
aaauaggagaggaugagagcccag

SEQ ID NO: 2462676 - RNA, 16 nt, Human
aaauaggagaggauga

SEQ ID NO: 2462677 - RNA, 14 nt, Human
aaauaggagaggau

SEQ ID NO: 2462678 - RNA, 16 nt, Human
aaauagcuuguauagu

SEQ ID NO: 2462679 - RNA, 12 nt, Human
aaauagcuauau

SEQ ID NO: 2462680 - RNA, 13 nt, Human
aaauagcucuuuc

SEQ ID NO: 2462681 - RNA, 19 nt, Human
aaauagcuccguggagcag

SEQ ID NO: 2462682 - RNA, 16 nt, Human
aaauagcuauauccau

SEQ ID NO: 2462683 - RNA, 19 nt, Human
aaauagcuauauccaugua

SEQ ID NO: 2462684 - RNA, 15 nt, Human
aaauagcuuguauag

SEQ ID NO: 2462685 - RNA, 18 nt, Human
aaaaucauauugcuucuu

SEQ ID NO: 2462686 - RNA, 14 nt, Human
aaaaucauauugcu

SEQ ID NO: 2462687 - RNA, 13 nt, Human
aaaaucauauugc

SEQ ID NO: 2462688 - RNA, 13 nt, Human
aaaaucauaaacu

SEQ ID NO: 2462689 - RNA, 22 nt, Human
aaaaucauaaacugugugcaga

SEQ ID NO: 2462690 - RNA, 13 nt, Human
aaaaucauggaau

SEQ ID NO: 2462691 - RNA, 12 nt, Human
aaaaucaugaga

SEQ ID NO: 2462692 - RNA, 19 nt, Human
aaaaucauggaaugguuau

SEQ ID NO: 2462693 - RNA, 17 nt, Human
aaaaucauggaaugguu

SEQ ID NO: 2462694 - RNA, 22 nt, Human
aaaaucauggaaugguuauaaa

SEQ ID NO: 2462695 - RNA, 15 nt, Human
aaaaucauguacauu

SEQ ID NO: 2462696 - RNA, 21 nt, Human
aaaaucuacacuccagugaga

SEQ ID NO: 2462697 - RNA, 15 nt, Human
aaaaucuaauauuaa

SEQ ID NO: 2462698 - RNA, 20 nt, Human
aaaauccuugcuuaugacau

SEQ ID NO: 2462699 - RNA, 13 nt, Human
aaaauccuugcuu

SEQ ID NO: 2462700 - RNA, 22 nt, Human
aaaaucccuuaccucggugccu

SEQ ID NO: 2462701 - RNA, 16 nt, Human
aaaaucauguacauuu

SEQ ID NO: 2462702 - RNA, 17 nt, Human
aaaaucauguacauuuc

SEQ ID NO: 2462703 - RNA, 15 nt, Human
aaaaucauguuugcu

SEQ ID NO: 2462704 - RNA, 18 nt, Human
aaaaucauguacauuucu

SEQ ID NO: 2462705 - RNA, 12 nt, Human
aaaaucauugau

SEQ ID NO: 2462706 - RNA, 16 nt, Human
aaaauccucuuccucu

SEQ ID NO: 2462707 - RNA, 17 nt, Human
aaaauaaaacuuuuuaa

SEQ ID NO: 2462708 - RNA, 17 nt, Human
aaaaguucugacuugac

SEQ ID NO: 2462709 - RNA, 14 nt, Human
aaaaguugaaauua

SEQ ID NO: 2462710 - RNA, 12 nt, Human
aaaauaaacaaa

SEQ ID NO: 2462711 - RNA, 14 nt, Human
aaaauaaacaaaua

SEQ ID NO: 2462712 - RNA, 19 nt, Human
aaaauaaaauuaaagcuga

SEQ ID NO: 2462713 - RNA, 21 nt, Human
aaaaguguuuauuuuucauau

SEQ ID NO: 2462714 - RNA, 13 nt, Human
aaaaguguuuauu

SEQ ID NO: 2462715 - RNA, 14 nt, Human
aaaaguuaaaaagu

SEQ ID NO: 2462716 - RNA, 12 nt, Human
aaaaguuauuaa

SEQ ID NO: 2462717 - RNA, 14 nt, Human
aaaaguuagcugag

SEQ ID NO: 2462718 - RNA, 18 nt, Human
aaaaguucugcagauaaa

SEQ ID NO: 2462719 - RNA, 12 nt, Human
aaaaguugaaau

SEQ ID NO: 2462720 - RNA, 17 nt, Human
aaaaguuauuaauauuu

SEQ ID NO: 2462721 - RNA, 17 nt, Human
aaaagugggcuugauuc

SEQ ID NO: 2462722 - RNA, 18 nt, Human
aaaagugggcuugauucu

SEQ ID NO: 2462723 - RNA, 17 nt, Human
aaaagugauuguuggca

SEQ ID NO: 2462724 - RNA, 17 nt, Human
aaaaguggccucuuugu

SEQ ID NO: 2462725 - RNA, 21 nt, Human
aaaagugggccagugugggaa

SEQ ID NO: 2462726 - RNA, 16 nt, Human
aaaaguggccucuuug

SEQ ID NO: 2462727 - RNA, 23 nt, Human
aaaagugaucaauaaaaugugau

SEQ ID NO: 2462728 - RNA, 21 nt, Human
aaaagugaucaauaaaaugug

SEQ ID NO: 2462729 - RNA, 14 nt, Human
aaaaagaaacaaga

SEQ ID NO: 2462730 - RNA, 14 nt, Human
aaaaagaaaagaua

SEQ ID NO: 2462731 - RNA, 13 nt, Human
aaaaagaaaaaag

SEQ ID NO: 2462732 - RNA, 11 nt, Human
aaaaagaaaaa

SEQ ID NO: 2462733 - RNA, 17 nt, Human
aaaaacucgaggacugu

SEQ ID NO: 2462734 - RNA, 21 nt, Human
aaaaacucgaggacuguauuu

SEQ ID NO: 2462735 - RNA, 20 nt, Human
aaaaacucugggaaauaaga

SEQ ID NO: 2462736 - RNA, 16 nt, Human
aaaaagaaacauuugg

SEQ ID NO: 2462737 - RNA, 15 nt, Human
aaaaagaaaggaggg

SEQ ID NO: 2462738 - RNA, 19 nt, Human
aaacagaaacaaaaacacu

SEQ ID NO: 2462739 - RNA, 21 nt, Human
aaacagaaacaaaaacacuaa

SEQ ID NO: 2462740 - RNA, 13 nt, Human
aaacagaaacaaa

SEQ ID NO: 2462741 - RNA, 12 nt, Human
aaacagacacug

SEQ ID NO: 2462742 - RNA, 12 nt, Human
aaacagaagccu

SEQ ID NO: 2462743 - RNA, 13 nt, Human
aaacagacuauuu

SEQ ID NO: 2462744 - RNA, 21 nt, Human
aaacagaacaucauuagaaca

SEQ ID NO: 2462745 - RNA, 22 nt, Human
aaacagaccuaaugcuccuugu

SEQ ID NO: 2462746 - RNA, 13 nt, Human
aaacagaacauca

SEQ ID NO: 2462747 - RNA, 22 nt, Human
aaacagacaaaaacagccucac

SEQ ID NO: 2462748 - RNA, 14 nt, Human
aaaauugauguguu

SEQ ID NO: 2462749 - RNA, 12 nt, Human
aaaauugaugug

SEQ ID NO: 2462750 - RNA, 21 nt, Human
aaaauugaugggauuugguca

SEQ ID NO: 2462751 - RNA, 15 nt, Human
aaacaccuucucugg

SEQ ID NO: 2462752 - RNA, 22 nt, Human
aaacaccuuccagcuccuguaa

SEQ ID NO: 2462753 - RNA, 21 nt, Human
aaaauugauguguuuauuuau

SEQ ID NO: 2462754 - RNA, 15 nt, Human
aaaauugcaaaucuu

SEQ ID NO: 2462755 - RNA, 23 nt, Human
aaaaucuaauauuaaaaauaugg

SEQ ID NO: 2462756 - RNA, 23 nt, Human
aaaauugauauacuuuuuucuua

SEQ ID NO: 2462757 - RNA, 19 nt, Human
aaaaucucaaauuucuaaa

SEQ ID NO: 2462758 - RNA, 22 nt, Human
aaaaucucaaauuucuaaaucu

SEQ ID NO: 2462759 - RNA, 16 nt, Human
aaaaucucaauauuuc

SEQ ID NO: 2462760 - RNA, 16 nt, Human
aaacacuguucucugc

SEQ ID NO: 2462761 - RNA, 13 nt, Human
aaacacugugcac

SEQ ID NO: 2462762 - RNA, 15 nt, Human
aaacacuguguaagc

SEQ ID NO: 2462763 - RNA, 22 nt, Human
aaacacugggagaaaugaaaaa

SEQ ID NO: 2462764 - RNA, 19 nt, Human
aaacacuggggcuggcaca

SEQ ID NO: 2462765 - RNA, 24 nt, Human
aaacacucaguuguucaauaauaa

SEQ ID NO: 2462766 - RNA, 21 nt, Human
aaacacugggagaaaugaaaa

SEQ ID NO: 2462767 - RNA, 14 nt, Human
aaacaccuucucug

SEQ ID NO: 2462768 - RNA, 13 nt, Human
aaacaccuucucu

SEQ ID NO: 2462769 - RNA, 21 nt, Human
aaacacgcacuuagucucuaa

SEQ ID NO: 2462770 - RNA, 12 nt, Human
aaagauauuuug

SEQ ID NO: 2462771 - RNA, 16 nt, Human
aaagauauuuugcuuu

SEQ ID NO: 2462772 - RNA, 22 nt, Human
aaagagugggcugcaucuggga

SEQ ID NO: 2462773 - RNA, 16 nt, Human
aaagaguucuuaagga

SEQ ID NO: 2462774 - RNA, 15 nt, Human
aaagauaaagaugau

SEQ ID NO: 2462775 - RNA, 13 nt, Human
aaagauaaagaug

SEQ ID NO: 2462776 - RNA, 17 nt, Human
aaagauauuuugcuuug

SEQ ID NO: 2462777 - RNA, 12 nt, Human
aaagaguuagaa

SEQ ID NO: 2462778 - RNA, 22 nt, Human
aaagaagguuuguguuuuucug

SEQ ID NO: 2462779 - RNA, 18 nt, Human
aaagaaggaaaaugaucu

SEQ ID NO: 2462780 - RNA, 14 nt, Human
aaagaguaggaaga

SEQ ID NO: 2462781 - RNA, 20 nt, Human
aaagaagguuucagaaagaa

SEQ ID NO: 2462782 - RNA, 16 nt, Human
aaagaagcccccagcu

SEQ ID NO: 2462783 - RNA, 12 nt, Human
aaagaaggaagu

SEQ ID NO: 2462784 - RNA, 21 nt, Human
aaagaagagccggagccucca

SEQ ID NO: 2462785 - RNA, 12 nt, Human
aaagaagagaca

SEQ ID NO: 2462786 - RNA, 21 nt, Human
aaagaagacauguuuuagaca

SEQ ID NO: 2462787 - RNA, 15 nt, Human
aaagaagauguuuaa

SEQ ID NO: 2462788 - RNA, 13 nt, Human
aaagaagauguuu

SEQ ID NO: 2462789 - RNA, 20 nt, Human
aaagaagcccaauauuauaa

SEQ ID NO: 2462790 - RNA, 15 nt, Human
aaagaaauguaaggg

SEQ ID NO: 2462791 - RNA, 18 nt, Human
aaagaagacauguuuuag

SEQ ID NO: 2462792 - RNA, 15 nt, Human
aaagaagacauguuu

SEQ ID NO: 2462793 - RNA, 21 nt, Human
aaacugagaugugaacacauc

SEQ ID NO: 2462794 - RNA, 23 nt, Human
aaacugagaugugaacacaucag

SEQ ID NO: 2462795 - RNA, 14 nt, Human
aaacucugccagcc

SEQ ID NO: 2462796 - RNA, 11 nt, Human
aaacucugcug

SEQ ID NO: 2462797 - RNA, 12 nt, Human
aaacucugcugu

SEQ ID NO: 2462798 - RNA, 14 nt, Human
aaacucugggaaau

SEQ ID NO: 2462799 - RNA, 12 nt, Human
aaacugacuuua

SEQ ID NO: 2462800 - RNA, 21 nt, Human
aaacugagacucagacaggaa

SEQ ID NO: 2462801 - RNA, 22 nt, Human
aaacugagauccuuccuuuuga

SEQ ID NO: 2462802 - RNA, 15 nt, Human
aaagaaauauaccua

SEQ ID NO: 2462803 - RNA, 19 nt, Human
aaacugaggaauuucaccu

SEQ ID NO: 2462804 - RNA, 18 nt, Human
aaacugaggaauuuucuu

SEQ ID NO: 2462805 - RNA, 14 nt, Human
aaacugaggaauuu

SEQ ID NO: 2462806 - RNA, 23 nt, Human
aaacugagacucagacaggaaag

SEQ ID NO: 2462807 - RNA, 17 nt, Human
aaagaaauauaccuaaa

SEQ ID NO: 2462808 - RNA, 23 nt, Human
aaaccaugaagagauuuuucaug

SEQ ID NO: 2462809 - RNA, 18 nt, Human
aaaccaucauugaaaucu

SEQ ID NO: 2462810 - RNA, 13 nt, Human
aaacccucgaggc

SEQ ID NO: 2462811 - RNA, 24 nt, Human
aaacccucgaggcggaucuuugga

SEQ ID NO: 2462812 - RNA, 18 nt, Human
aaacucuccucugcugcu

SEQ ID NO: 2462813 - RNA, 23 nt, Human
aaacucucuuugggaauguuugu

SEQ ID NO: 2462814 - RNA, 22 nt, Human
aaacucucuuugggaauguuug

SEQ ID NO: 2462815 - RNA, 17 nt, Human
aaacucucuuugggaau

SEQ ID NO: 2462816 - RNA, 12 nt, Human
aaacucucugaa

SEQ ID NO: 2462817 - RNA, 13 nt, Human
aaacucucugaac

SEQ ID NO: 2462818 - RNA, 16 nt, Human
aaacccuauugguaaa

SEQ ID NO: 2462819 - RNA, 19 nt, Human
aaacccgacagagggaaga

SEQ ID NO: 2462820 - RNA, 18 nt, Human
aaacccgacagagggaag

SEQ ID NO: 2462821 - RNA, 15 nt, Human
aaaccaugcaaaugc

SEQ ID NO: 2462822 - RNA, 13 nt, Human
aaaccauguagaa

SEQ ID NO: 2462823 - RNA, 16 nt, Human
aaacccgacagaggga

SEQ ID NO: 2462824 - RNA, 20 nt, Human
aaaccauuaugaagaagaga

SEQ ID NO: 2462825 - RNA, 13 nt, Human
aagucuguuuuau

SEQ ID NO: 2462826 - RNA, 14 nt, Human
aagucuguuuuaug

SEQ ID NO: 2462827 - RNA, 12 nt, Human
aagucuguuuua

SEQ ID NO: 2462828 - RNA, 21 nt, Human
aagucugcaacuuuaagcagc

SEQ ID NO: 2462829 - RNA, 18 nt, Human
aagucuggaucugggacc

SEQ ID NO: 2462830 - RNA, 22 nt, Human
aagucugugagauucauucaug

SEQ ID NO: 2462831 - RNA, 23 nt, Human
aagucugugugaugaacuuucuc

SEQ ID NO: 2462832 - RNA, 22 nt, Human
aagucugugugaugaacuuucu

SEQ ID NO: 2462833 - RNA, 15 nt, Human
aagucuccaaagucu

SEQ ID NO: 2462834 - RNA, 18 nt, Human
aagucucuuuucuuuaga

SEQ ID NO: 2462835 - RNA, 21 nt, Human
aaguggaaaaauagccugccu

SEQ ID NO: 2462836 - RNA, 13 nt, Human
aaguggaaauguu

SEQ ID NO: 2462837 - RNA, 17 nt, Human
aagugcuuccaaggcag

SEQ ID NO: 2462838 - RNA, 16 nt, Human
aaguggaccaggacag

SEQ ID NO: 2462839 - RNA, 22 nt, Human
aaguguaaagcauuccaacaaa

SEQ ID NO: 2462840 - RNA, 21 nt, Human
aaguguaaagcauuccaacaa

SEQ ID NO: 2462841 - RNA, 19 nt, Human
aaguggaccaggacaggac

SEQ ID NO: 2462842 - RNA, 20 nt, Human
aaguguaaagcauuccaaca

SEQ ID NO: 2462843 - RNA, 14 nt, Human
aaguguaacagcug

SEQ ID NO: 2462844 - RNA, 15 nt, Human
aaguguaacagcuga

SEQ ID NO: 2462845 - RNA, 16 nt, Human
aaguguaacagcugag

SEQ ID NO: 2462846 - RNA, 17 nt, Human
aaguguaacagcugagg

SEQ ID NO: 2462847 - RNA, 19 nt, Human
aaguggaaaaauagccugc

SEQ ID NO: 2462848 - RNA, 21 nt, Human
aaguguaggcagacacaggga

SEQ ID NO: 2462849 - RNA, 19 nt, Human
aaguguaggcagacacagg

SEQ ID NO: 2462850 - RNA, 17 nt, Human
aaguguaggcagacaca

SEQ ID NO: 2462851 - RNA, 16 nt, Human
aaguguaggcagacac

SEQ ID NO: 2462852 - RNA, 15 nt, Human
aaguguaggcagaca

SEQ ID NO: 2462853 - RNA, 14 nt, Human
aaguguaggcagac

SEQ ID NO: 2462854 - RNA, 13 nt, Human
aaguguaggcaga

SEQ ID NO: 2462855 - RNA, 20 nt, Human
aaguguaggcagacacaggg

SEQ ID NO: 2462856 - RNA, 14 nt, Human
aaguguacauaugu

SEQ ID NO: 2462857 - RNA, 16 nt, Human
aaguguaauagauuau

SEQ ID NO: 2462858 - RNA, 21 nt, Human
aaguguaacagcugaggucuc

SEQ ID NO: 2462859 - RNA, 11 nt, Human
aaguguaacug

SEQ ID NO: 2462860 - RNA, 12 nt, Human
aaguguaacugg

SEQ ID NO: 2462861 - RNA, 19 nt, Human
aaguguaagaaacacacug

SEQ ID NO: 2462862 - RNA, 17 nt, Human
aaguugauauagaacag

SEQ ID NO: 2462863 - RNA, 21 nt, Human
aaguugauauagaacagugcu

SEQ ID NO: 2462864 - RNA, 16 nt, Human
aaguugcagugagcug

SEQ ID NO: 2462865 - RNA, 20 nt, Human
aaguugauauagaacagugc

SEQ ID NO: 2462866 - RNA, 22 nt, Human
aaguugcagugagcugauauca

SEQ ID NO: 2462867 - RNA, 23 nt, Human
aaggugcaguucccccaaccuca

SEQ ID NO: 2462868 - RNA, 14 nt, Human
aaggugcaguuccc

SEQ ID NO: 2462869 - RNA, 18 nt, Human
aaggugccugugaggcag

SEQ ID NO: 2462870 - RNA, 11 nt, Human
aaggugccugu

SEQ ID NO: 2462871 - RNA, 20 nt, Human
aaggugccugugaggcaggg

SEQ ID NO: 2462872 - RNA, 19 nt, Human
aaguagaagucuuagaugu

SEQ ID NO: 2462873 - RNA, 20 nt, Human
aaguagaagucuuagaugua

SEQ ID NO: 2462874 - RNA, 21 nt, Human
aaggugaguuugagcugccuu

SEQ ID NO: 2462875 - RNA, 20 nt, Human
aaggugaguuugagcugccu

SEQ ID NO: 2462876 - RNA, 17 nt, Human
aaggugauauauuuaaa

SEQ ID NO: 2462877 - RNA, 22 nt, Human
aaggugaguuugagcugccuuc

SEQ ID NO: 2462878 - RNA, 20 nt, Human
aaggugaggagcuugaaacc

SEQ ID NO: 2462879 - RNA, 18 nt, Human
aaggucggaggcuuggga

SEQ ID NO: 2462880 - RNA, 14 nt, Human
aaggucggaccagc

SEQ ID NO: 2462881 - RNA, 20 nt, Human
aagguccucugucagucaca

SEQ ID NO: 2462882 - RNA, 22 nt, Human
aaggucggaggcuugggaccgc

SEQ ID NO: 2462883 - RNA, 20 nt, Human
aaggucggaggcuugggacc

SEQ ID NO: 2462884 - RNA, 17 nt, Human
aaggugacccaaugauu

SEQ ID NO: 2462885 - RNA, 21 nt, Human
aaguagggacuucugucuuca

SEQ ID NO: 2462886 - RNA, 15 nt, Human
aaguagggggucuaa

SEQ ID NO: 2462887 - RNA, 18 nt, Human
aaguaguaaaaauuaaaa

SEQ ID NO: 2462888 - RNA, 15 nt, Human
aaguaguaaaaauua

SEQ ID NO: 2462889 - RNA, 13 nt, Human
aaguaguaaaaau

SEQ ID NO: 2462890 - RNA, 19 nt, Human
aaguagggguuguggguga

SEQ ID NO: 2462891 - RNA, 22 nt, Human
aaguaggacuuuccuaaauguu

SEQ ID NO: 2462892 - RNA, 14 nt, Human
aaguaggcaggacc

SEQ ID NO: 2462893 - RNA, 23 nt, Human
aaguaggacuuuccuaaauguuu

SEQ ID NO: 2462894 - RNA, 15 nt, Human
aaguaggcaggacca

SEQ ID NO: 2462895 - RNA, 15 nt, Human
aaguaggcaugaggg

SEQ ID NO: 2462896 - RNA, 21 nt, Human
aaguagaagucuuagauguau

SEQ ID NO: 2462897 - RNA, 18 nt, Human
aaguaucccuacuguaau

SEQ ID NO: 2462898 - RNA, 23 nt, Human
aaguaucccuacuguaauuugug

SEQ ID NO: 2462899 - RNA, 17 nt, Human
aaguaucccuacuguaa

SEQ ID NO: 2462900 - RNA, 14 nt, Human
aaguaguccuguga

SEQ ID NO: 2462901 - RNA, 22 nt, Human
aaguccucuuuucugagaggac

SEQ ID NO: 2462902 - RNA, 23 nt, Human
aaguccugaagaggcgggccagc

SEQ ID NO: 2462903 - RNA, 17 nt, Human
aaguccugaagaggcgg

SEQ ID NO: 2462904 - RNA, 13 nt, Human
aaguccugaagag

SEQ ID NO: 2462905 - RNA, 22 nt, Human
aaguccugaagaggcgggccag

SEQ ID NO: 2462906 - RNA, 18 nt, Human
aaguccuuaccucuuccg

SEQ ID NO: 2462907 - RNA, 21 nt, Human
aaguccuuuuuuuccaucuuu

SEQ ID NO: 2462908 - RNA, 13 nt, Human
aaguccuuuaugu

SEQ ID NO: 2462909 - RNA, 16 nt, Human
aaguccuuuaugugga

SEQ ID NO: 2462910 - RNA, 15 nt, Human
aagucgaauuaauag

SEQ ID NO: 2462911 - RNA, 14 nt, Human
aagucuccaaaguc

SEQ ID NO: 2462912 - RNA, 17 nt, Human
aagucuaugaugcuguu

SEQ ID NO: 2462913 - RNA, 17 nt, Human
aagucuaaauauuuccu

SEQ ID NO: 2462914 - RNA, 21 nt, Human
aagucucacuggcugucagua

SEQ ID NO: 2462915 - RNA, 17 nt, Human
aagucuaaaguuuacag

SEQ ID NO: 2462916 - RNA, 15 nt, Human
aagucuaaaguuuac

SEQ ID NO: 2462917 - RNA, 14 nt, Human
aagucuaaaguuua

SEQ ID NO: 2462918 - RNA, 13 nt, Human
aagucuaaaguuu

SEQ ID NO: 2462919 - RNA, 11 nt, Human
aagucuaaagu

SEQ ID NO: 2462920 - RNA, 15 nt, Human
aagucguugugaggg

SEQ ID NO: 2462921 - RNA, 19 nt, Human
aagucuaggagcugggagg

SEQ ID NO: 2462922 - RNA, 22 nt, Human
aagucuaggagcugggaggaaa

SEQ ID NO: 2462923 - RNA, 20 nt, Human
aagucuaaaguuuacaguaa

SEQ ID NO: 2462924 - RNA, 19 nt, Human
aagucuaaaguuuacagua

SEQ ID NO: 2462925 - RNA, 21 nt, Human
aagucuaaaguuuacaguaaa

SEQ ID NO: 2462926 - RNA, 16 nt, Human
aagucuaaauauuucc

SEQ ID NO: 2462927 - RNA, 18 nt, Human
aaguccaagcauuuagau

SEQ ID NO: 2462928 - RNA, 12 nt, Human
aaguccaaugug

SEQ ID NO: 2462929 - RNA, 17 nt, Human
aaguaucuacaugcggu

SEQ ID NO: 2462930 - RNA, 17 nt, Human
aaguccaagcauaccaa

SEQ ID NO: 2462931 - RNA, 19 nt, Human
aaguaguaaaaauuaaaaa

SEQ ID NO: 2462932 - RNA, 17 nt, Human
aaguaguguaucacagu

SEQ ID NO: 2462933 - RNA, 18 nt, Human
aaguauccugcuucugau

SEQ ID NO: 2462934 - RNA, 17 nt, Human
aaguccuacaagcuaaa

SEQ ID NO: 2462935 - RNA, 18 nt, Human
aaguccucuuuucugaga

SEQ ID NO: 2462936 - RNA, 22 nt, Human
aagucccuguuuucugagcccg

SEQ ID NO: 2462937 - RNA, 21 nt, Human
aagucccuguuuucugagccc

SEQ ID NO: 2462938 - RNA, 22 nt, Human
aagucccuguaauuguuguuug

SEQ ID NO: 2462939 - RNA, 22 nt, Human
aaguccagauuuacacugggag

SEQ ID NO: 2462940 - RNA, 19 nt, Human
aaguccagauuuacacugg

SEQ ID NO: 2462941 - RNA, 16 nt, Human
aagggaaacugccagc

SEQ ID NO: 2462942 - RNA, 17 nt, Human
aagggaaacugccagca

SEQ ID NO: 2462943 - RNA, 16 nt, Human
aagggaaaagucucuu

SEQ ID NO: 2462944 - RNA, 23 nt, Human
aagggcauuggccauucuauugu

SEQ ID NO: 2462945 - RNA, 11 nt, Human
aagggccagag

SEQ ID NO: 2462946 - RNA, 12 nt, Human
aagggccagagc

SEQ ID NO: 2462947 - RNA, 13 nt, Human
aagggccagagcc

SEQ ID NO: 2462948 - RNA, 14 nt, Human
aagggccagagcca

SEQ ID NO: 2462949 - RNA, 15 nt, Human
aagggccagagccag

SEQ ID NO: 2462950 - RNA, 16 nt, Human
aagggccagagccagg

SEQ ID NO: 2462951 - RNA, 18 nt, Human
aaggucauuuuuuuuaag

SEQ ID NO: 2462952 - RNA, 19 nt, Human
aaggucauuuuuuuuaaga

SEQ ID NO: 2462953 - RNA, 17 nt, Human
aagggccagagccaggg

SEQ ID NO: 2462954 - RNA, 14 nt, Human
aagggccaguccug

SEQ ID NO: 2462955 - RNA, 16 nt, Human
aagggccaguccugcc

SEQ ID NO: 2462956 - RNA, 19 nt, Human
aagggccaugcugaaggga

SEQ ID NO: 2462957 - RNA, 17 nt, Human
aagggccaugcugaagg

SEQ ID NO: 2462958 - RNA, 16 nt, Human
aagggccaugcugaag

SEQ ID NO: 2462959 - RNA, 18 nt, Human
aagggccagucugggcug

SEQ ID NO: 2462960 - RNA, 14 nt, Human
aagggccagucugg

SEQ ID NO: 2462961 - RNA, 9 nt, Human
aagggccag

SEQ ID NO: 2462962 - RNA, 22 nt, Human
aagggccaguccugccuggcca

SEQ ID NO: 2462963 - RNA, 16 nt, Human
aagggacauguuuuga

SEQ ID NO: 2462964 - RNA, 17 nt, Human
aagggaaguugugccuu

SEQ ID NO: 2462965 - RNA, 18 nt, Human
aagggaaggaacucuggc

SEQ ID NO: 2462966 - RNA, 23 nt, Human
aagggaaggccccacagacaagg

SEQ ID NO: 2462967 - RNA, 15 nt, Human
aagggaaccuguguc

SEQ ID NO: 2462968 - RNA, 16 nt, Human
aagggaaauaucauuu

SEQ ID NO: 2462969 - RNA, 23 nt, Human
aagggaacagugaggugcccagc

SEQ ID NO: 2462970 - RNA, 23 nt, Human
aagggaaacugccagcaacgcag

SEQ ID NO: 2462971 - RNA, 15 nt, Human
aagggaaauaucauu

SEQ ID NO: 2462972 - RNA, 14 nt, Human
aagggaaauaucau

SEQ ID NO: 2462973 - RNA, 12 nt, Human
aagggaaauaga

SEQ ID NO: 2462974 - RNA, 13 nt, Human
aagggaaauauca

SEQ ID NO: 2462975 - RNA, 13 nt, Human
aagggaccaaggc

SEQ ID NO: 2462976 - RNA, 20 nt, Human
aagggacauguuuugauaaa

SEQ ID NO: 2462977 - RNA, 19 nt, Human
aagggacauguuuugauaa

SEQ ID NO: 2462978 - RNA, 15 nt, Human
aagggagaagaaagg

SEQ ID NO: 2462979 - RNA, 16 nt, Human
aagggagaagaaaggu

SEQ ID NO: 2462980 - RNA, 17 nt, Human
aagggagagaccucauc

SEQ ID NO: 2462981 - RNA, 16 nt, Human
aagggagagagagagg

SEQ ID NO: 2462982 - RNA, 24 nt, Human
aagggagcacuggguugacuuuca

SEQ ID NO: 2462983 - RNA, 17 nt, Human
aagggagcagaacugaa

SEQ ID NO: 2462984 - RNA, 17 nt, Human
aagggagagcggggcag

SEQ ID NO: 2462985 - RNA, 18 nt, Human
aagggagcuaucaggaac

SEQ ID NO: 2462986 - RNA, 17 nt, Human
aagcgauucuucugcuu

SEQ ID NO: 2462987 - RNA, 21 nt, Human
aagcgauucuucugcuucagc

SEQ ID NO: 2462988 - RNA, 21 nt, Human
aagcggagguugcagggagcc

SEQ ID NO: 2462989 - RNA, 14 nt, Human
aagcuaauuugcau

SEQ ID NO: 2462990 - RNA, 19 nt, Human
aagcuacagguuacaacag

SEQ ID NO: 2462991 - RNA, 18 nt, Human
aagcuacagguuacaaca

SEQ ID NO: 2462992 - RNA, 15 nt, Human
aagcuacagguuaca

SEQ ID NO: 2462993 - RNA, 14 nt, Human
aagcuacagguuac

SEQ ID NO: 2462994 - RNA, 13 nt, Human
aagcuacagguua

SEQ ID NO: 2462995 - RNA, 15 nt, Human
aagcuaauuugcauu

SEQ ID NO: 2462996 - RNA, 22 nt, Human
aagcuaauuugcauuaaauuca

SEQ ID NO: 2462997 - RNA, 23 nt, Human
aagcuaauuugcauuaaauucac

SEQ ID NO: 2462998 - RNA, 23 nt, Human
aagcggaaaagguuuuauuuugu

SEQ ID NO: 2462999 - RNA, 21 nt, Human
aaggauuguaaaaaaaaaugc

SEQ ID NO: 2463000 - RNA, 14 nt, Human
aaggauuguaaaaa

SEQ ID NO: 2463001 - RNA, 13 nt, Human
aaggauuguaaaa

SEQ ID NO: 2463002 - RNA, 12 nt, Human
aaggauuguaaa

SEQ ID NO: 2463003 - RNA, 15 nt, Human
aaggauugcuacugu

SEQ ID NO: 2463004 - RNA, 15 nt, Human
aaggauguucuagca

SEQ ID NO: 2463005 - RNA, 23 nt, Human
aaggacuuccuguccagcuccaa

SEQ ID NO: 2463006 - RNA, 16 nt, Human
aaggaugugggggaag

SEQ ID NO: 2463007 - RNA, 15 nt, Human
aaggauguugguguu

SEQ ID NO: 2463008 - RNA, 16 nt, Human
aaggauucauguggaa

SEQ ID NO: 2463009 - RNA, 20 nt, Human
aaggcagcucuaaaugucaa

SEQ ID NO: 2463010 - RNA, 14 nt, Human
aaggcaggaagaga

SEQ ID NO: 2463011 - RNA, 13 nt, Human
aaggcaggaagag

SEQ ID NO: 2463012 - RNA, 12 nt, Human
aaggcaggaaga

SEQ ID NO: 2463013 - RNA, 23 nt, Human
aaggauuguaaaaaaaaaugccu

SEQ ID NO: 2463014 - RNA, 16 nt, Human
aaggcaggaaugugug

SEQ ID NO: 2463015 - RNA, 19 nt, Human
aaggcaggaauguguggca

SEQ ID NO: 2463016 - RNA, 12 nt, Human
aaggcagggagg

SEQ ID NO: 2463017 - RNA, 18 nt, Human
aaggcagggaaaggcucu

SEQ ID NO: 2463018 - RNA, 20 nt, Human
aaggcagggagcgagggaga

SEQ ID NO: 2463019 - RNA, 13 nt, Human
aaggacagccccu

SEQ ID NO: 2463020 - RNA, 19 nt, Human
aaggacagccccuccucca

SEQ ID NO: 2463021 - RNA, 17 nt, Human
aaggacagaguaugaac

SEQ ID NO: 2463022 - RNA, 18 nt, Human
aaggacacuuccugccua

SEQ ID NO: 2463023 - RNA, 13 nt, Human
aaggacacuagaa

SEQ ID NO: 2463024 - RNA, 21 nt, Human
aagcugugugcucuccaagcc

SEQ ID NO: 2463025 - RNA, 17 nt, Human
aaggacacuuccugccu

SEQ ID NO: 2463026 - RNA, 16 nt, Human
aaggacacuuccugcc

SEQ ID NO: 2463027 - RNA, 14 nt, Human
aaggacacuuccug

SEQ ID NO: 2463028 - RNA, 20 nt, Human
aagcuguguccuugcaccug

SEQ ID NO: 2463029 - RNA, 17 nt, Human
aaggacuuccuguccag

SEQ ID NO: 2463030 - RNA, 20 nt, Human
aaggacuuccuguccagcuc

SEQ ID NO: 2463031 - RNA, 21 nt, Human
aaggacuuccuguccagcucc

SEQ ID NO: 2463032 - RNA, 22 nt, Human
aaggacuuccuguccagcucca

SEQ ID NO: 2463033 - RNA, 23 nt, Human
aaggacuguuuuuuccugagcuu

SEQ ID NO: 2463034 - RNA, 21 nt, Human
aaggacugugacaggcagcag

SEQ ID NO: 2463035 - RNA, 18 nt, Human
aagcuguguggcagucug

SEQ ID NO: 2463036 - RNA, 20 nt, Human
aagcugugccacccugggcu

SEQ ID NO: 2463037 - RNA, 16 nt, Human
aagcugugccacccug

SEQ ID NO: 2463038 - RNA, 13 nt, Human
aagcuguggccag

SEQ ID NO: 2463039 - RNA, 21 nt, Human
aagcugugccacccugggcuc

SEQ ID NO: 2463040 - RNA, 12 nt, Human
aagcuguguccu

SEQ ID NO: 2463041 - RNA, 22 nt, Human
aagcuguguccuugcaccugca

SEQ ID NO: 2463042 - RNA, 14 nt, Human
aagcugugccaccc

SEQ ID NO: 2463043 - RNA, 22 nt, Human
aagcugugagacagugggaaau

SEQ ID NO: 2463044 - RNA, 13 nt, Human
aagcugugagaca

SEQ ID NO: 2463045 - RNA, 23 nt, Human
aagcuguaguagcccuuucugug

SEQ ID NO: 2463046 - RNA, 19 nt, Human
aagcugugacuucuccagg

SEQ ID NO: 2463047 - RNA, 22 nt, Human
aagcuguaguagcccuuucugu

SEQ ID NO: 2463048 - RNA, 18 nt, Human
aagcuguaaaaagagaga

SEQ ID NO: 2463049 - RNA, 17 nt, Human
aagcuguaaaaagagag

SEQ ID NO: 2463050 - RNA, 17 nt, Human
aagcugguaaacuauuu

SEQ ID NO: 2463051 - RNA, 21 nt, Human
aagcuggucccacucagucca

SEQ ID NO: 2463052 - RNA, 18 nt, Human
aagcuggucccacucagu

SEQ ID NO: 2463053 - RNA, 22 nt, Human
aagcuacagguuacaacagauu

SEQ ID NO: 2463054 - RNA, 21 nt, Human
aagcuacagguuacaacagau

SEQ ID NO: 2463055 - RNA, 20 nt, Human
aagcuacagguuacaacaga

SEQ ID NO: 2463056 - RNA, 19 nt, Human
aagcuaccucaaacuucca

SEQ ID NO: 2463057 - RNA, 15 nt, Human
aagcugggcagguug

SEQ ID NO: 2463058 - RNA, 18 nt, Human
aagcugggccccagccca

SEQ ID NO: 2463059 - RNA, 17 nt, Human
aagcugggccccagccc

SEQ ID NO: 2463060 - RNA, 19 nt, Human
aagcugggccccagcccac

SEQ ID NO: 2463061 - RNA, 16 nt, Human
aagauguuugucagau

SEQ ID NO: 2463062 - RNA, 18 nt, Human
aagauguuuaacuuaauc

SEQ ID NO: 2463063 - RNA, 14 nt, Human
aagauguuuaacuu

SEQ ID NO: 2463064 - RNA, 18 nt, Human
aagauuacuuagaggaaa

SEQ ID NO: 2463065 - RNA, 19 nt, Human
aagauucccagagacagga

SEQ ID NO: 2463066 - RNA, 20 nt, Human
aagauuacuuagaggaaaua

SEQ ID NO: 2463067 - RNA, 20 nt, Human
aagauucccagagacaggaa

SEQ ID NO: 2463068 - RNA, 12 nt, Human
aagaguguacug

SEQ ID NO: 2463069 - RNA, 12 nt, Human
aagauaaaugug

SEQ ID NO: 2463070 - RNA, 23 nt, Human
aagauacaguuacucagaauucu

SEQ ID NO: 2463071 - RNA, 13 nt, Human
aagauaaaugugc

SEQ ID NO: 2463072 - RNA, 14 nt, Human
aagauacgacuuua

SEQ ID NO: 2463073 - RNA, 15 nt, Human
aagauacgacuuuau

SEQ ID NO: 2463074 - RNA, 18 nt, Human
aagauacgacuuuauuuu

SEQ ID NO: 2463075 - RNA, 21 nt, Human
aagauacgacuuuauuuucug

SEQ ID NO: 2463076 - RNA, 14 nt, Human
aagauaaagaugau

SEQ ID NO: 2463077 - RNA, 12 nt, Human
aagauaaagaug

SEQ ID NO: 2463078 - RNA, 13 nt, Human
aagauaccuaaaa

SEQ ID NO: 2463079 - RNA, 22 nt, Human
aagauaccuaaaagagauuuca

SEQ ID NO: 2463080 - RNA, 17 nt, Human
aagauaaagaugaucua

SEQ ID NO: 2463081 - RNA, 20 nt, Human
aagagugcgccgagucuguc

SEQ ID NO: 2463082 - RNA, 20 nt, Human
aagagugggggagagcaggc

SEQ ID NO: 2463083 - RNA, 19 nt, Human
aagagugggggagagcagg

SEQ ID NO: 2463084 - RNA, 16 nt, Human
aagagugggcugcauc

SEQ ID NO: 2463085 - RNA, 23 nt, Human
aagagugauagucuuuugcuuuu

SEQ ID NO: 2463086 - RNA, 15 nt, Human
aagagugaaaaauga

SEQ ID NO: 2463087 - RNA, 14 nt, Human
aagagugcauuuuc

SEQ ID NO: 2463088 - RNA, 22 nt, Human
aagagugacaguggauugcauu

SEQ ID NO: 2463089 - RNA, 17 nt, Human
aacuuucauuuuuuucc

SEQ ID NO: 2463090 - RNA, 14 nt, Human
aacuuucauuuuuu

SEQ ID NO: 2463091 - RNA, 11 nt, Human
aacuuucauuu

SEQ ID NO: 2463092 - RNA, 17 nt, Human
aacuuuauuaaauacaa

SEQ ID NO: 2463093 - RNA, 19 nt, Human
aacuuuauuaaauacaaaa

SEQ ID NO: 2463094 - RNA, 23 nt, Human
aacuuuauuaaauacaaaacuuc

SEQ ID NO: 2463095 - RNA, 21 nt, Human
aacuuuauuaaauacaaaacu

SEQ ID NO: 2463096 - RNA, 14 nt, Human
aacuuuccucgccu

SEQ ID NO: 2463097 - RNA, 23 nt, Human
aagccagcaggcucucaggccag

SEQ ID NO: 2463098 - RNA, 20 nt, Human
aagccagcaggcucucaggc

SEQ ID NO: 2463099 - RNA, 11 nt, Human
aagccagccuu

SEQ ID NO: 2463100 - RNA, 14 nt, Human
aagccagcguccuc

SEQ ID NO: 2463101 - RNA, 17 nt, Human
aagccagcguccuccuc

SEQ ID NO: 2463102 - RNA, 19 nt, Human
aagcagauggaaugcugug

SEQ ID NO: 2463103 - RNA, 17 nt, Human
aagcagauggaaugcug

SEQ ID NO: 2463104 - RNA, 19 nt, Human
aagcagaugcaaagaggca

SEQ ID NO: 2463105 - RNA, 18 nt, Human
aagcagaugcaaagaggc

SEQ ID NO: 2463106 - RNA, 21 nt, Human
aagcagaugcaaagaggcaag

SEQ ID NO: 2463107 - RNA, 23 nt, Human
aagcagaugcaaagaggcaagag

SEQ ID NO: 2463108 - RNA, 13 nt, Human
aagcagcccuugg

SEQ ID NO: 2463109 - RNA, 14 nt, Human
aagcagccaagcuc

SEQ ID NO: 2463110 - RNA, 16 nt, Human
aagcagccaagcuccu

SEQ ID NO: 2463111 - RNA, 20 nt, Human
aagcagauggaaugcugugu

SEQ ID NO: 2463112 - RNA, 17 nt, Human
aagcagcguuucuauga

SEQ ID NO: 2463113 - RNA, 20 nt, Human
aagcagcguuucuaugacac

SEQ ID NO: 2463114 - RNA, 14 nt, Human
aagcagcguuucua

SEQ ID NO: 2463115 - RNA, 22 nt, Human
aagcagccucuccccaggucca

SEQ ID NO: 2463116 - RNA, 17 nt, Human
aagcagccucuccccag

SEQ ID NO: 2463117 - RNA, 16 nt, Human
aagcagccucucccca

SEQ ID NO: 2463118 - RNA, 16 nt, Human
aagcagcccuuggcca

SEQ ID NO: 2463119 - RNA, 21 nt, Human
aagcagccaagcuccuuggga

SEQ ID NO: 2463120 - RNA, 19 nt, Human
aagccacaggccugagauu

SEQ ID NO: 2463121 - RNA, 17 nt, Human
aagccacaggccugaga

SEQ ID NO: 2463122 - RNA, 15 nt, Human
aagccacaggccuga

SEQ ID NO: 2463123 - RNA, 14 nt, Human
aagccacaggccug

SEQ ID NO: 2463124 - RNA, 23 nt, Human
aagccacaggccugagauuucau

SEQ ID NO: 2463125 - RNA, 22 nt, Human
aagccacaggccugagauuuca

SEQ ID NO: 2463126 - RNA, 19 nt, Human
aagccagcaggcucucagg

SEQ ID NO: 2463127 - RNA, 21 nt, Human
aagccaauuuuucugcacuga

SEQ ID NO: 2463128 - RNA, 20 nt, Human
aagccaauuuuucugcacug

SEQ ID NO: 2463129 - RNA, 18 nt, Human
aagccaauuuuucugcac

SEQ ID NO: 2463130 - RNA, 17 nt, Human
aagccaauuuuucugca

SEQ ID NO: 2463131 - RNA, 16 nt, Human
aagccaauuuuucugc

SEQ ID NO: 2463132 - RNA, 14 nt, Human
aagccaauuuuucu

SEQ ID NO: 2463133 - RNA, 13 nt, Human
aagccaauuuuuc

SEQ ID NO: 2463134 - RNA, 18 nt, Human
aagccacaagaaauuuga

SEQ ID NO: 2463135 - RNA, 15 nt, Human
aagccacaagaaauu

SEQ ID NO: 2463136 - RNA, 22 nt, Human
aagccaauuuuucugcacugag

SEQ ID NO: 2463137 - RNA, 11 nt, Human
aagccacagaa

SEQ ID NO: 2463138 - RNA, 16 nt, Human
aagccacaagaaauuu

SEQ ID NO: 2463139 - RNA, 14 nt, Human
aagccacagcuggu

SEQ ID NO: 2463140 - RNA, 21 nt, Human
aagcagcguuucuaugacaca

SEQ ID NO: 2463141 - RNA, 22 nt, Human
aagcagcguuucuaugacacau

SEQ ID NO: 2463142 - RNA, 11 nt, Human
aagccaauuuu

SEQ ID NO: 2463143 - RNA, 17 nt, Human
aagccaauucagacagg

SEQ ID NO: 2463144 - RNA, 13 nt, Human
aagcagcucaaag

SEQ ID NO: 2463145 - RNA, 16 nt, Human
aagcagcucaaaggca

SEQ ID NO: 2463146 - RNA, 18 nt, Human
aagcagcucaaaggcaca

SEQ ID NO: 2463147 - RNA, 19 nt, Human
aagcagcucaaaggcacag

SEQ ID NO: 2463148 - RNA, 20 nt, Human
aagcagcgaccgcccccucc

SEQ ID NO: 2463149 - RNA, 19 nt, Human
aagcagcgaccgcccccuc

SEQ ID NO: 2463150 - RNA, 17 nt, Human
aagcagcccuuggccag

SEQ ID NO: 2463151 - RNA, 22 nt, Human
aagcagcggucagcagacaagg

SEQ ID NO: 2463152 - RNA, 20 nt, Human
aauuaaaaaaaaaaaacuuu

SEQ ID NO: 2463153 - RNA, 21 nt, Human
aauuaaaaaaaaagaucuguu

SEQ ID NO: 2463154 - RNA, 22 nt, Human
aauguuuuuuuuuaaagacuuu

SEQ ID NO: 2463155 - RNA, 20 nt, Human
aauguuuuuuuuuaaagacu

SEQ ID NO: 2463156 - RNA, 15 nt, Human
aauguuuuuuuuuaa

SEQ ID NO: 2463157 - RNA, 23 nt, Human
aaugccuuacccucauguucuua

SEQ ID NO: 2463158 - RNA, 22 nt, Human
aaugcgcaggcuggcccugccc

SEQ ID NO: 2463159 - RNA, 21 nt, Human
aaugcgcaggcuggcccugcc

SEQ ID NO: 2463160 - RNA, 23 nt, Human
aaugccuuugagacaguuucuua

SEQ ID NO: 2463161 - RNA, 22 nt, Human
aaugccuuugagacaguuucuu

SEQ ID NO: 2463162 - RNA, 20 nt, Human
aaugccuuugagacaguuuc

SEQ ID NO: 2463163 - RNA, 19 nt, Human
aaugccuuugagacaguuu

SEQ ID NO: 2463164 - RNA, 18 nt, Human
aaugccuuugagacaguu

SEQ ID NO: 2463165 - RNA, 17 nt, Human
aaugccuuugagacagu

SEQ ID NO: 2463166 - RNA, 16 nt, Human
aaugccuuugagacag

SEQ ID NO: 2463167 - RNA, 14 nt, Human
aaugccuuugagac

SEQ ID NO: 2463168 - RNA, 13 nt, Human
aaugccuuugaga

SEQ ID NO: 2463169 - RNA, 12 nt, Human
aaugccuuugag

SEQ ID NO: 2463170 - RNA, 12 nt, Human
aaugccuuuaaa

SEQ ID NO: 2463171 - RNA, 19 nt, Human
aaugcuagguuaauuccaa

SEQ ID NO: 2463172 - RNA, 18 nt, Human
aaugcuagguuaauucca

SEQ ID NO: 2463173 - RNA, 19 nt, Human
aaugcgugcauaccacuuu

SEQ ID NO: 2463174 - RNA, 18 nt, Human
aaugcgugcauaccacuu

SEQ ID NO: 2463175 - RNA, 14 nt, Human
aaugcguaauuaaa

SEQ ID NO: 2463176 - RNA, 20 nt, Human
aaugcggccgcauucccuga

SEQ ID NO: 2463177 - RNA, 18 nt, Human
aauguccaugauggaaua

SEQ ID NO: 2463178 - RNA, 17 nt, Human
aauguccuccagaagcc

SEQ ID NO: 2463179 - RNA, 18 nt, Human
aauguccuccagaagccu

SEQ ID NO: 2463180 - RNA, 17 nt, Human
aaugucuaaaugcugaa

SEQ ID NO: 2463181 - RNA, 15 nt, Human
aaugucuaaaugcug

SEQ ID NO: 2463182 - RNA, 12 nt, Human
aaugucuaaaug

SEQ ID NO: 2463183 - RNA, 21 nt, Human
aauguccuccagaagccucug

SEQ ID NO: 2463184 - RNA, 23 nt, Human
aauguccuccagaagccucuggc

SEQ ID NO: 2463185 - RNA, 22 nt, Human
aaugucuuuuuuuuaaugugcu

SEQ ID NO: 2463186 - RNA, 21 nt, Human
aaugucuuuuuuuuaaugugc

SEQ ID NO: 2463187 - RNA, 15 nt, Human
aaugucuuuugaaua

SEQ ID NO: 2463188 - RNA, 13 nt, Human
aaugucuuuugaa

SEQ ID NO: 2463189 - RNA, 18 nt, Human
aaugucuuuguuggaaaa

SEQ ID NO: 2463190 - RNA, 22 nt, Human
aaugucuuuguuggaaaagaau

SEQ ID NO: 2463191 - RNA, 23 nt, Human
aauguuuacacucuuuguaagag

SEQ ID NO: 2463192 - RNA, 20 nt, Human
aauguuuacacucuuuguaa

SEQ ID NO: 2463193 - RNA, 14 nt, Human
aauguuuaaugcug

SEQ ID NO: 2463194 - RNA, 17 nt, Human
aaugucuuuugaauauu

SEQ ID NO: 2463195 - RNA, 17 nt, Human
aaugugaaaagaaaaau

SEQ ID NO: 2463196 - RNA, 15 nt, Human
aaugugaaaagaaaa

SEQ ID NO: 2463197 - RNA, 22 nt, Human
aauguuuacagauccccaagcc

SEQ ID NO: 2463198 - RNA, 20 nt, Human
aauguuuagcaaauacauau

SEQ ID NO: 2463199 - RNA, 22 nt, Human
aauguuuacagggagccuccug

SEQ ID NO: 2463200 - RNA, 21 nt, Human
aauguuuacagggagccuccu

SEQ ID NO: 2463201 - RNA, 15 nt, Human
aauguuuaugagcca

SEQ ID NO: 2463202 - RNA, 16 nt, Human
aauguuuaugagccag

SEQ ID NO: 2463203 - RNA, 17 nt, Human
aauguuuaugagccaga

SEQ ID NO: 2463204 - RNA, 18 nt, Human
aauguuuaugagccagac

SEQ ID NO: 2463205 - RNA, 21 nt, Human
aauguuuaugcaaggaaggaa

SEQ ID NO: 2463206 - RNA, 22 nt, Human
aauguuuaugcaaggaaggaaa

SEQ ID NO: 2463207 - RNA, 23 nt, Human
aauguuucaaacauauauaacaa

SEQ ID NO: 2463208 - RNA, 23 nt, Human
aauguuuaugcaaggaaggaaag

SEQ ID NO: 2463209 - RNA, 20 nt, Human
aauguuuauuccugauaaua

SEQ ID NO: 2463210 - RNA, 22 nt, Human
aauguuuaugagccagacaaau

SEQ ID NO: 2463211 - RNA, 12 nt, Human
aauguuuccuuu

SEQ ID NO: 2463212 - RNA, 16 nt, Human
aauguuugccucugcc

SEQ ID NO: 2463213 - RNA, 15 nt, Human
aauguuugccucugc

SEQ ID NO: 2463214 - RNA, 23 nt, Human
aauguuucuucuagguucuaaaa

SEQ ID NO: 2463215 - RNA, 15 nt, Human
aauguuucugcagua

SEQ ID NO: 2463216 - RNA, 22 nt, Human
aauguuucuucuagguucuaaa

SEQ ID NO: 2463217 - RNA, 16 nt, Human
aauguuuauuccuuga

SEQ ID NO: 2463218 - RNA, 15 nt, Human
aauguuuauuccuug

SEQ ID NO: 2463219 - RNA, 20 nt, Human
aauguuuccaaccuggagua

SEQ ID NO: 2463220 - RNA, 13 nt, Human
aauguuuccuuua

SEQ ID NO: 2463221 - RNA, 19 nt, Human
aaugguguuguaugccuuu

SEQ ID NO: 2463222 - RNA, 13 nt, Human
aaugguuaaaaga

SEQ ID NO: 2463223 - RNA, 14 nt, Human
aaugguuauaaaag

SEQ ID NO: 2463224 - RNA, 17 nt, Human
aaugguguuuuuuuaau

SEQ ID NO: 2463225 - RNA, 23 nt, Human
aaugcugcccaugccaccgcuuc

SEQ ID NO: 2463226 - RNA, 22 nt, Human
aaugcugcccaugccaccgcuu

SEQ ID NO: 2463227 - RNA, 21 nt, Human
aaugcugcauuuuaauuuuaa

SEQ ID NO: 2463228 - RNA, 16 nt, Human
aaugcugcauuuuaau

SEQ ID NO: 2463229 - RNA, 14 nt, Human
aaugcugcauuuua

SEQ ID NO: 2463230 - RNA, 20 nt, Human
aaugcugcagauuugggcug

SEQ ID NO: 2463231 - RNA, 12 nt, Human
aaugcugcagau

SEQ ID NO: 2463232 - RNA, 18 nt, Human
aaugcugccugccugucu

SEQ ID NO: 2463233 - RNA, 14 nt, Human
aaugcugccugccu

SEQ ID NO: 2463234 - RNA, 12 nt, Human
aaugcugccugc

SEQ ID NO: 2463235 - RNA, 15 nt, Human
aaugcugccugccug

SEQ ID NO: 2463236 - RNA, 19 nt, Human
aaugcugcgcccuucccca

SEQ ID NO: 2463237 - RNA, 18 nt, Human
aaugcugaaaaaacaccu

SEQ ID NO: 2463238 - RNA, 18 nt, Human
aaugcugaacauugcaua

SEQ ID NO: 2463239 - RNA, 21 nt, Human
aaugcuagguuaauuccaauu

SEQ ID NO: 2463240 - RNA, 23 nt, Human
aaugcuauaacuauguugauaaa

SEQ ID NO: 2463241 - RNA, 17 nt, Human
aaugucaucagaacuuu

SEQ ID NO: 2463242 - RNA, 19 nt, Human
aaugucauuaaaauaaaua

SEQ ID NO: 2463243 - RNA, 13 nt, Human
aaugucaguaugu

SEQ ID NO: 2463244 - RNA, 15 nt, Human
aaugucaguaugugg

SEQ ID NO: 2463245 - RNA, 21 nt, Human
aaugucagauacaauguauuu

SEQ ID NO: 2463246 - RNA, 18 nt, Human
aaugucagauacaaugua

SEQ ID NO: 2463247 - RNA, 17 nt, Human
aaugucagauacaaugu

SEQ ID NO: 2463248 - RNA, 16 nt, Human
aaugucagauacaaug

SEQ ID NO: 2463249 - RNA, 18 nt, Human
aaugucaggaacagaagg

SEQ ID NO: 2463250 - RNA, 20 nt, Human
aaugucaggaacagaaggau

SEQ ID NO: 2463251 - RNA, 19 nt, Human
aaugguuauaaaagugauu

SEQ ID NO: 2463252 - RNA, 17 nt, Human
aaugguuauaaaaguga

SEQ ID NO: 2463253 - RNA, 16 nt, Human
aaugguuauaaaagug

SEQ ID NO: 2463254 - RNA, 15 nt, Human
aaugguuauaaaagu

SEQ ID NO: 2463255 - RNA, 19 nt, Human
aaugguuccaugccugagg

SEQ ID NO: 2463256 - RNA, 14 nt, Human
aaugguuccaugcc

SEQ ID NO: 2463257 - RNA, 13 nt, Human
aaugguuguauua

SEQ ID NO: 2463258 - RNA, 12 nt, Human
aaugguuguauu

SEQ ID NO: 2463259 - RNA, 15 nt, Human
aaugguugccuuaaa

SEQ ID NO: 2463260 - RNA, 21 nt, Human
aaugguuccaugccugagggu

SEQ ID NO: 2463261 - RNA, 17 nt, Human
aaugguugacuggguuu

SEQ ID NO: 2463262 - RNA, 19 nt, Human
aaugucagaaaccaguuau

SEQ ID NO: 2463263 - RNA, 15 nt, Human
aaugucagauacaau

SEQ ID NO: 2463264 - RNA, 17 nt, Human
aaugucacuuaaaggcu

SEQ ID NO: 2463265 - RNA, 16 nt, Human
aaugguuguauuagau

SEQ ID NO: 2463266 - RNA, 15 nt, Human
aaugguuguauuaga

SEQ ID NO: 2463267 - RNA, 18 nt, Human
aaugguugccuuaaagaa

SEQ ID NO: 2463268 - RNA, 23 nt, Human
aaugucaccaccuucccagcucu

SEQ ID NO: 2463269 - RNA, 18 nt, Human
aauccaagcaaaugugaa

SEQ ID NO: 2463270 - RNA, 17 nt, Human
aauccaagcaaauguga

SEQ ID NO: 2463271 - RNA, 15 nt, Human
aauccaaugaaauga

SEQ ID NO: 2463272 - RNA, 17 nt, Human
aauccagacccggcugc

SEQ ID NO: 2463273 - RNA, 19 nt, Human
aauccagacccggcugcgu

SEQ ID NO: 2463274 - RNA, 16 nt, Human
aaucucaaauuucuaa

SEQ ID NO: 2463275 - RNA, 15 nt, Human
aaucucaaauuucua

SEQ ID NO: 2463276 - RNA, 13 nt, Human
aauccagccugcu

SEQ ID NO: 2463277 - RNA, 23 nt, Human
aauccaagcgaggucaacagaga

SEQ ID NO: 2463278 - RNA, 20 nt, Human
aaucucuuuuugcuuucgaa

SEQ ID NO: 2463279 - RNA, 15 nt, Human
aaucucuuuuugacu

SEQ ID NO: 2463280 - RNA, 19 nt, Human
aaugaaaguauaacugagu

SEQ ID NO: 2463281 - RNA, 22 nt, Human
aaugaaagcauguggcauguuc

SEQ ID NO: 2463282 - RNA, 17 nt, Human
aaugaaaguauaacuga

SEQ ID NO: 2463283 - RNA, 13 nt, Human
aaucucugugccu

SEQ ID NO: 2463284 - RNA, 20 nt, Human
aaucucucgguuccacgucc

SEQ ID NO: 2463285 - RNA, 17 nt, Human
aaucucaaauuucuaaa

SEQ ID NO: 2463286 - RNA, 18 nt, Human
aaucucaaauuucuaaau

SEQ ID NO: 2463287 - RNA, 18 nt, Human
aauccaggcagauccagg

SEQ ID NO: 2463288 - RNA, 17 nt, Human
aauccaggcagauccag

SEQ ID NO: 2463289 - RNA, 16 nt, Human
aaucucuccauucccg

SEQ ID NO: 2463290 - RNA, 21 nt, Human
aaugauuaugaauuacauuug

SEQ ID NO: 2463291 - RNA, 23 nt, Human
aaugauuaugaauuacauuugua

SEQ ID NO: 2463292 - RNA, 16 nt, Human
aaugauuaauuaaaac

SEQ ID NO: 2463293 - RNA, 19 nt, Human
aaugaagcuuuauacgugu

SEQ ID NO: 2463294 - RNA, 23 nt, Human
aaugaucuagguuuaacucagau

SEQ ID NO: 2463295 - RNA, 22 nt, Human
aaugaucuagguuuaacucaga

SEQ ID NO: 2463296 - RNA, 19 nt, Human
aaugaucuagguuuaacuc

SEQ ID NO: 2463297 - RNA, 18 nt, Human
aaugaucuagguuuaacu

SEQ ID NO: 2463298 - RNA, 17 nt, Human
aaugaucuagguuuaac

SEQ ID NO: 2463299 - RNA, 16 nt, Human
aaugaucuagguuuaa

SEQ ID NO: 2463300 - RNA, 14 nt, Human
aaugaucuagguuu

SEQ ID NO: 2463301 - RNA, 13 nt, Human
aaugaucuagguu

SEQ ID NO: 2463302 - RNA, 15 nt, Human
aaugauuaugaauua

SEQ ID NO: 2463303 - RNA, 20 nt, Human
aaugauccccagcuguuuau

SEQ ID NO: 2463304 - RNA, 19 nt, Human
aaugauccccagcuguuua

SEQ ID NO: 2463305 - RNA, 22 nt, Human
aaugauccccagcuguuuaugc

SEQ ID NO: 2463306 - RNA, 22 nt, Human
aaugaagguuaggauuuaacag

SEQ ID NO: 2463307 - RNA, 21 nt, Human
aaugaagguuaggauuuaaca

SEQ ID NO: 2463308 - RNA, 22 nt, Human
aaugaaggugucagaauaauaa

SEQ ID NO: 2463309 - RNA, 19 nt, Human
aaugaaaugcucuccuuuc

SEQ ID NO: 2463310 - RNA, 22 nt, Human
aaugaaggcgggccugcaagcc

SEQ ID NO: 2463311 - RNA, 14 nt, Human
aaugaaauaucugu

SEQ ID NO: 2463312 - RNA, 21 nt, Human
aaugaaauccugcuucagugu

SEQ ID NO: 2463313 - RNA, 17 nt, Human
aaugaaaugcucuccuu

SEQ ID NO: 2463314 - RNA, 18 nt, Human
aaugaaaugcucuccuuu

SEQ ID NO: 2463315 - RNA, 22 nt, Human
aaugaaauaucuguauuuaauu

SEQ ID NO: 2463316 - RNA, 12 nt, Human
aaugaaauaucu

SEQ ID NO: 2463317 - RNA, 14 nt, Human
aaugaaauacacaa

SEQ ID NO: 2463318 - RNA, 13 nt, Human
aaugaaauacugu

SEQ ID NO: 2463319 - RNA, 15 nt, Human
aaugaaaguuugcac

SEQ ID NO: 2463320 - RNA, 21 nt, Human
aaugaaauaauguacaucugg

SEQ ID NO: 2463321 - RNA, 15 nt, Human
aaugaaguuugaaug

SEQ ID NO: 2463322 - RNA, 14 nt, Human
aaugaaguuugaau

SEQ ID NO: 2463323 - RNA, 13 nt, Human
aaugaaguuugaa

SEQ ID NO: 2463324 - RNA, 12 nt, Human
aaugaaguuuga

SEQ ID NO: 2463325 - RNA, 16 nt, Human
aaugaaguuugaaugu

SEQ ID NO: 2463326 - RNA, 16 nt, Human
aaugaucauaagucua

SEQ ID NO: 2463327 - RNA, 20 nt, Human
aaugauccccaagugugaac

SEQ ID NO: 2463328 - RNA, 16 nt, Human
aaugauccccagcugu

SEQ ID NO: 2463329 - RNA, 14 nt, Human
aaugaagucucuga

SEQ ID NO: 2463330 - RNA, 16 nt, Human
aaugaagucucugaag

SEQ ID NO: 2463331 - RNA, 16 nt, Human
aaugaaguauuucuca

SEQ ID NO: 2463332 - RNA, 23 nt, Human
aaugaagucucugaagugaaacu

SEQ ID NO: 2463333 - RNA, 17 nt, Human
aaugaaguuguagguaa

SEQ ID NO: 2463334 - RNA, 15 nt, Human
aauauuagaugugau

SEQ ID NO: 2463335 - RNA, 14 nt, Human
aauauuagauguga

SEQ ID NO: 2463336 - RNA, 13 nt, Human
aauauuagaugug

SEQ ID NO: 2463337 - RNA, 12 nt, Human
aauauuagaugu

SEQ ID NO: 2463338 - RNA, 13 nt, Human
aauauuagaaaca

SEQ ID NO: 2463339 - RNA, 17 nt, Human
aauauuaaacccuggau

SEQ ID NO: 2463340 - RNA, 21 nt, Human
aauauuagugaccucagcuuu

SEQ ID NO: 2463341 - RNA, 19 nt, Human
aauauuagcuuuacuguuu

SEQ ID NO: 2463342 - RNA, 21 nt, Human
aauauuagcuuuacuguuugu

SEQ ID NO: 2463343 - RNA, 19 nt, Human
aauauuagaugugauuuaa

SEQ ID NO: 2463344 - RNA, 18 nt, Human
aauauuagaugugauuua

SEQ ID NO: 2463345 - RNA, 17 nt, Human
aauauuagaugugauuu

SEQ ID NO: 2463346 - RNA, 16 nt, Human
aauauuagaugugauu

SEQ ID NO: 2463347 - RNA, 15 nt, Human
aauauuagcuuuacu

SEQ ID NO: 2463348 - RNA, 18 nt, Human
aauauuagcuuuacuguu

SEQ ID NO: 2463349 - RNA, 22 nt, Human
aauauuauacuaagaaaagaua

SEQ ID NO: 2463350 - RNA, 15 nt, Human
aauauuauacuaaga

SEQ ID NO: 2463351 - RNA, 20 nt, Human
aauauuagaugugauuuaau

SEQ ID NO: 2463352 - RNA, 16 nt, Human
aauauuauacuaagaa

SEQ ID NO: 2463353 - RNA, 23 nt, Human
aaucaagggcaaaaagucuacau

SEQ ID NO: 2463354 - RNA, 15 nt, Human
aaucaagcuucaguu

SEQ ID NO: 2463355 - RNA, 23 nt, Human
aaucaagccucuggucacauggc

SEQ ID NO: 2463356 - RNA, 13 nt, Human
aaucaagccucug

SEQ ID NO: 2463357 - RNA, 20 nt, Human
aaucaagauuuaauccuaga

SEQ ID NO: 2463358 - RNA, 14 nt, Human
aaucaagagcugcc

SEQ ID NO: 2463359 - RNA, 13 nt, Human
aaucaagagcugc

SEQ ID NO: 2463360 - RNA, 17 nt, Human
aaucaagagcugcccuc

SEQ ID NO: 2463361 - RNA, 16 nt, Human
aaucaagagcugcccu

SEQ ID NO: 2463362 - RNA, 15 nt, Human
aaucaccgaaaacgu

SEQ ID NO: 2463363 - RNA, 20 nt, Human
aaucaccacaccaaaccucu

SEQ ID NO: 2463364 - RNA, 15 nt, Human
aaucaccaaaggcuc

SEQ ID NO: 2463365 - RNA, 14 nt, Human
aaucaccgaaaacg

SEQ ID NO: 2463366 - RNA, 19 nt, Human
aaucacauucgaguguuuc

SEQ ID NO: 2463367 - RNA, 14 nt, Human
aauauacuguaaag

SEQ ID NO: 2463368 - RNA, 15 nt, Human
aauauacuguaaaga

SEQ ID NO: 2463369 - RNA, 16 nt, Human
aauauacuguaaagaa

SEQ ID NO: 2463370 - RNA, 17 nt, Human
aauauacuguaaagaaa

SEQ ID NO: 2463371 - RNA, 18 nt, Human
aauauacuguaaagaaag

SEQ ID NO: 2463372 - RNA, 21 nt, Human
aauauacuguaaagaaagaga

SEQ ID NO: 2463373 - RNA, 22 nt, Human
aauauacuguaaagaaagagag

SEQ ID NO: 2463374 - RNA, 23 nt, Human
aauauacuguaaagaaagagaga

SEQ ID NO: 2463375 - RNA, 12 nt, Human
aauauacuguaa

SEQ ID NO: 2463376 - RNA, 13 nt, Human
aauauacuguaaa

SEQ ID NO: 2463377 - RNA, 11 nt, Human
aauauacugua

SEQ ID NO: 2463378 - RNA, 17 nt, Human
aauauacuauauuuaug

SEQ ID NO: 2463379 - RNA, 18 nt, Human
aauauacauucaaacuua

SEQ ID NO: 2463380 - RNA, 19 nt, Human
aauauacauucaaacuuaa

SEQ ID NO: 2463381 - RNA, 13 nt, Human
aauauacacacag

SEQ ID NO: 2463382 - RNA, 13 nt, Human
aauagacaauuua

SEQ ID NO: 2463383 - RNA, 20 nt, Human
aauagaauauaauuaucgga

SEQ ID NO: 2463384 - RNA, 17 nt, Human
aauagaauauaauuauc

SEQ ID NO: 2463385 - RNA, 22 nt, Human
aauagaaggauguacauuucca

SEQ ID NO: 2463386 - RNA, 19 nt, Human
aauagaaggauguacauuu

SEQ ID NO: 2463387 - RNA, 20 nt, Human
aauagaaggauguacauuuc

SEQ ID NO: 2463388 - RNA, 22 nt, Human
aauauguuuuuuagaucaaaua

SEQ ID NO: 2463389 - RNA, 21 nt, Human
aauauguuuuuuagaucaaau

SEQ ID NO: 2463390 - RNA, 19 nt, Human
aauauauggcagaguugua

SEQ ID NO: 2463391 - RNA, 14 nt, Human
aauauauggcagag

SEQ ID NO: 2463392 - RNA, 21 nt, Human
aauauaucuaaauugaauaau

SEQ ID NO: 2463393 - RNA, 20 nt, Human
aauauaucuaaauugaauaa

SEQ ID NO: 2463394 - RNA, 15 nt, Human
aauauacuuguggac

SEQ ID NO: 2463395 - RNA, 13 nt, Human
aauauacuugugg

SEQ ID NO: 2463396 - RNA, 16 nt, Human
aauauauaucaaauau

SEQ ID NO: 2463397 - RNA, 16 nt, Human
aauauacuuguggacu

SEQ ID NO: 2463398 - RNA, 19 nt, Human
aauauaccccuuaguguuu

SEQ ID NO: 2463399 - RNA, 17 nt, Human
aauauauaucugcuguc

SEQ ID NO: 2463400 - RNA, 18 nt, Human
aauauaucuaaauugaau

SEQ ID NO: 2463401 - RNA, 17 nt, Human
aauauaucuaaauugaa

SEQ ID NO: 2463402 - RNA, 22 nt, Human
aauauaucccagaaauuagaaa

SEQ ID NO: 2463403 - RNA, 16 nt, Human
aauauaucccagaaau

SEQ ID NO: 2463404 - RNA, 16 nt, Human
aauacuguauuuugua

SEQ ID NO: 2463405 - RNA, 22 nt, Human
aauacuguacaaugacuuuauu

SEQ ID NO: 2463406 - RNA, 20 nt, Human
aauacuugucaauauuuaaa

SEQ ID NO: 2463407 - RNA, 18 nt, Human
aauacuugucaauauuua

SEQ ID NO: 2463408 - RNA, 17 nt, Human
aauacuugucaauauuu

SEQ ID NO: 2463409 - RNA, 10 nt, Human
aauacuuguc

SEQ ID NO: 2463410 - RNA, 22 nt, Human
aauacugccagaugcugauguu

SEQ ID NO: 2463411 - RNA, 20 nt, Human
aauacugccagaugcugaug

SEQ ID NO: 2463412 - RNA, 19 nt, Human
aauacugccagaugcugau

SEQ ID NO: 2463413 - RNA, 18 nt, Human
aauacugccagaugcuga

SEQ ID NO: 2463414 - RNA, 24 nt, Human
aauacugccagaugcugauguuca

SEQ ID NO: 2463415 - RNA, 23 nt, Human
aauacugccagaugcugauguuc

SEQ ID NO: 2463416 - RNA, 17 nt, Human
aauacugccagaugcug

SEQ ID NO: 2463417 - RNA, 16 nt, Human
aauacugccagaugcu

SEQ ID NO: 2463418 - RNA, 17 nt, Human
aauacuuuaaaggaaaa

SEQ ID NO: 2463419 - RNA, 16 nt, Human
aauacuuuaaaggaaa

SEQ ID NO: 2463420 - RNA, 15 nt, Human
aauacuuuaaaggaa

SEQ ID NO: 2463421 - RNA, 14 nt, Human
aauacuuuaaagga

SEQ ID NO: 2463422 - RNA, 11 nt, Human
aauacuuuugc

SEQ ID NO: 2463423 - RNA, 15 nt, Human
aauacuuuuuacaau

SEQ ID NO: 2463424 - RNA, 18 nt, Human
aauagaaaacugaaaauc

SEQ ID NO: 2463425 - RNA, 17 nt, Human
aauagaaaacugaaaau

SEQ ID NO: 2463426 - RNA, 19 nt, Human
aauagaaaacugaaaaucu

SEQ ID NO: 2463427 - RNA, 10 nt, Human
aauacuuuuu

SEQ ID NO: 2463428 - RNA, 13 nt, Human
aauagaaaacuga

SEQ ID NO: 2463429 - RNA, 20 nt, Human
aauacucuacccucuuagaa

SEQ ID NO: 2463430 - RNA, 22 nt, Human
aauacucuacccucuuagaaaa

SEQ ID NO: 2463431 - RNA, 23 nt, Human
aauacucuuaggaagagaaacca

SEQ ID NO: 2463432 - RNA, 16 nt, Human
aauacucauguguaug

SEQ ID NO: 2463433 - RNA, 15 nt, Human
aauacucauguguau

SEQ ID NO: 2463434 - RNA, 14 nt, Human
aauacucaugugua

SEQ ID NO: 2463435 - RNA, 13 nt, Human
aauacucaugugu

SEQ ID NO: 2463436 - RNA, 12 nt, Human
aauacucaugug

SEQ ID NO: 2463437 - RNA, 23 nt, Human
aauacucauaaugugaaguguua

SEQ ID NO: 2463438 - RNA, 19 nt, Human
aauacucauaaugugaagu

SEQ ID NO: 2463439 - RNA, 18 nt, Human
aauacucauaaugugaag

SEQ ID NO: 2463440 - RNA, 21 nt, Human
aauacuauuuuuacugccacu

SEQ ID NO: 2463441 - RNA, 19 nt, Human
aauacuauuuuuacugcca

SEQ ID NO: 2463442 - RNA, 17 nt, Human
aauacuauuuuuacugc

SEQ ID NO: 2463443 - RNA, 16 nt, Human
aauacuauuuuuacug

SEQ ID NO: 2463444 - RNA, 17 nt, Human
aauacucauaaugugaa

SEQ ID NO: 2463445 - RNA, 16 nt, Human
aauacucauaauguga

SEQ ID NO: 2463446 - RNA, 17 nt, Human
aauacuaccuugaaaau

SEQ ID NO: 2463447 - RNA, 18 nt, Human
aauacuaccuugaaaaua

SEQ ID NO: 2463448 - RNA, 21 nt, Human
aauacuaccuugaaaauaaga

SEQ ID NO: 2463449 - RNA, 19 nt, Human
aauacuagggagaagguuu

SEQ ID NO: 2463450 - RNA, 15 nt, Human
aauacuauuuuuacu

SEQ ID NO: 2463451 - RNA, 17 nt, Human
aauacuaguugugaccu

SEQ ID NO: 2463452 - RNA, 14 nt, Human
aauacuaguuguga

SEQ ID NO: 2463453 - RNA, 15 nt, Human
aauacuacuccugua

SEQ ID NO: 2463454 - RNA, 21 nt, Human
aauacuauauuuauacuguau

SEQ ID NO: 2463455 - RNA, 12 nt, Human
agacagccccag

SEQ ID NO: 2463456 - RNA, 21 nt, Human
agacagauacuccuccaaggu

SEQ ID NO: 2463457 - RNA, 15 nt, Human
agacagauacuccuc

SEQ ID NO: 2463458 - RNA, 15 nt, Human
agacagcccgggcuc

SEQ ID NO: 2463459 - RNA, 14 nt, Human
agacagcccgggcu

SEQ ID NO: 2463460 - RNA, 18 nt, Human
agacagccccagagcagg

SEQ ID NO: 2463461 - RNA, 17 nt, Human
agacagccccagagcag

SEQ ID NO: 2463462 - RNA, 15 nt, Human
agacagccccagagc

SEQ ID NO: 2463463 - RNA, 13 nt, Human
agacagccccaga

SEQ ID NO: 2463464 - RNA, 17 nt, Human
agacagcuccacccugg

SEQ ID NO: 2463465 - RNA, 20 nt, Human
agacagccccagagcagggu

SEQ ID NO: 2463466 - RNA, 19 nt, Human
agacagccccagagcaggg

SEQ ID NO: 2463467 - RNA, 21 nt, Human
agacagcuccacccuggccga

SEQ ID NO: 2463468 - RNA, 15 nt, Human
agacagcucccucug

SEQ ID NO: 2463469 - RNA, 18 nt, Human
agacagcucccucugccu

SEQ ID NO: 2463470 - RNA, 19 nt, Human
agacagcucccucugccug

SEQ ID NO: 2463471 - RNA, 14 nt, Human
agacaacccugcaa

SEQ ID NO: 2463472 - RNA, 20 nt, Human
agacaacccugcaaaggacu

SEQ ID NO: 2463473 - RNA, 21 nt, Human
agacaacccugcaaaggacug

SEQ ID NO: 2463474 - RNA, 15 nt, Human
agacaacagaaguca

SEQ ID NO: 2463475 - RNA, 13 nt, Human
agacaacagaagu

SEQ ID NO: 2463476 - RNA, 14 nt, Human
agacaacagaaguc

SEQ ID NO: 2463477 - RNA, 15 nt, Human
agacaagagauggga

SEQ ID NO: 2463478 - RNA, 23 nt, Human
agacagagucucacuguugccca

SEQ ID NO: 2463479 - RNA, 17 nt, Human
agacaagaaaucccugu

SEQ ID NO: 2463480 - RNA, 13 nt, Human
agacaagaaaucc

SEQ ID NO: 2463481 - RNA, 21 nt, Human
agacaagacuucaguauguug

SEQ ID NO: 2463482 - RNA, 19 nt, Human
agacaagacuucaguaugu

SEQ ID NO: 2463483 - RNA, 18 nt, Human
agacaagaaaucccuguu

SEQ ID NO: 2463484 - RNA, 15 nt, Human
agacaagacuucagu

SEQ ID NO: 2463485 - RNA, 17 nt, Human
agacaaauucuguuucu

SEQ ID NO: 2463486 - RNA, 18 nt, Human
agacaaauucuguuucuu

SEQ ID NO: 2463487 - RNA, 19 nt, Human
agacaaauucuguuucuug

SEQ ID NO: 2463488 - RNA, 21 nt, Human
agacaaauucuguuucuugag

SEQ ID NO: 2463489 - RNA, 21 nt, Human
agacgcugugcugcccugccc

SEQ ID NO: 2463490 - RNA, 13 nt, Human
agacccccacccc

SEQ ID NO: 2463491 - RNA, 14 nt, Human
agacccccaccccu

SEQ ID NO: 2463492 - RNA, 16 nt, Human
agacccccaccccuuc

SEQ ID NO: 2463493 - RNA, 17 nt, Human
agacccccaccccuucc

SEQ ID NO: 2463494 - RNA, 19 nt, Human
agacccccaccccuucccc

SEQ ID NO: 2463495 - RNA, 20 nt, Human
agacccccaccccuucccca

SEQ ID NO: 2463496 - RNA, 21 nt, Human
agacccccaccccuuccccac

SEQ ID NO: 2463497 - RNA, 12 nt, Human
agacccccacuc

SEQ ID NO: 2463498 - RNA, 23 nt, Human
agaccccacccaagcuuggcagc

SEQ ID NO: 2463499 - RNA, 20 nt, Human
agaccccacccaagcuuggc

SEQ ID NO: 2463500 - RNA, 16 nt, Human
agaccccacccaagcu

SEQ ID NO: 2463501 - RNA, 15 nt, Human
agaccccacccaagc

SEQ ID NO: 2463502 - RNA, 12 nt, Human
agaccccaccca

SEQ ID NO: 2463503 - RNA, 13 nt, Human
agacccccacacc

SEQ ID NO: 2463504 - RNA, 14 nt, Human
agacccccacaccu

SEQ ID NO: 2463505 - RNA, 15 nt, Human
agacccccacaccuc

SEQ ID NO: 2463506 - RNA, 11 nt, Human
agacccccacc

SEQ ID NO: 2463507 - RNA, 12 nt, Human
agacccccaccc

SEQ ID NO: 2463508 - RNA, 12 nt, Human
agacagcucuua

SEQ ID NO: 2463509 - RNA, 11 nt, Human
agacagcucuu

SEQ ID NO: 2463510 - RNA, 12 nt, Human
agacagcugccu

SEQ ID NO: 2463511 - RNA, 16 nt, Human
agacccauuccuauuu

SEQ ID NO: 2463512 - RNA, 20 nt, Human
agacagcucccucugccuga

SEQ ID NO: 2463513 - RNA, 15 nt, Human
agacccauuccuauu

SEQ ID NO: 2463514 - RNA, 18 nt, Human
agacggagucccaccuug

SEQ ID NO: 2463515 - RNA, 19 nt, Human
agacgguucaccagccucu

SEQ ID NO: 2463516 - RNA, 20 nt, Human
agacguacguaucagcggcc

SEQ ID NO: 2463517 - RNA, 17 nt, Human
agacguaggggaggggu

SEQ ID NO: 2463518 - RNA, 16 nt, Human
agacguaugcuuauuu

SEQ ID NO: 2463519 - RNA, 22 nt, Human
agacgcugugcugcccugccca

SEQ ID NO: 2463520 - RNA, 21 nt, Human
agacggaggccuacucuucca

SEQ ID NO: 2463521 - RNA, 13 nt, Human
agacccccacucu

SEQ ID NO: 2463522 - RNA, 13 nt, Human
agacguguacaua

SEQ ID NO: 2463523 - RNA, 18 nt, Human
agacguaugcuuauuuua

SEQ ID NO: 2463524 - RNA, 19 nt, Human
agacguaugcuuauuuuaa

SEQ ID NO: 2463525 - RNA, 14 nt, Human
agacgucccuccac

SEQ ID NO: 2463526 - RNA, 17 nt, Human
agacgugauuuugcugu

SEQ ID NO: 2463527 - RNA, 17 nt, Human
agagagccauuuuguga

SEQ ID NO: 2463528 - RNA, 15 nt, Human
agagagccauuuugu

SEQ ID NO: 2463529 - RNA, 13 nt, Human
agagagccauuuu

SEQ ID NO: 2463530 - RNA, 23 nt, Human
agagagcagcuucugccacuucc

SEQ ID NO: 2463531 - RNA, 19 nt, Human
agagagcagcuucugccac

SEQ ID NO: 2463532 - RNA, 17 nt, Human
agagagcagcuucugcc

SEQ ID NO: 2463533 - RNA, 18 nt, Human
agagagcaccccucucug

SEQ ID NO: 2463534 - RNA, 16 nt, Human
agagaagacccuucuc

SEQ ID NO: 2463535 - RNA, 16 nt, Human
agagagcggucucagg

SEQ ID NO: 2463536 - RNA, 21 nt, Human
agagagcggucucaggcuggu

SEQ ID NO: 2463537 - RNA, 19 nt, Human
agagagccauuuugugaau

SEQ ID NO: 2463538 - RNA, 18 nt, Human
agagagccauuuugugaa

SEQ ID NO: 2463539 - RNA, 18 nt, Human
agagagcgagcgcuaccc

SEQ ID NO: 2463540 - RNA, 15 nt, Human
agagaaaauaaaaag

SEQ ID NO: 2463541 - RNA, 16 nt, Human
agagaaaauaaaaagu

SEQ ID NO: 2463542 - RNA, 17 nt, Human
agagaaaauaaaaaguu

SEQ ID NO: 2463543 - RNA, 20 nt, Human
agagaaccuggaguuccuga

SEQ ID NO: 2463544 - RNA, 23 nt, Human
agagaaccucacgcaccucccau

SEQ ID NO: 2463545 - RNA, 17 nt, Human
agagaacuuccagaucc

SEQ ID NO: 2463546 - RNA, 11 nt, Human
agagaagacaa

SEQ ID NO: 2463547 - RNA, 15 nt, Human
agagaagaaugagcc

SEQ ID NO: 2463548 - RNA, 12 nt, Human
agagaagaauga

SEQ ID NO: 2463549 - RNA, 14 nt, Human
agagaacuguggcc

SEQ ID NO: 2463550 - RNA, 22 nt, Human
agagaacuaacacuauuuuaug

SEQ ID NO: 2463551 - RNA, 16 nt, Human
agagaacuaacacuau

SEQ ID NO: 2463552 - RNA, 15 nt, Human
agagaacgcagcccu

SEQ ID NO: 2463553 - RNA, 14 nt, Human
agagaacgcagccc

SEQ ID NO: 2463554 - RNA, 21 nt, Human
agagaggguggugaccucugc

SEQ ID NO: 2463555 - RNA, 20 nt, Human
agagaggguggugaccucug

SEQ ID NO: 2463556 - RNA, 22 nt, Human
agagaggguggugaccucugcc

SEQ ID NO: 2463557 - RNA, 23 nt, Human
agagagcugguaguuaguagcau

SEQ ID NO: 2463558 - RNA, 11 nt, Human
agagagcuggu

SEQ ID NO: 2463559 - RNA, 12 nt, Human
agagagcuggua

SEQ ID NO: 2463560 - RNA, 16 nt, Human
agagcccacgccccca

SEQ ID NO: 2463561 - RNA, 15 nt, Human
agagcccagcuccaa

SEQ ID NO: 2463562 - RNA, 13 nt, Human
agagcccacgccc

SEQ ID NO: 2463563 - RNA, 19 nt, Human
agagcccaccuuggcucaa

SEQ ID NO: 2463564 - RNA, 21 nt, Human
agacugcauuauauuuauuac

SEQ ID NO: 2463565 - RNA, 23 nt, Human
agacugcgggaugguccuggggc

SEQ ID NO: 2463566 - RNA, 23 nt, Human
agacugcgauuugucccaggucc

SEQ ID NO: 2463567 - RNA, 20 nt, Human
agacugcgggaugguccugg

SEQ ID NO: 2463568 - RNA, 22 nt, Human
agacugcgggaugguccugggg

SEQ ID NO: 2463569 - RNA, 16 nt, Human
agacuggaagcacagc

SEQ ID NO: 2463570 - RNA, 17 nt, Human
agacuggaagcacagcu

SEQ ID NO: 2463571 - RNA, 19 nt, Human
agacuggaagcacagcuuc

SEQ ID NO: 2463572 - RNA, 14 nt, Human
agacuggaagcuaa

SEQ ID NO: 2463573 - RNA, 19 nt, Human
agacuggaagcuaauuugc

SEQ ID NO: 2463574 - RNA, 14 nt, Human
agacugcugggacu

SEQ ID NO: 2463575 - RNA, 15 nt, Human
agacugcugggacug

SEQ ID NO: 2463576 - RNA, 13 nt, Human
agagaaaauaaaa

SEQ ID NO: 2463577 - RNA, 14 nt, Human
agagaaaauaaaaa

SEQ ID NO: 2463578 - RNA, 12 nt, Human
agagaaaauaaa

SEQ ID NO: 2463579 - RNA, 21 nt, Human
agagaaaagaaaaaaaaagaa

SEQ ID NO: 2463580 - RNA, 12 nt, Human
agagaaaagaaa

SEQ ID NO: 2463581 - RNA, 13 nt, Human
agagaaaagaaaa

SEQ ID NO: 2463582 - RNA, 14 nt, Human
agagaaaagaaaaa

SEQ ID NO: 2463583 - RNA, 15 nt, Human
agagaaaagaaaaaa

SEQ ID NO: 2463584 - RNA, 20 nt, Human
agagaaaacuuauuugagug

SEQ ID NO: 2463585 - RNA, 19 nt, Human
agagaaaacuuauuugagu

SEQ ID NO: 2463586 - RNA, 18 nt, Human
agagaaaacuuauuugag

SEQ ID NO: 2463587 - RNA, 10 nt, Human
agagaaaaga

SEQ ID NO: 2463588 - RNA, 11 nt, Human
agagaaaagaa

SEQ ID NO: 2463589 - RNA, 16 nt, Human
agauaucgacuuguuu

SEQ ID NO: 2463590 - RNA, 17 nt, Human
agaguuauuuaggcuuu

SEQ ID NO: 2463591 - RNA, 20 nt, Human
agaguucaauggcugcugaa

SEQ ID NO: 2463592 - RNA, 18 nt, Human
agaguucaauggcugcug

SEQ ID NO: 2463593 - RNA, 17 nt, Human
agaguucaauggcugcu

SEQ ID NO: 2463594 - RNA, 21 nt, Human
agaguucaauggcugcugaag

SEQ ID NO: 2463595 - RNA, 16 nt, Human
agaguucacuauaaau

SEQ ID NO: 2463596 - RNA, 16 nt, Human
agaguuccugcggagu

SEQ ID NO: 2463597 - RNA, 19 nt, Human
agaguuccccaugcagaca

SEQ ID NO: 2463598 - RNA, 14 nt, Human
agaguuagacuguu

SEQ ID NO: 2463599 - RNA, 13 nt, Human
agaguuagacugu

SEQ ID NO: 2463600 - RNA, 12 nt, Human
agaguuagacug

SEQ ID NO: 2463601 - RNA, 17 nt, Human
agaguuagacuguuggg

SEQ ID NO: 2463602 - RNA, 15 nt, Human
agaguuagacuguug

SEQ ID NO: 2463603 - RNA, 19 nt, Human
agaguuaguuucuuuggga

SEQ ID NO: 2463604 - RNA, 21 nt, Human
agauauauuaaaaauauaaaa

SEQ ID NO: 2463605 - RNA, 20 nt, Human
agauauauuaaaaauauaaa

SEQ ID NO: 2463606 - RNA, 19 nt, Human
agauauauuaaaaauauaa

SEQ ID NO: 2463607 - RNA, 18 nt, Human
agauauauuaaaaauaua

SEQ ID NO: 2463608 - RNA, 20 nt, Human
agauauauuuuuaagauaau

SEQ ID NO: 2463609 - RNA, 20 nt, Human
agauauauuaagugacuguu

SEQ ID NO: 2463610 - RNA, 17 nt, Human
agauauauuuuuaagau

SEQ ID NO: 2463611 - RNA, 16 nt, Human
agauauauuuuucaca

SEQ ID NO: 2463612 - RNA, 23 nt, Human
agauauauuuuuaagauaauaau

SEQ ID NO: 2463613 - RNA, 21 nt, Human
agauauauuuuuaagauaaua

SEQ ID NO: 2463614 - RNA, 14 nt, Human
agauauauuuuuca

SEQ ID NO: 2463615 - RNA, 15 nt, Human
agauauauuuuucac

SEQ ID NO: 2463616 - RNA, 17 nt, Human
agauauauuaaaaauau

SEQ ID NO: 2463617 - RNA, 13 nt, Human
agauauauuaaaa

SEQ ID NO: 2463618 - RNA, 22 nt, Human
agaguuccugcggagugaagag

SEQ ID NO: 2463619 - RNA, 14 nt, Human
agaguucugcucua

SEQ ID NO: 2463620 - RNA, 19 nt, Human
agauauaugcucugcaugu

SEQ ID NO: 2463621 - RNA, 14 nt, Human
agaucuucuguggg

SEQ ID NO: 2463622 - RNA, 17 nt, Human
agaugaaaaagcaugua

SEQ ID NO: 2463623 - RNA, 19 nt, Human
agaugaaaaagcauguaca

SEQ ID NO: 2463624 - RNA, 12 nt, Human
agaucuuucagg

SEQ ID NO: 2463625 - RNA, 13 nt, Human
agaucuuucagga

SEQ ID NO: 2463626 - RNA, 21 nt, Human
agaucuuucaggaaagacgga

SEQ ID NO: 2463627 - RNA, 23 nt, Human
agaugggagcuccucuccuggag

SEQ ID NO: 2463628 - RNA, 18 nt, Human
agaugggagcuccucucc

SEQ ID NO: 2463629 - RNA, 16 nt, Human
agaugggaugcuugcc

SEQ ID NO: 2463630 - RNA, 22 nt, Human
agaugggcauggggugggccuc

SEQ ID NO: 2463631 - RNA, 16 nt, Human
agaugggcuuguuuuc

SEQ ID NO: 2463632 - RNA, 17 nt, Human
agaugggcuuguuuucu

SEQ ID NO: 2463633 - RNA, 14 nt, Human
agauggcugugccu

SEQ ID NO: 2463634 - RNA, 13 nt, Human
agaugggagcucc

SEQ ID NO: 2463635 - RNA, 22 nt, Human
agauggcugacuuugcucuuuc

SEQ ID NO: 2463636 - RNA, 14 nt, Human
agauggcuccucuc

SEQ ID NO: 2463637 - RNA, 15 nt, Human
agauggcuccucuca

SEQ ID NO: 2463638 - RNA, 20 nt, Human
agauggcgagcauccuggcc

SEQ ID NO: 2463639 - RNA, 14 nt, Human
agaugaaacacaaa

SEQ ID NO: 2463640 - RNA, 22 nt, Human
agaugaaaaagcauguacagug

SEQ ID NO: 2463641 - RNA, 21 nt, Human
agaugaaaaagcauguacagu

SEQ ID NO: 2463642 - RNA, 20 nt, Human
agaugaaaaagcauguacag

SEQ ID NO: 2463643 - RNA, 13 nt, Human
agaugaaagagga

SEQ ID NO: 2463644 - RNA, 17 nt, Human
agaugaaacacaaacaa

SEQ ID NO: 2463645 - RNA, 23 nt, Human
agaugaaaucuuacagcugggug

SEQ ID NO: 2463646 - RNA, 20 nt, Human
agaugaaaucuuacagcugg

SEQ ID NO: 2463647 - RNA, 14 nt, Human
agauggcacuuuga

SEQ ID NO: 2463648 - RNA, 23 nt, Human
agaugaaagaggagguuuggggu

SEQ ID NO: 2463649 - RNA, 17 nt, Human
agaugaaagaggagguu

SEQ ID NO: 2463650 - RNA, 14 nt, Human
agauggcagucacu

SEQ ID NO: 2463651 - RNA, 19 nt, Human
agauggcccagcuccccaa

SEQ ID NO: 2463652 - RNA, 17 nt, Human
agauggcauccugugaa

SEQ ID NO: 2463653 - RNA, 19 nt, Human
agauggcauccugugaagu

SEQ ID NO: 2463654 - RNA, 19 nt, Human
agauggccugagaagagag

SEQ ID NO: 2463655 - RNA, 14 nt, Human
agagcccaggccuc

SEQ ID NO: 2463656 - RNA, 13 nt, Human
agagcccaggccu

SEQ ID NO: 2463657 - RNA, 15 nt, Human
agagcccaggccucc

SEQ ID NO: 2463658 - RNA, 14 nt, Human
agagccccacacgg

SEQ ID NO: 2463659 - RNA, 19 nt, Human
agaggaacuguccagagag

SEQ ID NO: 2463660 - RNA, 18 nt, Human
agaggaacuguccagaga

SEQ ID NO: 2463661 - RNA, 17 nt, Human
agaggaacuguccagag

SEQ ID NO: 2463662 - RNA, 15 nt, Human
agaggaacuguccag

SEQ ID NO: 2463663 - RNA, 12 nt, Human
agaggaacuguc

SEQ ID NO: 2463664 - RNA, 16 nt, Human
agaggaaggagaggag

SEQ ID NO: 2463665 - RNA, 14 nt, Human
agaggaaccaaccc

SEQ ID NO: 2463666 - RNA, 16 nt, Human
agaggagagaggaccc

SEQ ID NO: 2463667 - RNA, 15 nt, Human
agaggagagaggacc

SEQ ID NO: 2463668 - RNA, 10 nt, Human
agaggagaga

SEQ ID NO: 2463669 - RNA, 15 nt, Human
agaggagaaacacau

SEQ ID NO: 2463670 - RNA, 22 nt, Human
agaggacuguagggagggcggc

SEQ ID NO: 2463671 - RNA, 22 nt, Human
agaggacgagcgauugaggugu

SEQ ID NO: 2463672 - RNA, 14 nt, Human
agaggagaaacaca

SEQ ID NO: 2463673 - RNA, 15 nt, Human
agaggaccggcggcu

SEQ ID NO: 2463674 - RNA, 19 nt, Human
agaggacucacuugcccac

SEQ ID NO: 2463675 - RNA, 16 nt, Human
agaggacgugggcggc

SEQ ID NO: 2463676 - RNA, 14 nt, Human
agaggacgugggcg

SEQ ID NO: 2463677 - RNA, 20 nt, Human
agaggacaguauuugugggg

SEQ ID NO: 2463678 - RNA, 18 nt, Human
agaggacagaucaauggc

SEQ ID NO: 2463679 - RNA, 23 nt, Human
agaggacagaucaauggcgcagu

SEQ ID NO: 2463680 - RNA, 13 nt, Human
agaggaagagcag

SEQ ID NO: 2463681 - RNA, 22 nt, Human
agaggaagaauuuguuaucagu

SEQ ID NO: 2463682 - RNA, 21 nt, Human
agaggaacuguccagagagca

SEQ ID NO: 2463683 - RNA, 20 nt, Human
agaggaacuguccagagagc

SEQ ID NO: 2463684 - RNA, 15 nt, Human
agaggaaggggccag

SEQ ID NO: 2463685 - RNA, 16 nt, Human
agaggacaagggaaau

SEQ ID NO: 2463686 - RNA, 15 nt, Human
agaggagagaggcag

SEQ ID NO: 2463687 - RNA, 13 nt, Human
agaggagagaggc

SEQ ID NO: 2463688 - RNA, 12 nt, Human
agaggagagagg

SEQ ID NO: 2463689 - RNA, 11 nt, Human
agaggagagag

SEQ ID NO: 2463690 - RNA, 17 nt, Human
agagggaugcauggaga

SEQ ID NO: 2463691 - RNA, 12 nt, Human
agagggcacaga

SEQ ID NO: 2463692 - RNA, 23 nt, Human
agagggcaugcgcacaaggcuga

SEQ ID NO: 2463693 - RNA, 14 nt, Human
agagggcccaggca

SEQ ID NO: 2463694 - RNA, 16 nt, Human
agagggcccaggcagg

SEQ ID NO: 2463695 - RNA, 17 nt, Human
agagggcccaggcaggc

SEQ ID NO: 2463696 - RNA, 12 nt, Human
agaggagagcca

SEQ ID NO: 2463697 - RNA, 17 nt, Human
agaggagagaggcagag

SEQ ID NO: 2463698 - RNA, 16 nt, Human
agagggcacucugcuu

SEQ ID NO: 2463699 - RNA, 18 nt, Human
agagggccaagacuuggc

SEQ ID NO: 2463700 - RNA, 16 nt, Human
agagggcacacacugu

SEQ ID NO: 2463701 - RNA, 14 nt, Human
agagggcagaggcu

SEQ ID NO: 2463702 - RNA, 22 nt, Human
agaggguggugaccucugccug

SEQ ID NO: 2463703 - RNA, 20 nt, Human
agaggguggugaccucugcc

SEQ ID NO: 2463704 - RNA, 19 nt, Human
agaggguggugaccucugc

SEQ ID NO: 2463705 - RNA, 18 nt, Human
agagggcccugguguuuc

SEQ ID NO: 2463706 - RNA, 13 nt, Human
agagggcccuggu

SEQ ID NO: 2463707 - RNA, 21 nt, Human
agagggcccaggcaggccacc

SEQ ID NO: 2463708 - RNA, 23 nt, Human
agagggcccugguguuucuagca

SEQ ID NO: 2463709 - RNA, 19 nt, Human
agaguggcuccucccggug

SEQ ID NO: 2463710 - RNA, 15 nt, Human
agaguggcuccuccc

SEQ ID NO: 2463711 - RNA, 11 nt, Human
agagugggagc

SEQ ID NO: 2463712 - RNA, 23 nt, Human
agaguggcuccucccggugccca

SEQ ID NO: 2463713 - RNA, 18 nt, Human
agagugggcugcaucugg

SEQ ID NO: 2463714 - RNA, 20 nt, Human
agagugucuucacggcagga

SEQ ID NO: 2463715 - RNA, 19 nt, Human
agaguggggauaugauuua

SEQ ID NO: 2463716 - RNA, 14 nt, Human
agagugugccugaa

SEQ ID NO: 2463717 - RNA, 14 nt, Human
agagugucuuucca

SEQ ID NO: 2463718 - RNA, 15 nt, Human
agagugucuuuccac

SEQ ID NO: 2463719 - RNA, 22 nt, Human
agagugucuucacggcaggaca

SEQ ID NO: 2463720 - RNA, 19 nt, Human
agagugugaaauagacauu

SEQ ID NO: 2463721 - RNA, 19 nt, Human
agagugugggaagggagag

SEQ ID NO: 2463722 - RNA, 20 nt, Human
agagugugggaagggagagc

SEQ ID NO: 2463723 - RNA, 17 nt, Human
agaguguggccuucgga

SEQ ID NO: 2463724 - RNA, 18 nt, Human
agaugggggcaagaagau

SEQ ID NO: 2463725 - RNA, 17 nt, Human
agaugggggcaagaaga

SEQ ID NO: 2463726 - RNA, 16 nt, Human
agaugggggcaagaag

SEQ ID NO: 2463727 - RNA, 15 nt, Human
agaugggggcaagaa

SEQ ID NO: 2463728 - RNA, 18 nt, Human
agaugggggaaagcacag

SEQ ID NO: 2463729 - RNA, 15 nt, Human
agauggggccucugu

SEQ ID NO: 2463730 - RNA, 14 nt, Human
agauggggccucug

SEQ ID NO: 2463731 - RNA, 15 nt, Human
agaugggggaaagca

SEQ ID NO: 2463732 - RNA, 18 nt, Human
agaugggcuuguuuucuu

SEQ ID NO: 2463733 - RNA, 19 nt, Human
agaugggcuuguuuucuug

SEQ ID NO: 2463734 - RNA, 12 nt, Human
agcacugaccug

SEQ ID NO: 2463735 - RNA, 16 nt, Human
agcacugacuucuaag

SEQ ID NO: 2463736 - RNA, 23 nt, Human
agcacugacuagggaaaugauca

SEQ ID NO: 2463737 - RNA, 22 nt, Human
agcacugaccugucaugccccc

SEQ ID NO: 2463738 - RNA, 20 nt, Human
agcacugaccugucaugccc

SEQ ID NO: 2463739 - RNA, 13 nt, Human
agcacugaccugu

SEQ ID NO: 2463740 - RNA, 17 nt, Human
agcacuggguugacuuu

SEQ ID NO: 2463741 - RNA, 19 nt, Human
agcacagacccugcccugu

SEQ ID NO: 2463742 - RNA, 18 nt, Human
agcacagacccugcccug

SEQ ID NO: 2463743 - RNA, 20 nt, Human
agcacagacccugcccugug

SEQ ID NO: 2463744 - RNA, 16 nt, Human
agcacagaaggaggag

SEQ ID NO: 2463745 - RNA, 14 nt, Human
agcacacagggcag

SEQ ID NO: 2463746 - RNA, 17 nt, Human
agcacagacccugcccu

SEQ ID NO: 2463747 - RNA, 14 nt, Human
agcacacuguagca

SEQ ID NO: 2463748 - RNA, 19 nt, Human
agcacacuguagcauuaca

SEQ ID NO: 2463749 - RNA, 19 nt, Human
agcacagaaacagaggaga

SEQ ID NO: 2463750 - RNA, 13 nt, Human
agcacagaaggag

SEQ ID NO: 2463751 - RNA, 23 nt, Human
agcacacuugacaucaacugcau

SEQ ID NO: 2463752 - RNA, 20 nt, Human
agcacacucauccccucacu

SEQ ID NO: 2463753 - RNA, 14 nt, Human
agcacacucauccc

SEQ ID NO: 2463754 - RNA, 13 nt, Human
agcagcguuucua

SEQ ID NO: 2463755 - RNA, 22 nt, Human
agcagcgguuuggggagcagag

SEQ ID NO: 2463756 - RNA, 23 nt, Human
agcagcgguuuggggagcagaga

SEQ ID NO: 2463757 - RNA, 22 nt, Human
agcagcgaccaccccugccucc

SEQ ID NO: 2463758 - RNA, 23 nt, Human
agcagcgaccgcccccuccucua

SEQ ID NO: 2463759 - RNA, 21 nt, Human
agcagcgaccaccccugccuc

SEQ ID NO: 2463760 - RNA, 20 nt, Human
agcagcgaccaccccugccu

SEQ ID NO: 2463761 - RNA, 18 nt, Human
agcagcgaccgcccccuc

SEQ ID NO: 2463762 - RNA, 14 nt, Human
agcagcgccuuucc

SEQ ID NO: 2463763 - RNA, 15 nt, Human
agcagcgccuuuccc

SEQ ID NO: 2463764 - RNA, 15 nt, Human
agcagcgguggccuc

SEQ ID NO: 2463765 - RNA, 21 nt, Human
agcagcggggcgaagcccagg

SEQ ID NO: 2463766 - RNA, 16 nt, Human
agcagcgguggccucu

SEQ ID NO: 2463767 - RNA, 17 nt, Human
agcagcgguuuggggag

SEQ ID NO: 2463768 - RNA, 17 nt, Human
agcacuguuccagccug

SEQ ID NO: 2463769 - RNA, 16 nt, Human
agcacuguuccagccu

SEQ ID NO: 2463770 - RNA, 19 nt, Human
agcacugugcucagggcua

SEQ ID NO: 2463771 - RNA, 18 nt, Human
agcacugugcucagggcu

SEQ ID NO: 2463772 - RNA, 15 nt, Human
agcacugugcucagg

SEQ ID NO: 2463773 - RNA, 14 nt, Human
agcacugugcucag

SEQ ID NO: 2463774 - RNA, 23 nt, Human
agcacugugcuaauaacagugca

SEQ ID NO: 2463775 - RNA, 15 nt, Human
agcacugugcuaaua

SEQ ID NO: 2463776 - RNA, 20 nt, Human
agcacuguuccagccugccc

SEQ ID NO: 2463777 - RNA, 18 nt, Human
agcagcgaccaccccugc

SEQ ID NO: 2463778 - RNA, 16 nt, Human
agcacugucccuugcc

SEQ ID NO: 2463779 - RNA, 15 nt, Human
agcacugucccuugc

SEQ ID NO: 2463780 - RNA, 13 nt, Human
agcacugucccuu

SEQ ID NO: 2463781 - RNA, 12 nt, Human
agcacugucccu

SEQ ID NO: 2463782 - RNA, 22 nt, Human
agcacugucccuugccucaaug

SEQ ID NO: 2463783 - RNA, 19 nt, Human
agcacugucccuugccuca

SEQ ID NO: 2463784 - RNA, 19 nt, Human
agcacuggguugcagggga

SEQ ID NO: 2463785 - RNA, 14 nt, Human
agcacugucucagu

SEQ ID NO: 2463786 - RNA, 14 nt, Human
agcacugugcuaau

SEQ ID NO: 2463787 - RNA, 20 nt, Human
agcacugucucaguuucacu

SEQ ID NO: 2463788 - RNA, 20 nt, Human
agcagugcaugcugucccuu

SEQ ID NO: 2463789 - RNA, 19 nt, Human
agcagugcaugcugucccu

SEQ ID NO: 2463790 - RNA, 15 nt, Human
agcagcuucaccaga

SEQ ID NO: 2463791 - RNA, 22 nt, Human
agcagcugguaaucuugcucug

SEQ ID NO: 2463792 - RNA, 18 nt, Human
agcagugcaugcuguccc

SEQ ID NO: 2463793 - RNA, 16 nt, Human
agcagugccuuccaua

SEQ ID NO: 2463794 - RNA, 17 nt, Human
agcagugccuuccauaa

SEQ ID NO: 2463795 - RNA, 20 nt, Human
agcagugccuuccauaauua

SEQ ID NO: 2463796 - RNA, 18 nt, Human
agcagcuggacuacccac

SEQ ID NO: 2463797 - RNA, 13 nt, Human
agcagcuggacua

SEQ ID NO: 2463798 - RNA, 10 nt, Human
agcagcugga

SEQ ID NO: 2463799 - RNA, 18 nt, Human
agcagcuuagacuaaggc

SEQ ID NO: 2463800 - RNA, 18 nt, Human
agcagcugaacagccaaa

SEQ ID NO: 2463801 - RNA, 23 nt, Human
agcagcucuugcuaaucaguguc

SEQ ID NO: 2463802 - RNA, 23 nt, Human
agcagcugaaauaugcuggcugg

SEQ ID NO: 2463803 - RNA, 22 nt, Human
agcagcugaaauaugcuggcug

SEQ ID NO: 2463804 - RNA, 17 nt, Human
agcagcucuugcuaauc

SEQ ID NO: 2463805 - RNA, 16 nt, Human
agcagcucuugcuaau

SEQ ID NO: 2463806 - RNA, 15 nt, Human
agcagcucuugcuaa

SEQ ID NO: 2463807 - RNA, 13 nt, Human
agcagcucuugcu

SEQ ID NO: 2463808 - RNA, 12 nt, Human
agcagcucuccc

SEQ ID NO: 2463809 - RNA, 14 nt, Human
agcagcucuccccu

SEQ ID NO: 2463810 - RNA, 13 nt, Human
agcaguugaaaag

SEQ ID NO: 2463811 - RNA, 16 nt, Human
agcaguugaaaagacu

SEQ ID NO: 2463812 - RNA, 14 nt, Human
agcaguuccggauu

SEQ ID NO: 2463813 - RNA, 22 nt, Human
agcaguuaacuuuaagacugag

SEQ ID NO: 2463814 - RNA, 15 nt, Human
agcaguuaacuuuaa

SEQ ID NO: 2463815 - RNA, 21 nt, Human
agcaguguuccccaucugggu

SEQ ID NO: 2463816 - RNA, 21 nt, Human
agcaguuacaaaaaccuuccc

SEQ ID NO: 2463817 - RNA, 15 nt, Human
agcagugugaggcca

SEQ ID NO: 2463818 - RNA, 21 nt, Human
agcagugugaggccagggcag

SEQ ID NO: 2463819 - RNA, 20 nt, Human
agcagugucuuccauaaugu

SEQ ID NO: 2463820 - RNA, 18 nt, Human
agcagugggccuggccag

SEQ ID NO: 2463821 - RNA, 13 nt, Human
agcagugucauca

SEQ ID NO: 2463822 - RNA, 19 nt, Human
agcagugccuuccauaauu

SEQ ID NO: 2463823 - RNA, 19 nt, Human
agcagugucaucagaagau

SEQ ID NO: 2463824 - RNA, 15 nt, Human
agcagugucaucaga

SEQ ID NO: 2463825 - RNA, 20 nt, Human
agcagugucaucagaagaua

SEQ ID NO: 2463826 - RNA, 15 nt, Human
agcagugucuuccau

SEQ ID NO: 2463827 - RNA, 16 nt, Human
agcagugucuuccaua

SEQ ID NO: 2463828 - RNA, 17 nt, Human
agcagugucuuccauaa

SEQ ID NO: 2463829 - RNA, 22 nt, Human
agcagugucuuccauaauguau

SEQ ID NO: 2463830 - RNA, 23 nt, Human
agcauccuggcacccggccccug

SEQ ID NO: 2463831 - RNA, 22 nt, Human
agcauccuggcacccggccccu

SEQ ID NO: 2463832 - RNA, 18 nt, Human
agcauccuggcacccggc

SEQ ID NO: 2463833 - RNA, 19 nt, Human
agcauccuuuucugcagag

SEQ ID NO: 2463834 - RNA, 21 nt, Human
agcauccuuuucugcagaggg

SEQ ID NO: 2463835 - RNA, 20 nt, Human
agcaugaauuuuuuucaucu

SEQ ID NO: 2463836 - RNA, 22 nt, Human
agcaugaaugguauggaacucu

SEQ ID NO: 2463837 - RNA, 22 nt, Human
agcaugacaagccccaggcagg

SEQ ID NO: 2463838 - RNA, 20 nt, Human
agcaugacaagccccaggca

SEQ ID NO: 2463839 - RNA, 21 nt, Human
agcaugacaagccccaggcag

SEQ ID NO: 2463840 - RNA, 17 nt, Human
agcaugacaagccccag

SEQ ID NO: 2463841 - RNA, 18 nt, Human
agcaugacaagccccagg

SEQ ID NO: 2463842 - RNA, 19 nt, Human
agcaugacaagccccaggc

SEQ ID NO: 2463843 - RNA, 14 nt, Human
agcaugacauuucu

SEQ ID NO: 2463844 - RNA, 15 nt, Human
agcaugacauuucuu

SEQ ID NO: 2463845 - RNA, 18 nt, Human
agcaugaccugugaccag

SEQ ID NO: 2463846 - RNA, 18 nt, Human
agccaauccccuccuugg

SEQ ID NO: 2463847 - RNA, 16 nt, Human
agccaauccccuccuu

SEQ ID NO: 2463848 - RNA, 15 nt, Human
agccagcacacaggg

SEQ ID NO: 2463849 - RNA, 17 nt, Human
agccagcacacagggca

SEQ ID NO: 2463850 - RNA, 18 nt, Human
agccagcacacagggcag

SEQ ID NO: 2463851 - RNA, 20 nt, Human
agccaauccccuccuugggc

SEQ ID NO: 2463852 - RNA, 19 nt, Human
agccagcacacagggcagu

SEQ ID NO: 2463853 - RNA, 23 nt, Human
agccagcaccuggcaucgcacca

SEQ ID NO: 2463854 - RNA, 15 nt, Human
agccagcaccuggca

SEQ ID NO: 2463855 - RNA, 14 nt, Human
agccagcaccuggc

SEQ ID NO: 2463856 - RNA, 13 nt, Human
agccagcaccugg

SEQ ID NO: 2463857 - RNA, 15 nt, Human
agccagcacuuguau

SEQ ID NO: 2463858 - RNA, 20 nt, Human
agccagcacuuguccagcug

SEQ ID NO: 2463859 - RNA, 21 nt, Human
agccagcacuuguccagcuga

SEQ ID NO: 2463860 - RNA, 22 nt, Human
agccagcacuuguccagcugag

SEQ ID NO: 2463861 - RNA, 15 nt, Human
agccaauccccuccu

SEQ ID NO: 2463862 - RNA, 14 nt, Human
agccaauccccucc

SEQ ID NO: 2463863 - RNA, 13 nt, Human
agccaauccccuc

SEQ ID NO: 2463864 - RNA, 18 nt, Human
agccaauaacacacagcu

SEQ ID NO: 2463865 - RNA, 14 nt, Human
agccaauauuuuuc

SEQ ID NO: 2463866 - RNA, 23 nt, Human
agccaagugugguagagugugcc

SEQ ID NO: 2463867 - RNA, 20 nt, Human
agccaaguggggugcuggga

SEQ ID NO: 2463868 - RNA, 16 nt, Human
agccaaguggggugcu

SEQ ID NO: 2463869 - RNA, 13 nt, Human
agccaaguggggu

SEQ ID NO: 2463870 - RNA, 18 nt, Human
agccaaguccagauuuac

SEQ ID NO: 2463871 - RNA, 15 nt, Human
agccaaguccagauu

SEQ ID NO: 2463872 - RNA, 13 nt, Human
agccaaguccaga

SEQ ID NO: 2463873 - RNA, 21 nt, Human
agccaagucagcuuugccuuc

SEQ ID NO: 2463874 - RNA, 23 nt, Human
agccaagucagcuuugccuucca

SEQ ID NO: 2463875 - RNA, 14 nt, Human
agccaaccccugug

SEQ ID NO: 2463876 - RNA, 16 nt, Human
agccaaccccugugga

SEQ ID NO: 2463877 - RNA, 15 nt, Human
agccaacagguggca

SEQ ID NO: 2463878 - RNA, 23 nt, Human
agccaacacccugucuaaaaaac

SEQ ID NO: 2463879 - RNA, 22 nt, Human
agccaacacgcaccugccucag

SEQ ID NO: 2463880 - RNA, 21 nt, Human
agccaacagguggcaggacca

SEQ ID NO: 2463881 - RNA, 17 nt, Human
agccaacagguggcagg

SEQ ID NO: 2463882 - RNA, 23 nt, Human
agccaacagguggcaggaccagg

SEQ ID NO: 2463883 - RNA, 21 nt, Human
agccaacagucaaaacagaga

SEQ ID NO: 2463884 - RNA, 18 nt, Human
agccaacacgcaccugcc

SEQ ID NO: 2463885 - RNA, 19 nt, Human
agccaacacgcaccugccu

SEQ ID NO: 2463886 - RNA, 18 nt, Human
agccaacagaagcuucca

SEQ ID NO: 2463887 - RNA, 19 nt, Human
agccaacacccaucuguuu

SEQ ID NO: 2463888 - RNA, 15 nt, Human
agccaaaugguuuaa

SEQ ID NO: 2463889 - RNA, 20 nt, Human
agccaaauguaauugaauaa

SEQ ID NO: 2463890 - RNA, 16 nt, Human
agcauggagcuggccg

SEQ ID NO: 2463891 - RNA, 13 nt, Human
agcauggagcugg

SEQ ID NO: 2463892 - RNA, 14 nt, Human
agcauggagcuggc

SEQ ID NO: 2463893 - RNA, 17 nt, Human
agccaaaucaaaauaug

SEQ ID NO: 2463894 - RNA, 23 nt, Human
agcaugccuggauggggcugcac

SEQ ID NO: 2463895 - RNA, 20 nt, Human
agcaugccuggauggggcug

SEQ ID NO: 2463896 - RNA, 19 nt, Human
agcaugagagaauuguauc

SEQ ID NO: 2463897 - RNA, 22 nt, Human
agcaugaccugugaccagcacu

SEQ ID NO: 2463898 - RNA, 23 nt, Human
agcaugaccugugaccagcacug

SEQ ID NO: 2463899 - RNA, 21 nt, Human
agcaugcugugauugugccua

SEQ ID NO: 2463900 - RNA, 20 nt, Human
agccagcaggcucucaggcc

SEQ ID NO: 2463901 - RNA, 15 nt, Human
agccagcagacauug

SEQ ID NO: 2463902 - RNA, 14 nt, Human
agccagcagacauu

SEQ ID NO: 2463903 - RNA, 16 nt, Human
agccagcagacauugu

SEQ ID NO: 2463904 - RNA, 17 nt, Human
agccagcaggcucucag

SEQ ID NO: 2463905 - RNA, 19 nt, Human
agccagcaggcucucaggc

SEQ ID NO: 2463906 - RNA, 18 nt, Human
agccagcaggcucucagg

SEQ ID NO: 2463907 - RNA, 19 nt, Human
agcccgggcugccugggcu

SEQ ID NO: 2463908 - RNA, 18 nt, Human
agcccgggcugccugggc

SEQ ID NO: 2463909 - RNA, 17 nt, Human
agcccgggcugccuggg

SEQ ID NO: 2463910 - RNA, 16 nt, Human
agcccgggcugccugg

SEQ ID NO: 2463911 - RNA, 21 nt, Human
agcccgggcugccugggcugu

SEQ ID NO: 2463912 - RNA, 20 nt, Human
agcccgggcugccugggcug

SEQ ID NO: 2463913 - RNA, 15 nt, Human
agcccgggcugccug

SEQ ID NO: 2463914 - RNA, 14 nt, Human
agcccgggcugccu

SEQ ID NO: 2463915 - RNA, 13 nt, Human
agcccgggcugcc

SEQ ID NO: 2463916 - RNA, 12 nt, Human
agcccgggcugc

SEQ ID NO: 2463917 - RNA, 16 nt, Human
agccccauuccuggga

SEQ ID NO: 2463918 - RNA, 16 nt, Human
agccccauucugccug

SEQ ID NO: 2463919 - RNA, 13 nt, Human
agccccauucugc

SEQ ID NO: 2463920 - RNA, 14 nt, Human
agcccucaaaguga

SEQ ID NO: 2463921 - RNA, 19 nt, Human
agcccuaaaucuagacuca

SEQ ID NO: 2463922 - RNA, 13 nt, Human
agcccucaaagug

SEQ ID NO: 2463923 - RNA, 22 nt, Human
agcccucaccccugguucucau

SEQ ID NO: 2463924 - RNA, 17 nt, Human
agcccucacccuggggc

SEQ ID NO: 2463925 - RNA, 22 nt, Human
agcccuaaaauuccacugcguu

SEQ ID NO: 2463926 - RNA, 17 nt, Human
agcccguguggccccuu

SEQ ID NO: 2463927 - RNA, 18 nt, Human
agcccguguggccccuuc

SEQ ID NO: 2463928 - RNA, 19 nt, Human
agcccguguggccccuuca

SEQ ID NO: 2463929 - RNA, 14 nt, Human
agcccgucucagug

SEQ ID NO: 2463930 - RNA, 15 nt, Human
agcccgucucagugu

SEQ ID NO: 2463931 - RNA, 15 nt, Human
agcccguguggcccc

SEQ ID NO: 2463932 - RNA, 16 nt, Human
agcccguguggccccu

SEQ ID NO: 2463933 - RNA, 23 nt, Human
agccccaugcuggagccugugua

SEQ ID NO: 2463934 - RNA, 22 nt, Human
agccccaugcuggagccugugu

SEQ ID NO: 2463935 - RNA, 21 nt, Human
agccccaugcuggagccugug

SEQ ID NO: 2463936 - RNA, 20 nt, Human
agccccaugcuggagccugu

SEQ ID NO: 2463937 - RNA, 13 nt, Human
agccccauuccug

SEQ ID NO: 2463938 - RNA, 19 nt, Human
agccccaugcuggagccug

SEQ ID NO: 2463939 - RNA, 18 nt, Human
agccccaugcuggagccu

SEQ ID NO: 2463940 - RNA, 17 nt, Human
agccccaugcuggagcc

SEQ ID NO: 2463941 - RNA, 16 nt, Human
agccccaugcuggagc

SEQ ID NO: 2463942 - RNA, 20 nt, Human
agccccagugccaagcacag

SEQ ID NO: 2463943 - RNA, 23 nt, Human
agccccagugccaagcacagugc

SEQ ID NO: 2463944 - RNA, 14 nt, Human
agccccaugcugga

SEQ ID NO: 2463945 - RNA, 15 nt, Human
agccccagugcccac

SEQ ID NO: 2463946 - RNA, 14 nt, Human
agccccagugccca

SEQ ID NO: 2463947 - RNA, 13 nt, Human
agccccagugccc

SEQ ID NO: 2463948 - RNA, 13 nt, Human
agccccagugcca

SEQ ID NO: 2463949 - RNA, 13 nt, Human
agccuccuccuga

SEQ ID NO: 2463950 - RNA, 12 nt, Human
agccuccuccug

SEQ ID NO: 2463951 - RNA, 14 nt, Human
agccgcuccugucu

SEQ ID NO: 2463952 - RNA, 20 nt, Human
agccgccauugccaccagga

SEQ ID NO: 2463953 - RNA, 21 nt, Human
agccgccauugccaccaggag

SEQ ID NO: 2463954 - RNA, 22 nt, Human
agccgccauugccaccaggaga

SEQ ID NO: 2463955 - RNA, 15 nt, Human
agccgcugagcgagg

SEQ ID NO: 2463956 - RNA, 19 nt, Human
agccgcugagcgaggagau

SEQ ID NO: 2463957 - RNA, 12 nt, Human
agccgcucggag

SEQ ID NO: 2463958 - RNA, 22 nt, Human
agccgcuccugucugccagcca

SEQ ID NO: 2463959 - RNA, 16 nt, Human
agccgcuccugucugc

SEQ ID NO: 2463960 - RNA, 17 nt, Human
agccgcuccugucugcc

SEQ ID NO: 2463961 - RNA, 19 nt, Human
agccgcuccugucugccag

SEQ ID NO: 2463962 - RNA, 21 nt, Human
agccgcuccugucugccagcc

SEQ ID NO: 2463963 - RNA, 13 nt, Human
agccgcuggggcc

SEQ ID NO: 2463964 - RNA, 22 nt, Human
agccgcugcccggcgcccucug

SEQ ID NO: 2463965 - RNA, 18 nt, Human
agccgcugcccggcgccc

SEQ ID NO: 2463966 - RNA, 17 nt, Human
agccgcugcccggcgcc

SEQ ID NO: 2463967 - RNA, 12 nt, Human
agccgcugcccg

SEQ ID NO: 2463968 - RNA, 22 nt, Human
agccggccucucuggccuccca

SEQ ID NO: 2463969 - RNA, 19 nt, Human
agccggccucucuggccuc

SEQ ID NO: 2463970 - RNA, 18 nt, Human
agccggccucucuggccu

SEQ ID NO: 2463971 - RNA, 12 nt, Human
agccgcugcugg

SEQ ID NO: 2463972 - RNA, 18 nt, Human
agccggcggcccaagccc

SEQ ID NO: 2463973 - RNA, 13 nt, Human
agccggcggccca

SEQ ID NO: 2463974 - RNA, 23 nt, Human
agccggccucucuggccucccac

SEQ ID NO: 2463975 - RNA, 17 nt, Human
agccgggccccugggcu

SEQ ID NO: 2463976 - RNA, 16 nt, Human
agccgggccccugggc

SEQ ID NO: 2463977 - RNA, 18 nt, Human
agccgggccccugggcuu

SEQ ID NO: 2463978 - RNA, 14 nt, Human
agccgggccccugg

SEQ ID NO: 2463979 - RNA, 20 nt, Human
agccgggaaagaagagccgg

SEQ ID NO: 2463980 - RNA, 23 nt, Human
agccgggaacagacaacagaagu

SEQ ID NO: 2463981 - RNA, 21 nt, Human
agccgccaugcuccuggccca

SEQ ID NO: 2463982 - RNA, 17 nt, Human
agccgccauugccacca

SEQ ID NO: 2463983 - RNA, 18 nt, Human
agccgccauugccaccag

SEQ ID NO: 2463984 - RNA, 19 nt, Human
agccgccauugccaccagg

SEQ ID NO: 2463985 - RNA, 14 nt, Human
agcccucgucuccc

SEQ ID NO: 2463986 - RNA, 17 nt, Human
agcccuccuuccacgga

SEQ ID NO: 2463987 - RNA, 12 nt, Human
agcccuccuucc

SEQ ID NO: 2463988 - RNA, 13 nt, Human
agcccuccuucca

SEQ ID NO: 2463989 - RNA, 14 nt, Human
agcccuccucaccc

SEQ ID NO: 2463990 - RNA, 11 nt, Human
agcccuccuuc

SEQ ID NO: 2463991 - RNA, 12 nt, Human
agcccucuucca

SEQ ID NO: 2463992 - RNA, 11 nt, Human
agcccucuucc

SEQ ID NO: 2463993 - RNA, 15 nt, Human
agcccucuuccauca

SEQ ID NO: 2463994 - RNA, 13 nt, Human
agcccucuuccau

SEQ ID NO: 2463995 - RNA, 17 nt, Human
agccgcaucuucuccau

SEQ ID NO: 2463996 - RNA, 21 nt, Human
agccgcaucuucuccaucugg

SEQ ID NO: 2463997 - RNA, 15 nt, Human
agcccuccaaaagca

SEQ ID NO: 2463998 - RNA, 16 nt, Human
agcccucaucccgagc

SEQ ID NO: 2463999 - RNA, 19 nt, Human
agcccucagaacccuuggc

SEQ ID NO: 2464000 - RNA, 24 nt, Human
agcccucagaacccuuggcuugcc

SEQ ID NO: 2464001 - RNA, 15 nt, Human
agcccucagaacccu

SEQ ID NO: 2464002 - RNA, 18 nt, Human
agcccucagaacccuugg

SEQ ID NO: 2464003 - RNA, 14 nt, Human
agcccucagaaccc

SEQ ID NO: 2464004 - RNA, 23 nt, Human
agcccucaccccugguucucauc

SEQ ID NO: 2464005 - RNA, 24 nt, Human
agcccuccgccauucucaagcccu

SEQ ID NO: 2464006 - RNA, 12 nt, Human
agcccuccucac

SEQ ID NO: 2464007 - RNA, 13 nt, Human
agcccuccucacc

SEQ ID NO: 2464008 - RNA, 23 nt, Human
agcccuccgccauucucaagccc

SEQ ID NO: 2464009 - RNA, 21 nt, Human
agcccucccuguccuccucgg

SEQ ID NO: 2464010 - RNA, 22 nt, Human
agcccucccuguccuccucgga

SEQ ID NO: 2464011 - RNA, 14 nt, Human
agcccucccugucc

SEQ ID NO: 2464012 - RNA, 17 nt, Human
agcccuccaaaagcacu

SEQ ID NO: 2464013 - RNA, 15 nt, Human
agcccucccuguccu

SEQ ID NO: 2464014 - RNA, 16 nt, Human
agcccucccuguccuc

SEQ ID NO: 2464015 - RNA, 17 nt, Human
agcccucccuguccucc

SEQ ID NO: 2464016 - RNA, 19 nt, Human
agcccucccuguccuccuc

SEQ ID NO: 2464017 - RNA, 20 nt, Human
agcccucccuguccuccucg

SEQ ID NO: 2464018 - RNA, 21 nt, Human
agccgggcgugguggugagug

SEQ ID NO: 2464019 - RNA, 19 nt, Human
agccgucagccaaauguaa

SEQ ID NO: 2464020 - RNA, 19 nt, Human
agccgggccuggggcuccu

SEQ ID NO: 2464021 - RNA, 13 nt, Human
agccgggccuggg

SEQ ID NO: 2464022 - RNA, 20 nt, Human
agccgucagccaaauguaau

SEQ ID NO: 2464023 - RNA, 22 nt, Human
agccgggcgugguggcgggcac

SEQ ID NO: 2464024 - RNA, 20 nt, Human
agccgugaugcucaggcuug

SEQ ID NO: 2464025 - RNA, 19 nt, Human
agccgugaugcucaggcuu

SEQ ID NO: 2464026 - RNA, 18 nt, Human
agccgugaugcucaggcu

SEQ ID NO: 2464027 - RNA, 17 nt, Human
agccgugaugcucaggc

SEQ ID NO: 2464028 - RNA, 16 nt, Human
agccgugccuucagcu

SEQ ID NO: 2464029 - RNA, 15 nt, Human
agccgugccuucagc

SEQ ID NO: 2464030 - RNA, 17 nt, Human
agccgugccuucagcuc

SEQ ID NO: 2464031 - RNA, 21 nt, Human
agccucccaaagugcugggau

SEQ ID NO: 2464032 - RNA, 22 nt, Human
agccucccacgacugcccggca

SEQ ID NO: 2464033 - RNA, 18 nt, Human
agccgugcucgccccagc

SEQ ID NO: 2464034 - RNA, 17 nt, Human
agccucccaaguagcug

SEQ ID NO: 2464035 - RNA, 16 nt, Human
agccgugcccugcccc

SEQ ID NO: 2464036 - RNA, 19 nt, Human
agccucccgaguagcuggg

SEQ ID NO: 2464037 - RNA, 18 nt, Human
agccucccgaguagcugg

SEQ ID NO: 2464038 - RNA, 20 nt, Human
agccucccgaguagcuggga

SEQ ID NO: 2464039 - RNA, 16 nt, Human
agccucccugaagccu

SEQ ID NO: 2464040 - RNA, 17 nt, Human
agccucccauccagggc

SEQ ID NO: 2464041 - RNA, 13 nt, Human
agccucccacccc

SEQ ID NO: 2464042 - RNA, 23 nt, Human
agccuccggaguagcugggacca

SEQ ID NO: 2464043 - RNA, 20 nt, Human
agccuccucaucccguguuc

SEQ ID NO: 2464044 - RNA, 17 nt, Human
agccuccguauuucaga

SEQ ID NO: 2464045 - RNA, 18 nt, Human
agccuccguauuucagac

SEQ ID NO: 2464046 - RNA, 14 nt, Human
agccuccuccagcc

SEQ ID NO: 2464047 - RNA, 18 nt, Human
agccuccgagagggagag

SEQ ID NO: 2464048 - RNA, 17 nt, Human
agccuccgagagggaga

SEQ ID NO: 2464049 - RNA, 16 nt, Human
agccuccgagagggag

SEQ ID NO: 2464050 - RNA, 14 nt, Human
agccuccgagaggg

SEQ ID NO: 2464051 - RNA, 18 nt, Human
agccucccugucggccug

SEQ ID NO: 2464052 - RNA, 18 nt, Human
agccucccauccagggcc

SEQ ID NO: 2464053 - RNA, 20 nt, Human
aggagaaucacuugaaccug

SEQ ID NO: 2464054 - RNA, 15 nt, Human
aggagaaugagccuc

SEQ ID NO: 2464055 - RNA, 16 nt, Human
aggagaauccaagcga

SEQ ID NO: 2464056 - RNA, 18 nt, Human
aggagaauccaagcgagg

SEQ ID NO: 2464057 - RNA, 20 nt, Human
aggagaauugcuugaaccug

SEQ ID NO: 2464058 - RNA, 20 nt, Human
aggagaauggcgugaacccg

SEQ ID NO: 2464059 - RNA, 19 nt, Human
aggagacacaacaacuccu

SEQ ID NO: 2464060 - RNA, 11 nt, Human
aggagacacaa

SEQ ID NO: 2464061 - RNA, 22 nt, Human
aggaguccaggccauggaggca

SEQ ID NO: 2464062 - RNA, 14 nt, Human
aggagucccaagga

SEQ ID NO: 2464063 - RNA, 20 nt, Human
aggaguccacuuuguuucgu

SEQ ID NO: 2464064 - RNA, 14 nt, Human
aggagucagagaga

SEQ ID NO: 2464065 - RNA, 12 nt, Human
aggagaaggaag

SEQ ID NO: 2464066 - RNA, 16 nt, Human
aggagaaggaaggaga

SEQ ID NO: 2464067 - RNA, 19 nt, Human
aggaccuagggauguucug

SEQ ID NO: 2464068 - RNA, 15 nt, Human
aggaccucagcugcu

SEQ ID NO: 2464069 - RNA, 18 nt, Human
aggaccucagcugcuucu

SEQ ID NO: 2464070 - RNA, 22 nt, Human
aggaccuagggauguucuggcc

SEQ ID NO: 2464071 - RNA, 13 nt, Human
aggaccucaggug

SEQ ID NO: 2464072 - RNA, 16 nt, Human
aggaccggcggcucgg

SEQ ID NO: 2464073 - RNA, 22 nt, Human
aggacccuucccuugagcccuc

SEQ ID NO: 2464074 - RNA, 12 nt, Human
aggagucccugg

SEQ ID NO: 2464075 - RNA, 21 nt, Human
aggagucccugccaucauguu

SEQ ID NO: 2464076 - RNA, 16 nt, Human
aggagucccaaggaaa

SEQ ID NO: 2464077 - RNA, 17 nt, Human
aggagucccaaggaaag

SEQ ID NO: 2464078 - RNA, 21 nt, Human
aggagugggaaaacacugcca

SEQ ID NO: 2464079 - RNA, 18 nt, Human
aggaguggguugauuuca

SEQ ID NO: 2464080 - RNA, 21 nt, Human
aggaugcuuguacauaaugcg

SEQ ID NO: 2464081 - RNA, 23 nt, Human
aggaugcuuguacauaaugcgug

SEQ ID NO: 2464082 - RNA, 16 nt, Human
aggaguuaagaguagc

SEQ ID NO: 2464083 - RNA, 18 nt, Human
aggagugugugauuuuuu

SEQ ID NO: 2464084 - RNA, 16 nt, Human
aggaguguggccacgu

SEQ ID NO: 2464085 - RNA, 16 nt, Human
aggagugugagaauca

SEQ ID NO: 2464086 - RNA, 22 nt, Human
aggaguuaguggauuacugcca

SEQ ID NO: 2464087 - RNA, 17 nt, Human
aggaguuaagaguagca

SEQ ID NO: 2464088 - RNA, 17 nt, Human
aggaguuagaggccagc

SEQ ID NO: 2464089 - RNA, 12 nt, Human
aggaguucaaug

SEQ ID NO: 2464090 - RNA, 20 nt, Human
aggaguuagaggccagccug

SEQ ID NO: 2464091 - RNA, 17 nt, Human
aggaugucacagggcca

SEQ ID NO: 2464092 - RNA, 16 nt, Human
aggaugucacagggcc

SEQ ID NO: 2464093 - RNA, 15 nt, Human
aggaugucacagggc

SEQ ID NO: 2464094 - RNA, 14 nt, Human
aggauuaaauaaug

SEQ ID NO: 2464095 - RNA, 18 nt, Human
aggauguucugggacaca

SEQ ID NO: 2464096 - RNA, 20 nt, Human
aggauuaaauaauguaaaua

SEQ ID NO: 2464097 - RNA, 14 nt, Human
aggauguuuuucau

SEQ ID NO: 2464098 - RNA, 18 nt, Human
aggaugucacagggccaa

SEQ ID NO: 2464099 - RNA, 16 nt, Human
aggauuacaugcaugu

SEQ ID NO: 2464100 - RNA, 14 nt, Human
aggauuauuggaaa

SEQ ID NO: 2464101 - RNA, 22 nt, Human
aggauguucuagcauggcugcc

SEQ ID NO: 2464102 - RNA, 22 nt, Human
aggauguacaaggacagccccu

SEQ ID NO: 2464103 - RNA, 16 nt, Human
aggauguucugggaca

SEQ ID NO: 2464104 - RNA, 15 nt, Human
aggauguucugggac

SEQ ID NO: 2464105 - RNA, 23 nt, Human
aggaugguucccuugaugaagaa

SEQ ID NO: 2464106 - RNA, 17 nt, Human
aggauggagccagcucu

SEQ ID NO: 2464107 - RNA, 19 nt, Human
aggauggagagaggggaau

SEQ ID NO: 2464108 - RNA, 18 nt, Human
aggauguaaacagugccu

SEQ ID NO: 2464109 - RNA, 19 nt, Human
aggauguaaacagugccug

SEQ ID NO: 2464110 - RNA, 22 nt, Human
aggauguaaacagugccugcug

SEQ ID NO: 2464111 - RNA, 20 nt, Human
aggauguaaacagugccugc

SEQ ID NO: 2464112 - RNA, 21 nt, Human
aggauguaaacagugccugcu

SEQ ID NO: 2464113 - RNA, 16 nt, Human
aggaguucaaugaucu

SEQ ID NO: 2464114 - RNA, 15 nt, Human
aggaguucaaugauc

SEQ ID NO: 2464115 - RNA, 14 nt, Human
aggaguucaaugau

SEQ ID NO: 2464116 - RNA, 13 nt, Human
aggaguucaauga

SEQ ID NO: 2464117 - RNA, 17 nt, Human
aggaguucaaugaucua

SEQ ID NO: 2464118 - RNA, 14 nt, Human
aggauggaacacgg

SEQ ID NO: 2464119 - RNA, 14 nt, Human
aggauggagagagg

SEQ ID NO: 2464120 - RNA, 15 nt, Human
aggauggagagaggg

SEQ ID NO: 2464121 - RNA, 16 nt, Human
aggauggagagagggg

SEQ ID NO: 2464122 - RNA, 17 nt, Human
aggauggagagagggga

SEQ ID NO: 2464123 - RNA, 19 nt, Human
aggauggaacacggccaca

SEQ ID NO: 2464124 - RNA, 13 nt, Human
aggauggagagag

SEQ ID NO: 2464125 - RNA, 21 nt, Human
aggaaucaugugccaagcaga

SEQ ID NO: 2464126 - RNA, 17 nt, Human
aggaauccagacccggc

SEQ ID NO: 2464127 - RNA, 20 nt, Human
aggaauccagacccggcugc

SEQ ID NO: 2464128 - RNA, 17 nt, Human
aggaauccacucccagg

SEQ ID NO: 2464129 - RNA, 16 nt, Human
aggaauccacucccag

SEQ ID NO: 2464130 - RNA, 21 nt, Human
aggaauccacucccaggcagc

SEQ ID NO: 2464131 - RNA, 22 nt, Human
agcuuuuuaauuguuguuucuu

SEQ ID NO: 2464132 - RNA, 13 nt, Human
agcuuuuugucuu

SEQ ID NO: 2464133 - RNA, 23 nt, Human
aggaaucaugucaggccugugug

SEQ ID NO: 2464134 - RNA, 14 nt, Human
agcuuuuccucccu

SEQ ID NO: 2464135 - RNA, 18 nt, Human
agcuuuugaauaaaaacu

SEQ ID NO: 2464136 - RNA, 21 nt, Human
agcuuuucccuuuuuuuaagu

SEQ ID NO: 2464137 - RNA, 21 nt, Human
agcuuuuuaauuguuguuucu

SEQ ID NO: 2464138 - RNA, 17 nt, Human
agcuuuuuaauuguugu

SEQ ID NO: 2464139 - RNA, 22 nt, Human
agcuuuuuauuccuccugcuca

SEQ ID NO: 2464140 - RNA, 19 nt, Human
agcuuuuuccagaggcuau

SEQ ID NO: 2464141 - RNA, 15 nt, Human
agcuuuuuaauuguu

SEQ ID NO: 2464142 - RNA, 14 nt, Human
agcuuuuuaauugu

SEQ ID NO: 2464143 - RNA, 13 nt, Human
agcuuuugcuuuu

SEQ ID NO: 2464144 - RNA, 18 nt, Human
aggacccagacccagugg

SEQ ID NO: 2464145 - RNA, 20 nt, Human
aggacccaucacgccugugc

SEQ ID NO: 2464146 - RNA, 18 nt, Human
aggacccaucacgccugu

SEQ ID NO: 2464147 - RNA, 20 nt, Human
aggacccuucccuugagccc

SEQ ID NO: 2464148 - RNA, 13 nt, Human
aggacccuucccu

SEQ ID NO: 2464149 - RNA, 12 nt, Human
aggacccuuccc

SEQ ID NO: 2464150 - RNA, 12 nt, Human
aggacccagacc

SEQ ID NO: 2464151 - RNA, 13 nt, Human
aggacccagagga

SEQ ID NO: 2464152 - RNA, 15 nt, Human
aggacccagaggaag

SEQ ID NO: 2464153 - RNA, 15 nt, Human
aggacccagacccag

SEQ ID NO: 2464154 - RNA, 14 nt, Human
aggacccagaccca

SEQ ID NO: 2464155 - RNA, 13 nt, Human
aggacccagaccc

SEQ ID NO: 2464156 - RNA, 22 nt, Human
agcuccccucggagaagagcug

SEQ ID NO: 2464157 - RNA, 17 nt, Human
agcucccuaggagacca

SEQ ID NO: 2464158 - RNA, 15 nt, Human
agcucccuaggagac

SEQ ID NO: 2464159 - RNA, 14 nt, Human
agcucccuucucug

SEQ ID NO: 2464160 - RNA, 13 nt, Human
agcucccuucucu

SEQ ID NO: 2464161 - RNA, 23 nt, Human
agcucccuucucuguagggaacu

SEQ ID NO: 2464162 - RNA, 16 nt, Human
agcucccuucucugua

SEQ ID NO: 2464163 - RNA, 13 nt, Human
agcucccucugcc

SEQ ID NO: 2464164 - RNA, 14 nt, Human
agcucccucugccu

SEQ ID NO: 2464165 - RNA, 17 nt, Human
agcuccuagcagagaga

SEQ ID NO: 2464166 - RNA, 17 nt, Human
agcuccgccucccgggu

SEQ ID NO: 2464167 - RNA, 23 nt, Human
agcuccgcuuucuacccagcgag

SEQ ID NO: 2464168 - RNA, 21 nt, Human
agcuccgcuuucuacccagcg

SEQ ID NO: 2464169 - RNA, 20 nt, Human
agcuccgcuuucuacccagc

SEQ ID NO: 2464170 - RNA, 13 nt, Human
agcuccuuccugg

SEQ ID NO: 2464171 - RNA, 15 nt, Human
agcuccuuccuggag

SEQ ID NO: 2464172 - RNA, 19 nt, Human
agcuccuuccuggagacug

SEQ ID NO: 2464173 - RNA, 13 nt, Human
agcuccuucuguc

SEQ ID NO: 2464174 - RNA, 15 nt, Human
agcuccguggagcag

SEQ ID NO: 2464175 - RNA, 14 nt, Human
agcuccguggagca

SEQ ID NO: 2464176 - RNA, 15 nt, Human
agcuccuagcagaga

SEQ ID NO: 2464177 - RNA, 12 nt, Human
agcuccuucugu

SEQ ID NO: 2464178 - RNA, 15 nt, Human
agcugagagacuuuu

SEQ ID NO: 2464179 - RNA, 16 nt, Human
agcugagagaaaauaa

SEQ ID NO: 2464180 - RNA, 23 nt, Human
agcugagauuauaggcaccuacc

SEQ ID NO: 2464181 - RNA, 14 nt, Human
agcugagcaggugu

SEQ ID NO: 2464182 - RNA, 21 nt, Human
agcugcgguccacccaggagc

SEQ ID NO: 2464183 - RNA, 14 nt, Human
agcugagagacuuu

SEQ ID NO: 2464184 - RNA, 15 nt, Human
agcugagcaccaggg

SEQ ID NO: 2464185 - RNA, 13 nt, Human
agcugagcaggga

SEQ ID NO: 2464186 - RNA, 15 nt, Human
agcugagcagggaga

SEQ ID NO: 2464187 - RNA, 21 nt, Human
agcugaacaauaggcuguucc

SEQ ID NO: 2464188 - RNA, 22 nt, Human
agcugaacaauaggcuguuccc

SEQ ID NO: 2464189 - RNA, 18 nt, Human
agcugaaaugcugcauuu

SEQ ID NO: 2464190 - RNA, 16 nt, Human
agcugaaaugcugcau

SEQ ID NO: 2464191 - RNA, 20 nt, Human
agcugaaaugcugcauuuua

SEQ ID NO: 2464192 - RNA, 13 nt, Human
agcugaaaugcug

SEQ ID NO: 2464193 - RNA, 12 nt, Human
agcugaaauacu

SEQ ID NO: 2464194 - RNA, 20 nt, Human
agcugaaauaugcuggcugg

SEQ ID NO: 2464195 - RNA, 22 nt, Human
agcugaaaaaucacauccuggc

SEQ ID NO: 2464196 - RNA, 21 nt, Human
agcugaaaaaucacauccugg

SEQ ID NO: 2464197 - RNA, 19 nt, Human
agcugaaaaaucacauccu

SEQ ID NO: 2464198 - RNA, 22 nt, Human
agcugaaaaccuaaguccuuua

SEQ ID NO: 2464199 - RNA, 23 nt, Human
agcugaaaaaucacauccuggcc

SEQ ID NO: 2464200 - RNA, 12 nt, Human
agcugaaaauau

SEQ ID NO: 2464201 - RNA, 18 nt, Human
agcugaaauaugcuggcu

SEQ ID NO: 2464202 - RNA, 21 nt, Human
agcugcuauagccuggggugg

SEQ ID NO: 2464203 - RNA, 15 nt, Human
agcugcuauagccug

SEQ ID NO: 2464204 - RNA, 16 nt, Human
agcugcuauagccugg

SEQ ID NO: 2464205 - RNA, 19 nt, Human
agcugcuacaaagaagaca

SEQ ID NO: 2464206 - RNA, 18 nt, Human
agcugcuacaaagaagac

SEQ ID NO: 2464207 - RNA, 17 nt, Human
agcugcuacaaagaaga

SEQ ID NO: 2464208 - RNA, 16 nt, Human
agcugcuacaaagaag

SEQ ID NO: 2464209 - RNA, 21 nt, Human
agcugcuacaaagaagacaug

SEQ ID NO: 2464210 - RNA, 20 nt, Human
agcugcuacaaagaagacau

SEQ ID NO: 2464211 - RNA, 22 nt, Human
agcugcuacaaagaagacaugu

SEQ ID NO: 2464212 - RNA, 15 nt, Human
agcugcuacaaagaa

SEQ ID NO: 2464213 - RNA, 14 nt, Human
agcugcuacaaaga

SEQ ID NO: 2464214 - RNA, 13 nt, Human
agcugcuacaaag

SEQ ID NO: 2464215 - RNA, 11 nt, Human
agcugcuacaa

SEQ ID NO: 2464216 - RNA, 23 nt, Human
agcugcgguccacccaggagccc

SEQ ID NO: 2464217 - RNA, 16 nt, Human
agcugcucagggaaaa

SEQ ID NO: 2464218 - RNA, 23 nt, Human
agcugcucacuaccuccucaggg

SEQ ID NO: 2464219 - RNA, 21 nt, Human
agcugcucagggaaaagcagc

SEQ ID NO: 2464220 - RNA, 19 nt, Human
agcuucugguacucuccua

SEQ ID NO: 2464221 - RNA, 17 nt, Human
agcuucugguacucucc

SEQ ID NO: 2464222 - RNA, 16 nt, Human
agcuucugguacucuc

SEQ ID NO: 2464223 - RNA, 15 nt, Human
agcuucugguacucu

SEQ ID NO: 2464224 - RNA, 14 nt, Human
agcuucugguacuc

SEQ ID NO: 2464225 - RNA, 22 nt, Human
agcuucugcuuuucugcccugg

SEQ ID NO: 2464226 - RNA, 23 nt, Human
agcuucugcuuuucugcccuggc

SEQ ID NO: 2464227 - RNA, 21 nt, Human
agcuucugcuuuucugcccug

SEQ ID NO: 2464228 - RNA, 20 nt, Human
agcuucugcuuuucugcccu

SEQ ID NO: 2464229 - RNA, 21 nt, Human
agcuucuggugaccuuccaag

SEQ ID NO: 2464230 - RNA, 22 nt, Human
agcuucuggugaccuuccaaga

SEQ ID NO: 2464231 - RNA, 12 nt, Human
agcuucuguccu

SEQ ID NO: 2464232 - RNA, 23 nt, Human
agcuucugguacucuccuagaga

SEQ ID NO: 2464233 - RNA, 21 nt, Human
agcuucugguacucuccuaga

SEQ ID NO: 2464234 - RNA, 20 nt, Human
agcuucugguacucuccuag

SEQ ID NO: 2464235 - RNA, 19 nt, Human
agcuucuguugcugccuca

SEQ ID NO: 2464236 - RNA, 22 nt, Human
agcuuccaugauucuauuuaua

SEQ ID NO: 2464237 - RNA, 17 nt, Human
agcuuccaguccaaucu

SEQ ID NO: 2464238 - RNA, 23 nt, Human
agcuucccucccguguguucucc

SEQ ID NO: 2464239 - RNA, 22 nt, Human
agcuuccuacccacaccucugc

SEQ ID NO: 2464240 - RNA, 20 nt, Human
agcuucccccccaccacagg

SEQ ID NO: 2464241 - RNA, 22 nt, Human
agcuucccccccaccacaggcc

SEQ ID NO: 2464242 - RNA, 17 nt, Human
agcuuccccucucuccu

SEQ ID NO: 2464243 - RNA, 23 nt, Human
agcuuccauuccaagccugacca

SEQ ID NO: 2464244 - RNA, 20 nt, Human
agguaaaagcaucacaugaa

SEQ ID NO: 2464245 - RNA, 17 nt, Human
agguaaaagugugagca

SEQ ID NO: 2464246 - RNA, 18 nt, Human
agguaaaucagacuauga

SEQ ID NO: 2464247 - RNA, 13 nt, Human
agguaaacaguuc

SEQ ID NO: 2464248 - RNA, 19 nt, Human
agguaaaauugaaaggcau

SEQ ID NO: 2464249 - RNA, 23 nt, Human
agguaaaucagacuaugaaguuu

SEQ ID NO: 2464250 - RNA, 15 nt, Human
agguaaacuccuguc

SEQ ID NO: 2464251 - RNA, 14 nt, Human
agguaaacuccugu

SEQ ID NO: 2464252 - RNA, 14 nt, Human
agguaaacaguucu

SEQ ID NO: 2464253 - RNA, 17 nt, Human
agguaacagaacagcuu

SEQ ID NO: 2464254 - RNA, 15 nt, Human
agguaacagaacagc

SEQ ID NO: 2464255 - RNA, 14 nt, Human
agguaacagaacag

SEQ ID NO: 2464256 - RNA, 13 nt, Human
agguaacagaaca

SEQ ID NO: 2464257 - RNA, 19 nt, Human
agguaaucgaccugccucg

SEQ ID NO: 2464258 - RNA, 21 nt, Human
agguaacagaacagcuucagg

SEQ ID NO: 2464259 - RNA, 19 nt, Human
agguaacagaacagcuuca

SEQ ID NO: 2464260 - RNA, 18 nt, Human
agguaacagaacagcuuc

SEQ ID NO: 2464261 - RNA, 21 nt, Human
agguaaucgaccugccucggc

SEQ ID NO: 2464262 - RNA, 11 nt, Human
aggucccuaau

SEQ ID NO: 2464263 - RNA, 12 nt, Human
aggucccuaaua

SEQ ID NO: 2464264 - RNA, 19 nt, Human
agguaauuucuugugccuc

SEQ ID NO: 2464265 - RNA, 17 nt, Human
agguacaaccuguucug

SEQ ID NO: 2464266 - RNA, 14 nt, Human
agguaaugagggac

SEQ ID NO: 2464267 - RNA, 13 nt, Human
agguaaugaggga

SEQ ID NO: 2464268 - RNA, 17 nt, Human
agguaaugagggacugg

SEQ ID NO: 2464269 - RNA, 16 nt, Human
agguaauuucuugugc

SEQ ID NO: 2464270 - RNA, 16 nt, Human
agguaaugugaauaaa

SEQ ID NO: 2464271 - RNA, 15 nt, Human
aggucccuaauaaag

SEQ ID NO: 2464272 - RNA, 13 nt, Human
aggucccuaauaa

SEQ ID NO: 2464273 - RNA, 21 nt, Human
aggucucggacuaagccuacc

SEQ ID NO: 2464274 - RNA, 23 nt, Human
aggucucgcugaugcugggcugg

SEQ ID NO: 2464275 - RNA, 22 nt, Human
aggucucgcugaugcugggcug

SEQ ID NO: 2464276 - RNA, 21 nt, Human
aggucucgcugaugcugggcu

SEQ ID NO: 2464277 - RNA, 20 nt, Human
aggucucgcugaugcugggc

SEQ ID NO: 2464278 - RNA, 19 nt, Human
aggucucgcugaugcuggg

SEQ ID NO: 2464279 - RNA, 17 nt, Human
aggucucgcugaugcug

SEQ ID NO: 2464280 - RNA, 16 nt, Human
aggucccuaauaaagc

SEQ ID NO: 2464281 - RNA, 16 nt, Human
agguacacagcucuag

SEQ ID NO: 2464282 - RNA, 12 nt, Human
agguacacucuu

SEQ ID NO: 2464283 - RNA, 18 nt, Human
aggucuguucuuuccaaa

SEQ ID NO: 2464284 - RNA, 20 nt, Human
aggucugacacgucugccua

SEQ ID NO: 2464285 - RNA, 16 nt, Human
aggucucuuccccucu

SEQ ID NO: 2464286 - RNA, 19 nt, Human
aggucucugccggcucuuu

SEQ ID NO: 2464287 - RNA, 16 nt, Human
aggucucugccggcuc

SEQ ID NO: 2464288 - RNA, 15 nt, Human
aggucucugccggcu

SEQ ID NO: 2464289 - RNA, 13 nt, Human
aggucucuucccc

SEQ ID NO: 2464290 - RNA, 12 nt, Human
aggucucuuccc

SEQ ID NO: 2464291 - RNA, 15 nt, Human
aggucucuuccccuc

SEQ ID NO: 2464292 - RNA, 15 nt, Human
aggucucuugaggga

SEQ ID NO: 2464293 - RNA, 16 nt, Human
aggucucuugagggag

SEQ ID NO: 2464294 - RNA, 13 nt, Human
aggucugaaaugg

SEQ ID NO: 2464295 - RNA, 15 nt, Human
aggucugaaauggag

SEQ ID NO: 2464296 - RNA, 21 nt, Human
aggucugaaauggagguccuu

SEQ ID NO: 2464297 - RNA, 19 nt, Human
aggugcuacaaaaacacag

SEQ ID NO: 2464298 - RNA, 20 nt, Human
aggugcuacaaaaacacagc

SEQ ID NO: 2464299 - RNA, 21 nt, Human
aggugcuacaaaaacacagca

SEQ ID NO: 2464300 - RNA, 22 nt, Human
aggugcuacaaaaacacagcaa

SEQ ID NO: 2464301 - RNA, 22 nt, Human
aggucuguucuuuccaaaguac

SEQ ID NO: 2464302 - RNA, 23 nt, Human
aggucuguucuuuccaaaguaca

SEQ ID NO: 2464303 - RNA, 18 nt, Human
aggugcuacaaaaacaca

SEQ ID NO: 2464304 - RNA, 22 nt, Human
aggucuggagaagcucccagga

SEQ ID NO: 2464305 - RNA, 14 nt, Human
aggucugcucggcc

SEQ ID NO: 2464306 - RNA, 13 nt, Human
agguucccuuuga

SEQ ID NO: 2464307 - RNA, 22 nt, Human
agguucccuuugacgccauccc

SEQ ID NO: 2464308 - RNA, 14 nt, Human
agguucaaagauau

SEQ ID NO: 2464309 - RNA, 17 nt, Human
agguuauuuuaguuucu

SEQ ID NO: 2464310 - RNA, 16 nt, Human
agguuauuuauuuaaa

SEQ ID NO: 2464311 - RNA, 15 nt, Human
agguuauuuauuuaa

SEQ ID NO: 2464312 - RNA, 17 nt, Human
agguuaucugucccagg

SEQ ID NO: 2464313 - RNA, 15 nt, Human
agguucaaagauauu

SEQ ID NO: 2464314 - RNA, 18 nt, Human
agguuaggauuuaacagu

SEQ ID NO: 2464315 - RNA, 22 nt, Human
agguuagauuuuguauucaggg

SEQ ID NO: 2464316 - RNA, 20 nt, Human
agguuagaaccuagaagggc

SEQ ID NO: 2464317 - RNA, 18 nt, Human
agguuagaaccuagaagg

SEQ ID NO: 2464318 - RNA, 21 nt, Human
agguuaggaguucgagaccag

SEQ ID NO: 2464319 - RNA, 21 nt, Human
agguuacccuguaacaugcaa

SEQ ID NO: 2464320 - RNA, 16 nt, Human
agguuaccaagaagcc

SEQ ID NO: 2464321 - RNA, 15 nt, Human
agguuaccaagaagc

SEQ ID NO: 2464322 - RNA, 17 nt, Human
agguuacccuguaacau

SEQ ID NO: 2464323 - RNA, 20 nt, Human
agguuaucgaaauaacaaug

SEQ ID NO: 2464324 - RNA, 19 nt, Human
agguuaucgaaauaacaau

SEQ ID NO: 2464325 - RNA, 18 nt, Human
agguuaucgaaauaacaa

SEQ ID NO: 2464326 - RNA, 17 nt, Human
agguuaucgaaauaaca

SEQ ID NO: 2464327 - RNA, 16 nt, Human
agguuaucugucccag

SEQ ID NO: 2464328 - RNA, 14 nt, Human
agguuauaggucac

SEQ ID NO: 2464329 - RNA, 17 nt, Human
agguuauaggucacucc

SEQ ID NO: 2464330 - RNA, 14 nt, Human
agguuaucgaaaua

SEQ ID NO: 2464331 - RNA, 19 nt, Human
agguuauaggucacuccug

SEQ ID NO: 2464332 - RNA, 20 nt, Human
agguuauuuuaguuucuguu

SEQ ID NO: 2464333 - RNA, 19 nt, Human
agguuauuuuaguuucugu

SEQ ID NO: 2464334 - RNA, 18 nt, Human
agguuccgcuuggagcag

SEQ ID NO: 2464335 - RNA, 21 nt, Human
agguuccgcuuggagcagagg

SEQ ID NO: 2464336 - RNA, 23 nt, Human
agguuccgcuuggagcagagggg

SEQ ID NO: 2464337 - RNA, 23 nt, Human
agguucccuuugacgccauccca

SEQ ID NO: 2464338 - RNA, 12 nt, Human
agguuccucugc

SEQ ID NO: 2464339 - RNA, 23 nt, Human
aggugcuacaaaaacacagcaag

SEQ ID NO: 2464340 - RNA, 24 nt, Human
aggugcuacaaaaacacagcaagg

SEQ ID NO: 2464341 - RNA, 22 nt, Human
aggugcuaggaacacuccuuca

SEQ ID NO: 2464342 - RNA, 19 nt, Human
aggugcuaggaacacuccu

SEQ ID NO: 2464343 - RNA, 23 nt, Human
aggugcuaggaacacuccuucac

SEQ ID NO: 2464344 - RNA, 21 nt, Human
aggugcuacacccuuuuccag

SEQ ID NO: 2464345 - RNA, 20 nt, Human
aggugcuacacccuuuucca

SEQ ID NO: 2464346 - RNA, 17 nt, Human
agguggaauuauuuuaa

SEQ ID NO: 2464347 - RNA, 21 nt, Human
agguggaauuauuuuaaaaga

SEQ ID NO: 2464348 - RNA, 18 nt, Human
aggugcucacaccccauu

SEQ ID NO: 2464349 - RNA, 15 nt, Human
aggugcucauuggcu

SEQ ID NO: 2464350 - RNA, 17 nt, Human
agguggaagcccuccuu

SEQ ID NO: 2464351 - RNA, 19 nt, Human
agguggaagcccuccuucc

SEQ ID NO: 2464352 - RNA, 20 nt, Human
agguggaagcccuccuucca

SEQ ID NO: 2464353 - RNA, 21 nt, Human
agguggaagcccuccuuccac

SEQ ID NO: 2464354 - RNA, 22 nt, Human
agguuaaaaaaaggcauuguuu

SEQ ID NO: 2464355 - RNA, 24 nt, Human
agguuacaacagauuugugaacuc

SEQ ID NO: 2464356 - RNA, 23 nt, Human
agguuacaacagauuugugaacu

SEQ ID NO: 2464357 - RNA, 22 nt, Human
agguuacaacagauuugugaac

SEQ ID NO: 2464358 - RNA, 21 nt, Human
agguuacaacagauuugugaa

SEQ ID NO: 2464359 - RNA, 15 nt, Human
agguuacaagccugc

SEQ ID NO: 2464360 - RNA, 21 nt, Human
agguuacaagccugcacaaua

SEQ ID NO: 2464361 - RNA, 19 nt, Human
agguuacaacagauuugug

SEQ ID NO: 2464362 - RNA, 16 nt, Human
agguuacaacagauuu

SEQ ID NO: 2464363 - RNA, 16 nt, Human
agguuaaggcugagga

SEQ ID NO: 2464364 - RNA, 17 nt, Human
agguuaaggcugaggaa

SEQ ID NO: 2464365 - RNA, 24 nt, Human
agguuaaggcugaggaaaggccag

SEQ ID NO: 2464366 - RNA, 14 nt, Human
agguguuuauacag

SEQ ID NO: 2464367 - RNA, 12 nt, Human
agguguuuauac

SEQ ID NO: 2464368 - RNA, 18 nt, Human
agguggagcaaagugagg

SEQ ID NO: 2464369 - RNA, 11 nt, Human
agguggagcaa

SEQ ID NO: 2464370 - RNA, 16 nt, Human
agguggacuggaaggg

SEQ ID NO: 2464371 - RNA, 14 nt, Human
agguggacacacaa

SEQ ID NO: 2464372 - RNA, 16 nt, Human
agguggaucacagagg

SEQ ID NO: 2464373 - RNA, 17 nt, Human
agguggaucaccugagg

SEQ ID NO: 2464374 - RNA, 20 nt, Human
agguggaggcugcagugagc

SEQ ID NO: 2464375 - RNA, 20 nt, Human
agguggagguugcagugagc

SEQ ID NO: 2464376 - RNA, 21 nt, Human
aggguccuggggaaccugacc

SEQ ID NO: 2464377 - RNA, 23 nt, Human
aggguccuggggaaccugacccc

SEQ ID NO: 2464378 - RNA, 14 nt, Human
aggguccuucccuc

SEQ ID NO: 2464379 - RNA, 21 nt, Human
aggguccuggcuccugagggg

SEQ ID NO: 2464380 - RNA, 16 nt, Human
aggguccuucccucuc

SEQ ID NO: 2464381 - RNA, 17 nt, Human
aggguccuucccucucc

SEQ ID NO: 2464382 - RNA, 12 nt, Human
aggguccugggg

SEQ ID NO: 2464383 - RNA, 15 nt, Human
aggguccuggggaac

SEQ ID NO: 2464384 - RNA, 19 nt, Human
aggguccuggcuccugagg

SEQ ID NO: 2464385 - RNA, 20 nt, Human
aggguccuggcuccugaggg

SEQ ID NO: 2464386 - RNA, 17 nt, Human
aggguccuggcuccuga

SEQ ID NO: 2464387 - RNA, 12 nt, Human
agggucccuggg

SEQ ID NO: 2464388 - RNA, 20 nt, Human
agggucccucuguguauuug

SEQ ID NO: 2464389 - RNA, 18 nt, Human
agggucccucuguguauu

SEQ ID NO: 2464390 - RNA, 15 nt, Human
agggucccucugugu

SEQ ID NO: 2464391 - RNA, 14 nt, Human
agggucccucugug

SEQ ID NO: 2464392 - RNA, 11 nt, Human
agggucccugg

SEQ ID NO: 2464393 - RNA, 15 nt, Human
aggguccccaccugg

SEQ ID NO: 2464394 - RNA, 20 nt, Human
agggucccauuucucacuga

SEQ ID NO: 2464395 - RNA, 19 nt, Human
agggucccaagcugggccc

SEQ ID NO: 2464396 - RNA, 18 nt, Human
agggucccaagcugggcc

SEQ ID NO: 2464397 - RNA, 12 nt, Human
agggucccucug

SEQ ID NO: 2464398 - RNA, 18 nt, Human
aggguccccaccugggac

SEQ ID NO: 2464399 - RNA, 17 nt, Human
agggucccaagcugggc

SEQ ID NO: 2464400 - RNA, 13 nt, Human
agggucccaagcu

SEQ ID NO: 2464401 - RNA, 12 nt, Human
agggucccaagc

SEQ ID NO: 2464402 - RNA, 23 nt, Human
aggguccacaggaagugaagaau

SEQ ID NO: 2464403 - RNA, 21 nt, Human
aggggccucuuaugggcuggg

SEQ ID NO: 2464404 - RNA, 20 nt, Human
aggggccucuuaugggcugg

SEQ ID NO: 2464405 - RNA, 19 nt, Human
aggggccucuuaugggcug

SEQ ID NO: 2464406 - RNA, 15 nt, Human
aggguaucuggugac

SEQ ID NO: 2464407 - RNA, 21 nt, Human
aggguaucaggugcugccauc

SEQ ID NO: 2464408 - RNA, 18 nt, Human
aggguaucaggugcugcc

SEQ ID NO: 2464409 - RNA, 16 nt, Human
aggggccuaggccuca

SEQ ID NO: 2464410 - RNA, 19 nt, Human
aggggccuaggccucagcc

SEQ ID NO: 2464411 - RNA, 23 nt, Human
aggggccuaggccucagccagag

SEQ ID NO: 2464412 - RNA, 19 nt, Human
aggguaucaggugcugcca

SEQ ID NO: 2464413 - RNA, 18 nt, Human
agggucaggagaggggca

SEQ ID NO: 2464414 - RNA, 14 nt, Human
agggucaggagagg

SEQ ID NO: 2464415 - RNA, 15 nt, Human
agggucaggagaggg

SEQ ID NO: 2464416 - RNA, 22 nt, Human
agggucauaucacucaggcccu

SEQ ID NO: 2464417 - RNA, 21 nt, Human
agggucagacgccugaggaac

SEQ ID NO: 2464418 - RNA, 13 nt, Human
agggucagagagg

SEQ ID NO: 2464419 - RNA, 21 nt, Human
agggucagagaggagucagag

SEQ ID NO: 2464420 - RNA, 21 nt, Human
agggucaggaaggaugagcau

SEQ ID NO: 2464421 - RNA, 22 nt, Human
agggucaggaaggaugagcauu

SEQ ID NO: 2464422 - RNA, 13 nt, Human
agggucaggaagg

SEQ ID NO: 2464423 - RNA, 19 nt, Human
aggcuagaaccuggcaagc

SEQ ID NO: 2464424 - RNA, 13 nt, Human
aggcuaaacaucc

SEQ ID NO: 2464425 - RNA, 21 nt, Human
aggcuaaacauccaauauuuu

SEQ ID NO: 2464426 - RNA, 21 nt, Human
aggcuagaaccaccugccuau

SEQ ID NO: 2464427 - RNA, 17 nt, Human
aggcuacugucagcucc

SEQ ID NO: 2464428 - RNA, 23 nt, Human
aggcuacuguaaggcaaucaugg

SEQ ID NO: 2464429 - RNA, 18 nt, Human
aggcguucuucgaggugg

SEQ ID NO: 2464430 - RNA, 18 nt, Human
aggcguggagcugccuga

SEQ ID NO: 2464431 - RNA, 17 nt, Human
aggcguggagcugccug

SEQ ID NO: 2464432 - RNA, 16 nt, Human
aggcguggagcugccu

SEQ ID NO: 2464433 - RNA, 15 nt, Human
aggcguggagcugcc

SEQ ID NO: 2464434 - RNA, 19 nt, Human
aggcguucuucgaggugga

SEQ ID NO: 2464435 - RNA, 18 nt, Human
aggcgucuguauauuuug

SEQ ID NO: 2464436 - RNA, 21 nt, Human
aggcgucuguauauuuuggga

SEQ ID NO: 2464437 - RNA, 21 nt, Human
aggcguccgcgcgccagcaca

SEQ ID NO: 2464438 - RNA, 21 nt, Human
aggcgugagccaccgugccug

SEQ ID NO: 2464439 - RNA, 14 nt, Human
aggcgugaggaugg

SEQ ID NO: 2464440 - RNA, 13 nt, Human
aggcgugaggaug

SEQ ID NO: 2464441 - RNA, 23 nt, Human
aggcccuucucuccagccccugg

SEQ ID NO: 2464442 - RNA, 22 nt, Human
aggcccuucucuccagccccug

SEQ ID NO: 2464443 - RNA, 17 nt, Human
aggcccuuuccucaggc

SEQ ID NO: 2464444 - RNA, 16 nt, Human
aggcccuuuccucagg

SEQ ID NO: 2464445 - RNA, 17 nt, Human
aggccgaagaagggucc

SEQ ID NO: 2464446 - RNA, 18 nt, Human
aggccgaagaaggguccu

SEQ ID NO: 2464447 - RNA, 22 nt, Human
aggccgaagaaggguccuuccc

SEQ ID NO: 2464448 - RNA, 18 nt, Human
aggccgcagcucuugccc

SEQ ID NO: 2464449 - RNA, 17 nt, Human
aggccgcagcucuugcc

SEQ ID NO: 2464450 - RNA, 24 nt, Human
aggccgaagcucuggcugaacccu

SEQ ID NO: 2464451 - RNA, 23 nt, Human
aggccgaagcucuggcugaaccc

SEQ ID NO: 2464452 - RNA, 19 nt, Human
aggccgaagcucuggcuga

SEQ ID NO: 2464453 - RNA, 17 nt, Human
aggccgaagcucuggcu

SEQ ID NO: 2464454 - RNA, 16 nt, Human
aggccgaagcucuggc

SEQ ID NO: 2464455 - RNA, 15 nt, Human
aggccgaagcucugg

SEQ ID NO: 2464456 - RNA, 14 nt, Human
aggccgaagcucug

SEQ ID NO: 2464457 - RNA, 16 nt, Human
aggccgcagcucuugc

SEQ ID NO: 2464458 - RNA, 13 nt, Human
aggccgcagcucu

SEQ ID NO: 2464459 - RNA, 12 nt, Human
aggccgcagcuc

SEQ ID NO: 2464460 - RNA, 16 nt, Human
aggccgagaagccagu

SEQ ID NO: 2464461 - RNA, 17 nt, Human
aggccgagaagccagug

SEQ ID NO: 2464462 - RNA, 15 nt, Human
aggccgagaagcaag

SEQ ID NO: 2464463 - RNA, 19 nt, Human
aggccgagaagcaagaaag

SEQ ID NO: 2464464 - RNA, 16 nt, Human
aggcccuuauuuucaa

SEQ ID NO: 2464465 - RNA, 20 nt, Human
aggcccuuauuuucaagaaa

SEQ ID NO: 2464466 - RNA, 22 nt, Human
aggcccuuauuuucaagaaacu

SEQ ID NO: 2464467 - RNA, 21 nt, Human
aggcccuucucuccagccccu

SEQ ID NO: 2464468 - RNA, 20 nt, Human
aggcccuucucuccagcccc

SEQ ID NO: 2464469 - RNA, 18 nt, Human
aggcccuuccucuccacu

SEQ ID NO: 2464470 - RNA, 17 nt, Human
aggcccuuccucuccac

SEQ ID NO: 2464471 - RNA, 15 nt, Human
aggcccuuccucucc

SEQ ID NO: 2464472 - RNA, 13 nt, Human
aggcccuuccucu

SEQ ID NO: 2464473 - RNA, 22 nt, Human
aggcugguucggauuuggggug

SEQ ID NO: 2464474 - RNA, 20 nt, Human
aggcugucaauuacaggaag

SEQ ID NO: 2464475 - RNA, 18 nt, Human
aggcuguaucccaugagc

SEQ ID NO: 2464476 - RNA, 13 nt, Human
aggcuguauccca

SEQ ID NO: 2464477 - RNA, 16 nt, Human
aggcuagauguaugua

SEQ ID NO: 2464478 - RNA, 15 nt, Human
aggcuagauguaugu

SEQ ID NO: 2464479 - RNA, 17 nt, Human
aggcuagauguauguac

SEQ ID NO: 2464480 - RNA, 17 nt, Human
aggcuggugggaggggc

SEQ ID NO: 2464481 - RNA, 14 nt, Human
aggcuggugggagg

SEQ ID NO: 2464482 - RNA, 12 nt, Human
aggcugguggga

SEQ ID NO: 2464483 - RNA, 17 nt, Human
aggcugguggcccagga

SEQ ID NO: 2464484 - RNA, 16 nt, Human
aggcugguggcccagg

SEQ ID NO: 2464485 - RNA, 15 nt, Human
aggcugguggcccag

SEQ ID NO: 2464486 - RNA, 20 nt, Human
aggcuagagugcaguggcau

SEQ ID NO: 2464487 - RNA, 15 nt, Human
aggcuagaucaugaa

SEQ ID NO: 2464488 - RNA, 21 nt, Human
aggcugucaauuacaggaagu

SEQ ID NO: 2464489 - RNA, 16 nt, Human
aggcuguccuguacau

SEQ ID NO: 2464490 - RNA, 15 nt, Human
aggcuguccuguaca

SEQ ID NO: 2464491 - RNA, 18 nt, Human
aggcuggugggaggggcg

SEQ ID NO: 2464492 - RNA, 22 nt, Human
agggacagaggggguggccucc

SEQ ID NO: 2464493 - RNA, 15 nt, Human
aggcugucuggccag

SEQ ID NO: 2464494 - RNA, 21 nt, Human
aggcuguccuguacauugugg

SEQ ID NO: 2464495 - RNA, 19 nt, Human
aggcuguccuuacccaucu

SEQ ID NO: 2464496 - RNA, 21 nt, Human
aggcuguccuuacccaucugc

SEQ ID NO: 2464497 - RNA, 23 nt, Human
agggacagaggggguggccuccc

SEQ ID NO: 2464498 - RNA, 22 nt, Human
agggacagaugaaugccgugga

SEQ ID NO: 2464499 - RNA, 17 nt, Human
aggcugucuggccaggc

SEQ ID NO: 2464500 - RNA, 14 nt, Human
agggaccuugaagg

SEQ ID NO: 2464501 - RNA, 16 nt, Human
agggaccucucccagg

SEQ ID NO: 2464502 - RNA, 13 nt, Human
agggaccucuccc

SEQ ID NO: 2464503 - RNA, 15 nt, Human
agggaccucucccag

SEQ ID NO: 2464504 - RNA, 23 nt, Human
agggacgccugggggugccagga

SEQ ID NO: 2464505 - RNA, 18 nt, Human
agggacgccugggggugc

SEQ ID NO: 2464506 - RNA, 22 nt, Human
agggacgccugggggugccagg

SEQ ID NO: 2464507 - RNA, 13 nt, Human
agggacgccuggg

SEQ ID NO: 2464508 - RNA, 15 nt, Human
agggacgccuggggg

SEQ ID NO: 2464509 - RNA, 15 nt, Human
agggaccuugaaggg

SEQ ID NO: 2464510 - RNA, 16 nt, Human
auaccugugccucggc

SEQ ID NO: 2464511 - RNA, 14 nt, Human
auaccucugugugc

SEQ ID NO: 2464512 - RNA, 20 nt, Human
auaccuuccuucccugggcu

SEQ ID NO: 2464513 - RNA, 17 nt, Human
auaccuacauguauuug

SEQ ID NO: 2464514 - RNA, 21 nt, Human
auaccuacauguauuuguuug

SEQ ID NO: 2464515 - RNA, 12 nt, Human
auacccaccccc

SEQ ID NO: 2464516 - RNA, 14 nt, Human
auacccaaauccuc

SEQ ID NO: 2464517 - RNA, 22 nt, Human
auaccauuuuuuaaggaaacaa

SEQ ID NO: 2464518 - RNA, 20 nt, Human
auaccauuuuuuaaggaaac

SEQ ID NO: 2464519 - RNA, 23 nt, Human
auacccaaauccucuccagcuau

SEQ ID NO: 2464520 - RNA, 18 nt, Human
auacccaaauccucucca

SEQ ID NO: 2464521 - RNA, 11 nt, Human
auacccacccc

SEQ ID NO: 2464522 - RNA, 18 nt, Human
auaccugucccccugaca

SEQ ID NO: 2464523 - RNA, 13 nt, Human
auaccucugugug

SEQ ID NO: 2464524 - RNA, 12 nt, Human
auaccucugugu

SEQ ID NO: 2464525 - RNA, 17 nt, Human
auaccugucccccugac

SEQ ID NO: 2464526 - RNA, 15 nt, Human
auaccucacccugcu

SEQ ID NO: 2464527 - RNA, 15 nt, Human
auaccucaaccuaug

SEQ ID NO: 2464528 - RNA, 18 nt, Human
auaccucaaccuauggua

SEQ ID NO: 2464529 - RNA, 17 nt, Human
auacacacucaaaucaa

SEQ ID NO: 2464530 - RNA, 18 nt, Human
auacacacucaaaucaag

SEQ ID NO: 2464531 - RNA, 18 nt, Human
auacaccacuacauucug

SEQ ID NO: 2464532 - RNA, 20 nt, Human
auacacacucaaaucaagaa

SEQ ID NO: 2464533 - RNA, 19 nt, Human
auacacacauaugucauau

SEQ ID NO: 2464534 - RNA, 21 nt, Human
auacaccacuacauucuguua

SEQ ID NO: 2464535 - RNA, 19 nt, Human
auacaccacuacauucugu

SEQ ID NO: 2464536 - RNA, 20 nt, Human
auacaccacuacauucuguu

SEQ ID NO: 2464537 - RNA, 18 nt, Human
auaaugggcuuagagcag

SEQ ID NO: 2464538 - RNA, 22 nt, Human
auaauguauaaagaacaaggua

SEQ ID NO: 2464539 - RNA, 15 nt, Human
auaauguaagcucua

SEQ ID NO: 2464540 - RNA, 23 nt, Human
auaauguuucaaacauauauaac

SEQ ID NO: 2464541 - RNA, 11 nt, Human
auaaugucucu

SEQ ID NO: 2464542 - RNA, 14 nt, Human
auaauguauuguug

SEQ ID NO: 2464543 - RNA, 22 nt, Human
auacacacacacacacagccac

SEQ ID NO: 2464544 - RNA, 23 nt, Human
auacacacacacacacagccaca

SEQ ID NO: 2464545 - RNA, 13 nt, Human
auacacacaguua

SEQ ID NO: 2464546 - RNA, 14 nt, Human
auacacacauaugu

SEQ ID NO: 2464547 - RNA, 21 nt, Human
auacacacacacacacagcca

SEQ ID NO: 2464548 - RNA, 20 nt, Human
auaauuaaauuuugaguucu

SEQ ID NO: 2464549 - RNA, 20 nt, Human
auaauuaaaguguccauuga

SEQ ID NO: 2464550 - RNA, 16 nt, Human
auaauuaaagugucca

SEQ ID NO: 2464551 - RNA, 15 nt, Human
auaaugucucuguga

SEQ ID NO: 2464552 - RNA, 13 nt, Human
auaauguuugcua

SEQ ID NO: 2464553 - RNA, 15 nt, Human
auaauuaaagugucc

SEQ ID NO: 2464554 - RNA, 13 nt, Human
auaauuaaagugu

SEQ ID NO: 2464555 - RNA, 12 nt, Human
auaauuaaagug

SEQ ID NO: 2464556 - RNA, 14 nt, Human
auaauguuugcuau

SEQ ID NO: 2464557 - RNA, 21 nt, Human
auaaugcgugcauaccacuuu

SEQ ID NO: 2464558 - RNA, 20 nt, Human
auaaugcgugcauaccacuu

SEQ ID NO: 2464559 - RNA, 16 nt, Human
auaaggccuuaauaug

SEQ ID NO: 2464560 - RNA, 21 nt, Human
auaaugggauuuucuuuucuu

SEQ ID NO: 2464561 - RNA, 14 nt, Human
auaauguaagcucu

SEQ ID NO: 2464562 - RNA, 15 nt, Human
auaaugcuacugucu

SEQ ID NO: 2464563 - RNA, 18 nt, Human
auaaugcuguugccucau

SEQ ID NO: 2464564 - RNA, 19 nt, Human
auaaggccauaaaacaggu

SEQ ID NO: 2464565 - RNA, 14 nt, Human
auaaggaucagaac

SEQ ID NO: 2464566 - RNA, 20 nt, Human
auaaggaucagaacagcaga

SEQ ID NO: 2464567 - RNA, 22 nt, Human
auaaggaucagaacagcagagg

SEQ ID NO: 2464568 - RNA, 18 nt, Human
auaaggaaagcaauaaau

SEQ ID NO: 2464569 - RNA, 14 nt, Human
auaacaacuucaua

SEQ ID NO: 2464570 - RNA, 15 nt, Human
auaacaaccuggaga

SEQ ID NO: 2464571 - RNA, 14 nt, Human
auaacaagaucuuu

SEQ ID NO: 2464572 - RNA, 20 nt, Human
auaacagugcauauuccuuu

SEQ ID NO: 2464573 - RNA, 18 nt, Human
auaaaggauuaaugucaa

SEQ ID NO: 2464574 - RNA, 22 nt, Human
auaaauuuuuuuuguuucauau

SEQ ID NO: 2464575 - RNA, 19 nt, Human
auaaauuuuuuuuguuuca

SEQ ID NO: 2464576 - RNA, 15 nt, Human
auaaaagaaaaaaua

SEQ ID NO: 2464577 - RNA, 16 nt, Human
auaaaaauauguacaa

SEQ ID NO: 2464578 - RNA, 22 nt, Human
auaaaaauauuguguugugaau

SEQ ID NO: 2464579 - RNA, 17 nt, Human
auaaaacuuuuuaaaau

SEQ ID NO: 2464580 - RNA, 21 nt, Human
auaaacuuuaccuuuuuuaua

SEQ ID NO: 2464581 - RNA, 16 nt, Human
auaaacuuuaccuuuu

SEQ ID NO: 2464582 - RNA, 24 nt, Human
auaaacuuuaccuuuuuuauacau

SEQ ID NO: 2464583 - RNA, 20 nt, Human
auaaacuuuuuucuuacugu

SEQ ID NO: 2464584 - RNA, 23 nt, Human
auaaacuuuuuuuugagaauggu

SEQ ID NO: 2464585 - RNA, 15 nt, Human
auaaaacuuuuuaaa

SEQ ID NO: 2464586 - RNA, 11 nt, Human
auaaaacuuuu

SEQ ID NO: 2464587 - RNA, 13 nt, Human
auaaaaaguuaaa

SEQ ID NO: 2464588 - RNA, 18 nt, Human
auaaaaaguuaaaaaguu

SEQ ID NO: 2464589 - RNA, 13 nt, Human
auaaaaauaaauu

SEQ ID NO: 2464590 - RNA, 14 nt, Human
auaaaaauauugug

SEQ ID NO: 2464591 - RNA, 22 nt, Human
auaaaaauaaauuugguucuaa

SEQ ID NO: 2464592 - RNA, 11 nt, Human
auaaaaaguua

SEQ ID NO: 2464593 - RNA, 12 nt, Human
auaaaaaguuaa

SEQ ID NO: 2464594 - RNA, 10 nt, Human
auaaaaaguu

SEQ ID NO: 2464595 - RNA, 20 nt, Human
auaaaaagugacacagcagc

SEQ ID NO: 2464596 - RNA, 19 nt, Human
auaaaaagugacacagcag

SEQ ID NO: 2464597 - RNA, 21 nt, Human
auaaaaaggcaccuauaaaac

SEQ ID NO: 2464598 - RNA, 17 nt, Human
auaaaaagugacacagc

SEQ ID NO: 2464599 - RNA, 14 nt, Human
auaaagcagcguuu

SEQ ID NO: 2464600 - RNA, 18 nt, Human
auaaagcagcguuucuau

SEQ ID NO: 2464601 - RNA, 19 nt, Human
auaaagcagcguuucuaug

SEQ ID NO: 2464602 - RNA, 20 nt, Human
auaaagcagcguuucuauga

SEQ ID NO: 2464603 - RNA, 13 nt, Human
auaaagcagcguu

SEQ ID NO: 2464604 - RNA, 21 nt, Human
auaaagcaauuuuccuugaag

SEQ ID NO: 2464605 - RNA, 20 nt, Human
auaaagcaauuuuccuugaa

SEQ ID NO: 2464606 - RNA, 19 nt, Human
auaaagcaauuuuccuuga

SEQ ID NO: 2464607 - RNA, 14 nt, Human
auaaagaagauguu

SEQ ID NO: 2464608 - RNA, 21 nt, Human
auaaagaacaagguaguuuuu

SEQ ID NO: 2464609 - RNA, 17 nt, Human
auaaagaaauugcaaua

SEQ ID NO: 2464610 - RNA, 15 nt, Human
auaaagaacaaggua

SEQ ID NO: 2464611 - RNA, 23 nt, Human
auaaagaagcaauaaagaagagu

SEQ ID NO: 2464612 - RNA, 12 nt, Human
auaaagacaccu

SEQ ID NO: 2464613 - RNA, 14 nt, Human
auaaaggaugugau

SEQ ID NO: 2464614 - RNA, 17 nt, Human
auaaaggaugugauugu

SEQ ID NO: 2464615 - RNA, 21 nt, Human
auaaaggaugugauuguggaa

SEQ ID NO: 2464616 - RNA, 22 nt, Human
auaaaggaugugauuguggaau

SEQ ID NO: 2464617 - RNA, 13 nt, Human
auaaaggauguga

SEQ ID NO: 2464618 - RNA, 18 nt, Human
auaaagcuguguggcagu

SEQ ID NO: 2464619 - RNA, 20 nt, Human
auaaaggaaaaaagagaagu

SEQ ID NO: 2464620 - RNA, 18 nt, Human
auaaagccuguauucuca

SEQ ID NO: 2464621 - RNA, 20 nt, Human
auaaagccuuggauguauau

SEQ ID NO: 2464622 - RNA, 15 nt, Human
auaaagcaggcagaa

SEQ ID NO: 2464623 - RNA, 23 nt, Human
auaaagcaauuuuccuugaagcc

SEQ ID NO: 2464624 - RNA, 16 nt, Human
auaaagccacugaaaa

SEQ ID NO: 2464625 - RNA, 20 nt, Human
auaaagccuguuuugucuuu

SEQ ID NO: 2464626 - RNA, 14 nt, Human
auaaagccugcuuu

SEQ ID NO: 2464627 - RNA, 14 nt, Human
auaaagcauuuaua

SEQ ID NO: 2464628 - RNA, 12 nt, Human
auaaagccacug

SEQ ID NO: 2464629 - RNA, 18 nt, Human
auaaagcauuuauaaauu

SEQ ID NO: 2464630 - RNA, 20 nt, Human
auaaagcccugggaucacug

SEQ ID NO: 2464631 - RNA, 14 nt, Human
auaaagcccuggga

SEQ ID NO: 2464632 - RNA, 14 nt, Human
auauacuguaaaga

SEQ ID NO: 2464633 - RNA, 15 nt, Human
auauacuguaaagaa

SEQ ID NO: 2464634 - RNA, 18 nt, Human
auauacuguaaagaaaga

SEQ ID NO: 2464635 - RNA, 19 nt, Human
auauacuguaaagaaagag

SEQ ID NO: 2464636 - RNA, 20 nt, Human
auauacuguaaagaaagaga

SEQ ID NO: 2464637 - RNA, 21 nt, Human
auauacuguaaagaaagagag

SEQ ID NO: 2464638 - RNA, 22 nt, Human
auauacuguaaagaaagagaga

SEQ ID NO: 2464639 - RNA, 23 nt, Human
auauacuguaaagaaagagagaa

SEQ ID NO: 2464640 - RNA, 15 nt, Human
auauacuuaaaugga

SEQ ID NO: 2464641 - RNA, 24 nt, Human
auauacuguaaagaaagagagaaa

SEQ ID NO: 2464642 - RNA, 15 nt, Human
auauacuuguggacu

SEQ ID NO: 2464643 - RNA, 14 nt, Human
auauacuuguggac

SEQ ID NO: 2464644 - RNA, 21 nt, Human
auauacuuguggacuaaaaga

SEQ ID NO: 2464645 - RNA, 10 nt, Human
auauacugua

SEQ ID NO: 2464646 - RNA, 11 nt, Human
auauacuguaa

SEQ ID NO: 2464647 - RNA, 12 nt, Human
auauacuguaaa

SEQ ID NO: 2464648 - RNA, 13 nt, Human
auauacuguaaag

SEQ ID NO: 2464649 - RNA, 22 nt, Human
auagucaaaccauaaacuucau

SEQ ID NO: 2464650 - RNA, 20 nt, Human
auagucaaaccauaaacuuc

SEQ ID NO: 2464651 - RNA, 19 nt, Human
auagucaaaccauaaacuu

SEQ ID NO: 2464652 - RNA, 22 nt, Human
auauacucuagaugaaguuuua

SEQ ID NO: 2464653 - RNA, 14 nt, Human
auagucaaauugug

SEQ ID NO: 2464654 - RNA, 23 nt, Human
auaguauuugagaguucuaaauu

SEQ ID NO: 2464655 - RNA, 23 nt, Human
auauagaucaguuauaaguagca

SEQ ID NO: 2464656 - RNA, 16 nt, Human
auauagagauguuuuu

SEQ ID NO: 2464657 - RNA, 15 nt, Human
auauagagauguuuu

SEQ ID NO: 2464658 - RNA, 22 nt, Human
auauagagauguuuuuaaaagu

SEQ ID NO: 2464659 - RNA, 20 nt, Human
auauacuuuuuuuucuuuaa

SEQ ID NO: 2464660 - RNA, 11 nt, Human
auauacuuuuu

SEQ ID NO: 2464661 - RNA, 15 nt, Human
auauagaacagugcu

SEQ ID NO: 2464662 - RNA, 22 nt, Human
auauacuuuuuucuuauuuaac

SEQ ID NO: 2464663 - RNA, 14 nt, Human
auauagagauguuu

SEQ ID NO: 2464664 - RNA, 13 nt, Human
auauagagauguu

SEQ ID NO: 2464665 - RNA, 15 nt, Human
auaggugcuacaaaa

SEQ ID NO: 2464666 - RNA, 21 nt, Human
auaggugcuacaaaaacacag

SEQ ID NO: 2464667 - RNA, 23 nt, Human
auaggugcuacaaaaacacagca

SEQ ID NO: 2464668 - RNA, 13 nt, Human
auagguggccucu

SEQ ID NO: 2464669 - RNA, 14 nt, Human
auaggugcuacaaa

SEQ ID NO: 2464670 - RNA, 22 nt, Human
auaggucacuggcucuccaagu

SEQ ID NO: 2464671 - RNA, 23 nt, Human
auaggucagugaggcccagggag

SEQ ID NO: 2464672 - RNA, 21 nt, Human
auagguauaaguggugugugu

SEQ ID NO: 2464673 - RNA, 18 nt, Human
auagcccaucccugccug

SEQ ID NO: 2464674 - RNA, 17 nt, Human
auagcccaucccugccu

SEQ ID NO: 2464675 - RNA, 21 nt, Human
auaggucacuggcucuccaag

SEQ ID NO: 2464676 - RNA, 20 nt, Human
auaggucacuggcucuccaa

SEQ ID NO: 2464677 - RNA, 19 nt, Human
auaggucacuggcucucca

SEQ ID NO: 2464678 - RNA, 17 nt, Human
auaggucacuggcucuc

SEQ ID NO: 2464679 - RNA, 16 nt, Human
auaggucacuggcucu

SEQ ID NO: 2464680 - RNA, 15 nt, Human
auaggucacuggcuc

SEQ ID NO: 2464681 - RNA, 15 nt, Human
auaggucacuccugg

SEQ ID NO: 2464682 - RNA, 16 nt, Human
auaggucacuccuggg

SEQ ID NO: 2464683 - RNA, 15 nt, Human
auagguuuaauaauu

SEQ ID NO: 2464684 - RNA, 20 nt, Human
auagguugccaauaauacac

SEQ ID NO: 2464685 - RNA, 18 nt, Human
auagguuguaaauguguu

SEQ ID NO: 2464686 - RNA, 21 nt, Human
auaguauuugagaguucuaaa

SEQ ID NO: 2464687 - RNA, 20 nt, Human
auaguauuugagaguucuaa

SEQ ID NO: 2464688 - RNA, 21 nt, Human
auaguauuccauugugugagu

SEQ ID NO: 2464689 - RNA, 22 nt, Human
auaguauuccauugugugagug

SEQ ID NO: 2464690 - RNA, 18 nt, Human
auaguaugguggcugggu

SEQ ID NO: 2464691 - RNA, 17 nt, Human
auaguaugguggcuggg

SEQ ID NO: 2464692 - RNA, 18 nt, Human
auagcagcuuauucacaa

SEQ ID NO: 2464693 - RNA, 12 nt, Human
auagcccagaca

SEQ ID NO: 2464694 - RNA, 17 nt, Human
auagcccagacacagaa

SEQ ID NO: 2464695 - RNA, 13 nt, Human
auagcccagacac

SEQ ID NO: 2464696 - RNA, 14 nt, Human
auagcccagaucag

SEQ ID NO: 2464697 - RNA, 16 nt, Human
auagcccaucccugcc

SEQ ID NO: 2464698 - RNA, 14 nt, Human
auagcccagguccu

SEQ ID NO: 2464699 - RNA, 22 nt, Human
auagccacaucccuuugaaaca

SEQ ID NO: 2464700 - RNA, 23 nt, Human
auagccacauuuggaauacuuuu

SEQ ID NO: 2464701 - RNA, 16 nt, Human
auagccaccccagaaa

SEQ ID NO: 2464702 - RNA, 19 nt, Human
auagccacuuaccuucaau

SEQ ID NO: 2464703 - RNA, 21 nt, Human
auagccacuuaccuucaauaa

SEQ ID NO: 2464704 - RNA, 23 nt, Human
auagccacuuaccuucaauaaag

SEQ ID NO: 2464705 - RNA, 13 nt, Human
auagccacauuug

SEQ ID NO: 2464706 - RNA, 16 nt, Human
auagccacauuuggaa

SEQ ID NO: 2464707 - RNA, 21 nt, Human
auagccacauuuggaauacuu

SEQ ID NO: 2464708 - RNA, 22 nt, Human
auagccacauuuggaauacuuu

SEQ ID NO: 2464709 - RNA, 21 nt, Human
auagccaaggccaaaggaagc

SEQ ID NO: 2464710 - RNA, 15 nt, Human
auagccaaggccaaa

SEQ ID NO: 2464711 - RNA, 14 nt, Human
auaucaaaaagacu

SEQ ID NO: 2464712 - RNA, 16 nt, Human
auaucaaauauauuca

SEQ ID NO: 2464713 - RNA, 21 nt, Human
auaucaacagauaguuguguu

SEQ ID NO: 2464714 - RNA, 17 nt, Human
auaucaucaguauugaa

SEQ ID NO: 2464715 - RNA, 22 nt, Human
auaucaucaguauugaagcauu

SEQ ID NO: 2464716 - RNA, 21 nt, Human
auaucaugagugaauaaaugu

SEQ ID NO: 2464717 - RNA, 23 nt, Human
auaucauuauaacugaaggagaa

SEQ ID NO: 2464718 - RNA, 12 nt, Human
auauccaaaagc

SEQ ID NO: 2464719 - RNA, 19 nt, Human
auauccaaaagcuuuuuau

SEQ ID NO: 2464720 - RNA, 23 nt, Human
auaucauuuauuuuuuacauuau

SEQ ID NO: 2464721 - RNA, 21 nt, Human
auaucauuuauuuuuuacauu

SEQ ID NO: 2464722 - RNA, 22 nt, Human
auaugcuucuguuuuauaauuu

SEQ ID NO: 2464723 - RNA, 20 nt, Human
auaugcuucuguuuuauaau

SEQ ID NO: 2464724 - RNA, 21 nt, Human
auaugcuuauacacuuacacu

SEQ ID NO: 2464725 - RNA, 19 nt, Human
auauuaccacagacauacu

SEQ ID NO: 2464726 - RNA, 22 nt, Human
auauuaccacagacauacuaac

SEQ ID NO: 2464727 - RNA, 16 nt, Human
auauuacuagcauaug

SEQ ID NO: 2464728 - RNA, 15 nt, Human
auauuauauauauau

SEQ ID NO: 2464729 - RNA, 14 nt, Human
auauuagaaguguu

SEQ ID NO: 2464730 - RNA, 23 nt, Human
auauuaugaagcuuuuaugugaa

SEQ ID NO: 2464731 - RNA, 19 nt, Human
auauuaucaugcaaaugcu

SEQ ID NO: 2464732 - RNA, 21 nt, Human
auauuaucaugcaaaugcugu

SEQ ID NO: 2464733 - RNA, 16 nt, Human
auauuauguuaaaacu

SEQ ID NO: 2464734 - RNA, 21 nt, Human
auauuauguauuuauauuuug

SEQ ID NO: 2464735 - RNA, 13 nt, Human
auauuauguguuu

SEQ ID NO: 2464736 - RNA, 16 nt, Human
auauuauggaagauuu

SEQ ID NO: 2464737 - RNA, 22 nt, Human
auauuauuaguuuugauuuaau

SEQ ID NO: 2464738 - RNA, 19 nt, Human
auauuauuaguuuugauuu

SEQ ID NO: 2464739 - RNA, 13 nt, Human
auauuauuucuag

SEQ ID NO: 2464740 - RNA, 17 nt, Human
auauuauucauucauuu

SEQ ID NO: 2464741 - RNA, 13 nt, Human
auauuuauuuuaa

SEQ ID NO: 2464742 - RNA, 14 nt, Human
auauuuauugcuuu

SEQ ID NO: 2464743 - RNA, 13 nt, Human
auauuuauugcuu

SEQ ID NO: 2464744 - RNA, 12 nt, Human
auauuuauugcu

SEQ ID NO: 2464745 - RNA, 19 nt, Human
auauuuacuucuuauacau

SEQ ID NO: 2464746 - RNA, 23 nt, Human
auauuuacuaagccacaagaaau

SEQ ID NO: 2464747 - RNA, 23 nt, Human
auauuuauuauuuucaccuguuu

SEQ ID NO: 2464748 - RNA, 22 nt, Human
auauuauuucuaggaagaauuu

SEQ ID NO: 2464749 - RNA, 20 nt, Human
auauuauuucuaggaagaau

SEQ ID NO: 2464750 - RNA, 14 nt, Human
auauuauuucuagg

SEQ ID NO: 2464751 - RNA, 16 nt, Human
auauuuacauaugaaa

SEQ ID NO: 2464752 - RNA, 18 nt, Human
auauuuacauaugaaauu

SEQ ID NO: 2464753 - RNA, 19 nt, Human
auauuuacauaugaaauuu

SEQ ID NO: 2464754 - RNA, 20 nt, Human
auauuuacauaugaaauuua

SEQ ID NO: 2464755 - RNA, 15 nt, Human
auauuuacauaugaa

SEQ ID NO: 2464756 - RNA, 21 nt, Human
auauuuacaugaauugcauuu

SEQ ID NO: 2464757 - RNA, 14 nt, Human
auauuuacguauga

SEQ ID NO: 2464758 - RNA, 20 nt, Human
aguuguuugauucagacagc

SEQ ID NO: 2464759 - RNA, 11 nt, Human
aguuguuugau

SEQ ID NO: 2464760 - RNA, 13 nt, Human
aguuguuugaugc

SEQ ID NO: 2464761 - RNA, 16 nt, Human
aguuguuucauugacu

SEQ ID NO: 2464762 - RNA, 19 nt, Human
aguuguuucauugacuauc

SEQ ID NO: 2464763 - RNA, 19 nt, Human
aguuguuggccuccggccu

SEQ ID NO: 2464764 - RNA, 13 nt, Human
aguuguuucauug

SEQ ID NO: 2464765 - RNA, 15 nt, Human
aguuguuucauugac

SEQ ID NO: 2464766 - RNA, 15 nt, Human
aguuguuggccuccg

SEQ ID NO: 2464767 - RNA, 14 nt, Human
aguuguuggccucc

SEQ ID NO: 2464768 - RNA, 13 nt, Human
aguuguuggccuc

SEQ ID NO: 2464769 - RNA, 15 nt, Human
aguuguugcccuggg

SEQ ID NO: 2464770 - RNA, 14 nt, Human
aguugaagacagag

SEQ ID NO: 2464771 - RNA, 18 nt, Human
aguuguggaaagccucug

SEQ ID NO: 2464772 - RNA, 19 nt, Human
aguuguggaaagccucugc

SEQ ID NO: 2464773 - RNA, 20 nt, Human
aguuguggaaagccucugcu

SEQ ID NO: 2464774 - RNA, 21 nt, Human
aguuguggaaagccucugcug

SEQ ID NO: 2464775 - RNA, 19 nt, Human
aguuguggugcugacaaag

SEQ ID NO: 2464776 - RNA, 17 nt, Human
aguugugggugggagag

SEQ ID NO: 2464777 - RNA, 20 nt, Human
aguuguggagagugcaacag

SEQ ID NO: 2464778 - RNA, 20 nt, Human
aguuguggugcugacaaagc

SEQ ID NO: 2464779 - RNA, 23 nt, Human
aguugaaaaucuuauaauuuaaa

SEQ ID NO: 2464780 - RNA, 22 nt, Human
aguugaaaagacuccaaagaaa

SEQ ID NO: 2464781 - RNA, 23 nt, Human
aguugaacugauaguuacuguug

SEQ ID NO: 2464782 - RNA, 13 nt, Human
aguugaacugaua

SEQ ID NO: 2464783 - RNA, 20 nt, Human
aguguuuuuguaaagugugg

SEQ ID NO: 2464784 - RNA, 21 nt, Human
aguguuuuuaccucugucuug

SEQ ID NO: 2464785 - RNA, 17 nt, Human
aguguuuuuaccucugu

SEQ ID NO: 2464786 - RNA, 16 nt, Human
aguguuuuuaccucug

SEQ ID NO: 2464787 - RNA, 14 nt, Human
aguuaaacauaaau

SEQ ID NO: 2464788 - RNA, 13 nt, Human
aguuaaagcagug

SEQ ID NO: 2464789 - RNA, 15 nt, Human
aguguuuuuguaaag

SEQ ID NO: 2464790 - RNA, 14 nt, Human
aguguuuuuguaaa

SEQ ID NO: 2464791 - RNA, 18 nt, Human
aguguuuuuguaaagugu

SEQ ID NO: 2464792 - RNA, 14 nt, Human
aguuaagccuuugg

SEQ ID NO: 2464793 - RNA, 15 nt, Human
aguuaagugaauguc

SEQ ID NO: 2464794 - RNA, 21 nt, Human
aguuaauauaucccagaaauu

SEQ ID NO: 2464795 - RNA, 20 nt, Human
aguuaauauaucccagaaau

SEQ ID NO: 2464796 - RNA, 15 nt, Human
aguuaauauugugaa

SEQ ID NO: 2464797 - RNA, 13 nt, Human
aguuaagccuuug

SEQ ID NO: 2464798 - RNA, 16 nt, Human
aguuaaagugaauaac

SEQ ID NO: 2464799 - RNA, 12 nt, Human
aguuaaauaaau

SEQ ID NO: 2464800 - RNA, 16 nt, Human
aguuacagacaaagcg

SEQ ID NO: 2464801 - RNA, 14 nt, Human
aguuacagacaaag

SEQ ID NO: 2464802 - RNA, 18 nt, Human
aguuacacuaaaagguga

SEQ ID NO: 2464803 - RNA, 20 nt, Human
aguuaaugaugguugauggg

SEQ ID NO: 2464804 - RNA, 17 nt, Human
aguuacagacaaagcgu

SEQ ID NO: 2464805 - RNA, 19 nt, Human
aguucagguaacaggcaga

SEQ ID NO: 2464806 - RNA, 20 nt, Human
aguucagguaacaggcagau

SEQ ID NO: 2464807 - RNA, 16 nt, Human
aguuacagaaaguggu

SEQ ID NO: 2464808 - RNA, 15 nt, Human
aguuacagaaagugg

SEQ ID NO: 2464809 - RNA, 13 nt, Human
aguuacagaaagu

SEQ ID NO: 2464810 - RNA, 12 nt, Human
aguuacagaaag

SEQ ID NO: 2464811 - RNA, 19 nt, Human
aguucagguagcugccccu

SEQ ID NO: 2464812 - RNA, 20 nt, Human
aguucagguagcugccccug

SEQ ID NO: 2464813 - RNA, 21 nt, Human
aguucagguagcugccccugg

SEQ ID NO: 2464814 - RNA, 18 nt, Human
aguucauaaauuuauggu

SEQ ID NO: 2464815 - RNA, 24 nt, Human
aguucaguuccucuuugcauggaa

SEQ ID NO: 2464816 - RNA, 23 nt, Human
aguucaguuccucuuugcaugga

SEQ ID NO: 2464817 - RNA, 20 nt, Human
aguucaguuccucuuugcau

SEQ ID NO: 2464818 - RNA, 16 nt, Human
aguucaguuccucuuu

SEQ ID NO: 2464819 - RNA, 23 nt, Human
aguucaguggcagggcucaggau

SEQ ID NO: 2464820 - RNA, 22 nt, Human
aguucaguggcagggcucagga

SEQ ID NO: 2464821 - RNA, 21 nt, Human
aguucaguggcagggcucagg

SEQ ID NO: 2464822 - RNA, 19 nt, Human
aguucaguggcagggcuca

SEQ ID NO: 2464823 - RNA, 18 nt, Human
aguucaguggcagggcuc

SEQ ID NO: 2464824 - RNA, 13 nt, Human
aguucaguggcag

SEQ ID NO: 2464825 - RNA, 19 nt, Human
aguucaguggcacucaaca

SEQ ID NO: 2464826 - RNA, 11 nt, Human
aguucaguggc

SEQ ID NO: 2464827 - RNA, 20 nt, Human
aguucaguaccuggaggagg

SEQ ID NO: 2464828 - RNA, 19 nt, Human
aguucaguaccuggaggag

SEQ ID NO: 2464829 - RNA, 17 nt, Human
aguucaguaccuggagg

SEQ ID NO: 2464830 - RNA, 16 nt, Human
aguucaguaccuggag

SEQ ID NO: 2464831 - RNA, 15 nt, Human
aguucaguaccugga

SEQ ID NO: 2464832 - RNA, 14 nt, Human
aguucaguaccugg

SEQ ID NO: 2464833 - RNA, 22 nt, Human
aguugaaaaucuuauaauuuaa

SEQ ID NO: 2464834 - RNA, 21 nt, Human
aguugaaaagacuccaaagaa

SEQ ID NO: 2464835 - RNA, 13 nt, Human
aguucaugagaau

SEQ ID NO: 2464836 - RNA, 21 nt, Human
aguucaugagaaucuauauuu

SEQ ID NO: 2464837 - RNA, 23 nt, Human
aguucauguuugcuucauaaaug

SEQ ID NO: 2464838 - RNA, 19 nt, Human
aguucaguuuuaccagaug

SEQ ID NO: 2464839 - RNA, 17 nt, Human
aguucauguuugcuuca

SEQ ID NO: 2464840 - RNA, 17 nt, Human
agugucuuaauuaaaag

SEQ ID NO: 2464841 - RNA, 18 nt, Human
agugucuuaauuaaaaga

SEQ ID NO: 2464842 - RNA, 21 nt, Human
agugucuuaauuaaaagaaua

SEQ ID NO: 2464843 - RNA, 14 nt, Human
aguguccuuagaac

SEQ ID NO: 2464844 - RNA, 16 nt, Human
aguguauggaaauaaa

SEQ ID NO: 2464845 - RNA, 18 nt, Human
aguguaugacugcacaug

SEQ ID NO: 2464846 - RNA, 20 nt, Human
aguguauggaaauaaaugua

SEQ ID NO: 2464847 - RNA, 21 nt, Human
aguguauggaaauaaauguau

SEQ ID NO: 2464848 - RNA, 22 nt, Human
aguguauggaaauaaauguauc

SEQ ID NO: 2464849 - RNA, 17 nt, Human
aguguaugcacgugugc

SEQ ID NO: 2464850 - RNA, 14 nt, Human
agugggagcugccu

SEQ ID NO: 2464851 - RNA, 22 nt, Human
aguggcuucauuagagcaggcg

SEQ ID NO: 2464852 - RNA, 21 nt, Human
aguggcuucauuagagcaggc

SEQ ID NO: 2464853 - RNA, 20 nt, Human
aguggcuucauuagagcagg

SEQ ID NO: 2464854 - RNA, 12 nt, Human
agugggagaaaa

SEQ ID NO: 2464855 - RNA, 13 nt, Human
agugggagaaaac

SEQ ID NO: 2464856 - RNA, 17 nt, Human
agugggagaaaacacuu

SEQ ID NO: 2464857 - RNA, 15 nt, Human
agugggagcugccug

SEQ ID NO: 2464858 - RNA, 16 nt, Human
agugggagcugccugu

SEQ ID NO: 2464859 - RNA, 14 nt, Human
agugggagccaggg

SEQ ID NO: 2464860 - RNA, 14 nt, Human
aguguauaucagaa

SEQ ID NO: 2464861 - RNA, 14 nt, Human
agugggagaaaaca

SEQ ID NO: 2464862 - RNA, 17 nt, Human
aguguauuuuuuuacua

SEQ ID NO: 2464863 - RNA, 18 nt, Human
aguguauuuuuuuacuaa

SEQ ID NO: 2464864 - RNA, 20 nt, Human
aguguccaaagcagggucug

SEQ ID NO: 2464865 - RNA, 17 nt, Human
aguguccaaagcagggu

SEQ ID NO: 2464866 - RNA, 14 nt, Human
aguguccaaagcag

SEQ ID NO: 2464867 - RNA, 15 nt, Human
agugucaaguugugc

SEQ ID NO: 2464868 - RNA, 14 nt, Human
agugucaaguugug

SEQ ID NO: 2464869 - RNA, 20 nt, Human
agugucaaauaaacacugug

SEQ ID NO: 2464870 - RNA, 21 nt, Human
agugucaaauaaacacugugu

SEQ ID NO: 2464871 - RNA, 19 nt, Human
agugucaaauaaacacugu

SEQ ID NO: 2464872 - RNA, 17 nt, Human
agugucaaauaaacacu

SEQ ID NO: 2464873 - RNA, 15 nt, Human
agugucaaauaaaca

SEQ ID NO: 2464874 - RNA, 21 nt, Human
aguguauuuuucaauaaagca

SEQ ID NO: 2464875 - RNA, 14 nt, Human
aguguauuuguauu

SEQ ID NO: 2464876 - RNA, 16 nt, Human
aguguauuuuucaaua

SEQ ID NO: 2464877 - RNA, 19 nt, Human
aguguccccuccacuguca

SEQ ID NO: 2464878 - RNA, 17 nt, Human
aguguccccuccacugu

SEQ ID NO: 2464879 - RNA, 15 nt, Human
aguguccccuccacu

SEQ ID NO: 2464880 - RNA, 14 nt, Human
aguguccccuccac

SEQ ID NO: 2464881 - RNA, 13 nt, Human
aguguccccucca

SEQ ID NO: 2464882 - RNA, 23 nt, Human
aguguccauugacauguacagag

SEQ ID NO: 2464883 - RNA, 22 nt, Human
aguguccauugacauguacaga

SEQ ID NO: 2464884 - RNA, 21 nt, Human
aguguccauugacauguacag

SEQ ID NO: 2464885 - RNA, 20 nt, Human
aguguccauugacauguaca

SEQ ID NO: 2464886 - RNA, 21 nt, Human
aguguccaaagcagggucugg

SEQ ID NO: 2464887 - RNA, 15 nt, Human
agugucuuaauuaaa

SEQ ID NO: 2464888 - RNA, 21 nt, Human
aguguccccuccacugucaca

SEQ ID NO: 2464889 - RNA, 14 nt, Human
aguggcucaacauu

SEQ ID NO: 2464890 - RNA, 14 nt, Human
aguggcucacgccu

SEQ ID NO: 2464891 - RNA, 17 nt, Human
aguggcugguccagggc

SEQ ID NO: 2464892 - RNA, 15 nt, Human
aguggcugguccagg

SEQ ID NO: 2464893 - RNA, 22 nt, Human
aguggcugcugcccaggcccag

SEQ ID NO: 2464894 - RNA, 19 nt, Human
aguggcugcugcccaggcc

SEQ ID NO: 2464895 - RNA, 17 nt, Human
aguggcugcugcccagg

SEQ ID NO: 2464896 - RNA, 16 nt, Human
aguggcugcugcccag

SEQ ID NO: 2464897 - RNA, 14 nt, Human
aguggcugcugccc

SEQ ID NO: 2464898 - RNA, 13 nt, Human
aguggcugcugcc

SEQ ID NO: 2464899 - RNA, 16 nt, Human
aguggcuggaucugug

SEQ ID NO: 2464900 - RNA, 21 nt, Human
aguggcuccucccggugccca

SEQ ID NO: 2464901 - RNA, 11 nt, Human
aguggcugcug

SEQ ID NO: 2464902 - RNA, 12 nt, Human
aguggcugcugc

SEQ ID NO: 2464903 - RNA, 14 nt, Human
aguggcugcugacu

SEQ ID NO: 2464904 - RNA, 17 nt, Human
aguggcuccucccggug

SEQ ID NO: 2464905 - RNA, 13 nt, Human
aguggcuccuccc

SEQ ID NO: 2464906 - RNA, 23 nt, Human
aguggcuuaaaacaacacucaca

SEQ ID NO: 2464907 - RNA, 19 nt, Human
aguggcugguccagggcua

SEQ ID NO: 2464908 - RNA, 18 nt, Human
aguggcugguccagggcu

SEQ ID NO: 2464909 - RNA, 16 nt, Human
aguggcugucaucagc

SEQ ID NO: 2464910 - RNA, 17 nt, Human
aguggcugucaucagcc

SEQ ID NO: 2464911 - RNA, 17 nt, Human
aguggcuguccagugcc

SEQ ID NO: 2464912 - RNA, 13 nt, Human
aguggcuguccag

SEQ ID NO: 2464913 - RNA, 12 nt, Human
aguggcugucca

SEQ ID NO: 2464914 - RNA, 19 nt, Human
aguggcuguccagugccca

SEQ ID NO: 2464915 - RNA, 18 nt, Human
aguggcuguccagugccc

SEQ ID NO: 2464916 - RNA, 19 nt, Human
aguggcuuacuacaugugg

SEQ ID NO: 2464917 - RNA, 19 nt, Human
aguggcuucauuagagcag

SEQ ID NO: 2464918 - RNA, 17 nt, Human
aguggcuucaucuguca

SEQ ID NO: 2464919 - RNA, 15 nt, Human
aguggcuucaaaaua

SEQ ID NO: 2464920 - RNA, 23 nt, Human
aguggcuguccagugcccauucc

SEQ ID NO: 2464921 - RNA, 18 nt, Human
aguauggguuagggaaaa

SEQ ID NO: 2464922 - RNA, 22 nt, Human
aguauggugagagaagccugug

SEQ ID NO: 2464923 - RNA, 17 nt, Human
aguaugggacuggccuc

SEQ ID NO: 2464924 - RNA, 20 nt, Human
aguaugggacuggccucugc

SEQ ID NO: 2464925 - RNA, 17 nt, Human
agucaaaccauaaacuu

SEQ ID NO: 2464926 - RNA, 13 nt, Human
agucaaaccauaa

SEQ ID NO: 2464927 - RNA, 20 nt, Human
agucaaaccauaaacuucau

SEQ ID NO: 2464928 - RNA, 18 nt, Human
agucaaaccauaaacuuc

SEQ ID NO: 2464929 - RNA, 13 nt, Human
agucaaagacauu

SEQ ID NO: 2464930 - RNA, 21 nt, Human
agucaaaaggugccugugagg

SEQ ID NO: 2464931 - RNA, 18 nt, Human
agucaaaaggugccugug

SEQ ID NO: 2464932 - RNA, 19 nt, Human
agucaaauugugugaaagg

SEQ ID NO: 2464933 - RNA, 23 nt, Human
agucaaauugugugaaagguacu

SEQ ID NO: 2464934 - RNA, 15 nt, Human
agucaaauuaauaau

SEQ ID NO: 2464935 - RNA, 18 nt, Human
agucaaauuaauaaucuu

SEQ ID NO: 2464936 - RNA, 14 nt, Human
agucaaauuaauaa

SEQ ID NO: 2464937 - RNA, 23 nt, Human
agucaaaugguaggcauuuccua

SEQ ID NO: 2464938 - RNA, 15 nt, Human
agucaaacugugcca

SEQ ID NO: 2464939 - RNA, 22 nt, Human
agucaaaugguaggcauuuccu

SEQ ID NO: 2464940 - RNA, 12 nt, Human
agucaaaguaaa

SEQ ID NO: 2464941 - RNA, 21 nt, Human
agucaaaguaaaacuugcugc

SEQ ID NO: 2464942 - RNA, 16 nt, Human
agucaacaaacuauuu

SEQ ID NO: 2464943 - RNA, 22 nt, Human
agucaaauuugaaaauaauugu

SEQ ID NO: 2464944 - RNA, 20 nt, Human
agucaaauuaauaaucuuau

SEQ ID NO: 2464945 - RNA, 22 nt, Human
agucaaauuaauaaucuuauua

SEQ ID NO: 2464946 - RNA, 15 nt, Human
aguaugaggcauuug

SEQ ID NO: 2464947 - RNA, 16 nt, Human
aguaugaggcauuugu

SEQ ID NO: 2464948 - RNA, 23 nt, Human
aguaugcuugaaaagauaaauua

SEQ ID NO: 2464949 - RNA, 19 nt, Human
aguauggagcucagagagg

SEQ ID NO: 2464950 - RNA, 14 nt, Human
aguauggagcucag

SEQ ID NO: 2464951 - RNA, 20 nt, Human
aguaugcuuggacugaaggg

SEQ ID NO: 2464952 - RNA, 12 nt, Human
aguaugaaaaua

SEQ ID NO: 2464953 - RNA, 16 nt, Human
aguaucuuuuuauuca

SEQ ID NO: 2464954 - RNA, 18 nt, Human
aguaugaaucuaugccaa

SEQ ID NO: 2464955 - RNA, 17 nt, Human
aguaugaaucuaugcca

SEQ ID NO: 2464956 - RNA, 16 nt, Human
aguaugaaucuaugcc

SEQ ID NO: 2464957 - RNA, 15 nt, Human
aguaugaaucuaugc

SEQ ID NO: 2464958 - RNA, 13 nt, Human
aguaugaaucuau

SEQ ID NO: 2464959 - RNA, 17 nt, Human
aguaucuuuuuucaaaa

SEQ ID NO: 2464960 - RNA, 13 nt, Human
aguaugaaaauaa

SEQ ID NO: 2464961 - RNA, 16 nt, Human
aguaugaauaaagaca

SEQ ID NO: 2464962 - RNA, 15 nt, Human
aguaucuugaagacu

SEQ ID NO: 2464963 - RNA, 12 nt, Human
aguaucuugaag

SEQ ID NO: 2464964 - RNA, 11 nt, Human
aguaucuugaa

SEQ ID NO: 2464965 - RNA, 18 nt, Human
aguaucuguaucucucuc

SEQ ID NO: 2464966 - RNA, 15 nt, Human
aguaucuguaucucu

SEQ ID NO: 2464967 - RNA, 14 nt, Human
aguaucuucaugua

SEQ ID NO: 2464968 - RNA, 14 nt, Human
aguaucugggaacu

SEQ ID NO: 2464969 - RNA, 23 nt, Human
aguaucucggaccuuucagcugu

SEQ ID NO: 2464970 - RNA, 22 nt, Human
aguaucucggaccuuucagcug

SEQ ID NO: 2464971 - RNA, 18 nt, Human
aguaucuccucgcaagcu

SEQ ID NO: 2464972 - RNA, 19 nt, Human
aguaucuccucgcaagcug

SEQ ID NO: 2464973 - RNA, 15 nt, Human
aguaucucagggccu

SEQ ID NO: 2464974 - RNA, 23 nt, Human
agugacccggaggccacaugagu

SEQ ID NO: 2464975 - RNA, 19 nt, Human
agugacccggaggccacau

SEQ ID NO: 2464976 - RNA, 18 nt, Human
agugacccggaggccaca

SEQ ID NO: 2464977 - RNA, 17 nt, Human
agugacccggaggccac

SEQ ID NO: 2464978 - RNA, 16 nt, Human
agugacccggaggcca

SEQ ID NO: 2464979 - RNA, 15 nt, Human
agugacccggaggcc

SEQ ID NO: 2464980 - RNA, 15 nt, Human
agugacaguauuuug

SEQ ID NO: 2464981 - RNA, 18 nt, Human
agugaccauacuaauuau

SEQ ID NO: 2464982 - RNA, 22 nt, Human
agugacaucucuuugaugucau

SEQ ID NO: 2464983 - RNA, 23 nt, Human
agugacagggaagcuacagguua

SEQ ID NO: 2464984 - RNA, 22 nt, Human
agugacagggaagcuacagguu

SEQ ID NO: 2464985 - RNA, 20 nt, Human
agugacagggaagcuacagg

SEQ ID NO: 2464986 - RNA, 19 nt, Human
agugacagggaagcuacag

SEQ ID NO: 2464987 - RNA, 20 nt, Human
agugacaguggauugcauuu

SEQ ID NO: 2464988 - RNA, 19 nt, Human
agugacaguggauugcauu

SEQ ID NO: 2464989 - RNA, 15 nt, Human
agucugaaggcuggg

SEQ ID NO: 2464990 - RNA, 13 nt, Human
agucugaaggcug

SEQ ID NO: 2464991 - RNA, 16 nt, Human
agucugaaggcugggu

SEQ ID NO: 2464992 - RNA, 22 nt, Human
agucugauccaggaggccgggg

SEQ ID NO: 2464993 - RNA, 12 nt, Human
aguccuguaaug

SEQ ID NO: 2464994 - RNA, 20 nt, Human
aguccugugaaugccacugc

SEQ ID NO: 2464995 - RNA, 19 nt, Human
aguccugugaaugccacug

SEQ ID NO: 2464996 - RNA, 18 nt, Human
aguccugugaaugccacu

SEQ ID NO: 2464997 - RNA, 13 nt, Human
aguccugugaaug

SEQ ID NO: 2464998 - RNA, 22 nt, Human
aguccugggagaaccucaggcu

SEQ ID NO: 2464999 - RNA, 21 nt, Human
aguccuggcaugggaaugaau

SEQ ID NO: 2465000 - RNA, 20 nt, Human
aguccuggcaugggaaugaa

SEQ ID NO: 2465001 - RNA, 22 nt, Human
aguccuggcaugggaaugaaug

SEQ ID NO: 2465002 - RNA, 14 nt, Human
aguccuggccuggc

SEQ ID NO: 2465003 - RNA, 13 nt, Human
aguccuggccugg

SEQ ID NO: 2465004 - RNA, 20 nt, Human
aguccuggccuggcuucucc

SEQ ID NO: 2465005 - RNA, 18 nt, Human
aguccuggccuggcuucu

SEQ ID NO: 2465006 - RNA, 21 nt, Human
aguccugggagaaccucaggc

SEQ ID NO: 2465007 - RNA, 23 nt, Human
agugaagaaaagugaaugcucaa

SEQ ID NO: 2465008 - RNA, 22 nt, Human
agugaagaaaagugaaugcuca

SEQ ID NO: 2465009 - RNA, 19 nt, Human
agugaagaaaagugaaugc

SEQ ID NO: 2465010 - RNA, 16 nt, Human
agugaagaaaagugaa

SEQ ID NO: 2465011 - RNA, 14 nt, Human
agugaagacaauga

SEQ ID NO: 2465012 - RNA, 16 nt, Human
agugaagacaaugacu

SEQ ID NO: 2465013 - RNA, 20 nt, Human
agugaagaggggcagcccuu

SEQ ID NO: 2465014 - RNA, 19 nt, Human
agugaagaggggcagcccu

SEQ ID NO: 2465015 - RNA, 17 nt, Human
agugaagaggggcagcc

SEQ ID NO: 2465016 - RNA, 16 nt, Human
agugaagaggggcagc

SEQ ID NO: 2465017 - RNA, 15 nt, Human
agugaaggcuucucu

SEQ ID NO: 2465018 - RNA, 21 nt, Human
agugaaggcuucucucugugg

SEQ ID NO: 2465019 - RNA, 15 nt, Human
agugaagaggggcag

SEQ ID NO: 2465020 - RNA, 14 nt, Human
agugaagaggggca

SEQ ID NO: 2465021 - RNA, 13 nt, Human
agugaagaggggc

SEQ ID NO: 2465022 - RNA, 16 nt, Human
agugaagacuggaagc

SEQ ID NO: 2465023 - RNA, 19 nt, Human
agugaagagggagaaggga

SEQ ID NO: 2465024 - RNA, 13 nt, Human
agugacagggaag

SEQ ID NO: 2465025 - RNA, 16 nt, Human
agugacagggaagcua

SEQ ID NO: 2465026 - RNA, 18 nt, Human
agugaagguuuacaauuu

SEQ ID NO: 2465027 - RNA, 21 nt, Human
agugaagaggggcagcccuug

SEQ ID NO: 2465028 - RNA, 15 nt, Human
agugaagguuuacaa

SEQ ID NO: 2465029 - RNA, 23 nt, Human
agugaagguuuacaauuuacaaa

SEQ ID NO: 2465030 - RNA, 18 nt, Human
agucugauucccaagcuc

SEQ ID NO: 2465031 - RNA, 16 nt, Human
agucugauucccaagc

SEQ ID NO: 2465032 - RNA, 21 nt, Human
agucugaucgugacgcugaau

SEQ ID NO: 2465033 - RNA, 20 nt, Human
agucugaucgugacgcugaa

SEQ ID NO: 2465034 - RNA, 18 nt, Human
agucugaucgugacgcug

SEQ ID NO: 2465035 - RNA, 15 nt, Human
aguccugggaugugg

SEQ ID NO: 2465036 - RNA, 23 nt, Human
agucugaucgugacgcugaauaa

SEQ ID NO: 2465037 - RNA, 22 nt, Human
agucugaucgugacgcugaaua

SEQ ID NO: 2465038 - RNA, 19 nt, Human
agucugaugauuucuugaa

SEQ ID NO: 2465039 - RNA, 20 nt, Human
agucugcugcccuccauccc

SEQ ID NO: 2465040 - RNA, 18 nt, Human
agucugcugcccuccauc

SEQ ID NO: 2465041 - RNA, 20 nt, Human
agugaacuugggccacugug

SEQ ID NO: 2465042 - RNA, 17 nt, Human
agucuggaaugcagugg

SEQ ID NO: 2465043 - RNA, 13 nt, Human
agucugcugcccu

SEQ ID NO: 2465044 - RNA, 15 nt, Human
agucugcugcccucc

SEQ ID NO: 2465045 - RNA, 16 nt, Human
agucugcugcccucca

SEQ ID NO: 2465046 - RNA, 17 nt, Human
agucugcugcccuccau

SEQ ID NO: 2465047 - RNA, 17 nt, Human
agucugcuauauuuuca

SEQ ID NO: 2465048 - RNA, 16 nt, Human
agucugcuauauuuuc

SEQ ID NO: 2465049 - RNA, 16 nt, Human
auggcuuaauguuuau

SEQ ID NO: 2465050 - RNA, 14 nt, Human
auggcuuaauguuu

SEQ ID NO: 2465051 - RNA, 16 nt, Human
auggcuguggagugug

SEQ ID NO: 2465052 - RNA, 20 nt, Human
auggcugugccucugccugu

SEQ ID NO: 2465053 - RNA, 19 nt, Human
auggcugugccucugccug

SEQ ID NO: 2465054 - RNA, 16 nt, Human
auggcuuccuccuccc

SEQ ID NO: 2465055 - RNA, 15 nt, Human
auggcuuccuccucc

SEQ ID NO: 2465056 - RNA, 12 nt, Human
auggcuuccucc

SEQ ID NO: 2465057 - RNA, 21 nt, Human
auggcuuccaagguggucugc

SEQ ID NO: 2465058 - RNA, 16 nt, Human
auggcuuccaaggugg

SEQ ID NO: 2465059 - RNA, 19 nt, Human
auggcuuauccagcuggug

SEQ ID NO: 2465060 - RNA, 18 nt, Human
auggcuuauccagcuggu

SEQ ID NO: 2465061 - RNA, 17 nt, Human
auggcuuauccagcugg

SEQ ID NO: 2465062 - RNA, 21 nt, Human
auggcuuaauguuuauuccug

SEQ ID NO: 2465063 - RNA, 16 nt, Human
auggcuuaguuuucau

SEQ ID NO: 2465064 - RNA, 22 nt, Human
augcugcccaugccaccgcuuc

SEQ ID NO: 2465065 - RNA, 17 nt, Human
augcugcccaugccacc

SEQ ID NO: 2465066 - RNA, 15 nt, Human
augcugcccaugcca

SEQ ID NO: 2465067 - RNA, 12 nt, Human
augcugccccuc

SEQ ID NO: 2465068 - RNA, 11 nt, Human
augcugcccug

SEQ ID NO: 2465069 - RNA, 22 nt, Human
augcugauguucaguguaauuu

SEQ ID NO: 2465070 - RNA, 21 nt, Human
augcugauguucaguguaauu

SEQ ID NO: 2465071 - RNA, 20 nt, Human
augcugcagauuugggcugg

SEQ ID NO: 2465072 - RNA, 18 nt, Human
augcugcaggacuugaga

SEQ ID NO: 2465073 - RNA, 23 nt, Human
augcugcauuuuaauuuuaacca

SEQ ID NO: 2465074 - RNA, 24 nt, Human
augcugauguucaguguaauuucu

SEQ ID NO: 2465075 - RNA, 19 nt, Human
augcugcaggacuugagaa

SEQ ID NO: 2465076 - RNA, 14 nt, Human
augcugccaaauuu

SEQ ID NO: 2465077 - RNA, 15 nt, Human
augcucuucugugga

SEQ ID NO: 2465078 - RNA, 19 nt, Human
augcugaagccaaagccaa

SEQ ID NO: 2465079 - RNA, 14 nt, Human
augcugaaaccaag

SEQ ID NO: 2465080 - RNA, 23 nt, Human
augcugaacauugcauauaacuu

SEQ ID NO: 2465081 - RNA, 17 nt, Human
augcugaacauugcaua

SEQ ID NO: 2465082 - RNA, 16 nt, Human
augcugaaacaggaga

SEQ ID NO: 2465083 - RNA, 18 nt, Human
augcugaaacaggagaga

SEQ ID NO: 2465084 - RNA, 17 nt, Human
augcugaaaaaacaccu

SEQ ID NO: 2465085 - RNA, 15 nt, Human
augcugaaacaggag

SEQ ID NO: 2465086 - RNA, 16 nt, Human
augcucuuuacuucau

SEQ ID NO: 2465087 - RNA, 22 nt, Human
auggauuggauuauuuaauaac

SEQ ID NO: 2465088 - RNA, 20 nt, Human
auggauuggauuauuuaaua

SEQ ID NO: 2465089 - RNA, 18 nt, Human
auggcugugccucugccu

SEQ ID NO: 2465090 - RNA, 15 nt, Human
auggauuuccagcca

SEQ ID NO: 2465091 - RNA, 15 nt, Human
auggauuggauuauu

SEQ ID NO: 2465092 - RNA, 20 nt, Human
auggauugauaauugcauuc

SEQ ID NO: 2465093 - RNA, 18 nt, Human
auggauugauaauugcau

SEQ ID NO: 2465094 - RNA, 19 nt, Human
auggauucuccacucaguu

SEQ ID NO: 2465095 - RNA, 17 nt, Human
auggauucucagauauu

SEQ ID NO: 2465096 - RNA, 18 nt, Human
auggauucucagauauuu

SEQ ID NO: 2465097 - RNA, 19 nt, Human
auggauucucagauauuua

SEQ ID NO: 2465098 - RNA, 22 nt, Human
auggauucucagauauuuauau

SEQ ID NO: 2465099 - RNA, 14 nt, Human
auggauucucagau

SEQ ID NO: 2465100 - RNA, 16 nt, Human
auggauucucagauau

SEQ ID NO: 2465101 - RNA, 18 nt, Human
auggaggauggagagagg

SEQ ID NO: 2465102 - RNA, 11 nt, Human
auggaggagaa

SEQ ID NO: 2465103 - RNA, 13 nt, Human
auggaggagaaga

SEQ ID NO: 2465104 - RNA, 15 nt, Human
auggaggagaagaau

SEQ ID NO: 2465105 - RNA, 17 nt, Human
auggaggagaagaauuu

SEQ ID NO: 2465106 - RNA, 14 nt, Human
auggaggaggaggc

SEQ ID NO: 2465107 - RNA, 16 nt, Human
auggaggaggaggcaa

SEQ ID NO: 2465108 - RNA, 15 nt, Human
auggaggaggaggca

SEQ ID NO: 2465109 - RNA, 16 nt, Human
auggaggauggagaga

SEQ ID NO: 2465110 - RNA, 12 nt, Human
auggaggcacac

SEQ ID NO: 2465111 - RNA, 13 nt, Human
auggaggaauaug

SEQ ID NO: 2465112 - RNA, 22 nt, Human
auggaggaaaaccaagccgugg

SEQ ID NO: 2465113 - RNA, 16 nt, Human
auggaggaaaaccaag

SEQ ID NO: 2465114 - RNA, 13 nt, Human
augcuuguacaua

SEQ ID NO: 2465115 - RNA, 14 nt, Human
augcuuguacauaa

SEQ ID NO: 2465116 - RNA, 12 nt, Human
augcuuguacau

SEQ ID NO: 2465117 - RNA, 15 nt, Human
augcuuggcuucuca

SEQ ID NO: 2465118 - RNA, 16 nt, Human
auggaaaccugaaaaa

SEQ ID NO: 2465119 - RNA, 20 nt, Human
auggaaaaggaagacuagag

SEQ ID NO: 2465120 - RNA, 14 nt, Human
auggaaaaggaaga

SEQ ID NO: 2465121 - RNA, 12 nt, Human
auggaaaaggaa

SEQ ID NO: 2465122 - RNA, 22 nt, Human
auggaaaggagaggaaagaacu

SEQ ID NO: 2465123 - RNA, 19 nt, Human
auggaaaggagaggaaaga

SEQ ID NO: 2465124 - RNA, 15 nt, Human
auggaaaggagagga

SEQ ID NO: 2465125 - RNA, 17 nt, Human
auggaaagaaucuaaua

SEQ ID NO: 2465126 - RNA, 11 nt, Human
auggaaagaau

SEQ ID NO: 2465127 - RNA, 22 nt, Human
auggaaacuguugccagagaug

SEQ ID NO: 2465128 - RNA, 15 nt, Human
auggaaacugaaugc

SEQ ID NO: 2465129 - RNA, 14 nt, Human
auggaaacugaaug

SEQ ID NO: 2465130 - RNA, 16 nt, Human
auggaaacugaaugcu

SEQ ID NO: 2465131 - RNA, 20 nt, Human
auggaaacuguugccagaga

SEQ ID NO: 2465132 - RNA, 13 nt, Human
auggaaacgguga

SEQ ID NO: 2465133 - RNA, 23 nt, Human
auggaaaccugaaaaaaaguuua

SEQ ID NO: 2465134 - RNA, 13 nt, Human
auggaaacugaau

SEQ ID NO: 2465135 - RNA, 14 nt, Human
augccugagggugg

SEQ ID NO: 2465136 - RNA, 12 nt, Human
augccugagggu

SEQ ID NO: 2465137 - RNA, 15 nt, Human
augccugagggugga

SEQ ID NO: 2465138 - RNA, 22 nt, Human
augccucugccaaaggauguga

SEQ ID NO: 2465139 - RNA, 18 nt, Human
augccucugccaaaggau

SEQ ID NO: 2465140 - RNA, 19 nt, Human
augccucucucaggccaaa

SEQ ID NO: 2465141 - RNA, 16 nt, Human
augcaugaaguaauau

SEQ ID NO: 2465142 - RNA, 17 nt, Human
augccucucucaggcca

SEQ ID NO: 2465143 - RNA, 15 nt, Human
augcaucuguccuca

SEQ ID NO: 2465144 - RNA, 19 nt, Human
augcaucuccaccugcucc

SEQ ID NO: 2465145 - RNA, 20 nt, Human
augcaucuggcucaccgggu

SEQ ID NO: 2465146 - RNA, 17 nt, Human
augcaucuccaccugcu

SEQ ID NO: 2465147 - RNA, 14 nt, Human
augcaucuccaccu

SEQ ID NO: 2465148 - RNA, 18 nt, Human
augcaucuuacugaaggu

SEQ ID NO: 2465149 - RNA, 14 nt, Human
augcaucuuacuga

SEQ ID NO: 2465150 - RNA, 16 nt, Human
augcaucuuacugaag

SEQ ID NO: 2465151 - RNA, 16 nt, Human
augcauauuauuuuau

SEQ ID NO: 2465152 - RNA, 22 nt, Human
augcaucucacuggaugcaaag

SEQ ID NO: 2465153 - RNA, 17 nt, Human
augcauauccugagcca

SEQ ID NO: 2465154 - RNA, 18 nt, Human
augcauauccugagccau

SEQ ID NO: 2465155 - RNA, 17 nt, Human
augcacaaacagaggcc

SEQ ID NO: 2465156 - RNA, 16 nt, Human
augcacaaacagaggc

SEQ ID NO: 2465157 - RNA, 16 nt, Human
augcacagaguuguua

SEQ ID NO: 2465158 - RNA, 16 nt, Human
augcacaccucccccu

SEQ ID NO: 2465159 - RNA, 20 nt, Human
augcacacuagccucuccag

SEQ ID NO: 2465160 - RNA, 22 nt, Human
augcacacuagccucuccagga

SEQ ID NO: 2465161 - RNA, 17 nt, Human
augcacagaguuguuac

SEQ ID NO: 2465162 - RNA, 18 nt, Human
augcacagaguuguuaca

SEQ ID NO: 2465163 - RNA, 11 nt, Human
augcauauacu

SEQ ID NO: 2465164 - RNA, 22 nt, Human
augcauaguucccauguuaaau

SEQ ID NO: 2465165 - RNA, 17 nt, Human
augaugccaugaggaac

SEQ ID NO: 2465166 - RNA, 16 nt, Human
augaugccaugaggaa

SEQ ID NO: 2465167 - RNA, 15 nt, Human
augauguuucacaua

SEQ ID NO: 2465168 - RNA, 21 nt, Human
augauguuucgugaaguauac

SEQ ID NO: 2465169 - RNA, 15 nt, Human
augcacaaacagagg

SEQ ID NO: 2465170 - RNA, 16 nt, Human
augcacaaaaagaugc

SEQ ID NO: 2465171 - RNA, 17 nt, Human
augcaauuuccuuuuuu

SEQ ID NO: 2465172 - RNA, 20 nt, Human
augcaauuuugcauuugaau

SEQ ID NO: 2465173 - RNA, 24 nt, Human
augauguuuuccaugaguccccug

SEQ ID NO: 2465174 - RNA, 15 nt, Human
augauguguugugau

SEQ ID NO: 2465175 - RNA, 14 nt, Human
augauguguuguga

SEQ ID NO: 2465176 - RNA, 24 nt, Human
augaugccacaccaagcugugcca

SEQ ID NO: 2465177 - RNA, 22 nt, Human
augaugccacaccaagcugugc

SEQ ID NO: 2465178 - RNA, 18 nt, Human
augaugccacaccaagcu

SEQ ID NO: 2465179 - RNA, 12 nt, Human
augaugccacac

SEQ ID NO: 2465180 - RNA, 18 nt, Human
augaugccaaccucugga

SEQ ID NO: 2465181 - RNA, 17 nt, Human
augaugccaaccucugg

SEQ ID NO: 2465182 - RNA, 17 nt, Human
augauggagcgcaccug

SEQ ID NO: 2465183 - RNA, 16 nt, Human
auguggcuugagaaau

SEQ ID NO: 2465184 - RNA, 21 nt, Human
auguggcuugagaaauaugga

SEQ ID NO: 2465185 - RNA, 22 nt, Human
auguggcuguaucuuguuuuuc

SEQ ID NO: 2465186 - RNA, 11 nt, Human
augugggaggg

SEQ ID NO: 2465187 - RNA, 10 nt, Human
augugggagg

SEQ ID NO: 2465188 - RNA, 13 nt, Human
auguucugggaca

SEQ ID NO: 2465189 - RNA, 19 nt, Human
auguuugccucugccucug

SEQ ID NO: 2465190 - RNA, 13 nt, Human
auguuuccaaccu

SEQ ID NO: 2465191 - RNA, 21 nt, Human
auguuucacauaaaaccucau

SEQ ID NO: 2465192 - RNA, 15 nt, Human
auguuuccagacuuc

SEQ ID NO: 2465193 - RNA, 19 nt, Human
auguuucacgaaguuuguu

SEQ ID NO: 2465194 - RNA, 22 nt, Human
auguuucauguuuugugacuau

SEQ ID NO: 2465195 - RNA, 16 nt, Human
auguuugcuauugaca

SEQ ID NO: 2465196 - RNA, 22 nt, Human
auguuugccucugccucugaca

SEQ ID NO: 2465197 - RNA, 12 nt, Human
auguuuuagcau

SEQ ID NO: 2465198 - RNA, 22 nt, Human
auguuuuagacaaauacucaug

SEQ ID NO: 2465199 - RNA, 19 nt, Human
auguuuuagacaaauacuc

SEQ ID NO: 2465200 - RNA, 16 nt, Human
auguuuuacugugaaa

SEQ ID NO: 2465201 - RNA, 20 nt, Human
auguuuuaccguaauaauua

SEQ ID NO: 2465202 - RNA, 14 nt, Human
auguuuuagaguua

SEQ ID NO: 2465203 - RNA, 23 nt, Human
auguuuuagacaaauacucaugu

SEQ ID NO: 2465204 - RNA, 19 nt, Human
auguuuuagaguuaacaau

SEQ ID NO: 2465205 - RNA, 19 nt, Human
auguuuuaauuccaugaau

SEQ ID NO: 2465206 - RNA, 20 nt, Human
auguuugcuucauaaaugaa

SEQ ID NO: 2465207 - RNA, 18 nt, Human
auguuugcuucauaaaug

SEQ ID NO: 2465208 - RNA, 20 nt, Human
auuaaauacagacacuaagu

SEQ ID NO: 2465209 - RNA, 19 nt, Human
auuaaauacagacacuaag

SEQ ID NO: 2465210 - RNA, 17 nt, Human
auuaaauacagacacua

SEQ ID NO: 2465211 - RNA, 14 nt, Human
auuaaauacagaca

SEQ ID NO: 2465212 - RNA, 12 nt, Human
auuaaauacaga

SEQ ID NO: 2465213 - RNA, 17 nt, Human
auuaaauacaaaacuuc

SEQ ID NO: 2465214 - RNA, 19 nt, Human
auuaaauacaaaacuucca

SEQ ID NO: 2465215 - RNA, 16 nt, Human
auuaaauacaaaacuu

SEQ ID NO: 2465216 - RNA, 18 nt, Human
auuaaaucuaugaaguau

SEQ ID NO: 2465217 - RNA, 22 nt, Human
auuaaauauguuagcaaagagu

SEQ ID NO: 2465218 - RNA, 20 nt, Human
auuaaauauguuagcaaaga

SEQ ID NO: 2465219 - RNA, 15 nt, Human
auuaaauauaauaug

SEQ ID NO: 2465220 - RNA, 18 nt, Human
auguucuaagucuuucca

SEQ ID NO: 2465221 - RNA, 19 nt, Human
auguucuaagucuuuccau

SEQ ID NO: 2465222 - RNA, 22 nt, Human
auguucuauuucagugccaaua

SEQ ID NO: 2465223 - RNA, 16 nt, Human
auguucucuaucauuu

SEQ ID NO: 2465224 - RNA, 15 nt, Human
auguucucuaucauu

SEQ ID NO: 2465225 - RNA, 14 nt, Human
auguucucuaucau

SEQ ID NO: 2465226 - RNA, 12 nt, Human
auguucugggac

SEQ ID NO: 2465227 - RNA, 11 nt, Human
auguucuggga

SEQ ID NO: 2465228 - RNA, 21 nt, Human
auguucucuaucauuuaauaa

SEQ ID NO: 2465229 - RNA, 20 nt, Human
auguucucuaucauuuaaua

SEQ ID NO: 2465230 - RNA, 19 nt, Human
auguucucuaucauuuaau

SEQ ID NO: 2465231 - RNA, 18 nt, Human
auguucucuaucauuuaa

SEQ ID NO: 2465232 - RNA, 13 nt, Human
auguucuggcccu

SEQ ID NO: 2465233 - RNA, 13 nt, Human
auguucugcuuuc

SEQ ID NO: 2465234 - RNA, 13 nt, Human
augugugagugug

SEQ ID NO: 2465235 - RNA, 22 nt, Human
augugugaggagcugcuggcuu

SEQ ID NO: 2465236 - RNA, 22 nt, Human
augugugcaacaggguauggac

SEQ ID NO: 2465237 - RNA, 16 nt, Human
augugugagugugugc

SEQ ID NO: 2465238 - RNA, 17 nt, Human
augugugagugugugca

SEQ ID NO: 2465239 - RNA, 15 nt, Human
augugugaggagcug

SEQ ID NO: 2465240 - RNA, 19 nt, Human
augugugaggagcugcugg

SEQ ID NO: 2465241 - RNA, 18 nt, Human
augugggcagugauguca

SEQ ID NO: 2465242 - RNA, 22 nt, Human
augugugccauagaguuuaaca

SEQ ID NO: 2465243 - RNA, 20 nt, Human
augugugccauagaguuuaa

SEQ ID NO: 2465244 - RNA, 18 nt, Human
augugugccauagaguuu

SEQ ID NO: 2465245 - RNA, 11 nt, Human
augugugccau

SEQ ID NO: 2465246 - RNA, 15 nt, Human
augugugcaugugug

SEQ ID NO: 2465247 - RNA, 12 nt, Human
augugugcaugu

SEQ ID NO: 2465248 - RNA, 15 nt, Human
augugugcgagugug

SEQ ID NO: 2465249 - RNA, 19 nt, Human
auguuccugaauucuauuu

SEQ ID NO: 2465250 - RNA, 17 nt, Human
augugugcucuucuucu

SEQ ID NO: 2465251 - RNA, 18 nt, Human
augugugcgagugugugc

SEQ ID NO: 2465252 - RNA, 19 nt, Human
augugugcgagugugugca

SEQ ID NO: 2465253 - RNA, 17 nt, Human
auguucuaagaagugaa

SEQ ID NO: 2465254 - RNA, 20 nt, Human
auguuccuucaagaucaugu

SEQ ID NO: 2465255 - RNA, 23 nt, Human
auguuccugaauucuauuugcug

SEQ ID NO: 2465256 - RNA, 14 nt, Human
augugaaguguuaa

SEQ ID NO: 2465257 - RNA, 13 nt, Human
augugaaguguua

SEQ ID NO: 2465258 - RNA, 21 nt, Human
augugaauaaaauuauuuugg

SEQ ID NO: 2465259 - RNA, 20 nt, Human
augugaaguguuaauacuag

SEQ ID NO: 2465260 - RNA, 19 nt, Human
augugaaguguuaauacua

SEQ ID NO: 2465261 - RNA, 16 nt, Human
augugaaguguuaaua

SEQ ID NO: 2465262 - RNA, 12 nt, Human
augugaaucaga

SEQ ID NO: 2465263 - RNA, 15 nt, Human
augugaaucagaccc

SEQ ID NO: 2465264 - RNA, 16 nt, Human
augugaaucagacccu

SEQ ID NO: 2465265 - RNA, 21 nt, Human
augugaaucagacccuacccc

SEQ ID NO: 2465266 - RNA, 18 nt, Human
augugaauugccugcaga

SEQ ID NO: 2465267 - RNA, 16 nt, Human
augugaaugggaaaag

SEQ ID NO: 2465268 - RNA, 20 nt, Human
augugaaugaucucucugaa

SEQ ID NO: 2465269 - RNA, 18 nt, Human
augucuucauuucauugu

SEQ ID NO: 2465270 - RNA, 17 nt, Human
augucuucauuucauug

SEQ ID NO: 2465271 - RNA, 22 nt, Human
augucuucauaccuacauguau

SEQ ID NO: 2465272 - RNA, 21 nt, Human
augucuucauaccuacaugua

SEQ ID NO: 2465273 - RNA, 23 nt, Human
augucuuaaugaaguuugaaugu

SEQ ID NO: 2465274 - RNA, 17 nt, Human
augucuucguacaguuc

SEQ ID NO: 2465275 - RNA, 19 nt, Human
augucuucauuucauugua

SEQ ID NO: 2465276 - RNA, 20 nt, Human
augucuucauuucauuguau

SEQ ID NO: 2465277 - RNA, 13 nt, Human
augucuuccugga

SEQ ID NO: 2465278 - RNA, 19 nt, Human
augucuuaaugaaguuuga

SEQ ID NO: 2465279 - RNA, 21 nt, Human
augucuuaaugaaguuugaau

SEQ ID NO: 2465280 - RNA, 20 nt, Human
augucuuaaugaaguuugaa

SEQ ID NO: 2465281 - RNA, 14 nt, Human
augucuuuucuugc

SEQ ID NO: 2465282 - RNA, 23 nt, Human
augucuuuguuggaaaagaauac

SEQ ID NO: 2465283 - RNA, 22 nt, Human
augucuucguacaguucuucgg

SEQ ID NO: 2465284 - RNA, 20 nt, Human
augucuucguacaguucuuc

SEQ ID NO: 2465285 - RNA, 10 nt, Human
augucuugug

SEQ ID NO: 2465286 - RNA, 11 nt, Human
augucuugugu

SEQ ID NO: 2465287 - RNA, 22 nt, Human
augucuuuaggcagcagcuuuu

SEQ ID NO: 2465288 - RNA, 23 nt, Human
augugaaaccuuuuuuaagauuu

SEQ ID NO: 2465289 - RNA, 22 nt, Human
augugaaaccuuuuuuaagauu

SEQ ID NO: 2465290 - RNA, 21 nt, Human
augugaaaccuuuuuuaagau

SEQ ID NO: 2465291 - RNA, 20 nt, Human
augugaaaccuuuuuuaaga

SEQ ID NO: 2465292 - RNA, 22 nt, Human
augugaaacuggauuaaacuua

SEQ ID NO: 2465293 - RNA, 19 nt, Human
augugaaaccuuuuuuaag

SEQ ID NO: 2465294 - RNA, 18 nt, Human
augugaaaccuuuuuuaa

SEQ ID NO: 2465295 - RNA, 15 nt, Human
augugaaaccuuuuu

SEQ ID NO: 2465296 - RNA, 13 nt, Human
augugaaaccuuu

SEQ ID NO: 2465297 - RNA, 12 nt, Human
augugaaaccuu

SEQ ID NO: 2465298 - RNA, 15 nt, Human
augucuuuugaauau

SEQ ID NO: 2465299 - RNA, 15 nt, Human
augugaaacauguuu

SEQ ID NO: 2465300 - RNA, 20 nt, Human
augucuuuguuggaaaagaa

SEQ ID NO: 2465301 - RNA, 12 nt, Human
augugaaagcac

SEQ ID NO: 2465302 - RNA, 13 nt, Human
augugaacccggg

SEQ ID NO: 2465303 - RNA, 12 nt, Human
augugaagccaa

SEQ ID NO: 2465304 - RNA, 21 nt, Human
augugaagccaauucagacag

SEQ ID NO: 2465305 - RNA, 22 nt, Human
augugaagccaauucagacagg

SEQ ID NO: 2465306 - RNA, 15 nt, Human
augugaacuuuauua

SEQ ID NO: 2465307 - RNA, 16 nt, Human
augugaacccgggacg

SEQ ID NO: 2465308 - RNA, 17 nt, Human
augugaacuuuauuaaa

SEQ ID NO: 2465309 - RNA, 13 nt, Human
auggucagcuccc

SEQ ID NO: 2465310 - RNA, 12 nt, Human
auggucagcucc

SEQ ID NO: 2465311 - RNA, 20 nt, Human
auggucagcucccuucucug

SEQ ID NO: 2465312 - RNA, 22 nt, Human
auggucaucuuggagggaccaa

SEQ ID NO: 2465313 - RNA, 22 nt, Human
auggucaucuuuuucucuaaaa

SEQ ID NO: 2465314 - RNA, 12 nt, Human
augguccugggg

SEQ ID NO: 2465315 - RNA, 14 nt, Human
augguccuggggcu

SEQ ID NO: 2465316 - RNA, 17 nt, Human
augguccuggggcucug

SEQ ID NO: 2465317 - RNA, 19 nt, Human
augguccuggggcucugug

SEQ ID NO: 2465318 - RNA, 20 nt, Human
augguccuggggcucugugc

SEQ ID NO: 2465319 - RNA, 14 nt, Human
auggucgcccagga

SEQ ID NO: 2465320 - RNA, 15 nt, Human
auggucacacacuga

SEQ ID NO: 2465321 - RNA, 16 nt, Human
auggucacacacugau

SEQ ID NO: 2465322 - RNA, 18 nt, Human
auggucacacacugaugc

SEQ ID NO: 2465323 - RNA, 19 nt, Human
auggucacacacugaugcu

SEQ ID NO: 2465324 - RNA, 19 nt, Human
auggucaccaaaucagcug

SEQ ID NO: 2465325 - RNA, 17 nt, Human
auggucacgcaccuggg

SEQ ID NO: 2465326 - RNA, 20 nt, Human
auggucacacacugaugcuu

SEQ ID NO: 2465327 - RNA, 18 nt, Human
auggucagcccuagggug

SEQ ID NO: 2465328 - RNA, 19 nt, Human
auggucagcguugcauguc

SEQ ID NO: 2465329 - RNA, 18 nt, Human
auggucagcguugcaugu

SEQ ID NO: 2465330 - RNA, 16 nt, Human
auggucagcguugcau

SEQ ID NO: 2465331 - RNA, 19 nt, Human
augguauagcaaauguuuu

SEQ ID NO: 2465332 - RNA, 21 nt, Human
augguauauuugguacuguau

SEQ ID NO: 2465333 - RNA, 20 nt, Human
augguaugagcugagggggg

SEQ ID NO: 2465334 - RNA, 14 nt, Human
augguaugagcuga

SEQ ID NO: 2465335 - RNA, 14 nt, Human
auggucacacacug

SEQ ID NO: 2465336 - RNA, 20 nt, Human
auggucaacacuuaaggguu

SEQ ID NO: 2465337 - RNA, 19 nt, Human
augguauaaugguugacug

SEQ ID NO: 2465338 - RNA, 14 nt, Human
auguaagggaaacu

SEQ ID NO: 2465339 - RNA, 16 nt, Human
auguaagggaaacugc

SEQ ID NO: 2465340 - RNA, 15 nt, Human
auggucggaaaacau

SEQ ID NO: 2465341 - RNA, 15 nt, Human
auggucgcccaggag

SEQ ID NO: 2465342 - RNA, 16 nt, Human
auggucgcccaggaga

SEQ ID NO: 2465343 - RNA, 16 nt, Human
auguaagcugaaaaua

SEQ ID NO: 2465344 - RNA, 17 nt, Human
auguaagcugaaaauau

SEQ ID NO: 2465345 - RNA, 15 nt, Human
auguaagcuguuuau

SEQ ID NO: 2465346 - RNA, 14 nt, Human
auguaagcuguuua

SEQ ID NO: 2465347 - RNA, 22 nt, Human
auguaagcuguuuauuuuauau

SEQ ID NO: 2465348 - RNA, 19 nt, Human
auguaagggaaacugccag

SEQ ID NO: 2465349 - RNA, 15 nt, Human
auguaauuaaguacu

SEQ ID NO: 2465350 - RNA, 17 nt, Human
auguaauuaaguacuau

SEQ ID NO: 2465351 - RNA, 22 nt, Human
auguauugcacauuguaaaaag

SEQ ID NO: 2465352 - RNA, 17 nt, Human
auguauugcacauugua

SEQ ID NO: 2465353 - RNA, 16 nt, Human
auguauugcacauugu

SEQ ID NO: 2465354 - RNA, 14 nt, Human
auguauugauaaga

SEQ ID NO: 2465355 - RNA, 20 nt, Human
auguauucuagcuaauguaa

SEQ ID NO: 2465356 - RNA, 24 nt, Human
auguauucagcuuuaguagauauu

SEQ ID NO: 2465357 - RNA, 22 nt, Human
auguauuauuucauuauguaaa

SEQ ID NO: 2465358 - RNA, 15 nt, Human
auguauuauuucauu

SEQ ID NO: 2465359 - RNA, 19 nt, Human
auguauucuagcuaaugua

SEQ ID NO: 2465360 - RNA, 20 nt, Human
auguauuauucugcagcaug

SEQ ID NO: 2465361 - RNA, 23 nt, Human
auguaauuaaguacuauguauca

SEQ ID NO: 2465362 - RNA, 23 nt, Human
auguauuuuauuguaacagacau

SEQ ID NO: 2465363 - RNA, 20 nt, Human
auguauuuuauuguaacaga

SEQ ID NO: 2465364 - RNA, 16 nt, Human
auguauuuuauuguaa

SEQ ID NO: 2465365 - RNA, 15 nt, Human
auguauuuuauugua

SEQ ID NO: 2465366 - RNA, 14 nt, Human
auguauuuuauugu

SEQ ID NO: 2465367 - RNA, 14 nt, Human
auguauuuguuugc

SEQ ID NO: 2465368 - RNA, 16 nt, Human
auguauuggccuggag

SEQ ID NO: 2465369 - RNA, 15 nt, Human
auguauuggccugga

SEQ ID NO: 2465370 - RNA, 13 nt, Human
auguauuggccug

SEQ ID NO: 2465371 - RNA, 17 nt, Human
auguauuuuuguacccu

SEQ ID NO: 2465372 - RNA, 14 nt, Human
augaggcauuuggc

SEQ ID NO: 2465373 - RNA, 13 nt, Human
augaggcagagga

SEQ ID NO: 2465374 - RNA, 21 nt, Human
augaggcaaugucaggaacag

SEQ ID NO: 2465375 - RNA, 22 nt, Human
augaggaugcagagucagcaga

SEQ ID NO: 2465376 - RNA, 18 nt, Human
augaggcaaugucaggaa

SEQ ID NO: 2465377 - RNA, 13 nt, Human
augaggacauguu

SEQ ID NO: 2465378 - RNA, 14 nt, Human
augaggaguugcug

SEQ ID NO: 2465379 - RNA, 20 nt, Human
augaggaugcagagucagca

SEQ ID NO: 2465380 - RNA, 21 nt, Human
augaggaugcagagucagcag

SEQ ID NO: 2465381 - RNA, 12 nt, Human
augaggaaugua

SEQ ID NO: 2465382 - RNA, 23 nt, Human
augaggaauaauuauuuauuuaa

SEQ ID NO: 2465383 - RNA, 14 nt, Human
augaggaauaauua

SEQ ID NO: 2465384 - RNA, 22 nt, Human
augagcucuacccagggccugc

SEQ ID NO: 2465385 - RNA, 17 nt, Human
augaggaauguauaugu

SEQ ID NO: 2465386 - RNA, 15 nt, Human
augaggaauguauau

SEQ ID NO: 2465387 - RNA, 14 nt, Human
augaggaggaagga

SEQ ID NO: 2465388 - RNA, 23 nt, Human
augaccuuucaauaggaaaaacu

SEQ ID NO: 2465389 - RNA, 22 nt, Human
augaccuuucaauaggaaaaac

SEQ ID NO: 2465390 - RNA, 21 nt, Human
augaccuuucaauaggaaaaa

SEQ ID NO: 2465391 - RNA, 15 nt, Human
augagcucuacccag

SEQ ID NO: 2465392 - RNA, 16 nt, Human
augagcucuacccagg

SEQ ID NO: 2465393 - RNA, 18 nt, Human
augagcucuacccagggc

SEQ ID NO: 2465394 - RNA, 19 nt, Human
augagcucuacccagggcc

SEQ ID NO: 2465395 - RNA, 21 nt, Human
augagcucgcauuugucaaug

SEQ ID NO: 2465396 - RNA, 22 nt, Human
augagcucgcauuugucaauga

SEQ ID NO: 2465397 - RNA, 21 nt, Human
augagcuccagacccccagca

SEQ ID NO: 2465398 - RNA, 22 nt, Human
augagcuccagacccccagcaa

SEQ ID NO: 2465399 - RNA, 14 nt, Human
augagcuccucuuc

SEQ ID NO: 2465400 - RNA, 22 nt, Human
augagcuccucuuccuggcuuc

SEQ ID NO: 2465401 - RNA, 14 nt, Human
augagcuccagacc

SEQ ID NO: 2465402 - RNA, 15 nt, Human
augagcuccagaccc

SEQ ID NO: 2465403 - RNA, 16 nt, Human
augagcuccagacccc

SEQ ID NO: 2465404 - RNA, 17 nt, Human
augagcuccagaccccc

SEQ ID NO: 2465405 - RNA, 20 nt, Human
augagcuccagacccccagc

SEQ ID NO: 2465406 - RNA, 13 nt, Human
augaaagacugua

SEQ ID NO: 2465407 - RNA, 16 nt, Human
augaaagacuguacaa

SEQ ID NO: 2465408 - RNA, 17 nt, Human
augaaagacuguacaaa

SEQ ID NO: 2465409 - RNA, 19 nt, Human
augaaagacuguacaaagu

SEQ ID NO: 2465410 - RNA, 14 nt, Human
augaaaaagcaugu

SEQ ID NO: 2465411 - RNA, 20 nt, Human
augaaaaacaaaaauaacau

SEQ ID NO: 2465412 - RNA, 16 nt, Human
augaaaaaauguauau

SEQ ID NO: 2465413 - RNA, 23 nt, Human
augaaaaaauauauaucaaauau

SEQ ID NO: 2465414 - RNA, 18 nt, Human
augaaaaagcauguacag

SEQ ID NO: 2465415 - RNA, 16 nt, Human
augaaaaagcauguac

SEQ ID NO: 2465416 - RNA, 15 nt, Human
augaaaaagcaugua

SEQ ID NO: 2465417 - RNA, 21 nt, Human
augaaaaagcauguacagugu

SEQ ID NO: 2465418 - RNA, 19 nt, Human
augaaaaagcauguacagu

SEQ ID NO: 2465419 - RNA, 13 nt, Human
augaaaaauagca

SEQ ID NO: 2465420 - RNA, 16 nt, Human
augaaaaauuuaagca

SEQ ID NO: 2465421 - RNA, 17 nt, Human
augaaaaauuuaagcau

SEQ ID NO: 2465422 - RNA, 18 nt, Human
augaaaaauuuaagcauu

SEQ ID NO: 2465423 - RNA, 13 nt, Human
augaaaaauauga

SEQ ID NO: 2465424 - RNA, 13 nt, Human
augaaaaauucuc

SEQ ID NO: 2465425 - RNA, 20 nt, Human
augaaguuugaauguuaaau

SEQ ID NO: 2465426 - RNA, 19 nt, Human
augaaguuugaauguuaaa

SEQ ID NO: 2465427 - RNA, 14 nt, Human
augaaguuuuacau

SEQ ID NO: 2465428 - RNA, 16 nt, Human
augaaguuuuacauug

SEQ ID NO: 2465429 - RNA, 19 nt, Human
augaaguuuuuuuuauaca

SEQ ID NO: 2465430 - RNA, 18 nt, Human
augaaguuugaauguuaa

SEQ ID NO: 2465431 - RNA, 16 nt, Human
augaaguuugaauguu

SEQ ID NO: 2465432 - RNA, 15 nt, Human
augaaguuugaaugu

SEQ ID NO: 2465433 - RNA, 14 nt, Human
augaaguuugaaug

SEQ ID NO: 2465434 - RNA, 19 nt, Human
augaaguuugaacuucaua

SEQ ID NO: 2465435 - RNA, 18 nt, Human
augaaguuugaacuucau

SEQ ID NO: 2465436 - RNA, 13 nt, Human
augaaguuugaau

SEQ ID NO: 2465437 - RNA, 23 nt, Human
augaaguuuccuuggcuggugca

SEQ ID NO: 2465438 - RNA, 22 nt, Human
augaagcuuuuaugugaaacau

SEQ ID NO: 2465439 - RNA, 21 nt, Human
augaaggagaggcaacaucca

SEQ ID NO: 2465440 - RNA, 19 nt, Human
augaaaaauuuaagcauug

SEQ ID NO: 2465441 - RNA, 20 nt, Human
augaaaaauuuaagcauugu

SEQ ID NO: 2465442 - RNA, 22 nt, Human
augaaggcagaaaaaugucauu

SEQ ID NO: 2465443 - RNA, 16 nt, Human
augaaggcaaaaaaau

SEQ ID NO: 2465444 - RNA, 20 nt, Human
augaagguuaggauuuaaca

SEQ ID NO: 2465445 - RNA, 16 nt, Human
augaagguuaggauuu

SEQ ID NO: 2465446 - RNA, 18 nt, Human
augaaggugucauacaga

SEQ ID NO: 2465447 - RNA, 17 nt, Human
augaagggaaaggauau

SEQ ID NO: 2465448 - RNA, 22 nt, Human
augaagguuaggauuuaacagu

SEQ ID NO: 2465449 - RNA, 21 nt, Human
augaagguuaggauuuaacag

SEQ ID NO: 2465450 - RNA, 17 nt, Human
augaagguuucugaaaa

SEQ ID NO: 2465451 - RNA, 19 nt, Human
augaagguuucugaaaauu

SEQ ID NO: 2465452 - RNA, 17 nt, Human
aucuugaauuguaagga

SEQ ID NO: 2465453 - RNA, 16 nt, Human
aucuugaauuguaacu

SEQ ID NO: 2465454 - RNA, 18 nt, Human
aucuugaauaauguaaga

SEQ ID NO: 2465455 - RNA, 22 nt, Human
aucuucugaacuuggcgcugcc

SEQ ID NO: 2465456 - RNA, 11 nt, Human
aucugggaaag

SEQ ID NO: 2465457 - RNA, 16 nt, Human
aucugggaagauuucu

SEQ ID NO: 2465458 - RNA, 21 nt, Human
aucuucugccuuagucucagu

SEQ ID NO: 2465459 - RNA, 14 nt, Human
aucuucugccuucu

SEQ ID NO: 2465460 - RNA, 17 nt, Human
aucuucugcaauugcuu

SEQ ID NO: 2465461 - RNA, 14 nt, Human
aucugggaaagaca

SEQ ID NO: 2465462 - RNA, 16 nt, Human
aucugggacccuuucc

SEQ ID NO: 2465463 - RNA, 22 nt, Human
aucugggaaaauaccccaucau

SEQ ID NO: 2465464 - RNA, 18 nt, Human
aucuugaagacuuuucuu

SEQ ID NO: 2465465 - RNA, 20 nt, Human
aucuucuuaugcaauuuccu

SEQ ID NO: 2465466 - RNA, 14 nt, Human
aucuucuucaccau

SEQ ID NO: 2465467 - RNA, 12 nt, Human
aucuugaaggaa

SEQ ID NO: 2465468 - RNA, 16 nt, Human
aucuucugccuucuca

SEQ ID NO: 2465469 - RNA, 18 nt, Human
aucuucugccuucucaug

SEQ ID NO: 2465470 - RNA, 20 nt, Human
aucuucuggagucuccagug

SEQ ID NO: 2465471 - RNA, 18 nt, Human
aucuucuggagucuccag

SEQ ID NO: 2465472 - RNA, 17 nt, Human
aucuucuuaugcaauuu

SEQ ID NO: 2465473 - RNA, 14 nt, Human
aucuucuuuauaau

SEQ ID NO: 2465474 - RNA, 20 nt, Human
aucuaucugcuuaugcaguu

SEQ ID NO: 2465475 - RNA, 19 nt, Human
aucuaucugcuuaugcagu

SEQ ID NO: 2465476 - RNA, 19 nt, Human
aucuaucucaucuaucuca

SEQ ID NO: 2465477 - RNA, 22 nt, Human
aucuaucaauagucaagaaaaa

SEQ ID NO: 2465478 - RNA, 20 nt, Human
aucuaucaauagucaagaaa

SEQ ID NO: 2465479 - RNA, 17 nt, Human
aucuaucaauagucaag

SEQ ID NO: 2465480 - RNA, 15 nt, Human
aucuaucaauaguca

SEQ ID NO: 2465481 - RNA, 23 nt, Human
aucuauucucuccaaaaaugcac

SEQ ID NO: 2465482 - RNA, 21 nt, Human
aucucccccagccccauccuc

SEQ ID NO: 2465483 - RNA, 21 nt, Human
aucucccucacugaaaccagg

SEQ ID NO: 2465484 - RNA, 15 nt, Human
aucucccgcugcugc

SEQ ID NO: 2465485 - RNA, 23 nt, Human
aucuccccuugcacuaaaguaug

SEQ ID NO: 2465486 - RNA, 15 nt, Human
aucucccugccgccu

SEQ ID NO: 2465487 - RNA, 19 nt, Human
aucucccugccgccucaau

SEQ ID NO: 2465488 - RNA, 12 nt, Human
aucucccugccg

SEQ ID NO: 2465489 - RNA, 14 nt, Human
aucucccucccaca

SEQ ID NO: 2465490 - RNA, 19 nt, Human
aucuaugccaaagaucacu

SEQ ID NO: 2465491 - RNA, 17 nt, Human
aucuaugccaaagauca

SEQ ID NO: 2465492 - RNA, 17 nt, Human
aucuauggucgggagac

SEQ ID NO: 2465493 - RNA, 16 nt, Human
aucuaugcauuuucug

SEQ ID NO: 2465494 - RNA, 18 nt, Human
aucuaugcauuuucugga

SEQ ID NO: 2465495 - RNA, 20 nt, Human
aucuaugaaguauauaaugg

SEQ ID NO: 2465496 - RNA, 19 nt, Human
aucuaugaaguauauaaug

SEQ ID NO: 2465497 - RNA, 18 nt, Human
aucuaugaaguauauaau

SEQ ID NO: 2465498 - RNA, 15 nt, Human
aucuaugaaguauau

SEQ ID NO: 2465499 - RNA, 18 nt, Human
aucuaucuuauauaguuu

SEQ ID NO: 2465500 - RNA, 17 nt, Human
aucuauucagacaagca

SEQ ID NO: 2465501 - RNA, 15 nt, Human
aucuauucagacaag

SEQ ID NO: 2465502 - RNA, 18 nt, Human
aucuauuauacuguauua

SEQ ID NO: 2465503 - RNA, 17 nt, Human
aucuauuauacuguauu

SEQ ID NO: 2465504 - RNA, 22 nt, Human
aucuauucagacaagcaacagg

SEQ ID NO: 2465505 - RNA, 21 nt, Human
aucuauucagacaagcaacag

SEQ ID NO: 2465506 - RNA, 19 nt, Human
aucuauuccugguagaaua

SEQ ID NO: 2465507 - RNA, 16 nt, Human
aucuauuauacuguau

SEQ ID NO: 2465508 - RNA, 14 nt, Human
aucuauuauacugu

SEQ ID NO: 2465509 - RNA, 21 nt, Human
aucuaugccaaagaucacuug

SEQ ID NO: 2465510 - RNA, 17 nt, Human
aucuggcaacaucuuua

SEQ ID NO: 2465511 - RNA, 19 nt, Human
aucuggacuccucugucca

SEQ ID NO: 2465512 - RNA, 23 nt, Human
aucuggccguugauguuggcugg

SEQ ID NO: 2465513 - RNA, 21 nt, Human
aucuggaccccaucugugaau

SEQ ID NO: 2465514 - RNA, 12 nt, Human
aucuggcagggu

SEQ ID NO: 2465515 - RNA, 18 nt, Human
aucuggacuccucugucc

SEQ ID NO: 2465516 - RNA, 17 nt, Human
aucuggacuccucuguc

SEQ ID NO: 2465517 - RNA, 16 nt, Human
aucuggacuccucugu

SEQ ID NO: 2465518 - RNA, 15 nt, Human
aucuggacuccucug

SEQ ID NO: 2465519 - RNA, 18 nt, Human
aucuggaaccaucagaaa

SEQ ID NO: 2465520 - RNA, 11 nt, Human
aucuggaaccc

SEQ ID NO: 2465521 - RNA, 14 nt, Human
aucuggaacccaga

SEQ ID NO: 2465522 - RNA, 15 nt, Human
aucuggaacccagac

SEQ ID NO: 2465523 - RNA, 16 nt, Human
aucuggaacccagacu

SEQ ID NO: 2465524 - RNA, 17 nt, Human
aucuggaacccagacuc

SEQ ID NO: 2465525 - RNA, 18 nt, Human
aucuggaacccagacuca

SEQ ID NO: 2465526 - RNA, 22 nt, Human
aucuggaccccaucugugaaua

SEQ ID NO: 2465527 - RNA, 12 nt, Human
aucugcuucagu

SEQ ID NO: 2465528 - RNA, 14 nt, Human
aucugcuucagugg

SEQ ID NO: 2465529 - RNA, 21 nt, Human
aucugcuuacaauucccugcu

SEQ ID NO: 2465530 - RNA, 19 nt, Human
aucugcuuacaauucccug

SEQ ID NO: 2465531 - RNA, 15 nt, Human
aucugcuuaugcagu

SEQ ID NO: 2465532 - RNA, 22 nt, Human
aucugcuuuuuaaagaaugcuc

SEQ ID NO: 2465533 - RNA, 18 nt, Human
aucucugugccuucgucu

SEQ ID NO: 2465534 - RNA, 15 nt, Human
aucucugugccuucg

SEQ ID NO: 2465535 - RNA, 14 nt, Human
aucucugugccuuc

SEQ ID NO: 2465536 - RNA, 13 nt, Human
aucucugugccuu

SEQ ID NO: 2465537 - RNA, 15 nt, Human
aucucugugugcaca

SEQ ID NO: 2465538 - RNA, 17 nt, Human
aucucugugugcacaaa

SEQ ID NO: 2465539 - RNA, 19 nt, Human
aucucugugugcacaaaua

SEQ ID NO: 2465540 - RNA, 13 nt, Human
aucucguuucaaa

SEQ ID NO: 2465541 - RNA, 15 nt, Human
aucucgugggagagc

SEQ ID NO: 2465542 - RNA, 17 nt, Human
aucucugcuuuggaaau

SEQ ID NO: 2465543 - RNA, 16 nt, Human
aucucggcucacugca

SEQ ID NO: 2465544 - RNA, 14 nt, Human
aucucgugggagag

SEQ ID NO: 2465545 - RNA, 14 nt, Human
aucucggcucacug

SEQ ID NO: 2465546 - RNA, 15 nt, Human
aucucggcucacugc

SEQ ID NO: 2465547 - RNA, 19 nt, Human
aucuccugugcauggguga

SEQ ID NO: 2465548 - RNA, 15 nt, Human
aucuccuuucaggga

SEQ ID NO: 2465549 - RNA, 20 nt, Human
aucucgccaccccuccuucc

SEQ ID NO: 2465550 - RNA, 21 nt, Human
aucucgccaccccuccuuccu

SEQ ID NO: 2465551 - RNA, 14 nt, Human
aucuccugugcaug

SEQ ID NO: 2465552 - RNA, 15 nt, Human
aucuccugugcaugg

SEQ ID NO: 2465553 - RNA, 18 nt, Human
aucuccugugcaugggug

SEQ ID NO: 2465554 - RNA, 19 nt, Human
auccucccaccucagccuc

SEQ ID NO: 2465555 - RNA, 18 nt, Human
auccucccaccucagccu

SEQ ID NO: 2465556 - RNA, 23 nt, Human
auccuccagguuuuucaauuaaa

SEQ ID NO: 2465557 - RNA, 20 nt, Human
auccucccaccucagccucc

SEQ ID NO: 2465558 - RNA, 19 nt, Human
aucggcccacagcucccac

SEQ ID NO: 2465559 - RNA, 20 nt, Human
aucggcccacagcucccacc

SEQ ID NO: 2465560 - RNA, 21 nt, Human
aucggaucuggggcucuggga

SEQ ID NO: 2465561 - RNA, 23 nt, Human
aucggaggcuugucagagcuggg

SEQ ID NO: 2465562 - RNA, 18 nt, Human
aucggaggcuugucagag

SEQ ID NO: 2465563 - RNA, 20 nt, Human
aucggaggcuugucagagcu

SEQ ID NO: 2465564 - RNA, 21 nt, Human
aucggaggcuugucagagcug

SEQ ID NO: 2465565 - RNA, 22 nt, Human
aucggaggcuugucagagcugg

SEQ ID NO: 2465566 - RNA, 22 nt, Human
aucgcuguguguuaguucccaa

SEQ ID NO: 2465567 - RNA, 23 nt, Human
aucgcuguguguuaguucccaac

SEQ ID NO: 2465568 - RNA, 17 nt, Human
aucgcuucauguaacua

SEQ ID NO: 2465569 - RNA, 15 nt, Human
aucggagccuccucu

SEQ ID NO: 2465570 - RNA, 16 nt, Human
aucggagccuccucuc

SEQ ID NO: 2465571 - RNA, 18 nt, Human
aucggaagcagugccuuc

SEQ ID NO: 2465572 - RNA, 13 nt, Human
aucggagacagug

SEQ ID NO: 2465573 - RNA, 14 nt, Human
aucggaagcagugc

SEQ ID NO: 2465574 - RNA, 22 nt, Human
aucggaagcagugccuuccaua

SEQ ID NO: 2465575 - RNA, 14 nt, Human
aucccauuuaaaaa

SEQ ID NO: 2465576 - RNA, 15 nt, Human
auccaggcagaucca

SEQ ID NO: 2465577 - RNA, 16 nt, Human
auccaggcagauccag

SEQ ID NO: 2465578 - RNA, 14 nt, Human
auccaggcagaucc

SEQ ID NO: 2465579 - RNA, 13 nt, Human
auccccaagccug

SEQ ID NO: 2465580 - RNA, 14 nt, Human
aucccauugcccug

SEQ ID NO: 2465581 - RNA, 16 nt, Human
aucccauugcccuggu

SEQ ID NO: 2465582 - RNA, 17 nt, Human
aucccauugcccugguu

SEQ ID NO: 2465583 - RNA, 15 nt, Human
aucccauuuaaaaaa

SEQ ID NO: 2465584 - RNA, 14 nt, Human
auccagcuggugag

SEQ ID NO: 2465585 - RNA, 22 nt, Human
auccagcuccccuucugaauca

SEQ ID NO: 2465586 - RNA, 13 nt, Human
auccagaaagaaa

SEQ ID NO: 2465587 - RNA, 14 nt, Human
auccagaaagaaaa

SEQ ID NO: 2465588 - RNA, 15 nt, Human
auccagaaagaaaaa

SEQ ID NO: 2465589 - RNA, 15 nt, Human
auccagcuauguuau

SEQ ID NO: 2465590 - RNA, 20 nt, Human
auccagaauugaccuuuuga

SEQ ID NO: 2465591 - RNA, 22 nt, Human
auccaggacuauauuugggccu

SEQ ID NO: 2465592 - RNA, 23 nt, Human
auccaggacuauauuugggccug

SEQ ID NO: 2465593 - RNA, 15 nt, Human
auccaggacucuguc

SEQ ID NO: 2465594 - RNA, 13 nt, Human
auccaggacucug

SEQ ID NO: 2465595 - RNA, 16 nt, Human
auccagaaagaaaacu

SEQ ID NO: 2465596 - RNA, 18 nt, Human
auccagaaagaaaacuug

SEQ ID NO: 2465597 - RNA, 15 nt, Human
auccagacccggcug

SEQ ID NO: 2465598 - RNA, 23 nt, Human
auccuccaggugcacaagcucca

SEQ ID NO: 2465599 - RNA, 23 nt, Human
auccuccagcuucugguacucuc

SEQ ID NO: 2465600 - RNA, 14 nt, Human
auccuccagguuuu

SEQ ID NO: 2465601 - RNA, 13 nt, Human
auccuccagguuu

SEQ ID NO: 2465602 - RNA, 12 nt, Human
auccuccagguu

SEQ ID NO: 2465603 - RNA, 22 nt, Human
auccuccagguuuuucaauuaa

SEQ ID NO: 2465604 - RNA, 21 nt, Human
auccuccagguuuuucaauua

SEQ ID NO: 2465605 - RNA, 20 nt, Human
auccuccagguuuuucaauu

SEQ ID NO: 2465606 - RNA, 19 nt, Human
auccuccagguuuuucaau

SEQ ID NO: 2465607 - RNA, 18 nt, Human
auccuccagguuuuucaa

SEQ ID NO: 2465608 - RNA, 17 nt, Human
auccuccagguuuuuca

SEQ ID NO: 2465609 - RNA, 16 nt, Human
auccuccagguuuuuc

SEQ ID NO: 2465610 - RNA, 15 nt, Human
auccuccagguuuuu

SEQ ID NO: 2465611 - RNA, 15 nt, Human
auccucccaccucag

SEQ ID NO: 2465612 - RNA, 11 nt, Human
auccuccaggu

SEQ ID NO: 2465613 - RNA, 14 nt, Human
auccuccagcuucu

SEQ ID NO: 2465614 - RNA, 13 nt, Human
auccuccagcuuc

SEQ ID NO: 2465615 - RNA, 12 nt, Human
auccuccagcuu

SEQ ID NO: 2465616 - RNA, 11 nt, Human
auccuccagcu

SEQ ID NO: 2465617 - RNA, 13 nt, Human
auccuccagcagg

SEQ ID NO: 2465618 - RNA, 15 nt, Human
auccuccagcaggga

SEQ ID NO: 2465619 - RNA, 11 nt, Human
auccuccagca

SEQ ID NO: 2465620 - RNA, 23 nt, Human
auccuccaacuucauuugaugcu

SEQ ID NO: 2465621 - RNA, 21 nt, Human
auccucauauggcccaguguc

SEQ ID NO: 2465622 - RNA, 20 nt, Human
auccucauauggcccagugu

SEQ ID NO: 2465623 - RNA, 16 nt, Human
auccucauauggccca

SEQ ID NO: 2465624 - RNA, 21 nt, Human
auccucaaacacugcaggcau

SEQ ID NO: 2465625 - RNA, 19 nt, Human
auccuccacguucugcuca

SEQ ID NO: 2465626 - RNA, 23 nt, Human
auccucauuugggguagcuagag

SEQ ID NO: 2465627 - RNA, 12 nt, Human
auccuauguuuu

SEQ ID NO: 2465628 - RNA, 16 nt, Human
auccuaugugauuuua

SEQ ID NO: 2465629 - RNA, 17 nt, Human
auccuaugugauuuuaa

SEQ ID NO: 2465630 - RNA, 20 nt, Human
auccuauguuuuuguucaaa

SEQ ID NO: 2465631 - RNA, 18 nt, Human
auccuauucucaccagga

SEQ ID NO: 2465632 - RNA, 23 nt, Human
auccuaugugauuuuaacucugu

SEQ ID NO: 2465633 - RNA, 18 nt, Human
auccccuggacugggagg

SEQ ID NO: 2465634 - RNA, 12 nt, Human
auccuaugugau

SEQ ID NO: 2465635 - RNA, 14 nt, Human
auccuaugugauuu

SEQ ID NO: 2465636 - RNA, 21 nt, Human
auccccuucucaucacucccc

SEQ ID NO: 2465637 - RNA, 19 nt, Human
auccucaaacacugcaggc

SEQ ID NO: 2465638 - RNA, 17 nt, Human
auccucaaacacugcag

SEQ ID NO: 2465639 - RNA, 16 nt, Human
auccucaaacacugca

SEQ ID NO: 2465640 - RNA, 15 nt, Human
auccucaaacacugc

SEQ ID NO: 2465641 - RNA, 20 nt, Human
auccuauucucaccaggaag

SEQ ID NO: 2465642 - RNA, 22 nt, Human
auccccgcagugugcacuaagg

SEQ ID NO: 2465643 - RNA, 18 nt, Human
auccccgcagugugcacu

SEQ ID NO: 2465644 - RNA, 15 nt, Human
auccccucccuguca

SEQ ID NO: 2465645 - RNA, 13 nt, Human
auccccucccagu

SEQ ID NO: 2465646 - RNA, 13 nt, Human
auccccucaggac

SEQ ID NO: 2465647 - RNA, 15 nt, Human
auccccuguagagug

SEQ ID NO: 2465648 - RNA, 15 nt, Human
auccccucucccccc

SEQ ID NO: 2465649 - RNA, 15 nt, Human
auccccuccuugggc

SEQ ID NO: 2465650 - RNA, 14 nt, Human
auccccuccuuggg

SEQ ID NO: 2465651 - RNA, 19 nt, Human
auccccucccugucaaagc

SEQ ID NO: 2465652 - RNA, 23 nt, Human
auccccucuccccccccccucca

SEQ ID NO: 2465653 - RNA, 12 nt, Human
aucacagggcag

SEQ ID NO: 2465654 - RNA, 15 nt, Human
aucacagggcagagc

SEQ ID NO: 2465655 - RNA, 16 nt, Human
aucacagcugcuuucu

SEQ ID NO: 2465656 - RNA, 22 nt, Human
aucacagcuucagccaggagcu

SEQ ID NO: 2465657 - RNA, 21 nt, Human
aucacagcuucagccaggagc

SEQ ID NO: 2465658 - RNA, 21 nt, Human
aucacagccucugaaaaccaa

SEQ ID NO: 2465659 - RNA, 12 nt, Human
aucacagcugcu

SEQ ID NO: 2465660 - RNA, 18 nt, Human
aucacagcuucagccagg

SEQ ID NO: 2465661 - RNA, 14 nt, Human
aucacagcuucagc

SEQ ID NO: 2465662 - RNA, 23 nt, Human
aucacccgcuaagagggagggag

SEQ ID NO: 2465663 - RNA, 19 nt, Human
aucaccaacgucugugcca

SEQ ID NO: 2465664 - RNA, 18 nt, Human
aucaccaacgucugugcc

SEQ ID NO: 2465665 - RNA, 15 nt, Human
aucacauguggacuu

SEQ ID NO: 2465666 - RNA, 19 nt, Human
aucacagggcagagccggg

SEQ ID NO: 2465667 - RNA, 14 nt, Human
aucacauguauguu

SEQ ID NO: 2465668 - RNA, 20 nt, Human
aucacagggcagagccggga

SEQ ID NO: 2465669 - RNA, 17 nt, Human
auauuuauuuauuuauu

SEQ ID NO: 2465670 - RNA, 15 nt, Human
auauuuauuuuaaua

SEQ ID NO: 2465671 - RNA, 14 nt, Human
auauuuauuuuaau

SEQ ID NO: 2465672 - RNA, 17 nt, Human
auauuuauuuuaauaau

SEQ ID NO: 2465673 - RNA, 23 nt, Human
auauuuauuguuuauuuaucagu

SEQ ID NO: 2465674 - RNA, 21 nt, Human
auauuuauugcuuuauaaaua

SEQ ID NO: 2465675 - RNA, 18 nt, Human
auauuuauugcuuuauaa

SEQ ID NO: 2465676 - RNA, 14 nt, Human
auauuuauugugcu

SEQ ID NO: 2465677 - RNA, 22 nt, Human
auauuuauuguuuauuuaucag

SEQ ID NO: 2465678 - RNA, 19 nt, Human
aucagcacgauuucuguuu

SEQ ID NO: 2465679 - RNA, 20 nt, Human
aucagcacgauuucuguuua

SEQ ID NO: 2465680 - RNA, 19 nt, Human
aucacccuuaccaugugcc

SEQ ID NO: 2465681 - RNA, 23 nt, Human
aucacccuuaccaugugccugau

SEQ ID NO: 2465682 - RNA, 12 nt, Human
aucagccaauua

SEQ ID NO: 2465683 - RNA, 23 nt, Human
aucagcacgauuucuguuuagau

SEQ ID NO: 2465684 - RNA, 21 nt, Human
aucaccgaaaacguggcugcu

SEQ ID NO: 2465685 - RNA, 19 nt, Human
aucaccgaaaacguggcug

SEQ ID NO: 2465686 - RNA, 14 nt, Human
aucaccgaaaacgu

SEQ ID NO: 2465687 - RNA, 22 nt, Human
aucacauuauuugcauguuacc

SEQ ID NO: 2465688 - RNA, 17 nt, Human
aucacauguauguuuug

SEQ ID NO: 2465689 - RNA, 16 nt, Human
aucacauguauguuuu

SEQ ID NO: 2465690 - RNA, 15 nt, Human
aucacauuauuugca

SEQ ID NO: 2465691 - RNA, 16 nt, Human
aucacauuauuugcau

SEQ ID NO: 2465692 - RNA, 21 nt, Human
aucagccugucucuuccauau

SEQ ID NO: 2465693 - RNA, 19 nt, Human
aucagccugucucuuccau

SEQ ID NO: 2465694 - RNA, 18 nt, Human
aucagccugucucuucca

SEQ ID NO: 2465695 - RNA, 20 nt, Human
aucagccugcuccagcuguu

SEQ ID NO: 2465696 - RNA, 14 nt, Human
aucagccugucucu

SEQ ID NO: 2465697 - RNA, 19 nt, Human
aucagccugcuccagcugu

SEQ ID NO: 2465698 - RNA, 17 nt, Human
aucagccugcuccagcu

SEQ ID NO: 2465699 - RNA, 18 nt, Human
aucagccugcuccagcug

SEQ ID NO: 2465700 - RNA, 14 nt, Human
aucagccugugcca

SEQ ID NO: 2465701 - RNA, 23 nt, Human
aucagcggccccuugacucuggg

SEQ ID NO: 2465702 - RNA, 15 nt, Human
aucagcuauuuacug

SEQ ID NO: 2465703 - RNA, 14 nt, Human
aucagcuauuuacu

SEQ ID NO: 2465704 - RNA, 21 nt, Human
aucagcugcugaaacaacaaa

SEQ ID NO: 2465705 - RNA, 13 nt, Human
aucagcuccuucc

SEQ ID NO: 2465706 - RNA, 15 nt, Human
aucagcuccuuccug

SEQ ID NO: 2465707 - RNA, 18 nt, Human
aucagcuccacuuucagu

SEQ ID NO: 2465708 - RNA, 16 nt, Human
aucaugugaaaucauu

SEQ ID NO: 2465709 - RNA, 14 nt, Human
aucaugugaaauca

SEQ ID NO: 2465710 - RNA, 21 nt, Human
aucaugugaacccgggacgca

SEQ ID NO: 2465711 - RNA, 20 nt, Human
aucauguguaaucaauaaac

SEQ ID NO: 2465712 - RNA, 19 nt, Human
aucauguguaaucaauaaa

SEQ ID NO: 2465713 - RNA, 15 nt, Human
aucauguguaaucaa

SEQ ID NO: 2465714 - RNA, 13 nt, Human
aucauguguaauc

SEQ ID NO: 2465715 - RNA, 21 nt, Human
aucauguguaaucaauaaacg

SEQ ID NO: 2465716 - RNA, 22 nt, Human
aucagcugcugaaacaacaaau

SEQ ID NO: 2465717 - RNA, 23 nt, Human
aucagcugcugaaacaacaaaua

SEQ ID NO: 2465718 - RNA, 15 nt, Human
aucaugugaaaucau

SEQ ID NO: 2465719 - RNA, 17 nt, Human
aucagcuccuuccugga

SEQ ID NO: 2465720 - RNA, 22 nt, Human
aucagcuggucaaacaaacucu

SEQ ID NO: 2465721 - RNA, 20 nt, Human
cugggcaccggggccucgga

SEQ ID NO: 2465722 - RNA, 12 nt, Human
cugggcagaagg

SEQ ID NO: 2465723 - RNA, 20 nt, Human
cugggcaccuggggaguggg

SEQ ID NO: 2465724 - RNA, 16 nt, Human
cugggcaccuggggag

SEQ ID NO: 2465725 - RNA, 17 nt, Human
cugggcaccuggggagu

SEQ ID NO: 2465726 - RNA, 19 nt, Human
cugggcaccuggggagugg

SEQ ID NO: 2465727 - RNA, 15 nt, Human
cugggcagaaggaag

SEQ ID NO: 2465728 - RNA, 14 nt, Human
cugggcauugcuuu

SEQ ID NO: 2465729 - RNA, 16 nt, Human
cugggcauugcuuucc

SEQ ID NO: 2465730 - RNA, 17 nt, Human
cugggcauugcuuucca

SEQ ID NO: 2465731 - RNA, 12 nt, Human
cugggccagaau

SEQ ID NO: 2465732 - RNA, 18 nt, Human
cugggccacuucugggug

SEQ ID NO: 2465733 - RNA, 21 nt, Human
cugggccaaguuccucuagug

SEQ ID NO: 2465734 - RNA, 19 nt, Human
cugggccaacucaccugag

SEQ ID NO: 2465735 - RNA, 15 nt, Human
cugggccaaguuccu

SEQ ID NO: 2465736 - RNA, 18 nt, Human
cugggccaaguuccucua

SEQ ID NO: 2465737 - RNA, 20 nt, Human
cugggccaaguuccucuagu

SEQ ID NO: 2465738 - RNA, 13 nt, Human
cugggccagagua

SEQ ID NO: 2465739 - RNA, 12 nt, Human
cugggcauuuuc

SEQ ID NO: 2465740 - RNA, 14 nt, Human
cugggccagaauuu

SEQ ID NO: 2465741 - RNA, 14 nt, Human
cuggggagaaagua

SEQ ID NO: 2465742 - RNA, 16 nt, Human
cuggggaugucucuca

SEQ ID NO: 2465743 - RNA, 17 nt, Human
cuggggaugucucucau

SEQ ID NO: 2465744 - RNA, 21 nt, Human
cuggggcacuuggcagcgcgg

SEQ ID NO: 2465745 - RNA, 20 nt, Human
cuggggagugggacagaguc

SEQ ID NO: 2465746 - RNA, 15 nt, Human
cuggggagcccgucu

SEQ ID NO: 2465747 - RNA, 12 nt, Human
cuggggagcccg

SEQ ID NO: 2465748 - RNA, 20 nt, Human
cuggggagcccgucucagug

SEQ ID NO: 2465749 - RNA, 17 nt, Human
cuggggagugggacaga

SEQ ID NO: 2465750 - RNA, 20 nt, Human
cuggguucacugcaaccucc

SEQ ID NO: 2465751 - RNA, 18 nt, Human
cuggguucacugcaaccu

SEQ ID NO: 2465752 - RNA, 18 nt, Human
cuggguucagaaaugcug

SEQ ID NO: 2465753 - RNA, 22 nt, Human
cugggugggugguggggagggg

SEQ ID NO: 2465754 - RNA, 20 nt, Human
cugggugggugguggggagg

SEQ ID NO: 2465755 - RNA, 19 nt, Human
cugggugggugguggggag

SEQ ID NO: 2465756 - RNA, 18 nt, Human
cuggguggguggugggga

SEQ ID NO: 2465757 - RNA, 17 nt, Human
cuggguggguggugggg

SEQ ID NO: 2465758 - RNA, 15 nt, Human
cuggguggguggugg

SEQ ID NO: 2465759 - RNA, 12 nt, Human
cugggugggugg

SEQ ID NO: 2465760 - RNA, 22 nt, Human
cuggguucagaaaugcugccug

SEQ ID NO: 2465761 - RNA, 21 nt, Human
cuggguucagaaaugcugccu

SEQ ID NO: 2465762 - RNA, 23 nt, Human
cuggguucagaaaugcugccugc

SEQ ID NO: 2465763 - RNA, 16 nt, Human
cuggucuucuuugggu

SEQ ID NO: 2465764 - RNA, 19 nt, Human
cuggguggccucgggacac

SEQ ID NO: 2465765 - RNA, 18 nt, Human
cuggggcugaccuuccuc

SEQ ID NO: 2465766 - RNA, 23 nt, Human
cuggguggccucgggacaccugc

SEQ ID NO: 2465767 - RNA, 13 nt, Human
cugggugggcucu

SEQ ID NO: 2465768 - RNA, 15 nt, Human
cugggugggcucugu

SEQ ID NO: 2465769 - RNA, 14 nt, Human
cugggugggcucug

SEQ ID NO: 2465770 - RNA, 15 nt, Human
cuggguggggcagug

SEQ ID NO: 2465771 - RNA, 15 nt, Human
cuggguucacugcaa

SEQ ID NO: 2465772 - RNA, 13 nt, Human
cuggguggggcug

SEQ ID NO: 2465773 - RNA, 17 nt, Human
cuggguggggcugcucc

SEQ ID NO: 2465774 - RNA, 18 nt, Human
cuggguggggcugcuccu

SEQ ID NO: 2465775 - RNA, 20 nt, Human
cuggguggggcugcuccucc

SEQ ID NO: 2465776 - RNA, 21 nt, Human
cuggguggggcugcuccucca

SEQ ID NO: 2465777 - RNA, 22 nt, Human
cuggguggggcugcuccuccag

SEQ ID NO: 2465778 - RNA, 16 nt, Human
cuggguggggugagga

SEQ ID NO: 2465779 - RNA, 21 nt, Human
cuggguggggugaggaccacu

SEQ ID NO: 2465780 - RNA, 15 nt, Human
cuggggcagucaccu

SEQ ID NO: 2465781 - RNA, 15 nt, Human
cuggggccacacaga

SEQ ID NO: 2465782 - RNA, 15 nt, Human
cuggggccaggcugg

SEQ ID NO: 2465783 - RNA, 17 nt, Human
cuggggccacacagaaa

SEQ ID NO: 2465784 - RNA, 18 nt, Human
cuggggcuagggggagcc

SEQ ID NO: 2465785 - RNA, 18 nt, Human
cuggggccacacagaaac

SEQ ID NO: 2465786 - RNA, 19 nt, Human
cuggggcuaggcuggagcc

SEQ ID NO: 2465787 - RNA, 19 nt, Human
cuggggcuccuuucuccag

SEQ ID NO: 2465788 - RNA, 22 nt, Human
cuggggcucccuucaucuccag

SEQ ID NO: 2465789 - RNA, 14 nt, Human
cuggggcucccuuc

SEQ ID NO: 2465790 - RNA, 12 nt, Human
cuggggcucccu

SEQ ID NO: 2465791 - RNA, 23 nt, Human
cuggggcuccuuucuccagccag

SEQ ID NO: 2465792 - RNA, 20 nt, Human
cuggggcuccuuucuccagc

SEQ ID NO: 2465793 - RNA, 14 nt, Human
cuggggcucuggga

SEQ ID NO: 2465794 - RNA, 15 nt, Human
cuggggcucugggau

SEQ ID NO: 2465795 - RNA, 14 nt, Human
cuggggcucugugc

SEQ ID NO: 2465796 - RNA, 17 nt, Human
cuggggcucugugcagg

SEQ ID NO: 2465797 - RNA, 19 nt, Human
cuggggcucugugcaggga

SEQ ID NO: 2465798 - RNA, 14 nt, Human
cuggggcugaccuu

SEQ ID NO: 2465799 - RNA, 13 nt, Human
cuggggcugaagg

SEQ ID NO: 2465800 - RNA, 16 nt, Human
cuggguggccucggga

SEQ ID NO: 2465801 - RNA, 18 nt, Human
cuggcagaguugaagaca

SEQ ID NO: 2465802 - RNA, 17 nt, Human
cuggcagaguugaagac

SEQ ID NO: 2465803 - RNA, 23 nt, Human
cuggcagaaugcuagcucugagc

SEQ ID NO: 2465804 - RNA, 19 nt, Human
cuggcagaguugaagacag

SEQ ID NO: 2465805 - RNA, 14 nt, Human
cuggcagaggaggg

SEQ ID NO: 2465806 - RNA, 15 nt, Human
cuggcagcagagugu

SEQ ID NO: 2465807 - RNA, 12 nt, Human
cuggcagccccu

SEQ ID NO: 2465808 - RNA, 11 nt, Human
cuggcagccca

SEQ ID NO: 2465809 - RNA, 22 nt, Human
cuggcagccgugccuucagcuc

SEQ ID NO: 2465810 - RNA, 21 nt, Human
cuggcagccgugccuucagcu

SEQ ID NO: 2465811 - RNA, 14 nt, Human
cuggcagccuccca

SEQ ID NO: 2465812 - RNA, 15 nt, Human
cuggcagccucccau

SEQ ID NO: 2465813 - RNA, 12 nt, Human
cuggcagccucc

SEQ ID NO: 2465814 - RNA, 13 nt, Human
cuggcagccccug

SEQ ID NO: 2465815 - RNA, 20 nt, Human
cuggcagccgugccuucagc

SEQ ID NO: 2465816 - RNA, 19 nt, Human
cuggcagccgugccuucag

SEQ ID NO: 2465817 - RNA, 20 nt, Human
cugggacuuccuugcucucc

SEQ ID NO: 2465818 - RNA, 18 nt, Human
cugggacuuccuugcucu

SEQ ID NO: 2465819 - RNA, 17 nt, Human
cugggacuuccuugcuc

SEQ ID NO: 2465820 - RNA, 16 nt, Human
cugggacuuccuugcu

SEQ ID NO: 2465821 - RNA, 21 nt, Human
cugggacuuccuugcucuccc

SEQ ID NO: 2465822 - RNA, 16 nt, Human
cugggacugagccagu

SEQ ID NO: 2465823 - RNA, 15 nt, Human
cugggacugagccag

SEQ ID NO: 2465824 - RNA, 14 nt, Human
cugggacugagcca

SEQ ID NO: 2465825 - RNA, 13 nt, Human
cugggacugagcc

SEQ ID NO: 2465826 - RNA, 21 nt, Human
cugggacucagccuucagaca

SEQ ID NO: 2465827 - RNA, 18 nt, Human
cugggacucagccuucag

SEQ ID NO: 2465828 - RNA, 14 nt, Human
cugggacuuccuug

SEQ ID NO: 2465829 - RNA, 20 nt, Human
cugggacugagccaguccca

SEQ ID NO: 2465830 - RNA, 13 nt, Human
cugggacuggcca

SEQ ID NO: 2465831 - RNA, 14 nt, Human
cugggacuggccag

SEQ ID NO: 2465832 - RNA, 17 nt, Human
cugggacucagccuuca

SEQ ID NO: 2465833 - RNA, 16 nt, Human
cugggacucagccuuc

SEQ ID NO: 2465834 - RNA, 15 nt, Human
cugggacucagccuu

SEQ ID NO: 2465835 - RNA, 14 nt, Human
cugggacucagccu

SEQ ID NO: 2465836 - RNA, 13 nt, Human
cugggacucagcc

SEQ ID NO: 2465837 - RNA, 23 nt, Human
cugggaauguauuauucugcagc

SEQ ID NO: 2465838 - RNA, 24 nt, Human
cuggcucugcaaugggcacuggga

SEQ ID NO: 2465839 - RNA, 24 nt, Human
cuggcucugagcgccuccauccaa

SEQ ID NO: 2465840 - RNA, 18 nt, Human
cugggaauaagugccagg

SEQ ID NO: 2465841 - RNA, 18 nt, Human
cuggcucugcaaugggca

SEQ ID NO: 2465842 - RNA, 13 nt, Human
cugggaauguauu

SEQ ID NO: 2465843 - RNA, 18 nt, Human
cugggaauguauuauucu

SEQ ID NO: 2465844 - RNA, 19 nt, Human
cugggaauguauuauucug

SEQ ID NO: 2465845 - RNA, 22 nt, Human
cugggaauguauuauucugcag

SEQ ID NO: 2465846 - RNA, 11 nt, Human
cugggacacag

SEQ ID NO: 2465847 - RNA, 21 nt, Human
cuggcucugagcgccuccauc

SEQ ID NO: 2465848 - RNA, 20 nt, Human
cuggcucugagcgccuccau

SEQ ID NO: 2465849 - RNA, 13 nt, Human
cuggcucugagcg

SEQ ID NO: 2465850 - RNA, 12 nt, Human
cuggcucugagc

SEQ ID NO: 2465851 - RNA, 16 nt, Human
cuggcucucuccagga

SEQ ID NO: 2465852 - RNA, 15 nt, Human
cuggcucucuccagg

SEQ ID NO: 2465853 - RNA, 14 nt, Human
cuggcucucuccag

SEQ ID NO: 2465854 - RNA, 13 nt, Human
cuggcucucucca

SEQ ID NO: 2465855 - RNA, 23 nt, Human
cuggcucuccaagugccagaggu

SEQ ID NO: 2465856 - RNA, 14 nt, Human
cuggcucuccaagu

SEQ ID NO: 2465857 - RNA, 13 nt, Human
cuggcucuccaag

SEQ ID NO: 2465858 - RNA, 12 nt, Human
cuggcucuccaa

SEQ ID NO: 2465859 - RNA, 17 nt, Human
cuggcucucaugggguc

SEQ ID NO: 2465860 - RNA, 22 nt, Human
cuggccguugauguuggcuggg

SEQ ID NO: 2465861 - RNA, 19 nt, Human
cuggcucuccaagugccag

SEQ ID NO: 2465862 - RNA, 17 nt, Human
cuggcucuccaagugcc

SEQ ID NO: 2465863 - RNA, 16 nt, Human
cuggcucuccaagugc

SEQ ID NO: 2465864 - RNA, 15 nt, Human
cuggcucuccaagug

SEQ ID NO: 2465865 - RNA, 22 nt, Human
cuggcucuccaagugccagagg

SEQ ID NO: 2465866 - RNA, 20 nt, Human
cuggcucuccaagugccaga

SEQ ID NO: 2465867 - RNA, 20 nt, Human
cuggcucucccauuuccuga

SEQ ID NO: 2465868 - RNA, 14 nt, Human
cuggccuagcauac

SEQ ID NO: 2465869 - RNA, 23 nt, Human
cuggccguugauguuggcuggga

SEQ ID NO: 2465870 - RNA, 15 nt, Human
cuggccgugggccug

SEQ ID NO: 2465871 - RNA, 23 nt, Human
cuggccggucugcaagucagagg

SEQ ID NO: 2465872 - RNA, 22 nt, Human
cuggccggucugcaagucagag

SEQ ID NO: 2465873 - RNA, 19 nt, Human
cuggccgucacuugugggg

SEQ ID NO: 2465874 - RNA, 15 nt, Human
cuggcccugcccugg

SEQ ID NO: 2465875 - RNA, 16 nt, Human
cuggccgggagccuga

SEQ ID NO: 2465876 - RNA, 22 nt, Human
cuggccgggaccccgagccugg

SEQ ID NO: 2465877 - RNA, 16 nt, Human
cuggccggucugcaag

SEQ ID NO: 2465878 - RNA, 21 nt, Human
cuggccggucugcaagucaga

SEQ ID NO: 2465879 - RNA, 20 nt, Human
cuggccggucugcaagucag

SEQ ID NO: 2465880 - RNA, 17 nt, Human
cuggccggucugcaagu

SEQ ID NO: 2465881 - RNA, 18 nt, Human
cuggccccugagaucucu

SEQ ID NO: 2465882 - RNA, 22 nt, Human
cuggccccugagaucucugcag

SEQ ID NO: 2465883 - RNA, 12 nt, Human
cuggccccuggg

SEQ ID NO: 2465884 - RNA, 23 nt, Human
cuggccccugagaucucugcagg

SEQ ID NO: 2465885 - RNA, 20 nt, Human
cuggcagccucccauccagg

SEQ ID NO: 2465886 - RNA, 22 nt, Human
cuggcagccucccauccagggc

SEQ ID NO: 2465887 - RNA, 22 nt, Human
cuggccccucagggucccuggu

SEQ ID NO: 2465888 - RNA, 11 nt, Human
cuggcccugcc

SEQ ID NO: 2465889 - RNA, 13 nt, Human
cuggcccugcccu

SEQ ID NO: 2465890 - RNA, 20 nt, Human
cuggcccugagguguggggg

SEQ ID NO: 2465891 - RNA, 19 nt, Human
cuggcccugaggugugggg

SEQ ID NO: 2465892 - RNA, 17 nt, Human
cuggcccugaggugugg

SEQ ID NO: 2465893 - RNA, 14 nt, Human
cuggcccugcccug

SEQ ID NO: 2465894 - RNA, 14 nt, Human
cuggcccucugugu

SEQ ID NO: 2465895 - RNA, 13 nt, Human
cuggcccucugug

SEQ ID NO: 2465896 - RNA, 14 nt, Human
cuggcccugaggug

SEQ ID NO: 2465897 - RNA, 16 nt, Human
cuggcccucuguguug

SEQ ID NO: 2465898 - RNA, 13 nt, Human
cuggcccugaggu

SEQ ID NO: 2465899 - RNA, 14 nt, Human
cuggccccuggguc

SEQ ID NO: 2465900 - RNA, 13 nt, Human
cuggccccugggu

SEQ ID NO: 2465901 - RNA, 18 nt, Human
cuggcccgucauguuccu

SEQ ID NO: 2465902 - RNA, 22 nt, Human
cugccuguugggccaggagccu

SEQ ID NO: 2465903 - RNA, 21 nt, Human
cugccuguugggccaggagcc

SEQ ID NO: 2465904 - RNA, 23 nt, Human
cugccuguugggccaggagccuc

SEQ ID NO: 2465905 - RNA, 15 nt, Human
cugccuguaguuagg

SEQ ID NO: 2465906 - RNA, 22 nt, Human
cugcuagcacuuggagccaagg

SEQ ID NO: 2465907 - RNA, 15 nt, Human
cugcucagcuucucc

SEQ ID NO: 2465908 - RNA, 19 nt, Human
cugcuauauuuucaugacu

SEQ ID NO: 2465909 - RNA, 17 nt, Human
cugcuauauuuucauga

SEQ ID NO: 2465910 - RNA, 15 nt, Human
cugcuauagccuggg

SEQ ID NO: 2465911 - RNA, 14 nt, Human
cugcuauagccugg

SEQ ID NO: 2465912 - RNA, 23 nt, Human
cugcuaggugggccagccccucc

SEQ ID NO: 2465913 - RNA, 19 nt, Human
cugcuaggcgagugccagg

SEQ ID NO: 2465914 - RNA, 18 nt, Human
cugcuaggcgagugccag

SEQ ID NO: 2465915 - RNA, 15 nt, Human
cugcuaggcgagugc

SEQ ID NO: 2465916 - RNA, 22 nt, Human
cugcuaggcgagugccaggacu

SEQ ID NO: 2465917 - RNA, 20 nt, Human
cugcuaggcgagugccagga

SEQ ID NO: 2465918 - RNA, 23 nt, Human
cugcuaggcgagugccaggacuc

SEQ ID NO: 2465919 - RNA, 15 nt, Human
cugcuaggugggcca

SEQ ID NO: 2465920 - RNA, 16 nt, Human
cugcuaggugggccag

SEQ ID NO: 2465921 - RNA, 20 nt, Human
cugcuaggugggccagcccc

SEQ ID NO: 2465922 - RNA, 21 nt, Human
cugcuaggugggccagccccu

SEQ ID NO: 2465923 - RNA, 22 nt, Human
cugcuaggugggccagccccuc

SEQ ID NO: 2465924 - RNA, 19 nt, Human
cugcugaccuccacagcuu

SEQ ID NO: 2465925 - RNA, 18 nt, Human
cugcugacuguuuucucu

SEQ ID NO: 2465926 - RNA, 21 nt, Human
cugcugacuguuuucucuuga

SEQ ID NO: 2465927 - RNA, 16 nt, Human
cugcucaucauucucu

SEQ ID NO: 2465928 - RNA, 17 nt, Human
cugcucaucauucucug

SEQ ID NO: 2465929 - RNA, 18 nt, Human
cugcucaucauucucugu

SEQ ID NO: 2465930 - RNA, 22 nt, Human
cugcucaucauucucugucuca

SEQ ID NO: 2465931 - RNA, 22 nt, Human
cugcugacccagccuguuuuaa

SEQ ID NO: 2465932 - RNA, 18 nt, Human
cugcucagcuucuccugu

SEQ ID NO: 2465933 - RNA, 16 nt, Human
cugcugaccuccacag

SEQ ID NO: 2465934 - RNA, 18 nt, Human
cugcugaccuccacagcu

SEQ ID NO: 2465935 - RNA, 19 nt, Human
cugcucaguaaagcacuug

SEQ ID NO: 2465936 - RNA, 15 nt, Human
cugcucauauuguga

SEQ ID NO: 2465937 - RNA, 19 nt, Human
cugcucauauugugauucu

SEQ ID NO: 2465938 - RNA, 12 nt, Human
cugcucaucauu

SEQ ID NO: 2465939 - RNA, 18 nt, Human
cugcucaguaaagcacuu

SEQ ID NO: 2465940 - RNA, 23 nt, Human
cugcucagggaaaagcagcucuc

SEQ ID NO: 2465941 - RNA, 23 nt, Human
cugcuauauuuucaugacuuuuc

SEQ ID NO: 2465942 - RNA, 16 nt, Human
cugcucagcuucuccu

SEQ ID NO: 2465943 - RNA, 22 nt, Human
cugcucagggaaaagcagcucu

SEQ ID NO: 2465944 - RNA, 20 nt, Human
cugccuccccucuccuuccu

SEQ ID NO: 2465945 - RNA, 20 nt, Human
cugccucccucacccugagc

SEQ ID NO: 2465946 - RNA, 19 nt, Human
cugccucccucacccugag

SEQ ID NO: 2465947 - RNA, 18 nt, Human
cugccucccucacccuga

SEQ ID NO: 2465948 - RNA, 22 nt, Human
cugccuccccugugcaguccug

SEQ ID NO: 2465949 - RNA, 22 nt, Human
cugccucccucacccugagccc

SEQ ID NO: 2465950 - RNA, 21 nt, Human
cugccucccucacccugagcc

SEQ ID NO: 2465951 - RNA, 14 nt, Human
cugccucccuucau

SEQ ID NO: 2465952 - RNA, 17 nt, Human
cugccuccccugugcag

SEQ ID NO: 2465953 - RNA, 16 nt, Human
cugccuccccugugca

SEQ ID NO: 2465954 - RNA, 14 nt, Human
cugccucccucacc

SEQ ID NO: 2465955 - RNA, 13 nt, Human
cugccuccccugu

SEQ ID NO: 2465956 - RNA, 19 nt, Human
cugaucugacauccccacu

SEQ ID NO: 2465957 - RNA, 18 nt, Human
cugaucugacauccccac

SEQ ID NO: 2465958 - RNA, 20 nt, Human
cugaucugaugcaagcaaga

SEQ ID NO: 2465959 - RNA, 22 nt, Human
cugaucugugcuuuccagcuca

SEQ ID NO: 2465960 - RNA, 21 nt, Human
cugaucugugcuuuccagcuc

SEQ ID NO: 2465961 - RNA, 20 nt, Human
cugaucugugcuuuccagcu

SEQ ID NO: 2465962 - RNA, 18 nt, Human
cugaucugugcuuuccag

SEQ ID NO: 2465963 - RNA, 17 nt, Human
cugaucugugcuuucca

SEQ ID NO: 2465964 - RNA, 13 nt, Human
cugaucugugcuu

SEQ ID NO: 2465965 - RNA, 13 nt, Human
cugaucugguuug

SEQ ID NO: 2465966 - RNA, 23 nt, Human
cugaucugugcuuuccagcucac

SEQ ID NO: 2465967 - RNA, 20 nt, Human
cugaugaacuuauucuguag

SEQ ID NO: 2465968 - RNA, 21 nt, Human
cugaugaacucuuaaucaaau

SEQ ID NO: 2465969 - RNA, 20 nt, Human
cugccuguugggccaggagc

SEQ ID NO: 2465970 - RNA, 19 nt, Human
cugccuguucagcuccagc

SEQ ID NO: 2465971 - RNA, 18 nt, Human
cugccuguucagcuccag

SEQ ID NO: 2465972 - RNA, 17 nt, Human
cugccuguucagcucca

SEQ ID NO: 2465973 - RNA, 17 nt, Human
cugccugguccucacac

SEQ ID NO: 2465974 - RNA, 19 nt, Human
cugccugguccucacacuc

SEQ ID NO: 2465975 - RNA, 23 nt, Human
cugccugguccucacacucaccc

SEQ ID NO: 2465976 - RNA, 16 nt, Human
cugccugguccucaca

SEQ ID NO: 2465977 - RNA, 20 nt, Human
cugccuguagcccacucugc

SEQ ID NO: 2465978 - RNA, 22 nt, Human
cugccuguagcccacucugcuc

SEQ ID NO: 2465979 - RNA, 23 nt, Human
cugccuguagcccacucugcucg

SEQ ID NO: 2465980 - RNA, 13 nt, Human
cugccuguaguua

SEQ ID NO: 2465981 - RNA, 15 nt, Human
cugccuguagcccac

SEQ ID NO: 2465982 - RNA, 19 nt, Human
cugccuguagcccacucug

SEQ ID NO: 2465983 - RNA, 16 nt, Human
cugccuguagcaguga

SEQ ID NO: 2465984 - RNA, 19 nt, Human
cugccuguaacuugagagu

SEQ ID NO: 2465985 - RNA, 23 nt, Human
cugccucucccaucacuucccua

SEQ ID NO: 2465986 - RNA, 15 nt, Human
cugccucucccauca

SEQ ID NO: 2465987 - RNA, 22 nt, Human
cugccucucccaucacuucccu

SEQ ID NO: 2465988 - RNA, 24 nt, Human
cugccuccucuucaacugaccagc

SEQ ID NO: 2465989 - RNA, 15 nt, Human
cugccuccucuucaa

SEQ ID NO: 2465990 - RNA, 14 nt, Human
cugccuccucuuca

SEQ ID NO: 2465991 - RNA, 13 nt, Human
cugccuccucuuc

SEQ ID NO: 2465992 - RNA, 15 nt, Human
cugccucccuucaug

SEQ ID NO: 2465993 - RNA, 17 nt, Human
cugccucccuucaugca

SEQ ID NO: 2465994 - RNA, 18 nt, Human
cugccucccuucaugcau

SEQ ID NO: 2465995 - RNA, 19 nt, Human
cugccucccuucaugcaug

SEQ ID NO: 2465996 - RNA, 21 nt, Human
cugccucccuucaugcaugga

SEQ ID NO: 2465997 - RNA, 23 nt, Human
cugccucccuucaugcauggaaa

SEQ ID NO: 2465998 - RNA, 23 nt, Human
cugccuccgcgugaucaaagcca

SEQ ID NO: 2465999 - RNA, 21 nt, Human
cugcuucaaggauccugagcc

SEQ ID NO: 2466000 - RNA, 13 nt, Human
cugcuucaaggau

SEQ ID NO: 2466001 - RNA, 12 nt, Human
cugcuucaagga

SEQ ID NO: 2466002 - RNA, 19 nt, Human
cugcuucaaauauuucccu

SEQ ID NO: 2466003 - RNA, 23 nt, Human
cugcuucaaggauccugagccag

SEQ ID NO: 2466004 - RNA, 22 nt, Human
cugcuucaaggauccugagcca

SEQ ID NO: 2466005 - RNA, 20 nt, Human
cugcuuuugucuaugggacu

SEQ ID NO: 2466006 - RNA, 14 nt, Human
cugcuucaaauauu

SEQ ID NO: 2466007 - RNA, 22 nt, Human
cuggaguuucauguacaagaug

SEQ ID NO: 2466008 - RNA, 13 nt, Human
cuggaguuucaug

SEQ ID NO: 2466009 - RNA, 18 nt, Human
cuggaguugaucuggaac

SEQ ID NO: 2466010 - RNA, 23 nt, Human
cuggaguuuuuguuuggagagca

SEQ ID NO: 2466011 - RNA, 22 nt, Human
cuggaguuuuuguuuggagagc

SEQ ID NO: 2466012 - RNA, 18 nt, Human
cuggaguuucauguacaa

SEQ ID NO: 2466013 - RNA, 14 nt, Human
cuggauaacuuagg

SEQ ID NO: 2466014 - RNA, 17 nt, Human
cuggauaaagccacuga

SEQ ID NO: 2466015 - RNA, 16 nt, Human
cuggauaaagccacug

SEQ ID NO: 2466016 - RNA, 13 nt, Human
cuggauaaaauga

SEQ ID NO: 2466017 - RNA, 15 nt, Human
cuggauaggagccug

SEQ ID NO: 2466018 - RNA, 13 nt, Human
cuggauaggagcc

SEQ ID NO: 2466019 - RNA, 15 nt, Human
cuggauaacuuaggu

SEQ ID NO: 2466020 - RNA, 19 nt, Human
cuggauaggagccugcugg

SEQ ID NO: 2466021 - RNA, 18 nt, Human
cuggauaggagccugcug

SEQ ID NO: 2466022 - RNA, 20 nt, Human
cuggauaggagccugcuggu

SEQ ID NO: 2466023 - RNA, 13 nt, Human
cuggauauuuuca

SEQ ID NO: 2466024 - RNA, 15 nt, Human
cuggauauuuucaaa

SEQ ID NO: 2466025 - RNA, 16 nt, Human
cuggauauuuucaaau

SEQ ID NO: 2466026 - RNA, 22 nt, Human
cuggaucacagcugcuuucugu

SEQ ID NO: 2466027 - RNA, 16 nt, Human
cuggaucacagcugcu

SEQ ID NO: 2466028 - RNA, 14 nt, Human
cuggaucacagcug

SEQ ID NO: 2466029 - RNA, 23 nt, Human
cuggaucaaaguaggcaggacca

SEQ ID NO: 2466030 - RNA, 21 nt, Human
cuggauauuuucaaauuguau

SEQ ID NO: 2466031 - RNA, 22 nt, Human
cuggauauuuucaaauuguauc

SEQ ID NO: 2466032 - RNA, 21 nt, Human
cugcuuuugucuaugggacuc

SEQ ID NO: 2466033 - RNA, 19 nt, Human
cugcuuuuuaaagaaugcu

SEQ ID NO: 2466034 - RNA, 19 nt, Human
cugcuuuugucuaugggac

SEQ ID NO: 2466035 - RNA, 14 nt, Human
cuggaacuugggga

SEQ ID NO: 2466036 - RNA, 21 nt, Human
cugcuucaauacccaaauccu

SEQ ID NO: 2466037 - RNA, 13 nt, Human
cuggaagacagag

SEQ ID NO: 2466038 - RNA, 12 nt, Human
cuggaagagagg

SEQ ID NO: 2466039 - RNA, 18 nt, Human
cuggaagauccugcgggu

SEQ ID NO: 2466040 - RNA, 14 nt, Human
cuggaagauccugc

SEQ ID NO: 2466041 - RNA, 21 nt, Human
cuggaagacagagaccuccug

SEQ ID NO: 2466042 - RNA, 13 nt, Human
cuggaagagagga

SEQ ID NO: 2466043 - RNA, 23 nt, Human
cuggacugaagccugcaggaguu

SEQ ID NO: 2466044 - RNA, 23 nt, Human
cuggacucucagucucugagcag

SEQ ID NO: 2466045 - RNA, 18 nt, Human
cuggacuuuccugcaacu

SEQ ID NO: 2466046 - RNA, 16 nt, Human
cuggacuuuccugcaa

SEQ ID NO: 2466047 - RNA, 15 nt, Human
cuggacuuuccugca

SEQ ID NO: 2466048 - RNA, 14 nt, Human
cuggacuuuccugc

SEQ ID NO: 2466049 - RNA, 13 nt, Human
cuggacuuuccug

SEQ ID NO: 2466050 - RNA, 20 nt, Human
cuggaguugaucuggaaccc

SEQ ID NO: 2466051 - RNA, 22 nt, Human
cuggaguugaucuggaacccag

SEQ ID NO: 2466052 - RNA, 14 nt, Human
cuggagaaaaugga

SEQ ID NO: 2466053 - RNA, 13 nt, Human
cuggacuuggagg

SEQ ID NO: 2466054 - RNA, 22 nt, Human
cuggacugccuugaauaucccc

SEQ ID NO: 2466055 - RNA, 20 nt, Human
cuggacuugagcuuggcagc

SEQ ID NO: 2466056 - RNA, 22 nt, Human
cuggacugaagccugcaggagu

SEQ ID NO: 2466057 - RNA, 20 nt, Human
cuggacugccuugaauaucc

SEQ ID NO: 2466058 - RNA, 18 nt, Human
cuggacuugagcuuggca

SEQ ID NO: 2466059 - RNA, 18 nt, Human
cuggacugaggccugagc

SEQ ID NO: 2466060 - RNA, 16 nt, Human
cuggacugaggccuga

SEQ ID NO: 2466061 - RNA, 15 nt, Human
cuggacugaggccug

SEQ ID NO: 2466062 - RNA, 13 nt, Human
cuggacugaggcc

SEQ ID NO: 2466063 - RNA, 16 nt, Human
cuggacugaagccugc

SEQ ID NO: 2466064 - RNA, 19 nt, Human
cuggacugaagccugcagg

SEQ ID NO: 2466065 - RNA, 12 nt, Human
cuggacugaggc

SEQ ID NO: 2466066 - RNA, 16 nt, Human
cugucgcccagucugg

SEQ ID NO: 2466067 - RNA, 19 nt, Human
cugucgccuuagcauguuu

SEQ ID NO: 2466068 - RNA, 18 nt, Human
cugucgccuuagcauguu

SEQ ID NO: 2466069 - RNA, 22 nt, Human
cuguccuguacauugugggaug

SEQ ID NO: 2466070 - RNA, 17 nt, Human
cugucgccuuagcaugu

SEQ ID NO: 2466071 - RNA, 14 nt, Human
cuguccuguacauu

SEQ ID NO: 2466072 - RNA, 17 nt, Human
cuguccuggugucacuu

SEQ ID NO: 2466073 - RNA, 15 nt, Human
cugucgcccagucug

SEQ ID NO: 2466074 - RNA, 18 nt, Human
cuguccugggcugguggc

SEQ ID NO: 2466075 - RNA, 14 nt, Human
cuguccugggcugg

SEQ ID NO: 2466076 - RNA, 23 nt, Human
cuguccugggcgcccuggaagcc

SEQ ID NO: 2466077 - RNA, 22 nt, Human
cuguccugggcgcccuggaagc

SEQ ID NO: 2466078 - RNA, 21 nt, Human
cuguccugggcgcccuggaag

SEQ ID NO: 2466079 - RNA, 19 nt, Human
cuguccugggcgcccugga

SEQ ID NO: 2466080 - RNA, 18 nt, Human
cuguccugggcgcccugg

SEQ ID NO: 2466081 - RNA, 13 nt, Human
cuguccugggcgc

SEQ ID NO: 2466082 - RNA, 13 nt, Human
cuguccugggccu

SEQ ID NO: 2466083 - RNA, 14 nt, Human
cuguccugggccug

SEQ ID NO: 2466084 - RNA, 12 nt, Human
cuguccugggcg

SEQ ID NO: 2466085 - RNA, 11 nt, Human
cuguccugggc

SEQ ID NO: 2466086 - RNA, 18 nt, Human
cuguccugggccugcaga

SEQ ID NO: 2466087 - RNA, 15 nt, Human
cuguccucuucugca

SEQ ID NO: 2466088 - RNA, 21 nt, Human
cuguccugggagugagcuggu

SEQ ID NO: 2466089 - RNA, 21 nt, Human
cuguccucccauccccuggac

SEQ ID NO: 2466090 - RNA, 16 nt, Human
cuguccuccugguggg

SEQ ID NO: 2466091 - RNA, 14 nt, Human
cuguccuccuggug

SEQ ID NO: 2466092 - RNA, 12 nt, Human
cuguccuccucg

SEQ ID NO: 2466093 - RNA, 23 nt, Human
cuguccuccucggaucaccgaga

SEQ ID NO: 2466094 - RNA, 21 nt, Human
cuguccuccugguggguccag

SEQ ID NO: 2466095 - RNA, 20 nt, Human
cuguccucucuggcugggga

SEQ ID NO: 2466096 - RNA, 19 nt, Human
cuguccuccuggugggucc

SEQ ID NO: 2466097 - RNA, 19 nt, Human
cuguccucccauccccugg

SEQ ID NO: 2466098 - RNA, 18 nt, Human
cuguccucccauccccug

SEQ ID NO: 2466099 - RNA, 16 nt, Human
cuguccucccaucccc

SEQ ID NO: 2466100 - RNA, 15 nt, Human
cuguccuccaagcca

SEQ ID NO: 2466101 - RNA, 17 nt, Human
cuguccuccaagccagc

SEQ ID NO: 2466102 - RNA, 20 nt, Human
cugucaauuacaggaaguac

SEQ ID NO: 2466103 - RNA, 19 nt, Human
cugucaauuacaggaagua

SEQ ID NO: 2466104 - RNA, 23 nt, Human
cugucaauuacaggaaguacugg

SEQ ID NO: 2466105 - RNA, 23 nt, Human
cuguagucccagccacucgggag

SEQ ID NO: 2466106 - RNA, 18 nt, Human
cuguagucccagccacuc

SEQ ID NO: 2466107 - RNA, 17 nt, Human
cuguagucccagccacu

SEQ ID NO: 2466108 - RNA, 15 nt, Human
cuguagucccagcca

SEQ ID NO: 2466109 - RNA, 19 nt, Human
cugucaauuucccugacuc

SEQ ID NO: 2466110 - RNA, 18 nt, Human
cugucaauuucccugacu

SEQ ID NO: 2466111 - RNA, 17 nt, Human
cugucaauuucccugac

SEQ ID NO: 2466112 - RNA, 15 nt, Human
cugucaucaauugaa

SEQ ID NO: 2466113 - RNA, 22 nt, Human
cugucagugccgccgccucgcc

SEQ ID NO: 2466114 - RNA, 18 nt, Human
cugucagugccgccgccu

SEQ ID NO: 2466115 - RNA, 17 nt, Human
cugucagugccgccgcc

SEQ ID NO: 2466116 - RNA, 16 nt, Human
cugucacaccagccau

SEQ ID NO: 2466117 - RNA, 15 nt, Human
cugucacaccagcca

SEQ ID NO: 2466118 - RNA, 13 nt, Human
cugucacaccagc

SEQ ID NO: 2466119 - RNA, 14 nt, Human
cugucauagaaauu

SEQ ID NO: 2466120 - RNA, 16 nt, Human
cugucauagaaauuac

SEQ ID NO: 2466121 - RNA, 19 nt, Human
cugucauaagaaugaauaa

SEQ ID NO: 2466122 - RNA, 15 nt, Human
cuggugaagcucacu

SEQ ID NO: 2466123 - RNA, 14 nt, Human
cuggugacaccagc

SEQ ID NO: 2466124 - RNA, 17 nt, Human
cuggugacaccagccuu

SEQ ID NO: 2466125 - RNA, 15 nt, Human
cuggugacaccagcc

SEQ ID NO: 2466126 - RNA, 16 nt, Human
cuggugacaccagccu

SEQ ID NO: 2466127 - RNA, 20 nt, Human
cuggugaagcucacuucugg

SEQ ID NO: 2466128 - RNA, 15 nt, Human
cuggucuuuccucug

SEQ ID NO: 2466129 - RNA, 20 nt, Human
cuggucuuguggaauuggga

SEQ ID NO: 2466130 - RNA, 18 nt, Human
cuggucuuguggaauugg

SEQ ID NO: 2466131 - RNA, 14 nt, Human
cuggucuugagaug

SEQ ID NO: 2466132 - RNA, 15 nt, Human
cuggucuugagaugu

SEQ ID NO: 2466133 - RNA, 20 nt, Human
cugguugguguugcagaagg

SEQ ID NO: 2466134 - RNA, 21 nt, Human
cugguugguguugcagaaggu

SEQ ID NO: 2466135 - RNA, 13 nt, Human
cugguugucauuu

SEQ ID NO: 2466136 - RNA, 14 nt, Human
cugguugucauuuu

SEQ ID NO: 2466137 - RNA, 12 nt, Human
cuguaaacugug

SEQ ID NO: 2466138 - RNA, 13 nt, Human
cuguaaacugugu

SEQ ID NO: 2466139 - RNA, 19 nt, Human
cuguaaacucaaaacuuaa

SEQ ID NO: 2466140 - RNA, 13 nt, Human
cugguuuccugcc

SEQ ID NO: 2466141 - RNA, 14 nt, Human
cugguuuccugccc

SEQ ID NO: 2466142 - RNA, 15 nt, Human
cugguuuacacuuua

SEQ ID NO: 2466143 - RNA, 15 nt, Human
cugguugucauuuuu

SEQ ID NO: 2466144 - RNA, 23 nt, Human
cugguuucauuucuacugugacu

SEQ ID NO: 2466145 - RNA, 18 nt, Human
cugguuucacuggcccaa

SEQ ID NO: 2466146 - RNA, 13 nt, Human
cugguuucacugg

SEQ ID NO: 2466147 - RNA, 17 nt, Human
cugguuucacuggccca

SEQ ID NO: 2466148 - RNA, 14 nt, Human
cuguaaagaaagag

SEQ ID NO: 2466149 - RNA, 15 nt, Human
cuguaaagaaagaga

SEQ ID NO: 2466150 - RNA, 16 nt, Human
cuguaaagaaagagag

SEQ ID NO: 2466151 - RNA, 17 nt, Human
cuguaaagaaagagaga

SEQ ID NO: 2466152 - RNA, 13 nt, Human
cuguaaagaaaga

SEQ ID NO: 2466153 - RNA, 22 nt, Human
cuguaaacucaaaacuuaacau

SEQ ID NO: 2466154 - RNA, 14 nt, Human
cuguaaacugugua

SEQ ID NO: 2466155 - RNA, 20 nt, Human
cuguaaacuguguauuccaa

SEQ ID NO: 2466156 - RNA, 18 nt, Human
cuguaaagaaagagagaa

SEQ ID NO: 2466157 - RNA, 19 nt, Human
cuguaaagaaagagagaaa

SEQ ID NO: 2466158 - RNA, 20 nt, Human
cuguaaagaaagagagaaaa

SEQ ID NO: 2466159 - RNA, 21 nt, Human
cuguaaagaaagagagaaaau

SEQ ID NO: 2466160 - RNA, 22 nt, Human
cuguaaagaaagagagaaaaua

SEQ ID NO: 2466161 - RNA, 23 nt, Human
cuguaaagaaagagagaaaauaa

SEQ ID NO: 2466162 - RNA, 22 nt, Human
cuguaaagagaccuaccucagg

SEQ ID NO: 2466163 - RNA, 20 nt, Human
cuguaaagagaccuaccuca

SEQ ID NO: 2466164 - RNA, 17 nt, Human
cuguagagggcccuggu

SEQ ID NO: 2466165 - RNA, 21 nt, Human
cuguagggcuggaccuauguc

SEQ ID NO: 2466166 - RNA, 24 nt, Human
cuguaggguaauuaguaacaugug

SEQ ID NO: 2466167 - RNA, 18 nt, Human
cuguaguaaacuauuuau

SEQ ID NO: 2466168 - RNA, 19 nt, Human
cuguaguaaacuauuuauc

SEQ ID NO: 2466169 - RNA, 20 nt, Human
cuguaguaaacuauuuaucu

SEQ ID NO: 2466170 - RNA, 21 nt, Human
cuguaguagcccuuucugugu

SEQ ID NO: 2466171 - RNA, 14 nt, Human
cuguagucccagcc

SEQ ID NO: 2466172 - RNA, 12 nt, Human
cuguagucccag

SEQ ID NO: 2466173 - RNA, 19 nt, Human
cuguaguagcccuuucugu

SEQ ID NO: 2466174 - RNA, 18 nt, Human
cuguaguagcccuuucug

SEQ ID NO: 2466175 - RNA, 13 nt, Human
cuguagaguggga

SEQ ID NO: 2466176 - RNA, 20 nt, Human
cuguagaaaugguuguauua

SEQ ID NO: 2466177 - RNA, 18 nt, Human
cuguacuuaauaaauuca

SEQ ID NO: 2466178 - RNA, 22 nt, Human
cuguagaccuagggaggaccuu

SEQ ID NO: 2466179 - RNA, 16 nt, Human
cuguagagggcccugg

SEQ ID NO: 2466180 - RNA, 21 nt, Human
cuguagagcuagaacauggag

SEQ ID NO: 2466181 - RNA, 15 nt, Human
cuguagaagagggau

SEQ ID NO: 2466182 - RNA, 19 nt, Human
cuguagaaaugguuguauu

SEQ ID NO: 2466183 - RNA, 17 nt, Human
cuguagaaaugguugua

SEQ ID NO: 2466184 - RNA, 13 nt, Human
cuguagaaauggu

SEQ ID NO: 2466185 - RNA, 15 nt, Human
cuguacuucaaguua

SEQ ID NO: 2466186 - RNA, 19 nt, Human
cuguagaaaagggaacuga

SEQ ID NO: 2466187 - RNA, 19 nt, Human
cuguaaccucuucagaggc

SEQ ID NO: 2466188 - RNA, 20 nt, Human
cuguaaccucuucagaggcc

SEQ ID NO: 2466189 - RNA, 22 nt, Human
cuguaaccucuucagaggcccu

SEQ ID NO: 2466190 - RNA, 23 nt, Human
cuguaaccucuucagaggcccuc

SEQ ID NO: 2466191 - RNA, 19 nt, Human
cuguaacauacuggccugg

SEQ ID NO: 2466192 - RNA, 15 nt, Human
cuguaaccucuucag

SEQ ID NO: 2466193 - RNA, 16 nt, Human
cuguaacacuuuacaa

SEQ ID NO: 2466194 - RNA, 19 nt, Human
cuguaacucuaaaagaucc

SEQ ID NO: 2466195 - RNA, 15 nt, Human
cuguaacucuaaaag

SEQ ID NO: 2466196 - RNA, 22 nt, Human
cuguacugauuuuuguaagaca

SEQ ID NO: 2466197 - RNA, 20 nt, Human
cuguacugauuuuuguaaga

SEQ ID NO: 2466198 - RNA, 15 nt, Human
cuguacucuuagaug

SEQ ID NO: 2466199 - RNA, 20 nt, Human
cuguacuguucugugucuuu

SEQ ID NO: 2466200 - RNA, 13 nt, Human
cuguacuuaauaa

SEQ ID NO: 2466201 - RNA, 16 nt, Human
cuguacuuaauaaauu

SEQ ID NO: 2466202 - RNA, 17 nt, Human
cuguacuguucuguguc

SEQ ID NO: 2466203 - RNA, 16 nt, Human
cugugacccccagcuc

SEQ ID NO: 2466204 - RNA, 17 nt, Human
cugugacccccagcucc

SEQ ID NO: 2466205 - RNA, 18 nt, Human
cugugacccccagcuccg

SEQ ID NO: 2466206 - RNA, 21 nt, Human
cugugacccccagcuccggcc

SEQ ID NO: 2466207 - RNA, 23 nt, Human
cugugaccucaggcacuagccuu

SEQ ID NO: 2466208 - RNA, 22 nt, Human
cugugaccucaggcacuagccu

SEQ ID NO: 2466209 - RNA, 17 nt, Human
cugugaccucuccccug

SEQ ID NO: 2466210 - RNA, 17 nt, Human
cugugaccucaggcacu

SEQ ID NO: 2466211 - RNA, 14 nt, Human
cugugaccucaggc

SEQ ID NO: 2466212 - RNA, 13 nt, Human
cugugacccccag

SEQ ID NO: 2466213 - RNA, 15 nt, Human
cugugacccccagcu

SEQ ID NO: 2466214 - RNA, 14 nt, Human
cugugcugcccugc

SEQ ID NO: 2466215 - RNA, 13 nt, Human
cugugcugcccug

SEQ ID NO: 2466216 - RNA, 12 nt, Human
cugugcugcccu

SEQ ID NO: 2466217 - RNA, 14 nt, Human
cugugcgcugacaa

SEQ ID NO: 2466218 - RNA, 18 nt, Human
cugugccugccugggagu

SEQ ID NO: 2466219 - RNA, 21 nt, Human
cugugccuuugaguuuccuca

SEQ ID NO: 2466220 - RNA, 16 nt, Human
cugugccuuuugccau

SEQ ID NO: 2466221 - RNA, 19 nt, Human
cugugccugaccuugagga

SEQ ID NO: 2466222 - RNA, 17 nt, Human
cugugccugaccuugag

SEQ ID NO: 2466223 - RNA, 15 nt, Human
cugugccugaauauu

SEQ ID NO: 2466224 - RNA, 19 nt, Human
cugugccuucuuuugauua

SEQ ID NO: 2466225 - RNA, 16 nt, Human
cugugaccugccccgc

SEQ ID NO: 2466226 - RNA, 22 nt, Human
cugugaccugccccgcccagcu

SEQ ID NO: 2466227 - RNA, 19 nt, Human
cuguuauaaucuuucacag

SEQ ID NO: 2466228 - RNA, 13 nt, Human
cuguuauaaucuu

SEQ ID NO: 2466229 - RNA, 15 nt, Human
cugugucuaaacugc

SEQ ID NO: 2466230 - RNA, 14 nt, Human
cugugucuaaacug

SEQ ID NO: 2466231 - RNA, 16 nt, Human
cugugucuaaacugca

SEQ ID NO: 2466232 - RNA, 13 nt, Human
cuguuagucauuu

SEQ ID NO: 2466233 - RNA, 15 nt, Human
cuguuagucauuugc

SEQ ID NO: 2466234 - RNA, 14 nt, Human
cuguuagucauuug

SEQ ID NO: 2466235 - RNA, 18 nt, Human
cuguuagucauuugcuga

SEQ ID NO: 2466236 - RNA, 22 nt, Human
cugugucccaugacccaccccu

SEQ ID NO: 2466237 - RNA, 21 nt, Human
cugugucccaugacccacccc

SEQ ID NO: 2466238 - RNA, 20 nt, Human
cugugucccaugacccaccc

SEQ ID NO: 2466239 - RNA, 22 nt, Human
cugugucacuggcugccuccac

SEQ ID NO: 2466240 - RNA, 21 nt, Human
cugugucacuggcugccucca

SEQ ID NO: 2466241 - RNA, 20 nt, Human
cugugucacuggcugccucc

SEQ ID NO: 2466242 - RNA, 19 nt, Human
cugugucacuggcugccuc

SEQ ID NO: 2466243 - RNA, 18 nt, Human
cugugucacuggcugccu

SEQ ID NO: 2466244 - RNA, 17 nt, Human
cuguguccuggugcucu

SEQ ID NO: 2466245 - RNA, 15 nt, Human
cuguguccuggugcu

SEQ ID NO: 2466246 - RNA, 14 nt, Human
cuguguccuggugc

SEQ ID NO: 2466247 - RNA, 13 nt, Human
cuguguccuggug

SEQ ID NO: 2466248 - RNA, 23 nt, Human
cugugucccaugacccaccccug

SEQ ID NO: 2466249 - RNA, 20 nt, Human
cuguguccuggugcucucug

SEQ ID NO: 2466250 - RNA, 19 nt, Human
cuguguccuggugcucucu

SEQ ID NO: 2466251 - RNA, 23 nt, Human
cuguguccuggugcucucugcca

SEQ ID NO: 2466252 - RNA, 16 nt, Human
cuguguccuucccugc

SEQ ID NO: 2466253 - RNA, 15 nt, Human
cuguguccuucccug

SEQ ID NO: 2466254 - RNA, 14 nt, Human
cuguguccuugcac

SEQ ID NO: 2466255 - RNA, 16 nt, Human
cuguguccuugcaccu

SEQ ID NO: 2466256 - RNA, 18 nt, Human
cuguguccuugcaccugc

SEQ ID NO: 2466257 - RNA, 19 nt, Human
cuguguccuugcaccugca

SEQ ID NO: 2466258 - RNA, 16 nt, Human
cugugucguagccaag

SEQ ID NO: 2466259 - RNA, 13 nt, Human
cugugucuaaacu

SEQ ID NO: 2466260 - RNA, 12 nt, Human
cugugucuaaac

SEQ ID NO: 2466261 - RNA, 11 nt, Human
cugugucuaaa

SEQ ID NO: 2466262 - RNA, 22 nt, Human
cuguguccuugcaccugcaucc

SEQ ID NO: 2466263 - RNA, 19 nt, Human
cugugcugcccugcccacc

SEQ ID NO: 2466264 - RNA, 18 nt, Human
cugugcugcccugcccac

SEQ ID NO: 2466265 - RNA, 17 nt, Human
cugugcugcccugccca

SEQ ID NO: 2466266 - RNA, 15 nt, Human
cugugcugcccugcc

SEQ ID NO: 2466267 - RNA, 17 nt, Human
cugugucagcauagaag

SEQ ID NO: 2466268 - RNA, 19 nt, Human
cugugucagcauagaagua

SEQ ID NO: 2466269 - RNA, 17 nt, Human
cugugucacuggcugcc

SEQ ID NO: 2466270 - RNA, 16 nt, Human
cugugucacuggcugc

SEQ ID NO: 2466271 - RNA, 15 nt, Human
cugugucacuggcug

SEQ ID NO: 2466272 - RNA, 14 nt, Human
cugugucacuggcu

SEQ ID NO: 2466273 - RNA, 14 nt, Human
cugugucacuacgu

SEQ ID NO: 2466274 - RNA, 15 nt, Human
cuuagggcaccaggg

SEQ ID NO: 2466275 - RNA, 16 nt, Human
cuuaggggcugcugac

SEQ ID NO: 2466276 - RNA, 23 nt, Human
cuuaggccuuccucucuccagau

SEQ ID NO: 2466277 - RNA, 21 nt, Human
cuuagggaaggauacaaaagc

SEQ ID NO: 2466278 - RNA, 12 nt, Human
cuuaggccuucc

SEQ ID NO: 2466279 - RNA, 13 nt, Human
cuuaggccuuccu

SEQ ID NO: 2466280 - RNA, 15 nt, Human
cuuaggccuuccucu

SEQ ID NO: 2466281 - RNA, 17 nt, Human
cuuaggccuuccucucu

SEQ ID NO: 2466282 - RNA, 19 nt, Human
cuuagggaaggauacaaaa

SEQ ID NO: 2466283 - RNA, 16 nt, Human
cuuaggaugugugcau

SEQ ID NO: 2466284 - RNA, 14 nt, Human
cuuaggaugugugc

SEQ ID NO: 2466285 - RNA, 18 nt, Human
cuuaggagcagagcucug

SEQ ID NO: 2466286 - RNA, 16 nt, Human
cuuaggagcagagcuc

SEQ ID NO: 2466287 - RNA, 22 nt, Human
cuuaggaugugugcaugugugu

SEQ ID NO: 2466288 - RNA, 18 nt, Human
cuuaggaugugugcaugu

SEQ ID NO: 2466289 - RNA, 14 nt, Human
cuuaggcagggaag

SEQ ID NO: 2466290 - RNA, 15 nt, Human
cuuaggccagcacca

SEQ ID NO: 2466291 - RNA, 19 nt, Human
cuuaggcaugacuguagaa

SEQ ID NO: 2466292 - RNA, 15 nt, Human
cuuaggcagggaagu

SEQ ID NO: 2466293 - RNA, 15 nt, Human
cuuaggagagaccga

SEQ ID NO: 2466294 - RNA, 20 nt, Human
cuuaggacagggucccugcu

SEQ ID NO: 2466295 - RNA, 11 nt, Human
cuuaggaagga

SEQ ID NO: 2466296 - RNA, 22 nt, Human
cuuaggaagagaaaccagggag

SEQ ID NO: 2466297 - RNA, 17 nt, Human
cuuagcuuuuuaauugu

SEQ ID NO: 2466298 - RNA, 16 nt, Human
cuuagcuuuuuaauug

SEQ ID NO: 2466299 - RNA, 17 nt, Human
cuuaggaagagaaacca

SEQ ID NO: 2466300 - RNA, 15 nt, Human
cuuaggaagaauuuu

SEQ ID NO: 2466301 - RNA, 22 nt, Human
cuuagcucauucuccuuguguu

SEQ ID NO: 2466302 - RNA, 17 nt, Human
cuuagcccccacccacu

SEQ ID NO: 2466303 - RNA, 13 nt, Human
cuuagcccccacc

SEQ ID NO: 2466304 - RNA, 20 nt, Human
cuuagcccccacccacuucc

SEQ ID NO: 2466305 - RNA, 18 nt, Human
cuuagcccccacccacuu

SEQ ID NO: 2466306 - RNA, 11 nt, Human
cuuagccuccc

SEQ ID NO: 2466307 - RNA, 22 nt, Human
cuuagccuccugaccugaggcu

SEQ ID NO: 2466308 - RNA, 21 nt, Human
cuuagccuccugaccugaggc

SEQ ID NO: 2466309 - RNA, 17 nt, Human
cuuagccuccugaccug

SEQ ID NO: 2466310 - RNA, 14 nt, Human
cuuagccuccugac

SEQ ID NO: 2466311 - RNA, 14 nt, Human
cuuagccucccuga

SEQ ID NO: 2466312 - RNA, 15 nt, Human
cuuagccucccugaa

SEQ ID NO: 2466313 - RNA, 16 nt, Human
cuuaccagcagagcac

SEQ ID NO: 2466314 - RNA, 13 nt, Human
cuuaccaggaagc

SEQ ID NO: 2466315 - RNA, 15 nt, Human
cuuaccauaugugcu

SEQ ID NO: 2466316 - RNA, 13 nt, Human
cuuaccauuaaag

SEQ ID NO: 2466317 - RNA, 18 nt, Human
cuuagcauguuugcugaa

SEQ ID NO: 2466318 - RNA, 17 nt, Human
cuuagcauguuugcuga

SEQ ID NO: 2466319 - RNA, 16 nt, Human
cuuagcauguuugcug

SEQ ID NO: 2466320 - RNA, 14 nt, Human
cuuaccaugugccu

SEQ ID NO: 2466321 - RNA, 18 nt, Human
cuuagcauguguugaaaa

SEQ ID NO: 2466322 - RNA, 14 nt, Human
cuuagcuuuuuaau

SEQ ID NO: 2466323 - RNA, 18 nt, Human
cuuagcuuugcucugcca

SEQ ID NO: 2466324 - RNA, 23 nt, Human
cuuagcuucuauuauagccacau

SEQ ID NO: 2466325 - RNA, 23 nt, Human
cuuagcuuagaccucagccugug

SEQ ID NO: 2466326 - RNA, 21 nt, Human
cuuagcuuagaccucagccug

SEQ ID NO: 2466327 - RNA, 22 nt, Human
cuuagcuuagaccucagccugu

SEQ ID NO: 2466328 - RNA, 17 nt, Human
cuuagcugucugcucag

SEQ ID NO: 2466329 - RNA, 14 nt, Human
cuuagcuuagaccu

SEQ ID NO: 2466330 - RNA, 15 nt, Human
cuuagcuuagaccuc

SEQ ID NO: 2466331 - RNA, 16 nt, Human
cuuagcuuagaccuca

SEQ ID NO: 2466332 - RNA, 17 nt, Human
cuuagcuuagaccucag

SEQ ID NO: 2466333 - RNA, 18 nt, Human
cuuagcuuagaccucagc

SEQ ID NO: 2466334 - RNA, 19 nt, Human
cuuagcuuagaccucagcc

SEQ ID NO: 2466335 - RNA, 20 nt, Human
cuuagcuuagaccucagccu

SEQ ID NO: 2466336 - RNA, 14 nt, Human
cuuagcuaucagaa

SEQ ID NO: 2466337 - RNA, 14 nt, Human
cuuagcuccccucc

SEQ ID NO: 2466338 - RNA, 23 nt, Human
cuuagcucauucuccuuguguua

SEQ ID NO: 2466339 - RNA, 11 nt, Human
cuuagcugagu

SEQ ID NO: 2466340 - RNA, 17 nt, Human
cuuagcucuuaauuguu

SEQ ID NO: 2466341 - RNA, 17 nt, Human
cuuagcuccccuccaac

SEQ ID NO: 2466342 - RNA, 13 nt, Human
cuuagcugggaga

SEQ ID NO: 2466343 - RNA, 14 nt, Human
cuuagcugucugcu

SEQ ID NO: 2466344 - RNA, 14 nt, Human
cuuagcugagugga

SEQ ID NO: 2466345 - RNA, 14 nt, Human
cuguuggcuggggg

SEQ ID NO: 2466346 - RNA, 22 nt, Human
cuguuggcugggggccucagug

SEQ ID NO: 2466347 - RNA, 19 nt, Human
cuguuggcugggggccuca

SEQ ID NO: 2466348 - RNA, 23 nt, Human
cuguugggguggguauaaaagau

SEQ ID NO: 2466349 - RNA, 22 nt, Human
cuguugggguggguauaaaaga

SEQ ID NO: 2466350 - RNA, 16 nt, Human
cuguuguaacuaggcu

SEQ ID NO: 2466351 - RNA, 20 nt, Human
cuguugguuccaagcccugg

SEQ ID NO: 2466352 - RNA, 14 nt, Human
cuguugguuccaag

SEQ ID NO: 2466353 - RNA, 20 nt, Human
cuguugggguggguauaaaa

SEQ ID NO: 2466354 - RNA, 21 nt, Human
cuuaaaaaugguuuaaauggu

SEQ ID NO: 2466355 - RNA, 14 nt, Human
cuguuuaagagaca

SEQ ID NO: 2466356 - RNA, 12 nt, Human
cuguuuaagaga

SEQ ID NO: 2466357 - RNA, 23 nt, Human
cuguuuaaauguuuuucuaugua

SEQ ID NO: 2466358 - RNA, 20 nt, Human
cuguuuaaauguuuuucuau

SEQ ID NO: 2466359 - RNA, 14 nt, Human
cuguuguacauuua

SEQ ID NO: 2466360 - RNA, 13 nt, Human
cuguuguacauuu

SEQ ID NO: 2466361 - RNA, 12 nt, Human
cuguuguacauu

SEQ ID NO: 2466362 - RNA, 22 nt, Human
cuguuguaacuaggcucagaga

SEQ ID NO: 2466363 - RNA, 19 nt, Human
cuguuguacauuuaugauu

SEQ ID NO: 2466364 - RNA, 18 nt, Human
cuguuguacauuuaugau

SEQ ID NO: 2466365 - RNA, 17 nt, Human
cuguuguacauuuauga

SEQ ID NO: 2466366 - RNA, 15 nt, Human
cuguuguacauuuau

SEQ ID NO: 2466367 - RNA, 22 nt, Human
cuguuguacauuuaugauuuaa

SEQ ID NO: 2466368 - RNA, 22 nt, Human
cuguuuaaauauuucaagacau

SEQ ID NO: 2466369 - RNA, 19 nt, Human
cuguuuaaauauuucaaga

SEQ ID NO: 2466370 - RNA, 20 nt, Human
cuguuguuuuguuuuaaaua

SEQ ID NO: 2466371 - RNA, 16 nt, Human
cuguuguuuuguuuua

SEQ ID NO: 2466372 - RNA, 17 nt, Human
cuguuguuucuaaacaa

SEQ ID NO: 2466373 - RNA, 12 nt, Human
cuguugucauug

SEQ ID NO: 2466374 - RNA, 23 nt, Human
cuguuguuguuaaugaaaauguc

SEQ ID NO: 2466375 - RNA, 22 nt, Human
cuguuguauaaauuuauuuacu

SEQ ID NO: 2466376 - RNA, 13 nt, Human
cuuaaaaccaaag

SEQ ID NO: 2466377 - RNA, 13 nt, Human
cuuaaauaauaaa

SEQ ID NO: 2466378 - RNA, 21 nt, Human
cuuaaauaauaaacaguggaa

SEQ ID NO: 2466379 - RNA, 22 nt, Human
cuuaaauaauaaagaucaugua

SEQ ID NO: 2466380 - RNA, 20 nt, Human
cuuaauuuugguuguauucu

SEQ ID NO: 2466381 - RNA, 23 nt, Human
cuuaauuuugguuguauucuuug

SEQ ID NO: 2466382 - RNA, 21 nt, Human
cuuaauuuugguuguauucuu

SEQ ID NO: 2466383 - RNA, 18 nt, Human
cuuaaaaauguaaauauu

SEQ ID NO: 2466384 - RNA, 17 nt, Human
cuuaaaaauguaaauau

SEQ ID NO: 2466385 - RNA, 16 nt, Human
cuuaaaaauguaaaua

SEQ ID NO: 2466386 - RNA, 15 nt, Human
cuuaaaaauguaaau

SEQ ID NO: 2466387 - RNA, 20 nt, Human
cuguuuaauauuuaaacagc

SEQ ID NO: 2466388 - RNA, 18 nt, Human
cuguuuaauauuuaaaca

SEQ ID NO: 2466389 - RNA, 16 nt, Human
cuguuuaauauuuaaa

SEQ ID NO: 2466390 - RNA, 14 nt, Human
cuuaaaacaacacu

SEQ ID NO: 2466391 - RNA, 21 nt, Human
cuuaccagauaaugcuacuuu

SEQ ID NO: 2466392 - RNA, 13 nt, Human
cuuaccagaagcu

SEQ ID NO: 2466393 - RNA, 19 nt, Human
cuuaccaacuuucuguaaa

SEQ ID NO: 2466394 - RNA, 17 nt, Human
cuuaccaacuuucugua

SEQ ID NO: 2466395 - RNA, 16 nt, Human
cuuaccaacuuucugu

SEQ ID NO: 2466396 - RNA, 15 nt, Human
cuuaccaacuuucug

SEQ ID NO: 2466397 - RNA, 22 nt, Human
cuuacauuuuuacaauaaauaa

SEQ ID NO: 2466398 - RNA, 15 nt, Human
cuuaccagcagagca

SEQ ID NO: 2466399 - RNA, 13 nt, Human
cuuacauuuccug

SEQ ID NO: 2466400 - RNA, 12 nt, Human
cuuacauuuccu

SEQ ID NO: 2466401 - RNA, 20 nt, Human
cuuacauuguucaauuagaa

SEQ ID NO: 2466402 - RNA, 15 nt, Human
cuuacauugugaaac

SEQ ID NO: 2466403 - RNA, 17 nt, Human
cuuacauuuuuacaaua

SEQ ID NO: 2466404 - RNA, 14 nt, Human
cuuacauuuuuaca

SEQ ID NO: 2466405 - RNA, 14 nt, Human
cuuaccaacuuucu

SEQ ID NO: 2466406 - RNA, 20 nt, Human
cuuacauuuuacuuuuuccu

SEQ ID NO: 2466407 - RNA, 21 nt, Human
cuuacaauuuuuuuaauuuug

SEQ ID NO: 2466408 - RNA, 20 nt, Human
cuuacaauuuuuuuaauuuu

SEQ ID NO: 2466409 - RNA, 20 nt, Human
cuuacaauucccugcugucg

SEQ ID NO: 2466410 - RNA, 19 nt, Human
cuuacaauucccugcuguc

SEQ ID NO: 2466411 - RNA, 23 nt, Human
cuuacaauuuuuuuaauuuugua

SEQ ID NO: 2466412 - RNA, 22 nt, Human
cuuacaauuuuuuuaauuuugu

SEQ ID NO: 2466413 - RNA, 22 nt, Human
cuuacauuagcaguuugcuuug

SEQ ID NO: 2466414 - RNA, 21 nt, Human
cuuacauuagcaguuugcuuu

SEQ ID NO: 2466415 - RNA, 18 nt, Human
cuuacaagccuaagaauc

SEQ ID NO: 2466416 - RNA, 16 nt, Human
cuuacaauucccugcu

SEQ ID NO: 2466417 - RNA, 17 nt, Human
cuuacaagccagcugga

SEQ ID NO: 2466418 - RNA, 16 nt, Human
cuuacaagccagcugg

SEQ ID NO: 2466419 - RNA, 19 nt, Human
cugugucccaugacccacc

SEQ ID NO: 2466420 - RNA, 14 nt, Human
cuguuauaacucug

SEQ ID NO: 2466421 - RNA, 16 nt, Human
cuguuauuuagacuca

SEQ ID NO: 2466422 - RNA, 14 nt, Human
cuguuauuuagacu

SEQ ID NO: 2466423 - RNA, 14 nt, Human
cuguuauuuauaau

SEQ ID NO: 2466424 - RNA, 20 nt, Human
cuguuauuuauaaucacuuu

SEQ ID NO: 2466425 - RNA, 17 nt, Human
cuguuauuucuauuuuu

SEQ ID NO: 2466426 - RNA, 23 nt, Human
cuguucaagagcacacuuggccc

SEQ ID NO: 2466427 - RNA, 21 nt, Human
cuguucaagagcacacuuggc

SEQ ID NO: 2466428 - RNA, 17 nt, Human
cuguucaauguuuaaug

SEQ ID NO: 2466429 - RNA, 12 nt, Human
cuguucaagagc

SEQ ID NO: 2466430 - RNA, 16 nt, Human
cuguuauuucuauuuu

SEQ ID NO: 2466431 - RNA, 17 nt, Human
gaaacaacucuuugaga

SEQ ID NO: 2466432 - RNA, 20 nt, Human
gaaacaacucuuugagaaac

SEQ ID NO: 2466433 - RNA, 14 nt, Human
gaaacaacuuggaa

SEQ ID NO: 2466434 - RNA, 13 nt, Human
gaaacaaagaagg

SEQ ID NO: 2466435 - RNA, 21 nt, Human
gaaaauucaaaaaguguuuau

SEQ ID NO: 2466436 - RNA, 20 nt, Human
gaaaauucaaaaaguguuua

SEQ ID NO: 2466437 - RNA, 19 nt, Human
gaaaauucaaaaaguguuu

SEQ ID NO: 2466438 - RNA, 14 nt, Human
gaaacaaagaaggu

SEQ ID NO: 2466439 - RNA, 17 nt, Human
gaaaauucaaaaagugu

SEQ ID NO: 2466440 - RNA, 17 nt, Human
gaaaauuauuuuaaaca

SEQ ID NO: 2466441 - RNA, 16 nt, Human
gaaaauuauuugcaua

SEQ ID NO: 2466442 - RNA, 22 nt, Human
gaaacaaagcuuagcaggagag

SEQ ID NO: 2466443 - RNA, 19 nt, Human
gaaacaaagcuuagcagga

SEQ ID NO: 2466444 - RNA, 15 nt, Human
gaaacaaagcuuagc

SEQ ID NO: 2466445 - RNA, 15 nt, Human
gaaacaacagcuuua

SEQ ID NO: 2466446 - RNA, 21 nt, Human
gaaacaacagcuuuaaaagaa

SEQ ID NO: 2466447 - RNA, 15 nt, Human
gaaaauuauuugcau

SEQ ID NO: 2466448 - RNA, 15 nt, Human
gaaaauguugagaau

SEQ ID NO: 2466449 - RNA, 17 nt, Human
gaaaauguugagaaucc

SEQ ID NO: 2466450 - RNA, 20 nt, Human
gaaaauguugagaaucccaa

SEQ ID NO: 2466451 - RNA, 23 nt, Human
gaaaaugucuauucaaaauauca

SEQ ID NO: 2466452 - RNA, 15 nt, Human
gaaaauguuauuuaa

SEQ ID NO: 2466453 - RNA, 16 nt, Human
gaaaauguuauuuaac

SEQ ID NO: 2466454 - RNA, 12 nt, Human
gaaaaugugugu

SEQ ID NO: 2466455 - RNA, 15 nt, Human
gaaaaugugugugug

SEQ ID NO: 2466456 - RNA, 14 nt, Human
gaaaaugucuugug

SEQ ID NO: 2466457 - RNA, 23 nt, Human
gaaaaugucagaaaccaguuaug

SEQ ID NO: 2466458 - RNA, 14 nt, Human
gaaaagcaccugcc

SEQ ID NO: 2466459 - RNA, 14 nt, Human
gaaaagauguagau

SEQ ID NO: 2466460 - RNA, 17 nt, Human
gaaaagauguagauuua

SEQ ID NO: 2466461 - RNA, 18 nt, Human
gaaaagauguagauuuau

SEQ ID NO: 2466462 - RNA, 19 nt, Human
gaaaagauguagauuuauu

SEQ ID NO: 2466463 - RNA, 23 nt, Human
gaaaagauuuuaaucaaguugaa

SEQ ID NO: 2466464 - RNA, 13 nt, Human
gaaaagauuuuaa

SEQ ID NO: 2466465 - RNA, 17 nt, Human
gaaaagauuuuaaucaa

SEQ ID NO: 2466466 - RNA, 21 nt, Human
gaaaagauguagauuuauuuc

SEQ ID NO: 2466467 - RNA, 14 nt, Human
gaaaagacuccaaa

SEQ ID NO: 2466468 - RNA, 19 nt, Human
gaaaagaauacagaaagau

SEQ ID NO: 2466469 - RNA, 22 nt, Human
gaaaagaaaucuaugauuccag

SEQ ID NO: 2466470 - RNA, 16 nt, Human
gaaaagaauacagaaa

SEQ ID NO: 2466471 - RNA, 18 nt, Human
gaaaagaauacagaaaga

SEQ ID NO: 2466472 - RNA, 16 nt, Human
gaaaagacuccaaaga

SEQ ID NO: 2466473 - RNA, 17 nt, Human
gaaaagacuccaaagaa

SEQ ID NO: 2466474 - RNA, 13 nt, Human
gaaaagauaaaga

SEQ ID NO: 2466475 - RNA, 20 nt, Human
gaaaagaggaguuucgaggu

SEQ ID NO: 2466476 - RNA, 12 nt, Human
gaaaagaggagu

SEQ ID NO: 2466477 - RNA, 21 nt, Human
gaaaagagauggccugagaag

SEQ ID NO: 2466478 - RNA, 14 nt, Human
gaaaagagauggcc

SEQ ID NO: 2466479 - RNA, 21 nt, Human
gaaaagagauauuuuaaaaug

SEQ ID NO: 2466480 - RNA, 22 nt, Human
gaaaagauacgacuuuauuuuc

SEQ ID NO: 2466481 - RNA, 21 nt, Human
gaaaagaggaguuucgaggua

SEQ ID NO: 2466482 - RNA, 16 nt, Human
gaaaagauacgacuuu

SEQ ID NO: 2466483 - RNA, 19 nt, Human
gaaaagauacgacuuuauu

SEQ ID NO: 2466484 - RNA, 20 nt, Human
gaaaagauacgacuuuauuu

SEQ ID NO: 2466485 - RNA, 23 nt, Human
gaaaagaaaaaugagccuggcaa

SEQ ID NO: 2466486 - RNA, 21 nt, Human
gaaaacuuuaugcuaagugaa

SEQ ID NO: 2466487 - RNA, 18 nt, Human
gaaaacuuguauuaugug

SEQ ID NO: 2466488 - RNA, 22 nt, Human
gaaaacuuguauuauguguguu

SEQ ID NO: 2466489 - RNA, 19 nt, Human
gaaaacuuguauuaugugu

SEQ ID NO: 2466490 - RNA, 14 nt, Human
gaaaaaaguuguag

SEQ ID NO: 2466491 - RNA, 22 nt, Human
gaaaaaaguuguaggcgaauca

SEQ ID NO: 2466492 - RNA, 23 nt, Human
gaaaaaaguuguaggcgaaucau

SEQ ID NO: 2466493 - RNA, 17 nt, Human
gaaaaaauaacacacau

SEQ ID NO: 2466494 - RNA, 17 nt, Human
gaaaaaagagaaaagaa

SEQ ID NO: 2466495 - RNA, 18 nt, Human
gaaaaaagagaaaagaaa

SEQ ID NO: 2466496 - RNA, 10 nt, Human
gaaaaaagag

SEQ ID NO: 2466497 - RNA, 16 nt, Human
gaaaaaagagaaaaga

SEQ ID NO: 2466498 - RNA, 19 nt, Human
gaaaaaacaccuagcuuua

SEQ ID NO: 2466499 - RNA, 16 nt, Human
gaaaaaaaugacuaaa

SEQ ID NO: 2466500 - RNA, 13 nt, Human
gaaagggcccaga

SEQ ID NO: 2466501 - RNA, 15 nt, Human
gaaaggcuccaggag

SEQ ID NO: 2466502 - RNA, 14 nt, Human
gaaaggcuccagga

SEQ ID NO: 2466503 - RNA, 13 nt, Human
gaaaggcuccagg

SEQ ID NO: 2466504 - RNA, 23 nt, Human
gaaagaaaguugcacggcugcug

SEQ ID NO: 2466505 - RNA, 22 nt, Human
gaaagaaaguugcacggcugcu

SEQ ID NO: 2466506 - RNA, 23 nt, Human
gaaagaacauggacuuguauauu

SEQ ID NO: 2466507 - RNA, 20 nt, Human
gaaagaacauggacuuguau

SEQ ID NO: 2466508 - RNA, 19 nt, Human
gaaagaacauggacuugua

SEQ ID NO: 2466509 - RNA, 17 nt, Human
gaaacuggguuccugca

SEQ ID NO: 2466510 - RNA, 17 nt, Human
gaaacuggcacugaauu

SEQ ID NO: 2466511 - RNA, 18 nt, Human
gaaagaaaaucaggcugg

SEQ ID NO: 2466512 - RNA, 16 nt, Human
gaaagaaaauaugcau

SEQ ID NO: 2466513 - RNA, 17 nt, Human
gaaagaaaauaugcauc

SEQ ID NO: 2466514 - RNA, 21 nt, Human
gaaagaaacccgacagaggga

SEQ ID NO: 2466515 - RNA, 22 nt, Human
gaaagaaacccgacagagggaa

SEQ ID NO: 2466516 - RNA, 15 nt, Human
gaaagaaagaaggaa

SEQ ID NO: 2466517 - RNA, 13 nt, Human
gaaacuggauuaa

SEQ ID NO: 2466518 - RNA, 17 nt, Human
gaaacuggauuaaacuu

SEQ ID NO: 2466519 - RNA, 21 nt, Human
gaaacugcuuguuuccuagca

SEQ ID NO: 2466520 - RNA, 17 nt, Human
gaacacucaugcugaaa

SEQ ID NO: 2466521 - RNA, 18 nt, Human
gaacacuccaauuaagga

SEQ ID NO: 2466522 - RNA, 22 nt, Human
gaacacuaaccugaccgugggc

SEQ ID NO: 2466523 - RNA, 16 nt, Human
gaacacuaaccugacc

SEQ ID NO: 2466524 - RNA, 22 nt, Human
gaacacguccagaauuuuucau

SEQ ID NO: 2466525 - RNA, 13 nt, Human
gaacacuagccag

SEQ ID NO: 2466526 - RNA, 16 nt, Human
gaacacucaugcugaa

SEQ ID NO: 2466527 - RNA, 14 nt, Human
gaacacggccacau

SEQ ID NO: 2466528 - RNA, 22 nt, Human
gaacacggccacaucaaagagg

SEQ ID NO: 2466529 - RNA, 21 nt, Human
gaacacccgacuccucaaaag

SEQ ID NO: 2466530 - RNA, 16 nt, Human
gaacacccuauauuuu

SEQ ID NO: 2466531 - RNA, 14 nt, Human
gaacacccucgaag

SEQ ID NO: 2466532 - RNA, 21 nt, Human
gaacaaguuguuucauugacu

SEQ ID NO: 2466533 - RNA, 19 nt, Human
gaacaaguuguuucauuga

SEQ ID NO: 2466534 - RNA, 22 nt, Human
gaacaagucccuguaauuguug

SEQ ID NO: 2466535 - RNA, 17 nt, Human
gaacacaaacuguaaau

SEQ ID NO: 2466536 - RNA, 14 nt, Human
gaacaaucaaagca

SEQ ID NO: 2466537 - RNA, 21 nt, Human
gaacaaugugcuaugugaaga

SEQ ID NO: 2466538 - RNA, 20 nt, Human
gaacaauauugacuuugucu

SEQ ID NO: 2466539 - RNA, 19 nt, Human
gaacaauauugacuuuguc

SEQ ID NO: 2466540 - RNA, 19 nt, Human
gaacacaaacuguaaauaa

SEQ ID NO: 2466541 - RNA, 22 nt, Human
gaacacacuguguccuggugcu

SEQ ID NO: 2466542 - RNA, 16 nt, Human
gaacacacuguguccu

SEQ ID NO: 2466543 - RNA, 14 nt, Human
gaacacacuguguc

SEQ ID NO: 2466544 - RNA, 14 nt, Human
gaacacacuccauc

SEQ ID NO: 2466545 - RNA, 17 nt, Human
gaacacaggcaaaaucc

SEQ ID NO: 2466546 - RNA, 15 nt, Human
gaacacagaaagccu

SEQ ID NO: 2466547 - RNA, 17 nt, Human
gaacacauaauucagga

SEQ ID NO: 2466548 - RNA, 20 nt, Human
gaacacauaauucaggaagc

SEQ ID NO: 2466549 - RNA, 21 nt, Human
gaacaccagagaccucaaauu

SEQ ID NO: 2466550 - RNA, 15 nt, Human
gaacaaagugagaca

SEQ ID NO: 2466551 - RNA, 22 nt, Human
gaacaaaggacagaguaugaac

SEQ ID NO: 2466552 - RNA, 19 nt, Human
gaacaaagcagccacgagg

SEQ ID NO: 2466553 - RNA, 15 nt, Human
gaacaaagcagccac

SEQ ID NO: 2466554 - RNA, 16 nt, Human
gaacaaagcagccacg

SEQ ID NO: 2466555 - RNA, 14 nt, Human
gaacaaagcagcca

SEQ ID NO: 2466556 - RNA, 19 nt, Human
gaacaaaaaaaucugcaga

SEQ ID NO: 2466557 - RNA, 21 nt, Human
gaacaaaaaaaucugcagaag

SEQ ID NO: 2466558 - RNA, 16 nt, Human
gaacaaaaaaaucugc

SEQ ID NO: 2466559 - RNA, 19 nt, Human
gaaaugaaaacauguaaua

SEQ ID NO: 2466560 - RNA, 22 nt, Human
gaaaucuguaucuguagugaga

SEQ ID NO: 2466561 - RNA, 19 nt, Human
gaaaucucacuuuucucca

SEQ ID NO: 2466562 - RNA, 11 nt, Human
gaaaugaaaaa

SEQ ID NO: 2466563 - RNA, 14 nt, Human
gaaaucuuuuaaaa

SEQ ID NO: 2466564 - RNA, 19 nt, Human
gaaaucuuacagcugggug

SEQ ID NO: 2466565 - RNA, 20 nt, Human
gaaaucugugccugagaaca

SEQ ID NO: 2466566 - RNA, 16 nt, Human
gaaaugaaaacaugua

SEQ ID NO: 2466567 - RNA, 13 nt, Human
gaaaugaaagaaa

SEQ ID NO: 2466568 - RNA, 15 nt, Human
gaaaggggagagccu

SEQ ID NO: 2466569 - RNA, 20 nt, Human
gaaagggcaacaauaaaaua

SEQ ID NO: 2466570 - RNA, 20 nt, Human
gaaaggggagagccugcugg

SEQ ID NO: 2466571 - RNA, 18 nt, Human
gaaaggggagagccugcu

SEQ ID NO: 2466572 - RNA, 13 nt, Human
gaaaggggagccc

SEQ ID NO: 2466573 - RNA, 15 nt, Human
gaaaggggagcccac

SEQ ID NO: 2466574 - RNA, 16 nt, Human
gaaaggggagcccacu

SEQ ID NO: 2466575 - RNA, 16 nt, Human
gaaagggcccagagag

SEQ ID NO: 2466576 - RNA, 15 nt, Human
gaaagggcccagaga

SEQ ID NO: 2466577 - RNA, 18 nt, Human
gaaaucuaugauuccagg

SEQ ID NO: 2466578 - RNA, 15 nt, Human
gaaaucuaguauuuc

SEQ ID NO: 2466579 - RNA, 20 nt, Human
gaaaucuaugauuccaggug

SEQ ID NO: 2466580 - RNA, 12 nt, Human
gaaaucucaccc

SEQ ID NO: 2466581 - RNA, 23 nt, Human
gaaaucccuguuuaauauuuaaa

SEQ ID NO: 2466582 - RNA, 22 nt, Human
gaaaucccuguuuaauauuuaa

SEQ ID NO: 2466583 - RNA, 21 nt, Human
gaaaucccuguuuaauauuua

SEQ ID NO: 2466584 - RNA, 19 nt, Human
gaaaucccuguuuaauauu

SEQ ID NO: 2466585 - RNA, 21 nt, Human
gaaaggggagagccugcuggc

SEQ ID NO: 2466586 - RNA, 18 nt, Human
gaaaucccuguuuaauau

SEQ ID NO: 2466587 - RNA, 22 nt, Human
gaaccaccacacccagcccacu

SEQ ID NO: 2466588 - RNA, 21 nt, Human
gaaccaccacacccagcccac

SEQ ID NO: 2466589 - RNA, 20 nt, Human
gaaccaccacacccagccca

SEQ ID NO: 2466590 - RNA, 18 nt, Human
gaaccaccacacccagcc

SEQ ID NO: 2466591 - RNA, 16 nt, Human
gaagacgccugagcuc

SEQ ID NO: 2466592 - RNA, 15 nt, Human
gaagacgccugagcu

SEQ ID NO: 2466593 - RNA, 23 nt, Human
gaagacgaggcccucgggcccag

SEQ ID NO: 2466594 - RNA, 22 nt, Human
gaagacgaggcccucgggccca

SEQ ID NO: 2466595 - RNA, 14 nt, Human
gaagacgaggcccu

SEQ ID NO: 2466596 - RNA, 16 nt, Human
gaagacucauucuucu

SEQ ID NO: 2466597 - RNA, 18 nt, Human
gaagacucauucuucugu

SEQ ID NO: 2466598 - RNA, 17 nt, Human
gaagacucauucuucug

SEQ ID NO: 2466599 - RNA, 22 nt, Human
gaagcacaugccucucucaggc

SEQ ID NO: 2466600 - RNA, 14 nt, Human
gaagcacaugccuc

SEQ ID NO: 2466601 - RNA, 14 nt, Human
gaagcacagcuuca

SEQ ID NO: 2466602 - RNA, 13 nt, Human
gaagcacagcuuc

SEQ ID NO: 2466603 - RNA, 21 nt, Human
gaagcacaugccucucucagg

SEQ ID NO: 2466604 - RNA, 14 nt, Human
gaagcacauguuua

SEQ ID NO: 2466605 - RNA, 16 nt, Human
gaagcaccauaacuuu

SEQ ID NO: 2466606 - RNA, 19 nt, Human
gaagcacuguuccagccug

SEQ ID NO: 2466607 - RNA, 16 nt, Human
gaagcaccccaugcca

SEQ ID NO: 2466608 - RNA, 21 nt, Human
gaagcaccccaugccaaagcu

SEQ ID NO: 2466609 - RNA, 22 nt, Human
gaagcagccucuccccaggucc

SEQ ID NO: 2466610 - RNA, 12 nt, Human
gaagcagccucu

SEQ ID NO: 2466611 - RNA, 23 nt, Human
gaagcagaugcaaagaggcaaga

SEQ ID NO: 2466612 - RNA, 18 nt, Human
gaagcaggcuacacugac

SEQ ID NO: 2466613 - RNA, 14 nt, Human
gaagcaggcuacac

SEQ ID NO: 2466614 - RNA, 12 nt, Human
gaagcagcucuu

SEQ ID NO: 2466615 - RNA, 13 nt, Human
gaagcaggcugga

SEQ ID NO: 2466616 - RNA, 12 nt, Human
gaagcaggcugg

SEQ ID NO: 2466617 - RNA, 23 nt, Human
gaagcaggcuacacugacacugg

SEQ ID NO: 2466618 - RNA, 19 nt, Human
gaagcaggcuacacugaca

SEQ ID NO: 2466619 - RNA, 15 nt, Human
gaagcaggcuggagg

SEQ ID NO: 2466620 - RNA, 15 nt, Human
gaagcagugagccgc

SEQ ID NO: 2466621 - RNA, 23 nt, Human
gaagcagguugaggggcuccugg

SEQ ID NO: 2466622 - RNA, 19 nt, Human
gaagcagguugaggggcuc

SEQ ID NO: 2466623 - RNA, 22 nt, Human
gaagcagguugaggggcuccug

SEQ ID NO: 2466624 - RNA, 12 nt, Human
gaagcagguucc

SEQ ID NO: 2466625 - RNA, 19 nt, Human
gaagcagguucccaagcuc

SEQ ID NO: 2466626 - RNA, 18 nt, Human
gaagcagguugaggggcu

SEQ ID NO: 2466627 - RNA, 13 nt, Human
gaagacagcucuu

SEQ ID NO: 2466628 - RNA, 12 nt, Human
gaagacagcucu

SEQ ID NO: 2466629 - RNA, 15 nt, Human
gaagacagagcuaca

SEQ ID NO: 2466630 - RNA, 13 nt, Human
gaagacagagcua

SEQ ID NO: 2466631 - RNA, 16 nt, Human
gaagacacugaugggc

SEQ ID NO: 2466632 - RNA, 15 nt, Human
gaacugcaugcugcu

SEQ ID NO: 2466633 - RNA, 15 nt, Human
gaacugcauauguuu

SEQ ID NO: 2466634 - RNA, 21 nt, Human
gaacugcauauguuucgcuga

SEQ ID NO: 2466635 - RNA, 21 nt, Human
gaagacacugaugggcaaccc

SEQ ID NO: 2466636 - RNA, 18 nt, Human
gaagacagagaccuccug

SEQ ID NO: 2466637 - RNA, 19 nt, Human
gaacugcaugcugcuggac

SEQ ID NO: 2466638 - RNA, 23 nt, Human
gaagacaccagagcagaugcaga

SEQ ID NO: 2466639 - RNA, 21 nt, Human
gaagacacugaaauauacaca

SEQ ID NO: 2466640 - RNA, 19 nt, Human
gaagaccucaccuagaaau

SEQ ID NO: 2466641 - RNA, 18 nt, Human
gaagaccccacccaagcu

SEQ ID NO: 2466642 - RNA, 22 nt, Human
gaagaccuggcaaggacacaga

SEQ ID NO: 2466643 - RNA, 20 nt, Human
gaagaccucaccuagaaauu

SEQ ID NO: 2466644 - RNA, 22 nt, Human
gaagaccugcugagggaccagc

SEQ ID NO: 2466645 - RNA, 20 nt, Human
gaagaccagcuuugcaguga

SEQ ID NO: 2466646 - RNA, 18 nt, Human
gaagaccagacuguggag

SEQ ID NO: 2466647 - RNA, 22 nt, Human
gaagaccacauccacacacgca

SEQ ID NO: 2466648 - RNA, 21 nt, Human
gaagaccacauccacacacgc

SEQ ID NO: 2466649 - RNA, 20 nt, Human
gaagaccacauccacacacg

SEQ ID NO: 2466650 - RNA, 14 nt, Human
gaagaccacaucca

SEQ ID NO: 2466651 - RNA, 23 nt, Human
gaagaccaaucucuugaauccca

SEQ ID NO: 2466652 - RNA, 18 nt, Human
gaagacauguuuuagaca

SEQ ID NO: 2466653 - RNA, 16 nt, Human
gaagaccccacccaag

SEQ ID NO: 2466654 - RNA, 15 nt, Human
gaagaccccacccaa

SEQ ID NO: 2466655 - RNA, 14 nt, Human
gaagacccuccccg

SEQ ID NO: 2466656 - RNA, 14 nt, Human
gaagaccccaccca

SEQ ID NO: 2466657 - RNA, 15 nt, Human
gaagacagcucuuau

SEQ ID NO: 2466658 - RNA, 14 nt, Human
gaagacagcucuua

SEQ ID NO: 2466659 - RNA, 18 nt, Human
gaagacaugaaccaagug

SEQ ID NO: 2466660 - RNA, 21 nt, Human
gaagacagagaccuccugccu

SEQ ID NO: 2466661 - RNA, 15 nt, Human
gaagacaggacagug

SEQ ID NO: 2466662 - RNA, 21 nt, Human
gaagacauggagacuccugcc

SEQ ID NO: 2466663 - RNA, 20 nt, Human
gaagacauggagacuccugc

SEQ ID NO: 2466664 - RNA, 15 nt, Human
gaagacauggagacu

SEQ ID NO: 2466665 - RNA, 12 nt, Human
gaagacauguuu

SEQ ID NO: 2466666 - RNA, 22 nt, Human
gaagacauggggaggaaggaca

SEQ ID NO: 2466667 - RNA, 18 nt, Human
gaacucuuagaaaugaag

SEQ ID NO: 2466668 - RNA, 15 nt, Human
gaacucuuagaaaug

SEQ ID NO: 2466669 - RNA, 20 nt, Human
gaacucuuaaucaaauagca

SEQ ID NO: 2466670 - RNA, 13 nt, Human
gaacucuuaauca

SEQ ID NO: 2466671 - RNA, 20 nt, Human
gaacucuggcuuccagguau

SEQ ID NO: 2466672 - RNA, 18 nt, Human
gaacucugggcugccaug

SEQ ID NO: 2466673 - RNA, 14 nt, Human
gaacuccuggccuc

SEQ ID NO: 2466674 - RNA, 17 nt, Human
gaacucuggcuuccagg

SEQ ID NO: 2466675 - RNA, 19 nt, Human
gaacucuggcuuccaggua

SEQ ID NO: 2466676 - RNA, 19 nt, Human
gaaccccgucgaggggcuc

SEQ ID NO: 2466677 - RNA, 20 nt, Human
gaacuccuggaaauaucagu

SEQ ID NO: 2466678 - RNA, 17 nt, Human
gaacccgggaggcagag

SEQ ID NO: 2466679 - RNA, 19 nt, Human
gaacccgggaggcagaggu

SEQ ID NO: 2466680 - RNA, 15 nt, Human
gaacuccugaccuca

SEQ ID NO: 2466681 - RNA, 14 nt, Human
gaacuccugaccuc

SEQ ID NO: 2466682 - RNA, 13 nt, Human
gaacuccuggccu

SEQ ID NO: 2466683 - RNA, 23 nt, Human
gaacugcaggcccuggccucccc

SEQ ID NO: 2466684 - RNA, 21 nt, Human
gaacugcaggcccuggccucc

SEQ ID NO: 2466685 - RNA, 19 nt, Human
gaacugcaggcccuggccu

SEQ ID NO: 2466686 - RNA, 18 nt, Human
gaacugcaggcccuggcc

SEQ ID NO: 2466687 - RNA, 17 nt, Human
gaacugcaggcccuggc

SEQ ID NO: 2466688 - RNA, 16 nt, Human
gaacugcaggcccugg

SEQ ID NO: 2466689 - RNA, 14 nt, Human
gaacugcaggcccu

SEQ ID NO: 2466690 - RNA, 12 nt, Human
gaacugcaggcc

SEQ ID NO: 2466691 - RNA, 19 nt, Human
gaacugcagaccuguccuc

SEQ ID NO: 2466692 - RNA, 18 nt, Human
gaacugcagaccuguccu

SEQ ID NO: 2466693 - RNA, 17 nt, Human
gaacugcagaccugucc

SEQ ID NO: 2466694 - RNA, 16 nt, Human
gaacugcagaccuguc

SEQ ID NO: 2466695 - RNA, 13 nt, Human
gaacugauaguua

SEQ ID NO: 2466696 - RNA, 19 nt, Human
gaacugauaguuacuguug

SEQ ID NO: 2466697 - RNA, 15 nt, Human
gaacugagcuuggaa

SEQ ID NO: 2466698 - RNA, 16 nt, Human
gaacugagcuuggaag

SEQ ID NO: 2466699 - RNA, 21 nt, Human
gaacugagcuuggaagcuucu

SEQ ID NO: 2466700 - RNA, 22 nt, Human
gaacugagcuuggaagcuucug

SEQ ID NO: 2466701 - RNA, 14 nt, Human
gaacugagcuugga

SEQ ID NO: 2466702 - RNA, 21 nt, Human
gaacugagcuccucugggcag

SEQ ID NO: 2466703 - RNA, 21 nt, Human
gaaccccccucccacccaccg

SEQ ID NO: 2466704 - RNA, 17 nt, Human
gaaccccccucccaccc

SEQ ID NO: 2466705 - RNA, 20 nt, Human
gaaccccggggugcccacag

SEQ ID NO: 2466706 - RNA, 18 nt, Human
gaaccccuggcuccaggc

SEQ ID NO: 2466707 - RNA, 21 nt, Human
gaaccccuacaugaaacagaa

SEQ ID NO: 2466708 - RNA, 17 nt, Human
gaaccccuucauccucu

SEQ ID NO: 2466709 - RNA, 22 nt, Human
gaaccccuggcuccaggccagg

SEQ ID NO: 2466710 - RNA, 17 nt, Human
gaacccaggacgcuucu

SEQ ID NO: 2466711 - RNA, 15 nt, Human
gaacccaggacgcuu

SEQ ID NO: 2466712 - RNA, 16 nt, Human
gaacccaggaggugga

SEQ ID NO: 2466713 - RNA, 23 nt, Human
gaacccauuccauuuaucuuucu

SEQ ID NO: 2466714 - RNA, 19 nt, Human
gaacccaggacgcuucuga

SEQ ID NO: 2466715 - RNA, 14 nt, Human
gaaccccccuccca

SEQ ID NO: 2466716 - RNA, 17 nt, Human
gaaccccaaggagggag

SEQ ID NO: 2466717 - RNA, 16 nt, Human
gaacccaaguccaagc

SEQ ID NO: 2466718 - RNA, 17 nt, Human
gaacccaaguccaagca

SEQ ID NO: 2466719 - RNA, 16 nt, Human
gaacccagacucagac

SEQ ID NO: 2466720 - RNA, 17 nt, Human
gaacccagacucagaca

SEQ ID NO: 2466721 - RNA, 19 nt, Human
gaacccagacucagacauu

SEQ ID NO: 2466722 - RNA, 13 nt, Human
gaacccagacuca

SEQ ID NO: 2466723 - RNA, 15 nt, Human
gaacccaccugcuga

SEQ ID NO: 2466724 - RNA, 19 nt, Human
gaacccaccugcugagaga

SEQ ID NO: 2466725 - RNA, 12 nt, Human
gaacccaccugc

SEQ ID NO: 2466726 - RNA, 13 nt, Human
gaacccaccugcu

SEQ ID NO: 2466727 - RNA, 14 nt, Human
gaacccaccugcug

SEQ ID NO: 2466728 - RNA, 13 nt, Human
gaaccaggagcug

SEQ ID NO: 2466729 - RNA, 23 nt, Human
gaaccagaugaguaaaggaguaa

SEQ ID NO: 2466730 - RNA, 21 nt, Human
gaaccaggaaauggaacccca

SEQ ID NO: 2466731 - RNA, 12 nt, Human
gaaccagagcca

SEQ ID NO: 2466732 - RNA, 19 nt, Human
gaaccagagccauggacuc

SEQ ID NO: 2466733 - RNA, 23 nt, Human
gaaccagagccauggacucuaca

SEQ ID NO: 2466734 - RNA, 14 nt, Human
gaaccacuucccuc

SEQ ID NO: 2466735 - RNA, 19 nt, Human
gaaccacuacaugcagccc

SEQ ID NO: 2466736 - RNA, 23 nt, Human
gaaccaccacacccagcccacuu

SEQ ID NO: 2466737 - RNA, 12 nt, Human
gaaccaucagaa

SEQ ID NO: 2466738 - RNA, 20 nt, Human
gaaccaucauuauaaacgug

SEQ ID NO: 2466739 - RNA, 19 nt, Human
gaaccaguuucagguguuu

SEQ ID NO: 2466740 - RNA, 19 nt, Human
gaaccaguccccccacccu

SEQ ID NO: 2466741 - RNA, 18 nt, Human
gaaccagggagaccgagc

SEQ ID NO: 2466742 - RNA, 22 nt, Human
gaaccauggucggaaaacaugc

SEQ ID NO: 2466743 - RNA, 18 nt, Human
gaaccaugaagacaggau

SEQ ID NO: 2466744 - RNA, 17 nt, Human
gaaccaugaagacagga

SEQ ID NO: 2466745 - RNA, 16 nt, Human
gaaccaugaagacagg

SEQ ID NO: 2466746 - RNA, 21 nt, Human
gaaccaugucagcaaaaagca

SEQ ID NO: 2466747 - RNA, 23 nt, Human
gaaccaugucagcaaaaagcaaa

SEQ ID NO: 2466748 - RNA, 17 nt, Human
cuuucuaaugugugaau

SEQ ID NO: 2466749 - RNA, 16 nt, Human
cuuucuacccagcgag

SEQ ID NO: 2466750 - RNA, 15 nt, Human
cuuucuacccagcga

SEQ ID NO: 2466751 - RNA, 19 nt, Human
cuuucuacaguauuaugua

SEQ ID NO: 2466752 - RNA, 20 nt, Human
cuuucuacagggcugacauu

SEQ ID NO: 2466753 - RNA, 15 nt, Human
cuuucuacaauguga

SEQ ID NO: 2466754 - RNA, 18 nt, Human
cuuucuacaaugugaacu

SEQ ID NO: 2466755 - RNA, 14 nt, Human
cuuucuacaggcca

SEQ ID NO: 2466756 - RNA, 20 nt, Human
cuuucuacaaugugaacuuu

SEQ ID NO: 2466757 - RNA, 16 nt, Human
cuuucuauuguacaga

SEQ ID NO: 2466758 - RNA, 15 nt, Human
cuuucuauuguacag

SEQ ID NO: 2466759 - RNA, 16 nt, Human
cuuucuauugaaaaau

SEQ ID NO: 2466760 - RNA, 23 nt, Human
cuuucuacaguauuauguacucu

SEQ ID NO: 2466761 - RNA, 17 nt, Human
cuuucuauuguacagaa

SEQ ID NO: 2466762 - RNA, 17 nt, Human
cuuugacgccaucccag

SEQ ID NO: 2466763 - RNA, 16 nt, Human
cuuugacgccauccca

SEQ ID NO: 2466764 - RNA, 16 nt, Human
cuuugacucaccuguu

SEQ ID NO: 2466765 - RNA, 23 nt, Human
cuuugaccugccucccuucaugc

SEQ ID NO: 2466766 - RNA, 14 nt, Human
cuuugacucaccug

SEQ ID NO: 2466767 - RNA, 19 nt, Human
cuuugacucaccuguuacu

SEQ ID NO: 2466768 - RNA, 21 nt, Human
cuuugacucuuuugccauuaa

SEQ ID NO: 2466769 - RNA, 16 nt, Human
cuuugacugagcagac

SEQ ID NO: 2466770 - RNA, 14 nt, Human
cuuugaccuguugg

SEQ ID NO: 2466771 - RNA, 20 nt, Human
cuuugaccugccucccuuca

SEQ ID NO: 2466772 - RNA, 18 nt, Human
cuuucucccacugaguuu

SEQ ID NO: 2466773 - RNA, 18 nt, Human
cuuugaccugccucccuu

SEQ ID NO: 2466774 - RNA, 20 nt, Human
cuuucuccagccagcaauga

SEQ ID NO: 2466775 - RNA, 19 nt, Human
cuuucuccagccagcaaug

SEQ ID NO: 2466776 - RNA, 16 nt, Human
cuuucuccagccagca

SEQ ID NO: 2466777 - RNA, 15 nt, Human
cuuucuccagccagc

SEQ ID NO: 2466778 - RNA, 14 nt, Human
cuuucuccagccag

SEQ ID NO: 2466779 - RNA, 13 nt, Human
cuuucuccagcca

SEQ ID NO: 2466780 - RNA, 20 nt, Human
cuuucucagccucugaauau

SEQ ID NO: 2466781 - RNA, 16 nt, Human
cuuucucaguuuucau

SEQ ID NO: 2466782 - RNA, 17 nt, Human
cuuucucaguuuucaua

SEQ ID NO: 2466783 - RNA, 20 nt, Human
cuuucucaguuuucauaagu

SEQ ID NO: 2466784 - RNA, 15 nt, Human
cuuucucaguuuuca

SEQ ID NO: 2466785 - RNA, 22 nt, Human
cuuucucagccgcuucugacug

SEQ ID NO: 2466786 - RNA, 21 nt, Human
cuuucucagccgcuucugacu

SEQ ID NO: 2466787 - RNA, 20 nt, Human
cuuuuauaaacuuuaccuuu

SEQ ID NO: 2466788 - RNA, 21 nt, Human
cuuuuauaaacuuuaccuuuu

SEQ ID NO: 2466789 - RNA, 22 nt, Human
cuuuguauucucuccuguaccu

SEQ ID NO: 2466790 - RNA, 19 nt, Human
cuuuuauaaacuuuaccuu

SEQ ID NO: 2466791 - RNA, 21 nt, Human
cuuuuauaauaaaaggaaaag

SEQ ID NO: 2466792 - RNA, 14 nt, Human
cuuuuauaauaaaa

SEQ ID NO: 2466793 - RNA, 20 nt, Human
cuuuguaugucauuuccuuc

SEQ ID NO: 2466794 - RNA, 22 nt, Human
cuuuuauaacuaguccuuuacu

SEQ ID NO: 2466795 - RNA, 16 nt, Human
cuuuguaaugaaaacc

SEQ ID NO: 2466796 - RNA, 21 nt, Human
cuuuguaaugucaccaccuuc

SEQ ID NO: 2466797 - RNA, 22 nt, Human
cuuuguaaugucaccaccuucc

SEQ ID NO: 2466798 - RNA, 13 nt, Human
cuuuguaaugaaa

SEQ ID NO: 2466799 - RNA, 13 nt, Human
cuuuguaauggga

SEQ ID NO: 2466800 - RNA, 17 nt, Human
cuuuguaaugucaccac

SEQ ID NO: 2466801 - RNA, 17 nt, Human
cuuuguauucucuccug

SEQ ID NO: 2466802 - RNA, 18 nt, Human
cuuuguauauuauuucua

SEQ ID NO: 2466803 - RNA, 12 nt, Human
cuuuguaugcac

SEQ ID NO: 2466804 - RNA, 15 nt, Human
cuuuguaaugaaaac

SEQ ID NO: 2466805 - RNA, 14 nt, Human
cuuuguaaugaaaa

SEQ ID NO: 2466806 - RNA, 14 nt, Human
cuuugguucuggcc

SEQ ID NO: 2466807 - RNA, 19 nt, Human
cuuugguucuggccagaau

SEQ ID NO: 2466808 - RNA, 21 nt, Human
cuuugguucuggccagaaugc

SEQ ID NO: 2466809 - RNA, 19 nt, Human
cuuugguuuuuuucuucug

SEQ ID NO: 2466810 - RNA, 17 nt, Human
cuuugguuuuuuucuuc

SEQ ID NO: 2466811 - RNA, 11 nt, Human
cuuugguuuuu

SEQ ID NO: 2466812 - RNA, 22 nt, Human
cuuugauucuccuucagcccuc

SEQ ID NO: 2466813 - RNA, 19 nt, Human
cuuugauucuccuucagcc

SEQ ID NO: 2466814 - RNA, 18 nt, Human
cuuugauucuccuucagc

SEQ ID NO: 2466815 - RNA, 16 nt, Human
cuuugauucuccuuca

SEQ ID NO: 2466816 - RNA, 19 nt, Human
cuuugagauagaagaacug

SEQ ID NO: 2466817 - RNA, 15 nt, Human
cuuugauucuccuuc

SEQ ID NO: 2466818 - RNA, 18 nt, Human
cuuugagauagaagaacu

SEQ ID NO: 2466819 - RNA, 14 nt, Human
cuuugacuuuuugc

SEQ ID NO: 2466820 - RNA, 15 nt, Human
cuuugacuuuuugca

SEQ ID NO: 2466821 - RNA, 17 nt, Human
cuuugacuuuuugcauu

SEQ ID NO: 2466822 - RNA, 16 nt, Human
cuuugagacaguuucu

SEQ ID NO: 2466823 - RNA, 15 nt, Human
cuuugagacaguuuc

SEQ ID NO: 2466824 - RNA, 13 nt, Human
cuuugagacaguu

SEQ ID NO: 2466825 - RNA, 18 nt, Human
cuuugagacaguuucuua

SEQ ID NO: 2466826 - RNA, 17 nt, Human
cuuugagacaguuucuu

SEQ ID NO: 2466827 - RNA, 17 nt, Human
cuuugagacugggucuc

SEQ ID NO: 2466828 - RNA, 18 nt, Human
cuuugcacagcucuccgg

SEQ ID NO: 2466829 - RNA, 15 nt, Human
cuuugcaaaggagcu

SEQ ID NO: 2466830 - RNA, 16 nt, Human
cuuugcaaaggagcuc

SEQ ID NO: 2466831 - RNA, 20 nt, Human
cuuugauucuccuucagccc

SEQ ID NO: 2466832 - RNA, 14 nt, Human
cuuugguucagcua

SEQ ID NO: 2466833 - RNA, 15 nt, Human
cuuggguaggcggga

SEQ ID NO: 2466834 - RNA, 18 nt, Human
cuuggguggagaagccau

SEQ ID NO: 2466835 - RNA, 17 nt, Human
cuuggguggagaagcca

SEQ ID NO: 2466836 - RNA, 15 nt, Human
cuuggguggagaagc

SEQ ID NO: 2466837 - RNA, 23 nt, Human
cuugggucccccacgugacagug

SEQ ID NO: 2466838 - RNA, 20 nt, Human
cuugggguuuucaguaugaa

SEQ ID NO: 2466839 - RNA, 17 nt, Human
cuugggucccagggaag

SEQ ID NO: 2466840 - RNA, 16 nt, Human
cuuggucugugagaug

SEQ ID NO: 2466841 - RNA, 14 nt, Human
cuugguccugcugc

SEQ ID NO: 2466842 - RNA, 19 nt, Human
cuuggucugugagaugcua

SEQ ID NO: 2466843 - RNA, 16 nt, Human
cuugguccaggaaaug

SEQ ID NO: 2466844 - RNA, 16 nt, Human
cuuggucaccagcucc

SEQ ID NO: 2466845 - RNA, 14 nt, Human
cuuggucaccagcu

SEQ ID NO: 2466846 - RNA, 15 nt, Human
cuuggucuuauuuau

SEQ ID NO: 2466847 - RNA, 22 nt, Human
cuugguagaagcccuucuaccu

SEQ ID NO: 2466848 - RNA, 14 nt, Human
cuuggucacauaca

SEQ ID NO: 2466849 - RNA, 15 nt, Human
cuugguaagaagccg

SEQ ID NO: 2466850 - RNA, 23 nt, Human
cuugguacuacuagaugucuuua

SEQ ID NO: 2466851 - RNA, 22 nt, Human
cuuggguguaacaggucuccuc

SEQ ID NO: 2466852 - RNA, 20 nt, Human
cuuggguggagaagccauug

SEQ ID NO: 2466853 - RNA, 19 nt, Human
cuuggguggagaagccauu

SEQ ID NO: 2466854 - RNA, 23 nt, Human
cuuggguggagaagccauugucu

SEQ ID NO: 2466855 - RNA, 21 nt, Human
cuuggguguaacaggucuccu

SEQ ID NO: 2466856 - RNA, 14 nt, Human
cuuggguucugaua

SEQ ID NO: 2466857 - RNA, 17 nt, Human
cuuggguuuuuguuacc

SEQ ID NO: 2466858 - RNA, 23 nt, Human
cuuggguucaagugauucuccug

SEQ ID NO: 2466859 - RNA, 19 nt, Human
cuugucuuuggacccugag

SEQ ID NO: 2466860 - RNA, 18 nt, Human
cuugucuuuggacccuga

SEQ ID NO: 2466861 - RNA, 15 nt, Human
cuugucuuuggaccc

SEQ ID NO: 2466862 - RNA, 13 nt, Human
cuugucuuuggac

SEQ ID NO: 2466863 - RNA, 17 nt, Human
cuugugacccagcacug

SEQ ID NO: 2466864 - RNA, 13 nt, Human
cuugugacccagc

SEQ ID NO: 2466865 - RNA, 20 nt, Human
cuugugacagauuauacaga

SEQ ID NO: 2466866 - RNA, 19 nt, Human
cuugugacagauuauacag

SEQ ID NO: 2466867 - RNA, 12 nt, Human
cuugugacauau

SEQ ID NO: 2466868 - RNA, 21 nt, Human
cuugugacauauuaugucuuc

SEQ ID NO: 2466869 - RNA, 23 nt, Human
cuugucucaaugcucauaacgga

SEQ ID NO: 2466870 - RNA, 19 nt, Human
cuugucucaaugcucauaa

SEQ ID NO: 2466871 - RNA, 18 nt, Human
cuugucucaaugcucaua

SEQ ID NO: 2466872 - RNA, 17 nt, Human
cuugucucaaugcucau

SEQ ID NO: 2466873 - RNA, 16 nt, Human
cuugucucaaugcuca

SEQ ID NO: 2466874 - RNA, 14 nt, Human
cuugucucaaugcu

SEQ ID NO: 2466875 - RNA, 17 nt, Human
cuugucuauuuuugucu

SEQ ID NO: 2466876 - RNA, 20 nt, Human
cuugguguccuuucccucca

SEQ ID NO: 2466877 - RNA, 21 nt, Human
cuugguguccuuucccuccac

SEQ ID NO: 2466878 - RNA, 16 nt, Human
cuuggucuucccaggc

SEQ ID NO: 2466879 - RNA, 15 nt, Human
cuuggucuucccagg

SEQ ID NO: 2466880 - RNA, 20 nt, Human
cuuggugaauuuuuuuuucc

SEQ ID NO: 2466881 - RNA, 22 nt, Human
cuuggugaauuuuuuuuuccua

SEQ ID NO: 2466882 - RNA, 17 nt, Human
cuugguguaguugaacu

SEQ ID NO: 2466883 - RNA, 15 nt, Human
cuugguguccaccug

SEQ ID NO: 2466884 - RNA, 19 nt, Human
cuuggugucgggcaugaca

SEQ ID NO: 2466885 - RNA, 20 nt, Human
cuuggugucgggcaugacac

SEQ ID NO: 2466886 - RNA, 16 nt, Human
cuugguguccaccugg

SEQ ID NO: 2466887 - RNA, 17 nt, Human
cuugguguccaccuggc

SEQ ID NO: 2466888 - RNA, 19 nt, Human
cuugguguccaccuggccc

SEQ ID NO: 2466889 - RNA, 14 nt, Human
cuugguguccuuuc

SEQ ID NO: 2466890 - RNA, 15 nt, Human
cuuucagaugucuuc

SEQ ID NO: 2466891 - RNA, 12 nt, Human
cuuucagauguc

SEQ ID NO: 2466892 - RNA, 15 nt, Human
cuuucacuauuuccu

SEQ ID NO: 2466893 - RNA, 20 nt, Human
cuuucagaugucuucugccu

SEQ ID NO: 2466894 - RNA, 19 nt, Human
cuuucagaugucuucugcc

SEQ ID NO: 2466895 - RNA, 17 nt, Human
cuuucagaugucuucug

SEQ ID NO: 2466896 - RNA, 16 nt, Human
cuuucagaugucuucu

SEQ ID NO: 2466897 - RNA, 22 nt, Human
cuuucagaugucuucugccugu

SEQ ID NO: 2466898 - RNA, 21 nt, Human
cuuucagaugucuucugccug

SEQ ID NO: 2466899 - RNA, 23 nt, Human
cuuucagaugucuucugccuguu

SEQ ID NO: 2466900 - RNA, 18 nt, Human
cuuuaauuaccaaccugu

SEQ ID NO: 2466901 - RNA, 19 nt, Human
cuuuaauuaccaaccuguu

SEQ ID NO: 2466902 - RNA, 21 nt, Human
cuuguggaagcaaaaaucuga

SEQ ID NO: 2466903 - RNA, 20 nt, Human
cuugugcuuuuccuauuugu

SEQ ID NO: 2466904 - RNA, 18 nt, Human
cuuguggaauugggagcu

SEQ ID NO: 2466905 - RNA, 21 nt, Human
cuuuaauuuauuuuugcaugg

SEQ ID NO: 2466906 - RNA, 19 nt, Human
cuuuaauuuauuuuugcau

SEQ ID NO: 2466907 - RNA, 18 nt, Human
cuuuaauuuauuuuugca

SEQ ID NO: 2466908 - RNA, 16 nt, Human
cuuuaauuuauuuuug

SEQ ID NO: 2466909 - RNA, 22 nt, Human
cuuuaauuuauuuuugcauggc

SEQ ID NO: 2466910 - RNA, 21 nt, Human
cuuuacagguauuuauaauau

SEQ ID NO: 2466911 - RNA, 20 nt, Human
cuuuaauucucaugugaucc

SEQ ID NO: 2466912 - RNA, 17 nt, Human
cuuuaauucucauguga

SEQ ID NO: 2466913 - RNA, 19 nt, Human
cuuuaauucucuuucaaag

SEQ ID NO: 2466914 - RNA, 23 nt, Human
cuuuaauuguuaagauaugaugu

SEQ ID NO: 2466915 - RNA, 17 nt, Human
cuugugccacacccucc

SEQ ID NO: 2466916 - RNA, 18 nt, Human
cuugugccaacacucaag

SEQ ID NO: 2466917 - RNA, 11 nt, Human
cuugugccaua

SEQ ID NO: 2466918 - RNA, 14 nt, Human
cuugugccuggcuc

SEQ ID NO: 2466919 - RNA, 19 nt, Human
cuugugccauagucacaug

SEQ ID NO: 2466920 - RNA, 19 nt, Human
cuugugcagaaaacauugu

SEQ ID NO: 2466921 - RNA, 18 nt, Human
cuugugcagaaaacauug

SEQ ID NO: 2466922 - RNA, 17 nt, Human
cuugugcagaaaacauu

SEQ ID NO: 2466923 - RNA, 16 nt, Human
cuugugcagaaaacau

SEQ ID NO: 2466924 - RNA, 21 nt, Human
cuugugcagaaaacauuguuc

SEQ ID NO: 2466925 - RNA, 20 nt, Human
cuugugcagaaaacauuguu

SEQ ID NO: 2466926 - RNA, 15 nt, Human
cuugugcaguguuga

SEQ ID NO: 2466927 - RNA, 23 nt, Human
cuuuaaugucacaggcaggucca

SEQ ID NO: 2466928 - RNA, 23 nt, Human
cuugugcuggauggagcccaggc

SEQ ID NO: 2466929 - RNA, 22 nt, Human
cuugugcuggauggagcccagg

SEQ ID NO: 2466930 - RNA, 21 nt, Human
cuugugcuggauggagcccag

SEQ ID NO: 2466931 - RNA, 15 nt, Human
cuugugccuggcuca

SEQ ID NO: 2466932 - RNA, 16 nt, Human
cuugugccuggcucag

SEQ ID NO: 2466933 - RNA, 20 nt, Human
cuugugcugaucgugcuaaa

SEQ ID NO: 2466934 - RNA, 20 nt, Human
cuuucacccuuuucuguuug

SEQ ID NO: 2466935 - RNA, 15 nt, Human
cuuucacccuuuucu

SEQ ID NO: 2466936 - RNA, 14 nt, Human
cuuucacccuuuuc

SEQ ID NO: 2466937 - RNA, 17 nt, Human
cuuuaccacccccacac

SEQ ID NO: 2466938 - RNA, 16 nt, Human
cuuuaccacccccaca

SEQ ID NO: 2466939 - RNA, 14 nt, Human
cuuuaccaccccca

SEQ ID NO: 2466940 - RNA, 22 nt, Human
cuuucaccccagggccugagcc

SEQ ID NO: 2466941 - RNA, 23 nt, Human
cuuucaccccagggccugagccu

SEQ ID NO: 2466942 - RNA, 19 nt, Human
cuuuacaugcaauuuauua

SEQ ID NO: 2466943 - RNA, 14 nt, Human
cuuuacaugcaauu

SEQ ID NO: 2466944 - RNA, 17 nt, Human
cuuuacaugcaauuuau

SEQ ID NO: 2466945 - RNA, 17 nt, Human
cuuuacaugacacagcu

SEQ ID NO: 2466946 - RNA, 20 nt, Human
cuuuacaugggguuuucaau

SEQ ID NO: 2466947 - RNA, 13 nt, Human
cuuccuccuggug

SEQ ID NO: 2466948 - RNA, 18 nt, Human
cuuccucuagaagccaag

SEQ ID NO: 2466949 - RNA, 19 nt, Human
cuuccucgcagagaggcca

SEQ ID NO: 2466950 - RNA, 18 nt, Human
cuuccucgcagagaggcc

SEQ ID NO: 2466951 - RNA, 16 nt, Human
cuuccucgcagagagg

SEQ ID NO: 2466952 - RNA, 22 nt, Human
cuuccuccuuuucuuucucucu

SEQ ID NO: 2466953 - RNA, 22 nt, Human
cuuccuccugggcccucucugc

SEQ ID NO: 2466954 - RNA, 19 nt, Human
cuuccucugaggcuggauc

SEQ ID NO: 2466955 - RNA, 15 nt, Human
cuuccucugaggcug

SEQ ID NO: 2466956 - RNA, 22 nt, Human
cuuccucugaggcugaaauuca

SEQ ID NO: 2466957 - RNA, 22 nt, Human
cuuccucuuuccaucuacccuc

SEQ ID NO: 2466958 - RNA, 14 nt, Human
cuuccucugaggcu

SEQ ID NO: 2466959 - RNA, 12 nt, Human
cuuccucugagg

SEQ ID NO: 2466960 - RNA, 16 nt, Human
cuuccucucuccagau

SEQ ID NO: 2466961 - RNA, 16 nt, Human
cuuccucugaggcuga

SEQ ID NO: 2466962 - RNA, 21 nt, Human
cuuccucuuuccaucuacccu

SEQ ID NO: 2466963 - RNA, 15 nt, Human
cuuccucuccacugc

SEQ ID NO: 2466964 - RNA, 14 nt, Human
cuuccucuccacug

SEQ ID NO: 2466965 - RNA, 13 nt, Human
cuuccucuccacu

SEQ ID NO: 2466966 - RNA, 14 nt, Human
cuuccucugagccu

SEQ ID NO: 2466967 - RNA, 15 nt, Human
cuuccucugagccuu

SEQ ID NO: 2466968 - RNA, 19 nt, Human
cuuccucuagaagccaagg

SEQ ID NO: 2466969 - RNA, 15 nt, Human
cuuccucucuccaga

SEQ ID NO: 2466970 - RNA, 14 nt, Human
cuuccucuccaccc

SEQ ID NO: 2466971 - RNA, 13 nt, Human
cuucuaaguaaaa

SEQ ID NO: 2466972 - RNA, 17 nt, Human
cuucuaaguaaaaccac

SEQ ID NO: 2466973 - RNA, 16 nt, Human
cuuccugacacuuuaa

SEQ ID NO: 2466974 - RNA, 17 nt, Human
cuuccugacacuuuaau

SEQ ID NO: 2466975 - RNA, 15 nt, Human
cuuccugacacuuua

SEQ ID NO: 2466976 - RNA, 18 nt, Human
cuuccugacacuuuaauu

SEQ ID NO: 2466977 - RNA, 13 nt, Human
cuuccugaagcug

SEQ ID NO: 2466978 - RNA, 16 nt, Human
cuucuagguucuaaaa

SEQ ID NO: 2466979 - RNA, 21 nt, Human
cuucuaaguaaaaccacagca

SEQ ID NO: 2466980 - RNA, 23 nt, Human
cuucuaaauggcaaaggaaggug

SEQ ID NO: 2466981 - RNA, 23 nt, Human
cuucuaaagguguugucccuucu

SEQ ID NO: 2466982 - RNA, 13 nt, Human
cuucuaaaugcau

SEQ ID NO: 2466983 - RNA, 21 nt, Human
cuucuaggguuauugcauuug

SEQ ID NO: 2466984 - RNA, 20 nt, Human
cuucuagguggcaaggcugu

SEQ ID NO: 2466985 - RNA, 15 nt, Human
cuucuaaaugcauau

SEQ ID NO: 2466986 - RNA, 13 nt, Human
cuucucacauuua

SEQ ID NO: 2466987 - RNA, 20 nt, Human
cuucucacauuuauauuuuu

SEQ ID NO: 2466988 - RNA, 14 nt, Human
cuucuaguuuccca

SEQ ID NO: 2466989 - RNA, 22 nt, Human
cuucuagguggcaaggcugugc

SEQ ID NO: 2466990 - RNA, 15 nt, Human
cuucuaguuucccac

SEQ ID NO: 2466991 - RNA, 13 nt, Human
cuucucugucuca

SEQ ID NO: 2466992 - RNA, 21 nt, Human
cuucucugugaacgauuuaga

SEQ ID NO: 2466993 - RNA, 13 nt, Human
cuucucuguucau

SEQ ID NO: 2466994 - RNA, 22 nt, Human
cuucucugugaacgauuuagaa

SEQ ID NO: 2466995 - RNA, 14 nt, Human
cuucucuguucauu

SEQ ID NO: 2466996 - RNA, 17 nt, Human
cuucucuguucauuucc

SEQ ID NO: 2466997 - RNA, 21 nt, Human
cuucucuguuccauugaaucu

SEQ ID NO: 2466998 - RNA, 12 nt, Human
cuucucuuaauu

SEQ ID NO: 2466999 - RNA, 14 nt, Human
cuucucuuaauuua

SEQ ID NO: 2467000 - RNA, 15 nt, Human
cuucucuuaauuuaa

SEQ ID NO: 2467001 - RNA, 16 nt, Human
cuucucuuaauuuaau

SEQ ID NO: 2467002 - RNA, 14 nt, Human
cuucuucagagacu

SEQ ID NO: 2467003 - RNA, 13 nt, Human
cuucuucagagac

SEQ ID NO: 2467004 - RNA, 15 nt, Human
cuucuucacccagcu

SEQ ID NO: 2467005 - RNA, 14 nt, Human
cuucuucacccagc

SEQ ID NO: 2467006 - RNA, 13 nt, Human
cuucuucaccauu

SEQ ID NO: 2467007 - RNA, 17 nt, Human
cuucuuauucucacucc

SEQ ID NO: 2467008 - RNA, 20 nt, Human
cuucuuauucucacuccacc

SEQ ID NO: 2467009 - RNA, 22 nt, Human
cuucuuauucucacuccaccac

SEQ ID NO: 2467010 - RNA, 21 nt, Human
cuucuuacaauaauucuauga

SEQ ID NO: 2467011 - RNA, 13 nt, Human
cuucuuacaugca

SEQ ID NO: 2467012 - RNA, 23 nt, Human
cuucuucacccagcuaaucugua

SEQ ID NO: 2467013 - RNA, 22 nt, Human
cuucuucacccagcuaaucugu

SEQ ID NO: 2467014 - RNA, 18 nt, Human
cuucuucacccagcuaau

SEQ ID NO: 2467015 - RNA, 16 nt, Human
cuucuucacccagcua

SEQ ID NO: 2467016 - RNA, 20 nt, Human
cuucuucagaagacacugca

SEQ ID NO: 2467017 - RNA, 19 nt, Human
cuucugaaugcugcuacuu

SEQ ID NO: 2467018 - RNA, 16 nt, Human
cuucugaaugcugcua

SEQ ID NO: 2467019 - RNA, 15 nt, Human
cuucugaaugcugcu

SEQ ID NO: 2467020 - RNA, 22 nt, Human
cuucucuuccuuuuaucaguag

SEQ ID NO: 2467021 - RNA, 14 nt, Human
cuucucuuccugua

SEQ ID NO: 2467022 - RNA, 13 nt, Human
cuucucuuccugu

SEQ ID NO: 2467023 - RNA, 14 nt, Human
cuucugaccacacu

SEQ ID NO: 2467024 - RNA, 15 nt, Human
cuucugaccacacuu

SEQ ID NO: 2467025 - RNA, 17 nt, Human
cuucugaccacacuucc

SEQ ID NO: 2467026 - RNA, 18 nt, Human
cuucugaccacacuuccu

SEQ ID NO: 2467027 - RNA, 19 nt, Human
cuucugaccacacuuccug

SEQ ID NO: 2467028 - RNA, 18 nt, Human
cuucugaccacagcauca

SEQ ID NO: 2467029 - RNA, 23 nt, Human
cuucugaccacacuuccugucca

SEQ ID NO: 2467030 - RNA, 21 nt, Human
cuucugaccacagcaucauuu

SEQ ID NO: 2467031 - RNA, 16 nt, Human
cuucuuaaaugagaag

SEQ ID NO: 2467032 - RNA, 21 nt, Human
cuucuuaaaugagaaggaauu

SEQ ID NO: 2467033 - RNA, 21 nt, Human
cuucuuaaccccaguaagcca

SEQ ID NO: 2467034 - RNA, 18 nt, Human
cuucuuaauauaacugcc

SEQ ID NO: 2467035 - RNA, 22 nt, Human
cuucuuaaucuuuucacaaaua

SEQ ID NO: 2467036 - RNA, 21 nt, Human
cuucuuaaucuuuucacaaau

SEQ ID NO: 2467037 - RNA, 23 nt, Human
cuucuuaaucuuuucacaaauaa

SEQ ID NO: 2467038 - RNA, 20 nt, Human
cuucuuaaucuuuucacaaa

SEQ ID NO: 2467039 - RNA, 17 nt, Human
cuucuuaaucuuuucac

SEQ ID NO: 2467040 - RNA, 16 nt, Human
cuucuuaaucuuuuca

SEQ ID NO: 2467041 - RNA, 20 nt, Human
cuucuuaauauaacugccuu

SEQ ID NO: 2467042 - RNA, 14 nt, Human
cuugaagggccaga

SEQ ID NO: 2467043 - RNA, 15 nt, Human
cuugaagggccagag

SEQ ID NO: 2467044 - RNA, 16 nt, Human
cuugaagggccagagc

SEQ ID NO: 2467045 - RNA, 17 nt, Human
cuugaagggccagagcc

SEQ ID NO: 2467046 - RNA, 18 nt, Human
cuugaagggccagagcca

SEQ ID NO: 2467047 - RNA, 19 nt, Human
cuugaagggccagagccag

SEQ ID NO: 2467048 - RNA, 21 nt, Human
cuugaagggccagagccaggg

SEQ ID NO: 2467049 - RNA, 13 nt, Human
cuugaagggccag

SEQ ID NO: 2467050 - RNA, 23 nt, Human
cuugaaggaucuguuuuuaaaaa

SEQ ID NO: 2467051 - RNA, 17 nt, Human
cuugauauccucuuuga

SEQ ID NO: 2467052 - RNA, 22 nt, Human
cuugauauccucuuugagugaa

SEQ ID NO: 2467053 - RNA, 23 nt, Human
cuugaucaacaucuuuucuugcc

SEQ ID NO: 2467054 - RNA, 17 nt, Human
cuugaucaacaucuuuu

SEQ ID NO: 2467055 - RNA, 19 nt, Human
cuugaccagcagaucccag

SEQ ID NO: 2467056 - RNA, 20 nt, Human
cuugaccagcagaucccagc

SEQ ID NO: 2467057 - RNA, 21 nt, Human
cuugaccagcagaucccagcu

SEQ ID NO: 2467058 - RNA, 18 nt, Human
cuugauguguuaucucuu

SEQ ID NO: 2467059 - RNA, 14 nt, Human
cuugauguugcuua

SEQ ID NO: 2467060 - RNA, 20 nt, Human
cuugauuaagaucucagugg

SEQ ID NO: 2467061 - RNA, 16 nt, Human
cuugauuauccauauu

SEQ ID NO: 2467062 - RNA, 23 nt, Human
cuugauguugcuuagucacuuau

SEQ ID NO: 2467063 - RNA, 18 nt, Human
cuugauucacaaugaaau

SEQ ID NO: 2467064 - RNA, 20 nt, Human
cuugacagggcacaccgggc

SEQ ID NO: 2467065 - RNA, 16 nt, Human
cuugacaucaacugca

SEQ ID NO: 2467066 - RNA, 21 nt, Human
cuugaauuguaacuguucuug

SEQ ID NO: 2467067 - RNA, 22 nt, Human
cuugaauuguaacuguucuuga

SEQ ID NO: 2467068 - RNA, 14 nt, Human
cuugacauucaagg

SEQ ID NO: 2467069 - RNA, 19 nt, Human
cuugacauaauuucacuga

SEQ ID NO: 2467070 - RNA, 12 nt, Human
cuugaccaagca

SEQ ID NO: 2467071 - RNA, 15 nt, Human
cuugaccaagcagga

SEQ ID NO: 2467072 - RNA, 17 nt, Human
cuugaccaagcaggaag

SEQ ID NO: 2467073 - RNA, 18 nt, Human
cuugaccaagcaggaagc

SEQ ID NO: 2467074 - RNA, 19 nt, Human
cuugaccaagcaggaagcu

SEQ ID NO: 2467075 - RNA, 20 nt, Human
cuugaccaagcaggaagcuc

SEQ ID NO: 2467076 - RNA, 23 nt, Human
cuugaccaagcaggaagcucaga

SEQ ID NO: 2467077 - RNA, 11 nt, Human
cuugaccagca

SEQ ID NO: 2467078 - RNA, 13 nt, Human
cuugaaugucuuu

SEQ ID NO: 2467079 - RNA, 19 nt, Human
cuugaauguggcuugagaa

SEQ ID NO: 2467080 - RNA, 22 nt, Human
cuugaauguggcuugagaaaua

SEQ ID NO: 2467081 - RNA, 17 nt, Human
cuugaauuguaacuguu

SEQ ID NO: 2467082 - RNA, 20 nt, Human
cuugaauuguaacuguucuu

SEQ ID NO: 2467083 - RNA, 20 nt, Human
cuugaauguggcuugagaaa

SEQ ID NO: 2467084 - RNA, 14 nt, Human
cuugaaggugcuga

SEQ ID NO: 2467085 - RNA, 22 nt, Human
cuugaaggugcugacggccagg

SEQ ID NO: 2467086 - RNA, 20 nt, Human
cuugaagggccagagccagg

SEQ ID NO: 2467087 - RNA, 16 nt, Human
cuugaaggguaaagaa

SEQ ID NO: 2467088 - RNA, 16 nt, Human
cuuggccuugggcuuc

SEQ ID NO: 2467089 - RNA, 23 nt, Human
cuuggccugucucauccccaggg

SEQ ID NO: 2467090 - RNA, 17 nt, Human
cuuggccugucucaucc

SEQ ID NO: 2467091 - RNA, 22 nt, Human
cuuggccugucucauccccagg

SEQ ID NO: 2467092 - RNA, 24 nt, Human
cuuggauuguccccgacccuugcc

SEQ ID NO: 2467093 - RNA, 23 nt, Human
cuuggauuguccccgacccuugc

SEQ ID NO: 2467094 - RNA, 13 nt, Human
cuugcuaugauga

SEQ ID NO: 2467095 - RNA, 22 nt, Human
cuuggauuguccccgacccuug

SEQ ID NO: 2467096 - RNA, 15 nt, Human
cuuggcaacagaagc

SEQ ID NO: 2467097 - RNA, 13 nt, Human
cuuggcaacagaa

SEQ ID NO: 2467098 - RNA, 20 nt, Human
cuuggcaacagaagcaguug

SEQ ID NO: 2467099 - RNA, 11 nt, Human
cuuggccucag

SEQ ID NO: 2467100 - RNA, 16 nt, Human
cuuggccugcugugau

SEQ ID NO: 2467101 - RNA, 15 nt, Human
cuuggccugcuguga

SEQ ID NO: 2467102 - RNA, 13 nt, Human
cuuggccugcugu

SEQ ID NO: 2467103 - RNA, 12 nt, Human
cuuggccugcug

SEQ ID NO: 2467104 - RNA, 17 nt, Human
cuuggccugaucagacc

SEQ ID NO: 2467105 - RNA, 12 nt, Human
cuuggccucaga

SEQ ID NO: 2467106 - RNA, 23 nt, Human
cuuggccucagaauucacaaaau

SEQ ID NO: 2467107 - RNA, 12 nt, Human
cuugauucauaa

SEQ ID NO: 2467108 - RNA, 20 nt, Human
cuugauuuuagccuucucug

SEQ ID NO: 2467109 - RNA, 21 nt, Human
cuugauuuuagccuucucugu

SEQ ID NO: 2467110 - RNA, 19 nt, Human
cuugauuuuagccuucucu

SEQ ID NO: 2467111 - RNA, 16 nt, Human
cuugcaaaaaggguca

SEQ ID NO: 2467112 - RNA, 14 nt, Human
cuugauuuugcaaa

SEQ ID NO: 2467113 - RNA, 12 nt, Human
cuugauuuuugc

SEQ ID NO: 2467114 - RNA, 15 nt, Human
cuugcaaaaaggguc

SEQ ID NO: 2467115 - RNA, 22 nt, Human
cuugcuaaucagugucucacac

SEQ ID NO: 2467116 - RNA, 21 nt, Human
cuugcuaaucagugucucaca

SEQ ID NO: 2467117 - RNA, 20 nt, Human
cuugcuaaucagugucucac

SEQ ID NO: 2467118 - RNA, 19 nt, Human
cuugcuaaucagugucuca

SEQ ID NO: 2467119 - RNA, 23 nt, Human
cuugcuaaucagugucucacacu

SEQ ID NO: 2467120 - RNA, 14 nt, Human
cuugcuaccucagu

SEQ ID NO: 2467121 - RNA, 16 nt, Human
cuugcuaccucaaggg

SEQ ID NO: 2467122 - RNA, 12 nt, Human
cuugcaaaguau

SEQ ID NO: 2467123 - RNA, 18 nt, Human
cuugcuaaucagugucuc

SEQ ID NO: 2467124 - RNA, 17 nt, Human
cuugcuaaucagugucu

SEQ ID NO: 2467125 - RNA, 16 nt, Human
cuugcuaaucaguguc

SEQ ID NO: 2467126 - RNA, 15 nt, Human
cuugcuaaucagugu

SEQ ID NO: 2467127 - RNA, 15 nt, Human
cuugcguaugucugu

SEQ ID NO: 2467128 - RNA, 22 nt, Human
cuugcgguauccgcccccaaua

SEQ ID NO: 2467129 - RNA, 18 nt, Human
gaucuggguucacugcaa

SEQ ID NO: 2467130 - RNA, 22 nt, Human
gaguugauagcacagacccugc

SEQ ID NO: 2467131 - RNA, 21 nt, Human
gaucuggaaccucagccuggc

SEQ ID NO: 2467132 - RNA, 23 nt, Human
gaucuggaaccucagccuggcca

SEQ ID NO: 2467133 - RNA, 17 nt, Human
gaucugggacccuuucc

SEQ ID NO: 2467134 - RNA, 20 nt, Human
gaucuggguucacugcaacc

SEQ ID NO: 2467135 - RNA, 17 nt, Human
gaucuggggcucuggga

SEQ ID NO: 2467136 - RNA, 22 nt, Human
gaucugggacccuuuccuuccu

SEQ ID NO: 2467137 - RNA, 18 nt, Human
gaucuggggcucugggau

SEQ ID NO: 2467138 - RNA, 23 nt, Human
gaucugggacccuuuccuuccuu

SEQ ID NO: 2467139 - RNA, 14 nt, Human
gaugaggccucuug

SEQ ID NO: 2467140 - RNA, 22 nt, Human
gaugaggccgcuagaggccuga

SEQ ID NO: 2467141 - RNA, 21 nt, Human
gaugaggccgcuagaggccug

SEQ ID NO: 2467142 - RNA, 19 nt, Human
gaugaggccgcuagaggcc

SEQ ID NO: 2467143 - RNA, 13 nt, Human
gaugaggcagagg

SEQ ID NO: 2467144 - RNA, 19 nt, Human
gaugagcucuacccagggc

SEQ ID NO: 2467145 - RNA, 20 nt, Human
gaugagcucuacccagggcc

SEQ ID NO: 2467146 - RNA, 20 nt, Human
gaugagcuggaaggagugag

SEQ ID NO: 2467147 - RNA, 11 nt, Human
gaugagcucua

SEQ ID NO: 2467148 - RNA, 16 nt, Human
gaugagcucuacccag

SEQ ID NO: 2467149 - RNA, 23 nt, Human
gaugaggccucuuggaccucugc

SEQ ID NO: 2467150 - RNA, 22 nt, Human
gaugaggccucuuggaccucug

SEQ ID NO: 2467151 - RNA, 14 nt, Human
gaugaugacuaugg

SEQ ID NO: 2467152 - RNA, 17 nt, Human
gaugaugugccugggug

SEQ ID NO: 2467153 - RNA, 15 nt, Human
gaugaugugccuggg

SEQ ID NO: 2467154 - RNA, 14 nt, Human
gaugaugugccugg

SEQ ID NO: 2467155 - RNA, 22 nt, Human
gaugaugguugcaaaagacuaa

SEQ ID NO: 2467156 - RNA, 15 nt, Human
gaugaugguguuuug

SEQ ID NO: 2467157 - RNA, 21 nt, Human
gaugauggucuucagccucuu

SEQ ID NO: 2467158 - RNA, 15 nt, Human
gaugaugccacacca

SEQ ID NO: 2467159 - RNA, 13 nt, Human
gaugaugccacac

SEQ ID NO: 2467160 - RNA, 19 nt, Human
gaugaugccaaccucugga

SEQ ID NO: 2467161 - RNA, 14 nt, Human
gaugaugcugccag

SEQ ID NO: 2467162 - RNA, 19 nt, Human
gaugaugggaauuguguga

SEQ ID NO: 2467163 - RNA, 17 nt, Human
gaugaugggaauugugu

SEQ ID NO: 2467164 - RNA, 20 nt, Human
gaugcuggucauguguuuga

SEQ ID NO: 2467165 - RNA, 17 nt, Human
gaugcugguaauggcca

SEQ ID NO: 2467166 - RNA, 23 nt, Human
gaugcuggguuggugcacaguga

SEQ ID NO: 2467167 - RNA, 20 nt, Human
gaugcuggguuggugcacag

SEQ ID NO: 2467168 - RNA, 19 nt, Human
gaugcuggguuggugcaca

SEQ ID NO: 2467169 - RNA, 17 nt, Human
gaugcugggcugggugc

SEQ ID NO: 2467170 - RNA, 15 nt, Human
gaugauucagaaauu

SEQ ID NO: 2467171 - RNA, 15 nt, Human
gaugcugggcugggu

SEQ ID NO: 2467172 - RNA, 14 nt, Human
gaugcugggcuggg

SEQ ID NO: 2467173 - RNA, 22 nt, Human
gaugcugggcuggcucccucuu

SEQ ID NO: 2467174 - RNA, 17 nt, Human
gaugcugggcuggcucc

SEQ ID NO: 2467175 - RNA, 23 nt, Human
gaugcuucucacugccaugccag

SEQ ID NO: 2467176 - RNA, 16 nt, Human
gaugcugugcuaugaa

SEQ ID NO: 2467177 - RNA, 20 nt, Human
gaugcugguaauggccaugg

SEQ ID NO: 2467178 - RNA, 17 nt, Human
gauguacagucugucau

SEQ ID NO: 2467179 - RNA, 16 nt, Human
gauguacagucuguca

SEQ ID NO: 2467180 - RNA, 19 nt, Human
gauguacagucugucauga

SEQ ID NO: 2467181 - RNA, 18 nt, Human
gauguacagucugucaug

SEQ ID NO: 2467182 - RNA, 15 nt, Human
gauguacauuuccaa

SEQ ID NO: 2467183 - RNA, 19 nt, Human
gauguaccaugaaacaaag

SEQ ID NO: 2467184 - RNA, 22 nt, Human
gauguacauuuccaaauucaca

SEQ ID NO: 2467185 - RNA, 12 nt, Human
gauguaaaguga

SEQ ID NO: 2467186 - RNA, 19 nt, Human
gauggauauauguuuuuga

SEQ ID NO: 2467187 - RNA, 22 nt, Human
gaugucagccgagccgggccug

SEQ ID NO: 2467188 - RNA, 17 nt, Human
gaugucccaacuuguaa

SEQ ID NO: 2467189 - RNA, 17 nt, Human
gauguccacagaugccu

SEQ ID NO: 2467190 - RNA, 20 nt, Human
gauguccacagaugccucca

SEQ ID NO: 2467191 - RNA, 20 nt, Human
gauguccagaagaauauuca

SEQ ID NO: 2467192 - RNA, 12 nt, Human
gauguccagaag

SEQ ID NO: 2467193 - RNA, 18 nt, Human
gaugucccaacuuguaaa

SEQ ID NO: 2467194 - RNA, 21 nt, Human
gauguccucaccacaugcgga

SEQ ID NO: 2467195 - RNA, 20 nt, Human
gaugucccuuucuuggccag

SEQ ID NO: 2467196 - RNA, 21 nt, Human
gaugucccuuucuuggccagu

SEQ ID NO: 2467197 - RNA, 19 nt, Human
gauggaguucuugugccau

SEQ ID NO: 2467198 - RNA, 18 nt, Human
gauggaguucuugugcca

SEQ ID NO: 2467199 - RNA, 18 nt, Human
gauggaguccagggaaga

SEQ ID NO: 2467200 - RNA, 16 nt, Human
gauggagguuucauac

SEQ ID NO: 2467201 - RNA, 16 nt, Human
gauggaguucuugugc

SEQ ID NO: 2467202 - RNA, 18 nt, Human
gauggauaaccuauauga

SEQ ID NO: 2467203 - RNA, 21 nt, Human
gaugcuuuucugucucugccu

SEQ ID NO: 2467204 - RNA, 22 nt, Human
gauggagcgcaccugcccccug

SEQ ID NO: 2467205 - RNA, 23 nt, Human
gauggaggaaaaccaagccgugg

SEQ ID NO: 2467206 - RNA, 13 nt, Human
gauggaggagaag

SEQ ID NO: 2467207 - RNA, 14 nt, Human
gauggaggagaaga

SEQ ID NO: 2467208 - RNA, 12 nt, Human
gauggaggagga

SEQ ID NO: 2467209 - RNA, 11 nt, Human
gauggaggagg

SEQ ID NO: 2467210 - RNA, 21 nt, Human
gauggaggggugguccugacu

SEQ ID NO: 2467211 - RNA, 22 nt, Human
gauggaggggugguccugacuc

SEQ ID NO: 2467212 - RNA, 19 nt, Human
gauggagguucucucggag

SEQ ID NO: 2467213 - RNA, 14 nt, Human
gaugcuuguacaua

SEQ ID NO: 2467214 - RNA, 16 nt, Human
gaugcuuguacauaau

SEQ ID NO: 2467215 - RNA, 23 nt, Human
gaugcuuuguuucuuucauauga

SEQ ID NO: 2467216 - RNA, 13 nt, Human
gaugcuguuugac

SEQ ID NO: 2467217 - RNA, 17 nt, Human
gaugcuuuuagcucaaa

SEQ ID NO: 2467218 - RNA, 20 nt, Human
gaugcuuuucugucucugcc

SEQ ID NO: 2467219 - RNA, 17 nt, Human
gaugcuuuucugucucu

SEQ ID NO: 2467220 - RNA, 16 nt, Human
gaugcuuuucugucuc

SEQ ID NO: 2467221 - RNA, 21 nt, Human
gaugcuuuaagugcacaacau

SEQ ID NO: 2467222 - RNA, 14 nt, Human
gaugcuguuugaca

SEQ ID NO: 2467223 - RNA, 12 nt, Human
gaugcuguugcc

SEQ ID NO: 2467224 - RNA, 15 nt, Human
gaugucuucugccug

SEQ ID NO: 2467225 - RNA, 14 nt, Human
gaugucuucugccu

SEQ ID NO: 2467226 - RNA, 13 nt, Human
gaugucuucugcc

SEQ ID NO: 2467227 - RNA, 21 nt, Human
gaugucuucguacaguucuuc

SEQ ID NO: 2467228 - RNA, 18 nt, Human
gaugucuucugccuguua

SEQ ID NO: 2467229 - RNA, 16 nt, Human
gaugucuucugccugu

SEQ ID NO: 2467230 - RNA, 20 nt, Human
gaugucuucugccuguuaua

SEQ ID NO: 2467231 - RNA, 19 nt, Human
gaugugaguugcacagcua

SEQ ID NO: 2467232 - RNA, 20 nt, Human
gaugucuucguacaguucuu

SEQ ID NO: 2467233 - RNA, 22 nt, Human
gaugucuuccuuggagggggga

SEQ ID NO: 2467234 - RNA, 18 nt, Human
gaugucuucauaccuaca

SEQ ID NO: 2467235 - RNA, 14 nt, Human
gaugucuucauacc

SEQ ID NO: 2467236 - RNA, 21 nt, Human
gaugucugccaauuuuugccu

SEQ ID NO: 2467237 - RNA, 22 nt, Human
gaugucugccaauuuuugccuu

SEQ ID NO: 2467238 - RNA, 14 nt, Human
gaugucugccaauu

SEQ ID NO: 2467239 - RNA, 17 nt, Human
gauguccucaccacaug

SEQ ID NO: 2467240 - RNA, 14 nt, Human
gaugucuaauaguu

SEQ ID NO: 2467241 - RNA, 18 nt, Human
gaugugauauauaagugu

SEQ ID NO: 2467242 - RNA, 11 nt, Human
gaugugauaua

SEQ ID NO: 2467243 - RNA, 15 nt, Human
gaugugauuguggaa

SEQ ID NO: 2467244 - RNA, 16 nt, Human
gaugugauuguggaau

SEQ ID NO: 2467245 - RNA, 18 nt, Human
gaugugauuguggaaugg

SEQ ID NO: 2467246 - RNA, 24 nt, Human
gaugugauuuaauaguguuaauca

SEQ ID NO: 2467247 - RNA, 23 nt, Human
gaugugauuuaauaguguuaauc

SEQ ID NO: 2467248 - RNA, 18 nt, Human
gaugugauuuaauagugu

SEQ ID NO: 2467249 - RNA, 15 nt, Human
gaugugcaugggagc

SEQ ID NO: 2467250 - RNA, 21 nt, Human
gaugugcauuuuugugaaaug

SEQ ID NO: 2467251 - RNA, 14 nt, Human
gaugugcacccaug

SEQ ID NO: 2467252 - RNA, 23 nt, Human
gaugugcauuuuugugaaaugaa

SEQ ID NO: 2467253 - RNA, 19 nt, Human
gauucuccugccucagccu

SEQ ID NO: 2467254 - RNA, 21 nt, Human
gauucuccugccucagccucc

SEQ ID NO: 2467255 - RNA, 20 nt, Human
gauucuccugccucagccuc

SEQ ID NO: 2467256 - RNA, 16 nt, Human
gauucuccugugcuag

SEQ ID NO: 2467257 - RNA, 14 nt, Human
gauucuccugugcu

SEQ ID NO: 2467258 - RNA, 12 nt, Human
gauucuguacau

SEQ ID NO: 2467259 - RNA, 15 nt, Human
gauucuguggaacaa

SEQ ID NO: 2467260 - RNA, 19 nt, Human
gauucuguguguuuucaua

SEQ ID NO: 2467261 - RNA, 22 nt, Human
gauucuguguguuuucauaaua

SEQ ID NO: 2467262 - RNA, 23 nt, Human
gauucuuauggacaaugacccag

SEQ ID NO: 2467263 - RNA, 21 nt, Human
gauucuucugcuucagccucc

SEQ ID NO: 2467264 - RNA, 20 nt, Human
gauuuaacagaaauguacag

SEQ ID NO: 2467265 - RNA, 23 nt, Human
gauuuaacagaaauguacagcaa

SEQ ID NO: 2467266 - RNA, 23 nt, Human
gauucuuggcccgcacagagcug

SEQ ID NO: 2467267 - RNA, 19 nt, Human
gauucuuuccauuaugauu

SEQ ID NO: 2467268 - RNA, 16 nt, Human
gauuucacucuccuug

SEQ ID NO: 2467269 - RNA, 13 nt, Human
gauuucacucucc

SEQ ID NO: 2467270 - RNA, 19 nt, Human
gauuuaacagucauuuaaa

SEQ ID NO: 2467271 - RNA, 18 nt, Human
gauuuaacagucauuuaa

SEQ ID NO: 2467272 - RNA, 17 nt, Human
gauuuaacagucauuua

SEQ ID NO: 2467273 - RNA, 20 nt, Human
gauucuuucccaauucacau

SEQ ID NO: 2467274 - RNA, 18 nt, Human
gauuuaagacacuuuuug

SEQ ID NO: 2467275 - RNA, 13 nt, Human
gauuuaauaaaau

SEQ ID NO: 2467276 - RNA, 14 nt, Human
gauuuaauaaaaua

SEQ ID NO: 2467277 - RNA, 22 nt, Human
gauuuaagggauggaaaaggaa

SEQ ID NO: 2467278 - RNA, 18 nt, Human
gauuucacucuccuuggu

SEQ ID NO: 2467279 - RNA, 17 nt, Human
gauuucacucuccuugg

SEQ ID NO: 2467280 - RNA, 17 nt, Human
gauuucagcucacugca

SEQ ID NO: 2467281 - RNA, 20 nt, Human
gauuucagcucacugcaacc

SEQ ID NO: 2467282 - RNA, 15 nt, Human
gauuucagcucacug

SEQ ID NO: 2467283 - RNA, 17 nt, Human
gauuuaauaaaauaauu

SEQ ID NO: 2467284 - RNA, 15 nt, Human
gauuuaauaaaauaa

SEQ ID NO: 2467285 - RNA, 21 nt, Human
gauuucagaaagagcaagucu

SEQ ID NO: 2467286 - RNA, 18 nt, Human
gcaaaaaaaaaaaaaagc

SEQ ID NO: 2467287 - RNA, 20 nt, Human
gcaaaaaacucgaggacugu

SEQ ID NO: 2467288 - RNA, 15 nt, Human
gauuucaucugcucu

SEQ ID NO: 2467289 - RNA, 12 nt, Human
gauuucaucugc

SEQ ID NO: 2467290 - RNA, 23 nt, Human
gauuuuuuuuuccuucagugccu

SEQ ID NO: 2467291 - RNA, 22 nt, Human
gauuuuuuuuuccuucagugcc

SEQ ID NO: 2467292 - RNA, 20 nt, Human
gauuucaggauacucuguca

SEQ ID NO: 2467293 - RNA, 22 nt, Human
gauuucaggauacucugucaga

SEQ ID NO: 2467294 - RNA, 22 nt, Human
gcacuaugaggaauaauuauuu

SEQ ID NO: 2467295 - RNA, 15 nt, Human
gcacuccagccuggg

SEQ ID NO: 2467296 - RNA, 13 nt, Human
gcacucaacauga

SEQ ID NO: 2467297 - RNA, 22 nt, Human
gcacucacacaggacccccuuc

SEQ ID NO: 2467298 - RNA, 16 nt, Human
gcacucacacaggacc

SEQ ID NO: 2467299 - RNA, 16 nt, Human
gcacuccagccugggc

SEQ ID NO: 2467300 - RNA, 17 nt, Human
gcacuccagccugggca

SEQ ID NO: 2467301 - RNA, 21 nt, Human
gcacuccagccugggcgacag

SEQ ID NO: 2467302 - RNA, 15 nt, Human
gcacuccaugcuuag

SEQ ID NO: 2467303 - RNA, 16 nt, Human
gcacuccaugagcacc

SEQ ID NO: 2467304 - RNA, 23 nt, Human
gcacucacacaggacccccuucc

SEQ ID NO: 2467305 - RNA, 23 nt, Human
gcacuccaugcuuagucacugcc

SEQ ID NO: 2467306 - RNA, 21 nt, Human
gcacuccaugcuuagucacug

SEQ ID NO: 2467307 - RNA, 17 nt, Human
gcacuccagccugggug

SEQ ID NO: 2467308 - RNA, 21 nt, Human
gcacucuaaaagguucaggga

SEQ ID NO: 2467309 - RNA, 17 nt, Human
gcacucuaaaagguuca

SEQ ID NO: 2467310 - RNA, 21 nt, Human
gcacucgggaaaccuggggcu

SEQ ID NO: 2467311 - RNA, 22 nt, Human
gcacuauagccuaggugacaga

SEQ ID NO: 2467312 - RNA, 12 nt, Human
gcaccuccugcc

SEQ ID NO: 2467313 - RNA, 23 nt, Human
gcaccuccccccacugcaggccc

SEQ ID NO: 2467314 - RNA, 19 nt, Human
gcaccuccccccacugcag

SEQ ID NO: 2467315 - RNA, 21 nt, Human
gcaccuccccccacugcaggc

SEQ ID NO: 2467316 - RNA, 17 nt, Human
gcaccucccauccuaau

SEQ ID NO: 2467317 - RNA, 13 nt, Human
gcaccucccccca

SEQ ID NO: 2467318 - RNA, 17 nt, Human
gcaccuccccccacugc

SEQ ID NO: 2467319 - RNA, 18 nt, Human
gcaccuccccccacugca

SEQ ID NO: 2467320 - RNA, 12 nt, Human
gcacacauuuuu

SEQ ID NO: 2467321 - RNA, 11 nt, Human
gcacacauuuu

SEQ ID NO: 2467322 - RNA, 13 nt, Human
gcacacagggcag

SEQ ID NO: 2467323 - RNA, 20 nt, Human
gcacacaccagagcccaccu

SEQ ID NO: 2467324 - RNA, 16 nt, Human
gcacacaccucagagg

SEQ ID NO: 2467325 - RNA, 21 nt, Human
gcacacaccuguagucccagc

SEQ ID NO: 2467326 - RNA, 17 nt, Human
gcacacacugugcuuuc

SEQ ID NO: 2467327 - RNA, 12 nt, Human
gcacacacugug

SEQ ID NO: 2467328 - RNA, 11 nt, Human
gcacacacugu

SEQ ID NO: 2467329 - RNA, 13 nt, Human
gcacacaccugua

SEQ ID NO: 2467330 - RNA, 19 nt, Human
gcacacacugugcuuucua

SEQ ID NO: 2467331 - RNA, 11 nt, Human
gcacacagcac

SEQ ID NO: 2467332 - RNA, 23 nt, Human
gcacacagcacgggggccaagga

SEQ ID NO: 2467333 - RNA, 19 nt, Human
gcacacagcugcagagaca

SEQ ID NO: 2467334 - RNA, 16 nt, Human
gcaccggcuggccugg

SEQ ID NO: 2467335 - RNA, 15 nt, Human
gcaccggcuggccug

SEQ ID NO: 2467336 - RNA, 17 nt, Human
gcaccuaauccaggcag

SEQ ID NO: 2467337 - RNA, 18 nt, Human
gcaccuaauccaggcaga

SEQ ID NO: 2467338 - RNA, 16 nt, Human
gcaccuaauccaggca

SEQ ID NO: 2467339 - RNA, 17 nt, Human
gcaccggcuggccuggc

SEQ ID NO: 2467340 - RNA, 17 nt, Human
gcaccuaccaccacgcc

SEQ ID NO: 2467341 - RNA, 18 nt, Human
gcaccuaccaccacgccc

SEQ ID NO: 2467342 - RNA, 18 nt, Human
gcaccuccacauccucca

SEQ ID NO: 2467343 - RNA, 11 nt, Human
gcaccucccau

SEQ ID NO: 2467344 - RNA, 14 nt, Human
gcaccucccauccu

SEQ ID NO: 2467345 - RNA, 21 nt, Human
gcaccuacaguguacagucuu

SEQ ID NO: 2467346 - RNA, 19 nt, Human
gcaccuacaguguacaguc

SEQ ID NO: 2467347 - RNA, 22 nt, Human
gcaccuaauccaggcagaucca

SEQ ID NO: 2467348 - RNA, 23 nt, Human
gcaccuaauccaggcagauccag

SEQ ID NO: 2467349 - RNA, 18 nt, Human
gcaccuacaguguacagu

SEQ ID NO: 2467350 - RNA, 18 nt, Human
gcaaccuccgccucuugg

SEQ ID NO: 2467351 - RNA, 22 nt, Human
gcaacccuggugaccagcacca

SEQ ID NO: 2467352 - RNA, 23 nt, Human
gcaaccgucuguuaugcugugac

SEQ ID NO: 2467353 - RNA, 21 nt, Human
gcaacccuuaccccuuagccu

SEQ ID NO: 2467354 - RNA, 12 nt, Human
gcaacccuccua

SEQ ID NO: 2467355 - RNA, 23 nt, Human
gcaacccuccuaucaccuccccu

SEQ ID NO: 2467356 - RNA, 18 nt, Human
gcaacccccagccugcua

SEQ ID NO: 2467357 - RNA, 17 nt, Human
gcaacccccagccugcu

SEQ ID NO: 2467358 - RNA, 16 nt, Human
gcaaaagaugcuucuc

SEQ ID NO: 2467359 - RNA, 22 nt, Human
gcaaaacagcguuuaagacugu

SEQ ID NO: 2467360 - RNA, 21 nt, Human
gcaaaaccacuagaacucucc

SEQ ID NO: 2467361 - RNA, 23 nt, Human
gcaaaacucuacuuaauccaaug

SEQ ID NO: 2467362 - RNA, 22 nt, Human
gcaaaacucuacuuaauccaau

SEQ ID NO: 2467363 - RNA, 17 nt, Human
gcaaaacucuacuuaau

SEQ ID NO: 2467364 - RNA, 20 nt, Human
gcaaaacgcauggagugugu

SEQ ID NO: 2467365 - RNA, 12 nt, Human
gcaaaacugaau

SEQ ID NO: 2467366 - RNA, 16 nt, Human
gcaaaagacuaauuua

SEQ ID NO: 2467367 - RNA, 15 nt, Human
gcaaaagaugcuucu

SEQ ID NO: 2467368 - RNA, 19 nt, Human
gcacacaccagagcccacc

SEQ ID NO: 2467369 - RNA, 18 nt, Human
gcacacaccagagcccac

SEQ ID NO: 2467370 - RNA, 17 nt, Human
gcacacaccagagccca

SEQ ID NO: 2467371 - RNA, 16 nt, Human
gcacacaccagagccc

SEQ ID NO: 2467372 - RNA, 15 nt, Human
gcacacaccagagcc

SEQ ID NO: 2467373 - RNA, 14 nt, Human
gcacacaccagagc

SEQ ID NO: 2467374 - RNA, 12 nt, Human
gcacacaccaga

SEQ ID NO: 2467375 - RNA, 23 nt, Human
gcaauaauggucccauccaggca

SEQ ID NO: 2467376 - RNA, 22 nt, Human
gcaauaauggucccauccaggc

SEQ ID NO: 2467377 - RNA, 21 nt, Human
gcaauaauggucccauccagg

SEQ ID NO: 2467378 - RNA, 20 nt, Human
gcaauaauggucccauccag

SEQ ID NO: 2467379 - RNA, 23 nt, Human
gcaauaccguguugguuuugacu

SEQ ID NO: 2467380 - RNA, 18 nt, Human
gcaauagucaaauugugu

SEQ ID NO: 2467381 - RNA, 23 nt, Human
gcaauaaggggagaguaacccug

SEQ ID NO: 2467382 - RNA, 19 nt, Human
gcaauaauggucccaucca

SEQ ID NO: 2467383 - RNA, 13 nt, Human
gcaauaaagaaga

SEQ ID NO: 2467384 - RNA, 18 nt, Human
gcaauaauggucccaucc

SEQ ID NO: 2467385 - RNA, 11 nt, Human
gcaauaaagca

SEQ ID NO: 2467386 - RNA, 22 nt, Human
gcaaguuucuagcuagaaauau

SEQ ID NO: 2467387 - RNA, 21 nt, Human
gcaaguucuagagaagaggcu

SEQ ID NO: 2467388 - RNA, 21 nt, Human
gcauccuggcacccggccccu

SEQ ID NO: 2467389 - RNA, 17 nt, Human
gcauccuggcacccggc

SEQ ID NO: 2467390 - RNA, 18 nt, Human
gcauggcaucaccuccac

SEQ ID NO: 2467391 - RNA, 20 nt, Human
gcaucgcaccauucugacuc

SEQ ID NO: 2467392 - RNA, 13 nt, Human
gcauccuucugcc

SEQ ID NO: 2467393 - RNA, 13 nt, Human
gcauggccaggug

SEQ ID NO: 2467394 - RNA, 17 nt, Human
gcauggccagcagcuug

SEQ ID NO: 2467395 - RNA, 17 nt, Human
gcauggccagguggcca

SEQ ID NO: 2467396 - RNA, 14 nt, Human
gcauggccaggugg

SEQ ID NO: 2467397 - RNA, 23 nt, Human
gcauccuggcacccggccccugc

SEQ ID NO: 2467398 - RNA, 22 nt, Human
gcauccuggcacccggccccug

SEQ ID NO: 2467399 - RNA, 13 nt, Human
gcaucgcaaugua

SEQ ID NO: 2467400 - RNA, 18 nt, Human
gcaucgcaccauucugac

SEQ ID NO: 2467401 - RNA, 20 nt, Human
gcauccuuuucugcagaggg

SEQ ID NO: 2467402 - RNA, 14 nt, Human
gcauccuggcaccc

SEQ ID NO: 2467403 - RNA, 17 nt, Human
gcauccugugaaguccu

SEQ ID NO: 2467404 - RNA, 14 nt, Human
gcauccugugaagu

SEQ ID NO: 2467405 - RNA, 16 nt, Human
gcauuguaaaugugcu

SEQ ID NO: 2467406 - RNA, 20 nt, Human
gcauuggcagcaggugcugc

SEQ ID NO: 2467407 - RNA, 21 nt, Human
gcauuggcagcaggugcugcu

SEQ ID NO: 2467408 - RNA, 20 nt, Human
gcaugugacucugaagcuga

SEQ ID NO: 2467409 - RNA, 15 nt, Human
gcauuguaucgaugu

SEQ ID NO: 2467410 - RNA, 19 nt, Human
gcauuguaucgauguuaug

SEQ ID NO: 2467411 - RNA, 17 nt, Human
gcauugugaacugacag

SEQ ID NO: 2467412 - RNA, 16 nt, Human
gcauugucccugugcc

SEQ ID NO: 2467413 - RNA, 21 nt, Human
gcauguauugugucuuuugca

SEQ ID NO: 2467414 - RNA, 23 nt, Human
gcauguauugugucuuuugcaug

SEQ ID NO: 2467415 - RNA, 19 nt, Human
gcauguccuguaaagguua

SEQ ID NO: 2467416 - RNA, 23 nt, Human
gcaugucgugaccaacuagacau

SEQ ID NO: 2467417 - RNA, 23 nt, Human
gcaugucccuaccgagucucuuc

SEQ ID NO: 2467418 - RNA, 17 nt, Human
gcaugugaugagaggaa

SEQ ID NO: 2467419 - RNA, 12 nt, Human
gcaugugaagaa

SEQ ID NO: 2467420 - RNA, 15 nt, Human
gcaugugacucugaa

SEQ ID NO: 2467421 - RNA, 21 nt, Human
gcaugugacucugaagcugac

SEQ ID NO: 2467422 - RNA, 21 nt, Human
gcaugugaaaaucaaauacau

SEQ ID NO: 2467423 - RNA, 16 nt, Human
gcaugggaaugaaugu

SEQ ID NO: 2467424 - RNA, 13 nt, Human
gcaugggaaugaa

SEQ ID NO: 2467425 - RNA, 19 nt, Human
gcaugggaaugaaugucag

SEQ ID NO: 2467426 - RNA, 15 nt, Human
gcaugggcacucccu

SEQ ID NO: 2467427 - RNA, 13 nt, Human
gcauggcccuggg

SEQ ID NO: 2467428 - RNA, 12 nt, Human
gcauggcccugg

SEQ ID NO: 2467429 - RNA, 13 nt, Human
gcaugggccuggc

SEQ ID NO: 2467430 - RNA, 20 nt, Human
gcauguauugugucuuuugc

SEQ ID NO: 2467431 - RNA, 20 nt, Human
gcauguauuggccuggaggu

SEQ ID NO: 2467432 - RNA, 19 nt, Human
gcauguauuggccuggagg

SEQ ID NO: 2467433 - RNA, 18 nt, Human
gcauguauuggccuggag

SEQ ID NO: 2467434 - RNA, 17 nt, Human
gcauguauuggccugga

SEQ ID NO: 2467435 - RNA, 16 nt, Human
gcauguauuggccugg

SEQ ID NO: 2467436 - RNA, 15 nt, Human
gcauguauuggccug

SEQ ID NO: 2467437 - RNA, 15 nt, Human
gcauguaugucuugg

SEQ ID NO: 2467438 - RNA, 14 nt, Human
gcauguaugucuug

SEQ ID NO: 2467439 - RNA, 20 nt, Human
gcauguaccauuugcauggc

SEQ ID NO: 2467440 - RNA, 14 nt, Human
gcauguaggagaau

SEQ ID NO: 2467441 - RNA, 15 nt, Human
gcauguaggagaauc

SEQ ID NO: 2467442 - RNA, 22 nt, Human
gcauggggauaaaggagaaggc

SEQ ID NO: 2467443 - RNA, 22 nt, Human
gcaugggccuggccaccucucu

SEQ ID NO: 2467444 - RNA, 23 nt, Human
gcauggggauaaaggagaaggca

SEQ ID NO: 2467445 - RNA, 18 nt, Human
gcauguaccauuugcaug

SEQ ID NO: 2467446 - RNA, 23 nt, Human
gcauguacaguguucuguuuaau

SEQ ID NO: 2467447 - RNA, 22 nt, Human
gcauguacccuaaggucauuac

SEQ ID NO: 2467448 - RNA, 18 nt, Human
gccaagaauucuuaaaua

SEQ ID NO: 2467449 - RNA, 14 nt, Human
gccaagaauucuua

SEQ ID NO: 2467450 - RNA, 21 nt, Human
gccaagaaacgucuucuaaac

SEQ ID NO: 2467451 - RNA, 22 nt, Human
gccaagaaacgucuucuaaacu

SEQ ID NO: 2467452 - RNA, 15 nt, Human
gccaagaaacgucuu

SEQ ID NO: 2467453 - RNA, 18 nt, Human
gccaagaaguuuaaggaa

SEQ ID NO: 2467454 - RNA, 22 nt, Human
gccaagacuuggcaacagaagc

SEQ ID NO: 2467455 - RNA, 18 nt, Human
gccaagacuuggcaacag

SEQ ID NO: 2467456 - RNA, 12 nt, Human
gccaagacuugg

SEQ ID NO: 2467457 - RNA, 13 nt, Human
gccaagaggcugc

SEQ ID NO: 2467458 - RNA, 14 nt, Human
gccaagaggcugca

SEQ ID NO: 2467459 - RNA, 12 nt, Human
gccaagaggcug

SEQ ID NO: 2467460 - RNA, 16 nt, Human
gccaagagcagaggca

SEQ ID NO: 2467461 - RNA, 20 nt, Human
gccaagagcagaggcagcga

SEQ ID NO: 2467462 - RNA, 20 nt, Human
gccaacuuguaaauacacca

SEQ ID NO: 2467463 - RNA, 18 nt, Human
gccaacuuguaaauacac

SEQ ID NO: 2467464 - RNA, 17 nt, Human
gccaacuuguaaauaca

SEQ ID NO: 2467465 - RNA, 15 nt, Human
gccaacuuguaaaua

SEQ ID NO: 2467466 - RNA, 14 nt, Human
gccaacuuguaaau

SEQ ID NO: 2467467 - RNA, 13 nt, Human
gccaacuuguaaa

SEQ ID NO: 2467468 - RNA, 14 nt, Human
gccaacuuggcuuu

SEQ ID NO: 2467469 - RNA, 23 nt, Human
gccaacuugagggcccagagcag

SEQ ID NO: 2467470 - RNA, 22 nt, Human
gccaacuugagggcccagagca

SEQ ID NO: 2467471 - RNA, 21 nt, Human
gccaacuugagggcccagagc

SEQ ID NO: 2467472 - RNA, 20 nt, Human
gccaacuugagggcccagag

SEQ ID NO: 2467473 - RNA, 15 nt, Human
gccaacuugagggcc

SEQ ID NO: 2467474 - RNA, 20 nt, Human
gccaacuucuucagagcuga

SEQ ID NO: 2467475 - RNA, 19 nt, Human
gccaacuucuucagagcug

SEQ ID NO: 2467476 - RNA, 12 nt, Human
gccaacuguugu

SEQ ID NO: 2467477 - RNA, 19 nt, Human
gccaacugcugcuuuuuga

SEQ ID NO: 2467478 - RNA, 19 nt, Human
gccaacuauggccugugga

SEQ ID NO: 2467479 - RNA, 12 nt, Human
gccaacugcugc

SEQ ID NO: 2467480 - RNA, 15 nt, Human
gccaacuauggccug

SEQ ID NO: 2467481 - RNA, 14 nt, Human
gccaacuauggccu

SEQ ID NO: 2467482 - RNA, 23 nt, Human
gccaacgacaaagccaaacucug

SEQ ID NO: 2467483 - RNA, 22 nt, Human
gccaaccuguaauaaauaugag

SEQ ID NO: 2467484 - RNA, 21 nt, Human
gccaaccuguaauaaauauga

SEQ ID NO: 2467485 - RNA, 14 nt, Human
gccaacgacaaagc

SEQ ID NO: 2467486 - RNA, 20 nt, Human
gccaaccuguaauaaauaug

SEQ ID NO: 2467487 - RNA, 18 nt, Human
gccaaccuguaauaaaua

SEQ ID NO: 2467488 - RNA, 16 nt, Human
gccaaccuguaauaaa

SEQ ID NO: 2467489 - RNA, 15 nt, Human
gccaaccccugugga

SEQ ID NO: 2467490 - RNA, 21 nt, Human
gcauuuccuaucaccuauuuc

SEQ ID NO: 2467491 - RNA, 23 nt, Human
gcauuuccaacaccacagacaca

SEQ ID NO: 2467492 - RNA, 22 nt, Human
gcauuuccaacaccacagacac

SEQ ID NO: 2467493 - RNA, 21 nt, Human
gcauuuccaacaccacagaca

SEQ ID NO: 2467494 - RNA, 22 nt, Human
gcauuucauucuucucuagcug

SEQ ID NO: 2467495 - RNA, 20 nt, Human
gcauuucauucuucucuagc

SEQ ID NO: 2467496 - RNA, 13 nt, Human
gcauuucauucuu

SEQ ID NO: 2467497 - RNA, 11 nt, Human
gcauuucauuc

SEQ ID NO: 2467498 - RNA, 18 nt, Human
gcauuuaaaacagacacu

SEQ ID NO: 2467499 - RNA, 23 nt, Human
gcauuguuugcuuauuguuccaa

SEQ ID NO: 2467500 - RNA, 16 nt, Human
gcauuuauuugugaug

SEQ ID NO: 2467501 - RNA, 17 nt, Human
gcauuuauuugugauga

SEQ ID NO: 2467502 - RNA, 19 nt, Human
gcauuuauggucaacacuu

SEQ ID NO: 2467503 - RNA, 12 nt, Human
gcauuuaaaaga

SEQ ID NO: 2467504 - RNA, 15 nt, Human
gcauuuaaaagauac

SEQ ID NO: 2467505 - RNA, 23 nt, Human
gcauuguugagguggucugaaug

SEQ ID NO: 2467506 - RNA, 16 nt, Human
gcauuguugagguggu

SEQ ID NO: 2467507 - RNA, 17 nt, Human
gcauuguuugcuuauug

SEQ ID NO: 2467508 - RNA, 18 nt, Human
gcauuguuugcuuauugu

SEQ ID NO: 2467509 - RNA, 20 nt, Human
gcauuguuugcuuauuguuc

SEQ ID NO: 2467510 - RNA, 21 nt, Human
gcauuguuugcuuauuguucc

SEQ ID NO: 2467511 - RNA, 22 nt, Human
gcauuguuugcuuauuguucca

SEQ ID NO: 2467512 - RNA, 18 nt, Human
gcauugugaacugacagg

SEQ ID NO: 2467513 - RNA, 16 nt, Human
gcauuguggcugucag

SEQ ID NO: 2467514 - RNA, 19 nt, Human
gcauuguggcugucagcag

SEQ ID NO: 2467515 - RNA, 15 nt, Human
gcauuguugaggugg

SEQ ID NO: 2467516 - RNA, 13 nt, Human
gcauuucugaagu

SEQ ID NO: 2467517 - RNA, 12 nt, Human
gcauuucugaag

SEQ ID NO: 2467518 - RNA, 13 nt, Human
gcauuucucuggg

SEQ ID NO: 2467519 - RNA, 14 nt, Human
gcauuugaaaauuu

SEQ ID NO: 2467520 - RNA, 13 nt, Human
gcauuugaaugca

SEQ ID NO: 2467521 - RNA, 12 nt, Human
gcauuugaaugc

SEQ ID NO: 2467522 - RNA, 21 nt, Human
gcauuucuugauguugcuuag

SEQ ID NO: 2467523 - RNA, 20 nt, Human
gcauuucuugauguugcuua

SEQ ID NO: 2467524 - RNA, 10 nt, Human
gcauuugaau

SEQ ID NO: 2467525 - RNA, 16 nt, Human
gcauuugaaaauuuug

SEQ ID NO: 2467526 - RNA, 16 nt, Human
gcauuugaaugcauuu

SEQ ID NO: 2467527 - RNA, 15 nt, Human
gcauuugaaugcauu

SEQ ID NO: 2467528 - RNA, 19 nt, Human
gccaacagaagcuuccauu

SEQ ID NO: 2467529 - RNA, 16 nt, Human
gccaacagguggcagg

SEQ ID NO: 2467530 - RNA, 23 nt, Human
gccaacaguguuaggccuggcac

SEQ ID NO: 2467531 - RNA, 22 nt, Human
gccaacaguguuaggccuggca

SEQ ID NO: 2467532 - RNA, 21 nt, Human
gccaacaguguuaggccuggc

SEQ ID NO: 2467533 - RNA, 20 nt, Human
gccaacaguguuaggccugg

SEQ ID NO: 2467534 - RNA, 22 nt, Human
gccaacagguggcaggaccagg

SEQ ID NO: 2467535 - RNA, 19 nt, Human
gccaacagguggcaggacc

SEQ ID NO: 2467536 - RNA, 23 nt, Human
gccaacagguggcaggaccagga

SEQ ID NO: 2467537 - RNA, 20 nt, Human
gccaacagucaaaacagaga

SEQ ID NO: 2467538 - RNA, 14 nt, Human
gccaacauggugaa

SEQ ID NO: 2467539 - RNA, 23 nt, Human
gccaacaucgugaaacccugucu

SEQ ID NO: 2467540 - RNA, 22 nt, Human
gccaacaucgugaaacccuguc

SEQ ID NO: 2467541 - RNA, 20 nt, Human
gccaacaucgugaaacccug

SEQ ID NO: 2467542 - RNA, 23 nt, Human
gccaaccauaccuuccuucccug

SEQ ID NO: 2467543 - RNA, 13 nt, Human
gccaaccauaccu

SEQ ID NO: 2467544 - RNA, 14 nt, Human
gccaaccccugugg

SEQ ID NO: 2467545 - RNA, 22 nt, Human
gccaacccuucuccucuuguaa

SEQ ID NO: 2467546 - RNA, 13 nt, Human
gccaacccuucuc

SEQ ID NO: 2467547 - RNA, 23 nt, Human
gccaacccuucuccucuuguaaa

SEQ ID NO: 2467548 - RNA, 17 nt, Human
gccaagaggcugcagcc

SEQ ID NO: 2467549 - RNA, 23 nt, Human
gccaagacuuggcaacagaagca

SEQ ID NO: 2467550 - RNA, 18 nt, Human
gccaagaucgcgccacug

SEQ ID NO: 2467551 - RNA, 22 nt, Human
gccaagcaccuagccucgcucu

SEQ ID NO: 2467552 - RNA, 18 nt, Human
gccaagcacugugcucag

SEQ ID NO: 2467553 - RNA, 15 nt, Human
gccaagcacugugcu

SEQ ID NO: 2467554 - RNA, 23 nt, Human
gccaagcacugugcucagggcua

SEQ ID NO: 2467555 - RNA, 12 nt, Human
gccaagcagcca

SEQ ID NO: 2467556 - RNA, 20 nt, Human
gccaagcaaccuggguccaa

SEQ ID NO: 2467557 - RNA, 19 nt, Human
gccaagcaaccugggucca

SEQ ID NO: 2467558 - RNA, 18 nt, Human
gccaagcaaccugggucc

SEQ ID NO: 2467559 - RNA, 13 nt, Human
gccaagcaaccug

SEQ ID NO: 2467560 - RNA, 21 nt, Human
gccaagcacagugguggcagg

SEQ ID NO: 2467561 - RNA, 16 nt, Human
gccaagcacaguggug

SEQ ID NO: 2467562 - RNA, 12 nt, Human
gccaagcacagu

SEQ ID NO: 2467563 - RNA, 20 nt, Human
gccaagcacagugccugcau

SEQ ID NO: 2467564 - RNA, 14 nt, Human
gccaaggagcugcu

SEQ ID NO: 2467565 - RNA, 15 nt, Human
gccaaggagcugcua

SEQ ID NO: 2467566 - RNA, 16 nt, Human
gccaaggagcugcuau

SEQ ID NO: 2467567 - RNA, 20 nt, Human
gccaaggagcugcuauagcc

SEQ ID NO: 2467568 - RNA, 12 nt, Human
gccaaggagcug

SEQ ID NO: 2467569 - RNA, 13 nt, Human
gccaaggagcugc

SEQ ID NO: 2467570 - RNA, 11 nt, Human
gccaaggagcu

SEQ ID NO: 2467571 - RNA, 17 nt, Human
gccaaggacugccgacc

SEQ ID NO: 2467572 - RNA, 14 nt, Human
gccaaggacugccg

SEQ ID NO: 2467573 - RNA, 20 nt, Human
gccaagcucaggaccaggca

SEQ ID NO: 2467574 - RNA, 13 nt, Human
gccaagcuagaau

SEQ ID NO: 2467575 - RNA, 22 nt, Human
gccaagcccuccccaucccaug

SEQ ID NO: 2467576 - RNA, 22 nt, Human
gccaagcauuuaauguagccau

SEQ ID NO: 2467577 - RNA, 21 nt, Human
gccaagcccuccccaucccau

SEQ ID NO: 2467578 - RNA, 14 nt, Human
gccaagcagggagg

SEQ ID NO: 2467579 - RNA, 14 nt, Human
gccaagcagccaag

SEQ ID NO: 2467580 - RNA, 16 nt, Human
gccaagcuccaagccc

SEQ ID NO: 2467581 - RNA, 23 nt, Human
gccaagcucaggaccaggcaaug

SEQ ID NO: 2467582 - RNA, 16 nt, Human
gccaagcuccuuggga

SEQ ID NO: 2467583 - RNA, 17 nt, Human
gccaagcuccuugggag

SEQ ID NO: 2467584 - RNA, 19 nt, Human
gccaagcuccuugggaggc

SEQ ID NO: 2467585 - RNA, 17 nt, Human
gccaaggccaaaggaag

SEQ ID NO: 2467586 - RNA, 19 nt, Human
gccaaggccaaaggaagca

SEQ ID NO: 2467587 - RNA, 11 nt, Human
gccaaggccaa

SEQ ID NO: 2467588 - RNA, 23 nt, Human
gccaaggaggguggaucaccuga

SEQ ID NO: 2467589 - RNA, 21 nt, Human
gccaaggagggugagugcaag

SEQ ID NO: 2467590 - RNA, 21 nt, Human
gccaaggagcugcuauagccu

SEQ ID NO: 2467591 - RNA, 23 nt, Human
gccaaggagcugcuauagccugg

SEQ ID NO: 2467592 - RNA, 20 nt, Human
gccaaggagggugagugcaa

SEQ ID NO: 2467593 - RNA, 16 nt, Human
gcacuuuguucuggcu

SEQ ID NO: 2467594 - RNA, 20 nt, Human
gcacuuugggaggcugaggc

SEQ ID NO: 2467595 - RNA, 21 nt, Human
gcacuuugggaggcugaggcg

SEQ ID NO: 2467596 - RNA, 16 nt, Human
gcacuuugggaggccu

SEQ ID NO: 2467597 - RNA, 16 nt, Human
gcacuuugggaggcug

SEQ ID NO: 2467598 - RNA, 19 nt, Human
gcacucugugcccaugggc

SEQ ID NO: 2467599 - RNA, 14 nt, Human
gcacucugugccca

SEQ ID NO: 2467600 - RNA, 13 nt, Human
gcacucugugccc

SEQ ID NO: 2467601 - RNA, 12 nt, Human
gcacucugugcc

SEQ ID NO: 2467602 - RNA, 11 nt, Human
gcacucugugc

SEQ ID NO: 2467603 - RNA, 19 nt, Human
gcacucuguuauuuagacu

SEQ ID NO: 2467604 - RNA, 21 nt, Human
gcacucugugcccaugggcac

SEQ ID NO: 2467605 - RNA, 20 nt, Human
gcacucugugcccaugggca

SEQ ID NO: 2467606 - RNA, 14 nt, Human
gcacucuguuauuu

SEQ ID NO: 2467607 - RNA, 16 nt, Human
gcacucuuaagcuucc

SEQ ID NO: 2467608 - RNA, 20 nt, Human
gcacuuucuauccucuguaa

SEQ ID NO: 2467609 - RNA, 17 nt, Human
gcacugaagugcuuagu

SEQ ID NO: 2467610 - RNA, 22 nt, Human
gcacuuucuacaaugugaacuu

SEQ ID NO: 2467611 - RNA, 16 nt, Human
gcaggcucucaggcca

SEQ ID NO: 2467612 - RNA, 15 nt, Human
gcaggcucucaggcc

SEQ ID NO: 2467613 - RNA, 14 nt, Human
gcaggcucucaggc

SEQ ID NO: 2467614 - RNA, 13 nt, Human
gcaggcucucagg

SEQ ID NO: 2467615 - RNA, 12 nt, Human
gcaggcucucag

SEQ ID NO: 2467616 - RNA, 22 nt, Human
gcaggcucgggcuccccagccc

SEQ ID NO: 2467617 - RNA, 21 nt, Human
gcagcuugaggguugggcugg

SEQ ID NO: 2467618 - RNA, 19 nt, Human
gcagcuugaggguugggcu

SEQ ID NO: 2467619 - RNA, 23 nt, Human
gcaggcuggcagcucuccaguca

SEQ ID NO: 2467620 - RNA, 22 nt, Human
gcaggcuggcagcucuccaguc

SEQ ID NO: 2467621 - RNA, 14 nt, Human
gcaggcuggccagu

SEQ ID NO: 2467622 - RNA, 12 nt, Human
gcaggcuggcca

SEQ ID NO: 2467623 - RNA, 13 nt, Human
gcaggcuggcccu

SEQ ID NO: 2467624 - RNA, 22 nt, Human
gcaggcuggccaguccaggcug

SEQ ID NO: 2467625 - RNA, 22 nt, Human
gcagggaaaggcucugaaagcc

SEQ ID NO: 2467626 - RNA, 22 nt, Human
gcagggaaacagcuaaugggac

SEQ ID NO: 2467627 - RNA, 17 nt, Human
gcaggcucucaggccag

SEQ ID NO: 2467628 - RNA, 12 nt, Human
gcagcuugcccc

SEQ ID NO: 2467629 - RNA, 15 nt, Human
gcaggcugacaucug

SEQ ID NO: 2467630 - RNA, 20 nt, Human
gcaggcuggagguaaggccu

SEQ ID NO: 2467631 - RNA, 13 nt, Human
gcagcuugccccg

SEQ ID NO: 2467632 - RNA, 16 nt, Human
gcaggcuggcaccgcc

SEQ ID NO: 2467633 - RNA, 18 nt, Human
gcaggcuggcagcucucc

SEQ ID NO: 2467634 - RNA, 17 nt, Human
gcaggcuggcagcucuc

SEQ ID NO: 2467635 - RNA, 18 nt, Human
gcaggcuggcaccgccuu

SEQ ID NO: 2467636 - RNA, 19 nt, Human
gcaggcuggcaccgccuuc

SEQ ID NO: 2467637 - RNA, 20 nt, Human
gcagcugcuuuugucuaugg

SEQ ID NO: 2467638 - RNA, 13 nt, Human
gcagcugcuuuug

SEQ ID NO: 2467639 - RNA, 23 nt, Human
gcagcugcgguccacccaggagc

SEQ ID NO: 2467640 - RNA, 22 nt, Human
gcagcugcgguccacccaggag

SEQ ID NO: 2467641 - RNA, 15 nt, Human
gcagcuucugccacu

SEQ ID NO: 2467642 - RNA, 14 nt, Human
gcagcuucugccac

SEQ ID NO: 2467643 - RNA, 12 nt, Human
gcagcuuccaga

SEQ ID NO: 2467644 - RNA, 13 nt, Human
gcagcuucaguug

SEQ ID NO: 2467645 - RNA, 14 nt, Human
gcagcuucaccaga

SEQ ID NO: 2467646 - RNA, 15 nt, Human
gcagcuuauucacaa

SEQ ID NO: 2467647 - RNA, 14 nt, Human
gcagcuucuguccu

SEQ ID NO: 2467648 - RNA, 18 nt, Human
gcagcuucugccacuucc

SEQ ID NO: 2467649 - RNA, 17 nt, Human
gcagcuucugccacuuc

SEQ ID NO: 2467650 - RNA, 20 nt, Human
gcagcuucugccacuuccca

SEQ ID NO: 2467651 - RNA, 16 nt, Human
gcagcuugaggguugg

SEQ ID NO: 2467652 - RNA, 15 nt, Human
gcagcuggacuaccc

SEQ ID NO: 2467653 - RNA, 23 nt, Human
gcagcuggaaaagggucuuggga

SEQ ID NO: 2467654 - RNA, 16 nt, Human
gcagcuggacuaccca

SEQ ID NO: 2467655 - RNA, 15 nt, Human
gcagcugggcccaac

SEQ ID NO: 2467656 - RNA, 14 nt, Human
gcagcugggcccaa

SEQ ID NO: 2467657 - RNA, 22 nt, Human
gcagcugggcccaacccugucu

SEQ ID NO: 2467658 - RNA, 21 nt, Human
gcagcugggcccaacccuguc

SEQ ID NO: 2467659 - RNA, 19 nt, Human
gcagcugggcccaacccug

SEQ ID NO: 2467660 - RNA, 16 nt, Human
gcagcugggcccaacc

SEQ ID NO: 2467661 - RNA, 23 nt, Human
gcagcugggcccaacccugucug

SEQ ID NO: 2467662 - RNA, 14 nt, Human
gcagcuguuagagu

SEQ ID NO: 2467663 - RNA, 21 nt, Human
gcagcuguuuuaguuaaauuu

SEQ ID NO: 2467664 - RNA, 16 nt, Human
gcagcuguuuaaaugu

SEQ ID NO: 2467665 - RNA, 16 nt, Human
gcagcuguugcaguga

SEQ ID NO: 2467666 - RNA, 17 nt, Human
gcagcuguuagagucca

SEQ ID NO: 2467667 - RNA, 15 nt, Human
gcauaaauaugcagu

SEQ ID NO: 2467668 - RNA, 14 nt, Human
gcauaaauaugcag

SEQ ID NO: 2467669 - RNA, 16 nt, Human
gcauaacaauuccucu

SEQ ID NO: 2467670 - RNA, 17 nt, Human
gcauaacaauuccucua

SEQ ID NO: 2467671 - RNA, 13 nt, Human
gcauacacacaca

SEQ ID NO: 2467672 - RNA, 14 nt, Human
gcauacacacacac

SEQ ID NO: 2467673 - RNA, 21 nt, Human
gcauacacacacacacacagc

SEQ ID NO: 2467674 - RNA, 22 nt, Human
gcauacacacacacacacagcc

SEQ ID NO: 2467675 - RNA, 18 nt, Human
gcauaacaagguccaaga

SEQ ID NO: 2467676 - RNA, 11 nt, Human
gcauacacaca

SEQ ID NO: 2467677 - RNA, 13 nt, Human
gcauacaaucuga

SEQ ID NO: 2467678 - RNA, 23 nt, Human
gcaguugccagucaccccggcca

SEQ ID NO: 2467679 - RNA, 14 nt, Human
gcaguugccaguca

SEQ ID NO: 2467680 - RNA, 13 nt, Human
gcauaaauaugca

SEQ ID NO: 2467681 - RNA, 14 nt, Human
gcauaaaggccuuu

SEQ ID NO: 2467682 - RNA, 15 nt, Human
gcauaaaaauuagcc

SEQ ID NO: 2467683 - RNA, 20 nt, Human
gcagguucuucuuccugaag

SEQ ID NO: 2467684 - RNA, 18 nt, Human
gcagguucccaagcucag

SEQ ID NO: 2467685 - RNA, 19 nt, Human
gcagguucccaagcucaga

SEQ ID NO: 2467686 - RNA, 15 nt, Human
gcagguucccaagcu

SEQ ID NO: 2467687 - RNA, 16 nt, Human
gcagguucccaagcuc

SEQ ID NO: 2467688 - RNA, 13 nt, Human
gcagguucccaag

SEQ ID NO: 2467689 - RNA, 22 nt, Human
gcaguugaaaagacuccaaaga

SEQ ID NO: 2467690 - RNA, 17 nt, Human
gcaguugacagcaggug

SEQ ID NO: 2467691 - RNA, 22 nt, Human
gcaguugaaugacaacagaagc

SEQ ID NO: 2467692 - RNA, 22 nt, Human
gcagguucuucuuccugaagcu

SEQ ID NO: 2467693 - RNA, 15 nt, Human
gcaguugacagcagg

SEQ ID NO: 2467694 - RNA, 16 nt, Human
gcagguuagaaccuag

SEQ ID NO: 2467695 - RNA, 20 nt, Human
gcaggugguggcacugagcc

SEQ ID NO: 2467696 - RNA, 14 nt, Human
gcaggugguggcac

SEQ ID NO: 2467697 - RNA, 21 nt, Human
gcaggugguccugagaccuga

SEQ ID NO: 2467698 - RNA, 16 nt, Human
gcaggugguccugaga

SEQ ID NO: 2467699 - RNA, 22 nt, Human
gcaggugguggcacugagcccc

SEQ ID NO: 2467700 - RNA, 21 nt, Human
gcaggugguggcacugagccc

SEQ ID NO: 2467701 - RNA, 23 nt, Human
gcaggugguggcacugagccccc

SEQ ID NO: 2467702 - RNA, 22 nt, Human
gcaggugucauauauggggggc

SEQ ID NO: 2467703 - RNA, 15 nt, Human
gcaggugguccugag

SEQ ID NO: 2467704 - RNA, 17 nt, Human
gcagguggggagggggu

SEQ ID NO: 2467705 - RNA, 20 nt, Human
gcagggaaggggaggcagcc

SEQ ID NO: 2467706 - RNA, 21 nt, Human
gcagggaaguguaagaaacac

SEQ ID NO: 2467707 - RNA, 21 nt, Human
gcagggaaggggaggcagccg

SEQ ID NO: 2467708 - RNA, 15 nt, Human
gcauaccacuuuugu

SEQ ID NO: 2467709 - RNA, 16 nt, Human
gcauaccacuuuuguu

SEQ ID NO: 2467710 - RNA, 23 nt, Human
gcauacacacacacacacagcca

SEQ ID NO: 2467711 - RNA, 17 nt, Human
gcauacauuuauaaugu

SEQ ID NO: 2467712 - RNA, 17 nt, Human
gagaagcggcuggcagc

SEQ ID NO: 2467713 - RNA, 18 nt, Human
gacuuugggauaggaaaa

SEQ ID NO: 2467714 - RNA, 16 nt, Human
gacuuuggcugcaugc

SEQ ID NO: 2467715 - RNA, 15 nt, Human
gacuuugcuucccau

SEQ ID NO: 2467716 - RNA, 13 nt, Human
gacuuugugaucc

SEQ ID NO: 2467717 - RNA, 22 nt, Human
gacuuuguaccccccaaccccu

SEQ ID NO: 2467718 - RNA, 19 nt, Human
gacuuuggcugcaugcgag

SEQ ID NO: 2467719 - RNA, 22 nt, Human
gacuuuguuaguuucuccaagc

SEQ ID NO: 2467720 - RNA, 14 nt, Human
gacuuuucugcaaa

SEQ ID NO: 2467721 - RNA, 13 nt, Human
gacuuuucugcaa

SEQ ID NO: 2467722 - RNA, 23 nt, Human
gacuuuucuguccgagcuuugaa

SEQ ID NO: 2467723 - RNA, 14 nt, Human
gacuuuguaccccc

SEQ ID NO: 2467724 - RNA, 17 nt, Human
gacuuuuccauguaucu

SEQ ID NO: 2467725 - RNA, 18 nt, Human
gacuuuuccauguaucua

SEQ ID NO: 2467726 - RNA, 19 nt, Human
gacuuuucgaccaauucaa

SEQ ID NO: 2467727 - RNA, 22 nt, Human
gacuuuucgaccaauucaaccc

SEQ ID NO: 2467728 - RNA, 21 nt, Human
gacuuuucuguccgagcuuug

SEQ ID NO: 2467729 - RNA, 16 nt, Human
gacuguuuucucuuga

SEQ ID NO: 2467730 - RNA, 18 nt, Human
gacuguuuucucuugaga

SEQ ID NO: 2467731 - RNA, 18 nt, Human
gacuguuuuuacccauau

SEQ ID NO: 2467732 - RNA, 14 nt, Human
gacuguuuuuuccu

SEQ ID NO: 2467733 - RNA, 16 nt, Human
gacuuucugccuggag

SEQ ID NO: 2467734 - RNA, 19 nt, Human
gacuguuuuuuccugagcu

SEQ ID NO: 2467735 - RNA, 20 nt, Human
gacuguuuuuuccugagcuu

SEQ ID NO: 2467736 - RNA, 17 nt, Human
gacuguuuuuacccaua

SEQ ID NO: 2467737 - RNA, 13 nt, Human
gacuguuuuuacc

SEQ ID NO: 2467738 - RNA, 21 nt, Human
gacuguuuucucucggcuccc

SEQ ID NO: 2467739 - RNA, 19 nt, Human
gacuguuuucucucggcuc

SEQ ID NO: 2467740 - RNA, 14 nt, Human
gacuuuggaaagag

SEQ ID NO: 2467741 - RNA, 14 nt, Human
gacuuuggaaagac

SEQ ID NO: 2467742 - RNA, 13 nt, Human
gacuuucuguugg

SEQ ID NO: 2467743 - RNA, 11 nt, Human
gacuuucuguu

SEQ ID NO: 2467744 - RNA, 18 nt, Human
gacuuucugccuggagug

SEQ ID NO: 2467745 - RNA, 21 nt, Human
gacuuugcagccggcacaggg

SEQ ID NO: 2467746 - RNA, 20 nt, Human
gacugugugcucaggagccc

SEQ ID NO: 2467747 - RNA, 17 nt, Human
gacugugugcucaggag

SEQ ID NO: 2467748 - RNA, 16 nt, Human
gacugugugcucagga

SEQ ID NO: 2467749 - RNA, 14 nt, Human
gacugugugcucag

SEQ ID NO: 2467750 - RNA, 15 nt, Human
gacugucauagaaau

SEQ ID NO: 2467751 - RNA, 21 nt, Human
gacugucucaagagggcacug

SEQ ID NO: 2467752 - RNA, 20 nt, Human
gacuguauuugugacuaauu

SEQ ID NO: 2467753 - RNA, 19 nt, Human
gacuguauuugugacuaau

SEQ ID NO: 2467754 - RNA, 17 nt, Human
gacuguauuugugacua

SEQ ID NO: 2467755 - RNA, 23 nt, Human
gacugucucaagagggcacuggu

SEQ ID NO: 2467756 - RNA, 22 nt, Human
gacugucucaagagggcacugg

SEQ ID NO: 2467757 - RNA, 23 nt, Human
gacuguauuugugacuaauugua

SEQ ID NO: 2467758 - RNA, 22 nt, Human
gacuguauuugugacuaauugu

SEQ ID NO: 2467759 - RNA, 18 nt, Human
gacugucuccauggcccu

SEQ ID NO: 2467760 - RNA, 22 nt, Human
gacuguguauucuaguuuuguc

SEQ ID NO: 2467761 - RNA, 14 nt, Human
gacucaaugcacug

SEQ ID NO: 2467762 - RNA, 16 nt, Human
gacucaagugucucag

SEQ ID NO: 2467763 - RNA, 15 nt, Human
gacucaauaaaauca

SEQ ID NO: 2467764 - RNA, 17 nt, Human
gacucaauaaaaucaug

SEQ ID NO: 2467765 - RNA, 17 nt, Human
gacucaaguccuuaccu

SEQ ID NO: 2467766 - RNA, 17 nt, Human
gacucaaugcacugaca

SEQ ID NO: 2467767 - RNA, 17 nt, Human
gacucacaagaagacca

SEQ ID NO: 2467768 - RNA, 15 nt, Human
gacucacaagaagac

SEQ ID NO: 2467769 - RNA, 19 nt, Human
gacucacaaccugaaccua

SEQ ID NO: 2467770 - RNA, 17 nt, Human
gacucaauuucucccca

SEQ ID NO: 2467771 - RNA, 16 nt, Human
gacucaauuucucccc

SEQ ID NO: 2467772 - RNA, 18 nt, Human
gacucacaaccugaaccu

SEQ ID NO: 2467773 - RNA, 17 nt, Human
gacuguacuccucccag

SEQ ID NO: 2467774 - RNA, 16 nt, Human
gacuguacuccuccca

SEQ ID NO: 2467775 - RNA, 22 nt, Human
gacuguacaaaguagaagucuu

SEQ ID NO: 2467776 - RNA, 22 nt, Human
gacugguguuaucaccgugggc

SEQ ID NO: 2467777 - RNA, 22 nt, Human
gacucacaagaagaccagacug

SEQ ID NO: 2467778 - RNA, 21 nt, Human
gacucacaagaagaccagacu

SEQ ID NO: 2467779 - RNA, 13 nt, Human
gacgcugugcugc

SEQ ID NO: 2467780 - RNA, 20 nt, Human
gacgcugguagagauggagg

SEQ ID NO: 2467781 - RNA, 21 nt, Human
gacgcugguagagauggagga

SEQ ID NO: 2467782 - RNA, 15 nt, Human
gacccuccccgcacc

SEQ ID NO: 2467783 - RNA, 17 nt, Human
gacccuccccgcacccc

SEQ ID NO: 2467784 - RNA, 20 nt, Human
gacccuccuguugcacccag

SEQ ID NO: 2467785 - RNA, 18 nt, Human
gacccuccuguugcaccc

SEQ ID NO: 2467786 - RNA, 15 nt, Human
gacccuccuguugca

SEQ ID NO: 2467787 - RNA, 19 nt, Human
gacccuccuccucccccag

SEQ ID NO: 2467788 - RNA, 22 nt, Human
gacccuccuccucccccagagg

SEQ ID NO: 2467789 - RNA, 11 nt, Human
gacccucucaa

SEQ ID NO: 2467790 - RNA, 15 nt, Human
gacccucguggccuu

SEQ ID NO: 2467791 - RNA, 22 nt, Human
gacccuccuguugcacccagcc

SEQ ID NO: 2467792 - RNA, 21 nt, Human
gacccuccuguugcacccagc

SEQ ID NO: 2467793 - RNA, 23 nt, Human
gacccuccuguugcacccagccc

SEQ ID NO: 2467794 - RNA, 18 nt, Human
gacccucguggccuuccc

SEQ ID NO: 2467795 - RNA, 12 nt, Human
gacgcugugcug

SEQ ID NO: 2467796 - RNA, 17 nt, Human
gacgcugaauaaauguc

SEQ ID NO: 2467797 - RNA, 16 nt, Human
gacgcugaauaaaugu

SEQ ID NO: 2467798 - RNA, 13 nt, Human
gacgcugaauaaa

SEQ ID NO: 2467799 - RNA, 18 nt, Human
gacgcugguagagaugga

SEQ ID NO: 2467800 - RNA, 18 nt, Human
gacuagugaggaaagauu

SEQ ID NO: 2467801 - RNA, 17 nt, Human
gacuauagcccaggucc

SEQ ID NO: 2467802 - RNA, 22 nt, Human
gacucaacauguuacugaccag

SEQ ID NO: 2467803 - RNA, 22 nt, Human
gacuauucaaacagucucagga

SEQ ID NO: 2467804 - RNA, 15 nt, Human
gacuauggagcugag

SEQ ID NO: 2467805 - RNA, 14 nt, Human
gacucaaaccaaau

SEQ ID NO: 2467806 - RNA, 19 nt, Human
gacucaaaucuccaguauu

SEQ ID NO: 2467807 - RNA, 18 nt, Human
gacucaaaguuucagaga

SEQ ID NO: 2467808 - RNA, 22 nt, Human
gacucaaaugcucagaccagcu

SEQ ID NO: 2467809 - RNA, 15 nt, Human
gacuauucaaacagu

SEQ ID NO: 2467810 - RNA, 16 nt, Human
gacuauucaaacaguc

SEQ ID NO: 2467811 - RNA, 19 nt, Human
gacuauauuugggccugcu

SEQ ID NO: 2467812 - RNA, 21 nt, Human
gacuauauuugggccugcucc

SEQ ID NO: 2467813 - RNA, 19 nt, Human
gacuaugcguuuuuauaaa

SEQ ID NO: 2467814 - RNA, 19 nt, Human
gacuauauagagauguuuu

SEQ ID NO: 2467815 - RNA, 16 nt, Human
gacuauauagagaugu

SEQ ID NO: 2467816 - RNA, 23 nt, Human
gacuauauagagauguuuuuaaa

SEQ ID NO: 2467817 - RNA, 20 nt, Human
gacuauauagagauguuuuu

SEQ ID NO: 2467818 - RNA, 18 nt, Human
gacuauauuguacacacc

SEQ ID NO: 2467819 - RNA, 16 nt, Human
gaagcauguuucaugu

SEQ ID NO: 2467820 - RNA, 19 nt, Human
gaagcauguuucauguuuu

SEQ ID NO: 2467821 - RNA, 14 nt, Human
gaagcauguuucau

SEQ ID NO: 2467822 - RNA, 13 nt, Human
gaagcauguuuca

SEQ ID NO: 2467823 - RNA, 12 nt, Human
gaagcauguuuc

SEQ ID NO: 2467824 - RNA, 17 nt, Human
gaagcauguaggagaau

SEQ ID NO: 2467825 - RNA, 16 nt, Human
gaagcaugaaaaagca

SEQ ID NO: 2467826 - RNA, 16 nt, Human
gaagcauguaggagaa

SEQ ID NO: 2467827 - RNA, 17 nt, Human
gaagcagugccuuccau

SEQ ID NO: 2467828 - RNA, 18 nt, Human
gaagcagugccuuccaua

SEQ ID NO: 2467829 - RNA, 19 nt, Human
gaagcagugccuuccauaa

SEQ ID NO: 2467830 - RNA, 16 nt, Human
gaagcagugagccgca

SEQ ID NO: 2467831 - RNA, 14 nt, Human
gaagcaguuguguc

SEQ ID NO: 2467832 - RNA, 13 nt, Human
gaagcaguugugu

SEQ ID NO: 2467833 - RNA, 22 nt, Human
gaagcaucuuccagaaguguga

SEQ ID NO: 2467834 - RNA, 16 nt, Human
gaagcaguugugucag

SEQ ID NO: 2467835 - RNA, 13 nt, Human
gaagcaugaaaaa

SEQ ID NO: 2467836 - RNA, 15 nt, Human
gacacucagaccuga

SEQ ID NO: 2467837 - RNA, 13 nt, Human
gacacucagaccu

SEQ ID NO: 2467838 - RNA, 22 nt, Human
gacacuccuagagaacgcagcc

SEQ ID NO: 2467839 - RNA, 21 nt, Human
gacacuccuagagaacgcagc

SEQ ID NO: 2467840 - RNA, 14 nt, Human
gacacuccuagaga

SEQ ID NO: 2467841 - RNA, 16 nt, Human
gacacuccagugccag

SEQ ID NO: 2467842 - RNA, 15 nt, Human
gacacucccuugggc

SEQ ID NO: 2467843 - RNA, 21 nt, Human
gacacucccuugggcucccug

SEQ ID NO: 2467844 - RNA, 19 nt, Human
gacacuccagugccagcaa

SEQ ID NO: 2467845 - RNA, 14 nt, Human
gacacuccagugcc

SEQ ID NO: 2467846 - RNA, 12 nt, Human
gacacuccagug

SEQ ID NO: 2467847 - RNA, 16 nt, Human
gacacuccccgaaguc

SEQ ID NO: 2467848 - RNA, 21 nt, Human
gacacuccccgaagucuuuug

SEQ ID NO: 2467849 - RNA, 14 nt, Human
gacagaaagcagaa

SEQ ID NO: 2467850 - RNA, 21 nt, Human
gacacuuuucaugugugauuu

SEQ ID NO: 2467851 - RNA, 12 nt, Human
gacacucugcuc

SEQ ID NO: 2467852 - RNA, 19 nt, Human
gacacuuuuuugaguggau

SEQ ID NO: 2467853 - RNA, 20 nt, Human
gacagaaagcagaacaguga

SEQ ID NO: 2467854 - RNA, 16 nt, Human
gacagaaaacauguuu

SEQ ID NO: 2467855 - RNA, 13 nt, Human
gacagcccuccau

SEQ ID NO: 2467856 - RNA, 21 nt, Human
gacagcccuucuuuccacaga

SEQ ID NO: 2467857 - RNA, 16 nt, Human
gacagccucccacccc

SEQ ID NO: 2467858 - RNA, 12 nt, Human
gacagaaagcag

SEQ ID NO: 2467859 - RNA, 11 nt, Human
gacagccuccc

SEQ ID NO: 2467860 - RNA, 15 nt, Human
gacagcuccuucugu

SEQ ID NO: 2467861 - RNA, 14 nt, Human
gacagcuccuucug

SEQ ID NO: 2467862 - RNA, 12 nt, Human
gacagccuggca

SEQ ID NO: 2467863 - RNA, 11 nt, Human
gacagccuggc

SEQ ID NO: 2467864 - RNA, 13 nt, Human
gacagcuccuucu

SEQ ID NO: 2467865 - RNA, 18 nt, Human
gacaggggcaggaggaag

SEQ ID NO: 2467866 - RNA, 21 nt, Human
gacagggcuggcccagcccug

SEQ ID NO: 2467867 - RNA, 20 nt, Human
gacagggcuggcccagcccu

SEQ ID NO: 2467868 - RNA, 22 nt, Human
gacagggcuggcccagcccugc

SEQ ID NO: 2467869 - RNA, 20 nt, Human
gacaggggcaggaggaaggg

SEQ ID NO: 2467870 - RNA, 19 nt, Human
gacagggcuggcccagccc

SEQ ID NO: 2467871 - RNA, 18 nt, Human
gacagggcuggcccagcc

SEQ ID NO: 2467872 - RNA, 17 nt, Human
gacagggcuggcccagc

SEQ ID NO: 2467873 - RNA, 15 nt, Human
gacagggcuggccca

SEQ ID NO: 2467874 - RNA, 12 nt, Human
gacagggcuggc

SEQ ID NO: 2467875 - RNA, 14 nt, Human
gacagggcuggccc

SEQ ID NO: 2467876 - RNA, 22 nt, Human
gacagguuugggaccccuggug

SEQ ID NO: 2467877 - RNA, 17 nt, Human
gacaguaucacugucuu

SEQ ID NO: 2467878 - RNA, 21 nt, Human
gacaguaucacugucuuuccu

SEQ ID NO: 2467879 - RNA, 15 nt, Human
gacaguauacagucc

SEQ ID NO: 2467880 - RNA, 19 nt, Human
gacagguuugggaccccug

SEQ ID NO: 2467881 - RNA, 20 nt, Human
gacaggguuuggcugugucu

SEQ ID NO: 2467882 - RNA, 17 nt, Human
gacaggguuucaccaug

SEQ ID NO: 2467883 - RNA, 20 nt, Human
gacaguauggcagcuuuccu

SEQ ID NO: 2467884 - RNA, 21 nt, Human
gacaguaugagucaaugugca

SEQ ID NO: 2467885 - RNA, 22 nt, Human
gacaguaugagucaaugugcag

SEQ ID NO: 2467886 - RNA, 22 nt, Human
gaccagcuuuucccaaaagccc

SEQ ID NO: 2467887 - RNA, 16 nt, Human
gaccaggacaggacca

SEQ ID NO: 2467888 - RNA, 22 nt, Human
gaccaggacuauagcccagguc

SEQ ID NO: 2467889 - RNA, 14 nt, Human
gaccaggacuauag

SEQ ID NO: 2467890 - RNA, 14 nt, Human
gaccaggacucccu

SEQ ID NO: 2467891 - RNA, 16 nt, Human
gaccaggacucccucc

SEQ ID NO: 2467892 - RNA, 17 nt, Human
gaccaggacucccuccu

SEQ ID NO: 2467893 - RNA, 19 nt, Human
gaccaggacucccuccuca

SEQ ID NO: 2467894 - RNA, 21 nt, Human
gaccaggacucccuccucacc

SEQ ID NO: 2467895 - RNA, 23 nt, Human
gaccaggagggcacuggagcugu

SEQ ID NO: 2467896 - RNA, 16 nt, Human
gaccaggagggcacug

SEQ ID NO: 2467897 - RNA, 23 nt, Human
gaccaggacucccuccucaccuc

SEQ ID NO: 2467898 - RNA, 13 nt, Human
gaccaggccuggg

SEQ ID NO: 2467899 - RNA, 23 nt, Human
gaccaggcauccuccacaauagc

SEQ ID NO: 2467900 - RNA, 15 nt, Human
gaccaguaauuguga

SEQ ID NO: 2467901 - RNA, 21 nt, Human
gaccagguuauuuuaaaaaga

SEQ ID NO: 2467902 - RNA, 17 nt, Human
gaccagucaaccugggc

SEQ ID NO: 2467903 - RNA, 15 nt, Human
gaccagucugacccu

SEQ ID NO: 2467904 - RNA, 18 nt, Human
gaccagucaaccugggca

SEQ ID NO: 2467905 - RNA, 22 nt, Human
gaccaggggugauuucagagag

SEQ ID NO: 2467906 - RNA, 23 nt, Human
gaccaggucuuggagcugagccu

SEQ ID NO: 2467907 - RNA, 22 nt, Human
gaccaggucuuggagcugagcc

SEQ ID NO: 2467908 - RNA, 23 nt, Human
gaccaggggugauuucagagagg

SEQ ID NO: 2467909 - RNA, 15 nt, Human
gaccaucccugaagg

SEQ ID NO: 2467910 - RNA, 14 nt, Human
gaccaucccugaag

SEQ ID NO: 2467911 - RNA, 16 nt, Human
gaccauaacagccaac

SEQ ID NO: 2467912 - RNA, 19 nt, Human
gaccaguuuaaccugaugc

SEQ ID NO: 2467913 - RNA, 20 nt, Human
gaccaguugggagcacugga

SEQ ID NO: 2467914 - RNA, 17 nt, Human
gaccaguugggagcacu

SEQ ID NO: 2467915 - RNA, 15 nt, Human
gaccaguugggagca

SEQ ID NO: 2467916 - RNA, 14 nt, Human
gaccaguugggagc

SEQ ID NO: 2467917 - RNA, 14 nt, Human
gaccaguggucuca

SEQ ID NO: 2467918 - RNA, 15 nt, Human
gaccaguugcacuug

SEQ ID NO: 2467919 - RNA, 17 nt, Human
gaccaucccugaaggcc

SEQ ID NO: 2467920 - RNA, 16 nt, Human
gaccaucccugaaggc

SEQ ID NO: 2467921 - RNA, 22 nt, Human
gaccaugcucaucugcuggucc

SEQ ID NO: 2467922 - RNA, 21 nt, Human
gaccaugcucaucugcugguc

SEQ ID NO: 2467923 - RNA, 19 nt, Human
gaccauaacagccaacagg

SEQ ID NO: 2467924 - RNA, 16 nt, Human
gaccauucuccaccug

SEQ ID NO: 2467925 - RNA, 23 nt, Human
gaccccugcucaguaaagcacuu

SEQ ID NO: 2467926 - RNA, 16 nt, Human
gaccccuggccuccgg

SEQ ID NO: 2467927 - RNA, 15 nt, Human
gaccccuggccuccg

SEQ ID NO: 2467928 - RNA, 14 nt, Human
gaccccuggccucc

SEQ ID NO: 2467929 - RNA, 13 nt, Human
gaccccuggccuc

SEQ ID NO: 2467930 - RNA, 13 nt, Human
gaccccuggcuuu

SEQ ID NO: 2467931 - RNA, 22 nt, Human
gaccccuggcuuuucacugcug

SEQ ID NO: 2467932 - RNA, 21 nt, Human
gaccccuggcuuuucacugcu

SEQ ID NO: 2467933 - RNA, 14 nt, Human
gacccgcucuggac

SEQ ID NO: 2467934 - RNA, 13 nt, Human
gacccgcucugga

SEQ ID NO: 2467935 - RNA, 20 nt, Human
gaccccuuuucagcuucugc

SEQ ID NO: 2467936 - RNA, 17 nt, Human
gaccccuuuucagcuuc

SEQ ID NO: 2467937 - RNA, 18 nt, Human
gaccccuuuucagcuucu

SEQ ID NO: 2467938 - RNA, 13 nt, Human
gacccggcugcgu

SEQ ID NO: 2467939 - RNA, 12 nt, Human
gacccggcugcg

SEQ ID NO: 2467940 - RNA, 16 nt, Human
gacccuauugcugcuu

SEQ ID NO: 2467941 - RNA, 16 nt, Human
gacccuaccccaccac

SEQ ID NO: 2467942 - RNA, 14 nt, Human
gacccuacaggaga

SEQ ID NO: 2467943 - RNA, 15 nt, Human
gacccuacaggagag

SEQ ID NO: 2467944 - RNA, 11 nt, Human
gacccuacccc

SEQ ID NO: 2467945 - RNA, 14 nt, Human
gacccuaccccacc

SEQ ID NO: 2467946 - RNA, 14 nt, Human
gacccguccauuug

SEQ ID NO: 2467947 - RNA, 16 nt, Human
gacccgcucuggacca

SEQ ID NO: 2467948 - RNA, 21 nt, Human
gacccggagcuaacacuggcc

SEQ ID NO: 2467949 - RNA, 18 nt, Human
gacccuaagaccggcggc

SEQ ID NO: 2467950 - RNA, 16 nt, Human
gacccuaaaucuugac

SEQ ID NO: 2467951 - RNA, 22 nt, Human
gacccguucaacuuuuccuuug

SEQ ID NO: 2467952 - RNA, 11 nt, Human
gagaagcugcu

SEQ ID NO: 2467953 - RNA, 20 nt, Human
gagaagcuaaaaccugagcu

SEQ ID NO: 2467954 - RNA, 17 nt, Human
gagaagcucccaggaac

SEQ ID NO: 2467955 - RNA, 19 nt, Human
gagaagcuccucuccccag

SEQ ID NO: 2467956 - RNA, 19 nt, Human
gagaagcuaaaaccugagc

SEQ ID NO: 2467957 - RNA, 23 nt, Human
gagaagcugaugcuuugcuucaa

SEQ ID NO: 2467958 - RNA, 22 nt, Human
gagaagcuccucuccccagccc

SEQ ID NO: 2467959 - RNA, 23 nt, Human
gagcaguggcugguccagggcua

SEQ ID NO: 2467960 - RNA, 14 nt, Human
gagcaguggcuggu

SEQ ID NO: 2467961 - RNA, 17 nt, Human
gagcagugcaggcacag

SEQ ID NO: 2467962 - RNA, 16 nt, Human
gagcagugcaggcaca

SEQ ID NO: 2467963 - RNA, 15 nt, Human
gagcagugcaggcac

SEQ ID NO: 2467964 - RNA, 14 nt, Human
gagcagugcaggca

SEQ ID NO: 2467965 - RNA, 21 nt, Human
gagcagugaaugauucagugu

SEQ ID NO: 2467966 - RNA, 22 nt, Human
gagcaucaggccaggcccucug

SEQ ID NO: 2467967 - RNA, 20 nt, Human
gagcaucaggccaggcccuc

SEQ ID NO: 2467968 - RNA, 15 nt, Human
gagcagugggccugg

SEQ ID NO: 2467969 - RNA, 17 nt, Human
gagcagugggccuggcc

SEQ ID NO: 2467970 - RNA, 18 nt, Human
gagcagugggccuggcca

SEQ ID NO: 2467971 - RNA, 11 nt, Human
gagcagugucu

SEQ ID NO: 2467972 - RNA, 12 nt, Human
gagcagugucuu

SEQ ID NO: 2467973 - RNA, 20 nt, Human
gagcuguggacuuuguucac

SEQ ID NO: 2467974 - RNA, 18 nt, Human
gagcugugcaggugggga

SEQ ID NO: 2467975 - RNA, 17 nt, Human
gagcuguucacagccag

SEQ ID NO: 2467976 - RNA, 19 nt, Human
gagcugccuguucagcucc

SEQ ID NO: 2467977 - RNA, 16 nt, Human
gagcugccuguucagc

SEQ ID NO: 2467978 - RNA, 15 nt, Human
gagcugccuguucag

SEQ ID NO: 2467979 - RNA, 17 nt, Human
gagcggagaaaggaagg

SEQ ID NO: 2467980 - RNA, 18 nt, Human
gagcgcuuucuggaaaag

SEQ ID NO: 2467981 - RNA, 13 nt, Human
gagcggaaagcag

SEQ ID NO: 2467982 - RNA, 14 nt, Human
gagcggaaagcagc

SEQ ID NO: 2467983 - RNA, 15 nt, Human
gagcggaaagcagcu

SEQ ID NO: 2467984 - RNA, 16 nt, Human
gagcggaaagcagcuc

SEQ ID NO: 2467985 - RNA, 17 nt, Human
gagcggaaagcagcuca

SEQ ID NO: 2467986 - RNA, 18 nt, Human
gagcuggugcauuacaga

SEQ ID NO: 2467987 - RNA, 17 nt, Human
gagcuggugcauuacag

SEQ ID NO: 2467988 - RNA, 15 nt, Human
gagcuggugcccgga

SEQ ID NO: 2467989 - RNA, 16 nt, Human
gagcuggugcccggag

SEQ ID NO: 2467990 - RNA, 17 nt, Human
gagcuggugcccggaga

SEQ ID NO: 2467991 - RNA, 21 nt, Human
gagcuggugcccggagauugg

SEQ ID NO: 2467992 - RNA, 20 nt, Human
gagcugugcaucagcuagaa

SEQ ID NO: 2467993 - RNA, 18 nt, Human
gagcugguugggaagaca

SEQ ID NO: 2467994 - RNA, 18 nt, Human
gagcuguauuaagccacu

SEQ ID NO: 2467995 - RNA, 14 nt, Human
gagcuggugucuga

SEQ ID NO: 2467996 - RNA, 17 nt, Human
gagccuguguaacagcu

SEQ ID NO: 2467997 - RNA, 16 nt, Human
gagccuguguaacagc

SEQ ID NO: 2467998 - RNA, 15 nt, Human
gagccuguguaacag

SEQ ID NO: 2467999 - RNA, 14 nt, Human
gagccuguguaaca

SEQ ID NO: 2468000 - RNA, 13 nt, Human
gagccuguguaac

SEQ ID NO: 2468001 - RNA, 21 nt, Human
gagcccucaaagugaggggaa

SEQ ID NO: 2468002 - RNA, 19 nt, Human
gagccugugccuccucacc

SEQ ID NO: 2468003 - RNA, 21 nt, Human
gagccuguguaacagcuccuu

SEQ ID NO: 2468004 - RNA, 20 nt, Human
gagccuguguaacagcuccu

SEQ ID NO: 2468005 - RNA, 19 nt, Human
gagccuguguaacagcucc

SEQ ID NO: 2468006 - RNA, 18 nt, Human
gagccuguguaacagcuc

SEQ ID NO: 2468007 - RNA, 22 nt, Human
gagccuguguaacagcuccuug

SEQ ID NO: 2468008 - RNA, 20 nt, Human
gagcccgggcugccugggcu

SEQ ID NO: 2468009 - RNA, 22 nt, Human
gagcccgggcugccugggcugu

SEQ ID NO: 2468010 - RNA, 19 nt, Human
gagcccgggcugccugggc

SEQ ID NO: 2468011 - RNA, 18 nt, Human
gagcccgggcugccuggg

SEQ ID NO: 2468012 - RNA, 13 nt, Human
gagcccucagaac

SEQ ID NO: 2468013 - RNA, 15 nt, Human
gagcccucaaaguga

SEQ ID NO: 2468014 - RNA, 22 nt, Human
gagccccuucugcucagcucug

SEQ ID NO: 2468015 - RNA, 17 nt, Human
gagcaucaggccaggcc

SEQ ID NO: 2468016 - RNA, 17 nt, Human
gagcccgcacccccacc

SEQ ID NO: 2468017 - RNA, 19 nt, Human
gagcccgcacccccacccu

SEQ ID NO: 2468018 - RNA, 20 nt, Human
gagcccgcacccccacccuu

SEQ ID NO: 2468019 - RNA, 23 nt, Human
gagcccgcacccccacccuuugg

SEQ ID NO: 2468020 - RNA, 17 nt, Human
gagcccgggcugccugg

SEQ ID NO: 2468021 - RNA, 15 nt, Human
gagcccgggcugccu

SEQ ID NO: 2468022 - RNA, 14 nt, Human
gagcccgggcugcc

SEQ ID NO: 2468023 - RNA, 22 nt, Human
gagcccgggagcugcugcccug

SEQ ID NO: 2468024 - RNA, 14 nt, Human
gagcccgggagcug

SEQ ID NO: 2468025 - RNA, 17 nt, Human
gagcccggcgccccugc

SEQ ID NO: 2468026 - RNA, 17 nt, Human
gagcccggaugcuucuc

SEQ ID NO: 2468027 - RNA, 13 nt, Human
gagcgacagugag

SEQ ID NO: 2468028 - RNA, 15 nt, Human
gagcgacagugagac

SEQ ID NO: 2468029 - RNA, 13 nt, Human
gagccuuccaggg

SEQ ID NO: 2468030 - RNA, 12 nt, Human
gagccuuccagg

SEQ ID NO: 2468031 - RNA, 23 nt, Human
gagcgcuccugccgcagagcugg

SEQ ID NO: 2468032 - RNA, 22 nt, Human
gagcgcuccugccgcagagcug

SEQ ID NO: 2468033 - RNA, 21 nt, Human
gagcgcuccugccgcagagcu

SEQ ID NO: 2468034 - RNA, 15 nt, Human
gagcgcuccugccgc

SEQ ID NO: 2468035 - RNA, 20 nt, Human
gagcgccugccccucccaga

SEQ ID NO: 2468036 - RNA, 15 nt, Human
gagcgcuacccacuu

SEQ ID NO: 2468037 - RNA, 16 nt, Human
gagcgccugccccucc

SEQ ID NO: 2468038 - RNA, 18 nt, Human
gagcgccugccccuccca

SEQ ID NO: 2468039 - RNA, 22 nt, Human
gagcgccugccccucccagaac

SEQ ID NO: 2468040 - RNA, 21 nt, Human
gagcgaggagaugcuccuugg

SEQ ID NO: 2468041 - RNA, 13 nt, Human
gagcgccugcccc

SEQ ID NO: 2468042 - RNA, 15 nt, Human
gagcgccugccccuc

SEQ ID NO: 2468043 - RNA, 18 nt, Human
gagcgaggagaugcuccu

SEQ ID NO: 2468044 - RNA, 16 nt, Human
gagcgagcgcuaccca

SEQ ID NO: 2468045 - RNA, 21 nt, Human
gagcgagacuugguuucaaaa

SEQ ID NO: 2468046 - RNA, 18 nt, Human
gagucagaaguuucugcc

SEQ ID NO: 2468047 - RNA, 14 nt, Human
gagucauauuuuga

SEQ ID NO: 2468048 - RNA, 20 nt, Human
gagucauaaaccuuaaguaa

SEQ ID NO: 2468049 - RNA, 16 nt, Human
gagucauaaaccuuaa

SEQ ID NO: 2468050 - RNA, 18 nt, Human
gagucagugccagguccu

SEQ ID NO: 2468051 - RNA, 15 nt, Human
gagucacugccucuc

SEQ ID NO: 2468052 - RNA, 21 nt, Human
gagucacugccucucccuggc

SEQ ID NO: 2468053 - RNA, 15 nt, Human
gagucagugccaggu

SEQ ID NO: 2468054 - RNA, 23 nt, Human
gagucacugccucucccuggccc

SEQ ID NO: 2468055 - RNA, 12 nt, Human
gagucaugccaa

SEQ ID NO: 2468056 - RNA, 19 nt, Human
gagucaugaucucccugcc

SEQ ID NO: 2468057 - RNA, 20 nt, Human
gagucaugaucucccugccg

SEQ ID NO: 2468058 - RNA, 18 nt, Human
gagucauucguucugugg

SEQ ID NO: 2468059 - RNA, 16 nt, Human
gagucaugaucucccu

SEQ ID NO: 2468060 - RNA, 13 nt, Human
gagucaucuccau

SEQ ID NO: 2468061 - RNA, 18 nt, Human
gagucaugaucucccugc

SEQ ID NO: 2468062 - RNA, 18 nt, Human
gagugagacucugucuca

SEQ ID NO: 2468063 - RNA, 14 nt, Human
gagugagacucugu

SEQ ID NO: 2468064 - RNA, 22 nt, Human
gagugagacccagcccucaucc

SEQ ID NO: 2468065 - RNA, 23 nt, Human
gagugagacccagcccucauccc

SEQ ID NO: 2468066 - RNA, 14 nt, Human
gaguccaagcuggg

SEQ ID NO: 2468067 - RNA, 12 nt, Human
gaguccaagcug

SEQ ID NO: 2468068 - RNA, 22 nt, Human
gaguccaacguggggcagcaca

SEQ ID NO: 2468069 - RNA, 20 nt, Human
gaguccaacguggggcagca

SEQ ID NO: 2468070 - RNA, 13 nt, Human
gagugagacccug

SEQ ID NO: 2468071 - RNA, 19 nt, Human
gagugccaggacuccccag

SEQ ID NO: 2468072 - RNA, 14 nt, Human
gagugccaggacuc

SEQ ID NO: 2468073 - RNA, 13 nt, Human
gagugccaggacu

SEQ ID NO: 2468074 - RNA, 12 nt, Human
gagugccaggac

SEQ ID NO: 2468075 - RNA, 22 nt, Human
gagugccaggacuccccaggcc

SEQ ID NO: 2468076 - RNA, 20 nt, Human
gagugccaggacuccccagg

SEQ ID NO: 2468077 - RNA, 14 nt, Human
gagugcccagaacu

SEQ ID NO: 2468078 - RNA, 18 nt, Human
gagugcagugagccgaga

SEQ ID NO: 2468079 - RNA, 13 nt, Human
gagugcagugagc

SEQ ID NO: 2468080 - RNA, 21 nt, Human
gaguugauagcacagacccug

SEQ ID NO: 2468081 - RNA, 22 nt, Human
gaguugauacuacaguuuguua

SEQ ID NO: 2468082 - RNA, 19 nt, Human
gaguugauacuacaguuug

SEQ ID NO: 2468083 - RNA, 14 nt, Human
gagugccuggccaa

SEQ ID NO: 2468084 - RNA, 23 nt, Human
gagugccccauucuuuuguaauu

SEQ ID NO: 2468085 - RNA, 21 nt, Human
gagucacuggaacacuaauga

SEQ ID NO: 2468086 - RNA, 14 nt, Human
gagucacuggaaca

SEQ ID NO: 2468087 - RNA, 17 nt, Human
gaggugggauccuccag

SEQ ID NO: 2468088 - RNA, 12 nt, Human
gagucacugccu

SEQ ID NO: 2468089 - RNA, 14 nt, Human
gagguggcuggguu

SEQ ID NO: 2468090 - RNA, 13 nt, Human
gaggugggagcag

SEQ ID NO: 2468091 - RNA, 16 nt, Human
gaggugggauccucca

SEQ ID NO: 2468092 - RNA, 15 nt, Human
gaggugggauccucc

SEQ ID NO: 2468093 - RNA, 13 nt, Human
gaggugggauccu

SEQ ID NO: 2468094 - RNA, 22 nt, Human
gagguggccagagcugggaggc

SEQ ID NO: 2468095 - RNA, 21 nt, Human
gagguggccagagcugggagg

SEQ ID NO: 2468096 - RNA, 19 nt, Human
gagguggccagagcuggga

SEQ ID NO: 2468097 - RNA, 17 nt, Human
gagguggccagagcugg

SEQ ID NO: 2468098 - RNA, 23 nt, Human
gagguggccagagcugggaggca

SEQ ID NO: 2468099 - RNA, 20 nt, Human
gagguggcugagccccuguc

SEQ ID NO: 2468100 - RNA, 20 nt, Human
gagguggaucacagaggcuu

SEQ ID NO: 2468101 - RNA, 15 nt, Human
gagguggcagcccug

SEQ ID NO: 2468102 - RNA, 16 nt, Human
gagguggcagcccugu

SEQ ID NO: 2468103 - RNA, 18 nt, Human
gagguggcagcccuguag

SEQ ID NO: 2468104 - RNA, 21 nt, Human
gagguggagcaaagugagggc

SEQ ID NO: 2468105 - RNA, 19 nt, Human
gagguggaggcugcaguga

SEQ ID NO: 2468106 - RNA, 20 nt, Human
gagguggagguugcagugag

SEQ ID NO: 2468107 - RNA, 19 nt, Human
gagguggagguugcaguga

SEQ ID NO: 2468108 - RNA, 18 nt, Human
gagguggaauuauuuuaa

SEQ ID NO: 2468109 - RNA, 13 nt, Human
gaggggacagguc

SEQ ID NO: 2468110 - RNA, 19 nt, Human
gaggggacaaaacccaccu

SEQ ID NO: 2468111 - RNA, 18 nt, Human
gaggggaauaauagaaga

SEQ ID NO: 2468112 - RNA, 19 nt, Human
gaggggaauaauagaagaa

SEQ ID NO: 2468113 - RNA, 23 nt, Human
gaggcugcccccggcccccuggu

SEQ ID NO: 2468114 - RNA, 22 nt, Human
gaggcugcccccggcccccugg

SEQ ID NO: 2468115 - RNA, 21 nt, Human
gaggcugcccccggcccccug

SEQ ID NO: 2468116 - RNA, 20 nt, Human
gaggcugcccccggcccccu

SEQ ID NO: 2468117 - RNA, 19 nt, Human
gaggcugcccccggccccc

SEQ ID NO: 2468118 - RNA, 22 nt, Human
gaggcuccugugcuacuuugcc

SEQ ID NO: 2468119 - RNA, 19 nt, Human
gaggcugcagccaggccac

SEQ ID NO: 2468120 - RNA, 17 nt, Human
gaggcugcccccggccc

SEQ ID NO: 2468121 - RNA, 12 nt, Human
gaggcugccccc

SEQ ID NO: 2468122 - RNA, 9 nt, Human
gaggcugcc

SEQ ID NO: 2468123 - RNA, 23 nt, Human
gaggcugccccaccccuccccau

SEQ ID NO: 2468124 - RNA, 16 nt, Human
gaggcugcagcgagcu

SEQ ID NO: 2468125 - RNA, 14 nt, Human
gaggcugcagucag

SEQ ID NO: 2468126 - RNA, 13 nt, Human
gagggcggcaggg

SEQ ID NO: 2468127 - RNA, 23 nt, Human
gagggcgaccccgucacagccuc

SEQ ID NO: 2468128 - RNA, 19 nt, Human
gagggccugugggagccug

SEQ ID NO: 2468129 - RNA, 14 nt, Human
gaggcugccucucc

SEQ ID NO: 2468130 - RNA, 18 nt, Human
gagggcuagaacuggaga

SEQ ID NO: 2468131 - RNA, 20 nt, Human
gagggcuagaaccuggcagg

SEQ ID NO: 2468132 - RNA, 21 nt, Human
gagggcuagaaccuggagagc

SEQ ID NO: 2468133 - RNA, 19 nt, Human
gagggcuagaaccuggaga

SEQ ID NO: 2468134 - RNA, 18 nt, Human
gagggcuagaaccuggag

SEQ ID NO: 2468135 - RNA, 20 nt, Human
gagggcuagaaccuggaagg

SEQ ID NO: 2468136 - RNA, 16 nt, Human
gagggcuagaaccugg

SEQ ID NO: 2468137 - RNA, 14 nt, Human
gagggcgugggagc

SEQ ID NO: 2468138 - RNA, 23 nt, Human
gagggcggcaggggccuggagau

SEQ ID NO: 2468139 - RNA, 19 nt, Human
gagggcggcaggggccugg

SEQ ID NO: 2468140 - RNA, 17 nt, Human
gagggcuagaaccuaga

SEQ ID NO: 2468141 - RNA, 14 nt, Human
gagggcguggaggg

SEQ ID NO: 2468142 - RNA, 20 nt, Human
gagggcgugacucacccaag

SEQ ID NO: 2468143 - RNA, 15 nt, Human
gagggcuccagacac

SEQ ID NO: 2468144 - RNA, 14 nt, Human
gagggcuccagaca

SEQ ID NO: 2468145 - RNA, 13 nt, Human
gagggcuccagac

SEQ ID NO: 2468146 - RNA, 12 nt, Human
gagggcuccaga

SEQ ID NO: 2468147 - RNA, 22 nt, Human
gagggcuuccucuagaagccaa

SEQ ID NO: 2468148 - RNA, 19 nt, Human
gagggcuuccucuagaagc

SEQ ID NO: 2468149 - RNA, 20 nt, Human
gagggcuagaaucuggagag

SEQ ID NO: 2468150 - RNA, 19 nt, Human
gagggcuagaaucuggaga

SEQ ID NO: 2468151 - RNA, 18 nt, Human
gagggcuagaaucuggag

SEQ ID NO: 2468152 - RNA, 19 nt, Human
gagggcuagaacuggagag

SEQ ID NO: 2468153 - RNA, 21 nt, Human
gagggcuagaaucuggagagc

SEQ ID NO: 2468154 - RNA, 19 nt, Human
gaggggaagaguguacugg

SEQ ID NO: 2468155 - RNA, 21 nt, Human
gagggcuuccucuagaagcca

SEQ ID NO: 2468156 - RNA, 15 nt, Human
gaggggaagggccag

SEQ ID NO: 2468157 - RNA, 14 nt, Human
gaggggaagggcca

SEQ ID NO: 2468158 - RNA, 12 nt, Human
gaggggaacaga

SEQ ID NO: 2468159 - RNA, 17 nt, Human
gaggcucugcccuuggu

SEQ ID NO: 2468160 - RNA, 15 nt, Human
gaggcucugcccuug

SEQ ID NO: 2468161 - RNA, 19 nt, Human
gaggcucuggagcccacug

SEQ ID NO: 2468162 - RNA, 14 nt, Human
gaggcucuggagcc

SEQ ID NO: 2468163 - RNA, 14 nt, Human
gaggcucugcccuu

SEQ ID NO: 2468164 - RNA, 13 nt, Human
gaggcucugcccu

SEQ ID NO: 2468165 - RNA, 12 nt, Human
gaggcucugccc

SEQ ID NO: 2468166 - RNA, 14 nt, Human
gaggcuccagaggg

SEQ ID NO: 2468167 - RNA, 17 nt, Human
gaggcuccagagggcac

SEQ ID NO: 2468168 - RNA, 20 nt, Human
gaggccagagacacaagccu

SEQ ID NO: 2468169 - RNA, 21 nt, Human
gaggccagaggcccccagccc

SEQ ID NO: 2468170 - RNA, 13 nt, Human
gaggccagcccca

SEQ ID NO: 2468171 - RNA, 14 nt, Human
gaggccagccccac

SEQ ID NO: 2468172 - RNA, 12 nt, Human
gaggccagccug

SEQ ID NO: 2468173 - RNA, 22 nt, Human
gaggccagccccacccaggagg

SEQ ID NO: 2468174 - RNA, 13 nt, Human
gaggccagccugg

SEQ ID NO: 2468175 - RNA, 14 nt, Human
gaggccagccuggc

SEQ ID NO: 2468176 - RNA, 16 nt, Human
gaggccagccccaccc

SEQ ID NO: 2468177 - RNA, 18 nt, Human
gaggccagccccacccag

SEQ ID NO: 2468178 - RNA, 20 nt, Human
gaggccagccccacccagga

SEQ ID NO: 2468179 - RNA, 21 nt, Human
gaggccagccccacccaggag

SEQ ID NO: 2468180 - RNA, 23 nt, Human
ggcccuucucuccagccccugga

SEQ ID NO: 2468181 - RNA, 22 nt, Human
ggcccuucucuccagccccugg

SEQ ID NO: 2468182 - RNA, 18 nt, Human
ggcccuuuccucaggcaa

SEQ ID NO: 2468183 - RNA, 16 nt, Human
ggcccuuuccucaggc

SEQ ID NO: 2468184 - RNA, 13 nt, Human
ggcccucuacccc

SEQ ID NO: 2468185 - RNA, 21 nt, Human
ggcccuugcaguucagcacca

SEQ ID NO: 2468186 - RNA, 18 nt, Human
ggccucaccgaguggggg

SEQ ID NO: 2468187 - RNA, 21 nt, Human
ggccgaauccccucccuguca

SEQ ID NO: 2468188 - RNA, 19 nt, Human
ggccucacuaggcuucugg

SEQ ID NO: 2468189 - RNA, 10 nt, Human
ggccucagaa

SEQ ID NO: 2468190 - RNA, 19 nt, Human
ggccgaauccccucccugu

SEQ ID NO: 2468191 - RNA, 16 nt, Human
ggccgaaggcagugca

SEQ ID NO: 2468192 - RNA, 18 nt, Human
ggccgaagcucuggcuga

SEQ ID NO: 2468193 - RNA, 17 nt, Human
ggccgaagcucuggcug

SEQ ID NO: 2468194 - RNA, 16 nt, Human
ggccgaagcucuggcu

SEQ ID NO: 2468195 - RNA, 15 nt, Human
ggccgaagcucuggc

SEQ ID NO: 2468196 - RNA, 14 nt, Human
ggccgaagcucugg

SEQ ID NO: 2468197 - RNA, 23 nt, Human
ggccucaagugauucuccugccu

SEQ ID NO: 2468198 - RNA, 21 nt, Human
ggccucagcaccccugucucu

SEQ ID NO: 2468199 - RNA, 17 nt, Human
ggccucagcaccccugu

SEQ ID NO: 2468200 - RNA, 19 nt, Human
ggccucaccgagugggggc

SEQ ID NO: 2468201 - RNA, 15 nt, Human
ggccucagccagaga

SEQ ID NO: 2468202 - RNA, 17 nt, Human
ggccucagccagagaag

SEQ ID NO: 2468203 - RNA, 20 nt, Human
ggccucagccagagaagcua

SEQ ID NO: 2468204 - RNA, 14 nt, Human
ggccuccauccuga

SEQ ID NO: 2468205 - RNA, 15 nt, Human
ggccuccauccugag

SEQ ID NO: 2468206 - RNA, 16 nt, Human
ggccuccauccugagg

SEQ ID NO: 2468207 - RNA, 16 nt, Human
ggccccugcuucucca

SEQ ID NO: 2468208 - RNA, 23 nt, Human
ggccccugcugguucaggguugg

SEQ ID NO: 2468209 - RNA, 23 nt, Human
ggcccgcuugccucggcuccugc

SEQ ID NO: 2468210 - RNA, 22 nt, Human
ggcccgcuugccucggcuccug

SEQ ID NO: 2468211 - RNA, 19 nt, Human
ggccccugcuucuccagcc

SEQ ID NO: 2468212 - RNA, 21 nt, Human
ggcccgcuugccucggcuccu

SEQ ID NO: 2468213 - RNA, 12 nt, Human
ggcccggccagc

SEQ ID NO: 2468214 - RNA, 13 nt, Human
ggcccggcuccag

SEQ ID NO: 2468215 - RNA, 14 nt, Human
ggccccugcugguu

SEQ ID NO: 2468216 - RNA, 13 nt, Human
ggccccugcuggu

SEQ ID NO: 2468217 - RNA, 21 nt, Human
ggcccuucucuccagccccug

SEQ ID NO: 2468218 - RNA, 20 nt, Human
ggcccuucucuccagccccu

SEQ ID NO: 2468219 - RNA, 21 nt, Human
ggcccucgcugccagcucugu

SEQ ID NO: 2468220 - RNA, 22 nt, Human
ggcccucgcugccagcucugua

SEQ ID NO: 2468221 - RNA, 16 nt, Human
ggcccucgggcccagc

SEQ ID NO: 2468222 - RNA, 15 nt, Human
ggcccucgggcccag

SEQ ID NO: 2468223 - RNA, 23 nt, Human
ggcccucgcugccagcucuguau

SEQ ID NO: 2468224 - RNA, 20 nt, Human
ggcccucgggcccagccccc

SEQ ID NO: 2468225 - RNA, 19 nt, Human
ggcccucgggcccagcccc

SEQ ID NO: 2468226 - RNA, 18 nt, Human
ggcccucgggcccagccc

SEQ ID NO: 2468227 - RNA, 17 nt, Human
ggcccucgggcccagcc

SEQ ID NO: 2468228 - RNA, 19 nt, Human
ggcccuucucuccagcccc

SEQ ID NO: 2468229 - RNA, 15 nt, Human
ggcccggcuccaggc

SEQ ID NO: 2468230 - RNA, 20 nt, Human
ggcccggccagccaugucug

SEQ ID NO: 2468231 - RNA, 23 nt, Human
ggcccggcgcgguggcucacgcc

SEQ ID NO: 2468232 - RNA, 13 nt, Human
ggcccggggcugg

SEQ ID NO: 2468233 - RNA, 19 nt, Human
ggcccggggcuggcggcua

SEQ ID NO: 2468234 - RNA, 22 nt, Human
ggcccggggcuggcggcuacuc

SEQ ID NO: 2468235 - RNA, 16 nt, Human
ggcccuccuacccugc

SEQ ID NO: 2468236 - RNA, 21 nt, Human
ggcccuccuacccugcgccca

SEQ ID NO: 2468237 - RNA, 19 nt, Human
ggcccuccuacccugcgcc

SEQ ID NO: 2468238 - RNA, 17 nt, Human
ggcccuccuacccugcg

SEQ ID NO: 2468239 - RNA, 16 nt, Human
ggcccucgcugccagc

SEQ ID NO: 2468240 - RNA, 19 nt, Human
ggcccucgcugccagcucu

SEQ ID NO: 2468241 - RNA, 15 nt, Human
ggcccucgcugccag

SEQ ID NO: 2468242 - RNA, 20 nt, Human
ggcccuccuacccugcgccc

SEQ ID NO: 2468243 - RNA, 18 nt, Human
ggccagucuguggaucag

SEQ ID NO: 2468244 - RNA, 15 nt, Human
ggccagucuguggau

SEQ ID NO: 2468245 - RNA, 23 nt, Human
ggccagucuguggaucagagaug

SEQ ID NO: 2468246 - RNA, 20 nt, Human
ggccagugugacaaggauug

SEQ ID NO: 2468247 - RNA, 14 nt, Human
ggccagucugugga

SEQ ID NO: 2468248 - RNA, 13 nt, Human
ggccagucugugg

SEQ ID NO: 2468249 - RNA, 16 nt, Human
ggccagucugggcugc

SEQ ID NO: 2468250 - RNA, 15 nt, Human
ggccagucugggcug

SEQ ID NO: 2468251 - RNA, 22 nt, Human
ggccaguccugccuggccaggc

SEQ ID NO: 2468252 - RNA, 18 nt, Human
ggccaguccugccuggcc

SEQ ID NO: 2468253 - RNA, 19 nt, Human
ggccaguccugccuggcca

SEQ ID NO: 2468254 - RNA, 20 nt, Human
ggccaguccugccuggccag

SEQ ID NO: 2468255 - RNA, 21 nt, Human
ggccaguccugccuggccagg

SEQ ID NO: 2468256 - RNA, 22 nt, Human
ggcauagaggcuucuccgccag

SEQ ID NO: 2468257 - RNA, 14 nt, Human
ggcauacuaauaaa

SEQ ID NO: 2468258 - RNA, 16 nt, Human
ggcauagaggcuucuc

SEQ ID NO: 2468259 - RNA, 17 nt, Human
ggccagucccugaggca

SEQ ID NO: 2468260 - RNA, 23 nt, Human
ggccagucccugaggcagguccc

SEQ ID NO: 2468261 - RNA, 19 nt, Human
ggcauagaugcaggugagc

SEQ ID NO: 2468262 - RNA, 16 nt, Human
ggccaguccugccugg

SEQ ID NO: 2468263 - RNA, 19 nt, Human
ggcaguuuuucuguauuuu

SEQ ID NO: 2468264 - RNA, 15 nt, Human
ggcaguuuuucugua

SEQ ID NO: 2468265 - RNA, 12 nt, Human
ggcaguuuuucu

SEQ ID NO: 2468266 - RNA, 16 nt, Human
ggcaguuuuucuguau

SEQ ID NO: 2468267 - RNA, 20 nt, Human
ggcagugguaagcucuggcu

SEQ ID NO: 2468268 - RNA, 21 nt, Human
ggcauacgccuguaguccuag

SEQ ID NO: 2468269 - RNA, 17 nt, Human
ggccaguuggucccccu

SEQ ID NO: 2468270 - RNA, 14 nt, Human
ggccaguugguccc

SEQ ID NO: 2468271 - RNA, 17 nt, Human
ggccagucugggcugcc

SEQ ID NO: 2468272 - RNA, 19 nt, Human
ggccagugugaucccaagu

SEQ ID NO: 2468273 - RNA, 12 nt, Human
ggagagaaaaca

SEQ ID NO: 2468274 - RNA, 15 nt, Human
ggagacugcccagcu

SEQ ID NO: 2468275 - RNA, 20 nt, Human
ggagacucuguggggccuug

SEQ ID NO: 2468276 - RNA, 16 nt, Human
ggagagaagagaaugc

SEQ ID NO: 2468277 - RNA, 24 nt, Human
ggagagaaagugggugagaugcug

SEQ ID NO: 2468278 - RNA, 12 nt, Human
ggagagaagaau

SEQ ID NO: 2468279 - RNA, 18 nt, Human
ggagagaaagugggugag

SEQ ID NO: 2468280 - RNA, 16 nt, Human
ggagagaaagugggug

SEQ ID NO: 2468281 - RNA, 18 nt, Human
ggagagaaacaauaaaga

SEQ ID NO: 2468282 - RNA, 13 nt, Human
ggagagaccucau

SEQ ID NO: 2468283 - RNA, 11 nt, Human
ggagagaccuc

SEQ ID NO: 2468284 - RNA, 18 nt, Human
ggagagaccgagugaacc

SEQ ID NO: 2468285 - RNA, 18 nt, Human
ggagagaaggggaggagg

SEQ ID NO: 2468286 - RNA, 20 nt, Human
ggagagaaggggaggagggc

SEQ ID NO: 2468287 - RNA, 21 nt, Human
ggagagaaggggaggagggcg

SEQ ID NO: 2468288 - RNA, 15 nt, Human
ggagagaccucauca

SEQ ID NO: 2468289 - RNA, 20 nt, Human
ggcagacacagggacuugaa

SEQ ID NO: 2468290 - RNA, 17 nt, Human
ggcagacacagggacuu

SEQ ID NO: 2468291 - RNA, 23 nt, Human
ggcagaaugcuagcucugagcca

SEQ ID NO: 2468292 - RNA, 21 nt, Human
ggcagaaugcuagcucugagc

SEQ ID NO: 2468293 - RNA, 20 nt, Human
ggcagaaugcuagcucugag

SEQ ID NO: 2468294 - RNA, 18 nt, Human
ggcagaaugcuagcucug

SEQ ID NO: 2468295 - RNA, 16 nt, Human
ggcacuugauuccuug

SEQ ID NO: 2468296 - RNA, 19 nt, Human
ggcagacacggaucugaga

SEQ ID NO: 2468297 - RNA, 17 nt, Human
ggcagacacggaucuga

SEQ ID NO: 2468298 - RNA, 13 nt, Human
ggcagacagcagc

SEQ ID NO: 2468299 - RNA, 14 nt, Human
ggcagacagcagcu

SEQ ID NO: 2468300 - RNA, 15 nt, Human
ggcagacagcagcuc

SEQ ID NO: 2468301 - RNA, 16 nt, Human
ggcagacagcagcuca

SEQ ID NO: 2468302 - RNA, 17 nt, Human
ggcagacagcagcucag

SEQ ID NO: 2468303 - RNA, 18 nt, Human
ggcagacagcagcucagg

SEQ ID NO: 2468304 - RNA, 19 nt, Human
ggcagacagcagcucaggc

SEQ ID NO: 2468305 - RNA, 14 nt, Human
ggcacuucacagag

SEQ ID NO: 2468306 - RNA, 13 nt, Human
ggcacuucacaga

SEQ ID NO: 2468307 - RNA, 11 nt, Human
ggcacuucaca

SEQ ID NO: 2468308 - RNA, 21 nt, Human
ggcacuucacagagugugcug

SEQ ID NO: 2468309 - RNA, 15 nt, Human
ggcacuucacagagu

SEQ ID NO: 2468310 - RNA, 14 nt, Human
ggcacugcaggggc

SEQ ID NO: 2468311 - RNA, 23 nt, Human
ggcacugagcccccccaacacug

SEQ ID NO: 2468312 - RNA, 19 nt, Human
ggcacugagcccccccaac

SEQ ID NO: 2468313 - RNA, 13 nt, Human
ggcacugagcccc

SEQ ID NO: 2468314 - RNA, 12 nt, Human
ggcacugccuga

SEQ ID NO: 2468315 - RNA, 15 nt, Human
ggcacugguggcccg

SEQ ID NO: 2468316 - RNA, 16 nt, Human
ggcagacgccggggac

SEQ ID NO: 2468317 - RNA, 21 nt, Human
ggcagacacggaucugagaau

SEQ ID NO: 2468318 - RNA, 20 nt, Human
ggcagacagcagcucaggca

SEQ ID NO: 2468319 - RNA, 13 nt, Human
ggcagcagccauc

SEQ ID NO: 2468320 - RNA, 12 nt, Human
ggcagcagccau

SEQ ID NO: 2468321 - RNA, 13 nt, Human
ggcagcagggcua

SEQ ID NO: 2468322 - RNA, 18 nt, Human
ggcagcagggcuacccug

SEQ ID NO: 2468323 - RNA, 21 nt, Human
ggcagcaggugcugcuacccu

SEQ ID NO: 2468324 - RNA, 19 nt, Human
ggcagcaggugcugcuacc

SEQ ID NO: 2468325 - RNA, 16 nt, Human
ggcagcaggugcugcu

SEQ ID NO: 2468326 - RNA, 15 nt, Human
ggcagcaggugcugc

SEQ ID NO: 2468327 - RNA, 21 nt, Human
ggcagcagggcuacccugagc

SEQ ID NO: 2468328 - RNA, 13 nt, Human
ggcagcaguguga

SEQ ID NO: 2468329 - RNA, 14 nt, Human
ggcagcagugugag

SEQ ID NO: 2468330 - RNA, 19 nt, Human
ggcagcagugugaggccag

SEQ ID NO: 2468331 - RNA, 20 nt, Human
ggcagcagugugaggccagg

SEQ ID NO: 2468332 - RNA, 11 nt, Human
ggcagccccug

SEQ ID NO: 2468333 - RNA, 23 nt, Human
ggcagccccauucugccugccca

SEQ ID NO: 2468334 - RNA, 21 nt, Human
ggcacagaaaauggaagacag

SEQ ID NO: 2468335 - RNA, 20 nt, Human
ggcacagaaaauggaagaca

SEQ ID NO: 2468336 - RNA, 19 nt, Human
ggcacagaaaauggaagac

SEQ ID NO: 2468337 - RNA, 13 nt, Human
ggcacaucagcac

SEQ ID NO: 2468338 - RNA, 18 nt, Human
ggcacagugucugggcug

SEQ ID NO: 2468339 - RNA, 15 nt, Human
ggcacagugucuggg

SEQ ID NO: 2468340 - RNA, 19 nt, Human
ggcacagugucugggcuga

SEQ ID NO: 2468341 - RNA, 17 nt, Human
ggcacaucagaaaggaa

SEQ ID NO: 2468342 - RNA, 23 nt, Human
ggcacucagaagacacugauggg

SEQ ID NO: 2468343 - RNA, 22 nt, Human
ggcacucuguuauuuagacuca

SEQ ID NO: 2468344 - RNA, 12 nt, Human
ggcacugagccc

SEQ ID NO: 2468345 - RNA, 17 nt, Human
ggcacugagauauuuau

SEQ ID NO: 2468346 - RNA, 17 nt, Human
ggcacaguaugucccau

SEQ ID NO: 2468347 - RNA, 19 nt, Human
ggcacagggucugcucuuu

SEQ ID NO: 2468348 - RNA, 18 nt, Human
ggcacagggucugcucuu

SEQ ID NO: 2468349 - RNA, 17 nt, Human
ggcacagggucugcucu

SEQ ID NO: 2468350 - RNA, 21 nt, Human
ggcacaguuuucugagaaaga

SEQ ID NO: 2468351 - RNA, 23 nt, Human
ggcacagaaaauggaagacagcu

SEQ ID NO: 2468352 - RNA, 12 nt, Human
ggcacagggucu

SEQ ID NO: 2468353 - RNA, 20 nt, Human
ggcaguggugguuuucuguu

SEQ ID NO: 2468354 - RNA, 21 nt, Human
ggcaguggugguuuucuguuc

SEQ ID NO: 2468355 - RNA, 11 nt, Human
ggcaguuacau

SEQ ID NO: 2468356 - RNA, 15 nt, Human
ggcaguucugggugc

SEQ ID NO: 2468357 - RNA, 21 nt, Human
ggcaguucugggugcucccua

SEQ ID NO: 2468358 - RNA, 14 nt, Human
ggcaguuggccaga

SEQ ID NO: 2468359 - RNA, 14 nt, Human
ggcaggggacagga

SEQ ID NO: 2468360 - RNA, 15 nt, Human
ggcagggcugaggcc

SEQ ID NO: 2468361 - RNA, 15 nt, Human
ggcagggcugacucu

SEQ ID NO: 2468362 - RNA, 14 nt, Human
ggcagggcucugau

SEQ ID NO: 2468363 - RNA, 13 nt, Human
ggcagggcucuga

SEQ ID NO: 2468364 - RNA, 11 nt, Human
ggcagggcuca

SEQ ID NO: 2468365 - RNA, 13 nt, Human
ggcagggcucagg

SEQ ID NO: 2468366 - RNA, 15 nt, Human
ggcagggcucaggau

SEQ ID NO: 2468367 - RNA, 13 nt, Human
ggcagccgagcuc

SEQ ID NO: 2468368 - RNA, 16 nt, Human
ggcagggccuugccca

SEQ ID NO: 2468369 - RNA, 18 nt, Human
ggcagggccuugcccaga

SEQ ID NO: 2468370 - RNA, 19 nt, Human
ggcagggccuugcccagag

SEQ ID NO: 2468371 - RNA, 20 nt, Human
ggcagggccuugcccagaga

SEQ ID NO: 2468372 - RNA, 21 nt, Human
ggcagggccuugcccagagau

SEQ ID NO: 2468373 - RNA, 22 nt, Human
ggcagccccuguucuggcagag

SEQ ID NO: 2468374 - RNA, 13 nt, Human
ggcagcccuguag

SEQ ID NO: 2468375 - RNA, 21 nt, Human
ggcagcccuugcuuguuggga

SEQ ID NO: 2468376 - RNA, 11 nt, Human
ggcagcccuug

SEQ ID NO: 2468377 - RNA, 15 nt, Human
ggcagcccuguaggg

SEQ ID NO: 2468378 - RNA, 16 nt, Human
ggcugggagagccuuc

SEQ ID NO: 2468379 - RNA, 15 nt, Human
ggcugggagagccuu

SEQ ID NO: 2468380 - RNA, 14 nt, Human
ggcugggagagccu

SEQ ID NO: 2468381 - RNA, 13 nt, Human
ggcugcugaaggc

SEQ ID NO: 2468382 - RNA, 13 nt, Human
ggcugggagagcc

SEQ ID NO: 2468383 - RNA, 21 nt, Human
ggcugcgucuggaggggcccc

SEQ ID NO: 2468384 - RNA, 15 nt, Human
ggcugcucagggcug

SEQ ID NO: 2468385 - RNA, 15 nt, Human
ggcugcuacccagaa

SEQ ID NO: 2468386 - RNA, 16 nt, Human
ggcugcuacccagaaa

SEQ ID NO: 2468387 - RNA, 13 nt, Human
ggcugcugaagcu

SEQ ID NO: 2468388 - RNA, 15 nt, Human
ggcugcuccuccagg

SEQ ID NO: 2468389 - RNA, 18 nt, Human
ggcugcuccuccagggcc

SEQ ID NO: 2468390 - RNA, 19 nt, Human
ggcugcuccuccagggcca

SEQ ID NO: 2468391 - RNA, 23 nt, Human
ggcugcuccuccagggccacgug

SEQ ID NO: 2468392 - RNA, 12 nt, Human
ggcugcuccucc

SEQ ID NO: 2468393 - RNA, 13 nt, Human
ggcugcuccucca

SEQ ID NO: 2468394 - RNA, 18 nt, Human
ggcugacaucuguguuuc

SEQ ID NO: 2468395 - RNA, 13 nt, Human
ggcugaccacagc

SEQ ID NO: 2468396 - RNA, 15 nt, Human
ggcugaccacagcac

SEQ ID NO: 2468397 - RNA, 16 nt, Human
ggcugaccacagcaca

SEQ ID NO: 2468398 - RNA, 17 nt, Human
ggcugaccacagcacag

SEQ ID NO: 2468399 - RNA, 18 nt, Human
ggcugaccacagcacagc

SEQ ID NO: 2468400 - RNA, 20 nt, Human
ggcugccaaugggagcucau

SEQ ID NO: 2468401 - RNA, 19 nt, Human
ggcugccaaugggagcuca

SEQ ID NO: 2468402 - RNA, 15 nt, Human
ggcucuucuccuuuc

SEQ ID NO: 2468403 - RNA, 14 nt, Human
ggcucuucuccuuu

SEQ ID NO: 2468404 - RNA, 20 nt, Human
ggcugaacggggagaaaagg

SEQ ID NO: 2468405 - RNA, 22 nt, Human
ggcugacagacagcccuccauc

SEQ ID NO: 2468406 - RNA, 14 nt, Human
ggcugacaucugug

SEQ ID NO: 2468407 - RNA, 18 nt, Human
ggcugaaggacugugaca

SEQ ID NO: 2468408 - RNA, 24 nt, Human
ggcugacacguccaccccagugca

SEQ ID NO: 2468409 - RNA, 14 nt, Human
ggcugaaggacugu

SEQ ID NO: 2468410 - RNA, 13 nt, Human
ggcugaaggacug

SEQ ID NO: 2468411 - RNA, 16 nt, Human
ggcugaauagcagaag

SEQ ID NO: 2468412 - RNA, 16 nt, Human
ggcucuucuccuuuca

SEQ ID NO: 2468413 - RNA, 22 nt, Human
ggcugcccuggugcugccacac

SEQ ID NO: 2468414 - RNA, 20 nt, Human
ggcugccuccacucccacuu

SEQ ID NO: 2468415 - RNA, 17 nt, Human
ggcugccaaggccagag

SEQ ID NO: 2468416 - RNA, 11 nt, Human
ggcugccuggg

SEQ ID NO: 2468417 - RNA, 16 nt, Human
ggcugccuggccccca

SEQ ID NO: 2468418 - RNA, 15 nt, Human
ggcugccugggcugu

SEQ ID NO: 2468419 - RNA, 14 nt, Human
ggcugccugggcug

SEQ ID NO: 2468420 - RNA, 17 nt, Human
ggcugccugggcuguug

SEQ ID NO: 2468421 - RNA, 16 nt, Human
ggcugccuuagaaccu

SEQ ID NO: 2468422 - RNA, 22 nt, Human
ggcugcggaaugaaccacaucu

SEQ ID NO: 2468423 - RNA, 19 nt, Human
ggcugcccuggugcugcca

SEQ ID NO: 2468424 - RNA, 16 nt, Human
ggcugcccuggugcug

SEQ ID NO: 2468425 - RNA, 15 nt, Human
ggcugcccuggugcu

SEQ ID NO: 2468426 - RNA, 14 nt, Human
ggcugcccuggugc

SEQ ID NO: 2468427 - RNA, 21 nt, Human
ggcugccaaugggagcucaug

SEQ ID NO: 2468428 - RNA, 13 nt, Human
ggcugcccuggug

SEQ ID NO: 2468429 - RNA, 19 nt, Human
ggcugaccacagcacagcc

SEQ ID NO: 2468430 - RNA, 15 nt, Human
ggcugccaaggccag

SEQ ID NO: 2468431 - RNA, 13 nt, Human
ggcucucaggcca

SEQ ID NO: 2468432 - RNA, 14 nt, Human
ggcucucaggccag

SEQ ID NO: 2468433 - RNA, 14 nt, Human
ggcucucagcucag

SEQ ID NO: 2468434 - RNA, 12 nt, Human
ggcucucagcuc

SEQ ID NO: 2468435 - RNA, 19 nt, Human
ggcucucagcucagcgcca

SEQ ID NO: 2468436 - RNA, 15 nt, Human
ggcucugugcaggga

SEQ ID NO: 2468437 - RNA, 19 nt, Human
ggcucugugcugacccucc

SEQ ID NO: 2468438 - RNA, 18 nt, Human
ggcucugugcugacccuc

SEQ ID NO: 2468439 - RNA, 16 nt, Human
ggcucugugcugaccc

SEQ ID NO: 2468440 - RNA, 12 nt, Human
ggcucugugcug

SEQ ID NO: 2468441 - RNA, 14 nt, Human
ggcucugugggcug

SEQ ID NO: 2468442 - RNA, 12 nt, Human
ggcucugugggc

SEQ ID NO: 2468443 - RNA, 20 nt, Human
ggcucugugcugacccuccu

SEQ ID NO: 2468444 - RNA, 20 nt, Human
ggcucuuagcagcuuccaga

SEQ ID NO: 2468445 - RNA, 19 nt, Human
ggcucuuagcagcuuccag

SEQ ID NO: 2468446 - RNA, 18 nt, Human
ggcucugugggcugcacu

SEQ ID NO: 2468447 - RNA, 15 nt, Human
ggcucugugggcugc

SEQ ID NO: 2468448 - RNA, 18 nt, Human
ggcucuuagcagcuucca

SEQ ID NO: 2468449 - RNA, 12 nt, Human
ggcucuuccagg

SEQ ID NO: 2468450 - RNA, 21 nt, Human
ggcucuuagcagcuuccagau

SEQ ID NO: 2468451 - RNA, 17 nt, Human
ggcucuucuccccagag

SEQ ID NO: 2468452 - RNA, 13 nt, Human
ggcucuucuccuu

SEQ ID NO: 2468453 - RNA, 12 nt, Human
ggcucuucuccu

SEQ ID NO: 2468454 - RNA, 11 nt, Human
ggcucucaggc

SEQ ID NO: 2468455 - RNA, 20 nt, Human
ggcuccugugcuacuuugcc

SEQ ID NO: 2468456 - RNA, 13 nt, Human
ggcuccugugcua

SEQ ID NO: 2468457 - RNA, 12 nt, Human
ggcuccugugcu

SEQ ID NO: 2468458 - RNA, 17 nt, Human
ggcuccugugcccuuau

SEQ ID NO: 2468459 - RNA, 14 nt, Human
ggcuccugugcccu

SEQ ID NO: 2468460 - RNA, 13 nt, Human
ggcuccugugccc

SEQ ID NO: 2468461 - RNA, 23 nt, Human
ggcuccugugcuacuuugccuuu

SEQ ID NO: 2468462 - RNA, 20 nt, Human
ggcuccuucccaucgcuguc

SEQ ID NO: 2468463 - RNA, 16 nt, Human
ggcuccugcugcacca

SEQ ID NO: 2468464 - RNA, 15 nt, Human
ggcuccugcugcacc

SEQ ID NO: 2468465 - RNA, 14 nt, Human
ggcuccugcugcac

SEQ ID NO: 2468466 - RNA, 13 nt, Human
ggcuccugcugca

SEQ ID NO: 2468467 - RNA, 12 nt, Human
ggcuccugcugc

SEQ ID NO: 2468468 - RNA, 11 nt, Human
ggcuccugcug

SEQ ID NO: 2468469 - RNA, 19 nt, Human
ggcuccugccuucuguccu

SEQ ID NO: 2468470 - RNA, 18 nt, Human
ggcuccugccuucugucc

SEQ ID NO: 2468471 - RNA, 23 nt, Human
ggcuccugcugcaccaacccagc

SEQ ID NO: 2468472 - RNA, 22 nt, Human
ggcuccugcugcaccaacccag

SEQ ID NO: 2468473 - RNA, 21 nt, Human
ggcuccugcugcaccaaccca

SEQ ID NO: 2468474 - RNA, 13 nt, Human
ggcuccuggaaag

SEQ ID NO: 2468475 - RNA, 14 nt, Human
ggcuccacuugguc

SEQ ID NO: 2468476 - RNA, 17 nt, Human
ggcuccaaacccucgag

SEQ ID NO: 2468477 - RNA, 21 nt, Human
ggcucauauuccugcagccug

SEQ ID NO: 2468478 - RNA, 22 nt, Human
ggcucauauuccugcagccugg

SEQ ID NO: 2468479 - RNA, 15 nt, Human
ggcucacugccaggc

SEQ ID NO: 2468480 - RNA, 13 nt, Human
ggcucagagaugu

SEQ ID NO: 2468481 - RNA, 21 nt, Human
ggcucacugccaggccagccu

SEQ ID NO: 2468482 - RNA, 22 nt, Human
ggcucacugccaggccagccuc

SEQ ID NO: 2468483 - RNA, 20 nt, Human
ggcucacugccaggccagcc

SEQ ID NO: 2468484 - RNA, 19 nt, Human
ggcucacugccaggccagc

SEQ ID NO: 2468485 - RNA, 18 nt, Human
ggcucacugccaggccag

SEQ ID NO: 2468486 - RNA, 16 nt, Human
ggcucacugccaggcc

SEQ ID NO: 2468487 - RNA, 14 nt, Human
ggcucagagugggg

SEQ ID NO: 2468488 - RNA, 18 nt, Human
ggcucagcggggacagcu

SEQ ID NO: 2468489 - RNA, 13 nt, Human
ggcucagaucuca

SEQ ID NO: 2468490 - RNA, 18 nt, Human
ggcucagagaugugcacc

SEQ ID NO: 2468491 - RNA, 13 nt, Human
ggcucagccuggu

SEQ ID NO: 2468492 - RNA, 18 nt, Human
ggcucagggaccacagca

SEQ ID NO: 2468493 - RNA, 17 nt, Human
ggcucagggaccacagc

SEQ ID NO: 2468494 - RNA, 16 nt, Human
ggcucagggaccacag

SEQ ID NO: 2468495 - RNA, 14 nt, Human
ggcucagggaccac

SEQ ID NO: 2468496 - RNA, 20 nt, Human
ggcucagccuggugggccuc

SEQ ID NO: 2468497 - RNA, 22 nt, Human
ggcucaggauuucgugggucug

SEQ ID NO: 2468498 - RNA, 12 nt, Human
ggcucaggaaaa

SEQ ID NO: 2468499 - RNA, 20 nt, Human
ggcucagcggggacagcucc

SEQ ID NO: 2468500 - RNA, 19 nt, Human
ggcucagcggggacagcuc

SEQ ID NO: 2468501 - RNA, 20 nt, Human
ggcucagguggggucacucu

SEQ ID NO: 2468502 - RNA, 19 nt, Human
ggcucagguggggucacuc

SEQ ID NO: 2468503 - RNA, 22 nt, Human
ggcucagggagguuaagugacu

SEQ ID NO: 2468504 - RNA, 14 nt, Human
ggcucagucucagg

SEQ ID NO: 2468505 - RNA, 15 nt, Human
ggcucagucucagga

SEQ ID NO: 2468506 - RNA, 17 nt, Human
ggcucagucucaggagc

SEQ ID NO: 2468507 - RNA, 20 nt, Human
ggcucauagggaagaccugc

SEQ ID NO: 2468508 - RNA, 17 nt, Human
ggcucauauuccugcag

SEQ ID NO: 2468509 - RNA, 20 nt, Human
ggcucauauuccugcagccu

SEQ ID NO: 2468510 - RNA, 22 nt, Human
aaaagauguagauuuauuucau

SEQ ID NO: 2468511 - RNA, 15 nt, Human
aaaacuucagacaua

SEQ ID NO: 2468512 - RNA, 19 nt, Human
aaaacuuaacauauuuacu

SEQ ID NO: 2468513 - RNA, 17 nt, Human
aaaacuuaacauauuua

SEQ ID NO: 2468514 - RNA, 11 nt, Human
aaaacuuauuu

SEQ ID NO: 2468515 - RNA, 15 nt, Human
aaaacuuauuugagu

SEQ ID NO: 2468516 - RNA, 15 nt, Human
aaaacugacagagga

SEQ ID NO: 2468517 - RNA, 17 nt, Human
aaaacugaauuauaaga

SEQ ID NO: 2468518 - RNA, 21 nt, Human
aaaacugaagucugaaauuug

SEQ ID NO: 2468519 - RNA, 16 nt, Human
aaaacugacuccuuag

SEQ ID NO: 2468520 - RNA, 21 nt, Human
aaaagauuuucagaaaauauu

SEQ ID NO: 2468521 - RNA, 12 nt, Human
aaaagcaaaauc

SEQ ID NO: 2468522 - RNA, 14 nt, Human
aaaagcauguacag

SEQ ID NO: 2468523 - RNA, 15 nt, Human
aaaagauuuuaauca

SEQ ID NO: 2468524 - RNA, 21 nt, Human
aaaagauugcugaaauuuuau

SEQ ID NO: 2468525 - RNA, 13 nt, Human
aaaagauuuguuu

SEQ ID NO: 2468526 - RNA, 17 nt, Human
aaaagauuuguuuuguc

SEQ ID NO: 2468527 - RNA, 14 nt, Human
aaaagauuuuaauc

SEQ ID NO: 2468528 - RNA, 21 nt, Human
aaaagauugaaguauuuugcu

SEQ ID NO: 2468529 - RNA, 14 nt, Human
aaaagauugcugaa

SEQ ID NO: 2468530 - RNA, 16 nt, Human
aaaagauugcugaaau

SEQ ID NO: 2468531 - RNA, 18 nt, Human
aaaagauugcugaaauuu

SEQ ID NO: 2468532 - RNA, 12 nt, Human
aaaacuucuuuu

SEQ ID NO: 2468533 - RNA, 23 nt, Human
aaaagauguagauuuauuucauc

SEQ ID NO: 2468534 - RNA, 13 nt, Human
aaaagauucauuu

SEQ ID NO: 2468535 - RNA, 11 nt, Human
aaaagauucau

SEQ ID NO: 2468536 - RNA, 20 nt, Human
aaaaccaucaaaaauauucc

SEQ ID NO: 2468537 - RNA, 22 nt, Human
aaaacccaccuuguuggagccu

SEQ ID NO: 2468538 - RNA, 17 nt, Human
aaaaccugucaaugaua

SEQ ID NO: 2468539 - RNA, 14 nt, Human
aaaaccugucaaug

SEQ ID NO: 2468540 - RNA, 13 nt, Human
aaaaccuuucaaa

SEQ ID NO: 2468541 - RNA, 17 nt, Human
aaaacgcaaagggcuga

SEQ ID NO: 2468542 - RNA, 13 nt, Human
aaaacgcauggag

SEQ ID NO: 2468543 - RNA, 14 nt, Human
aaaacgcauggagu

SEQ ID NO: 2468544 - RNA, 18 nt, Human
aaaacgcauggagugugu

SEQ ID NO: 2468545 - RNA, 14 nt, Human
aaaaccuuuugaaa

SEQ ID NO: 2468546 - RNA, 20 nt, Human
aaaaccuuucaaauuucaca

SEQ ID NO: 2468547 - RNA, 18 nt, Human
aaaacucuccucugcugc

SEQ ID NO: 2468548 - RNA, 16 nt, Human
aaaacggcccucuuga

SEQ ID NO: 2468549 - RNA, 17 nt, Human
aaaacgcauggagugug

SEQ ID NO: 2468550 - RNA, 16 nt, Human
aaaacgguuaaaacug

SEQ ID NO: 2468551 - RNA, 21 nt, Human
aaaacucuacuuaauccaaug

SEQ ID NO: 2468552 - RNA, 18 nt, Human
aaaacgguuaaaacuguc

SEQ ID NO: 2468553 - RNA, 19 nt, Human
aaaacugaagucugaaauu

SEQ ID NO: 2468554 - RNA, 18 nt, Human
aaaacugaagucugaaau

SEQ ID NO: 2468555 - RNA, 17 nt, Human
aaaacugaagucugaaa

SEQ ID NO: 2468556 - RNA, 15 nt, Human
aaaacugaagucuga

SEQ ID NO: 2468557 - RNA, 19 nt, Human
aaaacugaaaaucuaauau

SEQ ID NO: 2468558 - RNA, 18 nt, Human
aaaacugaaaaucuaaua

SEQ ID NO: 2468559 - RNA, 23 nt, Human
aaaacugaaagugaaaguccaga

SEQ ID NO: 2468560 - RNA, 23 nt, Human
aaaaaugggacuucuuuucacau

SEQ ID NO: 2468561 - RNA, 18 nt, Human
aaaaaugggacuucuuuu

SEQ ID NO: 2468562 - RNA, 17 nt, Human
aaaaaugggacuucuuu

SEQ ID NO: 2468563 - RNA, 13 nt, Human
aaaaaugguaauu

SEQ ID NO: 2468564 - RNA, 14 nt, Human
gggaccagccaaga

SEQ ID NO: 2468565 - RNA, 16 nt, Human
aaaaaugggacuucuu

SEQ ID NO: 2468566 - RNA, 17 nt, Human
aaaaaugguuuaaaugg

SEQ ID NO: 2468567 - RNA, 13 nt, Human
aaaaauguaaaua

SEQ ID NO: 2468568 - RNA, 12 nt, Human
aaaaauguaaau

SEQ ID NO: 2468569 - RNA, 15 nt, Human
aaaaauggugccuga

SEQ ID NO: 2468570 - RNA, 20 nt, Human
gggaccagagcugccaccug

SEQ ID NO: 2468571 - RNA, 14 nt, Human
gggaccagagcugc

SEQ ID NO: 2468572 - RNA, 23 nt, Human
gggaccacagcaaggcaccugca

SEQ ID NO: 2468573 - RNA, 22 nt, Human
gggaccacagcaaggcaccugc

SEQ ID NO: 2468574 - RNA, 19 nt, Human
gggaccacagcaaggcacc

SEQ ID NO: 2468575 - RNA, 23 nt, Human
gggaccaaggcaaggcaggugcc

SEQ ID NO: 2468576 - RNA, 19 nt, Human
gggaccaaggcaaggcagg

SEQ ID NO: 2468577 - RNA, 17 nt, Human
gggaccaaggcaaggca

SEQ ID NO: 2468578 - RNA, 12 nt, Human
gggaccaaggca

SEQ ID NO: 2468579 - RNA, 17 nt, Human
gggaccaaggaccccuc

SEQ ID NO: 2468580 - RNA, 15 nt, Human
gggacauugggaagg

SEQ ID NO: 2468581 - RNA, 13 nt, Human
aaaacaugcuaca

SEQ ID NO: 2468582 - RNA, 14 nt, Human
aaaacaugcuacac

SEQ ID NO: 2468583 - RNA, 16 nt, Human
aaaaauguauaugcac

SEQ ID NO: 2468584 - RNA, 13 nt, Human
aaaacaucuauuc

SEQ ID NO: 2468585 - RNA, 16 nt, Human
aaaacaucuauucucu

SEQ ID NO: 2468586 - RNA, 21 nt, Human
aaaacaucuauucucuccaaa

SEQ ID NO: 2468587 - RNA, 16 nt, Human
aaaacauccagauaca

SEQ ID NO: 2468588 - RNA, 21 nt, Human
aaaacauccagauacacccaa

SEQ ID NO: 2468589 - RNA, 11 nt, Human
aaaacaucugg

SEQ ID NO: 2468590 - RNA, 19 nt, Human
aaaaccacagcccugucag

SEQ ID NO: 2468591 - RNA, 20 nt, Human
aaaaccacagcccugucagu

SEQ ID NO: 2468592 - RNA, 16 nt, Human
aaaaccacuagaacuc

SEQ ID NO: 2468593 - RNA, 12 nt, Human
aaaacccaagug

SEQ ID NO: 2468594 - RNA, 17 nt, Human
aaaaccacuagaacucu

SEQ ID NO: 2468595 - RNA, 11 nt, Human
aaaaccaggcc

SEQ ID NO: 2468596 - RNA, 23 nt, Human
gggacuuggaagcuccgcuuucu

SEQ ID NO: 2468597 - RNA, 18 nt, Human
gggacuuggaagcuccgc

SEQ ID NO: 2468598 - RNA, 17 nt, Human
gggacuuggaagcuccg

SEQ ID NO: 2468599 - RNA, 15 nt, Human
gggacuuggaagcuc

SEQ ID NO: 2468600 - RNA, 21 nt, Human
gggagaaccaaaaagaggcua

SEQ ID NO: 2468601 - RNA, 14 nt, Human
aaaaggaagacuag

SEQ ID NO: 2468602 - RNA, 15 nt, Human
aaaaggaagacuaga

SEQ ID NO: 2468603 - RNA, 18 nt, Human
gggacuugaaucuuucca

SEQ ID NO: 2468604 - RNA, 15 nt, Human
gggagaaaagacaug

SEQ ID NO: 2468605 - RNA, 13 nt, Human
gggagaaaauuca

SEQ ID NO: 2468606 - RNA, 15 nt, Human
gggagaaaauucaau

SEQ ID NO: 2468607 - RNA, 10 nt, Human
gggagaaaac

SEQ ID NO: 2468608 - RNA, 16 nt, Human
gggagaaauugacaga

SEQ ID NO: 2468609 - RNA, 14 nt, Human
gggagaaccucagg

SEQ ID NO: 2468610 - RNA, 16 nt, Human
gggagaaccucaggcu

SEQ ID NO: 2468611 - RNA, 15 nt, Human
gggagaaccucaggc

SEQ ID NO: 2468612 - RNA, 10 nt, Human
aaaaggaaaa

SEQ ID NO: 2468613 - RNA, 21 nt, Human
aaaagcuuugaacccugggac

SEQ ID NO: 2468614 - RNA, 21 nt, Human
aaaagccucaacuagucauuu

SEQ ID NO: 2468615 - RNA, 14 nt, Human
aaaaggaaaagcaa

SEQ ID NO: 2468616 - RNA, 14 nt, Human
aaaagcuuuuuauu

SEQ ID NO: 2468617 - RNA, 18 nt, Human
aaaaggaagccaaagagu

SEQ ID NO: 2468618 - RNA, 13 nt, Human
aaaaggaagacua

SEQ ID NO: 2468619 - RNA, 18 nt, Human
aaaagccaagaggcugca

SEQ ID NO: 2468620 - RNA, 22 nt, Human
aaaagcauguacaguguucugu

SEQ ID NO: 2468621 - RNA, 19 nt, Human
aaaagcauguacaguguuc

SEQ ID NO: 2468622 - RNA, 18 nt, Human
aaaagcauguacaguguu

SEQ ID NO: 2468623 - RNA, 15 nt, Human
aaaagcauguacagu

SEQ ID NO: 2468624 - RNA, 19 nt, Human
gggagagccuuccaggggu

SEQ ID NO: 2468625 - RNA, 15 nt, Human
gggagagccuuccag

SEQ ID NO: 2468626 - RNA, 23 nt, Human
gggagcaggcucgggcuccccag

SEQ ID NO: 2468627 - RNA, 13 nt, Human
gggagagccugcu

SEQ ID NO: 2468628 - RNA, 12 nt, Human
gggagagccugc

SEQ ID NO: 2468629 - RNA, 21 nt, Human
gggagaggauuuuuuucugag

SEQ ID NO: 2468630 - RNA, 16 nt, Human
gggagagccugcuggc

SEQ ID NO: 2468631 - RNA, 19 nt, Human
gggagccaugcgcccccuc

SEQ ID NO: 2468632 - RNA, 10 nt, Human
gggaggcuga

SEQ ID NO: 2468633 - RNA, 19 nt, Human
gggagcauagaaggcaggu

SEQ ID NO: 2468634 - RNA, 12 nt, Human
gggagccagggc

SEQ ID NO: 2468635 - RNA, 16 nt, Human
gggagcauggcuguga

SEQ ID NO: 2468636 - RNA, 11 nt, Human
gggagcagugu

SEQ ID NO: 2468637 - RNA, 19 nt, Human
gggagcagugucuuccaua

SEQ ID NO: 2468638 - RNA, 18 nt, Human
gggagcauagaaggcagg

SEQ ID NO: 2468639 - RNA, 20 nt, Human
gggagcagugucuuccauaa

SEQ ID NO: 2468640 - RNA, 17 nt, Human
gggagagggaggucacu

SEQ ID NO: 2468641 - RNA, 22 nt, Human
gggagaggccaugauucgccca

SEQ ID NO: 2468642 - RNA, 15 nt, Human
gggagcagggagguc

SEQ ID NO: 2468643 - RNA, 24 nt, Human
gggagcaggcggugggcacccacc

SEQ ID NO: 2468644 - RNA, 15 nt, Human
gggagggggauccga

SEQ ID NO: 2468645 - RNA, 22 nt, Human
gggagggauucugguuccaggg

SEQ ID NO: 2468646 - RNA, 15 nt, Human
gggaggcugagacag

SEQ ID NO: 2468647 - RNA, 16 nt, Human
gggagggagggcucca

SEQ ID NO: 2468648 - RNA, 15 nt, Human
gggagggagggcucc

SEQ ID NO: 2468649 - RNA, 13 nt, Human
gggaggcuucccc

SEQ ID NO: 2468650 - RNA, 17 nt, Human
gggaggcugagacagga

SEQ ID NO: 2468651 - RNA, 14 nt, Human
gggaggcugaggcg

SEQ ID NO: 2468652 - RNA, 18 nt, Human
gggaggucaaggcugcag

SEQ ID NO: 2468653 - RNA, 17 nt, Human
gggaggggggcacaugc

SEQ ID NO: 2468654 - RNA, 23 nt, Human
gggagggguugccacaggccucc

SEQ ID NO: 2468655 - RNA, 19 nt, Human
gggagggguugccacaggc

SEQ ID NO: 2468656 - RNA, 22 nt, Human
gggagggguaaaauuccuuagc

SEQ ID NO: 2468657 - RNA, 19 nt, Human
gggaugacuaaaauauuua

SEQ ID NO: 2468658 - RNA, 20 nt, Human
gggaugacuaaaauauuuau

SEQ ID NO: 2468659 - RNA, 15 nt, Human
gggaggucgaggcag

SEQ ID NO: 2468660 - RNA, 15 nt, Human
gggaggucacuggaa

SEQ ID NO: 2468661 - RNA, 14 nt, Human
gggaggucauuuug

SEQ ID NO: 2468662 - RNA, 13 nt, Human
gggaagagacuug

SEQ ID NO: 2468663 - RNA, 16 nt, Human
gggaagaaagagaagg

SEQ ID NO: 2468664 - RNA, 19 nt, Human
gggaagaaaagagcuuucu

SEQ ID NO: 2468665 - RNA, 15 nt, Human
gggaagacgaggccc

SEQ ID NO: 2468666 - RNA, 17 nt, Human
gggaagacgccugagcu

SEQ ID NO: 2468667 - RNA, 17 nt, Human
gggacaccugcccugcc

SEQ ID NO: 2468668 - RNA, 16 nt, Human
gggacaccugcccugc

SEQ ID NO: 2468669 - RNA, 17 nt, Human
gggacagagacaccugc

SEQ ID NO: 2468670 - RNA, 14 nt, Human
gggacaccugcccu

SEQ ID NO: 2468671 - RNA, 13 nt, Human
gggacagcuccuu

SEQ ID NO: 2468672 - RNA, 12 nt, Human
gggacagcuccu

SEQ ID NO: 2468673 - RNA, 18 nt, Human
gggacagaggccccagcc

SEQ ID NO: 2468674 - RNA, 19 nt, Human
gggacagaggccccagccu

SEQ ID NO: 2468675 - RNA, 20 nt, Human
gggacagaggccccagccuc

SEQ ID NO: 2468676 - RNA, 21 nt, Human
gggacagaggccccagccucc

SEQ ID NO: 2468677 - RNA, 13 nt, Human
gggacagagcaga

SEQ ID NO: 2468678 - RNA, 17 nt, Human
gggacagaggccccagc

SEQ ID NO: 2468679 - RNA, 18 nt, Human
gggacagagacaccugca

SEQ ID NO: 2468680 - RNA, 20 nt, Human
gggacagagacaccugcacc

SEQ ID NO: 2468681 - RNA, 21 nt, Human
gggacagucaccucauggaau

SEQ ID NO: 2468682 - RNA, 20 nt, Human
gggacagucaccucauggaa

SEQ ID NO: 2468683 - RNA, 22 nt, Human
gggacagucaccucauggaauu

SEQ ID NO: 2468684 - RNA, 15 nt, Human
gggacaucucuuuga

SEQ ID NO: 2468685 - RNA, 20 nt, Human
gggacagggcuggcccagcc

SEQ ID NO: 2468686 - RNA, 19 nt, Human
gggacagggcuggcccagc

SEQ ID NO: 2468687 - RNA, 18 nt, Human
gggacagggcuggcccag

SEQ ID NO: 2468688 - RNA, 17 nt, Human
gggacagggcuggccca

SEQ ID NO: 2468689 - RNA, 17 nt, Human
gggacaggggcaggagg

SEQ ID NO: 2468690 - RNA, 22 nt, Human
gggacagggcuggcccagcccu

SEQ ID NO: 2468691 - RNA, 21 nt, Human
gggacagggcuggcccagccc

SEQ ID NO: 2468692 - RNA, 18 nt, Human
gggacaggggcaggagga

SEQ ID NO: 2468693 - RNA, 13 nt, Human
gggacagggcugg

SEQ ID NO: 2468694 - RNA, 14 nt, Human
gggacagaggccug

SEQ ID NO: 2468695 - RNA, 12 nt, Human
gggacagggcug

SEQ ID NO: 2468696 - RNA, 15 nt, Human
gggacagcuccuucu

SEQ ID NO: 2468697 - RNA, 19 nt, Human
gggaaccucacucuugcca

SEQ ID NO: 2468698 - RNA, 12 nt, Human
gggaacccugcu

SEQ ID NO: 2468699 - RNA, 19 nt, Human
gggaaccaugaagacagga

SEQ ID NO: 2468700 - RNA, 20 nt, Human
gggaacccaaguccaagcau

SEQ ID NO: 2468701 - RNA, 15 nt, Human
gggaaccuguguccg

SEQ ID NO: 2468702 - RNA, 14 nt, Human
gggaaccugugucc

SEQ ID NO: 2468703 - RNA, 13 nt, Human
gggaaccuguguc

SEQ ID NO: 2468704 - RNA, 13 nt, Human
gggaaccuggaac

SEQ ID NO: 2468705 - RNA, 12 nt, Human
gggaaccucacu

SEQ ID NO: 2468706 - RNA, 13 nt, Human
gggaaccugaccc

SEQ ID NO: 2468707 - RNA, 20 nt, Human
gggaacugcagaccuguccu

SEQ ID NO: 2468708 - RNA, 15 nt, Human
gggaacugcagaccu

SEQ ID NO: 2468709 - RNA, 18 nt, Human
gggaagaagcucucuccu

SEQ ID NO: 2468710 - RNA, 18 nt, Human
gggaacgugacugcccca

SEQ ID NO: 2468711 - RNA, 14 nt, Human
gggaacgugacugc

SEQ ID NO: 2468712 - RNA, 17 nt, Human
gggaacgugacugcccc

SEQ ID NO: 2468713 - RNA, 23 nt, Human
gggaacucaccuggggcugcugg

SEQ ID NO: 2468714 - RNA, 22 nt, Human
gggaacucaccuggggcugcug

SEQ ID NO: 2468715 - RNA, 16 nt, Human
gggaacucagauccag

SEQ ID NO: 2468716 - RNA, 13 nt, Human
gggaacuccugga

SEQ ID NO: 2468717 - RNA, 12 nt, Human
gggaacaguguu

SEQ ID NO: 2468718 - RNA, 18 nt, Human
gggaaccaugaagacagg

SEQ ID NO: 2468719 - RNA, 20 nt, Human
gggaacaguguuucccauaa

SEQ ID NO: 2468720 - RNA, 18 nt, Human
ggcuucuggagcccuugg

SEQ ID NO: 2468721 - RNA, 20 nt, Human
ggcuucuggagcccuugggu

SEQ ID NO: 2468722 - RNA, 22 nt, Human
ggcuucugcacccuccacccug

SEQ ID NO: 2468723 - RNA, 13 nt, Human
ggcuucuggagcc

SEQ ID NO: 2468724 - RNA, 16 nt, Human
ggcuucuggagcccuu

SEQ ID NO: 2468725 - RNA, 21 nt, Human
ggcuuccuccugguguggaag

SEQ ID NO: 2468726 - RNA, 22 nt, Human
ggcuucccgcucagcccucccu

SEQ ID NO: 2468727 - RNA, 21 nt, Human
ggcuguaggacucgcagucag

SEQ ID NO: 2468728 - RNA, 15 nt, Human
ggcuguagaaggaga

SEQ ID NO: 2468729 - RNA, 12 nt, Human
ggcuuccuccuc

SEQ ID NO: 2468730 - RNA, 21 nt, Human
ggcuuccucaguuccugcccu

SEQ ID NO: 2468731 - RNA, 21 nt, Human
ggcuucugcacccuccacccu

SEQ ID NO: 2468732 - RNA, 20 nt, Human
ggcuucugcacccuccaccc

SEQ ID NO: 2468733 - RNA, 18 nt, Human
ggcuucugcacccuccac

SEQ ID NO: 2468734 - RNA, 16 nt, Human
ggcuucugcacccucc

SEQ ID NO: 2468735 - RNA, 15 nt, Human
ggcuucugcacccuc

SEQ ID NO: 2468736 - RNA, 14 nt, Human
ggcuucugcacccu

SEQ ID NO: 2468737 - RNA, 13 nt, Human
ggcuucugcaccc

SEQ ID NO: 2468738 - RNA, 14 nt, Human
ggcuucucucugug

SEQ ID NO: 2468739 - RNA, 22 nt, Human
ggcugguucggauuuggggugg

SEQ ID NO: 2468740 - RNA, 18 nt, Human
ggcugguuuggaaugcuu

SEQ ID NO: 2468741 - RNA, 10 nt, Human
ggcugggugc

SEQ ID NO: 2468742 - RNA, 23 nt, Human
ggcugguucggauuuggggugga

SEQ ID NO: 2468743 - RNA, 23 nt, Human
ggcugguuuuguaagaugcuggg

SEQ ID NO: 2468744 - RNA, 22 nt, Human
ggcugguuuuguaagaugcugg

SEQ ID NO: 2468745 - RNA, 21 nt, Human
ggcugguuuuguaagaugcug

SEQ ID NO: 2468746 - RNA, 13 nt, Human
ggcugguuuugua

SEQ ID NO: 2468747 - RNA, 16 nt, Human
ggcuguaaaaugcaug

SEQ ID NO: 2468748 - RNA, 18 nt, Human
ggcuguaucccaugagcc

SEQ ID NO: 2468749 - RNA, 20 nt, Human
ggcuucaguggcagcugcuu

SEQ ID NO: 2468750 - RNA, 19 nt, Human
ggcuucaguggcagcugcu

SEQ ID NO: 2468751 - RNA, 17 nt, Human
ggcuucaguggcagcug

SEQ ID NO: 2468752 - RNA, 18 nt, Human
ggcuucaguggcagcugc

SEQ ID NO: 2468753 - RNA, 18 nt, Human
ggcuucccgcucagcccu

SEQ ID NO: 2468754 - RNA, 17 nt, Human
ggcuucccgcucagccc

SEQ ID NO: 2468755 - RNA, 16 nt, Human
ggcuucccgcucagcc

SEQ ID NO: 2468756 - RNA, 15 nt, Human
ggcuucccgcucagc

SEQ ID NO: 2468757 - RNA, 21 nt, Human
ggcuucccgcucagcccuccc

SEQ ID NO: 2468758 - RNA, 19 nt, Human
ggcuucccgcucagcccuc

SEQ ID NO: 2468759 - RNA, 16 nt, Human
ggcuuccucauaguau

SEQ ID NO: 2468760 - RNA, 9 nt, Human
ggcuucaua

SEQ ID NO: 2468761 - RNA, 11 nt, Human
ggcuucauaca

SEQ ID NO: 2468762 - RNA, 18 nt, Human
ggcuucauccuccucaga

SEQ ID NO: 2468763 - RNA, 22 nt, Human
ggcuucauccuccucagaucuu

SEQ ID NO: 2468764 - RNA, 12 nt, Human
ggcuucauacac

SEQ ID NO: 2468765 - RNA, 14 nt, Human
ggcuucccgcucag

SEQ ID NO: 2468766 - RNA, 20 nt, Human
ggcugggucgcccuggacug

SEQ ID NO: 2468767 - RNA, 17 nt, Human
ggcugggucgcccugga

SEQ ID NO: 2468768 - RNA, 14 nt, Human
ggcugggucgcccu

SEQ ID NO: 2468769 - RNA, 16 nt, Human
aaaaauaauaauaaug

SEQ ID NO: 2468770 - RNA, 21 nt, Human
ggcuggguucuacccaggugc

SEQ ID NO: 2468771 - RNA, 19 nt, Human
ggcuggguucuacccaggu

SEQ ID NO: 2468772 - RNA, 19 nt, Human
ggcuggguggcaccagcag

SEQ ID NO: 2468773 - RNA, 14 nt, Human
ggcugggugcgacc

SEQ ID NO: 2468774 - RNA, 19 nt, Human
ggcugggggccucagugcc

SEQ ID NO: 2468775 - RNA, 17 nt, Human
ggcugggggccucagug

SEQ ID NO: 2468776 - RNA, 16 nt, Human
ggcugggggccucagu

SEQ ID NO: 2468777 - RNA, 15 nt, Human
ggcugggggccucag

SEQ ID NO: 2468778 - RNA, 14 nt, Human
aaaaauaacaauga

SEQ ID NO: 2468779 - RNA, 21 nt, Human
aaaaauaaauuugguucuaau

SEQ ID NO: 2468780 - RNA, 22 nt, Human
aaagauggcugugccucugccu

SEQ ID NO: 2468781 - RNA, 21 nt, Human
aaagauggcugugccucugcc

SEQ ID NO: 2468782 - RNA, 16 nt, Human
aaagauggaugugcuu

SEQ ID NO: 2468783 - RNA, 18 nt, Human
aaagauggggucuguaaa

SEQ ID NO: 2468784 - RNA, 17 nt, Human
aaagauggggucuguaa

SEQ ID NO: 2468785 - RNA, 23 nt, Human
aaagauggcugugccucugccug

SEQ ID NO: 2468786 - RNA, 21 nt, Human
aaagauggggucuguaaaauc

SEQ ID NO: 2468787 - RNA, 19 nt, Human
aaagauggggucuguaaaa

SEQ ID NO: 2468788 - RNA, 22 nt, Human
aaagauggggucuguaaaaucu

SEQ ID NO: 2468789 - RNA, 20 nt, Human
aaagcaauuuuccuugaagc

SEQ ID NO: 2468790 - RNA, 19 nt, Human
aaagcaauuuuccuugaag

SEQ ID NO: 2468791 - RNA, 18 nt, Human
aaagcaauuuuccuugaa

SEQ ID NO: 2468792 - RNA, 17 nt, Human
aaagcaauuuuccuuga

SEQ ID NO: 2468793 - RNA, 16 nt, Human
aaagcaauuuuccuug

SEQ ID NO: 2468794 - RNA, 15 nt, Human
aaagcaauuuuccuu

SEQ ID NO: 2468795 - RNA, 14 nt, Human
aaagcaauuuuccu

SEQ ID NO: 2468796 - RNA, 13 nt, Human
aaagcaauuuucc

SEQ ID NO: 2468797 - RNA, 12 nt, Human
aaagcaauuuuc

SEQ ID NO: 2468798 - RNA, 15 nt, Human
aaagcaauuccaacc

SEQ ID NO: 2468799 - RNA, 14 nt, Human
aaagcaaugcauuu

SEQ ID NO: 2468800 - RNA, 13 nt, Human
aaagcaaugcauu

SEQ ID NO: 2468801 - RNA, 12 nt, Human
aaagcaaugcau

SEQ ID NO: 2468802 - RNA, 14 nt, Human
aaagcaauaugcau

SEQ ID NO: 2468803 - RNA, 14 nt, Human
aaagcaaggaaacu

SEQ ID NO: 2468804 - RNA, 20 nt, Human
aaagcaaggaaacuauguaa

SEQ ID NO: 2468805 - RNA, 22 nt, Human
aaagcaagugauugggacagag

SEQ ID NO: 2468806 - RNA, 23 nt, Human
aaagcaauaauggucccauccag

SEQ ID NO: 2468807 - RNA, 22 nt, Human
aaagcaauaauggucccaucca

SEQ ID NO: 2468808 - RNA, 14 nt, Human
aaagcaauaauggu

SEQ ID NO: 2468809 - RNA, 15 nt, Human
aaagcaauaaaugaa

SEQ ID NO: 2468810 - RNA, 17 nt, Human
aaagcaauaaaugaaug

SEQ ID NO: 2468811 - RNA, 20 nt, Human
gguccugcagucuggcugag

SEQ ID NO: 2468812 - RNA, 12 nt, Human
gguccugcugca

SEQ ID NO: 2468813 - RNA, 17 nt, Human
gguccugagggucccca

SEQ ID NO: 2468814 - RNA, 19 nt, Human
gguccugcagucuggcuga

SEQ ID NO: 2468815 - RNA, 11 nt, Human
gguccugcugc

SEQ ID NO: 2468816 - RNA, 13 nt, Human
gguccuguggcag

SEQ ID NO: 2468817 - RNA, 12 nt, Human
gguccuguggca

SEQ ID NO: 2468818 - RNA, 18 nt, Human
gguccuguggcaggcagc

SEQ ID NO: 2468819 - RNA, 17 nt, Human
gguccuguggcaggcag

SEQ ID NO: 2468820 - RNA, 16 nt, Human
gguccuguggcaggca

SEQ ID NO: 2468821 - RNA, 14 nt, Human
gguccuguggcagg

SEQ ID NO: 2468822 - RNA, 21 nt, Human
gguccuucaaguuagcucagg

SEQ ID NO: 2468823 - RNA, 16 nt, Human
gguccuugcaccccuc

SEQ ID NO: 2468824 - RNA, 22 nt, Human
gguccuuuacacucaggcuuuc

SEQ ID NO: 2468825 - RNA, 20 nt, Human
gguccuuggugugacccucu

SEQ ID NO: 2468826 - RNA, 21 nt, Human
gguccuuugggaaaggagaag

SEQ ID NO: 2468827 - RNA, 22 nt, Human
gguccuguggcaggcagcgcca

SEQ ID NO: 2468828 - RNA, 21 nt, Human
gguccuguggcaggcagcgcc

SEQ ID NO: 2468829 - RNA, 15 nt, Human
gguccuuccaggccc

SEQ ID NO: 2468830 - RNA, 16 nt, Human
gguccuuccaggcccc

SEQ ID NO: 2468831 - RNA, 15 nt, Human
gguccuucccucucc

SEQ ID NO: 2468832 - RNA, 19 nt, Human
gguccuucccucuccccaa

SEQ ID NO: 2468833 - RNA, 19 nt, Human
aaagagaugaugaaaauau

SEQ ID NO: 2468834 - RNA, 20 nt, Human
aaagagaugaugaaaauauu

SEQ ID NO: 2468835 - RNA, 22 nt, Human
aaagagaugaugaaaauauuua

SEQ ID NO: 2468836 - RNA, 20 nt, Human
aaagagauauuuuaaaauga

SEQ ID NO: 2468837 - RNA, 18 nt, Human
aaagagauggccugagaa

SEQ ID NO: 2468838 - RNA, 14 nt, Human
aaagacuguacaaa

SEQ ID NO: 2468839 - RNA, 12 nt, Human
aaagagagguua

SEQ ID NO: 2468840 - RNA, 11 nt, Human
aaagagagguu

SEQ ID NO: 2468841 - RNA, 16 nt, Human
aaagagauauuuuaaa

SEQ ID NO: 2468842 - RNA, 13 nt, Human
aaagagauauuuu

SEQ ID NO: 2468843 - RNA, 12 nt, Human
aaagagauauuu

SEQ ID NO: 2468844 - RNA, 23 nt, Human
aaagacugaguacguugugcauu

SEQ ID NO: 2468845 - RNA, 12 nt, Human
aaagacuggcuu

SEQ ID NO: 2468846 - RNA, 16 nt, Human
aaagacugagcucaag

SEQ ID NO: 2468847 - RNA, 23 nt, Human
aaagacuggcuuuuauuaaugca

SEQ ID NO: 2468848 - RNA, 21 nt, Human
aaagacuggcuuuuauuaaug

SEQ ID NO: 2468849 - RNA, 13 nt, Human
aaagacuggcuuu

SEQ ID NO: 2468850 - RNA, 13 nt, Human
aaagacuguacaa

SEQ ID NO: 2468851 - RNA, 14 nt, Human
aaagaggaaagaau

SEQ ID NO: 2468852 - RNA, 12 nt, Human
aaagaggaaaga

SEQ ID NO: 2468853 - RNA, 18 nt, Human
aaagagcccuugccuccc

SEQ ID NO: 2468854 - RNA, 14 nt, Human
aaagaggagugcuu

SEQ ID NO: 2468855 - RNA, 19 nt, Human
aaagaugcuucucacugcc

SEQ ID NO: 2468856 - RNA, 17 nt, Human
aaagaugcuucucacug

SEQ ID NO: 2468857 - RNA, 14 nt, Human
aaagaugcuucuca

SEQ ID NO: 2468858 - RNA, 15 nt, Human
aaagaggcagcuuga

SEQ ID NO: 2468859 - RNA, 15 nt, Human
aaagaggaaugaagu

SEQ ID NO: 2468860 - RNA, 13 nt, Human
aaagagauuucaa

SEQ ID NO: 2468861 - RNA, 14 nt, Human
aaagagauuucaag

SEQ ID NO: 2468862 - RNA, 15 nt, Human
aaagagcaagucugg

SEQ ID NO: 2468863 - RNA, 18 nt, Human
aaagagcacuuaagagaa

SEQ ID NO: 2468864 - RNA, 12 nt, Human
aaagagcacuua

SEQ ID NO: 2468865 - RNA, 23 nt, Human
aaagagcaagucuggaucuggga

SEQ ID NO: 2468866 - RNA, 15 nt, Human
aaagagcccuugccu

SEQ ID NO: 2468867 - RNA, 22 nt, Human
aaagagcacuuaagagaauauu

SEQ ID NO: 2468868 - RNA, 21 nt, Human
aaagagcacuuaagagaauau

SEQ ID NO: 2468869 - RNA, 20 nt, Human
aaagagcacuuaagagaaua

SEQ ID NO: 2468870 - RNA, 22 nt, Human
aaagagcuuuaguccuagagga

SEQ ID NO: 2468871 - RNA, 22 nt, Human
aaagagcuuucuucccgaaccc

SEQ ID NO: 2468872 - RNA, 18 nt, Human
aaagacuauucaaacagu

SEQ ID NO: 2468873 - RNA, 19 nt, Human
aaagacuauucaaacaguc

SEQ ID NO: 2468874 - RNA, 17 nt, Human
aaagacuauucaaacag

SEQ ID NO: 2468875 - RNA, 22 nt, Human
aaagaccuuuggagcaaagcug

SEQ ID NO: 2468876 - RNA, 23 nt, Human
aaagaccuuguguguauguguac

SEQ ID NO: 2468877 - RNA, 20 nt, Human
aaagaccuuguguguaugug

SEQ ID NO: 2468878 - RNA, 23 nt, Human
aaagacgaccagcauuuaaccaa

SEQ ID NO: 2468879 - RNA, 21 nt, Human
aaagacuauucaaacagucuc

SEQ ID NO: 2468880 - RNA, 15 nt, Human
aaagacuccaaagaa

SEQ ID NO: 2468881 - RNA, 21 nt, Human
aaagacuccaaagaaauguaa

SEQ ID NO: 2468882 - RNA, 19 nt, Human
aaagacugaccaauauugu

SEQ ID NO: 2468883 - RNA, 14 nt, Human
aaagacuccaaaga

SEQ ID NO: 2468884 - RNA, 13 nt, Human
aaagacagugaaa

SEQ ID NO: 2468885 - RNA, 12 nt, Human
aaacuuuucuca

SEQ ID NO: 2468886 - RNA, 14 nt, Human
aaacuuuucucaga

SEQ ID NO: 2468887 - RNA, 9 nt, Human
aaagacaga

SEQ ID NO: 2468888 - RNA, 19 nt, Human
aaagaccuuguguguaugu

SEQ ID NO: 2468889 - RNA, 17 nt, Human
aaagaccuuguguguau

SEQ ID NO: 2468890 - RNA, 13 nt, Human
aaagaccagacua

SEQ ID NO: 2468891 - RNA, 15 nt, Human
aaagaccauuuuucc

SEQ ID NO: 2468892 - RNA, 19 nt, Human
aaagacauucugacaucuu

SEQ ID NO: 2468893 - RNA, 18 nt, Human
aaagacauccauaaagaa

SEQ ID NO: 2468894 - RNA, 15 nt, Human
aaagacaugaauaug

SEQ ID NO: 2468895 - RNA, 19 nt, Human
aaagacauccauaaagaag

SEQ ID NO: 2468896 - RNA, 14 nt, Human
aaagacaucaagca

SEQ ID NO: 2468897 - RNA, 13 nt, Human
aaagacagaagcc

SEQ ID NO: 2468898 - RNA, 14 nt, Human
aaagacagagcugg

SEQ ID NO: 2468899 - RNA, 22 nt, Human
aaagacagggcugauaagcuaa

SEQ ID NO: 2468900 - RNA, 14 nt, Human
ggguggccucccaa

SEQ ID NO: 2468901 - RNA, 17 nt, Human
ggguggggggcuucaua

SEQ ID NO: 2468902 - RNA, 23 nt, Human
ggguggccuaagaguugagcucu

SEQ ID NO: 2468903 - RNA, 12 nt, Human
ggguggggcugc

SEQ ID NO: 2468904 - RNA, 19 nt, Human
ggguggggggcuucauaca

SEQ ID NO: 2468905 - RNA, 19 nt, Human
aaacuucagacauagaauu

SEQ ID NO: 2468906 - RNA, 23 nt, Human
aaacuucagcgguuuauauaagc

SEQ ID NO: 2468907 - RNA, 14 nt, Human
ggguggggcugcuc

SEQ ID NO: 2468908 - RNA, 19 nt, Human
aaacuuccagugcaacacu

SEQ ID NO: 2468909 - RNA, 16 nt, Human
aaacuuguauuaugug

SEQ ID NO: 2468910 - RNA, 19 nt, Human
aaacuuguaaauaaaggaa

SEQ ID NO: 2468911 - RNA, 16 nt, Human
aaacuuguaauuuuuu

SEQ ID NO: 2468912 - RNA, 11 nt, Human
aaacuuguaaa

SEQ ID NO: 2468913 - RNA, 12 nt, Human
aaacuuguaaau

SEQ ID NO: 2468914 - RNA, 24 nt, Human
aaacuuggcucgaaucucugugcc

SEQ ID NO: 2468915 - RNA, 18 nt, Human
aaacuugcuuuaugccuu

SEQ ID NO: 2468916 - RNA, 21 nt, Human
aaacuuccagugcaacacuga

SEQ ID NO: 2468917 - RNA, 14 nt, Human
aaacuuugcuaaau

SEQ ID NO: 2468918 - RNA, 20 nt, Human
aaacuuguaauuuuuuuaau

SEQ ID NO: 2468919 - RNA, 18 nt, Human
aaacuuuccucgccugac

SEQ ID NO: 2468920 - RNA, 17 nt, Human
aaaggagauuggaagga

SEQ ID NO: 2468921 - RNA, 19 nt, Human
aaaggagcccuuaucugug

SEQ ID NO: 2468922 - RNA, 15 nt, Human
aaaggagauaaaucu

SEQ ID NO: 2468923 - RNA, 14 nt, Human
aaaggagauaaauc

SEQ ID NO: 2468924 - RNA, 21 nt, Human
aaaggagagcuagcagcaggg

SEQ ID NO: 2468925 - RNA, 17 nt, Human
aaaggagagcuagcagc

SEQ ID NO: 2468926 - RNA, 22 nt, Human
aaaggaaagagggagguaagga

SEQ ID NO: 2468927 - RNA, 17 nt, Human
aaaggaaaucucacccc

SEQ ID NO: 2468928 - RNA, 12 nt, Human
aaaggaagccaa

SEQ ID NO: 2468929 - RNA, 14 nt, Human
aaaggaagccaaag

SEQ ID NO: 2468930 - RNA, 15 nt, Human
aaaggaagccaaaga

SEQ ID NO: 2468931 - RNA, 15 nt, Human
aaaggaaaugauuga

SEQ ID NO: 2468932 - RNA, 23 nt, Human
aaaggaaaucucaccccauccca

SEQ ID NO: 2468933 - RNA, 13 nt, Human
aaaggaagacuag

SEQ ID NO: 2468934 - RNA, 12 nt, Human
aaaggaagacua

SEQ ID NO: 2468935 - RNA, 14 nt, Human
aaagguacuucaaa

SEQ ID NO: 2468936 - RNA, 14 nt, Human
aaagguaaaucaga

SEQ ID NO: 2468937 - RNA, 15 nt, Human
aaaggggugcuuuua

SEQ ID NO: 2468938 - RNA, 17 nt, Human
aaagggucuugggaaau

SEQ ID NO: 2468939 - RNA, 10 nt, Human
aaagggugaa

SEQ ID NO: 2468940 - RNA, 14 nt, Human
aaagggugaagcua

SEQ ID NO: 2468941 - RNA, 19 nt, Human
aaagggugaagcuauuuau

SEQ ID NO: 2468942 - RNA, 21 nt, Human
aaagggugaagcuauuuaucu

SEQ ID NO: 2468943 - RNA, 18 nt, Human
aaagggugcugcuucccu

SEQ ID NO: 2468944 - RNA, 20 nt, Human
aaagggauggcaagaugugg

SEQ ID NO: 2468945 - RNA, 17 nt, Human
aaagggagagagagagg

SEQ ID NO: 2468946 - RNA, 23 nt, Human
aaagggagcacuggguugacuuu

SEQ ID NO: 2468947 - RNA, 20 nt, Human
aaagggagcagaacugaacc

SEQ ID NO: 2468948 - RNA, 18 nt, Human
aaagggagcuaucaggaa

SEQ ID NO: 2468949 - RNA, 22 nt, Human
aaagggacuuggaagcuccgcu

SEQ ID NO: 2468950 - RNA, 20 nt, Human
aaagggacugagaaauuuau

SEQ ID NO: 2468951 - RNA, 23 nt, Human
aaaggagcccuuaucugugcuca

SEQ ID NO: 2468952 - RNA, 21 nt, Human
aaagcucauauuuuguauaua

SEQ ID NO: 2468953 - RNA, 16 nt, Human
aaagcacuuggacucu

SEQ ID NO: 2468954 - RNA, 22 nt, Human
aaagcacugaccugucaugccc

SEQ ID NO: 2468955 - RNA, 15 nt, Human
aaagcucacuuuacu

SEQ ID NO: 2468956 - RNA, 20 nt, Human
aaagcuccucgagggcaggg

SEQ ID NO: 2468957 - RNA, 17 nt, Human
aaagcuccuagcagaga

SEQ ID NO: 2468958 - RNA, 13 nt, Human
aaagcucauauuu

SEQ ID NO: 2468959 - RNA, 16 nt, Human
aaagcuccuguccucc

SEQ ID NO: 2468960 - RNA, 13 nt, Human
aaagcuccugucc

SEQ ID NO: 2468961 - RNA, 15 nt, Human
aaagcugaaaacugc

SEQ ID NO: 2468962 - RNA, 17 nt, Human
aaagcacugacuucuaa

SEQ ID NO: 2468963 - RNA, 21 nt, Human
aaagcacugacuucuaaguaa

SEQ ID NO: 2468964 - RNA, 19 nt, Human
aaagcacgaaauguuauuu

SEQ ID NO: 2468965 - RNA, 22 nt, Human
aaagcaccagcuucuccaggcu

SEQ ID NO: 2468966 - RNA, 12 nt, Human
aaagcaccugcc

SEQ ID NO: 2468967 - RNA, 17 nt, Human
gguggaucacagaggcu

SEQ ID NO: 2468968 - RNA, 23 nt, Human
aaagcaccaaaauaagaaaagau

SEQ ID NO: 2468969 - RNA, 14 nt, Human
aaagcacggacucu

SEQ ID NO: 2468970 - RNA, 14 nt, Human
aaagcacuauacag

SEQ ID NO: 2468971 - RNA, 13 nt, Human
aaagcaccugccg

SEQ ID NO: 2468972 - RNA, 14 nt, Human
aaagcacugaccug

SEQ ID NO: 2468973 - RNA, 13 nt, Human
aaagcuuuccugc

SEQ ID NO: 2468974 - RNA, 12 nt, Human
aaagcuuuccug

SEQ ID NO: 2468975 - RNA, 15 nt, Human
aaagcuuguuaagau

SEQ ID NO: 2468976 - RNA, 15 nt, Human
aaagcuuuuagaaau

SEQ ID NO: 2468977 - RNA, 22 nt, Human
aaagcuuuccugccccaggccu

SEQ ID NO: 2468978 - RNA, 14 nt, Human
aaagcuuuccugcc

SEQ ID NO: 2468979 - RNA, 23 nt, Human
aaagcuuuccugccccaggccug

SEQ ID NO: 2468980 - RNA, 21 nt, Human
aaagcuuugcuuaugguaaua

SEQ ID NO: 2468981 - RNA, 12 nt, Human
aaagcugaaaac

SEQ ID NO: 2468982 - RNA, 15 nt, Human
aaagcugccuguagu

SEQ ID NO: 2468983 - RNA, 16 nt, Human
aaagcugccuguaguu

SEQ ID NO: 2468984 - RNA, 17 nt, Human
aaagcugccuguaguua

SEQ ID NO: 2468985 - RNA, 21 nt, Human
aaagcugccuguaguuaggaa

SEQ ID NO: 2468986 - RNA, 23 nt, Human
aaagcugccuguaguuaggaaau

SEQ ID NO: 2468987 - RNA, 13 nt, Human
aaagcugcugaca

SEQ ID NO: 2468988 - RNA, 21 nt, Human
aaagcugcucagggaaaagca

SEQ ID NO: 2468989 - RNA, 24 nt, Human
ggugauccacccaccucagccucc

SEQ ID NO: 2468990 - RNA, 23 nt, Human
ggugauccacccaccucagccuc

SEQ ID NO: 2468991 - RNA, 18 nt, Human
ggugauccacccaccuca

SEQ ID NO: 2468992 - RNA, 20 nt, Human
ggugauauccauucuuucug

SEQ ID NO: 2468993 - RNA, 23 nt, Human
ggugaaauuuauuaguuaauaua

SEQ ID NO: 2468994 - RNA, 19 nt, Human
ggugaacaaagcagccacg

SEQ ID NO: 2468995 - RNA, 18 nt, Human
ggugaacaaagcagccac

SEQ ID NO: 2468996 - RNA, 14 nt, Human
ggugaaagggagcu

SEQ ID NO: 2468997 - RNA, 16 nt, Human
ggugcaaugaccuuuc

SEQ ID NO: 2468998 - RNA, 13 nt, Human
ggugcaaugaccu

SEQ ID NO: 2468999 - RNA, 12 nt, Human
ggugcaaugacc

SEQ ID NO: 2469000 - RNA, 18 nt, Human
ggugcaaaguucccuacu

SEQ ID NO: 2469001 - RNA, 19 nt, Human
ggugaucaauuaaauguag

SEQ ID NO: 2469002 - RNA, 12 nt, Human
ggugcaaauccu

SEQ ID NO: 2469003 - RNA, 22 nt, Human
ggugcaacccaaggacugaggg

SEQ ID NO: 2469004 - RNA, 13 nt, Human
ggugaacagaaca

SEQ ID NO: 2469005 - RNA, 13 nt, Human
ggugaaagggagc

SEQ ID NO: 2469006 - RNA, 14 nt, Human
ggucgcccaggaga

SEQ ID NO: 2469007 - RNA, 13 nt, Human
ggucgaggcagga

SEQ ID NO: 2469008 - RNA, 15 nt, Human
gguccuuugggguga

SEQ ID NO: 2469009 - RNA, 20 nt, Human
ggucgaccccaaagccccuu

SEQ ID NO: 2469010 - RNA, 14 nt, Human
ggucgcccuggacu

SEQ ID NO: 2469011 - RNA, 12 nt, Human
ggucgcccagga

SEQ ID NO: 2469012 - RNA, 13 nt, Human
ggucgcccaggag

SEQ ID NO: 2469013 - RNA, 19 nt, Human
ggugcuuuuauagaggcua

SEQ ID NO: 2469014 - RNA, 21 nt, Human
ggugcuuguucccucucccug

SEQ ID NO: 2469015 - RNA, 20 nt, Human
ggugcugggaggagggagag

SEQ ID NO: 2469016 - RNA, 17 nt, Human
ggugcaugaucuugagc

SEQ ID NO: 2469017 - RNA, 19 nt, Human
ggugcauuacagagaggag

SEQ ID NO: 2469018 - RNA, 16 nt, Human
gguggaagaggggaca

SEQ ID NO: 2469019 - RNA, 19 nt, Human
gguggaagaagggagaaga

SEQ ID NO: 2469020 - RNA, 21 nt, Human
ggugcuuuuauagaggcuagc

SEQ ID NO: 2469021 - RNA, 19 nt, Human
gguggaaggcccgaggggc

SEQ ID NO: 2469022 - RNA, 16 nt, Human
gguggaaggcccgagg

SEQ ID NO: 2469023 - RNA, 15 nt, Human
gguggaaggaggcgc

SEQ ID NO: 2469024 - RNA, 13 nt, Human
gguggaagcccuc

SEQ ID NO: 2469025 - RNA, 18 nt, Human
gguggaagcccuccuucc

SEQ ID NO: 2469026 - RNA, 19 nt, Human
gguggaagcccuccuucca

SEQ ID NO: 2469027 - RNA, 20 nt, Human
gguggaagcccuccuuccac

SEQ ID NO: 2469028 - RNA, 15 nt, Human
gguggaauuauuuua

SEQ ID NO: 2469029 - RNA, 15 nt, Human
gguggagaagccauu

SEQ ID NO: 2469030 - RNA, 14 nt, Human
gguggagaagccau

SEQ ID NO: 2469031 - RNA, 13 nt, Human
gguggagaagcca

SEQ ID NO: 2469032 - RNA, 20 nt, Human
gguggaggguggggggcgcu

SEQ ID NO: 2469033 - RNA, 21 nt, Human
gguggagccaguaaacagagg

SEQ ID NO: 2469034 - RNA, 23 nt, Human
gguggagggccacaugggaggcu

SEQ ID NO: 2469035 - RNA, 13 nt, Human
gguggagggccac

SEQ ID NO: 2469036 - RNA, 15 nt, Human
gguggaggcuuccug

SEQ ID NO: 2469037 - RNA, 13 nt, Human
gguggaugccugg

SEQ ID NO: 2469038 - RNA, 15 nt, Human
gguggauauaaauau

SEQ ID NO: 2469039 - RNA, 15 nt, Human
gguggaucacagagg

SEQ ID NO: 2469040 - RNA, 16 nt, Human
gguggaucaccugagg

SEQ ID NO: 2469041 - RNA, 20 nt, Human
gguggagguugcagugagcu

SEQ ID NO: 2469042 - RNA, 13 nt, Human
gguggauauaaau

SEQ ID NO: 2469043 - RNA, 16 nt, Human
ggugcugggccccugc

SEQ ID NO: 2469044 - RNA, 15 nt, Human
ggugcugggccccug

SEQ ID NO: 2469045 - RNA, 13 nt, Human
ggugcugggcccc

SEQ ID NO: 2469046 - RNA, 11 nt, Human
ggugcugggcc

SEQ ID NO: 2469047 - RNA, 21 nt, Human
ggugcauauuuauaaaaauaa

SEQ ID NO: 2469048 - RNA, 21 nt, Human
ggugcauuugaggucuguucu

SEQ ID NO: 2469049 - RNA, 18 nt, Human
ggugcaguugacagcagg

SEQ ID NO: 2469050 - RNA, 16 nt, Human
ggugcagugugaaaag

SEQ ID NO: 2469051 - RNA, 20 nt, Human
ggugcaguugacagcaggug

SEQ ID NO: 2469052 - RNA, 16 nt, Human
ggugcaacccuuaccc

SEQ ID NO: 2469053 - RNA, 23 nt, Human
ggugcaacccaaggacugaggga

SEQ ID NO: 2469054 - RNA, 16 nt, Human
ggugcagagugcccag

SEQ ID NO: 2469055 - RNA, 17 nt, Human
ggugcagagugcccaga

SEQ ID NO: 2469056 - RNA, 19 nt, Human
ggugcagagugcccagaac

SEQ ID NO: 2469057 - RNA, 17 nt, Human
aaacuuaaucuaaaugg

SEQ ID NO: 2469058 - RNA, 18 nt, Human
aaacuuaaucuaaaugga

SEQ ID NO: 2469059 - RNA, 16 nt, Human
aaacuuaaucuaaaug

SEQ ID NO: 2469060 - RNA, 14 nt, Human
aaacuuaaucuaaa

SEQ ID NO: 2469061 - RNA, 18 nt, Human
ggguggcccauccccccu

SEQ ID NO: 2469062 - RNA, 13 nt, Human
ggguggcccaucc

SEQ ID NO: 2469063 - RNA, 17 nt, Human
ggguggccgcugagugg

SEQ ID NO: 2469064 - RNA, 21 nt, Human
ggguggccgcugaguggcagg

SEQ ID NO: 2469065 - RNA, 19 nt, Human
ggguggcccauccccccuc

SEQ ID NO: 2469066 - RNA, 22 nt, Human
ggguggccuaagaguugagcuc

SEQ ID NO: 2469067 - RNA, 11 nt, Human
ggguggcccau

SEQ ID NO: 2469068 - RNA, 19 nt, Human
ggguggcaccagcagccug

SEQ ID NO: 2469069 - RNA, 19 nt, Human
aaacuguguauuccaagac

SEQ ID NO: 2469070 - RNA, 14 nt, Human
ggguggcacugcca

SEQ ID NO: 2469071 - RNA, 19 nt, Human
aaacuguguggacugugau

SEQ ID NO: 2469072 - RNA, 20 nt, Human
aaacuguguggacugugaug

SEQ ID NO: 2469073 - RNA, 13 nt, Human
aaacucuccucug

SEQ ID NO: 2469074 - RNA, 22 nt, Human
aaacugcccccucugcccugcg

SEQ ID NO: 2469075 - RNA, 24 nt, Human
aaacucgaggacuguauuugugac

SEQ ID NO: 2469076 - RNA, 23 nt, Human
aaacucgaggacuguauuuguga

SEQ ID NO: 2469077 - RNA, 20 nt, Human
aaacucuaaacauuaaucaa

SEQ ID NO: 2469078 - RNA, 21 nt, Human
aaacucuaaacauuaaucaau

SEQ ID NO: 2469079 - RNA, 13 nt, Human
aaacugcuuguuu

SEQ ID NO: 2469080 - RNA, 14 nt, Human
aaacugcuuguuuc

SEQ ID NO: 2469081 - RNA, 17 nt, Human
aaacugcuuguuuccua

SEQ ID NO: 2469082 - RNA, 19 nt, Human
aaacugcuuguuuccuagc

SEQ ID NO: 2469083 - RNA, 21 nt, Human
aaacugcccccucugcccugc

SEQ ID NO: 2469084 - RNA, 17 nt, Human
aaacugcguuaaaggcu

SEQ ID NO: 2469085 - RNA, 20 nt, Human
aaacuguguacauaacugaa

SEQ ID NO: 2469086 - RNA, 21 nt, Human
aaacuguguacauaacugaaa

SEQ ID NO: 2469087 - RNA, 16 nt, Human
aaacuguguauuccaa

SEQ ID NO: 2469088 - RNA, 18 nt, Human
aaacuguguauuccaaga

SEQ ID NO: 2469089 - RNA, 10 nt, Human
aaacugugua

SEQ ID NO: 2469090 - RNA, 12 nt, Human
aaacugugcacc

SEQ ID NO: 2469091 - RNA, 22 nt, Human
aaacugcuuguuuccuagcaca

SEQ ID NO: 2469092 - RNA, 12 nt, Human
aaacugucccuu

SEQ ID NO: 2469093 - RNA, 11 nt, Human
aaacucaaaug

SEQ ID NO: 2469094 - RNA, 16 nt, Human
aaacucaccauguaaa

SEQ ID NO: 2469095 - RNA, 18 nt, Human
aaacucaccauguaaaag

SEQ ID NO: 2469096 - RNA, 16 nt, Human
aaacucaccugcuggc

SEQ ID NO: 2469097 - RNA, 18 nt, Human
aaacucaccugcuggccc

SEQ ID NO: 2469098 - RNA, 19 nt, Human
aaacucaccugcuggcccc

SEQ ID NO: 2469099 - RNA, 20 nt, Human
aaacucaccugcuggccccu

SEQ ID NO: 2469100 - RNA, 15 nt, Human
aaacucacugcucaa

SEQ ID NO: 2469101 - RNA, 22 nt, Human
aaacucaccugcuggccccuca

SEQ ID NO: 2469102 - RNA, 19 nt, Human
aaacucaaaacuuaacaua

SEQ ID NO: 2469103 - RNA, 18 nt, Human
aaacucaaaacuuaacau

SEQ ID NO: 2469104 - RNA, 13 nt, Human
aaacucaaaauau

SEQ ID NO: 2469105 - RNA, 15 nt, Human
aaacucaaacuuuuc

SEQ ID NO: 2469106 - RNA, 22 nt, Human
aaacucaaaacuuaacauauuu

SEQ ID NO: 2469107 - RNA, 21 nt, Human
aaacucaaaauauuuguacau

SEQ ID NO: 2469108 - RNA, 13 nt, Human
aaacuauuuaacu

SEQ ID NO: 2469109 - RNA, 17 nt, Human
aaacuauuuaacuugag

SEQ ID NO: 2469110 - RNA, 11 nt, Human
aaacuauuuau

SEQ ID NO: 2469111 - RNA, 13 nt, Human
aaacucaaaacuu

SEQ ID NO: 2469112 - RNA, 20 nt, Human
aaacuauuugucuuucagga

SEQ ID NO: 2469113 - RNA, 13 nt, Human
aaacuauuuaucu

SEQ ID NO: 2469114 - RNA, 22 nt, Human
aaacuauuuaucuguguuuuug

SEQ ID NO: 2469115 - RNA, 17 nt, Human
aaacucagggacagagc

SEQ ID NO: 2469116 - RNA, 13 nt, Human
aaacucagggaca

SEQ ID NO: 2469117 - RNA, 23 nt, Human
aaacucaggauggucaucuugga

SEQ ID NO: 2469118 - RNA, 23 nt, Human
aaacucagccucaauaagccuug

SEQ ID NO: 2469119 - RNA, 16 nt, Human
aaacucacugcucaag

SEQ ID NO: 2469120 - RNA, 20 nt, Human
aaacucacugcucaagaaga

SEQ ID NO: 2469121 - RNA, 19 nt, Human
aaacucagggacagagcca

SEQ ID NO: 2469122 - RNA, 18 nt, Human
aaacucagggacagagcc

SEQ ID NO: 2469123 - RNA, 15 nt, Human
aaacucauuuauaaa

SEQ ID NO: 2469124 - RNA, 24 nt, Human
aaacucauuuauaaagcuaaaaua

SEQ ID NO: 2469125 - RNA, 15 nt, Human
aaacucguuaauuug

SEQ ID NO: 2469126 - RNA, 22 nt, Human
aaacucgaggacuguauuugug

SEQ ID NO: 2469127 - RNA, 20 nt, Human
aaacucgaggacuguauuug

SEQ ID NO: 2469128 - RNA, 19 nt, Human
aaacucgaggacuguauuu

SEQ ID NO: 2469129 - RNA, 17 nt, Human
aaacucgaggacuguau

SEQ ID NO: 2469130 - RNA, 15 nt, Human
aaacucauuuccuau

SEQ ID NO: 2469131 - RNA, 16 nt, Human
aaacucgaggacugua

SEQ ID NO: 2469132 - RNA, 18 nt, Human
aaacuaggugcauauuua

SEQ ID NO: 2469133 - RNA, 17 nt, Human
aaacuaggaaauuuuuu

SEQ ID NO: 2469134 - RNA, 16 nt, Human
aaacguaugcauguga

SEQ ID NO: 2469135 - RNA, 16 nt, Human
aaaccuuuuuuaagau

SEQ ID NO: 2469136 - RNA, 15 nt, Human
aaaccuuuuuuaaga

SEQ ID NO: 2469137 - RNA, 17 nt, Human
aaacgguuaaaacuguc

SEQ ID NO: 2469138 - RNA, 15 nt, Human
aaacgguuaaaacug

SEQ ID NO: 2469139 - RNA, 16 nt, Human
aaacuaucaguuuguc

SEQ ID NO: 2469140 - RNA, 16 nt, Human
aaacuaucuuggugaa

SEQ ID NO: 2469141 - RNA, 11 nt, Human
aaacuaucagu

SEQ ID NO: 2469142 - RNA, 22 nt, Human
aaacuaggugcauauuuauaaa

SEQ ID NO: 2469143 - RNA, 17 nt, Human
aaacguaugcaugugaa

SEQ ID NO: 2469144 - RNA, 18 nt, Human
aaacuagggccaagccca

SEQ ID NO: 2469145 - RNA, 15 nt, Human
aaacauuaagauuga

SEQ ID NO: 2469146 - RNA, 20 nt, Human
aaacauuaagaaaaucauau

SEQ ID NO: 2469147 - RNA, 19 nt, Human
aaacauuaagaaaaucaua

SEQ ID NO: 2469148 - RNA, 18 nt, Human
aaacauuaagaaaaucau

SEQ ID NO: 2469149 - RNA, 20 nt, Human
aaacauuaagauugaggccu

SEQ ID NO: 2469150 - RNA, 15 nt, Human
aaacauuaugaugug

SEQ ID NO: 2469151 - RNA, 23 nt, Human
aaacauucugauuuggaaaaaga

SEQ ID NO: 2469152 - RNA, 12 nt, Human
aaacauucuauc

SEQ ID NO: 2469153 - RNA, 16 nt, Human
aaaccaagccguggcu

SEQ ID NO: 2469154 - RNA, 12 nt, Human
aaacauugaaga

SEQ ID NO: 2469155 - RNA, 16 nt, Human
aaacauugaaguaaug

SEQ ID NO: 2469156 - RNA, 20 nt, Human
aaaccacaaggcuguugcau

SEQ ID NO: 2469157 - RNA, 22 nt, Human
aaaccaagggggaugacaugug

SEQ ID NO: 2469158 - RNA, 23 nt, Human
aaaccaagucaagugaaaaagga

SEQ ID NO: 2469159 - RNA, 12 nt, Human
aaaccacagcag

SEQ ID NO: 2469160 - RNA, 18 nt, Human
aaaccucuaauuuauuuu

SEQ ID NO: 2469161 - RNA, 19 nt, Human
aaaccucuaacccaggucu

SEQ ID NO: 2469162 - RNA, 21 nt, Human
aaaccuccaaaacuccugccc

SEQ ID NO: 2469163 - RNA, 21 nt, Human
aaaccacaaggcuguugcaug

SEQ ID NO: 2469164 - RNA, 22 nt, Human
aaaccucacccgaggcugccca

SEQ ID NO: 2469165 - RNA, 18 nt, Human
aaaccuuuuauauuuagu

SEQ ID NO: 2469166 - RNA, 18 nt, Human
aaaccuuuguuugcaucu

SEQ ID NO: 2469167 - RNA, 13 nt, Human
aaaccuuuugaaa

SEQ ID NO: 2469168 - RNA, 20 nt, Human
aaaccuuuuggaaaaucugc

SEQ ID NO: 2469169 - RNA, 15 nt, Human
aaacgggcucagcaa

SEQ ID NO: 2469170 - RNA, 22 nt, Human
aaaccugaaaaaaaguuuacaa

SEQ ID NO: 2469171 - RNA, 18 nt, Human
aaaccugaccccugcuca

SEQ ID NO: 2469172 - RNA, 17 nt, Human
aaaccuuuagggcagcu

SEQ ID NO: 2469173 - RNA, 19 nt, Human
aaaccuuucaaauuucaca

SEQ ID NO: 2469174 - RNA, 11 nt, Human
aaaccuuucaa

SEQ ID NO: 2469175 - RNA, 17 nt, Human
aaaccuuucaaauuuca

SEQ ID NO: 2469176 - RNA, 15 nt, Human
aaaccucugugagca

SEQ ID NO: 2469177 - RNA, 11 nt, Human
aaaccucuguu

SEQ ID NO: 2469178 - RNA, 14 nt, Human
aaaccucuguucag

SEQ ID NO: 2469179 - RNA, 16 nt, Human
aaaccucuguucagug

SEQ ID NO: 2469180 - RNA, 17 nt, Human
aaaccucuguucagugu

SEQ ID NO: 2469181 - RNA, 16 nt, Human
aaaccugaaaaaaagu

SEQ ID NO: 2469182 - RNA, 21 nt, Human
aaaccucuguucaguguaaau

SEQ ID NO: 2469183 - RNA, 16 nt, Human
aaaccucuacuaaaaa

SEQ ID NO: 2469184 - RNA, 24 nt, Human
aaaccucuaauuuauuuugucgaa

SEQ ID NO: 2469185 - RNA, 20 nt, Human
aaaccucuaauuuauuuugu

SEQ ID NO: 2469186 - RNA, 19 nt, Human
aaaccucuaauuuauuuug

SEQ ID NO: 2469187 - RNA, 11 nt, Human
aaaccucuccu

SEQ ID NO: 2469188 - RNA, 22 nt, Human
aaaccucuccucauguucugcu

SEQ ID NO: 2469189 - RNA, 15 nt, Human
ggggguagagcugau

SEQ ID NO: 2469190 - RNA, 14 nt, Human
ggggguagagcuga

SEQ ID NO: 2469191 - RNA, 23 nt, Human
ggggggcccgccuggcagaacug

SEQ ID NO: 2469192 - RNA, 22 nt, Human
gggggucccagugggaggggca

SEQ ID NO: 2469193 - RNA, 18 nt, Human
gggggucccagugggagg

SEQ ID NO: 2469194 - RNA, 16 nt, Human
ggggguccacccagca

SEQ ID NO: 2469195 - RNA, 20 nt, Human
ggggguagagcugauccaga

SEQ ID NO: 2469196 - RNA, 22 nt, Human
gggggcuauagcuacaggaagc

SEQ ID NO: 2469197 - RNA, 19 nt, Human
gggggugcugggccccugc

SEQ ID NO: 2469198 - RNA, 19 nt, Human
ggguccaggggaugggagg

SEQ ID NO: 2469199 - RNA, 17 nt, Human
ggguccagggagcaggc

SEQ ID NO: 2469200 - RNA, 16 nt, Human
ggguccagggagcagg

SEQ ID NO: 2469201 - RNA, 13 nt, Human
ggggguggaggcu

SEQ ID NO: 2469202 - RNA, 17 nt, Human
ggguccccaucauccca

SEQ ID NO: 2469203 - RNA, 22 nt, Human
ggguccccaucaucccagcugc

SEQ ID NO: 2469204 - RNA, 23 nt, Human
gggucccaagcugggccccagcc

SEQ ID NO: 2469205 - RNA, 22 nt, Human
gggucccaagcugggccccagc

SEQ ID NO: 2469206 - RNA, 20 nt, Human
gggucccaagcugggcccca

SEQ ID NO: 2469207 - RNA, 17 nt, Human
gggucccaagcugggcc

SEQ ID NO: 2469208 - RNA, 15 nt, Human
gggucccaagcuggg

SEQ ID NO: 2469209 - RNA, 13 nt, Human
gggucccaagcug

SEQ ID NO: 2469210 - RNA, 12 nt, Human
ggguccaugggc

SEQ ID NO: 2469211 - RNA, 23 nt, Human
gggucccagugggaggggcaggc

SEQ ID NO: 2469212 - RNA, 22 nt, Human
gggucccagugggaggggcagg

SEQ ID NO: 2469213 - RNA, 17 nt, Human
gggucccagugggaggg

SEQ ID NO: 2469214 - RNA, 16 nt, Human
gggucccagugggagg

SEQ ID NO: 2469215 - RNA, 14 nt, Human
gggucccaguggga

SEQ ID NO: 2469216 - RNA, 17 nt, Human
gggucccacuuccccuc

SEQ ID NO: 2469217 - RNA, 16 nt, Human
gggucccagccacccc

SEQ ID NO: 2469218 - RNA, 15 nt, Human
gggucgcccuggacu

SEQ ID NO: 2469219 - RNA, 13 nt, Human
gggucgcccugga

SEQ ID NO: 2469220 - RNA, 16 nt, Human
aaacauuaagaaaauc

SEQ ID NO: 2469221 - RNA, 15 nt, Human
aaacauuaagaaaau

SEQ ID NO: 2469222 - RNA, 14 nt, Human
aaacauuaagaaaa

SEQ ID NO: 2469223 - RNA, 13 nt, Human
aaacauuaagaaa

SEQ ID NO: 2469224 - RNA, 20 nt, Human
gggucggcugaccaugcuca

SEQ ID NO: 2469225 - RNA, 12 nt, Human
aaacauuaagaa

SEQ ID NO: 2469226 - RNA, 15 nt, Human
gggucggcugaccau

SEQ ID NO: 2469227 - RNA, 14 nt, Human
gggucggcugacca

SEQ ID NO: 2469228 - RNA, 23 nt, Human
gggucggaacccaagcuuagaac

SEQ ID NO: 2469229 - RNA, 18 nt, Human
gggggccucagugccacu

SEQ ID NO: 2469230 - RNA, 17 nt, Human
gggggccucagugccac

SEQ ID NO: 2469231 - RNA, 15 nt, Human
gggggccucagugcc

SEQ ID NO: 2469232 - RNA, 12 nt, Human
gggggccucagu

SEQ ID NO: 2469233 - RNA, 23 nt, Human
ggggccuacagcuuugaucccug

SEQ ID NO: 2469234 - RNA, 20 nt, Human
ggggccuaggccucagccag

SEQ ID NO: 2469235 - RNA, 15 nt, Human
ggggccucagugcca

SEQ ID NO: 2469236 - RNA, 14 nt, Human
gggggccaugagcu

SEQ ID NO: 2469237 - RNA, 15 nt, Human
gggggccaugagcuc

SEQ ID NO: 2469238 - RNA, 17 nt, Human
gggggccccagucagcc

SEQ ID NO: 2469239 - RNA, 21 nt, Human
gggggccaugaggccucagug

SEQ ID NO: 2469240 - RNA, 20 nt, Human
gggggccccagucagccucu

SEQ ID NO: 2469241 - RNA, 19 nt, Human
gggggccccagucagccuc

SEQ ID NO: 2469242 - RNA, 21 nt, Human
gggggccccagucagccucuc

SEQ ID NO: 2469243 - RNA, 23 nt, Human
ggggccuaucagugugcccccca

SEQ ID NO: 2469244 - RNA, 19 nt, Human
ggggccuaucagugugccc

SEQ ID NO: 2469245 - RNA, 23 nt, Human
ggggccuaggccucagccagaga

SEQ ID NO: 2469246 - RNA, 12 nt, Human
ggggccucaggu

SEQ ID NO: 2469247 - RNA, 14 nt, Human
gggggccaggugca

SEQ ID NO: 2469248 - RNA, 19 nt, Human
ggggacuuacaugauucau

SEQ ID NO: 2469249 - RNA, 21 nt, Human
ggggcccugguccuuccaggc

SEQ ID NO: 2469250 - RNA, 14 nt, Human
ggggccgcugccac

SEQ ID NO: 2469251 - RNA, 22 nt, Human
ggggccgcugccacccaccucc

SEQ ID NO: 2469252 - RNA, 21 nt, Human
ggggacuagccccuguggaga

SEQ ID NO: 2469253 - RNA, 16 nt, Human
ggggacucagcccuga

SEQ ID NO: 2469254 - RNA, 14 nt, Human
ggggacugucuuuc

SEQ ID NO: 2469255 - RNA, 11 nt, Human
ggggagaaagu

SEQ ID NO: 2469256 - RNA, 14 nt, Human
ggggacucagcccu

SEQ ID NO: 2469257 - RNA, 15 nt, Human
ggggacucagcccug

SEQ ID NO: 2469258 - RNA, 21 nt, Human
ggggacgcugguagagaugga

SEQ ID NO: 2469259 - RNA, 23 nt, Human
ggggacgcugguagagauggagg

SEQ ID NO: 2469260 - RNA, 23 nt, Human
ggggacggggggccccagucagc

SEQ ID NO: 2469261 - RNA, 18 nt, Human
ggggacggggggccccag

SEQ ID NO: 2469262 - RNA, 13 nt, Human
ggggacucagccc

SEQ ID NO: 2469263 - RNA, 21 nt, Human
ggggacccaauguaggagcug

SEQ ID NO: 2469264 - RNA, 15 nt, Human
ggggacccccgcccc

SEQ ID NO: 2469265 - RNA, 13 nt, Human
ggggacccccgcc

SEQ ID NO: 2469266 - RNA, 11 nt, Human
ggggacccugu

SEQ ID NO: 2469267 - RNA, 18 nt, Human
ggggacccccgcccccug

SEQ ID NO: 2469268 - RNA, 15 nt, Human
aaacagucucaggaa

SEQ ID NO: 2469269 - RNA, 16 nt, Human
aaacauggccuuugcu

SEQ ID NO: 2469270 - RNA, 14 nt, Human
aaacaguagugaua

SEQ ID NO: 2469271 - RNA, 17 nt, Human
aaacaggucaauacagu

SEQ ID NO: 2469272 - RNA, 17 nt, Human
aaacauggccuuugcuu

SEQ ID NO: 2469273 - RNA, 17 nt, Human
aaacaugguuacaauca

SEQ ID NO: 2469274 - RNA, 15 nt, Human
aaacaugguuacaau

SEQ ID NO: 2469275 - RNA, 22 nt, Human
aaacaugggguuggcugggccc

SEQ ID NO: 2469276 - RNA, 21 nt, Human
aaacaugguagaauuggagag

SEQ ID NO: 2469277 - RNA, 17 nt, Human
aaacauguuagaagcaa

SEQ ID NO: 2469278 - RNA, 22 nt, Human
aaacaugucuccuauccugguu

SEQ ID NO: 2469279 - RNA, 18 nt, Human
aaacauguacaaaaucga

SEQ ID NO: 2469280 - RNA, 16 nt, Human
aaacauguuagaagca

SEQ ID NO: 2469281 - RNA, 14 nt, Human
aaacauguguuuua

SEQ ID NO: 2469282 - RNA, 13 nt, Human
ggggaaggcaggg

SEQ ID NO: 2469283 - RNA, 23 nt, Human
ggggaagggccagucugggcugc

SEQ ID NO: 2469284 - RNA, 22 nt, Human
ggggaagggccagucugggcug

SEQ ID NO: 2469285 - RNA, 13 nt, Human
ggggaagggccag

SEQ ID NO: 2469286 - RNA, 13 nt, Human
ggggaagcccugg

SEQ ID NO: 2469287 - RNA, 16 nt, Human
ggggaagaguguacug

SEQ ID NO: 2469288 - RNA, 18 nt, Human
ggggaagagcacagcccu

SEQ ID NO: 2469289 - RNA, 14 nt, Human
ggggaagagcacag

SEQ ID NO: 2469290 - RNA, 14 nt, Human
ggggaagcccugga

SEQ ID NO: 2469291 - RNA, 22 nt, Human
ggggaauguuugccucugccuc

SEQ ID NO: 2469292 - RNA, 18 nt, Human
ggggaauguuugccucug

SEQ ID NO: 2469293 - RNA, 16 nt, Human
ggggaccagagcugcc

SEQ ID NO: 2469294 - RNA, 15 nt, Human
ggggaccagagcugc

SEQ ID NO: 2469295 - RNA, 22 nt, Human
ggggacagaggccugcccgggc

SEQ ID NO: 2469296 - RNA, 19 nt, Human
ggggaauugaggacacuga

SEQ ID NO: 2469297 - RNA, 16 nt, Human
ggggaaguccucuggg

SEQ ID NO: 2469298 - RNA, 15 nt, Human
ggggaauucaucucu

SEQ ID NO: 2469299 - RNA, 13 nt, Human
gggaugagaaagg

SEQ ID NO: 2469300 - RNA, 20 nt, Human
gggaugagcauggagcuggc

SEQ ID NO: 2469301 - RNA, 16 nt, Human
gggaugagaagagggg

SEQ ID NO: 2469302 - RNA, 15 nt, Human
gggaugagaguuuug

SEQ ID NO: 2469303 - RNA, 20 nt, Human
gggaugacaugcacucagcu

SEQ ID NO: 2469304 - RNA, 17 nt, Human
gggaugacuagaggcag

SEQ ID NO: 2469305 - RNA, 15 nt, Human
gggaugacugugauu

SEQ ID NO: 2469306 - RNA, 23 nt, Human
gggaugacuagaggcagggaggg

SEQ ID NO: 2469307 - RNA, 16 nt, Human
aaaauguucagaaggu

SEQ ID NO: 2469308 - RNA, 16 nt, Human
aaaauguuauuuaaca

SEQ ID NO: 2469309 - RNA, 22 nt, Human
gggaugaugccacaccaagcug

SEQ ID NO: 2469310 - RNA, 20 nt, Human
gggaugagcucaagcaggaa

SEQ ID NO: 2469311 - RNA, 15 nt, Human
gggaugagccgcugu

SEQ ID NO: 2469312 - RNA, 21 nt, Human
gggaugagcauggagcuggcc

SEQ ID NO: 2469313 - RNA, 17 nt, Human
gggaugccaucuguggg

SEQ ID NO: 2469314 - RNA, 17 nt, Human
aaaauguugaaaaguca

SEQ ID NO: 2469315 - RNA, 19 nt, Human
aaaauguugaaaagucaaa

SEQ ID NO: 2469316 - RNA, 13 nt, Human
aaaauguugaaaa

SEQ ID NO: 2469317 - RNA, 22 nt, Human
aaaauguuggauuuauaaaugc

SEQ ID NO: 2469318 - RNA, 20 nt, Human
aaaauguuggauuuauaaau

SEQ ID NO: 2469319 - RNA, 19 nt, Human
aaaauguuggauuuauaaa

SEQ ID NO: 2469320 - RNA, 15 nt, Human
aaaauguuggauuua

SEQ ID NO: 2469321 - RNA, 14 nt, Human
aaaauguugagaau

SEQ ID NO: 2469322 - RNA, 18 nt, Human
aaaauguuuuagcaauuu

SEQ ID NO: 2469323 - RNA, 15 nt, Human
aaaauguuuuagcaa

SEQ ID NO: 2469324 - RNA, 21 nt, Human
aaaauguuggucauuuuaugu

SEQ ID NO: 2469325 - RNA, 14 nt, Human
aaaauuuaagcauu

SEQ ID NO: 2469326 - RNA, 15 nt, Human
aaaauuuaagcauug

SEQ ID NO: 2469327 - RNA, 16 nt, Human
aaaauuuaagcauugu

SEQ ID NO: 2469328 - RNA, 15 nt, Human
aaaauuuaagugcgu

SEQ ID NO: 2469329 - RNA, 19 nt, Human
aaaauuuaaguaucuuuuu

SEQ ID NO: 2469330 - RNA, 21 nt, Human
aaaauuuaagcauuguuugcu

SEQ ID NO: 2469331 - RNA, 23 nt, Human
aaaauuuaagcauuguuugcuua

SEQ ID NO: 2469332 - RNA, 22 nt, Human
aaaauuuguuuugacggaugau

SEQ ID NO: 2469333 - RNA, 21 nt, Human
aaaauuuuauaaaauuaagca

SEQ ID NO: 2469334 - RNA, 20 nt, Human
aaaauuucaacaaguagcua

SEQ ID NO: 2469335 - RNA, 16 nt, Human
aaaauuuguuuugacg

SEQ ID NO: 2469336 - RNA, 23 nt, Human
aaaauuuaguuuuuguucuuaau

SEQ ID NO: 2469337 - RNA, 19 nt, Human
aaaauuuaguuuuuguucu

SEQ ID NO: 2469338 - RNA, 16 nt, Human
aaaauuuaguuuuugu

SEQ ID NO: 2469339 - RNA, 15 nt, Human
aaaauuuaguuuuug

SEQ ID NO: 2469340 - RNA, 23 nt, Human
aaaauuuaagugcguguguagag

SEQ ID NO: 2469341 - RNA, 18 nt, Human
aaaauuuaagugcgugug

SEQ ID NO: 2469342 - RNA, 19 nt, Human
aaaauuuagaaauauaauu

SEQ ID NO: 2469343 - RNA, 17 nt, Human
aaacaaagguugagaug

SEQ ID NO: 2469344 - RNA, 22 nt, Human
aaacaaagcuuagcaggagagg

SEQ ID NO: 2469345 - RNA, 17 nt, Human
aaacaaagcuuagcagg

SEQ ID NO: 2469346 - RNA, 15 nt, Human
aaacaaagcuuagca

SEQ ID NO: 2469347 - RNA, 14 nt, Human
aaaauuuuauagcu

SEQ ID NO: 2469348 - RNA, 13 nt, Human
aaacaaagccaga

SEQ ID NO: 2469349 - RNA, 20 nt, Human
aaaauuuugauguuuuaagg

SEQ ID NO: 2469350 - RNA, 13 nt, Human
aaaauuuuauucc

SEQ ID NO: 2469351 - RNA, 12 nt, Human
aaacacagcaag

SEQ ID NO: 2469352 - RNA, 14 nt, Human
aaacacagcaaggg

SEQ ID NO: 2469353 - RNA, 16 nt, Human
aaacacaguuacacuu

SEQ ID NO: 2469354 - RNA, 13 nt, Human
aaacacaguuaca

SEQ ID NO: 2469355 - RNA, 18 nt, Human
aaacacaguuacacuugu

SEQ ID NO: 2469356 - RNA, 20 nt, Human
aaacacaaaaguuagcugag

SEQ ID NO: 2469357 - RNA, 21 nt, Human
aaacacagacauucugccagg

SEQ ID NO: 2469358 - RNA, 20 nt, Human
aaacacaguguuuuuguaaa

SEQ ID NO: 2469359 - RNA, 19 nt, Human
aaacacaguguuuuuguaa

SEQ ID NO: 2469360 - RNA, 16 nt, Human
aaacacaguguuuuug

SEQ ID NO: 2469361 - RNA, 11 nt, Human
aaacacauuuu

SEQ ID NO: 2469362 - RNA, 18 nt, Human
aaacacaucuuuccuguc

SEQ ID NO: 2469363 - RNA, 14 nt, Human
aaacacaucuuccc

SEQ ID NO: 2469364 - RNA, 16 nt, Human
aaacacaucuucccua

SEQ ID NO: 2469365 - RNA, 19 nt, Human
aaacaaauucauauucugu

SEQ ID NO: 2469366 - RNA, 17 nt, Human
aaacaaauaugcaaaag

SEQ ID NO: 2469367 - RNA, 14 nt, Human
aaacaaauaugcaa

SEQ ID NO: 2469368 - RNA, 13 nt, Human
aaacaaauaugca

SEQ ID NO: 2469369 - RNA, 17 nt, Human
aaacaaaguuacuaggu

SEQ ID NO: 2469370 - RNA, 23 nt, Human
aaacaaagcuuagcaggagagga

SEQ ID NO: 2469371 - RNA, 12 nt, Human
aaacaaauaugc

SEQ ID NO: 2469372 - RNA, 15 nt, Human
aaacaauaaaugugc

SEQ ID NO: 2469373 - RNA, 16 nt, Human
aaacaauaaaugugca

SEQ ID NO: 2469374 - RNA, 16 nt, Human
aaacaacaauuucuac

SEQ ID NO: 2469375 - RNA, 21 nt, Human
aaacaaauucauauucugucu

SEQ ID NO: 2469376 - RNA, 22 nt, Human
aaacaauaguaauucucaggcc

SEQ ID NO: 2469377 - RNA, 21 nt, Human
aaacaauacucauaaugugaa

SEQ ID NO: 2469378 - RNA, 14 nt, Human
aaacaauauuguuu

SEQ ID NO: 2469379 - RNA, 15 nt, Human
aaacaauauuguuuc

SEQ ID NO: 2469380 - RNA, 11 nt, Human
aaacacagcaa

SEQ ID NO: 2469381 - RNA, 19 nt, Human
aaacacaaacgggcucagc

SEQ ID NO: 2469382 - RNA, 16 nt, Human
aaacaauauuguuucu

SEQ ID NO: 2469383 - RNA, 17 nt, Human
aaacaauauuguuucua

SEQ ID NO: 2469384 - RNA, 15 nt, Human
guaaagaaagagaga

SEQ ID NO: 2469385 - RNA, 16 nt, Human
guaaagaaagagagaa

SEQ ID NO: 2469386 - RNA, 17 nt, Human
guaaagaaagagagaaa

SEQ ID NO: 2469387 - RNA, 18 nt, Human
guaaagaaagagagaaaa

SEQ ID NO: 2469388 - RNA, 19 nt, Human
guaaagaaagagagaaaau

SEQ ID NO: 2469389 - RNA, 20 nt, Human
guaaagaaagagagaaaaua

SEQ ID NO: 2469390 - RNA, 21 nt, Human
guaaagaaagagagaaaauaa

SEQ ID NO: 2469391 - RNA, 22 nt, Human
guaaagaaagagagaaaauaaa

SEQ ID NO: 2469392 - RNA, 16 nt, Human
guaaacuguggaugau

SEQ ID NO: 2469393 - RNA, 20 nt, Human
guaaacuguguauuccaaga

SEQ ID NO: 2469394 - RNA, 16 nt, Human
guaaacuuuuugugcu

SEQ ID NO: 2469395 - RNA, 14 nt, Human
guaaagaaagagag

SEQ ID NO: 2469396 - RNA, 15 nt, Human
guaacugcugaaaac

SEQ ID NO: 2469397 - RNA, 14 nt, Human
guaacugcugaaaa

SEQ ID NO: 2469398 - RNA, 19 nt, Human
guaacucuaauucccauuu

SEQ ID NO: 2469399 - RNA, 22 nt, Human
guaacugcauugagaacugcau

SEQ ID NO: 2469400 - RNA, 18 nt, Human
guaacugcauugagaacu

SEQ ID NO: 2469401 - RNA, 19 nt, Human
guaacugcauugagaacug

SEQ ID NO: 2469402 - RNA, 15 nt, Human
guaacucaucuguca

SEQ ID NO: 2469403 - RNA, 13 nt, Human
guaacucaucugu

SEQ ID NO: 2469404 - RNA, 23 nt, Human
guaaagaaagagagaaaauaaaa

SEQ ID NO: 2469405 - RNA, 21 nt, Human
guaaagaaauuuaaaagacac

SEQ ID NO: 2469406 - RNA, 23 nt, Human
guaacucuaauucccauuuugca

SEQ ID NO: 2469407 - RNA, 12 nt, Human
guaacuccacca

SEQ ID NO: 2469408 - RNA, 17 nt, Human
guaacuccaccaaccca

SEQ ID NO: 2469409 - RNA, 13 nt, Human
guaacugacaacu

SEQ ID NO: 2469410 - RNA, 20 nt, Human
guaauaggcguaacuaauuu

SEQ ID NO: 2469411 - RNA, 17 nt, Human
guaauagauuauaguug

SEQ ID NO: 2469412 - RNA, 19 nt, Human
guaauaagacauaacguuu

SEQ ID NO: 2469413 - RNA, 14 nt, Human
guaauaagacauaa

SEQ ID NO: 2469414 - RNA, 13 nt, Human
guaauaagacaua

SEQ ID NO: 2469415 - RNA, 13 nt, Human
guaauauauugcu

SEQ ID NO: 2469416 - RNA, 12 nt, Human
guaauauauugc

SEQ ID NO: 2469417 - RNA, 16 nt, Human
guaauaaauaugagug

SEQ ID NO: 2469418 - RNA, 14 nt, Human
guaauaaauaugag

SEQ ID NO: 2469419 - RNA, 13 nt, Human
guaauaaauauga

SEQ ID NO: 2469420 - RNA, 22 nt, Human
guaauaacugugaaguuuacau

SEQ ID NO: 2469421 - RNA, 16 nt, Human
guaauaacugugaagu

SEQ ID NO: 2469422 - RNA, 15 nt, Human
guaauaacugugaag

SEQ ID NO: 2469423 - RNA, 14 nt, Human
guaacuggcugugu

SEQ ID NO: 2469424 - RNA, 15 nt, Human
guaauaaacuuuaau

SEQ ID NO: 2469425 - RNA, 12 nt, Human
guaauaaauaug

SEQ ID NO: 2469426 - RNA, 11 nt, Human
guaauaaauau

SEQ ID NO: 2469427 - RNA, 21 nt, Human
guaauuuaaacaggcccagca

SEQ ID NO: 2469428 - RNA, 20 nt, Human
guaauuuaaacaggcccagc

SEQ ID NO: 2469429 - RNA, 17 nt, Human
guaauuuaguuauugau

SEQ ID NO: 2469430 - RNA, 19 nt, Human
guaauuuaaacaggcccag

SEQ ID NO: 2469431 - RNA, 16 nt, Human
guaauuuaaacaggcc

SEQ ID NO: 2469432 - RNA, 14 nt, Human
guaauuuaaacagg

SEQ ID NO: 2469433 - RNA, 23 nt, Human
guaauuuaaaauugugauguguc

SEQ ID NO: 2469434 - RNA, 16 nt, Human
guaauuugaggacaac

SEQ ID NO: 2469435 - RNA, 22 nt, Human
guaauuugugauacaaugcugu

SEQ ID NO: 2469436 - RNA, 22 nt, Human
guaauuucuuugccuguucagu

SEQ ID NO: 2469437 - RNA, 23 nt, Human
guaauuugagagaaauaugaaga

SEQ ID NO: 2469438 - RNA, 14 nt, Human
guaauuucuuugcc

SEQ ID NO: 2469439 - RNA, 13 nt, Human
guaauuucuuugc

SEQ ID NO: 2469440 - RNA, 11 nt, Human
guaauuuauuu

SEQ ID NO: 2469441 - RNA, 19 nt, Human
guaauuuaaaauugugaug

SEQ ID NO: 2469442 - RNA, 20 nt, Human
guaauuuaaaauugugaugu

SEQ ID NO: 2469443 - RNA, 17 nt, Human
guaauuguuguuuguau

SEQ ID NO: 2469444 - RNA, 19 nt, Human
guaauuguuguuuguaugu

SEQ ID NO: 2469445 - RNA, 21 nt, Human
guaauuguuguuuguauguau

SEQ ID NO: 2469446 - RNA, 23 nt, Human
guaauuguuguuuguauguauaa

SEQ ID NO: 2469447 - RNA, 21 nt, Human
guaauuguugcuaaucuucuu

SEQ ID NO: 2469448 - RNA, 12 nt, Human
guaaucccagcu

SEQ ID NO: 2469449 - RNA, 17 nt, Human
guaaucccagcuacuca

SEQ ID NO: 2469450 - RNA, 18 nt, Human
guaaucccagcuacucag

SEQ ID NO: 2469451 - RNA, 21 nt, Human
guaaucccagcuacucaggag

SEQ ID NO: 2469452 - RNA, 14 nt, Human
guaauaugcacaca

SEQ ID NO: 2469453 - RNA, 16 nt, Human
guaauaugcacacauu

SEQ ID NO: 2469454 - RNA, 17 nt, Human
guaauaugcacacauuu

SEQ ID NO: 2469455 - RNA, 18 nt, Human
guaauaugcacacauuuu

SEQ ID NO: 2469456 - RNA, 21 nt, Human
guaauccaagcaaaugugaau

SEQ ID NO: 2469457 - RNA, 20 nt, Human
guaauauauugcugcuggua

SEQ ID NO: 2469458 - RNA, 18 nt, Human
guaauauauugcugcugg

SEQ ID NO: 2469459 - RNA, 16 nt, Human
guaauauauugcugcu

SEQ ID NO: 2469460 - RNA, 15 nt, Human
guaauauauugcugc

SEQ ID NO: 2469461 - RNA, 22 nt, Human
guaaucauuucuugggcccucc

SEQ ID NO: 2469462 - RNA, 23 nt, Human
guaaucauuucuugggcccuccu

SEQ ID NO: 2469463 - RNA, 20 nt, Human
guaaucccagcacuuuggga

SEQ ID NO: 2469464 - RNA, 18 nt, Human
guaaucccagcacuuugg

SEQ ID NO: 2469465 - RNA, 13 nt, Human
guaaucccagcag

SEQ ID NO: 2469466 - RNA, 15 nt, Human
guaaucccagcacuu

SEQ ID NO: 2469467 - RNA, 16 nt, Human
guaaucccagcacuuu

SEQ ID NO: 2469468 - RNA, 14 nt, Human
guaaucccagcacu

SEQ ID NO: 2469469 - RNA, 17 nt, Human
guaauccaucacuagcc

SEQ ID NO: 2469470 - RNA, 12 nt, Human
guaaucccagca

SEQ ID NO: 2469471 - RNA, 15 nt, Human
guaauccaccugccu

SEQ ID NO: 2469472 - RNA, 21 nt, Human
aaauaauuuuuauauuugaaa

SEQ ID NO: 2469473 - RNA, 23 nt, Human
guacacugccuucucaacuccaa

SEQ ID NO: 2469474 - RNA, 17 nt, Human
guacacguguccuguag

SEQ ID NO: 2469475 - RNA, 14 nt, Human
guacacugaauauu

SEQ ID NO: 2469476 - RNA, 15 nt, Human
guacacugaauauuu

SEQ ID NO: 2469477 - RNA, 15 nt, Human
guacacguguccugu

SEQ ID NO: 2469478 - RNA, 14 nt, Human
guacacguguccug

SEQ ID NO: 2469479 - RNA, 21 nt, Human
guaauuuuguucuaguuuuca

SEQ ID NO: 2469480 - RNA, 21 nt, Human
guaauuuuuuuaauuuacaaa

SEQ ID NO: 2469481 - RNA, 20 nt, Human
guacacagcucuagacacug

SEQ ID NO: 2469482 - RNA, 14 nt, Human
guaauuuugccaaa

SEQ ID NO: 2469483 - RNA, 18 nt, Human
guaauuuuauaugaagau

SEQ ID NO: 2469484 - RNA, 15 nt, Human
guaauuuuauaugaa

SEQ ID NO: 2469485 - RNA, 15 nt, Human
aaauacacacucaaa

SEQ ID NO: 2469486 - RNA, 23 nt, Human
aaauaauuuuuauauuugaaaua

SEQ ID NO: 2469487 - RNA, 22 nt, Human
aaauaauuuuuauauuugaaau

SEQ ID NO: 2469488 - RNA, 15 nt, Human
aaauacaaaacuucc

SEQ ID NO: 2469489 - RNA, 17 nt, Human
aaauacagcuggauugg

SEQ ID NO: 2469490 - RNA, 23 nt, Human
aaauacagauuuugauagcaaag

SEQ ID NO: 2469491 - RNA, 17 nt, Human
aaauacagauuuugaua

SEQ ID NO: 2469492 - RNA, 22 nt, Human
aaauacagacacuaaguuauag

SEQ ID NO: 2469493 - RNA, 15 nt, Human
aaauacagauuuuga

SEQ ID NO: 2469494 - RNA, 20 nt, Human
aaauacaguuugucacauga

SEQ ID NO: 2469495 - RNA, 22 nt, Human
aaauacaguuugucacaugaaa

SEQ ID NO: 2469496 - RNA, 22 nt, Human
aaauacagucuuccauuugcaa

SEQ ID NO: 2469497 - RNA, 23 nt, Human
aaauacagucuuccauuugcaag

SEQ ID NO: 2469498 - RNA, 16 nt, Human
aaauacauauuuccaa

SEQ ID NO: 2469499 - RNA, 13 nt, Human
aaauacaugacau

SEQ ID NO: 2469500 - RNA, 14 nt, Human
aaauacaugcaucu

SEQ ID NO: 2469501 - RNA, 17 nt, Human
aaauacagacacuaagu

SEQ ID NO: 2469502 - RNA, 16 nt, Human
aaauacagacacuaag

SEQ ID NO: 2469503 - RNA, 14 nt, Human
aaauacagacacua

SEQ ID NO: 2469504 - RNA, 23 nt, Human
aaauacaccaccucacuccuguu

SEQ ID NO: 2469505 - RNA, 22 nt, Human
aaauacaccaccucacuccugu

SEQ ID NO: 2469506 - RNA, 21 nt, Human
aaauacaccaccucacuccug

SEQ ID NO: 2469507 - RNA, 17 nt, Human
aaauacacaaguaaaca

SEQ ID NO: 2469508 - RNA, 17 nt, Human
aaauacagauagauaua

SEQ ID NO: 2469509 - RNA, 19 nt, Human
aaauacacacucaaaucaa

SEQ ID NO: 2469510 - RNA, 19 nt, Human
aaauacaacuuaaauaaua

SEQ ID NO: 2469511 - RNA, 18 nt, Human
aaauacacauagcaugua

SEQ ID NO: 2469512 - RNA, 18 nt, Human
aaauaccagccaguaaau

SEQ ID NO: 2469513 - RNA, 20 nt, Human
aaauacuauuuaaagccucc

SEQ ID NO: 2469514 - RNA, 15 nt, Human
aaauacuacuccugu

SEQ ID NO: 2469515 - RNA, 14 nt, Human
aaauacuacuccug

SEQ ID NO: 2469516 - RNA, 23 nt, Human
aaauaccaaaauuauuucagaaa

SEQ ID NO: 2469517 - RNA, 21 nt, Human
aaauaccaaaauuauuucaga

SEQ ID NO: 2469518 - RNA, 16 nt, Human
aaauacucauguguau

SEQ ID NO: 2469519 - RNA, 15 nt, Human
aaauacucaugugua

SEQ ID NO: 2469520 - RNA, 14 nt, Human
aaauacucaugugu

SEQ ID NO: 2469521 - RNA, 22 nt, Human
aaauacuauuuuuacugccacu

SEQ ID NO: 2469522 - RNA, 21 nt, Human
aaauacuauuuuuacugccac

SEQ ID NO: 2469523 - RNA, 16 nt, Human
aaauacuauuuuuacu

SEQ ID NO: 2469524 - RNA, 17 nt, Human
aaauacugccagaugcu

SEQ ID NO: 2469525 - RNA, 13 nt, Human
aaauacugccaga

SEQ ID NO: 2469526 - RNA, 17 nt, Human
aaauacugcaagaaaau

SEQ ID NO: 2469527 - RNA, 21 nt, Human
aaauacucauguguaugggca

SEQ ID NO: 2469528 - RNA, 17 nt, Human
aaauacucauguguaug

SEQ ID NO: 2469529 - RNA, 20 nt, Human
aaauacugccagaugcugau

SEQ ID NO: 2469530 - RNA, 18 nt, Human
aaauacugccagaugcug

SEQ ID NO: 2469531 - RNA, 14 nt, Human
aaauacuguacaau

SEQ ID NO: 2469532 - RNA, 15 nt, Human
aaauacuguacaaug

SEQ ID NO: 2469533 - RNA, 14 nt, Human
aaauauaauugaca

SEQ ID NO: 2469534 - RNA, 23 nt, Human
aaauacugccagaugcugauguu

SEQ ID NO: 2469535 - RNA, 15 nt, Human
aaauauacacacagc

SEQ ID NO: 2469536 - RNA, 21 nt, Human
aaaguacuucuccacccugcu

SEQ ID NO: 2469537 - RNA, 20 nt, Human
aaaguacuucuccacccugc

SEQ ID NO: 2469538 - RNA, 16 nt, Human
aaaguaguccugugaa

SEQ ID NO: 2469539 - RNA, 21 nt, Human
aaaguaguaaaaauuaaaaaa

SEQ ID NO: 2469540 - RNA, 23 nt, Human
aaaguacuucuccacccugcucu

SEQ ID NO: 2469541 - RNA, 18 nt, Human
aaaguauguuagugcaaa

SEQ ID NO: 2469542 - RNA, 18 nt, Human
aaaguaucccuacuguaa

SEQ ID NO: 2469543 - RNA, 14 nt, Human
aaaguaguaaaaau

SEQ ID NO: 2469544 - RNA, 13 nt, Human
aaaguauauauag

SEQ ID NO: 2469545 - RNA, 17 nt, Human
aaaguauauauagaauc

SEQ ID NO: 2469546 - RNA, 18 nt, Human
aaaguauauauagaaucu

SEQ ID NO: 2469547 - RNA, 22 nt, Human
aaaguauauauauauauuauau

SEQ ID NO: 2469548 - RNA, 14 nt, Human
aaaguauauauuua

SEQ ID NO: 2469549 - RNA, 15 nt, Human
aaaguauauauuuau

SEQ ID NO: 2469550 - RNA, 23 nt, Human
aaaguauauauuuauuuaagcuu

SEQ ID NO: 2469551 - RNA, 15 nt, Human
aaaguaucaugcauu

SEQ ID NO: 2469552 - RNA, 14 nt, Human
aaaguaucaugcau

SEQ ID NO: 2469553 - RNA, 12 nt, Human
aaaguaucaugc

SEQ ID NO: 2469554 - RNA, 14 nt, Human
aaaguauauguuag

SEQ ID NO: 2469555 - RNA, 20 nt, Human
aaaguacacuguuucaaacu

SEQ ID NO: 2469556 - RNA, 14 nt, Human
aaagguauaauuuu

SEQ ID NO: 2469557 - RNA, 20 nt, Human
aaagguauuuuaaucaccaa

SEQ ID NO: 2469558 - RNA, 16 nt, Human
aaaggguuuuaaugua

SEQ ID NO: 2469559 - RNA, 16 nt, Human
aaaggguguuuuucug

SEQ ID NO: 2469560 - RNA, 14 nt, Human
aaaggguguacuua

SEQ ID NO: 2469561 - RNA, 16 nt, Human
aaagguauaauuuuau

SEQ ID NO: 2469562 - RNA, 15 nt, Human
aaaguacauuuaaua

SEQ ID NO: 2469563 - RNA, 14 nt, Human
aaaguacauuuaau

SEQ ID NO: 2469564 - RNA, 13 nt, Human
aaaguacauuuaa

SEQ ID NO: 2469565 - RNA, 12 nt, Human
aaaguacauuua

SEQ ID NO: 2469566 - RNA, 19 nt, Human
aaaguacuucuccacccug

SEQ ID NO: 2469567 - RNA, 14 nt, Human
aaaggugaaggaau

SEQ ID NO: 2469568 - RNA, 16 nt, Human
aaaguacauguuaaac

SEQ ID NO: 2469569 - RNA, 22 nt, Human
aaaguauucuucucuuccuuuu

SEQ ID NO: 2469570 - RNA, 12 nt, Human
aaaguauucuuc

SEQ ID NO: 2469571 - RNA, 19 nt, Human
aaaguauucuguacucuua

SEQ ID NO: 2469572 - RNA, 20 nt, Human
aaaguauuuaauuagugcua

SEQ ID NO: 2469573 - RNA, 19 nt, Human
aaaguauuuaauuagugcu

SEQ ID NO: 2469574 - RNA, 18 nt, Human
aaaguauuuaauuagugc

SEQ ID NO: 2469575 - RNA, 17 nt, Human
aaaguauuuaauuagug

SEQ ID NO: 2469576 - RNA, 23 nt, Human
aaaguauuuaauuagugcuaagu

SEQ ID NO: 2469577 - RNA, 21 nt, Human
aaaguauuuaauuagugcuaa

SEQ ID NO: 2469578 - RNA, 16 nt, Human
aaaguaucaugcauuc

SEQ ID NO: 2469579 - RNA, 15 nt, Human
aaaguauuauuuucc

SEQ ID NO: 2469580 - RNA, 16 nt, Human
aaaguauuauuuucca

SEQ ID NO: 2469581 - RNA, 17 nt, Human
aaaguauuauuuuccaa

SEQ ID NO: 2469582 - RNA, 17 nt, Human
aaaguucuguaaaauau

SEQ ID NO: 2469583 - RNA, 16 nt, Human
aaaguucuagugaccg

SEQ ID NO: 2469584 - RNA, 14 nt, Human
aaaguucuguacuc

SEQ ID NO: 2469585 - RNA, 23 nt, Human
aaaguucugcagauaaacaguag

SEQ ID NO: 2469586 - RNA, 21 nt, Human
aaaguucuguacucaaaugua

SEQ ID NO: 2469587 - RNA, 12 nt, Human
aaaguugaaauu

SEQ ID NO: 2469588 - RNA, 15 nt, Human
aaaguuacuagguaa

SEQ ID NO: 2469589 - RNA, 20 nt, Human
aaaguuacuagguaacuuca

SEQ ID NO: 2469590 - RNA, 22 nt, Human
aaaguuacugauucacugcaug

SEQ ID NO: 2469591 - RNA, 21 nt, Human
aaaguuacuagguaacuucau

SEQ ID NO: 2469592 - RNA, 19 nt, Human
aaaguuacuaccugucaag

SEQ ID NO: 2469593 - RNA, 12 nt, Human
aaaguuacuagg

SEQ ID NO: 2469594 - RNA, 14 nt, Human
aaaguuagucuacu

SEQ ID NO: 2469595 - RNA, 14 nt, Human
aaaguuagcugagc

SEQ ID NO: 2469596 - RNA, 20 nt, Human
aaaguuacuuugucagaggc

SEQ ID NO: 2469597 - RNA, 16 nt, Human
aaaguuauauagguuu

SEQ ID NO: 2469598 - RNA, 23 nt, Human
aaaguuagucuacucuuaagcca

SEQ ID NO: 2469599 - RNA, 21 nt, Human
aaaguuauuaauauuuuaauu

SEQ ID NO: 2469600 - RNA, 22 nt, Human
guaaaccccuuuaguggcuuca

SEQ ID NO: 2469601 - RNA, 24 nt, Human
guaaacugugcaccaagcaggaaa

SEQ ID NO: 2469602 - RNA, 13 nt, Human
guaaaccaaagcc

SEQ ID NO: 2469603 - RNA, 22 nt, Human
guaaacauguguuuuaauucca

SEQ ID NO: 2469604 - RNA, 20 nt, Human
guaaacauguguuuuaauuc

SEQ ID NO: 2469605 - RNA, 14 nt, Human
guaaacauguguuu

SEQ ID NO: 2469606 - RNA, 22 nt, Human
guaaacagugccugcugaauga

SEQ ID NO: 2469607 - RNA, 23 nt, Human
guaaacauaauucuuguauauua

SEQ ID NO: 2469608 - RNA, 13 nt, Human
guaaacagugccu

SEQ ID NO: 2469609 - RNA, 14 nt, Human
guaaacagugccug

SEQ ID NO: 2469610 - RNA, 15 nt, Human
guaaacagugccugc

SEQ ID NO: 2469611 - RNA, 17 nt, Human
guaaacagugccugcug

SEQ ID NO: 2469612 - RNA, 18 nt, Human
guaaacagugccugcuga

SEQ ID NO: 2469613 - RNA, 20 nt, Human
guaaacagugccugcugaau

SEQ ID NO: 2469614 - RNA, 14 nt, Human
aaauaauuuuaaac

SEQ ID NO: 2469615 - RNA, 18 nt, Human
aaauaauuuuaaacaaag

SEQ ID NO: 2469616 - RNA, 20 nt, Human
aaauaauuuuaaacaaaggu

SEQ ID NO: 2469617 - RNA, 12 nt, Human
aaauaauuuuaa

SEQ ID NO: 2469618 - RNA, 17 nt, Human
aaauaauugauuucaag

SEQ ID NO: 2469619 - RNA, 20 nt, Human
guaaacagauggcacuuuga

SEQ ID NO: 2469620 - RNA, 19 nt, Human
guaaacagauggcacuuug

SEQ ID NO: 2469621 - RNA, 12 nt, Human
aaauaauuuuau

SEQ ID NO: 2469622 - RNA, 15 nt, Human
aaauaauaauaaugu

SEQ ID NO: 2469623 - RNA, 17 nt, Human
aaauaauaaagaugcuc

SEQ ID NO: 2469624 - RNA, 19 nt, Human
aaauaauaaagaugcucuu

SEQ ID NO: 2469625 - RNA, 13 nt, Human
aaauaauaugcau

SEQ ID NO: 2469626 - RNA, 12 nt, Human
aaauaauaugca

SEQ ID NO: 2469627 - RNA, 14 nt, Human
aaauaauaugcauu

SEQ ID NO: 2469628 - RNA, 12 nt, Human
aaauaauaaauc

SEQ ID NO: 2469629 - RNA, 23 nt, Human
aaauaaucuauuucuaugagaaa

SEQ ID NO: 2469630 - RNA, 22 nt, Human
aaauaaucuauuucuaugagaa

SEQ ID NO: 2469631 - RNA, 13 nt, Human
aaauaaucuauuu

SEQ ID NO: 2469632 - RNA, 14 nt, Human
aaauaaucauucuu

SEQ ID NO: 2469633 - RNA, 15 nt, Human
aaauaaucggcccac

SEQ ID NO: 2469634 - RNA, 14 nt, Human
aaauaagaaaccua

SEQ ID NO: 2469635 - RNA, 15 nt, Human
aaauaagaaaaauca

SEQ ID NO: 2469636 - RNA, 24 nt, Human
aaauaagaaacaacucuuugagaa

SEQ ID NO: 2469637 - RNA, 13 nt, Human
aaauaagaaaaga

SEQ ID NO: 2469638 - RNA, 22 nt, Human
aaauaagaaaagauguagauuu

SEQ ID NO: 2469639 - RNA, 12 nt, Human
aaauaagaaaag

SEQ ID NO: 2469640 - RNA, 16 nt, Human
aaauaacuucaagcaa

SEQ ID NO: 2469641 - RNA, 14 nt, Human
aaauaagaauagaa

SEQ ID NO: 2469642 - RNA, 17 nt, Human
aaauaagaauagaaaua

SEQ ID NO: 2469643 - RNA, 23 nt, Human
aaauaagacggauuuauuuuucc

SEQ ID NO: 2469644 - RNA, 12 nt, Human
aaauaagagaga

SEQ ID NO: 2469645 - RNA, 16 nt, Human
aaaguugguaaaccuu

SEQ ID NO: 2469646 - RNA, 17 nt, Human
aaaguugguaaaccuuu

SEQ ID NO: 2469647 - RNA, 16 nt, Human
aaaguuggugacagau

SEQ ID NO: 2469648 - RNA, 23 nt, Human
aaauaaaaacuaaauuguaaacu

SEQ ID NO: 2469649 - RNA, 10 nt, Human
aaauaaaaag

SEQ ID NO: 2469650 - RNA, 13 nt, Human
aaauaaaaacaaa

SEQ ID NO: 2469651 - RNA, 18 nt, Human
aaaguugugauuccagau

SEQ ID NO: 2469652 - RNA, 20 nt, Human
aaaguuuaaaacagaagccu

SEQ ID NO: 2469653 - RNA, 21 nt, Human
aaauaaaaagugacacagcag

SEQ ID NO: 2469654 - RNA, 20 nt, Human
aaauaaaaagugacacagca

SEQ ID NO: 2469655 - RNA, 12 nt, Human
aaauaaaaaguu

SEQ ID NO: 2469656 - RNA, 13 nt, Human
aaauaaaaaguua

SEQ ID NO: 2469657 - RNA, 14 nt, Human
aaauaaaaaguuaa

SEQ ID NO: 2469658 - RNA, 19 nt, Human
aaauaaaaagugacacagc

SEQ ID NO: 2469659 - RNA, 15 nt, Human
aaauaaaaagugaca

SEQ ID NO: 2469660 - RNA, 14 nt, Human
aaauaaaaagugac

SEQ ID NO: 2469661 - RNA, 14 nt, Human
aaauaaaaacuaaa

SEQ ID NO: 2469662 - RNA, 13 nt, Human
aaauaaaaagaaa

SEQ ID NO: 2469663 - RNA, 15 nt, Human
aaauaaaaaguuaaa

SEQ ID NO: 2469664 - RNA, 19 nt, Human
aaauaaaaaguuaaaaagu

SEQ ID NO: 2469665 - RNA, 16 nt, Human
aaauaaaaauaaauuc

SEQ ID NO: 2469666 - RNA, 14 nt, Human
aaauaaaaauaaau

SEQ ID NO: 2469667 - RNA, 14 nt, Human
aaauaaaaauauug

SEQ ID NO: 2469668 - RNA, 18 nt, Human
aaauaacaauguuaagga

SEQ ID NO: 2469669 - RNA, 13 nt, Human
aaauaacacacau

SEQ ID NO: 2469670 - RNA, 21 nt, Human
aaauaacacacauauaaacau

SEQ ID NO: 2469671 - RNA, 19 nt, Human
aaauaacaauguuaaggaa

SEQ ID NO: 2469672 - RNA, 19 nt, Human
aaauaaccaauccuggaca

SEQ ID NO: 2469673 - RNA, 17 nt, Human
aaauaacuaguguugcu

SEQ ID NO: 2469674 - RNA, 15 nt, Human
aaauaacuucaagca

SEQ ID NO: 2469675 - RNA, 18 nt, Human
aaauaacuucaagcaaac

SEQ ID NO: 2469676 - RNA, 15 nt, Human
guacuauguaucaau

SEQ ID NO: 2469677 - RNA, 17 nt, Human
guacuauguaucaauga

SEQ ID NO: 2469678 - RNA, 13 nt, Human
guacuauucugau

SEQ ID NO: 2469679 - RNA, 21 nt, Human
guacuauuuagauauaacacu

SEQ ID NO: 2469680 - RNA, 15 nt, Human
guacucaaauguagc

SEQ ID NO: 2469681 - RNA, 17 nt, Human
guacucaggaggcugag

SEQ ID NO: 2469682 - RNA, 23 nt, Human
guacucaggaggcugaggggagg

SEQ ID NO: 2469683 - RNA, 14 nt, Human
guacucauuaaaaa

SEQ ID NO: 2469684 - RNA, 23 nt, Human
guacucuccuagagacagaagca

SEQ ID NO: 2469685 - RNA, 14 nt, Human
guacucuccuagag

SEQ ID NO: 2469686 - RNA, 11 nt, Human
guacucuccua

SEQ ID NO: 2469687 - RNA, 17 nt, Human
guacucgcuugugcaga

SEQ ID NO: 2469688 - RNA, 16 nt, Human
guacuccugcaaaauu

SEQ ID NO: 2469689 - RNA, 21 nt, Human
guacuccugcaaaauuuuaua

SEQ ID NO: 2469690 - RNA, 16 nt, Human
guacucugcacauacg

SEQ ID NO: 2469691 - RNA, 14 nt, Human
guacucuuccgaaa

SEQ ID NO: 2469692 - RNA, 15 nt, Human
guacucuccuagaga

SEQ ID NO: 2469693 - RNA, 13 nt, Human
guacucuuccgaa

SEQ ID NO: 2469694 - RNA, 14 nt, Human
guacuccucccagg

SEQ ID NO: 2469695 - RNA, 15 nt, Human
guacuccugcaaaau

SEQ ID NO: 2469696 - RNA, 20 nt, Human
guacucaucaucaacccuaa

SEQ ID NO: 2469697 - RNA, 19 nt, Human
guacuacaguccucccauc

SEQ ID NO: 2469698 - RNA, 18 nt, Human
guacuacaguccucccau

SEQ ID NO: 2469699 - RNA, 14 nt, Human
guacccacugcucu

SEQ ID NO: 2469700 - RNA, 13 nt, Human
guacccacugcuc

SEQ ID NO: 2469701 - RNA, 16 nt, Human
guacuaguuacacauc

SEQ ID NO: 2469702 - RNA, 17 nt, Human
guacuaguuacacaucu

SEQ ID NO: 2469703 - RNA, 13 nt, Human
guacuauguauca

SEQ ID NO: 2469704 - RNA, 17 nt, Human
guacuacaguccuccca

SEQ ID NO: 2469705 - RNA, 15 nt, Human
guacuacuagauguc

SEQ ID NO: 2469706 - RNA, 20 nt, Human
guacuacuagaugucuuuag

SEQ ID NO: 2469707 - RNA, 21 nt, Human
guacuacuagaugucuuuagg

SEQ ID NO: 2469708 - RNA, 22 nt, Human
guacuagagaucugguuuugcu

SEQ ID NO: 2469709 - RNA, 22 nt, Human
guacuagggggaagugacaagg

SEQ ID NO: 2469710 - RNA, 15 nt, Human
guacuguucuguguc

SEQ ID NO: 2469711 - RNA, 14 nt, Human
guacuguucugugu

SEQ ID NO: 2469712 - RNA, 23 nt, Human
guacuguguacagaauucugcua

SEQ ID NO: 2469713 - RNA, 14 nt, Human
guacuuaacuauuc

SEQ ID NO: 2469714 - RNA, 19 nt, Human
guacuuaaaugaaagcaug

SEQ ID NO: 2469715 - RNA, 15 nt, Human
guacuuaauaaauuc

SEQ ID NO: 2469716 - RNA, 18 nt, Human
guacuguucugugucuuu

SEQ ID NO: 2469717 - RNA, 17 nt, Human
guacuguucugugucuu

SEQ ID NO: 2469718 - RNA, 23 nt, Human
guacuguucucuucuugaacacu

SEQ ID NO: 2469719 - RNA, 17 nt, Human
guacuuaaaugaaagca

SEQ ID NO: 2469720 - RNA, 22 nt, Human
guacuucaaauccuugaagauu

SEQ ID NO: 2469721 - RNA, 21 nt, Human
guacuucaaauccuugaagau

SEQ ID NO: 2469722 - RNA, 15 nt, Human
guacuucaugcuguc

SEQ ID NO: 2469723 - RNA, 21 nt, Human
guacuucacugucaggaagaa

SEQ ID NO: 2469724 - RNA, 15 nt, Human
guacuuauuacugcu

SEQ ID NO: 2469725 - RNA, 13 nt, Human
guacuuauuacug

SEQ ID NO: 2469726 - RNA, 16 nt, Human
guacuuagcagcuauc

SEQ ID NO: 2469727 - RNA, 19 nt, Human
guacuuagcagcuaucucu

SEQ ID NO: 2469728 - RNA, 12 nt, Human
guacugagauuu

SEQ ID NO: 2469729 - RNA, 16 nt, Human
guacugagccuuguaa

SEQ ID NO: 2469730 - RNA, 23 nt, Human
guacucuuccgaaaaauccucuu

SEQ ID NO: 2469731 - RNA, 22 nt, Human
guacucuuccgaaaaauccucu

SEQ ID NO: 2469732 - RNA, 16 nt, Human
guacugauuuuuguaa

SEQ ID NO: 2469733 - RNA, 21 nt, Human
guacuggggguugcgggggga

SEQ ID NO: 2469734 - RNA, 12 nt, Human
guacuggggguu

SEQ ID NO: 2469735 - RNA, 16 nt, Human
guacuguaaagagacc

SEQ ID NO: 2469736 - RNA, 14 nt, Human
guacuguaguuuuu

SEQ ID NO: 2469737 - RNA, 16 nt, Human
guacuggagaaaaugg

SEQ ID NO: 2469738 - RNA, 14 nt, Human
guacuggcauggua

SEQ ID NO: 2469739 - RNA, 16 nt, Human
guacuggcaugguacg

SEQ ID NO: 2469740 - RNA, 19 nt, Human
guacuggcugauggaguaa

SEQ ID NO: 2469741 - RNA, 21 nt, Human
guagaagucuuagauguauau

SEQ ID NO: 2469742 - RNA, 15 nt, Human
guagaaggagacaga

SEQ ID NO: 2469743 - RNA, 17 nt, Human
guagaaggguuauauuu

SEQ ID NO: 2469744 - RNA, 21 nt, Human
guagaagcauuccuucuuuga

SEQ ID NO: 2469745 - RNA, 18 nt, Human
guagaagcauuccuucuu

SEQ ID NO: 2469746 - RNA, 22 nt, Human
guagaagcauuccuucuuugau

SEQ ID NO: 2469747 - RNA, 13 nt, Human
guagaaggagaca

SEQ ID NO: 2469748 - RNA, 18 nt, Human
guagaagcccuucuaccu

SEQ ID NO: 2469749 - RNA, 15 nt, Human
guagaagcauuccuu

SEQ ID NO: 2469750 - RNA, 20 nt, Human
guagaagauuugaugcugga

SEQ ID NO: 2469751 - RNA, 13 nt, Human
guagaagagggau

SEQ ID NO: 2469752 - RNA, 12 nt, Human
guagaagauggc

SEQ ID NO: 2469753 - RNA, 14 nt, Human
guagaauguauugu

SEQ ID NO: 2469754 - RNA, 19 nt, Human
guagaaguuuuuguacugu

SEQ ID NO: 2469755 - RNA, 15 nt, Human
guagaaguuuuugua

SEQ ID NO: 2469756 - RNA, 14 nt, Human
guagaaguuuuugu

SEQ ID NO: 2469757 - RNA, 15 nt, Human
guagaaggucggagg

SEQ ID NO: 2469758 - RNA, 19 nt, Human
guagaaggguuauauuuua

SEQ ID NO: 2469759 - RNA, 19 nt, Human
guagaauguauuguaccuu

SEQ ID NO: 2469760 - RNA, 18 nt, Human
guagaauguauuguaccu

SEQ ID NO: 2469761 - RNA, 17 nt, Human
guagaauguauuguacc

SEQ ID NO: 2469762 - RNA, 23 nt, Human
guagaauguauuguaccuuuuaa

SEQ ID NO: 2469763 - RNA, 20 nt, Human
guagaauguauuguaccuuu

SEQ ID NO: 2469764 - RNA, 14 nt, Human
guagaauugcauug

SEQ ID NO: 2469765 - RNA, 15 nt, Human
guagaauugcauuga

SEQ ID NO: 2469766 - RNA, 20 nt, Human
guagaaauaucugaaaaugu

SEQ ID NO: 2469767 - RNA, 18 nt, Human
guacuucaggggcacuuc

SEQ ID NO: 2469768 - RNA, 15 nt, Human
guacuucacugucag

SEQ ID NO: 2469769 - RNA, 18 nt, Human
guacuuauuacugcuaag

SEQ ID NO: 2469770 - RNA, 16 nt, Human
guacuuauuacugcua

SEQ ID NO: 2469771 - RNA, 21 nt, Human
guagaaaggccuuuaaaauuu

SEQ ID NO: 2469772 - RNA, 16 nt, Human
guagaaauaauaugca

SEQ ID NO: 2469773 - RNA, 21 nt, Human
guagaaauaucugaaaaugua

SEQ ID NO: 2469774 - RNA, 23 nt, Human
guagaaauaucugaaaauguaug

SEQ ID NO: 2469775 - RNA, 18 nt, Human
guagaacguaaccacgga

SEQ ID NO: 2469776 - RNA, 19 nt, Human
guagaacguaaccacggaa

SEQ ID NO: 2469777 - RNA, 18 nt, Human
guagaaaugguuguauua

SEQ ID NO: 2469778 - RNA, 17 nt, Human
guagaaaugguuguauu

SEQ ID NO: 2469779 - RNA, 17 nt, Human
guagaaauaauaugcau

SEQ ID NO: 2469780 - RNA, 14 nt, Human
guagaaaugaugau

SEQ ID NO: 2469781 - RNA, 22 nt, Human
guagaaaugguuguauuagaug

SEQ ID NO: 2469782 - RNA, 20 nt, Human
guagaaaugguuguauuaga

SEQ ID NO: 2469783 - RNA, 22 nt, Human
guagaaaggggcccaguccugg

SEQ ID NO: 2469784 - RNA, 22 nt, Human
guagaacacaaggucauuugcu

SEQ ID NO: 2469785 - RNA, 11 nt, Human
guagagccagg

SEQ ID NO: 2469786 - RNA, 15 nt, Human
guagagccagagguc

SEQ ID NO: 2469787 - RNA, 13 nt, Human
guagagaaacacu

SEQ ID NO: 2469788 - RNA, 18 nt, Human
guagagaccgagccucug

SEQ ID NO: 2469789 - RNA, 15 nt, Human
guagagauggaggag

SEQ ID NO: 2469790 - RNA, 10 nt, Human
guagagccag

SEQ ID NO: 2469791 - RNA, 13 nt, Human
guagagacagggu

SEQ ID NO: 2469792 - RNA, 19 nt, Human
guagccgagagccugcucc

SEQ ID NO: 2469793 - RNA, 17 nt, Human
guagcccgccugccagu

SEQ ID NO: 2469794 - RNA, 15 nt, Human
guagcccuggccaga

SEQ ID NO: 2469795 - RNA, 14 nt, Human
guagcccuuucugu

SEQ ID NO: 2469796 - RNA, 17 nt, Human
guagcccuggccagagg

SEQ ID NO: 2469797 - RNA, 16 nt, Human
guagagauggaggagg

SEQ ID NO: 2469798 - RNA, 17 nt, Human
guagagauggaggagga

SEQ ID NO: 2469799 - RNA, 20 nt, Human
guagcccgccugccaguccu

SEQ ID NO: 2469800 - RNA, 16 nt, Human
guagcccgccugccag

SEQ ID NO: 2469801 - RNA, 15 nt, Human
guagcccgccugcca

SEQ ID NO: 2469802 - RNA, 18 nt, Human
guagagccagggucucac

SEQ ID NO: 2469803 - RNA, 15 nt, Human
guagagccagggucu

SEQ ID NO: 2469804 - RNA, 15 nt, Human
guagacauuucucuu

SEQ ID NO: 2469805 - RNA, 14 nt, Human
guagaccaaaauaa

SEQ ID NO: 2469806 - RNA, 15 nt, Human
guagaccaaaauaaa

SEQ ID NO: 2469807 - RNA, 16 nt, Human
guagaccaaaauaaaa

SEQ ID NO: 2469808 - RNA, 22 nt, Human
guagacaagcaauuagacaaga

SEQ ID NO: 2469809 - RNA, 19 nt, Human
guagacacgcucuucuauu

SEQ ID NO: 2469810 - RNA, 18 nt, Human
guagacacgcucuucuau

SEQ ID NO: 2469811 - RNA, 22 nt, Human
guagaccuuguuacuucugagg

SEQ ID NO: 2469812 - RNA, 21 nt, Human
guagaccuuguuacuucugag

SEQ ID NO: 2469813 - RNA, 20 nt, Human
guagaccuuguuacuucuga

SEQ ID NO: 2469814 - RNA, 19 nt, Human
guagaccuuguuacuucug

SEQ ID NO: 2469815 - RNA, 16 nt, Human
guagaccuagggagga

SEQ ID NO: 2469816 - RNA, 17 nt, Human
guagaccuagggaggac

SEQ ID NO: 2469817 - RNA, 20 nt, Human
guagaccuagggaggaccuu

SEQ ID NO: 2469818 - RNA, 12 nt, Human
guagagacaggg

SEQ ID NO: 2469819 - RNA, 11 nt, Human
guagagacagg

SEQ ID NO: 2469820 - RNA, 19 nt, Human
aaaucauuucugcaucagc

SEQ ID NO: 2469821 - RNA, 21 nt, Human
aaaucauuucugcaucagcug

SEQ ID NO: 2469822 - RNA, 22 nt, Human
aaaucauuucugcaucagcugc

SEQ ID NO: 2469823 - RNA, 23 nt, Human
aaaucauuucugcaucagcugcu

SEQ ID NO: 2469824 - RNA, 15 nt, Human
aaauccacuuuaucu

SEQ ID NO: 2469825 - RNA, 16 nt, Human
aaaucauuuuauaugu

SEQ ID NO: 2469826 - RNA, 23 nt, Human
aaaucauuuggguuaauauggcu

SEQ ID NO: 2469827 - RNA, 21 nt, Human
aaaucauuuuauaugucaaag

SEQ ID NO: 2469828 - RNA, 20 nt, Human
aaaucauuuuauaugucaaa

SEQ ID NO: 2469829 - RNA, 12 nt, Human
aaaucauuuggg

SEQ ID NO: 2469830 - RNA, 22 nt, Human
aaaucauaggaaaguauuuuuu

SEQ ID NO: 2469831 - RNA, 16 nt, Human
aaaucaguuacuaaga

SEQ ID NO: 2469832 - RNA, 22 nt, Human
aaaucagucagugcaaauguca

SEQ ID NO: 2469833 - RNA, 12 nt, Human
aaaucauuucug

SEQ ID NO: 2469834 - RNA, 22 nt, Human
aaaucauaagauauuuuucaug

SEQ ID NO: 2469835 - RNA, 23 nt, Human
aaaucauaaacugugugcagacu

SEQ ID NO: 2469836 - RNA, 21 nt, Human
aaaucaguuacuaagaagaaa

SEQ ID NO: 2469837 - RNA, 17 nt, Human
aaaucaguuacuaagaa

SEQ ID NO: 2469838 - RNA, 14 nt, Human
aaaucauaaacugu

SEQ ID NO: 2469839 - RNA, 16 nt, Human
aaaucauaaacugugu

SEQ ID NO: 2469840 - RNA, 19 nt, Human
aaaucagccguguaaccau

SEQ ID NO: 2469841 - RNA, 12 nt, Human
aaaucagccugc

SEQ ID NO: 2469842 - RNA, 16 nt, Human
aaaucagcugcuacua

SEQ ID NO: 2469843 - RNA, 18 nt, Human
aaaucagccugcuccagc

SEQ ID NO: 2469844 - RNA, 17 nt, Human
aaauauacuguaaagaa

SEQ ID NO: 2469845 - RNA, 19 nt, Human
aaauauacuguaaagaaag

SEQ ID NO: 2469846 - RNA, 21 nt, Human
aaauauacuguaaagaaagag

SEQ ID NO: 2469847 - RNA, 23 nt, Human
aaauauacuguaaagaaagagag

SEQ ID NO: 2469848 - RNA, 18 nt, Human
aaauauacuuaaauggaa

SEQ ID NO: 2469849 - RNA, 14 nt, Human
aaauauacuuaaau

SEQ ID NO: 2469850 - RNA, 13 nt, Human
aaauauacuguaa

SEQ ID NO: 2469851 - RNA, 14 nt, Human
aaauauacuguaaa

SEQ ID NO: 2469852 - RNA, 15 nt, Human
aaauauacuguaaag

SEQ ID NO: 2469853 - RNA, 16 nt, Human
aaauauacuguaaaga

SEQ ID NO: 2469854 - RNA, 12 nt, Human
aaauauacugua

SEQ ID NO: 2469855 - RNA, 17 nt, Human
aaauauuauguuaaaac

SEQ ID NO: 2469856 - RNA, 14 nt, Human
aaauauuauguguu

SEQ ID NO: 2469857 - RNA, 15 nt, Human
aaauauuagauguga

SEQ ID NO: 2469858 - RNA, 14 nt, Human
aaauauuagaugug

SEQ ID NO: 2469859 - RNA, 13 nt, Human
aaauauuagaugu

SEQ ID NO: 2469860 - RNA, 17 nt, Human
aaauauuagaaacagcu

SEQ ID NO: 2469861 - RNA, 14 nt, Human
aaauauuagaaaca

SEQ ID NO: 2469862 - RNA, 22 nt, Human
aaauauuagaugugauuuaaua

SEQ ID NO: 2469863 - RNA, 21 nt, Human
aaauauuagaugugauuuaau

SEQ ID NO: 2469864 - RNA, 20 nt, Human
aaauauuagaugugauuuaa

SEQ ID NO: 2469865 - RNA, 18 nt, Human
aaauauuagaugugauuu

SEQ ID NO: 2469866 - RNA, 20 nt, Human
aaauauuauaacuuaaaaaa

SEQ ID NO: 2469867 - RNA, 17 nt, Human
aaaucagccaauuaugu

SEQ ID NO: 2469868 - RNA, 23 nt, Human
aaaucagccaauuauguuaaacu

SEQ ID NO: 2469869 - RNA, 21 nt, Human
aaaucagccaauuauguuaaa

SEQ ID NO: 2469870 - RNA, 20 nt, Human
aaaucagccaauuauguuaa

SEQ ID NO: 2469871 - RNA, 18 nt, Human
aaaucagccaauuauguu

SEQ ID NO: 2469872 - RNA, 21 nt, Human
aaaucagacuaugaaguuuuu

SEQ ID NO: 2469873 - RNA, 14 nt, Human
aaaucagacuauga

SEQ ID NO: 2469874 - RNA, 18 nt, Human
aaauauucccuagaaacu

SEQ ID NO: 2469875 - RNA, 19 nt, Human
aaauauucccuagaaacuu

SEQ ID NO: 2469876 - RNA, 15 nt, Human
aaauauuccugcauu

SEQ ID NO: 2469877 - RNA, 22 nt, Human
aaaucaccacaccaaaccucuc

SEQ ID NO: 2469878 - RNA, 12 nt, Human
aaaucacauccu

SEQ ID NO: 2469879 - RNA, 23 nt, Human
aaauauuccauccauauacuuug

SEQ ID NO: 2469880 - RNA, 16 nt, Human
aaauauucaugcuucu

SEQ ID NO: 2469881 - RNA, 20 nt, Human
aaauauuauuuuaugaaagg

SEQ ID NO: 2469882 - RNA, 15 nt, Human
aaauauuauguguuu

SEQ ID NO: 2469883 - RNA, 23 nt, Human
aaauauuauuguggaaaugaaua

SEQ ID NO: 2469884 - RNA, 17 nt, Human
guacaugaaaacacauu

SEQ ID NO: 2469885 - RNA, 18 nt, Human
guacaugaaaacacauuu

SEQ ID NO: 2469886 - RNA, 19 nt, Human
guacaugaaaacacauuuu

SEQ ID NO: 2469887 - RNA, 20 nt, Human
guacaugaaaacacauuuuu

SEQ ID NO: 2469888 - RNA, 20 nt, Human
guacauguguagccugugca

SEQ ID NO: 2469889 - RNA, 19 nt, Human
guacauguguagccugugc

SEQ ID NO: 2469890 - RNA, 13 nt, Human
guacaugugaggc

SEQ ID NO: 2469891 - RNA, 17 nt, Human
guacauucaauguuuau

SEQ ID NO: 2469892 - RNA, 18 nt, Human
guacauucaauguuuaug

SEQ ID NO: 2469893 - RNA, 11 nt, Human
guacaugagaa

SEQ ID NO: 2469894 - RNA, 10 nt, Human
guacauguau

SEQ ID NO: 2469895 - RNA, 16 nt, Human
guacauggcagaguuu

SEQ ID NO: 2469896 - RNA, 19 nt, Human
guacauggaauaacaugua

SEQ ID NO: 2469897 - RNA, 18 nt, Human
aaauccauacauuugugu

SEQ ID NO: 2469898 - RNA, 23 nt, Human
guacaucccauguaacagaaagg

SEQ ID NO: 2469899 - RNA, 22 nt, Human
guacaucccauguaacagaaag

SEQ ID NO: 2469900 - RNA, 21 nt, Human
guacaucccauguaacagaaa

SEQ ID NO: 2469901 - RNA, 20 nt, Human
guacaucccauguaacagaa

SEQ ID NO: 2469902 - RNA, 17 nt, Human
guacaucccauguaaca

SEQ ID NO: 2469903 - RNA, 20 nt, Human
guacauauuuguggaauaau

SEQ ID NO: 2469904 - RNA, 15 nt, Human
aaauccauacauuug

SEQ ID NO: 2469905 - RNA, 15 nt, Human
aaauccagaaagaaa

SEQ ID NO: 2469906 - RNA, 14 nt, Human
aaauccagaaagaa

SEQ ID NO: 2469907 - RNA, 15 nt, Human
guacaugaaaacaca

SEQ ID NO: 2469908 - RNA, 16 nt, Human
guacaugaaaacacau

SEQ ID NO: 2469909 - RNA, 14 nt, Human
guacaugaaaacac

SEQ ID NO: 2469910 - RNA, 18 nt, Human
guacaucuauuuuggauu

SEQ ID NO: 2469911 - RNA, 20 nt, Human
guacaucuauuuuggauugu

SEQ ID NO: 2469912 - RNA, 14 nt, Human
guacaucuggccuu

SEQ ID NO: 2469913 - RNA, 18 nt, Human
guaccaggucuccuccac

SEQ ID NO: 2469914 - RNA, 17 nt, Human
guaccagcugcgcuugc

SEQ ID NO: 2469915 - RNA, 19 nt, Human
guaccagcugcgcuugcuu

SEQ ID NO: 2469916 - RNA, 22 nt, Human
guaccaggucuccuccaccgcc

SEQ ID NO: 2469917 - RNA, 19 nt, Human
guaccaggucuccuccacc

SEQ ID NO: 2469918 - RNA, 16 nt, Human
guaccagcaauaugua

SEQ ID NO: 2469919 - RNA, 16 nt, Human
guaccagauaaaauua

SEQ ID NO: 2469920 - RNA, 16 nt, Human
guaccagcugcgcuug

SEQ ID NO: 2469921 - RNA, 14 nt, Human
guaccagcugcgcu

SEQ ID NO: 2469922 - RNA, 16 nt, Human
guaccagcccagaugu

SEQ ID NO: 2469923 - RNA, 18 nt, Human
guacccaaaagcucagcc

SEQ ID NO: 2469924 - RNA, 14 nt, Human
guaccauuugcaug

SEQ ID NO: 2469925 - RNA, 21 nt, Human
guaccauuuauacaaauuaga

SEQ ID NO: 2469926 - RNA, 19 nt, Human
guaccauuuauacaaauua

SEQ ID NO: 2469927 - RNA, 12 nt, Human
guacccacugcu

SEQ ID NO: 2469928 - RNA, 20 nt, Human
guaccaugaaacaaagcugc

SEQ ID NO: 2469929 - RNA, 20 nt, Human
guaccauaguaccauuuaua

SEQ ID NO: 2469930 - RNA, 15 nt, Human
guacauuuggagaca

SEQ ID NO: 2469931 - RNA, 16 nt, Human
guacauuucccugugc

SEQ ID NO: 2469932 - RNA, 14 nt, Human
guacauuucccugu

SEQ ID NO: 2469933 - RNA, 18 nt, Human
guacauuucccugugcug

SEQ ID NO: 2469934 - RNA, 22 nt, Human
guacauuuaugauuuaauaaaa

SEQ ID NO: 2469935 - RNA, 21 nt, Human
guacauuuaugauuuaauaaa

SEQ ID NO: 2469936 - RNA, 20 nt, Human
guacauuuaugauuuaauaa

SEQ ID NO: 2469937 - RNA, 19 nt, Human
guacauuuaugauuuaaua

SEQ ID NO: 2469938 - RNA, 18 nt, Human
guacauuuaugauuuaau

SEQ ID NO: 2469939 - RNA, 16 nt, Human
guacauuuaugauuua

SEQ ID NO: 2469940 - RNA, 14 nt, Human
guacauuuaugauu

SEQ ID NO: 2469941 - RNA, 15 nt, Human
guacauuuuguaaca

SEQ ID NO: 2469942 - RNA, 17 nt, Human
guacauuucugaaauga

SEQ ID NO: 2469943 - RNA, 13 nt, Human
guacauuucugaa

SEQ ID NO: 2469944 - RNA, 23 nt, Human
guaccaagacuacuagggaaaug

SEQ ID NO: 2469945 - RNA, 20 nt, Human
guaccaagacuacuagggaa

SEQ ID NO: 2469946 - RNA, 18 nt, Human
guaccaaaugcuuuaaaa

SEQ ID NO: 2469947 - RNA, 16 nt, Human
guaccaaaugcuuuaa

SEQ ID NO: 2469948 - RNA, 15 nt, Human
guaccaaucauuuua

SEQ ID NO: 2469949 - RNA, 14 nt, Human
guaccaaucauuuu

SEQ ID NO: 2469950 - RNA, 21 nt, Human
guaccaaucauuuuaauuauu

SEQ ID NO: 2469951 - RNA, 14 nt, Human
guaccacucaggcc

SEQ ID NO: 2469952 - RNA, 16 nt, Human
gcucugauaggccaag

SEQ ID NO: 2469953 - RNA, 20 nt, Human
gcucugaggcuuccagagag

SEQ ID NO: 2469954 - RNA, 19 nt, Human
gcucugaggcuuccagaga

SEQ ID NO: 2469955 - RNA, 21 nt, Human
gcucugaggcuuccagagagu

SEQ ID NO: 2469956 - RNA, 18 nt, Human
gcucugaggcuuccagag

SEQ ID NO: 2469957 - RNA, 16 nt, Human
gcucugaggcuuccag

SEQ ID NO: 2469958 - RNA, 16 nt, Human
gcucugagccaguuca

SEQ ID NO: 2469959 - RNA, 18 nt, Human
gcucugagcgccuccauc

SEQ ID NO: 2469960 - RNA, 17 nt, Human
gcucugagcgccuccau

SEQ ID NO: 2469961 - RNA, 14 nt, Human
gcucugagcgccuc

SEQ ID NO: 2469962 - RNA, 13 nt, Human
gcucugagccagu

SEQ ID NO: 2469963 - RNA, 17 nt, Human
gcucugaucauccacug

SEQ ID NO: 2469964 - RNA, 23 nt, Human
gcucugaucauccacugugccau

SEQ ID NO: 2469965 - RNA, 23 nt, Human
gcucugcaagaauugaagcagga

SEQ ID NO: 2469966 - RNA, 13 nt, Human
gcucugaucccuc

SEQ ID NO: 2469967 - RNA, 22 nt, Human
gcucugaucccucuacagagcu

SEQ ID NO: 2469968 - RNA, 23 nt, Human
gcucugaucccucuacagagcuu

SEQ ID NO: 2469969 - RNA, 21 nt, Human
gcucugauauuccaugaaugu

SEQ ID NO: 2469970 - RNA, 17 nt, Human
gcucugcaauuccccuc

SEQ ID NO: 2469971 - RNA, 23 nt, Human
gcucugcaaugggcacugggaug

SEQ ID NO: 2469972 - RNA, 20 nt, Human
gcucugccccagaggccucu

SEQ ID NO: 2469973 - RNA, 16 nt, Human
gcucugccccagaggc

SEQ ID NO: 2469974 - RNA, 15 nt, Human
gcucugccccagagg

SEQ ID NO: 2469975 - RNA, 12 nt, Human
gcucugccccag

SEQ ID NO: 2469976 - RNA, 13 nt, Human
gcucugccccagc

SEQ ID NO: 2469977 - RNA, 15 nt, Human
gcucugccccagcuc

SEQ ID NO: 2469978 - RNA, 11 nt, Human
gcucugcccuu

SEQ ID NO: 2469979 - RNA, 21 nt, Human
gcucugccccagaggccucuc

SEQ ID NO: 2469980 - RNA, 20 nt, Human
gcucugccccagcucuggcu

SEQ ID NO: 2469981 - RNA, 18 nt, Human
gcucugccccagcucugg

SEQ ID NO: 2469982 - RNA, 19 nt, Human
gcucugccccagcucuggc

SEQ ID NO: 2469983 - RNA, 23 nt, Human
gcucguguauccuggggcucccu

SEQ ID NO: 2469984 - RNA, 19 nt, Human
gcucguguauccuggggcu

SEQ ID NO: 2469985 - RNA, 18 nt, Human
gcucguguauccuggggc

SEQ ID NO: 2469986 - RNA, 17 nt, Human
gcucguguauccugggg

SEQ ID NO: 2469987 - RNA, 16 nt, Human
gcucguguauccuggg

SEQ ID NO: 2469988 - RNA, 15 nt, Human
gcucguguauccugg

SEQ ID NO: 2469989 - RNA, 21 nt, Human
gcucgucggggggacagcucc

SEQ ID NO: 2469990 - RNA, 12 nt, Human
gcucgguggacc

SEQ ID NO: 2469991 - RNA, 14 nt, Human
gcucgguggaccca

SEQ ID NO: 2469992 - RNA, 17 nt, Human
gcucgguggacccaggg

SEQ ID NO: 2469993 - RNA, 18 nt, Human
gcucgguggacccaggga

SEQ ID NO: 2469994 - RNA, 21 nt, Human
gcuccacacccucucccagga

SEQ ID NO: 2469995 - RNA, 22 nt, Human
gcuccacacccucucccaggac

SEQ ID NO: 2469996 - RNA, 23 nt, Human
gcuccacacccucucccaggacc

SEQ ID NO: 2469997 - RNA, 21 nt, Human
gcuccacucugcuucucugac

SEQ ID NO: 2469998 - RNA, 20 nt, Human
gcuccacucugcuucucuga

SEQ ID NO: 2469999 - RNA, 19 nt, Human
gcuccacucugcuucucug

SEQ ID NO: 2470000 - RNA, 17 nt, Human
gcuccacucugcuucuc

SEQ ID NO: 2470001 - RNA, 15 nt, Human
gcuccacuuggucug

SEQ ID NO: 2470002 - RNA, 22 nt, Human
gcuccacccuuggccugucuca

SEQ ID NO: 2470003 - RNA, 23 nt, Human
gcuccacccuuggccugucucau

SEQ ID NO: 2470004 - RNA, 16 nt, Human
gcuccacucugcuucu

SEQ ID NO: 2470005 - RNA, 15 nt, Human
gcuccacucugcuuc

SEQ ID NO: 2470006 - RNA, 13 nt, Human
gcuccacucugcu

SEQ ID NO: 2470007 - RNA, 19 nt, Human
gcuccacgucugcgccgcc

SEQ ID NO: 2470008 - RNA, 21 nt, Human
gcuccacucugacuggcacag

SEQ ID NO: 2470009 - RNA, 16 nt, Human
gcuccacccuggccga

SEQ ID NO: 2470010 - RNA, 12 nt, Human
gcuccacagugu

SEQ ID NO: 2470011 - RNA, 16 nt, Human
gcuccacagccauccc

SEQ ID NO: 2470012 - RNA, 19 nt, Human
gcuccaccaagaaagcagg

SEQ ID NO: 2470013 - RNA, 12 nt, Human
gcuccaccacau

SEQ ID NO: 2470014 - RNA, 15 nt, Human
gcuccaccacauccu

SEQ ID NO: 2470015 - RNA, 19 nt, Human
gcuccacccuggccgaguc

SEQ ID NO: 2470016 - RNA, 11 nt, Human
gcuccacccuu

SEQ ID NO: 2470017 - RNA, 13 nt, Human
gcuccacccuugg

SEQ ID NO: 2470018 - RNA, 14 nt, Human
gcuccacccuuggc

SEQ ID NO: 2470019 - RNA, 15 nt, Human
gcuccacccuuggcc

SEQ ID NO: 2470020 - RNA, 16 nt, Human
gcuccacccuuggccu

SEQ ID NO: 2470021 - RNA, 17 nt, Human
gcuccacccuuggccug

SEQ ID NO: 2470022 - RNA, 19 nt, Human
gcuccacccuuggccuguc

SEQ ID NO: 2470023 - RNA, 21 nt, Human
gcucccccgggaggggcccgc

SEQ ID NO: 2470024 - RNA, 17 nt, Human
gcucccccgggaggggc

SEQ ID NO: 2470025 - RNA, 15 nt, Human
gcucccccgggaggg

SEQ ID NO: 2470026 - RNA, 20 nt, Human
gcucccccauccuccccuuc

SEQ ID NO: 2470027 - RNA, 17 nt, Human
gcucccccauccucccc

SEQ ID NO: 2470028 - RNA, 18 nt, Human
gcucccccauccuccccu

SEQ ID NO: 2470029 - RNA, 14 nt, Human
gcucccccauccuc

SEQ ID NO: 2470030 - RNA, 16 nt, Human
gcucccccauccuccc

SEQ ID NO: 2470031 - RNA, 20 nt, Human
gcucccccacccccucccca

SEQ ID NO: 2470032 - RNA, 22 nt, Human
gcucccccacccccuccccagg

SEQ ID NO: 2470033 - RNA, 17 nt, Human
gcucccaggcauucccc

SEQ ID NO: 2470034 - RNA, 21 nt, Human
gcuccccagcccuggcucugc

SEQ ID NO: 2470035 - RNA, 12 nt, Human
gcuccccaugug

SEQ ID NO: 2470036 - RNA, 22 nt, Human
gcuccccagcccuggcucugca

SEQ ID NO: 2470037 - RNA, 14 nt, Human
gcuccccauguguc

SEQ ID NO: 2470038 - RNA, 14 nt, Human
gcucccccaccccc

SEQ ID NO: 2470039 - RNA, 15 nt, Human
gcucccccacccccu

SEQ ID NO: 2470040 - RNA, 19 nt, Human
gcucccagcagcccuaagg

SEQ ID NO: 2470041 - RNA, 23 nt, Human
gcucccagcagcccuaaggaucu

SEQ ID NO: 2470042 - RNA, 12 nt, Human
gcucccaggaac

SEQ ID NO: 2470043 - RNA, 12 nt, Human
gcucccagcagc

SEQ ID NO: 2470044 - RNA, 22 nt, Human
gcucccacaggcccuuccucuc

SEQ ID NO: 2470045 - RNA, 18 nt, Human
gcucccaccccacccccu

SEQ ID NO: 2470046 - RNA, 21 nt, Human
gcucccaccccacccccuuca

SEQ ID NO: 2470047 - RNA, 18 nt, Human
gcuccacuuggucuguga

SEQ ID NO: 2470048 - RNA, 19 nt, Human
gcuccacuuggucugugag

SEQ ID NO: 2470049 - RNA, 18 nt, Human
gcuccacugucacccucc

SEQ ID NO: 2470050 - RNA, 12 nt, Human
gcuccacuguca

SEQ ID NO: 2470051 - RNA, 23 nt, Human
gcuccacucugcuucucugacuu

SEQ ID NO: 2470052 - RNA, 18 nt, Human
gcuccagcucaccagccc

SEQ ID NO: 2470053 - RNA, 21 nt, Human
gcucccacaggcccuuccucu

SEQ ID NO: 2470054 - RNA, 20 nt, Human
gcucccacaggcccuuccuc

SEQ ID NO: 2470055 - RNA, 17 nt, Human
gcucccacaggcccuuc

SEQ ID NO: 2470056 - RNA, 16 nt, Human
gcucccacaggcccuu

SEQ ID NO: 2470057 - RNA, 21 nt, Human
gcuccagcucaccagccccag

SEQ ID NO: 2470058 - RNA, 20 nt, Human
gcuccagcucaccagcccca

SEQ ID NO: 2470059 - RNA, 18 nt, Human
gcuccugcugcaccaacc

SEQ ID NO: 2470060 - RNA, 18 nt, Human
gcuccuggaaaggcucag

SEQ ID NO: 2470061 - RNA, 22 nt, Human
gcuccugcugcaccaacccagc

SEQ ID NO: 2470062 - RNA, 23 nt, Human
gcuccuggaaaggcucagucuca

SEQ ID NO: 2470063 - RNA, 21 nt, Human
gcuccuggaaaggcucagucu

SEQ ID NO: 2470064 - RNA, 22 nt, Human
gcuccuggaaaggcucagucuc

SEQ ID NO: 2470065 - RNA, 14 nt, Human
gcuccuggcccacu

SEQ ID NO: 2470066 - RNA, 15 nt, Human
gcuccuggcccacug

SEQ ID NO: 2470067 - RNA, 20 nt, Human
gcuccuggcccacugcaucg

SEQ ID NO: 2470068 - RNA, 19 nt, Human
gcuccuggagccuuugaau

SEQ ID NO: 2470069 - RNA, 18 nt, Human
gcuccuggagccuuugaa

SEQ ID NO: 2470070 - RNA, 18 nt, Human
gcuccuggcccacugcau

SEQ ID NO: 2470071 - RNA, 19 nt, Human
gcuccuggcccacugcauc

SEQ ID NO: 2470072 - RNA, 12 nt, Human
gcuccugccacc

SEQ ID NO: 2470073 - RNA, 18 nt, Human
gcuccugccaccacgccc

SEQ ID NO: 2470074 - RNA, 20 nt, Human
gcuccugcacuuacuugcuu

SEQ ID NO: 2470075 - RNA, 12 nt, Human
gcuccugcacuu

SEQ ID NO: 2470076 - RNA, 22 nt, Human
gcuccugaggggcaucugcccc

SEQ ID NO: 2470077 - RNA, 23 nt, Human
gcuccugaggggcaucugccccu

SEQ ID NO: 2470078 - RNA, 18 nt, Human
gcuccugaggggcaucug

SEQ ID NO: 2470079 - RNA, 21 nt, Human
gcuccugaggggcaucugccc

SEQ ID NO: 2470080 - RNA, 21 nt, Human
gcuccccucggagaagagcug

SEQ ID NO: 2470081 - RNA, 17 nt, Human
gcucccccuccaccugc

SEQ ID NO: 2470082 - RNA, 18 nt, Human
gcucccccuccaccugcu

SEQ ID NO: 2470083 - RNA, 12 nt, Human
gcucccgcccgu

SEQ ID NO: 2470084 - RNA, 19 nt, Human
gcuccccucuauuuagcau

SEQ ID NO: 2470085 - RNA, 21 nt, Human
gcuccccucuauuuagcauga

SEQ ID NO: 2470086 - RNA, 22 nt, Human
gcuagugugguguuuccuggca

SEQ ID NO: 2470087 - RNA, 21 nt, Human
gcuagugugguguuuccuggc

SEQ ID NO: 2470088 - RNA, 21 nt, Human
gcuagugacuugugucccaug

SEQ ID NO: 2470089 - RNA, 14 nt, Human
gcuaugagggccuu

SEQ ID NO: 2470090 - RNA, 12 nt, Human
gcuaugcauuug

SEQ ID NO: 2470091 - RNA, 13 nt, Human
gcuaugcauuuga

SEQ ID NO: 2470092 - RNA, 14 nt, Human
gcuagugacuugug

SEQ ID NO: 2470093 - RNA, 17 nt, Human
gcuaugaucgcgccacu

SEQ ID NO: 2470094 - RNA, 18 nt, Human
gcuauggauggcuucuaa

SEQ ID NO: 2470095 - RNA, 13 nt, Human
gcuaugggagccc

SEQ ID NO: 2470096 - RNA, 14 nt, Human
gcuaugggagcccc

SEQ ID NO: 2470097 - RNA, 19 nt, Human
gcuauucaguaauaacucu

SEQ ID NO: 2470098 - RNA, 23 nt, Human
gcuaggccuggccagaugcacca

SEQ ID NO: 2470099 - RNA, 17 nt, Human
gcuaggccuggccagau

SEQ ID NO: 2470100 - RNA, 23 nt, Human
gcuagucaagcuccuccucccug

SEQ ID NO: 2470101 - RNA, 19 nt, Human
gcuaggcgagugccaggac

SEQ ID NO: 2470102 - RNA, 16 nt, Human
gcuagucuuaagaacu

SEQ ID NO: 2470103 - RNA, 14 nt, Human
gcuagucagagaga

SEQ ID NO: 2470104 - RNA, 18 nt, Human
gcuagucagagagagugu

SEQ ID NO: 2470105 - RNA, 18 nt, Human
gcuaggcgagugccagga

SEQ ID NO: 2470106 - RNA, 16 nt, Human
gcuaggcgagugccag

SEQ ID NO: 2470107 - RNA, 16 nt, Human
gcuaggccuggccaga

SEQ ID NO: 2470108 - RNA, 18 nt, Human
gcucagagagggcaggca

SEQ ID NO: 2470109 - RNA, 16 nt, Human
gcucagagagggcagg

SEQ ID NO: 2470110 - RNA, 17 nt, Human
gcucaggacagaugcca

SEQ ID NO: 2470111 - RNA, 14 nt, Human
gcucaggaccaggc

SEQ ID NO: 2470112 - RNA, 19 nt, Human
gcucagagagggcaggcau

SEQ ID NO: 2470113 - RNA, 20 nt, Human
gcucaggacagaugccacac

SEQ ID NO: 2470114 - RNA, 14 nt, Human
gcucagagagggug

SEQ ID NO: 2470115 - RNA, 20 nt, Human
gcucacugcauccuccgccu

SEQ ID NO: 2470116 - RNA, 13 nt, Human
gcucacugccagg

SEQ ID NO: 2470117 - RNA, 12 nt, Human
gcucacugccag

SEQ ID NO: 2470118 - RNA, 19 nt, Human
gcucacugccaggccagcc

SEQ ID NO: 2470119 - RNA, 17 nt, Human
gcucacugccaggccag

SEQ ID NO: 2470120 - RNA, 15 nt, Human
gcucacugccaggcc

SEQ ID NO: 2470121 - RNA, 14 nt, Human
gcucacugccaggc

SEQ ID NO: 2470122 - RNA, 16 nt, Human
gcucagacauguuuuc

SEQ ID NO: 2470123 - RNA, 20 nt, Human
gcucacugccaggccagccu

SEQ ID NO: 2470124 - RNA, 13 nt, Human
gcucagagagggu

SEQ ID NO: 2470125 - RNA, 15 nt, Human
gcucagacccccacu

SEQ ID NO: 2470126 - RNA, 19 nt, Human
gcucagacccccacucuca

SEQ ID NO: 2470127 - RNA, 13 nt, Human
gcucagagagggc

SEQ ID NO: 2470128 - RNA, 23 nt, Human
gcucagacccccacucucauucc

SEQ ID NO: 2470129 - RNA, 21 nt, Human
gcucagacauguuuuccguga

SEQ ID NO: 2470130 - RNA, 16 nt, Human
gcucagaccagcucuu

SEQ ID NO: 2470131 - RNA, 20 nt, Human
gcucagggccaugcugaggc

SEQ ID NO: 2470132 - RNA, 17 nt, Human
gcucaggugucccugca

SEQ ID NO: 2470133 - RNA, 16 nt, Human
gcucaggugucccugc

SEQ ID NO: 2470134 - RNA, 23 nt, Human
gcucagguggggucacucuggca

SEQ ID NO: 2470135 - RNA, 14 nt, Human
gcucaggugucccu

SEQ ID NO: 2470136 - RNA, 16 nt, Human
gcucaggaccaggcaa

SEQ ID NO: 2470137 - RNA, 15 nt, Human
gcucaggaccaggca

SEQ ID NO: 2470138 - RNA, 16 nt, Human
gcucaggacucagaag

SEQ ID NO: 2470139 - RNA, 14 nt, Human
gcucaggaucucuu

SEQ ID NO: 2470140 - RNA, 18 nt, Human
gcucaggaucucuuagca

SEQ ID NO: 2470141 - RNA, 20 nt, Human
gcucaggccuauaaccccag

SEQ ID NO: 2470142 - RNA, 19 nt, Human
gcucaggcgauccaccugu

SEQ ID NO: 2470143 - RNA, 22 nt, Human
gcucaggcgauccaccugucuc

SEQ ID NO: 2470144 - RNA, 20 nt, Human
gcucagggaccacagcaagg

SEQ ID NO: 2470145 - RNA, 18 nt, Human
gcucagggaccacagcaa

SEQ ID NO: 2470146 - RNA, 19 nt, Human
gcucagggccaugcugagg

SEQ ID NO: 2470147 - RNA, 17 nt, Human
gcucagggaccacagca

SEQ ID NO: 2470148 - RNA, 16 nt, Human
gcucagggaccacagc

SEQ ID NO: 2470149 - RNA, 17 nt, Human
gcucagggaaaggccag

SEQ ID NO: 2470150 - RNA, 24 nt, Human
gcucaggcgauccaccugucucag

SEQ ID NO: 2470151 - RNA, 15 nt, Human
gcucagggaaaagca

SEQ ID NO: 2470152 - RNA, 17 nt, Human
gcucagggaaaagcagc

SEQ ID NO: 2470153 - RNA, 14 nt, Human
gcucacugcagccu

SEQ ID NO: 2470154 - RNA, 13 nt, Human
gcucacugcagcc

SEQ ID NO: 2470155 - RNA, 12 nt, Human
gcucacugcagc

SEQ ID NO: 2470156 - RNA, 11 nt, Human
gcucacugcag

SEQ ID NO: 2470157 - RNA, 16 nt, Human
gcucacugcagccuca

SEQ ID NO: 2470158 - RNA, 15 nt, Human
gcucacugcagccuc

SEQ ID NO: 2470159 - RNA, 16 nt, Human
gcucacucggcacccu

SEQ ID NO: 2470160 - RNA, 16 nt, Human
gcucacugcauccucc

SEQ ID NO: 2470161 - RNA, 17 nt, Human
gcucacugcagccucaa

SEQ ID NO: 2470162 - RNA, 16 nt, Human
gcucacuauggugcca

SEQ ID NO: 2470163 - RNA, 18 nt, Human
gcucacuauggugccaau

SEQ ID NO: 2470164 - RNA, 17 nt, Human
gcucacuaugaaucuau

SEQ ID NO: 2470165 - RNA, 16 nt, Human
gcuauuuuucccccug

SEQ ID NO: 2470166 - RNA, 12 nt, Human
gcuauuuuuccc

SEQ ID NO: 2470167 - RNA, 20 nt, Human
gcucaaaauuugaagaauga

SEQ ID NO: 2470168 - RNA, 15 nt, Human
gcucaaaaaaugagc

SEQ ID NO: 2470169 - RNA, 15 nt, Human
gcuauuuuuauggaa

SEQ ID NO: 2470170 - RNA, 22 nt, Human
gcuauuuuuauuuguuugugca

SEQ ID NO: 2470171 - RNA, 17 nt, Human
gcuaugggagccccagg

SEQ ID NO: 2470172 - RNA, 20 nt, Human
gcuauucaguaauaacucua

SEQ ID NO: 2470173 - RNA, 16 nt, Human
gcuauugacaagucau

SEQ ID NO: 2470174 - RNA, 22 nt, Human
gcuauugauauaaauaaaacau

SEQ ID NO: 2470175 - RNA, 16 nt, Human
gcuagaacucccuuuc

SEQ ID NO: 2470176 - RNA, 18 nt, Human
gcuagaacucccuuucaa

SEQ ID NO: 2470177 - RNA, 18 nt, Human
gcuacugcagcuuuacau

SEQ ID NO: 2470178 - RNA, 19 nt, Human
gcuacugcagcuuuacaug

SEQ ID NO: 2470179 - RNA, 12 nt, Human
gcuagaacuccc

SEQ ID NO: 2470180 - RNA, 13 nt, Human
gcuagaacucccu

SEQ ID NO: 2470181 - RNA, 14 nt, Human
gcuagaacucccuu

SEQ ID NO: 2470182 - RNA, 15 nt, Human
gcuagaacucccuuu

SEQ ID NO: 2470183 - RNA, 18 nt, Human
gcuacucuguuccuucac

SEQ ID NO: 2470184 - RNA, 17 nt, Human
gcuacugauuuuuguga

SEQ ID NO: 2470185 - RNA, 16 nt, Human
gcuacugauuuuugug

SEQ ID NO: 2470186 - RNA, 20 nt, Human
gcuacugauuuccuuuggag

SEQ ID NO: 2470187 - RNA, 17 nt, Human
gcuacugauuuccuuug

SEQ ID NO: 2470188 - RNA, 17 nt, Human
gcuacucuguuccuuca

SEQ ID NO: 2470189 - RNA, 21 nt, Human
gcuacucuaguauuccagacc

SEQ ID NO: 2470190 - RNA, 19 nt, Human
gcuacucuaguauuccaga

SEQ ID NO: 2470191 - RNA, 20 nt, Human
gcuacucuaguauuccagac

SEQ ID NO: 2470192 - RNA, 18 nt, Human
gcuaaucagugucucaca

SEQ ID NO: 2470193 - RNA, 17 nt, Human
gcuaaucagugucucac

SEQ ID NO: 2470194 - RNA, 16 nt, Human
gcuaaucagugucuca

SEQ ID NO: 2470195 - RNA, 15 nt, Human
gcuaaucagugucuc

SEQ ID NO: 2470196 - RNA, 22 nt, Human
gcuaaucagcauucucacuccu

SEQ ID NO: 2470197 - RNA, 17 nt, Human
gcuaaucagcauucuca

SEQ ID NO: 2470198 - RNA, 16 nt, Human
gcuaaucagcauucuc

SEQ ID NO: 2470199 - RNA, 14 nt, Human
gcuaaucagcauuc

SEQ ID NO: 2470200 - RNA, 20 nt, Human
gcuaauaucaauagaaggau

SEQ ID NO: 2470201 - RNA, 20 nt, Human
gcuaaaaaugggacuucuuu

SEQ ID NO: 2470202 - RNA, 14 nt, Human
gcuaaaaaugggac

SEQ ID NO: 2470203 - RNA, 14 nt, Human
gcuaaaaccugagc

SEQ ID NO: 2470204 - RNA, 16 nt, Human
gcuaaaaccugagcua

SEQ ID NO: 2470205 - RNA, 13 nt, Human
gcuaagugugaac

SEQ ID NO: 2470206 - RNA, 23 nt, Human
gcuaagugauccucccaccucag

SEQ ID NO: 2470207 - RNA, 19 nt, Human
gcuaaucuguagggcugga

SEQ ID NO: 2470208 - RNA, 18 nt, Human
gcuaaucuguagggcugg

SEQ ID NO: 2470209 - RNA, 17 nt, Human
gcuaaucuguagggcug

SEQ ID NO: 2470210 - RNA, 19 nt, Human
gcuaaucagugucucacac

SEQ ID NO: 2470211 - RNA, 21 nt, Human
gcuaaucuguagggcuggacc

SEQ ID NO: 2470212 - RNA, 20 nt, Human
gcuaaucuguagggcuggac

SEQ ID NO: 2470213 - RNA, 22 nt, Human
gcuaaucuguagggcuggaccu

SEQ ID NO: 2470214 - RNA, 13 nt, Human
gcuaaugggacac

SEQ ID NO: 2470215 - RNA, 15 nt, Human
gcuaaugggacacua

SEQ ID NO: 2470216 - RNA, 21 nt, Human
gcuaaugaagggaaaggauau

SEQ ID NO: 2470217 - RNA, 11 nt, Human
gcuacucagca

SEQ ID NO: 2470218 - RNA, 14 nt, Human
gcuacucagaagcc

SEQ ID NO: 2470219 - RNA, 21 nt, Human
gcuacucagaagccugaggcu

SEQ ID NO: 2470220 - RNA, 12 nt, Human
gcuacucagcag

SEQ ID NO: 2470221 - RNA, 16 nt, Human
gcuacucagcagcccu

SEQ ID NO: 2470222 - RNA, 17 nt, Human
gcuacucagcagcccuc

SEQ ID NO: 2470223 - RNA, 18 nt, Human
gcuacucagcagcccucc

SEQ ID NO: 2470224 - RNA, 19 nt, Human
gcuacucagcagcccuccu

SEQ ID NO: 2470225 - RNA, 21 nt, Human
gcuacucagcagcccuccuca

SEQ ID NO: 2470226 - RNA, 22 nt, Human
gcuacucagcagcccuccucac

SEQ ID NO: 2470227 - RNA, 24 nt, Human
gcuacucagcagcccuccucaccc

SEQ ID NO: 2470228 - RNA, 14 nt, Human
gcuacucaggaggc

SEQ ID NO: 2470229 - RNA, 15 nt, Human
gcuacucaggaggcu

SEQ ID NO: 2470230 - RNA, 16 nt, Human
gcuacucaggaggcug

SEQ ID NO: 2470231 - RNA, 23 nt, Human
gcuacucaggaggcugaggcaga

SEQ ID NO: 2470232 - RNA, 22 nt, Human
gcuaauucuuugaccuguuggg

SEQ ID NO: 2470233 - RNA, 20 nt, Human
gcuaauucccagagugugaa

SEQ ID NO: 2470234 - RNA, 15 nt, Human
gcuacucagaagccu

SEQ ID NO: 2470235 - RNA, 16 nt, Human
gcuacucagaagccug

SEQ ID NO: 2470236 - RNA, 17 nt, Human
gcuacucagaagccuga

SEQ ID NO: 2470237 - RNA, 18 nt, Human
gcuacucagaagccugag

SEQ ID NO: 2470238 - RNA, 19 nt, Human
gcuacucagaagccugagg

SEQ ID NO: 2470239 - RNA, 18 nt, Human
gcguuucuaugacacaug

SEQ ID NO: 2470240 - RNA, 22 nt, Human
gcguuugaccuuuuauguagua

SEQ ID NO: 2470241 - RNA, 11 nt, Human
gcuaaaaaugg

SEQ ID NO: 2470242 - RNA, 11 nt, Human
gcguguggcuc

SEQ ID NO: 2470243 - RNA, 13 nt, Human
gcguguggcucac

SEQ ID NO: 2470244 - RNA, 14 nt, Human
gcguguggcucacg

SEQ ID NO: 2470245 - RNA, 19 nt, Human
gcguguggcucacgugugu

SEQ ID NO: 2470246 - RNA, 15 nt, Human
gcguguguagaguua

SEQ ID NO: 2470247 - RNA, 12 nt, Human
gcguguguagag

SEQ ID NO: 2470248 - RNA, 18 nt, Human
gcguguguacacgggacu

SEQ ID NO: 2470249 - RNA, 21 nt, Human
gcguguggcucacguguguga

SEQ ID NO: 2470250 - RNA, 21 nt, Human
gcguguguagaguuaagaagc

SEQ ID NO: 2470251 - RNA, 20 nt, Human
gcguguguagaguuaagaag

SEQ ID NO: 2470252 - RNA, 22 nt, Human
gcguguguagaguuaagaagcu

SEQ ID NO: 2470253 - RNA, 17 nt, Human
gcguguguccaugugug

SEQ ID NO: 2470254 - RNA, 23 nt, Human
gcguguguggguggauauaaaua

SEQ ID NO: 2470255 - RNA, 16 nt, Human
gcguguguggguggau

SEQ ID NO: 2470256 - RNA, 18 nt, Human
gcguguguccaugugugu

SEQ ID NO: 2470257 - RNA, 23 nt, Human
gcguguguccaugugugugcaag

SEQ ID NO: 2470258 - RNA, 17 nt, Human
gcgugucaccugugcuu

SEQ ID NO: 2470259 - RNA, 19 nt, Human
gcgugucgugggugugugu

SEQ ID NO: 2470260 - RNA, 18 nt, Human
gcgugugcgugcaugugc

SEQ ID NO: 2470261 - RNA, 15 nt, Human
gcgugguuccuuucu

SEQ ID NO: 2470262 - RNA, 14 nt, Human
gcgugcccucgcug

SEQ ID NO: 2470263 - RNA, 23 nt, Human
gcgugcacacaccagagcccacc

SEQ ID NO: 2470264 - RNA, 19 nt, Human
gcgugcacacaccagagcc

SEQ ID NO: 2470265 - RNA, 16 nt, Human
gcgggaugggccaccg

SEQ ID NO: 2470266 - RNA, 15 nt, Human
gcgggaugggccacc

SEQ ID NO: 2470267 - RNA, 22 nt, Human
gcgggaggauguucugggacac

SEQ ID NO: 2470268 - RNA, 21 nt, Human
gcgggaggauguucugggaca

SEQ ID NO: 2470269 - RNA, 20 nt, Human
gcgugcacacaccagagccc

SEQ ID NO: 2470270 - RNA, 14 nt, Human
gcgggaugggccac

SEQ ID NO: 2470271 - RNA, 20 nt, Human
gcgggaggauguucugggac

SEQ ID NO: 2470272 - RNA, 21 nt, Human
gcgcacuuuccuccuggcaga

SEQ ID NO: 2470273 - RNA, 15 nt, Human
gcgauggucucagaa

SEQ ID NO: 2470274 - RNA, 23 nt, Human
gcgcaagccuguaaucccagcua

SEQ ID NO: 2470275 - RNA, 22 nt, Human
gcgaucuggguucacugcaacc

SEQ ID NO: 2470276 - RNA, 19 nt, Human
gcgaugaauuuggagacuc

SEQ ID NO: 2470277 - RNA, 21 nt, Human
gcgcacccuccccucccgucu

SEQ ID NO: 2470278 - RNA, 18 nt, Human
gcgcacccuccccucccg

SEQ ID NO: 2470279 - RNA, 17 nt, Human
gcgcacccuccccuccc

SEQ ID NO: 2470280 - RNA, 16 nt, Human
gcgcacccuccccucc

SEQ ID NO: 2470281 - RNA, 15 nt, Human
gcgcacccuccccuc

SEQ ID NO: 2470282 - RNA, 13 nt, Human
gcgcacccucccc

SEQ ID NO: 2470283 - RNA, 20 nt, Human
gcgcacaauaguaaccuggg

SEQ ID NO: 2470284 - RNA, 17 nt, Human
gcgcacaaggcugacca

SEQ ID NO: 2470285 - RNA, 18 nt, Human
gcgcacaaggcugaccaa

SEQ ID NO: 2470286 - RNA, 12 nt, Human
gcgcaccugccc

SEQ ID NO: 2470287 - RNA, 17 nt, Human
gcgcaccugcccccugg

SEQ ID NO: 2470288 - RNA, 18 nt, Human
gcgcaccugcccccuggu

SEQ ID NO: 2470289 - RNA, 19 nt, Human
gcgcaccugcccccuggug

SEQ ID NO: 2470290 - RNA, 22 nt, Human
gcgcacugugacccccagcucc

SEQ ID NO: 2470291 - RNA, 15 nt, Human
gcgagcccugguggc

SEQ ID NO: 2470292 - RNA, 17 nt, Human
gcgagcccugguggcag

SEQ ID NO: 2470293 - RNA, 16 nt, Human
gcgaggaggcuccaga

SEQ ID NO: 2470294 - RNA, 17 nt, Human
gcgaggaggcuccagag

SEQ ID NO: 2470295 - RNA, 17 nt, Human
gcgauccaccugucuca

SEQ ID NO: 2470296 - RNA, 21 nt, Human
gcgauccaccugucucagccu

SEQ ID NO: 2470297 - RNA, 20 nt, Human
gcgaggagaugcuccuuggg

SEQ ID NO: 2470298 - RNA, 15 nt, Human
gcgaggaggcuccag

SEQ ID NO: 2470299 - RNA, 19 nt, Human
gcgaggagaugcuccuugg

SEQ ID NO: 2470300 - RNA, 21 nt, Human
gcgagcuaugaucgcgccacu

SEQ ID NO: 2470301 - RNA, 14 nt, Human
gccuugccagagau

SEQ ID NO: 2470302 - RNA, 21 nt, Human
gccuguuggacccgcucugga

SEQ ID NO: 2470303 - RNA, 13 nt, Human
gccuugccagaga

SEQ ID NO: 2470304 - RNA, 17 nt, Human
gccuugccagagaucca

SEQ ID NO: 2470305 - RNA, 12 nt, Human
gccuugcccaga

SEQ ID NO: 2470306 - RNA, 14 nt, Human
gccuugcccagaga

SEQ ID NO: 2470307 - RNA, 15 nt, Human
gccuugcccagagau

SEQ ID NO: 2470308 - RNA, 16 nt, Human
gccuugcccagagaug

SEQ ID NO: 2470309 - RNA, 22 nt, Human
gccuugcccagagaugccucca

SEQ ID NO: 2470310 - RNA, 18 nt, Human
gccuugcgguauccgccc

SEQ ID NO: 2470311 - RNA, 19 nt, Human
gccuugcgguauccgcccc

SEQ ID NO: 2470312 - RNA, 22 nt, Human
gccuugcgguauccgcccccaa

SEQ ID NO: 2470313 - RNA, 20 nt, Human
gccuugcccagagaugccuc

SEQ ID NO: 2470314 - RNA, 22 nt, Human
gccuugcccggauucugggagg

SEQ ID NO: 2470315 - RNA, 21 nt, Human
gccuucggccuccauccugag

SEQ ID NO: 2470316 - RNA, 23 nt, Human
gccuucggccuccauccugaggc

SEQ ID NO: 2470317 - RNA, 20 nt, Human
gccuucggccuccauccuga

SEQ ID NO: 2470318 - RNA, 19 nt, Human
gccuugaccauucuccacc

SEQ ID NO: 2470319 - RNA, 17 nt, Human
gccuugaccauucucca

SEQ ID NO: 2470320 - RNA, 20 nt, Human
gccuugaccauucuccaccu

SEQ ID NO: 2470321 - RNA, 22 nt, Human
gccuguuccccucacuggauga

SEQ ID NO: 2470322 - RNA, 17 nt, Human
gccuguuccccucacug

SEQ ID NO: 2470323 - RNA, 19 nt, Human
gccuguuggacccgcucug

SEQ ID NO: 2470324 - RNA, 20 nt, Human
gccuggccugagcugggaug

SEQ ID NO: 2470325 - RNA, 14 nt, Human
gccuggccugaggu

SEQ ID NO: 2470326 - RNA, 22 nt, Human
gccuggcgggaugggccaccgc

SEQ ID NO: 2470327 - RNA, 21 nt, Human
gccuggcgggaugggccaccg

SEQ ID NO: 2470328 - RNA, 23 nt, Human
gccuggcgggaugggccaccgcc

SEQ ID NO: 2470329 - RNA, 20 nt, Human
gccuggcgggaugggccacc

SEQ ID NO: 2470330 - RNA, 15 nt, Human
gccuggcgggauggg

SEQ ID NO: 2470331 - RNA, 19 nt, Human
gccuggcgacagagcgaga

SEQ ID NO: 2470332 - RNA, 16 nt, Human
gccuggccuggcacac

SEQ ID NO: 2470333 - RNA, 13 nt, Human
gccuggccuggca

SEQ ID NO: 2470334 - RNA, 21 nt, Human
gccuggcgaaaccccaucucu

SEQ ID NO: 2470335 - RNA, 18 nt, Human
gccuggccugagcuggga

SEQ ID NO: 2470336 - RNA, 14 nt, Human
gccuggccugagcu

SEQ ID NO: 2470337 - RNA, 13 nt, Human
gccuggccugagc

SEQ ID NO: 2470338 - RNA, 18 nt, Human
gccuggcucagagccagu

SEQ ID NO: 2470339 - RNA, 17 nt, Human
gccuggcucagagccag

SEQ ID NO: 2470340 - RNA, 16 nt, Human
gccuggcucagagcca

SEQ ID NO: 2470341 - RNA, 14 nt, Human
gccuggcucagagc

SEQ ID NO: 2470342 - RNA, 13 nt, Human
gccuggcucaggu

SEQ ID NO: 2470343 - RNA, 16 nt, Human
gccugugccucuggga

SEQ ID NO: 2470344 - RNA, 17 nt, Human
gccugugccucugggac

SEQ ID NO: 2470345 - RNA, 18 nt, Human
gccuguggccuguguccc

SEQ ID NO: 2470346 - RNA, 19 nt, Human
gccuguggcgccgucucca

SEQ ID NO: 2470347 - RNA, 19 nt, Human
gccugugccuccucacccc

SEQ ID NO: 2470348 - RNA, 18 nt, Human
gccugugccucugggacu

SEQ ID NO: 2470349 - RNA, 17 nt, Human
gccuguguaacagcucc

SEQ ID NO: 2470350 - RNA, 16 nt, Human
gccuguguaacagcuc

SEQ ID NO: 2470351 - RNA, 14 nt, Human
gccuguguaacagc

SEQ ID NO: 2470352 - RNA, 23 nt, Human
gccuguggcgccgucuccagggg

SEQ ID NO: 2470353 - RNA, 21 nt, Human
gccuguggcgccgucuccagg

SEQ ID NO: 2470354 - RNA, 16 nt, Human
gccuguggcggugccu

SEQ ID NO: 2470355 - RNA, 18 nt, Human
gccuguggcggugccugg

SEQ ID NO: 2470356 - RNA, 19 nt, Human
gccuguggcggugccuggg

SEQ ID NO: 2470357 - RNA, 20 nt, Human
gccuguugggccaggagccu

SEQ ID NO: 2470358 - RNA, 18 nt, Human
gccuguugggccaggagc

SEQ ID NO: 2470359 - RNA, 16 nt, Human
gccuguugggccagga

SEQ ID NO: 2470360 - RNA, 15 nt, Human
gccuguugggccagg

SEQ ID NO: 2470361 - RNA, 23 nt, Human
gccuguguaacagcuccuuggga

SEQ ID NO: 2470362 - RNA, 22 nt, Human
gccuguguaacagcuccuuggg

SEQ ID NO: 2470363 - RNA, 19 nt, Human
gccuguguaacagcuccuu

SEQ ID NO: 2470364 - RNA, 18 nt, Human
gccuguguaacagcuccu

SEQ ID NO: 2470365 - RNA, 14 nt, Human
gccuguguccaugc

SEQ ID NO: 2470366 - RNA, 12 nt, Human
gccuguguccau

SEQ ID NO: 2470367 - RNA, 19 nt, Human
gccuguucccauucuugca

SEQ ID NO: 2470368 - RNA, 14 nt, Human
gccuguugggccag

SEQ ID NO: 2470369 - RNA, 20 nt, Human
gccuguucccccgccgcuuu

SEQ ID NO: 2470370 - RNA, 14 nt, Human
gccuguucccccgc

SEQ ID NO: 2470371 - RNA, 23 nt, Human
gccuguucccauucuugcauggc

SEQ ID NO: 2470372 - RNA, 15 nt, Human
gccugcccaggcccc

SEQ ID NO: 2470373 - RNA, 16 nt, Human
gccugaaagaggcuga

SEQ ID NO: 2470374 - RNA, 19 nt, Human
gccucuuugucuaaaacaa

SEQ ID NO: 2470375 - RNA, 23 nt, Human
gccucuuugucuaaaacaauaaa

SEQ ID NO: 2470376 - RNA, 22 nt, Human
gccugcccaggccccugccacc

SEQ ID NO: 2470377 - RNA, 16 nt, Human
gccugccccccucauc

SEQ ID NO: 2470378 - RNA, 18 nt, Human
gccucuuuucucugugcu

SEQ ID NO: 2470379 - RNA, 23 nt, Human
gccugccccaaacaaauaugcaa

SEQ ID NO: 2470380 - RNA, 17 nt, Human
gccugccccaaacaaau

SEQ ID NO: 2470381 - RNA, 20 nt, Human
gccugccccgcccccagucc

SEQ ID NO: 2470382 - RNA, 21 nt, Human
gccugccccgcccccaguccc

SEQ ID NO: 2470383 - RNA, 14 nt, Human
gccugccccuccca

SEQ ID NO: 2470384 - RNA, 15 nt, Human
gccugccccucccag

SEQ ID NO: 2470385 - RNA, 16 nt, Human
gccugccccucccaga

SEQ ID NO: 2470386 - RNA, 15 nt, Human
gccucuuagaugcag

SEQ ID NO: 2470387 - RNA, 16 nt, Human
gccucuuaugggcugg

SEQ ID NO: 2470388 - RNA, 18 nt, Human
gccucuuaugggcugggu

SEQ ID NO: 2470389 - RNA, 17 nt, Human
gccucuuaugggcuggg

SEQ ID NO: 2470390 - RNA, 22 nt, Human
gccucgaacuggcugcaaaggg

SEQ ID NO: 2470391 - RNA, 20 nt, Human
gccucgaacuggcugcaaag

SEQ ID NO: 2470392 - RNA, 20 nt, Human
gccuccuuccaccucccucc

SEQ ID NO: 2470393 - RNA, 19 nt, Human
gccuccuuccaccucccuc

SEQ ID NO: 2470394 - RNA, 17 nt, Human
gccucgacacagagugg

SEQ ID NO: 2470395 - RNA, 20 nt, Human
gccucuuaaagcugccugua

SEQ ID NO: 2470396 - RNA, 18 nt, Human
gccucuuagacuucugcu

SEQ ID NO: 2470397 - RNA, 22 nt, Human
gccucuuaaagcugccuguagu

SEQ ID NO: 2470398 - RNA, 23 nt, Human
gccucuuaaagcugccuguaguu

SEQ ID NO: 2470399 - RNA, 12 nt, Human
gccucuuuucuc

SEQ ID NO: 2470400 - RNA, 17 nt, Human
gccucuuucugucccuu

SEQ ID NO: 2470401 - RNA, 23 nt, Human
gccucuuucaagcagucgugccu

SEQ ID NO: 2470402 - RNA, 23 nt, Human
gccucuuucauccacuagugcaa

SEQ ID NO: 2470403 - RNA, 16 nt, Human
gccucuuucauccacu

SEQ ID NO: 2470404 - RNA, 14 nt, Human
gccugcccaggccc

SEQ ID NO: 2470405 - RNA, 13 nt, Human
gccugcccaggcc

SEQ ID NO: 2470406 - RNA, 22 nt, Human
gccucuucccccugcuuccacc

SEQ ID NO: 2470407 - RNA, 18 nt, Human
gccucuucccccugcuuc

SEQ ID NO: 2470408 - RNA, 16 nt, Human
gccucuucccccugcu

SEQ ID NO: 2470409 - RNA, 14 nt, Human
gccucuucccccug

SEQ ID NO: 2470410 - RNA, 17 nt, Human
gccucuucaaauuagaa

SEQ ID NO: 2470411 - RNA, 19 nt, Human
gccucuuagacuucugcuu

SEQ ID NO: 2470412 - RNA, 21 nt, Human
gccucuuccagucuuccugac

SEQ ID NO: 2470413 - RNA, 21 nt, Human
gccucuuaugggcuggguucu

SEQ ID NO: 2470414 - RNA, 14 nt, Human
gccucuuggguuca

SEQ ID NO: 2470415 - RNA, 21 nt, Human
gccucuuggaccucugcucug

SEQ ID NO: 2470416 - RNA, 14 nt, Human
gccuccaggugugc

SEQ ID NO: 2470417 - RNA, 13 nt, Human
gccuccaggugug

SEQ ID NO: 2470418 - RNA, 12 nt, Human
gccuccaggugu

SEQ ID NO: 2470419 - RNA, 24 nt, Human
gccuccagggcuggacugaggccu

SEQ ID NO: 2470420 - RNA, 23 nt, Human
gccuccagggcuggacugaggcc

SEQ ID NO: 2470421 - RNA, 22 nt, Human
gccuccagggcuggacugaggc

SEQ ID NO: 2470422 - RNA, 21 nt, Human
gccuccagggcuggacugagg

SEQ ID NO: 2470423 - RNA, 12 nt, Human
gccuccauccug

SEQ ID NO: 2470424 - RNA, 15 nt, Human
gccuccauccaaggc

SEQ ID NO: 2470425 - RNA, 23 nt, Human
gccuccugugugugcgccuacag

SEQ ID NO: 2470426 - RNA, 19 nt, Human
gccuccugugugugcgccu

SEQ ID NO: 2470427 - RNA, 17 nt, Human
gccucgaacuggcugca

SEQ ID NO: 2470428 - RNA, 18 nt, Human
gccuccuuccaccucccu

SEQ ID NO: 2470429 - RNA, 17 nt, Human
gccuccuuccaccuccc

SEQ ID NO: 2470430 - RNA, 16 nt, Human
gccuccuuccaccucc

SEQ ID NO: 2470431 - RNA, 17 nt, Human
gccuccauucugaccau

SEQ ID NO: 2470432 - RNA, 17 nt, Human
gccuccauuuaguucuu

SEQ ID NO: 2470433 - RNA, 17 nt, Human
gccucccaaagugcugg

SEQ ID NO: 2470434 - RNA, 16 nt, Human
gccuccauucugacca

SEQ ID NO: 2470435 - RNA, 16 nt, Human
gccucccaaagugcug

SEQ ID NO: 2470436 - RNA, 11 nt, Human
gccuccaugcu

SEQ ID NO: 2470437 - RNA, 16 nt, Human
gccuccauccaaggcc

SEQ ID NO: 2470438 - RNA, 16 nt, Human
gccuccaggugugcac

SEQ ID NO: 2470439 - RNA, 20 nt, Human
gcccucaccccugcccuggg

SEQ ID NO: 2470440 - RNA, 16 nt, Human
gcccccaccuccaccc

SEQ ID NO: 2470441 - RNA, 15 nt, Human
gcccccaccuccacc

SEQ ID NO: 2470442 - RNA, 18 nt, Human
gcccccaccuccacccuc

SEQ ID NO: 2470443 - RNA, 12 nt, Human
gcccccacugac

SEQ ID NO: 2470444 - RNA, 17 nt, Human
gcccccacugaccagaa

SEQ ID NO: 2470445 - RNA, 12 nt, Human
gcccccacuggu

SEQ ID NO: 2470446 - RNA, 18 nt, Human
gcccccaccgugggcagg

SEQ ID NO: 2470447 - RNA, 20 nt, Human
gcccccaccgugggcaggga

SEQ ID NO: 2470448 - RNA, 14 nt, Human
gcccccaccuccac

SEQ ID NO: 2470449 - RNA, 13 nt, Human
gcccccaccucca

SEQ ID NO: 2470450 - RNA, 22 nt, Human
gcccccaccgugggcagggagc

SEQ ID NO: 2470451 - RNA, 17 nt, Human
gcccccaccgugggcag

SEQ ID NO: 2470452 - RNA, 18 nt, Human
gcccccaucucaugcccc

SEQ ID NO: 2470453 - RNA, 19 nt, Human
gcccccacugccuuugacc

SEQ ID NO: 2470454 - RNA, 16 nt, Human
gccccccagccucugg

SEQ ID NO: 2470455 - RNA, 15 nt, Human
gccccccauccuggc

SEQ ID NO: 2470456 - RNA, 13 nt, Human
gccccccacccca

SEQ ID NO: 2470457 - RNA, 14 nt, Human
gccccccaccccag

SEQ ID NO: 2470458 - RNA, 22 nt, Human
gcccccccaacacugugcccug

SEQ ID NO: 2470459 - RNA, 19 nt, Human
gcccccccaacacugugcc

SEQ ID NO: 2470460 - RNA, 17 nt, Human
gcccccccaacacugug

SEQ ID NO: 2470461 - RNA, 20 nt, Human
gccccccauccuggcccauc

SEQ ID NO: 2470462 - RNA, 19 nt, Human
gccccccauccuggcccau

SEQ ID NO: 2470463 - RNA, 18 nt, Human
gccccccauccuggccca

SEQ ID NO: 2470464 - RNA, 17 nt, Human
gccccccauccuggccc

SEQ ID NO: 2470465 - RNA, 16 nt, Human
gccccccauccuggcc

SEQ ID NO: 2470466 - RNA, 23 nt, Human
gcccccccaacacugugcccugg

SEQ ID NO: 2470467 - RNA, 16 nt, Human
gcccccccccaccccu

SEQ ID NO: 2470468 - RNA, 17 nt, Human
gcccccccccaccccug

SEQ ID NO: 2470469 - RNA, 14 nt, Human
gcccccccuuccac

SEQ ID NO: 2470470 - RNA, 13 nt, Human
gcccccccuucca

SEQ ID NO: 2470471 - RNA, 16 nt, Human
gccccugccacccugg

SEQ ID NO: 2470472 - RNA, 17 nt, Human
gccccugccacccuggg

SEQ ID NO: 2470473 - RNA, 11 nt, Human
gccccugccag

SEQ ID NO: 2470474 - RNA, 16 nt, Human
gccccugccagacccc

SEQ ID NO: 2470475 - RNA, 18 nt, Human
gccccugccaccucccug

SEQ ID NO: 2470476 - RNA, 16 nt, Human
gccccccucaaaccuc

SEQ ID NO: 2470477 - RNA, 14 nt, Human
gccccccucaaacc

SEQ ID NO: 2470478 - RNA, 11 nt, Human
gccccccucaa

SEQ ID NO: 2470479 - RNA, 15 nt, Human
gcccccccuuccacu

SEQ ID NO: 2470480 - RNA, 23 nt, Human
gcccgggcugccugggcuguugg

SEQ ID NO: 2470481 - RNA, 18 nt, Human
gcccgggcugccugggcu

SEQ ID NO: 2470482 - RNA, 17 nt, Human
gcccgggcugccugggc

SEQ ID NO: 2470483 - RNA, 16 nt, Human
gcccgggcugccuggg

SEQ ID NO: 2470484 - RNA, 15 nt, Human
gcccgggcugccugg

SEQ ID NO: 2470485 - RNA, 14 nt, Human
gcccgggcugccug

SEQ ID NO: 2470486 - RNA, 13 nt, Human
gcccgggcugccu

SEQ ID NO: 2470487 - RNA, 18 nt, Human
gcccggggcagcugccag

SEQ ID NO: 2470488 - RNA, 14 nt, Human
gcccggggcagcug

SEQ ID NO: 2470489 - RNA, 17 nt, Human
gcccggggcagcugcca

SEQ ID NO: 2470490 - RNA, 22 nt, Human
gcccggggcagcugccagagaa

SEQ ID NO: 2470491 - RNA, 23 nt, Human
gcccgggcucugccucccaucac

SEQ ID NO: 2470492 - RNA, 12 nt, Human
gcccgggcugcc

SEQ ID NO: 2470493 - RNA, 19 nt, Human
gccccugcugccuccccaa

SEQ ID NO: 2470494 - RNA, 16 nt, Human
gccccugcugccuccc

SEQ ID NO: 2470495 - RNA, 17 nt, Human
gccccugcugccucccc

SEQ ID NO: 2470496 - RNA, 20 nt, Human
gccccugcugccuccccaac

SEQ ID NO: 2470497 - RNA, 23 nt, Human
gccccugccucucugcagguccc

SEQ ID NO: 2470498 - RNA, 20 nt, Human
gccccugccucucugcaggu

SEQ ID NO: 2470499 - RNA, 21 nt, Human
gccccugccccagcccaaguc

SEQ ID NO: 2470500 - RNA, 20 nt, Human
gccccugccccagcccaagu

SEQ ID NO: 2470501 - RNA, 15 nt, Human
gccccugccccagcc

SEQ ID NO: 2470502 - RNA, 13 nt, Human
gccccugcugccu

SEQ ID NO: 2470503 - RNA, 15 nt, Human
gccccugcugccucc

SEQ ID NO: 2470504 - RNA, 16 nt, Human
gcccuaaugcgcaggc

SEQ ID NO: 2470505 - RNA, 17 nt, Human
gcccuaaugcgcaggcu

SEQ ID NO: 2470506 - RNA, 19 nt, Human
gcccuaaugcgcaggcugg

SEQ ID NO: 2470507 - RNA, 20 nt, Human
gcccuaaugcgcaggcuggc

SEQ ID NO: 2470508 - RNA, 15 nt, Human
gcccuaaggaucucu

SEQ ID NO: 2470509 - RNA, 13 nt, Human
gcccguccugccu

SEQ ID NO: 2470510 - RNA, 17 nt, Human
gcccguaaacacgccug

SEQ ID NO: 2470511 - RNA, 21 nt, Human
gcccuaaccucugagucacca

SEQ ID NO: 2470512 - RNA, 18 nt, Human
gcccgucauguuccucaa

SEQ ID NO: 2470513 - RNA, 22 nt, Human
gcccucaccccugguucucauc

SEQ ID NO: 2470514 - RNA, 21 nt, Human
gcccucaccccugguucucau

SEQ ID NO: 2470515 - RNA, 18 nt, Human
gcccucaccccugguucu

SEQ ID NO: 2470516 - RNA, 23 nt, Human
gcccucaaggccucccacaguga

SEQ ID NO: 2470517 - RNA, 19 nt, Human
gcccucaccccugcccugg

SEQ ID NO: 2470518 - RNA, 22 nt, Human
gcccucaaggccucccacagug

SEQ ID NO: 2470519 - RNA, 21 nt, Human
gcccucaaggccucccacagu

SEQ ID NO: 2470520 - RNA, 13 nt, Human
gcccucaccccug

SEQ ID NO: 2470521 - RNA, 20 nt, Human
gcccucaaggccucccacag

SEQ ID NO: 2470522 - RNA, 19 nt, Human
gcccucaaggccucccaca

SEQ ID NO: 2470523 - RNA, 18 nt, Human
gcccucaaggccucccac

SEQ ID NO: 2470524 - RNA, 17 nt, Human
gcccucaaggccuccca

SEQ ID NO: 2470525 - RNA, 15 nt, Human
gcccucaaucccagc

SEQ ID NO: 2470526 - RNA, 19 nt, Human
gcccucaaaaugacagcca

SEQ ID NO: 2470527 - RNA, 15 nt, Human
gcccucaaggccucc

SEQ ID NO: 2470528 - RNA, 16 nt, Human
gcccucaaggccuccc

SEQ ID NO: 2470529 - RNA, 20 nt, Human
gccuaggugacagagugaga

SEQ ID NO: 2470530 - RNA, 17 nt, Human
gccuagggccuggucca

SEQ ID NO: 2470531 - RNA, 17 nt, Human
gccuaggggucagggac

SEQ ID NO: 2470532 - RNA, 14 nt, Human
gccuagucccuucc

SEQ ID NO: 2470533 - RNA, 22 nt, Human
gccuagugaaggcuucucucug

SEQ ID NO: 2470534 - RNA, 23 nt, Human
gccuagugaaggcuucucucugu

SEQ ID NO: 2470535 - RNA, 19 nt, Human
gccuagugaaggcuucucu

SEQ ID NO: 2470536 - RNA, 22 nt, Human
gccuaggggucagggaccaagg

SEQ ID NO: 2470537 - RNA, 19 nt, Human
gccuagucccuuccacacc

SEQ ID NO: 2470538 - RNA, 18 nt, Human
gccuaguggggucucccu

SEQ ID NO: 2470539 - RNA, 19 nt, Human
gccuaguggggucucccuc

SEQ ID NO: 2470540 - RNA, 22 nt, Human
gccuaguggggucucccucucc

SEQ ID NO: 2470541 - RNA, 23 nt, Human
gccuaguggggucucccucuccu

SEQ ID NO: 2470542 - RNA, 17 nt, Human
gccuaguucauccaauc

SEQ ID NO: 2470543 - RNA, 21 nt, Human
gccuaguucauccaauccuca

SEQ ID NO: 2470544 - RNA, 21 nt, Human
gccuagcauacguacacauuu

SEQ ID NO: 2470545 - RNA, 22 nt, Human
gccuagcauacguacacauuuu

SEQ ID NO: 2470546 - RNA, 20 nt, Human
gccuagcauacguacacauu

SEQ ID NO: 2470547 - RNA, 16 nt, Human
gccgccgccucgccca

SEQ ID NO: 2470548 - RNA, 15 nt, Human
gccgccgccucgccc

SEQ ID NO: 2470549 - RNA, 14 nt, Human
gccgccgccucgcc

SEQ ID NO: 2470550 - RNA, 13 nt, Human
gccgccgccucuu

SEQ ID NO: 2470551 - RNA, 24 nt, Human
gccgccgccucgcccaccgcaugc

SEQ ID NO: 2470552 - RNA, 23 nt, Human
gccuagcauacguacacauuuua

SEQ ID NO: 2470553 - RNA, 13 nt, Human
gccgccucaaugu

SEQ ID NO: 2470554 - RNA, 15 nt, Human
gccuagccgaccuca

SEQ ID NO: 2470555 - RNA, 16 nt, Human
gccuagccgaccucag

SEQ ID NO: 2470556 - RNA, 17 nt, Human
gccuagccgaccucagc

SEQ ID NO: 2470557 - RNA, 18 nt, Human
gccuagccgaccucagcc

SEQ ID NO: 2470558 - RNA, 14 nt, Human
gccuagcugcuaca

SEQ ID NO: 2470559 - RNA, 14 nt, Human
gccgccucaccccc

SEQ ID NO: 2470560 - RNA, 19 nt, Human
gccuagccgaccucagccu

SEQ ID NO: 2470561 - RNA, 20 nt, Human
gccuagccgaccucagccuu

SEQ ID NO: 2470562 - RNA, 15 nt, Human
gccuaggugacagag

SEQ ID NO: 2470563 - RNA, 14 nt, Human
gccuaggugacaga

SEQ ID NO: 2470564 - RNA, 20 nt, Human
gccuaggccucagccagaga

SEQ ID NO: 2470565 - RNA, 17 nt, Human
gccuaggccucagccag

SEQ ID NO: 2470566 - RNA, 18 nt, Human
gccuaggccucagccaga

SEQ ID NO: 2470567 - RNA, 13 nt, Human
gccuaggugacag

SEQ ID NO: 2470568 - RNA, 24 nt, Human
gccuagcugcuacaaagaagacau

SEQ ID NO: 2470569 - RNA, 23 nt, Human
gccuagcugcuacaaagaagaca

SEQ ID NO: 2470570 - RNA, 22 nt, Human
gccuagcugcuacaaagaagac

SEQ ID NO: 2470571 - RNA, 19 nt, Human
gccuagcugcuacaaagaa

SEQ ID NO: 2470572 - RNA, 17 nt, Human
gccuagcugcuacaaag

SEQ ID NO: 2470573 - RNA, 16 nt, Human
gccuagcugcuacaaa

SEQ ID NO: 2470574 - RNA, 15 nt, Human
gccuagcugcuacaa

SEQ ID NO: 2470575 - RNA, 18 nt, Human
gccuaggagauaucugag

SEQ ID NO: 2470576 - RNA, 11 nt, Human
gccuaggagau

SEQ ID NO: 2470577 - RNA, 20 nt, Human
gccuaggagauaucugaggg

SEQ ID NO: 2470578 - RNA, 17 nt, Human
gccuaggaauucccagc

SEQ ID NO: 2470579 - RNA, 13 nt, Human
gccuaggccucag

SEQ ID NO: 2470580 - RNA, 16 nt, Human
gccuaggccucagcca

SEQ ID NO: 2470581 - RNA, 15 nt, Human
gccgcagcucuugcc

SEQ ID NO: 2470582 - RNA, 14 nt, Human
gccgcagcucuugc

SEQ ID NO: 2470583 - RNA, 13 nt, Human
gccgcagcucuug

SEQ ID NO: 2470584 - RNA, 18 nt, Human
gcccuuaucugugcucag

SEQ ID NO: 2470585 - RNA, 20 nt, Human
gccgcagcucuugcccuucc

SEQ ID NO: 2470586 - RNA, 19 nt, Human
gccgcagcucuugcccuuc

SEQ ID NO: 2470587 - RNA, 15 nt, Human
gccgcaucuucucca

SEQ ID NO: 2470588 - RNA, 17 nt, Human
gccgcaucuucuccauc

SEQ ID NO: 2470589 - RNA, 18 nt, Human
gccgcaucuucuccaucu

SEQ ID NO: 2470590 - RNA, 20 nt, Human
gccgcaucuucuccaucugg

SEQ ID NO: 2470591 - RNA, 14 nt, Human
gccgcauucccuga

SEQ ID NO: 2470592 - RNA, 14 nt, Human
gccgcccaaggccc

SEQ ID NO: 2470593 - RNA, 23 nt, Human
gccgcccccugccccccagccuc

SEQ ID NO: 2470594 - RNA, 18 nt, Human
gccgcccugcgggugaac

SEQ ID NO: 2470595 - RNA, 13 nt, Human
gccgccgccucgc

SEQ ID NO: 2470596 - RNA, 15 nt, Human
gccgccccacccaga

SEQ ID NO: 2470597 - RNA, 17 nt, Human
gccgcccccugcccccc

SEQ ID NO: 2470598 - RNA, 14 nt, Human
gccgccccacccag

SEQ ID NO: 2470599 - RNA, 19 nt, Human
gccgccccagccucugagc

SEQ ID NO: 2470600 - RNA, 15 nt, Human
gcccuuaucugugcu

SEQ ID NO: 2470601 - RNA, 16 nt, Human
gcccuuaucugugcuc

SEQ ID NO: 2470602 - RNA, 22 nt, Human
gcccuuagcagggaaacagcua

SEQ ID NO: 2470603 - RNA, 20 nt, Human
gccgcagcccugcagagggc

SEQ ID NO: 2470604 - RNA, 19 nt, Human
gccgcagcccugcagaggg

SEQ ID NO: 2470605 - RNA, 17 nt, Human
gccgcagccucccucug

SEQ ID NO: 2470606 - RNA, 18 nt, Human
gccgcagccucccucuga

SEQ ID NO: 2470607 - RNA, 21 nt, Human
gcccugucgagacacuugccu

SEQ ID NO: 2470608 - RNA, 16 nt, Human
gcccugucgagacacu

SEQ ID NO: 2470609 - RNA, 23 nt, Human
gcccugucccucccaccucugug

SEQ ID NO: 2470610 - RNA, 22 nt, Human
gcccugucccucccaccucugu

SEQ ID NO: 2470611 - RNA, 21 nt, Human
gcccugucccucccaccucug

SEQ ID NO: 2470612 - RNA, 20 nt, Human
gcccugucccucccaccucu

SEQ ID NO: 2470613 - RNA, 19 nt, Human
gcccugucccucccaccuc

SEQ ID NO: 2470614 - RNA, 22 nt, Human
gcccuguccugccuaaggcuga

SEQ ID NO: 2470615 - RNA, 20 nt, Human
gcccuuagcagggaaacagc

SEQ ID NO: 2470616 - RNA, 11 nt, Human
gcccugucugu

SEQ ID NO: 2470617 - RNA, 17 nt, Human
gcccugucgagacacuu

SEQ ID NO: 2470618 - RNA, 21 nt, Human
gcccugugcaaccucuuggcc

SEQ ID NO: 2470619 - RNA, 19 nt, Human
gcccuuagcagggaaacag

SEQ ID NO: 2470620 - RNA, 13 nt, Human
gcccugccuccuu

SEQ ID NO: 2470621 - RNA, 12 nt, Human
gcccugccuccu

SEQ ID NO: 2470622 - RNA, 18 nt, Human
gcccugcccugguuuccu

SEQ ID NO: 2470623 - RNA, 15 nt, Human
gcccugucagugcag

SEQ ID NO: 2470624 - RNA, 18 nt, Human
gcccugucccucccaccu

SEQ ID NO: 2470625 - RNA, 17 nt, Human
gcccugucccucccacc

SEQ ID NO: 2470626 - RNA, 16 nt, Human
gcccugucccucccac

SEQ ID NO: 2470627 - RNA, 15 nt, Human
gcccugucccuccca

SEQ ID NO: 2470628 - RNA, 13 nt, Human
gcccugucccucc

SEQ ID NO: 2470629 - RNA, 22 nt, Human
gcccugcccaccuggccucugc

SEQ ID NO: 2470630 - RNA, 21 nt, Human
gcccugcccaccuggccucug

SEQ ID NO: 2470631 - RNA, 20 nt, Human
gcccugcccaccuggccucu

SEQ ID NO: 2470632 - RNA, 17 nt, Human
gcccugcccaccuggcc

SEQ ID NO: 2470633 - RNA, 11 nt, Human
gcccugccucc

SEQ ID NO: 2470634 - RNA, 12 nt, Human
gcccugcccugg

SEQ ID NO: 2470635 - RNA, 16 nt, Human
gcccugcccugguuuc

SEQ ID NO: 2470636 - RNA, 11 nt, Human
gcccugcccug

SEQ ID NO: 2470637 - RNA, 15 nt, Human
gcccugcccuagcuc

SEQ ID NO: 2470638 - RNA, 16 nt, Human
gcccugcccuagcucc

SEQ ID NO: 2470639 - RNA, 17 nt, Human
gcccugcccuagcucca

SEQ ID NO: 2470640 - RNA, 18 nt, Human
gcccugcccuagcuccac

SEQ ID NO: 2470641 - RNA, 18 nt, Human
gcccugcagagggcacag

SEQ ID NO: 2470642 - RNA, 16 nt, Human
gcccugcagagggcac

SEQ ID NO: 2470643 - RNA, 21 nt, Human
gcccugcagaggggaaaccag

SEQ ID NO: 2470644 - RNA, 22 nt, Human
gcuggaggugggagcaggagau

SEQ ID NO: 2470645 - RNA, 16 nt, Human
gcuggagguggggccu

SEQ ID NO: 2470646 - RNA, 21 nt, Human
gcuggaggugggagcaggaga

SEQ ID NO: 2470647 - RNA, 19 nt, Human
gcuggaggugggagcagga

SEQ ID NO: 2470648 - RNA, 17 nt, Human
gcuggaggugggagcag

SEQ ID NO: 2470649 - RNA, 16 nt, Human
gcuggaggugggagca

SEQ ID NO: 2470650 - RNA, 15 nt, Human
gcuggaggugggagc

SEQ ID NO: 2470651 - RNA, 14 nt, Human
gcuggaggugggag

SEQ ID NO: 2470652 - RNA, 16 nt, Human
gcuggagguaaggccu

SEQ ID NO: 2470653 - RNA, 13 nt, Human
gcuggaggcaggg

SEQ ID NO: 2470654 - RNA, 14 nt, Human
gcuggaggcagggc

SEQ ID NO: 2470655 - RNA, 15 nt, Human
gcuggaggcagggcc

SEQ ID NO: 2470656 - RNA, 12 nt, Human
gcuggaggcagg

SEQ ID NO: 2470657 - RNA, 16 nt, Human
gcuggaggcagggccu

SEQ ID NO: 2470658 - RNA, 21 nt, Human
gcuggaggcagggccuugccc

SEQ ID NO: 2470659 - RNA, 20 nt, Human
gcuggccuggccccucaggg

SEQ ID NO: 2470660 - RNA, 22 nt, Human
gcuggagugcagugagccgaga

SEQ ID NO: 2470661 - RNA, 17 nt, Human
gcuggagugcagugagc

SEQ ID NO: 2470662 - RNA, 18 nt, Human
gcuggagugcagugagcc

SEQ ID NO: 2470663 - RNA, 20 nt, Human
gcuggcgcagccaaggccga

SEQ ID NO: 2470664 - RNA, 17 nt, Human
gcuggcgcagccaaggc

SEQ ID NO: 2470665 - RNA, 16 nt, Human
gcuggcgcagccaagg

SEQ ID NO: 2470666 - RNA, 14 nt, Human
gcuggcgcagccaa

SEQ ID NO: 2470667 - RNA, 13 nt, Human
gcuggcgcagcca

SEQ ID NO: 2470668 - RNA, 20 nt, Human
gcuggcgugcaguggugcga

SEQ ID NO: 2470669 - RNA, 19 nt, Human
gcuggccuuccugcccuac

SEQ ID NO: 2470670 - RNA, 23 nt, Human
gcuggccuuccugcccuacagag

SEQ ID NO: 2470671 - RNA, 16 nt, Human
gcuggccuuccugccc

SEQ ID NO: 2470672 - RNA, 15 nt, Human
gcuggccuuccugcc

SEQ ID NO: 2470673 - RNA, 13 nt, Human
gcuggccuuccug

SEQ ID NO: 2470674 - RNA, 12 nt, Human
gcuggccuuccu

SEQ ID NO: 2470675 - RNA, 15 nt, Human
gcuggagugcagugg

SEQ ID NO: 2470676 - RNA, 17 nt, Human
gcuggccuggccggcaa

SEQ ID NO: 2470677 - RNA, 14 nt, Human
gcuggccuggccgg

SEQ ID NO: 2470678 - RNA, 15 nt, Human
gcugcugaaggcucg

SEQ ID NO: 2470679 - RNA, 14 nt, Human
gcugcugaaggcuc

SEQ ID NO: 2470680 - RNA, 13 nt, Human
gcugcugaaggcu

SEQ ID NO: 2470681 - RNA, 23 nt, Human
gcucugguccauagagagcaaga

SEQ ID NO: 2470682 - RNA, 16 nt, Human
gcucugguccauagag

SEQ ID NO: 2470683 - RNA, 15 nt, Human
gcucugguccauaga

SEQ ID NO: 2470684 - RNA, 14 nt, Human
gcucugggccauuc

SEQ ID NO: 2470685 - RNA, 20 nt, Human
gcucugggccauucuccaca

SEQ ID NO: 2470686 - RNA, 23 nt, Human
gcucugggccauucuccacagca

SEQ ID NO: 2470687 - RNA, 13 nt, Human
gcucugcccuugg

SEQ ID NO: 2470688 - RNA, 13 nt, Human
gcucugcccugcc

SEQ ID NO: 2470689 - RNA, 15 nt, Human
gcucugcccugcccu

SEQ ID NO: 2470690 - RNA, 21 nt, Human
gcucugggauagcugacccag

SEQ ID NO: 2470691 - RNA, 13 nt, Human
gcugcuggcuggu

SEQ ID NO: 2470692 - RNA, 14 nt, Human
gcugcuggcgccuc

SEQ ID NO: 2470693 - RNA, 20 nt, Human
gcugcuggaucacagcugcu

SEQ ID NO: 2470694 - RNA, 12 nt, Human
gcugcuggcgcc

SEQ ID NO: 2470695 - RNA, 12 nt, Human
gcugcuggagga

SEQ ID NO: 2470696 - RNA, 14 nt, Human
gcugcuggaggaaa

SEQ ID NO: 2470697 - RNA, 18 nt, Human
gcugcuggaucacagcug

SEQ ID NO: 2470698 - RNA, 22 nt, Human
gcugcuggaggaaaacugagac

SEQ ID NO: 2470699 - RNA, 13 nt, Human
gcugcugcugcug

SEQ ID NO: 2470700 - RNA, 15 nt, Human
gcugcugaaggcuca

SEQ ID NO: 2470701 - RNA, 18 nt, Human
gcugcugaaggcucgagc

SEQ ID NO: 2470702 - RNA, 14 nt, Human
gcugcuggagacuc

SEQ ID NO: 2470703 - RNA, 13 nt, Human
gcugcuggagacu

SEQ ID NO: 2470704 - RNA, 21 nt, Human
gcugcuggacaguaucacugu

SEQ ID NO: 2470705 - RNA, 14 nt, Human
gcugcugcugcugc

SEQ ID NO: 2470706 - RNA, 19 nt, Human
gcugcuggcgccucugcaa

SEQ ID NO: 2470707 - RNA, 18 nt, Human
gcugcuggcgccucugca

SEQ ID NO: 2470708 - RNA, 17 nt, Human
gcugcuggcgccucugc

SEQ ID NO: 2470709 - RNA, 16 nt, Human
gcugcuggcgccucug

SEQ ID NO: 2470710 - RNA, 11 nt, Human
gcugcuggcuu

SEQ ID NO: 2470711 - RNA, 21 nt, Human
gcuggguaaacuguggaugau

SEQ ID NO: 2470712 - RNA, 13 nt, Human
gcugggucaggca

SEQ ID NO: 2470713 - RNA, 14 nt, Human
gcugggucaggcag

SEQ ID NO: 2470714 - RNA, 15 nt, Human
gcugggucaggcagg

SEQ ID NO: 2470715 - RNA, 16 nt, Human
gcugggucaggcaggg

SEQ ID NO: 2470716 - RNA, 12 nt, Human
gcugggucgccc

SEQ ID NO: 2470717 - RNA, 18 nt, Human
gcugggugcgaccccauc

SEQ ID NO: 2470718 - RNA, 22 nt, Human
gcugggccccugccucucugca

SEQ ID NO: 2470719 - RNA, 21 nt, Human
gcugggccccugccucucugc

SEQ ID NO: 2470720 - RNA, 23 nt, Human
gcugggccccugccucucugcag

SEQ ID NO: 2470721 - RNA, 12 nt, Human
gcuggcucugag

SEQ ID NO: 2470722 - RNA, 23 nt, Human
gcuggcuccagaugcagggcagu

SEQ ID NO: 2470723 - RNA, 14 nt, Human
gcuggcuccagaug

SEQ ID NO: 2470724 - RNA, 17 nt, Human
gcuggcuccagaugcag

SEQ ID NO: 2470725 - RNA, 21 nt, Human
gcuggcuccagaugcagggca

SEQ ID NO: 2470726 - RNA, 22 nt, Human
gcuggcuccagaugcagggcag

SEQ ID NO: 2470727 - RNA, 15 nt, Human
gcuggcgccucugca

SEQ ID NO: 2470728 - RNA, 14 nt, Human
gcuggcgccucugc

SEQ ID NO: 2470729 - RNA, 13 nt, Human
gcuggcgccucug

SEQ ID NO: 2470730 - RNA, 12 nt, Human
gcuggcgccucu

SEQ ID NO: 2470731 - RNA, 16 nt, Human
gcuggcgccucugcaa

SEQ ID NO: 2470732 - RNA, 16 nt, Human
gcuggcggcuacucag

SEQ ID NO: 2470733 - RNA, 17 nt, Human
gcuggcuguuggcuggg

SEQ ID NO: 2470734 - RNA, 16 nt, Human
gcuggcuguuggcugg

SEQ ID NO: 2470735 - RNA, 15 nt, Human
gcuggcuguuggcug

SEQ ID NO: 2470736 - RNA, 14 nt, Human
gcuggcuggggccu

SEQ ID NO: 2470737 - RNA, 15 nt, Human
gcuggcugggcaugg

SEQ ID NO: 2470738 - RNA, 16 nt, Human
gcuggcugggcaugga

SEQ ID NO: 2470739 - RNA, 21 nt, Human
gcuggguggcaccagcagccu

SEQ ID NO: 2470740 - RNA, 22 nt, Human
gcuggguggcaccagcagccug

SEQ ID NO: 2470741 - RNA, 23 nt, Human
gcuggguggcaccagcagccugg

SEQ ID NO: 2470742 - RNA, 22 nt, Human
gcugggugcgaccccaucugcc

SEQ ID NO: 2470743 - RNA, 21 nt, Human
gcugggugcgaccccaucugc

SEQ ID NO: 2470744 - RNA, 23 nt, Human
gcugggugcgaccccaucugccc

SEQ ID NO: 2470745 - RNA, 22 nt, Human
gcuuccucauaguaugguggcu

SEQ ID NO: 2470746 - RNA, 23 nt, Human
gcuuccuagaaguuacugaaugc

SEQ ID NO: 2470747 - RNA, 19 nt, Human
gcuucuucuccuaugugua

SEQ ID NO: 2470748 - RNA, 18 nt, Human
gcuucuucuccuaugugu

SEQ ID NO: 2470749 - RNA, 20 nt, Human
gcuucuucuccuauguguaa

SEQ ID NO: 2470750 - RNA, 21 nt, Human
gcuucuuccuauuugccaugg

SEQ ID NO: 2470751 - RNA, 14 nt, Human
gcuucuucucaggc

SEQ ID NO: 2470752 - RNA, 19 nt, Human
gcuucuucagaucagugcu

SEQ ID NO: 2470753 - RNA, 16 nt, Human
gcuucuuccaggugcc

SEQ ID NO: 2470754 - RNA, 19 nt, Human
gcuucuuccaggugcccag

SEQ ID NO: 2470755 - RNA, 15 nt, Human
gcuucuuccaggugc

SEQ ID NO: 2470756 - RNA, 16 nt, Human
gcuucuucagaucagu

SEQ ID NO: 2470757 - RNA, 19 nt, Human
gcuucuaccaugaacagaa

SEQ ID NO: 2470758 - RNA, 22 nt, Human
gcuucuaauauuuauugcuuua

SEQ ID NO: 2470759 - RNA, 17 nt, Human
gcuucuaccaugaacag

SEQ ID NO: 2470760 - RNA, 16 nt, Human
gcuuccuccuggaaau

SEQ ID NO: 2470761 - RNA, 13 nt, Human
gcuuccuccugga

SEQ ID NO: 2470762 - RNA, 12 nt, Human
gcuuccuccugg

SEQ ID NO: 2470763 - RNA, 14 nt, Human
gcuuccuccucccu

SEQ ID NO: 2470764 - RNA, 20 nt, Human
gcuuccucuagaagccaagg

SEQ ID NO: 2470765 - RNA, 17 nt, Human
gcuuccucuagaagcca

SEQ ID NO: 2470766 - RNA, 15 nt, Human
gcuuccucuagaagc

SEQ ID NO: 2470767 - RNA, 13 nt, Human
gcuuccuccugcg

SEQ ID NO: 2470768 - RNA, 23 nt, Human
gcuuccucuagaagccaagggaa

SEQ ID NO: 2470769 - RNA, 22 nt, Human
gcuuccucuagaagccaaggga

SEQ ID NO: 2470770 - RNA, 14 nt, Human
gcuucguuuauuuu

SEQ ID NO: 2470771 - RNA, 21 nt, Human
gcuucuaauauuuauugcuuu

SEQ ID NO: 2470772 - RNA, 20 nt, Human
gcuucuaauauuuauugcuu

SEQ ID NO: 2470773 - RNA, 18 nt, Human
gcuucuaauauuuauugc

SEQ ID NO: 2470774 - RNA, 15 nt, Human
gcuucuaauauuuau

SEQ ID NO: 2470775 - RNA, 16 nt, Human
gcuucguuuauuuuca

SEQ ID NO: 2470776 - RNA, 17 nt, Human
gcuucguuuauuuucaa

SEQ ID NO: 2470777 - RNA, 22 nt, Human
gcuucgguuucuaacuuggagc

SEQ ID NO: 2470778 - RNA, 22 nt, Human
gcuuguaacuccaccaacccau

SEQ ID NO: 2470779 - RNA, 22 nt, Human
gcuugagccgggccccugggcu

SEQ ID NO: 2470780 - RNA, 21 nt, Human
gcuugagccgggccccugggc

SEQ ID NO: 2470781 - RNA, 18 nt, Human
gcuugagccgggccccug

SEQ ID NO: 2470782 - RNA, 17 nt, Human
gcuugagccgggccccu

SEQ ID NO: 2470783 - RNA, 20 nt, Human
gcuuguaaauagcucaggug

SEQ ID NO: 2470784 - RNA, 14 nt, Human
gcuugagcucagga

SEQ ID NO: 2470785 - RNA, 18 nt, Human
gcuucuugccucugugcu

SEQ ID NO: 2470786 - RNA, 17 nt, Human
gcuucuugccucugugc

SEQ ID NO: 2470787 - RNA, 16 nt, Human
gcuucuugccucugug

SEQ ID NO: 2470788 - RNA, 15 nt, Human
gcuucuugccucugu

SEQ ID NO: 2470789 - RNA, 14 nt, Human
gcuucuugccucug

SEQ ID NO: 2470790 - RNA, 13 nt, Human
gcuucuugccucu

SEQ ID NO: 2470791 - RNA, 12 nt, Human
gcuucuugccuc

SEQ ID NO: 2470792 - RNA, 22 nt, Human
gcuugacuuuuguauagguaga

SEQ ID NO: 2470793 - RNA, 15 nt, Human
gcuugacuuuuguau

SEQ ID NO: 2470794 - RNA, 20 nt, Human
gcuugagaaauauggacacu

SEQ ID NO: 2470795 - RNA, 12 nt, Human
gcuugagcccag

SEQ ID NO: 2470796 - RNA, 12 nt, Human
gcuugagccggg

SEQ ID NO: 2470797 - RNA, 16 nt, Human
gcuugagcccaggagu

SEQ ID NO: 2470798 - RNA, 14 nt, Human
gcuugagcccagga

SEQ ID NO: 2470799 - RNA, 15 nt, Human
gcuugagcccaggag

SEQ ID NO: 2470800 - RNA, 14 nt, Human
gcuuguauagugua

SEQ ID NO: 2470801 - RNA, 17 nt, Human
gcuuguaucaacacugu

SEQ ID NO: 2470802 - RNA, 13 nt, Human
gcuugucagagcu

SEQ ID NO: 2470803 - RNA, 14 nt, Human
gcuugucagagcug

SEQ ID NO: 2470804 - RNA, 21 nt, Human
gcuuguccaacccgaggcccg

SEQ ID NO: 2470805 - RNA, 15 nt, Human
gcuugucagagcugg

SEQ ID NO: 2470806 - RNA, 16 nt, Human
gcuugucagagcuggg

SEQ ID NO: 2470807 - RNA, 17 nt, Human
gcuugucagagcuggga

SEQ ID NO: 2470808 - RNA, 18 nt, Human
gcuugucagagcugggag

SEQ ID NO: 2470809 - RNA, 12 nt, Human
gcuuguacauaa

SEQ ID NO: 2470810 - RNA, 15 nt, Human
gcuuguaacuccacc

SEQ ID NO: 2470811 - RNA, 16 nt, Human
gcuuguaacuccacca

SEQ ID NO: 2470812 - RNA, 23 nt, Human
gcuuucuguugucauugcuguug

SEQ ID NO: 2470813 - RNA, 16 nt, Human
gcuuucuguugucauu

SEQ ID NO: 2470814 - RNA, 15 nt, Human
gcuuucuguugucau

SEQ ID NO: 2470815 - RNA, 22 nt, Human
gcuuucuguugucauugcuguu

SEQ ID NO: 2470816 - RNA, 12 nt, Human
gcuuucuugcug

SEQ ID NO: 2470817 - RNA, 13 nt, Human
gcuuucuugcugg

SEQ ID NO: 2470818 - RNA, 14 nt, Human
gcuuucuugcuggu

SEQ ID NO: 2470819 - RNA, 18 nt, Human
gcuugucauuaccagacg

SEQ ID NO: 2470820 - RNA, 15 nt, Human
gcuuguccagcgccu

SEQ ID NO: 2470821 - RNA, 16 nt, Human
gcuuguccagcgccua

SEQ ID NO: 2470822 - RNA, 16 nt, Human
gcuuguccccuccuca

SEQ ID NO: 2470823 - RNA, 19 nt, Human
gcuuguccccuccucacuc

SEQ ID NO: 2470824 - RNA, 22 nt, Human
gcuuguccccuccucacucccu

SEQ ID NO: 2470825 - RNA, 21 nt, Human
gcuuucuuucguuuguuuguu

SEQ ID NO: 2470826 - RNA, 20 nt, Human
gcuuucuuucguuuguuugu

SEQ ID NO: 2470827 - RNA, 17 nt, Human
gcuuucuugcugguugu

SEQ ID NO: 2470828 - RNA, 20 nt, Human
gcuuugacucaccuguuacu

SEQ ID NO: 2470829 - RNA, 14 nt, Human
gcuuugacucaccu

SEQ ID NO: 2470830 - RNA, 11 nt, Human
gcuuugaaugu

SEQ ID NO: 2470831 - RNA, 15 nt, Human
gcuuugacugagcag

SEQ ID NO: 2470832 - RNA, 22 nt, Human
gcuuugacugagcagacuggug

SEQ ID NO: 2470833 - RNA, 17 nt, Human
gcuucagccuccccacc

SEQ ID NO: 2470834 - RNA, 19 nt, Human
gcuucagccaggagcuggg

SEQ ID NO: 2470835 - RNA, 12 nt, Human
gcuucagccucc

SEQ ID NO: 2470836 - RNA, 19 nt, Human
gcuucacggaagagccuug

SEQ ID NO: 2470837 - RNA, 15 nt, Human
gcuucagccaggagc

SEQ ID NO: 2470838 - RNA, 18 nt, Human
gcuucacggaagagccuu

SEQ ID NO: 2470839 - RNA, 21 nt, Human
gcuucagccugaggcugagac

SEQ ID NO: 2470840 - RNA, 23 nt, Human
gcuucagccugaggcugagacug

SEQ ID NO: 2470841 - RNA, 12 nt, Human
gcuucagccuga

SEQ ID NO: 2470842 - RNA, 14 nt, Human
gcuucagccugagg

SEQ ID NO: 2470843 - RNA, 15 nt, Human
gcuucagccugaggc

SEQ ID NO: 2470844 - RNA, 20 nt, Human
gcuucagccugaggcugaga

SEQ ID NO: 2470845 - RNA, 19 nt, Human
gcuucaaggauccugagcc

SEQ ID NO: 2470846 - RNA, 18 nt, Human
gcuucaaggauccugagc

SEQ ID NO: 2470847 - RNA, 18 nt, Human
gcuuauuuaauuaaaaaa

SEQ ID NO: 2470848 - RNA, 20 nt, Human
gcuuauucaucuguuuuucu

SEQ ID NO: 2470849 - RNA, 13 nt, Human
gcuuauuguucca

SEQ ID NO: 2470850 - RNA, 14 nt, Human
gcuuauuguuccaa

SEQ ID NO: 2470851 - RNA, 15 nt, Human
gcuuauuguuccaag

SEQ ID NO: 2470852 - RNA, 17 nt, Human
gcuuauuguuccaagac

SEQ ID NO: 2470853 - RNA, 20 nt, Human
gcuuauuguuccaagacauu

SEQ ID NO: 2470854 - RNA, 21 nt, Human
gcuuauuguuccaagacauug

SEQ ID NO: 2470855 - RNA, 22 nt, Human
gcuuauuguuccaagacauugu

SEQ ID NO: 2470856 - RNA, 11 nt, Human
gcuuauuuaau

SEQ ID NO: 2470857 - RNA, 21 nt, Human
gcuucaaggauccugagccag

SEQ ID NO: 2470858 - RNA, 20 nt, Human
gcuucaaggauccugagcca

SEQ ID NO: 2470859 - RNA, 17 nt, Human
gcuucacggaagagccu

SEQ ID NO: 2470860 - RNA, 15 nt, Human
gcuucacggaagagc

SEQ ID NO: 2470861 - RNA, 20 nt, Human
ggacaggaugaccuggauaa

SEQ ID NO: 2470862 - RNA, 17 nt, Human
ggagaaagcacugaccu

SEQ ID NO: 2470863 - RNA, 16 nt, Human
ggagaaacagagacag

SEQ ID NO: 2470864 - RNA, 19 nt, Human
ggagaaacccuugaaaaga

SEQ ID NO: 2470865 - RNA, 9 nt, Human
ggagacuca

SEQ ID NO: 2470866 - RNA, 13 nt, Human
ggagacucaccuc

SEQ ID NO: 2470867 - RNA, 16 nt, Human
ggagacucaccucugc

SEQ ID NO: 2470868 - RNA, 17 nt, Human
ggagacucaccucugcc

SEQ ID NO: 2470869 - RNA, 18 nt, Human
ggagacucaccucugccu

SEQ ID NO: 2470870 - RNA, 19 nt, Human
ggagacucaccucugccuc

SEQ ID NO: 2470871 - RNA, 21 nt, Human
ggagacucaccucugccucaa

SEQ ID NO: 2470872 - RNA, 16 nt, Human
ggagacuccuaggcag

SEQ ID NO: 2470873 - RNA, 13 nt, Human
ggagacuccuagg

SEQ ID NO: 2470874 - RNA, 18 nt, Human
ggagacuccaugagaagc

SEQ ID NO: 2470875 - RNA, 21 nt, Human
ggagacuccaugagaagccgu

SEQ ID NO: 2470876 - RNA, 17 nt, Human
ggagacuccugcccugu

SEQ ID NO: 2470877 - RNA, 12 nt, Human
ggagacuccugc

SEQ ID NO: 2470878 - RNA, 21 nt, Human
ggagacuccuaggcaggacau

SEQ ID NO: 2470879 - RNA, 18 nt, Human
ggagacuccuaggcagga

SEQ ID NO: 2470880 - RNA, 13 nt, Human
ggagacucugugg

SEQ ID NO: 2470881 - RNA, 16 nt, Human
ggagacucuguggggc

SEQ ID NO: 2470882 - RNA, 13 nt, Human
ggagaaacuggaa

SEQ ID NO: 2470883 - RNA, 16 nt, Human
ggagaaaggaagggcu

SEQ ID NO: 2470884 - RNA, 22 nt, Human
ggacuuugcagccggcacaggg

SEQ ID NO: 2470885 - RNA, 15 nt, Human
ggagaaacagagaca

SEQ ID NO: 2470886 - RNA, 17 nt, Human
ggacuuugcagccggca

SEQ ID NO: 2470887 - RNA, 16 nt, Human
ggacuuugcagccggc

SEQ ID NO: 2470888 - RNA, 20 nt, Human
ggacuuuccuaaauguuuaa

SEQ ID NO: 2470889 - RNA, 23 nt, Human
ggacuuucuuuucgccguggcug

SEQ ID NO: 2470890 - RNA, 18 nt, Human
ggacuugaggauuuugag

SEQ ID NO: 2470891 - RNA, 13 nt, Human
ggacuugaaguug

SEQ ID NO: 2470892 - RNA, 12 nt, Human
ggacuugaaguu

SEQ ID NO: 2470893 - RNA, 14 nt, Human
ggacuuggaagcuc

SEQ ID NO: 2470894 - RNA, 19 nt, Human
ggacuugcaaaaaggguca

SEQ ID NO: 2470895 - RNA, 16 nt, Human
ggacuuuccacccccu

SEQ ID NO: 2470896 - RNA, 17 nt, Human
ggacuuuccacccccuc

SEQ ID NO: 2470897 - RNA, 20 nt, Human
ggacuuuccacccccucccu

SEQ ID NO: 2470898 - RNA, 21 nt, Human
ggacuuuccacccccucccug

SEQ ID NO: 2470899 - RNA, 21 nt, Human
ggacuuucuuuucgccguggc

SEQ ID NO: 2470900 - RNA, 11 nt, Human
ggacuucuuuu

SEQ ID NO: 2470901 - RNA, 19 nt, Human
ggacuccccaggccaggcc

SEQ ID NO: 2470902 - RNA, 17 nt, Human
ggacuucuuuucacauu

SEQ ID NO: 2470903 - RNA, 23 nt, Human
ggacuugaaagcauccaugugug

SEQ ID NO: 2470904 - RNA, 18 nt, Human
ggacuccccaggccaggc

SEQ ID NO: 2470905 - RNA, 17 nt, Human
ggacuccccaggccagg

SEQ ID NO: 2470906 - RNA, 16 nt, Human
ggacuccccaggccag

SEQ ID NO: 2470907 - RNA, 14 nt, Human
ggacuccccaggcc

SEQ ID NO: 2470908 - RNA, 20 nt, Human
ggacucccuccucaccucug

SEQ ID NO: 2470909 - RNA, 22 nt, Human
ggacucccuccucaccucugga

SEQ ID NO: 2470910 - RNA, 16 nt, Human
ggacuccggcccuccu

SEQ ID NO: 2470911 - RNA, 18 nt, Human
ggacucaaugcacugaca

SEQ ID NO: 2470912 - RNA, 16 nt, Human
ggacucaaugcacuga

SEQ ID NO: 2470913 - RNA, 17 nt, Human
ggacucagcuccccaga

SEQ ID NO: 2470914 - RNA, 13 nt, Human
ggacucagcuccc

SEQ ID NO: 2470915 - RNA, 21 nt, Human
ggacucagccuucagacagag

SEQ ID NO: 2470916 - RNA, 21 nt, Human
ggacuaagccuaccugcucuc

SEQ ID NO: 2470917 - RNA, 15 nt, Human
ggacucagccuucag

SEQ ID NO: 2470918 - RNA, 17 nt, Human
ggacucagccuucagac

SEQ ID NO: 2470919 - RNA, 13 nt, Human
ggacucagggcag

SEQ ID NO: 2470920 - RNA, 15 nt, Human
ggacucagggcagcg

SEQ ID NO: 2470921 - RNA, 17 nt, Human
ggacucaggaugcccag

SEQ ID NO: 2470922 - RNA, 18 nt, Human
ggacucaggaugcccagg

SEQ ID NO: 2470923 - RNA, 19 nt, Human
ggacucaggaugcccaggg

SEQ ID NO: 2470924 - RNA, 20 nt, Human
ggacucaggaugcccagggc

SEQ ID NO: 2470925 - RNA, 22 nt, Human
ggacucauuuuaaaaaauggaa

SEQ ID NO: 2470926 - RNA, 20 nt, Human
ggacucagggccaugccugc

SEQ ID NO: 2470927 - RNA, 22 nt, Human
ggacucagggcagcgccaggcu

SEQ ID NO: 2470928 - RNA, 20 nt, Human
ggacuccacccauccuauca

SEQ ID NO: 2470929 - RNA, 11 nt, Human
ggacuccaccc

SEQ ID NO: 2470930 - RNA, 24 nt, Human
ggacucauuucauuccuaacacag

SEQ ID NO: 2470931 - RNA, 19 nt, Human
ggacuccagacucucugug

SEQ ID NO: 2470932 - RNA, 14 nt, Human
ggacuccagacucu

SEQ ID NO: 2470933 - RNA, 18 nt, Human
ggacuccagaaucuaaag

SEQ ID NO: 2470934 - RNA, 24 nt, Human
ggacuaacuugucuuuggacccug

SEQ ID NO: 2470935 - RNA, 14 nt, Human
ggacuacaggugug

SEQ ID NO: 2470936 - RNA, 15 nt, Human
ggacucaaugcacug

SEQ ID NO: 2470937 - RNA, 19 nt, Human
ggacuaagccuaccugcuc

SEQ ID NO: 2470938 - RNA, 16 nt, Human
ggacuaagccuaccug

SEQ ID NO: 2470939 - RNA, 23 nt, Human
ggacuauauuugggccugcucca

SEQ ID NO: 2470940 - RNA, 14 nt, Human
ggacuauuauaauu

SEQ ID NO: 2470941 - RNA, 20 nt, Human
ggacuaacuugucuuuggac

SEQ ID NO: 2470942 - RNA, 21 nt, Human
ggacguuccagccggcauggc

SEQ ID NO: 2470943 - RNA, 19 nt, Human
ggacuaaaagauauaagug

SEQ ID NO: 2470944 - RNA, 14 nt, Human
ggacuaaaagauau

SEQ ID NO: 2470945 - RNA, 12 nt, Human
ggacuaaaagau

SEQ ID NO: 2470946 - RNA, 16 nt, Human
ggacguuccagccggc

SEQ ID NO: 2470947 - RNA, 14 nt, Human
ggacguuccagccg

SEQ ID NO: 2470948 - RNA, 13 nt, Human
ggacguuccagcc

SEQ ID NO: 2470949 - RNA, 19 nt, Human
ggacguggcucagccagca

SEQ ID NO: 2470950 - RNA, 15 nt, Human
ggacccccgcccccu

SEQ ID NO: 2470951 - RNA, 14 nt, Human
ggacccccgccccc

SEQ ID NO: 2470952 - RNA, 22 nt, Human
ggacccccgcccccugcccucc

SEQ ID NO: 2470953 - RNA, 20 nt, Human
ggacccccgcccccugcccu

SEQ ID NO: 2470954 - RNA, 19 nt, Human
ggacccccgcccccugccc

SEQ ID NO: 2470955 - RNA, 16 nt, Human
ggacccccgcccccug

SEQ ID NO: 2470956 - RNA, 11 nt, Human
ggacccugagg

SEQ ID NO: 2470957 - RNA, 14 nt, Human
ggacccccuucccc

SEQ ID NO: 2470958 - RNA, 12 nt, Human
ggacccccuucc

SEQ ID NO: 2470959 - RNA, 12 nt, Human
ggacccccugaa

SEQ ID NO: 2470960 - RNA, 15 nt, Human
ggaccccgagccugg

SEQ ID NO: 2470961 - RNA, 23 nt, Human
ggacccccgcccccugcccuccc

SEQ ID NO: 2470962 - RNA, 13 nt, Human
ggacccugaaggg

SEQ ID NO: 2470963 - RNA, 16 nt, Human
ggacccugugacaugg

SEQ ID NO: 2470964 - RNA, 13 nt, Human
ggacccugaggcc

SEQ ID NO: 2470965 - RNA, 12 nt, Human
ggacccugaggc

SEQ ID NO: 2470966 - RNA, 13 nt, Human
ggaccucaggccu

SEQ ID NO: 2470967 - RNA, 22 nt, Human
ggaccgccagauggggccucug

SEQ ID NO: 2470968 - RNA, 15 nt, Human
ggaccgccagauggg

SEQ ID NO: 2470969 - RNA, 17 nt, Human
ggaccgccagauggggc

SEQ ID NO: 2470970 - RNA, 22 nt, Human
ggacccuuuccuuccuucccug

SEQ ID NO: 2470971 - RNA, 23 nt, Human
ggacccugugacauggugccuga

SEQ ID NO: 2470972 - RNA, 22 nt, Human
ggacccugugacauggugccug

SEQ ID NO: 2470973 - RNA, 13 nt, Human
ggacccuguugcu

SEQ ID NO: 2470974 - RNA, 17 nt, Human
ggacccuguugcuaagc

SEQ ID NO: 2470975 - RNA, 21 nt, Human
ggacccuucccuugagcccuc

SEQ ID NO: 2470976 - RNA, 23 nt, Human
ggacccuugagaguaucaggucu

SEQ ID NO: 2470977 - RNA, 12 nt, Human
ggacccuuuccu

SEQ ID NO: 2470978 - RNA, 16 nt, Human
ggacccuuuccuuccu

SEQ ID NO: 2470979 - RNA, 17 nt, Human
ggacccuuuccuuccuu

SEQ ID NO: 2470980 - RNA, 21 nt, Human
ggacccuuuccuuccuucccu

SEQ ID NO: 2470981 - RNA, 23 nt, Human
ggacccuuuccuuccuucccugg

SEQ ID NO: 2470982 - RNA, 18 nt, Human
ggacggugcuccaggcag

SEQ ID NO: 2470983 - RNA, 17 nt, Human
ggacggugcuccaggca

SEQ ID NO: 2470984 - RNA, 15 nt, Human
ggacggugcuccagg

SEQ ID NO: 2470985 - RNA, 14 nt, Human
ggacggugcuccag

SEQ ID NO: 2470986 - RNA, 21 nt, Human
ggacggugcccaagccagagg

SEQ ID NO: 2470987 - RNA, 19 nt, Human
ggacggugcccaagccaga

SEQ ID NO: 2470988 - RNA, 17 nt, Human
ggacggugcccaagcca

SEQ ID NO: 2470989 - RNA, 21 nt, Human
ggacggggggccccagucagc

SEQ ID NO: 2470990 - RNA, 19 nt, Human
ggacggggggccccaguca

SEQ ID NO: 2470991 - RNA, 23 nt, Human
ggacggggggccccagucagccu

SEQ ID NO: 2470992 - RNA, 20 nt, Human
ggacguguuaugacuccaga

SEQ ID NO: 2470993 - RNA, 16 nt, Human
ggacgucccugcccau

SEQ ID NO: 2470994 - RNA, 20 nt, Human
ggacggugcuccaggcaggc

SEQ ID NO: 2470995 - RNA, 18 nt, Human
ggacguccugccaccugg

SEQ ID NO: 2470996 - RNA, 18 nt, Human
ggacguggcucagccagc

SEQ ID NO: 2470997 - RNA, 22 nt, Human
ggacguccugccaccuggggca

SEQ ID NO: 2470998 - RNA, 15 nt, Human
ggaccucaggccugg

SEQ ID NO: 2470999 - RNA, 14 nt, Human
ggaccucaggccug

SEQ ID NO: 2471000 - RNA, 20 nt, Human
ggaccucaggccugggggcu

SEQ ID NO: 2471001 - RNA, 18 nt, Human
ggacggcauuccugcuua

SEQ ID NO: 2471002 - RNA, 21 nt, Human
ggacggccugaugcucccucc

SEQ ID NO: 2471003 - RNA, 22 nt, Human
ggacggccugaugcucccuccc

SEQ ID NO: 2471004 - RNA, 16 nt, Human
ggacggggccggccag

SEQ ID NO: 2471005 - RNA, 13 nt, Human
ggacggggccggc

SEQ ID NO: 2471006 - RNA, 15 nt, Human
ggacggcugggcaca

SEQ ID NO: 2471007 - RNA, 16 nt, Human
ggaacacucugagacu

SEQ ID NO: 2471008 - RNA, 15 nt, Human
ggaacacucugagac

SEQ ID NO: 2471009 - RNA, 11 nt, Human
ggaacagaagg

SEQ ID NO: 2471010 - RNA, 12 nt, Human
ggaacagaagga

SEQ ID NO: 2471011 - RNA, 13 nt, Human
ggaacagaaggau

SEQ ID NO: 2471012 - RNA, 19 nt, Human
ggaacagaaggaugaauga

SEQ ID NO: 2471013 - RNA, 15 nt, Human
ggaacuguccagaga

SEQ ID NO: 2471014 - RNA, 14 nt, Human
ggaacuguccagag

SEQ ID NO: 2471015 - RNA, 20 nt, Human
ggaacugcugggcuuggcag

SEQ ID NO: 2471016 - RNA, 17 nt, Human
ggaacagacaggagaaa

SEQ ID NO: 2471017 - RNA, 19 nt, Human
ggaacagaauguuuuacug

SEQ ID NO: 2471018 - RNA, 13 nt, Human
ggaacagacagga

SEQ ID NO: 2471019 - RNA, 15 nt, Human
ggaacagacaggaga

SEQ ID NO: 2471020 - RNA, 16 nt, Human
ggaacagacaggagaa

SEQ ID NO: 2471021 - RNA, 16 nt, Human
ggaacagaauguuuua

SEQ ID NO: 2471022 - RNA, 12 nt, Human
ggaacagaaugu

SEQ ID NO: 2471023 - RNA, 18 nt, Human
ggaacagacaacagaagu

SEQ ID NO: 2471024 - RNA, 20 nt, Human
ggaacagacaacagaaguca

SEQ ID NO: 2471025 - RNA, 21 nt, Human
ggaacagacaacagaagucau

SEQ ID NO: 2471026 - RNA, 14 nt, Human
ggaacacucugaga

SEQ ID NO: 2471027 - RNA, 12 nt, Human
ggaacacucuga

SEQ ID NO: 2471028 - RNA, 15 nt, Human
ggaagagaaaaaaua

SEQ ID NO: 2471029 - RNA, 13 nt, Human
ggaagagaaacca

SEQ ID NO: 2471030 - RNA, 21 nt, Human
ggaagaccagcuuugcaguga

SEQ ID NO: 2471031 - RNA, 18 nt, Human
ggaagacuuuggaaagag

SEQ ID NO: 2471032 - RNA, 13 nt, Human
ggaagagaaaaaa

SEQ ID NO: 2471033 - RNA, 17 nt, Human
ggaagagaggaguucaa

SEQ ID NO: 2471034 - RNA, 20 nt, Human
ggaagagaggaguucaauga

SEQ ID NO: 2471035 - RNA, 19 nt, Human
ggaagagaggaguucaaug

SEQ ID NO: 2471036 - RNA, 18 nt, Human
ggaagagaggaguucaau

SEQ ID NO: 2471037 - RNA, 21 nt, Human
ggaagagaggaguucaaugau

SEQ ID NO: 2471038 - RNA, 17 nt, Human
ggaagacuuuggaaaga

SEQ ID NO: 2471039 - RNA, 13 nt, Human
ggaagacuuugga

SEQ ID NO: 2471040 - RNA, 23 nt, Human
ggaagacagagaccuccugccuc

SEQ ID NO: 2471041 - RNA, 12 nt, Human
ggaagacagaga

SEQ ID NO: 2471042 - RNA, 22 nt, Human
ggaacuuggggaguuaagaccu

SEQ ID NO: 2471043 - RNA, 12 nt, Human
ggaagacuuugg

SEQ ID NO: 2471044 - RNA, 22 nt, Human
ggaagacauggggaggaaggac

SEQ ID NO: 2471045 - RNA, 14 nt, Human
ggaagacagcucuu

SEQ ID NO: 2471046 - RNA, 13 nt, Human
ggaagacagcucu

SEQ ID NO: 2471047 - RNA, 22 nt, Human
ggaagacaaugugaaaagaaaa

SEQ ID NO: 2471048 - RNA, 15 nt, Human
ggaacuucuaauaua

SEQ ID NO: 2471049 - RNA, 18 nt, Human
ggaacuguccagagagca

SEQ ID NO: 2471050 - RNA, 17 nt, Human
ggaacuguccagagagc

SEQ ID NO: 2471051 - RNA, 16 nt, Human
ggaacuguccagagag

SEQ ID NO: 2471052 - RNA, 22 nt, Human
ggaagcuagcuccccuccucuc

SEQ ID NO: 2471053 - RNA, 21 nt, Human
ggaagcuagcuccccuccucu

SEQ ID NO: 2471054 - RNA, 20 nt, Human
ggaagcuagcuccccuccuc

SEQ ID NO: 2471055 - RNA, 19 nt, Human
ggaagcuagcuccccuccu

SEQ ID NO: 2471056 - RNA, 17 nt, Human
ggaagcuagcuccccuc

SEQ ID NO: 2471057 - RNA, 16 nt, Human
ggaagcuagcuccccu

SEQ ID NO: 2471058 - RNA, 22 nt, Human
ggaagcuacagguuacaacaga

SEQ ID NO: 2471059 - RNA, 21 nt, Human
ggaagcuacagguuacaacag

SEQ ID NO: 2471060 - RNA, 23 nt, Human
ggaagcuacagguuacaacagau

SEQ ID NO: 2471061 - RNA, 15 nt, Human
ggaagccgcuggggc

SEQ ID NO: 2471062 - RNA, 15 nt, Human
ggaagcuacagguua

SEQ ID NO: 2471063 - RNA, 13 nt, Human
ggaagcuacaggu

SEQ ID NO: 2471064 - RNA, 16 nt, Human
ggaagcuaauuugcau

SEQ ID NO: 2471065 - RNA, 21 nt, Human
ggaagcgugaaggccgagaag

SEQ ID NO: 2471066 - RNA, 22 nt, Human
ggaagcgugaaggccgagaagc

SEQ ID NO: 2471067 - RNA, 22 nt, Human
ggaagcggagguugcagggagc

SEQ ID NO: 2471068 - RNA, 11 nt, Human
ggaagcccucc

SEQ ID NO: 2471069 - RNA, 12 nt, Human
ggaagcccuccu

SEQ ID NO: 2471070 - RNA, 15 nt, Human
ggaagcccuccuucc

SEQ ID NO: 2471071 - RNA, 16 nt, Human
ggaagcccuccuucca

SEQ ID NO: 2471072 - RNA, 17 nt, Human
ggaagcccuccuuccac

SEQ ID NO: 2471073 - RNA, 12 nt, Human
ggaagcccugga

SEQ ID NO: 2471074 - RNA, 11 nt, Human
ggaagcccugg

SEQ ID NO: 2471075 - RNA, 15 nt, Human
ggaagcccuggauuu

SEQ ID NO: 2471076 - RNA, 23 nt, Human
ggaagcccuggauuucagaaaga

SEQ ID NO: 2471077 - RNA, 13 nt, Human
ggaagcccccacc

SEQ ID NO: 2471078 - RNA, 21 nt, Human
ggaagcccccaccgugggcag

SEQ ID NO: 2471079 - RNA, 22 nt, Human
ggaagcccccaccgugggcagg

SEQ ID NO: 2471080 - RNA, 20 nt, Human
ggaaggaaacccagcucugg

SEQ ID NO: 2471081 - RNA, 19 nt, Human
ggaaggaaacccagcucug

SEQ ID NO: 2471082 - RNA, 18 nt, Human
ggaaggaacucuggcuuc

SEQ ID NO: 2471083 - RNA, 17 nt, Human
ggaaggaacucuggcuu

SEQ ID NO: 2471084 - RNA, 16 nt, Human
ggaaggaacucuggcu

SEQ ID NO: 2471085 - RNA, 19 nt, Human
ggaaggaaagaaagaagga

SEQ ID NO: 2471086 - RNA, 13 nt, Human
ggaaggacccuga

SEQ ID NO: 2471087 - RNA, 23 nt, Human
ggaaggaacucuggcuuccaggu

SEQ ID NO: 2471088 - RNA, 15 nt, Human
ggaaggagacucacc

SEQ ID NO: 2471089 - RNA, 20 nt, Human
ggaaggagacucaccucugc

SEQ ID NO: 2471090 - RNA, 13 nt, Human
ggaaguuuagaga

SEQ ID NO: 2471091 - RNA, 12 nt, Human
ggaaggagagaa

SEQ ID NO: 2471092 - RNA, 21 nt, Human
ggaaguguaacagcugagguc

SEQ ID NO: 2471093 - RNA, 18 nt, Human
ggaaguuucauauauugu

SEQ ID NO: 2471094 - RNA, 14 nt, Human
ggaaguuuucaaug

SEQ ID NO: 2471095 - RNA, 11 nt, Human
ggaaguuuuca

SEQ ID NO: 2471096 - RNA, 21 nt, Human
ggaagugugggucugugugug

SEQ ID NO: 2471097 - RNA, 22 nt, Human
ggaagugugggucugugugugu

SEQ ID NO: 2471098 - RNA, 12 nt, Human
ggaagugugggu

SEQ ID NO: 2471099 - RNA, 21 nt, Human
ggaaggagacucaccucugcc

SEQ ID NO: 2471100 - RNA, 22 nt, Human
ggaaggagacucaccucugccu

SEQ ID NO: 2471101 - RNA, 13 nt, Human
ggaaggagagccu

SEQ ID NO: 2471102 - RNA, 13 nt, Human
ggaagcugcuccg

SEQ ID NO: 2471103 - RNA, 15 nt, Human
ggaagcugcuccgug

SEQ ID NO: 2471104 - RNA, 17 nt, Human
ggaagcuguguccuugc

SEQ ID NO: 2471105 - RNA, 18 nt, Human
ggaagcuggccgaggguc

SEQ ID NO: 2471106 - RNA, 13 nt, Human
ggaagcugaggcg

SEQ ID NO: 2471107 - RNA, 17 nt, Human
ggaagcugcccugccca

SEQ ID NO: 2471108 - RNA, 18 nt, Human
ggaagcucugaagucaca

SEQ ID NO: 2471109 - RNA, 16 nt, Human
ggaaggaaacccagcu

SEQ ID NO: 2471110 - RNA, 21 nt, Human
ggaagcuguguccuugcaccu

SEQ ID NO: 2471111 - RNA, 13 nt, Human
ggaagcuuccagu

SEQ ID NO: 2471112 - RNA, 23 nt, Human
ggaagcuguguccuugcaccugc

SEQ ID NO: 2471113 - RNA, 19 nt, Human
ggaagcuucuuaaaugaga

SEQ ID NO: 2471114 - RNA, 20 nt, Human
ggaagcuuccaguccaaucu

SEQ ID NO: 2471115 - RNA, 23 nt, Human
ggaagcucagggccuggcucagg

SEQ ID NO: 2471116 - RNA, 15 nt, Human
ggaagcucagggccu

SEQ ID NO: 2471117 - RNA, 11 nt, Human
ggaagcuccgc

SEQ ID NO: 2471118 - RNA, 14 nt, Human
ggaagcuccacugu

SEQ ID NO: 2471119 - RNA, 23 nt, Human
ggaagcuccacugucacccucca

SEQ ID NO: 2471120 - RNA, 17 nt, Human
ggacacuaaccacgcug

SEQ ID NO: 2471121 - RNA, 22 nt, Human
ggacacggggcaguggcaaccu

SEQ ID NO: 2471122 - RNA, 19 nt, Human
ggacagcuccuucuguccu

SEQ ID NO: 2471123 - RNA, 22 nt, Human
ggacacuaaccacgcuggaccu

SEQ ID NO: 2471124 - RNA, 19 nt, Human
ggacagcuugagccgggcc

SEQ ID NO: 2471125 - RNA, 13 nt, Human
ggacagcuguccu

SEQ ID NO: 2471126 - RNA, 11 nt, Human
ggacagcuguc

SEQ ID NO: 2471127 - RNA, 20 nt, Human
ggacagcuccuucuguccua

SEQ ID NO: 2471128 - RNA, 18 nt, Human
ggacacagcucuucucca

SEQ ID NO: 2471129 - RNA, 15 nt, Human
ggacacagcucuucu

SEQ ID NO: 2471130 - RNA, 21 nt, Human
ggacacagcucuucuccaggc

SEQ ID NO: 2471131 - RNA, 16 nt, Human
ggacaccugcccugcc

SEQ ID NO: 2471132 - RNA, 20 nt, Human
ggacaaguggacucagggca

SEQ ID NO: 2471133 - RNA, 18 nt, Human
ggacaauacagaacccau

SEQ ID NO: 2471134 - RNA, 16 nt, Human
ggacaaucaguccccu

SEQ ID NO: 2471135 - RNA, 19 nt, Human
ggacaaggacuaggguccu

SEQ ID NO: 2471136 - RNA, 20 nt, Human
ggacaaggaggucugugcca

SEQ ID NO: 2471137 - RNA, 22 nt, Human
ggacaaggcuagaucaugaaga

SEQ ID NO: 2471138 - RNA, 14 nt, Human
ggacacagcucuuc

SEQ ID NO: 2471139 - RNA, 22 nt, Human
ggacaaucaguccccucccauc

SEQ ID NO: 2471140 - RNA, 20 nt, Human
ggacaaucaguccccuccca

SEQ ID NO: 2471141 - RNA, 18 nt, Human
ggacaaucaguccccucc

SEQ ID NO: 2471142 - RNA, 17 nt, Human
ggacaaucaguccccuc

SEQ ID NO: 2471143 - RNA, 21 nt, Human
ggacaaucaugaaauaugcau

SEQ ID NO: 2471144 - RNA, 19 nt, Human
ggacaaucaugaaauaugc

SEQ ID NO: 2471145 - RNA, 23 nt, Human
ggacaaggaugaucuaggaagac

SEQ ID NO: 2471146 - RNA, 22 nt, Human
ggacaaggaugaucuaggaaga

SEQ ID NO: 2471147 - RNA, 23 nt, Human
ggacaagccaacuuguaaauaca

SEQ ID NO: 2471148 - RNA, 21 nt, Human
ggacaagccaacuuguaaaua

SEQ ID NO: 2471149 - RNA, 20 nt, Human
ggacaagccaacuuguaaau

SEQ ID NO: 2471150 - RNA, 20 nt, Human
ggacaagcagagguggccag

SEQ ID NO: 2471151 - RNA, 13 nt, Human
ggacaagcagagg

SEQ ID NO: 2471152 - RNA, 13 nt, Human
ggacaagagcagg

SEQ ID NO: 2471153 - RNA, 15 nt, Human
ggacaacgaggaagc

SEQ ID NO: 2471154 - RNA, 17 nt, Human
ggacaacgaggaagccc

SEQ ID NO: 2471155 - RNA, 19 nt, Human
ggaaucuggagagcuagaa

SEQ ID NO: 2471156 - RNA, 13 nt, Human
ggaaucuggagag

SEQ ID NO: 2471157 - RNA, 16 nt, Human
ggacaacgaggaagcc

SEQ ID NO: 2471158 - RNA, 19 nt, Human
ggaaucgaggaaccagagc

SEQ ID NO: 2471159 - RNA, 20 nt, Human
ggaaucgaggaaccagagcc

SEQ ID NO: 2471160 - RNA, 21 nt, Human
ggaaucgaggaaccagagcca

SEQ ID NO: 2471161 - RNA, 20 nt, Human
ggaauccacucccaggcagc

SEQ ID NO: 2471162 - RNA, 19 nt, Human
ggaauccuguccucagcuu

SEQ ID NO: 2471163 - RNA, 14 nt, Human
ggaauccuguccuc

SEQ ID NO: 2471164 - RNA, 18 nt, Human
ggaaucaugucaggccug

SEQ ID NO: 2471165 - RNA, 15 nt, Human
ggaaucaugucaggc

SEQ ID NO: 2471166 - RNA, 14 nt, Human
ggaaucagcuucua

SEQ ID NO: 2471167 - RNA, 21 nt, Human
ggaaucaugucaggccugugu

SEQ ID NO: 2471168 - RNA, 19 nt, Human
ggaaucaugucaggccugu

SEQ ID NO: 2471169 - RNA, 13 nt, Human
ggaaucagcuucu

SEQ ID NO: 2471170 - RNA, 16 nt, Human
ggaaucagcaagaaga

SEQ ID NO: 2471171 - RNA, 23 nt, Human
ggaaucagacuucacacugcaag

SEQ ID NO: 2471172 - RNA, 18 nt, Human
ggaaucacucuuguggau

SEQ ID NO: 2471173 - RNA, 20 nt, Human
ggaaucacucuuguggaugu

SEQ ID NO: 2471174 - RNA, 21 nt, Human
ggaaucagacuucacacugca

SEQ ID NO: 2471175 - RNA, 19 nt, Human
ggaauccacucccaggcag

SEQ ID NO: 2471176 - RNA, 16 nt, Human
ggaauccacucccagg

SEQ ID NO: 2471177 - RNA, 14 nt, Human
ggaauccacuccca

SEQ ID NO: 2471178 - RNA, 24 nt, Human
ggaaucauuucuauuucuccucca

SEQ ID NO: 2471179 - RNA, 16 nt, Human
ggaauccagacccggc

SEQ ID NO: 2471180 - RNA, 18 nt, Human
ggaauaacauguaauuaa

SEQ ID NO: 2471181 - RNA, 13 nt, Human
ggaauaauaccua

SEQ ID NO: 2471182 - RNA, 20 nt, Human
ggaauaaggccuuaauaugu

SEQ ID NO: 2471183 - RNA, 23 nt, Human
ggaauaaauaugccucuccuuug

SEQ ID NO: 2471184 - RNA, 22 nt, Human
ggaauaaauaugccucuccuuu

SEQ ID NO: 2471185 - RNA, 13 nt, Human
ggaauaaauaugc

SEQ ID NO: 2471186 - RNA, 12 nt, Human
ggaauaaauaug

SEQ ID NO: 2471187 - RNA, 19 nt, Human
ggaauaaaauacuauuuuu

SEQ ID NO: 2471188 - RNA, 14 nt, Human
ggaauaaaauacua

SEQ ID NO: 2471189 - RNA, 12 nt, Human
ggaauaaaauac

SEQ ID NO: 2471190 - RNA, 18 nt, Human
ggaaguuuugcauuuaug

SEQ ID NO: 2471191 - RNA, 21 nt, Human
ggaaguuuuguggaggagcuc

SEQ ID NO: 2471192 - RNA, 15 nt, Human
cauauucaggaagcu

SEQ ID NO: 2471193 - RNA, 14 nt, Human
cauauucaggaagc

SEQ ID NO: 2471194 - RNA, 20 nt, Human
cauauucaggaagcucaggg

SEQ ID NO: 2471195 - RNA, 22 nt, Human
cauauucaggaagcucagggcc

SEQ ID NO: 2471196 - RNA, 20 nt, Human
cauaugccugggcagaagga

SEQ ID NO: 2471197 - RNA, 15 nt, Human
cauaugccugggcag

SEQ ID NO: 2471198 - RNA, 22 nt, Human
cauaugccugggcagaaggaag

SEQ ID NO: 2471199 - RNA, 20 nt, Human
cauagcuugauaaagggcca

SEQ ID NO: 2471200 - RNA, 23 nt, Human
cauagcaagauugcuuaaaauag

SEQ ID NO: 2471201 - RNA, 15 nt, Human
cauagcaagacacau

SEQ ID NO: 2471202 - RNA, 20 nt, Human
cauagcaagacacaucccua

SEQ ID NO: 2471203 - RNA, 14 nt, Human
cauagcaagacaca

SEQ ID NO: 2471204 - RNA, 22 nt, Human
cauagcagagaaugaaagggcc

SEQ ID NO: 2471205 - RNA, 19 nt, Human
cauagcagagaaugaaagg

SEQ ID NO: 2471206 - RNA, 17 nt, Human
cauagcuccuucucucu

SEQ ID NO: 2471207 - RNA, 20 nt, Human
cauagcuccugcuccacagc

SEQ ID NO: 2471208 - RNA, 15 nt, Human
cauagcuccugcucc

SEQ ID NO: 2471209 - RNA, 14 nt, Human
cauagcuccugcuc

SEQ ID NO: 2471210 - RNA, 14 nt, Human
cauagcacuucccc

SEQ ID NO: 2471211 - RNA, 13 nt, Human
cauagcacuuccc

SEQ ID NO: 2471212 - RNA, 20 nt, Human
cauagcuaucaagugugcuu

SEQ ID NO: 2471213 - RNA, 18 nt, Human
cauagcuccuucucucuu

SEQ ID NO: 2471214 - RNA, 15 nt, Human
cauagcugucuagag

SEQ ID NO: 2471215 - RNA, 14 nt, Human
cauagcugucuaga

SEQ ID NO: 2471216 - RNA, 13 nt, Human
cauagcuuccaug

SEQ ID NO: 2471217 - RNA, 22 nt, Human
cauagcuuacaagccagcugga

SEQ ID NO: 2471218 - RNA, 15 nt, Human
cauaauuuguacaua

SEQ ID NO: 2471219 - RNA, 16 nt, Human
cauaauucuuguauau

SEQ ID NO: 2471220 - RNA, 17 nt, Human
cauaauucuuguauauu

SEQ ID NO: 2471221 - RNA, 18 nt, Human
cauaauucuuguauauua

SEQ ID NO: 2471222 - RNA, 18 nt, Human
cauaauucuaagacuaau

SEQ ID NO: 2471223 - RNA, 13 nt, Human
cagugggagaaaa

SEQ ID NO: 2471224 - RNA, 15 nt, Human
cagugggagcugccu

SEQ ID NO: 2471225 - RNA, 20 nt, Human
cauacaccuaugucauuuca

SEQ ID NO: 2471226 - RNA, 14 nt, Human
cauacaccagcauu

SEQ ID NO: 2471227 - RNA, 18 nt, Human
cauacaccagcauuccuu

SEQ ID NO: 2471228 - RNA, 20 nt, Human
cauacaccagcauuccuuuu

SEQ ID NO: 2471229 - RNA, 23 nt, Human
cauacacuuauuggaacucugcu

SEQ ID NO: 2471230 - RNA, 15 nt, Human
cauacacuuccuucu

SEQ ID NO: 2471231 - RNA, 21 nt, Human
cauacacacacacacacagcc

SEQ ID NO: 2471232 - RNA, 22 nt, Human
cauacacacacacacacagcca

SEQ ID NO: 2471233 - RNA, 21 nt, Human
cauaauuuguacauauguaaa

SEQ ID NO: 2471234 - RNA, 23 nt, Human
cauaauuuguacauauguaaaau

SEQ ID NO: 2471235 - RNA, 13 nt, Human
cauacaccagcau

SEQ ID NO: 2471236 - RNA, 23 nt, Human
cauacacacacacacacagccac

SEQ ID NO: 2471237 - RNA, 16 nt, Human
caucugggggagugga

SEQ ID NO: 2471238 - RNA, 15 nt, Human
caucugggggagugg

SEQ ID NO: 2471239 - RNA, 13 nt, Human
caucugggcuccu

SEQ ID NO: 2471240 - RNA, 20 nt, Human
caucugggcuccuccagggu

SEQ ID NO: 2471241 - RNA, 11 nt, Human
caucugggcuc

SEQ ID NO: 2471242 - RNA, 16 nt, Human
caucugggcuccucca

SEQ ID NO: 2471243 - RNA, 17 nt, Human
caucugggcuccuccag

SEQ ID NO: 2471244 - RNA, 15 nt, Human
caucuggguccuugc

SEQ ID NO: 2471245 - RNA, 18 nt, Human
caucugggggaguggaau

SEQ ID NO: 2471246 - RNA, 17 nt, Human
caucugggggaguggaa

SEQ ID NO: 2471247 - RNA, 16 nt, Human
caucuggguagcugua

SEQ ID NO: 2471248 - RNA, 18 nt, Human
caucuggguagcuguaag

SEQ ID NO: 2471249 - RNA, 20 nt, Human
caucuggguagcuguaaggc

SEQ ID NO: 2471250 - RNA, 15 nt, Human
caucaggccaggccc

SEQ ID NO: 2471251 - RNA, 19 nt, Human
caucaggccaggcccucug

SEQ ID NO: 2471252 - RNA, 16 nt, Human
caucaggccaggcccu

SEQ ID NO: 2471253 - RNA, 14 nt, Human
caucaggccaggcc

SEQ ID NO: 2471254 - RNA, 19 nt, Human
cauccauggggcugauugu

SEQ ID NO: 2471255 - RNA, 16 nt, Human
cauccauguguggacu

SEQ ID NO: 2471256 - RNA, 17 nt, Human
cauccauguguggacuc

SEQ ID NO: 2471257 - RNA, 18 nt, Human
cauccauguguggacuca

SEQ ID NO: 2471258 - RNA, 19 nt, Human
cauccauguuuguaaaacu

SEQ ID NO: 2471259 - RNA, 18 nt, Human
cauccauguuuguaaaac

SEQ ID NO: 2471260 - RNA, 15 nt, Human
cauccauguuuguaa

SEQ ID NO: 2471261 - RNA, 17 nt, Human
caucccagccccaauga

SEQ ID NO: 2471262 - RNA, 14 nt, Human
cauccauuccucag

SEQ ID NO: 2471263 - RNA, 19 nt, Human
caucccaggacaccacacc

SEQ ID NO: 2471264 - RNA, 14 nt, Human
caucccagccuugg

SEQ ID NO: 2471265 - RNA, 13 nt, Human
caucccaggacac

SEQ ID NO: 2471266 - RNA, 12 nt, Human
caucugggaaag

SEQ ID NO: 2471267 - RNA, 15 nt, Human
caucugcucuccuuc

SEQ ID NO: 2471268 - RNA, 14 nt, Human
caucugcucuccuu

SEQ ID NO: 2471269 - RNA, 13 nt, Human
caucugcucuccu

SEQ ID NO: 2471270 - RNA, 15 nt, Human
caucugggauuccca

SEQ ID NO: 2471271 - RNA, 19 nt, Human
caucugggaguccccuuuu

SEQ ID NO: 2471272 - RNA, 16 nt, Human
caucugggauucccac

SEQ ID NO: 2471273 - RNA, 18 nt, Human
caucugggaguccccuuu

SEQ ID NO: 2471274 - RNA, 14 nt, Human
caucugggaaagac

SEQ ID NO: 2471275 - RNA, 21 nt, Human
caucugggaagauuucuaccu

SEQ ID NO: 2471276 - RNA, 19 nt, Human
caucugcgugacaauaaaa

SEQ ID NO: 2471277 - RNA, 18 nt, Human
caucugcgugacaauaaa

SEQ ID NO: 2471278 - RNA, 16 nt, Human
caucugcgugacaaua

SEQ ID NO: 2471279 - RNA, 23 nt, Human
caucugcgugacaauaaaacauu

SEQ ID NO: 2471280 - RNA, 22 nt, Human
caucugcgugacaauaaaacau

SEQ ID NO: 2471281 - RNA, 12 nt, Human
caucugcuaaua

SEQ ID NO: 2471282 - RNA, 20 nt, Human
caucugccuuaaaaccaaag

SEQ ID NO: 2471283 - RNA, 18 nt, Human
caucugccuuaaaaccaa

SEQ ID NO: 2471284 - RNA, 20 nt, Human
caucugccgugccuggaucc

SEQ ID NO: 2471285 - RNA, 19 nt, Human
caucugccccucccccaac

SEQ ID NO: 2471286 - RNA, 17 nt, Human
cauccuuccuucccacc

SEQ ID NO: 2471287 - RNA, 18 nt, Human
caucugccccucccccaa

SEQ ID NO: 2471288 - RNA, 16 nt, Human
cauccuuccuucccac

SEQ ID NO: 2471289 - RNA, 15 nt, Human
cauccuuccuuccca

SEQ ID NO: 2471290 - RNA, 14 nt, Human
cauccuuccuuccc

SEQ ID NO: 2471291 - RNA, 22 nt, Human
cauccuucccugucugccaggg

SEQ ID NO: 2471292 - RNA, 11 nt, Human
cauccuuaaag

SEQ ID NO: 2471293 - RNA, 22 nt, Human
cauccuucaagaacucugggcu

SEQ ID NO: 2471294 - RNA, 23 nt, Human
cauccuucaagaacucugggcug

SEQ ID NO: 2471295 - RNA, 18 nt, Human
cauccuuccucacaccag

SEQ ID NO: 2471296 - RNA, 21 nt, Human
cauccuucccugucugccagg

SEQ ID NO: 2471297 - RNA, 15 nt, Human
cauccuucccugucu

SEQ ID NO: 2471298 - RNA, 19 nt, Human
caucccauaugccugggca

SEQ ID NO: 2471299 - RNA, 23 nt, Human
caucccaggacaccacacccagc

SEQ ID NO: 2471300 - RNA, 22 nt, Human
caucccaggacaccacacccag

SEQ ID NO: 2471301 - RNA, 21 nt, Human
caucccaggacaccacaccca

SEQ ID NO: 2471302 - RNA, 19 nt, Human
caucccaggcuucacccug

SEQ ID NO: 2471303 - RNA, 13 nt, Human
caucccaggggac

SEQ ID NO: 2471304 - RNA, 14 nt, Human
caucccaggggacc

SEQ ID NO: 2471305 - RNA, 19 nt, Human
caucccaggggaccacacc

SEQ ID NO: 2471306 - RNA, 14 nt, Human
caucccccugcccu

SEQ ID NO: 2471307 - RNA, 13 nt, Human
caucccccugccc

SEQ ID NO: 2471308 - RNA, 12 nt, Human
caucccccugcc

SEQ ID NO: 2471309 - RNA, 11 nt, Human
caucccccugc

SEQ ID NO: 2471310 - RNA, 18 nt, Human
cauccccccucaccaggg

SEQ ID NO: 2471311 - RNA, 17 nt, Human
cauccccccucaccagg

SEQ ID NO: 2471312 - RNA, 14 nt, Human
cauccccccucacc

SEQ ID NO: 2471313 - RNA, 13 nt, Human
cauccccccucac

SEQ ID NO: 2471314 - RNA, 13 nt, Human
caucccaguggcc

SEQ ID NO: 2471315 - RNA, 20 nt, Human
caucccaguggccucaaccc

SEQ ID NO: 2471316 - RNA, 23 nt, Human
caucccaguggccucaacccucc

SEQ ID NO: 2471317 - RNA, 12 nt, Human
caucccaucauc

SEQ ID NO: 2471318 - RNA, 21 nt, Human
cauccccauccuccagcuucu

SEQ ID NO: 2471319 - RNA, 12 nt, Human
cauccccccuca

SEQ ID NO: 2471320 - RNA, 18 nt, Human
cauccccauccuccagcu

SEQ ID NO: 2471321 - RNA, 21 nt, Human
cauccuguguuucuagggaaa

SEQ ID NO: 2471322 - RNA, 22 nt, Human
cauccuguguuucuagggaaau

SEQ ID NO: 2471323 - RNA, 21 nt, Human
cauccuucaagaacucugggc

SEQ ID NO: 2471324 - RNA, 15 nt, Human
cauccuguguuucua

SEQ ID NO: 2471325 - RNA, 19 nt, Human
cauccccuggacugggagg

SEQ ID NO: 2471326 - RNA, 14 nt, Human
cauccccuguagag

SEQ ID NO: 2471327 - RNA, 19 nt, Human
caucccccugcccucgugg

SEQ ID NO: 2471328 - RNA, 19 nt, Human
cauccccgcagugugcacu

SEQ ID NO: 2471329 - RNA, 14 nt, Human
cauccccuggacug

SEQ ID NO: 2471330 - RNA, 22 nt, Human
cauggccacuugggucuucccu

SEQ ID NO: 2471331 - RNA, 18 nt, Human
cauggccaccuuuucagc

SEQ ID NO: 2471332 - RNA, 13 nt, Human
cauggccaggugg

SEQ ID NO: 2471333 - RNA, 14 nt, Human
cauggccagguggc

SEQ ID NO: 2471334 - RNA, 15 nt, Human
caugcugcccuguga

SEQ ID NO: 2471335 - RNA, 14 nt, Human
caugcugcccugug

SEQ ID NO: 2471336 - RNA, 19 nt, Human
cauggcaucaccuccacca

SEQ ID NO: 2471337 - RNA, 17 nt, Human
caugcucaucugcuggu

SEQ ID NO: 2471338 - RNA, 16 nt, Human
caugcucaucugcugg

SEQ ID NO: 2471339 - RNA, 20 nt, Human
caugcucagcccugacuggu

SEQ ID NO: 2471340 - RNA, 15 nt, Human
caugcucagcccuga

SEQ ID NO: 2471341 - RNA, 19 nt, Human
caugcucaucugcuggucc

SEQ ID NO: 2471342 - RNA, 18 nt, Human
caugcucaucugcugguc

SEQ ID NO: 2471343 - RNA, 23 nt, Human
caugcucagcccugacuggugcu

SEQ ID NO: 2471344 - RNA, 16 nt, Human
caugcacgugugugca

SEQ ID NO: 2471345 - RNA, 23 nt, Human
caugcuaucucugugugcacaaa

SEQ ID NO: 2471346 - RNA, 13 nt, Human
caugcugcccugu

SEQ ID NO: 2471347 - RNA, 12 nt, Human
caugcugcccug

SEQ ID NO: 2471348 - RNA, 13 nt, Human
caugcuccuggcc

SEQ ID NO: 2471349 - RNA, 12 nt, Human
caugacauguua

SEQ ID NO: 2471350 - RNA, 15 nt, Human
caugacauguuauau

SEQ ID NO: 2471351 - RNA, 20 nt, Human
caugaaguuuccuuggcugg

SEQ ID NO: 2471352 - RNA, 22 nt, Human
caugauuaaccacuucagcuga

SEQ ID NO: 2471353 - RNA, 23 nt, Human
caugauuaaccacuucagcugac

SEQ ID NO: 2471354 - RNA, 14 nt, Human
caugcacaccuccc

SEQ ID NO: 2471355 - RNA, 18 nt, Human
caugcaauuuauuaaaau

SEQ ID NO: 2471356 - RNA, 12 nt, Human
caugcacaaauu

SEQ ID NO: 2471357 - RNA, 24 nt, Human
caugauuaaccacuucagcugacu

SEQ ID NO: 2471358 - RNA, 22 nt, Human
caugaaggaugccaagaaguuu

SEQ ID NO: 2471359 - RNA, 22 nt, Human
caugaagcccaagugaaaucaa

SEQ ID NO: 2471360 - RNA, 15 nt, Human
caugaaguaauaugc

SEQ ID NO: 2471361 - RNA, 19 nt, Human
caugaaguaauaugcacac

SEQ ID NO: 2471362 - RNA, 22 nt, Human
caugaaguaauaugcacacauu

SEQ ID NO: 2471363 - RNA, 23 nt, Human
caugaaguaauaugcacacauuu

SEQ ID NO: 2471364 - RNA, 23 nt, Human
caugacacgaauauugcugaugg

SEQ ID NO: 2471365 - RNA, 19 nt, Human
caugaagucguugugaggg

SEQ ID NO: 2471366 - RNA, 20 nt, Human
caugaaguguguuuccuuca

SEQ ID NO: 2471367 - RNA, 18 nt, Human
caugaaguuuccuuggcu

SEQ ID NO: 2471368 - RNA, 21 nt, Human
caugacacgaauauugcugau

SEQ ID NO: 2471369 - RNA, 18 nt, Human
caugaagguuucugaaaa

SEQ ID NO: 2471370 - RNA, 16 nt, Human
caugaaggugucauac

SEQ ID NO: 2471371 - RNA, 15 nt, Human
caugaagguuucuga

SEQ ID NO: 2471372 - RNA, 22 nt, Human
caugucaacuucuggcuccuca

SEQ ID NO: 2471373 - RNA, 18 nt, Human
caugucaacuucuggcuc

SEQ ID NO: 2471374 - RNA, 20 nt, Human
cauguaucuaugcauuuucu

SEQ ID NO: 2471375 - RNA, 15 nt, Human
cauguaucaucugga

SEQ ID NO: 2471376 - RNA, 14 nt, Human
cauguaucuaccuc

SEQ ID NO: 2471377 - RNA, 21 nt, Human
cauguaucccaacuccuauaa

SEQ ID NO: 2471378 - RNA, 17 nt, Human
caugucagcaaaaagca

SEQ ID NO: 2471379 - RNA, 16 nt, Human
caugucagcaaaaagc

SEQ ID NO: 2471380 - RNA, 14 nt, Human
caugucagcaaaaa

SEQ ID NO: 2471381 - RNA, 16 nt, Human
caugucacuguggucc

SEQ ID NO: 2471382 - RNA, 15 nt, Human
caugucacugugguc

SEQ ID NO: 2471383 - RNA, 14 nt, Human
caugucacuguggu

SEQ ID NO: 2471384 - RNA, 13 nt, Human
caugucacugugg

SEQ ID NO: 2471385 - RNA, 23 nt, Human
caugucaccguggaccuuccugc

SEQ ID NO: 2471386 - RNA, 22 nt, Human
caugucaccguggaccuuccug

SEQ ID NO: 2471387 - RNA, 20 nt, Human
caugucaccguggaccuucc

SEQ ID NO: 2471388 - RNA, 20 nt, Human
caugucaccggauccugggu

SEQ ID NO: 2471389 - RNA, 18 nt, Human
cauguaguaucaaauauu

SEQ ID NO: 2471390 - RNA, 17 nt, Human
cauguaguaucaaauau

SEQ ID NO: 2471391 - RNA, 16 nt, Human
cauguaguaucaaaua

SEQ ID NO: 2471392 - RNA, 22 nt, Human
cauguaguaucaaauauuagau

SEQ ID NO: 2471393 - RNA, 21 nt, Human
cauguaguaucaaauauuaga

SEQ ID NO: 2471394 - RNA, 20 nt, Human
cauguaguaucaaauauuag

SEQ ID NO: 2471395 - RNA, 19 nt, Human
cauguaguaucaaauauua

SEQ ID NO: 2471396 - RNA, 20 nt, Human
cauguauaauauuuuuaauu

SEQ ID NO: 2471397 - RNA, 18 nt, Human
cauguauaauauuuuuaa

SEQ ID NO: 2471398 - RNA, 15 nt, Human
cauguauaauauuuu

SEQ ID NO: 2471399 - RNA, 20 nt, Human
cauguccaagaagcccagga

SEQ ID NO: 2471400 - RNA, 19 nt, Human
cauguccaagaagcccagg

SEQ ID NO: 2471401 - RNA, 21 nt, Human
caugucaggccugugugugaa

SEQ ID NO: 2471402 - RNA, 23 nt, Human
caugucagcaaaaagcaaaauca

SEQ ID NO: 2471403 - RNA, 22 nt, Human
caugucagcaaaaagcaaaauc

SEQ ID NO: 2471404 - RNA, 20 nt, Human
caugucagcaaaaagcaaaa

SEQ ID NO: 2471405 - RNA, 18 nt, Human
caugucagcaaaaagcaa

SEQ ID NO: 2471406 - RNA, 18 nt, Human
cauguccaagaagcccag

SEQ ID NO: 2471407 - RNA, 18 nt, Human
cauguugcacacccacuc

SEQ ID NO: 2471408 - RNA, 22 nt, Human
cauguugcacacccacucagcu

SEQ ID NO: 2471409 - RNA, 23 nt, Human
cauguugcacacccacucagcuc

SEQ ID NO: 2471410 - RNA, 20 nt, Human
cauguccccaaaccugcaag

SEQ ID NO: 2471411 - RNA, 16 nt, Human
caugucaggccugugu

SEQ ID NO: 2471412 - RNA, 18 nt, Human
caugucagcaucagcuca

SEQ ID NO: 2471413 - RNA, 19 nt, Human
cauguugagccaggccugg

SEQ ID NO: 2471414 - RNA, 13 nt, Human
cauguuggccagg

SEQ ID NO: 2471415 - RNA, 12 nt, Human
cauguuggccag

SEQ ID NO: 2471416 - RNA, 12 nt, Human
cauuaucucaaa

SEQ ID NO: 2471417 - RNA, 23 nt, Human
cauuaucuagauacuguaucaug

SEQ ID NO: 2471418 - RNA, 13 nt, Human
cauuaucucaaaa

SEQ ID NO: 2471419 - RNA, 16 nt, Human
cauuaugagaggcaau

SEQ ID NO: 2471420 - RNA, 17 nt, Human
cauuagggggaacucua

SEQ ID NO: 2471421 - RNA, 22 nt, Human
cauuaggugugacugaauuucu

SEQ ID NO: 2471422 - RNA, 15 nt, Human
cauguugcugaggag

SEQ ID NO: 2471423 - RNA, 14 nt, Human
cauguugcugagga

SEQ ID NO: 2471424 - RNA, 13 nt, Human
cauguugcugcca

SEQ ID NO: 2471425 - RNA, 16 nt, Human
cauguugcugaggagu

SEQ ID NO: 2471426 - RNA, 14 nt, Human
cauucucacuccua

SEQ ID NO: 2471427 - RNA, 14 nt, Human
cauucuauuguuaa

SEQ ID NO: 2471428 - RNA, 18 nt, Human
cauucuagguuugcaaga

SEQ ID NO: 2471429 - RNA, 18 nt, Human
cauucggcucccuggagc

SEQ ID NO: 2471430 - RNA, 15 nt, Human
cauucggcucccugg

SEQ ID NO: 2471431 - RNA, 19 nt, Human
cauucggcucccuggagcc

SEQ ID NO: 2471432 - RNA, 17 nt, Human
cauucucaagcccugca

SEQ ID NO: 2471433 - RNA, 16 nt, Human
cauucucaagcccugc

SEQ ID NO: 2471434 - RNA, 14 nt, Human
cauucucaagcccu

SEQ ID NO: 2471435 - RNA, 13 nt, Human
cauucucacuccu

SEQ ID NO: 2471436 - RNA, 13 nt, Human
cauucggcucccu

SEQ ID NO: 2471437 - RNA, 19 nt, Human
cauuccuucuuugauaaug

SEQ ID NO: 2471438 - RNA, 18 nt, Human
cauuccuucuuugauaau

SEQ ID NO: 2471439 - RNA, 16 nt, Human
cauuccuucuuugaua

SEQ ID NO: 2471440 - RNA, 15 nt, Human
cauuccuucuuugau

SEQ ID NO: 2471441 - RNA, 23 nt, Human
cauuccuucuuugauaauguuaa

SEQ ID NO: 2471442 - RNA, 13 nt, Human
cauuccuugccug

SEQ ID NO: 2471443 - RNA, 12 nt, Human
cauuccuguucc

SEQ ID NO: 2471444 - RNA, 14 nt, Human
cauuccuucuuuga

SEQ ID NO: 2471445 - RNA, 22 nt, Human
cauuaugagaggcaaugauugu

SEQ ID NO: 2471446 - RNA, 13 nt, Human
ccaaaugcagcuu

SEQ ID NO: 2471447 - RNA, 15 nt, Human
ccaaaugcagcuuua

SEQ ID NO: 2471448 - RNA, 18 nt, Human
ccaaaugcagcuuuaaaa

SEQ ID NO: 2471449 - RNA, 15 nt, Human
ccaaaugcuuuaaaa

SEQ ID NO: 2471450 - RNA, 22 nt, Human
ccaaaugcauggugcaguugac

SEQ ID NO: 2471451 - RNA, 17 nt, Human
ccaaaugcauggugcag

SEQ ID NO: 2471452 - RNA, 17 nt, Human
ccaaauaaugucucugu

SEQ ID NO: 2471453 - RNA, 16 nt, Human
ccaaauaaugucucug

SEQ ID NO: 2471454 - RNA, 15 nt, Human
ccaaauaaugucucu

SEQ ID NO: 2471455 - RNA, 15 nt, Human
ccaaauauguccugg

SEQ ID NO: 2471456 - RNA, 12 nt, Human
ccaaaugcagcu

SEQ ID NO: 2471457 - RNA, 13 nt, Human
ccaaauauguccu

SEQ ID NO: 2471458 - RNA, 17 nt, Human
ccaaauaagaaaccuaa

SEQ ID NO: 2471459 - RNA, 16 nt, Human
ccaaauaagaaaccua

SEQ ID NO: 2471460 - RNA, 15 nt, Human
ccaaauaagaaaccu

SEQ ID NO: 2471461 - RNA, 20 nt, Human
ccaaauaaaaacuaaauugu

SEQ ID NO: 2471462 - RNA, 16 nt, Human
ccaaauaaaaacuaaa

SEQ ID NO: 2471463 - RNA, 11 nt, Human
ccaaauaaaaa

SEQ ID NO: 2471464 - RNA, 22 nt, Human
ccaaagugguauagaaaugcug

SEQ ID NO: 2471465 - RNA, 17 nt, Human
ccaagcugggccccagc

SEQ ID NO: 2471466 - RNA, 16 nt, Human
ccaagcugggccccag

SEQ ID NO: 2471467 - RNA, 15 nt, Human
ccaagcugggcccca

SEQ ID NO: 2471468 - RNA, 13 nt, Human
ccaagcugggccc

SEQ ID NO: 2471469 - RNA, 12 nt, Human
ccaagcugggcc

SEQ ID NO: 2471470 - RNA, 11 nt, Human
ccaagcugggc

SEQ ID NO: 2471471 - RNA, 14 nt, Human
ccaagaagcccagg

SEQ ID NO: 2471472 - RNA, 19 nt, Human
ccaagcuggucccacucag

SEQ ID NO: 2471473 - RNA, 12 nt, Human
ccaagcuggucc

SEQ ID NO: 2471474 - RNA, 21 nt, Human
ccaagcugggccccagcccac

SEQ ID NO: 2471475 - RNA, 20 nt, Human
ccaagcugggccccagccca

SEQ ID NO: 2471476 - RNA, 19 nt, Human
ccaagcugggccccagccc

SEQ ID NO: 2471477 - RNA, 18 nt, Human
ccaagcugggccccagcc

SEQ ID NO: 2471478 - RNA, 16 nt, Human
ccaaggcaaggcaggu

SEQ ID NO: 2471479 - RNA, 15 nt, Human
ccaaggcaaggcagg

SEQ ID NO: 2471480 - RNA, 13 nt, Human
ccaaggcaaggca

SEQ ID NO: 2471481 - RNA, 22 nt, Human
ccaagcugggccccagcccacc

SEQ ID NO: 2471482 - RNA, 18 nt, Human
ccaaggaugccccguccc

SEQ ID NO: 2471483 - RNA, 15 nt, Human
ccaaggccaaaggaa

SEQ ID NO: 2471484 - RNA, 23 nt, Human
ccaaggcaaggcaggugccucca

SEQ ID NO: 2471485 - RNA, 22 nt, Human
ccaaggcaaggcaggugccucc

SEQ ID NO: 2471486 - RNA, 17 nt, Human
ccaaggcaaggcaggug

SEQ ID NO: 2471487 - RNA, 21 nt, Human
ccaaggcagaagcagcagggg

SEQ ID NO: 2471488 - RNA, 15 nt, Human
ccaacgucugugcca

SEQ ID NO: 2471489 - RNA, 13 nt, Human
ccaacgucugugc

SEQ ID NO: 2471490 - RNA, 22 nt, Human
ccaaauggaaaugggcagagca

SEQ ID NO: 2471491 - RNA, 22 nt, Human
ccaaaugcuuuaaaaacuauuu

SEQ ID NO: 2471492 - RNA, 21 nt, Human
ccaacggagagcgccugcccc

SEQ ID NO: 2471493 - RNA, 13 nt, Human
ccaagaagcccag

SEQ ID NO: 2471494 - RNA, 13 nt, Human
ccaagaaagcagg

SEQ ID NO: 2471495 - RNA, 18 nt, Human
ccaagaaacugagaccaa

SEQ ID NO: 2471496 - RNA, 14 nt, Human
ccaagaaacgucuu

SEQ ID NO: 2471497 - RNA, 22 nt, Human
ccaacggagagcgccugccccu

SEQ ID NO: 2471498 - RNA, 24 nt, Human
ccaacggcaagggaacaaguacuu

SEQ ID NO: 2471499 - RNA, 23 nt, Human
ccaaugaaaaaauguauaugcac

SEQ ID NO: 2471500 - RNA, 15 nt, Human
ccaaugaaaaaaugu

SEQ ID NO: 2471501 - RNA, 13 nt, Human
ccaauccugcccc

SEQ ID NO: 2471502 - RNA, 13 nt, Human
ccaauccuauguu

SEQ ID NO: 2471503 - RNA, 21 nt, Human
ccaauccccuccuugggcacu

SEQ ID NO: 2471504 - RNA, 14 nt, Human
ccaauccuauguuu

SEQ ID NO: 2471505 - RNA, 15 nt, Human
ccaauccucacuggg

SEQ ID NO: 2471506 - RNA, 18 nt, Human
ccaaucuaaccacaucaa

SEQ ID NO: 2471507 - RNA, 12 nt, Human
ccaauccugccc

SEQ ID NO: 2471508 - RNA, 17 nt, Human
ccaauccucacugggug

SEQ ID NO: 2471509 - RNA, 18 nt, Human
ccaauccucacugggugg

SEQ ID NO: 2471510 - RNA, 16 nt, Human
ccaaggccaaaggaag

SEQ ID NO: 2471511 - RNA, 17 nt, Human
ccaauccccuccuuggg

SEQ ID NO: 2471512 - RNA, 16 nt, Human
ccaauccccuccuugg

SEQ ID NO: 2471513 - RNA, 18 nt, Human
ccaaucccagcuaccuca

SEQ ID NO: 2471514 - RNA, 15 nt, Human
cauuuuuuaaaugca

SEQ ID NO: 2471515 - RNA, 16 nt, Human
cauuuuuuaaaugcac

SEQ ID NO: 2471516 - RNA, 19 nt, Human
cauuuuuuaaaugcaccug

SEQ ID NO: 2471517 - RNA, 17 nt, Human
cauuuuuuaaggaaaca

SEQ ID NO: 2471518 - RNA, 14 nt, Human
cauuugugaaauga

SEQ ID NO: 2471519 - RNA, 16 nt, Human
cauuugugaaaugaug

SEQ ID NO: 2471520 - RNA, 22 nt, Human
cauuugucuauucuccagcuga

SEQ ID NO: 2471521 - RNA, 17 nt, Human
cauuugucacacacuuu

SEQ ID NO: 2471522 - RNA, 14 nt, Human
cauuuggauugggg

SEQ ID NO: 2471523 - RNA, 23 nt, Human
cauuuggauuggggucccucuaa

SEQ ID NO: 2471524 - RNA, 23 nt, Human
cauuuggaguguuccccuuccac

SEQ ID NO: 2471525 - RNA, 15 nt, Human
cauuuggauuggaug

SEQ ID NO: 2471526 - RNA, 21 nt, Human
cauuuggagacacaacuauuu

SEQ ID NO: 2471527 - RNA, 15 nt, Human
cauuuggaauacuuu

SEQ ID NO: 2471528 - RNA, 17 nt, Human
cauuuggaauacuuuuu

SEQ ID NO: 2471529 - RNA, 18 nt, Human
cauuucauuccuaacaca

SEQ ID NO: 2471530 - RNA, 21 nt, Human
cauuucauuccuaacacagca

SEQ ID NO: 2471531 - RNA, 15 nt, Human
cauuucauuccuaac

SEQ ID NO: 2471532 - RNA, 20 nt, Human
cauuucaucuauuucugaga

SEQ ID NO: 2471533 - RNA, 14 nt, Human
cauuucaucuauuu

SEQ ID NO: 2471534 - RNA, 15 nt, Human
cauuucaucuauuuc

SEQ ID NO: 2471535 - RNA, 16 nt, Human
cauuucaucuauuucu

SEQ ID NO: 2471536 - RNA, 17 nt, Human
cauuucaucuauuucug

SEQ ID NO: 2471537 - RNA, 18 nt, Human
cauuucaucuauuucuga

SEQ ID NO: 2471538 - RNA, 13 nt, Human
cauuucaggaggg

SEQ ID NO: 2471539 - RNA, 22 nt, Human
cauuucaggagcagccucagaa

SEQ ID NO: 2471540 - RNA, 16 nt, Human
cauuucaggagcagcc

SEQ ID NO: 2471541 - RNA, 21 nt, Human
cauuuauggucaacacuuaag

SEQ ID NO: 2471542 - RNA, 15 nt, Human
cauuucaggagcagc

SEQ ID NO: 2471543 - RNA, 20 nt, Human
cauuuauggucaacacuuaa

SEQ ID NO: 2471544 - RNA, 14 nt, Human
cauuuauguuuauu

SEQ ID NO: 2471545 - RNA, 22 nt, Human
cauuuauauauugaauuaauau

SEQ ID NO: 2471546 - RNA, 15 nt, Human
cauuuauauauugaa

SEQ ID NO: 2471547 - RNA, 16 nt, Human
cauuuaugauuuaaua

SEQ ID NO: 2471548 - RNA, 21 nt, Human
cauuuaugauuuaauaaaaua

SEQ ID NO: 2471549 - RNA, 20 nt, Human
cauuuaugauuuaauaaaau

SEQ ID NO: 2471550 - RNA, 18 nt, Human
cauuuaugauuuaauaaa

SEQ ID NO: 2471551 - RNA, 17 nt, Human
cauuuaugauuuaauaa

SEQ ID NO: 2471552 - RNA, 23 nt, Human
cauuuaugauuuaauaaaauaau

SEQ ID NO: 2471553 - RNA, 15 nt, Human
cauuuauucugcuca

SEQ ID NO: 2471554 - RNA, 14 nt, Human
cauuuauucugcuc

SEQ ID NO: 2471555 - RNA, 22 nt, Human
cauugguucuuguauuaagaau

SEQ ID NO: 2471556 - RNA, 15 nt, Human
cauuggaagacccca

SEQ ID NO: 2471557 - RNA, 18 nt, Human
cauugguucuuguauuaa

SEQ ID NO: 2471558 - RNA, 16 nt, Human
cauuggaagaccccac

SEQ ID NO: 2471559 - RNA, 15 nt, Human
cauugguucuuguau

SEQ ID NO: 2471560 - RNA, 13 nt, Human
cauuuauauagau

SEQ ID NO: 2471561 - RNA, 15 nt, Human
cauuuauacucuuuu

SEQ ID NO: 2471562 - RNA, 11 nt, Human
cauuuauacuc

SEQ ID NO: 2471563 - RNA, 13 nt, Human
cauuuauauauug

SEQ ID NO: 2471564 - RNA, 12 nt, Human
cauuuauauauu

SEQ ID NO: 2471565 - RNA, 17 nt, Human
cauuuauacaaauuaga

SEQ ID NO: 2471566 - RNA, 18 nt, Human
cauuuauacaaauuagaa

SEQ ID NO: 2471567 - RNA, 19 nt, Human
cauuuauacaaauuagaaa

SEQ ID NO: 2471568 - RNA, 20 nt, Human
cauuuauacaaauuagaaaa

SEQ ID NO: 2471569 - RNA, 12 nt, Human
cauuuauacaaa

SEQ ID NO: 2471570 - RNA, 15 nt, Human
cauuuauacaaauua

SEQ ID NO: 2471571 - RNA, 21 nt, Human
cauuuauaauguuugcuauug

SEQ ID NO: 2471572 - RNA, 23 nt, Human
cauuuaguuugauuauucagugu

SEQ ID NO: 2471573 - RNA, 18 nt, Human
cauuuauaaagcuaaaau

SEQ ID NO: 2471574 - RNA, 21 nt, Human
cauuuauaaagcuaaaauaac

SEQ ID NO: 2471575 - RNA, 14 nt, Human
cauuuauaauguuu

SEQ ID NO: 2471576 - RNA, 17 nt, Human
cauuuauaauguuugcu

SEQ ID NO: 2471577 - RNA, 19 nt, Human
cauuguaaauaguauuuga

SEQ ID NO: 2471578 - RNA, 21 nt, Human
cauuguaaaccacaaggcugu

SEQ ID NO: 2471579 - RNA, 13 nt, Human
cauuguaaaccac

SEQ ID NO: 2471580 - RNA, 22 nt, Human
cauugcuugugccacacccucc

SEQ ID NO: 2471581 - RNA, 17 nt, Human
cauugcuuuacugucaa

SEQ ID NO: 2471582 - RNA, 12 nt, Human
cauugcuuucug

SEQ ID NO: 2471583 - RNA, 14 nt, Human
cauugcuuucugaa

SEQ ID NO: 2471584 - RNA, 22 nt, Human
cauugcuuugaagcaguugugu

SEQ ID NO: 2471585 - RNA, 18 nt, Human
cauugcuuugaagcaguu

SEQ ID NO: 2471586 - RNA, 16 nt, Human
cauugcuuugaagcag

SEQ ID NO: 2471587 - RNA, 15 nt, Human
cauugcuuucugaaa

SEQ ID NO: 2471588 - RNA, 23 nt, Human
cauugcuuugaagcaguuguguc

SEQ ID NO: 2471589 - RNA, 14 nt, Human
ccacuccucugacu

SEQ ID NO: 2471590 - RNA, 13 nt, Human
ccacuccucugac

SEQ ID NO: 2471591 - RNA, 20 nt, Human
ccacuccucugacucagggc

SEQ ID NO: 2471592 - RNA, 19 nt, Human
ccaccacggccacuggcca

SEQ ID NO: 2471593 - RNA, 16 nt, Human
ccaccacggccacugg

SEQ ID NO: 2471594 - RNA, 21 nt, Human
ccaccacgauguggcccuggc

SEQ ID NO: 2471595 - RNA, 17 nt, Human
ccaccacuaggacucug

SEQ ID NO: 2471596 - RNA, 20 nt, Human
ccaccacuaggacucugagg

SEQ ID NO: 2471597 - RNA, 20 nt, Human
ccaccaggcuggcgcagcca

SEQ ID NO: 2471598 - RNA, 19 nt, Human
ccaccaggcuggcgcagcc

SEQ ID NO: 2471599 - RNA, 18 nt, Human
ccaccaggcuggcgcagc

SEQ ID NO: 2471600 - RNA, 12 nt, Human
ccaccaggcugg

SEQ ID NO: 2471601 - RNA, 15 nt, Human
ccaccacuggccacc

SEQ ID NO: 2471602 - RNA, 14 nt, Human
ccaccacuggccac

SEQ ID NO: 2471603 - RNA, 22 nt, Human
ccaccaggcugcucagggcugg

SEQ ID NO: 2471604 - RNA, 18 nt, Human
ccaccagucugacuguuu

SEQ ID NO: 2471605 - RNA, 23 nt, Human
ccaccaggcuggcgcagccaagg

SEQ ID NO: 2471606 - RNA, 21 nt, Human
ccaccaggcuggcgcagccaa

SEQ ID NO: 2471607 - RNA, 15 nt, Human
ccaccacgcccggcu

SEQ ID NO: 2471608 - RNA, 17 nt, Human
ccaccaccucccucacc

SEQ ID NO: 2471609 - RNA, 19 nt, Human
ccaccacgauguggcccug

SEQ ID NO: 2471610 - RNA, 20 nt, Human
ccaccacgauguggcccugg

SEQ ID NO: 2471611 - RNA, 13 nt, Human
ccaccacccugag

SEQ ID NO: 2471612 - RNA, 24 nt, Human
ccaccaccccccacucugugccug

SEQ ID NO: 2471613 - RNA, 12 nt, Human
ccaccaccuagg

SEQ ID NO: 2471614 - RNA, 18 nt, Human
ccaccaccuaggccacuc

SEQ ID NO: 2471615 - RNA, 20 nt, Human
ccaccaccuaggccacuccu

SEQ ID NO: 2471616 - RNA, 21 nt, Human
ccaccaccuaggccacuccuc

SEQ ID NO: 2471617 - RNA, 12 nt, Human
ccaccaccuccc

SEQ ID NO: 2471618 - RNA, 22 nt, Human
ccaccaccuaggccacuccucc

SEQ ID NO: 2471619 - RNA, 12 nt, Human
ccacagccgcag

SEQ ID NO: 2471620 - RNA, 15 nt, Human
ccacagccgcagccu

SEQ ID NO: 2471621 - RNA, 20 nt, Human
ccaccaccccccacucugug

SEQ ID NO: 2471622 - RNA, 16 nt, Human
ccaccaccccccacuc

SEQ ID NO: 2471623 - RNA, 18 nt, Human
ccacagccgcagccuccc

SEQ ID NO: 2471624 - RNA, 23 nt, Human
ccacagcccugucagugcagccc

SEQ ID NO: 2471625 - RNA, 21 nt, Human
ccacagcccugucagugcagc

SEQ ID NO: 2471626 - RNA, 20 nt, Human
ccacagcccugucagugcag

SEQ ID NO: 2471627 - RNA, 13 nt, Human
ccacagccauccc

SEQ ID NO: 2471628 - RNA, 20 nt, Human
ccacagccaucccagccuug

SEQ ID NO: 2471629 - RNA, 18 nt, Human
ccacagagagucccacug

SEQ ID NO: 2471630 - RNA, 13 nt, Human
ccacagagagucc

SEQ ID NO: 2471631 - RNA, 14 nt, Human
ccacagagcgggga

SEQ ID NO: 2471632 - RNA, 19 nt, Human
ccacagagagucccacugc

SEQ ID NO: 2471633 - RNA, 19 nt, Human
ccacagcccacguccuguc

SEQ ID NO: 2471634 - RNA, 18 nt, Human
ccacagcccacguccugu

SEQ ID NO: 2471635 - RNA, 17 nt, Human
ccacagcccacguccug

SEQ ID NO: 2471636 - RNA, 14 nt, Human
ccacagcccacguc

SEQ ID NO: 2471637 - RNA, 21 nt, Human
ccacagcccacguccugucag

SEQ ID NO: 2471638 - RNA, 13 nt, Human
ccacagcccuguc

SEQ ID NO: 2471639 - RNA, 14 nt, Human
ccacagcccuguca

SEQ ID NO: 2471640 - RNA, 15 nt, Human
ccacagcccugucag

SEQ ID NO: 2471641 - RNA, 20 nt, Human
ccacagacacacacacgcac

SEQ ID NO: 2471642 - RNA, 15 nt, Human
ccacagacacacaca

SEQ ID NO: 2471643 - RNA, 14 nt, Human
ccacagacacacac

SEQ ID NO: 2471644 - RNA, 13 nt, Human
ccacagacacaca

SEQ ID NO: 2471645 - RNA, 21 nt, Human
ccacagacacacacacgcacg

SEQ ID NO: 2471646 - RNA, 22 nt, Human
ccacagagaaaguacuucucca

SEQ ID NO: 2471647 - RNA, 18 nt, Human
ccacagaagcuccaggua

SEQ ID NO: 2471648 - RNA, 15 nt, Human
ccacagacaagguag

SEQ ID NO: 2471649 - RNA, 12 nt, Human
ccacagacacac

SEQ ID NO: 2471650 - RNA, 11 nt, Human
ccacagacaca

SEQ ID NO: 2471651 - RNA, 21 nt, Human
ccacagacaagguagcccugg

SEQ ID NO: 2471652 - RNA, 16 nt, Human
ccacagaagcuccagg

SEQ ID NO: 2471653 - RNA, 22 nt, Human
ccacagaagccaggagcaaaug

SEQ ID NO: 2471654 - RNA, 21 nt, Human
ccacagaagccaggagcaaau

SEQ ID NO: 2471655 - RNA, 20 nt, Human
ccacagaagccaggagcaaa

SEQ ID NO: 2471656 - RNA, 18 nt, Human
ccacagaagccaggagca

SEQ ID NO: 2471657 - RNA, 21 nt, Human
ccacacuucaggcucuucucc

SEQ ID NO: 2471658 - RNA, 14 nt, Human
ccacacuggugacu

SEQ ID NO: 2471659 - RNA, 23 nt, Human
ccacacuggggugccgccugccc

SEQ ID NO: 2471660 - RNA, 22 nt, Human
ccacacuggggugccgccugcc

SEQ ID NO: 2471661 - RNA, 13 nt, Human
ccacacuggugac

SEQ ID NO: 2471662 - RNA, 20 nt, Human
ccacacuucaggcucuucuc

SEQ ID NO: 2471663 - RNA, 16 nt, Human
ccacacuucaggcucu

SEQ ID NO: 2471664 - RNA, 20 nt, Human
ccacacuggggugccgccug

SEQ ID NO: 2471665 - RNA, 19 nt, Human
ccacacuggggugccgccu

SEQ ID NO: 2471666 - RNA, 22 nt, Human
ccacacuggacuccggcccucc

SEQ ID NO: 2471667 - RNA, 21 nt, Human
ccacacuggacuccggcccuc

SEQ ID NO: 2471668 - RNA, 20 nt, Human
ccacgcccuccccuccccug

SEQ ID NO: 2471669 - RNA, 13 nt, Human
ccacgcacuccau

SEQ ID NO: 2471670 - RNA, 18 nt, Human
ccacgauguggcccuggc

SEQ ID NO: 2471671 - RNA, 16 nt, Human
ccacgagggucaggac

SEQ ID NO: 2471672 - RNA, 17 nt, Human
ccacgauguggcccugg

SEQ ID NO: 2471673 - RNA, 20 nt, Human
ccacgauguggcccuggccu

SEQ ID NO: 2471674 - RNA, 16 nt, Human
ccacgacugucuccau

SEQ ID NO: 2471675 - RNA, 21 nt, Human
ccaccuuguuggagccugcag

SEQ ID NO: 2471676 - RNA, 20 nt, Human
ccaccuuguuggagccugca

SEQ ID NO: 2471677 - RNA, 22 nt, Human
ccaccuuguuggagccugcagg

SEQ ID NO: 2471678 - RNA, 17 nt, Human
ccaccuuuauuaaaauc

SEQ ID NO: 2471679 - RNA, 19 nt, Human
ccaccuuguuggagccugc

SEQ ID NO: 2471680 - RNA, 18 nt, Human
ccaccuuguuggagccug

SEQ ID NO: 2471681 - RNA, 17 nt, Human
ccaccuuguuggagccu

SEQ ID NO: 2471682 - RNA, 18 nt, Human
ccaccucacuccuguuac

SEQ ID NO: 2471683 - RNA, 16 nt, Human
ccaccucacuccuguu

SEQ ID NO: 2471684 - RNA, 15 nt, Human
ccaccucacuccugu

SEQ ID NO: 2471685 - RNA, 19 nt, Human
ccaccuuggcugcagggag

SEQ ID NO: 2471686 - RNA, 18 nt, Human
ccaccuuggcugcaggga

SEQ ID NO: 2471687 - RNA, 22 nt, Human
ccacgcccuccccuccccugcu

SEQ ID NO: 2471688 - RNA, 21 nt, Human
ccacgcccuccccuccccugc

SEQ ID NO: 2471689 - RNA, 17 nt, Human
ccacgccuguaauccca

SEQ ID NO: 2471690 - RNA, 18 nt, Human
ccacgcuggaccuugaac

SEQ ID NO: 2471691 - RNA, 16 nt, Human
ccaccuuggcugcagg

SEQ ID NO: 2471692 - RNA, 15 nt, Human
ccaccuuggcugcag

SEQ ID NO: 2471693 - RNA, 14 nt, Human
ccaccuuggcugca

SEQ ID NO: 2471694 - RNA, 12 nt, Human
ccaccuuggcug

SEQ ID NO: 2471695 - RNA, 21 nt, Human
ccaccuagacuguaaaccucu

SEQ ID NO: 2471696 - RNA, 13 nt, Human
ccaccuagcagca

SEQ ID NO: 2471697 - RNA, 14 nt, Human
ccaccuagcagcac

SEQ ID NO: 2471698 - RNA, 23 nt, Human
ccaccuagcagcaccguucugug

SEQ ID NO: 2471699 - RNA, 16 nt, Human
ccaccuaggccacucc

SEQ ID NO: 2471700 - RNA, 17 nt, Human
ccaccuaggccacuccu

SEQ ID NO: 2471701 - RNA, 20 nt, Human
ccaccuaguggcuguccagu

SEQ ID NO: 2471702 - RNA, 19 nt, Human
ccaccuaguggcuguccag

SEQ ID NO: 2471703 - RNA, 18 nt, Human
ccaccuaguggcugucca

SEQ ID NO: 2471704 - RNA, 16 nt, Human
ccaccuaguggcuguc

SEQ ID NO: 2471705 - RNA, 18 nt, Human
ccaccuaggccacuccuc

SEQ ID NO: 2471706 - RNA, 20 nt, Human
ccaccuaggccacuccucca

SEQ ID NO: 2471707 - RNA, 15 nt, Human
ccaccuaguggcugu

SEQ ID NO: 2471708 - RNA, 22 nt, Human
ccaccuaggccacuccuccaaa

SEQ ID NO: 2471709 - RNA, 18 nt, Human
ccaccuaucucgugggag

SEQ ID NO: 2471710 - RNA, 23 nt, Human
ccaccuaguggcuguccagugcc

SEQ ID NO: 2471711 - RNA, 22 nt, Human
ccaccuaguggcuguccagugc

SEQ ID NO: 2471712 - RNA, 21 nt, Human
ccaccuaguggcuguccagug

SEQ ID NO: 2471713 - RNA, 21 nt, Human
ccaccuaucucgugggagagc

SEQ ID NO: 2471714 - RNA, 20 nt, Human
ccaccuaucucgugggagag

SEQ ID NO: 2471715 - RNA, 14 nt, Human
ccaccucaccccac

SEQ ID NO: 2471716 - RNA, 12 nt, Human
ccaccucacccc

SEQ ID NO: 2471717 - RNA, 22 nt, Human
ccaccaucuuugcagguugcuu

SEQ ID NO: 2471718 - RNA, 16 nt, Human
ccaccaugccaggcua

SEQ ID NO: 2471719 - RNA, 15 nt, Human
ccaccaugcccagcu

SEQ ID NO: 2471720 - RNA, 17 nt, Human
ccaccgccuccuacagc

SEQ ID NO: 2471721 - RNA, 14 nt, Human
ccaccgcuccccag

SEQ ID NO: 2471722 - RNA, 15 nt, Human
ccaccgcuccccagc

SEQ ID NO: 2471723 - RNA, 17 nt, Human
ccaccgcuccccagccc

SEQ ID NO: 2471724 - RNA, 19 nt, Human
ccaccgggcugggagcucu

SEQ ID NO: 2471725 - RNA, 21 nt, Human
ccaccgcugccuaaguggcug

SEQ ID NO: 2471726 - RNA, 21 nt, Human
ccaccgcuccccagcccaggg

SEQ ID NO: 2471727 - RNA, 13 nt, Human
ccaccgcugccua

SEQ ID NO: 2471728 - RNA, 14 nt, Human
ccaccgcugccuaa

SEQ ID NO: 2471729 - RNA, 15 nt, Human
ccaccgcugccuaag

SEQ ID NO: 2471730 - RNA, 15 nt, Human
ccaccauccugcagc

SEQ ID NO: 2471731 - RNA, 14 nt, Human
ccaccauccugcag

SEQ ID NO: 2471732 - RNA, 14 nt, Human
ccaccaccccagcu

SEQ ID NO: 2471733 - RNA, 18 nt, Human
ccaccaucaccagacagg

SEQ ID NO: 2471734 - RNA, 19 nt, Human
ccaccaucaugucuggcua

SEQ ID NO: 2471735 - RNA, 18 nt, Human
ccaccaucaugucuggcu

SEQ ID NO: 2471736 - RNA, 14 nt, Human
ccaccagucacugu

SEQ ID NO: 2471737 - RNA, 13 nt, Human
cagccaggccaca

SEQ ID NO: 2471738 - RNA, 12 nt, Human
cagccaggccac

SEQ ID NO: 2471739 - RNA, 22 nt, Human
cagccaggccacaagacccuug

SEQ ID NO: 2471740 - RNA, 16 nt, Human
cagccaggagcugggc

SEQ ID NO: 2471741 - RNA, 15 nt, Human
cagccaggagcuggg

SEQ ID NO: 2471742 - RNA, 22 nt, Human
cagccaggagcugggcagaagg

SEQ ID NO: 2471743 - RNA, 11 nt, Human
cagccaggagc

SEQ ID NO: 2471744 - RNA, 14 nt, Human
cagccaggagcugg

SEQ ID NO: 2471745 - RNA, 12 nt, Human
cagccaggagcu

SEQ ID NO: 2471746 - RNA, 19 nt, Human
cagccagcagccagcucuc

SEQ ID NO: 2471747 - RNA, 21 nt, Human
cagccagcagccagcucucag

SEQ ID NO: 2471748 - RNA, 22 nt, Human
cagcauauuuguauaguugcuu

SEQ ID NO: 2471749 - RNA, 18 nt, Human
cagcauauuuauagcaau

SEQ ID NO: 2471750 - RNA, 17 nt, Human
cagccagcagccagcuc

SEQ ID NO: 2471751 - RNA, 18 nt, Human
cagccagcagccagcucu

SEQ ID NO: 2471752 - RNA, 20 nt, Human
cagcaguugaaaagacucca

SEQ ID NO: 2471753 - RNA, 21 nt, Human
cagcaguugaaaagacuccaa

SEQ ID NO: 2471754 - RNA, 17 nt, Human
cagcaguugaaaagacu

SEQ ID NO: 2471755 - RNA, 23 nt, Human
cagcagugaaaacaagugcuggc

SEQ ID NO: 2471756 - RNA, 17 nt, Human
cagcagugaaaacaagu

SEQ ID NO: 2471757 - RNA, 15 nt, Human
cagcagugaaaacaa

SEQ ID NO: 2471758 - RNA, 14 nt, Human
cagcagugaaaaca

SEQ ID NO: 2471759 - RNA, 22 nt, Human
cagcauauucaggaagcucagg

SEQ ID NO: 2471760 - RNA, 19 nt, Human
cagcauauucaggaagcuc

SEQ ID NO: 2471761 - RNA, 23 nt, Human
cagcauauucaggaagcucaggg

SEQ ID NO: 2471762 - RNA, 22 nt, Human
cagcaguugaaaagacuccaaa

SEQ ID NO: 2471763 - RNA, 22 nt, Human
cagcagugaaaacaagugcugg

SEQ ID NO: 2471764 - RNA, 12 nt, Human
cagcauauuuau

SEQ ID NO: 2471765 - RNA, 14 nt, Human
cagcauauuuauag

SEQ ID NO: 2471766 - RNA, 22 nt, Human
cagcacagccucuuagaugcag

SEQ ID NO: 2471767 - RNA, 16 nt, Human
cagcacagagaccccc

SEQ ID NO: 2471768 - RNA, 20 nt, Human
cagcacagagagggggccac

SEQ ID NO: 2471769 - RNA, 17 nt, Human
cagcacagagagggggc

SEQ ID NO: 2471770 - RNA, 13 nt, Human
cagcacagagagg

SEQ ID NO: 2471771 - RNA, 18 nt, Human
cagcacacagggcaguga

SEQ ID NO: 2471772 - RNA, 19 nt, Human
cagcacacagggcagugag

SEQ ID NO: 2471773 - RNA, 14 nt, Human
cagcacagagaaga

SEQ ID NO: 2471774 - RNA, 17 nt, Human
cagcacagagaagacaa

SEQ ID NO: 2471775 - RNA, 16 nt, Human
cagcacagagaagaca

SEQ ID NO: 2471776 - RNA, 12 nt, Human
cagcacagagag

SEQ ID NO: 2471777 - RNA, 23 nt, Human
cagcaccccuuccauguggagaa

SEQ ID NO: 2471778 - RNA, 22 nt, Human
cagcaccccuuccauguggaga

SEQ ID NO: 2471779 - RNA, 19 nt, Human
cagcaccccuuccaugugg

SEQ ID NO: 2471780 - RNA, 21 nt, Human
cagcacagcaaggaggcuggc

SEQ ID NO: 2471781 - RNA, 19 nt, Human
cagcacagcaaggaggcug

SEQ ID NO: 2471782 - RNA, 13 nt, Human
cagcacagcaagg

SEQ ID NO: 2471783 - RNA, 13 nt, Human
cagcacagccaac

SEQ ID NO: 2471784 - RNA, 16 nt, Human
cagcacccgggcucag

SEQ ID NO: 2471785 - RNA, 12 nt, Human
cagcacccugca

SEQ ID NO: 2471786 - RNA, 16 nt, Human
cagcaccguucugugc

SEQ ID NO: 2471787 - RNA, 17 nt, Human
cagcaccguucugugca

SEQ ID NO: 2471788 - RNA, 18 nt, Human
cagcaccguucugugcac

SEQ ID NO: 2471789 - RNA, 15 nt, Human
cagcaccuacagugu

SEQ ID NO: 2471790 - RNA, 17 nt, Human
cagcaggugcugcuacc

SEQ ID NO: 2471791 - RNA, 15 nt, Human
cagcaggugcugcua

SEQ ID NO: 2471792 - RNA, 14 nt, Human
cagcaggugcugcu

SEQ ID NO: 2471793 - RNA, 11 nt, Human
cagcaggugcu

SEQ ID NO: 2471794 - RNA, 19 nt, Human
cagcaguaccuauaaagua

SEQ ID NO: 2471795 - RNA, 23 nt, Human
cagcaggugcugcuacccucccu

SEQ ID NO: 2471796 - RNA, 19 nt, Human
cagcaggugcugcuacccu

SEQ ID NO: 2471797 - RNA, 21 nt, Human
cagcagggucuuuucaucugg

SEQ ID NO: 2471798 - RNA, 20 nt, Human
cagcagggucuuuucaucug

SEQ ID NO: 2471799 - RNA, 22 nt, Human
cagcagggucuuuucaucuggg

SEQ ID NO: 2471800 - RNA, 21 nt, Human
cagcagguccccagcuuuggc

SEQ ID NO: 2471801 - RNA, 20 nt, Human
cagcaccuacaguguacagu

SEQ ID NO: 2471802 - RNA, 16 nt, Human
cagcaccccuuccaug

SEQ ID NO: 2471803 - RNA, 18 nt, Human
cagcagggucuuuucauc

SEQ ID NO: 2471804 - RNA, 20 nt, Human
cagaggggguggccucccaa

SEQ ID NO: 2471805 - RNA, 19 nt, Human
cagaggggguggccuccca

SEQ ID NO: 2471806 - RNA, 17 nt, Human
cagaggggguggccucc

SEQ ID NO: 2471807 - RNA, 18 nt, Human
cagaggggguggccuccc

SEQ ID NO: 2471808 - RNA, 14 nt, Human
cagaguauggagcu

SEQ ID NO: 2471809 - RNA, 21 nt, Human
cagaguaugaacaccugggcu

SEQ ID NO: 2471810 - RNA, 13 nt, Human
cagaguaugaaca

SEQ ID NO: 2471811 - RNA, 22 nt, Human
cagaggggcaggcccugcacug

SEQ ID NO: 2471812 - RNA, 20 nt, Human
cagagucagaaguuucugcc

SEQ ID NO: 2471813 - RNA, 20 nt, Human
cagaguauggagcucagaga

SEQ ID NO: 2471814 - RNA, 20 nt, Human
cagaguauuugaaaaaugua

SEQ ID NO: 2471815 - RNA, 21 nt, Human
cagagucacacgggggcagcu

SEQ ID NO: 2471816 - RNA, 13 nt, Human
cagagucagcaga

SEQ ID NO: 2471817 - RNA, 15 nt, Human
cagauauuuuuucag

SEQ ID NO: 2471818 - RNA, 14 nt, Human
cagagucagcagaa

SEQ ID NO: 2471819 - RNA, 11 nt, Human
cagauauuuau

SEQ ID NO: 2471820 - RNA, 12 nt, Human
cagauauuuaua

SEQ ID NO: 2471821 - RNA, 14 nt, Human
cagauauuuauauu

SEQ ID NO: 2471822 - RNA, 16 nt, Human
cagauauuuauauuuu

SEQ ID NO: 2471823 - RNA, 20 nt, Human
cagauauuuauauuuuuauu

SEQ ID NO: 2471824 - RNA, 21 nt, Human
cagauauuuauauuuuuauuu

SEQ ID NO: 2471825 - RNA, 22 nt, Human
cagauauuuauauuuuuauuuu

SEQ ID NO: 2471826 - RNA, 19 nt, Human
cagaaguuucugccgcagc

SEQ ID NO: 2471827 - RNA, 23 nt, Human
cagaaguuucugccgcagcccug

SEQ ID NO: 2471828 - RNA, 20 nt, Human
cagaaguuugagaucagccu

SEQ ID NO: 2471829 - RNA, 22 nt, Human
cagaaguuugagaucagccugg

SEQ ID NO: 2471830 - RNA, 23 nt, Human
cagaaguuugagaucagccuggg

SEQ ID NO: 2471831 - RNA, 18 nt, Human
cagagcugccaccugccu

SEQ ID NO: 2471832 - RNA, 16 nt, Human
cagagcugccaccugc

SEQ ID NO: 2471833 - RNA, 20 nt, Human
cagagcugggauguuucugu

SEQ ID NO: 2471834 - RNA, 22 nt, Human
cagagcuguggacuuuguucac

SEQ ID NO: 2471835 - RNA, 19 nt, Human
cagagcuguuuauggccuc

SEQ ID NO: 2471836 - RNA, 20 nt, Human
cagagcuguuuauggccuca

SEQ ID NO: 2471837 - RNA, 21 nt, Human
cagagcuguuuauggccucag

SEQ ID NO: 2471838 - RNA, 14 nt, Human
cagagcuucccuga

SEQ ID NO: 2471839 - RNA, 18 nt, Human
cagagcuucccugacuca

SEQ ID NO: 2471840 - RNA, 13 nt, Human
cagagcuucccug

SEQ ID NO: 2471841 - RNA, 22 nt, Human
cagagcuguuuauggccucagc

SEQ ID NO: 2471842 - RNA, 13 nt, Human
cagagcuggggcu

SEQ ID NO: 2471843 - RNA, 14 nt, Human
cagagcugggaggg

SEQ ID NO: 2471844 - RNA, 20 nt, Human
cagagcuggggcugagggau

SEQ ID NO: 2471845 - RNA, 22 nt, Human
cagagggccugcaagggaguga

SEQ ID NO: 2471846 - RNA, 23 nt, Human
cagaggggaaaccaguguagccu

SEQ ID NO: 2471847 - RNA, 20 nt, Human
cagaggggcaggcccugcac

SEQ ID NO: 2471848 - RNA, 19 nt, Human
cagaggggcaggcccugca

SEQ ID NO: 2471849 - RNA, 18 nt, Human
cagaggggcaggcccugc

SEQ ID NO: 2471850 - RNA, 16 nt, Human
cagaggggcaggcccu

SEQ ID NO: 2471851 - RNA, 20 nt, Human
cagcuccagcucaccagccc

SEQ ID NO: 2471852 - RNA, 18 nt, Human
cagcuccagcucaccagc

SEQ ID NO: 2471853 - RNA, 17 nt, Human
cagcuccagcucaccag

SEQ ID NO: 2471854 - RNA, 16 nt, Human
cagcuccagcucacca

SEQ ID NO: 2471855 - RNA, 21 nt, Human
cagcucccaaggcucugagca

SEQ ID NO: 2471856 - RNA, 21 nt, Human
cagcuccagguggcucugagg

SEQ ID NO: 2471857 - RNA, 17 nt, Human
cagcuccagguggcucu

SEQ ID NO: 2471858 - RNA, 19 nt, Human
cagcuccacucugacuggc

SEQ ID NO: 2471859 - RNA, 22 nt, Human
cagcuccagcucaccagcccca

SEQ ID NO: 2471860 - RNA, 13 nt, Human
cagcuccacccug

SEQ ID NO: 2471861 - RNA, 15 nt, Human
cagcuccacccuggc

SEQ ID NO: 2471862 - RNA, 14 nt, Human
cagcuccagcugcu

SEQ ID NO: 2471863 - RNA, 23 nt, Human
cagcuccacucugacuggcacag

SEQ ID NO: 2471864 - RNA, 14 nt, Human
cagcuccaaccugc

SEQ ID NO: 2471865 - RNA, 17 nt, Human
cagcuccaaccugcaaa

SEQ ID NO: 2471866 - RNA, 20 nt, Human
cagcuccaaccugcaaagau

SEQ ID NO: 2471867 - RNA, 15 nt, Human
cagcuccagcucacc

SEQ ID NO: 2471868 - RNA, 14 nt, Human
cagcuccagcucac

SEQ ID NO: 2471869 - RNA, 20 nt, Human
cagcuccaagaccuguuggu

SEQ ID NO: 2471870 - RNA, 18 nt, Human
cagcuccaagaccuguug

SEQ ID NO: 2471871 - RNA, 23 nt, Human
cagcuccaaccugcaaagaucug

SEQ ID NO: 2471872 - RNA, 13 nt, Human
cagcuccagcuca

SEQ ID NO: 2471873 - RNA, 23 nt, Human
caggaaaucaaauaugcaaagca

SEQ ID NO: 2471874 - RNA, 19 nt, Human
caggaaaggaaucauuucu

SEQ ID NO: 2471875 - RNA, 13 nt, Human
caggaaaugaaaa

SEQ ID NO: 2471876 - RNA, 20 nt, Human
caggaaaugaaaaugucuug

SEQ ID NO: 2471877 - RNA, 21 nt, Human
caggaaaugaaaaugucuugu

SEQ ID NO: 2471878 - RNA, 21 nt, Human
caggaacaaucgauggccuug

SEQ ID NO: 2471879 - RNA, 22 nt, Human
caggaacacccgacuccucaaa

SEQ ID NO: 2471880 - RNA, 12 nt, Human
caggaacagaag

SEQ ID NO: 2471881 - RNA, 15 nt, Human
caggaaaggcuccag

SEQ ID NO: 2471882 - RNA, 14 nt, Human
caggaaaggcucca

SEQ ID NO: 2471883 - RNA, 15 nt, Human
caggaaaggaaucau

SEQ ID NO: 2471884 - RNA, 18 nt, Human
caggaaaggcccagccac

SEQ ID NO: 2471885 - RNA, 19 nt, Human
caggaaagcucagcuacug

SEQ ID NO: 2471886 - RNA, 12 nt, Human
cagcuucaguug

SEQ ID NO: 2471887 - RNA, 18 nt, Human
cagcuucauuuccugugu

SEQ ID NO: 2471888 - RNA, 14 nt, Human
cagcuucagguuau

SEQ ID NO: 2471889 - RNA, 17 nt, Human
cagcuucagccaggagc

SEQ ID NO: 2471890 - RNA, 15 nt, Human
cagcuucagccagga

SEQ ID NO: 2471891 - RNA, 15 nt, Human
cagcuucauuuccug

SEQ ID NO: 2471892 - RNA, 18 nt, Human
cagcugugcucuggacag

SEQ ID NO: 2471893 - RNA, 17 nt, Human
cagcugugagccuuggc

SEQ ID NO: 2471894 - RNA, 16 nt, Human
cagcugugagccuugg

SEQ ID NO: 2471895 - RNA, 15 nt, Human
cagcugugagccuug

SEQ ID NO: 2471896 - RNA, 13 nt, Human
cagcugugagccu

SEQ ID NO: 2471897 - RNA, 20 nt, Human
cagcugugaacauggacucu

SEQ ID NO: 2471898 - RNA, 18 nt, Human
cagcugugaacauggacu

SEQ ID NO: 2471899 - RNA, 22 nt, Human
cagcugucccugucaccaagcu

SEQ ID NO: 2471900 - RNA, 16 nt, Human
cagcuguccucuucug

SEQ ID NO: 2471901 - RNA, 18 nt, Human
cagcugauuuuaacaaua

SEQ ID NO: 2471902 - RNA, 16 nt, Human
cagcugcaccugccag

SEQ ID NO: 2471903 - RNA, 21 nt, Human
cagcugauuuuaacaauaacu

SEQ ID NO: 2471904 - RNA, 17 nt, Human
cagcugcaccugccagc

SEQ ID NO: 2471905 - RNA, 18 nt, Human
cagcugcaccugccagcc

SEQ ID NO: 2471906 - RNA, 20 nt, Human
cagcugcaccugccagccug

SEQ ID NO: 2471907 - RNA, 21 nt, Human
cagcugcaccugccagccugg

SEQ ID NO: 2471908 - RNA, 20 nt, Human
cagcuccccucggagaagag

SEQ ID NO: 2471909 - RNA, 22 nt, Human
cagcucccccuguccccucagc

SEQ ID NO: 2471910 - RNA, 20 nt, Human
cagcugauuuuaacaauaac

SEQ ID NO: 2471911 - RNA, 17 nt, Human
cagcuccccucggagaa

SEQ ID NO: 2471912 - RNA, 18 nt, Human
cagcuccccucggagaag

SEQ ID NO: 2471913 - RNA, 16 nt, Human
cagcuccccucggaga

SEQ ID NO: 2471914 - RNA, 12 nt, Human
cagcucccaccc

SEQ ID NO: 2471915 - RNA, 14 nt, Human
cagcucccacccca

SEQ ID NO: 2471916 - RNA, 15 nt, Human
cagcucccaccccac

SEQ ID NO: 2471917 - RNA, 19 nt, Human
cagcucccaccccaccccc

SEQ ID NO: 2471918 - RNA, 21 nt, Human
cagcucccccuguccccucag

SEQ ID NO: 2471919 - RNA, 19 nt, Human
cagcucccccuguccccuc

SEQ ID NO: 2471920 - RNA, 12 nt, Human
cagcugccucuu

SEQ ID NO: 2471921 - RNA, 13 nt, Human
cagcugccucuuc

SEQ ID NO: 2471922 - RNA, 18 nt, Human
cagcugccgaccagagcc

SEQ ID NO: 2471923 - RNA, 17 nt, Human
cagcugccgaccagagc

SEQ ID NO: 2471924 - RNA, 13 nt, Human
cagcugccccggg

SEQ ID NO: 2471925 - RNA, 12 nt, Human
cagcugccccgg

SEQ ID NO: 2471926 - RNA, 15 nt, Human
cagcugccccagcca

SEQ ID NO: 2471927 - RNA, 16 nt, Human
cagcugccagagaagc

SEQ ID NO: 2471928 - RNA, 14 nt, Human
cagcugccagagaa

SEQ ID NO: 2471929 - RNA, 15 nt, Human
cagcugccagagaag

SEQ ID NO: 2471930 - RNA, 12 nt, Human
cagcugcacuga

SEQ ID NO: 2471931 - RNA, 22 nt, Human
cagcugcaccugccagccuggc

SEQ ID NO: 2471932 - RNA, 18 nt, Human
cagcugcacugaugcugc

SEQ ID NO: 2471933 - RNA, 15 nt, Human
cagcugcagagacag

SEQ ID NO: 2471934 - RNA, 13 nt, Human
cagcugccagaga

SEQ ID NO: 2471935 - RNA, 16 nt, Human
cagcugcagagacaga

SEQ ID NO: 2471936 - RNA, 16 nt, Human
cagccucuuucugucc

SEQ ID NO: 2471937 - RNA, 18 nt, Human
cagccucuuggccccaga

SEQ ID NO: 2471938 - RNA, 15 nt, Human
cagccucuuaaagcu

SEQ ID NO: 2471939 - RNA, 19 nt, Human
cagccucuuaaagcugccu

SEQ ID NO: 2471940 - RNA, 20 nt, Human
cagccucuuaaagcugccug

SEQ ID NO: 2471941 - RNA, 21 nt, Human
cagccucuuaaagcugccugu

SEQ ID NO: 2471942 - RNA, 13 nt, Human
cagccgggcccug

SEQ ID NO: 2471943 - RNA, 12 nt, Human
cagccgggcccu

SEQ ID NO: 2471944 - RNA, 24 nt, Human
cagccggccucucuggccucccac

SEQ ID NO: 2471945 - RNA, 23 nt, Human
cagccggccucucuggccuccca

SEQ ID NO: 2471946 - RNA, 22 nt, Human
cagccggccucucuggccuccc

SEQ ID NO: 2471947 - RNA, 20 nt, Human
cagccggccucucuggccuc

SEQ ID NO: 2471948 - RNA, 19 nt, Human
cagccggccucucuggccu

SEQ ID NO: 2471949 - RNA, 15 nt, Human
cagccgggcccugag

SEQ ID NO: 2471950 - RNA, 14 nt, Human
cagccucuguuccc

SEQ ID NO: 2471951 - RNA, 11 nt, Human
cagccucuuaa

SEQ ID NO: 2471952 - RNA, 19 nt, Human
cagccgauucaccugagca

SEQ ID NO: 2471953 - RNA, 16 nt, Human
cagccgcagccucccu

SEQ ID NO: 2471954 - RNA, 19 nt, Human
cagccgcagccucccucug

SEQ ID NO: 2471955 - RNA, 16 nt, Human
cagccgcugcccggcg

SEQ ID NO: 2471956 - RNA, 14 nt, Human
cagccgcuucugac

SEQ ID NO: 2471957 - RNA, 13 nt, Human
cagccggcacagg

SEQ ID NO: 2471958 - RNA, 22 nt, Human
cagccgcugcccggcgcccucu

SEQ ID NO: 2471959 - RNA, 18 nt, Human
cagccgcuucugacugcu

SEQ ID NO: 2471960 - RNA, 23 nt, Human
cagccggcacagggucugcucuu

SEQ ID NO: 2471961 - RNA, 18 nt, Human
cagccggcacagggucug

SEQ ID NO: 2471962 - RNA, 17 nt, Human
cagccggcacagggucu

SEQ ID NO: 2471963 - RNA, 15 nt, Human
cagccggcacagggu

SEQ ID NO: 2471964 - RNA, 18 nt, Human
cagccggccucucuggcc

SEQ ID NO: 2471965 - RNA, 17 nt, Human
cagccggccucucuggc

SEQ ID NO: 2471966 - RNA, 16 nt, Human
cagccggccucucugg

SEQ ID NO: 2471967 - RNA, 15 nt, Human
cagccggccucucug

SEQ ID NO: 2471968 - RNA, 14 nt, Human
cagccggccucucu

SEQ ID NO: 2471969 - RNA, 14 nt, Human
cagccggcacccac

SEQ ID NO: 2471970 - RNA, 20 nt, Human
cagcccuucuuuccacagaa

SEQ ID NO: 2471971 - RNA, 19 nt, Human
cagcccuucuuuccacaga

SEQ ID NO: 2471972 - RNA, 15 nt, Human
cagcccuucuuucca

SEQ ID NO: 2471973 - RNA, 23 nt, Human
cagccccugccccagcccaaguc

SEQ ID NO: 2471974 - RNA, 21 nt, Human
cagccgagauagccaaggcca

SEQ ID NO: 2471975 - RNA, 20 nt, Human
cagccgagauagccaaggcc

SEQ ID NO: 2471976 - RNA, 18 nt, Human
cagccgagccgggccugg

SEQ ID NO: 2471977 - RNA, 17 nt, Human
cagccgagccgggccug

SEQ ID NO: 2471978 - RNA, 14 nt, Human
cagccgagccgggc

SEQ ID NO: 2471979 - RNA, 12 nt, Human
cagccgagccgg

SEQ ID NO: 2471980 - RNA, 23 nt, Human
cagccgagcucguguauccuggg

SEQ ID NO: 2471981 - RNA, 22 nt, Human
cagccgagcucguguauccugg

SEQ ID NO: 2471982 - RNA, 14 nt, Human
cagccgagcucgug

SEQ ID NO: 2471983 - RNA, 19 nt, Human
cagccgagccgggccuggg

SEQ ID NO: 2471984 - RNA, 18 nt, Human
cagccgauucaccugagc

SEQ ID NO: 2471985 - RNA, 14 nt, Human
cagccccuggaugc

SEQ ID NO: 2471986 - RNA, 13 nt, Human
cagccccuggaug

SEQ ID NO: 2471987 - RNA, 12 nt, Human
cagccccuggau

SEQ ID NO: 2471988 - RNA, 21 nt, Human
cagccccuggaugcagccuca

SEQ ID NO: 2471989 - RNA, 19 nt, Human
cagccccuggaugcagccu

SEQ ID NO: 2471990 - RNA, 18 nt, Human
cagccccuggaugcagcc

SEQ ID NO: 2471991 - RNA, 17 nt, Human
cagccccuggaugcagc

SEQ ID NO: 2471992 - RNA, 21 nt, Human
cagcccuuagcagggaaacag

SEQ ID NO: 2471993 - RNA, 16 nt, Human
cagcccuuagcaggga

SEQ ID NO: 2471994 - RNA, 15 nt, Human
cagcccuuagcaggg

SEQ ID NO: 2471995 - RNA, 19 nt, Human
cagccugagcgacagugag

SEQ ID NO: 2471996 - RNA, 22 nt, Human
cagccugagcgacagugagacu

SEQ ID NO: 2471997 - RNA, 18 nt, Human
cagccugagcgacaguga

SEQ ID NO: 2471998 - RNA, 17 nt, Human
cagccucuuucuguccc

SEQ ID NO: 2471999 - RNA, 17 nt, Human
cagcggggacagcuccu

SEQ ID NO: 2472000 - RNA, 16 nt, Human
cagcggggacagcucc

SEQ ID NO: 2472001 - RNA, 16 nt, Human
cagccugagcaacucu

SEQ ID NO: 2472002 - RNA, 20 nt, Human
cagccugagcaacucuugau

SEQ ID NO: 2472003 - RNA, 14 nt, Human
cagcggggacagcu

SEQ ID NO: 2472004 - RNA, 15 nt, Human
cagcggggacagcuc

SEQ ID NO: 2472005 - RNA, 15 nt, Human
cagcgugcuuuaaaa

SEQ ID NO: 2472006 - RNA, 14 nt, Human
cagcguccugucca

SEQ ID NO: 2472007 - RNA, 15 nt, Human
cagcguccuguccac

SEQ ID NO: 2472008 - RNA, 16 nt, Human
cagcguccuccucugu

SEQ ID NO: 2472009 - RNA, 18 nt, Human
cagcguccuccucuguga

SEQ ID NO: 2472010 - RNA, 21 nt, Human
cagcgucccagucucuggcag

SEQ ID NO: 2472011 - RNA, 15 nt, Human
cagcguccuccucug

SEQ ID NO: 2472012 - RNA, 14 nt, Human
cagcgucccagucu

SEQ ID NO: 2472013 - RNA, 20 nt, Human
cagcggggccuggcgggaug

SEQ ID NO: 2472014 - RNA, 17 nt, Human
cagcguagccucuccgg

SEQ ID NO: 2472015 - RNA, 14 nt, Human
cagcgguggccucu

SEQ ID NO: 2472016 - RNA, 18 nt, Human
cagcgggggccagggaag

SEQ ID NO: 2472017 - RNA, 19 nt, Human
cagcggggcgaagcccagg

SEQ ID NO: 2472018 - RNA, 14 nt, Human
cagcggggcgaagc

SEQ ID NO: 2472019 - RNA, 23 nt, Human
cagcggggccuggcgggaugggc

SEQ ID NO: 2472020 - RNA, 21 nt, Human
cagccugagcaacucuugauu

SEQ ID NO: 2472021 - RNA, 15 nt, Human
cagcgguuuggggag

SEQ ID NO: 2472022 - RNA, 15 nt, Human
cagcgguggccucuu

SEQ ID NO: 2472023 - RNA, 15 nt, Human
cagcguacucaucau

SEQ ID NO: 2472024 - RNA, 15 nt, Human
cagucaccucaugga

SEQ ID NO: 2472025 - RNA, 22 nt, Human
cagucaccccggccaccugcgg

SEQ ID NO: 2472026 - RNA, 19 nt, Human
cagucaccccggccaccug

SEQ ID NO: 2472027 - RNA, 20 nt, Human
cagucaccccggccaccugc

SEQ ID NO: 2472028 - RNA, 15 nt, Human
cagucaaccugggca

SEQ ID NO: 2472029 - RNA, 16 nt, Human
cagucaaccugggcaa

SEQ ID NO: 2472030 - RNA, 22 nt, Human
cagucaaccugggcaaagccua

SEQ ID NO: 2472031 - RNA, 16 nt, Human
cagucaacaaacuauu

SEQ ID NO: 2472032 - RNA, 14 nt, Human
cagucaaccugggc

SEQ ID NO: 2472033 - RNA, 15 nt, Human
cagucaaaacagaga

SEQ ID NO: 2472034 - RNA, 19 nt, Human
caguauuuugguucuuagu

SEQ ID NO: 2472035 - RNA, 19 nt, Human
cagucaaaacagagaugug

SEQ ID NO: 2472036 - RNA, 19 nt, Human
caguauuuuggagaaauua

SEQ ID NO: 2472037 - RNA, 20 nt, Human
caguauuuuggagaaauuau

SEQ ID NO: 2472038 - RNA, 23 nt, Human
caguauuuuggagaaauuauuua

SEQ ID NO: 2472039 - RNA, 21 nt, Human
caguauuuuggagaaauuauu

SEQ ID NO: 2472040 - RNA, 18 nt, Human
cagguuugggaccccugg

SEQ ID NO: 2472041 - RNA, 21 nt, Human
caguauugaagcauuuuauaa

SEQ ID NO: 2472042 - RNA, 23 nt, Human
cagguuugggaccccuggugguu

SEQ ID NO: 2472043 - RNA, 22 nt, Human
cagguugggccauacuggccuc

SEQ ID NO: 2472044 - RNA, 21 nt, Human
cagguugggccauacuggccu

SEQ ID NO: 2472045 - RNA, 17 nt, Human
cagguugggccauacug

SEQ ID NO: 2472046 - RNA, 13 nt, Human
cagguugggccau

SEQ ID NO: 2472047 - RNA, 16 nt, Human
cagguuuaagcuguua

SEQ ID NO: 2472048 - RNA, 18 nt, Human
cagguuuaagcuguuacu

SEQ ID NO: 2472049 - RNA, 15 nt, Human
cagguuugggacccc

SEQ ID NO: 2472050 - RNA, 17 nt, Human
cagguuucuggucucua

SEQ ID NO: 2472051 - RNA, 20 nt, Human
cagguuucuggucucuaggc

SEQ ID NO: 2472052 - RNA, 21 nt, Human
cagucaaccugggcaaagccu

SEQ ID NO: 2472053 - RNA, 15 nt, Human
cagucaaggaguggc

SEQ ID NO: 2472054 - RNA, 18 nt, Human
caggguguggcccugcca

SEQ ID NO: 2472055 - RNA, 18 nt, Human
caggguggugcugggacu

SEQ ID NO: 2472056 - RNA, 17 nt, Human
caggguggugcugggac

SEQ ID NO: 2472057 - RNA, 19 nt, Human
caggguggugcugggacug

SEQ ID NO: 2472058 - RNA, 16 nt, Human
caggguggugcuggga

SEQ ID NO: 2472059 - RNA, 20 nt, Human
cagggugggauggaggagaa

SEQ ID NO: 2472060 - RNA, 14 nt, Human
cagggucugggcag

SEQ ID NO: 2472061 - RNA, 19 nt, Human
cagggucucugcugccgcc

SEQ ID NO: 2472062 - RNA, 23 nt, Human
cagggucugcucuuucucugcca

SEQ ID NO: 2472063 - RNA, 22 nt, Human
cagggucugcucuuucucugcc

SEQ ID NO: 2472064 - RNA, 21 nt, Human
cagggucugcucuuucucugc

SEQ ID NO: 2472065 - RNA, 16 nt, Human
cagggucugggcagga

SEQ ID NO: 2472066 - RNA, 13 nt, Human
cagggucuucccu

SEQ ID NO: 2472067 - RNA, 17 nt, Human
cagggucuucccuaccu

SEQ ID NO: 2472068 - RNA, 15 nt, Human
cagggucugggcagg

SEQ ID NO: 2472069 - RNA, 18 nt, Human
cagggugggauggaggag

SEQ ID NO: 2472070 - RNA, 19 nt, Human
caggguugaccccagagga

SEQ ID NO: 2472071 - RNA, 20 nt, Human
caggguugaccccagaggau

SEQ ID NO: 2472072 - RNA, 21 nt, Human
caggguugaucacacucuggg

SEQ ID NO: 2472073 - RNA, 18 nt, Human
caggguugaucacacucu

SEQ ID NO: 2472074 - RNA, 15 nt, Human
caggguucuccucuc

SEQ ID NO: 2472075 - RNA, 22 nt, Human
caggguucccccagcccugugg

SEQ ID NO: 2472076 - RNA, 17 nt, Human
caggguucuccucuccc

SEQ ID NO: 2472077 - RNA, 20 nt, Human
caggguucuccucuccccuc

SEQ ID NO: 2472078 - RNA, 21 nt, Human
caggguucuccucuccccucu

SEQ ID NO: 2472079 - RNA, 23 nt, Human
caggguguugggauacugcaggg

SEQ ID NO: 2472080 - RNA, 19 nt, Human
caggguguggcccugccau

SEQ ID NO: 2472081 - RNA, 13 nt, Human
cagggugugugcu

SEQ ID NO: 2472082 - RNA, 15 nt, Human
caggguuaagaagac

SEQ ID NO: 2472083 - RNA, 18 nt, Human
caggguucaaaaugucug

SEQ ID NO: 2472084 - RNA, 15 nt, Human
caggguucccccagc

SEQ ID NO: 2472085 - RNA, 17 nt, Human
caggguucccccagccc

SEQ ID NO: 2472086 - RNA, 18 nt, Human
caggguucccccagcccu

SEQ ID NO: 2472087 - RNA, 20 nt, Human
caggguucccccagcccugu

SEQ ID NO: 2472088 - RNA, 21 nt, Human
caggguucccccagcccugug

SEQ ID NO: 2472089 - RNA, 18 nt, Human
cagggucucacucugucg

SEQ ID NO: 2472090 - RNA, 17 nt, Human
cagggucucacucuguc

SEQ ID NO: 2472091 - RNA, 18 nt, Human
cagggucucugcugccgc

SEQ ID NO: 2472092 - RNA, 17 nt, Human
cagggucucugcugccg

SEQ ID NO: 2472093 - RNA, 16 nt, Human
cagggucucugcugcc

SEQ ID NO: 2472094 - RNA, 15 nt, Human
cagggucucugcugc

SEQ ID NO: 2472095 - RNA, 13 nt, Human
cagggucucugcu

SEQ ID NO: 2472096 - RNA, 23 nt, Human
cagggucucuagugcugugaaaa

SEQ ID NO: 2472097 - RNA, 20 nt, Human
cagggucugcucuuucucug

SEQ ID NO: 2472098 - RNA, 17 nt, Human
cagggucugcucuuucu

SEQ ID NO: 2472099 - RNA, 14 nt, Human
cagggucugcucuu

SEQ ID NO: 2472100 - RNA, 13 nt, Human
cagggucugcucu

SEQ ID NO: 2472101 - RNA, 21 nt, Human
cagggucucacucugucgccc

SEQ ID NO: 2472102 - RNA, 22 nt, Human
cagggucucacucugucgccca

SEQ ID NO: 2472103 - RNA, 19 nt, Human
cagguugcuuugcccuggu

SEQ ID NO: 2472104 - RNA, 18 nt, Human
cagguugcuuugcccugg

SEQ ID NO: 2472105 - RNA, 17 nt, Human
cagguugcuuugcccug

SEQ ID NO: 2472106 - RNA, 15 nt, Human
cagguugcuuugccc

SEQ ID NO: 2472107 - RNA, 22 nt, Human
cagguugcugguugcugugugg

SEQ ID NO: 2472108 - RNA, 21 nt, Human
cagguugcugguugcugugug

SEQ ID NO: 2472109 - RNA, 20 nt, Human
cagguugcugguugcugugu

SEQ ID NO: 2472110 - RNA, 19 nt, Human
cagguugcugguugcugug

SEQ ID NO: 2472111 - RNA, 21 nt, Human
caggugcuacacccuuuucca

SEQ ID NO: 2472112 - RNA, 22 nt, Human
cagguugggaaugaggcuugcu

SEQ ID NO: 2472113 - RNA, 20 nt, Human
cagguugggaaugaggcuug

SEQ ID NO: 2472114 - RNA, 14 nt, Human
cagguugguggggg

SEQ ID NO: 2472115 - RNA, 20 nt, Human
caggugcuaggaacacuccu

SEQ ID NO: 2472116 - RNA, 18 nt, Human
caggugcuaggaacacuc

SEQ ID NO: 2472117 - RNA, 14 nt, Human
caggugcgaaagga

SEQ ID NO: 2472118 - RNA, 23 nt, Human
caggugcagcccccacugccuuu

SEQ ID NO: 2472119 - RNA, 12 nt, Human
caggugcagugg

SEQ ID NO: 2472120 - RNA, 13 nt, Human
caggugcaguggc

SEQ ID NO: 2472121 - RNA, 20 nt, Human
caggugauccacccaccuca

SEQ ID NO: 2472122 - RNA, 23 nt, Human
caggugcacagacgucccuccac

SEQ ID NO: 2472123 - RNA, 15 nt, Human
caggugcacagacgu

SEQ ID NO: 2472124 - RNA, 18 nt, Human
caggugcagcccccacug

SEQ ID NO: 2472125 - RNA, 20 nt, Human
caggugcagcccccacugcc

SEQ ID NO: 2472126 - RNA, 17 nt, Human
caggugauccacccacc

SEQ ID NO: 2472127 - RNA, 16 nt, Human
caggugauccacccac

SEQ ID NO: 2472128 - RNA, 12 nt, Human
caggguuggccc

SEQ ID NO: 2472129 - RNA, 15 nt, Human
cagucucaggaaauc

SEQ ID NO: 2472130 - RNA, 18 nt, Human
cagucgucgcacagucuc

SEQ ID NO: 2472131 - RNA, 17 nt, Human
cagucgucgcacagucu

SEQ ID NO: 2472132 - RNA, 13 nt, Human
cagucgugccugu

SEQ ID NO: 2472133 - RNA, 20 nt, Human
cagucgucgcacagucucuc

SEQ ID NO: 2472134 - RNA, 20 nt, Human
cagucgcgcugccugugugg

SEQ ID NO: 2472135 - RNA, 18 nt, Human
cagucgcgcugccugugu

SEQ ID NO: 2472136 - RNA, 17 nt, Human
cagucgcgcugccugug

SEQ ID NO: 2472137 - RNA, 16 nt, Human
cagucgcgcugccugu

SEQ ID NO: 2472138 - RNA, 15 nt, Human
cagucgcgcugccug

SEQ ID NO: 2472139 - RNA, 14 nt, Human
cagucgcgcugccu

SEQ ID NO: 2472140 - RNA, 13 nt, Human
cagucgucgcaca

SEQ ID NO: 2472141 - RNA, 19 nt, Human
cagucgggggcuggccuag

SEQ ID NO: 2472142 - RNA, 18 nt, Human
cagucgggggcuggccua

SEQ ID NO: 2472143 - RNA, 17 nt, Human
cagucgggggcuggccu

SEQ ID NO: 2472144 - RNA, 16 nt, Human
cagucgggggcuggcc

SEQ ID NO: 2472145 - RNA, 14 nt, Human
cagucgggggcugg

SEQ ID NO: 2472146 - RNA, 13 nt, Human
cagucgggggcug

SEQ ID NO: 2472147 - RNA, 14 nt, Human
cagucucccucccu

SEQ ID NO: 2472148 - RNA, 18 nt, Human
cagucucaggagcauggg

SEQ ID NO: 2472149 - RNA, 19 nt, Human
cagucucaggagcaugggg

SEQ ID NO: 2472150 - RNA, 23 nt, Human
cagucucacugugggaaggccag

SEQ ID NO: 2472151 - RNA, 19 nt, Human
cagucucacugugggaagg

SEQ ID NO: 2472152 - RNA, 17 nt, Human
cagucucacccagacuc

SEQ ID NO: 2472153 - RNA, 13 nt, Human
cagucucaggagc

SEQ ID NO: 2472154 - RNA, 14 nt, Human
cagucucaggagca

SEQ ID NO: 2472155 - RNA, 16 nt, Human
cagucuccaccaggaa

SEQ ID NO: 2472156 - RNA, 17 nt, Human
cagucuccaccaggaac

SEQ ID NO: 2472157 - RNA, 11 nt, Human
cagucucccuu

SEQ ID NO: 2472158 - RNA, 22 nt, Human
cagucugaucgugacgcugaau

SEQ ID NO: 2472159 - RNA, 17 nt, Human
cagucucccuucuccca

SEQ ID NO: 2472160 - RNA, 22 nt, Human
cagucugaugagaacucugagc

SEQ ID NO: 2472161 - RNA, 15 nt, Human
cagucgauagagcug

SEQ ID NO: 2472162 - RNA, 16 nt, Human
cagucgauagagcugu

SEQ ID NO: 2472163 - RNA, 15 nt, Human
caguccuuccaccuc

SEQ ID NO: 2472164 - RNA, 14 nt, Human
cagugcaggcacag

SEQ ID NO: 2472165 - RNA, 15 nt, Human
cagugccaaaaacaa

SEQ ID NO: 2472166 - RNA, 21 nt, Human
cagugccagcaaugacaucuc

SEQ ID NO: 2472167 - RNA, 17 nt, Human
cagugccagcaaugaca

SEQ ID NO: 2472168 - RNA, 15 nt, Human
cagugccagcaauga

SEQ ID NO: 2472169 - RNA, 14 nt, Human
cagugccagcaaug

SEQ ID NO: 2472170 - RNA, 15 nt, Human
cagugccaagcacag

SEQ ID NO: 2472171 - RNA, 23 nt, Human
cagugccaagcacagugccugca

SEQ ID NO: 2472172 - RNA, 22 nt, Human
cagugccaauaaaauuuaggaa

SEQ ID NO: 2472173 - RNA, 19 nt, Human
cagugccaagcacagugcc

SEQ ID NO: 2472174 - RNA, 16 nt, Human
cagugggacagggcau

SEQ ID NO: 2472175 - RNA, 19 nt, Human
cagugggacagggcauggc

SEQ ID NO: 2472176 - RNA, 12 nt, Human
cagugcccacag

SEQ ID NO: 2472177 - RNA, 11 nt, Human
cagugggagcu

SEQ ID NO: 2472178 - RNA, 18 nt, Human
cagugggagccagggcug

SEQ ID NO: 2472179 - RNA, 17 nt, Human
cagugggagccagggcu

SEQ ID NO: 2472180 - RNA, 13 nt, Human
cagugggagccag

SEQ ID NO: 2472181 - RNA, 14 nt, Human
cagugggagaaaac

SEQ ID NO: 2472182 - RNA, 23 nt, Human
cagugcaugcugucccuuacgug

SEQ ID NO: 2472183 - RNA, 22 nt, Human
cagugcaugcugucccuuacgu

SEQ ID NO: 2472184 - RNA, 19 nt, Human
cagugcaugcugucccuua

SEQ ID NO: 2472185 - RNA, 16 nt, Human
cagugcagcccgugug

SEQ ID NO: 2472186 - RNA, 12 nt, Human
cagugcaggcac

SEQ ID NO: 2472187 - RNA, 22 nt, Human
cagugcagcccguguggccccu

SEQ ID NO: 2472188 - RNA, 20 nt, Human
cagucugauucccaagcucu

SEQ ID NO: 2472189 - RNA, 19 nt, Human
cagucugauucccaagcuc

SEQ ID NO: 2472190 - RNA, 22 nt, Human
cagugcaaugguauaaauuuca

SEQ ID NO: 2472191 - RNA, 24 nt, Human
cagugcaagagacucuggccucca

SEQ ID NO: 2472192 - RNA, 15 nt, Human
cagugcacccacucu

SEQ ID NO: 2472193 - RNA, 23 nt, Human
cagugcaagagacucuggccucc

SEQ ID NO: 2472194 - RNA, 22 nt, Human
cagugcaagagacucuggccuc

SEQ ID NO: 2472195 - RNA, 21 nt, Human
cagugcaagagacucuggccu

SEQ ID NO: 2472196 - RNA, 20 nt, Human
cagggaguguaguaaagccg

SEQ ID NO: 2472197 - RNA, 23 nt, Human
cagggaguccccuccccggcccu

SEQ ID NO: 2472198 - RNA, 22 nt, Human
cagggaguccccuccccggccc

SEQ ID NO: 2472199 - RNA, 13 nt, Human
cagggaguccccu

SEQ ID NO: 2472200 - RNA, 23 nt, Human
cagggagguuaagugacuugccc

SEQ ID NO: 2472201 - RNA, 14 nt, Human
cagggagggccugg

SEQ ID NO: 2472202 - RNA, 16 nt, Human
cagggagggccugggc

SEQ ID NO: 2472203 - RNA, 18 nt, Human
cagggaggugaccccagg

SEQ ID NO: 2472204 - RNA, 22 nt, Human
cagggaguccgaaagggacuug

SEQ ID NO: 2472205 - RNA, 17 nt, Human
cagggagguggcugggu

SEQ ID NO: 2472206 - RNA, 14 nt, Human
cagggagguggcug

SEQ ID NO: 2472207 - RNA, 16 nt, Human
cagggagguccgggag

SEQ ID NO: 2472208 - RNA, 12 nt, Human
caggccucccuc

SEQ ID NO: 2472209 - RNA, 20 nt, Human
caggcgauccaccugucuca

SEQ ID NO: 2472210 - RNA, 15 nt, Human
caggcgccccuuccc

SEQ ID NO: 2472211 - RNA, 20 nt, Human
caggccugccuguucccauu

SEQ ID NO: 2472212 - RNA, 18 nt, Human
caggccugccagacggca

SEQ ID NO: 2472213 - RNA, 18 nt, Human
caggccugagauuucauc

SEQ ID NO: 2472214 - RNA, 16 nt, Human
caggccugagauuuca

SEQ ID NO: 2472215 - RNA, 23 nt, Human
caggccugaaagaggcugaggcc

SEQ ID NO: 2472216 - RNA, 14 nt, Human
caggccugagauuu

SEQ ID NO: 2472217 - RNA, 21 nt, Human
caggccugagauuucaucugc

SEQ ID NO: 2472218 - RNA, 19 nt, Human
caggccugagauuucaucu

SEQ ID NO: 2472219 - RNA, 23 nt, Human
caggccugagauuucaucugcuc

SEQ ID NO: 2472220 - RNA, 12 nt, Human
caggccugccag

SEQ ID NO: 2472221 - RNA, 14 nt, Human
caggccugccagac

SEQ ID NO: 2472222 - RNA, 14 nt, Human
caggccucccuguu

SEQ ID NO: 2472223 - RNA, 13 nt, Human
caggccucccugu

SEQ ID NO: 2472224 - RNA, 22 nt, Human
caggccugaaagaggcugaggc

SEQ ID NO: 2472225 - RNA, 15 nt, Human
caggccugacucuca

SEQ ID NO: 2472226 - RNA, 22 nt, Human
caggccucccucucucuucugc

SEQ ID NO: 2472227 - RNA, 23 nt, Human
caggccucccucucucuucugcu

SEQ ID NO: 2472228 - RNA, 13 nt, Human
caggccucccucu

SEQ ID NO: 2472229 - RNA, 14 nt, Human
caggccucccucuc

SEQ ID NO: 2472230 - RNA, 15 nt, Human
caggccucccucucu

SEQ ID NO: 2472231 - RNA, 16 nt, Human
caggccucccucucuc

SEQ ID NO: 2472232 - RNA, 17 nt, Human
caggccucccucucucu

SEQ ID NO: 2472233 - RNA, 18 nt, Human
caggccucccucucucuu

SEQ ID NO: 2472234 - RNA, 19 nt, Human
caggccucccucucucuuc

SEQ ID NO: 2472235 - RNA, 17 nt, Human
cagggaggacgcucucu

SEQ ID NO: 2472236 - RNA, 18 nt, Human
cagggaggacgcucucug

SEQ ID NO: 2472237 - RNA, 19 nt, Human
caggcugggcuucaguggc

SEQ ID NO: 2472238 - RNA, 17 nt, Human
caggcugggcuucagug

SEQ ID NO: 2472239 - RNA, 12 nt, Human
cagggagggccu

SEQ ID NO: 2472240 - RNA, 13 nt, Human
cagggagggccug

SEQ ID NO: 2472241 - RNA, 21 nt, Human
caggcuggcgcagccaaggcc

SEQ ID NO: 2472242 - RNA, 22 nt, Human
cagggaggagguggcagcccug

SEQ ID NO: 2472243 - RNA, 20 nt, Human
caggcuggcgcagccaaggc

SEQ ID NO: 2472244 - RNA, 18 nt, Human
caggcuggcgcagccaag

SEQ ID NO: 2472245 - RNA, 15 nt, Human
cagggagcugggaca

SEQ ID NO: 2472246 - RNA, 17 nt, Human
cagggaggaagaagcuu

SEQ ID NO: 2472247 - RNA, 23 nt, Human
cagggaggagguggcagcccugu

SEQ ID NO: 2472248 - RNA, 15 nt, Human
caggcgggcucaagg

SEQ ID NO: 2472249 - RNA, 23 nt, Human
caggcgggagcgguggcccuguc

SEQ ID NO: 2472250 - RNA, 21 nt, Human
caggcgggagcgguggcccug

SEQ ID NO: 2472251 - RNA, 17 nt, Human
caggcgccggcgggcgg

SEQ ID NO: 2472252 - RNA, 17 nt, Human
caggcgccccuuccccc

SEQ ID NO: 2472253 - RNA, 18 nt, Human
caggcuggcccugcccug

SEQ ID NO: 2472254 - RNA, 19 nt, Human
caggcuggcccugcccugg

SEQ ID NO: 2472255 - RNA, 17 nt, Human
caggcuggcccugcccu

SEQ ID NO: 2472256 - RNA, 17 nt, Human
caggcggugggcaccca

SEQ ID NO: 2472257 - RNA, 15 nt, Human
caggcggugggcacc

SEQ ID NO: 2472258 - RNA, 15 nt, Human
caggcugggcuucag

SEQ ID NO: 2472259 - RNA, 17 nt, Human
caggcuggcgcagccaa

SEQ ID NO: 2472260 - RNA, 16 nt, Human
caggcuggcgcagcca

SEQ ID NO: 2472261 - RNA, 15 nt, Human
caggcuggcgcagcc

SEQ ID NO: 2472262 - RNA, 13 nt, Human
caggcuggcgcag

SEQ ID NO: 2472263 - RNA, 16 nt, Human
caggcugggcuucagu

SEQ ID NO: 2472264 - RNA, 15 nt, Human
caggcuggcgugcag

SEQ ID NO: 2472265 - RNA, 20 nt, Human
caggcuggcccugcccuggu

SEQ ID NO: 2472266 - RNA, 16 nt, Human
caggcgggcucaagga

SEQ ID NO: 2472267 - RNA, 21 nt, Human
caggcggugggcacccacccu

SEQ ID NO: 2472268 - RNA, 21 nt, Human
caggccagagggagugacaga

SEQ ID NO: 2472269 - RNA, 19 nt, Human
caggccagagggagugaca

SEQ ID NO: 2472270 - RNA, 13 nt, Human
caggcagcauuua

SEQ ID NO: 2472271 - RNA, 23 nt, Human
caggcagcagagacuugggacau

SEQ ID NO: 2472272 - RNA, 14 nt, Human
caggcagcagagac

SEQ ID NO: 2472273 - RNA, 12 nt, Human
caggcagcagag

SEQ ID NO: 2472274 - RNA, 11 nt, Human
caggcagcaga

SEQ ID NO: 2472275 - RNA, 15 nt, Human
caggcagcacagaga

SEQ ID NO: 2472276 - RNA, 23 nt, Human
caggccagagggagugacagagg

SEQ ID NO: 2472277 - RNA, 23 nt, Human
caggagggagggggaaggcaggg

SEQ ID NO: 2472278 - RNA, 16 nt, Human
caggagggcaagggcc

SEQ ID NO: 2472279 - RNA, 22 nt, Human
caggagggagcauagaaggcag

SEQ ID NO: 2472280 - RNA, 22 nt, Human
caggagggauuggccgcuuggc

SEQ ID NO: 2472281 - RNA, 18 nt, Human
caggagggcacuggagcu

SEQ ID NO: 2472282 - RNA, 16 nt, Human
caggagggcccuaccu

SEQ ID NO: 2472283 - RNA, 19 nt, Human
caggagggcaagggccaug

SEQ ID NO: 2472284 - RNA, 17 nt, Human
caggagggcaagggcca

SEQ ID NO: 2472285 - RNA, 12 nt, Human
caggagggcccu

SEQ ID NO: 2472286 - RNA, 20 nt, Human
caggagguggaggcugcagu

SEQ ID NO: 2472287 - RNA, 17 nt, Human
caggaggccagccuuga

SEQ ID NO: 2472288 - RNA, 15 nt, Human
caggagggaggggga

SEQ ID NO: 2472289 - RNA, 12 nt, Human
caggagggaggg

SEQ ID NO: 2472290 - RNA, 23 nt, Human
caggcacccaccaucaugucugg

SEQ ID NO: 2472291 - RNA, 22 nt, Human
caggcacccaccaucaugucug

SEQ ID NO: 2472292 - RNA, 18 nt, Human
caggcacccaccaucaug

SEQ ID NO: 2472293 - RNA, 15 nt, Human
caggagguggucugg

SEQ ID NO: 2472294 - RNA, 15 nt, Human
caggagguggagguu

SEQ ID NO: 2472295 - RNA, 19 nt, Human
caggagguggagguugcag

SEQ ID NO: 2472296 - RNA, 14 nt, Human
caggcagauccagg

SEQ ID NO: 2472297 - RNA, 17 nt, Human
caggcacccccuggaga

SEQ ID NO: 2472298 - RNA, 15 nt, Human
caggcagauccagga

SEQ ID NO: 2472299 - RNA, 17 nt, Human
caggcagauccaggacu

SEQ ID NO: 2472300 - RNA, 18 nt, Human
caggcagauccaggacua

SEQ ID NO: 2472301 - RNA, 16 nt, Human
caggcacccccuggag

SEQ ID NO: 2472302 - RNA, 15 nt, Human
caggcacccccugga

SEQ ID NO: 2472303 - RNA, 22 nt, Human
caggagguggcuauggccaccc

SEQ ID NO: 2472304 - RNA, 18 nt, Human
caggagguggcuauggcc

SEQ ID NO: 2472305 - RNA, 20 nt, Human
caggagguggagguugcagu

SEQ ID NO: 2472306 - RNA, 13 nt, Human
caggcagaucugu

SEQ ID NO: 2472307 - RNA, 15 nt, Human
caggcagaucugugc

SEQ ID NO: 2472308 - RNA, 16 nt, Human
caggcagaucugugcc

SEQ ID NO: 2472309 - RNA, 17 nt, Human
caggcagaucugugccc

SEQ ID NO: 2472310 - RNA, 18 nt, Human
caggcagaucugugcccc

SEQ ID NO: 2472311 - RNA, 19 nt, Human
caggcagaucugugcccca

SEQ ID NO: 2472312 - RNA, 21 nt, Human
caggcagaucugugccccaug

SEQ ID NO: 2472313 - RNA, 22 nt, Human
caggcagaucugugccccaugc

SEQ ID NO: 2472314 - RNA, 17 nt, Human
caggacccccuuccccu

SEQ ID NO: 2472315 - RNA, 16 nt, Human
caggacccccuucccc

SEQ ID NO: 2472316 - RNA, 15 nt, Human
caggacccccuuccc

SEQ ID NO: 2472317 - RNA, 14 nt, Human
caggacccccuucc

SEQ ID NO: 2472318 - RNA, 12 nt, Human
caggaccccuga

SEQ ID NO: 2472319 - RNA, 14 nt, Human
caggaccccugagu

SEQ ID NO: 2472320 - RNA, 13 nt, Human
caggacccugaag

SEQ ID NO: 2472321 - RNA, 13 nt, Human
caggaacagaagg

SEQ ID NO: 2472322 - RNA, 14 nt, Human
caggacccugaagg

SEQ ID NO: 2472323 - RNA, 15 nt, Human
caggacccugaaggg

SEQ ID NO: 2472324 - RNA, 12 nt, Human
caggagcucuuc

SEQ ID NO: 2472325 - RNA, 15 nt, Human
caggagcucuucagg

SEQ ID NO: 2472326 - RNA, 18 nt, Human
caggagcucuucaggccu

SEQ ID NO: 2472327 - RNA, 19 nt, Human
caggagcucuucaggccuc

SEQ ID NO: 2472328 - RNA, 20 nt, Human
caggagcucuucaggccucc

SEQ ID NO: 2472329 - RNA, 22 nt, Human
caggagcucuucaggccucccu

SEQ ID NO: 2472330 - RNA, 23 nt, Human
caggagcucuucaggccucccuc

SEQ ID NO: 2472331 - RNA, 22 nt, Human
caggagcugcccagaguugcug

SEQ ID NO: 2472332 - RNA, 13 nt, Human
caggagcugccca

SEQ ID NO: 2472333 - RNA, 14 nt, Human
caggagcugggauc

SEQ ID NO: 2472334 - RNA, 22 nt, Human
caggagcugggauccuaagggc

SEQ ID NO: 2472335 - RNA, 15 nt, Human
caggagcugggcaga

SEQ ID NO: 2472336 - RNA, 12 nt, Human
caggagcugggc

SEQ ID NO: 2472337 - RNA, 23 nt, Human
caggagcugggcagaaggccaag

SEQ ID NO: 2472338 - RNA, 16 nt, Human
caggaggccagccuug

SEQ ID NO: 2472339 - RNA, 15 nt, Human
caggaggccagccuu

SEQ ID NO: 2472340 - RNA, 14 nt, Human
caggaggccagccu

SEQ ID NO: 2472341 - RNA, 13 nt, Human
caggaggaagggg

SEQ ID NO: 2472342 - RNA, 17 nt, Human
caggagcuuuggaccua

SEQ ID NO: 2472343 - RNA, 22 nt, Human
auuguuguuugccauacuuugu

SEQ ID NO: 2472344 - RNA, 15 nt, Human
auuguuuaaaaucau

SEQ ID NO: 2472345 - RNA, 17 nt, Human
auuguuguuuguaugua

SEQ ID NO: 2472346 - RNA, 18 nt, Human
auuguuguuuguauguau

SEQ ID NO: 2472347 - RNA, 20 nt, Human
auuguuguuuguauguauaa

SEQ ID NO: 2472348 - RNA, 21 nt, Human
auuguuguuuguauguauaau

SEQ ID NO: 2472349 - RNA, 15 nt, Human
auugcuguguaucug

SEQ ID NO: 2472350 - RNA, 12 nt, Human
auugcuguguau

SEQ ID NO: 2472351 - RNA, 11 nt, Human
auugcugugcc

SEQ ID NO: 2472352 - RNA, 19 nt, Human
auugcugugaauuagcuca

SEQ ID NO: 2472353 - RNA, 21 nt, Human
auuguaacguugcugugggaa

SEQ ID NO: 2472354 - RNA, 20 nt, Human
auuguaacguugcuguggga

SEQ ID NO: 2472355 - RNA, 18 nt, Human
auuguaacguugcugugg

SEQ ID NO: 2472356 - RNA, 17 nt, Human
auuguaacguugcugug

SEQ ID NO: 2472357 - RNA, 16 nt, Human
auuguaacguugcugu

SEQ ID NO: 2472358 - RNA, 19 nt, Human
auuguaacagacauuguuu

SEQ ID NO: 2472359 - RNA, 15 nt, Human
auuguaacguugcug

SEQ ID NO: 2472360 - RNA, 18 nt, Human
auuguaacagacauuguu

SEQ ID NO: 2472361 - RNA, 17 nt, Human
auuguaacagacauugu

SEQ ID NO: 2472362 - RNA, 16 nt, Human
auuguaacagacauug

SEQ ID NO: 2472363 - RNA, 15 nt, Human
auuguaacagacauu

SEQ ID NO: 2472364 - RNA, 14 nt, Human
auuguaacagacau

SEQ ID NO: 2472365 - RNA, 23 nt, Human
auuguaaauugaaucaguauaaa

SEQ ID NO: 2472366 - RNA, 23 nt, Human
auugcuuugaagcaguuguguca

SEQ ID NO: 2472367 - RNA, 10 nt, Human
auugcuuuga

SEQ ID NO: 2472368 - RNA, 21 nt, Human
auugcuuugaagcaguugugu

SEQ ID NO: 2472369 - RNA, 13 nt, Human
auugcuuucugaa

SEQ ID NO: 2472370 - RNA, 15 nt, Human
auugcuuucugaaau

SEQ ID NO: 2472371 - RNA, 16 nt, Human
auugcuuucugaaauu

SEQ ID NO: 2472372 - RNA, 17 nt, Human
auugcuuucugaaauua

SEQ ID NO: 2472373 - RNA, 16 nt, Human
auugcuuuauaaauaa

SEQ ID NO: 2472374 - RNA, 15 nt, Human
auugcuuuauaaaua

SEQ ID NO: 2472375 - RNA, 13 nt, Human
auugcuuuauaaa

SEQ ID NO: 2472376 - RNA, 16 nt, Human
auugcuuuacugucaa

SEQ ID NO: 2472377 - RNA, 14 nt, Human
auugcuuuccacug

SEQ ID NO: 2472378 - RNA, 17 nt, Human
auugcuuuauaaauaaa

SEQ ID NO: 2472379 - RNA, 11 nt, Human
auugcuuucug

SEQ ID NO: 2472380 - RNA, 20 nt, Human
auugcuuacauuuuuacaau

SEQ ID NO: 2472381 - RNA, 19 nt, Human
auugcuuacauuuuuacaa

SEQ ID NO: 2472382 - RNA, 16 nt, Human
auugcuuacauuuuua

SEQ ID NO: 2472383 - RNA, 14 nt, Human
auugcuuacauuuu

SEQ ID NO: 2472384 - RNA, 13 nt, Human
auugcuuacauuu

SEQ ID NO: 2472385 - RNA, 21 nt, Human
auugcuguugucccucugcua

SEQ ID NO: 2472386 - RNA, 21 nt, Human
auugcuuacaagccuaagaau

SEQ ID NO: 2472387 - RNA, 17 nt, Human
auugcuguugucccucu

SEQ ID NO: 2472388 - RNA, 16 nt, Human
auugcuuaaaauagca

SEQ ID NO: 2472389 - RNA, 17 nt, Human
auugcuuaaaauagcaa

SEQ ID NO: 2472390 - RNA, 22 nt, Human
auugcuuacauuuuuacaauaa

SEQ ID NO: 2472391 - RNA, 21 nt, Human
auugcuuacauuuuuacaaua

SEQ ID NO: 2472392 - RNA, 15 nt, Human
auugcuugauacuuu

SEQ ID NO: 2472393 - RNA, 16 nt, Human
auugcuuguuggauuu

SEQ ID NO: 2472394 - RNA, 14 nt, Human
auugcuugcacaaa

SEQ ID NO: 2472395 - RNA, 19 nt, Human
auuguuguuugccauacuu

SEQ ID NO: 2472396 - RNA, 20 nt, Human
auuguuguuucuuucuagug

SEQ ID NO: 2472397 - RNA, 19 nt, Human
auuguuguuucuuucuagu

SEQ ID NO: 2472398 - RNA, 16 nt, Human
auuguuguuucuuucu

SEQ ID NO: 2472399 - RNA, 14 nt, Human
auuguuguuucuuu

SEQ ID NO: 2472400 - RNA, 12 nt, Human
auuguuguuucu

SEQ ID NO: 2472401 - RNA, 17 nt, Human
auuguuaauuuuuccua

SEQ ID NO: 2472402 - RNA, 22 nt, Human
auuguuaagucuaaauauuucc

SEQ ID NO: 2472403 - RNA, 21 nt, Human
auuguuaagucuaaauauuuc

SEQ ID NO: 2472404 - RNA, 17 nt, Human
auuguuaacucuugucu

SEQ ID NO: 2472405 - RNA, 23 nt, Human
auuguuaagucuaaauauuuccu

SEQ ID NO: 2472406 - RNA, 17 nt, Human
auuguguugugaauguu

SEQ ID NO: 2472407 - RNA, 15 nt, Human
auuguguucccauuu

SEQ ID NO: 2472408 - RNA, 13 nt, Human
auuguguuuguca

SEQ ID NO: 2472409 - RNA, 19 nt, Human
auuguguuugucauuagcc

SEQ ID NO: 2472410 - RNA, 18 nt, Human
auuguguuugucauuagc

SEQ ID NO: 2472411 - RNA, 16 nt, Human
auuguguuugucauua

SEQ ID NO: 2472412 - RNA, 15 nt, Human
auuguguuugucauu

SEQ ID NO: 2472413 - RNA, 22 nt, Human
auuguguuugucauuagccuga

SEQ ID NO: 2472414 - RNA, 13 nt, Human
auuguguuugugu

SEQ ID NO: 2472415 - RNA, 13 nt, Human
auuguuaaaauaa

SEQ ID NO: 2472416 - RNA, 15 nt, Human
auuguuaaaauaacu

SEQ ID NO: 2472417 - RNA, 12 nt, Human
auuguaagaaau

SEQ ID NO: 2472418 - RNA, 14 nt, Human
auuguaagaaauac

SEQ ID NO: 2472419 - RNA, 20 nt, Human
auuguaagaaauacuguaca

SEQ ID NO: 2472420 - RNA, 21 nt, Human
auuguaagaaauacuguacaa

SEQ ID NO: 2472421 - RNA, 13 nt, Human
auuguaacuguuc

SEQ ID NO: 2472422 - RNA, 15 nt, Human
auuguaacuguucuu

SEQ ID NO: 2472423 - RNA, 19 nt, Human
auuguaacuguucuugaau

SEQ ID NO: 2472424 - RNA, 15 nt, Human
auuguaacuuggaug

SEQ ID NO: 2472425 - RNA, 23 nt, Human
auuguaacuuggauguagccaug

SEQ ID NO: 2472426 - RNA, 20 nt, Human
auuguguucccauuucagcu

SEQ ID NO: 2472427 - RNA, 14 nt, Human
auuguguugugaau

SEQ ID NO: 2472428 - RNA, 16 nt, Human
auuguguguuauuuaa

SEQ ID NO: 2472429 - RNA, 18 nt, Human
auuguguguuauuuaaau

SEQ ID NO: 2472430 - RNA, 19 nt, Human
auuuaugcauggaaaccug

SEQ ID NO: 2472431 - RNA, 20 nt, Human
auuuaugccucuguauuuaa

SEQ ID NO: 2472432 - RNA, 12 nt, Human
auuucacuuaau

SEQ ID NO: 2472433 - RNA, 15 nt, Human
auuucacuuuagaug

SEQ ID NO: 2472434 - RNA, 17 nt, Human
auuucacuuaauaaugu

SEQ ID NO: 2472435 - RNA, 19 nt, Human
auuucacuuuagaugcuga

SEQ ID NO: 2472436 - RNA, 18 nt, Human
auuucacuuuagaugcug

SEQ ID NO: 2472437 - RNA, 16 nt, Human
auuuaugcauauuauu

SEQ ID NO: 2472438 - RNA, 15 nt, Human
auuuaugaguuuuug

SEQ ID NO: 2472439 - RNA, 18 nt, Human
auuuaugaguuuuugaua

SEQ ID NO: 2472440 - RNA, 15 nt, Human
auuuaugauuuaaua

SEQ ID NO: 2472441 - RNA, 13 nt, Human
auuuaugauuuaa

SEQ ID NO: 2472442 - RNA, 19 nt, Human
auuuaugaguuuuugauag

SEQ ID NO: 2472443 - RNA, 22 nt, Human
auuuaugcauauuauuuuaugu

SEQ ID NO: 2472444 - RNA, 19 nt, Human
auuuaugauuuaauaaaau

SEQ ID NO: 2472445 - RNA, 17 nt, Human
auuuaugauuuaauaaa

SEQ ID NO: 2472446 - RNA, 16 nt, Human
auuuaugauuuaauaa

SEQ ID NO: 2472447 - RNA, 12 nt, Human
auuuauggagga

SEQ ID NO: 2472448 - RNA, 23 nt, Human
auuuaugaauugaauuaucuugg

SEQ ID NO: 2472449 - RNA, 17 nt, Human
auuuaugagcucuucau

SEQ ID NO: 2472450 - RNA, 22 nt, Human
auuuaucuuuacuuuuaaacag

SEQ ID NO: 2472451 - RNA, 13 nt, Human
auuuaugaaaaga

SEQ ID NO: 2472452 - RNA, 22 nt, Human
auuuaucucuauuuaauauuua

SEQ ID NO: 2472453 - RNA, 20 nt, Human
auuuaucuguguuuuugaaa

SEQ ID NO: 2472454 - RNA, 19 nt, Human
auuuaucuugucucugggc

SEQ ID NO: 2472455 - RNA, 20 nt, Human
auuuaucugggauuaugguu

SEQ ID NO: 2472456 - RNA, 19 nt, Human
auuuaucucuauuuaauau

SEQ ID NO: 2472457 - RNA, 16 nt, Human
auuuaucucuauuuaa

SEQ ID NO: 2472458 - RNA, 16 nt, Human
auuuaucugugcaaau

SEQ ID NO: 2472459 - RNA, 16 nt, Human
auuuauauguacauga

SEQ ID NO: 2472460 - RNA, 17 nt, Human
auuuauauguacaugag

SEQ ID NO: 2472461 - RNA, 15 nt, Human
auuuauauguacaug

SEQ ID NO: 2472462 - RNA, 15 nt, Human
auuuauaaucacuuu

SEQ ID NO: 2472463 - RNA, 20 nt, Human
auuuauauauuuauaacuca

SEQ ID NO: 2472464 - RNA, 15 nt, Human
auuuauaucacaugu

SEQ ID NO: 2472465 - RNA, 17 nt, Human
auuuauaagcagauuua

SEQ ID NO: 2472466 - RNA, 16 nt, Human
auuuauaagguuuuaa

SEQ ID NO: 2472467 - RNA, 13 nt, Human
auuuauaaucacu

SEQ ID NO: 2472468 - RNA, 22 nt, Human
auuuauaaucacuuuuuuccac

SEQ ID NO: 2472469 - RNA, 19 nt, Human
auuuauauauuuauaacuc

SEQ ID NO: 2472470 - RNA, 14 nt, Human
auuuauaagcagau

SEQ ID NO: 2472471 - RNA, 22 nt, Human
auuuauaagcagauuuaacaau

SEQ ID NO: 2472472 - RNA, 22 nt, Human
auuuauaacucaucauaaaaua

SEQ ID NO: 2472473 - RNA, 23 nt, Human
auuuauaacucaucauaaaauaa

SEQ ID NO: 2472474 - RNA, 23 nt, Human
auuuaauaacauuaccuuacugu

SEQ ID NO: 2472475 - RNA, 14 nt, Human
auuuauaacucauc

SEQ ID NO: 2472476 - RNA, 15 nt, Human
auuuauaacucauca

SEQ ID NO: 2472477 - RNA, 16 nt, Human
auuuauaacucaucau

SEQ ID NO: 2472478 - RNA, 17 nt, Human
auuuauaacucaucaua

SEQ ID NO: 2472479 - RNA, 18 nt, Human
auuuauaacucaucauaa

SEQ ID NO: 2472480 - RNA, 19 nt, Human
auuuauaacucaucauaaa

SEQ ID NO: 2472481 - RNA, 20 nt, Human
auuuauaacucaucauaaaa

SEQ ID NO: 2472482 - RNA, 21 nt, Human
auuuauaacucaucauaaaau

SEQ ID NO: 2472483 - RNA, 16 nt, Human
auuuaaugaaagacug

SEQ ID NO: 2472484 - RNA, 15 nt, Human
auuuaaugaaagacu

SEQ ID NO: 2472485 - RNA, 20 nt, Human
auuuaaugaaagacuguaca

SEQ ID NO: 2472486 - RNA, 21 nt, Human
auuuaaugaaagacuguacaa

SEQ ID NO: 2472487 - RNA, 19 nt, Human
auuuaauaacauuaccuua

SEQ ID NO: 2472488 - RNA, 18 nt, Human
auuuaauaacauuaccuu

SEQ ID NO: 2472489 - RNA, 17 nt, Human
auuuaauaacauuaccu

SEQ ID NO: 2472490 - RNA, 15 nt, Human
auuuaauaacauuac

SEQ ID NO: 2472491 - RNA, 15 nt, Human
auuuaauaauauacu

SEQ ID NO: 2472492 - RNA, 13 nt, Human
auuuaauaauaua

SEQ ID NO: 2472493 - RNA, 18 nt, Human
auuuaauaauauacuugu

SEQ ID NO: 2472494 - RNA, 16 nt, Human
auuuaauaauauacuu

SEQ ID NO: 2472495 - RNA, 19 nt, Human
auuuaauaauauacuugug

SEQ ID NO: 2472496 - RNA, 15 nt, Human
auuuaauaaucugua

SEQ ID NO: 2472497 - RNA, 16 nt, Human
auuuaauaaaugugcc

SEQ ID NO: 2472498 - RNA, 16 nt, Human
auuuaauaacaauugu

SEQ ID NO: 2472499 - RNA, 14 nt, Human
auuuaauaacauua

SEQ ID NO: 2472500 - RNA, 12 nt, Human
auuuaauaacau

SEQ ID NO: 2472501 - RNA, 13 nt, Human
auuuaauaacauu

SEQ ID NO: 2472502 - RNA, 13 nt, Human
auuucugugggag

SEQ ID NO: 2472503 - RNA, 16 nt, Human
auuucugugggagaau

SEQ ID NO: 2472504 - RNA, 23 nt, Human
auuucuauucaagguggccaaau

SEQ ID NO: 2472505 - RNA, 17 nt, Human
auuucuaugagaaaaga

SEQ ID NO: 2472506 - RNA, 12 nt, Human
auuucuauuuau

SEQ ID NO: 2472507 - RNA, 14 nt, Human
auuucuaugagaaa

SEQ ID NO: 2472508 - RNA, 16 nt, Human
auuucuauuuauuuac

SEQ ID NO: 2472509 - RNA, 13 nt, Human
auuucuauuuauu

SEQ ID NO: 2472510 - RNA, 15 nt, Human
auuucuauuucuccu

SEQ ID NO: 2472511 - RNA, 17 nt, Human
auuucuauuuauuuacu

SEQ ID NO: 2472512 - RNA, 22 nt, Human
auuucugcugaauuuucacaug

SEQ ID NO: 2472513 - RNA, 16 nt, Human
auuucugcugaauuuu

SEQ ID NO: 2472514 - RNA, 14 nt, Human
auuucugcugaauu

SEQ ID NO: 2472515 - RNA, 17 nt, Human
auuucugccuuccuugc

SEQ ID NO: 2472516 - RNA, 16 nt, Human
auuucugccuuccuug

SEQ ID NO: 2472517 - RNA, 20 nt, Human
auuucugcugaauuuucaca

SEQ ID NO: 2472518 - RNA, 18 nt, Human
auuucuauuucuccucca

SEQ ID NO: 2472519 - RNA, 20 nt, Human
auuucuauuucuccuccaug

SEQ ID NO: 2472520 - RNA, 18 nt, Human
auuucugcauauguugaa

SEQ ID NO: 2472521 - RNA, 22 nt, Human
auuucugcauauguugaauacu

SEQ ID NO: 2472522 - RNA, 23 nt, Human
auuucugcauauguugaauacuu

SEQ ID NO: 2472523 - RNA, 15 nt, Human
auuucugccuuccuu

SEQ ID NO: 2472524 - RNA, 14 nt, Human
auuucuaugaaaua

SEQ ID NO: 2472525 - RNA, 16 nt, Human
auuucauaugcuguau

SEQ ID NO: 2472526 - RNA, 18 nt, Human
auuucauaaacaacuuaa

SEQ ID NO: 2472527 - RNA, 20 nt, Human
auuucauaccuaucaucuua

SEQ ID NO: 2472528 - RNA, 12 nt, Human
auuucagacucc

SEQ ID NO: 2472529 - RNA, 13 nt, Human
auuccuccugcuc

SEQ ID NO: 2472530 - RNA, 14 nt, Human
auuccuccugcuca

SEQ ID NO: 2472531 - RNA, 15 nt, Human
auuccuccugcucau

SEQ ID NO: 2472532 - RNA, 16 nt, Human
auuccuccugcucaua

SEQ ID NO: 2472533 - RNA, 15 nt, Human
auuccuccaccugcc

SEQ ID NO: 2472534 - RNA, 20 nt, Human
auuccuccugcucauauugu

SEQ ID NO: 2472535 - RNA, 12 nt, Human
auuccuccuggg

SEQ ID NO: 2472536 - RNA, 15 nt, Human
auuccugcauuugug

SEQ ID NO: 2472537 - RNA, 17 nt, Human
auuccugcagccuggag

SEQ ID NO: 2472538 - RNA, 22 nt, Human
auuccuccugggccccucaucu

SEQ ID NO: 2472539 - RNA, 19 nt, Human
auuccugcagccuggaggc

SEQ ID NO: 2472540 - RNA, 18 nt, Human
auuccugcauuugugaaa

SEQ ID NO: 2472541 - RNA, 20 nt, Human
auuccuauugugauuugacu

SEQ ID NO: 2472542 - RNA, 19 nt, Human
auuccuauugugauuugac

SEQ ID NO: 2472543 - RNA, 18 nt, Human
auuccuauugugauuuga

SEQ ID NO: 2472544 - RNA, 17 nt, Human
auuccuauugugauuug

SEQ ID NO: 2472545 - RNA, 23 nt, Human
auuccuauugugauuugacuguu

SEQ ID NO: 2472546 - RNA, 21 nt, Human
auuccuauugugauuugacug

SEQ ID NO: 2472547 - RNA, 17 nt, Human
auuccucaacguauugu

SEQ ID NO: 2472548 - RNA, 14 nt, Human
auuccucagggaca

SEQ ID NO: 2472549 - RNA, 17 nt, Human
auuccugggaaauauuc

SEQ ID NO: 2472550 - RNA, 22 nt, Human
auuccugggaaauauucccuag

SEQ ID NO: 2472551 - RNA, 15 nt, Human
auuccugccugucuc

SEQ ID NO: 2472552 - RNA, 18 nt, Human
auuccuggaaaccacagu

SEQ ID NO: 2472553 - RNA, 17 nt, Human
auuccugccugucuccu

SEQ ID NO: 2472554 - RNA, 20 nt, Human
auuccugguacccagccauc

SEQ ID NO: 2472555 - RNA, 18 nt, Human
auuccugguacccagcca

SEQ ID NO: 2472556 - RNA, 15 nt, Human
auuccugguacccag

SEQ ID NO: 2472557 - RNA, 15 nt, Human
auuccugggcacagu

SEQ ID NO: 2472558 - RNA, 10 nt, Human
auuccugggc

SEQ ID NO: 2472559 - RNA, 13 nt, Human
auuccugggcaca

SEQ ID NO: 2472560 - RNA, 18 nt, Human
auuccuguauguugucca

SEQ ID NO: 2472561 - RNA, 17 nt, Human
auuccuguauguugucc

SEQ ID NO: 2472562 - RNA, 16 nt, Human
auuccuguauguuguc

SEQ ID NO: 2472563 - RNA, 13 nt, Human
auuccuguauguu

SEQ ID NO: 2472564 - RNA, 23 nt, Human
auuccuguagcaucuucuggagu

SEQ ID NO: 2472565 - RNA, 18 nt, Human
auuccuguagcaucuucu

SEQ ID NO: 2472566 - RNA, 17 nt, Human
auuccuguagcaucuuc

SEQ ID NO: 2472567 - RNA, 16 nt, Human
auuccuguagcaucuu

SEQ ID NO: 2472568 - RNA, 16 nt, Human
auuccuuaaauaaacu

SEQ ID NO: 2472569 - RNA, 22 nt, Human
auuccuguggauguaaagugau

SEQ ID NO: 2472570 - RNA, 20 nt, Human
auuccuuagcuuagaccuca

SEQ ID NO: 2472571 - RNA, 21 nt, Human
auuccuuagcuuagaccucag

SEQ ID NO: 2472572 - RNA, 12 nt, Human
auuccuuccugu

SEQ ID NO: 2472573 - RNA, 14 nt, Human
auuccuuccuguuc

SEQ ID NO: 2472574 - RNA, 16 nt, Human
auuccuuccuguucug

SEQ ID NO: 2472575 - RNA, 21 nt, Human
auuccuucuuugauaauguua

SEQ ID NO: 2472576 - RNA, 20 nt, Human
auuccuucuuugauaauguu

SEQ ID NO: 2472577 - RNA, 17 nt, Human
auuccuucuuugauaau

SEQ ID NO: 2472578 - RNA, 16 nt, Human
auuccuucuuugauaa

SEQ ID NO: 2472579 - RNA, 15 nt, Human
auuccuucuuugaua

SEQ ID NO: 2472580 - RNA, 14 nt, Human
auuccuucuuugau

SEQ ID NO: 2472581 - RNA, 17 nt, Human
auuccuuccuguucuga

SEQ ID NO: 2472582 - RNA, 18 nt, Human
auuccuuccuguucugaa

SEQ ID NO: 2472583 - RNA, 22 nt, Human
auuccuucagggugaugccagg

SEQ ID NO: 2472584 - RNA, 15 nt, Human
auuccuucaggguga

SEQ ID NO: 2472585 - RNA, 14 nt, Human
auuccuucagggug

SEQ ID NO: 2472586 - RNA, 24 nt, Human
auuccuuagcuuagaccucagccu

SEQ ID NO: 2472587 - RNA, 22 nt, Human
auuccuuagcuuagaccucagc

SEQ ID NO: 2472588 - RNA, 23 nt, Human
auuccuuagcuuagaccucagcc

SEQ ID NO: 2472589 - RNA, 22 nt, Human
auucuucuguacgucugacagg

SEQ ID NO: 2472590 - RNA, 20 nt, Human
auucuucugcuucagccucc

SEQ ID NO: 2472591 - RNA, 18 nt, Human
auucucugucucauccau

SEQ ID NO: 2472592 - RNA, 19 nt, Human
auucucugucucauccauc

SEQ ID NO: 2472593 - RNA, 19 nt, Human
auucuucugcuucagccuc

SEQ ID NO: 2472594 - RNA, 13 nt, Human
auucucugucuca

SEQ ID NO: 2472595 - RNA, 14 nt, Human
auucucugucucau

SEQ ID NO: 2472596 - RNA, 16 nt, Human
auucucugucucaucc

SEQ ID NO: 2472597 - RNA, 17 nt, Human
auucucugucucaucca

SEQ ID NO: 2472598 - RNA, 12 nt, Human
auucucugucuc

SEQ ID NO: 2472599 - RNA, 13 nt, Human
auucucugagcug

SEQ ID NO: 2472600 - RNA, 17 nt, Human
auucucugagcugugca

SEQ ID NO: 2472601 - RNA, 18 nt, Human
auucucugagcugugcag

SEQ ID NO: 2472602 - RNA, 21 nt, Human
auuccuuggcaugccuuccag

SEQ ID NO: 2472603 - RNA, 21 nt, Human
auucuccuuguguuacuaagu

SEQ ID NO: 2472604 - RNA, 22 nt, Human
auucuccuuguguuacuaaguu

SEQ ID NO: 2472605 - RNA, 17 nt, Human
auucucuaguuugauua

SEQ ID NO: 2472606 - RNA, 18 nt, Human
auucucuaguuugauuaa

SEQ ID NO: 2472607 - RNA, 18 nt, Human
auucuccuuguguuacua

SEQ ID NO: 2472608 - RNA, 19 nt, Human
auucuccuuguguuacuaa

SEQ ID NO: 2472609 - RNA, 23 nt, Human
auuccuucuuugauaauguuaaa

SEQ ID NO: 2472610 - RNA, 22 nt, Human
auuccuucuuugauaauguuaa

SEQ ID NO: 2472611 - RNA, 20 nt, Human
auuccuuggcaugccuucca

SEQ ID NO: 2472612 - RNA, 12 nt, Human
auuccuugugaa

SEQ ID NO: 2472613 - RNA, 17 nt, Human
auucuccuuguguuacu

SEQ ID NO: 2472614 - RNA, 15 nt, Human
auucuugcaaaguau

SEQ ID NO: 2472615 - RNA, 16 nt, Human
auucuugcaaaguauc

SEQ ID NO: 2472616 - RNA, 14 nt, Human
auucuugcaaagua

SEQ ID NO: 2472617 - RNA, 20 nt, Human
auuaugaauuacauuuguau

SEQ ID NO: 2472618 - RNA, 19 nt, Human
auuaugaauuacauuugua

SEQ ID NO: 2472619 - RNA, 22 nt, Human
auuaugaauuacauuuguauaa

SEQ ID NO: 2472620 - RNA, 22 nt, Human
auuaguaccauaguaccauuua

SEQ ID NO: 2472621 - RNA, 19 nt, Human
auuaguacugcucuuguuu

SEQ ID NO: 2472622 - RNA, 16 nt, Human
auuaguaacauguguu

SEQ ID NO: 2472623 - RNA, 17 nt, Human
auuaguaacauguguua

SEQ ID NO: 2472624 - RNA, 20 nt, Human
auuaguacuccccuccuuga

SEQ ID NO: 2472625 - RNA, 16 nt, Human
auuagggagaaaauuc

SEQ ID NO: 2472626 - RNA, 15 nt, Human
auuagguuuuguaca

SEQ ID NO: 2472627 - RNA, 16 nt, Human
auuaguaaaugcuuau

SEQ ID NO: 2472628 - RNA, 13 nt, Human
auuaguaacaugu

SEQ ID NO: 2472629 - RNA, 21 nt, Human
auuagguuuuguacaauugaa

SEQ ID NO: 2472630 - RNA, 14 nt, Human
auuaguaaagaaau

SEQ ID NO: 2472631 - RNA, 19 nt, Human
auuaaaugcccagccccuu

SEQ ID NO: 2472632 - RNA, 17 nt, Human
auuaaaugcccagcccc

SEQ ID NO: 2472633 - RNA, 19 nt, Human
auuaggauuugccccuucc

SEQ ID NO: 2472634 - RNA, 18 nt, Human
auuaaauuaggaauaaau

SEQ ID NO: 2472635 - RNA, 16 nt, Human
auuaggauuucaugau

SEQ ID NO: 2472636 - RNA, 14 nt, Human
auuaggauuucaug

SEQ ID NO: 2472637 - RNA, 23 nt, Human
auuaggacaaucaguccccuccc

SEQ ID NO: 2472638 - RNA, 13 nt, Human
auuaaauuaggaa

SEQ ID NO: 2472639 - RNA, 22 nt, Human
auuauguaaaauguuuuagcaa

SEQ ID NO: 2472640 - RNA, 18 nt, Human
auuaugggaaucaagauu

SEQ ID NO: 2472641 - RNA, 17 nt, Human
auuaugggaaucaagau

SEQ ID NO: 2472642 - RNA, 22 nt, Human
auuaugcccaguuucugccucu

SEQ ID NO: 2472643 - RNA, 20 nt, Human
auuaugcccaguuucugccu

SEQ ID NO: 2472644 - RNA, 19 nt, Human
auuaugccuuuuuugauca

SEQ ID NO: 2472645 - RNA, 12 nt, Human
auuaugcuucuu

SEQ ID NO: 2472646 - RNA, 15 nt, Human
auuaugcuucuugga

SEQ ID NO: 2472647 - RNA, 16 nt, Human
auuauggaagauuuua

SEQ ID NO: 2472648 - RNA, 17 nt, Human
auuauggaagauuuuaa

SEQ ID NO: 2472649 - RNA, 20 nt, Human
auuauggaagauuuuaaauu

SEQ ID NO: 2472650 - RNA, 18 nt, Human
auucaacagguuuuccug

SEQ ID NO: 2472651 - RNA, 22 nt, Human
auucaacacucccuucccauga

SEQ ID NO: 2472652 - RNA, 16 nt, Human
auucaaccacuguaaa

SEQ ID NO: 2472653 - RNA, 20 nt, Human
auucaauaaaguauuuaauu

SEQ ID NO: 2472654 - RNA, 18 nt, Human
auucaauaaaguauuuaa

SEQ ID NO: 2472655 - RNA, 22 nt, Human
auucaaccacuguaaaaugaaa

SEQ ID NO: 2472656 - RNA, 19 nt, Human
auucaaccacuguaaaaug

SEQ ID NO: 2472657 - RNA, 22 nt, Human
auucaauaaaguauuuaauuag

SEQ ID NO: 2472658 - RNA, 21 nt, Human
auucaauaaaguauuuaauua

SEQ ID NO: 2472659 - RNA, 13 nt, Human
auucaauaaauug

SEQ ID NO: 2472660 - RNA, 13 nt, Human
auucaauaagcau

SEQ ID NO: 2472661 - RNA, 16 nt, Human
auucaauauccuuugc

SEQ ID NO: 2472662 - RNA, 22 nt, Human
auucaaucgacuggguuuaugu

SEQ ID NO: 2472663 - RNA, 17 nt, Human
auucaaucuguaaacug

SEQ ID NO: 2472664 - RNA, 18 nt, Human
auucaaucuguaaacugu

SEQ ID NO: 2472665 - RNA, 15 nt, Human
auucaaucuguaaac

SEQ ID NO: 2472666 - RNA, 16 nt, Human
auucaaucuguaaacu

SEQ ID NO: 2472667 - RNA, 14 nt, Human
auucaaucuguaaa

SEQ ID NO: 2472668 - RNA, 19 nt, Human
auucaauauccuuugccuc

SEQ ID NO: 2472669 - RNA, 22 nt, Human
caaagucaugcaaaggcuggga

SEQ ID NO: 2472670 - RNA, 14 nt, Human
caaaguccuuuuuu

SEQ ID NO: 2472671 - RNA, 17 nt, Human
caaaguccuuuuuuucc

SEQ ID NO: 2472672 - RNA, 17 nt, Human
caaagucuaaaguuuac

SEQ ID NO: 2472673 - RNA, 16 nt, Human
caaagucuaaaguuua

SEQ ID NO: 2472674 - RNA, 15 nt, Human
caaagucuaaaguuu

SEQ ID NO: 2472675 - RNA, 13 nt, Human
caaagucuaaagu

SEQ ID NO: 2472676 - RNA, 19 nt, Human
caaaguccuuuuuuuccau

SEQ ID NO: 2472677 - RNA, 23 nt, Human
caaaguccuuuuuuuccaucuuu

SEQ ID NO: 2472678 - RNA, 21 nt, Human
caaaucuuaacuugaaggagu

SEQ ID NO: 2472679 - RNA, 20 nt, Human
caaagucuaaaguuuacagu

SEQ ID NO: 2472680 - RNA, 13 nt, Human
caaaucuggaagc

SEQ ID NO: 2472681 - RNA, 19 nt, Human
caaagucuaaaguuuacag

SEQ ID NO: 2472682 - RNA, 12 nt, Human
caaaucuugaaa

SEQ ID NO: 2472683 - RNA, 19 nt, Human
caaaucuugaaauuaagaa

SEQ ID NO: 2472684 - RNA, 13 nt, Human
caaaucuugaaau

SEQ ID NO: 2472685 - RNA, 22 nt, Human
caaaugaauguugucuguuugu

SEQ ID NO: 2472686 - RNA, 19 nt, Human
caaaucuuuuagucauuau

SEQ ID NO: 2472687 - RNA, 17 nt, Human
caaaugacccaaagacc

SEQ ID NO: 2472688 - RNA, 19 nt, Human
caaaugaaugaccuuguug

SEQ ID NO: 2472689 - RNA, 18 nt, Human
caaaugacccaaagacca

SEQ ID NO: 2472690 - RNA, 22 nt, Human
caaaugaccagcagauucaaau

SEQ ID NO: 2472691 - RNA, 12 nt, Human
caaaugagccau

SEQ ID NO: 2472692 - RNA, 20 nt, Human
caaaugagaucuaagccuuu

SEQ ID NO: 2472693 - RNA, 18 nt, Human
caaaugcccaagggaaag

SEQ ID NO: 2472694 - RNA, 18 nt, Human
caaaugcauggugcaguu

SEQ ID NO: 2472695 - RNA, 19 nt, Human
caaaugcccaagggaaaga

SEQ ID NO: 2472696 - RNA, 23 nt, Human
caaaugcuguaacuuucugaaau

SEQ ID NO: 2472697 - RNA, 21 nt, Human
caaaugcugacccaugcaaua

SEQ ID NO: 2472698 - RNA, 18 nt, Human
caaaugcugcgcccuucc

SEQ ID NO: 2472699 - RNA, 19 nt, Human
caaaugcugcgcccuuccc

SEQ ID NO: 2472700 - RNA, 20 nt, Human
caaaugcugcgcccuucccc

SEQ ID NO: 2472701 - RNA, 21 nt, Human
caaaugcugcgcccuucccca

SEQ ID NO: 2472702 - RNA, 14 nt, Human
caacaaagaacacu

SEQ ID NO: 2472703 - RNA, 16 nt, Human
caacaaagcuguugau

SEQ ID NO: 2472704 - RNA, 17 nt, Human
caacaaagcacaguguu

SEQ ID NO: 2472705 - RNA, 19 nt, Human
caacaaagccaacagucaa

SEQ ID NO: 2472706 - RNA, 19 nt, Human
caacaaaggguuuuaaugu

SEQ ID NO: 2472707 - RNA, 12 nt, Human
caacaaagcugu

SEQ ID NO: 2472708 - RNA, 20 nt, Human
caacaaaggguuuuaaugua

SEQ ID NO: 2472709 - RNA, 21 nt, Human
caacaaauuagguuuuguaca

SEQ ID NO: 2472710 - RNA, 19 nt, Human
caacaaauuagguuuugua

SEQ ID NO: 2472711 - RNA, 19 nt, Human
caaaguaucccuacuguaa

SEQ ID NO: 2472712 - RNA, 21 nt, Human
caaaguaucccuacuguaauu

SEQ ID NO: 2472713 - RNA, 21 nt, Human
caaagucaugcaaaggcuggg

SEQ ID NO: 2472714 - RNA, 20 nt, Human
caaagucaugcaaaggcugg

SEQ ID NO: 2472715 - RNA, 14 nt, Human
caaagguaaaucag

SEQ ID NO: 2472716 - RNA, 22 nt, Human
caaagguaaaucagacuaugaa

SEQ ID NO: 2472717 - RNA, 16 nt, Human
caaaggguuuuaaugu

SEQ ID NO: 2472718 - RNA, 23 nt, Human
caaagggugaagcuauuuaucug

SEQ ID NO: 2472719 - RNA, 22 nt, Human
caaaguagaagucuuagaugua

SEQ ID NO: 2472720 - RNA, 19 nt, Human
caaaggguuuuaauguaga

SEQ ID NO: 2472721 - RNA, 18 nt, Human
caaaggguuuuaauguag

SEQ ID NO: 2472722 - RNA, 19 nt, Human
caaaguaucaggacgagaa

SEQ ID NO: 2472723 - RNA, 21 nt, Human
caaagcagugcaugcuguccc

SEQ ID NO: 2472724 - RNA, 18 nt, Human
caaagcagugcaugcugu

SEQ ID NO: 2472725 - RNA, 14 nt, Human
caaagauauuuugc

SEQ ID NO: 2472726 - RNA, 16 nt, Human
caaagauauuuugcuu

SEQ ID NO: 2472727 - RNA, 22 nt, Human
caaagcagugcaugcugucccu

SEQ ID NO: 2472728 - RNA, 23 nt, Human
caaagauauauacacaggauccu

SEQ ID NO: 2472729 - RNA, 20 nt, Human
caaagggugaagcuauuuau

SEQ ID NO: 2472730 - RNA, 21 nt, Human
caaagggugaagcuauuuauc

SEQ ID NO: 2472731 - RNA, 19 nt, Human
caaagggugaagcuauuua

SEQ ID NO: 2472732 - RNA, 20 nt, Human
caacacaagcuggaagcaca

SEQ ID NO: 2472733 - RNA, 13 nt, Human
caacaccaagcac

SEQ ID NO: 2472734 - RNA, 21 nt, Human
caacacacagauuugagcuca

SEQ ID NO: 2472735 - RNA, 22 nt, Human
caacacacagauuugagcucag

SEQ ID NO: 2472736 - RNA, 11 nt, Human
caacacacaga

SEQ ID NO: 2472737 - RNA, 14 nt, Human
caacacacacacuc

SEQ ID NO: 2472738 - RNA, 18 nt, Human
caacaaccucaacugccu

SEQ ID NO: 2472739 - RNA, 17 nt, Human
caacacaagcuggaagc

SEQ ID NO: 2472740 - RNA, 19 nt, Human
caacaaccucaacugccua

SEQ ID NO: 2472741 - RNA, 22 nt, Human
caacaacauguauaauauuuuu

SEQ ID NO: 2472742 - RNA, 21 nt, Human
caacaacauguauaauauuuu

SEQ ID NO: 2472743 - RNA, 22 nt, Human
caagaugcuggaugucugccaa

SEQ ID NO: 2472744 - RNA, 15 nt, Human
caagaugucagacug

SEQ ID NO: 2472745 - RNA, 16 nt, Human
caagaugucagacugg

SEQ ID NO: 2472746 - RNA, 17 nt, Human
caagaugucagacuggc

SEQ ID NO: 2472747 - RNA, 17 nt, Human
caagaccacguuucuaa

SEQ ID NO: 2472748 - RNA, 18 nt, Human
caagaccacguuucuaaa

SEQ ID NO: 2472749 - RNA, 19 nt, Human
caagacccaaaaggcagaa

SEQ ID NO: 2472750 - RNA, 21 nt, Human
caagaauuuccuguuggauuu

SEQ ID NO: 2472751 - RNA, 23 nt, Human
caacucagucccuaaaaacacag

SEQ ID NO: 2472752 - RNA, 14 nt, Human
caacuccuggaagc

SEQ ID NO: 2472753 - RNA, 17 nt, Human
caacuccuggaagcugu

SEQ ID NO: 2472754 - RNA, 14 nt, Human
caacucuccuccag

SEQ ID NO: 2472755 - RNA, 19 nt, Human
caacucgcuuuaggucagc

SEQ ID NO: 2472756 - RNA, 14 nt, Human
caacucgcuuuagg

SEQ ID NO: 2472757 - RNA, 14 nt, Human
caacuccugucuaa

SEQ ID NO: 2472758 - RNA, 21 nt, Human
caacuccuggaagcugugucc

SEQ ID NO: 2472759 - RNA, 14 nt, Human
caagaaugcugaaa

SEQ ID NO: 2472760 - RNA, 13 nt, Human
caagaaugcugaa

SEQ ID NO: 2472761 - RNA, 16 nt, Human
caagaaugcugaaacc

SEQ ID NO: 2472762 - RNA, 15 nt, Human
caagaaugcugaaac

SEQ ID NO: 2472763 - RNA, 17 nt, Human
caagaaugcugaaacca

SEQ ID NO: 2472764 - RNA, 24 nt, Human
caacucuccccugaccugugagcc

SEQ ID NO: 2472765 - RNA, 13 nt, Human
caacucuagcugg

SEQ ID NO: 2472766 - RNA, 18 nt, Human
caacucuccccugaccug

SEQ ID NO: 2472767 - RNA, 22 nt, Human
caagaauugaagcaggacuaaa

SEQ ID NO: 2472768 - RNA, 21 nt, Human
caagaauggggaucacagaga

SEQ ID NO: 2472769 - RNA, 21 nt, Human
caagaauuggaagcugcccug

SEQ ID NO: 2472770 - RNA, 12 nt, Human
caacucagacua

SEQ ID NO: 2472771 - RNA, 17 nt, Human
caacucaccccagcccc

SEQ ID NO: 2472772 - RNA, 17 nt, Human
caacuagacauucuguc

SEQ ID NO: 2472773 - RNA, 16 nt, Human
caacuagacauucugu

SEQ ID NO: 2472774 - RNA, 21 nt, Human
caacuagacauucugucgccu

SEQ ID NO: 2472775 - RNA, 15 nt, Human
caacuagacauucug

SEQ ID NO: 2472776 - RNA, 18 nt, Human
caacucaccccagcccca

SEQ ID NO: 2472777 - RNA, 18 nt, Human
caacuaauuuuuguauuu

SEQ ID NO: 2472778 - RNA, 12 nt, Human
caaccccugugg

SEQ ID NO: 2472779 - RNA, 14 nt, Human
caaccccuguggag

SEQ ID NO: 2472780 - RNA, 22 nt, Human
caacuaacaagaaacucacccc

SEQ ID NO: 2472781 - RNA, 20 nt, Human
caaccccccagcacugagga

SEQ ID NO: 2472782 - RNA, 19 nt, Human
caaccccccagcacugagg

SEQ ID NO: 2472783 - RNA, 16 nt, Human
caaccccugaggaaga

SEQ ID NO: 2472784 - RNA, 13 nt, Human
caaccccugagga

SEQ ID NO: 2472785 - RNA, 12 nt, Human
caaccccugagg

SEQ ID NO: 2472786 - RNA, 10 nt, Human
caaccccuga

SEQ ID NO: 2472787 - RNA, 18 nt, Human
caaccccccagcacugag

SEQ ID NO: 2472788 - RNA, 16 nt, Human
caaccccccagcacug

SEQ ID NO: 2472789 - RNA, 15 nt, Human
caaccccccagcacu

SEQ ID NO: 2472790 - RNA, 14 nt, Human
caaccccccagcac

SEQ ID NO: 2472791 - RNA, 16 nt, Human
caacccccauuucuau

SEQ ID NO: 2472792 - RNA, 16 nt, Human
caaccccccaccugcc

SEQ ID NO: 2472793 - RNA, 17 nt, Human
caaccccccaccugcca

SEQ ID NO: 2472794 - RNA, 15 nt, Human
caaccagcuaagaaa

SEQ ID NO: 2472795 - RNA, 22 nt, Human
caaccagcuaagaaaagauuuu

SEQ ID NO: 2472796 - RNA, 22 nt, Human
caaccagcaucccuugaccagg

SEQ ID NO: 2472797 - RNA, 23 nt, Human
caaccaugaguggcauggccacc

SEQ ID NO: 2472798 - RNA, 23 nt, Human
caaccaugagaccacuguuauca

SEQ ID NO: 2472799 - RNA, 13 nt, Human
caaccaucgcuuu

SEQ ID NO: 2472800 - RNA, 18 nt, Human
caaccaugagaccacugu

SEQ ID NO: 2472801 - RNA, 17 nt, Human
caaccagcuaagaaaag

SEQ ID NO: 2472802 - RNA, 16 nt, Human
auuuuuaagugcugca

SEQ ID NO: 2472803 - RNA, 18 nt, Human
auuuuuaagugcugcauu

SEQ ID NO: 2472804 - RNA, 19 nt, Human
auuuuuaagugcugcauuu

SEQ ID NO: 2472805 - RNA, 18 nt, Human
auuuuuaauauauacuau

SEQ ID NO: 2472806 - RNA, 14 nt, Human
auuuuuagacagag

SEQ ID NO: 2472807 - RNA, 15 nt, Human
auuuuuacugccacu

SEQ ID NO: 2472808 - RNA, 19 nt, Human
auuuuuaauauauacuaug

SEQ ID NO: 2472809 - RNA, 14 nt, Human
auuuuuaaucauga

SEQ ID NO: 2472810 - RNA, 16 nt, Human
auuuuuaguaaagaca

SEQ ID NO: 2472811 - RNA, 14 nt, Human
auuuuuacugccac

SEQ ID NO: 2472812 - RNA, 15 nt, Human
auuuuuaaucaugaa

SEQ ID NO: 2472813 - RNA, 21 nt, Human
auuuuuagauaguuagaaccu

SEQ ID NO: 2472814 - RNA, 21 nt, Human
auuuucugguagauagaaaua

SEQ ID NO: 2472815 - RNA, 16 nt, Human
auuuucugugccugaa

SEQ ID NO: 2472816 - RNA, 18 nt, Human
auuuucugugccugaaua

SEQ ID NO: 2472817 - RNA, 20 nt, Human
auuuucugugccugaauauu

SEQ ID NO: 2472818 - RNA, 15 nt, Human
auuuuauaugcuuac

SEQ ID NO: 2472819 - RNA, 16 nt, Human
auuuuauaugcuuacu

SEQ ID NO: 2472820 - RNA, 18 nt, Human
auuuuaugcuuuaaacau

SEQ ID NO: 2472821 - RNA, 19 nt, Human
auuuuauggcucacuauga

SEQ ID NO: 2472822 - RNA, 19 nt, Human
auuuuaugcuuuaaacauu

SEQ ID NO: 2472823 - RNA, 22 nt, Human
auuuuauguuaagggaagaauu

SEQ ID NO: 2472824 - RNA, 18 nt, Human
auuuuagcuacuauauau

SEQ ID NO: 2472825 - RNA, 21 nt, Human
auuuuaggaaaugaaugugug

SEQ ID NO: 2472826 - RNA, 15 nt, Human
auuuuagcugcagaa

SEQ ID NO: 2472827 - RNA, 16 nt, Human
auuuuagcugcagaac

SEQ ID NO: 2472828 - RNA, 21 nt, Human
auuuuagccuucucuguucau

SEQ ID NO: 2472829 - RNA, 21 nt, Human
auuuuauaucaauuuaaaaaa

SEQ ID NO: 2472830 - RNA, 16 nt, Human
auuuuagguguugauu

SEQ ID NO: 2472831 - RNA, 15 nt, Human
auuuuagguguugau

SEQ ID NO: 2472832 - RNA, 21 nt, Human
auuuuaggcagggauuugagg

SEQ ID NO: 2472833 - RNA, 17 nt, Human
auuuuaggcagggauuu

SEQ ID NO: 2472834 - RNA, 16 nt, Human
auuuuaggaaaugaau

SEQ ID NO: 2472835 - RNA, 18 nt, Human
auuuugaaucaauaauau

SEQ ID NO: 2472836 - RNA, 17 nt, Human
auuuugaaucaauaaua

SEQ ID NO: 2472837 - RNA, 15 nt, Human
auuuugaaucaauaa

SEQ ID NO: 2472838 - RNA, 14 nt, Human
auuuugaaucaaua

SEQ ID NO: 2472839 - RNA, 13 nt, Human
auuuugaaucaau

SEQ ID NO: 2472840 - RNA, 12 nt, Human
auuuugaaucaa

SEQ ID NO: 2472841 - RNA, 11 nt, Human
auuuugaauca

SEQ ID NO: 2472842 - RNA, 20 nt, Human
auuuugaauaaauaaaugua

SEQ ID NO: 2472843 - RNA, 19 nt, Human
auuuucugugggcaggccu

SEQ ID NO: 2472844 - RNA, 23 nt, Human
auuuucuguguuuugcuguacca

SEQ ID NO: 2472845 - RNA, 11 nt, Human
auuuucugugg

SEQ ID NO: 2472846 - RNA, 21 nt, Human
auuuucugugccugaauauuu

SEQ ID NO: 2472847 - RNA, 19 nt, Human
auuuucuuaucuucugcaa

SEQ ID NO: 2472848 - RNA, 11 nt, Human
auuuucuguug

SEQ ID NO: 2472849 - RNA, 14 nt, Human
auuuucuucaugca

SEQ ID NO: 2472850 - RNA, 18 nt, Human
auuuucuucaugcaauga

SEQ ID NO: 2472851 - RNA, 17 nt, Human
caaagauaucucaucuc

SEQ ID NO: 2472852 - RNA, 20 nt, Human
caaagauaaucucucagcuu

SEQ ID NO: 2472853 - RNA, 16 nt, Human
caaagauaaucucuca

SEQ ID NO: 2472854 - RNA, 20 nt, Human
auuuuuauaucagccugagu

SEQ ID NO: 2472855 - RNA, 18 nt, Human
auuuuuauaucagccuga

SEQ ID NO: 2472856 - RNA, 15 nt, Human
auuuuuauauuugaa

SEQ ID NO: 2472857 - RNA, 16 nt, Human
auuuuuuucugauugu

SEQ ID NO: 2472858 - RNA, 15 nt, Human
auuuuuauauuuagu

SEQ ID NO: 2472859 - RNA, 22 nt, Human
auuuuuauaucuauauguacuu

SEQ ID NO: 2472860 - RNA, 18 nt, Human
auuuuuuuuuccuucagu

SEQ ID NO: 2472861 - RNA, 23 nt, Human
auuuuuuuguagaugaaaaagca

SEQ ID NO: 2472862 - RNA, 20 nt, Human
auuuuuuugcaagugaaggu

SEQ ID NO: 2472863 - RNA, 17 nt, Human
auuuuuuugcaagugaa

SEQ ID NO: 2472864 - RNA, 14 nt, Human
auuuuuuugcaagu

SEQ ID NO: 2472865 - RNA, 21 nt, Human
auuuuuuucugauuguaacgu

SEQ ID NO: 2472866 - RNA, 16 nt, Human
auuuuuuugagacaga

SEQ ID NO: 2472867 - RNA, 16 nt, Human
caaaagaagcccccag

SEQ ID NO: 2472868 - RNA, 17 nt, Human
caaaagaagcccccagc

SEQ ID NO: 2472869 - RNA, 13 nt, Human
caaaagaagcccc

SEQ ID NO: 2472870 - RNA, 22 nt, Human
auuuuuuuuuccuucagugccu

SEQ ID NO: 2472871 - RNA, 20 nt, Human
auuuuuuuuuccuucagugc

SEQ ID NO: 2472872 - RNA, 15 nt, Human
caaaagacaauucuu

SEQ ID NO: 2472873 - RNA, 13 nt, Human
caaaagacaauuc

SEQ ID NO: 2472874 - RNA, 12 nt, Human
caaaagacaauu

SEQ ID NO: 2472875 - RNA, 22 nt, Human
caaaagacaauucuuuauacaa

SEQ ID NO: 2472876 - RNA, 21 nt, Human
caaaagacaauucuuuauaca

SEQ ID NO: 2472877 - RNA, 23 nt, Human
caaaagacaauucuuuauacaac

SEQ ID NO: 2472878 - RNA, 19 nt, Human
caaaagcugggcagguugg

SEQ ID NO: 2472879 - RNA, 18 nt, Human
caaaagaagcccccagcu

SEQ ID NO: 2472880 - RNA, 19 nt, Human
caaaagaagcccccagcua

SEQ ID NO: 2472881 - RNA, 19 nt, Human
caaaagaaucagaaacagg

SEQ ID NO: 2472882 - RNA, 15 nt, Human
caaaagaaucagaaa

SEQ ID NO: 2472883 - RNA, 14 nt, Human
caaaccaaauaaaa

SEQ ID NO: 2472884 - RNA, 15 nt, Human
caaaccaaauaaaaa

SEQ ID NO: 2472885 - RNA, 18 nt, Human
caaacccccuuugugcug

SEQ ID NO: 2472886 - RNA, 17 nt, Human
caaacccccuuugugcu

SEQ ID NO: 2472887 - RNA, 21 nt, Human
caaaccccgaccaccugccca

SEQ ID NO: 2472888 - RNA, 17 nt, Human
caaaccccacccuaguu

SEQ ID NO: 2472889 - RNA, 16 nt, Human
caaacccccuuugugc

SEQ ID NO: 2472890 - RNA, 18 nt, Human
caaaccccgaccaccugc

SEQ ID NO: 2472891 - RNA, 13 nt, Human
caaacccaugagg

SEQ ID NO: 2472892 - RNA, 21 nt, Human
caaaaggauaaugaauacuuu

SEQ ID NO: 2472893 - RNA, 15 nt, Human
caaacagucucagga

SEQ ID NO: 2472894 - RNA, 13 nt, Human
caaaagcuuuuua

SEQ ID NO: 2472895 - RNA, 13 nt, Human
caaaaggaagucu

SEQ ID NO: 2472896 - RNA, 16 nt, Human
caaacagucucaggaa

SEQ ID NO: 2472897 - RNA, 17 nt, Human
caaacagucucaggaaa

SEQ ID NO: 2472898 - RNA, 17 nt, Human
caaacauauauaacaau

SEQ ID NO: 2472899 - RNA, 20 nt, Human
caaacaugugguuaaugcca

SEQ ID NO: 2472900 - RNA, 12 nt, Human
cagaacagugau

SEQ ID NO: 2472901 - RNA, 17 nt, Human
cagaacagugauuacca

SEQ ID NO: 2472902 - RNA, 11 nt, Human
cagaacaguga

SEQ ID NO: 2472903 - RNA, 24 nt, Human
cagaacagcuucagguuaucgaaa

SEQ ID NO: 2472904 - RNA, 19 nt, Human
cagaacagcuucagguuau

SEQ ID NO: 2472905 - RNA, 18 nt, Human
cagaacagcuucagguua

SEQ ID NO: 2472906 - RNA, 17 nt, Human
cagaacagcuucagguu

SEQ ID NO: 2472907 - RNA, 16 nt, Human
cagaaguuucugccgc

SEQ ID NO: 2472908 - RNA, 14 nt, Human
cagaaguuucugcc

SEQ ID NO: 2472909 - RNA, 18 nt, Human
cagaacagugauuaccag

SEQ ID NO: 2472910 - RNA, 19 nt, Human
cagaaguuucucagcuccc

SEQ ID NO: 2472911 - RNA, 15 nt, Human
cagaaguuucucagc

SEQ ID NO: 2472912 - RNA, 16 nt, Human
cagaaaugcugccugc

SEQ ID NO: 2472913 - RNA, 14 nt, Human
cagaaaugcugccu

SEQ ID NO: 2472914 - RNA, 23 nt, Human
cagaaaugagaucaggcucugcc

SEQ ID NO: 2472915 - RNA, 20 nt, Human
cagaaaugagaucaggcucu

SEQ ID NO: 2472916 - RNA, 21 nt, Human
cagaaaugcugccugccuguc

SEQ ID NO: 2472917 - RNA, 20 nt, Human
cagaaaugcugccugccugu

SEQ ID NO: 2472918 - RNA, 19 nt, Human
cagaaaugcugccugccug

SEQ ID NO: 2472919 - RNA, 17 nt, Human
cagaaaugcugccugcc

SEQ ID NO: 2472920 - RNA, 20 nt, Human
cagaaaucaguaauauuuau

SEQ ID NO: 2472921 - RNA, 14 nt, Human
cagaaauccaucua

SEQ ID NO: 2472922 - RNA, 19 nt, Human
cagaaaucuagaagacugu

SEQ ID NO: 2472923 - RNA, 19 nt, Human
cagaaauacauauuuccaa

SEQ ID NO: 2472924 - RNA, 22 nt, Human
cagaaauaccaaaauuauuuca

SEQ ID NO: 2472925 - RNA, 23 nt, Human
cagaaauaccaaaauuauuucag

SEQ ID NO: 2472926 - RNA, 15 nt, Human
cagaaauaugugguu

SEQ ID NO: 2472927 - RNA, 16 nt, Human
cagaacagcuucaggu

SEQ ID NO: 2472928 - RNA, 15 nt, Human
cagaacagcuucagg

SEQ ID NO: 2472929 - RNA, 13 nt, Human
cagaacagcuuca

SEQ ID NO: 2472930 - RNA, 12 nt, Human
cagaacagcuuc

SEQ ID NO: 2472931 - RNA, 21 nt, Human
cagaaaugucuaaaugcugaa

SEQ ID NO: 2472932 - RNA, 12 nt, Human
cagaacagccgc

SEQ ID NO: 2472933 - RNA, 17 nt, Human
cagaacagccgcuccug

SEQ ID NO: 2472934 - RNA, 20 nt, Human
cagaacagccgcuccugucu

SEQ ID NO: 2472935 - RNA, 16 nt, Human
cagaaauguacagcaa

SEQ ID NO: 2472936 - RNA, 14 nt, Human
cagaaaugucuaaa

SEQ ID NO: 2472937 - RNA, 11 nt, Human
cagaaaugucu

SEQ ID NO: 2472938 - RNA, 23 nt, Human
cagaaaugcugccugccugucug

SEQ ID NO: 2472939 - RNA, 23 nt, Human
cagaaauguacaacuuuuuaccu

SEQ ID NO: 2472940 - RNA, 17 nt, Human
cagaaagggcaacaaua

SEQ ID NO: 2472941 - RNA, 12 nt, Human
cagaaaggagac

SEQ ID NO: 2472942 - RNA, 23 nt, Human
cagaaauacagauuuugauagca

SEQ ID NO: 2472943 - RNA, 16 nt, Human
cagaaauacauauuuc

SEQ ID NO: 2472944 - RNA, 13 nt, Human
cagaaauacauau

SEQ ID NO: 2472945 - RNA, 20 nt, Human
cagaaauacagauuuugaua

SEQ ID NO: 2472946 - RNA, 15 nt, Human
cagaaauacagauuu

SEQ ID NO: 2472947 - RNA, 23 nt, Human
cagaaaguggugcucaguuguag

SEQ ID NO: 2472948 - RNA, 16 nt, Human
cagaaagugugcuuua

SEQ ID NO: 2472949 - RNA, 17 nt, Human
cagaaagugugcuuuau

SEQ ID NO: 2472950 - RNA, 22 nt, Human
cagaaagugugcuuuaugcuga

SEQ ID NO: 2472951 - RNA, 23 nt, Human
cagaaagugugcuuuaugcugaa

SEQ ID NO: 2472952 - RNA, 20 nt, Human
cagaaauaaaguuggugaca

SEQ ID NO: 2472953 - RNA, 22 nt, Human
cagaaaguggugcucaguugua

SEQ ID NO: 2472954 - RNA, 21 nt, Human
cagaaaguggugcucaguugu

SEQ ID NO: 2472955 - RNA, 19 nt, Human
cagaaaguggugcucaguu

SEQ ID NO: 2472956 - RNA, 18 nt, Human
cagaaaguggugcucagu

SEQ ID NO: 2472957 - RNA, 22 nt, Human
cagaaaguggccaugccacccu

SEQ ID NO: 2472958 - RNA, 17 nt, Human
cagaaaguggugcucag

SEQ ID NO: 2472959 - RNA, 23 nt, Human
cagaaaguggccaugccacccug

SEQ ID NO: 2472960 - RNA, 21 nt, Human
cagaaagguucugcccgggaa

SEQ ID NO: 2472961 - RNA, 17 nt, Human
cagaaagguucugcccg

SEQ ID NO: 2472962 - RNA, 16 nt, Human
cagaaagguucugccc

SEQ ID NO: 2472963 - RNA, 15 nt, Human
cagaaagguucugcc

SEQ ID NO: 2472964 - RNA, 22 nt, Human
cagaaagggcaacaauaaaaua

SEQ ID NO: 2472965 - RNA, 20 nt, Human
cagaaagguuuucuucuuuu

SEQ ID NO: 2472966 - RNA, 22 nt, Human
cacuuuaauucucaugugaucc

SEQ ID NO: 2472967 - RNA, 20 nt, Human
cacuuuaauucucaugugau

SEQ ID NO: 2472968 - RNA, 20 nt, Human
cacuuuaauuaccaaccugu

SEQ ID NO: 2472969 - RNA, 22 nt, Human
cacuuuacaauguucaucccau

SEQ ID NO: 2472970 - RNA, 21 nt, Human
cacuuuacaauguucauccca

SEQ ID NO: 2472971 - RNA, 16 nt, Human
cacuuuagaugcugau

SEQ ID NO: 2472972 - RNA, 15 nt, Human
cacuuuagaugcuga

SEQ ID NO: 2472973 - RNA, 14 nt, Human
cacuuuagaugcug

SEQ ID NO: 2472974 - RNA, 21 nt, Human
cacuuuagaugcugaugauuu

SEQ ID NO: 2472975 - RNA, 15 nt, Human
cacuuuagggcugua

SEQ ID NO: 2472976 - RNA, 17 nt, Human
cacuuuagggcuguaaa

SEQ ID NO: 2472977 - RNA, 18 nt, Human
cacuuuagggcuguaaaa

SEQ ID NO: 2472978 - RNA, 23 nt, Human
cacuuuagggcuguaaaaugcau

SEQ ID NO: 2472979 - RNA, 19 nt, Human
cacuuucuacaaugugaac

SEQ ID NO: 2472980 - RNA, 23 nt, Human
cacuuucuacaaugugaacuuua

SEQ ID NO: 2472981 - RNA, 13 nt, Human
cacuuucuagcca

SEQ ID NO: 2472982 - RNA, 17 nt, Human
cacuuucuagccagagg

SEQ ID NO: 2472983 - RNA, 16 nt, Human
cacuuucuagccagag

SEQ ID NO: 2472984 - RNA, 22 nt, Human
cacuuguggguuuuuguuuugu

SEQ ID NO: 2472985 - RNA, 13 nt, Human
cacuugugugugg

SEQ ID NO: 2472986 - RNA, 13 nt, Human
cacuuaagacugu

SEQ ID NO: 2472987 - RNA, 13 nt, Human
cacuuaacagaug

SEQ ID NO: 2472988 - RNA, 22 nt, Human
cacuuaacaagcucccaggccg

SEQ ID NO: 2472989 - RNA, 17 nt, Human
cacuuaaggcacucugu

SEQ ID NO: 2472990 - RNA, 22 nt, Human
cacuuaagagaauauuuuaagu

SEQ ID NO: 2472991 - RNA, 20 nt, Human
cacuuaagagaauauuuuaa

SEQ ID NO: 2472992 - RNA, 17 nt, Human
cacuuaagagaauauuu

SEQ ID NO: 2472993 - RNA, 15 nt, Human
cacuuaagagaauau

SEQ ID NO: 2472994 - RNA, 13 nt, Human
cacuuaagagaau

SEQ ID NO: 2472995 - RNA, 21 nt, Human
cacuuaagacuguguauucua

SEQ ID NO: 2472996 - RNA, 23 nt, Human
cacuugugugugggcugugagug

SEQ ID NO: 2472997 - RNA, 14 nt, Human
cacuuguuguuuua

SEQ ID NO: 2472998 - RNA, 21 nt, Human
cacuugugugugggcugugag

SEQ ID NO: 2472999 - RNA, 22 nt, Human
cacuugugugugggcugugagu

SEQ ID NO: 2473000 - RNA, 19 nt, Human
cacuuguugauuaauggaa

SEQ ID NO: 2473001 - RNA, 14 nt, Human
cacuuguguguggg

SEQ ID NO: 2473002 - RNA, 15 nt, Human
cacuugugugugggc

SEQ ID NO: 2473003 - RNA, 17 nt, Human
cacuugugugugggcug

SEQ ID NO: 2473004 - RNA, 19 nt, Human
cacuugugugugggcugug

SEQ ID NO: 2473005 - RNA, 17 nt, Human
cacuuguguuuugcaag

SEQ ID NO: 2473006 - RNA, 18 nt, Human
cacuuguguuaugaagca

SEQ ID NO: 2473007 - RNA, 16 nt, Human
cacugccauaaaacau

SEQ ID NO: 2473008 - RNA, 21 nt, Human
cacugccaggccagccuccga

SEQ ID NO: 2473009 - RNA, 20 nt, Human
cacugccaggccagccuccg

SEQ ID NO: 2473010 - RNA, 19 nt, Human
cacugccaggccagccucc

SEQ ID NO: 2473011 - RNA, 18 nt, Human
cacugccaggccagccuc

SEQ ID NO: 2473012 - RNA, 17 nt, Human
cacugccaggccagccu

SEQ ID NO: 2473013 - RNA, 16 nt, Human
cacugccaggccagcc

SEQ ID NO: 2473014 - RNA, 14 nt, Human
cacugccaggccag

SEQ ID NO: 2473015 - RNA, 13 nt, Human
cacugccaggcca

SEQ ID NO: 2473016 - RNA, 20 nt, Human
cacugcaggcaucacagcua

SEQ ID NO: 2473017 - RNA, 12 nt, Human
cacugcaggcac

SEQ ID NO: 2473018 - RNA, 20 nt, Human
cacugccaucuuaguuugga

SEQ ID NO: 2473019 - RNA, 16 nt, Human
cacugccaucuuaguu

SEQ ID NO: 2473020 - RNA, 21 nt, Human
cacugccauaaaacauuaaga

SEQ ID NO: 2473021 - RNA, 17 nt, Human
cacugccauaaaacauu

SEQ ID NO: 2473022 - RNA, 14 nt, Human
cacugccauauacu

SEQ ID NO: 2473023 - RNA, 17 nt, Human
cacugccaugccagcuu

SEQ ID NO: 2473024 - RNA, 23 nt, Human
cacugcagccucaaccuccuggg

SEQ ID NO: 2473025 - RNA, 22 nt, Human
cacugcagccucaaccuccugg

SEQ ID NO: 2473026 - RNA, 21 nt, Human
cacugcagccucaaccuccug

SEQ ID NO: 2473027 - RNA, 20 nt, Human
cacugcagccucaaccuccu

SEQ ID NO: 2473028 - RNA, 14 nt, Human
cacugcagccucaa

SEQ ID NO: 2473029 - RNA, 19 nt, Human
cacugcagccucaaccucc

SEQ ID NO: 2473030 - RNA, 20 nt, Human
cacugguauuccugccucca

SEQ ID NO: 2473031 - RNA, 23 nt, Human
cacuguugcccaggcuggcgugc

SEQ ID NO: 2473032 - RNA, 19 nt, Human
cacuguugcccaggcuggc

SEQ ID NO: 2473033 - RNA, 18 nt, Human
cacuguugcccaggcugg

SEQ ID NO: 2473034 - RNA, 19 nt, Human
cacugguauuccugccucc

SEQ ID NO: 2473035 - RNA, 15 nt, Human
cacuuaaaaaugguu

SEQ ID NO: 2473036 - RNA, 14 nt, Human
cacuuaaaaaaugu

SEQ ID NO: 2473037 - RNA, 16 nt, Human
cacuuaaaaaaugucc

SEQ ID NO: 2473038 - RNA, 18 nt, Human
cacuggggugccgccugc

SEQ ID NO: 2473039 - RNA, 15 nt, Human
cacuggggugccgcc

SEQ ID NO: 2473040 - RNA, 13 nt, Human
cacuggggugccg

SEQ ID NO: 2473041 - RNA, 22 nt, Human
cacugggaugagccgcugugag

SEQ ID NO: 2473042 - RNA, 20 nt, Human
cacugggguccuggggccuc

SEQ ID NO: 2473043 - RNA, 21 nt, Human
cacuggggugccgccugcccg

SEQ ID NO: 2473044 - RNA, 20 nt, Human
cacuggggugccgccugccc

SEQ ID NO: 2473045 - RNA, 22 nt, Human
cacugggugcccaagcucagaa

SEQ ID NO: 2473046 - RNA, 15 nt, Human
cacugggugggguga

SEQ ID NO: 2473047 - RNA, 18 nt, Human
cacuggguggggugagga

SEQ ID NO: 2473048 - RNA, 19 nt, Human
cacuggguggggugaggac

SEQ ID NO: 2473049 - RNA, 21 nt, Human
cacuggguggggugaggacca

SEQ ID NO: 2473050 - RNA, 23 nt, Human
cacuggguggggugaggaccacu

SEQ ID NO: 2473051 - RNA, 17 nt, Human
cacugguauuccugccu

SEQ ID NO: 2473052 - RNA, 16 nt, Human
cacugguauuccugcc

SEQ ID NO: 2473053 - RNA, 20 nt, Human
cacugguagaccaaaauaaa

SEQ ID NO: 2473054 - RNA, 15 nt, Human
cacuggguugacuuu

SEQ ID NO: 2473055 - RNA, 13 nt, Human
cacugggcuucua

SEQ ID NO: 2473056 - RNA, 23 nt, Human
cacugggaugagccgcugugagc

SEQ ID NO: 2473057 - RNA, 20 nt, Human
cacugggaugagccgcugug

SEQ ID NO: 2473058 - RNA, 19 nt, Human
cacugggagaaaugaaaaa

SEQ ID NO: 2473059 - RNA, 16 nt, Human
cacugggagaggugcc

SEQ ID NO: 2473060 - RNA, 19 nt, Human
cacugccaugcagggccuc

SEQ ID NO: 2473061 - RNA, 17 nt, Human
cacugccaugcagggcc

SEQ ID NO: 2473062 - RNA, 22 nt, Human
cacugccaucuuaguuuggauu

SEQ ID NO: 2473063 - RNA, 23 nt, Human
cacugggagaggugccagcaacu

SEQ ID NO: 2473064 - RNA, 20 nt, Human
cacugggagaggugccagca

SEQ ID NO: 2473065 - RNA, 20 nt, Human
cacucuguuauuuagacuca

SEQ ID NO: 2473066 - RNA, 22 nt, Human
cacucuuauugcccacgcugga

SEQ ID NO: 2473067 - RNA, 21 nt, Human
cacucuuauugcccacgcugg

SEQ ID NO: 2473068 - RNA, 20 nt, Human
cacucuuauugcccacgcug

SEQ ID NO: 2473069 - RNA, 16 nt, Human
cacucuuaagcuuccg

SEQ ID NO: 2473070 - RNA, 13 nt, Human
cacggccaggcca

SEQ ID NO: 2473071 - RNA, 12 nt, Human
cacggccaggcc

SEQ ID NO: 2473072 - RNA, 17 nt, Human
cacggccaggccagagg

SEQ ID NO: 2473073 - RNA, 19 nt, Human
cacggccgcuccaggggug

SEQ ID NO: 2473074 - RNA, 17 nt, Human
cacggccgcuccagggg

SEQ ID NO: 2473075 - RNA, 16 nt, Human
cacggccgcuccaggg

SEQ ID NO: 2473076 - RNA, 15 nt, Human
cacggccgcuccagg

SEQ ID NO: 2473077 - RNA, 14 nt, Human
cacggccacuggcc

SEQ ID NO: 2473078 - RNA, 14 nt, Human
cacggccgcuccag

SEQ ID NO: 2473079 - RNA, 14 nt, Human
cacggcucacugca

SEQ ID NO: 2473080 - RNA, 15 nt, Human
cacggcucacugcag

SEQ ID NO: 2473081 - RNA, 15 nt, Human
cacuacaccuggcug

SEQ ID NO: 2473082 - RNA, 23 nt, Human
cacuacaccuggcugagguuccu

SEQ ID NO: 2473083 - RNA, 16 nt, Human
cacuacacuccagccu

SEQ ID NO: 2473084 - RNA, 17 nt, Human
cacuacacuccagccug

SEQ ID NO: 2473085 - RNA, 18 nt, Human
cacuacacuccagccuga

SEQ ID NO: 2473086 - RNA, 19 nt, Human
cacuacacuccagccugag

SEQ ID NO: 2473087 - RNA, 13 nt, Human
cacggccacauca

SEQ ID NO: 2473088 - RNA, 19 nt, Human
cacggccacaucaaagagg

SEQ ID NO: 2473089 - RNA, 21 nt, Human
cacggcaggacaacgaggaag

SEQ ID NO: 2473090 - RNA, 17 nt, Human
cacggccaacaaagcug

SEQ ID NO: 2473091 - RNA, 15 nt, Human
cacggccaacaaagc

SEQ ID NO: 2473092 - RNA, 22 nt, Human
cacggcaggacaacgaggaagc

SEQ ID NO: 2473093 - RNA, 23 nt, Human
cacggcaggacaacgaggaagcc

SEQ ID NO: 2473094 - RNA, 16 nt, Human
cacuacauucuguuaa

SEQ ID NO: 2473095 - RNA, 17 nt, Human
cacuacauucuguuaau

SEQ ID NO: 2473096 - RNA, 21 nt, Human
cacuacaugcagcccaugccc

SEQ ID NO: 2473097 - RNA, 23 nt, Human
cacuacaugcagcccaugcccac

SEQ ID NO: 2473098 - RNA, 20 nt, Human
cacuacacuccagccugagc

SEQ ID NO: 2473099 - RNA, 21 nt, Human
cacuacacuccagccugagca

SEQ ID NO: 2473100 - RNA, 17 nt, Human
cacuacauaaacugacu

SEQ ID NO: 2473101 - RNA, 14 nt, Human
cacuacauaaacug

SEQ ID NO: 2473102 - RNA, 15 nt, Human
cacuacaugcagccc

SEQ ID NO: 2473103 - RNA, 21 nt, Human
cacuacauucuguuaaucauu

SEQ ID NO: 2473104 - RNA, 19 nt, Human
cacuacaugugguuuauag

SEQ ID NO: 2473105 - RNA, 19 nt, Human
cacuacauaaacugacuuu

SEQ ID NO: 2473106 - RNA, 20 nt, Human
cacuacaugugguuuauaga

SEQ ID NO: 2473107 - RNA, 21 nt, Human
cacuaccacgccaagcuaauu

SEQ ID NO: 2473108 - RNA, 12 nt, Human
cacuccagccug

SEQ ID NO: 2473109 - RNA, 13 nt, Human
cacuccagccuga

SEQ ID NO: 2473110 - RNA, 13 nt, Human
cacuccagccugg

SEQ ID NO: 2473111 - RNA, 14 nt, Human
cacuccagccuggg

SEQ ID NO: 2473112 - RNA, 23 nt, Human
cacuccagccugagcgacaguga

SEQ ID NO: 2473113 - RNA, 14 nt, Human
cacuccagccugag

SEQ ID NO: 2473114 - RNA, 15 nt, Human
cacuccagccugagc

SEQ ID NO: 2473115 - RNA, 21 nt, Human
cacuccagccugagcaacaga

SEQ ID NO: 2473116 - RNA, 16 nt, Human
cacucugugcccaugg

SEQ ID NO: 2473117 - RNA, 14 nt, Human
cacucugugcccau

SEQ ID NO: 2473118 - RNA, 13 nt, Human
cacucugugccca

SEQ ID NO: 2473119 - RNA, 12 nt, Human
cacucugugccc

SEQ ID NO: 2473120 - RNA, 20 nt, Human
cacucugucgcccagucugg

SEQ ID NO: 2473121 - RNA, 21 nt, Human
cacuccagccugggcgacaga

SEQ ID NO: 2473122 - RNA, 15 nt, Human
cacuccagccugggc

SEQ ID NO: 2473123 - RNA, 16 nt, Human
cacuccagccugggcg

SEQ ID NO: 2473124 - RNA, 21 nt, Human
cacucugugcccaugggcacu

SEQ ID NO: 2473125 - RNA, 18 nt, Human
cacucugugcccaugggc

SEQ ID NO: 2473126 - RNA, 13 nt, Human
cacucuguuauuu

SEQ ID NO: 2473127 - RNA, 17 nt, Human
cacucuguuauuuagac

SEQ ID NO: 2473128 - RNA, 12 nt, Human
caccuacugagu

SEQ ID NO: 2473129 - RNA, 16 nt, Human
caccucaccccacuua

SEQ ID NO: 2473130 - RNA, 14 nt, Human
caccucaccccacu

SEQ ID NO: 2473131 - RNA, 11 nt, Human
caccucacccc

SEQ ID NO: 2473132 - RNA, 21 nt, Human
caccucacugaaaacaucugg

SEQ ID NO: 2473133 - RNA, 15 nt, Human
caccucacuccuguu

SEQ ID NO: 2473134 - RNA, 14 nt, Human
caccucacuccugu

SEQ ID NO: 2473135 - RNA, 13 nt, Human
caccucacuccug

SEQ ID NO: 2473136 - RNA, 12 nt, Human
caccucagccuc

SEQ ID NO: 2473137 - RNA, 22 nt, Human
caccucagaguauggagcucag

SEQ ID NO: 2473138 - RNA, 19 nt, Human
caccucagaguauggagcu

SEQ ID NO: 2473139 - RNA, 20 nt, Human
caccucagagacauacaccu

SEQ ID NO: 2473140 - RNA, 19 nt, Human
caccucagaggcuguucuu

SEQ ID NO: 2473141 - RNA, 22 nt, Human
caccuacuuuucuuuccucaga

SEQ ID NO: 2473142 - RNA, 14 nt, Human
caccuagcagcacc

SEQ ID NO: 2473143 - RNA, 16 nt, Human
caccuagaauuggcug

SEQ ID NO: 2473144 - RNA, 16 nt, Human
caccuagcuuuauucu

SEQ ID NO: 2473145 - RNA, 16 nt, Human
caccuaggccacuccu

SEQ ID NO: 2473146 - RNA, 17 nt, Human
caccuaggccacuccuc

SEQ ID NO: 2473147 - RNA, 18 nt, Human
caccuaggccacuccucc

SEQ ID NO: 2473148 - RNA, 19 nt, Human
caccuaggccacuccucca

SEQ ID NO: 2473149 - RNA, 16 nt, Human
caccuuggcugcaggg

SEQ ID NO: 2473150 - RNA, 15 nt, Human
caccuuggcugcagg

SEQ ID NO: 2473151 - RNA, 23 nt, Human
caccuuuauucuggcagaggagg

SEQ ID NO: 2473152 - RNA, 21 nt, Human
caccugcccccugguggacag

SEQ ID NO: 2473153 - RNA, 13 nt, Human
caccugcccccuu

SEQ ID NO: 2473154 - RNA, 18 nt, Human
caccuuggcugcagggag

SEQ ID NO: 2473155 - RNA, 13 nt, Human
caccugcccaacc

SEQ ID NO: 2473156 - RNA, 19 nt, Human
caccugcccaaccugcucu

SEQ ID NO: 2473157 - RNA, 18 nt, Human
caccugcccaaccugcuc

SEQ ID NO: 2473158 - RNA, 15 nt, Human
caccugccccaacuc

SEQ ID NO: 2473159 - RNA, 16 nt, Human
caccugccccaacucu

SEQ ID NO: 2473160 - RNA, 14 nt, Human
caccugcccccugg

SEQ ID NO: 2473161 - RNA, 15 nt, Human
caccugcccccuggu

SEQ ID NO: 2473162 - RNA, 11 nt, Human
caccucagccu

SEQ ID NO: 2473163 - RNA, 13 nt, Human
caccugcccagau

SEQ ID NO: 2473164 - RNA, 22 nt, Human
caccugccauuugcacccuccg

SEQ ID NO: 2473165 - RNA, 18 nt, Human
caccugcccaucacaggg

SEQ ID NO: 2473166 - RNA, 22 nt, Human
caccugcccaucacaggguugg

SEQ ID NO: 2473167 - RNA, 16 nt, Human
cacgaaauguuauuuu

SEQ ID NO: 2473168 - RNA, 15 nt, Human
cacgaaauguuauuu

SEQ ID NO: 2473169 - RNA, 17 nt, Human
caccuuuuuuaaggaaa

SEQ ID NO: 2473170 - RNA, 13 nt, Human
cacgaaauguuau

SEQ ID NO: 2473171 - RNA, 21 nt, Human
caccuuuuucauacaaggccc

SEQ ID NO: 2473172 - RNA, 19 nt, Human
caccuuuuucauacaaggc

SEQ ID NO: 2473173 - RNA, 20 nt, Human
caccuuuucagcgauguaug

SEQ ID NO: 2473174 - RNA, 20 nt, Human
caccuuuugggaauguuuua

SEQ ID NO: 2473175 - RNA, 18 nt, Human
caccuuuuaacucaccuc

SEQ ID NO: 2473176 - RNA, 14 nt, Human
caccuuucccaucu

SEQ ID NO: 2473177 - RNA, 22 nt, Human
caccuuucagauaacuguuauu

SEQ ID NO: 2473178 - RNA, 21 nt, Human
caccuuucagauaacuguuau

SEQ ID NO: 2473179 - RNA, 20 nt, Human
caccuugggaugaugccuca

SEQ ID NO: 2473180 - RNA, 14 nt, Human
caccuuuauucugg

SEQ ID NO: 2473181 - RNA, 19 nt, Human
caccuugggaugaugccuc

SEQ ID NO: 2473182 - RNA, 22 nt, Human
caccuuucauaaucuuugcuuu

SEQ ID NO: 2473183 - RNA, 16 nt, Human
caccuuucuccuuugu

SEQ ID NO: 2473184 - RNA, 23 nt, Human
caccuuugugggguuuuuggaga

SEQ ID NO: 2473185 - RNA, 13 nt, Human
caauaaaauagca

SEQ ID NO: 2473186 - RNA, 13 nt, Human
caauaaaaucaug

SEQ ID NO: 2473187 - RNA, 20 nt, Human
caauaaaaucuugaaaaugc

SEQ ID NO: 2473188 - RNA, 14 nt, Human
caauaaaaucaugu

SEQ ID NO: 2473189 - RNA, 15 nt, Human
caauaaaaucaugua

SEQ ID NO: 2473190 - RNA, 20 nt, Human
caauaaaaucauguacauuu

SEQ ID NO: 2473191 - RNA, 15 nt, Human
caauaaaaugugauu

SEQ ID NO: 2473192 - RNA, 16 nt, Human
caauaaaaugugauuu

SEQ ID NO: 2473193 - RNA, 20 nt, Human
caauaaaaugugauuuuucu

SEQ ID NO: 2473194 - RNA, 21 nt, Human
caauaaaaugugauuuuucug

SEQ ID NO: 2473195 - RNA, 22 nt, Human
caauaaaaugugauuuuucuga

SEQ ID NO: 2473196 - RNA, 23 nt, Human
caauaaaauccauacauuugugu

SEQ ID NO: 2473197 - RNA, 20 nt, Human
caauaaaauccauacauuug

SEQ ID NO: 2473198 - RNA, 14 nt, Human
caauaaaacauuaa

SEQ ID NO: 2473199 - RNA, 20 nt, Human
caauaaaaauguuuaacggu

SEQ ID NO: 2473200 - RNA, 15 nt, Human
caauaaaacauuaau

SEQ ID NO: 2473201 - RNA, 20 nt, Human
caauaaaagcaauuccaacc

SEQ ID NO: 2473202 - RNA, 17 nt, Human
caauaaaaauguuuaac

SEQ ID NO: 2473203 - RNA, 22 nt, Human
caauaaaagcaauuccaaccuu

SEQ ID NO: 2473204 - RNA, 17 nt, Human
caaguuuguaucaggug

SEQ ID NO: 2473205 - RNA, 22 nt, Human
caaguuuuaggacaaacagcuc

SEQ ID NO: 2473206 - RNA, 23 nt, Human
caaguuucuagcuagaaauauga

SEQ ID NO: 2473207 - RNA, 22 nt, Human
caaguuucuagcuagaaauaug

SEQ ID NO: 2473208 - RNA, 20 nt, Human
caaguuuacucaacccucuc

SEQ ID NO: 2473209 - RNA, 23 nt, Human
caaguuguuugagaaauuaagua

SEQ ID NO: 2473210 - RNA, 13 nt, Human
caagucauggcug

SEQ ID NO: 2473211 - RNA, 17 nt, Human
caaguuguuugagaaau

SEQ ID NO: 2473212 - RNA, 21 nt, Human
caaguuguuugagaaauuaag

SEQ ID NO: 2473213 - RNA, 13 nt, Human
caaguuguuugag

SEQ ID NO: 2473214 - RNA, 16 nt, Human
caaguuguuucauuga

SEQ ID NO: 2473215 - RNA, 14 nt, Human
caaggccuucuccu

SEQ ID NO: 2473216 - RNA, 18 nt, Human
caaggccuuucugugugu

SEQ ID NO: 2473217 - RNA, 15 nt, Human
caaggccuuucugug

SEQ ID NO: 2473218 - RNA, 13 nt, Human
caaggcggccccu

SEQ ID NO: 2473219 - RNA, 15 nt, Human
caaggcucugagcaa

SEQ ID NO: 2473220 - RNA, 22 nt, Human
caaggcguccgcgcgccagcac

SEQ ID NO: 2473221 - RNA, 19 nt, Human
caaggcguccgcgcgccag

SEQ ID NO: 2473222 - RNA, 19 nt, Human
caaggcuagaucaugaaga

SEQ ID NO: 2473223 - RNA, 16 nt, Human
caaggcggccccuccc

SEQ ID NO: 2473224 - RNA, 15 nt, Human
caaggcggccccucc

SEQ ID NO: 2473225 - RNA, 14 nt, Human
caaggcggccccuc

SEQ ID NO: 2473226 - RNA, 19 nt, Human
caaggcgggagcaucucuu

SEQ ID NO: 2473227 - RNA, 20 nt, Human
caagucauagguuaauauuu

SEQ ID NO: 2473228 - RNA, 23 nt, Human
caagucaguccaggaugcuaaca

SEQ ID NO: 2473229 - RNA, 14 nt, Human
caagucauggcugu

SEQ ID NO: 2473230 - RNA, 12 nt, Human
caagucauggcu

SEQ ID NO: 2473231 - RNA, 16 nt, Human
caagucaugugcauuu

SEQ ID NO: 2473232 - RNA, 13 nt, Human
caagucaugugca

SEQ ID NO: 2473233 - RNA, 19 nt, Human
caagucaggcccuuauuuu

SEQ ID NO: 2473234 - RNA, 20 nt, Human
caagucagcuuugccuucca

SEQ ID NO: 2473235 - RNA, 23 nt, Human
caagucagaggauggccaguguc

SEQ ID NO: 2473236 - RNA, 22 nt, Human
caagucagaggauggccagugu

SEQ ID NO: 2473237 - RNA, 19 nt, Human
caagucagcuuugccuucc

SEQ ID NO: 2473238 - RNA, 21 nt, Human
caagucagaggauggccagug

SEQ ID NO: 2473239 - RNA, 19 nt, Human
caagucagaggauggccag

SEQ ID NO: 2473240 - RNA, 15 nt, Human
caagucagaggaugg

SEQ ID NO: 2473241 - RNA, 14 nt, Human
caagucagaggaug

SEQ ID NO: 2473242 - RNA, 16 nt, Human
caaggcgugaggaugg

SEQ ID NO: 2473243 - RNA, 18 nt, Human
caaggcugaccaagagag

SEQ ID NO: 2473244 - RNA, 14 nt, Human
caagucacucccaa

SEQ ID NO: 2473245 - RNA, 19 nt, Human
caaggcugaccaagagaga

SEQ ID NO: 2473246 - RNA, 20 nt, Human
caaggccaaaggaagcacau

SEQ ID NO: 2473247 - RNA, 19 nt, Human
caaggccaaaggaagcaca

SEQ ID NO: 2473248 - RNA, 21 nt, Human
caaggccaaaggaagcacaug

SEQ ID NO: 2473249 - RNA, 14 nt, Human
caaggccagagugg

SEQ ID NO: 2473250 - RNA, 19 nt, Human
caaggccgaagcucuggcu

SEQ ID NO: 2473251 - RNA, 17 nt, Human
caaggccgaagcucugg

SEQ ID NO: 2473252 - RNA, 16 nt, Human
caaggccgaagcucug

SEQ ID NO: 2473253 - RNA, 21 nt, Human
caaggccgaagcucuggcuga

SEQ ID NO: 2473254 - RNA, 20 nt, Human
caaggccgaagcucuggcug

SEQ ID NO: 2473255 - RNA, 23 nt, Human
caaggccgaagcucuggcugaac

SEQ ID NO: 2473256 - RNA, 19 nt, Human
caaggccgcuguucaccca

SEQ ID NO: 2473257 - RNA, 18 nt, Human
caaggccucccacaguga

SEQ ID NO: 2473258 - RNA, 17 nt, Human
caaggccucccacagug

SEQ ID NO: 2473259 - RNA, 16 nt, Human
caaggccucccacagu

SEQ ID NO: 2473260 - RNA, 15 nt, Human
caaggccucccacag

SEQ ID NO: 2473261 - RNA, 14 nt, Human
caaggccucccaca

SEQ ID NO: 2473262 - RNA, 13 nt, Human
caaggccucccac

SEQ ID NO: 2473263 - RNA, 20 nt, Human
caaggccgcuguucacccac

SEQ ID NO: 2473264 - RNA, 22 nt, Human
caaggccgcuguucacccacag

SEQ ID NO: 2473265 - RNA, 18 nt, Human
caagauuuuaaagacaug

SEQ ID NO: 2473266 - RNA, 16 nt, Human
caaggcaaggcuguca

SEQ ID NO: 2473267 - RNA, 17 nt, Human
caaggcaaggcugucaa

SEQ ID NO: 2473268 - RNA, 18 nt, Human
caaggcaaggcugucaau

SEQ ID NO: 2473269 - RNA, 19 nt, Human
caaggcaccugcagguugg

SEQ ID NO: 2473270 - RNA, 15 nt, Human
caaggcaccugcagg

SEQ ID NO: 2473271 - RNA, 17 nt, Human
caagauuuuccacaaga

SEQ ID NO: 2473272 - RNA, 13 nt, Human
caaggcaccugca

SEQ ID NO: 2473273 - RNA, 19 nt, Human
caagauguccuccuuguuc

SEQ ID NO: 2473274 - RNA, 21 nt, Human
caagauguccuccuuguucua

SEQ ID NO: 2473275 - RNA, 17 nt, Human
caagauucugaaacauu

SEQ ID NO: 2473276 - RNA, 13 nt, Human
caagauugcuuaa

SEQ ID NO: 2473277 - RNA, 21 nt, Human
caagauugcuuaaaauagcaa

SEQ ID NO: 2473278 - RNA, 16 nt, Human
caagauugcuuaaaau

SEQ ID NO: 2473279 - RNA, 18 nt, Human
caagauugcuuaaaauag

SEQ ID NO: 2473280 - RNA, 12 nt, Human
caagauuucaga

SEQ ID NO: 2473281 - RNA, 21 nt, Human
cacaagcuccaagcucccagg

SEQ ID NO: 2473282 - RNA, 20 nt, Human
cacaagcuccaagcucccag

SEQ ID NO: 2473283 - RNA, 14 nt, Human
cacaagauucccag

SEQ ID NO: 2473284 - RNA, 19 nt, Human
cacaagcuccaagcuccca

SEQ ID NO: 2473285 - RNA, 18 nt, Human
cacaagcuccaagcuccc

SEQ ID NO: 2473286 - RNA, 15 nt, Human
caauuucuccccagg

SEQ ID NO: 2473287 - RNA, 20 nt, Human
caauuucuguguugccaagc

SEQ ID NO: 2473288 - RNA, 17 nt, Human
cacaagagcccaggccu

SEQ ID NO: 2473289 - RNA, 20 nt, Human
cacaagagcccaggccuccu

SEQ ID NO: 2473290 - RNA, 14 nt, Human
caauuucuccccag

SEQ ID NO: 2473291 - RNA, 13 nt, Human
caauuucucccca

SEQ ID NO: 2473292 - RNA, 12 nt, Human
caauuucucccc

SEQ ID NO: 2473293 - RNA, 15 nt, Human
caauuucuguguugc

SEQ ID NO: 2473294 - RNA, 22 nt, Human
caauuucuguccuucagaugga

SEQ ID NO: 2473295 - RNA, 20 nt, Human
caauuucuacaaaauccuga

SEQ ID NO: 2473296 - RNA, 16 nt, Human
caauuucuacuuugaa

SEQ ID NO: 2473297 - RNA, 20 nt, Human
caauuucuacuuugaaguca

SEQ ID NO: 2473298 - RNA, 21 nt, Human
caauuucuacuuugaagucau

SEQ ID NO: 2473299 - RNA, 19 nt, Human
cacaagagcccaggccucc

SEQ ID NO: 2473300 - RNA, 18 nt, Human
cacaagagcccaggccuc

SEQ ID NO: 2473301 - RNA, 19 nt, Human
caauugacugucacuguuc

SEQ ID NO: 2473302 - RNA, 19 nt, Human
caauugauuuuaaaccaua

SEQ ID NO: 2473303 - RNA, 14 nt, Human
caauugcaucuccc

SEQ ID NO: 2473304 - RNA, 15 nt, Human
caauugcaucuccca

SEQ ID NO: 2473305 - RNA, 17 nt, Human
caauugcaucucccaga

SEQ ID NO: 2473306 - RNA, 20 nt, Human
caauuuccuuuauauuuagu

SEQ ID NO: 2473307 - RNA, 19 nt, Human
caauuuccuuuauauuuag

SEQ ID NO: 2473308 - RNA, 21 nt, Human
caauuuccuuuauauuuagug

SEQ ID NO: 2473309 - RNA, 15 nt, Human
caauuuccuuuauau

SEQ ID NO: 2473310 - RNA, 16 nt, Human
caauuuccuuuauauu

SEQ ID NO: 2473311 - RNA, 17 nt, Human
caauuuccaagagcuga

SEQ ID NO: 2473312 - RNA, 15 nt, Human
caauugaauggucag

SEQ ID NO: 2473313 - RNA, 21 nt, Human
caauugaauuaaauuaggaau

SEQ ID NO: 2473314 - RNA, 21 nt, Human
caauugaacuuaaauaaaugu

SEQ ID NO: 2473315 - RNA, 21 nt, Human
caaugggaaauacuacuccug

SEQ ID NO: 2473316 - RNA, 15 nt, Human
caauggcuuuuuaaa

SEQ ID NO: 2473317 - RNA, 18 nt, Human
caauggcuuacuccagga

SEQ ID NO: 2473318 - RNA, 15 nt, Human
caaugggagcucaug

SEQ ID NO: 2473319 - RNA, 23 nt, Human
caauggcuaauucccagagugug

SEQ ID NO: 2473320 - RNA, 19 nt, Human
caauggcuaauucccagag

SEQ ID NO: 2473321 - RNA, 18 nt, Human
caauggcuaauucccaga

SEQ ID NO: 2473322 - RNA, 17 nt, Human
caauggcuaauucccag

SEQ ID NO: 2473323 - RNA, 22 nt, Human
caauggcugcugaagcugccug

SEQ ID NO: 2473324 - RNA, 14 nt, Human
caauggcugcugaa

SEQ ID NO: 2473325 - RNA, 22 nt, Human
caauggcuauauggcaagaaag

SEQ ID NO: 2473326 - RNA, 20 nt, Human
caauccuaauuucuccuccc

SEQ ID NO: 2473327 - RNA, 16 nt, Human
caauggcagccuuggc

SEQ ID NO: 2473328 - RNA, 16 nt, Human
caauggcuaauuccca

SEQ ID NO: 2473329 - RNA, 21 nt, Human
caauggcgcagugccucuggu

SEQ ID NO: 2473330 - RNA, 20 nt, Human
caauggcgcagugccucugg

SEQ ID NO: 2473331 - RNA, 19 nt, Human
caauggcgcagugccucug

SEQ ID NO: 2473332 - RNA, 19 nt, Human
caauccuaauuucuccucc

SEQ ID NO: 2473333 - RNA, 18 nt, Human
caauggcgcagugccucu

SEQ ID NO: 2473334 - RNA, 16 nt, Human
caauggcgcagugccu

SEQ ID NO: 2473335 - RNA, 21 nt, Human
caaugcuggcuguuggcuggg

SEQ ID NO: 2473336 - RNA, 20 nt, Human
caaugcuggcuguuggcugg

SEQ ID NO: 2473337 - RNA, 13 nt, Human
caaugcuggcugu

SEQ ID NO: 2473338 - RNA, 20 nt, Human
caaucccuuuauuacccccu

SEQ ID NO: 2473339 - RNA, 17 nt, Human
caauccuaacacauuau

SEQ ID NO: 2473340 - RNA, 22 nt, Human
caauccuaacacauuaucggga

SEQ ID NO: 2473341 - RNA, 20 nt, Human
caauccccuccuugggcacu

SEQ ID NO: 2473342 - RNA, 16 nt, Human
caauccccuccuuggg

SEQ ID NO: 2473343 - RNA, 14 nt, Human
caauccccuccuug

SEQ ID NO: 2473344 - RNA, 12 nt, Human
caauccccuccu

SEQ ID NO: 2473345 - RNA, 22 nt, Human
caauccauguuaguuuuuacuu

SEQ ID NO: 2473346 - RNA, 15 nt, Human
caauccccucauuca

SEQ ID NO: 2473347 - RNA, 21 nt, Human
caauccccucauucaggaaaa

SEQ ID NO: 2473348 - RNA, 22 nt, Human
caauccccucauucaggaaaac

SEQ ID NO: 2473349 - RNA, 23 nt, Human
caaucccaccaacccucagagcc

SEQ ID NO: 2473350 - RNA, 12 nt, Human
caaucccagcua

SEQ ID NO: 2473351 - RNA, 17 nt, Human
caaucccagcuaccuca

SEQ ID NO: 2473352 - RNA, 22 nt, Human
caaucccaccaacccucagagc

SEQ ID NO: 2473353 - RNA, 17 nt, Human
caaucccaccaacccuc

SEQ ID NO: 2473354 - RNA, 16 nt, Human
caaucccaccaacccu

SEQ ID NO: 2473355 - RNA, 17 nt, Human
caauccauguaagguau

SEQ ID NO: 2473356 - RNA, 21 nt, Human
caauccauguuaguuuuuacu

SEQ ID NO: 2473357 - RNA, 23 nt, Human
caauccauguuaguuuuuacuuu

SEQ ID NO: 2473358 - RNA, 23 nt, Human
caaucauuguacaguuuguuuac

SEQ ID NO: 2473359 - RNA, 21 nt, Human
caaucauuguacaguuuguuu

SEQ ID NO: 2473360 - RNA, 20 nt, Human
caaucauuguacaguuuguu

SEQ ID NO: 2473361 - RNA, 17 nt, Human
caaucauuuuaauuauu

SEQ ID NO: 2473362 - RNA, 22 nt, Human
caaucauuguacaguuuguuua

SEQ ID NO: 2473363 - RNA, 15 nt, Human
caauccauguaaggu

SEQ ID NO: 2473364 - RNA, 15 nt, Human
caauccaagagucug

SEQ ID NO: 2473365 - RNA, 21 nt, Human
caaucaguccccucccaucug

SEQ ID NO: 2473366 - RNA, 20 nt, Human
caaucaguccccucccaucu

SEQ ID NO: 2473367 - RNA, 17 nt, Human
caaucaguccccuccca

SEQ ID NO: 2473368 - RNA, 16 nt, Human
caaucaguccccuccc

SEQ ID NO: 2473369 - RNA, 15 nt, Human
caaucaguccccucc

SEQ ID NO: 2473370 - RNA, 14 nt, Human
caaucaguccccuc

SEQ ID NO: 2473371 - RNA, 19 nt, Human
caaucaguauaauucugua

SEQ ID NO: 2473372 - RNA, 16 nt, Human
caaucaguauaauucu

SEQ ID NO: 2473373 - RNA, 15 nt, Human
caaucaguauaauuc

SEQ ID NO: 2473374 - RNA, 15 nt, Human
caaucauuguacagu

SEQ ID NO: 2473375 - RNA, 14 nt, Human
caaucauuguacag

SEQ ID NO: 2473376 - RNA, 13 nt, Human
caaucauuguaca

SEQ ID NO: 2473377 - RNA, 21 nt, Human
caaucauugcugaaaauggua

SEQ ID NO: 2473378 - RNA, 18 nt, Human
caaucauugcugaaaaug

SEQ ID NO: 2473379 - RNA, 16 nt, Human
caaucauugcugaaaa

SEQ ID NO: 2473380 - RNA, 15 nt, Human
caaucauugcugaaa

SEQ ID NO: 2473381 - RNA, 20 nt, Human
caaucaucugugugaaaaug

SEQ ID NO: 2473382 - RNA, 19 nt, Human
caaucaucugugugaaaau

SEQ ID NO: 2473383 - RNA, 17 nt, Human
caaucaucugugugaaa

SEQ ID NO: 2473384 - RNA, 17 nt, Human
caaucaugaaauaugca

SEQ ID NO: 2473385 - RNA, 22 nt, Human
caaucaguccccucccaucugg

SEQ ID NO: 2473386 - RNA, 15 nt, Human
caaucaucuguguga

SEQ ID NO: 2473387 - RNA, 22 nt, Human
cacaucuaagccugaaggggcg

SEQ ID NO: 2473388 - RNA, 16 nt, Human
cacaucugugucuugu

SEQ ID NO: 2473389 - RNA, 17 nt, Human
cacaucugugucuuguu

SEQ ID NO: 2473390 - RNA, 18 nt, Human
cacaucugugucuuguuu

SEQ ID NO: 2473391 - RNA, 23 nt, Human
cacaucugugucuuguuuggaau

SEQ ID NO: 2473392 - RNA, 17 nt, Human
cacauuuuauuuuauua

SEQ ID NO: 2473393 - RNA, 12 nt, Human
cacaucuguguc

SEQ ID NO: 2473394 - RNA, 12 nt, Human
cacaucugccuu

SEQ ID NO: 2473395 - RNA, 11 nt, Human
cacaucucugc

SEQ ID NO: 2473396 - RNA, 13 nt, Human
cacaucugcauuu

SEQ ID NO: 2473397 - RNA, 21 nt, Human
cacaucugcauuuucacccca

SEQ ID NO: 2473398 - RNA, 13 nt, Human
cacaucucuaucu

SEQ ID NO: 2473399 - RNA, 22 nt, Human
cacaucuccuccauacucagga

SEQ ID NO: 2473400 - RNA, 19 nt, Human
cacauuuuauuuuauuaug

SEQ ID NO: 2473401 - RNA, 20 nt, Human
cacauuuuauuuuauuaugc

SEQ ID NO: 2473402 - RNA, 21 nt, Human
cacauuuuauuuuauuaugca

SEQ ID NO: 2473403 - RNA, 12 nt, Human
caccaaaauaag

SEQ ID NO: 2473404 - RNA, 17 nt, Human
caccaaaauaagaaaag

SEQ ID NO: 2473405 - RNA, 12 nt, Human
cacaucuucccu

SEQ ID NO: 2473406 - RNA, 15 nt, Human
caccaaaguauuuuu

SEQ ID NO: 2473407 - RNA, 13 nt, Human
caccaaaggccag

SEQ ID NO: 2473408 - RNA, 16 nt, Human
caccaaacauacuaga

SEQ ID NO: 2473409 - RNA, 13 nt, Human
cacaucugccuua

SEQ ID NO: 2473410 - RNA, 18 nt, Human
caccaaaauaagaaaaga

SEQ ID NO: 2473411 - RNA, 19 nt, Human
caccaaaauaagaaaagau

SEQ ID NO: 2473412 - RNA, 15 nt, Human
caccaacaccacggu

SEQ ID NO: 2473413 - RNA, 17 nt, Human
caccaacaucccauugc

SEQ ID NO: 2473414 - RNA, 22 nt, Human
caccaacaucccauugcccugg

SEQ ID NO: 2473415 - RNA, 14 nt, Human
caccaacaucccau

SEQ ID NO: 2473416 - RNA, 16 nt, Human
caccaacgucugugcc

SEQ ID NO: 2473417 - RNA, 21 nt, Human
caccaacccagccgcugcccg

SEQ ID NO: 2473418 - RNA, 20 nt, Human
caccaacccagccgcugccc

SEQ ID NO: 2473419 - RNA, 19 nt, Human
caccaacccaucagaagga

SEQ ID NO: 2473420 - RNA, 19 nt, Human
caccagccaggcucugugc

SEQ ID NO: 2473421 - RNA, 18 nt, Human
caccagccaggcucugug

SEQ ID NO: 2473422 - RNA, 16 nt, Human
caccagccaggcucug

SEQ ID NO: 2473423 - RNA, 15 nt, Human
caccagccaggcucu

SEQ ID NO: 2473424 - RNA, 14 nt, Human
caccagccaggcuc

SEQ ID NO: 2473425 - RNA, 13 nt, Human
caccagccaggcu

SEQ ID NO: 2473426 - RNA, 14 nt, Human
caccaacgucugug

SEQ ID NO: 2473427 - RNA, 13 nt, Human
caccaacccucag

SEQ ID NO: 2473428 - RNA, 17 nt, Human
caccaacccagccgcug

SEQ ID NO: 2473429 - RNA, 14 nt, Human
caccaacccagccg

SEQ ID NO: 2473430 - RNA, 13 nt, Human
caccaacccagcc

SEQ ID NO: 2473431 - RNA, 23 nt, Human
caccaacaucccauugcccuggu

SEQ ID NO: 2473432 - RNA, 19 nt, Human
caccccaaagcuuuccugc

SEQ ID NO: 2473433 - RNA, 15 nt, Human
cacccauuuucacau

SEQ ID NO: 2473434 - RNA, 18 nt, Human
cacccauguuucucuggc

SEQ ID NO: 2473435 - RNA, 17 nt, Human
cacccauguuucucugg

SEQ ID NO: 2473436 - RNA, 13 nt, Human
cacccaugugcca

SEQ ID NO: 2473437 - RNA, 18 nt, Human
caccccaaagcuuuccug

SEQ ID NO: 2473438 - RNA, 13 nt, Human
caccccacccccu

SEQ ID NO: 2473439 - RNA, 11 nt, Human
caccccacacu

SEQ ID NO: 2473440 - RNA, 12 nt, Human
caccccacacuu

SEQ ID NO: 2473441 - RNA, 20 nt, Human
cacccaugggcucugacaga

SEQ ID NO: 2473442 - RNA, 19 nt, Human
cacccaugggcucugacag

SEQ ID NO: 2473443 - RNA, 18 nt, Human
cacccaugggcucugaca

SEQ ID NO: 2473444 - RNA, 13 nt, Human
cacccaugggcuc

SEQ ID NO: 2473445 - RNA, 15 nt, Human
cacccaugaaucaaa

SEQ ID NO: 2473446 - RNA, 19 nt, Human
cacccaugaaucaaagaca

SEQ ID NO: 2473447 - RNA, 14 nt, Human
cacccagcucagca

SEQ ID NO: 2473448 - RNA, 22 nt, Human
cacccaugaagacaggacagug

SEQ ID NO: 2473449 - RNA, 14 nt, Human
cacccagccucagu

SEQ ID NO: 2473450 - RNA, 13 nt, Human
cacccagccucag

SEQ ID NO: 2473451 - RNA, 12 nt, Human
cacccagccuca

SEQ ID NO: 2473452 - RNA, 11 nt, Human
cacccagccuc

SEQ ID NO: 2473453 - RNA, 19 nt, Human
cacccagccucaguccucc

SEQ ID NO: 2473454 - RNA, 15 nt, Human
cacccagccucaguc

SEQ ID NO: 2473455 - RNA, 22 nt, Human
cacccagccucaguccuccccu

SEQ ID NO: 2473456 - RNA, 16 nt, Human
cacccaggagccccga

SEQ ID NO: 2473457 - RNA, 13 nt, Human
cacccaccucccu

SEQ ID NO: 2473458 - RNA, 14 nt, Human
cacccaccucccug

SEQ ID NO: 2473459 - RNA, 15 nt, Human
cacccaccucccugc

SEQ ID NO: 2473460 - RNA, 16 nt, Human
cacccaccucccugcc

SEQ ID NO: 2473461 - RNA, 18 nt, Human
cacccaccucccugccuc

SEQ ID NO: 2473462 - RNA, 21 nt, Human
cacccaccucccugccuccag

SEQ ID NO: 2473463 - RNA, 18 nt, Human
cacccaccucagccuccc

SEQ ID NO: 2473464 - RNA, 22 nt, Human
cacccagcccuggucucagcag

SEQ ID NO: 2473465 - RNA, 19 nt, Human
cacccagcccuggucucag

SEQ ID NO: 2473466 - RNA, 18 nt, Human
cacccagcccuggucuca

SEQ ID NO: 2473467 - RNA, 16 nt, Human
cacccagcccuggucu

SEQ ID NO: 2473468 - RNA, 14 nt, Human
cacccagcccuggu

SEQ ID NO: 2473469 - RNA, 13 nt, Human
cacccagcccugg

SEQ ID NO: 2473470 - RNA, 12 nt, Human
cacccagcccug

SEQ ID NO: 2473471 - RNA, 13 nt, Human
cacccacucagcu

SEQ ID NO: 2473472 - RNA, 14 nt, Human
cacccacucagcuc

SEQ ID NO: 2473473 - RNA, 22 nt, Human
cacccagcccauucucucuccu

SEQ ID NO: 2473474 - RNA, 23 nt, Human
cacccaccucccugccuccagga

SEQ ID NO: 2473475 - RNA, 23 nt, Human
cacccagcccauucucucuccug

SEQ ID NO: 2473476 - RNA, 16 nt, Human
caccagccccagugcc

SEQ ID NO: 2473477 - RNA, 15 nt, Human
caccaggcugugggc

SEQ ID NO: 2473478 - RNA, 16 nt, Human
caccaggcugugggcc

SEQ ID NO: 2473479 - RNA, 17 nt, Human
caccaggcugugggccu

SEQ ID NO: 2473480 - RNA, 21 nt, Human
caccagccaggcucugugcug

SEQ ID NO: 2473481 - RNA, 20 nt, Human
caccagccaggcucugugcu

SEQ ID NO: 2473482 - RNA, 13 nt, Human
caccagccccagu

SEQ ID NO: 2473483 - RNA, 17 nt, Human
cacccaccucagccucc

SEQ ID NO: 2473484 - RNA, 16 nt, Human
caccagggaugguacu

SEQ ID NO: 2473485 - RNA, 18 nt, Human
caccaggcugugggccuc

SEQ ID NO: 2473486 - RNA, 18 nt, Human
caccagggaaggggacaa

SEQ ID NO: 2473487 - RNA, 21 nt, Human
caccagggaaggggacaagga

SEQ ID NO: 2473488 - RNA, 13 nt, Human
caccagggaaggg

SEQ ID NO: 2473489 - RNA, 20 nt, Human
caccaggcuugccugcaggc

SEQ ID NO: 2473490 - RNA, 17 nt, Human
cacagacccugcccugu

SEQ ID NO: 2473491 - RNA, 16 nt, Human
cacagacccugcccug

SEQ ID NO: 2473492 - RNA, 14 nt, Human
cacagacccugccc

SEQ ID NO: 2473493 - RNA, 17 nt, Human
cacagaaaugagaucag

SEQ ID NO: 2473494 - RNA, 18 nt, Human
cacagaaagccuaucaaa

SEQ ID NO: 2473495 - RNA, 19 nt, Human
cacagaagaggcugguucu

SEQ ID NO: 2473496 - RNA, 18 nt, Human
cacagacccugcccugug

SEQ ID NO: 2473497 - RNA, 15 nt, Human
cacagcuccucccac

SEQ ID NO: 2473498 - RNA, 10 nt, Human
cacagcuccu

SEQ ID NO: 2473499 - RNA, 22 nt, Human
cacagaaaugagaucaggcucu

SEQ ID NO: 2473500 - RNA, 14 nt, Human
cacagcucuguccu

SEQ ID NO: 2473501 - RNA, 11 nt, Human
cacagcucugu

SEQ ID NO: 2473502 - RNA, 19 nt, Human
cacagcucuguccugggag

SEQ ID NO: 2473503 - RNA, 18 nt, Human
cacagcucuguccuggga

SEQ ID NO: 2473504 - RNA, 16 nt, Human
cacagcucuguccugg

SEQ ID NO: 2473505 - RNA, 15 nt, Human
cacagcucuguccug

SEQ ID NO: 2473506 - RNA, 15 nt, Human
cacagcucuucucca

SEQ ID NO: 2473507 - RNA, 14 nt, Human
cacagcucuucucc

SEQ ID NO: 2473508 - RNA, 20 nt, Human
cacagcucuccggucucucu

SEQ ID NO: 2473509 - RNA, 21 nt, Human
cacagcucuccggucucucuc

SEQ ID NO: 2473510 - RNA, 17 nt, Human
cacagcucuucuccagg

SEQ ID NO: 2473511 - RNA, 12 nt, Human
cacacauuuuuu

SEQ ID NO: 2473512 - RNA, 16 nt, Human
cacacauuuuuuaaau

SEQ ID NO: 2473513 - RNA, 19 nt, Human
cacacauuuuuuaaaugca

SEQ ID NO: 2473514 - RNA, 20 nt, Human
cacacauuuuuuaaaugcac

SEQ ID NO: 2473515 - RNA, 10 nt, Human
cacacauuuu

SEQ ID NO: 2473516 - RNA, 11 nt, Human
cacacauuuuu

SEQ ID NO: 2473517 - RNA, 18 nt, Human
cacacauggcuaauuuuu

SEQ ID NO: 2473518 - RNA, 23 nt, Human
cacaccaagcugugccacccugg

SEQ ID NO: 2473519 - RNA, 22 nt, Human
cacaccaagcugugccacccug

SEQ ID NO: 2473520 - RNA, 20 nt, Human
cacaccaagcugugccaccc

SEQ ID NO: 2473521 - RNA, 18 nt, Human
cacaccaagcugugccac

SEQ ID NO: 2473522 - RNA, 17 nt, Human
cacaccaagcugugcca

SEQ ID NO: 2473523 - RNA, 16 nt, Human
cacaccaagcugugcc

SEQ ID NO: 2473524 - RNA, 18 nt, Human
cacaccaagcagcaacag

SEQ ID NO: 2473525 - RNA, 18 nt, Human
cacacauuuguguaaaca

SEQ ID NO: 2473526 - RNA, 18 nt, Human
cacacuuguuccagcucu

SEQ ID NO: 2473527 - RNA, 19 nt, Human
cacacuuguuccagcucuu

SEQ ID NO: 2473528 - RNA, 20 nt, Human
cacacuuguuccagcucuuu

SEQ ID NO: 2473529 - RNA, 12 nt, Human
cacagaaaauau

SEQ ID NO: 2473530 - RNA, 13 nt, Human
cacagaaaauaua

SEQ ID NO: 2473531 - RNA, 14 nt, Human
cacagaaaauauac

SEQ ID NO: 2473532 - RNA, 15 nt, Human
cacagaaaauauacu

SEQ ID NO: 2473533 - RNA, 17 nt, Human
cacacuuuuuaagaaau

SEQ ID NO: 2473534 - RNA, 13 nt, Human
cacagaacccuug

SEQ ID NO: 2473535 - RNA, 23 nt, Human
cacagaaagccuaucaaagaccu

SEQ ID NO: 2473536 - RNA, 18 nt, Human
cacagaaagacugagcuc

SEQ ID NO: 2473537 - RNA, 22 nt, Human
cacagaaagacugagcucaagg

SEQ ID NO: 2473538 - RNA, 12 nt, Human
cacagaaagccu

SEQ ID NO: 2473539 - RNA, 16 nt, Human
cacagaaaauauacug

SEQ ID NO: 2473540 - RNA, 17 nt, Human
cacagaaaauauacugu

SEQ ID NO: 2473541 - RNA, 18 nt, Human
cacagaaaauauacugua

SEQ ID NO: 2473542 - RNA, 19 nt, Human
cacagaaaauauacuguaa

SEQ ID NO: 2473543 - RNA, 12 nt, Human
cacagaaaccuu

SEQ ID NO: 2473544 - RNA, 15 nt, Human
cacagaaagacugag

SEQ ID NO: 2473545 - RNA, 20 nt, Human
cacagaaaauauacuguaaa

SEQ ID NO: 2473546 - RNA, 19 nt, Human
cacagaaaccucuacuaaa

SEQ ID NO: 2473547 - RNA, 21 nt, Human
cacagggacuugaaguuguua

SEQ ID NO: 2473548 - RNA, 17 nt, Human
cacagggacuugaaguu

SEQ ID NO: 2473549 - RNA, 16 nt, Human
cacagggacuugaagu

SEQ ID NO: 2473550 - RNA, 14 nt, Human
cacagggacuugaa

SEQ ID NO: 2473551 - RNA, 22 nt, Human
cacagggacugaaaaccucucc

SEQ ID NO: 2473552 - RNA, 15 nt, Human
cccauucugccugcc

SEQ ID NO: 2473553 - RNA, 14 nt, Human
cccauucugccugc

SEQ ID NO: 2473554 - RNA, 15 nt, Human
cccauuucucacuga

SEQ ID NO: 2473555 - RNA, 20 nt, Human
cccauuucuauuuauuuacu

SEQ ID NO: 2473556 - RNA, 19 nt, Human
cccauucugccugcccagg

SEQ ID NO: 2473557 - RNA, 15 nt, Human
cccauuugcuccuuu

SEQ ID NO: 2473558 - RNA, 13 nt, Human
ccccagaggcugg

SEQ ID NO: 2473559 - RNA, 22 nt, Human
cccauuuuggaaguuuucagga

SEQ ID NO: 2473560 - RNA, 19 nt, Human
cccauuuugcaaaauuucc

SEQ ID NO: 2473561 - RNA, 22 nt, Human
cccauuuugcaaaauuuccagu

SEQ ID NO: 2473562 - RNA, 20 nt, Human
cccauuuuuauaucgaucuc

SEQ ID NO: 2473563 - RNA, 14 nt, Human
cccauuuucugugg

SEQ ID NO: 2473564 - RNA, 20 nt, Human
cccauuuuagucacuuuuuu

SEQ ID NO: 2473565 - RNA, 18 nt, Human
cccauuuuagucacuuuu

SEQ ID NO: 2473566 - RNA, 14 nt, Human
cccauuuuagucac

SEQ ID NO: 2473567 - RNA, 17 nt, Human
cccauuuugagugacuc

SEQ ID NO: 2473568 - RNA, 18 nt, Human
cccauuuugagugacucg

SEQ ID NO: 2473569 - RNA, 12 nt, Human
cccauuuugcaa

SEQ ID NO: 2473570 - RNA, 19 nt, Human
ccccauggucagcccuagg

SEQ ID NO: 2473571 - RNA, 22 nt, Human
ccccaugggaagacgaggcccu

SEQ ID NO: 2473572 - RNA, 16 nt, Human
ccccauguguccuggu

SEQ ID NO: 2473573 - RNA, 14 nt, Human
ccccauguguccug

SEQ ID NO: 2473574 - RNA, 15 nt, Human
ccccaugucucucag

SEQ ID NO: 2473575 - RNA, 17 nt, Human
ccccaugucucucagaa

SEQ ID NO: 2473576 - RNA, 23 nt, Human
cccccuucugggcaucuguucug

SEQ ID NO: 2473577 - RNA, 22 nt, Human
cccccuucugggcaucuguucu

SEQ ID NO: 2473578 - RNA, 14 nt, Human
cccccuucugggca

SEQ ID NO: 2473579 - RNA, 12 nt, Human
cccccuucuggg

SEQ ID NO: 2473580 - RNA, 23 nt, Human
ccccauuagcuuucaauuccgua

SEQ ID NO: 2473581 - RNA, 17 nt, Human
ccccauuagcuuucaau

SEQ ID NO: 2473582 - RNA, 23 nt, Human
ccccauguguccugguucccguu

SEQ ID NO: 2473583 - RNA, 18 nt, Human
ccccauguguccugguuc

SEQ ID NO: 2473584 - RNA, 17 nt, Human
ccccauuagagucagcc

SEQ ID NO: 2473585 - RNA, 21 nt, Human
ccccaugcuggagccugugua

SEQ ID NO: 2473586 - RNA, 20 nt, Human
ccccaugcuggagccugugu

SEQ ID NO: 2473587 - RNA, 19 nt, Human
ccccaugcuggagccugug

SEQ ID NO: 2473588 - RNA, 18 nt, Human
ccccaugcuggagccugu

SEQ ID NO: 2473589 - RNA, 17 nt, Human
ccccaugcuggagccug

SEQ ID NO: 2473590 - RNA, 16 nt, Human
ccccaugcuggagccu

SEQ ID NO: 2473591 - RNA, 15 nt, Human
ccccaugcuggagcc

SEQ ID NO: 2473592 - RNA, 14 nt, Human
ccccaugcuggagc

SEQ ID NO: 2473593 - RNA, 15 nt, Human
ccccaugcuggaggu

SEQ ID NO: 2473594 - RNA, 23 nt, Human
ccccaugcuggagccuguguaac

SEQ ID NO: 2473595 - RNA, 22 nt, Human
ccccaugcuggagccuguguaa

SEQ ID NO: 2473596 - RNA, 14 nt, Human
ccccaugcuguuga

SEQ ID NO: 2473597 - RNA, 18 nt, Human
ccccaugccuguccagcc

SEQ ID NO: 2473598 - RNA, 19 nt, Human
ccccaugccuguccagccu

SEQ ID NO: 2473599 - RNA, 20 nt, Human
ccccaugccuguccagccug

SEQ ID NO: 2473600 - RNA, 21 nt, Human
ccccaugccuguccagccugg

SEQ ID NO: 2473601 - RNA, 22 nt, Human
ccccaugccuguccagccuggg

SEQ ID NO: 2473602 - RNA, 23 nt, Human
ccccaugccuguccagccugggc

SEQ ID NO: 2473603 - RNA, 12 nt, Human
ccccaugcugga

SEQ ID NO: 2473604 - RNA, 15 nt, Human
ccccagcccagggug

SEQ ID NO: 2473605 - RNA, 24 nt, Human
ccccaugccuguccagccugggca

SEQ ID NO: 2473606 - RNA, 20 nt, Human
ccccagauugcaacaggcug

SEQ ID NO: 2473607 - RNA, 19 nt, Human
ccccagcccacccuccugu

SEQ ID NO: 2473608 - RNA, 18 nt, Human
ccccagauaccagccccu

SEQ ID NO: 2473609 - RNA, 16 nt, Human
ccccagcccacccucc

SEQ ID NO: 2473610 - RNA, 22 nt, Human
ccccagcccacccuccugucuu

SEQ ID NO: 2473611 - RNA, 20 nt, Human
ccccagcccacccuccuguc

SEQ ID NO: 2473612 - RNA, 11 nt, Human
ccccagcccag

SEQ ID NO: 2473613 - RNA, 17 nt, Human
ccccagaggcuggguga

SEQ ID NO: 2473614 - RNA, 18 nt, Human
ccccagaucaccagcccg

SEQ ID NO: 2473615 - RNA, 15 nt, Human
ccccagauaccagcc

SEQ ID NO: 2473616 - RNA, 22 nt, Human
ccccagagugugggaagggaga

SEQ ID NO: 2473617 - RNA, 15 nt, Human
ccccagauugcaaca

SEQ ID NO: 2473618 - RNA, 12 nt, Human
ccccagcccaga

SEQ ID NO: 2473619 - RNA, 13 nt, Human
ccccagcccagag

SEQ ID NO: 2473620 - RNA, 15 nt, Human
ccccagcccagagac

SEQ ID NO: 2473621 - RNA, 16 nt, Human
ccccagcccagagaca

SEQ ID NO: 2473622 - RNA, 15 nt, Human
ccccagcccagggcu

SEQ ID NO: 2473623 - RNA, 14 nt, Human
ccccagcccagggc

SEQ ID NO: 2473624 - RNA, 12 nt, Human
ccccagcccagg

SEQ ID NO: 2473625 - RNA, 13 nt, Human
ccccagcccaggg

SEQ ID NO: 2473626 - RNA, 21 nt, Human
ccccagcccagggcuccugca

SEQ ID NO: 2473627 - RNA, 20 nt, Human
ccccagcccagggcuccugc

SEQ ID NO: 2473628 - RNA, 12 nt, Human
ccccaugccugu

SEQ ID NO: 2473629 - RNA, 21 nt, Human
ccccagcccaggguuccccca

SEQ ID NO: 2473630 - RNA, 13 nt, Human
ccccaugccuguc

SEQ ID NO: 2473631 - RNA, 15 nt, Human
ccccaugccugucca

SEQ ID NO: 2473632 - RNA, 17 nt, Human
ccccaugccuguccagc

SEQ ID NO: 2473633 - RNA, 17 nt, Human
cccccuuugugcugugg

SEQ ID NO: 2473634 - RNA, 16 nt, Human
cccccuuugugcugug

SEQ ID NO: 2473635 - RNA, 14 nt, Human
cccccuuugugcug

SEQ ID NO: 2473636 - RNA, 20 nt, Human
cccccuuugggcccagggac

SEQ ID NO: 2473637 - RNA, 19 nt, Human
cccccuuugggcccaggga

SEQ ID NO: 2473638 - RNA, 18 nt, Human
cccccuuugggcccaggg

SEQ ID NO: 2473639 - RNA, 17 nt, Human
cccccuuugggcccagg

SEQ ID NO: 2473640 - RNA, 16 nt, Human
cccccuuugggcccag

SEQ ID NO: 2473641 - RNA, 20 nt, Human
cccccuuuccuggacacuca

SEQ ID NO: 2473642 - RNA, 22 nt, Human
cccccuuucagaugucuucugc

SEQ ID NO: 2473643 - RNA, 12 nt, Human
cccccuuuccug

SEQ ID NO: 2473644 - RNA, 18 nt, Human
cccccuuucagaugucuu

SEQ ID NO: 2473645 - RNA, 17 nt, Human
cccccuuucagaugucu

SEQ ID NO: 2473646 - RNA, 15 nt, Human
cccccuugccacccc

SEQ ID NO: 2473647 - RNA, 14 nt, Human
cccccuugaguggg

SEQ ID NO: 2473648 - RNA, 18 nt, Human
cccccuugccagacaugu

SEQ ID NO: 2473649 - RNA, 20 nt, Human
ccccgagggaugaugccaca

SEQ ID NO: 2473650 - RNA, 19 nt, Human
ccccgagggaugaugccac

SEQ ID NO: 2473651 - RNA, 18 nt, Human
ccccgagggaugaugcca

SEQ ID NO: 2473652 - RNA, 18 nt, Human
cccccuuugugcuguggg

SEQ ID NO: 2473653 - RNA, 22 nt, Human
ccccgagggaugaugccacacc

SEQ ID NO: 2473654 - RNA, 21 nt, Human
ccccgagggaugaugccacac

SEQ ID NO: 2473655 - RNA, 14 nt, Human
ccccgcacugggcu

SEQ ID NO: 2473656 - RNA, 21 nt, Human
ccccgaguuuccccagacacc

SEQ ID NO: 2473657 - RNA, 14 nt, Human
ccccgcagacaccu

SEQ ID NO: 2473658 - RNA, 17 nt, Human
ccccgcagaccucccca

SEQ ID NO: 2473659 - RNA, 14 nt, Human
ccccgcagaccucc

SEQ ID NO: 2473660 - RNA, 13 nt, Human
ccccgcagaccuc

SEQ ID NO: 2473661 - RNA, 12 nt, Human
ccccgcagaccu

SEQ ID NO: 2473662 - RNA, 18 nt, Human
cccaggaaaggcuccagg

SEQ ID NO: 2473663 - RNA, 17 nt, Human
cccaggaaaggcuccag

SEQ ID NO: 2473664 - RNA, 22 nt, Human
cccagcugggcucugccacccu

SEQ ID NO: 2473665 - RNA, 20 nt, Human
cccagcugggcucugccacc

SEQ ID NO: 2473666 - RNA, 19 nt, Human
cccagcugggcucugccac

SEQ ID NO: 2473667 - RNA, 18 nt, Human
cccagcugggcucugcca

SEQ ID NO: 2473668 - RNA, 15 nt, Human
cccaggcugagccuc

SEQ ID NO: 2473669 - RNA, 16 nt, Human
cccaggcugagccuca

SEQ ID NO: 2473670 - RNA, 17 nt, Human
cccaggcugagccucag

SEQ ID NO: 2473671 - RNA, 24 nt, Human
cccagcugggcucugccacccuac

SEQ ID NO: 2473672 - RNA, 18 nt, Human
cccaggcugagccucagu

SEQ ID NO: 2473673 - RNA, 13 nt, Human
cccaggcuggagu

SEQ ID NO: 2473674 - RNA, 22 nt, Human
cccaggcuuagucacugagaca

SEQ ID NO: 2473675 - RNA, 20 nt, Human
cccauccccccucaccaggg

SEQ ID NO: 2473676 - RNA, 16 nt, Human
cccauccccccucacc

SEQ ID NO: 2473677 - RNA, 15 nt, Human
cccauccccccucac

SEQ ID NO: 2473678 - RNA, 14 nt, Human
cccauccccccuca

SEQ ID NO: 2473679 - RNA, 12 nt, Human
cccauccccccu

SEQ ID NO: 2473680 - RNA, 23 nt, Human
cccaucaguguacccccgcccag

SEQ ID NO: 2473681 - RNA, 21 nt, Human
cccaucaguguacccccgccc

SEQ ID NO: 2473682 - RNA, 20 nt, Human
cccaucaguguacccccgcc

SEQ ID NO: 2473683 - RNA, 15 nt, Human
cccaucccccugccc

SEQ ID NO: 2473684 - RNA, 14 nt, Human
cccaucccccugcc

SEQ ID NO: 2473685 - RNA, 12 nt, Human
cccaucccccug

SEQ ID NO: 2473686 - RNA, 22 nt, Human
cccauccccccucaccaggggc

SEQ ID NO: 2473687 - RNA, 17 nt, Human
cccaucccccugcccuc

SEQ ID NO: 2473688 - RNA, 16 nt, Human
cccaucccccugcccu

SEQ ID NO: 2473689 - RNA, 21 nt, Human
cccauccccuggacugggagg

SEQ ID NO: 2473690 - RNA, 16 nt, Human
cccauccccgcagugu

SEQ ID NO: 2473691 - RNA, 19 nt, Human
cccaucaggacucuuguga

SEQ ID NO: 2473692 - RNA, 17 nt, Human
cccaucaggacucuugu

SEQ ID NO: 2473693 - RNA, 22 nt, Human
cccaucagugcucccucacaug

SEQ ID NO: 2473694 - RNA, 13 nt, Human
cccaucaguguac

SEQ ID NO: 2473695 - RNA, 23 nt, Human
cccaucagugcucccucacaugu

SEQ ID NO: 2473696 - RNA, 18 nt, Human
cccaucagcuccagcugc

SEQ ID NO: 2473697 - RNA, 13 nt, Human
cccaucacuggag

SEQ ID NO: 2473698 - RNA, 15 nt, Human
cccaucacuggagca

SEQ ID NO: 2473699 - RNA, 20 nt, Human
cccaucacuggagcaccagg

SEQ ID NO: 2473700 - RNA, 14 nt, Human
cccaucagaaggag

SEQ ID NO: 2473701 - RNA, 15 nt, Human
cccagggagcggaaa

SEQ ID NO: 2473702 - RNA, 16 nt, Human
cccaucacgccugugc

SEQ ID NO: 2473703 - RNA, 21 nt, Human
cccaucacaggguugggccca

SEQ ID NO: 2473704 - RNA, 22 nt, Human
cccaucacaggguugggcccag

SEQ ID NO: 2473705 - RNA, 20 nt, Human
cccagggacaccagccaggc

SEQ ID NO: 2473706 - RNA, 19 nt, Human
cccagggacaccagccagg

SEQ ID NO: 2473707 - RNA, 21 nt, Human
cccagggacaccagccaggcu

SEQ ID NO: 2473708 - RNA, 17 nt, Human
cccagggaccgaaaagu

SEQ ID NO: 2473709 - RNA, 14 nt, Human
cccagggagaggcc

SEQ ID NO: 2473710 - RNA, 18 nt, Human
cccagggagaggccauga

SEQ ID NO: 2473711 - RNA, 18 nt, Human
cccagggacaccagccag

SEQ ID NO: 2473712 - RNA, 17 nt, Human
cccagggacaccagcca

SEQ ID NO: 2473713 - RNA, 15 nt, Human
cccagggacaccagc

SEQ ID NO: 2473714 - RNA, 14 nt, Human
cccagggacaccag

SEQ ID NO: 2473715 - RNA, 13 nt, Human
cccagggaagugc

SEQ ID NO: 2473716 - RNA, 15 nt, Human
cccagggaaguuuug

SEQ ID NO: 2473717 - RNA, 17 nt, Human
cccagcugggcucugcc

SEQ ID NO: 2473718 - RNA, 14 nt, Human
cccagcugggcucu

SEQ ID NO: 2473719 - RNA, 13 nt, Human
cccagcugggcuc

SEQ ID NO: 2473720 - RNA, 12 nt, Human
cccagcugggcu

SEQ ID NO: 2473721 - RNA, 22 nt, Human
cccagcugggaggcaagagggg

SEQ ID NO: 2473722 - RNA, 21 nt, Human
cccagcugggaggcaagaggg

SEQ ID NO: 2473723 - RNA, 20 nt, Human
cccagcugggaggcaagagg

SEQ ID NO: 2473724 - RNA, 18 nt, Human
cccagcugggaggcaaga

SEQ ID NO: 2473725 - RNA, 17 nt, Human
cccagcugggaggcaag

SEQ ID NO: 2473726 - RNA, 15 nt, Human
cccagcugggaggca

SEQ ID NO: 2473727 - RNA, 14 nt, Human
cccagcugggaggc

SEQ ID NO: 2473728 - RNA, 13 nt, Human
cccagcugggagg

SEQ ID NO: 2473729 - RNA, 12 nt, Human
cccagcugggag

SEQ ID NO: 2473730 - RNA, 11 nt, Human
cccagcuggga

SEQ ID NO: 2473731 - RNA, 20 nt, Human
cccagcuggcccgugacaga

SEQ ID NO: 2473732 - RNA, 11 nt, Human
cccagcuggcc

SEQ ID NO: 2473733 - RNA, 16 nt, Human
cccaggaaaggcucca

SEQ ID NO: 2473734 - RNA, 15 nt, Human
cccaggaaaggcucc

SEQ ID NO: 2473735 - RNA, 21 nt, Human
cccagccaucugcccaggggu

SEQ ID NO: 2473736 - RNA, 20 nt, Human
cccagccaucugcccagggg

SEQ ID NO: 2473737 - RNA, 18 nt, Human
cccagccaucugcccagg

SEQ ID NO: 2473738 - RNA, 17 nt, Human
cccagccaucugcccag

SEQ ID NO: 2473739 - RNA, 16 nt, Human
cccagccaucugccca

SEQ ID NO: 2473740 - RNA, 15 nt, Human
cccagccaucugccc

SEQ ID NO: 2473741 - RNA, 13 nt, Human
cccagccaucugc

SEQ ID NO: 2473742 - RNA, 23 nt, Human
cccagccaucugcccaggggugc

SEQ ID NO: 2473743 - RNA, 10 nt, Human
cccagccauu

SEQ ID NO: 2473744 - RNA, 14 nt, Human
cccagcugcucccc

SEQ ID NO: 2473745 - RNA, 22 nt, Human
cccagccaucugcccaggggug

SEQ ID NO: 2473746 - RNA, 18 nt, Human
cccagccauuaccaugga

SEQ ID NO: 2473747 - RNA, 15 nt, Human
cccagcugcuccccu

SEQ ID NO: 2473748 - RNA, 21 nt, Human
cccagcugcuccccucccucc

SEQ ID NO: 2473749 - RNA, 15 nt, Human
cccagcugcuugugu

SEQ ID NO: 2473750 - RNA, 13 nt, Human
cccagcacccagc

SEQ ID NO: 2473751 - RNA, 19 nt, Human
cccagcacccgggcucagg

SEQ ID NO: 2473752 - RNA, 12 nt, Human
cccagcacccgg

SEQ ID NO: 2473753 - RNA, 18 nt, Human
cccagcacaugaaaccuu

SEQ ID NO: 2473754 - RNA, 15 nt, Human
cccagcacccagcaa

SEQ ID NO: 2473755 - RNA, 21 nt, Human
cccagcacccgggcucaggga

SEQ ID NO: 2473756 - RNA, 22 nt, Human
cccagcacccgggcucagggac

SEQ ID NO: 2473757 - RNA, 16 nt, Human
cccagcacuaaagcag

SEQ ID NO: 2473758 - RNA, 13 nt, Human
cccagcacugagg

SEQ ID NO: 2473759 - RNA, 17 nt, Human
cccagcacuaaagcagu

SEQ ID NO: 2473760 - RNA, 21 nt, Human
cccagccaggccccaggcagg

SEQ ID NO: 2473761 - RNA, 19 nt, Human
cccagcacagcuugaccug

SEQ ID NO: 2473762 - RNA, 18 nt, Human
cccagcacagcuugaccu

SEQ ID NO: 2473763 - RNA, 17 nt, Human
cccacugcacccccucc

SEQ ID NO: 2473764 - RNA, 16 nt, Human
cccacugcacccccuc

SEQ ID NO: 2473765 - RNA, 16 nt, Human
cccacuggacucaccu

SEQ ID NO: 2473766 - RNA, 15 nt, Human
cccacuggcagcauc

SEQ ID NO: 2473767 - RNA, 21 nt, Human
cccacuggggaaauaacagcu

SEQ ID NO: 2473768 - RNA, 21 nt, Human
cccacugggguccagggagca

SEQ ID NO: 2473769 - RNA, 22 nt, Human
cccauccucuguacagagccca

SEQ ID NO: 2473770 - RNA, 21 nt, Human
cccauccucuguacagagccc

SEQ ID NO: 2473771 - RNA, 21 nt, Human
cccauccuaccaaugcaugca

SEQ ID NO: 2473772 - RNA, 20 nt, Human
cccauccuaccaaugcaugc

SEQ ID NO: 2473773 - RNA, 19 nt, Human
cccauccuaccaaugcaug

SEQ ID NO: 2473774 - RNA, 17 nt, Human
cccauccuaccaaugca

SEQ ID NO: 2473775 - RNA, 18 nt, Human
cccaucccugccugguca

SEQ ID NO: 2473776 - RNA, 17 nt, Human
cccaucccugccugguc

SEQ ID NO: 2473777 - RNA, 15 nt, Human
cccaucccugccugg

SEQ ID NO: 2473778 - RNA, 16 nt, Human
cccaucccuccccagu

SEQ ID NO: 2473779 - RNA, 15 nt, Human
cccaucccuccccag

SEQ ID NO: 2473780 - RNA, 14 nt, Human
cccaucccugccug

SEQ ID NO: 2473781 - RNA, 13 nt, Human
cccaucccugccu

SEQ ID NO: 2473782 - RNA, 12 nt, Human
cccaucccugcc

SEQ ID NO: 2473783 - RNA, 17 nt, Human
cccauccuggcccauca

SEQ ID NO: 2473784 - RNA, 16 nt, Human
cccauccuggcccauc

SEQ ID NO: 2473785 - RNA, 15 nt, Human
cccauccuggcccau

SEQ ID NO: 2473786 - RNA, 14 nt, Human
cccauccuggccca

SEQ ID NO: 2473787 - RNA, 18 nt, Human
cccauccuggcccaucag

SEQ ID NO: 2473788 - RNA, 14 nt, Human
cccauccuacccuc

SEQ ID NO: 2473789 - RNA, 13 nt, Human
cccauccuacccu

SEQ ID NO: 2473790 - RNA, 12 nt, Human
cccauccuaccc

SEQ ID NO: 2473791 - RNA, 13 nt, Human
cccauccuggccc

SEQ ID NO: 2473792 - RNA, 14 nt, Human
cccuccuccacucu

SEQ ID NO: 2473793 - RNA, 13 nt, Human
cccuccuccacuc

SEQ ID NO: 2473794 - RNA, 12 nt, Human
cccuccuccacu

SEQ ID NO: 2473795 - RNA, 16 nt, Human
cccuccucucugcccu

SEQ ID NO: 2473796 - RNA, 15 nt, Human
cccuccucucugccc

SEQ ID NO: 2473797 - RNA, 11 nt, Human
cccuccucugc

SEQ ID NO: 2473798 - RNA, 12 nt, Human
cccuccucugcc

SEQ ID NO: 2473799 - RNA, 15 nt, Human
cccuccugucuuccc

SEQ ID NO: 2473800 - RNA, 14 nt, Human
cccuccugucuucc

SEQ ID NO: 2473801 - RNA, 12 nt, Human
cccuccugucuu

SEQ ID NO: 2473802 - RNA, 13 nt, Human
cccuccuguaaau

SEQ ID NO: 2473803 - RNA, 18 nt, Human
cccuccugucuucccagg

SEQ ID NO: 2473804 - RNA, 16 nt, Human
cccuccugucuuccca

SEQ ID NO: 2473805 - RNA, 19 nt, Human
cccuccugggaucugcucg

SEQ ID NO: 2473806 - RNA, 17 nt, Human
cccuccugggaucugcu

SEQ ID NO: 2473807 - RNA, 11 nt, Human
cccuccuggga

SEQ ID NO: 2473808 - RNA, 12 nt, Human
cccuccugcugc

SEQ ID NO: 2473809 - RNA, 11 nt, Human
cccuccugcug

SEQ ID NO: 2473810 - RNA, 20 nt, Human
cccuccugccgacuccuggg

SEQ ID NO: 2473811 - RNA, 19 nt, Human
cccuccugccgacuccugg

SEQ ID NO: 2473812 - RNA, 13 nt, Human
cccuccugcugca

SEQ ID NO: 2473813 - RNA, 13 nt, Human
cccuccuggcucu

SEQ ID NO: 2473814 - RNA, 18 nt, Human
cccuccugccgacuccug

SEQ ID NO: 2473815 - RNA, 13 nt, Human
cccuccucugcca

SEQ ID NO: 2473816 - RNA, 16 nt, Human
cccuccucugccaccu

SEQ ID NO: 2473817 - RNA, 18 nt, Human
cccuccugaaacuuacac

SEQ ID NO: 2473818 - RNA, 21 nt, Human
cccuccucacuggccaucccu

SEQ ID NO: 2473819 - RNA, 19 nt, Human
cccuccucacuggccaucc

SEQ ID NO: 2473820 - RNA, 16 nt, Human
cccuccucacuggcca

SEQ ID NO: 2473821 - RNA, 15 nt, Human
cccuccucacuggcc

SEQ ID NO: 2473822 - RNA, 12 nt, Human
cccuccucacug

SEQ ID NO: 2473823 - RNA, 14 nt, Human
cccuccucacuggc

SEQ ID NO: 2473824 - RNA, 14 nt, Human
cccuccucaccccg

SEQ ID NO: 2473825 - RNA, 16 nt, Human
cccuccucaccucugg

SEQ ID NO: 2473826 - RNA, 17 nt, Human
cccuccucaccucugga

SEQ ID NO: 2473827 - RNA, 18 nt, Human
cccuccucaccucuggac

SEQ ID NO: 2473828 - RNA, 23 nt, Human
cccuccucaccucuggacuggcu

SEQ ID NO: 2473829 - RNA, 21 nt, Human
cccuccuaucaccuccccucc

SEQ ID NO: 2473830 - RNA, 13 nt, Human
cccuccucacccc

SEQ ID NO: 2473831 - RNA, 12 nt, Human
cccuccucaccu

SEQ ID NO: 2473832 - RNA, 13 nt, Human
cccuccucaccuc

SEQ ID NO: 2473833 - RNA, 14 nt, Human
ccccucugcccugc

SEQ ID NO: 2473834 - RNA, 15 nt, Human
ccccucugcccugcg

SEQ ID NO: 2473835 - RNA, 20 nt, Human
ccccucugcccugcggguca

SEQ ID NO: 2473836 - RNA, 23 nt, Human
ccccucugcccugcgggucacag

SEQ ID NO: 2473837 - RNA, 16 nt, Human
ccccucugcugcuguc

SEQ ID NO: 2473838 - RNA, 13 nt, Human
ccccugcacucca

SEQ ID NO: 2473839 - RNA, 21 nt, Human
ccccugcaaagcccagcuuga

SEQ ID NO: 2473840 - RNA, 18 nt, Human
ccccugcaaagcccagcu

SEQ ID NO: 2473841 - RNA, 20 nt, Human
ccccugcaaagcccagcuug

SEQ ID NO: 2473842 - RNA, 17 nt, Human
ccccugcaaagcccagc

SEQ ID NO: 2473843 - RNA, 17 nt, Human
ccccugaaacuuauuuu

SEQ ID NO: 2473844 - RNA, 16 nt, Human
ccccugaaacuuauuu

SEQ ID NO: 2473845 - RNA, 13 nt, Human
ccccugaaacuua

SEQ ID NO: 2473846 - RNA, 15 nt, Human
ccccugacaacacuc

SEQ ID NO: 2473847 - RNA, 16 nt, Human
ccccucuggcuccagc

SEQ ID NO: 2473848 - RNA, 18 nt, Human
ccccucuugccccaaccc

SEQ ID NO: 2473849 - RNA, 13 nt, Human
ccccucuggccag

SEQ ID NO: 2473850 - RNA, 22 nt, Human
ccccucuugccccaacccccag

SEQ ID NO: 2473851 - RNA, 16 nt, Human
ccccucuggccaggau

SEQ ID NO: 2473852 - RNA, 21 nt, Human
ccccugccaccucccugaccc

SEQ ID NO: 2473853 - RNA, 18 nt, Human
ccccugccaccucccuga

SEQ ID NO: 2473854 - RNA, 20 nt, Human
ccccugccaccaggccaccu

SEQ ID NO: 2473855 - RNA, 12 nt, Human
ccccugccacca

SEQ ID NO: 2473856 - RNA, 10 nt, Human
ccccugccag

SEQ ID NO: 2473857 - RNA, 16 nt, Human
ccccugccacccuggg

SEQ ID NO: 2473858 - RNA, 14 nt, Human
ccccugccacccug

SEQ ID NO: 2473859 - RNA, 19 nt, Human
ccccugcccccaggacugg

SEQ ID NO: 2473860 - RNA, 18 nt, Human
ccccugcccccaggacug

SEQ ID NO: 2473861 - RNA, 17 nt, Human
ccccugccccccagccu

SEQ ID NO: 2473862 - RNA, 23 nt, Human
ccccugcccccaggacugggcca

SEQ ID NO: 2473863 - RNA, 16 nt, Human
ccccugccccagccca

SEQ ID NO: 2473864 - RNA, 14 nt, Human
ccccugccccagcc

SEQ ID NO: 2473865 - RNA, 12 nt, Human
ccccugccccca

SEQ ID NO: 2473866 - RNA, 17 nt, Human
ccccugcccccaggacu

SEQ ID NO: 2473867 - RNA, 16 nt, Human
ccccugcccccaggac

SEQ ID NO: 2473868 - RNA, 14 nt, Human
ccccugccagggca

SEQ ID NO: 2473869 - RNA, 15 nt, Human
ccccugccagggcag

SEQ ID NO: 2473870 - RNA, 19 nt, Human
ccccugccagggcagggcc

SEQ ID NO: 2473871 - RNA, 23 nt, Human
ccccugccagggcagggccccag

SEQ ID NO: 2473872 - RNA, 13 nt, Human
ccccugccccagc

SEQ ID NO: 2473873 - RNA, 18 nt, Human
ccccugcccaucugggaa

SEQ ID NO: 2473874 - RNA, 14 nt, Human
ccccugcccaucug

SEQ ID NO: 2473875 - RNA, 14 nt, Human
ccccugccagugcc

SEQ ID NO: 2473876 - RNA, 15 nt, Human
ccccugccagugccu

SEQ ID NO: 2473877 - RNA, 16 nt, Human
ccccugccagugccuu

SEQ ID NO: 2473878 - RNA, 17 nt, Human
ccccugccagugccuua

SEQ ID NO: 2473879 - RNA, 22 nt, Human
cccggcccuaccagcgcccgcu

SEQ ID NO: 2473880 - RNA, 18 nt, Human
cccggccccggccccagc

SEQ ID NO: 2473881 - RNA, 21 nt, Human
cccggcccccuggucucuggu

SEQ ID NO: 2473882 - RNA, 13 nt, Human
cccggcccccugg

SEQ ID NO: 2473883 - RNA, 18 nt, Human
cccggccgccgcccugcu

SEQ ID NO: 2473884 - RNA, 22 nt, Human
cccggcccugggcucggaggcu

SEQ ID NO: 2473885 - RNA, 16 nt, Human
cccggccccugcuggu

SEQ ID NO: 2473886 - RNA, 12 nt, Human
cccggcccccug

SEQ ID NO: 2473887 - RNA, 16 nt, Human
cccggccccagccaga

SEQ ID NO: 2473888 - RNA, 15 nt, Human
cccggccccagccag

SEQ ID NO: 2473889 - RNA, 14 nt, Human
cccggccccagcca

SEQ ID NO: 2473890 - RNA, 13 nt, Human
cccggccccagcc

SEQ ID NO: 2473891 - RNA, 19 nt, Human
cccggccauguccuuagca

SEQ ID NO: 2473892 - RNA, 11 nt, Human
cccggccagcc

SEQ ID NO: 2473893 - RNA, 15 nt, Human
cccggccccugcugg

SEQ ID NO: 2473894 - RNA, 15 nt, Human
cccgggaagggggcu

SEQ ID NO: 2473895 - RNA, 20 nt, Human
cccggcuaauuuuuguauuu

SEQ ID NO: 2473896 - RNA, 15 nt, Human
cccggcgcccucugu

SEQ ID NO: 2473897 - RNA, 14 nt, Human
cccggcgcccucug

SEQ ID NO: 2473898 - RNA, 21 nt, Human
cccggccugcucccagcagcc

SEQ ID NO: 2473899 - RNA, 20 nt, Human
cccggccugcucccagcagc

SEQ ID NO: 2473900 - RNA, 18 nt, Human
cccggccugcucccagca

SEQ ID NO: 2473901 - RNA, 17 nt, Human
cccggccugcucccagc

SEQ ID NO: 2473902 - RNA, 18 nt, Human
cccggccucagcaccccu

SEQ ID NO: 2473903 - RNA, 20 nt, Human
cccggcgcccucuguccuga

SEQ ID NO: 2473904 - RNA, 18 nt, Human
cccggcgcccucuguccu

SEQ ID NO: 2473905 - RNA, 16 nt, Human
cccggcgcccucuguc

SEQ ID NO: 2473906 - RNA, 19 nt, Human
cccggcgcccucuguccug

SEQ ID NO: 2473907 - RNA, 14 nt, Human
cccggcgcgguggc

SEQ ID NO: 2473908 - RNA, 19 nt, Human
cccggcgcgguggcucacg

SEQ ID NO: 2473909 - RNA, 22 nt, Human
cccggcgcgguggcucacgccu

SEQ ID NO: 2473910 - RNA, 18 nt, Human
cccgaauagcugggacua

SEQ ID NO: 2473911 - RNA, 17 nt, Human
cccgaauagcugggacu

SEQ ID NO: 2473912 - RNA, 16 nt, Human
cccgaauagcugggac

SEQ ID NO: 2473913 - RNA, 13 nt, Human
ccccuucugaccc

SEQ ID NO: 2473914 - RNA, 19 nt, Human
ccccuucucuccuccccaa

SEQ ID NO: 2473915 - RNA, 15 nt, Human
ccccuucucuccucc

SEQ ID NO: 2473916 - RNA, 12 nt, Human
ccccuucucugc

SEQ ID NO: 2473917 - RNA, 13 nt, Human
ccccuucucugcu

SEQ ID NO: 2473918 - RNA, 14 nt, Human
ccccuucucugcuc

SEQ ID NO: 2473919 - RNA, 14 nt, Human
ccccuucugaccca

SEQ ID NO: 2473920 - RNA, 16 nt, Human
ccccuucucugcucca

SEQ ID NO: 2473921 - RNA, 22 nt, Human
ccccuucucugcuccaccacau

SEQ ID NO: 2473922 - RNA, 19 nt, Human
cccucaacaagggagagac

SEQ ID NO: 2473923 - RNA, 18 nt, Human
cccucaacaagggagaga

SEQ ID NO: 2473924 - RNA, 17 nt, Human
cccucaacaagggagag

SEQ ID NO: 2473925 - RNA, 20 nt, Human
cccucaaaugacccaaagac

SEQ ID NO: 2473926 - RNA, 16 nt, Human
cccucaaccucuucug

SEQ ID NO: 2473927 - RNA, 16 nt, Human
cccucaacucuccucc

SEQ ID NO: 2473928 - RNA, 16 nt, Human
cccucacccuggggcu

SEQ ID NO: 2473929 - RNA, 21 nt, Human
cccucaacaagggagagaccu

SEQ ID NO: 2473930 - RNA, 15 nt, Human
cccucacccuggggc

SEQ ID NO: 2473931 - RNA, 14 nt, Human
cccucaccuccucu

SEQ ID NO: 2473932 - RNA, 14 nt, Human
cccucaccugggca

SEQ ID NO: 2473933 - RNA, 15 nt, Human
cccucaccugggcac

SEQ ID NO: 2473934 - RNA, 21 nt, Human
cccgggaagggggcugggaca

SEQ ID NO: 2473935 - RNA, 18 nt, Human
cccgggaagggggcuggg

SEQ ID NO: 2473936 - RNA, 19 nt, Human
cccucaaaugacccaaaga

SEQ ID NO: 2473937 - RNA, 18 nt, Human
cccucaaaugacccaaag

SEQ ID NO: 2473938 - RNA, 17 nt, Human
cccggcuaauuuuugua

SEQ ID NO: 2473939 - RNA, 16 nt, Human
cccucaacaccucugc

SEQ ID NO: 2473940 - RNA, 12 nt, Human
cccucagcucca

SEQ ID NO: 2473941 - RNA, 13 nt, Human
cccucaggacugc

SEQ ID NO: 2473942 - RNA, 17 nt, Human
cccucaggacugcaaca

SEQ ID NO: 2473943 - RNA, 18 nt, Human
cccucaggcauaggccug

SEQ ID NO: 2473944 - RNA, 19 nt, Human
cccucaggcauaggccugg

SEQ ID NO: 2473945 - RNA, 20 nt, Human
cccucaggcauaggccuggg

SEQ ID NO: 2473946 - RNA, 21 nt, Human
cccucaggcauaggccugggu

SEQ ID NO: 2473947 - RNA, 22 nt, Human
cccucaggcauaggccugggug

SEQ ID NO: 2473948 - RNA, 12 nt, Human
cccucagggauc

SEQ ID NO: 2473949 - RNA, 23 nt, Human
cccucaggcauaggccugggugc

SEQ ID NO: 2473950 - RNA, 16 nt, Human
cccucagcaccccuuc

SEQ ID NO: 2473951 - RNA, 21 nt, Human
cccucaccuuggcaccagaca

SEQ ID NO: 2473952 - RNA, 23 nt, Human
cccucaccuuggcaccagacacc

SEQ ID NO: 2473953 - RNA, 21 nt, Human
cccucaccuugcaacacacag

SEQ ID NO: 2473954 - RNA, 20 nt, Human
cccucaccuuggcaccagac

SEQ ID NO: 2473955 - RNA, 18 nt, Human
cccucaccuugcaacaca

SEQ ID NO: 2473956 - RNA, 21 nt, Human
cccucaccuguagcagccagu

SEQ ID NO: 2473957 - RNA, 17 nt, Human
cccucaccugggcaccu

SEQ ID NO: 2473958 - RNA, 23 nt, Human
cccucaccugggcaccuggggag

SEQ ID NO: 2473959 - RNA, 23 nt, Human
cccucagccccucuugcccccca

SEQ ID NO: 2473960 - RNA, 17 nt, Human
cccucagccccucuugc

SEQ ID NO: 2473961 - RNA, 21 nt, Human
cccucagccccucuugccccc

SEQ ID NO: 2473962 - RNA, 20 nt, Human
cccucagccccaccccaggu

SEQ ID NO: 2473963 - RNA, 12 nt, Human
cccucagccccu

SEQ ID NO: 2473964 - RNA, 13 nt, Human
cccucagccccuc

SEQ ID NO: 2473965 - RNA, 14 nt, Human
cccucagccccucu

SEQ ID NO: 2473966 - RNA, 19 nt, Human
cccucagccccaccccagg

SEQ ID NO: 2473967 - RNA, 21 nt, Human
cccucagcaccccuuccaugu

SEQ ID NO: 2473968 - RNA, 19 nt, Human
cccucagcaccccuuccau

SEQ ID NO: 2473969 - RNA, 18 nt, Human
cccucagcaccccuucca

SEQ ID NO: 2473970 - RNA, 17 nt, Human
cccucagcaccccuucc

SEQ ID NO: 2473971 - RNA, 23 nt, Human
ccaggaucaugguguaauaagac

SEQ ID NO: 2473972 - RNA, 20 nt, Human
ccaggaucaugguguaauaa

SEQ ID NO: 2473973 - RNA, 17 nt, Human
ccaggaucaugguguaa

SEQ ID NO: 2473974 - RNA, 15 nt, Human
ccaggaucauggugu

SEQ ID NO: 2473975 - RNA, 21 nt, Human
ccaggaucagauugcauguga

SEQ ID NO: 2473976 - RNA, 14 nt, Human
ccaggaucauggug

SEQ ID NO: 2473977 - RNA, 19 nt, Human
ccaggaucagauugcaugu

SEQ ID NO: 2473978 - RNA, 17 nt, Human
ccaggauccagaagggg

SEQ ID NO: 2473979 - RNA, 20 nt, Human
ccaggaugagcaucccagga

SEQ ID NO: 2473980 - RNA, 21 nt, Human
ccaggauggaacacggccaca

SEQ ID NO: 2473981 - RNA, 23 nt, Human
ccaggauagugggcaccccacug

SEQ ID NO: 2473982 - RNA, 14 nt, Human
ccaggaucagauug

SEQ ID NO: 2473983 - RNA, 18 nt, Human
ccaggaucagauugcaug

SEQ ID NO: 2473984 - RNA, 17 nt, Human
ccaggcuggcgcagcca

SEQ ID NO: 2473985 - RNA, 16 nt, Human
ccaggcuggcgcagcc

SEQ ID NO: 2473986 - RNA, 15 nt, Human
ccaggcuggcgcagc

SEQ ID NO: 2473987 - RNA, 14 nt, Human
ccaggcuggcgcag

SEQ ID NO: 2473988 - RNA, 13 nt, Human
ccaggcuggcgca

SEQ ID NO: 2473989 - RNA, 23 nt, Human
ccaggcuggccagccccacagcc

SEQ ID NO: 2473990 - RNA, 22 nt, Human
ccaggcuggccagccccacagc

SEQ ID NO: 2473991 - RNA, 21 nt, Human
ccaggcuggccagccccacag

SEQ ID NO: 2473992 - RNA, 20 nt, Human
ccaggcuggccagccccaca

SEQ ID NO: 2473993 - RNA, 18 nt, Human
ccaggcuggccagcccca

SEQ ID NO: 2473994 - RNA, 17 nt, Human
ccaggcuggccagcccc

SEQ ID NO: 2473995 - RNA, 16 nt, Human
ccaggcuggccagccc

SEQ ID NO: 2473996 - RNA, 15 nt, Human
ccaggcuggccagcc

SEQ ID NO: 2473997 - RNA, 14 nt, Human
ccaggcuggccagc

SEQ ID NO: 2473998 - RNA, 13 nt, Human
ccaggcuggccag

SEQ ID NO: 2473999 - RNA, 22 nt, Human
ccaggcuggcgcagccaaggcc

SEQ ID NO: 2474000 - RNA, 21 nt, Human
ccaggcuggcgcagccaaggc

SEQ ID NO: 2474001 - RNA, 19 nt, Human
ccaggcuggcgcagccaag

SEQ ID NO: 2474002 - RNA, 18 nt, Human
ccaggcuggcgcagccaa

SEQ ID NO: 2474003 - RNA, 12 nt, Human
ccaggcuggcgu

SEQ ID NO: 2474004 - RNA, 19 nt, Human
ccaggggaaagaugagcuu

SEQ ID NO: 2474005 - RNA, 23 nt, Human
ccaggcuggcgcagccaaggccg

SEQ ID NO: 2474006 - RNA, 21 nt, Human
ccaggggaaaaucagccugcu

SEQ ID NO: 2474007 - RNA, 14 nt, Human
ccaggggagcccuc

SEQ ID NO: 2474008 - RNA, 13 nt, Human
ccaggggagcccu

SEQ ID NO: 2474009 - RNA, 16 nt, Human
ccaggggaguuguguc

SEQ ID NO: 2474010 - RNA, 18 nt, Human
ccaggggaguugugucug

SEQ ID NO: 2474011 - RNA, 18 nt, Human
ccaggggaccacaccucc

SEQ ID NO: 2474012 - RNA, 13 nt, Human
ccaggggaccaca

SEQ ID NO: 2474013 - RNA, 21 nt, Human
ccaggggagagggucuggaga

SEQ ID NO: 2474014 - RNA, 18 nt, Human
ccaggggagagggucugg

SEQ ID NO: 2474015 - RNA, 20 nt, Human
ccaggggagagggucuggag

SEQ ID NO: 2474016 - RNA, 12 nt, Human
ccaggcuggcca

SEQ ID NO: 2474017 - RNA, 14 nt, Human
ccaggcugcuggac

SEQ ID NO: 2474018 - RNA, 21 nt, Human
ccaggcugcucuugaacuccu

SEQ ID NO: 2474019 - RNA, 19 nt, Human
ccaggcugcucagggcugg

SEQ ID NO: 2474020 - RNA, 17 nt, Human
ccaggcugcucagggcu

SEQ ID NO: 2474021 - RNA, 14 nt, Human
ccaggcugccgugg

SEQ ID NO: 2474022 - RNA, 19 nt, Human
ccaggcugccaaggccaga

SEQ ID NO: 2474023 - RNA, 20 nt, Human
ccaggcugccaaggccagag

SEQ ID NO: 2474024 - RNA, 18 nt, Human
ccaggcugccguggggcc

SEQ ID NO: 2474025 - RNA, 15 nt, Human
ccaggcugccguggg

SEQ ID NO: 2474026 - RNA, 13 nt, Human
ccaggcugcucag

SEQ ID NO: 2474027 - RNA, 14 nt, Human
ccaggcaggucuug

SEQ ID NO: 2474028 - RNA, 12 nt, Human
ccaggcaggucu

SEQ ID NO: 2474029 - RNA, 23 nt, Human
ccaggcaggucuugaacuccugg

SEQ ID NO: 2474030 - RNA, 17 nt, Human
ccaggcaggugccugga

SEQ ID NO: 2474031 - RNA, 22 nt, Human
ccaggauggaggggugguccug

SEQ ID NO: 2474032 - RNA, 20 nt, Human
ccaggauggcccuucccacu

SEQ ID NO: 2474033 - RNA, 19 nt, Human
ccaggcagguagccagggg

SEQ ID NO: 2474034 - RNA, 17 nt, Human
ccaggaucccaggggcc

SEQ ID NO: 2474035 - RNA, 14 nt, Human
ccaggauggagggg

SEQ ID NO: 2474036 - RNA, 18 nt, Human
ccaguccuagcugcacag

SEQ ID NO: 2474037 - RNA, 14 nt, Human
ccaguccccuuugu

SEQ ID NO: 2474038 - RNA, 12 nt, Human
ccagucccuggg

SEQ ID NO: 2474039 - RNA, 13 nt, Human
ccagucccugggg

SEQ ID NO: 2474040 - RNA, 15 nt, Human
ccagucccuggggga

SEQ ID NO: 2474041 - RNA, 19 nt, Human
ccagucccugggggaagcc

SEQ ID NO: 2474042 - RNA, 22 nt, Human
ccagucccugggggaagcccug

SEQ ID NO: 2474043 - RNA, 23 nt, Human
ccagucccugggggaagcccugg

SEQ ID NO: 2474044 - RNA, 15 nt, Human
ccagucccugaggca

SEQ ID NO: 2474045 - RNA, 17 nt, Human
ccaguccccgugccccg

SEQ ID NO: 2474046 - RNA, 15 nt, Human
ccaguccccgugccc

SEQ ID NO: 2474047 - RNA, 22 nt, Human
ccaguccccgugccccgccucc

SEQ ID NO: 2474048 - RNA, 18 nt, Human
ccagucccccugccccag

SEQ ID NO: 2474049 - RNA, 17 nt, Human
ccaggggugcccccucc

SEQ ID NO: 2474050 - RNA, 16 nt, Human
ccaggggugcccccuc

SEQ ID NO: 2474051 - RNA, 15 nt, Human
ccaggggugcccccu

SEQ ID NO: 2474052 - RNA, 13 nt, Human
ccaggggugcccc

SEQ ID NO: 2474053 - RNA, 19 nt, Human
ccagucagguaguugcaau

SEQ ID NO: 2474054 - RNA, 18 nt, Human
ccaguccaaauguccucc

SEQ ID NO: 2474055 - RNA, 19 nt, Human
ccaguccaggcugccgugg

SEQ ID NO: 2474056 - RNA, 16 nt, Human
ccaguccaggcugccg

SEQ ID NO: 2474057 - RNA, 15 nt, Human
ccaguccaggcugcc

SEQ ID NO: 2474058 - RNA, 14 nt, Human
ccaguccaggcugc

SEQ ID NO: 2474059 - RNA, 22 nt, Human
ccaguccaaucucauggagaag

SEQ ID NO: 2474060 - RNA, 13 nt, Human
ccaguccaggcug

SEQ ID NO: 2474061 - RNA, 21 nt, Human
ccaguccaaucucauggagaa

SEQ ID NO: 2474062 - RNA, 14 nt, Human
ccaguccaaggaaa

SEQ ID NO: 2474063 - RNA, 21 nt, Human
ccaguccaaauguccuccaga

SEQ ID NO: 2474064 - RNA, 19 nt, Human
ccaggggucucccuggagu

SEQ ID NO: 2474065 - RNA, 18 nt, Human
ccaggggucucccuggag

SEQ ID NO: 2474066 - RNA, 17 nt, Human
ccaggggucucccugga

SEQ ID NO: 2474067 - RNA, 21 nt, Human
ccaggggugauuucagagagg

SEQ ID NO: 2474068 - RNA, 20 nt, Human
ccaggggugauuucagagag

SEQ ID NO: 2474069 - RNA, 19 nt, Human
ccaggggugauuucagaga

SEQ ID NO: 2474070 - RNA, 14 nt, Human
ccaggggucccagc

SEQ ID NO: 2474071 - RNA, 17 nt, Human
ccaggggucccagccac

SEQ ID NO: 2474072 - RNA, 16 nt, Human
ccaggggucucccugg

SEQ ID NO: 2474073 - RNA, 18 nt, Human
ccaggggucccagccacc

SEQ ID NO: 2474074 - RNA, 19 nt, Human
ccaggggggugaggagcug

SEQ ID NO: 2474075 - RNA, 20 nt, Human
ccaggggggugaggagcugg

SEQ ID NO: 2474076 - RNA, 17 nt, Human
ccaggggggugaggagc

SEQ ID NO: 2474077 - RNA, 23 nt, Human
ccagggggccagucccugaggca

SEQ ID NO: 2474078 - RNA, 21 nt, Human
ccaggggaggccugaggcuuc

SEQ ID NO: 2474079 - RNA, 22 nt, Human
ccagcuuugcccaacaccagcc

SEQ ID NO: 2474080 - RNA, 19 nt, Human
ccagcuuugcccaacacca

SEQ ID NO: 2474081 - RNA, 18 nt, Human
ccagcuuugcccaacacc

SEQ ID NO: 2474082 - RNA, 15 nt, Human
ccagcuuugcccaac

SEQ ID NO: 2474083 - RNA, 20 nt, Human
ccagcuuugcuaccaaagca

SEQ ID NO: 2474084 - RNA, 18 nt, Human
ccagcuuuuccucccuug

SEQ ID NO: 2474085 - RNA, 16 nt, Human
ccagcuuuuccucccu

SEQ ID NO: 2474086 - RNA, 23 nt, Human
ccagcuuuucccaaaagcccauu

SEQ ID NO: 2474087 - RNA, 13 nt, Human
ccagcuuuuccca

SEQ ID NO: 2474088 - RNA, 23 nt, Human
ccaggaaacuccacaucugccuu

SEQ ID NO: 2474089 - RNA, 22 nt, Human
ccaggaaacuccacaucugccu

SEQ ID NO: 2474090 - RNA, 21 nt, Human
ccaggaaacuccacaucugcc

SEQ ID NO: 2474091 - RNA, 20 nt, Human
ccaggaaacuccacaucugc

SEQ ID NO: 2474092 - RNA, 19 nt, Human
ccaggaaacuccacaucug

SEQ ID NO: 2474093 - RNA, 17 nt, Human
ccagccccauccucugu

SEQ ID NO: 2474094 - RNA, 15 nt, Human
ccagccccauccucu

SEQ ID NO: 2474095 - RNA, 13 nt, Human
ccagccccuagcc

SEQ ID NO: 2474096 - RNA, 17 nt, Human
ccagccccggggugagu

SEQ ID NO: 2474097 - RNA, 16 nt, Human
ccagccccaucaggac

SEQ ID NO: 2474098 - RNA, 17 nt, Human
ccagcagacauugucag

SEQ ID NO: 2474099 - RNA, 15 nt, Human
ccagcagacauuguc

SEQ ID NO: 2474100 - RNA, 14 nt, Human
ccagcagacauugu

SEQ ID NO: 2474101 - RNA, 13 nt, Human
ccagcagacauug

SEQ ID NO: 2474102 - RNA, 18 nt, Human
ccagccccauccucugua

SEQ ID NO: 2474103 - RNA, 18 nt, Human
ccagccccggcccugggc

SEQ ID NO: 2474104 - RNA, 13 nt, Human
ccagcagagcacc

SEQ ID NO: 2474105 - RNA, 12 nt, Human
ccagcagagcac

SEQ ID NO: 2474106 - RNA, 14 nt, Human
ccagcagagcaccu

SEQ ID NO: 2474107 - RNA, 17 nt, Human
ccagccccagugcccac

SEQ ID NO: 2474108 - RNA, 15 nt, Human
ccagcacuuguauau

SEQ ID NO: 2474109 - RNA, 21 nt, Human
ccagcacuuggagaggcugag

SEQ ID NO: 2474110 - RNA, 15 nt, Human
ccagcacuuggagag

SEQ ID NO: 2474111 - RNA, 23 nt, Human
ccacucgggaggcugagacagga

SEQ ID NO: 2474112 - RNA, 16 nt, Human
ccacucuacccuccca

SEQ ID NO: 2474113 - RNA, 15 nt, Human
ccagcacugucucag

SEQ ID NO: 2474114 - RNA, 20 nt, Human
ccacucgggaggcugagaca

SEQ ID NO: 2474115 - RNA, 18 nt, Human
ccacucgcuucccccaua

SEQ ID NO: 2474116 - RNA, 21 nt, Human
ccacucgcuucccccauagcc

SEQ ID NO: 2474117 - RNA, 15 nt, Human
ccacuccucuuauuu

SEQ ID NO: 2474118 - RNA, 14 nt, Human
ccacuccuguacac

SEQ ID NO: 2474119 - RNA, 15 nt, Human
ccacuccuguacacu

SEQ ID NO: 2474120 - RNA, 12 nt, Human
ccacuccuuccu

SEQ ID NO: 2474121 - RNA, 13 nt, Human
ccacuccuuccug

SEQ ID NO: 2474122 - RNA, 22 nt, Human
ccacuccuuccugccaccugcu

SEQ ID NO: 2474123 - RNA, 13 nt, Human
ccacucgcuuccc

SEQ ID NO: 2474124 - RNA, 16 nt, Human
ccacucgcuuccccca

SEQ ID NO: 2474125 - RNA, 23 nt, Human
ccagcacuuugggaggccaagga

SEQ ID NO: 2474126 - RNA, 19 nt, Human
ccagcacuuugggaggccu

SEQ ID NO: 2474127 - RNA, 21 nt, Human
ccagcacuuugggaggccaag

SEQ ID NO: 2474128 - RNA, 12 nt, Human
ccagcagacauu

SEQ ID NO: 2474129 - RNA, 21 nt, Human
ccagcacuuugggaggcugag

SEQ ID NO: 2474130 - RNA, 16 nt, Human
ccagcacuuguccagc

SEQ ID NO: 2474131 - RNA, 19 nt, Human
ccagcacuuguccagcuga

SEQ ID NO: 2474132 - RNA, 20 nt, Human
ccagcacuuguccagcugag

SEQ ID NO: 2474133 - RNA, 14 nt, Human
ccagcacuuuggga

SEQ ID NO: 2474134 - RNA, 15 nt, Human
ccagcacuuugggag

SEQ ID NO: 2474135 - RNA, 16 nt, Human
ccagcacuuugggagg

SEQ ID NO: 2474136 - RNA, 19 nt, Human
ccagcacuuugggaggcca

SEQ ID NO: 2474137 - RNA, 11 nt, Human
ccagcacuuug

SEQ ID NO: 2474138 - RNA, 17 nt, Human
ccagcacuuugggaggc

SEQ ID NO: 2474139 - RNA, 24 nt, Human
ccagccccuucugacccaugcugc

SEQ ID NO: 2474140 - RNA, 23 nt, Human
ccagccccuucugacccaugcug

SEQ ID NO: 2474141 - RNA, 23 nt, Human
ccagccccuagcccaggagagag

SEQ ID NO: 2474142 - RNA, 22 nt, Human
ccagccccuagcccaggagaga

SEQ ID NO: 2474143 - RNA, 19 nt, Human
ccagccccuagcccaggag

SEQ ID NO: 2474144 - RNA, 18 nt, Human
ccagccccuagcccagga

SEQ ID NO: 2474145 - RNA, 17 nt, Human
ccagccccuagcccagg

SEQ ID NO: 2474146 - RNA, 16 nt, Human
ccagccccuagcccag

SEQ ID NO: 2474147 - RNA, 15 nt, Human
ccagccccuagccca

SEQ ID NO: 2474148 - RNA, 14 nt, Human
ccagccccuagccc

SEQ ID NO: 2474149 - RNA, 11 nt, Human
ccagccccucc

SEQ ID NO: 2474150 - RNA, 12 nt, Human
ccagccccuccc

SEQ ID NO: 2474151 - RNA, 13 nt, Human
ccagccccuccca

SEQ ID NO: 2474152 - RNA, 14 nt, Human
ccagccccucccac

SEQ ID NO: 2474153 - RNA, 15 nt, Human
ccagccccucccacc

SEQ ID NO: 2474154 - RNA, 16 nt, Human
ccagccccucccacca

SEQ ID NO: 2474155 - RNA, 21 nt, Human
ccagccccucccaccacagca

SEQ ID NO: 2474156 - RNA, 17 nt, Human
ccagcuacuugggaagc

SEQ ID NO: 2474157 - RNA, 16 nt, Human
ccagcuacuugggaag

SEQ ID NO: 2474158 - RNA, 14 nt, Human
ccagcuacuuggga

SEQ ID NO: 2474159 - RNA, 22 nt, Human
ccagcccggccugcucccagca

SEQ ID NO: 2474160 - RNA, 20 nt, Human
ccagcccggccugcucccag

SEQ ID NO: 2474161 - RNA, 19 nt, Human
ccagcccggccugcuccca

SEQ ID NO: 2474162 - RNA, 17 nt, Human
ccagcuacuuccuccuc

SEQ ID NO: 2474163 - RNA, 15 nt, Human
ccagcuacuuccucc

SEQ ID NO: 2474164 - RNA, 17 nt, Human
ccagcccggcugguuuu

SEQ ID NO: 2474165 - RNA, 17 nt, Human
ccagcccggccugcucc

SEQ ID NO: 2474166 - RNA, 15 nt, Human
ccagcccggccugcu

SEQ ID NO: 2474167 - RNA, 14 nt, Human
ccagcccggccugc

SEQ ID NO: 2474168 - RNA, 13 nt, Human
ccagcccggccug

SEQ ID NO: 2474169 - RNA, 13 nt, Human
ccagccccucugg

SEQ ID NO: 2474170 - RNA, 14 nt, Human
ccagccccuugaga

SEQ ID NO: 2474171 - RNA, 20 nt, Human
ccagccccucccaccacagc

SEQ ID NO: 2474172 - RNA, 14 nt, Human
ccagcuccccaaga

SEQ ID NO: 2474173 - RNA, 23 nt, Human
ccagcuccccaagaaagccucag

SEQ ID NO: 2474174 - RNA, 15 nt, Human
ccagcucccccggga

SEQ ID NO: 2474175 - RNA, 12 nt, Human
ccagcuuucccu

SEQ ID NO: 2474176 - RNA, 14 nt, Human
ccagcuuucccugc

SEQ ID NO: 2474177 - RNA, 18 nt, Human
ccagcuuucccugccucu

SEQ ID NO: 2474178 - RNA, 14 nt, Human
ccagcucccucuau

SEQ ID NO: 2474179 - RNA, 21 nt, Human
ccagcucccccgggaggggcc

SEQ ID NO: 2474180 - RNA, 17 nt, Human
ccagcucccccgggagg

SEQ ID NO: 2474181 - RNA, 14 nt, Human
ccagcucccuagga

SEQ ID NO: 2474182 - RNA, 21 nt, Human
ccagcuauuuuuacuagaaca

SEQ ID NO: 2474183 - RNA, 19 nt, Human
ccagcuauuuuuacuagaa

SEQ ID NO: 2474184 - RNA, 14 nt, Human
ccagcuccaaccug

SEQ ID NO: 2474185 - RNA, 15 nt, Human
ccagcuccaaccugc

SEQ ID NO: 2474186 - RNA, 21 nt, Human
ccagcuccaagaccuguuggu

SEQ ID NO: 2474187 - RNA, 19 nt, Human
ccagcuccaagaccuguug

SEQ ID NO: 2474188 - RNA, 20 nt, Human
ccagcuccaaccugcaaaga

SEQ ID NO: 2474189 - RNA, 22 nt, Human
ccagcuccaaggggaaucagaa

SEQ ID NO: 2474190 - RNA, 14 nt, Human
ccagcuauaccugu

SEQ ID NO: 2474191 - RNA, 15 nt, Human
ccagcuauaccugug

SEQ ID NO: 2474192 - RNA, 16 nt, Human
ccagcuauaccugugc

SEQ ID NO: 2474193 - RNA, 18 nt, Human
ccagcuauaccugugccu

SEQ ID NO: 2474194 - RNA, 22 nt, Human
ccagcuauguuauauugaaaaa

SEQ ID NO: 2474195 - RNA, 19 nt, Human
ccagcuauaccugugccuc

SEQ ID NO: 2474196 - RNA, 17 nt, Human
ccagcuauuuuuacuag

SEQ ID NO: 2474197 - RNA, 22 nt, Human
ccagcuauugauauaaauaaaa

SEQ ID NO: 2474198 - RNA, 21 nt, Human
ccauaaugcuacugucucacu

SEQ ID NO: 2474199 - RNA, 19 nt, Human
ccauaauguauaaagaaca

SEQ ID NO: 2474200 - RNA, 20 nt, Human
ccauaauuaugacaguuaua

SEQ ID NO: 2474201 - RNA, 17 nt, Human
ccauaauuuucuucaug

SEQ ID NO: 2474202 - RNA, 21 nt, Human
ccauaauuuucuucaugcaau

SEQ ID NO: 2474203 - RNA, 21 nt, Human
ccauaaucuggacuccucugu

SEQ ID NO: 2474204 - RNA, 14 nt, Human
ccauaaucuggacu

SEQ ID NO: 2474205 - RNA, 19 nt, Human
ccauccagguucagcuugu

SEQ ID NO: 2474206 - RNA, 18 nt, Human
ccauccagguucagcuug

SEQ ID NO: 2474207 - RNA, 20 nt, Human
ccaguuggucccccuuccau

SEQ ID NO: 2474208 - RNA, 18 nt, Human
ccaguuggucccccuucc

SEQ ID NO: 2474209 - RNA, 22 nt, Human
ccauaagguuucguuucuguau

SEQ ID NO: 2474210 - RNA, 20 nt, Human
ccauaagguuucguuucugu

SEQ ID NO: 2474211 - RNA, 15 nt, Human
ccauaaggaauguag

SEQ ID NO: 2474212 - RNA, 17 nt, Human
ccauaagccuccauuua

SEQ ID NO: 2474213 - RNA, 17 nt, Human
ccaguugggagcacugg

SEQ ID NO: 2474214 - RNA, 18 nt, Human
ccaguugggagcacugga

SEQ ID NO: 2474215 - RNA, 19 nt, Human
ccaguugggagcacuggag

SEQ ID NO: 2474216 - RNA, 21 nt, Human
ccauaagccuccauuuaguuc

SEQ ID NO: 2474217 - RNA, 20 nt, Human
ccaucccauaugccugggca

SEQ ID NO: 2474218 - RNA, 19 nt, Human
ccaucccauaugccugggc

SEQ ID NO: 2474219 - RNA, 19 nt, Human
ccauccagugucucacagc

SEQ ID NO: 2474220 - RNA, 20 nt, Human
ccaucccaaacccuucagug

SEQ ID NO: 2474221 - RNA, 21 nt, Human
ccaucccauaugccugggcag

SEQ ID NO: 2474222 - RNA, 11 nt, Human
ccaucccauga

SEQ ID NO: 2474223 - RNA, 16 nt, Human
ccaucccuccccaguu

SEQ ID NO: 2474224 - RNA, 14 nt, Human
ccaucccguuuaga

SEQ ID NO: 2474225 - RNA, 16 nt, Human
ccaucccgaaaaucuc

SEQ ID NO: 2474226 - RNA, 19 nt, Human
ccaucccaugaacacacug

SEQ ID NO: 2474227 - RNA, 19 nt, Human
ccaucccgaaaaucucucg

SEQ ID NO: 2474228 - RNA, 17 nt, Human
ccaucccgacauggacc

SEQ ID NO: 2474229 - RNA, 22 nt, Human
ccaucccgacauggacccggag

SEQ ID NO: 2474230 - RNA, 13 nt, Human
ccaguuggucccc

SEQ ID NO: 2474231 - RNA, 23 nt, Human
ccaguuggguggaugccuggugg

SEQ ID NO: 2474232 - RNA, 15 nt, Human
ccaguugccaucugc

SEQ ID NO: 2474233 - RNA, 22 nt, Human
ccaguuggagcagaugccuccc

SEQ ID NO: 2474234 - RNA, 18 nt, Human
ccaguugaucaaugaaua

SEQ ID NO: 2474235 - RNA, 21 nt, Human
ccaguugcacuuggccucugg

SEQ ID NO: 2474236 - RNA, 14 nt, Human
ccaguugcacuugg

SEQ ID NO: 2474237 - RNA, 20 nt, Human
ccaguugcacuuggccucug

SEQ ID NO: 2474238 - RNA, 22 nt, Human
ccaguucugcuccucuccaggc

SEQ ID NO: 2474239 - RNA, 21 nt, Human
ccaguucugcuccucuccagg

SEQ ID NO: 2474240 - RNA, 20 nt, Human
ccaguucugcuccucuccag

SEQ ID NO: 2474241 - RNA, 19 nt, Human
ccaguucugcuccucucca

SEQ ID NO: 2474242 - RNA, 17 nt, Human
ccaguucugcuccucuc

SEQ ID NO: 2474243 - RNA, 16 nt, Human
ccaguucugcuccucu

SEQ ID NO: 2474244 - RNA, 15 nt, Human
ccaguucugcuccuc

SEQ ID NO: 2474245 - RNA, 14 nt, Human
ccaguucugcuccu

SEQ ID NO: 2474246 - RNA, 13 nt, Human
ccaguucugcucc

SEQ ID NO: 2474247 - RNA, 23 nt, Human
ccaguuccuuucaaugguuugca

SEQ ID NO: 2474248 - RNA, 15 nt, Human
ccauguccuuagcac

SEQ ID NO: 2474249 - RNA, 17 nt, Human
ccaugaguccuugaaaa

SEQ ID NO: 2474250 - RNA, 18 nt, Human
ccaugaguccccuguuug

SEQ ID NO: 2474251 - RNA, 21 nt, Human
ccaugaguggcauggccacca

SEQ ID NO: 2474252 - RNA, 20 nt, Human
ccaugaguggcauggccacc

SEQ ID NO: 2474253 - RNA, 21 nt, Human
ccaugaguuggggucuggcag

SEQ ID NO: 2474254 - RNA, 22 nt, Human
ccaugaguuggggucuggcagc

SEQ ID NO: 2474255 - RNA, 23 nt, Human
ccaugaguuggggucuggcagcc

SEQ ID NO: 2474256 - RNA, 16 nt, Human
ccaugaucccuguguu

SEQ ID NO: 2474257 - RNA, 14 nt, Human
ccaugaucccugug

SEQ ID NO: 2474258 - RNA, 17 nt, Human
ccaugaguuugcccugg

SEQ ID NO: 2474259 - RNA, 18 nt, Human
ccaugaguuugcccuggu

SEQ ID NO: 2474260 - RNA, 20 nt, Human
ccaugaggaacaaggcaagg

SEQ ID NO: 2474261 - RNA, 23 nt, Human
ccaugaggaacaaggcaaggcug

SEQ ID NO: 2474262 - RNA, 22 nt, Human
ccaucccucgugguccccaaca

SEQ ID NO: 2474263 - RNA, 18 nt, Human
ccaugaggaguugcuguu

SEQ ID NO: 2474264 - RNA, 20 nt, Human
ccaugaggaguugcuguuug

SEQ ID NO: 2474265 - RNA, 15 nt, Human
ccaugaggccucagu

SEQ ID NO: 2474266 - RNA, 17 nt, Human
ccaugucgccucugcau

SEQ ID NO: 2474267 - RNA, 16 nt, Human
ccaugucgccucugca

SEQ ID NO: 2474268 - RNA, 15 nt, Human
ccaugucgccucugc

SEQ ID NO: 2474269 - RNA, 12 nt, Human
ccaugucgccuc

SEQ ID NO: 2474270 - RNA, 22 nt, Human
ccauguagcccccuggccucug

SEQ ID NO: 2474271 - RNA, 23 nt, Human
ccauguagcccccuggccucugu

SEQ ID NO: 2474272 - RNA, 15 nt, Human
ccauguaucuaccuc

SEQ ID NO: 2474273 - RNA, 16 nt, Human
ccauguagcaggacug

SEQ ID NO: 2474274 - RNA, 19 nt, Human
ccauguagaagcugcaucu

SEQ ID NO: 2474275 - RNA, 18 nt, Human
ccauguagaagcugcauc

SEQ ID NO: 2474276 - RNA, 15 nt, Human
ccauguagaagcugc

SEQ ID NO: 2474277 - RNA, 14 nt, Human
ccauguagaagcug

SEQ ID NO: 2474278 - RNA, 14 nt, Human
ccauguagcccccu

SEQ ID NO: 2474279 - RNA, 20 nt, Human
ccauguagcccccuggccuc

SEQ ID NO: 2474280 - RNA, 15 nt, Human
ccauguagaaaauuu

SEQ ID NO: 2474281 - RNA, 16 nt, Human
ccauguagaaaauuug

SEQ ID NO: 2474282 - RNA, 13 nt, Human
ccauguacuguag

SEQ ID NO: 2474283 - RNA, 14 nt, Human
ccauguacuguagu

SEQ ID NO: 2474284 - RNA, 15 nt, Human
ccauguacuguaguu

SEQ ID NO: 2474285 - RNA, 22 nt, Human
ccauguacuguaguuuuucuuc

SEQ ID NO: 2474286 - RNA, 16 nt, Human
ccauguacaugaagaa

SEQ ID NO: 2474287 - RNA, 22 nt, Human
ccaugaucccuguguugucucu

SEQ ID NO: 2474288 - RNA, 17 nt, Human
ccaugaucccuguguug

SEQ ID NO: 2474289 - RNA, 19 nt, Human
ccauucuggaagugacuuu

SEQ ID NO: 2474290 - RNA, 14 nt, Human
ccauucuuccuagu

SEQ ID NO: 2474291 - RNA, 19 nt, Human
ccauucuuccuaguuuucu

SEQ ID NO: 2474292 - RNA, 22 nt, Human
ccauucuggauuuugucaagca

SEQ ID NO: 2474293 - RNA, 20 nt, Human
ccauucuuccuaguuuucuc

SEQ ID NO: 2474294 - RNA, 18 nt, Human
ccauugcacuccagccug

SEQ ID NO: 2474295 - RNA, 15 nt, Human
ccauugccaccagga

SEQ ID NO: 2474296 - RNA, 16 nt, Human
ccauugccaccaggag

SEQ ID NO: 2474297 - RNA, 17 nt, Human
ccauugccaccaggaga

SEQ ID NO: 2474298 - RNA, 21 nt, Human
ccauugccaccaggagaacca

SEQ ID NO: 2474299 - RNA, 15 nt, Human
ccauugccuccuccu

SEQ ID NO: 2474300 - RNA, 13 nt, Human
ccauugccuccuc

SEQ ID NO: 2474301 - RNA, 14 nt, Human
ccauugcccugguu

SEQ ID NO: 2474302 - RNA, 21 nt, Human
ccauuggcuauuuaaaacuug

SEQ ID NO: 2474303 - RNA, 17 nt, Human
ccauuucaauucucaaa

SEQ ID NO: 2474304 - RNA, 16 nt, Human
ccauuucaucuauuuc

SEQ ID NO: 2474305 - RNA, 17 nt, Human
ccauuucaucuauuucu

SEQ ID NO: 2474306 - RNA, 16 nt, Human
ccauuuauccaccucc

SEQ ID NO: 2474307 - RNA, 13 nt, Human
ccauuucagagag

SEQ ID NO: 2474308 - RNA, 20 nt, Human
ccauuggcuauuuaaaacuu

SEQ ID NO: 2474309 - RNA, 19 nt, Human
ccauuggcuauuuaaaacu

SEQ ID NO: 2474310 - RNA, 15 nt, Human
ccauuggaucucauu

SEQ ID NO: 2474311 - RNA, 23 nt, Human
ccauugccuccuccuucccaaag

SEQ ID NO: 2474312 - RNA, 16 nt, Human
cccaacucaccccagc

SEQ ID NO: 2474313 - RNA, 15 nt, Human
cccaacucaccccag

SEQ ID NO: 2474314 - RNA, 21 nt, Human
ccauuucauuugugccagaau

SEQ ID NO: 2474315 - RNA, 22 nt, Human
ccauuucauuugugccagaaug

SEQ ID NO: 2474316 - RNA, 17 nt, Human
ccauuucccaucugcac

SEQ ID NO: 2474317 - RNA, 16 nt, Human
ccauuucccaucugca

SEQ ID NO: 2474318 - RNA, 15 nt, Human
ccauuucccaucugc

SEQ ID NO: 2474319 - RNA, 14 nt, Human
ccauuucccaucug

SEQ ID NO: 2474320 - RNA, 13 nt, Human
ccauuucccaucu

SEQ ID NO: 2474321 - RNA, 21 nt, Human
ccauuucaucuauuucugaga

SEQ ID NO: 2474322 - RNA, 21 nt, Human
cccacucuaggggucaggcuc

SEQ ID NO: 2474323 - RNA, 13 nt, Human
cccacucucauuc

SEQ ID NO: 2474324 - RNA, 20 nt, Human
cccacucccuggcucucaga

SEQ ID NO: 2474325 - RNA, 21 nt, Human
cccacucucauuccccaggug

SEQ ID NO: 2474326 - RNA, 17 nt, Human
cccacucuccccacacu

SEQ ID NO: 2474327 - RNA, 14 nt, Human
cccacucucauucc

SEQ ID NO: 2474328 - RNA, 19 nt, Human
cccacucucauuccccagg

SEQ ID NO: 2474329 - RNA, 11 nt, Human
cccacucuccc

SEQ ID NO: 2474330 - RNA, 14 nt, Human
cccacucuccccac

SEQ ID NO: 2474331 - RNA, 15 nt, Human
cccacucuccccaca

SEQ ID NO: 2474332 - RNA, 22 nt, Human
cccacugcuuuuggucugugug

SEQ ID NO: 2474333 - RNA, 15 nt, Human
cccacugcacccccu

SEQ ID NO: 2474334 - RNA, 14 nt, Human
cccacugcaccccc

SEQ ID NO: 2474335 - RNA, 12 nt, Human
cccacugcaccc

SEQ ID NO: 2474336 - RNA, 16 nt, Human
cccacugcacacaccu

SEQ ID NO: 2474337 - RNA, 23 nt, Human
cccacugcuuuuggucuguguga

SEQ ID NO: 2474338 - RNA, 18 nt, Human
cccacugcaauccugucu

SEQ ID NO: 2474339 - RNA, 15 nt, Human
cccacugcaauccug

SEQ ID NO: 2474340 - RNA, 14 nt, Human
cccacugaccagaa

SEQ ID NO: 2474341 - RNA, 16 nt, Human
cccacugacagccucc

SEQ ID NO: 2474342 - RNA, 12 nt, Human
cccacucugugc

SEQ ID NO: 2474343 - RNA, 21 nt, Human
cccacucugcuuugacugagc

SEQ ID NO: 2474344 - RNA, 13 nt, Human
cccaccccacacu

SEQ ID NO: 2474345 - RNA, 14 nt, Human
cccaccccacacuu

SEQ ID NO: 2474346 - RNA, 15 nt, Human
cccaccccacccccu

SEQ ID NO: 2474347 - RNA, 17 nt, Human
cccaccccacccccacc

SEQ ID NO: 2474348 - RNA, 14 nt, Human
cccaccccagccua

SEQ ID NO: 2474349 - RNA, 12 nt, Human
cccaccccugcc

SEQ ID NO: 2474350 - RNA, 12 nt, Human
cccaccccuggg

SEQ ID NO: 2474351 - RNA, 13 nt, Human
cccaccccugugc

SEQ ID NO: 2474352 - RNA, 12 nt, Human
cccaccccugug

SEQ ID NO: 2474353 - RNA, 16 nt, Human
cccaccccugccccca

SEQ ID NO: 2474354 - RNA, 22 nt, Human
cccaccccugggggcucucaug

SEQ ID NO: 2474355 - RNA, 16 nt, Human
cccaccccugugcucc

SEQ ID NO: 2474356 - RNA, 15 nt, Human
cccaccccugugcuc

SEQ ID NO: 2474357 - RNA, 21 nt, Human
cccaccccugugcuccgugcc

SEQ ID NO: 2474358 - RNA, 12 nt, Human
cccaccccuucc

SEQ ID NO: 2474359 - RNA, 13 nt, Human
cccacucccugca

SEQ ID NO: 2474360 - RNA, 12 nt, Human
cccacucccugc

SEQ ID NO: 2474361 - RNA, 14 nt, Human
cccacccucccugg

SEQ ID NO: 2474362 - RNA, 22 nt, Human
cccacucccuggcucucagaag

SEQ ID NO: 2474363 - RNA, 21 nt, Human
cccacccucagcaccccuucc

SEQ ID NO: 2474364 - RNA, 18 nt, Human
cccacccucagcaccccu

SEQ ID NO: 2474365 - RNA, 17 nt, Human
cccacccucagcacccc

SEQ ID NO: 2474366 - RNA, 16 nt, Human
cccacccucagcaccc

SEQ ID NO: 2474367 - RNA, 14 nt, Human
cccacccucagcac

SEQ ID NO: 2474368 - RNA, 13 nt, Human
cccacccucagca

SEQ ID NO: 2474369 - RNA, 12 nt, Human
cccacccucagc

SEQ ID NO: 2474370 - RNA, 16 nt, Human
cccacccgaugcugcu

SEQ ID NO: 2474371 - RNA, 15 nt, Human
cccacccgaugcugc

SEQ ID NO: 2474372 - RNA, 14 nt, Human
cccacccgaugcug

SEQ ID NO: 2474373 - RNA, 14 nt, Human
cccaccccuugcuc

SEQ ID NO: 2474374 - RNA, 13 nt, Human
cccaccccuuccc

SEQ ID NO: 2474375 - RNA, 15 nt, Human
cccaccccuucccca

SEQ ID NO: 2474376 - RNA, 17 nt, Human
cccaccccuuccccacu

SEQ ID NO: 2474377 - RNA, 22 nt, Human
cccaccccuuccccacugccug

SEQ ID NO: 2474378 - RNA, 13 nt, Human
cccacccaggagg

SEQ ID NO: 2474379 - RNA, 21 nt, Human
cccacccagcacccagcaacu

SEQ ID NO: 2474380 - RNA, 12 nt, Human
cccacccaggag

SEQ ID NO: 2474381 - RNA, 12 nt, Human
cccaccccacac

SEQ ID NO: 2474382 - RNA, 19 nt, Human
cccaagcaaaaucauggaa

SEQ ID NO: 2474383 - RNA, 23 nt, Human
cccaagauucacaccugacucug

SEQ ID NO: 2474384 - RNA, 14 nt, Human
cccacccacaugug

SEQ ID NO: 2474385 - RNA, 15 nt, Human
cccacccacauguga

SEQ ID NO: 2474386 - RNA, 15 nt, Human
cccaagcucugcucc

SEQ ID NO: 2474387 - RNA, 20 nt, Human
cccaagauucacaccugacu

SEQ ID NO: 2474388 - RNA, 23 nt, Human
cccaagaggucaaggcugcagug

SEQ ID NO: 2474389 - RNA, 12 nt, Human
cccaagcucugc

SEQ ID NO: 2474390 - RNA, 14 nt, Human
cccaagcucugcuc

SEQ ID NO: 2474391 - RNA, 13 nt, Human
cccaagcucugcu

SEQ ID NO: 2474392 - RNA, 20 nt, Human
cccaacucaccccagcccca

SEQ ID NO: 2474393 - RNA, 17 nt, Human
cccaacucaccccagcc

SEQ ID NO: 2474394 - RNA, 13 nt, Human
cccaacuccagaa

SEQ ID NO: 2474395 - RNA, 20 nt, Human
cccaacuaauuuuuguauuu

SEQ ID NO: 2474396 - RNA, 12 nt, Human
cccaacuccugg

SEQ ID NO: 2474397 - RNA, 15 nt, Human
cccaacucuagcugg

SEQ ID NO: 2474398 - RNA, 16 nt, Human
cccaacucuagcuggg

SEQ ID NO: 2474399 - RNA, 21 nt, Human
cccaacucuagcugggggugg

SEQ ID NO: 2474400 - RNA, 15 nt, Human
cccaagaaugggagg

SEQ ID NO: 2474401 - RNA, 18 nt, Human
cccaagacagaugcccca

SEQ ID NO: 2474402 - RNA, 13 nt, Human
cccaacuccugga

SEQ ID NO: 2474403 - RNA, 15 nt, Human
cccaacuccuggaag

SEQ ID NO: 2474404 - RNA, 17 nt, Human
cccaacuccuggaagcu

SEQ ID NO: 2474405 - RNA, 23 nt, Human
cccaacuccuggaagcugugucc

SEQ ID NO: 2474406 - RNA, 17 nt, Human
cccaagagaugaagagu

SEQ ID NO: 2474407 - RNA, 15 nt, Human
cccaagagaugaaga

SEQ ID NO: 2474408 - RNA, 22 nt, Human
cccaagacuugguguccuuucc

SEQ ID NO: 2474409 - RNA, 19 nt, Human
cccaagacagaugccccag

SEQ ID NO: 2474410 - RNA, 20 nt, Human
cccaagacagaugccccaga

SEQ ID NO: 2474411 - RNA, 21 nt, Human
cccaagacagaugccccagag

SEQ ID NO: 2474412 - RNA, 19 nt, Human
ccuccuaucagaaguuucu

SEQ ID NO: 2474413 - RNA, 22 nt, Human
ccuccuauucaguucccagaau

SEQ ID NO: 2474414 - RNA, 20 nt, Human
ccuccuagggaaaaguucau

SEQ ID NO: 2474415 - RNA, 19 nt, Human
ccuccuaucaccuccccuc

SEQ ID NO: 2474416 - RNA, 13 nt, Human
ccuccucaccccc

SEQ ID NO: 2474417 - RNA, 14 nt, Human
ccuccucaccccca

SEQ ID NO: 2474418 - RNA, 16 nt, Human
ccuccucacccccagc

SEQ ID NO: 2474419 - RNA, 13 nt, Human
ccuccucaccccg

SEQ ID NO: 2474420 - RNA, 15 nt, Human
ccuccucaccccguc

SEQ ID NO: 2474421 - RNA, 23 nt, Human
ccuccuuugugaggaagccgcug

SEQ ID NO: 2474422 - RNA, 15 nt, Human
ccuccucaccucaug

SEQ ID NO: 2474423 - RNA, 14 nt, Human
ccuccucaccucau

SEQ ID NO: 2474424 - RNA, 13 nt, Human
ccuccucaccuca

SEQ ID NO: 2474425 - RNA, 12 nt, Human
ccuccucaccuc

SEQ ID NO: 2474426 - RNA, 18 nt, Human
ccuccuuuuuauguugcc

SEQ ID NO: 2474427 - RNA, 18 nt, Human
ccuccuuuugcuugaaac

SEQ ID NO: 2474428 - RNA, 16 nt, Human
ccucgaaacacagaaa

SEQ ID NO: 2474429 - RNA, 20 nt, Human
ccucgaaacacagaaaccuu

SEQ ID NO: 2474430 - RNA, 18 nt, Human
ccuccuuuucacaguucu

SEQ ID NO: 2474431 - RNA, 14 nt, Human
ccucgcaagcuggg

SEQ ID NO: 2474432 - RNA, 14 nt, Human
ccucgcagagaggc

SEQ ID NO: 2474433 - RNA, 19 nt, Human
ccucgcccaccgcaugccc

SEQ ID NO: 2474434 - RNA, 13 nt, Human
ccucgcccaccgc

SEQ ID NO: 2474435 - RNA, 21 nt, Human
ccucgcccaccgcaugccccc

SEQ ID NO: 2474436 - RNA, 12 nt, Human
ccucgcccaccg

SEQ ID NO: 2474437 - RNA, 12 nt, Human
ccucgcccuggg

SEQ ID NO: 2474438 - RNA, 13 nt, Human
ccucgcccugggu

SEQ ID NO: 2474439 - RNA, 17 nt, Human
ccucgcuggacucucag

SEQ ID NO: 2474440 - RNA, 13 nt, Human
ccucgcugcuucu

SEQ ID NO: 2474441 - RNA, 21 nt, Human
ccucgcuggggcagugcccuc

SEQ ID NO: 2474442 - RNA, 12 nt, Human
ccucggagaaga

SEQ ID NO: 2474443 - RNA, 14 nt, Human
ccucggagaagagc

SEQ ID NO: 2474444 - RNA, 19 nt, Human
ccucggacuuagcugggag

SEQ ID NO: 2474445 - RNA, 20 nt, Human
ccucggacuuagcugggaga

SEQ ID NO: 2474446 - RNA, 18 nt, Human
ccucgcuggacucucagu

SEQ ID NO: 2474447 - RNA, 12 nt, Human
ccucgcuuggac

SEQ ID NO: 2474448 - RNA, 19 nt, Human
ccucccuuggaaaccugcc

SEQ ID NO: 2474449 - RNA, 17 nt, Human
ccucccuucugcuacug

SEQ ID NO: 2474450 - RNA, 15 nt, Human
ccucccuucugcuac

SEQ ID NO: 2474451 - RNA, 16 nt, Human
ccucccuucugcuacu

SEQ ID NO: 2474452 - RNA, 22 nt, Human
ccucccuuccuuuucccugcuu

SEQ ID NO: 2474453 - RNA, 21 nt, Human
ccucccuuccuuuucccugcu

SEQ ID NO: 2474454 - RNA, 10 nt, Human
ccucccuucu

SEQ ID NO: 2474455 - RNA, 13 nt, Human
ccucccuucugcu

SEQ ID NO: 2474456 - RNA, 19 nt, Human
ccucccuuggguucugaua

SEQ ID NO: 2474457 - RNA, 23 nt, Human
ccucccuuggaaaccugcccugc

SEQ ID NO: 2474458 - RNA, 22 nt, Human
ccucccuuggaaaccugcccug

SEQ ID NO: 2474459 - RNA, 21 nt, Human
ccucccuuggaaaccugcccu

SEQ ID NO: 2474460 - RNA, 20 nt, Human
ccucccuuggggccuaugca

SEQ ID NO: 2474461 - RNA, 16 nt, Human
ccucccuucucuucac

SEQ ID NO: 2474462 - RNA, 17 nt, Human
ccucccuuccuuuuccc

SEQ ID NO: 2474463 - RNA, 16 nt, Human
ccucccuuccuuuucc

SEQ ID NO: 2474464 - RNA, 15 nt, Human
ccucccuuccuuuuc

SEQ ID NO: 2474465 - RNA, 13 nt, Human
ccucccuuccuuu

SEQ ID NO: 2474466 - RNA, 15 nt, Human
ccucccuuucucccc

SEQ ID NO: 2474467 - RNA, 14 nt, Human
ccucccuuucuccc

SEQ ID NO: 2474468 - RNA, 13 nt, Human
ccucccuuucucc

SEQ ID NO: 2474469 - RNA, 12 nt, Human
ccucccuuucuc

SEQ ID NO: 2474470 - RNA, 19 nt, Human
ccucccuuuuuccuugucc

SEQ ID NO: 2474471 - RNA, 18 nt, Human
ccucccuuuuuccuuguc

SEQ ID NO: 2474472 - RNA, 17 nt, Human
ccucccuuuuuccuugu

SEQ ID NO: 2474473 - RNA, 16 nt, Human
ccucccuuuuuccuug

SEQ ID NO: 2474474 - RNA, 22 nt, Human
ccuccgacagcccccucugccg

SEQ ID NO: 2474475 - RNA, 20 nt, Human
ccuccgacagcccccucugc

SEQ ID NO: 2474476 - RNA, 21 nt, Human
ccuccgagccggggaguuucu

SEQ ID NO: 2474477 - RNA, 19 nt, Human
ccuccgagagggagagaga

SEQ ID NO: 2474478 - RNA, 16 nt, Human
ccuccgagagggagag

SEQ ID NO: 2474479 - RNA, 14 nt, Human
ccuccgagagggag

SEQ ID NO: 2474480 - RNA, 16 nt, Human
ccuccgauccuuccuc

SEQ ID NO: 2474481 - RNA, 14 nt, Human
ccuccgaggccagu

SEQ ID NO: 2474482 - RNA, 15 nt, Human
ccuccgauccuuccu

SEQ ID NO: 2474483 - RNA, 13 nt, Human
ccuccgccucuug

SEQ ID NO: 2474484 - RNA, 22 nt, Human
ccuccggcgucagccuccagcc

SEQ ID NO: 2474485 - RNA, 20 nt, Human
ccuccggcgucagccuccag

SEQ ID NO: 2474486 - RNA, 19 nt, Human
ccuccggcgucagccucca

SEQ ID NO: 2474487 - RNA, 18 nt, Human
ccuccggcgucagccucc

SEQ ID NO: 2474488 - RNA, 17 nt, Human
ccuccggcgucagccuc

SEQ ID NO: 2474489 - RNA, 16 nt, Human
ccuccggccuccccuc

SEQ ID NO: 2474490 - RNA, 15 nt, Human
ccuccggccuccccu

SEQ ID NO: 2474491 - RNA, 12 nt, Human
ccuccggccucc

SEQ ID NO: 2474492 - RNA, 15 nt, Human
ccuccuagccaccca

SEQ ID NO: 2474493 - RNA, 22 nt, Human
ccuccuaccgaaaccuugccuu

SEQ ID NO: 2474494 - RNA, 19 nt, Human
ccuccuaccgaaaccuugc

SEQ ID NO: 2474495 - RNA, 18 nt, Human
ccuccuaucaccuccccu

SEQ ID NO: 2474496 - RNA, 14 nt, Human
ccuccgccucuugg

SEQ ID NO: 2474497 - RNA, 19 nt, Human
ccuccgccuucacuccggu

SEQ ID NO: 2474498 - RNA, 20 nt, Human
ccuccgcgugaucaaagcca

SEQ ID NO: 2474499 - RNA, 23 nt, Human
ccucaacucuccuccagagucag

SEQ ID NO: 2474500 - RNA, 21 nt, Human
ccucaacucuccuccagaguc

SEQ ID NO: 2474501 - RNA, 19 nt, Human
ccucaacucuccuccagag

SEQ ID NO: 2474502 - RNA, 15 nt, Human
ccucaaccuccuggg

SEQ ID NO: 2474503 - RNA, 17 nt, Human
ccucaaauuacuuugug

SEQ ID NO: 2474504 - RNA, 17 nt, Human
ccucaacaagggagaga

SEQ ID NO: 2474505 - RNA, 16 nt, Human
ccucaacaagggagag

SEQ ID NO: 2474506 - RNA, 15 nt, Human
ccucaacaagggaga

SEQ ID NO: 2474507 - RNA, 16 nt, Human
ccucaacaccucugca

SEQ ID NO: 2474508 - RNA, 19 nt, Human
ccucaacccucccucagcc

SEQ ID NO: 2474509 - RNA, 21 nt, Human
ccucaacccucccucagcccc

SEQ ID NO: 2474510 - RNA, 22 nt, Human
ccucaacccucccucagccccu

SEQ ID NO: 2474511 - RNA, 23 nt, Human
ccucaacccucccucagccccuc

SEQ ID NO: 2474512 - RNA, 18 nt, Human
ccucaacccucccucagc

SEQ ID NO: 2474513 - RNA, 16 nt, Human
ccucaacccucccuca

SEQ ID NO: 2474514 - RNA, 21 nt, Human
ccucaacaagggagagaccuc

SEQ ID NO: 2474515 - RNA, 18 nt, Human
ccucaacaagggagagac

SEQ ID NO: 2474516 - RNA, 22 nt, Human
ccucaacaagggagagaccuca

SEQ ID NO: 2474517 - RNA, 15 nt, Human
ccucaaaucguccag

SEQ ID NO: 2474518 - RNA, 16 nt, Human
ccucaaaugacccaaa

SEQ ID NO: 2474519 - RNA, 19 nt, Human
ccucaaaugacccaaagac

SEQ ID NO: 2474520 - RNA, 14 nt, Human
ccucaaagucugca

SEQ ID NO: 2474521 - RNA, 14 nt, Human
ccucaacugccuac

SEQ ID NO: 2474522 - RNA, 15 nt, Human
ccucaacugccuacu

SEQ ID NO: 2474523 - RNA, 21 nt, Human
ccucaaggccucccacaguga

SEQ ID NO: 2474524 - RNA, 20 nt, Human
ccucaaggccucccacagug

SEQ ID NO: 2474525 - RNA, 20 nt, Human
ccucaagugauucuccugcc

SEQ ID NO: 2474526 - RNA, 20 nt, Human
ccucaagucacucccaagcc

SEQ ID NO: 2474527 - RNA, 20 nt, Human
ccucaaggggccauccuguc

SEQ ID NO: 2474528 - RNA, 19 nt, Human
ccucaagggggacugucuu

SEQ ID NO: 2474529 - RNA, 11 nt, Human
ccucagcucug

SEQ ID NO: 2474530 - RNA, 14 nt, Human
ccucagcucuggga

SEQ ID NO: 2474531 - RNA, 13 nt, Human
ccucagcucuggg

SEQ ID NO: 2474532 - RNA, 12 nt, Human
ccucagcucugg

SEQ ID NO: 2474533 - RNA, 11 nt, Human
ccucagcucca

SEQ ID NO: 2474534 - RNA, 23 nt, Human
ccucaagugauucuccugccuca

SEQ ID NO: 2474535 - RNA, 22 nt, Human
ccucagccuugccagagaucca

SEQ ID NO: 2474536 - RNA, 23 nt, Human
ccucagccuuggauaaugcuguu

SEQ ID NO: 2474537 - RNA, 13 nt, Human
ccucauuccugaa

SEQ ID NO: 2474538 - RNA, 21 nt, Human
ccucauuccaccuucccaugc

SEQ ID NO: 2474539 - RNA, 13 nt, Human
ccucauucaggaa

SEQ ID NO: 2474540 - RNA, 21 nt, Human
ccucaggccaggugcaguggc

SEQ ID NO: 2474541 - RNA, 15 nt, Human
ccucauucaggaaaa

SEQ ID NO: 2474542 - RNA, 16 nt, Human
ccucauucaggaaaac

SEQ ID NO: 2474543 - RNA, 17 nt, Human
ccucauucaggaaaacu

SEQ ID NO: 2474544 - RNA, 22 nt, Human
ccucauucaggaaaacugacag

SEQ ID NO: 2474545 - RNA, 10 nt, Human
ccucaggccu

SEQ ID NO: 2474546 - RNA, 20 nt, Human
ccucagcucugggagaggau

SEQ ID NO: 2474547 - RNA, 13 nt, Human
ccucaggcaggaa

SEQ ID NO: 2474548 - RNA, 15 nt, Human
ccucaggcaggaagg

SEQ ID NO: 2474549 - RNA, 19 nt, Human
ccucaggcaggaagggcag

SEQ ID NO: 2474550 - RNA, 18 nt, Human
ccucaggcauaggccugg

SEQ ID NO: 2474551 - RNA, 22 nt, Human
ccucaggcauaggccugggugc

SEQ ID NO: 2474552 - RNA, 12 nt, Human
ccucaggcaggu

SEQ ID NO: 2474553 - RNA, 18 nt, Human
ccucaggcaggugggaug

SEQ ID NO: 2474554 - RNA, 18 nt, Human
ccucagcucugggagagg

SEQ ID NO: 2474555 - RNA, 17 nt, Human
ccucagcucugggagag

SEQ ID NO: 2474556 - RNA, 16 nt, Human
ccucagcucugggaga

SEQ ID NO: 2474557 - RNA, 15 nt, Human
ccucagcucugggag

SEQ ID NO: 2474558 - RNA, 13 nt, Human
ccucagcugccuc

SEQ ID NO: 2474559 - RNA, 14 nt, Human
ccucagcugccuca

SEQ ID NO: 2474560 - RNA, 15 nt, Human
ccucagcugccucac

SEQ ID NO: 2474561 - RNA, 16 nt, Human
ccucagcugccucacu

SEQ ID NO: 2474562 - RNA, 17 nt, Human
ccucagcugccucacuu

SEQ ID NO: 2474563 - RNA, 18 nt, Human
ccucagcugccucacuuc

SEQ ID NO: 2474564 - RNA, 16 nt, Human
ccucccagucaccuug

SEQ ID NO: 2474565 - RNA, 15 nt, Human
ccucccauccagggc

SEQ ID NO: 2474566 - RNA, 17 nt, Human
ccucccaucacccgcua

SEQ ID NO: 2474567 - RNA, 19 nt, Human
ccuccaagaccuucuccuu

SEQ ID NO: 2474568 - RNA, 17 nt, Human
ccuccaagaccuucucc

SEQ ID NO: 2474569 - RNA, 16 nt, Human
ccuccaagaccuucuc

SEQ ID NO: 2474570 - RNA, 16 nt, Human
ccucauuuaucccuca

SEQ ID NO: 2474571 - RNA, 19 nt, Human
ccucauuuaucccucaacc

SEQ ID NO: 2474572 - RNA, 22 nt, Human
ccucauuucaggagcagccuca

SEQ ID NO: 2474573 - RNA, 20 nt, Human
ccucauuuaucccucaaccc

SEQ ID NO: 2474574 - RNA, 12 nt, Human
ccucccaucacc

SEQ ID NO: 2474575 - RNA, 17 nt, Human
ccucccaguaccuccug

SEQ ID NO: 2474576 - RNA, 21 nt, Human
ccucccagggccagggcccug

SEQ ID NO: 2474577 - RNA, 20 nt, Human
ccuccaagaccuucuccuuc

SEQ ID NO: 2474578 - RNA, 19 nt, Human
ccucauugacaagaacuga

SEQ ID NO: 2474579 - RNA, 17 nt, Human
ccucauuugggguagcu

SEQ ID NO: 2474580 - RNA, 14 nt, Human
ccucccagggccag

SEQ ID NO: 2474581 - RNA, 17 nt, Human
ccuccaagaaucuaucu

SEQ ID NO: 2474582 - RNA, 20 nt, Human
ccucauuugggguagcuaga

SEQ ID NO: 2474583 - RNA, 15 nt, Human
ccucccaggcucuca

SEQ ID NO: 2474584 - RNA, 19 nt, Human
ccuagccuuagaagucaca

SEQ ID NO: 2474585 - RNA, 23 nt, Human
ccuagccugugccucugggacug

SEQ ID NO: 2474586 - RNA, 18 nt, Human
ccuagccuuauccucuga

SEQ ID NO: 2474587 - RNA, 22 nt, Human
ccuagccuuagaagucacacag

SEQ ID NO: 2474588 - RNA, 12 nt, Human
ccuaauaaagcu

SEQ ID NO: 2474589 - RNA, 18 nt, Human
ccuaauaaacauccuuca

SEQ ID NO: 2474590 - RNA, 22 nt, Human
ccgugacagacuccugaggaca

SEQ ID NO: 2474591 - RNA, 20 nt, Human
ccgugacagacuccugagga

SEQ ID NO: 2474592 - RNA, 18 nt, Human
ccgugacagacuccugag

SEQ ID NO: 2474593 - RNA, 18 nt, Human
ccgugaaaacggagcuga

SEQ ID NO: 2474594 - RNA, 17 nt, Human
ccgugaaaacggagcug

SEQ ID NO: 2474595 - RNA, 22 nt, Human
ccgucuuagaaguggaccagga

SEQ ID NO: 2474596 - RNA, 14 nt, Human
ccguccugccugug

SEQ ID NO: 2474597 - RNA, 13 nt, Human
ccgucugugaauu

SEQ ID NO: 2474598 - RNA, 14 nt, Human
ccgucuucagccua

SEQ ID NO: 2474599 - RNA, 15 nt, Human
ccgucuucagccuag

SEQ ID NO: 2474600 - RNA, 15 nt, Human
ccuagcccaggagag

SEQ ID NO: 2474601 - RNA, 13 nt, Human
ccuagcccaggag

SEQ ID NO: 2474602 - RNA, 11 nt, Human
ccuagcccagg

SEQ ID NO: 2474603 - RNA, 16 nt, Human
ccuagccauuccuggu

SEQ ID NO: 2474604 - RNA, 21 nt, Human
ccuagccauuccugguaccca

SEQ ID NO: 2474605 - RNA, 20 nt, Human
ccuagcccaggagagagaaa

SEQ ID NO: 2474606 - RNA, 19 nt, Human
ccuagcccaggagagagaa

SEQ ID NO: 2474607 - RNA, 18 nt, Human
ccuagcccaggagagaga

SEQ ID NO: 2474608 - RNA, 17 nt, Human
ccuagcccaggagagag

SEQ ID NO: 2474609 - RNA, 22 nt, Human
ccuagccccuuagcccccaccc

SEQ ID NO: 2474610 - RNA, 21 nt, Human
ccuagccccuuagcccccacc

SEQ ID NO: 2474611 - RNA, 15 nt, Human
ccuagccauuccugg

SEQ ID NO: 2474612 - RNA, 14 nt, Human
ccuagccauuccug

SEQ ID NO: 2474613 - RNA, 16 nt, Human
ccuagccacccaccac

SEQ ID NO: 2474614 - RNA, 12 nt, Human
ccuagccaccca

SEQ ID NO: 2474615 - RNA, 23 nt, Human
ccuaauuagagcagaugaccccu

SEQ ID NO: 2474616 - RNA, 21 nt, Human
ccuaaugcgcaggcuggcccu

SEQ ID NO: 2474617 - RNA, 20 nt, Human
ccuaaugcgcaggcuggccc

SEQ ID NO: 2474618 - RNA, 22 nt, Human
ccuaauaaacauccuucaagaa

SEQ ID NO: 2474619 - RNA, 12 nt, Human
ccuaaugcugca

SEQ ID NO: 2474620 - RNA, 19 nt, Human
ccuaaugcuccuuguuccu

SEQ ID NO: 2474621 - RNA, 16 nt, Human
ccuaaugcuccuuguu

SEQ ID NO: 2474622 - RNA, 21 nt, Human
ccuagcauacguacacauuuu

SEQ ID NO: 2474623 - RNA, 19 nt, Human
ccuaauguuuaugagccag

SEQ ID NO: 2474624 - RNA, 18 nt, Human
ccuaauguuuaugagcca

SEQ ID NO: 2474625 - RNA, 14 nt, Human
ccuaauuagagcag

SEQ ID NO: 2474626 - RNA, 20 nt, Human
ccggcacagggucugcucuu

SEQ ID NO: 2474627 - RNA, 19 nt, Human
ccggcacagggucugcucu

SEQ ID NO: 2474628 - RNA, 17 nt, Human
ccggccaccugcggugc

SEQ ID NO: 2474629 - RNA, 15 nt, Human
ccggcacuccaugcu

SEQ ID NO: 2474630 - RNA, 13 nt, Human
ccggcagaaggga

SEQ ID NO: 2474631 - RNA, 15 nt, Human
ccggccagccauguc

SEQ ID NO: 2474632 - RNA, 18 nt, Human
ccggccaccugcggugcu

SEQ ID NO: 2474633 - RNA, 15 nt, Human
ccggccccagccaga

SEQ ID NO: 2474634 - RNA, 14 nt, Human
ccggccccagccag

SEQ ID NO: 2474635 - RNA, 16 nt, Human
ccggccccagccagag

SEQ ID NO: 2474636 - RNA, 13 nt, Human
ccggccccagcca

SEQ ID NO: 2474637 - RNA, 12 nt, Human
ccggccccagcc

SEQ ID NO: 2474638 - RNA, 13 nt, Human
ccggccagguggg

SEQ ID NO: 2474639 - RNA, 15 nt, Human
ccggccaggugggcg

SEQ ID NO: 2474640 - RNA, 11 nt, Human
ccggccagccc

SEQ ID NO: 2474641 - RNA, 13 nt, Human
ccggccaggccac

SEQ ID NO: 2474642 - RNA, 14 nt, Human
ccguccucccgggc

SEQ ID NO: 2474643 - RNA, 24 nt, Human
ccguccucaccccuguccucacug

SEQ ID NO: 2474644 - RNA, 23 nt, Human
ccguccucaccccuguccucacu

SEQ ID NO: 2474645 - RNA, 20 nt, Human
ccguccucaccccuguccuc

SEQ ID NO: 2474646 - RNA, 19 nt, Human
ccguccucaccccuguccu

SEQ ID NO: 2474647 - RNA, 16 nt, Human
ccguccucaccccugu

SEQ ID NO: 2474648 - RNA, 14 nt, Human
ccguccucaccccu

SEQ ID NO: 2474649 - RNA, 11 nt, Human
ccguccucacc

SEQ ID NO: 2474650 - RNA, 15 nt, Human
ccguccugccugugg

SEQ ID NO: 2474651 - RNA, 19 nt, Human
ccguccucccgggcccucc

SEQ ID NO: 2474652 - RNA, 16 nt, Human
ccguccucccgggccc

SEQ ID NO: 2474653 - RNA, 13 nt, Human
ccguccugccugu

SEQ ID NO: 2474654 - RNA, 18 nt, Human
ccgucccauauccugccu

SEQ ID NO: 2474655 - RNA, 14 nt, Human
ccgucccccucugg

SEQ ID NO: 2474656 - RNA, 14 nt, Human
ccguccgcccugcu

SEQ ID NO: 2474657 - RNA, 13 nt, Human
ccguccgcccugc

SEQ ID NO: 2474658 - RNA, 17 nt, Human
ccguaccccacccucag

SEQ ID NO: 2474659 - RNA, 16 nt, Human
ccguaccccacccuca

SEQ ID NO: 2474660 - RNA, 15 nt, Human
ccguaccccacccuc

SEQ ID NO: 2474661 - RNA, 14 nt, Human
ccguaccccacccu

SEQ ID NO: 2474662 - RNA, 20 nt, Human
ccguaccccacccucagcac

SEQ ID NO: 2474663 - RNA, 18 nt, Human
ccguaccccacccucagc

SEQ ID NO: 2474664 - RNA, 18 nt, Human
ccguacaacguguccuca

SEQ ID NO: 2474665 - RNA, 13 nt, Human
ccguaccccaccc

SEQ ID NO: 2474666 - RNA, 12 nt, Human
ccguaccccacc

SEQ ID NO: 2474667 - RNA, 18 nt, Human
ccguacauucaauguuua

SEQ ID NO: 2474668 - RNA, 21 nt, Human
ccguaaacacgccugcaaacg

SEQ ID NO: 2474669 - RNA, 17 nt, Human
ccguaauaauuauuauu

SEQ ID NO: 2474670 - RNA, 15 nt, Human
ccguaacccaacucu

SEQ ID NO: 2474671 - RNA, 21 nt, Human
ccgguuucgaaguugaugcaa

SEQ ID NO: 2474672 - RNA, 20 nt, Human
ccgguucuuccagugguuug

SEQ ID NO: 2474673 - RNA, 20 nt, Human
ccgguuucgaaguugaugca

SEQ ID NO: 2474674 - RNA, 16 nt, Human
ccgguucuuccagugg

SEQ ID NO: 2474675 - RNA, 23 nt, Human
ccgcagcccugcagagggcacag

SEQ ID NO: 2474676 - RNA, 18 nt, Human
ccgcagcccugcagaggg

SEQ ID NO: 2474677 - RNA, 13 nt, Human
ccgcagagcuggc

SEQ ID NO: 2474678 - RNA, 14 nt, Human
ccgcagcagcuccc

SEQ ID NO: 2474679 - RNA, 15 nt, Human
ccgcagagcuggccg

SEQ ID NO: 2474680 - RNA, 14 nt, Human
ccgcagcccugcag

SEQ ID NO: 2474681 - RNA, 14 nt, Human
cccuccuuucacca

SEQ ID NO: 2474682 - RNA, 16 nt, Human
cccuccuuccuugacc

SEQ ID NO: 2474683 - RNA, 18 nt, Human
cccuccuuccuugaccag

SEQ ID NO: 2474684 - RNA, 17 nt, Human
cccuccuugccuccugu

SEQ ID NO: 2474685 - RNA, 18 nt, Human
cccuccuugccuccugug

SEQ ID NO: 2474686 - RNA, 13 nt, Human
cccuccuguugca

SEQ ID NO: 2474687 - RNA, 12 nt, Human
cccuccuucaga

SEQ ID NO: 2474688 - RNA, 19 nt, Human
cccuccuguugcacccagc

SEQ ID NO: 2474689 - RNA, 18 nt, Human
cccuccuguugcacccag

SEQ ID NO: 2474690 - RNA, 22 nt, Human
cccuccuguugcacccagcccu

SEQ ID NO: 2474691 - RNA, 11 nt, Human
cccuccuucca

SEQ ID NO: 2474692 - RNA, 15 nt, Human
cccugugauggggcc

SEQ ID NO: 2474693 - RNA, 23 nt, Human
cccugugaguacuacaguccucc

SEQ ID NO: 2474694 - RNA, 21 nt, Human
cccugugaguacuacaguccu

SEQ ID NO: 2474695 - RNA, 14 nt, Human
cccuccuugggcac

SEQ ID NO: 2474696 - RNA, 23 nt, Human
cccuccuugcucugcaggcaccu

SEQ ID NO: 2474697 - RNA, 20 nt, Human
cccuccuugcucugcaggca

SEQ ID NO: 2474698 - RNA, 19 nt, Human
cccuccuugcucugcaggc

SEQ ID NO: 2474699 - RNA, 18 nt, Human
cccuccuuguccacccac

SEQ ID NO: 2474700 - RNA, 16 nt, Human
cccuccuugggcacuu

SEQ ID NO: 2474701 - RNA, 12 nt, Human
cccuccuugucu

SEQ ID NO: 2474702 - RNA, 23 nt, Human
cccugugcugguguccugaccac

SEQ ID NO: 2474703 - RNA, 22 nt, Human
cccugugcugguguccugacca

SEQ ID NO: 2474704 - RNA, 21 nt, Human
cccugugcugguguccugacc

SEQ ID NO: 2474705 - RNA, 20 nt, Human
cccugugcugguguccugac

SEQ ID NO: 2474706 - RNA, 16 nt, Human
cccugugcuggugucc

SEQ ID NO: 2474707 - RNA, 15 nt, Human
cccugugcugguguc

SEQ ID NO: 2474708 - RNA, 14 nt, Human
cccugugcuggugu

SEQ ID NO: 2474709 - RNA, 13 nt, Human
cccugugcuggug

SEQ ID NO: 2474710 - RNA, 23 nt, Human
cccugugaguuuguacagucuug

SEQ ID NO: 2474711 - RNA, 23 nt, Human
cccugugagauuuugcuuuucca

SEQ ID NO: 2474712 - RNA, 24 nt, Human
cccugugacauggugccugagagg

SEQ ID NO: 2474713 - RNA, 22 nt, Human
cccugugacauggugccugaga

SEQ ID NO: 2474714 - RNA, 12 nt, Human
cccugugcuggu

SEQ ID NO: 2474715 - RNA, 22 nt, Human
cccugugcuccgugccuccacc

SEQ ID NO: 2474716 - RNA, 20 nt, Human
cccugugcuccgugccucca

SEQ ID NO: 2474717 - RNA, 18 nt, Human
cccugugcuccgugccuc

SEQ ID NO: 2474718 - RNA, 22 nt, Human
cccuguggaugagcccucagaa

SEQ ID NO: 2474719 - RNA, 23 nt, Human
cccuguggaugagcccucagaac

SEQ ID NO: 2474720 - RNA, 20 nt, Human
cccuguggaugagcccucag

SEQ ID NO: 2474721 - RNA, 21 nt, Human
cccuguggaugagcccucaga

SEQ ID NO: 2474722 - RNA, 14 nt, Human
cccuguggaaggga

SEQ ID NO: 2474723 - RNA, 18 nt, Human
cccuguggaagggacuag

SEQ ID NO: 2474724 - RNA, 16 nt, Human
cccuguggagacuggg

SEQ ID NO: 2474725 - RNA, 21 nt, Human
cccuguggaagggacuaggag

SEQ ID NO: 2474726 - RNA, 23 nt, Human
cccuucuaggguuauugcauuug

SEQ ID NO: 2474727 - RNA, 17 nt, Human
cccuguggagcccgcac

SEQ ID NO: 2474728 - RNA, 19 nt, Human
cccuucucaucacuccccu

SEQ ID NO: 2474729 - RNA, 15 nt, Human
cccuucucaucacuc

SEQ ID NO: 2474730 - RNA, 16 nt, Human
cccuucucagaaucua

SEQ ID NO: 2474731 - RNA, 15 nt, Human
cccuucucagaaucu

SEQ ID NO: 2474732 - RNA, 10 nt, Human
cccuucucca

SEQ ID NO: 2474733 - RNA, 23 nt, Human
cccuucucauuccaacagugagu

SEQ ID NO: 2474734 - RNA, 23 nt, Human
cccuucuccauccacaugggagc

SEQ ID NO: 2474735 - RNA, 21 nt, Human
cccuucuccaucucucuggcc

SEQ ID NO: 2474736 - RNA, 18 nt, Human
cccuucuccaucucucug

SEQ ID NO: 2474737 - RNA, 17 nt, Human
cccuucuccaucucucu

SEQ ID NO: 2474738 - RNA, 13 nt, Human
cccuucuccaucu

SEQ ID NO: 2474739 - RNA, 13 nt, Human
cccuucucccaca

SEQ ID NO: 2474740 - RNA, 19 nt, Human
ccgaagcucuggcugaacc

SEQ ID NO: 2474741 - RNA, 17 nt, Human
ccgaagcucuggcugaa

SEQ ID NO: 2474742 - RNA, 13 nt, Human
ccgacagagggaa

SEQ ID NO: 2474743 - RNA, 12 nt, Human
ccgacagccugg

SEQ ID NO: 2474744 - RNA, 14 nt, Human
ccgacagccuggca

SEQ ID NO: 2474745 - RNA, 13 nt, Human
ccgacagccuggc

SEQ ID NO: 2474746 - RNA, 18 nt, Human
ccgacagcccccucugcc

SEQ ID NO: 2474747 - RNA, 21 nt, Human
ccgaagcucuggcugaacccu

SEQ ID NO: 2474748 - RNA, 22 nt, Human
ccgacagccuggcacagggcag

SEQ ID NO: 2474749 - RNA, 15 nt, Human
ccgacagccuggcac

SEQ ID NO: 2474750 - RNA, 17 nt, Human
ccgaaaaauccucuucc

SEQ ID NO: 2474751 - RNA, 15 nt, Human
ccgaaaaauccucuu

SEQ ID NO: 2474752 - RNA, 15 nt, Human
ccgaacacccucgaa

SEQ ID NO: 2474753 - RNA, 23 nt, Human
ccgaacaucaccgacgcgucucc

SEQ ID NO: 2474754 - RNA, 13 nt, Human
ccgaaccuccucu

SEQ ID NO: 2474755 - RNA, 15 nt, Human
ccgaaccuccucugu

SEQ ID NO: 2474756 - RNA, 16 nt, Human
ccgaaccuccucugug

SEQ ID NO: 2474757 - RNA, 17 nt, Human
ccgaacuguuguauaaa

SEQ ID NO: 2474758 - RNA, 18 nt, Human
ccgaagaaggguccuucc

SEQ ID NO: 2474759 - RNA, 18 nt, Human
ccgaagccgccuguggac

SEQ ID NO: 2474760 - RNA, 16 nt, Human
ccgaagcucuggcuga

SEQ ID NO: 2474761 - RNA, 19 nt, Human
ccgaagaaggguccuuccc

SEQ ID NO: 2474762 - RNA, 20 nt, Human
ccgaagaaggguccuucccu

SEQ ID NO: 2474763 - RNA, 19 nt, Human
cccuucucuccagccccug

SEQ ID NO: 2474764 - RNA, 14 nt, Human
cccuucucuccagc

SEQ ID NO: 2474765 - RNA, 14 nt, Human
cccuucucccauga

SEQ ID NO: 2474766 - RNA, 19 nt, Human
cccuucucccaccccugcc

SEQ ID NO: 2474767 - RNA, 23 nt, Human
cccuucuccaucucucuggcccu

SEQ ID NO: 2474768 - RNA, 22 nt, Human
cccuucuccaucucucuggccc

SEQ ID NO: 2474769 - RNA, 14 nt, Human
cccuucucccacac

SEQ ID NO: 2474770 - RNA, 15 nt, Human
cccuucucccacacu

SEQ ID NO: 2474771 - RNA, 17 nt, Human
cccuucuccucuuguaa

SEQ ID NO: 2474772 - RNA, 22 nt, Human
cccuuuuuuggcugcugaaggc

SEQ ID NO: 2474773 - RNA, 21 nt, Human
cccuuuuuuggcugcugaagg

SEQ ID NO: 2474774 - RNA, 23 nt, Human
cccuuuuuuggcugcugaaggcu

SEQ ID NO: 2474775 - RNA, 15 nt, Human
cccuucucucaucuc

SEQ ID NO: 2474776 - RNA, 20 nt, Human
cccuucuccucuuguaaaua

SEQ ID NO: 2474777 - RNA, 18 nt, Human
cccuucuccucuuguaaa

SEQ ID NO: 2474778 - RNA, 18 nt, Human
ccugggcgcccuggaagc

SEQ ID NO: 2474779 - RNA, 17 nt, Human
ccugggcgcccuggaag

SEQ ID NO: 2474780 - RNA, 19 nt, Human
ccugggcgcccuggaagcc

SEQ ID NO: 2474781 - RNA, 16 nt, Human
ccugggcgcccuggaa

SEQ ID NO: 2474782 - RNA, 15 nt, Human
ccugggcgcccugga

SEQ ID NO: 2474783 - RNA, 13 nt, Human
ccugggcgcccug

SEQ ID NO: 2474784 - RNA, 12 nt, Human
ccugggcgcccu

SEQ ID NO: 2474785 - RNA, 13 nt, Human
ccuggccuguucu

SEQ ID NO: 2474786 - RNA, 19 nt, Human
ccuggccuguucuguuuug

SEQ ID NO: 2474787 - RNA, 19 nt, Human
ccuggccuggcacacauca

SEQ ID NO: 2474788 - RNA, 16 nt, Human
ccuggccuggcacaca

SEQ ID NO: 2474789 - RNA, 15 nt, Human
ccuggccuggcacac

SEQ ID NO: 2474790 - RNA, 14 nt, Human
ccuggccugugccu

SEQ ID NO: 2474791 - RNA, 11 nt, Human
ccuggccuguu

SEQ ID NO: 2474792 - RNA, 15 nt, Human
ccuggccuggcuucu

SEQ ID NO: 2474793 - RNA, 13 nt, Human
ccuggccugcugg

SEQ ID NO: 2474794 - RNA, 15 nt, Human
ccugggcucggaggc

SEQ ID NO: 2474795 - RNA, 14 nt, Human
ccugggcucggagg

SEQ ID NO: 2474796 - RNA, 15 nt, Human
ccugggcuacaagga

SEQ ID NO: 2474797 - RNA, 21 nt, Human
ccugggcucggaggcugcccc

SEQ ID NO: 2474798 - RNA, 19 nt, Human
ccugggcucggaggcugcc

SEQ ID NO: 2474799 - RNA, 18 nt, Human
ccugggcucggaggcugc

SEQ ID NO: 2474800 - RNA, 16 nt, Human
ccugggcucggaggcu

SEQ ID NO: 2474801 - RNA, 22 nt, Human
ccugggcucggaggcugccccc

SEQ ID NO: 2474802 - RNA, 12 nt, Human
ccugggcucugc

SEQ ID NO: 2474803 - RNA, 14 nt, Human
ccugggcucugugg

SEQ ID NO: 2474804 - RNA, 13 nt, Human
ccugggcucugug

SEQ ID NO: 2474805 - RNA, 12 nt, Human
ccugggcucugu

SEQ ID NO: 2474806 - RNA, 19 nt, Human
ccugggcucugggagcagc

SEQ ID NO: 2474807 - RNA, 18 nt, Human
ccugggcucugggagcag

SEQ ID NO: 2474808 - RNA, 17 nt, Human
ccugggcucugggagca

SEQ ID NO: 2474809 - RNA, 16 nt, Human
ccugggcucugggagc

SEQ ID NO: 2474810 - RNA, 13 nt, Human
ccugggcucuggg

SEQ ID NO: 2474811 - RNA, 14 nt, Human
ccugggcucugccc

SEQ ID NO: 2474812 - RNA, 20 nt, Human
ccugggcucugccccagcuc

SEQ ID NO: 2474813 - RNA, 22 nt, Human
ccugggcucugccccagcucug

SEQ ID NO: 2474814 - RNA, 24 nt, Human
ccugggcucugccccagcucuggc

SEQ ID NO: 2474815 - RNA, 17 nt, Human
ccugggcuuggccugcu

SEQ ID NO: 2474816 - RNA, 16 nt, Human
ccugggcuuggccugc

SEQ ID NO: 2474817 - RNA, 15 nt, Human
ccugggcuuggccug

SEQ ID NO: 2474818 - RNA, 14 nt, Human
ccugggcuuggccu

SEQ ID NO: 2474819 - RNA, 13 nt, Human
ccugggcuuggcc

SEQ ID NO: 2474820 - RNA, 23 nt, Human
ccugggcuguuggcacucacaga

SEQ ID NO: 2474821 - RNA, 22 nt, Human
ccugggcuguuggcacucacag

SEQ ID NO: 2474822 - RNA, 21 nt, Human
ccugggcuguuggcacucaca

SEQ ID NO: 2474823 - RNA, 21 nt, Human
ccugggcuuggccugcuguga

SEQ ID NO: 2474824 - RNA, 20 nt, Human
ccugggcuuggccugcugug

SEQ ID NO: 2474825 - RNA, 19 nt, Human
ccugggcuuggccugcugu

SEQ ID NO: 2474826 - RNA, 18 nt, Human
ccugggcuuggccugcug

SEQ ID NO: 2474827 - RNA, 18 nt, Human
ccuggggaaccugacccc

SEQ ID NO: 2474828 - RNA, 20 nt, Human
ccugggcuguuggcacucac

SEQ ID NO: 2474829 - RNA, 18 nt, Human
ccugggcuguuggcacuc

SEQ ID NO: 2474830 - RNA, 16 nt, Human
ccugggcuguuggcac

SEQ ID NO: 2474831 - RNA, 14 nt, Human
ccugggcuguuggc

SEQ ID NO: 2474832 - RNA, 14 nt, Human
ccugggcugugcua

SEQ ID NO: 2474833 - RNA, 13 nt, Human
ccugggcugugcu

SEQ ID NO: 2474834 - RNA, 20 nt, Human
ccugggcuggaaucaggaau

SEQ ID NO: 2474835 - RNA, 14 nt, Human
ccugggcuggaauc

SEQ ID NO: 2474836 - RNA, 19 nt, Human
ccugggcucugugggcugc

SEQ ID NO: 2474837 - RNA, 15 nt, Human
ccugggcucuguggg

SEQ ID NO: 2474838 - RNA, 22 nt, Human
ccugggcucugugggcugcacu

SEQ ID NO: 2474839 - RNA, 22 nt, Human
ccugggcugagagaaccucacg

SEQ ID NO: 2474840 - RNA, 14 nt, Human
ccuggggagccagg

SEQ ID NO: 2474841 - RNA, 18 nt, Human
ccuggggagugggacaga

SEQ ID NO: 2474842 - RNA, 19 nt, Human
ccuggggagugggacagag

SEQ ID NO: 2474843 - RNA, 22 nt, Human
ccuggggagugggacagagucu

SEQ ID NO: 2474844 - RNA, 23 nt, Human
ccuggggagugggacagagucug

SEQ ID NO: 2474845 - RNA, 15 nt, Human
ccuggggagaaagua

SEQ ID NO: 2474846 - RNA, 16 nt, Human
ccuggggcuccuuucu

SEQ ID NO: 2474847 - RNA, 15 nt, Human
ccuggggcuccuuuc

SEQ ID NO: 2474848 - RNA, 14 nt, Human
ccuggggcucccuu

SEQ ID NO: 2474849 - RNA, 13 nt, Human
ccuggggcucccu

SEQ ID NO: 2474850 - RNA, 21 nt, Human
ccuggggcuccuuucuccagc

SEQ ID NO: 2474851 - RNA, 20 nt, Human
ccuggggcuccuuucuccag

SEQ ID NO: 2474852 - RNA, 22 nt, Human
ccuggggcuccuuucuccagcc

SEQ ID NO: 2474853 - RNA, 24 nt, Human
ccuggggagugggacagagucugg

SEQ ID NO: 2474854 - RNA, 19 nt, Human
ccuggggcagucaccugcc

SEQ ID NO: 2474855 - RNA, 19 nt, Human
ccuggggcgggccccucau

SEQ ID NO: 2474856 - RNA, 17 nt, Human
ccuggggcgggccccuc

SEQ ID NO: 2474857 - RNA, 20 nt, Human
ccuggggcuaggcuggagcc

SEQ ID NO: 2474858 - RNA, 22 nt, Human
ccuggggcuaggcuggagccca

SEQ ID NO: 2474859 - RNA, 19 nt, Human
ccugguggcagugggagcu

SEQ ID NO: 2474860 - RNA, 18 nt, Human
ccugguggcagugggagc

SEQ ID NO: 2474861 - RNA, 15 nt, Human
ccuggggcugcuggc

SEQ ID NO: 2474862 - RNA, 15 nt, Human
ccuggggcuggccuc

SEQ ID NO: 2474863 - RNA, 16 nt, Human
ccuggggcuggccucc

SEQ ID NO: 2474864 - RNA, 17 nt, Human
ccuggggcuggccuccc

SEQ ID NO: 2474865 - RNA, 15 nt, Human
ccuggggcucugugc

SEQ ID NO: 2474866 - RNA, 18 nt, Human
ccuggggcucugugcagg

SEQ ID NO: 2474867 - RNA, 14 nt, Human
ccuggggcugcugg

SEQ ID NO: 2474868 - RNA, 23 nt, Human
ccugguggguccaggggccccuc

SEQ ID NO: 2474869 - RNA, 22 nt, Human
ccugguggguccaggggccccu

SEQ ID NO: 2474870 - RNA, 19 nt, Human
ccugguggguccaggggcc

SEQ ID NO: 2474871 - RNA, 18 nt, Human
ccugguggguccaggggc

SEQ ID NO: 2474872 - RNA, 17 nt, Human
ccuggggcugcuggccu

SEQ ID NO: 2474873 - RNA, 15 nt, Human
ccugguggcaguggg

SEQ ID NO: 2474874 - RNA, 20 nt, Human
ccugguggcagugggagcug

SEQ ID NO: 2474875 - RNA, 13 nt, Human
ccuggugguucac

SEQ ID NO: 2474876 - RNA, 22 nt, Human
ccuggugguucacucuuggagc

SEQ ID NO: 2474877 - RNA, 12 nt, Human
ccuggugguuca

SEQ ID NO: 2474878 - RNA, 19 nt, Human
ccugguguuucuagcacug

SEQ ID NO: 2474879 - RNA, 20 nt, Human
ccuggugugaagguccugcu

SEQ ID NO: 2474880 - RNA, 21 nt, Human
ccuggugguugcuguuuuccu

SEQ ID NO: 2474881 - RNA, 13 nt, Human
ccugguguggaag

SEQ ID NO: 2474882 - RNA, 18 nt, Human
ccugguuuccugcccugg

SEQ ID NO: 2474883 - RNA, 19 nt, Human
ccugguuuccugcccuggg

SEQ ID NO: 2474884 - RNA, 20 nt, Human
ccugguuuccugcccuggga

SEQ ID NO: 2474885 - RNA, 21 nt, Human
ccugguuuccugcccugggag

SEQ ID NO: 2474886 - RNA, 22 nt, Human
ccugguguuucuagcacuggcc

SEQ ID NO: 2474887 - RNA, 21 nt, Human
ccugguguuucuagcacuggc

SEQ ID NO: 2474888 - RNA, 13 nt, Human
ccugguucccguu

SEQ ID NO: 2474889 - RNA, 23 nt, Human
ccugguguuucuagcacuggccu

SEQ ID NO: 2474890 - RNA, 22 nt, Human
ccugguucccguuucuccaccu

SEQ ID NO: 2474891 - RNA, 20 nt, Human
ccugguuccggaauccuguc

SEQ ID NO: 2474892 - RNA, 16 nt, Human
ccugguuuccugcccu

SEQ ID NO: 2474893 - RNA, 21 nt, Human
ccugguuccggaauccugucc

SEQ ID NO: 2474894 - RNA, 18 nt, Human
ccuggccccucagggucc

SEQ ID NO: 2474895 - RNA, 16 nt, Human
ccuggccccucagggu

SEQ ID NO: 2474896 - RNA, 21 nt, Human
ccuggccccucagggucccug

SEQ ID NO: 2474897 - RNA, 20 nt, Human
ccuggccccucagggucccu

SEQ ID NO: 2474898 - RNA, 22 nt, Human
ccuggccucaagugauucuccu

SEQ ID NO: 2474899 - RNA, 21 nt, Human
ccuggccuccggcgucagccu

SEQ ID NO: 2474900 - RNA, 13 nt, Human
ccuggccuccggc

SEQ ID NO: 2474901 - RNA, 20 nt, Human
ccuggccuccccugccacca

SEQ ID NO: 2474902 - RNA, 19 nt, Human
ccuggccuccccugccacc

SEQ ID NO: 2474903 - RNA, 18 nt, Human
ccuggccuccccugccac

SEQ ID NO: 2474904 - RNA, 17 nt, Human
ccuggccuccccugcca

SEQ ID NO: 2474905 - RNA, 15 nt, Human
ccuggccuccccugc

SEQ ID NO: 2474906 - RNA, 23 nt, Human
ccuggccuccggcgucagccucc

SEQ ID NO: 2474907 - RNA, 22 nt, Human
ccuggccuccggcgucagccuc

SEQ ID NO: 2474908 - RNA, 24 nt, Human
ccuggccuccggcgucagccucca

SEQ ID NO: 2474909 - RNA, 13 nt, Human
ccuggccuggcac

SEQ ID NO: 2474910 - RNA, 12 nt, Human
ccuggccuggca

SEQ ID NO: 2474911 - RNA, 16 nt, Human
ccuggccugaggucuc

SEQ ID NO: 2474912 - RNA, 12 nt, Human
ccuggccugcug

SEQ ID NO: 2474913 - RNA, 15 nt, Human
ccuggcacacaucag

SEQ ID NO: 2474914 - RNA, 13 nt, Human
ccuggcacacauc

SEQ ID NO: 2474915 - RNA, 12 nt, Human
ccuggcacacau

SEQ ID NO: 2474916 - RNA, 19 nt, Human
ccuggcaauaguguguucu

SEQ ID NO: 2474917 - RNA, 21 nt, Human
ccuggcaauaguguguucuga

SEQ ID NO: 2474918 - RNA, 19 nt, Human
ccuggcaaagggagcagaa

SEQ ID NO: 2474919 - RNA, 23 nt, Human
ccuggcaaagggagcagaacuga

SEQ ID NO: 2474920 - RNA, 22 nt, Human
ccuggcaagcuagaaccuggag

SEQ ID NO: 2474921 - RNA, 21 nt, Human
ccuggcaagcuagaaccugga

SEQ ID NO: 2474922 - RNA, 23 nt, Human
ccuggcaagcuagaaccuggagg

SEQ ID NO: 2474923 - RNA, 12 nt, Human
ccuggcaauagu

SEQ ID NO: 2474924 - RNA, 15 nt, Human
ccuggauggggcugc

SEQ ID NO: 2474925 - RNA, 13 nt, Human
ccugcugcagggg

SEQ ID NO: 2474926 - RNA, 12 nt, Human
ccugcugcaggg

SEQ ID NO: 2474927 - RNA, 23 nt, Human
ccugcugcagaggggcaggcccu

SEQ ID NO: 2474928 - RNA, 22 nt, Human
ccugcugcagaggggcaggccc

SEQ ID NO: 2474929 - RNA, 18 nt, Human
ccugcugcagaggggcag

SEQ ID NO: 2474930 - RNA, 16 nt, Human
ccugcugcagaggggc

SEQ ID NO: 2474931 - RNA, 14 nt, Human
ccugcugcagaggg

SEQ ID NO: 2474932 - RNA, 23 nt, Human
ccugcugcaccaacccagccgcu

SEQ ID NO: 2474933 - RNA, 21 nt, Human
ccugcugcaccaacccagccg

SEQ ID NO: 2474934 - RNA, 20 nt, Human
ccugcugcaccaacccagcc

SEQ ID NO: 2474935 - RNA, 19 nt, Human
ccugcugcaccaacccagc

SEQ ID NO: 2474936 - RNA, 18 nt, Human
ccugcugcaccaacccag

SEQ ID NO: 2474937 - RNA, 17 nt, Human
ccugcugcaccaaccca

SEQ ID NO: 2474938 - RNA, 16 nt, Human
ccugcugcaccaaccc

SEQ ID NO: 2474939 - RNA, 12 nt, Human
ccugcugcacca

SEQ ID NO: 2474940 - RNA, 18 nt, Human
ccuggauggggcugcacc

SEQ ID NO: 2474941 - RNA, 17 nt, Human
ccuggauggggcugcac

SEQ ID NO: 2474942 - RNA, 23 nt, Human
ccuggauucauuuccugcccuuc

SEQ ID NO: 2474943 - RNA, 21 nt, Human
ccuggauucauuuccugcccu

SEQ ID NO: 2474944 - RNA, 20 nt, Human
ccuggauucauuuccugccc

SEQ ID NO: 2474945 - RNA, 19 nt, Human
ccuggauucauuuccugcc

SEQ ID NO: 2474946 - RNA, 18 nt, Human
ccuggauucauuuccugc

SEQ ID NO: 2474947 - RNA, 17 nt, Human
ccuggauucauuuccug

SEQ ID NO: 2474948 - RNA, 15 nt, Human
ccuggauucauuucc

SEQ ID NO: 2474949 - RNA, 14 nt, Human
ccuggauucauuuc

SEQ ID NO: 2474950 - RNA, 21 nt, Human
ccugucucuagccacuuuggu

SEQ ID NO: 2474951 - RNA, 21 nt, Human
ccugucuccuuugcaggcuca

SEQ ID NO: 2474952 - RNA, 22 nt, Human
ccugguuuuuaaauagaguuug

SEQ ID NO: 2474953 - RNA, 18 nt, Human
ccugguuuuuguagccuu

SEQ ID NO: 2474954 - RNA, 22 nt, Human
ccugguuuccugcccugggagg

SEQ ID NO: 2474955 - RNA, 22 nt, Human
ccugguuuuuguagccuuccuc

SEQ ID NO: 2474956 - RNA, 19 nt, Human
ccugguuuuuguagccuuc

SEQ ID NO: 2474957 - RNA, 12 nt, Human
ccuguaaaccug

SEQ ID NO: 2474958 - RNA, 23 nt, Human
ccuguaacacaagccacagaagc

SEQ ID NO: 2474959 - RNA, 21 nt, Human
ccuguaacacaagccacagaa

SEQ ID NO: 2474960 - RNA, 20 nt, Human
ccuguaacacaagccacaga

SEQ ID NO: 2474961 - RNA, 19 nt, Human
ccuguaacacaagccacag

SEQ ID NO: 2474962 - RNA, 18 nt, Human
ccuguaacacaagccaca

SEQ ID NO: 2474963 - RNA, 19 nt, Human
ccuguaaaaaaaaaaaagu

SEQ ID NO: 2474964 - RNA, 13 nt, Human
ccuguaaaccuga

SEQ ID NO: 2474965 - RNA, 19 nt, Human
ccuguaaaugguguacaua

SEQ ID NO: 2474966 - RNA, 23 nt, Human
ccuguaacauacuggccuggacu

SEQ ID NO: 2474967 - RNA, 19 nt, Human
ccuguaacauacuggccug

SEQ ID NO: 2474968 - RNA, 16 nt, Human
ccuguaaccucuucag

SEQ ID NO: 2474969 - RNA, 21 nt, Human
ccuguaaccucuucagaggcc

SEQ ID NO: 2474970 - RNA, 18 nt, Human
ccugucucauccccaggg

SEQ ID NO: 2474971 - RNA, 20 nt, Human
ccugucucauccccaggggu

SEQ ID NO: 2474972 - RNA, 17 nt, Human
ccugucucuacuaaaaa

SEQ ID NO: 2474973 - RNA, 22 nt, Human
ccuguaacacaagccacagaag

SEQ ID NO: 2474974 - RNA, 23 nt, Human
ccugucuccuuucaccccagggc

SEQ ID NO: 2474975 - RNA, 13 nt, Human
ccugucuccuuuc

SEQ ID NO: 2474976 - RNA, 18 nt, Human
ccugccaucauguuuaca

SEQ ID NO: 2474977 - RNA, 20 nt, Human
ccugccaucauguuuacaga

SEQ ID NO: 2474978 - RNA, 17 nt, Human
ccugcccaccuggccuc

SEQ ID NO: 2474979 - RNA, 15 nt, Human
ccugcccaccuggcc

SEQ ID NO: 2474980 - RNA, 15 nt, Human
ccugccaucuuccca

SEQ ID NO: 2474981 - RNA, 14 nt, Human
ccugccaucuuccc

SEQ ID NO: 2474982 - RNA, 23 nt, Human
ccugccagugccuuaccuccugc

SEQ ID NO: 2474983 - RNA, 17 nt, Human
ccugccaucuucccagc

SEQ ID NO: 2474984 - RNA, 16 nt, Human
ccugccaucuucccag

SEQ ID NO: 2474985 - RNA, 18 nt, Human
ccugccaucuucccagca

SEQ ID NO: 2474986 - RNA, 17 nt, Human
ccugccauuugcacccu

SEQ ID NO: 2474987 - RNA, 23 nt, Human
ccugccauuugcacccuccgccu

SEQ ID NO: 2474988 - RNA, 19 nt, Human
ccugcccaccuggccucug

SEQ ID NO: 2474989 - RNA, 18 nt, Human
ccugcccaccuggccucu

SEQ ID NO: 2474990 - RNA, 19 nt, Human
ccugcccaggccccugcca

SEQ ID NO: 2474991 - RNA, 14 nt, Human
ccugcccacacagg

SEQ ID NO: 2474992 - RNA, 18 nt, Human
ccugcccaggccccugcc

SEQ ID NO: 2474993 - RNA, 22 nt, Human
ccugcccaggccccugccaccc

SEQ ID NO: 2474994 - RNA, 21 nt, Human
ccugcccaggccccugccacc

SEQ ID NO: 2474995 - RNA, 15 nt, Human
ccugccucagccucc

SEQ ID NO: 2474996 - RNA, 16 nt, Human
ccugccucagccuccc

SEQ ID NO: 2474997 - RNA, 15 nt, Human
ccugccucucugcag

SEQ ID NO: 2474998 - RNA, 14 nt, Human
ccugccucucugca

SEQ ID NO: 2474999 - RNA, 18 nt, Human
ccugcugagucccaggcu

SEQ ID NO: 2475000 - RNA, 15 nt, Human
ccugcugagucccag

SEQ ID NO: 2475001 - RNA, 19 nt, Human
ccugcugagucccaggcug

SEQ ID NO: 2475002 - RNA, 20 nt, Human
ccugcugagucccaggcuga

SEQ ID NO: 2475003 - RNA, 13 nt, Human
ccugccucucugc

SEQ ID NO: 2475004 - RNA, 22 nt, Human
ccugcccacacagguucacgug

SEQ ID NO: 2475005 - RNA, 12 nt, Human
ccugccucagga

SEQ ID NO: 2475006 - RNA, 17 nt, Human
ccugccucagccucccg

SEQ ID NO: 2475007 - RNA, 23 nt, Human
ccugccucucaucaacugaauga

SEQ ID NO: 2475008 - RNA, 20 nt, Human
ccugccucucaucaacugaa

SEQ ID NO: 2475009 - RNA, 14 nt, Human
ccugccuccacccu

SEQ ID NO: 2475010 - RNA, 13 nt, Human
ccugccuccaccc

SEQ ID NO: 2475011 - RNA, 14 nt, Human
ccucuugccacugc

SEQ ID NO: 2475012 - RNA, 22 nt, Human
ccucuugccacugccucuuccu

SEQ ID NO: 2475013 - RNA, 15 nt, Human
ccucuugccccaacc

SEQ ID NO: 2475014 - RNA, 12 nt, Human
ccucuugcccca

SEQ ID NO: 2475015 - RNA, 23 nt, Human
ccucuugccacugccucuuccuc

SEQ ID NO: 2475016 - RNA, 23 nt, Human
ccucuugccccaacccccagcac

SEQ ID NO: 2475017 - RNA, 22 nt, Human
ccucuugccccaacccccagca

SEQ ID NO: 2475018 - RNA, 21 nt, Human
ccucuugccccaacccccagc

SEQ ID NO: 2475019 - RNA, 16 nt, Human
ccucuugccccaaccc

SEQ ID NO: 2475020 - RNA, 12 nt, Human
ccucuugccccc

SEQ ID NO: 2475021 - RNA, 16 nt, Human
ccucuugccccccacc

SEQ ID NO: 2475022 - RNA, 21 nt, Human
ccucuugccccccaccccagc

SEQ ID NO: 2475023 - RNA, 23 nt, Human
ccucuugccccccaccccagccu

SEQ ID NO: 2475024 - RNA, 12 nt, Human
ccucuugcucaa

SEQ ID NO: 2475025 - RNA, 16 nt, Human
ccucuugccuccugga

SEQ ID NO: 2475026 - RNA, 17 nt, Human
ccucuugcggucccuuc

SEQ ID NO: 2475027 - RNA, 16 nt, Human
ccucuuucccucccuu

SEQ ID NO: 2475028 - RNA, 15 nt, Human
ccugacccagucccc

SEQ ID NO: 2475029 - RNA, 21 nt, Human
ccugacccaggccgcagcucu

SEQ ID NO: 2475030 - RNA, 15 nt, Human
ccucuuuccucucuu

SEQ ID NO: 2475031 - RNA, 19 nt, Human
ccugacccaggccgcagcu

SEQ ID NO: 2475032 - RNA, 15 nt, Human
ccucuuugagugaag

SEQ ID NO: 2475033 - RNA, 23 nt, Human
ccucuuuccucucuuuguucuca

SEQ ID NO: 2475034 - RNA, 18 nt, Human
ccucuugcggucccuucu

SEQ ID NO: 2475035 - RNA, 19 nt, Human
ccucuuucccucccuuccu

SEQ ID NO: 2475036 - RNA, 14 nt, Human
ccucggcuccugcu

SEQ ID NO: 2475037 - RNA, 13 nt, Human
ccucggcuccugc

SEQ ID NO: 2475038 - RNA, 12 nt, Human
ccucggcuccug

SEQ ID NO: 2475039 - RNA, 16 nt, Human
ccucggccuggcuccu

SEQ ID NO: 2475040 - RNA, 22 nt, Human
ccucggccucccaaagugcugg

SEQ ID NO: 2475041 - RNA, 15 nt, Human
ccucggaucaccgag

SEQ ID NO: 2475042 - RNA, 17 nt, Human
ccucggaucaccgagag

SEQ ID NO: 2475043 - RNA, 13 nt, Human
ccucggagccuca

SEQ ID NO: 2475044 - RNA, 14 nt, Human
ccucggagccucau

SEQ ID NO: 2475045 - RNA, 16 nt, Human
ccucggagccucaucc

SEQ ID NO: 2475046 - RNA, 23 nt, Human
ccucggagccucauccgaggcag

SEQ ID NO: 2475047 - RNA, 13 nt, Human
ccugcaggcagcc

SEQ ID NO: 2475048 - RNA, 12 nt, Human
ccugcaggcagc

SEQ ID NO: 2475049 - RNA, 19 nt, Human
ccugcaggaccugccugua

SEQ ID NO: 2475050 - RNA, 20 nt, Human
ccugcaggaccugccuguag

SEQ ID NO: 2475051 - RNA, 14 nt, Human
ccugcaggcagcca

SEQ ID NO: 2475052 - RNA, 20 nt, Human
ccugaguuccuagccaccgc

SEQ ID NO: 2475053 - RNA, 21 nt, Human
ccugaguuccuagccaccgcc

SEQ ID NO: 2475054 - RNA, 20 nt, Human
ccugauaugauuuaaaacau

SEQ ID NO: 2475055 - RNA, 19 nt, Human
ccugauaugauuuaaaaca

SEQ ID NO: 2475056 - RNA, 21 nt, Human
ccugauauuucccuccccugg

SEQ ID NO: 2475057 - RNA, 15 nt, Human
ccugauauaaaugca

SEQ ID NO: 2475058 - RNA, 19 nt, Human
ccugauaacaaccuggaga

SEQ ID NO: 2475059 - RNA, 14 nt, Human
ccugauaugauuua

SEQ ID NO: 2475060 - RNA, 19 nt, Human
ccugauaaagaacaucugu

SEQ ID NO: 2475061 - RNA, 18 nt, Human
ccugauaacaaccuggag

SEQ ID NO: 2475062 - RNA, 17 nt, Human
ccugauaacaaccugga

SEQ ID NO: 2475063 - RNA, 17 nt, Human
ccugauaauaauugauc

SEQ ID NO: 2475064 - RNA, 16 nt, Human
ccugaccccugcucag

SEQ ID NO: 2475065 - RNA, 12 nt, Human
ccugacccgucu

SEQ ID NO: 2475066 - RNA, 14 nt, Human
ccugaccccugcuc

SEQ ID NO: 2475067 - RNA, 15 nt, Human
ccugaccccugcuca

SEQ ID NO: 2475068 - RNA, 18 nt, Human
ccugaccccucauagccc

SEQ ID NO: 2475069 - RNA, 17 nt, Human
ccugagaucucugcagg

SEQ ID NO: 2475070 - RNA, 18 nt, Human
ccugagaucucugcagga

SEQ ID NO: 2475071 - RNA, 22 nt, Human
ccugacccgucuaauauauaaa

SEQ ID NO: 2475072 - RNA, 14 nt, Human
ccugagauuuacac

SEQ ID NO: 2475073 - RNA, 17 nt, Human
ccugagauuucaucugc

SEQ ID NO: 2475074 - RNA, 16 nt, Human
ccugagauuucaucug

SEQ ID NO: 2475075 - RNA, 15 nt, Human
ccugagauuucaucu

SEQ ID NO: 2475076 - RNA, 11 nt, Human
ccugagauuuc

SEQ ID NO: 2475077 - RNA, 22 nt, Human
ccugagauuucaucugcucucc

SEQ ID NO: 2475078 - RNA, 18 nt, Human
ccugagauuucaucugcu

SEQ ID NO: 2475079 - RNA, 23 nt, Human
ccugagauuucaucugcucuccu

SEQ ID NO: 2475080 - RNA, 21 nt, Human
ccugagcaacagagugagacc

SEQ ID NO: 2475081 - RNA, 17 nt, Human
ccugaggcuguggucac

SEQ ID NO: 2475082 - RNA, 16 nt, Human
ccugaggcugugguca

SEQ ID NO: 2475083 - RNA, 15 nt, Human
ccugaggcugugguc

SEQ ID NO: 2475084 - RNA, 23 nt, Human
ccugagcaacagagugagacccu

SEQ ID NO: 2475085 - RNA, 23 nt, Human
ccugaggugggcccaggaccagc

SEQ ID NO: 2475086 - RNA, 21 nt, Human
ccugaggugggcccaggacca

SEQ ID NO: 2475087 - RNA, 19 nt, Human
ccugaggugggcccaggac

SEQ ID NO: 2475088 - RNA, 18 nt, Human
ccugaggugggcccagga

SEQ ID NO: 2475089 - RNA, 17 nt, Human
ccugaggugggcccagg

SEQ ID NO: 2475090 - RNA, 16 nt, Human
ccugaggugggcccag

SEQ ID NO: 2475091 - RNA, 15 nt, Human
ccugaggugggccca

SEQ ID NO: 2475092 - RNA, 20 nt, Human
ccugaggugugggggcugca

SEQ ID NO: 2475093 - RNA, 19 nt, Human
ccugaggugugggggcugc

SEQ ID NO: 2475094 - RNA, 17 nt, Human
ccugaggugugggggcu

SEQ ID NO: 2475095 - RNA, 15 nt, Human
ccugagguguggggg

SEQ ID NO: 2475096 - RNA, 19 nt, Human
ccugaguuccuagccaccg

SEQ ID NO: 2475097 - RNA, 16 nt, Human
ccugaggucucgcuga

SEQ ID NO: 2475098 - RNA, 22 nt, Human
ccugaggucaggaguucaagac

SEQ ID NO: 2475099 - RNA, 16 nt, Human
ccugaggguggagacu

SEQ ID NO: 2475100 - RNA, 15 nt, Human
ccugaggguggagac

SEQ ID NO: 2475101 - RNA, 13 nt, Human
ccugaggguggag

SEQ ID NO: 2475102 - RNA, 19 nt, Human
ccugaggucuggcugcuug

SEQ ID NO: 2475103 - RNA, 17 nt, Human
ccugaggucuggcugcu

SEQ ID NO: 2475104 - RNA, 15 nt, Human
ccugaggucuggcug

SEQ ID NO: 2475105 - RNA, 12 nt, Human
ccugaggucugg

SEQ ID NO: 2475106 - RNA, 21 nt, Human
ccugaggucuggcugcuugcc

SEQ ID NO: 2475107 - RNA, 20 nt, Human
ccugaggugaaagggagcua

SEQ ID NO: 2475108 - RNA, 13 nt, Human
ccugagggucccc

SEQ ID NO: 2475109 - RNA, 22 nt, Human
ccugagggccccucugcccagc

SEQ ID NO: 2475110 - RNA, 21 nt, Human
ccugagggccccucugcccag

SEQ ID NO: 2475111 - RNA, 19 nt, Human
ccugaggguccccaccugg

SEQ ID NO: 2475112 - RNA, 20 nt, Human
ccugagggccccucugccca

SEQ ID NO: 2475113 - RNA, 19 nt, Human
ccugagggccccucugccc

SEQ ID NO: 2475114 - RNA, 18 nt, Human
ccugagggccccucugcc

SEQ ID NO: 2475115 - RNA, 16 nt, Human
ccugagggccccucug

SEQ ID NO: 2475116 - RNA, 14 nt, Human
ccugagggccccuc

SEQ ID NO: 2475117 - RNA, 13 nt, Human
ccugagggccccu

SEQ ID NO: 2475118 - RNA, 23 nt, Human
ccugagggcagaaagguucugcc

SEQ ID NO: 2475119 - RNA, 20 nt, Human
ccugaggcuuuggauuugac

SEQ ID NO: 2475120 - RNA, 22 nt, Human
ccugaggcuuuggauuugacau

SEQ ID NO: 2475121 - RNA, 22 nt, Human
ccugagggcagaaagguucugc

SEQ ID NO: 2475122 - RNA, 18 nt, Human
cuauuuuuggcagucuga

SEQ ID NO: 2475123 - RNA, 21 nt, Human
cuauuuuuggcagucugaauu

SEQ ID NO: 2475124 - RNA, 18 nt, Human
cucaaaaaaagaaaaaga

SEQ ID NO: 2475125 - RNA, 22 nt, Human
cuauuuuuggcagucugaauuu

SEQ ID NO: 2475126 - RNA, 14 nt, Human
cuauuuuucccccu

SEQ ID NO: 2475127 - RNA, 18 nt, Human
cuauuuuuauuuauauuu

SEQ ID NO: 2475128 - RNA, 19 nt, Human
cuauuuuuacugccacucu

SEQ ID NO: 2475129 - RNA, 16 nt, Human
cuauuuuuauuuauau

SEQ ID NO: 2475130 - RNA, 17 nt, Human
cuauguugcccaggcag

SEQ ID NO: 2475131 - RNA, 16 nt, Human
cuauguugcccaggca

SEQ ID NO: 2475132 - RNA, 12 nt, Human
cuauuuuuacug

SEQ ID NO: 2475133 - RNA, 21 nt, Human
cuauuuuuacuagaacacaga

SEQ ID NO: 2475134 - RNA, 18 nt, Human
cuauuuuuacuagaacac

SEQ ID NO: 2475135 - RNA, 19 nt, Human
cuauuuuguaaacucaaaa

SEQ ID NO: 2475136 - RNA, 13 nt, Human
cuauguguaaggu

SEQ ID NO: 2475137 - RNA, 17 nt, Human
cuauuuuuacugccacu

SEQ ID NO: 2475138 - RNA, 16 nt, Human
cuauuuuuacugccac

SEQ ID NO: 2475139 - RNA, 15 nt, Human
cuauuuuuauuuaua

SEQ ID NO: 2475140 - RNA, 14 nt, Human
cuauuuuucagaau

SEQ ID NO: 2475141 - RNA, 13 nt, Human
cucaaaacugcac

SEQ ID NO: 2475142 - RNA, 19 nt, Human
cucaaacugaggaauuuca

SEQ ID NO: 2475143 - RNA, 17 nt, Human
cucaaaacugcacuguc

SEQ ID NO: 2475144 - RNA, 19 nt, Human
cucaaaacccaucugggcu

SEQ ID NO: 2475145 - RNA, 20 nt, Human
cucaaacuuuuccccugucc

SEQ ID NO: 2475146 - RNA, 22 nt, Human
cucaaaacccaucugggcuccu

SEQ ID NO: 2475147 - RNA, 22 nt, Human
cucaaacugaggaauuucaccu

SEQ ID NO: 2475148 - RNA, 17 nt, Human
cucaaacugccuuggcu

SEQ ID NO: 2475149 - RNA, 22 nt, Human
cucaaagacaauguuauuuucc

SEQ ID NO: 2475150 - RNA, 13 nt, Human
cucaaagucugca

SEQ ID NO: 2475151 - RNA, 14 nt, Human
cucaaagucugcaa

SEQ ID NO: 2475152 - RNA, 23 nt, Human
cucaaagugacuauucaguuuuc

SEQ ID NO: 2475153 - RNA, 19 nt, Human
cucaaaguuuugaaaagcu

SEQ ID NO: 2475154 - RNA, 18 nt, Human
cucaaaguuuugaaaagc

SEQ ID NO: 2475155 - RNA, 17 nt, Human
cucaaaguuuugaaaag

SEQ ID NO: 2475156 - RNA, 15 nt, Human
cucaaaguuuugaaa

SEQ ID NO: 2475157 - RNA, 14 nt, Human
cucaaaguuuugaa

SEQ ID NO: 2475158 - RNA, 12 nt, Human
cucaaaguuuug

SEQ ID NO: 2475159 - RNA, 15 nt, Human
cucaaagucugcaac

SEQ ID NO: 2475160 - RNA, 18 nt, Human
cucaaagagggagugcau

SEQ ID NO: 2475161 - RNA, 11 nt, Human
cucaaaggcac

SEQ ID NO: 2475162 - RNA, 20 nt, Human
cuaucucccccagccccauc

SEQ ID NO: 2475163 - RNA, 17 nt, Human
cuaucucugugugcaca

SEQ ID NO: 2475164 - RNA, 17 nt, Human
cuaucucgugggagagc

SEQ ID NO: 2475165 - RNA, 21 nt, Human
cuaucugaaccauuaaagucg

SEQ ID NO: 2475166 - RNA, 21 nt, Human
cuaucucugugugcacaaaua

SEQ ID NO: 2475167 - RNA, 18 nt, Human
cuaucugcuuaugcaguu

SEQ ID NO: 2475168 - RNA, 19 nt, Human
cuauguaucaaugaguaac

SEQ ID NO: 2475169 - RNA, 11 nt, Human
cuaugugauuu

SEQ ID NO: 2475170 - RNA, 16 nt, Human
cuaugugauuuuaacu

SEQ ID NO: 2475171 - RNA, 18 nt, Human
cuaugugauuuuaacucu

SEQ ID NO: 2475172 - RNA, 19 nt, Human
cuaugugauuuuaacucug

SEQ ID NO: 2475173 - RNA, 17 nt, Human
cuaugugagcacaaagg

SEQ ID NO: 2475174 - RNA, 23 nt, Human
cuaugucauuugcuggagcucug

SEQ ID NO: 2475175 - RNA, 16 nt, Human
cuaugucauuucauuu

SEQ ID NO: 2475176 - RNA, 18 nt, Human
cuaugucauuucauuucc

SEQ ID NO: 2475177 - RNA, 22 nt, Human
cuauguauuugcaguucaccug

SEQ ID NO: 2475178 - RNA, 16 nt, Human
cuauguaucaaugagu

SEQ ID NO: 2475179 - RNA, 14 nt, Human
cuauguauggaaua

SEQ ID NO: 2475180 - RNA, 13 nt, Human
cuauguauuugca

SEQ ID NO: 2475181 - RNA, 22 nt, Human
cuauguauggaauacaguguua

SEQ ID NO: 2475182 - RNA, 14 nt, Human
cuauguugcccagg

SEQ ID NO: 2475183 - RNA, 17 nt, Human
cuauguggcuguaucuu

SEQ ID NO: 2475184 - RNA, 15 nt, Human
cuauguugcccaggc

SEQ ID NO: 2475185 - RNA, 22 nt, Human
cuauguguagggcgggaggaug

SEQ ID NO: 2475186 - RNA, 20 nt, Human
cuaugugauuuuaacucugu

SEQ ID NO: 2475187 - RNA, 21 nt, Human
cuaugugauuuuaacucuguc

SEQ ID NO: 2475188 - RNA, 22 nt, Human
cuaugugauuuuaacucugucu

SEQ ID NO: 2475189 - RNA, 22 nt, Human
cucacacaggacccccuucccc

SEQ ID NO: 2475190 - RNA, 21 nt, Human
cucacacaggacccccuuccc

SEQ ID NO: 2475191 - RNA, 21 nt, Human
cucacacaugagcaucaggcc

SEQ ID NO: 2475192 - RNA, 14 nt, Human
cucacacaugagca

SEQ ID NO: 2475193 - RNA, 14 nt, Human
cucaaauaaaauaa

SEQ ID NO: 2475194 - RNA, 23 nt, Human
cucaaaguuuugaaaagcuauua

SEQ ID NO: 2475195 - RNA, 21 nt, Human
cucaaaguuuugaaaagcuau

SEQ ID NO: 2475196 - RNA, 13 nt, Human
cucaaauaaaaua

SEQ ID NO: 2475197 - RNA, 12 nt, Human
cucaaauaacua

SEQ ID NO: 2475198 - RNA, 14 nt, Human
cucacaaaggaugc

SEQ ID NO: 2475199 - RNA, 19 nt, Human
cucacaacauggugucugg

SEQ ID NO: 2475200 - RNA, 17 nt, Human
cucacaaccugaaccua

SEQ ID NO: 2475201 - RNA, 16 nt, Human
cucacaaccugaaccu

SEQ ID NO: 2475202 - RNA, 13 nt, Human
cucacacaggacc

SEQ ID NO: 2475203 - RNA, 22 nt, Human
cucacacagccaggugccuugg

SEQ ID NO: 2475204 - RNA, 20 nt, Human
cucacacagccaggugccuu

SEQ ID NO: 2475205 - RNA, 19 nt, Human
cucacacagccaggugccu

SEQ ID NO: 2475206 - RNA, 16 nt, Human
cucacacagccaggug

SEQ ID NO: 2475207 - RNA, 15 nt, Human
cucacacagccaggu

SEQ ID NO: 2475208 - RNA, 14 nt, Human
cucacacagccagg

SEQ ID NO: 2475209 - RNA, 22 nt, Human
cucacaauaaaaauggcucaga

SEQ ID NO: 2475210 - RNA, 21 nt, Human
cucacaauaaaaauggcucag

SEQ ID NO: 2475211 - RNA, 12 nt, Human
cucacacagcca

SEQ ID NO: 2475212 - RNA, 19 nt, Human
cucacaagaagaccagacu

SEQ ID NO: 2475213 - RNA, 17 nt, Human
cucacaagaagaccaga

SEQ ID NO: 2475214 - RNA, 15 nt, Human
cucacaagaagacca

SEQ ID NO: 2475215 - RNA, 20 nt, Human
cucacaaccugaaccuagga

SEQ ID NO: 2475216 - RNA, 15 nt, Human
cucacccugccuuau

SEQ ID NO: 2475217 - RNA, 14 nt, Human
cucacccugccuua

SEQ ID NO: 2475218 - RNA, 20 nt, Human
cucacccugagccccuuccu

SEQ ID NO: 2475219 - RNA, 19 nt, Human
cucacccugagccccuucc

SEQ ID NO: 2475220 - RNA, 13 nt, Human
cucacccugccuu

SEQ ID NO: 2475221 - RNA, 15 nt, Human
cucacccugcuacac

SEQ ID NO: 2475222 - RNA, 21 nt, Human
cucacccugccuuaucuugca

SEQ ID NO: 2475223 - RNA, 14 nt, Human
cucacccuggggcu

SEQ ID NO: 2475224 - RNA, 14 nt, Human
cucacccugagccc

SEQ ID NO: 2475225 - RNA, 14 nt, Human
cucacccgaggcug

SEQ ID NO: 2475226 - RNA, 17 nt, Human
cucaccucucccuugga

SEQ ID NO: 2475227 - RNA, 16 nt, Human
cucaccucucccuugg

SEQ ID NO: 2475228 - RNA, 15 nt, Human
cucaccucucccuug

SEQ ID NO: 2475229 - RNA, 14 nt, Human
cucaccucucccuu

SEQ ID NO: 2475230 - RNA, 13 nt, Human
cucaccucucccu

SEQ ID NO: 2475231 - RNA, 17 nt, Human
cucaccucaugcccacc

SEQ ID NO: 2475232 - RNA, 15 nt, Human
cucaccucaugccca

SEQ ID NO: 2475233 - RNA, 16 nt, Human
cucaccucccccaucu

SEQ ID NO: 2475234 - RNA, 21 nt, Human
cucaccgcagucgucgcacag

SEQ ID NO: 2475235 - RNA, 15 nt, Human
cucaccgcagucguc

SEQ ID NO: 2475236 - RNA, 21 nt, Human
cucaccguggcuaagaguguc

SEQ ID NO: 2475237 - RNA, 23 nt, Human
cucaccuaauguuuaugagccag

SEQ ID NO: 2475238 - RNA, 17 nt, Human
cucaccuaacucauacu

SEQ ID NO: 2475239 - RNA, 14 nt, Human
cucaccucaugccc

SEQ ID NO: 2475240 - RNA, 16 nt, Human
cucaccugccccucaa

SEQ ID NO: 2475241 - RNA, 14 nt, Human
cucaccugccccuc

SEQ ID NO: 2475242 - RNA, 18 nt, Human
cucaccugccccucaacu

SEQ ID NO: 2475243 - RNA, 15 nt, Human
cucaccugcuggccc

SEQ ID NO: 2475244 - RNA, 16 nt, Human
cucaccugcuggcccc

SEQ ID NO: 2475245 - RNA, 18 nt, Human
cucaccugcuggccccuc

SEQ ID NO: 2475246 - RNA, 19 nt, Human
cucaccugcuggccccuca

SEQ ID NO: 2475247 - RNA, 13 nt, Human
cucaccugccccu

SEQ ID NO: 2475248 - RNA, 19 nt, Human
cucaccugagucacccuac

SEQ ID NO: 2475249 - RNA, 22 nt, Human
cucaccucuggacuggcuagag

SEQ ID NO: 2475250 - RNA, 15 nt, Human
cucaccucuggacug

SEQ ID NO: 2475251 - RNA, 21 nt, Human
cucaccucuggacuggcuaga

SEQ ID NO: 2475252 - RNA, 13 nt, Human
cucaccucugccu

SEQ ID NO: 2475253 - RNA, 14 nt, Human
cucaccucugccuc

SEQ ID NO: 2475254 - RNA, 15 nt, Human
cucaccucugccuca

SEQ ID NO: 2475255 - RNA, 16 nt, Human
cucaccucugccucaa

SEQ ID NO: 2475256 - RNA, 18 nt, Human
cucaccucugccucaaug

SEQ ID NO: 2475257 - RNA, 19 nt, Human
cucaccucugccucaaugu

SEQ ID NO: 2475258 - RNA, 14 nt, Human
cucaccucuggacu

SEQ ID NO: 2475259 - RNA, 23 nt, Human
cucaccucaugcccacccccugc

SEQ ID NO: 2475260 - RNA, 12 nt, Human
cucaccucugcc

SEQ ID NO: 2475261 - RNA, 16 nt, Human
cucaccucuaaaacag

SEQ ID NO: 2475262 - RNA, 21 nt, Human
cucacuuggugauauguccua

SEQ ID NO: 2475263 - RNA, 20 nt, Human
cucacuuccauacagcucua

SEQ ID NO: 2475264 - RNA, 15 nt, Human
cucacuugcccacac

SEQ ID NO: 2475265 - RNA, 18 nt, Human
cucacuuccauacagcuc

SEQ ID NO: 2475266 - RNA, 20 nt, Human
cucacuucugggcuucaucu

SEQ ID NO: 2475267 - RNA, 19 nt, Human
cucaccuuggcaccagaca

SEQ ID NO: 2475268 - RNA, 22 nt, Human
cucaccuugcaacacacagaca

SEQ ID NO: 2475269 - RNA, 21 nt, Human
cucacuuaucccaagagaaug

SEQ ID NO: 2475270 - RNA, 14 nt, Human
cucacuucacccug

SEQ ID NO: 2475271 - RNA, 20 nt, Human
cucacuuuccuccugaggcu

SEQ ID NO: 2475272 - RNA, 14 nt, Human
cucacuuuucucca

SEQ ID NO: 2475273 - RNA, 16 nt, Human
cucaccuuggcaccag

SEQ ID NO: 2475274 - RNA, 17 nt, Human
cucaccuuggcaccaga

SEQ ID NO: 2475275 - RNA, 19 nt, Human
cucaccuugcaacacacag

SEQ ID NO: 2475276 - RNA, 20 nt, Human
cucaccuugcaacacacaga

SEQ ID NO: 2475277 - RNA, 21 nt, Human
cucaccuugcaacacacagac

SEQ ID NO: 2475278 - RNA, 22 nt, Human
cucaccuguugcuuacaauuuu

SEQ ID NO: 2475279 - RNA, 21 nt, Human
cucaccuguugcuuacaauuu

SEQ ID NO: 2475280 - RNA, 20 nt, Human
cucaccuguugcuuacaauu

SEQ ID NO: 2475281 - RNA, 17 nt, Human
cucaccuguugcuuaca

SEQ ID NO: 2475282 - RNA, 18 nt, Human
cucaccuugcaacacaca

SEQ ID NO: 2475283 - RNA, 19 nt, Human
cucaccugggcaccugggg

SEQ ID NO: 2475284 - RNA, 21 nt, Human
cucaccugcuggccccucacc

SEQ ID NO: 2475285 - RNA, 20 nt, Human
cucaccugggcaccugggga

SEQ ID NO: 2475286 - RNA, 21 nt, Human
cucaccugggcaccuggggag

SEQ ID NO: 2475287 - RNA, 11 nt, Human
cucaccugggg

SEQ ID NO: 2475288 - RNA, 20 nt, Human
cucaccuggggcugcuggcc

SEQ ID NO: 2475289 - RNA, 17 nt, Human
cucaccuggggcugcug

SEQ ID NO: 2475290 - RNA, 21 nt, Human
cucaccuggggcugcuggccu

SEQ ID NO: 2475291 - RNA, 12 nt, Human
cucaccuggggu

SEQ ID NO: 2475292 - RNA, 15 nt, Human
cucaccuguugcuua

SEQ ID NO: 2475293 - RNA, 13 nt, Human
cucaccuguugcu

SEQ ID NO: 2475294 - RNA, 14 nt, Human
cucaccuguacucu

SEQ ID NO: 2475295 - RNA, 21 nt, Human
cucaccuggggugugggaggc

SEQ ID NO: 2475296 - RNA, 23 nt, Human
cucagaaaacaaggaugaauuaa

SEQ ID NO: 2475297 - RNA, 19 nt, Human
cucagaaaacaaggaugaa

SEQ ID NO: 2475298 - RNA, 19 nt, Human
cucagaaggcaaaugacuu

SEQ ID NO: 2475299 - RNA, 21 nt, Human
cucagaaacacuggggcuggc

SEQ ID NO: 2475300 - RNA, 19 nt, Human
cucagaaacacuggggcug

SEQ ID NO: 2475301 - RNA, 18 nt, Human
cucagaaacacuggggcu

SEQ ID NO: 2475302 - RNA, 15 nt, Human
cucacuuuucuccau

SEQ ID NO: 2475303 - RNA, 16 nt, Human
cucagaaguuucuucu

SEQ ID NO: 2475304 - RNA, 19 nt, Human
cucagaaguuucuucuuua

SEQ ID NO: 2475305 - RNA, 20 nt, Human
cucagaaucuacccaaagga

SEQ ID NO: 2475306 - RNA, 11 nt, Human
cucagaaucua

SEQ ID NO: 2475307 - RNA, 23 nt, Human
cucagaauccaagugaacacuag

SEQ ID NO: 2475308 - RNA, 12 nt, Human
cucagaauauug

SEQ ID NO: 2475309 - RNA, 16 nt, Human
cucagaagguauuccu

SEQ ID NO: 2475310 - RNA, 19 nt, Human
cucagaagguauuccuuuu

SEQ ID NO: 2475311 - RNA, 14 nt, Human
cucagaagggaggc

SEQ ID NO: 2475312 - RNA, 20 nt, Human
cucagaaggcucuucugacu

SEQ ID NO: 2475313 - RNA, 20 nt, Human
cucagaagggaggcuggggu

SEQ ID NO: 2475314 - RNA, 13 nt, Human
cucagaagguauu

SEQ ID NO: 2475315 - RNA, 15 nt, Human
cucagaaggcucuuc

SEQ ID NO: 2475316 - RNA, 14 nt, Human
cucagaaggcucuu

SEQ ID NO: 2475317 - RNA, 20 nt, Human
cucagaaggcaaaugacuuu

SEQ ID NO: 2475318 - RNA, 13 nt, Human
cucagaagggagg

SEQ ID NO: 2475319 - RNA, 17 nt, Human
cuacucacagucucuuu

SEQ ID NO: 2475320 - RNA, 18 nt, Human
cuacucacagucucuuua

SEQ ID NO: 2475321 - RNA, 20 nt, Human
cuacuagggaaaugccuuug

SEQ ID NO: 2475322 - RNA, 14 nt, Human
cuacuauauaugug

SEQ ID NO: 2475323 - RNA, 15 nt, Human
cuacuagaugucuuu

SEQ ID NO: 2475324 - RNA, 21 nt, Human
cuacuacaucgcccuccacau

SEQ ID NO: 2475325 - RNA, 18 nt, Human
cuacuaugccagaugccu

SEQ ID NO: 2475326 - RNA, 16 nt, Human
cuacucaagaggcuga

SEQ ID NO: 2475327 - RNA, 20 nt, Human
cuacucaagaggcugaggca

SEQ ID NO: 2475328 - RNA, 15 nt, Human
cuacucacagucucu

SEQ ID NO: 2475329 - RNA, 23 nt, Human
cuaccugaggggccucuuauggg

SEQ ID NO: 2475330 - RNA, 19 nt, Human
cuaccugaggggccucuua

SEQ ID NO: 2475331 - RNA, 16 nt, Human
cuaccugaggggccuc

SEQ ID NO: 2475332 - RNA, 15 nt, Human
cuaccugaggggccu

SEQ ID NO: 2475333 - RNA, 12 nt, Human
cuaccuucugua

SEQ ID NO: 2475334 - RNA, 18 nt, Human
cuaccuuccaguuccuca

SEQ ID NO: 2475335 - RNA, 20 nt, Human
cuaccugauuggugcaaccc

SEQ ID NO: 2475336 - RNA, 19 nt, Human
cuaccuuccagucaggaug

SEQ ID NO: 2475337 - RNA, 18 nt, Human
cuaccuucauuucaggag

SEQ ID NO: 2475338 - RNA, 15 nt, Human
cuaccuucuguaguu

SEQ ID NO: 2475339 - RNA, 14 nt, Human
cuaccuucuguagu

SEQ ID NO: 2475340 - RNA, 13 nt, Human
cuaccuucuguag

SEQ ID NO: 2475341 - RNA, 14 nt, Human
cuaccuugaaaaua

SEQ ID NO: 2475342 - RNA, 19 nt, Human
cuaccuugaaaauaagaau

SEQ ID NO: 2475343 - RNA, 16 nt, Human
cuaccuugggggaacc

SEQ ID NO: 2475344 - RNA, 23 nt, Human
cuaccuugaggucuuuugacaug

SEQ ID NO: 2475345 - RNA, 21 nt, Human
cuaccuugguucccccacuga

SEQ ID NO: 2475346 - RNA, 14 nt, Human
cuaccuugugaccc

SEQ ID NO: 2475347 - RNA, 22 nt, Human
cuaccuugaggucuuuugacau

SEQ ID NO: 2475348 - RNA, 22 nt, Human
cuacuagagucugaacagcugu

SEQ ID NO: 2475349 - RNA, 17 nt, Human
cuacuaauuccacaccu

SEQ ID NO: 2475350 - RNA, 16 nt, Human
cuacuacaucgcccuc

SEQ ID NO: 2475351 - RNA, 18 nt, Human
cuacuacaucgcccucca

SEQ ID NO: 2475352 - RNA, 12 nt, Human
cuacuaauucca

SEQ ID NO: 2475353 - RNA, 15 nt, Human
cuacuaauuccacac

SEQ ID NO: 2475354 - RNA, 13 nt, Human
cuacuaaugaugu

SEQ ID NO: 2475355 - RNA, 14 nt, Human
cuacuaaugauguu

SEQ ID NO: 2475356 - RNA, 19 nt, Human
cuaccuugugacccagcac

SEQ ID NO: 2475357 - RNA, 14 nt, Human
cuacuaaaaaugca

SEQ ID NO: 2475358 - RNA, 15 nt, Human
cuacuaaaaaugcaa

SEQ ID NO: 2475359 - RNA, 23 nt, Human
cuacuaacaaucagcuccuuccu

SEQ ID NO: 2475360 - RNA, 16 nt, Human
cuauaaaguaaagcua

SEQ ID NO: 2475361 - RNA, 17 nt, Human
cuauaaacaauuacaug

SEQ ID NO: 2475362 - RNA, 23 nt, Human
cuauaaagaagaacuugcaugga

SEQ ID NO: 2475363 - RNA, 15 nt, Human
cuaguuugauuaaau

SEQ ID NO: 2475364 - RNA, 15 nt, Human
cuaguucuguagaaa

SEQ ID NO: 2475365 - RNA, 20 nt, Human
cuaguuugauuaaauucuug

SEQ ID NO: 2475366 - RNA, 20 nt, Human
cuaguuuucuccucccagga

SEQ ID NO: 2475367 - RNA, 16 nt, Human
cuauaaacaauuacau

SEQ ID NO: 2475368 - RNA, 13 nt, Human
cuauaaaacaggu

SEQ ID NO: 2475369 - RNA, 14 nt, Human
cuaguucuguagaa

SEQ ID NO: 2475370 - RNA, 17 nt, Human
cuaguuugauuaaauuc

SEQ ID NO: 2475371 - RNA, 19 nt, Human
cuaguuugauuaaauucuu

SEQ ID NO: 2475372 - RNA, 13 nt, Human
cuaggguccuggg

SEQ ID NO: 2475373 - RNA, 14 nt, Human
cuaggguccugggg

SEQ ID NO: 2475374 - RNA, 15 nt, Human
cuaggguccugggga

SEQ ID NO: 2475375 - RNA, 13 nt, Human
cuaggguggcccu

SEQ ID NO: 2475376 - RNA, 17 nt, Human
cuaggguggcccuugca

SEQ ID NO: 2475377 - RNA, 15 nt, Human
cuaggcucagagaug

SEQ ID NO: 2475378 - RNA, 13 nt, Human
cuaggcucagaga

SEQ ID NO: 2475379 - RNA, 12 nt, Human
cuaggcucagag

SEQ ID NO: 2475380 - RNA, 20 nt, Human
cuaggcuacaauuuucuccc

SEQ ID NO: 2475381 - RNA, 22 nt, Human
cuaggcucagagaugugcaccc

SEQ ID NO: 2475382 - RNA, 13 nt, Human
cuaggcuccaccc

SEQ ID NO: 2475383 - RNA, 20 nt, Human
cuaggcucagagaugugcac

SEQ ID NO: 2475384 - RNA, 14 nt, Human
cuagggaagauaau

SEQ ID NO: 2475385 - RNA, 14 nt, Human
cuagggggaaguga

SEQ ID NO: 2475386 - RNA, 23 nt, Human
cuagggggagccccuucugcuca

SEQ ID NO: 2475387 - RNA, 18 nt, Human
cuaggggucaggcuccau

SEQ ID NO: 2475388 - RNA, 16 nt, Human
cuaggggucaggcucc

SEQ ID NO: 2475389 - RNA, 23 nt, Human
cuaggggucuuguuaagugcagu

SEQ ID NO: 2475390 - RNA, 21 nt, Human
cuaggggucagggaccaagga

SEQ ID NO: 2475391 - RNA, 15 nt, Human
cuagggagagacccu

SEQ ID NO: 2475392 - RNA, 14 nt, Human
cuagggaggaccuu

SEQ ID NO: 2475393 - RNA, 21 nt, Human
cuagggaggaccuuaucugug

SEQ ID NO: 2475394 - RNA, 23 nt, Human
cuagggaggaccuuaucugugcg

SEQ ID NO: 2475395 - RNA, 17 nt, Human
cuagggaaacuucccgu

SEQ ID NO: 2475396 - RNA, 16 nt, Human
cuagggaaacuucccg

SEQ ID NO: 2475397 - RNA, 14 nt, Human
cuagggaagggugg

SEQ ID NO: 2475398 - RNA, 16 nt, Human
cuagggaccccuccuc

SEQ ID NO: 2475399 - RNA, 15 nt, Human
cuagggaccccuccu

SEQ ID NO: 2475400 - RNA, 20 nt, Human
cuagggaaaugaucaguuuu

SEQ ID NO: 2475401 - RNA, 20 nt, Human
cuagggaccccuccucccuu

SEQ ID NO: 2475402 - RNA, 17 nt, Human
cuagggaccccuccucc

SEQ ID NO: 2475403 - RNA, 14 nt, Human
cuagggagagaccc

SEQ ID NO: 2475404 - RNA, 16 nt, Human
cuagacauucugucgc

SEQ ID NO: 2475405 - RNA, 15 nt, Human
cuagacauucugucg

SEQ ID NO: 2475406 - RNA, 14 nt, Human
cuagacauucuguc

SEQ ID NO: 2475407 - RNA, 13 nt, Human
cuagacacugcca

SEQ ID NO: 2475408 - RNA, 16 nt, Human
cuagcauacguacaca

SEQ ID NO: 2475409 - RNA, 18 nt, Human
cuagcauacguacacauu

SEQ ID NO: 2475410 - RNA, 19 nt, Human
cuagcauacguacacauuu

SEQ ID NO: 2475411 - RNA, 20 nt, Human
cuagcauacguacacauuuu

SEQ ID NO: 2475412 - RNA, 20 nt, Human
cuagaauucuagugcugcug

SEQ ID NO: 2475413 - RNA, 19 nt, Human
cuagaauucuagugcugcu

SEQ ID NO: 2475414 - RNA, 18 nt, Human
cuagaauucuagugcugc

SEQ ID NO: 2475415 - RNA, 16 nt, Human
cuagaauucuagugcu

SEQ ID NO: 2475416 - RNA, 15 nt, Human
cuagaauucuagugc

SEQ ID NO: 2475417 - RNA, 22 nt, Human
cuagaauucccucucucugacu

SEQ ID NO: 2475418 - RNA, 20 nt, Human
cuagaauucccucucucuga

SEQ ID NO: 2475419 - RNA, 16 nt, Human
cuagaauucccucucu

SEQ ID NO: 2475420 - RNA, 13 nt, Human
cuagaauuuauuc

SEQ ID NO: 2475421 - RNA, 12 nt, Human
cuagaauuuauu

SEQ ID NO: 2475422 - RNA, 21 nt, Human
cuagaauuuaucacacuucug

SEQ ID NO: 2475423 - RNA, 20 nt, Human
cuagaaguuacugaaugcac

SEQ ID NO: 2475424 - RNA, 19 nt, Human
cuagaaguuacugaaugca

SEQ ID NO: 2475425 - RNA, 18 nt, Human
cuagaaguuacugaaugc

SEQ ID NO: 2475426 - RNA, 17 nt, Human
cuagaaguuacugaaug

SEQ ID NO: 2475427 - RNA, 16 nt, Human
cuagaaguuacugaau

SEQ ID NO: 2475428 - RNA, 20 nt, Human
cuagaaucuggagagcuaga

SEQ ID NO: 2475429 - RNA, 20 nt, Human
cuagaauauccuacuucucc

SEQ ID NO: 2475430 - RNA, 19 nt, Human
cuagaauauccuacuucuc

SEQ ID NO: 2475431 - RNA, 21 nt, Human
cuagaauauccuacuucucca

SEQ ID NO: 2475432 - RNA, 22 nt, Human
cuagaaucagccuaggggucag

SEQ ID NO: 2475433 - RNA, 15 nt, Human
cuagccauuccuggu

SEQ ID NO: 2475434 - RNA, 20 nt, Human
cuagccagcacuuguauaua

SEQ ID NO: 2475435 - RNA, 14 nt, Human
cuagccauuccugg

SEQ ID NO: 2475436 - RNA, 13 nt, Human
cuagcccaggaga

SEQ ID NO: 2475437 - RNA, 21 nt, Human
cuagccauuccugguacccag

SEQ ID NO: 2475438 - RNA, 20 nt, Human
cuagccauuccugguaccca

SEQ ID NO: 2475439 - RNA, 17 nt, Human
cuagccauuccugguac

SEQ ID NO: 2475440 - RNA, 18 nt, Human
cuagcccaaugaaaugaa

SEQ ID NO: 2475441 - RNA, 17 nt, Human
cuagccagaggagagag

SEQ ID NO: 2475442 - RNA, 19 nt, Human
cuagccagaggagagagga

SEQ ID NO: 2475443 - RNA, 22 nt, Human
cuaggcccccacuugccucuuc

SEQ ID NO: 2475444 - RNA, 20 nt, Human
cuaggcccccacuugccucu

SEQ ID NO: 2475445 - RNA, 17 nt, Human
cuaggcccccacuugcc

SEQ ID NO: 2475446 - RNA, 19 nt, Human
cuaggcccccacuugccuc

SEQ ID NO: 2475447 - RNA, 13 nt, Human
cuaggccucagcc

SEQ ID NO: 2475448 - RNA, 23 nt, Human
cuaggcccccacuugccucuucc

SEQ ID NO: 2475449 - RNA, 12 nt, Human
cuaggccgggcg

SEQ ID NO: 2475450 - RNA, 13 nt, Human
cuaggccuggcca

SEQ ID NO: 2475451 - RNA, 15 nt, Human
cuaggccucagccag

SEQ ID NO: 2475452 - RNA, 16 nt, Human
cuaggccucagccaga

SEQ ID NO: 2475453 - RNA, 17 nt, Human
cuaggccucagccagag

SEQ ID NO: 2475454 - RNA, 18 nt, Human
cuaggccucagccagaga

SEQ ID NO: 2475455 - RNA, 19 nt, Human
cuaggccuggccagaugca

SEQ ID NO: 2475456 - RNA, 18 nt, Human
cuaggccuggccagaugc

SEQ ID NO: 2475457 - RNA, 15 nt, Human
cuaggccuggccaga

SEQ ID NO: 2475458 - RNA, 14 nt, Human
cuaggccuggccag

SEQ ID NO: 2475459 - RNA, 12 nt, Human
cuaggccugggg

SEQ ID NO: 2475460 - RNA, 13 nt, Human
cuaggccugggga

SEQ ID NO: 2475461 - RNA, 18 nt, Human
cuaggcgagugccaggac

SEQ ID NO: 2475462 - RNA, 17 nt, Human
cuaggcgagugccagga

SEQ ID NO: 2475463 - RNA, 16 nt, Human
cuaggcgagugccagg

SEQ ID NO: 2475464 - RNA, 20 nt, Human
cuaggcgagugccaggacuc

SEQ ID NO: 2475465 - RNA, 19 nt, Human
cuaggcgagugccaggacu

SEQ ID NO: 2475466 - RNA, 18 nt, Human
cuaggcuacaauuuucuc

SEQ ID NO: 2475467 - RNA, 15 nt, Human
cuaggcgagugccag

SEQ ID NO: 2475468 - RNA, 19 nt, Human
cuaggccucagccagagaa

SEQ ID NO: 2475469 - RNA, 21 nt, Human
cgauacaccgggccuggagaa

SEQ ID NO: 2475470 - RNA, 20 nt, Human
cgauacaccgggccuggaga

SEQ ID NO: 2475471 - RNA, 18 nt, Human
cgauacaccgggccugga

SEQ ID NO: 2475472 - RNA, 17 nt, Human
cgaguuuggucccuggg

SEQ ID NO: 2475473 - RNA, 14 nt, Human
cgaguuuccccaga

SEQ ID NO: 2475474 - RNA, 22 nt, Human
cgaguuguggaaagccucugcu

SEQ ID NO: 2475475 - RNA, 19 nt, Human
cgaguagcugagauuauag

SEQ ID NO: 2475476 - RNA, 22 nt, Human
cgagguggaucacagaggcuuc

SEQ ID NO: 2475477 - RNA, 23 nt, Human
cgagguggaucacagaggcuucu

SEQ ID NO: 2475478 - RNA, 20 nt, Human
cgagguagaguuugaaggag

SEQ ID NO: 2475479 - RNA, 16 nt, Human
cgagguaugaggucua

SEQ ID NO: 2475480 - RNA, 15 nt, Human
cgaggucaacagaga

SEQ ID NO: 2475481 - RNA, 16 nt, Human
cgaggucaacagagaa

SEQ ID NO: 2475482 - RNA, 17 nt, Human
cgaggucaacagagaag

SEQ ID NO: 2475483 - RNA, 23 nt, Human
cgaggucaacagagaaggcagga

SEQ ID NO: 2475484 - RNA, 21 nt, Human
cgaggucaacagagaaggcag

SEQ ID NO: 2475485 - RNA, 20 nt, Human
cgagguggaucacagaggcu

SEQ ID NO: 2475486 - RNA, 15 nt, Human
cgcugggcugagccc

SEQ ID NO: 2475487 - RNA, 14 nt, Human
cgcugggcugagcc

SEQ ID NO: 2475488 - RNA, 17 nt, Human
cgcugggcugagccccu

SEQ ID NO: 2475489 - RNA, 20 nt, Human
cgcuggggccaguugguccc

SEQ ID NO: 2475490 - RNA, 20 nt, Human
cgcugcugcugcugcgcccu

SEQ ID NO: 2475491 - RNA, 15 nt, Human
cgcugcugcugcugc

SEQ ID NO: 2475492 - RNA, 20 nt, Human
cgcugcugcgcccugggcuc

SEQ ID NO: 2475493 - RNA, 19 nt, Human
cgcugcugcgcccugggcu

SEQ ID NO: 2475494 - RNA, 20 nt, Human
cgcuggacucucagucucug

SEQ ID NO: 2475495 - RNA, 18 nt, Human
cgcuggccgggaccccga

SEQ ID NO: 2475496 - RNA, 23 nt, Human
cgcuggccgggaccccgagccug

SEQ ID NO: 2475497 - RNA, 17 nt, Human
cgcuggggccaguuggu

SEQ ID NO: 2475498 - RNA, 17 nt, Human
cgcugccccuggcagcc

SEQ ID NO: 2475499 - RNA, 16 nt, Human
cgcugccccuggcagc

SEQ ID NO: 2475500 - RNA, 13 nt, Human
cgcugccccuggc

SEQ ID NO: 2475501 - RNA, 21 nt, Human
cgccuuagcauguuugcugaa

SEQ ID NO: 2475502 - RNA, 21 nt, Human
cgccuguucccccgccgcuuu

SEQ ID NO: 2475503 - RNA, 22 nt, Human
cgccuuagcacuaccacuccug

SEQ ID NO: 2475504 - RNA, 23 nt, Human
cgccuuagguacuuauuccagau

SEQ ID NO: 2475505 - RNA, 22 nt, Human
cgccuucacuccggugugccug

SEQ ID NO: 2475506 - RNA, 23 nt, Human
cgcuggaccuugaacuggguacu

SEQ ID NO: 2475507 - RNA, 19 nt, Human
cgcuggaccuugaacuggg

SEQ ID NO: 2475508 - RNA, 18 nt, Human
cgcugccccuggcagccc

SEQ ID NO: 2475509 - RNA, 18 nt, Human
cgcugcugcgcccugggc

SEQ ID NO: 2475510 - RNA, 22 nt, Human
cgauacugcgacuuucugccug

SEQ ID NO: 2475511 - RNA, 20 nt, Human
cgauacugcgacuuucugcc

SEQ ID NO: 2475512 - RNA, 15 nt, Human
cgauaaucagagaaa

SEQ ID NO: 2475513 - RNA, 16 nt, Human
cgaguuuggucccugg

SEQ ID NO: 2475514 - RNA, 19 nt, Human
cgauacugcgacuuucugc

SEQ ID NO: 2475515 - RNA, 15 nt, Human
cgcauaggaccuuuc

SEQ ID NO: 2475516 - RNA, 23 nt, Human
cgauacugcgacuuucugccugg

SEQ ID NO: 2475517 - RNA, 18 nt, Human
cgcaucaaaagacaauuc

SEQ ID NO: 2475518 - RNA, 15 nt, Human
cgcaucaaaagacaa

SEQ ID NO: 2475519 - RNA, 14 nt, Human
cgcaucaaaagaca

SEQ ID NO: 2475520 - RNA, 22 nt, Human
cgcaucaaaagacaauucuuua

SEQ ID NO: 2475521 - RNA, 19 nt, Human
cgcaucaaaagacaauucu

SEQ ID NO: 2475522 - RNA, 13 nt, Human
cgcaucagacaga

SEQ ID NO: 2475523 - RNA, 12 nt, Human
cgcaucauaugc

SEQ ID NO: 2475524 - RNA, 16 nt, Human
cgccuuaaggauguuc

SEQ ID NO: 2475525 - RNA, 20 nt, Human
cgccuguaguccuagccacu

SEQ ID NO: 2475526 - RNA, 19 nt, Human
cgccuguucccccgccgcu

SEQ ID NO: 2475527 - RNA, 15 nt, Human
cgccuguucccccgc

SEQ ID NO: 2475528 - RNA, 13 nt, Human
cgccuguuccccc

SEQ ID NO: 2475529 - RNA, 18 nt, Human
cgccuguagucccagcca

SEQ ID NO: 2475530 - RNA, 15 nt, Human
cgcaucuucuccauc

SEQ ID NO: 2475531 - RNA, 16 nt, Human
cgcaucuucuccaucu

SEQ ID NO: 2475532 - RNA, 21 nt, Human
cgcaucuucuccaucuggcag

SEQ ID NO: 2475533 - RNA, 20 nt, Human
cgccuguagucccagcuacu

SEQ ID NO: 2475534 - RNA, 17 nt, Human
cgccuguaguccuagcc

SEQ ID NO: 2475535 - RNA, 13 nt, Human
cgcaucuucucca

SEQ ID NO: 2475536 - RNA, 14 nt, Human
cgcaucuucuccau

SEQ ID NO: 2475537 - RNA, 19 nt, Human
cgcauccuagucucuauca

SEQ ID NO: 2475538 - RNA, 16 nt, Human
cgcauccuagucucua

SEQ ID NO: 2475539 - RNA, 15 nt, Human
cgcauccuagucucu

SEQ ID NO: 2475540 - RNA, 16 nt, Human
cguaauuuugccaaau

SEQ ID NO: 2475541 - RNA, 18 nt, Human
cggugggccuugcugggg

SEQ ID NO: 2475542 - RNA, 13 nt, Human
cggugggccuugc

SEQ ID NO: 2475543 - RNA, 19 nt, Human
cggugggccuuguccccug

SEQ ID NO: 2475544 - RNA, 19 nt, Human
cggugggccuugcugggga

SEQ ID NO: 2475545 - RNA, 17 nt, Human
cggugguaccaggucuc

SEQ ID NO: 2475546 - RNA, 21 nt, Human
cggugguaccaggucuccucc

SEQ ID NO: 2475547 - RNA, 15 nt, Human
cggugugcaccaggg

SEQ ID NO: 2475548 - RNA, 16 nt, Human
cggugugcaccagggu

SEQ ID NO: 2475549 - RNA, 15 nt, Human
cggugugccugcagc

SEQ ID NO: 2475550 - RNA, 17 nt, Human
cggugugccugcagccc

SEQ ID NO: 2475551 - RNA, 20 nt, Human
cggugugccugcagccccgc

SEQ ID NO: 2475552 - RNA, 23 nt, Human
cggagaagagcuguucacagcca

SEQ ID NO: 2475553 - RNA, 24 nt, Human
cggagaagagcuguucacagccag

SEQ ID NO: 2475554 - RNA, 15 nt, Human
cggagacggaguccc

SEQ ID NO: 2475555 - RNA, 18 nt, Human
cggagaaccuugugccug

SEQ ID NO: 2475556 - RNA, 12 nt, Human
cggagacagggu

SEQ ID NO: 2475557 - RNA, 15 nt, Human
cggagacagugaucu

SEQ ID NO: 2475558 - RNA, 19 nt, Human
cggugggcauuugugaggc

SEQ ID NO: 2475559 - RNA, 13 nt, Human
cguacacauuuua

SEQ ID NO: 2475560 - RNA, 16 nt, Human
cguacacauuuuauuu

SEQ ID NO: 2475561 - RNA, 17 nt, Human
cguaauaauuauuauua

SEQ ID NO: 2475562 - RNA, 13 nt, Human
cguaaugcuuaga

SEQ ID NO: 2475563 - RNA, 16 nt, Human
cguaauuaaaagaauu

SEQ ID NO: 2475564 - RNA, 21 nt, Human
cguaaugcuuagagaauguuc

SEQ ID NO: 2475565 - RNA, 14 nt, Human
cguaauaauuauua

SEQ ID NO: 2475566 - RNA, 12 nt, Human
cgguucuuccag

SEQ ID NO: 2475567 - RNA, 20 nt, Human
cgguuaugaaauucaccccc

SEQ ID NO: 2475568 - RNA, 13 nt, Human
cgguucaccagcc

SEQ ID NO: 2475569 - RNA, 14 nt, Human
cgguucaccagccu

SEQ ID NO: 2475570 - RNA, 15 nt, Human
cgguucaccagccuc

SEQ ID NO: 2475571 - RNA, 16 nt, Human
cgguucaccagccucu

SEQ ID NO: 2475572 - RNA, 15 nt, Human
cgguuuauauaagcu

SEQ ID NO: 2475573 - RNA, 19 nt, Human
cgguuccacgucccccugg

SEQ ID NO: 2475574 - RNA, 18 nt, Human
cgguuccacgucccccug

SEQ ID NO: 2475575 - RNA, 20 nt, Human
cgguuccacgucccccuggg

SEQ ID NO: 2475576 - RNA, 20 nt, Human
cuaacugcuacaaauacucu

SEQ ID NO: 2475577 - RNA, 14 nt, Human
cuaacuccagugaa

SEQ ID NO: 2475578 - RNA, 15 nt, Human
cuaacucaccuaacu

SEQ ID NO: 2475579 - RNA, 21 nt, Human
cuaacuagagcagcccuggag

SEQ ID NO: 2475580 - RNA, 17 nt, Human
cuaacucauacugugcu

SEQ ID NO: 2475581 - RNA, 19 nt, Human
cuaacucagaaacaucagu

SEQ ID NO: 2475582 - RNA, 14 nt, Human
cuaacuggacuggu

SEQ ID NO: 2475583 - RNA, 20 nt, Human
cuaacucauacugugcugga

SEQ ID NO: 2475584 - RNA, 13 nt, Human
cuaacuggaagca

SEQ ID NO: 2475585 - RNA, 15 nt, Human
cuaaaggcuaccuuu

SEQ ID NO: 2475586 - RNA, 16 nt, Human
cuaaaggcuaccuuug

SEQ ID NO: 2475587 - RNA, 15 nt, Human
cuaaagcugccagcc

SEQ ID NO: 2475588 - RNA, 18 nt, Human
cuaaagagagaauguaga

SEQ ID NO: 2475589 - RNA, 21 nt, Human
cguguuuuauuccuguauguu

SEQ ID NO: 2475590 - RNA, 19 nt, Human
cuaaagaaaaagucaucca

SEQ ID NO: 2475591 - RNA, 18 nt, Human
cuaaagaaaaagucaucc

SEQ ID NO: 2475592 - RNA, 21 nt, Human
cuaaagaagguuucagaaaga

SEQ ID NO: 2475593 - RNA, 14 nt, Human
cuaaagcugccagc

SEQ ID NO: 2475594 - RNA, 21 nt, Human
cuaaagaaagauuacuuagag

SEQ ID NO: 2475595 - RNA, 16 nt, Human
cuaaagagagaaugua

SEQ ID NO: 2475596 - RNA, 19 nt, Human
cuaaaguguguuguugcuu

SEQ ID NO: 2475597 - RNA, 20 nt, Human
cuaacuagagcagcccugga

SEQ ID NO: 2475598 - RNA, 19 nt, Human
cuaaaguuuacaguaaaua

SEQ ID NO: 2475599 - RNA, 18 nt, Human
cuaaaguuuacaguaaau

SEQ ID NO: 2475600 - RNA, 14 nt, Human
cuaaaguuuacagu

SEQ ID NO: 2475601 - RNA, 13 nt, Human
cuaaaguuuacag

SEQ ID NO: 2475602 - RNA, 17 nt, Human
cuaaaggcuaccuuugu

SEQ ID NO: 2475603 - RNA, 19 nt, Human
cuaaaggcuaccuuuguau

SEQ ID NO: 2475604 - RNA, 22 nt, Human
cuaaaguguauuuuuuuacuaa

SEQ ID NO: 2475605 - RNA, 13 nt, Human
cuaaaggccucuu

SEQ ID NO: 2475606 - RNA, 16 nt, Human
cguguauccuggggcu

SEQ ID NO: 2475607 - RNA, 15 nt, Human
cguguauccuggggc

SEQ ID NO: 2475608 - RNA, 14 nt, Human
cguguauccugggg

SEQ ID NO: 2475609 - RNA, 17 nt, Human
cguguccccggccucag

SEQ ID NO: 2475610 - RNA, 16 nt, Human
cguguccccggccuca

SEQ ID NO: 2475611 - RNA, 16 nt, Human
cgugucaccugugcuu

SEQ ID NO: 2475612 - RNA, 22 nt, Human
cguguccccuauccuacuuccc

SEQ ID NO: 2475613 - RNA, 20 nt, Human
cguguuucugacucugagcu

SEQ ID NO: 2475614 - RNA, 11 nt, Human
cguguuugcac

SEQ ID NO: 2475615 - RNA, 15 nt, Human
cgugucccucucgga

SEQ ID NO: 2475616 - RNA, 17 nt, Human
cguguccgacucuucug

SEQ ID NO: 2475617 - RNA, 15 nt, Human
cgugucgugggugug

SEQ ID NO: 2475618 - RNA, 14 nt, Human
cguuaccaggcagg

SEQ ID NO: 2475619 - RNA, 20 nt, Human
cguuaagggaaggaacucug

SEQ ID NO: 2475620 - RNA, 13 nt, Human
cguuaaaauacca

SEQ ID NO: 2475621 - RNA, 12 nt, Human
cguguuuguguu

SEQ ID NO: 2475622 - RNA, 20 nt, Human
cuccuuuagcaggugguccu

SEQ ID NO: 2475623 - RNA, 14 nt, Human
cuccuuuagcaggu

SEQ ID NO: 2475624 - RNA, 19 nt, Human
cuccuuucaccccagggcc

SEQ ID NO: 2475625 - RNA, 22 nt, Human
cuccuuuagcgcccaguugggu

SEQ ID NO: 2475626 - RNA, 16 nt, Human
cuccuuucucuucucu

SEQ ID NO: 2475627 - RNA, 21 nt, Human
cuccuuucuccagccagcaau

SEQ ID NO: 2475628 - RNA, 19 nt, Human
cuccuuucuccagccagca

SEQ ID NO: 2475629 - RNA, 18 nt, Human
cuccuuucuccagccagc

SEQ ID NO: 2475630 - RNA, 17 nt, Human
cuccuuucuccagccag

SEQ ID NO: 2475631 - RNA, 14 nt, Human
cuccuuucuccagc

SEQ ID NO: 2475632 - RNA, 17 nt, Human
cuccuuuagcgcccagu

SEQ ID NO: 2475633 - RNA, 16 nt, Human
cuccuuuagcgcccag

SEQ ID NO: 2475634 - RNA, 15 nt, Human
cuccuagcagagaga

SEQ ID NO: 2475635 - RNA, 23 nt, Human
cuccuagagggaggggccuaggc

SEQ ID NO: 2475636 - RNA, 16 nt, Human
cuccuagccacccacc

SEQ ID NO: 2475637 - RNA, 22 nt, Human
cuccuagccugugccucuggga

SEQ ID NO: 2475638 - RNA, 24 nt, Human
cuccuuuucacaguucucuccuuc

SEQ ID NO: 2475639 - RNA, 23 nt, Human
cuccuuugcugaggccuccagcu

SEQ ID NO: 2475640 - RNA, 22 nt, Human
cuccuuugcacugagggccaca

SEQ ID NO: 2475641 - RNA, 16 nt, Human
cuccuuugcaggcuca

SEQ ID NO: 2475642 - RNA, 21 nt, Human
cuccuuugcacugagggccac

SEQ ID NO: 2475643 - RNA, 20 nt, Human
cuccuuugcacugagggcca

SEQ ID NO: 2475644 - RNA, 18 nt, Human
cuccuuugcacugagggc

SEQ ID NO: 2475645 - RNA, 16 nt, Human
cuccuuugcacugagg

SEQ ID NO: 2475646 - RNA, 23 nt, Human
cuccuuugugaggaagccgcugg

SEQ ID NO: 2475647 - RNA, 15 nt, Human
cuccuuugcacugag

SEQ ID NO: 2475648 - RNA, 14 nt, Human
cuccuuugcacuga

SEQ ID NO: 2475649 - RNA, 21 nt, Human
cuccuuucuuuuucuucuucc

SEQ ID NO: 2475650 - RNA, 20 nt, Human
cuccuuucuuuuucuucuuc

SEQ ID NO: 2475651 - RNA, 19 nt, Human
cuccuuucuuuuucuucuu

SEQ ID NO: 2475652 - RNA, 13 nt, Human
cuccuuucuuuuu

SEQ ID NO: 2475653 - RNA, 14 nt, Human
cuccuuucuuucua

SEQ ID NO: 2475654 - RNA, 18 nt, Human
cuccuuuuucucccucug

SEQ ID NO: 2475655 - RNA, 15 nt, Human
cuccuuuuucucccu

SEQ ID NO: 2475656 - RNA, 14 nt, Human
cuccuuuuucuccc

SEQ ID NO: 2475657 - RNA, 18 nt, Human
cuccuuuuuauguugcca

SEQ ID NO: 2475658 - RNA, 21 nt, Human
cuccuuuuucucccucuggau

SEQ ID NO: 2475659 - RNA, 19 nt, Human
cuccuuuuucucccucugg

SEQ ID NO: 2475660 - RNA, 14 nt, Human
cucgaaacacagaa

SEQ ID NO: 2475661 - RNA, 15 nt, Human
cucgaaacacagaaa

SEQ ID NO: 2475662 - RNA, 19 nt, Human
cucgaaacacagaaaccuu

SEQ ID NO: 2475663 - RNA, 13 nt, Human
cucgaacuccuga

SEQ ID NO: 2475664 - RNA, 20 nt, Human
cucgaaacacagaaaccuuu

SEQ ID NO: 2475665 - RNA, 22 nt, Human
cucgaacauggaacucauuccu

SEQ ID NO: 2475666 - RNA, 23 nt, Human
cucgaacauggaacucauuccug

SEQ ID NO: 2475667 - RNA, 16 nt, Human
cucgaacuccugaccu

SEQ ID NO: 2475668 - RNA, 17 nt, Human
cucgaacuccugaccuu

SEQ ID NO: 2475669 - RNA, 22 nt, Human
cucgucaucauuuuuccuuccc

SEQ ID NO: 2475670 - RNA, 20 nt, Human
cucguauaugucucaggucc

SEQ ID NO: 2475671 - RNA, 12 nt, Human
cucguccucccc

SEQ ID NO: 2475672 - RNA, 14 nt, Human
cucguccucccccu

SEQ ID NO: 2475673 - RNA, 17 nt, Human
cucguggccagcccggc

SEQ ID NO: 2475674 - RNA, 16 nt, Human
cucguggccagcccgg

SEQ ID NO: 2475675 - RNA, 14 nt, Human
cucguggccagccc

SEQ ID NO: 2475676 - RNA, 13 nt, Human
cucguggccagcc

SEQ ID NO: 2475677 - RNA, 12 nt, Human
cucguggccagc

SEQ ID NO: 2475678 - RNA, 19 nt, Human
cucguggccagcccggcug

SEQ ID NO: 2475679 - RNA, 18 nt, Human
cucguggccagcccggcu

SEQ ID NO: 2475680 - RNA, 14 nt, Human
cucguggccuuccc

SEQ ID NO: 2475681 - RNA, 18 nt, Human
cucguggccuuccccagc

SEQ ID NO: 2475682 - RNA, 21 nt, Human
cucguggccuuccccagccuc

SEQ ID NO: 2475683 - RNA, 15 nt, Human
cucgugggagagcca

SEQ ID NO: 2475684 - RNA, 20 nt, Human
cucguggccuuccccagccu

SEQ ID NO: 2475685 - RNA, 14 nt, Human
cucguaacugguuu

SEQ ID NO: 2475686 - RNA, 14 nt, Human
cucguagccaucuc

SEQ ID NO: 2475687 - RNA, 18 nt, Human
cucguauaugucucaggu

SEQ ID NO: 2475688 - RNA, 13 nt, Human
cucgguuucucca

SEQ ID NO: 2475689 - RNA, 14 nt, Human
cucgguggacccag

SEQ ID NO: 2475690 - RNA, 11 nt, Human
cucggugccuu

SEQ ID NO: 2475691 - RNA, 23 nt, Human
cucgguguggagaagcggcuggc

SEQ ID NO: 2475692 - RNA, 24 nt, Human
cucgggcccaggccaucuuccagg

SEQ ID NO: 2475693 - RNA, 21 nt, Human
cucggguggcuagucagagag

SEQ ID NO: 2475694 - RNA, 23 nt, Human
cucgggcugagaacccugcgugg

SEQ ID NO: 2475695 - RNA, 17 nt, Human
cucgggcuccugugccc

SEQ ID NO: 2475696 - RNA, 15 nt, Human
cucgggcuccugugc

SEQ ID NO: 2475697 - RNA, 19 nt, Human
cucgggcgagucacugccu

SEQ ID NO: 2475698 - RNA, 21 nt, Human
cucgggcgagucacugccucu

SEQ ID NO: 2475699 - RNA, 14 nt, Human
cucgggcuccugug

SEQ ID NO: 2475700 - RNA, 22 nt, Human
cucgggcgagucacugccucuc

SEQ ID NO: 2475701 - RNA, 16 nt, Human
cucugcacaagcugca

SEQ ID NO: 2475702 - RNA, 22 nt, Human
cucugaaaucugaagaccucga

SEQ ID NO: 2475703 - RNA, 17 nt, Human
cucugaaaacggcccuc

SEQ ID NO: 2475704 - RNA, 17 nt, Human
cucugaaaccaguguua

SEQ ID NO: 2475705 - RNA, 15 nt, Human
cucugaaacccugga

SEQ ID NO: 2475706 - RNA, 18 nt, Human
cucucuuuuuggaggugc

SEQ ID NO: 2475707 - RNA, 21 nt, Human
cucucuuuguucucagcuccc

SEQ ID NO: 2475708 - RNA, 20 nt, Human
cucucuuuguucucagcucc

SEQ ID NO: 2475709 - RNA, 19 nt, Human
cucucuuuguucucagcuc

SEQ ID NO: 2475710 - RNA, 22 nt, Human
cucucuuuguucucagcucccc

SEQ ID NO: 2475711 - RNA, 20 nt, Human
cucucuuuuuggaggugcuu

SEQ ID NO: 2475712 - RNA, 19 nt, Human
cucucuuuuuggaggugcu

SEQ ID NO: 2475713 - RNA, 12 nt, Human
cucugaaaccag

SEQ ID NO: 2475714 - RNA, 16 nt, Human
cucugaaaucugaaga

SEQ ID NO: 2475715 - RNA, 19 nt, Human
cucucuggccuucggccuc

SEQ ID NO: 2475716 - RNA, 22 nt, Human
cucucuggccuucggccuccau

SEQ ID NO: 2475717 - RNA, 17 nt, Human
cucucuggccuucggcc

SEQ ID NO: 2475718 - RNA, 10 nt, Human
cucuccucug

SEQ ID NO: 2475719 - RNA, 20 nt, Human
cucucuugauuaagaucuca

SEQ ID NO: 2475720 - RNA, 20 nt, Human
cucuccucggcccccuccau

SEQ ID NO: 2475721 - RNA, 20 nt, Human
cucuccuccugcccaccugu

SEQ ID NO: 2475722 - RNA, 17 nt, Human
cucucuucugcuccacc

SEQ ID NO: 2475723 - RNA, 16 nt, Human
cucucuugcacccgcc

SEQ ID NO: 2475724 - RNA, 14 nt, Human
cucucuugcacccg

SEQ ID NO: 2475725 - RNA, 15 nt, Human
cucucuugguuuccu

SEQ ID NO: 2475726 - RNA, 13 nt, Human
cucucuugcaccc

SEQ ID NO: 2475727 - RNA, 15 nt, Human
cucuccucugccuca

SEQ ID NO: 2475728 - RNA, 18 nt, Human
cucucuucugcuccaccc

SEQ ID NO: 2475729 - RNA, 20 nt, Human
cucucuuuccuucuugccuu

SEQ ID NO: 2475730 - RNA, 17 nt, Human
cucucuuuccuucuugc

SEQ ID NO: 2475731 - RNA, 15 nt, Human
cucucuuuccuucuu

SEQ ID NO: 2475732 - RNA, 18 nt, Human
cucucuuuguucucagcu

SEQ ID NO: 2475733 - RNA, 15 nt, Human
cucucuuuguucuca

SEQ ID NO: 2475734 - RNA, 14 nt, Human
cucucuuuguucuc

SEQ ID NO: 2475735 - RNA, 18 nt, Human
cucucuuugggaauguuu

SEQ ID NO: 2475736 - RNA, 17 nt, Human
cucucuuugggaauguu

SEQ ID NO: 2475737 - RNA, 15 nt, Human
cucucuuugggaaug

SEQ ID NO: 2475738 - RNA, 20 nt, Human
cucuccuccuuuucacaguu

SEQ ID NO: 2475739 - RNA, 13 nt, Human
cucuccuccuuuu

SEQ ID NO: 2475740 - RNA, 16 nt, Human
cucuccgaccagacac

SEQ ID NO: 2475741 - RNA, 20 nt, Human
cucuccuccccaaggagaca

SEQ ID NO: 2475742 - RNA, 15 nt, Human
cucuccuccugccca

SEQ ID NO: 2475743 - RNA, 19 nt, Human
cucuccuccugcccaccug

SEQ ID NO: 2475744 - RNA, 13 nt, Human
cucucccuuggau

SEQ ID NO: 2475745 - RNA, 12 nt, Human
cucucccuggcc

SEQ ID NO: 2475746 - RNA, 13 nt, Human
cucucccuggccc

SEQ ID NO: 2475747 - RNA, 12 nt, Human
cucucccuguug

SEQ ID NO: 2475748 - RNA, 16 nt, Human
cucgugguaggacugu

SEQ ID NO: 2475749 - RNA, 15 nt, Human
cucgugguaggacug

SEQ ID NO: 2475750 - RNA, 19 nt, Human
cucccagcagcccuaagga

SEQ ID NO: 2475751 - RNA, 21 nt, Human
cucccagcaacacaagcugga

SEQ ID NO: 2475752 - RNA, 19 nt, Human
cucccagcccuauggaugu

SEQ ID NO: 2475753 - RNA, 18 nt, Human
cucccagcccuauggaug

SEQ ID NO: 2475754 - RNA, 21 nt, Human
cucccagcccuauggaugugg

SEQ ID NO: 2475755 - RNA, 16 nt, Human
cucccagcccuaugga

SEQ ID NO: 2475756 - RNA, 13 nt, Human
cucccaccucagc

SEQ ID NO: 2475757 - RNA, 17 nt, Human
cucccaccucagccucc

SEQ ID NO: 2475758 - RNA, 16 nt, Human
cucccaccucagccuc

SEQ ID NO: 2475759 - RNA, 15 nt, Human
cuccauaaccccacc

SEQ ID NO: 2475760 - RNA, 14 nt, Human
cuccauaaccccac

SEQ ID NO: 2475761 - RNA, 22 nt, Human
cuccauaaccccacccuugccc

SEQ ID NO: 2475762 - RNA, 14 nt, Human
cuccauacucagga

SEQ ID NO: 2475763 - RNA, 14 nt, Human
cucccaccucagcc

SEQ ID NO: 2475764 - RNA, 20 nt, Human
cuccaggugcacaagcucca

SEQ ID NO: 2475765 - RNA, 19 nt, Human
cuccaggugcacaagcucc

SEQ ID NO: 2475766 - RNA, 20 nt, Human
cuccagggaguccccucccc

SEQ ID NO: 2475767 - RNA, 18 nt, Human
cuccagggaguccccucc

SEQ ID NO: 2475768 - RNA, 17 nt, Human
cuccagggaguccccuc

SEQ ID NO: 2475769 - RNA, 14 nt, Human
cuccagggaguccc

SEQ ID NO: 2475770 - RNA, 18 nt, Human
cuccaggugcacaagcuc

SEQ ID NO: 2475771 - RNA, 22 nt, Human
cuccaggugcacaagcuccaag

SEQ ID NO: 2475772 - RNA, 15 nt, Human
cuccagugguugcug

SEQ ID NO: 2475773 - RNA, 23 nt, Human
cuccaguggggcaagauuuuccu

SEQ ID NO: 2475774 - RNA, 14 nt, Human
cuccagugccaaca

SEQ ID NO: 2475775 - RNA, 20 nt, Human
cuccaguggggcaagauuuu

SEQ ID NO: 2475776 - RNA, 18 nt, Human
cuccagugccagcaauga

SEQ ID NO: 2475777 - RNA, 21 nt, Human
cuccagggaguccccuccccg

SEQ ID NO: 2475778 - RNA, 19 nt, Human
cuccagugguugcuguuga

SEQ ID NO: 2475779 - RNA, 16 nt, Human
cuccagugguugcugu

SEQ ID NO: 2475780 - RNA, 17 nt, Human
cuccaguuuucaguuga

SEQ ID NO: 2475781 - RNA, 22 nt, Human
cuccaggcuguaucccaugagc

SEQ ID NO: 2475782 - RNA, 23 nt, Human
cuccaggcuguaucccaugagcc

SEQ ID NO: 2475783 - RNA, 17 nt, Human
cuccaggcugucuuuca

SEQ ID NO: 2475784 - RNA, 11 nt, Human
cuccagacaca

SEQ ID NO: 2475785 - RNA, 22 nt, Human
cuccagaauuucccaaagcagu

SEQ ID NO: 2475786 - RNA, 17 nt, Human
cucagacauuggcaccu

SEQ ID NO: 2475787 - RNA, 16 nt, Human
cuccagacacaugucc

SEQ ID NO: 2475788 - RNA, 22 nt, Human
cucagacaggaaagggaaggcc

SEQ ID NO: 2475789 - RNA, 20 nt, Human
cuccagacaaaccagaagca

SEQ ID NO: 2475790 - RNA, 16 nt, Human
cucagaaucucaaaua

SEQ ID NO: 2475791 - RNA, 17 nt, Human
cucagaaucucaaauaa

SEQ ID NO: 2475792 - RNA, 21 nt, Human
cuccagaauuucccaaagcag

SEQ ID NO: 2475793 - RNA, 13 nt, Human
cucagacauuggc

SEQ ID NO: 2475794 - RNA, 20 nt, Human
cucagacauguuuuccguga

SEQ ID NO: 2475795 - RNA, 19 nt, Human
cucagacauguuuuccgug

SEQ ID NO: 2475796 - RNA, 20 nt, Human
cuccgcuuucuacccagcga

SEQ ID NO: 2475797 - RNA, 21 nt, Human
cuccgcuuucuacccagcgag

SEQ ID NO: 2475798 - RNA, 15 nt, Human
cuccguauuucagac

SEQ ID NO: 2475799 - RNA, 13 nt, Human
cuccguauuucag

SEQ ID NO: 2475800 - RNA, 14 nt, Human
cuccguauuucaga

SEQ ID NO: 2475801 - RNA, 13 nt, Human
cuccggugugccu

SEQ ID NO: 2475802 - RNA, 18 nt, Human
cuccggugugccugcagc

SEQ ID NO: 2475803 - RNA, 19 nt, Human
cuccggugugccugcagcc

SEQ ID NO: 2475804 - RNA, 23 nt, Human
cuccggugugccugcagccccgc

SEQ ID NO: 2475805 - RNA, 23 nt, Human
cuccuagagacagaagcaggcug

SEQ ID NO: 2475806 - RNA, 18 nt, Human
cuccuagagacagaagca

SEQ ID NO: 2475807 - RNA, 17 nt, Human
cuccuagagacagaagc

SEQ ID NO: 2475808 - RNA, 21 nt, Human
cuccuagagaacgcagcccua

SEQ ID NO: 2475809 - RNA, 13 nt, Human
cuccuagagggag

SEQ ID NO: 2475810 - RNA, 15 nt, Human
cuccuagagggaggg

SEQ ID NO: 2475811 - RNA, 18 nt, Human
cuccuagagggaggggcc

SEQ ID NO: 2475812 - RNA, 19 nt, Human
cuccuagagggaggggccu

SEQ ID NO: 2475813 - RNA, 20 nt, Human
cuccuagagaacgcagcccu

SEQ ID NO: 2475814 - RNA, 18 nt, Human
cuccuagagaacgcagcc

SEQ ID NO: 2475815 - RNA, 15 nt, Human
cuccuagagaacgca

SEQ ID NO: 2475816 - RNA, 21 nt, Human
cuccuagacugacccugauca

SEQ ID NO: 2475817 - RNA, 22 nt, Human
cuccgcuuucuacccagcgagc

SEQ ID NO: 2475818 - RNA, 21 nt, Human
cuccggggagcgcccgcgccc

SEQ ID NO: 2475819 - RNA, 20 nt, Human
cuccgguaaaacaccggaga

SEQ ID NO: 2475820 - RNA, 18 nt, Human
cuccggggagcgcccgcg

SEQ ID NO: 2475821 - RNA, 14 nt, Human
cuccgggagagggg

SEQ ID NO: 2475822 - RNA, 15 nt, Human
cuccgggaccuggug

SEQ ID NO: 2475823 - RNA, 19 nt, Human
cucccucuuucccucccuu

SEQ ID NO: 2475824 - RNA, 15 nt, Human
cucccucuuucccuc

SEQ ID NO: 2475825 - RNA, 20 nt, Human
cucccucuucucaagugccu

SEQ ID NO: 2475826 - RNA, 15 nt, Human
cucccucuucucaag

SEQ ID NO: 2475827 - RNA, 14 nt, Human
cucccucuucucaa

SEQ ID NO: 2475828 - RNA, 18 nt, Human
cucccucuggcccugccu

SEQ ID NO: 2475829 - RNA, 19 nt, Human
cucccucuggcccugccuu

SEQ ID NO: 2475830 - RNA, 20 nt, Human
cucccucuggcccugccuuc

SEQ ID NO: 2475831 - RNA, 21 nt, Human
cucccucugaccugcaggcca

SEQ ID NO: 2475832 - RNA, 16 nt, Human
cucccucugaggcugu

SEQ ID NO: 2475833 - RNA, 17 nt, Human
cucccucuccugccuac

SEQ ID NO: 2475834 - RNA, 20 nt, Human
cucccucugaggcuguagga

SEQ ID NO: 2475835 - RNA, 17 nt, Human
cucccucugaggcugua

SEQ ID NO: 2475836 - RNA, 22 nt, Human
cucccucugccugaaccuucca

SEQ ID NO: 2475837 - RNA, 14 nt, Human
cucccucuggauca

SEQ ID NO: 2475838 - RNA, 13 nt, Human
cucccucuggauc

SEQ ID NO: 2475839 - RNA, 11 nt, Human
cucccucugga

SEQ ID NO: 2475840 - RNA, 16 nt, Human
cucccucuggaucaaa

SEQ ID NO: 2475841 - RNA, 14 nt, Human
cucccucuggcccu

SEQ ID NO: 2475842 - RNA, 15 nt, Human
cucccucuggcccug

SEQ ID NO: 2475843 - RNA, 17 nt, Human
cucccucuggcccugcc

SEQ ID NO: 2475844 - RNA, 18 nt, Human
cucccuccgauccuuccu

SEQ ID NO: 2475845 - RNA, 23 nt, Human
cucccuccccugcccugguccag

SEQ ID NO: 2475846 - RNA, 12 nt, Human
cucccucuccug

SEQ ID NO: 2475847 - RNA, 13 nt, Human
cucccucuccugc

SEQ ID NO: 2475848 - RNA, 14 nt, Human
cucccucuccugcc

SEQ ID NO: 2475849 - RNA, 15 nt, Human
cucccucuccugccu

SEQ ID NO: 2475850 - RNA, 15 nt, Human
cucccucucucuucu

SEQ ID NO: 2475851 - RNA, 16 nt, Human
cucccucucucuucug

SEQ ID NO: 2475852 - RNA, 17 nt, Human
cucccucucucuucugc

SEQ ID NO: 2475853 - RNA, 20 nt, Human
cucccucucucuucugcucc

SEQ ID NO: 2475854 - RNA, 21 nt, Human
cucccucucucuucugcucca

SEQ ID NO: 2475855 - RNA, 22 nt, Human
cucccucucucuucugcuccac

SEQ ID NO: 2475856 - RNA, 13 nt, Human
cucccucugaccu

SEQ ID NO: 2475857 - RNA, 14 nt, Human
cucccucugaccug

SEQ ID NO: 2475858 - RNA, 17 nt, Human
cucccucugaccugcag

SEQ ID NO: 2475859 - RNA, 18 nt, Human
cucccucugaccugcagg

SEQ ID NO: 2475860 - RNA, 14 nt, Human
cuccccaucccaug

SEQ ID NO: 2475861 - RNA, 21 nt, Human
cuccccaggguucaguccuca

SEQ ID NO: 2475862 - RNA, 11 nt, Human
cuccccaguuc

SEQ ID NO: 2475863 - RNA, 23 nt, Human
cuccccagguccagcucuggagg

SEQ ID NO: 2475864 - RNA, 21 nt, Human
cuccccagguccagcucugga

SEQ ID NO: 2475865 - RNA, 20 nt, Human
cuccccagguccagcucugg

SEQ ID NO: 2475866 - RNA, 19 nt, Human
cuccccagguccagcucug

SEQ ID NO: 2475867 - RNA, 18 nt, Human
cuccccagguccagcucu

SEQ ID NO: 2475868 - RNA, 11 nt, Human
cucccagccug

SEQ ID NO: 2475869 - RNA, 15 nt, Human
cucccagcucuagac

SEQ ID NO: 2475870 - RNA, 18 nt, Human
cucccagcucuagacaac

SEQ ID NO: 2475871 - RNA, 20 nt, Human
cucccagcucuagacaaccc

SEQ ID NO: 2475872 - RNA, 17 nt, Human
cuccccagguccagcuc

SEQ ID NO: 2475873 - RNA, 16 nt, Human
cuccccagguccagcu

SEQ ID NO: 2475874 - RNA, 11 nt, Human
cuccccagggg

SEQ ID NO: 2475875 - RNA, 21 nt, Human
cuccccaggggagagggucug

SEQ ID NO: 2475876 - RNA, 16 nt, Human
cucccucccucuuucc

SEQ ID NO: 2475877 - RNA, 18 nt, Human
cucccuccccugccauuu

SEQ ID NO: 2475878 - RNA, 16 nt, Human
cucccuccccugcccu

SEQ ID NO: 2475879 - RNA, 18 nt, Human
cucccuccccugcccugg

SEQ ID NO: 2475880 - RNA, 21 nt, Human
cucccuccccugcccuggucc

SEQ ID NO: 2475881 - RNA, 11 nt, Human
cucccuccccu

SEQ ID NO: 2475882 - RNA, 14 nt, Human
cucccuccccugcc

SEQ ID NO: 2475883 - RNA, 15 nt, Human
cucccuccccugcca

SEQ ID NO: 2475884 - RNA, 15 nt, Human
cuccccaucccaugu

SEQ ID NO: 2475885 - RNA, 18 nt, Human
cugaucucucgugauuga

SEQ ID NO: 2475886 - RNA, 17 nt, Human
cugaucucucgugauug

SEQ ID NO: 2475887 - RNA, 14 nt, Human
cugaucucucguga

SEQ ID NO: 2475888 - RNA, 16 nt, Human
cugaggugugggggcu

SEQ ID NO: 2475889 - RNA, 14 nt, Human
cugagguguggggg

SEQ ID NO: 2475890 - RNA, 13 nt, Human
cugaggugugggg

SEQ ID NO: 2475891 - RNA, 23 nt, Human
cugaggugggcccaggaccagcu

SEQ ID NO: 2475892 - RNA, 22 nt, Human
cugaggugggcccaggaccagc

SEQ ID NO: 2475893 - RNA, 20 nt, Human
cugaggugggcccaggacca

SEQ ID NO: 2475894 - RNA, 17 nt, Human
cugaggugggcccagga

SEQ ID NO: 2475895 - RNA, 16 nt, Human
cugaggugggcccagg

SEQ ID NO: 2475896 - RNA, 20 nt, Human
cugaggugugggggcugcag

SEQ ID NO: 2475897 - RNA, 19 nt, Human
cugaggugugggggcugca

SEQ ID NO: 2475898 - RNA, 18 nt, Human
cugaggugugggggcugc

SEQ ID NO: 2475899 - RNA, 17 nt, Human
cugaggugugggggcug

SEQ ID NO: 2475900 - RNA, 22 nt, Human
cugaggugugggggcugcagca

SEQ ID NO: 2475901 - RNA, 21 nt, Human
cugaggugugggggcugcagc

SEQ ID NO: 2475902 - RNA, 20 nt, Human
cugagguuccucugccugcc

SEQ ID NO: 2475903 - RNA, 19 nt, Human
cugagguuccucugccugc

SEQ ID NO: 2475904 - RNA, 18 nt, Human
cugagguuccucugccug

SEQ ID NO: 2475905 - RNA, 17 nt, Human
cugagguuccucugccu

SEQ ID NO: 2475906 - RNA, 16 nt, Human
cugagguuccucugcc

SEQ ID NO: 2475907 - RNA, 15 nt, Human
cugagguuccucugc

SEQ ID NO: 2475908 - RNA, 14 nt, Human
cugagguuccucug

SEQ ID NO: 2475909 - RNA, 21 nt, Human
cugaguaaaaaagcugugugc

SEQ ID NO: 2475910 - RNA, 23 nt, Human
cugagguuccucugccugccccg

SEQ ID NO: 2475911 - RNA, 21 nt, Human
cugagguuccucugccugccc

SEQ ID NO: 2475912 - RNA, 20 nt, Human
cugaguaagaaaugcugccc

SEQ ID NO: 2475913 - RNA, 22 nt, Human
cugaguaaucgcuuaaagaugu

SEQ ID NO: 2475914 - RNA, 16 nt, Human
cugaggaauuucaccu

SEQ ID NO: 2475915 - RNA, 21 nt, Human
cugaggggaggaucacuggag

SEQ ID NO: 2475916 - RNA, 23 nt, Human
cugaggaauccagacccggcugc

SEQ ID NO: 2475917 - RNA, 16 nt, Human
cugaggggcaucugcc

SEQ ID NO: 2475918 - RNA, 17 nt, Human
cugaggggcaucugccc

SEQ ID NO: 2475919 - RNA, 22 nt, Human
cugaggggaggaucacuggagc

SEQ ID NO: 2475920 - RNA, 23 nt, Human
cugaggggaggaucacuggagcc

SEQ ID NO: 2475921 - RNA, 14 nt, Human
cugaggggccucuu

SEQ ID NO: 2475922 - RNA, 20 nt, Human
cugaggggcaucugccccuc

SEQ ID NO: 2475923 - RNA, 18 nt, Human
cugaggggcaucugcccc

SEQ ID NO: 2475924 - RNA, 19 nt, Human
cugaggggcaucugccccu

SEQ ID NO: 2475925 - RNA, 20 nt, Human
cugaggguggagacuaagcc

SEQ ID NO: 2475926 - RNA, 19 nt, Human
cugaggguggagacuaagc

SEQ ID NO: 2475927 - RNA, 15 nt, Human
cugaggguggagacu

SEQ ID NO: 2475928 - RNA, 21 nt, Human
cugaggguccccaccugggac

SEQ ID NO: 2475929 - RNA, 20 nt, Human
cugaggguccccaccuggga

SEQ ID NO: 2475930 - RNA, 19 nt, Human
cugaggguccccaccuggg

SEQ ID NO: 2475931 - RNA, 18 nt, Human
cugaggguccccaccugg

SEQ ID NO: 2475932 - RNA, 15 nt, Human
cugaggguccccacc

SEQ ID NO: 2475933 - RNA, 22 nt, Human
cugaggggggccgugcccaggg

SEQ ID NO: 2475934 - RNA, 23 nt, Human
cugaggggggccgugcccagggg

SEQ ID NO: 2475935 - RNA, 21 nt, Human
cugaggggggccgugcccagg

SEQ ID NO: 2475936 - RNA, 20 nt, Human
cugaggggggccgugcccag

SEQ ID NO: 2475937 - RNA, 16 nt, Human
cugaggggggccgugc

SEQ ID NO: 2475938 - RNA, 13 nt, Human
cugaggugggagg

SEQ ID NO: 2475939 - RNA, 22 nt, Human
cugaggugggaggaucucuuga

SEQ ID NO: 2475940 - RNA, 21 nt, Human
cugaggugggagauguggaaa

SEQ ID NO: 2475941 - RNA, 15 nt, Human
cugaggugggcccag

SEQ ID NO: 2475942 - RNA, 14 nt, Human
cugaggugggccca

SEQ ID NO: 2475943 - RNA, 22 nt, Human
cugagcugggaugauuggaggg

SEQ ID NO: 2475944 - RNA, 13 nt, Human
cugagcugugcag

SEQ ID NO: 2475945 - RNA, 16 nt, Human
cugagcugcucugaau

SEQ ID NO: 2475946 - RNA, 16 nt, Human
cugagcugccauccag

SEQ ID NO: 2475947 - RNA, 12 nt, Human
cugagcugggau

SEQ ID NO: 2475948 - RNA, 15 nt, Human
cugagcugaggcagc

SEQ ID NO: 2475949 - RNA, 18 nt, Human
cugagcugaggcagcagu

SEQ ID NO: 2475950 - RNA, 13 nt, Human
cugagcugcucug

SEQ ID NO: 2475951 - RNA, 15 nt, Human
cugagcugccaucca

SEQ ID NO: 2475952 - RNA, 13 nt, Human
cugaccccugcuc

SEQ ID NO: 2475953 - RNA, 14 nt, Human
cugaccccugcuca

SEQ ID NO: 2475954 - RNA, 16 nt, Human
cugaccccugcucagu

SEQ ID NO: 2475955 - RNA, 19 nt, Human
cugacccugcuucaaauau

SEQ ID NO: 2475956 - RNA, 17 nt, Human
cugacccuccuguugca

SEQ ID NO: 2475957 - RNA, 14 nt, Human
cugacccuccuguu

SEQ ID NO: 2475958 - RNA, 13 nt, Human
cugacccuccugu

SEQ ID NO: 2475959 - RNA, 23 nt, Human
cugacccuccuguugcacccagc

SEQ ID NO: 2475960 - RNA, 22 nt, Human
cugacccuccuguugcacccag

SEQ ID NO: 2475961 - RNA, 18 nt, Human
cugacccucuccacccca

SEQ ID NO: 2475962 - RNA, 12 nt, Human
cugagcuuggaa

SEQ ID NO: 2475963 - RNA, 22 nt, Human
cugagcuugcagagaugaggcc

SEQ ID NO: 2475964 - RNA, 22 nt, Human
cugagcuucccccccaccacag

SEQ ID NO: 2475965 - RNA, 15 nt, Human
cugagcugugcaggu

SEQ ID NO: 2475966 - RNA, 16 nt, Human
cugagcuucucuguga

SEQ ID NO: 2475967 - RNA, 15 nt, Human
cugagcuucucugug

SEQ ID NO: 2475968 - RNA, 14 nt, Human
cugagcuuggaagc

SEQ ID NO: 2475969 - RNA, 20 nt, Human
cugagcuuggaagcuucugg

SEQ ID NO: 2475970 - RNA, 21 nt, Human
cugagcuuggaagcuucuggu

SEQ ID NO: 2475971 - RNA, 12 nt, Human
cugagcuuggcc

SEQ ID NO: 2475972 - RNA, 15 nt, Human
cugagcuuggccaga

SEQ ID NO: 2475973 - RNA, 16 nt, Human
cugagcuuggccagaa

SEQ ID NO: 2475974 - RNA, 17 nt, Human
cugagcuuggccagaag

SEQ ID NO: 2475975 - RNA, 22 nt, Human
cugaggaacccuuacaguagga

SEQ ID NO: 2475976 - RNA, 18 nt, Human
cugaggaagaacggggcu

SEQ ID NO: 2475977 - RNA, 15 nt, Human
cugaggaagaacggg

SEQ ID NO: 2475978 - RNA, 18 nt, Human
cugaggaagagggacugu

SEQ ID NO: 2475979 - RNA, 23 nt, Human
cugaggaagagggacuguucuuu

SEQ ID NO: 2475980 - RNA, 23 nt, Human
cugaggaagaacggggcucuucu

SEQ ID NO: 2475981 - RNA, 18 nt, Human
cugaggaagaugggggca

SEQ ID NO: 2475982 - RNA, 18 nt, Human
cugagcuuggccagaagg

SEQ ID NO: 2475983 - RNA, 20 nt, Human
cugaggaagcacagcagcau

SEQ ID NO: 2475984 - RNA, 23 nt, Human
cugaggaagaugggggcaagaag

SEQ ID NO: 2475985 - RNA, 19 nt, Human
cucugcacaagcugcaccc

SEQ ID NO: 2475986 - RNA, 17 nt, Human
cucugcacaagcugcac

SEQ ID NO: 2475987 - RNA, 18 nt, Human
cucugcacaagcugcacc

SEQ ID NO: 2475988 - RNA, 22 nt, Human
cugaaaauauaaccagccauug

SEQ ID NO: 2475989 - RNA, 18 nt, Human
cugaaaaugguauuuucc

SEQ ID NO: 2475990 - RNA, 20 nt, Human
cugaaaaucuaauauuaaaa

SEQ ID NO: 2475991 - RNA, 17 nt, Human
cugaaaaucuaauauua

SEQ ID NO: 2475992 - RNA, 16 nt, Human
cugaaaaucuaauauu

SEQ ID NO: 2475993 - RNA, 15 nt, Human
cugaaaaucuaauau

SEQ ID NO: 2475994 - RNA, 20 nt, Human
cugaaaaucgaguuuuuccu

SEQ ID NO: 2475995 - RNA, 13 nt, Human
cugaaagaggaau

SEQ ID NO: 2475996 - RNA, 17 nt, Human
cugaaagaggaaugaag

SEQ ID NO: 2475997 - RNA, 23 nt, Human
cugaaaaaucacauccuggccug

SEQ ID NO: 2475998 - RNA, 21 nt, Human
cugaaaaaucacauccuggcc

SEQ ID NO: 2475999 - RNA, 19 nt, Human
cugaaaaaucuaagugaua

SEQ ID NO: 2476000 - RNA, 22 nt, Human
cugaaaaaucuaagugauauaa

SEQ ID NO: 2476001 - RNA, 21 nt, Human
cugaaaaaugguaauuguugc

SEQ ID NO: 2476002 - RNA, 15 nt, Human
cugaaaauauaacca

SEQ ID NO: 2476003 - RNA, 13 nt, Human
cugaaaauauaac

SEQ ID NO: 2476004 - RNA, 19 nt, Human
cugaaaagacucaguguuc

SEQ ID NO: 2476005 - RNA, 17 nt, Human
cugaaaaaucacauccu

SEQ ID NO: 2476006 - RNA, 12 nt, Human
cugaaaaaucac

SEQ ID NO: 2476007 - RNA, 21 nt, Human
cugaaaaaacaccuagcuuua

SEQ ID NO: 2476008 - RNA, 20 nt, Human
cugaaaaaaaguuuacaagu

SEQ ID NO: 2476009 - RNA, 22 nt, Human
cugaaaaaacaccuagcuuuau

SEQ ID NO: 2476010 - RNA, 18 nt, Human
cugaaaaaaaguuuacaa

SEQ ID NO: 2476011 - RNA, 15 nt, Human
cugaaaaaaaguuua

SEQ ID NO: 2476012 - RNA, 14 nt, Human
cugaaaaaaaguuu

SEQ ID NO: 2476013 - RNA, 12 nt, Human
cucuugcacccg

SEQ ID NO: 2476014 - RNA, 23 nt, Human
cucuugcaauccacaaucugaca

SEQ ID NO: 2476015 - RNA, 20 nt, Human
cucuugcaauccacaaucug

SEQ ID NO: 2476016 - RNA, 13 nt, Human
cucuugauuuuca

SEQ ID NO: 2476017 - RNA, 24 nt, Human
cucuugauucauaaugacuuaagc

SEQ ID NO: 2476018 - RNA, 12 nt, Human
cucuugccccaa

SEQ ID NO: 2476019 - RNA, 22 nt, Human
cucuugccacugccucuuccuc

SEQ ID NO: 2476020 - RNA, 19 nt, Human
cucuugcacccgccucucc

SEQ ID NO: 2476021 - RNA, 15 nt, Human
cucuugcacccgccu

SEQ ID NO: 2476022 - RNA, 14 nt, Human
cucuugcacccgcc

SEQ ID NO: 2476023 - RNA, 13 nt, Human
cucuugcacccgc

SEQ ID NO: 2476024 - RNA, 21 nt, Human
cucuugcacccgccucucccg

SEQ ID NO: 2476025 - RNA, 20 nt, Human
cucuugcacccgccucuccc

SEQ ID NO: 2476026 - RNA, 14 nt, Human
cucuugcaggucuc

SEQ ID NO: 2476027 - RNA, 22 nt, Human
cucuugcccuucccugucccuc

SEQ ID NO: 2476028 - RNA, 21 nt, Human
cucuugcccuucccugucccu

SEQ ID NO: 2476029 - RNA, 20 nt, Human
cucuugcccuucccuguccc

SEQ ID NO: 2476030 - RNA, 14 nt, Human
cucuuuuuguuuuu

SEQ ID NO: 2476031 - RNA, 22 nt, Human
cucuugccccaacccccagcac

SEQ ID NO: 2476032 - RNA, 20 nt, Human
cucuugccccaacccccagc

SEQ ID NO: 2476033 - RNA, 19 nt, Human
cucuugccccaacccccag

SEQ ID NO: 2476034 - RNA, 14 nt, Human
cucuugccccaacc

SEQ ID NO: 2476035 - RNA, 23 nt, Human
cucuugccccaacccccagcacc

SEQ ID NO: 2476036 - RNA, 12 nt, Human
cucuugcccccc

SEQ ID NO: 2476037 - RNA, 13 nt, Human
cucuugcccccca

SEQ ID NO: 2476038 - RNA, 16 nt, Human
cucuugccccccaccc

SEQ ID NO: 2476039 - RNA, 19 nt, Human
cucuugcccuucccugucc

SEQ ID NO: 2476040 - RNA, 17 nt, Human
cucuugcccuucccugu

SEQ ID NO: 2476041 - RNA, 16 nt, Human
cucuugcccuucccug

SEQ ID NO: 2476042 - RNA, 15 nt, Human
cucuugcccuucccu

SEQ ID NO: 2476043 - RNA, 19 nt, Human
cucuugccccccaccccag

SEQ ID NO: 2476044 - RNA, 20 nt, Human
cucuugccccccaccccagc

SEQ ID NO: 2476045 - RNA, 14 nt, Human
cucuugcccuuccc

SEQ ID NO: 2476046 - RNA, 22 nt, Human
cucuugccccccaccccagccu

SEQ ID NO: 2476047 - RNA, 15 nt, Human
cucuugagccuggga

SEQ ID NO: 2476048 - RNA, 16 nt, Human
cucuugagccugggag

SEQ ID NO: 2476049 - RNA, 22 nt, Human
cucuugauucauaaugacuuaa

SEQ ID NO: 2476050 - RNA, 19 nt, Human
cucuugauaccccccucug

SEQ ID NO: 2476051 - RNA, 18 nt, Human
cucuugauaccccccucu

SEQ ID NO: 2476052 - RNA, 21 nt, Human
cucuugauaccccccucuguc

SEQ ID NO: 2476053 - RNA, 23 nt, Human
cucuugaguuugucgcucaugug

SEQ ID NO: 2476054 - RNA, 14 nt, Human
cucuugaggccagg

SEQ ID NO: 2476055 - RNA, 16 nt, Human
cucuugaggccaggag

SEQ ID NO: 2476056 - RNA, 17 nt, Human
cucuugaggccaggagu

SEQ ID NO: 2476057 - RNA, 14 nt, Human
cucuugagggagcu

SEQ ID NO: 2476058 - RNA, 15 nt, Human
cucuugagggagcuu

SEQ ID NO: 2476059 - RNA, 13 nt, Human
cucuugagccugg

SEQ ID NO: 2476060 - RNA, 14 nt, Human
cucuugagccuggg

SEQ ID NO: 2476061 - RNA, 20 nt, Human
cugaccccuccucacuggcc

SEQ ID NO: 2476062 - RNA, 17 nt, Human
cugaccccuccucacug

SEQ ID NO: 2476063 - RNA, 16 nt, Human
cugaccccuccucacu

SEQ ID NO: 2476064 - RNA, 15 nt, Human
cugaccccuccucac

SEQ ID NO: 2476065 - RNA, 14 nt, Human
cugaccccuccuca

SEQ ID NO: 2476066 - RNA, 12 nt, Human
cugaccccuccu

SEQ ID NO: 2476067 - RNA, 20 nt, Human
cugaccccucauagcccuca

SEQ ID NO: 2476068 - RNA, 21 nt, Human
cugaccccucauagcccucac

SEQ ID NO: 2476069 - RNA, 17 nt, Human
cugaccccucauagccc

SEQ ID NO: 2476070 - RNA, 23 nt, Human
cugacacacagcucuguccuggg

SEQ ID NO: 2476071 - RNA, 22 nt, Human
cugacacacagcucuguccugg

SEQ ID NO: 2476072 - RNA, 21 nt, Human
cugacacacagcucuguccug

SEQ ID NO: 2476073 - RNA, 20 nt, Human
cugacacacagcucuguccu

SEQ ID NO: 2476074 - RNA, 19 nt, Human
cugacacacagcucugucc

SEQ ID NO: 2476075 - RNA, 18 nt, Human
cugacacacagcucuguc

SEQ ID NO: 2476076 - RNA, 17 nt, Human
cugacacacagcucugu

SEQ ID NO: 2476077 - RNA, 16 nt, Human
cugacacacagcucug

SEQ ID NO: 2476078 - RNA, 15 nt, Human
cugacacacagcucu

SEQ ID NO: 2476079 - RNA, 13 nt, Human
cugacacacagcu

SEQ ID NO: 2476080 - RNA, 17 nt, Human
cugaagccagccuucuu

SEQ ID NO: 2476081 - RNA, 14 nt, Human
cugaagccagccuu

SEQ ID NO: 2476082 - RNA, 13 nt, Human
cugaagccagccu

SEQ ID NO: 2476083 - RNA, 16 nt, Human
cugaagccaaagccaa

SEQ ID NO: 2476084 - RNA, 23 nt, Human
cugaagcauguuucauguuuugu

SEQ ID NO: 2476085 - RNA, 20 nt, Human
cugaagcauguuucauguuu

SEQ ID NO: 2476086 - RNA, 18 nt, Human
cugaagcauguuucaugu

SEQ ID NO: 2476087 - RNA, 15 nt, Human
cugaagcauguuuca

SEQ ID NO: 2476088 - RNA, 14 nt, Human
cugaagccauuguc

SEQ ID NO: 2476089 - RNA, 13 nt, Human
cugacaaucaacu

SEQ ID NO: 2476090 - RNA, 21 nt, Human
cugacaaucaacucuaauagu

SEQ ID NO: 2476091 - RNA, 18 nt, Human
cugacacaaaaaguagau

SEQ ID NO: 2476092 - RNA, 22 nt, Human
cugaaagaggcugaggccugga

SEQ ID NO: 2476093 - RNA, 11 nt, Human
cugaaagccac

SEQ ID NO: 2476094 - RNA, 12 nt, Human
cugaaagccacg

SEQ ID NO: 2476095 - RNA, 14 nt, Human
cugaagcagaugca

SEQ ID NO: 2476096 - RNA, 14 nt, Human
cugaaaauguaugu

SEQ ID NO: 2476097 - RNA, 14 nt, Human
cugaaagaggcuga

SEQ ID NO: 2476098 - RNA, 14 nt, Human
cugaaagaggccaa

SEQ ID NO: 2476099 - RNA, 20 nt, Human
cugaagcagccucuccccag

SEQ ID NO: 2476100 - RNA, 16 nt, Human
cugaagcagccucucc

SEQ ID NO: 2476101 - RNA, 15 nt, Human
cugaagcagccucuc

SEQ ID NO: 2476102 - RNA, 14 nt, Human
cugaagcagccucu

SEQ ID NO: 2476103 - RNA, 19 nt, Human
cugaagcagguucccaagc

SEQ ID NO: 2476104 - RNA, 20 nt, Human
cugaagcagguucccaagcu

SEQ ID NO: 2476105 - RNA, 21 nt, Human
cugaagcagguucccaagcuc

SEQ ID NO: 2476106 - RNA, 13 nt, Human
cugaagcauguuu

SEQ ID NO: 2476107 - RNA, 22 nt, Human
cugaagcagaugcaaagaggca

SEQ ID NO: 2476108 - RNA, 19 nt, Human
cugacacaaaccugccugg

SEQ ID NO: 2476109 - RNA, 18 nt, Human
cugacacaaaccugccug

SEQ ID NO: 2476110 - RNA, 16 nt, Human
cugacacaaaccugcc

SEQ ID NO: 2476111 - RNA, 14 nt, Human
cugacacaaaccug

SEQ ID NO: 2476112 - RNA, 20 nt, Human
cugacacaaaccugccuggg

SEQ ID NO: 2476113 - RNA, 18 nt, Human
cugacacaggaugaaggc

SEQ ID NO: 2476114 - RNA, 14 nt, Human
cugacacccauguu

SEQ ID NO: 2476115 - RNA, 13 nt, Human
cugacacccaugu

SEQ ID NO: 2476116 - RNA, 21 nt, Human
cugacacccauguuucucugg

SEQ ID NO: 2476117 - RNA, 23 nt, Human
cugacacugcggggcuuggcuga

SEQ ID NO: 2476118 - RNA, 22 nt, Human
cugacacugguauuccugccuc

SEQ ID NO: 2476119 - RNA, 19 nt, Human
cugacacuuuaauuaccaa

SEQ ID NO: 2476120 - RNA, 14 nt, Human
cugacagaaagcag

SEQ ID NO: 2476121 - RNA, 21 nt, Human
cugacacugcggggcuuggcu

SEQ ID NO: 2476122 - RNA, 13 nt, Human
cugacacugcggg

SEQ ID NO: 2476123 - RNA, 17 nt, Human
cugacacucccuugggc

SEQ ID NO: 2476124 - RNA, 19 nt, Human
cugacaccuuugcaggcau

SEQ ID NO: 2476125 - RNA, 14 nt, Human
cugacacguccacc

SEQ ID NO: 2476126 - RNA, 17 nt, Human
cugacacguccacccca

SEQ ID NO: 2476127 - RNA, 14 nt, Human
cugacaccuuucau

SEQ ID NO: 2476128 - RNA, 16 nt, Human
gugagaggggaacaga

SEQ ID NO: 2476129 - RNA, 13 nt, Human
gugagagcugggu

SEQ ID NO: 2476130 - RNA, 18 nt, Human
gugagaaucccuggcaaa

SEQ ID NO: 2476131 - RNA, 22 nt, Human
gugagaauaagagagucauaaa

SEQ ID NO: 2476132 - RNA, 19 nt, Human
gugagacaguccagccugg

SEQ ID NO: 2476133 - RNA, 18 nt, Human
gugagacaguccagccug

SEQ ID NO: 2476134 - RNA, 23 nt, Human
gugagagggcaugcgcacaaggc

SEQ ID NO: 2476135 - RNA, 15 nt, Human
gugagcaauccugca

SEQ ID NO: 2476136 - RNA, 14 nt, Human
gugagcacagccua

SEQ ID NO: 2476137 - RNA, 13 nt, Human
gugagagugagcu

SEQ ID NO: 2476138 - RNA, 21 nt, Human
gugagcacuaaggugugcucu

SEQ ID NO: 2476139 - RNA, 19 nt, Human
gugagcagaaguggagcug

SEQ ID NO: 2476140 - RNA, 19 nt, Human
gugagcacucccaagucua

SEQ ID NO: 2476141 - RNA, 16 nt, Human
gugagcacucccaagu

SEQ ID NO: 2476142 - RNA, 21 nt, Human
gugagcacggccaacaaagcu

SEQ ID NO: 2476143 - RNA, 20 nt, Human
gugagcagaaguggagcugg

SEQ ID NO: 2476144 - RNA, 17 nt, Human
gugagcagacugguggg

SEQ ID NO: 2476145 - RNA, 17 nt, Human
gugaguacuacaguccu

SEQ ID NO: 2476146 - RNA, 15 nt, Human
gugagcaggcuguga

SEQ ID NO: 2476147 - RNA, 21 nt, Human
gugagguggaauuauuuuaaa

SEQ ID NO: 2476148 - RNA, 15 nt, Human
gugacccccagcucc

SEQ ID NO: 2476149 - RNA, 17 nt, Human
gugacccccagcuccgg

SEQ ID NO: 2476150 - RNA, 20 nt, Human
gugaccccuuuucagcuucu

SEQ ID NO: 2476151 - RNA, 19 nt, Human
gugaccccuuuucagcuuc

SEQ ID NO: 2476152 - RNA, 16 nt, Human
gugacccccagcuccg

SEQ ID NO: 2476153 - RNA, 23 nt, Human
gugaccccuuuucagcuucugcu

SEQ ID NO: 2476154 - RNA, 22 nt, Human
gugaccccuuuucagcuucugc

SEQ ID NO: 2476155 - RNA, 20 nt, Human
gugacuuuggcugcaugcga

SEQ ID NO: 2476156 - RNA, 12 nt, Human
gugaccccaggu

SEQ ID NO: 2476157 - RNA, 14 nt, Human
gugacccagguccu

SEQ ID NO: 2476158 - RNA, 15 nt, Human
gugacccagucagag

SEQ ID NO: 2476159 - RNA, 22 nt, Human
gugagaaaaagcuccuguccuc

SEQ ID NO: 2476160 - RNA, 17 nt, Human
gugagaaaaagcuccug

SEQ ID NO: 2476161 - RNA, 15 nt, Human
gugagaacuacucag

SEQ ID NO: 2476162 - RNA, 20 nt, Human
gugagaagugaaugcuggga

SEQ ID NO: 2476163 - RNA, 22 nt, Human
gugagaagugaaugcugggacu

SEQ ID NO: 2476164 - RNA, 21 nt, Human
gugagaagugaaugcugggac

SEQ ID NO: 2476165 - RNA, 14 nt, Human
gugagaauaagaga

SEQ ID NO: 2476166 - RNA, 17 nt, Human
gugagaauaggcagccc

SEQ ID NO: 2476167 - RNA, 12 nt, Human
gugagagcuggg

SEQ ID NO: 2476168 - RNA, 20 nt, Human
aacugaaaucauacuucuua

SEQ ID NO: 2476169 - RNA, 13 nt, Human
aacugaaaucaua

SEQ ID NO: 2476170 - RNA, 17 nt, Human
aacucugucuucaccug

SEQ ID NO: 2476171 - RNA, 20 nt, Human
aacucugucuucaccugauu

SEQ ID NO: 2476172 - RNA, 20 nt, Human
aacucuguguugugaauguc

SEQ ID NO: 2476173 - RNA, 23 nt, Human
aacucugucuucaccugauucaa

SEQ ID NO: 2476174 - RNA, 16 nt, Human
aacucuguggcauuau

SEQ ID NO: 2476175 - RNA, 21 nt, Human
aacucugggcugcuacccaga

SEQ ID NO: 2476176 - RNA, 22 nt, Human
aacucugggcugcuacccagaa

SEQ ID NO: 2476177 - RNA, 15 nt, Human
aacugaacauuccag

SEQ ID NO: 2476178 - RNA, 21 nt, Human
aacugcaggcccuggccuccc

SEQ ID NO: 2476179 - RNA, 20 nt, Human
aacugcaggcccuggccucc

SEQ ID NO: 2476180 - RNA, 19 nt, Human
aacugcaggcccuggccuc

SEQ ID NO: 2476181 - RNA, 18 nt, Human
aacugcaggcccuggccu

SEQ ID NO: 2476182 - RNA, 17 nt, Human
aacugcaggcccuggcc

SEQ ID NO: 2476183 - RNA, 16 nt, Human
aacugcaggcccuggc

SEQ ID NO: 2476184 - RNA, 14 nt, Human
aacugcaggcccug

SEQ ID NO: 2476185 - RNA, 20 nt, Human
aacucuggcuuccagguauc

SEQ ID NO: 2476186 - RNA, 18 nt, Human
aacucuggcuuccaggua

SEQ ID NO: 2476187 - RNA, 17 nt, Human
aacucuggcuuccaggu

SEQ ID NO: 2476188 - RNA, 16 nt, Human
aacucuggcuuccagg

SEQ ID NO: 2476189 - RNA, 22 nt, Human
aacucugcugucuaaccuguga

SEQ ID NO: 2476190 - RNA, 16 nt, Human
aacucugcuugauuuu

SEQ ID NO: 2476191 - RNA, 11 nt, Human
aacucugcugu

SEQ ID NO: 2476192 - RNA, 16 nt, Human
aacucugcauucuagu

SEQ ID NO: 2476193 - RNA, 14 nt, Human
aacucugccagcca

SEQ ID NO: 2476194 - RNA, 20 nt, Human
gugaguccuggcaugggaau

SEQ ID NO: 2476195 - RNA, 15 nt, Human
aacucugcacuacuc

SEQ ID NO: 2476196 - RNA, 19 nt, Human
gugaguacuacaguccucc

SEQ ID NO: 2476197 - RNA, 20 nt, Human
gugagguggguuuucuuccc

SEQ ID NO: 2476198 - RNA, 14 nt, Human
gugaguaagagcug

SEQ ID NO: 2476199 - RNA, 15 nt, Human
gugaguaagagcugg

SEQ ID NO: 2476200 - RNA, 16 nt, Human
gugaguaagagcuggu

SEQ ID NO: 2476201 - RNA, 17 nt, Human
gugaguccuggcauggg

SEQ ID NO: 2476202 - RNA, 15 nt, Human
gugaguccauucucc

SEQ ID NO: 2476203 - RNA, 21 nt, Human
gugaccagcaccaucucuccu

SEQ ID NO: 2476204 - RNA, 18 nt, Human
gugaccagcaccaucucu

SEQ ID NO: 2476205 - RNA, 18 nt, Human
gugaccauguuuuguuua

SEQ ID NO: 2476206 - RNA, 17 nt, Human
gugaccacucugucuug

SEQ ID NO: 2476207 - RNA, 17 nt, Human
gugaccaggcauccucc

SEQ ID NO: 2476208 - RNA, 14 nt, Human
gugaccagggguga

SEQ ID NO: 2476209 - RNA, 14 nt, Human
gugacccaaugauu

SEQ ID NO: 2476210 - RNA, 22 nt, Human
gugaccaacuagacauucuguc

SEQ ID NO: 2476211 - RNA, 19 nt, Human
gugaccaacuagacauucu

SEQ ID NO: 2476212 - RNA, 16 nt, Human
gugaccaaaauccccu

SEQ ID NO: 2476213 - RNA, 24 nt, Human
gugacauggugccugagaggcagg

SEQ ID NO: 2476214 - RNA, 23 nt, Human
gugacauggugccugagaggcag

SEQ ID NO: 2476215 - RNA, 13 nt, Human
gugacauguaaca

SEQ ID NO: 2476216 - RNA, 17 nt, Human
gugaccaaugaugguca

SEQ ID NO: 2476217 - RNA, 15 nt, Human
gugaccaaugucuug

SEQ ID NO: 2476218 - RNA, 16 nt, Human
gugaccaaugucuuga

SEQ ID NO: 2476219 - RNA, 23 nt, Human
gugaccaacuagacauucugucg

SEQ ID NO: 2476220 - RNA, 19 nt, Human
gugaccaaguuauaaauca

SEQ ID NO: 2476221 - RNA, 14 nt, Human
gugacaugucuuuu

SEQ ID NO: 2476222 - RNA, 22 nt, Human
gugacauggugccugagaggca

SEQ ID NO: 2476223 - RNA, 20 nt, Human
gugacauggugccugagagg

SEQ ID NO: 2476224 - RNA, 19 nt, Human
gugacauggugccugagag

SEQ ID NO: 2476225 - RNA, 16 nt, Human
gugacauggugccuga

SEQ ID NO: 2476226 - RNA, 15 nt, Human
gugacauggugccug

SEQ ID NO: 2476227 - RNA, 14 nt, Human
gugacaucucuuac

SEQ ID NO: 2476228 - RNA, 22 nt, Human
gugacaugcgggcugggcagcu

SEQ ID NO: 2476229 - RNA, 18 nt, Human
gugacaucaguggcaugg

SEQ ID NO: 2476230 - RNA, 21 nt, Human
gugacaugcgggcugggcagc

SEQ ID NO: 2476231 - RNA, 20 nt, Human
gugacaugcgggcugggcag

SEQ ID NO: 2476232 - RNA, 16 nt, Human
gugacaugcgggcugg

SEQ ID NO: 2476233 - RNA, 19 nt, Human
gugacagaggcagccccau

SEQ ID NO: 2476234 - RNA, 18 nt, Human
gugacagaggcagcccca

SEQ ID NO: 2476235 - RNA, 16 nt, Human
gugacagaggcagccc

SEQ ID NO: 2476236 - RNA, 18 nt, Human
gugaaguuagaauuccuu

SEQ ID NO: 2476237 - RNA, 17 nt, Human
gugaaguuagaauuccu

SEQ ID NO: 2476238 - RNA, 14 nt, Human
gugaaguuagaauu

SEQ ID NO: 2476239 - RNA, 16 nt, Human
gugaaguccuucaccu

SEQ ID NO: 2476240 - RNA, 16 nt, Human
aacuauauuuucuuua

SEQ ID NO: 2476241 - RNA, 13 nt, Human
aacuauauuuucu

SEQ ID NO: 2476242 - RNA, 18 nt, Human
aacuagacauucugucgc

SEQ ID NO: 2476243 - RNA, 16 nt, Human
aacuagacauucuguc

SEQ ID NO: 2476244 - RNA, 23 nt, Human
gugaagacaaugacuuacuguac

SEQ ID NO: 2476245 - RNA, 19 nt, Human
gugaagaggggcagcccuu

SEQ ID NO: 2476246 - RNA, 17 nt, Human
gugaagaggggcagccc

SEQ ID NO: 2476247 - RNA, 16 nt, Human
gugaagaggggcagcc

SEQ ID NO: 2476248 - RNA, 15 nt, Human
gugaagaggggcagc

SEQ ID NO: 2476249 - RNA, 14 nt, Human
gugaagaggggcag

SEQ ID NO: 2476250 - RNA, 13 nt, Human
gugaagaggggca

SEQ ID NO: 2476251 - RNA, 12 nt, Human
gugaagaggggc

SEQ ID NO: 2476252 - RNA, 19 nt, Human
gugaagagggagaagcaug

SEQ ID NO: 2476253 - RNA, 23 nt, Human
gugaagaaaagugaaugcucaag

SEQ ID NO: 2476254 - RNA, 23 nt, Human
aacuaucucauuuccaagcaagu

SEQ ID NO: 2476255 - RNA, 20 nt, Human
aacuaucucauuuccaagca

SEQ ID NO: 2476256 - RNA, 13 nt, Human
aacuauauuguuu

SEQ ID NO: 2476257 - RNA, 16 nt, Human
aacuagaauuugauua

SEQ ID NO: 2476258 - RNA, 15 nt, Human
aacuagaauuugauu

SEQ ID NO: 2476259 - RNA, 16 nt, Human
aacuagaaccuggagg

SEQ ID NO: 2476260 - RNA, 15 nt, Human
aacuacuguguuccu

SEQ ID NO: 2476261 - RNA, 18 nt, Human
gugaagcaccaagcucaa

SEQ ID NO: 2476262 - RNA, 17 nt, Human
gugaagcaccaagcuca

SEQ ID NO: 2476263 - RNA, 10 nt, Human
gugaagccaa

SEQ ID NO: 2476264 - RNA, 20 nt, Human
gugaagccaauucagacagg

SEQ ID NO: 2476265 - RNA, 22 nt, Human
gugaagccaauucagacaggca

SEQ ID NO: 2476266 - RNA, 15 nt, Human
gugaaggaauauaug

SEQ ID NO: 2476267 - RNA, 12 nt, Human
gugaaggacccu

SEQ ID NO: 2476268 - RNA, 13 nt, Human
gugaaggacccuu

SEQ ID NO: 2476269 - RNA, 20 nt, Human
gugaaggccgagaagcaaga

SEQ ID NO: 2476270 - RNA, 14 nt, Human
gugaagugaagaca

SEQ ID NO: 2476271 - RNA, 16 nt, Human
gugaagugaaugaaac

SEQ ID NO: 2476272 - RNA, 17 nt, Human
gugaaguauacuguauu

SEQ ID NO: 2476273 - RNA, 19 nt, Human
gugaaguauacuguauuuu

SEQ ID NO: 2476274 - RNA, 20 nt, Human
gugaagguccugcuauuacu

SEQ ID NO: 2476275 - RNA, 17 nt, Human
gugaagguccugcuauu

SEQ ID NO: 2476276 - RNA, 17 nt, Human
gugaaggcuucucucug

SEQ ID NO: 2476277 - RNA, 22 nt, Human
gugaaggcuucucucuguggga

SEQ ID NO: 2476278 - RNA, 14 nt, Human
gugaaggcuucucu

SEQ ID NO: 2476279 - RNA, 15 nt, Human
aaccuuuagggcagc

SEQ ID NO: 2476280 - RNA, 14 nt, Human
aaccuuuagggcag

SEQ ID NO: 2476281 - RNA, 17 nt, Human
aaccuuguuauuucuca

SEQ ID NO: 2476282 - RNA, 18 nt, Human
aaccuuucaaauuucaca

SEQ ID NO: 2476283 - RNA, 19 nt, Human
aaccuuuagggcagcuugc

SEQ ID NO: 2476284 - RNA, 16 nt, Human
aaccuuuagggcagcu

SEQ ID NO: 2476285 - RNA, 14 nt, Human
aaccuuucaaauuu

SEQ ID NO: 2476286 - RNA, 22 nt, Human
aaccuugguguaguugaacuga

SEQ ID NO: 2476287 - RNA, 23 nt, Human
aaccuuagauguucuaagucuuu

SEQ ID NO: 2476288 - RNA, 21 nt, Human
aaccuugugccuggcucagag

SEQ ID NO: 2476289 - RNA, 15 nt, Human
aaccuugugccuggc

SEQ ID NO: 2476290 - RNA, 18 nt, Human
aaccuuguuauuucucag

SEQ ID NO: 2476291 - RNA, 19 nt, Human
aaccuugucucuaugccag

SEQ ID NO: 2476292 - RNA, 23 nt, Human
aaccuugucucuaugccagcuca

SEQ ID NO: 2476293 - RNA, 23 nt, Human
aacguggcugcuucaaggauccu

SEQ ID NO: 2476294 - RNA, 19 nt, Human
aacguguugccuugaacca

SEQ ID NO: 2476295 - RNA, 18 nt, Human
aacguggggcagcacaga

SEQ ID NO: 2476296 - RNA, 17 nt, Human
aacguggggcagcacag

SEQ ID NO: 2476297 - RNA, 22 nt, Human
aacguggggcagcacagagagg

SEQ ID NO: 2476298 - RNA, 12 nt, Human
aacuaacacuau

SEQ ID NO: 2476299 - RNA, 23 nt, Human
aacuaagaaauaugcacaauagc

SEQ ID NO: 2476300 - RNA, 16 nt, Human
aacuaacacuauuuua

SEQ ID NO: 2476301 - RNA, 14 nt, Human
aacguugcuguggg

SEQ ID NO: 2476302 - RNA, 13 nt, Human
aacguugcugugg

SEQ ID NO: 2476303 - RNA, 14 nt, Human
aacguugcucccca

SEQ ID NO: 2476304 - RNA, 16 nt, Human
aacguugcugugggaa

SEQ ID NO: 2476305 - RNA, 16 nt, Human
aacuacuguguuccug

SEQ ID NO: 2476306 - RNA, 17 nt, Human
aacuacuguguuccugg

SEQ ID NO: 2476307 - RNA, 19 nt, Human
aacuaagcccccgcuguaa

SEQ ID NO: 2476308 - RNA, 17 nt, Human
aacuaagcccccgcugu

SEQ ID NO: 2476309 - RNA, 14 nt, Human
aacuaauaaaagca

SEQ ID NO: 2476310 - RNA, 15 nt, Human
aacuaauaaaagcau

SEQ ID NO: 2476311 - RNA, 17 nt, Human
aacuagaauuuauucaa

SEQ ID NO: 2476312 - RNA, 22 nt, Human
aacuagaauuuauucaauuccu

SEQ ID NO: 2476313 - RNA, 19 nt, Human
aacuagaauuuauucaauu

SEQ ID NO: 2476314 - RNA, 16 nt, Human
aacuagaaaucugcca

SEQ ID NO: 2476315 - RNA, 15 nt, Human
aaccugcccugccug

SEQ ID NO: 2476316 - RNA, 13 nt, Human
aaccugcccugcc

SEQ ID NO: 2476317 - RNA, 11 nt, Human
aaccugcccug

SEQ ID NO: 2476318 - RNA, 19 nt, Human
aaccugccagggagacaga

SEQ ID NO: 2476319 - RNA, 15 nt, Human
aaccugccagggaga

SEQ ID NO: 2476320 - RNA, 22 nt, Human
aaccugcaagggcuccccacug

SEQ ID NO: 2476321 - RNA, 21 nt, Human
aaccuguuaccuacuuugacu

SEQ ID NO: 2476322 - RNA, 13 nt, Human
aaccuguucugcu

SEQ ID NO: 2476323 - RNA, 17 nt, Human
aaccuguucugcuuucc

SEQ ID NO: 2476324 - RNA, 24 nt, Human
aaccuguuaccuacuuugacuuuu

SEQ ID NO: 2476325 - RNA, 21 nt, Human
aaccuguugauagcaagugaa

SEQ ID NO: 2476326 - RNA, 19 nt, Human
aaccuguuuaaauauuuca

SEQ ID NO: 2476327 - RNA, 19 nt, Human
aaccugauugugucucuug

SEQ ID NO: 2476328 - RNA, 17 nt, Human
aaccugaugcagucacg

SEQ ID NO: 2476329 - RNA, 15 nt, Human
aaccugaugcugacu

SEQ ID NO: 2476330 - RNA, 17 nt, Human
aaccugauguuaaaauu

SEQ ID NO: 2476331 - RNA, 19 nt, Human
aaccugcaagggcucccca

SEQ ID NO: 2476332 - RNA, 18 nt, Human
aaccugauguuaaaauuc

SEQ ID NO: 2476333 - RNA, 18 nt, Human
aaccugauugugucucuu

SEQ ID NO: 2476334 - RNA, 11 nt, Human
gucuuuucauc

SEQ ID NO: 2476335 - RNA, 24 nt, Human
gucuuuuaggacccuucccuugag

SEQ ID NO: 2476336 - RNA, 17 nt, Human
gucuucauuucauugua

SEQ ID NO: 2476337 - RNA, 16 nt, Human
gucuucauuucauugu

SEQ ID NO: 2476338 - RNA, 22 nt, Human
gucuucauuaagcccucuucca

SEQ ID NO: 2476339 - RNA, 21 nt, Human
gucuucauuaagcccucuucc

SEQ ID NO: 2476340 - RNA, 13 nt, Human
gucuuccauaaug

SEQ ID NO: 2476341 - RNA, 15 nt, Human
gucuuccauaaugua

SEQ ID NO: 2476342 - RNA, 16 nt, Human
gucuucaguaagccgu

SEQ ID NO: 2476343 - RNA, 22 nt, Human
gucuucagccucuuucuguccc

SEQ ID NO: 2476344 - RNA, 23 nt, Human
gucuucagccucuuucugucccu

SEQ ID NO: 2476345 - RNA, 23 nt, Human
gucuucauaccuacauguauuug

SEQ ID NO: 2476346 - RNA, 18 nt, Human
gucuucagggggccaggu

SEQ ID NO: 2476347 - RNA, 15 nt, Human
gucuuuguacagaca

SEQ ID NO: 2476348 - RNA, 15 nt, Human
gucuuccauuugcaa

SEQ ID NO: 2476349 - RNA, 12 nt, Human
gucuucccaggg

SEQ ID NO: 2476350 - RNA, 17 nt, Human
gucuuccauaauguaua

SEQ ID NO: 2476351 - RNA, 15 nt, Human
gucuucccaggguag

SEQ ID NO: 2476352 - RNA, 13 nt, Human
gucuucccagggu

SEQ ID NO: 2476353 - RNA, 21 nt, Human
gucuuuguaaugucaccaccu

SEQ ID NO: 2476354 - RNA, 16 nt, Human
gucuuuguacagacaa

SEQ ID NO: 2476355 - RNA, 22 nt, Human
gucuuuguaaugucaccaccuu

SEQ ID NO: 2476356 - RNA, 22 nt, Human
gucuggaucugggacccuuucc

SEQ ID NO: 2476357 - RNA, 11 nt, Human
gucugggcuga

SEQ ID NO: 2476358 - RNA, 16 nt, Human
gucugggguucagccc

SEQ ID NO: 2476359 - RNA, 17 nt, Human
gucugggguucagcccc

SEQ ID NO: 2476360 - RNA, 18 nt, Human
gucugggguucagccccu

SEQ ID NO: 2476361 - RNA, 20 nt, Human
gucugguggccccguuucug

SEQ ID NO: 2476362 - RNA, 13 nt, Human
gucugguggcccc

SEQ ID NO: 2476363 - RNA, 18 nt, Human
gucuggucuccucagccu

SEQ ID NO: 2476364 - RNA, 15 nt, Human
gucuggugaagcuca

SEQ ID NO: 2476365 - RNA, 20 nt, Human
gucugggguucagccccucc

SEQ ID NO: 2476366 - RNA, 23 nt, Human
gucugggguucagccccuccucu

SEQ ID NO: 2476367 - RNA, 14 nt, Human
gucuucagccucuu

SEQ ID NO: 2476368 - RNA, 23 nt, Human
gucuucagccuagccgaccucag

SEQ ID NO: 2476369 - RNA, 13 nt, Human
gucuucagccuag

SEQ ID NO: 2476370 - RNA, 15 nt, Human
gucuucagccuagcc

SEQ ID NO: 2476371 - RNA, 20 nt, Human
gucuucaccugauucaacua

SEQ ID NO: 2476372 - RNA, 13 nt, Human
gucugguuucuag

SEQ ID NO: 2476373 - RNA, 17 nt, Human
gucuucacagcucugug

SEQ ID NO: 2476374 - RNA, 15 nt, Human
gucuucacggcagga

SEQ ID NO: 2476375 - RNA, 12 nt, Human
gucuucagccua

SEQ ID NO: 2476376 - RNA, 13 nt, Human
gucuggugggagg

SEQ ID NO: 2476377 - RNA, 17 nt, Human
gucugguuucaccgagg

SEQ ID NO: 2476378 - RNA, 22 nt, Human
gucugguuucaccgaggacaug

SEQ ID NO: 2476379 - RNA, 16 nt, Human
gucuucacagcucugu

SEQ ID NO: 2476380 - RNA, 13 nt, Human
gucuucacaacag

SEQ ID NO: 2476381 - RNA, 23 nt, Human
gucugacaggcaaugcuggcugu

SEQ ID NO: 2476382 - RNA, 22 nt, Human
gucugacaggcaaugcuggcug

SEQ ID NO: 2476383 - RNA, 19 nt, Human
gucugaagucacugcacag

SEQ ID NO: 2476384 - RNA, 17 nt, Human
gucugaagucacugcac

SEQ ID NO: 2476385 - RNA, 21 nt, Human
gucugacaggcaaugcuggcu

SEQ ID NO: 2476386 - RNA, 18 nt, Human
gucuggaggggccccugc

SEQ ID NO: 2476387 - RNA, 23 nt, Human
gucuggaggggccccugcuucuc

SEQ ID NO: 2476388 - RNA, 21 nt, Human
gucuggaguugaucuggaacc

SEQ ID NO: 2476389 - RNA, 10 nt, Human
gucuggaggg

SEQ ID NO: 2476390 - RNA, 17 nt, Human
gucuggaggggccccug

SEQ ID NO: 2476391 - RNA, 16 nt, Human
gucugaagugguuguu

SEQ ID NO: 2476392 - RNA, 18 nt, Human
gucucuuuaaucuucagu

SEQ ID NO: 2476393 - RNA, 14 nt, Human
gucuggagaagcag

SEQ ID NO: 2476394 - RNA, 17 nt, Human
gucuggagaagcaguga

SEQ ID NO: 2476395 - RNA, 23 nt, Human
gucuggagaagcucccaggaaca

SEQ ID NO: 2476396 - RNA, 22 nt, Human
gucuggagaagcucccaggaac

SEQ ID NO: 2476397 - RNA, 21 nt, Human
gucuggagaagcucccaggaa

SEQ ID NO: 2476398 - RNA, 19 nt, Human
gucuggagaagcagugagc

SEQ ID NO: 2476399 - RNA, 23 nt, Human
gucucuuuaaugucacaggcagg

SEQ ID NO: 2476400 - RNA, 22 nt, Human
gucucuuuaaugucacaggcag

SEQ ID NO: 2476401 - RNA, 19 nt, Human
gucugaaggcuggguucug

SEQ ID NO: 2476402 - RNA, 14 nt, Human
gucugaaggcuggg

SEQ ID NO: 2476403 - RNA, 16 nt, Human
gucugaagucacugca

SEQ ID NO: 2476404 - RNA, 20 nt, Human
gucucuuuaaugucacaggc

SEQ ID NO: 2476405 - RNA, 19 nt, Human
gucucuuuaaugucacagg

SEQ ID NO: 2476406 - RNA, 18 nt, Human
gucucuuuaaugucacag

SEQ ID NO: 2476407 - RNA, 16 nt, Human
gucucuuguauuaaac

SEQ ID NO: 2476408 - RNA, 19 nt, Human
gucucuuguauuaaacucu

SEQ ID NO: 2476409 - RNA, 17 nt, Human
gucucuuuaaucuucag

SEQ ID NO: 2476410 - RNA, 19 nt, Human
aaccaugcaaaugcuauga

SEQ ID NO: 2476411 - RNA, 24 nt, Human
aaccaugaagagauuuuucaugau

SEQ ID NO: 2476412 - RNA, 22 nt, Human
aaccaugagaccacuguuauca

SEQ ID NO: 2476413 - RNA, 17 nt, Human
gucucuugguccugcug

SEQ ID NO: 2476414 - RNA, 17 nt, Human
aaccaugaagacaggau

SEQ ID NO: 2476415 - RNA, 16 nt, Human
aaccaugaagacagga

SEQ ID NO: 2476416 - RNA, 15 nt, Human
aaccaugaagacagg

SEQ ID NO: 2476417 - RNA, 20 nt, Human
aaccaucugucccugccuca

SEQ ID NO: 2476418 - RNA, 23 nt, Human
aaccaugaagagauuuuucauga

SEQ ID NO: 2476419 - RNA, 21 nt, Human
aaccaugaagagauuuuucau

SEQ ID NO: 2476420 - RNA, 19 nt, Human
aaccauccccuccguggca

SEQ ID NO: 2476421 - RNA, 22 nt, Human
aaccaucccugaugucugucug

SEQ ID NO: 2476422 - RNA, 19 nt, Human
gucucuugguccugcugca

SEQ ID NO: 2476423 - RNA, 18 nt, Human
gucucuugguccugcugc

SEQ ID NO: 2476424 - RNA, 20 nt, Human
gucucuugguccugcugcag

SEQ ID NO: 2476425 - RNA, 13 nt, Human
gucucuugguccu

SEQ ID NO: 2476426 - RNA, 13 nt, Human
gucucuuguaauc

SEQ ID NO: 2476427 - RNA, 23 nt, Human
aaccaugaguggcauggccacca

SEQ ID NO: 2476428 - RNA, 17 nt, Human
gucucaggcugguggga

SEQ ID NO: 2476429 - RNA, 13 nt, Human
gucucaggcuggu

SEQ ID NO: 2476430 - RNA, 15 nt, Human
gucucaggucccugc

SEQ ID NO: 2476431 - RNA, 13 nt, Human
gucucacagcccu

SEQ ID NO: 2476432 - RNA, 15 nt, Human
gucucacacuggcgu

SEQ ID NO: 2476433 - RNA, 17 nt, Human
gucucaaugcucauaac

SEQ ID NO: 2476434 - RNA, 19 nt, Human
gucucacaguguugcccag

SEQ ID NO: 2476435 - RNA, 23 nt, Human
gucucacaguguugcccaggcug

SEQ ID NO: 2476436 - RNA, 23 nt, Human
gucucaguccaugaagauguaga

SEQ ID NO: 2476437 - RNA, 16 nt, Human
gucucaggucccugca

SEQ ID NO: 2476438 - RNA, 23 nt, Human
gucuccacacacagcugggcugu

SEQ ID NO: 2476439 - RNA, 20 nt, Human
gucuccacacacagcugggc

SEQ ID NO: 2476440 - RNA, 22 nt, Human
gucuccaaccccccagcacuga

SEQ ID NO: 2476441 - RNA, 12 nt, Human
gucuccaccagg

SEQ ID NO: 2476442 - RNA, 15 nt, Human
gucuccaccaggaac

SEQ ID NO: 2476443 - RNA, 16 nt, Human
gucuccaccaggaacc

SEQ ID NO: 2476444 - RNA, 17 nt, Human
gucuccaccaggaaccu

SEQ ID NO: 2476445 - RNA, 19 nt, Human
gucuccaccaggaaccucu

SEQ ID NO: 2476446 - RNA, 20 nt, Human
gucuccaccaggaaccucuu

SEQ ID NO: 2476447 - RNA, 21 nt, Human
gucuccaccaggaaccucuuc

SEQ ID NO: 2476448 - RNA, 15 nt, Human
gucuccagaccccca

SEQ ID NO: 2476449 - RNA, 21 nt, Human
gucuccaaccccccagcacug

SEQ ID NO: 2476450 - RNA, 20 nt, Human
gucuccaaccccccagcacu

SEQ ID NO: 2476451 - RNA, 17 nt, Human
gucuccaaccccccagc

SEQ ID NO: 2476452 - RNA, 16 nt, Human
gucuccaaccccccag

SEQ ID NO: 2476453 - RNA, 22 nt, Human
gucucaggcuggugggaggggc

SEQ ID NO: 2476454 - RNA, 18 nt, Human
gucucaggcuggugggag

SEQ ID NO: 2476455 - RNA, 16 nt, Human
gucucaguccaccuga

SEQ ID NO: 2476456 - RNA, 11 nt, Human
gucucaugugu

SEQ ID NO: 2476457 - RNA, 20 nt, Human
gucucaaacuccugggcuca

SEQ ID NO: 2476458 - RNA, 21 nt, Human
gucuaugacuuauuuccuuca

SEQ ID NO: 2476459 - RNA, 16 nt, Human
gucucaaacuccuggg

SEQ ID NO: 2476460 - RNA, 17 nt, Human
gucucaagagggcacug

SEQ ID NO: 2476461 - RNA, 15 nt, Human
gucucaagagggcac

SEQ ID NO: 2476462 - RNA, 19 nt, Human
gucucaagggcuagcaucc

SEQ ID NO: 2476463 - RNA, 21 nt, Human
gucucaacccuuuugucugcc

SEQ ID NO: 2476464 - RNA, 14 nt, Human
gucucaaugcucau

SEQ ID NO: 2476465 - RNA, 12 nt, Human
gucucaaugcuc

SEQ ID NO: 2476466 - RNA, 22 nt, Human
gucucaagagggcacugguggc

SEQ ID NO: 2476467 - RNA, 20 nt, Human
gucucaagagggcacuggug

SEQ ID NO: 2476468 - RNA, 15 nt, Human
gucuauccacagaga

SEQ ID NO: 2476469 - RNA, 14 nt, Human
gucuauccacagag

SEQ ID NO: 2476470 - RNA, 13 nt, Human
gucuauccacaga

SEQ ID NO: 2476471 - RNA, 15 nt, Human
gucuaugggacucaa

SEQ ID NO: 2476472 - RNA, 14 nt, Human
gucuaugggacuca

SEQ ID NO: 2476473 - RNA, 22 nt, Human
gucucaaacucuugaccucagg

SEQ ID NO: 2476474 - RNA, 19 nt, Human
gucucaaaaaaagaaaaag

SEQ ID NO: 2476475 - RNA, 16 nt, Human
gucucaaacuccugac

SEQ ID NO: 2476476 - RNA, 23 nt, Human
aaccaaaguaaccuuuugcaccu

SEQ ID NO: 2476477 - RNA, 17 nt, Human
aaccaacuacaaccaag

SEQ ID NO: 2476478 - RNA, 14 nt, Human
aaccaagaagggcu

SEQ ID NO: 2476479 - RNA, 23 nt, Human
aaccaaaggugaaggaauauaug

SEQ ID NO: 2476480 - RNA, 21 nt, Human
aaccaaaggugaaggaauaua

SEQ ID NO: 2476481 - RNA, 20 nt, Human
aaccaaaggugaaggaauau

SEQ ID NO: 2476482 - RNA, 16 nt, Human
aaccaaaggugaagga

SEQ ID NO: 2476483 - RNA, 14 nt, Human
aaccaaaggugaag

SEQ ID NO: 2476484 - RNA, 10 nt, Human
aaccaaaggu

SEQ ID NO: 2476485 - RNA, 15 nt, Human
aaccaaaucuggaag

SEQ ID NO: 2476486 - RNA, 22 nt, Human
aaccaaaucacugaacuuugcu

SEQ ID NO: 2476487 - RNA, 16 nt, Human
aaccaaauauuccaga

SEQ ID NO: 2476488 - RNA, 16 nt, Human
aaccacagcugcugga

SEQ ID NO: 2476489 - RNA, 15 nt, Human
aaccacagcugcugg

SEQ ID NO: 2476490 - RNA, 14 nt, Human
aaccacagcugcug

SEQ ID NO: 2476491 - RNA, 13 nt, Human
aaccacagcugcu

SEQ ID NO: 2476492 - RNA, 18 nt, Human
aaccacagcugcuggaga

SEQ ID NO: 2476493 - RNA, 16 nt, Human
aaccacagcccuguca

SEQ ID NO: 2476494 - RNA, 12 nt, Human
aaccacagcccu

SEQ ID NO: 2476495 - RNA, 13 nt, Human
aaccacagcccug

SEQ ID NO: 2476496 - RNA, 14 nt, Human
aaccacagcccugu

SEQ ID NO: 2476497 - RNA, 15 nt, Human
aaccacagcccuguc

SEQ ID NO: 2476498 - RNA, 13 nt, Human
aaccacaucuugc

SEQ ID NO: 2476499 - RNA, 23 nt, Human
gucuccaggggcugcuuccuccu

SEQ ID NO: 2476500 - RNA, 22 nt, Human
gucuccaggggcugcuuccucc

SEQ ID NO: 2476501 - RNA, 18 nt, Human
gucuccagugguugcugu

SEQ ID NO: 2476502 - RNA, 21 nt, Human
gucuccaguauccacuuugca

SEQ ID NO: 2476503 - RNA, 13 nt, Human
gucuccauguuug

SEQ ID NO: 2476504 - RNA, 21 nt, Human
gucuccaggggcugcuuccuc

SEQ ID NO: 2476505 - RNA, 20 nt, Human
gucuccaggggcugcuuccu

SEQ ID NO: 2476506 - RNA, 19 nt, Human
gucuccaggggcugcuucc

SEQ ID NO: 2476507 - RNA, 16 nt, Human
gucuccaggggcugcu

SEQ ID NO: 2476508 - RNA, 22 nt, Human
gucuccagccccuucucagaau

SEQ ID NO: 2476509 - RNA, 15 nt, Human
gucuccaggggcugc

SEQ ID NO: 2476510 - RNA, 17 nt, Human
gucuccagacccccacc

SEQ ID NO: 2476511 - RNA, 20 nt, Human
gucuccagacccccaccccu

SEQ ID NO: 2476512 - RNA, 20 nt, Human
gucuccagccccuucucaga

SEQ ID NO: 2476513 - RNA, 13 nt, Human
aacauuuuaaaug

SEQ ID NO: 2476514 - RNA, 20 nt, Human
aacauuuuaaauaaaagaaa

SEQ ID NO: 2476515 - RNA, 19 nt, Human
aacauuuuaaauaaaagaa

SEQ ID NO: 2476516 - RNA, 15 nt, Human
aacauuuuaaauaaa

SEQ ID NO: 2476517 - RNA, 17 nt, Human
aacauuuuaaauggaca

SEQ ID NO: 2476518 - RNA, 15 nt, Human
aacauuuuaaaugga

SEQ ID NO: 2476519 - RNA, 18 nt, Human
aacauuuuaaauggacag

SEQ ID NO: 2476520 - RNA, 14 nt, Human
aacauuuuaauuca

SEQ ID NO: 2476521 - RNA, 20 nt, Human
gucuccagugguugcuguug

SEQ ID NO: 2476522 - RNA, 19 nt, Human
gucuccagugguugcuguu

SEQ ID NO: 2476523 - RNA, 14 nt, Human
gucuccauggcccu

SEQ ID NO: 2476524 - RNA, 22 nt, Human
aacauuuguucuauagcuuuuc

SEQ ID NO: 2476525 - RNA, 16 nt, Human
aacauuuugucauaua

SEQ ID NO: 2476526 - RNA, 13 nt, Human
aacauuuucacac

SEQ ID NO: 2476527 - RNA, 15 nt, Human
aacauuuuacccaca

SEQ ID NO: 2476528 - RNA, 17 nt, Human
aacauuuuacccacaca

SEQ ID NO: 2476529 - RNA, 19 nt, Human
aacauuaccuuacugugga

SEQ ID NO: 2476530 - RNA, 17 nt, Human
aacauuaccuuacugug

SEQ ID NO: 2476531 - RNA, 19 nt, Human
guccugauggucagcuccc

SEQ ID NO: 2476532 - RNA, 18 nt, Human
guccugauggucagcucc

SEQ ID NO: 2476533 - RNA, 17 nt, Human
guccugauggucagcuc

SEQ ID NO: 2476534 - RNA, 15 nt, Human
guccugauggucagc

SEQ ID NO: 2476535 - RNA, 17 nt, Human
guccugaucagagccgu

SEQ ID NO: 2476536 - RNA, 21 nt, Human
aacauuaagauugaggccugc

SEQ ID NO: 2476537 - RNA, 19 nt, Human
aacauuaagaaaaucauau

SEQ ID NO: 2476538 - RNA, 18 nt, Human
aacauuaagaaaaucaua

SEQ ID NO: 2476539 - RNA, 16 nt, Human
aacauuaagaaaauca

SEQ ID NO: 2476540 - RNA, 16 nt, Human
aacauuaccuuacugu

SEQ ID NO: 2476541 - RNA, 22 nt, Human
aacauuacagggaaugccugag

SEQ ID NO: 2476542 - RNA, 20 nt, Human
aacauuacagggaaugccug

SEQ ID NO: 2476543 - RNA, 14 nt, Human
aacauuaagaaaau

SEQ ID NO: 2476544 - RNA, 13 nt, Human
aacauuaagaaaa

SEQ ID NO: 2476545 - RNA, 23 nt, Human
aacauuaaaacaauauuguuucu

SEQ ID NO: 2476546 - RNA, 21 nt, Human
aacauuaaaacaauauuguuu

SEQ ID NO: 2476547 - RNA, 16 nt, Human
guccugcugcaguugc

SEQ ID NO: 2476548 - RNA, 13 nt, Human
guccugcugcagu

SEQ ID NO: 2476549 - RNA, 22 nt, Human
guccugccuguggcgccgucuc

SEQ ID NO: 2476550 - RNA, 15 nt, Human
guccugccuguggcg

SEQ ID NO: 2476551 - RNA, 23 nt, Human
guccugauggucagcucccuucu

SEQ ID NO: 2476552 - RNA, 20 nt, Human
guccugauggucagcucccu

SEQ ID NO: 2476553 - RNA, 19 nt, Human
guccugcuccacaguguug

SEQ ID NO: 2476554 - RNA, 17 nt, Human
guccugcuccacagugu

SEQ ID NO: 2476555 - RNA, 16 nt, Human
guccugcuccacagug

SEQ ID NO: 2476556 - RNA, 14 nt, Human
guccugcuccacag

SEQ ID NO: 2476557 - RNA, 19 nt, Human
guccugcgucgaagcuuug

SEQ ID NO: 2476558 - RNA, 16 nt, Human
guccuuuauguggaaa

SEQ ID NO: 2476559 - RNA, 13 nt, Human
guccuuuaugugg

SEQ ID NO: 2476560 - RNA, 14 nt, Human
guccuuuaguaccu

SEQ ID NO: 2476561 - RNA, 21 nt, Human
guccuuuacacucaggcuuuc

SEQ ID NO: 2476562 - RNA, 14 nt, Human
guccuugcuuggcu

SEQ ID NO: 2476563 - RNA, 22 nt, Human
guccuugcugguuuucuggaug

SEQ ID NO: 2476564 - RNA, 22 nt, Human
guccuuggugugacccucugaa

SEQ ID NO: 2476565 - RNA, 17 nt, Human
guccuuggaaguuucau

SEQ ID NO: 2476566 - RNA, 14 nt, Human
guccuuggugugac

SEQ ID NO: 2476567 - RNA, 17 nt, Human
guccugcugcaguugcc

SEQ ID NO: 2476568 - RNA, 12 nt, Human
guccuugcacac

SEQ ID NO: 2476569 - RNA, 16 nt, Human
guccuugcaccccuca

SEQ ID NO: 2476570 - RNA, 22 nt, Human
guccuugcacacuccccugcac

SEQ ID NO: 2476571 - RNA, 19 nt, Human
guccuugcaccccucacuc

SEQ ID NO: 2476572 - RNA, 18 nt, Human
guccuugcaccccucacu

SEQ ID NO: 2476573 - RNA, 14 nt, Human
guccuugcaccugc

SEQ ID NO: 2476574 - RNA, 15 nt, Human
guccuugcaccugca

SEQ ID NO: 2476575 - RNA, 16 nt, Human
guccuugcaccugcau

SEQ ID NO: 2476576 - RNA, 17 nt, Human
guccuugcaccugcauc

SEQ ID NO: 2476577 - RNA, 12 nt, Human
guccuugcccuu

SEQ ID NO: 2476578 - RNA, 18 nt, Human
guccuugcaccugcaucc

SEQ ID NO: 2476579 - RNA, 14 nt, Human
gucgcccagucugg

SEQ ID NO: 2476580 - RNA, 13 nt, Human
gucgcccagucug

SEQ ID NO: 2476581 - RNA, 20 nt, Human
gucgcccaggcuggagugca

SEQ ID NO: 2476582 - RNA, 15 nt, Human
gucgcccaggcugga

SEQ ID NO: 2476583 - RNA, 14 nt, Human
gucgcccaggcugg

SEQ ID NO: 2476584 - RNA, 12 nt, Human
gucgcccaggag

SEQ ID NO: 2476585 - RNA, 13 nt, Human
gucgcccaggaga

SEQ ID NO: 2476586 - RNA, 16 nt, Human
guccuuuuuuuccauc

SEQ ID NO: 2476587 - RNA, 19 nt, Human
guccuuuuuuuccaucuuu

SEQ ID NO: 2476588 - RNA, 17 nt, Human
gucgaauuaauagcuuu

SEQ ID NO: 2476589 - RNA, 22 nt, Human
guccuuuuguaccaugguguga

SEQ ID NO: 2476590 - RNA, 21 nt, Human
guccuuuauguggaaaacaga

SEQ ID NO: 2476591 - RNA, 20 nt, Human
guccuuuauguggaaaacag

SEQ ID NO: 2476592 - RNA, 17 nt, Human
guccuuuuguaccaugg

SEQ ID NO: 2476593 - RNA, 14 nt, Human
gucgaggacaggga

SEQ ID NO: 2476594 - RNA, 12 nt, Human
gucgagacacuu

SEQ ID NO: 2476595 - RNA, 23 nt, Human
gucgagcuggaugucccaccucu

SEQ ID NO: 2476596 - RNA, 16 nt, Human
gucgaauuuuuauuau

SEQ ID NO: 2476597 - RNA, 19 nt, Human
gucuacucuuaagccaucu

SEQ ID NO: 2476598 - RNA, 18 nt, Human
gucuacucuuaagccauc

SEQ ID NO: 2476599 - RNA, 17 nt, Human
gucuacucuuaagccau

SEQ ID NO: 2476600 - RNA, 20 nt, Human
gucuacucauuccccggggc

SEQ ID NO: 2476601 - RNA, 21 nt, Human
gucuagaaguuguuugucauc

SEQ ID NO: 2476602 - RNA, 23 nt, Human
gucuacucuuaagccaucuuggu

SEQ ID NO: 2476603 - RNA, 17 nt, Human
gucuagaaguuguuugu

SEQ ID NO: 2476604 - RNA, 13 nt, Human
gucuagagaggga

SEQ ID NO: 2476605 - RNA, 14 nt, Human
gucuagagagggag

SEQ ID NO: 2476606 - RNA, 15 nt, Human
gucuagagagggagg

SEQ ID NO: 2476607 - RNA, 16 nt, Human
gucuagagagggaggc

SEQ ID NO: 2476608 - RNA, 21 nt, Human
gucuagagagggaggcaagcc

SEQ ID NO: 2476609 - RNA, 15 nt, Human
gucuagauggcuccu

SEQ ID NO: 2476610 - RNA, 16 nt, Human
gucuagauggcuccuc

SEQ ID NO: 2476611 - RNA, 17 nt, Human
gucuagauggcuccucu

SEQ ID NO: 2476612 - RNA, 18 nt, Human
gucuagauggcuccucuc

SEQ ID NO: 2476613 - RNA, 20 nt, Human
gucuauaaucccagcacuuu

SEQ ID NO: 2476614 - RNA, 21 nt, Human
gucuauaaucccagcacuuug

SEQ ID NO: 2476615 - RNA, 14 nt, Human
gucuauauguuugu

SEQ ID NO: 2476616 - RNA, 17 nt, Human
gucuauaugaaaaacaa

SEQ ID NO: 2476617 - RNA, 14 nt, Human
gucgcccuggacug

SEQ ID NO: 2476618 - RNA, 23 nt, Human
gucgcccagucuggaaugcagug

SEQ ID NO: 2476619 - RNA, 20 nt, Human
gucuaccugaggggccucuu

SEQ ID NO: 2476620 - RNA, 18 nt, Human
gucgcccuggacugugug

SEQ ID NO: 2476621 - RNA, 15 nt, Human
gucgcccucccaggc

SEQ ID NO: 2476622 - RNA, 16 nt, Human
aacagauucacacugu

SEQ ID NO: 2476623 - RNA, 15 nt, Human
aacagauucacacug

SEQ ID NO: 2476624 - RNA, 24 nt, Human
aacagauguuucuuuuguauguaa

SEQ ID NO: 2476625 - RNA, 17 nt, Human
aacagauguuucuuuug

SEQ ID NO: 2476626 - RNA, 20 nt, Human
aacagauguuucuuuuguau

SEQ ID NO: 2476627 - RNA, 18 nt, Human
aacagauucacacugucu

SEQ ID NO: 2476628 - RNA, 12 nt, Human
aacaggucuccu

SEQ ID NO: 2476629 - RNA, 13 nt, Human
aacaggucuccuc

SEQ ID NO: 2476630 - RNA, 15 nt, Human
aacaggucuccucuu

SEQ ID NO: 2476631 - RNA, 17 nt, Human
aacaggucuccucuuaa

SEQ ID NO: 2476632 - RNA, 18 nt, Human
aacaggucuccucuuaaa

SEQ ID NO: 2476633 - RNA, 19 nt, Human
aacaggucuccucuuaaaa

SEQ ID NO: 2476634 - RNA, 23 nt, Human
aacagguggcaggaccaggacua

SEQ ID NO: 2476635 - RNA, 22 nt, Human
aacagguggcaggaccaggacu

SEQ ID NO: 2476636 - RNA, 21 nt, Human
aacagguggcaggaccaggac

SEQ ID NO: 2476637 - RNA, 19 nt, Human
aacagguggcaggaccagg

SEQ ID NO: 2476638 - RNA, 14 nt, Human
aacagguggagaaa

SEQ ID NO: 2476639 - RNA, 16 nt, Human
aacagguggcaggacc

SEQ ID NO: 2476640 - RNA, 20 nt, Human
aacaggucuccucuuaaaaa

SEQ ID NO: 2476641 - RNA, 17 nt, Human
aacagucucaggaaauc

SEQ ID NO: 2476642 - RNA, 21 nt, Human
aacagguuauuuuaguuucug

SEQ ID NO: 2476643 - RNA, 20 nt, Human
aacagguuauuuuaguuucu

SEQ ID NO: 2476644 - RNA, 16 nt, Human
aacagguuauuuuagu

SEQ ID NO: 2476645 - RNA, 19 nt, Human
aacagguuuuccugaagaa

SEQ ID NO: 2476646 - RNA, 19 nt, Human
aacagucucaggaaaucaa

SEQ ID NO: 2476647 - RNA, 12 nt, Human
aacagucugauc

SEQ ID NO: 2476648 - RNA, 22 nt, Human
aacagguuauuuuaguuucugu

SEQ ID NO: 2476649 - RNA, 16 nt, Human
aacagguuuuauaauu

SEQ ID NO: 2476650 - RNA, 23 nt, Human
aacagucugaucgugacgcugaa

SEQ ID NO: 2476651 - RNA, 17 nt, Human
aacagucuucaggcaaa

SEQ ID NO: 2476652 - RNA, 19 nt, Human
aacagauuauuaccuuaca

SEQ ID NO: 2476653 - RNA, 14 nt, Human
aacagaugcuuuuc

SEQ ID NO: 2476654 - RNA, 23 nt, Human
aacagaugcaaugugcuacugau

SEQ ID NO: 2476655 - RNA, 21 nt, Human
aacagaugcaaugugcuacug

SEQ ID NO: 2476656 - RNA, 22 nt, Human
aacagaugcaaugugcuacuga

SEQ ID NO: 2476657 - RNA, 19 nt, Human
aacagagugagacccuguc

SEQ ID NO: 2476658 - RNA, 17 nt, Human
aacagaggccauggcag

SEQ ID NO: 2476659 - RNA, 21 nt, Human
aacagaggccauggcagaaua

SEQ ID NO: 2476660 - RNA, 20 nt, Human
aacagaggaagaauuuguua

SEQ ID NO: 2476661 - RNA, 13 nt, Human
aacagagauguga

SEQ ID NO: 2476662 - RNA, 19 nt, Human
aacagagacaggcccaaga

SEQ ID NO: 2476663 - RNA, 15 nt, Human
aacagagaaggcagg

SEQ ID NO: 2476664 - RNA, 16 nt, Human
aacagagaaggcagga

SEQ ID NO: 2476665 - RNA, 16 nt, Human
guccuaccaauagauu

SEQ ID NO: 2476666 - RNA, 13 nt, Human
aacagagaaggca

SEQ ID NO: 2476667 - RNA, 20 nt, Human
aacagacuggaagcacagcu

SEQ ID NO: 2476668 - RNA, 13 nt, Human
guccuacccaccc

SEQ ID NO: 2476669 - RNA, 16 nt, Human
aacauauauaacaaug

SEQ ID NO: 2476670 - RNA, 22 nt, Human
aacauagaaauugccugacgaa

SEQ ID NO: 2476671 - RNA, 14 nt, Human
aacaucaacaucuu

SEQ ID NO: 2476672 - RNA, 17 nt, Human
aacauaugaaaauacaa

SEQ ID NO: 2476673 - RNA, 22 nt, Human
aacauguuuuucuucucccuca

SEQ ID NO: 2476674 - RNA, 11 nt, Human
aacauguuucc

SEQ ID NO: 2476675 - RNA, 13 nt, Human
aacauguuccuga

SEQ ID NO: 2476676 - RNA, 17 nt, Human
aacauguuacugaccag

SEQ ID NO: 2476677 - RNA, 14 nt, Human
aacauauuguugaa

SEQ ID NO: 2476678 - RNA, 13 nt, Human
aacauauuuguua

SEQ ID NO: 2476679 - RNA, 20 nt, Human
aacauauuuguuaaauauuu

SEQ ID NO: 2476680 - RNA, 22 nt, Human
aacauauuuguuaaauauuuac

SEQ ID NO: 2476681 - RNA, 16 nt, Human
aacauguuacugacca

SEQ ID NO: 2476682 - RNA, 20 nt, Human
aacauguuuacuuuucaggg

SEQ ID NO: 2476683 - RNA, 20 nt, Human
aacauacucccaucugugaa

SEQ ID NO: 2476684 - RNA, 12 nt, Human
aacauaauuaaa

SEQ ID NO: 2476685 - RNA, 22 nt, Human
aacauaaucuucugccuucuca

SEQ ID NO: 2476686 - RNA, 17 nt, Human
aacauacuggcugguga

SEQ ID NO: 2476687 - RNA, 16 nt, Human
aacauacucccaucug

SEQ ID NO: 2476688 - RNA, 18 nt, Human
aacauacucccaucugug

SEQ ID NO: 2476689 - RNA, 18 nt, Human
aacauaaauaaaaugacc

SEQ ID NO: 2476690 - RNA, 21 nt, Human
aacagugagccugaauuuugu

SEQ ID NO: 2476691 - RNA, 13 nt, Human
aacagugagccug

SEQ ID NO: 2476692 - RNA, 20 nt, Human
aacauaaucuucugccuucu

SEQ ID NO: 2476693 - RNA, 21 nt, Human
aacauaaccauuacagggagc

SEQ ID NO: 2476694 - RNA, 16 nt, Human
guccccgcacugggcu

SEQ ID NO: 2476695 - RNA, 15 nt, Human
guccccgcacugggc

SEQ ID NO: 2476696 - RNA, 13 nt, Human
gucccccucuguc

SEQ ID NO: 2476697 - RNA, 19 nt, Human
gucccccucuguccaggca

SEQ ID NO: 2476698 - RNA, 13 nt, Human
gucccccugacaa

SEQ ID NO: 2476699 - RNA, 15 nt, Human
guccccucccaucug

SEQ ID NO: 2476700 - RNA, 14 nt, Human
guccccucccaucu

SEQ ID NO: 2476701 - RNA, 12 nt, Human
guccccucccau

SEQ ID NO: 2476702 - RNA, 11 nt, Human
guccccuucuc

SEQ ID NO: 2476703 - RNA, 13 nt, Human
guccccuuccauc

SEQ ID NO: 2476704 - RNA, 23 nt, Human
guccccuguuuguuucugaaagg

SEQ ID NO: 2476705 - RNA, 15 nt, Human
guccccgugccccgc

SEQ ID NO: 2476706 - RNA, 22 nt, Human
guccccgugccccgccuccccg

SEQ ID NO: 2476707 - RNA, 21 nt, Human
gucccccucuguccaggcacu

SEQ ID NO: 2476708 - RNA, 14 nt, Human
guccccucagcucc

SEQ ID NO: 2476709 - RNA, 13 nt, Human
guccccucagcuc

SEQ ID NO: 2476710 - RNA, 12 nt, Human
guccccucaccu

SEQ ID NO: 2476711 - RNA, 18 nt, Human
guccccucagcuccagac

SEQ ID NO: 2476712 - RNA, 15 nt, Human
guccccucagcucca

SEQ ID NO: 2476713 - RNA, 22 nt, Human
guccccuuuucuuuucuacccu

SEQ ID NO: 2476714 - RNA, 22 nt, Human
guccccuuuguauuccuuaaau

SEQ ID NO: 2476715 - RNA, 20 nt, Human
guccccuucucucaucucuu

SEQ ID NO: 2476716 - RNA, 19 nt, Human
guccccuucucucaucucu

SEQ ID NO: 2476717 - RNA, 18 nt, Human
guccccuucucucaucuc

SEQ ID NO: 2476718 - RNA, 17 nt, Human
guccccuucucucaucu

SEQ ID NO: 2476719 - RNA, 14 nt, Human
guccccuucucuca

SEQ ID NO: 2476720 - RNA, 13 nt, Human
guccccuucucuc

SEQ ID NO: 2476721 - RNA, 12 nt, Human
guccccuucucu

SEQ ID NO: 2476722 - RNA, 13 nt, Human
gucccuuuuccuu

SEQ ID NO: 2476723 - RNA, 21 nt, Human
guccgaaagggacuuggaagc

SEQ ID NO: 2476724 - RNA, 22 nt, Human
guccgaaagggacuuggaagcu

SEQ ID NO: 2476725 - RNA, 23 nt, Human
guccccuuuucuuuucuacccua

SEQ ID NO: 2476726 - RNA, 19 nt, Human
guccuaaggacacacuaau

SEQ ID NO: 2476727 - RNA, 14 nt, Human
guccuaagaaagag

SEQ ID NO: 2476728 - RNA, 16 nt, Human
guccuaacugguauag

SEQ ID NO: 2476729 - RNA, 22 nt, Human
guccuaagaaagaggagugcuu

SEQ ID NO: 2476730 - RNA, 13 nt, Human
guccuaaaacacc

SEQ ID NO: 2476731 - RNA, 14 nt, Human
guccguuuacucca

SEQ ID NO: 2476732 - RNA, 22 nt, Human
gucccuuucuuggccaguuauc

SEQ ID NO: 2476733 - RNA, 17 nt, Human
gucccuuucuuggccag

SEQ ID NO: 2476734 - RNA, 21 nt, Human
guccauggaaugcuugaaaaa

SEQ ID NO: 2476735 - RNA, 20 nt, Human
guccauggaaugcuugaaaa

SEQ ID NO: 2476736 - RNA, 13 nt, Human
guccaugggcaga

SEQ ID NO: 2476737 - RNA, 14 nt, Human
guccaugggcagag

SEQ ID NO: 2476738 - RNA, 16 nt, Human
guccaugggcagagcc

SEQ ID NO: 2476739 - RNA, 18 nt, Human
guccaugggcagagccca

SEQ ID NO: 2476740 - RNA, 23 nt, Human
guccaugggcagagcccaaggga

SEQ ID NO: 2476741 - RNA, 14 nt, Human
guccaugugugugc

SEQ ID NO: 2476742 - RNA, 19 nt, Human
guccaugugguucuucaaa

SEQ ID NO: 2476743 - RNA, 13 nt, Human
guccaugugugug

SEQ ID NO: 2476744 - RNA, 18 nt, Human
gucccaccuuggcugcag

SEQ ID NO: 2476745 - RNA, 17 nt, Human
gucccaccuuggcugca

SEQ ID NO: 2476746 - RNA, 12 nt, Human
gucccccucugg

SEQ ID NO: 2476747 - RNA, 14 nt, Human
gucccccucuggcu

SEQ ID NO: 2476748 - RNA, 18 nt, Human
guccauugacauguacag

SEQ ID NO: 2476749 - RNA, 17 nt, Human
guccauugacauguaca

SEQ ID NO: 2476750 - RNA, 19 nt, Human
guccauugacauguacaga

SEQ ID NO: 2476751 - RNA, 15 nt, Human
guccauugacaugua

SEQ ID NO: 2476752 - RNA, 14 nt, Human
guccauugacaugu

SEQ ID NO: 2476753 - RNA, 15 nt, Human
guccauucucccagg

SEQ ID NO: 2476754 - RNA, 13 nt, Human
guccauucuccca

SEQ ID NO: 2476755 - RNA, 22 nt, Human
guccccccacccucauucuacu

SEQ ID NO: 2476756 - RNA, 19 nt, Human
gucccaccuuggcugcagg

SEQ ID NO: 2476757 - RNA, 22 nt, Human
guagcucuaggagggcuggcaa

SEQ ID NO: 2476758 - RNA, 14 nt, Human
guagcuagaggaac

SEQ ID NO: 2476759 - RNA, 15 nt, Human
guagcuagaggaacc

SEQ ID NO: 2476760 - RNA, 11 nt, Human
guagcucaggu

SEQ ID NO: 2476761 - RNA, 16 nt, Human
guagcuauaucuauau

SEQ ID NO: 2476762 - RNA, 13 nt, Human
guagcuauaucua

SEQ ID NO: 2476763 - RNA, 17 nt, Human
guagcuagaggaaccaa

SEQ ID NO: 2476764 - RNA, 18 nt, Human
guccauggaaugcuugaa

SEQ ID NO: 2476765 - RNA, 15 nt, Human
guccauggaaugcuu

SEQ ID NO: 2476766 - RNA, 14 nt, Human
guccauggaaugcu

SEQ ID NO: 2476767 - RNA, 14 nt, Human
guagcucagguggg

SEQ ID NO: 2476768 - RNA, 12 nt, Human
guagcucaggug

SEQ ID NO: 2476769 - RNA, 23 nt, Human
guagcuccucaacucaccuaaug

SEQ ID NO: 2476770 - RNA, 22 nt, Human
guagccuggauauuauucuugu

SEQ ID NO: 2476771 - RNA, 12 nt, Human
guagccugugca

SEQ ID NO: 2476772 - RNA, 21 nt, Human
guagccucgccgucugugaau

SEQ ID NO: 2476773 - RNA, 15 nt, Human
guagccuugcccgga

SEQ ID NO: 2476774 - RNA, 23 nt, Human
guagccuugcccggauucuggga

SEQ ID NO: 2476775 - RNA, 14 nt, Human
guagccuuccucca

SEQ ID NO: 2476776 - RNA, 13 nt, Human
aagcaaaauguga

SEQ ID NO: 2476777 - RNA, 19 nt, Human
aagauguagauuuauuuca

SEQ ID NO: 2476778 - RNA, 22 nt, Human
aagauguagauuuauuucauca

SEQ ID NO: 2476779 - RNA, 15 nt, Human
aagaugcaauguaga

SEQ ID NO: 2476780 - RNA, 17 nt, Human
aagaugaucuacucaga

SEQ ID NO: 2476781 - RNA, 16 nt, Human
aagauguagauuuauu

SEQ ID NO: 2476782 - RNA, 22 nt, Human
aagauguagaggagaaacugga

SEQ ID NO: 2476783 - RNA, 22 nt, Human
aagaugacauugcuaagaugcu

SEQ ID NO: 2476784 - RNA, 21 nt, Human
aagaugacauugcuaagaugc

SEQ ID NO: 2476785 - RNA, 23 nt, Human
aagaugacauugcuaagaugcuc

SEQ ID NO: 2476786 - RNA, 17 nt, Human
aagaugagagaacugga

SEQ ID NO: 2476787 - RNA, 18 nt, Human
aagaugagagaacuggag

SEQ ID NO: 2476788 - RNA, 19 nt, Human
aagauguagaggagaaacu

SEQ ID NO: 2476789 - RNA, 18 nt, Human
aagaugaucuacucagaa

SEQ ID NO: 2476790 - RNA, 14 nt, Human
aagaugaucauuug

SEQ ID NO: 2476791 - RNA, 15 nt, Human
aagaugaucagaccu

SEQ ID NO: 2476792 - RNA, 15 nt, Human
aagaugcaaggacca

SEQ ID NO: 2476793 - RNA, 20 nt, Human
aagaugcaaggaccaggacu

SEQ ID NO: 2476794 - RNA, 13 nt, Human
aagcaaaugugaa

SEQ ID NO: 2476795 - RNA, 12 nt, Human
aagcaaaugucu

SEQ ID NO: 2476796 - RNA, 14 nt, Human
aagcaaaugugaau

SEQ ID NO: 2476797 - RNA, 16 nt, Human
aagcaagauuucagau

SEQ ID NO: 2476798 - RNA, 15 nt, Human
aagcaagauuucaga

SEQ ID NO: 2476799 - RNA, 19 nt, Human
aagcaaaauuuuuucucua

SEQ ID NO: 2476800 - RNA, 12 nt, Human
aagcaaacacau

SEQ ID NO: 2476801 - RNA, 13 nt, Human
aagcaaacacauu

SEQ ID NO: 2476802 - RNA, 17 nt, Human
aagcaaaucagaaacuu

SEQ ID NO: 2476803 - RNA, 14 nt, Human
aagcaaacacauua

SEQ ID NO: 2476804 - RNA, 21 nt, Human
aagaucacuuguuguuuuacu

SEQ ID NO: 2476805 - RNA, 19 nt, Human
aagaucacuuguuguuuua

SEQ ID NO: 2476806 - RNA, 15 nt, Human
aagaucacuuucuca

SEQ ID NO: 2476807 - RNA, 17 nt, Human
aagaucacuuucucagu

SEQ ID NO: 2476808 - RNA, 23 nt, Human
aagaucacuuucucaguuuucau

SEQ ID NO: 2476809 - RNA, 17 nt, Human
aagaucacgcuccccgc

SEQ ID NO: 2476810 - RNA, 22 nt, Human
aagaucaaaauaaaaagugaca

SEQ ID NO: 2476811 - RNA, 16 nt, Human
aagaucacgcuccccg

SEQ ID NO: 2476812 - RNA, 19 nt, Human
aagaucacgcuccccgccu

SEQ ID NO: 2476813 - RNA, 22 nt, Human
aagauccuaaaacaaaagcuca

SEQ ID NO: 2476814 - RNA, 16 nt, Human
aagauccccucaggac

SEQ ID NO: 2476815 - RNA, 15 nt, Human
aagauccccucagga

SEQ ID NO: 2476816 - RNA, 16 nt, Human
aagaucauguacccca

SEQ ID NO: 2476817 - RNA, 17 nt, Human
aagaucauauacgugaa

SEQ ID NO: 2476818 - RNA, 20 nt, Human
aagaugacauugcuaagaug

SEQ ID NO: 2476819 - RNA, 17 nt, Human
aagaugacauugcuaag

SEQ ID NO: 2476820 - RNA, 16 nt, Human
aagaugacauugcuaa

SEQ ID NO: 2476821 - RNA, 15 nt, Human
aagaugacauugcua

SEQ ID NO: 2476822 - RNA, 23 nt, Human
aagauccuaccccaauuccuugu

SEQ ID NO: 2476823 - RNA, 21 nt, Human
aagauccugucuuuaaggaaa

SEQ ID NO: 2476824 - RNA, 17 nt, Human
aagauauuuugcuuugu

SEQ ID NO: 2476825 - RNA, 20 nt, Human
aagauauuuugcuuugugau

SEQ ID NO: 2476826 - RNA, 22 nt, Human
aagauauuuugcuuugugauuu

SEQ ID NO: 2476827 - RNA, 21 nt, Human
aagaucaaaauaaaaagugac

SEQ ID NO: 2476828 - RNA, 17 nt, Human
aagaucaaaauaaaaag

SEQ ID NO: 2476829 - RNA, 15 nt, Human
aagaucaaaauaaaa

SEQ ID NO: 2476830 - RNA, 15 nt, Human
aagauauuuugcuuu

SEQ ID NO: 2476831 - RNA, 19 nt, Human
aagaguaggaagacuuugg

SEQ ID NO: 2476832 - RNA, 18 nt, Human
aagaguaggaagacuuug

SEQ ID NO: 2476833 - RNA, 16 nt, Human
aagaguaggaagacuu

SEQ ID NO: 2476834 - RNA, 19 nt, Human
gugguguuuccuggcacug

SEQ ID NO: 2476835 - RNA, 18 nt, Human
gugguuauggagagggug

SEQ ID NO: 2476836 - RNA, 20 nt, Human
gugguucacucuuggagccu

SEQ ID NO: 2476837 - RNA, 21 nt, Human
gugguucacucuuggagccug

SEQ ID NO: 2476838 - RNA, 23 nt, Human
gugguuaaugccauggacagaag

SEQ ID NO: 2476839 - RNA, 22 nt, Human
gugguuauuucucaacaaagca

SEQ ID NO: 2476840 - RNA, 14 nt, Human
gugguuauuucuca

SEQ ID NO: 2476841 - RNA, 20 nt, Human
gugucccaaaaagaaaggag

SEQ ID NO: 2476842 - RNA, 19 nt, Human
gugucuugcaauggcagcc

SEQ ID NO: 2476843 - RNA, 21 nt, Human
guguccaugcgcucagggcca

SEQ ID NO: 2476844 - RNA, 20 nt, Human
guguccaugcgcucagggcc

SEQ ID NO: 2476845 - RNA, 19 nt, Human
guguccaugcgcucagggc

SEQ ID NO: 2476846 - RNA, 18 nt, Human
guguccaugcgcucaggg

SEQ ID NO: 2476847 - RNA, 23 nt, Human
guguccauugacauguacagaga

SEQ ID NO: 2476848 - RNA, 20 nt, Human
guguccauugacauguacag

SEQ ID NO: 2476849 - RNA, 19 nt, Human
guguccauugacauguaca

SEQ ID NO: 2476850 - RNA, 14 nt, Human
guguccaugugugu

SEQ ID NO: 2476851 - RNA, 15 nt, Human
guguccaugugugug

SEQ ID NO: 2476852 - RNA, 16 nt, Human
guguccauugacaugu

SEQ ID NO: 2476853 - RNA, 16 nt, Human
guguccaugugugugc

SEQ ID NO: 2476854 - RNA, 16 nt, Human
aagcaaguauuagaau

SEQ ID NO: 2476855 - RNA, 13 nt, Human
guguccaccuggc

SEQ ID NO: 2476856 - RNA, 18 nt, Human
guguccacgacugucucc

SEQ ID NO: 2476857 - RNA, 13 nt, Human
aagaugacauugc

SEQ ID NO: 2476858 - RNA, 23 nt, Human
gugucuugggcagagcuggcucu

SEQ ID NO: 2476859 - RNA, 20 nt, Human
gugucuugggcagagcuggc

SEQ ID NO: 2476860 - RNA, 17 nt, Human
gugucuugggcagagcu

SEQ ID NO: 2476861 - RNA, 16 nt, Human
gugucuugggcagagc

SEQ ID NO: 2476862 - RNA, 21 nt, Human
gugucuugcaauggcagccuu

SEQ ID NO: 2476863 - RNA, 12 nt, Human
gugugaggccag

SEQ ID NO: 2476864 - RNA, 21 nt, Human
guguccauugacauguacaga

SEQ ID NO: 2476865 - RNA, 14 nt, Human
gugugaggccaggg

SEQ ID NO: 2476866 - RNA, 15 nt, Human
gugugaggccagggc

SEQ ID NO: 2476867 - RNA, 17 nt, Human
gugugaguaagagcugg

SEQ ID NO: 2476868 - RNA, 17 nt, Human
gugugaggccagggcag

SEQ ID NO: 2476869 - RNA, 19 nt, Human
guguggugcagugugaaaa

SEQ ID NO: 2476870 - RNA, 15 nt, Human
gugugguguuuccug

SEQ ID NO: 2476871 - RNA, 18 nt, Human
gugugagucaccaagccc

SEQ ID NO: 2476872 - RNA, 13 nt, Human
gugugagucacca

SEQ ID NO: 2476873 - RNA, 14 nt, Human
guguguguaugugg

SEQ ID NO: 2476874 - RNA, 19 nt, Human
guguguguaugcgugugug

SEQ ID NO: 2476875 - RNA, 14 nt, Human
gugugugugcgugu

SEQ ID NO: 2476876 - RNA, 9 nt, Human
gugugugug

SEQ ID NO: 2476877 - RNA, 13 nt, Human
gugugugugaaug

SEQ ID NO: 2476878 - RNA, 17 nt, Human
guguguguauguuugca

SEQ ID NO: 2476879 - RNA, 12 nt, Human
guguguguaugu

SEQ ID NO: 2476880 - RNA, 17 nt, Human
guguguguugugugugg

SEQ ID NO: 2476881 - RNA, 15 nt, Human
gugugugugugugug

SEQ ID NO: 2476882 - RNA, 14 nt, Human
gugugugugugugc

SEQ ID NO: 2476883 - RNA, 14 nt, Human
gugugugugugugu

SEQ ID NO: 2476884 - RNA, 15 nt, Human
gugugugugcguguu

SEQ ID NO: 2476885 - RNA, 14 nt, Human
guguguguguccuu

SEQ ID NO: 2476886 - RNA, 12 nt, Human
gugugugugugu

SEQ ID NO: 2476887 - RNA, 13 nt, Human
gugugugugugcg

SEQ ID NO: 2476888 - RNA, 13 nt, Human
gugugugugugug

SEQ ID NO: 2476889 - RNA, 13 nt, Human
guguguguaugug

SEQ ID NO: 2476890 - RNA, 21 nt, Human
guguguggguggauauaaaua

SEQ ID NO: 2476891 - RNA, 19 nt, Human
gugugguguuuccuggcac

SEQ ID NO: 2476892 - RNA, 13 nt, Human
guguggugcagug

SEQ ID NO: 2476893 - RNA, 14 nt, Human
guguggugcagugu

SEQ ID NO: 2476894 - RNA, 23 nt, Human
gugugguggguucuuuggaagga

SEQ ID NO: 2476895 - RNA, 18 nt, Human
guguggugcagugugaaa

SEQ ID NO: 2476896 - RNA, 21 nt, Human
gugugguuugguguguucccg

SEQ ID NO: 2476897 - RNA, 18 nt, Human
guguuuaaagagagguua

SEQ ID NO: 2476898 - RNA, 11 nt, Human
guguuuaaaua

SEQ ID NO: 2476899 - RNA, 13 nt, Human
guguuuaagacau

SEQ ID NO: 2476900 - RNA, 14 nt, Human
guguuuaagacauu

SEQ ID NO: 2476901 - RNA, 19 nt, Human
guguugagccuuuucccuc

SEQ ID NO: 2476902 - RNA, 17 nt, Human
guguugaaaauguucag

SEQ ID NO: 2476903 - RNA, 14 nt, Human
guguguuauuuaaa

SEQ ID NO: 2476904 - RNA, 13 nt, Human
guguucugugaua

SEQ ID NO: 2476905 - RNA, 18 nt, Human
guguguuccaacugcccc

SEQ ID NO: 2476906 - RNA, 15 nt, Human
guguguuccaacugc

SEQ ID NO: 2476907 - RNA, 18 nt, Human
guguguucugauuagaaa

SEQ ID NO: 2476908 - RNA, 16 nt, Human
guguugaaaauguuca

SEQ ID NO: 2476909 - RNA, 16 nt, Human
aagacuccaaagaaau

SEQ ID NO: 2476910 - RNA, 17 nt, Human
aagacuccaaagaaaug

SEQ ID NO: 2476911 - RNA, 14 nt, Human
aagacuccaaagaa

SEQ ID NO: 2476912 - RNA, 17 nt, Human
aagacucauucuucugu

SEQ ID NO: 2476913 - RNA, 23 nt, Human
aagacuggcuuuuauuaaugcac

SEQ ID NO: 2476914 - RNA, 11 nt, Human
aagacuggcuu

SEQ ID NO: 2476915 - RNA, 21 nt, Human
aagacuggaagguggggacag

SEQ ID NO: 2476916 - RNA, 20 nt, Human
aagacuggaagcuaauuugc

SEQ ID NO: 2476917 - RNA, 22 nt, Human
aagacuggaagcuaauuugcau

SEQ ID NO: 2476918 - RNA, 23 nt, Human
aagacuggaagcuaauuugcauu

SEQ ID NO: 2476919 - RNA, 17 nt, Human
aagacucauucccuaga

SEQ ID NO: 2476920 - RNA, 23 nt, Human
aagacucaagugggaacgacugg

SEQ ID NO: 2476921 - RNA, 14 nt, Human
aagacucaguguuc

SEQ ID NO: 2476922 - RNA, 21 nt, Human
aagacucaagugggaacgacu

SEQ ID NO: 2476923 - RNA, 14 nt, Human
aagacuauucaaac

SEQ ID NO: 2476924 - RNA, 23 nt, Human
aagacgcugugcugcccugccca

SEQ ID NO: 2476925 - RNA, 20 nt, Human
aagacgcugugcugcccugc

SEQ ID NO: 2476926 - RNA, 22 nt, Human
aagacgcugugcugcccugccc

SEQ ID NO: 2476927 - RNA, 21 nt, Human
aagacgcugugcugcccugcc

SEQ ID NO: 2476928 - RNA, 22 nt, Human
aagaccccacccaagcuuggca

SEQ ID NO: 2476929 - RNA, 16 nt, Human
aagaccccacccaagc

SEQ ID NO: 2476930 - RNA, 23 nt, Human
aagaccccuuaccacugcucuga

SEQ ID NO: 2476931 - RNA, 12 nt, Human
aagaccagucca

SEQ ID NO: 2476932 - RNA, 13 nt, Human
aagaccauuuuuc

SEQ ID NO: 2476933 - RNA, 13 nt, Human
aagaccccaccca

SEQ ID NO: 2476934 - RNA, 16 nt, Human
aagacuguaaugaauc

SEQ ID NO: 2476935 - RNA, 13 nt, Human
aagacuguaauga

SEQ ID NO: 2476936 - RNA, 22 nt, Human
aagacuggcuuuuauuaaugca

SEQ ID NO: 2476937 - RNA, 16 nt, Human
aagacuguacaaagua

SEQ ID NO: 2476938 - RNA, 20 nt, Human
aagagaugaugaaaauauuu

SEQ ID NO: 2476939 - RNA, 17 nt, Human
aagagaugggcuuguuu

SEQ ID NO: 2476940 - RNA, 17 nt, Human
aagagauggccugagaa

SEQ ID NO: 2476941 - RNA, 13 nt, Human
aagagaugaagag

SEQ ID NO: 2476942 - RNA, 16 nt, Human
aagagauugugguuuc

SEQ ID NO: 2476943 - RNA, 19 nt, Human
aagagauugugguuucauu

SEQ ID NO: 2476944 - RNA, 14 nt, Human
aagagcccaggccu

SEQ ID NO: 2476945 - RNA, 12 nt, Human
aagagcccaggc

SEQ ID NO: 2476946 - RNA, 16 nt, Human
aagagcccaggccucc

SEQ ID NO: 2476947 - RNA, 18 nt, Human
aagagaugggcuuguuuu

SEQ ID NO: 2476948 - RNA, 20 nt, Human
aagagaugggcuuguuuucu

SEQ ID NO: 2476949 - RNA, 15 nt, Human
aagagauuccugagc

SEQ ID NO: 2476950 - RNA, 19 nt, Human
aagagcuguucacagccag

SEQ ID NO: 2476951 - RNA, 21 nt, Human
guggccccacccugggcccug

SEQ ID NO: 2476952 - RNA, 16 nt, Human
aagagcuguccuggua

SEQ ID NO: 2476953 - RNA, 23 nt, Human
guggccccacccugggcccuggg

SEQ ID NO: 2476954 - RNA, 13 nt, Human
aagagcugcccuc

SEQ ID NO: 2476955 - RNA, 14 nt, Human
guggccccagccug

SEQ ID NO: 2476956 - RNA, 13 nt, Human
guggccccagccu

SEQ ID NO: 2476957 - RNA, 12 nt, Human
guggccccagcc

SEQ ID NO: 2476958 - RNA, 22 nt, Human
guggccccagccuggcccagcu

SEQ ID NO: 2476959 - RNA, 21 nt, Human
guggccccagccuggcccagc

SEQ ID NO: 2476960 - RNA, 20 nt, Human
guggccccagccuggcccag

SEQ ID NO: 2476961 - RNA, 19 nt, Human
guggccccagccuggccca

SEQ ID NO: 2476962 - RNA, 18 nt, Human
guggccccagccuggccc

SEQ ID NO: 2476963 - RNA, 17 nt, Human
guggccccagccuggcc

SEQ ID NO: 2476964 - RNA, 16 nt, Human
guggccccagccuggc

SEQ ID NO: 2476965 - RNA, 15 nt, Human
guggccccagccugg

SEQ ID NO: 2476966 - RNA, 17 nt, Human
guggccccguuucuggu

SEQ ID NO: 2476967 - RNA, 16 nt, Human
guggccccguuucugg

SEQ ID NO: 2476968 - RNA, 16 nt, Human
guggcccgacagccug

SEQ ID NO: 2476969 - RNA, 21 nt, Human
aagagccauguagaagcugca

SEQ ID NO: 2476970 - RNA, 16 nt, Human
aagagcuagcgcugcc

SEQ ID NO: 2476971 - RNA, 19 nt, Human
aagagcuagcgcugccgca

SEQ ID NO: 2476972 - RNA, 20 nt, Human
aagagcuagcgcugccgcac

SEQ ID NO: 2476973 - RNA, 18 nt, Human
aagagcuguucacagcca

SEQ ID NO: 2476974 - RNA, 18 nt, Human
aagagcugaggcaauucu

SEQ ID NO: 2476975 - RNA, 11 nt, Human
aagagcugagg

SEQ ID NO: 2476976 - RNA, 18 nt, Human
gugggauccuccaggugc

SEQ ID NO: 2476977 - RNA, 15 nt, Human
gugggauccuccagg

SEQ ID NO: 2476978 - RNA, 16 nt, Human
gugggagcgugggagg

SEQ ID NO: 2476979 - RNA, 18 nt, Human
gugggaucugccccuccc

SEQ ID NO: 2476980 - RNA, 14 nt, Human
gugggauggaggag

SEQ ID NO: 2476981 - RNA, 19 nt, Human
gugggaucugccccucccu

SEQ ID NO: 2476982 - RNA, 16 nt, Human
gugggauggaggagaa

SEQ ID NO: 2476983 - RNA, 23 nt, Human
gugggauguucagcacugucccu

SEQ ID NO: 2476984 - RNA, 17 nt, Human
gugggauggaggagaag

SEQ ID NO: 2476985 - RNA, 12 nt, Human
gugggagcugag

SEQ ID NO: 2476986 - RNA, 22 nt, Human
gugggagcaggagauugagaag

SEQ ID NO: 2476987 - RNA, 15 nt, Human
gugggagcaggagau

SEQ ID NO: 2476988 - RNA, 14 nt, Human
gugggagcaggaga

SEQ ID NO: 2476989 - RNA, 13 nt, Human
gugggagcaggag

SEQ ID NO: 2476990 - RNA, 12 nt, Human
gugggagcagga

SEQ ID NO: 2476991 - RNA, 19 nt, Human
gugggagcagcgguuuggg

SEQ ID NO: 2476992 - RNA, 13 nt, Human
gugggagagccca

SEQ ID NO: 2476993 - RNA, 14 nt, Human
gugggagagcccag

SEQ ID NO: 2476994 - RNA, 13 nt, Human
gugggagaggucu

SEQ ID NO: 2476995 - RNA, 15 nt, Human
gugggagagcccagc

SEQ ID NO: 2476996 - RNA, 20 nt, Human
gugggaacgagaggggaaga

SEQ ID NO: 2476997 - RNA, 18 nt, Human
gugggaacgagaggggaa

SEQ ID NO: 2476998 - RNA, 23 nt, Human
gugggaacgacugggcacugcca

SEQ ID NO: 2476999 - RNA, 12 nt, Human
gugggaaaacac

SEQ ID NO: 2477000 - RNA, 21 nt, Human
gugggaacgagaggggaagag

SEQ ID NO: 2477001 - RNA, 17 nt, Human
gugggaacgugacugcc

SEQ ID NO: 2477002 - RNA, 14 nt, Human
guggccucccaacu

SEQ ID NO: 2477003 - RNA, 13 nt, Human
guggccucccaac

SEQ ID NO: 2477004 - RNA, 17 nt, Human
guggcccgacagccugg

SEQ ID NO: 2477005 - RNA, 23 nt, Human
guggccccguuucugguggucug

SEQ ID NO: 2477006 - RNA, 20 nt, Human
guggccucaacccucccuca

SEQ ID NO: 2477007 - RNA, 21 nt, Human
guggccucaacccucccucag

SEQ ID NO: 2477008 - RNA, 13 nt, Human
guggccucagaau

SEQ ID NO: 2477009 - RNA, 11 nt, Human
guggccucaga

SEQ ID NO: 2477010 - RNA, 12 nt, Human
guggccucagaa

SEQ ID NO: 2477011 - RNA, 15 nt, Human
guggccucccaacuc

SEQ ID NO: 2477012 - RNA, 21 nt, Human
guggcuucccgcucagcccuc

SEQ ID NO: 2477013 - RNA, 14 nt, Human
guggcuucuuaauc

SEQ ID NO: 2477014 - RNA, 18 nt, Human
guggcuuucagccucugg

SEQ ID NO: 2477015 - RNA, 16 nt, Human
guggcuuugcauuuua

SEQ ID NO: 2477016 - RNA, 22 nt, Human
guggcuugagaaauauggacac

SEQ ID NO: 2477017 - RNA, 16 nt, Human
guggcuuucagccucu

SEQ ID NO: 2477018 - RNA, 20 nt, Human
guggcuuuuuuccuccugug

SEQ ID NO: 2477019 - RNA, 23 nt, Human
guggcuuugcauuuuaaaaauga

SEQ ID NO: 2477020 - RNA, 22 nt, Human
guggcuuugcauuuuaaaaaug

SEQ ID NO: 2477021 - RNA, 18 nt, Human
guggcuuugcauuuuaaa

SEQ ID NO: 2477022 - RNA, 17 nt, Human
gugggaacgacugggca

SEQ ID NO: 2477023 - RNA, 23 nt, Human
gugggaaagauuacuuuuucuuu

SEQ ID NO: 2477024 - RNA, 22 nt, Human
gugguggagccaguaaacagag

SEQ ID NO: 2477025 - RNA, 12 nt, Human
gugguggagcca

SEQ ID NO: 2477026 - RNA, 19 nt, Human
gugguggaagaggggacag

SEQ ID NO: 2477027 - RNA, 20 nt, Human
gugguggaucuguccaagga

SEQ ID NO: 2477028 - RNA, 14 nt, Human
gugguggagccagu

SEQ ID NO: 2477029 - RNA, 16 nt, Human
gugguggcacaggccc

SEQ ID NO: 2477030 - RNA, 21 nt, Human
gugggucccacuuccccuccu

SEQ ID NO: 2477031 - RNA, 20 nt, Human
gugggucccacuuccccucc

SEQ ID NO: 2477032 - RNA, 18 nt, Human
guggugcucaguuguaga

SEQ ID NO: 2477033 - RNA, 14 nt, Human
guggugcugggacu

SEQ ID NO: 2477034 - RNA, 15 nt, Human
guggugcugacaaag

SEQ ID NO: 2477035 - RNA, 18 nt, Human
gugguggaagaggggaca

SEQ ID NO: 2477036 - RNA, 18 nt, Human
gugguggcgggcgccugu

SEQ ID NO: 2477037 - RNA, 18 nt, Human
gugguggcccacgccugu

SEQ ID NO: 2477038 - RNA, 18 nt, Human
gugguggcucaugccugu

SEQ ID NO: 2477039 - RNA, 18 nt, Human
gugguggcucacgccugu

SEQ ID NO: 2477040 - RNA, 21 nt, Human
gugguggcagggccuagcugc

SEQ ID NO: 2477041 - RNA, 17 nt, Human
gugguggcagggccuag

SEQ ID NO: 2477042 - RNA, 15 nt, Human
gugguggcagggccu

SEQ ID NO: 2477043 - RNA, 23 nt, Human
gugguggcagggccuagcugcua

SEQ ID NO: 2477044 - RNA, 23 nt, Human
gugguggcauacgccuguagucc

SEQ ID NO: 2477045 - RNA, 16 nt, Human
gugguguuuccuggca

SEQ ID NO: 2477046 - RNA, 15 nt, Human
gugguguuuccuggc

SEQ ID NO: 2477047 - RNA, 22 nt, Human
gugguguggagaagccacaggc

SEQ ID NO: 2477048 - RNA, 14 nt, Human
gugguguggagaag

SEQ ID NO: 2477049 - RNA, 23 nt, Human
guggugugucccccucuguccag

SEQ ID NO: 2477050 - RNA, 20 nt, Human
gugguguuuccugcaggcca

SEQ ID NO: 2477051 - RNA, 15 nt, Human
gugggggucugugug

SEQ ID NO: 2477052 - RNA, 16 nt, Human
gugggggucugugugu

SEQ ID NO: 2477053 - RNA, 14 nt, Human
gugggggucugugu

SEQ ID NO: 2477054 - RNA, 19 nt, Human
guggggguagagcugaucc

SEQ ID NO: 2477055 - RNA, 18 nt, Human
guggggggggugcugggc

SEQ ID NO: 2477056 - RNA, 24 nt, Human
gugggauguucagcacugucccuu

SEQ ID NO: 2477057 - RNA, 15 nt, Human
guggguauaaaagau

SEQ ID NO: 2477058 - RNA, 13 nt, Human
guggguauaaaag

SEQ ID NO: 2477059 - RNA, 21 nt, Human
guggguagguuggacuggaaa

SEQ ID NO: 2477060 - RNA, 15 nt, Human
guggggguggaggcu

SEQ ID NO: 2477061 - RNA, 12 nt, Human
guggguauaaaa

SEQ ID NO: 2477062 - RNA, 14 nt, Human
guggguagacacac

SEQ ID NO: 2477063 - RNA, 23 nt, Human
gugggggugcagaugagguugcu

SEQ ID NO: 2477064 - RNA, 22 nt, Human
guggggguggaauaaaauacua

SEQ ID NO: 2477065 - RNA, 20 nt, Human
guggguagaucacgagauca

SEQ ID NO: 2477066 - RNA, 23 nt, Human
guggguccaggggccccuccagc

SEQ ID NO: 2477067 - RNA, 20 nt, Human
guggguccaggggccccucc

SEQ ID NO: 2477068 - RNA, 18 nt, Human
guggguccaugggcagag

SEQ ID NO: 2477069 - RNA, 20 nt, Human
guggguccaugggcagagcc

SEQ ID NO: 2477070 - RNA, 22 nt, Human
guggguccaugggcagagccca

SEQ ID NO: 2477071 - RNA, 19 nt, Human
guggguccaggggccccuc

SEQ ID NO: 2477072 - RNA, 16 nt, Human
guggguccaggggccc

SEQ ID NO: 2477073 - RNA, 16 nt, Human
guggguauaaaagaug

SEQ ID NO: 2477074 - RNA, 14 nt, Human
gugggucaaggaau

SEQ ID NO: 2477075 - RNA, 18 nt, Human
gugcacgcaguggccuuc

SEQ ID NO: 2477076 - RNA, 23 nt, Human
aacugcauuaccgcguuguaaaa

SEQ ID NO: 2477077 - RNA, 17 nt, Human
gugcacacaccagagcc

SEQ ID NO: 2477078 - RNA, 18 nt, Human
gugcacguacacacacau

SEQ ID NO: 2477079 - RNA, 15 nt, Human
gugcacguggagagc

SEQ ID NO: 2477080 - RNA, 16 nt, Human
gugcacguggagagcu

SEQ ID NO: 2477081 - RNA, 18 nt, Human
gugcacguggagagcugg

SEQ ID NO: 2477082 - RNA, 14 nt, Human
gugcacacaccaga

SEQ ID NO: 2477083 - RNA, 12 nt, Human
gugcacacacca

SEQ ID NO: 2477084 - RNA, 23 nt, Human
aacugcaggcccuggccuccccu

SEQ ID NO: 2477085 - RNA, 14 nt, Human
aacugcagggaaaa

SEQ ID NO: 2477086 - RNA, 23 nt, Human
aacugcagggaaaauuauuugca

SEQ ID NO: 2477087 - RNA, 14 nt, Human
aacugcaugcugcu

SEQ ID NO: 2477088 - RNA, 22 nt, Human
aacugcauuaccgcguuguaaa

SEQ ID NO: 2477089 - RNA, 16 nt, Human
aacugcaugcugcugg

SEQ ID NO: 2477090 - RNA, 21 nt, Human
aacugcauuaccgcguuguaa

SEQ ID NO: 2477091 - RNA, 21 nt, Human
gugcauuugaggucuguucuu

SEQ ID NO: 2477092 - RNA, 22 nt, Human
gugcauuugaggucuguucuuu

SEQ ID NO: 2477093 - RNA, 20 nt, Human
gugcauuugaggucuguucu

SEQ ID NO: 2477094 - RNA, 21 nt, Human
gugcacguggcauguggccug

SEQ ID NO: 2477095 - RNA, 21 nt, Human
gugcacguggagagcuggugc

SEQ ID NO: 2477096 - RNA, 15 nt, Human
gugcauuuggugguu

SEQ ID NO: 2477097 - RNA, 23 nt, Human
gugccaacacucaagaagcaggc

SEQ ID NO: 2477098 - RNA, 22 nt, Human
gugccaacacucaagaagcagg

SEQ ID NO: 2477099 - RNA, 18 nt, Human
gugcacguggcauguggc

SEQ ID NO: 2477100 - RNA, 21 nt, Human
gugccaacaguguuaggccug

SEQ ID NO: 2477101 - RNA, 14 nt, Human
gugccaagcacagu

SEQ ID NO: 2477102 - RNA, 16 nt, Human
gugccaagcacagugc

SEQ ID NO: 2477103 - RNA, 14 nt, Human
gugccaagcagagg

SEQ ID NO: 2477104 - RNA, 17 nt, Human
gugccaagcacagugcc

SEQ ID NO: 2477105 - RNA, 18 nt, Human
gugccaagcacagugccu

SEQ ID NO: 2477106 - RNA, 19 nt, Human
gugccaagcacagugccug

SEQ ID NO: 2477107 - RNA, 23 nt, Human
gugccugccugggaguuuuguau

SEQ ID NO: 2477108 - RNA, 11 nt, Human
gugccugcagc

SEQ ID NO: 2477109 - RNA, 16 nt, Human
gugccuggccacgccc

SEQ ID NO: 2477110 - RNA, 22 nt, Human
gugccuggacauuugccuugcu

SEQ ID NO: 2477111 - RNA, 14 nt, Human
gugccuggcucaga

SEQ ID NO: 2477112 - RNA, 12 nt, Human
gugccuggcuca

SEQ ID NO: 2477113 - RNA, 19 nt, Human
gugccuggccuggcacaca

SEQ ID NO: 2477114 - RNA, 15 nt, Human
gugccuggccuggca

SEQ ID NO: 2477115 - RNA, 12 nt, Human
gugccuggccug

SEQ ID NO: 2477116 - RNA, 18 nt, Human
gugccuggcucagagcca

SEQ ID NO: 2477117 - RNA, 16 nt, Human
gugccuggcucagagc

SEQ ID NO: 2477118 - RNA, 15 nt, Human
gugccugggaaugua

SEQ ID NO: 2477119 - RNA, 20 nt, Human
gugccuggcucagagccagu

SEQ ID NO: 2477120 - RNA, 16 nt, Human
gugccugggaauguau

SEQ ID NO: 2477121 - RNA, 17 nt, Human
gugccugggaauguauu

SEQ ID NO: 2477122 - RNA, 19 nt, Human
gugccaauauguauuguaa

SEQ ID NO: 2477123 - RNA, 17 nt, Human
gugccaauauguauugu

SEQ ID NO: 2477124 - RNA, 15 nt, Human
gugccaauauguauu

SEQ ID NO: 2477125 - RNA, 14 nt, Human
gugccucugggacu

SEQ ID NO: 2477126 - RNA, 15 nt, Human
gugccucugggacug

SEQ ID NO: 2477127 - RNA, 17 nt, Human
gugccugagaggcaggc

SEQ ID NO: 2477128 - RNA, 16 nt, Human
gugccugagaggcagg

SEQ ID NO: 2477129 - RNA, 15 nt, Human
gugccugagaggcag

SEQ ID NO: 2477130 - RNA, 14 nt, Human
gugccugagaggca

SEQ ID NO: 2477131 - RNA, 21 nt, Human
gugccaauauguauuguaaac

SEQ ID NO: 2477132 - RNA, 20 nt, Human
gugccaauauguauuguaaa

SEQ ID NO: 2477133 - RNA, 22 nt, Human
gugccaauggaaccuccuuucu

SEQ ID NO: 2477134 - RNA, 22 nt, Human
gugccugauucggcugucucag

SEQ ID NO: 2477135 - RNA, 21 nt, Human
gugccugauucggcugucuca

SEQ ID NO: 2477136 - RNA, 19 nt, Human
gugccugauucggcugucu

SEQ ID NO: 2477137 - RNA, 18 nt, Human
gugccugauucggcuguc

SEQ ID NO: 2477138 - RNA, 23 nt, Human
gugccugauccagccucuccccu

SEQ ID NO: 2477139 - RNA, 20 nt, Human
gugccugauccagccucucc

SEQ ID NO: 2477140 - RNA, 18 nt, Human
gugccugagaggcaggca

SEQ ID NO: 2477141 - RNA, 12 nt, Human
gugccugagagu

SEQ ID NO: 2477142 - RNA, 20 nt, Human
aacuuguaauuuuuuuaauu

SEQ ID NO: 2477143 - RNA, 15 nt, Human
aacuuguaaaugugg

SEQ ID NO: 2477144 - RNA, 15 nt, Human
aacuuguaaauacac

SEQ ID NO: 2477145 - RNA, 15 nt, Human
aacuuguaaaugcug

SEQ ID NO: 2477146 - RNA, 18 nt, Human
aacuuguaaaugcuguca

SEQ ID NO: 2477147 - RNA, 23 nt, Human
aacuugguucccauuugcuccuu

SEQ ID NO: 2477148 - RNA, 14 nt, Human
aacuuguaaauaca

SEQ ID NO: 2477149 - RNA, 14 nt, Human
aacuuggcgcugcc

SEQ ID NO: 2477150 - RNA, 15 nt, Human
aacuuggauuuuuga

SEQ ID NO: 2477151 - RNA, 12 nt, Human
aacuuggagccg

SEQ ID NO: 2477152 - RNA, 23 nt, Human
aacuuggaauuuguaaccucagc

SEQ ID NO: 2477153 - RNA, 15 nt, Human
aacuuggagccccag

SEQ ID NO: 2477154 - RNA, 22 nt, Human
gugccuggguggacauggcccc

SEQ ID NO: 2477155 - RNA, 17 nt, Human
gugccuggguggggcug

SEQ ID NO: 2477156 - RNA, 23 nt, Human
aacuuggaaaaauccagaaagaa

SEQ ID NO: 2477157 - RNA, 14 nt, Human
aacuuggaaauagu

SEQ ID NO: 2477158 - RNA, 22 nt, Human
aagaaaaaggaugcacagaguu

SEQ ID NO: 2477159 - RNA, 20 nt, Human
aagaaaaagucauccaaucu

SEQ ID NO: 2477160 - RNA, 19 nt, Human
aagaaaaaggaugcacaga

SEQ ID NO: 2477161 - RNA, 20 nt, Human
aagaaaaaggaugcacagag

SEQ ID NO: 2477162 - RNA, 18 nt, Human
aacuuguuacuaaagaaa

SEQ ID NO: 2477163 - RNA, 20 nt, Human
aacuugucuuuuucuggacu

SEQ ID NO: 2477164 - RNA, 17 nt, Human
aacuuguauuaaagaca

SEQ ID NO: 2477165 - RNA, 18 nt, Human
aagaaaacaucuauucuc

SEQ ID NO: 2477166 - RNA, 14 nt, Human
aagaaaaaucaugu

SEQ ID NO: 2477167 - RNA, 13 nt, Human
aagaaaaaucaug

SEQ ID NO: 2477168 - RNA, 11 nt, Human
aagaaaagaua

SEQ ID NO: 2477169 - RNA, 16 nt, Human
aagaaaagagcuuucu

SEQ ID NO: 2477170 - RNA, 23 nt, Human
aagaaaagagauauuuuaaaaug

SEQ ID NO: 2477171 - RNA, 14 nt, Human
aagaaaacccaccc

SEQ ID NO: 2477172 - RNA, 12 nt, Human
aagaaaagauuu

SEQ ID NO: 2477173 - RNA, 22 nt, Human
aagaaaagauuuuaaucaaguu

SEQ ID NO: 2477174 - RNA, 22 nt, Human
aagaaaaguagguuuacauuca

SEQ ID NO: 2477175 - RNA, 19 nt, Human
aagaaaagugaaugcucaa

SEQ ID NO: 2477176 - RNA, 15 nt, Human
aagaaaagauaaaga

SEQ ID NO: 2477177 - RNA, 15 nt, Human
aagaaaagugggcca

SEQ ID NO: 2477178 - RNA, 18 nt, Human
aagaaaauaaaaaaaaga

SEQ ID NO: 2477179 - RNA, 21 nt, Human
aagaaaauaaaaaaaagaaaa

SEQ ID NO: 2477180 - RNA, 13 nt, Human
aagaaaauaaaaa

SEQ ID NO: 2477181 - RNA, 16 nt, Human
aagaaaagugguuguu

SEQ ID NO: 2477182 - RNA, 16 nt, Human
aagaaaagugggccag

SEQ ID NO: 2477183 - RNA, 22 nt, Human
aagaaaauaaaaaaaagaaaaa

SEQ ID NO: 2477184 - RNA, 23 nt, Human
aagaaaauaaaaaaaagaaaaaa

SEQ ID NO: 2477185 - RNA, 19 nt, Human
aagaaaauacauaagacca

SEQ ID NO: 2477186 - RNA, 22 nt, Human
aagaaaguugcacggcugcuga

SEQ ID NO: 2477187 - RNA, 20 nt, Human
aagaaaguugcacggcugcu

SEQ ID NO: 2477188 - RNA, 23 nt, Human
aagaaauaaaaggaagccaaaga

SEQ ID NO: 2477189 - RNA, 21 nt, Human
aagaaauaaaaggaagccaaa

SEQ ID NO: 2477190 - RNA, 16 nt, Human
aagaaaauugcugugc

SEQ ID NO: 2477191 - RNA, 16 nt, Human
aagaaaggguguuuuu

SEQ ID NO: 2477192 - RNA, 13 nt, Human
aagaaaauaucac

SEQ ID NO: 2477193 - RNA, 13 nt, Human
aagaaaauauuuu

SEQ ID NO: 2477194 - RNA, 11 nt, Human
aagaaaauauu

SEQ ID NO: 2477195 - RNA, 13 nt, Human
aagaaaauaugca

SEQ ID NO: 2477196 - RNA, 20 nt, Human
aagaaaaucauauugcuucu

SEQ ID NO: 2477197 - RNA, 17 nt, Human
aagaaaaucauauugcu

SEQ ID NO: 2477198 - RNA, 22 nt, Human
aagaaaaucuauuuuguaacuu

SEQ ID NO: 2477199 - RNA, 15 nt, Human
aagaaaauauuuugu

SEQ ID NO: 2477200 - RNA, 14 nt, Human
aagaaaauauuuug

SEQ ID NO: 2477201 - RNA, 13 nt, Human
aagaaaaucacuu

SEQ ID NO: 2477202 - RNA, 15 nt, Human
aagaaaaucauauug

SEQ ID NO: 2477203 - RNA, 20 nt, Human
aagaaaauauuuugucuaaa

SEQ ID NO: 2477204 - RNA, 23 nt, Human
aagaaaaucagauggagcaugaa

SEQ ID NO: 2477205 - RNA, 17 nt, Human
aagaagcccaggaaagg

SEQ ID NO: 2477206 - RNA, 16 nt, Human
aagaagcccaggaaag

SEQ ID NO: 2477207 - RNA, 22 nt, Human
aagaagcaccaaucaugaauua

SEQ ID NO: 2477208 - RNA, 19 nt, Human
aagaagcaggcuacacuga

SEQ ID NO: 2477209 - RNA, 14 nt, Human
aagaagcaggcuac

SEQ ID NO: 2477210 - RNA, 12 nt, Human
aagaagcaggcu

SEQ ID NO: 2477211 - RNA, 19 nt, Human
aagaagccacagaccuagg

SEQ ID NO: 2477212 - RNA, 15 nt, Human
aagaagcccccagcu

SEQ ID NO: 2477213 - RNA, 16 nt, Human
aagaagcccccagcua

SEQ ID NO: 2477214 - RNA, 19 nt, Human
aagaagcccccagcuaaga

SEQ ID NO: 2477215 - RNA, 14 nt, Human
aagaagcucucucc

SEQ ID NO: 2477216 - RNA, 15 nt, Human
aagaagcucucuccu

SEQ ID NO: 2477217 - RNA, 17 nt, Human
aagaagccgggaacaga

SEQ ID NO: 2477218 - RNA, 14 nt, Human
aagaagcuguugua

SEQ ID NO: 2477219 - RNA, 19 nt, Human
aagaaggcagcagguggca

SEQ ID NO: 2477220 - RNA, 24 nt, Human
guggacacagcucuucuccaggcu

SEQ ID NO: 2477221 - RNA, 17 nt, Human
guggacacagcucuucu

SEQ ID NO: 2477222 - RNA, 15 nt, Human
guggacacagcucuu

SEQ ID NO: 2477223 - RNA, 14 nt, Human
guggacacagcucu

SEQ ID NO: 2477224 - RNA, 14 nt, Human
guggacuaaaagau

SEQ ID NO: 2477225 - RNA, 23 nt, Human
guggacuaaaagauauaagugcu

SEQ ID NO: 2477226 - RNA, 15 nt, Human
guggacuaaaagaua

SEQ ID NO: 2477227 - RNA, 21 nt, Human
guggacaccaggagucccugg

SEQ ID NO: 2477228 - RNA, 22 nt, Human
guggacaccaggagucccuggu

SEQ ID NO: 2477229 - RNA, 20 nt, Human
guggaaggcaucagucccua

SEQ ID NO: 2477230 - RNA, 15 nt, Human
guggacaccaggagu

SEQ ID NO: 2477231 - RNA, 18 nt, Human
guggaagaagggagaaga

SEQ ID NO: 2477232 - RNA, 16 nt, Human
guggaagaagggagaa

SEQ ID NO: 2477233 - RNA, 15 nt, Human
guggaagaagggaga

SEQ ID NO: 2477234 - RNA, 17 nt, Human
guggaagaagagggaga

SEQ ID NO: 2477235 - RNA, 14 nt, Human
guggaagagggcug

SEQ ID NO: 2477236 - RNA, 17 nt, Human
guggaagaggggacagg

SEQ ID NO: 2477237 - RNA, 16 nt, Human
guggaagaggggacag

SEQ ID NO: 2477238 - RNA, 15 nt, Human
guggaagaggggaca

SEQ ID NO: 2477239 - RNA, 20 nt, Human
guggaagaagggagaagaaa

SEQ ID NO: 2477240 - RNA, 17 nt, Human
guggaagagggcugcaa

SEQ ID NO: 2477241 - RNA, 20 nt, Human
guggaauuauuuuaaaagau

SEQ ID NO: 2477242 - RNA, 18 nt, Human
guggaagcccuccuucca

SEQ ID NO: 2477243 - RNA, 16 nt, Human
guggaagcccuccuuc

SEQ ID NO: 2477244 - RNA, 17 nt, Human
guggaagcccuccuucc

SEQ ID NO: 2477245 - RNA, 20 nt, Human
guggaagaggggacaggucc

SEQ ID NO: 2477246 - RNA, 13 nt, Human
guggaagcccucc

SEQ ID NO: 2477247 - RNA, 14 nt, Human
guggaagcccuccu

SEQ ID NO: 2477248 - RNA, 16 nt, Human
guggaagaagagggag

SEQ ID NO: 2477249 - RNA, 23 nt, Human
gugcuguggccagggugagagcu

SEQ ID NO: 2477250 - RNA, 16 nt, Human
gugcuguggccugggc

SEQ ID NO: 2477251 - RNA, 17 nt, Human
gugcuguggccugggca

SEQ ID NO: 2477252 - RNA, 18 nt, Human
gugcuguggccaggguga

SEQ ID NO: 2477253 - RNA, 17 nt, Human
gugcuguggccagggug

SEQ ID NO: 2477254 - RNA, 16 nt, Human
gugcuguggccagggu

SEQ ID NO: 2477255 - RNA, 15 nt, Human
gugcuguggccaggg

SEQ ID NO: 2477256 - RNA, 14 nt, Human
gugcuguggccagg

SEQ ID NO: 2477257 - RNA, 14 nt, Human
gugcuguggaagca

SEQ ID NO: 2477258 - RNA, 11 nt, Human
gugcuguggcc

SEQ ID NO: 2477259 - RNA, 13 nt, Human
gugcuguggaagc

SEQ ID NO: 2477260 - RNA, 16 nt, Human
gugcugugcccaaguu

SEQ ID NO: 2477261 - RNA, 15 nt, Human
gugcugugcccaagu

SEQ ID NO: 2477262 - RNA, 20 nt, Human
gugcugucugaucugugcuu

SEQ ID NO: 2477263 - RNA, 12 nt, Human
gugcugugaaaa

SEQ ID NO: 2477264 - RNA, 17 nt, Human
gugcuguauaaaaucag

SEQ ID NO: 2477265 - RNA, 16 nt, Human
gugcuguauaaaauca

SEQ ID NO: 2477266 - RNA, 21 nt, Human
gugcuguauaaaaucagccaa

SEQ ID NO: 2477267 - RNA, 18 nt, Human
gugcuguccucagguggc

SEQ ID NO: 2477268 - RNA, 19 nt, Human
gugcuggauggagcccagg

SEQ ID NO: 2477269 - RNA, 18 nt, Human
gugcuggauggagcccag

SEQ ID NO: 2477270 - RNA, 18 nt, Human
gugcuggcaccaccaggc

SEQ ID NO: 2477271 - RNA, 15 nt, Human
gugcuggcaaccacu

SEQ ID NO: 2477272 - RNA, 16 nt, Human
gugcugggccccugcc

SEQ ID NO: 2477273 - RNA, 24 nt, Human
gugcuggaggugggagcaggagau

SEQ ID NO: 2477274 - RNA, 21 nt, Human
gugcuggaggugggagcagga

SEQ ID NO: 2477275 - RNA, 19 nt, Human
gugcuggaggugggagcag

SEQ ID NO: 2477276 - RNA, 17 nt, Human
gugcuggaggugggagc

SEQ ID NO: 2477277 - RNA, 16 nt, Human
gugcuggaggugggag

SEQ ID NO: 2477278 - RNA, 16 nt, Human
gugcuggaggacugag

SEQ ID NO: 2477279 - RNA, 14 nt, Human
gugcuggaggacug

SEQ ID NO: 2477280 - RNA, 19 nt, Human
gugcuggagccacuaacua

SEQ ID NO: 2477281 - RNA, 18 nt, Human
gugcuggagccacuaacu

SEQ ID NO: 2477282 - RNA, 15 nt, Human
gugcuggagccacua

SEQ ID NO: 2477283 - RNA, 12 nt, Human
gugcuggagcca

SEQ ID NO: 2477284 - RNA, 15 nt, Human
gugcugguguccuga

SEQ ID NO: 2477285 - RNA, 13 nt, Human
gugcugguguccu

SEQ ID NO: 2477286 - RNA, 23 nt, Human
gugcugguguccugaccacccuc

SEQ ID NO: 2477287 - RNA, 20 nt, Human
gugcugguguccugaccacc

SEQ ID NO: 2477288 - RNA, 19 nt, Human
gugcugguguccugaccac

SEQ ID NO: 2477289 - RNA, 16 nt, Human
gugcugguguccugac

SEQ ID NO: 2477290 - RNA, 15 nt, Human
gugcuguauaaaauc

SEQ ID NO: 2477291 - RNA, 13 nt, Human
gugcuguauaaaa

SEQ ID NO: 2477292 - RNA, 20 nt, Human
gugcuggauggagcccaggc

SEQ ID NO: 2477293 - RNA, 19 nt, Human
gugcugggccccugccucu

SEQ ID NO: 2477294 - RNA, 20 nt, Human
gugcugcccugcccaccugg

SEQ ID NO: 2477295 - RNA, 19 nt, Human
gugcugcccugcccaccug

SEQ ID NO: 2477296 - RNA, 21 nt, Human
gugcugcccugcccaccuggc

SEQ ID NO: 2477297 - RNA, 18 nt, Human
gugcuggaauucuaacaa

SEQ ID NO: 2477298 - RNA, 16 nt, Human
gugcugcuucccucug

SEQ ID NO: 2477299 - RNA, 13 nt, Human
gugcugcuucccu

SEQ ID NO: 2477300 - RNA, 15 nt, Human
gugcugcugcugcug

SEQ ID NO: 2477301 - RNA, 17 nt, Human
aagaagggagaagaaag

SEQ ID NO: 2477302 - RNA, 15 nt, Human
aagaagggagaagaa

SEQ ID NO: 2477303 - RNA, 14 nt, Human
aagaagggagaaga

SEQ ID NO: 2477304 - RNA, 22 nt, Human
aagaagggcuagaaccuggagg

SEQ ID NO: 2477305 - RNA, 13 nt, Human
aagaagggaugga

SEQ ID NO: 2477306 - RNA, 23 nt, Human
aagaagguuucagaaagaagugg

SEQ ID NO: 2477307 - RNA, 17 nt, Human
aagaaggguccuucccu

SEQ ID NO: 2477308 - RNA, 21 nt, Human
aagaaggguccuucccucucc

SEQ ID NO: 2477309 - RNA, 24 nt, Human
aagaaggguccuucccucucccca

SEQ ID NO: 2477310 - RNA, 18 nt, Human
gugcugcccugcccaccu

SEQ ID NO: 2477311 - RNA, 18 nt, Human
aagaagguuuguguuuuu

SEQ ID NO: 2477312 - RNA, 21 nt, Human
aagaagguuaccaagaagccu

SEQ ID NO: 2477313 - RNA, 15 nt, Human
aagaaguaggcauga

SEQ ID NO: 2477314 - RNA, 13 nt, Human
aagaauauucagg

SEQ ID NO: 2477315 - RNA, 11 nt, Human
aagaauauuug

SEQ ID NO: 2477316 - RNA, 17 nt, Human
guggcagcugcggucca

SEQ ID NO: 2477317 - RNA, 19 nt, Human
guggcagagcuuggacugg

SEQ ID NO: 2477318 - RNA, 13 nt, Human
aagaauauuuuaa

SEQ ID NO: 2477319 - RNA, 21 nt, Human
aagaaucacaauaauuuucua

SEQ ID NO: 2477320 - RNA, 15 nt, Human
aagaauauuugaaug

SEQ ID NO: 2477321 - RNA, 15 nt, Human
aagaauguuuauagc

SEQ ID NO: 2477322 - RNA, 16 nt, Human
aagaauugaacccagg

SEQ ID NO: 2477323 - RNA, 18 nt, Human
aagaauugaacccaggag

SEQ ID NO: 2477324 - RNA, 20 nt, Human
aagaauuucuugguaagaag

SEQ ID NO: 2477325 - RNA, 22 nt, Human
aagaauuucuugguaagaagcc

SEQ ID NO: 2477326 - RNA, 23 nt, Human
aagaauuucuugguaagaagccg

SEQ ID NO: 2477327 - RNA, 16 nt, Human
aagaauuauuuugaug

SEQ ID NO: 2477328 - RNA, 19 nt, Human
aagaauucaaacuggggcc

SEQ ID NO: 2477329 - RNA, 18 nt, Human
aagaauuuuaaaaaugaa

SEQ ID NO: 2477330 - RNA, 17 nt, Human
aagaauuuuaaaaauga

SEQ ID NO: 2477331 - RNA, 16 nt, Human
aagaauuuuaaaaaug

SEQ ID NO: 2477332 - RNA, 15 nt, Human
aagaauuuuaaaaau

SEQ ID NO: 2477333 - RNA, 14 nt, Human
aagaauuuuaaaaa

SEQ ID NO: 2477334 - RNA, 13 nt, Human
aagaauuuuaaaa

SEQ ID NO: 2477335 - RNA, 20 nt, Human
aagaauuuucagaccccagc

SEQ ID NO: 2477336 - RNA, 13 nt, Human
aagaauuuuuaaa

SEQ ID NO: 2477337 - RNA, 20 nt, Human
aagaauuuuaaaaaugaauc

SEQ ID NO: 2477338 - RNA, 19 nt, Human
aagaauuuuaaaaaugaau

SEQ ID NO: 2477339 - RNA, 22 nt, Human
aagaauuuucagaccccagcgg

SEQ ID NO: 2477340 - RNA, 13 nt, Human
aagacccaaaagg

SEQ ID NO: 2477341 - RNA, 23 nt, Human
aagaccagagauaguggggagac

SEQ ID NO: 2477342 - RNA, 22 nt, Human
guggcagcucaccucucccuug

SEQ ID NO: 2477343 - RNA, 14 nt, Human
guggcagcugcggu

SEQ ID NO: 2477344 - RNA, 23 nt, Human
guggcagagcuuggacuggaugc

SEQ ID NO: 2477345 - RNA, 15 nt, Human
guggcagagcuugga

SEQ ID NO: 2477346 - RNA, 19 nt, Human
guggcacuuuuucauuugc

SEQ ID NO: 2477347 - RNA, 20 nt, Human
guggcagauaaucagccucu

SEQ ID NO: 2477348 - RNA, 21 nt, Human
guggcagauaaucagccucuu

SEQ ID NO: 2477349 - RNA, 23 nt, Human
guggcagauaaucagccucuuaa

SEQ ID NO: 2477350 - RNA, 16 nt, Human
guggcacaggcccccu

SEQ ID NO: 2477351 - RNA, 13 nt, Human
guggcaccagcag

SEQ ID NO: 2477352 - RNA, 14 nt, Human
guggcaccagcagc

SEQ ID NO: 2477353 - RNA, 21 nt, Human
guggauuuaacagaaauguac

SEQ ID NO: 2477354 - RNA, 23 nt, Human
guggacucuuugguggcuuugca

SEQ ID NO: 2477355 - RNA, 18 nt, Human
guggacucuuugguggcu

SEQ ID NO: 2477356 - RNA, 17 nt, Human
guggacucuuugguggc

SEQ ID NO: 2477357 - RNA, 13 nt, Human
guggacuggaagg

SEQ ID NO: 2477358 - RNA, 14 nt, Human
guggacucagggca

SEQ ID NO: 2477359 - RNA, 15 nt, Human
guggacucagggcag

SEQ ID NO: 2477360 - RNA, 16 nt, Human
guggacucagggcagc

SEQ ID NO: 2477361 - RNA, 21 nt, Human
guggacucagggcagcgccag

SEQ ID NO: 2477362 - RNA, 21 nt, Human
guggacuccagacucucugug

SEQ ID NO: 2477363 - RNA, 17 nt, Human
guggacucugcacaugu

SEQ ID NO: 2477364 - RNA, 14 nt, Human
guggacucugcaca

SEQ ID NO: 2477365 - RNA, 14 nt, Human
guggacuccagacu

SEQ ID NO: 2477366 - RNA, 20 nt, Human
guggauuuaacagaaaugua

SEQ ID NO: 2477367 - RNA, 16 nt, Human
guggacuggccccugg

SEQ ID NO: 2477368 - RNA, 15 nt, Human
guggacuggccccug

SEQ ID NO: 2477369 - RNA, 21 nt, Human
guggauuuugguuuuguuccc

SEQ ID NO: 2477370 - RNA, 23 nt, Human
guggauuuaacagaaauguacag

SEQ ID NO: 2477371 - RNA, 15 nt, Human
guggcaaggcugugc

SEQ ID NO: 2477372 - RNA, 13 nt, Human
guggcaaggcugu

SEQ ID NO: 2477373 - RNA, 12 nt, Human
guggcacaggcc

SEQ ID NO: 2477374 - RNA, 16 nt, Human
guggcaaggcugugcu

SEQ ID NO: 2477375 - RNA, 22 nt, Human
guggcacacaccuguaguccca

SEQ ID NO: 2477376 - RNA, 22 nt, Human
guggcaaagccuucauugccuu

SEQ ID NO: 2477377 - RNA, 21 nt, Human
guggcaagcugugacuucucc

SEQ ID NO: 2477378 - RNA, 20 nt, Human
uaaaucuccaaaauaaaacu

SEQ ID NO: 2477379 - RNA, 21 nt, Human
uaaaucuccaaaauaaaacuu

SEQ ID NO: 2477380 - RNA, 18 nt, Human
uaaaugagcuauguauua

SEQ ID NO: 2477381 - RNA, 16 nt, Human
uaaaugagcuauguau

SEQ ID NO: 2477382 - RNA, 12 nt, Human
uaaaugaauguu

SEQ ID NO: 2477383 - RNA, 19 nt, Human
uaaaucuaguauacauugu

SEQ ID NO: 2477384 - RNA, 13 nt, Human
uaaaugaauguuu

SEQ ID NO: 2477385 - RNA, 15 nt, Human
uaaauguugacaugg

SEQ ID NO: 2477386 - RNA, 17 nt, Human
uaaaugauuucauucaa

SEQ ID NO: 2477387 - RNA, 17 nt, Human
uaaaugauucuuaguga

SEQ ID NO: 2477388 - RNA, 21 nt, Human
uaaaugauguggugccugagg

SEQ ID NO: 2477389 - RNA, 17 nt, Human
uaaaugaggggccucag

SEQ ID NO: 2477390 - RNA, 22 nt, Human
uaaauuaacuuuuauaaacuuu

SEQ ID NO: 2477391 - RNA, 15 nt, Human
uaaauuaagacaugc

SEQ ID NO: 2477392 - RNA, 12 nt, Human
uaaauuaagaca

SEQ ID NO: 2477393 - RNA, 20 nt, Human
uaaauguuuuucuauguagu

SEQ ID NO: 2477394 - RNA, 18 nt, Human
uaaauguuuuucuaugua

SEQ ID NO: 2477395 - RNA, 20 nt, Human
uaaauguuuuuuuuuaaaga

SEQ ID NO: 2477396 - RNA, 19 nt, Human
uaaauuacaauugucauuu

SEQ ID NO: 2477397 - RNA, 13 nt, Human
uaaauuaaucuuu

SEQ ID NO: 2477398 - RNA, 13 nt, Human
uaaauuaagacau

SEQ ID NO: 2477399 - RNA, 14 nt, Human
uaaauuaggaauaa

SEQ ID NO: 2477400 - RNA, 17 nt, Human
uaaauuaggaauaaaua

SEQ ID NO: 2477401 - RNA, 18 nt, Human
uaaauuaguauuuauuua

SEQ ID NO: 2477402 - RNA, 21 nt, Human
uaaauuaggaauaaauaaaaa

SEQ ID NO: 2477403 - RNA, 22 nt, Human
uaaauuaggaauaaauaaaaau

SEQ ID NO: 2477404 - RNA, 18 nt, Human
uaacaagaaacucacccc

SEQ ID NO: 2477405 - RNA, 16 nt, Human
uaacaagaucuuucag

SEQ ID NO: 2477406 - RNA, 17 nt, Human
uaacaagaucuuucagg

SEQ ID NO: 2477407 - RNA, 18 nt, Human
uaacaagaucuuucagga

SEQ ID NO: 2477408 - RNA, 14 nt, Human
uaacaagaaacuca

SEQ ID NO: 2477409 - RNA, 13 nt, Human
uaacaacuaggga

SEQ ID NO: 2477410 - RNA, 14 nt, Human
uaacaaccuggaga

SEQ ID NO: 2477411 - RNA, 22 nt, Human
uaacaacuaugauuuggaaaau

SEQ ID NO: 2477412 - RNA, 21 nt, Human
uaacaacuaugauuuggaaaa

SEQ ID NO: 2477413 - RNA, 16 nt, Human
uaacaacuaugauuug

SEQ ID NO: 2477414 - RNA, 17 nt, Human
uaacaaugcuguauuuu

SEQ ID NO: 2477415 - RNA, 15 nt, Human
uaacaaugcuguauu

SEQ ID NO: 2477416 - RNA, 16 nt, Human
uaacaagguccaagau

SEQ ID NO: 2477417 - RNA, 15 nt, Human
uaacaagcucccagg

SEQ ID NO: 2477418 - RNA, 13 nt, Human
uaacaagccaccc

SEQ ID NO: 2477419 - RNA, 18 nt, Human
uaaauuuuacccuuuaga

SEQ ID NO: 2477420 - RNA, 16 nt, Human
uaaauuuuacccuuua

SEQ ID NO: 2477421 - RNA, 15 nt, Human
uaaauuuuaauuuau

SEQ ID NO: 2477422 - RNA, 16 nt, Human
uaaauuuugaguucua

SEQ ID NO: 2477423 - RNA, 16 nt, Human
uaaauuuuuuuccuua

SEQ ID NO: 2477424 - RNA, 19 nt, Human
uaaauuuuuuuuguuucau

SEQ ID NO: 2477425 - RNA, 23 nt, Human
uaacaaaaaaauauauuuaauga

SEQ ID NO: 2477426 - RNA, 20 nt, Human
uaacaaaaaaauauauuuaa

SEQ ID NO: 2477427 - RNA, 22 nt, Human
uaacaaaacacucggcauuuca

SEQ ID NO: 2477428 - RNA, 18 nt, Human
uaacaaaaacuacacaua

SEQ ID NO: 2477429 - RNA, 12 nt, Human
uaacaaauuaug

SEQ ID NO: 2477430 - RNA, 15 nt, Human
uaaauauaauucugu

SEQ ID NO: 2477431 - RNA, 13 nt, Human
uaaauauaauucu

SEQ ID NO: 2477432 - RNA, 19 nt, Human
uaaauauaauucuguaaau

SEQ ID NO: 2477433 - RNA, 18 nt, Human
uaaauauaauucuguaaa

SEQ ID NO: 2477434 - RNA, 16 nt, Human
uaaauauaauucugua

SEQ ID NO: 2477435 - RNA, 18 nt, Human
uaaauaguauuugagagu

SEQ ID NO: 2477436 - RNA, 19 nt, Human
uaaaucuccaaaauaaaac

SEQ ID NO: 2477437 - RNA, 18 nt, Human
uaaaucuaguauacauug

SEQ ID NO: 2477438 - RNA, 15 nt, Human
uaaaucuagacucaa

SEQ ID NO: 2477439 - RNA, 19 nt, Human
uaaauccuuuuucuuuaua

SEQ ID NO: 2477440 - RNA, 17 nt, Human
uaaauccuuuacuguua

SEQ ID NO: 2477441 - RNA, 23 nt, Human
uaaaucccauucauaacuuucau

SEQ ID NO: 2477442 - RNA, 19 nt, Human
uaaaucgcuuuugauaauc

SEQ ID NO: 2477443 - RNA, 18 nt, Human
uaaaucgcuuuugauaau

SEQ ID NO: 2477444 - RNA, 15 nt, Human
uaaaucccauucaua

SEQ ID NO: 2477445 - RNA, 17 nt, Human
uaaauccuuuuucuuua

SEQ ID NO: 2477446 - RNA, 17 nt, Human
uaaauacaaaacuucca

SEQ ID NO: 2477447 - RNA, 18 nt, Human
uaaauacacaacacacac

SEQ ID NO: 2477448 - RNA, 19 nt, Human
uaaauacacauagcaugua

SEQ ID NO: 2477449 - RNA, 23 nt, Human
uaaauacaccaccucacuccugu

SEQ ID NO: 2477450 - RNA, 15 nt, Human
uaaauagcuauaucc

SEQ ID NO: 2477451 - RNA, 16 nt, Human
uaaauagcuauaucca

SEQ ID NO: 2477452 - RNA, 17 nt, Human
uaaauagcuauauccau

SEQ ID NO: 2477453 - RNA, 18 nt, Human
uaaauagcuauauccaug

SEQ ID NO: 2477454 - RNA, 15 nt, Human
uaaauacagacacua

SEQ ID NO: 2477455 - RNA, 14 nt, Human
uaaauacagacacu

SEQ ID NO: 2477456 - RNA, 16 nt, Human
uaaauacagacacuaa

SEQ ID NO: 2477457 - RNA, 14 nt, Human
uaaauagcuauauc

SEQ ID NO: 2477458 - RNA, 20 nt, Human
uaaauaguaaaaauaaaauu

SEQ ID NO: 2477459 - RNA, 19 nt, Human
uaaauaguaaaaauaaaau

SEQ ID NO: 2477460 - RNA, 21 nt, Human
uaaauaggagaggaugagagc

SEQ ID NO: 2477461 - RNA, 16 nt, Human
uaaauaggagaggaug

SEQ ID NO: 2477462 - RNA, 22 nt, Human
uaaauagcuauauccauguacu

SEQ ID NO: 2477463 - RNA, 19 nt, Human
uaaauagcuauauccaugu

SEQ ID NO: 2477464 - RNA, 20 nt, Human
uaaauagcuauauccaugua

SEQ ID NO: 2477465 - RNA, 14 nt, Human
aauacacacucaaa

SEQ ID NO: 2477466 - RNA, 15 nt, Human
aauacaccacuacau

SEQ ID NO: 2477467 - RNA, 17 nt, Human
aauacacaaguaaacau

SEQ ID NO: 2477468 - RNA, 15 nt, Human
aauacacaaguaaac

SEQ ID NO: 2477469 - RNA, 21 nt, Human
aauacaccaccucacuccugu

SEQ ID NO: 2477470 - RNA, 20 nt, Human
aauacaccaccucacuccug

SEQ ID NO: 2477471 - RNA, 23 nt, Human
aauacacauagcauguaauggua

SEQ ID NO: 2477472 - RNA, 20 nt, Human
aauaauuaugaguuugcuua

SEQ ID NO: 2477473 - RNA, 18 nt, Human
aauaauuauccagaguuu

SEQ ID NO: 2477474 - RNA, 14 nt, Human
aauacaauaaguua

SEQ ID NO: 2477475 - RNA, 16 nt, Human
aauacaccacuacauu

SEQ ID NO: 2477476 - RNA, 18 nt, Human
aauacaccacuacauucu

SEQ ID NO: 2477477 - RNA, 20 nt, Human
aauacaccacuacauucugu

SEQ ID NO: 2477478 - RNA, 22 nt, Human
uaaauaaaugaaguauuucuca

SEQ ID NO: 2477479 - RNA, 22 nt, Human
uaaauaaauguaucuuauucac

SEQ ID NO: 2477480 - RNA, 22 nt, Human
aauacaccaccucacuccuguu

SEQ ID NO: 2477481 - RNA, 16 nt, Human
uaaauaaaugucauua

SEQ ID NO: 2477482 - RNA, 20 nt, Human
uaaauaaauuguauauucac

SEQ ID NO: 2477483 - RNA, 19 nt, Human
uaaauaaauuguauauuca

SEQ ID NO: 2477484 - RNA, 18 nt, Human
uaaauaaauuguauauuc

SEQ ID NO: 2477485 - RNA, 17 nt, Human
uaaauaaauuguauauu

SEQ ID NO: 2477486 - RNA, 16 nt, Human
uaaauaaauuguauau

SEQ ID NO: 2477487 - RNA, 15 nt, Human
uaaauaaauuguaua

SEQ ID NO: 2477488 - RNA, 14 nt, Human
uaaauaaauuguau

SEQ ID NO: 2477489 - RNA, 12 nt, Human
uaaauaaauugu

SEQ ID NO: 2477490 - RNA, 18 nt, Human
uaaauaaaugucauuaaa

SEQ ID NO: 2477491 - RNA, 15 nt, Human
uaaauaaauuguuug

SEQ ID NO: 2477492 - RNA, 13 nt, Human
uaaauaaauuguu

SEQ ID NO: 2477493 - RNA, 20 nt, Human
uaaauaaauuguuugaccau

SEQ ID NO: 2477494 - RNA, 22 nt, Human
uaaauaaauuguauauucacuu

SEQ ID NO: 2477495 - RNA, 21 nt, Human
uaaauaaauuguauauucacu

SEQ ID NO: 2477496 - RNA, 15 nt, Human
aauaacaauaaaaga

SEQ ID NO: 2477497 - RNA, 18 nt, Human
aauaaauuugguucuaau

SEQ ID NO: 2477498 - RNA, 21 nt, Human
aauaaauuugguucuaauaga

SEQ ID NO: 2477499 - RNA, 14 nt, Human
aauaaauucagaua

SEQ ID NO: 2477500 - RNA, 16 nt, Human
aauaacaagucgauga

SEQ ID NO: 2477501 - RNA, 12 nt, Human
aauaacauguaa

SEQ ID NO: 2477502 - RNA, 19 nt, Human
aauaacauguaauuaagua

SEQ ID NO: 2477503 - RNA, 22 nt, Human
aauaacauguaauuaaguacua

SEQ ID NO: 2477504 - RNA, 12 nt, Human
aauaaaugugcc

SEQ ID NO: 2477505 - RNA, 21 nt, Human
aauaaaugugccuucauuuuu

SEQ ID NO: 2477506 - RNA, 12 nt, Human
aauaaauuauuu

SEQ ID NO: 2477507 - RNA, 20 nt, Human
aauaaaugugaaauucuguc

SEQ ID NO: 2477508 - RNA, 18 nt, Human
aauaaauuaaaacaugca

SEQ ID NO: 2477509 - RNA, 17 nt, Human
aauaaauuauuuauuau

SEQ ID NO: 2477510 - RNA, 19 nt, Human
aauaaauauauauaaaccu

SEQ ID NO: 2477511 - RNA, 16 nt, Human
aauaaauauauauaaa

SEQ ID NO: 2477512 - RNA, 15 nt, Human
aauaaauauauauaa

SEQ ID NO: 2477513 - RNA, 14 nt, Human
aauaaauauauaua

SEQ ID NO: 2477514 - RNA, 16 nt, Human
aauaaauauauauauc

SEQ ID NO: 2477515 - RNA, 15 nt, Human
aauaaauauauauau

SEQ ID NO: 2477516 - RNA, 13 nt, Human
aauaaauauauau

SEQ ID NO: 2477517 - RNA, 12 nt, Human
aauaaauauaua

SEQ ID NO: 2477518 - RNA, 11 nt, Human
aauaaauauau

SEQ ID NO: 2477519 - RNA, 20 nt, Human
aauaaauaccucuuagcuga

SEQ ID NO: 2477520 - RNA, 19 nt, Human
aauaaauagcuauauccau

SEQ ID NO: 2477521 - RNA, 21 nt, Human
aauaaauagcuauauccaugu

SEQ ID NO: 2477522 - RNA, 18 nt, Human
aauaaaguaucaugcauu

SEQ ID NO: 2477523 - RNA, 17 nt, Human
aauaaaguaucaugcau

SEQ ID NO: 2477524 - RNA, 16 nt, Human
aauaaaguaucaugca

SEQ ID NO: 2477525 - RNA, 19 nt, Human
aauaaaguuugcuuagaaa

SEQ ID NO: 2477526 - RNA, 14 nt, Human
aauaaauaaaugca

SEQ ID NO: 2477527 - RNA, 12 nt, Human
aauaaauaaaug

SEQ ID NO: 2477528 - RNA, 13 nt, Human
aauaagcuaaaga

SEQ ID NO: 2477529 - RNA, 17 nt, Human
aauaagcaucaaacucu

SEQ ID NO: 2477530 - RNA, 14 nt, Human
aauaagcuaaagag

SEQ ID NO: 2477531 - RNA, 19 nt, Human
aauaacuacuguguuccug

SEQ ID NO: 2477532 - RNA, 17 nt, Human
aauaacuacuguguucc

SEQ ID NO: 2477533 - RNA, 18 nt, Human
aauaacuacuguguuccu

SEQ ID NO: 2477534 - RNA, 13 nt, Human
aauaacuacugug

SEQ ID NO: 2477535 - RNA, 14 nt, Human
aauaacuacugugu

SEQ ID NO: 2477536 - RNA, 15 nt, Human
aauaacuacuguguu

SEQ ID NO: 2477537 - RNA, 16 nt, Human
aauaacuacuguguuc

SEQ ID NO: 2477538 - RNA, 19 nt, Human
aauaacuaguguugcuugg

SEQ ID NO: 2477539 - RNA, 15 nt, Human
aauaacagugcauau

SEQ ID NO: 2477540 - RNA, 20 nt, Human
aauaacauaauuuguacaua

SEQ ID NO: 2477541 - RNA, 15 nt, Human
aauaacuaaaaggua

SEQ ID NO: 2477542 - RNA, 16 nt, Human
aauaaggucaaugcca

SEQ ID NO: 2477543 - RNA, 14 nt, Human
aauaagguugaaca

SEQ ID NO: 2477544 - RNA, 17 nt, Human
aauaaggccuuaauaug

SEQ ID NO: 2477545 - RNA, 18 nt, Human
uaaagugauuaaacgugc

SEQ ID NO: 2477546 - RNA, 16 nt, Human
uaaagugauuaaacgu

SEQ ID NO: 2477547 - RNA, 22 nt, Human
uaaagugauuaaacgugcagac

SEQ ID NO: 2477548 - RNA, 11 nt, Human
uaaagugauua

SEQ ID NO: 2477549 - RNA, 19 nt, Human
uaaagucgagcuuuucuaa

SEQ ID NO: 2477550 - RNA, 16 nt, Human
uaaagugauauuuccc

SEQ ID NO: 2477551 - RNA, 20 nt, Human
uaaagugagcucuaugggca

SEQ ID NO: 2477552 - RNA, 15 nt, Human
uaaagugauauuucc

SEQ ID NO: 2477553 - RNA, 16 nt, Human
uaaagugauaauuucu

SEQ ID NO: 2477554 - RNA, 13 nt, Human
uaaagucaggggu

SEQ ID NO: 2477555 - RNA, 19 nt, Human
uaaaggcuucucucucacc

SEQ ID NO: 2477556 - RNA, 17 nt, Human
uaaaggcuucucucuca

SEQ ID NO: 2477557 - RNA, 21 nt, Human
uaaagggaaaggauucaugug

SEQ ID NO: 2477558 - RNA, 17 nt, Human
uaaagucagguccaauu

SEQ ID NO: 2477559 - RNA, 20 nt, Human
uaaagucgagcuuuucuaaa

SEQ ID NO: 2477560 - RNA, 18 nt, Human
uaaagucagguccaauuu

SEQ ID NO: 2477561 - RNA, 13 nt, Human
uaaagucccaggu

SEQ ID NO: 2477562 - RNA, 15 nt, Human
uaaaguguauuuuuu

SEQ ID NO: 2477563 - RNA, 19 nt, Human
uaaaguguauuuuuuuacu

SEQ ID NO: 2477564 - RNA, 14 nt, Human
uaaaguguauuuuu

SEQ ID NO: 2477565 - RNA, 22 nt, Human
uaaaguggguuauucuggaguu

SEQ ID NO: 2477566 - RNA, 21 nt, Human
uaaaguggguuauucuggagu

SEQ ID NO: 2477567 - RNA, 16 nt, Human
uaaaguguaaauccuu

SEQ ID NO: 2477568 - RNA, 22 nt, Human
uaaaguguaaauccuuuuucuu

SEQ ID NO: 2477569 - RNA, 13 nt, Human
aauaaaaaaugga

SEQ ID NO: 2477570 - RNA, 17 nt, Human
aauaaaaaaaagaaaaa

SEQ ID NO: 2477571 - RNA, 18 nt, Human
aauaaaaaaaagaaaaaa

SEQ ID NO: 2477572 - RNA, 15 nt, Human
aauaaaaaaaagaaa

SEQ ID NO: 2477573 - RNA, 12 nt, Human
aauaaaaauaau

SEQ ID NO: 2477574 - RNA, 22 nt, Human
aauaaaaauauuguguugugaa

SEQ ID NO: 2477575 - RNA, 15 nt, Human
aauaaaaauaaauuc

SEQ ID NO: 2477576 - RNA, 16 nt, Human
aauaaaaauaaauuug

SEQ ID NO: 2477577 - RNA, 12 nt, Human
aauaaaaacaaa

SEQ ID NO: 2477578 - RNA, 22 nt, Human
aauaaaaaccaagaagaugucu

SEQ ID NO: 2477579 - RNA, 14 nt, Human
aauaaaaaccaaga

SEQ ID NO: 2477580 - RNA, 19 nt, Human
aauaaaaacugacuccuua

SEQ ID NO: 2477581 - RNA, 21 nt, Human
aauaaaaacugacuccuuaga

SEQ ID NO: 2477582 - RNA, 20 nt, Human
aauaaaaggaagccaaagag

SEQ ID NO: 2477583 - RNA, 21 nt, Human
aauaaaaggaagccaaagagu

SEQ ID NO: 2477584 - RNA, 16 nt, Human
aauaaaagugaccuuu

SEQ ID NO: 2477585 - RNA, 17 nt, Human
aauaaaaggaaaagcaa

SEQ ID NO: 2477586 - RNA, 14 nt, Human
aauaaaaggaaaag

SEQ ID NO: 2477587 - RNA, 13 nt, Human
aauaaaaggaaaa

SEQ ID NO: 2477588 - RNA, 12 nt, Human
aauaaaaggaaa

SEQ ID NO: 2477589 - RNA, 18 nt, Human
aauaaaagcagcaucugc

SEQ ID NO: 2477590 - RNA, 21 nt, Human
aauaaaagcagcaucugcuaa

SEQ ID NO: 2477591 - RNA, 16 nt, Human
aauaaaagauauaaau

SEQ ID NO: 2477592 - RNA, 14 nt, Human
aauaaaaauguuua

SEQ ID NO: 2477593 - RNA, 15 nt, Human
aauaaaaauguuuaa

SEQ ID NO: 2477594 - RNA, 13 nt, Human
aauaaaaauggau

SEQ ID NO: 2477595 - RNA, 22 nt, Human
aauaaaauccauacauuugugu

SEQ ID NO: 2477596 - RNA, 16 nt, Human
aauaaaaucuugaaaa

SEQ ID NO: 2477597 - RNA, 17 nt, Human
aauaaaauaauucuaaa

SEQ ID NO: 2477598 - RNA, 16 nt, Human
aauaaaauaauucuaa

SEQ ID NO: 2477599 - RNA, 14 nt, Human
aauaaaauaaaaau

SEQ ID NO: 2477600 - RNA, 15 nt, Human
aauaaaauaauucua

SEQ ID NO: 2477601 - RNA, 16 nt, Human
aauaaaguacaagagc

SEQ ID NO: 2477602 - RNA, 15 nt, Human
aauaaaguaucaugc

SEQ ID NO: 2477603 - RNA, 11 nt, Human
aauaaaguauc

SEQ ID NO: 2477604 - RNA, 15 nt, Human
aauaaaguauauaua

SEQ ID NO: 2477605 - RNA, 14 nt, Human
aauaaaguaauuau

SEQ ID NO: 2477606 - RNA, 18 nt, Human
aauaaaggaugugauugu

SEQ ID NO: 2477607 - RNA, 11 nt, Human
aauaaaaucau

SEQ ID NO: 2477608 - RNA, 18 nt, Human
aauaaaaucauguacauu

SEQ ID NO: 2477609 - RNA, 18 nt, Human
uaaagaaagagagaaaau

SEQ ID NO: 2477610 - RNA, 19 nt, Human
uaaagaaagagagaaaaua

SEQ ID NO: 2477611 - RNA, 20 nt, Human
uaaagaaagagagaaaauaa

SEQ ID NO: 2477612 - RNA, 21 nt, Human
uaaagaaagagagaaaauaaa

SEQ ID NO: 2477613 - RNA, 11 nt, Human
uaaagaaagau

SEQ ID NO: 2477614 - RNA, 22 nt, Human
uaaagaaagagagaaaauaaaa

SEQ ID NO: 2477615 - RNA, 23 nt, Human
uaaagaaagagagaaaauaaaaa

SEQ ID NO: 2477616 - RNA, 21 nt, Human
uaaagaaagucgaauuaauag

SEQ ID NO: 2477617 - RNA, 17 nt, Human
uaaagaaagucgaauua

SEQ ID NO: 2477618 - RNA, 11 nt, Human
uaaagaaaguc

SEQ ID NO: 2477619 - RNA, 15 nt, Human
uaaacucuguugcaa

SEQ ID NO: 2477620 - RNA, 20 nt, Human
uaaacucuucacaaaaucug

SEQ ID NO: 2477621 - RNA, 21 nt, Human
uaaacucucuuugggaauguu

SEQ ID NO: 2477622 - RNA, 18 nt, Human
uaaacucucuuugggaau

SEQ ID NO: 2477623 - RNA, 10 nt, Human
uaaacugcau

SEQ ID NO: 2477624 - RNA, 16 nt, Human
uaaacugacuuuaucc

SEQ ID NO: 2477625 - RNA, 15 nt, Human
uaaacugacuuuauc

SEQ ID NO: 2477626 - RNA, 14 nt, Human
uaaacugacuuuau

SEQ ID NO: 2477627 - RNA, 12 nt, Human
uaaacugccccc

SEQ ID NO: 2477628 - RNA, 16 nt, Human
uaaagaaagagagaaa

SEQ ID NO: 2477629 - RNA, 17 nt, Human
uaaagaaagagagaaaa

SEQ ID NO: 2477630 - RNA, 15 nt, Human
uaaagaaagagagaa

SEQ ID NO: 2477631 - RNA, 16 nt, Human
uaaacugcauuagaaa

SEQ ID NO: 2477632 - RNA, 14 nt, Human
uaaacucaaaauau

SEQ ID NO: 2477633 - RNA, 16 nt, Human
uaaacucaaaauauuu

SEQ ID NO: 2477634 - RNA, 19 nt, Human
uaaacucaaaauauuugua

SEQ ID NO: 2477635 - RNA, 21 nt, Human
uaaacucaaaauauuuguaca

SEQ ID NO: 2477636 - RNA, 20 nt, Human
uaaacucagggacagagcca

SEQ ID NO: 2477637 - RNA, 19 nt, Human
uaaacucagggacagagcc

SEQ ID NO: 2477638 - RNA, 11 nt, Human
uaaacucaggg

SEQ ID NO: 2477639 - RNA, 20 nt, Human
uaaacucaaaacuuaacaua

SEQ ID NO: 2477640 - RNA, 22 nt, Human
uaaacucaaaauauuuguacau

SEQ ID NO: 2477641 - RNA, 23 nt, Human
uaaacucaaaauauuuguacaua

SEQ ID NO: 2477642 - RNA, 22 nt, Human
uaaacucuaaacauuaaucaau

SEQ ID NO: 2477643 - RNA, 15 nt, Human
uaaacucuaaacauu

SEQ ID NO: 2477644 - RNA, 14 nt, Human
uaaacucuaaacau

SEQ ID NO: 2477645 - RNA, 15 nt, Human
uaaacuccuguccuu

SEQ ID NO: 2477646 - RNA, 14 nt, Human
uaaacuccuguccu

SEQ ID NO: 2477647 - RNA, 14 nt, Human
uaaacucauuuaua

SEQ ID NO: 2477648 - RNA, 19 nt, Human
uaaacuagcauaucugccu

SEQ ID NO: 2477649 - RNA, 17 nt, Human
uaaacuagcauaucugc

SEQ ID NO: 2477650 - RNA, 22 nt, Human
uaaacuagcauaucugccuuua

SEQ ID NO: 2477651 - RNA, 21 nt, Human
uaaacuagcauaucugccuuu

SEQ ID NO: 2477652 - RNA, 23 nt, Human
uaaacuagcauaucugccuuuau

SEQ ID NO: 2477653 - RNA, 14 nt, Human
uaaacuauauuuuc

SEQ ID NO: 2477654 - RNA, 13 nt, Human
uaaacuaucaguu

SEQ ID NO: 2477655 - RNA, 20 nt, Human
uaaacuaucuuggugaauuu

SEQ ID NO: 2477656 - RNA, 21 nt, Human
uaaacuaucuuggugaauuuu

SEQ ID NO: 2477657 - RNA, 14 nt, Human
uaaacuaucuuuuu

SEQ ID NO: 2477658 - RNA, 17 nt, Human
uaaacuaucaguuuguc

SEQ ID NO: 2477659 - RNA, 22 nt, Human
uaaacuaucuuggugaauuuuu

SEQ ID NO: 2477660 - RNA, 19 nt, Human
uaaacucaaaacuuaacau

SEQ ID NO: 2477661 - RNA, 15 nt, Human
uaaacucaaaacuua

SEQ ID NO: 2477662 - RNA, 15 nt, Human
uaaacuauuugucuu

SEQ ID NO: 2477663 - RNA, 18 nt, Human
uaaacgauuuaauucucu

SEQ ID NO: 2477664 - RNA, 22 nt, Human
uaaacgauuuaauucucuugaa

SEQ ID NO: 2477665 - RNA, 18 nt, Human
uaaaccucuaauuuauuu

SEQ ID NO: 2477666 - RNA, 15 nt, Human
uaaaccuuaaguaag

SEQ ID NO: 2477667 - RNA, 16 nt, Human
uaaaccuuaguacuga

SEQ ID NO: 2477668 - RNA, 18 nt, Human
uaaacggauuauuuuuuc

SEQ ID NO: 2477669 - RNA, 17 nt, Human
uaaacggauuauuuuuu

SEQ ID NO: 2477670 - RNA, 16 nt, Human
uaaacggauuauuuuu

SEQ ID NO: 2477671 - RNA, 15 nt, Human
uaaacggauuauuuu

SEQ ID NO: 2477672 - RNA, 14 nt, Human
uaaacggauuauuu

SEQ ID NO: 2477673 - RNA, 13 nt, Human
uaaacggauuauu

SEQ ID NO: 2477674 - RNA, 22 nt, Human
uaaacggauuauuuuuucagac

SEQ ID NO: 2477675 - RNA, 21 nt, Human
uaaacggauuauuuuuucaga

SEQ ID NO: 2477676 - RNA, 20 nt, Human
uaaacggauuauuuuuucag

SEQ ID NO: 2477677 - RNA, 19 nt, Human
uaaacggauuauuuuuuca

SEQ ID NO: 2477678 - RNA, 15 nt, Human
uaaacggauuccaaa

SEQ ID NO: 2477679 - RNA, 17 nt, Human
uaaacgugcagacuaug

SEQ ID NO: 2477680 - RNA, 22 nt, Human
uaaacgugaugaucagcuguuu

SEQ ID NO: 2477681 - RNA, 15 nt, Human
uaaacguaugcaugu

SEQ ID NO: 2477682 - RNA, 23 nt, Human
uaaacggauuauuuuuucagacc

SEQ ID NO: 2477683 - RNA, 20 nt, Human
uaaacguaugcaugugaaga

SEQ ID NO: 2477684 - RNA, 17 nt, Human
uaaacgugaugaucagc

SEQ ID NO: 2477685 - RNA, 19 nt, Human
uaaaccucaaaaugucuaa

SEQ ID NO: 2477686 - RNA, 18 nt, Human
uaaaccucaaaaugucua

SEQ ID NO: 2477687 - RNA, 13 nt, Human
uaaaccuaaaaaa

SEQ ID NO: 2477688 - RNA, 16 nt, Human
uaaaccuaaaaaagau

SEQ ID NO: 2477689 - RNA, 15 nt, Human
uaaaccuaaaaaaga

SEQ ID NO: 2477690 - RNA, 18 nt, Human
uaaaccuaaaaaagauau

SEQ ID NO: 2477691 - RNA, 16 nt, Human
uaaaccgccaaggcug

SEQ ID NO: 2477692 - RNA, 18 nt, Human
uaaaccgccaaggcuggg

SEQ ID NO: 2477693 - RNA, 19 nt, Human
uaaacccaguaguggugac

SEQ ID NO: 2477694 - RNA, 23 nt, Human
uaaacccauuuuagucacuuuuu

SEQ ID NO: 2477695 - RNA, 14 nt, Human
uaaacccauuuuag

SEQ ID NO: 2477696 - RNA, 21 nt, Human
uaaagaagcaauaaagaagag

SEQ ID NO: 2477697 - RNA, 13 nt, Human
uaaagaagcaaua

SEQ ID NO: 2477698 - RNA, 18 nt, Human
uaaagaagauguuuaacu

SEQ ID NO: 2477699 - RNA, 13 nt, Human
uaaagaagauguu

SEQ ID NO: 2477700 - RNA, 15 nt, Human
uaaagaacauaaaua

SEQ ID NO: 2477701 - RNA, 19 nt, Human
uaaagaacacccuauauuu

SEQ ID NO: 2477702 - RNA, 17 nt, Human
uaaagaaauugcaauaa

SEQ ID NO: 2477703 - RNA, 16 nt, Human
uaaagaaauugcaaua

SEQ ID NO: 2477704 - RNA, 11 nt, Human
uaaagacaaag

SEQ ID NO: 2477705 - RNA, 15 nt, Human
uaaagacaaagacaa

SEQ ID NO: 2477706 - RNA, 15 nt, Human
uaaagaauaauaugc

SEQ ID NO: 2477707 - RNA, 14 nt, Human
uaaagaagguuuca

SEQ ID NO: 2477708 - RNA, 16 nt, Human
uaaagacuuuuaugau

SEQ ID NO: 2477709 - RNA, 14 nt, Human
uaaagacuggcuuu

SEQ ID NO: 2477710 - RNA, 15 nt, Human
uaaagagaccuaccu

SEQ ID NO: 2477711 - RNA, 15 nt, Human
uaaagacuggcuuuu

SEQ ID NO: 2477712 - RNA, 20 nt, Human
uaaagacuggcuuuuauuaa

SEQ ID NO: 2477713 - RNA, 15 nt, Human
uaaagacaccuacug

SEQ ID NO: 2477714 - RNA, 19 nt, Human
uaaagacaaagacaaauuc

SEQ ID NO: 2477715 - RNA, 20 nt, Human
uaaagacaaagacaaauucu

SEQ ID NO: 2477716 - RNA, 22 nt, Human
uaaagacaaagacaaauucugu

SEQ ID NO: 2477717 - RNA, 9 nt, Human
uaaagacag

SEQ ID NO: 2477718 - RNA, 19 nt, Human
uaaagacaggguuucacca

SEQ ID NO: 2477719 - RNA, 21 nt, Human
uaaagacagggaagagcagaa

SEQ ID NO: 2477720 - RNA, 15 nt, Human
uaaagacagaggcag

SEQ ID NO: 2477721 - RNA, 10 nt, Human
uaaagacaga

SEQ ID NO: 2477722 - RNA, 15 nt, Human
uaaagauguuaaaaa

SEQ ID NO: 2477723 - RNA, 22 nt, Human
uaaagauuuaucaaaucaguca

SEQ ID NO: 2477724 - RNA, 15 nt, Human
uaaagauuuaucaaa

SEQ ID NO: 2477725 - RNA, 14 nt, Human
uaaagauuucuuga

SEQ ID NO: 2477726 - RNA, 19 nt, Human
uaaaggcuaccuuuguauu

SEQ ID NO: 2477727 - RNA, 20 nt, Human
uaaagcaacugucuauuucu

SEQ ID NO: 2477728 - RNA, 16 nt, Human
uaaagcaacugucuau

SEQ ID NO: 2477729 - RNA, 21 nt, Human
uaaaggcuaccuuuguauucu

SEQ ID NO: 2477730 - RNA, 15 nt, Human
uaaaggcuucucucu

SEQ ID NO: 2477731 - RNA, 14 nt, Human
uaaaggcuucucuc

SEQ ID NO: 2477732 - RNA, 22 nt, Human
uaaaggcucgauuuuguaucug

SEQ ID NO: 2477733 - RNA, 19 nt, Human
uaaaggcucgauuuuguau

SEQ ID NO: 2477734 - RNA, 18 nt, Human
uaaaggcucgauuuugua

SEQ ID NO: 2477735 - RNA, 17 nt, Human
uaaaggcucgauuuugu

SEQ ID NO: 2477736 - RNA, 21 nt, Human
uaaagcaacugucuauuucug

SEQ ID NO: 2477737 - RNA, 20 nt, Human
uaaaggcuauacuugucuug

SEQ ID NO: 2477738 - RNA, 18 nt, Human
uaaagauauuuuuaucuu

SEQ ID NO: 2477739 - RNA, 21 nt, Human
uaaagauauuuuuaucuuuau

SEQ ID NO: 2477740 - RNA, 22 nt, Human
uaaagauauuuuuaucuuuaua

SEQ ID NO: 2477741 - RNA, 23 nt, Human
uaaagauacagaacucuuucaaa

SEQ ID NO: 2477742 - RNA, 12 nt, Human
uaaagaguucuu

SEQ ID NO: 2477743 - RNA, 11 nt, Human
uaaagaugauc

SEQ ID NO: 2477744 - RNA, 21 nt, Human
uaaagaugaucuacucagaaa

SEQ ID NO: 2477745 - RNA, 13 nt, Human
uaaagaugaucua

SEQ ID NO: 2477746 - RNA, 21 nt, Human
uaaagaugcaaggaccaggac

SEQ ID NO: 2477747 - RNA, 22 nt, Human
uaaagaugcaaggaccaggacu

SEQ ID NO: 2477748 - RNA, 13 nt, Human
uaaagauggaaaa

SEQ ID NO: 2477749 - RNA, 22 nt, Human
uaaagagaccuaccucagguug

SEQ ID NO: 2477750 - RNA, 20 nt, Human
uaaagagaccuaccucaggu

SEQ ID NO: 2477751 - RNA, 19 nt, Human
uaaagagaccuaccucagg

SEQ ID NO: 2477752 - RNA, 13 nt, Human
uaaagagagguua

SEQ ID NO: 2477753 - RNA, 12 nt, Human
uaaagagagaau

SEQ ID NO: 2477754 - RNA, 17 nt, Human
uaaagagcccuugccuc

SEQ ID NO: 2477755 - RNA, 16 nt, Human
uaaagagcccuugccu

SEQ ID NO: 2477756 - RNA, 15 nt, Human
uaaagagcccuugcc

SEQ ID NO: 2477757 - RNA, 18 nt, Human
uaaagagauucacacaca

SEQ ID NO: 2477758 - RNA, 21 nt, Human
uaaagagcccuugccucccca

SEQ ID NO: 2477759 - RNA, 19 nt, Human
uaaagagcccuugccuccc

SEQ ID NO: 2477760 - RNA, 17 nt, Human
uaaagaggcugaaagag

SEQ ID NO: 2477761 - RNA, 20 nt, Human
uaaagaggcugaaagaggcc

SEQ ID NO: 2477762 - RNA, 18 nt, Human
uaaagaguuaguuugagu

SEQ ID NO: 2477763 - RNA, 18 nt, Human
aaguuacuagguaacuuc

SEQ ID NO: 2477764 - RNA, 19 nt, Human
aaguuacuagguaacuuca

SEQ ID NO: 2477765 - RNA, 20 nt, Human
aaguuacuagguaacuucau

SEQ ID NO: 2477766 - RNA, 21 nt, Human
aaguuacuagguaacuucaua

SEQ ID NO: 2477767 - RNA, 15 nt, Human
aaguuacugaaugca

SEQ ID NO: 2477768 - RNA, 14 nt, Human
aaguuacugaaugc

SEQ ID NO: 2477769 - RNA, 12 nt, Human
aaguuacugaau

SEQ ID NO: 2477770 - RNA, 22 nt, Human
aaguuacuucacuuuaauucuc

SEQ ID NO: 2477771 - RNA, 12 nt, Human
aaguuacuuugu

SEQ ID NO: 2477772 - RNA, 23 nt, Human
aaguuacuucacuuuaauucuca

SEQ ID NO: 2477773 - RNA, 15 nt, Human
aaguuacuuauucua

SEQ ID NO: 2477774 - RNA, 16 nt, Human
aaguuacuuauucuag

SEQ ID NO: 2477775 - RNA, 14 nt, Human
aaguuagaauuccu

SEQ ID NO: 2477776 - RNA, 14 nt, Human
aaguuauuaauauu

SEQ ID NO: 2477777 - RNA, 19 nt, Human
aaguuacuuugucagaggc

SEQ ID NO: 2477778 - RNA, 19 nt, Human
aaguuauuaauauuuuaau

SEQ ID NO: 2477779 - RNA, 12 nt, Human
aaguuaaauaaa

SEQ ID NO: 2477780 - RNA, 14 nt, Human
aaguuaaauaaauc

SEQ ID NO: 2477781 - RNA, 18 nt, Human
aaguuaaacauugaagua

SEQ ID NO: 2477782 - RNA, 17 nt, Human
aaguuaaagugaauaac

SEQ ID NO: 2477783 - RNA, 14 nt, Human
aaguuacacauuuu

SEQ ID NO: 2477784 - RNA, 17 nt, Human
aaguuacacauuuuuca

SEQ ID NO: 2477785 - RNA, 17 nt, Human
guuuuuuuuuaaagacu

SEQ ID NO: 2477786 - RNA, 20 nt, Human
guuuuuuuuuauacacugua

SEQ ID NO: 2477787 - RNA, 14 nt, Human
guuuuuuuucuucu

SEQ ID NO: 2477788 - RNA, 19 nt, Human
guuuuuuuuuccuguccuu

SEQ ID NO: 2477789 - RNA, 23 nt, Human
guuuuuuuuuauacacuguaaug

SEQ ID NO: 2477790 - RNA, 20 nt, Human
guuuuuuuuuccuguccuuc

SEQ ID NO: 2477791 - RNA, 15 nt, Human
aaguguuagauagaa

SEQ ID NO: 2477792 - RNA, 23 nt, Human
aaguguuuuguucuuucuggagu

SEQ ID NO: 2477793 - RNA, 23 nt, Human
aaguguuucuguuauuaacaaac

SEQ ID NO: 2477794 - RNA, 21 nt, Human
aaguguuucuguuauuaacaa

SEQ ID NO: 2477795 - RNA, 21 nt, Human
aaguguuuauuuuucauauug

SEQ ID NO: 2477796 - RNA, 14 nt, Human
aaguguuucuguua

SEQ ID NO: 2477797 - RNA, 17 nt, Human
aaguguuguaaauauuu

SEQ ID NO: 2477798 - RNA, 23 nt, Human
aaguguuggcuaaugaagggaaa

SEQ ID NO: 2477799 - RNA, 19 nt, Human
aaguguuuauuuuucauau

SEQ ID NO: 2477800 - RNA, 16 nt, Human
aaguguuuauuuuuca

SEQ ID NO: 2477801 - RNA, 15 nt, Human
aaguguuuauuuuuc

SEQ ID NO: 2477802 - RNA, 22 nt, Human
aaguguuguaaauauuuaugua

SEQ ID NO: 2477803 - RNA, 18 nt, Human
aaguguuguaaauauuua

SEQ ID NO: 2477804 - RNA, 20 nt, Human
aaguguuguaaauauuuaug

SEQ ID NO: 2477805 - RNA, 19 nt, Human
aaguuuacaguaaauaaau

SEQ ID NO: 2477806 - RNA, 18 nt, Human
aaguuuacaguaaauaaa

SEQ ID NO: 2477807 - RNA, 12 nt, Human
aaguuuacagua

SEQ ID NO: 2477808 - RNA, 23 nt, Human
aaguuuacaaguguauaucagaa

SEQ ID NO: 2477809 - RNA, 18 nt, Human
aaguuuacauuguaaaua

SEQ ID NO: 2477810 - RNA, 21 nt, Human
aaguuuacaaguguauaucag

SEQ ID NO: 2477811 - RNA, 18 nt, Human
aaguuuacaaguguauau

SEQ ID NO: 2477812 - RNA, 20 nt, Human
aaguuuaauggugccuucau

SEQ ID NO: 2477813 - RNA, 18 nt, Human
aaguuuacaaucaaagga

SEQ ID NO: 2477814 - RNA, 19 nt, Human
aaguuuacaaucaaaggaa

SEQ ID NO: 2477815 - RNA, 21 nt, Human
aaguuuacaguaaauaaauug

SEQ ID NO: 2477816 - RNA, 20 nt, Human
aaguuuacaguaaauaaauu

SEQ ID NO: 2477817 - RNA, 19 nt, Human
aaguuuacauuguaaauag

SEQ ID NO: 2477818 - RNA, 19 nt, Human
aaguuuacucaacccucuc

SEQ ID NO: 2477819 - RNA, 11 nt, Human
aaguuuagaga

SEQ ID NO: 2477820 - RNA, 22 nt, Human
aaguuuacaguaaauaaauugu

SEQ ID NO: 2477821 - RNA, 14 nt, Human
aaguuuaauugacu

SEQ ID NO: 2477822 - RNA, 17 nt, Human
aaguucugcagauaaac

SEQ ID NO: 2477823 - RNA, 15 nt, Human
aaguucugacuugac

SEQ ID NO: 2477824 - RNA, 15 nt, Human
aaguucugaguguuu

SEQ ID NO: 2477825 - RNA, 18 nt, Human
aaguucuagagaagaggc

SEQ ID NO: 2477826 - RNA, 17 nt, Human
aaguuauugcaguuuau

SEQ ID NO: 2477827 - RNA, 15 nt, Human
aaguuauugcaguuu

SEQ ID NO: 2477828 - RNA, 14 nt, Human
aaguuauugcaguu

SEQ ID NO: 2477829 - RNA, 14 nt, Human
aaguuauugacaaa

SEQ ID NO: 2477830 - RNA, 18 nt, Human
aaguuauugacaaacucu

SEQ ID NO: 2477831 - RNA, 21 nt, Human
aaguucuagagaagaggcugg

SEQ ID NO: 2477832 - RNA, 17 nt, Human
aaguucuagagaagagg

SEQ ID NO: 2477833 - RNA, 23 nt, Human
aaguucauauuccauauuuauuc

SEQ ID NO: 2477834 - RNA, 22 nt, Human
aaguucauauuccauauuuauu

SEQ ID NO: 2477835 - RNA, 21 nt, Human
aaguucauauuccauauuuau

SEQ ID NO: 2477836 - RNA, 15 nt, Human
aaguucauauuccau

SEQ ID NO: 2477837 - RNA, 14 nt, Human
aaguucauaggguc

SEQ ID NO: 2477838 - RNA, 21 nt, Human
uaaaauuuuuuuagaaagcau

SEQ ID NO: 2477839 - RNA, 20 nt, Human
uaaaauuuuuuuagaaagca

SEQ ID NO: 2477840 - RNA, 16 nt, Human
uaaaauuuuuuuucau

SEQ ID NO: 2477841 - RNA, 17 nt, Human
uaaaauuuuuuuucaug

SEQ ID NO: 2477842 - RNA, 19 nt, Human
uaaaauuuuuuuucauguu

SEQ ID NO: 2477843 - RNA, 20 nt, Human
uaaaauuuuuuuucauguuu

SEQ ID NO: 2477844 - RNA, 23 nt, Human
uaaacaaaauagaagcuguagua

SEQ ID NO: 2477845 - RNA, 18 nt, Human
uaaacaaaauagaagcug

SEQ ID NO: 2477846 - RNA, 23 nt, Human
uaaaauuuuuuuucauguuuuaa

SEQ ID NO: 2477847 - RNA, 19 nt, Human
uaaaauuuuuuuagaaagc

SEQ ID NO: 2477848 - RNA, 18 nt, Human
uaaaauuuuuuuagaaag

SEQ ID NO: 2477849 - RNA, 17 nt, Human
uaaaauuuuuuuagaaa

SEQ ID NO: 2477850 - RNA, 16 nt, Human
uaaaauuuuuuuagaa

SEQ ID NO: 2477851 - RNA, 19 nt, Human
uaaaauuuuuaaucuuuaa

SEQ ID NO: 2477852 - RNA, 18 nt, Human
uaaaccauaaaaagcuga

SEQ ID NO: 2477853 - RNA, 17 nt, Human
uaaaccauaaaaagcug

SEQ ID NO: 2477854 - RNA, 19 nt, Human
uaaaccauaaaaagcugac

SEQ ID NO: 2477855 - RNA, 21 nt, Human
uaaaccagguuuagacaguau

SEQ ID NO: 2477856 - RNA, 21 nt, Human
uaaaccacaaggcuguugcau

SEQ ID NO: 2477857 - RNA, 22 nt, Human
uaaaccaccagugcccaaaguc

SEQ ID NO: 2477858 - RNA, 14 nt, Human
uaaacaaaguuacu

SEQ ID NO: 2477859 - RNA, 15 nt, Human
uaaacaaaguuacua

SEQ ID NO: 2477860 - RNA, 17 nt, Human
uaaacaaaguuacuagg

SEQ ID NO: 2477861 - RNA, 19 nt, Human
uaaaccaaggcuagaacca

SEQ ID NO: 2477862 - RNA, 13 nt, Human
uaaacaaagguug

SEQ ID NO: 2477863 - RNA, 19 nt, Human
uaaaauuauagaugggaau

SEQ ID NO: 2477864 - RNA, 19 nt, Human
uaaaauuaaagcugaaaac

SEQ ID NO: 2477865 - RNA, 14 nt, Human
uaaaauuaaagcua

SEQ ID NO: 2477866 - RNA, 18 nt, Human
uaaaauuaaagcugaaaa

SEQ ID NO: 2477867 - RNA, 16 nt, Human
uaaaauuaaagcugaa

SEQ ID NO: 2477868 - RNA, 14 nt, Human
uaaaauuuguugca

SEQ ID NO: 2477869 - RNA, 14 nt, Human
uaaaauuauuccuu

SEQ ID NO: 2477870 - RNA, 15 nt, Human
uaaaauuuguugcau

SEQ ID NO: 2477871 - RNA, 17 nt, Human
uaaaauuuuuaaucuuu

SEQ ID NO: 2477872 - RNA, 17 nt, Human
uaaaauuuuaucucuua

SEQ ID NO: 2477873 - RNA, 16 nt, Human
aaguuuaugucuaaag

SEQ ID NO: 2477874 - RNA, 17 nt, Human
aaguuuaugucuaaaga

SEQ ID NO: 2477875 - RNA, 22 nt, Human
aaguuucaaugugauucuaaug

SEQ ID NO: 2477876 - RNA, 16 nt, Human
aaguuucaaugugauu

SEQ ID NO: 2477877 - RNA, 16 nt, Human
aaguuucaggugacau

SEQ ID NO: 2477878 - RNA, 15 nt, Human
aaguuucaggugaca

SEQ ID NO: 2477879 - RNA, 14 nt, Human
aaguuucaggugac

SEQ ID NO: 2477880 - RNA, 12 nt, Human
aaguuucaggug

SEQ ID NO: 2477881 - RNA, 21 nt, Human
aaguuucagagaccauugcaa

SEQ ID NO: 2477882 - RNA, 19 nt, Human
aaguuucaggauacaugug

SEQ ID NO: 2477883 - RNA, 20 nt, Human
aaguuucacugacuuagaac

SEQ ID NO: 2477884 - RNA, 12 nt, Human
aaguuugcaauu

SEQ ID NO: 2477885 - RNA, 16 nt, Human
aaguuugauuucauua

SEQ ID NO: 2477886 - RNA, 22 nt, Human
aaguuucaggugacaugugaaa

SEQ ID NO: 2477887 - RNA, 21 nt, Human
aaguuucaggugacaugugaa

SEQ ID NO: 2477888 - RNA, 19 nt, Human
aaguuucaggugacaugug

SEQ ID NO: 2477889 - RNA, 17 nt, Human
aaguuucaggugacaug

SEQ ID NO: 2477890 - RNA, 16 nt, Human
aaguuucaguugauuu

SEQ ID NO: 2477891 - RNA, 16 nt, Human
aaguuugcuuagaaaa

SEQ ID NO: 2477892 - RNA, 19 nt, Human
aaguuuggcaauaguuugc

SEQ ID NO: 2477893 - RNA, 15 nt, Human
aaguuugcuuagaaa

SEQ ID NO: 2477894 - RNA, 14 nt, Human
aaguuugcacugua

SEQ ID NO: 2477895 - RNA, 13 nt, Human
aaguuugcuuaga

SEQ ID NO: 2477896 - RNA, 21 nt, Human
aaguuugcacuguaugcugga

SEQ ID NO: 2477897 - RNA, 18 nt, Human
uaaaauguugaaaaguca

SEQ ID NO: 2477898 - RNA, 17 nt, Human
uaaaauguugaaaaguc

SEQ ID NO: 2477899 - RNA, 15 nt, Human
uaaaauguugaaaag

SEQ ID NO: 2477900 - RNA, 14 nt, Human
uaaaauguugaaaa

SEQ ID NO: 2477901 - RNA, 17 nt, Human
uaaaauguucacuuuug

SEQ ID NO: 2477902 - RNA, 22 nt, Human
uaaaauguucacuuuugacaaa

SEQ ID NO: 2477903 - RNA, 20 nt, Human
uaaaauguugaaaagucaaa

SEQ ID NO: 2477904 - RNA, 19 nt, Human
uaaaauguugaaaagucaa

SEQ ID NO: 2477905 - RNA, 14 nt, Human
uaaaauguugaaua

SEQ ID NO: 2477906 - RNA, 16 nt, Human
aaguuuugaaaagcua

SEQ ID NO: 2477907 - RNA, 15 nt, Human
aaguuuugaaaagcu

SEQ ID NO: 2477908 - RNA, 13 nt, Human
aaguuuugaaaag

SEQ ID NO: 2477909 - RNA, 12 nt, Human
aaguuuugaaaa

SEQ ID NO: 2477910 - RNA, 18 nt, Human
aaguuuugaaaagcuauu

SEQ ID NO: 2477911 - RNA, 14 nt, Human
uaaaauguuaaaac

SEQ ID NO: 2477912 - RNA, 15 nt, Human
aaguuuugcauuuau

SEQ ID NO: 2477913 - RNA, 14 nt, Human
aaguuuuaggacaa

SEQ ID NO: 2477914 - RNA, 21 nt, Human
aaguuuuaggacaaacagcuc

SEQ ID NO: 2477915 - RNA, 14 nt, Human
aaguuuguuuuuaa

SEQ ID NO: 2477916 - RNA, 23 nt, Human
aaguuuucagaaccucuucccca

SEQ ID NO: 2477917 - RNA, 15 nt, Human
aaguuuucaaugaug

SEQ ID NO: 2477918 - RNA, 11 nt, Human
aaguuuucagg

SEQ ID NO: 2477919 - RNA, 21 nt, Human
aaguuuucccuugaggaaaca

SEQ ID NO: 2477920 - RNA, 13 nt, Human
aaguuuuccugag

SEQ ID NO: 2477921 - RNA, 22 nt, Human
aaguuuucccuugaggaaacaa

SEQ ID NO: 2477922 - RNA, 19 nt, Human
guugagcagggauccuggu

SEQ ID NO: 2477923 - RNA, 18 nt, Human
guugagccagcagacauu

SEQ ID NO: 2477924 - RNA, 16 nt, Human
guugagccagcagaca

SEQ ID NO: 2477925 - RNA, 15 nt, Human
guugagccagcagac

SEQ ID NO: 2477926 - RNA, 22 nt, Human
guugagccagcagacauuguca

SEQ ID NO: 2477927 - RNA, 20 nt, Human
guugagccagcagacauugu

SEQ ID NO: 2477928 - RNA, 15 nt, Human
guugagccaggccug

SEQ ID NO: 2477929 - RNA, 23 nt, Human
guugagccaggccugggucugug

SEQ ID NO: 2477930 - RNA, 16 nt, Human
guugacaguucugaag

SEQ ID NO: 2477931 - RNA, 17 nt, Human
guugacaguucugaaga

SEQ ID NO: 2477932 - RNA, 18 nt, Human
guugacaguucauaugua

SEQ ID NO: 2477933 - RNA, 12 nt, Human
guugacagcagg

SEQ ID NO: 2477934 - RNA, 19 nt, Human
guugagccccaaguccuga

SEQ ID NO: 2477935 - RNA, 16 nt, Human
guugagccccaagucc

SEQ ID NO: 2477936 - RNA, 15 nt, Human
guugagccccaaguc

SEQ ID NO: 2477937 - RNA, 10 nt, Human
guugagcccc

SEQ ID NO: 2477938 - RNA, 14 nt, Human
guugagccuuuucc

SEQ ID NO: 2477939 - RNA, 15 nt, Human
guugagccccuggag

SEQ ID NO: 2477940 - RNA, 22 nt, Human
guugauagcacagacccugccc

SEQ ID NO: 2477941 - RNA, 20 nt, Human
guugagccccaaguccugaa

SEQ ID NO: 2477942 - RNA, 23 nt, Human
guugauagcacagacccugcccu

SEQ ID NO: 2477943 - RNA, 12 nt, Human
guugauaguuua

SEQ ID NO: 2477944 - RNA, 24 nt, Human
guugagcucucggaacugcaugcu

SEQ ID NO: 2477945 - RNA, 13 nt, Human
guugagcuguuuu

SEQ ID NO: 2477946 - RNA, 20 nt, Human
guugauauuucgaaagcugc

SEQ ID NO: 2477947 - RNA, 14 nt, Human
guugauauuucuau

SEQ ID NO: 2477948 - RNA, 20 nt, Human
guugaucacuggcaaugaaa

SEQ ID NO: 2477949 - RNA, 20 nt, Human
guugacaccucgccccugcu

SEQ ID NO: 2477950 - RNA, 15 nt, Human
guugacacaggucuu

SEQ ID NO: 2477951 - RNA, 19 nt, Human
guucuguuuacaucaguuu

SEQ ID NO: 2477952 - RNA, 16 nt, Human
guucuguuuacaucag

SEQ ID NO: 2477953 - RNA, 14 nt, Human
guucuguuuacauc

SEQ ID NO: 2477954 - RNA, 16 nt, Human
guucuguuuugccuga

SEQ ID NO: 2477955 - RNA, 23 nt, Human
guucugugucuuucacagcuccu

SEQ ID NO: 2477956 - RNA, 21 nt, Human
guucugugguuuuccccuccc

SEQ ID NO: 2477957 - RNA, 19 nt, Human
guucugugguuuuccccuc

SEQ ID NO: 2477958 - RNA, 22 nt, Human
guucugugucuuucacagcucc

SEQ ID NO: 2477959 - RNA, 13 nt, Human
guucugugucuuu

SEQ ID NO: 2477960 - RNA, 23 nt, Human
guucugugguuuuccccucccug

SEQ ID NO: 2477961 - RNA, 15 nt, Human
guucugugucugugu

SEQ ID NO: 2477962 - RNA, 18 nt, Human
guucucagcucccccugu

SEQ ID NO: 2477963 - RNA, 17 nt, Human
guucucagcucccccug

SEQ ID NO: 2477964 - RNA, 15 nt, Human
guucucagcuccccc

SEQ ID NO: 2477965 - RNA, 14 nt, Human
guucucagcucccc

SEQ ID NO: 2477966 - RNA, 19 nt, Human
guucucacuguucccucug

SEQ ID NO: 2477967 - RNA, 16 nt, Human
guucucacuguucccu

SEQ ID NO: 2477968 - RNA, 13 nt, Human
guucucagcuccc

SEQ ID NO: 2477969 - RNA, 17 nt, Human
guucucacacccaccgu

SEQ ID NO: 2477970 - RNA, 16 nt, Human
guucucacacccaccg

SEQ ID NO: 2477971 - RNA, 12 nt, Human
guucucacuguu

SEQ ID NO: 2477972 - RNA, 12 nt, Human
guucucacaccc

SEQ ID NO: 2477973 - RNA, 14 nt, Human
guucucagggcucc

SEQ ID NO: 2477974 - RNA, 13 nt, Human
guucucagggcuc

SEQ ID NO: 2477975 - RNA, 20 nt, Human
guucucagcucccccugucc

SEQ ID NO: 2477976 - RNA, 19 nt, Human
guucucagcucccccuguc

SEQ ID NO: 2477977 - RNA, 23 nt, Human
guucucagggcuccugccuucug

SEQ ID NO: 2477978 - RNA, 15 nt, Human
guucucagggcuccu

SEQ ID NO: 2477979 - RNA, 17 nt, Human
guucucagguguugcca

SEQ ID NO: 2477980 - RNA, 16 nt, Human
guucucaucuuucuug

SEQ ID NO: 2477981 - RNA, 11 nt, Human
guucucaucuu

SEQ ID NO: 2477982 - RNA, 15 nt, Human
guucuaguuugcauu

SEQ ID NO: 2477983 - RNA, 14 nt, Human
guucuaguuugcau

SEQ ID NO: 2477984 - RNA, 13 nt, Human
guuccccuuccac

SEQ ID NO: 2477985 - RNA, 14 nt, Human
guucuaguugcuug

SEQ ID NO: 2477986 - RNA, 18 nt, Human
guuccccuguucacucua

SEQ ID NO: 2477987 - RNA, 14 nt, Human
guucuaguuuucag

SEQ ID NO: 2477988 - RNA, 13 nt, Human
guucuaguuuuca

SEQ ID NO: 2477989 - RNA, 15 nt, Human
guucuauuuaaugga

SEQ ID NO: 2477990 - RNA, 18 nt, Human
guucuauuucagugccaa

SEQ ID NO: 2477991 - RNA, 15 nt, Human
guucuaguuuucagu

SEQ ID NO: 2477992 - RNA, 13 nt, Human
guucuauuuggaa

SEQ ID NO: 2477993 - RNA, 15 nt, Human
guucuauuuggaauu

SEQ ID NO: 2477994 - RNA, 14 nt, Human
guucuauuuggaau

SEQ ID NO: 2477995 - RNA, 18 nt, Human
guucuauuuggaauuuau

SEQ ID NO: 2477996 - RNA, 12 nt, Human
guucucugcccu

SEQ ID NO: 2477997 - RNA, 22 nt, Human
guucuguggaaaguguaaagca

SEQ ID NO: 2477998 - RNA, 21 nt, Human
guucuguggaaaguguaaagc

SEQ ID NO: 2477999 - RNA, 20 nt, Human
guucuguggaaaguguaaag

SEQ ID NO: 2478000 - RNA, 19 nt, Human
guucuguggaaaguguaaa

SEQ ID NO: 2478001 - RNA, 17 nt, Human
guucuguggaaagugua

SEQ ID NO: 2478002 - RNA, 16 nt, Human
guucuguggaaagugu

SEQ ID NO: 2478003 - RNA, 14 nt, Human
guucuguggaaagu

SEQ ID NO: 2478004 - RNA, 12 nt, Human
guucuguggaaa

SEQ ID NO: 2478005 - RNA, 11 nt, Human
guucuguggaa

SEQ ID NO: 2478006 - RNA, 11 nt, Human
guucugugcac

SEQ ID NO: 2478007 - RNA, 18 nt, Human
guucugucccuuggagcu

SEQ ID NO: 2478008 - RNA, 17 nt, Human
guucugucucauaugau

SEQ ID NO: 2478009 - RNA, 11 nt, Human
guucucugccc

SEQ ID NO: 2478010 - RNA, 16 nt, Human
guucucugaggacacu

SEQ ID NO: 2478011 - RNA, 19 nt, Human
guucuccguuagcuccugu

SEQ ID NO: 2478012 - RNA, 18 nt, Human
guucuccguuagcuccug

SEQ ID NO: 2478013 - RNA, 15 nt, Human
guguuuaguugcaga

SEQ ID NO: 2478014 - RNA, 22 nt, Human
guguuuaagacauuuuuggaag

SEQ ID NO: 2478015 - RNA, 16 nt, Human
guguuuaaauaaagua

SEQ ID NO: 2478016 - RNA, 16 nt, Human
guguuuaugugugugu

SEQ ID NO: 2478017 - RNA, 12 nt, Human
guguuuaugugu

SEQ ID NO: 2478018 - RNA, 11 nt, Human
aagcucccagg

SEQ ID NO: 2478019 - RNA, 16 nt, Human
aagcucccaggaacaa

SEQ ID NO: 2478020 - RNA, 14 nt, Human
aagcucccaggaac

SEQ ID NO: 2478021 - RNA, 13 nt, Human
aagcucccaggaa

SEQ ID NO: 2478022 - RNA, 21 nt, Human
aagcucccaagggauggugcc

SEQ ID NO: 2478023 - RNA, 19 nt, Human
aagcucccaagggauggug

SEQ ID NO: 2478024 - RNA, 17 nt, Human
aagcucccaagggaugg

SEQ ID NO: 2478025 - RNA, 13 nt, Human
guguuuauuguca

SEQ ID NO: 2478026 - RNA, 13 nt, Human
guguuuauuuaua

SEQ ID NO: 2478027 - RNA, 10 nt, Human
guguuuauuu

SEQ ID NO: 2478028 - RNA, 20 nt, Human
aagcuccaucuccacuccag

SEQ ID NO: 2478029 - RNA, 22 nt, Human
aagcucccaggcauuccccagg

SEQ ID NO: 2478030 - RNA, 12 nt, Human
aagcucccaggc

SEQ ID NO: 2478031 - RNA, 14 nt, Human
aagcucccaggccg

SEQ ID NO: 2478032 - RNA, 16 nt, Human
aagcuccuagcagaga

SEQ ID NO: 2478033 - RNA, 23 nt, Human
aagcucccaggcauuccccagga

SEQ ID NO: 2478034 - RNA, 16 nt, Human
aagcucuagugggaag

SEQ ID NO: 2478035 - RNA, 21 nt, Human
aagcuccuccucccugcaucu

SEQ ID NO: 2478036 - RNA, 18 nt, Human
aagcuccuagcagagaga

SEQ ID NO: 2478037 - RNA, 13 nt, Human
aagcuccuccucc

SEQ ID NO: 2478038 - RNA, 15 nt, Human
aagcuccuccucccu

SEQ ID NO: 2478039 - RNA, 16 nt, Human
aagcuccuccucccug

SEQ ID NO: 2478040 - RNA, 17 nt, Human
aagcuccuccucccugc

SEQ ID NO: 2478041 - RNA, 18 nt, Human
aagcuccuccucccugca

SEQ ID NO: 2478042 - RNA, 19 nt, Human
aagcuccuccucccugcau

SEQ ID NO: 2478043 - RNA, 22 nt, Human
aagcucucugcaucuacuccca

SEQ ID NO: 2478044 - RNA, 15 nt, Human
aagcucucugcaucu

SEQ ID NO: 2478045 - RNA, 15 nt, Human
aagcucuauuaagau

SEQ ID NO: 2478046 - RNA, 12 nt, Human
aagcucugaagu

SEQ ID NO: 2478047 - RNA, 16 nt, Human
aagcucugaagucaca

SEQ ID NO: 2478048 - RNA, 22 nt, Human
aagcucugaagucacaucacag

SEQ ID NO: 2478049 - RNA, 16 nt, Human
aaggaaaaaauaacaa

SEQ ID NO: 2478050 - RNA, 19 nt, Human
aaggaaaaaauaacaauga

SEQ ID NO: 2478051 - RNA, 22 nt, Human
guuccccuccuccacucucccc

SEQ ID NO: 2478052 - RNA, 13 nt, Human
guuccccucacug

SEQ ID NO: 2478053 - RNA, 21 nt, Human
guuccccuaguaagugccuuc

SEQ ID NO: 2478054 - RNA, 17 nt, Human
guuccccuguucacucu

SEQ ID NO: 2478055 - RNA, 15 nt, Human
guuccccuguucacu

SEQ ID NO: 2478056 - RNA, 16 nt, Human
aagcuuuuaugugaaa

SEQ ID NO: 2478057 - RNA, 13 nt, Human
aagcuuuuagaaa

SEQ ID NO: 2478058 - RNA, 14 nt, Human
aagcuuuuagaaau

SEQ ID NO: 2478059 - RNA, 18 nt, Human
aagcuuuuagaaauacug

SEQ ID NO: 2478060 - RNA, 23 nt, Human
guuccccuaguaagugccuucca

SEQ ID NO: 2478061 - RNA, 19 nt, Human
aaggaaaaaagagaaguau

SEQ ID NO: 2478062 - RNA, 22 nt, Human
aagcuguugaugguagguggca

SEQ ID NO: 2478063 - RNA, 13 nt, Human
aagcuguuguaca

SEQ ID NO: 2478064 - RNA, 12 nt, Human
aagcuguuguac

SEQ ID NO: 2478065 - RNA, 19 nt, Human
aagcuguuggccucugcaa

SEQ ID NO: 2478066 - RNA, 13 nt, Human
aagcucugcuccu

SEQ ID NO: 2478067 - RNA, 18 nt, Human
aagcuguuacugucuuca

SEQ ID NO: 2478068 - RNA, 22 nt, Human
aagcuuuccugccccaggccug

SEQ ID NO: 2478069 - RNA, 21 nt, Human
aagcuuuccugccccaggccu

SEQ ID NO: 2478070 - RNA, 18 nt, Human
aagcuuuccugccccagg

SEQ ID NO: 2478071 - RNA, 21 nt, Human
aagcuguuguacauuuaugau

SEQ ID NO: 2478072 - RNA, 16 nt, Human
aagcuuuccugcccca

SEQ ID NO: 2478073 - RNA, 20 nt, Human
aagcuguuguacauuuauga

SEQ ID NO: 2478074 - RNA, 18 nt, Human
aagcuguuguacauuuau

SEQ ID NO: 2478075 - RNA, 17 nt, Human
aagcuguuguacauuua

SEQ ID NO: 2478076 - RNA, 14 nt, Human
aagcuguuguacau

SEQ ID NO: 2478077 - RNA, 23 nt, Human
aagcuguuuccauagggugacac

SEQ ID NO: 2478078 - RNA, 15 nt, Human
aagcuguuuccauag

SEQ ID NO: 2478079 - RNA, 15 nt, Human
aagcuuucugucucc

SEQ ID NO: 2478080 - RNA, 17 nt, Human
aagcuuugccagcugcu

SEQ ID NO: 2478081 - RNA, 23 nt, Human
aagcuuugcuuaugguaauaaaa

SEQ ID NO: 2478082 - RNA, 23 nt, Human
aaggauaaaguugguaaaccuuu

SEQ ID NO: 2478083 - RNA, 13 nt, Human
aaggauaaugaau

SEQ ID NO: 2478084 - RNA, 21 nt, Human
aaggauaaaguugguaaaccu

SEQ ID NO: 2478085 - RNA, 23 nt, Human
aaggaggauuccauuuggcagag

SEQ ID NO: 2478086 - RNA, 17 nt, Human
aaggagccccauuccug

SEQ ID NO: 2478087 - RNA, 19 nt, Human
aaggagccccauuccuggg

SEQ ID NO: 2478088 - RNA, 20 nt, Human
aaggaggaagagaaaaaaua

SEQ ID NO: 2478089 - RNA, 20 nt, Human
aaggagcccuuaucugugcu

SEQ ID NO: 2478090 - RNA, 12 nt, Human
aaggauccugag

SEQ ID NO: 2478091 - RNA, 11 nt, Human
aaggauccuga

SEQ ID NO: 2478092 - RNA, 20 nt, Human
aaggauagaugcuggcccag

SEQ ID NO: 2478093 - RNA, 11 nt, Human
aaggauaaagu

SEQ ID NO: 2478094 - RNA, 22 nt, Human
aaggaucagaacagcagagguu

SEQ ID NO: 2478095 - RNA, 22 nt, Human
aaggauauuuacuacuuuugca

SEQ ID NO: 2478096 - RNA, 22 nt, Human
aaggauccugagccagauuuca

SEQ ID NO: 2478097 - RNA, 20 nt, Human
aaggauccugagccagauuu

SEQ ID NO: 2478098 - RNA, 16 nt, Human
aaggaucucucaggag

SEQ ID NO: 2478099 - RNA, 19 nt, Human
aaggauagaugcuggccca

SEQ ID NO: 2478100 - RNA, 21 nt, Human
aaggaucucucaggagcacag

SEQ ID NO: 2478101 - RNA, 20 nt, Human
aaggaucucucaggagcaca

SEQ ID NO: 2478102 - RNA, 22 nt, Human
aaggaucucucaggagcacagg

SEQ ID NO: 2478103 - RNA, 15 nt, Human
aaggaucuguuuuua

SEQ ID NO: 2478104 - RNA, 16 nt, Human
aaggaucuuuguggcc

SEQ ID NO: 2478105 - RNA, 21 nt, Human
aaggaucuguuuuuaaaaauc

SEQ ID NO: 2478106 - RNA, 23 nt, Human
aaggaucuguuuuuaaaaaucau

SEQ ID NO: 2478107 - RNA, 12 nt, Human
aaggaaaaugau

SEQ ID NO: 2478108 - RNA, 14 nt, Human
aaggaaaaugauac

SEQ ID NO: 2478109 - RNA, 15 nt, Human
guugaucuggaaccc

SEQ ID NO: 2478110 - RNA, 14 nt, Human
guugaucagaucug

SEQ ID NO: 2478111 - RNA, 16 nt, Human
guugaucuggaaccca

SEQ ID NO: 2478112 - RNA, 17 nt, Human
guugaucuggaacccag

SEQ ID NO: 2478113 - RNA, 18 nt, Human
aaggaaaccacagcugcu

SEQ ID NO: 2478114 - RNA, 17 nt, Human
aaggaaaccacagcugc

SEQ ID NO: 2478115 - RNA, 16 nt, Human
aaggaaaccacagcug

SEQ ID NO: 2478116 - RNA, 14 nt, Human
aaggaaaaugaucu

SEQ ID NO: 2478117 - RNA, 13 nt, Human
aaggaaaaugauc

SEQ ID NO: 2478118 - RNA, 19 nt, Human
guugaucuggaacccagac

SEQ ID NO: 2478119 - RNA, 15 nt, Human
aaggaaacccagcuc

SEQ ID NO: 2478120 - RNA, 17 nt, Human
aaggaagguggauggcc

SEQ ID NO: 2478121 - RNA, 12 nt, Human
aaggaaggugga

SEQ ID NO: 2478122 - RNA, 22 nt, Human
aaggaagggcauccuucugccu

SEQ ID NO: 2478123 - RNA, 21 nt, Human
aaggaaggcucuucuccccag

SEQ ID NO: 2478124 - RNA, 20 nt, Human
aaggaaggagacucaccucu

SEQ ID NO: 2478125 - RNA, 22 nt, Human
aaggaaggagacucaccucugc

SEQ ID NO: 2478126 - RNA, 16 nt, Human
aaggaaacccagcucu

SEQ ID NO: 2478127 - RNA, 18 nt, Human
aaggaagcuccacuguca

SEQ ID NO: 2478128 - RNA, 11 nt, Human
aaggaaggaaa

SEQ ID NO: 2478129 - RNA, 15 nt, Human
aaggaaaccagugca

SEQ ID NO: 2478130 - RNA, 20 nt, Human
aaggaaaccacagcugcugg

SEQ ID NO: 2478131 - RNA, 12 nt, Human
aaggaaggaaag

SEQ ID NO: 2478132 - RNA, 13 nt, Human
aaggaaggaaaga

SEQ ID NO: 2478133 - RNA, 16 nt, Human
aaggaaggaaagaaag

SEQ ID NO: 2478134 - RNA, 22 nt, Human
aaggagcaagucagaauagaaa

SEQ ID NO: 2478135 - RNA, 17 nt, Human
aaggagauuuacaacug

SEQ ID NO: 2478136 - RNA, 18 nt, Human
aaggagauuuuccuuccu

SEQ ID NO: 2478137 - RNA, 14 nt, Human
aaggagagccugcu

SEQ ID NO: 2478138 - RNA, 18 nt, Human
aaggagauuuacaacugg

SEQ ID NO: 2478139 - RNA, 18 nt, Human
aaggagagaaggggagga

SEQ ID NO: 2478140 - RNA, 16 nt, Human
aaggagagaaaguggg

SEQ ID NO: 2478141 - RNA, 13 nt, Human
aaggagagccugc

SEQ ID NO: 2478142 - RNA, 18 nt, Human
aaggaagguggauggccc

SEQ ID NO: 2478143 - RNA, 16 nt, Human
aaggaagguucuggug

SEQ ID NO: 2478144 - RNA, 17 nt, Human
aaggaagguuuucucca

SEQ ID NO: 2478145 - RNA, 16 nt, Human
aaggaagguuuucucc

SEQ ID NO: 2478146 - RNA, 12 nt, Human
aaggagacacaa

SEQ ID NO: 2478147 - RNA, 14 nt, Human
aaggagagaaagug

SEQ ID NO: 2478148 - RNA, 12 nt, Human
aaggagagaaag

SEQ ID NO: 2478149 - RNA, 11 nt, Human
aaggagagaaa

SEQ ID NO: 2478150 - RNA, 17 nt, Human
aaggagacucaccucug

SEQ ID NO: 2478151 - RNA, 20 nt, Human
aaggagacucaccucugccu

SEQ ID NO: 2478152 - RNA, 22 nt, Human
aaggagacucaccucugccuca

SEQ ID NO: 2478153 - RNA, 23 nt, Human
aaggagacucaccucugccucaa

SEQ ID NO: 2478154 - RNA, 16 nt, Human
aaggagacucaccucu

SEQ ID NO: 2478155 - RNA, 23 nt, Human
guugcugaugaacucuuaaucaa

SEQ ID NO: 2478156 - RNA, 23 nt, Human
guuggcugggggccucagugcca

SEQ ID NO: 2478157 - RNA, 13 nt, Human
guugcugaauagg

SEQ ID NO: 2478158 - RNA, 22 nt, Human
guugcucagucucccuuucccu

SEQ ID NO: 2478159 - RNA, 18 nt, Human
guugcuccgccucugcug

SEQ ID NO: 2478160 - RNA, 20 nt, Human
guugcuccgccucugcuggc

SEQ ID NO: 2478161 - RNA, 22 nt, Human
guugcuccgccucugcuggcac

SEQ ID NO: 2478162 - RNA, 22 nt, Human
guugcuaagccccagcaagcaa

SEQ ID NO: 2478163 - RNA, 17 nt, Human
guugcuaagccccagca

SEQ ID NO: 2478164 - RNA, 18 nt, Human
guugcucaaaaaaugagc

SEQ ID NO: 2478165 - RNA, 20 nt, Human
guugcucaaaucuauucaga

SEQ ID NO: 2478166 - RNA, 22 nt, Human
guugcuaagaagcgagcacuga

SEQ ID NO: 2478167 - RNA, 16 nt, Human
guugcccaggcuggcg

SEQ ID NO: 2478168 - RNA, 18 nt, Human
aaggcguggagcugccug

SEQ ID NO: 2478169 - RNA, 16 nt, Human
aaggcguggagcugcc

SEQ ID NO: 2478170 - RNA, 19 nt, Human
aaggcguggagcugccuga

SEQ ID NO: 2478171 - RNA, 16 nt, Human
aaggcuaaaacuuaac

SEQ ID NO: 2478172 - RNA, 15 nt, Human
guugcccaggcuggc

SEQ ID NO: 2478173 - RNA, 21 nt, Human
guugggaaugaggcuugcuga

SEQ ID NO: 2478174 - RNA, 19 nt, Human
guugggaaugaggcuugcu

SEQ ID NO: 2478175 - RNA, 14 nt, Human
guugggaagacaug

SEQ ID NO: 2478176 - RNA, 17 nt, Human
guugggaaugaggcuug

SEQ ID NO: 2478177 - RNA, 14 nt, Human
guugggagaauguc

SEQ ID NO: 2478178 - RNA, 21 nt, Human
guugggagaaugucaguaugu

SEQ ID NO: 2478179 - RNA, 17 nt, Human
guugggcuggugucacc

SEQ ID NO: 2478180 - RNA, 18 nt, Human
guugguuccaagcccugg

SEQ ID NO: 2478181 - RNA, 23 nt, Human
guugggguggguauaaaagaugg

SEQ ID NO: 2478182 - RNA, 19 nt, Human
guugguuccaagcccugga

SEQ ID NO: 2478183 - RNA, 16 nt, Human
guuggggucuggcagc

SEQ ID NO: 2478184 - RNA, 21 nt, Human
guugggguggguauaaaagau

SEQ ID NO: 2478185 - RNA, 24 nt, Human
aaggaugcacagaguuguuacauu

SEQ ID NO: 2478186 - RNA, 18 nt, Human
aaggaucuuuguggccaa

SEQ ID NO: 2478187 - RNA, 20 nt, Human
aaggaucuuuguggccaagg

SEQ ID NO: 2478188 - RNA, 20 nt, Human
aaggaugccaagaaguuuaa

SEQ ID NO: 2478189 - RNA, 22 nt, Human
aaggaugcacagaguuguuaca

SEQ ID NO: 2478190 - RNA, 14 nt, Human
aaggaugcccaaag

SEQ ID NO: 2478191 - RNA, 19 nt, Human
aaggaugcccaaagaugca

SEQ ID NO: 2478192 - RNA, 22 nt, Human
aaggaugccaagaaguuuaagg

SEQ ID NO: 2478193 - RNA, 15 nt, Human
aaggccccagagacu

SEQ ID NO: 2478194 - RNA, 14 nt, Human
aaggccccagagac

SEQ ID NO: 2478195 - RNA, 16 nt, Human
aaggccccgcccaggc

SEQ ID NO: 2478196 - RNA, 14 nt, Human
aaggccccgcccag

SEQ ID NO: 2478197 - RNA, 19 nt, Human
aaggccccgcccaggcuua

SEQ ID NO: 2478198 - RNA, 14 nt, Human
aaggcccccuacgc

SEQ ID NO: 2478199 - RNA, 15 nt, Human
aaggcuaccuuugua

SEQ ID NO: 2478200 - RNA, 14 nt, Human
guugcccaggcugg

SEQ ID NO: 2478201 - RNA, 13 nt, Human
aaggcuaccuuug

SEQ ID NO: 2478202 - RNA, 14 nt, Human
aaggcguggagcug

SEQ ID NO: 2478203 - RNA, 13 nt, Human
aaggcggccccuc

SEQ ID NO: 2478204 - RNA, 18 nt, Human
aaggcgggagcaucucuu

SEQ ID NO: 2478205 - RNA, 23 nt, Human
aaggcgaucccaucuugauaaga

SEQ ID NO: 2478206 - RNA, 14 nt, Human
aaggccuuucugug

SEQ ID NO: 2478207 - RNA, 17 nt, Human
aaggccuuuaaaauuuu

SEQ ID NO: 2478208 - RNA, 16 nt, Human
aaggccuuuaaaauuu

SEQ ID NO: 2478209 - RNA, 15 nt, Human
aaggccuuuaaaauu

SEQ ID NO: 2478210 - RNA, 15 nt, Human
aaggccuucuccucc

SEQ ID NO: 2478211 - RNA, 12 nt, Human
aaggccuucucc

SEQ ID NO: 2478212 - RNA, 11 nt, Human
aaggccuuuaa

SEQ ID NO: 2478213 - RNA, 15 nt, Human
aaggccuuaauaugu

SEQ ID NO: 2478214 - RNA, 16 nt, Human
aaggccucuuccuugc

SEQ ID NO: 2478215 - RNA, 17 nt, Human
aaggccuggcccacagc

SEQ ID NO: 2478216 - RNA, 18 nt, Human
aaguauucuuauuuaaug

SEQ ID NO: 2478217 - RNA, 19 nt, Human
aaguauucuuauuuaauga

SEQ ID NO: 2478218 - RNA, 21 nt, Human
aaguauucuguacucuuagau

SEQ ID NO: 2478219 - RNA, 16 nt, Human
aagucaaccugccuga

SEQ ID NO: 2478220 - RNA, 22 nt, Human
aagucaaccaauguagaaagcu

SEQ ID NO: 2478221 - RNA, 16 nt, Human
aagucaaccaauguag

SEQ ID NO: 2478222 - RNA, 17 nt, Human
aagucaauguuuucagu

SEQ ID NO: 2478223 - RNA, 19 nt, Human
aagucaaggguaggguggg

SEQ ID NO: 2478224 - RNA, 24 nt, Human
aagucacacaguauuacuucugcu

SEQ ID NO: 2478225 - RNA, 21 nt, Human
aagucaagugaaaaaggagga

SEQ ID NO: 2478226 - RNA, 17 nt, Human
aagucacucccaagccc

SEQ ID NO: 2478227 - RNA, 18 nt, Human
aagucaccggagcuuuca

SEQ ID NO: 2478228 - RNA, 23 nt, Human
aagucacucccaagcccccuccu

SEQ ID NO: 2478229 - RNA, 14 nt, Human
aagucaccggagcu

SEQ ID NO: 2478230 - RNA, 12 nt, Human
aagucacugcac

SEQ ID NO: 2478231 - RNA, 20 nt, Human
aagucagugcccaacuguua

SEQ ID NO: 2478232 - RNA, 21 nt, Human
aagucagugcccaacuguuau

SEQ ID NO: 2478233 - RNA, 23 nt, Human
aagucaguccaggaugcuaacau

SEQ ID NO: 2478234 - RNA, 18 nt, Human
aagucagugggaacguga

SEQ ID NO: 2478235 - RNA, 18 nt, Human
aagucaauguuuucaguu

SEQ ID NO: 2478236 - RNA, 13 nt, Human
aagucacacagug

SEQ ID NO: 2478237 - RNA, 16 nt, Human
aagucacaucacagga

SEQ ID NO: 2478238 - RNA, 17 nt, Human
aagucacaucacaggac

SEQ ID NO: 2478239 - RNA, 19 nt, Human
aagucacaucacaggacac

SEQ ID NO: 2478240 - RNA, 15 nt, Human
aaguauuauuuucca

SEQ ID NO: 2478241 - RNA, 16 nt, Human
aaguauguuuuagcau

SEQ ID NO: 2478242 - RNA, 21 nt, Human
aaguauguuagugcaaauugu

SEQ ID NO: 2478243 - RNA, 23 nt, Human
aaguauguuagugcaaauuguca

SEQ ID NO: 2478244 - RNA, 23 nt, Human
aaguacuucuccacccugcucuc

SEQ ID NO: 2478245 - RNA, 22 nt, Human
aaguacuucuccacccugcucu

SEQ ID NO: 2478246 - RNA, 15 nt, Human
aaguacuggagaaaa

SEQ ID NO: 2478247 - RNA, 21 nt, Human
aaguacuucuccacccugcuc

SEQ ID NO: 2478248 - RNA, 17 nt, Human
aaguacugcuguaaaua

SEQ ID NO: 2478249 - RNA, 20 nt, Human
aaguacugcuguaaauaaau

SEQ ID NO: 2478250 - RNA, 23 nt, Human
aaguacugcuguaaauaaaugcu

SEQ ID NO: 2478251 - RNA, 16 nt, Human
aaguacuauguaucaa

SEQ ID NO: 2478252 - RNA, 16 nt, Human
guuuucugagaaagac

SEQ ID NO: 2478253 - RNA, 17 nt, Human
guuuucugagaaagacu

SEQ ID NO: 2478254 - RNA, 22 nt, Human
guuuucugagaaagacuauuca

SEQ ID NO: 2478255 - RNA, 15 nt, Human
aaguacuauguauca

SEQ ID NO: 2478256 - RNA, 18 nt, Human
aagucuuagauguauaua

SEQ ID NO: 2478257 - RNA, 19 nt, Human
aagucuuagauguauauau

SEQ ID NO: 2478258 - RNA, 15 nt, Human
aagugaaugcuggga

SEQ ID NO: 2478259 - RNA, 22 nt, Human
aagugaagguuuacaauuuaca

SEQ ID NO: 2478260 - RNA, 17 nt, Human
aagucaugcaaaggcug

SEQ ID NO: 2478261 - RNA, 17 nt, Human
aagucuuagauguauau

SEQ ID NO: 2478262 - RNA, 15 nt, Human
aagucaugaagccca

SEQ ID NO: 2478263 - RNA, 17 nt, Human
aagucaugaagcccaag

SEQ ID NO: 2478264 - RNA, 23 nt, Human
aagucaugaagcccaagugaaau

SEQ ID NO: 2478265 - RNA, 15 nt, Human
aagucauccaaucua

SEQ ID NO: 2478266 - RNA, 11 nt, Human
aagucaugagc

SEQ ID NO: 2478267 - RNA, 20 nt, Human
aagugacagggaagcuacag

SEQ ID NO: 2478268 - RNA, 19 nt, Human
aagugacagggaagcuaca

SEQ ID NO: 2478269 - RNA, 16 nt, Human
aagugacagggaagcu

SEQ ID NO: 2478270 - RNA, 15 nt, Human
aagugacagggaagc

SEQ ID NO: 2478271 - RNA, 23 nt, Human
aagugacagggaagcuacagguu

SEQ ID NO: 2478272 - RNA, 22 nt, Human
aagugacagggaagcuacaggu

SEQ ID NO: 2478273 - RNA, 16 nt, Human
aagugacaaggcccca

SEQ ID NO: 2478274 - RNA, 18 nt, Human
aagugacaaggccccaga

SEQ ID NO: 2478275 - RNA, 19 nt, Human
aagugacaaggccccagag

SEQ ID NO: 2478276 - RNA, 12 nt, Human
aagugacaggga

SEQ ID NO: 2478277 - RNA, 24 nt, Human
aagugacacagcagcuucaccaga

SEQ ID NO: 2478278 - RNA, 20 nt, Human
aagugacaaggccccagaga

SEQ ID NO: 2478279 - RNA, 21 nt, Human
aagugacaaggccccagagac

SEQ ID NO: 2478280 - RNA, 14 nt, Human
aagugaauuuuucu

SEQ ID NO: 2478281 - RNA, 17 nt, Human
aagugaauuuuucucua

SEQ ID NO: 2478282 - RNA, 19 nt, Human
aagugaauuuuucucuaac

SEQ ID NO: 2478283 - RNA, 18 nt, Human
aagugaaugcucaaguuu

SEQ ID NO: 2478284 - RNA, 19 nt, Human
aagucaugcaaaggcuggg

SEQ ID NO: 2478285 - RNA, 14 nt, Human
aagugaauuugaau

SEQ ID NO: 2478286 - RNA, 16 nt, Human
aagugaauuugaauga

SEQ ID NO: 2478287 - RNA, 17 nt, Human
aagugaauuugaaugaa

SEQ ID NO: 2478288 - RNA, 19 nt, Human
aagugaauuugaaugaaaa

SEQ ID NO: 2478289 - RNA, 20 nt, Human
aagugaauuugaaugaaaaa

SEQ ID NO: 2478290 - RNA, 23 nt, Human
aagugaauuugaaugaaaaauuu

SEQ ID NO: 2478291 - RNA, 19 nt, Human
aagugacuuuggcugcaug

SEQ ID NO: 2478292 - RNA, 19 nt, Human
aagugacuuagcagaugcu

SEQ ID NO: 2478293 - RNA, 19 nt, Human
aagugacuguucaagagca

SEQ ID NO: 2478294 - RNA, 15 nt, Human
aagugagaagauggu

SEQ ID NO: 2478295 - RNA, 19 nt, Human
guuuuucuacuuuuaaaga

SEQ ID NO: 2478296 - RNA, 21 nt, Human
aagugacuuagcagaugcugg

SEQ ID NO: 2478297 - RNA, 18 nt, Human
aagugagaauaggcagcc

SEQ ID NO: 2478298 - RNA, 18 nt, Human
guuuuucuaggccugggg

SEQ ID NO: 2478299 - RNA, 17 nt, Human
guuuuucugccagggag

SEQ ID NO: 2478300 - RNA, 14 nt, Human
guuuuucugccagg

SEQ ID NO: 2478301 - RNA, 16 nt, Human
guuuuucuggguggcc

SEQ ID NO: 2478302 - RNA, 18 nt, Human
guuuuugauagcuuuauu

SEQ ID NO: 2478303 - RNA, 17 nt, Human
guuuuucugcuuuugaa

SEQ ID NO: 2478304 - RNA, 15 nt, Human
guuuuugcacauguu

SEQ ID NO: 2478305 - RNA, 18 nt, Human
guuuuugguuuuuaaaac

SEQ ID NO: 2478306 - RNA, 17 nt, Human
guuuuuguuuggagagc

SEQ ID NO: 2478307 - RNA, 23 nt, Human
guuuuuguucuuaauugcacucu

SEQ ID NO: 2478308 - RNA, 15 nt, Human
guuuuuguucaaagc

SEQ ID NO: 2478309 - RNA, 14 nt, Human
guuuuuguaaauua

SEQ ID NO: 2478310 - RNA, 16 nt, Human
guuuuuguaaagugug

SEQ ID NO: 2478311 - RNA, 15 nt, Human
guuuuuguaaagugu

SEQ ID NO: 2478312 - RNA, 14 nt, Human
guuuuuguacugua

SEQ ID NO: 2478313 - RNA, 21 nt, Human
guuuuuguaaauuaaucuuuu

SEQ ID NO: 2478314 - RNA, 16 nt, Human
guuuuugucuuaaaaa

SEQ ID NO: 2478315 - RNA, 10 nt, Human
guuuuuuggu

SEQ ID NO: 2478316 - RNA, 9 nt, Human
guuuuuugg

SEQ ID NO: 2478317 - RNA, 12 nt, Human
guuuuuugaaaa

SEQ ID NO: 2478318 - RNA, 14 nt, Human
guuuuuuccugagc

SEQ ID NO: 2478319 - RNA, 21 nt, Human
guuuuuuccugagcuuggcca

SEQ ID NO: 2478320 - RNA, 16 nt, Human
guuuuuuagaucaaau

SEQ ID NO: 2478321 - RNA, 21 nt, Human
guuuuuuaaaauauuuaucug

SEQ ID NO: 2478322 - RNA, 15 nt, Human
guuuuuuaugcuaau

SEQ ID NO: 2478323 - RNA, 19 nt, Human
guuuuuuagaucaaauacu

SEQ ID NO: 2478324 - RNA, 23 nt, Human
guuuuuuuuuaaaaaagaaacau

SEQ ID NO: 2478325 - RNA, 15 nt, Human
guuuuuuuuuaaaga

SEQ ID NO: 2478326 - RNA, 18 nt, Human
guuuuuuuuaaauaaaag

SEQ ID NO: 2478327 - RNA, 13 nt, Human
guuuuuuuucuaa

SEQ ID NO: 2478328 - RNA, 17 nt, Human
guuuuuuuucuaaaacu

SEQ ID NO: 2478329 - RNA, 20 nt, Human
guuuuuuuuaaauaaaagca

SEQ ID NO: 2478330 - RNA, 19 nt, Human
guuuuuuucuucuguauuu

SEQ ID NO: 2478331 - RNA, 19 nt, Human
guuuuuuuguauaguaaag

SEQ ID NO: 2478332 - RNA, 23 nt, Human
guuugcacguuaugguguuucuc

SEQ ID NO: 2478333 - RNA, 20 nt, Human
guuucuggucucuaggcugg

SEQ ID NO: 2478334 - RNA, 19 nt, Human
guuugcacuguaugcugga

SEQ ID NO: 2478335 - RNA, 20 nt, Human
guuugcacuguaugcuggac

SEQ ID NO: 2478336 - RNA, 14 nt, Human
guuugcauagguga

SEQ ID NO: 2478337 - RNA, 16 nt, Human
guuugcagaugacaaa

SEQ ID NO: 2478338 - RNA, 22 nt, Human
guuugcagaaaagcaccugccg

SEQ ID NO: 2478339 - RNA, 19 nt, Human
guuugcagaaaagcaccug

SEQ ID NO: 2478340 - RNA, 22 nt, Human
guuugcacuguaugcuggacgg

SEQ ID NO: 2478341 - RNA, 21 nt, Human
guuugcagaaaagcaccugcc

SEQ ID NO: 2478342 - RNA, 20 nt, Human
guuugcagagcuugaacaca

SEQ ID NO: 2478343 - RNA, 13 nt, Human
guuugcuaaguga

SEQ ID NO: 2478344 - RNA, 18 nt, Human
guuugccuucuacuuuua

SEQ ID NO: 2478345 - RNA, 18 nt, Human
guuugcuaucuuaauuuu

SEQ ID NO: 2478346 - RNA, 16 nt, Human
guuugcuaucuuaauu

SEQ ID NO: 2478347 - RNA, 14 nt, Human
guuugccugagggc

SEQ ID NO: 2478348 - RNA, 17 nt, Human
guuugccucugccucug

SEQ ID NO: 2478349 - RNA, 14 nt, Human
guuucucagcuccc

SEQ ID NO: 2478350 - RNA, 15 nt, Human
guuucucagcuccca

SEQ ID NO: 2478351 - RNA, 21 nt, Human
guuucucagauccuuguuuca

SEQ ID NO: 2478352 - RNA, 15 nt, Human
guuucuagggaaaug

SEQ ID NO: 2478353 - RNA, 18 nt, Human
guuucuagggaaaugaaa

SEQ ID NO: 2478354 - RNA, 19 nt, Human
guuucucagauccuuguuu

SEQ ID NO: 2478355 - RNA, 19 nt, Human
guuucucagcucccauuuc

SEQ ID NO: 2478356 - RNA, 18 nt, Human
guuucuccaaacugaagc

SEQ ID NO: 2478357 - RNA, 14 nt, Human
guuucucccccugg

SEQ ID NO: 2478358 - RNA, 15 nt, Human
guuucucccccuggg

SEQ ID NO: 2478359 - RNA, 17 nt, Human
guuucucccccugggcu

SEQ ID NO: 2478360 - RNA, 22 nt, Human
guuucucccccugggcucugcc

SEQ ID NO: 2478361 - RNA, 23 nt, Human
guuucucccccugggcucugccc

SEQ ID NO: 2478362 - RNA, 21 nt, Human
guuucugguggucuguuggca

SEQ ID NO: 2478363 - RNA, 18 nt, Human
guuucugguggucuguug

SEQ ID NO: 2478364 - RNA, 14 nt, Human
guuucuggucucua

SEQ ID NO: 2478365 - RNA, 16 nt, Human
guuucugccucugagg

SEQ ID NO: 2478366 - RNA, 18 nt, Human
guuucugccgcagcccug

SEQ ID NO: 2478367 - RNA, 22 nt, Human
guuucugccgcagcccugcaga

SEQ ID NO: 2478368 - RNA, 22 nt, Human
guuucucccucucacugucuga

SEQ ID NO: 2478369 - RNA, 20 nt, Human
guuucucccucucacugucu

SEQ ID NO: 2478370 - RNA, 12 nt, Human
guuucucugcug

SEQ ID NO: 2478371 - RNA, 13 nt, Human
guuucucugcugu

SEQ ID NO: 2478372 - RNA, 19 nt, Human
guuuggcaauaguuugcau

SEQ ID NO: 2478373 - RNA, 17 nt, Human
guuuggcaauaguuugc

SEQ ID NO: 2478374 - RNA, 15 nt, Human
guuuggcaauaguuu

SEQ ID NO: 2478375 - RNA, 20 nt, Human
guuuggauucuuauguagca

SEQ ID NO: 2478376 - RNA, 17 nt, Human
guuugcuauuagagcau

SEQ ID NO: 2478377 - RNA, 20 nt, Human
guuugcuaucuuaauuuugg

SEQ ID NO: 2478378 - RNA, 17 nt, Human
guuugcucaccuggggu

SEQ ID NO: 2478379 - RNA, 15 nt, Human
guuuggccaucucug

SEQ ID NO: 2478380 - RNA, 16 nt, Human
guuuggcgggccaagg

SEQ ID NO: 2478381 - RNA, 18 nt, Human
guuuggcgggccaaggac

SEQ ID NO: 2478382 - RNA, 21 nt, Human
guuuggcgggccaaggacugc

SEQ ID NO: 2478383 - RNA, 16 nt, Human
guuuuaagaggcaggg

SEQ ID NO: 2478384 - RNA, 18 nt, Human
guuuuaaggaugcuugua

SEQ ID NO: 2478385 - RNA, 19 nt, Human
guuuggcugugucuaaacu

SEQ ID NO: 2478386 - RNA, 18 nt, Human
guuuggcugugucuaaac

SEQ ID NO: 2478387 - RNA, 17 nt, Human
guuuggcugugucuaaa

SEQ ID NO: 2478388 - RNA, 15 nt, Human
guuuggcugugucua

SEQ ID NO: 2478389 - RNA, 21 nt, Human
guuuggcugugucuaaacugc

SEQ ID NO: 2478390 - RNA, 20 nt, Human
guuuggcugugucuaaacug

SEQ ID NO: 2478391 - RNA, 14 nt, Human
guuuuaagaggcag

SEQ ID NO: 2478392 - RNA, 14 nt, Human
guuuuacugugaaa

SEQ ID NO: 2478393 - RNA, 15 nt, Human
guuuuacugcagcuu

SEQ ID NO: 2478394 - RNA, 13 nt, Human
guuuuacuuuuaa

SEQ ID NO: 2478395 - RNA, 18 nt, Human
guuuuacuuuuaaacugu

SEQ ID NO: 2478396 - RNA, 21 nt, Human
guuuuacuuuuaaacugugua

SEQ ID NO: 2478397 - RNA, 16 nt, Human
guuuuacugcagcuuu

SEQ ID NO: 2478398 - RNA, 18 nt, Human
guuuuacugcagcuuugu

SEQ ID NO: 2478399 - RNA, 22 nt, Human
guuuuauaauuuugugaagcaa

SEQ ID NO: 2478400 - RNA, 15 nt, Human
guuuuauaauuuugu

SEQ ID NO: 2478401 - RNA, 15 nt, Human
guuuucugagaaaga

SEQ ID NO: 2478402 - RNA, 18 nt, Human
guuuuauacuguacuuaa

SEQ ID NO: 2478403 - RNA, 21 nt, Human
guuuuauacugaaggaaaaac

SEQ ID NO: 2478404 - RNA, 15 nt, Human
guuuuauacugaagg

SEQ ID NO: 2478405 - RNA, 23 nt, Human
guuuuauacuguacuuaauaaau

SEQ ID NO: 2478406 - RNA, 19 nt, Human
guuguaacuaggcucagag

SEQ ID NO: 2478407 - RNA, 18 nt, Human
guuguaacuaggcucaga

SEQ ID NO: 2478408 - RNA, 13 nt, Human
guuguaacuaggc

SEQ ID NO: 2478409 - RNA, 19 nt, Human
aaggcugagaggagagaga

SEQ ID NO: 2478410 - RNA, 21 nt, Human
guuguaacuaggcucagagau

SEQ ID NO: 2478411 - RNA, 19 nt, Human
aaggcugaccaagagagaa

SEQ ID NO: 2478412 - RNA, 16 nt, Human
guuguaaacaggaagc

SEQ ID NO: 2478413 - RNA, 22 nt, Human
guuguaaaauauagcuguacaa

SEQ ID NO: 2478414 - RNA, 14 nt, Human
guuguaaaauauag

SEQ ID NO: 2478415 - RNA, 13 nt, Human
guuguaaaauaua

SEQ ID NO: 2478416 - RNA, 15 nt, Human
guuguaaauauauaa

SEQ ID NO: 2478417 - RNA, 14 nt, Human
guuguaaauauaua

SEQ ID NO: 2478418 - RNA, 18 nt, Human
guuguaaauauauaaaua

SEQ ID NO: 2478419 - RNA, 16 nt, Human
guuguaaauauauaaa

SEQ ID NO: 2478420 - RNA, 14 nt, Human
guuguaaauauuua

SEQ ID NO: 2478421 - RNA, 20 nt, Human
guuguaaauauuuauguaaa

SEQ ID NO: 2478422 - RNA, 13 nt, Human
aagggcccagaga

SEQ ID NO: 2478423 - RNA, 15 nt, Human
aagggcccagagagg

SEQ ID NO: 2478424 - RNA, 18 nt, Human
aaggcuggagugcagugg

SEQ ID NO: 2478425 - RNA, 15 nt, Human
aaggcugcuuagaau

SEQ ID NO: 2478426 - RNA, 19 nt, Human
aaggcugcgucuggagggg

SEQ ID NO: 2478427 - RNA, 16 nt, Human
aaggcugcgucuggag

SEQ ID NO: 2478428 - RNA, 14 nt, Human
aaggcugcgucugg

SEQ ID NO: 2478429 - RNA, 23 nt, Human
aaggcugaggaaaggccagcugg

SEQ ID NO: 2478430 - RNA, 16 nt, Human
aaggcugaugucaauu

SEQ ID NO: 2478431 - RNA, 23 nt, Human
aaggcugaugccaaguuguuuga

SEQ ID NO: 2478432 - RNA, 17 nt, Human
aaggcugaggaaaggcc

SEQ ID NO: 2478433 - RNA, 17 nt, Human
aaggcugaccaagagag

SEQ ID NO: 2478434 - RNA, 19 nt, Human
aaggcugaggaaaggccag

SEQ ID NO: 2478435 - RNA, 20 nt, Human
aaggcugaggaaaggccagc

SEQ ID NO: 2478436 - RNA, 16 nt, Human
aaggguaucuggugac

SEQ ID NO: 2478437 - RNA, 19 nt, Human
aaggguaucaggugcugcc

SEQ ID NO: 2478438 - RNA, 14 nt, Human
aaggggcaguggug

SEQ ID NO: 2478439 - RNA, 17 nt, Human
aaggggcaguggugguu

SEQ ID NO: 2478440 - RNA, 17 nt, Human
aaggguaucaggugcug

SEQ ID NO: 2478441 - RNA, 13 nt, Human
aaggggagcccac

SEQ ID NO: 2478442 - RNA, 16 nt, Human
aaggggagcccacugu

SEQ ID NO: 2478443 - RNA, 13 nt, Human
aaggggaggaggg

SEQ ID NO: 2478444 - RNA, 22 nt, Human
aaggggauguauccaugggggc

SEQ ID NO: 2478445 - RNA, 15 nt, Human
aaggggaggagggcg

SEQ ID NO: 2478446 - RNA, 14 nt, Human
aaggggaggcagcc

SEQ ID NO: 2478447 - RNA, 16 nt, Human
aaggggaggcagccgg

SEQ ID NO: 2478448 - RNA, 20 nt, Human
aagggcccuucacugccuuu

SEQ ID NO: 2478449 - RNA, 16 nt, Human
aagggcccagauucua

SEQ ID NO: 2478450 - RNA, 16 nt, Human
aaggcuggcugggcau

SEQ ID NO: 2478451 - RNA, 21 nt, Human
aaguaaagcuaaaaugauuuu

SEQ ID NO: 2478452 - RNA, 12 nt, Human
aaguaaagcuaa

SEQ ID NO: 2478453 - RNA, 15 nt, Human
guuucuaccucccag

SEQ ID NO: 2478454 - RNA, 23 nt, Human
guuucuagcuagaaauaugauuu

SEQ ID NO: 2478455 - RNA, 18 nt, Human
guuucuagcuagaaauau

SEQ ID NO: 2478456 - RNA, 16 nt, Human
guuucuaccucccaga

SEQ ID NO: 2478457 - RNA, 18 nt, Human
guuucuagcacuggccug

SEQ ID NO: 2478458 - RNA, 17 nt, Human
aaguaaaaccacagcag

SEQ ID NO: 2478459 - RNA, 18 nt, Human
aaguaaaaccacagcagu

SEQ ID NO: 2478460 - RNA, 16 nt, Human
aaggguuuuaauguag

SEQ ID NO: 2478461 - RNA, 12 nt, Human
aaguaaaacuug

SEQ ID NO: 2478462 - RNA, 20 nt, Human
aaggguuuguggcugggggc

SEQ ID NO: 2478463 - RNA, 22 nt, Human
aaguaaaaacaaagaaauuaug

SEQ ID NO: 2478464 - RNA, 16 nt, Human
aagggugcugcuuccc

SEQ ID NO: 2478465 - RNA, 19 nt, Human
aagggugcugcuucccucu

SEQ ID NO: 2478466 - RNA, 14 nt, Human
aaggguuaagaaaa

SEQ ID NO: 2478467 - RNA, 14 nt, Human
aaggguuauauuuu

SEQ ID NO: 2478468 - RNA, 23 nt, Human
aagggugcugcuucccucugccu

SEQ ID NO: 2478469 - RNA, 13 nt, Human
aagggugucugag

SEQ ID NO: 2478470 - RNA, 20 nt, Human
aagggugcugcuucccucug

SEQ ID NO: 2478471 - RNA, 21 nt, Human
aagggugaugggaaagcauug

SEQ ID NO: 2478472 - RNA, 18 nt, Human
aaggggcagucuggaggg

SEQ ID NO: 2478473 - RNA, 19 nt, Human
aaggggcagucuggagggg

SEQ ID NO: 2478474 - RNA, 20 nt, Human
aaggggcagucuggaggggc

SEQ ID NO: 2478475 - RNA, 15 nt, Human
aaguaaaaccacagc

SEQ ID NO: 2478476 - RNA, 16 nt, Human
aaguaaaaccacagca

SEQ ID NO: 2478477 - RNA, 14 nt, Human
aaguaaaaccacag

SEQ ID NO: 2478478 - RNA, 17 nt, Human
aaggguuuguggcuggg

SEQ ID NO: 2478479 - RNA, 17 nt, Human
aaggguucuggcugccc

SEQ ID NO: 2478480 - RNA, 16 nt, Human
aaggguucccucaaga

SEQ ID NO: 2478481 - RNA, 15 nt, Human
uacauaaugcgugca

SEQ ID NO: 2478482 - RNA, 20 nt, Human
uacauaaucuguacaaugaa

SEQ ID NO: 2478483 - RNA, 15 nt, Human
uacauaaucuguaca

SEQ ID NO: 2478484 - RNA, 12 nt, Human
uacauaaucugu

SEQ ID NO: 2478485 - RNA, 19 nt, Human
uacauaaguaauucaagaa

SEQ ID NO: 2478486 - RNA, 15 nt, Human
uacauaaguuuagga

SEQ ID NO: 2478487 - RNA, 17 nt, Human
uacauaaguaauucaag

SEQ ID NO: 2478488 - RNA, 16 nt, Human
uacauaaguaauucaa

SEQ ID NO: 2478489 - RNA, 11 nt, Human
uacagugguuu

SEQ ID NO: 2478490 - RNA, 14 nt, Human
uacagucugucaug

SEQ ID NO: 2478491 - RNA, 15 nt, Human
uacagucugucauga

SEQ ID NO: 2478492 - RNA, 18 nt, Human
uacagucuuccauuugca

SEQ ID NO: 2478493 - RNA, 19 nt, Human
uacagucuuccauuugcaa

SEQ ID NO: 2478494 - RNA, 20 nt, Human
uacagucuuccauuugcaag

SEQ ID NO: 2478495 - RNA, 22 nt, Human
uacagucuuccauuugcaaggg

SEQ ID NO: 2478496 - RNA, 12 nt, Human
uacagucuugua

SEQ ID NO: 2478497 - RNA, 12 nt, Human
uacagugagcca

SEQ ID NO: 2478498 - RNA, 23 nt, Human
uacagugaaaauguaagcuguuu

SEQ ID NO: 2478499 - RNA, 22 nt, Human
uacagugaaaauguaagcuguu

SEQ ID NO: 2478500 - RNA, 21 nt, Human
uacagugaaaauguaagcugu

SEQ ID NO: 2478501 - RNA, 14 nt, Human
uacagugagccaag

SEQ ID NO: 2478502 - RNA, 20 nt, Human
uacagugaaaauguaagcug

SEQ ID NO: 2478503 - RNA, 15 nt, Human
uacagugaaaaugua

SEQ ID NO: 2478504 - RNA, 17 nt, Human
uacagucuugcagcagg

SEQ ID NO: 2478505 - RNA, 13 nt, Human
uacagucuuguau

SEQ ID NO: 2478506 - RNA, 15 nt, Human
uacaguccucccauc

SEQ ID NO: 2478507 - RNA, 12 nt, Human
uacaguccuccc

SEQ ID NO: 2478508 - RNA, 22 nt, Human
uacagcaacaauuuaugaauug

SEQ ID NO: 2478509 - RNA, 19 nt, Human
uacagcaacaauuuaugaa

SEQ ID NO: 2478510 - RNA, 20 nt, Human
uacagcaacaauuuaugaau

SEQ ID NO: 2478511 - RNA, 18 nt, Human
uacaguaucucagggccu

SEQ ID NO: 2478512 - RNA, 18 nt, Human
uacaguccucccaucuca

SEQ ID NO: 2478513 - RNA, 17 nt, Human
uacaguccucccaucuc

SEQ ID NO: 2478514 - RNA, 16 nt, Human
uacagucugucaugaa

SEQ ID NO: 2478515 - RNA, 13 nt, Human
uacagucugucau

SEQ ID NO: 2478516 - RNA, 14 nt, Human
aauguauuuuuccu

SEQ ID NO: 2478517 - RNA, 13 nt, Human
aaugucacaggca

SEQ ID NO: 2478518 - RNA, 22 nt, Human
aaugugaaacuggauuaaacuu

SEQ ID NO: 2478519 - RNA, 14 nt, Human
aaugucacaggcag

SEQ ID NO: 2478520 - RNA, 18 nt, Human
aauguaucauagaaaugu

SEQ ID NO: 2478521 - RNA, 19 nt, Human
aauguaucauagaaaugua

SEQ ID NO: 2478522 - RNA, 16 nt, Human
aauguaucauagaaau

SEQ ID NO: 2478523 - RNA, 15 nt, Human
aauguaucaggaaau

SEQ ID NO: 2478524 - RNA, 18 nt, Human
aauguaucaggaaauaua

SEQ ID NO: 2478525 - RNA, 22 nt, Human
aauguaucauagaaauguaacu

SEQ ID NO: 2478526 - RNA, 16 nt, Human
aauguaucuuauucac

SEQ ID NO: 2478527 - RNA, 13 nt, Human
aauguaucuuauu

SEQ ID NO: 2478528 - RNA, 16 nt, Human
aauguaugcuucauac

SEQ ID NO: 2478529 - RNA, 15 nt, Human
aauguaugcuucaua

SEQ ID NO: 2478530 - RNA, 18 nt, Human
aauguaucuuauucacau

SEQ ID NO: 2478531 - RNA, 17 nt, Human
aauguaucuuauucaca

SEQ ID NO: 2478532 - RNA, 22 nt, Human
uacauacccuggccgcccccug

SEQ ID NO: 2478533 - RNA, 14 nt, Human
uacauacaccagca

SEQ ID NO: 2478534 - RNA, 15 nt, Human
uacauacaccagcau

SEQ ID NO: 2478535 - RNA, 16 nt, Human
uacauacaccagcauu

SEQ ID NO: 2478536 - RNA, 20 nt, Human
uacauacaccagcauuccuu

SEQ ID NO: 2478537 - RNA, 13 nt, Human
uacauacugcugu

SEQ ID NO: 2478538 - RNA, 23 nt, Human
uacauacuuucauccugacucug

SEQ ID NO: 2478539 - RNA, 12 nt, Human
uacauacugcug

SEQ ID NO: 2478540 - RNA, 12 nt, Human
aauguagagggg

SEQ ID NO: 2478541 - RNA, 12 nt, Human
aauguagauuuu

SEQ ID NO: 2478542 - RNA, 13 nt, Human
aauguagccaugg

SEQ ID NO: 2478543 - RNA, 14 nt, Human
aauguagcugguuu

SEQ ID NO: 2478544 - RNA, 17 nt, Human
aauguagcugguuuccu

SEQ ID NO: 2478545 - RNA, 19 nt, Human
aauguaggcuuaguuugug

SEQ ID NO: 2478546 - RNA, 16 nt, Human
aauguaggcuuaguuu

SEQ ID NO: 2478547 - RNA, 21 nt, Human
aauguaggccaaauuuguagu

SEQ ID NO: 2478548 - RNA, 21 nt, Human
aauguagcugguuuccucauu

SEQ ID NO: 2478549 - RNA, 22 nt, Human
aauguaggcuuaguuugugugu

SEQ ID NO: 2478550 - RNA, 20 nt, Human
aauguagguaugaauaaguu

SEQ ID NO: 2478551 - RNA, 13 nt, Human
aauguaagacaaa

SEQ ID NO: 2478552 - RNA, 13 nt, Human
aauguaagcucua

SEQ ID NO: 2478553 - RNA, 15 nt, Human
aauguaagcucuacu

SEQ ID NO: 2478554 - RNA, 18 nt, Human
aaugguuuucuugugugu

SEQ ID NO: 2478555 - RNA, 17 nt, Human
aaugguuuucuugugug

SEQ ID NO: 2478556 - RNA, 22 nt, Human
aaugguuuucuuguguguuuau

SEQ ID NO: 2478557 - RNA, 23 nt, Human
aaugguuugaauauaaacacuau

SEQ ID NO: 2478558 - RNA, 17 nt, Human
aaugguuugaauauaaa

SEQ ID NO: 2478559 - RNA, 12 nt, Human
uacaauauuuaa

SEQ ID NO: 2478560 - RNA, 14 nt, Human
uacaauauuuaaaa

SEQ ID NO: 2478561 - RNA, 16 nt, Human
uacaauauuuaaaauu

SEQ ID NO: 2478562 - RNA, 20 nt, Human
uacaaucaaaggaaaauagu

SEQ ID NO: 2478563 - RNA, 13 nt, Human
uacaauaacauaa

SEQ ID NO: 2478564 - RNA, 21 nt, Human
uacaauaaaacuuugcugcca

SEQ ID NO: 2478565 - RNA, 13 nt, Human
uacaauaaauaau

SEQ ID NO: 2478566 - RNA, 16 nt, Human
uacaauaauucuauga

SEQ ID NO: 2478567 - RNA, 15 nt, Human
uacaauaaauaaucu

SEQ ID NO: 2478568 - RNA, 16 nt, Human
uacaauaaauaaucug

SEQ ID NO: 2478569 - RNA, 23 nt, Human
uacaaucauugcugaaaauggua

SEQ ID NO: 2478570 - RNA, 17 nt, Human
uacaaucauugcugaaa

SEQ ID NO: 2478571 - RNA, 22 nt, Human
uacaaucauugcugaaaauggu

SEQ ID NO: 2478572 - RNA, 23 nt, Human
aaugguuguauuagauguucucu

SEQ ID NO: 2478573 - RNA, 21 nt, Human
aaugguuguauuagauguucu

SEQ ID NO: 2478574 - RNA, 19 nt, Human
aaugguuguauuagauguu

SEQ ID NO: 2478575 - RNA, 18 nt, Human
aaugguuguauuagaugu

SEQ ID NO: 2478576 - RNA, 16 nt, Human
aaugguuuaaaugguc

SEQ ID NO: 2478577 - RNA, 24 nt, Human
aaugguuguauuagauguucucua

SEQ ID NO: 2478578 - RNA, 22 nt, Human
aaugguuuaacuucugccugug

SEQ ID NO: 2478579 - RNA, 13 nt, Human
aaugguuucaaag

SEQ ID NO: 2478580 - RNA, 17 nt, Human
aaugguuuaacuucugc

SEQ ID NO: 2478581 - RNA, 14 nt, Human
aaugguuugaauau

SEQ ID NO: 2478582 - RNA, 22 nt, Human
uacagagaacuaacacuauuuu

SEQ ID NO: 2478583 - RNA, 19 nt, Human
uacagagaacuaacacuau

SEQ ID NO: 2478584 - RNA, 23 nt, Human
uacagagaacuaacacuauuuua

SEQ ID NO: 2478585 - RNA, 14 nt, Human
uacagacuucucca

SEQ ID NO: 2478586 - RNA, 15 nt, Human
uacagacuucuccag

SEQ ID NO: 2478587 - RNA, 16 nt, Human
uacagacguaugcuua

SEQ ID NO: 2478588 - RNA, 17 nt, Human
uacagacguaugcuuau

SEQ ID NO: 2478589 - RNA, 18 nt, Human
uacagacguaugcuuauu

SEQ ID NO: 2478590 - RNA, 18 nt, Human
uacagauuuugauagcaa

SEQ ID NO: 2478591 - RNA, 17 nt, Human
uacagauuuugauagca

SEQ ID NO: 2478592 - RNA, 16 nt, Human
uacagauuuugauagc

SEQ ID NO: 2478593 - RNA, 15 nt, Human
uacagauuuugauag

SEQ ID NO: 2478594 - RNA, 22 nt, Human
uacagcaaggagauuuacaacu

SEQ ID NO: 2478595 - RNA, 22 nt, Human
uacagauuuugauagcaaagcg

SEQ ID NO: 2478596 - RNA, 21 nt, Human
uacagauuuugauagcaaagc

SEQ ID NO: 2478597 - RNA, 23 nt, Human
uacagauuuugauagcaaagcga

SEQ ID NO: 2478598 - RNA, 21 nt, Human
aauguacagcaaggagauuua

SEQ ID NO: 2478599 - RNA, 23 nt, Human
aauguacagcaaggagauuuaca

SEQ ID NO: 2478600 - RNA, 15 nt, Human
aauguacauuaauua

SEQ ID NO: 2478601 - RNA, 22 nt, Human
uacaccuaacucaccuaacuca

SEQ ID NO: 2478602 - RNA, 14 nt, Human
aauguaagcuguuu

SEQ ID NO: 2478603 - RNA, 17 nt, Human
aauguacaucuggccuu

SEQ ID NO: 2478604 - RNA, 14 nt, Human
uacaccuaugucau

SEQ ID NO: 2478605 - RNA, 17 nt, Human
uacaccuaugucauuuc

SEQ ID NO: 2478606 - RNA, 21 nt, Human
uacaccuaugucauuucauuu

SEQ ID NO: 2478607 - RNA, 22 nt, Human
uacaccuggcugagguuccucu

SEQ ID NO: 2478608 - RNA, 15 nt, Human
uacaccuggcugagg

SEQ ID NO: 2478609 - RNA, 14 nt, Human
uacaccuggcugag

SEQ ID NO: 2478610 - RNA, 13 nt, Human
uacaccuggcuga

SEQ ID NO: 2478611 - RNA, 12 nt, Human
uacaccuggcug

SEQ ID NO: 2478612 - RNA, 13 nt, Human
uacacggaaaacg

SEQ ID NO: 2478613 - RNA, 13 nt, Human
uacacgggacuga

SEQ ID NO: 2478614 - RNA, 20 nt, Human
uacaccuuucuccuuuguac

SEQ ID NO: 2478615 - RNA, 19 nt, Human
uacaccuuucuccuuugua

SEQ ID NO: 2478616 - RNA, 23 nt, Human
uacaccuggcugagguuccucug

SEQ ID NO: 2478617 - RNA, 18 nt, Human
uacaccuuucuccuuugu

SEQ ID NO: 2478618 - RNA, 16 nt, Human
aauuaaggcauaagaa

SEQ ID NO: 2478619 - RNA, 13 nt, Human
aauuaaguacuau

SEQ ID NO: 2478620 - RNA, 16 nt, Human
aauuaaggauuuuaug

SEQ ID NO: 2478621 - RNA, 20 nt, Human
aauuaaggauuuuaugcuuu

SEQ ID NO: 2478622 - RNA, 22 nt, Human
aauuaaggauuuuaugcuuuaa

SEQ ID NO: 2478623 - RNA, 17 nt, Human
uacauguacugauuacu

SEQ ID NO: 2478624 - RNA, 13 nt, Human
uacauguaguagu

SEQ ID NO: 2478625 - RNA, 19 nt, Human
uacauguaaaacauuaucu

SEQ ID NO: 2478626 - RNA, 16 nt, Human
uacaugguugugaccu

SEQ ID NO: 2478627 - RNA, 22 nt, Human
uacauguauuauuucauuaugu

SEQ ID NO: 2478628 - RNA, 12 nt, Human
uacauguauuau

SEQ ID NO: 2478629 - RNA, 15 nt, Human
uacauguauugcaca

SEQ ID NO: 2478630 - RNA, 12 nt, Human
uacauuaauguu

SEQ ID NO: 2478631 - RNA, 20 nt, Human
uacauuagcaguuugcuuug

SEQ ID NO: 2478632 - RNA, 19 nt, Human
uacauuagcaguuugcuuu

SEQ ID NO: 2478633 - RNA, 23 nt, Human
uacauuaauguuaauucagcacu

SEQ ID NO: 2478634 - RNA, 20 nt, Human
uacauuaauguuaauucagc

SEQ ID NO: 2478635 - RNA, 15 nt, Human
uacauuaauguuaau

SEQ ID NO: 2478636 - RNA, 15 nt, Human
uacauuaauuaucua

SEQ ID NO: 2478637 - RNA, 22 nt, Human
uacauuaauuauuauugcuguu

SEQ ID NO: 2478638 - RNA, 23 nt, Human
uacauuaauuauuauugcuguug

SEQ ID NO: 2478639 - RNA, 23 nt, Human
uacauugugggauguucagcacu

SEQ ID NO: 2478640 - RNA, 14 nt, Human
uacauuguucaauu

SEQ ID NO: 2478641 - RNA, 18 nt, Human
uacauugucauuuauaua

SEQ ID NO: 2478642 - RNA, 17 nt, Human
uacauugucauuuauau

SEQ ID NO: 2478643 - RNA, 19 nt, Human
uacauugucucuaaauugu

SEQ ID NO: 2478644 - RNA, 16 nt, Human
uacauugugaaacuuc

SEQ ID NO: 2478645 - RNA, 15 nt, Human
uacauuguucaauua

SEQ ID NO: 2478646 - RNA, 13 nt, Human
uacauuguugagc

SEQ ID NO: 2478647 - RNA, 23 nt, Human
uacauuguugagcuauugcuguu

SEQ ID NO: 2478648 - RNA, 19 nt, Human
uacauuguuugucugucuu

SEQ ID NO: 2478649 - RNA, 18 nt, Human
aauguugagaaucccaaa

SEQ ID NO: 2478650 - RNA, 18 nt, Human
aauguugacaugggacau

SEQ ID NO: 2478651 - RNA, 14 nt, Human
aauguugaauuuug

SEQ ID NO: 2478652 - RNA, 13 nt, Human
aaugugaaagcac

SEQ ID NO: 2478653 - RNA, 19 nt, Human
aaugugaacagcggcugga

SEQ ID NO: 2478654 - RNA, 15 nt, Human
aaugugaacuuuauu

SEQ ID NO: 2478655 - RNA, 16 nt, Human
aaugugaauaaaauua

SEQ ID NO: 2478656 - RNA, 17 nt, Human
aaugugaaguguuaaua

SEQ ID NO: 2478657 - RNA, 14 nt, Human
aaugugaaguguua

SEQ ID NO: 2478658 - RNA, 20 nt, Human
aaugugaacuuuauuaaaua

SEQ ID NO: 2478659 - RNA, 17 nt, Human
aaugugaccagggguga

SEQ ID NO: 2478660 - RNA, 15 nt, Human
aaugugaccaggggu

SEQ ID NO: 2478661 - RNA, 17 nt, Human
aaugugaaugggaaaag

SEQ ID NO: 2478662 - RNA, 17 nt, Human
aaugugaauaaaauuau

SEQ ID NO: 2478663 - RNA, 23 nt, Human
aaugugaaucagacccuacccca

SEQ ID NO: 2478664 - RNA, 18 nt, Human
aauuaacuuuuauaaacu

SEQ ID NO: 2478665 - RNA, 20 nt, Human
aauuaacuuuuauaaacuuu

SEQ ID NO: 2478666 - RNA, 22 nt, Human
aauuaacuuuuauaaacuuuac

SEQ ID NO: 2478667 - RNA, 19 nt, Human
aauuaacaugaauauuuag

SEQ ID NO: 2478668 - RNA, 18 nt, Human
aauuaaauuuugugucuc

SEQ ID NO: 2478669 - RNA, 17 nt, Human
aauuaaauuuugugucu

SEQ ID NO: 2478670 - RNA, 12 nt, Human
aauuaacacugc

SEQ ID NO: 2478671 - RNA, 17 nt, Human
uaccccccaaccccuga

SEQ ID NO: 2478672 - RNA, 16 nt, Human
uacccccaggguugag

SEQ ID NO: 2478673 - RNA, 15 nt, Human
uaccccaucauucau

SEQ ID NO: 2478674 - RNA, 16 nt, Human
uacccccgcccaggcu

SEQ ID NO: 2478675 - RNA, 12 nt, Human
uacccccgccca

SEQ ID NO: 2478676 - RNA, 15 nt, Human
uaccccccucugucu

SEQ ID NO: 2478677 - RNA, 20 nt, Human
uacccccgcccaggcuggcc

SEQ ID NO: 2478678 - RNA, 17 nt, Human
uacccccgcccaggcug

SEQ ID NO: 2478679 - RNA, 17 nt, Human
uacccccuucugggcau

SEQ ID NO: 2478680 - RNA, 23 nt, Human
uaccccacccucagcaccccuuc

SEQ ID NO: 2478681 - RNA, 22 nt, Human
uaccccacccucagcaccccuu

SEQ ID NO: 2478682 - RNA, 15 nt, Human
uaccccacccucagc

SEQ ID NO: 2478683 - RNA, 14 nt, Human
uaccccacccucag

SEQ ID NO: 2478684 - RNA, 13 nt, Human
uaccccacccuca

SEQ ID NO: 2478685 - RNA, 12 nt, Human
uaccccacccuc

SEQ ID NO: 2478686 - RNA, 17 nt, Human
uaccccaauuccuugua

SEQ ID NO: 2478687 - RNA, 22 nt, Human
uaccccaccacgauguggcccu

SEQ ID NO: 2478688 - RNA, 17 nt, Human
uaccauccccuguagag

SEQ ID NO: 2478689 - RNA, 16 nt, Human
uaccauauacagcuca

SEQ ID NO: 2478690 - RNA, 15 nt, Human
uaccauaauguauuu

SEQ ID NO: 2478691 - RNA, 22 nt, Human
uaccaugagaagagggccugug

SEQ ID NO: 2478692 - RNA, 20 nt, Human
uaccaugagaagagggccug

SEQ ID NO: 2478693 - RNA, 20 nt, Human
uaccaugaacagaaaacauu

SEQ ID NO: 2478694 - RNA, 14 nt, Human
uaccaugaacagaa

SEQ ID NO: 2478695 - RNA, 16 nt, Human
uaccccaauuccuugu

SEQ ID NO: 2478696 - RNA, 18 nt, Human
uaccaucagggacaggau

SEQ ID NO: 2478697 - RNA, 20 nt, Human
uaccauaguaccauuuauac

SEQ ID NO: 2478698 - RNA, 15 nt, Human
uaccaugaaacaaag

SEQ ID NO: 2478699 - RNA, 17 nt, Human
uaccacuuuuguucuug

SEQ ID NO: 2478700 - RNA, 21 nt, Human
uaccagacgguucaccagccu

SEQ ID NO: 2478701 - RNA, 23 nt, Human
uaccagacuguguauucauugaa

SEQ ID NO: 2478702 - RNA, 23 nt, Human
uaccagacgguucaccagccucu

SEQ ID NO: 2478703 - RNA, 15 nt, Human
uaccagacuguguau

SEQ ID NO: 2478704 - RNA, 22 nt, Human
uaccagacgguucaccagccuc

SEQ ID NO: 2478705 - RNA, 23 nt, Human
uacauuguuugucugucuucaua

SEQ ID NO: 2478706 - RNA, 20 nt, Human
uacauuuauaguuguaacua

SEQ ID NO: 2478707 - RNA, 19 nt, Human
uacauuuauaauguuugcu

SEQ ID NO: 2478708 - RNA, 14 nt, Human
uacauuuaugauuu

SEQ ID NO: 2478709 - RNA, 12 nt, Human
uacauuuaugau

SEQ ID NO: 2478710 - RNA, 16 nt, Human
uacauuuaugauuuaa

SEQ ID NO: 2478711 - RNA, 13 nt, Human
uacauuuaauaca

SEQ ID NO: 2478712 - RNA, 15 nt, Human
uacauuuaauacagc

SEQ ID NO: 2478713 - RNA, 16 nt, Human
uacccugagcugaggc

SEQ ID NO: 2478714 - RNA, 17 nt, Human
uacccugagcugaggca

SEQ ID NO: 2478715 - RNA, 18 nt, Human
uacccugagcugaggcag

SEQ ID NO: 2478716 - RNA, 20 nt, Human
uacccugcgauuuugccugu

SEQ ID NO: 2478717 - RNA, 22 nt, Human
uacccucuucauggauggggga

SEQ ID NO: 2478718 - RNA, 20 nt, Human
uacccuggcacuauaaugua

SEQ ID NO: 2478719 - RNA, 22 nt, Human
uacccuggcacuauaauguaag

SEQ ID NO: 2478720 - RNA, 22 nt, Human
uacccucuggagggguguggcu

SEQ ID NO: 2478721 - RNA, 14 nt, Human
uacccucuggaggg

SEQ ID NO: 2478722 - RNA, 12 nt, Human
uacccucuggag

SEQ ID NO: 2478723 - RNA, 21 nt, Human
uacccucucagcuccaggugg

SEQ ID NO: 2478724 - RNA, 20 nt, Human
uacccucucagcuccaggug

SEQ ID NO: 2478725 - RNA, 17 nt, Human
uacccucucagcuccag

SEQ ID NO: 2478726 - RNA, 16 nt, Human
uacccucucagcucca

SEQ ID NO: 2478727 - RNA, 15 nt, Human
uacccucucagcucc

SEQ ID NO: 2478728 - RNA, 23 nt, Human
uacccucgggcccaccuggccac

SEQ ID NO: 2478729 - RNA, 22 nt, Human
uacccucgggcccaccuggcca

SEQ ID NO: 2478730 - RNA, 13 nt, Human
uacccucucagcu

SEQ ID NO: 2478731 - RNA, 21 nt, Human
uacccucgggcccaccuggcc

SEQ ID NO: 2478732 - RNA, 20 nt, Human
uacccucgggcccaccuggc

SEQ ID NO: 2478733 - RNA, 18 nt, Human
uacccucgggcccaccug

SEQ ID NO: 2478734 - RNA, 17 nt, Human
uacccucgggcccaccu

SEQ ID NO: 2478735 - RNA, 15 nt, Human
uacccuccuguaaau

SEQ ID NO: 2478736 - RNA, 12 nt, Human
uacccuccucca

SEQ ID NO: 2478737 - RNA, 15 nt, Human
uacccucgggcccac

SEQ ID NO: 2478738 - RNA, 23 nt, Human
uacccucccugcuguccccucuu

SEQ ID NO: 2478739 - RNA, 22 nt, Human
uacccucccugcuguccccucu

SEQ ID NO: 2478740 - RNA, 18 nt, Human
uacccucccugcuguccc

SEQ ID NO: 2478741 - RNA, 17 nt, Human
uacccucccugcugucc

SEQ ID NO: 2478742 - RNA, 15 nt, Human
uacccuccuggcucu

SEQ ID NO: 2478743 - RNA, 12 nt, Human
uacccuccuggc

SEQ ID NO: 2478744 - RNA, 15 nt, Human
uacccucccugcugu

SEQ ID NO: 2478745 - RNA, 14 nt, Human
uacccucccugcug

SEQ ID NO: 2478746 - RNA, 12 nt, Human
uacccucccugc

SEQ ID NO: 2478747 - RNA, 11 nt, Human
uacccucccug

SEQ ID NO: 2478748 - RNA, 11 nt, Human
uacccuccccc

SEQ ID NO: 2478749 - RNA, 15 nt, Human
uacccucccaccccc

SEQ ID NO: 2478750 - RNA, 16 nt, Human
uacccucauguucuua

SEQ ID NO: 2478751 - RNA, 15 nt, Human
uacccucauguucuu

SEQ ID NO: 2478752 - RNA, 13 nt, Human
uacccucccaccc

SEQ ID NO: 2478753 - RNA, 14 nt, Human
uacccucccacccc

SEQ ID NO: 2478754 - RNA, 15 nt, Human
uaccccucccagcug

SEQ ID NO: 2478755 - RNA, 14 nt, Human
uaccccucccagcu

SEQ ID NO: 2478756 - RNA, 13 nt, Human
uaccccucccagc

SEQ ID NO: 2478757 - RNA, 10 nt, Human
uaccccuccc

SEQ ID NO: 2478758 - RNA, 23 nt, Human
uacccccuucugggcaucuguuc

SEQ ID NO: 2478759 - RNA, 22 nt, Human
uacccccgcccaggcuggccag

SEQ ID NO: 2478760 - RNA, 17 nt, Human
uaccccgcagacaccuu

SEQ ID NO: 2478761 - RNA, 13 nt, Human
uaccccugaucug

SEQ ID NO: 2478762 - RNA, 19 nt, Human
uaccccucccagcugacag

SEQ ID NO: 2478763 - RNA, 16 nt, Human
uaccccucccagcuga

SEQ ID NO: 2478764 - RNA, 20 nt, Human
uacccgggaagggggcuggg

SEQ ID NO: 2478765 - RNA, 19 nt, Human
uaccccuuagccucccuga

SEQ ID NO: 2478766 - RNA, 18 nt, Human
uaccccuuucuggcucuc

SEQ ID NO: 2478767 - RNA, 14 nt, Human
uacccgcagaguuc

SEQ ID NO: 2478768 - RNA, 17 nt, Human
uacaaaaacacagcaag

SEQ ID NO: 2478769 - RNA, 18 nt, Human
uacaaaaacacagcaagg

SEQ ID NO: 2478770 - RNA, 22 nt, Human
uaauuuuuuuaaccaaagguga

SEQ ID NO: 2478771 - RNA, 21 nt, Human
uaauuuuuuuaaccaaaggug

SEQ ID NO: 2478772 - RNA, 20 nt, Human
uaauuuuuuuaaccaaaggu

SEQ ID NO: 2478773 - RNA, 17 nt, Human
uaauuuuuuuaaccaaa

SEQ ID NO: 2478774 - RNA, 17 nt, Human
uaauuuuuuauucaagu

SEQ ID NO: 2478775 - RNA, 18 nt, Human
uaauuuuuuuauuguuua

SEQ ID NO: 2478776 - RNA, 17 nt, Human
uaauuuuuuuauuguuu

SEQ ID NO: 2478777 - RNA, 16 nt, Human
uaauuuuuuuauuguu

SEQ ID NO: 2478778 - RNA, 15 nt, Human
uaauuuuuuuauugu

SEQ ID NO: 2478779 - RNA, 14 nt, Human
uaauuuuuuuaauu

SEQ ID NO: 2478780 - RNA, 14 nt, Human
uaauuuuuuuauug

SEQ ID NO: 2478781 - RNA, 16 nt, Human
uacaaaaacauggccu

SEQ ID NO: 2478782 - RNA, 20 nt, Human
uaauuuuuuuauuguuuaaa

SEQ ID NO: 2478783 - RNA, 16 nt, Human
uaauuuuuuucaauau

SEQ ID NO: 2478784 - RNA, 18 nt, Human
uacaagccagcuggagaa

SEQ ID NO: 2478785 - RNA, 21 nt, Human
uacaagcauucugucuugaag

SEQ ID NO: 2478786 - RNA, 21 nt, Human
uacaagccauucuaaggaaau

SEQ ID NO: 2478787 - RNA, 15 nt, Human
uacaagcccccccuu

SEQ ID NO: 2478788 - RNA, 14 nt, Human
uacaagcccccccu

SEQ ID NO: 2478789 - RNA, 20 nt, Human
uacaagcgugagccacugca

SEQ ID NO: 2478790 - RNA, 19 nt, Human
uacaagcgugagccacugc

SEQ ID NO: 2478791 - RNA, 18 nt, Human
uacaagcgugagccacug

SEQ ID NO: 2478792 - RNA, 16 nt, Human
uacaagcgugagccac

SEQ ID NO: 2478793 - RNA, 15 nt, Human
uacaaguguauauca

SEQ ID NO: 2478794 - RNA, 14 nt, Human
uacaaguguauauc

SEQ ID NO: 2478795 - RNA, 13 nt, Human
uacaaguuagaaa

SEQ ID NO: 2478796 - RNA, 15 nt, Human
uacaaguuagaaaac

SEQ ID NO: 2478797 - RNA, 21 nt, Human
uacaaguguauaucagaaaag

SEQ ID NO: 2478798 - RNA, 20 nt, Human
uacaauaaaaucuugaaaau

SEQ ID NO: 2478799 - RNA, 21 nt, Human
uacaagcgugagccacugcac

SEQ ID NO: 2478800 - RNA, 13 nt, Human
uacaaguguauau

SEQ ID NO: 2478801 - RNA, 16 nt, Human
uacaagccugcacaau

SEQ ID NO: 2478802 - RNA, 19 nt, Human
uacaagcccccccuuccac

SEQ ID NO: 2478803 - RNA, 18 nt, Human
uaauuuaccugaagucuu

SEQ ID NO: 2478804 - RNA, 17 nt, Human
uaauuuaccugaagucu

SEQ ID NO: 2478805 - RNA, 14 nt, Human
uaauuucuccuccc

SEQ ID NO: 2478806 - RNA, 13 nt, Human
uaauuucuccucc

SEQ ID NO: 2478807 - RNA, 17 nt, Human
uaauuuccuggugugaa

SEQ ID NO: 2478808 - RNA, 15 nt, Human
uaauucagcucuuga

SEQ ID NO: 2478809 - RNA, 13 nt, Human
uaauucauguugc

SEQ ID NO: 2478810 - RNA, 14 nt, Human
uaauuuaaugcaug

SEQ ID NO: 2478811 - RNA, 19 nt, Human
uaauucaucccaacugucu

SEQ ID NO: 2478812 - RNA, 14 nt, Human
uaauucauguuucu

SEQ ID NO: 2478813 - RNA, 22 nt, Human
uaauuuacaaaaauauaaaaua

SEQ ID NO: 2478814 - RNA, 21 nt, Human
uaauuuacaaaaauauaaaau

SEQ ID NO: 2478815 - RNA, 19 nt, Human
uaauuuacaaaaauauaaa

SEQ ID NO: 2478816 - RNA, 21 nt, Human
uaauuuaaugcauguuaggaa

SEQ ID NO: 2478817 - RNA, 16 nt, Human
uaauuugcauuaaauu

SEQ ID NO: 2478818 - RNA, 17 nt, Human
uaauuugcauuaaauuc

SEQ ID NO: 2478819 - RNA, 22 nt, Human
uaauuugauaucacagucuaau

SEQ ID NO: 2478820 - RNA, 19 nt, Human
uaauuugauaucacagucu

SEQ ID NO: 2478821 - RNA, 12 nt, Human
uaauuugcauua

SEQ ID NO: 2478822 - RNA, 14 nt, Human
uaauuugauguuua

SEQ ID NO: 2478823 - RNA, 20 nt, Human
uaauuugcauuaaauucaca

SEQ ID NO: 2478824 - RNA, 12 nt, Human
uaauuugaucuu

SEQ ID NO: 2478825 - RNA, 19 nt, Human
uaauuuuuuagagagcugu

SEQ ID NO: 2478826 - RNA, 13 nt, Human
uaauuuuuuacua

SEQ ID NO: 2478827 - RNA, 21 nt, Human
uaauuuuuguauuuuuaguag

SEQ ID NO: 2478828 - RNA, 22 nt, Human
uaauuuuuguguuuuuaauaaa

SEQ ID NO: 2478829 - RNA, 22 nt, Human
uaauuugaaaacauaaucugca

SEQ ID NO: 2478830 - RNA, 23 nt, Human
uaauuucuuugccuguucaguua

SEQ ID NO: 2478831 - RNA, 18 nt, Human
uaauuucuuugccuguuc

SEQ ID NO: 2478832 - RNA, 17 nt, Human
uaauuucuuugccuguu

SEQ ID NO: 2478833 - RNA, 19 nt, Human
uaauuucuuacuaaacauu

SEQ ID NO: 2478834 - RNA, 19 nt, Human
uaauuucuccucccuuccu

SEQ ID NO: 2478835 - RNA, 16 nt, Human
uaauuucuuugccugu

SEQ ID NO: 2478836 - RNA, 12 nt, Human
uaauuucuuugc

SEQ ID NO: 2478837 - RNA, 18 nt, Human
uaauuugaggacaaccau

SEQ ID NO: 2478838 - RNA, 22 nt, Human
uaauuugaggacaaccauucca

SEQ ID NO: 2478839 - RNA, 15 nt, Human
uaauuugagagaaau

SEQ ID NO: 2478840 - RNA, 12 nt, Human
uaauuugauauc

SEQ ID NO: 2478841 - RNA, 22 nt, Human
uaauuugauaguauugugcaua

SEQ ID NO: 2478842 - RNA, 16 nt, Human
aaugcacuuuguucug

SEQ ID NO: 2478843 - RNA, 13 nt, Human
aaugcacuuuguu

SEQ ID NO: 2478844 - RNA, 20 nt, Human
aaugcacaaacagaggccgc

SEQ ID NO: 2478845 - RNA, 19 nt, Human
aaugcacaaacagaggccg

SEQ ID NO: 2478846 - RNA, 20 nt, Human
aaugcacuuuguucuggcuc

SEQ ID NO: 2478847 - RNA, 19 nt, Human
aaugcacuuuguucuggcu

SEQ ID NO: 2478848 - RNA, 20 nt, Human
uaauuauacccccugcaaag

SEQ ID NO: 2478849 - RNA, 21 nt, Human
uaauuagugcuaagugugaac

SEQ ID NO: 2478850 - RNA, 23 nt, Human
uaauuaguuccucauuagcauuu

SEQ ID NO: 2478851 - RNA, 22 nt, Human
uaauucagcacugauuucacaa

SEQ ID NO: 2478852 - RNA, 21 nt, Human
uaauucagcacugauuucaca

SEQ ID NO: 2478853 - RNA, 19 nt, Human
uaauucagcacugauuuca

SEQ ID NO: 2478854 - RNA, 18 nt, Human
uaauucaccaaaguauuu

SEQ ID NO: 2478855 - RNA, 18 nt, Human
uaauucagcacugauuuc

SEQ ID NO: 2478856 - RNA, 17 nt, Human
uaauucaccaaaguauu

SEQ ID NO: 2478857 - RNA, 16 nt, Human
uaauucaccaaaguau

SEQ ID NO: 2478858 - RNA, 16 nt, Human
uaauuaucuaaaguau

SEQ ID NO: 2478859 - RNA, 21 nt, Human
uaauuaucgggaacaguguuu

SEQ ID NO: 2478860 - RNA, 23 nt, Human
uaauuaucgggaacaguguuucc

SEQ ID NO: 2478861 - RNA, 21 nt, Human
uaauuaugccuuuuuugauca

SEQ ID NO: 2478862 - RNA, 21 nt, Human
uaauuaugacaguuauacugu

SEQ ID NO: 2478863 - RNA, 13 nt, Human
uaauuaugacagu

SEQ ID NO: 2478864 - RNA, 20 nt, Human
uaauuagugcuaagugugaa

SEQ ID NO: 2478865 - RNA, 17 nt, Human
uaauuaucggaagcagu

SEQ ID NO: 2478866 - RNA, 18 nt, Human
uaauuaucggaagcagug

SEQ ID NO: 2478867 - RNA, 19 nt, Human
uaauuaucggaagcagugc

SEQ ID NO: 2478868 - RNA, 21 nt, Human
uaauuaucggaagcagugccu

SEQ ID NO: 2478869 - RNA, 18 nt, Human
uaauuaucgggaacagug

SEQ ID NO: 2478870 - RNA, 19 nt, Human
uaauuaucgggaacagugu

SEQ ID NO: 2478871 - RNA, 20 nt, Human
uaauuaucgggaacaguguu

SEQ ID NO: 2478872 - RNA, 16 nt, Human
aaugcaaaccaucauu

SEQ ID NO: 2478873 - RNA, 14 nt, Human
aaugcaaaccauca

SEQ ID NO: 2478874 - RNA, 14 nt, Human
aaugaccuuucaau

SEQ ID NO: 2478875 - RNA, 13 nt, Human
aaugaccuuucaa

SEQ ID NO: 2478876 - RNA, 21 nt, Human
aaugaaugucagugugacuga

SEQ ID NO: 2478877 - RNA, 20 nt, Human
aaugaaugucagugugacug

SEQ ID NO: 2478878 - RNA, 18 nt, Human
aaugaauccuacacaccu

SEQ ID NO: 2478879 - RNA, 19 nt, Human
aaugaccaguaauugugaa

SEQ ID NO: 2478880 - RNA, 18 nt, Human
aaugaccaguaauuguga

SEQ ID NO: 2478881 - RNA, 16 nt, Human
aaugacccaaagacca

SEQ ID NO: 2478882 - RNA, 21 nt, Human
aaugaccaguaauugugaaaa

SEQ ID NO: 2478883 - RNA, 16 nt, Human
aaugaccucaagaugu

SEQ ID NO: 2478884 - RNA, 23 nt, Human
aaugcaaaccaucauugaaaucu

SEQ ID NO: 2478885 - RNA, 22 nt, Human
aaugcaaaccaucauugaaauc

SEQ ID NO: 2478886 - RNA, 18 nt, Human
aaugcacaaacagaggcc

SEQ ID NO: 2478887 - RNA, 17 nt, Human
aaugcaagcuaguggcu

SEQ ID NO: 2478888 - RNA, 16 nt, Human
aaugcaauauuaaugc

SEQ ID NO: 2478889 - RNA, 21 nt, Human
aaugcaagauuuuccacaaga

SEQ ID NO: 2478890 - RNA, 14 nt, Human
aaugcaauauguau

SEQ ID NO: 2478891 - RNA, 14 nt, Human
aaugcaacaugugu

SEQ ID NO: 2478892 - RNA, 16 nt, Human
aaugcaaauccuaugu

SEQ ID NO: 2478893 - RNA, 18 nt, Human
aaugcaacaacauguaua

SEQ ID NO: 2478894 - RNA, 15 nt, Human
aaugcaacaacaugu

SEQ ID NO: 2478895 - RNA, 18 nt, Human
uaaucagugugucuaaau

SEQ ID NO: 2478896 - RNA, 17 nt, Human
uaaucagugugucuaaa

SEQ ID NO: 2478897 - RNA, 19 nt, Human
uaaucagguccucagagaa

SEQ ID NO: 2478898 - RNA, 22 nt, Human
uaaucagguccucagagaauuu

SEQ ID NO: 2478899 - RNA, 15 nt, Human
uaaucagugucucac

SEQ ID NO: 2478900 - RNA, 11 nt, Human
uaaucaguguc

SEQ ID NO: 2478901 - RNA, 15 nt, Human
uaaucaggcugaggu

SEQ ID NO: 2478902 - RNA, 21 nt, Human
uaauauuuaaacagcaguguu

SEQ ID NO: 2478903 - RNA, 19 nt, Human
uaaucagggaggucauuuu

SEQ ID NO: 2478904 - RNA, 14 nt, Human
uaaucagccucuua

SEQ ID NO: 2478905 - RNA, 15 nt, Human
uaaucagccucuuaa

SEQ ID NO: 2478906 - RNA, 13 nt, Human
uaauauuuaaaca

SEQ ID NO: 2478907 - RNA, 16 nt, Human
uaauauucauuguaua

SEQ ID NO: 2478908 - RNA, 12 nt, Human
uaaucagccucu

SEQ ID NO: 2478909 - RNA, 13 nt, Human
uaaucagccucuu

SEQ ID NO: 2478910 - RNA, 21 nt, Human
uaauauugauaugcuuauaca

SEQ ID NO: 2478911 - RNA, 16 nt, Human
uaauauuguggugcca

SEQ ID NO: 2478912 - RNA, 14 nt, Human
uaauauugagaaag

SEQ ID NO: 2478913 - RNA, 19 nt, Human
uaauauugagaaagaaacu

SEQ ID NO: 2478914 - RNA, 21 nt, Human
uaauagaauauaauuaucgga

SEQ ID NO: 2478915 - RNA, 18 nt, Human
uaauauugacuuguauau

SEQ ID NO: 2478916 - RNA, 16 nt, Human
uaauauugacuuguau

SEQ ID NO: 2478917 - RNA, 16 nt, Human
uaauauuccucaguuc

SEQ ID NO: 2478918 - RNA, 13 nt, Human
uaaucuuucacag

SEQ ID NO: 2478919 - RNA, 17 nt, Human
uaaucuuuaauuuuaca

SEQ ID NO: 2478920 - RNA, 15 nt, Human
uaaucuucugccuuc

SEQ ID NO: 2478921 - RNA, 16 nt, Human
uaaucuugaauuguaa

SEQ ID NO: 2478922 - RNA, 14 nt, Human
uaaucuucugccuu

SEQ ID NO: 2478923 - RNA, 14 nt, Human
uaauccagaauaac

SEQ ID NO: 2478924 - RNA, 22 nt, Human
uaaucuugaauuguaacuguuc

SEQ ID NO: 2478925 - RNA, 13 nt, Human
uaauccagcugau

SEQ ID NO: 2478926 - RNA, 14 nt, Human
uaaucuugcucugc

SEQ ID NO: 2478927 - RNA, 15 nt, Human
uaaucuugcucugcu

SEQ ID NO: 2478928 - RNA, 20 nt, Human
uaaucuugcucugcuugaca

SEQ ID NO: 2478929 - RNA, 15 nt, Human
uaaucauugccuggu

SEQ ID NO: 2478930 - RNA, 14 nt, Human
uaaucauugccugg

SEQ ID NO: 2478931 - RNA, 22 nt, Human
uaaucauucuuauuucaugaaa

SEQ ID NO: 2478932 - RNA, 17 nt, Human
uaaucaugaauguguaa

SEQ ID NO: 2478933 - RNA, 16 nt, Human
uaaucaugaaugugua

SEQ ID NO: 2478934 - RNA, 20 nt, Human
uaaucauucuuauuucauga

SEQ ID NO: 2478935 - RNA, 13 nt, Human
uaaucaugaaugu

SEQ ID NO: 2478936 - RNA, 18 nt, Human
uaaucaugaaauuacuua

SEQ ID NO: 2478937 - RNA, 21 nt, Human
uaaucaugaaauuacuuauca

SEQ ID NO: 2478938 - RNA, 17 nt, Human
uaaucagugucucacac

SEQ ID NO: 2478939 - RNA, 16 nt, Human
uaaucagugucucaca

SEQ ID NO: 2478940 - RNA, 17 nt, Human
uaaucaugaaauuacuu

SEQ ID NO: 2478941 - RNA, 22 nt, Human
uaauccaagcaaaugugaauca

SEQ ID NO: 2478942 - RNA, 19 nt, Human
uaauccaauggguuuuucc

SEQ ID NO: 2478943 - RNA, 12 nt, Human
uaaucauuucuu

SEQ ID NO: 2478944 - RNA, 19 nt, Human
uaaucauuucuugggcccu

SEQ ID NO: 2478945 - RNA, 22 nt, Human
uaaucauuucuugggcccuccu

SEQ ID NO: 2478946 - RNA, 15 nt, Human
uaauaccucugugug

SEQ ID NO: 2478947 - RNA, 14 nt, Human
uaauaccucugugu

SEQ ID NO: 2478948 - RNA, 13 nt, Human
uaauaccucugug

SEQ ID NO: 2478949 - RNA, 22 nt, Human
uaauaccauuuuuuaaggaaac

SEQ ID NO: 2478950 - RNA, 13 nt, Human
uaauaccucccuu

SEQ ID NO: 2478951 - RNA, 16 nt, Human
uaauaccacagcuuuu

SEQ ID NO: 2478952 - RNA, 21 nt, Human
uaauacagcaacaauuuauga

SEQ ID NO: 2478953 - RNA, 22 nt, Human
uaauacagcaacaauuuaugaa

SEQ ID NO: 2478954 - RNA, 19 nt, Human
uaauacagcagugucauca

SEQ ID NO: 2478955 - RNA, 20 nt, Human
uaauacacuaauuccuuucu

SEQ ID NO: 2478956 - RNA, 23 nt, Human
uaauacagcagugucaucagaag

SEQ ID NO: 2478957 - RNA, 20 nt, Human
uaauacagccaaagauaauc

SEQ ID NO: 2478958 - RNA, 18 nt, Human
uaauacuugcuuuggaaa

SEQ ID NO: 2478959 - RNA, 20 nt, Human
uaauaccugggugauuacau

SEQ ID NO: 2478960 - RNA, 14 nt, Human
uaauacuguauuug

SEQ ID NO: 2478961 - RNA, 15 nt, Human
uaauaccugggugau

SEQ ID NO: 2478962 - RNA, 18 nt, Human
uaauaccucugugugcuc

SEQ ID NO: 2478963 - RNA, 18 nt, Human
uaauagaaaacugaaaau

SEQ ID NO: 2478964 - RNA, 16 nt, Human
uaauagaaaacugaaa

SEQ ID NO: 2478965 - RNA, 15 nt, Human
uaauagaaaacugaa

SEQ ID NO: 2478966 - RNA, 19 nt, Human
uaauagaaaacugaaaauc

SEQ ID NO: 2478967 - RNA, 12 nt, Human
uaauagaagaac

SEQ ID NO: 2478968 - RNA, 21 nt, Human
uaauagaagaacauccaagga

SEQ ID NO: 2478969 - RNA, 22 nt, Human
uaauacaccacuacauucuguu

SEQ ID NO: 2478970 - RNA, 21 nt, Human
uaauacaccacuacauucugu

SEQ ID NO: 2478971 - RNA, 23 nt, Human
uaauacaccacuacauucuguua

SEQ ID NO: 2478972 - RNA, 22 nt, Human
uaauacacuaauuccuuucuau

SEQ ID NO: 2478973 - RNA, 18 nt, Human
uaauacagcaacaauuua

SEQ ID NO: 2478974 - RNA, 19 nt, Human
aauacaguuugucacauga

SEQ ID NO: 2478975 - RNA, 19 nt, Human
uaacaaugcuguauuuuaa

SEQ ID NO: 2478976 - RNA, 20 nt, Human
aauacaguaucucagggccu

SEQ ID NO: 2478977 - RNA, 18 nt, Human
aauacaguacaggcagca

SEQ ID NO: 2478978 - RNA, 21 nt, Human
aauacaguacaggcagcacag

SEQ ID NO: 2478979 - RNA, 17 nt, Human
uaacaagcucccaggcc

SEQ ID NO: 2478980 - RNA, 15 nt, Human
aauacaguacaggca

SEQ ID NO: 2478981 - RNA, 16 nt, Human
aauacaguacaggcag

SEQ ID NO: 2478982 - RNA, 17 nt, Human
aauacaguacaggcagc

SEQ ID NO: 2478983 - RNA, 18 nt, Human
aauacaguuguuggccuc

SEQ ID NO: 2478984 - RNA, 21 nt, Human
aauacagucuuccauuugcaa

SEQ ID NO: 2478985 - RNA, 12 nt, Human
aauacaguguua

SEQ ID NO: 2478986 - RNA, 12 nt, Human
uaaugugaaacu

SEQ ID NO: 2478987 - RNA, 20 nt, Human
uaaugugaaacuggauuaaa

SEQ ID NO: 2478988 - RNA, 22 nt, Human
uaaugugaaacuggauuaaacu

SEQ ID NO: 2478989 - RNA, 23 nt, Human
uaaugugaaacuggauuaaacuu

SEQ ID NO: 2478990 - RNA, 17 nt, Human
uaauguaauaacuguga

SEQ ID NO: 2478991 - RNA, 15 nt, Human
uaaugucacaggcag

SEQ ID NO: 2478992 - RNA, 17 nt, Human
uaaugucacaggcaggu

SEQ ID NO: 2478993 - RNA, 16 nt, Human
uaaugucacaggcagg

SEQ ID NO: 2478994 - RNA, 19 nt, Human
uaaugaaauaucuguauuu

SEQ ID NO: 2478995 - RNA, 16 nt, Human
uaaugaagaaagugga

SEQ ID NO: 2478996 - RNA, 17 nt, Human
uaaugaagaaaguggaa

SEQ ID NO: 2478997 - RNA, 16 nt, Human
uaaugaaccgcugaau

SEQ ID NO: 2478998 - RNA, 14 nt, Human
uaaugaaauaucug

SEQ ID NO: 2478999 - RNA, 18 nt, Human
uaaugaaccgcugaauau

SEQ ID NO: 2479000 - RNA, 22 nt, Human
uaaugaagaaaguggaaaacaa

SEQ ID NO: 2479001 - RNA, 23 nt, Human
uaaugaagaaaguggaaaacaag

SEQ ID NO: 2479002 - RNA, 14 nt, Human
uaaugaaguuugaa

SEQ ID NO: 2479003 - RNA, 13 nt, Human
uaaugaaguuuga

SEQ ID NO: 2479004 - RNA, 14 nt, Human
uaaugaagcuuuau

SEQ ID NO: 2479005 - RNA, 22 nt, Human
uaaugaagggaaaggauauuuu

SEQ ID NO: 2479006 - RNA, 18 nt, Human
uaaugaaguuugaauguu

SEQ ID NO: 2479007 - RNA, 17 nt, Human
uaaugaaguuugaaugu

SEQ ID NO: 2479008 - RNA, 16 nt, Human
uaaugaaguuugaaug

SEQ ID NO: 2479009 - RNA, 15 nt, Human
uaaugaaguuugaau

SEQ ID NO: 2479010 - RNA, 15 nt, Human
uaauguaagacaaau

SEQ ID NO: 2479011 - RNA, 16 nt, Human
uaauguaagcucuacu

SEQ ID NO: 2479012 - RNA, 17 nt, Human
uaauguaagcucuacug

SEQ ID NO: 2479013 - RNA, 17 nt, Human
aaucuuuucacaaauaa

SEQ ID NO: 2479014 - RNA, 16 nt, Human
aaucuuuucacaaaua

SEQ ID NO: 2479015 - RNA, 15 nt, Human
aaucuuuucacaaau

SEQ ID NO: 2479016 - RNA, 14 nt, Human
aaucuuuucacaaa

SEQ ID NO: 2479017 - RNA, 18 nt, Human
aaucuuuucacaaauaaa

SEQ ID NO: 2479018 - RNA, 21 nt, Human
aaucuuuuuuagcauaaaauu

SEQ ID NO: 2479019 - RNA, 14 nt, Human
aaugaaaaaaugua

SEQ ID NO: 2479020 - RNA, 14 nt, Human
aaugaaaaauucuc

SEQ ID NO: 2479021 - RNA, 17 nt, Human
aaugaaaaauucucagu

SEQ ID NO: 2479022 - RNA, 17 nt, Human
aaugaaaaauuuaagca

SEQ ID NO: 2479023 - RNA, 18 nt, Human
aaugaaaaauuuaagcau

SEQ ID NO: 2479024 - RNA, 14 nt, Human
aaugaaugucagug

SEQ ID NO: 2479025 - RNA, 15 nt, Human
aaugaaugucagugu

SEQ ID NO: 2479026 - RNA, 15 nt, Human
aaugaaugaaugaau

SEQ ID NO: 2479027 - RNA, 14 nt, Human
aaugaaugaaacau

SEQ ID NO: 2479028 - RNA, 22 nt, Human
aaucuugacuacagucaggaaa

SEQ ID NO: 2479029 - RNA, 17 nt, Human
aaucuugaaauuaagaa

SEQ ID NO: 2479030 - RNA, 14 nt, Human
aaucuugaaauuaa

SEQ ID NO: 2479031 - RNA, 22 nt, Human
uaaugugcuguguaaaguuagu

SEQ ID NO: 2479032 - RNA, 21 nt, Human
uaaugugcuguguaaaguuag

SEQ ID NO: 2479033 - RNA, 20 nt, Human
uaaugugcuguguaaaguua

SEQ ID NO: 2479034 - RNA, 13 nt, Human
aaucuugaaaaug

SEQ ID NO: 2479035 - RNA, 23 nt, Human
aaucuuuuacaacugccucgaaa

SEQ ID NO: 2479036 - RNA, 13 nt, Human
aaucuugcucugc

SEQ ID NO: 2479037 - RNA, 19 nt, Human
aaucuugggggguuuuuac

SEQ ID NO: 2479038 - RNA, 19 nt, Human
uaaugugcuguguaaaguu

SEQ ID NO: 2479039 - RNA, 18 nt, Human
uaaugugcuguguaaagu

SEQ ID NO: 2479040 - RNA, 17 nt, Human
uaaugugcuguguaaag

SEQ ID NO: 2479041 - RNA, 16 nt, Human
uaaugugcuguguaaa

SEQ ID NO: 2479042 - RNA, 15 nt, Human
uaaugugcuguguaa

SEQ ID NO: 2479043 - RNA, 14 nt, Human
uaaugugcugugua

SEQ ID NO: 2479044 - RNA, 13 nt, Human
uaaugugcugugu

SEQ ID NO: 2479045 - RNA, 12 nt, Human
uaaugugcugug

SEQ ID NO: 2479046 - RNA, 23 nt, Human
aaucuucugaacuuggcgcugcc

SEQ ID NO: 2479047 - RNA, 13 nt, Human
uaaugugaagugu

SEQ ID NO: 2479048 - RNA, 13 nt, Human
uaaugugauauua

SEQ ID NO: 2479049 - RNA, 17 nt, Human
uaaugugccuaguucuu

SEQ ID NO: 2479050 - RNA, 21 nt, Human
uaaugugaaaaugguccagga

SEQ ID NO: 2479051 - RNA, 19 nt, Human
uaauguauuuuauuguaac

SEQ ID NO: 2479052 - RNA, 12 nt, Human
uaauguauuuua

SEQ ID NO: 2479053 - RNA, 13 nt, Human
acaagcugcaccc

SEQ ID NO: 2479054 - RNA, 14 nt, Human
acaagcuaaaauua

SEQ ID NO: 2479055 - RNA, 18 nt, Human
acaagcgugagccacugc

SEQ ID NO: 2479056 - RNA, 21 nt, Human
acaagcgugagccacugcacc

SEQ ID NO: 2479057 - RNA, 20 nt, Human
acaagcgugagccacugcac

SEQ ID NO: 2479058 - RNA, 21 nt, Human
acaagccaacuuguaaauaca

SEQ ID NO: 2479059 - RNA, 14 nt, Human
acaagccaacuugu

SEQ ID NO: 2479060 - RNA, 13 nt, Human
acaagccacagaa

SEQ ID NO: 2479061 - RNA, 12 nt, Human
acaagccacaga

SEQ ID NO: 2479062 - RNA, 18 nt, Human
acaagccacagaagccag

SEQ ID NO: 2479063 - RNA, 18 nt, Human
acaagccacgaaugaaug

SEQ ID NO: 2479064 - RNA, 12 nt, Human
acaagccacccc

SEQ ID NO: 2479065 - RNA, 14 nt, Human
acaagccccaggca

SEQ ID NO: 2479066 - RNA, 15 nt, Human
acaagccagcuggag

SEQ ID NO: 2479067 - RNA, 13 nt, Human
acaagccagcugg

SEQ ID NO: 2479068 - RNA, 17 nt, Human
acaagagcccaggccuc

SEQ ID NO: 2479069 - RNA, 18 nt, Human
acaagagcccaggccucc

SEQ ID NO: 2479070 - RNA, 19 nt, Human
acaagagcagccuguggca

SEQ ID NO: 2479071 - RNA, 20 nt, Human
acaagagcagccuguggcau

SEQ ID NO: 2479072 - RNA, 15 nt, Human
acaagagcacuacau

SEQ ID NO: 2479073 - RNA, 21 nt, Human
acaagagcacuacauucauuu

SEQ ID NO: 2479074 - RNA, 14 nt, Human
acaagagcagccug

SEQ ID NO: 2479075 - RNA, 15 nt, Human
acaagagcagccugu

SEQ ID NO: 2479076 - RNA, 16 nt, Human
acaagagcagccugug

SEQ ID NO: 2479077 - RNA, 18 nt, Human
acaagagcagccuguggc

SEQ ID NO: 2479078 - RNA, 18 nt, Human
acaagcacuaaacaaaga

SEQ ID NO: 2479079 - RNA, 21 nt, Human
acaagcauucugucuugaagg

SEQ ID NO: 2479080 - RNA, 11 nt, Human
acaagcagagg

SEQ ID NO: 2479081 - RNA, 22 nt, Human
acaagcaauuagacaagaacuu

SEQ ID NO: 2479082 - RNA, 13 nt, Human
acaagagcccagc

SEQ ID NO: 2479083 - RNA, 20 nt, Human
acaagagcccagcagggccu

SEQ ID NO: 2479084 - RNA, 15 nt, Human
acaagcaagcuccca

SEQ ID NO: 2479085 - RNA, 13 nt, Human
acaagcaagcucc

SEQ ID NO: 2479086 - RNA, 17 nt, Human
uagcauguuugcugaac

SEQ ID NO: 2479087 - RNA, 12 nt, Human
uagcauuaacua

SEQ ID NO: 2479088 - RNA, 16 nt, Human
uagcauguuugcugaa

SEQ ID NO: 2479089 - RNA, 13 nt, Human
uagcauguuugcu

SEQ ID NO: 2479090 - RNA, 20 nt, Human
uagcauguugagccaggccu

SEQ ID NO: 2479091 - RNA, 16 nt, Human
uagcauuaacuaaucu

SEQ ID NO: 2479092 - RNA, 12 nt, Human
uagcauuucuug

SEQ ID NO: 2479093 - RNA, 18 nt, Human
uagcauuucauucuucuc

SEQ ID NO: 2479094 - RNA, 17 nt, Human
uagcauuucauucuucu

SEQ ID NO: 2479095 - RNA, 16 nt, Human
uagcauuucauucuuc

SEQ ID NO: 2479096 - RNA, 15 nt, Human
uagcauuucauucuu

SEQ ID NO: 2479097 - RNA, 13 nt, Human
uagcauuucauuc

SEQ ID NO: 2479098 - RNA, 20 nt, Human
uagcauugugaacugacagg

SEQ ID NO: 2479099 - RNA, 22 nt, Human
uagcauuuaguccaaugucuuu

SEQ ID NO: 2479100 - RNA, 16 nt, Human
uagcauuucuugaugu

SEQ ID NO: 2479101 - RNA, 13 nt, Human
uagcauuucuuga

SEQ ID NO: 2479102 - RNA, 22 nt, Human
acaaauguguaucggaugcuuu

SEQ ID NO: 2479103 - RNA, 17 nt, Human
acaaauucauauucugu

SEQ ID NO: 2479104 - RNA, 17 nt, Human
acaaauuauuaaugaaa

SEQ ID NO: 2479105 - RNA, 22 nt, Human
acaaauuauguuacaucuguuu

SEQ ID NO: 2479106 - RNA, 22 nt, Human
acaaauuagaaaauguuauuua

SEQ ID NO: 2479107 - RNA, 20 nt, Human
acaaauuagguuuuguacaa

SEQ ID NO: 2479108 - RNA, 22 nt, Human
acaagaaaugaaagcagggacu

SEQ ID NO: 2479109 - RNA, 13 nt, Human
acaagaagaccag

SEQ ID NO: 2479110 - RNA, 14 nt, Human
acaagaagaagggc

SEQ ID NO: 2479111 - RNA, 18 nt, Human
acaagaaauuugauuucu

SEQ ID NO: 2479112 - RNA, 15 nt, Human
acaagaacugaaacc

SEQ ID NO: 2479113 - RNA, 20 nt, Human
acaagaagccacagaccuag

SEQ ID NO: 2479114 - RNA, 23 nt, Human
acaagaaggguuuuccacccugg

SEQ ID NO: 2479115 - RNA, 15 nt, Human
acaacaacaaaauga

SEQ ID NO: 2479116 - RNA, 18 nt, Human
acaaauucugucucugga

SEQ ID NO: 2479117 - RNA, 15 nt, Human
acaacaaccugguca

SEQ ID NO: 2479118 - RNA, 12 nt, Human
acaacacucaca

SEQ ID NO: 2479119 - RNA, 14 nt, Human
acaacacacacacu

SEQ ID NO: 2479120 - RNA, 13 nt, Human
acaacaagaguuu

SEQ ID NO: 2479121 - RNA, 13 nt, Human
uagcaccagggaa

SEQ ID NO: 2479122 - RNA, 14 nt, Human
uagcaccagggaag

SEQ ID NO: 2479123 - RNA, 15 nt, Human
uagauuuuguuuugc

SEQ ID NO: 2479124 - RNA, 21 nt, Human
uagcaugucgucaaagcugaa

SEQ ID NO: 2479125 - RNA, 18 nt, Human
uagcaugucgucaaagcu

SEQ ID NO: 2479126 - RNA, 16 nt, Human
uagcaccagggaaggg

SEQ ID NO: 2479127 - RNA, 18 nt, Human
uagcacaggggggccgcc

SEQ ID NO: 2479128 - RNA, 21 nt, Human
uagcauguguuugguucuggg

SEQ ID NO: 2479129 - RNA, 22 nt, Human
uagcauguguuugguucugggg

SEQ ID NO: 2479130 - RNA, 19 nt, Human
uagcacagacccugcccug

SEQ ID NO: 2479131 - RNA, 18 nt, Human
uagcacagacccugcccu

SEQ ID NO: 2479132 - RNA, 17 nt, Human
uagcacagacccugccc

SEQ ID NO: 2479133 - RNA, 16 nt, Human
uagcacagacccugcc

SEQ ID NO: 2479134 - RNA, 19 nt, Human
uagauuuucuuuaaaagaa

SEQ ID NO: 2479135 - RNA, 16 nt, Human
uagauuuucuuuaaaa

SEQ ID NO: 2479136 - RNA, 15 nt, Human
uagauuuucuuuaaa

SEQ ID NO: 2479137 - RNA, 14 nt, Human
uagauuuucuuuaa

SEQ ID NO: 2479138 - RNA, 12 nt, Human
uagauuuuccaa

SEQ ID NO: 2479139 - RNA, 13 nt, Human
uagauuuuccaaa

SEQ ID NO: 2479140 - RNA, 14 nt, Human
uagaucaugaagaa

SEQ ID NO: 2479141 - RNA, 22 nt, Human
uagauuuuagacccuauugcug

SEQ ID NO: 2479142 - RNA, 19 nt, Human
uagaugcaguucugaagaa

SEQ ID NO: 2479143 - RNA, 17 nt, Human
uagaugcaguucugaag

SEQ ID NO: 2479144 - RNA, 16 nt, Human
uagaugcaguucugaa

SEQ ID NO: 2479145 - RNA, 23 nt, Human
uagaucaaauacuuuaaaggaaa

SEQ ID NO: 2479146 - RNA, 17 nt, Human
uagaucaaauacuuuaa

SEQ ID NO: 2479147 - RNA, 14 nt, Human
uagaucaaauacuu

SEQ ID NO: 2479148 - RNA, 13 nt, Human
uagaucaaauacu

SEQ ID NO: 2479149 - RNA, 20 nt, Human
uagaggaaauaagaaaaauc

SEQ ID NO: 2479150 - RNA, 17 nt, Human
uagaucacgagaucaag

SEQ ID NO: 2479151 - RNA, 16 nt, Human
uagaucaccagaauaa

SEQ ID NO: 2479152 - RNA, 16 nt, Human
uagaucacgagaucaa

SEQ ID NO: 2479153 - RNA, 19 nt, Human
uagaggaaauaagaaaaau

SEQ ID NO: 2479154 - RNA, 22 nt, Human
uagaggaaaaaaaugacuaaaa

SEQ ID NO: 2479155 - RNA, 16 nt, Human
acaaaaagcauaaaaa

SEQ ID NO: 2479156 - RNA, 16 nt, Human
acaaaaagaacaaaaa

SEQ ID NO: 2479157 - RNA, 22 nt, Human
uagagcaggcguucagcucacu

SEQ ID NO: 2479158 - RNA, 20 nt, Human
uagagcaggcguucagcuca

SEQ ID NO: 2479159 - RNA, 11 nt, Human
uagagcaggcg

SEQ ID NO: 2479160 - RNA, 19 nt, Human
uagagcagcccuggaguca

SEQ ID NO: 2479161 - RNA, 14 nt, Human
uagagcagcccugg

SEQ ID NO: 2479162 - RNA, 19 nt, Human
uagagcagaugaccccucc

SEQ ID NO: 2479163 - RNA, 14 nt, Human
uagagccaggcaca

SEQ ID NO: 2479164 - RNA, 12 nt, Human
uagagccaggca

SEQ ID NO: 2479165 - RNA, 19 nt, Human
uagagcauugccauucccu

SEQ ID NO: 2479166 - RNA, 19 nt, Human
uagagccaggcacacacug

SEQ ID NO: 2479167 - RNA, 15 nt, Human
uagagccaggcacac

SEQ ID NO: 2479168 - RNA, 23 nt, Human
uagagcugacacaaaccugccug

SEQ ID NO: 2479169 - RNA, 16 nt, Human
uagagcauugccauuc

SEQ ID NO: 2479170 - RNA, 15 nt, Human
uagagcauugccauu

SEQ ID NO: 2479171 - RNA, 19 nt, Human
uagagcauugaauuggaga

SEQ ID NO: 2479172 - RNA, 22 nt, Human
uagagcaguuucuguccugcug

SEQ ID NO: 2479173 - RNA, 23 nt, Human
uagagcagggauuaaccucugca

SEQ ID NO: 2479174 - RNA, 17 nt, Human
uagagcaguuucugucc

SEQ ID NO: 2479175 - RNA, 18 nt, Human
uagagcugauccagagca

SEQ ID NO: 2479176 - RNA, 15 nt, Human
uagagcugauccaga

SEQ ID NO: 2479177 - RNA, 14 nt, Human
uagagcugauccag

SEQ ID NO: 2479178 - RNA, 15 nt, Human
uagagcuucuggcac

SEQ ID NO: 2479179 - RNA, 17 nt, Human
uagagcuuucaaguaca

SEQ ID NO: 2479180 - RNA, 19 nt, Human
uagagcugauccagagcac

SEQ ID NO: 2479181 - RNA, 20 nt, Human
uagagcuguauuaagccacu

SEQ ID NO: 2479182 - RNA, 17 nt, Human
uagaggaaaaaaaugac

SEQ ID NO: 2479183 - RNA, 18 nt, Human
uagaggaaaaaaaugacu

SEQ ID NO: 2479184 - RNA, 21 nt, Human
uacuucaaauccuugaagauu

SEQ ID NO: 2479185 - RNA, 23 nt, Human
uacuucaaaaguauuuuccugua

SEQ ID NO: 2479186 - RNA, 18 nt, Human
uacuucaaguuaaaguga

SEQ ID NO: 2479187 - RNA, 23 nt, Human
uacuucaaguuaaagugaauaac

SEQ ID NO: 2479188 - RNA, 22 nt, Human
uacuucaggggcacuucauuga

SEQ ID NO: 2479189 - RNA, 19 nt, Human
uacuucaggggcacuucau

SEQ ID NO: 2479190 - RNA, 19 nt, Human
uacuucacuuuaauucuca

SEQ ID NO: 2479191 - RNA, 16 nt, Human
uacuucacuuuaauuc

SEQ ID NO: 2479192 - RNA, 16 nt, Human
uacuucaugcugucua

SEQ ID NO: 2479193 - RNA, 22 nt, Human
uacuucacuuuaauucucaugu

SEQ ID NO: 2479194 - RNA, 15 nt, Human
uacuucacuuuaauu

SEQ ID NO: 2479195 - RNA, 19 nt, Human
uacuucacugucaggaaga

SEQ ID NO: 2479196 - RNA, 14 nt, Human
uacuucacugucag

SEQ ID NO: 2479197 - RNA, 21 nt, Human
uacuucaaguuaaagugaaua

SEQ ID NO: 2479198 - RNA, 15 nt, Human
uagaacucccuuuca

SEQ ID NO: 2479199 - RNA, 22 nt, Human
uagaacucaguuuuaacuagaa

SEQ ID NO: 2479200 - RNA, 19 nt, Human
uagaacucaguuuuaacua

SEQ ID NO: 2479201 - RNA, 13 nt, Human
uagaaccuggagg

SEQ ID NO: 2479202 - RNA, 22 nt, Human
uagaaccuggagagcuagaacc

SEQ ID NO: 2479203 - RNA, 13 nt, Human
uagaaccuggaga

SEQ ID NO: 2479204 - RNA, 23 nt, Human
uagaaccuggaagggcuagaacc

SEQ ID NO: 2479205 - RNA, 17 nt, Human
uagaaccuggagggcug

SEQ ID NO: 2479206 - RNA, 22 nt, Human
uagaaccuggagggcuagaacc

SEQ ID NO: 2479207 - RNA, 17 nt, Human
uagaaccuggaagggcu

SEQ ID NO: 2479208 - RNA, 16 nt, Human
uagaaccuggaagggc

SEQ ID NO: 2479209 - RNA, 22 nt, Human
uagaacuuggauguaccugccc

SEQ ID NO: 2479210 - RNA, 19 nt, Human
uagaacuuuaagcaacaag

SEQ ID NO: 2479211 - RNA, 15 nt, Human
uagaagacauuuaua

SEQ ID NO: 2479212 - RNA, 20 nt, Human
uagaacuguaugucagacau

SEQ ID NO: 2479213 - RNA, 16 nt, Human
uagaacuugacccccu

SEQ ID NO: 2479214 - RNA, 19 nt, Human
uagaacuguaugucagaca

SEQ ID NO: 2479215 - RNA, 22 nt, Human
uagaacuggagaggcuagaacc

SEQ ID NO: 2479216 - RNA, 19 nt, Human
uagaacucugaaaugaaga

SEQ ID NO: 2479217 - RNA, 23 nt, Human
uagaacucuccaucuuauuuuca

SEQ ID NO: 2479218 - RNA, 15 nt, Human
uagaagccaagggaa

SEQ ID NO: 2479219 - RNA, 12 nt, Human
uagaagccaagg

SEQ ID NO: 2479220 - RNA, 23 nt, Human
uagaagcauuccuucuuugauaa

SEQ ID NO: 2479221 - RNA, 22 nt, Human
uagaagcauuccuucuuugaua

SEQ ID NO: 2479222 - RNA, 21 nt, Human
uagaagcauuccuucuuugau

SEQ ID NO: 2479223 - RNA, 20 nt, Human
uagaagcauuccuucuuuga

SEQ ID NO: 2479224 - RNA, 14 nt, Human
uagaagcauuccuu

SEQ ID NO: 2479225 - RNA, 15 nt, Human
uagaagucacacagu

SEQ ID NO: 2479226 - RNA, 20 nt, Human
uagaagacucuaccagacug

SEQ ID NO: 2479227 - RNA, 21 nt, Human
uagaacuugcagcugauguug

SEQ ID NO: 2479228 - RNA, 23 nt, Human
uagaagauauuagucuuggggca

SEQ ID NO: 2479229 - RNA, 21 nt, Human
uagaagacucuaccagacugu

SEQ ID NO: 2479230 - RNA, 16 nt, Human
uagaagauccuacccc

SEQ ID NO: 2479231 - RNA, 18 nt, Human
uagaagauggcacuuaua

SEQ ID NO: 2479232 - RNA, 14 nt, Human
uagaagcuggagga

SEQ ID NO: 2479233 - RNA, 20 nt, Human
uagaagucuuagauguauau

SEQ ID NO: 2479234 - RNA, 18 nt, Human
uagaagucuuagauguau

SEQ ID NO: 2479235 - RNA, 19 nt, Human
uagaagucuuagauguaua

SEQ ID NO: 2479236 - RNA, 19 nt, Human
uagaagccaagggaaaggg

SEQ ID NO: 2479237 - RNA, 16 nt, Human
uagaagccaagggaaa

SEQ ID NO: 2479238 - RNA, 22 nt, Human
uagaagccccguuauaacuccu

SEQ ID NO: 2479239 - RNA, 16 nt, Human
uagaagucacacagua

SEQ ID NO: 2479240 - RNA, 16 nt, Human
uagaagucuuagaugu

SEQ ID NO: 2479241 - RNA, 17 nt, Human
uagaagucuuagaugua

SEQ ID NO: 2479242 - RNA, 23 nt, Human
uagaauuuauucaauuccucugg

SEQ ID NO: 2479243 - RNA, 19 nt, Human
uagacaaauauuuggaggg

SEQ ID NO: 2479244 - RNA, 15 nt, Human
uagacaacccugcaa

SEQ ID NO: 2479245 - RNA, 14 nt, Human
uagaauugcauuga

SEQ ID NO: 2479246 - RNA, 15 nt, Human
uagaauugcauugac

SEQ ID NO: 2479247 - RNA, 13 nt, Human
uagaauugcauug

SEQ ID NO: 2479248 - RNA, 22 nt, Human
uagaauuuauucaauuccucug

SEQ ID NO: 2479249 - RNA, 20 nt, Human
uagaauuuauucaauuccuc

SEQ ID NO: 2479250 - RNA, 19 nt, Human
uagaauuggcugaacucau

SEQ ID NO: 2479251 - RNA, 15 nt, Human
uagaauuuauucaau

SEQ ID NO: 2479252 - RNA, 21 nt, Human
uagacagagucucacuguugc

SEQ ID NO: 2479253 - RNA, 16 nt, Human
uagacaauuuauuaug

SEQ ID NO: 2479254 - RNA, 22 nt, Human
uagacaaguccagccuggcaag

SEQ ID NO: 2479255 - RNA, 14 nt, Human
uagacagucccugc

SEQ ID NO: 2479256 - RNA, 12 nt, Human
uagacagucccu

SEQ ID NO: 2479257 - RNA, 23 nt, Human
aauuuguaaguuucaggugacau

SEQ ID NO: 2479258 - RNA, 19 nt, Human
aauuuguaaguuucaggug

SEQ ID NO: 2479259 - RNA, 18 nt, Human
aauuuguaaguuucaggu

SEQ ID NO: 2479260 - RNA, 16 nt, Human
aauuuguaaguuucag

SEQ ID NO: 2479261 - RNA, 14 nt, Human
aauuuguaaguuuc

SEQ ID NO: 2479262 - RNA, 15 nt, Human
aauuuguaaguuuau

SEQ ID NO: 2479263 - RNA, 14 nt, Human
aauuuguaaguuua

SEQ ID NO: 2479264 - RNA, 13 nt, Human
aauuuguaaguuu

SEQ ID NO: 2479265 - RNA, 16 nt, Human
aauuuguaaccucagc

SEQ ID NO: 2479266 - RNA, 15 nt, Human
aauuuguaaccucag

SEQ ID NO: 2479267 - RNA, 24 nt, Human
aauuuguaaaaacagcauugcuuu

SEQ ID NO: 2479268 - RNA, 22 nt, Human
uagacaguaugagucaaugugc

SEQ ID NO: 2479269 - RNA, 15 nt, Human
aauuuguaauugcuu

SEQ ID NO: 2479270 - RNA, 19 nt, Human
aauuuguaauugcuuacau

SEQ ID NO: 2479271 - RNA, 20 nt, Human
aauuuguacauauguaaaau

SEQ ID NO: 2479272 - RNA, 19 nt, Human
aauuuguaucugaaggaga

SEQ ID NO: 2479273 - RNA, 18 nt, Human
aauuuguaucugaaggag

SEQ ID NO: 2479274 - RNA, 17 nt, Human
aauuuguaucugaagga

SEQ ID NO: 2479275 - RNA, 15 nt, Human
aauuuguaucugaag

SEQ ID NO: 2479276 - RNA, 14 nt, Human
aauuuguaucugaa

SEQ ID NO: 2479277 - RNA, 12 nt, Human
aauuuguaucug

SEQ ID NO: 2479278 - RNA, 17 nt, Human
aauuuuaaaaaugaauc

SEQ ID NO: 2479279 - RNA, 21 nt, Human
aauuuuaaaaaugaauccuac

SEQ ID NO: 2479280 - RNA, 14 nt, Human
aauuuuaaaaauga

SEQ ID NO: 2479281 - RNA, 18 nt, Human
aauuuguuugugcuucua

SEQ ID NO: 2479282 - RNA, 22 nt, Human
aauuuguaucugaaggagauuu

SEQ ID NO: 2479283 - RNA, 20 nt, Human
aauuuguaucugaaggagau

SEQ ID NO: 2479284 - RNA, 17 nt, Human
aauuuguuugugcuucu

SEQ ID NO: 2479285 - RNA, 19 nt, Human
aauuuuuauauuugaaaua

SEQ ID NO: 2479286 - RNA, 12 nt, Human
aauuuuaaauua

SEQ ID NO: 2479287 - RNA, 17 nt, Human
aauuuuaaacaaagguu

SEQ ID NO: 2479288 - RNA, 19 nt, Human
aauuuuaaccuaugauauu

SEQ ID NO: 2479289 - RNA, 18 nt, Human
aauuuuaaauaaaaguga

SEQ ID NO: 2479290 - RNA, 22 nt, Human
aauuuuaaauaaaagugaucaa

SEQ ID NO: 2479291 - RNA, 14 nt, Human
aauuuuaaacaaag

SEQ ID NO: 2479292 - RNA, 17 nt, Human
aauuuuaaauaaaagug

SEQ ID NO: 2479293 - RNA, 13 nt, Human
aauuuuuauucau

SEQ ID NO: 2479294 - RNA, 21 nt, Human
aauuuuuauuauuuguuuucc

SEQ ID NO: 2479295 - RNA, 16 nt, Human
aauuuuuauuauuugu

SEQ ID NO: 2479296 - RNA, 16 nt, Human
aauuuuuauucauaag

SEQ ID NO: 2479297 - RNA, 15 nt, Human
aauuuuuauucauaa

SEQ ID NO: 2479298 - RNA, 16 nt, Human
aauuuuuauuuuucua

SEQ ID NO: 2479299 - RNA, 15 nt, Human
aauuuuuauuuuucu

SEQ ID NO: 2479300 - RNA, 15 nt, Human
aauuuuucagaugcu

SEQ ID NO: 2479301 - RNA, 17 nt, Human
aauuuuuauuaaauuau

SEQ ID NO: 2479302 - RNA, 18 nt, Human
aauuuuuauuaaauuaug

SEQ ID NO: 2479303 - RNA, 19 nt, Human
aauuuuucagaugcuucug

SEQ ID NO: 2479304 - RNA, 20 nt, Human
aauuuuucauugauaugaaa

SEQ ID NO: 2479305 - RNA, 23 nt, Human
aauuuuucauugauaugaaaaau

SEQ ID NO: 2479306 - RNA, 12 nt, Human
aauuuuucugca

SEQ ID NO: 2479307 - RNA, 22 nt, Human
aauuuuucucuaacucagaaac

SEQ ID NO: 2479308 - RNA, 20 nt, Human
aauuuuucucuaacucagaa

SEQ ID NO: 2479309 - RNA, 23 nt, Human
aauuuuucugcacugagcagagu

SEQ ID NO: 2479310 - RNA, 16 nt, Human
aauuuuucugcacuga

SEQ ID NO: 2479311 - RNA, 14 nt, Human
aauuuuuguauuuu

SEQ ID NO: 2479312 - RNA, 19 nt, Human
aauuuuuucucuaggaaau

SEQ ID NO: 2479313 - RNA, 18 nt, Human
aauuuuuuaucaugcaug

SEQ ID NO: 2479314 - RNA, 20 nt, Human
aauuuuuuaucaugcauguc

SEQ ID NO: 2479315 - RNA, 18 nt, Human
aauuuuuuuauuguuuaa

SEQ ID NO: 2479316 - RNA, 16 nt, Human
aauuuuuuuauuguuu

SEQ ID NO: 2479317 - RNA, 15 nt, Human
aauuuuuuucaauau

SEQ ID NO: 2479318 - RNA, 19 nt, Human
aauuuuuuucaauauuuau

SEQ ID NO: 2479319 - RNA, 17 nt, Human
aauuuuuuuauuacuga

SEQ ID NO: 2479320 - RNA, 15 nt, Human
aauuuuuuuauuacu

SEQ ID NO: 2479321 - RNA, 17 nt, Human
acaaaaaaauauauuua

SEQ ID NO: 2479322 - RNA, 13 nt, Human
acaaaaaaauaua

SEQ ID NO: 2479323 - RNA, 17 nt, Human
acaaaaaaaaaguuuua

SEQ ID NO: 2479324 - RNA, 22 nt, Human
acaaaaaaaaaguuuuauuuuu

SEQ ID NO: 2479325 - RNA, 21 nt, Human
acaaaaaaaaaguuuuauuuu

SEQ ID NO: 2479326 - RNA, 19 nt, Human
acaaaaaaaaaguuuuauu

SEQ ID NO: 2479327 - RNA, 20 nt, Human
aauuuuuuuuuuuuaacuuu

SEQ ID NO: 2479328 - RNA, 17 nt, Human
aauuuuuuugagacaga

SEQ ID NO: 2479329 - RNA, 16 nt, Human
aauuuuuuucugcaac

SEQ ID NO: 2479330 - RNA, 19 nt, Human
aauuuuuuuauuguuuaaa

SEQ ID NO: 2479331 - RNA, 20 nt, Human
aauuuuuuuccuuaccuuuu

SEQ ID NO: 2479332 - RNA, 21 nt, Human
aauuuuuuucaucuucucugg

SEQ ID NO: 2479333 - RNA, 13 nt, Human
acaaaaacauggc

SEQ ID NO: 2479334 - RNA, 18 nt, Human
acaaaaaaaucugcagaa

SEQ ID NO: 2479335 - RNA, 16 nt, Human
acaaaaaaaucugcag

SEQ ID NO: 2479336 - RNA, 19 nt, Human
acaaaaaaaucugcagaag

SEQ ID NO: 2479337 - RNA, 15 nt, Human
acaaaaacagccuca

SEQ ID NO: 2479338 - RNA, 21 nt, Human
acaaaaacagccucacagaag

SEQ ID NO: 2479339 - RNA, 20 nt, Human
acaaaaaaauauauuuaaug

SEQ ID NO: 2479340 - RNA, 13 nt, Human
acaaaaaaaucug

SEQ ID NO: 2479341 - RNA, 16 nt, Human
acaaaaacacagcaag

SEQ ID NO: 2479342 - RNA, 13 nt, Human
aauuucuaaaucu

SEQ ID NO: 2479343 - RNA, 21 nt, Human
aauuucuaaaucuccaaaaua

SEQ ID NO: 2479344 - RNA, 21 nt, Human
aauuuaugaauugaauuaucu

SEQ ID NO: 2479345 - RNA, 23 nt, Human
aauuuaugaauugaauuaucuug

SEQ ID NO: 2479346 - RNA, 16 nt, Human
aauuuaugaguuuuug

SEQ ID NO: 2479347 - RNA, 14 nt, Human
aauuuaugugaugg

SEQ ID NO: 2479348 - RNA, 19 nt, Human
aauuuaugaguuuuugaua

SEQ ID NO: 2479349 - RNA, 20 nt, Human
aauuuaugaguuuuugauag

SEQ ID NO: 2479350 - RNA, 20 nt, Human
aauuucucccagucauuuaa

SEQ ID NO: 2479351 - RNA, 20 nt, Human
aauuucuccucccuuccuuu

SEQ ID NO: 2479352 - RNA, 14 nt, Human
aauuucuccucccu

SEQ ID NO: 2479353 - RNA, 12 nt, Human
aauuucuccucc

SEQ ID NO: 2479354 - RNA, 19 nt, Human
aauuucuccccagggugga

SEQ ID NO: 2479355 - RNA, 13 nt, Human
aauuucuccccag

SEQ ID NO: 2479356 - RNA, 12 nt, Human
aauuucucccca

SEQ ID NO: 2479357 - RNA, 11 nt, Human
aauuucucccc

SEQ ID NO: 2479358 - RNA, 15 nt, Human
aauuucuacuuugaa

SEQ ID NO: 2479359 - RNA, 16 nt, Human
aauuucuacuuugaag

SEQ ID NO: 2479360 - RNA, 17 nt, Human
aauuucuacuuugaagu

SEQ ID NO: 2479361 - RNA, 16 nt, Human
aauuucuaccauuuca

SEQ ID NO: 2479362 - RNA, 18 nt, Human
aauuucuaccauuucaga

SEQ ID NO: 2479363 - RNA, 22 nt, Human
aauuucuaaaaaacagaggcca

SEQ ID NO: 2479364 - RNA, 17 nt, Human
aauuuagaaauauaauu

SEQ ID NO: 2479365 - RNA, 18 nt, Human
aauuuagguuuuuauuag

SEQ ID NO: 2479366 - RNA, 20 nt, Human
aauuuagguuuuuauuagua

SEQ ID NO: 2479367 - RNA, 18 nt, Human
aauuuauccugaaauuuc

SEQ ID NO: 2479368 - RNA, 19 nt, Human
aauuuauccugaaauuuca

SEQ ID NO: 2479369 - RNA, 23 nt, Human
aauuuauccugaaauuucagauu

SEQ ID NO: 2479370 - RNA, 20 nt, Human
aauuuaucuugucucugggc

SEQ ID NO: 2479371 - RNA, 19 nt, Human
aauuuaucuugucucuggg

SEQ ID NO: 2479372 - RNA, 18 nt, Human
aauuuaucuugucucugg

SEQ ID NO: 2479373 - RNA, 20 nt, Human
aauuugaaacacuuugcaua

SEQ ID NO: 2479374 - RNA, 21 nt, Human
aauuucuguguugccaagcuc

SEQ ID NO: 2479375 - RNA, 14 nt, Human
aauuugaaauuuag

SEQ ID NO: 2479376 - RNA, 13 nt, Human
aauuucuguccuu

SEQ ID NO: 2479377 - RNA, 15 nt, Human
aauuugaaacacuuu

SEQ ID NO: 2479378 - RNA, 12 nt, Human
aauuugaaugaa

SEQ ID NO: 2479379 - RNA, 13 nt, Human
aauuugaaugaaa

SEQ ID NO: 2479380 - RNA, 14 nt, Human
aauuugaaugaaaa

SEQ ID NO: 2479381 - RNA, 15 nt, Human
aauuugaaugaaaaa

SEQ ID NO: 2479382 - RNA, 16 nt, Human
aauuugaaugaaaaau

SEQ ID NO: 2479383 - RNA, 18 nt, Human
aauuugagagaaauauga

SEQ ID NO: 2479384 - RNA, 20 nt, Human
aauuugagagaaauaugaag

SEQ ID NO: 2479385 - RNA, 13 nt, Human
aauuugaggacaa

SEQ ID NO: 2479386 - RNA, 17 nt, Human
aauuugagauacaaaca

SEQ ID NO: 2479387 - RNA, 19 nt, Human
uacuucaaauccuugaaga

SEQ ID NO: 2479388 - RNA, 14 nt, Human
uacuucaaauccuu

SEQ ID NO: 2479389 - RNA, 19 nt, Human
uacuucaaaaguauuuucc

SEQ ID NO: 2479390 - RNA, 16 nt, Human
uacuucaaaaguauuu

SEQ ID NO: 2479391 - RNA, 14 nt, Human
uacuucaaaaguau

SEQ ID NO: 2479392 - RNA, 12 nt, Human
uacuucaaaagu

SEQ ID NO: 2479393 - RNA, 20 nt, Human
uacuuauuuuugacaguguu

SEQ ID NO: 2479394 - RNA, 18 nt, Human
aauuugauaucacagucu

SEQ ID NO: 2479395 - RNA, 18 nt, Human
aauuugaucguuccaguu

SEQ ID NO: 2479396 - RNA, 13 nt, Human
aauuugagugcuc

SEQ ID NO: 2479397 - RNA, 20 nt, Human
aauuugauacauaugugaau

SEQ ID NO: 2479398 - RNA, 21 nt, Human
aauuugauacauaugugaaua

SEQ ID NO: 2479399 - RNA, 14 nt, Human
aauuugaggacaac

SEQ ID NO: 2479400 - RNA, 20 nt, Human
aauuugaguuggaucaucua

SEQ ID NO: 2479401 - RNA, 16 nt, Human
aauuugauaucacagu

SEQ ID NO: 2479402 - RNA, 14 nt, Human
aauuugauaucaca

SEQ ID NO: 2479403 - RNA, 21 nt, Human
aauuugauaguauugugcaua

SEQ ID NO: 2479404 - RNA, 16 nt, Human
aauuuacaaagugugu

SEQ ID NO: 2479405 - RNA, 15 nt, Human
aauuuacaaagugug

SEQ ID NO: 2479406 - RNA, 14 nt, Human
aauuuacauggcaa

SEQ ID NO: 2479407 - RNA, 19 nt, Human
aauuuacauacucugcuua

SEQ ID NO: 2479408 - RNA, 17 nt, Human
aauuuacaaagugugua

SEQ ID NO: 2479409 - RNA, 14 nt, Human
aauuuacaaagugu

SEQ ID NO: 2479410 - RNA, 13 nt, Human
aauuuacaaagug

SEQ ID NO: 2479411 - RNA, 21 nt, Human
aauuuacaaaaauauaaaaua

SEQ ID NO: 2479412 - RNA, 18 nt, Human
aauuuacaaaaauauaaa

SEQ ID NO: 2479413 - RNA, 16 nt, Human
aauuuacaaaaauaua

SEQ ID NO: 2479414 - RNA, 19 nt, Human
aauuuaauucauguuucuu

SEQ ID NO: 2479415 - RNA, 23 nt, Human
aauuuaauucauguuucuuaaau

SEQ ID NO: 2479416 - RNA, 21 nt, Human
aauuuaaaggguguacuuaua

SEQ ID NO: 2479417 - RNA, 19 nt, Human
aauuuaaaggguguacuua

SEQ ID NO: 2479418 - RNA, 22 nt, Human
aauuuaaaggguguacuuauau

SEQ ID NO: 2479419 - RNA, 23 nt, Human
aauuuaagugcguguguagaguu

SEQ ID NO: 2479420 - RNA, 14 nt, Human
aauuuaaauauaau

SEQ ID NO: 2479421 - RNA, 16 nt, Human
aauuuaagugcgugug

SEQ ID NO: 2479422 - RNA, 20 nt, Human
aauuuaagugcguguguaga

SEQ ID NO: 2479423 - RNA, 14 nt, Human
aauuuaaugcaugu

SEQ ID NO: 2479424 - RNA, 14 nt, Human
aauuuaauauagcu

SEQ ID NO: 2479425 - RNA, 21 nt, Human
aauuuaauuagggguugcuaa

SEQ ID NO: 2479426 - RNA, 18 nt, Human
aauuuaauucauguuucu

SEQ ID NO: 2479427 - RNA, 17 nt, Human
aauuuaaacccauuuua

SEQ ID NO: 2479428 - RNA, 19 nt, Human
aauuuaaacaggcccagca

SEQ ID NO: 2479429 - RNA, 20 nt, Human
aauuuaaacaggcccagcau

SEQ ID NO: 2479430 - RNA, 18 nt, Human
aauuuaaacaggcccagc

SEQ ID NO: 2479431 - RNA, 11 nt, Human
aauuuaaacag

SEQ ID NO: 2479432 - RNA, 19 nt, Human
aauuuaaacaccuccucau

SEQ ID NO: 2479433 - RNA, 15 nt, Human
aauuuaaacaccucc

SEQ ID NO: 2479434 - RNA, 10 nt, Human
aauuuaaaca

SEQ ID NO: 2479435 - RNA, 9 nt, Human
aauuuaaac

SEQ ID NO: 2479436 - RNA, 18 nt, Human
aauuuaaaggguguacuu

SEQ ID NO: 2479437 - RNA, 19 nt, Human
aauuuaaacccauuuuagu

SEQ ID NO: 2479438 - RNA, 18 nt, Human
aauuuaaacccauuuuag

SEQ ID NO: 2479439 - RNA, 12 nt, Human
aauuuaaagcaa

SEQ ID NO: 2479440 - RNA, 13 nt, Human
aauuuaaaagucu

SEQ ID NO: 2479441 - RNA, 14 nt, Human
aauuuaaaaaauaa

SEQ ID NO: 2479442 - RNA, 20 nt, Human
aauuguuuugcacuuuuuua

SEQ ID NO: 2479443 - RNA, 17 nt, Human
aauuguuuugcacuuuu

SEQ ID NO: 2479444 - RNA, 16 nt, Human
aauuguuuugcacuuu

SEQ ID NO: 2479445 - RNA, 13 nt, Human
aauuuaaaaaaua

SEQ ID NO: 2479446 - RNA, 16 nt, Human
aauuguuugucuuuaa

SEQ ID NO: 2479447 - RNA, 21 nt, Human
aauugcuuacauuuuuacaau

SEQ ID NO: 2479448 - RNA, 20 nt, Human
aauugcuuacauuuuuacaa

SEQ ID NO: 2479449 - RNA, 15 nt, Human
aauugcuuacauuuu

SEQ ID NO: 2479450 - RNA, 13 nt, Human
aauugcuguguau

SEQ ID NO: 2479451 - RNA, 18 nt, Human
aauugcuguguaucugau

SEQ ID NO: 2479452 - RNA, 22 nt, Human
aauugcugugccucccaaaauu

SEQ ID NO: 2479453 - RNA, 13 nt, Human
aauugcugugccu

SEQ ID NO: 2479454 - RNA, 12 nt, Human
aauugcugugcc

SEQ ID NO: 2479455 - RNA, 23 nt, Human
aauugugugaaagguacuucaaa

SEQ ID NO: 2479456 - RNA, 13 nt, Human
uacuguaagaaaa

SEQ ID NO: 2479457 - RNA, 21 nt, Human
uacuguaaagaaagagagaaa

SEQ ID NO: 2479458 - RNA, 23 nt, Human
uacuguaaagaaagagagaaaau

SEQ ID NO: 2479459 - RNA, 18 nt, Human
uacuguaacacuuuacaa

SEQ ID NO: 2479460 - RNA, 11 nt, Human
uacuguaacac

SEQ ID NO: 2479461 - RNA, 20 nt, Human
uacuguaaagagaccuaccu

SEQ ID NO: 2479462 - RNA, 23 nt, Human
aauugcuauguuuugacauuuuu

SEQ ID NO: 2479463 - RNA, 20 nt, Human
aauugcuccuaagcuucaaa

SEQ ID NO: 2479464 - RNA, 12 nt, Human
aauugcuccuug

SEQ ID NO: 2479465 - RNA, 19 nt, Human
aauuguuguuucuuucuag

SEQ ID NO: 2479466 - RNA, 18 nt, Human
aauuguuguuucuuucua

SEQ ID NO: 2479467 - RNA, 17 nt, Human
aauuguuguuucuuucu

SEQ ID NO: 2479468 - RNA, 15 nt, Human
aauuguuguuucuuu

SEQ ID NO: 2479469 - RNA, 13 nt, Human
aauuguuguuucu

SEQ ID NO: 2479470 - RNA, 12 nt, Human
aauuguuguuuc

SEQ ID NO: 2479471 - RNA, 23 nt, Human
aauuguugcuaaucuucuuaugc

SEQ ID NO: 2479472 - RNA, 23 nt, Human
aauugugugugaugugaagccaa

SEQ ID NO: 2479473 - RNA, 21 nt, Human
aauuguuguuucuuucuagug

SEQ ID NO: 2479474 - RNA, 20 nt, Human
aauuguuguuucuuucuagu

SEQ ID NO: 2479475 - RNA, 13 nt, Human
aauuguuguuugu

SEQ ID NO: 2479476 - RNA, 14 nt, Human
aauuguuguuugua

SEQ ID NO: 2479477 - RNA, 17 nt, Human
aauuguuguuuguaugu

SEQ ID NO: 2479478 - RNA, 19 nt, Human
aauuguuguuuguauguau

SEQ ID NO: 2479479 - RNA, 21 nt, Human
aauuguuguuuguauguauaa

SEQ ID NO: 2479480 - RNA, 22 nt, Human
aauuguuguuuguauguauaau

SEQ ID NO: 2479481 - RNA, 23 nt, Human
aauuguuguuuguauguauaauu

SEQ ID NO: 2479482 - RNA, 22 nt, Human
aauuguuuggggaugagaaagg

SEQ ID NO: 2479483 - RNA, 20 nt, Human
aauuguuuaaguguuguaaa

SEQ ID NO: 2479484 - RNA, 23 nt, Human
aauuguuguuucuuucuaguggu

SEQ ID NO: 2479485 - RNA, 15 nt, Human
aauuguuuaaguguu

SEQ ID NO: 2479486 - RNA, 20 nt, Human
aauuguuucaaaauaaaaac

SEQ ID NO: 2479487 - RNA, 16 nt, Human
aauugacccacaagaa

SEQ ID NO: 2479488 - RNA, 19 nt, Human
aauugacccacaagaaaug

SEQ ID NO: 2479489 - RNA, 15 nt, Human
uacguacacauuuua

SEQ ID NO: 2479490 - RNA, 14 nt, Human
uacguacacauuuu

SEQ ID NO: 2479491 - RNA, 13 nt, Human
aauugacccacaa

SEQ ID NO: 2479492 - RNA, 22 nt, Human
aauugaacuuaaauaaauguca

SEQ ID NO: 2479493 - RNA, 22 nt, Human
aauugaaaggcauucucugaag

SEQ ID NO: 2479494 - RNA, 17 nt, Human
aauugaaaggcauucuc

SEQ ID NO: 2479495 - RNA, 21 nt, Human
aauugaaaggcauucucugaa

SEQ ID NO: 2479496 - RNA, 21 nt, Human
aauugaacuuaaauaaauguc

SEQ ID NO: 2479497 - RNA, 18 nt, Human
aauucuuugaccuguugg

SEQ ID NO: 2479498 - RNA, 22 nt, Human
aauucuuugaccuguugggagu

SEQ ID NO: 2479499 - RNA, 13 nt, Human
aauucuuuauaca

SEQ ID NO: 2479500 - RNA, 15 nt, Human
aauucuuguauauua

SEQ ID NO: 2479501 - RNA, 16 nt, Human
aauucuuguauauuau

SEQ ID NO: 2479502 - RNA, 22 nt, Human
aauucuuuauacaacagugcua

SEQ ID NO: 2479503 - RNA, 21 nt, Human
aauucuuuauacaacagugcu

SEQ ID NO: 2479504 - RNA, 20 nt, Human
aauucuuuauacaacagugc

SEQ ID NO: 2479505 - RNA, 19 nt, Human
aauucuuuauacaacagug

SEQ ID NO: 2479506 - RNA, 14 nt, Human
aauucuuuauacaa

SEQ ID NO: 2479507 - RNA, 20 nt, Human
aauucuuguauauuauggaa

SEQ ID NO: 2479508 - RNA, 18 nt, Human
aauucuugguugaggaaa

SEQ ID NO: 2479509 - RNA, 19 nt, Human
aauucuugguugaggaaac

SEQ ID NO: 2479510 - RNA, 20 nt, Human
aauucuugguugaggaaaca

SEQ ID NO: 2479511 - RNA, 14 nt, Human
aauucuuguauauu

SEQ ID NO: 2479512 - RNA, 13 nt, Human
aauucuuggaaua

SEQ ID NO: 2479513 - RNA, 15 nt, Human
aauucuuggaauacu

SEQ ID NO: 2479514 - RNA, 23 nt, Human
aauucuucugaacucaaacugag

SEQ ID NO: 2479515 - RNA, 14 nt, Human
aauucuugcaaagu

SEQ ID NO: 2479516 - RNA, 20 nt, Human
aauucuugcaaaguaucccu

SEQ ID NO: 2479517 - RNA, 21 nt, Human
aauucuugccaaauauaaaua

SEQ ID NO: 2479518 - RNA, 21 nt, Human
aauucuugaaggaaaaugaua

SEQ ID NO: 2479519 - RNA, 16 nt, Human
aauucuugaaggaaaa

SEQ ID NO: 2479520 - RNA, 15 nt, Human
aauucuucugaacuc

SEQ ID NO: 2479521 - RNA, 18 nt, Human
aauucuucugaacucaaa

SEQ ID NO: 2479522 - RNA, 15 nt, Human
aauucuugaaggaaa

SEQ ID NO: 2479523 - RNA, 22 nt, Human
aauucuucuccacuuucuagcc

SEQ ID NO: 2479524 - RNA, 13 nt, Human
aauucuucugaac

SEQ ID NO: 2479525 - RNA, 21 nt, Human
aauucuucccuaucuuugcca

SEQ ID NO: 2479526 - RNA, 11 nt, Human
aauucuucccu

SEQ ID NO: 2479527 - RNA, 18 nt, Human
aauucuucagguggaaaa

SEQ ID NO: 2479528 - RNA, 19 nt, Human
uacccuuuuucuccagcug

SEQ ID NO: 2479529 - RNA, 18 nt, Human
uacccuuuuucuccagcu

SEQ ID NO: 2479530 - RNA, 17 nt, Human
uacccuuuuucuccagc

SEQ ID NO: 2479531 - RNA, 20 nt, Human
uacccuuuagacuguagccu

SEQ ID NO: 2479532 - RNA, 20 nt, Human
uacccuuggcucaauccucu

SEQ ID NO: 2479533 - RNA, 18 nt, Human
uacccuggccgcccccug

SEQ ID NO: 2479534 - RNA, 23 nt, Human
uacccugcgcccaguccuuccac

SEQ ID NO: 2479535 - RNA, 21 nt, Human
uacccugcgcccaguccuucc

SEQ ID NO: 2479536 - RNA, 15 nt, Human
aauucuuaugcuuau

SEQ ID NO: 2479537 - RNA, 15 nt, Human
aauucuuacauguuu

SEQ ID NO: 2479538 - RNA, 16 nt, Human
aauucuuaaguauguu

SEQ ID NO: 2479539 - RNA, 13 nt, Human
aauucuuacaugu

SEQ ID NO: 2479540 - RNA, 13 nt, Human
aauucuuaaauau

SEQ ID NO: 2479541 - RNA, 17 nt, Human
aauucuuacaaacaugu

SEQ ID NO: 2479542 - RNA, 17 nt, Human
uacuguaaagaaagaga

SEQ ID NO: 2479543 - RNA, 18 nt, Human
uacuguaaagaaagagag

SEQ ID NO: 2479544 - RNA, 19 nt, Human
uacuguaaagaaagagaga

SEQ ID NO: 2479545 - RNA, 20 nt, Human
uacuguaaagaaagagagaa

SEQ ID NO: 2479546 - RNA, 13 nt, Human
uacuguaaagaaa

SEQ ID NO: 2479547 - RNA, 16 nt, Human
uacuguaaagaaagag

SEQ ID NO: 2479548 - RNA, 12 nt, Human
uacuguaaagaa

SEQ ID NO: 2479549 - RNA, 23 nt, Human
uacugacacuuugccagaaagca

SEQ ID NO: 2479550 - RNA, 17 nt, Human
uacugaagguaaaauug

SEQ ID NO: 2479551 - RNA, 13 nt, Human
uacugacaugugg

SEQ ID NO: 2479552 - RNA, 19 nt, Human
uacuggugcagucauuaug

SEQ ID NO: 2479553 - RNA, 23 nt, Human
uacugaaggaaaaacacaagcaa

SEQ ID NO: 2479554 - RNA, 20 nt, Human
uacugaaggaaaaacacaag

SEQ ID NO: 2479555 - RNA, 19 nt, Human
uacugaaggaaaaacacaa

SEQ ID NO: 2479556 - RNA, 18 nt, Human
uacugaaggaaaaacaca

SEQ ID NO: 2479557 - RNA, 14 nt, Human
uacugaaggaaaaa

SEQ ID NO: 2479558 - RNA, 13 nt, Human
uacugaaggaaaa

SEQ ID NO: 2479559 - RNA, 12 nt, Human
uacugaaggaaa

SEQ ID NO: 2479560 - RNA, 22 nt, Human
uacugaagaugcagcaaaaugu

SEQ ID NO: 2479561 - RNA, 14 nt, Human
uacucuucuugaaa

SEQ ID NO: 2479562 - RNA, 17 nt, Human
uacucuucuugaaauuu

SEQ ID NO: 2479563 - RNA, 18 nt, Human
uacucuucuugaaauuuu

SEQ ID NO: 2479564 - RNA, 22 nt, Human
uacucaauugauaaacauuuaa

SEQ ID NO: 2479565 - RNA, 14 nt, Human
uacucaauggauuu

SEQ ID NO: 2479566 - RNA, 22 nt, Human
uacucaauguuacuaucugcuu

SEQ ID NO: 2479567 - RNA, 21 nt, Human
uacucugugucagguggggca

SEQ ID NO: 2479568 - RNA, 17 nt, Human
uacucuuaagccaucuu

SEQ ID NO: 2479569 - RNA, 16 nt, Human
uacucuuaagccaucu

SEQ ID NO: 2479570 - RNA, 15 nt, Human
uacucuuaagccauc

SEQ ID NO: 2479571 - RNA, 14 nt, Human
uacucuuaagccau

SEQ ID NO: 2479572 - RNA, 14 nt, Human
uacucuguuccuuc

SEQ ID NO: 2479573 - RNA, 19 nt, Human
uacucuguuccuucacauc

SEQ ID NO: 2479574 - RNA, 18 nt, Human
uacucuuauagacaacau

SEQ ID NO: 2479575 - RNA, 23 nt, Human
uacucuuaagccaucuugguaaa

SEQ ID NO: 2479576 - RNA, 22 nt, Human
uacucuuaagccaucuugguaa

SEQ ID NO: 2479577 - RNA, 21 nt, Human
uacucuuaagccaucuuggua

SEQ ID NO: 2479578 - RNA, 20 nt, Human
uacucuuaagccaucuuggu

SEQ ID NO: 2479579 - RNA, 20 nt, Human
uacucuuaaguuucucagcu

SEQ ID NO: 2479580 - RNA, 15 nt, Human
uacucuuaaguuucu

SEQ ID NO: 2479581 - RNA, 18 nt, Human
uacucuuaggaagagaaa

SEQ ID NO: 2479582 - RNA, 22 nt, Human
uacucuucaguuaagccuuugg

SEQ ID NO: 2479583 - RNA, 12 nt, Human
uacucuuccgaa

SEQ ID NO: 2479584 - RNA, 21 nt, Human
uacucuuaaguuucucagcuc

SEQ ID NO: 2479585 - RNA, 21 nt, Human
uacucuuaggaagagaaacca

SEQ ID NO: 2479586 - RNA, 16 nt, Human
uacuauaauuuaccug

SEQ ID NO: 2479587 - RNA, 14 nt, Human
uacuaguuacacau

SEQ ID NO: 2479588 - RNA, 19 nt, Human
uacuaguuacacaucuuca

SEQ ID NO: 2479589 - RNA, 21 nt, Human
uacuaguugugaccuuagugu

SEQ ID NO: 2479590 - RNA, 16 nt, Human
uacuauguaucaauga

SEQ ID NO: 2479591 - RNA, 22 nt, Human
uacuauucaguggcgagaaaua

SEQ ID NO: 2479592 - RNA, 11 nt, Human
uacuauuuaaa

SEQ ID NO: 2479593 - RNA, 14 nt, Human
uacucaacccucuc

SEQ ID NO: 2479594 - RNA, 23 nt, Human
uacucaacccucucaggugacca

SEQ ID NO: 2479595 - RNA, 15 nt, Human
uacucaagaggcuga

SEQ ID NO: 2479596 - RNA, 19 nt, Human
uacucaagaggcugaggca

SEQ ID NO: 2479597 - RNA, 15 nt, Human
uacucaagcccgcgg

SEQ ID NO: 2479598 - RNA, 19 nt, Human
uacuagguaacuucauauu

SEQ ID NO: 2479599 - RNA, 22 nt, Human
uacguuccuauugucauuaaag

SEQ ID NO: 2479600 - RNA, 18 nt, Human
uacguuccuauugucauu

SEQ ID NO: 2479601 - RNA, 15 nt, Human
uacuagguaacuuca

SEQ ID NO: 2479602 - RNA, 16 nt, Human
uacuagguaacuucau

SEQ ID NO: 2479603 - RNA, 15 nt, Human
uacguuccuauuguc

SEQ ID NO: 2479604 - RNA, 16 nt, Human
uacguuauuguugacu

SEQ ID NO: 2479605 - RNA, 15 nt, Human
uacguuauuguugac

SEQ ID NO: 2479606 - RNA, 13 nt, Human
uacguugugcauu

SEQ ID NO: 2479607 - RNA, 14 nt, Human
uacguugugcauuu

SEQ ID NO: 2479608 - RNA, 15 nt, Human
uacgugugauuuuuc

SEQ ID NO: 2479609 - RNA, 14 nt, Human
uacguuaccaggca

SEQ ID NO: 2479610 - RNA, 15 nt, Human
uacguguagcuauau

SEQ ID NO: 2479611 - RNA, 18 nt, Human
uacgucaaacaugaagug

SEQ ID NO: 2479612 - RNA, 14 nt, Human
uacgucugacaggc

SEQ ID NO: 2479613 - RNA, 16 nt, Human
uacguacaugugaggc

SEQ ID NO: 2479614 - RNA, 13 nt, Human
uacguaugagacg

SEQ ID NO: 2479615 - RNA, 17 nt, Human
acagucucaggaaauca

SEQ ID NO: 2479616 - RNA, 14 nt, Human
acagucucuuuaau

SEQ ID NO: 2479617 - RNA, 19 nt, Human
acagucucuuuaaucuuca

SEQ ID NO: 2479618 - RNA, 13 nt, Human
acagucugucaug

SEQ ID NO: 2479619 - RNA, 22 nt, Human
acagucugaucgugacgcugaa

SEQ ID NO: 2479620 - RNA, 20 nt, Human
acagucugaucgugacgcug

SEQ ID NO: 2479621 - RNA, 19 nt, Human
acagucugaucgugacgcu

SEQ ID NO: 2479622 - RNA, 20 nt, Human
acagucucuuuaaucuucag

SEQ ID NO: 2479623 - RNA, 14 nt, Human
acagucuuccauuu

SEQ ID NO: 2479624 - RNA, 19 nt, Human
acagucuuccauuugcaag

SEQ ID NO: 2479625 - RNA, 14 nt, Human
acagucuuguauua

SEQ ID NO: 2479626 - RNA, 20 nt, Human
acagugaaagaaaauaacaa

SEQ ID NO: 2479627 - RNA, 18 nt, Human
acagugaaaauguaagcu

SEQ ID NO: 2479628 - RNA, 14 nt, Human
acagugaaaaugua

SEQ ID NO: 2479629 - RNA, 15 nt, Human
acagucuugcagcag

SEQ ID NO: 2479630 - RNA, 22 nt, Human
acagucuuguauuaaguuguua

SEQ ID NO: 2479631 - RNA, 18 nt, Human
acagucuuguauuaaguu

SEQ ID NO: 2479632 - RNA, 15 nt, Human
acagucuuguauuaa

SEQ ID NO: 2479633 - RNA, 13 nt, Human
acagucucaggaa

SEQ ID NO: 2479634 - RNA, 14 nt, Human
acagucucaggaaa

SEQ ID NO: 2479635 - RNA, 15 nt, Human
acagucucaggaaau

SEQ ID NO: 2479636 - RNA, 16 nt, Human
acagucucaggaaauc

SEQ ID NO: 2479637 - RNA, 22 nt, Human
acaguccuuaccagcagagcac

SEQ ID NO: 2479638 - RNA, 21 nt, Human
acaguccuuaccagcagagca

SEQ ID NO: 2479639 - RNA, 23 nt, Human
acaguccucuccaccuaguggcu

SEQ ID NO: 2479640 - RNA, 23 nt, Human
acaguccugggagaaccucaggc

SEQ ID NO: 2479641 - RNA, 21 nt, Human
acaguccugggagaaccucag

SEQ ID NO: 2479642 - RNA, 22 nt, Human
acaguccugggagaaccucagg

SEQ ID NO: 2479643 - RNA, 13 nt, Human
acagucuaauuuu

SEQ ID NO: 2479644 - RNA, 14 nt, Human
acagucuaauuuuu

SEQ ID NO: 2479645 - RNA, 21 nt, Human
acagucuaauuuuuauucaua

SEQ ID NO: 2479646 - RNA, 18 nt, Human
acagucuaauuuuuauuc

SEQ ID NO: 2479647 - RNA, 22 nt, Human
acagucuaauuuuuauucauaa

SEQ ID NO: 2479648 - RNA, 19 nt, Human
acaguguugaaaauguuca

SEQ ID NO: 2479649 - RNA, 21 nt, Human
acaguguugaaaauguucaga

SEQ ID NO: 2479650 - RNA, 22 nt, Human
acaguguucuguuuaauacuca

SEQ ID NO: 2479651 - RNA, 9 nt, Human
acaguguuu

SEQ ID NO: 2479652 - RNA, 15 nt, Human
acaguguuucccaua

SEQ ID NO: 2479653 - RNA, 16 nt, Human
acaguguuucccauaa

SEQ ID NO: 2479654 - RNA, 18 nt, Human
acaguguuucccauaauu

SEQ ID NO: 2479655 - RNA, 22 nt, Human
acaguguuucccauaauuuucu

SEQ ID NO: 2479656 - RNA, 23 nt, Human
acaguguuaggccuggcacagug

SEQ ID NO: 2479657 - RNA, 22 nt, Human
acaguguuaggccuggcacagu

SEQ ID NO: 2479658 - RNA, 21 nt, Human
acaguguuaggccuggcacag

SEQ ID NO: 2479659 - RNA, 19 nt, Human
acaguguuaggccuggcac

SEQ ID NO: 2479660 - RNA, 11 nt, Human
acaguguuccg

SEQ ID NO: 2479661 - RNA, 17 nt, Human
acaguguucuguuuaau

SEQ ID NO: 2479662 - RNA, 16 nt, Human
acaguguucuguuuaa

SEQ ID NO: 2479663 - RNA, 15 nt, Human
acaguguucuguuua

SEQ ID NO: 2479664 - RNA, 14 nt, Human
acaguguucuguuu

SEQ ID NO: 2479665 - RNA, 16 nt, Human
acaguguuauuuucuu

SEQ ID NO: 2479666 - RNA, 20 nt, Human
acaguguuauuuucuuugaa

SEQ ID NO: 2479667 - RNA, 13 nt, Human
acaguguucuguu

SEQ ID NO: 2479668 - RNA, 22 nt, Human
acaguguuauuuucuuugaaau

SEQ ID NO: 2479669 - RNA, 15 nt, Human
acaguuaagagaaau

SEQ ID NO: 2479670 - RNA, 22 nt, Human
acaguguuuuuguaaagugugg

SEQ ID NO: 2479671 - RNA, 20 nt, Human
acaguguuuuuguaaagugu

SEQ ID NO: 2479672 - RNA, 18 nt, Human
acaguguuuuuguaaagu

SEQ ID NO: 2479673 - RNA, 16 nt, Human
acaguguuuuuguaaa

SEQ ID NO: 2479674 - RNA, 17 nt, Human
acaguguuugcaauggu

SEQ ID NO: 2479675 - RNA, 23 nt, Human
acaguguuucccauaauuuucuu

SEQ ID NO: 2479676 - RNA, 19 nt, Human
acaguguuucgacagcuga

SEQ ID NO: 2479677 - RNA, 21 nt, Human
acaguuaccucugccucagaa

SEQ ID NO: 2479678 - RNA, 16 nt, Human
acaguuaacuuucaga

SEQ ID NO: 2479679 - RNA, 13 nt, Human
acaguuaacuuuc

SEQ ID NO: 2479680 - RNA, 14 nt, Human
acaguuaacuuuca

SEQ ID NO: 2479681 - RNA, 21 nt, Human
acaguuaaaugagaacaugaa

SEQ ID NO: 2479682 - RNA, 14 nt, Human
acagugagacucug

SEQ ID NO: 2479683 - RNA, 18 nt, Human
acagugagacucugucuc

SEQ ID NO: 2479684 - RNA, 23 nt, Human
acagugacucgggcuccugugcc

SEQ ID NO: 2479685 - RNA, 20 nt, Human
acagugacucgggcuccugu

SEQ ID NO: 2479686 - RNA, 19 nt, Human
acagugacucgggcuccug

SEQ ID NO: 2479687 - RNA, 18 nt, Human
acagugacucgggcuccu

SEQ ID NO: 2479688 - RNA, 21 nt, Human
acagugaaaauguaagcuguu

SEQ ID NO: 2479689 - RNA, 14 nt, Human
acagugaagcaaau

SEQ ID NO: 2479690 - RNA, 17 nt, Human
acagugaaggcuguccu

SEQ ID NO: 2479691 - RNA, 13 nt, Human
acagugugaaguu

SEQ ID NO: 2479692 - RNA, 12 nt, Human
acagugugaagu

SEQ ID NO: 2479693 - RNA, 24 nt, Human
acagugucuguaucggagacagug

SEQ ID NO: 2479694 - RNA, 13 nt, Human
acagugagccaag

SEQ ID NO: 2479695 - RNA, 12 nt, Human
acagugagccaa

SEQ ID NO: 2479696 - RNA, 12 nt, Human
acagugagccug

SEQ ID NO: 2479697 - RNA, 14 nt, Human
acagugagccugaa

SEQ ID NO: 2479698 - RNA, 17 nt, Human
acaguguuaggccuggc

SEQ ID NO: 2479699 - RNA, 14 nt, Human
acaguguuaaauga

SEQ ID NO: 2479700 - RNA, 19 nt, Human
acagugugaaguuagaauu

SEQ ID NO: 2479701 - RNA, 18 nt, Human
acagugugaaguuagaau

SEQ ID NO: 2479702 - RNA, 16 nt, Human
acagugugaaguuaga

SEQ ID NO: 2479703 - RNA, 15 nt, Human
acagugugaaguuag

SEQ ID NO: 2479704 - RNA, 22 nt, Human
acagugugaaguuagaauuccu

SEQ ID NO: 2479705 - RNA, 15 nt, Human
acaguccucccaucu

SEQ ID NO: 2479706 - RNA, 14 nt, Human
acaguccucccauc

SEQ ID NO: 2479707 - RNA, 13 nt, Human
acaguccucccau

SEQ ID NO: 2479708 - RNA, 15 nt, Human
acagucccugccaau

SEQ ID NO: 2479709 - RNA, 20 nt, Human
acaguccuuaccagcagagc

SEQ ID NO: 2479710 - RNA, 18 nt, Human
acaguccuuaccagcaga

SEQ ID NO: 2479711 - RNA, 17 nt, Human
acaguccucccaucuca

SEQ ID NO: 2479712 - RNA, 19 nt, Human
acaguccuaacugguauag

SEQ ID NO: 2479713 - RNA, 12 nt, Human
acaguccuggga

SEQ ID NO: 2479714 - RNA, 18 nt, Human
acaguccuaacugguaua

SEQ ID NO: 2479715 - RNA, 18 nt, Human
acagucaaaacagagaug

SEQ ID NO: 2479716 - RNA, 19 nt, Human
acaguauuacuucugcuac

SEQ ID NO: 2479717 - RNA, 17 nt, Human
acaguauuacuucugcu

SEQ ID NO: 2479718 - RNA, 16 nt, Human
acaguauuacuucugc

SEQ ID NO: 2479719 - RNA, 15 nt, Human
acaguauuacuucug

SEQ ID NO: 2479720 - RNA, 17 nt, Human
acaguauuuugguucuu

SEQ ID NO: 2479721 - RNA, 13 nt, Human
acagucccugcca

SEQ ID NO: 2479722 - RNA, 12 nt, Human
acagucccugcc

SEQ ID NO: 2479723 - RNA, 16 nt, Human
acagucaaaacagaga

SEQ ID NO: 2479724 - RNA, 17 nt, Human
acagucaaaacagagau

SEQ ID NO: 2479725 - RNA, 17 nt, Human
acagucaaggaguggcu

SEQ ID NO: 2479726 - RNA, 23 nt, Human
acaguaaauaaauuguuugacca

SEQ ID NO: 2479727 - RNA, 15 nt, Human
acaguaaauaaauug

SEQ ID NO: 2479728 - RNA, 14 nt, Human
acaguaaauaaauu

SEQ ID NO: 2479729 - RNA, 13 nt, Human
acaguaaauaaau

SEQ ID NO: 2479730 - RNA, 19 nt, Human
acaguaacgcaggggaaac

SEQ ID NO: 2479731 - RNA, 17 nt, Human
acaguaacgcaggggaa

SEQ ID NO: 2479732 - RNA, 18 nt, Human
acaguaaauaaauuguuu

SEQ ID NO: 2479733 - RNA, 17 nt, Human
acaguaaauaaauuguu

SEQ ID NO: 2479734 - RNA, 12 nt, Human
acaguaaauaaa

SEQ ID NO: 2479735 - RNA, 12 nt, Human
acaguaaacauu

SEQ ID NO: 2479736 - RNA, 24 nt, Human
acagggcaugccccggccaccucu

SEQ ID NO: 2479737 - RNA, 23 nt, Human
acagggcaugccccggccaccuc

SEQ ID NO: 2479738 - RNA, 22 nt, Human
acagggcaugccccggccaccu

SEQ ID NO: 2479739 - RNA, 21 nt, Human
acagggcaucuccaggaaggc

SEQ ID NO: 2479740 - RNA, 21 nt, Human
acaguauggcagcuuuccuca

SEQ ID NO: 2479741 - RNA, 23 nt, Human
acaguaugagucaaugugcagug

SEQ ID NO: 2479742 - RNA, 21 nt, Human
acaguaugagucaaugugcag

SEQ ID NO: 2479743 - RNA, 17 nt, Human
acaguaugucccauagg

SEQ ID NO: 2479744 - RNA, 19 nt, Human
acaguaugagucaaugugc

SEQ ID NO: 2479745 - RNA, 23 nt, Human
acaguaucacugucuuuccuaga

SEQ ID NO: 2479746 - RNA, 10 nt, Human
acaguaacuu

SEQ ID NO: 2479747 - RNA, 21 nt, Human
acaguaucacugucuuuccua

SEQ ID NO: 2479748 - RNA, 17 nt, Human
acaggcugggcuucagu

SEQ ID NO: 2479749 - RNA, 14 nt, Human
acaggcugggcuuc

SEQ ID NO: 2479750 - RNA, 21 nt, Human
acaggcugggcuucaguggca

SEQ ID NO: 2479751 - RNA, 22 nt, Human
acagggcacaccgggcacucag

SEQ ID NO: 2479752 - RNA, 16 nt, Human
acagggcagagccggg

SEQ ID NO: 2479753 - RNA, 22 nt, Human
acagguuuuccugaagaauuga

SEQ ID NO: 2479754 - RNA, 17 nt, Human
acagggcaucuccagga

SEQ ID NO: 2479755 - RNA, 21 nt, Human
acagggcagcugggcccaacc

SEQ ID NO: 2479756 - RNA, 16 nt, Human
acagggcaucuccagg

SEQ ID NO: 2479757 - RNA, 18 nt, Human
acagggcagcugggccca

SEQ ID NO: 2479758 - RNA, 17 nt, Human
acagggcagcugggccc

SEQ ID NO: 2479759 - RNA, 16 nt, Human
acagggcagcugggcc

SEQ ID NO: 2479760 - RNA, 21 nt, Human
uauuaaacagauuuuuacaaa

SEQ ID NO: 2479761 - RNA, 20 nt, Human
uauuaaacagauuuuuacaa

SEQ ID NO: 2479762 - RNA, 12 nt, Human
uauuaaaacuca

SEQ ID NO: 2479763 - RNA, 23 nt, Human
uauuaaaaaucucaaauuucuaa

SEQ ID NO: 2479764 - RNA, 22 nt, Human
uauuaaaaauauggaacuucua

SEQ ID NO: 2479765 - RNA, 20 nt, Human
uauuaaaaauauggaacuuc

SEQ ID NO: 2479766 - RNA, 23 nt, Human
uauuaaacagauuuuuacaaaug

SEQ ID NO: 2479767 - RNA, 21 nt, Human
uauuaaacguaugcaugugaa

SEQ ID NO: 2479768 - RNA, 20 nt, Human
uauuaaacguaugcauguga

SEQ ID NO: 2479769 - RNA, 22 nt, Human
uauuaaacguaugcaugugaag

SEQ ID NO: 2479770 - RNA, 12 nt, Human
uauuaaagacag

SEQ ID NO: 2479771 - RNA, 18 nt, Human
uauuaaauacaaaacuuc

SEQ ID NO: 2479772 - RNA, 12 nt, Human
uauuaaauacag

SEQ ID NO: 2479773 - RNA, 19 nt, Human
uauuaaauacaaaacuucc

SEQ ID NO: 2479774 - RNA, 16 nt, Human
uauuaaauacaaaacu

SEQ ID NO: 2479775 - RNA, 12 nt, Human
uauuacaucuuu

SEQ ID NO: 2479776 - RNA, 16 nt, Human
uauuacauggcagugu

SEQ ID NO: 2479777 - RNA, 17 nt, Human
uauuacaucuuucacau

SEQ ID NO: 2479778 - RNA, 16 nt, Human
uauuaaaaaucucaaa

SEQ ID NO: 2479779 - RNA, 18 nt, Human
uauuaaaaaucucaaauu

SEQ ID NO: 2479780 - RNA, 20 nt, Human
uauuaaaaaucucaaauuuc

SEQ ID NO: 2479781 - RNA, 22 nt, Human
uauuaaaaaucucaaauuucua

SEQ ID NO: 2479782 - RNA, 19 nt, Human
uauguuuuaagaggcaggg

SEQ ID NO: 2479783 - RNA, 17 nt, Human
uauguuuuaagaggcag

SEQ ID NO: 2479784 - RNA, 23 nt, Human
uauguguguguguuguguguggg

SEQ ID NO: 2479785 - RNA, 14 nt, Human
uauguuuuagcaug

SEQ ID NO: 2479786 - RNA, 16 nt, Human
uauguuuuagcaugug

SEQ ID NO: 2479787 - RNA, 22 nt, Human
uauguuuguauaaugaaugaga

SEQ ID NO: 2479788 - RNA, 22 nt, Human
uauuaaaaauauaaaacugcgu

SEQ ID NO: 2479789 - RNA, 18 nt, Human
uauguuuuagcauguguu

SEQ ID NO: 2479790 - RNA, 14 nt, Human
uauguguguguguu

SEQ ID NO: 2479791 - RNA, 22 nt, Human
uauguguguguguugugugugg

SEQ ID NO: 2479792 - RNA, 11 nt, Human
uaugugugugu

SEQ ID NO: 2479793 - RNA, 12 nt, Human
uaugugugugua

SEQ ID NO: 2479794 - RNA, 13 nt, Human
uauguguguguau

SEQ ID NO: 2479795 - RNA, 19 nt, Human
uauguguguguaugcuacu

SEQ ID NO: 2479796 - RNA, 19 nt, Human
uauguguguguauguuugc

SEQ ID NO: 2479797 - RNA, 23 nt, Human
acagcuggguggcacugccaugc

SEQ ID NO: 2479798 - RNA, 20 nt, Human
acagcuggguggcacugcca

SEQ ID NO: 2479799 - RNA, 19 nt, Human
acagcuggguggcacugcc

SEQ ID NO: 2479800 - RNA, 18 nt, Human
acagcuggguggcacugc

SEQ ID NO: 2479801 - RNA, 12 nt, Human
uauguguguaua

SEQ ID NO: 2479802 - RNA, 19 nt, Human
uauguguguauauguaugu

SEQ ID NO: 2479803 - RNA, 12 nt, Human
uauguguguaug

SEQ ID NO: 2479804 - RNA, 21 nt, Human
uauguguguaugggugugugu

SEQ ID NO: 2479805 - RNA, 16 nt, Human
acagcuggguggcacu

SEQ ID NO: 2479806 - RNA, 13 nt, Human
acagcugggcugu

SEQ ID NO: 2479807 - RNA, 21 nt, Human
acagcugcuuucuguugucau

SEQ ID NO: 2479808 - RNA, 15 nt, Human
acagcugcuuucugu

SEQ ID NO: 2479809 - RNA, 13 nt, Human
acagcugcuuucu

SEQ ID NO: 2479810 - RNA, 11 nt, Human
acagcugcugg

SEQ ID NO: 2479811 - RNA, 13 nt, Human
acagcuggccucc

SEQ ID NO: 2479812 - RNA, 23 nt, Human
acagcugcuuucuguugucauug

SEQ ID NO: 2479813 - RNA, 14 nt, Human
acagcucccucugc

SEQ ID NO: 2479814 - RNA, 17 nt, Human
acagcucccucugccug

SEQ ID NO: 2479815 - RNA, 18 nt, Human
acagcucccaccccaccc

SEQ ID NO: 2479816 - RNA, 22 nt, Human
acagcucccaccccacccccuu

SEQ ID NO: 2479817 - RNA, 14 nt, Human
acagcuccucccac

SEQ ID NO: 2479818 - RNA, 12 nt, Human
acagcuccuccc

SEQ ID NO: 2479819 - RNA, 22 nt, Human
acagcugcuccuagagggaggg

SEQ ID NO: 2479820 - RNA, 23 nt, Human
acagcugcuccuagagggagggg

SEQ ID NO: 2479821 - RNA, 21 nt, Human
acagcugcuccuagagggagg

SEQ ID NO: 2479822 - RNA, 16 nt, Human
acagcucccucugccu

SEQ ID NO: 2479823 - RNA, 15 nt, Human
uauuagaugugauuu

SEQ ID NO: 2479824 - RNA, 14 nt, Human
uauuagaugugauu

SEQ ID NO: 2479825 - RNA, 13 nt, Human
uauuagaugugau

SEQ ID NO: 2479826 - RNA, 15 nt, Human
uauuagagugucuuu

SEQ ID NO: 2479827 - RNA, 18 nt, Human
uauuagagugucuuucca

SEQ ID NO: 2479828 - RNA, 16 nt, Human
uauuagagcauugaau

SEQ ID NO: 2479829 - RNA, 12 nt, Human
uauuagagaaga

SEQ ID NO: 2479830 - RNA, 19 nt, Human
uauuaccucugauaccuca

SEQ ID NO: 2479831 - RNA, 14 nt, Human
uauuaccucugaua

SEQ ID NO: 2479832 - RNA, 16 nt, Human
uauuaccacagacaua

SEQ ID NO: 2479833 - RNA, 21 nt, Human
uauuacccccuccuucagaca

SEQ ID NO: 2479834 - RNA, 15 nt, Human
uauuaccaugagaag

SEQ ID NO: 2479835 - RNA, 15 nt, Human
uauuagaauaccaca

SEQ ID NO: 2479836 - RNA, 22 nt, Human
uauuacccccuccuucagacac

SEQ ID NO: 2479837 - RNA, 13 nt, Human
uauuaccucugau

SEQ ID NO: 2479838 - RNA, 11 nt, Human
uauuaccucug

SEQ ID NO: 2479839 - RNA, 15 nt, Human
uauuagauguucucu

SEQ ID NO: 2479840 - RNA, 14 nt, Human
uauuagauguucuc

SEQ ID NO: 2479841 - RNA, 20 nt, Human
uauuagaugugauuuaauag

SEQ ID NO: 2479842 - RNA, 16 nt, Human
uauuagaugugauuua

SEQ ID NO: 2479843 - RNA, 12 nt, Human
uauuagauguuc

SEQ ID NO: 2479844 - RNA, 21 nt, Human
uauuagauguucucuaucauu

SEQ ID NO: 2479845 - RNA, 17 nt, Human
uauuagauguucucuau

SEQ ID NO: 2479846 - RNA, 22 nt, Human
uauuagauguucucuaucauuu

SEQ ID NO: 2479847 - RNA, 23 nt, Human
uauuagaugugauuuaauagugu

SEQ ID NO: 2479848 - RNA, 23 nt, Human
uauuagccaggaucaugguguaa

SEQ ID NO: 2479849 - RNA, 16 nt, Human
uauuagccagucuuua

SEQ ID NO: 2479850 - RNA, 21 nt, Human
uauuagccagguaaugugaau

SEQ ID NO: 2479851 - RNA, 19 nt, Human
uauuagccaggaucauggu

SEQ ID NO: 2479852 - RNA, 18 nt, Human
uauuagccaggaucaugg

SEQ ID NO: 2479853 - RNA, 17 nt, Human
uauuagccaggaucaug

SEQ ID NO: 2479854 - RNA, 13 nt, Human
uauuagccaggau

SEQ ID NO: 2479855 - RNA, 15 nt, Human
uauuagccacaaaau

SEQ ID NO: 2479856 - RNA, 23 nt, Human
uauuagccacaaaauugggaaag

SEQ ID NO: 2479857 - RNA, 16 nt, Human
uauuagugaugucauc

SEQ ID NO: 2479858 - RNA, 16 nt, Human
uauuaguguaugcuuu

SEQ ID NO: 2479859 - RNA, 13 nt, Human
uauuaguuaauau

SEQ ID NO: 2479860 - RNA, 14 nt, Human
uauuauaaauuaug

SEQ ID NO: 2479861 - RNA, 14 nt, Human
uauuaguuuugauu

SEQ ID NO: 2479862 - RNA, 14 nt, Human
uauucauaauuauu

SEQ ID NO: 2479863 - RNA, 16 nt, Human
uauucauaguuuaauu

SEQ ID NO: 2479864 - RNA, 23 nt, Human
uauucauagcagcuuauucacaa

SEQ ID NO: 2479865 - RNA, 21 nt, Human
uauucauauuuucuuucaaaa

SEQ ID NO: 2479866 - RNA, 22 nt, Human
uauucaggaagcucagggccug

SEQ ID NO: 2479867 - RNA, 18 nt, Human
uauucaggaagcucaggg

SEQ ID NO: 2479868 - RNA, 16 nt, Human
uauucaggagaguaga

SEQ ID NO: 2479869 - RNA, 12 nt, Human
uauucaggacuu

SEQ ID NO: 2479870 - RNA, 20 nt, Human
uauuauaaauuauguuuaua

SEQ ID NO: 2479871 - RNA, 16 nt, Human
uauuauaaauuauguu

SEQ ID NO: 2479872 - RNA, 15 nt, Human
uauuauaaauuaugu

SEQ ID NO: 2479873 - RNA, 18 nt, Human
uauuauaaauuauguuua

SEQ ID NO: 2479874 - RNA, 16 nt, Human
uauucaaguuauugua

SEQ ID NO: 2479875 - RNA, 20 nt, Human
uauucaaguuauuguacagc

SEQ ID NO: 2479876 - RNA, 19 nt, Human
uauucaacucauaagacuu

SEQ ID NO: 2479877 - RNA, 22 nt, Human
uauucagacaagcaacagguuu

SEQ ID NO: 2479878 - RNA, 18 nt, Human
uauucagacaagcaacag

SEQ ID NO: 2479879 - RNA, 14 nt, Human
uauucagacaagca

SEQ ID NO: 2479880 - RNA, 18 nt, Human
uauuguauuuauuccaua

SEQ ID NO: 2479881 - RNA, 15 nt, Human
uauuguauuuauucc

SEQ ID NO: 2479882 - RNA, 20 nt, Human
uauuguauuuauucaauaaa

SEQ ID NO: 2479883 - RNA, 18 nt, Human
uauuguauuuauucaaua

SEQ ID NO: 2479884 - RNA, 17 nt, Human
uauuguauuuauucaau

SEQ ID NO: 2479885 - RNA, 16 nt, Human
uauuguauuuauucaa

SEQ ID NO: 2479886 - RNA, 15 nt, Human
uauuguauuuauuca

SEQ ID NO: 2479887 - RNA, 10 nt, Human
uauuguauuu

SEQ ID NO: 2479888 - RNA, 17 nt, Human
uauugucaaagugguga

SEQ ID NO: 2479889 - RNA, 13 nt, Human
uauugucaaagug

SEQ ID NO: 2479890 - RNA, 18 nt, Human
uauuguauuacuagaaga

SEQ ID NO: 2479891 - RNA, 22 nt, Human
uauuguauaagauuagaaugaa

SEQ ID NO: 2479892 - RNA, 21 nt, Human
uauuguauaaacuaucaguuu

SEQ ID NO: 2479893 - RNA, 16 nt, Human
uauuguauaaacuauc

SEQ ID NO: 2479894 - RNA, 17 nt, Human
uauuguagcauuucuug

SEQ ID NO: 2479895 - RNA, 16 nt, Human
uauuguagcauuucuu

SEQ ID NO: 2479896 - RNA, 15 nt, Human
uauuguagcauuucu

SEQ ID NO: 2479897 - RNA, 17 nt, Human
uauuguaccuuuuaaca

SEQ ID NO: 2479898 - RNA, 12 nt, Human
uauuggccugga

SEQ ID NO: 2479899 - RNA, 13 nt, Human
uauuguaccuuuu

SEQ ID NO: 2479900 - RNA, 20 nt, Human
uauuguacagcuguuuaaga

SEQ ID NO: 2479901 - RNA, 14 nt, Human
uauuguaccucucu

SEQ ID NO: 2479902 - RNA, 13 nt, Human
uauuguaccucuc

SEQ ID NO: 2479903 - RNA, 11 nt, Human
uauuguaccuc

SEQ ID NO: 2479904 - RNA, 17 nt, Human
uauuguacaguuuuuau

SEQ ID NO: 2479905 - RNA, 15 nt, Human
uauuguacaguuuuu

SEQ ID NO: 2479906 - RNA, 14 nt, Human
uauuguacaguuuu

SEQ ID NO: 2479907 - RNA, 13 nt, Human
uauuguacaguuu

SEQ ID NO: 2479908 - RNA, 12 nt, Human
uauuguacaguu

SEQ ID NO: 2479909 - RNA, 13 nt, Human
uauuguacacuuu

SEQ ID NO: 2479910 - RNA, 12 nt, Human
uauuguacacuu

SEQ ID NO: 2479911 - RNA, 12 nt, Human
uauuguacagaa

SEQ ID NO: 2479912 - RNA, 11 nt, Human
uauuguacaga

SEQ ID NO: 2479913 - RNA, 20 nt, Human
uauuguacacuuuuuugggg

SEQ ID NO: 2479914 - RNA, 15 nt, Human
uauuguacacuuuuu

SEQ ID NO: 2479915 - RNA, 11 nt, Human
uauuguacagu

SEQ ID NO: 2479916 - RNA, 21 nt, Human
uauugugauuugacuguuuuu

SEQ ID NO: 2479917 - RNA, 20 nt, Human
uauugugauuugacuguuuu

SEQ ID NO: 2479918 - RNA, 19 nt, Human
uauugugauuugacuguuu

SEQ ID NO: 2479919 - RNA, 18 nt, Human
uauugugauuugacuguu

SEQ ID NO: 2479920 - RNA, 15 nt, Human
uauuuaacagcugaa

SEQ ID NO: 2479921 - RNA, 21 nt, Human
uauuuaacagcugaauuaucu

SEQ ID NO: 2479922 - RNA, 23 nt, Human
uauuuaacagcugaauuaucuau

SEQ ID NO: 2479923 - RNA, 13 nt, Human
uauuuaacuugag

SEQ ID NO: 2479924 - RNA, 21 nt, Human
uauuuaacugccuuguguaca

SEQ ID NO: 2479925 - RNA, 14 nt, Human
uauuuaacuugagg

SEQ ID NO: 2479926 - RNA, 20 nt, Human
uauuuaacuugagcuuuaaa

SEQ ID NO: 2479927 - RNA, 17 nt, Human
uauugucuagugaaacu

SEQ ID NO: 2479928 - RNA, 17 nt, Human
uauuguccauuguccaa

SEQ ID NO: 2479929 - RNA, 17 nt, Human
uauugucauuaaaggua

SEQ ID NO: 2479930 - RNA, 15 nt, Human
uauuguccauugucc

SEQ ID NO: 2479931 - RNA, 22 nt, Human
uauugucaguaucuguaucucu

SEQ ID NO: 2479932 - RNA, 16 nt, Human
uauugucagauauuuu

SEQ ID NO: 2479933 - RNA, 17 nt, Human
uauugugauuugacugu

SEQ ID NO: 2479934 - RNA, 22 nt, Human
uauugugauuucccguggcccc

SEQ ID NO: 2479935 - RNA, 21 nt, Human
uauugugaucuaucaauaguc

SEQ ID NO: 2479936 - RNA, 13 nt, Human
uauugugaucuau

SEQ ID NO: 2479937 - RNA, 15 nt, Human
uauugugaaguacau

SEQ ID NO: 2479938 - RNA, 17 nt, Human
uauugugaaguacauau

SEQ ID NO: 2479939 - RNA, 19 nt, Human
uauugugaaguacauauua

SEQ ID NO: 2479940 - RNA, 15 nt, Human
uauuuaaugaaagac

SEQ ID NO: 2479941 - RNA, 21 nt, Human
uauuuaaugaaagacuguaca

SEQ ID NO: 2479942 - RNA, 20 nt, Human
uauuuaagauaauuauaaua

SEQ ID NO: 2479943 - RNA, 17 nt, Human
uauuuaagauaauuaua

SEQ ID NO: 2479944 - RNA, 21 nt, Human
uauuuaacuugaggguaauaa

SEQ ID NO: 2479945 - RNA, 20 nt, Human
uauuuaagauaguuuugcca

SEQ ID NO: 2479946 - RNA, 14 nt, Human
uauuuaauaacauu

SEQ ID NO: 2479947 - RNA, 13 nt, Human
uauuuaauaacau

SEQ ID NO: 2479948 - RNA, 15 nt, Human
uauuuaauaacauua

SEQ ID NO: 2479949 - RNA, 17 nt, Human
uauuuaauaacaauugu

SEQ ID NO: 2479950 - RNA, 11 nt, Human
uauuuaauaac

SEQ ID NO: 2479951 - RNA, 10 nt, Human
uauuuaauaa

SEQ ID NO: 2479952 - RNA, 21 nt, Human
uauuuaagccucauauuuaaa

SEQ ID NO: 2479953 - RNA, 20 nt, Human
uauuuaagccucauauuuaa

SEQ ID NO: 2479954 - RNA, 18 nt, Human
uauuuaagccucauauuu

SEQ ID NO: 2479955 - RNA, 16 nt, Human
uauuuaagcuuauguc

SEQ ID NO: 2479956 - RNA, 20 nt, Human
uauuuagacaagagauggga

SEQ ID NO: 2479957 - RNA, 19 nt, Human
uauuuagacaagagauggg

SEQ ID NO: 2479958 - RNA, 15 nt, Human
uauuuagacaagaga

SEQ ID NO: 2479959 - RNA, 13 nt, Human
uauuuagacaaga

SEQ ID NO: 2479960 - RNA, 18 nt, Human
uauuuagauauaacacua

SEQ ID NO: 2479961 - RNA, 21 nt, Human
uauuuagacucaucuuacugu

SEQ ID NO: 2479962 - RNA, 20 nt, Human
uauuuagcaccagggaaggg

SEQ ID NO: 2479963 - RNA, 17 nt, Human
uauuuagauuguuaaaa

SEQ ID NO: 2479964 - RNA, 19 nt, Human
uauuuagauuguuaaaaua

SEQ ID NO: 2479965 - RNA, 18 nt, Human
uauuuacuucuuauacau

SEQ ID NO: 2479966 - RNA, 22 nt, Human
uauuuacugagcuucucuguga

SEQ ID NO: 2479967 - RNA, 21 nt, Human
uauuuacugagcuucucugug

SEQ ID NO: 2479968 - RNA, 23 nt, Human
uauuuacugagcuucucugugaa

SEQ ID NO: 2479969 - RNA, 15 nt, Human
uauuuacgcuuugau

SEQ ID NO: 2479970 - RNA, 19 nt, Human
uauuuacgcuuugauucau

SEQ ID NO: 2479971 - RNA, 19 nt, Human
uauuuacugagcuucucug

SEQ ID NO: 2479972 - RNA, 16 nt, Human
uauuuacugagcuucu

SEQ ID NO: 2479973 - RNA, 22 nt, Human
uauuuacgcuuugauucauagu

SEQ ID NO: 2479974 - RNA, 14 nt, Human
uauuuacugagcuu

SEQ ID NO: 2479975 - RNA, 14 nt, Human
uauuuacgcuuuga

SEQ ID NO: 2479976 - RNA, 21 nt, Human
uauuuacaugaauugcauuuu

SEQ ID NO: 2479977 - RNA, 17 nt, Human
uauuuacauaugaaauu

SEQ ID NO: 2479978 - RNA, 21 nt, Human
uauuuacauaugaaauuuaau

SEQ ID NO: 2479979 - RNA, 22 nt, Human
uauuuacagugaaaauguaagc

SEQ ID NO: 2479980 - RNA, 20 nt, Human
uauuuacagugaaaauguaa

SEQ ID NO: 2479981 - RNA, 14 nt, Human
uauuuacauaugaa

SEQ ID NO: 2479982 - RNA, 16 nt, Human
uauuuacauaugaaau

SEQ ID NO: 2479983 - RNA, 23 nt, Human
uauuuaauuuuuuugagacagag

SEQ ID NO: 2479984 - RNA, 14 nt, Human
uauuuaauucaugu

SEQ ID NO: 2479985 - RNA, 21 nt, Human
uauuuaauuagugcuaagugu

SEQ ID NO: 2479986 - RNA, 19 nt, Human
uauuuaauuagugcuaagu

SEQ ID NO: 2479987 - RNA, 18 nt, Human
uauuuaauuagugcuaag

SEQ ID NO: 2479988 - RNA, 17 nt, Human
uauuuaauuagugcuaa

SEQ ID NO: 2479989 - RNA, 16 nt, Human
uauuuaauuagugcua

SEQ ID NO: 2479990 - RNA, 19 nt, Human
uauuuaaugauaaguaaau

SEQ ID NO: 2479991 - RNA, 21 nt, Human
uauuuaaugccgauauacucu

SEQ ID NO: 2479992 - RNA, 15 nt, Human
uauuuaauguuaugu

SEQ ID NO: 2479993 - RNA, 16 nt, Human
uauuuauuuuaauaau

SEQ ID NO: 2479994 - RNA, 14 nt, Human
uauuuauuuuaaua

SEQ ID NO: 2479995 - RNA, 18 nt, Human
uauuuauuuuaauaaugu

SEQ ID NO: 2479996 - RNA, 14 nt, Human
uauuuauuuauuua

SEQ ID NO: 2479997 - RNA, 14 nt, Human
uauuucaaauugga

SEQ ID NO: 2479998 - RNA, 20 nt, Human
uauuucaaaauauacauuca

SEQ ID NO: 2479999 - RNA, 20 nt, Human
uauuuauuuuuuuuaaguau

SEQ ID NO: 2480000 - RNA, 17 nt, Human
uauuuauuuuccucccc

SEQ ID NO: 2480001 - RNA, 18 nt, Human
uauuuauuuuccucccca

SEQ ID NO: 2480002 - RNA, 20 nt, Human
uauuucacuuuagaugcuga

SEQ ID NO: 2480003 - RNA, 14 nt, Human
uauuucaagacauu

SEQ ID NO: 2480004 - RNA, 18 nt, Human
uauuucaaauuggagcuu

SEQ ID NO: 2480005 - RNA, 22 nt, Human
uauuucaauuuccaagagcuga

SEQ ID NO: 2480006 - RNA, 14 nt, Human
uauuuauuuaguau

SEQ ID NO: 2480007 - RNA, 21 nt, Human
uauuuauuuaauaacaauugu

SEQ ID NO: 2480008 - RNA, 13 nt, Human
uauuuauuuacug

SEQ ID NO: 2480009 - RNA, 17 nt, Human
uauuuauuuacugagcu

SEQ ID NO: 2480010 - RNA, 13 nt, Human
uauuuauuuaugg

SEQ ID NO: 2480011 - RNA, 14 nt, Human
uauuuauuuaugga

SEQ ID NO: 2480012 - RNA, 14 nt, Human
uauuuauuuaaauu

SEQ ID NO: 2480013 - RNA, 18 nt, Human
uauuuauuuaaaugucua

SEQ ID NO: 2480014 - RNA, 16 nt, Human
uauuuauuuaaauguc

SEQ ID NO: 2480015 - RNA, 19 nt, Human
uauuuauuuaaaagauuca

SEQ ID NO: 2480016 - RNA, 11 nt, Human
uauuuauuuac

SEQ ID NO: 2480017 - RNA, 12 nt, Human
uauuuauuuaau

SEQ ID NO: 2480018 - RNA, 16 nt, Human
uauuuauuuaagcuua

SEQ ID NO: 2480019 - RNA, 13 nt, Human
uauuuauuuaaau

SEQ ID NO: 2480020 - RNA, 17 nt, Human
uauuuagggaacugcuu

SEQ ID NO: 2480021 - RNA, 18 nt, Human
uauuuagggaacugcuug

SEQ ID NO: 2480022 - RNA, 17 nt, Human
uauuuaguuauaguuuc

SEQ ID NO: 2480023 - RNA, 15 nt, Human
uauuuaguuauaguu

SEQ ID NO: 2480024 - RNA, 17 nt, Human
uauuuaggcagauugaa

SEQ ID NO: 2480025 - RNA, 19 nt, Human
uauuuaguguucauaaaua

SEQ ID NO: 2480026 - RNA, 11 nt, Human
uauuuagcaug

SEQ ID NO: 2480027 - RNA, 22 nt, Human
uauuuagauuguuaaaauaacu

SEQ ID NO: 2480028 - RNA, 21 nt, Human
uauuuagcaugacaagcccca

SEQ ID NO: 2480029 - RNA, 13 nt, Human
uauugacacagaa

SEQ ID NO: 2480030 - RNA, 16 nt, Human
uauugacacagaaaau

SEQ ID NO: 2480031 - RNA, 18 nt, Human
uauugacacagaaaaugu

SEQ ID NO: 2480032 - RNA, 20 nt, Human
uauugacacagaaaauguug

SEQ ID NO: 2480033 - RNA, 23 nt, Human
uauugacacagaaaauguugaga

SEQ ID NO: 2480034 - RNA, 13 nt, Human
uauugacaauaau

SEQ ID NO: 2480035 - RNA, 17 nt, Human
uauugacaauaauuuca

SEQ ID NO: 2480036 - RNA, 18 nt, Human
uauugacaauaauuucag

SEQ ID NO: 2480037 - RNA, 14 nt, Human
uauugacaaacucu

SEQ ID NO: 2480038 - RNA, 15 nt, Human
uauugacaaacucuc

SEQ ID NO: 2480039 - RNA, 13 nt, Human
uauugaagcauuu

SEQ ID NO: 2480040 - RNA, 15 nt, Human
uauugaagcauuuua

SEQ ID NO: 2480041 - RNA, 16 nt, Human
uauugaagcauuuuau

SEQ ID NO: 2480042 - RNA, 17 nt, Human
uauugaagcauuuuaua

SEQ ID NO: 2480043 - RNA, 19 nt, Human
uauugaagcauuuuauaaa

SEQ ID NO: 2480044 - RNA, 21 nt, Human
uauugaauauaauauauuugu

SEQ ID NO: 2480045 - RNA, 20 nt, Human
uauugaauauaauauauuug

SEQ ID NO: 2480046 - RNA, 22 nt, Human
uauugaauauaauauauuugug

SEQ ID NO: 2480047 - RNA, 18 nt, Human
uauugaaucauguaguau

SEQ ID NO: 2480048 - RNA, 11 nt, Human
uauugaaucua

SEQ ID NO: 2480049 - RNA, 12 nt, Human
uauugaauguuu

SEQ ID NO: 2480050 - RNA, 22 nt, Human
uauugaaucauguaguaucaaa

SEQ ID NO: 2480051 - RNA, 17 nt, Human
uauugaaucuauuuaag

SEQ ID NO: 2480052 - RNA, 16 nt, Human
uauugaaucuauuuaa

SEQ ID NO: 2480053 - RNA, 14 nt, Human
uauugaacuuuuuu

SEQ ID NO: 2480054 - RNA, 13 nt, Human
uauugaacuuuuu

SEQ ID NO: 2480055 - RNA, 12 nt, Human
uauugaagcauu

SEQ ID NO: 2480056 - RNA, 20 nt, Human
uauugaaauuguacauauuu

SEQ ID NO: 2480057 - RNA, 18 nt, Human
uauugaacuuggaaagaa

SEQ ID NO: 2480058 - RNA, 22 nt, Human
uauucuucucuuccuuuuauca

SEQ ID NO: 2480059 - RNA, 24 nt, Human
uauucuuugauguuaacacauuuu

SEQ ID NO: 2480060 - RNA, 23 nt, Human
uauucuuugauguuaacacauuu

SEQ ID NO: 2480061 - RNA, 22 nt, Human
uauucuuugauguuaacacauu

SEQ ID NO: 2480062 - RNA, 21 nt, Human
uauucuuugauguuaacacau

SEQ ID NO: 2480063 - RNA, 20 nt, Human
uauucuuugauguuaacaca

SEQ ID NO: 2480064 - RNA, 18 nt, Human
uauucuuugauguuaaca

SEQ ID NO: 2480065 - RNA, 10 nt, Human
uauucuuuga

SEQ ID NO: 2480066 - RNA, 14 nt, Human
uauuggcugggagu

SEQ ID NO: 2480067 - RNA, 23 nt, Human
uauuggcuaaauugaaaccugga

SEQ ID NO: 2480068 - RNA, 14 nt, Human
uauuggccuggagg

SEQ ID NO: 2480069 - RNA, 14 nt, Human
uauugagucaaaug

SEQ ID NO: 2480070 - RNA, 15 nt, Human
uauugagaaagagca

SEQ ID NO: 2480071 - RNA, 18 nt, Human
uauugagaauuuuaaauu

SEQ ID NO: 2480072 - RNA, 19 nt, Human
uauugacuucaaugauagu

SEQ ID NO: 2480073 - RNA, 15 nt, Human
uauugacuuguauau

SEQ ID NO: 2480074 - RNA, 14 nt, Human
uauugacuuguaua

SEQ ID NO: 2480075 - RNA, 17 nt, Human
uauugacuuguauauuu

SEQ ID NO: 2480076 - RNA, 14 nt, Human
uauugacuuugucu

SEQ ID NO: 2480077 - RNA, 17 nt, Human
uauuggggucugacccc

SEQ ID NO: 2480078 - RNA, 16 nt, Human
uauuggggucugaccc

SEQ ID NO: 2480079 - RNA, 23 nt, Human
uauuggguagauauuuuuucuga

SEQ ID NO: 2480080 - RNA, 14 nt, Human
uauuggguucauua

SEQ ID NO: 2480081 - RNA, 16 nt, Human
uauuggguucauuauu

SEQ ID NO: 2480082 - RNA, 13 nt, Human
uauugguccagcu

SEQ ID NO: 2480083 - RNA, 22 nt, Human
uauugguccagcuugcucuuca

SEQ ID NO: 2480084 - RNA, 21 nt, Human
uauugguaacauccuuucuau

SEQ ID NO: 2480085 - RNA, 18 nt, Human
uauugguaacauccuuuc

SEQ ID NO: 2480086 - RNA, 22 nt, Human
uauugguaacauccuuucuauu

SEQ ID NO: 2480087 - RNA, 18 nt, Human
uauuggguucauuauugg

SEQ ID NO: 2480088 - RNA, 20 nt, Human
uauuggguucauuauuggaa

SEQ ID NO: 2480089 - RNA, 15 nt, Human
uauugguaacauccu

SEQ ID NO: 2480090 - RNA, 19 nt, Human
uauuguaacagacauuguu

SEQ ID NO: 2480091 - RNA, 18 nt, Human
uauuguaacagacauugu

SEQ ID NO: 2480092 - RNA, 17 nt, Human
uauuguaacagacauug

SEQ ID NO: 2480093 - RNA, 16 nt, Human
uauuguaacagacauu

SEQ ID NO: 2480094 - RNA, 15 nt, Human
uauuguaacagacau

SEQ ID NO: 2480095 - RNA, 15 nt, Human
uauuguaaauauguu

SEQ ID NO: 2480096 - RNA, 11 nt, Human
uauuguaagaa

SEQ ID NO: 2480097 - RNA, 17 nt, Human
uauuguaagaaauacug

SEQ ID NO: 2480098 - RNA, 19 nt, Human
uauuguaagaaauacugua

SEQ ID NO: 2480099 - RNA, 16 nt, Human
uauuguaaacaugugu

SEQ ID NO: 2480100 - RNA, 18 nt, Human
uauuguaaacauguguuu

SEQ ID NO: 2480101 - RNA, 17 nt, Human
uauuguaaacauguguu

SEQ ID NO: 2480102 - RNA, 14 nt, Human
uauuguaaauaugu

SEQ ID NO: 2480103 - RNA, 15 nt, Human
uauuguaaacaugug

SEQ ID NO: 2480104 - RNA, 16 nt, Human
acaguucaagaaagcu

SEQ ID NO: 2480105 - RNA, 21 nt, Human
acaguucaguggcagggcuca

SEQ ID NO: 2480106 - RNA, 20 nt, Human
acaguucaguggcagggcuc

SEQ ID NO: 2480107 - RNA, 13 nt, Human
acaguucaguggc

SEQ ID NO: 2480108 - RNA, 21 nt, Human
acaguucaguuccucuuugca

SEQ ID NO: 2480109 - RNA, 16 nt, Human
acaguucaguuccucu

SEQ ID NO: 2480110 - RNA, 12 nt, Human
acaguucaguuc

SEQ ID NO: 2480111 - RNA, 23 nt, Human
acaguucaguggcagggcucagg

SEQ ID NO: 2480112 - RNA, 15 nt, Human
acaguucauauguac

SEQ ID NO: 2480113 - RNA, 20 nt, Human
acaguucauguuugcuucau

SEQ ID NO: 2480114 - RNA, 12 nt, Human
acaguucaagaa

SEQ ID NO: 2480115 - RNA, 20 nt, Human
acaguucaagaaagcuucaa

SEQ ID NO: 2480116 - RNA, 20 nt, Human
acaguucaauucucauuugu

SEQ ID NO: 2480117 - RNA, 13 nt, Human
acaguuacucaga

SEQ ID NO: 2480118 - RNA, 20 nt, Human
acaguuacucagaauucucu

SEQ ID NO: 2480119 - RNA, 23 nt, Human
acaguuagcaaacuuuguauguc

SEQ ID NO: 2480120 - RNA, 22 nt, Human
acaguuaggguugaguuacuuc

SEQ ID NO: 2480121 - RNA, 19 nt, Human
acaguucggugagcuacaa

SEQ ID NO: 2480122 - RNA, 22 nt, Human
acaguucggugagcuacaaaug

SEQ ID NO: 2480123 - RNA, 23 nt, Human
acaguucggugagcuacaaaugc

SEQ ID NO: 2480124 - RNA, 16 nt, Human
acaguucucuccuucu

SEQ ID NO: 2480125 - RNA, 12 nt, Human
acaguuccucgc

SEQ ID NO: 2480126 - RNA, 14 nt, Human
acaguuccucgccc

SEQ ID NO: 2480127 - RNA, 15 nt, Human
acaguuccucgcccu

SEQ ID NO: 2480128 - RNA, 16 nt, Human
acaguuccucgcccug

SEQ ID NO: 2480129 - RNA, 12 nt, Human
uauucucugagc

SEQ ID NO: 2480130 - RNA, 19 nt, Human
acaguucuuugggccagac

SEQ ID NO: 2480131 - RNA, 18 nt, Human
uauucucuccuguaccuc

SEQ ID NO: 2480132 - RNA, 18 nt, Human
uauucucugagcugugca

SEQ ID NO: 2480133 - RNA, 19 nt, Human
uauucucugagcugugcag

SEQ ID NO: 2480134 - RNA, 20 nt, Human
uauucucuccuguaccucuu

SEQ ID NO: 2480135 - RNA, 24 nt, Human
uauucucuccuguaccucuugagc

SEQ ID NO: 2480136 - RNA, 20 nt, Human
acaguucuucgggaagagag

SEQ ID NO: 2480137 - RNA, 19 nt, Human
acaguucuucgggaagaga

SEQ ID NO: 2480138 - RNA, 15 nt, Human
acaguucuucgggaa

SEQ ID NO: 2480139 - RNA, 23 nt, Human
acaguucuugugugguuuggccc

SEQ ID NO: 2480140 - RNA, 17 nt, Human
acaguucuugugugguu

SEQ ID NO: 2480141 - RNA, 24 nt, Human
acaguucuucgggaagagaggagu

SEQ ID NO: 2480142 - RNA, 21 nt, Human
acaguucuucgggaagagagg

SEQ ID NO: 2480143 - RNA, 17 nt, Human
acaguucuuugggccag

SEQ ID NO: 2480144 - RNA, 18 nt, Human
acaguucuuugggccaga

SEQ ID NO: 2480145 - RNA, 17 nt, Human
acaguucucuccuucuu

SEQ ID NO: 2480146 - RNA, 15 nt, Human
acaguucugaagaau

SEQ ID NO: 2480147 - RNA, 13 nt, Human
acaguucugaaga

SEQ ID NO: 2480148 - RNA, 13 nt, Human
acaguuccuucag

SEQ ID NO: 2480149 - RNA, 18 nt, Human
acaguuccucgcccuggg

SEQ ID NO: 2480150 - RNA, 19 nt, Human
acaguuccucgcccugggu

SEQ ID NO: 2480151 - RNA, 22 nt, Human
uauucuguagauucuguggaac

SEQ ID NO: 2480152 - RNA, 19 nt, Human
uauucuguagauucugugg

SEQ ID NO: 2480153 - RNA, 21 nt, Human
uauucucuuaauuuuucuuaa

SEQ ID NO: 2480154 - RNA, 22 nt, Human
uauucugauuacacaaaacaaa

SEQ ID NO: 2480155 - RNA, 12 nt, Human
uauucuggaguu

SEQ ID NO: 2480156 - RNA, 14 nt, Human
uauucugauuccac

SEQ ID NO: 2480157 - RNA, 13 nt, Human
uauucuucucuuc

SEQ ID NO: 2480158 - RNA, 14 nt, Human
uauucuucauaaca

SEQ ID NO: 2480159 - RNA, 15 nt, Human
uauucuuauuuaaug

SEQ ID NO: 2480160 - RNA, 16 nt, Human
uauucuguuggccagu

SEQ ID NO: 2480161 - RNA, 22 nt, Human
uauucuuaagggaacuuccaca

SEQ ID NO: 2480162 - RNA, 19 nt, Human
uaucuagauacuguaucau

SEQ ID NO: 2480163 - RNA, 20 nt, Human
uaucuagcaaucacaacacu

SEQ ID NO: 2480164 - RNA, 16 nt, Human
uaucucccccagcccc

SEQ ID NO: 2480165 - RNA, 18 nt, Human
uaucucccccagccccau

SEQ ID NO: 2480166 - RNA, 17 nt, Human
uaucucccccagcccca

SEQ ID NO: 2480167 - RNA, 20 nt, Human
uaucuagugcagcugauuuu

SEQ ID NO: 2480168 - RNA, 23 nt, Human
uaucuagugcagcugauuuuaac

SEQ ID NO: 2480169 - RNA, 14 nt, Human
uaucuagugcagcu

SEQ ID NO: 2480170 - RNA, 19 nt, Human
uaucuagugcagcugauuu

SEQ ID NO: 2480171 - RNA, 18 nt, Human
uauccauuaucaugugua

SEQ ID NO: 2480172 - RNA, 17 nt, Human
uauccauuaucaugugu

SEQ ID NO: 2480173 - RNA, 16 nt, Human
uauccauuaucaugug

SEQ ID NO: 2480174 - RNA, 15 nt, Human
uauccauuaucaugu

SEQ ID NO: 2480175 - RNA, 19 nt, Human
uauccauuaucauguguaa

SEQ ID NO: 2480176 - RNA, 14 nt, Human
uauccauucuuucu

SEQ ID NO: 2480177 - RNA, 15 nt, Human
uauccauuucucaug

SEQ ID NO: 2480178 - RNA, 16 nt, Human
uauccauucuuucuga

SEQ ID NO: 2480179 - RNA, 14 nt, Human
uaucuacucuccuc

SEQ ID NO: 2480180 - RNA, 20 nt, Human
uaucuacucuccucaucucu

SEQ ID NO: 2480181 - RNA, 20 nt, Human
uaucuacugauaaagaaaga

SEQ ID NO: 2480182 - RNA, 21 nt, Human
uaucuacucuccucaucucua

SEQ ID NO: 2480183 - RNA, 15 nt, Human
uaucuagauacugua

SEQ ID NO: 2480184 - RNA, 16 nt, Human
uaucuagauacuguau

SEQ ID NO: 2480185 - RNA, 14 nt, Human
uaucagaagaccac

SEQ ID NO: 2480186 - RNA, 23 nt, Human
uaucagaagaccacaaaaauuga

SEQ ID NO: 2480187 - RNA, 22 nt, Human
uauccauauugagucaaauggu

SEQ ID NO: 2480188 - RNA, 10 nt, Human
uaucagaauu

SEQ ID NO: 2480189 - RNA, 18 nt, Human
uauccauggggaagggau

SEQ ID NO: 2480190 - RNA, 21 nt, Human
uaucagaagaccacaaaaauu

SEQ ID NO: 2480191 - RNA, 17 nt, Human
uauccaugggggcaggg

SEQ ID NO: 2480192 - RNA, 18 nt, Human
uauccaugggggcagggc

SEQ ID NO: 2480193 - RNA, 19 nt, Human
uauccaugggggcagggca

SEQ ID NO: 2480194 - RNA, 20 nt, Human
uauccaugggggcagggcau

SEQ ID NO: 2480195 - RNA, 13 nt, Human
uauccauguacug

SEQ ID NO: 2480196 - RNA, 14 nt, Human
uauccauguacugu

SEQ ID NO: 2480197 - RNA, 15 nt, Human
uauccauguacugua

SEQ ID NO: 2480198 - RNA, 16 nt, Human
uauccauguacuguag

SEQ ID NO: 2480199 - RNA, 22 nt, Human
uauccauguacuguaguuuuuc

SEQ ID NO: 2480200 - RNA, 14 nt, Human
uauccauuaucaug

SEQ ID NO: 2480201 - RNA, 18 nt, Human
uauccauguacuguaguu

SEQ ID NO: 2480202 - RNA, 21 nt, Human
acagagugagacucugucuca

SEQ ID NO: 2480203 - RNA, 18 nt, Human
acagagcuacacagggga

SEQ ID NO: 2480204 - RNA, 21 nt, Human
acagagcgagagucugucuca

SEQ ID NO: 2480205 - RNA, 22 nt, Human
acagaguggacuguucccugag

SEQ ID NO: 2480206 - RNA, 19 nt, Human
acagagugauagccuuccg

SEQ ID NO: 2480207 - RNA, 18 nt, Human
acagaguggucuuucugg

SEQ ID NO: 2480208 - RNA, 19 nt, Human
acagaguggucuuucugga

SEQ ID NO: 2480209 - RNA, 21 nt, Human
acagaguggucuuucuggaga

SEQ ID NO: 2480210 - RNA, 24 nt, Human
acagaguggucuuucuggagaggu

SEQ ID NO: 2480211 - RNA, 16 nt, Human
acagagcuacacaggg

SEQ ID NO: 2480212 - RNA, 23 nt, Human
acagagccuucugaggacauucc

SEQ ID NO: 2480213 - RNA, 21 nt, Human
acagagccucgggacaucaaa

SEQ ID NO: 2480214 - RNA, 20 nt, Human
acagagcccacgcccccacu

SEQ ID NO: 2480215 - RNA, 14 nt, Human
acagagaggagaaa

SEQ ID NO: 2480216 - RNA, 16 nt, Human
acagagaggagaaaca

SEQ ID NO: 2480217 - RNA, 20 nt, Human
acagagaggagaaacacauc

SEQ ID NO: 2480218 - RNA, 18 nt, Human
acagagaggagaaacaca

SEQ ID NO: 2480219 - RNA, 21 nt, Human
acagagagggggccaccuccc

SEQ ID NO: 2480220 - RNA, 15 nt, Human
acagagacaccugca

SEQ ID NO: 2480221 - RNA, 16 nt, Human
acagagacaccugcac

SEQ ID NO: 2480222 - RNA, 17 nt, Human
acagagacaccugcacc

SEQ ID NO: 2480223 - RNA, 21 nt, Human
acagagacaccugcaccuccc

SEQ ID NO: 2480224 - RNA, 15 nt, Human
acagagacaggccca

SEQ ID NO: 2480225 - RNA, 21 nt, Human
acagagacaggcccaagagau

SEQ ID NO: 2480226 - RNA, 16 nt, Human
acagagacauuccucc

SEQ ID NO: 2480227 - RNA, 23 nt, Human
acagagacaggcccaagagauga

SEQ ID NO: 2480228 - RNA, 14 nt, Human
acagagaccuccug

SEQ ID NO: 2480229 - RNA, 19 nt, Human
acagagacauuccuccgag

SEQ ID NO: 2480230 - RNA, 17 nt, Human
acagagacauuccuccg

SEQ ID NO: 2480231 - RNA, 16 nt, Human
acagagaggacuguag

SEQ ID NO: 2480232 - RNA, 15 nt, Human
acagagaggacgugg

SEQ ID NO: 2480233 - RNA, 22 nt, Human
acagacuggaagcacagcuuca

SEQ ID NO: 2480234 - RNA, 18 nt, Human
uaucuccucgcaagcugg

SEQ ID NO: 2480235 - RNA, 14 nt, Human
acagacuucugaaa

SEQ ID NO: 2480236 - RNA, 17 nt, Human
acagacuucuccagacc

SEQ ID NO: 2480237 - RNA, 13 nt, Human
acagacuucugaa

SEQ ID NO: 2480238 - RNA, 15 nt, Human
acagacuucuccaga

SEQ ID NO: 2480239 - RNA, 16 nt, Human
acagacuucuccagac

SEQ ID NO: 2480240 - RNA, 14 nt, Human
uauauuuacaaaug

SEQ ID NO: 2480241 - RNA, 21 nt, Human
uauauugguaacauccuuucu

SEQ ID NO: 2480242 - RNA, 19 nt, Human
uauauugguaacauccuuu

SEQ ID NO: 2480243 - RNA, 18 nt, Human
uauauugguaacauccuu

SEQ ID NO: 2480244 - RNA, 17 nt, Human
uauauugguaacauccu

SEQ ID NO: 2480245 - RNA, 23 nt, Human
uauauugauaacagcacugacua

SEQ ID NO: 2480246 - RNA, 22 nt, Human
uauauugauaacagcacugacu

SEQ ID NO: 2480247 - RNA, 23 nt, Human
acagacuccugaggacagcuguc

SEQ ID NO: 2480248 - RNA, 12 nt, Human
uauauugauaac

SEQ ID NO: 2480249 - RNA, 15 nt, Human
uauauuuacaaaugg

SEQ ID NO: 2480250 - RNA, 21 nt, Human
uaucaaguauuauaccuuuuu

SEQ ID NO: 2480251 - RNA, 18 nt, Human
uaucaaguauuauaccuu

SEQ ID NO: 2480252 - RNA, 24 nt, Human
uauauuuacagugaaaauguaagc

SEQ ID NO: 2480253 - RNA, 14 nt, Human
uaucaagugucuuc

SEQ ID NO: 2480254 - RNA, 18 nt, Human
uaucacccagaagaaaau

SEQ ID NO: 2480255 - RNA, 17 nt, Human
uaucaccagcugccucu

SEQ ID NO: 2480256 - RNA, 15 nt, Human
uaucaccagcugccu

SEQ ID NO: 2480257 - RNA, 18 nt, Human
uaucaccagagagggacu

SEQ ID NO: 2480258 - RNA, 15 nt, Human
uaucaccacaguaag

SEQ ID NO: 2480259 - RNA, 18 nt, Human
uaucacauguuuucucug

SEQ ID NO: 2480260 - RNA, 13 nt, Human
uaucacauuauuu

SEQ ID NO: 2480261 - RNA, 18 nt, Human
uaucacugacacaaaaag

SEQ ID NO: 2480262 - RNA, 20 nt, Human
uaucaccuccccuccuugcc

SEQ ID NO: 2480263 - RNA, 20 nt, Human
uaucaauagucaagaaaaau

SEQ ID NO: 2480264 - RNA, 15 nt, Human
uaucaauagucaaga

SEQ ID NO: 2480265 - RNA, 13 nt, Human
uaucaauagucaa

SEQ ID NO: 2480266 - RNA, 15 nt, Human
uaucaaucaguauaa

SEQ ID NO: 2480267 - RNA, 18 nt, Human
uaucaaucaguauaauuc

SEQ ID NO: 2480268 - RNA, 17 nt, Human
uaucaauccuuguucag

SEQ ID NO: 2480269 - RNA, 17 nt, Human
uaucacauguauguuuu

SEQ ID NO: 2480270 - RNA, 16 nt, Human
uaucacauguauguuu

SEQ ID NO: 2480271 - RNA, 12 nt, Human
uaucacauguau

SEQ ID NO: 2480272 - RNA, 20 nt, Human
uaucacagucuaauuuuuau

SEQ ID NO: 2480273 - RNA, 21 nt, Human
uaucacauguauguuuuggua

SEQ ID NO: 2480274 - RNA, 18 nt, Human
uaucacauguauguuuug

SEQ ID NO: 2480275 - RNA, 12 nt, Human
uaucacauguuu

SEQ ID NO: 2480276 - RNA, 13 nt, Human
uaucacacuucug

SEQ ID NO: 2480277 - RNA, 16 nt, Human
uaucacagucuaauuu

SEQ ID NO: 2480278 - RNA, 15 nt, Human
uaucacagucuaauu

SEQ ID NO: 2480279 - RNA, 17 nt, Human
uaucacacuucugugag

SEQ ID NO: 2480280 - RNA, 16 nt, Human
acagacccugcccugu

SEQ ID NO: 2480281 - RNA, 17 nt, Human
acagacccugcccugug

SEQ ID NO: 2480282 - RNA, 18 nt, Human
acagacacuaaguuauag

SEQ ID NO: 2480283 - RNA, 14 nt, Human
acagacacuggcau

SEQ ID NO: 2480284 - RNA, 21 nt, Human
acagacacucccacuuggcau

SEQ ID NO: 2480285 - RNA, 13 nt, Human
acagacagcccuc

SEQ ID NO: 2480286 - RNA, 23 nt, Human
acacuccuagagaacgcagcccu

SEQ ID NO: 2480287 - RNA, 20 nt, Human
acacuccuagagaacgcagc

SEQ ID NO: 2480288 - RNA, 14 nt, Human
acacuccuagagaa

SEQ ID NO: 2480289 - RNA, 23 nt, Human
acagacacaggcccggcuccagg

SEQ ID NO: 2480290 - RNA, 11 nt, Human
acacuccuuca

SEQ ID NO: 2480291 - RNA, 15 nt, Human
acacuccccgaaguc

SEQ ID NO: 2480292 - RNA, 16 nt, Human
acacuccaucagcuua

SEQ ID NO: 2480293 - RNA, 15 nt, Human
acacuccccugcacu

SEQ ID NO: 2480294 - RNA, 14 nt, Human
acacucccuugggc

SEQ ID NO: 2480295 - RNA, 16 nt, Human
acacuccuacaccuaa

SEQ ID NO: 2480296 - RNA, 17 nt, Human
acacuccccugcacugg

SEQ ID NO: 2480297 - RNA, 16 nt, Human
uauauugauccagaaa

SEQ ID NO: 2480298 - RNA, 14 nt, Human
acagacuggaagca

SEQ ID NO: 2480299 - RNA, 23 nt, Human
acagacugcgauuugucccaggu

SEQ ID NO: 2480300 - RNA, 20 nt, Human
acagacccugcccugugggc

SEQ ID NO: 2480301 - RNA, 18 nt, Human
acagacccugcccugugg

SEQ ID NO: 2480302 - RNA, 16 nt, Human
acagacagacacacac

SEQ ID NO: 2480303 - RNA, 17 nt, Human
acagacuauuuaacuug

SEQ ID NO: 2480304 - RNA, 20 nt, Human
acagacucaaaugcucagac

SEQ ID NO: 2480305 - RNA, 22 nt, Human
acagacucacaaccugaaccua

SEQ ID NO: 2480306 - RNA, 20 nt, Human
acagacucacaaccugaacc

SEQ ID NO: 2480307 - RNA, 17 nt, Human
acagacuccugaggaca

SEQ ID NO: 2480308 - RNA, 22 nt, Human
acagacucgauucauauugaau

SEQ ID NO: 2480309 - RNA, 17 nt, Human
acagcuaacauggaagu

SEQ ID NO: 2480310 - RNA, 20 nt, Human
acagcuaaucagcauucuca

SEQ ID NO: 2480311 - RNA, 22 nt, Human
acagccuguggcggugccuggg

SEQ ID NO: 2480312 - RNA, 21 nt, Human
acagcucaggaucucuuagca

SEQ ID NO: 2480313 - RNA, 21 nt, Human
acagcucaguucuagucucuc

SEQ ID NO: 2480314 - RNA, 23 nt, Human
acagcucaguucuagucucucug

SEQ ID NO: 2480315 - RNA, 17 nt, Human
acagcuccacccuggcc

SEQ ID NO: 2480316 - RNA, 13 nt, Human
acagcucccaccc

SEQ ID NO: 2480317 - RNA, 14 nt, Human
acagcucccacccc

SEQ ID NO: 2480318 - RNA, 15 nt, Human
acagcucccacccca

SEQ ID NO: 2480319 - RNA, 16 nt, Human
acagcucccaccccac

SEQ ID NO: 2480320 - RNA, 15 nt, Human
acagcuaacauggaa

SEQ ID NO: 2480321 - RNA, 14 nt, Human
acagcuaacaugga

SEQ ID NO: 2480322 - RNA, 22 nt, Human
uauggggagaaaagacaugaau

SEQ ID NO: 2480323 - RNA, 12 nt, Human
acagccuggcac

SEQ ID NO: 2480324 - RNA, 20 nt, Human
acagccuguggcggugccug

SEQ ID NO: 2480325 - RNA, 21 nt, Human
acagccuguggcggugccugg

SEQ ID NO: 2480326 - RNA, 15 nt, Human
acagccuggcacagg

SEQ ID NO: 2480327 - RNA, 19 nt, Human
uauggggauagaugugugg

SEQ ID NO: 2480328 - RNA, 14 nt, Human
acagccuggcacag

SEQ ID NO: 2480329 - RNA, 17 nt, Human
uauggggauagaugugu

SEQ ID NO: 2480330 - RNA, 18 nt, Human
uauggggauagaugugug

SEQ ID NO: 2480331 - RNA, 17 nt, Human
uaugggcauuguaguua

SEQ ID NO: 2480332 - RNA, 15 nt, Human
uaugggcaaaaaacu

SEQ ID NO: 2480333 - RNA, 16 nt, Human
uaugggagccccaggg

SEQ ID NO: 2480334 - RNA, 17 nt, Human
uauggcuauaggugcua

SEQ ID NO: 2480335 - RNA, 21 nt, Human
uauggcuagaauauccuacuu

SEQ ID NO: 2480336 - RNA, 17 nt, Human
uauggcuagaauauccu

SEQ ID NO: 2480337 - RNA, 17 nt, Human
uauggcucacuaugaau

SEQ ID NO: 2480338 - RNA, 22 nt, Human
uauggcuagaauauccuacuuc

SEQ ID NO: 2480339 - RNA, 16 nt, Human
uauggcuuuugugcau

SEQ ID NO: 2480340 - RNA, 17 nt, Human
uauggcuggccacugca

SEQ ID NO: 2480341 - RNA, 15 nt, Human
uaugggagccccagg

SEQ ID NO: 2480342 - RNA, 10 nt, Human
uaugggagag

SEQ ID NO: 2480343 - RNA, 22 nt, Human
uaugcugaguauguuaagcucu

SEQ ID NO: 2480344 - RNA, 16 nt, Human
uauggcuauaggugcu

SEQ ID NO: 2480345 - RNA, 14 nt, Human
uauggccuguggau

SEQ ID NO: 2480346 - RNA, 22 nt, Human
uauggccugugagcuaggaauu

SEQ ID NO: 2480347 - RNA, 19 nt, Human
uaugcugaaacagaauacu

SEQ ID NO: 2480348 - RNA, 19 nt, Human
uaugcucugcauguuacau

SEQ ID NO: 2480349 - RNA, 12 nt, Human
uauggccucagc

SEQ ID NO: 2480350 - RNA, 19 nt, Human
uauggccucagcugccuca

SEQ ID NO: 2480351 - RNA, 23 nt, Human
uauggccucagcugccucacuuc

SEQ ID NO: 2480352 - RNA, 22 nt, Human
uauggcccuggccuagcauacg

SEQ ID NO: 2480353 - RNA, 21 nt, Human
uaugaugacucccuuaaaaua

SEQ ID NO: 2480354 - RNA, 19 nt, Human
uaugaucucagguucuccu

SEQ ID NO: 2480355 - RNA, 21 nt, Human
uaugauggguguuuuuagcag

SEQ ID NO: 2480356 - RNA, 15 nt, Human
uaugaucccagcacu

SEQ ID NO: 2480357 - RNA, 15 nt, Human
uaugaucgcgccacu

SEQ ID NO: 2480358 - RNA, 14 nt, Human
uaugcucugcaugu

SEQ ID NO: 2480359 - RNA, 18 nt, Human
uaugcucugcauguuaca

SEQ ID NO: 2480360 - RNA, 22 nt, Human
uaugaugauacaagauuagaag

SEQ ID NO: 2480361 - RNA, 15 nt, Human
uaugaugcuguugcc

SEQ ID NO: 2480362 - RNA, 13 nt, Human
uaugauguauauu

SEQ ID NO: 2480363 - RNA, 18 nt, Human
uaugauguguugugauag

SEQ ID NO: 2480364 - RNA, 17 nt, Human
uaugauguguugugaua

SEQ ID NO: 2480365 - RNA, 15 nt, Human
uaugauguguuguga

SEQ ID NO: 2480366 - RNA, 18 nt, Human
uaugaugugggucaagga

SEQ ID NO: 2480367 - RNA, 14 nt, Human
uaugaucacggcuc

SEQ ID NO: 2480368 - RNA, 21 nt, Human
uaugaguuucauagcuaagaa

SEQ ID NO: 2480369 - RNA, 17 nt, Human
uaugaguuucauagcua

SEQ ID NO: 2480370 - RNA, 21 nt, Human
uaugaguuuuugauagcuuua

SEQ ID NO: 2480371 - RNA, 22 nt, Human
uaugaguuuuugauagcuuuau

SEQ ID NO: 2480372 - RNA, 23 nt, Human
uaugaguuuuugauagcuuuauu

SEQ ID NO: 2480373 - RNA, 17 nt, Human
uaugagucaaugugcag

SEQ ID NO: 2480374 - RNA, 16 nt, Human
uaugagucaaugugca

SEQ ID NO: 2480375 - RNA, 23 nt, Human
uaugagucaaugugcaguguagc

SEQ ID NO: 2480376 - RNA, 18 nt, Human
uaugaguuguuuucagac

SEQ ID NO: 2480377 - RNA, 22 nt, Human
uaugaguuguuuucagacucag

SEQ ID NO: 2480378 - RNA, 15 nt, Human
uaugagggaaaauga

SEQ ID NO: 2480379 - RNA, 19 nt, Human
uaugaggucuaggaacaua

SEQ ID NO: 2480380 - RNA, 15 nt, Human
uaugagucaaugugc

SEQ ID NO: 2480381 - RNA, 15 nt, Human
uaugaggucuaggaa

SEQ ID NO: 2480382 - RNA, 23 nt, Human
uaugaucacggcucacugcagcc

SEQ ID NO: 2480383 - RNA, 21 nt, Human
uaugaucacggcucacugcag

SEQ ID NO: 2480384 - RNA, 13 nt, Human
uaugaggcauuug

SEQ ID NO: 2480385 - RNA, 14 nt, Human
uaugaggaugcaga

SEQ ID NO: 2480386 - RNA, 22 nt, Human
uaugaggcaaccacaggcagca

SEQ ID NO: 2480387 - RNA, 21 nt, Human
uaugagcuuccuucugugaaa

SEQ ID NO: 2480388 - RNA, 20 nt, Human
uaucuuggacugacauuuag

SEQ ID NO: 2480389 - RNA, 17 nt, Human
uaugaggaauaauuauu

SEQ ID NO: 2480390 - RNA, 23 nt, Human
uaugaggacuugugucucugugc

SEQ ID NO: 2480391 - RNA, 17 nt, Human
uaugaggacuugugucu

SEQ ID NO: 2480392 - RNA, 16 nt, Human
uaugagcuuuauguaa

SEQ ID NO: 2480393 - RNA, 15 nt, Human
uaucuugaagacuuu

SEQ ID NO: 2480394 - RNA, 15 nt, Human
uaucuugaauaaugu

SEQ ID NO: 2480395 - RNA, 15 nt, Human
uaucuugcucuguaa

SEQ ID NO: 2480396 - RNA, 17 nt, Human
uaucuugcucuguaauc

SEQ ID NO: 2480397 - RNA, 18 nt, Human
uaugagcuuccuucugug

SEQ ID NO: 2480398 - RNA, 17 nt, Human
uaucuuggacugacauu

SEQ ID NO: 2480399 - RNA, 19 nt, Human
acagagugugcuggaggac

SEQ ID NO: 2480400 - RNA, 17 nt, Human
acagagugugcuggagg

SEQ ID NO: 2480401 - RNA, 18 nt, Human
acagaguuuucacucuua

SEQ ID NO: 2480402 - RNA, 13 nt, Human
acagauaagcaag

SEQ ID NO: 2480403 - RNA, 20 nt, Human
acagaguuuucacucuuauu

SEQ ID NO: 2480404 - RNA, 18 nt, Human
acagcagccccugcacaa

SEQ ID NO: 2480405 - RNA, 15 nt, Human
acagauaagcaagag

SEQ ID NO: 2480406 - RNA, 18 nt, Human
acagauaagcaagagaga

SEQ ID NO: 2480407 - RNA, 19 nt, Human
acagauaagcaagagagau

SEQ ID NO: 2480408 - RNA, 22 nt, Human
acagcagccuggggcuggccuc

SEQ ID NO: 2480409 - RNA, 14 nt, Human
acagcagcucaggc

SEQ ID NO: 2480410 - RNA, 18 nt, Human
acagcagcuucaccagag

SEQ ID NO: 2480411 - RNA, 17 nt, Human
acagcagcuucaccaga

SEQ ID NO: 2480412 - RNA, 16 nt, Human
acagcagcuucaccag

SEQ ID NO: 2480413 - RNA, 13 nt, Human
acagcagcuucac

SEQ ID NO: 2480414 - RNA, 22 nt, Human
acagcagcuucaccagagcauu

SEQ ID NO: 2480415 - RNA, 15 nt, Human
acagcagcucaggca

SEQ ID NO: 2480416 - RNA, 16 nt, Human
acagcagcucaggcac

SEQ ID NO: 2480417 - RNA, 12 nt, Human
acagcagcuuca

SEQ ID NO: 2480418 - RNA, 14 nt, Human
acagcagcugaaca

SEQ ID NO: 2480419 - RNA, 17 nt, Human
acagcagcucaggcaca

SEQ ID NO: 2480420 - RNA, 16 nt, Human
acagccucugaccccu

SEQ ID NO: 2480421 - RNA, 12 nt, Human
acagccucugac

SEQ ID NO: 2480422 - RNA, 23 nt, Human
acagccuccucugucugcccuuc

SEQ ID NO: 2480423 - RNA, 22 nt, Human
acagccuccucugucugcccuu

SEQ ID NO: 2480424 - RNA, 20 nt, Human
acagccuccucugucugccc

SEQ ID NO: 2480425 - RNA, 19 nt, Human
acagccuccucugucugcc

SEQ ID NO: 2480426 - RNA, 17 nt, Human
acagccuccucugucug

SEQ ID NO: 2480427 - RNA, 15 nt, Human
acagccuccucuguc

SEQ ID NO: 2480428 - RNA, 13 nt, Human
acagccuccucug

SEQ ID NO: 2480429 - RNA, 12 nt, Human
acagccuccucu

SEQ ID NO: 2480430 - RNA, 16 nt, Human
acagccccagagcagg

SEQ ID NO: 2480431 - RNA, 18 nt, Human
acagccuccccugccagg

SEQ ID NO: 2480432 - RNA, 19 nt, Human
acagccuccccugccaggg

SEQ ID NO: 2480433 - RNA, 21 nt, Human
acagccuccccugccagggca

SEQ ID NO: 2480434 - RNA, 22 nt, Human
acagccuccccugccagggcag

SEQ ID NO: 2480435 - RNA, 15 nt, Human
acagccuccccugcc

SEQ ID NO: 2480436 - RNA, 17 nt, Human
acagccuccccugccag

SEQ ID NO: 2480437 - RNA, 15 nt, Human
acagccucccacccc

SEQ ID NO: 2480438 - RNA, 16 nt, Human
acagccucccaccccc

SEQ ID NO: 2480439 - RNA, 17 nt, Human
acagccccagagcaggg

SEQ ID NO: 2480440 - RNA, 18 nt, Human
acagccucacuugaaugu

SEQ ID NO: 2480441 - RNA, 15 nt, Human
acagccccagagcag

SEQ ID NO: 2480442 - RNA, 14 nt, Human
acagccccagagca

SEQ ID NO: 2480443 - RNA, 13 nt, Human
acagccccagagc

SEQ ID NO: 2480444 - RNA, 15 nt, Human
acagccccacccugg

SEQ ID NO: 2480445 - RNA, 13 nt, Human
acagccccacccu

SEQ ID NO: 2480446 - RNA, 14 nt, Human
acagccccacccug

SEQ ID NO: 2480447 - RNA, 12 nt, Human
acagccccaccc

SEQ ID NO: 2480448 - RNA, 20 nt, Human
acagcccacguccugucagu

SEQ ID NO: 2480449 - RNA, 19 nt, Human
acagcccacguccugucag

SEQ ID NO: 2480450 - RNA, 17 nt, Human
acagcccacguccuguc

SEQ ID NO: 2480451 - RNA, 13 nt, Human
acagcccaccugg

SEQ ID NO: 2480452 - RNA, 16 nt, Human
acagcccacguccugu

SEQ ID NO: 2480453 - RNA, 15 nt, Human
acagcccacguccug

SEQ ID NO: 2480454 - RNA, 19 nt, Human
acagcccaaagaaggaaaa

SEQ ID NO: 2480455 - RNA, 20 nt, Human
acaccucagaggcuguucuu

SEQ ID NO: 2480456 - RNA, 18 nt, Human
acaccucaguucccuugg

SEQ ID NO: 2480457 - RNA, 21 nt, Human
acaccucaguucccuuggccu

SEQ ID NO: 2480458 - RNA, 22 nt, Human
acaccuagcuuuauucuucaga

SEQ ID NO: 2480459 - RNA, 17 nt, Human
acaccuaugucauuuca

SEQ ID NO: 2480460 - RNA, 20 nt, Human
acaccuaugucauuucauuu

SEQ ID NO: 2480461 - RNA, 18 nt, Human
acaccuagcuuuauucuu

SEQ ID NO: 2480462 - RNA, 21 nt, Human
acaccuagcuuuauucuucag

SEQ ID NO: 2480463 - RNA, 18 nt, Human
uauaacaaugcuguauuu

SEQ ID NO: 2480464 - RNA, 20 nt, Human
acaccuccacaguucagugg

SEQ ID NO: 2480465 - RNA, 21 nt, Human
acaccucagaggcuguucuug

SEQ ID NO: 2480466 - RNA, 12 nt, Human
acaccucccagg

SEQ ID NO: 2480467 - RNA, 22 nt, Human
acaccucaguucccuuggccuc

SEQ ID NO: 2480468 - RNA, 23 nt, Human
acaccucaguucccuuggccuca

SEQ ID NO: 2480469 - RNA, 20 nt, Human
uauaaccacaaagcacaguu

SEQ ID NO: 2480470 - RNA, 21 nt, Human
uauaacagguuauuuuaguuu

SEQ ID NO: 2480471 - RNA, 20 nt, Human
uauaacagguuauuuuaguu

SEQ ID NO: 2480472 - RNA, 15 nt, Human
uauaacagguuauuu

SEQ ID NO: 2480473 - RNA, 13 nt, Human
uauaacagguuau

SEQ ID NO: 2480474 - RNA, 12 nt, Human
uauaacagguua

SEQ ID NO: 2480475 - RNA, 14 nt, Human
acaccagccaggcu

SEQ ID NO: 2480476 - RNA, 16 nt, Human
uauaagcccacuguua

SEQ ID NO: 2480477 - RNA, 21 nt, Human
uauaauuuaccugaagucuuu

SEQ ID NO: 2480478 - RNA, 14 nt, Human
uauaauuuugugaa

SEQ ID NO: 2480479 - RNA, 17 nt, Human
uauaauuuuaugaaugu

SEQ ID NO: 2480480 - RNA, 22 nt, Human
uauaauuuuaugaaugucuuug

SEQ ID NO: 2480481 - RNA, 16 nt, Human
uauaagauuagaauga

SEQ ID NO: 2480482 - RNA, 16 nt, Human
uauaagaggcugauaa

SEQ ID NO: 2480483 - RNA, 19 nt, Human
uauaagaauaaaauguuga

SEQ ID NO: 2480484 - RNA, 20 nt, Human
uauaaccaguguuguggauu

SEQ ID NO: 2480485 - RNA, 16 nt, Human
uauaagaauaaaaugu

SEQ ID NO: 2480486 - RNA, 20 nt, Human
uauaagaagcuuucaguauu

SEQ ID NO: 2480487 - RNA, 15 nt, Human
uauagauuauaacuu

SEQ ID NO: 2480488 - RNA, 16 nt, Human
uauagauuauaacuug

SEQ ID NO: 2480489 - RNA, 19 nt, Human
uauaccaguauaauugagu

SEQ ID NO: 2480490 - RNA, 19 nt, Human
uauaccauggugaauuaau

SEQ ID NO: 2480491 - RNA, 22 nt, Human
uauacaguaacuuuauguguaa

SEQ ID NO: 2480492 - RNA, 14 nt, Human
uauacauuugauaa

SEQ ID NO: 2480493 - RNA, 17 nt, Human
uauacauucuuuaucuu

SEQ ID NO: 2480494 - RNA, 16 nt, Human
uauacauucuuuaucu

SEQ ID NO: 2480495 - RNA, 22 nt, Human
uauacauucuuuaucuugacau

SEQ ID NO: 2480496 - RNA, 17 nt, Human
uauaccagcaauauauc

SEQ ID NO: 2480497 - RNA, 13 nt, Human
uauacauaaacaa

SEQ ID NO: 2480498 - RNA, 14 nt, Human
uauacauaaacaag

SEQ ID NO: 2480499 - RNA, 14 nt, Human
uauacacuguaaug

SEQ ID NO: 2480500 - RNA, 11 nt, Human
uauacacauaa

SEQ ID NO: 2480501 - RNA, 21 nt, Human
uauacacuuacacuuuaugca

SEQ ID NO: 2480502 - RNA, 19 nt, Human
uauacaguaacuuuaugug

SEQ ID NO: 2480503 - RNA, 18 nt, Human
uauacaguaacuuuaugu

SEQ ID NO: 2480504 - RNA, 16 nt, Human
uauacaguaacuuuau

SEQ ID NO: 2480505 - RNA, 21 nt, Human
uauacaguaacuuuaugugua

SEQ ID NO: 2480506 - RNA, 20 nt, Human
uauacaguaacuuuaugugu

SEQ ID NO: 2480507 - RNA, 19 nt, Human
uauaauuuugugaagcaaa

SEQ ID NO: 2480508 - RNA, 21 nt, Human
uauacaacagugcuaaaaaug

SEQ ID NO: 2480509 - RNA, 20 nt, Human
uauacaacagugcuaaaaau

SEQ ID NO: 2480510 - RNA, 16 nt, Human
uauacaacagugcuaa

SEQ ID NO: 2480511 - RNA, 15 nt, Human
uauacaacagugcua

SEQ ID NO: 2480512 - RNA, 14 nt, Human
uauacaacagugcu

SEQ ID NO: 2480513 - RNA, 15 nt, Human
uauacaauaacauaa

SEQ ID NO: 2480514 - RNA, 22 nt, Human
uauacaacccuggcauuauguc

SEQ ID NO: 2480515 - RNA, 21 nt, Human
uauacaacccuggcauuaugu

SEQ ID NO: 2480516 - RNA, 12 nt, Human
uauacacacagc

SEQ ID NO: 2480517 - RNA, 22 nt, Human
uauauaucauauugguauucac

SEQ ID NO: 2480518 - RNA, 16 nt, Human
uauauauccucuguau

SEQ ID NO: 2480519 - RNA, 14 nt, Human
uauauauccucugu

SEQ ID NO: 2480520 - RNA, 19 nt, Human
uauaucacauguuuucucu

SEQ ID NO: 2480521 - RNA, 13 nt, Human
uauaucagaaaag

SEQ ID NO: 2480522 - RNA, 22 nt, Human
uauaucaacagauaguuguguu

SEQ ID NO: 2480523 - RNA, 18 nt, Human
uauaucagaaaagggaag

SEQ ID NO: 2480524 - RNA, 11 nt, Human
uauaucagccu

SEQ ID NO: 2480525 - RNA, 14 nt, Human
uauauauauaaaau

SEQ ID NO: 2480526 - RNA, 13 nt, Human
uauauauauauau

SEQ ID NO: 2480527 - RNA, 14 nt, Human
uauauauauaaaca

SEQ ID NO: 2480528 - RNA, 13 nt, Human
uauauauauaaaa

SEQ ID NO: 2480529 - RNA, 13 nt, Human
uauauaucaaaua

SEQ ID NO: 2480530 - RNA, 16 nt, Human
uauauccuuucuaaca

SEQ ID NO: 2480531 - RNA, 19 nt, Human
acacucauugaccugaggc

SEQ ID NO: 2480532 - RNA, 14 nt, Human
uauaucccagaaau

SEQ ID NO: 2480533 - RNA, 23 nt, Human
uauaucagccugagucuccugug

SEQ ID NO: 2480534 - RNA, 15 nt, Human
uauaucagccugagu

SEQ ID NO: 2480535 - RNA, 20 nt, Human
uauauccaaaagcuuuuuau

SEQ ID NO: 2480536 - RNA, 14 nt, Human
uauauccauguacu

SEQ ID NO: 2480537 - RNA, 15 nt, Human
uauauccauguacug

SEQ ID NO: 2480538 - RNA, 16 nt, Human
uauauccauguacugu

SEQ ID NO: 2480539 - RNA, 17 nt, Human
uauauccauguacugua

SEQ ID NO: 2480540 - RNA, 18 nt, Human
uauauccauguacuguag

SEQ ID NO: 2480541 - RNA, 19 nt, Human
uauauccauguacuguagu

SEQ ID NO: 2480542 - RNA, 23 nt, Human
acacucauugaccugaggcccuu

SEQ ID NO: 2480543 - RNA, 21 nt, Human
acacucauugaccugaggccc

SEQ ID NO: 2480544 - RNA, 15 nt, Human
acacuccaauuaagg

SEQ ID NO: 2480545 - RNA, 16 nt, Human
acacuccaauuaagga

SEQ ID NO: 2480546 - RNA, 14 nt, Human
acacuccaagauau

SEQ ID NO: 2480547 - RNA, 19 nt, Human
acacuccagugccagcaau

SEQ ID NO: 2480548 - RNA, 16 nt, Human
acacuccagugccagc

SEQ ID NO: 2480549 - RNA, 16 nt, Human
acacuccaagauaugg

SEQ ID NO: 2480550 - RNA, 21 nt, Human
acacuccagugccagcaauga

SEQ ID NO: 2480551 - RNA, 14 nt, Human
acacuccaucagcu

SEQ ID NO: 2480552 - RNA, 14 nt, Human
uauagauuugaccu

SEQ ID NO: 2480553 - RNA, 20 nt, Human
uauagccuaggugacagagu

SEQ ID NO: 2480554 - RNA, 13 nt, Human
uauacaacagugc

SEQ ID NO: 2480555 - RNA, 22 nt, Human
uauagcuauuacugucugguuu

SEQ ID NO: 2480556 - RNA, 14 nt, Human
uauagcuauuacug

SEQ ID NO: 2480557 - RNA, 11 nt, Human
uauagcuauua

SEQ ID NO: 2480558 - RNA, 16 nt, Human
uauagcuacaggaagc

SEQ ID NO: 2480559 - RNA, 22 nt, Human
uauagcuacaggaagcacccca

SEQ ID NO: 2480560 - RNA, 14 nt, Human
uauaggaauugacc

SEQ ID NO: 2480561 - RNA, 19 nt, Human
uauaggaauugacccacaa

SEQ ID NO: 2480562 - RNA, 13 nt, Human
uauaggaauugac

SEQ ID NO: 2480563 - RNA, 12 nt, Human
uauagcuauuuu

SEQ ID NO: 2480564 - RNA, 13 nt, Human
uauagcuauuuuu

SEQ ID NO: 2480565 - RNA, 18 nt, Human
uauauauaauucuguaca

SEQ ID NO: 2480566 - RNA, 13 nt, Human
uauauauaaauaa

SEQ ID NO: 2480567 - RNA, 16 nt, Human
uauauauaauucugua

SEQ ID NO: 2480568 - RNA, 14 nt, Human
uauauauaaauaaa

SEQ ID NO: 2480569 - RNA, 12 nt, Human
uauauauaaaua

SEQ ID NO: 2480570 - RNA, 12 nt, Human
uauauauaaacc

SEQ ID NO: 2480571 - RNA, 13 nt, Human
uauauauaaaaua

SEQ ID NO: 2480572 - RNA, 12 nt, Human
uauauauaaaau

SEQ ID NO: 2480573 - RNA, 16 nt, Human
uauauauaaaccuaaa

SEQ ID NO: 2480574 - RNA, 13 nt, Human
uauauauaaaccu

SEQ ID NO: 2480575 - RNA, 13 nt, Human
uauauauacagua

SEQ ID NO: 2480576 - RNA, 20 nt, Human
uauauauaauucuguacaua

SEQ ID NO: 2480577 - RNA, 19 nt, Human
uauauauaauucuguacau

SEQ ID NO: 2480578 - RNA, 12 nt, Human
uauauauagaau

SEQ ID NO: 2480579 - RNA, 13 nt, Human
uauauauagaauc

SEQ ID NO: 2480580 - RNA, 21 nt, Human
uauaggugcuacaaaaacaca

SEQ ID NO: 2480581 - RNA, 20 nt, Human
uauaggugcuacaaaaacac

SEQ ID NO: 2480582 - RNA, 23 nt, Human
uauaggugcuacaaaaacacagc

SEQ ID NO: 2480583 - RNA, 17 nt, Human
uauagguuuuguuugcu

SEQ ID NO: 2480584 - RNA, 10 nt, Human
uauauauaaa

SEQ ID NO: 2480585 - RNA, 16 nt, Human
uauagguuuuguuugc

SEQ ID NO: 2480586 - RNA, 22 nt, Human
uauagguugugcaaauuaacag

SEQ ID NO: 2480587 - RNA, 15 nt, Human
uauagguugugcaaa

SEQ ID NO: 2480588 - RNA, 18 nt, Human
uauagguuuuaaagaccu

SEQ ID NO: 2480589 - RNA, 18 nt, Human
uaguucuguagaaauggu

SEQ ID NO: 2480590 - RNA, 16 nt, Human
uaguucuguagaaaug

SEQ ID NO: 2480591 - RNA, 15 nt, Human
uaguucuguagaaau

SEQ ID NO: 2480592 - RNA, 14 nt, Human
uaguucuguagaaa

SEQ ID NO: 2480593 - RNA, 13 nt, Human
uaguucuguagaa

SEQ ID NO: 2480594 - RNA, 16 nt, Human
uaguuuuauaugcuuc

SEQ ID NO: 2480595 - RNA, 21 nt, Human
uaguuuuaucacauguauguu

SEQ ID NO: 2480596 - RNA, 20 nt, Human
uaguuuuaucacauguaugu

SEQ ID NO: 2480597 - RNA, 19 nt, Human
uaguuuuaucacauguaug

SEQ ID NO: 2480598 - RNA, 17 nt, Human
uaguuuuaucacaugua

SEQ ID NO: 2480599 - RNA, 16 nt, Human
uaguuccugcuacaac

SEQ ID NO: 2480600 - RNA, 15 nt, Human
uaguucguagcuuuc

SEQ ID NO: 2480601 - RNA, 19 nt, Human
uaguucucagcucuucuga

SEQ ID NO: 2480602 - RNA, 20 nt, Human
uaguucucacuguucccucu

SEQ ID NO: 2480603 - RNA, 18 nt, Human
uaguuacuguugugaccu

SEQ ID NO: 2480604 - RNA, 17 nt, Human
uaguuacuguugugacc

SEQ ID NO: 2480605 - RNA, 22 nt, Human
uaguuagccaauauuuuucuua

SEQ ID NO: 2480606 - RNA, 16 nt, Human
uagugacuuguguccc

SEQ ID NO: 2480607 - RNA, 15 nt, Human
uagugaucacagcag

SEQ ID NO: 2480608 - RNA, 14 nt, Human
uagugaucacagca

SEQ ID NO: 2480609 - RNA, 20 nt, Human
uagugaucacagcagcuucu

SEQ ID NO: 2480610 - RNA, 17 nt, Human
uagugaucugaacagaa

SEQ ID NO: 2480611 - RNA, 18 nt, Human
uagugaucugaacagaaa

SEQ ID NO: 2480612 - RNA, 20 nt, Human
uaguuccucauuagcauuuu

SEQ ID NO: 2480613 - RNA, 15 nt, Human
uaguuauaguuucag

SEQ ID NO: 2480614 - RNA, 12 nt, Human
uaguuccugcua

SEQ ID NO: 2480615 - RNA, 23 nt, Human
uaguucccugaaaacccagagag

SEQ ID NO: 2480616 - RNA, 16 nt, Human
uaguuaggaaauaaaa

SEQ ID NO: 2480617 - RNA, 18 nt, Human
uaguuaggaaauaaaacc

SEQ ID NO: 2480618 - RNA, 21 nt, Human
uaguuaggaaauaaaaccuuu

SEQ ID NO: 2480619 - RNA, 22 nt, Human
uaguuaggaaauaaaaccuuuc

SEQ ID NO: 2480620 - RNA, 15 nt, Human
uaguuaggauagcau

SEQ ID NO: 2480621 - RNA, 21 nt, Human
uaguuacuguugugaccugaa

SEQ ID NO: 2480622 - RNA, 23 nt, Human
uaguuaggaaauaaaaccuuuca

SEQ ID NO: 2480623 - RNA, 20 nt, Human
uaguuaggauagcauuuuug

SEQ ID NO: 2480624 - RNA, 15 nt, Human
uaguuaguagcaugu

SEQ ID NO: 2480625 - RNA, 16 nt, Human
uaguuaguagcauguu

SEQ ID NO: 2480626 - RNA, 21 nt, Human
uagucaggugccucaagagaa

SEQ ID NO: 2480627 - RNA, 23 nt, Human
uagucacugccugcagaggucug

SEQ ID NO: 2480628 - RNA, 17 nt, Human
acaaggaaggugguggg

SEQ ID NO: 2480629 - RNA, 21 nt, Human
acaaggaagucaaagcaagga

SEQ ID NO: 2480630 - RNA, 20 nt, Human
acaagcuuuuuuacacaaau

SEQ ID NO: 2480631 - RNA, 18 nt, Human
acaagcuggaagcacaug

SEQ ID NO: 2480632 - RNA, 16 nt, Human
acaagcuggaagcaca

SEQ ID NO: 2480633 - RNA, 19 nt, Human
acaagcugcacccucaggc

SEQ ID NO: 2480634 - RNA, 21 nt, Human
acaagcugcacccucaggcag

SEQ ID NO: 2480635 - RNA, 22 nt, Human
acaagcugcacccucaggcagg

SEQ ID NO: 2480636 - RNA, 23 nt, Human
acaagcugcacccucaggcaggu

SEQ ID NO: 2480637 - RNA, 17 nt, Human
uagucucugugcuuuga

SEQ ID NO: 2480638 - RNA, 14 nt, Human
uagucucugugcuu

SEQ ID NO: 2480639 - RNA, 23 nt, Human
uagucucucuggggccacacaga

SEQ ID NO: 2480640 - RNA, 21 nt, Human
uagucucuaucauuaaaguuc

SEQ ID NO: 2480641 - RNA, 20 nt, Human
uagucucuaucauuaaaguu

SEQ ID NO: 2480642 - RNA, 22 nt, Human
uagucuccuuugcacugagggc

SEQ ID NO: 2480643 - RNA, 21 nt, Human
uagucuccuuugcacugaggg

SEQ ID NO: 2480644 - RNA, 20 nt, Human
uagucuccuuugcacugagg

SEQ ID NO: 2480645 - RNA, 23 nt, Human
uagucugcaaaaugaggaaugua

SEQ ID NO: 2480646 - RNA, 21 nt, Human
uagucucuuguauuaaacucu

SEQ ID NO: 2480647 - RNA, 22 nt, Human
uagugagcagucaggaaagaga

SEQ ID NO: 2480648 - RNA, 20 nt, Human
uagugacccggaggccacau

SEQ ID NO: 2480649 - RNA, 18 nt, Human
uagugacccggaggccac

SEQ ID NO: 2480650 - RNA, 12 nt, Human
uagucugguuuc

SEQ ID NO: 2480651 - RNA, 13 nt, Human
uagucugguuucu

SEQ ID NO: 2480652 - RNA, 18 nt, Human
uagucugugugaagguga

SEQ ID NO: 2480653 - RNA, 19 nt, Human
uagucuccuuugcacugag

SEQ ID NO: 2480654 - RNA, 18 nt, Human
uagucuccuuugcacuga

SEQ ID NO: 2480655 - RNA, 17 nt, Human
uagucuccuuugcacug

SEQ ID NO: 2480656 - RNA, 21 nt, Human
uagucucauuacuuuugaagu

SEQ ID NO: 2480657 - RNA, 22 nt, Human
uagucucaguuugugugucuua

SEQ ID NO: 2480658 - RNA, 19 nt, Human
uagucucaguuuguguguc

SEQ ID NO: 2480659 - RNA, 18 nt, Human
uaguccaaugucuuuuua

SEQ ID NO: 2480660 - RNA, 11 nt, Human
uagucucaguu

SEQ ID NO: 2480661 - RNA, 22 nt, Human
uaguccaaugucuuuuuaagcu

SEQ ID NO: 2480662 - RNA, 13 nt, Human
uagucaugugacc

SEQ ID NO: 2480663 - RNA, 13 nt, Human
uagucacuuuuuu

SEQ ID NO: 2480664 - RNA, 17 nt, Human
uagucacuuauuucaua

SEQ ID NO: 2480665 - RNA, 20 nt, Human
uagucacuuuuuuuuuccaa

SEQ ID NO: 2480666 - RNA, 22 nt, Human
uauaaaauaauuuuuauauuug

SEQ ID NO: 2480667 - RNA, 21 nt, Human
uauaaaauaauuuuuauauuu

SEQ ID NO: 2480668 - RNA, 17 nt, Human
uauaaaagccuguuuaa

SEQ ID NO: 2480669 - RNA, 14 nt, Human
uauaaaagccuguu

SEQ ID NO: 2480670 - RNA, 23 nt, Human
uauaaaagauggggucuguaaaa

SEQ ID NO: 2480671 - RNA, 22 nt, Human
uauaaaagauggggucuguaaa

SEQ ID NO: 2480672 - RNA, 21 nt, Human
uauaaaagauggggucuguaa

SEQ ID NO: 2480673 - RNA, 20 nt, Human
uauaaaagauggggucugua

SEQ ID NO: 2480674 - RNA, 12 nt, Human
uauaaaagccug

SEQ ID NO: 2480675 - RNA, 17 nt, Human
uaguuuucaguuuguau

SEQ ID NO: 2480676 - RNA, 11 nt, Human
uauaaaagaug

SEQ ID NO: 2480677 - RNA, 23 nt, Human
uaguuuucauacacagccugggc

SEQ ID NO: 2480678 - RNA, 22 nt, Human
acacaucagcuugcccuguuaa

SEQ ID NO: 2480679 - RNA, 23 nt, Human
uauaaaauaauuuuuauauuuga

SEQ ID NO: 2480680 - RNA, 22 nt, Human
uauaaaauaaauauauauaaac

SEQ ID NO: 2480681 - RNA, 21 nt, Human
uauaaaauaaauauauauaaa

SEQ ID NO: 2480682 - RNA, 12 nt, Human
acacaucaguca

SEQ ID NO: 2480683 - RNA, 20 nt, Human
acacaucccuaaugugugcc

SEQ ID NO: 2480684 - RNA, 19 nt, Human
acacaugcaaggucauuuu

SEQ ID NO: 2480685 - RNA, 20 nt, Human
acacaugcaaggucauuuuu

SEQ ID NO: 2480686 - RNA, 18 nt, Human
acacaugcaaggucauuu

SEQ ID NO: 2480687 - RNA, 19 nt, Human
acacaucccuaaugugugc

SEQ ID NO: 2480688 - RNA, 17 nt, Human
acacaucccuaaugugu

SEQ ID NO: 2480689 - RNA, 12 nt, Human
acacaucuccuc

SEQ ID NO: 2480690 - RNA, 14 nt, Human
acacaucuccucca

SEQ ID NO: 2480691 - RNA, 15 nt, Human
acacaucuucaacag

SEQ ID NO: 2480692 - RNA, 21 nt, Human
acacaugcaaggucauuuuuu

SEQ ID NO: 2480693 - RNA, 17 nt, Human
acaccagccaggcucug

SEQ ID NO: 2480694 - RNA, 16 nt, Human
acaccagccaggcucu

SEQ ID NO: 2480695 - RNA, 13 nt, Human
acacaucuuuccu

SEQ ID NO: 2480696 - RNA, 13 nt, Human
acacaucuucccu

SEQ ID NO: 2480697 - RNA, 14 nt, Human
acacaucuucccua

SEQ ID NO: 2480698 - RNA, 15 nt, Human
acacaucuucccuag

SEQ ID NO: 2480699 - RNA, 12 nt, Human
acaccaggccgu

SEQ ID NO: 2480700 - RNA, 19 nt, Human
acaccaggagucccuggua

SEQ ID NO: 2480701 - RNA, 23 nt, Human
acaccagcuguucugucccuugg

SEQ ID NO: 2480702 - RNA, 15 nt, Human
acaccagcuguucug

SEQ ID NO: 2480703 - RNA, 17 nt, Human
acaccaggagucccugg

SEQ ID NO: 2480704 - RNA, 17 nt, Human
acaccagccccugcccc

SEQ ID NO: 2480705 - RNA, 15 nt, Human
acaccagccccugcc

SEQ ID NO: 2480706 - RNA, 13 nt, Human
acaccagccccug

SEQ ID NO: 2480707 - RNA, 22 nt, Human
acaccagccaggcucugugcug

SEQ ID NO: 2480708 - RNA, 22 nt, Human
acaccagccccugccccagccc

SEQ ID NO: 2480709 - RNA, 21 nt, Human
acaccagccccugccccagcc

SEQ ID NO: 2480710 - RNA, 19 nt, Human
acaccagccucgucuucau

SEQ ID NO: 2480711 - RNA, 20 nt, Human
acaccagccuuucucccagg

SEQ ID NO: 2480712 - RNA, 21 nt, Human
acacccagcccacuucugcca

SEQ ID NO: 2480713 - RNA, 20 nt, Human
acacccagcccacuucugcc

SEQ ID NO: 2480714 - RNA, 19 nt, Human
acacccagcccacuucugc

SEQ ID NO: 2480715 - RNA, 22 nt, Human
acaccaggccguccucccgggc

SEQ ID NO: 2480716 - RNA, 21 nt, Human
acaccaggccguccucccggg

SEQ ID NO: 2480717 - RNA, 12 nt, Human
acaccaggcugu

SEQ ID NO: 2480718 - RNA, 14 nt, Human
acaccaggcugugg

SEQ ID NO: 2480719 - RNA, 21 nt, Human
acaccaggcuugccugcaggc

SEQ ID NO: 2480720 - RNA, 18 nt, Human
acacccugugauggggcc

SEQ ID NO: 2480721 - RNA, 12 nt, Human
acacccugugau

SEQ ID NO: 2480722 - RNA, 11 nt, Human
acacccuguga

SEQ ID NO: 2480723 - RNA, 18 nt, Human
acaccaggcugugggccu

SEQ ID NO: 2480724 - RNA, 18 nt, Human
acaccuaccaaaaaauaa

SEQ ID NO: 2480725 - RNA, 22 nt, Human
acaccuaagggacauguuuuga

SEQ ID NO: 2480726 - RNA, 21 nt, Human
acaccuacucuaucagagaaa

SEQ ID NO: 2480727 - RNA, 15 nt, Human
acaccuagcaucuca

SEQ ID NO: 2480728 - RNA, 20 nt, Human
acaccguguaaaccaaagcc

SEQ ID NO: 2480729 - RNA, 19 nt, Human
acaccguguaaaccaaagc

SEQ ID NO: 2480730 - RNA, 18 nt, Human
acaccuaagggacauguu

SEQ ID NO: 2480731 - RNA, 14 nt, Human
acaccuaagggaca

SEQ ID NO: 2480732 - RNA, 15 nt, Human
acaccuaacucaccu

SEQ ID NO: 2480733 - RNA, 17 nt, Human
acaccguguaaaccaaa

SEQ ID NO: 2480734 - RNA, 19 nt, Human
acaccgggguggugggaac

SEQ ID NO: 2480735 - RNA, 22 nt, Human
acacccuguacuguucuguguc

SEQ ID NO: 2480736 - RNA, 16 nt, Human
acaccgggccuggaga

SEQ ID NO: 2480737 - RNA, 13 nt, Human
acacccuguacug

SEQ ID NO: 2480738 - RNA, 13 nt, Human
ucccucaucucuc

SEQ ID NO: 2480739 - RNA, 16 nt, Human
ucccucaucugucccu

SEQ ID NO: 2480740 - RNA, 16 nt, Human
ucccucagugcccuca

SEQ ID NO: 2480741 - RNA, 20 nt, Human
ucccucaccuuggcaccaga

SEQ ID NO: 2480742 - RNA, 22 nt, Human
ucccucauccucauacccaccc

SEQ ID NO: 2480743 - RNA, 22 nt, Human
ucccucacccugagccccuucc

SEQ ID NO: 2480744 - RNA, 15 nt, Human
ucccucaccuuggca

SEQ ID NO: 2480745 - RNA, 21 nt, Human
ucccucagucuggcccuuccu

SEQ ID NO: 2480746 - RNA, 18 nt, Human
acucaucuagguaaauua

SEQ ID NO: 2480747 - RNA, 16 nt, Human
acucaucuagguaaau

SEQ ID NO: 2480748 - RNA, 23 nt, Human
ucccucauuccaccuucccaugc

SEQ ID NO: 2480749 - RNA, 21 nt, Human
ucccucaucugucccuccggg

SEQ ID NO: 2480750 - RNA, 9 nt, Human
acucaucau

SEQ ID NO: 2480751 - RNA, 12 nt, Human
acucaucauaaa

SEQ ID NO: 2480752 - RNA, 13 nt, Human
acucaucauaaaa

SEQ ID NO: 2480753 - RNA, 14 nt, Human
acucaucauaaaau

SEQ ID NO: 2480754 - RNA, 15 nt, Human
acucaucauaaaaua

SEQ ID NO: 2480755 - RNA, 14 nt, Human
acucaugcugaaag

SEQ ID NO: 2480756 - RNA, 13 nt, Human
acucaugcugaaa

SEQ ID NO: 2480757 - RNA, 12 nt, Human
acucaugcugaa

SEQ ID NO: 2480758 - RNA, 15 nt, Human
acucaugaucuugug

SEQ ID NO: 2480759 - RNA, 21 nt, Human
acucaugaucuugugacauau

SEQ ID NO: 2480760 - RNA, 19 nt, Human
acucaucccuaaugcugca

SEQ ID NO: 2480761 - RNA, 14 nt, Human
acucaugagaaguu

SEQ ID NO: 2480762 - RNA, 16 nt, Human
acucaucauaaaauaa

SEQ ID NO: 2480763 - RNA, 17 nt, Human
acucaucauaaaauaaa

SEQ ID NO: 2480764 - RNA, 21 nt, Human
acucauugcugagccucugcu

SEQ ID NO: 2480765 - RNA, 22 nt, Human
acucauugcugagccucugcuc

SEQ ID NO: 2480766 - RNA, 23 nt, Human
acucauugcugagccucugcucc

SEQ ID NO: 2480767 - RNA, 21 nt, Human
acucauuuauaaagcuaaaau

SEQ ID NO: 2480768 - RNA, 16 nt, Human
acucauuuccuaugua

SEQ ID NO: 2480769 - RNA, 18 nt, Human
acucauugcugagccucu

SEQ ID NO: 2480770 - RNA, 20 nt, Human
acucauugcugagccucugc

SEQ ID NO: 2480771 - RNA, 15 nt, Human
acucauugcugagcc

SEQ ID NO: 2480772 - RNA, 16 nt, Human
acucaugcugaaagcc

SEQ ID NO: 2480773 - RNA, 18 nt, Human
acuccuacaccuaacuca

SEQ ID NO: 2480774 - RNA, 17 nt, Human
acuccuacaccuaacuc

SEQ ID NO: 2480775 - RNA, 16 nt, Human
acuccuacaccuaacu

SEQ ID NO: 2480776 - RNA, 23 nt, Human
acuccuagagaacgcagcccuag

SEQ ID NO: 2480777 - RNA, 22 nt, Human
acuccuagagaacgcagcccua

SEQ ID NO: 2480778 - RNA, 21 nt, Human
acuccuagagaacgcagcccu

SEQ ID NO: 2480779 - RNA, 20 nt, Human
acuccuagagaacgcagccc

SEQ ID NO: 2480780 - RNA, 14 nt, Human
acuccuaccuggua

SEQ ID NO: 2480781 - RNA, 14 nt, Human
acuccuaccucagc

SEQ ID NO: 2480782 - RNA, 15 nt, Human
acuccuaccucagcc

SEQ ID NO: 2480783 - RNA, 16 nt, Human
acuccuaccucagccu

SEQ ID NO: 2480784 - RNA, 17 nt, Human
acuccuaccucagccua

SEQ ID NO: 2480785 - RNA, 21 nt, Human
acuccugagaccccuggccuc

SEQ ID NO: 2480786 - RNA, 20 nt, Human
acuccugagaccccuggccu

SEQ ID NO: 2480787 - RNA, 18 nt, Human
acuccugagaccccuggc

SEQ ID NO: 2480788 - RNA, 17 nt, Human
acuccugagaccccugg

SEQ ID NO: 2480789 - RNA, 19 nt, Human
acuccugaggacagcuguc

SEQ ID NO: 2480790 - RNA, 17 nt, Human
acuccugaggacagcug

SEQ ID NO: 2480791 - RNA, 16 nt, Human
acuccugaggacagcu

SEQ ID NO: 2480792 - RNA, 23 nt, Human
acuccugagaccccuggccuccg

SEQ ID NO: 2480793 - RNA, 21 nt, Human
acuccugaggacagcuguccu

SEQ ID NO: 2480794 - RNA, 20 nt, Human
acuccugaggacagcugucc

SEQ ID NO: 2480795 - RNA, 13 nt, Human
acuccugcaaaau

SEQ ID NO: 2480796 - RNA, 15 nt, Human
acuccugcaaaauuu

SEQ ID NO: 2480797 - RNA, 20 nt, Human
acuccuaggcaggacaugcu

SEQ ID NO: 2480798 - RNA, 18 nt, Human
acuccuaggcaggacaug

SEQ ID NO: 2480799 - RNA, 16 nt, Human
acuccuaggcaggaca

SEQ ID NO: 2480800 - RNA, 13 nt, Human
acuccuaggcagg

SEQ ID NO: 2480801 - RNA, 16 nt, Human
acuccuaggaaaauac

SEQ ID NO: 2480802 - RNA, 15 nt, Human
acuccugaccucaag

SEQ ID NO: 2480803 - RNA, 20 nt, Human
acuccagcuggguuggaaaa

SEQ ID NO: 2480804 - RNA, 20 nt, Human
acuccagccugggcgacaga

SEQ ID NO: 2480805 - RNA, 20 nt, Human
acuccagccugggugacaga

SEQ ID NO: 2480806 - RNA, 21 nt, Human
acuccagccugggcaacacag

SEQ ID NO: 2480807 - RNA, 14 nt, Human
acuccaggagagga

SEQ ID NO: 2480808 - RNA, 13 nt, Human
acuccaggagagg

SEQ ID NO: 2480809 - RNA, 16 nt, Human
acuccacaucugccuu

SEQ ID NO: 2480810 - RNA, 15 nt, Human
acuccacaucugccu

SEQ ID NO: 2480811 - RNA, 14 nt, Human
acuccacaucugcc

SEQ ID NO: 2480812 - RNA, 13 nt, Human
acuccacaucugc

SEQ ID NO: 2480813 - RNA, 18 nt, Human
acuccagccugggcaaca

SEQ ID NO: 2480814 - RNA, 23 nt, Human
acuccagccugggcaacagagca

SEQ ID NO: 2480815 - RNA, 15 nt, Human
acuccagccugggcg

SEQ ID NO: 2480816 - RNA, 18 nt, Human
acuccagccugggcgaca

SEQ ID NO: 2480817 - RNA, 17 nt, Human
acuccaauuaaggauuu

SEQ ID NO: 2480818 - RNA, 21 nt, Human
acuccaauuaaggauuuuaug

SEQ ID NO: 2480819 - RNA, 19 nt, Human
acuccaagauauggacaca

SEQ ID NO: 2480820 - RNA, 20 nt, Human
acucauuuuaaaaaauggaa

SEQ ID NO: 2480821 - RNA, 18 nt, Human
acuccaacagaagaacug

SEQ ID NO: 2480822 - RNA, 19 nt, Human
acuccaacagaagaacugu

SEQ ID NO: 2480823 - RNA, 21 nt, Human
uccuagauggcagucacugaa

SEQ ID NO: 2480824 - RNA, 20 nt, Human
uccuagcacuuugggaggcc

SEQ ID NO: 2480825 - RNA, 14 nt, Human
uccuaggcauuugc

SEQ ID NO: 2480826 - RNA, 18 nt, Human
uccuagcacacacuuuug

SEQ ID NO: 2480827 - RNA, 19 nt, Human
uccuagcacacacuuuugg

SEQ ID NO: 2480828 - RNA, 17 nt, Human
uccuagcacacacuuuu

SEQ ID NO: 2480829 - RNA, 22 nt, Human
uccuagauggcagucacugaau

SEQ ID NO: 2480830 - RNA, 13 nt, Human
uccuagaugcucu

SEQ ID NO: 2480831 - RNA, 18 nt, Human
uccuagauggcagucacu

SEQ ID NO: 2480832 - RNA, 15 nt, Human
uccguuggccacucc

SEQ ID NO: 2480833 - RNA, 13 nt, Human
uccguuggccacu

SEQ ID NO: 2480834 - RNA, 22 nt, Human
uccguugggccccagccuucuu

SEQ ID NO: 2480835 - RNA, 17 nt, Human
uccuaaaacaccuggua

SEQ ID NO: 2480836 - RNA, 22 nt, Human
uccuaaaacaaaagcucaucca

SEQ ID NO: 2480837 - RNA, 15 nt, Human
uccuaaaacaaauag

SEQ ID NO: 2480838 - RNA, 23 nt, Human
uccuaaaauaagggcagagucac

SEQ ID NO: 2480839 - RNA, 14 nt, Human
uccuagaguagagu

SEQ ID NO: 2480840 - RNA, 22 nt, Human
uccuaaaauaagggcagaguca

SEQ ID NO: 2480841 - RNA, 17 nt, Human
uccuaaaauaagggcag

SEQ ID NO: 2480842 - RNA, 23 nt, Human
ucccuuugacgccaucccagccc

SEQ ID NO: 2480843 - RNA, 22 nt, Human
ucccuuugacgccaucccagcc

SEQ ID NO: 2480844 - RNA, 17 nt, Human
ucccuuugcccagaaag

SEQ ID NO: 2480845 - RNA, 14 nt, Human
uccguauuucagac

SEQ ID NO: 2480846 - RNA, 15 nt, Human
uccguauuucagacu

SEQ ID NO: 2480847 - RNA, 13 nt, Human
uccguauuucaga

SEQ ID NO: 2480848 - RNA, 18 nt, Human
uccgugaaaacggagcug

SEQ ID NO: 2480849 - RNA, 23 nt, Human
uccgucuaguuaacauuucaagg

SEQ ID NO: 2480850 - RNA, 22 nt, Human
uccgucuaagucaugagcugag

SEQ ID NO: 2480851 - RNA, 20 nt, Human
uccgucuaagucaugagcug

SEQ ID NO: 2480852 - RNA, 21 nt, Human
uccgugccuccaccaccacug

SEQ ID NO: 2480853 - RNA, 19 nt, Human
uccguuagcuccuguggcc

SEQ ID NO: 2480854 - RNA, 17 nt, Human
uccgugccuccaccacc

SEQ ID NO: 2480855 - RNA, 16 nt, Human
uccgugccuccaccac

SEQ ID NO: 2480856 - RNA, 20 nt, Human
uccgugagugaaccaucauu

SEQ ID NO: 2480857 - RNA, 18 nt, Human
ucccuuguucucuaaguu

SEQ ID NO: 2480858 - RNA, 14 nt, Human
ucccuuguucucua

SEQ ID NO: 2480859 - RNA, 13 nt, Human
ucccuuguucucu

SEQ ID NO: 2480860 - RNA, 15 nt, Human
ucccuugugugugug

SEQ ID NO: 2480861 - RNA, 16 nt, Human
ucccuugugcgugggu

SEQ ID NO: 2480862 - RNA, 13 nt, Human
ucccuugugugug

SEQ ID NO: 2480863 - RNA, 15 nt, Human
ucccuuucccuucuu

SEQ ID NO: 2480864 - RNA, 13 nt, Human
ucccuuucccuuc

SEQ ID NO: 2480865 - RNA, 21 nt, Human
ucccuuucacaaaauuuuauu

SEQ ID NO: 2480866 - RNA, 22 nt, Human
ucccuuuccaaaugcccagcuu

SEQ ID NO: 2480867 - RNA, 22 nt, Human
ucccuuacgugaguccuggcau

SEQ ID NO: 2480868 - RNA, 18 nt, Human
ucccuuacgugaguccug

SEQ ID NO: 2480869 - RNA, 19 nt, Human
ucccuugguggcaagagcc

SEQ ID NO: 2480870 - RNA, 21 nt, Human
ucccuucaaccauuccccaug

SEQ ID NO: 2480871 - RNA, 11 nt, Human
ucccuucaacc

SEQ ID NO: 2480872 - RNA, 15 nt, Human
ucccuguuccccaga

SEQ ID NO: 2480873 - RNA, 16 nt, Human
ucccuguuccccagag

SEQ ID NO: 2480874 - RNA, 18 nt, Human
ucccuguuccccagagaa

SEQ ID NO: 2480875 - RNA, 17 nt, Human
ucccuguguugucucua

SEQ ID NO: 2480876 - RNA, 22 nt, Human
ucccuguauuuucuuucucuac

SEQ ID NO: 2480877 - RNA, 14 nt, Human
ucccugucaccaag

SEQ ID NO: 2480878 - RNA, 15 nt, Human
ucccugucaccaagc

SEQ ID NO: 2480879 - RNA, 17 nt, Human
ucccuguuccccagaga

SEQ ID NO: 2480880 - RNA, 20 nt, Human
ucccuguugacgaagucucu

SEQ ID NO: 2480881 - RNA, 14 nt, Human
ucccuguugaagcu

SEQ ID NO: 2480882 - RNA, 11 nt, Human
ucccuguuuaa

SEQ ID NO: 2480883 - RNA, 21 nt, Human
ucccuguugacgaagucucuu

SEQ ID NO: 2480884 - RNA, 18 nt, Human
ucccuguuggucgguggg

SEQ ID NO: 2480885 - RNA, 18 nt, Human
ucccuguuuaauauuuaa

SEQ ID NO: 2480886 - RNA, 16 nt, Human
ucccuguuuaauauuu

SEQ ID NO: 2480887 - RNA, 15 nt, Human
ucccuguuuaauauu

SEQ ID NO: 2480888 - RNA, 14 nt, Human
ucccuguuuaauau

SEQ ID NO: 2480889 - RNA, 22 nt, Human
ucccuguuuaauauuuaaacag

SEQ ID NO: 2480890 - RNA, 21 nt, Human
ucccuguuuaauauuuaaaca

SEQ ID NO: 2480891 - RNA, 19 nt, Human
ucccuguuugaagccugcc

SEQ ID NO: 2480892 - RNA, 23 nt, Human
acuccugcacacgcuccuuccuc

SEQ ID NO: 2480893 - RNA, 23 nt, Human
ucccugguggcagcucaccucuc

SEQ ID NO: 2480894 - RNA, 17 nt, Human
ucccugguucugaugau

SEQ ID NO: 2480895 - RNA, 16 nt, Human
ucccugguucugauga

SEQ ID NO: 2480896 - RNA, 14 nt, Human
ucccuguaaccucu

SEQ ID NO: 2480897 - RNA, 12 nt, Human
ucccugguucug

SEQ ID NO: 2480898 - RNA, 18 nt, Human
acuccugcaaaauuuuau

SEQ ID NO: 2480899 - RNA, 18 nt, Human
ucccuguaaccucuucag

SEQ ID NO: 2480900 - RNA, 19 nt, Human
ucccuguaaccucuucaga

SEQ ID NO: 2480901 - RNA, 22 nt, Human
ucccuguaaccucuucagaggc

SEQ ID NO: 2480902 - RNA, 23 nt, Human
ucccuguaaccucuucagaggcc

SEQ ID NO: 2480903 - RNA, 20 nt, Human
ucccuguaauuguuguuugu

SEQ ID NO: 2480904 - RNA, 21 nt, Human
ucccuguaauuguuguuugua

SEQ ID NO: 2480905 - RNA, 21 nt, Human
ucccuguauuuucuuucucua

SEQ ID NO: 2480906 - RNA, 20 nt, Human
ucccuguauuuucuuucucu

SEQ ID NO: 2480907 - RNA, 21 nt, Human
acucugcuucucugacuucug

SEQ ID NO: 2480908 - RNA, 20 nt, Human
acucugcuucucugacuucu

SEQ ID NO: 2480909 - RNA, 18 nt, Human
acucugcuucucugacuu

SEQ ID NO: 2480910 - RNA, 17 nt, Human
acucugcuucucugacu

SEQ ID NO: 2480911 - RNA, 16 nt, Human
acucugcauucuagua

SEQ ID NO: 2480912 - RNA, 22 nt, Human
acucugcacaugucuuguacau

SEQ ID NO: 2480913 - RNA, 21 nt, Human
acucugcacaugucuuguaca

SEQ ID NO: 2480914 - RNA, 19 nt, Human
acucugcacaugucuugua

SEQ ID NO: 2480915 - RNA, 18 nt, Human
acucugcacaugucuugu

SEQ ID NO: 2480916 - RNA, 23 nt, Human
acucugcacuacuccucugcagu

SEQ ID NO: 2480917 - RNA, 19 nt, Human
acucugcacuacuccucug

SEQ ID NO: 2480918 - RNA, 15 nt, Human
acucugcacuacucc

SEQ ID NO: 2480919 - RNA, 14 nt, Human
acucugcacuacuc

SEQ ID NO: 2480920 - RNA, 21 nt, Human
acucuggagguuuguuuagaa

SEQ ID NO: 2480921 - RNA, 22 nt, Human
acucuuaucucagucaugcaua

SEQ ID NO: 2480922 - RNA, 13 nt, Human
acucuuaucucag

SEQ ID NO: 2480923 - RNA, 12 nt, Human
acucuuaucuca

SEQ ID NO: 2480924 - RNA, 22 nt, Human
acucugcuucucugacuucugc

SEQ ID NO: 2480925 - RNA, 15 nt, Human
acucugcuugauuuu

SEQ ID NO: 2480926 - RNA, 16 nt, Human
acucugcuugauuuuu

SEQ ID NO: 2480927 - RNA, 18 nt, Human
acucugcuugauuuuugc

SEQ ID NO: 2480928 - RNA, 23 nt, Human
acucugcuuugacugagcagacu

SEQ ID NO: 2480929 - RNA, 20 nt, Human
acucugcuuugacugagcag

SEQ ID NO: 2480930 - RNA, 22 nt, Human
acucugcuuugacugagcagac

SEQ ID NO: 2480931 - RNA, 13 nt, Human
acucugcuuguua

SEQ ID NO: 2480932 - RNA, 14 nt, Human
acucugcuuugacu

SEQ ID NO: 2480933 - RNA, 16 nt, Human
acucugcuucucugac

SEQ ID NO: 2480934 - RNA, 19 nt, Human
acucuccucugcugcuggc

SEQ ID NO: 2480935 - RNA, 18 nt, Human
acucuccucugcugcugg

SEQ ID NO: 2480936 - RNA, 17 nt, Human
acucugaaaucugaaga

SEQ ID NO: 2480937 - RNA, 14 nt, Human
acucugaaaucuga

SEQ ID NO: 2480938 - RNA, 14 nt, Human
acucucccccaccc

SEQ ID NO: 2480939 - RNA, 17 nt, Human
acucugcacaugucuug

SEQ ID NO: 2480940 - RNA, 13 nt, Human
acucugcacaugu

SEQ ID NO: 2480941 - RNA, 11 nt, Human
acucugcacau

SEQ ID NO: 2480942 - RNA, 14 nt, Human
acucugcacauacg

SEQ ID NO: 2480943 - RNA, 17 nt, Human
acucugaagccucuggg

SEQ ID NO: 2480944 - RNA, 16 nt, Human
acucugaagccucugg

SEQ ID NO: 2480945 - RNA, 15 nt, Human
acucugaagccucug

SEQ ID NO: 2480946 - RNA, 14 nt, Human
acucugaagccucu

SEQ ID NO: 2480947 - RNA, 9 nt, Human
acucugaac

SEQ ID NO: 2480948 - RNA, 16 nt, Human
acucugaaaugaagau

SEQ ID NO: 2480949 - RNA, 19 nt, Human
acucugaagccucugggaa

SEQ ID NO: 2480950 - RNA, 18 nt, Human
acucugaagccucuggga

SEQ ID NO: 2480951 - RNA, 12 nt, Human
acucugaagcug

SEQ ID NO: 2480952 - RNA, 23 nt, Human
acucugaagcugacgaacuucca

SEQ ID NO: 2480953 - RNA, 20 nt, Human
acucugaagggcaucaugca

SEQ ID NO: 2480954 - RNA, 21 nt, Human
acucugaagggcaucaugcau

SEQ ID NO: 2480955 - RNA, 19 nt, Human
acucgggcuccugugcccu

SEQ ID NO: 2480956 - RNA, 18 nt, Human
acucgggcuccugugccc

SEQ ID NO: 2480957 - RNA, 17 nt, Human
acucgggcuccugugcc

SEQ ID NO: 2480958 - RNA, 15 nt, Human
acucgggcuccugug

SEQ ID NO: 2480959 - RNA, 16 nt, Human
acucucauuccccagg

SEQ ID NO: 2480960 - RNA, 17 nt, Human
acucucauuccccaggu

SEQ ID NO: 2480961 - RNA, 21 nt, Human
acucucauuccccagguggcu

SEQ ID NO: 2480962 - RNA, 14 nt, Human
acucuccaaccugg

SEQ ID NO: 2480963 - RNA, 17 nt, Human
acucuccaaccuggaca

SEQ ID NO: 2480964 - RNA, 14 nt, Human
acucgggcuccugu

SEQ ID NO: 2480965 - RNA, 20 nt, Human
acucgggaggcugagacagg

SEQ ID NO: 2480966 - RNA, 22 nt, Human
acucgggaggcugagacaggag

SEQ ID NO: 2480967 - RNA, 23 nt, Human
acucgcuugugcagaaaacauug

SEQ ID NO: 2480968 - RNA, 17 nt, Human
acucgcuugugcagaaa

SEQ ID NO: 2480969 - RNA, 16 nt, Human
acucggcacccugcaa

SEQ ID NO: 2480970 - RNA, 15 nt, Human
acucgcuugugcaga

SEQ ID NO: 2480971 - RNA, 20 nt, Human
acucgcuucccccauagcca

SEQ ID NO: 2480972 - RNA, 17 nt, Human
acucuccucugcugcug

SEQ ID NO: 2480973 - RNA, 10 nt, Human
acucuccccc

SEQ ID NO: 2480974 - RNA, 14 nt, Human
acucuccccacacu

SEQ ID NO: 2480975 - RNA, 15 nt, Human
acucuccccacacua

SEQ ID NO: 2480976 - RNA, 13 nt, Human
acucuccaucuua

SEQ ID NO: 2480977 - RNA, 14 nt, Human
acucucccauggcu

SEQ ID NO: 2480978 - RNA, 19 nt, Human
acucuccaaccuggacaac

SEQ ID NO: 2480979 - RNA, 23 nt, Human
acucucccauggcuuaaugcuuc

SEQ ID NO: 2480980 - RNA, 15 nt, Human
acucucccauggcuu

SEQ ID NO: 2480981 - RNA, 10 nt, Human
acucucccca

SEQ ID NO: 2480982 - RNA, 11 nt, Human
acucuccccac

SEQ ID NO: 2480983 - RNA, 12 nt, Human
acucuccccaca

SEQ ID NO: 2480984 - RNA, 23 nt, Human
acucgcgacaaugcaaaccauca

SEQ ID NO: 2480985 - RNA, 20 nt, Human
acucgcgacaaugcaaacca

SEQ ID NO: 2480986 - RNA, 12 nt, Human
acucgcuucccc

SEQ ID NO: 2480987 - RNA, 15 nt, Human
acucgcuucccccau

SEQ ID NO: 2480988 - RNA, 19 nt, Human
uccuaggcauuugcugaau

SEQ ID NO: 2480989 - RNA, 20 nt, Human
uccuaggcuccaccccaucc

SEQ ID NO: 2480990 - RNA, 13 nt, Human
uccuaggccacac

SEQ ID NO: 2480991 - RNA, 18 nt, Human
acucgcgacaaugcaaac

SEQ ID NO: 2480992 - RNA, 22 nt, Human
uccuaggcuccaccccauccag

SEQ ID NO: 2480993 - RNA, 17 nt, Human
uccuagggccuggguuu

SEQ ID NO: 2480994 - RNA, 19 nt, Human
uccuagggaaggguggugg

SEQ ID NO: 2480995 - RNA, 20 nt, Human
uccuagggaaaaguucauag

SEQ ID NO: 2480996 - RNA, 19 nt, Human
uccucccucccucuuuccc

SEQ ID NO: 2480997 - RNA, 19 nt, Human
uccucccucugaggcugua

SEQ ID NO: 2480998 - RNA, 14 nt, Human
uccucccugcaucu

SEQ ID NO: 2480999 - RNA, 13 nt, Human
uccucuccacccu

SEQ ID NO: 2481000 - RNA, 18 nt, Human
uccucccucugaggcugu

SEQ ID NO: 2481001 - RNA, 13 nt, Human
uccucccuccugc

SEQ ID NO: 2481002 - RNA, 17 nt, Human
uccucccucccucuuuc

SEQ ID NO: 2481003 - RNA, 15 nt, Human
uccucccucccucuu

SEQ ID NO: 2481004 - RNA, 16 nt, Human
uccucuccacugccuu

SEQ ID NO: 2481005 - RNA, 15 nt, Human
uccucuccacugccu

SEQ ID NO: 2481006 - RNA, 12 nt, Human
uccucuccccag

SEQ ID NO: 2481007 - RNA, 14 nt, Human
uccucuccacugcc

SEQ ID NO: 2481008 - RNA, 13 nt, Human
uccucuccacugc

SEQ ID NO: 2481009 - RNA, 13 nt, Human
uccucuccaccua

SEQ ID NO: 2481010 - RNA, 16 nt, Human
uccucuccacccuccc

SEQ ID NO: 2481011 - RNA, 14 nt, Human
uccucuccacccuc

SEQ ID NO: 2481012 - RNA, 12 nt, Human
uccucuccacug

SEQ ID NO: 2481013 - RNA, 22 nt, Human
uccucauacccacccccaccca

SEQ ID NO: 2481014 - RNA, 16 nt, Human
uccuccccuccuccug

SEQ ID NO: 2481015 - RNA, 18 nt, Human
uccuccccuccuccugga

SEQ ID NO: 2481016 - RNA, 20 nt, Human
uccuccccuccuccuggacu

SEQ ID NO: 2481017 - RNA, 22 nt, Human
uccuccccuccuccuggacucc

SEQ ID NO: 2481018 - RNA, 13 nt, Human
uccuccccuuccc

SEQ ID NO: 2481019 - RNA, 14 nt, Human
uccuccccuucccu

SEQ ID NO: 2481020 - RNA, 15 nt, Human
uccuccccuucccug

SEQ ID NO: 2481021 - RNA, 17 nt, Human
uccuccccuucccugca

SEQ ID NO: 2481022 - RNA, 18 nt, Human
uccuccccuucccugcaa

SEQ ID NO: 2481023 - RNA, 18 nt, Human
uccucauacccaccccca

SEQ ID NO: 2481024 - RNA, 14 nt, Human
uccucauacccacc

SEQ ID NO: 2481025 - RNA, 20 nt, Human
uccucagccuccucaucugg

SEQ ID NO: 2481026 - RNA, 11 nt, Human
uccucagccuu

SEQ ID NO: 2481027 - RNA, 22 nt, Human
uccucagguggccaugccucag

SEQ ID NO: 2481028 - RNA, 16 nt, Human
uccucauaaaaagcaa

SEQ ID NO: 2481029 - RNA, 23 nt, Human
uccucauaaaaagcaaaacaaaa

SEQ ID NO: 2481030 - RNA, 20 nt, Human
uccucaguuuaauccuucua

SEQ ID NO: 2481031 - RNA, 23 nt, Human
uccucagguggccaugccucagc

SEQ ID NO: 2481032 - RNA, 17 nt, Human
uccucagagaauuucua

SEQ ID NO: 2481033 - RNA, 20 nt, Human
uccucagagaauuucuacca

SEQ ID NO: 2481034 - RNA, 19 nt, Human
uccucagaucauccagaag

SEQ ID NO: 2481035 - RNA, 20 nt, Human
uccucagaucuucugugggu

SEQ ID NO: 2481036 - RNA, 22 nt, Human
uccucacuuccauacagcucua

SEQ ID NO: 2481037 - RNA, 21 nt, Human
uccucacuuccauacagcucu

SEQ ID NO: 2481038 - RNA, 22 nt, Human
uccucacuggguggggugagga

SEQ ID NO: 2481039 - RNA, 13 nt, Human
uccucacccccag

SEQ ID NO: 2481040 - RNA, 16 nt, Human
uccucacccccagcuu

SEQ ID NO: 2481041 - RNA, 20 nt, Human
uccucacccccagcuuugcu

SEQ ID NO: 2481042 - RNA, 14 nt, Human
uccucaccacaugc

SEQ ID NO: 2481043 - RNA, 20 nt, Human
uccucaccccgucugggguu

SEQ ID NO: 2481044 - RNA, 15 nt, Human
uccucaccccugucc

SEQ ID NO: 2481045 - RNA, 14 nt, Human
uccucaccccuguc

SEQ ID NO: 2481046 - RNA, 13 nt, Human
uccucaccccugu

SEQ ID NO: 2481047 - RNA, 12 nt, Human
uccucaccccug

SEQ ID NO: 2481048 - RNA, 19 nt, Human
uccucaccccuguccucac

SEQ ID NO: 2481049 - RNA, 17 nt, Human
uccucaccccuguccuc

SEQ ID NO: 2481050 - RNA, 17 nt, Human
uccucacucccuuccca

SEQ ID NO: 2481051 - RNA, 19 nt, Human
uccucacucccuucccaua

SEQ ID NO: 2481052 - RNA, 21 nt, Human
uccucacugcucccugaagcc

SEQ ID NO: 2481053 - RNA, 20 nt, Human
uccucacugcucccugaagc

SEQ ID NO: 2481054 - RNA, 17 nt, Human
uccucacugcucccuga

SEQ ID NO: 2481055 - RNA, 15 nt, Human
uccucacugcucccu

SEQ ID NO: 2481056 - RNA, 16 nt, Human
uccucacucccuucua

SEQ ID NO: 2481057 - RNA, 13 nt, Human
uccucacugcucc

SEQ ID NO: 2481058 - RNA, 21 nt, Human
uccucacucccuucccauaag

SEQ ID NO: 2481059 - RNA, 18 nt, Human
uccucacuggccaucccu

SEQ ID NO: 2481060 - RNA, 17 nt, Human
uccucacuggccauccc

SEQ ID NO: 2481061 - RNA, 13 nt, Human
uccucacuggcca

SEQ ID NO: 2481062 - RNA, 23 nt, Human
uccucacugcucccugaagccag

SEQ ID NO: 2481063 - RNA, 22 nt, Human
uccucacuggccaucccucgug

SEQ ID NO: 2481064 - RNA, 13 nt, Human
uccucacugggug

SEQ ID NO: 2481065 - RNA, 14 nt, Human
uccucacugggugg

SEQ ID NO: 2481066 - RNA, 15 nt, Human
uccucacuggguggg

SEQ ID NO: 2481067 - RNA, 15 nt, Human
uccucaaacacugca

SEQ ID NO: 2481068 - RNA, 14 nt, Human
uccucaaacacugc

SEQ ID NO: 2481069 - RNA, 23 nt, Human
acucuuaucucagucaugcauaa

SEQ ID NO: 2481070 - RNA, 14 nt, Human
uccucaaacaacac

SEQ ID NO: 2481071 - RNA, 19 nt, Human
acucuuauugcccacgcug

SEQ ID NO: 2481072 - RNA, 16 nt, Human
acucuuauugcccacg

SEQ ID NO: 2481073 - RNA, 18 nt, Human
uccucaaggggccauccu

SEQ ID NO: 2481074 - RNA, 15 nt, Human
uccucaaggggccau

SEQ ID NO: 2481075 - RNA, 14 nt, Human
uccucaaggggcca

SEQ ID NO: 2481076 - RNA, 17 nt, Human
uccucaagaaauaaaag

SEQ ID NO: 2481077 - RNA, 23 nt, Human
uccucaagaaauaaaaggaagcc

SEQ ID NO: 2481078 - RNA, 16 nt, Human
uccucaaacacugcag

SEQ ID NO: 2481079 - RNA, 21 nt, Human
uccuagagggaggggccuagg

SEQ ID NO: 2481080 - RNA, 17 nt, Human
uccucaacacccaacug

SEQ ID NO: 2481081 - RNA, 23 nt, Human
uccucaacucaccuaauguuuau

SEQ ID NO: 2481082 - RNA, 18 nt, Human
uccucaaguccccaagau

SEQ ID NO: 2481083 - RNA, 21 nt, Human
uccucaaggggccauccuguc

SEQ ID NO: 2481084 - RNA, 12 nt, Human
uccucaauccag

SEQ ID NO: 2481085 - RNA, 13 nt, Human
uccucaauccagc

SEQ ID NO: 2481086 - RNA, 14 nt, Human
uccucaauccagcu

SEQ ID NO: 2481087 - RNA, 20 nt, Human
uccucacaucuuucacacuu

SEQ ID NO: 2481088 - RNA, 20 nt, Human
uccucacaacauggugucug

SEQ ID NO: 2481089 - RNA, 13 nt, Human
uccccuugcccag

SEQ ID NO: 2481090 - RNA, 15 nt, Human
uccccuugcccaggg

SEQ ID NO: 2481091 - RNA, 16 nt, Human
uccccuugcccagggc

SEQ ID NO: 2481092 - RNA, 21 nt, Human
uccccuuuucuuuucuacccu

SEQ ID NO: 2481093 - RNA, 20 nt, Human
uccccuuuucuuuucuaccc

SEQ ID NO: 2481094 - RNA, 16 nt, Human
ucccgaauagcuggga

SEQ ID NO: 2481095 - RNA, 15 nt, Human
ucccgaauagcuggg

SEQ ID NO: 2481096 - RNA, 16 nt, Human
uccccuucucucaucu

SEQ ID NO: 2481097 - RNA, 15 nt, Human
uccccuucucucauc

SEQ ID NO: 2481098 - RNA, 18 nt, Human
uccccuucucucaucucu

SEQ ID NO: 2481099 - RNA, 14 nt, Human
uccccuugagcuga

SEQ ID NO: 2481100 - RNA, 16 nt, Human
uccccuucugaaucag

SEQ ID NO: 2481101 - RNA, 15 nt, Human
uccccuugagcugag

SEQ ID NO: 2481102 - RNA, 16 nt, Human
uccccuugagcugaga

SEQ ID NO: 2481103 - RNA, 13 nt, Human
uccccuucucuca

SEQ ID NO: 2481104 - RNA, 16 nt, Human
uccccuccuccacucu

SEQ ID NO: 2481105 - RNA, 14 nt, Human
uccccuccuccacu

SEQ ID NO: 2481106 - RNA, 18 nt, Human
uccccuccucuccccuac

SEQ ID NO: 2481107 - RNA, 16 nt, Human
uccccuccucuccccu

SEQ ID NO: 2481108 - RNA, 14 nt, Human
uccccuccucuccc

SEQ ID NO: 2481109 - RNA, 14 nt, Human
uccccuccucacuc

SEQ ID NO: 2481110 - RNA, 22 nt, Human
uccccuccaaccuggggggcag

SEQ ID NO: 2481111 - RNA, 13 nt, Human
uccccuccaaccu

SEQ ID NO: 2481112 - RNA, 16 nt, Human
uccccucaggacugca

SEQ ID NO: 2481113 - RNA, 15 nt, Human
uccccucagcuccag

SEQ ID NO: 2481114 - RNA, 12 nt, Human
uccccuccaacc

SEQ ID NO: 2481115 - RNA, 14 nt, Human
uccccucccugggu

SEQ ID NO: 2481116 - RNA, 13 nt, Human
uccccucccuggg

SEQ ID NO: 2481117 - RNA, 12 nt, Human
uccccuccacug

SEQ ID NO: 2481118 - RNA, 21 nt, Human
uccccucccuggcucccauga

SEQ ID NO: 2481119 - RNA, 15 nt, Human
uccccuccacuguca

SEQ ID NO: 2481120 - RNA, 13 nt, Human
uccccucauucag

SEQ ID NO: 2481121 - RNA, 16 nt, Human
uccccuccaagguaug

SEQ ID NO: 2481122 - RNA, 22 nt, Human
uccccuccuaccccucccagcu

SEQ ID NO: 2481123 - RNA, 20 nt, Human
uccccuccuaccccucccag

SEQ ID NO: 2481124 - RNA, 12 nt, Human
uccccuccucca

SEQ ID NO: 2481125 - RNA, 19 nt, Human
uccccuccuaccccuccca

SEQ ID NO: 2481126 - RNA, 17 nt, Human
uccccuccuaccccucc

SEQ ID NO: 2481127 - RNA, 14 nt, Human
uccccuccuacccc

SEQ ID NO: 2481128 - RNA, 20 nt, Human
uccccuccgccaggcgagau

SEQ ID NO: 2481129 - RNA, 13 nt, Human
uccccuccuaccc

SEQ ID NO: 2481130 - RNA, 13 nt, Human
uccccucccuguc

SEQ ID NO: 2481131 - RNA, 16 nt, Human
uccccucccuggguuc

SEQ ID NO: 2481132 - RNA, 14 nt, Human
uccccucccuguca

SEQ ID NO: 2481133 - RNA, 17 nt, Human
uccccuccgccaggcga

SEQ ID NO: 2481134 - RNA, 20 nt, Human
uccccucacagccucugacc

SEQ ID NO: 2481135 - RNA, 19 nt, Human
uccccucacagccucugac

SEQ ID NO: 2481136 - RNA, 18 nt, Human
uccccucacagccucuga

SEQ ID NO: 2481137 - RNA, 17 nt, Human
uccccucacagccucug

SEQ ID NO: 2481138 - RNA, 17 nt, Human
uccccucaccuccucua

SEQ ID NO: 2481139 - RNA, 15 nt, Human
uccccucaccuccuc

SEQ ID NO: 2481140 - RNA, 13 nt, Human
uccccucacugga

SEQ ID NO: 2481141 - RNA, 12 nt, Human
uccccucacugg

SEQ ID NO: 2481142 - RNA, 19 nt, Human
uccccucacugauggacaa

SEQ ID NO: 2481143 - RNA, 21 nt, Human
uccccucacagccucugaccc

SEQ ID NO: 2481144 - RNA, 12 nt, Human
uccccucagcuc

SEQ ID NO: 2481145 - RNA, 14 nt, Human
uccccucagcucca

SEQ ID NO: 2481146 - RNA, 16 nt, Human
acucaagaagcaggcu

SEQ ID NO: 2481147 - RNA, 15 nt, Human
acucaagaagcaggc

SEQ ID NO: 2481148 - RNA, 14 nt, Human
acucaagaagcagg

SEQ ID NO: 2481149 - RNA, 13 nt, Human
acucaagaagcag

SEQ ID NO: 2481150 - RNA, 15 nt, Human
acucaacccucucag

SEQ ID NO: 2481151 - RNA, 13 nt, Human
acucaacccucuc

SEQ ID NO: 2481152 - RNA, 19 nt, Human
acucaagaagcaggcuaca

SEQ ID NO: 2481153 - RNA, 16 nt, Human
uccccucacagccucu

SEQ ID NO: 2481154 - RNA, 21 nt, Human
ucccggacugcaagcagggcu

SEQ ID NO: 2481155 - RNA, 15 nt, Human
ucccgcugcugcugc

SEQ ID NO: 2481156 - RNA, 13 nt, Human
ucccgcugcugcu

SEQ ID NO: 2481157 - RNA, 21 nt, Human
ucccggagggcccugagcuga

SEQ ID NO: 2481158 - RNA, 16 nt, Human
ucccggagggcccuga

SEQ ID NO: 2481159 - RNA, 18 nt, Human
ucccggagguuggguggg

SEQ ID NO: 2481160 - RNA, 18 nt, Human
ucccuauuagagaagaga

SEQ ID NO: 2481161 - RNA, 21 nt, Human
ucccuauuuuuuuucuguuau

SEQ ID NO: 2481162 - RNA, 22 nt, Human
ucccuauuuuuuuucuguuaua

SEQ ID NO: 2481163 - RNA, 22 nt, Human
ucccucaacaagggagagaccu

SEQ ID NO: 2481164 - RNA, 18 nt, Human
ucccucaacaagggagag

SEQ ID NO: 2481165 - RNA, 20 nt, Human
ucccucaaaugacccaaaga

SEQ ID NO: 2481166 - RNA, 19 nt, Human
ucccucaaaugacccaaag

SEQ ID NO: 2481167 - RNA, 17 nt, Human
ucccggcacuccaugcu

SEQ ID NO: 2481168 - RNA, 20 nt, Human
ucccucaaagcacacgucau

SEQ ID NO: 2481169 - RNA, 13 nt, Human
ucccucaaaugac

SEQ ID NO: 2481170 - RNA, 20 nt, Human
ucccucaccuguagcagcca

SEQ ID NO: 2481171 - RNA, 14 nt, Human
ucccucaccuguag

SEQ ID NO: 2481172 - RNA, 13 nt, Human
ucccucaccugua

SEQ ID NO: 2481173 - RNA, 12 nt, Human
ucccucaccugu

SEQ ID NO: 2481174 - RNA, 21 nt, Human
ucccucacccugagccccuuc

SEQ ID NO: 2481175 - RNA, 20 nt, Human
ucccucacccugagccccuu

SEQ ID NO: 2481176 - RNA, 19 nt, Human
ucccucacccugagccccu

SEQ ID NO: 2481177 - RNA, 17 nt, Human
ucccucacccugagccc

SEQ ID NO: 2481178 - RNA, 15 nt, Human
ucccucacccugagc

SEQ ID NO: 2481179 - RNA, 22 nt, Human
ucccucacccacuuuggccucc

SEQ ID NO: 2481180 - RNA, 17 nt, Human
ucccucacccacccaca

SEQ ID NO: 2481181 - RNA, 23 nt, Human
ucccucaacaagggagagaccuc

SEQ ID NO: 2481182 - RNA, 16 nt, Human
ucccucaauucccccu

SEQ ID NO: 2481183 - RNA, 16 nt, Human
ucccucaaccccacca

SEQ ID NO: 2481184 - RNA, 20 nt, Human
ucccgcucagcccucccugc

SEQ ID NO: 2481185 - RNA, 16 nt, Human
ucccgcucagcccucc

SEQ ID NO: 2481186 - RNA, 15 nt, Human
ucccgcucagcccuc

SEQ ID NO: 2481187 - RNA, 14 nt, Human
ucccgcucagcccu

SEQ ID NO: 2481188 - RNA, 15 nt, Human
ucccgccccuucccc

SEQ ID NO: 2481189 - RNA, 21 nt, Human
ucccgccccuucccacucacc

SEQ ID NO: 2481190 - RNA, 13 nt, Human
ucccgcucagccc

SEQ ID NO: 2481191 - RNA, 19 nt, Human
ucccgccucuucuucuuca

SEQ ID NO: 2481192 - RNA, 21 nt, Human
ucccgccucuucuucuucaga

SEQ ID NO: 2481193 - RNA, 18 nt, Human
ucccgaauagcugggacu

SEQ ID NO: 2481194 - RNA, 20 nt, Human
ucccgaguagcugggacuac

SEQ ID NO: 2481195 - RNA, 18 nt, Human
ucccgccagacuguuaga

SEQ ID NO: 2481196 - RNA, 22 nt, Human
ucccgcaaacccccuuugugcu

SEQ ID NO: 2481197 - RNA, 21 nt, Human
ucccgcaaacccccuuugugc

SEQ ID NO: 2481198 - RNA, 19 nt, Human
ucccgauucacccugucca

SEQ ID NO: 2481199 - RNA, 23 nt, Human
ucccgaaccccaaggagggagau

SEQ ID NO: 2481200 - RNA, 22 nt, Human
uccccuuuucuuuucuacccua

SEQ ID NO: 2481201 - RNA, 22 nt, Human
acuauccauaguggacauuguu

SEQ ID NO: 2481202 - RNA, 18 nt, Human
acuaucccggcugcccuu

SEQ ID NO: 2481203 - RNA, 16 nt, Human
acuaucuuggugaauu

SEQ ID NO: 2481204 - RNA, 22 nt, Human
acuaucuuuuugcuuacaguuu

SEQ ID NO: 2481205 - RNA, 16 nt, Human
acuaucccggcugccc

SEQ ID NO: 2481206 - RNA, 17 nt, Human
acuaucccggcugcccu

SEQ ID NO: 2481207 - RNA, 22 nt, Human
acuaucaguuuguccuguagag

SEQ ID NO: 2481208 - RNA, 20 nt, Human
acuaucagcccaagaugcuu

SEQ ID NO: 2481209 - RNA, 22 nt, Human
acuaucaugucaaacgugaaaa

SEQ ID NO: 2481210 - RNA, 22 nt, Human
acuaugaaguuuuuuuuauaca

SEQ ID NO: 2481211 - RNA, 18 nt, Human
acuaugaacuacaaagcu

SEQ ID NO: 2481212 - RNA, 18 nt, Human
acuauguugcccaggcag

SEQ ID NO: 2481213 - RNA, 17 nt, Human
acuauguugcccaggca

SEQ ID NO: 2481214 - RNA, 23 nt, Human
acucaacauguuacugaccagca

SEQ ID NO: 2481215 - RNA, 17 nt, Human
acucaacauguuacuga

SEQ ID NO: 2481216 - RNA, 20 nt, Human
acucaacauguuacugacca

SEQ ID NO: 2481217 - RNA, 21 nt, Human
acucaacauguuacugaccag

SEQ ID NO: 2481218 - RNA, 22 nt, Human
acucaacauguuacugaccagc

SEQ ID NO: 2481219 - RNA, 19 nt, Human
acucaaauuaaucuuucuu

SEQ ID NO: 2481220 - RNA, 19 nt, Human
acucaacaugagucaagag

SEQ ID NO: 2481221 - RNA, 16 nt, Human
acucaacaugagucaa

SEQ ID NO: 2481222 - RNA, 15 nt, Human
acucaacaugaguca

SEQ ID NO: 2481223 - RNA, 14 nt, Human
acuauuaagaggca

SEQ ID NO: 2481224 - RNA, 18 nt, Human
acuauuauccccauuucu

SEQ ID NO: 2481225 - RNA, 21 nt, Human
acuauuauaauuuaaugcaug

SEQ ID NO: 2481226 - RNA, 21 nt, Human
acuauuaagaggcagaaaauu

SEQ ID NO: 2481227 - RNA, 17 nt, Human
acuauuauaauuuaaug

SEQ ID NO: 2481228 - RNA, 23 nt, Human
acuaugaaugggcaaaacugaau

SEQ ID NO: 2481229 - RNA, 22 nt, Human
acuaugaaucuauuauacugua

SEQ ID NO: 2481230 - RNA, 13 nt, Human
acuaugaaucuau

SEQ ID NO: 2481231 - RNA, 21 nt, Human
acuaugaacuucucucagacu

SEQ ID NO: 2481232 - RNA, 19 nt, Human
acuaugaacuucucucaga

SEQ ID NO: 2481233 - RNA, 18 nt, Human
acuaugaacuucucucag

SEQ ID NO: 2481234 - RNA, 23 nt, Human
acuauguugcccaggcaggucuu

SEQ ID NO: 2481235 - RNA, 20 nt, Human
acuauguugcccaggcaggu

SEQ ID NO: 2481236 - RNA, 19 nt, Human
acuauguugcccaggcagg

SEQ ID NO: 2481237 - RNA, 24 nt, Human
uccccaccgcagacaggaccaggg

SEQ ID NO: 2481238 - RNA, 10 nt, Human
uccccacacu

SEQ ID NO: 2481239 - RNA, 14 nt, Human
uccccaccugggac

SEQ ID NO: 2481240 - RNA, 13 nt, Human
uccccaccuggga

SEQ ID NO: 2481241 - RNA, 18 nt, Human
uccccaccuucaauuccu

SEQ ID NO: 2481242 - RNA, 20 nt, Human
uccccaccuucaauuccugg

SEQ ID NO: 2481243 - RNA, 22 nt, Human
uccccaccuucaauuccugggc

SEQ ID NO: 2481244 - RNA, 23 nt, Human
uccccaccuucaauuccugggcc

SEQ ID NO: 2481245 - RNA, 20 nt, Human
uccccaccuucuucagccac

SEQ ID NO: 2481246 - RNA, 12 nt, Human
uccccaggccag

SEQ ID NO: 2481247 - RNA, 14 nt, Human
uccccacgcccucc

SEQ ID NO: 2481248 - RNA, 16 nt, Human
uccccaggcaccucac

SEQ ID NO: 2481249 - RNA, 23 nt, Human
uccccaggaggccagccuugacc

SEQ ID NO: 2481250 - RNA, 22 nt, Human
uccccaggccaggccaccagga

SEQ ID NO: 2481251 - RNA, 19 nt, Human
uccccaggccaggccacca

SEQ ID NO: 2481252 - RNA, 16 nt, Human
uccccaggccaggcca

SEQ ID NO: 2481253 - RNA, 14 nt, Human
uccccaggccaggc

SEQ ID NO: 2481254 - RNA, 23 nt, Human
uccccaggccaggccaccaggau

SEQ ID NO: 2481255 - RNA, 11 nt, Human
uccccaggccc

SEQ ID NO: 2481256 - RNA, 13 nt, Human
uccccaggcccca

SEQ ID NO: 2481257 - RNA, 19 nt, Human
uccccaggccccaggaagc

SEQ ID NO: 2481258 - RNA, 23 nt, Human
uccccaggccguggcugcccaca

SEQ ID NO: 2481259 - RNA, 21 nt, Human
uccccaggccguggcugccca

SEQ ID NO: 2481260 - RNA, 20 nt, Human
uccccaggccccaggaagcc

SEQ ID NO: 2481261 - RNA, 21 nt, Human
uccccaggccccaggaagccg

SEQ ID NO: 2481262 - RNA, 19 nt, Human
uccccaggccguggcugcc

SEQ ID NO: 2481263 - RNA, 23 nt, Human
acuauaauuuaccugaagucuuu

SEQ ID NO: 2481264 - RNA, 17 nt, Human
acuauagccuaggugac

SEQ ID NO: 2481265 - RNA, 21 nt, Human
acuauaguccagcuuuguucu

SEQ ID NO: 2481266 - RNA, 17 nt, Human
acuauauagagauguuu

SEQ ID NO: 2481267 - RNA, 16 nt, Human
acuauauagagauguu

SEQ ID NO: 2481268 - RNA, 20 nt, Human
acuauagcccagguccucug

SEQ ID NO: 2481269 - RNA, 14 nt, Human
acuauagcccaggu

SEQ ID NO: 2481270 - RNA, 18 nt, Human
acuauaucuguauauaaa

SEQ ID NO: 2481271 - RNA, 17 nt, Human
acuauaucuguauauaa

SEQ ID NO: 2481272 - RNA, 14 nt, Human
acuauaucuguaua

SEQ ID NO: 2481273 - RNA, 18 nt, Human
acuauauagagauguuuu

SEQ ID NO: 2481274 - RNA, 13 nt, Human
acuauauauguga

SEQ ID NO: 2481275 - RNA, 22 nt, Human
acuauaucuguauauaaaauau

SEQ ID NO: 2481276 - RNA, 13 nt, Human
acuauaugugaau

SEQ ID NO: 2481277 - RNA, 18 nt, Human
acuauauuaucaugcaaa

SEQ ID NO: 2481278 - RNA, 15 nt, Human
acuauauuguacaca

SEQ ID NO: 2481279 - RNA, 17 nt, Human
acuaaccagcagaaaug

SEQ ID NO: 2481280 - RNA, 23 nt, Human
acuacaggugugagucaccaagc

SEQ ID NO: 2481281 - RNA, 15 nt, Human
acuacaguccuccca

SEQ ID NO: 2481282 - RNA, 17 nt, Human
acuaaaucucuaauaug

SEQ ID NO: 2481283 - RNA, 16 nt, Human
acuaaaucucuaauau

SEQ ID NO: 2481284 - RNA, 14 nt, Human
acuaaaucucuaau

SEQ ID NO: 2481285 - RNA, 23 nt, Human
acuaaccagggaagcugucccuc

SEQ ID NO: 2481286 - RNA, 23 nt, Human
acuaaauagcauguauugugucu

SEQ ID NO: 2481287 - RNA, 20 nt, Human
acuaaauagcauguauugug

SEQ ID NO: 2481288 - RNA, 19 nt, Human
acuaaauagcauguauugu

SEQ ID NO: 2481289 - RNA, 18 nt, Human
acuaaauagcauguauug

SEQ ID NO: 2481290 - RNA, 16 nt, Human
acuaaauagcauguau

SEQ ID NO: 2481291 - RNA, 15 nt, Human
acuaaauagcaugua

SEQ ID NO: 2481292 - RNA, 16 nt, Human
acuaaccagcagaaau

SEQ ID NO: 2481293 - RNA, 13 nt, Human
acuaaccacgcug

SEQ ID NO: 2481294 - RNA, 14 nt, Human
acuaaaauauuuau

SEQ ID NO: 2481295 - RNA, 21 nt, Human
acuaaaagauauaagugcugu

SEQ ID NO: 2481296 - RNA, 20 nt, Human
acuaaaagauauaagugcug

SEQ ID NO: 2481297 - RNA, 19 nt, Human
acuaaaagauauaagugcu

SEQ ID NO: 2481298 - RNA, 16 nt, Human
acuaaaagauauaagu

SEQ ID NO: 2481299 - RNA, 20 nt, Human
acuaaaaguucuucuccaau

SEQ ID NO: 2481300 - RNA, 23 nt, Human
acuaaaagauauaagugcuguau

SEQ ID NO: 2481301 - RNA, 12 nt, Human
acuaaaagaucg

SEQ ID NO: 2481302 - RNA, 22 nt, Human
acuaaaguauguaaaguaugua

SEQ ID NO: 2481303 - RNA, 14 nt, Human
acuaaaguauguaa

SEQ ID NO: 2481304 - RNA, 20 nt, Human
acuaaagcaguggacaccag

SEQ ID NO: 2481305 - RNA, 13 nt, Human
acuaaacauuuug

SEQ ID NO: 2481306 - RNA, 14 nt, Human
acuaaacauuuugu

SEQ ID NO: 2481307 - RNA, 12 nt, Human
acuaaacucauu

SEQ ID NO: 2481308 - RNA, 14 nt, Human
acuaaacucauuua

SEQ ID NO: 2481309 - RNA, 16 nt, Human
acuaaacucauuuaua

SEQ ID NO: 2481310 - RNA, 16 nt, Human
acuaaacucucuuugg

SEQ ID NO: 2481311 - RNA, 15 nt, Human
acuaaacucucuuug

SEQ ID NO: 2481312 - RNA, 23 nt, Human
acuaaacucucuuugggaauguu

SEQ ID NO: 2481313 - RNA, 23 nt, Human
acuaaacugguuuguugcagcca

SEQ ID NO: 2481314 - RNA, 15 nt, Human
acguuuccugagaag

SEQ ID NO: 2481315 - RNA, 14 nt, Human
acguuuuauugugu

SEQ ID NO: 2481316 - RNA, 15 nt, Human
acguuuuauuguguu

SEQ ID NO: 2481317 - RNA, 16 nt, Human
acguuuuauuguguuu

SEQ ID NO: 2481318 - RNA, 18 nt, Human
acguuuuauuguguuuuu

SEQ ID NO: 2481319 - RNA, 14 nt, Human
acguuucuaaaggc

SEQ ID NO: 2481320 - RNA, 16 nt, Human
acguuuacuuaucuua

SEQ ID NO: 2481321 - RNA, 12 nt, Human
acguuuccauca

SEQ ID NO: 2481322 - RNA, 13 nt, Human
acuaaaaauacaa

SEQ ID NO: 2481323 - RNA, 22 nt, Human
acguuuuuguaaauuaaucuuu

SEQ ID NO: 2481324 - RNA, 14 nt, Human
acguuuuuccuuua

SEQ ID NO: 2481325 - RNA, 13 nt, Human
acguuuuuccuuu

SEQ ID NO: 2481326 - RNA, 20 nt, Human
acguuuuuaauauaaagccu

SEQ ID NO: 2481327 - RNA, 17 nt, Human
acuaaaaagaaggaaaa

SEQ ID NO: 2481328 - RNA, 13 nt, Human
acuaaaaauauua

SEQ ID NO: 2481329 - RNA, 11 nt, Human
acuaaaagaua

SEQ ID NO: 2481330 - RNA, 16 nt, Human
acuaaaaagaaggaaa

SEQ ID NO: 2481331 - RNA, 12 nt, Human
acuaaaaauaca

SEQ ID NO: 2481332 - RNA, 13 nt, Human
uccagccugggug

SEQ ID NO: 2481333 - RNA, 17 nt, Human
uccagccuggggucugg

SEQ ID NO: 2481334 - RNA, 17 nt, Human
uccagccugggcgacag

SEQ ID NO: 2481335 - RNA, 20 nt, Human
uccagccugggcgacagagc

SEQ ID NO: 2481336 - RNA, 24 nt, Human
uccagccugggugacagagcaagu

SEQ ID NO: 2481337 - RNA, 20 nt, Human
uccagcuauaacaguaggga

SEQ ID NO: 2481338 - RNA, 12 nt, Human
uccagccugggu

SEQ ID NO: 2481339 - RNA, 14 nt, Human
uccagcucaccagc

SEQ ID NO: 2481340 - RNA, 21 nt, Human
uccagcuauuuuuauuuguuu

SEQ ID NO: 2481341 - RNA, 12 nt, Human
acguuucuaaag

SEQ ID NO: 2481342 - RNA, 18 nt, Human
acguuuacaagccccccc

SEQ ID NO: 2481343 - RNA, 14 nt, Human
uccccacacuccua

SEQ ID NO: 2481344 - RNA, 20 nt, Human
uccccaauaauugcagaacu

SEQ ID NO: 2481345 - RNA, 21 nt, Human
uccccaauaauugcagaacua

SEQ ID NO: 2481346 - RNA, 23 nt, Human
uccccaagauucacaccugacuc

SEQ ID NO: 2481347 - RNA, 15 nt, Human
uccccaagccuggca

SEQ ID NO: 2481348 - RNA, 17 nt, Human
uccccaagaaagccuca

SEQ ID NO: 2481349 - RNA, 19 nt, Human
uccccaacccugccccugc

SEQ ID NO: 2481350 - RNA, 23 nt, Human
uccccaacagugugaaguuagaa

SEQ ID NO: 2481351 - RNA, 16 nt, Human
uccccaacccugcccc

SEQ ID NO: 2481352 - RNA, 17 nt, Human
uccccaacccugccccu

SEQ ID NO: 2481353 - RNA, 18 nt, Human
uccccaacccugccccug

SEQ ID NO: 2481354 - RNA, 20 nt, Human
uccccaacccugccccugcc

SEQ ID NO: 2481355 - RNA, 19 nt, Human
uccccaacagugugaaguu

SEQ ID NO: 2481356 - RNA, 18 nt, Human
uccccaacagugugaagu

SEQ ID NO: 2481357 - RNA, 16 nt, Human
uccccaacagugugaa

SEQ ID NO: 2481358 - RNA, 15 nt, Human
uccccaacaguguga

SEQ ID NO: 2481359 - RNA, 21 nt, Human
uccccaacagugugaaguuag

SEQ ID NO: 2481360 - RNA, 20 nt, Human
uccccaacagugugaaguua

SEQ ID NO: 2481361 - RNA, 18 nt, Human
uccccaacauguaauaag

SEQ ID NO: 2481362 - RNA, 14 nt, Human
uccccaacagugug

SEQ ID NO: 2481363 - RNA, 23 nt, Human
uccccaacagcgacauagcccau

SEQ ID NO: 2481364 - RNA, 14 nt, Human
uccccaaauccgaa

SEQ ID NO: 2481365 - RNA, 19 nt, Human
uccccaaauccgaaccucc

SEQ ID NO: 2481366 - RNA, 16 nt, Human
uccccaaaccugcaag

SEQ ID NO: 2481367 - RNA, 23 nt, Human
uccccaaaucaauacacuaguug

SEQ ID NO: 2481368 - RNA, 18 nt, Human
uccccaaaucaauacacu

SEQ ID NO: 2481369 - RNA, 18 nt, Human
uccccaaagucuuaaaau

SEQ ID NO: 2481370 - RNA, 20 nt, Human
ucccauuuuggaaguuuuca

SEQ ID NO: 2481371 - RNA, 16 nt, Human
uccccaaaaaccucac

SEQ ID NO: 2481372 - RNA, 22 nt, Human
uccccaaaaaccucacccgagg

SEQ ID NO: 2481373 - RNA, 19 nt, Human
ucccaucucacacaugagc

SEQ ID NO: 2481374 - RNA, 14 nt, Human
ucccaucucacaca

SEQ ID NO: 2481375 - RNA, 18 nt, Human
ucccauauccugccucag

SEQ ID NO: 2481376 - RNA, 15 nt, Human
ucccauauccugccu

SEQ ID NO: 2481377 - RNA, 13 nt, Human
ucccaucgcuguc

SEQ ID NO: 2481378 - RNA, 13 nt, Human
ucccaucucacac

SEQ ID NO: 2481379 - RNA, 15 nt, Human
ucccauaugccuggg

SEQ ID NO: 2481380 - RNA, 15 nt, Human
ucccauaggcccagu

SEQ ID NO: 2481381 - RNA, 14 nt, Human
ucccauaccaccca

SEQ ID NO: 2481382 - RNA, 17 nt, Human
ucccauagccaggaaac

SEQ ID NO: 2481383 - RNA, 22 nt, Human
ucccauaaccgcugauucucag

SEQ ID NO: 2481384 - RNA, 15 nt, Human
ucccauaagcuauag

SEQ ID NO: 2481385 - RNA, 22 nt, Human
ucccauaauuuucuucaugcaa

SEQ ID NO: 2481386 - RNA, 18 nt, Human
ucccauaaccgcugauuc

SEQ ID NO: 2481387 - RNA, 20 nt, Human
ucccagugucuuccuguggg

SEQ ID NO: 2481388 - RNA, 20 nt, Human
ucccaguucaggagucccaa

SEQ ID NO: 2481389 - RNA, 23 nt, Human
ucccaguucaggagucccaagga

SEQ ID NO: 2481390 - RNA, 16 nt, Human
acuacaguccucccau

SEQ ID NO: 2481391 - RNA, 16 nt, Human
acuacauaaacugacu

SEQ ID NO: 2481392 - RNA, 13 nt, Human
acuacauaaacug

SEQ ID NO: 2481393 - RNA, 15 nt, Human
acuacagucaggaaa

SEQ ID NO: 2481394 - RNA, 23 nt, Human
acuacauaaacugacuuuauccu

SEQ ID NO: 2481395 - RNA, 17 nt, Human
acuacauaaacugacuu

SEQ ID NO: 2481396 - RNA, 17 nt, Human
acuacaucgcccuccac

SEQ ID NO: 2481397 - RNA, 20 nt, Human
acuacaugagaacaaacaga

SEQ ID NO: 2481398 - RNA, 19 nt, Human
acuacaucgcccuccacau

SEQ ID NO: 2481399 - RNA, 12 nt, Human
acuacaugcacu

SEQ ID NO: 2481400 - RNA, 14 nt, Human
acuacaugcacuug

SEQ ID NO: 2481401 - RNA, 18 nt, Human
acuacaugugguuuauag

SEQ ID NO: 2481402 - RNA, 15 nt, Human
acuacaugugguuua

SEQ ID NO: 2481403 - RNA, 20 nt, Human
acuacaugcagcccaugccc

SEQ ID NO: 2481404 - RNA, 18 nt, Human
ucccagguaccagcugcg

SEQ ID NO: 2481405 - RNA, 17 nt, Human
ucccagguaccagcugc

SEQ ID NO: 2481406 - RNA, 16 nt, Human
ucccagguaccagcug

SEQ ID NO: 2481407 - RNA, 19 nt, Human
ucccagguaagcaggagga

SEQ ID NO: 2481408 - RNA, 18 nt, Human
ucccagguaagcaggagg

SEQ ID NO: 2481409 - RNA, 18 nt, Human
ucccaggguagcccgccu

SEQ ID NO: 2481410 - RNA, 16 nt, Human
ucccaggguagcccgc

SEQ ID NO: 2481411 - RNA, 22 nt, Human
ucccaggggcccaaggcggccc

SEQ ID NO: 2481412 - RNA, 21 nt, Human
ucccaggggcccaaggcggcc

SEQ ID NO: 2481413 - RNA, 22 nt, Human
ucccaggguagcccgccugcca

SEQ ID NO: 2481414 - RNA, 21 nt, Human
ucccaggguagcccgccugcc

SEQ ID NO: 2481415 - RNA, 23 nt, Human
ucccaggguagcccgccugccag

SEQ ID NO: 2481416 - RNA, 19 nt, Human
acuacaugugguuuauaga

SEQ ID NO: 2481417 - RNA, 18 nt, Human
ucccaggggcuggcuuca

SEQ ID NO: 2481418 - RNA, 13 nt, Human
acuacauucauuu

SEQ ID NO: 2481419 - RNA, 18 nt, Human
ucccaggggaccacaccu

SEQ ID NO: 2481420 - RNA, 15 nt, Human
ucccagugacacuuc

SEQ ID NO: 2481421 - RNA, 19 nt, Human
ucccagugacacuucagag

SEQ ID NO: 2481422 - RNA, 22 nt, Human
ucccagugacacuucagagagc

SEQ ID NO: 2481423 - RNA, 20 nt, Human
ucccagugacacuucagaga

SEQ ID NO: 2481424 - RNA, 14 nt, Human
ucccaguggccuca

SEQ ID NO: 2481425 - RNA, 18 nt, Human
ucccaguggccucaaccc

SEQ ID NO: 2481426 - RNA, 19 nt, Human
ucccaguggccucaacccu

SEQ ID NO: 2481427 - RNA, 21 nt, Human
ucccaguggcugcugcccagg

SEQ ID NO: 2481428 - RNA, 19 nt, Human
ucccaguggcugcugccca

SEQ ID NO: 2481429 - RNA, 18 nt, Human
ucccaguggcugcugccc

SEQ ID NO: 2481430 - RNA, 17 nt, Human
ucccaguggcugcugcc

SEQ ID NO: 2481431 - RNA, 16 nt, Human
ucccaguggcugcugc

SEQ ID NO: 2481432 - RNA, 15 nt, Human
ucccaguggcugcug

SEQ ID NO: 2481433 - RNA, 20 nt, Human
ucccaguggccucaacccuc

SEQ ID NO: 2481434 - RNA, 22 nt, Human
ucccaguggccucaacccuccc

SEQ ID NO: 2481435 - RNA, 20 nt, Human
ucccagugggaggggcaggc

SEQ ID NO: 2481436 - RNA, 17 nt, Human
ucccagugggaggggca

SEQ ID NO: 2481437 - RNA, 15 nt, Human
ucccagugggagggg

SEQ ID NO: 2481438 - RNA, 14 nt, Human
ucccagugggaggg

SEQ ID NO: 2481439 - RNA, 15 nt, Human
ucccagugggaggcg

SEQ ID NO: 2481440 - RNA, 10 nt, Human
ucccaguggg

SEQ ID NO: 2481441 - RNA, 23 nt, Human
ucccaguggcugcugcccaggcc

SEQ ID NO: 2481442 - RNA, 22 nt, Human
ucccaguggcugcugcccaggc

SEQ ID NO: 2481443 - RNA, 15 nt, Human
ucccagugucuuccu

SEQ ID NO: 2481444 - RNA, 23 nt, Human
ucccagugggaggggcaggcuga

SEQ ID NO: 2481445 - RNA, 22 nt, Human
ucccagugggaggggcaggcug

SEQ ID NO: 2481446 - RNA, 21 nt, Human
ucccagugggaggggcaggcu

SEQ ID NO: 2481447 - RNA, 19 nt, Human
ucccagugucuuccugugg

SEQ ID NO: 2481448 - RNA, 17 nt, Human
ucccagugucuuccugu

SEQ ID NO: 2481449 - RNA, 15 nt, Human
ucccaguucaggagu

SEQ ID NO: 2481450 - RNA, 19 nt, Human
ucccagugccgagaaggaa

SEQ ID NO: 2481451 - RNA, 22 nt, Human
ucccagugccgagaaggaagcc

SEQ ID NO: 2481452 - RNA, 16 nt, Human
ucccagucucuggcag

SEQ ID NO: 2481453 - RNA, 22 nt, Human
ucccagucuacccagagaagcc

SEQ ID NO: 2481454 - RNA, 15 nt, Human
ucccagugaauucuu

SEQ ID NO: 2481455 - RNA, 19 nt, Human
ucccagguaccagcugcgc

SEQ ID NO: 2481456 - RNA, 21 nt, Human
ucccagguaccagcugcgcuu

SEQ ID NO: 2481457 - RNA, 20 nt, Human
acuguacagacagaaaaaac

SEQ ID NO: 2481458 - RNA, 17 nt, Human
acuguaauuuuauauga

SEQ ID NO: 2481459 - RNA, 14 nt, Human
acuguacaaaguag

SEQ ID NO: 2481460 - RNA, 15 nt, Human
acuguacaaaguaga

SEQ ID NO: 2481461 - RNA, 16 nt, Human
acuguaauaaagauga

SEQ ID NO: 2481462 - RNA, 22 nt, Human
acuguaaugaaccgcugaauau

SEQ ID NO: 2481463 - RNA, 21 nt, Human
acuguaagacucauucccuag

SEQ ID NO: 2481464 - RNA, 23 nt, Human
acuguaaugaaccgcugaauaug

SEQ ID NO: 2481465 - RNA, 12 nt, Human
acuguaauuuag

SEQ ID NO: 2481466 - RNA, 19 nt, Human
acuguaauuugugauacaa

SEQ ID NO: 2481467 - RNA, 13 nt, Human
acuguacaaagua

SEQ ID NO: 2481468 - RNA, 23 nt, Human
acuguacaugaaaacacauuuuu

SEQ ID NO: 2481469 - RNA, 13 nt, Human
acuguacaugaaa

SEQ ID NO: 2481470 - RNA, 14 nt, Human
acuguacaugaaaa

SEQ ID NO: 2481471 - RNA, 19 nt, Human
acuguagaaugauuucaug

SEQ ID NO: 2481472 - RNA, 20 nt, Human
acuguagaaugauuucaugc

SEQ ID NO: 2481473 - RNA, 18 nt, Human
acuguagaaugauuucau

SEQ ID NO: 2481474 - RNA, 15 nt, Human
acuguagaaaugaug

SEQ ID NO: 2481475 - RNA, 23 nt, Human
acuguagaaaagggaacugaaca

SEQ ID NO: 2481476 - RNA, 14 nt, Human
acuguacuccuccc

SEQ ID NO: 2481477 - RNA, 13 nt, Human
acuguacuccucc

SEQ ID NO: 2481478 - RNA, 16 nt, Human
acugggaugagccgcu

SEQ ID NO: 2481479 - RNA, 17 nt, Human
acuggggagcccgucuc

SEQ ID NO: 2481480 - RNA, 13 nt, Human
acuggggagcccg

SEQ ID NO: 2481481 - RNA, 21 nt, Human
acuggggagcccgucucagug

SEQ ID NO: 2481482 - RNA, 17 nt, Human
acuggggaugugggagg

SEQ ID NO: 2481483 - RNA, 16 nt, Human
acuggggaugugggag

SEQ ID NO: 2481484 - RNA, 18 nt, Human
acuggggaugugggaggg

SEQ ID NO: 2481485 - RNA, 17 nt, Human
acuggggauuggguggg

SEQ ID NO: 2481486 - RNA, 19 nt, Human
acuggguacuuguggacac

SEQ ID NO: 2481487 - RNA, 12 nt, Human
acuggggcacuu

SEQ ID NO: 2481488 - RNA, 21 nt, Human
acuggggauugggugggcagg

SEQ ID NO: 2481489 - RNA, 16 nt, Human
acuguaaggcaaucau

SEQ ID NO: 2481490 - RNA, 23 nt, Human
acuggguacuuguggacacagcu

SEQ ID NO: 2481491 - RNA, 20 nt, Human
acuggguacuuguggacaca

SEQ ID NO: 2481492 - RNA, 17 nt, Human
acugggagaaaugaaaa

SEQ ID NO: 2481493 - RNA, 13 nt, Human
ucgcuccuguguc

SEQ ID NO: 2481494 - RNA, 14 nt, Human
ucgcuccugcccac

SEQ ID NO: 2481495 - RNA, 12 nt, Human
ucgcuccugugu

SEQ ID NO: 2481496 - RNA, 23 nt, Human
acugggagaggugccagcaacug

SEQ ID NO: 2481497 - RNA, 22 nt, Human
acugggagaggugccagcaacu

SEQ ID NO: 2481498 - RNA, 19 nt, Human
acugggagaggugccagca

SEQ ID NO: 2481499 - RNA, 12 nt, Human
acugggagccua

SEQ ID NO: 2481500 - RNA, 23 nt, Human
acugggagccuacccacccccag

SEQ ID NO: 2481501 - RNA, 13 nt, Human
acugggcaaugau

SEQ ID NO: 2481502 - RNA, 18 nt, Human
acugggcaaugauggcaa

SEQ ID NO: 2481503 - RNA, 22 nt, Human
acugggcuuggggaccagagcu

SEQ ID NO: 2481504 - RNA, 22 nt, Human
acugggaugggaggagaggaca

SEQ ID NO: 2481505 - RNA, 13 nt, Human
ucgcgacaaugca

SEQ ID NO: 2481506 - RNA, 14 nt, Human
ucgcgacaaugcaa

SEQ ID NO: 2481507 - RNA, 23 nt, Human
ucgccuuucccaggugcuacacc

SEQ ID NO: 2481508 - RNA, 21 nt, Human
ucgccuuagcauguuugcuga

SEQ ID NO: 2481509 - RNA, 20 nt, Human
ucgccuuagcauguuugcug

SEQ ID NO: 2481510 - RNA, 17 nt, Human
ucgaggacagggaggug

SEQ ID NO: 2481511 - RNA, 14 nt, Human
ucgaggacagggag

SEQ ID NO: 2481512 - RNA, 16 nt, Human
ucgccuguaaucucac

SEQ ID NO: 2481513 - RNA, 14 nt, Human
ucgccuuagcaugu

SEQ ID NO: 2481514 - RNA, 22 nt, Human
ucgccuuagcacuaccacuccu

SEQ ID NO: 2481515 - RNA, 20 nt, Human
ucgaggacuguauuugugac

SEQ ID NO: 2481516 - RNA, 18 nt, Human
ucgaggcccagcgaccuc

SEQ ID NO: 2481517 - RNA, 19 nt, Human
ucgaggacuguauuuguga

SEQ ID NO: 2481518 - RNA, 20 nt, Human
ucgagcagggugcugugggu

SEQ ID NO: 2481519 - RNA, 22 nt, Human
ucgagcaguccugccucagccu

SEQ ID NO: 2481520 - RNA, 14 nt, Human
ucgagcaugccugg

SEQ ID NO: 2481521 - RNA, 13 nt, Human
ucgaggacaggga

SEQ ID NO: 2481522 - RNA, 14 nt, Human
ucgagcagggugcu

SEQ ID NO: 2481523 - RNA, 17 nt, Human
ucgagcaguccugccuc

SEQ ID NO: 2481524 - RNA, 21 nt, Human
ucgagcaguccugccucagcc

SEQ ID NO: 2481525 - RNA, 13 nt, Human
ucgaccugccucg

SEQ ID NO: 2481526 - RNA, 22 nt, Human
ucgaccugcggcugcugugugc

SEQ ID NO: 2481527 - RNA, 20 nt, Human
ucgaccugcggcugcugugu

SEQ ID NO: 2481528 - RNA, 14 nt, Human
ucgacucagccuca

SEQ ID NO: 2481529 - RNA, 21 nt, Human
ucgacucaggauccagucccu

SEQ ID NO: 2481530 - RNA, 16 nt, Human
ucgacucaggauccag

SEQ ID NO: 2481531 - RNA, 14 nt, Human
ucgacucaggaucc

SEQ ID NO: 2481532 - RNA, 16 nt, Human
ucgacucagccucagg

SEQ ID NO: 2481533 - RNA, 16 nt, Human
ucgacugugaccugug

SEQ ID NO: 2481534 - RNA, 17 nt, Human
ucgacugugaccugugg

SEQ ID NO: 2481535 - RNA, 19 nt, Human
ucgaccugauuuacaguuu

SEQ ID NO: 2481536 - RNA, 18 nt, Human
ucgaccugauuuacaguu

SEQ ID NO: 2481537 - RNA, 19 nt, Human
ucgaccccaaagccccuug

SEQ ID NO: 2481538 - RNA, 14 nt, Human
ucgaccccaaagcc

SEQ ID NO: 2481539 - RNA, 17 nt, Human
ucgaccaauucaacccu

SEQ ID NO: 2481540 - RNA, 12 nt, Human
ucgacacagagu

SEQ ID NO: 2481541 - RNA, 20 nt, Human
ucgaauuuuuauuauuuguu

SEQ ID NO: 2481542 - RNA, 13 nt, Human
uccuuuauaauga

SEQ ID NO: 2481543 - RNA, 23 nt, Human
uccuuuaggagggaguuaucuaa

SEQ ID NO: 2481544 - RNA, 14 nt, Human
uccuuccuguucug

SEQ ID NO: 2481545 - RNA, 17 nt, Human
uccuuccugucuuccug

SEQ ID NO: 2481546 - RNA, 19 nt, Human
uccuuccugucuuccugca

SEQ ID NO: 2481547 - RNA, 12 nt, Human
uccuuccugucu

SEQ ID NO: 2481548 - RNA, 13 nt, Human
uccuuccugucuu

SEQ ID NO: 2481549 - RNA, 14 nt, Human
uccuuccugucuuc

SEQ ID NO: 2481550 - RNA, 19 nt, Human
uccuuucacaaccuucugu

SEQ ID NO: 2481551 - RNA, 18 nt, Human
uccuuucacaaccuucug

SEQ ID NO: 2481552 - RNA, 16 nt, Human
uccuuucacaaccuuc

SEQ ID NO: 2481553 - RNA, 21 nt, Human
uccuuuauguggaaaacagaa

SEQ ID NO: 2481554 - RNA, 16 nt, Human
uccuuuauauuuagug

SEQ ID NO: 2481555 - RNA, 18 nt, Human
uccuuucaccccagggcc

SEQ ID NO: 2481556 - RNA, 19 nt, Human
uccuuucaccccagggccu

SEQ ID NO: 2481557 - RNA, 21 nt, Human
uccuuucaccccagggccuga

SEQ ID NO: 2481558 - RNA, 23 nt, Human
uccuuucagggaauuucaggaac

SEQ ID NO: 2481559 - RNA, 21 nt, Human
uccuuucagggaauuucagga

SEQ ID NO: 2481560 - RNA, 22 nt, Human
uccuuucagggaauuucaggaa

SEQ ID NO: 2481561 - RNA, 15 nt, Human
uccuuucaccacaug

SEQ ID NO: 2481562 - RNA, 20 nt, Human
uccuuucacaaccuucugug

SEQ ID NO: 2481563 - RNA, 17 nt, Human
uccuuucaccccagggc

SEQ ID NO: 2481564 - RNA, 19 nt, Human
uccuuucaaugguuugcaa

SEQ ID NO: 2481565 - RNA, 22 nt, Human
uccuuucuaacaaaaaaauaua

SEQ ID NO: 2481566 - RNA, 14 nt, Human
uccuuucuaaacaa

SEQ ID NO: 2481567 - RNA, 18 nt, Human
uccuuuccccagcccagg

SEQ ID NO: 2481568 - RNA, 13 nt, Human
uccuuucccucca

SEQ ID NO: 2481569 - RNA, 20 nt, Human
uccuuuccccagcccagggu

SEQ ID NO: 2481570 - RNA, 17 nt, Human
uccuuuccccagcccag

SEQ ID NO: 2481571 - RNA, 16 nt, Human
uccuuuccccagccca

SEQ ID NO: 2481572 - RNA, 14 nt, Human
uccuuucccuccac

SEQ ID NO: 2481573 - RNA, 20 nt, Human
uccuuucauuuacuguggcu

SEQ ID NO: 2481574 - RNA, 16 nt, Human
uccuuucauuuacugu

SEQ ID NO: 2481575 - RNA, 18 nt, Human
uccuuuccaaggcuucuc

SEQ ID NO: 2481576 - RNA, 17 nt, Human
uccuuuccaaggcuucu

SEQ ID NO: 2481577 - RNA, 15 nt, Human
uccuuuccccagccc

SEQ ID NO: 2481578 - RNA, 14 nt, Human
uccuuuccccagcc

SEQ ID NO: 2481579 - RNA, 13 nt, Human
uccuuuccccagc

SEQ ID NO: 2481580 - RNA, 13 nt, Human
ucgaacuggcugc

SEQ ID NO: 2481581 - RNA, 14 nt, Human
ucgaacuggcugca

SEQ ID NO: 2481582 - RNA, 15 nt, Human
ucgaacuggcugcaa

SEQ ID NO: 2481583 - RNA, 15 nt, Human
uccuuucuaaacaag

SEQ ID NO: 2481584 - RNA, 23 nt, Human
ucgaagcgcgccacucgcuuccc

SEQ ID NO: 2481585 - RNA, 14 nt, Human
ucgaagcucagccc

SEQ ID NO: 2481586 - RNA, 15 nt, Human
ucgaagcucagccca

SEQ ID NO: 2481587 - RNA, 16 nt, Human
ucgaagcucagcccac

SEQ ID NO: 2481588 - RNA, 15 nt, Human
ucgaauuuuuauuau

SEQ ID NO: 2481589 - RNA, 18 nt, Human
acugcugcaaggccuuuc

SEQ ID NO: 2481590 - RNA, 15 nt, Human
acugcugcaaggccu

SEQ ID NO: 2481591 - RNA, 11 nt, Human
acugcugcaag

SEQ ID NO: 2481592 - RNA, 18 nt, Human
acugcucuuguuucuuuu

SEQ ID NO: 2481593 - RNA, 15 nt, Human
acugcucuuguuucu

SEQ ID NO: 2481594 - RNA, 12 nt, Human
acugcucugaug

SEQ ID NO: 2481595 - RNA, 18 nt, Human
acugcuccccagcccugg

SEQ ID NO: 2481596 - RNA, 19 nt, Human
acugcucaucauuccuuga

SEQ ID NO: 2481597 - RNA, 23 nt, Human
acugcucaucauuccuugagaaa

SEQ ID NO: 2481598 - RNA, 16 nt, Human
acugcucaagaagaca

SEQ ID NO: 2481599 - RNA, 18 nt, Human
acugcucaagaagacaug

SEQ ID NO: 2481600 - RNA, 19 nt, Human
acugcuagucuuaagaacu

SEQ ID NO: 2481601 - RNA, 22 nt, Human
acugcuaggugggccagccccu

SEQ ID NO: 2481602 - RNA, 23 nt, Human
acugcuaggugggccagccccuc

SEQ ID NO: 2481603 - RNA, 16 nt, Human
acugcuaggugggcca

SEQ ID NO: 2481604 - RNA, 17 nt, Human
acugcuaggugggccag

SEQ ID NO: 2481605 - RNA, 20 nt, Human
acugcuaggugggccagccc

SEQ ID NO: 2481606 - RNA, 21 nt, Human
acugcuaggugggccagcccc

SEQ ID NO: 2481607 - RNA, 23 nt, Human
acugcuaggcgagugccaggacu

SEQ ID NO: 2481608 - RNA, 22 nt, Human
acugcuaggcgagugccaggac

SEQ ID NO: 2481609 - RNA, 21 nt, Human
acugcuaggcgagugccagga

SEQ ID NO: 2481610 - RNA, 20 nt, Human
acugcuaggcgagugccagg

SEQ ID NO: 2481611 - RNA, 19 nt, Human
acugcuaggcgagugccag

SEQ ID NO: 2481612 - RNA, 18 nt, Human
acugcuaggcgagugcca

SEQ ID NO: 2481613 - RNA, 18 nt, Human
acugcuacuguaauuuua

SEQ ID NO: 2481614 - RNA, 22 nt, Human
acugcuacuguaauuuuauaug

SEQ ID NO: 2481615 - RNA, 20 nt, Human
acugcgggaugguccugggg

SEQ ID NO: 2481616 - RNA, 21 nt, Human
acugcgggaugguccuggggc

SEQ ID NO: 2481617 - RNA, 18 nt, Human
acugcggggcuuggcuga

SEQ ID NO: 2481618 - RNA, 16 nt, Human
acugcggggcuuggcu

SEQ ID NO: 2481619 - RNA, 22 nt, Human
acugcgggaugguccuggggcu

SEQ ID NO: 2481620 - RNA, 23 nt, Human
acugcgacuuucugccuggagug

SEQ ID NO: 2481621 - RNA, 22 nt, Human
acugcgacuuucugccuggagu

SEQ ID NO: 2481622 - RNA, 21 nt, Human
acugcgacuuucugccuggag

SEQ ID NO: 2481623 - RNA, 19 nt, Human
acugcgacuuucugccugg

SEQ ID NO: 2481624 - RNA, 19 nt, Human
acugcgaucuucagagcag

SEQ ID NO: 2481625 - RNA, 18 nt, Human
acugcgaucuucagagca

SEQ ID NO: 2481626 - RNA, 23 nt, Human
acugcggagaaccuugugccugg

SEQ ID NO: 2481627 - RNA, 20 nt, Human
acugcggaaaaggaaggaaa

SEQ ID NO: 2481628 - RNA, 19 nt, Human
acugcgggaugguccuggg

SEQ ID NO: 2481629 - RNA, 18 nt, Human
acugcgacuuucugccug

SEQ ID NO: 2481630 - RNA, 17 nt, Human
acugcgacuuucugccu

SEQ ID NO: 2481631 - RNA, 15 nt, Human
acugcgacuuucugc

SEQ ID NO: 2481632 - RNA, 13 nt, Human
acugccuuugacc

SEQ ID NO: 2481633 - RNA, 16 nt, Human
acugccuuuggcagag

SEQ ID NO: 2481634 - RNA, 19 nt, Human
acugccuuuggcagaguuc

SEQ ID NO: 2481635 - RNA, 22 nt, Human
acugccuucucaacuccaaacu

SEQ ID NO: 2481636 - RNA, 21 nt, Human
acugccuugaauauccccucc

SEQ ID NO: 2481637 - RNA, 18 nt, Human
acugccuugaauaucccc

SEQ ID NO: 2481638 - RNA, 17 nt, Human
acugccuugaauauccc

SEQ ID NO: 2481639 - RNA, 11 nt, Human
acugccuuuga

SEQ ID NO: 2481640 - RNA, 22 nt, Human
acugccuugaauauccccuccc

SEQ ID NO: 2481641 - RNA, 18 nt, Human
acugccuuggcuucaggg

SEQ ID NO: 2481642 - RNA, 15 nt, Human
acugcaggggccgag

SEQ ID NO: 2481643 - RNA, 22 nt, Human
acugcagggccaggacugagcc

SEQ ID NO: 2481644 - RNA, 22 nt, Human
acugcagugaaagacaagcugc

SEQ ID NO: 2481645 - RNA, 21 nt, Human
acugcagugaaagacaagcug

SEQ ID NO: 2481646 - RNA, 14 nt, Human
acugcauacaaucu

SEQ ID NO: 2481647 - RNA, 16 nt, Human
acugcauaccaaccug

SEQ ID NO: 2481648 - RNA, 14 nt, Human
acugcuugaggaaa

SEQ ID NO: 2481649 - RNA, 15 nt, Human
acugcuugaggaaaa

SEQ ID NO: 2481650 - RNA, 18 nt, Human
acugcuugaggaaaacaa

SEQ ID NO: 2481651 - RNA, 20 nt, Human
acugcuucccauccuacccu

SEQ ID NO: 2481652 - RNA, 19 nt, Human
acugcuucccauccuaccc

SEQ ID NO: 2481653 - RNA, 17 nt, Human
acugcuucccauccuac

SEQ ID NO: 2481654 - RNA, 16 nt, Human
acugcuucccauccua

SEQ ID NO: 2481655 - RNA, 15 nt, Human
acugcuucccauccu

SEQ ID NO: 2481656 - RNA, 13 nt, Human
acugcuggcugcc

SEQ ID NO: 2481657 - RNA, 22 nt, Human
acuggauuaaacuuaaucuaaa

SEQ ID NO: 2481658 - RNA, 22 nt, Human
acuggcaaaaggaucuuugugg

SEQ ID NO: 2481659 - RNA, 12 nt, Human
acuggcaaaagg

SEQ ID NO: 2481660 - RNA, 13 nt, Human
acuggcaaacuuc

SEQ ID NO: 2481661 - RNA, 16 nt, Human
acuggcaaacuucaga

SEQ ID NO: 2481662 - RNA, 20 nt, Human
acuggcaaacuucagacuga

SEQ ID NO: 2481663 - RNA, 23 nt, Human
acugcuuccagugaggcucugcc

SEQ ID NO: 2481664 - RNA, 22 nt, Human
acugcuuccagugaggcucugc

SEQ ID NO: 2481665 - RNA, 21 nt, Human
acugcuuccagugaggcucug

SEQ ID NO: 2481666 - RNA, 18 nt, Human
acugcuuccagugaggcu

SEQ ID NO: 2481667 - RNA, 12 nt, Human
acugcugcuuuu

SEQ ID NO: 2481668 - RNA, 14 nt, Human
acugcugcuucucc

SEQ ID NO: 2481669 - RNA, 13 nt, Human
acugcugcugccu

SEQ ID NO: 2481670 - RNA, 21 nt, Human
acugcugcuuuuugagguggc

SEQ ID NO: 2481671 - RNA, 12 nt, Human
acugcuggcugc

SEQ ID NO: 2481672 - RNA, 18 nt, Human
acugcugcccagccucca

SEQ ID NO: 2481673 - RNA, 16 nt, Human
acugcugcccagccuc

SEQ ID NO: 2481674 - RNA, 21 nt, Human
acugcugcccagccuccaagc

SEQ ID NO: 2481675 - RNA, 17 nt, Human
acugcugcuagagccag

SEQ ID NO: 2481676 - RNA, 20 nt, Human
uccuucagugccuuauggaa

SEQ ID NO: 2481677 - RNA, 13 nt, Human
uccuucagugccu

SEQ ID NO: 2481678 - RNA, 11 nt, Human
uccuucauuuc

SEQ ID NO: 2481679 - RNA, 14 nt, Human
uccuucauuuccuc

SEQ ID NO: 2481680 - RNA, 22 nt, Human
uccuucagugccuuauggaaca

SEQ ID NO: 2481681 - RNA, 13 nt, Human
uccuucagccuga

SEQ ID NO: 2481682 - RNA, 11 nt, Human
uccuucagugc

SEQ ID NO: 2481683 - RNA, 12 nt, Human
uccuucagugcc

SEQ ID NO: 2481684 - RNA, 21 nt, Human
uccuucagcccucaccccugg

SEQ ID NO: 2481685 - RNA, 18 nt, Human
uccuucagcuuccauuuc

SEQ ID NO: 2481686 - RNA, 23 nt, Human
uccuucagggugaugccagguuc

SEQ ID NO: 2481687 - RNA, 18 nt, Human
uccuucagggugaugcca

SEQ ID NO: 2481688 - RNA, 12 nt, Human
uccuucagugca

SEQ ID NO: 2481689 - RNA, 19 nt, Human
uccuucccugggcugugcu

SEQ ID NO: 2481690 - RNA, 12 nt, Human
uccuucccuggg

SEQ ID NO: 2481691 - RNA, 15 nt, Human
uccuucccuucucca

SEQ ID NO: 2481692 - RNA, 20 nt, Human
uccuucccugggcugugcua

SEQ ID NO: 2481693 - RNA, 12 nt, Human
uccuucccuggc

SEQ ID NO: 2481694 - RNA, 14 nt, Human
uccuucccuggcuu

SEQ ID NO: 2481695 - RNA, 15 nt, Human
uccuucccuggcuug

SEQ ID NO: 2481696 - RNA, 15 nt, Human
uccuucauuuccucc

SEQ ID NO: 2481697 - RNA, 14 nt, Human
uccuuccaacagga

SEQ ID NO: 2481698 - RNA, 20 nt, Human
uccuuccaacaggagcuggg

SEQ ID NO: 2481699 - RNA, 21 nt, Human
uccuuccaacaggagcuggga

SEQ ID NO: 2481700 - RNA, 20 nt, Human
uccuucccaggaguggagga

SEQ ID NO: 2481701 - RNA, 17 nt, Human
uccuuccccuuucccca

SEQ ID NO: 2481702 - RNA, 12 nt, Human
uccuucccucuc

SEQ ID NO: 2481703 - RNA, 20 nt, Human
uccuuccuggagcccagagg

SEQ ID NO: 2481704 - RNA, 23 nt, Human
uccuuccuacacccuuggacuug

SEQ ID NO: 2481705 - RNA, 22 nt, Human
uccuuccuacacccuuggacuu

SEQ ID NO: 2481706 - RNA, 17 nt, Human
uccuuccucugagccuu

SEQ ID NO: 2481707 - RNA, 16 nt, Human
uccuuccucugaggcu

SEQ ID NO: 2481708 - RNA, 21 nt, Human
uccuuccuacacccuuggacu

SEQ ID NO: 2481709 - RNA, 16 nt, Human
uccuuccucacaccag

SEQ ID NO: 2481710 - RNA, 16 nt, Human
uccuuccucugagccu

SEQ ID NO: 2481711 - RNA, 21 nt, Human
uccuuccucacaccaggcuug

SEQ ID NO: 2481712 - RNA, 16 nt, Human
acuggcugccuccacu

SEQ ID NO: 2481713 - RNA, 14 nt, Human
acuggcugccucca

SEQ ID NO: 2481714 - RNA, 12 nt, Human
acuggcugccuc

SEQ ID NO: 2481715 - RNA, 20 nt, Human
acuggcugccagcuauuuuu

SEQ ID NO: 2481716 - RNA, 19 nt, Human
acuggcugccagcuauuuu

SEQ ID NO: 2481717 - RNA, 23 nt, Human
acuggcucucuccaggauccaga

SEQ ID NO: 2481718 - RNA, 17 nt, Human
acuggcucucuccagga

SEQ ID NO: 2481719 - RNA, 16 nt, Human
acuggcucucuccagg

SEQ ID NO: 2481720 - RNA, 22 nt, Human
acuggcugcaaaggguaucagg

SEQ ID NO: 2481721 - RNA, 22 nt, Human
acuggcucuccaagugccagag

SEQ ID NO: 2481722 - RNA, 21 nt, Human
acuggcucuccaagugccaga

SEQ ID NO: 2481723 - RNA, 20 nt, Human
acuggcucuccaagugccag

SEQ ID NO: 2481724 - RNA, 17 nt, Human
acuggcucuccaagugc

SEQ ID NO: 2481725 - RNA, 15 nt, Human
acuggcucucuccag

SEQ ID NO: 2481726 - RNA, 14 nt, Human
acuggcucucucca

SEQ ID NO: 2481727 - RNA, 16 nt, Human
acuggcucuccaagug

SEQ ID NO: 2481728 - RNA, 15 nt, Human
acuggcucuccaagu

SEQ ID NO: 2481729 - RNA, 14 nt, Human
acuggcucuccaag

SEQ ID NO: 2481730 - RNA, 13 nt, Human
acuggcucuccaa

SEQ ID NO: 2481731 - RNA, 12 nt, Human
acuggcucucca

SEQ ID NO: 2481732 - RNA, 22 nt, Human
acuggcucauauuccugcagcc

SEQ ID NO: 2481733 - RNA, 19 nt, Human
uccuucagcccucaccccu

SEQ ID NO: 2481734 - RNA, 15 nt, Human
uccuucagcccucac

SEQ ID NO: 2481735 - RNA, 14 nt, Human
uccuucagcccuca

SEQ ID NO: 2481736 - RNA, 13 nt, Human
uccuucagcccuc

SEQ ID NO: 2481737 - RNA, 23 nt, Human
uccuucagacacccucaaccucu

SEQ ID NO: 2481738 - RNA, 22 nt, Human
acuggcugccuccacucccacu

SEQ ID NO: 2481739 - RNA, 21 nt, Human
acuggcugccuccacucccac

SEQ ID NO: 2481740 - RNA, 19 nt, Human
acuggcugccuccacuccc

SEQ ID NO: 2481741 - RNA, 17 nt, Human
acuggcugccuccacuc

SEQ ID NO: 2481742 - RNA, 16 nt, Human
acuggcuggcugcagu

SEQ ID NO: 2481743 - RNA, 17 nt, Human
acuggcuggcugcagug

SEQ ID NO: 2481744 - RNA, 21 nt, Human
acuggcacaguuuucugagaa

SEQ ID NO: 2481745 - RNA, 22 nt, Human
acuggcacaguuuucugagaaa

SEQ ID NO: 2481746 - RNA, 20 nt, Human
acuggcacugaauuaaucau

SEQ ID NO: 2481747 - RNA, 21 nt, Human
acuggcaaacuucagacugaa

SEQ ID NO: 2481748 - RNA, 16 nt, Human
acuggcacugaauuaa

SEQ ID NO: 2481749 - RNA, 14 nt, Human
acuggcagcaucuu

SEQ ID NO: 2481750 - RNA, 16 nt, Human
acuggcaguuuuccau

SEQ ID NO: 2481751 - RNA, 22 nt, Human
acuggcaguuuuccauugguuu

SEQ ID NO: 2481752 - RNA, 19 nt, Human
acuggcgacacguagcagc

SEQ ID NO: 2481753 - RNA, 16 nt, Human
acuggccucugcugau

SEQ ID NO: 2481754 - RNA, 23 nt, Human
acuggcguagaaguuuuuguacu

SEQ ID NO: 2481755 - RNA, 18 nt, Human
acuggcuagaguccucac

SEQ ID NO: 2481756 - RNA, 21 nt, Human
acuggcuagaguccucacucc

SEQ ID NO: 2481757 - RNA, 23 nt, Human
acuggccucugcugauccuccca

SEQ ID NO: 2481758 - RNA, 22 nt, Human
acuggccugcacggugggccuu

SEQ ID NO: 2481759 - RNA, 21 nt, Human
acuggcauggauauaguuuua

SEQ ID NO: 2481760 - RNA, 23 nt, Human
acuggcauggauauaguuuuacu

SEQ ID NO: 2481761 - RNA, 22 nt, Human
acugcaggcccuggccuccccu

SEQ ID NO: 2481762 - RNA, 19 nt, Human
acugcaggcccuggccucc

SEQ ID NO: 2481763 - RNA, 18 nt, Human
acugcaggcccuggccuc

SEQ ID NO: 2481764 - RNA, 17 nt, Human
acugcaggcccuggccu

SEQ ID NO: 2481765 - RNA, 10 nt, Human
acugcaggga

SEQ ID NO: 2481766 - RNA, 23 nt, Human
acugcagggaaaauuauuugcau

SEQ ID NO: 2481767 - RNA, 16 nt, Human
acugcagggacugcca

SEQ ID NO: 2481768 - RNA, 18 nt, Human
acugcagggacugccagu

SEQ ID NO: 2481769 - RNA, 17 nt, Human
acugcagggacugccag

SEQ ID NO: 2481770 - RNA, 20 nt, Human
acugcagggccaggacugag

SEQ ID NO: 2481771 - RNA, 17 nt, Human
acugcagggccaggacu

SEQ ID NO: 2481772 - RNA, 16 nt, Human
acugcagggccaggac

SEQ ID NO: 2481773 - RNA, 15 nt, Human
acugcagggccagga

SEQ ID NO: 2481774 - RNA, 13 nt, Human
acugcagggccag

SEQ ID NO: 2481775 - RNA, 23 nt, Human
acugcaggccccgcuuguccagc

SEQ ID NO: 2481776 - RNA, 23 nt, Human
acugcagaccuguccuccuggug

SEQ ID NO: 2481777 - RNA, 21 nt, Human
acugcagaccuguccuccugg

SEQ ID NO: 2481778 - RNA, 20 nt, Human
acugcagaccuguccuccug

SEQ ID NO: 2481779 - RNA, 23 nt, Human
acugcagccucaaccuccugggc

SEQ ID NO: 2481780 - RNA, 16 nt, Human
acugcaggcccuggcc

SEQ ID NO: 2481781 - RNA, 15 nt, Human
acugcaggcccuggc

SEQ ID NO: 2481782 - RNA, 14 nt, Human
acugcaggcccugg

SEQ ID NO: 2481783 - RNA, 13 nt, Human
acugcaggcccug

SEQ ID NO: 2481784 - RNA, 12 nt, Human
acugcaggcccu

SEQ ID NO: 2481785 - RNA, 15 nt, Human
acugcaggccccgcu

SEQ ID NO: 2481786 - RNA, 21 nt, Human
acugcaggccccgcuugucca

SEQ ID NO: 2481787 - RNA, 15 nt, Human
acugcagcuuuacau

SEQ ID NO: 2481788 - RNA, 19 nt, Human
acugcaggcaucacagcua

SEQ ID NO: 2481789 - RNA, 12 nt, Human
acugcaggcccc

SEQ ID NO: 2481790 - RNA, 22 nt, Human
acugcagccucaaccuccuggg

SEQ ID NO: 2481791 - RNA, 21 nt, Human
acugcagccucaaccuccugg

SEQ ID NO: 2481792 - RNA, 18 nt, Human
acugcagaccuguccucc

SEQ ID NO: 2481793 - RNA, 16 nt, Human
acugcagaccuguccu

SEQ ID NO: 2481794 - RNA, 21 nt, Human
acugcagaauacaguaagcug

SEQ ID NO: 2481795 - RNA, 23 nt, Human
uccuuaaaggcaccaucuaauag

SEQ ID NO: 2481796 - RNA, 19 nt, Human
acugcagccucaaccuccu

SEQ ID NO: 2481797 - RNA, 22 nt, Human
uccuuaaaggcaccaucuaaua

SEQ ID NO: 2481798 - RNA, 23 nt, Human
uccuuaaauaaacucaaugagcu

SEQ ID NO: 2481799 - RNA, 13 nt, Human
acugcacuguuuu

SEQ ID NO: 2481800 - RNA, 17 nt, Human
uccuuaaacugugugga

SEQ ID NO: 2481801 - RNA, 23 nt, Human
uccuuaaacuguguggacuguga

SEQ ID NO: 2481802 - RNA, 23 nt, Human
uccuuaaacagggcaucuccagg

SEQ ID NO: 2481803 - RNA, 14 nt, Human
uccuuaaacugugu

SEQ ID NO: 2481804 - RNA, 15 nt, Human
uccuuaaacugugug

SEQ ID NO: 2481805 - RNA, 16 nt, Human
uccuuaaacugugugg

SEQ ID NO: 2481806 - RNA, 20 nt, Human
uccuguuuuucuggguggcc

SEQ ID NO: 2481807 - RNA, 17 nt, Human
uccuguuuuucugggug

SEQ ID NO: 2481808 - RNA, 16 nt, Human
uccuguuuuucugggu

SEQ ID NO: 2481809 - RNA, 15 nt, Human
uccuuaaacagggca

SEQ ID NO: 2481810 - RNA, 24 nt, Human
uccugugucuugcaauggcagccu

SEQ ID NO: 2481811 - RNA, 23 nt, Human
uccugugucuugcaauggcagcc

SEQ ID NO: 2481812 - RNA, 23 nt, Human
uccuguguaaucauuucuugggc

SEQ ID NO: 2481813 - RNA, 15 nt, Human
uccugugugcaguga

SEQ ID NO: 2481814 - RNA, 19 nt, Human
uccugugugauugacagcu

SEQ ID NO: 2481815 - RNA, 22 nt, Human
uccuguguguccaaaacugccu

SEQ ID NO: 2481816 - RNA, 14 nt, Human
uccugugugugcgc

SEQ ID NO: 2481817 - RNA, 13 nt, Human
uccugugugugcg

SEQ ID NO: 2481818 - RNA, 18 nt, Human
uccugugugugcgccuac

SEQ ID NO: 2481819 - RNA, 12 nt, Human
uccuguguuucu

SEQ ID NO: 2481820 - RNA, 22 nt, Human
uccuguuugggccccucuccca

SEQ ID NO: 2481821 - RNA, 18 nt, Human
uccuguuugggccccucu

SEQ ID NO: 2481822 - RNA, 14 nt, Human
uccuguuuuucaca

SEQ ID NO: 2481823 - RNA, 19 nt, Human
uccuguuguuguuaaugaa

SEQ ID NO: 2481824 - RNA, 20 nt, Human
uccuguuguuauggaaacug

SEQ ID NO: 2481825 - RNA, 21 nt, Human
uccuguuguuguuaaugaaaa

SEQ ID NO: 2481826 - RNA, 19 nt, Human
uccuguucccaugagauga

SEQ ID NO: 2481827 - RNA, 20 nt, Human
uccuguguuuuuucugccac

SEQ ID NO: 2481828 - RNA, 19 nt, Human
uccuguguuucuagggaaa

SEQ ID NO: 2481829 - RNA, 18 nt, Human
uccuguuacuuaccuaaa

SEQ ID NO: 2481830 - RNA, 22 nt, Human
uccuguuagguauuagaaagug

SEQ ID NO: 2481831 - RNA, 23 nt, Human
uccuguuagcuguuauuucuauu

SEQ ID NO: 2481832 - RNA, 21 nt, Human
uccuguuggauuuguuuaaaa

SEQ ID NO: 2481833 - RNA, 22 nt, Human
uccuguugcacccagcccuggu

SEQ ID NO: 2481834 - RNA, 21 nt, Human
uccuguugcacccagcccugg

SEQ ID NO: 2481835 - RNA, 20 nt, Human
uccuguugcacccagcccug

SEQ ID NO: 2481836 - RNA, 19 nt, Human
uccuguugcacccagcccu

SEQ ID NO: 2481837 - RNA, 16 nt, Human
uccuguugcacccagc

SEQ ID NO: 2481838 - RNA, 13 nt, Human
uccuguugcaccc

SEQ ID NO: 2481839 - RNA, 12 nt, Human
uccuguucugaa

SEQ ID NO: 2481840 - RNA, 19 nt, Human
uccuguucuuaagacguga

SEQ ID NO: 2481841 - RNA, 16 nt, Human
uccugcugcagagggg

SEQ ID NO: 2481842 - RNA, 22 nt, Human
uccugcugcaccaacccagccg

SEQ ID NO: 2481843 - RNA, 21 nt, Human
uccugcugcaccaacccagcc

SEQ ID NO: 2481844 - RNA, 20 nt, Human
uccugcugcaccaacccagc

SEQ ID NO: 2481845 - RNA, 19 nt, Human
uccugcugcaccaacccag

SEQ ID NO: 2481846 - RNA, 17 nt, Human
uccugcugcaccaaccc

SEQ ID NO: 2481847 - RNA, 13 nt, Human
uccugcugcacca

SEQ ID NO: 2481848 - RNA, 12 nt, Human
uccugcugcacc

SEQ ID NO: 2481849 - RNA, 13 nt, Human
uccugcugcaguu

SEQ ID NO: 2481850 - RNA, 17 nt, Human
uccugggcccucucugc

SEQ ID NO: 2481851 - RNA, 21 nt, Human
uccugggcccucucugcucug

SEQ ID NO: 2481852 - RNA, 23 nt, Human
uccugggcccucucugcucugcg

SEQ ID NO: 2481853 - RNA, 12 nt, Human
uccugggccugc

SEQ ID NO: 2481854 - RNA, 21 nt, Human
uccugcugcagaggggcaggc

SEQ ID NO: 2481855 - RNA, 18 nt, Human
uccugcugcagaggggca

SEQ ID NO: 2481856 - RNA, 16 nt, Human
uccugggcccucucug

SEQ ID NO: 2481857 - RNA, 23 nt, Human
uccuggggguucuuucuuccucu

SEQ ID NO: 2481858 - RNA, 22 nt, Human
uccuggggguucuuucuuccuc

SEQ ID NO: 2481859 - RNA, 21 nt, Human
uccuggggguucuuucuuccu

SEQ ID NO: 2481860 - RNA, 19 nt, Human
uccuggggcucugugcagg

SEQ ID NO: 2481861 - RNA, 21 nt, Human
uccuggggccucggagccuca

SEQ ID NO: 2481862 - RNA, 22 nt, Human
uccuggggccucggagccucau

SEQ ID NO: 2481863 - RNA, 14 nt, Human
uccuggggcucccu

SEQ ID NO: 2481864 - RNA, 15 nt, Human
uccuggggccucuug

SEQ ID NO: 2481865 - RNA, 16 nt, Human
uccuggggcucccuuc

SEQ ID NO: 2481866 - RNA, 15 nt, Human
uccuggggcucccuu

SEQ ID NO: 2481867 - RNA, 15 nt, Human
uccuggggcucugug

SEQ ID NO: 2481868 - RNA, 16 nt, Human
uccuggggcucugugc

SEQ ID NO: 2481869 - RNA, 18 nt, Human
uccuggggcucugugcag

SEQ ID NO: 2481870 - RNA, 18 nt, Human
uccuggggaaccugaccc

SEQ ID NO: 2481871 - RNA, 19 nt, Human
uccuggggaaccugacccc

SEQ ID NO: 2481872 - RNA, 12 nt, Human
uccugggcuggu

SEQ ID NO: 2481873 - RNA, 13 nt, Human
uccuggggccucg

SEQ ID NO: 2481874 - RNA, 13 nt, Human
uccugggccugca

SEQ ID NO: 2481875 - RNA, 15 nt, Human
uccugggccugcaga

SEQ ID NO: 2481876 - RNA, 14 nt, Human
uccugggcgcccug

SEQ ID NO: 2481877 - RNA, 13 nt, Human
uccugggcgcccu

SEQ ID NO: 2481878 - RNA, 16 nt, Human
uccugggccugcagaa

SEQ ID NO: 2481879 - RNA, 20 nt, Human
uccugggcgcccuggaagcc

SEQ ID NO: 2481880 - RNA, 19 nt, Human
uccugggcgcccuggaagc

SEQ ID NO: 2481881 - RNA, 18 nt, Human
uccugggcgcccuggaag

SEQ ID NO: 2481882 - RNA, 16 nt, Human
uccugggcgcccugga

SEQ ID NO: 2481883 - RNA, 12 nt, Human
uccugggcucag

SEQ ID NO: 2481884 - RNA, 13 nt, Human
uccugggcucagg

SEQ ID NO: 2481885 - RNA, 18 nt, Human
uccugguacccagccauc

SEQ ID NO: 2481886 - RNA, 17 nt, Human
uccugguacccagccau

SEQ ID NO: 2481887 - RNA, 13 nt, Human
uccugguagaaua

SEQ ID NO: 2481888 - RNA, 16 nt, Human
uccugguacccagcca

SEQ ID NO: 2481889 - RNA, 15 nt, Human
uccugguacccagcc

SEQ ID NO: 2481890 - RNA, 23 nt, Human
uccuggguuuuguauucucugag

SEQ ID NO: 2481891 - RNA, 17 nt, Human
uccuggguuuuguauuc

SEQ ID NO: 2481892 - RNA, 20 nt, Human
uccuggguuuuguauucucu

SEQ ID NO: 2481893 - RNA, 21 nt, Human
uccuggguuuuguauucucug

SEQ ID NO: 2481894 - RNA, 22 nt, Human
uccuggguuuuguauucucuga

SEQ ID NO: 2481895 - RNA, 23 nt, Human
uccuggguuuucuuaaccaucuu

SEQ ID NO: 2481896 - RNA, 21 nt, Human
uccuggguggucugcaggcag

SEQ ID NO: 2481897 - RNA, 22 nt, Human
uccuggguggucugcaggcagg

SEQ ID NO: 2481898 - RNA, 15 nt, Human
uccuggguggucugc

SEQ ID NO: 2481899 - RNA, 19 nt, Human
uccuggguggucugcaggc

SEQ ID NO: 2481900 - RNA, 23 nt, Human
uccugggguauaaaacuuuccuc

SEQ ID NO: 2481901 - RNA, 16 nt, Human
uccugucuucccaggg

SEQ ID NO: 2481902 - RNA, 15 nt, Human
uccugucuucccagg

SEQ ID NO: 2481903 - RNA, 17 nt, Human
uccugucuucccagggu

SEQ ID NO: 2481904 - RNA, 15 nt, Human
uccugucuuccugca

SEQ ID NO: 2481905 - RNA, 14 nt, Human
uccugucuucccag

SEQ ID NO: 2481906 - RNA, 12 nt, Human
uccugucuuccc

SEQ ID NO: 2481907 - RNA, 11 nt, Human
uccugucuucc

SEQ ID NO: 2481908 - RNA, 22 nt, Human
uccugucugccagccagcagcc

SEQ ID NO: 2481909 - RNA, 21 nt, Human
uccugucuuuaaagccugccu

SEQ ID NO: 2481910 - RNA, 17 nt, Human
uccugucuuuaaggaaa

SEQ ID NO: 2481911 - RNA, 18 nt, Human
uccugucuuuaaggaaaa

SEQ ID NO: 2481912 - RNA, 22 nt, Human
uccugucuuucugagcacacuu

SEQ ID NO: 2481913 - RNA, 16 nt, Human
uccugugaaugccacu

SEQ ID NO: 2481914 - RNA, 15 nt, Human
uccugucuuucugag

SEQ ID NO: 2481915 - RNA, 19 nt, Human
uccugucuuuaaggaaaaa

SEQ ID NO: 2481916 - RNA, 23 nt, Human
uccugugggggaagagcacagcc

SEQ ID NO: 2481917 - RNA, 22 nt, Human
uccugugggggaagagcacagc

SEQ ID NO: 2481918 - RNA, 13 nt, Human
uccuguguacagg

SEQ ID NO: 2481919 - RNA, 18 nt, Human
uccuguguaaucauuucu

SEQ ID NO: 2481920 - RNA, 22 nt, Human
uccuguguaaucauuucuuggg

SEQ ID NO: 2481921 - RNA, 23 nt, Human
uccuguggccccacccugggccc

SEQ ID NO: 2481922 - RNA, 22 nt, Human
uccuguggccccacccugggcc

SEQ ID NO: 2481923 - RNA, 21 nt, Human
uccuguggcaggcagcgccaa

SEQ ID NO: 2481924 - RNA, 12 nt, Human
uccuguggcccc

SEQ ID NO: 2481925 - RNA, 20 nt, Human
uccuguggcaggcagcgcca

SEQ ID NO: 2481926 - RNA, 19 nt, Human
uccuguggcaggcagcgcc

SEQ ID NO: 2481927 - RNA, 16 nt, Human
uccuguggcaggcagc

SEQ ID NO: 2481928 - RNA, 15 nt, Human
uccuguggcaggcag

SEQ ID NO: 2481929 - RNA, 17 nt, Human
uccugugcccacauccc

SEQ ID NO: 2481930 - RNA, 14 nt, Human
uccuguggcaggca

SEQ ID NO: 2481931 - RNA, 15 nt, Human
uccugugacauguaa

SEQ ID NO: 2481932 - RNA, 14 nt, Human
uccugugacaugua

SEQ ID NO: 2481933 - RNA, 22 nt, Human
uccugugaaugccacugccuuc

SEQ ID NO: 2481934 - RNA, 20 nt, Human
uccugugaaugccacugccu

SEQ ID NO: 2481935 - RNA, 18 nt, Human
uccugugacuucagcucu

SEQ ID NO: 2481936 - RNA, 18 nt, Human
uccugugacauguaacag

SEQ ID NO: 2481937 - RNA, 15 nt, Human
uccugugcaugggug

SEQ ID NO: 2481938 - RNA, 16 nt, Human
uccugugcauggguga

SEQ ID NO: 2481939 - RNA, 18 nt, Human
uccugugcaugggugaag

SEQ ID NO: 2481940 - RNA, 20 nt, Human
uccugugcaugggugaaggg

SEQ ID NO: 2481941 - RNA, 18 nt, Human
uccugugcuacuuugccu

SEQ ID NO: 2481942 - RNA, 17 nt, Human
acugaggggaggggagc

SEQ ID NO: 2481943 - RNA, 22 nt, Human
acugaggggaggggagcauggg

SEQ ID NO: 2481944 - RNA, 14 nt, Human
acugaggccugagc

SEQ ID NO: 2481945 - RNA, 13 nt, Human
acugaggccugag

SEQ ID NO: 2481946 - RNA, 20 nt, Human
acugagggaccaacugggcc

SEQ ID NO: 2481947 - RNA, 21 nt, Human
acugagggaccaacugggccc

SEQ ID NO: 2481948 - RNA, 18 nt, Human
acugagggacucugaagc

SEQ ID NO: 2481949 - RNA, 17 nt, Human
acugagggacucugaag

SEQ ID NO: 2481950 - RNA, 12 nt, Human
acugagggcagu

SEQ ID NO: 2481951 - RNA, 14 nt, Human
acugagggacucug

SEQ ID NO: 2481952 - RNA, 21 nt, Human
acugaggccuaaaaguaaaca

SEQ ID NO: 2481953 - RNA, 22 nt, Human
acugagggaccaacugggccca

SEQ ID NO: 2481954 - RNA, 22 nt, Human
acugaggccaaaagaggccuga

SEQ ID NO: 2481955 - RNA, 15 nt, Human
acugaggcagggaag

SEQ ID NO: 2481956 - RNA, 23 nt, Human
acugaggcagacagcagcucagg

SEQ ID NO: 2481957 - RNA, 12 nt, Human
acugaggcaggg

SEQ ID NO: 2481958 - RNA, 14 nt, Human
acugaggcagggaa

SEQ ID NO: 2481959 - RNA, 13 nt, Human
acugaggcagaca

SEQ ID NO: 2481960 - RNA, 15 nt, Human
acugaggcagacagc

SEQ ID NO: 2481961 - RNA, 19 nt, Human
acugaggcagacagcagcu

SEQ ID NO: 2481962 - RNA, 22 nt, Human
acugaggcagacagcagcucag

SEQ ID NO: 2481963 - RNA, 14 nt, Human
acugaggaucagag

SEQ ID NO: 2481964 - RNA, 15 nt, Human
acugaggaccagcca

SEQ ID NO: 2481965 - RNA, 20 nt, Human
acugaggaauuuucuuugug

SEQ ID NO: 2481966 - RNA, 15 nt, Human
acugaggcacgagca

SEQ ID NO: 2481967 - RNA, 19 nt, Human
uccucuccaccuaguggcu

SEQ ID NO: 2481968 - RNA, 17 nt, Human
uccucuccaccuagugg

SEQ ID NO: 2481969 - RNA, 14 nt, Human
uccucuccccagcc

SEQ ID NO: 2481970 - RNA, 15 nt, Human
uccucuccccagccc

SEQ ID NO: 2481971 - RNA, 16 nt, Human
uccucuccccagccca

SEQ ID NO: 2481972 - RNA, 15 nt, Human
uccucuccccagcaa

SEQ ID NO: 2481973 - RNA, 17 nt, Human
uccucuccccagcccag

SEQ ID NO: 2481974 - RNA, 18 nt, Human
uccucuccccagcccaga

SEQ ID NO: 2481975 - RNA, 19 nt, Human
uccucuccccagcccagag

SEQ ID NO: 2481976 - RNA, 14 nt, Human
acugagccuuguaa

SEQ ID NO: 2481977 - RNA, 16 nt, Human
acugagcuucucugug

SEQ ID NO: 2481978 - RNA, 16 nt, Human
acugagcuccucuggg

SEQ ID NO: 2481979 - RNA, 19 nt, Human
acugagcuccucugggcag

SEQ ID NO: 2481980 - RNA, 23 nt, Human
acugagcuccaugugcccccucu

SEQ ID NO: 2481981 - RNA, 16 nt, Human
acugagcuccaugugc

SEQ ID NO: 2481982 - RNA, 13 nt, Human
acugagcuccucu

SEQ ID NO: 2481983 - RNA, 14 nt, Human
acugagcuccucug

SEQ ID NO: 2481984 - RNA, 22 nt, Human
acugaggaagaacggggcucuu

SEQ ID NO: 2481985 - RNA, 13 nt, Human
acugaggaagaac

SEQ ID NO: 2481986 - RNA, 17 nt, Human
acugagcuuggaagcuu

SEQ ID NO: 2481987 - RNA, 19 nt, Human
acugaggaauuucaccugu

SEQ ID NO: 2481988 - RNA, 16 nt, Human
acugaggaauuuucuu

SEQ ID NO: 2481989 - RNA, 17 nt, Human
acugaggaauuucaccu

SEQ ID NO: 2481990 - RNA, 21 nt, Human
acugagcuccucugggcagga

SEQ ID NO: 2481991 - RNA, 18 nt, Human
acugaggaaugaugaagc

SEQ ID NO: 2481992 - RNA, 13 nt, Human
acugagcuuggaa

SEQ ID NO: 2481993 - RNA, 16 nt, Human
acugagcuuggaagcu

SEQ ID NO: 2481994 - RNA, 12 nt, Human
acugagcuugga

SEQ ID NO: 2481995 - RNA, 18 nt, Human
acugagcuucucugugaa

SEQ ID NO: 2481996 - RNA, 17 nt, Human
acugagcuucucuguga

SEQ ID NO: 2481997 - RNA, 19 nt, Human
acugaguacguugugcauu

SEQ ID NO: 2481998 - RNA, 21 nt, Human
acugaguacguugugcauuug

SEQ ID NO: 2481999 - RNA, 22 nt, Human
acugagggccacacuauuacca

SEQ ID NO: 2482000 - RNA, 12 nt, Human
acugagggccac

SEQ ID NO: 2482001 - RNA, 22 nt, Human
acugagggacucugaagccucu

SEQ ID NO: 2482002 - RNA, 23 nt, Human
acugagggcagucgauagagcug

SEQ ID NO: 2482003 - RNA, 18 nt, Human
acugaguacguugugcau

SEQ ID NO: 2482004 - RNA, 22 nt, Human
acugaguacguugugcauuugg

SEQ ID NO: 2482005 - RNA, 23 nt, Human
acugaguacguugugcauuuggu

SEQ ID NO: 2482006 - RNA, 16 nt, Human
acugagugccuuuugg

SEQ ID NO: 2482007 - RNA, 20 nt, Human
acugaguaagaaaugcugcc

SEQ ID NO: 2482008 - RNA, 16 nt, Human
acugaguccuuaaaca

SEQ ID NO: 2482009 - RNA, 18 nt, Human
acugaggggucuccagga

SEQ ID NO: 2482010 - RNA, 21 nt, Human
acugaggggucuccaggagga

SEQ ID NO: 2482011 - RNA, 18 nt, Human
acugaguuacauugucau

SEQ ID NO: 2482012 - RNA, 15 nt, Human
acugaguuacauugu

SEQ ID NO: 2482013 - RNA, 21 nt, Human
acugaguuaaauuauacugga

SEQ ID NO: 2482014 - RNA, 21 nt, Human
acugcaaaugucaucagaacu

SEQ ID NO: 2482015 - RNA, 22 nt, Human
acugcaaaugucaucagaacuu

SEQ ID NO: 2482016 - RNA, 18 nt, Human
acugcaacaggcuugugc

SEQ ID NO: 2482017 - RNA, 14 nt, Human
acugcaaccuccgc

SEQ ID NO: 2482018 - RNA, 13 nt, Human
acugcaaccuccg

SEQ ID NO: 2482019 - RNA, 20 nt, Human
acugcaaccuucgccaccug

SEQ ID NO: 2482020 - RNA, 22 nt, Human
acugcaaccuccgccucuuggg

SEQ ID NO: 2482021 - RNA, 16 nt, Human
acugcaaccuccgccu

SEQ ID NO: 2482022 - RNA, 18 nt, Human
uccugcaacucaaggacu

SEQ ID NO: 2482023 - RNA, 15 nt, Human
uccugcaaugaaguc

SEQ ID NO: 2482024 - RNA, 18 nt, Human
uccugcaaugaagucucu

SEQ ID NO: 2482025 - RNA, 20 nt, Human
uccugcaaugaagucucuga

SEQ ID NO: 2482026 - RNA, 19 nt, Human
uccugauggucagcucccu

SEQ ID NO: 2482027 - RNA, 18 nt, Human
uccugauggucagcuccc

SEQ ID NO: 2482028 - RNA, 17 nt, Human
uccugauggucagcucc

SEQ ID NO: 2482029 - RNA, 23 nt, Human
uccugaugguacaggaaagcuca

SEQ ID NO: 2482030 - RNA, 21 nt, Human
uccugauggucagcucccuuc

SEQ ID NO: 2482031 - RNA, 20 nt, Human
uccugauggucagcucccuu

SEQ ID NO: 2482032 - RNA, 17 nt, Human
uccugcaacucaaggac

SEQ ID NO: 2482033 - RNA, 17 nt, Human
uccugcaaaauuuuaua

SEQ ID NO: 2482034 - RNA, 19 nt, Human
uccugcaaaauuuuauagc

SEQ ID NO: 2482035 - RNA, 22 nt, Human
uccugcagccuccuccugacca

SEQ ID NO: 2482036 - RNA, 19 nt, Human
uccugcagccuccuccuga

SEQ ID NO: 2482037 - RNA, 18 nt, Human
uccugcagccuccuccug

SEQ ID NO: 2482038 - RNA, 16 nt, Human
uccugcagccuccucc

SEQ ID NO: 2482039 - RNA, 15 nt, Human
uccugcagccuccuc

SEQ ID NO: 2482040 - RNA, 12 nt, Human
uccugcagccuc

SEQ ID NO: 2482041 - RNA, 15 nt, Human
uccugcaggcagcca

SEQ ID NO: 2482042 - RNA, 17 nt, Human
uccugcagaccacgccc

SEQ ID NO: 2482043 - RNA, 21 nt, Human
uccugcacuuacuugcuuauu

SEQ ID NO: 2482044 - RNA, 19 nt, Human
acugcacagagcucuccag

SEQ ID NO: 2482045 - RNA, 18 nt, Human
acugcacagagcucucca

SEQ ID NO: 2482046 - RNA, 17 nt, Human
acugcacagagcucucc

SEQ ID NO: 2482047 - RNA, 16 nt, Human
acugcacagagcucuc

SEQ ID NO: 2482048 - RNA, 15 nt, Human
acugcacagagcucu

SEQ ID NO: 2482049 - RNA, 12 nt, Human
acugcacagagc

SEQ ID NO: 2482050 - RNA, 21 nt, Human
acugcaauccugucuuucuga

SEQ ID NO: 2482051 - RNA, 17 nt, Human
acugcaauuaaagugau

SEQ ID NO: 2482052 - RNA, 20 nt, Human
acugcaauccugucuuucug

SEQ ID NO: 2482053 - RNA, 18 nt, Human
acugcacagugcaucuca

SEQ ID NO: 2482054 - RNA, 20 nt, Human
uccugaggggcaucugcccc

SEQ ID NO: 2482055 - RNA, 16 nt, Human
acugcacagcguccug

SEQ ID NO: 2482056 - RNA, 22 nt, Human
acugcacagcggccccugcauc

SEQ ID NO: 2482057 - RNA, 20 nt, Human
acugcacagcggccccugca

SEQ ID NO: 2482058 - RNA, 23 nt, Human
acugcacagagcucuccagcucc

SEQ ID NO: 2482059 - RNA, 16 nt, Human
acugcacagugcaucu

SEQ ID NO: 2482060 - RNA, 15 nt, Human
uccugaguggugcca

SEQ ID NO: 2482061 - RNA, 17 nt, Human
uccugauaauaauugau

SEQ ID NO: 2482062 - RNA, 18 nt, Human
uccugaugguacaggaaa

SEQ ID NO: 2482063 - RNA, 21 nt, Human
uccugauggcaggauggccug

SEQ ID NO: 2482064 - RNA, 24 nt, Human
uccugauaugauuuaaaacaugua

SEQ ID NO: 2482065 - RNA, 19 nt, Human
uccugauaauaauugauca

SEQ ID NO: 2482066 - RNA, 18 nt, Human
uccugauaauaauugauc

SEQ ID NO: 2482067 - RNA, 23 nt, Human
uccugauaugauuuaaaacaugu

SEQ ID NO: 2482068 - RNA, 22 nt, Human
uccugaggguccccaccuggga

SEQ ID NO: 2482069 - RNA, 19 nt, Human
uccugaggguccccaccug

SEQ ID NO: 2482070 - RNA, 17 nt, Human
uccugaggguccccacc

SEQ ID NO: 2482071 - RNA, 18 nt, Human
acugcacagcguccuguc

SEQ ID NO: 2482072 - RNA, 21 nt, Human
uccugaggggcaucugccccu

SEQ ID NO: 2482073 - RNA, 22 nt, Human
uccugaggggcaucugccccuc

SEQ ID NO: 2482074 - RNA, 20 nt, Human
uccugaguagcugggauuac

SEQ ID NO: 2482075 - RNA, 19 nt, Human
uccugaguagcuggauuac

SEQ ID NO: 2482076 - RNA, 18 nt, Human
uccugcuccacaguguug

SEQ ID NO: 2482077 - RNA, 15 nt, Human
uccugcuccacagug

SEQ ID NO: 2482078 - RNA, 14 nt, Human
uccugcuccacagu

SEQ ID NO: 2482079 - RNA, 18 nt, Human
uccugcuccacagccauc

SEQ ID NO: 2482080 - RNA, 14 nt, Human
uccugcuccacagc

SEQ ID NO: 2482081 - RNA, 13 nt, Human
uccugcuccacag

SEQ ID NO: 2482082 - RNA, 13 nt, Human
uccugcucugccc

SEQ ID NO: 2482083 - RNA, 16 nt, Human
uccugcuccacagugu

SEQ ID NO: 2482084 - RNA, 21 nt, Human
uccugcuacaacuucagcagu

SEQ ID NO: 2482085 - RNA, 20 nt, Human
uccugcuacaacuucagcag

SEQ ID NO: 2482086 - RNA, 14 nt, Human
uccugcuacucugu

SEQ ID NO: 2482087 - RNA, 19 nt, Human
uccugcuacaacuucagca

SEQ ID NO: 2482088 - RNA, 15 nt, Human
uccugcucauauugu

SEQ ID NO: 2482089 - RNA, 16 nt, Human
uccugcucauauugug

SEQ ID NO: 2482090 - RNA, 18 nt, Human
uccugcuacucuguuccu

SEQ ID NO: 2482091 - RNA, 20 nt, Human
uccugccucgaacuggcugc

SEQ ID NO: 2482092 - RNA, 14 nt, Human
uccugccuccgccu

SEQ ID NO: 2482093 - RNA, 17 nt, Human
uccugccucagccuccg

SEQ ID NO: 2482094 - RNA, 15 nt, Human
uccugcguccuccuc

SEQ ID NO: 2482095 - RNA, 14 nt, Human
uccugcguccuccu

SEQ ID NO: 2482096 - RNA, 13 nt, Human
uccugcguccucc

SEQ ID NO: 2482097 - RNA, 18 nt, Human
uccugcguccuccucacc

SEQ ID NO: 2482098 - RNA, 16 nt, Human
uccugcguccuccuca

SEQ ID NO: 2482099 - RNA, 21 nt, Human
uccugcguccuccucaccuca

SEQ ID NO: 2482100 - RNA, 14 nt, Human
uccugcgggugggg

SEQ ID NO: 2482101 - RNA, 13 nt, Human
uccugcggguggg

SEQ ID NO: 2482102 - RNA, 23 nt, Human
uccugcgggcuuuuccccggucc

SEQ ID NO: 2482103 - RNA, 20 nt, Human
uccugcaggcagccaggcca

SEQ ID NO: 2482104 - RNA, 19 nt, Human
uccugcaggcagccaggcc

SEQ ID NO: 2482105 - RNA, 17 nt, Human
uccugcaggcagccagg

SEQ ID NO: 2482106 - RNA, 16 nt, Human
uccugcaggcagccag

SEQ ID NO: 2482107 - RNA, 21 nt, Human
uccugcagucuggcugagccc

SEQ ID NO: 2482108 - RNA, 18 nt, Human
uccugcagguaaacaguu

SEQ ID NO: 2482109 - RNA, 22 nt, Human
uccugcagggccagaccugccu

SEQ ID NO: 2482110 - RNA, 22 nt, Human
uccugcauucacccagacagcu

SEQ ID NO: 2482111 - RNA, 16 nt, Human
uccugcauucacccag

SEQ ID NO: 2482112 - RNA, 19 nt, Human
uccugccucagccucccaa

SEQ ID NO: 2482113 - RNA, 22 nt, Human
uccugcaggcagccaggccaca

SEQ ID NO: 2482114 - RNA, 14 nt, Human
uccugcaggccagg

SEQ ID NO: 2482115 - RNA, 19 nt, Human
uccugcaggccaggccagc

SEQ ID NO: 2482116 - RNA, 20 nt, Human
uccugcaggccaggccagcu

SEQ ID NO: 2482117 - RNA, 22 nt, Human
uccaccaagccuggucagccca

SEQ ID NO: 2482118 - RNA, 23 nt, Human
uccaccaagccuggucagcccaa

SEQ ID NO: 2482119 - RNA, 22 nt, Human
uccaccaccacuggccaccagg

SEQ ID NO: 2482120 - RNA, 21 nt, Human
uccaccaccacuggccaccag

SEQ ID NO: 2482121 - RNA, 19 nt, Human
uccaccaccacuggccacc

SEQ ID NO: 2482122 - RNA, 18 nt, Human
uccaccaccacuggccac

SEQ ID NO: 2482123 - RNA, 14 nt, Human
uccaccaccacugg

SEQ ID NO: 2482124 - RNA, 13 nt, Human
uccaccaccacug

SEQ ID NO: 2482125 - RNA, 17 nt, Human
uccaccaagaaagcagg

SEQ ID NO: 2482126 - RNA, 22 nt, Human
uccaccaccucccucaccaaca

SEQ ID NO: 2482127 - RNA, 15 nt, Human
uccaccaggaaccuc

SEQ ID NO: 2482128 - RNA, 16 nt, Human
uccaccagccugcacu

SEQ ID NO: 2482129 - RNA, 14 nt, Human
uccaccagccugca

SEQ ID NO: 2482130 - RNA, 15 nt, Human
uccaccagccugcac

SEQ ID NO: 2482131 - RNA, 18 nt, Human
uccaccaccucccucacc

SEQ ID NO: 2482132 - RNA, 17 nt, Human
uccaccaccucccucac

SEQ ID NO: 2482133 - RNA, 16 nt, Human
uccaccaccucccuca

SEQ ID NO: 2482134 - RNA, 14 nt, Human
uccaccaccucccu

SEQ ID NO: 2482135 - RNA, 23 nt, Human
uccaccaccacuggccaccaggc

SEQ ID NO: 2482136 - RNA, 13 nt, Human
uccaccacccaaa

SEQ ID NO: 2482137 - RNA, 17 nt, Human
uccaccacccaaaaguc

SEQ ID NO: 2482138 - RNA, 18 nt, Human
uccaccaagccuggucag

SEQ ID NO: 2482139 - RNA, 16 nt, Human
uccaccaacccaucag

SEQ ID NO: 2482140 - RNA, 18 nt, Human
uccaccaacccaucagaa

SEQ ID NO: 2482141 - RNA, 23 nt, Human
uccacaguucaguggcagggcuc

SEQ ID NO: 2482142 - RNA, 22 nt, Human
uccacaguucgaccugcggcug

SEQ ID NO: 2482143 - RNA, 16 nt, Human
uccacaguucaguggc

SEQ ID NO: 2482144 - RNA, 15 nt, Human
uccacaguucagugg

SEQ ID NO: 2482145 - RNA, 18 nt, Human
uccacauaaggaaacugg

SEQ ID NO: 2482146 - RNA, 13 nt, Human
uccacaguucagu

SEQ ID NO: 2482147 - RNA, 12 nt, Human
uccaagcuggga

SEQ ID NO: 2482148 - RNA, 22 nt, Human
uccaagcugggagauucaaggg

SEQ ID NO: 2482149 - RNA, 13 nt, Human
uccaagugugcau

SEQ ID NO: 2482150 - RNA, 11 nt, Human
uccaagugugc

SEQ ID NO: 2482151 - RNA, 11 nt, Human
uccaagcuggu

SEQ ID NO: 2482152 - RNA, 17 nt, Human
uccaauaaaaugccuca

SEQ ID NO: 2482153 - RNA, 21 nt, Human
uccaaguuuacucaacccucu

SEQ ID NO: 2482154 - RNA, 20 nt, Human
uccaagugugcauauuguac

SEQ ID NO: 2482155 - RNA, 19 nt, Human
uccaagugugcauauugua

SEQ ID NO: 2482156 - RNA, 15 nt, Human
uccaagugugcauau

SEQ ID NO: 2482157 - RNA, 14 nt, Human
uccaagugugcaua

SEQ ID NO: 2482158 - RNA, 21 nt, Human
uccaagugugcauauuguaca

SEQ ID NO: 2482159 - RNA, 13 nt, Human
uccaagugugugu

SEQ ID NO: 2482160 - RNA, 14 nt, Human
uccaagugugugug

SEQ ID NO: 2482161 - RNA, 18 nt, Human
uccaagugugugugcgug

SEQ ID NO: 2482162 - RNA, 14 nt, Human
uccaauaaacagga

SEQ ID NO: 2482163 - RNA, 13 nt, Human
uccaauaaacagg

SEQ ID NO: 2482164 - RNA, 12 nt, Human
uccaauaaacag

SEQ ID NO: 2482165 - RNA, 23 nt, Human
uccaauaaaugugaaauucuguc

SEQ ID NO: 2482166 - RNA, 14 nt, Human
uccaauaaaccagg

SEQ ID NO: 2482167 - RNA, 14 nt, Human
uccacagugacucc

SEQ ID NO: 2482168 - RNA, 22 nt, Human
uccaacuaaugccuuacucuuc

SEQ ID NO: 2482169 - RNA, 21 nt, Human
uccaacuaucucauuuccaag

SEQ ID NO: 2482170 - RNA, 13 nt, Human
uccaagcucccag

SEQ ID NO: 2482171 - RNA, 12 nt, Human
uccaagcuccca

SEQ ID NO: 2482172 - RNA, 15 nt, Human
uccaagcucccaggc

SEQ ID NO: 2482173 - RNA, 14 nt, Human
uccaagcucccagg

SEQ ID NO: 2482174 - RNA, 16 nt, Human
uccaagcucccaggca

SEQ ID NO: 2482175 - RNA, 18 nt, Human
uccaagcuccaucuccac

SEQ ID NO: 2482176 - RNA, 14 nt, Human
uccaaccuucccaa

SEQ ID NO: 2482177 - RNA, 17 nt, Human
uccaacagaagaacugu

SEQ ID NO: 2482178 - RNA, 19 nt, Human
uccaacagcucaagucuuc

SEQ ID NO: 2482179 - RNA, 14 nt, Human
uccaacaggagcug

SEQ ID NO: 2482180 - RNA, 16 nt, Human
uccaacaggagcuggg

SEQ ID NO: 2482181 - RNA, 13 nt, Human
uccaacagugagu

SEQ ID NO: 2482182 - RNA, 17 nt, Human
uccaacaggagcuggga

SEQ ID NO: 2482183 - RNA, 16 nt, Human
uccaacguggcccaga

SEQ ID NO: 2482184 - RNA, 14 nt, Human
uccaacguggccca

SEQ ID NO: 2482185 - RNA, 18 nt, Human
uccaacguggggcagcac

SEQ ID NO: 2482186 - RNA, 17 nt, Human
uccaacguggggcagca

SEQ ID NO: 2482187 - RNA, 15 nt, Human
uccaacuaaugccuu

SEQ ID NO: 2482188 - RNA, 19 nt, Human
uccaacuaaugccuuacuc

SEQ ID NO: 2482189 - RNA, 19 nt, Human
uccaacguggggcagcaca

SEQ ID NO: 2482190 - RNA, 14 nt, Human
uccaaaugcagcuu

SEQ ID NO: 2482191 - RNA, 15 nt, Human
uccaaaugcagcuuu

SEQ ID NO: 2482192 - RNA, 18 nt, Human
uccaaauaaaaacuaaau

SEQ ID NO: 2482193 - RNA, 17 nt, Human
uccaaauaaaaacuaaa

SEQ ID NO: 2482194 - RNA, 17 nt, Human
uccaaauaagaaaccua

SEQ ID NO: 2482195 - RNA, 16 nt, Human
uccaaaugaaugaccu

SEQ ID NO: 2482196 - RNA, 19 nt, Human
uccaaaugaaugaccuugu

SEQ ID NO: 2482197 - RNA, 17 nt, Human
uccaacaccaagcacag

SEQ ID NO: 2482198 - RNA, 21 nt, Human
uccaacaccaagcacagcagc

SEQ ID NO: 2482199 - RNA, 16 nt, Human
uccaacaccacagaca

SEQ ID NO: 2482200 - RNA, 20 nt, Human
uccaaaugaauguugucugu

SEQ ID NO: 2482201 - RNA, 23 nt, Human
uccaacaccaagcacagcagccu

SEQ ID NO: 2482202 - RNA, 20 nt, Human
uccaacaccacagacacaca

SEQ ID NO: 2482203 - RNA, 19 nt, Human
uccaacaccacagacacac

SEQ ID NO: 2482204 - RNA, 18 nt, Human
uccaacaccacagacaca

SEQ ID NO: 2482205 - RNA, 17 nt, Human
uccaacaccacagacac

SEQ ID NO: 2482206 - RNA, 22 nt, Human
uccaacaccacagacacacaca

SEQ ID NO: 2482207 - RNA, 21 nt, Human
uccaacaccacagacacacac

SEQ ID NO: 2482208 - RNA, 14 nt, Human
accuggaauauaua

SEQ ID NO: 2482209 - RNA, 17 nt, Human
accuggaauauauaacc

SEQ ID NO: 2482210 - RNA, 16 nt, Human
ucauuugaacaacuag

SEQ ID NO: 2482211 - RNA, 21 nt, Human
accuggaagggcuagaaccug

SEQ ID NO: 2482212 - RNA, 19 nt, Human
ucauuugagcagggcucag

SEQ ID NO: 2482213 - RNA, 19 nt, Human
accugcugaagggcagagg

SEQ ID NO: 2482214 - RNA, 16 nt, Human
accugcugagagaccc

SEQ ID NO: 2482215 - RNA, 19 nt, Human
accugcugagagacccaag

SEQ ID NO: 2482216 - RNA, 16 nt, Human
accugcucucuuguaa

SEQ ID NO: 2482217 - RNA, 13 nt, Human
accugcucucuug

SEQ ID NO: 2482218 - RNA, 19 nt, Human
accugcucuccucuugcca

SEQ ID NO: 2482219 - RNA, 23 nt, Human
accugcuuggguggagaagccau

SEQ ID NO: 2482220 - RNA, 22 nt, Human
accugcuuggguggagaagcca

SEQ ID NO: 2482221 - RNA, 18 nt, Human
accuggaacuuggggagu

SEQ ID NO: 2482222 - RNA, 22 nt, Human
accugcugagagacccaaggag

SEQ ID NO: 2482223 - RNA, 15 nt, Human
accugaaguucacca

SEQ ID NO: 2482224 - RNA, 13 nt, Human
accugaaguucac

SEQ ID NO: 2482225 - RNA, 18 nt, Human
accugcggugcuaucucc

SEQ ID NO: 2482226 - RNA, 22 nt, Human
accugaagucuuuguacagaca

SEQ ID NO: 2482227 - RNA, 15 nt, Human
accugaagucuuugu

SEQ ID NO: 2482228 - RNA, 22 nt, Human
accugcggugcuaucuccccca

SEQ ID NO: 2482229 - RNA, 19 nt, Human
accugcggugcuaucuccc

SEQ ID NO: 2482230 - RNA, 23 nt, Human
accugcggugcuaucucccccag

SEQ ID NO: 2482231 - RNA, 17 nt, Human
accugcucuccucuugc

SEQ ID NO: 2482232 - RNA, 18 nt, Human
accugcucuccucuugcc

SEQ ID NO: 2482233 - RNA, 16 nt, Human
ucauuuuuuuccaggc

SEQ ID NO: 2482234 - RNA, 13 nt, Human
ucauuuuuuucca

SEQ ID NO: 2482235 - RNA, 18 nt, Human
ucauuuuuuuccaggcug

SEQ ID NO: 2482236 - RNA, 13 nt, Human
ucauuuuuuuuaa

SEQ ID NO: 2482237 - RNA, 13 nt, Human
uccaaauaaaaac

SEQ ID NO: 2482238 - RNA, 10 nt, Human
uccaaauaaa

SEQ ID NO: 2482239 - RNA, 23 nt, Human
uccaaagucucuggaauuugaaa

SEQ ID NO: 2482240 - RNA, 23 nt, Human
ucauuuuuguacaguuugcugua

SEQ ID NO: 2482241 - RNA, 22 nt, Human
ucauuuuuguacaguuugcugu

SEQ ID NO: 2482242 - RNA, 21 nt, Human
ucauuuuuguacaguuugcug

SEQ ID NO: 2482243 - RNA, 16 nt, Human
ucauuuuuguacaguu

SEQ ID NO: 2482244 - RNA, 20 nt, Human
ucauuuuuguuucuaccucc

SEQ ID NO: 2482245 - RNA, 19 nt, Human
ucauuuuuguuucuaccuc

SEQ ID NO: 2482246 - RNA, 17 nt, Human
ucauuuuuuuaauuuau

SEQ ID NO: 2482247 - RNA, 13 nt, Human
ucauuuuuucuua

SEQ ID NO: 2482248 - RNA, 21 nt, Human
ucauuuuauaugucaaagcag

SEQ ID NO: 2482249 - RNA, 17 nt, Human
ucauuuuauaugucaaa

SEQ ID NO: 2482250 - RNA, 16 nt, Human
ucauuuuauaugucaa

SEQ ID NO: 2482251 - RNA, 15 nt, Human
ucauuuuauguuaag

SEQ ID NO: 2482252 - RNA, 18 nt, Human
ucauuuuauaugucaaag

SEQ ID NO: 2482253 - RNA, 15 nt, Human
ucauuuuccccccac

SEQ ID NO: 2482254 - RNA, 19 nt, Human
ucauuuuccccccacucuc

SEQ ID NO: 2482255 - RNA, 18 nt, Human
ucauuugugccagaaugc

SEQ ID NO: 2482256 - RNA, 12 nt, Human
ucauuuguguca

SEQ ID NO: 2482257 - RNA, 15 nt, Human
ucauuugugucaaug

SEQ ID NO: 2482258 - RNA, 13 nt, Human
ucauuugugucaa

SEQ ID NO: 2482259 - RNA, 21 nt, Human
ucauuugagcagggcucagcg

SEQ ID NO: 2482260 - RNA, 16 nt, Human
ucauuugaugcuaaau

SEQ ID NO: 2482261 - RNA, 21 nt, Human
ucauuugcccuuaaggacaaa

SEQ ID NO: 2482262 - RNA, 19 nt, Human
ucauuugcccuuaaggaca

SEQ ID NO: 2482263 - RNA, 20 nt, Human
ucauuugcuaacuagcuugg

SEQ ID NO: 2482264 - RNA, 20 nt, Human
ucauuuuaacaucugagaaa

SEQ ID NO: 2482265 - RNA, 13 nt, Human
ucauuuuaauuau

SEQ ID NO: 2482266 - RNA, 14 nt, Human
ucauuuuaauuauu

SEQ ID NO: 2482267 - RNA, 18 nt, Human
ucauuuuacccuuggcuc

SEQ ID NO: 2482268 - RNA, 15 nt, Human
ucauuuguuggaaug

SEQ ID NO: 2482269 - RNA, 22 nt, Human
ucauuuuaacaucugagaaaag

SEQ ID NO: 2482270 - RNA, 21 nt, Human
uccagccccuggaugcagccu

SEQ ID NO: 2482271 - RNA, 19 nt, Human
uccagccccuggaugcagc

SEQ ID NO: 2482272 - RNA, 17 nt, Human
uccagccccuggaugca

SEQ ID NO: 2482273 - RNA, 16 nt, Human
uccagccccuggaugc

SEQ ID NO: 2482274 - RNA, 14 nt, Human
uccagccccuggau

SEQ ID NO: 2482275 - RNA, 15 nt, Human
uccagccccuggaug

SEQ ID NO: 2482276 - RNA, 18 nt, Human
uccagaccccuggcuuuu

SEQ ID NO: 2482277 - RNA, 17 nt, Human
uccagaccccuggcuuu

SEQ ID NO: 2482278 - RNA, 16 nt, Human
uccagaccccuggcuu

SEQ ID NO: 2482279 - RNA, 15 nt, Human
uccagaccccuggcu

SEQ ID NO: 2482280 - RNA, 21 nt, Human
uccagccucuguuccccuagu

SEQ ID NO: 2482281 - RNA, 16 nt, Human
uccagccucuguuccc

SEQ ID NO: 2482282 - RNA, 12 nt, Human
uccagccucugu

SEQ ID NO: 2482283 - RNA, 21 nt, Human
uccagccccuucucagaaucu

SEQ ID NO: 2482284 - RNA, 22 nt, Human
uccagccccuucucagaaucua

SEQ ID NO: 2482285 - RNA, 20 nt, Human
uccagccugagcgacaguga

SEQ ID NO: 2482286 - RNA, 22 nt, Human
uccagccccuggaugcagccuc

SEQ ID NO: 2482287 - RNA, 18 nt, Human
uccagccccuucucagaa

SEQ ID NO: 2482288 - RNA, 17 nt, Human
uccagccccuucucaga

SEQ ID NO: 2482289 - RNA, 23 nt, Human
uccagaccccuggcuuuucacug

SEQ ID NO: 2482290 - RNA, 11 nt, Human
uccagccugcc

SEQ ID NO: 2482291 - RNA, 21 nt, Human
uccagccugagcgacagugag

SEQ ID NO: 2482292 - RNA, 13 nt, Human
uccagccugagca

SEQ ID NO: 2482293 - RNA, 12 nt, Human
uccagccugggc

SEQ ID NO: 2482294 - RNA, 13 nt, Human
uccagccugggca

SEQ ID NO: 2482295 - RNA, 20 nt, Human
uccagccugggcaacagagc

SEQ ID NO: 2482296 - RNA, 19 nt, Human
uccagccugggcagccagg

SEQ ID NO: 2482297 - RNA, 22 nt, Human
uccagccugggcagccaggcug

SEQ ID NO: 2482298 - RNA, 23 nt, Human
uccagccugggcagccaggcugc

SEQ ID NO: 2482299 - RNA, 20 nt, Human
uccacucugcuucucugacu

SEQ ID NO: 2482300 - RNA, 19 nt, Human
uccacucugcuucucugac

SEQ ID NO: 2482301 - RNA, 15 nt, Human
uccacucugcuucuc

SEQ ID NO: 2482302 - RNA, 14 nt, Human
uccacucugcuucu

SEQ ID NO: 2482303 - RNA, 17 nt, Human
uccacucuccuugcuac

SEQ ID NO: 2482304 - RNA, 18 nt, Human
uccacuagugcaaaucau

SEQ ID NO: 2482305 - RNA, 22 nt, Human
uccacucucccccacccccucc

SEQ ID NO: 2482306 - RNA, 12 nt, Human
uccacucugcuu

SEQ ID NO: 2482307 - RNA, 19 nt, Human
uccacucuccuugcuaccc

SEQ ID NO: 2482308 - RNA, 14 nt, Human
uccacugagcucca

SEQ ID NO: 2482309 - RNA, 13 nt, Human
uccacugagcucc

SEQ ID NO: 2482310 - RNA, 23 nt, Human
uccacucugcuucucugacuucu

SEQ ID NO: 2482311 - RNA, 21 nt, Human
uccacucugcuucucugacuu

SEQ ID NO: 2482312 - RNA, 24 nt, Human
uccacucugcuucucugacuucug

SEQ ID NO: 2482313 - RNA, 13 nt, Human
uccagaaugcugu

SEQ ID NO: 2482314 - RNA, 15 nt, Human
uccagaaugcuguac

SEQ ID NO: 2482315 - RNA, 16 nt, Human
uccagaaugcuguaca

SEQ ID NO: 2482316 - RNA, 13 nt, Human
uccagaccccugg

SEQ ID NO: 2482317 - RNA, 14 nt, Human
uccagaaucuaaag

SEQ ID NO: 2482318 - RNA, 23 nt, Human
uccagaauaucugggauucuacu

SEQ ID NO: 2482319 - RNA, 14 nt, Human
uccagaauaucugg

SEQ ID NO: 2482320 - RNA, 12 nt, Human
uccagaauaucu

SEQ ID NO: 2482321 - RNA, 19 nt, Human
uccagaaucuaaagccagu

SEQ ID NO: 2482322 - RNA, 18 nt, Human
uccagaaucuaaagccag

SEQ ID NO: 2482323 - RNA, 22 nt, Human
uccagaauaaaacgcaaagggc

SEQ ID NO: 2482324 - RNA, 15 nt, Human
uccagaagugugauu

SEQ ID NO: 2482325 - RNA, 23 nt, Human
uccagaagggguuuggucuggga

SEQ ID NO: 2482326 - RNA, 22 nt, Human
uccagaaguuugagaucagccu

SEQ ID NO: 2482327 - RNA, 15 nt, Human
accuuuguauucucu

SEQ ID NO: 2482328 - RNA, 19 nt, Human
accuuuguauucucuccug

SEQ ID NO: 2482329 - RNA, 23 nt, Human
accuuuguauucucuccuguacc

SEQ ID NO: 2482330 - RNA, 11 nt, Human
accuuugucac

SEQ ID NO: 2482331 - RNA, 15 nt, Human
uccacuacaccuggc

SEQ ID NO: 2482332 - RNA, 19 nt, Human
uccacuaaccccgggcggg

SEQ ID NO: 2482333 - RNA, 16 nt, Human
uccacuaaccccgggc

SEQ ID NO: 2482334 - RNA, 11 nt, Human
uccacuaaccc

SEQ ID NO: 2482335 - RNA, 20 nt, Human
uccacguucugcucaucauu

SEQ ID NO: 2482336 - RNA, 21 nt, Human
uccacguucugcucaucauuc

SEQ ID NO: 2482337 - RNA, 18 nt, Human
uccacuacaccuggcuga

SEQ ID NO: 2482338 - RNA, 17 nt, Human
uccacuacaccuggcug

SEQ ID NO: 2482339 - RNA, 16 nt, Human
uccacuacaccuggcu

SEQ ID NO: 2482340 - RNA, 17 nt, Human
uccacuagugcaaauca

SEQ ID NO: 2482341 - RNA, 15 nt, Human
uccacuagugcaaau

SEQ ID NO: 2482342 - RNA, 13 nt, Human
uccacuacugcua

SEQ ID NO: 2482343 - RNA, 16 nt, Human
uccacggucuguucuu

SEQ ID NO: 2482344 - RNA, 18 nt, Human
uccacgucccccuggggc

SEQ ID NO: 2482345 - RNA, 17 nt, Human
uccacgucccccugggg

SEQ ID NO: 2482346 - RNA, 16 nt, Human
uccacgucccccuggg

SEQ ID NO: 2482347 - RNA, 18 nt, Human
uccacggucuguucuuga

SEQ ID NO: 2482348 - RNA, 19 nt, Human
uccacguucugcucaucau

SEQ ID NO: 2482349 - RNA, 17 nt, Human
uccacguucaccccucc

SEQ ID NO: 2482350 - RNA, 12 nt, Human
accuucuccuuc

SEQ ID NO: 2482351 - RNA, 23 nt, Human
accuucucccucauuucaggagc

SEQ ID NO: 2482352 - RNA, 17 nt, Human
accuucuccccauucug

SEQ ID NO: 2482353 - RNA, 12 nt, Human
accuucccagcu

SEQ ID NO: 2482354 - RNA, 14 nt, Human
accuucuccaaaug

SEQ ID NO: 2482355 - RNA, 19 nt, Human
accuucccaaacgccuccc

SEQ ID NO: 2482356 - RNA, 21 nt, Human
accuucccaaacgccuccccu

SEQ ID NO: 2482357 - RNA, 22 nt, Human
accuucccaaacgccuccccug

SEQ ID NO: 2482358 - RNA, 17 nt, Human
accuuccagucaggaug

SEQ ID NO: 2482359 - RNA, 11 nt, Human
accuucccagc

SEQ ID NO: 2482360 - RNA, 17 nt, Human
accuuccaagagccuga

SEQ ID NO: 2482361 - RNA, 13 nt, Human
accuuaucugugc

SEQ ID NO: 2482362 - RNA, 22 nt, Human
accuuagauguucuaagucuuu

SEQ ID NO: 2482363 - RNA, 22 nt, Human
accuuaguguuucugugcaugg

SEQ ID NO: 2482364 - RNA, 11 nt, Human
accuuaucugu

SEQ ID NO: 2482365 - RNA, 14 nt, Human
accuuccagcuccu

SEQ ID NO: 2482366 - RNA, 13 nt, Human
accuuccagcucc

SEQ ID NO: 2482367 - RNA, 14 nt, Human
accuucccaaacgc

SEQ ID NO: 2482368 - RNA, 17 nt, Human
accuuccagcuccugua

SEQ ID NO: 2482369 - RNA, 19 nt, Human
accuuccauggcucuuuuu

SEQ ID NO: 2482370 - RNA, 15 nt, Human
accuugaaugaugcc

SEQ ID NO: 2482371 - RNA, 14 nt, Human
accuugacagggca

SEQ ID NO: 2482372 - RNA, 15 nt, Human
accuugacagggcac

SEQ ID NO: 2482373 - RNA, 16 nt, Human
accuucuguggcucac

SEQ ID NO: 2482374 - RNA, 19 nt, Human
accuucuucagccaccucu

SEQ ID NO: 2482375 - RNA, 20 nt, Human
accuucuucagccaccucuc

SEQ ID NO: 2482376 - RNA, 15 nt, Human
accuucuguggcuca

SEQ ID NO: 2482377 - RNA, 13 nt, Human
accuucuguggcu

SEQ ID NO: 2482378 - RNA, 13 nt, Human
accuucuccuuca

SEQ ID NO: 2482379 - RNA, 13 nt, Human
accuucuguaguu

SEQ ID NO: 2482380 - RNA, 12 nt, Human
accuucuguggc

SEQ ID NO: 2482381 - RNA, 22 nt, Human
accuuaaguaagcaacagcaua

SEQ ID NO: 2482382 - RNA, 15 nt, Human
accuuaccaacuuuc

SEQ ID NO: 2482383 - RNA, 18 nt, Human
accuuaccaacuuucugu

SEQ ID NO: 2482384 - RNA, 17 nt, Human
accuuaccaacuuucug

SEQ ID NO: 2482385 - RNA, 16 nt, Human
accuuaccaacuuucu

SEQ ID NO: 2482386 - RNA, 20 nt, Human
accuuaccaacuuucuguaa

SEQ ID NO: 2482387 - RNA, 15 nt, Human
accuuacuguggagg

SEQ ID NO: 2482388 - RNA, 19 nt, Human
accuuaccaacuuucugua

SEQ ID NO: 2482389 - RNA, 21 nt, Human
accuuacuguggaggaaggau

SEQ ID NO: 2482390 - RNA, 16 nt, Human
accuggugcugccucu

SEQ ID NO: 2482391 - RNA, 13 nt, Human
accuggugcugga

SEQ ID NO: 2482392 - RNA, 14 nt, Human
accuggugcuggau

SEQ ID NO: 2482393 - RNA, 14 nt, Human
accuggucucuccu

SEQ ID NO: 2482394 - RNA, 10 nt, Human
accuggugcu

SEQ ID NO: 2482395 - RNA, 11 nt, Human
accuggugcug

SEQ ID NO: 2482396 - RNA, 21 nt, Human
accuuaaguaagcaacagcau

SEQ ID NO: 2482397 - RNA, 22 nt, Human
accuggugcuggauauuuucaa

SEQ ID NO: 2482398 - RNA, 15 nt, Human
accugguggccucug

SEQ ID NO: 2482399 - RNA, 22 nt, Human
accugguuccggaauccugucc

SEQ ID NO: 2482400 - RNA, 23 nt, Human
accuggucacaggacucugccuc

SEQ ID NO: 2482401 - RNA, 22 nt, Human
accuggucacaggacucugccu

SEQ ID NO: 2482402 - RNA, 15 nt, Human
uccaccaucaagcca

SEQ ID NO: 2482403 - RNA, 19 nt, Human
uccaccaggaaccucuuca

SEQ ID NO: 2482404 - RNA, 21 nt, Human
uccaccaggaaccucuucaga

SEQ ID NO: 2482405 - RNA, 21 nt, Human
accuuaguguuucugugcaug

SEQ ID NO: 2482406 - RNA, 20 nt, Human
accuuaguguuucugugcau

SEQ ID NO: 2482407 - RNA, 19 nt, Human
accuuaguguuucugugca

SEQ ID NO: 2482408 - RNA, 15 nt, Human
accuuaguguuucug

SEQ ID NO: 2482409 - RNA, 14 nt, Human
accuuaguguuucu

SEQ ID NO: 2482410 - RNA, 14 nt, Human
accuuaguggcuuu

SEQ ID NO: 2482411 - RNA, 21 nt, Human
accuuaggccuuccucucucc

SEQ ID NO: 2482412 - RNA, 18 nt, Human
accuuaggccuuccucuc

SEQ ID NO: 2482413 - RNA, 20 nt, Human
accuuaggccuuccucucuc

SEQ ID NO: 2482414 - RNA, 14 nt, Human
accuuaggccuucc

SEQ ID NO: 2482415 - RNA, 15 nt, Human
accuuaggccuuccu

SEQ ID NO: 2482416 - RNA, 16 nt, Human
accuuaggccuuccuc

SEQ ID NO: 2482417 - RNA, 17 nt, Human
accuuaggccuuccucu

SEQ ID NO: 2482418 - RNA, 17 nt, Human
accuuagacagucccug

SEQ ID NO: 2482419 - RNA, 14 nt, Human
accuuagccugccc

SEQ ID NO: 2482420 - RNA, 17 nt, Human
accuuagauuagcucug

SEQ ID NO: 2482421 - RNA, 19 nt, Human
accuuagauuagcucugga

SEQ ID NO: 2482422 - RNA, 18 nt, Human
accuuagauuagcucugg

SEQ ID NO: 2482423 - RNA, 21 nt, Human
accuuagcuggcauuacagcu

SEQ ID NO: 2482424 - RNA, 22 nt, Human
accuuagcuggcauuacagcug

SEQ ID NO: 2482425 - RNA, 13 nt, Human
accuuaggccuuc

SEQ ID NO: 2482426 - RNA, 16 nt, Human
accuuaggcagggaag

SEQ ID NO: 2482427 - RNA, 13 nt, Human
accuuaggcaggg

SEQ ID NO: 2482428 - RNA, 15 nt, Human
accuuaggcagggaa

SEQ ID NO: 2482429 - RNA, 23 nt, Human
accuuaggaauaaucuccuguua

SEQ ID NO: 2482430 - RNA, 18 nt, Human
accucacagaaaugagau

SEQ ID NO: 2482431 - RNA, 11 nt, Human
accucacccca

SEQ ID NO: 2482432 - RNA, 15 nt, Human
accucaccccacuua

SEQ ID NO: 2482433 - RNA, 12 nt, Human
accucaccccac

SEQ ID NO: 2482434 - RNA, 21 nt, Human
accucacugggguccuggggc

SEQ ID NO: 2482435 - RNA, 23 nt, Human
accucacugggguccuggggccu

SEQ ID NO: 2482436 - RNA, 19 nt, Human
accucaaguuuuuguuuug

SEQ ID NO: 2482437 - RNA, 16 nt, Human
accucaagcugcaucu

SEQ ID NO: 2482438 - RNA, 10 nt, Human
accucaaggg

SEQ ID NO: 2482439 - RNA, 15 nt, Human
accucaagggggacu

SEQ ID NO: 2482440 - RNA, 20 nt, Human
accucaagggggacugucuu

SEQ ID NO: 2482441 - RNA, 21 nt, Human
accucaagggggacugucuuu

SEQ ID NO: 2482442 - RNA, 19 nt, Human
accuccccagccccuagcc

SEQ ID NO: 2482443 - RNA, 16 nt, Human
accuccccagccccua

SEQ ID NO: 2482444 - RNA, 15 nt, Human
accuccccagccccu

SEQ ID NO: 2482445 - RNA, 13 nt, Human
accucagccuaga

SEQ ID NO: 2482446 - RNA, 15 nt, Human
accucagccuagacc

SEQ ID NO: 2482447 - RNA, 14 nt, Human
accucagccaugag

SEQ ID NO: 2482448 - RNA, 22 nt, Human
accucagccaugaggaguugcu

SEQ ID NO: 2482449 - RNA, 23 nt, Human
accucagccaugaggaguugcug

SEQ ID NO: 2482450 - RNA, 10 nt, Human
accucagccu

SEQ ID NO: 2482451 - RNA, 22 nt, Human
accucagacuuaccaggaagca

SEQ ID NO: 2482452 - RNA, 20 nt, Human
accucacugaaaacaucugg

SEQ ID NO: 2482453 - RNA, 18 nt, Human
accucagaguauggagcu

SEQ ID NO: 2482454 - RNA, 22 nt, Human
accucagaggcuguucuugggg

SEQ ID NO: 2482455 - RNA, 20 nt, Human
accucagaguccaggcccca

SEQ ID NO: 2482456 - RNA, 17 nt, Human
accucagaguccaggcc

SEQ ID NO: 2482457 - RNA, 19 nt, Human
accucagaguccaggcccc

SEQ ID NO: 2482458 - RNA, 13 nt, Human
accuccucaggga

SEQ ID NO: 2482459 - RNA, 23 nt, Human
accuccucagggauggccguugg

SEQ ID NO: 2482460 - RNA, 14 nt, Human
accuccucagggau

SEQ ID NO: 2482461 - RNA, 16 nt, Human
accuccuccacaccag

SEQ ID NO: 2482462 - RNA, 20 nt, Human
accucccccucccccuucuc

SEQ ID NO: 2482463 - RNA, 16 nt, Human
accuccgccucccggg

SEQ ID NO: 2482464 - RNA, 22 nt, Human
accuccccccacugcaggcccc

SEQ ID NO: 2482465 - RNA, 19 nt, Human
accucccccucccccuucu

SEQ ID NO: 2482466 - RNA, 23 nt, Human
accuccuacgucaaacaugaagu

SEQ ID NO: 2482467 - RNA, 13 nt, Human
accuccccccacu

SEQ ID NO: 2482468 - RNA, 14 nt, Human
accuccccccacug

SEQ ID NO: 2482469 - RNA, 15 nt, Human
accuccccccacugc

SEQ ID NO: 2482470 - RNA, 16 nt, Human
accuccccccacugca

SEQ ID NO: 2482471 - RNA, 17 nt, Human
accuccccccacugcag

SEQ ID NO: 2482472 - RNA, 18 nt, Human
accuccccccacugcagg

SEQ ID NO: 2482473 - RNA, 20 nt, Human
accuccgccucuuggguuca

SEQ ID NO: 2482474 - RNA, 23 nt, Human
accuccccagccccuagcccagg

SEQ ID NO: 2482475 - RNA, 13 nt, Human
accuccccagccu

SEQ ID NO: 2482476 - RNA, 20 nt, Human
accuccccaggccguggcug

SEQ ID NO: 2482477 - RNA, 19 nt, Human
accuccccaggccguggcu

SEQ ID NO: 2482478 - RNA, 14 nt, Human
accuccccaggccg

SEQ ID NO: 2482479 - RNA, 13 nt, Human
accuccccaggcc

SEQ ID NO: 2482480 - RNA, 20 nt, Human
accgugggcggggccuugcg

SEQ ID NO: 2482481 - RNA, 19 nt, Human
accgugggcggggccuugc

SEQ ID NO: 2482482 - RNA, 17 nt, Human
accgugggcggggccuu

SEQ ID NO: 2482483 - RNA, 15 nt, Human
accgugggcggggcc

SEQ ID NO: 2482484 - RNA, 14 nt, Human
accgugggcucccu

SEQ ID NO: 2482485 - RNA, 16 nt, Human
accgugggcucccuga

SEQ ID NO: 2482486 - RNA, 14 nt, Human
accguguaaaccaa

SEQ ID NO: 2482487 - RNA, 21 nt, Human
accguguugguuuugacugga

SEQ ID NO: 2482488 - RNA, 14 nt, Human
accguucugugcac

SEQ ID NO: 2482489 - RNA, 13 nt, Human
accguuucuuccc

SEQ ID NO: 2482490 - RNA, 18 nt, Human
accguuggggauugggga

SEQ ID NO: 2482491 - RNA, 19 nt, Human
accuaacgcccuauuuuug

SEQ ID NO: 2482492 - RNA, 17 nt, Human
accuaaccccuuuccug

SEQ ID NO: 2482493 - RNA, 13 nt, Human
accuaaaaaagau

SEQ ID NO: 2482494 - RNA, 14 nt, Human
accguuucuucccu

SEQ ID NO: 2482495 - RNA, 18 nt, Human
accuaaccccuuuccugc

SEQ ID NO: 2482496 - RNA, 20 nt, Human
accuaauccaggcagaucca

SEQ ID NO: 2482497 - RNA, 11 nt, Human
accuaauccaa

SEQ ID NO: 2482498 - RNA, 15 nt, Human
accuaauccaggcag

SEQ ID NO: 2482499 - RNA, 17 nt, Human
accuaaucaggcugagg

SEQ ID NO: 2482500 - RNA, 16 nt, Human
accuaaucaggcugag

SEQ ID NO: 2482501 - RNA, 16 nt, Human
accuaagggacauguu

SEQ ID NO: 2482502 - RNA, 15 nt, Human
accuaagggacaugu

SEQ ID NO: 2482503 - RNA, 21 nt, Human
accuaacucaccuaacucaua

SEQ ID NO: 2482504 - RNA, 23 nt, Human
accuaagggacauguuuugauaa

SEQ ID NO: 2482505 - RNA, 18 nt, Human
accuaaguccuuuaugug

SEQ ID NO: 2482506 - RNA, 20 nt, Human
accuaaguuucaguugauuu

SEQ ID NO: 2482507 - RNA, 14 nt, Human
accuagcagcaccg

SEQ ID NO: 2482508 - RNA, 21 nt, Human
accuagcagcaccguucugug

SEQ ID NO: 2482509 - RNA, 22 nt, Human
accuagcagcaccguucugugc

SEQ ID NO: 2482510 - RNA, 13 nt, Human
accuagccuuaga

SEQ ID NO: 2482511 - RNA, 16 nt, Human
accuagcgucaguauu

SEQ ID NO: 2482512 - RNA, 23 nt, Human
accuagcagcaccguucugugca

SEQ ID NO: 2482513 - RNA, 19 nt, Human
accuauaaaguaaagcuaa

SEQ ID NO: 2482514 - RNA, 16 nt, Human
accuaugucauuucau

SEQ ID NO: 2482515 - RNA, 18 nt, Human
accuaugucauuucauuu

SEQ ID NO: 2482516 - RNA, 14 nt, Human
accucaagcugcau

SEQ ID NO: 2482517 - RNA, 12 nt, Human
accuaugucauu

SEQ ID NO: 2482518 - RNA, 15 nt, Human
accuaugucauuuca

SEQ ID NO: 2482519 - RNA, 19 nt, Human
accuaugauauuuucugug

SEQ ID NO: 2482520 - RNA, 22 nt, Human
accuaugguauaaugguugacu

SEQ ID NO: 2482521 - RNA, 15 nt, Human
accuauagucccagc

SEQ ID NO: 2482522 - RNA, 16 nt, Human
accuauagucccagcu

SEQ ID NO: 2482523 - RNA, 13 nt, Human
accuauaugauuu

SEQ ID NO: 2482524 - RNA, 22 nt, Human
accuauauaauaaagcuacuga

SEQ ID NO: 2482525 - RNA, 22 nt, Human
accuauagucccagcuacucag

SEQ ID NO: 2482526 - RNA, 18 nt, Human
accuaucucgugggagag

SEQ ID NO: 2482527 - RNA, 17 nt, Human
accuaucucgugggaga

SEQ ID NO: 2482528 - RNA, 15 nt, Human
accuaucucguggga

SEQ ID NO: 2482529 - RNA, 17 nt, Human
accuauaugauuuauag

SEQ ID NO: 2482530 - RNA, 17 nt, Human
accgccaaggcuggggg

SEQ ID NO: 2482531 - RNA, 12 nt, Human
accgcaggaagc

SEQ ID NO: 2482532 - RNA, 13 nt, Human
accgcaggaagcu

SEQ ID NO: 2482533 - RNA, 14 nt, Human
accgcaggaagcug

SEQ ID NO: 2482534 - RNA, 17 nt, Human
accgccagauggggccu

SEQ ID NO: 2482535 - RNA, 17 nt, Human
accgccacauggcuucc

SEQ ID NO: 2482536 - RNA, 20 nt, Human
accgccagauggggccucug

SEQ ID NO: 2482537 - RNA, 21 nt, Human
accgccacacacacaggagca

SEQ ID NO: 2482538 - RNA, 22 nt, Human
accgcaugcccccucgugccag

SEQ ID NO: 2482539 - RNA, 14 nt, Human
accgcaugcccccu

SEQ ID NO: 2482540 - RNA, 23 nt, Human
accgcagucgucgcacagucucu

SEQ ID NO: 2482541 - RNA, 22 nt, Human
accgcagucgucgcacagucuc

SEQ ID NO: 2482542 - RNA, 21 nt, Human
accgcagucgucgcacagucu

SEQ ID NO: 2482543 - RNA, 16 nt, Human
accgcaggaagcugcu

SEQ ID NO: 2482544 - RNA, 19 nt, Human
accgcaggaagcugcuccg

SEQ ID NO: 2482545 - RNA, 14 nt, Human
accgagugaaccua

SEQ ID NO: 2482546 - RNA, 23 nt, Human
accgagccucugucacugcaggc

SEQ ID NO: 2482547 - RNA, 19 nt, Human
accgagcaaagaucaaaau

SEQ ID NO: 2482548 - RNA, 17 nt, Human
accgagcaaagaucaaa

SEQ ID NO: 2482549 - RNA, 24 nt, Human
accgagucucuucuccacuggaug

SEQ ID NO: 2482550 - RNA, 21 nt, Human
accgagucucuucuccacugg

SEQ ID NO: 2482551 - RNA, 20 nt, Human
accgagucucuucuccacug

SEQ ID NO: 2482552 - RNA, 20 nt, Human
accgcagacaggaccaggga

SEQ ID NO: 2482553 - RNA, 21 nt, Human
accgagugaaccuaccuucau

SEQ ID NO: 2482554 - RNA, 13 nt, Human
accgaugcuccag

SEQ ID NO: 2482555 - RNA, 15 nt, Human
accgaugcuccagcc

SEQ ID NO: 2482556 - RNA, 22 nt, Human
accgauucaucucucagaaggg

SEQ ID NO: 2482557 - RNA, 23 nt, Human
accgaugcuccagccaaccccug

SEQ ID NO: 2482558 - RNA, 18 nt, Human
accgccgacuuuguaccc

SEQ ID NO: 2482559 - RNA, 19 nt, Human
accgcccccuccucuagcu

SEQ ID NO: 2482560 - RNA, 14 nt, Human
accgcccccuccuc

SEQ ID NO: 2482561 - RNA, 12 nt, Human
accgcccccucc

SEQ ID NO: 2482562 - RNA, 11 nt, Human
accgcccccuc

SEQ ID NO: 2482563 - RNA, 12 nt, Human
accgccuucucu

SEQ ID NO: 2482564 - RNA, 15 nt, Human
accgcuccccagccc

SEQ ID NO: 2482565 - RNA, 17 nt, Human
accgcuccccagcccag

SEQ ID NO: 2482566 - RNA, 18 nt, Human
accgcuccccagcccagg

SEQ ID NO: 2482567 - RNA, 19 nt, Human
accgcuccccagcccaggg

SEQ ID NO: 2482568 - RNA, 20 nt, Human
accgcuccccagcccagggu

SEQ ID NO: 2482569 - RNA, 16 nt, Human
accgccuccuacagcc

SEQ ID NO: 2482570 - RNA, 21 nt, Human
accgccgacuuuguacccccc

SEQ ID NO: 2482571 - RNA, 16 nt, Human
accgugggcagggagc

SEQ ID NO: 2482572 - RNA, 18 nt, Human
accgugggcagggagcgg

SEQ ID NO: 2482573 - RNA, 15 nt, Human
accggacuuuucugc

SEQ ID NO: 2482574 - RNA, 16 nt, Human
accggacuuuucugca

SEQ ID NO: 2482575 - RNA, 16 nt, Human
accgcuuccggcuccu

SEQ ID NO: 2482576 - RNA, 21 nt, Human
accgcugccuaaguggcugcu

SEQ ID NO: 2482577 - RNA, 22 nt, Human
accgcuuccggcuccugugcuu

SEQ ID NO: 2482578 - RNA, 17 nt, Human
accgcugauucucaggg

SEQ ID NO: 2482579 - RNA, 13 nt, Human
accgcugaauaug

SEQ ID NO: 2482580 - RNA, 19 nt, Human
accgcugccuaaguggcug

SEQ ID NO: 2482581 - RNA, 20 nt, Human
accgcugccuaaguggcugc

SEQ ID NO: 2482582 - RNA, 12 nt, Human
ucauauuauaca

SEQ ID NO: 2482583 - RNA, 16 nt, Human
ucauauucugucugga

SEQ ID NO: 2482584 - RNA, 17 nt, Human
ucauauuccugcagccu

SEQ ID NO: 2482585 - RNA, 19 nt, Human
ucauauguugcucagucuc

SEQ ID NO: 2482586 - RNA, 18 nt, Human
ucauauguugcucagucu

SEQ ID NO: 2482587 - RNA, 20 nt, Human
ucauauguugcucagucucc

SEQ ID NO: 2482588 - RNA, 15 nt, Human
ucauauguugcucag

SEQ ID NO: 2482589 - RNA, 14 nt, Human
ucauauguugcuca

SEQ ID NO: 2482590 - RNA, 13 nt, Human
ucauauguugcuc

SEQ ID NO: 2482591 - RNA, 23 nt, Human
acccuuuuggcccccgagcuggg

SEQ ID NO: 2482592 - RNA, 10 nt, Human
acccuuuucu

SEQ ID NO: 2482593 - RNA, 14 nt, Human
acccuuuuggcccc

SEQ ID NO: 2482594 - RNA, 23 nt, Human
acccuuugguuuuuuucuucugu

SEQ ID NO: 2482595 - RNA, 21 nt, Human
acccuuugguuuuuuucuucu

SEQ ID NO: 2482596 - RNA, 12 nt, Human
acccuuuuccag

SEQ ID NO: 2482597 - RNA, 23 nt, Human
acccuuugcugugaggcuguccu

SEQ ID NO: 2482598 - RNA, 22 nt, Human
acccuuugcugugaggcugucc

SEQ ID NO: 2482599 - RNA, 23 nt, Human
acccuuuggggggggcccgccug

SEQ ID NO: 2482600 - RNA, 12 nt, Human
acccuuugguuu

SEQ ID NO: 2482601 - RNA, 12 nt, Human
acccuuuggggg

SEQ ID NO: 2482602 - RNA, 23 nt, Human
accgaaguggacuggccccuggg

SEQ ID NO: 2482603 - RNA, 21 nt, Human
accgaaguggacuggccccug

SEQ ID NO: 2482604 - RNA, 20 nt, Human
accgaaguggacuggccccu

SEQ ID NO: 2482605 - RNA, 16 nt, Human
accgacgcgucuccug

SEQ ID NO: 2482606 - RNA, 23 nt, Human
accgaccugguuuuuaaauagag

SEQ ID NO: 2482607 - RNA, 18 nt, Human
accgacguugccaucaaa

SEQ ID NO: 2482608 - RNA, 18 nt, Human
accgacgcgucuccuguu

SEQ ID NO: 2482609 - RNA, 17 nt, Human
accgacgcgucuccugu

SEQ ID NO: 2482610 - RNA, 18 nt, Human
accgagucucuucuccac

SEQ ID NO: 2482611 - RNA, 17 nt, Human
accgagaguagccgaga

SEQ ID NO: 2482612 - RNA, 15 nt, Human
accgagcaaagauca

SEQ ID NO: 2482613 - RNA, 23 nt, Human
accgagaguagccgagagccugc

SEQ ID NO: 2482614 - RNA, 20 nt, Human
ucauauuuacuucuuauaca

SEQ ID NO: 2482615 - RNA, 21 nt, Human
ucauauuuacuucuuauacau

SEQ ID NO: 2482616 - RNA, 22 nt, Human
ucauauuuacuucuuauacauu

SEQ ID NO: 2482617 - RNA, 16 nt, Human
ucauauuuacuucuua

SEQ ID NO: 2482618 - RNA, 12 nt, Human
ucauauugaaua

SEQ ID NO: 2482619 - RNA, 13 nt, Human
ucauguuccaaau

SEQ ID NO: 2482620 - RNA, 14 nt, Human
ucauguuccuucaa

SEQ ID NO: 2482621 - RNA, 13 nt, Human
ucauguuccucaa

SEQ ID NO: 2482622 - RNA, 16 nt, Human
ucauguguguccacga

SEQ ID NO: 2482623 - RNA, 21 nt, Human
ucauguguguccacgacuguc

SEQ ID NO: 2482624 - RNA, 23 nt, Human
ucauguguguccacgacugucuc

SEQ ID NO: 2482625 - RNA, 17 nt, Human
ucauguguuugaacuuc

SEQ ID NO: 2482626 - RNA, 16 nt, Human
ucaugugugcucuucu

SEQ ID NO: 2482627 - RNA, 20 nt, Human
ucaugugugcaacaggguau

SEQ ID NO: 2482628 - RNA, 14 nt, Human
ucaugugugcucuu

SEQ ID NO: 2482629 - RNA, 12 nt, Human
ucaugugugucc

SEQ ID NO: 2482630 - RNA, 14 nt, Human
ucaugugaaaucau

SEQ ID NO: 2482631 - RNA, 13 nt, Human
ucaugucuggcua

SEQ ID NO: 2482632 - RNA, 16 nt, Human
ucauguuuaagaaauu

SEQ ID NO: 2482633 - RNA, 15 nt, Human
ucauguuuuaacaaa

SEQ ID NO: 2482634 - RNA, 14 nt, Human
ucauguuuaagaaa

SEQ ID NO: 2482635 - RNA, 22 nt, Human
ucauguuuuccauuguuugaaa

SEQ ID NO: 2482636 - RNA, 16 nt, Human
ucauguuuuaacaaaa

SEQ ID NO: 2482637 - RNA, 18 nt, Human
ucauguuuuaacaaaaac

SEQ ID NO: 2482638 - RNA, 13 nt, Human
ucauguuggucaa

SEQ ID NO: 2482639 - RNA, 17 nt, Human
ucauguuggccaggcug

SEQ ID NO: 2482640 - RNA, 21 nt, Human
ucauguuccuucaagaucaug

SEQ ID NO: 2482641 - RNA, 22 nt, Human
ucauguugcacacccacucagc

SEQ ID NO: 2482642 - RNA, 11 nt, Human
ucauguucuua

SEQ ID NO: 2482643 - RNA, 17 nt, Human
ucauguucuuaauucuu

SEQ ID NO: 2482644 - RNA, 15 nt, Human
ucauuaaauggggcu

SEQ ID NO: 2482645 - RNA, 19 nt, Human
ucauuaagcccucuuccau

SEQ ID NO: 2482646 - RNA, 18 nt, Human
ucauuaagcccucuucca

SEQ ID NO: 2482647 - RNA, 23 nt, Human
ucauuccuugagaaaaacaauga

SEQ ID NO: 2482648 - RNA, 17 nt, Human
ucauguuuugugacuau

SEQ ID NO: 2482649 - RNA, 16 nt, Human
ucauguuuugugacua

SEQ ID NO: 2482650 - RNA, 15 nt, Human
ucauguuuugugacu

SEQ ID NO: 2482651 - RNA, 14 nt, Human
ucauguuuugugac

SEQ ID NO: 2482652 - RNA, 21 nt, Human
ucauuaaaauaaauaaaugca

SEQ ID NO: 2482653 - RNA, 13 nt, Human
ucauuaaaguucu

SEQ ID NO: 2482654 - RNA, 12 nt, Human
ucauuaaaguuc

SEQ ID NO: 2482655 - RNA, 14 nt, Human
ucauuaaaguucua

SEQ ID NO: 2482656 - RNA, 21 nt, Human
ucauguuuuugaaacagaacc

SEQ ID NO: 2482657 - RNA, 18 nt, Human
ucauuaaaggcuucucuc

SEQ ID NO: 2482658 - RNA, 15 nt, Human
ucauuaaagcauuua

SEQ ID NO: 2482659 - RNA, 21 nt, Human
ucauguccccaaaccugcaag

SEQ ID NO: 2482660 - RNA, 20 nt, Human
ucauguccccaaaccugcaa

SEQ ID NO: 2482661 - RNA, 17 nt, Human
ucauguccccaaaccug

SEQ ID NO: 2482662 - RNA, 19 nt, Human
ucaugucaggccugugugu

SEQ ID NO: 2482663 - RNA, 17 nt, Human
ucaugucaggccugugu

SEQ ID NO: 2482664 - RNA, 16 nt, Human
ucaugucaggccugug

SEQ ID NO: 2482665 - RNA, 14 nt, Human
ucaugucaggccug

SEQ ID NO: 2482666 - RNA, 21 nt, Human
ucaugucaacuucuggcuccu

SEQ ID NO: 2482667 - RNA, 18 nt, Human
ucaugucaacuucuggcu

SEQ ID NO: 2482668 - RNA, 17 nt, Human
ucaugucaacuucuggc

SEQ ID NO: 2482669 - RNA, 22 nt, Human
ucaugcccacccccugcccugc

SEQ ID NO: 2482670 - RNA, 21 nt, Human
ucaugcccacccccugcccug

SEQ ID NO: 2482671 - RNA, 20 nt, Human
ucaugcccacccccugcccu

SEQ ID NO: 2482672 - RNA, 19 nt, Human
ucaugcccacccccugccc

SEQ ID NO: 2482673 - RNA, 18 nt, Human
ucaugcccacccccugcc

SEQ ID NO: 2482674 - RNA, 16 nt, Human
ucaugcccacccccug

SEQ ID NO: 2482675 - RNA, 16 nt, Human
ucaugccaagcauuua

SEQ ID NO: 2482676 - RNA, 19 nt, Human
ucaugccaccauggccagc

SEQ ID NO: 2482677 - RNA, 12 nt, Human
ucaugccagcua

SEQ ID NO: 2482678 - RNA, 22 nt, Human
ucaugccaccauggccagccaa

SEQ ID NO: 2482679 - RNA, 23 nt, Human
ucaugccagcuacuuccuccucc

SEQ ID NO: 2482680 - RNA, 21 nt, Human
ucaugccagcuacuuccuccu

SEQ ID NO: 2482681 - RNA, 15 nt, Human
ucaugcccacccccu

SEQ ID NO: 2482682 - RNA, 21 nt, Human
ucaugccaagcauuuaaugua

SEQ ID NO: 2482683 - RNA, 13 nt, Human
ucaugcccacccc

SEQ ID NO: 2482684 - RNA, 14 nt, Human
ucaugcauggaaau

SEQ ID NO: 2482685 - RNA, 22 nt, Human
ucaugauagaaggcuaugggga

SEQ ID NO: 2482686 - RNA, 15 nt, Human
ucaugcauggaaauu

SEQ ID NO: 2482687 - RNA, 18 nt, Human
ucaugcauguccuguaaa

SEQ ID NO: 2482688 - RNA, 12 nt, Human
ucaugcauuguu

SEQ ID NO: 2482689 - RNA, 18 nt, Human
ucaugagugaauaaaugu

SEQ ID NO: 2482690 - RNA, 16 nt, Human
ucaugagcugagcagg

SEQ ID NO: 2482691 - RNA, 18 nt, Human
ucaugacuuuuccaugua

SEQ ID NO: 2482692 - RNA, 17 nt, Human
ucaugacuuuuccaugu

SEQ ID NO: 2482693 - RNA, 22 nt, Human
ucaugaauuaguuuuauaugcu

SEQ ID NO: 2482694 - RNA, 23 nt, Human
ucauccacugugccaugugccag

SEQ ID NO: 2482695 - RNA, 21 nt, Human
ucauccacugugccaugugcc

SEQ ID NO: 2482696 - RNA, 19 nt, Human
ucauccacugugccaugug

SEQ ID NO: 2482697 - RNA, 20 nt, Human
ucaugaauucuuaugcuuau

SEQ ID NO: 2482698 - RNA, 19 nt, Human
ucaugacaaagacugagua

SEQ ID NO: 2482699 - RNA, 17 nt, Human
ucaugacauguuauaua

SEQ ID NO: 2482700 - RNA, 14 nt, Human
ucaugacauguuau

SEQ ID NO: 2482701 - RNA, 21 nt, Human
ucaugacauguuauauauuuu

SEQ ID NO: 2482702 - RNA, 19 nt, Human
ucaugacauguuauauauu

SEQ ID NO: 2482703 - RNA, 22 nt, Human
ucaugacauuccuaaacuaucu

SEQ ID NO: 2482704 - RNA, 21 nt, Human
ucauugcuuugaagcaguugu

SEQ ID NO: 2482705 - RNA, 13 nt, Human
ucauugcuuacaa

SEQ ID NO: 2482706 - RNA, 17 nt, Human
ucauugauaugaaaaau

SEQ ID NO: 2482707 - RNA, 18 nt, Human
ucauugauaugaaaaaua

SEQ ID NO: 2482708 - RNA, 19 nt, Human
ucauugagaguuuugucuu

SEQ ID NO: 2482709 - RNA, 13 nt, Human
ucauugauaugaa

SEQ ID NO: 2482710 - RNA, 15 nt, Human
ucauugauaugaaaa

SEQ ID NO: 2482711 - RNA, 16 nt, Human
ucauugauaugaaaaa

SEQ ID NO: 2482712 - RNA, 22 nt, Human
ucauugaccugaggcccuucuc

SEQ ID NO: 2482713 - RNA, 18 nt, Human
ucauugagaguuuugucu

SEQ ID NO: 2482714 - RNA, 14 nt, Human
ucauugagaguuuu

SEQ ID NO: 2482715 - RNA, 20 nt, Human
ucauugacuaucaaacugaa

SEQ ID NO: 2482716 - RNA, 21 nt, Human
ucauugacuaucaaacugaag

SEQ ID NO: 2482717 - RNA, 21 nt, Human
ucauucuccuuguguuacuaa

SEQ ID NO: 2482718 - RNA, 16 nt, Human
ucauucuccugccugu

SEQ ID NO: 2482719 - RNA, 15 nt, Human
ucauucuccugccug

SEQ ID NO: 2482720 - RNA, 14 nt, Human
ucauucuccugccu

SEQ ID NO: 2482721 - RNA, 13 nt, Human
ucauucuccugcc

SEQ ID NO: 2482722 - RNA, 19 nt, Human
ucauugaccugaggcccuu

SEQ ID NO: 2482723 - RNA, 22 nt, Human
ucauuaagcccucuuccaucau

SEQ ID NO: 2482724 - RNA, 15 nt, Human
ucauucguucugugg

SEQ ID NO: 2482725 - RNA, 12 nt, Human
ucauucuccugc

SEQ ID NO: 2482726 - RNA, 20 nt, Human
accuccuuucucuucucugu

SEQ ID NO: 2482727 - RNA, 18 nt, Human
accuccuuucucuucucu

SEQ ID NO: 2482728 - RNA, 14 nt, Human
accucgcuggacuc

SEQ ID NO: 2482729 - RNA, 16 nt, Human
accucgcuggacucuc

SEQ ID NO: 2482730 - RNA, 18 nt, Human
accucgcuggacucucag

SEQ ID NO: 2482731 - RNA, 17 nt, Human
accucggugccuuccuc

SEQ ID NO: 2482732 - RNA, 17 nt, Human
ucauuggcuuuauccuc

SEQ ID NO: 2482733 - RNA, 16 nt, Human
ucauuggcuuuauccu

SEQ ID NO: 2482734 - RNA, 14 nt, Human
ucauuggcuuuauc

SEQ ID NO: 2482735 - RNA, 11 nt, Human
ucauuggcuuu

SEQ ID NO: 2482736 - RNA, 23 nt, Human
ucauugcuuugaagcaguugugu

SEQ ID NO: 2482737 - RNA, 21 nt, Human
ucauuggauucugagagcugu

SEQ ID NO: 2482738 - RNA, 13 nt, Human
ucauuguaaucac

SEQ ID NO: 2482739 - RNA, 17 nt, Human
accuccuuucucuucuc

SEQ ID NO: 2482740 - RNA, 16 nt, Human
accuccuuucucuucu

SEQ ID NO: 2482741 - RNA, 16 nt, Human
ucauuguaauguuacu

SEQ ID NO: 2482742 - RNA, 12 nt, Human
accucugcacaa

SEQ ID NO: 2482743 - RNA, 22 nt, Human
accugaagcuaucguaaaauua

SEQ ID NO: 2482744 - RNA, 15 nt, Human
accucugauaccuca

SEQ ID NO: 2482745 - RNA, 13 nt, Human
accucugauaccu

SEQ ID NO: 2482746 - RNA, 23 nt, Human
accucucuuauagaauauuuauu

SEQ ID NO: 2482747 - RNA, 22 nt, Human
accucucuuauagaauauuuau

SEQ ID NO: 2482748 - RNA, 20 nt, Human
accucugaaacccuggacca

SEQ ID NO: 2482749 - RNA, 14 nt, Human
accucucuuuuuca

SEQ ID NO: 2482750 - RNA, 20 nt, Human
accucugaaaacggcccucu

SEQ ID NO: 2482751 - RNA, 14 nt, Human
accucucucacucc

SEQ ID NO: 2482752 - RNA, 23 nt, Human
accucucccuuggauuguccccg

SEQ ID NO: 2482753 - RNA, 19 nt, Human
accucucucacuccuugaa

SEQ ID NO: 2482754 - RNA, 23 nt, Human
accucucuccuuugcugaggccu

SEQ ID NO: 2482755 - RNA, 15 nt, Human
accucucccucaaca

SEQ ID NO: 2482756 - RNA, 20 nt, Human
accucuccuuuggccauucc

SEQ ID NO: 2482757 - RNA, 14 nt, Human
accucuccucaugu

SEQ ID NO: 2482758 - RNA, 23 nt, Human
accucuacuaaaaagaaggaaaa

SEQ ID NO: 2482759 - RNA, 22 nt, Human
accucuacuaaaaagaaggaaa

SEQ ID NO: 2482760 - RNA, 12 nt, Human
accucucccuca

SEQ ID NO: 2482761 - RNA, 21 nt, Human
accucuccccuggaacugucu

SEQ ID NO: 2482762 - RNA, 18 nt, Human
accucuaauuuauuuugu

SEQ ID NO: 2482763 - RNA, 15 nt, Human
accucucccuuggau

SEQ ID NO: 2482764 - RNA, 14 nt, Human
accucucccuugga

SEQ ID NO: 2482765 - RNA, 13 nt, Human
accucucccuugg

SEQ ID NO: 2482766 - RNA, 23 nt, Human
accucucccugacccuguauaua

SEQ ID NO: 2482767 - RNA, 22 nt, Human
accucucccugacccuguauau

SEQ ID NO: 2482768 - RNA, 17 nt, Human
accucucccugacccug

SEQ ID NO: 2482769 - RNA, 14 nt, Human
accucucccugacc

SEQ ID NO: 2482770 - RNA, 14 nt, Human
accagcgcccgcug

SEQ ID NO: 2482771 - RNA, 13 nt, Human
accagcgcccgcu

SEQ ID NO: 2482772 - RNA, 14 nt, Human
accagcgaagggag

SEQ ID NO: 2482773 - RNA, 23 nt, Human
accagcgaggaggcuccagaggg

SEQ ID NO: 2482774 - RNA, 19 nt, Human
accagccuuucucccaggc

SEQ ID NO: 2482775 - RNA, 22 nt, Human
accagccuuucucccaggccag

SEQ ID NO: 2482776 - RNA, 17 nt, Human
accaggacucccuccuc

SEQ ID NO: 2482777 - RNA, 18 nt, Human
accaggacucccuccuca

SEQ ID NO: 2482778 - RNA, 21 nt, Human
accaggacucccuccucaccu

SEQ ID NO: 2482779 - RNA, 14 nt, Human
accaggagaaccac

SEQ ID NO: 2482780 - RNA, 18 nt, Human
accaggagaaccacuaca

SEQ ID NO: 2482781 - RNA, 19 nt, Human
accaggagaaccacuacau

SEQ ID NO: 2482782 - RNA, 20 nt, Human
accaggagaaccacuacaug

SEQ ID NO: 2482783 - RNA, 14 nt, Human
accaggagcugcuc

SEQ ID NO: 2482784 - RNA, 18 nt, Human
accaggagggcacuggag

SEQ ID NO: 2482785 - RNA, 16 nt, Human
accaggagcugcucac

SEQ ID NO: 2482786 - RNA, 15 nt, Human
accaggagcugcuca

SEQ ID NO: 2482787 - RNA, 16 nt, Human
accaggacucccuccu

SEQ ID NO: 2482788 - RNA, 17 nt, Human
accaggagucccuggua

SEQ ID NO: 2482789 - RNA, 22 nt, Human
accaggagucccugguaauaag

SEQ ID NO: 2482790 - RNA, 20 nt, Human
accaggcacgaacccaccug

SEQ ID NO: 2482791 - RNA, 21 nt, Human
accaggcacgaacccaccugc

SEQ ID NO: 2482792 - RNA, 12 nt, Human
accaggccaccu

SEQ ID NO: 2482793 - RNA, 22 nt, Human
accaggcacgaacccaccugcu

SEQ ID NO: 2482794 - RNA, 23 nt, Human
accaggcacgaacccaccugcug

SEQ ID NO: 2482795 - RNA, 14 nt, Human
accaggauggcccu

SEQ ID NO: 2482796 - RNA, 19 nt, Human
accaggcaacuugggaacu

SEQ ID NO: 2482797 - RNA, 23 nt, Human
ucaccugaagacucauucuucug

SEQ ID NO: 2482798 - RNA, 22 nt, Human
ucaccugagcaggaccucugaa

SEQ ID NO: 2482799 - RNA, 21 nt, Human
ucaccugagcccggaugcuuc

SEQ ID NO: 2482800 - RNA, 22 nt, Human
ucaccugagcccggaugcuucu

SEQ ID NO: 2482801 - RNA, 23 nt, Human
ucaccugagcccggaugcuucuc

SEQ ID NO: 2482802 - RNA, 19 nt, Human
ucaccugaagacucauucu

SEQ ID NO: 2482803 - RNA, 13 nt, Human
ucaccucccccau

SEQ ID NO: 2482804 - RNA, 15 nt, Human
ucaccucccccaucu

SEQ ID NO: 2482805 - RNA, 17 nt, Human
accaggccaccucccca

SEQ ID NO: 2482806 - RNA, 14 nt, Human
accaggccaccucc

SEQ ID NO: 2482807 - RNA, 19 nt, Human
accaggccgccccagccuc

SEQ ID NO: 2482808 - RNA, 22 nt, Human
ucaccuccucuaagguugggca

SEQ ID NO: 2482809 - RNA, 12 nt, Human
ucaccuccucua

SEQ ID NO: 2482810 - RNA, 16 nt, Human
accaggccgccccagc

SEQ ID NO: 2482811 - RNA, 13 nt, Human
ucaccuccccucc

SEQ ID NO: 2482812 - RNA, 14 nt, Human
ucaccuccccuccu

SEQ ID NO: 2482813 - RNA, 15 nt, Human
ucaccuccccuccuu

SEQ ID NO: 2482814 - RNA, 23 nt, Human
ucaccuccggucgugucucuggu

SEQ ID NO: 2482815 - RNA, 21 nt, Human
ucaccuccggucgugucucug

SEQ ID NO: 2482816 - RNA, 17 nt, Human
ucaccuccccuccuugc

SEQ ID NO: 2482817 - RNA, 23 nt, Human
accacuuguguuuugcaagccag

SEQ ID NO: 2482818 - RNA, 19 nt, Human
accacuuguguuuugcaag

SEQ ID NO: 2482819 - RNA, 12 nt, Human
accacuuuuguu

SEQ ID NO: 2482820 - RNA, 17 nt, Human
accagacaccuugacag

SEQ ID NO: 2482821 - RNA, 18 nt, Human
accagagaccguccucac

SEQ ID NO: 2482822 - RNA, 16 nt, Human
accagagaccguccuc

SEQ ID NO: 2482823 - RNA, 23 nt, Human
accagacaccuugacagggcaca

SEQ ID NO: 2482824 - RNA, 22 nt, Human
accagacaccuugacagggcac

SEQ ID NO: 2482825 - RNA, 22 nt, Human
accagagcccaccuuggcucaa

SEQ ID NO: 2482826 - RNA, 19 nt, Human
accagagcccaccuuggcu

SEQ ID NO: 2482827 - RNA, 12 nt, Human
accagagcagau

SEQ ID NO: 2482828 - RNA, 15 nt, Human
accagagcagaugca

SEQ ID NO: 2482829 - RNA, 20 nt, Human
accagagauaauaugagaau

SEQ ID NO: 2482830 - RNA, 20 nt, Human
accagagcauuuccaacacc

SEQ ID NO: 2482831 - RNA, 22 nt, Human
accagagcagaugcagagagcc

SEQ ID NO: 2482832 - RNA, 17 nt, Human
accagagcagaugcaga

SEQ ID NO: 2482833 - RNA, 16 nt, Human
accagagcagaugcag

SEQ ID NO: 2482834 - RNA, 13 nt, Human
accagagccaugg

SEQ ID NO: 2482835 - RNA, 14 nt, Human
accagagccaugga

SEQ ID NO: 2482836 - RNA, 17 nt, Human
accagagccauggacuc

SEQ ID NO: 2482837 - RNA, 23 nt, Human
accagagccauggacucuacacu

SEQ ID NO: 2482838 - RNA, 14 nt, Human
accagagccccaca

SEQ ID NO: 2482839 - RNA, 17 nt, Human
accagagccccacacgg

SEQ ID NO: 2482840 - RNA, 17 nt, Human
accagagcccaccuugg

SEQ ID NO: 2482841 - RNA, 20 nt, Human
accagagccccacacggagg

SEQ ID NO: 2482842 - RNA, 23 nt, Human
accagccucucuugguuuccuuc

SEQ ID NO: 2482843 - RNA, 11 nt, Human
accagccuggc

SEQ ID NO: 2482844 - RNA, 12 nt, Human
accagccuggcc

SEQ ID NO: 2482845 - RNA, 20 nt, Human
accagccuggucaacauggu

SEQ ID NO: 2482846 - RNA, 14 nt, Human
accagccugggcag

SEQ ID NO: 2482847 - RNA, 23 nt, Human
accagccuguuggacccgcucug

SEQ ID NO: 2482848 - RNA, 14 nt, Human
accagccuguugga

SEQ ID NO: 2482849 - RNA, 16 nt, Human
accagccuuucuccca

SEQ ID NO: 2482850 - RNA, 17 nt, Human
accagccuuucucccag

SEQ ID NO: 2482851 - RNA, 20 nt, Human
accagccugaccaacauggu

SEQ ID NO: 2482852 - RNA, 13 nt, Human
accagccugggca

SEQ ID NO: 2482853 - RNA, 15 nt, Human
accagccuggccaac

SEQ ID NO: 2482854 - RNA, 20 nt, Human
accagccuggccaacauggu

SEQ ID NO: 2482855 - RNA, 15 nt, Human
accacuucagcugac

SEQ ID NO: 2482856 - RNA, 18 nt, Human
accacuuaaaaaaugucc

SEQ ID NO: 2482857 - RNA, 13 nt, Human
accacuucagcug

SEQ ID NO: 2482858 - RNA, 14 nt, Human
accacuucagcuga

SEQ ID NO: 2482859 - RNA, 14 nt, Human
accacugcagaaga

SEQ ID NO: 2482860 - RNA, 19 nt, Human
accacugcagaagacagua

SEQ ID NO: 2482861 - RNA, 13 nt, Human
accacugcagaag

SEQ ID NO: 2482862 - RNA, 24 nt, Human
accacaucuugcucugcugacaga

SEQ ID NO: 2482863 - RNA, 21 nt, Human
accacaucuugcucugcugac

SEQ ID NO: 2482864 - RNA, 20 nt, Human
accacaucuugcucugcuga

SEQ ID NO: 2482865 - RNA, 16 nt, Human
accacaucuugcucug

SEQ ID NO: 2482866 - RNA, 21 nt, Human
accacauccuccguccagccg

SEQ ID NO: 2482867 - RNA, 22 nt, Human
accacauccuccguccagccgc

SEQ ID NO: 2482868 - RNA, 20 nt, Human
accacucuaucaaguauuau

SEQ ID NO: 2482869 - RNA, 23 nt, Human
accacauccacacacgcaggaac

SEQ ID NO: 2482870 - RNA, 16 nt, Human
accacaucuaagccug

SEQ ID NO: 2482871 - RNA, 17 nt, Human
accacaucuuuaucugu

SEQ ID NO: 2482872 - RNA, 20 nt, Human
accacaucuaagccugaagg

SEQ ID NO: 2482873 - RNA, 20 nt, Human
accacucaaauuaaucuuuc

SEQ ID NO: 2482874 - RNA, 21 nt, Human
accacagcaaggcaccugcag

SEQ ID NO: 2482875 - RNA, 19 nt, Human
accacagcaaggcaccugc

SEQ ID NO: 2482876 - RNA, 15 nt, Human
accacagcacagcca

SEQ ID NO: 2482877 - RNA, 21 nt, Human
accacagcagcugaacagcca

SEQ ID NO: 2482878 - RNA, 16 nt, Human
accacagcagcugaac

SEQ ID NO: 2482879 - RNA, 16 nt, Human
accacagcacagccaa

SEQ ID NO: 2482880 - RNA, 18 nt, Human
accacagacacacacacg

SEQ ID NO: 2482881 - RNA, 16 nt, Human
accacagacacacaca

SEQ ID NO: 2482882 - RNA, 20 nt, Human
accacagacacacacacgca

SEQ ID NO: 2482883 - RNA, 10 nt, Human
accacagcaa

SEQ ID NO: 2482884 - RNA, 18 nt, Human
accacagcaaggcaccug

SEQ ID NO: 2482885 - RNA, 21 nt, Human
accacagacauacuaaccagc

SEQ ID NO: 2482886 - RNA, 22 nt, Human
accacagacauacuaaccagca

SEQ ID NO: 2482887 - RNA, 11 nt, Human
accacagcagu

SEQ ID NO: 2482888 - RNA, 11 nt, Human
accacaguguc

SEQ ID NO: 2482889 - RNA, 16 nt, Human
accacagccagcaccu

SEQ ID NO: 2482890 - RNA, 16 nt, Human
accacagcaucauuuu

SEQ ID NO: 2482891 - RNA, 19 nt, Human
accacagcaggugucauau

SEQ ID NO: 2482892 - RNA, 19 nt, Human
accacauagcaugaggcca

SEQ ID NO: 2482893 - RNA, 12 nt, Human
accacagugucu

SEQ ID NO: 2482894 - RNA, 13 nt, Human
accacagugucug

SEQ ID NO: 2482895 - RNA, 14 nt, Human
accacauccuccgu

SEQ ID NO: 2482896 - RNA, 20 nt, Human
accacauccuccguccagcc

SEQ ID NO: 2482897 - RNA, 14 nt, Human
accacaucuugcuc

SEQ ID NO: 2482898 - RNA, 12 nt, Human
uauuucauuucu

SEQ ID NO: 2482899 - RNA, 21 nt, Human
uauuucaugcugggaaugaga

SEQ ID NO: 2482900 - RNA, 15 nt, Human
accacagacacacac

SEQ ID NO: 2482901 - RNA, 14 nt, Human
accacagacacaca

SEQ ID NO: 2482902 - RNA, 13 nt, Human
accacagacacac

SEQ ID NO: 2482903 - RNA, 12 nt, Human
accacagacaca

SEQ ID NO: 2482904 - RNA, 21 nt, Human
accacacuuccuguccagaga

SEQ ID NO: 2482905 - RNA, 22 nt, Human
accacacuuccuguccagagag

SEQ ID NO: 2482906 - RNA, 13 nt, Human
accacacuuccug

SEQ ID NO: 2482907 - RNA, 16 nt, Human
accacacuuccugucc

SEQ ID NO: 2482908 - RNA, 17 nt, Human
accacacuuccugucca

SEQ ID NO: 2482909 - RNA, 22 nt, Human
accacacuggacuccggcccuc

SEQ ID NO: 2482910 - RNA, 21 nt, Human
accacacuggacuccggcccu

SEQ ID NO: 2482911 - RNA, 17 nt, Human
uauuucaugaaaauugu

SEQ ID NO: 2482912 - RNA, 20 nt, Human
uauuucaucauauuauacag

SEQ ID NO: 2482913 - RNA, 21 nt, Human
uauuucaucauauuauacaga

SEQ ID NO: 2482914 - RNA, 20 nt, Human
uauuucauaaacaacuuaau

SEQ ID NO: 2482915 - RNA, 17 nt, Human
ucaccugcuggccccuc

SEQ ID NO: 2482916 - RNA, 19 nt, Human
ucaccugcuggccccucac

SEQ ID NO: 2482917 - RNA, 20 nt, Human
ucaccugcuggccccucacc

SEQ ID NO: 2482918 - RNA, 21 nt, Human
ucaccugcuggccccucaccu

SEQ ID NO: 2482919 - RNA, 16 nt, Human
ucaccugccccucaac

SEQ ID NO: 2482920 - RNA, 15 nt, Human
ucaccugaggucggg

SEQ ID NO: 2482921 - RNA, 11 nt, Human
ucaccugcugg

SEQ ID NO: 2482922 - RNA, 15 nt, Human
ucaccugcuggcccc

SEQ ID NO: 2482923 - RNA, 16 nt, Human
ucaccugcuggccccu

SEQ ID NO: 2482924 - RNA, 15 nt, Human
ucacugagacagccc

SEQ ID NO: 2482925 - RNA, 14 nt, Human
ucacugagacagcc

SEQ ID NO: 2482926 - RNA, 13 nt, Human
ucacugagacagc

SEQ ID NO: 2482927 - RNA, 17 nt, Human
ucaccugggcaccuggg

SEQ ID NO: 2482928 - RNA, 22 nt, Human
ucacugaaugccucaaugugac

SEQ ID NO: 2482929 - RNA, 23 nt, Human
ucacugaaugcuucugacuucau

SEQ ID NO: 2482930 - RNA, 24 nt, Human
ucacugcacagugcaucucagccc

SEQ ID NO: 2482931 - RNA, 22 nt, Human
ucacugcacagugcaucucagc

SEQ ID NO: 2482932 - RNA, 20 nt, Human
ucacugcacagugcaucuca

SEQ ID NO: 2482933 - RNA, 19 nt, Human
ucacugacacaaaaaguag

SEQ ID NO: 2482934 - RNA, 12 nt, Human
ucacugcagccu

SEQ ID NO: 2482935 - RNA, 21 nt, Human
ucacuguagaaugauuucaug

SEQ ID NO: 2482936 - RNA, 15 nt, Human
ucacugcacagugca

SEQ ID NO: 2482937 - RNA, 24 nt, Human
ucacuguauaaauaggagaggaug

SEQ ID NO: 2482938 - RNA, 23 nt, Human
ucacuguauaaauaggagaggau

SEQ ID NO: 2482939 - RNA, 19 nt, Human
ucacuguauaaauaggaga

SEQ ID NO: 2482940 - RNA, 17 nt, Human
ucacuguauaaauagga

SEQ ID NO: 2482941 - RNA, 16 nt, Human
ucacuguauaaauagg

SEQ ID NO: 2482942 - RNA, 15 nt, Human
ucacuguauaaauag

SEQ ID NO: 2482943 - RNA, 14 nt, Human
ucacuguauaaaua

SEQ ID NO: 2482944 - RNA, 14 nt, Human
ucaccugggcaccu

SEQ ID NO: 2482945 - RNA, 18 nt, Human
ucacugucccucaaauga

SEQ ID NO: 2482946 - RNA, 18 nt, Human
ucacugucaggaagaaau

SEQ ID NO: 2482947 - RNA, 15 nt, Human
ucacuguccuccaag

SEQ ID NO: 2482948 - RNA, 16 nt, Human
ucacuguccuccaagc

SEQ ID NO: 2482949 - RNA, 16 nt, Human
ucacuguugcccaggc

SEQ ID NO: 2482950 - RNA, 12 nt, Human
ucacugucuuuc

SEQ ID NO: 2482951 - RNA, 20 nt, Human
ucacugucugagaguuuagu

SEQ ID NO: 2482952 - RNA, 15 nt, Human
ucacugucugagagu

SEQ ID NO: 2482953 - RNA, 20 nt, Human
ucacugucaggaagaaauca

SEQ ID NO: 2482954 - RNA, 19 nt, Human
ucacuguccuccaagccag

SEQ ID NO: 2482955 - RNA, 24 nt, Human
accaugaagagauuuuucaugauu

SEQ ID NO: 2482956 - RNA, 20 nt, Human
accaugaagagauuuuucau

SEQ ID NO: 2482957 - RNA, 15 nt, Human
accaguucugggcaa

SEQ ID NO: 2482958 - RNA, 21 nt, Human
accaguugcacuuggccucug

SEQ ID NO: 2482959 - RNA, 21 nt, Human
accaguguagccuugcccgga

SEQ ID NO: 2482960 - RNA, 17 nt, Human
accaguuaugugaauga

SEQ ID NO: 2482961 - RNA, 22 nt, Human
accagugcccaaagucugugug

SEQ ID NO: 2482962 - RNA, 23 nt, Human
accagugcccaaagucuguguga

SEQ ID NO: 2482963 - RNA, 18 nt, Human
accagugcaacagcacug

SEQ ID NO: 2482964 - RNA, 18 nt, Human
accagugcgauucuggau

SEQ ID NO: 2482965 - RNA, 21 nt, Human
accaguguuguggauuuaaca

SEQ ID NO: 2482966 - RNA, 12 nt, Human
accaguggucuc

SEQ ID NO: 2482967 - RNA, 17 nt, Human
accaguggucucacaug

SEQ ID NO: 2482968 - RNA, 13 nt, Human
accaguguagccu

SEQ ID NO: 2482969 - RNA, 16 nt, Human
accaguguagccuugc

SEQ ID NO: 2482970 - RNA, 17 nt, Human
accagugcaacagcacu

SEQ ID NO: 2482971 - RNA, 20 nt, Human
accaggggcaggcacagcac

SEQ ID NO: 2482972 - RNA, 19 nt, Human
accaggggcaggcacagca

SEQ ID NO: 2482973 - RNA, 18 nt, Human
accaggggcaggcacagc

SEQ ID NO: 2482974 - RNA, 12 nt, Human
accagugacuuu

SEQ ID NO: 2482975 - RNA, 17 nt, Human
accaggggcaggcacag

SEQ ID NO: 2482976 - RNA, 16 nt, Human
accaggggcaggcaca

SEQ ID NO: 2482977 - RNA, 15 nt, Human
accaggggcaggcac

SEQ ID NO: 2482978 - RNA, 22 nt, Human
accagggcgaacgacaauagcu

SEQ ID NO: 2482979 - RNA, 23 nt, Human
accagggcgaacgacaauagcuu

SEQ ID NO: 2482980 - RNA, 19 nt, Human
accagggccugagccaagc

SEQ ID NO: 2482981 - RNA, 15 nt, Human
accagggcagggcca

SEQ ID NO: 2482982 - RNA, 14 nt, Human
accagggcagggcc

SEQ ID NO: 2482983 - RNA, 18 nt, Human
ucacuguugcccaggcug

SEQ ID NO: 2482984 - RNA, 17 nt, Human
ucacuguugcccaggcu

SEQ ID NO: 2482985 - RNA, 19 nt, Human
ucacuguugcccaggcugg

SEQ ID NO: 2482986 - RNA, 14 nt, Human
ucacugucuuuccu

SEQ ID NO: 2482987 - RNA, 20 nt, Human
accagggagccccuuugaug

SEQ ID NO: 2482988 - RNA, 21 nt, Human
accagggagaccgagcgcuuu

SEQ ID NO: 2482989 - RNA, 12 nt, Human
accauuccccau

SEQ ID NO: 2482990 - RNA, 15 nt, Human
accauuccccauggg

SEQ ID NO: 2482991 - RNA, 23 nt, Human
accaugauuaaccacuucagcug

SEQ ID NO: 2482992 - RNA, 22 nt, Human
accaugauuaaccacuucagcu

SEQ ID NO: 2482993 - RNA, 18 nt, Human
accaugagcaauucuccu

SEQ ID NO: 2482994 - RNA, 23 nt, Human
accaugagaauaagagaaagaaa

SEQ ID NO: 2482995 - RNA, 21 nt, Human
accaugagaagagggccugug

SEQ ID NO: 2482996 - RNA, 20 nt, Human
accaugagaagagggccugu

SEQ ID NO: 2482997 - RNA, 18 nt, Human
accaugagaagagggccu

SEQ ID NO: 2482998 - RNA, 16 nt, Human
accauucuccaccugc

SEQ ID NO: 2482999 - RNA, 13 nt, Human
accauucuccacc

SEQ ID NO: 2483000 - RNA, 18 nt, Human
accauucuccaccugcca

SEQ ID NO: 2483001 - RNA, 17 nt, Human
accauugucuuguucug

SEQ ID NO: 2483002 - RNA, 22 nt, Human
accaugaguggcauggccacca

SEQ ID NO: 2483003 - RNA, 19 nt, Human
accaugaguggcauggcca

SEQ ID NO: 2483004 - RNA, 21 nt, Human
accauugucuuguucugugau

SEQ ID NO: 2483005 - RNA, 13 nt, Human
acccaaaaggcag

SEQ ID NO: 2483006 - RNA, 15 nt, Human
acccaaaaggcagaa

SEQ ID NO: 2483007 - RNA, 22 nt, Human
accauuuuuuaaggaaacaaua

SEQ ID NO: 2483008 - RNA, 20 nt, Human
accauuuuuuaaggaaacaa

SEQ ID NO: 2483009 - RNA, 23 nt, Human
accauuuugggguacccacugcu

SEQ ID NO: 2483010 - RNA, 20 nt, Human
accauuucagagaggccuuu

SEQ ID NO: 2483011 - RNA, 22 nt, Human
accauuuugggguacccacugc

SEQ ID NO: 2483012 - RNA, 11 nt, Human
accauuucaga

SEQ ID NO: 2483013 - RNA, 14 nt, Human
accauuucagagag

SEQ ID NO: 2483014 - RNA, 23 nt, Human
accauuuauacaaauuagaaaau

SEQ ID NO: 2483015 - RNA, 16 nt, Human
accauuuauacaaauu

SEQ ID NO: 2483016 - RNA, 19 nt, Human
accauuuauacaaauuaga

SEQ ID NO: 2483017 - RNA, 21 nt, Human
accauuuauacaaauuagaaa

SEQ ID NO: 2483018 - RNA, 22 nt, Human
accauuuauacaaauuagaaaa

SEQ ID NO: 2483019 - RNA, 13 nt, Human
accauuuauacaa

SEQ ID NO: 2483020 - RNA, 15 nt, Human
ucagaacccuuggcu

SEQ ID NO: 2483021 - RNA, 16 nt, Human
ucagaacccuuggcuu

SEQ ID NO: 2483022 - RNA, 22 nt, Human
ucagaaccauccauaguaguau

SEQ ID NO: 2483023 - RNA, 16 nt, Human
ucagaacagagccuuu

SEQ ID NO: 2483024 - RNA, 11 nt, Human
acccagcccau

SEQ ID NO: 2483025 - RNA, 18 nt, Human
acccagcccacuucugcc

SEQ ID NO: 2483026 - RNA, 21 nt, Human
acccagacagcucccucugcc

SEQ ID NO: 2483027 - RNA, 22 nt, Human
acccagacagcucccucugccu

SEQ ID NO: 2483028 - RNA, 15 nt, Human
acccagacagcuccc

SEQ ID NO: 2483029 - RNA, 17 nt, Human
acccagcccacuucugc

SEQ ID NO: 2483030 - RNA, 16 nt, Human
acccagcccacuucug

SEQ ID NO: 2483031 - RNA, 18 nt, Human
acccaaaaggcagaagca

SEQ ID NO: 2483032 - RNA, 21 nt, Human
acccaaaagcucagccagccc

SEQ ID NO: 2483033 - RNA, 23 nt, Human
acccaaaagucaaaaggugccug

SEQ ID NO: 2483034 - RNA, 21 nt, Human
acccaaauguucaucaaugaa

SEQ ID NO: 2483035 - RNA, 22 nt, Human
acccaaaagcucagccagcccc

SEQ ID NO: 2483036 - RNA, 12 nt, Human
acccaaccacuc

SEQ ID NO: 2483037 - RNA, 16 nt, Human
acccagaagaaaauag

SEQ ID NO: 2483038 - RNA, 19 nt, Human
acccacuugcuuuuaaaau

SEQ ID NO: 2483039 - RNA, 16 nt, Human
acccaacucuccugga

SEQ ID NO: 2483040 - RNA, 15 nt, Human
acccaacucuccugg

SEQ ID NO: 2483041 - RNA, 13 nt, Human
acccaacucuccu

SEQ ID NO: 2483042 - RNA, 19 nt, Human
acccaacuagcucuauguu

SEQ ID NO: 2483043 - RNA, 15 nt, Human
acccaagcaaggcca

SEQ ID NO: 2483044 - RNA, 15 nt, Human
accccuggcuuuuca

SEQ ID NO: 2483045 - RNA, 14 nt, Human
accccuuagccucc

SEQ ID NO: 2483046 - RNA, 15 nt, Human
accccuuagccuccc

SEQ ID NO: 2483047 - RNA, 15 nt, Human
accccuuccaugugg

SEQ ID NO: 2483048 - RNA, 18 nt, Human
accccuuauccaggacuc

SEQ ID NO: 2483049 - RNA, 17 nt, Human
accccuuauccaggacu

SEQ ID NO: 2483050 - RNA, 16 nt, Human
accccuuagccucccu

SEQ ID NO: 2483051 - RNA, 17 nt, Human
accccuuagccucccug

SEQ ID NO: 2483052 - RNA, 16 nt, Human
accccuuauccaggac

SEQ ID NO: 2483053 - RNA, 15 nt, Human
accccuuauccagga

SEQ ID NO: 2483054 - RNA, 18 nt, Human
accccuuagccucccuga

SEQ ID NO: 2483055 - RNA, 19 nt, Human
ucagccuggcuucaaauug

SEQ ID NO: 2483056 - RNA, 19 nt, Human
accccuuccauguggagaa

SEQ ID NO: 2483057 - RNA, 18 nt, Human
accccuuccauguggaga

SEQ ID NO: 2483058 - RNA, 14 nt, Human
accccuuccccacu

SEQ ID NO: 2483059 - RNA, 15 nt, Human
accccuuccccacug

SEQ ID NO: 2483060 - RNA, 16 nt, Human
accccuuccccacugc

SEQ ID NO: 2483061 - RNA, 18 nt, Human
accccuuccccacugccu

SEQ ID NO: 2483062 - RNA, 20 nt, Human
accccuuccccacugccugc

SEQ ID NO: 2483063 - RNA, 10 nt, Human
ucagccuggg

SEQ ID NO: 2483064 - RNA, 12 nt, Human
ucagccugggca

SEQ ID NO: 2483065 - RNA, 14 nt, Human
accccuggccuccg

SEQ ID NO: 2483066 - RNA, 13 nt, Human
accccuggccucc

SEQ ID NO: 2483067 - RNA, 12 nt, Human
accccuggccuc

SEQ ID NO: 2483068 - RNA, 17 nt, Human
accccuccuuccuugac

SEQ ID NO: 2483069 - RNA, 23 nt, Human
accccuccucccuuuuuccuugu

SEQ ID NO: 2483070 - RNA, 18 nt, Human
accccuccucccuuuuuc

SEQ ID NO: 2483071 - RNA, 15 nt, Human
accccuccucccuuu

SEQ ID NO: 2483072 - RNA, 12 nt, Human
accccuccuucc

SEQ ID NO: 2483073 - RNA, 16 nt, Human
accccuccuuccuuga

SEQ ID NO: 2483074 - RNA, 19 nt, Human
accccuggcuccaggccag

SEQ ID NO: 2483075 - RNA, 20 nt, Human
accccuggcuccaggccagg

SEQ ID NO: 2483076 - RNA, 22 nt, Human
accccuggcuccaggccagggg

SEQ ID NO: 2483077 - RNA, 12 nt, Human
accccuggcuuu

SEQ ID NO: 2483078 - RNA, 23 nt, Human
accccuccucacuggccaucccu

SEQ ID NO: 2483079 - RNA, 21 nt, Human
accccuccucacuggccaucc

SEQ ID NO: 2483080 - RNA, 19 nt, Human
accccuccucacuggccau

SEQ ID NO: 2483081 - RNA, 18 nt, Human
accccuccucacuggcca

SEQ ID NO: 2483082 - RNA, 17 nt, Human
accccuccucacuggcc

SEQ ID NO: 2483083 - RNA, 16 nt, Human
accccuccucacuggc

SEQ ID NO: 2483084 - RNA, 14 nt, Human
accccuccucacug

SEQ ID NO: 2483085 - RNA, 13 nt, Human
accccuccucacu

SEQ ID NO: 2483086 - RNA, 23 nt, Human
accccucccuuucuccccugccc

SEQ ID NO: 2483087 - RNA, 19 nt, Human
accccucccuuucuccccu

SEQ ID NO: 2483088 - RNA, 18 nt, Human
accccucccuuucucccc

SEQ ID NO: 2483089 - RNA, 16 nt, Human
accccucccuuucucc

SEQ ID NO: 2483090 - RNA, 15 nt, Human
acccccuccccgccc

SEQ ID NO: 2483091 - RNA, 13 nt, Human
acccccuccccag

SEQ ID NO: 2483092 - RNA, 14 nt, Human
acccccuccccagg

SEQ ID NO: 2483093 - RNA, 19 nt, Human
acccccucaagccaauccc

SEQ ID NO: 2483094 - RNA, 12 nt, Human
acccccucccca

SEQ ID NO: 2483095 - RNA, 14 nt, Human
accccucccuuucu

SEQ ID NO: 2483096 - RNA, 13 nt, Human
accccucccuuuc

SEQ ID NO: 2483097 - RNA, 16 nt, Human
acccccuccccagggg

SEQ ID NO: 2483098 - RNA, 14 nt, Human
acccccucccuggc

SEQ ID NO: 2483099 - RNA, 15 nt, Human
acccccucccuggcc

SEQ ID NO: 2483100 - RNA, 21 nt, Human
acccccagcucaauggacugg

SEQ ID NO: 2483101 - RNA, 20 nt, Human
acccccagcucaauggacug

SEQ ID NO: 2483102 - RNA, 13 nt, Human
acccccagcucaa

SEQ ID NO: 2483103 - RNA, 12 nt, Human
acccccagcuca

SEQ ID NO: 2483104 - RNA, 22 nt, Human
acccccagcuuugcccaacacc

SEQ ID NO: 2483105 - RNA, 19 nt, Human
acccccagcugcuuguguc

SEQ ID NO: 2483106 - RNA, 14 nt, Human
acccccagcuuugc

SEQ ID NO: 2483107 - RNA, 18 nt, Human
acccccagcuccggccug

SEQ ID NO: 2483108 - RNA, 21 nt, Human
acccccaggccucagucuccc

SEQ ID NO: 2483109 - RNA, 16 nt, Human
acccccagcuuugcua

SEQ ID NO: 2483110 - RNA, 16 nt, Human
acccccaggaccccug

SEQ ID NO: 2483111 - RNA, 17 nt, Human
acccccaucucucccuc

SEQ ID NO: 2483112 - RNA, 18 nt, Human
acccccauuucuauuuau

SEQ ID NO: 2483113 - RNA, 17 nt, Human
acccccauuucuauuua

SEQ ID NO: 2483114 - RNA, 20 nt, Human
accccccaaccccugaggaa

SEQ ID NO: 2483115 - RNA, 19 nt, Human
accccccaaccccugagga

SEQ ID NO: 2483116 - RNA, 14 nt, Human
accccccaagcugu

SEQ ID NO: 2483117 - RNA, 12 nt, Human
accccccaccug

SEQ ID NO: 2483118 - RNA, 13 nt, Human
accccccaccugc

SEQ ID NO: 2483119 - RNA, 16 nt, Human
accccccacucugugc

SEQ ID NO: 2483120 - RNA, 22 nt, Human
accccccacacucacuccugag

SEQ ID NO: 2483121 - RNA, 19 nt, Human
accccccacucugugccug

SEQ ID NO: 2483122 - RNA, 18 nt, Human
accccccagaaccugucc

SEQ ID NO: 2483123 - RNA, 13 nt, Human
acccccgcccccu

SEQ ID NO: 2483124 - RNA, 14 nt, Human
acccccgcccccug

SEQ ID NO: 2483125 - RNA, 16 nt, Human
acccccucauuguuua

SEQ ID NO: 2483126 - RNA, 19 nt, Human
accccccagaaccuguccu

SEQ ID NO: 2483127 - RNA, 21 nt, Human
acccccgcccccugcccuccc

SEQ ID NO: 2483128 - RNA, 20 nt, Human
acccccgcccccugcccucc

SEQ ID NO: 2483129 - RNA, 19 nt, Human
acccccgcccccugcccuc

SEQ ID NO: 2483130 - RNA, 18 nt, Human
acccccgcccccugcccu

SEQ ID NO: 2483131 - RNA, 15 nt, Human
acccccgcccccugc

SEQ ID NO: 2483132 - RNA, 22 nt, Human
accccaugcuguugauugcuaa

SEQ ID NO: 2483133 - RNA, 20 nt, Human
accccaugcuguugauugcu

SEQ ID NO: 2483134 - RNA, 23 nt, Human
accccaugcuguugauugcuaaa

SEQ ID NO: 2483135 - RNA, 17 nt, Human
accccaugcuguugauu

SEQ ID NO: 2483136 - RNA, 16 nt, Human
accccaugcuguugau

SEQ ID NO: 2483137 - RNA, 12 nt, Human
accccaugcugu

SEQ ID NO: 2483138 - RNA, 17 nt, Human
accccaucugcccagga

SEQ ID NO: 2483139 - RNA, 16 nt, Human
accccaugccaaagcu

SEQ ID NO: 2483140 - RNA, 16 nt, Human
accccaucugcccagg

SEQ ID NO: 2483141 - RNA, 15 nt, Human
accccaucugcccag

SEQ ID NO: 2483142 - RNA, 15 nt, Human
accccaucugugaau

SEQ ID NO: 2483143 - RNA, 16 nt, Human
accccaucugugaaua

SEQ ID NO: 2483144 - RNA, 18 nt, Human
accccaucugugaauaag

SEQ ID NO: 2483145 - RNA, 15 nt, Human
acccagugcccccac

SEQ ID NO: 2483146 - RNA, 18 nt, Human
acccagugcccccacuga

SEQ ID NO: 2483147 - RNA, 14 nt, Human
acccagugagcacu

SEQ ID NO: 2483148 - RNA, 16 nt, Human
acccagucuguucccc

SEQ ID NO: 2483149 - RNA, 14 nt, Human
acccagucccuggg

SEQ ID NO: 2483150 - RNA, 14 nt, Human
acccccagccugcu

SEQ ID NO: 2483151 - RNA, 23 nt, Human
accccaugucaccggauccuggg

SEQ ID NO: 2483152 - RNA, 15 nt, Human
acccccagccugcua

SEQ ID NO: 2483153 - RNA, 16 nt, Human
accccauuuucugugg

SEQ ID NO: 2483154 - RNA, 18 nt, Human
acccaguaacucaucugu

SEQ ID NO: 2483155 - RNA, 16 nt, Human
acccaguccacaaaau

SEQ ID NO: 2483156 - RNA, 17 nt, Human
acccaguaacucaucug

SEQ ID NO: 2483157 - RNA, 17 nt, Human
acccaguccccgugccc

SEQ ID NO: 2483158 - RNA, 21 nt, Human
acccaguccccgugccccgcc

SEQ ID NO: 2483159 - RNA, 13 nt, Human
acccagucccugg

SEQ ID NO: 2483160 - RNA, 15 nt, Human
acccagucccugggg

SEQ ID NO: 2483161 - RNA, 15 nt, Human
acccagcucuggucc

SEQ ID NO: 2483162 - RNA, 13 nt, Human
acccagcucuggu

SEQ ID NO: 2483163 - RNA, 22 nt, Human
acccagcuaugguucucucgca

SEQ ID NO: 2483164 - RNA, 18 nt, Human
ucagcccugggccccacc

SEQ ID NO: 2483165 - RNA, 19 nt, Human
ucagcccugggccccacca

SEQ ID NO: 2483166 - RNA, 14 nt, Human
ucagcccuggaggu

SEQ ID NO: 2483167 - RNA, 13 nt, Human
ucagcccuggagg

SEQ ID NO: 2483168 - RNA, 12 nt, Human
ucagcccuggag

SEQ ID NO: 2483169 - RNA, 19 nt, Human
ucagcccuggaggugccag

SEQ ID NO: 2483170 - RNA, 17 nt, Human
ucagcccuggaggugcc

SEQ ID NO: 2483171 - RNA, 21 nt, Human
ucagcccuggaggugccagca

SEQ ID NO: 2483172 - RNA, 12 nt, Human
ucagcccugggc

SEQ ID NO: 2483173 - RNA, 17 nt, Human
ucagcccaccccccuca

SEQ ID NO: 2483174 - RNA, 16 nt, Human
ucagcccauauuucau

SEQ ID NO: 2483175 - RNA, 18 nt, Human
ucagcccaccccccucau

SEQ ID NO: 2483176 - RNA, 20 nt, Human
ucagccccaccccagguccu

SEQ ID NO: 2483177 - RNA, 18 nt, Human
ucagcccucccugccccu

SEQ ID NO: 2483178 - RNA, 14 nt, Human
ucagccccuccucu

SEQ ID NO: 2483179 - RNA, 15 nt, Human
ucagccccuccucug

SEQ ID NO: 2483180 - RNA, 16 nt, Human
ucagccccuccucugc

SEQ ID NO: 2483181 - RNA, 17 nt, Human
ucagccccuccucugcc

SEQ ID NO: 2483182 - RNA, 12 nt, Human
ucagccccuccu

SEQ ID NO: 2483183 - RNA, 13 nt, Human
ucagccccuccuc

SEQ ID NO: 2483184 - RNA, 18 nt, Human
ucagccccuccucugcca

SEQ ID NO: 2483185 - RNA, 23 nt, Human
ucagcccugaggugaaagggagc

SEQ ID NO: 2483186 - RNA, 13 nt, Human
ucagcccugaggu

SEQ ID NO: 2483187 - RNA, 16 nt, Human
ucagcccugacccugu

SEQ ID NO: 2483188 - RNA, 19 nt, Human
ucagcccucccugccccuc

SEQ ID NO: 2483189 - RNA, 17 nt, Human
ucagcccucccugcccc

SEQ ID NO: 2483190 - RNA, 13 nt, Human
ucagcccugaccc

SEQ ID NO: 2483191 - RNA, 21 nt, Human
ucagauuuuaaaaagucuuca

SEQ ID NO: 2483192 - RNA, 19 nt, Human
ucagauuuuaaaaagucuu

SEQ ID NO: 2483193 - RNA, 14 nt, Human
ucagauucccagag

SEQ ID NO: 2483194 - RNA, 22 nt, Human
ucagaugucuucugccuguuau

SEQ ID NO: 2483195 - RNA, 22 nt, Human
ucagauuugccuuauuggcagc

SEQ ID NO: 2483196 - RNA, 14 nt, Human
ucagaugcccagag

SEQ ID NO: 2483197 - RNA, 22 nt, Human
ucagauggauugauaauugcau

SEQ ID NO: 2483198 - RNA, 21 nt, Human
ucagaugucuucugccuguua

SEQ ID NO: 2483199 - RNA, 20 nt, Human
ucagaugucuucugccuguu

SEQ ID NO: 2483200 - RNA, 19 nt, Human
ucagaugucuucugccugu

SEQ ID NO: 2483201 - RNA, 17 nt, Human
ucagaugucuucugccu

SEQ ID NO: 2483202 - RNA, 16 nt, Human
ucagaugucuucugcc

SEQ ID NO: 2483203 - RNA, 15 nt, Human
ucagaugucuucugc

SEQ ID NO: 2483204 - RNA, 14 nt, Human
ucagaugucuucug

SEQ ID NO: 2483205 - RNA, 13 nt, Human
ucagaugucuucu

SEQ ID NO: 2483206 - RNA, 15 nt, Human
ucagaugggaagaca

SEQ ID NO: 2483207 - RNA, 18 nt, Human
ucagaugggaagacauga

SEQ ID NO: 2483208 - RNA, 15 nt, Human
ucagaacuagaauuu

SEQ ID NO: 2483209 - RNA, 21 nt, Human
ucagaacucaaauggggccag

SEQ ID NO: 2483210 - RNA, 22 nt, Human
ucagaacucaaauggggccaga

SEQ ID NO: 2483211 - RNA, 18 nt, Human
ucagaacccuuggcuugc

SEQ ID NO: 2483212 - RNA, 20 nt, Human
ucagaacccuuggcuugccc

SEQ ID NO: 2483213 - RNA, 24 nt, Human
ucagaacccuuggcuugcccacgu

SEQ ID NO: 2483214 - RNA, 15 nt, Human
ucagaaccucuuccc

SEQ ID NO: 2483215 - RNA, 16 nt, Human
ucagaaccucuucccc

SEQ ID NO: 2483216 - RNA, 17 nt, Human
ucagaaccucuucccca

SEQ ID NO: 2483217 - RNA, 18 nt, Human
ucagaaccucuuccccag

SEQ ID NO: 2483218 - RNA, 20 nt, Human
ucagaaccucuuccccagaa

SEQ ID NO: 2483219 - RNA, 12 nt, Human
ucagaagaaaga

SEQ ID NO: 2483220 - RNA, 13 nt, Human
ucagaagacacug

SEQ ID NO: 2483221 - RNA, 13 nt, Human
ucagaucuucugu

SEQ ID NO: 2483222 - RNA, 21 nt, Human
ucagaugaacucuuagaaaug

SEQ ID NO: 2483223 - RNA, 14 nt, Human
ucagaucugucuga

SEQ ID NO: 2483224 - RNA, 13 nt, Human
ucagaucugucug

SEQ ID NO: 2483225 - RNA, 22 nt, Human
ucaggaagaaaucacagaauca

SEQ ID NO: 2483226 - RNA, 15 nt, Human
ucaggaagaaaucac

SEQ ID NO: 2483227 - RNA, 23 nt, Human
ucaggaagaaaucacagaaucau

SEQ ID NO: 2483228 - RNA, 13 nt, Human
ucaggaagaacac

SEQ ID NO: 2483229 - RNA, 23 nt, Human
ucaggaagaaaggagucugcaca

SEQ ID NO: 2483230 - RNA, 12 nt, Human
ucaggaagaaau

SEQ ID NO: 2483231 - RNA, 14 nt, Human
ucagccuggugggc

SEQ ID NO: 2483232 - RNA, 17 nt, Human
ucagcggggacagcucc

SEQ ID NO: 2483233 - RNA, 16 nt, Human
ucagcggggacagcuc

SEQ ID NO: 2483234 - RNA, 15 nt, Human
ucagcggggacagcu

SEQ ID NO: 2483235 - RNA, 20 nt, Human
ucagccuggccagacacagg

SEQ ID NO: 2483236 - RNA, 19 nt, Human
ucagccuggccagacacag

SEQ ID NO: 2483237 - RNA, 21 nt, Human
accccuuccccacugccugcc

SEQ ID NO: 2483238 - RNA, 22 nt, Human
accccuuccccacugccugccc

SEQ ID NO: 2483239 - RNA, 20 nt, Human
ucaggaagcucagggccugg

SEQ ID NO: 2483240 - RNA, 19 nt, Human
ucaggaagcucagggccug

SEQ ID NO: 2483241 - RNA, 17 nt, Human
ucaggaagcucagggcc

SEQ ID NO: 2483242 - RNA, 16 nt, Human
ucaggaagcucagggc

SEQ ID NO: 2483243 - RNA, 23 nt, Human
ucaggccaaacucaccugccccu

SEQ ID NO: 2483244 - RNA, 20 nt, Human
ucaggccaaacucaccugcc

SEQ ID NO: 2483245 - RNA, 16 nt, Human
ucaggcaugccugugu

SEQ ID NO: 2483246 - RNA, 17 nt, Human
ucaggcaugccugugug

SEQ ID NO: 2483247 - RNA, 19 nt, Human
ucaggcaugaacauguacu

SEQ ID NO: 2483248 - RNA, 18 nt, Human
ucaggcaugaacauguac

SEQ ID NO: 2483249 - RNA, 14 nt, Human
ucaggcaugccugu

SEQ ID NO: 2483250 - RNA, 15 nt, Human
ucaggcaugccugug

SEQ ID NO: 2483251 - RNA, 20 nt, Human
ucaggaagaugaaagaggag

SEQ ID NO: 2483252 - RNA, 18 nt, Human
ucaggcauaggccugggu

SEQ ID NO: 2483253 - RNA, 22 nt, Human
ucaggaagaacacccucuaaau

SEQ ID NO: 2483254 - RNA, 19 nt, Human
ucaggcauaggccugggug

SEQ ID NO: 2483255 - RNA, 20 nt, Human
ucaggcauaggccugggugc

SEQ ID NO: 2483256 - RNA, 17 nt, Human
ucaggcaugaacaugua

SEQ ID NO: 2483257 - RNA, 22 nt, Human
ucaggcauaggccugggugcug

SEQ ID NO: 2483258 - RNA, 11 nt, Human
ucaggccaggc

SEQ ID NO: 2483259 - RNA, 20 nt, Human
ucaggccagcugcuugggcu

SEQ ID NO: 2483260 - RNA, 15 nt, Human
ucaggccagcugcuu

SEQ ID NO: 2483261 - RNA, 14 nt, Human
ucaggcccaaagcc

SEQ ID NO: 2483262 - RNA, 21 nt, Human
ucaggccaucaucaguggagc

SEQ ID NO: 2483263 - RNA, 22 nt, Human
ucaggccaucaucaguggagcc

SEQ ID NO: 2483264 - RNA, 16 nt, Human
ucaggccaggugcagu

SEQ ID NO: 2483265 - RNA, 17 nt, Human
ucaggccaggugcagug

SEQ ID NO: 2483266 - RNA, 18 nt, Human
ucaggccaggugcagugg

SEQ ID NO: 2483267 - RNA, 19 nt, Human
ucaggccaggugcaguggc

SEQ ID NO: 2483268 - RNA, 15 nt, Human
ucaggccgaaggagg

SEQ ID NO: 2483269 - RNA, 23 nt, Human
ucaggccaucaucaguggagcca

SEQ ID NO: 2483270 - RNA, 19 nt, Human
accccuucgcuccuguguc

SEQ ID NO: 2483271 - RNA, 16 nt, Human
ucagguaacaggcaga

SEQ ID NO: 2483272 - RNA, 15 nt, Human
ucagguaacaggcag

SEQ ID NO: 2483273 - RNA, 13 nt, Human
ucagguaacaggc

SEQ ID NO: 2483274 - RNA, 18 nt, Human
ucagggucccugguggca

SEQ ID NO: 2483275 - RNA, 14 nt, Human
ucagggucccuggu

SEQ ID NO: 2483276 - RNA, 13 nt, Human
ucagggucccugg

SEQ ID NO: 2483277 - RNA, 19 nt, Human
ucaggcccuuauuuucaag

SEQ ID NO: 2483278 - RNA, 22 nt, Human
ucagggguucgagaccagucug

SEQ ID NO: 2483279 - RNA, 18 nt, Human
ucagggguucgagaccag

SEQ ID NO: 2483280 - RNA, 15 nt, Human
ucagggucauagcau

SEQ ID NO: 2483281 - RNA, 23 nt, Human
accccuucucuccuccccaaauc

SEQ ID NO: 2483282 - RNA, 17 nt, Human
accccuuuucagcuucu

SEQ ID NO: 2483283 - RNA, 16 nt, Human
accccuuuucagcuuc

SEQ ID NO: 2483284 - RNA, 17 nt, Human
accccuuucuggcucuc

SEQ ID NO: 2483285 - RNA, 12 nt, Human
accccuuuccug

SEQ ID NO: 2483286 - RNA, 17 nt, Human
accccuucucuccuccc

SEQ ID NO: 2483287 - RNA, 15 nt, Human
accccuucucuccuc

SEQ ID NO: 2483288 - RNA, 20 nt, Human
accccuucgcuccugugucu

SEQ ID NO: 2483289 - RNA, 21 nt, Human
acccgacagagggaagaaaag

SEQ ID NO: 2483290 - RNA, 20 nt, Human
accccuuuucagcuucugcu

SEQ ID NO: 2483291 - RNA, 19 nt, Human
accccuuuucagcuucugc

SEQ ID NO: 2483292 - RNA, 23 nt, Human
accccuuuucagcuucugcuggg

SEQ ID NO: 2483293 - RNA, 16 nt, Human
acccgacagagggaag

SEQ ID NO: 2483294 - RNA, 13 nt, Human
acccgaggaaacu

SEQ ID NO: 2483295 - RNA, 14 nt, Human
acccgaggcccgca

SEQ ID NO: 2483296 - RNA, 14 nt, Human
acccgaggcugccc

SEQ ID NO: 2483297 - RNA, 15 nt, Human
acccgaggcugccca

SEQ ID NO: 2483298 - RNA, 17 nt, Human
acccgaggcugcccacu

SEQ ID NO: 2483299 - RNA, 17 nt, Human
acccuccacccuguccc

SEQ ID NO: 2483300 - RNA, 16 nt, Human
acccuccacccugucc

SEQ ID NO: 2483301 - RNA, 15 nt, Human
acccuccacccuguc

SEQ ID NO: 2483302 - RNA, 14 nt, Human
acccuccacccugu

SEQ ID NO: 2483303 - RNA, 23 nt, Human
acccgaugcugcuuuccccugug

SEQ ID NO: 2483304 - RNA, 13 nt, Human
acccuccacccug

SEQ ID NO: 2483305 - RNA, 22 nt, Human
acccgaugcugcuuuccccugu

SEQ ID NO: 2483306 - RNA, 14 nt, Human
acccgaugcugcuu

SEQ ID NO: 2483307 - RNA, 13 nt, Human
acccgaugcugcu

SEQ ID NO: 2483308 - RNA, 12 nt, Human
acccgaugcugc

SEQ ID NO: 2483309 - RNA, 21 nt, Human
acccgagucauucguucugug

SEQ ID NO: 2483310 - RNA, 24 nt, Human
acccgaggcugcccacuaugguca

SEQ ID NO: 2483311 - RNA, 11 nt, Human
acccucccugc

SEQ ID NO: 2483312 - RNA, 17 nt, Human
acccucccauggcaccu

SEQ ID NO: 2483313 - RNA, 23 nt, Human
acccucccucuacugggagccua

SEQ ID NO: 2483314 - RNA, 16 nt, Human
acccucccagaccugc

SEQ ID NO: 2483315 - RNA, 15 nt, Human
acccucccagaccug

SEQ ID NO: 2483316 - RNA, 16 nt, Human
acccucccauggcacc

SEQ ID NO: 2483317 - RNA, 14 nt, Human
acccucccaccccc

SEQ ID NO: 2483318 - RNA, 20 nt, Human
acccucccacccccuucucu

SEQ ID NO: 2483319 - RNA, 13 nt, Human
acccucccagacc

SEQ ID NO: 2483320 - RNA, 23 nt, Human
acccuccacccugucccccagcu

SEQ ID NO: 2483321 - RNA, 23 nt, Human
acccucccacccccuucucugcu

SEQ ID NO: 2483322 - RNA, 15 nt, Human
acccuccacucuccu

SEQ ID NO: 2483323 - RNA, 12 nt, Human
acccucccaccc

SEQ ID NO: 2483324 - RNA, 13 nt, Human
acccucccacccc

SEQ ID NO: 2483325 - RNA, 20 nt, Human
acccucugccaccagagacc

SEQ ID NO: 2483326 - RNA, 18 nt, Human
acccuccugucuucccag

SEQ ID NO: 2483327 - RNA, 16 nt, Human
acccuccugucuuccc

SEQ ID NO: 2483328 - RNA, 13 nt, Human
acccuccugucuu

SEQ ID NO: 2483329 - RNA, 21 nt, Human
acccuccuguaaaugguguac

SEQ ID NO: 2483330 - RNA, 17 nt, Human
acccuccuguaaauggu

SEQ ID NO: 2483331 - RNA, 14 nt, Human
acccuccuguaaau

SEQ ID NO: 2483332 - RNA, 11 nt, Human
acccuccuggc

SEQ ID NO: 2483333 - RNA, 13 nt, Human
acccuccuggcuc

SEQ ID NO: 2483334 - RNA, 19 nt, Human
acccuccuccagaccauuc

SEQ ID NO: 2483335 - RNA, 21 nt, Human
acccuccuaucaccuccccuc

SEQ ID NO: 2483336 - RNA, 13 nt, Human
acccucccuggag

SEQ ID NO: 2483337 - RNA, 12 nt, Human
acccucccugga

SEQ ID NO: 2483338 - RNA, 21 nt, Human
acccucccugcuguccccucu

SEQ ID NO: 2483339 - RNA, 20 nt, Human
acccucccugcuguccccuc

SEQ ID NO: 2483340 - RNA, 15 nt, Human
acccucccugcuguc

SEQ ID NO: 2483341 - RNA, 14 nt, Human
acccucccugcugu

SEQ ID NO: 2483342 - RNA, 13 nt, Human
acccucccugcug

SEQ ID NO: 2483343 - RNA, 12 nt, Human
acccucccugcu

SEQ ID NO: 2483344 - RNA, 15 nt, Human
acccucccuggagug

SEQ ID NO: 2483345 - RNA, 15 nt, Human
acccuccgccuucac

SEQ ID NO: 2483346 - RNA, 22 nt, Human
acccuccgccuucacuccggug

SEQ ID NO: 2483347 - RNA, 14 nt, Human
acccucccuggagu

SEQ ID NO: 2483348 - RNA, 17 nt, Human
acccuccuaucaccucc

SEQ ID NO: 2483349 - RNA, 12 nt, Human
acccugcccugu

SEQ ID NO: 2483350 - RNA, 11 nt, Human
acccugcccug

SEQ ID NO: 2483351 - RNA, 13 nt, Human
acccugcccugug

SEQ ID NO: 2483352 - RNA, 14 nt, Human
acccugcccugugg

SEQ ID NO: 2483353 - RNA, 19 nt, Human
acccucugccaccagagac

SEQ ID NO: 2483354 - RNA, 23 nt, Human
acccucuggagggguguggcucc

SEQ ID NO: 2483355 - RNA, 14 nt, Human
acccucuuagaaaa

SEQ ID NO: 2483356 - RNA, 13 nt, Human
acccucuucaugg

SEQ ID NO: 2483357 - RNA, 15 nt, Human
acccugccccugccc

SEQ ID NO: 2483358 - RNA, 18 nt, Human
acccugccccugccccgu

SEQ ID NO: 2483359 - RNA, 14 nt, Human
acccugccccugcc

SEQ ID NO: 2483360 - RNA, 17 nt, Human
acccuuguggucccacc

SEQ ID NO: 2483361 - RNA, 16 nt, Human
acccuuguggucccac

SEQ ID NO: 2483362 - RNA, 19 nt, Human
acccuuguggucccacccc

SEQ ID NO: 2483363 - RNA, 15 nt, Human
acccuugugguccca

SEQ ID NO: 2483364 - RNA, 20 nt, Human
acccuuugaauuggacaaua

SEQ ID NO: 2483365 - RNA, 12 nt, Human
acccuuugcccc

SEQ ID NO: 2483366 - RNA, 21 nt, Human
acccuucacauacccuccccc

SEQ ID NO: 2483367 - RNA, 20 nt, Human
acccuucccuugagcccucu

SEQ ID NO: 2483368 - RNA, 19 nt, Human
acccuucccuugagcccuc

SEQ ID NO: 2483369 - RNA, 22 nt, Human
acccuuccccuccuucucccuu

SEQ ID NO: 2483370 - RNA, 19 nt, Human
acccuuccucaccacuucc

SEQ ID NO: 2483371 - RNA, 21 nt, Human
acccuucuccucuuguaaaua

SEQ ID NO: 2483372 - RNA, 19 nt, Human
acccuucuccucuuguaaa

SEQ ID NO: 2483373 - RNA, 17 nt, Human
acccuucuccucuugua

SEQ ID NO: 2483374 - RNA, 15 nt, Human
acccuucuccucuug

SEQ ID NO: 2483375 - RNA, 13 nt, Human
ugacucagggcuc

SEQ ID NO: 2483376 - RNA, 14 nt, Human
ugacucagggcucc

SEQ ID NO: 2483377 - RNA, 15 nt, Human
ugacucagggcuccu

SEQ ID NO: 2483378 - RNA, 17 nt, Human
ugacucagggcuccugg

SEQ ID NO: 2483379 - RNA, 18 nt, Human
ugacucagggcuccuggg

SEQ ID NO: 2483380 - RNA, 19 nt, Human
ugacucagggcuccugggu

SEQ ID NO: 2483381 - RNA, 20 nt, Human
ugacucauucugaaggagcc

SEQ ID NO: 2483382 - RNA, 19 nt, Human
ugacuccagaauuucccaa

SEQ ID NO: 2483383 - RNA, 17 nt, Human
ugacuccagaauuuccc

SEQ ID NO: 2483384 - RNA, 15 nt, Human
ugaccugaggcccuu

SEQ ID NO: 2483385 - RNA, 14 nt, Human
ugaccugaggcccu

SEQ ID NO: 2483386 - RNA, 17 nt, Human
ugaccugaggcccuucu

SEQ ID NO: 2483387 - RNA, 14 nt, Human
ugaccugaggaagc

SEQ ID NO: 2483388 - RNA, 15 nt, Human
ugaccugaggaagcg

SEQ ID NO: 2483389 - RNA, 18 nt, Human
ugacucacuuaucccaag

SEQ ID NO: 2483390 - RNA, 21 nt, Human
ugacucagcauaccugcuggu

SEQ ID NO: 2483391 - RNA, 16 nt, Human
ugacucagaugucucu

SEQ ID NO: 2483392 - RNA, 15 nt, Human
ugacucacccaagca

SEQ ID NO: 2483393 - RNA, 23 nt, Human
ugacuccagaauuucccaaagca

SEQ ID NO: 2483394 - RNA, 20 nt, Human
ugacuccagaauuucccaaa

SEQ ID NO: 2483395 - RNA, 13 nt, Human
ugacugucacugu

SEQ ID NO: 2483396 - RNA, 16 nt, Human
ugacugucacuguucc

SEQ ID NO: 2483397 - RNA, 17 nt, Human
ugacugucacuguuccu

SEQ ID NO: 2483398 - RNA, 11 nt, Human
ugacuccagga

SEQ ID NO: 2483399 - RNA, 13 nt, Human
ugacucauccucu

SEQ ID NO: 2483400 - RNA, 12 nt, Human
ugacuccaggag

SEQ ID NO: 2483401 - RNA, 15 nt, Human
ugacuguuuccauca

SEQ ID NO: 2483402 - RNA, 24 nt, Human
ugacuguucaagagcacacuuggc

SEQ ID NO: 2483403 - RNA, 11 nt, Human
ugacugugugu

SEQ ID NO: 2483404 - RNA, 17 nt, Human
ugacuucaaugauagua

SEQ ID NO: 2483405 - RNA, 19 nt, Human
ugacuuauuuucucugugu

SEQ ID NO: 2483406 - RNA, 18 nt, Human
ugacuuauuuucucugug

SEQ ID NO: 2483407 - RNA, 18 nt, Human
ugacuguucaagagcaca

SEQ ID NO: 2483408 - RNA, 21 nt, Human
ugacuuauuuauauaaauuuu

SEQ ID NO: 2483409 - RNA, 17 nt, Human
ugacuuauuuauauaaa

SEQ ID NO: 2483410 - RNA, 20 nt, Human
ugacuuauuuauauaaauuu

SEQ ID NO: 2483411 - RNA, 18 nt, Human
ugacuuuagucugcaaaa

SEQ ID NO: 2483412 - RNA, 19 nt, Human
ugacuuuagucugcaaaau

SEQ ID NO: 2483413 - RNA, 18 nt, Human
ugacuuuauauggaugau

SEQ ID NO: 2483414 - RNA, 12 nt, Human
ugacuuucaggu

SEQ ID NO: 2483415 - RNA, 20 nt, Human
agauuauaggcaccuaccac

SEQ ID NO: 2483416 - RNA, 16 nt, Human
agauucaaucccagga

SEQ ID NO: 2483417 - RNA, 22 nt, Human
agauucacaccugacucugaaa

SEQ ID NO: 2483418 - RNA, 20 nt, Human
agauuauggagcuuuuuucc

SEQ ID NO: 2483419 - RNA, 16 nt, Human
ugacuucugccuggag

SEQ ID NO: 2483420 - RNA, 15 nt, Human
ugacuucugccugga

SEQ ID NO: 2483421 - RNA, 13 nt, Human
ugacuucugccug

SEQ ID NO: 2483422 - RNA, 12 nt, Human
ugacuucugccu

SEQ ID NO: 2483423 - RNA, 16 nt, Human
ugacuucuccaggucu

SEQ ID NO: 2483424 - RNA, 15 nt, Human
ugacuucuccagguc

SEQ ID NO: 2483425 - RNA, 23 nt, Human
ugacuucuccaggucucacgggc

SEQ ID NO: 2483426 - RNA, 14 nt, Human
ugacuucuccaggu

SEQ ID NO: 2483427 - RNA, 18 nt, Human
ugacuucaggggcugccc

SEQ ID NO: 2483428 - RNA, 17 nt, Human
ugacuucaggggcugcc

SEQ ID NO: 2483429 - RNA, 13 nt, Human
ugacuucaggggc

SEQ ID NO: 2483430 - RNA, 23 nt, Human
ugacuucaaugauaguaagaaaa

SEQ ID NO: 2483431 - RNA, 22 nt, Human
ugacuucaggggcugcccgcuc

SEQ ID NO: 2483432 - RNA, 22 nt, Human
ugacuucauuaauaauaaauuc

SEQ ID NO: 2483433 - RNA, 20 nt, Human
ugacuucgacugugaccugu

SEQ ID NO: 2483434 - RNA, 21 nt, Human
ugacuucaggggcugcccgcu

SEQ ID NO: 2483435 - RNA, 14 nt, Human
ugacuuccacaccu

SEQ ID NO: 2483436 - RNA, 15 nt, Human
ugacuugugucccau

SEQ ID NO: 2483437 - RNA, 19 nt, Human
ugacuuguauauuuuaaga

SEQ ID NO: 2483438 - RNA, 12 nt, Human
ugacuuguauau

SEQ ID NO: 2483439 - RNA, 19 nt, Human
ugacuuggggagauggagu

SEQ ID NO: 2483440 - RNA, 18 nt, Human
ugacuuggggagauggag

SEQ ID NO: 2483441 - RNA, 13 nt, Human
ugacuugcccagu

SEQ ID NO: 2483442 - RNA, 16 nt, Human
ugacuugacuuuaguc

SEQ ID NO: 2483443 - RNA, 18 nt, Human
ugacuucugccuggagac

SEQ ID NO: 2483444 - RNA, 19 nt, Human
ugacuugacagaacacugu

SEQ ID NO: 2483445 - RNA, 17 nt, Human
ugacuugacagaacacu

SEQ ID NO: 2483446 - RNA, 16 nt, Human
agauugugccccugca

SEQ ID NO: 2483447 - RNA, 21 nt, Human
agauugugccccugcacucca

SEQ ID NO: 2483448 - RNA, 12 nt, Human
agauugggucua

SEQ ID NO: 2483449 - RNA, 22 nt, Human
agauuggcucacacugagaaug

SEQ ID NO: 2483450 - RNA, 13 nt, Human
agauucacacugu

SEQ ID NO: 2483451 - RNA, 23 nt, Human
agauuggcucacacugagaaugu

SEQ ID NO: 2483452 - RNA, 17 nt, Human
agauucacacugucugg

SEQ ID NO: 2483453 - RNA, 16 nt, Human
agauuuaccacuugug

SEQ ID NO: 2483454 - RNA, 18 nt, Human
agauugugaauauuucca

SEQ ID NO: 2483455 - RNA, 14 nt, Human
agauuuaugcauau

SEQ ID NO: 2483456 - RNA, 22 nt, Human
agauuuaauuaaucaugaaugu

SEQ ID NO: 2483457 - RNA, 13 nt, Human
agauuuaauuaau

SEQ ID NO: 2483458 - RNA, 18 nt, Human
agauuuagugaaagcuag

SEQ ID NO: 2483459 - RNA, 12 nt, Human
agauuugaccua

SEQ ID NO: 2483460 - RNA, 13 nt, Human
agauuucaagaga

SEQ ID NO: 2483461 - RNA, 14 nt, Human
agauuucaagagau

SEQ ID NO: 2483462 - RNA, 16 nt, Human
agauuugaaggucugc

SEQ ID NO: 2483463 - RNA, 13 nt, Human
agauuugggcugg

SEQ ID NO: 2483464 - RNA, 16 nt, Human
agauuugugaacucag

SEQ ID NO: 2483465 - RNA, 15 nt, Human
agauuugugaacuca

SEQ ID NO: 2483466 - RNA, 13 nt, Human
agauuugugaacu

SEQ ID NO: 2483467 - RNA, 11 nt, Human
agauuugugaa

SEQ ID NO: 2483468 - RNA, 17 nt, Human
agauuugggcuggaaca

SEQ ID NO: 2483469 - RNA, 14 nt, Human
agauuugggcugga

SEQ ID NO: 2483470 - RNA, 14 nt, Human
agauuucacucucc

SEQ ID NO: 2483471 - RNA, 13 nt, Human
agauuucacucuc

SEQ ID NO: 2483472 - RNA, 16 nt, Human
agauuuaucaaaucag

SEQ ID NO: 2483473 - RNA, 15 nt, Human
agauuuaucaaauca

SEQ ID NO: 2483474 - RNA, 17 nt, Human
agauuuaucaaaucagu

SEQ ID NO: 2483475 - RNA, 13 nt, Human
agauuuaucaaau

SEQ ID NO: 2483476 - RNA, 16 nt, Human
agauuuacacugggag

SEQ ID NO: 2483477 - RNA, 15 nt, Human
agauuuacacuggga

SEQ ID NO: 2483478 - RNA, 22 nt, Human
agauuugugaacucagccaagc

SEQ ID NO: 2483479 - RNA, 19 nt, Human
agauuuucagcaaacucuu

SEQ ID NO: 2483480 - RNA, 17 nt, Human
agauuuucagaaaauau

SEQ ID NO: 2483481 - RNA, 15 nt, Human
agcaaaaagcaaaau

SEQ ID NO: 2483482 - RNA, 21 nt, Human
agauuugugaacucagccaag

SEQ ID NO: 2483483 - RNA, 19 nt, Human
agauuugugaacucagcca

SEQ ID NO: 2483484 - RNA, 12 nt, Human
agauuuucagaa

SEQ ID NO: 2483485 - RNA, 15 nt, Human
agcaacaauuuauga

SEQ ID NO: 2483486 - RNA, 12 nt, Human
agcaaaacaaaa

SEQ ID NO: 2483487 - RNA, 23 nt, Human
agauuuuccacaagauucccaga

SEQ ID NO: 2483488 - RNA, 15 nt, Human
agcaaccccaggcug

SEQ ID NO: 2483489 - RNA, 16 nt, Human
agcaaccccaggcuga

SEQ ID NO: 2483490 - RNA, 14 nt, Human
agcaaccccaggcu

SEQ ID NO: 2483491 - RNA, 15 nt, Human
agcaaccaguuggcu

SEQ ID NO: 2483492 - RNA, 22 nt, Human
agcaacauuuuacccacacaca

SEQ ID NO: 2483493 - RNA, 19 nt, Human
agcaacagguuuuauaauu

SEQ ID NO: 2483494 - RNA, 21 nt, Human
agcaacaucuagcaaauguua

SEQ ID NO: 2483495 - RNA, 23 nt, Human
agcaacaggaaucaagagcugcc

SEQ ID NO: 2483496 - RNA, 22 nt, Human
agcaacaggaaucaagagcugc

SEQ ID NO: 2483497 - RNA, 21 nt, Human
agcaacaggaaucaagagcug

SEQ ID NO: 2483498 - RNA, 18 nt, Human
agcaacagguuuuauaau

SEQ ID NO: 2483499 - RNA, 20 nt, Human
agcaacauuuuacccacaca

SEQ ID NO: 2483500 - RNA, 17 nt, Human
agcaacacaagcuggaa

SEQ ID NO: 2483501 - RNA, 14 nt, Human
agcaacacaagcug

SEQ ID NO: 2483502 - RNA, 21 nt, Human
agcaacaauuuaugaauugaa

SEQ ID NO: 2483503 - RNA, 20 nt, Human
agcaacacaagcuggaagca

SEQ ID NO: 2483504 - RNA, 18 nt, Human
agcaacacaagcuggaag

SEQ ID NO: 2483505 - RNA, 22 nt, Human
agcaacagagugagacccuguc

SEQ ID NO: 2483506 - RNA, 23 nt, Human
agcaacagagugagacccugucu

SEQ ID NO: 2483507 - RNA, 20 nt, Human
agcaacagagugagacccug

SEQ ID NO: 2483508 - RNA, 22 nt, Human
agaugucccuuucuuggccagu

SEQ ID NO: 2483509 - RNA, 20 nt, Human
agaugucccuuucuuggcca

SEQ ID NO: 2483510 - RNA, 21 nt, Human
agaugucccuuucuuggccag

SEQ ID NO: 2483511 - RNA, 18 nt, Human
agaugucagccgagccgg

SEQ ID NO: 2483512 - RNA, 20 nt, Human
agaugucagccgagccgggc

SEQ ID NO: 2483513 - RNA, 18 nt, Human
agaugucagacuggcugg

SEQ ID NO: 2483514 - RNA, 20 nt, Human
agaugucuucguacaguucu

SEQ ID NO: 2483515 - RNA, 19 nt, Human
agaugucuucguacaguuc

SEQ ID NO: 2483516 - RNA, 18 nt, Human
agaugucuucguacaguu

SEQ ID NO: 2483517 - RNA, 15 nt, Human
agaugucuucguaca

SEQ ID NO: 2483518 - RNA, 17 nt, Human
agaugucuucugccugu

SEQ ID NO: 2483519 - RNA, 16 nt, Human
agaugucuucugccug

SEQ ID NO: 2483520 - RNA, 18 nt, Human
agaugucuucugccuguu

SEQ ID NO: 2483521 - RNA, 13 nt, Human
agaugucuucgua

SEQ ID NO: 2483522 - RNA, 22 nt, Human
agaugucucuggcgugugggua

SEQ ID NO: 2483523 - RNA, 12 nt, Human
agaugucuauuc

SEQ ID NO: 2483524 - RNA, 18 nt, Human
agaugucuaauaguuauu

SEQ ID NO: 2483525 - RNA, 19 nt, Human
agauggaguucuugugcca

SEQ ID NO: 2483526 - RNA, 17 nt, Human
agauggaguucuugugc

SEQ ID NO: 2483527 - RNA, 11 nt, Human
agauggauucu

SEQ ID NO: 2483528 - RNA, 15 nt, Human
agauggauucucaga

SEQ ID NO: 2483529 - RNA, 16 nt, Human
agauggauucucagau

SEQ ID NO: 2483530 - RNA, 17 nt, Human
agauggauucucagaua

SEQ ID NO: 2483531 - RNA, 15 nt, Human
agaugucagacuggc

SEQ ID NO: 2483532 - RNA, 16 nt, Human
agauggcaaaugacca

SEQ ID NO: 2483533 - RNA, 23 nt, Human
agauggauucuccacucaguugc

SEQ ID NO: 2483534 - RNA, 18 nt, Human
agauggauugguguaaaa

SEQ ID NO: 2483535 - RNA, 15 nt, Human
agauggauuugccug

SEQ ID NO: 2483536 - RNA, 20 nt, Human
agauggauuugccugugcca

SEQ ID NO: 2483537 - RNA, 13 nt, Human
agauggauucucc

SEQ ID NO: 2483538 - RNA, 18 nt, Human
agauggauucuccacuca

SEQ ID NO: 2483539 - RNA, 18 nt, Human
agauggauucucagauau

SEQ ID NO: 2483540 - RNA, 20 nt, Human
agauggauucucagauauuu

SEQ ID NO: 2483541 - RNA, 18 nt, Human
agaugcuucucacugcca

SEQ ID NO: 2483542 - RNA, 16 nt, Human
agaugcuucucacugc

SEQ ID NO: 2483543 - RNA, 22 nt, Human
agaugcuuuucugucucugccu

SEQ ID NO: 2483544 - RNA, 19 nt, Human
agaugcuuuucugucucug

SEQ ID NO: 2483545 - RNA, 17 nt, Human
agaugcuuuucugucuc

SEQ ID NO: 2483546 - RNA, 16 nt, Human
agaugcuuuucugucu

SEQ ID NO: 2483547 - RNA, 12 nt, Human
agaugcuucugg

SEQ ID NO: 2483548 - RNA, 15 nt, Human
agaugcuucugggag

SEQ ID NO: 2483549 - RNA, 16 nt, Human
agaugcuucugggaga

SEQ ID NO: 2483550 - RNA, 23 nt, Human
agaugcuagaacucccuuucaac

SEQ ID NO: 2483551 - RNA, 22 nt, Human
agaugcuagaacucccuuucaa

SEQ ID NO: 2483552 - RNA, 14 nt, Human
agaugcaaagaggc

SEQ ID NO: 2483553 - RNA, 15 nt, Human
agaugcaaagaggca

SEQ ID NO: 2483554 - RNA, 16 nt, Human
agaugcaaagaggcaa

SEQ ID NO: 2483555 - RNA, 17 nt, Human
agaugcaaagaggcaag

SEQ ID NO: 2483556 - RNA, 18 nt, Human
agaugcaaagaggcaaga

SEQ ID NO: 2483557 - RNA, 17 nt, Human
ugaccccucauagcccu

SEQ ID NO: 2483558 - RNA, 13 nt, Human
ugacccagugaga

SEQ ID NO: 2483559 - RNA, 14 nt, Human
ugacccccagcucc

SEQ ID NO: 2483560 - RNA, 22 nt, Human
ugacccccaaccaaguggcucc

SEQ ID NO: 2483561 - RNA, 19 nt, Human
ugaccccucauagcccuca

SEQ ID NO: 2483562 - RNA, 20 nt, Human
ugaccccucauagcccucac

SEQ ID NO: 2483563 - RNA, 13 nt, Human
ugaccucugccug

SEQ ID NO: 2483564 - RNA, 18 nt, Human
ugaccugaaguucaccau

SEQ ID NO: 2483565 - RNA, 14 nt, Human
ugaccugaaguuca

SEQ ID NO: 2483566 - RNA, 13 nt, Human
ugaccugaaguuc

SEQ ID NO: 2483567 - RNA, 21 nt, Human
ugaccucuguuguccuccccu

SEQ ID NO: 2483568 - RNA, 22 nt, Human
ugaccucuguuguccuccccuu

SEQ ID NO: 2483569 - RNA, 12 nt, Human
ugaccugaggcc

SEQ ID NO: 2483570 - RNA, 19 nt, Human
ugaccucuguuguccuccc

SEQ ID NO: 2483571 - RNA, 18 nt, Human
ugaccucuguuguccucc

SEQ ID NO: 2483572 - RNA, 17 nt, Human
ugaccucuguuguccuc

SEQ ID NO: 2483573 - RNA, 14 nt, Human
ugaccucugccuga

SEQ ID NO: 2483574 - RNA, 23 nt, Human
ugacccagugcccccacugacca

SEQ ID NO: 2483575 - RNA, 17 nt, Human
ugacccagugcccccac

SEQ ID NO: 2483576 - RNA, 18 nt, Human
ugacccagugcccccacu

SEQ ID NO: 2483577 - RNA, 16 nt, Human
ugacccagugccccca

SEQ ID NO: 2483578 - RNA, 16 nt, Human
ugacccagucccuggg

SEQ ID NO: 2483579 - RNA, 20 nt, Human
ugacccagucccugggggaa

SEQ ID NO: 2483580 - RNA, 21 nt, Human
ugacccaguccccgugccccg

SEQ ID NO: 2483581 - RNA, 12 nt, Human
ugacccaguccc

SEQ ID NO: 2483582 - RNA, 14 nt, Human
ugacccagucccug

SEQ ID NO: 2483583 - RNA, 15 nt, Human
ugacccagucccugg

SEQ ID NO: 2483584 - RNA, 22 nt, Human
ugacccaggccgcagcucuugc

SEQ ID NO: 2483585 - RNA, 21 nt, Human
ugacccaggccgcagcucuug

SEQ ID NO: 2483586 - RNA, 19 nt, Human
ugacccaggccgcagcucu

SEQ ID NO: 2483587 - RNA, 16 nt, Human
ugacccaggccgcagc

SEQ ID NO: 2483588 - RNA, 19 nt, Human
agauguguugcuauccuga

SEQ ID NO: 2483589 - RNA, 19 nt, Human
ugacccaggcugggcaagg

SEQ ID NO: 2483590 - RNA, 17 nt, Human
ugacccaggcugggcaa

SEQ ID NO: 2483591 - RNA, 15 nt, Human
ugacccaggcugggc

SEQ ID NO: 2483592 - RNA, 14 nt, Human
ugacccaggcuggg

SEQ ID NO: 2483593 - RNA, 12 nt, Human
ugacccaggcug

SEQ ID NO: 2483594 - RNA, 13 nt, Human
ugacccaggcugg

SEQ ID NO: 2483595 - RNA, 18 nt, Human
agauguguucacaaugga

SEQ ID NO: 2483596 - RNA, 15 nt, Human
agauguguucacaau

SEQ ID NO: 2483597 - RNA, 16 nt, Human
agaugugucuauggcu

SEQ ID NO: 2483598 - RNA, 17 nt, Human
agaucagagcagcagug

SEQ ID NO: 2483599 - RNA, 20 nt, Human
agaucagcaaaccggggccu

SEQ ID NO: 2483600 - RNA, 18 nt, Human
agaucacuuucucaguuu

SEQ ID NO: 2483601 - RNA, 19 nt, Human
agaucacuuucucaguuuu

SEQ ID NO: 2483602 - RNA, 23 nt, Human
agaucacuuucucaguuuucaua

SEQ ID NO: 2483603 - RNA, 19 nt, Human
ugaauuuaauaaucuguag

SEQ ID NO: 2483604 - RNA, 19 nt, Human
ugaauuuaaauauaauucu

SEQ ID NO: 2483605 - RNA, 16 nt, Human
ugaauuuaaauauaau

SEQ ID NO: 2483606 - RNA, 15 nt, Human
ugaauuuaaauauaa

SEQ ID NO: 2483607 - RNA, 20 nt, Human
ugaauuuaaauauaauucug

SEQ ID NO: 2483608 - RNA, 18 nt, Human
ugaauuuauuauuguucu

SEQ ID NO: 2483609 - RNA, 15 nt, Human
ugaauuuauuauugu

SEQ ID NO: 2483610 - RNA, 14 nt, Human
ugacaguaguacca

SEQ ID NO: 2483611 - RNA, 17 nt, Human
ugacagguuugggaccc

SEQ ID NO: 2483612 - RNA, 15 nt, Human
ugacauugcguuuga

SEQ ID NO: 2483613 - RNA, 19 nt, Human
ugacauugcguuugaccuu

SEQ ID NO: 2483614 - RNA, 20 nt, Human
ugacagugccugggaaugua

SEQ ID NO: 2483615 - RNA, 23 nt, Human
ugacagucuugugcuuuuccuau

SEQ ID NO: 2483616 - RNA, 17 nt, Human
ugacagugccugggaau

SEQ ID NO: 2483617 - RNA, 15 nt, Human
ugacagucuugugcu

SEQ ID NO: 2483618 - RNA, 18 nt, Human
ugacaguccucuccaccu

SEQ ID NO: 2483619 - RNA, 14 nt, Human
ugacagugccuggg

SEQ ID NO: 2483620 - RNA, 17 nt, Human
ugacaguccucuccacc

SEQ ID NO: 2483621 - RNA, 16 nt, Human
ugacaguccucuccac

SEQ ID NO: 2483622 - RNA, 15 nt, Human
ugacaguccucucca

SEQ ID NO: 2483623 - RNA, 21 nt, Human
ugacaguaguaccaaaugcuu

SEQ ID NO: 2483624 - RNA, 15 nt, Human
ugacauugcuuuacu

SEQ ID NO: 2483625 - RNA, 13 nt, Human
ugacauugcuuua

SEQ ID NO: 2483626 - RNA, 19 nt, Human
ugacauugcuaagaugcuc

SEQ ID NO: 2483627 - RNA, 18 nt, Human
ugacauugcuaagaugcu

SEQ ID NO: 2483628 - RNA, 16 nt, Human
ugacauugcuaagaug

SEQ ID NO: 2483629 - RNA, 18 nt, Human
ugacauuguagagcuucu

SEQ ID NO: 2483630 - RNA, 14 nt, Human
ugacauuuugccaa

SEQ ID NO: 2483631 - RNA, 14 nt, Human
ugaccaaaguccuu

SEQ ID NO: 2483632 - RNA, 16 nt, Human
ugaccaaaguccuuuu

SEQ ID NO: 2483633 - RNA, 16 nt, Human
ugaccaaaauccccuu

SEQ ID NO: 2483634 - RNA, 18 nt, Human
ugaccaaaauccccuucu

SEQ ID NO: 2483635 - RNA, 12 nt, Human
ugaccacacucc

SEQ ID NO: 2483636 - RNA, 17 nt, Human
ugaccacacuccagcug

SEQ ID NO: 2483637 - RNA, 19 nt, Human
ugaccacacuccagcuggg

SEQ ID NO: 2483638 - RNA, 20 nt, Human
ugaccacacuccagcuggga

SEQ ID NO: 2483639 - RNA, 17 nt, Human
ugaccaacaguuccuuc

SEQ ID NO: 2483640 - RNA, 16 nt, Human
ugaccaacauggagaa

SEQ ID NO: 2483641 - RNA, 17 nt, Human
ugaccaacauggagaaa

SEQ ID NO: 2483642 - RNA, 15 nt, Human
ugaccaaugucuuga

SEQ ID NO: 2483643 - RNA, 18 nt, Human
ugaccaacauggagaaac

SEQ ID NO: 2483644 - RNA, 20 nt, Human
ugaccaacauggagaaaccc

SEQ ID NO: 2483645 - RNA, 21 nt, Human
agaucauugugaaauuauuca

SEQ ID NO: 2483646 - RNA, 15 nt, Human
ugaccacacuuccug

SEQ ID NO: 2483647 - RNA, 18 nt, Human
ugaccacacuuccugucc

SEQ ID NO: 2483648 - RNA, 20 nt, Human
ugaccacacuuccuguccag

SEQ ID NO: 2483649 - RNA, 12 nt, Human
agaucauuguga

SEQ ID NO: 2483650 - RNA, 23 nt, Human
agauccaaaagaagcccccagcu

SEQ ID NO: 2483651 - RNA, 18 nt, Human
agauccaaaagaagcccc

SEQ ID NO: 2483652 - RNA, 23 nt, Human
ugaccacacuuccuguccagaga

SEQ ID NO: 2483653 - RNA, 21 nt, Human
agauccaaaagaagcccccag

SEQ ID NO: 2483654 - RNA, 14 nt, Human
agauccacacacag

SEQ ID NO: 2483655 - RNA, 15 nt, Human
agauccacacacaga

SEQ ID NO: 2483656 - RNA, 16 nt, Human
agauccacacacagag

SEQ ID NO: 2483657 - RNA, 17 nt, Human
agauccacacacagagg

SEQ ID NO: 2483658 - RNA, 18 nt, Human
agauccacacacagagga

SEQ ID NO: 2483659 - RNA, 19 nt, Human
agaugauuuaaaagggaag

SEQ ID NO: 2483660 - RNA, 17 nt, Human
agaugaugggggagggg

SEQ ID NO: 2483661 - RNA, 19 nt, Human
agaugauggaugccaauau

SEQ ID NO: 2483662 - RNA, 16 nt, Human
agaugauggaugccaa

SEQ ID NO: 2483663 - RNA, 21 nt, Human
agaucgugccguuacucucca

SEQ ID NO: 2483664 - RNA, 19 nt, Human
agaugaugaugaucuuuaa

SEQ ID NO: 2483665 - RNA, 20 nt, Human
agauccuuguuucaaacaca

SEQ ID NO: 2483666 - RNA, 18 nt, Human
agauccuuguuucaaaca

SEQ ID NO: 2483667 - RNA, 20 nt, Human
agauccuuuaaauccuucca

SEQ ID NO: 2483668 - RNA, 14 nt, Human
agaucgcaguuugc

SEQ ID NO: 2483669 - RNA, 15 nt, Human
agaucgcccccaccu

SEQ ID NO: 2483670 - RNA, 16 nt, Human
agaucgcaucauugca

SEQ ID NO: 2483671 - RNA, 15 nt, Human
agaucgcaguuugcc

SEQ ID NO: 2483672 - RNA, 20 nt, Human
agaucgcgccacugcacucc

SEQ ID NO: 2483673 - RNA, 15 nt, Human
agaucgcgccacugc

SEQ ID NO: 2483674 - RNA, 13 nt, Human
agauccagccugg

SEQ ID NO: 2483675 - RNA, 14 nt, Human
agauccagccuggg

SEQ ID NO: 2483676 - RNA, 12 nt, Human
agauccaggacu

SEQ ID NO: 2483677 - RNA, 21 nt, Human
agauccugucuuuaaggaaaa

SEQ ID NO: 2483678 - RNA, 15 nt, Human
agauccuuguuucaa

SEQ ID NO: 2483679 - RNA, 14 nt, Human
agauccuuguuuca

SEQ ID NO: 2483680 - RNA, 15 nt, Human
agauccuuccuuuug

SEQ ID NO: 2483681 - RNA, 21 nt, Human
agauaauguuagagguuuuaa

SEQ ID NO: 2483682 - RNA, 19 nt, Human
agauaaugugauauuauac

SEQ ID NO: 2483683 - RNA, 12 nt, Human
agauaauuauaa

SEQ ID NO: 2483684 - RNA, 18 nt, Human
agauaauucuagcuuuga

SEQ ID NO: 2483685 - RNA, 13 nt, Human
agauaaugugaaa

SEQ ID NO: 2483686 - RNA, 18 nt, Human
agauaaugugaaaauggu

SEQ ID NO: 2483687 - RNA, 12 nt, Human
agauaaugugaa

SEQ ID NO: 2483688 - RNA, 15 nt, Human
agauaaucucucagc

SEQ ID NO: 2483689 - RNA, 23 nt, Human
agauaaucuagaacacaggcaaa

SEQ ID NO: 2483690 - RNA, 16 nt, Human
agauaaucuagaacac

SEQ ID NO: 2483691 - RNA, 16 nt, Human
agauaaguguauuuuu

SEQ ID NO: 2483692 - RNA, 18 nt, Human
agauaaguguauuuuuca

SEQ ID NO: 2483693 - RNA, 20 nt, Human
agauaaguguauuuuucaau

SEQ ID NO: 2483694 - RNA, 14 nt, Human
agauaauaauauau

SEQ ID NO: 2483695 - RNA, 17 nt, Human
agauaauaauauauguu

SEQ ID NO: 2483696 - RNA, 16 nt, Human
agauaauaauauaugu

SEQ ID NO: 2483697 - RNA, 15 nt, Human
agauaaucagccucu

SEQ ID NO: 2483698 - RNA, 19 nt, Human
agauaaucagugugucuaa

SEQ ID NO: 2483699 - RNA, 16 nt, Human
agauaaucagccucuu

SEQ ID NO: 2483700 - RNA, 17 nt, Human
agauaaucagccucuua

SEQ ID NO: 2483701 - RNA, 19 nt, Human
agaguuuugucuugaaugu

SEQ ID NO: 2483702 - RNA, 16 nt, Human
agaguuuugucuugaa

SEQ ID NO: 2483703 - RNA, 14 nt, Human
agaguuuugucuug

SEQ ID NO: 2483704 - RNA, 13 nt, Human
agaguuuugucuu

SEQ ID NO: 2483705 - RNA, 21 nt, Human
agaguuuuggaugcagugcuc

SEQ ID NO: 2483706 - RNA, 18 nt, Human
agagugagggccugaggu

SEQ ID NO: 2483707 - RNA, 21 nt, Human
agagugagagggcaugcgcac

SEQ ID NO: 2483708 - RNA, 19 nt, Human
agagugagacucugucuca

SEQ ID NO: 2483709 - RNA, 15 nt, Human
agagugagacccugu

SEQ ID NO: 2483710 - RNA, 18 nt, Human
agagugagacucagucuu

SEQ ID NO: 2483711 - RNA, 14 nt, Human
agagugagagggca

SEQ ID NO: 2483712 - RNA, 15 nt, Human
agauaaagaugaucu

SEQ ID NO: 2483713 - RNA, 13 nt, Human
agauaaagaugau

SEQ ID NO: 2483714 - RNA, 16 nt, Human
agauaaagaugaucua

SEQ ID NO: 2483715 - RNA, 11 nt, Human
agauaaagaug

SEQ ID NO: 2483716 - RNA, 19 nt, Human
agauaaacucagaaauuua

SEQ ID NO: 2483717 - RNA, 22 nt, Human
agauaaaauuauagaugggaau

SEQ ID NO: 2483718 - RNA, 21 nt, Human
agauaaaauuauagaugggaa

SEQ ID NO: 2483719 - RNA, 13 nt, Human
agauaaacucaga

SEQ ID NO: 2483720 - RNA, 19 nt, Human
agauaaggguaucugguga

SEQ ID NO: 2483721 - RNA, 17 nt, Human
agauaaggguaucuggu

SEQ ID NO: 2483722 - RNA, 14 nt, Human
agauaaagauuucu

SEQ ID NO: 2483723 - RNA, 17 nt, Human
agauaaagauuucuuga

SEQ ID NO: 2483724 - RNA, 14 nt, Human
agauaccagcgagg

SEQ ID NO: 2483725 - RNA, 19 nt, Human
agauaccagcgaggaggcu

SEQ ID NO: 2483726 - RNA, 21 nt, Human
agauaccagcgaggaggcucc

SEQ ID NO: 2483727 - RNA, 23 nt, Human
agauaccagcgaggaggcuccag

SEQ ID NO: 2483728 - RNA, 23 nt, Human
agauacaauguauuuauuuaaaa

SEQ ID NO: 2483729 - RNA, 21 nt, Human
agauacaugguugugaccuga

SEQ ID NO: 2483730 - RNA, 20 nt, Human
agauacagaacucuuucaaa

SEQ ID NO: 2483731 - RNA, 13 nt, Human
agauacaauguau

SEQ ID NO: 2483732 - RNA, 16 nt, Human
agauacaauguauuua

SEQ ID NO: 2483733 - RNA, 15 nt, Human
agauacaauguauuu

SEQ ID NO: 2483734 - RNA, 18 nt, Human
agauacagaacucuuuca

SEQ ID NO: 2483735 - RNA, 19 nt, Human
agauacaggaaaagcugcu

SEQ ID NO: 2483736 - RNA, 17 nt, Human
agauaccucacccugcu

SEQ ID NO: 2483737 - RNA, 14 nt, Human
agauaccucacccu

SEQ ID NO: 2483738 - RNA, 13 nt, Human
agauaccucaccc

SEQ ID NO: 2483739 - RNA, 22 nt, Human
agauaccuaaaagagauuucaa

SEQ ID NO: 2483740 - RNA, 19 nt, Human
agauaccuaaaagagauuu

SEQ ID NO: 2483741 - RNA, 18 nt, Human
agauaccagguugaaaga

SEQ ID NO: 2483742 - RNA, 19 nt, Human
agauaccagguugaaagac

SEQ ID NO: 2483743 - RNA, 22 nt, Human
agauauuuugcuuugugauuuu

SEQ ID NO: 2483744 - RNA, 17 nt, Human
agauauuuuuaucuuua

SEQ ID NO: 2483745 - RNA, 19 nt, Human
agauauuuuuaucuuuaua

SEQ ID NO: 2483746 - RNA, 14 nt, Human
agauacgacuuuau

SEQ ID NO: 2483747 - RNA, 19 nt, Human
agaucaaccccuucgcucc

SEQ ID NO: 2483748 - RNA, 14 nt, Human
agaucaaccccuuc

SEQ ID NO: 2483749 - RNA, 20 nt, Human
agauauuuuuaucuuuauau

SEQ ID NO: 2483750 - RNA, 21 nt, Human
agauauuuuuaucuuuauaug

SEQ ID NO: 2483751 - RNA, 13 nt, Human
agauauuuuucau

SEQ ID NO: 2483752 - RNA, 12 nt, Human
agauauuuuuca

SEQ ID NO: 2483753 - RNA, 19 nt, Human
agauauuuuucaugauuuu

SEQ ID NO: 2483754 - RNA, 16 nt, Human
agauauuuuucaugau

SEQ ID NO: 2483755 - RNA, 19 nt, Human
agauauuuuuccauuuuuu

SEQ ID NO: 2483756 - RNA, 16 nt, Human
agauacgacuuuauuu

SEQ ID NO: 2483757 - RNA, 18 nt, Human
agauauuuuuucagaaau

SEQ ID NO: 2483758 - RNA, 15 nt, Human
agaucaagagaucaa

SEQ ID NO: 2483759 - RNA, 19 nt, Human
agauauuuuuucagaaaua

SEQ ID NO: 2483760 - RNA, 21 nt, Human
agauauuuuuucagaaauaug

SEQ ID NO: 2483761 - RNA, 22 nt, Human
agauauuuuuucagaaauaugu

SEQ ID NO: 2483762 - RNA, 21 nt, Human
agaucaaccccuucgcuccug

SEQ ID NO: 2483763 - RNA, 11 nt, Human
agaucacuuuc

SEQ ID NO: 2483764 - RNA, 15 nt, Human
agaucacuacugcag

SEQ ID NO: 2483765 - RNA, 14 nt, Human
agaucacuacugca

SEQ ID NO: 2483766 - RNA, 23 nt, Human
agaucacgcuccccgccuguucc

SEQ ID NO: 2483767 - RNA, 22 nt, Human
agaucacgcuccccgccuguuc

SEQ ID NO: 2483768 - RNA, 21 nt, Human
agaucacgcuccccgccuguu

SEQ ID NO: 2483769 - RNA, 18 nt, Human
agaucacguuccuucccc

SEQ ID NO: 2483770 - RNA, 12 nt, Human
ugaaugcuuuuu

SEQ ID NO: 2483771 - RNA, 19 nt, Human
ugaaugcuuuuugaauguu

SEQ ID NO: 2483772 - RNA, 18 nt, Human
ugaaugcuuuuugaaugu

SEQ ID NO: 2483773 - RNA, 23 nt, Human
ugaaugcuuuuugaauguuauuu

SEQ ID NO: 2483774 - RNA, 22 nt, Human
ugaaugccacugccuucgcuuc

SEQ ID NO: 2483775 - RNA, 21 nt, Human
ugaaugccacugccuucgcuu

SEQ ID NO: 2483776 - RNA, 21 nt, Human
ugaaugcuuauagguggccuc

SEQ ID NO: 2483777 - RNA, 14 nt, Human
ugaaugcauaaaau

SEQ ID NO: 2483778 - RNA, 23 nt, Human
ugaaugcccacaggcaaaugcau

SEQ ID NO: 2483779 - RNA, 23 nt, Human
ugaauggauuggauuauuuaaua

SEQ ID NO: 2483780 - RNA, 22 nt, Human
ugaauggauuggauuauuuaau

SEQ ID NO: 2483781 - RNA, 21 nt, Human
ugaauggauuggauuauuuaa

SEQ ID NO: 2483782 - RNA, 20 nt, Human
ugaauggauuggauuauuua

SEQ ID NO: 2483783 - RNA, 17 nt, Human
ugaauggauuggauuau

SEQ ID NO: 2483784 - RNA, 15 nt, Human
ugaauggauuggauu

SEQ ID NO: 2483785 - RNA, 14 nt, Human
ugaauggauuggau

SEQ ID NO: 2483786 - RNA, 12 nt, Human
ugaauggccugc

SEQ ID NO: 2483787 - RNA, 15 nt, Human
ugaauggccugccuu

SEQ ID NO: 2483788 - RNA, 17 nt, Human
ugaauggccugccuuga

SEQ ID NO: 2483789 - RNA, 21 nt, Human
ugaauggccugccuugaagcc

SEQ ID NO: 2483790 - RNA, 14 nt, Human
ugaaugcauuuugu

SEQ ID NO: 2483791 - RNA, 13 nt, Human
ugaaugcauuuug

SEQ ID NO: 2483792 - RNA, 12 nt, Human
ugaaugcauuuu

SEQ ID NO: 2483793 - RNA, 21 nt, Human
ugaaugcauuuuguuugguau

SEQ ID NO: 2483794 - RNA, 15 nt, Human
ugaaugcauuuuguu

SEQ ID NO: 2483795 - RNA, 15 nt, Human
ugaaugccacugccu

SEQ ID NO: 2483796 - RNA, 22 nt, Human
ugaaugcauuuuguuugguauu

SEQ ID NO: 2483797 - RNA, 16 nt, Human
ugaaugcauaaaaugu

SEQ ID NO: 2483798 - RNA, 15 nt, Human
ugaaugcauaaaaug

SEQ ID NO: 2483799 - RNA, 18 nt, Human
ugaauauccccucccagu

SEQ ID NO: 2483800 - RNA, 16 nt, Human
ugaauauccccuccca

SEQ ID NO: 2483801 - RNA, 14 nt, Human
ugaauauccccucc

SEQ ID NO: 2483802 - RNA, 13 nt, Human
ugaauauccccuc

SEQ ID NO: 2483803 - RNA, 23 nt, Human
ugaagguuuacaauuuacaaagu

SEQ ID NO: 2483804 - RNA, 18 nt, Human
ugaauauauuauaaucuu

SEQ ID NO: 2483805 - RNA, 21 nt, Human
ugaauauacagcaggugcuca

SEQ ID NO: 2483806 - RNA, 22 nt, Human
ugaauauaccccuuaguguuug

SEQ ID NO: 2483807 - RNA, 16 nt, Human
ugaauauaaacacuau

SEQ ID NO: 2483808 - RNA, 22 nt, Human
ugaauauaauauauuuguguau

SEQ ID NO: 2483809 - RNA, 21 nt, Human
ugaauauaauauauuugugua

SEQ ID NO: 2483810 - RNA, 22 nt, Human
ugaagguuuacaauuuacaaag

SEQ ID NO: 2483811 - RNA, 21 nt, Human
ugaagguuuacaauuuacaaa

SEQ ID NO: 2483812 - RNA, 14 nt, Human
ugaagguuuacaau

SEQ ID NO: 2483813 - RNA, 20 nt, Human
ugaagguuaggauuuaacag

SEQ ID NO: 2483814 - RNA, 16 nt, Human
ugaagguuaggauuua

SEQ ID NO: 2483815 - RNA, 14 nt, Human
ugaagguugaagag

SEQ ID NO: 2483816 - RNA, 14 nt, Human
ugaauauaaacacu

SEQ ID NO: 2483817 - RNA, 15 nt, Human
ugaauauaaacacua

SEQ ID NO: 2483818 - RNA, 13 nt, Human
ugaagguuucuga

SEQ ID NO: 2483819 - RNA, 18 nt, Human
ugaagguggaaauaaacu

SEQ ID NO: 2483820 - RNA, 19 nt, Human
ugaaggugcugacggccag

SEQ ID NO: 2483821 - RNA, 20 nt, Human
ugaaggugcugacggccagg

SEQ ID NO: 2483822 - RNA, 14 nt, Human
ugaaggugucagaa

SEQ ID NO: 2483823 - RNA, 15 nt, Human
ugaagguuaggauuu

SEQ ID NO: 2483824 - RNA, 15 nt, Human
ugaaggugucagaau

SEQ ID NO: 2483825 - RNA, 15 nt, Human
ugaaggugcugacgg

SEQ ID NO: 2483826 - RNA, 23 nt, Human
ugaagcuuuauacguguagcuau

SEQ ID NO: 2483827 - RNA, 14 nt, Human
ugaagcuuuauacg

SEQ ID NO: 2483828 - RNA, 23 nt, Human
ugaagcuuguguauccauuauca

SEQ ID NO: 2483829 - RNA, 15 nt, Human
ugaagcuuguguauc

SEQ ID NO: 2483830 - RNA, 12 nt, Human
ugaagcuuuaua

SEQ ID NO: 2483831 - RNA, 14 nt, Human
ugaagcuuguguau

SEQ ID NO: 2483832 - RNA, 13 nt, Human
ugaagcuugugua

SEQ ID NO: 2483833 - RNA, 12 nt, Human
ugaagcuuccuu

SEQ ID NO: 2483834 - RNA, 14 nt, Human
agagugaacaaauu

SEQ ID NO: 2483835 - RNA, 22 nt, Human
agagucucacuguugcccaggc

SEQ ID NO: 2483836 - RNA, 20 nt, Human
agagucucacuguugcccag

SEQ ID NO: 2483837 - RNA, 22 nt, Human
agagugaacaaauuuacagaga

SEQ ID NO: 2483838 - RNA, 16 nt, Human
agagugagacucuguc

SEQ ID NO: 2483839 - RNA, 15 nt, Human
agagugagacucugu

SEQ ID NO: 2483840 - RNA, 18 nt, Human
ugaaugucagugugacug

SEQ ID NO: 2483841 - RNA, 15 nt, Human
ugaaugucaguguga

SEQ ID NO: 2483842 - RNA, 17 nt, Human
ugaauguauuuauuugg

SEQ ID NO: 2483843 - RNA, 14 nt, Human
ugaaugucagugug

SEQ ID NO: 2483844 - RNA, 22 nt, Human
agagucggaacggagaaaggug

SEQ ID NO: 2483845 - RNA, 21 nt, Human
agaguccugcacaguuuucug

SEQ ID NO: 2483846 - RNA, 14 nt, Human
agaguccugcacag

SEQ ID NO: 2483847 - RNA, 14 nt, Human
agaguccucuggau

SEQ ID NO: 2483848 - RNA, 14 nt, Human
agaguccucacucc

SEQ ID NO: 2483849 - RNA, 14 nt, Human
agaguccucugaau

SEQ ID NO: 2483850 - RNA, 19 nt, Human
ugaauguauuuauuuggga

SEQ ID NO: 2483851 - RNA, 23 nt, Human
ugaauguauuuauuugggagacc

SEQ ID NO: 2483852 - RNA, 12 nt, Human
agaguccucuga

SEQ ID NO: 2483853 - RNA, 13 nt, Human
agaguccucugaa

SEQ ID NO: 2483854 - RNA, 19 nt, Human
agagcuucuguugcugccu

SEQ ID NO: 2483855 - RNA, 20 nt, Human
agagcuucuguugcugccuc

SEQ ID NO: 2483856 - RNA, 20 nt, Human
agaggaaaaugaauaauaca

SEQ ID NO: 2483857 - RNA, 17 nt, Human
agaggaaaaugaauaau

SEQ ID NO: 2483858 - RNA, 16 nt, Human
agaggaaaaugaauaa

SEQ ID NO: 2483859 - RNA, 21 nt, Human
agagcuucuguugcugccuca

SEQ ID NO: 2483860 - RNA, 17 nt, Human
agagcuucccugacuca

SEQ ID NO: 2483861 - RNA, 20 nt, Human
agagcuucccugacucauuc

SEQ ID NO: 2483862 - RNA, 15 nt, Human
agagcuucuggcacu

SEQ ID NO: 2483863 - RNA, 13 nt, Human
agagcuucccuga

SEQ ID NO: 2483864 - RNA, 16 nt, Human
agagcuucccugacuc

SEQ ID NO: 2483865 - RNA, 12 nt, Human
agagcuucccug

SEQ ID NO: 2483866 - RNA, 15 nt, Human
agagcuggugcccgg

SEQ ID NO: 2483867 - RNA, 19 nt, Human
agagcugggugucaagagg

SEQ ID NO: 2483868 - RNA, 13 nt, Human
agagcuggugccc

SEQ ID NO: 2483869 - RNA, 21 nt, Human
agagcugguaguuaguagcau

SEQ ID NO: 2483870 - RNA, 23 nt, Human
agagcugguaguuaguagcaugu

SEQ ID NO: 2483871 - RNA, 18 nt, Human
agagcuggggcugaggga

SEQ ID NO: 2483872 - RNA, 13 nt, Human
agagcugggaggg

SEQ ID NO: 2483873 - RNA, 21 nt, Human
agagcuggggcugagggaugg

SEQ ID NO: 2483874 - RNA, 23 nt, Human
agagcugggaggcauggcccugg

SEQ ID NO: 2483875 - RNA, 22 nt, Human
agagcugggaggcauggcccug

SEQ ID NO: 2483876 - RNA, 12 nt, Human
agagcugggagg

SEQ ID NO: 2483877 - RNA, 21 nt, Human
ugaacuuucucuucauacuuu

SEQ ID NO: 2483878 - RNA, 16 nt, Human
agagcuggcucugagc

SEQ ID NO: 2483879 - RNA, 15 nt, Human
agagcuggcucugag

SEQ ID NO: 2483880 - RNA, 12 nt, Human
agagcuggcucu

SEQ ID NO: 2483881 - RNA, 13 nt, Human
agagcuggcucug

SEQ ID NO: 2483882 - RNA, 19 nt, Human
agaggaaagcaaaggagau

SEQ ID NO: 2483883 - RNA, 18 nt, Human
agaggaaagcaaaggaga

SEQ ID NO: 2483884 - RNA, 16 nt, Human
agaggaaagcaaagga

SEQ ID NO: 2483885 - RNA, 12 nt, Human
agaggaaagcaa

SEQ ID NO: 2483886 - RNA, 12 nt, Human
agaggaaaucac

SEQ ID NO: 2483887 - RNA, 11 nt, Human
agaggaaauca

SEQ ID NO: 2483888 - RNA, 21 nt, Human
agaggaaaucaccgaaaacgu

SEQ ID NO: 2483889 - RNA, 23 nt, Human
agaggaaauaagaaaaaucaugu

SEQ ID NO: 2483890 - RNA, 22 nt, Human
agaggaaauaagaaaaaucaug

SEQ ID NO: 2483891 - RNA, 14 nt, Human
agaggaaauaagaa

SEQ ID NO: 2483892 - RNA, 18 nt, Human
agaggcaacugcauuggc

SEQ ID NO: 2483893 - RNA, 11 nt, Human
ugaacuuugac

SEQ ID NO: 2483894 - RNA, 15 nt, Human
ucuuuguaaugaaaa

SEQ ID NO: 2483895 - RNA, 13 nt, Human
ucuuuguaaugaa

SEQ ID NO: 2483896 - RNA, 21 nt, Human
ucuuuggucuacacugugcug

SEQ ID NO: 2483897 - RNA, 14 nt, Human
ucuuuggucuacac

SEQ ID NO: 2483898 - RNA, 12 nt, Human
ucuuuguaauga

SEQ ID NO: 2483899 - RNA, 22 nt, Human
ucuuuguaagaguguagaagca

SEQ ID NO: 2483900 - RNA, 21 nt, Human
ucuuuguaagaguguagaagc

SEQ ID NO: 2483901 - RNA, 19 nt, Human
ucuuuguaagaguguagaa

SEQ ID NO: 2483902 - RNA, 24 nt, Human
ucuuuguaagaguguagaagcauu

SEQ ID NO: 2483903 - RNA, 23 nt, Human
ucuuuguaagaguguagaagcau

SEQ ID NO: 2483904 - RNA, 20 nt, Human
ugaagaagcaccaaucauga

SEQ ID NO: 2483905 - RNA, 14 nt, Human
ugaagaagauggua

SEQ ID NO: 2483906 - RNA, 16 nt, Human
ugaacuuugaccucug

SEQ ID NO: 2483907 - RNA, 17 nt, Human
ugaacuuugaccucugc

SEQ ID NO: 2483908 - RNA, 20 nt, Human
ugaagaacugcaggcccugg

SEQ ID NO: 2483909 - RNA, 22 nt, Human
ugaacuuucucuucauacuuuu

SEQ ID NO: 2483910 - RNA, 11 nt, Human
ugaacuuucuc

SEQ ID NO: 2483911 - RNA, 23 nt, Human
ucuuuguaaucguuaugugugua

SEQ ID NO: 2483912 - RNA, 13 nt, Human
ugaagacaaugac

SEQ ID NO: 2483913 - RNA, 17 nt, Human
ugaagacaaugacuuac

SEQ ID NO: 2483914 - RNA, 11 nt, Human
ugaagacaaug

SEQ ID NO: 2483915 - RNA, 23 nt, Human
ugaagaacugcaggcccuggccu

SEQ ID NO: 2483916 - RNA, 11 nt, Human
ugaagaagaga

SEQ ID NO: 2483917 - RNA, 21 nt, Human
agaggcuucuucagaucagug

SEQ ID NO: 2483918 - RNA, 16 nt, Human
agaggcuagcuucugc

SEQ ID NO: 2483919 - RNA, 19 nt, Human
agaggcuaaauuacucagg

SEQ ID NO: 2483920 - RNA, 17 nt, Human
agaggcuagcuucugcu

SEQ ID NO: 2483921 - RNA, 21 nt, Human
agaggcuaaauuacucaggaa

SEQ ID NO: 2483922 - RNA, 19 nt, Human
agaggcuagcuucugcuuu

SEQ ID NO: 2483923 - RNA, 14 nt, Human
agagggaagaaaag

SEQ ID NO: 2483924 - RNA, 15 nt, Human
agagggaagaaaaga

SEQ ID NO: 2483925 - RNA, 23 nt, Human
agagggaagaaaagagcuuucuu

SEQ ID NO: 2483926 - RNA, 20 nt, Human
agaggcgggccagccaggcg

SEQ ID NO: 2483927 - RNA, 19 nt, Human
agaggcgggccagccaggc

SEQ ID NO: 2483928 - RNA, 18 nt, Human
agaggcgggccagccagg

SEQ ID NO: 2483929 - RNA, 17 nt, Human
agaggcgggccagccag

SEQ ID NO: 2483930 - RNA, 16 nt, Human
agaggcgucuguauau

SEQ ID NO: 2483931 - RNA, 16 nt, Human
agaggcgggccagcca

SEQ ID NO: 2483932 - RNA, 15 nt, Human
agaggcgggccagcc

SEQ ID NO: 2483933 - RNA, 14 nt, Human
agaggcgggccagc

SEQ ID NO: 2483934 - RNA, 13 nt, Human
agaggcgggccag

SEQ ID NO: 2483935 - RNA, 19 nt, Human
agaggccuuuuggaaugug

SEQ ID NO: 2483936 - RNA, 18 nt, Human
agaggcaccugucccaga

SEQ ID NO: 2483937 - RNA, 18 nt, Human
agaggcagaaaauugcac

SEQ ID NO: 2483938 - RNA, 20 nt, Human
agaggcagaaaauugcacaa

SEQ ID NO: 2483939 - RNA, 21 nt, Human
agaggauuuuuuucugagcga

SEQ ID NO: 2483940 - RNA, 20 nt, Human
agaggaaauauugcuggggu

SEQ ID NO: 2483941 - RNA, 19 nt, Human
agaggaaauauugcugggg

SEQ ID NO: 2483942 - RNA, 24 nt, Human
agaggcaccacuaaaagaucgcag

SEQ ID NO: 2483943 - RNA, 21 nt, Human
agaggcgcaugaauuugugaa

SEQ ID NO: 2483944 - RNA, 21 nt, Human
agaggcagagaaagaagagac

SEQ ID NO: 2483945 - RNA, 20 nt, Human
agaggcagagaaagaagaga

SEQ ID NO: 2483946 - RNA, 18 nt, Human
agaggcagagaaagaaga

SEQ ID NO: 2483947 - RNA, 17 nt, Human
agaggcagagaaagaag

SEQ ID NO: 2483948 - RNA, 14 nt, Human
agaggcagagaaag

SEQ ID NO: 2483949 - RNA, 13 nt, Human
agaggcagagaaa

SEQ ID NO: 2483950 - RNA, 21 nt, Human
agagggacgccugggggugcc

SEQ ID NO: 2483951 - RNA, 15 nt, Human
agagggacgccuggg

SEQ ID NO: 2483952 - RNA, 13 nt, Human
agagggaggggcc

SEQ ID NO: 2483953 - RNA, 14 nt, Human
agagggaggggccu

SEQ ID NO: 2483954 - RNA, 22 nt, Human
agagggagggagggcuccagac

SEQ ID NO: 2483955 - RNA, 14 nt, Human
agaggugagggaag

SEQ ID NO: 2483956 - RNA, 16 nt, Human
agagggaggggccuag

SEQ ID NO: 2483957 - RNA, 18 nt, Human
agagggaggggccuaggc

SEQ ID NO: 2483958 - RNA, 16 nt, Human
agaggucuuuuuuaaa

SEQ ID NO: 2483959 - RNA, 20 nt, Human
agagggaggggccuaggccu

SEQ ID NO: 2483960 - RNA, 19 nt, Human
agaggucuuuuuuaaaagg

SEQ ID NO: 2483961 - RNA, 20 nt, Human
agagggagggagggcuccag

SEQ ID NO: 2483962 - RNA, 21 nt, Human
agagggagggagggcuccaga

SEQ ID NO: 2483963 - RNA, 12 nt, Human
agagggacagau

SEQ ID NO: 2483964 - RNA, 17 nt, Human
agagggaagagugcauu

SEQ ID NO: 2483965 - RNA, 15 nt, Human
agagggaccucuccc

SEQ ID NO: 2483966 - RNA, 16 nt, Human
agagggaccucuccca

SEQ ID NO: 2483967 - RNA, 19 nt, Human
agagggaccucucccaggg

SEQ ID NO: 2483968 - RNA, 19 nt, Human
agaggugggcagguggugg

SEQ ID NO: 2483969 - RNA, 17 nt, Human
agaggugggcagguggu

SEQ ID NO: 2483970 - RNA, 14 nt, Human
agaggugggcaggu

SEQ ID NO: 2483971 - RNA, 13 nt, Human
agaggugggcagg

SEQ ID NO: 2483972 - RNA, 21 nt, Human
agaggugggccagucugugga

SEQ ID NO: 2483973 - RNA, 13 nt, Human
agaggugggccag

SEQ ID NO: 2483974 - RNA, 17 nt, Human
ugaagauguagaggaga

SEQ ID NO: 2483975 - RNA, 22 nt, Human
agaggugccagcaacugaauaa

SEQ ID NO: 2483976 - RNA, 13 nt, Human
agagguggccaga

SEQ ID NO: 2483977 - RNA, 18 nt, Human
agagguggccagagcugg

SEQ ID NO: 2483978 - RNA, 12 nt, Human
agaggugggcag

SEQ ID NO: 2483979 - RNA, 21 nt, Human
agaggugccagcaacugaaua

SEQ ID NO: 2483980 - RNA, 20 nt, Human
agaggugccagcaacugaau

SEQ ID NO: 2483981 - RNA, 19 nt, Human
agaggugccagcaacugaa

SEQ ID NO: 2483982 - RNA, 18 nt, Human
agaggugccagcaacuga

SEQ ID NO: 2483983 - RNA, 16 nt, Human
agaggugccagcaacu

SEQ ID NO: 2483984 - RNA, 14 nt, Human
agaggugccagcaa

SEQ ID NO: 2483985 - RNA, 12 nt, Human
agaggugccagc

SEQ ID NO: 2483986 - RNA, 18 nt, Human
ugaagauguagaggagaa

SEQ ID NO: 2483987 - RNA, 18 nt, Human
ugaagauucuccugugcu

SEQ ID NO: 2483988 - RNA, 15 nt, Human
ugaagauucuccugu

SEQ ID NO: 2483989 - RNA, 16 nt, Human
ugaagaugucuaauag

SEQ ID NO: 2483990 - RNA, 19 nt, Human
ugaagcagcuuuaaacaaa

SEQ ID NO: 2483991 - RNA, 17 nt, Human
ugaagcagcuuuaaaca

SEQ ID NO: 2483992 - RNA, 20 nt, Human
ugaagcagccucuccccagg

SEQ ID NO: 2483993 - RNA, 15 nt, Human
ugaagcagccucucc

SEQ ID NO: 2483994 - RNA, 13 nt, Human
ugaagcagccucu

SEQ ID NO: 2483995 - RNA, 16 nt, Human
ugaagauucuuuccca

SEQ ID NO: 2483996 - RNA, 19 nt, Human
ugaagauucuccugugcua

SEQ ID NO: 2483997 - RNA, 19 nt, Human
ugaagcagaugcaaagagg

SEQ ID NO: 2483998 - RNA, 22 nt, Human
ugaagcagaugcaaagaggcaa

SEQ ID NO: 2483999 - RNA, 23 nt, Human
ugaagcagaugcaaagaggcaag

SEQ ID NO: 2484000 - RNA, 19 nt, Human
ugaagcaggagaaucacuu

SEQ ID NO: 2484001 - RNA, 19 nt, Human
ugaagcagguucccaagcu

SEQ ID NO: 2484002 - RNA, 17 nt, Human
ugaagcaguugugucag

SEQ ID NO: 2484003 - RNA, 14 nt, Human
ugaagcaguugugu

SEQ ID NO: 2484004 - RNA, 20 nt, Human
ugaagcagguucccaagcuc

SEQ ID NO: 2484005 - RNA, 20 nt, Human
ugaagcauguuucauguuuu

SEQ ID NO: 2484006 - RNA, 19 nt, Human
ugaagccacugaagcuggg

SEQ ID NO: 2484007 - RNA, 16 nt, Human
ugaagcauguuucaug

SEQ ID NO: 2484008 - RNA, 14 nt, Human
ugaagcauguuuca

SEQ ID NO: 2484009 - RNA, 16 nt, Human
ugaagccagccuucuu

SEQ ID NO: 2484010 - RNA, 16 nt, Human
ugaagcccaagugaaa

SEQ ID NO: 2484011 - RNA, 19 nt, Human
ugaagcccaauaaaccucu

SEQ ID NO: 2484012 - RNA, 16 nt, Human
ugaagcccuccaaaag

SEQ ID NO: 2484013 - RNA, 15 nt, Human
ugaagcccaauaaac

SEQ ID NO: 2484014 - RNA, 21 nt, Human
ugaagccagccuucuuccauc

SEQ ID NO: 2484015 - RNA, 14 nt, Human
ugaagccagccuuc

SEQ ID NO: 2484016 - RNA, 13 nt, Human
ugaagccagccuu

SEQ ID NO: 2484017 - RNA, 12 nt, Human
ugaagccagccu

SEQ ID NO: 2484018 - RNA, 19 nt, Human
ugaagcauguuucauguuu

SEQ ID NO: 2484019 - RNA, 20 nt, Human
ugaagccacugaagcuggga

SEQ ID NO: 2484020 - RNA, 16 nt, Human
ugaagcugccugcuuu

SEQ ID NO: 2484021 - RNA, 15 nt, Human
ugaagcugccugcuu

SEQ ID NO: 2484022 - RNA, 15 nt, Human
ugaagccuuagccag

SEQ ID NO: 2484023 - RNA, 22 nt, Human
ugaagcccuccaaaagcacuua

SEQ ID NO: 2484024 - RNA, 13 nt, Human
ugaagccugcccu

SEQ ID NO: 2484025 - RNA, 13 nt, Human
ugaagccucuggg

SEQ ID NO: 2484026 - RNA, 14 nt, Human
ugaagccucuggga

SEQ ID NO: 2484027 - RNA, 22 nt, Human
ugaagcucuggugacaccagcc

SEQ ID NO: 2484028 - RNA, 20 nt, Human
ugaggguugggcugguguca

SEQ ID NO: 2484029 - RNA, 22 nt, Human
ugagggugacuauggagcugag

SEQ ID NO: 2484030 - RNA, 12 nt, Human
ugagggucuucu

SEQ ID NO: 2484031 - RNA, 19 nt, Human
ugagggucuucuuacaugc

SEQ ID NO: 2484032 - RNA, 17 nt, Human
ugagguacugagaguga

SEQ ID NO: 2484033 - RNA, 19 nt, Human
ugaggguuucugagcugcu

SEQ ID NO: 2484034 - RNA, 14 nt, Human
ugaggguggagacu

SEQ ID NO: 2484035 - RNA, 18 nt, Human
ugaggguuucagagagcc

SEQ ID NO: 2484036 - RNA, 21 nt, Human
ugagggugcuuguucccucuc

SEQ ID NO: 2484037 - RNA, 22 nt, Human
ugagguacugagagugaacaaa

SEQ ID NO: 2484038 - RNA, 13 nt, Human
ugaggucagagcc

SEQ ID NO: 2484039 - RNA, 16 nt, Human
ugaggucagagccugc

SEQ ID NO: 2484040 - RNA, 14 nt, Human
ugaggucagagccu

SEQ ID NO: 2484041 - RNA, 19 nt, Human
agcagagaccaucccugaa

SEQ ID NO: 2484042 - RNA, 18 nt, Human
agcagagaccaucccuga

SEQ ID NO: 2484043 - RNA, 17 nt, Human
agcagagaccaucccug

SEQ ID NO: 2484044 - RNA, 17 nt, Human
ugaggucagagccugca

SEQ ID NO: 2484045 - RNA, 20 nt, Human
agcagagaccaucccugaag

SEQ ID NO: 2484046 - RNA, 19 nt, Human
ugagguacaaccuguucug

SEQ ID NO: 2484047 - RNA, 20 nt, Human
ugaggucaaguaagaagaca

SEQ ID NO: 2484048 - RNA, 20 nt, Human
agcagagcaccuuagacagu

SEQ ID NO: 2484049 - RNA, 20 nt, Human
agcagagcaagucugcaggu

SEQ ID NO: 2484050 - RNA, 19 nt, Human
agcagagcaagucugcagg

SEQ ID NO: 2484051 - RNA, 18 nt, Human
agcagagcaagucugcag

SEQ ID NO: 2484052 - RNA, 17 nt, Human
agcagagcaagucugca

SEQ ID NO: 2484053 - RNA, 14 nt, Human
agcagagcaggggc

SEQ ID NO: 2484054 - RNA, 15 nt, Human
agcagagcaggggca

SEQ ID NO: 2484055 - RNA, 14 nt, Human
agcagaggggcuga

SEQ ID NO: 2484056 - RNA, 23 nt, Human
agcagagguggccagagcuggga

SEQ ID NO: 2484057 - RNA, 13 nt, Human
agcagaggcagcg

SEQ ID NO: 2484058 - RNA, 18 nt, Human
agcagagggacuuuguau

SEQ ID NO: 2484059 - RNA, 18 nt, Human
agcagauaccucacccug

SEQ ID NO: 2484060 - RNA, 22 nt, Human
agcagauacauaugagugugga

SEQ ID NO: 2484061 - RNA, 20 nt, Human
agcagauacauaugagugug

SEQ ID NO: 2484062 - RNA, 19 nt, Human
agcagauaccucacccugc

SEQ ID NO: 2484063 - RNA, 16 nt, Human
agcagaucccagcuca

SEQ ID NO: 2484064 - RNA, 17 nt, Human
agcagaugcaaagaggc

SEQ ID NO: 2484065 - RNA, 18 nt, Human
agcagaugcaaagaggca

SEQ ID NO: 2484066 - RNA, 19 nt, Human
agcagaugcaaagaggcaa

SEQ ID NO: 2484067 - RNA, 20 nt, Human
agcagaugcaaagaggcaag

SEQ ID NO: 2484068 - RNA, 13 nt, Human
agcagaugcaaag

SEQ ID NO: 2484069 - RNA, 14 nt, Human
agcagaugcaaaga

SEQ ID NO: 2484070 - RNA, 17 nt, Human
agcagaugaccccuccc

SEQ ID NO: 2484071 - RNA, 15 nt, Human
agcagagcucugccg

SEQ ID NO: 2484072 - RNA, 17 nt, Human
agcagaggaaggagagg

SEQ ID NO: 2484073 - RNA, 16 nt, Human
agcagagcuuccucag

SEQ ID NO: 2484074 - RNA, 12 nt, Human
agcagaggaggg

SEQ ID NO: 2484075 - RNA, 15 nt, Human
agcagaggaggggcc

SEQ ID NO: 2484076 - RNA, 17 nt, Human
agcagaggcacuggggg

SEQ ID NO: 2484077 - RNA, 15 nt, Human
agcagaggcacuggg

SEQ ID NO: 2484078 - RNA, 14 nt, Human
agcagaggcacugg

SEQ ID NO: 2484079 - RNA, 22 nt, Human
agcagaggaggggccgcugcca

SEQ ID NO: 2484080 - RNA, 19 nt, Human
agcagaggaggggccgcug

SEQ ID NO: 2484081 - RNA, 21 nt, Human
agcagaggaggggccgcugcc

SEQ ID NO: 2484082 - RNA, 13 nt, Human
agcagaggcacug

SEQ ID NO: 2484083 - RNA, 17 nt, Human
agcagauuuuaggaaau

SEQ ID NO: 2484084 - RNA, 20 nt, Human
agcagauuuuaggaaaugaa

SEQ ID NO: 2484085 - RNA, 22 nt, Human
agcagauuuuaauuuugaauaa

SEQ ID NO: 2484086 - RNA, 21 nt, Human
agcagauuuuaauuuugaaua

SEQ ID NO: 2484087 - RNA, 13 nt, Human
agcagauuuuaau

SEQ ID NO: 2484088 - RNA, 14 nt, Human
agcagaugcugguc

SEQ ID NO: 2484089 - RNA, 18 nt, Human
agcagauuuaacaauucc

SEQ ID NO: 2484090 - RNA, 13 nt, Human
agcagaugcuggu

SEQ ID NO: 2484091 - RNA, 21 nt, Human
agcagaugcagagagccauuu

SEQ ID NO: 2484092 - RNA, 20 nt, Human
agcagauuggagaaacccuu

SEQ ID NO: 2484093 - RNA, 21 nt, Human
agcagauggaaugcuguguua

SEQ ID NO: 2484094 - RNA, 19 nt, Human
agcagauggagaccccuug

SEQ ID NO: 2484095 - RNA, 18 nt, Human
agcagaugcagagagcca

SEQ ID NO: 2484096 - RNA, 17 nt, Human
agcagaugcagagagcc

SEQ ID NO: 2484097 - RNA, 16 nt, Human
agcagaugcagagagc

SEQ ID NO: 2484098 - RNA, 13 nt, Human
agcagaugcagag

SEQ ID NO: 2484099 - RNA, 12 nt, Human
agcagaugcaga

SEQ ID NO: 2484100 - RNA, 21 nt, Human
agcagaugcaaagaggcaaga

SEQ ID NO: 2484101 - RNA, 19 nt, Human
agcagaugcaaugacucag

SEQ ID NO: 2484102 - RNA, 24 nt, Human
ugaggcccuucucuccagccccug

SEQ ID NO: 2484103 - RNA, 23 nt, Human
ugaggcccuucucuccagccccu

SEQ ID NO: 2484104 - RNA, 22 nt, Human
ugaggcccuucucuccagcccc

SEQ ID NO: 2484105 - RNA, 20 nt, Human
ugaggcccuucucuccagcc

SEQ ID NO: 2484106 - RNA, 19 nt, Human
ugaggcccuucucuccagc

SEQ ID NO: 2484107 - RNA, 18 nt, Human
ugaggcccuucucuccag

SEQ ID NO: 2484108 - RNA, 21 nt, Human
ugaggccccuucuagguggca

SEQ ID NO: 2484109 - RNA, 16 nt, Human
ugaggcccuucucucc

SEQ ID NO: 2484110 - RNA, 22 nt, Human
ugaggccgcuagaggccugagg

SEQ ID NO: 2484111 - RNA, 20 nt, Human
ugaggccgcuagaggccuga

SEQ ID NO: 2484112 - RNA, 19 nt, Human
ugaggccgcuagaggccug

SEQ ID NO: 2484113 - RNA, 18 nt, Human
ugaggccgcuagaggccu

SEQ ID NO: 2484114 - RNA, 17 nt, Human
ugaggccgcuagaggcc

SEQ ID NO: 2484115 - RNA, 16 nt, Human
ugaggccgcuagaggc

SEQ ID NO: 2484116 - RNA, 23 nt, Human
ugaggccgcuagaggccugagga

SEQ ID NO: 2484117 - RNA, 19 nt, Human
ugaggccuaaaaguaaaca

SEQ ID NO: 2484118 - RNA, 18 nt, Human
ugagggaggaggccaccu

SEQ ID NO: 2484119 - RNA, 14 nt, Human
ugagggaggaggcc

SEQ ID NO: 2484120 - RNA, 13 nt, Human
ugagggaggaggc

SEQ ID NO: 2484121 - RNA, 18 nt, Human
ugaggccugcccucaggg

SEQ ID NO: 2484122 - RNA, 17 nt, Human
ugaggccugcccucagg

SEQ ID NO: 2484123 - RNA, 21 nt, Human
ugaggccucuuggaccucugc

SEQ ID NO: 2484124 - RNA, 15 nt, Human
ugaggccucuuggac

SEQ ID NO: 2484125 - RNA, 14 nt, Human
ugaggccucuugga

SEQ ID NO: 2484126 - RNA, 23 nt, Human
ugaggccucuuggaccucugcuc

SEQ ID NO: 2484127 - RNA, 15 nt, Human
ugaggccucagugga

SEQ ID NO: 2484128 - RNA, 22 nt, Human
ugaggccuccagcuucaggcag

SEQ ID NO: 2484129 - RNA, 19 nt, Human
ugaggccucaguggacuuu

SEQ ID NO: 2484130 - RNA, 15 nt, Human
ugagggauuaucuuu

SEQ ID NO: 2484131 - RNA, 19 nt, Human
ugagggauacccaucccau

SEQ ID NO: 2484132 - RNA, 20 nt, Human
ugagggaggaggccaccucu

SEQ ID NO: 2484133 - RNA, 19 nt, Human
ugagggaggaggccaccuc

SEQ ID NO: 2484134 - RNA, 23 nt, Human
ugagggaggaggccaccucucca

SEQ ID NO: 2484135 - RNA, 17 nt, Human
ugagggaucacagggcc

SEQ ID NO: 2484136 - RNA, 18 nt, Human
ugagggaucacagggccc

SEQ ID NO: 2484137 - RNA, 11 nt, Human
ugagggcaguc

SEQ ID NO: 2484138 - RNA, 16 nt, Human
ugagggcccagagcag

SEQ ID NO: 2484139 - RNA, 15 nt, Human
ugagggcccagagca

SEQ ID NO: 2484140 - RNA, 14 nt, Human
ugagggcccagagc

SEQ ID NO: 2484141 - RNA, 13 nt, Human
ugagggcccagag

SEQ ID NO: 2484142 - RNA, 21 nt, Human
ugagggcaucuugguccagga

SEQ ID NO: 2484143 - RNA, 12 nt, Human
ugagggcccaga

SEQ ID NO: 2484144 - RNA, 18 nt, Human
ugagggccaagaaagagu

SEQ ID NO: 2484145 - RNA, 16 nt, Human
ugagggccccucugcc

SEQ ID NO: 2484146 - RNA, 15 nt, Human
ugagggccccucugc

SEQ ID NO: 2484147 - RNA, 14 nt, Human
ugagggccccucug

SEQ ID NO: 2484148 - RNA, 21 nt, Human
ugagggcccagagcaggaagc

SEQ ID NO: 2484149 - RNA, 20 nt, Human
ugagggcccagagcaggaag

SEQ ID NO: 2484150 - RNA, 19 nt, Human
ugagggcccagagcaggaa

SEQ ID NO: 2484151 - RNA, 18 nt, Human
ugagggcccagagcagga

SEQ ID NO: 2484152 - RNA, 17 nt, Human
ugagggcccagagcagg

SEQ ID NO: 2484153 - RNA, 19 nt, Human
ugagggccccucugcccag

SEQ ID NO: 2484154 - RNA, 17 nt, Human
ugagggccccucugccc

SEQ ID NO: 2484155 - RNA, 21 nt, Human
ugagggccccucugcccagcu

SEQ ID NO: 2484156 - RNA, 17 nt, Human
ugagggcgaggggaggg

SEQ ID NO: 2484157 - RNA, 21 nt, Human
ugaggggaggaucacuggagc

SEQ ID NO: 2484158 - RNA, 22 nt, Human
ugaggggaggaucacuggagcc

SEQ ID NO: 2484159 - RNA, 12 nt, Human
ugaggggccucu

SEQ ID NO: 2484160 - RNA, 16 nt, Human
ugaggggcccgagcag

SEQ ID NO: 2484161 - RNA, 22 nt, Human
ugaggggcaucugccccucccc

SEQ ID NO: 2484162 - RNA, 15 nt, Human
ugaggggaggggggc

SEQ ID NO: 2484163 - RNA, 21 nt, Human
ugaggggaggaaacucaccug

SEQ ID NO: 2484164 - RNA, 17 nt, Human
ugaggggcaucugcccc

SEQ ID NO: 2484165 - RNA, 23 nt, Human
ugaggguaaccccaaaccuccaa

SEQ ID NO: 2484166 - RNA, 22 nt, Human
ugaggguaauaaacuuagaaua

SEQ ID NO: 2484167 - RNA, 21 nt, Human
ugaggguaauaaacuuagaau

SEQ ID NO: 2484168 - RNA, 18 nt, Human
ugaggguaauaaacuuag

SEQ ID NO: 2484169 - RNA, 19 nt, Human
ugaggguccccaccuggga

SEQ ID NO: 2484170 - RNA, 15 nt, Human
ugaggguccccaccu

SEQ ID NO: 2484171 - RNA, 18 nt, Human
ugaggguaucaaauaaaa

SEQ ID NO: 2484172 - RNA, 22 nt, Human
ugagggucagagaggagucaga

SEQ ID NO: 2484173 - RNA, 13 nt, Human
ugaggggccucuu

SEQ ID NO: 2484174 - RNA, 14 nt, Human
ugaggggcuccugg

SEQ ID NO: 2484175 - RNA, 22 nt, Human
ugaggggggccgugcccagggg

SEQ ID NO: 2484176 - RNA, 20 nt, Human
ugaggggggccgugcccagg

SEQ ID NO: 2484177 - RNA, 22 nt, Human
ugagggggaauagucuagaugg

SEQ ID NO: 2484178 - RNA, 22 nt, Human
ugaggggcuggccuuccugccc

SEQ ID NO: 2484179 - RNA, 14 nt, Human
ugaggggcuggccu

SEQ ID NO: 2484180 - RNA, 15 nt, Human
ugaggggcuccugga

SEQ ID NO: 2484181 - RNA, 18 nt, Human
ugagggguaaaagcugau

SEQ ID NO: 2484182 - RNA, 14 nt, Human
ugaggggucccuga

SEQ ID NO: 2484183 - RNA, 20 nt, Human
ugaggggucuccaggaggag

SEQ ID NO: 2484184 - RNA, 19 nt, Human
ugaggaauguauauguuuu

SEQ ID NO: 2484185 - RNA, 17 nt, Human
ugaggaauguauauguu

SEQ ID NO: 2484186 - RNA, 15 nt, Human
ugaggaauuucaccu

SEQ ID NO: 2484187 - RNA, 21 nt, Human
ugaggaauuucaccuguaaac

SEQ ID NO: 2484188 - RNA, 22 nt, Human
ugaggaauuucaccuguaaacc

SEQ ID NO: 2484189 - RNA, 13 nt, Human
ugaggaauuuucu

SEQ ID NO: 2484190 - RNA, 14 nt, Human
ugaggaauuuucuu

SEQ ID NO: 2484191 - RNA, 18 nt, Human
ugaggaauuuucuuugug

SEQ ID NO: 2484192 - RNA, 19 nt, Human
ugaggacaaccauuccaga

SEQ ID NO: 2484193 - RNA, 20 nt, Human
ugaggacaaccauuccagac

SEQ ID NO: 2484194 - RNA, 16 nt, Human
ugaggaaugaugaagc

SEQ ID NO: 2484195 - RNA, 20 nt, Human
ugaggaauaguugagcccca

SEQ ID NO: 2484196 - RNA, 22 nt, Human
ugaggaauccagacccggcugc

SEQ ID NO: 2484197 - RNA, 21 nt, Human
ugaggaauccagacccggcug

SEQ ID NO: 2484198 - RNA, 15 nt, Human
ugaggacagcugucc

SEQ ID NO: 2484199 - RNA, 14 nt, Human
ugaggacagcuguc

SEQ ID NO: 2484200 - RNA, 13 nt, Human
ugaggacagcugu

SEQ ID NO: 2484201 - RNA, 15 nt, Human
ugaggacacugauau

SEQ ID NO: 2484202 - RNA, 21 nt, Human
ugaggacacuaaccacgcugg

SEQ ID NO: 2484203 - RNA, 22 nt, Human
ugaggccacugcugcuucucca

SEQ ID NO: 2484204 - RNA, 20 nt, Human
ugaggccacacucagcacaa

SEQ ID NO: 2484205 - RNA, 23 nt, Human
ugaggccacacucagcacaaggc

SEQ ID NO: 2484206 - RNA, 12 nt, Human
ugaggccagaga

SEQ ID NO: 2484207 - RNA, 17 nt, Human
ugaggacagcuguccuc

SEQ ID NO: 2484208 - RNA, 16 nt, Human
ugaggacagcuguccu

SEQ ID NO: 2484209 - RNA, 18 nt, Human
ugaggacagcuguccucu

SEQ ID NO: 2484210 - RNA, 23 nt, Human
ugaggcauuuguuugaacugaua

SEQ ID NO: 2484211 - RNA, 13 nt, Human
ugaggccacacuc

SEQ ID NO: 2484212 - RNA, 19 nt, Human
ugaggccacacucagcaca

SEQ ID NO: 2484213 - RNA, 12 nt, Human
ugaggccacacu

SEQ ID NO: 2484214 - RNA, 22 nt, Human
ugaggccaaacguuuugaacua

SEQ ID NO: 2484215 - RNA, 16 nt, Human
ugaggccagagacaca

SEQ ID NO: 2484216 - RNA, 14 nt, Human
ugaggccagagaca

SEQ ID NO: 2484217 - RNA, 20 nt, Human
ugaggccagagacacaagcc

SEQ ID NO: 2484218 - RNA, 13 nt, Human
ugaggcccagagg

SEQ ID NO: 2484219 - RNA, 12 nt, Human
ugaggcccagag

SEQ ID NO: 2484220 - RNA, 13 nt, Human
ugaggccagggca

SEQ ID NO: 2484221 - RNA, 14 nt, Human
ugaggccagggcag

SEQ ID NO: 2484222 - RNA, 15 nt, Human
ugaggccagggcaga

SEQ ID NO: 2484223 - RNA, 16 nt, Human
ugaggccagggcagag

SEQ ID NO: 2484224 - RNA, 12 nt, Human
ugaggccaggag

SEQ ID NO: 2484225 - RNA, 13 nt, Human
ugaggccaggagu

SEQ ID NO: 2484226 - RNA, 20 nt, Human
ugaggcccagagggccugca

SEQ ID NO: 2484227 - RNA, 18 nt, Human
ugaggcccagagggccug

SEQ ID NO: 2484228 - RNA, 17 nt, Human
ugaggcccagagggccu

SEQ ID NO: 2484229 - RNA, 15 nt, Human
ugaggcccagagggc

SEQ ID NO: 2484230 - RNA, 22 nt, Human
ugaggcccagagggccugcaag

SEQ ID NO: 2484231 - RNA, 21 nt, Human
ugaggcccagagggccugcaa

SEQ ID NO: 2484232 - RNA, 23 nt, Human
ugaggcccagagggccugcaagg

SEQ ID NO: 2484233 - RNA, 13 nt, Human
ugaggcccaggga

SEQ ID NO: 2484234 - RNA, 14 nt, Human
ugaggcccagggag

SEQ ID NO: 2484235 - RNA, 17 nt, Human
ugaggcccagggagagg

SEQ ID NO: 2484236 - RNA, 20 nt, Human
ugaggcccagggagaggcca

SEQ ID NO: 2484237 - RNA, 23 nt, Human
ugaggcccagggagaggccauga

SEQ ID NO: 2484238 - RNA, 18 nt, Human
ugaggaagccgcuggggc

SEQ ID NO: 2484239 - RNA, 17 nt, Human
ugaggaagccgcugggg

SEQ ID NO: 2484240 - RNA, 14 nt, Human
ugaggaagccgcug

SEQ ID NO: 2484241 - RNA, 22 nt, Human
ugaggaagcaaaagcaucuaug

SEQ ID NO: 2484242 - RNA, 21 nt, Human
ugaggaagccgcuggggccag

SEQ ID NO: 2484243 - RNA, 19 nt, Human
ugaggaagccgcuggggcc

SEQ ID NO: 2484244 - RNA, 17 nt, Human
ugaggaagagggacugu

SEQ ID NO: 2484245 - RNA, 23 nt, Human
ugaggaagaugggggcaagaaga

SEQ ID NO: 2484246 - RNA, 23 nt, Human
ugaggaagccagguccacggucu

SEQ ID NO: 2484247 - RNA, 17 nt, Human
ugaggaagcgugaaggc

SEQ ID NO: 2484248 - RNA, 19 nt, Human
ugaggaauaguugagcccc

SEQ ID NO: 2484249 - RNA, 19 nt, Human
ugaggaauaauuauuuauu

SEQ ID NO: 2484250 - RNA, 17 nt, Human
ugaggaauaauuauuua

SEQ ID NO: 2484251 - RNA, 20 nt, Human
ugaggaaggcaggaagagag

SEQ ID NO: 2484252 - RNA, 19 nt, Human
ugaggaaggcaggaagaga

SEQ ID NO: 2484253 - RNA, 22 nt, Human
ugaggaagcgugaaggccgaga

SEQ ID NO: 2484254 - RNA, 24 nt, Human
ugaggaagaacggggcucuucuca

SEQ ID NO: 2484255 - RNA, 23 nt, Human
ugaggaagaacggggcucuucuc

SEQ ID NO: 2484256 - RNA, 19 nt, Human
ugaggaagaacggggcucu

SEQ ID NO: 2484257 - RNA, 17 nt, Human
ugaggaagaacggggcu

SEQ ID NO: 2484258 - RNA, 15 nt, Human
ugaggaagcaaaagc

SEQ ID NO: 2484259 - RNA, 22 nt, Human
ugaggaaagucauuggcuuuau

SEQ ID NO: 2484260 - RNA, 21 nt, Human
ugaggaaagucauuggcuuua

SEQ ID NO: 2484261 - RNA, 19 nt, Human
ugaggaaaggccagcuggc

SEQ ID NO: 2484262 - RNA, 19 nt, Human
ugaggaaagucauuggcuu

SEQ ID NO: 2484263 - RNA, 18 nt, Human
ugaggaaagucauuggcu

SEQ ID NO: 2484264 - RNA, 17 nt, Human
ugaggaaagucauuggc

SEQ ID NO: 2484265 - RNA, 15 nt, Human
ugaggaaagucauug

SEQ ID NO: 2484266 - RNA, 19 nt, Human
ugaggaaagcauguauuca

SEQ ID NO: 2484267 - RNA, 15 nt, Human
ugaggaaaggccagc

SEQ ID NO: 2484268 - RNA, 16 nt, Human
ugagcuuggccagaag

SEQ ID NO: 2484269 - RNA, 16 nt, Human
ugaggaaaggccagcu

SEQ ID NO: 2484270 - RNA, 18 nt, Human
ugaggaaaggccagcugg

SEQ ID NO: 2484271 - RNA, 13 nt, Human
ugagcuuuucuag

SEQ ID NO: 2484272 - RNA, 17 nt, Human
ugagcuuugcugcuaca

SEQ ID NO: 2484273 - RNA, 16 nt, Human
ugagcuuugcugcuac

SEQ ID NO: 2484274 - RNA, 15 nt, Human
ugagcuuugcugcua

SEQ ID NO: 2484275 - RNA, 12 nt, Human
ugagcuuuucua

SEQ ID NO: 2484276 - RNA, 23 nt, Human
ugaggaaaaaaaucguccaggga

SEQ ID NO: 2484277 - RNA, 16 nt, Human
ugaggaaacaacagcu

SEQ ID NO: 2484278 - RNA, 13 nt, Human
ugagcuacaaaug

SEQ ID NO: 2484279 - RNA, 14 nt, Human
ugagcuacaaaugc

SEQ ID NO: 2484280 - RNA, 22 nt, Human
ugagcgcuccugccgcagagcu

SEQ ID NO: 2484281 - RNA, 18 nt, Human
ugagcgcuccugccgcag

SEQ ID NO: 2484282 - RNA, 20 nt, Human
ugagcgccuccauccaaggc

SEQ ID NO: 2484283 - RNA, 14 nt, Human
ugagcgcuccugcc

SEQ ID NO: 2484284 - RNA, 23 nt, Human
ugagcgccuccauccaaggccag

SEQ ID NO: 2484285 - RNA, 18 nt, Human
ugagcgccuccauccaag

SEQ ID NO: 2484286 - RNA, 12 nt, Human
ugagcgccagga

SEQ ID NO: 2484287 - RNA, 23 nt, Human
ugagcgauuauuaucuaaagugu

SEQ ID NO: 2484288 - RNA, 17 nt, Human
ugagcgaggacauucuc

SEQ ID NO: 2484289 - RNA, 22 nt, Human
ugagcgaggagaugcuccuugg

SEQ ID NO: 2484290 - RNA, 23 nt, Human
ugagcgaggagaugcuccuuggg

SEQ ID NO: 2484291 - RNA, 16 nt, Human
ugagccuuuucccucu

SEQ ID NO: 2484292 - RNA, 13 nt, Human
ugagccuuguaau

SEQ ID NO: 2484293 - RNA, 17 nt, Human
ugagcgacaaagaugau

SEQ ID NO: 2484294 - RNA, 16 nt, Human
ugagcgacaaagauga

SEQ ID NO: 2484295 - RNA, 14 nt, Human
ugagcuuugcugcu

SEQ ID NO: 2484296 - RNA, 23 nt, Human
ugagcuuugcauguuccacuaac

SEQ ID NO: 2484297 - RNA, 22 nt, Human
ugagcuuugcauguuccacuaa

SEQ ID NO: 2484298 - RNA, 22 nt, Human
ugagcuuuccauguugcugcca

SEQ ID NO: 2484299 - RNA, 21 nt, Human
ugagcuuuccauguugcugcc

SEQ ID NO: 2484300 - RNA, 20 nt, Human
ugagcuuuccauguugcugc

SEQ ID NO: 2484301 - RNA, 19 nt, Human
ugagcuuuccauguugcug

SEQ ID NO: 2484302 - RNA, 14 nt, Human
ugagcuaggaauug

SEQ ID NO: 2484303 - RNA, 19 nt, Human
ugagcuuggccagaagggg

SEQ ID NO: 2484304 - RNA, 12 nt, Human
ugagcuuuaaaa

SEQ ID NO: 2484305 - RNA, 21 nt, Human
ugagcuuggccagaagggggc

SEQ ID NO: 2484306 - RNA, 18 nt, Human
ugagcuuuccauguugcu

SEQ ID NO: 2484307 - RNA, 22 nt, Human
ugagcuuuauguaauaauguga

SEQ ID NO: 2484308 - RNA, 16 nt, Human
ugagcuacaaaugcau

SEQ ID NO: 2484309 - RNA, 22 nt, Human
ugagcuagaagcuggaggacua

SEQ ID NO: 2484310 - RNA, 19 nt, Human
ugagcuagaagcuggagga

SEQ ID NO: 2484311 - RNA, 20 nt, Human
ugagcggugcuguccucagg

SEQ ID NO: 2484312 - RNA, 18 nt, Human
ugagcuacgccugccucc

SEQ ID NO: 2484313 - RNA, 21 nt, Human
ugagcggugcuguccucaggu

SEQ ID NO: 2484314 - RNA, 24 nt, Human
agcaagugagagagaugggagcuc

SEQ ID NO: 2484315 - RNA, 18 nt, Human
agcaagugagagagaugg

SEQ ID NO: 2484316 - RNA, 17 nt, Human
agcaagugagagagaug

SEQ ID NO: 2484317 - RNA, 23 nt, Human
ugagccaguucaguaccuggagg

SEQ ID NO: 2484318 - RNA, 15 nt, Human
ugagcccacaaagcc

SEQ ID NO: 2484319 - RNA, 22 nt, Human
ugagccaguucaguaccuggag

SEQ ID NO: 2484320 - RNA, 18 nt, Human
ugagccagucccaggggc

SEQ ID NO: 2484321 - RNA, 13 nt, Human
agcaagugagagc

SEQ ID NO: 2484322 - RNA, 19 nt, Human
ugagccagucccaggggca

SEQ ID NO: 2484323 - RNA, 17 nt, Human
ugagccagucccagggg

SEQ ID NO: 2484324 - RNA, 16 nt, Human
ugagccagucccaggg

SEQ ID NO: 2484325 - RNA, 14 nt, Human
ugagccagucccag

SEQ ID NO: 2484326 - RNA, 13 nt, Human
ugagccaguccca

SEQ ID NO: 2484327 - RNA, 21 nt, Human
ugagccagguaaugagggacu

SEQ ID NO: 2484328 - RNA, 20 nt, Human
agcaagugagacccugucuc

SEQ ID NO: 2484329 - RNA, 22 nt, Human
ugagccagauuucacucuccuu

SEQ ID NO: 2484330 - RNA, 17 nt, Human
ugagccagauuucacuc

SEQ ID NO: 2484331 - RNA, 20 nt, Human
ugagccagguaaugagggac

SEQ ID NO: 2484332 - RNA, 18 nt, Human
ugagccaggccugggucu

SEQ ID NO: 2484333 - RNA, 18 nt, Human
ugagccagcagacauugu

SEQ ID NO: 2484334 - RNA, 17 nt, Human
ugagccagcagacauug

SEQ ID NO: 2484335 - RNA, 23 nt, Human
ugagccagcagacauugucagca

SEQ ID NO: 2484336 - RNA, 14 nt, Human
ugagccaggccugg

SEQ ID NO: 2484337 - RNA, 16 nt, Human
ugagccagcagacauu

SEQ ID NO: 2484338 - RNA, 13 nt, Human
ugagccagcagac

SEQ ID NO: 2484339 - RNA, 12 nt, Human
ugagccaccacg

SEQ ID NO: 2484340 - RNA, 14 nt, Human
ugagccagacaaau

SEQ ID NO: 2484341 - RNA, 20 nt, Human
ugagccagacaaauggagga

SEQ ID NO: 2484342 - RNA, 14 nt, Human
agcaagugagagcu

SEQ ID NO: 2484343 - RNA, 18 nt, Human
agcaagugagagcugggu

SEQ ID NO: 2484344 - RNA, 21 nt, Human
agcaagugauugggacagagg

SEQ ID NO: 2484345 - RNA, 16 nt, Human
agcaaguuacagugau

SEQ ID NO: 2484346 - RNA, 22 nt, Human
agcaagugagagcuggguguca

SEQ ID NO: 2484347 - RNA, 14 nt, Human
agcaauaaagaaga

SEQ ID NO: 2484348 - RNA, 23 nt, Human
agcaaguucuagagaagaggcug

SEQ ID NO: 2484349 - RNA, 21 nt, Human
agcaaguucuagagaagaggc

SEQ ID NO: 2484350 - RNA, 20 nt, Human
agcaaguucuagagaagagg

SEQ ID NO: 2484351 - RNA, 17 nt, Human
agcaaguucuagagaag

SEQ ID NO: 2484352 - RNA, 24 nt, Human
agcacagcaaggaggcuggcuggg

SEQ ID NO: 2484353 - RNA, 23 nt, Human
agcacagcaaggaggcuggcugg

SEQ ID NO: 2484354 - RNA, 22 nt, Human
agcacagcaaggaggcuggcug

SEQ ID NO: 2484355 - RNA, 19 nt, Human
agcacagcaaggaggcugg

SEQ ID NO: 2484356 - RNA, 10 nt, Human
agcacagcag

SEQ ID NO: 2484357 - RNA, 12 nt, Human
agcacagcagcc

SEQ ID NO: 2484358 - RNA, 23 nt, Human
agcacagcagccuggggcuggcc

SEQ ID NO: 2484359 - RNA, 12 nt, Human
agcacagccaac

SEQ ID NO: 2484360 - RNA, 13 nt, Human
agcacagccaaca

SEQ ID NO: 2484361 - RNA, 23 nt, Human
agcacagccaacacgcaccugcc

SEQ ID NO: 2484362 - RNA, 13 nt, Human
agcacagcagccu

SEQ ID NO: 2484363 - RNA, 15 nt, Human
agcacagcagccugg

SEQ ID NO: 2484364 - RNA, 21 nt, Human
agcacagcagccccugcacaa

SEQ ID NO: 2484365 - RNA, 22 nt, Human
agcacagcccucccgccccuuc

SEQ ID NO: 2484366 - RNA, 21 nt, Human
agcacagcccucccgccccuu

SEQ ID NO: 2484367 - RNA, 16 nt, Human
agcacagcccucccgc

SEQ ID NO: 2484368 - RNA, 15 nt, Human
agcacagcccucccg

SEQ ID NO: 2484369 - RNA, 14 nt, Human
agcacagcccuccc

SEQ ID NO: 2484370 - RNA, 13 nt, Human
agcacagcccucc

SEQ ID NO: 2484371 - RNA, 12 nt, Human
agcacagcccuc

SEQ ID NO: 2484372 - RNA, 10 nt, Human
agcacagccc

SEQ ID NO: 2484373 - RNA, 22 nt, Human
agcacagccucuuagaugcagu

SEQ ID NO: 2484374 - RNA, 12 nt, Human
agcacagccuag

SEQ ID NO: 2484375 - RNA, 16 nt, Human
agcacagcuucauuuc

SEQ ID NO: 2484376 - RNA, 18 nt, Human
agcacaguguuaaaugaa

SEQ ID NO: 2484377 - RNA, 16 nt, Human
agcacaguguuaaaug

SEQ ID NO: 2484378 - RNA, 23 nt, Human
agcacagugguggcagggccuag

SEQ ID NO: 2484379 - RNA, 20 nt, Human
agcacagugguggcagggcc

SEQ ID NO: 2484380 - RNA, 19 nt, Human
agcacagugguggcagggc

SEQ ID NO: 2484381 - RNA, 18 nt, Human
agcacagugguggcaggg

SEQ ID NO: 2484382 - RNA, 17 nt, Human
agcacagugguggcagg

SEQ ID NO: 2484383 - RNA, 16 nt, Human
agcacagugguggcag

SEQ ID NO: 2484384 - RNA, 14 nt, Human
agcacaguuugaac

SEQ ID NO: 2484385 - RNA, 12 nt, Human
agcacaguuuga

SEQ ID NO: 2484386 - RNA, 22 nt, Human
agcacaguguuaaaugaaauug

SEQ ID NO: 2484387 - RNA, 19 nt, Human
agcacaguguuaaaugaaa

SEQ ID NO: 2484388 - RNA, 17 nt, Human
agcacaguuugaacaaa

SEQ ID NO: 2484389 - RNA, 19 nt, Human
agcacaggugggcuuccca

SEQ ID NO: 2484390 - RNA, 21 nt, Human
agcacaggugggcuucccagu

SEQ ID NO: 2484391 - RNA, 19 nt, Human
agcacagucugaugacaca

SEQ ID NO: 2484392 - RNA, 14 nt, Human
agcacagugccugc

SEQ ID NO: 2484393 - RNA, 15 nt, Human
agcacagugguggca

SEQ ID NO: 2484394 - RNA, 15 nt, Human
agcacagugccugca

SEQ ID NO: 2484395 - RNA, 13 nt, Human
agcacaugccucu

SEQ ID NO: 2484396 - RNA, 15 nt, Human
agcacaucugcauuu

SEQ ID NO: 2484397 - RNA, 16 nt, Human
agcacaucugcauuuu

SEQ ID NO: 2484398 - RNA, 14 nt, Human
agcacaugccucuc

SEQ ID NO: 2484399 - RNA, 22 nt, Human
agcaccaaaagcuuaccaaggg

SEQ ID NO: 2484400 - RNA, 18 nt, Human
agcaccaaaauaagaaaa

SEQ ID NO: 2484401 - RNA, 19 nt, Human
agcaccaaaauaagaaaag

SEQ ID NO: 2484402 - RNA, 20 nt, Human
agcaccaaaauaagaaaaga

SEQ ID NO: 2484403 - RNA, 21 nt, Human
agcaccaaaauaagaaaagau

SEQ ID NO: 2484404 - RNA, 16 nt, Human
agcaccaaaauaagaa

SEQ ID NO: 2484405 - RNA, 17 nt, Human
agcaccaaaauaagaaa

SEQ ID NO: 2484406 - RNA, 23 nt, Human
agcacaugaaaccuuauuuuuuc

SEQ ID NO: 2484407 - RNA, 23 nt, Human
agcacaucugcauuuucacccca

SEQ ID NO: 2484408 - RNA, 16 nt, Human
agcaccaaucaugaau

SEQ ID NO: 2484409 - RNA, 12 nt, Human
agcaccacccua

SEQ ID NO: 2484410 - RNA, 16 nt, Human
ugagccagauuucacu

SEQ ID NO: 2484411 - RNA, 14 nt, Human
ugagccagauuuca

SEQ ID NO: 2484412 - RNA, 13 nt, Human
ugagccagauuuc

SEQ ID NO: 2484413 - RNA, 23 nt, Human
ugagccacugcaccgggccacag

SEQ ID NO: 2484414 - RNA, 18 nt, Human
ugagccaccgugccuggc

SEQ ID NO: 2484415 - RNA, 19 nt, Human
ugagccaccgugccuggcc

SEQ ID NO: 2484416 - RNA, 20 nt, Human
ugagccaccgugccuggcca

SEQ ID NO: 2484417 - RNA, 21 nt, Human
ugagccaccgugccuggccac

SEQ ID NO: 2484418 - RNA, 18 nt, Human
ugagccacugcaccgggc

SEQ ID NO: 2484419 - RNA, 21 nt, Human
ugagccacugcaccgggccac

SEQ ID NO: 2484420 - RNA, 24 nt, Human
ugagcaucaggccaggcccucugc

SEQ ID NO: 2484421 - RNA, 22 nt, Human
ugagcaucaggccaggcccucu

SEQ ID NO: 2484422 - RNA, 15 nt, Human
ugagccaccacgccc

SEQ ID NO: 2484423 - RNA, 14 nt, Human
ugagccaccgugcc

SEQ ID NO: 2484424 - RNA, 17 nt, Human
ugagcagacuggugagc

SEQ ID NO: 2484425 - RNA, 19 nt, Human
ugagcagacuggugagcag

SEQ ID NO: 2484426 - RNA, 23 nt, Human
ugagcacucccaagucuacagag

SEQ ID NO: 2484427 - RNA, 18 nt, Human
ugagcacucccaagucua

SEQ ID NO: 2484428 - RNA, 17 nt, Human
ugagcacucccaagucu

SEQ ID NO: 2484429 - RNA, 15 nt, Human
ugagcacucccaagu

SEQ ID NO: 2484430 - RNA, 13 nt, Human
ugagcacuguagg

SEQ ID NO: 2484431 - RNA, 21 nt, Human
ugagcaucaggccaggcccuc

SEQ ID NO: 2484432 - RNA, 16 nt, Human
ugagcagacuggugag

SEQ ID NO: 2484433 - RNA, 14 nt, Human
agcaacgcaggccc

SEQ ID NO: 2484434 - RNA, 21 nt, Human
agcaaccuggguccaaauaaa

SEQ ID NO: 2484435 - RNA, 20 nt, Human
agcaaccuggguccaaauaa

SEQ ID NO: 2484436 - RNA, 19 nt, Human
agcaaccuggguccaaaua

SEQ ID NO: 2484437 - RNA, 18 nt, Human
agcaaccuggguccaaau

SEQ ID NO: 2484438 - RNA, 22 nt, Human
agcaaccuggguccaaauaaaa

SEQ ID NO: 2484439 - RNA, 15 nt, Human
agcaaccugggucca

SEQ ID NO: 2484440 - RNA, 18 nt, Human
agcaaccgguggauccuc

SEQ ID NO: 2484441 - RNA, 22 nt, Human
agcaacccuccuaucaccuccc

SEQ ID NO: 2484442 - RNA, 19 nt, Human
ugagcaaauguggcuccug

SEQ ID NO: 2484443 - RNA, 18 nt, Human
ugagcaaauguggcuccu

SEQ ID NO: 2484444 - RNA, 16 nt, Human
ugagcaaauguggcuc

SEQ ID NO: 2484445 - RNA, 15 nt, Human
ugagcaauccugcaa

SEQ ID NO: 2484446 - RNA, 16 nt, Human
ugagcaacucuugauu

SEQ ID NO: 2484447 - RNA, 18 nt, Human
ugagcaacucuugauuau

SEQ ID NO: 2484448 - RNA, 15 nt, Human
ugagcaaauguggcu

SEQ ID NO: 2484449 - RNA, 23 nt, Human
ugagcacuaaggugugcucugau

SEQ ID NO: 2484450 - RNA, 22 nt, Human
ugagcacuaaggugugcucuga

SEQ ID NO: 2484451 - RNA, 21 nt, Human
ugagcacuaaggugugcucug

SEQ ID NO: 2484452 - RNA, 20 nt, Human
ugagcacuaaggugugcucu

SEQ ID NO: 2484453 - RNA, 12 nt, Human
ugagcaccugcu

SEQ ID NO: 2484454 - RNA, 20 nt, Human
ugagcacggccaacaaagcu

SEQ ID NO: 2484455 - RNA, 21 nt, Human
ugagcaccugcuucaugcuca

SEQ ID NO: 2484456 - RNA, 19 nt, Human
ugagcaccgucauggcuua

SEQ ID NO: 2484457 - RNA, 16 nt, Human
ugagcaccaggggaug

SEQ ID NO: 2484458 - RNA, 13 nt, Human
ugagcacauucug

SEQ ID NO: 2484459 - RNA, 13 nt, Human
ugagcacacuuua

SEQ ID NO: 2484460 - RNA, 17 nt, Human
ugagcacagccuagggc

SEQ ID NO: 2484461 - RNA, 17 nt, Human
ugagcaccgucauggcu

SEQ ID NO: 2484462 - RNA, 13 nt, Human
ugagcaccagggg

SEQ ID NO: 2484463 - RNA, 14 nt, Human
ugagcaccagggga

SEQ ID NO: 2484464 - RNA, 14 nt, Human
ugagcaauucuccu

SEQ ID NO: 2484465 - RNA, 20 nt, Human
ugagcaaugucugugcuagg

SEQ ID NO: 2484466 - RNA, 18 nt, Human
ugagcaaugucugugcua

SEQ ID NO: 2484467 - RNA, 17 nt, Human
ugagcaaugucugugcu

SEQ ID NO: 2484468 - RNA, 20 nt, Human
ugagcacacuuuaguggccg

SEQ ID NO: 2484469 - RNA, 21 nt, Human
ugagcacaacuuuaagaggac

SEQ ID NO: 2484470 - RNA, 22 nt, Human
ugagcacaacuuuaagaggaca

SEQ ID NO: 2484471 - RNA, 17 nt, Human
ugagcaacuuucuuaca

SEQ ID NO: 2484472 - RNA, 16 nt, Human
ugagcaaugucugugc

SEQ ID NO: 2484473 - RNA, 21 nt, Human
agcaccugcuucaugcucagc

SEQ ID NO: 2484474 - RNA, 20 nt, Human
agcaccugcuucaugcucag

SEQ ID NO: 2484475 - RNA, 16 nt, Human
agcaccuuccucacuu

SEQ ID NO: 2484476 - RNA, 15 nt, Human
agcaccuuccucacu

SEQ ID NO: 2484477 - RNA, 22 nt, Human
agcaccugucuccuuucacccc

SEQ ID NO: 2484478 - RNA, 23 nt, Human
agcaccuuagacagucccugcca

SEQ ID NO: 2484479 - RNA, 20 nt, Human
agcaccuuccucacuuccau

SEQ ID NO: 2484480 - RNA, 19 nt, Human
agcaccuuccucacuucca

SEQ ID NO: 2484481 - RNA, 18 nt, Human
agcaccuuccucacuucc

SEQ ID NO: 2484482 - RNA, 17 nt, Human
agcacgaaauguuauuu

SEQ ID NO: 2484483 - RNA, 13 nt, Human
agcacgauuucug

SEQ ID NO: 2484484 - RNA, 14 nt, Human
agcacgauuucugu

SEQ ID NO: 2484485 - RNA, 15 nt, Human
agcacgauuucuguu

SEQ ID NO: 2484486 - RNA, 16 nt, Human
agcacgauuucuguuu

SEQ ID NO: 2484487 - RNA, 12 nt, Human
agcacuuguaua

SEQ ID NO: 2484488 - RNA, 18 nt, Human
agcacgaaauguuauuuu

SEQ ID NO: 2484489 - RNA, 23 nt, Human
agcacuuggagccaaggguucag

SEQ ID NO: 2484490 - RNA, 22 nt, Human
agcaccuuagacagucccugcc

SEQ ID NO: 2484491 - RNA, 21 nt, Human
agcaccuuagacagucccugc

SEQ ID NO: 2484492 - RNA, 20 nt, Human
agcaccuuagacagucccug

SEQ ID NO: 2484493 - RNA, 19 nt, Human
agcaccuuagacagucccu

SEQ ID NO: 2484494 - RNA, 18 nt, Human
agcaccaagcucaaagcg

SEQ ID NO: 2484495 - RNA, 17 nt, Human
agcaccaagcucaaagc

SEQ ID NO: 2484496 - RNA, 23 nt, Human
agcaccacccuagucccuucccc

SEQ ID NO: 2484497 - RNA, 17 nt, Human
agcaccagcuucuccag

SEQ ID NO: 2484498 - RNA, 18 nt, Human
agcaccagcuucuccagg

SEQ ID NO: 2484499 - RNA, 20 nt, Human
agcaccagcuucuccaggcu

SEQ ID NO: 2484500 - RNA, 19 nt, Human
agcaccagcuucuccaggc

SEQ ID NO: 2484501 - RNA, 21 nt, Human
agcaccagcuucuccaggcuc

SEQ ID NO: 2484502 - RNA, 14 nt, Human
agcaccaggcacga

SEQ ID NO: 2484503 - RNA, 10 nt, Human
agcaccaggg

SEQ ID NO: 2484504 - RNA, 12 nt, Human
agcaccagggaa

SEQ ID NO: 2484505 - RNA, 13 nt, Human
agcaccagggaag

SEQ ID NO: 2484506 - RNA, 17 nt, Human
agcaccagggcucacgu

SEQ ID NO: 2484507 - RNA, 15 nt, Human
agcaccagggacuau

SEQ ID NO: 2484508 - RNA, 23 nt, Human
agcaccaggcacgaacccaccug

SEQ ID NO: 2484509 - RNA, 12 nt, Human
agcagaaaugcc

SEQ ID NO: 2484510 - RNA, 13 nt, Human
agcagaaaugccu

SEQ ID NO: 2484511 - RNA, 19 nt, Human
agcagaaaugccuuacccu

SEQ ID NO: 2484512 - RNA, 13 nt, Human
agcagaaauacau

SEQ ID NO: 2484513 - RNA, 15 nt, Human
agcagaaaucuagaa

SEQ ID NO: 2484514 - RNA, 13 nt, Human
agcagaauaaagc

SEQ ID NO: 2484515 - RNA, 12 nt, Human
agcagaauaaag

SEQ ID NO: 2484516 - RNA, 11 nt, Human
agcagaauaaa

SEQ ID NO: 2484517 - RNA, 16 nt, Human
agcagaaguggagcug

SEQ ID NO: 2484518 - RNA, 23 nt, Human
agcagaaggggguggugucucca

SEQ ID NO: 2484519 - RNA, 22 nt, Human
agcagaaggggguggugucucc

SEQ ID NO: 2484520 - RNA, 16 nt, Human
agcagaaggggguggu

SEQ ID NO: 2484521 - RNA, 12 nt, Human
agcagaaggggg

SEQ ID NO: 2484522 - RNA, 14 nt, Human
agcagaacagugau

SEQ ID NO: 2484523 - RNA, 21 nt, Human
agcagaacggagccccaggcc

SEQ ID NO: 2484524 - RNA, 14 nt, Human
agcagaacugaacc

SEQ ID NO: 2484525 - RNA, 22 nt, Human
agcacuuugggaggccaaggug

SEQ ID NO: 2484526 - RNA, 14 nt, Human
agcacuuugggagg

SEQ ID NO: 2484527 - RNA, 19 nt, Human
agcacuuugggaggccaag

SEQ ID NO: 2484528 - RNA, 15 nt, Human
agcacuuugggaggc

SEQ ID NO: 2484529 - RNA, 12 nt, Human
agcacuuuggga

SEQ ID NO: 2484530 - RNA, 21 nt, Human
agcacuuguggguuuuuguuu

SEQ ID NO: 2484531 - RNA, 13 nt, Human
agcacuuguauau

SEQ ID NO: 2484532 - RNA, 16 nt, Human
agcacuuguccagcug

SEQ ID NO: 2484533 - RNA, 22 nt, Human
agcacuuucuacaaugugaacu

SEQ ID NO: 2484534 - RNA, 23 nt, Human
agcacuuugggaggccaaggugg

SEQ ID NO: 2484535 - RNA, 16 nt, Human
agcacuuugggaggcu

SEQ ID NO: 2484536 - RNA, 21 nt, Human
agcacuuugggaggccaaggu

SEQ ID NO: 2484537 - RNA, 20 nt, Human
agcacuuugggaggccaagg

SEQ ID NO: 2484538 - RNA, 21 nt, Human
agcacuuugggaggcugaggc

SEQ ID NO: 2484539 - RNA, 22 nt, Human
agcacuuugggaggcugaggcg

SEQ ID NO: 2484540 - RNA, 19 nt, Human
agcagaaaauacagcugga

SEQ ID NO: 2484541 - RNA, 13 nt, Human
agcagaaaauaca

SEQ ID NO: 2484542 - RNA, 13 nt, Human
ugagcgacaguga

SEQ ID NO: 2484543 - RNA, 14 nt, Human
ugagcgacagugag

SEQ ID NO: 2484544 - RNA, 16 nt, Human
ugagcgacagugagac

SEQ ID NO: 2484545 - RNA, 20 nt, Human
ugagcgacagugagacucug

SEQ ID NO: 2484546 - RNA, 15 nt, Human
ugagccuugaacuuu

SEQ ID NO: 2484547 - RNA, 17 nt, Human
ugagccuugaacuuuga

SEQ ID NO: 2484548 - RNA, 18 nt, Human
ugagccuugaacuuugac

SEQ ID NO: 2484549 - RNA, 19 nt, Human
ugagccuugaacuuugacc

SEQ ID NO: 2484550 - RNA, 11 nt, Human
ugagccuggcc

SEQ ID NO: 2484551 - RNA, 12 nt, Human
ugagccuggcca

SEQ ID NO: 2484552 - RNA, 18 nt, Human
ugagccuggcucuugugc

SEQ ID NO: 2484553 - RNA, 13 nt, Human
ugagccuggcucu

SEQ ID NO: 2484554 - RNA, 16 nt, Human
ugagccuggccagccu

SEQ ID NO: 2484555 - RNA, 14 nt, Human
ugagccugggaggu

SEQ ID NO: 2484556 - RNA, 11 nt, Human
ugagccuggca

SEQ ID NO: 2484557 - RNA, 16 nt, Human
ugagccuggcaagaau

SEQ ID NO: 2484558 - RNA, 19 nt, Human
ugagccugggaggucaagg

SEQ ID NO: 2484559 - RNA, 22 nt, Human
ugagccugggaggucaaggcug

SEQ ID NO: 2484560 - RNA, 14 nt, Human
ugagccuugaacuu

SEQ ID NO: 2484561 - RNA, 13 nt, Human
ugagccuucaguc

SEQ ID NO: 2484562 - RNA, 17 nt, Human
ugagccuggcuggcaca

SEQ ID NO: 2484563 - RNA, 13 nt, Human
ugagccuggcugg

SEQ ID NO: 2484564 - RNA, 14 nt, Human
ugagccuucagucu

SEQ ID NO: 2484565 - RNA, 23 nt, Human
agcagagaaugaaagggcccaga

SEQ ID NO: 2484566 - RNA, 22 nt, Human
agcagagaaugaaagggcccag

SEQ ID NO: 2484567 - RNA, 14 nt, Human
agcagagaauucuc

SEQ ID NO: 2484568 - RNA, 21 nt, Human
agcagagaauucucuuaucca

SEQ ID NO: 2484569 - RNA, 16 nt, Human
agcagagaccaucccu

SEQ ID NO: 2484570 - RNA, 15 nt, Human
agcagagaccauccc

SEQ ID NO: 2484571 - RNA, 15 nt, Human
agcagagacacuaac

SEQ ID NO: 2484572 - RNA, 14 nt, Human
agcagacuggugag

SEQ ID NO: 2484573 - RNA, 19 nt, Human
agcagacuggugagcagac

SEQ ID NO: 2484574 - RNA, 10 nt, Human
ugagccuggc

SEQ ID NO: 2484575 - RNA, 12 nt, Human
agcagacauugu

SEQ ID NO: 2484576 - RNA, 21 nt, Human
agcagacaguguuuucuggga

SEQ ID NO: 2484577 - RNA, 12 nt, Human
agcagacaggcc

SEQ ID NO: 2484578 - RNA, 23 nt, Human
agcagaauaaagcaauuuuccuu

SEQ ID NO: 2484579 - RNA, 22 nt, Human
agcagaauaaagcaauuuuccu

SEQ ID NO: 2484580 - RNA, 21 nt, Human
agcagaauaaagcaauuuucc

SEQ ID NO: 2484581 - RNA, 18 nt, Human
agcagaauaaagcaauuu

SEQ ID NO: 2484582 - RNA, 17 nt, Human
agcagaauaaagcaauu

SEQ ID NO: 2484583 - RNA, 16 nt, Human
agcagaauaaagcaau

SEQ ID NO: 2484584 - RNA, 15 nt, Human
agcagaauaaagcaa

SEQ ID NO: 2484585 - RNA, 14 nt, Human
agcagaauaaagca

SEQ ID NO: 2484586 - RNA, 19 nt, Human
agcagaauagcaaggugcu

SEQ ID NO: 2484587 - RNA, 23 nt, Human
agcagacauugucagcaaauuaa

SEQ ID NO: 2484588 - RNA, 22 nt, Human
agcagaccaccccgccugcccu

SEQ ID NO: 2484589 - RNA, 17 nt, Human
agcagacauugucagca

SEQ ID NO: 2484590 - RNA, 13 nt, Human
agcagacauuguc

SEQ ID NO: 2484591 - RNA, 21 nt, Human
agcagagaaugaaagggccca

SEQ ID NO: 2484592 - RNA, 19 nt, Human
agacauguagguguuuguu

SEQ ID NO: 2484593 - RNA, 16 nt, Human
agacauguagguguuu

SEQ ID NO: 2484594 - RNA, 18 nt, Human
agacaugucuguucuaca

SEQ ID NO: 2484595 - RNA, 16 nt, Human
agacauggggaggaag

SEQ ID NO: 2484596 - RNA, 18 nt, Human
agacauggggaggaagga

SEQ ID NO: 2484597 - RNA, 19 nt, Human
agacauggggaggaaggac

SEQ ID NO: 2484598 - RNA, 14 nt, Human
agacaugugacauu

SEQ ID NO: 2484599 - RNA, 13 nt, Human
agacaugugacau

SEQ ID NO: 2484600 - RNA, 12 nt, Human
agacaugugaca

SEQ ID NO: 2484601 - RNA, 20 nt, Human
agacaugucuguucuacaua

SEQ ID NO: 2484602 - RNA, 16 nt, Human
agacaugugacauuua

SEQ ID NO: 2484603 - RNA, 15 nt, Human
agacaugugacauuu

SEQ ID NO: 2484604 - RNA, 17 nt, Human
agacaugugacauuuau

SEQ ID NO: 2484605 - RNA, 17 nt, Human
agacauguggugggaca

SEQ ID NO: 2484606 - RNA, 21 nt, Human
ucuuccuauuugccaugggcu

SEQ ID NO: 2484607 - RNA, 21 nt, Human
ucuuccuaguuuucuccuccc

SEQ ID NO: 2484608 - RNA, 23 nt, Human
ucuuccuaguuuucuccucccag

SEQ ID NO: 2484609 - RNA, 19 nt, Human
ucuuccuaguuuucuccuc

SEQ ID NO: 2484610 - RNA, 21 nt, Human
ucuuccggagauguagcaaaa

SEQ ID NO: 2484611 - RNA, 18 nt, Human
ucuuccggagauguagca

SEQ ID NO: 2484612 - RNA, 19 nt, Human
ucuuccggagauguagcaa

SEQ ID NO: 2484613 - RNA, 12 nt, Human
agacccucucaa

SEQ ID NO: 2484614 - RNA, 17 nt, Human
agacauguuuuagacaa

SEQ ID NO: 2484615 - RNA, 15 nt, Human
agacauguuuuagac

SEQ ID NO: 2484616 - RNA, 22 nt, Human
agacauguagguguuuguucau

SEQ ID NO: 2484617 - RNA, 23 nt, Human
agacauguuuuagacaaauacuc

SEQ ID NO: 2484618 - RNA, 19 nt, Human
agacauguuuuagacaaau

SEQ ID NO: 2484619 - RNA, 14 nt, Human
agacccugcccugu

SEQ ID NO: 2484620 - RNA, 13 nt, Human
agacccugcccug

SEQ ID NO: 2484621 - RNA, 12 nt, Human
agacccugcccu

SEQ ID NO: 2484622 - RNA, 17 nt, Human
agacccucugccaccag

SEQ ID NO: 2484623 - RNA, 16 nt, Human
agacccucugccacca

SEQ ID NO: 2484624 - RNA, 15 nt, Human
agacccucugccacc

SEQ ID NO: 2484625 - RNA, 14 nt, Human
agacccucguggcc

SEQ ID NO: 2484626 - RNA, 23 nt, Human
agacccugcccugugggccccca

SEQ ID NO: 2484627 - RNA, 21 nt, Human
agacccugcccugugggcccc

SEQ ID NO: 2484628 - RNA, 19 nt, Human
agacccugcccugugggcc

SEQ ID NO: 2484629 - RNA, 16 nt, Human
agacccugcccugugg

SEQ ID NO: 2484630 - RNA, 15 nt, Human
agacccuuguggucc

SEQ ID NO: 2484631 - RNA, 13 nt, Human
agacccuuguggu

SEQ ID NO: 2484632 - RNA, 20 nt, Human
agacccugggugggcucugu

SEQ ID NO: 2484633 - RNA, 19 nt, Human
agacccugggugggcucug

SEQ ID NO: 2484634 - RNA, 17 nt, Human
agacccugggugggcuc

SEQ ID NO: 2484635 - RNA, 21 nt, Human
agacccucugccaccagagac

SEQ ID NO: 2484636 - RNA, 20 nt, Human
agacccucugccaccagaga

SEQ ID NO: 2484637 - RNA, 18 nt, Human
agacccuugacaccugcu

SEQ ID NO: 2484638 - RNA, 17 nt, Human
agacccuuauuacacgg

SEQ ID NO: 2484639 - RNA, 22 nt, Human
agacccugggugggcucugugc

SEQ ID NO: 2484640 - RNA, 13 nt, Human
agacccugucucu

SEQ ID NO: 2484641 - RNA, 23 nt, Human
agacccuuguggucccaccccac

SEQ ID NO: 2484642 - RNA, 22 nt, Human
agacccuuguggucccacccca

SEQ ID NO: 2484643 - RNA, 20 nt, Human
agacccuuguggucccaccc

SEQ ID NO: 2484644 - RNA, 19 nt, Human
agacccuuguggucccacc

SEQ ID NO: 2484645 - RNA, 23 nt, Human
agaccuaccucagguugcugguu

SEQ ID NO: 2484646 - RNA, 19 nt, Human
agaccuaccucagguugcu

SEQ ID NO: 2484647 - RNA, 16 nt, Human
agaccuaccucagguu

SEQ ID NO: 2484648 - RNA, 15 nt, Human
agaccuaccucaggu

SEQ ID NO: 2484649 - RNA, 14 nt, Human
agaccuaccucagg

SEQ ID NO: 2484650 - RNA, 18 nt, Human
agaccuaaugcuccuugu

SEQ ID NO: 2484651 - RNA, 15 nt, Human
agaccuaaugcuccu

SEQ ID NO: 2484652 - RNA, 19 nt, Human
agaccuaacgagaaauaga

SEQ ID NO: 2484653 - RNA, 13 nt, Human
agacuccaaagaa

SEQ ID NO: 2484654 - RNA, 14 nt, Human
agacuccaaagaaa

SEQ ID NO: 2484655 - RNA, 12 nt, Human
agacuccaaaga

SEQ ID NO: 2484656 - RNA, 18 nt, Human
agacucauucuucuguac

SEQ ID NO: 2484657 - RNA, 18 nt, Human
agacuauucaaacagucu

SEQ ID NO: 2484658 - RNA, 20 nt, Human
agacuauucaaacagucuca

SEQ ID NO: 2484659 - RNA, 21 nt, Human
agacuauucaaacagucucag

SEQ ID NO: 2484660 - RNA, 17 nt, Human
agacucauucuucugua

SEQ ID NO: 2484661 - RNA, 12 nt, Human
agaccugccccu

SEQ ID NO: 2484662 - RNA, 19 nt, Human
agacuaucuaaauguugaa

SEQ ID NO: 2484663 - RNA, 17 nt, Human
agacuaucuaaauguug

SEQ ID NO: 2484664 - RNA, 18 nt, Human
agacuaucuaaauguuga

SEQ ID NO: 2484665 - RNA, 18 nt, Human
agaccugauccuggaggc

SEQ ID NO: 2484666 - RNA, 19 nt, Human
agaccugauccuggaggcc

SEQ ID NO: 2484667 - RNA, 21 nt, Human
agaccugauccuggaggccca

SEQ ID NO: 2484668 - RNA, 22 nt, Human
agaccugauccuggaggcccag

SEQ ID NO: 2484669 - RNA, 15 nt, Human
agacuaucuaaaugu

SEQ ID NO: 2484670 - RNA, 15 nt, Human
agaccugauccugga

SEQ ID NO: 2484671 - RNA, 16 nt, Human
agaccugauccuggag

SEQ ID NO: 2484672 - RNA, 14 nt, Human
agaccugauccugg

SEQ ID NO: 2484673 - RNA, 16 nt, Human
agaccugagcucccca

SEQ ID NO: 2484674 - RNA, 17 nt, Human
agaccugacaagcacug

SEQ ID NO: 2484675 - RNA, 15 nt, Human
agaccugaauucuuu

SEQ ID NO: 2484676 - RNA, 19 nt, Human
agaccugacaagcacugcu

SEQ ID NO: 2484677 - RNA, 19 nt, Human
agaccugacaccuuucaua

SEQ ID NO: 2484678 - RNA, 21 nt, Human
ucuuggaccucugcucugagg

SEQ ID NO: 2484679 - RNA, 18 nt, Human
ucuuggaccucugcucug

SEQ ID NO: 2484680 - RNA, 16 nt, Human
ucuuggaccucugcuc

SEQ ID NO: 2484681 - RNA, 14 nt, Human
ucuuggaccucugc

SEQ ID NO: 2484682 - RNA, 17 nt, Human
ucuuggacacuguacaa

SEQ ID NO: 2484683 - RNA, 16 nt, Human
ucuuggacacuguaca

SEQ ID NO: 2484684 - RNA, 13 nt, Human
ucuuggagccugc

SEQ ID NO: 2484685 - RNA, 14 nt, Human
ucuuggagccugca

SEQ ID NO: 2484686 - RNA, 23 nt, Human
ucuuggaccucugcucugaggcu

SEQ ID NO: 2484687 - RNA, 12 nt, Human
ucuuggagccug

SEQ ID NO: 2484688 - RNA, 16 nt, Human
ucuugcaauggcagcc

SEQ ID NO: 2484689 - RNA, 13 nt, Human
ucuugcaauggca

SEQ ID NO: 2484690 - RNA, 17 nt, Human
ucuugcaauggcagccu

SEQ ID NO: 2484691 - RNA, 15 nt, Human
ucuuggaaaaaguga

SEQ ID NO: 2484692 - RNA, 16 nt, Human
ucuuggaaaaagugau

SEQ ID NO: 2484693 - RNA, 16 nt, Human
ucuuggaaagaaacaa

SEQ ID NO: 2484694 - RNA, 20 nt, Human
ucuugaugccuggcggggug

SEQ ID NO: 2484695 - RNA, 13 nt, Human
ucuugaugcaugc

SEQ ID NO: 2484696 - RNA, 21 nt, Human
ucuugaugcaugcacuguucc

SEQ ID NO: 2484697 - RNA, 14 nt, Human
ucuugaugccuggc

SEQ ID NO: 2484698 - RNA, 15 nt, Human
ucuugaucuguucug

SEQ ID NO: 2484699 - RNA, 23 nt, Human
ucuugaucugcucagcccuggag

SEQ ID NO: 2484700 - RNA, 12 nt, Human
ucuugaugacca

SEQ ID NO: 2484701 - RNA, 16 nt, Human
agacuccaaagaaaug

SEQ ID NO: 2484702 - RNA, 19 nt, Human
agacuccaaagaaauguaa

SEQ ID NO: 2484703 - RNA, 22 nt, Human
ucuugaucugcucagcccugga

SEQ ID NO: 2484704 - RNA, 21 nt, Human
ucuugaucugcucagcccugg

SEQ ID NO: 2484705 - RNA, 20 nt, Human
ucuugaucugcucagcccug

SEQ ID NO: 2484706 - RNA, 19 nt, Human
ucuugaucugcucagcccu

SEQ ID NO: 2484707 - RNA, 17 nt, Human
ucuugaucugcucagcc

SEQ ID NO: 2484708 - RNA, 14 nt, Human
ucuugaucugcuca

SEQ ID NO: 2484709 - RNA, 23 nt, Human
agaccugauccuggaggcccagu

SEQ ID NO: 2484710 - RNA, 18 nt, Human
ucuuuagaguuagacugu

SEQ ID NO: 2484711 - RNA, 17 nt, Human
ucuuuagaguuagacug

SEQ ID NO: 2484712 - RNA, 16 nt, Human
ucuuuagaguuagacu

SEQ ID NO: 2484713 - RNA, 14 nt, Human
ucuuuagaguuaga

SEQ ID NO: 2484714 - RNA, 17 nt, Human
ucuuuaggauugugaug

SEQ ID NO: 2484715 - RNA, 19 nt, Human
ucuuuagagcauugccauu

SEQ ID NO: 2484716 - RNA, 19 nt, Human
ucuuuagaguuagacuguu

SEQ ID NO: 2484717 - RNA, 14 nt, Human
ucuuuagagcauug

SEQ ID NO: 2484718 - RNA, 13 nt, Human
ucuuuagagcauu

SEQ ID NO: 2484719 - RNA, 12 nt, Human
ucuuuagaguua

SEQ ID NO: 2484720 - RNA, 16 nt, Human
ucuuuaccugagacca

SEQ ID NO: 2484721 - RNA, 18 nt, Human
ucuuuaccugagaccagu

SEQ ID NO: 2484722 - RNA, 12 nt, Human
ucuuuacuuuua

SEQ ID NO: 2484723 - RNA, 13 nt, Human
ucuuuaccugaga

SEQ ID NO: 2484724 - RNA, 15 nt, Human
ucuuuacuucaugga

SEQ ID NO: 2484725 - RNA, 15 nt, Human
ucuuggagccugcag

SEQ ID NO: 2484726 - RNA, 18 nt, Human
ucuuggagccugcagagc

SEQ ID NO: 2484727 - RNA, 16 nt, Human
ucuuggagcugagccu

SEQ ID NO: 2484728 - RNA, 19 nt, Human
ucuuggagccugcagagcu

SEQ ID NO: 2484729 - RNA, 22 nt, Human
ucuuggcacauuuaagagacag

SEQ ID NO: 2484730 - RNA, 21 nt, Human
ucuuggcacauuuaagagaca

SEQ ID NO: 2484731 - RNA, 14 nt, Human
ucuuggagucuucc

SEQ ID NO: 2484732 - RNA, 21 nt, Human
ucuuggagcugagccucucac

SEQ ID NO: 2484733 - RNA, 17 nt, Human
ucuuuaaaauacacacu

SEQ ID NO: 2484734 - RNA, 21 nt, Human
ucuuuaaaauuuaaguaucuu

SEQ ID NO: 2484735 - RNA, 21 nt, Human
ucuuuaaagggauggcaagau

SEQ ID NO: 2484736 - RNA, 18 nt, Human
ucuuuaaagucaggucca

SEQ ID NO: 2484737 - RNA, 17 nt, Human
agacuccugcaggcagc

SEQ ID NO: 2484738 - RNA, 16 nt, Human
agacuccugcaggcag

SEQ ID NO: 2484739 - RNA, 15 nt, Human
agacuccugcaggca

SEQ ID NO: 2484740 - RNA, 14 nt, Human
agacuccugcaggc

SEQ ID NO: 2484741 - RNA, 23 nt, Human
ucuuuaggauugugaugguucgu

SEQ ID NO: 2484742 - RNA, 16 nt, Human
ucuuuccugaggcugg

SEQ ID NO: 2484743 - RNA, 15 nt, Human
ucuuuccugaggcug

SEQ ID NO: 2484744 - RNA, 14 nt, Human
ucuuuccugaggcu

SEQ ID NO: 2484745 - RNA, 13 nt, Human
ucuuuccugaggc

SEQ ID NO: 2484746 - RNA, 23 nt, Human
agacuccugcaggcagccaggcc

SEQ ID NO: 2484747 - RNA, 20 nt, Human
agacuccugcaggcagccag

SEQ ID NO: 2484748 - RNA, 19 nt, Human
agacuccugcaggcagcca

SEQ ID NO: 2484749 - RNA, 18 nt, Human
agacuccugcaggcagcc

SEQ ID NO: 2484750 - RNA, 21 nt, Human
agacucgcgacaaugcaaacc

SEQ ID NO: 2484751 - RNA, 17 nt, Human
agacucuacagaggcca

SEQ ID NO: 2484752 - RNA, 19 nt, Human
agacucuacagaggccaug

SEQ ID NO: 2484753 - RNA, 20 nt, Human
agagacacacugaagaagca

SEQ ID NO: 2484754 - RNA, 18 nt, Human
agagacacacugaagaag

SEQ ID NO: 2484755 - RNA, 14 nt, Human
agagaccaucccug

SEQ ID NO: 2484756 - RNA, 13 nt, Human
agagaccaucccu

SEQ ID NO: 2484757 - RNA, 18 nt, Human
ucuuugggaauguuuguc

SEQ ID NO: 2484758 - RNA, 14 nt, Human
ucuuugggaauguu

SEQ ID NO: 2484759 - RNA, 15 nt, Human
ucuuugggccagaca

SEQ ID NO: 2484760 - RNA, 16 nt, Human
ucuuugggccagacau

SEQ ID NO: 2484761 - RNA, 20 nt, Human
ucuuuggguaccuauuuuca

SEQ ID NO: 2484762 - RNA, 19 nt, Human
ucuuuggguaccuauuuuc

SEQ ID NO: 2484763 - RNA, 18 nt, Human
ucuuuggggucagccagg

SEQ ID NO: 2484764 - RNA, 21 nt, Human
ucuuuggggucagccagggcc

SEQ ID NO: 2484765 - RNA, 20 nt, Human
ucuuugggccagacaugcca

SEQ ID NO: 2484766 - RNA, 19 nt, Human
agagaccaggcaaagcaag

SEQ ID NO: 2484767 - RNA, 20 nt, Human
ucuuugggaauauuugaauc

SEQ ID NO: 2484768 - RNA, 15 nt, Human
agagaccaucccuga

SEQ ID NO: 2484769 - RNA, 15 nt, Human
agagaaugagagaca

SEQ ID NO: 2484770 - RNA, 20 nt, Human
agagaaucaacauuucucaa

SEQ ID NO: 2484771 - RNA, 15 nt, Human
agagaaucauacuua

SEQ ID NO: 2484772 - RNA, 22 nt, Human
agagaaugaaauugcugaaaga

SEQ ID NO: 2484773 - RNA, 17 nt, Human
agagacacacugaagaa

SEQ ID NO: 2484774 - RNA, 23 nt, Human
agagaaucccuagucuucaagca

SEQ ID NO: 2484775 - RNA, 15 nt, Human
agagaauggaaaaca

SEQ ID NO: 2484776 - RNA, 12 nt, Human
agacuuuggaaa

SEQ ID NO: 2484777 - RNA, 14 nt, Human
agacuuuggaaaau

SEQ ID NO: 2484778 - RNA, 21 nt, Human
agacuuuggaaaaugcauugu

SEQ ID NO: 2484779 - RNA, 22 nt, Human
agacuuuggaaaaugcauugua

SEQ ID NO: 2484780 - RNA, 23 nt, Human
agacuuuggaaaaugcauuguau

SEQ ID NO: 2484781 - RNA, 14 nt, Human
agacuuuggaaaga

SEQ ID NO: 2484782 - RNA, 18 nt, Human
agagaaugaaagggccca

SEQ ID NO: 2484783 - RNA, 14 nt, Human
agacuugaaauacu

SEQ ID NO: 2484784 - RNA, 18 nt, Human
agacuuggcaacagaagc

SEQ ID NO: 2484785 - RNA, 17 nt, Human
agacuuggcaacagaag

SEQ ID NO: 2484786 - RNA, 15 nt, Human
agacuugggacauug

SEQ ID NO: 2484787 - RNA, 19 nt, Human
agacuuggcaacagaagca

SEQ ID NO: 2484788 - RNA, 13 nt, Human
agacuugcucucu

SEQ ID NO: 2484789 - RNA, 17 nt, Human
agacuucaucccucugg

SEQ ID NO: 2484790 - RNA, 21 nt, Human
agacuucaguauguugucaaa

SEQ ID NO: 2484791 - RNA, 19 nt, Human
agacuucaguauguuguca

SEQ ID NO: 2484792 - RNA, 13 nt, Human
agacuucaguaug

SEQ ID NO: 2484793 - RNA, 12 nt, Human
agacuucugcuu

SEQ ID NO: 2484794 - RNA, 22 nt, Human
agacuucaguauguugucaaag

SEQ ID NO: 2484795 - RNA, 18 nt, Human
agacuucugcuuuccaca

SEQ ID NO: 2484796 - RNA, 14 nt, Human
agacuucaucccuc

SEQ ID NO: 2484797 - RNA, 23 nt, Human
agacuguugcucaaaucuauuca

SEQ ID NO: 2484798 - RNA, 21 nt, Human
agacuucacacugcaagagcc

SEQ ID NO: 2484799 - RNA, 15 nt, Human
agacuucacacugca

SEQ ID NO: 2484800 - RNA, 14 nt, Human
agacuggcacaguu

SEQ ID NO: 2484801 - RNA, 15 nt, Human
agacuggcacaguuu

SEQ ID NO: 2484802 - RNA, 14 nt, Human
agacugucucaaga

SEQ ID NO: 2484803 - RNA, 18 nt, Human
agacuggcacaguuuucu

SEQ ID NO: 2484804 - RNA, 11 nt, Human
agacuguguau

SEQ ID NO: 2484805 - RNA, 11 nt, Human
agacuguggcu

SEQ ID NO: 2484806 - RNA, 14 nt, Human
agacuguggcugcu

SEQ ID NO: 2484807 - RNA, 20 nt, Human
agacuguggcugcuagcacu

SEQ ID NO: 2484808 - RNA, 15 nt, Human
agacuguugcucaaa

SEQ ID NO: 2484809 - RNA, 14 nt, Human
agacuguugcucaa

SEQ ID NO: 2484810 - RNA, 18 nt, Human
agacuguuaaaugaaacc

SEQ ID NO: 2484811 - RNA, 17 nt, Human
agacuguuaaaugaaac

SEQ ID NO: 2484812 - RNA, 23 nt, Human
agacuguugggguggguauaaaa

SEQ ID NO: 2484813 - RNA, 11 nt, Human
agacuguuggg

SEQ ID NO: 2484814 - RNA, 14 nt, Human
agacuuaucaacau

SEQ ID NO: 2484815 - RNA, 17 nt, Human
agacagucccugccaau

SEQ ID NO: 2484816 - RNA, 16 nt, Human
agacagucccugccaa

SEQ ID NO: 2484817 - RNA, 15 nt, Human
agacagucccugcca

SEQ ID NO: 2484818 - RNA, 21 nt, Human
agacaguauacaguccugugg

SEQ ID NO: 2484819 - RNA, 17 nt, Human
agacaguauacaguccu

SEQ ID NO: 2484820 - RNA, 15 nt, Human
agacaguauauuuau

SEQ ID NO: 2484821 - RNA, 14 nt, Human
agacaguauacagu

SEQ ID NO: 2484822 - RNA, 12 nt, Human
agacaguaugag

SEQ ID NO: 2484823 - RNA, 12 nt, Human
ucuuaagcuucc

SEQ ID NO: 2484824 - RNA, 17 nt, Human
ucuuaaguuucucagcu

SEQ ID NO: 2484825 - RNA, 15 nt, Human
ucuuaaguuucucag

SEQ ID NO: 2484826 - RNA, 16 nt, Human
ucuuaaggggcagcuu

SEQ ID NO: 2484827 - RNA, 17 nt, Human
agacaguauauuuauag

SEQ ID NO: 2484828 - RNA, 18 nt, Human
agacaguauauuuauagu

SEQ ID NO: 2484829 - RNA, 23 nt, Human
ucuuaaggauugugauauuuuua

SEQ ID NO: 2484830 - RNA, 18 nt, Human
ucuuaaguuucucagcuc

SEQ ID NO: 2484831 - RNA, 15 nt, Human
ucuuaauauaacugc

SEQ ID NO: 2484832 - RNA, 19 nt, Human
ucuuaauauaacugccuua

SEQ ID NO: 2484833 - RNA, 18 nt, Human
ucuuaauauaacugccuu

SEQ ID NO: 2484834 - RNA, 15 nt, Human
agacaggaccaggga

SEQ ID NO: 2484835 - RNA, 14 nt, Human
agacaggaaaggga

SEQ ID NO: 2484836 - RNA, 15 nt, Human
agacaggcccaagag

SEQ ID NO: 2484837 - RNA, 16 nt, Human
agacaggcccaagaga

SEQ ID NO: 2484838 - RNA, 18 nt, Human
agacaggaaagggaaggc

SEQ ID NO: 2484839 - RNA, 21 nt, Human
agacaggacagugcuucagcc

SEQ ID NO: 2484840 - RNA, 23 nt, Human
agacaggcaagcaccuccugccu

SEQ ID NO: 2484841 - RNA, 22 nt, Human
agacaggguuuggcugugucua

SEQ ID NO: 2484842 - RNA, 21 nt, Human
agacaggguuuggcugugucu

SEQ ID NO: 2484843 - RNA, 23 nt, Human
agacaggguuuggcugugucuaa

SEQ ID NO: 2484844 - RNA, 16 nt, Human
agacaggguuuggcug

SEQ ID NO: 2484845 - RNA, 23 nt, Human
agacaggguuucaccauguugcc

SEQ ID NO: 2484846 - RNA, 21 nt, Human
agacaggguuuugccauguug

SEQ ID NO: 2484847 - RNA, 15 nt, Human
agacaggcucuuagc

SEQ ID NO: 2484848 - RNA, 18 nt, Human
agacaggcccaagagaug

SEQ ID NO: 2484849 - RNA, 22 nt, Human
agacaggcccaagagaugaaga

SEQ ID NO: 2484850 - RNA, 20 nt, Human
agacaggcucuuagcagcuu

SEQ ID NO: 2484851 - RNA, 23 nt, Human
agacaggcccaagagaugaagag

SEQ ID NO: 2484852 - RNA, 19 nt, Human
agacaggguuucaccaugu

SEQ ID NO: 2484853 - RNA, 15 nt, Human
agacaccagagcaga

SEQ ID NO: 2484854 - RNA, 13 nt, Human
agacaccagagca

SEQ ID NO: 2484855 - RNA, 18 nt, Human
agaauuugagugcucuga

SEQ ID NO: 2484856 - RNA, 17 nt, Human
agaauuugagugcucug

SEQ ID NO: 2484857 - RNA, 21 nt, Human
agacacccucaaccucuucug

SEQ ID NO: 2484858 - RNA, 22 nt, Human
agacaccgccacauggcuuccu

SEQ ID NO: 2484859 - RNA, 21 nt, Human
agacacggaucugagaaucuu

SEQ ID NO: 2484860 - RNA, 20 nt, Human
agacacggaucugagaaucu

SEQ ID NO: 2484861 - RNA, 18 nt, Human
agacacggaucugagaau

SEQ ID NO: 2484862 - RNA, 15 nt, Human
agacacggaucugag

SEQ ID NO: 2484863 - RNA, 20 nt, Human
agacacuccccgaagucuuu

SEQ ID NO: 2484864 - RNA, 15 nt, Human
agacacuaaguuaua

SEQ ID NO: 2484865 - RNA, 22 nt, Human
agacacuaacgacuucagggca

SEQ ID NO: 2484866 - RNA, 20 nt, Human
agacaccagagcagaugcag

SEQ ID NO: 2484867 - RNA, 12 nt, Human
agacacccagga

SEQ ID NO: 2484868 - RNA, 13 nt, Human
agacacccaggac

SEQ ID NO: 2484869 - RNA, 14 nt, Human
agacacccaggacu

SEQ ID NO: 2484870 - RNA, 15 nt, Human
agacacccaggacuu

SEQ ID NO: 2484871 - RNA, 16 nt, Human
agacacccaggacuua

SEQ ID NO: 2484872 - RNA, 19 nt, Human
agacacccucaaccucuuc

SEQ ID NO: 2484873 - RNA, 21 nt, Human
agacaccaucuuuugugagau

SEQ ID NO: 2484874 - RNA, 19 nt, Human
agacagagacccucugcca

SEQ ID NO: 2484875 - RNA, 12 nt, Human
agacagaaucuc

SEQ ID NO: 2484876 - RNA, 16 nt, Human
agacagacacacacac

SEQ ID NO: 2484877 - RNA, 15 nt, Human
agacagacacacaca

SEQ ID NO: 2484878 - RNA, 14 nt, Human
agacagacacacac

SEQ ID NO: 2484879 - RNA, 22 nt, Human
agacagagacccucugccacca

SEQ ID NO: 2484880 - RNA, 18 nt, Human
agacaggaaaauccucug

SEQ ID NO: 2484881 - RNA, 19 nt, Human
agacaggaaaauccucugg

SEQ ID NO: 2484882 - RNA, 20 nt, Human
agacaggaaaauccucuggc

SEQ ID NO: 2484883 - RNA, 21 nt, Human
agacaggaaaauccucuggcu

SEQ ID NO: 2484884 - RNA, 23 nt, Human
agacagcuucucauccugcaggc

SEQ ID NO: 2484885 - RNA, 22 nt, Human
agacagcuucucauccugcagg

SEQ ID NO: 2484886 - RNA, 16 nt, Human
agacacucugcucugc

SEQ ID NO: 2484887 - RNA, 15 nt, Human
agacacucugcucug

SEQ ID NO: 2484888 - RNA, 14 nt, Human
agacacucugcucu

SEQ ID NO: 2484889 - RNA, 12 nt, Human
agacacucugcu

SEQ ID NO: 2484890 - RNA, 22 nt, Human
agacacuccccgaagucuuuug

SEQ ID NO: 2484891 - RNA, 23 nt, Human
agacacuccccgaagucuuuugu

SEQ ID NO: 2484892 - RNA, 16 nt, Human
agacacucuggcuggu

SEQ ID NO: 2484893 - RNA, 13 nt, Human
agacacucuggcu

SEQ ID NO: 2484894 - RNA, 18 nt, Human
agacacucugcucugccc

SEQ ID NO: 2484895 - RNA, 17 nt, Human
agacacucugcucugcc

SEQ ID NO: 2484896 - RNA, 18 nt, Human
agacacugaaaaaucuaa

SEQ ID NO: 2484897 - RNA, 13 nt, Human
agacacugaaaua

SEQ ID NO: 2484898 - RNA, 18 nt, Human
agacagaaucucgcucug

SEQ ID NO: 2484899 - RNA, 22 nt, Human
agacagaaucucgcucugucgc

SEQ ID NO: 2484900 - RNA, 18 nt, Human
agacagaagcugaagugc

SEQ ID NO: 2484901 - RNA, 20 nt, Human
agacacugaaauauacacac

SEQ ID NO: 2484902 - RNA, 21 nt, Human
agacacugaaauauacacaca

SEQ ID NO: 2484903 - RNA, 10 nt, Human
ucuucccucc

SEQ ID NO: 2484904 - RNA, 19 nt, Human
ucuuccaucauguccccaa

SEQ ID NO: 2484905 - RNA, 20 nt, Human
ucuucccuagaggguuccug

SEQ ID NO: 2484906 - RNA, 13 nt, Human
ucuucccuaccuc

SEQ ID NO: 2484907 - RNA, 14 nt, Human
ucuucccuaccuca

SEQ ID NO: 2484908 - RNA, 21 nt, Human
ucuucccuaccucaggcagga

SEQ ID NO: 2484909 - RNA, 19 nt, Human
ucuucccuuuuacauacug

SEQ ID NO: 2484910 - RNA, 21 nt, Human
ucuucccuuuuacauacugcu

SEQ ID NO: 2484911 - RNA, 22 nt, Human
ucuucccuuuuacauacugcug

SEQ ID NO: 2484912 - RNA, 21 nt, Human
ucuuccgaaaaauccucuucc

SEQ ID NO: 2484913 - RNA, 15 nt, Human
ucuuccggagaugua

SEQ ID NO: 2484914 - RNA, 16 nt, Human
ucuuccggagauguag

SEQ ID NO: 2484915 - RNA, 15 nt, Human
ucuuccaggugccca

SEQ ID NO: 2484916 - RNA, 13 nt, Human
ucuuccagguggg

SEQ ID NO: 2484917 - RNA, 18 nt, Human
ucuuccaggugcccagcu

SEQ ID NO: 2484918 - RNA, 22 nt, Human
ucuuccaggcugggagagccuu

SEQ ID NO: 2484919 - RNA, 18 nt, Human
ucuuccagucuuccugac

SEQ ID NO: 2484920 - RNA, 21 nt, Human
ucuuccagucuuccugacacu

SEQ ID NO: 2484921 - RNA, 19 nt, Human
ucuuccagguggggugagg

SEQ ID NO: 2484922 - RNA, 16 nt, Human
ucuuccaucauguccc

SEQ ID NO: 2484923 - RNA, 18 nt, Human
ucuuccaucauggauuca

SEQ ID NO: 2484924 - RNA, 13 nt, Human
ucuuccaucaugg

SEQ ID NO: 2484925 - RNA, 12 nt, Human
ucuuccauaaug

SEQ ID NO: 2484926 - RNA, 19 nt, Human
ucuuccauaugaccucaug

SEQ ID NO: 2484927 - RNA, 16 nt, Human
ucuuccauaauguaua

SEQ ID NO: 2484928 - RNA, 23 nt, Human
ucuucaccugauucaacuaaaaa

SEQ ID NO: 2484929 - RNA, 14 nt, Human
ucuucacggcagga

SEQ ID NO: 2484930 - RNA, 21 nt, Human
ucuucaccugauucaacuaaa

SEQ ID NO: 2484931 - RNA, 23 nt, Human
ucuucagaaagugugcuuuaugc

SEQ ID NO: 2484932 - RNA, 13 nt, Human
ucuucagaagaca

SEQ ID NO: 2484933 - RNA, 18 nt, Human
ucuucagaagacacugca

SEQ ID NO: 2484934 - RNA, 18 nt, Human
ucuucacucucugaagau

SEQ ID NO: 2484935 - RNA, 20 nt, Human
ucuucagaaagugugcuuua

SEQ ID NO: 2484936 - RNA, 14 nt, Human
ucuucacucgcccc

SEQ ID NO: 2484937 - RNA, 20 nt, Human
ucuucacccagcuaaucugu

SEQ ID NO: 2484938 - RNA, 19 nt, Human
ucuucacccagcuaaucug

SEQ ID NO: 2484939 - RNA, 17 nt, Human
ucuucaccauuuggcaa

SEQ ID NO: 2484940 - RNA, 24 nt, Human
ucuucaacaucaauguucauugua

SEQ ID NO: 2484941 - RNA, 21 nt, Human
ucuucaacaucaauguucauu

SEQ ID NO: 2484942 - RNA, 23 nt, Human
ucuucaacaucaauguucauugu

SEQ ID NO: 2484943 - RNA, 18 nt, Human
ucuucacagcucuguguu

SEQ ID NO: 2484944 - RNA, 16 nt, Human
ucuucaaauuagaaga

SEQ ID NO: 2484945 - RNA, 18 nt, Human
ucuucaacaggagaauuu

SEQ ID NO: 2484946 - RNA, 11 nt, Human
ucuucaacaga

SEQ ID NO: 2484947 - RNA, 19 nt, Human
ucuucaacaucaauguuca

SEQ ID NO: 2484948 - RNA, 20 nt, Human
ucuucaacaucaauguucau

SEQ ID NO: 2484949 - RNA, 19 nt, Human
ucuucaaauuagaagacau

SEQ ID NO: 2484950 - RNA, 20 nt, Human
ucuucaaauuagaagacauu

SEQ ID NO: 2484951 - RNA, 17 nt, Human
ucuucaaaaugagcccu

SEQ ID NO: 2484952 - RNA, 14 nt, Human
ucuuauuuaacuua

SEQ ID NO: 2484953 - RNA, 14 nt, Human
ucuuaugggcuggg

SEQ ID NO: 2484954 - RNA, 16 nt, Human
ucuuaugggcuggguu

SEQ ID NO: 2484955 - RNA, 15 nt, Human
ucuuaugggcugggu

SEQ ID NO: 2484956 - RNA, 22 nt, Human
ucuuauugcccacgcuggagug

SEQ ID NO: 2484957 - RNA, 18 nt, Human
ucuuauugcccacgcugg

SEQ ID NO: 2484958 - RNA, 14 nt, Human
ucuuauugcccacg

SEQ ID NO: 2484959 - RNA, 18 nt, Human
ucuuaugggcuggguucu

SEQ ID NO: 2484960 - RNA, 12 nt, Human
ucuuaauuauua

SEQ ID NO: 2484961 - RNA, 14 nt, Human
ucuuagaaaugaag

SEQ ID NO: 2484962 - RNA, 11 nt, Human
ucuuagaaauu

SEQ ID NO: 2484963 - RNA, 18 nt, Human
ucuuaaucuuuucacaaa

SEQ ID NO: 2484964 - RNA, 17 nt, Human
ucuuaaucuuuucacaa

SEQ ID NO: 2484965 - RNA, 15 nt, Human
ucuuagaaauuuauu

SEQ ID NO: 2484966 - RNA, 12 nt, Human
ucuuagaaauuu

SEQ ID NO: 2484967 - RNA, 15 nt, Human
ucuuagaaaugaagg

SEQ ID NO: 2484968 - RNA, 19 nt, Human
ucuuagaaguggaccagga

SEQ ID NO: 2484969 - RNA, 15 nt, Human
ucuuagacuucugcu

SEQ ID NO: 2484970 - RNA, 20 nt, Human
ucuuagacuacauuuagaga

SEQ ID NO: 2484971 - RNA, 14 nt, Human
ucuuagacuacauu

SEQ ID NO: 2484972 - RNA, 21 nt, Human
ucuuagaaguggaccaggaca

SEQ ID NO: 2484973 - RNA, 20 nt, Human
ucuuagacuucugcuuucca

SEQ ID NO: 2484974 - RNA, 18 nt, Human
ucuuagacuucugcuuuc

SEQ ID NO: 2484975 - RNA, 18 nt, Human
ucuuagacuugaaauacu

SEQ ID NO: 2484976 - RNA, 23 nt, Human
ucuuagacuugaaauacuacuua

SEQ ID NO: 2484977 - RNA, 18 nt, Human
ucuuaauuaaaagaauau

SEQ ID NO: 2484978 - RNA, 21 nt, Human
ucuuaauuaaaagaauauuuu

SEQ ID NO: 2484979 - RNA, 14 nt, Human
ucuuaauuaaaaga

SEQ ID NO: 2484980 - RNA, 16 nt, Human
ucuuaauauuaaauau

SEQ ID NO: 2484981 - RNA, 20 nt, Human
ucuguuggccagugugacaa

SEQ ID NO: 2484982 - RNA, 19 nt, Human
ucuguuggccagugugaca

SEQ ID NO: 2484983 - RNA, 18 nt, Human
ucuguuggccagugugac

SEQ ID NO: 2484984 - RNA, 18 nt, Human
ucuguucccccuucacaa

SEQ ID NO: 2484985 - RNA, 20 nt, Human
ucuguucccccuucacaaag

SEQ ID NO: 2484986 - RNA, 13 nt, Human
ucuguuccuucac

SEQ ID NO: 2484987 - RNA, 20 nt, Human
ucuguucuacauagaugcuu

SEQ ID NO: 2484988 - RNA, 15 nt, Human
ucuguuccuucacau

SEQ ID NO: 2484989 - RNA, 16 nt, Human
ucuguucaguguaaau

SEQ ID NO: 2484990 - RNA, 17 nt, Human
ucuguucaguguaaaua

SEQ ID NO: 2484991 - RNA, 21 nt, Human
ucugugcuggagauguuuuag

SEQ ID NO: 2484992 - RNA, 19 nt, Human
ucugugcuggagauguuuu

SEQ ID NO: 2484993 - RNA, 23 nt, Human
ucugugcugacccuccuguugca

SEQ ID NO: 2484994 - RNA, 19 nt, Human
ucugugcugacccuccugu

SEQ ID NO: 2484995 - RNA, 14 nt, Human
ucugugcuccuccu

SEQ ID NO: 2484996 - RNA, 13 nt, Human
ucugugcucagga

SEQ ID NO: 2484997 - RNA, 20 nt, Human
ucuguuccccauggccacuu

SEQ ID NO: 2484998 - RNA, 13 nt, Human
ucuguucccccuu

SEQ ID NO: 2484999 - RNA, 18 nt, Human
ucuguucauuuccucaaa

SEQ ID NO: 2485000 - RNA, 21 nt, Human
ucugugaaaggaaagagggag

SEQ ID NO: 2485001 - RNA, 15 nt, Human
ucugugaaaggaaag

SEQ ID NO: 2485002 - RNA, 12 nt, Human
ucuguccaagga

SEQ ID NO: 2485003 - RNA, 24 nt, Human
ucuguccaggcacugcugcccagc

SEQ ID NO: 2485004 - RNA, 22 nt, Human
ucugugcuagggaaacuucccg

SEQ ID NO: 2485005 - RNA, 21 nt, Human
ucugugcuagggaaacuuccc

SEQ ID NO: 2485006 - RNA, 16 nt, Human
ucugugcgugaaacac

SEQ ID NO: 2485007 - RNA, 22 nt, Human
ucugugcgugaaacacaccagg

SEQ ID NO: 2485008 - RNA, 18 nt, Human
ucugugccuucuuuugau

SEQ ID NO: 2485009 - RNA, 22 nt, Human
ucugugccuucuuuugauuaug

SEQ ID NO: 2485010 - RNA, 16 nt, Human
ucugugccuucgucuu

SEQ ID NO: 2485011 - RNA, 13 nt, Human
ucuguccaaggaa

SEQ ID NO: 2485012 - RNA, 15 nt, Human
ucugugccugaauau

SEQ ID NO: 2485013 - RNA, 17 nt, Human
ucugugccugaauauuu

SEQ ID NO: 2485014 - RNA, 22 nt, Human
ucugugccccaugccuguccag

SEQ ID NO: 2485015 - RNA, 23 nt, Human
agaauuucccaaagcagugcaug

SEQ ID NO: 2485016 - RNA, 16 nt, Human
agaauuucuaccauuu

SEQ ID NO: 2485017 - RNA, 20 nt, Human
agaauuucuaccauuucaga

SEQ ID NO: 2485018 - RNA, 21 nt, Human
agaauuuauucaauuccucug

SEQ ID NO: 2485019 - RNA, 21 nt, Human
agaauuucuaccauuucagag

SEQ ID NO: 2485020 - RNA, 13 nt, Human
agaauuucuuggu

SEQ ID NO: 2485021 - RNA, 21 nt, Human
agaauuucuugguaagaagcc

SEQ ID NO: 2485022 - RNA, 22 nt, Human
agaauuucuugguaagaagccg

SEQ ID NO: 2485023 - RNA, 18 nt, Human
agaauuucccaaagcagu

SEQ ID NO: 2485024 - RNA, 17 nt, Human
agaauuucccaaagcag

SEQ ID NO: 2485025 - RNA, 22 nt, Human
agaauuuagggagaaauguugu

SEQ ID NO: 2485026 - RNA, 19 nt, Human
agaauuuagggagaaaugu

SEQ ID NO: 2485027 - RNA, 14 nt, Human
agaauuuagggaga

SEQ ID NO: 2485028 - RNA, 14 nt, Human
agaauuuauucaau

SEQ ID NO: 2485029 - RNA, 13 nt, Human
agaauuuauucaa

SEQ ID NO: 2485030 - RNA, 15 nt, Human
agaauuuagguuuuu

SEQ ID NO: 2485031 - RNA, 21 nt, Human
agaauuuaucacacuucugug

SEQ ID NO: 2485032 - RNA, 13 nt, Human
ucuguuuccuuuu

SEQ ID NO: 2485033 - RNA, 18 nt, Human
ucuguuucucuuuccuug

SEQ ID NO: 2485034 - RNA, 14 nt, Human
ucuguuugacaaac

SEQ ID NO: 2485035 - RNA, 16 nt, Human
ucuguuucucuuuccu

SEQ ID NO: 2485036 - RNA, 18 nt, Human
ucuguuuuauaauuuugu

SEQ ID NO: 2485037 - RNA, 18 nt, Human
agaauugugucugcagga

SEQ ID NO: 2485038 - RNA, 17 nt, Human
agaauugugucugcagg

SEQ ID NO: 2485039 - RNA, 16 nt, Human
agaauugugucugcag

SEQ ID NO: 2485040 - RNA, 15 nt, Human
agaauugugucugca

SEQ ID NO: 2485041 - RNA, 15 nt, Human
agaauuguaucauuu

SEQ ID NO: 2485042 - RNA, 22 nt, Human
agaauuggcugaacucaugaga

SEQ ID NO: 2485043 - RNA, 21 nt, Human
agaauuggcugaacucaugag

SEQ ID NO: 2485044 - RNA, 18 nt, Human
agaauuggcugaacucau

SEQ ID NO: 2485045 - RNA, 20 nt, Human
agaauugucuuucugucucu

SEQ ID NO: 2485046 - RNA, 21 nt, Human
agaauuggagaguaaaaacug

SEQ ID NO: 2485047 - RNA, 18 nt, Human
ucuguuuuagguuaaaaa

SEQ ID NO: 2485048 - RNA, 22 nt, Human
agaauugcugauucuugaguuu

SEQ ID NO: 2485049 - RNA, 18 nt, Human
ucuggucuccucagccuc

SEQ ID NO: 2485050 - RNA, 17 nt, Human
ucuggucuccucagccu

SEQ ID NO: 2485051 - RNA, 20 nt, Human
ucuguagagggcccuggugu

SEQ ID NO: 2485052 - RNA, 19 nt, Human
ucuguagagggcccuggug

SEQ ID NO: 2485053 - RNA, 18 nt, Human
ucuguagagggcccuggu

SEQ ID NO: 2485054 - RNA, 17 nt, Human
ucuguagagggcccugg

SEQ ID NO: 2485055 - RNA, 22 nt, Human
ucuguagaaaugguuguauuag

SEQ ID NO: 2485056 - RNA, 16 nt, Human
ucuguagagggcccug

SEQ ID NO: 2485057 - RNA, 16 nt, Human
ucuguagggcuggacc

SEQ ID NO: 2485058 - RNA, 15 nt, Human
ucuguagggcuggac

SEQ ID NO: 2485059 - RNA, 20 nt, Human
ucuguaggguaauuaguaac

SEQ ID NO: 2485060 - RNA, 22 nt, Human
ucuguagggauuuuuggcuaca

SEQ ID NO: 2485061 - RNA, 14 nt, Human
ucuguagggcugga

SEQ ID NO: 2485062 - RNA, 23 nt, Human
ucuguagcuccucaacucaccua

SEQ ID NO: 2485063 - RNA, 23 nt, Human
ucuguagauucuguggaacaagc

SEQ ID NO: 2485064 - RNA, 19 nt, Human
ucuguagauucuguggaac

SEQ ID NO: 2485065 - RNA, 16 nt, Human
ucuguagauucugugg

SEQ ID NO: 2485066 - RNA, 19 nt, Human
ucuguagggaacucugggg

SEQ ID NO: 2485067 - RNA, 13 nt, Human
ucuguagcuccuc

SEQ ID NO: 2485068 - RNA, 14 nt, Human
ucuguagcuccuca

SEQ ID NO: 2485069 - RNA, 22 nt, Human
ucuguauaaguaagaaaauauu

SEQ ID NO: 2485070 - RNA, 18 nt, Human
ucuguauaaguaagaaaa

SEQ ID NO: 2485071 - RNA, 17 nt, Human
ucuguauaaguaagaaa

SEQ ID NO: 2485072 - RNA, 16 nt, Human
ucuguauaaguaagaa

SEQ ID NO: 2485073 - RNA, 23 nt, Human
ucuguauaaagccuguauucuca

SEQ ID NO: 2485074 - RNA, 15 nt, Human
ucuguauacaacccu

SEQ ID NO: 2485075 - RNA, 21 nt, Human
ucuguauaaguaagaaaauau

SEQ ID NO: 2485076 - RNA, 14 nt, Human
ucuguauacugugg

SEQ ID NO: 2485077 - RNA, 17 nt, Human
ucuguagggcuggaccu

SEQ ID NO: 2485078 - RNA, 23 nt, Human
ucuguaguuuuaucacauguaug

SEQ ID NO: 2485079 - RNA, 22 nt, Human
ucuguaguuuuaucacauguau

SEQ ID NO: 2485080 - RNA, 21 nt, Human
ucuguaguuuuaucacaugua

SEQ ID NO: 2485081 - RNA, 17 nt, Human
ucuguagugagauagca

SEQ ID NO: 2485082 - RNA, 14 nt, Human
ucuguagugagaua

SEQ ID NO: 2485083 - RNA, 15 nt, Human
ucuguauauaaaaua

SEQ ID NO: 2485084 - RNA, 14 nt, Human
ucuguauauaaaau

SEQ ID NO: 2485085 - RNA, 22 nt, Human
ucuguauauaaaauauuuucau

SEQ ID NO: 2485086 - RNA, 21 nt, Human
ucugucagcgcagguuuaguu

SEQ ID NO: 2485087 - RNA, 17 nt, Human
ucugucaggagagcagc

SEQ ID NO: 2485088 - RNA, 16 nt, Human
ucugucaggagagcag

SEQ ID NO: 2485089 - RNA, 13 nt, Human
ucugucagucaca

SEQ ID NO: 2485090 - RNA, 17 nt, Human
ucugucagucacagcca

SEQ ID NO: 2485091 - RNA, 19 nt, Human
ucugucagucacagccacc

SEQ ID NO: 2485092 - RNA, 15 nt, Human
ucugucauuugagca

SEQ ID NO: 2485093 - RNA, 23 nt, Human
ucuguccaaaggaggcuggcagg

SEQ ID NO: 2485094 - RNA, 19 nt, Human
ucuguccaaaggaggcugg

SEQ ID NO: 2485095 - RNA, 22 nt, Human
ucuguccaaaggaggcuggcag

SEQ ID NO: 2485096 - RNA, 22 nt, Human
ucugucaugaacauguuccuga

SEQ ID NO: 2485097 - RNA, 15 nt, Human
ucuguccaaaggagg

SEQ ID NO: 2485098 - RNA, 16 nt, Human
ucuguccaaaggaggc

SEQ ID NO: 2485099 - RNA, 17 nt, Human
ucuguccaaaggaggcu

SEQ ID NO: 2485100 - RNA, 23 nt, Human
ucugucauuugagcagggcucag

SEQ ID NO: 2485101 - RNA, 20 nt, Human
ucugucauuugagcagggcu

SEQ ID NO: 2485102 - RNA, 16 nt, Human
ucuggguucacugcaa

SEQ ID NO: 2485103 - RNA, 14 nt, Human
ucuggguucacugc

SEQ ID NO: 2485104 - RNA, 11 nt, Human
ucuggggcugu

SEQ ID NO: 2485105 - RNA, 18 nt, Human
ucugggugcucccuacca

SEQ ID NO: 2485106 - RNA, 16 nt, Human
ucuggggccacacaga

SEQ ID NO: 2485107 - RNA, 16 nt, Human
ucuggggcucugggau

SEQ ID NO: 2485108 - RNA, 18 nt, Human
ucugguccauagagagca

SEQ ID NO: 2485109 - RNA, 16 nt, Human
ucuggguuccuuccuc

SEQ ID NO: 2485110 - RNA, 13 nt, Human
ucuggguggccuc

SEQ ID NO: 2485111 - RNA, 17 nt, Human
ucuggucgcuccugccc

SEQ ID NO: 2485112 - RNA, 15 nt, Human
ucuggucgcuccugc

SEQ ID NO: 2485113 - RNA, 14 nt, Human
ucugguccuaccca

SEQ ID NO: 2485114 - RNA, 18 nt, Human
ucugguccggacacuccu

SEQ ID NO: 2485115 - RNA, 13 nt, Human
ucugguccuaccc

SEQ ID NO: 2485116 - RNA, 21 nt, Human
ucuggucaaccuccuggacau

SEQ ID NO: 2485117 - RNA, 17 nt, Human
ucuggucaaccuccugg

SEQ ID NO: 2485118 - RNA, 13 nt, Human
ucuggucccuugc

SEQ ID NO: 2485119 - RNA, 14 nt, Human
ucuggucccuugca

SEQ ID NO: 2485120 - RNA, 13 nt, Human
agaaggaagggca

SEQ ID NO: 2485121 - RNA, 17 nt, Human
agaaggaagugaagagg

SEQ ID NO: 2485122 - RNA, 15 nt, Human
ucuggggcucuggga

SEQ ID NO: 2485123 - RNA, 13 nt, Human
ucuggggccccuu

SEQ ID NO: 2485124 - RNA, 15 nt, Human
ucuggggcaggguua

SEQ ID NO: 2485125 - RNA, 22 nt, Human
agaaggaaggagacucaccucu

SEQ ID NO: 2485126 - RNA, 19 nt, Human
agaaggaaaaugaucugag

SEQ ID NO: 2485127 - RNA, 18 nt, Human
agaaggaaaaauguguaa

SEQ ID NO: 2485128 - RNA, 9 nt, Human
agaaggaag

SEQ ID NO: 2485129 - RNA, 17 nt, Human
agaaggaaauugagauu

SEQ ID NO: 2485130 - RNA, 16 nt, Human
agaagcuuaggcaggg

SEQ ID NO: 2485131 - RNA, 15 nt, Human
agaagcuuaggcagg

SEQ ID NO: 2485132 - RNA, 13 nt, Human
agaagcuuaggca

SEQ ID NO: 2485133 - RNA, 23 nt, Human
agaagcuguuguacauuuaugau

SEQ ID NO: 2485134 - RNA, 18 nt, Human
agaagcuuccauuccaag

SEQ ID NO: 2485135 - RNA, 16 nt, Human
agaagcuucagaaguu

SEQ ID NO: 2485136 - RNA, 17 nt, Human
agaagcuuaggcagggc

SEQ ID NO: 2485137 - RNA, 17 nt, Human
agaagcuucagaaguuu

SEQ ID NO: 2485138 - RNA, 22 nt, Human
agaagcuuuugaauaaaaacuu

SEQ ID NO: 2485139 - RNA, 17 nt, Human
agaaggaaaaaugugua

SEQ ID NO: 2485140 - RNA, 16 nt, Human
agaaggaaaaaugugu

SEQ ID NO: 2485141 - RNA, 16 nt, Human
agaaggaaaaggcagg

SEQ ID NO: 2485142 - RNA, 18 nt, Human
agaaauuuaaaagacacu

SEQ ID NO: 2485143 - RNA, 22 nt, Human
agaaauuuuuauuuuucuaagg

SEQ ID NO: 2485144 - RNA, 13 nt, Human
agaaauuuuuauu

SEQ ID NO: 2485145 - RNA, 20 nt, Human
agaaauuugauuucuauuca

SEQ ID NO: 2485146 - RNA, 17 nt, Human
agaaauuuaauucaugu

SEQ ID NO: 2485147 - RNA, 21 nt, Human
agaaauuuaauucauguuucu

SEQ ID NO: 2485148 - RNA, 22 nt, Human
agaaauuuaauucauguuucuu

SEQ ID NO: 2485149 - RNA, 16 nt, Human
agaaccuagaagggcu

SEQ ID NO: 2485150 - RNA, 21 nt, Human
agaaccgagcaaagaucaaaa

SEQ ID NO: 2485151 - RNA, 20 nt, Human
agaaccgagcaaagaucaaa

SEQ ID NO: 2485152 - RNA, 22 nt, Human
agaaccgagcaaagaucaaaau

SEQ ID NO: 2485153 - RNA, 18 nt, Human
agaaccgagcaaagauca

SEQ ID NO: 2485154 - RNA, 16 nt, Human
agaacaaagugagaca

SEQ ID NO: 2485155 - RNA, 22 nt, Human
agaacaaaggacagaguaugaa

SEQ ID NO: 2485156 - RNA, 21 nt, Human
agaacaaaggacagaguauga

SEQ ID NO: 2485157 - RNA, 14 nt, Human
agaacaaaggacag

SEQ ID NO: 2485158 - RNA, 21 nt, Human
agaacaaaaaaaucugcagaa

SEQ ID NO: 2485159 - RNA, 23 nt, Human
agaacaaaaaaaucugcagaagg

SEQ ID NO: 2485160 - RNA, 17 nt, Human
agaaauuuuucagaugc

SEQ ID NO: 2485161 - RNA, 18 nt, Human
agaaauuuuucagaugcu

SEQ ID NO: 2485162 - RNA, 21 nt, Human
agaaauuuuucagaugcuucu

SEQ ID NO: 2485163 - RNA, 22 nt, Human
agaaauuuuucagaugcuucug

SEQ ID NO: 2485164 - RNA, 20 nt, Human
agaacaaaaaaaucugcaga

SEQ ID NO: 2485165 - RNA, 19 nt, Human
agaacaaaaaaaucugcag

SEQ ID NO: 2485166 - RNA, 10 nt, Human
agaacaaaaa

SEQ ID NO: 2485167 - RNA, 23 nt, Human
agaaauuuuucagaugcuucugg

SEQ ID NO: 2485168 - RNA, 22 nt, Human
agaaauuggaacagaauguuuu

SEQ ID NO: 2485169 - RNA, 15 nt, Human
agaaauuggcuggau

SEQ ID NO: 2485170 - RNA, 19 nt, Human
agaaauuggaacagaaugu

SEQ ID NO: 2485171 - RNA, 14 nt, Human
agaaauuggcugga

SEQ ID NO: 2485172 - RNA, 20 nt, Human
agaaaugucuaaaugcugaa

SEQ ID NO: 2485173 - RNA, 16 nt, Human
agaaauguuguucauu

SEQ ID NO: 2485174 - RNA, 11 nt, Human
agaaauguguu

SEQ ID NO: 2485175 - RNA, 12 nt, Human
ucugcagagcag

SEQ ID NO: 2485176 - RNA, 17 nt, Human
agaaauguacagcaagg

SEQ ID NO: 2485177 - RNA, 16 nt, Human
agaaauguacagcaag

SEQ ID NO: 2485178 - RNA, 22 nt, Human
ucugcagaaggaaaaaugugua

SEQ ID NO: 2485179 - RNA, 21 nt, Human
ucugcagaaggaaaaaugugu

SEQ ID NO: 2485180 - RNA, 15 nt, Human
ucugcagaaggaaaa

SEQ ID NO: 2485181 - RNA, 13 nt, Human
ucugcagaaggaa

SEQ ID NO: 2485182 - RNA, 23 nt, Human
ucugcagaaggaaaaauguguaa

SEQ ID NO: 2485183 - RNA, 22 nt, Human
ucugcacugagcagagucuugc

SEQ ID NO: 2485184 - RNA, 15 nt, Human
ucugcacugagcaga

SEQ ID NO: 2485185 - RNA, 10 nt, Human
ucugcagaag

SEQ ID NO: 2485186 - RNA, 15 nt, Human
ucugcagaaacagaa

SEQ ID NO: 2485187 - RNA, 19 nt, Human
agaacggggcucuucucau

SEQ ID NO: 2485188 - RNA, 17 nt, Human
agaacggggcucuucuc

SEQ ID NO: 2485189 - RNA, 15 nt, Human
agaaccucuucccca

SEQ ID NO: 2485190 - RNA, 22 nt, Human
agaaccucacgcaccucccauc

SEQ ID NO: 2485191 - RNA, 21 nt, Human
agaacggagccccaggccucu

SEQ ID NO: 2485192 - RNA, 21 nt, Human
agaacggggcucuucucauuu

SEQ ID NO: 2485193 - RNA, 20 nt, Human
agaacggggcucuucucauu

SEQ ID NO: 2485194 - RNA, 18 nt, Human
agaacguggcucugcugg

SEQ ID NO: 2485195 - RNA, 17 nt, Human
agaacguggcucugcug

SEQ ID NO: 2485196 - RNA, 22 nt, Human
agaacguauugguccagcuugc

SEQ ID NO: 2485197 - RNA, 13 nt, Human
agaaccucuuccc

SEQ ID NO: 2485198 - RNA, 14 nt, Human
agaaccucuucccc

SEQ ID NO: 2485199 - RNA, 18 nt, Human
agaaccucacgcaccucc

SEQ ID NO: 2485200 - RNA, 21 nt, Human
agaaccucacgcaccucccau

SEQ ID NO: 2485201 - RNA, 12 nt, Human
agaaccucaggc

SEQ ID NO: 2485202 - RNA, 19 nt, Human
agaaccucaggcuuccuug

SEQ ID NO: 2485203 - RNA, 21 nt, Human
agaaccucaggcuuccuuggc

SEQ ID NO: 2485204 - RNA, 18 nt, Human
agaacuacaaacaaaauu

SEQ ID NO: 2485205 - RNA, 22 nt, Human
agaacuaacacuauuuuaugca

SEQ ID NO: 2485206 - RNA, 16 nt, Human
agaacuaaacucauuu

SEQ ID NO: 2485207 - RNA, 18 nt, Human
agaacuaaacucauuuau

SEQ ID NO: 2485208 - RNA, 19 nt, Human
agaacguggcucugcuggc

SEQ ID NO: 2485209 - RNA, 12 nt, Human
agaacuaaacuc

SEQ ID NO: 2485210 - RNA, 23 nt, Human
agaacuacaaacaaaauuucuau

SEQ ID NO: 2485211 - RNA, 22 nt, Human
agaacuacaaacaaaauuucua

SEQ ID NO: 2485212 - RNA, 19 nt, Human
agaacucacuggggccuac

SEQ ID NO: 2485213 - RNA, 17 nt, Human
agaacucaguuuuaacu

SEQ ID NO: 2485214 - RNA, 23 nt, Human
agaacucaucccuaaugcugcag

SEQ ID NO: 2485215 - RNA, 21 nt, Human
agaacucaugacggaagaguu

SEQ ID NO: 2485216 - RNA, 14 nt, Human
agaacucugggcug

SEQ ID NO: 2485217 - RNA, 23 nt, Human
agaacucuccaucuuauuuucau

SEQ ID NO: 2485218 - RNA, 14 nt, Human
agaacucccuuuca

SEQ ID NO: 2485219 - RNA, 23 nt, Human
agaacugaaccggcuuuaccaaa

SEQ ID NO: 2485220 - RNA, 21 nt, Human
agaacugaaccggcuuuacca

SEQ ID NO: 2485221 - RNA, 14 nt, Human
agaacucuuucaaa

SEQ ID NO: 2485222 - RNA, 20 nt, Human
agaacucugggcugccaugu

SEQ ID NO: 2485223 - RNA, 20 nt, Human
agaacucugggcugcuaccc

SEQ ID NO: 2485224 - RNA, 23 nt, Human
agaagaaaacaucuauucucucc

SEQ ID NO: 2485225 - RNA, 15 nt, Human
agaagaaaacaucua

SEQ ID NO: 2485226 - RNA, 22 nt, Human
ucugcacuccccugcugggugu

SEQ ID NO: 2485227 - RNA, 21 nt, Human
ucugcacucuaacccuaggca

SEQ ID NO: 2485228 - RNA, 22 nt, Human
ucugauauuccaugaauguauc

SEQ ID NO: 2485229 - RNA, 21 nt, Human
ucugauucccaagcucugcuc

SEQ ID NO: 2485230 - RNA, 20 nt, Human
ucugauucccaagcucugcu

SEQ ID NO: 2485231 - RNA, 19 nt, Human
ucugauucccaagcucugc

SEQ ID NO: 2485232 - RNA, 16 nt, Human
ucugauacccagagca

SEQ ID NO: 2485233 - RNA, 14 nt, Human
ucugauacccagag

SEQ ID NO: 2485234 - RNA, 23 nt, Human
ucugauaggaaugugaaagcacg

SEQ ID NO: 2485235 - RNA, 15 nt, Human
ucugauaggccaagu

SEQ ID NO: 2485236 - RNA, 17 nt, Human
ucugauauuccaugaau

SEQ ID NO: 2485237 - RNA, 19 nt, Human
ucugauauuccaugaaugu

SEQ ID NO: 2485238 - RNA, 20 nt, Human
ucugauauuccaugaaugua

SEQ ID NO: 2485239 - RNA, 19 nt, Human
ucugaggggcaacugaguc

SEQ ID NO: 2485240 - RNA, 17 nt, Human
ucugagggaggaggcca

SEQ ID NO: 2485241 - RNA, 13 nt, Human
ucugagggaggag

SEQ ID NO: 2485242 - RNA, 19 nt, Human
ucugaggcuuccagagagu

SEQ ID NO: 2485243 - RNA, 16 nt, Human
ucugaggcuuccagag

SEQ ID NO: 2485244 - RNA, 15 nt, Human
ucugaggcuuccaga

SEQ ID NO: 2485245 - RNA, 14 nt, Human
ucugaggcuuccag

SEQ ID NO: 2485246 - RNA, 22 nt, Human
ucugagggaggaggccaccucu

SEQ ID NO: 2485247 - RNA, 21 nt, Human
ucugagggaggaggccaccuc

SEQ ID NO: 2485248 - RNA, 20 nt, Human
ucugagggaggaggccaccu

SEQ ID NO: 2485249 - RNA, 18 nt, Human
ucugagggaggaggccac

SEQ ID NO: 2485250 - RNA, 15 nt, Human
ucugagggcuuccuu

SEQ ID NO: 2485251 - RNA, 23 nt, Human
ucugagggaggaggccaccucuc

SEQ ID NO: 2485252 - RNA, 18 nt, Human
ucugagggcuuccuuugg

SEQ ID NO: 2485253 - RNA, 21 nt, Human
ucugagaaagacuauucaaac

SEQ ID NO: 2485254 - RNA, 22 nt, Human
ucugagaaagacuauucaaaca

SEQ ID NO: 2485255 - RNA, 23 nt, Human
ucugagaaagacuauucaaacag

SEQ ID NO: 2485256 - RNA, 22 nt, Human
ucugagaaaagcuuugaacccu

SEQ ID NO: 2485257 - RNA, 12 nt, Human
ucugaggcugua

SEQ ID NO: 2485258 - RNA, 11 nt, Human
ucugaggcugu

SEQ ID NO: 2485259 - RNA, 14 nt, Human
ucugagaaagacua

SEQ ID NO: 2485260 - RNA, 15 nt, Human
ucugagaaagacuau

SEQ ID NO: 2485261 - RNA, 19 nt, Human
ucugagaaagacuauucaa

SEQ ID NO: 2485262 - RNA, 20 nt, Human
ucugagaaagacuauucaaa

SEQ ID NO: 2485263 - RNA, 17 nt, Human
ucugacuucugccugga

SEQ ID NO: 2485264 - RNA, 16 nt, Human
ucugacuucugccugg

SEQ ID NO: 2485265 - RNA, 15 nt, Human
ucugacuucugccug

SEQ ID NO: 2485266 - RNA, 14 nt, Human
ucugacuucugccu

SEQ ID NO: 2485267 - RNA, 20 nt, Human
ucugacuucugccuggagac

SEQ ID NO: 2485268 - RNA, 19 nt, Human
ucugacuucugccuggaga

SEQ ID NO: 2485269 - RNA, 16 nt, Human
agaaacucuacauaau

SEQ ID NO: 2485270 - RNA, 21 nt, Human
ucugacuguuuccaucaaggg

SEQ ID NO: 2485271 - RNA, 20 nt, Human
ucugacuuaagcugccucaa

SEQ ID NO: 2485272 - RNA, 12 nt, Human
ucugacuucugc

SEQ ID NO: 2485273 - RNA, 14 nt, Human
ucugaccugcaggc

SEQ ID NO: 2485274 - RNA, 18 nt, Human
ucugaccucuuggccaca

SEQ ID NO: 2485275 - RNA, 19 nt, Human
agaaagacuauucaaacag

SEQ ID NO: 2485276 - RNA, 18 nt, Human
agaaagacuauucaaaca

SEQ ID NO: 2485277 - RNA, 20 nt, Human
agaaagacuauucaaacagu

SEQ ID NO: 2485278 - RNA, 23 nt, Human
agaaagacuauucaaacagucuc

SEQ ID NO: 2485279 - RNA, 14 nt, Human
ucugaccuccauga

SEQ ID NO: 2485280 - RNA, 16 nt, Human
ucugaccucuuggcca

SEQ ID NO: 2485281 - RNA, 18 nt, Human
ucugaccugcacugggga

SEQ ID NO: 2485282 - RNA, 12 nt, Human
ucugaccugcag

SEQ ID NO: 2485283 - RNA, 17 nt, Human
ucugaccccuccucacu

SEQ ID NO: 2485284 - RNA, 16 nt, Human
ucugaccccuccucac

SEQ ID NO: 2485285 - RNA, 18 nt, Human
ucugaccccuccucacug

SEQ ID NO: 2485286 - RNA, 16 nt, Human
ucugacccucucccca

SEQ ID NO: 2485287 - RNA, 14 nt, Human
ucugacccucucca

SEQ ID NO: 2485288 - RNA, 23 nt, Human
ucugacccuuacagccucugacu

SEQ ID NO: 2485289 - RNA, 21 nt, Human
ucugaccgaaacagcgcuggg

SEQ ID NO: 2485290 - RNA, 19 nt, Human
ucugacccugcuucaaaua

SEQ ID NO: 2485291 - RNA, 13 nt, Human
agaaagaagagac

SEQ ID NO: 2485292 - RNA, 18 nt, Human
agaaagaaggaagugaag

SEQ ID NO: 2485293 - RNA, 15 nt, Human
ucugaccccuccuca

SEQ ID NO: 2485294 - RNA, 13 nt, Human
ucugaccccuccu

SEQ ID NO: 2485295 - RNA, 18 nt, Human
ucuggcaguucuggaaug

SEQ ID NO: 2485296 - RNA, 21 nt, Human
ucuggcagccucccauccagg

SEQ ID NO: 2485297 - RNA, 11 nt, Human
ucuggccaggc

SEQ ID NO: 2485298 - RNA, 18 nt, Human
ucuggcauuagaauuauu

SEQ ID NO: 2485299 - RNA, 19 nt, Human
ucuggccaggauggagggg

SEQ ID NO: 2485300 - RNA, 11 nt, Human
ucuggcccuau

SEQ ID NO: 2485301 - RNA, 19 nt, Human
ucuggcccucaccccugcc

SEQ ID NO: 2485302 - RNA, 23 nt, Human
ucuggcccucaccccugcccugg

SEQ ID NO: 2485303 - RNA, 21 nt, Human
ucuggcccucuaccccugauc

SEQ ID NO: 2485304 - RNA, 13 nt, Human
ucuggcccugccu

SEQ ID NO: 2485305 - RNA, 16 nt, Human
agaagccuguuuuguu

SEQ ID NO: 2485306 - RNA, 21 nt, Human
agaagccugaugcugacauuc

SEQ ID NO: 2485307 - RNA, 14 nt, Human
ucuggcccugccuu

SEQ ID NO: 2485308 - RNA, 15 nt, Human
ucuggcccugccuuc

SEQ ID NO: 2485309 - RNA, 16 nt, Human
ucuggcccugccuucu

SEQ ID NO: 2485310 - RNA, 22 nt, Human
agaagcuguuguacauuuauga

SEQ ID NO: 2485311 - RNA, 21 nt, Human
agaagcuguuguacauuuaug

SEQ ID NO: 2485312 - RNA, 20 nt, Human
agaagcuguuguacauuuau

SEQ ID NO: 2485313 - RNA, 19 nt, Human
agaagcuguuguacauuua

SEQ ID NO: 2485314 - RNA, 18 nt, Human
agaagcuguuguacauuu

SEQ ID NO: 2485315 - RNA, 16 nt, Human
agaagcuguuguacau

SEQ ID NO: 2485316 - RNA, 14 nt, Human
agaagcuguuguac

SEQ ID NO: 2485317 - RNA, 13 nt, Human
agaagcuguagua

SEQ ID NO: 2485318 - RNA, 16 nt, Human
agaagcuggaggacua

SEQ ID NO: 2485319 - RNA, 13 nt, Human
agaagcuggagga

SEQ ID NO: 2485320 - RNA, 17 nt, Human
agaagcugcucuggaau

SEQ ID NO: 2485321 - RNA, 14 nt, Human
agaagcuccaggua

SEQ ID NO: 2485322 - RNA, 15 nt, Human
agaagcugagcacca

SEQ ID NO: 2485323 - RNA, 20 nt, Human
agaagcugagcaccagggga

SEQ ID NO: 2485324 - RNA, 15 nt, Human
agaagcggcuggcag

SEQ ID NO: 2485325 - RNA, 16 nt, Human
agaagcggcuggcagc

SEQ ID NO: 2485326 - RNA, 18 nt, Human
agaagcuaaaaccugagc

SEQ ID NO: 2485327 - RNA, 19 nt, Human
agaagcgugagacgccacc

SEQ ID NO: 2485328 - RNA, 23 nt, Human
agaagcgggacgagacccuacag

SEQ ID NO: 2485329 - RNA, 19 nt, Human
agaagccuuugggaagggg

SEQ ID NO: 2485330 - RNA, 14 nt, Human
agaagcgagcacug

SEQ ID NO: 2485331 - RNA, 21 nt, Human
agaagcuauaaauuccucuuu

SEQ ID NO: 2485332 - RNA, 20 nt, Human
agaagcuauaaauuccucuu

SEQ ID NO: 2485333 - RNA, 16 nt, Human
ucuggcagccucccau

SEQ ID NO: 2485334 - RNA, 15 nt, Human
ucuggcagcucagag

SEQ ID NO: 2485335 - RNA, 14 nt, Human
ucuggcagcucaga

SEQ ID NO: 2485336 - RNA, 18 nt, Human
ucuggauuauauuaugaa

SEQ ID NO: 2485337 - RNA, 12 nt, Human
ucuggauuauau

SEQ ID NO: 2485338 - RNA, 19 nt, Human
ucuggauggcaccagaggc

SEQ ID NO: 2485339 - RNA, 18 nt, Human
ucuggauggcaccagagg

SEQ ID NO: 2485340 - RNA, 22 nt, Human
ucuggaugccugauugccaagc

SEQ ID NO: 2485341 - RNA, 18 nt, Human
ucuggaugcauuucucug

SEQ ID NO: 2485342 - RNA, 17 nt, Human
ucuggaugcauuucucu

SEQ ID NO: 2485343 - RNA, 14 nt, Human
ucuggaucugggac

SEQ ID NO: 2485344 - RNA, 21 nt, Human
ucuggauaggagccugcuggu

SEQ ID NO: 2485345 - RNA, 20 nt, Human
ucuggauaggagccugcugg

SEQ ID NO: 2485346 - RNA, 16 nt, Human
ucuggauaggagccug

SEQ ID NO: 2485347 - RNA, 14 nt, Human
ucuggauaggagcc

SEQ ID NO: 2485348 - RNA, 19 nt, Human
ucuggagucuccagugguu

SEQ ID NO: 2485349 - RNA, 20 nt, Human
ucuggagguugauaacuuug

SEQ ID NO: 2485350 - RNA, 21 nt, Human
ucuggagucucacuugucuca

SEQ ID NO: 2485351 - RNA, 14 nt, Human
ucuggaguggccac

SEQ ID NO: 2485352 - RNA, 15 nt, Human
ucuggaguggccacu

SEQ ID NO: 2485353 - RNA, 19 nt, Human
ucuggaguggccacuaagc

SEQ ID NO: 2485354 - RNA, 16 nt, Human
ucuggaguugaucugg

SEQ ID NO: 2485355 - RNA, 17 nt, Human
ucuggaguugaucugga

SEQ ID NO: 2485356 - RNA, 24 nt, Human
ucuggaguuuuuguuuggagagca

SEQ ID NO: 2485357 - RNA, 22 nt, Human
ucuggaguuuuuguuuggagag

SEQ ID NO: 2485358 - RNA, 21 nt, Human
ucuggaguugaucuggaaccc

SEQ ID NO: 2485359 - RNA, 22 nt, Human
ucuggaacccagacucagacau

SEQ ID NO: 2485360 - RNA, 23 nt, Human
ucuggaacccagacucagacauu

SEQ ID NO: 2485361 - RNA, 15 nt, Human
ucuggaaccucagcc

SEQ ID NO: 2485362 - RNA, 19 nt, Human
ucuggagguugauaacuuu

SEQ ID NO: 2485363 - RNA, 17 nt, Human
ucuggagguugauaacu

SEQ ID NO: 2485364 - RNA, 17 nt, Human
ucuggaguauucuauaa

SEQ ID NO: 2485365 - RNA, 18 nt, Human
ucuggagguacgaaaaga

SEQ ID NO: 2485366 - RNA, 23 nt, Human
ucugcuuuuuaaagaaugcucuu

SEQ ID NO: 2485367 - RNA, 20 nt, Human
ucugcuugagucagguuuga

SEQ ID NO: 2485368 - RNA, 18 nt, Human
ucuggaaaaugugaccca

SEQ ID NO: 2485369 - RNA, 15 nt, Human
ucuggaacccagacu

SEQ ID NO: 2485370 - RNA, 16 nt, Human
ucuggaacccagacuc

SEQ ID NO: 2485371 - RNA, 17 nt, Human
ucuggaacccagacuca

SEQ ID NO: 2485372 - RNA, 18 nt, Human
ucuggaacccagacucag

SEQ ID NO: 2485373 - RNA, 13 nt, Human
ucuggaacccaga

SEQ ID NO: 2485374 - RNA, 14 nt, Human
ucuggaacccagac

SEQ ID NO: 2485375 - RNA, 19 nt, Human
ucuggaaaggggggagcug

SEQ ID NO: 2485376 - RNA, 13 nt, Human
ucuggaaaagagg

SEQ ID NO: 2485377 - RNA, 18 nt, Human
ucugcuugauuuuugccu

SEQ ID NO: 2485378 - RNA, 12 nt, Human
ucugcuugaguc

SEQ ID NO: 2485379 - RNA, 14 nt, Human
ucugcuugagucag

SEQ ID NO: 2485380 - RNA, 19 nt, Human
ucugcuucucugacuucug

SEQ ID NO: 2485381 - RNA, 16 nt, Human
ucugcuucucugacuu

SEQ ID NO: 2485382 - RNA, 22 nt, Human
ucugcuucucugacuucugccu

SEQ ID NO: 2485383 - RNA, 18 nt, Human
ucugcuugacaacaucug

SEQ ID NO: 2485384 - RNA, 19 nt, Human
ucugcuugacaacaucuga

SEQ ID NO: 2485385 - RNA, 23 nt, Human
ucugcuuacaauucccugcuguc

SEQ ID NO: 2485386 - RNA, 22 nt, Human
ucugcuuacaauucccugcugu

SEQ ID NO: 2485387 - RNA, 21 nt, Human
ucugcuuacaauucccugcug

SEQ ID NO: 2485388 - RNA, 14 nt, Human
ucugcuucucugac

SEQ ID NO: 2485389 - RNA, 17 nt, Human
ucugcuuaggagagacc

SEQ ID NO: 2485390 - RNA, 16 nt, Human
ucugcuuaggagagac

SEQ ID NO: 2485391 - RNA, 21 nt, Human
ucugcuuaugcaguuuuucag

SEQ ID NO: 2485392 - RNA, 14 nt, Human
ucugcucaucauuc

SEQ ID NO: 2485393 - RNA, 15 nt, Human
ucugcucaucauucu

SEQ ID NO: 2485394 - RNA, 18 nt, Human
ucugcucaucauucucug

SEQ ID NO: 2485395 - RNA, 22 nt, Human
ucugcucaucauucucugucuc

SEQ ID NO: 2485396 - RNA, 18 nt, Human
ucugcuguccagacagcc

SEQ ID NO: 2485397 - RNA, 17 nt, Human
ucugcuguccagacagc

SEQ ID NO: 2485398 - RNA, 15 nt, Human
ucugcuguccagaca

SEQ ID NO: 2485399 - RNA, 14 nt, Human
ucugcuguccagac

SEQ ID NO: 2485400 - RNA, 19 nt, Human
ucugcuguccagacagccu

SEQ ID NO: 2485401 - RNA, 21 nt, Human
ucugcuaacuuggagccccag

SEQ ID NO: 2485402 - RNA, 21 nt, Human
ucugcuguccagacagccugu

SEQ ID NO: 2485403 - RNA, 16 nt, Human
ucugcugucucagccu

SEQ ID NO: 2485404 - RNA, 15 nt, Human
ucugcugucucagcc

SEQ ID NO: 2485405 - RNA, 20 nt, Human
ucugcuuacaauucccugcu

SEQ ID NO: 2485406 - RNA, 19 nt, Human
ucugcuuacaauucccugc

SEQ ID NO: 2485407 - RNA, 17 nt, Human
ucugcuuacaauucccu

SEQ ID NO: 2485408 - RNA, 13 nt, Human
ucugccuuuuuua

SEQ ID NO: 2485409 - RNA, 22 nt, Human
ucugccuuuggggacuuuucuu

SEQ ID NO: 2485410 - RNA, 16 nt, Human
ucugccuuccuugcua

SEQ ID NO: 2485411 - RNA, 16 nt, Human
ucugcggaccccagcu

SEQ ID NO: 2485412 - RNA, 15 nt, Human
ucugcggaccccagc

SEQ ID NO: 2485413 - RNA, 14 nt, Human
ucugcggaccccag

SEQ ID NO: 2485414 - RNA, 22 nt, Human
ucugcggaccccagcugugagc

SEQ ID NO: 2485415 - RNA, 17 nt, Human
ucugcggaccccagcug

SEQ ID NO: 2485416 - RNA, 22 nt, Human
ucugcuaacuuggagccccagu

SEQ ID NO: 2485417 - RNA, 22 nt, Human
ucugcuaagcucaaggcgugag

SEQ ID NO: 2485418 - RNA, 16 nt, Human
ucugcucacauaucug

SEQ ID NO: 2485419 - RNA, 17 nt, Human
ucugcuaccucacuggg

SEQ ID NO: 2485420 - RNA, 14 nt, Human
ucugcuaccucacu

SEQ ID NO: 2485421 - RNA, 19 nt, Human
ucugcuacguuccuauugu

SEQ ID NO: 2485422 - RNA, 14 nt, Human
ucugcuaauaaaac

SEQ ID NO: 2485423 - RNA, 21 nt, Human
ucugcuacguuccuauuguca

SEQ ID NO: 2485424 - RNA, 15 nt, Human
ucugcucagcagcua

SEQ ID NO: 2485425 - RNA, 15 nt, Human
ucugcucagcccugg

SEQ ID NO: 2485426 - RNA, 14 nt, Human
ucugcucagcccug

SEQ ID NO: 2485427 - RNA, 13 nt, Human
ucugcucagcccu

SEQ ID NO: 2485428 - RNA, 17 nt, Human
ucugcuauauuuucaug

SEQ ID NO: 2485429 - RNA, 16 nt, Human
ucugcucagcagcuau

SEQ ID NO: 2485430 - RNA, 16 nt, Human
ucugcuaugugacuug

SEQ ID NO: 2485431 - RNA, 19 nt, Human
ucugcucagcccuggaggu

SEQ ID NO: 2485432 - RNA, 18 nt, Human
ucugcucagcccuggagg

SEQ ID NO: 2485433 - RNA, 17 nt, Human
ucugcucagcccuggag

SEQ ID NO: 2485434 - RNA, 16 nt, Human
ucugcucagcccugga

SEQ ID NO: 2485435 - RNA, 14 nt, Human
ucugcucagcucug

SEQ ID NO: 2485436 - RNA, 16 nt, Human
ucugcucagcucuggg

SEQ ID NO: 2485437 - RNA, 22 nt, Human
ucugcucaguaauuugaggaca

SEQ ID NO: 2485438 - RNA, 12 nt, Human
ucugcucaucau

SEQ ID NO: 2485439 - RNA, 14 nt, Human
ucugcucagcuucu

SEQ ID NO: 2485440 - RNA, 15 nt, Human
ucugcucagcuucuc

SEQ ID NO: 2485441 - RNA, 18 nt, Human
ucugcucagcuucuccug

SEQ ID NO: 2485442 - RNA, 23 nt, Human
ucugccgcagcccugcagagggc

SEQ ID NO: 2485443 - RNA, 14 nt, Human
ucugcccuccaaga

SEQ ID NO: 2485444 - RNA, 23 nt, Human
ucugccggcucuuuccuugcuca

SEQ ID NO: 2485445 - RNA, 13 nt, Human
ucugccggcucuu

SEQ ID NO: 2485446 - RNA, 17 nt, Human
ucugccggcccuggggc

SEQ ID NO: 2485447 - RNA, 23 nt, Human
ucugcccgggaaggucaccagca

SEQ ID NO: 2485448 - RNA, 10 nt, Human
ucugcccggg

SEQ ID NO: 2485449 - RNA, 15 nt, Human
ucugccggcccuggg

SEQ ID NO: 2485450 - RNA, 16 nt, Human
ucugccggcccugggg

SEQ ID NO: 2485451 - RNA, 15 nt, Human
ucugccuuccuugcu

SEQ ID NO: 2485452 - RNA, 14 nt, Human
ucugccuuccuugc

SEQ ID NO: 2485453 - RNA, 20 nt, Human
ucugccuucucaugauccaa

SEQ ID NO: 2485454 - RNA, 11 nt, Human
ucugccuuuau

SEQ ID NO: 2485455 - RNA, 18 nt, Human
ucugccuuuauuguguuu

SEQ ID NO: 2485456 - RNA, 16 nt, Human
ucugccuuuauugugu

SEQ ID NO: 2485457 - RNA, 23 nt, Human
ucugccuuuauuguguuugucau

SEQ ID NO: 2485458 - RNA, 20 nt, Human
ucugccuuuauuguguuugu

SEQ ID NO: 2485459 - RNA, 22 nt, Human
ucugccccucuccaggcgccgg

SEQ ID NO: 2485460 - RNA, 18 nt, Human
ucugccccucccugcuuc

SEQ ID NO: 2485461 - RNA, 15 nt, Human
ucugccccucccugc

SEQ ID NO: 2485462 - RNA, 13 nt, Human
ucugccccucccu

SEQ ID NO: 2485463 - RNA, 12 nt, Human
ucugccccuccc

SEQ ID NO: 2485464 - RNA, 15 nt, Human
ucugccccuccccca

SEQ ID NO: 2485465 - RNA, 16 nt, Human
ucugccccucccccaa

SEQ ID NO: 2485466 - RNA, 18 nt, Human
ucugccccucccccaacc

SEQ ID NO: 2485467 - RNA, 22 nt, Human
ucugccccucccccaaccccca

SEQ ID NO: 2485468 - RNA, 13 nt, Human
ucugccccucccc

SEQ ID NO: 2485469 - RNA, 14 nt, Human
ucugccccuccccc

SEQ ID NO: 2485470 - RNA, 17 nt, Human
agaagaagucagagagg

SEQ ID NO: 2485471 - RNA, 16 nt, Human
agaagaagucagagag

SEQ ID NO: 2485472 - RNA, 21 nt, Human
agaagaaggcagcagguggca

SEQ ID NO: 2485473 - RNA, 20 nt, Human
agaagaacuguguuucaagu

SEQ ID NO: 2485474 - RNA, 21 nt, Human
agaagaacuguguuucaaguu

SEQ ID NO: 2485475 - RNA, 14 nt, Human
agaagaaggcagca

SEQ ID NO: 2485476 - RNA, 13 nt, Human
agaagaaggcagc

SEQ ID NO: 2485477 - RNA, 21 nt, Human
agaagaacuugcauggagcag

SEQ ID NO: 2485478 - RNA, 21 nt, Human
agaagaacugaaaucauacuu

SEQ ID NO: 2485479 - RNA, 13 nt, Human
agaagaaacuagg

SEQ ID NO: 2485480 - RNA, 19 nt, Human
agaagaaaauugcugugcc

SEQ ID NO: 2485481 - RNA, 16 nt, Human
agaagaaaauugcugu

SEQ ID NO: 2485482 - RNA, 18 nt, Human
agaagaaacgucuaugug

SEQ ID NO: 2485483 - RNA, 21 nt, Human
agaaaccaguuaugugaauga

SEQ ID NO: 2485484 - RNA, 13 nt, Human
agaaacccugucu

SEQ ID NO: 2485485 - RNA, 15 nt, Human
agaaacccagacuga

SEQ ID NO: 2485486 - RNA, 16 nt, Human
agaaacccgacagagg

SEQ ID NO: 2485487 - RNA, 18 nt, Human
agaaacccgacagaggga

SEQ ID NO: 2485488 - RNA, 14 nt, Human
agaaaacuucuuuu

SEQ ID NO: 2485489 - RNA, 13 nt, Human
agaaaacauguuu

SEQ ID NO: 2485490 - RNA, 11 nt, Human
agaaaacauug

SEQ ID NO: 2485491 - RNA, 15 nt, Human
agaaaacaugccucu

SEQ ID NO: 2485492 - RNA, 12 nt, Human
agaaaacaucua

SEQ ID NO: 2485493 - RNA, 19 nt, Human
agaaaacauuguuccagau

SEQ ID NO: 2485494 - RNA, 13 nt, Human
agaaaacauuguu

SEQ ID NO: 2485495 - RNA, 12 nt, Human
agaaaacauugu

SEQ ID NO: 2485496 - RNA, 15 nt, Human
agaaaacauuguucc

SEQ ID NO: 2485497 - RNA, 14 nt, Human
agaaaacccacccc

SEQ ID NO: 2485498 - RNA, 13 nt, Human
agaaaacccaccc

SEQ ID NO: 2485499 - RNA, 16 nt, Human
agaaaacccuuuucua

SEQ ID NO: 2485500 - RNA, 16 nt, Human
agaaaacugaaaaucu

SEQ ID NO: 2485501 - RNA, 15 nt, Human
agaaaacugaaaauc

SEQ ID NO: 2485502 - RNA, 21 nt, Human
agaaaacuccuuuagcaggug

SEQ ID NO: 2485503 - RNA, 20 nt, Human
agaaaacgguuaaaacuguc

SEQ ID NO: 2485504 - RNA, 13 nt, Human
agaaacuggaacu

SEQ ID NO: 2485505 - RNA, 15 nt, Human
agaaacuggaacucu

SEQ ID NO: 2485506 - RNA, 13 nt, Human
agaaacugaggaa

SEQ ID NO: 2485507 - RNA, 16 nt, Human
agaaacugaggaauuu

SEQ ID NO: 2485508 - RNA, 21 nt, Human
agaaacccgacagagggaaga

SEQ ID NO: 2485509 - RNA, 14 nt, Human
agaaacccugucuc

SEQ ID NO: 2485510 - RNA, 18 nt, Human
agaaacugaggaauuuuc

SEQ ID NO: 2485511 - RNA, 15 nt, Human
agaaacugcagggaa

SEQ ID NO: 2485512 - RNA, 16 nt, Human
agaaacugagaccaaa

SEQ ID NO: 2485513 - RNA, 16 nt, Human
agaaagaaaaugaaga

SEQ ID NO: 2485514 - RNA, 20 nt, Human
agaaagaaacccgacagagg

SEQ ID NO: 2485515 - RNA, 22 nt, Human
agaaagaaacccgacagaggga

SEQ ID NO: 2485516 - RNA, 12 nt, Human
agaaagaagccc

SEQ ID NO: 2485517 - RNA, 12 nt, Human
agaaagaaggaa

SEQ ID NO: 2485518 - RNA, 13 nt, Human
agaaagaaggaag

SEQ ID NO: 2485519 - RNA, 14 nt, Human
agaaagaaggaagu

SEQ ID NO: 2485520 - RNA, 12 nt, Human
agaaagaagaga

SEQ ID NO: 2485521 - RNA, 15 nt, Human
agaaagaagaugaau

SEQ ID NO: 2485522 - RNA, 19 nt, Human
agaaaacaaggaugaauua

SEQ ID NO: 2485523 - RNA, 21 nt, Human
agaaaaaucauguuugcucuc

SEQ ID NO: 2485524 - RNA, 23 nt, Human
agaaaacauaaucuucugccuuc

SEQ ID NO: 2485525 - RNA, 15 nt, Human
agaaaacaucacuga

SEQ ID NO: 2485526 - RNA, 12 nt, Human
agaaaacagaaa

SEQ ID NO: 2485527 - RNA, 16 nt, Human
agaaaacagaaaacaa

SEQ ID NO: 2485528 - RNA, 17 nt, Human
agaaaacacuuguaagu

SEQ ID NO: 2485529 - RNA, 14 nt, Human
agaaaaaucauguu

SEQ ID NO: 2485530 - RNA, 17 nt, Human
agaaaaaugagccuggc

SEQ ID NO: 2485531 - RNA, 15 nt, Human
agaaaaauaacccuu

SEQ ID NO: 2485532 - RNA, 19 nt, Human
agaaaaauaugaccacacu

SEQ ID NO: 2485533 - RNA, 18 nt, Human
agaaaaaggaugcacaga

SEQ ID NO: 2485534 - RNA, 19 nt, Human
ucucuuucuucucugcugc

SEQ ID NO: 2485535 - RNA, 13 nt, Human
ucucuugagccug

SEQ ID NO: 2485536 - RNA, 14 nt, Human
ucucuugagccugg

SEQ ID NO: 2485537 - RNA, 13 nt, Human
ucucuucuugaac

SEQ ID NO: 2485538 - RNA, 15 nt, Human
ucucuugagccuggg

SEQ ID NO: 2485539 - RNA, 22 nt, Human
ucucuuuaaugucacaggcagg

SEQ ID NO: 2485540 - RNA, 16 nt, Human
ucucuucuuuuggcuu

SEQ ID NO: 2485541 - RNA, 18 nt, Human
ucucuucuuuuggcuucc

SEQ ID NO: 2485542 - RNA, 14 nt, Human
ucucuuucucuccu

SEQ ID NO: 2485543 - RNA, 19 nt, Human
ucucuuuccuucuugccuu

SEQ ID NO: 2485544 - RNA, 18 nt, Human
ucucuuuccuucuugccu

SEQ ID NO: 2485545 - RNA, 12 nt, Human
ucucuuuccuug

SEQ ID NO: 2485546 - RNA, 23 nt, Human
ucucuuucuccuuagucuucuca

SEQ ID NO: 2485547 - RNA, 16 nt, Human
ucucuuuccuucuugc

SEQ ID NO: 2485548 - RNA, 15 nt, Human
ucucuuucaugaguu

SEQ ID NO: 2485549 - RNA, 13 nt, Human
ucucuccagaugu

SEQ ID NO: 2485550 - RNA, 16 nt, Human
ucucuccagauguuuc

SEQ ID NO: 2485551 - RNA, 15 nt, Human
ucucuccagccccug

SEQ ID NO: 2485552 - RNA, 20 nt, Human
ucucuccuguaccucuugag

SEQ ID NO: 2485553 - RNA, 22 nt, Human
ucucuccuguaccucuugagcc

SEQ ID NO: 2485554 - RNA, 13 nt, Human
ucucugcaucuga

SEQ ID NO: 2485555 - RNA, 21 nt, Human
ucucugcaucuacucccaagu

SEQ ID NO: 2485556 - RNA, 19 nt, Human
ucucugcaucuacucccaa

SEQ ID NO: 2485557 - RNA, 18 nt, Human
ucucugcaucuacuccca

SEQ ID NO: 2485558 - RNA, 22 nt, Human
ucucuccuuucuuuuucuucuu

SEQ ID NO: 2485559 - RNA, 14 nt, Human
ucucuccuuucuuu

SEQ ID NO: 2485560 - RNA, 19 nt, Human
ucucuccuuguucugauaa

SEQ ID NO: 2485561 - RNA, 15 nt, Human
ucucuccuuguucug

SEQ ID NO: 2485562 - RNA, 14 nt, Human
ucucuccuguccaa

SEQ ID NO: 2485563 - RNA, 13 nt, Human
ucucuccugucca

SEQ ID NO: 2485564 - RNA, 14 nt, Human
ucucuccuguacuu

SEQ ID NO: 2485565 - RNA, 17 nt, Human
ucucugcaucugaccac

SEQ ID NO: 2485566 - RNA, 16 nt, Human
ucucugcaucugacca

SEQ ID NO: 2485567 - RNA, 15 nt, Human
ucucugcaucugacc

SEQ ID NO: 2485568 - RNA, 15 nt, Human
ucucugccagugaca

SEQ ID NO: 2485569 - RNA, 14 nt, Human
ucucugccagugac

SEQ ID NO: 2485570 - RNA, 12 nt, Human
ucucugcccaac

SEQ ID NO: 2485571 - RNA, 13 nt, Human
ucucugcccaacc

SEQ ID NO: 2485572 - RNA, 21 nt, Human
ucucugccagugacagacagg

SEQ ID NO: 2485573 - RNA, 14 nt, Human
ucucuccagccccu

SEQ ID NO: 2485574 - RNA, 13 nt, Human
ucucuccagcccc

SEQ ID NO: 2485575 - RNA, 14 nt, Human
ucuccuuccugugu

SEQ ID NO: 2485576 - RNA, 19 nt, Human
ucuccuuccccuuucccca

SEQ ID NO: 2485577 - RNA, 13 nt, Human
ucuccuuccugug

SEQ ID NO: 2485578 - RNA, 20 nt, Human
ucuccuucagcccucacccc

SEQ ID NO: 2485579 - RNA, 19 nt, Human
ucuccuucagcccucaccc

SEQ ID NO: 2485580 - RNA, 15 nt, Human
ucuccuucagcccuc

SEQ ID NO: 2485581 - RNA, 18 nt, Human
ucuccuucaccuuugucc

SEQ ID NO: 2485582 - RNA, 20 nt, Human
ucuccuucaccuuugucccc

SEQ ID NO: 2485583 - RNA, 16 nt, Human
acuuuuuuuugagaau

SEQ ID NO: 2485584 - RNA, 14 nt, Human
agaaaaaaaaagaa

SEQ ID NO: 2485585 - RNA, 15 nt, Human
agaaaaaaaaagaaa

SEQ ID NO: 2485586 - RNA, 22 nt, Human
acuuuuuuuuuccaaaaaaaua

SEQ ID NO: 2485587 - RNA, 16 nt, Human
agaaaaaaaaagaaaa

SEQ ID NO: 2485588 - RNA, 20 nt, Human
agaaaaaaaaaaacuuacac

SEQ ID NO: 2485589 - RNA, 15 nt, Human
acuuuuuuuugagaa

SEQ ID NO: 2485590 - RNA, 17 nt, Human
acuuuuuuuuguauguu

SEQ ID NO: 2485591 - RNA, 22 nt, Human
ucucugcccuaaugcgcaggcu

SEQ ID NO: 2485592 - RNA, 11 nt, Human
ucucugcccua

SEQ ID NO: 2485593 - RNA, 21 nt, Human
ucucugccggcucuuuccuug

SEQ ID NO: 2485594 - RNA, 19 nt, Human
ucucugccggcucuuuccu

SEQ ID NO: 2485595 - RNA, 15 nt, Human
ucucugccggcucuu

SEQ ID NO: 2485596 - RNA, 23 nt, Human
ucucugccucccucacccugagc

SEQ ID NO: 2485597 - RNA, 21 nt, Human
ucucugccucccucacccuga

SEQ ID NO: 2485598 - RNA, 11 nt, Human
ucucugcucca

SEQ ID NO: 2485599 - RNA, 12 nt, Human
ucucugcuccac

SEQ ID NO: 2485600 - RNA, 13 nt, Human
ucucugcuccacc

SEQ ID NO: 2485601 - RNA, 16 nt, Human
ucucuggccuucggcc

SEQ ID NO: 2485602 - RNA, 17 nt, Human
ucucuggccuucggccu

SEQ ID NO: 2485603 - RNA, 13 nt, Human
ucucuggccuucg

SEQ ID NO: 2485604 - RNA, 14 nt, Human
ucucugcuccacca

SEQ ID NO: 2485605 - RNA, 15 nt, Human
ucucugcuccaccac

SEQ ID NO: 2485606 - RNA, 17 nt, Human
ucucugcuccaccacau

SEQ ID NO: 2485607 - RNA, 19 nt, Human
ucucugcuccaccacaucc

SEQ ID NO: 2485608 - RNA, 12 nt, Human
ucucuucuuuaa

SEQ ID NO: 2485609 - RNA, 21 nt, Human
ucucuucuggguuccuuccuc

SEQ ID NO: 2485610 - RNA, 19 nt, Human
ucucuucugcuccacccuu

SEQ ID NO: 2485611 - RNA, 13 nt, Human
ucucuucuuuaaa

SEQ ID NO: 2485612 - RNA, 14 nt, Human
ucucuugagagggu

SEQ ID NO: 2485613 - RNA, 19 nt, Human
ucucuucuggguuccuucc

SEQ ID NO: 2485614 - RNA, 20 nt, Human
ucucuucuggguuccuuccu

SEQ ID NO: 2485615 - RNA, 18 nt, Human
ucucuucuggguuccuuc

SEQ ID NO: 2485616 - RNA, 16 nt, Human
ucucuucugcuccacc

SEQ ID NO: 2485617 - RNA, 17 nt, Human
ucucuucugcuccaccc

SEQ ID NO: 2485618 - RNA, 21 nt, Human
ucucuucugagcuauuucauc

SEQ ID NO: 2485619 - RNA, 22 nt, Human
ucucuucugagcuauuucaucu

SEQ ID NO: 2485620 - RNA, 13 nt, Human
ucucuucugcucc

SEQ ID NO: 2485621 - RNA, 14 nt, Human
ucucuucugcucca

SEQ ID NO: 2485622 - RNA, 18 nt, Human
ucucugcucugcguguca

SEQ ID NO: 2485623 - RNA, 21 nt, Human
ucucugcucugcgugucaccu

SEQ ID NO: 2485624 - RNA, 22 nt, Human
ucucugcucugcgugucaccug

SEQ ID NO: 2485625 - RNA, 23 nt, Human
acuugugucccaugaucccugug

SEQ ID NO: 2485626 - RNA, 14 nt, Human
ucuccucugcugcu

SEQ ID NO: 2485627 - RNA, 13 nt, Human
ucuccucugcugc

SEQ ID NO: 2485628 - RNA, 19 nt, Human
acuuguugauuaauggaaa

SEQ ID NO: 2485629 - RNA, 21 nt, Human
acuuguugauuaauggaaaug

SEQ ID NO: 2485630 - RNA, 16 nt, Human
acuugugucucugugc

SEQ ID NO: 2485631 - RNA, 21 nt, Human
acuugugucucugugcuuuua

SEQ ID NO: 2485632 - RNA, 14 nt, Human
acuugugucucugu

SEQ ID NO: 2485633 - RNA, 22 nt, Human
acuugugucucugugcuuuuaa

SEQ ID NO: 2485634 - RNA, 20 nt, Human
acuugugugugggcugugag

SEQ ID NO: 2485635 - RNA, 21 nt, Human
acuugugugugggcugugagu

SEQ ID NO: 2485636 - RNA, 22 nt, Human
acuugugugugggcugugagug

SEQ ID NO: 2485637 - RNA, 17 nt, Human
acuuguuccagcucuuu

SEQ ID NO: 2485638 - RNA, 21 nt, Human
ucucccuuggauuguccccga

SEQ ID NO: 2485639 - RNA, 19 nt, Human
ucucccuuggauugucccc

SEQ ID NO: 2485640 - RNA, 21 nt, Human
ucuccgccagccuccucugga

SEQ ID NO: 2485641 - RNA, 20 nt, Human
ucuccgccagccuccucugg

SEQ ID NO: 2485642 - RNA, 18 nt, Human
ucuccgccagccuccucu

SEQ ID NO: 2485643 - RNA, 15 nt, Human
ucuccgccagccucc

SEQ ID NO: 2485644 - RNA, 14 nt, Human
ucuccgccagccuc

SEQ ID NO: 2485645 - RNA, 13 nt, Human
ucuccgccagccu

SEQ ID NO: 2485646 - RNA, 17 nt, Human
ucuccgacugcuaggga

SEQ ID NO: 2485647 - RNA, 18 nt, Human
ucucccuucucccaugag

SEQ ID NO: 2485648 - RNA, 19 nt, Human
ucuccguuagcuccugugg

SEQ ID NO: 2485649 - RNA, 18 nt, Human
ucuccguuagcuccugug

SEQ ID NO: 2485650 - RNA, 17 nt, Human
ucuccguuagcuccugu

SEQ ID NO: 2485651 - RNA, 16 nt, Human
ucuccguuagcuccug

SEQ ID NO: 2485652 - RNA, 12 nt, Human
ucuccucugcug

SEQ ID NO: 2485653 - RNA, 13 nt, Human
acuguagggaggg

SEQ ID NO: 2485654 - RNA, 15 nt, Human
acuguaggcacacuu

SEQ ID NO: 2485655 - RNA, 19 nt, Human
acuguaggaagaguagcau

SEQ ID NO: 2485656 - RNA, 17 nt, Human
acuguagccuggauauu

SEQ ID NO: 2485657 - RNA, 22 nt, Human
acuguagccucgccgucuguga

SEQ ID NO: 2485658 - RNA, 20 nt, Human
acuguaggaagaguagcauu

SEQ ID NO: 2485659 - RNA, 13 nt, Human
acuguagucucag

SEQ ID NO: 2485660 - RNA, 15 nt, Human
acuguagucucagga

SEQ ID NO: 2485661 - RNA, 16 nt, Human
acuguagucucaggac

SEQ ID NO: 2485662 - RNA, 18 nt, Human
acuguaguuuuucuucaa

SEQ ID NO: 2485663 - RNA, 20 nt, Human
acuguaguuuuucuucaaca

SEQ ID NO: 2485664 - RNA, 18 nt, Human
acuguauauaaaggaaaa

SEQ ID NO: 2485665 - RNA, 13 nt, Human
acuguauauaaag

SEQ ID NO: 2485666 - RNA, 23 nt, Human
acuguauaaauaggagaggauga

SEQ ID NO: 2485667 - RNA, 22 nt, Human
acuguauaaauaggagaggaug

SEQ ID NO: 2485668 - RNA, 21 nt, Human
acuguauaaauaggagaggau

SEQ ID NO: 2485669 - RNA, 20 nt, Human
acuguauaaauaggagagga

SEQ ID NO: 2485670 - RNA, 17 nt, Human
acuguauaaauaggaga

SEQ ID NO: 2485671 - RNA, 15 nt, Human
acuguauaaauagga

SEQ ID NO: 2485672 - RNA, 14 nt, Human
acuguauaaauagg

SEQ ID NO: 2485673 - RNA, 13 nt, Human
acuguauaaauag

SEQ ID NO: 2485674 - RNA, 12 nt, Human
acuguauaaaua

SEQ ID NO: 2485675 - RNA, 21 nt, Human
acuguaguuuuucuucaacau

SEQ ID NO: 2485676 - RNA, 18 nt, Human
ucucccagucuacccaga

SEQ ID NO: 2485677 - RNA, 19 nt, Human
ucucccagguaccagcugc

SEQ ID NO: 2485678 - RNA, 18 nt, Human
ucucccagguaccagcug

SEQ ID NO: 2485679 - RNA, 17 nt, Human
ucucccagguaccagcu

SEQ ID NO: 2485680 - RNA, 20 nt, Human
ucucccagucuacccagaga

SEQ ID NO: 2485681 - RNA, 19 nt, Human
ucucccagucuacccagag

SEQ ID NO: 2485682 - RNA, 15 nt, Human
ucucccagucauuua

SEQ ID NO: 2485683 - RNA, 18 nt, Human
ucucccuuggauuguccc

SEQ ID NO: 2485684 - RNA, 11 nt, Human
ucucccuugga

SEQ ID NO: 2485685 - RNA, 18 nt, Human
ucucccaaagugcuggga

SEQ ID NO: 2485686 - RNA, 12 nt, Human
ucucccaaggcu

SEQ ID NO: 2485687 - RNA, 13 nt, Human
ucucccaggaagc

SEQ ID NO: 2485688 - RNA, 19 nt, Human
ucucccaaggcugcgucug

SEQ ID NO: 2485689 - RNA, 12 nt, Human
ucucccacacug

SEQ ID NO: 2485690 - RNA, 13 nt, Human
ucucccaggccag

SEQ ID NO: 2485691 - RNA, 14 nt, Human
ucucccaggccagg

SEQ ID NO: 2485692 - RNA, 18 nt, Human
ucucccaggccaggcucc

SEQ ID NO: 2485693 - RNA, 23 nt, Human
ucucccaggccaggcuccuuccu

SEQ ID NO: 2485694 - RNA, 23 nt, Human
ucucccaggggcuggcuucagga

SEQ ID NO: 2485695 - RNA, 18 nt, Human
ucucccaggggcuggcuu

SEQ ID NO: 2485696 - RNA, 12 nt, Human
ucucccaggggc

SEQ ID NO: 2485697 - RNA, 17 nt, Human
acuuuuguaagacaaag

SEQ ID NO: 2485698 - RNA, 12 nt, Human
acuuuuguaaga

SEQ ID NO: 2485699 - RNA, 22 nt, Human
acuuuuuauggcacuaguauuu

SEQ ID NO: 2485700 - RNA, 13 nt, Human
acuuuuucauuug

SEQ ID NO: 2485701 - RNA, 18 nt, Human
acuuuuucauuugccuau

SEQ ID NO: 2485702 - RNA, 11 nt, Human
acuuuuuccag

SEQ ID NO: 2485703 - RNA, 16 nt, Human
acuuuugguuaagucu

SEQ ID NO: 2485704 - RNA, 20 nt, Human
acuuuugguuaagucuguuu

SEQ ID NO: 2485705 - RNA, 22 nt, Human
acuuuugguuaagucuguuuua

SEQ ID NO: 2485706 - RNA, 14 nt, Human
acuuuuggcauuuu

SEQ ID NO: 2485707 - RNA, 20 nt, Human
acuuugggauaggaaaaaug

SEQ ID NO: 2485708 - RNA, 19 nt, Human
acuuugguacauggccagu

SEQ ID NO: 2485709 - RNA, 19 nt, Human
acuuugggaggcugaggcg

SEQ ID NO: 2485710 - RNA, 19 nt, Human
acuuugggauucuuuccau

SEQ ID NO: 2485711 - RNA, 22 nt, Human
acuuuuuuuuuuuaagaguaaa

SEQ ID NO: 2485712 - RNA, 15 nt, Human
acuuuuuuuuaaguu

SEQ ID NO: 2485713 - RNA, 23 nt, Human
acuuuuuuggggauaugcuuagu

SEQ ID NO: 2485714 - RNA, 22 nt, Human
acuuuuuuggggauaugcuuag
